(19) United States
(12) Patent Application Publication
(10) Pub. No.: US 2006/0240418 A1
(43) Pub. Date: Oct. 26, 2006

(54) Canine gene microarrays

(76) Inventors: James C Diggans, Gaithersburg, MD (US); Mark Porter, Gaithersburg, MD (US); Tao Wei, Gaithersburg, MD (US)

Correspondence Address: MORGAN LEWIS & BOCKIUS LLP, 1111 PENNSYLVANIA AVENUE NW, WASHINGTON, DC, 20004, US

(21) Appl. No.: 10/513,369

(22) PCT Filed: May 5, 2003
(86) PCT No.: PCT/US03/13853

§ 371 Date: May 10, 2005

Related U.S. Application Data
(60) Provisional application No. 60/377,240, filed on May 3, 2002.

(51) Int. Cl. C12Q 1/68; G06F 19/00; C07H 21/04

(52) U.S. Cl. 435/6; 536/24.3; 702/20

(57) ABSTRACT

The present invention is based on the identification of novel canine nucleic acid sequences and the construction of canine microarrays containing a significant portion of the canine genome. The microarrays specifically hybridize to canine nucleic acid samples and may be used in drug screening and toxicity assays.

### RELATED APPLICATIONS

[0001] This application claims priority under 35 U.S.C. §119(e) to U.S. Provisional Application 60/377,240, filed May 3, 2002, which is herein incorporated by reference in its entirety.

### SEQUENCE LISTING SUBMISSION ON COMPACT DISC

[0002] The Sequence Listing submitted concurrently herewith on compact disc under 37 C.F.R. §§1.821(c) and 1.821(e) is herein incorporated by reference in its entirety. Four copies of the Sequence Listing, one on each of four compact discs are provided. Copy 1, Copy 2 and Copy 3 are identical. Copies 1, 2 and 3 are also identical to the CRF. Each electronic copy of the Sequence Listing was created on May 2, 2002 with a file size of 8868 KB. The filenames are as follows: Copy 1-g15116wo.txt; Copy2-g15116wo.txt; Copy 3-g15116wo.txt; CRF-g15116wo.txt.

### BACKGROUND OF THE INVENTION

[0003] The need for methods of assessing the impact, including toxicity, of a compound, pharmaceutical agent or environmental pollutant on a cell or living organism has led to the development of procedures which utilize living organisms as biological monitors. The simplest and most convenient of these systems utilize unicellular microorganisms such as yeast and bacteria, since they are most easily maintained and manipulated. Unicellular screening systems also often use easily detectable changes in phenotype to monitor the effect of test compounds on the cell. Unicellular organisms, however, are inadequate models for estimating the potential effects of many compounds on complex multicellular animals, as they do not have the ability to carry out biotransformations to the extent or at levels found in higher organisms.

[0004] The biotransformation of chemical compounds by multicellular organisms is a significant factor in determining the effects, including toxicity, of agents to which they are exposed. Accordingly, multicellular screening systems may be preferred or required to detect the toxic effects of compounds. The use of multicellular organisms as screening tools has been significantly hampered, however, by the lack of convenient screening mechanisms or endpoints, such as those available in yeast or bacterial systems. In an attempt to compensate for the deficiencies of single cell testing systems, animal models using small laboratory species such as rats and mice have been developed. Such models, however, do not always provide an accurate picture of cellular responses induced in higher mammals such as humans. Accordingly, higher order mammals such as dogs are often required in the later stages of pharmaceutical testing or in testing the biological effects of known or potential toxins.

[0005] In addition, safety guidelines in the pharmaceutical, food and chemical industries in many countries require pre-clinical toxicity testing of every product in at least two species, one rodent species, usually the rat, and one non-rodent species, usually the dog (Smith et al., Lab Anim 35(2):117-130 (2001); Broadhead et al., Hum Exp Toxicol 19(8):440-447 (2000); Zbinden, Regul Toxicol Pharmacol 17(1):85-94 (1993)). accordance with legal requirements for acute and repeated-dose toxicity testing, large-scale studies are usually undertaken, entailing the use of many dogs. Although primates, such as macaques and marmosets, may also be used as the non-rodent, large animal species, it is likely that the dog will remain the principal large animal used in testing.

[0006] There have been recent attempts in the pharmaceutical industry to redesign pre-clinical testing, so that fewer animals can be used and so that their use is more targeted. Because toxicity data from testing in dogs is known to be predictive for humans, testing in dogs, however, cannot be eliminated.

[0007] Thus, there is a need for sensitive and rapid methods of detecting cellular responses and differential gene expression in animal models in response to therapeutic agents, particularly methods that can accommodate large numbers of samples. Techniques employing microarrays, especially microarrays containing a high percentage of a large animal's genome (such as a dog's) are, therefore, likely to be the most useful in providing information about responses to therapeutic agents or toxins that would be seen in other large animals, such as humans.

### SUMMARY OF THE INVENTION

[0008] The present invention includes a set of cDNA sequences representative of the expressed genome of a dog. The present invention also includes microarrays containing probes that hybridize to mRNA sequences corresponding to the canine genes. The sequences on these microarrays represent a large portion of the canine genome, and these microarrays are capable of detecting changes in gene expression level in a large percentage of canine genes.

[0009] Additionally, the present invention includes methods of using the microarray chips to detect or monitor changes in gene expression in a tissue or cell sample, such as a toxic response in dogs after exposure of the dogs to a known toxin or to a compound with unknown toxic properties. The microarray chips are capable of detecting up- or down-regulation of a large percentage of the genes in the canine genome following exposure of the animal to a known or unknown toxin, and a profile of the genes that are up- and/or down-regulated can be produced. Genes within the profile can be selected as marker genes and their expression level determined in subjects undergoing toxicity response testing. The methods of the present invention may also be used to detect genes that are up- or down-regulated in canines in a disease state. A profile of these genes may then be produced, and marker genes may be identified. Expression levels of these genes may be used in the identification and monitoring of diseases in canines. In addition, expression levels of genes identified as marker genes may be used to detect and monitor a positive or negative response to a medical or pharmaceutical treatment.

[0010] The present invention also includes a computer system comprising a database of the genes and gene fragments herein described, in which the database also includes information identifying the expression level of genes in at least one tissue or cell sample, such as normal and toxin-exposed canine tissues. The database may also include descriptive information from external databases. Further, the present invention includes methods of using the computer system to present information comparing the expression level of the genes in the database in normal and in toxin-exposed tissues and cells.

[0011] Finally, the present invention includes kits comprising the canine microarrays, along with sequence information and gene expression information regarding the gene expression levels in at least one tissue or cell sample.

### DETAILED DESCRIPTION

[0012] Many biological functions are accomplished by altering the expression of various genes through transcriptional (e.g. through control of initiation, provision of RNA precursors, RNA processing, etc.) and/or translational control. For example, fundamental biological processes such as cell cycle, cell differentiation and cell death are often characterized by the variations in the expression levels of groups of genes.

[0013] Changes in gene expression are also associated with the effects of various chemicals, drugs, toxins, pharmaceutical agents and pollutants on an organism or cells. For example, the lack of sufficient expression of functional tumor suppressor genes and/or the over expression of oncogene/protooncogenes after exposure to all agent could lead to tumorgenesis or hyperplastic growth of cells (Marshall, Cell, 64: 313-326 (1991); Weinberg, Science, 254:1138-1146 (1991)). Thus, changes in the expression levels of particular genes (e.g. oncogenes or tumor suppressors) may serve as signposts for the presence and progression of toxicity or other cellular responses to exposure to a particular compound.

[0014] Monitoring changes in gene expression may also provide certain advantages during drug screening and development. Often drugs are screened for the ability to interact with a major target without regard to other effects the drugs have on cells. These cellular effects may cause toxicity in the whole animal, which prevents the development and clinical use of the potential drug.

[0015] The present invention is based, in part, on the identification of new canine genes, including new canine genes that are expressed in one or more tissues, such as liver, kidney, heart, brain and testicular tissue. These genes correspond to the canine cDNA of SEQ ID NOS: 1-11,109.

[0016] The genes of the invention may be used as diagnostic agents or markers to detect a cellular response in a sample individually or as part of a gene expression profile. They can also serve as a target for agents that modulate gene expression or activity. For example, agents may be identified that modulate gene expression levels as a means of modulating aberrant biological processes associated with a cellular response, such as inflammation, cytotoxicity, hyperplastic growth or disruption of the cell cycle.

Nucleic Acid Molecules

[0017] The present invention provides nucleic acid molecules corresponding to the genes or sequences described herein, preferably in isolated form. As used herein, “nucleic acid” includes RNA or DNA that comprises any one of SEQ ID NOS:1-11,109, is complementary to any of these sequences, specifically hybridizes to a nucleic acid of SEQ ID NOS: 1-11,109 and remains stably bound to it under appropriate stringency conditions, and/or exhibits greater than about 90% or 95% or more nucleotide sequence identity through greater than about 90% or 95% of the sequence length of SEQ ID NOS: 1-11,109.

[0018] Specifically contemplated are genomic DNA, cDNA, mRNA and antisense molecules, as well as nucleic acids based on alternative backbones or including alternative bases, whether derived from natural sources or synthesized. Such hybridizing or complementary nucleic acids, however, are defined further as being novel and unobvious over any prior art nucleic acid including that which encodes, hybridizes under appropriate stringency conditions, or is complementary to nucleic acid encoding a protein according to the present invention.

[0019] Homology or identity at the nucleotide or amino acid sequence level is determined by BLAST (Basic Local Alignment Search Tool) analysis using the algorithm employed by the programs blastp, blastn, blastx, tblastn and tblastx (Altschul S. F. et al., Nucleic Acids Res 25:3389-3402 (1997), and Karlin et al., Proc Natl Acad Sci USA 87:2264-2268 (1990), both fully incorporated by reference) which are tailored for sequence similarity searching. The approach used by the BLAST program is to first consider similar segments, with and without gaps, between a query sequence and a database sequence, then to evaluate the statistical significance of all matches that are identified and finally to summarize only those matches which satisfy a pre-selected threshold of significance. For a discussion of basic issues in similarity searching of sequence databases, see Altschul et al., Nature Genetics 6:119-129 (1994), which is fully incorporated by reference. The search parameters for histogram, descriptions, alignments, expect (i.e., the statistical significance threshold for reporting matches against database sequences), cutoff, matrix and filter (low complexity) are at the default settings. The default scoring matrix used by blastp, blastx, tblastn, and tblastx is the BLOSUM62 matrix (Henikoff et al., Proc Natl Acad Sci USA 89: 10915-10919 (1992), fully incorporated by reference), recommended for query sequences over 85 nucleotides or amino acids in length.

[0020] For blastn, the scoring matrix is set by the ratios of M (i.e., the reward score for a pair of matching residues) to N (i.e., the penalty score for mismatching residues), wherein the default values for M and N are 5 and −4, respectively. Four blastn parameters were adjusted as follows: Q=10 (gap creation penalty); R=10 (gap extension penalty); E value=10 (expected number of matches in the sequence database(s) purely by chance based on a random sequence model; word size=11 The equivalent Blastp parameter settings were Q=9; R=2; wink=1; and gapw=32. A Bestfit comparison between sequences, available in the GCG package version 10.0, uses DNA parameters GAP=50 (gap creation penalty) and LEN=3 (gap extension penalty) and the equivalent settings in protein comparisons are GAP=8 and LEN=2.

[0021] “Stringent conditions” are those that (1) employ low ionic strength and high temperature for washing, for example, 0.015 M NaCl/0.0015 M sodium citrate/0.1% SDS at 50° C., or (2) employ during hybridization a denaturing agent such as formamide, for example, 50% (vol/vol) formamide with 0.1% bovine serum albumin/0.1% Ficoll/0.1% polyvinylpyrrolidone/50 mM sodium phosphate buffer at pH 6.5 with 750 MM NaCl, 75 mM sodium citrate at 42° C. Another example is hybridization in 50% formamide, 5 SSC (0.75 M NaCl, 0.075 M sodium citrate), 50 mM sodium phosphate (pH 6.8), 0.1% sodium pyrophosphate, 5 Denhardt's solution, sonicated salmon sperm DNA (50 μg/ml), 0.1% SDS, and 10% dextran sulfate at 42° C., with washes at 42° C. in 0.2 SSC and 0.1% SDS. A skilled artisan can readily determine and vary the stringency conditions appropriately to obtain a clear and detectable hybridization signal. When hybridizing an oligonucleotide to MRNA or cRNA from a cell sample, the “stringent conditions” under which the oligonucleotide or probe specifically binds to a nucleic acid molecule of the invention can be calculated by one of ordinary skill in the art (see below).

[0022] As used herein, a nucleic acid molecule is said to be “isolated” when the nucleic acid molecule is substantially separated from contaminant nucleic acid molecules encoding other polypeptides.

[0023] The present invention further includes fragments of the nucleic acid molecules as herein described, e.g. hybridization probes or oligonucleotides. As used herein, a fragment of a nucleic acid molecule refers to a small portion of a sequence as herein described. The size of the fragment will be determined by the intended use. For example, if the fragment is chosen so as to encode a protein or an active portion of the protein, the fragment will need to be large enough to encode the full protein or the functional region(s) of the protein. For instance, fragments which encode peptides corresponding to predicted antigenic regions may be prepared. If the fragment is to be used as a nucleic acid probe or PCR primer, then the fragment length is chosen so as to obtain a relatively small number of false positives during probing/priming.

[0024] Fragments of the nucleic acid molecules of the present invention (i.e., synthetic oligonucleotides) that are used as probes or specific primers for the polymerase chain reaction (PCR), or to synthesize gene sequences encoding proteins, can easily be synthesized by chemical techniques, for example, the phosphoramidite method of Matteucci et al. (J Am Chem Soc 103:3185-3191 (1981)) or-using automated synthesis methods. In addition, larger DNA segments can readily be prepared by well known methods, such as synthesis of a group of oligonucleotides that define various modular segments of the gene, followed by ligation of oligonucleotides to build the complete modified gene.

[0025] The nucleic acid molecules of the present invention may further be modified so as to contain a detectable label for diagnostic and probe purposes. A variety of such labels are known in the art and can readily be employed with the encoding molecules herein described. Suitable labels include, but are not limited to, biotin, radiolabeled nucleotides and the like. A skilled artisan can readily employ any such label to obtain labeled variants of the nucleic acid molecules of the invention.

rDNA Molecules Containing a Nucleic Acid Molecule

[0026] The present invention further provides recombinant DNA molecules (rDNAs) that comprise any one of SEQ ID NOS: 1-11,109. As used herein, a rDNA molecule is a DNA molecule that has been subjected to molecular manipulation in situ. Methods for generating rDNA molecules are well known in the art, for example, see Sambrook et al., Molecular Cloning—A Laboratory Manual, 3d Ed., Cold Spring Harbor Laboratory Press, Cold Spring Harbor, N.Y., 2001. In the preferred rDNA molecules, a DNA sequence is operably linked to replication or expression control sequences and/or vector sequences.

[0027] The choice of control sequences to which one of the sequences of the present invention is operably linked depends directly, as is well known in the art, on the functional properties desired, e.g., protein expression, replication requirements and the host cell to be transformed. A vector contemplated by the present invention is at least capable of directing the replication or insertion into the host chromosome, and, in certain cases, expression, of the structural gene included in the rDNA molecule.

[0028] Expression control elements that are used for regulating the expression of an operably linked protein encoding sequence are known in the art and include, but are not limited to, inducible promoters, constitutive promoters, secretion signals, and other regulatory elements. Preferably, the inducible promoter is readily controlled, such as being responsive to a nutrient in the host cell's medium.

[0029] In one embodiment, the vector containing a coding nucleic acid molecule will include a prokaryotic replicon, i.e., a DNA sequence having the ability to direct autonomous replication and maintenance of the recombinant DNA molecule extrachromosomally in a prokaryotic host cell, such as a bacterial host cell, transformed therewith. Such replicons are well known in the art. In addition, vectors that include a prokaryotic replicon may also include a gene whose expression confers a detectable marker such as a drug resistance. Typical bacterial drug resistance genes are those that confer resistance to ampicillin or tetracycline.

[0030] Vectors that include a prokaryotic replicon can further include a prokaryotic or bacteriophage promoter capable of directing the expression (transcription and translation) of the coding gene sequences in a bacterial host cell, such as E. coli. A promoter is an expression control element formed by a DNA sequence that permits binding of RNA polymerase and transcription to occur. Promoter sequences compatible with bacterial hosts are typically provided in plasmid vectors containing convenient restrict ion sites for insertion of a DNA segment of the present invention. Typical of such vector plasmids are pUC8, pUC9, pBR322 and pBR329 available from BioRad Laboratories, (Richmond, Calif.), pPL and pKK223 available from Pharmacia (Piscataway, N.J.).

[0031] Expression vectors compatible with eukaryotic cells, preferably those compatible with vertebrate cells, such as canine cells, can also be used to form rDNA molecules that contain a coding sequence. Eukaryotic cell expression vectors, including viral vectors, are well known in the art and are available from several commercial sources. Typically, such vectors are provided containing convenient restriction sites for insertion of the desired DNA segment. Typical of such vectors are pSVL and pKSV-10 (Pharmacia), pBPV-1/pML2d. (International Biotechnologies, Inc.), pTDT1 (ATCC, #31255), the vector pCDM8 described herein, and the like eukaryotic expression vectors. Vectors may be modified to include prostate cell specific promoters if needed.

[0032] Eukaryotic cell vectors used to construct the rDNA molecules of the present invention may further include a selectable marker that is effective in an eukaryotic cell, preferably a drug resistance selection marker. A preferred drug resistance marker is the gene whose expression results in neomycin resistance, i.e., the neomycin phosphotransferase (neo) gene. (Southern et al., J Mol Anal Genet 1:327-341 (1982)) Alternatively, the selectable marker can be present on a separate plasmid, and the two vectors are introduced by co-transfection of the host cell, and selected by culturing in the appropriate drug for the selectable marker.

Host Cells Containing an Exogenously Supplied Coding Nucleic Acid Molecule

[0033] The present invention further provides host cells transformed with a nucleic acid molecule of the present invention. The host cell can be either prokaryotic or eukaryotic. Eukaryotic cells useful for expression of proteins are not limited, so long as the cell line is compatible with cell culture methods and compatible with the propagation of the expression vector and possible expression of the gene product. Preferred eukaryotic host cells include, but are not limited to, yeast, insect and mammalian cells, preferably vertebrate cells such as those from a mouse, rat, monkey, human or canine cell line. Preferred eukaryotic host cells include Chinese hamster ovary (CHO) cells available from the ATCC as CCL61, NIH Swiss mouse embryo cells (NIH/3T3) available from the ATCC as CRL 1658, baby hamster kidney cells (BHK), and the like eukaryotic tissue culture cell lines.

[0034] Any prokaryotic host can be used to replicate a rDNA molecule of the invention. The preferred prokaryotic host is E. coli.

[0035] Transformation of appropriate cell hosts with a rDNA molecule of the present invention is accomplished by well known methods that typically depend on the type of vector used and host system employed. With regard to transformation of prokaryotic host cells, electroporation and salt treatment methods are typically employed, see, for example, Cohen et al., (1972) Proc Natl Acad Sci USA 69:2110 (1972); and Sambrook et al. (supra). With regard to transformation of vertebrate cells with vectors containing rDNAs, electroporation, cationic lipid or salt treatment methods are typically employed, see, for example, Graham et al., Virol 52:456 (1973); and Wigler et al., Proc Natl Acad Sci USA 76:1373-1376 (1979).

[0036] Successfully transformed cells, i.e., cells that contain a rDNA molecule of the present invention, can be identified by well known techniques including the selection for a selectable marker. For example, cells resulting from the introduction of an rDNA of the present invention can be cloned to produce single colonies. Cells from those colonies can be harvested, lysed and their DNA content examined for the presence of the rDNA using a method such as that described by Southern, J Mol Biol 98:503 (1975) or Berent et al., Biotech 3:208 (1985), or the proteins produced from the cell assayed via an immunological method.

Nucleic Acid Assay Formats

[0037] The genes and sequences described herein may be used in a variety of nucleic acid detection assays to detect or quantititate the expression level of a gene or multiple genes in a given sample.

[0038] Any assay format to detect gene expression may be used. For example, traditional Northern blotting, dot or slot blot, nuclease protection, primer directed amplification, RT-PCR, semi- or quantitative PCR, branched-chain DNA and differential display methods may be used for detecting gene expression levels. Those methods are useful for some embodiments of the invention. In cases where smaller numbers of genes are detected, amplification based assays may be most efficient. Methods and assays of the invention, however, may be most efficiently designed with hybridization-based methods for detecting the expression of a large number of genes.

[0039] Any hybridization assay format may be used, including solution-based and solid support-based assay formats. Solid supports containing oligonucleotide probes based on the genes of the invention can be filters, polyvinyl chloride dishes, particles, beads, microparticles or silicon or glass based chips, etc. Such chips, wafers and hybridization methods are widely available, for example, those disclosed by Beattie (WO 95/11755).

[0040] Any solid surface to which oligonucleotides can be bound, either directly or indirectly, either covalently or non-covalently, can be used. A preferred solid support is a high density array or DNA chip. Solid supports also include beads, sets of beads, membranes, and other formats using any material, including glass and/or silicon. When beads or sets of beads are the support, one or more than one species of probe or oligonucleotide may be attached to each bead. In one embodiment, each species of probe or oligonucleotide is attached each to a different bead, and the set of beads comprises all or a subset of the nucleic acid molecules described herein. These contain a particular oligonucleotide probe in a predetermined location on the array. Each predetermined location may contain more than one molecule of the probe, but each molecule within the predetermined location has an identical sequence. Such predetermined locations are termed features. There may be, for example, from 2, 10, 100, 1000 to 10,000, 100,000 or 400,000 or more of such features on a single solid support. The solid support, or the area within which the probes are attached may be on the order of about a square centimeter. For instance, about 10,000, 100,000 or more probes may be attached per square centimeter. Probes may be attached to single or multiple solid support structures, e.g., the probes may be attached to a single chip or to multiple chips to comprise a chip set.

[0041] Oligonucleotide probe arrays for expression monitoring can be made and used according to any techniques known in the art (see for example, Lockhart et al., Nat Biotechnol 14:1675-1680 (1996); McGall et al., Proc Nat Acad Sci USA 93:13555-13460 (1996)). Such probe arrays may contain at least one or more oligonucleotides that are complementary to or hybridize to one or more of the genes or their transcripts. For instance, such arrays may contain oligonucleotides that are complementary or hybridize to at least 1, 2, 3, 4, 5, 6, 7, 8, 9, 10, 20, 30, 50, 70, 100, 500, 1000, 2000, 5000, 10,000 or more of the genes described herein. Preferred arrays contain all or nearly all of the genes described herein, for instance, at least about 90%, 95%, 97%, 99% or 99.5% of the sequences herein described. In a preferred embodiment, arrays are constructed that contain oligonucleotides to detect all or nearly all of the genes on a solid support substrate, such as a chip. Such arrays may represent all or nearly all of the entire expressed genome of a dog.

[0042] As described above, in addition to the sequences disclosed, sequences such as naturally occurring variant or polymorphic sequences may be used in the methods and compositions of the invention. For instance, expression levels of various allelic or homologous forms of a gene may be assayed. Any and all nucleotide variations that do not alter the functional activity of a gene, including all naturally occurring allelic variants of the genes herein disclosed, may be used in the methods and to make the compositions (e.g., arrays) of the invention.

[0043] Probes based on the sequences of the genes described above may be prepared by any commonly available method. Oligonucleotide probes for screening or assaying a tissue or cell sample are preferably of sufficient length to specifically hybridize only to appropriate, complementary genes or transcripts. Typically the oligonucleotide probes will be at least about 10, 12, 14, 16, 18, 20 or 25 nucleotides in length. In some cases, longer probes of at least 30, 40, or 50 nucleotides will be desirable.

[0044] As used herein, oligonucleotide sequences that are complementary to one or more of the genes refer to oligonucleotides that are capable of hybridizing under stringent conditions to at least part of the nucleotide sequences of said genes.

[0045] “Bind(s) substantially” refers to complementary hybridization between a probe nucleic acid and a target nucleic acid and embraces minor mismatches that can be accommodated by reducing the stringency of the hybridization media to achieve the desired detection of the target polynucleotide sequence.

[0046] The terms “background” or “background signal intensity” refer to hybridization signals resulting from non-specific binding, or other interactions, between the labeled target nucleic acids and components of the oligonucleotide array (e.g. the oligonucleotide probes, control probes, the array substrate, etc.). Background signals may also be produced by intrinsic fluorescence of the array components themselves. A single background signal can be calculated for the entire array, or a different background signal may be calculated for each target nucleic acid. In a preferred embodiment, background is calculated as the average hybridization signal intensity for the lowest 5% to 10% of the probes in the array, or, where a different background signal is calculated for each target gene, for the lowest 5% to 10% of the probes for each gene. One-of skill in the art will appreciate that where the probes to a particular gene hybridize well and thus appear to be specifically binding to a target sequence, they should not be used in a background signal calculation. Alternatively, background may be calculated as the average hybridization signal intensity produced by hybridization to probes that are not complementary to any sequence found in the sample (e.g. probes directed to nucleic acids of the opposite sense or to genes not found in the sample such as bacterial genes where the sample is mammalian nucleic acids). Background can also be calculated as the average signal intensity produced by regions of the array that lack any probes at all.

[0047] The phrase “hybridizing specifically to” refers to the binding, duplexing, or hybridizing of a molecule substantially to or only to a particular nucleotide sequence or sequences under stringent conditions when that sequence is present in a complex mixture (e.g., total cellular) DNA or RNA.

[0048] Assays and methods of the invention may utilize available formats to simultaneously screen at least about 100, about 1000, about 10,000 or about 1,000,000 different nucleic acid hybridizations.

[0049] As used herein a “probe” is defined as a nucleic acid, capable of binding to a target nucleic acid of complementary sequence through one or more types of chemical bonds, usually through complementary base pairing, usually through hydrogen bond formation. As used herein, a probe may include natural (i.e., A, G, U, C, or T) or modified bases (7-deazaguanosine, inosine, etc.). In addition, the bases in probes may be joined by a linkage other than a phosphodiester bond, so long as it does not interfere with hybridization. Thus, probes may be peptide nucleic acids in which the constituent bases are joined by peptide bonds rather than phosphodiester linkages.

[0050] The term “perfect match probe” refers to a probe that has a sequence that is perfectly complementary to a particular target sequence. The test probe is typically perfectly complementary to a portion (subsequence) of the target sequence. The perfect match (PM) probe can be a “test probe”, a “normalization control” probe, an expression level control probe and the like. A perfect match control or perfect match probe is, however, distinguished from a “mismatch control” or “mismatch probe.”

[0051] The terms “mismatch control” or “mismatch probe” refer to a probe whose sequence is deliberately selected not to be perfectly complementary to a particular target sequence. For each mismatch CAM) control in a high-density array there typically exists a corresponding perfect match (PM) probe that is perfectly complementary to the same particular target sequence. The mismatch may comprise one or more bases.

[0052] While the mismatch(s) may be located anywhere in the mismatch probe, terminal mismatches are less desirable as a terminal mismatch is less likely to prevent hybridization of the target sequence. In a particularly preferred embodiment, the mismatch is located at or near the center of the probe such that the mismatch is most likely to destabilize the duplex with the target sequence under the test hybridization conditions.

[0053] The term “stringent conditions” refers to conditions under which a probe will hybridize to its target subsequence, but with only insubstantial hybridization to other sequences or to other sequences such that the difference may be identified. Stringent conditions are sequence-dependent and will be different in different circumstances. Longer sequences hybridize specifically at higher temperatures. Generally, stringent conditions are selected to be about 5° C. lower than the thermal melting point (Tm) for the specific sequence at a defined ionic strength and pH.

[0054] Typically, stringent conditions will be those in which the salt concentration is at least about 0.01 to 1.0 M Na⁺ ion concentration (or other salts) at pH 7.0 to 8.3 and the temperature is at least about 30° C. for short probes (e.g., 10 to 50 nucleotides). Stringent conditions may also be achieved with the addition of destabilizing agents such as formamide.

[0055] The “percentage of sequence identity” or “sequence identity” is determined by comparing two optimally aligned sequences or subsequences over a comparison window or span, wherein the portion of the polynucleotide sequence in the comparison window may optionally comprise additions or deletions (i.e., gaps) as compared to the reference sequence (which does not comprise additions or deletions) for optimal alignment of the two sequences. The percentage is calculated by determining the number of positions at which the identical submit (e.g. nucleic acid base or amino acid residue) occurs in both sequences to yield the number of matched positions, dividing the number of matched positions by the total number of positions in the window of comparison and multiplying the result by 100 to yield the percentage of sequence identity. Percentage sequence identity when calculated using the programs GAP or BESTFIT (see below) is calculated using default gap weights. In an embodiment of the invention, the percent sequence identity is at least about 90% across 90% of the entire length of a given sequence.

Probe Design

[0056] One of skill in the art will appreciate that an enormous number of array designs are suitable for the practice of this invention. The high density array will typically include a number of test probes that specifically hybridize to the sequences of interest. Probes may be produced from any region of the genes identified herein and the attached representative sequence listing. See WO 99/32660 for methods of producing probes for a given gene or genes. In addition, any available software may be used to produce specific probe sequences, including, for instance, software available from Molecular Biology Insights, Olympus Optical Co. and Premier Biosoft International. In a preferred embodiment, the array will also include one or more control probes.

[0057] High density array chips of the invention include “test probes.” Test probes may be oligonucleotides that range from about 5 to about 500, or about 7 to about 50 nucleotides, more preferably from about 10 to about 40 nucleotides and most preferably from about 15 to about 35 nucleotides in length. In other particularly preferred embodiments, the probes are 20 or 25 nucleotides in length. In another preferred embodiment, test probes are double or single strand DNA sequences. DNA sequences are isolated or cloned from natural sources or amplified from natural sources using native nucleic acid as templates. These probes have sequences complementary to particular subsequences of the genes whose expression they are designed to detect. Thus, the test probes are capable of specifically hybridizing to the target nucleic acid they are to detect.

[0058] In addition to test probes that bind the target nucleic acid(s) of interest, the high density array can contain a number of control probes. The control probes may fall into three categories referred to herein as 1) normalization controls; 2) expression level controls; and 3) mismatch controls.

[0059] Normalization controls are oligonucleotide or other nucleic acid probes that are complementary to labeled reference oligonucleotides or other nucleic acid sequences that are added to the nucleic acid sample to be screened. The signals obtained from the normalization controls after hybridization provide a control for variations in hybridization conditions, label intensity, “reading” efficiency and other factors that may cause the signal of a perfect hybridization to vary between arrays. In a preferred embodiment, signals (e.g., fluorescence intensity) read from all other probes in the array are divided by the signal (e.g., fluorescence intensity) from the control probes thereby normalizing the measurements.

[0060] Virtually any probe may serve as a normalization control. However, it is recognized that hybridization efficiency varies with base composition and probe length. Preferred normalization probes are selected to reflect the average length of the other probes present in the array, however, they can be selected to cover a range of lengths. The normalization control(s) can also be selected to reflect the (average) base composition of the other probes in the array, however in a preferred embodiment, only one or a few probes are used and they are selected such that they hybridize well (i.e., no secondary structure) and do not match any target-specific probes.

[0061] Expression level controls are probes that hybridize specifically with constitutively expressed genes in the biological sample. Virtually any constitutively expressed gene provides a suitable target for expression level controls. Typically expression level control probes have sequences complementary to subsequences of constitutively expressed “housekeeping genes” including, but not limited to the actin gene, the transferrin receptor gene, the GAPDH gene, and the like.

[0062] Mismatch controls may also be provided for the probes to the target genes, for expression level controls or for normalization controls. Mismatch controls are oligonucleotide probes or other nucleic acid probes identical to their corresponding test or control probes except for the presence of one or more mismatched bases. A mismatched base is a base selected so that it is not complementary to the corresponding base in the target sequence to which the probe would otherwise specifically hybridize. One or more mismatches are selected such that under appropriate hybridization conditions (e.g., stringent conditions) the test or control probe would be expected to hybridize with its target sequence, but the mismatch probe would not hybridize (or would hybridize to a significantly lesser extent) Preferred mismatch probes contain a central mismatch. Thus, for example, where a probe is a 20 mer, a corresponding mismatch probe will have the identical sequence except for a single base mismatch (e.g., substituting a G, a C or a T for an A) at any of positions 6 through 14 (the central mismatch).

[0063] Mismatch probes thus provide a control for non-specific binding or cross hybridization to a nucleic acid in the sample other than the target to which the probe is directed. For example, if the target is present the perfect match probes should be consistently brighter than the mismatch probes. In addition, if all central mismatches are present, the mismatch probes can be used to detect a mutation, for instance, a mutation of a gene comprising one of SEQ ID NOS: 1-11,109. The difference in intensity between the perfect match and the mismatch probe provides a good measure of the concentration of the hybridized material.

Nucleic Acid Samples

[0064] Any canine cell or tissue sample may be used in the methods and assays of the invention. Cell or tissue samples used in the assays of the invention may be produced, grown, cultured, etc. in vitro or in vivo. When cultured cells or tissues are used, appropriate mammalian liver extracts may also be added with a test agent to evaluate agents that may require biotransformation to exhibit toxicity. In a preferred format, primary isolates of animal or canine hepatocytes which already express the appropriate complement of drug-metabolizing enzymes may be exposed to the test agent without the addition of mammalian liver extracts.

[0065] The genes which are assayed according to the present invention are typically in the form of mRNA or reverse transcribed mRNA. The genes may be cloned or not. The genes may be amplified or not. The cloning and/or amplification do not appear to bias the representation of genes within a population. In some assays, it may be preferable, however, to use polyA+RNA as a source, as it can be used with less processing steps.

[0066] As is apparent to one of ordinary skill in the art, nucleic acid samples used in the methods and assays of the invention may be prepared by any available method or process. Methods of isolating total mRNA are well known to those of skill in the art. For example, methods of isolation and purification of nucleic acids are described in detail in Chapter 3 of Laboratory Techniques in Biochemistry and Molecular Biology, Vol. 24, Hybridization With Nucleic Acid Probes: Theory and Nucleic Acid Probes, P. Tijssen, Ed., Elsevier Press, New York, 1993. Such samples include RNA samples, but also include cDNA synthesized from a mRNA sample isolated from a cell or tissue of interest. Such samples also include DNA amplified from the cDNA, and RNA transcribed from the amplified DNA. One of skill in the art would appreciate that it is desirable to inhibit or destroy RNase present in homogenates before homogenates are used.

[0067] Biological samples may be of any biological tissue or fluid or cells, as well as cells raised in vitro, such as cell lines and tissue culture cells. Frequently the sample will be a tissue or cell sample that has been exposed to a compound, agent, drug, pharmaceutical composition, potential environmental pollutant or other composition. In some formats, the sample will be a “clinical sample.” Typical clinical samples include, but are not limited to, blood, blood-cells (e.g., white cells), tissue or fine needle biopsy samples, urine, peritoneal fluid, and pleural fluid, or cells therefrom.

[0068] Biological samples may also include sections of tissues, such as frozen sections or formalin fixed sections taken for histological purposes.

Forming High Density Arrays

[0069] Methods of forming high density arrays of oligonucleotides with a minimal number of synthetic steps are known. The oligonucleotide analogue array can be synthesized on a single or on multiple solid substrates by a variety of methods, including, but not limited to, light-directed chemical coupling, and mechanically directed coupling (see Pirrung, U.S. Pat. No. 5,143,854).

[0070] In brief, the light-directed combinatorial synthesis of oligonucleotide arrays on a glass surface proceeds using automated phosphoramidite chemistry and chip masking techniques. In one specific implementation, a glass surface is derivatized with a silane reagent containing a functional group, e.g., a hydroxyl or amine group blocked by a photolabile protecting group. Photolysis through a photolithogaphic mask is used selectively to expose functional groups which are then ready to react with incoming 5′ photoprotected nucleoside phosphoramidites. The phosphoramidites react only with those sites which are illuminated (and thus exposed by removal of the photolabile blocking group). Thus, the phosphoramidites only add to those areas selectively exposed from the preceding step. These steps are repeated until the desired array of sequences have been synthesized on the solid surface. Combinatorial synthesis of different oligonucleotide analogues at different locations on the array is determined by the pattern of illumination during synthesis and the order of addition of coupling reagents.

[0071] In addition to the foregoing, additional methods which can be used to generate an array of oligonucleotides on a single substrate are described in PCT Publication Nos. WO 93/09668 and WO 01/23614. High density nucleic acid arrays can also be fabricated by depositing pre-made or natural nucleic acids in predetermined positions. Synthesized or natural nucleic acids are deposited on specific locations of a substrate by light directed targeting and oligonucleotide directed targeting. Another embodiment uses a dispenser that moves from region to region to deposit nucleic acids in specific spots.

Hybridization

[0072] Nucleic acid hybridization simply involves contacting a probe and target nucleic acid under conditions where the probe and its complementary target can form stable hybrid duplexes through complementary base pairing. See WO 99/32660. The nucleic acids that do not form hybrid duplexes are then washed away leaving the hybridized nucleic acids to be detected, typically through detection of an attached detectable label. It is generally recognized that nucleic acids are denatured by increasing the temperature or decreasing the salt concentration of the buffer containing the nucleic acids. Under low stringency conditions (e.g., low temperature and/or high salt) hybrid duplexes (e.g., DNA:DNA, RNA:RNA, or RNA:DNA) will form even where the annealed sequences are not perfectly complementary. Thus, specificity of hybridization is reduced at lower stringency. Conversely, at higher stringency (e.g., higher temperature or lower salt) successful hybridization tolerates fewer mismatches. One of skill in the art will appreciate that hybridization conditions may be selected to provide any degree of stringency.

[0073] In a preferred embodiment, hybridization is performed at low stringency, in this case in 6× SSPET at 37° C. (0.005% Triton X-100), to ensure hybridization and then subsequent washes are performed at higher stringency (e.g., 1× SSPET at 37° C.) to eliminate mismatched hybrid duplexes. Successive washes may be performed at increasingly higher stringency (e.g., down to as low as 0.25× SSPET at 37° C. to 50° C.) until a desired level of hybridization specificity is obtained. Stringency can also be increased by addition of agents such as formamide. Hybridization specificity may be evaluated by comparison of hybridization to the test-probes with hybridization to the various controls that can be present (e.g., expression level control, normalization control, mismatch controls, etc.).

[0074] In general, there is a tradeoff between hybridization specificity (stringency) and signal intensity. Thus, in a preferred embodiment, the wash is performed at the highest stringency that produces consistent results and that provides a signal intensity greater than approximately 10% of the background intensity. Thus, in a preferred embodiment, the hybridized array may be washed at successively higher stringency solutions and read between each wash. Analysis of the data sets thus produced will reveal a wash stringency above which the hybridization pattern is not appreciably altered and which provides adequate signal for the particular oligonucleotide probes of interest.

Signal Detection

[0075] The hybridized nucleic acids are typically detected by detecting one or more labels attached to the sample nucleic acids. The labels may be incorporated by any of a number of means well known to those of skill in the art. See WO 99/32660.

Databases

[0076] The present invention includes relational databases containing sequence information, for instance, for the genes herein described, as well as gene expression information from tissue or cells, such as canine cells or tissue exposed to various standard compounds, such as toxins. Databases may also contain information associated with a given sequence or tissue sample such as descriptive information about the gene associated with the sequence information, or descriptive information concerning the clinical status of the tissue sample, or the animal from which the sample was derived. The database may be designed to include different parts, for instance a sequence database and a gene expression database. Methods for the configuration and construction of such databases and computer-readable media to which such databases are saved are widely available, for instance, see U.S. Pat. No. 5,953,727, which is herein incorporated by reference in its entirety.

[0077] The databases of the invention may be linked to an outside or external database such as GenBank (www.ncbi.nlm.nih.gov/entrez.index.html); KEGG (www.genome.ad.jp/kegg); SPAD (www.grt.kyzushu-u.ac.jp/spad/index.html); HUGO (www.gene.ucl.ac.uk/hugo); Swiss-Prot (www.expasy.ch.sprot); Prosite (www.expasy.ch/tools/scnpsit1.html); OMIM (www.ncbi.nlm.nih.gov/omin); and GDB (www.gdb.org). In a preferred embodiment, the external database is GenBank and the associated databases maintained by the National Center for Biotechnology Information (NCBI) (www.ncbi.nlm.nih.gov).

[0078] Any appropriate computer platform, user interface, etc. may be used to perform the necessary comparisons between sequence information, gene expression information and any other information in the database or information provided as an input. For example, a large number of computer workstations are available from a variety of manufacturers, such has those available from Silicon Graphics. Client/server environments, database servers and networks are also widely available and appropriate platforms for the databases of the invention.

[0079] The databases of the invention may be used to produce, among other things, electronic Northerns that allow the user to determine the cell type or tissue in which a given gene is expressed and to allow determination of the abundance or expression level of a given gene in a particular tissue or cell.

[0080] The databases of the invention may also be used to present information identifying the expression level in a tissue or cell of a set of genes comprising one or more of the genes of SEQ ID NOS: 1-11,109, comprising the step of comparing the expression level of at least one gene in a cell or tissue exposed to a test agent to the level of expression of the gene in the database. Such methods may be used to predict the toxic potential of a given compound by comparing the level of expression of a gene or genes from a tissue or cell sample exposed to the test agent to the expression levels found in a control tissue or cell samples exposed to a standard toxin or hepatotoxin such as those herein described. Such methods may also be used in the drug or agent screening assays as described herein.

Kits

[0081] The invention further includes kits combining, in different combinations, high-density oligonucleotide arrays, reagents for use with the arrays, protein reagents encoded by the genes herein described, signal detection and array-processing instruments, gene expression databases and analysis and database management software described above. The kits may be used, for example, to predict or model the toxic response of a test compound, to monitor the progression of disease states, to identify genes that show promise as new drug targets and to screen known and newly designed drugs as discussed above.

[0082] The databases packaged with the kits may be a compilation of expression patterns of the genes in various tissues or in tissues, including cell or tissue samples, exposed to various compounds or reference toxins. In particular, the database software and packaged information that may contain the databases saved to a computer-readable medium include the expression results of the genes that can be used to predict toxicity of a test agent, by comparing the expression levels of the genes induced by the test agent to the expression levels in control samples. In another format, database and software information may be provided in a remote electronic format, such as a website, the address of which may be packaged in the kit.

[0083] The kits may used in the pharmaceutical industry, where the need for early drug testing is strong due to the high costs associated with drug development, but where bioinformatics, in particular gene expression informatics, is still lacking. These kits will reduce the costs, time and risks associated with traditional new drug screening using cell cultures and laboratory animals. The results of large-scale drug screening of pre-grouped patient populations, pharmacogenomics testing, can also be applied to select drugs with greater efficacy and fewer side-effects. The kits may also be used by smaller biotechnology companies and research institutes who do not have the facilities for performing such large-scale testing themselves.

[0084] Databases and software designed for use with use with microarrays is discussed in Balaban et al., U.S. Pat. No. 6,229,911, a computer-implemented method for managing information, stored as indexed tables, collected from small or large numbers of microarrays, and U.S. Pat. No. 6,185,561, a computer-based method with data mining capability for collecting gene expression level data, adding additional attributes and reformatting the data to produce answers to various queries. Chee et al., U.S. Pat. No. 5,974,164,1 discloses a software-based method for identifying mutations in a nucleic acid sequence based on differences in probe fluorescence intensities between wild type and mutant sequences that hybridize to reference sequences.

Identification of Marker Genes

[0085] Cell or tissue samples such as those associated with a disease state, for example, may be analyzed using the microarray chip of the invention, and gene expression profiles may be prepared. Expression levels of genes identified as marker genes, based on their properties as an indicator of a disease state, or as an indicator of normal functioning, for example, may be measured and then used to monitor a variety of medical treatments or in diagnostic procedures. Marker genes may be used in pharmaceutical development to monitor the degree of apoptosis or effect of treatment with pharmaceuticals, such as beta-adrenergic blocking agents. Additionally, the expression level of genes involved in the development of carcinomas or autoimmune disorders may be measured. In gene therapy, monitoring the expression of marker genes provides an indication of the level of genes delivered by various viral and synthetic non-viral vectors.

Identification of Toxicity Markers

[0086] To evaluate and identify gene expression changes that are predictive of toxicity, studies using selected compounds with well characterized toxicity can be used to catalogue altered gene expression during exposure in vivo and in vitro. For instance, canine cell or tissue samples can be prepared by administering a toxin or a control to a canine subject and harvesting tissue or cell samples after exposure. In another embodiment, in vitro cultured canine cells are exposed to the toxin. Methods of exposure or administration and methods of preparing cell or tissue samples are well known in the art. See, for example, PCT publication nos. WO 02/10453 and WO 02/095000, as well as PCT application nos. PCT/US02/21735, filed Jul. 10, 2002, and PCT/US03/03194, filed Jan. 31, 2003, all of which are herein incorporated by reference. In the instant invention, standard known toxins such as acyclovir, amitryptiline, alpha-naphthylisothiocyante (ANIT), acetaminophen, AY-25329, bicalutamide, carbon tetrachloride, chloroform, clofibrate, cyproterone acetate (CPA), diclofenac, diflunisal, dioxin, 17α-ethinylestradiol, hydrazine, indomethacin, lipopolysaccharide, phenobarbital, tacrine, valproate, WY-14643, zileuton, methotrexate, lovastatin, mercuric chloride, cephaloridine, ifosfamide, cyclophosphamide and minoxidil, 2-acetylaminofluorene (2-AAF), amiodarone, BI liver toxin, carbamazepine, chlorpromazine, CI-1000, colchicine, dimethylnitrosamine (DMN), gemfibrozil, imipramine, menadione, tamoxifen, tetracycline, thioacetamide, adriamycin, bromoethylamine HBr, carboplatin, cidorfovir, cis-platin, citrinin, cyclophosphamide, gentamicin, hydralizine, lithium, pamindronate, puromycin aminonucleoside, sulfadiazine, sodium chromate, sodium oxalate, vancomycin, BI-QT, clenbuterol, isoproteranol, norepinephrine, epinephrine, amphotericin B, epirubicin, phenylpropanolamine, rosiglitazone and 1-methyl-4phenyl-1,2,3,6-tetrahydropyridine HCl (MPTP) may be used to produce toxin-specific and composite gene expression profiles.

Toxicity Prediction and Modeling

[0087] The genes and gene expression information, as well as the portfolios and subsets of the genes that may be identified using the sequences and arrays of the invention, may be used to predict at least one toxic effect, such as the hepatotoxicity or nephrotoxicity of a test or unknown compound. As used, herein, at least one toxic effect includes, but is not limited to, a detrimental change in the physiological status of a cell or organism. The response may be, but is not required to be, associated with a particular pathology, such as tissue necrosis. The response may be associated with all or only part of an organ, e.g., renal tubular necrosis or glomerulonephritis. Additionally, the toxic effect includes effects at the molecular and cellular level. Hepatotoxicity is an effect as used herein and includes but is not limited to the pathologies of liver necrosis, hepatitis, fatty liver and protein adduct formation.

[0088] In general, assays to predict the toxicity of a test agent (or compound or multi-component composition) comprise the steps of exposing a cell population to the test compound, assaying or measuring the level of relative or absolute gene expression of one or more of the genes as herein described and comparing the identified expression level(s) to the expression level(s) found for a standard toxin. Assays may include the measurement of the expression levels of about 1, 2, 3, 4, 5, 6, 7, 8, 9, 10, 15, 20, 25, 30, 50, 75, 100, 500, 1000, 5000, 10,000 or more genes.

[0089] In the methods of the invention, the gene expression level for a gene or genes induced by the test agent, compound or compositions may be comparable to the levels found in the databases disclosed herein, or in other samples, such as toxin-exposed samples, if the expression level varies within a factor of about 2, about 1.5 or about 1.0 fold. In some cases, the expression levels are comparable if the agent induces a change in the expression of a gene in the same direction (e.g., up or down) as a reference toxin.

[0090] The cell population that is exposed to the test agent, compound or composition may be exposed in vitro or in vivo. For instance, cultured or freshly isolated hepatocytes, in particular dog hepatocytes, may be exposed to the agent under standard laboratory and cell culture conditions. In another assay format, in vivo exposure may be accomplished by administration of the agent to a living animal, for instance a laboratory dog.

[0091] Procedures for designing and conducting toxicity tests in in vitro and in vivo systems are well known, and are described in many texts on the subject, such as Loomis et al., Loomis's Esstentials of Toxicology 4th Ed., Academic Press, New York, 1996; Echobichon, The Basics of Toxicity Testing, CRC Press, Boca Raton, 1992; Frazier, editor, In Vitro Toxicity Testing, Marcel Dekker, New York, 1992; and the like.

[0092] In in vitro toxicity testing, two groups of test organisms are usually employed: One group serves as a control and the other group receives the test compound in a single dose (for acute toxicity tests) or a regimen of doses (for prolonged or chronic toxicity tests). Because, in some cases, the extraction of tissue as called for in the methods of the invention requires sacrificing the test animal, both the control group and the group receiving compound must be large enough to permit removal of animals for sampling tissues, if it is desired to observe the dynamics of gene expression through the duration of an experiment.

[0093] In setting up a toxicity study, extensive guidance is provided in the literature for selecting the appropriate test organism for the compound being tested, route of administration. dose ranges, and the like. Water or physiological saline (0.9% NaCl in water) is the solute of choice for the test compound since these solvents permit administration by a variety of routes. When this is not possible because of solubility limitations, vegetable oils such as corn oil or organic solvents such as propylene glycol may be used.

[0094] Regardless of the route of administration, the volume required to administer a given dose is limited by the size of the animal that is used. It is desirable to keep the volume of each dose uniform within and between groups of animals. Even when aqueous or physiological saline solutions are used for parenteral injection, the volumes that are tolerated are limited, although such solutions are ordinarily thought of as being innocuous. In some instances, the route of administration to the test animal should be the same as, or as similar as possible to, the route of administration of the compound to man for therapeutic purposes.

[0095] When a compound is to be administered by inhalation, special techniques for generating test atmospheres are necessary. The methods usually involve aerosolization or nebulization of fluids containing the compound. If the agent to be tested is a fluid that has an appreciable vapor pressure, it may be administered by passing air through the solution under controlled temperature conditions. Under these conditions, dose is estimated from the volume of air inhaled per unit time, the temperature of the solution, and the vapor pressure of the agent involved. Gases are metered from reservoirs. When particles of a solution are to be administered, unless the particle size is less than about 2 μm the particles will not reach the terminal alveolar sacs in the lungs. A variety of apparatuses and chambers are available to perform studies for detecting effects of irritant or other toxic endpoints when they are administered by inhalation. The preferred method of administering an agent to animals is via the oral route, either by intubation or by incorporating the agent in the feed.

[0096] When the agent is exposed to cells in vitro or in cell culture, the cell population to be exposed to the agent may be divided into two or more subpopulations, for instance, by dividing the population into two or more identical aliquots. In some preferred embodiments of the methods of the invention, the cells to be exposed to the agent are derived from liver tissue. For instance, cultured or freshly isolated rat hepatocytes may be used.

[0097] The methods of the invention may be used to generally predict at least one toxic response, and as described in the Examples, may be used to predict the likelihood that a compound or test agent will induce various specific pathologies such as those of the liver (liver necrosis, fatty liver disease, protein adduct formation or hepatitis), those of the kidney, heart, brain or testes, or other pathologies associated with at least one of the toxins herein described. The methods of the invention may also be used to determine the similarity of a toxic response to one or more individual compounds. In addition, the methods of the invention may be used to predict or elucidate the potential cellular pathways influenced, induced or modulated by the compound or test agent due to the similarity of the expression profile compared to the profile induced by a known toxin.

Diagnostic Uses for the Toxicity Markers

[0098] As described above, the genes and gene expression information or portfolios of the genes with their expression information may be used as diagnostic markers for the prediction or identification of the physiological state of tissue or cell sample that has been exposed to a compound or to identify or predict the toxic effects of a compound or agent. For instance, a tissue sample such as a sample of peripheral blood cells or some other easily obtainable tissue sample may be assayed by any of the methods described above, and the expression levels from a gene or genes may be compared to the expression levels found in tissues or cells exposed to the toxins described herein. These methods may result in the diagnosis of a physiological state in the cell or may be used to identify the potential toxicity of a compound, for instance a new or unknown compound or agent. The comparison of expression data, as well as available sequence or other information may be done by researcher or diagnostician or may be done with the aid of a computer and databases as described below.

[0099] In another format, the levels of a gene or genes, the encoded protein(s), or any metabolite produced by the encoded protein may be monitored or detected in a sample, such as a bodily tissue or fluid sample to identify or diagnose a physiological state of an organism. Such samples may include any tissue or fluid sample, including urine, blood and easily obtainable cells such as peripheral lymphocytes.

Use of the Markers for Monitoring Toxicity Progression

[0100] As described above, the genes and gene expression information provided may also be used as markers for the monitoring of toxicity progression, such as that found after initial exposure to a drug, drug candidate, toxin, pollutant, etc. For instance, a tissue or cell sample may be assayed by any of the methods described above, and the expression levels from a gene or genes may be compared to the expression levels found in tissue or cells exposed to a standard toxin or toxins. The comparison of the expression data, as well as available sequence or other information may be done by researcher or diagnostician or may be done with the aid of a computer and databases.

Use of the Toxicity Markers for Drug Screening

[0101] According to the present invention, the genes and arrays described herein may be used to identify markers or drug targets to evaluate the effects of a candidate drug, chemical compound or other agent on a cell or tissue sample. For instance, the genes may also be used as drug targets to screen for agents that modulate their expression and/or activity. In various formats, a candidate drug or agent can be screened for the ability to simulate the transcription or expression of a given marker or markers or to down-regulate or counteract the transcription or expression of a marker or markers. According to the present invention, one can also compare the specificity of a drug's effects by looking at the number of markers which the drug induces and comparing them. More specific drugs will have less transcriptional targets. Similar sets of markers identified for two drugs may indicate a similarity of effects.

[0102] Assays to monitor the expression of a marker or markers may utilize any available means of monitoring for changes in the expression level of the nucleic acids of the invention. As used herein, an agent is said to modulate the expression of a nucleic acid of the invention if it is capable of up- or down-regulating expression of the nucleic acid in a cell.

[0103] In one assay format, gene chips containing probes to one, two or more genes as described herein may be used to directly monitor or detect changes in gene expression in the treated or exposed cell. Cell lines, tissues or other samples are first exposed to a test agent and in some instances, a known toxin, and the detected expression levels of one or more, or preferably 2 or more of the genes are compared to the expression levels of those same genes exposed to a known toxin alone. Compounds that modulate the expression patterns of the known toxin(s) would be expected to modulate potential toxic physiological effects in vivo.

[0104] Agents that are assayed in the above methods can be randomly selected or rationally selected or designed. As used herein, an agent is said to be randomly selected when the agent is chosen randomly without considering the specific sequences involved in the association of the a protein of the invention alone or with its associated substrates, binding partners, etc. An example of randomly selected agents is the use a chemical library or a peptide combinatorial library, or a growth broth of an organism.

[0105] As used herein, an agent is said to be rationally selected or designed when the agent is chosen on a nonrandom basis which takes into account the sequence of the target site and/or its conformation in connection with the agent's action. Agents can be rationally selected or rationally designed by utilizing the peptide sequences that make up these sites. For example, a rationally selected peptide agent can be a peptide whose amino acid sequence is identical to or a derivative of any functional consensus site.

[0106] The agents of the present invention can be, as examples, peptides, small molecules, vitamin derivatives, as well as carbohydrates. Dominant negative proteins, DNAs encoding these proteins, antibodies to these proteins, peptide fragments of these proteins or mimics of these proteins may be introduced into cells to affect function. “Mimic” used herein refers to the modification of a region or several regions of a peptide molecule to provide a structure chemically different from the parent peptide but topographically and functionally similar to the parent peptide (see G. A. Grant in: Molecular Biology and Biotechnology, Meyers, ed., pp. 659-664, VCH Publishers, New York, 1995). A skilled artisan can readily recognize that there is no limit as to the structural nature of the agents of the present invention.

Use of Assays and Genes for Veterinary Medicine

[0107] The genes and arrays described herein may be used in veterinary medicine, for instance, to produce canine gene expression profiles indicative of a disease or physiological state. For instance, gene expression profiles may be created using arrays of the invention from peripheral blood cells isolated from an animal with a known disease state, for example, an inflammatory disease. Such gene expression profiles can then be used as diagnostic or therapeutic markers to aid in prediction of disease, to monitor treatment progression or efficacy, or to monitor disease progression (see WO 99/10536).

[0108] Without further description, it is believed that one of ordinary skill in the art can, using the preceding description and the following illustrative examples, make and utilize the compounds of the present invention and practice the claimed methods. The following working examples therefore, specifically point out the preferred embodiments of the present invention, and are not to be construed as limiting in any way the remainder of the disclosure.

### EXAMPLES

### Example 1

### Identification of Canine Nucleic Acid Sequences

[0109] A cDNA library of mixed canine tissues (liver, kidney, heart, brain and testes) was produced according to standard methods. Following 3′EST sequencing to identify individually expressed genes and gene fragments, these genes and gene fragments were further sequenced and were analyzed for their homology to known sequences. Only sequences that showed alignment below a first threshold level (90%) to sequences in public databases and that had identity below a second threshold level (90%) within the region of alignment were used to prepare microarrays.

### Example 2

### Preparation of Canine Microarray

[0110] Oligonucleotides of approximately 25 bases, corresponding to various regions of the novel genes identified above, were synthesized according to standard methods. The oligonucleotides were spotted onto microchips according to the Affymetrix photolithography protocol to create microarrays with over 100,000 sequences per chip. The chips were tested for intra-lot variability, inter-lot variability and day-to-day variability. The chips were also tested for the specificity of binding to canine RNA in hybridization experiments with RNA samples from various species: dog, human, rat and mouse. As sample preparation for testing the microarrays, total RNA was extracted from the following canine tissues and pooled: liver, kidney, heart, brain and testes. The pooled RNA was reverse transcribed to prepare cDNA and amplified by reaction with a reverse polymerase to prepare cRNA.

[0111] A samples from dogs hybridized to the chips to a considerably greater degree than samples from other species. The percentages of sequences on the chips that did and did not bind to RNA samples from other species are indicated in the following table.

| | ave. % | ave. % | ave. % | % genes at or above |
|---|---|---|---|---|
| organism | present | absent | marginal | 0.5 pM spike-in level |
| human | 7.1 | 91.2 | 1.8 | 3.5 |
| rat | 4.2 | 94.6 | 1.2 | 4.6 |
| mouse | 4.4 | 94.1 | 1.5 | 2.1 |

[0112] As a further control of specific hybridization, bacterial spikes were performed. Oligonucleotides designed from bacterial DNA sequences (Affymetrix) were incorporated into the microarrays, and canine RNA samples were spiked with known quantities of purified bacterial DNA (Affymetrix).

### Example 3

### Identification of Toxicity Markers and Toxicity Expression Profiles

[0113] Laboratory dogs are exposed to toxins, such as gentamicin, according to the following protocol. Gentamicin or vehicle (saline) is administered to dogs as shown below. The toxin is also prepared in saline solution.

| | | Dose Level | No. of | |
|---|---|---|---|---|
| Group | Drug | (mg/kg) | Males | Sacrifice |
| 1 | Saline | vehicle control | 5 | 6 hours after dosing |
| 2 | Gentamicin | X* | 5 | 6 hours after dosing |
| 3 | Gentamicin | Y* | 5 | 6 hours after dosing |
| 4 | Saline | vehicle control | 5 | 24 hours after dosing |
| 5 | Gentamicin | X | 5 | 24 hours after dosing |
| 6 | Gentamicin | Y | 5 | 24 hours after dosing |
| 7 | Saline | vehicle control | 5 | Day 7 |
| 8 | Gentamicin | X | 5 | Day 7 |
| 9 | Gentamicin | Y | 5 | Day 7 |

*X represents a safe but efficacious dose; Y represents a toxic or maximum-tolerated dose.

[0114] The toxin is administered daily by intramuscular injection. Animals were not dosed on the day of necropsy, with the exception of the 6-hour time point animals. ˜0.5 mL of blood from each animal is collected into an EDTA tube for analysis of plasma drug levels. Plasma (˜200 L) is obtained, frozen at ˜80° and used for test compound/metabolite estimation.

[0115] Animals are observed twice daily for signs of illness and drug toxicity (e.g., tremors, convulsions, salivation, diarrhea, lethargy, coma or other atypical behavior or appearance). were recorded as they occurred and included a time of onset, degree, and duration.

[0116] Blood samples are collected from each animal as follows. Approximately 1 mL of blood is collected into and EDTA tube for evaluation of hematology parameters. Approximately 1 mL of blood is collected into serum separator tubes for clinical chemistry analysis. An additional ˜2 mL of blood is collected into a 15 mL conical polypropylene vial to which ˜3 mL of Trizol is immediately added. The contents are mixed immediately with a vortex and by repeated inversion. The tubes are frozen in liquid nitrogen and stored at ˜−80° C.

[0117] At sacrifice, approximately 6 and 24 hours and 7 days after dosing, dogs scheduled for sacrifice are weighed, physically examined, and sacrificed by standard procedures using sterile, disposable instruments.

[0118] Fresh and sterile disposable instruments are used to collect tissues, with the exception of bone cutters that are-used to open the skull cap. These are sterilized between uses. All tissues are collected and frozen within approximately 5 minutes of the animal's death. The liver sections are frozen within approximately 2 minutes of the animal's death. The time of euthanasia, an interim time point at freezing of liver sections, and time at completion of necropsy are recorded. Tissues were stored at approximately −80° C., stored in liquid nitrogen, or preserved in 10% neutral buffered formalin.

[0119] Tissue collection is performed as follows. For the liver, the right medial lobe is snap frozen in liquid nitrogen and stored at ˜−80° C. The left medial lobe is preserved in 10% neutral-buffered formalin (NBF), and the left lateral lobe is snap frozen in liquid nitrogen and stored at ˜−80° C.

[0120] For the heart, a sagittal cross-section containing portions of the two atria and the two ventricles is preserved in 10% NBF for microscopic examination. The remaining heart is frozen in liquid nitrogen and stored at ˜−80° C.

[0121] For the kidneys, each kidney is hemi-dissected. Half is preserved in 10% NBF for microscopic examination, and the remaining half is frozen in liquid nitrogen and stored at ˜−80° C.

[0122] For the testes, a sagittal cross-section of each testis is preserved in 10% NBF for microscopic examination. The remaining testes are frozen together in liquid nitrogen and stored at ˜−80° C.

[0123] For the brain, a cross-section of the cerebral hemispheres and of the diencephalon is preserved in 10% NBF and the rest of the brain is frozen in liquid nitrogen and stored at ˜−80° C.

[0124] Microarray sample preparation is conducted with minor modifications, following the protocols set forth in the Affymetrix GeneChip Expression Analysis Manual. Frozen tissue is ground to a powder using a Spex Certiprep 6800 Freezer Mill. Total RNA is extracted with Trizol (GibcoBRL) utilizing the manufacturer's protocol. mRNA is isolated using the Oligotex mRNA Midi kit (Qiagen) followed by ethanol precipitation. Double stranded cDNA is generated from mRNA using the SuperScript Choice system (GibcoBRL). First strand cDNA synthesis is primed with a T7-(dT24) oligonucleotide. The cDNA is phenol-chloroform extracted and ethanol precipitated to a final concentration of 1 g/ml. From 2 g of cDNA, cRNA is synthesized using Ambion's T7 MegaScript in vitro Transcription Kit.

[0125] To biotin label the cRNA, nucleotides Bio-11-CTP and Bio-16-UTP (Enzo Diagnostics) are added to the reaction. Following a 37° C. incubation for six hours, impurities are removed from the labeled cRNA following the RNeasy Mini kit protocol (Qiagen). cRNA is fragmented (fragmentation buffer consisting of 200 mM Tris-acetate, pH 8.1, 500 mM KOAc, 150 mM MgOAc) for thirty-five minutes at 94° C. Following the Affymetrix protocol, 55 g of fragmented cRNA is hybridized on the array chip, or chip set, of the invention for twenty-four hours at 60 rpm in a 45° C. hybridization oven. The chips are washed and stained with Streptavidin Phycoerythrin (SAPE) (Molecular Probes) in Affymetrix fluidics stations. To amplify staining, SAPE solution is added twice, with an anti-streptavidin biotinylated antibody (Vector Laboratories) staining step in between. Hybridization to the probe arrays is detected by fluorometric scanning (Hewlett Packard Gene Array Scanner). Data is analyzed using Affymetrix GeneChip® version 3.0 and Expression Data Mining (EDMT) software (version 1.0), GeneExpress2000, and S-Plus.

[0126] Those genes that are differentially expressed upon exposure to gentamicin are identified using the microarray hybridization techniques described above, with data analysis according to a statistical method such as ANOVA, LDA or PCA (see WO 02/10453 or WO 02/095000). The set of genes that are differentially expressed creates an expression profile for a particular toxin. The determination of a particular gene expression profile in a tissue sample from a particular animal indicates a toxic response in that animal.

[0127] Although the present invention has been described in detail with reference to examples above, it is understood that various modifications can be made without departing from the spirit of the invention. Accordingly, the invention is limited only by the following claims. All cited patents, patent applications and publications referred to in this application are herein incorporated by reference in their entirety.

1. An isolated nucleic acid molecule comprising any one of SEQ ID NOS: 1-11,109, the complement thereof, or a sequence exhibiting greater than 90% sequence identity across greater than 90% of the length of any one of SEQ ID NOS: 1-11,109.

2. A set of probes, wherein each of the probes comprises a sequence that specifically hybridizes to a gene or the transcript of a gene comprising any one of SEQ ID NOS: 1-11,109.

3. A set of probes according to claim 2, wherein the set comprises probes that specifically hybridize to at least 2 of the genes of SEQ ID NOS: 1-11,109.

4. A set of probes according to claim 2, wherein the set comprises probes that specifically hybridize to at least about 5 of the genes of SEQ ID NOS: 1-11,109.

5. A set of probes according to claim 2, wherein the set comprises probes that specifically hybridize to at least about 10 of the genes of SEQ ID NOS: 1-11,109.

6. A set of probes according to claim 2, wherein the set comprises probes that specifically hybridize to at least about 100 of the genes of SEQ ID NOS: 1-11,109.

7. A set of probes according to claim 2, wherein the set comprises probes that specifically hybridize to at least about 1000 of the genes of SEQ ID NOS: 1-11,109.

8. A set of probes according to claim 2, wherein the set comprises probes that specifically hybridize to about 99% of the genes of SEQ ID NOS: 1-11,109.

9. A set of probes according to claim 2, wherein the set comprises probes that specifically hybridize to all of the genes of SEQ ID NOS: 1-11,109.

10. A set of probes according to claim 2, wherein the probes are attached to a solid support.

11. A set of probes according to claim 10, wherein the solid support is selected from the group consisting of a membrane, a set of beads, a glass support and a silicon support.

12. A solid support comprising at least one probe, wherein each probe comprises a sequence that specifically hybridizes to a gene or the transcript of a gene comprising any one of SEQ ID NOS: 1-11,109.

13. A solid support of claim 12, wherein the solid support is an array comprising at least 10 different oligonucleotides in discrete locations per square centimeter.

14. A solid support of claim 12, wherein the array comprises at least 100 different oligonucleotides in discrete locations per square centimeter.

15. A solid support of claim 12, wherein the array comprises at least 1000 different oligonucleotides in discrete locations per square centimeter.

16. A solid support of claim 12, wherein the array comprises at least 10,000 different oligonucleotides in discrete locations per square centimeter.

17. A method of identifying tissue or cell markers, comprising:
(a) detecting the level of expression in a tissue or cell sample from a canine of one or more genes comprising SEQ ID NOS: 1-11,109; wherein differential expression of the one or more genes identifies a marker.

18. A method of claim 17, further comprising:
(b) comparing the level of expression of said one or more genes in step (a) to the level of expression of said genes in a control tissue or cell sample.

19. A method of claim 17, wherein the level of expression of one or more genes is detected with a probe that specifically hybridizes to a gene or a transcript of the gene.

20. A method of claim 19, wherein the probe is an oligonucleotide.

21. A method of claim 20, wherein the oligonucleotide is attached to a solid support.

22. A method of claim 21, wherein the solid support is a chip.

23. A method of claim 17, wherein the level of expression of one or more genes in step (a) is detected by polymerase chain amplification (PCR).

24. A method of claim 23, wherein the PCR is quantitative or semi-quantitative.

25. A method of claim 17, wherein step (a) comprises preparing cDNA from polyA-RNA isolated from the tissue or cell sample exposed to the toxin.

26. A method of claim 25, wherein cRNA is prepared from the cDNA.

27. A method of claim 17, wherein the tissue or cell sample is isolated from a dog or canine cells that have been exposed to a toxin.

28. A method of claim 17, wherein the tissue or cell sample is in vitro cultured.

29. A method of identifying toxicity markers, comprising:
(a) detecting the level of expression in a tissue or cell sample exposed to a toxin of one or more genes comprising SEQ ID NOS: 1-11,109; wherein differential expression of the one or more genes is indicative of toxicity.

30. A method of preparing a gene expression profile of a tissue or cell sample, comprising:
(a) detecting the level of expression in a first tissue or cell sample of one or more genes comprising SEQ ID NOS: 1-11,109; and
(b) comparing the level of expression of said one or more genes in step (a) to the level of expression of said genes in a second tissue or cell sample.

31. A method of claim 30, wherein the comparing comprises calculating the differential expression for one or more genes in the first sample by dividing the level of expression for the one or more genes in step (a) by the level of expression detected for the corresponding one or more genes in the second tissue or cell sample.

32. A method of claim 31, wherein the first tissue or cell sample has been exposed to a toxin.

33. A method of claim 32, wherein the toxin is selected from the group consisting of a hepatotoxin, a nephrotoxin and a cardiotoxin.

34. A method of claim 33, wherein the hepatotoxin is selected from the group consisting of acyclovir, amitryptiline, alpha-naphthylisothiocyante (ANIT), acetaminophen, AY-25329, bicalutamide, carbon tetrachloride, chloroform, clofibrate, cyproterone acetate (CPA), diclofenac, diflunisal, dioxin, 17α-ethinylestradiol, hydrazine, indomethacin, bacterial lipopolysaccharide, phenobarbital, tacrine, valproate, WY-14643, zileuton, 2-acetylaminofluorene (2-AAF), BI liver toxin, CI-1000, colchicine, dimethylnitrosamine (DMN), gemfibrozil, menadione, thioacetamide, methotrexate, lovastatin, amiodarone, carbamazepine, chlorpromazine, imipramine, tamoxifen and tetracycline.

35. A method of claim 33, wherein the nephrotoxin is selected from the group consisting of acyclovir, adriamycin, AY-25329, bromoethylamine HBr, carboplatin, cephaloridine, chloroform, cidorfovir, cis-platin, citrinin, colchicine, cyclophosphamide, diclofenac, diflunisal, gentamicin, hydralizine, ifosfamide, indomethacin, lithium, menadione, mercuric chloride, pamindronate, puromycin aminonucleoside, sulfadiazine, sodium chromate, sodium oxalate, vancomycin, thioacetamide.

36. A method of claim 33, wherein the cardiotoxin is selected from the group consisting of cyclophosphamide, hydralazine, ifosfamide, minoxidil, BI-QT, clenbuterol, isoproteranol, norepinephrine, epinephrine, adriamycin, amphotericin B, epirubicin, phenylpropanolamine, rosiglitazone.

37. A method of preparing a gene expression profile indicative of a toxic effect of a compound, comprising:
(a) detecting the level of expression in a tissue or cell sample exposed to the compound of one or more genes comprising SEQ ID NOS: 1-11,109; and
(b) comparing the level of expression of said one or more genes in step (a) to the level of expression of said genes in a control tissue or cell sample.

38. A method of screening an agent for a potential toxic response, comprising:
(a) preparing a gene expression profile comprising the level of expression of one or more genes comprising SEQ ID NOS: 1-11,109 from a cell or tissue sample exposed to the agent; and
(b) comparing said gene expression profile to at least one gene expression profile prepared from a cell or tissue sample exposed to a known toxin.

39. A method of claim 38, further comprising:
(a1) comparing the gene expression profile from the agent exposed cell or tissue sample to a control cell or tissue sample prior to the comparing of step (b).

40. A method of claim 38, wherein the level of expression of one or more genes is detected with a probe that specifically hybridizes to a gene or a transcript of the gene.

41. A method of claim 40, wherein the probe is an oligonucleotide.

42. A method of claim 41, wherein the oligonucleotide is attached to a solid support.

43. A method of claim 42, wherein the solid support is a chip.

44. A method of claim 38, wherein the level of expression of one or more genes in step (a) is detected by polymerase chain amplification (PCR).

45. A method of claim 44, wherein the PCR is quantitative or semi-quantitative.

46. A method of claim 38, wherein step (a) comprises preparing cDNA from polyA-RNA isolated from the tissue or cell sample exposed to the toxin.

47. A method of claim 46, wherein cRNA is prepared from the cDNA.

48. A method of claim 38, wherein the tissue of cell sample is isolated from a dog.

49. A method of claim 38, wherein the tissue or cell sample is in vitro cultured.

50. A computer system comprising:
(a) a database of a set of genes comprising at least one gene comprising SEQ ID NOS: 1-11,109; and
(b) a user interface to view the information.

51. A computer system of claim 50, wherein the database further comprises information identifying the expression level for said at least one gene in a tissue or cell sample from a canine tissue or cell sample exposed to a toxin.

52. A computer system of claim 51, wherein the database further comprises information identifying the expression level for said at least one gene in the tissue or cell sample before exposure to the toxin.

53. A computer system of claim 52, wherein the database further comprises information identifying the expression level of any one of SEQ ID NOS: 1-11,109 in toxin-exposed or normal liver, kidney, heart, brain, or testicular tissue.

54. A computer system of claim 51, wherein the database further comprises information identifying the expression level for said at least one gene in a tissue or cell sample exposed to at least a second toxin.

55. A computer system of claim 50, further comprising records including descriptive information from an external database, which information correlates said genes to records in the external database.

56. A computer system of claim 55, wherein the external database is GenBank.

57. A method of using a computer system of claim 50 to present information identifying the expression level in a tissue or cell sample of at least one gene comprising SEQ ID NOS: 1-11,109, comprising:
(a) comparing the expression level of at least one gene in a tissue or cell exposed to a test agent to the level of expression of the gene in the database.

58. A method of claim 57, wherein the expression levels of at least about 100 genes are compared.

59. A method of claim 57, wherein the expression levels of at least about 1000 genes are compared.

60. A method of claim 57, wherein the expression levels of nearly all of the genes are compared.

61. A method of claim 57, wherein the expression levels of all of the genes are compared.

62. A method of claim 57, further comprising:
(b) displaying the level of expression of at least one gene in the tissue or cell sample compared to the expression level when exposed to a toxin.

63. A kit comprising at least one solid support of claim 12.

64. A kit of claim 63, further comprising sequence or gene expression information for the genes.

65. A kit of claim 64, wherein the gene expression information comprises gene expression levels in a tissue or cell sample exposed to a toxin.

66. An oligonucleotide probe or primer that specifically hybridizes to a nucleic acid molecule comprising greater than 90% sequence identity across greater than 90% of the length of any one of SEQ ID NOS: 1-11,109.

The application's sequence listing, which the Patent Office published only in electronic form, follows.

SEQUENCE LISTING (11109 sequences)

SEQ ID NO: 1 - DNA, 420 bp, Canis familiaris
  misc_feature (1)..(420): n = a or c or g or t
tgttttttcnnnnnttgtgtaaatccttaatatatggaatttttgtgatgannnnnnncactttgattgcngnncacatttccaatgtcaaatatctaaaatagncgaagatattttaattagaattttaaaaatctacatgtagggcctnntaatccatacttatcttcccccccctaaaatgatgaaataatttttcaagctttgaaaaagcagtcctggagaatagctcatgttctgttgtcttctatagtgtgcgatcatttgttttggtcacaaacaatttggtaatttataggttagagatcattccacttaaaacatttatattttgcatttcatagtcagtgataccatgtgaaaatgttagaattctgagttgtgattttattaacttgttgcttgcttattttaggcttt

SEQ ID NO: 2 - DNA, 560 bp, Canis familiaris
ctctgtgtacatgcactttcttcctccctcctttgtaggaccccagggctgaggtggggtacctccgcctctcccttctttgtcactttggtttcctataaatatgtatgtactgtatgtgcatcttgctttgtaaataactttgacctgttttgtttctgttcctggggggccagaggcagttacagaagggacagctcacatctcctagttacagccccacccagagtcagggccccaagggggacccagccctgggcacccaggtcccagcccacctggcttgagagcccagtccctgcggcctgggctctgaggatgcatcttcttcgggagaatccctgaccctacttctgtccacccctccccattctctccctagaggaaaccagtatatcaggtacggccctaaaaaccaggccccaggatgagaggcagggggtgtgaatgctggaatccccatgttaacccaggaccatctccagagccactgcagcatcggccgtttgtcccatgccagccccccctagaatatccacactgtgctaggtgtatatata

SEQ ID NO: 3 - DNA, 198 bp, Canis familiaris
  misc_feature (1)..(198): n = a or c or g or t
gtcnnaaggccatgtnnagtcagcatctgaagatacagtagctgacaaggttgaaatgtcagtgaacgacaaagcagaaccaagcagttgcagaagatggtaaacttaaagaagagttactcagatgtctgtatagatggcctaataattctctataccaactgtagttttttctattcttttaannnnnntggtgta

SEQ ID NO: 4 - DNA, 321 bp, Canis familiaris
  misc_feature (1)..(321): n = a or c or g or t
ctctgcatgacagcnngaacattgcaaatagcccctctgnnnaaggctctgaatttcttgcccccccccatctccttcaggcccctcggcatttttaaacgtccccatagtgcccatagaacattccatgaggggccnctggtgttcttgagcgatagtgcccttcattccgccctctctaactgtccatttcttttctgacactgcaccctccacaccccaccctcagatggacccttcccttcttccctctcgctggatctgagtctcttcccttcgggtccccatgttctcctgcattcccccctcaccccagtggtc

SEQ ID NO: 5 - DNA, 717 bp, Canis familiaris
  misc_feature (1)..(717): n = a or c or g or t
aatcataccatagcangaatcnctgnatatttnntatttacaaaaaaaaaacaaaannnnnncanaaaaaacttttctatttgtaacttctaatttttgtttgggataaagatttcatccattgtactagcaaatctctgggcagggtacttttatctcagtctttagcttttaaatggcttcttctcctaattccctcacaaaaatttggaaaggaaatccagatctgaagaagcatggctctctcaaaagtcatgattactcttccaaaaaaagaaaactgaaagtgcaggggccatgcattccagttgttactcccatgctcttcgtagatttggcaataatgactcagtttcaccaactgtcatctttggctttattgtaggacagaaacagttgtggaagctaatttacttcctttattccagaggtgtgaaatgtcatcttgaaagcaaacttgattatcagaaatatagaatgttacgtgttaaaacagacattatatatacaaatatatatacatatatactcacacatatgtacatacaactgcacaaataggaaaagttcatgccttctctgctgtcagatataatgttaaaagggttttgaatctctttaagcaagatctaagcagttctttgtcctgagaaagcaacatttctcaaatgagttaatggtgtttattttannnnnntaaactttaaggaaannnnn

SEQ ID NO: 6 - DNA, 507 bp, Canis familiaris
  misc_feature (1)..(507): n = a or c or g or t
ttctccacctgtagnctggggcttcagattagatgctgcttcagagtgcaaacatgnnnnatatttggtttctatttcttgaccntnntgcttnnnggaagaaaattacttaaaaattaaagataattccctgtagaacatgtggaagcgggccatagtagtgannngccaaagtgtatctagtggtggaccttctcacccctctggtcccacatacccttccttatcccgtcttacactccggggacttagcctgtatggtttccttggttgcaagttagcggtcttttctagttaagtaaacttccctggaaatgcttctgagtatgcttgtaatcctctgtttctgtggctacactgggtagcatttcccctgaagttgtgcctaattgtgcagttgctcatgagctcatttggattgtaactttgcgaagggccctgtctctctccttgctgtnngccttctcagggagggtcctcgcatagccttcactctgtatctgacaa

SEQ ID NO: 7 - DNA, 296 bp, Canis familiaris
  misc_feature (1)..(296): n = a or c or g or t
gttccacacngtaaggnnncttatnctcntnnnnnnatagaaatctctttcatacagcaatttacacgaacagcatagtcaatgactacagctttggactttgntaaaaattttgtactttaaacttaatgaatagaatcaagttgagaattctaaaggttgtagaaccatagacctttggtcactagaactttgaattaaaatggagaagtacatatttcctcaaacaacatgcaaaaaaaaaaaaagagaaagaaaaaaagagagagaaagacactgtaacatcattgtcattc

SEQ ID NO: 8 - DNA, 560 bp, Canis familiaris
  misc_feature (1)..(560): n = a or c or g or t
gaataacttgcgtgtttgttatnnnaattcaattcatatggtgnnnnnnnnnnnnnntnnntnncttccagacnnnnnaaaacannnngnnnnnnnnnnntannnnnttcnnntccgatgnnnctgctgtcgagatatgtataagagaagagtggnnnnatgtgcttntnnnnngcaggggcatgcatccataagaacacctcacaggctgccttttagatcatggtttgcacagaccaggtccaaacnnnnnggtccagataggtgcannnntgagattattcctatnnnngttgaagtgatnngctttgttttaaaaaaaaaaaaaaaaattgcanctactgtctggcttttttttctnnnaagaactttgaattagtcccctgttagaatagggttgccactcagtcctctttgtttttttaaggctgaattccatcacttatttaaagaaaaaaatatgcaaaatnnctggtcttgttaagagtgcaatattatatttttatgtaaaaataaaaattaatttggggggattatttattcagcntgaaacttaatat

SEQ ID NO: 9 - DNA, 640 bp, Canis familiaris
  misc_feature (1)..(640): n = a or c or g or t
gccatctttttttttttcatattctcatagactgaggaaaggatgtcagnnncttcactnnaacccacaaggtcaccgatgtgtctttggaaggtgggactggtcagagctgggctctgcaggaatatttgcagttgctcctctttctctctgggtttcctggtgactagcaggactgactgtcttttcaaagggaatttaagagtcactctgccagatacctgttacttccagctgtcacttcttcctcaaaggacaccagtgaaatgatgcgcatatgaaaacacagtttgtggatcacccttgcacaaaactccaaacagggaaggactacccagattgccagaagcacagggcaatgcctcaccgctgctcatcctccccgctggctcatgtgaaaccaggcaaccagggaaacctactcccaaagtacagagtgggcttggagaagcctgggttcctggcaccgaccccggcctgacaccccagtgagccggctgcctctctcctcttactatccccatgctaaccgaatgcttttcagtatttctccaaaagcaggatcagaaggttctgtcaagcacagtcccttgaaaggcactacannnngttttatatcccagcaacatatcttagttct

SEQ ID NO: 10 - DNA, 456 bp, Canis familiaris
  misc_feature (1)..(456): n = a or c or g or t
ccacttcgtnnncggcccctggacggcggcggggccgcgggggggccnncgtgcctcntggtgnnnnngcccaacttcctgtgacccacggccccgtgcctcgcnagnnngagagggaaactgaggctcggnnnnngccgggaccgccccgccagccgccgcccgacggccctcctccccggggcccccaggacctcctcccgagcagcctctgccggctcagctgcgcgggcccgcgggatggagcggggggggggggggtgcacaccccggggcctcgggagcagctctgcggtgtgtgcgggacacaagcccccaccctgagccgggcggcctggccccgcaggtcccgagcatcgcaggcaccgggagggccgagcacagccagcccggcgtctcctgggcaagcccagcttcannnngcggggaacgggcnnnnngccctaagcccggcgg

SEQ ID NO: 11 - DNA, 552 bp, Canis familiaris
  misc_feature (1)..(552): n = a or c or g or t
tcanctcctcccgtgccatgaggccaccgccgccccaacaccaccctctgtgtccacccagcctgtccgcatccatggccagccgggccgccctggaaccgtgaggcccggctctcctcacccctgccccgcacccaccgccgcctgaagccaccggctccgatcgccaacaacctctgcttgtccagaaaccgacatgaaacggaaaaggctatagccctctgcaaaaccagggacccggctgcttcgcaggcagcccctgggtccctcccgctctcctgcgcgtgtgcttttgtttttttatttcaaacagacattgaaaaaagaaaaaaaacaaaaacaaaaacccaacagctaccttctgtcctnnaannnnnnnnnntgacagatggggagaaggccagcgtagacctcagagannnntgcctcccgnnncnnnnntccctcggcagccggagannnnnnnnggagnnnnnnnnnnnttattccacgtcccatcctcgagcggcgagaccacctgcgtggctaggatgattaatgatgatgatgatg

SEQ ID NO: 12 - DNA, 699 bp, Canis familiaris
  misc_feature (1)..(699): n = a or c or g or t
atccagtccagaaagaattgtgtgaatgtnctgatcactacaacccagctggttccagctctggccaaggttctcctatatgggctangagaaatatttcctattgaaaacatctatagtgctaccaaaattggtaaggagagctgcttcgagagaattgtgtctaggtttggaaagaaagtcacatacgtagtgattggagatggacgagatgaagaaattgcagccaaacagcacaacatgcctttctggagaatcacaaaccatggagacctagtgtccctccaccaggctttggagcttgattttctctgagaactggaatgaagacctttccccatgagctcctttttattcgtcaagggagctagagaccggaaccatctgggaactctctctctgtctctgtctctgtgtgtgtgtctctctctctttctccatggaatgctggcgagaacacaatcagaaccaacagctgcaagggacgaagcttttttttttgccaagagtgagctgcagccctgtgttcatcctcgtagaggcaggagacagttggattgagagaacaatagactcaccgcagctacagtgcttttaantcttctgttttttgtttcattttattttgtttcaaaaaaatgaagaaaagaaaaggaaattcttggggcagagttgcactcttagttcgtgcccagtttg

SEQ ID NO: 13 - DNA, 496 bp, Canis familiaris
  misc_feature (1)..(496): n = a or c or g or t
gnggtggggtgggggctttatgtaaaaacggactttgtccagagcagaggaagtgcaggtgctggcacagatggctgttctgtgcctgctattcacacagttttataccagaccgtcatcacatctctagtccagtgtgccgagagtaagagcgaccgagaagcagtgcacttacaactgatagagcagtggaagaattaacccccttcccaggggcagagggcagggggccgtggtggcagatttggcaggtgcgctttgactacatagaaagaatccaaagattagaaaagacccgcaaaaagagaaggcgagtgttcttcaggcgtcttnnngctgtcctgtcaccatggagaaacttggaaggagtagagcttttcaaaagttgtttcgggcactcttggacaatatgtattttnnnnnnatggannnnnntacaaaagcaatcaaaagtgaaaggcactttttctnntaagttgttgcctttaatnnnntc

SEQ ID NO: 14 - DNA, 692 bp, Canis familiaris
  misc_feature (1)..(692): n = a or c or g or t
tgtnntgtacttcnaggnntgantnnacaaagcactgtgtactgatcaacaccatcctaagaagtgcggcccatagntgtgtannataccatgaggtgctgcagcagaacacctcattaggnnttccagctctagagatttatgattgtattacaataaaaggaacccacataaaaggaacccaagctcattttggatacagtgttcttcaccaaccctgtaggtgaggcttactctttgagatgggttgcagtaatgataatgacacacttttttcccccaactgtcatttatcaagcatgcaccatgctaatccctgtgctgagttctggtagtagaggtgatacctgatattggagctttactttagcctgtttattatgccaggggttcctgaaagaggagagaagaacctgcaaaacaatgatttcagaattattgtgaccatcccatactacttctaagatgtccagatgtttttgcaaacgcaggcatgctgagcatcagtggagaaagacttggcattgcagagaaggtttactgagacaactaccaggttccagcatgggaaaagctcaaagtcaacggcagaaaaaaaaggaatttcatggaagtgacttattgcttagaaacaagtgtgtgatgaaacctgttcgagctgccatggttctcagctnnntaacctttcccct

SEQ ID NO: 15 - DNA, 505 bp, Canis familiaris
  misc_feature (1)..(505): n = a or c or g or t
taacagtngcaaccattcaaacagtttaatctttattttgtgaatttttttttttgttgtttactattcgagacccagttttccgatacaaaagtgtttggcaccctgcacctcttatagttaggcttttgagtttaataccagggggaagagggagatggtagcagtggatgaagagtagccattttaaattatatagttacagtttaatgtcctggtaatttaaccggagtttgttaatatcactgtctccccaaaattaggatctgtattaataatagcgtcactgttataacccatgagcagtagatcagatgacacatgttaacttgtattaaatgttaacagtattatatgaactctgacaaccctcttagaggatccatgaatgtgaacagataaatgtggctaatcattggattcttcaatatgccttctaacgtggctattttatttatttggagctctaaacatgattgtcatagtatataagactgaaaggttt

SEQ ID NO: 16 - DNA, 579 bp, Canis familiaris
  misc_feature (1)..(579): n = a or c or g or t
tgacggtcnccgtgcagtgtgccttcaccctggccctgaaggtcccctggnnagctggcctgccccacctgcggaccctgctgagccaggctctccctctgcaggcccagcatgggcagctcagttaccgggatcctagccatgaggcacgctgggtcgccctccccggggaggaagcactgcagggggcctggcgagacacagcggccagccccaggggactgcagctgcagtgccgggtgagacttggagctgtgggtgtggatctgtggggtgggggcctgggcctgtctctgccctgccggccctgcagcctgccccctcttcctgccacaggcagcaggcagccggccagtcctgtaccaggcggtggcccagcacaactactgtgcccaggggcctgaggacctagacttgcggcagggggacatggtggacgtcctgtgtgcagtggacccggcgtggctggagggccactgtgacggccgcatcggcatcttccccaagtgcttcgtggtcccagctggatggtgcatgtgaggagcctgacaccccaaatccagagaagaaatcgcccca

SEQ ID NO: 17 - DNA, 563 bp, Canis familiaris
  misc_feature (1)..(563): n = a or c or g or t
annntccaggtggatgcttccaccaaatcagctgaggagtccannnntgagtccttggaaagtcaactcaattcttaccccatcaaactgagttagaactaagagactgggtcccagagagatcagggaagagatatagttcttcaactgagtctctggagtggaaactacctcatgacatgctagctctctgaaagctgtttgggcagttttaactgaaccaggtctttgcccacttttcccttttctattgaatgcaattgaaattccgcttgatgactcaaaaggatcctgattcagatcccttccccactactctaagccagtttccttacaaaggctaaataaagtctagcaactagttccaaaggaattctgattaacgcatatccacaaatatcctggccattctttaggatgttctatttattaactaattttgcctgatacatttttgtttttataaaatccagttctcatttttcatgtctcctctataaactcttaccgtaaataaggctgttagagacatgctggaaatttccatatttaagcactatcat

SEQ ID NO: 18 - DNA, 545 bp, Canis familiaris
  misc_feature (1)..(545): n = a or c or g or t
aaaccaacaaaaccatagagtgtagatttttttcctaatgatgagtcacctcaagttgttcactcaaagccatgataatatttctcactatttgatttctccaacacccctagaaatagatattttccttatttgattttagccatcaaatatattacagtatgggaaaagccagccatatatcagaaatagtcttgtttcaatttaaaaacacatttctacatgtacttattgtactttttttctttttagccttaaagaattttagaggactgtagttgtctgatttatcttgcatttctaattctgtaaatcattggttattgcacattgtattccatttttccatggatttattcattggcctccttttattttgaggggacaacacggaccgttatattttcgtcagtagtatggnnaatctgctaactgctattgttataacgtcctcatttttactgcacgccaaaaacaatgcttgccaaacaaaatcttggacattccagtataatatggtcattatatttctgttcatgttattg

SEQ ID NO: 19 - DNA, 300 bp, Canis familiaris
  misc_feature (1)..(300): n = a or c or g or t
aatcnctaaataatgccatgattccttnnntctccaagaaggcaaaggattgatttacttttgttcagagaaagtcctaatcaggagatccacaggtgagggactgggtgtgtgtatgggagtattttttatggttacctcgtgtaaagtacctagcacagtatgtggaattcagcagcccacaagggtgccacgttgggggcagggaagctttgtgaacttgggccctaccttgactacccttgagataattagctcaggtctacttttccctcagggtactgggttctctgcttcttt

SEQ ID NO: 20 - DNA, 608 bp, Canis familiaris
  misc_feature (1)..(608): n = a or c or g or t
tcatngacctcatccaccacgggaacagacaactgaaggcgcgcacaaaggaaccnnnnngtcccaggagtcctgctgtgtttnnnnnnatcgtgtcctacatcaaacagttcttcgagaccgttgggatttctctggcagacagacagttggtttcagaggacagcagccgggctactctacacagcgtggtggaggagctggtccggttccggctcaaggtccggcagttcgccctggccacagaagcggccaccagggaggctggacggcagcagctcctggacaggcggcccctgctagaggcgtgtgacactctgcgccaggaccttgctgcccatggcatcagcattaaggataggagcagcacatccacgtgggagctgctggatcacaggacccaagaccacaaaccagggagctgaggacttccagcacattctgtgcttaagtcacgcaagcagtcaagaattttcaagattagacgatgcttgggacgcctgggtggctcagcagttgagcgtctgccttcagctctgggcgtgatcccggagtcctgggatcgggtcccacatcgggctccctgcatggagactgcttctccctct

SEQ ID NO: 21 - DNA, 589 bp, Canis familiaris
  misc_feature (1)..(589): n = a or c or g or t
gcactntagtgcttcaaatgggtgctcnagtcaggtttttagaannnnncagactcnntcacannnngtnnagcccaagnaggggatnncannnngcaggcccaannnggagttcagtgtggggtnnntncggtcacaatggcccttcannnnnnntnnaggcccaggnnnctacagcttcnnnnnnnnngggaggtgnnngaaggnnnncaggtacctgtgtgccnaagaaggctgagtgnnnnnncgtgctctgngttgttcactttcacannncnnnnnnctcaacattgnnctagaaaaaggtagagaatgaaaatctnnnnnnntaatgtangaatannnaaggcnncattnaaacgnnnnnnnngagaacanngattccaacgccagcagctctttgtgattgttcacttgggtcngngccagtttcagtgtcacacacttgtcatccaggctgaccagaccagtctcttccttnnnnntttttcccaccaaggtgggaaaagtgtggtctccannntnnatttcccacnnccgtanncgcatgcaaagagccnnntttctcgctgggggcgccttcaggagt

SEQ ID NO: 22 - DNA, 383 bp, Canis familiaris
  misc_feature (1)..(383): n = a or c or g or t
tgnnagcattcataggagaaaaaaaataccattttagagggaaataatttcaactcaagcatannnctcctatttactcaggcctttataaagcaggttcaaatgctctaggatgaganngcatatggtttcactaatttaatccactgggatgttgccaaatgactaagcacttaatttgctgcttctcagacttctctatcaaaagagcagcgcccataatattagagtgagcatgcaggggtctcctctctccctcagggtttaggaatacagcctgaagctcatgagaagcctaccttgaaatgtctttgatgtctcttaactgtctcaaaaagtaatgtaaattttatattctattcannnttatctgcatttgtttt

SEQ ID NO: 23 - DNA, 548 bp, Canis familiaris
  misc_feature (1)..(548): n = a or c or g or t
ggggtacatggtnnnactgcatttaaaatgctaatgaatgttactggattagaattcaaacttagaaatacttaagaatgtattagaaagtgcatgctttatgttaaaaaacaacaatgctttaacattccccattcttgcttttttcagaaatttacattaattttgcatgtgtacaaacttaaacattttgtggggttacagatttcttgttatttattaagattcagtattaagttggcctttgaaatcttggtcccattaacttactagtcacattgaccaatgttttaggctatagcgatgcctagaattttgagactaaaagtagttacttattattttaacattccaaaagttttgtgattttttttttctctggtaattaccacattttctccatttcgtcctttaaatggccacagtgtgtactgtttgaatgttccattcgaaagatgtagcttcagaagcacagtggttgccccatggtccatgagacgttgtttgtagtacgaggatggagtgctgtctactgaaacaatactctt

SEQ ID NO: 24 - DNA, 315 bp, Canis familiaris
  misc_feature (1)..(315): n = a or c or g or t
ccagctagaaccntggccttggacttctagccagcagaactgtcaggaaacaaacgtctgttgttgcagtggcccccacaccccaccccagccccgactccccgtctgtggtgttttcctatggnnnnctgggaggactgagatggacggatggacggatggggcatgggaggccgaaggaacggggaggggtgaaggggcagacgggggatggcaggccctggggagtgggtgggggctggccagttagggcccggggtcccgagcattaaagagannnnnggcactcacctgatacacactccaaaatccaac

SEQ ID NO: 25 - DNA, 579 bp, Canis familiaris
  misc_feature (1)..(579): n = a or c or g or t
gccccaccccacccaggnnaaggtagaggncaggctggaggctgggaannagcccagatcccagatgaggtctgatgaggtggggtgcagggggagcctnnagccaagaatggctgaggagagagggcatagggaatgagggggcagaggaagtgctggctgtaagcaggaggggcaaggaatgtgtgcttagtggggccagggcaagtgctgagggtctgagaggggcagtgtgagcatccaggctgcagctagcccccggcaggaggctggggacgggggtgctgcggcccttccacccacttccatcctggcctgcaggcctctgcccaacacacgggagaactaacattactaacgtagcacccccccactatgctgttcatcaggccacgaggcccactgtgccttcacctcccaaaccagatgccacctgccggcagtgcttggcaccccccccagtcccccaggatgtgcctgtcaccacacataactcagtgtgtccaggcctttgggtctttctggatgtcatggnnnnntgtggtaggggggcnnnnattatagttttaggaagctgcc

SEQ ID NO: 26 - DNA, 585 bp, Canis familiaris
  misc_feature (1)..(585): n = a or c or g or t
tgtgaangacatannnaaaaaaggaataattgcctattcctttatcagaaactctnnaacagaaacactatacatttttatcgttaaatgcgtggtaatacctggtcactgttatagattgaacaaggtcagtgtgaagcagcgngtcctgggtgtcctctgctgagaacaccctttatggcagtggcaggctggactgccctggtcaccagaaataaaatggattccagcccatgtgaattgttgtctacgtgtcacagctgtgatgtgaccacagaacaatgtgcagtgtgtttatatgtaagatgtagaaggcacatctttacgacacaggagtgccttacagagggtcacatttagtcttttaaaaatgccaagttcaggcttaaaatttttagaacgtgttcttacattggagccgggttactttctttcgtaaccctgtgagtatctggtcaggcaagaccaggttttccctgttcatagtgacgcaattcaccacgtgtgggccacctttggacttgtaacccgaagaggtcatggctgacagcccagcctccctcaccccatgtaagaggtagacaa

SEQ ID NO: 27 - DNA, 579 bp, Canis familiaris
gggatgcccagtggccaaaaggtaaggagacttcatctcctcagacctagatggagaacaggtgtgatctctctcttttatcctgaaataaggcaagtgatggggcccaggcattcttaggagcttcccaaagctcagtgggttttgccaagtattttcaggaccgccctgaaatagcaaggctggtctggggtgcctttgtcacatctgagtggctgttgtagaaaaaagaaactgtcagtggaggaagggaagagggaaggcaggtaagcagttggaagcatggcacggtgaggagtatttaaaatcaaaataacctaaattttaatctctgctggtacttaatgttattatgatatagggcagaatgatttctacctcttagggtttgtcaaggtgaaacatggtgaagtcctcgctacatggttgagtcttgtgtcagatttctctctccctgcaggatcttgagcatccctgaatactaatgggaaaaggtgtcacgttcatttcagtgcagaaggcaggtgggacaaaaccaggttgtctccctagtggttagctagggcttgagatgaagga

SEQ ID NO: 28 - DNA, 316 bp, Canis familiaris
  misc_feature (1)..(316): n = a or c or g or t
tcacttgtgtatattcatcatgtttagnntttgggttctttttttcaccaccannctcnnttccctgtttccctccacatccctccctccctgttttccttcctctctnnnttctttctnnctttctctctcnctctttttnnnncnnnnccatttttttgggctgataatgtatgagcttttaactttgnnntgaangatgttcnnnnnnnnaatcggcaatatgggggggcagctgttcnannntaaatgtttactcaaggatgttcttaaaggtgtgcgctctctactatgcctnnntgtttgcctaccttac

SEQ ID NO: 29 - DNA, 570 bp, Canis familiaris
  misc_feature (1)..(570): n = a or c or g or t
ccannngactgaaatacgcaagttaggagttatgtttccctccctgnatactctcgtcctggctaacaatcatttgaatgccattgannagnctgatgattcactggccagattattccctaatctgcggtccatcagcctccacaagtcagatggaaataccattctgaagagaagagagcagttgtgacttgggtttgcaatcctgggaagacattgacaaactaaattcattccccaaacttgaagaagtgagattgttaggaattcctcttctgcagccatataccactgaggaacggaggaaattggtaatagccagattgccatcagtttccaaacttaatggcagtgttgttaccgatggtgaacgagaagattctgagagattttttatccgttactatgtggatgttccacaagaagaagtgccattcaggtatcatgaactgattacaaaatatgggaagttggagcctttggcagaagtggacctcagaccccagagcagtgcgaaagtagaagtccactnnnnngaccaggtggaagaantgagcattcgtctggacc

SEQ ID NO: 30 - DNA, 618 bp, Canis familiaris
  misc_feature (1)..(618): n = a or c or g or t
gagccatgtggggctcgttttngnncagctattgctgctgtgagagacctcaatcttgatggatttgatgacattgtgattnnagctcccctggaagatgatcatgggggagctgtgtacatttatcacgggagtggcaagactataaggaaagagtatgcacaacgtattccatcaggtggagatggcaagacactaaaattttttggccagtctatccatggagaaatggatttaaatggtgatggtctgactgatgtgactattgggggccttggtggtgctgccctcttctggtcccgagatgtggctgtagttaaagtgactatgaattttgaacccaataaagtgaatatccaaaagaaaaactgccgtgtggaaggaaaggaaacagtatgcataaatgctacagtgtgttttgatgtgaaattaaagtccaaagaagacacaatttacatagctgatatgcagtaccgtgtcacactagattcactaagacagatatcacgaagctttttctctggaactcaagaaagaaagattcaaagaaacatcacagttgaagaatcagaatgcactaagctttccttctacatgttggcaagtaaatcatatatg

SEQ ID NO: 31 - DNA, 627 bp, Canis familiaris
  misc_feature (1)..(627): n = a or c or g or t
tccactntcctttccctttcagtcnnnnntcccatgtatgtactttatgaaatccccctaaccctcctgatgcagtngacattgcagtggatatagataccagccagaagttgtaaaacttggtagagacctgatgcatgctttgaggagaaactgtcttgctgcaattattataaggctgagtaaagggctacctactattaccatccacagagttacagaatcttaggtgctgtctctgttggaggaacactcagccccttgttgcccacaaacagggaaccctctgtgtctaccagggaattagaaattaaggtttcttcactacttctatggtagagctgtctggaactctgtttcagactgtgaggctctgggcttgggctctagccacaaagggtttcttttaaggagctggaagggaaggaggcaggggttacatgttcatgtcatttaattttgatcctgctctctccagctgcttctttccgaagataaatctaaagatacaaagtctgcatttgatataatgccttaatcactgagtctacaattaatgttgaccgttttagattgtaagctcctggagagcagtattgctgtagtaggaatgttttaacagtgtca

SEQ ID NO: 32 - DNA, 563 bp, Canis familiaris
  misc_feature (1)..(563): n = a or c or g or t
gacatgcatcaatcctacattcatctgtgatcacccgcagataatgagccctnnngctaaatggnaccgctctaaagagggtctgactgagcgctttgagctgtttgtcatgaagaaggaaatctgcaacgnctacaccgagctcaacgaccctgtgcggcagcggcagctatttgaagaacaggctaaggccaaagctgctggcgacgatgaggccatgttcatagatgagaacttctgcactgctctggaatacggcctaccccccaccgctggctggggcatgggcatcgaccgtgtcaccatgtttctcacagactccaataacatcaaggaagtacttctgtttcctgccatgaaacctgaagacaagaaagacagtggagctacccctgaaacattacagagcacgacagctggcacttctgtctagaaaaggatcactgcaagtcctgtaactcaggcctctctgcatcttgcacaagttcaaggactgcaggggagttctcgtgtgtttgacgatcacagttcagttcagctacgagaatagagaagaggaatta

SEQ ID NO: 33 - DNA, 397 bp, Canis familiaris
  misc_feature (1)..(397): n = a or c or g or t
taggaaaccatgcagttcaaacttttcattttacangtgaggggtgaaagcccagagaaaggaaatggcttgtcagcacctcagcttgaaaggnagtgggaatgcaggcaaggggccaaccaggaannnnnnnatcccagggtggtggtcattttgctagccagggagcttcttccatgctttcctgttgaaaatgtgagctctggtcagaatcctctcgtggcacagactaaggtcccatggtgcctgtggggaagaaaggtgaggaaacttgggtttgttgggttggttcttcctgaccaatacttctgtactccttttgttggtttcctcaaatcactggttgtccgggtcttggttttaaggtttggaagaannncagggtcagggaaaaaag

SEQ ID NO: 34 - DNA, 495 bp, Canis familiaris
  misc_feature (1)..(495): n = a or c or g or t
cccaccctacaagctnnngctggacctgaccaagctgtaggtcttcatctgcccatgcatcaccaagtgcacgggctnntcgggcctcacttgctctgtgcccaggaatccaggtcagggtgggaccatccttgggctcctctacccccaatcctcctttccccagtcccgctctttgcccctctgggtcctggaattgccatgcccccactggggggggaggtgggatctgattttggttcctccctgctcccctcccccagagtgctacttttgtcttctatcttgtagcttcttgagtattcaaacctgttctgtgctgccttcctcctttctcccttggagagtgggggctgagggcacaggggaaccaccttgtgcnagggctccctcctccccaccccacctccagagatccagtcccaagagaggaggccccttgagagagttggtgggggtgcagctccatgctgggagggcgactgaggctggggt

SEQ ID NO: 35 - DNA, 574 bp, Canis familiaris
  misc_feature (1)..(574): n = a or c or g or t
gagaaatcaantgtaatcataagtcaaaaaaaannnccttcaaacttcnnggctacatactctganctganctacagtgactgagggagagcataatagatgataaattctgataaacatttgggaaacgttagaagttcctttttaacccaagaacttaaaagtggcctttcatttatactatgatacatctatttattgcaaattttggacatgcacatttattttaaaaactgatggacagcaagcagattacatgtattggaaataagaaatggacagaatgagaaataagaaagctagctatcctgcctggttctgtatttcaccctccatgggattatcattctacaccttgatatttgtactgtcaagacgtttctgtcttcactattcaagtggataaactgttcatagaaaccaatggagaccaacaagtctctaacagtctgacaacaagctttgcagcctgcctcaacaatgatggcattgctcacaagaagttcgctgtaagacagtaacactgtagaacaatggaaatgaatgtgcataatcacacacctcctcagcctgt

SEQ ID NO: 36 - DNA, 554 bp, Canis familiaris
  misc_feature (1)..(554): n = a or c or g or t
gctnngtnnaggaagtnncgctggnntattacagacgcagtggcttcgaccaggggattcatggnnnnnggtccactttcagcacgctgtatggcctnntcctgtgggatataatcttcatggatgggatanntgacgtcttcagaaacgnnnaccaggcattcccattggacttgtgtacagacagcttcttcgcaagccgtgggccggccatcgaggnnaggctgcagctgattcacagtgcccctgcggagagcnngcgagcctgggtggcagccgcgtggcaggcccaggaaggcagagtggcttccattgtcagctgggatcgctttgcttctcttcagcaagctcagctggtggaagttaaaggccccaatgatcgcctttcacataagcagatgatctggttggatgagctgcagaagttgggggccgaagtagaagtctgccacgtggttgcagttggagcaaagagcaaaagcctttcctaactaagagctgtggtgtcggggtgtctggttgtacttggactgattttcagaagcataaagcat

SEQ ID NO: 37 - DNA, 640 bp, Canis familiaris
  misc_feature (1)..(640): n = a or c or g or t
ccccagcgttctctacccagtgacacaccggtttcaatttgatgctgnngtcnttctcttgcactgcnnncngcgctaacacctccgtttctgtttattataacagtctatttattacttaatgtatataatgtaatgttttgtaagttattaatttatatatctaacattgcctgccaatggtggtgttacatttgtgtagaaaactctgcctaagagttgcgacttttcttgtaacgttttgtattgtgtattatataacctggacatcgcttaagaaagacatacgaccccctcccaggaggacattcgtgggcttttattcagacggtctgcccccttccctgtctgagttgctaattctgcacaactcctttgtgaaccagttttggaaacaggattctcacattcgatattaaatggtttatactgagcttttacttttgtagagtttgataggggtagggggcaaggggatgtagtttttacccatgttctatccaaatctgtgtacgcaggagttgggttatgactgggttctactataattgtggctttggtttaaacagcaacactacatttgctcacagatggctcttctgagtgttcccaaactactgactttgaagcaaaagcctcc

SEQ ID NO: 38 - DNA, 529 bp, Canis familiaris
  misc_feature (1)..(529): n = a or c or g or t
tgccacagcagattttccatgatgatgtcatgtggcacggcatcccaggggaganatgacactctgctgnnnngcatgcagtgagtttttggatgttatacattgacagagtgcaagttctggggggagaagggagcactcnnggggctcttgctgcttttgnngggtacgtgggacatgttttgacttggttttctgtaagttccatgaaaatggttctcttcanngcccattgtttctgtcatggtttccatctgtcctaagcaagtcattcctttgttatttggcatttcgaacatctcggccattaaaagcccccatattctctgcactgtttggccagcataatcactagnagtgattcaaagcaaagagtttgaacctgacggcatgaaatgtataaatgagggtgagtcctttggcatatactctaatgactatattgctttttctataaaacaacccataagcctttaanctttaaagaaaatgaaaaaggttagtgtttgttgggggggaactganctct

SEQ ID NO: 39 - DNA, 553 bp, Canis familiaris
  misc_feature (1)..(553): n = a or c or g or t
ctatgaagtatgtgnnnnatcaatatttatggannagtagatggcctgatgttttgaaatgggagagggggtaaaannagcaattcataacactcataatacaataaatacttcttaaaatttttattttcctctcacagttatcactaaggaattattatcttaattgattgtgcatattaggatttttttagcctttaccattaaaattacatactagactttgaacctactctgatatcttccagccaaaaaaagattccattcacttcaccatagcaaaataagtagaaatgctaatattcatttaaagctgttacagtaccataaaagtcctctaatttacttagaatttgtaaccattgatccaaggcttaaatggtgtttactttgtactatctgatgaaaagatttgttaatgaaagtcataatgaagattttaaagaaaaaaatgtttgatcttggaagaacgttaagctttatagagcatttatttgagaatatcatttaaaaaaacattcttttgtctttaaacaagtacccaaatggattg

SEQ ID NO: 40 - DNA, 371 bp, Canis familiaris
  misc_feature (1)..(371): n = a or c or g or t
ggtgaaaggtnnnaggcatanngaatccattctccnctctaaggntnnnncagnnncnnnnnncannnnnaaaaaggttgagaagagtcnnnccctnnnnnaacaccctgtgagannnnncaagttggagaatannnnagnnnnggagagcatnnnnttctttgatgctnnnnagtcnnnagacaatgaactcaagcaacaatcccttcagtccnnacattnnngnttnnngtgccttcctcnnnnnagcnnnnngcnctgtnnnnnnnnnncttgtgccactcaaccagaaaatccaccccaggnnnnnncnnnnnnnnnnnnngaaggcnnnggnnnnnncaaagaaaaaacgcagnncaggaaaaagg

SEQ ID NO: 41 - DNA, 121 bp, Canis familiaris
  misc_feature (1)..(121): n = a or c or g or t
ctcctgnnttgggcaagaccacacccaccacatgggacgggtctctcttgagtttgggggtagtgacaagtnnnnnnnnnaccagggctgagggtaccctctggcaccccaccttgtcnnt

SEQ ID NO: 42 - DNA, 594 bp, Canis familiaris
  misc_feature (1)..(594): n = a or c or g or t
aattgtgttacttgaaaacanngatcctgatgagagagatggtgcaaggctattatctttgtgtaatngactcaaattctctacctcttcagggctaatccttataactgagctgctgcctgtagtgtcttttngaaaactacttcaagggtgattttctgttacattttaacaaagtttttaatcaccttttgctacacctattcttttcgtgtgcagccaactttcaaaaattaccagtttggtgaaaggcaaattagatcatttggaaccaggatactaatgatttctcataacctttttttaaatcctaacatgaagtgaatttgactggaaaggcaaatagctattagggaagcaatttgctgttgttacagagttatctgtactttctttgtttaattgaaaaaaatgtagaaatgtatgtaaagaatttaagacaagagtactggatggatggatgatttgtcataggcttttccctttgtttctgttctagcagcaggaaaatagtttctctctatcccctcccctttacctgtaacaattttgttttctgctgttaattacattgtgtatttatagtcctatgct

SEQ ID NO: 43 - DNA, 565 bp, Canis familiaris
acagtgaccccggccaccctggaccgagggtgggagagaggcgtctgtgggacagggagcagcccaggacagacttggctagagatgtctccaaagccctccatcacattcaccttcagtttttgtgttttgggacaattactttagaaaataagtaggtcgttttaaaaacaaaaaatattgattgcttttttgtagtgttcaaaaaaaaggttctttgtgtatagccaaatgactgaaagcactgatatatttaaaaacaaaaggcaatttattaaggaaatttgtaccatttcagtaaacctgtctgaatgtacctgtatacgtttcaaaaacacccccccactgaatccctgtaacctatttattatataaagagtttgccttataaatttacataaaaatgtccgtttgtgtctttttttgtaaaatcaagtgattttttcataaggttcttttactatttgaaaagatgggcagcacgcagttttattttatttttgtaagttttttaatacgtgtgaaagcaaagaatactcagcatgcctttctaagtgacgcgttt

SEQ ID NO: 44 - DNA, 351 bp, Canis familiaris
  misc_feature (1)..(351): n = a or c or g or t
gtagatnnnnnntnnnnncagaggagggggctagngctggctggtttagtctgtaaagcatgggactcttgttgatnnnagcattgtgcgttcaagccccatattgggcgcagagctnnnngaaaaaaaaaaaaaaagttacctggggctgttttgtgtggggatggangntgggaaaagtgagtnactgctaataggtaaaggatttcttgtcagagtgttgaaaaattctatagtgctgatggtgacacaattctgtgaatatactaaaaaccaccgatctgtatactttaaaaggtgaattttatggaatgtgaaatatatttcaataaagctgtaaaagtgaagtca

SEQ ID NO: 45 - DNA, 584 bp, Canis familiaris
  misc_feature (1)..(584): n = a or c or g or t
tttataggtnnggtactatgaggnnactacttaaaaaatctcattttgttatttaaaaggcatttagagcttcaagaatgattttgtacgcgatgttgttttaaattttgactaatctcatagaattgcagtacactttattataagaaaacctgagagtccgttagatgttctttaagaccacaaacaggctggctatttggtcatttttcactttggctccttttaataggacctattgttttagattactatatgagaatttcatggattcactcctggatgcaggatataagaacatttaattcataacttttatattaaccaatgtagtaaaaaacagagctcacacacaaaaactaagttgcctttccttgaatgaatcctgcctgaataaaacaatgaaagaaaaataaaaataaaattaacggtatgtagtctaatttgtaaatgaatgaatattgaaataatacacactgtggatatattttaaggccttatgtagttttaattgttctgcttgttctgtggttatgtctaagactatagtatatgattctcttcaaagtatatcaagtattgtg

SEQ ID NO: 46 - DNA, 626 bp, Canis familiaris
  misc_feature (1)..(626): n = a or c or g or t
acaagagatncngcagacatgtgagatgctacagcagtgtaaagangnattcattgatgacattnctgggnncnnacccctagaagtagagatggcagggatagaatacatgaatgacgatcctggcatggtngatgttctttatgccaaagtccatatgaaagatggctccaacaggcttcaggaattagtcgatcgagtgctggaacgttttcaggcttctggactaatagtgaaagagtggaatagtgtgaaactccatgctacagtgatgaacactctattcaggaaggaccccaatgctgaaggcaggtacaatctctacacagcggatggcaaatacatcttcaaggaaagagaatcatttgatggccgaaacattttgaagctgtttgagaacttctactttggtaccctgaagctcaattcaattcacatctcccagaggtttacagtagacagctttgggaactacgcctcctgtgggcaaattgacttctcctgaggtggatcttgggaaacactataaattgaacatcctcacaaggatctacctttctttctgaagttcctctctggacatgtatgtctcaagctcatnnnngcagagattcacattctctcat

SEQ ID NO: 47 - DNA, 548 bp, Canis familiaris
  misc_feature (1)..(548): n = a or c or g or t
cagggtgtgcaagtcatcctnnacncagtgcacagcgnncggctctttgactggtggcatcctcagtatccgttctccctgagagcatagnnactgcttcctgtcnctgagggcagcgctgagctaggncagtccattagtaatcagatgccagtttggaaggggtgtctggattgtttatctggttagtaatgcacatgctcctctggttcctggggctcctattaggggaaggagaaggattgaatcaagaggaaaaacaactatgatttataaacatattgtaatgtaaaaatttgcatttgaaaggaaaaacctggccctattttctgtgttaaaaccccatttggtgctattgagtttgttgttctttattcttttatcccagcaaaaatggatgatcttgctctagggaaaaattaaacccttcaatctccaaacagggaagtttcagcattcccttgtgatcagagaggaggcttcaaggcctaaaattgttgctattgttacttcccattaagctgcccctcaaattcaagtgaatattt

SEQ ID NO: 48 - DNA, 589 bp, Canis familiaris
  misc_feature (1)..(589): n = a or c or g or t
gagccgagaccgccaggcccgatgcatatggtntctnnacacgctcatcaaatttcgagcacagaaagtgattaagcggaaaagtgccctgggacccggaatcccccatgtcatcaacaccaaattgctgaagcacttcacctgcttgacctacaacaacggcagcctacggaacttaatttcggattctatgaaggcgaagatcactgcatatgtaatcatacttgccttgcacataagcgacttccagattgacctgacaatgttacagagggacttgaagcttagtgagagaaggatgattgagatagcgaaagccatgaggctgaagatctctaaaagaaaggtgtctctggcagctggcagggaagaggatcacaaactgggcaccctgtccatcccgctgcctccagcccagacctcaaaacaccagtcaaagcggaggaaaatcacctagaggtgtgcttcccagataagagcattttggtcacctacagccacttctgttcatttccatttttatttttataataagaaggaaaaagaagcctcgctttgnnntgggtatgaagccagaagccagcatctc

SEQ ID NO: 49 - DNA, 572 bp, Canis familiaris
  misc_feature (1)..(572): n = a or c or g or t
cctgtgtaatannnagaagtagcatttcatatgatctgaagtnctaaatggttctctgatttaannnnnnttaaanngaataggtttcctctagttattggccannnnatgtannnnnngtatattaaggaggaatacaaagtactttgatttcaatgctagtagaaactggccagcaaaaaggtgcattttatttttaaattaatggatcacttgggaattactgacttgaagtatcaaaggatatttgcatgtgaatgtgggttatgttctttctcaccttgtagcatattctatgaaagttgagttgactggtagctaaaaatctgttttaacagcatgtaaaaagttattttatctgttacaagtcattatacaattttgaatgttatgtagtttctttttaacagtttaggtaacaaggtctgtttttcattctggtgcttttattaattttgatagtatgatgttacttactactgaaatgtaagctagagtgtacactagaatgtaagctccatgagagcaggtaccttgtctgtcttcactgnnnnnnctatttccaacgcctg

SEQ ID NO: 50 - DNA, 422 bp, Canis familiaris
  misc_feature (1)..(422): n = a or c or g or t
aattagagagaagagagcnaaagcagaatnnatgaaactagaaataagattaaaatgcaggaacatatctgagaaattagttttagttcagcaggactacagtttgattttcatagtgtggactcggtactgttaactgcacgncttcactggaaacaaagttttctataagggatagtatatgcattggaaaaacctcattaatcacaattattaacaactctaaattctttgatggtgagatcccagtctgtttattctttgaataacctaaaatattgaattatctattaaaaacctgatgaattcctcaaatgtggtagatattattgttcatgaactgggaagttcttggcgtttgagagctcagtgttctaggagggaaggcaaagggtaagccaggagtcacaaatcattatgac

SEQ ID NO: 51 - DNA, 554 bp, Canis familiaris
  misc_feature (1)..(554): n = a or c or g or t
ctttgatgatgatgacttnnatcaccagcttcttcgagaactcatagnncnnaagaccagctccttggatcccaatgatcaggtggccatgnnaaggcagtggcnngcgatccagaagttacgaagcaaaatccacaagaaagtagatannaaagccagcaaaggaaggaaacttcggtttcatgtccttagcaagctactgagcttcatggcacctattgaccatactacaatgaatgatgatgccaggacagagttgtatcgatctctttttgggcagctccaccctcctgatcaaggcccaagggactgaccgcgcctgctgctctggctacaggcttgaggcggggcctccggacacacggatacacgtagacacatggacacgccacatggccccttgcccagccccaaatgtaggaaggtgtcagcccacagcgttggactagttgggaagtcctagaaaggtgtggggttcagagtatgtgcctaatacatcccaggaagcctggaaacaagtgtgcatgtccaccatgctgcagcctgccagggac

SEQ ID NO: 52 - DNA, 639 bp, Canis familiaris
  misc_feature (1)..(639): n = a or c or g or t
cagaacctgctaataaacaggaatggnnagctgaagttggctgattttggcttggctcgagnctttgggatccctgttcgctgttactcagccgaggtggtcacgctgtggtaccgcccaccagatgtcctcttcggggccaagctgtactccacatccatcgacatgtggtcagctggctgcatcttcgcagagctggccaacgcagggcggcctcttttccccggcaacgacgtagatgaccaattgaagaggatcttccggcttctggggacaccgaccgaggagcagtggcctgccatgaccaagctgccagactataagccctacccaatgtacccggccacaacatccctggtgaatgtcgtacccaagctcaatgccacgggacgggacctgctgcagaacctcctgaagtgtaaccctgtccagcgcatctcagcagaagaggccctgcagcacccctacttctctgacttctgccctccgtaggctccaggatcttggccaggctggggcctggcctatttaagccccctcccgggaggggagaaaaagcaggggatgcacggtgtgctgagctccagctgtgctgggcctagccagggtagaggtgcccggcctgtgttcttcactccc

SEQ ID NO: 53 - DNA, 535 bp, Canis familiaris
  misc_feature (1)..(535): n = a or c or g or t
cggctccnnngcctccatccccagctgcaagtccctggcgagcttcaaatccaacgagtgcctggtgagcgacagnnntgagggcagcccggcactgagtcccagctgaggagcggcgtgggcagcgccagccccacctaccaggggcgcagacacctgctgcctttcctcagagttccccaatccaggccacttttccagagaacgctgcccacccagccatgggtctcttgcgaaaggcaccctttgcttcttgcccattttaactttctgcccaagggagcaggagctgcaaagggaagccagttgggccaggacacaggggtaccacagccacagggagcccttgggaaagctcgtcccattcttctggtggccctggcacctggctgacttcctgacttcctggatgacttcgctcatccccaccaccctcctcgggagctggtggtccagcctcagcgtcctaaccccctgcctctccagtctgccctgtatattccctggagtcctcccctctcagcccccggggcag

SEQ ID NO: 54 - DNA, 213 bp, Canis familiaris
  misc_feature (1)..(213): n = a or c or g or t
acactcagaaatgacttgcagttgagtgagtctggcagtgacagtgatgactagagtcggatctttcgaaatcagctcctcgtgcacagatgtgctgctggatcaggctgcactcgcatggagccccttgctgagagggacgcgctatggatcagtgactgtagtaggagtttnnngctctggaggtctnnnnnnttcaagtctttaacttag

SEQ ID NO: 55 - DNA, 601 bp, Canis familiaris
  misc_feature (1)..(601): n = a or c or g or t
acgccgtgtaccagaagatggaccagctgtaccaggggaagatgtatttccccggatattttcccaacgagctgcgagccatcttccgnnagcaggtgcatctcatccagaatgccatcatcgaaagccgcattgactgtcagcgccactgtggcatcttccagtacgaaaccatctcctgcatcaactgcactgactcgcatgtcgtctgctttggctacaactgcgagtcgtcagcacagtgggaaacagccgtacagggcctcctcctttacataaataagtggcacaaacaggacaccaaaacaagaaccactccagcctttctgatatcaccaagctttacatgtcttgagcccccacacctggccaacctgactctagaaaatgcttccgagtgcctgacccagcactgatgaccaccgggtttgccagagcggccctagccttgaggtggagccagactcagctggactgtcccagcctgaccccatggagcaggcctgccgctgccttgagcccctgcactcccatcagagcctggggctgggccgggagcagtgtgcggctttgtcgggcggggtcgcagagctattagatg

SEQ ID NO: 56 - DNA, 571 bp, Canis familiaris
  misc_feature (1)..(571): n = a or c or g or t
caaagangccatcggnnnctatgagcccatagtcaagaagcattatgacaacatcttgaacgtcagtgctatcgtgctggctaacctgtgtgtttcgtacattatgacaagtcagaatgaagaagctgaggagttgatgagaaagattgagaaggaggaaaagcagctgtcctacaatgaccccgataagaaaatctaccatctctgcattgtgaatttggtgatagggacactctattgtgccaaaggaaattatgactttggtatttctcgggttatcaaaagcctggaaccttatcataagaaactgggaaccgacacctggtattatgccaaaagatgcttcctgtccttattagaaaacatgtcgaaacacatgattgtgctctgtgacggtgttattcaagaatgtgtccagtttctagaacaatgtgaactttatggcagaaacatacctgctgttattgaacaacccctggaagaagaaagaatgcaccctggaaagaatacagtcacatacgagtccagacagttaaaggctttgatttatgagattataggatggaatatg

SEQ ID NO: 57 - DNA, 532 bp, Canis familiaris
  misc_feature (1)..(532): n = a or c or g or t
cccccctccctctccctgtgtctcatgaataaataaaaataaaatctttaggaaaaaaaagaagaggagagaatggagaaaactttaaactgcgagactggtatctggggaatggtggggactaaagagccctgcagattctgaagggctgttcaacggtctgtagaacgtctttggtggaagtggtagcacgtcttggctgggagacgctgtagaaactcctactattttctgaaagctcccgtaacagctttaccgaagctgtgaacttttcagccaaatgttgatttttttgacagtggatgaactaaacacatttttgaaaagcatggatacaactaatcgttctctctttttatttcagataaaagaagtaaagctttgaaagcctcgagtcctgcccctgctcatggccatcattaaccagctcggggaacacatgagatggaacgtcagtctggttgtaaatctccgctcgccaggaacatggagccccgatatacacgtgtacgtgtgtcgnnnnngctgaggc

SEQ ID NO: 58 - DNA, 554 bp, Canis familiaris
  misc_feature (1)..(554): n = a or c or g or t
gatttcagctcaggtcatganctcagggtcatgngnnnnngctccaagtcagacnctgccctgggcaannngcctacntaggntnnnctctcgctcnnnnnnntcctccctcaccacctcccccannngagtttctctctctctctctctctaaaaaaaaaaaaaaggtccagcctctcagtttccataaggatggatctgcaggcccttggtcataactaagcatttttgtatgttttgaagactttcctaggtcttttttctctccttttttgctttttaaaatttgctctgcttggaatattagcaaggtagtgcagccagaaagtccagcacagaggtcttctctattttcactgcttttcttatgacttttaaaattttaagtcaaattcaattaacatattattggtttcagaggtagaggtcagtgactcatcagtcttatataacaccagtgttcattacatcacatgcccacattaatgcccatcaccgagtaacccccaccatccccgtccccttcagcgaccctcagttcctatgattaagag

SEQ ID NO: 59 - DNA, 394 bp, Canis familiaris
  misc_feature (1)..(394): n = a or c or g or t
ctctcaggactgtcctctttccacagaggnnncatttttccatggaatgtgcagaangnactgggttggnntgtagaggtgaggaggggataaagcagtgattaagaagaagaggacttcacaccagcttcaaccctttggnnagacatctttattctgtgcatctgaagagaacagcaccagagtaaggccaacattaagcttgaagaatcagagtttggcattcaggaaaaaattctgatgaagcnactatccatggagaaaaagaaagcaattaaaataattttaacaacagagaggctcccaaatttgtggataagtttggacctagctgtgcttggatgcacaggaaaggggaagttatgtttggaagtttgtctctgcttcctcagat

SEQ ID NO: 60 - DNA, 561 bp, Canis familiaris
  misc_feature (1)..(561): n = a or c or g or t
angatgtgctgacattnngcntcatctnnatagctcatcccaggacccgagtgaaccttgccatggagcatcttctttattttggttgaatgtcttctttctgcctatttgtgtgaagccttatttttataaagtcagctatgttttgtaatcttgaattcttatagtttttatcataaaattatataaccctcctattggaagtttgaaaaatagagaaaagagaaataaccactctaatgcaacagctactaatcatattattatatctcatggcagtcttttcctgtggatatttttaatgccgttttaaccttgaatttgtgagtgaagggttgctctaaaaatgtagaaataatgtgagatcagaatctgatctcctatacttggatttaaatggattaaaaaaatctctgatggatccgtaatgaatttgtaatgattaccttctctttcctctaggctctaaaactttgttcttcaaaagagcgtgtctttgatgtttgtaaagccggtnnnnnnaagtggaagtattagaggagccatagatctcctatattt

SEQ ID NO: 61 - DNA, 384 bp, Canis familiaris
  misc_feature (1)..(384): n = a or c or g or t
ggcatcagaacaccagacnnnaccacttggtcgaatgtgccccgtcaggtggtagccattccacctgtgnngggtcacaggcgctcaggaggtggaggatgggggagaaacactgcagcctgggcgtgcgcacagcctgatagtgaagtaggtctgctcgtgcactgaatgaagacacagacttgatcattctattcccggttagactttgtcatctctgctgagacaatagagtttgaaatataaaggggaaagcttgatttactttaaatactgtgaactctaatgatatggaaatatttttcaactttaattttctgaagtataaattatttatgtaaattccttgtttttgcatattnnntaggacatgcatctttaagc

SEQ ID NO: 62 - DNA, 479 bp, Canis familiaris
  misc_feature (1)..(479): n = a or c or g or t
ataaagaaaaggagagactgagtgatgaactacttataaaatcagacctggaaactgtcgttcatcagcttgaacaagaaaagcaaagacnnaacaaaaaaatggaaagttttgcagttacagaaagagaacttactctggaagttgaaaggatgaggctagaacatggaataaaacgtcgagacaagtcaccctctcgtttagatacatttctgaaaggtatagaggaagaacgagatttttacaagaaagagctagaaagactccaacatataatacagcgaagatcttgctctacaaattattctacacgtgaaaaaattccaatatttaaaacactagaaaaggtaatatctctctttaaggatgattgataatcaggagtgtatctttatgaacaaactttttcggtgttattgtattaaatataactttattcatacttgttttttaaaagtttttcttggggatccctgggt

SEQ ID NO: 63 - DNA, 558 bp, Canis familiaris
  misc_feature (1)..(558): n = a or c or g or t
gcagcgcangctccaaaatacagtcgngtcagtannnnattgacaaccctnnaanccttttctgcccctgggagtctgcccttcccgaccagggctctcctggggcctgtgggcagccgggcagttccagccatctccccgcagacgggtttggcgaggacttggtggcagtcacagaagacttccagggcctgctggcagaggtggggacccaggctgagggcctgcggggcttgtccaggggcctgtgcgaccagctgctggcaggcctggtgcgggtgctgcaggaggagccagccctgcaaaccctggaggaggcgctggaacagggcctgttctgtgggtgggtggcacccctggaaggtccggtgggcactgtcctcgagtgcctggtgcatacctccagagcactagaagagcaacttgccagacccgttctctacctggtggacttgctgactgggctgagtgaaacccagctctccagacggcgtggggctcatgcccacctggctgcccgcaccgggaaggcgagagccccacccagccgtgcggcca

SEQ ID NO: 64 - DNA, 712 bp, Canis familiaris
  misc_feature (1)..(712): n = a or c or g or t
tngaagacataaaaaaaatnnatatatttattaatnnatcatttaaattgaannagacangcagtagtagagcataacagggagacttatttggggtagttgtcagaagctacaccagtaataataaagaaaatataaacagaacttaatagaaacgagggaaatgtaatataaatattaacaaagaaaatttaatgtaaggaacatttcatataaaatttaatataaatgtaaattgagtattggaggcctaaaaaagacaaacagggatcactaagttgttagagaagtagtaggcaccagaagcagctgtatcgccaggccttggggaacaataacagttgggatttaaagacttttagagcttggaggagactcctgtagagctggaatcgaaaactctgaagagggcagtttggtgagctggactagtgtctctaaagggatgatgctggtcctggaaggtttttagaagtttgagttagacatatgtggaatttaggaaacaaaacaggatcatagcagaagagaggaaaacataaaatgaaaaaatcagagagggagacaaaccatgagagactcttaatcataggaaacaaactgagggtctctggaggggaggagggtgggtgacagggtcactgggtgatgggcactgaggagagcacatgatgtcagaagcactgggtgttatatgcaactgatgaatcac

SEQ ID NO: 65 - DNA, 380 bp, Canis familiaris
  misc_feature (1)..(380): n = a or c or g or t
acacagtaggtanacgacatatttgttacataactagaatgaatggatnnacctagaagttacntcttctgcatgactttcattcactaaaaaagaaagtaaagggagataggattcttattctgacaaatcacctgaagtctcattaaatagtatataatgttcctctaaaaacaggaaaatatatcccattagcttatttgtttttttaagagtttagtcagctgtttgtgccgtctaatcgggtaacctcaagttcatgttactactatgacaattagcccattccttgtatctacatgcttttctgcttaataggggcttttaaatatactacgtgcaaccagctgaatgaaacagcaacctctgaatcttaatac

SEQ ID NO: 66 - DNA, 598 bp, Canis familiaris
  misc_feature (1)..(598): n = a or c or g or t
gaaatataatcttcatcctggtgtaacggattacatggntnnnnntctagatgaaagtgaaagtgctgcttctagtcgagcaccgtcccctcccccaactgcctcaaacagtagtaacagccagtctgagaaagaagatggcactataagcaatagtaatcagaatgggatgtcatctaatggaccaggggaaatgttgaacaaagaagaaatcaaagttgaggggttacatgttaacggaccagcaggtggaaataagagaccacttcatgcagatatggatactaatggttatgaaacagacaaccttaccactgaccaaaaacttggccatatgactgcaagaaatgaaaatgattttgatgagaaaagtgagagacctgccaaaaggcgaagggtaaacagcaatggaaaagaaagtccaggttcttcagaatttttccaagaagcgatgtcacatggaaaatttgaagagcttgaaaacacagatgactaaatcttaaacttattttactttctttggagtaaaatctggtgtgactaaaattttcagggttgatgggttaccttaaaaannnnatttccttgaagcagttgg

SEQ ID NO: 67 - DNA, 653 bp, Canis familiaris
  misc_feature (1)..(653): n = a or c or g or t
tgaagaaganggtagtnnncgtggtnnnagtgnnagcaatgaagaggatnnntnntgcnnacaccaaagctgtgaacagaaagactgcctggccagcaaagtttgggatatcagcctggcccagcctgagagtatccgtagtgacctggagagctctgatacacagtcagacgatgtgccagacatcacctcagatgagtgtggctcccctcgctcccatacggcagcctgcccctcgactcccagagccccaggtgcaccgagcccaagtgcccatatgaacctctctgccccagccgaggggaagactatcttgaagccagaaggtgcagaagccagagtatgaagtggaatgaatgctgttctgagaagcacacttgttgtaactgcatcttttggaatctttttttggggaggcggggacttatgtattttatttcaaagattctctggtcacaggttttccccagggaaattctgagaaatttgcagtttcttaccagataaaacatggagatttttgcccttagtcctaccccccaacccctccctcctttttttagttttaatttattggttaaattgatggtggcaatccgtgagatgtgtcaaagagtgtacagatgtatgtgtgtatattgtatgtatgctaa

SEQ ID NO: 68 - DNA, 512 bp, Canis familiaris
  misc_feature (1)..(512): n = a or c or g or t
aatgtcaaggtctcaacacttaaaggaagcccnnngtcctcccccaccccccaccccccgcccgggggagagactggcgaggggacaacctagactcactgggccatggttcatggccaaagccatgccataccctatgggtatgtatccaagtgtgtccttgtggggcctcgcccccggccaaaaccaagccagccccactcctgtgtcatcagacatcttgtctctctgctcccgaaggcacttccatcccccccaccctcaaccccagctccctcctgcgtttctgagttctgtttgctcagaattgtaaatgtttagttgtgaccatgacatattgtttgggtcagtgtttctttccaatgcatactaatatattatggttattatatatgaatatatttaatgacatggaaaaagttgtggattttcttttttttttaagttttttttttttcaggggggggttagagttgtaatggacccagatggaacttgtaacgtgggcnnca

SEQ ID NO: 69 - DNA, 551 bp, Canis familiaris
  misc_feature (1)..(551): n = a or c or g or t
atcatcatgggcacacgtgacgatctctatggggctnnnnaaaagctgtgctgtgtgcaggctcntgtgccctcacaggtcatcaatgtccgaaccattggtcagccaaccaggcttcggagtgtggcccagaaaattttacttcagattaattgtaaattgggtggtgagctctggggagtggatattcctctgaaacaattaatggtgattgggatggatgtttaccatgaccctagccgaggcatgcgctctgtggttggctttgttgcgagcatcaatctcactctcacaaaatggtattcacgagtggtattccagatgcctcatcaggagattgtggatagcctgaagctgtgcctggtgggctccttaaaaaagttttacgagaaatggacaagttgattttccaattcatgtggaaatgtaaaaagtccagaataagcaaaacaattttgaaaaagaagagcaagttgaaggactcctaccttctgaattcaaaacttattaaagnnngaataagcaagacnnnnnntactgatatagagata

SEQ ID NO: 70 - DNA, 674 bp, Canis familiaris
  misc_feature (1)..(674): n = a or c or g or t
cannctgaacccggactcccagggccaatgcttacatctgacaaatgatgnnnngagctatgagcaaacaggactatatgaacacttcggtgcaagagcccnntcttgactactccttccgaagcatccacgggatccaagatctgacaagcgaggagccacggtcagggctacgaccactaaggcactcaaagtcagggaagtcactgacccagtccctgtggctgaacaacaatttcctcaatgacctgagagacttcaaccatgtggtttcactgcttctggagcatccagagaacctggcctggatcgacctgtccttcaacgacctgacttccattgaccctgttctgacaactttcttcaacctcagtgtactctatctccacggcaacagcatccagcggctgggagaggtcaacaagctggctgtcctcccgaggctccggagcctgacactccatgggaaccccatagaggaagagaaggggtataggcaatatgtgctgtgcaccctgccccgtatcaccacattcgacttcagtggggtcaccaaagcagaccgtgccacagctgaagtgtggaaacacatgaacatcaagcctaagaaggtccggatcaagcagaatgcactctgaggatcccagggcccgaccagtcctaaaggcctgagg

SEQ ID NO: 71 - DNA, 435 bp, Canis familiaris
  misc_feature (1)..(435): n = a or c or g or t
tgtttttttcttccattttnnacatangaagtgtaagngatgngactgnnacaaaaatgcatacattatatagtnnncgtagattccaaacagaatttagactcctttatccttcatcagnnnnctaatccttgangnaaggacaacttaaaaaccgtggttctgacngaacagggcccatctccctcccaggtactnnnangagaattctgttttatncagaagttatttatttggttggatttcatttctaacaatacagatanngaattattacgtcatacannnnnnactaatatgttgaacatcaannncatctcaatataaaataacagtcccagannnnnctgggtggcttgtaggtaggttaagtgtctgcctttggctcaggacgtgatcnngcngnnnngggatcaggagcaaggtnnntgcatc

SEQ ID NO: 72 - DNA, 491 bp, Canis familiaris
  misc_feature (1)..(491): n = a or c or g or t
tggnctgcttgtttgcaggacagcgagagcacttctgtcgtcttaaaggtttttctgatcgaagctttaatggagcgttatttatttatcgaggcctctttggcaagcctggggcaccagcaaagggtaggagggatgtggggctgttgccccaactccctatagccctgagcagggcaggggtccctgagctattctttgccctcctccgaaggagctgaggcctgagcggtttatttattgggaaagtgagggagggagccagacggacggaccgactgactaacagccatgggtggatcaagggggtggtccctcccctggggtcactacagggccccaactgccccccaggatggatgtgagatgcgagaggtgagtgggggaccttcactgaccgggtgggtaggaggggtggctgaagggcttcccctggcccagactgcggggagggggggccctctgtcccgctcgttgctctgccccactcn

SEQ ID NO: 73 - DNA, 513 bp, Canis familiaris
  misc_feature (1)..(513): n = a or c or g or t
tcaacgcgcgcatcgactcccacagcaagatcctgtatgccagnnacgtggatcagcgcagcaccaccttcgagaagtccctgctgatggnnaannagttccagagacgtgccaaagcgatgatcctgcgggcggccgtgcttcgcaaccagattcacgtcaagtccccaccccgagaagggagccagggggagctgacgccggccaacagccagtcccgaatgagcaccaacatgtgagggtgcttgtcggccttcagggcggtctacactcccgcgcccccaccttcggactcacccacaggctcctatcgctcgtgcgtatggcccttgtgcaggtcccccccacccccgggcttccacatccagcttcttgtgctccctccaccctgttccccacgctgggggcctggcgaagggggctgctgctcgaggcccttcctgggaggagagagctgtggggcccaccgtgtgccccccactccgaggcccagcctccctgttgtcgcgtcat

SEQ ID NO: 74 - DNA, 440 bp, Canis familiaris
  misc_feature (1)..(440): n = a or c or g or t
cattccaacttgtggctctgctgttccacttgacctgaatccccctttctactttctctgtcatcatatcacttctggcctcatggccacatacaggaatgacagtggccctcatggggccagatttactttcctaaagtgtcatagctttcctttatttttaaaccttccacacacaaactactgatatacacaatatgcgtgaatctcaaaacagtcatgctaggtgaaagaagccagaagtaaaaggtcacatgctgtgattccataagtatcctggacagggaacagaaatcagatcagggcttgccaaatgctgagggcccaggcttcactgcaaagctacacaagagaactttttggggtgatgcaaattctctgtcttggtgatgatggtagnnnnnncatatttgtcacannnnntcaaactgaacaccctg

SEQ ID NO: 75 - DNA, 549 bp, Canis familiaris
agaaactcaagatgatcgtgaagattctgctaacagatatgcatctgccctccttccatctgaaggatgccctgactaccatcggggagaaggtctgcctggaggtgagcagttgccttgccctgtgtgggctcactcccttcaccgcggaaaaggaggccgtgctcaagggccagatccaggctgtggccaatcccgacgaccccatccgcaggatcatggattcccgaatcctgatcttcttagagagctaccttgccacaggtcatcagaagccagtgcccacggtacccgggggattgggcccggttcagagagagctggaggaagttgctattaaatttgtgcgcctggtcaactacaacaagctggtcttcagtccctactacgatgtcatcctcagtaaggtcctcgtcccgccctagcgcatccgcgctccgtagccgctgccgcagtactagcctcctggtccagtacctgttctccaccataatgttgctttggaaaatggctatttagtacatctctgtgtaacagccctgattccaa

SEQ ID NO: 76 - DNA, 515 bp, Canis familiaris
  misc_feature (1)..(515): n = a or c or g or t
acccccctccatnnntcagggctnngttttacatctacatnnattccagagnnactgcgcntgttcttgctactnntcaagggnancctgcaggtacttggccatagnnttgagacgtggngaaaagatccttgtgttggtcntagttcctgacacccaccctcccccggccccttccagccctagagaaaggtagtaaggtagtgagcattcagccaacccaagatcctttgtgacccaagatccctttgtcactggtgtcactctcctaactcacttgctgctcccatcccttacgcccctccaaaacctaagcaaaacaaaacaggatcttatggaactaggtaggtgaaggatgatcacattggggtttggaattaaaaacaccaaaaaaaaaaaatgcatttggttctctctacactggctaagaatattgctctacactgtaagttttaaatgtcctgtttctgtatgaatgtagtgtgggtttgagtagcgttgtgtgagcggcccca

SEQ ID NO: 77 - DNA, 669 bp, Canis familiaris
  misc_feature (1)..(669): n = a or c or g or t
atttgagaaaatcttttttgccctgttgttcatccatnngtagaaattttcagatctctannnnncacttactggagacctgaaggtattttcccttataagatggactttctcaaaatccgaggactgctcgcttggtatactttaaatgttaatgtttaatttttaaattttatttaagaggattaaagccctactatgtttattttcctactttctagaagctattttgtgtccttgggtggaggagacccacctccactaagcgtgacttagcttttccattctacactcacatcttgaagcgaagtgcttgacactagatgcgcgctcagatgttagcttccctcctgccacaggctggcccaggacctggcctctgctgggggcagatgtcccacagcgcctcgggttggcgaccaggcaagggcctgcccacactcagaagctgggcaagattacccatgggtctacaccgcaccgtaggccctgccattcctcattcacacagagtcaaatgagcaatctgtcataaagcagagaaaataccaccttctagtctctgctaataggtacttctgcaattgaaggttaatgctattaaattcattcactgcataaagaaggtggggcagtttactcgtaattttcagatatagatagtattcc

SEQ ID NO: 78 - DNA, 571 bp, Canis familiaris
  misc_feature (1)..(571): n = a or c or g or t
cactgcctttgctgcccatccctccatttnnatgcaggntnncgggtgnggacagagggggaacccctggagaagcagcatcccggcttcatccagaggagagggatacctgcttccagagcatggcagaaggagctgtgcatgcttacagcatcgtctccccttgggagccagcccggcccgtaggaagcctactttctaccctccctgctccccgaatcccagcacttttttgcagggcccgtccctgggtgcatgagctgtagggaggggacaaggagaggcctacagaggcctagggcactctgtcatggggtgggcctggtcccattgcagtggggcctcagccccctccggcattgccagagcctctgtcttcagcccagctcctgtggcaagtccttccctgtgacctacacatgctccgctggggtgtggtgggggggagagaggggtggtggtgattagccccaataatgtgtgtcccaggccccaatctactttcttggcagtgaatgctacaatatctgaatcagagggttattgtattcaagaaagacctgcagatcat

SEQ ID NO: 79 - DNA, 387 bp, Canis familiaris
  misc_feature (1)..(387): n = a or c or g or t
anntgaaatnntngactcaaagaagtnnnnnctttgtnntnngttatngaaatattaattttatctggaataaagattttttttttttaatttcaaagtcaggtttatcagaagggatgagaatagtaaatagtgaaatgggatatgatctacatggttgtcatggatattttgtaaatttttccacaatcacatttgtagaacagtaatactgagctttagggttctatatagaccttgtattactttcatccagtgtgtagactaatggctaatcatagggaccagaagtaatcaaagttggaaaggataattgtcaaaggtgtaaataacgtaggatagaatagtgacgaatcagaatccttccnnnnnnngtcacttactagt

SEQ ID NO: 80 - DNA, 535 bp, Canis familiaris
  misc_feature (1)..(535): n = a or c or g or t
cacagnggcatttccatttaacatgcaagagctggtactcaaggtgaggatncagaacccatctcttcgagaaaatgatttcattgaaattgaactggaccggcaggagctcacctatcaagaattgctcagagtgagctgctgtgagctgggggttaatccagaccaagtggagaagatcaggaagttacccaataccctggtaagaaaggacaaagatgtcgctcgactccaagactttcaggagctggaactggttctaatgataagtgaaaacaattttctgttcagaaatgctgcatccacactgactgaaagaccttgctacaacaggagggcttccaaactgacttactgacacagtggggacttttattgctgagtactgtgacagtgtgnagcacctctgggccaaggccaagccatggatctgaatgccttgggctcccgggagggccccggtgccactgtgtagtgtacactaacatggttctgccaaggtaggaagcccctgacacccaccccaccccccagc

SEQ ID NO: 81 - DNA, 662 bp, Canis familiaris
  misc_feature (1)..(662): n = a or c or g or t
ttgccaannngctcannntctctgcacgtgtgctcgannntcnagannnnaaagctgtgggcttgatcagccatgttctagaacagaaccaggagggggatgctgcctaccgaaaggccttggacctagcaagagagtttttacctcagggacccgttgcagtgagagtggcaaaattagcaattaatcaagggatggaggttgatttagtaacaggattagccatagaagaagcttgttatgctcagactattccaacaaaagacagacttgaaggtcttcttgcttttaaagagaaaagaccccctcgctataaaggagaatagaagacacagaaatctttccaatgccagtgtaataaatatacttctggaagtatctttcagatccacgtatgcctccgcacctggaatcccaataaccaaagtgaagagcgagttctctgtatagtgaattgagcatctggagtggacccctctgtgtactttgttcaaacgtgcatcacatcatatccattcagatttataaagctagtagtgtatactgtcaaaaacagattcaaacttacatacacatttttaaatatttcctgcatacgaggctttctgttcttaattttttaatgtgaataatttatatattgcacactctaggaaataata

SEQ ID NO: 82 - DNA, 657 bp, Canis familiaris
  misc_feature (1)..(657): n = a or c or g or t
tacatccactcctgccatctccnnnnggctccacnctgaagttgagaagaagacccctnngcangcctttgaagannnnnaggnncagctgagcccagctctgtactttgctggcagcgaacagaaagaggaatcttgcatcctttctgcagaacttggagaaaaatgtgaagccatagacaagaagttactgtacttagaagatcagcttcacacagcaatccacagccatgatgaagatctcattcagagtctcaagagggagctccagatggtgaaggaaactctgcaggccatgatcctgcagctccagccagcaaaggaggtgggagaaagagaggctgcggcttcctgtgtgacagctggtgtccgggaagcacaggcctgaggcaggacagcatgggaggaggagggcgagcagccacgtcagcacccgaggcctctctcacctcccctgcatgacccaggtgcctgaatcaactacagacacagggcctgaatttggagggggatgatctgctggatttccttccgaatgccagccagaggtacctttcccaagtcgttcatcggagagtcctgcaccgaacttgaaaatcttctcgtctcagttcccattagacagaagttggggttgaattctgctagaaaaatgtc

SEQ ID NO: 83 - DNA, 539 bp, Canis familiaris
  misc_feature (1)..(539): n = a or c or g or t
agggggcggggggcgttggtgagcagnggtggctgggcagagnnnngcctgctcgcatggggtnntgactgctggcggggnaggcggggggggcaggcaagggtcaagcacctgctgaacgccacacctctggccacaccagatgcctctgcggtcctcacccgcctctccagggtccctcccagggtgacatcctttcacactgtccccggccagggtcgaggaccagatgtttcaccaaggacctgcatttcaaacaatttttttaaattgttatacaggaagagatgtgctgaaaacagcatctcaaagttgagtgtgtttctttgcactgggggcattttaatgaattcttctttcattctgatctttgtttagccaacagaagcatccttttctaacgtcttccattctgacccaccccagaaacaaaagaaatattatttgtagcttgctatctatctgtatttgaatttttagcaattttatatttagatatcnnngaaaaatgtaaatgnnnaatttggtcattaaatctt

SEQ ID NO: 84 - DNA, 310 bp, Canis familiaris
  misc_feature (1)..(310): n = a or c or g or t
gggctgtctgccctttgacccaatactttttattatagggattnacacagataantaaaggtgttctgtattgttgtaccaaaatccctgaaatatcctaaatatgaattcataggggatctgttaaataacctatggctcgacagtgttttctgctctcaaagtaacgttacagaaacaacatactgacatggtgcagtgtttatgatcatagctacaggtggtatgaccggactccaggtctgagaatagccacgtacgtgtgggtgtcagaaaaaggttgggggacgcccaggggctccgtggtgga

SEQ ID NO: 85 - DNA, 510 bp, Canis familiaris
  misc_feature (1)..(510): n = a or c or g or t
gtaaatacagnctattttatctgttgctaccataaaatacacataaatctattataaaaagttaaaatttatcaaaacgtacagaaatacttaacagactatatatgacaccatttacagtggagagaaatggaaacaaatgtgaaaatgcagtattaaatcataactgcataaaattaattatagcacatactgtataccaccataatcatttcctagctacctcctgttgctattggcattgaactcatgtgtcatgagtatccgtttaaaatgtcatgtgacagtaatcatctccacttgagcagtttgtctctgcagtaaattgtggattgtagtaaaaagtgatccctcgcagttcttttatacttttcataatgttgagtgcaatatcctaaaccttgaataacaccgtgggatccatccagggagccactagtggtgcttgaagtgctcctaggaagcagagaaaagtcatgacaccacaagaaaaagttgaattgcttgatg

SEQ ID NO: 86 - DNA, 343 bp, Canis familiaris
  misc_feature (1)..(343): n = a or c or g or t
tcataatcnancagaagacccacactggggaaangncatataaatgtaatgagtgtgggaaatttttcagtgagagctcannnnnnnnnngccatcatataatccacacaggagagaaaccctatgagtgcaatgagtgtgggaaggcatttnnccagagctcttccctcagtcagcaccagaggattcatactggtgtgaagccctatgaatgtagggagtgtgggaaggnnttcaggtgtagctctgctttcattagacaccagagactccatgctgggnngtagccagaaatangaccaaggtgggtggggaatctagcnnnaaatgcaagtagtttgaa

SEQ ID NO: 87 - DNA, 486 bp, Canis familiaris
  misc_feature (1)..(486): n = a or c or g or t
cgcacaagtcctcaccanggnnnnntccttccactgnnnnttctgtttgacgtcgcattggcgtagacccatactgcnnnnnngcctgngtnntgaactnnnannnngtgaatttttaaggaactctgccctaaatnnagaaccgcaggctgaggtatgggctttaagatgaaaggtatcagcctccctcaggtacaaagtacctggatggacatccgttttgcagcagnncttttctaccctaacactggtgaccttttcaggccgagcataaggccattcttactatgtgacaaagcgactacagctcccaccaggagccacacatcttttcccactgacagctcctaccctgtggggaactgtgctgacagttcaccaggcactggagccataaggagaaacaggaattcaagttcatggagaagactccccatctagaagatggggacccttatgtgacagtcaaaaacacctttttataca

SEQ ID NO: 88 - DNA, 520 bp, Canis familiaris
  misc_feature (1)..(520): n = a or c or g or t
tgtcccctgcccaggcccccagagccagggttgtcnttctaccccttccccctcaaacnnnagatcttcctttgctccgaggcgcccccttggagcctgtgttggtgtctgtccatctgtctgtcctaccctcccgcgtccaaccctggggcgtggacagggccggggctacggccgtggctggtggcctcgccccacctatgttgccccctccccaccccatcccgtccaacgtctgcgcggatgtagcatgttctacgtatttttaaacgaagacagaaagcgacggctccccacccaacacaatcccaaaagaggctcagagggccccccggatagccccagagcctcccaccccactctcacaacgaccccaagaatcttttttttttttagccaaagccaggagccaggctgtgccatgtcccctccctcagcctgcccagtccgaacgcgggcgtcgtgtgtcgtgattgtggcatggagagtcccccaccccccgtgtgagcgtgtcctgggt

SEQ ID NO: 89 - DNA, 491 bp, Canis familiaris
  misc_feature (1)..(491): n = a or c or g or t
gtcgagcccagctccgcttacagcaataaggcctccgatgtgctctgcccgnnagccgggcagtcccagacgnngtgcggcccgagggcatggacgccacaggctccgagcgtccgtttttactgattttttttttaaacaaacgcaggaaagagccacgtgtttgcacttttgtgtccagccagagcgaagggcctccccggccctggggacagacgtgggtctggagctggactggccgtgcagggccgtagctgcccggggagccagcccagagctgggctgcaaagttgactgccttaaaacaagcccctcgtggccgagtgggcagtgggggcacctggcgggggcaccagggcgcagagacgggcttcagcagtgccaggtggggcggggtctgcgcctgtgggagggcagggccaggtcacggggtcctgggggggtctgcaggnnnnnnttgtgttgagtccnnnnntaatgttctgatcatc

SEQ ID NO: 90 - DNA, 486 bp, Canis familiaris
  misc_feature (1)..(486): n = a or c or g or t
tggtnngaaacaaattaggagtngaannnnaaagttctattttcattggcttcctcaccccggaacaggtgctgacctgccccaacccctatcccccgctacctaaggtttaggggtcaccagcctgtaaagccagtaaggctcactgagccaagtncaggccctcaaagtactttaaccactgtggccttctctccttcacctagaccagagtggtctcacatggccacagagggatgcaccaatgatgtaaaaggctgagactgttttaacagtcagggcagtgatctcaaatccaggccgttatgtgagaaaacaggcttacggaggacaggtcacagagtgtggcaaagcttacatttcaacccagtgttgtagaattccaacctacatgtctatctttgttactttcgtcttcgcgcccctttaccaaaagcattttctttaattatgccctacatctgtatcctttctgggtgtgccagt

SEQ ID NO: 91 - DNA, 561 bp, Canis familiaris
  misc_feature (1)..(561): n = a or c or g or t
agtaaataacatgctatgaaatnnggctctnncttttnnnaaacaggtttctccagtgagctgtgtcaacaaaacatagaaagggagacaagtttacaaatttcctctatgggaaggagcaagatgtcagattttgagttnnagtcaggctgccatccaaggtgtagcctttccagcttttgtgtgcctagaaatgtagtgaagtgaattttcagaaaatgcaaacattattaaagaaatgtaatattcactagataactcatagaagcaatgctaataatggattatataccagaaatttgtaactactaacagcaacgtattttcactctcctgttacctgacttaattttttgacttactgaagaaaatcagttccaagaaaaattaatttaaaacgatgagttcatttaaaacggttaggtccttaataggaaagaccacactagaggcgcctgggtggctcagtcggttaggcacctacctttggttcaggtcatgatccccgagtcctgggatcaagtcccacatcaggttccctgcagggagcctgcttctccg

SEQ ID NO: 92 - DNA, 546 bp, Canis familiaris
  misc_feature (1)..(546): n = a or c or g or t
agggtaagtgactctctagtgacggggtgttgcagtggttgtggcantcacccgggtcactagagtagttaccatttcatcacgtacagtgtccacctgaaagaatgaatgcagcttctccacatgccttattcccgcagacacgctgatatgctggaacaatctggctccaggagtattaatatacttttttgagactgtctacaagatactattttgtaaaaactgcctttaaatagacactgatgggttatatttgttttataataattgtgtacctaatgttcacttgaaattgattttgagatttatgtatatttataagcctgtcctatgtgaatttttactctaagatgtgataccttactaataaagacatggatttctatttatgtaaagtaattgtagcaatattcctagatgctacctaaacgattgttctgtccatttgccatctcaagatacttttatctttagaggattatgttacagttagaatatatatgagctaggttaaaactttaaaatataaattctcaacatggt

SEQ ID NO: 93 - DNA, 169 bp, Canis familiaris
ttcttactgttgtttcctgcccagaggacacacttggggtgtgcggagtgccgcccactgcttgggaccctgaggatcaccttgcaacccccataacgccctgcttcccacaggtttttagcgttctatcgtcctgttgtgcatcaccccaatatcccagacctgttac

SEQ ID NO: 94 - DNA, 662 bp, Canis familiaris
  misc_feature (1)..(662): n = a or c or g or t
agataagaggaaagaaagggnctgaaaattgaaccagacccagagcctgaattattcaatgggactggcatcacacaaatgtaatctacctttcatgttttgatagaagaaaagcaagcagtaatgtctctgggaagacaatcaaaacagattcctagtagaagcaaagcacattttcctccaactcatccttcctatttgttgaattttctcagtctcatgaagagcaaagtgggtatggaaagcttccagatgtctctctgctaactcctacccctaatctgctcactgagaagggaggagatgcgagaaatgggttagatttactaatattttattggattacaattccaaagggctatgggggattttgatggtatcaagggttagtgagactctatgcggcaggcattctctttggttcttctttcctccattagactagagaaagaagactgcctttagggcctgatcctcaacaaataaggtccacagtctctgtcttcatctagttataatgcctttgaactccttttctcactgtcttaatttaaacttatgttacgtcaccattggaatgttaaatctcaggcctggacatgaaattagggagaaaagaatagagaaaatctttctataagagagtgctcaattcaacttcc

SEQ ID NO: 95 - DNA, 532 bp, Canis familiaris
  misc_feature (1)..(532): n = a or c or g or t
tgtaagttaaactctacatagattaaatcgnacaacaaaaccatgtgcagtgtgtggaatgagaaaaaaatatatatatctatattttttggaaaagtttgcttgtgtttgtccaaaacccaggtatggtatgtaagttagagcagcaggcacgatcctaacatctgcgaggtagcagggatcacgtttctgtgtggctacgatagttttactagctttttcgttgtcttcccatgcattgaagttgagaaaatgattttccctttgcaggttgcacacacttttgtttatgcatttccttaaacttgtagaatccaggacacaaaccatagtaggcaataccattttagaatgtaatatacggaggtctctctagcctcttttagaagtcagtggattgaatgtcaggttttttttaaactttcacattcattaaggtgcctcgtttttcttgactttgtccattaacatttatccatatgcctttgcaataactagattgtgaaaagataacaagtgttgtaataataat

SEQ ID NO: 96 - DNA, 679 bp, Canis familiaris
  misc_feature (1)..(679): n = a or c or g or t
ctgttgtggtatcannaaccattacagggctgactgaaggcgagcatggattccacgtccatcagtnnnnagataatacacaaggctgtactagtgcaggtcctcactttaatcctctgtccaaaaaacatggtgggccaaaagatcaagagaggcatgttggagacctgggcaatgtgactgctggcaaggatggcgtggccattgtgtccatagaagattctctgattgcactctcaggagactattccatcattggccgcaccatggtggtccacgagaaacgagatgacttgggcaaaggtgacaatgaagaaagtacacagacaggaaacgccgggagtcgtttggcttgtggtgtcattgggatcgccaagtaaatattccctaggatgcgatctgagttctagttaactcctatgttatcttgctagtcgtagaaatttaacttgataaacattaaacattgtaaccttaaaagtgtaatttgtgtgactttttaattgctttaagtacctgtaatgagaactgatttatgatcacttggaagatttgtataattttataaaactcctattcagttaaaatgtatgtttcaacgatctctgtattttgccaggcttaatcatatatgggtattaaacttaattgtctgaatttcttcaattctcattcaagc

SEQ ID NO: 97 - DNA, 696 bp, Canis familiaris
  misc_feature (1)..(696): n = a or c or g or t
gtgtattgtatannntccagnnnncttcatttctgaattgaattttcttttcttgatgtccgtctccttcatatcanntcaaggttcagacttgtgaaggaacaagtatgatggggataagagtcttgaaaggagacctactgtacgtaatcagaagaagaggaaagaaggacttgtccattttgatattttgctgtaggtggccagttttgtttctcatagggaaatctgacccacctgtcatgttggctcctaaggaactgctgttgtaagcggctcatcaagagttgaacttcatgtagccttgttgggaatatggtaaaggaagaaagccacaggactgcccattcagtcttgggaagatctggatgattctgcacaagcaaaaatgacttgaaatttatgtatagacacctctctaccaatccatcttcagctgactgaatgttgtataatagcccttctccaaagcaggggtggaatgttctggtttcaccacagattttctactcctttcatttttggaatcagcttaaagattccaggtcccttttgtatataacctttattttgcttttttaaaaataattttgtttcatatttaaagtccttgtattagtcattgattcatgttcagcattatttgaaccatttgccattacaagaaagaaaaatacttatttgtgttttaaataa

SEQ ID NO: 98 - DNA, 581 bp, Canis familiaris
  misc_feature (1)..(581): n = a or c or g or t
acgaaggnccaccaaggcagactgttaggcgggcaaacagatctcttagaaaatgtaccagctgctttgaaggctgaagattgtttttgtataatattgtacagtattcagacattttaaaacagatctttactaaacagattaatgagttaacaagcaggttctcttttctttgggctctttttctttctgttgcatatttgattattttcttgtcccaagtagagaatagtactgcaaaaagggaccacatttttcaggtattttgaaatattaaaaaacagaacaaaatctagaaaattcctagatctccactcatggatacccattttcccttttatttaaaaaaagaaaaagaacaatacacctctttatagatgctgtctaatcttatatgcatctaatggaaggaaaataccagttgcactgagacttgtaatggtggtgatattagtggcattatctataaatacactcacctaggttgaaaagctaagaaggaaatgtaaatataatatatatttatatttgatgtaatatggacatcttcagattctaataaacaaggaatactnnnnnnn

SEQ ID NO: 99 - DNA, 681 bp, Canis familiaris
  misc_feature (1)..(681): n = a or c or g or t
gggaatcacangcttcaatgtgtgatgcttgggattaaatttggnnnnnntgttcagactcttttaaagtgagaacgtagagntgttnaggcaatataagcctagaagagaagggtcnntgaggcagattgcctggatttgattccctgtcttgctttttatccgctgttacttgaagcaagttaatctttgcctcagttttctgatctgtatcatggatgcaagagatagccctcagaaagttaaacagtttaatacttgtagaatacttagacttctatcaggcacatagtgctcaaaaatggttaattttgtgttttggtatctgctcttccttgggtgtgaaagtagaactttcttgcctcttgtcactgaaccaatgacattcagaagccaccgtttctctggccattagacacataacttggccagtggttcatagttttcaatttagggtttacattttgagcatatgttaattcagcttaataattcactcacctgtgactaatgagttcagttctcaggccatctttctactgctattaatggttctctaatttgttagctgcctttgtagttattttattttttatttttttgtagttattttaaaacccaggaatctctttggtgtgccttcattgttatggaaatacgacattttnnnnnttgtgataa

SEQ ID NO: 100 - DNA, 687 bp, Canis familiaris
  misc_feature (1)..(687): n = a or c or g or t
gggtnntcagggctggatgntcgtagggtcattcttcntggatctcctgacactgggcttnntcntgcagcnggnnctccggnnccacacagactatgtccactgcctggcgctgcgnnagcnnagtcccgaggtgctgtcaggtggagaggatnnagctgtgcgactttgggacctccgcacagccaaggaagtccagaccatcgaggtatataagcatgaggagtgctcgaggccacacaatgggcgttggatcagctgtttggcaactgactcagactggatggtctgcggaggaggcccagcgctcaccctctggcacctccgatcctccacacccacgactattttccccatacgggtgccacagaaacatgttaccttctaccaggacctgattctgtcagctggccagggccgctgtgtcaaccagtggcagctgagtggggagctcaaggcgcaggtgcctggctcctccccagggctgcttagccttagtctcaaccagcagccagcagcacccgagtgcaaggtcctgacagccgcaggtaacagctcccgagtggatgttttcaccaatctcggctaccgcgccttctccctgtccttctgacctctggcaacaccccttccatcatcccagggatttagattgcttttttttattttattaaatannnnnntttt

SEQ ID NO: 101 - DNA, 562 bp, Canis familiaris
  misc_feature (1)..(562): n = a or c or g or t
cactctgacatcgagtcaacacaaatatcatccctaaatctgttccaagtaccagagaatctttcaaatcaaaagattcagaaaaagaaagtcctccatgcagaatccaccaaaactagnctgctcagaagccagatgtccaccctcaagagctcaacttgcagtgagaggacagatggcctttctgcttccagcaactggaacacttcaagtgacagagaaataagcatcctactgacaaatgagtatctagatggcaaatcattagaaacattgagtcgagaaggaagtcaacttcacaaccaagatatgtcttcagaaaactggctcaagacccatggcttggttgccaagaaactcaccatcatggatgccttatcagtgacagcagtccctcacatccccacctatgttcccattctggacaagcttgttgtttccaaggtttttgacgaggtgttccctctggcacatgtgtccaacgacaccaataagatgacattaattaacccccaaggagtcaagctcaatatctacaagcaaaaagtggaacaggcaatta

SEQ ID NO: 102 - DNA, 572 bp, Canis familiaris
  misc_feature (1)..(572): n = a or c or g or t
atgaatgggnatgactnnggaccaagtttattgaagtcaaaatgtgatggctggctgctgggaccatcatcatccatcaaaaaataccaagagtccacaagcagtgttgagaatagaagnnaaaagaagacagttgggtttcaaccacatacagaagatgatacagacatgatatggacatgtcaaaagaaagatacatatcaacccctaagaggaacaggggcaggagttagaaaagatgcttccacatctcctatgacaaaaggaagccaaaaggagcttgcaatcacaaccacatcggcactgcagcttgacacttcccggtatgaaacatctctattggatttggttcaatctctgagtccaaagtctgctcccaaacctcagccccatccctccagagaagctggggcctggaatcacagtactcgccgactcagtcctcgaaaatcaacatggaacaagatgggggcaggcaggacccctgaagacctggaggagaatcaaattctggaagatatctttttcatttgacgttgaaacacacgctacaggattcccatacgacatgt

SEQ ID NO: 103 - DNA, 545 bp, Canis familiaris
  misc_feature (1)..(545): n = a or c or g or t
tgtttanntcagtttacgtcactgtcgaagaaacaaatagcaaaaaattaataacacnntagacacgaagacttagaagacaacacacaaaatcttcctctttcgattcttctgtgaaagtgtgtgtgtatgtgtgtgtgtatgtgtgtgtcccactccgggcaggccgggtcatcctcgatctctgtccctgcccctaggcccccacactgccccgtccttcggtgcttcccagagacccctctgagctggcctgtggggtgtggggagccccctgggcgggaggcagggccacaggttagctagagggcctcccatcaggcccaccgagcagagctgccaatactccctgagcccgcgctgtggcccgtgggacagtcgtggtggctagcatcagcacccaagcctggctcagggtttgggcggaatccggggcccccgagccgcagcccctcatgtctcgccacacacacacacacccccaccatgtgtttgtaaatactctggcatcctttggccctgagaaggtttttaaatgtgttatt

SEQ ID NO: 104 - DNA, 619 bp, Canis familiaris
  misc_feature (1)..(610): n = a or c or g or t
tctctgtnnggtatttgtgctttgaaatacttcagtaccatgcttaaaaacannggttcnnngctgctcagagggctgacttggagaccaaaatcatgttgaatgtcgatatcctaagggcattagntctgagtcctgggctgtcaatagcaattcatgctccctatacttagaacttcgatttttaaaaattaatttttaaaaagccctggtatagatgacctacctggcactatagccacattaataaataaatctcaaagaagaaaatagaaagaataaaaatggccagacatgttattttggggcacacagacactcaaagaaataagaatacactgtctggctgctgcctttctgtatctgccagggagcatggctgtcacttcctgaagaggaaggaagtcacataagaccttgtcgttagtccctaaccactggttttaacaaatgtgaatgactgaaatgtgatgggacagaaagatttaatcatttaaactatcttgttcagcatcagtattgtgtatgttacagatcataatttctaaatctggttattttattgtgtttttgactttctaaactaagtgtatataaaagttctctttttaaaaaaaaa

SEQ ID NO: 105 - DNA, 623 bp, Canis familiaris
  misc_feature (1)..(623): n = a or c or g or t
ttaggggagatagtctctannntgggatcagannncttanntagttttaattganctatanncttgtttactttnnnnnnnatctgccagtttttccattattacttcactgtgaactctnntgtgttaggactttgagcatgtncttggtctttcgtatccaaatttactatttatccttggtctgttactttcttagatcatccagaccccataagtagactcatggtcataacctaatatagccaattgaatggtattgaaggcttcaccctagaacagtattctcaaaatgtagtttggagactcgtggaaggccacagaactctttctggggggttcacaaggtcaaatatattttcataatactatgttcgtatattccttttttattcttattctctatttgtagacagtggcattttccagagactttatgctgtatggtgtcacaatagatgaatataaaaacagatacaaggatctagctgtttctaagatagacattaaccagatttacaaaatataaaatatcattcttttcactattttatgccttgaaaatatagttgtttttcataaaaatgtattatttatgtaaacatgtagttgatatattgtta

SEQ ID NO: 106 - DNA, 591 bp, Canis familiaris
  misc_feature (1)..(591): n = a or c or g or t
acatttcaantcnncatcaaataagaatgtatctgtggnannatnnatggtgatgatnnctgatgannnngaacacccagatctcttcttgctganngactnnnngaannnnnncncctacaagtttcaagctggcaacagaatgaatgcgatgctatggtttanncatttgagtgcagnntgccaangcaacnnnnnacaggntnctacaaacttgatgacttttgagtagaagcctaagaaagaagcaaggtgaactgttgcccctgaatgagagcaaggagctgatgaaagcgccagnnnnnnaccagtnctgtgccaggaggagcccagaggctccagnncagcctttggagnnctgaaccaaaaaagcactaatttcagggaatgaagtgagatattcccagagaacaaattggagttacaaaacaaactgccatggaccatgcttctttnnnnngaannnancngcggaaaccactgccttaaaagaatgaaaggaaaaccaacatgaaacaccaaatagtgtgtgtgaatcttctggcggtgctgtgcttggaatagatcgtannnaatttgcatttcttttaa

SEQ ID NO: 107 - DNA, 453 bp, Canis familiaris
  misc_feature (1)..(453): n = a or c or g or t
tcttgtcatacactgtancnaannaccatttgaatgttaaattatattggtgagctgagaatctggctaccttgatcttttgtcctctttcctttaccggtatccactattgtgaagggtttttttccccccaagcatatattgttggcctgaggatgtttattctccgtttggtttttgggactatgtatctctgcagaaatctgcatgccaattagacagtatccaaagcagaatccattttgcatgtcacaatcaagatctacatggcaatctaagacatactggttgattatagaaggagctaatgtaaagccgctcttacttatagtaacatttctaagaccgcatttttgaagcagtttttcctttgttttctaaaatggctaaggttataggtgtgtgtggtattaaatgaactgtaaaattgcctttgaaatttgtttaaaaggc

SEQ ID NO: 108 - DNA, 655 bp, Canis familiaris
  misc_feature (1)..(655): n = a or c or g or t
acattcaagcaatgaagaaaaatcnnaacagagattgctttggtgatcatcataggagaaaatggaacttngaagactgggacagtttttgtctttttttttttcatgaaatgactttaaatgtgaattatactaactgtatctaaatagcaaatccttgtatagattctggtaatgatctatctcagggtgtttgcatttctgaagagtgttatgatatcttcttagttttaaatttgggcaaaggctaaattgtgttaaaaatgatgaattagttaaaagcaacagaaccaactatgtgacccctgaggggtggggcctcgttcttaattagggctctctttgtttttgattctgaaaaactctgcttcctggcatccaggagttagagaatgctttcatctttttctcaaaactaatttttgatgcctaccttaatgggtatagtcatttgtttttgtttcataaacttcattgctctatcgaggagtgtggtggaatgttcttgagcgtattgtttatgcaagttgcaatcacttttgccatcctggctggtaagtaaaccactaataaatatactgtttttactccctcttttttcccattaaaactgatgtaaaagtagtgtaaggatttgttattataaagtctctta

SEQ ID NO: 109 - DNA, 542 bp, Canis familiaris
  misc_feature (1)..(542): n = a or c or g or t
ccccaannctgaagaaaatcagtaactgtgggatcaagnntctgcttccactgcccnnnnngcagtaagaaagagagnnnnccacaaaaggaaataaaagatgaatgaagaagaaaggttatgaaataaaggaagaaagaagggcatgaggatcttatagacatgcaggaggatgtttataggtgccaactgttgcatcaagtagcccatgtagggaagaatcacaggcaaaagtttcttcaaagaggcagttaattaaaagtggaaggagaaatatgatagatatacaaggaccctcctcccccatttatattctattcaaccccatcctcaactcttgccctgttccccattctgcaccctgtcagccgttcagccccacccaacttgtacaccaataccaaaatactagaagagaagttgccagggacactctgtaaaacacccattttgaatgaattgccatcttttggggttcatctactttaaactggctccctttcttttgtgtagtctcctttagtaataatgaggttagtcat

SEQ ID NO: 110 - DNA, 602 bp, Canis familiaris
  misc_feature (1)..(602): n = a or c or g or t
agcccgggatcgtgctnngctcctgctgcgcatggtaaatagcttcgggttagtgtgggggggatgcagggaggatgcggcaggccgggaggaccctggctgtgcccttcatgctgcatgggtttaactgttgtgtcgcaatgtgggtccttgaatgacgtctgtggacatttcccagcttcaccaaacgaggggtacagctcgaagcaggggccaggccaggccggctgtgcctctgtgcccatccccggctgcctggtgggcttgctcctggggaaccctggggccccctccccgttcaagctttgtcctcctgactgggtttccaaatcgcactgggggagggatgatttcccccatcgccggggaaagcacgtgttcccctttgcactttgagaatctggggcccttggagcggaggtcccttgctgtgccccccgccccccctctgtcctaggcctgaggggcccccacaggcccggggcaggtagacggagggcgaatgcttggcgctcgcacccctgctcgccctccgcggagggcccgtcttacatgccctgcaccgtttgacatctttgtgttccgagttcgcagcctctccc

SEQ ID NO: 111 - DNA, 573 bp, Canis familiaris
  misc_feature (1)..(573): n = a or c or g or t
gcttccacatnnncatgggtaaccccagtgagttctttgtggatgttatgtagggcgngcagcgggggccgcgttgagtttcctccctcggcccatccagtccgcccttggtgcttctgtcctgtgactgggtgtctcatcggtcacctgcccatcacgcctctagggcctgggcttagccacccgctggggtctttgccactgtgactctcaccagcagtgcctggttcctccccttttcctcgggggtgtacaagggacctttggttatttttagctttaccgtttttgtaagacttctggggggtttgaaatagactttcatacattttttggactatttttttagtagatatttccacttttatatgaagaatccttgtctcctgggccctttcttctagccccagaatgtgatctcccactctgtctgccctgtcagttgtgccctgcgcggggtggggggggtcagtggtaccttgggaggaggaagggggtgggcaccctagccggcagtcagaggaagctggggtgtttggtcttgggggcccacgtagctgcttttgttactct

SEQ ID NO: 112 - DNA, 471 bp, Canis familiaris
  misc_feature (1)..(471): n = a or c or g or t
atcgtgnnnagtcagccccagcttgggnnctcctttccaagnnngaggaattcngcgggcnnnctgcagggttgtgccagcacacagccatggcttgtaacttacngtcttcacagacatttgctctaactgccatgaagttcctggcacctgtgacaggtcggggccaagtctcagaggccacgcgttactgcacagcccaacgtacgcatcacccagtgcagaagggctcttttagaaaggtactgatccttcttttacattaaccagaaaacctctttttttttttcttacctatgttcacaactagttttcttattgaccataatggacggtctcttcttgtagagactgattctggccaacatgtggcagttgagataaatgcatgttttatgcaaaacaagaatacgatagttgcttttaaggaattctggcattgtatgtgcnnnnttgtagaattgttactgg

SEQ ID NO: 113 - DNA, 611 bp, Canis familiaris
aaacattttaggaggaacttggttgcccctcttttggaagacgttttgacctccacacgtcaagggatcatagagggtgatctgtttcttccgtgggtccacctttaagaaggagctggattctgaggtatcacgagccaatgtagaacagatgcgaagcatgactttcacctgccaagaaacaaaggcaggaaaggacacagaatgagaaagctggatacatctcgaaggagcagccttccagactctggagacatagcatgcacagcagcagggtgccttctcctggtaaattatgatgaactgaagcagcaccataatcctcaaagggtcaagggaaaactgacttatttgtagctatcaggcggagtattttgatacgtccattgctttattatggaaacggcacaccatgtcctttgtctgcttattaatataaattgaaaactgtacgctggtggcccagttacatagatgaaaaaggagtctggatggctgaggtttcagggctggtgcagttcccttcaagagaactactcacagatcaataacccatggacataaaagttagctccgtaatttactcctggcctctgctcatcaggactctt

SEQ ID NO: 114 - DNA, 559 bp, Canis familiaris
  misc_feature (1)..(559): n = a or c or g or t
tttccactacttatganctataccatcttctttgccgttttcgctggtggttacctggcaatgatacttcctgtactggttgatctgtctgggaattctagagcacatcagttcttgggacttgccagtttctttgctgggatggctgtcctttctggaccaccgatagcaggctggttatatgattacacccagacatacactggctccttctacttctctggtacatgctatctcctctcttcagtttccctgttctttgtaccgttggctgagagatggaaaaacagtgcctgaccagaaaggaaaaggactgcaatcaaacgagagcttaacaaaacacaatctaaactaagaagtcactggaaacaaaagcttggaagaaaccaatttcctcgtttgtaaaatgaaaaggcaaaccagatagtttttaaggtttcttttttttacattccgaggaatacctaattgatagaaaagagccacttaaactaagctgtttgttagtatttaatcaaacaggctaaagtcttcatcagtgaaaacaactaccttaggt

SEQ ID NO: 115 - DNA, 557 bp, Canis familiaris
  misc_feature (1)..(557): n = a or c or g or t
tgatttgaaattcataactnacacatttttacgttctatttttnnatcatttttttattttttnaagttgtaatattctttggagttgattgtaacagtaagagaaatggtgtttctgtacaaataatactgtttctgaaatatgtgtgcttcctaacactaaaactacccactaaaaatagaaaaagaatcatttttttaatgattttacaaaatgcatgtaaatgtcctaagtcattagctagaaaaatttcagtttgctgtatactcttgggaattaacgcctttcttgagaggttctagtaggaactccttataaggctgtatttctctgttattacagtgttctacttttcacagccctccatagttaatgacggcaaatcacttaatgacattggttgaaatgcttctttcccactcgtgctgtttcttgagagtttgcagaaagctcccttacaaacttctgtgagccttgtgcttctctcagcgccttactacccttgccagggaaggaagagtgaatcatctatttggtatttgtccctgcctattag

SEQ ID NO: 116 - DNA, 507 bp, Canis familiaris
  misc_feature (1)..(507): n = a or c or g or t
ggtcttgancnnggtcaannngagaataggtctcnnccgtcactttgatgagaccatcaataggtacaagcagtcgcgngatgtgtcnancctcaacagtggcaagaagagcctggananagaacacaaggccttgaccagtgagattgcgtcgctgcagtccaggctgaagacagagggctccgacctgtgtgacaaagtgagcgagatgcagaagctggatgcacaggtcaaggagctggtgctgaagtctgcagtggaagctgagcggctggtggccggcaagctcaagaaagacacgtacattgagaatgagaagctcatctctggaaagcggcaggagttggtcaccaagatcgaccacattcnnnntgctctgtagcctctnnncgttatcatcagcatgggcccagggcgctgcactttccgatggcagtttgggggtgaaggagnnnaggccaccagcaaggccattgaatgnnngcnnnnntattttataaaaggcct

SEQ ID NO: 117 - DNA, 474 bp, Canis familiaris
  misc_feature (1)..(474): n = a or c or g or t
ctggtcccagagtccaactgcagcctccttgtgtgnnnaaagcagggcggggccagacacaggccaggtccctgccaaccctacaccatctccaggaagtgctacttaacccggcagggggaaaggcccaggccctggagttagaccaccctggtctcactggtggcccagctctgccatttactgttagtgatgcaatccccagctcccagatttatgagccttgtcatctgagaaaggggactcatgccacctccgtggtcaggggaaggacaggcagcctggtggggaggctggcatcttagccaaggtcacccagtgagctggtggcagagtggagccagtgacaggacctgctggggtcctgggctgatggcctatcagtgggcggctgcaggaaacggagcccagagggtcggtaggacccacagggcagaggtgaactgaactcaacacatggccaccttccatctg

SEQ ID NO: 118 - DNA, 645 bp, Canis familiaris
  misc_feature (1)..(645): n = a or c or g or t
tcagccagagagctgnctnnagagtccaactgttgtatgtatgtcaccctcactaaaaatgtcccacaatattgtgggnnaagcagggcacaggtgatggtatatactcagagcagtgggatggttggggtcttctctgttcccttagttccagccaggaggaaagagaattggggtctgttgccagaaggggagtagaatgagtctggaagggctattttgaggaattgcgattgccagaaggcttggggccagagtcagtatttgtttagcaccttcaaatacaaggatgattcccttttcctgcctattagatgatggcccacttccctgaggtacaagttggcaggaccacctccccctacttcaccatccctggcaagctggcccattcccagtggaatagaggggtctactctgggatggggcagggcaagaggacagtgcatcccgtggcccagagctccacgattgcttcatgcctcccctcttctggcccaggtgtcctcggggctgccatagagcattgacccaaatcctgatccaagggccagcatggggaagagatggtcgcaggcaaaatgcactttatacagagattttcttattactgggaaggtgtgtttctcccacagtttgtgaata

SEQ ID NO: 119 - DNA, 62 bp, Canis familiaris
  misc_feature (1)..(62): n = a or c or g or t
tggctggaccccactcccagtggacctgtcctctgggctttgtttgtatgggctagagaant

SEQ ID NO: 120 - DNA, 578 bp, Canis familiaris
  misc_feature (1)..(578): n = a or c or g or t
ggatcagnntgatgtcnagagtaaaagagtctgtggctaggagtacgcagtngacnnggcggataagaggttnacgtgtgcattgcaggtcattgttacctgaactagnntagtctgtgacctggcttgtgaattcagtcatttgagaagtagttcaagtgatcttataaaaccaacttgaagaatcagttcccctcacttttatgaggagaagacaataacaagtggctctcagaaaacagctggaaaaaaaaaaaaagaaaacagctggagcctggatacacagtgccatcgtgccccgacaaagctgaacagagtgtctgctactttggcaccccagtcctgcatgagacccccaggacaccacaacattctatgatgggatcagggtcttcaaggtccacaccatccctattcctcttgcacctgaactcttctggtcccaagcttctcagaaggcttcccttcaaagtcaccgggggaatggtcccctgagtccacacaaagcactactggaatgccaggcgctgcagcctctcaggcggggagcctgcttctccctctccctcccgtctcct

SEQ ID NO: 121 - DNA, 626 bp, Canis familiaris
  misc_feature (1)..(626): n = a or c or g or t
agnnntcatgactttttatgaccaagtctttaagaatnnagnctgtatgctgctttataggatggcaaacgttaaagagccccccctcccaaaaaaaaacacatagaaacaagagtgtatacctgagatttcagtatgaagtattaaattggcatgaagtcagagaaagaagggaaagactggtgcttttgctaatgtgtatcaactatctctgtccatcttggtgttgaagtgttatttctgccagtattataaacgtgtaacagattcatcccgtcaaatacaacatttttggaaagtatttatgtaaatcttttgtgccaacagtaaagttccctcttgttcagtatctttagtcctacattttgatcttcagaagatcagtttgtcttcaaaaaccaaataatgaaccttgaatggggcagctctttgaagagatgcggttggaaggcctttcgtgtttcagaccaggacatggccttcagatagcttcttctcggtcaagtttcatgtgaacggtgccactgtatatatgtgattcagataattttcccatgtttccaatgcagtttaattgtatttgttactaaatagcttctttgtgcaaatgcagtttttacactaaa

SEQ ID NO: 122 - DNA, 657 bp, Canis familiaris
  misc_feature (1)..(657): n = a or c or g or t
gacnagtgtcagcatccaagatatccaaggtgaatgnntnnagcgaannnagggatatcaagtgccagatgtgtccagnnatacannngctcngncntcttcaagtgaggagactaggactcctgtgaatcagcaggacaagaggaagagctaccctgtatgtgtgctggagaaacaagaagctgcagaaggtggcttgggaaataagatgaagcactttccacactggattaaccccgaggtgaaaggtcaaaggcataaagaatccattctcctctctaaggatgagacagtgcccaaaaccatgacaaaaaaggttgagaagagtccacccctcaccaaacaccctgtgagaggagccaagttggagaataaaacagaggaggagagcatgaccttctttgatgctcctcagtctctagacaatgaactcaagcaacaatcccttcagtccagacattcctggttgctgtgccttcctcataacagctccaagcactgtcctcagctgacttgtgccactcaaccagaaaatccaccccaggtctcagctctcctctcagcagaaggcactggtctacacaaagaaaaaacgcagtgcaggaaaaaggagttcctagtttcctctgcatccccatgaaaaaggctgtcatcatc

SEQ ID NO: 123 - DNA, 663 bp, Canis familiaris
  misc_feature (1)..(663): n = a or c or g or t
gccggggnnngagcnnnngcaggacaannctgactcgccccacgtcagnnnnngtgaggctgatgcagnntccatggtgcccgtnnactcctccttctcgctcatctcngtctcgcacgcgctctacgacagccgcctgccgcccgacttcttcagcgccctggtgtgtgacatgctgcgcttctatgcagagcagggtgacgtgcagatggccgtgtccgtgctcatcgtgctgggcgaacgagtgcgcaaggacatcgacgagcagacccaggagcactggtacacgtcctacatcgacttgctgcagcgcttctgcctctggaacgtgtccaaccaggtggtgaagctcagcaccagccgcgccatcagctgcctcaaccaggcgtccaccaccctgcatgtcaactgcagccactgcaagcggcccatgagcagccgcggctgggtctgtgaccgctgccaccgctgcgccagtatgtgcgccgtgtgccaccacgtggtcaaggggctgttcgtgtggtgccagggctgcagtcacggcggccacctgcagcacatcatgaagtggctggagggcagctcgcactgcccggcgggctgcggccacctgtgcgagtactcctgaccgccgcgggcgggaggcgctgggnnnnnnaccaa

SEQ ID NO: 124 - DNA, 651 bp, Canis familiaris
  misc_feature (1)..(651): n = a or c or g or t
gccgagtgtgatgcggtcacgacagctgctgaaggagctcctgacacgagcgtctgtctnnnnctgggatngctgcctcaggacaagccccggccctaacctgaggcaccccagcggtggagannnggcgcannaagccacaggctcagtgtagtttaatgcgnnaactcaggaggagccagtgagtagcgcttgatgggatacaaacaacactgaagccctgggagccggcagagatgccttaaggactcttcggaggaaccatccccgcttgcgcagttccctttgtggctaagtgacatgctcacctgtcacacacgacagcattgcttttctgtagtgacgagtctccaggtggcccctggacatcaaaacacatcctgttttggctgaggtgtgccgctggctgtccccgtgacagctttgtgagtgggggagggcggtggtgaggcaggacttggaggccacaactaggactacccctgggcccgcaggatgggcagcggcctcgtgggtgggcccaggacatggggagtccatgtctggaatgtatttctccattttctgtaacaactccttatgatacaatgaggtaacattgtgcacttaaagtggaaactttaataagacctttgtagttactttttaacg

SEQ ID NO: 125 - DNA, 629 bp, Canis familiaris
  misc_feature (1)..(629): n = a or c or g or t
acatatatatatacatatatagatacatttatataatatatacannnagnntatatatttatatacatgtctcctggccncagagtttatnnanngtcaggctcactccannnnnctccctgggnnnnncaatttccttttgnnngtccttgggtggggtacannatggggcangaatgggttttctcaggaaggacagcagtggattctagataatagggctctgaaagaccctacccctgtatttgttctcttctccatcccaaggatgagaacacagcagcttcccctccctaggtggatgtccagactgggacaggacaccttggtccccaggtaggcaggagcactctgctggcctctgtgctctgagcagaacctggcctgcagacacagccaggaagaccgtcagtggatagatactctcttggcaccatctcacccttccaattggaaggtccaaggccaagctcactccttgccccctacccagcatccattccccagccatctgccacatctggctggtattgctgtcctcacagactcagaggtccagagatggtgctggttccggggccctggtgatgctggtggtcctggtccagggagaaactctgtaaatttgt

SEQ ID NO: 126 - DNA, 596 bp, Canis familiaris
  misc_feature (1)..(596): n = a or c or g or t
gatctcagtcaagtannagctgctctacgtngaagttcccagaggcnntccatcaacaaccatcttggcatcctcaaacaaagtgagaagtggnnnngacctcagtgttctctgcactgtcctaggggaacctgatgtnnaggtggaattcaggtggatctatccaggacagaaggatgaaaggcctgtgacaattcaagacacttggcggctgatccatagaggcctggggcacaccacaagaatctcccagagcgtcatgacaatcgaagatttggagaccactgatgtaggatattatatttgcactgctcagaatctccaaggggagactacagttgccaccactgttgagttttcctgacttggaaaatgaagtataatgaattgatggaaagttcattcgtatatacatgacccgctttggggttcttttgactcatgctttgccagaggctgatgtcaagtgccaaaccccacccccggccctgtgagtcagacccagacatccaaactaaaaggaagtcactcggtctaataatagaagtgttaactcctctgacagagagcatgtattctgattgcttacctatgta

SEQ ID NO: 127 - DNA, 570 bp, Canis familiaris
  misc_feature (1)..(570): n = a or c or g or t
ctgtgggttcccagnnaggtnnngctccttcagcnnnntcctccagccccatgagcagccttccccctggcacctgcatctggcacctacctttgcctgtccttgatgtctactggactccacacagagccatacagggtcagctgccactgctggaggatgccaggctggagtgtctcatctcctagggcagcaagtggggcgtccgtgagccctgcccctccactggccttgcaagcagcagaggccctgcccgccccaccccctagggggactggagcacacgatctgctgcagtagaggcctgtgtccactgaccagggcttttgcaggtgtgcctcacggggcgcccttagggatggagactgggaggctgaaaggtctaactccgaagcaaagaagttctgcctttgtttctttcgtcttttagggtttcagttgggattttgcttgaaaaaaaatttttttcctactaaattaaagaaaggtttgaaaaccaccagtctagtgaatacctaacttggctggaagccaggagagttgggtttggtttccagtctcctctggaat

SEQ ID NO: 128 - DNA, 445 bp, Canis familiaris
  misc_feature (1)..(445): n = a or c or g or t
ctagttatannaatttaatatttttannnnnnntacattgctgtatattcaannatttgttttattaatatgcaataaaggnntagaaattttagttttattccttacttggtaaatacggttaactatggaatatatttactgcctctagtgaatgtcctttatataatgactaattngagagtaatgtgtgctctgtaagtttgttttaaanngcactgtttttaaagaaactgtnnnggagcaacagaaagccaagnaacttcataatcagattatattaatcatttagttcagcagtttnnnncaagaatcagatgcccaaggagtacatttattgctttaatctgcattcattgaaggcatttattaccatatactacaacgttgtggtaggccatttttttccttttcatttttggctctttggaaacttgaatactta

SEQ ID NO: 129 - DNA, 534 bp, Canis familiaris
  misc_feature (1)..(534): n = a or c or g or t
tcatcctccagcgcctcatccacccagcaggtcctgtccctcagcacctcagcccccggctcaggctctactactacctctccnntcaccaccacggtccccagcgtgcagcctatcgtcaagctggtctccacggccaccactgctccccccagcactgcgccctctggtcccggcagtgtccagaagtacatcgtggtctctcttccccctacaggggagggcaaagggggccccacctcccatccttccccagctccaccnnnntnntcggccccctccccacttgggggcagtgccctgtgtggnnnnnnnacaggaagctggggatagcccccctccagctcccgggactccaaaagctaatggctcccagccccctggatctagctctcctcagcctgcgccttaatgctgtcacacatctgccagcctcctgtccccaactctctctctctcccacatacacacacacacgtatatatgctgggtggaaggaagtaatagtttgctnnnnnnatgttattattatta

SEQ ID NO: 130 - DNA, 404 bp, Canis familiaris
  misc_feature (1)..(404): n = a or c or g or t
acaaggacatgcacgactggctgtacgccttcaacccgctcctggccgnnaccatacggtccaagctctccagaannnnnnctgcccagatgagggtgtgagccnnngccctcccgccacagccagcaggccggcccccccccagccctcatcaccacccgtcatgtcacgcgcccagcctgcccccaccagccagccagcgagtcccctcttgggggacaacgcgccgggccccgcgagcgccacctctggcccggggacctgcgccacacgacctgtcctgctcccagcagaggccgcgtctgttctttattctttccgagcgagccctgggtgggaagagctgggaggtgctggaaaggccagagggcacaagtcacaggggcatcgctgccgttctaata

SEQ ID NO: 131 - DNA, 647 bp, Canis familiaris
  misc_feature (1)..(647): n = a or c or g or t
gcctgactttggcatctcctacgtngtggtcaggttcaagggcagcaagaaggatgagatcctgggcatcgccaacaacaggctgatccgcattgacctggctgtaggcgacgtggtcaagacctggcgcttcagcaatatgcgccagtggaatgtcaactgggacatccgacaggtggccatcgagtttgatgaacatatcaacgtggctttcagctgtgtgtccgccagctgccgcatcgtgcatgaatatatcgggggctacattttcctgtcaacccgagagcgggcccgtggggaagagctggacgaggacctcttcctgcagctcacaggaggccatgaggccttctgaggcctgtctgatcgcccccactttgctcactgcctgctatggccactcctaagcccacactctctccagacatgtactgagctggcacattcacctgctgtcactggctttatgcagaccagggacctaattgggccagactctgccatcccctaggctagggagagtggattatgagctcgaacaaggtccgcccttcccttgtctaagtggccaagactaataccctgagcacaggaggaagaccagctgtaactacaggatgaggataattcatggtttcaaactggag

SEQ ID NO: 132 - DNA, 647 bp, Canis familiaris
  misc_feature (1)..(647): n = a or c or g or t
tccacgcaataccttctatgtcctgaaccctcacaataanntgtccagcacagannagcaatttcgagccaattttagcagtgaagctggctggaaaggtgtggttggggaaaggccaagcccagaacaaatacaggcggccttgacggagcacgacttatatatctacgcagggcacggggctggggcccgcttcctggacggacaggccgtcctccggctgagctgccgggcggtggccctgctgttcggctgcagcagcgcggccctggctgtccacgggagcctggagggagctggcattgtgctcaagtacatcatggccggctgtcccctgtttctgggtaatctctgggatgtgactgaccgagacattgaccgctacacggaggctctgctgcagggctggctgcgggcaggcccaggagccccgcttctgtactacgtcaaccaggcccgccaggctccccgactcaagcatcttattggggctgcacctgtggcgtacggcttgcccgtctgcctgcggtgaccccctggagctgccccagcgccctcaggagccacgtgacagttccacatcctcttagatattttaagtgatttttctgtgttttatatgaaacatttccctttgacttaacctt

SEQ ID NO: 133 - DNA, 630 bp, Canis familiaris
  misc_feature (1)..(630): n = a or c or g or t
atagatgatnntagtgacacctgnattntacagtgtnctccagagnnnnngcnnnnnattgaactacannnttcttataagaaaggattttngacagannnnntgggcagagtctttaagtatttgggagatagaggtgtaagagaagatgaaatgaaaagagcagtgacatcaatgcctttcactctagggatggtggaacttttgaactttataagaaggaacaaggataaatttgactgcatcattatttcagattcaaattcagtcttcatagattgggttttagaagctaccagttttcatgatgtgtttgataaagtgtttacaaatcctgcagcttttgatagtaatggtcatctcactgtggaaaattatcatgctcattcttgcaacaggtgcccaaaaaacctttgcaaaaatgtagttttggtagaatttgtagataagcagttacaacagggaatagattatacacgaattgtttatataggtgatggtggaaatgatgtctgcccagtaacttttttgaagaagaatgatgttgccatgccacggaaaggttatactttacagaaaactctttccagaatgtctcaaaatcttgaacctatggaatcttctgttata

SEQ ID NO: 134 - DNA, 115 bp, Canis familiaris
agtgaaggctgtccagtgccaaaaagaggcatgtgtagatattctgctcaaaaaaggtgctgatccaaatgctaaggacttcaagggaaacaccgctctccattatgcggccttt

SEQ ID NO: 135 - DNA, 668 bp, Canis familiaris
  misc_feature (1)..(668): n = a or c or g or t
cattgacaacaagatcgaacaagccatngacnnggtgnagtccnanntcatgtttgcggtccgggannaggtnnaggtgctgaaggagcagatccgagacctggccgagcngaatgccgcgctggagcaggagaatngactgctgcgtgccctggccagccctgagcagctggcccagctgccctcctcgggagtcccacggctggggccctctgcgcccaatgggccctccgtctgagcctcccttccctcacaatgtgcctttgggggctgccacagctaccaggccttgtgccagctgcccacccccacttcctatgcagctttaatgcctccggatccctggggatgggagttgaaggctcagaatcggcctgtccccccactcttcctcagtctccccctaatgcccagggactgggcagcggcatccccaggccttgaaggaggagggagggcttcgggatagggtgttagatagagccctcctccccactcccgaggtgtcagtgttctgggaaccctggcagtagatgtctgggcgagttggagtctcccgggcggacaccccatccccaccttgttccctcaaagtacccattctcctctgcccaagggagggagtatggacagtctgcaagttctgggattcaggttgttattaaaat

SEQ ID NO: 136 - DNA, 673 bp, Canis familiaris
  misc_feature (1)..(673): n = a or c or g or t
ttccagcanganacanctcagnntctctttaacaaaagcaatgtgaatgccannnaaatcttgccntcgccttcccccatcccacacagccaggaacacaacagcaccagcgcctccctggaaagcagtgtccctgagagaccagcatcatccgtccctctcaccggggacagccagacggactctgacatcctggcattcatcaaggccagacagagcattctgcagaagaaatgtttccagtagatgtccagccgtgcactgtggcagcaagaagggagtccaggactgggtaaaaggatcgtgcaggagacggtagaggatcacatctcacagccagactgtccatagagcccctctaatccactcctcattgataatattagaaaactgaaactaagtggaggggccggcttctaataactcctttgtaacaagtgtcccctcctgccccctaccgggggggtgcctttccctgatcgtccaactagagccacccccatttcttttttattttcctcatcactacgtatcatcttgttttatttgcttattttttatggcctgccacccctcccccaagactctaagctccatgacaacaaggacctatacgtcttgctcatcactgtgttcccagaacaagttggtactgaataaatactccnnnnnn

SEQ ID NO: 137 - DNA, 523 bp, Canis familiaris
  misc_feature (1)..(523): n = a or c or g or t
gaagtggtattatcttcatctgctagatttttttaacctattaagagggctgtaacagttgctgctagtattttgttagggttccaccatcatttagtttccacatcattctaatgtatagtttcaagtcttactagacaatctgaattccactacatttctgtttggctccaacattccatttagcttgaccagtctaatttaacacgtgtgtgttggaggtcattaatgttacttgtacaatgctgtcactgtgtgacatccatatgaattttggtgtatatcacattgcattcaatcagctgtgattatgcgtagaaatactatagtaactagatgcagtgtgaattttttccattaacagtcagtggcttaaatatgattatggtcctgcaaggtgatacttgctaaaatatctaaacttttgtttgtttgtaactgaatcattttttaaaaattcataaagctggaaatgatcaaatgctgttttttttttcattgtcaacnnnnnnntgtcatttta

SEQ ID NO: 138 - DNA, 554 bp, Canis familiaris
  misc_feature (1)..(554): n = a or c or g or t
gcccactgcactgccacattccagtcggactgccacggggggacccaggccccagnnaannagccccgtgctgccccctgannngccgcccgggcccagggctgggctctgannagctgggggacctcacctgcccccctgaggccccagcctgacccagggctgacaggggaacaggaaactggactgggccgggcaggcctttgggggcctggggctggacagccctccccctcctgcagcgggtgccctccctggggtttaggggtggggggggcagcagggtttggggccctagtggggagccttcgggaagaggcttcctaagccatcnggtcccttagggccctggctctgagcgtgctggcagcttgggccctctctcccgccctgtccccactcttcccggggcttcctcccggaaccacagagcctgctgcatttgcctgcccgctgccctgcttggcgcctaccccggtgacccaccccctgcaccccagtcatttcatccccgctgactgtgtggcctggggnnnngagtggggctctcatgg

SEQ ID NO: 139 - DNA, 657 bp, Canis familiaris
  misc_feature (1)..(657): n = a or c or g or t
annnctttaacatgtnnntgtttttttttttcnnngcttgaannntgccaatgatgtaccaatccagtgtgaaatatctcctcttatctcctatgctggagaaggaatagaaagttatgtggcagataaagaattccatgcacctttaatcattgatgagaatggagtccatgagctggtgaagaatggtatatgaaccagaaatcaagttcaccacagtaagaatggcttttatttttgatagaccaactgtgaacctcaggacctctcctggaatactcacatttgaatatgcacagggtttcaccttgcttgttgaactcttacaactactccctattccccaagatccagatgactgagcttcagaaagcatttttatgattctcaaactcattgaagttcttatttatattttttaattgtatgtttgtttttttttcccaagccaaggaaaacattggccatccaggaaatttcccacagcttgggtatagtcagggtgtttaacatcactgtacttggagctggaaatgtttgttttcannnnnngtacatagtaataatatgttcttgtatgtgtcaaaaggtttctatggtactaaaagtttgttttattttatcagaaattaaatttttttaagaaaatannnngac

SEQ ID NO: 140 - DNA, 538 bp, Canis familiaris
  misc_feature (1)..(538): n = a or c or g or t
aaaaggttattttnctacatgaagaaaagttttcttatataaaaacttactgcaactcaggttttgtgtctctgtagagaggcacgtatataggtgtttttctttgtgcacttggtttttgcacaggtaaatgaggttaaacattgcccaggtatgcaggtcaactgacttctgtggtagctggattaaggaaagcttttggtgaatggacaaaagaaatcacaggctatttctttgtatctttctctcttccccagcactctaccagagaacatctcttattgagtcaggaaatcctaattttttggaaagtccacaggaaaaccaagttgcaagtctcaggctgataagaacataaagcagttcccatgtttgttaggatggttaatgtagtttcagagtataatgctgaaataaattttagactccatacctgtagtctttccactcttattggtcttgaatgtgggaaaggcatccgttcagggcagtgagtgatgttgaatgttaagttctattccaggaaatgtgattttag

SEQ ID NO: 141 - DNA, 563 bp, Canis familiaris
  misc_feature (1)..(563): n = a or c or g or t
gcagcaccagcactcagannnnnatnctnnccagactcactcttcaggaagcgtgaccacgtcctcatcctccacagccaacattgacgacttgaaaaagagactggagagaataaagagcagnngcaagtgaagtggccccggccccgtgccccgcagctccagctcactcaactcggggtcctcctggtcaccggggctcggcgggcctggcacacagactgcctggatgtgcccgccgcgggcctcccacgcgctccgctgctccgccagcgtcctgcctccggaagactgtctgtgtcgtagtttagtgtacagacttgtaaacagctgccctccgctcagctccgactagtctccgtagccttggtcttttatttctaactgctcatttgtaaagttgtcctgatctttcctagcttttaactattagaaactcttgactagttttccttttgagtccgtgagctcttctccctgtagccccgaagggtcactgtattctgtatgaatgcatggcatgatacaactaatttaagagtcttttataaataaagnnnnan

SEQ ID NO: 142 - DNA, 588 bp, Canis familiaris
  misc_feature (1)..(588): n = a or c or g or t
caacnngtctttgattcggttttttcaacatctctctggggtggggtgttggtgcccattggtgataaaccatcaagtatngcnnacaggttttaccttggaggaccgaccagtgtgcgcgggttcagcatgcacagcgttgggccacagagtgaaggagactacctgggtggagaagcatactgggccggcggtctgcacctgtacaccccactgcctttccggccaggccagggtggcttcggggagctcttcagaacacacttcttcctcaatgcggggaatctctgcaacctcaactacggggagggccccaaggctcacattcggaagctggctgagtgtattcgctggtcttacggtgccgggatcgtcctcagacttggcaacattgctcggctggaacttaattattgtgttcccatgggcgtgcagaagggtgacaggacatgcgatggtgtccagtttggagccgggataaggttcctgtagccgacacatgtgctctggaccctgcaggaggagccctgggactggggtggcatgagtcacttggtgccacgtgccctctcgccaagtaaacacgtc

SEQ ID NO: 143 - DNA, 514 bp, Canis familiaris
  misc_feature (1)..(514): n = a or c or g or t
gaatctgatggtnnaatattgtcctaaagaanngtcttccnnnngnctgaaattccagcttgttttatgttagccaaagaaggagctgggaaggggttgggatcacaagacaactgaaatctctagacatctgaggaaggtcgtattacttctttggacttggttcttttaaatctgcctcattggaactttttaggaatttcagttcagacttctaacagccttttaaagacaagagccaagacagatatctgccataagattcgcctgcaatacctgtgttggtgatttgagtgaatcactctcttctcaaggtccccaaaatatcttgaggttcctgcacctgccaggaagtgacattctctactcacctggtaggactactgggaactctatagcaaagtatcacactgattttttttccaccaggccttatttggttgcataaaggcaaccttagctccttaaagatgtctgatcatctccaagtctgtgtatgtgtcccacaaatatg

SEQ ID NO: 144 - DNA, 443 bp, Canis familiaris
  misc_feature (1)..(443): n = a or c or g or t
acaacgtcacccagcggcggccccgagtgctgtcctgcntgcactctgtgtgtgagcagtgcctgcagattctctatgagtcctgccctaagtacaagttcatctcctgtcccacttgccgccgcgagactgtgctcttcacggactatggcctggctgcactagctgtcaacacgtctatcttgagccgcctgccacctgaggcactgactgccccgtccggtggccagtgggggggtgagccggagggcagctgctaccagaccttccggcagtactgtggggccgcgtgcacctgccatgtgcggaacccgctgtctgcctgctccatcatgtagcacccaccggctcaccactgcctgccagtccttgctcgccgcttcttcagggatccggccctgccctgtcgcctgttgacccctcacccaccacagcttctggcc

SEQ ID NO: 145 - DNA, 442 bp, Canis familiaris
  misc_feature (1)..(442): n = a or c or g or t
aacgactggatgatagtttgctatacttacgagatgcccttcccgaatatagcacttttgatatgaatatgaagccagtagcacatgaacctagccacgaagttcctgttaatcagctgaaagtaaaaatgaagcctaagccctggtccaaacgctgggaacgtccaaaatttaatattaaaggcatcagatttgatctctgtttaactgaagaaaaaatgaaagaagctcagaaatggagtcagccatggcttgagtttgatatgatgaggacatatgatacttcaaaaattgaagctgcaatatgggatgaaattgaagcatcgaaaaagtcctgattctgagaatcagtttggttatttgcagaggatatactgactcccggagaatttatttaaagaccaannnnnnttcatatatgaggnnntagtcattaaataac

SEQ ID NO: 146 - DNA, 638 bp, Canis familiaris
  misc_feature (1)..(638): n = a or c or g or t
cgctgaatcgttaatgtgtagtgaacacanctccttgtaccccacttnnntagtcttatcggttctgatcttgtcaaacacagcctgactgcttctgacccccagatggcctcattactagacttttctttttaaagaagcgctgtttttaagggttttaaaaacgttttgaagagcacttcagattttccttttttgtttttactatgagccataagttttttaggaaatcattgggggttgcgtgggttttggttttggttgtgttgccttttttgtttctctttttagtggggtcaggcccgtgaagttgggtgccccaattcacttctcttaagattgaacggactctgaatccgctttttgtcggaagctgagcaagctgtggcttttttccaactctgtgtannnnnnnnnnngtagcgtggtaggacccatcctggggcagtagtagcagaggtgccctggctgccctgggcctggcctgtgcggcccttctgtgctgtgtatgacccacagtagacttgcagacgtcccctcaagaggttcttgaaaatgtttatttatattgtccttttttactggaagacgtatnnnnnnnccattgatgttgtnnnnnnagtggttaaggaattctt

SEQ ID NO: 147 - DNA, 583 bp, Canis familiaris
  misc_feature (1)..(583): n = a or c or g or t
gcntactctccntgnntttttggtttnnnacagttatttttctgatancntacttacagatgtttttgttcctttattcttgtacgagagctgaccccaaaacagtgggctactgtattatccccatatgcttggcagttatntgcaatcgccaccaggcatttgtcaaggcttctaatcagatcagcagactacaactgattgacacgtaaaatcagtcaccattttttcattacagttaaaaaactgccagtaccatatggagcccgatcacaagactgcagtttctttgcagacctcaggaagttgtggtgggacagcggctttctaaaaagtgtgactagggggctgtctttatctgaataataatgaatttttaagtgaagcccgagatacagtactacaaaatcatgttgatgacttcagattttggaagtaaaatcgtgtctgttatttgcattctttagaaacttgaataagtacctgaactcctatttttattctactgtgcaacatagtgatgattcagaaatttttcctatggggaaaaatgaatatgaacatttccattgtgcttaatgta

SEQ ID NO: 148 - DNA, 661 bp, Canis familiaris
  misc_feature (1)..(661): n = a or c or g or t
aacaacccagacatgcgggtgcagatcctcaaagattacgtcaaacagcacttccctgccacccccttgcttgactatgcactggaagttgagaagatnaccacctcaaagaaaccaaatcttatcctgaacgtagacggtttcatcggagttgcatttgttgacatgcttagaaactgtgggtcttttacccgggaggaagctgatgaatatattgacattggagctctcaatggcatctttgtgctgggaaggagtatgggcttcatcggacactatctcgatcagaagaggctgaagcaggggctttatcgtcacccttgggatgatatttcatatgttcttccggaacatatgagcatgtaactgagccaggaaccctattgcagtaaagtgaagacaagaactcctcccctgggaaactgcgtacagacagccggcactggagcttgctataggatgggcctggaatgtaaacagctattgatgtccaggcaccgaagacagccacaggctaacactggtcagtccacacaaagaagcttagtattttttttttgtaagcatagaataaaaaccaagccaagccaataaattgtgacatttgctctggtacctgctgtatttattatatggaagcatctaagcactgtaaggatag

SEQ ID NO: 149 - DNA, 520 bp, Canis familiaris
  misc_feature (1)..(520): n = a or c or g or t
gcaggnntacgtgctgctgaaccaggtccccaaggcgcgcatgcagctgaagcggctggccaaggccccgtgggcgctggccaaggccgaggacctggagaagggctggctcctgctggctgacatttactgccagggcggcaaattcgacctggcttcggagctgctgcggagctgcgtgcagtacaacaagtcctgctgcaaggcctatgagtacatgggcttcatcatggagaaggagcagtcctacaaagacgcagccaccaactacgaactggcctggaagtacagtcatcatgccaaccccgctattggcttcaagctcgctttcaactacttgaaggacaagagatttgtggaggccattgaagtctgccacaatgtcctcagagagcatcctaactaccccaaaatcagagaagaaattttggaaaaggcccgagggtctctgaggccatagctgtggtcagtgggagtcagggcgggtggaagccatcaannnncgcaggtttcatggaag

SEQ ID NO: 150 - DNA, 627 bp, Canis familiaris
  misc_feature (1)..(627): n = a or c or g or t
ggtgtgattgaatgcttgaagattgtcactcgaaccanatctcagcggattgcanaatttgcctttgactatgccactaagaaggnnnggggcaaggtcacggctgtcnnnaaggccaacatcatgaaacttggagatgggttgttcctgcaatgctgtgaggaagttgctgaactgtaccccaaaatcaagtttgagacaatgatcatannnaactgctgcatgcagctggtgcagaatccttaccagtttgatgtgttggtgatgcccaatctctatgggaacattattganaatctggctgctggcttggttgggggagctggtgtggtccctggtgaganctanagtgcagaatatgccgtctttgagacgggcgcccgacacccatttgcccaggcggtgggcaggaacatagccaaccccacagccatgctactatcagcttccaacatgnngcggcatctcaatctcgagtatcactccaacatgattgcagatgcagtgaagaaggtgatcaaagttggcaaggttngnacttctgacatgggtggctatgccacctgccaagacttnactgaggcggtcattggtgcnnnncctcacccataggnccacccataccca

SEQ ID NO: 151 - DNA, 503 bp, Canis familiaris
  misc_feature (1)..(503): n = a or c or g or t
caagtgagtcttctctcccctctccctggggtacaccagctttgtnnaggaaaaggtactgatcttnnnnnnnaagtcaatctgtatttgtgtggggttttgggggtctgtgcttaattatatgttaatgtgattgtgctttgtataaaaattttttggctatttgattttttttttttaggttttagagttaccaactttaagtatatttatgagaataaaatgtgttaatgttatgaggatatgagggacatttagnnnnnngtcatctgattctattatttagagtnnnnnnagacattttacttttagagcaggcttatgtcttattaaaattaatttagaaatgaggacttagtgcctcttttaagtagtgtactttttctttttactttaaatgtgccaggaatcattctccagttttgcttttactccaaaatgaacatcacagactggcaaggaactgtgtgttttctcaatcaggtttaancnnnnnnaatgtg

SEQ ID NO: 152 - DNA, 481 bp, Canis familiaris
  misc_feature (1)..(481): n = a or c or g or t
agatatccacaacatgnctgtcaaggccatganntttcctcccaaatcgtacaacaaggacttggngnctgcagaggaacggcgtgagcgagagcagcaagatttggagtttgccaaggagatggcagaggacgatgacgacagcttcccttgaactagggactgagggggggggggtggtgagtggggactggctctttatcttccccctcagggtcccctgcccagggaaccggcccctctcctgtacatgtctcacagactgcgcatgtgcagggggtgaagggtgcagggagctagccacccccaccttcaccccaggacccctccccagccggtgacagcacacggtgggcaggaggtgggcaggtggcctccccagggcagggtcctggctactgatacgggcagcaggatgggaggggagagccctgtgctctccagagagctggggactggaattgggacatgggttgggttg

SEQ ID NO: 153 - DNA, 543 bp, Canis familiaris
tctgcttatgctgggggagagggaatccatcatggtcaccgtggaatgcccagttcacctgcagttatgaggtctgcagggatggccaaaggagcagctaacagggcagcctcaggcatggcagtagcgggatcagcaacaagctctacagcaggcttggcagtggcaggagcaaaaacaagctcttcatcaggtgctctgagcttagcagcaaccaaatctacgagcacaggccaggtaagcacggccctgtctggagccaccgtcaaatgtccgggagaaagcggatccaacaaggccatcgcaggtgctgtcaatatatcctcagagggtacaaatgtggccttgggtgctgcaagcatgtcctcagtaggtgcttctaccctgaccacgggggctgccagtatctccccagggagcagcatgagtgtggtgtttgcaggcaccatgacaactggcacagctgctgcagaaagatctggatgcctagttgtaggaccccttgtctccaccttgcagagtgaaggctacatgagtgaacgg

SEQ ID NO: 154 - DNA, 198 bp, Canis familiaris
  misc_feature (1)..(198): n = a or c or g or t
tttccccagnnnnnggcctcnnnnngnnnnnnnnnaggaccttctcccagnnnnnnaggnncnnnnnggagnnnnnnngagnnncctcccatctgctcnnnagagcnnnnnagnnnggcccccgaggtcagcaggcgctcctggccctcccannngnnngggggtttgtctccagcttctcnnntnnagccgccatct

SEQ ID NO: 155 - DNA, 587 bp, Canis familiaris
  misc_feature (1)..(587): n = a or c or g or t
aaagtaaaattgaaattagtctctggggttatgcaaagttatgtgggaatcccnnnnnntgccatttagaactaatgagtccactttttgaggggtttaggggaaaaattgcagaataacagaaatggtttcttcataaataacatatttgtattattcactaggacctcaagaattggtatgtatgacgtgatctggttcagagcctggcctgtcagctatatacgtttcataaaatcatagaaattttttcagtactgatggtagaaaacaaatgacattttattaatacacagaagaaatatatctttctgataattacagtattttatctactaacccaacacccctttcttcacactgatagatctttggaaaccaaattaaatgtagtatgcatggttctggaaaacaaaaacaggtataagttgtagaaatcttgttgagtcttctttagtgcacattcttcttagggactacagtgtttcagctggattatgccttcctgtggacagttgtatggacactaattataatttgccagccatgccttttcaatgttgttgggccagccttttctaattatg

SEQ ID NO: 156 - DNA, 440 bp, Canis familiaris
  misc_feature (1)..(440): n = a or c or g or t
tcagactctttgttnnagcacggatctaccacacaatnnnntatttaacaccccttccccagccaaatcgcgctttggctttctttataggatatnnagnnactttttcaatggcttacaggnngctgaaaagtagattgtatttgtaaagagaatcatataacttgtcatccaattactttctaagaattctacaatttcaatttataatgaatagtttgttagattctaggtgggagggnagcgggaaaattaagatggggccaacagtctgaatatcaacatcaccaatgtcctttattgtttcatatttgtgcttgaaatttaatgtaattcttaaagtcttttgacttctttaagtgccttgttgtaaattctgattataattcataatnnnctttcaacatttaatattttaaatctataaaaagggtgattgc

SEQ ID NO: 157 - DNA, 590 bp, Canis familiaris
  misc_feature (1)..(590): n = a or c or g or t
cgcgcaaatgagcannntgagctgctacaagtgagtcgtactcgctgcaatgccaggtaaagacttgtacacaagtgctcagtgccagctgtcattgtggcaatcatccgttgtaaaaaccatgtgaatccctgacacttctcattgagataattgtgaaattgcatgttcagatgttttagcgtggggcctggcaaacacaggaagtgttcggtaaaaatatgagccgttgttactaatattgtgaatagtttttgtgtttacagtaaattgttcctaagttttttccctaatttatattaatggaaagaaatgtgactcatactatttattcagccttacaaagcaaattgttttatttttcatctcgaaacatctggatcactttaattgaaaagtattctgagactatggaatgggatgttagaaaaatactgcaattctagaattgtgtgaatcaatttttctgtgtacaagacacagggagtgtcttgttgcatggggagattaataagaaccagttacagtatctattcccccatttcaaatccttgtcattgaatggnnnnnnttgttcatgctgattctaa

SEQ ID NO: 158 - DNA, 501 bp, Canis familiaris
  misc_feature (1)..(501): n = a or c or g or t
tatatgtagcatcatttttgtcactcagtacaatacagaattaacataggtaaatgatcattttganagaacaatcccaatgtcagaatcatttactgtcttcaaaacattctcctaaatattgtcattcatgactagaacctatattttgaatgcactgcactagattnangagaaatgactgaacaaacacatgcggccgatacctatttgctgaacaatgtagagagtgtgaatgaatgtaccaagaaagcttttaaaacaacccaaacattcagtatttccgatgtcaagttcaccagtggctttcatcattctttggcagtcaaatctttctgtaatgaatctccaaagactttatggtgtttttttcttttaccttcttaaacaacagaaacctggtaatacttcattctccaacaattatgtaatgttttggctactggtcattagcttaaaaaggtgaaaagtaaatcgcactttgtccactggaaattaagt

SEQ ID NO: 159 - DNA, 552 bp, Canis familiaris
  misc_feature (1)..(552): n = a or c or g or t
gncgtgctgttcccgtnntagggaagtgaagcctgtgagctnnaaggtaaatcccagaacatggggggtgggggtggccaagtgtggccccttccccatcccgctctgcacttgatgggcctgcagggatcggctgggtgatccacacctgtgcttgctctctcttgttggctgtaacctgattttccatttctagcagtgggacaggaagggattggataggaacttgggacaggggccgagagctctagtttcgggctcctgtcatgtctttgattggctccagccccaaacctcccagatacccctgataattatgacaaatggatggagaagaaaaattctaatcccatgctctgtgtatgtcttttcttaagacctccaaagtcacctctttgtttggccttaaaaaataatccagccatactcactcaggacaaggtcgctgcagccgccctctccgctgggtcttatcccaacctccaatgctgtgacgaatgtagcttgtatgctgacttcgatcccctgccaccgtgcttctgtgatgtaaat

SEQ ID NO: 160 - DNA, 434 bp, Canis familiaris
  misc_feature (1)..(434): n = a or c or g or t
tcaatcgtnnaaagaacccntgcaacagcctttggtaacaagttacacatatatgcaatatttatttccacagactcagaagaataaaaagcatccaangaagatcctcgagctcagcattacttgtcattttggttgcagtttgtgaagcccacagtaattaggattatagggtaaacattttgttcagccagtgccgtttgagttcggaatctgagcctgagggatgtttgatcttacctatgcctgtgatcatatctgttatttatgagcgaatagcatggtgcttgcntagtcttacatgtgtcaacttgtagaaccttcataacagaatttggaggtgaggtttgtatggctcattttgcagacatggttcagtgatagagatgtctgtatgctctatccctcatctgccccatccatgatcttgggac

SEQ ID NO: 161 - DNA, 506 bp, Canis familiaris
aatcagtatctttttacagtattctttctacgtgatcttttttgtacatttaaggatattttgattacattaaataagactgctgattttgctactttttttaaggggtcttcaagtacgtaaaaaccatacattataggtagaggaaaagtgttccttgattttgcatctaccctctcacacccaagctgtaaacagttgacatattttgtcttaaaagacttggttcaatatatgcttatttgttttaaaacttgtatcatcaaactctctctttagattaaaaatgctgttgaatatgacacttttgaggagagagtgtgctcagaacgtggacaggatacagtaggccaagcatgctaagcataccataaattttctaattttacacctaaaacaaggagatgaggtcactaaaaaataaaaatacatatgtaagacttaatgtactcttgctttgtcaagctgtttgctgtactttctgagatcataatgttacgctaact

SEQ ID NO: 162 - DNA, 441 bp, Canis familiaris
  misc_feature (1)..(441): n = a or c or g or t
acgagctctataccaatgnctgttgagcaacttttattaaccagaggaatgcaattaacagtagcatgaaatagaatactgtagtataattctaaagctgctgttaatacataatagccaagtgtaaactgcaaaagttcgaacaagtgcctatattttgctatttttggcattactgtagagccatgtacaatagaaagcaatgcaagacttgtaaacttctcacctcttcttgtaatcgaggaataccaaatgctccccctcaggttattttgctaatggtacacataagttgcctctctctgttacaaatactgtgttccaatattttactttggtgtttggatctacaaatagtcaagggctggaaattttagctttcagtaagcttcaagcctagccatttctttttaatctgagacaatatttgattcctagttc

SEQ ID NO: 163 - DNA, 491 bp, Canis familiaris
  misc_feature (1)..(491): n = a or c or g or t
annacctagacaccccgtactgccatgggctataccacctgcctgctgcccgaagccaggggctggccccaaggttgatgctctgggtgcgaacctggagtccagaactgctcaccaggatgccagagtttggggatgtgctggcccagctgcacggcaagtcctgccacacagcaagggagccacccgaaggcagaaggtctaagagcgccatcgacagcctggaggcctttgtcggagaccgtgccggtggggccaggatggctgggatggagcaggtcacgggccacagcagggatgttccccagtgcattcaggaagcccctgcacacacagacatgcctccttccaggcgccctccagcaggccggctggggacccccacccccgccccccgtcccagttcagactgaagaccactctccctattgcagcagaagacctgggatcgaagtctgcagacagcactgcaggaggatgcggagatgatc

SEQ ID NO: 164 - DNA, 518 bp, Canis familiaris
  misc_feature (1)..(518): n = a or c or g or t
cncactggctgcagagccaggacttggcttcagctgggtgtgggccccctcccccagctaagctccaggcaagtggcaggtggagccggccgtgacgacccttccatgggtcgtcctggcgggtctcctggcctggcctccgactactagacatggctcttcagcacatccctgaatggagcaaccggccgggaaagccaggaactcaggtccccaaccaaaggcacgatctccccgcccaccctgcccccgaggttcaccggagcctccccaccctacaaaggccctgaagtgccgtaccagcatatgctgagacgaggccagccacgcgagagccaggctgcccccagtggaccagctgagacttgaagccaatccgtcccatccgtagctggctgatggcacccctgctgcagtgctcttcgtgctcaggcccctgcccccatcccgagcctccagcccgtcctcccccttccatccttcgttagccatttggcccttccacctgttaggccagc

SEQ ID NO: 165 - DNA, 524 bp, Canis familiaris
  misc_feature (1)..(524): n = a or c or g or t
acntggtcagcgccaagaggaannngctggccccggcgcacgtngacgagcagatcttcctgtacgagaatgcgcgcaccggggccgaggccgagccggaggacgaggacgagggcgagtggggcctggaccatgagcaggtgttcccccttggggatgctgtgcacgctggcttcttcggcatcagggacagcggctttgtgtagctgccggtgggtggacaggtggtcaccacggcgctggccgctccgctgtaaataccaagcgcgcgggggtggccgtgctggcgggaaaaacgtgggctacgcacctttcctctgagagccccctcgcatcccagccaaagcgtagggatgcgctgggaaggttccagaagcccctttacgcacctgctggctgccggttgcagatgatagctcccagagcagtgcagccaggagggagggacagtgcagggagggacggagggagggaggccccttcgcttcccagataaggaattccaccccccaggaccaggtcct

SEQ ID NO: 166 - DNA, 572 bp, Canis familiaris
  misc_feature (1)..(572): n = a or c or g or t
gacaaattctcntcaccacaatccaaacttagtgtacgcactgctttacaaacgagatctgtttgaacagtttcgaactcatccttcatttcaggatataatgcaaaatatcgatctggtgatcaccttcttcagttcccgattgctgcaggctggagctgagctgtcagtggaacgggtcctggaaatcattaagcagggggctgtggcactgcccaaagaccggctaaagaaatttccagaattgaaattcaagtatgtggaagaggagcagcccgaggagttttttatcccgtacgtgtggtcgctggtctacaactcagcagtaggtctctactggaagccgcaggacatccagctcttcacgatggattccgactgagggcaggacagcatctcccctgctcacctccctccagccgagcagcccttccagtgactttctgggaaacggaagtagacggattgcctgatacaccttctagcagagaggcttgcacacggcgtgtttcccttacacacttggatttggaaaattggtgccagttggcagtagatcactccgcttagat

SEQ ID NO: 167 - DNA, 625 bp, Canis familiaris
  misc_feature (1)..(625): n = a or c or g or t
gggnatgacggggatgatgacgannacgacgacgacgatgatggcnntannnctgatgaggagtctaatgacgacagtgatgatgatgatgagtagccccgaccccgggtgatgggtgaaaacacaatcacagctgcccactaccatgcagacagcaccagggggcagcgagcagccccagcctccgcgcaccagctccttctccctttcccatgccttttcccacccccttctcaccgggagctgttccactcagcaaacgcctctaaacccagtaatcccactcagcagggactagtggggaattattcccatgtggactgtcttgattgtcttggaaaagctcttgttctttgccagaccgtcactggtcatggcaaggccggaacctggcggtctggggacaataatcctctgacacctcaactcaagtctacttgtccttgacgtgataataacagaattgacagccggcaaactcaaagcagattgtgacctcacagtccgagcccagggagacccacgattcatccatttagcttcgtgcctagaacatcagtgataatccctccttcaagcgagaggttccctcttaggaaaggctcagccttggaaacaagtgtat

SEQ ID NO: 168 - DNA, 587 bp, Canis familiaris
  misc_feature (1)..(587): n = a or c or g or t
ttccccccaccccactggggctgcannngaccatcgnngagtccttgtatattgcccggcccctgctgcaccgtatcctctgcctgcggctgcctggcactacagggcgggccaggagtggggcgggcgggtgggccacgtgctggagacatccttgacaccttggccgtcagtgctcagtctgggcctgtggggtcagcggtcgtggacaccctggctcctgtccggcgtcgtggatgtgaccagcctgagccttctgagcgacaggaagggcttgacccggagggagcggctggagctacggcgccggaccatcctgctactctactacctgctgcgctccccattctacgaccgcttctccgaggcaaggatcctcttcctgctccagctgctgacagaccacgtcccgggcattggcgtggtcgcaaggccgctcatggattacttgcccacctggcagaagatttatttctacagttggggctgacacatcccgggagtgggtgcagggaggggcagggcggcacgttctgctgctgtgggcagggggtgcctgggccgttcagttccccggggcccctttg

SEQ ID NO: 169 - DNA, 375 bp, Canis familiaris
  misc_feature (1)..(375): n = a or c or g or t
ctccgctgccatcacccttgnnnagccancnnnantgcntngattattacagtagtnnnntaannnactctctgncccacacttgattcccctanngcgtnnnnncaaaataacagccaaagtaatctcttaaaatatagatcctatcacatcacttcccagctcaaaccttccaatggcttcctattgcactcagataaaaaaaaattttttttttaatttaagcnnnnannnnnnnggctcgtattttcaattgagaatgatgaaaagcttcataaaagtcctgcatgatctgactctgtacgagctgagnngaactcttccgaatttcattcaatatttcaggcacgatcctgcctcaagatctttgtactt

SEQ ID NO: 170 - DNA, 699 bp, Canis familiaris
  misc_feature (1)..(699): n = a or c or g or t
agaagaaagtacctgacaaattannggattccagcacagtgactcacnnattcaagatnnctgaaaacannnnnngtgtgatgacaggaatgacagctgacagcagatnnnnngtacagagggnacgctatgaggcagctaannnnaaatacaagtatgggtatgagattcctgtggacatgctgtgcaaaagaattgctgatatttctcaggtctacacacagaatgctgaaatgaggcctctcggttgttgtatgattttaattggtatagatgaagaacaaggccctcaggtgtacaagtgtgatcctgcaggttactactgtgggtttaaagccactgcagcaggagttaaacaaacggagtcaaccagcttccttgaaaaaaaagtgaagaagaaatttgattggacatttgaacagacagtggaaactgcaattacttgcctatcaactgttctatcgattgatttcaaaccttcagaaatagaagttggagtagttacagttgaaaatcctaaattcaggattctttcagaagcagagattgacgctcaccttgttgccctagcagagagagactaaacattgtagttagtttaccaaatccatgacgccacttgcctgtgtctggtagcaacagaccaacatcatggaggcccctggattgaaaaaggaacctctcccactcctcctgcca

SEQ ID NO: 171 - DNA, 587 bp, Canis familiaris
  misc_feature (1)..(587): n = a or c or g or t
ctctcttcaaaccaatgaatnnagtcacactggnaggttggatttannatgggtgtcagccccatttccacatttgaaactaagtataagtttttgttgaaactcctctttcactaccacgctgggacaaacttgcctttctacctaacttgtcctgaaccagtggaagtggctaacggtttagctttttaagtattcacatcatcctttcagtgcaaatcctatttggtatgtgtcagatccctaacacagagctcagcacctggaacacagtataccctccatatttgtatattgcatgacctagaagtcagtagtggagtcaactgtgccacccatgtcagtaatgaagatctgatgagcagatcaaataaatactctcataattctcagaaaaaaagaacaacctaggaatcctgaatatgtcacattgtaatagtaaaatttttatgattaaaaaaactggcattgcagaaaacaggaaaatacaaagaaattcaaaacatccataatctcacaagatggtgttgttaacatttttatgttcatattttacatgtaattnnnnnnnaaattgggatgctctt

SEQ ID NO: 172 - DNA, 532 bp, Canis familiaris
  misc_feature (1)..(532): n = a or c or g or t
agaggaatggagccatggactctaaagcacaaaggttctgactctgatcagctcaagccagccaaggactgcacacctattgagtatccaaaaccagatggacagatcagttttgaccttctgtcgtctgtggcactgagtggtactaaccacgagcatgaccagccagcacacttaaccttaagggacgacagtatccccgtaaatcgaaatctgtccctattcgatggaccggagcagcgcttctgccctgcaggagtttatgaatttgtacctttggaacaaggtgatggatttcggttacagataaatgctcagaattgcgtacactgtaaaacatgtgatattaaagatccaagtcagaatattaactgggtggtacctgaaggtggtggaggacctgcttacaatggaatgtaaactgcaactgattgcatttgcggcacgtttgatagtttccttaaaatgtatggcaaggtaactttacatatttagaagnnnacaggtgtcaaaatnnnntaccgtgtattac

SEQ ID NO: 173 - DNA, 617 bp, Canis familiaris
  misc_feature (1)..(617): n = a or c or g or t
gtcgccagaangcgncgagtgcancatgtnntgagccccgaggggacagaggcctgcttccagctgcgagatgnctcggtggtagactcagccaactacagctgtgtctacaaggacactgcgccacccttcgccggctctgctccaagctcgagcttggaactgcgcattgatggaccccctcccaggccacagctccaggctctgtggagtggggctatgattcctggacgtgatgccatcctgcgctgcaagggccaggtgccggaagtcgtgccgcacatcacttttgagctgttgcaggaaggcaaaaaggagccttcaacccaggtctgggccacccacccctcagcggaccttgtactgacctatgtggggccccagcacgcaggcaactacagctgccgctatcgctcatggttgcccatccccttcgtgtctgagctcagtgacccagtggagctccaggtggcaggaagttgatcaagctgcagactaaggccgctgatgctatctttggcaagtgctttctctggtctggctatgatccctcatgctgcagctagaggctggactccccctggaagtgctggaggactgtccctaattcctcctgg

SEQ ID NO: 174 - DNA, 502 bp, Canis familiaris
  misc_feature (1)..(502): n = a or c or g or t
gggatcctgggcannnaaggttggtgccatttacagtntgcagattnnnnnnaaccaccaagggttagtgcacatgattatgagagctgcacagccctgccccgcgnactgatggtgagccatccctgaagggccaccactcctgtcacccccatgctgggctatggctcttggggccttttaatcatgtgctggtacagcagccctggctgcttcagctaaattgaaccctgtggtcctcagtggttgaggtaatcccctgaattggccaggccactgccctgttcccattctggtttctctgagtgagttacttagagctgctcacaactcttcctgggcatgatccaccagccccagcctcactgtgtgctggccagtgtgacctgcccctccccccaccttgtgcagagccccctccctctgggcccagtggtttatatgatgacctttgctccgtttacagcagggtttgaagcagagctctctgtcaggaaccctg

SEQ ID NO: 175 - DNA, 482 bp, Canis familiaris
  misc_feature (1)..(482): n = a or c or g or t
tggggtgcactgagaccccagtaattttttnntcatgtgtatggtgctccttatgattcgtcttgtatttngnntnnctgatacccatcaggactgctgctctaacttccactctttannttgcccaaatctccgtgtccggaatgctttatgatcaactgccataggactgatggattaaccagtgttcggctttactcggagnntatgccctgcacagctcttgtatgtatcttagatnctaggaagtttttagcatgtgaagtgtgactcttgtttgaatgtttattacaggtaccttgtgaattccagaacagagactgtgcctcaaaatggttgggcccatgaacctgcactatctttcatggtgatgttttgaaaaatacaatcaggaaaaaagcccaacaagtttggaatttaaaatagaatcctctatcatgaaatttaaaaagaacctctcttcctcctttcctcaatcctaa

SEQ ID NO: 176 - DNA, 618 bp, Canis familiaris
  misc_feature (1)..(618): n = a or c or g or t
cgaaaccagggaatacatcaaatanngtcccaagtatgagaaagtgccagtcatcttggttgggaacaaagtngacctggaaagtgagagagaagtgtcatccaatgaaggcagagcccttgcgnaagagtggggctgcccctttatggagacttctgctaagagcaaaacgatggtggatgaactctttgcagaaatcgtgaggcagatgaactatgctgcacagcctgataaggatgacccgtgctgttctgcatgtaacatacaatagcattcacacatggctgtcctggacgggacttgcccagtaccataggcgacacacacctcgtccgcccgaccacagagcttgcaggacgtgtgctgtgaatctacagtgagatagcagccctcattcagcattgagcagtgattgtcagtcgatatctctgagtaacgtttgggttcagcaaccacagtcttcactatggtcctcagcctcctgtatgcacctgcaactttaaggcatagccaatcgatctacagggtgatctccttttgaaagcttatgatggcattgtcacagagttgacagaagcaactattgtataaattaaaataatcacgagaaaacannnn

SEQ ID NO: 177 - DNA, 662 bp, Canis familiaris
  misc_feature (1)..(662): n = a or c or g or t
cagcccctgcccctgccccagctcctgaaccccccannnaanctgcctttgatcccaagagtgtaaagatagacttcactgctgaccagattgaagagttcaaagaggctttctcgttgtttgaccggacaccgactggagagatgaagatcacctatgggcagtgtggagacgtactgcgggcactgggccagaaccccaccaatgccgaggtgctgcgtgtcctgggcaagcccaagcctgaagagatgaatgccaagatgctggactttgagacgttcctgccaatcttgcagcacatctcccgcaacaaggaacagggcacctatgaggactttgtggaggggctgcgtgtgtttgacaaggagagtaatgggacagttatgggtgctgagcttcgccatgtccttgccaccctgggagagaagatgactgaggccgaagtggagcagctgttggccgggcaagaggatgccaatggctgtatcaattacgaagcctttgtcaaacacatcatgtctgggtgaagcagactcgtccagggtgcctggcccttggcctcagcctttctggggcaagtgaagcaagaagcccagaataactgagctggagctaaggttctggactcattgcatgcagccctgagggcatcccaggcccat

SEQ ID NO: 178 - DNA, 471 bp, Canis familiaris
  misc_feature (1)..(471): n = a or c or g or t
aggcaccaagcatgtnnatatgtatagcgaggctcactcacagccagcnanntgacattaataactaacaaatggatnctcttacatgatgctggaactcctgatagtggtaattattattgagaaatgacttttgggaagttaaggtggcataaagaatttgtcatctgaaggctcttgcaggtaaattatggtaaatttttgtaagnnannngacttttaaagacccgcacaaatacggatccnanactgactttgaaaaaggcatatatgtactagtggcatggaaaacgcactatactcatgcatgcaaattagacaaccgagtatgaatctatttgtgggtgtactnnngctntngccatgnngcgggcatcattntntaccatccacttgtccatatgaagcttgctgccaaaatggtagcctggctcatcttctgaacatttggctcatctnnnnnntggtcct

SEQ ID NO: 179 - DNA, 641 bp, Canis familiaris
  misc_feature (1)..(632): n = a or c or g or t
cancttactgtggcatgacctgtgctgagctctatgagaagctgnntcngnnctaccgcatnnnnnannnncgaaactgtgatgatgaagtgtacgagctgatgcgtcagtgctnncnngaccgtccgtacgagcgacccccctttgcccagattgcgctgcagctgggncggatgctggaagccaggaaggcctacgtgaacatgtcgctgtttgagaacttcacttacgcgggcatcgacgccacagccgaggaggcctgagctgctgtcaagccagaaccgggctctgctggccagagcaaatccgctctccgacctgtgacttctgatccttgcagcctctgatctgagctgcctcaaggaattttttttaacttaagaaaagaggggattcaggggtggggtgggcttaggggatgcgggtcctcatcctttagagttgctcccatgccttctgcagctactcttatagtgactcctcccatttctccttctcgttcagccgctccacatatatctcctcttctgcaactgccctcactcagcccttccttcagctcctgcacccaagccagcacccacaccactaacatttcccattcggctactcccccacgtctggctttataatcagaaaaa

SEQ ID NO: 180 - DNA, 497 bp, Canis familiaris
  misc_feature (1)..(497): n = a or c or g or t
gaatccnnnnngcacagcagctgtcttgccaccatgaggcgacangcacaaggacaaaatccaacacggtgaggttggcagaacaggaaaaagaanntgagtcttnnatgacccagcctggcctgccccccacttcccatcaccttgtgatgtgagaaaaacccatctcagtccattggatccacaggaaagagcagcttcacggcctcgggtggaaattgcggctatactacaccacatcagaatgtgctgttctcatttattttttaatacaaacccatctttgcatgtgggccctggcagaaaattggtggttacgaaatattgacgaaggaggtaacataggagggttccagcaaaatagagtacccgttccatttgttaagtggacatgtcaaactgtgtggaagagccgcaggaaggtccgtccagctggcctgtgcctgcagccagctgatggtgtccctcggtgccatcgcgctccttcgagaagcaat

SEQ ID NO: 181 - DNA, 618 bp, Canis familiaris
  misc_feature (1)..(618): n = a or c or g or t
gancagggacancatngactacttgctttcaaagaatgnnagtnncaatgncatcatcatcgtagtggggggtgcagcngagtccctgagctccatgcctggcaagaacgcagtcaccctgcgcaatcgcaagggctttgtaaaactggcnntacgccatnnagctgacctggttcccacctactccttcggggagaatgaagtgtacaagcaagtgatctttgaggaaggctcctggggccgatgggtccagaagaagttccagaagtacattggctttgccccatgcatcttccatggccgaggcctcttctcctctgacacttgggggctggtgccctactccaagcccatcaccaccgtggtgggtgagcctatcaccatccccaagctggagcacccaacccagcaggacatagacctgtatcacgccatgtacgtggaggccctggtgaagctcttcgacaagcacaagaccaagtttggcctcccggagacggaggttctggaggtgaactgagcctgccattgagggccagctcctgggaggaaccagctacaaatcgttttctaccaagttcttgaatgcttttttgnnnnnnaaatttggaagcgtca

SEQ ID NO: 182 - DNA, 651 bp, Canis familiaris
  misc_feature (1)..(651): n = a or c or g or t
cgcnngctctganntgacagcctacttgatgggnctgatgaatnacttggnnanncacttcaccgaggaccagctaagcattgtggaggacatcaagaagaaatgctgctttgtggccctggaccccatcgaagagaagaaagtcccagccactgtgcacacgatccagtacactctgcctgacgggaaggagataagcctgtgccgggagaggtttctctgctcggaaatgttctttaagccttctcttatcaagtccatgcagctgggcctccacacccagacagtgtcctgccttaacaagtgtgacattgccctcaaacgggatctcatggggaacatcctgctgtgcgggggcagcactatgctcagcggtttccctaaccgcctgcagaaggagctgagcagcatgtgtcccaatgacaacccccaggtaaacgtgttgcccgagagagacactgcagtgtggacgggcggctccatcctggcgtcacttcagggcttccaaccactgtgggtccaccgctttgagtatgaggaacatgggcctttcttcctctacagaaggtgcttctgaactctgaagaagcatggttgccgtgcgtcggctttgctgggcgagcacccaccctacacatacggagctgagcc

SEQ ID NO: 183 - DNA, 494 bp, Canis familiaris
  misc_feature (1)..(494): n = a or c or g or t
ttttaaaagaagggtactnagtatctttaatcacatgttggtcaagacttttcttttaaaggttcatttgtatgatacatccatatgtatatataattttgttcttgcctagtgaatttcaacattttaaagttttcaaaaagccattggaatgttaaattaatgtaaagggaacagcttatctagaccaaagaatggtattttcacacttttctttgtaacattgaatggtttgaactccttaaatgtctgtnctgctaaacttttgattctttattagcacacaattacctatttttaaacactggcattttccaaaacttgtggcagctaactttttaaaaatttcatgacatgcagtatgtatagagggaagtcaacaatatgtgggagagcacttagttgtccttgctttttaaagtaagacttggtgctaagagtttcaggaatactgtattgttgaagatggcttttgtacttcctgtggacatgta

SEQ ID NO: 184 - DNA, 510 bp, Canis familiaris
  misc_feature (1)..(510): n = a or c or g or t
ccatccccctttccttttgacaaggtnntagagctgaggtttcaagccagggctnnagggcaatggtcatganctcaccagccacctttgaggtcatggaacctgggagcnnnagccccaacccccacgagatcaagcatcagatggaccttggggtcactgggagggcagaggtcacaagcctctagagagagggggtctgtgtgtgtgtgtatgtgcacctctgtgcacatgagagatgagagtgggggtcatttcagaggtcatagctcatgatctcctgaggtacaccatcgccccctccaagggcccctaggcccttggcctgcctccccaagggctcattaagccagaggccaaagtgccgcccctccccttcacctaccacccaagtcctcatgccctctcagggctaggggaggaggggctaacggaaggggggttccatgtacatatttatctctccttccacatagccccccagaccttttgtacatttttacaggggtg

SEQ ID NO: 185 - DNA, 511 bp, Canis familiaris
  misc_feature (1)..(511): n = a or c or g or t
aacccgtgggccgcttctttgggaataactgggctgagacntacnnnnntcgcttctngaaggagcaccacttcgaggccattgccctggtngagaaggcnctgcaggctgcatatggcagcagcgcccccagcatgacctcggctgccctccggtggctgtaccaccactcccagctccagggtgcccgtggggacgcagtcatcctgggcatgtccagcgtggagcagctggcccagaacttggcggcgactgaggaagggcccctggcaccggccgtggtgcaggccttcgatcaagcctggcacctggttgcccacgaatgtcccaantacttccgctagggccaggcccgcctccagctgccagaggtttctctctttcaggtcacctcttctgttctcatcccaaccagtctgccttaagctgatttagtggacttttttgattgtctggatcaatgcattatttttctagattcctatnnggctcccagttgcnnnnncaatgt

SEQ ID NO: 186 - DNA, 82 bp, Canis familiaris
  misc_feature (1)..(82): n = a or c or g or t
ttcnnnnnnannnnnnccnnnanccgtgccaagtccatggctcttgcctttcacacagcaaagtactgctgtcgctcttggg

SEQ ID NO: 187 - DNA, 474 bp, Canis familiaris
  misc_feature (1)..(474): n = a or c or g or t
gtccgaactcctcccgctggtgagcacaccggaggcacaggggccgcccccacnngcgctctgccgnnnngtgcatagcctgctctgtgagngaggtgagcgcttcctcaccatccttcgagacgaacntgccagctgagcccttcccgtggccannnnccactcaccttgcccattcccaggcacaggaccctggcatgagggtgcacttgtnnngaccctcagaccactgggagaccaccaccaccccttctctgttaggtgaacggggattgagaaggtctggtcggcctgggggcccagggatggctgtagccaccctggaaaccagggccgccaggtgggctggggacagcctcccggctcttgctgaggagcccagggcccttcttgcagcagctaaagctgacaggcctccgcatggcgtgcacatcagangcctgcgggcttttttatnnnnnnncctctgttttt

SEQ ID NO: 188 - DNA, 399 bp, Canis familiaris
  misc_feature (1)..(399): n = a or c or g or t
actgcaggggagttagtgtctggtcagctgggctctagcctgtagcttttccnnctgcgccctgacaccagtggtagtcgtcatcagccttttgctgttagcacttgagctccctcacgcatctcatcnngtcagatgaatccagtttctccaaagtggaagctaaccaagcatgagagaggtttgtctgcaggaccnnncggcttggatcccaccaaccccatgccccaaatccatgtgtattgncttctggcnnnnngggtgctgtcctnnnnngnnnngntcnnncagnnngctcnnngggnnnnnnnnnnnagnntncnnnnnnnnnncttggaccnnncctttgccctccatnnnnnnnntggctccagtcnnnnnnnnnnagtnnnnnncncc

SEQ ID NO: 189 - DNA, 622 bp, Canis familiaris
aggctgaggtgaataatgcaggggtcatcctcaaagtgacccatccccctgtagtgggcagcgatggctcctgcatgttctttgaggacagcatcatctataccacacagatcgacaacctcaagcatacaccacctacagccagcccccagcccaaagaggtgactttcctgagcttctctctatcctgggaagagatgttttatgcacaaaaatgtcaccgcttcctgactgacatcatcctggattccatcaggcaaaaggaccccaaagccatgacagccaaggtggtctccctgaccaaccagctgtggaccctgcacatcagccccaagcagtttgtggtggatttgctggccatcaccggcttcaaggatgaccggcacacccaggaacgcctgtacagctgggtggagctcacactgcctttcgccaggaaatatggttgctgcatggacctgctcatccagaggggcctgtcaaggtccatctcttactctatcctgggcaagtacttacaagagggctagggtgaccagaaatgcgccctcacataccccccacctgccaaggctcattttaagaatgtgtgtgcccatctgaaggtgtgtcagtctatttt

SEQ ID NO: 190 - DNA, 171 bp, Canis familiaris
tggctgatccaaggattctatgacatccatatttgcagccagtgattttcaagtactttgagtttcagacttataacaatataatctttgtgcagtgttagcattgcggatgctgaagatgatggccagctcatcagcgtatcttgaacaaaagacattaaatgatttcat

SEQ ID NO: 191 - DNA, 530 bp, Canis familiaris
  misc_feature (1)..(530): n = a or c or g or t
gnntnngnnnnnnnctgccagactgtcatcgaggacgattgccttcccatggaccagttcgctctgcatctgatgccgcatctgctaaccttggcaaatgatcgggttccgaacgttcgagtgctgcttgcaaagacgttaagacaaactctcctggagaaagaatatttcctaacctctgccagctgtcatcaggaagccgtagaacagaccatcatggctcttcagatggatcgtgacagtgacgtcaagtattttgcaagcatccaccctgccagtaccaaaatctctgatgatgccatgagcacagcttcctcaacctactagaaggccggaacctcatccttccgcttcatagggagccaagggctgacaagtgctccacacatgcgatctgggccagccttggggaggaggagagaccttcctcgcttgcagattaattgcaggtgcaagttgcctacattgataccagggattttaagagtcaagagaaagtacagtaaacactattatcttatcttgacttt

SEQ ID NO: 192 - DNA, 462 bp, Canis familiaris
  misc_feature (1)..(462): n = a or c or g or t
aaagatgtgcagtttgaacacggctaccggctcggcttcacggatgtcnacaagatctacntgcacaatcacctctcgtntatcctttactaccanngggagnanntagaagaggatcannaacatacataccgagtcgtccgcttcgaggtgattccccagagcatcaggctggaggacatcaaagcagatgagaagagttcatgcaccctgcctgagggtaccaactcctcgccccaannnattgatcccaccaaggagaaccaactgtacttcacctactctgtacactgggaggaaagtgacatcaaatgggcatctcgctgggatacttatctgaccatgagtgatgtgcagattcactggttttctatcattaactctgttgtggtggtcttcttcctgtcaggcatcctgagcatgatcatcattcggaccctccggaaggacattgccaactat

SEQ ID NO: 193 - DNA, 596 bp, Canis familiaris
  misc_feature (1)..(596): n = a or c or g or t
tatgtcaactcgnnngcttctcacaaaatcaacattncngagattaagatnnaagatattttgtctgtnctgacaagnnnnnattgttttaaaaggagccgatggnnaagccagaaatcccgagcctctggcccccaggaaatccgagagcgagccacagtcttgcagacggtatttgaagattatgtgcactccaatgagaggagggtctcctgtgcgaagaaagctctacaggccttcatccgagcctatgcaacctacccccgggagctgaagcacatctttcatgtccgatcgctccaccttggtcacgtggctaaaagcttcgggctgagagatgccccccaaaagcttagtgtcacagctgtgaagagaaggaaagcaaacctgaacaggcctgaccttcataagaagagccacagtacacaccancgccttgctgaaatcttgcgttccgaatactcaagtgggatggaggccggcatcgccaaggtcgaaaagcaaaacaaacatgcagagcccggcagccagccacgcatcgccgtctgtnnncggtgcccagccttggccgtgggaaaaactaagaaacactttcc

SEQ ID NO: 194 - DNA, 462 bp, Canis familiaris
  misc_feature (1)..(462): n = a or c or g or t
cattctnnacgctattctcgannnnncccacacnngcacccgtgaaagcagacacannggcacctgggaaagcacctgcgaaaacaggcacgccggcacccgcgaaagcacctgagaaggcacccgcaaaagcgggcacnnnggcacccgcgaaagcagcctcgcaggcatccacgaaagcannnnngaaaacaggcacgccggcacccgcgaaagcacctgcgaaagcacccgcgaaagcagccacgcaggcacccacgaaagcacccgcgaaaacccccacctcggactccaggcgcacacccacccaggtgtcctcaatggtatcctcgcggccatcctcggggcccgcatcctcggtgccatcttcgcggccatccttgcggacacccgcacggacataaacgttggtgcttcgtccctctcgctaatcccagcactgagcttgcatgctgtcgccca

SEQ ID NO: 195 - DNA, 678 bp, Canis familiaris
aatggcatcatatgtgcacagaaagaagctttgtaaactgtaaaaccactatacaaatgttgactttgaccatgtatgacatgttgctttctcagtttagaaaaataaacctgaaaaaaatctaatatataattatggctggcaaaagaataatttatgaactcaagttgaaaattggtgtcactttaaatggaattaaaaagaatttaagttgcctttaccaccaccatcttttgcaatttgtttaaaatgtcttggccatgggggcacctggctagctcagtcagtagagcatgcaactcttgaccttggggtcatgagttcaaatgccacattgggtatagagattagtttttaaaagtaaataaagtaaaaagtgttggccatggaaggaattgccagttctaaaactaattcagtggtgatgttgtctttaactgagaaatagtctagtttactgtagtggttctcaaattgtggtctgaggacccctgggggttcctggaaccctaggaggttcatgaagttcctcttccactacatgtctgcatgaggccagttttgctctatatacttcaaccaaagcaatgcactgaatgaagaagcaggcatgagaatccaggtgtcttctactagatagaaaagagatttgcaaaaatgtaaaacagtgccactctt

SEQ ID NO: 196 - DNA, 632 bp, Canis familiaris
  misc_feature (1)..(632): n = a or c or g or t
gccagggtnaccaagatgcagcannagatactgatgctcaggtcnnngnnncacaacctggtcatggaaaaccaggaggcagagcaggcgctgaggaagaagaaatataaagtggagacggaaatcgagaactggatccagaagtatgatatggagatgagtgcgaagcaggatgagtacgaggagcttgacaccatccacaaggaggagaaggtccagctggaggagctgaagcagaggcacaacgtgctcgtggaggagttcgcccagatccgggccgagcgggagatcaatgccaagaagaggatggaggccaagcaggagatgctgcgcatgacgcgggccgccacgctcatccaggctttgtggaagggctacctggtccgctccatgctcaggtccaggaagaagaagcggagcaagagcaaagagagggacaagaggaagggcaaggggaaggccaaggagaaggggaaggagaaggccaaggggaaggccaaggccaagaaatgagtctgctcctgggggccccattcctggtttgtgtctctgtgctccccacttcccagagagcaggccatgaggccacaaggagggggagccttgccattcctggctgaaatgatttttca

SEQ ID NO: 197 - DNA, 567 bp, Canis familiaris
  misc_feature (1)..(567): n = a or c or g or t
agtnnctgacatcaaattttcatctgcaggttgggttgcagtaacanntcagtttaaggacagactgcatctccgaggctatacanntcaaggaacagttctgaccgtccggccccctctcttgccacacatcgttaacatcaaaggagagcgcctcaagagaagtgtggcctataaaaccaagaagcctccttcccttgtgtacaatctgcagaagaaaaaacagatgaagttgaccttgttcactgaatattaacataactacatacataaatataaccataataaagctgtctttgctcctactcttcttgaaccacccaggactgtacctgtttgtaatgtattgaatttgtatatacaaggttttttttgtaaggtgtatatatgtatgtatgtgaccctaatatacttaaaaagtagttaagctacattcaagtttcttgcattattaagaccatatactggggtccctagttggctcagtcagagaagcgtgcaactcttcgtcttagggtcatgagttcaagtccacattgggcatagagattacaaaacaaaacttta

SEQ ID NO: 198 - DNA, 658 bp, Canis familiaris
  misc_feature (1)..(658): n = a or c or g or t
cgtcattncagtngaaantaatcttgtnntactaattttccagaccagannnngcctttaaaggtnngnntcaagngnctcatttgaaagtaantgctggctgctttggtccccatagatttggcacaggaggtggtggctatgcaggcttctgacttttttcctagatacttctttggaggttgcaagggctgttggggagagcagactttggccatgataggtggcctctggtctacagagattttgtaactccttggaaagtatcttagaatcattcttcctctcaatagctaaaaatttagaatagctgaaatctgtaggaatgaacctctgagggccgaaaatgtgacatttgggaacagttcttaaactctgattaactagctgtaatatagttttgtgaatttattgcactgatgctggaccttgtggtatatctgtccctaaataagtgttgtttcccccttcaatattactgtaaacaatggcacccattgtagcatttttttttaatgtttaatatgaaaactacaaactaccttaatttttacatgtgtttccttattgtagataagcttgtcttgctatctggattttttttgtgtatatatgttctaccaattaactacttttgcagttttaatcttgtattctt

SEQ ID NO: 199 - DNA, 572 bp, Canis familiaris
  misc_feature (1)..(572): n = a or c or g or t
ttcatcaaagggctagatctgtcattagcattattttctcagatcttccntccgaagttcggctattgaaattaaaactgtacttggtcctttcagggatcaaatttgactcagggtgttattttagccccaaacttacaacattatgaagtattaaaatataaatgtttctttatccaatctatttctagatattctagtatttgtttctgatggaataaatgacattaaaattggctcattatttaaatgtatgaatggatgtttgagtgctcaatctctaggtctttgtctagaaaggatgtttgcctcaactagcaaaatctttttgtcattgatattagaagtgacttctgagtacagttaagattaagtttctcctctttgccttcggctcttggttagaggcacaggtctctgattaagtaggtgtataatattgcatttaagtggacatgaatgagctttcctttaccatggaataaatcttcaagctttaagaaacagctttcattcccattcattttccatactggcctttgatgatatgcagatccctggtagcatgcctt

SEQ ID NO: 200 - DNA, 46 bp, Canis familiaris
  misc_feature (1)..(46): n = a or c or g or t
ctggagtcccaggatcaagtcccatgttgggctccctgcatngagc

SEQ ID NO: 201 - DNA, 601 bp, Canis familiaris
  misc_feature (1)..(601): n = a or c or g or t
aggggctttcaggtgtctggnngagaagggagatgtggnntnngtgaaagaccagactgtcttgcagaacactgggggaaagaacactgaagattgggctaaggatctgaagaaagaggactttgagctgctgtgccctgatggccaaaggaagtctgtggacaaggctcctgagtgcttcctagccaaagccccaaatcatgctgtggtctcaaggaaagacaaggcatcttgtgttagcaaaatgttacttgaccagcagcttttgtttggaagaaatggaaatgactgctcgggcaagttttgcttgttccactcagcaaccaaggaccttctgttcagggacgacacacaatgtttggccaaacttccagaggacacaacatataaatcatacttaggagcagagtatatcacggctgttgctaacctgagacaatgctccacctcgaaactcctggaggcctgcactttccatacatcttaaaatccaagaggcggagacacaccagatggtgatgggagctcacgtgacccataagttccctcggggcctcactggcctgggtggtttgtctggtttcacagttcagcggtggaa

SEQ ID NO: 202 - DNA, 650 bp, Canis familiaris
  misc_feature (1)..(650): n = a or c or g or t
gctcatcagttctccaatnnnggctggtgaaggtggtgccatgctnnnncttggtgctagtgactttgaattcggagtggatcccagtgctgatcccgagctggccctggccctccntgtttctatnnaagagcagcggcagcggcaggaggaggaggccnggcgggcagctgcagcctctgctgctgaggcggggattgctacagctggggccgaagactccgatgatgccctgctgaagatgaccatcagccagcaggagtttggccgcagcgggctccccgacctaagcagtatgactgaggaggagcagattgcctatgccatgcagatgtccctgnagggtgcagagttcggccaggcagaatcagctgacatcgatgccagttcagccatggacacatctgagcccgccaaggaggaggatgattatgatgtgatgcaggaccccgagttccttcagagcgtcctggagaaccttccaggcgtggatcccaacaacgaagctattcgaaatgccatgggctctctggcctcgcaggccaacaaggatggcaagaaggacaaaaaggaggaagataagaaatgagactgggggcaggggtggctgnnnnnnntcagggggctgtnnngtgtggggcgggaaatag

SEQ ID NO: 203 - DNA, 569 bp, Canis familiaris
  misc_feature (1)..(569): n = a or c or g or t
agggggataggtagagggagtgtccatttttttnnnactacaaanncggtttatnnaaatactatgggtgaaaggacttatattttaaaactaaatgctatatgttaaggaaattaaaagcattttatagctacattagcaagtctttcagcaaaacttattctcatgttggttttgtgtggggaattccatagtttgaatggatgcaacatgacatatataagagaaatagattttactgagctcattttgacaaatgcaatacaataggaatatctgatttgatataaaaaataatggaaatagtaggatctttctagaacattgtacaaattcaagatgcaatccattaataatttatattaatatatattattgtatatttatgacagaccatcatgaaacacccctttatagacctttaaaaatatccataatatgtttataccaaattacactatattaggtgcagaattgcttatcaaaagagaaatcttctgaagacaaatctggtaaaataatattttaatgtcaacttagtgattttttttgtctgattcatctgagtt

SEQ ID NO: 204 - DNA, 479 bp, Canis familiaris
  misc_feature (1)..(479): n = a or c or g or t
atatggccnttgaattcannagctgttgnnacttcttgcttttacatttctcccatttcgtttattctttccacctttactttttaaaagaaaaaaaaaaaaagcatagtgatgaaaaataaagactaaagagtcatcgttacctttcaaaactacccagaggtggagaccagaagcaggacagaaaggcttctgactagggtaagagggtggttggagacccaagggatcccttggatcctaggatctaagccatgtagggaagaatgggactgaggcaggtgggttaaggggtgtggataggggcctacagtgattaggagcctgcaggaaggatctggatcttcccaggagccagggggagtgggtatggtgcaggtcatataggcaggaggaccgattcagaggggttggcagttcagacaggcagtatggggaagaactggagcttggagttcccactctgnnnntaggtgttt

SEQ ID NO: 205 - DNA, 583 bp, Canis familiaris
  misc_feature (1)..(583): n = a or c or g or t
gggttgtnnnccagagcgtgagggcatcatcaccatngagtcccaggatggaggnnctttcccacaactgggcannnnnntcngactcgtccagcacccactgccaggcgagtacagcagcatcaccaccacccatannagtacaaccgaacccttcctactggatggactgaccctggggtcccagcgcctggaagcaagtggctccctcacccgccacgtgactcaggagtttgtgagccggacactaaccaccagtggcaccctcagtacccaggtggaccagcagttcttccagacctgatcccccaccaccacccttacccaacagtgtgctggaacctgggtccccaccctgcctcctctccctggctctgcctcagctactccatccttggatccccctccccccgcagcccagcgcacccacaatcggatcacaggaccagcacctcgggctacagagcagagggaaggtgtcctctgggggggtatgaaggaagcagaggtcccagaaggcccttctggctgcaactcccctaccccaggccccagcccatttgtgagtaaccaaggagtgggc

SEQ ID NO: 206 - DNA, 564 bp, Canis familiaris
  misc_feature (1)..(564): n = a or c or g or t
agaaggcaccgaggggacttcctcatgactatatctgtcattgctattattccacctctgaccctcagaagtctccatgtgagctgcttctgtgtatgtggcctgcattttgctagggagctgnnagatacagaagaaatttgaataattctctgacagttaaggaacttactaacaagcaagggagataaaaattaatgtattaaaatccttaaaacagctcaagggaacatgggaggcattctctctaagaccaaaatttcttagactctgaattcaagtctggtctcattatttgaggttcaaaagtatagtccacatggtagatttaagtttaagccctccctgactggtcatgttctaaattcccacagtgaccacctgtgtcactccttcagctcgtgtgggtaagatggctttcctattttagtggagacaggaaggataccgtgagaaggaaaccaagaaagtatagtctttagtagcatttttcatgagtgttgcaggcttccccatagaaaataacttcttgggttagcttcctggtttttccttaatcaagta

SEQ ID NO: 207 - DNA, 488 bp, Canis familiaris
  misc_feature (1)..(488): n = a or c or g or t
tatccccggacgattcatcctganngtagtacctcagcttcnnngtcncnnnnaacnaggtcaactcacacccagtctctcacaagcattcactccataaaagtggttgactaaaatgaatatgcacattgagatcttttaattcttctggttttaccaaggatttgaagtctcnancttttaaaatttcatcttcttagaacaccatggatacatcatgttcatcttttcaaaattacaagagactctttcaagtcataccatcctttgtaactatatgtaggcttattttaatgttattttttaatttaagcaattaagtaaaacttttttaaaaagcgacnnnnnnttgtttaataagttcagcntgtccctgattataccataaaagtgtataaatcctgttttctcaatgttatttccaaaaggctaaatcatttccagtgttattaaataaattttgagaactttattaaaaaaattatttt

SEQ ID NO: 208 - DNA, 582 bp, Canis familiaris
  misc_feature (1)..(582): n = a or c or g or t
agnaggtgcagctgtgctggtgctnnnngaatatgatcatgctgttcaacgannagcgcgaatctatgcagaagttttgggctatggactttcaggtgatgctggtcacataactgcacctgaccctgaaggagaaggagccttaagatgtatggctgcagctgtaaaagacgcaggtgtacaacctgaagagatatcctatgtcaacgcacatgcgacttccaccccattgggagatgctgctgaaaacaaagctatcaaacatcttttcaaagaccatgcacctgcccttgcagtttcgtcaaccaagggagccacaggacatctgttgggagctgcaggggcggttgaggcagcttttacagctctggcttgttattatcaaaaactaccacctactttaaacctggattgtacagaaccagaatttgatctcaattatgttccactaaaggcacaggaatggaaaattgagaaaagatgtattggactcaccaattcctttggttttggcggtactaatgcaacactttgtattgctgnnnngtaggacaaatcannnnnaattaaacattgatttct

SEQ ID NO: 209 - DNA, 494 bp, Canis familiaris
  misc_feature (1)..(494): n = a or c or g or t
atctgctttgcntcngaagtggtgctgggggtggggaacctggggggacactcccctctcccactccccttcctttgtcctgaccctgacacaggggttcataggttctatttcttccccaagagcctctgcaaagaaccccattttcctgtctgaatgcccctacactgttgtgttttagtggaatgtgttttcatttaaagacaactttgaatggggcacttctttttttcgtgttttaaaaatcaaaaattcttacagtacgaacagggctgtggggatgggggtgttggtgctgtaagaggtcactctgagtgcattttggcactgggatgggatggttggagtgggaggaccctccccactctctcccctttttttctaatatttaaggagtgtttttgtaggtttcaacaacaaccacaacttgaatttgtatcatgggaggtgggagggagtgtcttagaggtgnnnnnctaagcttaaggccaact

SEQ ID NO: 210 - DNA, 597 bp, Canis familiaris
ctgcccggggccctggtgcgcggcacgtcgggcgtcagagggcgtctgctgcctgcaaggctgcggtgacgtgaggggtgcgggctctgttgcaggggcgcgtggcgcgggcccgtctgtggtcctgccggggcgtccggtgccgccccgttcaccctgcccgtgacccgcgcgaggcccagcacgtgggcgggaaggtgggccgccgccctgcggaccgggctgaccccggggggctcggtgtgcgggaggttcgtcgggtcttcggggggttgggcttgcggagaggagcccccggctggcggtggcggtgtgggtgggcgggcaccccgggccctgcccctcggggggtgcggggctgaggggcgcggggctgaggggcgcggcatgcagcctcggaggggccgaggggcgcgctgcccagaaagccctcgtgggcctggagcgcggaccacccgccctcggacccacgcccggcttcatgggcgccccaggtgacccgagcccgaagcccggggcggcttgtgtcttcttcccgagtgtggagcccacgcggatcgcgcgctgcggtcatggggggagtgaggtatttattct

SEQ ID NO: 211 - DNA, 530 bp, Canis familiaris
  misc_feature (1)..(530): n = a or c or g or t
tgaaggctgccaatccgagtagtactcaaatgtgaggaactgctggtcttggattttttttccattaaattcagctgatcatattgatcagtaaataaacgtaaatagcttcaaattttaaaagtcaaattgcagtgttttttcactgtatcaaacgatgtcagtgctttatttaataaatctcttctgtatcatggcatttgtctacttgcttatatattacattgtcaattatgcatttgtaattttacatgtaatatgcattatttgccagttttcttatataggctatggacctcatgtgcagatagaaagacagaaatctagctctaccacaagttgcacaaatgttannnannnnnnnagtaatcgtagaacataggactgctaatctcagttcgctctgtgatgtcaagtgcagaatgtacaattaactggtgatttcctcatacttttgatactacttgtacctgtatgtcttttagaaagacattggtggagtctgtatcccttttttatttttaatacaa

SEQ ID NO: 212 - DNA, 640 bp, Canis familiaris
  misc_feature (1)..(640): n = a or c or g or t
ctcctacaagaagtacntgcacacagtcaagaaggtcaagattgggctgtatgtcccccacgagnntcntagcttccagcccatagagtnnnngcagnnagtcctcaatgtctcaaagatgttgagggccgacataaggaannagctggagaaatatgccagggacatgagaatgaagatcctgaaacctgcaagtgcccattctccaacccaagtgagaagccgggggaaatccctgtccccccgaaggagacaggcgagccccccgagacggctcggcaggagagacaaatcgcctgcactgcctgagaagaaggtgactgaccttggcacgctgaacgaggtgggctaccaaatccggatctaggcaagccatatcagccagcaagagggcttccgtggtgcttctctctgcactttaccgcagcatcttcaggaggaactgcaactatttattgagaacctgtgaattttatttttaaggattcccttggacgtggaatctgagtgggtggtgacaatgaactctgaagaaattcacgaaggggcaacccggaaaggctgaagttaagaaaccccacgggggttggactgcagatagaaagggtaattcgtaactgtgttttttctatcttcccat

SEQ ID NO: 213 - DNA, 615 bp, Canis familiaris
agctgatcgaatcaccctgcttgaaggctttaatttccattggcgtgattggacataccgggatgctgtaacaccacaggagcgctactcggaagagcagaaggcctacttttctactcctcctgcccaacgcttagccttcttgggcttggcccagccttcaaaggatactagctctccatctcctgagctaccttttacattcagacccaaaaagccccagaatgccagcagagcccggggctgggtcagccccagtgtctcaccacctacatcccctggcccttgatatccttcctctcctgggatccctatttataagtggtacttgttgggacttattttgctttttggcaaggcaagagattttattttaatatagtatttattcttgatataagaattatagtagagatcttgatataagaattatagtagggatcttcaatgaagatgaggctcagagaacttaatcaaaacaaagacaagacagattcagaatacccacctggtttgaaatatgggattcctgttactattgctctgctctgctccaataagctacttgttatagaacctttataaagggtaatcatcccctaatgacccctgctt

SEQ ID NO: 214 - DNA, 611 bp, Canis familiaris
  misc_feature (1)..(611): n = a or c or g or t
atatcaccccaantgtgtggtacacatctaaacgtaaacaaaaannngnctatgccatatttcttgaatggcccacatcaagaagtctatttcntngncaacccatagctactctgggagtaacacagattaaactgctgggacatggacagccacttaactggacttctttgaagccaaatggcttattgatacaactgccacatctaacctttcatcagatgcccagtaaatggggctgggctctggcactaactaatgtgatctaatttgcaacagagaggttcatgctgcaggtacaccgaagactagaaaatatcagatttctataattgtagcacacagagaaagcaattgtgaaactggtcaagaagactcaagtaattatttaggcaaatcagcccttttggctcttactcatgtttttcctaaattagccatgtaattgttttaactcttcagtgtactttgctatcaaagtctcttcacattgaatttatctccatgtgctattaagaagtggagatttctgtttacagtagctaggaactggtggtggtaaggactgaattgtgtctcaaattcccatgctgaagccctaacacctaatg

SEQ ID NO: 215 - DNA, 467 bp, Canis familiaris
  misc_feature (1)..(467): n = a or c or g or t
tttatctttctacnttctcagtctcagatcaacctgtacatgtggtgggtgggaacgataaaggaaaagcaaatagcacaggtgaggggaaatcaggatgatgagtatttttgaatatataaggaaagttgtgcagaattaatttatatcatttataaactatctctctaataagcaactaccttaagagtgtcatactagccccacaaagatggttcttaccttccagctattaattgggttccattacattgttatatttggttgtaagaattatgcatgctcattatgaagaaacacacttgaaaatacagctaacaaaaattcatgtataagtccaccattgggagatagccaatttagctcttctgtgaaagattttcactttgaatgtatgtacatataaaggtgtgtgcgactaaacaaatttggatcataannnntatccagtttatcnnnntntttta

SEQ ID NO: 216 - DNA, 526 bp, Canis familiaris
  misc_feature (1)..(526): n = a or c or g or t
tnnngntccaaatgtgnnagaggatcttttgtactgaggtttttaaaaccctttctttgtcagctttacttgggcttaccaagccttgtttggacagaccagtaaacagtccgcaggcatcttcaggcccccaaacacagggttgtctttatgccaaaacctattagtgagtaccctttgctaaaagcatcttcctgtgccatacagaacaatagaggcctgcgcctcatgccttgctgcctgcaaagcaaaaaaaacctgcctttttaatttttgaaccttaaaaaataagccagatactaactcaactagccgctgagctaagcctgccgctgtcactcagaggaaggcttcgacttatgctcaaactgacaacttccaagtggtaagcaagcaagggcggtgaccacacagaagtgggtctccgtcatgaacagacccccagggggcagtgctcttcttagataacttgaagctgtgtgcatgatgctggtgcttgaccatgaactgaagtctcatctttaaa

SEQ ID NO: 217 - DNA, 642 bp, Canis familiaris
  misc_feature (1)..(642): n = a or c or g or t
gggtnnactgcagtcccagtgcacacnnagaccacgtgaaccactgccgtgagtgaagcaaggcctcccccctagactagtgctgggccagtagtgccctcctgttcagctcctgctgtggctccctccacgtcttcccctctccatgcacgtcatgcaagcaagacggagaccctagagggtttgttaggtgttccaaagccatagaaagtagagtccctaatgagaccagtccccaccggcggcggcacttctaagcaagtagctcactagatttggaagaggttggaaagaaaggtagtggagcagcccttgggagaaagccattctcccggggcccctgcatctcctgagcttatagtcaagtagcctcaaagaccctcaacggtctggtccttggcatgattcctttttcaatatacgttttattttttgtgcacctctgctgatcatgtgaatgaaagaggaacagctggaagagctgtactcactttacggactgtctgtccccttacaacaaaactgggtggtcctgacccgactggcctaccagcataatcagtggaagctcatttggggagaaaccggctttaactgtttaaaagtcactgcttcactctcttaattcaacaaggaaaggaa

SEQ ID NO: 218 - DNA, 328 bp, Canis familiaris
aataggctcttctcaatgaacaagttttaatgttgttttgatgtaattttaaaagacttttagcaaacatgtgtttctttatagatttcttttaagaagctattttaaaagtaagccaagtgctgtctagcctgcttatggagttagggattgcatcagagtccatatattcttgctgtacaatgcctgtgatgttgaggagggtttttttttaaagtgtatgcctgagtctctgactctatggagtctacaaatgcactgactttgtaccccaaaatgatggaattgttaagtacaaaattaagctaatgaatcaatttgtaaccat

SEQ ID NO: 219 - DNA, 571 bp, Canis familiaris
  misc_feature (1)..(571): n = a or c or g or t
cgaacccgagagcnagaggnagaatcaaaggagggatggccctnnnnntgcacgcgggtcagaaaccaccagagaaagnnagggtgtgagccctgatcccaagnnngaagggggctgctcctgactggctcactccagagcctggggacacccccggcgccaagggggcacgcaacccagcacatgtgggagaaaccggtggatttttttttttttttttaagtgaacaacccggaaaagtatagccaggatccgttccaaacccatcctgggacagattaggaatctgaatctcagagcagggacaggtttggacaaagaagccacacggcagtattttactgacaagagttaactgtctgagcatttacagttcccatcctggctctcaggtcaaagagttaatgtttgtgcagataccacagggaccagctccagggatggacaggtcctggttggccaaggccattgactgcctctcaacctctaccatcatggcggnnncagaacgaagaccccatttcctattaaccagggtgaaacacagaggnnnnntcgcctgcctgggcgc

SEQ ID NO: 220 - DNA, 612 bp, Canis familiaris
  misc_feature (1)..(612): n = a or c or g or t
gctgtttgtttccaaacccgggagattttnnatgccatgaaccgagactgcnnaattccactcagtcatttgcaggtagatggaggaatgaccaacaacaaaattcttatgcaactacaagcagacattctatatatcccagtagtgaagccctcgatgccagaaacaactgccctgggagctgccatggcagccggggctgcggagggagttggtgtttggagtcttgaacccgaggatctgtcagcagtcacgatggagcgatttgaaccccagatcaatgctgaggaaagtgaaattcgttactctacatggaagaaggctgtgatgaagtcagtgggctgggttacaactcagtcttcagaaagtggtgaccctagtatcttctgtagtctacccttgggcttttttatagtgagtagcatggtaatgttaatcggagcaaggtacatctcaggtatcccataaatgataccaactcatggattccaaagatgcgagctctttgcctaatgggagaatccaacgattgtcttttaatgtgatgacactattcatagactccgattttatttataagccacttgctgcatgaccctccaagtagacctg

SEQ ID NO: 221 - DNA, 672 bp, Canis familiaris
  misc_feature (1)..(672): n = a or c or g or t
tattgacaaacagtgggcactcgtnggtgagcacaggtgatcgggaatatatccggaacgtaaaagaaaaatgttgctatgtggctctggacttcgacaaggagaaagtgaaagctgactgtccttcctacgcacagaagtatcagctgcccgatggccaggagatcacccttgggcgggagaagttcttctgccctgaagggctttttcaggcagatctcatagggagacgtgagccaggcatccacatgaaggccttccagagcatcagctcctgcaattctgccctctggaagattctcttcagccacatcgtattgtctggaggaactggctcctgttctggcttgtgcttccggttgcagaaagagatatctgccctggtttcccctacgattaacgtgaaggtgtccacctgcccctactccacttacagtgcctgggtgggcggctccatcctgtgctcactctccaccttcaaggacatgtgggtcactagcaaagagtataaggacatcggtgcctctatcgtcagtaggagaaccttctgatctgcagctgtgtggatctgtgtggacctgtcctatcaataccagctccaggctgagccccaacttggctggatcaatcagagctcaggaccaacttgaacatgagggtggtccttcctcc

SEQ ID NO: 222 - DNA, 567 bp, Canis familiaris
  misc_feature (1)..(567): n = a or c or g or t
gtatcggtgnctacttgcactatgagcaannagagctcacttncttcgatgctgaccgccccgatgacnngcggctactctacacattccaggctgacttccagggcaagctctaccccatcctggacacgtgctggcacgagaggggcagcaacacactgcctatggtgctgtccccgcccagcgggcctgtccacctcacccctccgcagcccaccaagctgtagggttgctggtgagtctgcctgcctacaggctcttccagcaggggctctgctgggttcagccagcagagatgatgacgtcctttactctttgggaaggtcttcatgcctgtatattcctggaaacatttaatgataagaagaaaaggaccataatcccttccctatcagccaggcgtgtatttattaaccttttgctggtcattcacctgcttatgaaccagcagaaccaggccttagtgtccttgggttaagatagacttcccttgatccctcctaaccatgctttctgcttgctcttttaacaaaannnngaaacattcccatgtatattttctgtcaa

SEQ ID NO: 223 - DNA, 690 bp, Canis familiaris
  misc_feature (1)..(690): n = a or c or g or t
atgccccgatcagtcagagnngcgcatttccggnaggctcnnngntccaatgctcagtcctcaaagctttaannaagcatcagcacacatgcttcaagacttatcgtacccattcattccacctgatatccagaccccagagtcctcgtttgtgaaggagggtcctgttcccccaggtcagagggaagggagccttccaagctgctccttccacactagtactcccaagagcctagagcctgggcctgttctagttaaagacactcctgaggagaagtatgggatcaaggtcacgtggaggagacgacgccacttgttcacttacctcagggagagagggaagctgaacaaaaaccagttccttgtgaaaaactcactggatttctcggacaccagcagtctcaagaaattttcataaagttgctaaagtacttttctggctcacaggagagtacatcaggaggataaaatggaaatgataccaattaatatcaacagaaaaaaatatcttaactaggaccttggaattgtaagggaaatcagttcccagatttgctttttaaaatgtcttttcctaagaagtttttagtgtcataaacagcttcatatttttcttatagtaactgttcaaaattttaaagtatcttgtagtaactatttaacatgtatgtaaatannnnnngcagaaag

SEQ ID NO: 224 - DNA, 713 bp, Canis familiaris
  misc_feature (1)..(713): n = a or c or g or t
aatatgaactngatataagaatgttataatagaatttttacaaaatatttcagtttttgtttcaattttaatcatcataaatgggcaatagntggactgctttttggttttgtaaaattaaagatttgtagtataagagtttttgcatttctttacactgcaaagagctttagtatttactccttttaggttcccctcacaacctctagctctgtgtctagctactgactcttttttaatcttccctaaaagaaagtgatttgtagcctataaatattaatgtttcctctctcctctgaagcgtttgtttatacatctgtacataaaaatacattgctaattttaatccacattttctccaggattattgagtaggtcatgaactttctttcttaaaaattttcaagcataatggtacctatgttgtagacttagatttaaagcatatctcggtgaaatctagttcacaaggagtcataaattatatctttgacccccccagatatatttcctgaatattctaatttaaattgttataattggatcacccagtattcttttcaagactgctggtgtattagaactttgtattgttgtcatttcttgaaaaaataaaatttctaggaattaaatagatatttcttaaattaagagataaagtttctgaatattcttagaatttaaaaaaaaataaagcttaccaaaannnnnnn

SEQ ID NO: 225 - DNA, 654 bp, Canis familiaris
  misc_feature (1)..(654): n = a or c or g or t
cagctttcatgacgctggntatcatannactgcatgtgnnctggngcatcatattttttgatnnctgtgagaagaaaaagtggtctgcccttcnnnnngntcttttgacgcatctgctggtgtctgccctgaccttcataagtcctcattatggaataaatctggtgtcaacatatatgatcatgctactcatgggcatctgggcgttctttgttgctgnaggcagctgccgaaatctgaagctctgcctactgtgtcaagacaaggacttcctccttttcaaccagcgctccagataacccccaagaaccagcacctgccaaacactggaataaggacttccctgtgaccagcctcaacacatgagaaatctccaatggaaagaagtatctattttatcttcacctcattgaaaatactgaatagatggaaccactcaactggcttatggattcagtctcagtaaaagaatttttaaggatttaacacattctaaggtgaccgtaatagatgatgatccctgagcaggtcttggctttaagactcaataataggaagtacttgtatacatgtagatcactgtaaatccttctacctagtagtaaaaccattcatttttcagtgcttgagcaaaatcagaggtggggtttgtag

SEQ ID NO: 226 - DNA, 546 bp, Canis familiaris
  misc_feature (1)..(546): n = a or c or g or t
ggtcactacgccccannnggtgtcngtgggggacgtgannngngagctgaccttctgtcggaagacagggctgcaggtgctcggggtcgtggagaacatgagtggcttcgtctgcccacactgcgcagagtgcaccaacgtcttctcccaagnaggcggggaggagctggccacgctcgccggagtcccgttcctgggctccgtgcctctggaccctgagctctgcgggagtctcgaggaagggcgagacttcatcagggacttccctaagagttctgccttccccgcgctcttctccatagcccagaaggttctgagccaggcacccgctcggctctcctaaccaaggcagccacaccgctgtgtctccccgcatctgggggcggtgggtggttctacctgggggggtggcctgagccctcagagaacagcatgccccagggcatggccggctgcctccggggccccgtgggtcacagggtccaggagaccctgggcgtctgttgcccacgatgctggtgactgaggtggggcgcagcctgtgag

SEQ ID NO: 227 - DNA, 642 bp, Canis familiaris
  misc_feature (1)..(642): n = a or c or g or t
acnncgtgagcagtggctcagtcacggtgaacgctgattcctcagtgcagttgctggctgaagaggctgtgacactagacatgctggacgtgggnnnagccaagatgaatctggagaaggcgcagtcggagctgtcaggggcagcnnacgaggcttccagggctgagatccaaatccgcatcgaggccaacgaggccctggtgaaagctctcgagtaggcggtgcgtggcccttgccagcagggaaactgaggcccatgtccctggcaggctgggccagctcccatgggtccagagtgatggcgggaggcgggatgggcggaaggtgagaaagcctctagagggatgcgccccgtgcagggcgcggtcttgccgaagctggcctccagggggcagccccgttaagcttcctgctgggagcagcctcgtcaaacccgggaagctgaggctccatgggggggttggggctgctgactggggctgagctcagagaccttgctctgcttttttttttggggggggggttacccccaccgtgggctcactgtccaccttccagcccgtcgctacccannngntgcgcccctgccatnnntctggccccgtagaccctggcgtggngacccattcccagccactttca

SEQ ID NO: 228 - DNA, 567 bp, Canis familiaris
  misc_feature (1)..(567): n = a or c or g or t
tccgtgaaaatgcaattagaaatgtactattcaaatgattatgnnnnnaccccaaagtatatgtgtaatttaaagattactgcaaatatttttattttattgtgggttttctgtacatctgttaatttactatttctttgtgtgttctgtagactagtgttctttcatccttcaattgagctcagagtaggttttgttgtaccattgtgattaggatttaaactaattcagagaattgtatcctttactgtacatactgtattctttaatttttaatttgttgtcatactgtatgtgctgatggcttggcttaagattttgacgcataaatggggtcactgttgatcagtgttgctagtggcttggcagctcttcgtaaaagcatattgggttggaaaggtgtttgcctatttttcaaattatttaatagatgtatggtaccatttaaaagtggttgtatctgaatttactgtggggataacatacactgtaatggggaaaaaattacctaaaaccaatttcaaaatggcatttctttctatttcagtttaaaaacccagtgcatgt

SEQ ID NO: 229 - DNA, 144 bp, Canis familiaris
  misc_feature (1)..(144): n = a or c or g or t
cacacacgtgtgcacacatgcacacccnncgctttcttatgcaatctatgtttgcnnntgtgctattcagttcannttctgtannaagcaggagttatatgttgtctttattgtagtgaaattatgcagaaagagnnccatata

SEQ ID NO: 230 - DNA, 725 bp, Canis familiaris
  misc_feature (1)..(725): n = a or c or g or t
ctcactgctgcagacattcctgaggctccaggtcagacctggtnnnnnagaggctatggagaacacagaggactcaggcctgggtcccagagatcttcagttccaagtgcaatgctggtacagacatagaacgcccatggcagcccctgggctcattctttttacccgtggagtagaaggcccagtcacctctgccattctaggcaggatttgggcctgacagtatttctagccccgggaagctgtgattagctttagctgttgtgtccacaagggggtgcctgggagctcccagcctgcctttccagcttgctggcctctttatcaaggctggacaggggctttgcaggaagaaagatgctggccgtttgcccctgccatcccattccaccccagccaatgatccttcacacttgccccacccttgggagttacaaaggtcagaggcctgagtgcccaccctcaaactagttaggaacaaggttcaaagcatggctcccctacttgttctatgacttggggctcagtttcttcatatggaaaatggggacatcttcacaattgtttaatggcttgtctaaatccacgttcctggggattctcaagtctgcagcctgagcaagaaaaagcagcctggcacactgatcccatgacaccagctccaccagttgttaatgcgagtctttattaggctgcatatacaatttaagctnnnnaaatttgta

SEQ ID NO: 231 - DNA, 622 bp, Canis familiaris
  misc_feature (1)..(622): n = a or c or g or t
cctgaaaaaagtgatnnnnnntnnnnnnctgcttctccctccccaggcttgatccccgtttccaggctctttgatatgtctgttttgctaggttctaccttngagctcagaccaaactcaaccattcagccttattattagnactattccctagaatccactcttggaaatccccatggatcagctgtttatctaacctgtttaacctaaagataagagaatgcttttctatcccttttggacttaagatttaactcatgctgctcgctattctcttacctttctttcccctaaaaagatatagtcacttaggatctgggttgcccttcatcctttatttggagctctgataactgtaaatattttcctatttttcttttctctgctatttgtacatcccagacacacatggtcactaataatgtaagaatttacataaaatcgaggtggtcccgatgcctagagtctgagagccccaagaacagagtatagtaaaatgatgttctgatccgactatgcaacataaatacannnnntgcttcnnnnnnnngagatactataatattagtaatgtcagggtctgtnnnnggtgcccaggagggnnnnntatccccagcttcat

SEQ ID NO: 232 - DNA, 587 bp, Canis familiaris
  misc_feature (1)..(587): n = a or c or g or t
aaaaaatgaagatcaagacaccacaacaccaccaccttcactggggcactnncccttttcacanntcctggaanctcacatcccaagcctggcaaccacctcttcctcatccatctggaaggggcacattggaagaacagtgagctgagccttgggtatcacagtacccagagtgatcagatctccccaggtgatcctaggcttgggtagcgtgagtgaagctcctgaaagctggagcctggccataccaccagcacagggagcagcagagggaagagtggcagcaggactatccctctgcagaatgacgggggcagattctcacctgcgccctccgcatttcaacccctaccccgaccggggcccatcctgtggagtgagaggccggcacagctctggtcacttggacagcagcagccgggggcacagaccacccagaagccctcctccgggtcacctgatgagacagcccctggggggtaggcttcccccaccactcccactagctgctgccaccagaactgtgttgggatgctaggaagtcaatgatttgaacaaacggaatttctttgtcctttgtaagagtc

SEQ ID NO: 233 - DNA, 508 bp, Canis familiaris
  misc_feature (1)..(508): n = a or c or g or t
gagaggcttgggncagcaannatgccacctacacatcagcccggacgctgctggccatcctgcggctgtccaccgccctggcgcgtctgcggatggtggacacagtggagaaggaagatgtgaatgaagccataaggctaatggagatgtcaaaggactcccttctgggcgacaaggggcagacggcgaggacccagagacccgcagatgtgatctttgccactgtccgggagctggtctccgagggccgaagtgtgcggttctcagaagcggagcagcgctgcatatcccgaggcttcacgcctgcccagttccaggcggctctagatgagtatgaggagttaaacgtctggcaggttaatactgcccggacacggattacttttgtctgattccatccagcttgtgaggcattggggtccccccttgtgctgacccacccctccctcaagagacctcatgatgcctttgaggggaaaggaagaccccccccttttctcctgagctg

SEQ ID NO: 234 - DNA, 521 bp, Canis familiaris
  misc_feature (1)..(521): n = a or c or g or t
ccttgcacaccaggcccgtacccagcagtctcnnnnnnnnngcaggcccagagtccctgaccctgctgacctcgctgctccaaagactcccgcggtgcccacagctaacgtccttggctgcacctcctggcgggtgccccccggccctgatcccgattcctcgctgcggagaacatgtgaggacactgtaccctcgtagctgggtctctctggaagagacaaactgcaaagagaaaactgtgatttttgtcatattctcagttaaaaacaaaacaaaaaaaacactgatcttagctaatgaaagctcttctggaaatcaatgacacacaacggccacagcagcgcacgactgcctctcccagtccagtcgggcccctcggaggcctcactgccgttttagagaacagcgtatttattgaaaccatgagaagggacaaagtgccttaatcgatatattttgtgattttttaaagatctatttaaaactgcttttctgctcttcataccgcacttagtgcaaa

SEQ ID NO: 235 - DNA, 633 bp, Canis familiaris
  misc_feature (1)..(633): n = a or c or g or t
actcacnnncttccagcaagggcccagggatcatcctgatattgttgattcatttatgcaactcctggcacaggcnctgaagcnnnngccagatttgttcctgtgtgaacgattggatgtcaaagctgtgttccagtgtgctgtgctggccctcaagttccccgaggcacctactgtcaaggcctcctgtggcttctttacagagctgctgcctcggtgtggggaagtagaacctgtggggaaagtggttcaggaggatggccgtatgctgctcgtagcagtgctggaggccattgggggccaggcctcccgcagcctcatggactgctttgccgacatcctatttgctctgaacaaacactgcttcagcctcctgagcatgtggatcaaggaggcactgcagccacctggttttccctctgcccgcctcagtcctgaacagaaggacaccttcagccagcagatccttcgtgagcgagtgaacaagaggcgggtgaaggagatggtgaaggaattcacactgctgtgccgggggctacatggcacagattatacagctgactactgaggggcgccccaccccccgtcccacccacacctcctcctcacccctccctatccccaaagnnnnnn

SEQ ID NO: 236 - DNA, 628 bp, Canis familiaris
  misc_feature (1)..(628): n = a or c or g or t
gtgactatcnntctgacccctggattgaggactggccagagctggatcatccgttccaggnnnnccatgggcagcccccagacttcggnnagcagctggccttgcccccaccccagccctctcctttgccccctcccatgcctttcccctaccccattcctcagccctcgccacctcccctgtttccacccctgccccaggacaccccttttttcccaggccagcccttcccaccccacgaattcttcaattataattcaacagaagacttctcgatgtcatctcacttaggatgtggccctggagtgaactttgtgcctggccccctgccacctccagtccctggccctatcccccacggtcagcaccggggcccagtggtccaccgggggatgccacgctgtgctcccaacagcccgtaccacgtgccgaggatgggggggccctgcaggcagcggcttagacactcagacagactgatccacacaaacaaactggacagacagcctcctgcccattcggggacctggcctgggtagactggatcttggactggggctagatgtgccattggccctacagggcctgcttgtcacccccagcactgggtcagggtgtctgttatgcc

SEQ ID NO: 237 - DNA, 622 bp, Canis familiaris
  misc_feature (1)..(622): n = a or c or g or t
tgtaatgngagatgtatttttggtaataagacataggtagtatannnnatacaaagacacgtgttttgtnatcnnnnnatgcancttcatnnctagagctnnnntngagnncannnnnnnnntttcnactnnacatgtgagggtnnnnnnnnnctggtgcnnnnncggctacannnnnntgcagcatgactcacaccccccatggcagctgaaggaccccaccgggaatattctggctgtgaggagctgggggtgctggctggcctgccttgtccccacggcactgagccactgccctccatgtgccatagcagtgccagtgagagctgaccccgcagtgggggctgggctctgctgctgacctctgccccttcccctcccccccgcagnnnnactgtcctttatgtcagactctaggtcactatttttgtgaaaagctatgcgacccccacagcaaaggccactcctgtcctctcctgcccctgtgtggcattcaaacccctgcactttgcacactgcacccagagcacaggggatttttagcatgtgtcccacctgagtatgtttaggcttataaagcagacttcaggctcacatgtattttactttgttcaggctgcag

SEQ ID NO: 238 - DNA, 597 bp, Canis familiaris
  misc_feature (1)..(597): n = a or c or g or t
tacactttttttgtaatgatgaaatattttagaattctttgaatcaaaatacttttctttnntnnatgaaacatttgtacaactgacataaacttgctgttttacntctgaaacacttcnnntccccccccaaattaaagcttttctctatttatgagctaagaaatgatgtttttaaagcaaaagtgaaatgttttcctttagcttctttttaaggtataacagcttttttactttattatgtggtaatggacagaagattacatacaaaaatgtctgggggctagcattctcctcggtggtttcaaatcattgcgctacctgaaaagtttttaaattcttaggttgttttgtccaccagcatttagtgtgatgccatgtagatataaaaatatacagaaggataagaagtggatactaagtgatttttatacctgggcattgaataaatgtgccaacattttttaggaagattcgcaaaaatattctgacctatacttaaattactggctggctttagatgtcttcatattaaatagtgatcactttcttgcactgtgaagtttttacatgaagatgttaaagtggaagtctacc

SEQ ID NO: 239 - DNA, 558 bp, Canis familiaris
cactgaagtccggggagttgctgtctgtatgctgtcccctccctctgtgttatggctgggctgcgttttccgccctgcctggggctcctcacttggtggctgactttgcttcctgtcactaagccctggtcctacagccactgccacccccacagtccatccctgctgtgctgacctctgcggactgaggggcagagactgccatgggtgtggtgccacggggcagtcggcagaaggggagaccctggtttccatgccgtgtggacaggaagaaaagccagtggcagataccaggggtctaggagcgggagttgctgggtagctggcgctggctccagacccagtggggcccgccccctcactgccaagatgtctgtgactagcctaggggccaagctggagggggctctttggcaggcccaaacctgttctccagcgcagggagcaggggcagggcccatggagcctgagctgcagctctcggcgctcttaaaggacttggatggggcggggagtgcgctggagctgccccctgatgctctctgctttcccctctgt

SEQ ID NO: 240 - DNA, 532 bp, Canis familiaris
  misc_feature (1)..(532): n = a or c or g or t
cntagcatcannngggttcatggtccatcccgtccaccccctgccgcttggctggatctggnnnngaatcaaaggnnnnnnnannnagatnnngaaagggactttttgggtgaatggctggggccccaaatccagattatcattggtgggttgggggtaggtgggtgggtgggtggtgttcatgatatttattttttcatttacgatctggggaggaggggctggggctatttatttaggaaggaggtgtacttttcaacctcaacctctatgttgggccatttgtcagcctcaaaaaggaaaaagggaagaattttagagttgcagttggggatgggatttgaaggaagttnnnagtggggagggatggggcacctgatctcaaagggataaagctgggtgctgatggggtgcagggcaggggactggggtgtatatgaataggatgtcaggatctgtgggctgtttctgtgttttctcagtatcaatttcttaaactaaaataccaaaaagaaaaaaaaaaagactcatc

SEQ ID NO: 241 - DNA, 231 bp, Canis familiaris
  misc_feature (1)..(231): n = a or c or g or t
caaagccnngcaaactcattgtnnaagtgaagactttgcttgcttcttnnnccatttatagacttgttttnnnacattcataatgataaatttggcnngtcatttaaaaaatacctgtttttgtacagtcctcttaaatggtgttaaacaaatttaattcatcctaagaaaataatataaaccaccagaatgaaaagttcgtattatgctatgctgttaattctgtttcat

SEQ ID NO: 242 - DNA, 494 bp, Canis familiaris
  misc_feature (1)..(494): n = a or c or g or t
gtgcttcagtgnngacaacgcacagcacgtggtggcaaaaatggatgccatcctgacagacatggaagaaaagatgagaagttgtgagacgctgaggctccggccctgaggcatcctgtcctcccctggaaatgaagcatccccttcaaatacactaagatggcaaccctgacctgacctccagctgaggaagaaagccattgagnnnnnnnnggctcagggcagggcttccctggggccatactgctcctccctcttcccccaaccactggcctattgtggggaagggccagatgtgtcccctgaggatccagactcaatttcttttgctcaaaaatctcttcagtgtgggtggggttatggtcagggacctcccagggctcctgcctaaaacagtttaagatactcccctaattaggaccagtcaaaaatttttatgtcaccattcaagcattactccttcaaaaaactggcaaaccacccctnnnnnngtg

SEQ ID NO: 243 - DNA, 516 bp, Canis familiaris
  misc_feature (1)..(516): n = a or c or g or t
tgtgtgatcnntagtcattgttagtaancnngttttgagctctgnnantggcntnnggcatgggacnnntgttttctcatcttnnnnnnnnctgggattcatgttctnnaaccctgtgactacaaagtcttctagccatgctctcctttggtggttttgacatttccctatagctcgaggacaggcccctgaccgttttttacacaaagatgatactttgctgaaatgtcagatggaaccatttgacttgcctaatctactagatgtggcattgagaaacctaccatagttttattccatattactttgccctttattgcttcttaaacatttagatttggctacaggtaacaattttcagagtatggtgatttaagatagtttcatcatcccagtgtgcacttttaataaggattttattatttggatggcttggattttccagcaattttgctgattttgtttatagttttttgtgtttgcttaatttatatttaacatggagactaagtttgt

SEQ ID NO: 244 - DNA, 686 bp, Canis familiaris
  misc_feature (1)..(686): n = a or c or g or t
ctcccgaaccattttcatccggggctnnnnnnttcatcctctcctaccaggctcgttgcccaggcagggnnnnncctgnaagcagcggctgactgtaccccctgaaagcggttttggaggaaccaggannaggccctccccagggggaataagatcagcccctcctgggcctggttgctctgtcactgacaccagctaccacaccaccaccacgtacacacacacactcacactcatatacactctctgatgccccaaagccaattcctggggcgccccaccctctcatttggggtctgtgttggtttacccgagttttctctggggcctgcatggaggcagtagcacggacaccacagcctcttggggtctctcggttctgagcttcagtggttctctctgcctcccgccccccacccccaacccattgccttctgcaccccaccctggccttttccacaacattagatatgaagtttggaggtttcttttgtattttgaggttttctgtattccgtctcctgcccctccccgccacttccccccagtgtcctcacatggaaagaaataatgcatttgtgccttctgtgagggatggggggaacaaacagtcccaggtgtccccatttctcggtccttcctccctctccaggttcccccacngcaataagagctttccttcatga

SEQ ID NO: 245 - DNA, 492 bp, Canis familiaris
  misc_feature (1)..(492): n = a or c or g or t
cattcaatttcctggatgctnntgcagttcgtgtcactggtgctgatgtccctatgccttatgcaaagattctagaagacaactctgtacctcaagttaaagacatcatatttgcaataaagaaaacattaaatatctagtttggacttgaatttcaagtcattgggatttacttaaaatactttctgacagttcacctgaattgtactgtaagaccttatgattcataaagctatctctaaagcaacatcacagatgtttttgtacttggaagaagtttaaatgtgcttgtatgtggaaaaactctcctctcctgccctagactccatgggggggggggggggttggtctgttacagttatgttctttgaataaggctaacttaaaattttaccctttcacaaggacaaggtctgaacatggcagagttctgcagaaagacatatccaaaaagataacttgtatgtaaagataaaagctattatctacatt

SEQ ID NO: 246 - DNA, 515 bp, Canis familiaris
  misc_feature (1)..(515): n = a or c or g or t
gatacacatgccatattctgcacangagnctgcccaagcccatcaccttgagatgnnaaccacctnntcagtccaccatccccatagtgagcatcattgctggcctggtnctccttgtgatcactnnagctatgctggttggagttgtgatatggaggaagaagcactcaggcagtgctcaggactctcagatgtctgtcatggctcctaatgagcaagccagctgccttgtgggactctgagtgatgcaagatttgtttacactcccacttttttgacttcaagagccccggatatctccatctgctaatggtgtctgaaagtgactctgttcctattagcataatgtgagcaggtggggaaattggcccacctctactcatcatgtcccttcccccaactgacctgtgttctttccctaatctgctttcctcttccagcagagatgggactgggtcattaccatccttgtctttacttcatatttggctgggaagtaatatttaacttgtctt

SEQ ID NO: 247 - DNA, 554 bp, Canis familiaris
  misc_feature (1)..(554): n = a or c or g or t
agtgatctcaagagtcacggctttgacaccctgctccagagcctgtttggggacctgaagccgctgttcaagaggnncacacagacccgctgggcagccccggcgcagaccctgggggacatcatctccaccgtgggcgaaaggctgcctgagttctccgagctccacgactgtttccagaaggagctcatggaggtggtgcacctgcacctggtgaaggagtacatcatccgcctcagcaagcggagcctggtcctcaaggtggtggagcagcagcggcagctggccgagcacatcctggccaacgccgaggtcatccagcgcttctgcactcagaacggctcgtcagcgacctggctgcaccacgccctccccacgctcgctgagatcattcgcctgcaagaccccagtgccatcaagattgaggtggccacttacgccacccggtaccccgacttcagcaaaggccacctgagtgccatcttggccatcaagggaaacctgtcgagcaacgaggtcaagagcatccggagcatcctggacgtcagcgaggg

SEQ ID NO: 248 - DNA, 198 bp, Canis familiaris
  misc_feature (1)..(198): n = a or c or g or t
tnnctccacagaacccgcacagttcagtgtgtcattcctgagccctgaccacacannnnntcnngacatctgcatgaganngactcagtctcctgtccactgggagggtaaaggctgagtcctcccacccagtaggatcctctcttcttcccttcacctggatttcctgcnnnnnngatcagggccaagaaaactttg

SEQ ID NO: 249 - DNA, 617 bp, Canis familiaris
gattccaagaaggagttccaaatgctagtgtcattatgcaggtgccagagaggattgttgtagcaggaaataatgaagacattccattttcaagacctgcagatcttgaccttattcagtcaactccctttaaacctctggcactaaaaacaccacctcgtgtacttacattaagtgaaagaccactagattttctggatttagaaagacctcctccaacccctcaaaatgaagaaatccgtgcagttggcaggctaaaaagagagcgctctatgagtgaaaatgctgttcgccaaaacggacagctggtcagagctgactccatacctgtgttgcgtggtgggtctgctgccgccacttctaatcctcatcatgacaacgtcaggcatggcatttcgcatatagatacaacaattgaaggaacttcagatgacatgactgttgtagatgcagcttcattaagacgacagataatcaaactaaatagacgtctacagcttctagaagaggagaacaaagagcgtgctaaaagagaaatggtcatgtattcaattactgtagcattctggctgcttaatagctggctctggtttcgccgctagaggtaacctcagctc

SEQ ID NO: 250 - DNA, 562 bp, Canis familiaris
  misc_feature (1)..(562): n = a or c or g or t
agccctgcacagacctccgaccacagctacgnncttttngacttagatgccctaaaaaagaaactcttcctgactctgaaggaaaatgaaaagctccgnaagcgcttgaaggcccagaggctggtgattcggaggatgtccagccgcctccgcgcacacagggctgggcctccgccagagccacagagctgagcccctggcaggtgggggccgtggaccccgagccttgccgctgatgtcaagtgacaggaatgccatgccgggtgggccacgcggaaggagcccaggccacctcaggggaagagtagttgcagcagcccaggacagggtggacctcgagcaaggggaccgagcctgctgtcctttcaacgaaagctgggtggtggggtgtgtgtgtcttgagaaccgcaggatgaagcgggcctggaggccatgtggcacacactcccccagtggggagaagtgcatccccttgaggggcggctgggcccggggcaggacacgagacggggcagtgtggcccccatcgcctgggcgctggcnctgagtggctgagactggc

SEQ ID NO: 251 - DNA, 561 bp, Canis familiaris
  misc_feature (1)..(561): n = a or c or g or t
aagnngcccaagaaggagaccaatcaggccccgaaatccaagtctggctctcgcccccgcangccaccaccccggagacacaccaggtcctgggctgtgctgaagctgctgctgttgctgctgctgtgtgtggctggcgggctggtggcctgtcgggtgacggagctgcggcggcagcctctctgcaccagcgtgaatgccgtctacgacaatgcagtccgggcactgcgcggccacgacatcctgcagtgggtactgcagaccgattcccagcagtgagctcgtcctccacacctgctgcctcccagccttggagcttggattcctatggaattgggttctgctggacacaacctctttttagcgtcagacctacctgccatcatcaaatggctgccgattggtacttgagatctcctctttgtaggacttctctgttccgtagtcagggttccctggtggaataaggagaagggggaggtggggacagtcacctgcatgcctaaaggaacaggcttggggtaggcagaggaaaaaaaacagccttttctagttatacaa

SEQ ID NO: 252 - DNA, 598 bp, Canis familiaris
  misc_feature (1)..(598): n = a or c or g or t
agccccannntgcttggnnnctgccctccccttgcctccccnnagcccccagccctccaacccccagcactgctnncaggtgttcgctgtccttgtctttagtnnccatacgtannatggccccaggaggagcctgtcctctcaaggannnagcttctccccttgtcctctggagaagtggtgaccacccagaagccccttcccaatctgaccccaggctgaacaaaccactgcatctcattggaccaatagctccagagtccccggctttggcatgaggaacaagcagcctgtccctcttcctcccctcccttcccagccgccaggccgtgaaccttttgtaccgcctccacccatgcacttggtaacccgtggcagagggtgtgggtgtcactgagcctccggcgaggctcccgggccaggagtgcactcaccatgaggcctgtttcggcagggaatcctggcctgccagctacttctcatcagggaccgcatgctaatttgtacttcttatctctgctgggttttctatattcttttttgagcgtggggagaagggttttagtagaagggtgaatcctattttacacancggtct

SEQ ID NO: 253 - DNA, 553 bp, Canis familiaris
  misc_feature (1)..(553): n = a or c or g or t
atncnctgaaagaaaaatggaacgctaagacagtgtatgtggnnngaaatgctactgcttctctagtgaataaaatcggcctagatgcagaaggagcaaactgtggaaatgcagaaaagcttgcagaatacatttgttcccgggagtcaccagcattgcctcttctgtttccctgtggaaccgtcaaaggagaaatcctgccccagatgctcaaggacagagggattcccatggaaagcatcactgtctatcagaaggtcccacacccgggaatccaagtgaacctcaacagctactatgctaagcagggcatcccggccagcatcacatttttcagtccctctggccttgcgtacagcctcaagcatattcaggagttatctggtgacaacattgatcgaattaagttcgccgccatcggccccagcacggcccgcgcactggccgcccagggcctgcccgtgagctgcacggctgagagccccacgccgcagggcctggccacgggcctccgcttggcactggaggccccgcgctgctgnnnnnccgctgg

SEQ ID NO: 254 - DNA, 550 bp, Canis familiaris
  misc_feature (1)..(550): n = a or c or g or t
tttgnncttgaaggaaaatgctatcagtccgtnnggcnnnntttatttttgtctttgaataagcatgtatgtatactgtcttctgtttttatttttacaccctattgtattacaacatttttagtattcaccagcatattcactgtctgcctaaaatatgcaacttttgcattacaatatgaagtaaaggtcnnnnnngtatgcatttnnngtaactaatgtacaaacacaaattttataaaattgtacagttttttttaaaaaaaactcacagctagcaaatggcttagatgtagcatctttgcattaattaaatgctttaaaaatataattaatgtgcagatcnnntacctgctaaattaagaatgacttcattatagtcatgattcgccacagcgtccttaactctaatgcctggactggccatgttctcgtccgctgtgctgttacagtccgcattggtgctagttggaaaattcctagctcacacaacccaaaagggtgccaggaggggtggattaccagtattnnncaataatccatggtttaa

SEQ ID NO: 255 - DNA, 654 bp, Canis familiaris
  misc_feature (1)..(654): n = a or c or g or t
atagaaatatanaatgtgnnctcangctnttntctgtgtaagttctggtnctncagccacctaccatgaccctgggcaactctctcagcctttcnnngtttcctcatctgtaaaatgggactaatagtatctaccttcagcgttgctggcagaattgaaaataaagtacgcgagtaaccaagaacattgtagatgatccaaaaatcatagccactcaccccttcacaaaactgaagtccatggaccatgcaagtcaagaattaacgtacaactgtattatacataggaaaccagaactatgttcacttatttcttattcccaaataggattaactgtgaagactaatttataaatgtgaacttaaggaaaactcaagctctgaaggaaatattttgcttttctactcaagttaatcctcaaatggtctaagtatctgtcacccattgacttggtgacagttcagccctcagatagagacatgcccgcctactcagtgttctggtcaggtgctctgactgcagccagcctgctgaccaggggcccaggcccctctggggacaaaagacttgggctgggccactgctctgtttccatgtgtgaactctgttctactgtaaccctgtcgggnnnngacattttcttcagatgcaacc

SEQ ID NO: 256 - DNA, 671 bp, Canis familiaris
  misc_feature (1)..(671): n = a or c or g or t
tcaatatcatctttgacaacagtgatgatgatgatgattgtgatggtgatagtgacagtgattacttccaaccccttctccctccagaaacctaaaagtgatgctgggaaatttcaggatcagagtcagagatggcacagaacagacaattaaccccatccagattatccgctactggaactttagccatacctccccacaggatgacctcatgctcatnaagctggcgaaacctgccaaactcaacaataaagtccagcctctacccctcgccaccaacaatgtccgtccaggcaccatctgtctactctcaggtttggactggagccaggacaacaacggtagacatcctgatttaaggcagaacctggaggctcctgtgatgtctgataaagagtgccagaaaaccgaacaagggaaaagccacaggaactccttatgtgttaaatttgtgaaagtcttcagccgaatttttggggaggtggccgtcgctaccgtcatctgcaaaaacaagctccaggggattgaggttggacacttcatgggaggagatgttggaatctataccgatattcacaaatatataccctggattgagagtatcactaaagacaaatgacatcctactactccctctgcatcccactggctttgtcattgactctaccagc

SEQ ID NO: 257 - DNA, 654 bp, Canis familiaris
  misc_feature (1)..(654): n = a or c or g or t
tgccaggacctactccccagggccaangagcactggcagggtggctgcagccnggcgggccccagcaggctcccggccgggcaccacagcgccgccttacctgctgaagaaggagaacggaaaaaccctgtacgagtgcaacgtgtgcagcaagaactttgggcagctttccaacctcaaggtccatctgcgtgtgcacagtggggagcgcccattccaatgtgccctgtgccagaagagcttcactcagctcgcccacctgcagaagcaccacttggtgcatactggggagcggccctatgagtgcctgatgtgccacaaacgcttcagcaactccagcaacctcaagacccacctgcgcctgcactcgggggcccgggccttccagtgcagtgtttgtccacgtcgcttcacccagcacgttcacctgaagctgcatcatcacctgcatgtcgcacagccttgtggccacctgtccctggcatctcttgcctgctttgcccgatggcaccaggaagcactggatcttgtggcactgccatcggagaggcagacgggttgggattcagaaaagaccaaggtgtccttggcacctggggaaaagtaggggcagccagcctgagccctcgtgcctggagaggaggcaggagcaga

SEQ ID NO: 258 - DNA, 523 bp, Canis familiaris
  misc_feature (1)..(523): n = a or c or g or t
aatatttcaatgtaatataaatgtgttgattttttaaaaatancttaaatggcaacactttggaatccaatcttatatttcatttaacatttaaaatgcaacagtttcttataaattaatgttgtgcttttaggtaaaaattatatatatgatttatttacccaaaaactgttatctatgtaagacaaaaatttaagtatttaaaattggctccttattaacaaataatacctgagtaatgaacacaaagtattgccacaaatccccactttactgtgtctgcttagacataatatgaatttttcaaatgatgtaatttattccaaaaggaaattatattttaaaagcagatttttcttgagaaaaaattatacaagaaaatatttcaaattatgatgttaaatctataaaatatgcttaaagtaagttgtttctatgttatgtggttatgttacaaataatatttggccaaatctttaccatctcttatatatatatatatatatatatatatatatatata

SEQ ID NO: 259 - DNA, 634 bp, Canis familiaris
  misc_feature (1)..(634): n = a or c or g or t
ctctccctgcccctatccagnagtgctgagggccagtgctgacccatgccacnnnngancagctgtctgggaccgaggaccagctttgctcttgggtnnnggcgacttcctgtggctgccagatagatgagatgtggcacaggttagcctcaggttgctgtgcccctagactataggagcccttggagcccagaacaggaacttgaaggccacatcccttacccaaattaagtatgcagagggcaagtgaaggttgactgaaacagggaggcagctttgtaatctatgtcagctctctcaggaagcaccagtatttatcttgggtatatatttgcccttagaaactcctgtttgtgagtctcaaaacaactgattattatttttttgaatactttgctgctgcttttctggatctgaattcccttttgtgccagatggcagtgcttgtctgcccacttgcttcaggggatatacagacaggttatttctagagggttttcagattacctgcttctttgctggagtaaatgttttgttccaaggccagaagagcttatcttccttgtcctctgttcccacccttccatgaacaatcatgcccataagagacactctcagatgaaactcttctttt

SEQ ID NO: 260 - DNA, 278 bp, Canis familiaris
  misc_feature (1)..(278): n = a or c or g or t
tnnngaaagaaaaaaataacagnngtgctggaatttttgcatcaatgataacatcattcatttctttggaacaaagtagaaaactatactattttggaaattatgaatttgtcctaggtttgtttgaaattgtagatcatgcttctcatttttttttttttacctgagtcctttaaaacaacactggaaattctgtatcatatacaagtgtaacacatgcatatcaatagaaaaaataaatggaatttcaaatagactaactagattatccccagtag

SEQ ID NO: 261 - DNA, 588 bp, Canis familiaris
  misc_feature (1)..(588): n = a or c or g or t
cagtgtttttcgaccaagactattgcttgggtttttttgaaagtataanagccacatagnttttccagaaaggtttcaaaactcccaaagattaatttccaacttataagtttgttttttattttcaatctatgacttgactggtattaaagctgctatttgatagtaattaaatatgttgtcattgatataaacctgtttggttcagcaaacaaactgaaatgattgtcatagacagtgttttatttttcctgttggtgttgctgattagtgagcatgctttaagacgaaaaaagcatgaatgataacttcctctgaaaggtgcggcatccaattcagatattttgtcctgattttaaagctggttggtgtagtgctattaaaattttgttcagttaattttcttttttaaaacttgttcgcacgttgtttagggtgcccttacttcagcaaaggagaaagagtaggagagccttagaatttttgaggaaaaaaaaaaaaacctataacatacaatgtactgtatcaaactattttacatgaatgacacaagtattctgaatttaaaaaaaattgaacattgttaaa

SEQ ID NO: 262 - DNA, 460 bp, Canis familiaris
  misc_feature (1)..(460): n = a or c or g or t
atccaatgctgtctccccatngnctccgatgtcaaaaatccagaatttgcattgtatttggaatcacaaacatagaattcttactgtgttggttaaagtaaaattaatttgcagttttgattttcatcaatgagctgtactttcccccatgactgtatgtagttttaataaaatcatttagagcaagtgagtgccacatgatgttgcaaaaccttttgnnngggcactccgccaagatgccaataagtcattttaaaatgtatgtcagagatgtaaacaaacattttggatttttttaaacagtatttatttggaatgttttcatttatctaaataactattgctattatgaattatggaaaaaaaagattaatatcatgtgtggcatatagtgacttcttaacacacacatcacgcaatctgcaaacccagaaaatgtgtatatctgtctttagaaatt

SEQ ID NO: 263 - DNA, 522 bp, Canis familiaris
  misc_feature (1)..(522): n = a or c or g or t
gagatgcgtnngccgcagcctcggcccccgcgccgacccccgagccccaggtcgccgaggacccttcccnnnngcggccctgccgggcctgcgtggacttcaagacgtggatgcgnacgcagcagaagcgggacggcaagttcagggaggattgtcctgaggatcgcgaggaactgggccgccacagctgggctgtcctgcacaccctggccgcctactaccccgatctgcccaccccagaacagcagcgagacatgacccagttcatacatttattttccaagttttacccgtgcgaggagtgtgccgaagacatccggaagaggatatgcaggaaccagccggacacgcgcactcgggcctgcttgacccagtggctgtgccgcctgcacaatgaagtgaaccgcaaactaggcaagccggacttcgactgctcacaagtggacgagcgctggcgcgatggctggaaggatggctcctgtgactagatagtggccggcagagctnnnnacagcagtccgg

SEQ ID NO: 264 - DNA, 202 bp, Canis familiaris
  misc_feature (1)..(202): n = a or c or g or t
gcgnntgagtggctcagnnaagcgtctgaatcttgatgtcagctcaagtcatganntcagggttgtgagacngagccctgcantgggctctgcgctgggcacggagcctacttgggattctttcagtnnntctgcccctcccctgctcactctctctttcaaaaaataacagggacacctgagtggttcagtggttgagcat

SEQ ID NO: 265 - DNA, 678 bp, Canis familiaris
  misc_feature (1)..(678): n = a or c or g or t
aacctggacanngtgcgngctgtgtngaccacgggtgacatcaagacgtcagtngactcagctgtggccatcaatgacctgtccgtggtcgtggacctccttaacattgtcaaccagaaagcctccctgtnnaagctggatctgtgcaccacggtcttgccgcagatcgagaaacttctgcagagcaagtatgagagctatgtccagaccggctgcacctccctgaagctgatcctgcagcggtttctgcccctgatcactgacatcttagcagcacccccctctgtgggtgtagacatcagccgggaggagaggctacacaagtgccggctctgctacaagcagctcaagagcatcagtggcctcgtcaagagcaagtcaagtttgagtggccgtcatggcagcgccttccgagagctgcacctactcatggccagtttggnnngaggagctttcggcctggcctcagcccctaatcctgtcccctgtgcgctcctgggcccaggagcctctgcccagcccccgctgcagccctgtggccaccctggaggcggcagcgctggcccaccagccacctgcacagcccccgagctctcagacaacttctccccagcagcggctgcccagctttgccaactcccgcttnnnggggcagcaaagagcgccctggggctgctg

SEQ ID NO: 266 - DNA, 601 bp, Canis familiaris
  misc_feature (1)..(601): n = a or c or g or t
ccntggtgtnnnnnngccagcccttcatctacagaacnntggactatcntggnanntagggtnnaccaggatnnaatcnnnngcctacctcactgganngcactgaanntggggtgcctacccaccctcaggcagaagacacccaccaggtcctccataaagagattctggaatgccatcaccttgaagccagagggtccccaagtcctagccgaaagcactcaagcctcaaggatgtaagcctgagcataagaaacttgactccaagagctgctccctgctcccacggtggtccctccttaacccactgactctgaggcaacaaaaaaatccggacagcaaacagccacctaacgtcccccctcataaggctttaggttcagagcccatggcccccagggctttggcatagcctcagatttctctgacttcctccactcccaatgtgaaccaaacagcttactacctgacccaaggctacccaccccaaggaagggttgggggatggcagcactggtgggctggcctgtgtaaaatgggcatggggtggggtgaactgagtcactgtggtgagggtgagaggaggagcttgggagctgga

SEQ ID NO: 267 - DNA, 648 bp, Canis familiaris
  misc_feature (1)..(648): n = a or c or g or t
tgcatttgatttcactagttcagacgtctaaatgccggagtaaatccgtttgcctcctcagcgctcctactctgaagtgcattggcctgactgtgctacgtgccaccgccgatccccggcctgggcggttccccacggacgccgaaccgcagcagagtccaaagccacagctgcggtctgtggcatcagacaccggagggctgactggcggtacctctgccctccctgggctcccccacgggctgctgtggaaacgccacgcccccggccggtggggctccggccagtctcctcgggccagcagctgagaaagggctccctgctttttttctttttcttttaaaaaaatcagacagagctagtagcttcaaggggttccaaaacttcctcgccccgtctggacccaaaagcaagagctaatttttaaaagccaaattcctgtttcagttggacagaaggaataatgggtctttcatattttctttgtatttctcttcaatagttgcttgacccaacatctgtctgctctatacaatgaaaatacaaactaaatgagaatagaaaaaaataattaaagcattaaattgtacaaattacaaatctgttnnnnnnatatacttacattaaataaaatacgcatttcnnnnn

SEQ ID NO: 268 - DNA, 675 bp, Canis familiaris
  misc_feature (1)..(675): n = a or c or g or t
aaggatttgagtgttacttgccctctctcagcnacttttttnntaatgtattaaaaaggggggaagtagagagaggtaaggagctctagcaatccttnggctctagcattctgtgactntaaagaaatgtaatacaattcaaattaggcaatacagggagaagggcaaggcagagggtgtgattcatctgtggttgacaacagctgctttcacataactaagagttactggtaaaagacatttcaatcttacagagcaactgttaggaacttctgtctagcgctgtcacacataggttcatggtcaacctaaatacgtgcactgtgcattttattggcaacctgcaaagatctgtttattttacagaaaccagttttcactcaaagtggtgtgcagacaattcaaataaataaagaaaacactattattgtacaatagcataagtgagactatgaaatggcaatacttttttaaataacccagatttgtaatatatttgttcactgtgcagagaccaactgtaccttgtacaaaataaaatgaatttctcaaactaatttaagaggaatgcctactgatgtgttgcacaccgaaatgtgtctataatctacaactcaggtttaaaaggtagaactaagctacatgttgtgtaagtcactttaggcagccagataa

SEQ ID NO: 269 - DNA, 287 bp, Canis familiaris
  misc_feature (1)..(287): n = a or c or g or t
gccgccgccgccgggccgggccggctgcgccagggactgcgacgggcctcggggcgcccaggaccgggacagcgcgggactcgaggcggcgcgggaagggacttccacacccggctcgtcctgtgcgcgcctcggcgggggcggggcgggggcgggggccgaggtcacgcgcggggagttctgcgtgtctgtagagggcgcgatgcgggacgagttgcgggcagaggaagttgaggaccccgaggcgctgagcttgtcggcnnngattttgcttttgagaagaaacc

SEQ ID NO: 270 - DNA, 590 bp, Canis familiaris
  misc_feature (1)..(590): n = a or c or g or t
gagnngaccntcgagggcatccgccagtnctacatcaacgtnnagcgagaggagtggaagctggacacgctgtgtgacttgtacgagactctgaccatcacacaggcagtcattttcatcaacacccgaaggaaggtggattggctcaccgagaagatgcacgcccgagacttcaccgtgtctgccatgcacggagacatggaccagaaggagcgagatgttatcatgagggagttccgctcgggctctagcagagtactgattaccactgacttgctggccagaggcatcgatgtgcagcaggtgtctctagtcatcaactatgaccttcctaccaacagggaaaactatatccacagaatcggccgtggtggacgatttggccggaagggtgtggctattaacatggtgacagaagaagacaagaggactcttcgagacatcgagactttctacaacacctccattgaggaaatgcccctcaatgttgctgacctcatctgaggggtggtcctgctacctagcctgaccctggcctcagtctggggggggcagaagagcaggaggggggagggaagggagccaaggga

SEQ ID NO: 271 - DNA, 569 bp, Canis familiaris
  misc_feature (1)..(569): n = a or c or g or t
gcagtgtcngcgatcgccccaccaggccccgccnnnnangacattgcnagcaggtccccgnnnncgctcnnagctggggtnnngggcgngaggacgggggtgcacgaccnttaatgaatctgcccaggcacagcactgcctcactcatcgacaccgccctgagcgctcagggcagcctggctggtcgtaggccaccttcttagccaaaaacccagggctcgtttttcaggaaattgataatgaacaacaaaaggggatattctctctgttttttgttttttggggtttttttttggcggatcctatttccgttcttttcacctaatagcctctcgtagctgcatgtgtatttatttataattataaccctggtggactgcagctttcatctttgtcgggaacgagtttgttccaaatcagagctgggtcgcgaccacagtgtttggcaaacccggtctgtccctgctctgcaccacagaggagcggggccggggctcggagccccgagaacagagcctggggagacggcggggcccatgcagctgcaccanntggtctgttttaattta

SEQ ID NO: 272 - DNA, 370 bp, Canis familiaris
  misc_feature (1)..(370): n = a or c or g or t
gntggtggnngagtaagtgatnnnnnntnntcaaacaagcagcctcacaatctnnnnnnntnnnnnnnctgtgatgtgactnnngattctttatgctgaaaacannnagtcccagagatgactngtctggnnnnnagaactgaaatagtattcactactgcttatngcacagcagttgtcactgaatcgctccactcnnaaaggatgcttctggaaaacagtacaactaggtagtagctaaatacaaaatctatgggatttggtctgtgtcttttnnnagtacagattnnnagttactacgaatttcagtagtgttcttcaagagcaaaataatgttaagaaatatttgaaatctttgggaaatcatgaa

SEQ ID NO: 273 - DNA, 708 bp, Canis familiaris
  misc_feature (1)..(708): n = a or c or g or t
gcacattcagctgcatgatgaagttcactgtcaaggactgtgaccccaccactggggagactgatgatgaaggctatgaagatgaatatgtgctnnaagatctnnaaatcactgttgctgatcatatccaaaaggtcatgaaactgaactttgaagcagnnngngatgaggtaggggatgagtttgagaaagaggaaacattcaccttgtctactatcaagacacttgaagaggctgtgggcaatatcgtgaaattcctgggaatgcatccttgtgagaggtcagacaaagtgccagataacaagaacacccacacattgcttctggctggtgtgttccggggaggtcatgatatcttggtgcgctccagactgctgcttttggacacagtaacaatgcaggtgacagccagaagttcagaggagctgccagtagacatcatcttggcatctgtgggctaaggggccagactgcatggaccctgctcctacccttttcccctcaacactacgcagaagtcatgccttcatcctgaattccaatggaaactccttcccaagcctctgcattcaaaaacaactaggaatcactggggaaaaaaaaaaattttttttccctgcaggactgctaggggataactttttttttcctttttttaaataggggatgattttagcttgtcctagaacctgttgcccttcttgtcag

SEQ ID NO: 274 - DNA, 523 bp, Canis familiaris
  misc_feature (1)..(523): n = a or c or g or t
ttttatttcattagctgtannctggtgtttggctttgaattattttgtagacatttttcacttaactttgcaattgatgagaaatttgtaggtctggtcccatggaggagtggggaacttactcctacatcagaaatgcttgcctctctgagtaaaagtgtttctttgaaatgagccacagagggggcacgttttactcatcttttctgcagtacagtaatagcagtctacttttttcttgtttctaaactttgcttccctttttgattagaaattgtgagaagctgcatttaatgtttaaaaatatgggaagataaatcgaacttatatgtatgtaagatcaattttctaatagaaaggtatggtccaaaatagtaaaagaaggaccaggtaaaacatgtagtttgtttttttttttcttttaacgtatacttggtcttttgtctgtgtctgttttattccactagaataaatgtgtccttgatgtaaatgcaaagcatttcttcctgattaaattgtagat

SEQ ID NO: 275 - DNA, 574 bp, Canis familiaris
  misc_feature (1)..(574): n = a or c or g or t
tctgtttgcatctgtggaagcgtaaatggtggtgggnnnngccctgaataggtttttatgggaattcttcacaataaacatagcttgtaactcgagatttacagatccattcattctgattaggcatgagattctcgggaaagaggaaaatggaaagtaaagaagagctcatgtcactgagatggagggtttaataaaacacctactctggctatcttgtcaacatagacagtagagtccaacaaagatagaatcacttactcctgccgatagaaccaccccatccacccattctcagttgatttcagtatcagtggaagtcactcattaccatactcttcacactgtaacaaaaaaaaaggaagtgcataatccttacaacagaaaagcaaagcaatctcttatacccttaaagttgatttgatgactcatttgtctccctttaggcattattcaagataaaagacctatgcatgctacttgtagcagttgatcttgtttaactagaattttagctatacatttttaagtatctgtgctatttgtatattttgataaaatattgtgacttaat

SEQ ID NO: 276 - DNA, 666 bp, Canis familiaris
  misc_feature (1)..(666): n = a or c or g or t
tgcactgctgactgacaaccatggtgccacatatgnnntcagtnngtcccactactggcgtctggacaccagtcgggatgggtggcacagctggcccattgtccatcagtggccccagggtccttcaacagtggatgctgccttttcctgggacaataaagtctacctaatccaaggcactcaggtatatatcttcctgacaaagggaggctatactctagtagatggttatccgaagaggctggagaaggaatttgggagccctcatgggatcaaccttgagactgtggatgcagcctttacttgtcctgggacttctcgtctccacattgcagcaggacgacatctgtggtggctggacctgaagttaggagctcaagccacatggacggaggttccttggccacatgagaaggttgacggggccctgtgtatagaaaagtccctcggccccaactcatgttctgccaatggtcccggcttatatctcatccatggctccgatttgtactgctacagtgatgtggagaaactgagcacagccaagtcccttccacagccccagagagtgaagagcctcctgggctgcaatcattgagaggagggctcttgagattattctggcccggccccttctctctgttttcctcacnnnnnnaaccacan

SEQ ID NO: 277 - DNA, 476 bp, Canis familiaris
gggggggggggggacccggcctccgcgggggaagattcgaggtagaactgccgtcctcggcgcgggggctctggggaggggacaggggttcccaggagctggcttcctttgactcgggggcgctggtcccatttctcagaccagctcgctgaggcagaggcgctgacctccaggggcttcgtttcagccgcagggtcccgcctgtgacagaggacacgtcgtgctcagaaccacgagccttcccgagagtgagagtggagcagcccccctgccccctgggaataaactgtcagctgggcctctgttgctacgttgttttgtcggaagtcccacgactgtctgagggtcttgtggtgcacggaggtcctctccgcaggggacagggattggaggggctcgctctcccttctgttttatcctgcgcgctccgagggtttgcgccaggctctggggtcgggggctactttggggctttc

SEQ ID NO: 278 - DNA, 537 bp, Canis familiaris
  misc_feature (1)..(537): n = a or c or g or t
ttcccccatctngatgcattacactcatcaggctttgcaaacccagcttcccgtgttcatttgggaatcctcatgagttgctccaatccgggatggtgggagtggggagggagagaggcactctatatgcaggtaattacgtgcaggcctgttgccatggtgctggaagcctgtgcctcttcttcccagggcttgactctgatcacttctggccgcctggtggccattgctacagctggtctacggagaggagctcttttctccccagggctgccatgacagcttcttttgggggaagaggagggagaagggaggaaaatatgacgagagcacatgaaagtgtgtatatatatcgctgctggctctgatgccaggggaacaaatggtgggggttgcaatgggagggagcagagcctacatttccttacatagctctacatctaaacagctgacccagccctccaaactgtgcggcttctgaaaccctcggggaagcatgatgtgtgtcctctccatttggggcgtctcacttctgac

SEQ ID NO: 279 - DNA, 585 bp, Canis familiaris
  misc_feature (1)..(585): n = a or c or g or t
tttatagatgatatagntgtatatnngnacaaccaatataccagttgagtattcaactgaaaactcaaaaaataaaagtatagattgtgactgtaccaaaaataatctgtaacaaaaagttcttgtttttttacagtcatttagaaactataacatcaaatattgaggagtaaacttagtaagagatgccctacaccctgaagtataacacttccataagggatgtaagacttgagagagtcttaagaatgggagaaatattccccattcttgcagaagaactttcaacttcgtaaaatgtaaggtattcctaaacattgtacaaagtaaatgcaacaccaacacaactcccaaaagactggaaaatttggggggttgggggggaaacttggcaaacattcttctagttcacctcaaagaacaattgttgagaagaaacatgagcggtaagcattgacgtcaagtattaaggagggcctcgaaagctcaaatatgccagtataaagctctaacatttaaaacagtaggatgcagggctaccgggctgnnnccatcagtaaagcatgtnactgctgatctcaggat

SEQ ID NO: 280 - DNA, 565 bp, Canis familiaris
  misc_feature (1)..(565): n = a or c or g or t
gtcactgaagtttaaagccagaaaaaaaacaaaatgtttatctagtccaaccccatcagctcacagagtnnagctgtacttcagaaaagtcaagggcctttcccaaggttgcatatgggtgtaactgattttctacctgaatcttgaactctggccttcttgcccagcactctccattatgggttggctctagatttatttcatttgttcataaacgttttccaagtgctgactatatgcagctgttatgtggcatcctggggacctcgcaaagaacaagacagatgtaggggtccctggcctcctggaagatgcctagtaaaccaggagtgcatagcgagcatcatggctctggcatgtgcggtgaaggaggagtggcggctgctccgccgtggacatcggggagagggacaaaggagaggcttccctaaggatgggatgttgaaggctcccagcagcgacagcccccacccagccctctatgggggcagcggggactggtcgacacaagaaccacatcaagttcctcacctctggctgcagcaacaactgtatttgatttgat

SEQ ID NO: 281 - DNA, 550 bp, Canis familiaris
gtggtccacatgaacacgaggtatcagagcatagaagaggcgcgaagtcaccctgatgggctggcagtgctggcggtgctgttggcagagcgggacacggacaacgccaacttctccgcgcttgtgtcgggcctgaagaacgtgtctgagcgcggggtcccggcgaatctggcacccaccttcccgctggcctcgctgctgcccggcgcctccggcctctcccgctactaccgctactcggggtcgctgaccacgcccggctgccagcccgcggtgctctggacgctcttcgccgacgcggtccccatcgggcgcgcgcaggtggcccagttccagactgtgccccgggccgggctccccggctcgcgccccgcaccgctcaccgacaacttccgcccgcagcagcctctcggggggcgcagggtctcggcgtctccgggcgcctccatccgcgccgcagcctcggcccccgccccgcacctggcccctgtgcgcggggctctgctgggcctagggctccgcctgtggctctggaggagcccctaggacc

SEQ ID NO: 282 - DNA, 603 bp, Canis familiaris
  misc_feature (1)..(603): n = a or c or g or t
ccattcaaattgatgggactnnaagaaccttgcaggacagtgacacagtcaagcacttggttgatgtnnagctgagctcgggatttgagaatggccagaaggctgccgtggtacaccactttgaatcccttcctgcaggttctaccttgatcttctataagtattgtgaccatgagaatgctgccttcaaagatgtggccctagtcctgactgttctcctagatgaaaaaacattagaagcaagtgttggccccagggaaactgaagaaaaagttagagatttactctgggccaggtttaccaattctgacactcctcgctccttcaaccacatggactctgacaaattgagtgggctctggagccgcatttcacacctggtgctgcccgtccagcctgtgaagagcatagaagaacaggggtgccttttataagttaagaacagaattggtttttgaaggcatggagttattgaaaagtcagtnnnaaacctgtttctgtggaaggaggttgatgaaaagcctggaaagcacaaatgagcttattttagaggaaaaaaattcattttttttaccttttgtaaaatctttctaagcttgacaa

SEQ ID NO: 283 - DNA, 527 bp, Canis familiaris
  misc_feature (1)..(527): n = a or c or g or t
cttccccnnggtganctactcccccattgtgtcagccgagaaggnctaccacgagcaactgtcagtggcagagatcaccaacgcctgctttgaatcctccaaccacatggtcaagtgcgaccctcgccatggcaaatacatggcctgctgcatgctctaccagggagaggtggtgcccaaggacgtgaacgccgccatcgccaccatcaagaccaagcactccatccagtttgtggactggtgtcccacgggcttcaaggttggcatcaactaccagccgcccaccgtggtgcccgggggcgacctggccaaggtgcagcaggcagtctgcatgctgagcaacaccaccgccatcgccgaggcctgggcccgccttaaccacaagtttgacctgatgtatgccaagcgggcgtttgtgcactggtacgtgggcgagggcatggaggaaggagagttcctggaggcccgagaggacctggctgccctggagaaggattatgaagaaatgggagcggagtcggtggaca

SEQ ID NO: 284 - DNA, 577 bp, Canis familiaris
  misc_feature (1)..(577): n = a or c or g or t
aaaaatcnnagaaggacttggaacaacnnagggcagctggagnngtgatnnagnctgctaatcttttggctgaagagaaggatgaggatcttctgtttgaataatctttcctgctctggttctttcataagctctaacatggcaccattgtaattcacggtgtgtaggtttggtatgtgtggctatttattttttggcctaagaatttcactggtaaaatttccttggatattggttatgggactacatttgcaaactcataattcagcaagcatttatctcatgagatttgtagagcctgcccaggaacctgtagaatttattctgcagaagcagtaccctactccatttatatctgttaaagtgctctgcttcccaagcatattaggaaattcccgttaggaagccacagtggcctcaggccagctgtcactgtagcactggttgttcctaccctgctccagcaccttggcactgtcctcagattgctgcagctgccctgtgtaaccctggtgcttctctcaagctttatgaaaccctatttttccttgcatgacaggnnnnnntcctgtctgtc

SEQ ID NO: 285 - DNA, 73 bp, Canis familiaris
cctgccagggtatagagagtcccctctctgggctgtcagtgtgaatgcgatctgtttacaatcttgtgcatag

SEQ ID NO: 286 - DNA, 628 bp, Canis familiaris
  misc_feature (1)..(628): n = a or c or g or t
taaactctgaaatgtcaagattgactatatctccagtagagctaataatgnnnnntaccataaatggaacatgctttggtggttggaaaagcgattctatcccaaagctggttactgactacaagaataagaaatttgatctggatctattggtgactcacactctgccttttgacaaaatcaatgaggcatttgacataatgaaccaaggaaaaagccttcggatagtcctgaccttttgaagacaccaggaataaattggaatactatctgactgaatctgaacctgtctgggttaatttacaacctttaataatgaaccacggattgccatgaatttaaacaactatttaaagttaacatctcaacatcaaatagttataaacattacagcatttgtatccataaaatatattaatatttcctgtttagtaattatgataactggtgtgtttatgaatagaattatatgatgagaattgttcaaaactagttctggagaggtgggagcggggaatgacgggtaagaagtaaagcttgttggctatatgtttataattttttaggttgggtgataaatattcagggtttcattacactgttctctctacttttgcttatgcttaaa

SEQ ID NO: 287 - DNA, 591 bp, Canis familiaris
  misc_feature (1)..(591): n = a or c or g or t
tctggcttccaatccagttgatgtggttcgaactcgcatgatgaaccagagagcaatngtgggacatgtggacctctacaagggtactttggatggtattttaaagatgtggaaacatgagggattttttgcactctataaaggattttggccaaactggcttcgacttggaccctggaacatcattttttttattacatacgagcagctcaagaggcttcaaatctaaggactgaattatatgtgagccaagccctgccagcctttctactcttttcccttttttccatgttctaatgtattttgacaaagttgtgtttactgaactgctggtctcccaagcctcctgatggaagaactctagggtggttcaaaattgttcatgtgtttgtgttaccatgttaacttttccctgagaggaagtgttaacattacgactctggccccagattggtatcttctatgaagatggatactgatggatgacattcaacatggccttcttttcaaatgttggttaaatgtagttnnnnnccccagatttgggctagagcagaaggcataggccagggcagttactgctatgtatgt

SEQ ID NO: 288 - DNA, 530 bp, Canis familiaris
  misc_feature (1)..(530): n = a or c or g or t
ggcntngacgtcacccctccccccacctccactagtggcccagggcctgnnnngggagaaagcccctcacactgcctgggcnnntggccaagcggccaaacagatgaagtcagtgagtgtgggggtgagtgtgagctcaccagggcccccagaggaagccctcgggcctcttccctcccctcgcaccagggcgggagcccaggcctgttgccggcagctgtgcttgcagctgtgctgttgctccctccaggaatgtgggacaggcccaaatgttccagggagatatcccatgtgggtgggggcttagcgtcgccaatttggttctatgtttggcctccaactatacaaagttccccctgaataacgattgcacagggtccatgtgggaggaaccccagtgccaagctgggtgtcctgaaagcccggcccctccaagtgttaagacagcaagggggggagttaggaggctgccacctcgggagacgtgcttctgtnnngcactgtgaacacagcctcgtgctgtgcccttc

SEQ ID NO: 289 - DNA, 551 bp, Canis familiaris
  misc_feature (1)..(551): n = a or c or g or t
gnagnatattcagtttatctggcancttgnagacagtgagaggnnnannagtggtgggcagnnaancagtgttatccaaggagcagcccgcattccagtatagcagccacgtctccctgcaagcttccagcgggcacatgtggggcacattccgctttgagaggcctgatggctcccactttgatgtccggatccctcccttctccctggaaagcaataaagatgagaaaaccccaccttcaggccttcactggtaggccagctgaggcctgagtgcctaggctcagcccctgaagaacagctctcatcccacaattgctgcagaactctctctccaccatgggccacagtgggtctttttatcatttgcgccatttgattgtggggttctttttcagtgcgtgggtgtaatcgttttctccagaagacctgtgtaggactcctccaaggctggcctcccctgtaagccctggctacactgtgttccagtaaagctttccaccaggaattcttatgttcagctgccacaggcctggggtttcctggcctgt

SEQ ID NO: 290 - DNA, 655 bp, Canis familiaris
  misc_feature (1)..(655): n = a or c or g or t
gctncggcacnnggcatgtggnnnctggtaggggcgcagagctnngcgnnaagggatggccctggcgcccggctgtcngngccacagcgtgcgtgggtgtcctgtggtngcgggtcgtcgacacannttccttccaatgttcaagctggtgacgggtttttgttgttagnganntgcctctcccatcnngcggattggtttcgggtcaggctgctgttctgtctcgtgttatcgtcgtgcttctttggnnttaagtgagaggccactgctgaagctgcactggggagggcgcgcccctcgcctgcagatgagacggggagagtgtgttccctccagcacatgcccccctnnnnannncgcggtgggnnnnaacccatgtgannacaagtcagccccccacccaggacnnnaggcttcagatcagaacctttctcgtccgttccaaatgtcgtttgtcccgacgtgtccacagtgcacagaagtgaacctgctgcagaggcagcgcccgccatggctcctctcccagnnaggtgcctttgacattctgttttccttcctggtgtgtggctgacattgtcctttagtcccatgtcaggtgctggtgagtattacctttcacgtgtgccatgctctagaacctttgccctggtagttc

SEQ ID NO: 291 - DNA, 280 bp, Canis familiaris
  misc_feature (1)..(280): n = a or c or g or t
cagagctgggcnnaggngactctcccagccaatccccccccattaagaggccatgcccaaatgtgcaggtgagtctggtactcctatgctttcctccaggttgaaattggcccaggaagttctttatgtgcttcatttccttatcataatgttgagagcatctgggagcaatcctaggaatgcctcctctggcagggcnggtagnnagctggggnnntttgannncnngtgtcaatagggagcccctcatccttgggaacctagcatgagagattgtaag

SEQ ID NO: 292 - DNA, 568 bp, Canis familiaris
  misc_feature (1)..(568): n = a or c or g or t
tctctgcttccntagnnctgatttcaaagtnactagtaatttcttgatttgaaattgtgagtatctagttcataagactatctatccaatttgctattttgcatgatcatactttgaagacatccaataatctcctttgtttagattttgtctgtactgttagttaatctacaaacgtttgcattggagacttccttcctcacatcttatgttaagattactactctctccgggttgaagtataccaaaaatcagccagctttctgacaaattaaattctaggtgtggtgatatagattatatatgtgtgattaacaaacataaatgctgaacattccatgttgttatggttaatatcttaatctagctggaagatgaatggaaaaaagtgtgcaactaggttttttttttttttgtgatggtataatgttctgaatttacttaaaggaattctttttgtgctaaaaataatttaaaaatatttttcaattctgttaatttgtagtaatttacgtttgcatgtgcctttcnnnnntagaattattctgannntgtacttgattttaat

SEQ ID NO: 293 - DNA, 175 bp, Canis familiaris
gtataagaccccaaatctgtgcggaggaggaagacgaagagctggaggttgaggtttttccttctgtgtaagcacctactgacaaaatgtagaggccattcaactgtccaataacatttggtttaaaggaggcaagatggatgtataaattactgcactgctttcctcaatttgt

SEQ ID NO: 294 - DNA, 658 bp, Canis familiaris
  misc_feature (1)..(658): n = a or c or g or t
agtgttaaatgctgcaantaatctctttttcaaaaatgtttttgaagctacctattttcagccaaataggaatattnnagagggctggcagggagtagatgagttccatttggatttttggaagatctcatctcattgaggttttagcagatgtgctgcgatttgggattaggtgaacctcatcggcaccctgctcctgggttgggctgagagaatttgggacagtttgcctgcagtaccatggaagcgcccagaaattccaagtaccttaggatttgtcgatgctgtcccaatagctgttgctcatcgacctctagtggtgaatttctagaatgctggtccattaatgggattttccaagatccaaaagagctttatcacgtctgggtggtcatcagcataaactggaatgtagtgtcagatgatactgtggcttgttttattattttttttctttgtcaagaagaagaccaaggaataacattctgtagttcctaaaaatactgattcttttgatttactactatacataaagggaaaattttattcttttatggaacaattcagcagtactcatgtattaaaataggaatgtgaatgctatatactcttcttatatcaaatgtctcaagcacctattttcattctatgcattgtt

SEQ ID NO: 295 - DNA, 591 bp, Canis familiaris
  misc_feature (1)..(591): n = a or c or g or t
gtccactcggtgaaaggcgtccccagctcctgccagttnnanntgctctcggacgggcacntggncaagagaatccaggtgggttcccccggctactgcatgatccccaagatgcctgtcttgagggagaaggaggagattgagccccgccccgtatttgggaagaagcccctggtgtgggaggaggatctggagctctcctcgaggttcctggaccggaaggaggagctccgcgtcaggcacgccggctacctgcggcaacaccccgaggcccgggcgctggtcgccgacttcctgctcttcctgctgctgcgccagccccgcgacgtggtcgccttcgccgccgagcacttcgggcccttcgcgagccgccgcccgccgccgcccgccctgcgctcctccacgcggcgcagccccttccgctcgccgagcccggggcgcccccccgcctagggcctgcgggtgcgggtgcgggtgcgggtgcgggaggccgggcgtcgcggggacgcagcggggacgggcgggactcccccgaggcgcgccttacccgctgtggggtttttttgcggggggggcggaggggggaataaa

SEQ ID NO: 296 - DNA, 707 bp, Canis familiaris
  misc_feature (1)..(707): n = a or c or g or t
gngctgtncaatcaagtgctgtccaatctctcacgtgtcaatgtgggcatggtacgtnnngcangaccatcaagatnnatttnnacttttcactattgccagctgatatcctccccatnnncntctgccctcccaccggatttttttcagcnnntagnctaccactgcagaatctgttatgacccaccattggggagtgcatttcagagcaggtggaactaaccctcttactatcaatatgcttcaaagaccttttgcctttggtaagatgcctctccagccactgagctcaccagtaacatgatctgagtgggagagatcatctaagctaacaatgagggtctacgttgtgtgggggtccaagactccagaggaagatgctttttatcaatggaggggtgacggggaaaacaaaagcaagaaaaaaagttaacttgtattatgtatttttactacacttttcttaaaaatagagcaatgggaaaactctgaaagagattgacatttttctcaacaggaatccatacttaacagttctggctttcattaaattttgctctttggtacctgggccttttatttaacatctatatttgttttaattctcttagcagatgtgtgaaaggatttttgcttgatcaaacactaaatatttttttggttctgtttttctttcaagtagccaggggttttttcttttggtattt

SEQ ID NO: 297 - DNA, 495 bp, Canis familiaris
  misc_feature (1)..(495): n = a or c or g or t
ggctttagagcccgggacccggtgccgctgattggctcctccagaaacgctgcacccaatgggagtgcgcgctggggctgcgtcacgagtctccaggcagggggccctgagccaggttgggagacggagannngaaacccggggaggtggggactccccagcccgagcgtccccgccccggacccgccctggggcctgagagcctgagaggcagcccggggtcctgagaccttgccctgactcctcacctagggcacacagggctcttgtcgcactgtctccctgagtcctggcccgggagttgtgtnnggcagtgagtctagaacattctgttcccacagggcatctacacagtgtcacagattactgaggatcccaggataacgttgtggctgtggttctgactatcgcatttaccagaataggaacaaagccggtgtaaaaaattcattaattcnnntagaatggtattaataanncacggcatgaaaacaa

SEQ ID NO: 298 - DNA, 667 bp, Canis familiaris
  misc_feature (1)..(667): n = a or c or g or t
tgctcaggctcaacgacatggcatcgactgatgacgggacgctccagtcccgactagtgatgcnnacccagggcagcttgcgactgatcctcaacaccaagctctgggcacagatgcagatcgacaaggccagtgagaagagcatacgcatcacagccatggacactgaggaccagggcgtgaaggttttcttgatctcagcaagttccaaggacacgggccagctgtatgcagctctgcaccatcgcatcctggccctgcgcagccgcgtggagcaggagcaggaagccaagatgcctgcccctgaacctggggcagccccgtccaatgaggacgacagtgacgaggacgtcctggctccgtcgggggccaccggaggtggtgccagcgaggaaggggatgggcagacggccggaagcacatagcgccgggagccggctgcccgcgagcctgctgctttgtccgtctgtctgcctgcccgcccgccccgccccaccggcagtgtggaggcgcagggctcgggaaccacactccccgctgggttggccacagttcggatccgcatgtcccgttcagaagcagactcgggaactgcctgaatgtggtttgggacacgagacctcatcatattgatgagcaaaacgaaaaagaacatttcttccctccc

SEQ ID NO: 299 - DNA, 627 bp, Canis familiaris
  misc_feature (1)..(627): n = a or c or g or t
acacagctactccgantgaccacgatnacgtcaaatgtaaaaaaccccaccagcaggcgacgcnggacgagcgcagccaggacagcacggnngtggcgctctcagactccagctcgacacaggacttctttaatgagcccgccagctcattggagggctcccgaaagctctacgtggagaagaagctgcctgttcccaattcccaagcaggatcaactggtaaagaccttcagggggccacagaggaaagaggaaaaactgaggagtccttggagagcacagaaggcttccgggtcacagagcaaggcagccagaagcctgctgcagaccccccaacctctgcgtgcattgctgtcaaaaccccagcatctgcacctgccctgtgggacgggaggaagagagctgatccccccgcggagccagcagcctttccccaggggctgccggccggggcagaggagcagcgccagttccttacagagcagtgcatcgcctccttccgcctgtgcctcagccgcttcccccagcactataagagcctctaccgactggccttcctctacacctacagcaagacccaccgggtgagtgagctgccagcccacacggggcatgagagagatcttc

SEQ ID NO: 300 - DNA, 691 bp, Canis familiaris
  misc_feature (1)..(691): n = a or c or g or t
gcagccacagtcaaagcaaagacaaacgtgaaattgtggggtatcgaccgagacagctatagaagaatnntcatgnnnnncacnctgagaaagcggaagatgtatgaggagtttnntagtaaagtatctattttagaatctctggacaagtgggaacgtctcacggtagctgatgcattggaacccgttcagtttgaagacgggcagaagattgtggtacagggagaaccaggggatgagttcttcattattttagagggttcagctgctgtgctacagcgtcggtcagaaaatgaagagtttgttgaagtgggaagattggggccttctgattattttggtgagattgcgctcctgatgaatcgtcctcgtgctgccacggtggtggctcgtggccccttgaagtgtgtgaagctggaccgacccagattcgaacgcgttcttggcccgtgctcagatatcctcaaacgaaacatccagcagtacaacagttttgtgtcgctgtctgtctgagatgggcctcctgtgcctcccttcccaccccccccacccccaagtccaggcctccctcctgcagactgctttctcttcctcttcgcagcgccatgtggccgctggtaccgcagcttctcgtctgtttatattaaaagttgcttttattgcaccgtttttaatttggagcattgactga

SEQ ID NO: 301 - DNA, 560 bp, Canis familiaris
  misc_feature (1)..(560): n = a or c or g or t
tctatgtgcacatactgtcgatttgtngcagcattgtttgtaaaattgaatatctnnacactttcaaaatgcaccccaataggggttgacaaataagttagggtagatccacgcaatggaatgccacacaacaaacactgaaatgaaagaggcagatttcttcatatcagtgtgggaagatgtccaagatcaaacatatttttaaaaagtaaattgcaaccattctgcattttgattgtggagatagatagttacatgactctgcgtttgtcaagacccacagaactgttcaccagaaagaggaattttactgtatgccaaaaaaatgaattaaaacgacattaaaagagtacattggagatttgcttttggattttggagatatctaataataattggatataattggagatttgtattgtgattattcaaagcatatatgtatgttgcatgtgtgtgtgtgtttgtagtatttctgggaggaaacactgaaaatcagtgggtttgggcaagggaaggggtatatttttactttatacctgcctgaactgtttgagggt

SEQ ID NO: 302 - DNA, 572 bp, Canis familiaris
  misc_feature (1)..(572): n = a or c or g or t
tccagtttgatttcactgctcattttacagacacgttcacgctttccggccattaaaggtaattgaagacccnnaaaatttnaccaaactaaaaatagttttaaacgattgtcattcgctgccagcaactagcccagtgtaaaatgtcnngattataggggttttcttacctccccaaactgtttagaccgtctcccattaaggagaattgcctggttttgtgaaggagggcttatcagatccagattgaaatctcaggcagtgtttnnngctgcaaagtctgcgtcctggaagatggggaaaggagcacagggttcttcctctataaatcaacatttacccagcagtttagaaaacacctttagcccacgtccaccccttccgttcatcccaccttaccttaatccctgctggctagtttgagggagcctctttgcaagtttggagttgtgagcagatgtatcatttccttttcttcggcggctcttccgttgcccagacttccccctccagctcccccatagggataagaaactcctgtgccactgggggagccagagggcccaacacca

SEQ ID NO: 303 - DNA, 369 bp, Canis familiaris
  misc_feature (1)..(369): n = a or c or g or t
accataaaacaggnggcagcnagtccctttggcnnngatnnngttcctgtaatanngagtnnnnannnannnccatcagagagannnggtatatttnnaggtgatggtaaannntttgttggnnnnnnnnggagnnnnnnnnnnnnaaantgnnnnnnaccaagaggnnnnnnatgntnagtnaaaatgaagatnnnnnnncggaacannntgcttcagatagtagtatggctccttctcagacattcatttctacagatgacttgttggactgcttagtgaatccacaagtaaccaggatagtggcccaacttctgataaaaggaagaagtttgtggtcctaagnnnantgacttttaaaataatacc

SEQ ID NO: 304 - DNA, 722 bp, Canis familiaris
  misc_feature (1)..(722): n = a or c or g or t
ctttttgtggnnncgcttgcctgttngactaagcacagggtttaattgcataggctgnnnactaaaagaaaagattgtctgcgtattgcaagctctgtattcttgccagtatgcatcgggtgatattttaanctactggtgcctgaagttagtgttagtgttttacaacctcaacaactaaaacatcctggtgctactcactttagcactgagtgacatttgtaattcctgtaccaaagagtgaatttttttttcttaatttttggttgatggagacttgtgaacagtgttcctaacaacaattttgatgatcacatcttagattttgcacactgcctcagtttaattggttttaaatgtctctcatttggaattttttttgtagttaggcatatgactatggtttttcatttctgtattttaatatagattggctactttaaaagatagtttaatgggctgaggttagaaaagataattgaacacttttcacaagatttttttatgttgtttttatttctacaggagtaagtgaaaaaataataagaactctccttttatttctatacatgagctatacagtttattgagccctttaaatgaatgctgaaacaatatgctaaaatgaaaagtgaagggcccattctgattatgagaatcctgcatctgtgtctgtgtgggggtggaggtgtacctaacccttagtggcactaaagaatgat

SEQ ID NO: 305 - DNA, 710 bp, Canis familiaris
  misc_feature (1)..(710): n = a or c or g or t
acaggctctttgtgaaaatnnagaaggacagggacttngtnngctgggcannnnacgtgctgtctccaaacctcatctctacgagcatgcttnnnnnngtcaagtacnnnntgaactccctatcccatgatacagccactgggctggtgcagtatgccttggaccagggtgtgaaagttgcacaggtatttgtnnacactgtggggctgccagagacctaccaagagcggttgcagcagcgctttcctggcattgaggtgacggtcaaggccaaggccgatgccctctaccctgtggtcagcgctgccagtatctgtgccaaggtggcccgtgaccaggctgtaaagagctggcactttgtggaaaagctgcaggacctggatgccgattatggctccggttaccccaatgatcccaagacaaaagcgtggttgaggaagcacgtggagcctgtgtttggcttcccccagtttgtccgtttcagctggcgcacggcccagagcatcctggagaaggaggcagaaggtgttatatgggaggactcgctgacaggggatcaggagggacctgggaggatcatgtcctatttcagcaaaggccctcgaacccacccccgcctcccccaccggtacttccaagagcgaggcctggagtcagccaccattctctaggagccagcctgttctccctttatgtgcctccctcaccct

SEQ ID NO: 306 - DNA, 562 bp, Canis familiaris
  misc_feature (1)..(562): n = a or c or g or t
tggtccacccaccaacancnggggtccacccacctgctcctggtgtccannnnccggccnnannggtgcacccaacagctccgnnagtccatcctcctccatctgctggggttcatccccaggccccgggggtgcacccaccggctcctgctgttcatccgcaagccccgggggtgcacccaccagctcctgcagtccacccccaggcccctggagtccaccctccagctcctggggtccacccaccagccccagggatccacccccagcctcctggggtccaccccccacctcctggggtccacccttcagctcctggggtccaccctccagctcctggggtccacccccagcctcctggagttcacccctcaaatcctggggtgcaccccccaactcccatgcccccaatgctgaggcccccactgccctccgaaggccctgggaacattccaccccctcccccagccaactgaaaagcagccccttctccaggcaagatgggtgtcgtgtgttctggtgttttccttccgagctaagcctggtgctctcgtactgggct

SEQ ID NO: 307 - DNA, 625 bp, Canis familiaris
  misc_feature (1)..(625): n = a or c or g or t
atgtnnacatgaaactcaggaaactaagnatctcagcatgtcaacacgctccctgaaatntggcaggcagactnnnggtgaagagggagatnnagcctctgggtatgatgcctattggaagaacctttcttctgataaatatggtgatagcagctatcatgatgaagaggaagatgaagatgaagcagaggatgatgaagatgaagacgatgaagtcggaaaggattcagacgctgagtcatcagatttatttactaatttgaatttaggaaggacctatgccagtggctatgctcactatgaggaacaagacaactaggagtgctgcttacccatgggtgaccgggtctgagaggagccacagaaggtgtgcttgatgaatcaggtgtgggtgttcagaagtactgtcacttagccttgtgcaaaacactagtcagtcacgcttccggaggcaaggagtagggcatagcatttttatagggattgataatcaagctgatagcataagaaaaaatgagttccaaatgtaagatgcttattgatccaagcagttgaagcatcatggattggagttttactgatttcagtgatcactaggttttgccaattagatacatatacagga

SEQ ID NO: 308 - DNA, 581 bp, Canis familiaris
  misc_feature (1)..(581): n = a or c or g or t
cttgcagagannngctcagagcccaaacactaaaatnnntgtgancaatctggctaaagtctttgggcctaccatagttgcccatgctgtgcccaatccagatccagtggttatgttacaggacatcaagcgtcagcccaaggtggtagagcgcctgctttccctgcccctggaatactggagtcagtttatgatggtggaacaagagaacattgaacccattcatgtcattgaaaactcaaatgccttttcaacaccgcagacaccaagtagtaaagtgagcttactggggcccgtgaccactcctgagcatcagcttctcaagactccttcttctagttccctgtcacagagagtacgctccaccctcaccaagaacacacccaggtttgggagcaaaagcaagtctgccaccaacctaggacgacaaggcaacttttttgcttctccaatgcttaagtgaagtcatgtctcctgttacctgccagcatttactgagcaaggaagggcacacctgtactctctgctctgcagcctcctgtactcattactacttttagcattctccaggcttttaatca

SEQ ID NO: 309 - DNA, 685 bp, Canis familiaris
  misc_feature (1)..(685): n = a or c or g or t
ccccctaccccacccggtnnatgttcagagncaaaaaatannaatcacataaaacagaatggcatccagcannnnnaggtggtttagctcccaaanntagaagacacctcagtgcctgcaggaccctctcaagctcctggagaagttctagcttcccctaaggaaggttacaagccattgaccagtgactctccctcttgtcgctacagacaaagttggtcagggtcccagcaggaaatgaaggtacactcagatagagtctttatttgaggagaatttcaaaagtgacaccatacggggcaggcctgaacaactatgtatctgtccaggtctgccccttacttttcccagaatgccattcacatttgggttttgttttttcaccttgaccacattgtacagtaacatctaagagccctttctacagtgggtggttttggtctttttatacctttttctcaaagtcactgatgtttgtccctgtttaatgtgtagcattgtaatgagagcccaccaaatcctgagtgtcattttgttgtccctatggtaggtgaaatagtgatgtagaaaaatctagtaaattctgaatgcttttccacgtagacttatctggaatgtgaacacgactctttggttaatagtaaatgcttaactgtagtccttgagtaggtgcatttctgtcngt

SEQ ID NO: 310 - DNA, 504 bp, Canis familiaris
  misc_feature (1)..(504): n = a or c or g or t
atgggtaatatcaccacaatcaacgatgtcatctttgnntagnnaggaatagagactcacacagagtttgcaccannnngatcctacacacagatgaacaattcattagtcattcagaacgcaaagctgtcgccaaattttgctctgtatgctaaacacaatacaatgattgaaaataaaaagaaaatagaatcaagacagtgaggaaaccttttaggaggcgatgggaatgtcacatcaacatattgtcaagattcagatgaatatctccacagtattttctatcccatgagacttgaaagttagtctgcatataggtttaacaacagtgttaactattctccattccaattttactcaatctacaaagcacacctcaagccctttttgcttctcttcaaagctttattcttatctgaacttttatcatgatttattccaaattatgataaattgcattttcttnnnnattaagtcaacatgnnnntctgttctgcatgtatt

SEQ ID NO: 311 - DNA, 684 bp, Canis familiaris
  misc_feature (1)..(684): n = a or c or g or t
acttcaagaagaagatgnctgacttgcctggtgacaaggatgagccttacgacagacgctncgtcnagtnnatgatcaagaacaagggctnggcggccattccgacttccatcctctacagcaggccacatcagaagcactttgaccactatatccgcttctgttttgtgaaggatgagtccacactgcaggccatggatgagaagctgcaaaaatggaaggaagagctcaggccctgacgtcgcctgctccaccctgccccacctggttcctgcttgctctttatctgggtttcagccattcccaggttgggtgtagattgagcctgggcccccttctctgtgtcatgggatgccccctttcatggaagaaaggaagagccctctttcttggtcctggtggattcacgagcacttcccacagtgcctatattcctgtcatggtggtgaggtggacctgacctgggcctctccctgctcctccctagattgggtcatagtcttgggccccctccatattctccccagacttgcctgggactcaacggacagagtccatcagtgcactggtcttgagccccagccctgcactggccccagcgaaggctccagcatccctcccttttcttatctagttcaataaccttgggaagtagtagtctttaggcttgagtcctccaagcta

SEQ ID NO: 312 - DNA, 636 bp, Canis familiaris
  misc_feature (1)..(636): n = a or c or g or t
atatatgtgtnnngcatccttgctgcagatttgctgctaagcacatgtttctttcttacctatctttggttttcttcagttgtgttcaaagtaccttctggaacctatagtgccctgtgttttcaggagtttagaatgttaagatctaaatcaagtaaagcaacttacacctttttaaagttgcatttgagaccatttccctcaaggagcctgttttccagcaaattcagcaggagagacgtgtgcaatgtttcacttggttttctatttgacatctttatttgaaatgctaagatgcaatattgttcactttgaagggggaaaatgcagaattgtgtttcccttttatctgtgtgattccttaagaaacgtgtttttaaagtatgtattctaaatggtttttattctgtattactgctttggccatgcggctctcatgactttcagtgtaccagatcctcagctccctgaaatatggggctgggaagctctggaattacggcaagatttttgttccatgagcgcaatactacatcattaacatttttaatggtatggattttataccatctgtgtatgtttgcaaatattaagttattacatgttttcaaatgagcatttttcatcctaaatttt

SEQ ID NO: 313 - DNA, 600 bp, Canis familiaris
  misc_feature (1)..(600): n = a or c or g or t
cggnctcgnnnnngctgnnanctgtgtcgnnnagcagtcgcgtggtgacccatgacatccccgtcaaggttattcctagaaagctgtnnaaggatttgcaagaacctaccatcccagactccgatgttagtatttacttaccagccttgaagacgatgaagagcatcgtngaaaaaatgaagaacatcagcaatcaccttatcatggaagcaaacctcagcggagagttgaacttgaaaatagaaacagaactagtgtgtgtcacaactcacttcaaagaccttgggaaccctccgcccgcctctgaagacgcgtctcaggagagaccccccgagcagatggctgaagtgcacatagacatccggaagctcctgcagttcctcgctggacagcaagtgaaccctacgagggctgtgtgcaacctcgtcagtaacaagattatccactttgatttgctccacgaggacgtttccctgcagtacttcatcccagccctatcatagaccggtccctgcccaggagctcggggctgcgccgtgctggccgtgggccatgtgtagagccatgcaagtctgtgcattnnnnnncttcagaaatttt

SEQ ID NO: 314 - DNA, 573 bp, Canis familiaris
  misc_feature (1)..(573): n = a or c or g or t
tgactgtnnaannaccaccccccaaagatactggcattgctcgagtaccacttgctgnagctgcaggaggtcctggggttgggagggcagctggcagaggagttccagctggtgttccaattccccaggctcctgctggattagcaggccctgtccgaggggttgggggaccatcccaacaggtaatgactccacagggaagaggaactgtagcagcggctgcagttgctgctactgccagcattgctggggccccaactcaatacccaccaggacgggggaccccacccactcctgtagggcgagcaacaccacctccaggcattatggctcctccacctggtatgagaccacctatgggcccaccaattgggcttccgcctgctcgagggacgcctataggcatgccccctccaggaatgagaccccctccaccaggaattagaggtccacctcccccaggaatgcgtccaccaagaccctaggatactgttgatccttcttaagtccattttttccctgctatgtgtcttgtgaaactgtgtgattgtttgtgagcttttgttccctcct

SEQ ID NO: 315 - DNA, 655 bp, Canis familiaris
  misc_feature (1)..(655): n = a or c or g or t
gaaaatgactgtgactcccccacccactcaccgccanngtcaccgaggcncttcaggnngcngcgcccaccgcccggtagcctgggcccctgacactgacgacgaggagangcccccacatcagcactctgcagtctgctcccacaactgggatcaccccacagactgggaaggcttccagtccacaaagggcttctggggcccctggccccaggatgctgtggagcccgctccccagaccattcgcttccagcagaccatagaaggcaggcccctgaaaggcgagatgcagtcagagatgggcctagaggcctatgtgtaccctgtgaatcccccgcccccaagccctcagacgctgagccacaagaacagcggagcggggcccagggcccaagccgagcaggagcaatgcgcccctgcccctcctgccccaccgcctgcccggggcccagcaatcgtccctgacatcccccggtgccgctcctcgggccgtgtagtgtacgatgcccgtgatgtgaggcggcggctccaggagctgacccgagaggtggaggccctgtctcactgttaccccctgggctccagatccagcaatgctgaggagacaggcaaggactgggtgtaccgttccctnnnagagaggtgactgggacga

SEQ ID NO: 316 - DNA, 603 bp, Canis familiaris
  misc_feature (1)..(603): n = a or c or g or t
cccactgctgcntggtgttccaaccagttctnnggncagaatacacattttnnaacctctgtgaggccatcctgcagtaccagatgaaccatagcatgctccagaaggcccgagacatgtatgcagaggagcggaagaggcagcagctggagagggaccaggctgcagtgacagagcagctgctgcgagaggggctccaggccagtggggacgcccagctccgacggacacgcttgcacaaactctcagccagacgggaagagcgggtccaaggcttcctgcaggccctggaactcaagcgggctgactggctggcacgtctgggcactgcatcagcctgagggaggctggcctcctgccactttgccctgcctctgcctccaggcctccactcccctttcttttcttggtgaaaggcacctccctcctagtgatgaattgtgtttcctttgcttggccagggagccccagaggccagatctgctggccatacagacaccttttggactgactgggacagtggaccctggggagggttgaggtgagagtctcccacaagtacactaaacctggctctggccannggtaggttcagacagcaga

SEQ ID NO: 317 - DNA, 720 bp, Canis familiaris
  misc_feature (1)..(720): n = a or c or g or t
ccgagcaggtgtctcatcacccacccatctcctgcttctactgtgagtgcaangagaagagactgtgcgtcaacactcacgtatggaccaaaagcaagttcatgggcatgtccgtgggggtctccatgataggggaaggtgtgctgaggctnnnnnaacatggnnaggagtacgtgttcaccctgcccagtgcctacgcgcggtccatcctcaccatcccatgggtggagctgggaggaaaagtcagcatcagctgtgccaagactgggtactcggccacagtgatattccacacgaagcctttttacggagggaaagtccacagggtcacagcagnnnnngaaacacaacccaaccaacaccattgtttgcaaagcccacggggagtggaacggtactttagagttcacatacaacagcggagagaccagggtcatcgacacaaccacgctgccagtgtaccccaagaagatcagacctctggagaagcaggggcccatggagtccaggaacctctggcaggaagtgaccagatacctgcggctgggggacattgatgctgccaccgagcagaagcggcgcctggaggagaagcagcgggtggaggaacgaaaacgggagaacctgcacacgccatggcagcccaagtattttatccaggagggtgatggctgggtatacttcaatcctctttggaaggcacactgatggggtggaggt

SEQ ID NO: 318 - DNA, 575 bp, Canis familiaris
  misc_feature (1)..(575): n = a or c or g or t
tntgccaacgaccannngcaaaactccacggccnaggtatngagtattacgaatgccagacanntagcaaagggctcttcagggtttccactttctccaacagatatcttgtaacccacagatatttatttttatttttttatttttttttcccacagatatttatttaatgcctactcagcacctttatcctcccaccccacaaatgctaatatttttagtggagcttttattttnnnagcatgtattatttatgggtgaatgaagaatcaagagagctagtttcatgtctagttctgttgctatttaaatagattatttaatttctgaaacctttgtttccttataaggaacacctgttcattttccttgttgggaggaacaggtgagacgtggctacagaagtactttgtaaatatacttgtccttttttataaaataaaaagatgnnnacacatatttctgccacctaaggtttatgcattgggtatttttctgcaaagttatgttgcaaatctttttgtgaaacaaatgatattttaaattcaatgcatcctgttttaaataattctgta

SEQ ID NO: 319 - DNA, 686 bp, Canis familiaris
  misc_feature (1)..(686): n = a or c or g or t
agnacgagtggcnngtgagatnnncagtgctgatgaactcctnnnnnctgagatgatgtttaatggnnttttcaatgacctatctgcagaacaggcaacggcactcctgagctgctttgtgtttcaagagaattctagtgagatgcccaaattaacagagcagttagcaggaccacttcgtcaaatgcaggaatgtgctaaaagaattgcaaaagtttcggcagaagccaaactggagattgatgaggaaacttacctaaactcattcaaacctcacttaatggatgtagtatatacctgggcaacaggcgctacatttgcccatatctgcaaaatgacagatgtcttcgaaggcagcataattcgttgtatgaggcgcctagaagaactgcttcgacagatgtgtcaagcagcaaaagccattggaaacactgagctggaaaacaaatttgcagaaggaatcaccaaaatcaagagagatattgtgtttgctgccagcctctacttataaaaagtcagataaacgattgtgggattttaaattttataccacctgatcacagttgactagaaatgcttttacagaagtgttgatttggttctcccatctcaaggcagttgtactcaaccatttcagtatgtattatannnnaatcaggcatcatactaagaaagcgcattattac

SEQ ID NO: 320 - DNA, 609 bp, Canis familiaris
  misc_feature (1)..(609): n = a or c or g or t
cactatcacagtgccagaggtgtcccgccgcgtagaggaactggctcganntaagaggnnctactctgagtattacnncaacagcaggagcacccccatnnggcccattcctcgctcctccctggaataccaagcttctagtcgcctgagggacctggccatcccgagggtnnggaacaacatttggagcataaacatgtctgaggtgtcccaggtatccagggcagcccagttggccatccccagcccaaggatcctacggctggcaaagcccagggccccagcccccctgttggaagagtgggaccccatgccgaaacccaagccgcacgtgtcagactacaaccgcctccttcacttggccatgcccaaggcccagtcggaccagtgtgttcctgaccgagatccgcgctgggaggtgctggacgttaccaagaaggcagtggccagtccccggatcatctctctggccaagcccaaggtgcgcaaggacctcaacgagggctacgacccctatcgcatttccccagcgtccctggtggctcaggcctcccctcgcctgtatgagctcgccgtccccaagagcatcaccaaaagagtgtgagcgac

SEQ ID NO: 321 - DNA, 609 bp, Canis familiaris
  misc_feature (1)..(609): n = a or c or g or t
agtctatcgtgactacctcatgtaccttggactgtgttctgtgaaccgccggagnctggactttattttgtccaagccccagcccgggcaggcggtagccatcgtagttgggggtgcccacgagtccctgtttgcgatcccagggatgcactgcctcgttctccggaaccgcaaaggcttcgtgcgcctggcactgaggcacggagcttccctggtacctgtgtactcctttggggagaatgatatcttcaattttaaggcttttcccacaaactcctggcagtatctgtgccagatcaccatcaagaagatcatgaaattttctccttgcatcttctggggccgcggactcttctcagctgactcctggggtttactgcccnnnnnnaagcctatcaccactgtggtgggccgccccatccctgtgccacagcgcctcaaccccactgaggaggaagttgaccactatcacatgctctacatggaggctctagagcaactgtttgaggaacacaaggaaagctgtggtgtcccagcctctactcacctcatctttaaatagccctggctttnnnattcccccagcccnnnnnnnctgaggaggctgtc

SEQ ID NO: 322 - DNA, 563 bp, Canis familiaris
  misc_feature (1)..(563): n = a or c or g or t
gctcntcaagacgcattccnnngagacatctgccatgctcttcacagtggataatgaagctggcaggatcacgtgtttgtgtcaagtcccccagaatgcagccaaccggggcctgaaagccagtgagtgggtgcagcaggtgtcagggctgatggacggcaaaggtggtggcaaagatgtgtctgctcaggccacaggcaagaatgtgggctgcctgcaggaggcactgcagctggctacctcctttgcccagctccacctgggagatgtgaagaactgaagggtaggggcagcttctactgggaagcatccttcacttacccaatgcatccgtccagccagctctccacctgccatgaggacatttggatcttgggacctttaaacagccctgtctgtcctaacccagcagtaactggaactcacgcacctgggagctagcctgtgactcattgctcacgttacatttctgccctgagccctccctacataccagcaccatgtctaaaaccactaccccaggattgctatttatcatgacaatgctcgtgtctgtagataag

SEQ ID NO: 323 - DNA, 440 bp, Canis familiaris
  misc_feature (1)..(440): n = a or c or g or t
tccntgctttcattaaggtatttaaacctggggatttcaccactctcccccaccatggagnnagngaggnacccccccccaacctcagtgaggagagccccgagccggacccggggcaaagaggggtgcggacaggattccccagatcagtgccccccacgcgagtagtgtggtcaggagagggttattgagagccaagaggggtacctggtgccatggctggagacctgggcggggcaggcagaccaggggctgccctcctagttcttccctccccccaagccccctgggtcctggcactccagagaagtggagcctccagccctgtgggttgcatgagaggggaggggctgcagagtggaggggggaagagtcaggcccccagccagggacgtgacctaggggtggggggtgggcatggctgacactggaaaatgggt

SEQ ID NO: 324 - DNA, 594 bp, Canis familiaris
ggtgtgggcgcaccgctggatggacctgtcggagcacggcttcgggctggcgctgctcaacgactgcaacttgcgggcacctaaagcccccgacgcctccgcggacatgggccgccacgagttcacctacgcgctgatgccgcacaagggctccctccaggacgcgggcgtcatccgcgcggcctacagcctcaacttcccgctcctggcgctgcccgccccgggccccgcccccgccgccgcctggagcgccttctccctgtcgtcgcccgccgtggtgctggagacggtcaaacaggcggagagcagcccgcagggccgcacgctggtgctccggctgtacgaggcccacggcagccacgtggactgctggctgcgcacgtcgctgccggttcaggaggcggtcctctgcgacctcctggagcggcgcgaccctgccggccacctgccctttcgggacgcccgtctgaagctcaccttttctcccttccaagtgcagtccctgctgctggtgctggggcccgcccgcaccgagaccctgcccctggggttgtgagcgtggagggctttgggggttcctggctcctgcctccc

SEQ ID NO: 325 - DNA, 691 bp, Canis familiaris
  misc_feature (1)..(691): n = a or c or g or t
aaagaaanatcttccagaaactgagaggaaatatgtttctctctgatgaagatcctaaattaaaggagaacatcaaaacagttgaacagcttagtgaaaatttaaatgacacccatcagtgtgcacatactaacatgcaatctgagaaaaagaagaatgtcaagaatcaggacaagttgcaagatgtattcgaggatccagaactgagagttttgaggtccaagaaatgtgatctggaaggcaacaagtccaagaaatgcaagaacagctgcaggagtcagaactgaccttcagactccagatagcaattcatgagaagaatgctcaagacaactgggtcaaggctcagatttgggagtgggagatagcgcagcaaagcagggagaaagcctacttgaaacacagactagccatactagaaggaaagatgctgcctgagagacacaggaggcaggaactgattccgggaagacctgagatgcagatccctcaaaggagagaatctagaccagttcccgagaagaacagcagcaccatccctaaaaagaacccagagatggctaaggattgtttcagatttgaagacttcctggaacagtaacaacctggctgtgcagagagcatatttagaaaagatgtcagatctgcctaagggtcagagtgtttccccttccaatcctgtcccctgtgc

SEQ ID NO: 326 - DNA, 692 bp, Canis familiaris
  misc_feature (1)..(692): n = a or c or g or t
aattcatactcctctcaattcttatgggaaactgggtgcctaaangnggctgagccccagnnagtgaccttccacccccaactgttttaagtacccatgagattgtaccctgccccctcacagggagacactaagcagtaatgtggagtggccctgccccaccatgtcctgcagcttcatcggttcccatcttgaccaggaaccacataagcttcatcctaagaggcacaggctcagcaactctctactagcaccatctcagcccccaagaactctcaacagggaagagccataggccgccatttagacagtgggccaagggagcttccaaatgtgtgaatggcacatgccagtttctgaaaacagcataaccctagaattgtctcctttcctgaaggctgtattcctgcttctgctgggccaccccctgaaggctgtattcctgcttctgctgggccaccccctacccctgtcactgcttctctagtagaagtcacatttgtatctgtcagcctttggatgggccaccttgacagcagaagtgcactggaagtaggactacactgaactgatgtatgtgtacctattccagagctatcttctggctgataggatggcgattttgcaccccagccctatccattgacaccaccacacagaatcagggtctcacatttcaccccaggttcaac

SEQ ID NO: 327 - DNA, 539 bp, Canis familiaris
  misc_feature (1)..(539): n = a or c or g or t
cgggggacaacccccctgtcctgttcagcagtgacttccgcatctctggggcaccagagaagtatgagagtgagaggcgactgggatcggagaggaggctgctgggnnttcggggggaacccccagagctggacctgagctattctcactcggacctgggcaaacgagccaccaaggacagctacaccctgacggaggagctggccgagtatgctgaaatccgggtcaagtgagggggctgggggccgcctgtgtggccacccctccctcaggaccctcactggcccctactggctacgggctcccttgctccccagagtggtgggggccagggcaggaaagggaggaggcaggtgacagcgaggtcctgggggcctggcctcccctccttcccagccgcccccagccctgccagcacccaccccacactgtggctcctctctaacctcctttaacctcatctgtctggaggggagccctgtctgtctgtccatgttatttattgctacccctgcctngnctcctgccccccacacccg

SEQ ID NO: 328 - DNA, 577 bp, Canis familiaris
  misc_feature (1)..(577): n = a or c or g or t
tgcaggcccttcatgcacntgcccctgaaaccagagctgtggcttgtccagcccgcccagccccttcctggctttcatgacacctcgccctggggccacagaactcccaggaggtgggcaggacttatcctctaggctcctcatccacctgggggttcctcccggccctggtgaccctggccccaaacctcacccccatggctgctacttctacacgcacctgcacgtccccacctcgggccgggcagcaggctcagctcccctggactctgagctgggccttgtccccgatactgcccatagcaccccccagcgcactactcctcaagggtgtcctgtgggggctccaggctccaccgggtggggtgcatgctctactcccaccgccctcgcaaggagccaggatggactggacataccctcactcaagtatggccttagcccccaccccacccccaaggcagagcccgagggaggcattcccccaacaggtctaaggcccggctggccctatgtactgtgtgggtggtgggtgagtgttggagccccggcctnnncaggtgacaccgagatgaca

SEQ ID NO: 329 - DNA, 591 bp, Canis familiaris
  misc_feature (1)..(591): n = a or c or g or t
ggaaaagaattaacgaaagacacagagccctgtnngnnnntgtnnnnnaccaccggccctgccaccatgnctgcgccgctccagaacccacatctgatttgctttatggcttattctggcccctcgcgtaccacccggccaggcagacgtgtgagcagcggaggggccggtgaagaggaaggcccttgagggtgctgctggcctgaaggctcatctgtcaggcttctgctcgtcgggcgcacggctgggaggactgtcatgaaatgaatgacggctgtctgtttctttggggaggcccccctggcctcacgtgggagcggctggggttggggtgctgccttaggaggtacacctgcgtgcccagttccagtgcacactgggaagaatgcaaccagctgcctgcctcccgttgctggcttgcccacccccctctcacgcttcctgaaatcctgtcctgtcagctcaggagtgagactccctggggaggaaagccttttactgttcttggaagcccaggctgcgtaccttggggcagggggatatgcttgaaaacagtctcattcttcgcacacacccacccccccatcactg

SEQ ID NO: 330 - DNA, 570 bp, Canis familiaris
aactcccatcattccagcggtcactcctttgccagctggccacccagaccataggcgtgtgtgtttgccacctgggaccagagccagagtggtctggtgggagctgtggctcagtgcacatggctttggcccccggttgctgtttgttgcctgacagacatcctacacttgggcatctgtttctgagtaactgatttctctttgaggtgcatttttaatctattgaattggcaagaacacaagggacagaagctgccctttcttggactcttctggagtaagagggatgggcctgtgctttgccctcgtggagggtcacatgcctcattcttgggctgatagaagggctctggagcacgtgtgcagccacgctgagccaggggcctccacagagcaggctctgcagcctgagcaccatctcctgtgtctgctttagtgcctgtggctctcagtgtggtgcttggccaacggcccttatcacccacccacccacaggcacctggcaaggtcagaggctcactgctcagactcccttgggctgagagggggctgaaccaaacctcccagctt

SEQ ID NO: 331 - DNA, 705 bp, Canis familiaris
  misc_feature (1)..(705): n = a or c or g or t
agagaaaancagctcccagtctgaggaagattatatcgagagaaggaaagaagttgagagcatcttgaagaagaactcagactggatttgggattggtcaagtcggccggaaaacatncccnncaaggagctcctgttcaagcacccgaagcgcactgccacgctcagcatgcggaacacaagcgtgatgaagaaggggggcatcttctcggcggagttcctgaaggtcttcctcccgtccctgttgctgtctcacctgctggccatcgggttggggatctacattggaaggcgtctaacaacttccaccagcaccttctgatgaagagtcggaacctggcttttttcctatagcggggatttcagttggaggctgcggcagcaccaacggagagtggtctcggtccgtgggtagctgcgccacttgtttggtctgtttgttcttaaatgctgcgttgctaatttagtagaaagaaaagacaaaaaccacgctaacctgtaatcatacaatgggatcaattactaagcatgtcatactgattaacatctaataatttggtagtaaattttgtttggctattataaatatcgaagtataaataattttaacactagatacaacacatgtagtattttaacagaaattacgtgtcaccagttattcagttaaaatactttatatttgaaaagaatgaataatgttta

SEQ ID NO: 332 - DNA, 625 bp, Canis familiaris
  misc_feature (1)..(625): n = a or c or g or t
agcacatcntcactgaccannnagacgtnnngnacattgcgaagtgcaagctgtgcatcgagcnnagactctcagcgctgctgacnggcatctctgcctgacccgcggagtacctggctcactgcccaacggctggatctcctctgccaatcccacaggcttgaggggcggccggctggccaggcttgaagggacaagcctgtggccttggtgctgcttggtggtggtagggagagagagggtgggtcccccctgagctgcaggcctgagctatgctgcggtgggcttcagggcgctgggatctgaatccaggccagacctctggcctcactgatgggcagagctcctgcctggcaatcacaactatcctcggccagtttggaggcaagtgggcacaggtagccggtcccctatcccagccagaccccagggcagccctcatgcctgctgacgtgctgaggacacgcagaggccccgagaccgctctgcccaggaaaaggtgtggcctcctggtccccttccttccccaagaccacccacccagctttgtgaatcatggagcactttatgcaggcagacctgaagcaggactgcccgcgcagtcccgcctgttgtactacagggc

SEQ ID NO: 333 - DNA, 443 bp, Canis familiaris
  misc_feature (1)..(443): n = a or c or g or t
gtgaaatgcttgagatttttctannnngtattgnnaagaattatttcacatgttggggtnnnnnnntagtcttggagtaagcataatatttaaatagccagtatgtacacacctatatcgatgagcaaaatctcaataaactggacataggtattatctagaaaatccacttaaagtcaaatcataacaaatcacagatgcctattatgataccacataattttttaatgttaacatattttttggaagagataaatgtaacaattacttgaatatagtttcattgttcagttatgatacaagatacagacaaatcttataagcagggttttaatttcataacacagtgaaattgtaattccaaggtacaggtacattcacataaataaatcctnnngctactgaataatgactatatactgatgacagtaagaattaacaat

SEQ ID NO: 334 - DNA, 419 bp, Canis familiaris
  misc_feature (1)..(419): n = a or c or g or t
cacggctggtgctcatccctcgtgacctccagaaggaagaactggcccaacgacagaagtggcctgcggctgtctccatgggaactgtgctatgatgtgccacctgttgtcacttgtgactcagtttccttggcttnnncgagggtcccctgctgccttttccagcgtcctgggactgtcccatgccggccatagggcaggaccaggccccagcatgtctgccagaggggggggtgtcctggcgtgaggggacatggccagcgtccatcatcctggccagaggttgatcgtggggccctggggaagggagactggcaggagggccatgggagggggggacgcggaggtccctgagaggaggagggccgtgacctatgggctctagtgacggttagacattcnnnnntcagttgtcattc

SEQ ID NO: 335 - DNA, 90 bp, Canis familiaris
  misc_feature (1)..(90): n = a or c or g or t
tcacagaccntgnntccnnnnnntgggcacatctcctgngcccngnnnngctccccccacttcctgggccttgctggtctccccacagac

SEQ ID NO: 336 - DNA, 703 bp, Canis familiaris
  misc_feature (1)..(703): n = a or c or g or t
aaaggaacctannnnnctagagatgctgcttactccagtcgcttctgcaaagacgacataaaacatggaaacacattccaaattcatggcataagcttgcaacagcggcatctgtttagaacgtataaatctatgtttctcgctcgagtgctaattggagattacataaatggagactccaaatacatgcgacctccttccaaagacgggagctatgtgaatttatatgacagctgtgtggatgatacctgggacccaaagatctttgtggtgtttgatgccaaccagatctatcctgagtacttaatagacttttattgatttcacttccaaatctcagtggtcaagcaagttctgtgctttttttgcaggaagatttgttctcctgtcatctagccactaaaatgttcactatctgatacttttgaaacagatatgaaaaaaagtggtctccatataaaaagacatactgactttaaggttggttttttgttgttttgtttttgtccgttgctcgtagtcttgtttgttaaagattgatgccattgccgttttaccacagggttctcgagaaagcgctcaaaactgaatcagcggagtctcaattaacatgatcattcagagtctgtaaagtttatgtgtgtgttatatttattcatatatatatatatanntccaaaaaataaaaaaaacaaacagncnn

SEQ ID NO: 337 - DNA, 40 bp, Canis familiaris
ggctagagccagacagaggcaggagcaaaagggagaccac

SEQ ID NO: 338 - DNA, 619 bp, Canis familiaris
  misc_feature (1)..(619): n = a or c or g or t
cttttggatgctatttcactctaaaatagcagcttttgagaanncaatgagctaataacttccttatgataaaaggatgatgctgtattttctcttataatattagatatgctgaagtgaagcacacagtctttctagtgtgtgtgtgtgtgtgtgtgtgtgagagagagagagagagagagagagacaatgttgttaaaaatcttaaatttcttcagttgttgaaaaaagctgtggcgtatcaatgttcatatttgccaagtctttgtaaaacatggaggacaaactttatgtgctaatgcatgtatttataaggcagggtttctttaccactcaaaattactaatttttgttttctctctccaaaaagcatttctgtttcttcttcatacttcaggtttatgtatgtgtatatattagctttctaagttttttcctttcacaaagacaggttcaacattctgtaatgtaaaatggtttctgaaactgaggtattacaccagagcttgctgtttttcaagtatcatatcatgtacattgattctgtaaatgtgctcaacagttttgacatgtgaatcctgttttaaagtgctcagattttggatgtgtaagccattga

SEQ ID NO: 339 - DNA, 619 bp, Canis familiaris
  misc_feature (1)..(619): n = a or c or g or t
cctgcccctatcccacccgtnncactnnannaaangcagacactcaccaagctgcnnnnnncccgannagncaatatccaggagctgaacaccatcnnnaaggccctgtcccagctcaagggtggggggctggctcannnnncctaccctgcccaggtggtgagcctgattctgtcagacgtggtgggggaccctgtnnaggtgatcgccagcggccccactgtggccagcgtccataatgtgcaagattgcctgcacatcctcaatcactacggccttcgtgctgccctaccacgttctgtgaagacggtgctggctcgggctgactctgaccctcacgggccacacacctgtggtcatgtgctcaacgtgatcattggctccaacactctggcactggctgaggcccagagctggagaaacagagagagaaggtggcttgtctggggcacttcagcaactctgccaccaaaccaggagagcctggtcgggacctgtttgcccaccctctgtggctcagaggccctggggcccagagagggctcagccagagtcagggatccactcttgcctccctgcttgtccctcaagtgcttggagatggtgacgtgaccacgct

SEQ ID NO: 340 - DNA, 628 bp, Canis familiaris
  misc_feature (1)..(628): n = a or c or g or t
ccctgaaactctgaaatgatttgaaattttaagagcaaagcaaaaacaaaacagcaaaaccaaaaaccaaactnnnaagaattagatcttaattatgggcctgagttatttggtaccaaaaataagaataagctcattctttcctctttggaatggcctgtaagttcgcctggaataaaggtgttctaacagcacgtattctagtttatgacagatgcattcattctgagcatgtactgagcacccatgtgtctttctagtattgtgggtgcaaatggacaagacgtataagatgttagctggcgcagagcttgagtttgggtagagagaaggcagcaacagatgcatcaatgccacagggggacgtggtccattagggctggatgagaaagcttttttaaacaagaggatcaggaaagattgatctgggaaggtcatacatgagctgaaacttgaatgaaaggaactgatatttcaaaaaataataaatcattagaggagctatctaggaggccagggcagctcattacatctgtgagttagcacgtgctgggcattttacagcagagtatggaagaagggaaagtggggtgagatctaattggtgggtcatgggaaggagagnnnn

SEQ ID NO: 341 - DNA, 385 bp, Canis familiaris
  misc_feature (1)..(385): n = a or c or g or t
tccaccctggctgcccagccccattggcgaggaggannagagtctagcctgaggccctcaggcccaggacccccaaggacagggacactaactcggacagggcacgcaggcagcagtacgggtctgcataagccgcgtgtggactccaccggttcccacttcctgcgcaccagccttcacgtctggcactggggcttggagcgccccccgtgggacgggcacagggctaagggtggggggagtctttcagtttctttaacagcccgtcctccccaccagctccacttccctccctcagctgccttgattctttccttaaaatggagatgcgagtgcctacctcagtgagttgtggggatgaagtgacggtcttgaaagtgttgat

SEQ ID NO: 342 - DNA, 477 bp, Canis familiaris
  misc_feature (1)..(477): n = a or c or g or t
tatagtgctttattttctctgtacttcagccagattcaggncttcagggttttaccagcattgttggtggttttgcacaccctcttaataattggatttatggatagtcttgtgggttttcaaaaatgaaacatgctaaggaacattttgctttttgatcctctgtttgcagcagaattatatatatgtatatgaaaatcattttggttatctacatttttgtatttggaaattgttttaaacaataaaaaaggaaaagaaacatatgaagctgtaatttattctgcatttgttaatatcgttgctagtcggtataccagtttggtatatattgcctctatacgtctacatttgtatttgcaacaatgagctttatatctacataaactgtaaataatcctttctgtgaaaggatcatcatatcaggatgataccaaaagtgtgtaaaagaaaactgttattttgtaatgatttctt

SEQ ID NO: 343 - DNA, 533 bp, Canis familiaris
  misc_feature (1)..(533): n = a or c or g or t
tnntaaaatatatatatatacattntcaagagtccatgtgtttnnatacacatatgatatacttccagcanntntgatcatttaaaatcatctcttcaaaatctatctgaagttctaatagttctcttttcaatccttagaagttaaaaataggtgtaagatagccatcgtatcaatngaagcctttcttatcctttgctgtaaaattacagatttatagtctatgtaaaagagtaattttgttcaattttgttctgtgnngttcttcttccctgattaattctaaatccctgatagactgagttggaccatttctttgtgcagcctggaaattgtttcccaagggaaaaaaaaaaatctgtgtttatgaaactcaggtaaagattaaatgaggttgagataaccatgaatacaaagaaaaattgtgttgttaccttatgtgagcctggtaaaaaggctagtattgtgtgttggtactgtctgacatctttccttctttgnncttgatcatgccacgttatcttcagatttct

SEQ ID NO: 344 - DNA, 528 bp, Canis familiaris
  misc_feature (1)..(528): n = a or c or g or t
tcagatctccatgaggtgctganngngtgctattaatgtgaaaatgaagcacttgagcccccccaccacactcctgccccagctaatctcagaattcttaccacctcaccctctcattaantggtagctgcatcttagaatctttaccttcattgagaaattaattagcaactggcttgaagattgatgaactaattgaaattttatatgtacgaggaagggataatgaatatggagatatgtctttttaaacattatttattgaagcttccaactcttgctgcttttatatagaaatattaactgtattgtttaatcatgatttataaaaaggaacaaatgaaccaagattggcagtcttgccgatctcttagaaataccatttttggagaaaagtccacaggaagtgcttataagggtagttattcatatttctattaacattataaagaattacaattgtgcgtgtttactgactggcagtttttatttcagtattagcacagtgtctcgccagtgttggaatca

SEQ ID NO: 345 - DNA, 497 bp, Canis familiaris
  misc_feature (1)..(497): n = a or c or g or t
tctcanctaattttgctngtcttcatttgttccatttagtgccaaatttattccattttaaaagcaagccagtgagtcaagtatacatattctctcactgagcttcataaacacattttgggcttaaaatgtacccaagtcctcatgaaatatattcaatccaattaaatatattccatcttttaaacacaaaatgccaagcctagcaccttcattaatttatagtactgttttatccagtggttaaaaaatgattatgcctcttcagtcctcactgttaaataaaataaaatcatagtaagaatgattagcaaaagacaaagctatttatagcaaatttctaggttactagaatagcactgatagttatacaatatcaatgttgactttgaacttcttatggattaaaaatatacatgatttcttttccttagcagaacacatcagagagatttgaccgttatcccataaaagttttgtaatgnnnnnagttaaat

SEQ ID NO: 346 - DNA, 503 bp, Canis familiaris
  misc_feature (1)..(503): n = a or c or g or t
gtaagatnctaggctatttaagctagtacnnncagttacgataatatatagtaatttcnnggtatacattttgtgcttctgagctaaagatgtcagtacttgtaacattattacaaagaaaagaatagcaaattggagacttggttacttttctctgccctacctgctgtgggacacagtggccaactgtggcctgaaattattagtcagattaatatttggtcggaagtagatccttgtactgatgttaaaattggaattggattcagtctggcaccactgtgtttcaggttctatgcagtgtgcccacaaaatacagtgcctcagcaggattttcataggctcaaggaatcagttgaacatccatctttatcatgtttatcaacgcaaattgttagaaaagatgttagtgaaaaagcgctaccttttgtagtgaaaaagcagtatcttttgtaacttgccatgtctttatcactcctgtaagatttgatgaaagtaaaaag

SEQ ID NO: 347 - DNA, 297 bp, Canis familiaris
  misc_feature (1)..(297): n = a or c or g or t
ggagtgtgatttttattttggcnnnnnanagtttgaggcaacccattaattgcatgcttcagctctcaaacagagatttggcccaggaaaggaaacacttctggctttatgaaactgcttattttcaaattttaagtggggacggaatgaatacgctacgttacatacttttatttatgttatccttttgctcagcagcttactttttgtctcctgaaagtgaaagagcactgaaagcattgtcaaatatacttgnnnnnnntgcaaaacgatttcaccagagtaaagatatcttgg

SEQ ID NO: 348 - DNA, 251 bp, Canis familiaris
  misc_feature (1)..(251): n = a or c or g or t
aaatgnatgttgttctacaagatgggtattaattagcttttcttccttggtatggtggttttattnnncactttggtgagtgttttattcaacatttggtgagtcgtatgtacttatgttaatatctagacaaaaatttttaaattgttctgagtgcntagaatcttgggattaccattgtaaaagtacatttcctaatttcaccattttgaaactttcagtgnngcatcctgctcacagggatttttaag

SEQ ID NO: 349 - DNA, 516 bp, Canis familiaris
  misc_feature (1)..(516): n = a or c or g or t
gtattccttttctctcttttcccctcttcannnaaaccaaactnnnnaaagaacccaacatgccagcatttgtgccttcggcgaaccagagcaagaaagagagctgcttgaactcgtatagcaagaaagctgcaggcgcagttcttccctcccagggggtctgtatgcttgttatcttcaagctcttctcaggggagaaaatgtcatggtctcatatctctgtcccagggcagaccccaagaccctaaatctaatagaaaatgtgtcttttctactctacacctagccagggctgggggcaagttaccttttctcagggtctggggagggactggaggcccctctctgcatgatcttgacaaagcacttcgctaactgtgcacttatccccactttgatatgggggaatataatatttttaaacaatttcaaaaaagtatctttcatacctattttgtatgcattgtgaaaattccaaaaagagctgagacatgcctatatttgttatttgtcttc

SEQ ID NO: 350 - DNA, 296 bp, Canis familiaris
  misc_feature (1)..(296): n = a or c or g or t
tgccaatgcccanntgaaggacttggatggtgaaatctttgnnnatgatgacttttatnnncagcntcttcgannnctcatanaacggaagaccagctccttggatcccaatgatcaggtggccatgggaaggcagtggcttgcgatccagaagtnnngaagcaaaatccacaagaaagtagataggaaagccagcaaaggaaggaaacttcggtttcatgtcnntagcaagctactgannttcatggcacctannnnnnntactacaatgaatgatgatgccagagaagannaag

SEQ ID NO: 351 - DNA, 506 bp, Canis familiaris
  misc_feature (1)..(506): n = a or c or g or t
tacttccaacgtaagatacttgaatatgaggaacagaagaaacagaagaaatcaagggaaaagactgtgaaataagaactgtggtcaacaggagggactngactcacaggccagttttggactttggcccctgccagcatggtgggactggcaaagctcacagcctccagaatccacggcctcctctgagacctggtaaccaggtctcgcttcaggctgctgtcttgagttcggggtccctggaatccactttctccagactctggaaggctctgacatctgtgctcacagagctgggctccgagctgcatgttccgcacaggtgacacagagtggcagagtggcacaggtgctatggagcctcagaagttgctgggactgccctcttccaggaaccacaatcacaaaatcctcaaaagggaaagcagttgtggcccaaggctcagtctcttcacataaaaaagcaagtctgtggacgtgtgaagataagaataaannnnnnaatn

SEQ ID NO: 352 - DNA, 643 bp, Canis familiaris
  misc_feature (1)..(643): n = a or c or g or t
aattcatgatgtttgcccttttaataaaatacaagggtagagnncattttgnntgcnngttgcctttattataaatttgagtnnnncntggttatataatatcttgcatggtnncctagctagatttttagcatttgccatatttattaaaattaattttttgtaaaacattcatagcttaagcagcaccattttttaaaaatgtaattgaaaaatcaagtgtaaatgcagaagcaaacattgtctgccctattaaactcggtgcccgttaacagtgtttacactgttcattgtgcctgttaagatagttttagtttattggagcttttgttaagaccagatttgtttttgagttatgttattatgagtgttggaattcatttaagcttaatgtagtcctagtgctcttgaaatggtgcccttttcatttttatatgatttttccaaagcatatcttcaaatactaaagtatcctcttccagaagaggaattttatagtctgatggtaaatgtcctcgttttacctttttaattgatatgtcaagtttcctaattatactatgggaaccaagaaacgtcagacatcattgtgtgtgtacagacctttctctacatgggtgagtgaatgcagtgnngaacagag

SEQ ID NO: 353 - DNA, 414 bp, Canis familiaris
  misc_feature (1)..(414): n = a or c or g or t
atgaaaatcctaactannagtcaccaaacatgcatcggcgtatcataagatccatcacagnngcaaaatacaaagagaaacaacaagtgaaagatgcacagaaaatgaaaaagaaagaaccaaagactattcttccacacgatcccactgctgatgtttttgttataccagctgatgaaaagccgatagaaatacagtgggtaaaaccagagccaaaagtggatttgaaggcaagaaagaaaaggatttacaaaaggcaaagaaaaatgaaacagaagatgaacagtggcagtgcaaaatgaatcagtggataactaacttttcagtaattttatatttattttgtattcagtgtgtaaatacggttttattatccaggactaccttacatctcattagtgtgnnnnnnaagac

SEQ ID NO: 354 - DNA, 495 bp, Canis familiaris
  misc_feature (1)..(495): n = a or c or g or t
atnnacatctgtttcaaatgctttagtggtgaaaagtgaaatatgtaaaaaaaaaaaaaatagataagtgaaatatgtaatatgcagtgtcagcaaaatgtaagggttgtgtatatgtttgttgatagataacagtcctcaccaaaccacttgcacaaatattttctcattttgttcttgtaactttcaggggctctaatcctcattagatatgggaagaaattgaagatctgatctgtcacttgcttaagaccaaaagtcccaacacagcttgtgtagagcaatagatctgctggctgaagtctaggcatatttatatgtatcatgctaacaatcctgtttccatcttgggtgccatatataggacctaagctatgctgagaattccactatttaaatttagctgactactgagatgatgagttgtgctctagaggttctccaaattcatggctcattaaaatcgcnnngggagggcagctcgggtggcttggc

SEQ ID NO: 355 - DNA, 450 bp, Canis familiaris
  misc_feature (1)..(450): n = a or c or g or t
agaaagaagtgagcacttcttcaaagaccaaagagacaccttctatagaaaagacagctccgcgttnnttagatgctcatgttcctgagacaccttctacatcaactttgaaacaggttaccagagtggattgtcctgtttgtggggttaatattccagaaaatcacattaataagcacttagatagctgtttaacgcgtgacgagaagaaggaaagcctcagaagttctattcacaaaaggaagcctctgcccaaaaccgtatataacttgctctcggatcgtgatttaaagaaaaagctaaaagagcatggattatctattcaaggaaataaacaacagctcattaaaaggcatcaagaatttgtacacatnnnaatgcccagtgtgatgctttgcaccctaagtcagctgctgaaatagttcaagaaattgaaaatatggagaagac

SEQ ID NO: 356 - DNA, 368 bp, Canis familiaris
  misc_feature (1)..(368): n = a or c or g or t
ttggcgctggtggtnnncggggcgctgcannngnnncgnctggccaaggactcnnngnccttctttagnnccaagtnnnannnctcggncnannnntgacggnnngggccntgtnnncatnnnnanncgtggaccctgaccccaggaccaccccccagggcagtgtccccannnactccatcctgtccccccgtccctgcccggaaccctgactccagnacagggnnnnntgccccaccccctcccaccccannnnnngcgcctannnntgacccnnaagannnattgtgtggatcccggtggcctcactccaactgtgatgccccctcccccaacactgtgnnnagggtgcancctccctcctcgcc

SEQ ID NO: 357 - DNA, 700 bp, Canis familiaris
  misc_feature (1)..(700): n = a or c or g or t
tgattcactgaagaaaattatgtctnnaaacatgactttggtnnatgagctaagtnnaatgcnnctggctatccangcagctatcagccaggcctttaaaactccagaggtcatcaggttatttgcaaagaaacaaccaggtcagcttcggacaaggttagcagagatggatagagatctcatggtaggaaagctggaaagaggcctgtatactcagcagaaagtnnagatactaacagctctcaggaaacttggagagaagctgactgcagatgatgaggccttcttgtcagcaaatgcaggtgctatactcagtcaatttgagaaagtctctacagaccttggctctggagacaaagttcttgcattggcaagttttgaggttgaaaaaacaaaaaaatgacatggtgtggagcttgggacattgatcacattcttgctataaatggcgtttgtcttctagggattttgaatcacttcaaagaaatcaaaagagattcttgaaatgcactgataacctaagaaaaggtgacagaaaaacatacttgtgtcttctggttatacccttcatcattgtgctttgtgtagggctgcctgcctgagtcatcctagacttcctgggatgagggaccctttggaccctattcattatagcggtgtgtttgagagagagaacagtaaacggttcctctgcctgttt

SEQ ID NO: 358 - DNA, 540 bp, Canis familiaris
  misc_feature (1)..(540): n = a or c or g or t
gaagtgggcaggacgtagagagnnaagcnnnggggcccctgcaggctaagcagcagctcgcggctcgctctggacccggcaagcaccccaaccaccaaacgggcaaggaggatactgcccccggcaccagatccagacaggacggagccttcctccaaatgtagtagcaagactcctccccatgtgacttctcgatccggttctgcccaaacagcatctacacagtctgacttctaaagcagacgaaggaaaacccattccctcccatgaaaaccagagctacacgccgccaggttccggtagcttcccagcgtggagacactgggcggtgctgttcgaggtcggtccggaccgaggacaccgaacaaaacgagagagggaggaggcaggcgccgctcccgtccgcggcaccgcccgaccctacagcaggctcgcgaccacagaacctcggtgacttcagaatcccagttaccctccacggtgacaaatatgttgagcaacaactctnnnnnnntcgaaagacagcagctcnnngcgnnn

SEQ ID NO: 359 - DNA, 332 bp, Canis familiaris
  misc_feature (1)..(332): n = a or c or g or t
acctttgtcctcctttnnnacaacggaaannnagcttgtgannncatgtcnnnagttaannnnnggtttttagtacatnnntggctttgctgaacctatctagtgcctgtttcgtgctttttttttttttttttctgccatnnnnnnnnnnttttcnnnnnnnctttnnnccttcnnnnnnnntgtttctttccagtncatgagtgtctccnnngnnncannnnnncnnnccatgggcgttctctggatggaggtgctgctccatttttctcctttgctttctctctttactttctctcttnnntttagagcnntggccagacccaggtgtt

SEQ ID NO: 360 - DNA, 538 bp, Canis familiaris
  misc_feature (1)..(538): n = a or c or g or t
gcaattatatagataactgagaattagattgttcttttcttccagttttacagatagtgcnnnnnattccagcacagaaccatcttacaagaccgaaataagccatttacaagtaactcctcagtattgtcactatacaagttaaactgggttcattcctatgcccacagtatatttatagtacatctacatgaatccattgactgtgtttgtttcttttaggacttataggtaaggccctgtattttatgtattgtgtctttattcaattttttaagttataaagataacatttgcttaggacttagaggttgggttagttcagaagtgtagaaagccagtgctcccttcacttccccaggacatcctccactgccattccccaagtctctgctgtatatttctagaaatttttttagacacatacatccatgcagccacagattttttaaagacaagggtaaggcagctgagtcaactacttcttttagataagactccacccccaccccaaaccattctgaatgtagtgtttcct

SEQ ID NO: 361 - DNA, 577 bp, Canis familiaris
  misc_feature (1)..(577): n = a or c or g or t
agtgatcctctgaatcgtaccacgatttctcaccccggtggtatcactcatctgaaagaaccccgagannnnnntgcatctctgcctcttccagaaaccttggccagnnaangaaggcggagattgggcccccaaagcctgtaggggtgggatgtgatactcgctgtagccactacggggcgcgcgcaggtcgcggatttccccggtagctccttcccgagtcccccccctacccgggcaccgctagttaaccagatacccagttactgcgcgcgggtcccccgccttgccacctactgccgtgcgaggtcgggggcaggcctctggcctcctggacctctgcagcgcgcggagcccctcttcgtactcacccacgccacccggcttgggacccggacgctggagtctctctttctctccggatcttggacagttctgtctctatttactagccatgtgaatttggccaaatcacttcacctccctgagcctcagtttcctcatctgtcaaatgggggtttataaacacctacctcgcagggttgttgtgaggattttatgcgataatgtatgtaaa

SEQ ID NO: 362 - DNA, 438 bp, Canis familiaris
  misc_feature (1)..(438): n = a or c or g or t
ttcagagaccacacacctttgctttccctcatgtggnnagcgtcacgagnnagccanntgactgccaccttgannngccacgttctcggctcctggattccagccacactttgggggtgtggaatgtgccataccagcccttctcaggcagatcaggaatgtatngacttgtaggaactcagctccccaaaggttcagccccgaccacagctggcattctggccattcggtgcggtgggaccagaggtgactggacacagatccaggaagcttgtctactttggatgtccctgtagtcggtcatctcacgtggcagggcagagtacatttataccttctgacccattgttatttcgtttagtgttctttgttaaaaaatattatattacaatttaaaaggttggttaagtttttggcaggagggaacagcgacagagt

SEQ ID NO: 363 - DNA, 644 bp, Canis familiaris
  misc_feature (1)..(644): n = a or c or g or t
cntnntcctcctcctcctccttttttcattcagagtttctgtacacttttgcagaggccaagnncgtgaggnnggaagaaaaccactngnctacttcattgactgagctctccccagatactgtcntctggagttctagaaatgattgtgaaaggcatgttgaatcagaatactgggaaatcatggaatgttgcagtttagaattaaacactgaacttgggctgtcccatcacattccagggcatctgcacattttcatggtcttctgttgggttgttttataactccttcccatcaagaaaaaatgttgggacaaaaagaaaggaagtgaagaggcctactgagccatgtatatcctgccatcatagactatgtgaatgaaaaaccaaaatcagatgacttaagaaaactcacatcttaaaaaaaatgttggataaatatcatggcaggggtttgttcctgaaatcatcctaagttaaacttccatcagaatcccagattccccttccgggtcaaggcagaattgattttttttttcaagagactgaacattggggtttcaacaaaagactaacaactctgttctttaaagacaacattttggtaacagtagtttcaaggctggatttccttatctggaaaac

SEQ ID NO: 364 - DNA, 544 bp, Canis familiaris
  misc_feature (1)..(544): n = a or c or g or t
aaaaaatgtgataatggtttggcntttgtattattgnnaaacaatctgntgttgtatggattcagtgcttnnactttataggtagattgaaataggattattaggtgagaattnnnnnnaagcctgtggatcatgctactcccgttcctttnacagtgccgtcaactcacttggnnnanttgcattgatctaaccaaannnncttatattgagtaannnnntatctttgattatgctaattttnnnnnnntaattgttaccactaattctctgttactgttctttttttttttttttttagtagaatcttttacttagaaacgttcatggggccattctttgttttaattttgcagacagaatggtttgcaatnnnacannnttattnnnnnnntgttttaagattttnnacttgggcnnnntgtattnnnnnnncatgttgaatannnntnctaatannnnnnnnatnnnnnggagnnnnnnangctgcataaaatggagttttcnnntgtcnnnnnnnnnncttggtattttcnntacctac

SEQ ID NO: 365 - DNA, 664 bp, Canis familiaris
  misc_feature (1)..(664): n = a or c or g or t
ccttcannaaaaaggccacgtgtgcgaacgctgagctggagaaaggaagacactatttaattatgggtaaagaagccctccagataaaacacaatttcagtttcaagtacatctaccccttggactcctcgacctggattgagtactggcctacggcggacgccgcgtgcccagcctgcccggcgttcttggccaatttagatgagtttgccgaagacatctttctaaacggctgtgaaaactcctgaactagttgagctacgcacagttttcaccctgggctcttgctgctgaagggtcttcctttccttccttcctttcttctctttttcctaaaaaccattcacggctggtcttagtgggaaagctcgctttccttagaattaatggcacttgctttaactgggggatgattttaagagctgtaactttcggaaataacatggccttggggggcatggagacagagcctccttccaaggttatcggacaccagatgcaataaaaatcggaacggcttctagacccgccgctcaggaatgcttgctggggacgcaagagtagccccactgaagtgtggtatcttaccatcacatggcctttgcttgaaagaaaacaccaaggaacacagaatggatcattaaaacctgactnnntttcnnnn

SEQ ID NO: 366 - DNA, 533 bp, Canis familiaris
  misc_feature (1)..(533): n = a or c or g or t
caatgtnngctcctttaaaatgaagatcctatgtggttcacagctgcattcccagacccagcatagtatcagggccaacacagagcaggctctcaaataatctgctgggcaaatttaccagatgtgtaaacttcgcaagcaaggcactttgtctttaagcttctttcctcaccaataaaatgaggctaaatacctaccttgcaatgttactataaggattaaagttgataaatacaagaccataagaataatgcctcgcacaccatagctgtcacttaataaacaatagccattatagcaactgtattctttgattactgtcaattcaactaaaagttggctctcccaagtcttccatattaagatagatttttaaatatatgaaaaatagcattatcacaaaaccagtttaggatatgtttttatttcaaaaagggctaaataaattatattttagcttttatttatccagttggatagaaaaacatattgggactgaacagcaacaacaaaaaattgtgggacgcctgggt

SEQ ID NO: 367 - DNA, 517 bp, Canis familiaris
gactctgcattccctgaatctggtcaggaggaagatttccagttgttcagcagcatccctccaggcatagctcaggtcagtcatcaagaacatgatacttgtcaagacctgcctcacgcctgccaacatgaaggtatcatccagtttccgcagattcccccaagacttcaggaatatgaactttctgagatgataagccagacaactggcagccaaaggacgatcactatagagactgcctcagtctcattgggtcagcaggaggaggaggacactccttccagcacacaggccctctcctgtgtgaattttagaagtgtcttccgctggctaaggcagcaagtcctctcttcacttctcaggagacaacaccctgaggagtccactgagagcccccatcagctggcacaaaagaaaagactctctcacagaggcaagagaatccaacctcaagagtccctcgacttaggacaaactctatcaccagattttttaactttttgatagcccccattct

SEQ ID NO: 368 - DNA, 291 bp, Canis familiaris
  misc_feature (1)..(291): n = a or c or g or t
atgataattcctnnagtctttcagactgtctttnnaatatttaatggtctacagcactatgcaatatttgaaagtacacttcagaaaactgtacatgaagattaatcaaagagtgaatggatactaaatcagcagagtggagttttttatgatgaggactcaggcattgctgaaggagttaaaagtaactctggacagtttgtttctgttccttttgcctggtatacagcaggtactcaataaatattcagtacttcagtatttaaatgtaagcttcagggtagccctggt

SEQ ID NO: 369 - DNA, 561 bp, Canis familiaris
  misc_feature (1)..(561): n = a or c or g or t
tcgccngtgaccagggctacagccaagtggtnntccacaccaccatgctgcagcgctcggccgtggccctctaccagcgcatgggcttccagaagacgggccagttcttcccctccctgaactggaggctatttgctattccttcgtgtgtgtttgtctaccccttgccctctgctcaggcctcacaggcacaggggcaggcgggggggccctgatccggttccttgtgccttagtccggggagggctggctctgccctggtagcaagccaggccccgagagtcagtgcgacagcacggtgagagcctactgctccttccgtgggaactggggggcggcagggtggctctactcctttctgtcttttgggatggccgcggtttcatttatccagtgccacgagagggctgcattaaaacacacaccgggcagcccgggtggctcagcagtttaacgcctgcctttggcccagggcgtgatcctggagtcagggatcgagtcccgcatcgggctccctgcatggagcctgcttctccctctgcctgtgcctctgcctccctc

SEQ ID NO: 370 - DNA, 511 bp, Canis familiaris
  misc_feature (1)..(511): n = a or c or g or t
ctgcccccacatgcngatagctcagaggcctgagcaggcccatagtngacaggtgggcacatgctgtcctgagtctggtgctccaacttgagcaagaccattggtcagcacctggcctgacgctggccctcatacctgccctttcctgtctccccacagggcccaggaagctgcttcctgggcccagatccaccagaagctccaggacttctcccgtggtacccagagctggaacgcgagcgggcacagctactagtacgggccacgatggccgaggagcaactttctgagctacaggagtacgtggaccagcacctaggcaggtacaaacaggagatcctgaggctgaggaagctgacgggtacggaggacgcctggaaagtgggggccacaccttcagtgaagccccagcacctgaagacccaaagccgctagccagttgtcaaaccacagcagaactcttcacagccagcgtggaggcctccccactgcacctccttggggtgggggt

SEQ ID NO: 371 - DNA, 504 bp, Canis familiaris
  misc_feature (1)..(504): n = a or c or g or t
aggnngctannnaacaaggtaccgaagtgagaaggtgacaatcagttatgcagagtatattgcttctcgacagcactgtttccagaatggcactcttcatgccccgcccctctacaatcattactcctgacacacggctgcatgaccagtcccacccccctgtggccaccaatggctatgacatcattggagcagatgcctcctcttcctggtccagttacttctattactgcaccattttatgatgctagcttccgttgccaagtctgcctccagctgnnngagagggaggggttgtactgaatgaaacagaacttgaggggcccaagccttatctcagcctttcctcaatatggggttccgttggattggggctcctccatgactagtgagaattaccgtgtgggttcagaagacccttggcatgcaggtgccactggtgatttgccacctgtgtggtggccacacagtggaagccagaattggtggtccatgaaggcttac

SEQ ID NO: 372 - DNA, 425 bp, Canis familiaris
  misc_feature (1)..(425): n = a or c or g or t
tngcctccttcctgctcctgctgctggggctgatgctgatcctgatcgccgtgggactggaggtggccccctcgtcaggtgtctccagcgccatcttctttgtgcccggcttcctgttgttggtcccgggagtctaccacgtgatcttcatctactgcgcggtcaagggccaccgcggcttccagnncttctacctgccctacttcgagaagtgagccgcggggcgggatccagccttgtctccgagcggccccagggggcgctcttcgggtccgccccgctccggttccctcttcaccagggaagaactctgggacccgccagcccccagccccctcggaagtttgttcaggaagtttgcccaatacccaggcctgggaaagtcgcccctggcctgttctgtgccttaacttattcttgggccg

SEQ ID NO: 373 - DNA, 670 bp, Canis familiaris
  misc_feature (1)..(670): n = a or c or g or t
agtgggaggtggtgtacaagcacaacgagacctcgcagaaggttgcggctcgggtgttcgcacagcgnnacctggcagacctcctcccgtccgtgtttggcagtctcagggacggtggctacttctttgatcccatcgaacgagatattgagataggattccttccatggctaatgaatgaagttgacaaaaccatggaatacaatatggtgggaagaacagtgcttgacatgttgattcgtgaggtggtcgagaagagactggctatgtatgagcataaggaggaccagcctccatttgtgcagtctgaggatgggttcagtggccccagagcaatgagagaatccctgatgggtgatgaattccatgaacaaagtgcatcacagtcacagagggtacttcaggccagagactccctgcaaagaacaccaagcaacagaaggtatatggagaatgtgtcatcccaagaaaggaagcttacggaagaagaagatgatgaacaaacagaaaggaatatctcagggagagaactattataactaaggggaactctcgagccacgaccactcagcggccaggcagcagtgccagcaatcaggtaacgatgtgtaggtcccctcagcccatggaaattatgttgtatttacccaacatgtttttttgtctaatg

SEQ ID NO: 374 - DNA, 727 bp, Canis familiaris
  misc_feature (1)..(727): n = a or c or g or t
tgactgagcatgtgcaggataaangcnngctacccattctcatcttcccagagggaacctgcatcaataatacatcagtgatgatgttcaaaaaggggagttttgagatnnnagccacggtttaccctgttgctatcaagtatgaccctcaatttggtgatgccttctggaatagcagcaaatatgggatggtgacgtacctactgagaatgatgaccagctgggccattgtctgcagcgtttggtacctgcctcccatgaccagagagacagatgaagatgccgtccagtttgcaaatagggtgaaatctgccattgccaggcagggggggctcgtggacctgctgtgggatgggggactgaagagggagaaggtgaaggacacgttcaaagaggagcagcagaagctgtacagcaagatgatcgtcggcaaccacgaggacaggagccggtcctgagcccgcgcctcgcgctgcccagagccgccactgcagatcctgcctcgcgagccagctggcgccgccgccgcccccccgcccccactgctgcatcctcctcaggccgctctggatcccaggactccagcctcttcagaactggcccgggccccctgggcgagcagctgaggtggaccctgctgggggtcgctgcccaggatgagatgccttcttgtttcttttacactaagtccgttggaggaatgccattaaagtcacctctccannnn

SEQ ID NO: 375 - DNA, 599 bp, Canis familiaris
  misc_feature (1)..(599): n = a or c or g or t
cgnnnactcattttnactgaggcctcngaagcaaacatctttcagcatgtatcctgttaatgctgggtttatactaactgccaaaatgtgcccggtataattttaattttatcttagtattgaagatacatagcaaatctcagcccactactaagttacttttcatcctcacagaattaaggaaaatagcacaatataacattatacaacttgtgtacaggtaattattttgtacatggtatttaaataaaagttatatttctttaagtaatctgaagggatgaagaaagtgggaagtgagagccaacgtcttcctcagagtactctgtaataaatcagatgcagtgatattctgctgaggtaactgcatcccggcggggcttaagatagctaagtcttttgctgttacttgctcagcatgtgacccatggaaaagataatcactttttctgatttcctagatataaaatggtcactgccatttgcatacccagttatgtgttgtaacttcagctaagtgaaggtgaaccattttcttgttttacgggataaactaaatttaggattactcatcattcatatatgttattctatacctt

SEQ ID NO: 376 - DNA, 684 bp, Canis familiaris
  misc_feature (1)..(684): n = a or c or g or t
aacgtaccatcttttcaatctttttttgtcacacgtgctnnnnntatgcantagcgtggtattnnngnctacactgcattaaaannnnaagaagggaacttagtgtgagctcaattggtgtccatttttttcgtaaatttttaagggctttttgcagtcagcagctcctacaagtgggttagtttcacttcattacccaatgctttaaagttgattataatgaaaatgcattgaagaccaatggagatacatgtcctagatctcttatcccttaaaaacaagcttcgtctggatggtaactacatgtttcaagtgctataacatgaataccaaaatgtgatgtcaaatgggtattttaaaagcagatatttgaaaattcttgtcttaatatatgtttattgaatatactctaaataagtgtgcaatttgctagtattacaatacagtgattagcattaggtatgtatcctctttatatcccagctgtgtcccttttacttgtaagtgcaatcctttcaagttcacttgctattttacccccacctagtctaccttcacgtagaaggcttgcctagagagtattgtacgtattttcacttgtgtagtgaattgcatgtgccaattgttaccgtagttatcagtcttatgttaacaagtctaaatgttactgtaaatgtatcagct

SEQ ID NO: 377 - DNA, 627 bp, Canis familiaris
  misc_feature (1)..(627): n = a or c or g or t
catntnntcaagagactgctngagttcctgntctatcaagagtatctannnntgaagannagnannaggtctaatcgaggcnaatttctttagattcctgatgtagagtactnnatgaaaaacaagtgaggtnnaggaaatagagtggacatggttggaactgttcaagttgatctcanngccgttctgcagttgctggcaggtgtttgcagttactccagctacacttctaaacagctgtccagcaggtacttcaaccttaaccatgtgcaaaaatgtgtggatgagtactgtaagctgtcaccatcagtaaaattccagcttcttagcatgtatttagtcatttccctacagtttcagcctccccctcaacatacagctccatttttattaccacctccacgtctttgttcaggtgccacattttcagtaaagctctctcctgctgattccccccctttagcccaaacatactacacaaagttctcccaataccttataaacagctttattatgacctcagcatgtactgtaattactgatttccttccctatctcatacccgcatgtgatctttccaagaccagggagaccattacttatttatgtgccctgcatgtataattt

SEQ ID NO: 378 - DNA, 459 bp, Canis familiaris
  misc_feature (1)..(459): n = a or c or g or t
annttgaagacagccagcgtggctggagggaagaccccaacagctatgcccaccgcggttcagacaaggtggaccacagaagccactgcggtgatgcttcccaaaatcagaaacaaggacagttagggaggtgtatggaaacactctggggctggaagtctggagaaatgtttgagatcctggtttttgcccttaacaacctagtgaccttctatgacatcaaccgttgagtaaccacaatgtgccgagtggtgaggccccaacttttatttttattttatttttatttttatttattcaatggggtgaaggattgggggtttaaagctacgtgtctgagacaacaggtacttctcagggaagaagccccttgtcagaggctgcgtgtcagcccagctcctggccagcctggaacctccacctccacttctgacactgtccttgggcctcgtccctgtg

SEQ ID NO: 379 - DNA, 517 bp, Canis familiaris
  misc_feature (1)..(517): n = a or c or g or t
tgctgcatcgaaacagaataaactngaacaagtagaaaannaattgttgagagtagcacaaatcttgaangaanntaaaatggctgcttccattatgaatcnnnacataaagcgttccgtgaaagtgaaannnnnnnatgacatgacagcaaaagagaggttctctcctatcacatccaacctgatcaatttgcttgctgagaacggtcgcttgaacaatacccctggagtcatttctgccttttccaccatgatgagtgtgcaccgtggagaagtgccgtgcacagtgacnnncgcgtctcctttggatgaagccactcttactgaactaaaaacgnnnnnnaagagcnnnnnnngcaaaggccaagtattgaaattggaagttaaggttgatccgtcaatcatggggggaatgattgtccgtattggagagaaatatgctgatatgtctgcaaggaccaagattcagaagctgagcagggccatgcgggaggtnnnctgaaagtattgattatct

SEQ ID NO: 380 - DNA, 428 bp, Canis familiaris
cttcaaacgggccatctaaggcagctaattatgcattgcattggggtctctactgtgaaaaattctgtgacttgaactaaatatttttaaatgtggattttttttgaaaactaatatttaatattgcttctcctgcatggcaaaactgcctattctgctatttaaaaaccctcaatgactttattttctactgccgcttttttcatgtgcagccaaaatgaaaatgtttaaattaactgtgttgtacaaatggtacccaacacaaactttttttaaattagtaagacttttgttttaaagttttaagtttgcatttgactttttttgtaaggatgtatgttgtgtgtttaacctttattaactaacgttaaaaactgtgatgtgtgcgtagaatattacgtatgcatgttcatgtttaaagaatggct

SEQ ID NO: 381 - DNA, 506 bp, Canis familiaris
tgggataaagggagtccatcacaaagaaacccccaaacatcgatggatcactaaatctccagtaaatgaaaaaacctatctgatctgaggatatgagacctccactattgagatgtcaaatctccctaagttaatctatataatcaatctgatctcagtggaacagtgggaaaaaaattgtatttatgagatgatgatgggatcttatttggatttattgctaaactcaataggtgactgtgtattcttattgcttagatttgtatatttagacttatgcatttatataatatacacttacatattttatatttatatttatgtatttaagtttttacttacaggtgaaatacaatatatttgccatatgtctcaaaattatatgtgaagaggacaagtattgatggattgatgaaacagactggccgtgacatggtcattgacgtttggtgctggtccacgagggttcacttacactattctgcctagatttagtatccgtattt

SEQ ID NO: 382 - DNA, 565 bp, Canis familiaris
  misc_feature (1)..(565): n = a or c or g or t
gagaagaacgacatggagcnaatgaagtaccgggaccgtgcagctgaacgcagagagaagtacggcatccctgagccaccagagcccaagaggaggaagtatggtggcatgtctgcagcttctgtggactttgagcagcccacaagggatgggctgggcagtgacaacattggcagtcgcatgcttcaggccatgggctggaaagagggtagtggcctgggccgcaagaagcagggcattgtgacgcctattgaggcccagacacgggtgcggggttccggcttaggtgcccgaggcagctcctatggggttacttcgactgagtcctacaaggagacactgcacaagacaatggtgacccgcttcaacgaggctcagtgagcagctgcaggagctgcttctacttatgtcgggtgtccagcccgggacaggggagggtgaagtggtgggtggtctgagtggggccctgcacctgtctaccagcctattccccagccagagaggccctgaccaagtcagactttgagttggtgacttttgttggagaactgggctgggatcatgc

SEQ ID NO: 383 - DNA, 442 bp, Canis familiaris
  misc_feature (1)..(442): n = a or c or g or t
cattcctcgcccatnngcagacactgagccctgacatgcagggttcctactgcacgttccctanntcggtgctggcacccatgcccacccactcgacagtctcagagctcggcaggagccccatggccacggccacatcctgctaaaaccaggatgggggaaccagccgagccccaagaacaactgtgattctgcttttttaaaactcgtggacatttcatacctgtgcaatactgaacacctcactggcccgccgccccagtgggacagtgagtggtcaccaggcttgcaaacgaacttcacatgtacagcggggataggttttggggaccgaaggaaggccaagccattattagagcacagcacgtgccgactactgtacttccagaccccctgccctctcaggaccgcctaggccctgcacctccaagctcgccttttc

SEQ ID NO: 384 - DNA, 607 bp, Canis familiaris
  misc_feature (1)..(607): n = a or c or g or t
agccnntgcgggtagtggtcactgctgaagttcancgctccgccctgggnnagccccntgcacccctgnnagncctgggggaggagcaggcgccagcccctgctctnnagggcgtggatgtgcccgagccgcctcctaactcgatggagcaaccggcctcggggccggagccacccgttgagccaccccaggagcccgccccagctctggctgtgtggcctgctgcttcagggcctgagctaatcgagctggacctgggtgccggagaggaggacctggtcaaggccgagatgctggctcctgaggcgaaggtggtgcacgtgctggtcgaacctatgattccccgccccgatgaggaggagccccctgcacccgcggccaccccggaggagtaggccccggcgcctgcattcggggtccccagagggccagagctgccacctgactccggaacaactggcttcgacccctgcgcagccccctgaccacctcgggagcccgccccagctcccaccgcggggctggtgatggctgcagcccagtggagacttgccctcccctgtcattttactgtttctatattttgagtttttctttaacctgtata

SEQ ID NO: 385 - DNA, 569 bp, Canis familiaris
  misc_feature (1)..(569): n = a or c or g or t
aaattgtttatcttctcttgttccccctcncggctnngcacacactttcacttttcctcaaggtagtctatgcccttaacatgtccctcgactccctttacnnggttcatttccagttctctttaaaaactcagaagtcatatcctcctgtgaaccttttgactccctgaaggtagctcatttttgtgtagcagaaaaattctgggtttttaaaaacagacctatttgatacttggttctgacgtagactaggacagagccttggacaggtacatctccccgagtcttttccctcctctgttaagggggcatatcaatacctgcgtcgcacagtaatcagggaataattaagtggaataaagttgatagagtgcctgacacaaagaagtaggcggcagatgttagtccccttcctcctttgcactgcatactgtgtctacctctagtattgtaactccaatgtaggactgaaaatgccagctaacctgtttgcctccccgactgtcagcgccgagaggacgagagtctcgtcctgcttaactttgtactcccaggccctcgctcaggat

SEQ ID NO: 386 - DNA, 529 bp, Canis familiaris
  misc_feature (1)..(529): n = a or c or g or t
tacttgtagaatgaaacagaagaagganctgtataggctgacggtgatagaagttgtcagggatgaaacataggnnnnactcagttctttgcatccggtattcaaagataggataaaataaaacctctgacagcatccatatattcatttcctaaatagggtagctttggacacagtaggtgaaaagtatgtctgaaagggagggtttctcaaaagaagcagggctctgaagctgatctccttgtattgtctttgtgtaccaaattcagagcctccaagaaggcactagatgtatgagctccatgactcatgagtccctcatttctgggaatacagacaantnnnanactnnnnnngttttcctctgtagcactagattcagaactagcaaaaaaaatttttttttttatatctgtgatgaattctcaannngccataggctccagtgtcaggaaatgcaagggtaacaaatctacgcatgattcaaagacctcnnncaagtcagtaatttnnnnntccagaaggnnct

SEQ ID NO: 387 - DNA, 516 bp, Canis familiaris
  misc_feature (1)..(516): n = a or c or g or t
tacatatttcttgttgantcaggnnacatttagagnctaaagcctagtcatnnggtnnnagtattaagacaaatagaaataagaatttgaatcttcaaaatattagtgtagcctatgattaaaaattatctacaacaaaaatgttttcatggtgccattttcaaggggtagtataataggaccacttctatagaaaataattccttcctctctcttgttagtacgaatctagtgttatattaacatttttgtgatgtttagagctttttaaataatctctactgaaaaaaagagtcttttcaaacataagggaagggaaaactgaataatttcacacaaatctaatgcagcttcagtttgtcatccttttcctccagatgttttaaggttattgggtttggattctcagagtatcatttgccttatcttttcatctctattttctgtttcttcacattattacgtttgtatacatctgtactgttttgcttttggatacattttctaattaaaaac

SEQ ID NO: 388 - DNA, 562 bp, Canis familiaris
  misc_feature (1)..(562): n = a or c or g or t
agcagctggnnagcgacgtgtgctacnggcagcccctgccccagcccacatgcgacccggagcagctaggcctgaagcacgcacagaaggcccaccagctgcagagtgacgtcaagtacaaatcagacttgaacctgaccagaggcgttggctggacaccccccggctcctacaaagtggaaatggctcggcgggcggcggaactggccaaggcgaggggcctgggtctccggggcgcttcgggggggccagaggctgtggagcccgcagagaatcagaggggggacgtgaacccagacgccaccgagattctgcacgtcaaaaggaggaaggctctgccgttgtgagtgagcggcgtccacccaggatccttgggaaagaggctcgggagcaaacgtgcgtgtgcaccagagacgtgcttcagtgcgagcgagctgctcgcaggacaccgtgccagcccctccccgagccgcctcccccgaagcgacgaccctcaggaagccacgaagcgtgttgtattcttggcccccacccccccgtctgaccctggaagggggtggct

SEQ ID NO: 389 - DNA, 461 bp, Canis familiaris
ggtgacggcgggctgggggtgtttgttcagctgatacccatcctcatcctgatcctcgtgtcggctctcagccagctcatggtctccagccccccgtacagcctgagcccaaggccgtcagtgggccatgtccacaggcggatcactgaccacctgaatgtcgtctactacgtggcagacagcttctctaaggagtacacaggctccagcctcaaaacagttgaacggaacgtggaagacgattatatcgccaacctccgaaacaactgctggaaggagaagcagcaaaaggaaggcttgctgtaccgggcccgctacttcggtgacacagatatgtaccacaaagcacagcggatgggcaccccgagctgtagccgactgtcagaggtgcaggcctccctgcatggatagtcctgggccggccacgccaccgaggtccaaaccatgaaatccctggagaa

SEQ ID NO: 390 - DNA, 703 bp, Canis familiaris
  misc_feature (1)..(703): n = a or c or g or t
tcnacatgccntgcgtagaaccatnnnaaagtatatgtcnannnnnngattgatcttgtgttgcaattctacatctaaagtaataccacctattcgtagtaggtgcctggcagttcgtgtgcctgctcccagcatcgaggatatttgtcatgtattatctactgtgtgcaagaaggaaggtctgaatcttccttcacaactggctcatagacttgcagagaagtcctgcaggaatctccgaaaagccctacttatgtgtgaagcctgcagagtacaacaatatccttttactgctgatcaagaaatccctgaaacagattgggaggtgtatctgagggagactgccaatgctattgtcagtgagcagactccacaaaggctccttgaagttcgtggaagactttatgagcttctaactcattgtattcctcctgaaataataatgaagggccttctttcagaacttttgcataattgtgatggacagctgaaaggggaagtggcccagatggcagcttactatgaacatcgtctacagctgggtagcaaagccatttatcatttggaagcatttgtggccaaatttatggcactttataagaagttcatggaggatggattagaaggcatgatgttttgacatcttgacgtccatctacccttaattcttcctaatatttctcagtatcagcatttacgttca

SEQ ID NO: 391 - DNA, 710 bp, Canis familiaris
  misc_feature (1)..(710): n = a or c or g or t
aagaactttgggctcagttgccaggggttcccccccaccccgcagagcactacnnngnnnctgaaagacaacagcaccagnnngcccctccacctgccgccgtcacccatcagatgctctccgtcatcctttgcnaggcatttcagagttgctagaaggcatctagctccgaagtgtggaagagctctatttcccctgggatgggagtggaggtgtgggtcacagatggaccaaaggcctcttctctcagcagcctcagcatgcctggcttctgacaaactccgggctgccttcccacacctcagtgccagcggaagagggtcattcgtggtctctgacatgccttccacctctccaccttcttacttatgactgagctcttctcccaagctggaagggcctgtcctcttagtcaagtcctcctgctgtctggagaacttgctcagcaccacctcctacaccgagtctcctctcaccactccatttctctcctacgctccttcctctatccctccgtgtatataactcttgcttctctgatgcttattgttcacaatttttgatgggtagttatctttttgtgtgtatctgatttcacaaggacattgtaaactctnnnggtagggaccatccccgagacctctttgtatctcccagactagctataagagtgctgggcacatagtaggtaatcaataaacacnnnnnnn

SEQ ID NO: 392 - DNA, 689 bp, Canis familiaris
  misc_feature (1)..(689): n = a or c or g or t
gaagatcaagagctcataatcccgtgccttgcactggngagagcatnnnnnnnctgnntgaagaaaatccggatctcagnnnnagagaatggtaagaaggatcaggtggcccagctggacgacattgtggatatttctgatgagatcagtcctagtgtggatgatttggctctgagcatatatccacctatgtgccacttgactgtgcgaatcaattctgcgaaacttgtatctgtcttaaagaaggcacttgaaattactaaagtgagtcatgtgaccccacagccagaagatagttggatccctttactcatcaatgctgttgaccattgcatgaacagaatcaaggaacttactcagaatgaacttgaattgtgagtttttaggctcatttgtattcttttctctccttcccttactatcacaggtagcctctgaagtctgcttttaaaacagagctagaatgctctctagatcaaaaaggagttcctgtctatacttgttcagagacattattaccaaagattattggttaggccagactggcagttatttataaactgtatgagtatgatatatttttctgtgctagataaaaaaggcaattgcatgagtttgtgttcctgaatggtatttcagagattcctgcagaagctgcctcattccctatttgcagtaaagtgtgttgt

SEQ ID NO: 393 - DNA, 611 bp, Canis familiaris
  misc_feature (1)..(611): n = a or c or g or t
tgacataatgagaaatgaatttgaaagactnnctgctcgacaaccgatagaannactcagtatgaaacgatatgaacttccagccccttcctcgggtcagaaaaatgacattactgcatggcaagaatgtgtaaacaattctatggcccagttagagcatcaggcagttcgaattgagaatctggaactaatgtcacagcatggatgcaatgcctggaaagtatataatgaaaatctagttcacatgattgaacatgcacagaaagagctccagaagttaaggaaacatattcaagatttaaactggcagcgaaagaacatgcagctcacagctggatctaaattaagggaaatggagtccacttgggtatccctggtcagtaagaattatgagattgaaaggactattgtgcaattagaaaatgaaatatttcaaatgaagcagcaacatggcgaggcaaacaaggaaaacatccggcaagacttctaacagacagatgaattcggtgggaagcaaggaaggcaagctgggctttcacagattaggcatctcaactgtcagggagaacagcatcttaggggaaccattatggttaaatgtgtattgtaga

SEQ ID NO: 394 - DNA, 384 bp, Canis familiaris
  misc_feature (1)..(384): n = a or c or g or t
tttgnnnnnnngaagattttagtgnnnnnnacatttttatgttgatgcagttgtattttttaaattgttctcccaacatttnnnnnnnnnttcaaacacnnnnnatctagcattnnnnnnntnnnaagnnnaatancttgtatgtattttggtagtgatgttttaaaatatcctaagtatttaanaaattacagtgtagagatttcagttttttctaaagnnnttctttctcaaaatgtgacttggctanatgcttgctgaggtactgttttttttttttttctttttttttnngttgannnntnanatgtnnnnntnnnnngggnnnnnnnnnnangnnnctcaaaggagtcnnnnngaatgggtttggtccctcgatnnnat

SEQ ID NO: 395 - DNA, 576 bp, Canis familiaris
acccgaactccagagaatcaagaagacccaggaccagatcagtaacataaaataccacgaggagttcgagaagagccgtatgggccccagcgggggcgagggcgtggaacctgagcgccgagattcgcaggacagcagcagctaccggcggccccaggagcagcagcagccgccccaccacatcccagccagcgcgccagtttaccagcagccccagcagcagcaggtggcacagtcctatggtggctacaaggagcccgcggccccagtctccataccacgcagcgccccaggcgggggtgggaagcggtaccgcgccgtgtacgactacagcgccgccgatgaggatgaagtctccttccaggacggggacaccatcgtcaacgtgcagcagatcgacgatggctggatgtacgggaccgtggagcgcacgggcgacacggggatgctgccggccaactacgtggaggccatctgagcgcctggcccggccgccctgccccatccgtcttcagtgcattccacggcatcgcatctgtcctgggcgtcacctgtccccccttcagtgtctctgtt

SEQ ID NO: 396 - DNA, 630 bp, Canis familiaris
  misc_feature (1)..(630): n = a or c or g or t
acagggttcagttttgtaatattttttccagcaaatttttatacagtgtcatttaatttnnnagaggatactgtccagaaaattaacgcatacttttgtcacaatttgcctttttttgtgggtgtggtttttttctttccctttttctcccccctctctttctttgcttcaatacctctgccactttggaaattgtaacagttaattaccttgaatgttgctaacaggacattttgtgtagggtcaagttatttttatatgagttaatgtgaagttgtaaatggaaatctttccttaaagtataacacaatgatgtctgtataaatctgtgtctatcctagaacctgtgctgtgtaagggcattcttactcatgctgttattatacttatgcaccattcagacttgttagagtagatgtgggtttatgactgccaagtttgcccagtacagtagttttatcactaaaagttggacttgctgatggagtcctatagtagtttcagtgttagatacagttttttccaccatacatccgtgcattttctctttaggtgactgaatgtttaagaaatttgtgtgcatagttactcagtttttatgaactgttgtatcctgttaatgcatattgc

SEQ ID NO: 397 - DNA, 570 bp, Canis familiaris
  misc_feature (1)..(570): n = a or c or g or t
tatatttttctaaaaatatngacttnacaggaaggtgtgcgagtacaattactatgatgcatgactcattatcatcttagatatttctgatatttaccttcctagtgaatgctataaaatgtttcgctgtatagaagaaatttgttaataaacctcacaccaacccttgacagcaccggtgagaaaagtggggggaaatacgttagttctatcaggccatagattaaaatttaaaacagattcttctatccatctctaaactttctccctcacctgtagcagtcatttcaatttcatctggtcctttgatacccctgtcatatgttttcagagcccatgagtcaattcagagcactaacatcacaaagtaggcttaaatctcattccatagaagtctaagaatcactagagaagaagttggctaaattaatgggatttagtttcagtttctctggtgacattgttaagaaattaagtaggaagcctgggttctatcagcagaacatccctactgcacactgtcaagtttcagtgttgatccgttgtgagnntacagtttataccataggc

SEQ ID NO: 398 - DNA, 420 bp, Canis familiaris
  misc_feature (1)..(420): n = a or c or g or t
tttgactgagccatcactnntgggtgattaccctaaatagatgaaaactcgagttcacataaaaacctgtacttgaatgtttatagcagctccgttcataatccccaaaatgtcttccaacaggcatgtgaataagcaaatgatagtgtatccacacatgtaataaaaaggaatgaattacattcataacaactcaatctcaaagtcctatgctaagggaaagaagcccagaagttacatactctctgatttcacctattgacattcttgaaaaggcaaaactatagtgatagaggctagatctgtggttgtcaggtgttgggagggggagggtttgattacaaaggggctgtgcaagggtctgtgttttggtgatggacttctgtattatagttgtggttatgggacgccttggtgact

SEQ ID NO: 399 - DNA, 72 bp, Canis familiaris
  misc_feature (1)..(72): n = a or c or g or t
tccctttacctnngctcctcccactgcacgatctctcaaatcttttaaaaatcaacattgaagacatatgag

SEQ ID NO: 400 - DNA, 460 bp, Canis familiaris
  misc_feature (1)..(460): n = a or c or g or t
gctgccaccaccagctgtgcacacggcactcacgtgtgcaccacaaacaggaccacaggagtcttccagcctctgctctgctgaaggtcaaatataaaggctttgatgagtgaatgttcccagacccctggttgctgggactacccctcannngggtcacaggcaccttccccatcctaagccgtggccgtagccatctcccttcagaccaaggcaggcagctgccctgaccagcagagcccagccctgcttccacttcctgtcttgcctcatccaaaaattggctaaaccgggggacttcgggactggatcacattcccctcctctgatgacccagcaaagccccggggacaccaagctctgctcctgaggccacccccctcattgccattccatgagggatgcacgtgcatcccagctaagatgagcagcgtagccntggtcacaatcgagggcaggt

SEQ ID NO: 401 - DNA, 497 bp, Canis familiaris
  misc_feature (1)..(497): n = a or c or g or t
atcatcngttngatgggattgctttttcaacagnnagccnnnannnnntgcattcgnnnnntgaatctgaccacctcggtagaatnntattatcttcaggagattggaccntggtaaactgannncttcaccttaaggagagacatttcatttccctcactcgctggcagcatttatttatgaataccaaacaggtttaatattctttcctctctgatattcctgccacctttgatttgattttttgtgtgtgtctaagaaccaggaaaaaaaatcttaggttttaaaaagttttaaaaaaaaattgtttcagaaactgtcaaatgtaccatatttgtattaagagttgttggggatttttgtacaatgaatttacatttatttatggtgacttctatttacgcttgtgatcaaataatgatgttaaattcttaaaccatatttgctatgcagctgaagatgatattttgctttgtattttggggtatctgtgttga

SEQ ID NO: 402 - DNA, 643 bp, Canis familiaris
  misc_feature (1)..(643): n = a or c or g or t
cacaggctacagattcaaaagctgcagtnngnnnactggtgaaatnnctnngngcaggcatttacgnnnnnaaactggaaagggctctcaatttccaccganaagtcctcagagaagcaggtttcaattgctnnaagaggcctagcnctaatgcaaaatgtaaggcttttaaaaggttnnaaacgctagcatcaccttttacaaccaaatcaccagccagactgtatataggaccctaagaagagattcagagctctgagggtggctatgaccacagcggagctaaggaaaccttgcttggcaggattcatcgagcacttctgaagaaggaagtagctttaaaggaagctcttcacgctgccatccacccatatgccagaagttttagtatctcacatgaatagagtttgagctactggaacagaagaggacacaacaatgagaaaatctggtgtgaaaacagcttgaagaaaacttggccatctttactgcaatttatagacaaggccaagcgtggatattttcatatgtcttacttgtgtatcccctctgcttgattccgagaactctcagcaaacaggaacgatggctgtcggggagggtactagaaagcactctgggtggggtaatgtgcagatggtgg

SEQ ID NO: 403 - DNA, 508 bp, Canis familiaris
  misc_feature (1)..(508): n = a or c or g or t
cagcagctggggaagacctctctcctcctagtcctcaagaatccnacgttcagccagtacagcctgaagaagtatcagctagagatttcctgcagagactagacttgcagattaagttgtcaacacgggcagccaagaaactaaaagaagagagcagagatgaagaaagtccctatgcaacttccctctatcacagttagatgatcaagggtgataatctaacctggattgagagctgtttggatcataacgaaaacaacaactgaagattcaaaagcatacatcctttaaatcacagtttagtagttccacctactgcaattgcactgaaatgattatttccctctggctttctataattttaagtctttattatggcatgagagcaaaattatatcctaaagctcatcacttttgtaggtgatggtagtttttagactagtttttgtaaatactagttaacataaagcatcaaagactatatacatattcaagctgaaaacaatgt

SEQ ID NO: 404 - DNA, 611 bp, Canis familiaris
  misc_feature (1)..(611): n = a or c or g or t
tttatcngctctcactgtgactttggtnnnnagcagaaaaataaaggaaactgttnnnatgaagaaaattgaaaatcggtgaaagcactggatcgttttctcaataatgaaaaaaaaaaaagaactaaattgttccaaataatctattcctgggtttgtttaatcttgttttgctttattttgtttttaaacaataaaatcatttannnncataaatccttcccccctcacccccaatgtatccaataggctttgctataatgttttttccaattctctggatacttgatttatagtttgaattttgatttcttctttgacccagaaattgtgtggaagaggcttcttaattttccaataattagaagatttttaaagaactttttattattgattttctgttcaaaagttttaaaacaaatctttgttttgggatatttagcaaagttttcttttatgcaagtatgtgattaatttgtatattacatgaatacaagaagcgaaaaaaatatatagtttatggtatttctcaaatctcttatatgatacttcactttaattgtatacttgaactgtcaaattctgaaagtatattaaaaacatcccannnn

SEQ ID NO: 405 - DNA, 545 bp, Canis familiaris
  misc_feature (1)..(545): n = a or c or g or t
atnctaagaagacagnncaagggactgggattccannncagagtttgttttttacagaaggtaaaagcaggcangccacattgtgccatcttccgccctgatggctgtaggaattactgcctgacataaaacaggaaagaggatccaccgttgggcagagggtgctttagggactcacttccacatcatcttggagtttaccttgttgcagatgcagccacaggtaggttagagacggagtgttggtgcaataaacccaggaatcaatgtagcatcttcatctcatcaagatgtagttcagagcagcagagtgcacagtctgataccatatgttttatcctcatacgttagagctttcagcagcctttataagcgaggccatttaccaaagttatttctataagctcaagagtgtttctgttgctaaattcttccagccgaagccactttcttcctctaatagttaatacaaatgactatttgtagtttcaaaggcatagctggcctggcggaaaatgaacctgcagcagttcaggatgactaat

SEQ ID NO: 406 - DNA, 512 bp, Canis familiaris
  misc_feature (1)..(512): n = a or c or g or t
tctngnctcgaaaatncgtgnnagacaaatgncaacaagaaatccactgtcattttnnnnnnnctattttaaaggaatacctaacatgcaacctttgtcctggtattttcccccaacacacaagcattggtnnaacatctctattcagcagcacttccgattcctgatctgtgagaaccacccttcaatcaaacaaaaggggcaggggtgggaatccaggctactcggttaatttcttnnnnntttttttttataaactagcccagaaaacgtgaaatgttttatataaaactgtattaagcatggcctaagtattaggtgtatgatctgtatagtatgttccatcaaaaaatatttattactagtgctttaagctccagagtaaacattctttaaagtggagttcactgggcagacttccccctttaatatagatagaattattctttatcagagatttaggacacagttttgctaactggtaaaaacaaatgtaaatatgtaagaatgtt

SEQ ID NO: 407 - DNA, 676 bp, Canis familiaris
  misc_feature (1)..(676): n = a or c or g or t
aaactgttntacatnncattccgtatatgggggatgaagttttagatcaggatgggactttcattgaagaactaataaaaaattatgatggaaaagtacatggggatagagaatgtgggtttataaatgatgaaatttttgtggagttggtgaatgctcttggtcaatacaatgatgatgatgatgatgatgatggagatgatcctgatgaaagagaagaaaaacagaaagatctagaggagaacagagatgataaagaaagccgcccacctcggaaatttccttctgataaaatttttgaagccatttcctcaatgtttccagataagggcacagcagaagaactaaaggaaaagtataaagagctcaccgagcagcagctcccaggtgcgcttcctcctgaatgtaccccgaacatcgatggaccaaatgctaaatctgttcagagggagcaaagcttgcattcatttcatacgcttttctgtaggcgatgttttaaatatgactgcttcctacatccatttcatgcaacacccaatacttacaagcggaagaacacagaaaccgctctagacaacaaaccttgtggaccacagtgttaccagcacttggagggagcaaaggagtttgcggctgccctcactgccgagcgcatcaagaccccgcccaagcggcc

SEQ ID NO: 408 - DNA, 600 bp, Canis familiaris
  misc_feature (1)..(600): n = a or c or g or t
ccctctgtgacttatgtctagtggtgggaacttcctctgtggtttatcctgctgccatgtttgcaccccaggtgtctgcccggggagtgccagtggncgaattcaacatggaaaccaccccagccaccaacagattcaggtttcatttccaggggccatgtggtaccactcttcctgaagccctggctcctcatgaaactggcaatgtttcttagttgtcctggggaaagaagaaattgtagtatgtctaagtacttgggccacacacagaggagaactgatcgtggggaccgtgagctaaatactggaaaatctagaaataccatcagattccctggctggaatcccccctgatgctaagtaaagcaacaatagcaaacactcttaggagaagttagagaacagccaggttaatgcatgttctttcatgtgaacttaaacctaagctctctcctatgtgtttggttggctattggaaacattttgtgattagattatcttttgaaaaaactaattatcctgattgtgttgtttcgatctggacgcagaagtataggggtaaaaccttggtatttcggatttttgccaagttgtggtgga

SEQ ID NO: 409 - DNA, 283 bp, Canis familiaris
  misc_feature (1)..(283): n = a or c or g or t
caggaaannncagactggaggaaagtacagataacatactctccattgttaaacaaagaacaggaacctttggggatcgtcctgcaagannnantcttttagaacaagtgttaaatcaaaaaagactgtcattactaagaagtccagaagtggtgcaatttttacagaaacagcaacaactattaaatcagcaagttttggagcaaagacagcagcagtttccaggaacatcagtgtgaaagaatnnatcaagaagattcacatgttttgtattttgtatagt

SEQ ID NO: 410 - DNA, 547 bp, Canis familiaris
  misc_feature (1)..(547): n = a or c or g or t
accagtgacattttccacaggcatcaaaatgggtcagcatatttcattagcanntattcaaaagcttgaagaagctctatatgaataccaaccactgcacatagagacatgtggaccacaagttcctgatcttgagatgctaggaagacttgggtatttaaatcatgtcagagctgcctctccacaggaccttgctggaggctatacttcttctcttgcttgtcacagagcactacaggatgcattcagtgggcttttctggcagcccagttaacctttatttctcctttttaagatttggaccgaatcagggagctagcaaaagcaaagcagacttgtaaaagtatagccatatgcagctgcccaacaacagttctaccactagcagctgtgttaaagtatttataagagaaaatttcagaactaagctgagtaatatagtggataaatatatgtgaaaaagatttattttttacttatatttttctgagagggattgaagctgtaaacttcatctgatggaagatatgnataattcacctatgta

SEQ ID NO: 411 - DNA, 582 bp, Canis familiaris
  misc_feature (1)..(582): n = a or c or g or t
aggaagagatcagaacaaggtatttnnaccttcggtatgaagaactctttagtgatggaggtgattgatgcaagaaagatgaagacagaggaagaactcacagaaaacattgggcttcccctgaatatgcttgaaaaacacagcccttggccagcctatgtcacatatatgtctccaatggtgaaaagactcattgagaaaagcaaagctagagacctggaatgcaagcaagcacttgaggaaagccaacggacatcccggcagagcaagccttccagcatcacacacctgaaaaggagaaagtcatctaagtcctctggaaatatggtgttgaaggacacgaggtcagaggccatgttatcgatgtggagctcgtactctgtaccgactgtgggtcctactgttatcccggagccagtgtgccttcatacggattccagagaaaatcccactgcaaactataacaagatcatcttccctcgaaaacctatgatgaggatgcttccgtacagctcccttctagccagcaaggaaaaacattcaaatatctagcagggagtccctgctgtcatccccccaaga

SEQ ID NO: 412 - DNA, 600 bp, Canis familiaris
  misc_feature (1)..(600): n = a or c or g or t
angatcatcannntggtctatctccagnnacatnnctgcttgaggtcccccaagaagtggnnnnggtnnagagnnnctcctnnancnntggggaacataaggcagctgctagactaaggnctgccnctgaagtctttctccacccgcctcatcccccttccttttccctcccttctggtctccatgttcttgagcttggtggggtcaggagaggaagatttggggaggagaagcctgttgggtggtttggatttcaggcccaccctttcctgggctgtgtggccttggcagatgatcagacttctctggtcttgcttccccacatggacagtgagtatcatggctcatctccacttggttcttctgagattgaagcatatgagtgtttgtcaaatgcctgactcagagtaggtaaacactgacagctgccccctgtcccctgccctgcctggtagacttgagggttataagaggcagagtgcctggtgggtaagggtgctactctgcagtgtcgggtggcccagggctgcaccccactctgactttcactcactctgttttgtcactctgtgcctttgattaacctctctgtgcctctgt

SEQ ID NO: 413 - DNA, 628 bp, Canis familiaris
  misc_feature (1)..(628): n = a or c or g or t
tgagtgcttttggtgaggaaggtgaaggtgattatctggatgactggactgtgctctgtaatgggcnntactgggtgagggatggtgaggtgcggttcaagcactcttccactgaagtnctgctgtccgtcacaggagaacaatatggtcgacctattagtgggcaaaaggaggtacatggcatggcccagccaagccagaacaactactggaaagccatggaaggcatcttcatgaagcccagtgagttgttaaaggcagaagctcatcacgcagagctatgagcctggaagctgtaagccactgttaccacacagtgttcatgacatctgctgctgctccaccttgggatccctgccacaggttccctgggcagtggccatgtccccactgagatgaagatgcgtgacagaaaacagtggctgtgtttggaagctttagcccttcacacttgaattggtggttcttccagactttcggtcagttctttttgagtaccggacttgctggtgaaggagcagatgtttttattcatattgataaaacagaaactaagggagatacctctcttcgttgggaaatttttactcttcagaagcttggcatcatggattatcaatgtgtgact

SEQ ID NO: 414 - DNA, 505 bp, Canis familiaris
tcaagcccattacccgcaagggtgtgggacagcgcatggggggtggcaaaggtgccattgatcactacgtgacccccgtgaaggctggccgtctcatagtagagttgggcgggcgttgtgaattcaaggaggtacaaggtttcctcgaccaggttgcccacaagttgccgttcacagcgaaggccgtgagccgagagactctagagaagatgcggagagatcaggaggagcgagaacagaacaaccaaaacccctggacctttgagcgcatagtcaccgccaacatgctggggattcggaaatacctgagcccgtacgacttgacccagaaggggcggtactggggcaagttctacatgcctgagcgagtgtagggaggatgggagacggaggtggacaaaggccacggagagaaaggacttaccctttcagtctcgggggctccgacagctaactgaggagcagtggatgagtaagtggcttctggaaaatggtaccacatctc

SEQ ID NO: 415 - DNA, 620 bp, Canis familiaris
  misc_feature (1)..(620): n = a or c or g or t
cattttctgagcataggtagaaagagagccagctcccccaacagcgggcattcattcatgaggcccactgttgggaaatgaataatttcttaantaggaagtagaacagaacagaggnctcttgagggagcgtggccactgttgaacagtggcttggggagtggagacactaatgacttgatggaaaggctctgacattccatgaatgtatcaggaaatattatatatgtgtgtatatgtttgcacactggtgcacaggctgagtgtcagtgtgtgtaacagctagtgttcctgagtttgactgcaagtctagatatttccctaaactgagtgtactttgatgtcacataaaatggtctggagaggtcactcctagggcctcttgggcctctcatgtgatgatgcctatgaatgtatcattctggggcatggcctgtgaccagcactaaattttcagtttcatttttacatagatgttctttcttggccagttatcccttctgacctttcagctgagtttatccaatcctcactgggtgaggtgaggaccacttgtgtacactgaatatttaataattatattctgctatttttatttatatctatttttgtaattttga

SEQ ID NO: 416 - DNA, 669 bp, Canis familiaris
  misc_feature (1)..(669): n = a or c or g or t
atcctcagcacccttcttgcttctgnagtcatccctaccactgtccggggcngaggcctgggnctgatcatggcactgggggctcttggagggctaagtggcccagctcagcgcctccacatgggccatggagccttcctgcagcatgtggtgctggcagcctgtgccctcctctgcatcctcagcatcatgcttctgccggagaccaagcgcaagctcctgcccgaggtgctccgggatggggagctgtgccgccggccttccctgctgcggcagccaccccccaatcgctgtgaccatgtcccactgcttgccacccccaaccctgccctctgagtggcctctgagcaccctggcaggaggctggctcatactgaaaggtggcataaggccctggcaaacagattgggaggactggtgaggaaggcagggctgcccaggagactgagaggcacctcacgccagccatcaaggagggctcagagggctgtccccacccccatctcctccctgctgctttgtgttcacttccttggcaagagtcaggggacagggagcgagctccacagtgtaatcactaggtctgggcatcatcctgcgcccaaagnnatcctcccagacctcattctttcttgctctatcnnnntgtttcaatnnagacattnnnnn

SEQ ID NO: 417 - DNA, 285 bp, Canis familiaris
  misc_feature (1)..(285): n = a or c or g or t
aaatanctactgnnaatctnngtgtgnntctaaatnnnnnngaaaatagcatcatactctacattctgttttataaattgcttctttgaaaatttagaaacattgtgactcttggtttcagtatattttctttgtattaactcttattatttaaatattttcattagttcaaaaaattatcagtagtactgctcttataaaaatccaaaaattcatgagtatgaaaattaaaataattattctttaataacattttaaatgcaaacataaatatataagcatatt

SEQ ID NO: 418 - DNA, 45 bp, Canis familiaris
  misc_feature (1)..(45): n = a or c or g or t
cctggncagctgcaaaaactcacataatccacagcttttctggtt

SEQ ID NO: 419 - DNA, 513 bp, Canis familiaris
  misc_feature (1)..(513): n = a or c or g or t
ggaggtacttatcccttcactaaagagacagnnggagggaaattatgttggtnaagccactctttgccctttcagatgcctgtctggaatgttgcttcttatggatgtgtgttttaatctctggctgttacctactcaaccttggaactgttattctggacacctttttgagtgataaggcaaaatctcctggggccaggtgtatgggggcaggtaggataaagaaataagtagaaagtagaatgatggtaggggtttttgtttttgaagtaggctccatgcccagtgtggagcccaatgtagggcttgaactcgtgacatgagatcaagttggatgtctaactgactgagccacccagggtgctacaatggtaggtttttaaaaactgttattttatttttgtgaggactttacattttaaagtcttatactctatgtttaaacatctccctaaaaaaaaaagcctgtgctgnnnnacaatctagatgtgnnnnnaccactcttctataaag

SEQ ID NO: 420 - DNA, 511 bp, Canis familiaris
  misc_feature (1)..(511): n = a or c or g or t
tgnactgatgtttttaaaatgatacttataaatcataataaactgtnnaatccaacttctagctttttaggagttagtaaaattttaaaatagtgatttnntgctttttatcacagttgacttctggaaactacactgcagagcagaagggtgaactcattcttcatgcaattttggttcagtcaagtcttgttacattctttactgtcagatattttcagtcagtaaagcagaatgctgattttagtaaacatcattgcatttagagctgagagaagctctaagattcatgagataagacagatagcataggtgttttgtaggcatcgttagatgtggatcagtgaaaccccaggactgcactagagctgtgaagggtgttaggctgaagggtttcctatgggagatccgtgatgtaagtaaataaaaaatggtgtattggttcccgttggtttctccatcgcaagtaggtaaatatttaaaaagagcccctcagattctactagacttc

SEQ ID NO: 421 - DNA, 534 bp, Canis familiaris
attctaccctcagctattaatcccactgcataatgcttgggcagaacactctgaaaacaggctgtgtgggcttaaactctaactctgctatttccttgtctctataaaaggaatgctgatgctagcagtgggcttacagagttgtcatgaggcttaggaagtaaagtgtgtccagtgcccaatttactgggacatagccagccctcagaaaggggaacacatggtacctatccaggtgtcacatgtcacacctgaatataactgctctgtgcctttcttcaccatcaggctataagtctcctgagtacaatatttaggttctaacttatgcctataagcacagctaggccctcatctaaaaaataaaaagcggtgcctgggtggttcagttgggtgagtgtccaactcgtggttttggcttcatcattgcagcagcatgagattaagcccatcatcgggctctgcactcagaggggagtctgcttgagagtctctccctctccctctgcccctcccccactcacactcattctc

SEQ ID NO: 422 - DNA, 626 bp, Canis familiaris
  misc_feature (1)..(626): n = a or c or g or t
atttaatgcagcangtaaatcttaaaatgtccctttttatataacatgcatcttgttttgaatttgtgtcatttttaatacagattgcagccttttctgaattcttataaacaggtgtatatttggtattattctttttaattcttttcaacttataacactatacaagttatttctaaaatacagattaagttctgcatatttttaaatcacaagtccctgttatactgataatgttctcactaaccataatatgtaagaacattatttcttagccatagcatgcatacatctatccaagttccattctaatatcctttttctttataactcatgtgatagctgtctataaataaaaacaaatatgctttaacttttcagattttcattttgatttagccttgcaattttaattttcccatcccttttataaaatgtcttttttcatttctttcttaaagctcttgttataagcagtcacctcaaatctcataaagttttgtgtcttaaatatgccatgcattaaaatgtaataaatcttttgatgcattatgaattaatgtttaacctgtcagtgaaaaaaaatttctcctaggttaacttttgctttactcccttatttactt

SEQ ID NO: 423 - DNA, 517 bp, Canis familiaris
  misc_feature (1)..(517): n = a or c or g or t
caggacaacaatccacccacagatgtcnacagtctaactcccagagcctataaatatggcacttcactttggcaaaggggacttcacagatgtgattaagtttctttctccagatacagcaagctccctgaggctcataaggagacattttgccaaaagatacatggataccagctaatgtttggaaatgtaacaaagcattttcactgatatctcatctaatacacaacatcacgaaattaggcagcacagctaccattgcctctattctagaagtacgggatattagttcattacaatttttctcaccatgatctatgtgtcctgccactcctaaccaacagcctttccagtcaacttgccagtaatctgaagcctcatggatgatacatgcgtggtagtgctatgggaatgacaacgccaggaaggcctaagatactggcccttgcagcaagtggaagtgcacacatgaacaaagagctacatcttggctctgaatgtccttgcaatgaggtaa

SEQ ID NO: 424 - DNA, 586 bp, Canis familiaris
catacagagtagtgcaagaatataaaagaggacaaacaaaagacaaatgatccccaaattcactatctcaaaacaactgtcattcaccttacatgaatatcatgccaaatatcttggcgtaaatttttataaaagaatcttttatttttaaatggggattaagttttaagtcagtgtattggttatctattgctgcatagcaaatgaacccaaagcatagcagcttaaaacaattttatcttacacagtttcttaagggtcaggaaatgagagttactcagctgggtggttctggctctgggtctcccatgaggttgaaaactgccagctgggcagcagtcatctgaaggtttgactgggactggaggatccacttgtaagtggctgagcacacatggctgttgactggaggcttcagctgctcttggcgtgggcctctccatagggctacatatggcatagcatgtagcttcccccaaagcagctgacccaagagagagtaagagagtaagcaggaagccacagtgccttttacgacctcgtctctgactcatactaaatcacttctgccttgttctatttttag

SEQ ID NO: 425 - DNA, 600 bp, Canis familiaris
  misc_feature (1)..(600): n = a or c or g or t
ctactgaatnnngcatccttgtcattcctgagattagtgtcacaaatgnnnnnnnnnagagnnncgggaatgnnnaaaanggcagnncactaggagacattgatgctcaacatatacagggtgtgcagnaaacagccacagatcctagaactgagagcaaaggcttgccagagatcaggaggcaaaaatctgtaagaaaaatgatggaggatggaataaactcacctggcagagtgcagttttagcagagcactttctagctgccctccaaggaaatacggaattaacaggtcaagaagaactgatggagatatctgaagttgacgagggattttattccagggctgcatctagtactagccagtctggtttatcaaacagtagtaacaattctagtaacaagacaagtgtaggaaagactcagagacgctcagcaggaagcaaaactggaggaaaagaaaaagaaactacaggggagtcttgcaaagatcactttgcccgaaaacaaactcaaagagcccagagtgagaatcttgagcttctctctttgaagagactnnnnnnnaactaccagccaatctctccctaaaccttgtagcc

SEQ ID NO: 426 - DNA, 512 bp, Canis familiaris
ccgccccaggggctccggtgcccgctctcgtggctttctccgcggggctcacccagaagcctttccccagcgatgggggtgtcgtcctcttcaacaaagtgctggtcaacgatggagatgtgtacgaccccgacaccgggatcttcacggctccgtatgacgggcgttacctcatcacagccaccctgactcctgagagggatgcatacgtggaagccgtcctgtccgtctccaatgccagcgtggcccagctgcatacagccggctacaggagggagttcctggaataccaccggccccaagggggcctgcacacctgtgggggcccgggcgcattccacctcgtcgtgcacttgaaggcaggagatggcgtcaacattgtggtgactgggggccgcttggcccacacagactttgacgaaatgtactccacgtttagtggggttttcttgtatcctttcctctctcccctctagggtggccggggcgagctacggggaactagttgtgag

SEQ ID NO: 427 - DNA, 548 bp, Canis familiaris
  misc_feature (1)..(548): n = a or c or g or t
agcatgtgcncaaccatcagccatcatagtaacactcaggtcagtagaagatgannagaggcctttcgcnnnnngaatgcagtttgttttattgcgaacacttgcatacattcctannnnnatttactttggagcagttattgacaccacctgcatgctctggcaacaggaatgtggagtgcaaggctcttgctgggagtacaacgtgacatcatttcgttttgtctattttggtttggcggctggcctcaaatttgttggctttatttttatttttctggcctggtactccattaaatacaaggaggacgagctgcagaggcagaggtggagagaattccctctgagcactgtgagcgagatggtgggccacaccgacaacgccgataagtatgcccggactagatcttgtccagctttcagcagccagggggatttccatgaagagactggtctgcagaaagggatccaatacacagcacagacctatccggggnnnttccccgaagcaataagctcctccccagacccggggctnnaagaaagcc

SEQ ID NO: 428 - DNA, 649 bp, Canis familiaris
  misc_feature (1)..(649): n = a or c or g or t
ggggatgtaacagaaacttatgtgcagtcttgcttacaaggggtggttactgtgtttcatanntaatcttcccaatgtttgggatattaaaacacaaagcncttgtatgtcaagttcaaggtctttaagagtttcagattttttaaaagaattggatggatctgtgtatgttagaagcccattcattagacgtacagtggatacatggtgttaaactccaaatgagccataggaacgcactacatgaagtaatgcactgagtatgcaatgttatcactgtctttgaccgtgattttatgtttaaaaatgttataattacgcacatgggtgaattatgtttcctaggcactggtttatctctgtgaatcttgaataacttttttatatttgggttaatatgtcgaattatcctaaaagaaattgatttcacctcaccaaaccaccattaatgacttacatgtattatttgcacagggaaaactgaaattgaatattatcaataagctagatatgaaatcagttttatcagagtagggttcagaaatgggcattttatattcttgttcctgtataatgattttggtttttttgcagaattaactctaagaatcaccggctaccaaagtaaaactcgatatactgatttcca

SEQ ID NO: 429 - DNA, 527 bp, Canis familiaris
  misc_feature (1)..(527): n = a or c or g or t
gcggctccgggnnacttgccacgtggnnngcgactcgtgggactcatcccaggnnttcgcagattatgtcagcactatgtgatggggcccatgcttcacaggcccatgctcagtaccatcagcttgcaggggctgagacctgggttgtgacatgggctgcccagaactcccaaacaccagttctgtctttctctttctgccacctttttttctcttttttccttcttcccttgcactgaggtcctggaggccttgatgggactcagcaaaggcatttccacaactgggtgtagagcctttgggccccttaccccagtactctgggaacctgggccaggttacagtgctcatcagtcactggggacagctcccctccccctgcctgaggttcctgttttgcctcctcaagcagatacccaggctttagagaagtttaggagtgtccattaccaggcctcttctccactgggcttcttaccatgctgctcccaggcctcagtccctttcatacctttattcctttcttt

SEQ ID NO: 430 - DNA, 492 bp, Canis familiaris
  misc_feature (1)..(492): n = a or c or g or t
ggcacattccaccacgtnnnnccccctgcgttgggctgaacgtgggattacagagccactcagtctccggcaactctgtgctgtggtttctatccccctgagccctgtgctccttctagaactttattcaaagacagagaaagagagattggctgcctgtgcagggctgtgcatgcatggatcggaaggggggatgccataacctggagaggcccctgcagagaaaactgagtgaatcagctttctgtattggatgatggtcaagggctccttctcgccaccggattcagttcagctgttggtcattaccccaaatggcccgagacaagtgaggctgggatatacgcgttcagatttggtagcagaaaggagccccttgaccatcagattcagtctgagctctgccccttactgcctgtgacctataataaggtttttttaaacttctaagctccattttcggggcgcctgggtggctcagtggttgagcat

SEQ ID NO: 431 - DNA, 454 bp, Canis familiaris
  misc_feature (1)..(454): n = a or c or g or t
gtgctcattgnnnactctgtcgccatnnnnnngcccagnntccggcttcancgaatccagcacaaaggaaaagactnctcctttgccagcgtccgcgtggagacccccgtgctgctcgtggtgaacnnnaagcctcagggccccagcagtcaggccgcggccaccgtggcannnnggcnnnagtgcgagtgaccggcctggacgtggctgcgaggacgggccctgagcagctcggccggccgcagcaccccagggaccccgctggcggggtgctcgaggcccccagcctatnnnnncctctgctgccgcctcctgtgcccccnnnnnttcaggcaaggagtggtgtcggcggagcgtgggggtccctccgggaccgaggcccgggcccctgttcttgcctccttcccgggctcctgtgtatatatcatttcagtattnnnngctgagggagggg

SEQ ID NO: 432 - DNA, 594 bp, Canis familiaris
  misc_feature (1)..(594): n = a or c or g or t
anngcgcagagccccctgctcnnnctcagtagaggagnggtgnnnncggggtggggcagagcgggctaccctnnnngtcctcgccctccctgccnctcaggctgttgcaagtgcagctgctcattctcgagcagagaacgtggtggatggagagagaaggcccctccctgggtggtggatgtgaggctcctgagactgtgggggtgggggccacagggacgcctagctgcagcagggacacttgatgggccgagtgggagatccagtcccagcttctctggcacgcttggccttggccccggccccatcatggtcggccacgtgcctgggtcctttcagggcgccttgggaggggccgcagggcggtggcggtcgggagaacccatgtgtgctgcgatgggaggctgcagcttggtgtgcccctcaccccacagtccacgtagtttttacttggagactcgccagtgacccgaacccccatcgccagccccgtgtcatgctggtccccttctcagtactgtactggctccgcgcgccagggctggggtgtggggtgtgagtgtgagcgtggctgtgtacgtacnnnnnnncaac

SEQ ID NO: 433 - DNA, 587 bp, Canis familiaris
  misc_feature (1)..(587): n = a or c or g or t
taaatccattgaatattgaatttatattgttgtctatctaatttatnngctaaattttgtcacaagtgattttggtatttgtttgccttctgctacatcacctgcaaagtataggaaatcaggattttgttggctttaagaaaatacatggcatgttcactgtatattaaatacacctgtatgtaatgttttctcttagggcagaaaagtgtatatattgtattcagctttctgttgtattttatttgccatgcagatttgaacagaatagactctttattcatacannntataagaaatgaaaaacttgtaagaatattcattagttgaagtttctgggcaacatcattatatatatacttaacttgaatcagttgtcttagtctctgagtcaggtttagattacttattttgagaatccattgtttaaaattgtgggaaattaaaagaactgacctttttttatagaggatgggaagttgataggatgagtgtatttctggaagctcctccagtttattcctgtggagaatacccaggaataaatatttgcccattgctaaataagacatatgccgttttatatt

SEQ ID NO: 434 - DNA, 475 bp, Canis familiaris
  misc_feature (1)..(475): n = a or c or g or t
gtgacatgtactcagtgttnngcnntgctgnntnnnnnnannnngtgtctgacagnntcctcacttccagcaagnnnnagctgcagaaaatgaannagtctttagatgatgtgatggattatcttgttaacaacacacctctcaactggctggtatttgacttcactgccatagacttgacatctgagactgatgaaattccagatattatagctttggaagaggaggatggatcagatcattcacatgataatggccctgagttttctcagggcaaaatgttgaataattaaaaagaaaatactccttttggctgaatacacaacttgtgtcacattaaacttcatgcttgctcatgtgtttattcctgaggctttggggattaatctcttatgggtttatctttttttgtttgtttttggctacttggtcataattgtaatgaaactgattggtttaaacttttgtaagagaa

SEQ ID NO: 435 - DNA, 542 bp, Canis familiaris
  misc_feature (1)..(542): n = a or c or g or t
ctgggagcagaaaggaggctccaagacatcatcgacaattaagcagagcaccccatcnnnnaagagatacaagttcgtggnnactggacatgnnaagtatgagaaggtgctcgtggatgagggctcagtgccctaggcagtccttcctgctctcctgagactacaggtgcctctggcagcagcgtccacgtctgcaggggagagtccaccagacgcccaccccggccctgccatgagagccaccgtcatggcccgcttggcctgcccgcgcccctccatcacccaccacaatcatcgcccctctgctcatcaaccacctgacttctctcccctcccactctctaaccaccctgcctcccactctgcctggcatggcaggagcaggaaagggactatcactggtgattgacccaaggagccatcccgcagaggccaagggttcccaaggaaggcccaggctgagcagagagagaacacctgctgggggacctccaggtcaagagannnagacacccgtaccacnnnntcaggccctgcacccc

SEQ ID NO: 436 - DNA, 622 bp, Canis familiaris
ttttgcagtatagtgattttgttttgtagacatctctcatttgctatcaattatagcacattgctgaaataagcaaaatgacataccttgcctttgttaaaatgttgtgtggtttaacagaacgtgatagatgctactgtcatttttttctctgattcaccagtaacaaccaaacagggaaaccgtctagcattgaatagctattaatatattacttacagatatttcttccttcccttggaattctttcttattctttctgtggaaggaaggcaagtcagaaaaagatatgggaaatgtgcaatattcctacagatttagctctaaaggcatatttgataaccagtacatcttggcaacactatctaaattaaaaagaattatcataaaaacatataacagaaagaactagtaaaaagaaggtaatacaggcttgatgtgcaatactctttactgatcatagtttatgtatgtgattgtatgaatacacctaatttcagtaaaagaggtggaaggtttttcaaaaaaagaaacatccttatgggtaggtctgctattcttgatgaacatcctgttcctttaaaattctagttgatgttcaaacatgaagtgttaaatatag

SEQ ID NO: 437 - DNA, 154 bp, Canis familiaris
  misc_feature (1)..(154): n = a or c or g or t
agcgctcgggcgtgcccgnnnnnnnnnnnnnngaggtgctgaggcggctgtcngtctgcgnnannaccctcagtctggacctggccaccagcggggcctcaggcacggacggacaggggggcccaggtggaaagaaggaggccgagggcaggac

SEQ ID NO: 438 - DNA, 634 bp, Canis familiaris
  misc_feature (1)..(634): n = a or c or g or t
annacttaaactacttcacttnngtctcantacantatagactttgttnnnnncaagtcagnnagctgattttcttcagattaaattccctctgatataatgggattaatttggttcttatatgtaattgattagtgnctaatattttttacactagcccacttcctattttatcccccaaagataaactccaaaacactgcatgacaatgctctaaaacactgtgacttcagtgctccttttattttcctcagtctagctttcaggagaaaagtgttatgatttttttcttgaaattcccagtagaaacacacagaaaaagatagaatttcaaggtatcttgtgaagtcacttaagataggaaaaagttttgatgccatatgaatagaaacaccaccattttattatactgtcccttctgagtcaccaaaacagccctttgcatctgagcttcaggtttcgtggggtctgccaatgataaccacttagtcatgtcattgtatttatgctttttcattgtgtggatctgaagcttaaccactaatgtccatctgctgaattattcaaatgttatttattgcagctgttgatctcatttttgttcttttagtcctcaaatannnnnnntacctgt

SEQ ID NO: 439 - DNA, 413 bp, Canis familiaris
  misc_feature (1)..(413): n = a or c or g or t
ccccactngaaggnnaggnnnnnnnnnnnccaggtgcccttcctgaagtacagnncaaggtagaaaagaatgnacantaaatctagaggggaagacgatatctatatnnnaacctctatacatctgatggtaaaaatgtagctccacaggccatcagtggagagaatttgaaccacgtgggatgattagaggtaccaggtagatgtactcttagaaaaaaaaaggttatgggaatnnnaggnnnagttcttactgctgctnnnnnnnaaaagcaatcannntgtacctcgatcagctgtannnaaaannnnttcctgagaagaaccaggaaagnnnnnnnnnngtannnnnaaatcacnnncacattaactgctccctctgcatggtcagaaataaaagcattcaggagcacc

SEQ ID NO: 440 - DNA, 576 bp, Canis familiaris
  misc_feature (1)..(576): n = a or c or g or t
agttngagccccagctgagcctatggnacgtgtttggagcaagccagnaggtgaaggctttgctggtgcagggcatcttgctgctggatcacaggggtcttcggtgttcctgggaaggtctggctgtgctagactctctgttgctgaccctcctgcctcgactccaagacgcctggcagcagagagccccttctcttgtgcaaggagaatgaccaaacgttcctgtgtcccggtgccatgccagagcgcgagagcacacgcaccagcaggaggagcagcagagggagagggagaagcagactccccactgagcaaggagtccgatgcggtgctcaatcccaggaccctgaaatcatgacctgagctgaaggcagatgcctaacagactgagccacccaggcgcccttgttctttttttaaaaagcttccttcctttgtgttcatttttatgacactagatttttgagagtcaaggccattgtcttatagaatgtcccacgttctgggtgtatctgtttcctaatgactgggtttaggtaaaatatttttggcaagcatacatatagatattgtgta

SEQ ID NO: 441 - DNA, 623 bp, Canis familiaris
  misc_feature (1)..(623): n = a or c or g or t
catcccaccagcgaggcccagagcgaagnnnnnngaagcggggcagaggccaaggtgcagcccagccnngcagcccaggcgcccctgcaggnngcgtgcgctcagagctcaagaccaagcagcagattctgaaacagcggcgccgcgcgcagaagttgcgcttcctgcagcgtgggggcctgaagcagctctccgcccgcaaccggcgccgcgcccaggagctgcagcggggtgcctttggccggggtgccccctccaagaagggcaagatgaggaagaggatgtgagggccgtgacccggccctgtgactcctcgcatgctccaagggtcagggtggacatcgcagatgaccccgtgtaccaccgtgtgcctggccctgtgccaggtgctggcggcgctccctgcgggtgctgcagaccctaaagaagagcactgtgtggccacggagggcagcagccgcctctgcccaagacagagacggagacgtttaaacagtctttaagggctcccaggagtttgctggtgaggtcgaggcggccacacctgagttgctcctgcttccacgcatgctgggtggttcctgagctcagaggtggtggccacatggctctgagccctgagt

SEQ ID NO: 442 - DNA, 603 bp, Canis familiaris
  misc_feature (1)..(603): n = a or c or g or t
gtacatggcattcaatcagcttttgatgaagnnatgtcatactgtcgatatcatccttccaaagggtattggtggcacttcaaagatcatgaagagcaagataaagtcaaacctaaagccaaaaggaaagaagaaccaagctctatttttcagagacaacgtgtggatgctttactcctagaccttagacagaaatttccacccaaatttgtgcagcaaaagtctggagaaaagcctgtcccagtggatcagacaaaaaaagaggcagaacctataccagaaacggtaaaatctgaggagaaggagaccacaaagaacgtccaacagatagtgagcaccaaaggcccccctgaaaaacgaatgagacttcagtgagcaacggataggagagaagcttgcaagactcctcttgcccattattgatacctcattactgtgacaggctcttgaactttaaaattctttaccacaatccttccatttgtatgaatgtgtttgttctttaagaaaggatgtaaggatcctcatgcttttgatataaatattttttatgtatgttttgtannctttcccctactggacttgagcagcctccttacttaa

SEQ ID NO: 443 - DNA, 664 bp, Canis familiaris
  misc_feature (1)..(664): n = a or c or g or t
tatgtgccagctgacccagctcagtttgctgctcagatgnnngccatagcagcnagcgaagcagnacaacnnnnnccatactctaacatgtnnaccctttattgtctaactgatatgaatcaacagagtcgcccatcaccgcnncctgcacctgggcctttcccccaagcaaccctctatttatctaatcctaaggatccacagtttctgcagcagccaccgaaagttacttctccaacttacgtgatgatggatgacagcaagaagaccagtgccccaccttttattttagtaggctcgaatgttcaggaagcccaggattggaaacctcttcctggacatgctgttgtttctcagtcagatgccttgaagagatacgctgcaatacaagtacccattgctgttcctgcagatcagaaattccagaaacatagcccaaacccccagaatggtagtcctcctacaagtggacaagatgtccccagttttctttctgttgcattcccagtagatgtagccaaaaaaggttcaggatctggtgacaaacgtactccctttggaagttacggtattgctggagaaataaccgtgactactgcccatgttcgcagagcagaaacttaaaactgatgctgaaaccaccaccgtctgagccaacgttcaa

SEQ ID NO: 444 - DNA, 597 bp, Canis familiaris
gctactgactaatttcccttgaataccaattgtgtcattagggggaccttcttgccccacccctgctgatccccccacatttgccctgcagcagaacctggcagggcagaggcggtaatggaacttagactcctgtgcccaaagtcacaaccagcctctgggatctgccaacactcctcgacccagggactcccaagccactagcctgtttcccagggggcccttctggcctcacaccctggggaagagtgagcagttttttggggaagctcccacccccatccccgccactctcaacaccaagagttaggagttagagaggtggggggacactaaagcccgaagccgtggtttttggcccctggggctaaccctgatccatagggctacctgcacctctggattctggattcacagaccaagtccaagcccgttcttacgtcgccatcaaggcccccgaacggcattctcggtacttctgtttgtttttgtacattttattagaaaggactgtaaaatagccacttagacactttacctcttcagtatgcaaatgtaaataagttgtaatataggagatcttttgttttaatataa

SEQ ID NO: 445 - DNA, 562 bp, Canis familiaris
  misc_feature (1)..(562): n = a or c or g or t
aagaggaagaagaggaagaggaagaggaagaagaagaagaggaagaggaagaggaagannaggaagaatcngagccataagagaagtagtgggagaaagaagccaaatatgtcagacatctcaagcactgaatgggaatgagaggctcagggaagtaaagatgaagtgggaatgacagctccagtggctctgactagaaatacagtctataaaaatatactaatgtaggaggagggattcaccactcacttttttttaaactcattttagtatgtaaggttttatttatttaatatattaaatattctactactttttacttttccacatttcatttgaactcttcacatgcatctgtatacaacatcagtatctttgtctcgggccaatttttccattcaccagaaactcctttagtacataccatctttcgtctaagttgtttgacatatactaccatatttacctgcatttattactttcactatataagtaaccagtacctattatgaggacagctgtttatgtgatcatttaaatttgccttataaatgtatattca

SEQ ID NO: 446 - DNA, 654 bp, Canis familiaris
  misc_feature (1)..(654): n = a or c or g or t
ccacanggtccatccacatcacaaatnncaagatttcattgtttttcannnntgagtagtatttctctataaaatcagattgcttatgttttgttattgagttgtaggagttctttttataatttggatgttaaccccttaccagatttatgatttgcaatatattttcccattcagtaagttgcctttttgttaatggattcctttgccatgcagaagctttttagtttgatatagtttcattgtttattttggtttttattgccattgcctttggagtcagatctaaaaaaatacagccaagagtgatgtcaagaagcttattgcatatgttctcttctaggagctttatggtttctggtcttatattcaagtctttaatccattttgagttaatttttgtgatggtataagataatggtccagtttcattcttttccatgtggctgttcagttttcccaacaccatttattgaagagactgtcctttccccattgtgtgttcctgcctcctttgttgtaaattgagtcaatcatatatgcaagggtttatttctgggctctcttctgttctattgatctgtgtatctgtttttatgccaataccatactgttgattactatagctttgtaatannnnnnnaaatcagggag

SEQ ID NO: 447 - DNA, 659 bp, Canis familiaris
  misc_feature (1)..(659): n = a or c or g or t
gttttggagactnngctggggaactttttatnnaatgtangcattttcatgctattttactttgcttttaatttagttttcttaggatttnnnncaaaatcagctttagactttcaaatgaacttgaatgggggagaaaatcaatttgaacctgaggatattcttttgccttacatggtcttttctttgacattctgtactttattcttggtcatggattatttatgtaccaaatattatactttaaacattttcatattctctgatctgcagaattatttatgttcaaattttggttgggaatcctatttcctacttaagctcaggaccttataaacctctgaattgagtgcctttgagttatacatgctaatagaaatttcatagcaaatgtaaataaggtcggaggatctcatatagaagattataataaagtattaatgtaaaaatagaacttatttttatcaaaaatggatgtacacttgtcataatttatgtttgctttttgtgtttattgctcttttgcaaataaccatgctcatcttctttccagtcagagttaagctttttgtggttaatgtatatttttagtatgtttttaaaaacgggaatcatttttatgtatctgtacaaataataaatacccatttggaaaaaga

SEQ ID NO: 448 - DNA, 486 bp, Canis familiaris
gatcctctaagagaggtttcttacaacagtgattccagatacagtgtataggccacccctggctgcaagggagaccagcaaatgccattttctaatatgggaggattgcttcctggaataaaatcagtgttgtaagatatgaatgaagaatggatattgggtgacagactcaagctcaccagcctaaggagtacagaccattttctttggccatggaagttggaggattctgcggagagaggagaggggattgggtcaaggagatgaaatggcagcgtatgtggggagcaagtggagagaggagagcatcgggcaatgctgtgtggatgtgcatagaaaggaaagtggacaaacacactccaaccattcacagtcacctgggaaactgaggcagctggatggcactgttttatgaaatgccctccccgcagcagttgaggtaacagacctgacatttaactgaatgtctttggatagaatatgaag

SEQ ID NO: 449 - DNA, 633 bp, Canis familiaris
  misc_feature (1)..(633): n = a or c or g or t
cagcagaggggaccagannatgcgtttcgatggtccatggactgacctggtcacaccgctgtgggttgtggtgacgtggctcactgtctgtgcggcgtatttatttatttaagcacctggggagttttggtaataatgagggtgtctgtgaatgagcccattggctctcaggctccctggggcccccaagcaagtcaaccaggtccacagatttcaggtcagggaacagaccaagcgtgtgtgtgtgtgtgtgtgtgtgtcccgatgtccctgaggcatggttgggcagcacagagggtccagagtgaccaccagccagagtgtgtgccaaacagccatgtctgggctcggggcgtacgtactcctgcccgccgtggttccacagcagcaaagtggcaaacccacctccctggcacacgggtcacatgctgtgttgggcagaggtgtgtccccaggacccccatgaggtacagcacgttcacacgggctggagaagagccaccacatagcccctgtttgcacggcgtaggcggctgcagagtgagggtgcagctgcgtccgtgcacccctttccacacgactgcgtgggaccgagtgcagctgatcaaagtgggttccacggtggttttatag

SEQ ID NO: 450 - DNA, 551 bp, Canis familiaris
  misc_feature (1)..(551): n = a or c or g or t
catcagagaccnntgagctgtcgctgtctgcnnagacactgggctcctccacancctccaacgtcaacttcntagttggcccagaggaggcccccgaagaagccgccaagacgcaggagttgagcgccaaggacagaggctgtggcgcgcgagccgccttccctgagggtttccaccccaggcgctccagccagggnngcacttggatgcccgtctgctcctcgcccatcgtcaagaaccccttcatgtcgccgctgctggcgtctgacagcatgctacagagcctgccgcccgtgcacattgtggcgtgcgcgctggaccccatgctggacgactcggtcatgttcgcgcggcggctgcgcggcctgggcaagccggtgacgctgcgcgtggtggaggacctgccgcacggcttcctgagcctggccgcgctgtgccgggagacgcgacacgccgccgcgctgtgcgtggagcgcatccgtctggtcctcacccagcccgccgcgccctcctcaccgcccctctgagccccaagcccgagccgcgccgcg

SEQ ID NO: 451 - DNA, 514 bp, Canis familiaris
  misc_feature (1)..(514): n = a or c or g or t
cctgtgccggctgcaagtgagaaaggctgtcnnnnnncaccgcataaaactcctagacctattgccgctcccgggcaggctgattaggtacctgaagtacgagaacactcagtagccaaggctttgtnnaggagcggctcctcagactgtttcactaaagcctcaggacggcagtgtccccaaatccagggggacctggggacagaccgagcctgtaggctgcctccctgtccagctggggcagctgccgtgacctcgccgggtctctgggccagagctttgcccggaccagagaacagaatgtgtccagtaggagaaaaaccgtgtttgttttcaaactgctgagtggatcccagaccttctctgccattgggaacagcagagcctccattcctggggctgggagagggggcagggcagaccttggggtggcctggggagggtgggagccagcagggaagccccgaccccaacgctttcagggatgagtttgcctttccagttcaacccggct

SEQ ID NO: 452 - DNA, 449 bp, Canis familiaris
  misc_feature (1)..(449): n = a or c or g or t
tttaaaaaaaaaaaaatgtnnnnnnttgcctnnnattgnnnncttnnnnngtagatnnnnnaaaaannnnnnnnttnnnngcttcnnntgtcctttctttatgagtttgaccttctccaaaggctgtgnnangaaggnagcgtttgctcccgtgcnannnanancaagatcccagaggctggaacaggnanctgagattttaaagcctctgatctccaggatctttgctnctaaatgtcnnncagtgagtaannnnngtgtgnagagggaaagcctgaaggcccagagagagaaagnaaatgttgtccttgcgggtaacnnnatgggaaatttgcgngcgggtgannnaggggccattctccttgcaaaacagctcagaagctgaggactgattccagattccagaaagatattgattcctttttaatgcaattcttcaattatccact

SEQ ID NO: 453 - DNA, 688 bp, Canis familiaris
  misc_feature (1)..(688): n = a or c or g or t
cnctgatatgaaaggaccataacatccagcctcacaaaggcttttctgtttgcttctactgattaaaaagaaagaaaatactaatgnnagcatcattaagtcacctgctaagaatatgagaaaggaaagagatcctgcccattttacagatggaaaaacctaagtataaggtgtagtatctttcctttaaccataatcaaggctgggctggatttagaacctggctggtcacctaagcctacaaatccagctccctctgatagatcatatgaaattaattaaaagggctaagggagatatgccataaggtctgctgaagtgtttctgattcagtttcctcctccaacaacaattccttcctttgaaataacgacaatgaggttgggtgggcacccctgggagcttgagtagagagcagaacaaaaagcatcctcctaacctgtcacagaatggcccccaggtcttccacctacacagctgttcctggagtcagagaatcccacttgcccttcaggactgatctctttgttattttcttaacattagaccttacagttattcgtatgtaggcactatcttccactagggcaggtgtttccagggaactatttcagggggtccacttattcacacactcatcgggcatctacaaactaagtaaattgtacccatctatgtactattactt

SEQ ID NO: 454 - DNA, 583 bp, Canis familiaris
  misc_feature (1)..(583): n = a or c or g or t
taaactaaaaaataaagctnntatacacacatcttcacattctgtcttctccctatgaatcaaaaaagaaagatngacaattttttattctataattatagaaggttattctgaatttgaactaagttaaaagtaagacaaacatctactatattaaaaatcctatgtgacattatagggaatcaagtctaactcagcactcatgtcagccctcctggccacccagggctaagagatcactatcttagtgtactagttgagctactctggtctaatcaccctgctggtaaacatagtcactctgtaccataaaggatttttacttttattaaattagcaaataccctatttatatcaaaggtatatgtaacatatgtacagtaaaaaagaataaagaaatgaacatttgtagaactgccccccacaaataaccagattaagaaaaggaacattaccggtatctttaaatcccccatgtaccannnnnngtgtgcctccaccttcagccagaggtacttttttgaatctcttgtgaatcttttctcttatagttgttctacacatggctgtattccttatgtgt

SEQ ID NO: 455 - DNA, 668 bp, Canis familiaris
  misc_feature (1)..(668): n = a or c or g or t
gaantnctacacatgatagaatgnngtgttaaaggtnnnagncttttaatacattatctttacaaagtggttttagtgtgaaataaagatangaaacatttttttaaaaggcattgttctttacagtccatctcatttcttatgaaataaagtgattctatttaaatgtagttccactgtcattcctggaaaatgtgctcttcagttcatagcaccagtaaaaaaaagggggggggggagttcacggggggaaatggttgaggcaaacttttcaactgattttgtcaagccgtctcacatgttcttgtttcccatgctacattattttcaaaaaacccaaaccaaaaaacctgatacacactcgaatcttaaaggagaaaactgggtaataaaggtcatttgttaaagaactgaacaactggaataggcttgtttttaagagtgccagtatgagtcacaacttgaaacatttctagctaagtatcttggagttccaactgatgtcacaagtagttgagtaagcaaggtaatgcaggggtgatgtaaggattgttagcctatataatattcaagattactttaaaatttcaatgttttatcctgatttttaagacttaagaggtggtctgtaatggattcaaatgttcatttgtagtataatgaaatgt

SEQ ID NO: 456 - DNA, 94 bp, Canis familiaris
  misc_feature (1)..(94): n = a or c or g or t
tgggaaaaacannaatgctgaaaaacactggagaccacagcccagggacacaggcnnnctgaaaggctgagannnnctacagctacagcaaaca

SEQ ID NO: 457 - DNA, 180 bp, Canis familiaris
acccaggttggcatctggcccagccaagggggccgggcccctgggcctgggtacagctccaggccaacaaaggggccaggggctttggggagagttgggagggtcccggccagggggctggagctggaagctgagcccccgtgagtggcgacccgtccggtccctggcaggacacatggg

SEQ ID NO: 458 - DNA, 132 bp, Canis familiaris
tgtgtagctgtgaacttagcagcatgactgagatgccaatataatcactgaaagacgaaattggtctgtttaaaagcagagttgaaaaaaaataaataaataaataaataaaagcagagttgttcacatgct

SEQ ID NO: 459 - DNA, 518 bp, Canis familiaris
  misc_feature (1)..(518): n = a or c or g or t
cnntatgctctgtcaacctcaggggcactcgggtcacaccaagcacagtcaggtcagcatcnnnnttcccggtctcttggagtcagtacggcttgcaagtttcagtttacaaaaggggagcacgtgttggccaagctcctgtttaggatggacattagggacaccaagggtactgggcttgtgcctcggtggctgtgggtggcagagccaggtgtggcgcctgggcagagagggcttcttaccttggccaagccccagcggggcctgggtcttttgggaaccagcggctcgactccccatggtgtgccctgcccccacagctctgtcatcagcagctgcccaggcctgctctatctcaacctggagtcctgccgctgccttcctcggggcctgaagcgggcctaccgaggccaggaggaagtccagtggtgcctggagcagctgctcaccagcctcccctcctccagctaggcagctccagacccccagccctcaggtnnnnagcggtgcctgccacc

SEQ ID NO: 460 - DNA, 528 bp, Canis familiaris
  misc_feature (1)..(528): n = a or c or g or t
atattaaattacattgtgaagaagactgcttannncagagtgaagataaaacggnngaaaagcactagcttgatatttaaaaattaaaatgaccaaaaccctccaactttgaagctgaagaaggtaaacctctccgttgtgttgcattacaacttgtggaatcnnncaagtgcatagactgnnnactttctatttatcagaccgtnnngctgacagagtgcttcacatgggggagnnnagctctttacctgttttctttccctgatttaagtgnnnnagaaacaattctcctttgttctcctcagctgcagttgaacaactttaacagggtnntggcatttgctttcctttataaaacatgcncagcaaactgcaccagttgactacagtttggtaaattgttatgttnncaattatgacatctgcaatgttttataaagcaactaatttaataaaatcactattgtgaggacttaaaatttgtgttaactcccannnggtatttttggagaatatagnacacggctc

SEQ ID NO: 461 - DNA, 560 bp, Canis familiaris
  misc_feature (1)..(560): n = a or c or g or t
acagaggtaatacatgagaaaatcagcgtcattccagagaactgagtctccaaggttcacttcataatgcaaattggtcacatgactgcggaatcattttgaagttatcagattttctgggctgtgggaaaaaaggatattgttttattattcgagatcttcctgtaccgtttaaatttttttaccatatgtatattttctgtaaaataccagggaacaaaacaaaacgcgaccccttctgtcagctgcatggaggagcctggcacattccaggcacaaatccctgtccctctgttaacctcatcatgagtggtggcagcaagtgatgtgtgggccctgcttgtcaacacacgtgtagctttttaaaaactcagttggggttaaaatagaaaatcttttaagtactggtgttctnnttcctttgagtaaattcctgtcaaagtcattcagaaattctagcttgtagaacttattcttatttataaatcatagaagacgtatcatgatttatactttagaatttttcattctggagttttagagtgccttttcaaagtttt

SEQ ID NO: 462 - DNA, 416 bp, Canis familiaris
  misc_feature (1)..(416): n = a or c or g or t
ccggcnnnaactcccaaatgcctccctggatctgtcagactcgnnnnagacgtggggtagtcntcctgcctaatcatccccaaggagagaggggnnnagnnggccacctttgcattggagggaaaaggctggcacagcaaggagacctacacatacatttctggtagtggctggacagagagggcctggaccccaacttctcaggaagacaagaccccctccttggatcatgcggcctgacatctctccagnnnnctcccacaagcagtcaccagaatagaaaaagctgaaaccacacccaccaacattaaagatggggcccaggatgttggggtgaggctgtggggtgaaggtgaaaggtggtggtgtgggcaaaagagaccaggtatggggaggtcagggtnnnnnnatgccag

SEQ ID NO: 463 - DNA, 402 bp, Canis familiaris
  misc_feature (1)..(402): n = a or c or g or t
caagtcctcattgacagcatgagnntgaagaacacaccgtcattnnnnnntgcctgcaataagcaagacattacaatggcaaaatccgcaaagttaattcagcnnnagcttgagaaagaactcaacactttacgggtcactcgttctgcggcccccagcacactggacagttccagcactgcccctgctcagctaggaaagaaaggcaaagaatttgagttctcacaattgcccctcaaagtggagtttctggagtgcagcgccaagggcggaagaggggacactggctccgctgacatccaggacctggagaagtggctggctaaaatcgcctgaggggcagaggcaaagcgcaggacatganaaagggtgtggtagtctggagttgataaagaaggggta

SEQ ID NO: 464 - DNA, 576 bp, Canis familiaris
  misc_feature (1)..(576): n = a or c or g or t
ctccaaaagacnntgcgtgacagcnnnnnngtgcagagggcccgcaccacacgctgcctacagctgctggcccaggagatccgggacagcaagaagttcntgtgngannagctggagctggtgcgggaggaggtgaccttcatctatcagaagctccaggctcaggaggaggagatcacagagaacctgatgaacatccagaagatgcagaagacacaggtgaagtgccgcaaggtcctgaccaagatgaagcagcaggggtatgagacatccaactggccggagactgaggagatgccaccaggaggcagtggctcctggagggatgacctccaaaaggaactgagtgacatatggtccgctgtacacttgctgcagaactcctttgatggcttcaccatgtccacagggggctgccccagggcctcgaacctcaggggctacaaggggcaccgaagcttgtgtcctcagctcccctcgtgggactcagactcagactcagaccaggacccatcccaaccaccattcaacaagagccgctccttcccacctgcctgagcagcggggactgctctc

SEQ ID NO: 465 - DNA, 368 bp, Canis familiaris
  misc_feature (1)..(368): n = a or c or g or t
atgctgttaggtgatgaaaaacagagtattgtcaaagcnannnntcttgaantagncaaactngcacaaaaaaatnntgcggtacagtttttatatcagaaactgataggttggctaaatgaagatccaaggaaggatgctggnnncttggtcgacattctgtacagtgccctccattgctgtgannntaatatggaaagaaaatatgtcttggatgatctcatcgagggggatctgaaatggagttctattcttcaggtcattgaaaagattgctttgaaatgaaccaagttgcaaattcctttcttgtcagcccttaaagcaaaagaagctctggaaacatggatcagcatgcnnnnnggggtgga

SEQ ID NO: 466 - DNA, 648 bp, Canis familiaris
  misc_feature (1)..(648): n = a or c or g or t
tgaaggnnntagaaagtggnncaaccactttgaaaaatcattgggcagtttcttaaataattaaatatacatcgttatgtattctgacaattttgccattagctatgtagccaagggtcatgaaagcatatggccaaacaaagattcataaaagagtattcatagcagctttctttataattgccaagaagtagaaataaatctaaatgtgtattaatatgtgaatggataatgtgtattaataatgtgtattaatctaaatgtgtattaatagatgaaggtggtatatataaataatggaacattactattctgcaattaaagagaattaattattaggatataaaatcaacatagattaatctgaaaataattatgctgaatgaaagacatcacaggaaaagagtacatataacatgattccatttttcataaaattctaaaaaaatgaaagtaatctatagtgacatgaagccatttagcagtttcttgggataagaatgaagcatggagggaagacagtgagggattgccaaggagcatgtggaaacttttggggataatgtgtatattagttatctttattgtggtgatggttttatgagtatatatgtatgtcaaaatttaagaaattttatattttgaata

SEQ ID NO: 467 - DNA, 623 bp, Canis familiaris
  misc_feature (1)..(623): n = a or c or g or t
gaagacagcaacgtgaatgacttnnaagacagctatnnacaacagtngacatggtaccagaggaaatacttagaatggacgggctatacggctttctttgttggcatcatggtccagcaaatagcagatctaatcatcaggaaaaccaggangaactccatcttccagcagggtctcttcagaaataaagtcatctgggtgnnaattgcctcacagatcatcattgcattaatcctgtcctatggacttnnaagtatcacagccctgaatttcacaatgctccggcctcagtattggtttgtggctgtgccatatgccattctgatttgggtgtatgatgaggtgcgaaaacttttcatcagactctaccctggaagttggtgggaaaagaacatgtattattaggaccacnttacttcccaggcctcccagttgcacattgggaatgtctttcatcttctggctgcatctgagagactgctacagtagagacatatcaaaatgcagaaagagaaggcagagaatagtatgaaagatactcactgagcttttgtactttcaaanaaattcaattgnnnatatatgatttgcatctctctattcatctccttgtttaaaaatat

SEQ ID NO: 468 - DNA, 640 bp, Canis familiaris
  misc_feature (1)..(640): n = a or c or g or t
ttatctgttgcttcatgcnngnnnagctgcatttcatgcaagaattctacaaactaataagattctngtcttctactttttacgatgtctcctggcttttgtgagctgtatctgtgaactttacttttataaggccgtgtgtaagaagtttgggctgcatgtgagtcgaatgatgctagccttcttggttcttagcactggcatgttttgctcatcatcagcattccttcctagcagtttctgcatgtacactacgttggtagccatgactggctggtatatggacaagacttctgttgctgtgctgggagtcgccgctggggctatcttaggctggccgttcagtgctgcacttgggtgcctgtggtggtcattgacagctactactatgggaagctggtggttgcaccactgaacattgtcttatacaatgtctttactcctcatggacctgatctttatgattgacatcagtaaatgccattatctagtggatttggacaccatgggagaaacaccccgggagccgaaatactcatcaaacagagaagaatggatcagtttggcctacagaccattccttgatgcctctannnnttttacatcaagtctaagggaacagatttctccttcctatgcc

SEQ ID NO: 469 - DNA, 252 bp, Canis familiaris
  misc_feature (1)..(252): n = a or c or g or t
gaaattaannngntgagatcacaagttgtttaataagcacannnatnnngtgaaaaaccnnnnnatgagctttaaataatgtnnnnnttcaagnggannnnnnngcagatttnngtcannnnngnnnnnntnctcctgatcatcccaatattttaattgcatcaggggagcttccactggatcagcatnnctttcacgcannncacggtgnnnttgcnnnaaaggctcaaaatgtgaaaacttnnnnngaat

SEQ ID NO: 470 - DNA, 530 bp, Canis familiaris
  misc_feature (1)..(530): n = a or c or g or t
catcacattcctngcaaacgtattatatcaccgaggnggcagnnaatttccctaccacagtctgagagctcccaggctaccccaaggtcctgagaatccctgtaccattttacccacgtcatgtatcacaatagcagagttctgctcctgcgcacactccagcatgcatccaccaccatggctttctaatatgagtggccatttgtttgcttgctcagttcttagtggcacgccttcttttgggaacagccaaagggattccagggctaaattctttcactctctctctccctttgctataatactaagcatgaggattctatagcttttcatgatggaactcagtntatgagctgggactcaggtgactgtgcatttaagctacttgttgagacccagacctggagagtggacatttcatctctgtgaagcactttttaacaaatctaagaaaaagccacaggaaagacttgaaagtggcccctttaatttgctgacttggagaaagctaggtcaagggttcattatgg

SEQ ID NO: 471 - DNA, 570 bp, Canis familiaris
  misc_feature (1)..(570): n = a or c or g or t
gtgtgccattgtggtcaaagagagannnnnncangacaagatgaagccaaaagaagacacagagctnnaggcccaggtccgcgtcccatcagtcattagcttaatgagcattgtgtgttgccctgaggtagccaagtcctgtggccatgaactactctctttgccttccccttacaattacctaaaccctctagactcagcctggtcttctctgaaatggtttatcatcaataacagaaaggagttttgcttgcagtacattgacaatgtctattcttaccagtatatacttctcagcgatttaattagcaaggggattggaaggataaactcaagcaaatggaaaatactaaccaacaaagtacgtagatgggaaaactactatcttggcaaattttcttaagggtgactcctctaacaagcagttgggaccatgctatgggcatagtctttaccaactctgctgggctcgactctggacccaaagatactccaacagcggcctcatggggatgctgtgaggaccaaggtttctaaggctgctggcaaagtgctggaaaaatgctgtaa

SEQ ID NO: 472 - DNA, 383 bp, Canis familiaris
  misc_feature (1)..(383): n = a or c or g or t
ctgtgcgaannncgtgagcctgtggagcaggatggggcatgaggaggagcctgcctgcccccaccccctgggccacagagcatagttcctgggatacctggccttctaccctggagagaggaacccttgccctggcccttcctccagccatacnnttcctcgcagggcagggagtctgtgtggccagggactctgatcagacccacatacagagtgtcctaccgcacggtgnnnnnnntggnnnnnnnntgctgccctggctnnnccgggagcaactgtgaggaggaatgcatgaactgtacccggctcagcgacatgagtgagcggctaaccacgctggaggccaaggctgagcaccaacaagcctatggaggaggagctgc

SEQ ID NO: 473 - DNA, 659 bp, Canis familiaris
  misc_feature (1)..(659): n = a or c or g or t
gtgctactgaaatgacaaaactgccantggctgtntagtctaatctctagccagcttattctgggttcctggcaaagatgtaggggttgtgtatgtacaatgaagcaaattctaacaatgacgttttggtctatattgcaaataaattactgaacttataaaaagaaacaaagattctcacctaattagtattattctggctttcaaacattttagatgtttaatttgcaaaatgtgatataattcttgtaagatatttaaaagattaaaaatcctcattaatattctactgaaataattcttcattaaatttttaaaaccccagcagagagctgagtgtaagtttaactttgattttttaatgtgattaactgtttttgctacctcactgagtcattgcaattaaaggcaaaagtgaatacaaactctgcttcaaaactgtaaatatagttcttgctcttgaaattgcatgtggttaatcaatttacctgtatgtcttttattggaagcatttgtttttccagagtatttctattttaaaatattattttataattttcataggcaaacacaactagtttaaagcccattttgaatgtgccttgctcattctaaaactactatgataactagtagacnnnngtaaaaaacaaatggta

SEQ ID NO: 474 - DNA, 711 bp, Canis familiaris
  misc_feature (1)..(711): n = a or c or g or t
acttccacgtccattgctgacaagtnnnactttatgcatcctggaatgggnnnncggggatgtgggacttgtactaaaggcgcagtggtcctggacaaattgggacagttgctcaccctaattctgctcctctgcagggtgaagttcttcacacgggaacctggatgcgatgcacctccctagggcctcctggctgaagaagcctatttggtgactgctgctttgctgtttaatttgttttaggacaggacggtgagactgtggaatattgaagaaattgaccaaattcctatggtaatcaagtacaaaaaggccctgggcttaaaggtgaaacagtgtgaagtatgtgagaagcctttctccacctacgaaagtgacatcttttctgaaacagtcaccaaatgtgtgttctgccgaatgagcgaggacttgtcagcagaagccttgtcagcagaagccttgtcatcatcctcaggaggggaagatatacggtcaagggagtgcagcctgggcacagacgactgacggccattgggcctgctggctggcttgagtaaggtgacctgtcacgcagggacctccggctaaggcccccgccctggccccggaggtgggcggtcacaccggggcacagcgtcagctccacagcgcgccggggaatcacacacctnnnnntagttttcacacagaataaatatctagattcctnnn

SEQ ID NO: 475 - DNA, 497 bp, Canis familiaris
tacagctgctgctgctctgtgcctttggcatgagcaccctgccctacatgaagatgatcttccctctcatcatgattgccatgatccctatccgctacaacctgctgccccgaatcattgaagccaaatatctggatgccatggatgctgagcactaaggccctacctggaagggccagacatattctattcatctgtccccctggctcttcccaggctgattctggccatgtggggagaggtctgggtgtcttttggggtgttgctctctgccgcaccccctcccagctgctccaacaggcctagggcatctaggcatgggggagggcgggttcccacagtatgtgcctatcccagtccccattagcctttcacttggatctctaacactgctcaggacaacttctgtccagaatgggactaagcaggacggattttcttttgataaaagagtcagatgtctgaaagagaaaccatttccttgattgtgtaaggaa

SEQ ID NO: 476 - DNA, 537 bp, Canis familiaris
gtaatccgttagaggctactgcagtgttacctgtgcagatacagcttacctcttctgttaacttgaacttggaaaaaaaacagtgctctaccgattgatgatgctgcggtgtcagggaaaacatctctcatttgtacacaagaagttgaaaagttgaatgaggcttttgacattttgctagcttttttcatcttagcttgtgttttaatcatttttttgatctacaaagttgttcagtttaaacaaaaactaaaggcaccagaaaactcaggggaaaatagactcgaatactacagcttttatcagtcagcaaggtataatgtaactgcctcagtttgtaacgcttccccaaattctttagaaagccctggtttggagcagattcgacttcacaagcaaattgttcctgaaagtgaggcgcaggtgattctctttgaacattctgctttataattcaacttaatattagttacaggaaaacttcagtgccatggacatgaattaaactgaagccactttatagaattataaacttta

SEQ ID NO: 477 - DNA, 655 bp, Canis familiaris
  misc_feature (1)..(655): n = a or c or g or t
ctaccagtcaggtaccaggagnctgaaagaatacactctcatnnagctgctcgtgatgcacatnnnngagccttgttttgactnnnttcgaaccaagcagacccttgggtaccatgtttaccctacatgtaggaacacatctgggatcctaggattctctgtcaccgtggggactcaggcaactaaatacaattctgaaattgttgataagaagatagaagagtttctttcaagctttgaggagaagatagagaacctcactgaggatgccttcaacacccaggtcacagctctcatcaagctgaaggaatgtgaggatacccaccttggggaggaggtggacaggaactggaacgaagtggtgacacagcagtatctctttgaccgccttgcccatgagattgaagcactgaagtcattctcaaaatctgacctcgtcagctggttcaaggctcacagaggaccaggaagtaaaatgctcagcgttcacgtcgttggatttgggaagtatgagccagaagaggacggctccccttcgggtgaggagtcccactcttgtgaagtgatgcagctaacctacctgccgacttcccccttgctggtgggctccaccattcccattaccgacatcagggctttcacatcgacacttagc

SEQ ID NO: 478 - DNA, 561 bp, Canis familiaris
  misc_feature (1)..(561): n = a or c or g or t
tcccagtaaacctaccaaaaatacatcagtgtatgtgaaaagaaaaaccatcaattctgcagtggccatnngctggtctgtgtccccccaggagttgtacagtgaaatgctgagccccagtgcctcagagtgtgaactatattgggggagagagtgttttcagaggcaagggagttaaaatgaggccctcgcccagtcttgctggtgtccctgaggatgaggacacagaccacctccaccagaacccacccccactgacacctcgccctgggacttcaaggctccagcgctgtaggaggaggggcatatgttaagcccccagtgtgcggggttttgttccagaaccctggagaaacaccacagtggctcttctctctcctcaggcaggctccctgagaaacaaccacaacatcacctttgctagggatcgtgtcaaggcgagggattcaccaaaggacacaaaagatactaagtggaggtgcctgggggccctgttggttgaacatccaatccttgatctccgctcaggtgtccgtctcagcggtgtgagttcaagccccg

SEQ ID NO: 479 - DNA, 550 bp, Canis familiaris
  misc_feature (1)..(550): n = a or c or g or t
acactgaacttcagctttgaggagctgaatacacttggnnttgatgaaggtgctccacgtcacagtcatctaagttggcaggaagaaaatgcggcccttgagatagatacatcttcagaggatccattttaaactaaggcaacaagggctctagatcttagtaccctgcccgtagaccatttctcgtgacaattcggttagcttctcacggtcggcttcctcaccaaacctaagggggtaaagaagatactacctaccactcagtaatcctgctacgcagtcgctgcagaagagatttgttcacctctaccagttttctttgttcctaatagctgtaaaacttagttttaatgaagttttccgcttatgaaattctagataaaagcccaaatgtatagcaaaaagcatgtaaatgaactcgacataacctgacatttcgtatcttctagcatcttcttggtcaaatagctaatacaaagttagattgttattttcaaaattatagctcctggcacttgcacgtctttagttgattctgagaattcataca

SEQ ID NO: 480 - DNA, 197 bp, Canis familiaris
  misc_feature (1)..(197): n = a or c or g or t
ccntgtccactcccccctcccctttcccattttcttgaaaaaactagggccttttgaccaaatggtcagtagagactcggaaaataattcatcatctttctgagtctttgatgttattcaaactgtgttctcatcagtatttgttcacaaacatattaaaggtaaccaaaatgttcaaatctgactgtttctaataa

SEQ ID NO: 481 - DNA, 571 bp, Canis familiaris
  misc_feature (1)..(571): n = a or c or g or t
cctggcgcagtggcccacngcctcccccgccgnnngccaccgcntcgcacaagtcgnngagccccggtggcaggcgggggtgtnnnntaatccaggacgtccccggaaccgggacgtgtggcttgcattcctgtctttcatcttctccccggaagctgcgggatctgtgtcagcccgagggctcttcacagaagcttcgtggagaaccgtgttggctccgcagacagacggcgtggcccatcgggtgcccgtgagcgggactgggaggcgctggttctcctcaggaggaagagttcccgcctggcctgccagcaagtcttcagcccttcagcctggggacagagctgtcccccaccccccaaggctgtccgagctgcttaccgagccctcagtgacgtcatcgccacgtcgacctgcaaggagggggtcgtcaggaaggcactgagcccccctttgcccctggggtgcgggcgccgcgggtctgggctctgtgtgcttctctcctcacggtgtctactaacgaccaacatttgctaatgtaaataatagtaaattattgagaatcctaatt

SEQ ID NO: 482 - DNA, 596 bp, Canis familiaris
  misc_feature (1)..(596): n = a or c or g or t
cgannaccaaattgaacannnnatcaaagagnnnnnnnaccannnnagctctcannagctggcctcggtaagcaaaagactccctgtggggcccccaaagaatgatgataccccaaacagacagtacttggatgaagatctgttaatgaaagtgctggaatacctcaaccaagaaaaggcagaaaagggaagggagcatattgctaagagagcaatggaaaatatgtaagagttttcatcaattgccctactttcttcctccaaccccaagaaaaccccaacatttctctttagtgtgttgacttctatcctgttaacactgtaatatctttaaatgatgtacaggcagatgattccatttcactggggtacctgcttcctttattctgacctgttctcttgtgtatggatatgtgtcaatgttatgacttctggatataaaaaattaatcatatcccttattcaagaaagatatctgtgatagtgtttaatagtgtatttaatggccgtggcattgttgatgctcacatatgataaagagtgtcctatgattctcttgacagtttttaatnnnnattgaattattttgttactgt

SEQ ID NO: 483 - DNA, 558 bp, Canis familiaris
  misc_feature (1)..(558): n = a or c or g or t
gccgccacggctttgcaagaactggactgggggcacgtgggagcttatgnnnagggcgtttcctccttgctccccggggctgcgggggaggggagtcctctcctctttccctctgatccgttcctcctctctgtgtcaccttcttccaccccccgacccatctcctcatttctgtctgtccctctctnnncctgcgatctctcatcctctgctctttacttggggtcagaactgggaggattgtagaggaaggcgaggctctaggtgactggtggcaccaggctcccaggtgatcccctcccaaccctcccctgtgatttataaaggaattttaatttttatagtgaatctcaagggattatcccatccttgaccacnnnnacaaagagaaggaccccgcttaatactgccccacatggagttcagggggaagcagggaggggttccccagaagggtcctgggggagattaggagtagctcttgatgcttaccctgagccccagatgctaggaggagggtgnntaccctggccctggnnnnnccagcgnntgctttgc

SEQ ID NO: 484 - DNA, 412 bp, Canis familiaris
  misc_feature (1)..(412): n = a or c or g or t
ccgccccaacagaacattacatcttctaggactttcggatcacagaccaaagggatgaaaaatgaaagcaaactgaaatgctttcaccaaatacgtttcagaaagctacgggaatgttcgctctggacagtcaggttttagaaatgaaaatctgactaaagagcctcctcttaaaatggaggtgatggcgttggcactgtttttttccaaagagacgaatttcttgattatgnnnggaaagcatgttcttgaaggtctgggacttcgttatttgtgaagctgtaagttaaagatctctcgagctgcctacagaggatataaacaannnnnntcctcttcattttaaagaatggctgtacctgtgctcacatcctgcactaaaccaaggaacagctccatgctgannnncttg

SEQ ID NO: 485 - DNA, 543 bp, Canis familiaris
  misc_feature (1)..(543): n = a or c or g or t
agaggacaactttttggttcgggttgccttgagcangaagatgaacataacagggccttggggtcatccttctgtgtactaacccttctctgcctaccagcggggtgcagctggagactggggggagcgcgccaatcaggttctgaagttcaccaaaggcaaatcgttccggcatgagaaaaccaagaagaagcggggcagctatcggggaggctccatctccgtccaggtcaattccgttaagtttgacagcgagtgacctggggccatctgtggcgaagcaggggtgaggatctcagaccatcgactttccccagcggacctgggaaaccctcagctctcttaagaaaggttctcggtgaggacaaccgtttagaataggtctgaagactttgtatcgtaacatctctggtccttttctggtgttcatagttttctacagatttgtttctgagtgttgagtagcaaagacaacataaggggcgtgttcctttttaagaaaaggaaaaattttagttcttgtccccttctccctatcctgtg

SEQ ID NO: 486 - DNA, 556 bp, Canis familiaris
  misc_feature (1)..(556): n = a or c or g or t
aagccanncagacaggcgggcaaacagtgagnngnnnctctgtcccccagagactgagccactactaagcatctgctgccactccctgaggctgtgtttctactctccagttcacaagtgtgttcagaacaaagagaagaggcaggtgatcctttttacataaagtcacccacccccccttttttaaagccagcagttctacagttgggtatgttattcagtgtttttggttttgtgaagctgcagccaacttgattcctggaagattctgtgtttaatgtgtctttaaagccctcgctcttgttttaagggcggcactttccaaacaggcttgttttgcattttgagttggatcctcgtgtggtgaacagaccggaggtttttattttaagctgtttgcactgagattgacagccttgggagtttcctgaaacatggacctcaggattgccttttgaaaacaaatctgtatgaacatataccacagaagctgttcctgggacattgctgggccccgccccctttgcctctgccctccctgtttgtgnnnaaaann

SEQ ID NO: 487 - DNA, 552 bp, Canis familiaris
  misc_feature (1)..(552): n = a or c or g or t
gtgggtgactntgactgcaggattgcacagagaggcatggtgattacctttgaatttgttttggctatctgccaaatacaaatacagattcaaaaatcagtaataggagaatgataatccagcatgggtnnctacttgtgaaatgtggctttctccannnagtaattgcaattagatgataatacctaattatgttttcctaattaaagataaattgctacttgattaaaaatcctgcccttcnnnnatgggaacaaaggttaagaggcgcagttgggtgaactctcaaatttattggcatttacacaaagcgctagaaatccaaggaattgaagttttaatcatgtgagggttgtacagnntactatcnanaatatttgtacatctttctgtaaatatggctctggacattgaaaattgaaaaacatatgccaacnnngaataagggaactccnctaaaaatcatgnnnnnnaannntgtgaggtagaaaaagatgtgcangaaagactacttagtagcttgttttgtgtgtgcatttttttgttttttgg

SEQ ID NO: 488 - DNA, 519 bp, Canis familiaris
  misc_feature (1)..(519): n = a or c or g or t
cttaaagtccacttatatcagatgtncttcgttttttgataagcttaccaaagagccagttgcnntgcggcctattgagaatgcccacgtcctgctgtacctgggagactcggtcaccaccgaccacatatcanntgcggggagcatcgccaggagcagcgctgctgccaagtacttgacaaacagaggccccggttccggtctccccggcatcctcaagcacctggcgcgctggcacaccttgcagattcaggaggagctggaccggccgcatgacctgctgcagaccccgtcgtggagggtttgtgatccggatgacagctcggacggaactggtctggcgcgctcggctgtgttacacgggggtgactctttcctgaggaggcaggctggagatgtggggttttcacatctgcgtcccggttccgcgggctcacggggactccctccccgaagcacagctgccagggcctgggcctccaccctgagcagtgtgtaatctaaaaatacctgcccttt

SEQ ID NO: 489 - DNA, 543 bp, Canis familiaris
  misc_feature (1)..(543): n = a or c or g or t
cagatgtgctnnagaatgtggaatgtgaaacacgtacaggctactatctcacnnnnnncttgactgggcatttcacatcccgggctcttgtcatcgaagcagagaatttgaaatgcctccaactttctgaggacaaagtttgtgacacaaaagactattttatgtcgaagacccttggcattggaagactgaaaaggccctctttcttggatgatccactgtatggcaaaaatgtgagcctttcatctgaagaccaacatctgaaagtcagccctccagagaaaccagaaatggatgaataggagactgaagatgtgatggaagaatggaaagaatcttaaagatttgctgggtgtgcttttaagaaagttggtaaattaaatttcatttttttttgaatccttatattcagtgactgcatttatggagaccactggtcaaatactgactttaatatttggattctcttcctggattttatttctttgatatttttgagacttggggtacaattggtcaatggctttctccattgaaattcct

SEQ ID NO: 490 - DNA, 572 bp, Canis familiaris
  misc_feature (1)..(572): n = a or c or g or t
acttggattttgannactttctcttttaagaaggcnnggnctggactggttggtgcccttcagagtagaaaactatataaccattagcagtgatccaaggccanngaatgaacagagattttgccttataagatgtcctattaaaagctgtccttcaaataccaagcgggggggaaccccttttgagcatctttgaatttgaccaaccgtactgttccaaagtacattttaattcacaataccaaggtttttgtacaaaatagtaaccgtagccatggaagttataccttggtctgtgagaaacttgtttatttctggtgtctaaggattggtgctttaacaaaagacgatggattgctccagggtcctcactaagannnnnnnnagggtatttcagctggtatcactgaacgagatgggaatacttgggttctttactttcaccaccactnaggtcccactgacttctgtgaattcctgtgtttgtgtcatctgttcctagaaattactctgccctggctttgtgtcatctnngtcacctgacttagaannnncccttcaaaaaagaccct

SEQ ID NO: 491 - DNA, 368 bp, Canis familiaris
  misc_feature (1)..(368): n = a or c or g or t
atcttagacnngaacaaacaaaacacccaacaaaaaagnncaagagaataatttaaaagttgaatcattnnttgactaacagacttcggtccaccatgtccttttcanagcccctnctggaacagtcaccttgttaattttatttttgaaaattcctttnnnnctctgccctttcacctctcactttcctagtctgtccctgccattctgtttttataagtggctacacttgcctnnngagtgatcgaaagaaacttttacatcttctcttccaaaataaaagtnanaagctgactgtgatacttaagtnnnnnnnngagcagcagacagaggtctcactttaaatttgtctttttttttcttttttt

SEQ ID NO: 492 - DNA, 330 bp, Canis familiaris
  misc_feature (1)..(330): n = a or c or g or t
acttacttttcaaaccagaagacagagtgaaacaggaagtgacaatgtttaagttactacngacacataaaaattacatagtagaaaaatacagaagaaaacctaagtgtttattggtaaaggattggttaaataacacatttcagccatgtaagaaaatctatatggctattaaaattaataaactannnnnnnnntnnnnnnncatggaaaatggccatgataatattaagtgcaacaaactattaatagaaaaatgtatagtatgaactcacttaaaaatttgtgtttatgatgcatagaaaagtcaactaatggctttcttcaaat

SEQ ID NO: 493 - DNA, 639 bp, Canis familiaris
  misc_feature (1)..(639): n = a or c or g or t
ctgacgcagatggcgtttaatgattgctttagnctgagctatcntggnnnnccccagcaaggagacttgattgaagtatttcgttctggctatcagcactgggcactgtacttgggtgatggttatgttatcaacatagcacctctagaggatggcatttctacatcatttacaagtgccaagtctgtcttcagcaagaaggccctggtgaagatgcaactgctgaaggatgttgtgggaaatgatacctacagaataaacaataaatacgatgggacatactcccctctccctgtggaagaagtcatgcaacggtcagagatggttattggacaggaggtggaatatgacattcttgtcaacaactgtgagcattttgtgactttgcttcgctatggagaaggagtttcagagcaggccaaccaagcaataagtaccattgggtttatgacagctgctgcttgtgccttctcactcctgggcttgtttccaaaaagacaaagagcaaaatactattaacaatttactgaagaaatattggaactgaaggaatttgtgaggaggagaaaaaaaaactgggatgaatacttattttcaatgcatcattattgttccaaattccagtgatggatggcaggc

SEQ ID NO: 494 - DNA, 439 bp, Canis familiaris
agtagatcacatactgggtcacaaaacagccttcaacaaatacaaaaagacttagatcataccatgcatatttttcaaaccaaaacattatgaaacttgaagtaagtcacaagaaaaaatttggaaagaccacaaattaaaagaacaaattaaagaacaaagaccacaaattaaagaacatcctactaaagaatgaatgggtcaaccaggaaattaaagaagaaattaaaaaatacatggaagcagataaaaatgaaaacatgactgtccaaaacctttgggatacagcaagggcagtcctacacaacctaatattacacctaaaagagttaaaaaaggaacagcaaataaagcctaaagccagtaggagaagggaaataatagattggagctgaaatcatatacaaacaaaaaaacagaacacatcaataaaactaag

SEQ ID NO: 495 - DNA, 597 bp, Canis familiaris
  misc_feature (1)..(597): n = a or c or g or t
attgggnnntccttgcacntatnnnaaggnngnccaaggtacaactannnngcttcccgttttgcttcaaggctctatagctctagattttggtggtagcaaatttattgggtggagggatcgagcagagagaggcagatcctcaggttcaacacaagaactggattggaaaaggtcattgtaggctgatgtgtgagcatcttggatacatagcccattgcccttaaacattggtttctttgggttgtttgtcagatagtctttaattttaatcattttcccttccctgtgctaccgtggccctttggaattcttgtgtttaacctaatgctcagccttggtactccatttcccttctccttcccctctttgctactattaaaagttggagaagtggaatttacaccttgaaatttccatgaggctatagttgtatcttgtcaaaatgacgcagtaataacgccaagtgtcaaaacaaccccattaaaatgctgcctgattaatgtgctgctaagtatagtgcacatgaaaacagcaagactgtatatatatgtaaatatatatatatatatatctgtatctttgtatgtatctctg

SEQ ID NO: 496 - DNA, 430 bp, Canis familiaris
  misc_feature (1)..(430): n = a or c or g or t
aaaaaaaaaaatcagttttatgaagagtaagaatnnaacctgggatgcaggaacaaaagaaggaaatgttgggcaaacatttttgtgggagctcccttcgctgttgtgcagcagaaacagattctcagttcatttttactcccactgtattatagtttaacaaaaattgtttatatcttggaaaaaaaactttctgtttaaaaaataaacaagtgaatgttggaaattagtctgttaatgttcttaataaagtgttcttggagtttaacctagcagcggatggctttctttagcttagcccagtttccagggaagcattgttttttccaggctgtaaaatggcagagtctcctggatannnnnnttattctgttgaaaaaaaaaaagcatgcagtatctatgacctatctgcagaaggagtttttgtaaa

SEQ ID NO: 497 - DNA, 329 bp, Canis familiaris
  misc_feature (1)..(329): n = a or c or g or t
acagtaccctttcaatagnnnnnnttcccggnnnnnaccctgtttgatgagcagtactcccngnnngcatcctacccccgtcaccccccgatggccnnnggtgccnnnagccaacacgtnctacaccagcccntnngtgcattcnnngaggtatggnaactctagnnacatgtacacccccctgaccacgcncaggaatnnnnngtnnnagcacatgcaacactttcctggctttgcttacatcaacggagaggcctccacangntngnnnnaatgactgctatcgcaggaatccatatttaatattaataataatnnttaataataat

SEQ ID NO: 498 - DNA, 655 bp, Canis familiaris
  misc_feature (1)..(655): n = a or c or g or t
cnctttttccagttggatgtgttattnngttcttttctgtcnnntactgctactatgtctcccaggggacagatnnacttctttgtcatcttcactctccacccccagagaggagtcagagccataactcaatcactggccccctcccaagagttgaaatgacaagtggtagtctcagagtgtagaggaccctgagggcccagatagtgtcctccccaccccctgatacctttggggctaaggcagccattcttgctaccctccatcccctttatggcttctgcacttttttaaaacataaagatgggcacctgcaactggcctgtggggatgcaaagattctttgctctgtatctagctggactgatctgtctcacaggaagtcatacagtcataaaggagaatttctctctccccttcatcttctccaaaggaagtaacaagacgagtccacagttaagaattagagcccctataatatcttcccatcaggggcctgctgatctttttcattccaaccatctaccttccccttttgaatgcaataaaactccatgacaccagcagctgttgctctttagaaattggttttctgaccatgtggctgatgtatcatgagcagaatggtcttcgttttgttgcttctgtttttcat

SEQ ID NO: 499 - DNA, 533 bp, Canis familiaris
aacatcacccgggaattcttcgaccctttgtatccggggaccaagtacgagctgggccccgccctctacctgggctggagcgcctcccttctcgccatcctgggcggcgtctgcctcggctccggctgctgccgcgctcccgacgcgaccccggcccccaggctcccctacgatgcctccgcggcgcggtcccccggcctcgttgaccgcctgcgccccgcggcctcggacgaagaaggcgacagcacctttggcaaatacgggaagaacgcttacgtgtaggacgccggtggacccctttcccttcgccttgccgggagccgagcgaggccgcgaggaccgcggctgcgggccacgccccgactccgccccgcgcccggaagccacgcccagctccggccacgccccctccgcctcccgccgcggccacgccccctccgcctggccaagatcccgcctcctgagaactcagctcagactcctggggcgggaccttctgggtctgggcgctggttggctgagggggcggaggc

SEQ ID NO: 500 - DNA, 521 bp, Canis familiaris
  misc_feature (1)..(521): n = a or c or g or t
tcccccaattccacttctccccaccctgtcagggacatttggctccncntagctggntctgttcatccagaggatgcccctcctgccaagtttggtaggccaagctacagatgggaccaaagggagtggccaacctcactgcctaaaccaatgccctccccgtccccatttccccaggctcctggttgtttgcctgccccaaaggagaagctccatggggttgagacaggccctccctgccatccctgtcccagctgctgccagggattaacaacagagtgcaagggagattaactgcttcccctcaaatattcaatctcagcagggacagatgtgtgggattgcagggatgcacagggcatggggggaggaggctgctaaatcatatcccctagcctcccccctgccctgcagaacgtcttccatctgcttccactcagctgggggttagggaggacttcattgctgtcccccaccctctatctctctctcttttttttgtgacagagactgagaggtct

SEQ ID NO: 501 - DNA, 265 bp, Canis familiaris
  misc_feature (1)..(265): n = a or c or g or t
aaagcactctgnnnnnnnggcaccctgtctgttccagtnnagcttacaggagtattccaaaagcctaaattgtggtatcccatgctcgggactcagctatcgnnaagactcccaaaattctgtcagccaatccaacctagccatggcaccagaattaataaatccttccctacttttgccccacctttcacccctaggctctccacctggcgttcacttttctttagctgggcaagtatcttatcacnnnnntgaactctgcaga

SEQ ID NO: 502 - DNA, 469 bp, Canis familiaris
tgagtcaggatttccaagcaaggcttatataatgacaagttctgtccatattaactcagtttcctgacaagtgaagctgacttatttaagtcaccaataagtattaagctcaagggactgtgcatacaacgtggtcaaagctgtgatgggcatgggtccatctgggccacaagcctgttcagtgttccaaaaggtaagacccttcctctcggctttgttgctcttgaaagaaaagacctcaaattgaagtaacatttctgagcacctaagggatttgtagatatttaagctaaaatgtccaagaatatgatatgtcagataaaagagtgtgaaatgtttcagcttttctttccatgagaagtcttgcaaagctttgtataactttttgagtgaatgagctcctgcccgtaattattttagtaagtaaaagggtgttacgctagatccttagagtataaaattgatttga

SEQ ID NO: 503 - DNA, 634 bp, Canis familiaris
  misc_feature (1)..(634): n = a or c or g or t
tcaagnnaatgaaantnnagnaannnnnnnncnnnnannncgtgnnggnngacaaactgaagcgattccagcaggagaatgaggaattaaaagctcgnatnnacaagcatatggcaatttcaaggcaactgtccaccgagcaggccgttctgcaggagtctctggagaaggagtccaaagtcaacaagagactgtccatggagaacgaggagctgctgtggaagctgcataatggggatctgtgcagccccaagcggtcccccacgtctgccgctgtccccttccagtccccaaggaactccggctccttccccagccccagcatctcacccagatgacgctttctggaaaccaggagactgtccgaaagcatctgtacaggtctgcgggactgaccctcaccatgctcacgggagcaagagctacagtggtggacgtgtgatgcccacgctgggactggagggtcgccacccccgaggctccataggagactggaatgctgcaggaagacttgcacccagcccaagagcctcctccccaaagatctccgaacggatctacatggacaccgttgcacaaagcacttaaagaatgagagggtcttgttcattgcctttttcacctaagcataagg

SEQ ID NO: 504 - DNA, 632 bp, Canis familiaris
  misc_feature (1)..(632): n = a or c or g or t
aacagcacctgtgaacattttcagcacacatgctggactttctcctncgtgtttctcatcacaacaaatgttgggggganngccaacaattgtcgagactctggcaaatgtggaactcctcaccagaaatgactcacaatcactgctgtcaaggtgcatgggactttgcttttgccgtcgtcagagcaccttcgttggttacagacattcgtccttacataaggccaaactcagcacacccataagaactctgaatgctgctaacagggtgattatgaaaggctcatgaagtcaggagctggggcagccatcttgcaatctctgaagaggtaagcctgaagacataagacaatagtgctgaggatggagaaaccaaaagatgggaagaaactgggtcctcggtaccagcctctaatttcactaagtagtccttgaactcctcagtccccagacttcttgttatgcgaagatgataggcgtcattttgcgtaggccactttgtcaggtgttctgttcataacacctagagtcatccagaatgataccttggccttttatcctttcacagattgattgttgtgcccagacatgtctggctctcagcagaggagctcacattgagcttttcacta

SEQ ID NO: 505 - DNA, 294 bp, Canis familiaris
  misc_feature (1)..(294): n = a or c or g or t
tgggtagtattgaggnnngggcagcagcagnnngtccagctcnnncttcttcccctggcagctnactggagaaacctggtttcaatataactcatnnnaaaggtnnnngccanagtnnnnntaattnnnnnaatattggttcccatgttttcctnnagttatcccagcagctgtgcctctgnnngggannnggtgnnngnnntggggtaantacagcctttccccaacaggaaattgtgggattcnnaaannnaagnnnggggaagacagagaacccagtggnnnnccaagtgg

SEQ ID NO: 506 - DNA, 505 bp, Canis familiaris
  misc_feature (1)..(505): n = a or c or g or t
atctcctcattnnggnctgattttccaggtancagtaaccactggacatctgtgnctgaaaannagacatttcatcactccacctgtactaacctcctcacgctgatgttacaaatcatcacagatttggaggcttacaacaatagaaatttattccctcacagctctacagtccagatgttcagaatcaagatttcagaaggcgcatgctccttctaaaggctcaaggggagaatcttttctcttcttttccccacatttggtgattcctggccttccttgacttgtggccatgtacctccaatctctacctccatcttcaaatggcctccttccttacctgtagctctgtgtcctctcctctcttcaaataacagaatttagggcccatcctaaatctaggaggatttcatatgaagaacctgaactaattacatctgcaaaggtctgattttcaaatcaagttgcactctgaggttccaagtggatacaaactttgagaggt

SEQ ID NO: 507 - DNA, 314 bp, Canis familiaris
  misc_feature (1)..(314): n = a or c or g or t
atgtgnnactccatctcatgaccctgggatcaggccccaaacccaaggcagatgctcaaccactgagtcactcaggtgtcccaatgcacataaaggttttcaaatgctgtagcatcatctcacttaaggccatagtaactctgttcccaagtccctgagattctgtttgaggggagcgctaaaaggccgtgtcctcttctatgtccacaactataggaacactctgatgcattttgctctccaaatttcaaagaaggtgtcagagccaagggccaaggcttcaagaaaagccctagaaattccctgcactcaaa

SEQ ID NO: 508 - DNA, 507 bp, Canis familiaris
  misc_feature (1)..(507): n = a or c or g or t
gcgaagactcaacnngcaagtaaacatattagatttnctgaatatgattgaaaaacaattttgcttcacctcnnaagatttcactggttacttgaacttttcnnnnnnaatacattttattttatagtaataaataatgtttttctgaaacctctgttaattagaagaaatacttttgttccttgtaagactttcttgagacaagtacatgtataccacagcttttcattaaaaattctatttgctgaaattaccttacacaaatcaaccccaaagtgatttagtaaatgttttcaacattatcattaattttgttgtttttatattacaaaaacaatatttgcaaaaataatactatatagtagaaaaaatgtttgacattggattcactgtacttattttgtaatttgctctttgcttttcaaatgtctaggatatcttttcatgttgatttatacagagacatatgtgtgatatttcattctgtttcttgcactttgcttacct

SEQ ID NO: 509 - DNA, 69 bp, Canis familiaris
  misc_feature (1)..(69): n = a or c or g or t
atttagtaggnnnnnnnnattatttatgttggtcactgtggannnnngggcccagccgnnnntggcctc

SEQ ID NO: 510 - DNA, 550 bp, Canis familiaris
ggcgctaaactgctgagccactcgggctgcccaaaaaattgtgtttaaaacagaagagattgtaaagaaaattttgaaaagcctttcgaaagataatttctggatacttttgaaagaactgggcctggttttgcttcctcctttgtcctctctggcggcaggggtcacaactcagctactctttctcttcccttcccgcctctctcctcctctggcatccagcgtgcaggacttgtgtagttagccgttccctaacactgtctgaggcctcaccaaggctcactaccgcccgcttaggcccggctgtgatgaactgaatgtttgtgtcccccgccctccggatcattggtggaaatgctaatccccactgtcaggaagtgggtcttgagggtagagtcctcatcagtgggaacatccttattcaagagacccgagagagttctcttgccccttctaacacgtgaggacatagcgagaagatagtatctgtgaaccaggaagtggttccttacaagaccccaaatcatctgtcagggctcctagtttgatc

SEQ ID NO: 511 - DNA, 211 bp, Canis familiaris
  misc_feature (1)..(211): n = a or c or g or t
ataattataaatttttaaagcacaagtcacatgttttgtaactcctgtgtgaatttannnnnnnngtnacatttaatnnnnnacatcagatatgttttggaaaagnnttaatttgagaacaactgaagnnngntaatccagaatctatntntagttnnntattnnngnnnatgctttnnngnnantatattnnnnnnntannnnntcatga

SEQ ID NO: 512 - DNA, 559 bp, Canis familiaris
  misc_feature (1)..(559): n = a or c or g or t
tttgatgctgcaacaaaggctatactnnnnaggtataagttttctcagcttaaaggnncttcagatgatggcaagagcaaaatcaaatttttgtttcagaatccagatactaagcagattgaagcaaaggagctggagttctcaaatctgtttgctgttcttcactgcattcattcattctttgctgccaaagtagcttgtttggaccctctttatttaggcaatcagactgctgcttccactgctgccagctctagtactacaagcagagcaaagtatacaacctgacattctgagcttgcattgccacttaccatgactatagaaccagaataaacatagtcttaagtttagaccctggaaaaacaatggtatcaccaagtcaacagtgaattcagtttgaaatttcagcagaaaacaaggtcataaggaatctcaaaagtgcttctcttttggaagacagttgtgaataattttaaatgaacataacagcttgttctcactcagcccatttgtaccagtatttcattgaaagtgaagacaaaagaatgaatgattc

SEQ ID NO: 513 - DNA, 660 bp, Canis familiaris
  misc_feature (1)..(660): n = a or c or g or t
gggnncaatgaaaagaaaaaagtnnacntgaaactggcttattttcacacatatcttaattttatatgttcttnnaaaaaaaagaacattnnnagatacacaagttttaaagctatttttctgaaagagatttaatgaatctttatttctaatatcaagtgattctggctgcatttctatttcccaaagatctgctaacaataactctaacttaattgtaagccttccagttttcaaattcttccacctgaggccactagtctcttgatgattttgtgatataggccccaaaattgggatcaccaaataggttcaaaagcttctatttatactaacaaccagaagaccagagaatgaatttttcagtgctgcagagcctcctgatattaatccaaccaaaggatacttatggatgtatcttgatatactaaatagcaattgttagatgtgatatgcatataattatatatgtagaattgtgagttaatgtaatacttagcaatatgattttataatggctcctcattttgcttcctatcaagccttccctgaggagtgaatataaagtattggttttccccagaaatttaaaggttatgttattaataataacttccaatcaaatcagataaaggcaaatttgtgatatagaaatatgag

SEQ ID NO: 514 - DNA, 559 bp, Canis familiaris
cgcttgaaagaaacaaattctactagaatctccactacgacttttatggttacggagaaaaccactacaggtgaagactggtagaaggagacattttctgaagcgcccgtggaggaggagcactggttagtgtcacaaggacgagctcagtctttgccaaagatgaagtagtctttgcttctgcttcgcttcccgcaaaactcttcataacatgggctgcatgaaatcaaagcaaactttcccatttcccaccacatttgagagcgagaagcaacatgcaagtgaagaaagcttcatgtccgaagagagattcctacccaggatgccttccccagataccgtcagaaaggaagcgaaggaaccaccagcgcctaaaattgtgattttcgaatttgcacaccgcctatcccatgagatcttgagtgacgccttgaagcagtgggcaggcgagaacatcaagtactatgacatcccatacattgagagtgaagggccatgacatcgtaggaggaggagaactttcttgaattgtgggtaaagctggtgctagtttaaatac

SEQ ID NO: 515 - DNA, 676 bp, Canis familiaris
  misc_feature (1)..(676): n = a or c or g or t
ggnncaaccaaattaatagagtgctttcacatttggagngccccaaggaggaaaagggaatgcattgggaatgtgtgaggagtggcctcaaagggagggggaggggagcagccagtctgagatggggaggagctggggaggagcccacactggggggtctgggtgcaggcccagggccacagaaagccaggggagtctcagactaggactggacacaggtgacatcccctggcaggcagggccaaggcctgctgaggctcggacaccagacagcaagtgtgggttcattccgagtgctgctctacctgtgatatctgtcaccttccctgccacatcagccacttgtgctttaagtctcatctttcattgtagcgctgaagggtttggcctccacaatataannnnnnnnnagcagtcacttgaggaagctggggggaggaaggggaannnnnnnntctttcccagctgccctgcctcatttatgtaaaaaaagaatgtggctccaagctctcctctgattacgagagctttagggaaatcagttgtcaacttcccctgaattgttgggtttataaagggcagtatttccccaagtgtggacagtgggtattttgagagatgtcccagagcgtgttgtatggagagatttggcaataggggattagggaaaattaag

SEQ ID NO: 516 - DNA, 581 bp, Canis familiaris
  misc_feature (1)..(581): n = a or c or g or t
ttttatnactagatactgaacgtgattagaatgtctttgaaggtntcctcacttttatttgncttaggcaattatnnnnagttgtcatagtcagatctttgcagcttttggggaacatagtttgttctcagaatcatttactatttttttctaatctcccttgttttaatctaagcatttccccctgtttctcatatataagtcatatttggtagataaaacagtatgatttggttggcattttcttcatgattataggagcatcattcatttgtctccagggctacttgtgtgatatagcatatacatctattgaagaaaataatcactctctaggggagggaggtagaaaagtatattctaaacttgggtttttgagtttgtggtcttgtcttaacttttgtgttggctctaactgaaacatgccaatatgtgttctcaagagtttttgttaagtattgtatgaaagtttacagaatgaaggaagttcatctacacttgaatctgtaagcaagataacacacaagtgtaccaagtgattattaactttgttgttttataaatttgtatgaatttggagt

SEQ ID NO: 517 - DNA, 606 bp, Canis familiaris
  misc_feature (1)..(606): n = a or c or g or t
tctcccagttnnnaaaagcagcagagatctacggggtcaggaccactgacatttttcagacggtngatctgtgggaagggaaggacatggcagctgtgcagaggaccctgatggctctcggcagcgttgcagtcaccaaggatgatggctgttacaggggagagccctcctggtttcacaggaaagcccagcagaatcggcgaggattttcagaggagcagctccgccagggacataacgtcatcgggctgcagatgggcagcaacaagggggcctcccaggccggcatgacggggtacgggatgcccaggcagatcatgtgagaggctgcctcccgcctccccggagggagcacgaaggttccacacaccgtctctgtgataaagaaatagttagtcaccttccgaccttctctttctccgagcctcccagtttctggtttttgcaagtgccgcatttccgctgagaacccgccttgcccgccgccacctgtgtccccgagaactatgcaaagactccgcctcctctcccccagctccttcctagcccgagcctcctctggtccgattatttatttnnnnnntttattggccaaaaattcccctc

SEQ ID NO: 518 - DNA, 592 bp, Canis familiaris
  misc_feature (1)..(592): n = a or c or g or t
cccacagcnnagggcancagcagcnntnntgctgcagagccttcctttggccnntccgccngcagcctcaaagaatacaatccttttgaggaggaagaggaggctgtagcagggaatcccttcactaacccagacagtccagcacccaaccccttcgatgaggaagatgagcatccccaccagaggccctcaagccctcctgttcctggcaacccttttgaaggagccacctgtaccaacccctttgagatggacagtgacagcgggccagagggtgaggagcccatagaggaggagctgctcctccagcaaattgataacatcaaggcgtacatttttgatgccaagcagtgtggccgcctggatgaggtagaagtgctgacggagaaccttagggagctgaagcgtaccctggccaaacagaaggggggcaccgactgacgccactgattgggcagggcatctttgagcccggggcctggcaggagcctgtggagcaggaaggggctggtggcctggatggggaaggagggagggtgacaactaagatgtgcacaggttagggcagggaattagctgttttgtgctgtgc

SEQ ID NO: 519 - DNA, 436 bp, Canis familiaris
  misc_feature (1)..(436): n = a or c or g or t
gcagccgggtgnctcatccttnntgcaggtcaccgaattgctgtttgaatgcagcatctttgtggtgtctttcccatgcangcaaagccatgtgccctcctgtctgctgtcacatctgtgctcagattgcttaaatattgtnngcgacagggaggttttaatctggttatgcagagggaagcggggctgtgggggcacgtttaattggctcccagcagagtagtgagcgcgtctatggagtgtggggttttttgttccctctctctcgaagtgttaccattttcacgtcctattaatgtcctctggttgttaaattannnnnncacattatagcggagctgggttccctcctggagtgaatacaaatgaagggcatttacttgtatttttagaggttttggaaaaacgtagtgatttgtggctttgatcaatcctg

SEQ ID NO: 520 - DNA, 528 bp, Canis familiaris
  misc_feature (1)..(528): n = a or c or g or t
aacggtttgacgcttctcattctgggagtgatcggtttannnactgtccccttgctgtacnggcaacaccaggcccagatggaccagtatgtgggattggtgaccaatcagttgagccacatcaaagctaagatccgagctaagatcccagggtccggagccctcgcctcggcagcagctgcagtctctggatccaaagccaaagccgaatgaaaggggtgtctctgccctcgggacgcctgcccccatcccctgcagccctctgcccaactccatctcccttccgtccccgcccgccctccgcctccgcccgagccatttcctgagcggccaggactacatctcccaagaggctctgctctaggagtcccggaaaggcgaggcacctttggccgtggcgcctgctgggacttgtagtcgcctagataggccacccgccctgcacttccgtgaccccgccgctggaggcgccgtgagagattggtgnnnnnnngacgccactagccncnaagccagggctttgcatgg

SEQ ID NO: 521 - DNA, 592 bp, Canis familiaris
  misc_feature (1)..(592): n = a or c or g or t
agggactatacacagtactatgatcatatttctaaacaaaaggaagagatnngcagatgcatacaagactttttcaagaaacacatacagtacaaattcttagatgaagactttgtgttcgatatatatagagacagtagggggaaggtgtggctgattgattttaatccgtttggggaagtaaccgattcactgctgtttacttggtaagagctgatatctggaagaaacttaaaaggtgattttagtgaaggagatgccctggagcaggattctccagctttccgttgcacaaacagtgaagtgacagttcaacccagtccctatctgagttaccgacttcccaaggactttgtagacctgtctactggggaggatgctcacaaactcatagattttcttaaactgaaaagaaatcagcaagaggatgactgattagagtcagagttaagtccgaggtaaagaggaaaccaccttggcgtcaggaggctgctctgagctcacaacttcctgtaccccactcgggttggggtgggaggcagcgtgaaatcaatagctttttatatccatgtatattaagctggaaaaaaat

SEQ ID NO: 522 - DNA, 566 bp, Canis familiaris
  misc_feature (1)..(566): n = a or c or g or t
aaggnnacccaaggnngcaaggtcaccattatgaagaagtagntcaaaggactccagttcctctctccaagtattgtgatatctccatgaagaagacttcatgtggatttgggtgggcaagaaggcattaaacacccagagaaggacatgatcaaagctgacctttttatacagtagtattttgctgttaagtaaccccagtactgcatctgcatctagctttcgttcatctactttcacttacatacagtattatataatcgaggaaaatgggaaaacgcaaacaaatccaaccttactttatacgttgtatatatgtatacctgccctgctcacctgggttcttgttaaaaaaaaagagatagtcacaaagggcttatgaaaatcctttctgaattgataattacaatattgaataggcaattctgtgatctactaatctgtcttctttcaattaggatcgttaatcagagagaattactgtgtatttcagtcattttgatttgaggtaactctataaaacgatcacccgtagtgacgtctcccagccctcacatgtgggaatt

SEQ ID NO: 523 - DNA, 700 bp, Canis familiaris
  misc_feature (1)..(700): n = a or c or g or t
taatcagaatatccagggtagtnnaaatgtnnncagtggcatataaaattccttacagccaggaagaaaggtgactaagggggatttagagtcctgtctcagctacacattatgctgcagctcagattcatgatggtgatgagcatggcctagatcttgaaagggacctgacttcctttatgaaggagattttatcaatgagctaaaaaatggctagcatgggttagcagatgtaataactcgaagtaagccgtcctacagtattcctagcactacaatctaaccaccttattttgtgaccgagaaagtggaaaaatgtaataacaggatcatatagacccatcatttgaacaactttgaactatcaaggtgtccttgtgattttcacaactgttgtccattgtttgaaggtgtaacttactaaacgtaaaacataaattccatatctacaacatctacaccagcaacagtataaatgtaggcctaaatttgcaaaattcataatttagtgatggaattttttaataacatgcagtatataaatgtgcagattttatgcaagtgttaacaaaatcatttttcagcttgcaaaacgggactgcagtattacatttttcacttaagcaattttttacatctacgtcgttgctttctataatgactgtgaatgccatcttttatgaatgcaacttgccttttt

SEQ ID NO: 524 - DNA, 418 bp, Canis familiaris
  misc_feature (1)..(418): n = a or c or g or t
aggtttgggtattatattctcaccacagtatatgtaagggatacagttctttcatnnaacaggttaggtggtgttagaaatcaagcagaaaatggtcctacttgaggaatgttaactttcaacacacttcttaccatttctttgctgggaagccatttggggttaggggttccactttccacttactgaacaagcaagttactggtccagaattttaatttagtaagaagggacagtcctcaaattgacttacattgggtgttttcagcatctgcataatgcctgctatttatcaggcctgctgcctgtcttgagagcacaaagacacagttcctgtcccctggagactcaaagcagcctctgccaagagacacacttatttgaacaataatagnnnnntactggttcttgctgtgat

SEQ ID NO: 525 - DNA, 528 bp, Canis familiaris
  misc_feature (1)..(528): n = a or c or g or t
aaaacagnnnagagggctagctgcccggggggtggcggccaaggacagcnnngctccctggtcagctggcccctcctgcttctccgtggtgatttggttggctccttaacacctgtgctgtctctgtgccctctctccccgcgcccacctgcctgccccccacactcccccagcggagagcatgatccgtgaccttgcttctggttttcgcctctgggacaagtaagtcaatgtgggcagttcggtcgtctggatttttcttttcctttttctgttcatttcatcttgccctccccacccccgaacccaggttgtgcaagtggcttttcctgagacttgcccagctttgagaatctcctcatccgccctctggcacccagcctatgggggaagggaggggagggacgggcgtagtgggagacctagctaagagctgagggtaagggcaggtaggtgtgaggctgtggacattatcggagtgtttcggttttggttttggttttttggttttttggttttctttttttt

SEQ ID NO: 526 - DNA, 643 bp, Canis familiaris
  misc_feature (1)..(643): n = a or c or g or t
tctcccgcaggtgtcatnnnnnngaactctctgccgctgannctgctgtnntnntagacctgctcatggcacttcccgannagctgcagcgcctgccctgcgatgccctggnnaaacacatgtcggacatgtacgtccacctgacagctccccagcctgacccagccagtgagggcctggggccggcagctgaggatgctgggacaagctccagccggcaggaggccgcaggccaggcccctccccaggcctctgagagcactgggcctgctgaaccaaggtctccttggcaagcagcaggggtctgtcccctgaacccattcttggtgcccctggaatttctgggccaggcagccacccctgcaaggtgaaggcccggcaggcggatgacacagcagacatctgtgagccccctggccctcgggcctgcctgggctggcactgggttgtcatgaggatccagtcatggtggaaggcccctgacatggtgggcagcagggggtggcctttaagatgaccgacacagcaggagtctccagagacagcagacaggtgtacaggggcttggccgcagagctgaggtgggggcagtcgggcagcttggttaaagtcacagttaaatactgtcccttcccacatcctg

SEQ ID NO: 527 - DNA, 526 bp, Canis familiaris
ctgggtgggcctagagcagaaagcacccagactttgccgttagatctggatcaaagcccagcttttgaatgtgggcatttagcctagcttgcaagctgattttgaggacgaaagatgatgatacatggaaatgcctgccacgtcacctgacacagaacaggcacttaatacatcttagtttttctctgtacccagtttcgctggtcctattagcatagattcatcccaactgggatctagggcagtgcttctccatctctgatctgcatacgtatcacctgggatctcatggaagtgcagattctgacccagtaggtctggggtggggcctgagatgctccatttctgggcggctcctgggggaggtgggggttgccctgagtagcaccaaatgcaggctaggacaaagttagatgtttccgggtctcattgctcaagaggtctcatcgctcaggagcccacagattaatccccagccctacccgcctcctccttccctttaaagatcaaatgactgtatcctaaa

SEQ ID NO: 528 - DNA, 370 bp, Canis familiaris
  misc_feature (1)..(370): n = a or c or g or t
atttgtttcctgtttggggatcatgaannangagttgccanntnntaanncttattttccacaaaacattttggaaaaccacttcaatacaatttcactcttggaaaagtaaagctgcatagtcaaagctaacatgggaaagctgccttgcaatctgtagctggatctcctgctcaacataaatttaattctatcctattttttaaagttagagagctaagatccaaagatagaacatacttcacagtcacaaaggaagcactaatattaggtacaccttctatattttaaaaaagtatcaataattatatcctttttatttcccctcattacagggcacagaacagatcnnnnnattgtacgagagata

SEQ ID NO: 529 - DNA, 659 bp, Canis familiaris
  misc_feature (1)..(659): n = a or c or g or t
atagacacagcttcatgtacttnctatgtactgtgtctttgnnagggaaatccnnnnncaatcatgaaacttgatttattttatccatatccctgaggagtatgtagattttattcatattcttgtcataatttaaaaatctgtttttaatgacaaattttaattcctttgattactgtaagttaagcttgtaccaaccagaactatgtgtgtggattaaaaatggattctctatggttttatccaaggagaaaaataaataaagagaagccacaaaattgttgtttttgaaacaaagcactctatagcattaactgaatatttagaaactctacttataattagtgtttgattttttttttttaatgataggctgtggaaagatgttatttaatgaccacatcttctaataatgctacctatctttttgctttgaaagccaatgaggggagaaaaaaggataactaaagtagatcagtatattctttgtatccttgaacatctaacagctctactgagtaaaattggggtaaatgtggctgacagaaactgtgttgagagtnnncggctgtaacatgtcccacttggaaaactggtacctcaaatgggtgccaaaggtcaaatgtaatgagataataattatccctgcctctgtcagt

SEQ ID NO: 530 - DNA, 443 bp, Canis familiaris
  misc_feature (1)..(443): n = a or c or g or t
cagtactaagggnngtagcatccattcttatttaacangcagaccagaacacatctatttanaacttgccaaactctggccaaggtacaaacactgccaactgcanncaaagggaacctctgctgatgactatnntgaaggatagagcagccaaattacagcagcaaagtgcatgcagcacctaccagagacattccctgaagctctaggccccaacactatacgacttcttcataaagctgctaacctcaggatcaggaaatgcaacagagttttctaacatgagaagaagacacagacttagacataacaccaagatggaggaattcataccaaacgaaacaagaaaaggccatggcaagaggtctaattgaaaaggatataagtaatatgactgataaagaatttaaagcaacaatcaaaaggatacttgctgggcttga

SEQ ID NO: 531 - DNA, 556 bp, Canis familiaris
  misc_feature (1)..(556): n = a or c or g or t
agtttgctnngcctagaacaccactctttgcnntgagtcgtccacttctcacgtataatgggaactgagatacagtgatttataggacatgtatatttgattatcatttggtttctcagatagatttggtcttgatccatagntcttgaaaacggttcagagccataaaggtgaaatgagtgtcttattattaatggaggtgactttttgggttgcacccaaaggcaggactggttgcctggaggaccaaacctgtgattagaggattggaaatttcagttctacacgctccccacccccacctccaggaggaggagggactggatgttgaatcaaccaatggccagtggcgtagtcaatcatgactgtaaaatgaagcctacgaacaaaccccagaggacagctctttgacccatttcagcagagcttctatgctgggggaaccagaatgcccccatgtaccactaaactgggtccccaggccccacaacgacagagattcctttgggagcttgccctgtgtatctcttcatctggctgttggtttatatccttt

SEQ ID NO: 532 - DNA, 415 bp, Canis familiaris
  misc_feature (1)..(415): n = a or c or g or t
tgtnnnaattgaagaagcttggtattgatgatttggtgcattttgactttatggatccaccagctcctgaaactcngatgagagccntngaacttttgaattacctggctgctttaaatgatgatggagatctgactgaattgggatccatgatggcagagtttcctctagatccacagctcgctaaaatggttattgcaagttgtgactacaactgtnntaatgaggtcctatctattactgctatgttgtcaggtaatagagggaaaggaactaaaaaaagcccagctcttcacagtttgggtggacttcacatttggttttgttttttattatttagtatnatagtagattttatagatggttttgaggagctcattttgtttcctaaatatcttgtaaatagatttatgaa

SEQ ID NO: 533 - DNA, 522 bp, Canis familiaris
  misc_feature (1)..(522): n = a or c or g or t
cagccctnnccancctggctccagncngaannnnngaggcccagtgcagctgaggttcccaacgccannagctactgggagaaagcaatacgtttgtgcagaatctctatgtatattctattttattaaattaattgaatctagtatatgcgggatgtacggcattttgtgactgaagagacttgtttccttctacttgtatgtgtctcagaatatttttgaggcgaaggcgtctgtctcttggctattttaacccaaaataaccagtctagttatattccctcttcttgcaaagcacaagctgggaccgagagtgcattacagctctgcccgggtggcccannnnnngcggagagcgagaaccacttcggaaactgtaatgtaacttattttctcctttaacctcgccatcattttctgtaggaaaaaaaaagagagagagaaaaagagaaaaataagattttacaaatgaaatggaacctttttnnntatatatatatatatatatatatatatatatat

SEQ ID NO: 534 - DNA, 480 bp, Canis familiaris
  misc_feature (1)..(480): n = a or c or g or t
cccatcatgaagaaggcnnggaagatccaggtgccagaggagcagaaggacgagaagtattggagccgacggtacaagaataacgnnnnagccaagaggtcccgagatgcccggcggctcaaggagaaccagatctcggtacgggcggccttcctggagaaggagaacgccctgctgaggcaggaagtggtggctgtgcgccaagagctgtcccactaccgcgccgtgctgtcccgctaccaggcccagcacggatccctgtgaggccgtcccccatccctgccaggcagcctcgctcagacttgtgccctgacgccctcttccctccccaccctgtggcccacgggccggccagctgagtgccccaggaacgtgatgatgcagataaatacatttatatttttaagaaaaagcgagcctcccccctccctcgcgggggcggggagggtcctgtgtgtgtgcccctgccacttcggggac

SEQ ID NO: 535 - DNA, 485 bp, Canis familiaris
  misc_feature (1)..(485): n = a or c or g or t
cagacctacacacacataagtgcacataagacaaaaatctaaatnnngnctgaggnctgtacccaagttcacttcccggttttgctgtcattaccccgtaagctgttgcctttggcgaaaactgggtgaagcgaacacggcatcgcttgcatgatctttgcaacttttggagaatggatcatcgggtcagaatggatagctaaatgcaatgctgtggacccgtacatgccgngtcttgagccgtcatgcttgctcctggctcaaaatttctctgacctgaccccatcctggctcatgccccaacccaaccttgatcattagtaaggagtggacttacattgataatatttgctgtttcccaatctttgcaaatgcttcaaatccctgtggttttgaatatgccattttcttcgtttgaagagcactgatggcccttctcaggtaggatgtcagcttcattctttggaaattcagttccaaactca

SEQ ID NO: 536 - DNA, 665 bp, Canis familiaris
  misc_feature (1)..(665): n = a or c or g or t
tggcannagatgctgcatgctnctacgatataaagttnngtnnnanncgagtagagcatcatgatcatgctgtcgtgagtggaagattggctggagaaaatatgactnnagctgctaagccatattggcatcagtcaatgttctggagtgacttgggtcccgatgttggctatgaagctattggtcttgtggacagtagtttgcccacagttggtgtgttcgcaaaagcaactgcacaagacaaccccaaatctgccacagagcagtcagggactggtatccgctcagagagtgagacagagtctgaggcctcagaaattgctgttcctcccagcaatcctgcagtcccccagacccctgcccaaggggaagactacggcaaaggtgtcatcttctacctcagggataaagtggtggtggggattgtgctgtggaacatcttcaaccgaatgccaatagcaaggaagatcattaaggatggtgagcannnnnnagatctcaacgaagtagccaaactgttcaacattcatgaagactgaagcccccagcagaacaggcaaactccctgctgtccttgatggcagcttggatgagtaaaggagcattttttattcagcagactccctctgtatgtatgagtgtgaatggcaaagtcctttgtgaat

SEQ ID NO: 537 - DNA, 494 bp, Canis familiaris
  misc_feature (1)..(494): n = a or c or g or t
agattgnnncttanannagaaggctaaggnnngaagtttgggggacagcgggcgggcagggccagccaggctgaccggagagactgggagtaacaggaggagagccgatcccaaagaaaggggcaatccgtgggaggcaaataccgggagacctcctcttgctttgctgtgctgtgtaaccaacacccacaaacttcacggcttgaaagaaaacccatttattggtttgccattccgtgagtcagaagcccagtcaccgcatctggggtttttgctcaaggtcttgggagaccaaggtcggggcattggtggggctgtgttttcagctggagcttggggtttgcttcaggctccggcgtttgtagaactcctcctttgcagctgtaggactgaggtccccatgttctcgctggccatcaactggagaccacttgcggccttcagagtccacgatggtacctggccgcagagcctccgcagccagcctcctcatg

SEQ ID NO: 538 - DNA, 615 bp, Canis familiaris
  misc_feature (1)..(615): n = a or c or g or t
tgcccccagtgaagtcagggtcacatcaggtaggcctatgaccaagagcaccctggggttggaaggcnnngagnnggactagaaatgtgactgagaaagaactccatcctgctgaaacacgttgatcttcctggggctgcactcaagcctttccagcccctggcctaaaacatgtggcagcttttcagatttgggatctaaaagaaattcagcaggaactctttttagccctgggtgaggaggtcctcagaagtatatgttctggtagaagagcgagtgtcaggtgggtgtgtgtttacacagatttcatctcaaccttgaaaatgctgctgttttgcaatgttgaactggattttttctttcctattgaaatgatacttttgtacttacaaagtggttgttatcagtatttattttaaagatgctaggtttaatttgttattaaattgaaatgcttatcttgtattccgttcagtaactgcactgacttttttttttaacaccctgcactgaatgtgaaacaaattaacgtgggatactgtaactgttgaacttaaggattttgtgtgtaaccctaacattgagccattgaagtgttcactgttttgtgctttg

SEQ ID NO: 539 - DNA, 513 bp, Canis familiaris
  misc_feature (1)..(513): n = a or c or g or t
gccgaagtctctcgtgggtgccaactaggggttgagcaggtgttggtgatgggatcgcagcgagaannaggggggcgacgctgatcatttggtgccagcgctggnntcggggctgccacttgattagcagagggcagacgtgaggtctccacaggataccaggcaaatcattctgagtgttggtggcaacagcttcgaagacgattgcatgcatcctcataatcatttactaaatggactgtaatttctgatttttcaaaatcatgttacgagatagacgtattctacttagacgttaaaccgtgcaagtgcatacaatgtgatcttctctaaatgtggtagattaaaacaaagatgttatgtatacaagtagaattaaacctgagaatccatgtaaaaattcagcgacgacatgcagtgctggtttctttcccctttttaatggaaatccagtctcgtttagttgctaaggctttttataccttttgaatggcacccaaattaaagtaagtg

SEQ ID NO: 540 - DNA, 669 bp, Canis familiaris
  misc_feature (1)..(669): n = a or c or g or t
tgtgtnaatacttanntacaaacccctannnaattccagtttggaattgcttactagagagaattggaaatgcatatgcccatgcttaaattgttttagagctttaatctgtattgtctttagagatgggaagaggtacatctttgttttccttactgaaaacaaatatggattaattgcctcacatttgtataagtgatcgactagtgtagagattcttgttttcagaagggagggtggtatagctagaaagcgacaaagacggcaatacacatgtaatgttactgtatgttgttactgaaatacttagatttttataatttcaaatcataaatcacttctcgtaggagggtctctgttgattagctgcgttatatacagttcactacgtaaggggctgttggtttttgtgtgctgcatttctgtctgttttttaatacctggttttgtacatacctaactctgttctcttttggttattcagaaactggattattttctcctaagcagtgcttaatttgtgttttttaattttgattcactagttccagctcaaagatgtccacactgttcttctgtccagaacactttcaggctctccatcagctctcatgtatatatggtatagaaaccatggggttaggcacttctttggctttttttttttta

SEQ ID NO: 541 - DNA, 617 bp, Canis familiaris
  misc_feature (1)..(608): n = a or c or g or t
ataannaatttttannagtttgattctttantnnccatttgccttttnnccatacaccctgtgtatctatacctgtaactgtttaaattttccattggttgaaaacataagtgtctctctggccattgaaattatcttgtttacagcaatacttttgtgaagcaattatttatttgcaagagctctcctcaactgtgttcatcttttcatttttgcttcgaatagaatggaacagatttaaatttaaaggaaatatgaaggcacttccttttttaataagaaggaaattgctagatgcttccttcagtagatttaaagtactgagaagactatttgtaaataaaaggattccagccttttaaaaaaagaaggaaaaaactttttggtgctctaatgcagggctgtctcaaaaatcgtcaacaaagggaaaataactatcagcctggatggtcacttgagtatatgacggttgtacacagtattattgctaaaacctttttacctcttggttgatttgcatcttttttccatattattaattttataccagtatgttaaatatttatattatttgaattttgctcttgtatggcaaaataattagtgagtttttaaaa

SEQ ID NO: 542 - DNA, 437 bp, Canis familiaris
aacctgctgcatggctcaacagtgttcatataaaggaacaagaaatttccagtgactgtggaggtgaaagcagggaagaaagcatggcagcgaagatcccgatcacagagacaaaagcctatcagttgctgaagcagtctacccttcaggataatataaatcacactgaagacagattccaaaaagcagatgtttctgtcttacagctgtcaggtttgaacattagcagcgggacattcaagacaaagacaactaacaaaattgcttcagaggctagtttttcatcgagtgaagaaagtcctttgtcaaggtatgaaaacgaaaagaaattaactaccaatttagagtctgaagccttctggggtgagtctgatgacagtaactcagaaattgaagctgctttacgtcctagaaaccgtaacacatccgccaatgat

SEQ ID NO: 543 - DNA, 535 bp, Canis familiaris
  misc_feature (1)..(535): n = a or c or g or t
tactgatgaannncgcccacagnnngcctgtgaacatggtcatgaccgttgnaaacaaggcagatgggatcctgggaggaacagatggaaggtactccttgacggtggccagcttcaggtccagtgaacacgagaatgcctatgagaatgtccctgaagaggagggcaatgtccgcagcacccccatgtgacccccacttgcctgtggccctccgccctgaccccaggtgcctgtgaccgatgcccggctcaccacacaagcctctcctctacacgggaatctacaataagaggctgactctcccaaccccacacctcccaccttcccttgaattgtcaccagccagtcnnngctgtgtccaggctggggttcagctgtggccctagggtttcccgccaggtctcccacccaattcaattcagaagacccttcagaagaggacagtcagctcgtcacctcctccctgcctcacatccactccctgtaaccgtggaaatggctcttatttctgtgaannnaagatgttttgtattt

SEQ ID NO: 544 - DNA, 131 bp, Canis familiaris
  misc_feature (1)..(131): n = a or c or g or t
ccccccccccccccaaacacacacacacacatcccactnnnggggcagccaggactattcccatcttcctagaataggggaaccctcctcatgccctgcccatacccctccaataaagacctatgccctca

SEQ ID NO: 545 - DNA, 637 bp, Canis familiaris
  misc_feature (1)..(637): n = a or c or g or t
gaacacacagagnncgagcgggccacgacgaccangtgaggccatgtggcagctgctgatcnntctggccctgtggctgggcgcggtgggnctgggcagggctgagctcaccgcagcacagcagcggggcctgcaggtggccctggaagaatttcataagcacccgcccgttcagtgggccttcaaggagaccagtgtggacagagccgaggacacgcccttccctgcagggaccttcgtgaggctggaatttaaactccagcagacgagctgccggaagaaggactggaaaaaagccaactgcaaaatcaaacccaatgggaggaagcggaaatgcctggcctgcatcaagctgaactctgcagataaagttctaggccggatggtccactgccccatccacacacaggttcaccaggagcctgaggagcaccaggaggctcagtgcagcagggtggagcgcgcaggcgaggacccccacagttactacntcccaggacaatttgccttcttcaaggccccgcctcccagctgaggccccacagagttgggtcccgcttcccggacagctgcaggaggtaaccagcaaaggacccccgcctgtccctgagctcagggaggacaatcccatnnnnnc

SEQ ID NO: 546 - DNA, 655 bp, Canis familiaris
  misc_feature (1)..(655): n = a or c or g or t
tcagaaactgtataataagctggtactttttattatnnnnnattttaatttgtatttccaannagnntattctctatctgctttgaaagattnnggcaatgtatnnnactggaaagtaaaaaattacacatttgatctggattaaaagtatctattagagctggccatttggcaaggtacctgttaacagggtttaaagtttactttattatccactaatgtcatccacggcagttcatctgtacagatactaaaccatcttgttcaattttttttaagaggttaatttaattaacattattatgctctctggggtccctctccccctgtctgtatagaaagggagaattagacaaagcatgcttttggaaagcaaataggaattgtttggaatgatttaaactttttgttgttgttcacttgtggttctacattcctggtgaatgatgaatattgctgtcaaaaggctgctccttccccataagggttgctgggcatttgatggcaggaagattttaaaagctagactgaagttggtctaaaatttagttctgtgaacctggtgataaagcaaagaaaaggttcatttttgtaaatactgctggtttggaatagtgatgttagacttacccnaatttatgaacaagagattaat

SEQ ID NO: 547 - DNA, 656 bp, Canis familiaris
  misc_feature (1)..(656): n = a or c or g or t
cgagacnagcaagatgaggntgctgagattcatcgcccagaatcagnnnngagacccccgggantggaaggctcatttcttgnaggnngtggatgatgctttcaagacgatnnacgtggatatggctgaggaacatgccagggcccagatgagagcccagatgaacatcggcgatgaagccctgattggacggtggagctgggatgacatacaggtggagctcctgacctgggatgaggatggagattttggcgacgcctgggccaggatcccctttgcattctgggccagataccatcagtacatcctgaatagcaaccgtgccaaccggagagccacttggagagccggcgtcagcagtggcaccaatggcggggccagcaccagcattctggatgggcccagcaccagctccaccatccggaccagaaatgccgccagaacgagtgccaacttcttctcctggatccagcaacgctgacgctgccgaaccgcaaccgtccctcaccaagccagagtgcctcctcggatccctccttaacaaggcactctaggcagcttcgacctgcccatcccagatggcatgcaagatgaagctctctttgcccttcctgcnnnnatcatgtgctttcnnnnnncgcttccgtggtgcgcct

SEQ ID NO: 548 - DNA, 282 bp, Canis familiaris
  misc_feature (1)..(282): n = a or c or g or t
acacagcggaaatatattcagggattgaagaggttaatgaccatttgccagaagcactttnntacagatccatcaaaatgtgtnnngnacaatgnactgtgatatctgtgtggtgtctaagtaacaagaaactgcagtnnacgtggtaccgacttcaggaatcaccagcaagagcgagggaagaacagtgcagcctcctgtggttccgttctccccatgctactctctcggttataagaaatggtgttggctctcctgtcaccnnnnnnngcaaactgattt

SEQ ID NO: 549 - DNA, 513 bp, Canis familiaris
  misc_feature (1)..(513): n = a or c or g or t
acgtcagacctcaagtngaggtggacatctgtcgtttgcctcatgccctgcacattcctttgaaacacttggagcggaggaacgcggagagcctgaaacnnntaggagaagcaatccgggaagggaagcagggcgcacaggcaggggcagctttcccagtttatgtgatttgcaaactgggcaatgactcccagaaggccgtgaagatcctgcagtctttgacagcagtccaggagttagaatctttaacagttcaggatgttgtggggggcctcatggcctgggctgccaaaatcgatggaacatttcctcagtactgaagtggatggtagagcctgacctgagcaagatgtggattgattgccctgtgttacccaaaagatacatttcttcgttttttttttttttttccaggaatgcgtggaagagagactgggattgtccaataactgaatacatgggctcctttttataaggggcttttttgttgtaatgtattggatgttgtagtta

SEQ ID NO: 550 - DNA, 613 bp, Canis familiaris
  misc_feature (1)..(613): n = a or c or g or t
aggggccccaccagncagctgnnctggctgaannnnagcgcngtgagcatcagcgtgaacaggaggccaatttcatggagatccagaaccagatcacgagtgacctactgactgagaaccctcaggttgctcagcacccagtggctccccaccgggtcttgccctattgttggaagggcatgactccagagcagagaactgccatcaggaaagtccaggaggtgcaacgccacgaaaaggaggcacagcgccaggccgaacaagcactggatgtcaaatgggaaaaccaggccttgcactcagcccaggcagcaatggagttagaatagcaggagagggaactttgtgctgaatttcgaaggggtctggggtctttcaatcagcagctggctatggagcaaaaagcccagcagaattatctgaattccacaatctacaccaatcagcctacaacccaatatcacctgcagttcaacaccagcagccgctgagctccaaatgaccatcattctcttctccctcactgagctcatgaaagctgggagtcagagaggaagaggctgcagactcccttcccaaatccattcccccactatccctgcctttggcccta

SEQ ID NO: 551 - DNA, 448 bp, Canis familiaris
  misc_feature (1)..(448): n = a or c or g or t
gccgcggcgncctgctgcccctctcntaaacacgcccagctcngnngccagaccccagtgccagcacgtgtacagtgagtgcctaaccccttagaaagcnaggtcttcagctgcgcacgtgcccaggcagggtaaggcaggactgctgtccacgcctggggcagaaggcttcgccgcaaatcatcgcatcgtgcatttgtgccgcaaggaccagagccatctgctcccagctcacctgccaggagactctggttcagacatcaacgggtcttccttccacacgaccttgaagaacgccacggttgtggctttgtgatacagaacagcatgtgggaaatcacagaaaagtcagagagaactgccagccccggggaggcctgtgctcagtcagggcaagccagggggctggtagcacgctccaccttgtacggaaatcttcaagtcagtc

SEQ ID NO: 552 - DNA, 506 bp, Canis familiaris
  misc_feature (1)..(506): n = a or c or g or t
cggcggctgcggnnnnncctcccccatcagctgatctgaacttccggccgcgccggccaccaccacttccgccctcgcgcgcttgggaaccggacccgggacgggcagatgtagaggacctgtctgtctaattactgcatttcctgcctttttttctcgaacccaccctcggataccgtaagaggaaatcaatacacagaggagtatgaaatgactacagatcccagcaataactcggcgtccataatgtccccgaggaataaacagccgccatgaacgccgggaaacgtaggctgtcaagcgataacacagaaactattaggtggagtttacggttttaactccggataggccctgggaccgcataaccttctgggagttgtagtccagaagcctgcattccatcatactttttaatagggtctcttcagggaagtaccacgagaagaatgcacttgatttcaggaaatggttgtacggttttgtcagtgggtccttttttttgt

SEQ ID NO: 553 - DNA, 623 bp, Canis familiaris
  misc_feature (1)..(623): n = a or c or g or t
atccatggtcgtttnntcttggggcttccaccacnnagtnntcatctgcccctgcaccaaggaaggcagagcagcccgggatcccggggccagggcttctactctgcccctggggaatgtgccccttgcatatcttctcagcaataaccctgtgggctctggaaccctcctcctctcccctgtcgnnnnnnttctgagactcccagctacagcccggctcttctagactcagattcctgtccctgaatgaggtctctggtaggcaagggctgagaggatccactctgttggggccagcactctgggggcgggggcggcagggggagcaggggtcctttgcttctctgccccccgtcccactgctcaggcagcagcgatgactcctgcaccgttggcctgtcgccgattagagcggcaagtgtggcagctgggctgcaggttagagaccgggcaggtccgcgcagccctgctgcggagggaacagcaagaggctgaaagtcaggaaggatggcaagtccagccagaccccgcccgtcccatccatcgtgttctcgtggaaactaaccaaaccgcgccgctgtgaccgggactgctgttctccgtgttgtgatctatcctctcaa

SEQ ID NO: 554 - DNA, 600 bp, Canis familiaris
  misc_feature (1)..(600): n = a or c or g or t
agaccacacgagggtaatctctatnnaaaaannnggcaatatgaaaagagtatttgagcgattctgtcgtggactaaaagaagtggaacgcttaatccaagctcgaggctgggagttcatgtggaatgagcgactaggatacattctgacctgcccttcgaaccttggcacaggattgcgtgctggcgtccacgttaggatcccaaaactcagcaaggatccacgcttttctaagatcctggaaaacctaagacttcagaagcgtggcacaggtggcgtagacacggcagctgtggcggatgtgtatgatatttccaatatagatcgaattggtcgatcagaggttgagcttgttcagatagtcatcgatggagtcaactacctcgtggattgtgaaaagaagttggagagaggtcaagatattaaggtcccaccacctctgcctcagtttagcaggaagtgaactttttctttttcaaactacaaataatctgtctgctggtatgacagacatcaagaatttttactctgagagtttttatagacttggaaaaatgtaaaattgtatatcctatctttaaaataaaactctcnnnnnnn

SEQ ID NO: 555 - DNA, 483 bp, Canis familiaris
caacaggtgcccaagggaggcctggcacaagcagagcctcacgtaggcaatgagagccgggttgtaaaaaccacccttgtctcctatttctcaattcttcctgaagctggttttcagagactggcctactttgtcttcagtcatccaaattttaatctgaatttccaagtgaaacctgttcatctaaattctcctggctgctcctaagtgagtgtcctgacttgagacctgtggcctctcgggtgtgtcatgattcttgaagacatgaagccccagctcaagccagactcttgcacaccagcaccaccccattactttccatccagtagggcagagacagcgcctgggaaaatgcataactgctgcctcatctccaggcctttccccacaaaaatctgtaacagaccttttcagtttgtgactcaaaactcaaacggcacatttctttgaacaaaattttatacaatctgaagtttcttaaag

SEQ ID NO: 556 - DNA, 641 bp, Canis familiaris
  misc_feature (1)..(641): n = a or c or g or t
tnaggtaaaacttttacagnngcccactgaagtnnacatcatcagaatctcacaatattttgagctaccattgcacctagatgtctggctgatctgntagtcagtcacaactttacttgagagcaagaattgtcccagttcttttccattccaaaactcttttaacagtgtggtgttaattaaaacataaacttctggttagataatataattctgaagtactattttagaataaacatttgtttcaggattcgataaaactcatgagttaatactatatttaaaaaagaattggtaacttttgaatgtgtgtaatattttcaaacctgtctaaaagccaaatatcctgcaaacagatacagcctgtcctatactatttaaatattttgccgttttgttttatagaaattattttgctgaattcacaaatagaatttgatttaagaagaattttgtcttgtgtgtctttgatttttgtcactcctttgttaataagcattaccttgggatccctgggtggcgcatcagtttagcgcctgcctttggcccggggcgcgatcctggagacctgggatcgaatcccacatcgggctcctggtgcatggatcctgcttctccctctgcctgtgtctctgcctctc

SEQ ID NO: 557 - DNA, 541 bp, Canis familiaris
  misc_feature (1)..(541): n = a or c or g or t
gaggggtgctgcatcacctgtnnnnangnntcagctctagaaggtgncctggcacagggncggcccccagcaggggcacatggcgggcgnnagacctgaccgtggggcaggaggatgacagggggacacgactctgggggtcggcgncaggctcagccacgagggactgaaggctgtcaaagacgggagggtccgagcccacctgtccagagcctgcggcaggagcacggtgtgtgaggctgtgcctatgggccaccaacccctgggatccgcgtccagggacctctgtccgtggggcaccaaggaggaccggccaccagcacgggctgggcgtctcgtgtggcagagccaacacccacccggccggccccccaggcggggagtccttggagccgttccagtcgtgagagattcaggcaggccagggaccgcggcccgtgcccctgagcacccccacgcaccgacgatgcccctgcaggctggagcctctgggctcatgtgagcannnnnngatgttgggatttcanngaccagattgttt

SEQ ID NO: 558 - DNA, 535 bp, Canis familiaris
  misc_feature (1)..(535): n = a or c or g or t
gcacacatgaatgacaaaagccactgtaagctcttcacagatnnnnntgctgctttggaattngcagacttctatgattttaggagtagctatccggattacaaggaaggggaccaccctgatgagactgaggaattgccttcagaaaagacagtagaatatgatgatgaaaccatggagttgattctaccttctggtgccagagtgggtcaccgctccttgatgagatactacaaacagcgatttggcttgtcacgggctgtggcagttgctaagaatcagaaggccgtgggccggatactgcagcagtacagagccctgggatggaccggcagcacaggagcagctcttctgcatgagcgggacatgcagtacgtccagaggatgaaatcgaagtggatgctgaagaccggaatgaagaacaatgccaccaagcagatgcacttcaggccccaagtgaggttctgagggtccccgaggattgagtggtgtgtgtcctgcgcaggtgcgcttcctgaggcccggacacagccgg

SEQ ID NO: 559 - DNA, 571 bp, Canis familiaris
  misc_feature (1)..(571): n = a or c or g or t
gtatntgacatcccagccaagggtcncaacattgtactgagtgaagagctggctggacaccagacatcagtcacagacattgcaacagagcctgcccagggacaggactgcgtggctgacatggtgacagcagatgactcaggcttgctatgtgtctggcagtcagggcccgaattcaaattaatgacccgaattccaggatttggggtcccgtgcccttctgtgcagctatggcacgggatagtcgcagcaggctacggggatgggcaagtgcgtctgtatgaggccagtacaggaactctgcacgtccagatcagcgcccatgcccgggccatctgtgccctggacttggctcctgaggtgggcaagcttctctctgcagccgaggacacctttatacacatctggaagctgagcagaagcccggagagtggccacactgaggtggaacactgtcatggtgagtgtgtacctgacacccaggtctgtggtgcccgattctgtgacccctcaggcagctcctttgctgtgactggctatgaccttgctgagatcctgagattcagcagcg

SEQ ID NO: 560 - DNA, 560 bp, Canis familiaris
  misc_feature (1)..(560): n = a or c or g or t
cagatgggcaggcctnnntgcctcccccgtccgaaatccagcggctctatgaacttctggctgcccacggtaccctnnagcttcaggctgagatcctgccccgccggccacccacacctgaggcccagagtgaagaggagagatcggatgaggagcctgaagccaaagaagaggaagaggaaaagaagttccgcccggagccagaaacgggaggcccgcctagacaaggtcctctcagacatgaagcgacacaagaagctggaggagcagatccttcgtactggcagggatctcttcagcctggactcagaggaccccagccccaccagccccccgctccggtcctcagggagcacactcttcccccggcaacggaaatattgagtgttgttgcagcctttagcgtgcagagcttataccttctgggctctccttccctaactctgggcactgggaactgggcaagaggagagagctcccaagctcccaacaccgcaccttgccagaaagaggacatgtgtgtgtatttatgctttctgttgaacatttatttggagacc

SEQ ID NO: 561 - DNA, 735 bp, Canis familiaris
  misc_feature (1)..(735): n = a or c or g or t
catnnnacacacacaagtttcancncngcacnnnagcacttttacacagcnnctggtgtcacagcttctacaccaatggnnagaagagggttncctggctcatgtagacagggttactgatttctatannaaccagaaggatgcattactngcagctgcaaacaaatggttaagtggtttggcagaatggcatgtcccggctgctggaatgtttttatgggttaaaattaagggtatttatgatgtaaaacaaatgattgaagaaaaagccattcagaaaaaggtattaatgcttcctggaaatgttttttacatcgataactcagctcctagtccttacttcagagcatccttctcttcagcttctccagaacagatggatatggccttccagagattagcccaacttattaaagaatctttatgaagaaatcaaactatgaaaaaatcaaactctttcatggatttttcagataaattatttttatgttttagcaagaagaaatgattattggcattagacttacagattggatttcaacaatcatgtcatgtctgtagtaattgtgcccttaaattcatcagattgacaaaatataatccacttataccttttgataaattttcactctgcaaaaatcattttctcctggattttattataaataactctaattgctttctgatttcccataaactttccttgaaacattttacaataaattattnnnnnnn

SEQ ID NO: 562 - DNA, 605 bp, Canis familiaris
  misc_feature (1)..(605): n = a or c or g or t
caggtcatcgaactcnanctcaaccagnnncagatanctcagatctcagtaaagatatcttgctgtcntcgnnnnaaagttcttcgcnnnnnagagaatngtcttgagctcagcatgcttccacagagtatcctcagtgattcccagatctgtctgcttgctgtggaaggcaacctttttgaaataaagaaacttcgagaactggaaggatatgataagtacatggagaggttcacggccactaagaagaagtttgcatgatgttctccaggaacatggaaaccttacaggataccaacatggaatctgttgcaatctggctgaatcagaggctcctgttgtcaaggattatctgcagtaaggagatgatacttctgaagataatcattttagtgatctttttccttttcagggctcatcttaagtaagctaaaaaaaatcaagagatagtaagagtcctccattttgagtcatggatagggtaaaggacaatgttgatcatcaaaaccatcctaagtctggcttgaagaaaagcagtagctatttatacaatgaggggatgctccttggtaacagaatcactccatatcacaggctcgaaattt

SEQ ID NO: 563 - DNA, 572 bp, Canis familiaris
  misc_feature (1)..(572): n = a or c or g or t
cccaagtccgaggagggatggtatttgaactagncaattccattgtgctcccatttgactgtcgagattatgcngtagttttaagaaagtatgctgacaaaatctacaatatttcaatgaaacatccacaagaaatgaaaacatacagcgtgtcatttgattcacttttctctgctgtgaagaattttacggaaattgcttctaagttcaatgagagacttgaagacttggacaaaaaaaacccaatattattaagaattatgaatgatcaactgatgtttttggaacgagcatttattgatcctttaggattaccagaccggcctttctataggcacatcatctatgctccaagcagccacaacaagtatgcaggggagtcattcccaggaatttacgatgctctgtttgatattgaaagcaaagtggatccttccaaggcctggggagaagtgaagagacagatctcaattgcagcctttactgtgcaggctgcagccgggactctgagggaagtagcctaaggtggttcttctgagaactcatattaaatagggatggtctgtcactca

SEQ ID NO: 564 - DNA, 477 bp, Canis familiaris
  misc_feature (1)..(477): n = a or c or g or t
agcctttctccaggggctcaaccacacagcgtcaccntnntctgttggctcacgtggatgcgcgcctgcctttcccctttcttcgtgcaaagatgtaacgcacataggataaagtgcattcacttgaagggcgccctggcacatgctctacattcgcctgcacctgtgtgatcggatctgaccacagggtatccccagtccccggaaggagctgcctgccccctttcacatccccccatcagcccccgctgccaggccccggaggtcaccgctcttctgctgctagtgcagtgagtcttgcctgcccttggagctgctacagatggaatcacatggggtaggatccagggtctggcttccttcacgtgagagcatgacgtcgaggcaggcgtgtggctgtgctggcttctctccacggctgcgcactcttcggttgcctggctgcgccgcaattnnnnccttctgcttttgacagac

SEQ ID NO: 565 - DNA, 402 bp, Canis familiaris
  misc_feature (1)..(402): n = a or c or g or t
aaaaaaaaaaaaatgaataaatgagcatcttgccactaacccttcctcctgaaaccacagcagggtttcaggttccaatcagaaacattggcaaagtgacattgccatgcataaatgtgatccacagatgggcctggtggtatttgtaactttttgcaaggcatttttttatatatttttgtgcacatttttttatgtttctttagaaaaaaaatgtatttcagaatatatttatagtcgaacaattcatatatttgaagtggagccatatgaatgtcagtaggttacatttctctattatcttgaactactggcaatttgtagagaaatatatatgatctataaatgtgattacagctttttaatgttagccacagtgtattnnntcacttgtactaaaat

SEQ ID NO: 566 - DNA, 371 bp, Canis familiaris
  misc_feature (1)..(371): n = a or c or g or t
cagcccgaggcgcgacccgtgaggacggcgcacccggagacggtcctcgcgaacgtactgcagctaccgtgactgacagtggcgatggagggggtggtggcggcggggctcctccagtggggatggttaatgcgggcaccaggcgccactggccgcccttccaggtgcttaactcttgtccctgcaagtgttactgccgccaccagccacgtcatcgccgtctaccacgcaacgtgtctgcctggctgagcacgcccaccaaccacctgagtgagccaccctgggttgccaccatcaagctggccggctccctggtggccgggctggagcacnacgatttgcaggccacccattccaactgagtgcagtct

SEQ ID NO: 567 - DNA, 647 bp, Canis familiaris
  misc_feature (1)..(647): n = a or c or g or t
tgaagaaagcatgaatattgtgttncagcatattgattttgccattcagtatnnagaagacnnagaattcaaagaaccaaaggaacatgaagatgaatcttcttctatgtttgatgaatattttcaaggacaccaaaatgaatgaagaatttttcagagtaactatacctgaaacactttcaattgaaccaagacattcttcttttcaaaagatgcaatactagaaagctacttatttaatgaaaaaggcaatacttggctctttatcagcagcatgcctaaatcaagttgtaattattctgaaatggctggtgtttcaagtggaatcttttagtagtatttttacagcatcaatttagattttaaatgttgaaattgaaatgaatgcacatagatttgcatataatataaatgagcatctgtggtacagttaggactcagtctacctttatttttcctgtttgatttttgttatttttgagggtttttttggagaggcaggaattattataacaatatacacatgtgtgtccaaaggaaaaaatctaggatatagttaagaccattgcttatttgtatgtctgaattttcctatatttgaaaatgtatcatttgtgtaattaaatgaaaattaacttttaaaaaac

SEQ ID NO: 568 - DNA, 421 bp, Canis familiaris
  misc_feature (1)..(421): n = a or c or g or t
gaagttcaaagattgagcccnngggcactccaatgtnnnnctgttgggagatgaggaggaagtcnnnnngaagcnnnnncaagggagacagaaacnaacagtatgaggaaannnagaatcagtggagccaaccnnnanagtaaggcnnnnnnnnnggttagaagcaacttgaannnagctctcacttctgatgaagcagacttggagaagagaaccatcaagaatgnnnctgtccaataaagccagctctggtgacagaaaactttcttgtgctgcccaaaacgagacaaatgatagaaactcctttctcatcactaatcagaatttggaaaattcaaatccaaattgtactgcaaaattgccttcgctcagtaaatcaaannnatcttcctttactttnnnnnacagatgtagtgtgaaa

SEQ ID NO: 569 - DNA, 507 bp, Canis familiaris
  misc_feature (1)..(507): n = a or c or g or t
gacagagaatgaccatgttctgcctctgcaagagctggccatgagnagtctccatcacacctaccacacttttcttaaagatttgaactttctgtctccagtctcgttacccagaagtctcctggagctgctgcactgccccctggggcactgtcaccggtgtagtgagcccatgtttacgattgtctaccccaagctctttcccttgagagagacgccgatggcagggctgcaccaggggaggacaacagttagttttgtggcttactgctgctccacccagtgtctgcagacttttgacctactgagttgataaacactcaagagcctcaggagttttgccaacttgacactgcagtggcctgcatattgtacgctgtttgtgtggcagagggacaggacagtccagcctggcggaacaggccctcacatcctgtcctgtcaaatgcgggggactacagaactctctggannnnncatgattgagcttcagagctgaaatgcctt

SEQ ID NO: 570 - DNA, 622 bp, Canis familiaris
  misc_feature (1)..(622): n = a or c or g or t
tgatttttttttttacattagggatcatgcataataaattaatattcacatatattatcatccntaatgtagggagggatgtatnnaactgcccgtgatatgtattttacttctactataccagaggggaaactgtaaagcagctacatgtgtaatcttggtttttttcacatatgtaggtatttgttttgagtaggtttaagaaaaaaatctttaaatgaaattgaattcctgatgaaatagtataaataagtattataaaaaccagtattctaaaaataaaaaaggatagggccattttttattttgcttctcttttgctattgttagtattcaaaattaaaacatcacattgttacctgttgtcttaatgtatttactgagaacagttagcatggagatgatgaacaaggagttagcaataacaaagtataaattcttttcagcagttacttgagaggaaaacaatgtaacgatctcattcagtctttagcaattctgtaaaataggtagtattatcatctctattttgcagatgaggaaataaggttttagccaggttaagagatttaccccgttcacacagcaagttggtggttgagccagaccatgagtcttgtga

SEQ ID NO: 571 - DNA, 82 bp, Canis familiaris
  misc_feature (1)..(82): n = a or c or g or t
gataannnttttcttcattaaaatcagaaatttggcattgacattttggtatattaaatggtgtataaggatttttggatgc

SEQ ID NO: 572 - DNA, 642 bp, Canis familiaris
  misc_feature (1)..(642): n = a or c or g or t
tcctgtcacttgagtcagnnnnngggggctggtttgattggatgatgccaacgcttctcttatngctgataaatggtgtgattgtnntgagcgtctttgtgaagctgctggtccatggagagccagtgatccggccacattcacgctcctcagtcaccttctggagacaccggaagcaggccgacctggacctcgccaggggggattttgcagctgctgcagccaacctnnnnnnctgcctgtcggtgttgggccgcacactgcccacctcccgcctggacctggcctgcagcctctcctggaacgtgatccgctacagcctgcagaagctgcgcctggtgcgctggctgctcaagaaggtcttccagcaccggcgggctgccccggccaccaccgcaggctttgaggacgaggcgaaggccagcgcccgggacgcggccctggcctatcacaggctgcaccagctgcacatcactggtgaggggtggccactgcttcctggctggcctcagggtgcccgatgccgtctctccaccttggctgggtttgctagttctctggcccatcagagccctcttcccactgctgccctagaacagtgggacggaccttccacccacaaccatggccacaaaggtggct

SEQ ID NO: 573 - DNA, 160 bp, Canis familiaris
gaaatcttgtttttgtttctgtaaaaatataaatatatatatatatttatgcattgtgaaaatgcagtccattgtgtaaaattgtacatattcctaaatccctaacaacctgtactaaactatatgtacaaagaactatgttgtcttatttatgttttgt

SEQ ID NO: 574 - DNA, 539 bp, Canis familiaris
  misc_feature (1)..(539): n = a or c or g or t
atcaggtatacaactgtnnatgcaaatggatatctgaaaaatggttcagctngacaactcagccaatcagcacatnnngccctccaactaccatacaatgtacttggtttaggtcgaagtgcaaatttccttgatcatctttatgttggcattccccgtccatctggagagaagtctatacgaaaacaagagtggaccgcaatcattccaaattcccagctaattgtcattccatatcctcacaatgttcctcgaagctggagtgccaagctgtatcttacaccaagtaacattgttctacttactgctatagctctcatcggtgtctgtgttttcatcttggcaataattggcattttacattggcaggaaaagaaagcagatgatagagaaaaacgacaagaagcccatcggtttcattttgatgctatgtgacttgcctttaatattacataatggaacggctactcacttgattaactggaacactaaatttggctgatagaagaaattaagggnnnntgaatattatttataaa

SEQ ID NO: 575 - DNA, 612 bp, Canis familiaris
  misc_feature (1)..(612): n = a or c or g or t
tgttaccatattataacgtgaatatttatacagtagcctcttcaatcntagnacnnnagcagttttcattccaaaaatgcccggtgtgatgctttacactccacaaagtatggttcaaaggcacaaggtcatggcccttgtcatagcagttgaatgtgcattgaaatatttttctatgattttttttttaattacaatagaaaaataagctgttgtaacatgtgaggtcatgacaatttatgtatttatatttgaaatcagatttctataaacttgtatttgtgtacagaattctcagtgggtttatatattgtgacatttatattcaagattgagatatggattatgcttaacagtaaaagctgaaatgagacctttactttgtttaaaatgctgcactgtgcaagtttggaaatgtacattaatttactgtatataatatcttgagtttgtttatacctccaagtttttacactgaagatgaattagctttaaaaacattcaaaacctttttttttttttaagggaataagctgttgggctttatctgtataaatgtgctttttattttccaatgtacaatgaaagtttatacttatatttcactgcatc

SEQ ID NO: 576 - DNA, 343 bp, Canis familiaris
  misc_feature (1)..(343): n = a or c or g or t
cgggatggcntgtatttttgtgatgtgattgagtaggaaggacaggcnnntttgaagttccaggtgtgggtggttcancnnnnngctaccagagngnnnnntgtttctccttggaagagcttccaggatcccgagcagattgaacntantcagctttcncttctgaccatgccantcacantngtggaaaannnnntgtacacagatttccatnnnnnnngtaatantnnnnnnngggannnnnnnnnaatnnnngtgnnnnnnnnnnnnnnnnagatccannnnnnnnnnngctnnnnntccaagnnnangtnnaannntaaaatcnnnnngtnntngcaaa

SEQ ID NO: 577 - DNA, 584 bp, Canis familiaris
  misc_feature (1)..(584): n = a or c or g or t
tcacctccatcgcccgtaccatcaatgaagtngagaaccaggtactgacccgagatgccaagggnntgagccannagcagctcaacgagttccgggcatccttcaaccactttgaccggaagcggaacgggatgatggagcctgatgacttccgggcttgcctcatctccatgggctatgatctgggagaagtagagtttgcacgaattatgaccatggtggaccccaacgcagccggcgtcgtgaccttccaggccttcatcgacttcatgacccgagagacagctgagactgacacagctgagcaagttgtggcctccttcaagatcctggcaggagataagaactacatcactcctgaagagctgcggcgggagctccctgctgagcaggccgagtactgcatccgtcgtatggcaccctacaagggctctggggctccacctggagccctggactacgtggccttctccagtgccctctatggggagagtgacctctgacctcaacccctaagactctaaacgattcggagagagggaactccctctggatgatcccatccatcccttggggcaagggcc

SEQ ID NO: 578 - DNA, 538 bp, Canis familiaris
cccttatagtgaacacagcagctacctagaactgaaacgttttgttcagtggctgaagccccagaaaatcatacctactgtgaatgttggtaccttgaaatctaggaggacaatggagaaatattttaaagagtggaaattggaagctggatattgactttacccgaaaggactcagaactgttaagtaacttaggtatagctcattacttagttaaatctttattgatatgaaatatgctttgtatggaaagccctgtgaaggctgcttagagagcttgttttctcatttgtgtttaaatagcatgtttatggtgccaggtatctcgcagcatcatcagtaatgatggacactagtctcccaagtacccttgattcttgctcctccctcaggagcagttatactctgcatctagccttaggagaggcaacaaaggcagccttagggaccaaaggattcatggtaatagataagtgacattgaaagcattgtctataagtatgtatctttaaaattatttaatatggagcatattttt

SEQ ID NO: 579 - DNA, 470 bp, Canis familiaris
  misc_feature (1)..(470): n = a or c or g or t
acaatactacatccactaccattcagaaagccacttagtgattgtatatgnctatgtttccttatcccatggaagaaaaaaaaacaattgtccacaatattgatgttccncttgggttctgtgtacagacccgtccaataataaatgtgtgtggtttctgtgagttgccgacgatcctgcatcatatctctttggagtcctttcattttaagttcaatttaatggaatttttttgcaagtgtcagaagacatacagttagttcttccttcccgcccctttcaaaaatatgaaagtgaatatttggaagaactgctgtgttaaagatgtgttgtgtccccccgtgaaagtgagtgggtgtccgtccatgccctgaataccacggactagtgtgcagaggcaggggcagccagctggccccgcgttgctgtgcgttttggtcctgacctgctccacgctcctgttgcaagca

SEQ ID NO: 580 - DNA, 512 bp, Canis familiaris
  misc_feature (1)..(512): n = a or c or g or t
aggaaannccacatgagcacacagcaagatggtgactacctataagccaagagaagagccctatggaatagaaaccagccatgctggcaccctgatcttagactcccggtttccagacctttaagcatataaatttctgttatttaagctccatagtctatggcaacccgagctgactaaaacagaaggcgtgatttagatgttgtgaaggcgtccaaaatgagtaacatgtggactctgccctcaaagacctctagagaaaatgatagtatgcacaatggtacttggtctgctctgctgcccatatctctcctgtatctacccccctctgttccagctataggttgtgctctaggatggtcccttcatgattgtcatccctgtgtcatattgaacattgtcataaccacgcatgatatccttaccaggttcctcttggtctaagccatcttcatcactgacaactgaggtaatttctaaaacagggatcnnnnnnaattgctcctccaggt

SEQ ID NO: 581 - DNA, 333 bp, Canis familiaris
  misc_feature (1)..(333): n = a or c or g or t
acatctgtnnngggatgctnnngggtaaggagaaaagcaaggnaggtcagcggtnnctgttgnnnnnnctttgnnnaggtncctttataacccagcnnntccccaagatcacagaaacgatggctgtnnnntcagttgaacgccaatgngnnnnnnngattgcatttagnnntgtctggatcataagatccaactctttgaagtctagactcacactcagtgtgagaagatatgcnnnnnaagaaaggccgatgccnnnnnngacccactcaggggagagctggttaattccagctttgctttcnnnnnaactcgaacaggaatgtcccnnnc

SEQ ID NO: 582 - DNA, 681 bp, Canis familiaris
  misc_feature (1)..(681): n = a or c or g or t
gaactattcctgcngatattcccaattcntnngtggtattagtgtcatgttaagatctgagaagcactnggtaaaaattgcgactgaagaaagccaggaaaagtccctgaaatctgaggatacacaaatggtcaatccctaaactatggttctctaccctgactgcagattagaagcaccagaggagcattaaaaaacaaagcatctctgggggtggtatctccctattggtgttttgcaaaggctccacacctgattctgatgccctgggaaggctgaagtcctaaggtcaggaactggcaagtgaagctcatgggccaaatcaggcctaacacctgcttctgtgaagttttattggaccacaaccatgctctcatttgtttatggccactcctgtgctacaacctcagacttgaatagttgtgacagactgtatggccagaaagcctaaaacgtttaccatttggcccttgacagaaaaagttggccaactcctgacttgggtcattctcttttcccttctttttgttaattttactggttcgttaagaattgttgatgatagccatttctaaaaagaaaaagaagaaaaactgtttcctgatctgtaaagccataaaattaattggcacattaagaaattggatttaattgcatataaaatttatccctgtggtttat

SEQ ID NO: 583 - DNA, 542 bp, Canis familiaris
caggtggccgataaagctgtcctcgaacaggaagagacagctgctgcttcccacgagccagaggaggagcagagcacaacaacccacgttcctgaaactcgggaacagaaacctcattttgagtcatcaactgtgaagacagagagcctcagttttggcagtgtttcaccaggaggagtaaagctagaaatctctaccaaggaagtgccggtagttcacacagaaacaaaaacgataacgtatgaatcgtcacaggttgatgctggtgcagatttggaaccgggcgtgctaatgagcgcgcagacaatcacgtctgaaaccaccagtaccacgaccaccacccacatcaccaaaactgtgaaaggaggcatctccgagacgagaattgagaagcggatagtcatcacaggagatgcggacatcgaccatgaccaggtagtgtgcatgaggccgtaaataccctggcagaagaacagacatacactggtcagccctactcttcccagtgttgttcttctagtccatcatgcggtctgaacagt

SEQ ID NO: 584 - DNA, 640 bp, Canis familiaris
  misc_feature (1)..(640): n = a or c or g or t
catgcagaaattcacgcagagcatgaagctggacggnnnnctgnnnnggctgacgttggagcgcggcacgatgctggggnngcccacggaggctgagcgggcggaggagcgcgcccgcaaggagctcgccaggaagtacctggcggagcacgtggacgcccctcagctggcatccagcttcgaggcgaccatcaacaagtttgataagaatttctcggcgcacttgcttgacctcctggccaggctgagcctctacagcaccagcgactgtgagcacagcatggccagcgtcatctccagactggacttcaatggcttctacacggagcggctggagcccctgtctgcagagaggagccagaaggcagccccccaggtgcccatcccacgggcccccccagcatcagcgcccagggtcgccgtccctgcccagtgaggctgctggtgctgcagagacaggagctcagaagcttttacccgagtgtcgccgaaccacgtgtnnnnnngtttaaagtctggatgtggcccctctcgctgccctcgtttgttggggtcctgggttccactctgcagcagccacccctgaccagagtgggtgtgtccacagccgtgcttccgtgagcttgcttcagttgtgcag

SEQ ID NO: 585 - DNA, 583 bp, Canis familiaris
  misc_feature (1)..(583): n = a or c or g or t
atacatctgctnnntgtaaaatgccaacctgtcatccccagngaggtgcatgggcccatggtgcacatgtgtgcancttgcacctgcagcaggagggccaggcgtcagcacccangaaacactctcagggtgtgctcaacagggccactttgccagggaccaacaaataaaaacctctagacaagatcaatttcacatgggtgctagatgctctgaggaagtcaacaagactggcatcctgaacccacctgccaaaggacttgagaaggcagttcagttttttaaaattagccctacgactcataaaaatgattctcgcaaaaggttcacttcttaagatgtccatacgcaaaattatggaagaaaaataccatgttgagatggctgtattttcttcacaaatagatatttcttgttgatttttgtggcacttagaagatgtcccagattagagataatagtatcttttgattaaacagaagctttgcacttcactttgatgcacgtactaccctcagatatgatactattaatagttttacactccttccagcaaagttcaaaccatggtcatttcgctgat

SEQ ID NO: 586 - DNA, 456 bp, Canis familiaris
  misc_feature (1)..(456): n = a or c or g or t
tnngtagtaaacattttcaaaatttttttgtttgaattatttatgaaaagcttttcaggactgaataatatgaaaaagatggtctctgagtgaaatagagctttgtatgtaggtagctaggaagtgacagacctctattggctgaagttaaggaatggagccctctcttgggttgaattgtgtgtcgcagaaagatatattgaagtcctaacctctagtacctgtgaatattatttggaaataagagtttttgtagatgtaatcaaattaaggtgaggtcattatggtaaaccctatgactggtatccttagaaggtgagagaaatgccatgagacagataacaccgggagaagacaggaaatcaccaaagtggaaatggaagttctgcagctgcaagccagagaactccaaggattgccggtgatgccacaaaaaagcagaaaacattcttcaag

SEQ ID NO: 587 - DNA, 584 bp, Canis familiaris
  misc_feature (1)..(584): n = a or c or g or t
tgcgagcccagaangaacaacnnttcaatcatgatatcaataatgaactgaagaaactggctagttactacagggactacacagataaagaaaaagaaatgtgtcaccgaatgttcactcctaatgataacggctctacagtaggagaaaattgaagattcttcagctaaactacagacaagagcggccaggctgctggagtnnnnngtcagtggggctagggggctttctggaaagaactccccagtgcatgctattgtggggacacgcctggaagttggannnggaattccacagccctgggccgttgcctcatctctgactgacgctgctgaaatgtgttttcacaggtgctgttttctgtttcacgttttcatacacagagtaggggnnnnnnntnnnnnnnnnnnaagtnnaaaaatgctatttttttaaaggcagtttttttttttttctttttttaantggaannagtccttggcttttctcccagtcccagccccctttccggctgttaatgtccctgggtaaatacaaatagagattactttgtttattttatagggttttctgttttagagaga

SEQ ID NO: 588 - DNA, 547 bp, Canis familiaris
  misc_feature (1)..(547): n = a or c or g or t
tcaaccacacagtgcgacgccttgtngnnttcacctttcacccttttgagcctttcgctatttcagtgcagaggactaatgctgagtatgttgtcaacttccatatgcgacactgctgcacgtaggtgcctcaccaaagtccggttatctggtcttccaagacattccccccttctcatctcaaggggactctgaagcaaaagctcctgactaccagccttgttggttccagactgtaatacctcagatggggagagtcggagagaggagtgagggtgtctcagtctaatagaatctttatcatatccnnnnnnnnctgattgatggaaagtcatctggtctttaccttgtgggaatgtctagcattaattaagtctgtttaatttttgttttatattgcattttattgctatgaagatgagagcattaccccttcccccttggcatctgttctttggcattatggtatgcagtctgaagcagggatgtcttgtttactcacagggactgtgtacnnnctttccacgtagccaacaacagggctgtc

SEQ ID NO: 589 - DNA, 584 bp, Canis familiaris
  misc_feature (1)..(584): n = a or c or g or t
agttncntcaggtggnccatgatctaatttaaggaacangcaactaaaaatgtnnngccaatcatgataatctgcttacttgcatggagaaagctctcccgagctgcatcattgcagccacctcctgctgtccacagcactgctgccccgtgtggctgagaaagctgctgccaccacagggctatgatcctcttctgtgtgtttctgtcattcttcattcatctagcaagtattccttgagctcctgtaggacaggtagccagggagctgttggaggtgtagtagcagctgggagatgagactcatctgtctttatggcagctctcctccttttgctgagcacctaggcatctcctgatgcctttttctgttatgttatgctttttttgctttgtttttcttgttcctgatctgtggctgagctccagttgtttggcccacgaccaaatccctgagagctattccccagtatcacaagggctcaccttccagaggatgtgaagtttggggcaatattatatcattgctgactgtgtgctcattatgttgtttttgtaacttgaacataaaaaggtaatccctta

SEQ ID NO: 590 - DNA, 472 bp, Canis familiaris
  misc_feature (1)..(472): n = a or c or g or t
agagctggagacgnngtncagagtgatggggaaggcgatgcttcgggacagtaatnnaaaaaggatgaatgaacgtgnnnnnntcctgaagaggctcagcaggaagacaccccccactctcttccggggaggctccatccagcagtgtgttccccatgggtatgccttctctcaagaggagcatggagccgttactcaggaagagatagtccgtgcttatgacaccaccaaaaagaaattgaggaagaaatgagacatgaattgtcctgatgggtcccaggaaagagatgcagtttgttgcacccagtgttaacacatctctgtcggaagagactggtgtcagcagccaaaacaccacgaaacacatttctgtggccttagccaaccggtttgnnnntgccccttccctnnnaacnnnnnnagattccgcaggnnnnnnnnnnnncctcccagtnnncggcagtgcttggcc

SEQ ID NO: 591 - DNA, 587 bp, Canis familiaris
  misc_feature (1)..(587): n = a or c or g or t
aaaataagcccaaaacannagctacgtgtaagagagccacatgttatgatgatctgttttaaattttgttcgcttagagaaatgcgagttcagttctcgcccaacctttcatctatgttgctaagagcagcagtgtcccgaccacagagcactgacccccattctaggcacaccggtgatggctcttactagtgcatgcgtgagcgtgacttgctccatggcgaatgctaggctctagggcatacaaaacaggaatacaaaataatagattgttctaagcaatgtcatttctgtttatgaatttgatttttcccttcatttcatgttagattgaaaacgcaaacaaactgctttcaagtacacccagaagctatctgtgttaccagatgtgttgtgaacactctatttttcataggtgcttccttaatatatgtccattgtagtgatggagagggactgggatctctcaggctctttacttgccagttgtctcctgcagctaatggaaatatatattttattttagaatataatttaaacatgaaggtctattctttgcactttttattaagacatatatatatata

SEQ ID NO: 592 - DNA, 539 bp, Canis familiaris
  misc_feature (1)..(539): n = a or c or g or t
cngncttccaaannntnntnnctctacaaaccctgtatctgagtgaaaacccgnnnnnntgcaactgctccttcctggacttcaccatctacttaatagtgtcccatctgaaccatccagatgagcaaaacgccacgtgcgtggagcccgccgagctggcggggtggcccatcacgcaggtggggaacccgctccggtacatgtgcatcacgcacctggaccgccaggactacatcttcctgctgctcatcggcttctgcatcttctccgcgggcaccgtggccgcctggctcacaggcatgtgtgccgtgctttaccagaacgcccggcgcaaggcgagcgaggacgaggccgaggacgagcacggccagaggggggatgacagcaggcgcatcttccaaaacagggcggactcgggccaggacgggttccctcagctgatttagctgccagagactgctatctgacaggccttccccgggctccctccctgccttccctcccgccctcctccttccgctcccccccaccccagctgt

SEQ ID NO: 593 - DNA, 637 bp, Canis familiaris
  misc_feature (1)..(637): n = a or c or g or t
tgtgtgtgcaacagaggaacatggctcaagaaactaatcacagccaagtgcctatgctttgttccactggctgcggattttatgnaaaccctcgtacaaatggcatgtgttcagtatgctataaagaacatcttcaaagacagaatagtagtaatggtagaataagcccacctgcagcttctgtcagtactctgtctgaatctttacccgtccagtgcacagacggcagtgtcgcggatgctcagttaccactagactccacgtctgcatctgtgcagccaagccctgtatcaaatcagtcacttttatcagaatctgtagcatcttcccaagtggacagtacatctgtggacaaagcagtacctgaaacagaagacctgcaagcttcagtatcagatacggcacagcagccatctgaagagcaaagcaagtctcttgaaaaaccaaaacaaaaaaagaatcgctgtttcatgtgcaggaagaaagtgggacttactgggtttgaatgccggtgtggaaatgtttactgtggtgtacannnnnnactcnnnnnntacacnnnnnnctcttacaattacaaagctgatgctgctgagaaaatcagaaaagaaaatccagtagttgttggtgaaaagat

SEQ ID NO: 594 - DNA, 377 bp, Canis familiaris
  misc_feature (1)..(377): n = a or c or g or t
aaaatctctgttgttatggncttannnnnngcattactctattgtaagctttggtgtttaaattagcaacagggatggtggggcttgaattcttgttacttgnnagtaggatctatcaacacgaataacacatgcacataaggcacacaactcacaagtcaggtcatctcctggcattcagttgtcatttgaaggtgaaattcctttacgtttccatcccatcggtcaaatggaaggatccaggggctcattggttctcttccactgttttcctttatgagcaggagctaacagaagtcagtgctctgtgttcaaagaaacatttctagcaaaggggagacacagttttaaaatgttaccattagggcagcccccgt

SEQ ID NO: 595 - DNA, 441 bp, Canis familiaris
  misc_feature (1)..(441): n = a or c or g or t
ccaaatccagcccnntttttgggggtttgcccaaannnntgtgttaatcaaaggtttagnctttagggtcnnnaannnaaggttcaaaatcccccctcnnnntttannngnnnnnnnnncttggannnnnnnntgaacttttcagaccctnnntttcctcagtnnnncannnnnntcnttangagaatcaaaacnagtacatggagggtaatgaggggaanntatgtaagtaaagggctttagggnnnnnnggatggctcagttggttattcccagggtcctaggatnnngtccnnnatcagnnnccctgcnnnnnnnngnnngntccctnnnnnnctccccctgcntnnnnnnntnnnnnnnnngtcaaataaataaataannnnntttaaaaataaaaaaaaaaaaaaaaaaaaaaaaaaaaaaaaaaaaaaaaaaaag

SEQ ID NO: 596 - DNA, 460 bp, Canis familiaris
  misc_feature (1)..(460): n = a or c or g or t
tgtctcataatacccacannnnnnacattctctctgtaattatgaanngtccttgttttatgttaattaaaagagaatgtctttgatcattaggatttgtcggtgttggattgtttccactgtgaggnncttaaactttttcgcttcataatattaaagcaactcatgttagagaccctttcaacatgaaaggtttgtagttgagacattacatatattttattgtttataataaaaatcatctatacagaagtcctgggtgttaattttaatatttgcacaacctattttccatgatatgttaacacctacactttcactaactgttgatgctgttttctattgaaattctggagcctagggagctatgtgttcgttttgtttattttcattcttactttcctgaagcaagagactttgtatggccttcagtgcaaagacttcagaccaattctttgta

SEQ ID NO: 597 - DNA, 606 bp, Canis familiaris
  misc_feature (1)..(606): n = a or c or g or t
agccccactctggtttcatnnntattcagaacgtccctcatttctgccaacangacttttattngcgtgctcnncgcttgactgtcaaactgacatgacagnnncnnngnnncttaaagacgaggtgagaagtagtcacatattgtttagatctagaaatgggcacataacctgtgctgagaaagccaggggcttaacagatgcccgccgattgacctcgttggcagagtactggttggacatgttagcaggggttccatttgtgctgccccacagccacctgtcagaaggtggttagtgcatggggcactgggacatgtgaagggcggtattcggtttcagtggctttggacagaagagcgggctctgaattgaagtgggtagccgcctagtcaaccactcccaccgtgggactgttatatttaactgaaccagttatggccttgaaatttcagggtagtgtgggcccgttttaaggctctgaccaaataggaaacacaaagcatctagaaatataaccagcgaggcttttccgcacggctaaaacggatgagggctcttccgagggcagagggagacggaatcttccctgtgttccagggtttt

SEQ ID NO: 598 - DNA, 628 bp, Canis familiaris
  misc_feature (1)..(628): n = a or c or g or t
tcgatgggttcatctctctcggngctccctgggggggttccatcaagcccatgcnnnnnnnngnntcaggtgacaaccagggcatcccgatcatgtccagcatcaagctgagagaggaacagcgtataacgacgacctccccctggatgtttccttccagagaggcatggcccgaagaccatgtgttcatttccacgcccagcttcaactacacaggccgtgacttccagcgcttctttgcagacttgcactttgaggaaggctggtacatgtggctacagtcacgtgacctactggcaggactcccagcacccggtgtggaagtgtactgtctatatggcgtgggcctgcccacaccccgcacttacatctttgatcatggctttccctacacagaccccgtaggggtgctctatgaggacggtgatgacaccgtagccacacgcagtactgagctctgtgcccgctggcagagccgccagccacagcctgtgcacctgctgcctctgcatgggacagagcacctcaacatggtcttcagtaaccagactttagagcacatcaatgccatcctgttgggtacctaccgacataacacccctgtacccccagctgccagcccagggcc

SEQ ID NO: 599 - DNA, 611 bp, Canis familiaris
  misc_feature (1)..(611): n = a or c or g or t
aaaattanngtcatcactcaaagatnaatgtaggaccagacattnnngcttcagataagccacctgaaacacacacacacacacacatacacacacacacacagttaaatgcaatgtcgttctgaacatctctgagctttggctacctgttgatacaaacacatcttttatgagagggagaaaaaaccttacatttcaatacaaagcaaagcaactttccgattttagtatatactaaagagaacaacaacattttaggacacgggcttacacatgtgatttgggggggccataaatcctactaaatctcgtaggccttatgacagcatagaataaggagcaagggtgtcaaattctaatcgacaggcagatcctgcaattctgagggccagtaggaggacagataccaggaagatgggccagtgagagagtgtcaggaggggacagagtcctggacaccgagcagcgcagcggagtgaactctgcttcacctgaggccagcaggaccccagtagacaggcggctccttcccaccgctcctgcatttgctccggctccagaatgacactccccacccttgcctctgcttctgtgatgagatggacttaata

SEQ ID NO: 600 - DNA, 528 bp, Canis familiaris
  misc_feature (1)..(528): n = a or c or g or t
gacaacccctccctgcctacnnnnnngnnnctgnncagggnnngtnnntgatcagactgtggcacagcccctgtactgggagcctggttcttggagcacagccttgtcccccttggccccctgtttttccctggtgtaccctcccctcacatccagctcccctatgacctggcgttccttcttaggaccctgccttgatcccacatcttctggtctctgctcctgtccccccaaagtccacatccgcctctatcagccacgcacactctccccacgaggctttgtcctctcattgctcccccagacttctctgctcttcaccttcctgatgacccacggggcccaaggccacagggcatccgagggacctcggccttggccacagcctcttggacgatgcacctgctctgccatggaggcccctgcttctcccatcagtggggccaggcccatgggacactgttcctcctccagggaggagagagtagtcccctcccttccaactggggttnnnnncacctcttgggg

SEQ ID NO: 601 - DNA, 592 bp, Canis familiaris
  misc_feature (1)..(592): n = a or c or g or t
atctgtgcagtcagcacagctgnnntctttctcctacgaaacatccgcaccaagatgggccgggtgcccaagaaggccgagtgaagagagtacaggctccagtgcatcctctcctacctgtggccttcccctgcacagggttggggggagtgggaggagcagagagaacgaaaggggggctgctccggctagcactgaacctttcatttccttttgtgctccttttccctcacccaggtggcactggaagttatcagtgcctaatgaggtcccagctccccatcctgtgctttatttaaaaggcaaaaatttttggttcttggactccattagctcctattttcctgccttcagacaggaaacccctgcagtcagggagtctcctgcacccgtcttccctcctgggtcctgcccagtgtcccagagaggtgcggcccctctggcagctgcagggtaccagtggctcaagatttctgccccaaggcctctcagcagggggcaacagccaatacctccaatcccagggggtgaggaggccatcactctcaccggtaccctgggaaaaaggggggcgggtggagcatcgtagaga

SEQ ID NO: 602 - DNA, 527 bp, Canis familiaris
  misc_feature (1)..(527): n = a or c or g or t
caagatccagtgccgggaccatganncngtgccgctggacgtcttncgcnnnnncatgctcacctgcnncgtgctcctnnagttcgtggcgcgggccagcgccctgtaccggctgctnnaggacccggccctggctgtggctgaccgccgggtgggccaggccgtgctggacacgctggagggggccctgcaggccagcgacggggccccggtgcctgcccactacctggaggctggatcgcgcctgggccccgacagcctggcgctggccatggaccgcgccctggtggcccggcggcccagctccccgatgacccgggaggagttcctggagaaggccgccgccctcttcatcgccaaggtcaagcccgtggccngagcccgcacacctcaccgccccctcccgcacccacagcgaggtcgcagccgcgggtcgctgatgcgggtctgggactggggtatgcccgcgggcaagggccgggcagggagccccccaccccctccaccctgacatcgcgccccagccc

SEQ ID NO: 603 - DNA, 612 bp, Canis familiaris
  misc_feature (1)..(612): n = a or c or g or t
attattttgaccttttactgctactnngtctgctatattcaaaccctgaggcattcccaagctagaagataaaaatcaactttccaaaatgtccacatcctataaatgttgctcagcaaaagtccacagtgtcttccaaattatattgtaatatcttttacttgcaagtcagtaatatacatgggattgaatttttaaggagaaaaggaaagggcggaaaactaaggcattaggttgagaatatgcagtgagtgcctactaaccaatggacattatgctaatcacttcctagcacattttctcacattttattttttctccttatataatttgattaaagaggtagtgttatcccatttcacagattaagaaattaaggcttaataaggtataacttttcaagtttaaagagctaataaatgatgaaattagatttgaacctatttttatctgtttccaaggagctttctactgcacatgccataaaactaagctaattatagagcatctttatctgtaagggaacatttagagatgaactggttcaacctccatattttagagagggaagtgactcttggaagaggaaattgtctttctcaaggttaccta

SEQ ID NO: 604 - DNA, 658 bp, Canis familiaris
  misc_feature (1)..(658): n = a or c or g or t
gtggtgatgctattttagannnctgccaggtgagagcaatgctanngcacaatccccaaataaagaccaccatttccccaaagnngtctccccagcagtctgtgtggtgttcagacatatgaagagaagcaagacagcatctaggacggagtaggcccctcagagagaatacttgagacttcactcagtggcccccagaggtgctccatggagaaggcaagccatggggatgaaaccccacatggtctagtggaaccatggcagccacccatgtacattccccatggtcggtcccagccccttcattccagttgcctcccactgtagaggttgtaaatcccaattcccactgttccagcttcctttgcagcttggggtgacaagtgaccaggtatggccagtgcaatttaagaggcagtcttacaggggcttctgggaaagtttatgcttttctgataaaagaggcagacatgggtaacacctctctgcccctccattcttcctgccttgattgaggatgtgatgcctggagccccaacatccaccttgctacaatgagaaaaaggccaagagaatctcacagacactgacctaccctaccatcatttgaccaagctgatgccggcagccatactccttcagaattcttgtaaaatag

SEQ ID NO: 605 - DNA, 582 bp, Canis familiaris
  misc_feature (1)..(582): n = a or c or g or t
ttccagagaaagacannagtattgataggcgctcaaggtgtgggacgaagaagcttgaaaaacaggttcatagtgttgaatcccactagatttggaactacagtgccatttacttcacggaaaccaagggaagatgaaaaagatggtcaggcatataaatttgtgtcacgttctgagatggaagcagatattaaagctggaaaatatttggaacatggggaatatgaaggaannnnctatggaaccaaaattgattctattcttgaagttgtccaaactggacgaacttgcattttggatgtcaacccacaagccctgaaagtgctgaggacatccgaattcatgccctatgttgtatttattgctgctccagaactagagacattacgtgccatgcacaaggcagtggtggatgctggtatcacgactaagcttttgacggactctgacttgaagaaaacagtggacgaaagtgcacggattcaaagagcgtacaaccactattttgatttgatcatcgtaaacgacaatctagacaaagcctttgagaaactacaaactgccatagagaagctgagaatg

SEQ ID NO: 606 - DNA, 560 bp, Canis familiaris
  misc_feature (1)..(560): n = a or c or g or t
cagannggtgagatccaccctctcttgccnctgcagggctgcatatgcctgctccctccaaggttggggtggcctcctagagcagagccaggggaacaggtcaggaaagggggagaaagagggggtatctgtgcctagctgggccatgtaccacccttaggctgtgaccccagctggaagggcaggtggccccttcctttcttttcctgcaaggatggggactgggatgcagttctgggcatttgcaggaaaagcagcctcctgctgcctccagggaatgccagaggcacaggtagcagtgcgtgtggggggcccaccctgtagggacccagtggtgtgtggttcagggccctgcgatcccgccccagtgtcgcccagcctcaggccctgctccatgctctgaggtgcccaggacaccgggagggggtacagtggcatcttggtgctctgtgggcctgtcttgcccttctaggaaagggttgggcagggcggccccctcctcaacccagactgcagacctgtcagctccactgggagggggnnnccacgtgggcttgtgg

SEQ ID NO: 607 - DNA, 517 bp, Canis familiaris
  misc_feature (1)..(517): n = a or c or g or t
tctcaaggcaaggagtgcatctattttaagatgctttnnagcaagcagctttatcagtcccccatnnttagcaatgcnnnngctgggacacgcagcgaacacttgagagggtggcgagtacagagagtagagataaaatgtctaaagcatcgggaaaggtaaaaaaaaaatctatttttgtacaaatgtaattttatccctcatgtatacttggatgatgggggggtgggacttgttttgtttctgcttctagagatggaggagagttttctcagtgaaggtgcggatgccccgctgcgctgcgcagacgtctcccctcgggcaggtgggcccccggcggccaggggtctcctcctcttccgagagattcttaaagccttgctctgttctgcccctgtcgccagccggcctccccgagactgtttgactgtgaacttacttccctgcgtgattgttgtctgaacgccgccgccgtgggtgccgggcacagacgaacaatggtgtcagaacgtggaaa

SEQ ID NO: 608 - DNA, 538 bp, Canis familiaris
  misc_feature (1)..(538): n = a or c or g or t
acgggctgaagctggggnctcggcctccagtccaagctttagatgggagatctcaggtttcaacaccacgtgtaggcaaaatgtttgatgctcaagcagccttacctaaagttgccagaaaggccttgggaactgtcaacagagccacagaaaattcagtgaagactaatggacctctcaaacagaagcagccaaccttctctgccaaaaaagtgactgagaagactgtcaaagcaaaaagctctgttcctgcctcagatgacacctatccagaaatagaaaaattctttcctttcaatcctttagattttgagagttttgacctgcctgaagagcaccagattgcacacctccccttgaatggagtgcctctcatgatccttgatgaggagagggaacttgaaaagctgttgcacctgggccccccttcacccctgaagatgccttctctatcctgggagtctgatctgttgcagtctcccagcgttctgtcgaccttggatgttgaattgccacctgtttgctannncttagatgt

SEQ ID NO: 609 - DNA, 407 bp, Canis familiaris
  misc_feature (1)..(407): n = a or c or g or t
tacagtngtggtaccagcanntcaatcaggatatagactatttctacaccccagaaagttctctcatgaccnnnagggtgaacccccacacacacacccaagttcctagaaccaccgttcagatttctataacaacagttttgcatttcacaaaatgccatataaatgaaatctatagtatgcagccttttaagtctggcttctttcatttagtcatngnnnnnnnnnntggtgtatgtaaagctctatacagtgagggaccagannnnnnnnngtagctaccacatcaccaaaacctaccatggggcttctcaacgtttttttccttccattattgctcctctaaggagaaaattttaatttaatttaaattctcgagacgcctgggtggctcagcggttgaggtt

SEQ ID NO: 610 - DNA, 611 bp, Canis familiaris
  misc_feature (1)..(611): n = a or c or g or t
tttctgtttctcatatgatctgccaatttgatgtnnnctcnngaaaacagtgnnnnncacttgatgtagactgggattgctaatcaaannnagattaaagagattgnngcatacggttggctccaaacacagcagtggcatgagggttgaaaacacgtagnntaactacttattttttacgtttatttgcaacatttccgctcctacagaactcttccaaagaattcttatacatgttggggccttgggacttaatgtaattttaaaccaattttgccgatcaccagttattcattatgagatcattttattttaagctattcttagggctaaaatgaatgtcttgaaactgtttttcattgtacctgctttcacggatactgaagttcttgaggctccctgcaattttctaagcaatttcttgttctcgctctctctcaaaacttgacctttttaagagatttgtagtaatgtataaataataatttttatatttaattattaactatatttatgattaagtaattattattataggtaatcattgaatattgacagacagagataaatagttacgaaccaagatctgtaaaatgatgtacagatgaaga

SEQ ID NO: 611 - DNA, 545 bp, Canis familiaris
cgtgtgtgcacctgcgtgcctcgatgggtgcctccctcaggctcctgcaggctggacttcctgccgccctagtcaggctgctctgacgccaggggacctgggagggctgtcccccgccttcaacttccgtcactttgcttttcgtgatgaagtaacataggcatctgtcttaactactacgttgaaatgaagatcctcctgcagacattcaccatggcctgagggctggaggctgcctgagggtctggggaccctgggctggggcccccacatcaggcctcgtgtccatgacccccacaccgacctgattggcagccggagccctggctgccctgccctgactcgtgcctgacctccgggccggagagaagggccggcggcctctccataggctctgctatcgactcagaggagcaagggtgggatcatttgtcattcaattaatggtgtcagcagagccattatttaaatgaccagccacatgtgtgatcaatctttaatgaaataataattgtacttcccagtcaatgagtgcccagcctctc

SEQ ID NO: 612 - DNA, 37 bp, Canis familiaris
  misc_feature (1)..(37): n = a or c or g or t
taacaactctcctgnnnnactgcctaaggcagttgct

SEQ ID NO: 613 - DNA, 570 bp, Canis familiaris
  misc_feature (1)..(570): n = a or c or g or t
tatctncgaagacatggcgcttcttgggagaccagaganntnnnnnnctgcactgctctgcactgggctgcagatggaggccactgcagtgtgatcgagtggatgataaaagatggctgtgaggtagatgctgcnnacacgggctcaggatggaccccactcatgagagtctctgctgtctcaggaaaccagagggtagcctctctgctgattgaagctggagcggacgtgaacatgaaagacaaagatggaaagacccctctgatggtggctgtgttaaataatcacgaggagttagtccagctacttcttgacaaaggggcagatgcaactgtaaagaatgagtttggcaaaggtgtgctagagatggccagagtttttgacagacagaacgtggtctccctgttggaagaaaggaaaaaaacccannnggcaaagaagtagtccgtctgctcaccagggcgctactcactccgaaagcccaagcgaaacaaagtcgaatgcgaccgttgagctagagatgaaattctgcatcttggaggctatacatttgattatttatttagattc

SEQ ID NO: 614 - DNA, 618 bp, Canis familiaris
  misc_feature (1)..(618): n = a or c or g or t
agtgctttacatttagtgggttagtgccaagtgctaccacttcccagtaaaagtgcaggggccagccttggggtccctagncgcctctgttgatgtggggtttgttgtggtcactctgacaggactgctttggaagagctgcttttagggattatctcttgactaccccgggtggggctcagggttctcctcaaagcctcacaaccaagatcataggaaaggagccctattttcctgctgcttcacagctcagaacatgtattgaatggaatgtatttttaagagaataaagtctatttttttgtattttaaagattgggagggctggggaagtagccctcaaaaaactgttaatgcattacaggcccctttgcaggggggcgtcagtagccgtcagtccacatctgcttgttcaggcaggtgctctggtctcacccctgcccccttggagtccaggtgtggcagcttctacattcccactccaagcatgggaccgaggaggccggaccctgtggctggaaaccagggcgaagccatgagcagtgactcggggctccttgggtgcatgtgtatagtggaagctgcctgtctgcatgtatcctctggctcgaatgctgt

SEQ ID NO: 615 - DNA, 647 bp, Canis familiaris
  misc_feature (1)..(647): n = a or c or g or t
acagggagtcaagannncnanttttcaantaaataanacacttagaacttagtagaatgcatcacatgccaaaatgttgaaacttgtatgtgtatgtgtatttacattaaaaaatcacatgcatccatatgaagggggtacatgaaataaatgtaaaaccttttttctacaggtcattttaaaaaacttgaaccctccccccagtatacttaacacatcttttcatctcttggattgttaaagattcaaatctgacaatatccagtgtcagtgggattgaggctaaatggcaccatagcttagtgggtctgtaaaccattggacccttcaggagagttaagctgcagttatcaaaatgttaaacatatttatccttaaaactgttactccacattaaggatcctgaggaggtaagcagactatgatgtttgcctgtaacattcatcatagtattcattttagcagggaaaaattggaaaaaaatctctatgtcaactaatggaaaattggttaaagtatggggctcccgcaaactgaaacacttaatctaactgaataatattcagtttacgtaggaaaattattttgcttgagtaagtaaaaaaccgattataaaatgatacaacnnnnnnntgtgtaaatataac

SEQ ID NO: 616 - DNA, 350 bp, Canis familiaris
  misc_feature (1)..(350): n = a or c or g or t
taagaacctaaatcagaaatnnnnntcaagagggannnttggaatagcaggcatgagctagttggagtttttaaacnnaaatgctttgggggcatcagctctcnctcatatcattggtgttccaggtcnntgttggactgtgttgggtgtgtnnnnnnntcttccccattcctcttatgatcctctctggtttttcttatttttgcccagtctgtatggacattttaggttcttttcttttttcttttcttttttttttttttttnnnnnnnnnnnnnnnnnttnnnnnnnncnnnnnnncgnnnnnnnntnnnnncnnnnnnnnnnnnnnnnnannnnnnnnnnnnnnn

SEQ ID NO: 617 - DNA, 533 bp, Canis familiaris
  misc_feature (1)..(533): n = a or c or g or t
cataaataaacaatttgatttcatagacacataatatcntggaatgtgtatatttttaaacttccaagataattaaagtaatgctgtgatatatatttttttgttttgttttgttttgttttgtttttttatgctgtgatatatttaaagcgttttttactgcagtataaaacatttggatgtattttccctattttcactaggaagaggaacccttctgtgctttggtaaagcacttaaatttaaatagtcaccacgttgcttatttttgttttgtaccaagctctgctttggtaggttaaagttaataacaacaattttccaagactaattgtatgtcctataaatttctttaatggtttacttttttttttttttaatggtttactttttaaaagtcacatactgtttaaagttgcagctttaccaatattaagatgaacatttaaatatgtgttttcttcaactgtttaaaatgttgaaagcattcaggagttggtatcgcttgattaaaagttactcctcatttaaca

SEQ ID NO: 618 - DNA, 537 bp, Canis familiaris
  misc_feature (1)..(537): n = a or c or g or t
tccgaatattacaacaaaatgggacacaggaagaaataaaatatgtggatcagacaaagaaaattaaaacaaccagnngcaaccaagaaatgacatcatttgaaattaatctgaannaaaaaaagtaccaggaggactttgatccacttgtgagagggtgttcctgttactgctgtaagaatcatactcgtgcgtacatccaccatctgctggtgaccaacgaactgttggctggggtcctgcttatgatgcacaactttgagcactattttggatttttccactccatccgggaagcactaaaaagcgacagactggcacagttgaaagagctcatctgcaggaatatctggttctgaagcctatgctattatttctaccctcacctcctcttcactcactggtgcttgggcccaggtaagccgctgcaaagggtataaagataatataacctgcccactcttaataaacatgtttcagggcacctggctgtctcagtcagtggaacgtgtgactcttggtcttcggtgtgagttt

SEQ ID NO: 619 - DNA, 663 bp, Canis familiaris
  misc_feature (1)..(654): n = a or c or g or t
tccaagaccaacgctccccctgtccggtaatcagactagcagnncnnnagtgatctcccctcaagagttactgaaaaagcttcagattgtacagcaggagcagcagctgcacgcgtctaaccgaccagccttggccgcaaagtttcctgtggtaactcagagctctagaacagggaaagccctggagtcctggatggacaagacacccagcacagagaagcagactcctctttttcaggccacttcgcccccgcatgttcctgctacactggctccttctctgcttatgtcccnnnnnntgttcacacaacccacctgtgccccgctgaaagagagggatgctggcctcttgcccctgggaagccaagaaccagctgccacttccagcagcctcctcctgcctctgccaacccaggagccccccgtgatcaccagcagcccacttaccaggctacaacttcaggaagcactgctatacctcatccagaacgatgacaacttcttaaacatcatctatgaagcttatctcttcagcatgacacaagcagccatgaaaaagaccatgtgaaagccaaacattttaagactgattttcaaagtcctgtggctcaaggttctttcgtgtccatggtgttaccctaaatgtttctgccctttaaaaaa

SEQ ID NO: 620 - DNA, 536 bp, Canis familiaris
  misc_feature (1)..(536): n = a or c or g or t
tcatccagcatnnnnnctgacccncnnnngcnngcatgtnnaccaattgatacaaannngagaaatcagatcaggnnggcaagagagcagcaagcctgaccaggtctgtggggaccggcacctgtgtgtgtgctcaccagcctcagaaccgctggaggtagctgcctgcgtcccacttctgacaccagctgtgcattcctggctccccgcccaccgcccacctgcgggatccgtcagcctcctgggaggccaggcgtcggcagctgtgccaggaaacgcagcgcgggaggtgcactcggggccatgggccggtgccagggaccctgtgtaggatggtgtcggggcccaccctgcttgtcagctgcagagccaacaggaggagacacggctcacaggtggacgctgctttacagcctgagaggaggagacgacagccccgccccggccagctcccggggcactctgtggactcgcatttacagcggcccctttctccgggagactttgctctctgcggctccagagacttgcctttc

SEQ ID NO: 621 - DNA, 609 bp, Canis familiaris
  misc_feature (1)..(609): n = a or c or g or t
atnnaaatgacaaagaatgaagantagtacataaatntagttgataaagcatctgcagagtttgagannaaagacttcaaatttcaaaaaagttctgtgctaaaatgctatcacacagcatcacatgttaaaagaagactcaatccatgtgacaaacttcattgttgtcttattttgagaaactgccacagccaccccaaccttgagcaaccaccaccctggtcagtcagcagccatcaacatcaaggcaaaaccctctcccagcaaaaacatgacttgctaaaagttcagatgatagtattttttttagcaataaagtagcaacgtacgtacattttttaaacatagtgctattgagcacttagtagactatagtataaacataacctttatatacactaggaaaccaaaaaaaaagtcatttgactcattttattgtcattaatattattgtggtggtctggaactcaacccacaatatctccaaggtatgcctttatttaataaatatcaaggagtttctatatcattactataatttaaggcatataatgattttgccaaatttaaagaatagaatgatcacacatgagaaatgtattaattagt

SEQ ID NO: 622 - DNA, 671 bp, Canis familiaris
  misc_feature (1)..(671): n = a or c or g or t
gannactggtntgctttttggcataaacgctttgaattttcatttttcactgttctgtaaacatttttcttttnnacttgaatggnnnacttaacattttcccagaaaagtagaaagatattacggcaatattttggtttgtttatgaaatacacatggtccatcagtgctcattggacagttaaaactattgtttaaagcagtgctgctgcttcttgggctcctgacttccctggaggttctagaggaaggttgcacgtgggcttattggcagcagtctatgctgaggtccttagggacccacagtggtgtttttgaacatggggtgcagaggccttcctggatatggatgctactgaggaaggaagaaagaagccaaggccaggagcatgaaatgggggtttgcactagtagacatcgtgaggatttttccttcttgtggtaaaatgttaagaaaaattatgtgcaatctgcctctattcattggagagtttctttccaagggttatttgcctcatctctgatctttagtgaaattttatgtataattgttatgtatttattccacctcgggaacagaaaacacctgtttactgttgcactttagaccagtgtgttttattaatgcaactgtgacacaaagtctcctttaccttttcaaaatgttatgg

SEQ ID NO: 623 - DNA, 638 bp, Canis familiaris
  misc_feature (1)..(638): n = a or c or g or t
tccaattcacnnatgagaattnnnctcttgcatctgggggacnnagatgctgagccagcatggaaagagcctgaagatacaagtttgcctcacgactgagcccctaaatgtgaagtgtgaggnntcagcagcctaatatgtggccccttcttttctttggcatggtttttagaagactcaggagcctgagctggggaaggaagggagggtgagcccagctcatgtccacaggacacatgtcagcagaaaatacacacctagtcagaggaatgcactttcacattctacacacacatatgcacatgaaccctcatgatgttcaaagctgtctcctcaccattatcccatttaggactccaatcagggctgcctcctatggttgctcatgccgtgcactgcacaattgtaagagccgccagtcacatggactgtgatgtgagcagcaccccctggagtagcctaacacagtggccctgttcacagtaacctgggagggagccaaggagacttggcccattttgtagctagtagaaactgaagctcagagacagccagtgacttacccatgggtcaaagaatgagtcagtggttggaacaaattctatgtcatcctttgtctccctcccccaggcatttca

SEQ ID NO: 624 - DNA, 327 bp, Canis familiaris
  misc_feature (1)..(327): n = a or c or g or t
ccctcccnnagcagaaggccctgtgagcccaacctaacacagaangnactcttctgnntnntttctggcaccaagaaccccagggactcttctgtcctggctaccannnagctacatctggggacatggcacctaccactccccagcccttcctgaacactggcaggtgtcatgtatagacagatgnnngcctcagcggcaggtgggcaccctcaggcaaggggagtccataaggccgcaagctannaaatgaccnngcacaagatgagcntctgggggccnnnnaactccannaaacatcnnnnnaccctgccctacagtngaccc

SEQ ID NO: 625 - DNA, 533 bp, Canis familiaris
  misc_feature (1)..(533): n = a or c or g or t
tcagaattgctacaactatctatacaggatgaaagcnctnnatgccatccgtgnnnctgagataccatttcacgctgaaggcaggcatccccgttcnttaatgggcaagaatttccgctcctacctgctagatcttcggaacactagtactccttttaagggtgtacgcaaagccctcattgataccttgctggatggctatgaaacagcccgctacgggacaggggtctttggccagagtgagtacctgcgctaccaggaggccctgagtgagcttgccaccgtgtaagtgtggcggagactatgtcgttggggctggttggagagtgctgctatgccccccacccccagcgagnnnnnnnnnctaagcagtggtaacaaaatcaccatgatgagctgccaggtcctgcctctccctcacagctgagagcatgtgcttctctacaagcttagagaaggggaagcctctcctactctagtgccttctcctgtttttgtggnnntgttttttggactnnnnnnntaaaatagtg

SEQ ID NO: 626 - DNA, 590 bp, Canis familiaris
  misc_feature (1)..(590): n = a or c or g or t
cttcaactagtagtgctccccatgctnnnnnntgtgaaaagttcnnggctatgtagcggcttttgactccctacatcccctaggctgctgccccaattctgtctttgtttagaacattgagaggtttcctagggcacatgctgggtgagaacagtgtgagaagtcagggaaaaaaatttagctgcttttagaacaaagctaggtatcaacctctgtccagctgtaccctgtgtgttgtttcaagaactcagtctctttttccatctgggataagaagctgaaagattaacttagatcttcggatggcctgagtttttgggccagagggaaggatctccaactctgaaactatgtgttagttttggatggatttggctacttgataagatactctgccagctgtgaggggaccctgtttttacaatgcatggccaagctctctgcaaatggaaatgcttgcactgggtgttggggatgtttgctacctcctgctatctttgtggttttggtcctcccactatgataggacctctggccagcattgtggcttgtcatgtcagtcccattggctaccttgtcatgctgtgagg

SEQ ID NO: 627 - DNA, 410 bp, Canis familiaris
  misc_feature (1)..(410): n = a or c or g or t
ttcgtcatcctcattttgatgggtcnntnntagntgtcaatgtgctatagtctgtcaaaactgatttttttccaaaactgttattaaggccatcaacccaatccagatccatgtatctgaatttgagctatggggaaataggacattaggagccagactgaaatcatggaactttttaggttcacaattttccatttttgaacagtatttcctgttggccaaagggctatttcttaagaggcatgcaaattttttcatgtaaacttgatatgcaagttaatatttgcccttttaatgttgttttcatgtttattaagatctggcatgtacctttcaacatctccataaaatggaacacttcttttgaaggatattctgctcagaggtttcacctgattaaagtgaacgtt

SEQ ID NO: 628 - DNA, 414 bp, Canis familiaris
  misc_feature (1)..(414): n = a or c or g or t
cctganctgcagcagcagaggatgatggctccagccccacccctgggactcntcaccgattnnnnnaccataagcttcatctgctgggccagacatcttgtatttgctatcaccgctctcccccgccccccaacccagccctccctgcattcagcaggtgctcactgagctcctgccctgcatctgacaatgctccggcatctgggatacagcagaaaacaaagnagacaaagtcgctgccttcttgctgctgatatttcctcgaaagagacagacgagaggcacctgggtggctcagttagttaagcatctgcctttgtctcaggttatgatcccagggtcctgggattgaacccctcatagggcaccctgctcagcaaggagctggcttcnnnctctctctctgctactccc

SEQ ID NO: 629 - DNA, 562 bp, Canis familiaris
  misc_feature (1)..(562): n = a or c or g or t
cctgtgtttggnnatgtgggcttggacgnatactccgtacaccagnnnctcctctgtatacacagaanctcatatacatggatcctcgtgtacacaagactcttctctgtacacacagactcaaccccgacacacatacagaccccaggggcagacagcactctctggccaccgcagggacacatgggcacatgcctggcacaggcagccagctggggggacacatggccgggagacttgggccagcctgagccagggctgcaggacactccaggctggacccagggcccctagagaccctgctgagaaggctaggcctggcagctccaggtggggggtcctccctgcgtggccctggctgggtccctaccctttctgggttctctggcttctgcaaggatgactctggggagaggttgcgtgtgtccctctgtccacccatcctgggcagggtggggagtgggaccttggccctgtctgggactcaccactacatcttccttgcagtgaaggggggcacggttgttcctgaggtgccccnnnnnggcagctggtcccccac

SEQ ID NO: 630 - DNA, 571 bp, Canis familiaris
  misc_feature (1)..(571): n = a or c or g or t
gaaaagctgtcttagcatgctcaggctttattttatgaagcagaatcnctgagaaaagatgagaaactgctttggttcttcttccantggcttctnntgattcagagatttataatctgtgccatggcagaaatttgatcagttgtctttctcccatagaggtactgatttttcagatatcgaaaatattaaattgcatttctctctcattgtctataataattcagagacagtagtttacagacaatatcaggataggaaagagggaaatagcagtggtggtacattgtatttatggaattctggttcccaaaagcatgggtagtcggatatgggtaaaaacaggaataactccagcatttgtgaatgctgggctttaaagtttatatttttgtcctttggttcatagaaccagacagtggcgggggggggcgggcacctgggtggctcagtggtggagcatctgccttcagttcaggttgtgatcctggggccccgggatggagtcctgccaatatcaggttccccacggggagcgtgctcttccctctgcctgtgtcnnnnntctctc

SEQ ID NO: 631 - DNA, 642 bp, Canis familiaris
  misc_feature (1)..(642): n = a or c or g or t
tgnngccatcagtgaagagaggttacgagagatgtttggtttatatnnncagacgacaggaaagnncaatgtatcnctgaaagaactgaatgcccgaccnnnagnagttttcatgtgcagcgtgctcaaaaggcaaggttatggagaaggtttccgttggatggcacagtacattgattaacaacctcttgcatcggttccaggtctcaccattcaggcctactcagagatttgatcattcaacatgcataacttgaattcaatagacttttgttggttagaaaacatgttttttagattattaatattatatcaacttaatttgagtggaaattgaaaactgattcaagtaagtttgaatatcacgttagctttctaattccataaaaatagtttatacagtttaatatctgacatttcccccagtgccatttataaagaacaactttccagcagtacatttgaagcactttttaacaatgtgaagctacaaatataaaccatgtttaaaagctcatcatgttaaatttttatgtactattttggaactagtttttaaattttagattatatgtccacctatcttaagtgtacagttaataattagcttattgatgattgcatgatgccttacagttttca

SEQ ID NO: 632 - DNA, 417 bp, Canis familiaris
  misc_feature (1)..(417): n = a or c or g or t
atgctgtnnatattcacgttttcctaggnnnntgtgnnnnngccacagcagcatgcnnttggtgtantcagtgncgaaaggggtctgttccttcttgannnnnnntgcagggatggtctcctcttttaaagcaggttgtgtactgttncttattaactttaattttttaaatcaacttgctatagactttatatacattttgttaaatacagttcgtagtgacgtagaaacaaggcatagttttcctttactaattacacatgttgaggcctaattctgaaagtcctcatatttaaaagttagacaacataatgaaatttttaactatttgtatgtcattttgaaagtgtactgctttatggtaaaagtgtttttcatttgttcattgttttcattatttgtgatcatgttgtcttt

SEQ ID NO: 633 - DNA, 547 bp, Canis familiaris
  misc_feature (1)..(547): n = a or c or g or t
agatggntaaggnctgatgccnacccccaggaattcatgagaacatacannnaattccaacacaaacagagagagttgaagtggattcgaacagcaagctaggtatggagagctgccagaattatttggggggatattataaggtaggccaagagtcaaggaaaattttggaagaaaggaggttgagtgaggtagggtgagggaacatccaaagaaaacttggaaatgttcggacactgttgtggttacaatatcagagagtcaggtcattgtcaatagaatctaacctctagggagagctaaagagattcaaagattttttagaattatgcagagacaaatggtaggataacaacgtttaccattattttggagaaagtaaacttctgagataagaaaggtgtaatctgttatcaacacaaggcagtaattctgctgaaatgatggaaggatttgtcctagaggactgggattgtcccagaagattggattgtggaagacgaagtcaacaatttcctgctatactcatttgcttgaagacaagtaa

SEQ ID NO: 634 - DNA, 589 bp, Canis familiaris
  misc_feature (1)..(589): n = a or c or g or t
ggtttcccaactgatactgtgnctgagcntgcagatgatcattcnnncttcccatcaaatcagctgctcctgggggatgagccnngcaacaagatcagtgaattccannnnngggagcccatcatttttctcccaaggtctttgttcatctagatatatgttgggatcagcttttcaaatttcacgcacacatgaacccttctctggttccatgacatctacttgggaggattgacgtttttatgatattgagttttcctaacctcaaacaaggttgctcctatctatttaactctttttaatatctttgcagaatttttatgattttatctgtaaatatcttatactagttttactatatttaattcaggtaccttcattttgatgctattataagtggtgctttaaccttcgtgtgctgattgtttattaaatgactattataagttatctaattttaatgaattatctgtaggtatttttggtttttctacatagaaaaatcacactaagaaaaataacagttttagttcttccttttccactgttcttttatttctttttctagaagacctttatagattttcta

SEQ ID NO: 635 - DNA, 334 bp, Canis familiaris
  misc_feature (1)..(334): n = a or c or g or t
annnnnnnnnnnnaannnnngtatnnnnnnnnnntntttatnnnnnnnnatccaaggtggnnnnnnnnnnttcgtnnnntaannncagcacgnncntgcttttccattnngtttnnnatgtgagccnngtagagtcagcctgctgtgaaatnnacattgccaggatgaatcttccnnaaaaataatttcaaattttttcagtatttagtagtgagagatattaatgcattaatggtaatacatttctcgtttaatataaattgaggatgtttttctagttgtgcatgaacgctggcaacttagtaagatnngncaattgttnnnntatgtaatg

SEQ ID NO: 636 - DNA, 593 bp, Canis familiaris
  misc_feature (1)..(593): n = a or c or g or t
ttttttgttagtatttgtacaactttctnnacacaaatnntacattttcattactgaaaatttannagctatggatgagcaaagtganncctctctatgttcattttgagcctacagagtgacataaagagtaaatgggtcaaaacttgattcaaaaaagctcttttcagagtgaatacgcaaggctaggacagacttagccagccttctatctcaacactgtccggtgaaaatcggcaatactgagacactgccggattctcaagtgcctttgggatcatcaaagataggttacataatctgaggtcttgagctggagttcagaatgtatcaaatccattgacagatcaacagtgctacactgaatatggctacacagttaaaggaaagacctcatttcccagttattctggatcagagagtttgcatatcactgtatgaagggagaaagggcgattgctggcagacatgtagttaaggtggcccaggaatcattctgtctggattaactgtcccagggaagtggcagggtgccatttctgtaccaagaggtgaatgtaatttgcatgttgaatgctgtaatcaagaacaaa

SEQ ID NO: 637 - DNA, 583 bp, Canis familiaris
  misc_feature (1)..(583): n = a or c or g or t
ggagtggccaccacttcctcggctctcttgcatttctcctgacagccaccaccccggactcgcttcctcaggccgcctgcctgtaaatagaagcccacaaactgtacagatttacagagatgccaagcccgggtcctggggttgccgtctaagggctgatggttccagcatcccccaggtgcccacctggcagctcagcgcgcccagccccagcgtggcaaatacatgtaaatatttttcgtaggcagtgtggctccagagagccccctgaagacagtgtccctcctgtgcgtcctttcccctgtacagagccctccaagaacccggcctgggccgagcgggcgtttgtcctttcctcccccaggccttcccctgccctttcccccataacccgtttattaaccacacccgtcctgagttcatggccaaatctctaaggaaaagtggagggaaaagactggaaaaagaggcccaggtgnnnnnnnccacnnnnnngtactcannnnnncccnnnnnntgtgaaggagctgtttgggtttttttgtttgtttgtttctgtttttnnnttggttgtgtttttttt

SEQ ID NO: 638 - DNA, 495 bp, Canis familiaris
  misc_feature (1)..(495): n = a or c or g or t
atggttncgtggttctaaccnntgctgctagcttcataatggtagctcanctagccatcaatgtttccaaggcccgaaagaagtacaaagtggagtatcccaccatnnncagcacggaccccgaaaacgggcacctgttcaactgcattcagcgcgcccaccagaacacgttggaagtgtatcctccgttcttatttttcctagcggttggaggtgtttaccacccgcgtatagcttctggcctgggcttggcctggattgttggacgagttctttacgcctatggttattacacaggagagcccnnnnnnnnnagtcggggagccctgggctccttagccctcatcggcctgatgggcaccnnggtgttctctgccttccagcatcttggttgggttaaaactggcttgggcggtggatccaaatgctgccattgaagaatgacaagatgtttaaaaactcattcattttgagtnnnnnnncttttattttcag

SEQ ID NO: 639 - DNA, 649 bp, Canis familiaris
  misc_feature (1)..(649): n = a or c or g or t
cnnnctgtcctagtaatcntaatttgtaaagaacatgcttactnnnnanngcaaattaaaatgactactgtttgctgtctttataatgttatctacctcttagttaccctttcttttttttaagctagctttttaaaatcatcattttctttactcaatactatttttctgtctctagtcatatggaatagggacaatactaaaaatgatatatgaattacgtccatggcaatggtttgatgaagtctagatgtgtttttaatctgtaggtatttaagtcctgttaggaaaattatcttcctaaaactatgacctcagtctaatcttaaagaagacatcaaattccagtacaggagcaacctacaaaatacttgaacagtactcctccaaactatcaaggtcatcaaaaaagaaagagaaaaagaaactgtcatacccaaggaactgagcccaacgggacacaacaagtaaacgtaatgtgggatccaggaacagaaaaaagatactaggtaaaaactaaggatatatgaataaactatggattttaataataaagtatcaatattcatttattaattgtaacaaatgtatcctgtgtacaatgttaatggagaaactgggagagggcatatatggaaattctgtacta

SEQ ID NO: 640 - DNA, 512 bp, Canis familiaris
  misc_feature (1)..(512): n = a or c or g or t
gcgcagacatgaacaggggcacaaggtggtataggcaggcaggtcagcagnnttcggcctccttgcttagctacaacctggcagtgctcaactttggtggccttgggccccaacttcaggatactatcccagatccctagttctgctttggggaggttcatccttgttcctagggcccctagttgaggcttgctactctggcctcagattcccaaaccagacttccaacccagccttaaggccctgcctgcccttgccttcagaaccatggcctgttagggttctgcctggcctcctgggccttagcactcagtccttgagccaggggtttggccagccggacctagctgtagagctgtcctaaacctccttgcttccttgcaccaagagaggtcttgggcctctgaaccccatttccccagagcttccctgcctcccctttcctgcttgtcccagcatcttggtggaaagagcattggctcctgtgttcctagctgagcagctggaagcct

SEQ ID NO: 641 - DNA, 588 bp, Canis familiaris
  misc_feature (1)..(588): n = a or c or g or t
ccagcaaaatttccaagnnncaacaatcttntaccaacacaacactaatnaaannagccnnggctgctgattctttnnatgaacaggaagctgcctttgaatctgtgtttgttgaaactaataaggttccagttgcacctgattccactngaaaaggtngagataaacaagatctttgatatctttcatgtttgcctgcaatcaaactagactttttaaaaattacttcttacaaagaaattaatctacaatctgatgagcacatttgttaatggctattccaggtgttttgctgctagaaattattaaagttgtacnnnagtatgttggtctagtgacctggttacattttacaagttattggactatgaggatatttgtttcatctaaattttaagattatggagactgctgtcattttcatcttctttaaaatcctatgtttatggaaagtaaaactgatgaactatagaatacactgtttgctacagtaggggtctttaatgctttttaaagttagagcttaattgatttggaatcctcagaaatcgagcgataacataaatatgagaacaggcaaaaagctcc

SEQ ID NO: 642 - DNA, 583 bp, Canis familiaris
  misc_feature (1)..(583): n = a or c or g or t
gtgatgatagcaaaantggctttcagtnntagtgtttcactaatcttcctcntaaacattagacctattttccttataaagtagggaaaatgtgatagggaataaatatacactgatggactatacattatttttattgtctttaagccagagttaaatggtaaagaaaaaaaatagtgactatttttgtgatgttggtctcccactcttactctatcttttgataaaggggataaatgatttcaggttaactctttgtatgttgttttctgctttctcatgaaaactgatggctttatttgtggaaacaactaatgagcagagaatctgttattgtggttgtgttacttatttctgttatttattcttctgagagacgctaagtgacaacagtattttaagtatcatgaaagccatggatgtgttagaatattgttcttcatagaacttgttaaatgcaattatcttttaggctgttttctaaaggctattttctaaatatttgactattttcaagaacagaaatataaaacattagtgctataagagattagatatcaactaagtttcattaacaatttat

SEQ ID NO: 643 - DNA, 549 bp, Canis familiaris
  misc_feature (1)..(549): n = a or c or g or t
tnnctccccagacagacaccccgggccccagcagnaggcagnnactccccactccctgcacgtcagctggggagagcnntaggggccctgctctgaatgtattcccccttaaactcgagctgcctgacgcacagtggggctggggtagatgggagggacaagggcagccaggcctgaatcagggatcctgcagggcacggactagacacaggagtgatggttgcttgttcatggagcccagctccctacctggtcctcatgggggctgccgggggaggggacccgcggccggtggtggctcccatgagccccagctactccctcccgcccttccgcgctgcttctctgtgcctgctgttggagccccgatgggtcggtgggtcagggagctcgccaccccagtgagctggggagctgtccctgggccggggcctctgcctggggctttgcggggagctgctgatgggtatagtctgtccagataccttgtttcaaaggcagtgggtgtgagctagcaagcggagcctccccaccgctgatcaagaactt

SEQ ID NO: 644 - DNA, 516 bp, Canis familiaris
  misc_feature (1)..(516): n = a or c or g or t
tgnnntcagtcacctggactngacagtgnnaggtgngcgnnnggtgggcaccccgtccccttcccccaggcgccaggacctgcaggccgatggtnnaggtgaggctgtcctcaggaggcaggagaattggactccttcatgagccccttccccgtgatcccttcctccttgcccccagcagagcaaggggaccagggccagggagccagagttttcactgagacacttgaagtggccagtcctctctgggggcctggcctggtggggagggtgtcagcagacctgcccatctcctctgctcgctctacgcgcgctgtattgtgtatagccggtggcatatcttcattgtaacgtacatttcccaccccttctccaacctcggtttggtttgtttaagcctccacctccccgcttcctggggcttgagtttccatctgagtcccacaggagccacggtggggagatgccggggagggggtggggaaacaagacggggcttctctcaggcccagcggc

SEQ ID NO: 645 - DNA, 551 bp, Canis familiaris
  misc_feature (1)..(551): n = a or c or g or t
agctcancgaangcatcttcatacagaacagnaaactctatttctttggcatcctttttaatnnactgacgctgggccttcagggcagtaanngtaatcagattaagaactgcggggttttctatggccacaatgtgttttcagttgctcttatttttgtgactgcattccagggcctctccgtggcttttatcctgaagttcctggataacatgttccatgtcttgatggcccaggtcaccactgtcatcatcacaacagtgtctgtgctggtctttgacttcaggccctccctagaatttttcttagaagctccctcagttcttctctccatatttatttacaaagccagcaagcctcaaggtctggaatatgcacctaggcaagaaagagtccgagatctaggtggcagtctttgggagcgctcctctggggatggagaagaactggagagacttaccaaaccgaaaagtgacattgaatcagatgaagatactttttaattggtaccgaaatgattgacaactctcagaaacccttattttcacatt

SEQ ID NO: 646 - DNA, 116 bp, Canis familiaris
gagccaaccctgcacccaccttcaccccttcaccgacagccggaccatgacctcagattgtacccatgtagctgggattgggaatgaggaggggggtttctcacctcacagatgac

SEQ ID NO: 647 - DNA, 335 bp, Canis familiaris
  misc_feature (1)..(335): n = a or c or g or t
acangtnagcaatgnntaatacaaagtagnnngtccannngtgtgctggttctgttggtaacgnnnnnntcacaaactccagnnnngcaaagnnnnntttcaatgtnnnttgctttcagaaacagggaatttatattctaaggccttgaattgatttttttcctcataaaatagtctgatnnnnnaatttttaaaaagaaatgccattaagtatgnngcattgtggtttaaaattactaacaannnctgggaaagaaaactttgattttgaatcttacgtgtttttaaaaattaggtttgaatgggcacaaagtatgaatattttgtttctttag

SEQ ID NO: 648 - DNA, 644 bp, Canis familiaris
  misc_feature (1)..(644): n = a or c or g or t
catcccaagagaagcattttaaattatttcanngtattctttttttctttttcccctcatttgagtcggaacttttgtacaatacctaaccactgatgtttacacagaatttcatattctgcaaaagggaattttggtccaatcatgactggaatcttccatgcttgacaaattggatgtaggtgacatcacataaagcttctgtaaatccatacaaataggatatttgtttaatcttgaatatttgaggagatttccccaaatgtaaatggccacggtgcattcttgacttattctgctaagcacaaaacaagcgcatagctgaaagcctatttttaaatgttactttttttcacatttttgttacagaatctactggatctttggctgaaagactagaatttatagtagttgattaatgatcccttaaattactcaggacttaatgtagcattgcacatctatgtacagtaaactgctttgttttactaaagtgaaaaatgtgagtagaaaaaatatatatgtggtatatatggaaatatatataattctacctatagatttatatatgtacacatgcctgtacaatagttgtatcaaaatatataatcgttcacaccaaatttattaaaggtatttgcttt

SEQ ID NO: 649 - DNA, 607 bp, Canis familiaris
  misc_feature (1)..(607): n = a or c or g or t
tggggtanntgaaggaaatcttaaaagaaattggtgttcagaatgtaaaagggacgcacaaaaacacatgggagctgaagccagagtatagacattatcaaggagaagaaaagagtgattaaggagactctaagccagcatgctaatggaacagctaaagggtgatgctaaagaaacaccactgagactcaaatacttgagtaccatctattataggggtaaaatgactggaactttaatttccctaggtgaattttttaaacagtaattcttgtaaagtacttaagttttttgaggaaaaaaacttatttataggcttatattaaactagattattcagaatggggtaggggttgggggtgttaaggtttttctttttaaatattaacttttaaaatgtaaaattaggaaatgttttctaaatgaggactctctgtccttgttttatctctgaggatctgaggtaatacaaatctgaagggaatgacaaagcaagaaaaaagtagtcaactacagaaagtcttacaaggaataaaaagccaaagttccttattctgatattgtcaaagaacaaagccgtctttnnnnnnttatttttacaggtgat

SEQ ID NO: 650 - DNA, 614 bp, Canis familiaris
gccctcaaaatagctgttctgttttttatctagagtttcatgaaagaattggtttgataataagctattctattaaagctggcagacaaaaggaccaacatcattttctttttttaaagatgagcagtattacagtgttcctgtagctgatgagaatggttctcaaaagagggatactgttgatgatgccaaccagaaaaggataattgctagagtgatggcactaaagaaagaaggggtgggatttagtgcacaagttgagctagttcatctgtagtagcagaagggagggcagagtgtaagagttccatcctgctagataggtaggtttggtggtgggtgttggtgaaatttttcttctgaatgcatctgttttcttagtaagttggtgtcaggtttgagtaggaggcttgaggtctgaggagagggaggagttaggaaatggtctgtagatgagtaccagggtgaacgcgataggattgcccggcagcacagaggcttgctcacctgaggtgaatcatcatggacttgggtttaaaaagtaaaacacgccagactgcaaataaaactgtgatattatcaaataaggaatttataatctggagggatagaag

SEQ ID NO: 651 - DNA, 164 bp, Canis familiaris
tctttaggagggctgcagggagggagggggagacagccctttctcctttagagttttcttttaatcacaccacctcccgactgcacctttccattattttgtcttcttcctgcgggtcctgttatttttcgtggccctcgtccttgcccttccctggatttggg

SEQ ID NO: 652 - DNA, 598 bp, Canis familiaris
  misc_feature (1)..(598): n = a or c or g or t
agattccagtattgtcaattgcagagatgacaaaggcangacaccacttcatgcagcagcatttgctgatcacgtngaatgcctgcagcttcttctgagacacaatgctgaagtgaatgcagcggacaattcagggaaaacagcactgatgatggctgctgagaacgggcaggcaggcgctgtggatattttggtgaacagtgcccaggctgatctgactgtaaaggataaagacttgaacacacccttacatttggctagtagcaaaggtcatgaaaaatgtgccttgttaatacttgacaagatacaagatgagagccttattaatgcaaaaaataatgcactgcagacacccctccacgttgctgcacgtaatggcttgaaggtggtagttgaggagttgttggccaaaggagcctgtgtactcgctgtagatgaaaatgggattgcctaaacaggctctaatgtgtatcccccaataaagagcttaagaaaaagaatttcagaagcaatgaccaagaatggtccctgattgtgtgttttgccagaaaagatcacatgcagcctcatgatctgatagtgacctggatcgggaaca

SEQ ID NO: 653 - DNA, 654 bp, Canis familiaris
  misc_feature (1)..(654): n = a or c or g or t
caacagcttttttagntttgcctccccaagtcgtgagttagnncagcagcaaatctctagcagggcctttaaagtaaaaagaatttagctcactttacaaagtatttctctcttcactatcagtgatctcatttagcaaataaacttttattctagttaggagtcaccgatctctgtgtactgttacattttcaacttaggagaaactcagtgtaggtaggagtggctttagagtctggtttcttttcctgtttccattatttaatgcatgagcattatattaaagtcacctttattgtgaattgttgagttttcacctgtagtgaaaatgttacattattattgcgtgttttgtggatctccatttgttttctatgttatttctgactaaactaggtgtttatgtatataagcacctatgttacatgtctgcttgtcactttgtgttctcgtatttatgcatatatgtatatatgtatattcctttatattaatattttgttgtatttgcaagtatatttgtgtgaagattttggtctcaggaaatggcaggtgaatctacagtttgttatttgggtatgtttatctatttgtatgtatttgcccttgtattaatttgtttggaggtacgctcatgtgggcgaataagaagac

SEQ ID NO: 654 - DNA, 529 bp, Canis familiaris
cttctttggcatttgtatacaacacctccgaggaattcgggtaggctgctgtcctctccgctgacttgagccagtcctcaaaacgggagtaatcatctagaaatttctgccacaggcgccacgtctcctcaattctgacaggaggggccactcaattcttacttcattcgtcgttccattgacatggcacagatattcctccagcgtcggtccaagcttctggtggtctgctggatggagtcgcattcagtctcattggcacaggcatcggagtcatgcaggaggacatcacagatgttaaacacagactccactcccgcactgtgttgttcgatgtctcgctgcaggtcctaaagttgtaatagagagggtcagaggagggagagatgaggagcctctttgttttgccactgtctgtagaaaggcaacatgaagttcactccaggtcacttcaatatttaataattttggaaatgactattattagataagactaacattttcttacttttcttctgataaatgtaca

SEQ ID NO: 655 - DNA, 641 bp, Canis familiaris
  misc_feature (1)..(641): n = a or c or g or t
gtcgaaaatcgaaatcaagctanctgatattccagaaggcaagaacatggctttcaagtggagaggaaaaccgctgtttgtgcgccatagaaccaagaaggagattgagcaggaggctgcagtcgaagtgtcccagttgagggacccacagcacgatttagatcgagtaaagaaacctgaatgggttatcctgataggtgtctgcactcatctcggttgtgtacccattgcaaatgcaggagattttggtggttattactgcccttgccatgggtcacactatgatgcttctggcaggatcaggaaggggcccgcccctctcaaccttgaggttccttcgtatgagttcactggtgatgacatggtgattgtgggttagagacctggactcaggttctaggctcctttcggtcttcttgtcccctcagaagacttagaaggaagccatctacacttgggttgatttgaaatatttaagaattgctaataatgtacttgcaaacgatgtgaagtaaattgagtttaatgttgaatactttcaagcattcacctaataaagccactgttaaacattgctaagctcaaagacttcaaaattgcggtgttttgatagctgattctaattaaaaactatannnnnn

SEQ ID NO: 656 - DNA, 609 bp, Canis familiaris
  misc_feature (1)..(609): n = a or c or g or t
tactgnagacagagctagcangcaaaagcctatgaacccagtnnncactttctgccatccttttaatacagctgactgggtcttgccaggaaagcagataggaaacctcagccaattatcctcaggagaagacaagtggctacttcgaaagaaggccaaggaagtattacttaattcaccactacaggaggaatgtaactttccccaagaccgttatggcctcccagcagtttgtgacctctttgcctgtatgcagcttaaagtagacaaagaaaagtggttgtatcgaactcctctacagatgtgaagcaatggaacccaagtcaagcaacttttctgcaaattatcccatatccatgggccgagtgactgtgcagcttgccaaatcattgtgtttctgggtctgaccagtcagcttagttcctttcctgcctagttgagctagtgaagagaaataagtcatcgaattataagttactgcataaaagaaaaagactgttgatgctgaggtgatttcagttcctttctacaaaagtattaactcagccctacactagaaacaaacagcatcttggtggataggtcnnnnnnataagcctctacagctcc

SEQ ID NO: 657 - DNA, 303 bp, Canis familiaris
  misc_feature (1)..(303): n = a or c or g or t
aagatagtgcttcttccccttttgtcatcattttttactgtatccaatctgtgactttaggagcaccaattgttaagggaagaacgttggtgaaaagcacagaaaccaatgacttctatggctatggaatttccgtggagaaaagagagcatcagaactcacctggatcatctttcatacctgggaaaccctccacactcccacgcgtgttccgtgaacttgagtgaatagatgttcagggtgcttgcagaggagagagcacacctggcgcatagatgnngtggggaggtgcagggggacgaa

SEQ ID NO: 658 - DNA, 518 bp, Canis familiaris
  misc_feature (1)..(518): n = a or c or g or t
tttaaataatatnnagggggagaacttctgatattacgtnaagctagaaaaannnnnggcaccctgaagccctatccaaaattgtgtatgtgtgtatatacacccaaacatgcacacattgttcagaattatgtcaagatattgtacccagaaaaaaaaaaaaagctgaaaggaaacgcaccagaattttatatggtgattatcgttggcattgaaaccaaatatctggttttggttttcctttatacctttttttcccccaaatatcctgtagggaatgttttattttaataaaacaaactttatttttaaagaagcaacagctaacatttcatggttagagccctatttggaaacaataatacatctcacatcagcaaatcctgcagattccaccctttgccttttagctttcgtgattaaatgaagtttcttgggctcagtggttagattggataactgaagatgatctctggaaagatgctgctttgtgannnnngttatctatctaagcatat

SEQ ID NO: 659 - DNA, 504 bp, Canis familiaris
  misc_feature (1)..(504): n = a or c or g or t
tgaaggaatgtattttaaatttgctctttaaaagggaaaatggagcacnnggggagctcagtggttgagtgtctgcctttggctcagggcgtgatcccggggtcccggaatggagtaccacattaggctccccacagggagcccccttctccctctatgtttctgcctctctctctctgtatctctcataaataaataaataaaatccttaaaaataaataaataaaaaattaaaaggaaaatatattactggacttagaataacttcccaaagcagactctaggaccctgaaaagccctttaaagttctttcagtttgatagtttatgtttattatttttaactattaagatactatataatgatataaaatttaagagattctgatatataattaaaaattaggagggttactatttttccttataaaatgtgtgtgttatctatcaatcaatttatattcctgagtgtgtgttgtatnntatgtattgtctgcatatttat

SEQ ID NO: 660 - DNA, 598 bp, Canis familiaris
  misc_feature (1)..(598): n = a or c or g or t
aatctgcatcnnggtaggcagtagggatngtaatctctgaggngncttggggtggtgngaaatcagannagtgagccatcaggcaggacctgggcaaagtttcgnnaannagntagcctctgaatgggacttctggatagcttcatacaatatcccacttctgcctttgtccttcttgctgttctttttcctgggcaggttttcttttatttcttttctagtgggtaccggcagctgggcctttgggcagctggcaattccttctttcattggaggagagacctcaacaagttctttctccttttgaagtgactttgaacccctaggagacaaggagcagtctctgatctgtgccctgctcacagtatctggcacatagattccatccccgtgtctacctccctcctcggagacacttctgacacgacctccactggccttgcgcagcgcttagcccggaagaccaacaaacaggtgtttgtcagctataaccttcaaaacacggacagtaacttcgcgttactggtagaaaacaggatcaaggaagaaatggacgcttttccggagaagttctagaacgcagagtggccgcagtgag

SEQ ID NO: 661 - DNA, 568 bp, Canis familiaris
  misc_feature (1)..(568): n = a or c or g or t
aaagangnctcccagaacattacttacatctgcaaaaacagtgtgggatacatngacgatcaagccaagaacctcaagaaagctgtggttctcaaagggtcaaatgacttggaaatcaaggcnnaaggaaatgtcagattccgatatattgttcttcatgacacttgctctaaacgaaatggaaatgtgggcaagaccgtcttcgagtacagaacgcagaatgtggcgcgcttacccatcgtagatcttgccgctgtggatgttggcagcacagaccaagaatttggcattgaaatcgggccagtttgttttgtgtagagcaggccaagatacattgaccaagagcaccacccccgccaccagtgaccaccaccattcacaagaattctgactatttgaagctgatcctgagactcttgaagtaaaggctaatcccgcatcagcactgtatatatggtcctaagtgcctggcctccttatccttcagaatatttattttacttacagtcctcgagtcttaattgatttaaactatttttcaatacaccagtttaggtttaagacaacc

SEQ ID NO: 662 - DNA, 269 bp, Canis familiaris
  misc_feature (1)..(269): n = a or c or g or t
gtcagtgtggngatgtgatgagggctctnggccagnnccccaccaacgccgangtgctcnnnntcctggnnaaccccaagagtgatgagctgaagtcccggcgtgtggacttcgagactttcctgcccatgctccaagcagtctccaagaaccgggaccaagggacatacgaggactacctggaggggcttcgagtgtttgacaaagaggggaacggcaaagtcatgggcgcggagctcagacacgtgctcaccaccctgggagagagg

SEQ ID NO: 663 - DNA, 640 bp, Canis familiaris
  misc_feature (1)..(640): n = a or c or g or t
aatgcctttgaccagtatcgagacctgtattttgaanncggcgtctcgtctgtctanntctgggacctggatcatggttttgctggagtgatcctcataaagaaggctggagatggatccaagaagatcaagggttgctgggattccatccacgtggtggaagtgcaggagaaatccagcggtcgcaccgcccattacaagctgacctccaccgtgatgctttggctgcagaccaacaaatccggctctggtaccatgaacctcggaggcagcctgaccagacagatggagaaggacgagaccgtgagcgactgctccccgcacatagccaacatcgggcgcctggtggaggacatggaaaataaaatcagaagtacgctgaatgagatctactttggaaaaacaaaggacatcgtcaacgggctgaggtctgtgcagactttcgcagacaaatcaaagcaagaagctcttaagaacgacctggtggaggccttgaagagaaagcagcagtgttagagccccgctccgctcgctccggacacgccacgcgctcggtagagtcctttcttagaaaactcgtcttctgcccccgccccgccccgcccccaccaggtcccgtaacaccggcatcgcgaccgca

SEQ ID NO: 664 - DNA, 167 bp, Canis familiaris
aatggggaactgttatttttgtaagtggatataggttgtttgttttaattttttttccccaatctgcctcatgaagtcccttatttgcaaaaatcccagtgcataatagctcatgaattataatctgttttgtaagtggccatgctaccagaacacagtcagtggta

SEQ ID NO: 665 - DNA, 645 bp, Canis familiaris
  misc_feature (1)..(645): n = a or c or g or t
cactgttaaattttctggggncngagctgcctccacaggtcccatcggctttagtgagcctcactgcacttctctccctgcactgcctttgtttaaaagtttatcgtctttagctgagaccaaattaatccttggtgaacaaggtgagcttaaaacatgccattatttaataagcgctccatcccatgatgggatatgatttgccgctccttttcagaatcctcttttggcattattagagctgtcattggggttacattggcatttactatcatgtctttcataagccaagttggtcttgggtagaatcatataatttattgtccgaactgagactttacagaatgaaaagaggttctgttaataattatgtcagatcaacaggtgtaagctggaattgtctcaggcaaactgggatgtatggtcaccctggttatgggtaacccgagtctaggtggtttgtaattgtgcagactgcatatatgtttctgtgtgtctatgtgcgggtgcttgttaagtggggctcatattactggataagaggcccgagggaagtgtggcttgctcgtctgttatgttaacaagcttttctaaaactgcttcacttgttaattcatttattccttcatacattgactgtttttg

SEQ ID NO: 666 - DNA, 577 bp, Canis familiaris
  misc_feature (1)..(577): n = a or c or g or t
attttgtnntcagatattcctgctgatttgcatgcttgccctctgccntgcaaactgtagcctccccacgctcccagctctgtcacctcgactcagggagaatgtcaggctctacctgggtctcttctcctgctgctgcagcctggaaactctgtccagaaagtttccacagccaggttgccagagggtctggaggtgagggtgagaaagtgaaatggttgctgtgaaactgttctgatgattgaaagatatgagctcctttaggagctttattttatgtcatggtgatgagcagctccctcccctgtaccagagagaggcttcgactccttgctctacctgggctgctgctttctccagcttacctgcagtgcacctgctggagccaggtctctatgtgtgcatagaggcaggggagatgcttgcgtgcttactttgaagaaaaaaaaaagagcccgactttgtgagaggaccaaccaacaaagaaaaccccacttagctgatgggagaattgttggggcttgtcctctgatcggagaggccactcccttgtcttccaatccgttccaagaaccat

SEQ ID NO: 667 - DNA, 431 bp, Canis familiaris
  misc_feature (1)..(431): n = a or c or g or t
cttgacctnnggcatgatcccaggaccccgagatcatganntgacctgaaggcngatgcttcactgactgagccccccgagggcccctttatatntctttctgtnnngtcttgtttggactgntngaaggtgttgttttggaaataattatgtacatgctgctctgccaaattctcttattgcatgtattttttttttaatttatgctcttgggttttcatatttataataatactatttgcgaataataatagttttaccttctttccaattatacttgtaatttcttccttgtataatagactggctcaaccttccaggaactgttaaataaaagcagtgagggcacctggtggctcagcggccgtctgccttcagcccgggccgtgcccccggggtcccgggatcgagtcccgcgtcggcnnnnngta

SEQ ID NO: 668 - DNA, 649 bp, Canis familiaris
  misc_feature (1)..(649): n = a or c or g or t
gctgaagtggatnnagagaagccatggaactgaaaaagcactcactgcactacnnnnnngtnnnnnnnnnnatcanntagnngcagtgaagaagctacagaactctaccaagctcntgcagaagaacaacctgaatctactcagagacctnnnngtgcacgtcgcccacagnnttcggaacagcccggactggggaggtgtggtcacgttacataggaaggagggtgattctgagttcatgaatatcatcgccaatgagattgggtcagaggagaccctcctgttcttaactgtgggcgatgagaaaggtgctgggctcttcctactggcagggccagctgaggccgtggagaccctgggccccagggtggctgaggtcctggagggcaaaggagctgggaagaaaggccgcttccagggcaaggccaccaagatgagcgggcgggcagaggcgcaggcactcctgcaggactacatcagcactcagagcgctgaggagtgaggactctgaggactctgccaccccccgggggctcctgccattgagaatgggcctctcaggaccacagagagagtctcttggacagtaaaatagtttgacttgaaatggtcgcggtaccacacggatatgactgatttgtacagtatt

SEQ ID NO: 669 - DNA, 454 bp, Canis familiaris
  misc_feature (1)..(454): n = a or c or g or t
cgcccgcgccgggtggtgncgggaagacgnnnggacctgatnctgatgcactgggcctgcgccgtgtgtcaggtgaagcnctgggttcggtggatgcggagnntgcggcagcgcgtttctgcggggccacagctaatgaggcgtcggccctggcggccccgccttccctgacagcccctgcccctgggcggcccgagccaggcggcccctggccccactgggccgccaccgtcctgggacagcgcccggtgacgtcaccagccatcagaccgactggactcgggcacggctctatcccgcggcctcgcccctgggaccgatacagcttattcaccgagtcgtttccagtttggttcccggagactgcatttgtggcttaggaacctcctcttaggttcacctgacattaatcatgatctgcctttgataacgtgtttagacgtcgggaaacaaa

SEQ ID NO: 670 - DNA, 162 bp, Canis familiaris
accgccgggcttccagggaccggagtgcgaaatacaagttctccagagagcggacatcgagagaggagtcctgggagcacgggcgcagtgagcgaggggccgctgattggaggctggagagctccaacgggaagatggcttcgcggaggtcggaggagaagg

SEQ ID NO: 671 - DNA, 511 bp, Canis familiaris
  misc_feature (1)..(511): n = a or c or g or t
ttgccaccacaactccccactacactatcagctccaacacaacctcagctacaaccacnngcaaaatatcatctgatctcatcttcaaaagtacaactcctnctgatatcacagtttccagtcctaaaacccaagttccagnnaccattccactcactgctgcaaccacgtctaatgctccaactaccgagatttcacctccccttgttactgccactactcttcctgccaccatgcaaacaactccttttaccatacataccatactcaagatgaccactgagtcaggatatgaaacaacagaacttccctacagcagcactaaccctgataataactacatatatgaaactacagaatcttattactatgatgaatttgatgtctctaattctgaaattacagcatccacctataccactccaaaacctgcctctaccaccaactaaataccagttttctaaagtatattgctgttaacttcatgattatatctttttctttaaaataa

SEQ ID NO: 672 - DNA, 508 bp, Canis familiaris
  misc_feature (1)..(508): n = a or c or g or t
ccatgtaaatanngagagaaaaatatacgtaccaagtacaagtttagtatttctcaaaacattgttttgccattgatttcntagggacccaaattaggatctccttcacgttttttctgtttaaaaatgcaccaagcagaccctacctgatgattattgcgttgatcttcagaacccagaggtggcaaaagctggtcatttttattacaaaggaagatatccaaattttttatagaatatgaaatatgtaaatcagaattccattgagaaaagagaagccactctaggcattccaagtagaaagtgctttaacagagggcattaaaagcctacataatcattggaagggcttaagaataattgttagtgaagcttcgagaagaaggtaattaacaagagagctcacccggtacccacagcaaatctttggaagctaaatggtgtcaacactgccaacatcagctgtctatgatatcaagacaggtgacttctaggaccttgcccagaa

SEQ ID NO: 673 - DNA, 591 bp, Canis familiaris
  misc_feature (1)..(591): n = a or c or g or t
agatnnncccccaacctttnngcccccccccccccagaagatgcatcatttgggtcntatctggcttgaaattgaaggccctcccctgtctccctccagggcagggacagtttgttgtgcttctgtcctgttccttgcagtcctcttgcactcagagggagcattaggggaaagccctgggtcagattctagccccttcccctccatgcttctctccaacccctcagggagaaccttagcactgctctcacggaagggagcaggtcacccctgggaccttctctcttcctcccctccctcctggctggctgtgcctactgggtgtagcctgatgctgcgcatgtggcagagtttcccttcacccttttatagaagtagtgtggtgcagtggagaaggtttcagacttgggatcgagcatgcctgaattcagatgtttctgtaccttctgcacttatcatctggggagcattggataagcctcttaatctccctgagcctcagtttttcacttgttaaaatagcaccaatgatatctcacaaggtggttatgaggattaaatgtgataaacatatgaaagtgtctggcacat

SEQ ID NO: 674 - DNA, 648 bp, Canis familiaris
  misc_feature (1)..(648): n = a or c or g or t
gctgcccgatggaaagaagagaagaaaggnnntggtgctcccctcacaccgaggccccaaaannaggcagcnggacaaaggcagagtgangtctctccctcccaaaaagccaaagccccagataaactcgcagaagcaagagaagcaaaaattaccttccaaccaggcccctaggaagaaagctaagggaaataagactgaaatccgcttcaaccagctggtcgaacaatataagcagaaattactgagaccttcaaaaggagcacctcttgcaaagaggagcaaatggtttgacagttgatagtggcagcggactggataagaagctggattctttgtcaagcttccctctgagggaaagacaccccctttcctccccagtgtgctgccactttgttgggagctcccctgggctgcacacatttgaactttgggccctccccagtgtgtgattagtgaaccacaaagagaaatctcagaaaaacatcatgatgtttttttgtgtattatccaagttactgtgtgaattgtgtctataattattacccattcagtcctctgttttagaaatggaaacaattgcacggaggattcttgagggctgaatttttaagatgtatattttgttaagtgtctcctctaaatgag

SEQ ID NO: 675 - DNA, 537 bp, Canis familiaris
  misc_feature (1)..(537): n = a or c or g or t
aaccanagttttataatgttttnngnngtcattttagaatgctaattataagtcaattgtttgtccttaattttgaaagagagaaagtaggtgagctgtagtcataggaagcctcagaaggtcctggtgcctctgtgacctcatttagtccccagctggctcggagtccatcctgtggccccatgggtggtgcctgccttgggagacctgagcgccactgccccacataagccccaggtcccacaggctgtcctctctgtgcagtcatctaaacacacctgtgggccttcaggttttaaaaactgcttgggctggagagttctgatatatgttgccagaggtgatttatacaatgaagtttagaatcgaatttatagagtgtgcaggccttcctgtgctggcacaaggtctgccagggtgcctttccaaatgctttcccacatagggaagtcataacctacactatgtgccttcttggctatttttctgtagattttttttttttttaataaatttcccttttaccttcctgttcca

SEQ ID NO: 676 - DNA, 561 bp, Canis familiaris
  misc_feature (1)..(561): n = a or c or g or t
tcctctgttcttgaantggnnagaggtttttggaatnnngcaaggctctagtgttgcaggctgtnnnntgtttactgcagtgaaattctggaaatgttcaggtgtggcttcctgaagcctgtcatttacaggctttaattgatgtgcacctttaggattttctgcccgctttatacagttgtccaaatgatatcccatgtttacaaatgcctttcagtttttactttctcctctccattaaattgcccttttgggcagtttataaatgtgtgttgggtgggtgggggaattaaatttctgagtgctagactccagagattaaataatttgattcatggattggaatctcacagttcattgtaatgaaactaatgtcaaccttggaggaccttcgacatacggcgctgaatcttgggtattaatgaatctgttaatagcatcttgatgtgtgcatcaaatgagttattttcaaacttgtatatttaaccaaagttggtgtatgggaaatgtttataccaagtcccacgtggttactgatggacataagaacagaaatgcttt

SEQ ID NO: 677 - DNA, 469 bp, Canis familiaris
  misc_feature (1)..(469): n = a or c or g or t
tggcccccaagctggccctccctgcggcctggtgccctgtgcagtcaacttccactgttgtcaaagaccgggtcagggcctgacaggctcagggtcagcagtcgtncttgcacggcccgttccctgcacggcccattccctgcacggcccagactcctctgcgctgcagcagggagcccagcgggtgggctgcagcccccccacccccccatgctcaccgcagcagagccccgtgtcttcatccatctgccgggctgcatctccacttcaggcttcatttgannnannnnnccatggctcaaaaaaagtttgaaaacccctggtctccaccaccttgattttgcagatgaggacaccgactctggacagttaggagggtcgggcagcgggagcttggactctgtgacccaatctgaccccacatcctagccttgccattcctacagagcctgctgtggcctcatagagc

SEQ ID NO: 678 - DNA, 465 bp, Canis familiaris
  misc_feature (1)..(465): n = a or c or g or t
ccaccccccaccaccgaaatttctgtgcccttgtctcacaaggacagnnnngctgttccagtccaggacactgatggtgcttggacctcagcctctaaagagggctggccatggtccgggagttaagggccttgggctggggtttaagtgtccacccagccaggctctgcccagtgtgggacnagtaggcaaagaaagagggcaggaccaggggagggaagatggnctggtccagctggtgcctgccaggagtgaccccctgcctcgcctgcccacccctcaccacagtgtttgtgccttgaactgaggaggcagcccctgagcccagaactcttatggtccaacaccccgagagaaggggtgagaataatctctgcatctcaggtctcccaggaaatgggaagacccaggcatcccaggaccctcacattctggagcagagatgagatctgagcctgtgcccct

SEQ ID NO: 679 - DNA, 559 bp, Canis familiaris
  misc_feature (1)..(559): n = a or c or g or t
ccccacctgggatcccagtncttggccnngaacactgtnccctcaattcttccctgggccctcaggcccttccttagagggagcaggaggccgttgccagtactcagaactttagggatgacaattcctgaggactaatcctccgtgggagccttcacagaccatgcgagccttcacagagccctcacagaccggcagaagggagtgagctggggcttgtttttntagttctctgcatgtctttaggaacagctgtgggagttgaactggaagaaagagaagggggaatttttaaactttatttttttaagcaaagaaatgcttttctcctagatgtgtcctaagttggggtttttaaggccgcacagactgccagatgctgggtttttgtttttgttttttggttttttttgtnnnnngntntnnntatggantnnannnnnnnagggatttttnnnccccctnnnnnnctnnnnnnnnnnnnnnnnttaagnnnnnnnnnncnnnnnnnnnnnnntnnnttgtannncnnnnnnnnnnnnnnnatctttgnnannnn

SEQ ID NO: 680 - DNA, 645 bp, Canis familiaris
  misc_feature (1)..(645): n = a or c or g or t
cctcnacgcnaaactctatacngcggcctgggcacacgtagcagnnaggctcataaaggactcagcgcatcacttacagactctgatgcaatccnnagctgactgggatgaggcctnnaaccagagcactgtcctacacctccaggctgctaaggcacattgctactatatcagtgtgaagaattttacagaaactctggacaaactagaaaacgaaccagcaattcagcaggtgctcaaacgcctctgtgatctctatgctttacacagtatcctgacaaactcgggtgactttctccacgatggcttcctatctgggacccaagtagatgcggtgagaacagcctacctgaacctgctcctcctcatccggaaggatgccatcttgttaactgatgcttttgacttcatggatcactgtttaaattcagcacttggctgttatgatggaaatgtctatgaacgtctgttccactgggctcagaggtcaccgaccaatactcaggggaaccctgcctatgagaaatacataaaaccactattacaaagttggagatccaagctgtgaaataatgaagagcattcaagaggcgccaccatgggactatgaactatggcatatatagcattcaactttaaagtata

SEQ ID NO: 681 - DNA, 622 bp, Canis familiaris
  misc_feature (1)..(622): n = a or c or g or t
tgattttccgcccacacaattcacagtcgggctgggggaggtgtagatgcaccatttgttgtgctgcanctttgtttatctgctatgtctgatcccaaacccagccatgcaaaggaatcatttgggtgagtgctgttacagattcctgggccccaccccacacacacctactgaatcataattgagcgcaggaaggggactgcaaatctacatttataaaaacctccccttgtggtttgataatctgcaagtttggggaactgctaatatatatataccactagaaaagcatagcgctcaaaatcctcaatttctgagctttaccgtctttaaagaacgtaaaaaacatatattcgctttctcagtgcctctttcacctttataccgtggtctgttcatcctgctgctggaaaaactggctccagttaaacaataggagaaaaaaaggtgcaaactttaccagcttccccaccttcttagcctcagtgaggtatttcccccaagtcctactggggcaatttaaatgctaatgtcttaagtacaacaatctctttagcaatcagaattgtttttctgccaatcctttttctctttatttttatatttgttggttcattcattc

SEQ ID NO: 682 - DNA, 653 bp, Canis familiaris
  misc_feature (1)..(653): n = a or c or g or t
cctgacaccggcggnnaaaggttgaaaaagtaccgtgtctgtggctatttggagcaggtacaaaaccattggaacagacagctgtcttactgtgctgcctgtttgtgttttttacagggaaaaagaaagtgcaaaaagttgtgtgtgggttttgttgttgttgttgttaagccttaaggcttttaaccattcagttggttgggtggcaggaaattgccctcccttattttggtctagaacttaaaaggcttccaaacccccccatggtgccattgcctcctaactccaggtaaacaaagcatctccacaattcagggtataaacctcaatctgcatctaaacctcaatctgcgtcagtctgtctgttctaaataggtattaatagatttctggcccaaactattgtactcttataaatgtgctcagttctcttactttaaaaacgtcttttaatttctccagtgctagcaggttcctaattgtggtgtggacagtgtgtcactgtatggctgtgggggcaaggctgtatagtactcccttgttaacatatggagagctgatgggctcgggccagactctaaacctccaagtgctgaaagggtaggcccagtgtccagtgtagcagtttattttatagcaaacagactgccttt

SEQ ID NO: 683 - DNA, 450 bp, Canis familiaris
  misc_feature (1)..(450): n = a or c or g or t
ggcgctacgaagggcacaaggtagaaggctactcggtgggatgcgagtgctccccggacggtgacctgctggtgacgggcagtgccgacggccgagtcctgctgtacagcttccgcactgccagccgggcgcgcacgctgcaagggcatgcacaggcttgtgttggcaccaccttccaccctgtgctgccctctgtcctcgccacctgctcctgggagggcgncattaagatctggcactgagcctcctagtgcagagcctcccggatgccagccaggccccaggctcccattcttccttggggtgggcgggtgtgaggaagcgctgaggttgccttgattgaagctgggtggagggtgcctccctccaccctgagcctcaggttccacatctgtaaaatgggggaagagatctgtttgcttcagggttatgaggaccaccttagtggaa

SEQ ID NO: 684 - DNA, 530 bp, Canis familiaris
ttcatggaataaattcatgagtagtagctgtggaattagtttagtcaggcctggagcagagtcataagccaaaaaaatacccactactaataaagtgaactttcacgaacagaaagttgacaggcagaaaaagaagatttcctagcttgcttccagccagataaatagttttgttgttgttctttctttagcttctgtttgatttatatttggaagtaattatgatgcttgattacaaagcaaattaaacatagcattattatgaagttaaattgtatattaatagaatagtattacaaactataataataatagctttagcctttattataatttatattaaagaccttgtaaacattgttaatttatttaactgttaagtataaacaagcattatagaacataacttgataaaggttatagctcattttcctatttggttcattacacagcagatgtatgaatataacagaatgacttgtaaatataccaaatggcctagtatgttgtttatcctattagtgagataa

SEQ ID NO: 685 - DNA, 414 bp, Canis familiaris
  misc_feature (1)..(414): n = a or c or g or t
tgtttctttaagcggggngagggtggccagcatctgtccctgtnngttatacgtcatggagtaggtgnggcngctgcttctggagcataacccacgtgtgtttcttctctttctaacccccatccctgcatgcctgatccccaatttgtactccttacccccagccttttttgggcagcanctgaagagccatagggcttccacctttattcccacccagagaatnnngggagccagtctcccattataggagtcactggacactttcatnnnnnaatcccatcacacnnnagttgtttcctcncctctcttctccccttgggtcctgggaatgctgnnnnntcaatgaccccagagcctaagaacagcagctgtctcttgagatgttgagagatggttctttcntagccctgg

SEQ ID NO: 686 - DNA, 580 bp, Canis familiaris
  misc_feature (1)..(580): n = a or c or g or t
cagagttcccccagtgtnntgtnnnaaccatgaaacttgggnnngggccaagcacagaatgttcaagaggcactgaagcccacccacggccttccataacatgtctcttccaagaacacgtacatagatgcccagcgccttgtagctcttttgtctttgggtgctaagtgattccaaagaatcgtttgctgtttgatccagaggaacatgaccgccagaaggaagaaaggactaccgttgagctgaaatcagcagtatttaaagacctgcaagaagtggaggaggaagcagtcaccaggacagctgccctggagtatgctgagcaaatcctgcctggctattggcacatcagtatatcactctgttgaatcccctggtgttatcctgactcgtttccctcaatttgggatcactgccaaaattacagtgctctgctcctgggttgtaggtaaaatcaaatgagataatgcccctaaagcgctgcatgttgtgagcacccaatgaagagagcaaaaccatggagcattctgcagcaagtagaatcaatagattatagaaatncacagagcaacaaggataa

SEQ ID NO: 687 - DNA, 627 bp, Canis familiaris
  misc_feature (1)..(627): n = a or c or g or t
tgtnngactatcnnnagtagaaatgtaaaatttatttgaaagttgattttatttnntctgtcaaaattttaaatgtatacatcctttggatctagcaataccactttgcagaatctatccccaaaacggacttgtacacgtgccccaaaatttgtgtgcaaggaaatctgttacagaattatttgtgatatggaaaataaggacacaatgtaaatgtactgggaaagaaatgtactggggatgaaaggtacagcacaggaaatatagtgaacagcactattaaatagcatttgatggtgacagagggtattacacttgcggtgagcacagcataacttatagagttattgaatcactgtgttgtacacatgaagctaatgtaacattctgtatcaactatacttcaattagataaaataatgaggaagaaccttgaaacttataagattaagtgacatatttacacatatgtaaaggtttctaacaccttaatttttgttttaagtaggctccttgcccggcatggagagcccaatgtggggcctggactcatgactccaagattgagacctgagctgagatcaaaagtcagatctgagccaacttaaccaannnngccacccaggg

SEQ ID NO: 688 - DNA, 606 bp, Canis familiaris
  misc_feature (1)..(606): n = a or c or g or t
tccaaaccaggaannaaaattcccttttccaacctgtatcaatnnaaaaaaaattttttttttnntgagagcagtttagtccatattttgcactgacatacttttcattttcctttgtttgttaaggtaaggtattcaccctcaattcaatccaacttctattttattagggtggaatatgatgtttagcagcaaacttaacagaaactggccttttctttgttacattcaaaaggccaacatggtacaattaaagaattgcggacaccaaaaaactgttccaagtatgtcgaatatgtcaagccatttaggcttgtcagaaatgactcctttggttttttttctaagtcattaaaatgtatataaattatactagattggataacagtcttgcatgtctatcatggtaaaatttaatatgccatcctgcccaacccttccactcctacctttaaaaaaaaaaggccattttatgaagcattgcacaccctcttgggaaactgatcgtcaaattttgaaacagtatgaaacaattctggttggtgtctcatgaatgagctgacaccatttttttattctgtatatttagaatgaagtcatgaacaa

SEQ ID NO: 689 - DNA, 479 bp, Canis familiaris
  misc_feature (1)..(479): n = a or c or g or t
tggnnncttcaccagccccggctatccnggcacttacccnaacaacactgactgtgaatgggccatcatcgctcctgctnnaagacctgtcaccgtcaccttttactnnatcagcatcgatcatcccggagactgtgtccagaactatctcatactctnnnntggaccngnnncnaantctccatcctttggaccatactgtggggcagncaccaacatagctccctttgtggcctcttcacatcnnnnnntcataaaatttcacgcagngtnnncagtgtatccatcagcaatccgattaacctgggannnnngagtagnnntgtgtgtcgnnnnngggcanggaccatcagncnnnccatnnnnnnacggctttctgcctgggtnactgggaaggannngaactttttttttttttnnncaaagtatgtgtggaatcannnnnnnnacatttaaaaaaaatntngaatnnnnnnnnn

SEQ ID NO: 690 - DNA, 670 bp, Canis familiaris
  misc_feature (1)..(670): n = a or c or g or t
aaatattnatacaagtttattaatagcaagtgcaactnnntngnnncatgccttgcaacacatttngatatattcgccatgcttctgggtaatnncaagcccccaactacttatcttttgcagtctctctctgatcagtaaaagaaaaaaatcacatgcctaagaggtaggactgtaaatatgtatatttaactttgtatagtccatgtacctactttgtatagaaaaataattttaaaaatttgaactgaaggggggtaaaataaggaagtcatgaagttttttgcatttttatttaaatgaaggaattccaaataactcacctgcagatttttagcacaaaaatagccattgtattgtaaagtgttaaaatttcaaataatcattctgggagagaaggtaattgttatctcagttatagggggttttttgttttttatttttttggggttttttttttcagtcctatttatctacagtaggtattaagttcttttgctagaataggttactacaaagatgattatatgctgaaagaaaaataacattatataaaagcagttaaagtgttgccattttacacacggagagcatgtactatgccgacacagattgttctattcatttatttttctttattgccgtggattgatttgataaatgaaggtgt

SEQ ID NO: 691 - DNA, 560 bp, Canis familiaris
  misc_feature (1)..(560): n = a or c or g or t
tatgnngtagacacggtgcttcgctacnggtgncgnnngnggctgatgcagcgcaacctgccactaatccgctgccaggagaatggtcactgggagccaccccagatctcctgtgtgccccgcaggcctggtcgggctctgcacccaatgaaggcctcaggaggacaacaggggaggctactgggacgctggcagtcaccacggatgcctccttccaggccctctcttggtcctcaaggagcaaggccttaaacaactgctgcccccagcactgccctctctcccaccctcttcccatcataggaagtgaccacgtgaggggtggagctggagtccaggtggcagtgcctgggcagctccaccctagactagaccctctggcccctaccctgggcatcagaacccctatggtgggcggggggggggggggctcaagggagtccctaagtgcctcaactgcccctctccttgccagccagcctgtcccctcctgtccactccatccctctgggaacacctggcnnncttacaatcagattnnnnaggaaatgggtctacag

SEQ ID NO: 692 - DNA, 469 bp, Canis familiaris
  misc_feature (1)..(469): n = a or c or g or t
cccgagtccgtcntcgtgcagactctgattggctgctggatggtnaccgcnnaangccgggcttacgtgagggcggaagtgctgaggttacggacgccctagtaagggcgggaggaggggcctcagcggaagtggcgtcactaagggcggaaggagtgtggctggggtcgaagccggggttccatcccggctgggctgccgccccttctggactgctgcaatggaactcagcgccgaatacctccgggagaagctgcagcgggacctggaggcagagcatgtggaagtcgaggacacgactcccaaccgttgcgcgtccagcttccgagtgctggtggtgtcggccaagttcgaggggaagccgctgcttcagagacaccggctggtgaacacgtgcctggcagaagagctcctgcacattcacgcctttgagcagaaaaccctgaccccagagcagtgggcccgtgag

SEQ ID NO: 693 - DNA, 584 bp, Canis familiaris
  misc_feature (1)..(584): n = a or c or g or t
gncttcattattataaaccattgtgattgttgttgatcaaagtactggcacttgtatnnattagtaantacatcagaattacatgaccactgttngaaaacccataaagaaaaaaaaataattgcttaaaaacaaaacaaaaaacgtaattgctattcaacatgaaggaaaagtgtttactctgttgggatgtccattaagcagtcgtttaatgttattatatctgtaacgtgattgtgtgatgttatgttcagaatataaagtgtatgcttttgaaatttaactttaagagacaagcagcttcacaatattgtatattttaaatggtcccagtgagaaagacattaaaagggaacaaattttgtttgttttgaatgaatcatatatgtaacttgttacatgtaaactaaatgccctttgacttgattggtagcagtatttcaaatatctttacttttaaaaaagagcatttcatatttaagcatataagtcatttgtagacttccattgttgaatatttattttagtcttaacatttgttcttaaattattacattgcattatttattccttgagttccttaa

SEQ ID NO: 694 - DNA, 612 bp, Canis familiaris
  misc_feature (1)..(612): n = a or c or g or t
aaagcttnctanncaacaaatatttgaatgaaatagggacaaaagtgtagataacactgtaagcagttatgagagaaacaaagcgaggataacaaaaaaatctcacaatcttgagtaattataacaataaacaccaaaaagcagcaagttaaagtctcaaaaacctagtgaagaaacagcaaaataagccaacgaaagcaaaggatatattaaagataaaagcaaacaaccagacaaaattagcaagaactgaaaagacacaaagtaactgacatctagagaacacagttaaagtgaaaaccacaggcccaaattggaagcacatgggtgaaggccctagatctgtaaacccagaagtttacctaacttaatgttagcagtctcaacttcccagaaatgtcatcttcacgggtcagcaccgataggataatgtgtcacagggccctttccttttcatcccttaaggaagaggagggaatctacctactatatcttctgttcccctaataagggggacctcagctaaaataatcccttttttctatttatgacttctttgtcatgctttttaaagcccttccctttctgtagcccttctccttttccagctag

SEQ ID NO: 695 - DNA, 541 bp, Canis familiaris
cagctattgctgctaagatgagtggggcatcaaggatcttggccaacgacatagaccctattgcaggaatggctatcagactgaattgtgaattgaaccaactgaatccttttcccattttaaccaaaaacattttggatttggaacaagataagtgggaccttgttgtgcttggagatatgttttatgatgaggaccttgcagacagtcttcatcaatggctgaagaattgcttttggacccacagaactcgagtactgattggtgaccctggacgaccccaattcagtggacatagcattcaacatcagctacacaaactgatagaatattcacttccagagcccactaggagggaaaacaatggattgacaacaagcacagtatgggattttcagccttgagttatccaagtgcttccaagtatgaatatattatgtttgggtttaaccctaaaagactctccagtttaaagcatgtagttcttgtaaaatggcaaatcttgtttctaaaatatgaagtcttaaagttttgtcagcct

SEQ ID NO: 696 - DNA, 664 bp, Canis familiaris
  misc_feature (1)..(664): n = a or c or g or t
acaccaagccagagaagagatgncttccagtgtgttcctttaccctttgctgatgtggtcaggcgntgacagtaatacaaaagctggggtgggtgggatggtttgctannacactcccaggacacggaaatccaaagcacttgtctagaaagagatacctcaggggggtcttggggactaagtagtaggagatgggaattgaactcctagcagaccccaggattccagctaactcttgaggaaaagcttttgctgtggggaaatatggcaggtgggacttccctgatggctctgtcctgtttcagatccctgcaggggccccagtggcagagtgtggaggaggcgttcccacacatctatacccacggctgtatccgcaaggatgtttgcagcgactgcaccagctttgtggcagacgtggtgcgctctagccgcaagagtgtggatgcactcaacaccacgcctcgccgtacccgccagacgcagtccctctacatccctaacacctggactctcaacttcaagtgatggctctcagccttactggaccacccagccagagacatttcaaggaggccagacgtctggggaggagccaggctaggcctggacatggctgagaaactccccattctgnnnnnnagccgctagcctgccctcctga

SEQ ID NO: 697 - DNA, 291 bp, Canis familiaris
  misc_feature (1)..(291): n = a or c or g or t
ggtgactggccagccacctgctctgccccgacacgtgccaggtgctttatatccgtcaccacgtctgttctttctggagaaccaagaaggcagctgagccccatgcagaggtgagggggatccctccctccactctgggagtgggctggcccagagcttgtggcnnnnctccctcttcctcgacctggggcgaccccctgtgtccttcgtccacatgggcctttccggccgtgtgtctctgactacctgcccctgggacttgagcaggtgccacatccagcctgcttcagg

SEQ ID NO: 698 - DNA, 91 bp, Canis familiaris
  misc_feature (1)..(91): n = a or c or g or t
gtnctgacgcngcatcgcgggcctggaagtgactgctcccggccacgcacgaggggctcctcctgcccnnnnngtccccagagtccaggct

SEQ ID NO: 699 - DNA, 521 bp, Canis familiaris
  misc_feature (1)..(521): n = a or c or g or t
gggacaannncgatgagnngtggcttgcccagaccnagtgcnnnnnctgctgggggtataccagtgcctnncagcaaacttgcacagcctgttcgcagatccttgccagctcctaaaacctatggtagcatgaaagatgacagttggaaagatggctgttactgaccagcaaagatgagaatgcagagatccacagcttcttggataccccttcaccaggctaaaagacaacttttatatgcagactgttcagataagactcttgggatttataaatcccnnnnnnnnnngtcttaattagcacaaactgacagagatgatcaagcagcactttaatgacatttaacatcagatgtgtttggtaatcatacaatcactcttcatggaatcacatttagttttgtttaatagaaactaagttgatttttttaatatttgacagaggccaatatctgggcaaaaaactaacggatgccaaagagaaatgcccatttgtaaatgagagaatacctttgtgcaca

SEQ ID NO: 700 - DNA, 135 bp, Canis familiaris
  misc_feature (1)..(135): n = a or c or g or t
ttccctcaaacccctccctgccacacccacagctccaggggtggagggaagcatggagcctctcctggcttcagccccatgggtggggagggtggggtggggcacacacnnactccnnnnccctccacctgacag

SEQ ID NO: 701 - DNA, 609 bp, Canis familiaris
  misc_feature (1)..(609): n = a or c or g or t
cccttgtatatcagcgcagnctaccacaanntcnagtgcttccagctgcttctccaggctggggcgaaccccgacttcaactgcaatggtcctgtcaacacgcagggcttctacaggggctcccccgggtgtgtcatggatgccgtcctgcgtcacggctgtgaggcagccttcgtgagcctgctcgtagagtttggagccaacctgaacctggtgaagtgggaatccttgggccctgagtcaagaggcagaaggaaggtggaccccgaggccttgcaagtctttaaagaggccagaagtgtccccaggaccttgctgagtctgtgccgtgtggccgtgagaagagttcttggcaaataccggcttcatctgattccctcgctgcctctgccagaccccataaaaaagtttctgctttatgagtagaattccggtgcagcagttgattgcagtgagaagaaggtgatctgccgtgaaagttgacgccgattcttgcccccgtgaaccacatcctgtgctgctgatggaatcccacttggctcctggtaaagcagaaaccgccttgttctcgtggactgtaattccatctcaggtgcttggggcatcgga

SEQ ID NO: 702 - DNA, 628 bp, Canis familiaris
  misc_feature (1)..(628): n = a or c or g or t
acnnnngtttcccacccctcatccagaaacactagaagatataagggcacaacagctagctgctgaccctcctgggaattttttttcttgttatggggtagggaggcaaaggggaaaggcctgtggaagccgatcatagaatcgtgtgcattctgtttgttcacgcaatgggtgtttgctctggacttgaaatctctattttgataaagaagcctttgaaaaacaaagaattcacagtgtggattttcatatatccttcatcatgaaaactttacctatctagatttgaaaatctacatgtttatgtgaatgtaaatcactgtttcttggaaccccaaattgtctcctaaaaactattcagaatctaaatatgtgttatttaacccttctctacacagtgcttgactttctgttcatgaatggatgcctttatgtatatagaaccgtgtatatatgtgtcactctgaagacaatttcttaatgccttagatgaatgacattttataaagctgtcaaatgatatctgtaggctgttacatctcatgttgattcaagatccagaaagttttgttatgtatttaagaaattgctgttgtattgtatttttttttctgattatttgagaggg

SEQ ID NO: 703 - DNA, 668 bp, Canis familiaris
  misc_feature (1)..(668): n = a or c or g or t
atgcttctgattgctcattannatgccactcgctcagcggcccagagtgtcaaacagctggaaactgtggctgccaggctttctgtttcgctcttacgccacacccagctactacntgcagacaaggccttctatgaagcaggcattgctgccaaggcagttggctgggagaacatggcattcatcttcctcaaccgctttttggatctgactgatgcaattgaagaaggaactctggatgcccttgaccactctgactttcaggatacagacattccctttgaggtgccacttccagccaagcagcatgtgccggaggctcagagggaagaggttcgagactgggtactcacggtctcaatggaccagcggctggagcaggttctacctcgggatgagcgtggtgcctacgaagcttccctggtggcagtgagcactggagttcgggcactaccctgcctcattacagggtaccccattctgaggaacaaaattgaatttaagcggccagggaaggcagccaacaaggacaactggaataagttccttatggctatcaagacttcccacagccccgtgtgccaagatgtgctgaaattcattagtcagtggtgtggagggctacccagcaccagtttttcctttcagtaactgggagggctcaggga

SEQ ID NO: 704 - DNA, 669 bp, Canis familiaris
  misc_feature (1)..(669): n = a or c or g or t
aacagacantnntggttcggttgtatgnnnncnncaaggatctcttgatgnnnntcacatggtatnnnnanngtctcagcnnnnngagtcaaaaatggaanntgaatttatgaaagaaaaaagtcttgtttacccaaatgaggaaaaagatgatttaaaagaaccagtaataacagaagagaaggaattaaatggagatgaccgatcttcattactaaacaaaactacagtgcacaatttacctggtctcagtaacataagagaaaccaatacacaggacggtagtgtgcagtttattaaagatcatgtgactcaatgtgcattcagttttcataattctttgctatatgacttggattaattctatataattttagagcttaaaagttacgagtaaaaattttttagacttaaaatagatgatctttctgttaactactatcttgaagtattcaagaaaatataaaattaaaatttgcaattttgactctaatggggaaactggagatacttatttttttgcatgtagagtttatacaaagtttccttaattacagggatttttgtgattcctctgatgtatattttttctaatggacagttaaacatttagttttaatacaacttgtatatatttgcttgtttgtttttggcttcttttgtttacca

SEQ ID NO: 705 - DNA, 433 bp, Canis familiaris
  misc_feature (1)..(433): n = a or c or g or t
tctgccccattanncaggtggaaatgaagaagccggtgaaaaataaagtgtgtggccacacctatgaggaggaagccattgtacgcatgattgagtccaagcacaggcggaagaaaaaggcctgttgccccaaaattggctgtagccacaccgatgtgagaatgtctgatctcatccaggatgaagcacttagaagggccattgagaaccacaacaagaagaaaaatcgccactccgagtaggaaaaacgcacctacctacagggatgtccgcagcctacctcctaccccagccatctggagagagcagtgctcatccaagcacttcgactggctgcatagcatactttgttggggtaacacttgaaggttttaagtgtaattggaagcatttttctatgtcacaacaaaaatccaagcatattatattgttt

SEQ ID NO: 706 - DNA, 432 bp, Canis familiaris
  misc_feature (1)..(432): n = a or c or g or t
caaacagtaggtaatgacgtctctggtgtttgttttctgtttaatgtacagagaggagactaagcatcttgggtttaggggaggccatatggatgcctccatgtggaggagggctgctcctgggacccctgaggggtgctgcttccaggagatcaagctttccnttctagaaaccatgtaccgattcggcaggactgctgtctttggttgcaagggaggaccagaggttctgagctccatctatgaatttcnnnnnntttttgccacaaaagggctacctggttggtaagaagttgggatcctccttaaaaatgtatgtatctatagatatagatacagaatgtatattaacttactgctttgaccgtttcaatagttttctttccagtaaagtaattgtnnncttgagtctctcctggnnnnnncagaaac

SEQ ID NO: 707 - DNA, 397 bp, Canis familiaris
  misc_feature (1)..(397): n = a or c or g or t
gccactgccacgcgtgtnntcagcngtgnntcttgttggtgacatcaagttacttgttacattttcaccccggtggttctcaaggtgcacgcgttggctctttgatcgtccagacagttctctcccgttgcagtgacaccacattatcctgggcttgaatcattttccctttccagcaccaaattgattactaacgctttacgaaattattcaaatatcggaattaactgttgaaaacgttctgagatgatgtggatatagcaaatacctctattcaggggaaaaaacactaattggtttggatagtcagctgtaccctgggaagctaaagaacacacatttcgctgagctgtaccattacttttctacaatacggcatcttnnnaaccacaccann

SEQ ID NO: 708 - DNA, 208 bp, Canis familiaris
  misc_feature (1)..(208): n = a or c or g or t
ggaacccttttgtgacattgatatgtgatatgagnggaagaaatatttatccacttcacagtnnnnnnnttggnnnaagtagcagtttaaaggaatcgatattttaatannnttgtgtccactctatgttcataagcttgggtctgctccacttgggtttcagaaacaatccatccactaannnntnnnangcagtagtgactttgct

SEQ ID NO: 709 - DNA, 517 bp, Canis familiaris
  misc_feature (1)..(517): n = a or c or g or t
ttgagcatcgcaacggcaaggttgtggtttcagcatctactcgggaatgggctannaaaaagcacctttatagcaccagaaatgtggtggcctgtgagagtataggacgagtgctggcagagcgatgcttagaggcagggatcaacttcatggtctaccaacccactccttgggaggcagcctcagactcgatgaaacgactacagaatgccatgacagaaggcggtgtggtgctgcaggagcctcggagaatctatgaatgaaatagcattgttccaaacggggaactaggaagctgtgaggtgctacgtccttcagaagagagcatctggaagaagggccagctgggaagttttgtacaatcccgtaacagtgtggaacattactgtagttaagttaactacattactgtagttaacatcactccctcctccccttaggtctgttttcggggttgggtggcggtggttaaatcgaaggctaaattcttcccctctcttggacaggagagaattat

SEQ ID NO: 710 - DNA, 447 bp, Canis familiaris
  misc_feature (1)..(447): n = a or c or g or t
cgtgttaaatggggcttttccttccattgaagagatccccgaaaatgtggntcatgaccacgagaagaatggcctccctcgtctctcttnnttcagcgatgcggaaattcagaagcgcttgaaaacatacttcaagttttttatcgtaagagatcccttcgaaaggctgatttctgcgtttaaggataagtttgttcacaatccccgctttgagccttggtacaggnnngagattgcccctggcatcattaggaaatacaggaggaaccgtnnnnnnnccaggggcatccagtttgaagattttnnnnnnnnnncnnnnnnntccaaaccacaggtggctggaccttcagtttggggaccacatcattcactgggtgacgtatgttgaactgtgcgcaccctgcgaaataaagtacagtgtaattggtcaccatgagaccctggagg

SEQ ID NO: 711 - DNA, 576 bp, Canis familiaris
  misc_feature (1)..(576): n = a or c or g or t
gcatcaggtggtannnggcctcctcacagatctgctgggcctaccacagccagtcttgggaccccagggatcgcccccaaaacaccgaacggcagggatgtgttggaacccacacagaaacaggactcggacccatagccagtgaaggtgacctcaagcctgcactcacccagactccccatggcgggaggccggaggttccctaaggtcccagaacctccccgtgggcccaggtctatgagcagtgtcctcgtgagggccggtcttgtgagcagcttaaggcagagctgggacccctccccatgtctggagtcacccccctgaagcagggtcggccaggctagtcaagctcctcgcccagggtgaggagccctcctgcactggtcagcagtggacgctggcaggagaggagcacccagcccacagcacctgtgctggggatggagtacctgtcccacctggaactgggtgttggacgccgtggcttctgggacctgagaacttgtgtttctgggcaagttccaggtgggaagcaggttctgttgatcaggcaggaagtcccatcccacagctggg

SEQ ID NO: 712 - DNA, 495 bp, Canis familiaris
  misc_feature (1)..(495): n = a or c or g or t
ataattcagtgcttgtgtagtagctcagcaatgctcctaaggtcccaggctctttctgtttttccnnctgggatccttatcatggtggcttctgtgcttatagttgtttgctcagtgagtagagcgtggctattgctgttccagacatttcattcccaatcaaacgctggaagtaggaagcaaaagcttttccttttcaagtctgtcttttatttgggaaaaagtctgtctcaaaagtccctcagagatttcttcttacatctcattagaagtactggttcacaagcctgagaactcctttgggagtggggttagcagtgcctgggtagggcacattgtctcccctaataaaatagggctcttttaggaagggtggaataaatggctgttggtatgcaacaaatcatgcctgccacatgatgtgaaacctaaagttatttgtttgtctgtgtaaaggntgtactctagaaatatannnnntatctgccttatgtc

SEQ ID NO: 713 - DNA, 527 bp, Canis familiaris
  misc_feature (1)..(527): n = a or c or g or t
agcctgtacggcaaggcnctgctgcacggcaactgctacaacaggtggttcgacaagtctttcacggtcatcgccttcaagaacggccagctgggcctcaacacagaacacgcgtgggcagacgcccccatcatagggcacctctgggagtttgtcctgggtactgagacctttcacctcggctacacggagactgggcactgccagggcaaagctaaccccgcgctggccgctccccagcggctgcagtgggacatccctgagcaggcctccccctgaccctgcagccccgcgtgccgagctctgcccccagctgacctctccctctgctggcagtgccgagcggtcatcgagagctcctgccaggtggccacggcactagccgacgacgtggagctgtactgcttccagttcctgccgttcggcaaaggcctcatcaagaagtgtcgcactagcccggacgccttcgtgcagattgccctgcaactcgcccacttccgggtaggggccgggccgcgggggcaggg

SEQ ID NO: 714 - DNA, 491 bp, Canis familiaris
  misc_feature (1)..(491): n = a or c or g or t
aacgaaaactgaaaccaaccactaactnngaaaatccaatctacgcagagatggagaatgaacagaaggatagcactgctgtggccccacctccaatgccttctgtccttgctaaaagttctccaaagagagatccagtgccaacctatactgcaacagaagacacttttacagacaccgcaaaccttgttagagaagactctgaggtatagctgtgccagctatttagggaataattagaaacacacttttgcacatatattttttacaaacagatgaagaaaaagttaacattcagtactttattaaaaaaatatattttttcccggtttgcctatagttggaagtgtccatggaaactctgccttgtgtgtctttttttttcttttttacttacgccgtctcatatttttacaaataattatcacaatgtactatatgtatatctttgcactgaagctatctnnnnnnnattctataaatatattgta

SEQ ID NO: 715 - DNA, 421 bp, Canis familiaris
  misc_feature (1)..(421): n = a or c or g or t
aatggcccaagggcctgtgccacttggcagagattctctcctnnagggagttgggagcaaggggtcttctaagtggggangaaaaaagaacaggaggaaaatgatggcacagttgatctctctacagtagagggtcttacctggggtcccggatgacccnnncccccttgcaagttacagctaagacttggtnnnnncatttgtttctgaggagagaggatccgtagtttatatcnnnnnnanaaggggtccaaggcccccaaaatggttggaaccaggctgtgcaccacagttagcctgggtaggtatgtgtggtgagactggggtgggggaatctgagtgttagaggctcaggaattcgtacctgacaagctcctcagattagttaattttatgataccagtattctgtccagagatga

SEQ ID NO: 716 - DNA, 521 bp, Canis familiaris
  misc_feature (1)..(521): n = a or c or g or t
ccaaggtgctgtcccgcacaggtgtctgtcctgcagctannannaccactgggaaacatgggnaggtggcttctgtaacttattttttttgatattagctcagagcagggcatttgggacttctcagccagcgggagagacaggaagccaacctgcccacctcctggccacagggacccaccctggggtcccctctagcttctgtatgccagcagggaagcctcctagctgaggtagcagggaggggaagtctttcttgtctgtggctgaggtcgggaatgggttacccactgtccctgaggcttgaagccaccagcgtcttggctctctgggcctccagagggccacgctccccctcttgccactgtggcctaggttgcaagaggtggctccttgctggacacaggtgacatggatacaaatgatgtgctttagccccctggtgggaaacagagagggcccccctgggggcaagggccttgtgcactggtttactttaaaatgtacagatcttctcatta

SEQ ID NO: 717 - DNA, 560 bp, Canis familiaris
  misc_feature (1)..(560): n = a or c or g or t
gtcagcagcagcgtactgcatggcattgagccacgactgaaggacttccaccagcttctgctcagnnngccaaagacagtgctgcctggannaacctccacgtacgcatccttatgcatccccaggctgggccatgtcatggagtagtggccctggccctttgagcagttagcaccagagctaagagaagcctgcagtggtcatgttgattgcaaggctctaaagggggatgcttctgtgtttgtagaaaaaagcaatcctgaccaccattggcgtgttggaggagcccctggggaatgcccgtctgcatggtgcccgcctcatggctgcactgctacacacaaacacacccagcatcaaccaggagctctgcaggctcaacaccatgggcttactgctgggcctctactcctggagggctggaatcttctaaaaattgaatctttatcccagaaggagccagccttggaagcaggcctgaagtctgactataaatttcttccagtgtttggactcccagcccagatacggatcaggggttgagttatgagaggcctcct

SEQ ID NO: 718 - DNA, 441 bp, Canis familiaris
  misc_feature (1)..(441): n = a or c or g or t
ggacctgctgctctgcatcaacatgatccacatcagccccctgagctgcacggaggggctcntcagagccgcgggacatctgctcaagcccaaggcgctgctgatcacctatgggccctatgccgtcaacgggagaatcactccgcagagtaacgtggattttgatctaactcttagatgcaggaaccctgagtgggggctgcgggacacagccctcctggaggacctgggccaagccagtggcctcctgctggagaggatggtggacatgccggccaacaacaagtgcttgatattccggaaagagtaactctctccttctctcgcatgtttgtgtctccacggggtccccctggaacaaacccagatgccagcccctgcctcccagggctgggccatgaggggtggcctggaccagtctgggnnnnnntggccggaggc

SEQ ID NO: 719 - DNA, 461 bp, Canis familiaris
  misc_feature (1)..(461): n = a or c or g or t
agacctgnngctttaaatcagtgtatgtgctgcaggaagaaggatgcaggaaagtgcgtctcagagggggaagnngtgggcaaagcatgtagtaactttaatgactttaaacgttaatgctaatagtttaccggcagcattcattgaagcatcaaaaatggcagagaaaaatcaggataaaaacaaaacaaaacaaaaaaaacacctaattgctgtttgggaaaaaattttattttgttgtttagtctccacttttttgtttaaaaaaaaaaacacctgaaatttcctccattggcctgaaagcagtaaaatgtgtcnnnnnnatctttccttgggccaatcacagaatggtctgacaggacaaaacaggagccagaaacaaggaccgaagggaaaagggaagaacagttcatagctgtgctgtacgtatatgtgaaaaactgaatatcccgtcatcctgt

SEQ ID NO: 720 - DNA, 681 bp, Canis familiaris
  misc_feature (1)..(681): n = a or c or g or t
gtcagggatgcgaagtcagngtaaggnnctgagggtgtgaaaatgcacactcagtggnnctggcnntctggcaccacagcaagcctgccgacannnnnacnnnngtnngcancnnnnnnnnnnannacacctcacacaccaactggctcttgtcatgtcaggaagggtaactagcnctcagaggggacagcctgctctggtcaccagtaaggtgaccaaccgggtgttggaactccctgcctggagcacttccttcttccctgctgccgcctctggaggggacttccaagtacctggtgctcatcccagggcccactgtccagggccctggactcacacaccaaccctctggacccacaggcctggattccttgataggaaagctctcaagggctgagtaagaattttgcatttggccagctactctgacacagcacctcctccagagcatggctgcgaggatcagacctgaaaagccctcaaaacagtgcctgcctcacaacaggcaggtctttattgtaaattctgattcccttggaggaggagcctacagaaccacgcaagggataagtggatggggagagggcctgggtccctcaacctcccaaatccatagcttgccagagtgtgatggaggggaaaggagctagctaggtggatgggtgggaagtgtaactgtac

SEQ ID NO: 721 - DNA, 637 bp, Canis familiaris
  misc_feature (1)..(637): n = a or c or g or t
gtgccaataagnnnacaggagaggggctagcctatgcntgtgggnncgcttatgaggnancannctggctggcacttgaggaagagacatgtgagtggtgcccgtcacggagcacccggacatggcatcataggaggccccgagcacatgggagtgttagctggtgtggaaggagccagagcggctggcggactggagccctttgcctgtgtgcctgccctgcagaggcgcagcctggctcacgggcaggagggcatccctgtggtacaggctctttgtggctctggattccacggtggaatccccaaacctcacctgacaggaaggtttatatggcacacgtttaaaacaggtactgctaggcgggaagatcattttaagtgaacaaatatggctgccagaggttatttaaaatgatcattaaatggagtatcgtgctccaaactgtgatatgtcacctgtgcagagaaagcaagcctgagtccgtgtctctgtgagagcaagcagagcagagggctggaggggaccagcaagtgcactcagcaggtgcagggacagtggattcttcaaagtaaggggcacccggctggctcagtggtggagcacacgacccttgatctcaggttgtnnnnncaag

SEQ ID NO: 722 - DNA, 569 bp, Canis familiaris
  misc_feature (1)..(569): n = a or c or g or t
agatctgcgatgactcggacgcggaggacagcagcctgggcagcaagactcgccagtggtacagtcggaaggccgnccgcgagtcggatggtggttgggaagaatgggaggacggagaggacaaggacggcttcaggcgggagggtctccacgagcacttgtctttggagatggagctgcgtcggggcagcatcctgggaagccatctggaggaagacgtcgattccaagaccgagagcgaagtatcttcctcagagtcatcgctcagtatctcgaagcacacaccccatcgagcctactggatagagcagcagaacaggctgccactgcctctgatggaagtcatggagaatgaagctctggaaatcctcaccaaagccctctggagctaccggtcagggattggccgggatcacttcctgaccaagcagctgcagcgatacatcgaggggctcaagaggcgtcggagcaagaggctgcacctcgtaacgtattgagaacgccgcttccggctcaagtgancgacagcnngactccagccccccgcccntgtcnnntccccagaccca

SEQ ID NO: 723 - DNA, 668 bp, Canis familiaris
  misc_feature (1)..(668): n = a or c or g or t
atgggggatgcttcgtgtgaacatgggagtgtagctgcttctcttgcntaagtattcttttcctgatcatgcattttaaagttaaagagcatttttaagtattccaaatgatctagagaatttttttccatgattgcattttactgtacagaatgctgcttctgctatatttgtgatagaggaattacaaggatacacatttatttctttgtgcctgttttatgtgcacacattaggcattgagaattgaaacttttttgtccatgtatctttggatctttgataaagaatccctgttcattgtaagcacttttacgggtggggtaggggtggggggtagggagtgctctgctggtctcaaattaccaagaattcgcccaagaaattttccgcaggatgattgtacagaatcattgcttatgaccatgatagctttctacactgtattacataaataaattaaataaaatcaccctgggcaagagttttctttaagggataagtagggacgttaaatattcaaagtaatctgggagtggggagaaaagaggcagattcagcttcttttaaccagcctaaaacgttttatttatgacagcgaaagaaagtaaaaggggcaaaatcagggaatggggaaagcctatctaggcaaaccctttaagattttc

SEQ ID NO: 724 - DNA, 442 bp, Canis familiaris
  misc_feature (1)..(442): n = a or c or g or t
agcgctgcagcacnnatcaaccctgtggggcgggggtcggcgccaagaccgcctgtgaacccctaaaccctccgggcaagcaaggagacgaggaccggggctcttgnngggaaggagatccaggtggagttggcaaagctgtggtcccaaagggttccccaacatccttcagttgtggctcccctgccctccaaagctagggttctcattcctttcccccctcctctcactcccccttcctctctctctccacttagccactgacccctgaacttctgagcgatagcagcctgagccccaggtctccaccagactgaccccgaagaggggcgggataaggaaatcagctcccccctcctcaatgctctgccctccctctggttgctcttgtgtgatcaactttgggtcagagtttactgtgggggctggaggaggccccgta

SEQ ID NO: 725 - DNA, 579 bp, Canis familiaris
  misc_feature (1)..(579): n = a or c or g or t
ccnnatctctggtcacatccttgtctttgggtgtcgtcccccatcatnnacaaggaaagtgaacttgttcagtcacacagcaccaatagggtgcttgaggtccatgggtgactgatctctagggcctggcgcttaccccctgggttccacagattgctacctctgaaagaataaatgcagaacccagaaagtttaaagttttatttctacaaatcactgataaacaccaaagcctttacatacggagaccatgctccaactcaggccaggagcactgctctgcaggaaaagctgctcctaggaaagagggtggcaccacgggcagaaacccaagaagtccaaagttcagggtgaagaggggtcagggcctaaggacctcagccagagcagccccggcagccgcagtgcgtgcactcgatgatccggccctgcaacagaggatagctgagacactgcactcctgccacatgcctcccctgccccacggaaccctcccaccaaggatggcaaagggacattcgctgtcttcaggactctcctcagaaagccttctgcgacagatgcaaacagttgctatnn

SEQ ID NO: 726 - DNA, 404 bp, Canis familiaris
  misc_feature (1)..(404): n = a or c or g or t
ccgctgaggtntacgggctacngtctcaggccgcctccgggacctgggctccctccaccactcccaggagggagatgggctcctgacaccncagtctgccacnncagctccaggaggctgtcaacaccagcaaatgctgtgtccgcagcatgcccaagatggcccctctcccccacccgtaccagccgctggcagggagggagacgtgctggtggcagcactctaggcatgctgaacgcctgggaccaagccgtgtggcggtcttttcttttgccttcctggaagactcaagatgtgtctcttcatcctctctctcagtatttgtttactttgatcttttgtttttaatgtcagagagaggcgtgtttagtggacacaagctgtaatacnnngcaaaactttgt

SEQ ID NO: 727 - DNA, 581 bp, Canis familiaris
gggcagtgaggtcccccagcccagcacatccatcccaagtcacctgggcccaccctgttaggttctgctcatacagtgggttgagaagaattcagccaggaggcttggctagtttagtctcttctctttgcctggtctgtgggctgtcaggtcaattctcttttctctttattttcccactggactgattggtaacttgactgaattccttgctggccctgacttgggtcattcatggggtctgttccacggtgaccggaccaccgttctctgggcgccgggttcagagctcagggtctgtaggggccgggtgcgcacccgagggcgaggaaggctgggcccataggcctgtgagctcggatgcggttcctcccgcccctcccacaaaacacgggcatttctgccaactcttcactctgaggagcgggctcaggtcgtagggatgtccctgcctcgggcctggacaaggcctgcccgggagaaaggggcaattccgcacagcatccgggttggcttgtgcgccgcgaccagagggcaggatcagcccccgggaactgtagatatgtacactggtctgtccg

SEQ ID NO: 728 - DNA, 353 bp, Canis familiaris
  misc_feature (1)..(353): n = a or c or g or t
agaagacagaatncttgtgtgccctgtctccatnnaataggaaaagccatatcttgaactaacagcatggatggtccctccccgccctgggttctaggctccttggcctctccaaaagaggnnnctgacacanagccatggacatttcaaagtgtccctccttggcgnatttgaggatggatggatttgcactgggcccactcatttcacaagnngntgccaaccttgcctactgaaacagcttcatgcaagagaccatgcaagagccgttcatttggggcttctctccattcaccactgacaggtactcctcgctggtcggaggtacattcattgtnnnnnngcaaacaatg

SEQ ID NO: 729 - DNA, 84 bp, Canis familiaris
  misc_feature (1)..(84): n = a or c or g or t
tgnnagggacannnnnnnnnnnnntgtnnnnnnnggatcagnnnnnggnnnnnccctggcctcttcctgtggtagctcagtttg

SEQ ID NO: 730 - DNA, 547 bp, Canis familiaris
  misc_feature (1)..(547): n = a or c or g or t
cactgnngtccctccctgggtgtnnagacacggaggtcgttaccaagagatggcttaggggtgaatgagagcaggtccctgtagtggcttcacactagccactgaattatggctaattgggctgtttgagccactggttggctggattttcaacagtaaaacttgaagataacctacaaaaggaacagtgtggctacaagcctgagctttaatggaatgtacatcctcacagagaagttggaaataaccaaaactgaggtcttcacccaccttcagttccatctctggatttgttccaatactaaagatcctcaggtccagaattccagcatcatctattcttttaaagtaaaattttaagaactcgatccattgtttcagtacctcccaatcaaagttggcaaatgatggatgagtgatttgagcagtgtgcccttgggaagctgaaatccatctgaatggagatgaagtgaacgtgcaaatgctgactatgtcctggaagcatttttttataccatcttgagatttcaacaaactggttctcgcc

SEQ ID NO: 731 - DNA, 540 bp, Canis familiaris
  misc_feature (1)..(540): n = a or c or g or t
gcggggggcgcgcccgggtctgtgcacctgcccagcttgctgctaccggccctccggccgccgctactgccctgtggctgtcgcaagagtcggggaggggactgtcctcgtgcctggccgcagagaaatcaccaaagcctcctgctggctcggagagagggtcggggcgcccgggcctgcggggccgccgaggccgcacggctgactccccaccaagccgctcccctgtnctactcctcgctgttctaacgccgcagatcaaaggcctcagaaccatgacaagcactttactttcacggaggttttctttcttgctgtgagccgtgtgtctctgcgtctcgtgtgtaggcgtgtgcgacgtgtgttttgtagtttccccccacggctccgtggggcaggctgggcgcctgtttataggcactacgtgatctgagatgtatatagtctgttttttttttttttaccataactgatttaattattttatttcttatgttcacatgagaaatgtatgccaaaatgnntagtgggtgtattttt

SEQ ID NO: 732 - DNA, 590 bp, Canis familiaris
  misc_feature (1)..(590): n = a or c or g or t
gtgatgttntaccagggcatttccctantggtnnnngtccttttnngtctctttcaggaagttaaacttccagtgcaggcgtatcactgggtctgaccacaggctgtttagaaaataggagtggtgacctttttggttgatggaggcagtagtatttgggagaagaatctctacccaaatgttcctctgaatgatggaacaatttgtccccagagaaacctccctctagaattttggtgaaaataccctgatctgggctttttcagagggtccaggctataatttaggattggtaatcaggaagcttttgtggaacactgccatgggagtggaagcttccttgagtcagaagataaaataatttttagggctagttgatcagccacttccctttcgattcatcctgttctgacctggggcacctgtgaggtgttttcctacctatgtttagtattaaggaatgggagtgtttgaagaggcacaacccaggatcattccagtagcaccacagtacttgaactctttgtcaattatgggcaaaaagggaaattgttaatttagctccggtgctttggtttacaggaacataa

SEQ ID NO: 733 - DNA, 494 bp, Canis familiaris
  misc_feature (1)..(494): n = a or c or g or t
atnntttagtatnnattaagaantaatgtcnnatctagaaacattaaactgagtatnnttcannaagatgtcaccacctctgatanctagattgctaatttgaatgtcagataatgtttctacatctacacctctttccgtatagctggacatctggctctgtggggtggcttttaggccacagtactgcattaggttctctatctgcatatttaatgagaagcattcctatgtaaaagtgtgtgtgtatggttgtatgcatacattcctattgtgaacctgtacatggcaaagaagtagtttggaaacttgtaaagcacaaccattaaagaaaatagtgttcagttattaaacttgatgtagcttaaatattgtttagtttataagaggttctttctattttctatggcaaagactttgacacttgaaatatagaagcaatacttgatttatttttgtaagtatttaggatattattttaaataaatgattgt

SEQ ID NO: 734 - DNA, 606 bp, Canis familiaris
  misc_feature (1)..(606): n = a or c or g or t
ttttatnncnnattnnagataaaaaatttacatttaatnnnagaattatgacatttttattactagtgtcgcaacttagagaccgtattgtatggtgccttgcaaaatagaaatagaaaggttttagcatgcataccaatataggatattaggcaatatttaagcacacctaattaacaaattaataccagtaaaggtactgctgctggaatgaagaaaatggaatatgtttctttctttttttctattgttacataattgccatgtggacttgtttatgattattgtgtagagtagcatttaagatttaactgtaacaaaaattactttaattgctgtatttaagttagcatgttaattaattgtgtagacattttggcaaaccatcacttttaagtatatcagacctatggttttgtgcccataatacaaatggaaaaacctgttggatgttacacattggtatcataatttaaacagtgggtcaacttttctcccaataacaattcattgaaagtgaaaatggtgaattatttcaatttgatttatacacactaaaaaaaaaaannnntaatgttggctttannnnatatttaaagtacaatg

SEQ ID NO: 735 - DNA, 73 bp, Canis familiaris
  misc_feature (1)..(73): n = a or c or g or t
aagaannnnatcctgatagttgagtgtnntaatctgattttgattgaggtcatacttaatcttaagtaacaat

SEQ ID NO: 736 - DNA, 107 bp, Canis familiaris
  misc_feature (1)..(107): n = a or c or g or t
ccncctccccaccccacctccagagatccagtcccaagagaggaggccccttgagagnnnnnnngggggtgcagctancatgctgggagggcnnntgaggctggggt

SEQ ID NO: 737 - DNA, 639 bp, Canis familiaris
  misc_feature (1)..(639): n = a or c or g or t
gctattcgantnnaaattcattnannagttttaattttcaagtttagatnnntnntcatatnnnnnnnnagnnnnngnacaaactnnnnnnagggtgtgtcttttctttctcactggatcatcttaaatagntcctacccctggattgtaactagataaaaatctgatttaaaattcttaatattcaggaatttatacttatttttactttannngccacggggggggggcagttatatatcttaaaaagaaagtatctaaagcatttttttacagtacttagattgtcttgcatatgtgcatactatatggcttttattgtcttgtctcttgtcagtagaccagtatacaatgtgtgggacatgtcagtcaagttggtcagcaccagcatctgtccagctgttaagtatattatgattcacttaaaaatctgttctatcccagccatgggccaagatgctgtatctgagggatgtgctgtgatttgatttacgtacactagagcacacagtagaaaaatctgagcttcattagtaatatgacacatgtatatagtgagatgtcttattgtgtgctttgcatattttgtaaatattttgcacgtcattaattttcttttttgtttaagcagtgtttggc

SEQ ID NO: 738 - DNA, 572 bp, Canis familiaris
  misc_feature (1)..(572): n = a or c or g or t
aagaaaaggcaatggaagaatgcactgaaaagaaaaaagaagtagaaaaaaagaaacggtcacgagttaaacaagtgctggcagatattgctaagcaagtggacttctggtttggagatgcaaatctacacaaagatagatttcttcgagagcaaatagaaaagtccagagacggatatgttgatatatcacttctcgtgtctttcaacaaaatgaaaaaattgaccacagatggaaaattaatagccagagcactaaaaagctcctctgttgtagagctggacttggaaggcaccagaatccggaggaaaaagcccctgggggaacgaccaaaggatgaggatgaacggacagtgtatgtggaattacttcccaaaaatgttaatcacagctggattgaaagagtatttgggaaatgtggcaatgttgtttatataagcataccacattataaatctactggagatccaaagggatttgcctttgtggaatttgaaacaaaagaacaagcagcaaaagctattgagtttctcnnnnacccaccagaagaagcaccaagaaaacctggtgta

SEQ ID NO: 739 - DNA, 565 bp, Canis familiaris
  misc_feature (1)..(565): n = a or c or g or t
cagctcatgagggctgagcatggtgaccaagcatgatccatggagggagaggctgtgttacctgtcgccctgtatgagagcctccagncctggttctcccctgagttgtcgctgcggaatagaatctggacgctgtggctctcggtgttgatgggttctggggctttctctccacagaagggccccaaaacttttgggccagctttaatctgtgattggcaagatagagaaaaaaggtcacatctgagtagtggtggcagccgctgggaccacctctatggtgcatcctggttttctggaggcctccatgtgaacccgtagtattcactcatgttttagtgggcattgccattcaccaaacagttccatttccactctctcatttacagattacgacggccttggaaatggatgaagctggctaataaccctctgctcaaaatgaacatatggctcagaaagggacagagctctgtccaggtgcatgggatagagaaggcctctgctctcaaagaacctacagcctagtcgaggatggctgggatggggtagcagatgggactaa

SEQ ID NO: 740 - DNA, 561 bp, Canis familiaris
  misc_feature (1)..(561): n = a or c or g or t
acaannctgacccagatcaaggantnnctgagattgaangnntctttcntaaaacacaagacatagctgtgnntaaagacctttctacaaaaacacaccaagaaacagttgaacctgaacacttctcttgtgaaacatatcaagaatttgctatgcctaaagcatcctgccatcaaaggatccaagaaatgcctgcccctgaggaatatacacctgaaatatatcaagagacacctggacctgcggactcttcacctgaaatataccaagaaacagctgggactgaagactcttcacctgaaatataccaagaaacacctgggcctgaggacctctctactaagacatataaaaataaggatatgcctaaagaatgctttccagaaccataccaagaaacaggtgggccccaaggccaggatcctaaaacacatcaggaggatgctaaggatgtttatacttttccccgagaaatgagagaaaaacccaaagcagaagaaccagagataccagcaattccaaatgttcctcaagagattcatccagaaaatgatgtcttta

SEQ ID NO: 741 - DNA, 668 bp, Canis familiaris
  misc_feature (1)..(668): n = a or c or g or t
ggctcagcacacaggcagaggggaccaggacactgaagncgtgcgctacctnannnncccagctgtgcatccccgggacaaacagnnnatgaagcannagctcagctcggagttgagcacgctgctctccagcctctcccgctacttccgccggggggcccccagctccccggctgctggcgtcctcccctcgcctcagggcaagtccacgtctctctccaaggccagcccagagagccaggagcctctgatccagctggtgcaggccttcgtgcggcacgtgcagagatagggtggcgacccggcccactccaccagcctgcgtggcagccctggacagctggggtgctgccagccggcncgacagccacgtggggctgagagcagcaccngnctcctgccccccagagcagccaggactccagctgcccacccgctgccattatttttctaatagatcaagaggtccacagccaggtgggagccaggagtctgctgcactcacaccctcaagttaaaaatgtcgtgagggtgtggcccttccctcaagcattccccaccgcaccagaccccggaccccaacccagctgaggccggagccagtgtcacgtgcggccaggagaggctgtgtgcatgggtctgaaaatctgttttccatgctctgttct

SEQ ID NO: 742 - DNA, 645 bp, Canis familiaris
  misc_feature (1)..(645): n = a or c or g or t
gcatccannntgcattcgnctttnnactnntctttnnnnncagttcaattctnnnnnnnntcaccnntacccacagcccaaggggaccannagggnnnnnnanaccggnngnngctctcctgctggtcagnnnnaatggtatcctttgccagttcccaccttacctggggcacttgggagtagaagcaaagaaggcatcttcagatgcagcccccccaacccttggtcaacctccaaagtcccctgatggaaacagcatgctctgatgggggtggagggagctgggggctgggcatcttgctgaggagttggctcctggccctgtagggcagatctcccgtgttgatgctgttctggcaccttcacatctagtgatgccctggaggcagggctgggtcccccctctcctgtcttcatccctccctgaactgcatcttacctcccctacacaagccccactccctggcccagggctgggtcggaacaggtgtcacccaccatgttacctctctgaccctatcctccttccctggccgcttgcatttgaggaacctcgggataatgaggactctgccccgcattgtccacactccgtgccagccctgttgcctttcccctctcccctccctcagcttttgctctgac

SEQ ID NO: 743 - DNA, 502 bp, Canis familiaris
gcagcattttgctatgctctgattgtcccacagaccaagtatattcttatgaggggacattacacaagggaaaaagtagtgtgtatatatatctgatatacaagcctgtgctcaatattagtgaagaggacataacggagttcacataagaatttaataatgcaaactttataataataatttgtataatattataaaagataggatttaatatttgtaagcagatcatgaaaacgtcttccacattatatggtagatgtttataaaaatgtttatggaacattttcatgaatctcttcaaatttttataaatgtatatttttaatgtcaataaactggccattagctaacatgtagcttcagaggtctgaaatctaccataaaaattgcactttcatggctaaaagtgtgtatattcctcccaattagagactatttagagcttaaaaattgtatttaaacctatttatcaaatgctttgtaagacactataccttttctc

SEQ ID NO: 744 - DNA, 517 bp, Canis familiaris
  misc_feature (1)..(517): n = a or c or g or t
gacttacaacaagaagggnnnntcgnnnngaaaagagcatctgaannaccaccagaatgggtctgtnnctgcggtgaacggacacaccaacagcttttcttccctnnaaaacaatgtgaagccgaggaagcaacggaaggattgaagccgaggagttgataaacctccaaaacccatcgtctgattcagcccgaaggagctggggtatgtgcctcgcaccaagcaccaactgaggcgaggccacggcgctttcttccctccgtctgggtattggcagcgtcctccccggtctacagagcaagcagagaggagacacaacctgtgacctgccccggggaagcgggacctctgttctcaggggctctcctgttcccatgctgcgggctggcccttagagctcactatggggggagacaccccaccccgacagcagcccctcaggccagctcttctcagcacaattaaccgcggcctgtattcaaatcatgctggctaggccttcccacctgtggggaga

SEQ ID NO: 745 - DNA, 523 bp, Canis familiaris
  misc_feature (1)..(523): n = a or c or g or t
cagaaaactgccatcttgnnaaagaggaagaaggtgaaggagacgtctgactnnnnagcacgtggcgcggtgttgnagtnngaggccacgctcaggcaggctctgnnagacgggggcgnnttaagccccncgaagaagcagcagctgaggacggagaacgactttgtgaggttcgacactgccttctnaccaaagccgctgttcttcagaaaagccaagagcagcgccactgccacttctgcacaccctgccctgcagcgagacaagatgccgtccagctccaagaaggtcactttcgggctgaacagaaacatgaccgcggaattcaagaagacagacaagagtatcctggtcagtcccacgggcccctcccgagtggccttcaaccctgagcagaggcccctccacggagtgctaaagacgcccacgagctcacccaccagcacccccctggggaccaagaagctgctgaccaccacgccaaagagaaggccaaccgctatggacttcttctaggatagta

SEQ ID NO: 746 - DNA, 516 bp, Canis familiaris
  misc_feature (1)..(516): n = a or c or g or t
acngagggtatcnnnatcaacccgacaattgtnnngagagagtcactgacctgatgcgcatgtgctggcagttcaatcccaagatgcggcccaccttcctggagattgtcgacctgctcaaggatgatctgcaccccagctttccagaagtttccttcttccacagcgaggagaacaaggcacccgagagcgaggagttggagatggagtttgaggacatggagagtgtccctctggatcgggcctcacactctcagagggaggaggccgggggccgggatgcagggtcctcgctgggcctaaagcggagctacgaggagcacatcccctacactcacatgaacgggggcaagaaaaatggacggattctgactctgccaaggtcgaatccttcctaacagcgcctgtcttgggggaggggatcccgtcttcaatttcctctgctttgaaggcctccagaaaactcaggattctcatacgaatctgccacagtgtcaaacggagctcagagatcat

SEQ ID NO: 747 - DNA, 610 bp, Canis familiaris
  misc_feature (1)..(610): n = a or c or g or t
agcaaagaaagannngccccccgaaaagaagaccgcagtgccagcagtggggcagagggtganntgnnntctgaacgnnagccgtagacttagggatgaaactcagtgcattatcatngnncnnaactggatcctgaaaaattcatgaaagatgctaagtacctacactgctttaagaatttggaactgagtcatgaaaaggaagacagaagtaagaaattgggaacctgagtagccctgcaaaaacaaaaaagaataaaacaaaacaacaccaaaggaacattaccattttctgttgttgctgtggtctaatagagaaagtgggtgttggaggtacgggggagtgcacctcatgcacatggcagcagggcatatacccatgctttccccatgaaaagactctgctggttcctatgatttcttggctctcttttgaaacaggctggcccaacatcacttgacactgagtcctcctttcacatgtgtccatgatgggtctcaactgcatccatgttcttcccagtactggctaagccaggccccgtntaaggtgtaaagagaacaaacatcagtgataatgtattgtgtaagacctttgcatcttgtaaat

SEQ ID NO: 748 - DNA, 365 bp, Canis familiaris
  misc_feature (1)..(365): n = a or c or g or t
caggacgctcaatcttcatcttgtgatagggaggtgtccgnnncacaatggcatactggagggtggggggggcggaggaagacagaaggtgttattgaggccttggtccagttcagcctccagccctggccctggccctggccctagccctggccctggggtacctgtttatgaacatctgtgggagagaaatccccaaaggcctgccatccattctcatcatcttcgtagaaccgaacctcaatgtcatctatagggaagagcgaagcatggccatggctcctaatagaatctgcagggccttttgtcctagagctgccctggctccccatcttgatacccagcntnccaggctcccagcctca

SEQ ID NO: 749 - DNA, 99 bp, Canis familiaris
  misc_feature (1)..(99): n = a or c or g or t
ctcctcctcctgtgccgggcgagnnnnnccttnnnctggaagaccacactgcctcctggccacggccacnnnntgtgtccatagacctttttattctgg

SEQ ID NO: 750 - DNA, 611 bp, Canis familiaris
  misc_feature (1)..(611): n = a or c or g or t
aagtgactttacctctttaggncttatctccttgtgttgaatgatgattataatgtaacctacttgattagattgtaatgcaaatggagtgaaacagccaattcagaacaaagctggaaaatggtcttaaaatgatctccttcatctttattttttatttttttaaagatgtatttatttgagagagatcatgagcaagagaggaagagaatctcaagctggctccaaggggagctgtactccactcaagctgagtgtggagcacaatgtggagcttgatttcgggtacttgagatcatgacaagccaaaatcaagagtcagatgagatgcctgggtggctcagtggttgagtgtctgcctttggcacagggcttgatcctggggtcctgggattgagtcccacatcagactctgctcagtggtgagtctgcttctctctctctgctccttaccccattcatgctctgtctctcacttactttccctctgtctctcaaataaataaaaatctgtgaagaaaaaatatgtataaactactgacattgaaaagagtggcacaaggatttccttagttgctcccagcttcatatgtttttctgtttgaatggaa

SEQ ID NO: 751 - DNA, 710 bp, Canis familiaris
  misc_feature (1)..(710): n = a or c or g or t
ggtcaacaccatttacttcaagggcctgtggaagtccaagttcagtcccgagaacacgannaannagctattctacaaggcaggtngagagtcatgctcggtgtccatgatgtaccaggaaggcaagttccgctaccggcgggtggcagaaggcacccaggtgctcgagctgcccttcaagggggacgacatcaccatggtgctcatcctgcccaagcctgagaagagcctggccaaggtggagcaggagctcaccccggaggtgctgcaggaatggctggatgaaatgacggagaccctgctggtggtccacatgccctgcttccgcatggaggacagcttcagcgtgaaggagcgcctgcaggacatgggcctcgtggacctgttcaaccccgagaagtccaggctcccaggtattgttgcagaaggccggaatgacctctttgtctcagatgcattccacaaggcctttcttgaggtaaatgaggaaggcagtgaagcagcagcaagtactgttattgggattgctggccgttcgctgaaccccaacagggtgaccttcaaggccaacaggcccttcctggttcttatacgggaagttgctctgaacactattatcttcatgggcagagtagccaacccttgtgataactgaagtgttccattttggtttgtgatagtagtaaaaataaacacaactactcccnnnn

SEQ ID NO: 752 - DNA, 534 bp, Canis familiaris
  misc_feature (1)..(534): n = a or c or g or t
gcaggnnaaggtgccntgcnnaggccacttccgaatcnggcaaaacctcccggagcatgcccagggctggctgggnagcaaatggctctggctgtttttcgttgttgtgctgtacgtgatactgaagtttcgaggagatagtgagaagagtaaggagcagaatccttccggccttcgaggctgtccatttcgctctccactaaagaaaaatcaaaatgcttcccccaacaaagactatgcattcaataccctaacccaactggagatggaccttgtgaaattcgtgtccaaggtgcggaacctgaaagtcgccatggcaactggcagtaacctcaagcttcagcacttggaggtacctccagagccacacaataatattaccatctatgaaatatggggcgaagaagactctgaatgaatgcacttatgtgtcagagtaggagagacaaaattgagtgttgacaaaccgtatgcaaaccaataaaattattctgnnnaaaaagaattctcaaatttgacaccttttcttccccc

SEQ ID NO: 753 - DNA, 565 bp, Canis familiaris
  misc_feature (1)..(565): n = a or c or g or t
tagggttagaaataggtaagaaaaaatacatgaagcagttcagcaaaggtgcttccatgtacagaccacaaggcttattagtacatgacaagcactcacagtggttggaacgggtgacccctggacaaaaaagtttaaaaaaaaaaacatctagaaatgcttcaagaataatgaacaatattttctatgacctatttaagtatcactttttcataaaatcccctagccttagatcactaggaaaacagagacttcaggatccttcaagacacctatcttgacatacaaccaggaaggaggagaagtgcatgcacgcgcagaagccgccagccaggaagcacaccaggctcctcacctctgttctgcaggctctgctcctctctgagacagtagcagcatgctgtcctgtttctcatgcacaactggaacctggggcggggagatgggctcgtaggactcagaagggacatgactcctctccggggattttccaggcctaatattataacatataaagtattagattatgctccggggcccacctnnnaattagctgaaacagaaa

SEQ ID NO: 754 - DNA, 583 bp, Canis familiaris
  misc_feature (1)..(583): n = a or c or g or t
ctncagtaccctgtgggctcacagaaagcttcaagggnnagcctttcccctcctctatcagagaggtgctctgacccagggtcatgtggggaagtccccacatggaagttcccttgatggttctgtgcccttaaaggcaaattgcctcatgccagccagctcaaaggttcattgctgctccttggctctactagccctctcctccttatgcagcaaatcacctgcccaggttgctgtggtgctagccctctcccatcatccaccaggagattcctgggtaccaaggaacagaataggacccccaggaaaagaaaggagaactggtacagatttctgcaatgaggaaaaagatgttccccaggccccaaacttagacttttccaactctgctgtgtttttatggcctgggacttcactgggagtgggtttttccttgtagcttttaagcagcaattccaagaatgataaccattgtaggcccctagctgctctcgtggcttcttccccccattgcctatccctttgcctgtgaaatgcctttacatatttgtgtgtgtgtgtgtgtgtgtgtgtgtgtgtacgc

SEQ ID NO: 755 - DNA, 385 bp, Canis familiaris
  misc_feature (1)..(385): n = a or c or g or t
atgctatgactatatgtannnnnntatttttaaaaaaagattttatttatttattctngagagacatagagacaggcagagacacaggcaaagggaaaagcaggctccttgcaaggagactgtgcaattttttttttaatcttaatatattatgtacatttttgtacccttaaaaaatagacattatttgtattcttcttaatgggtaatcaattatttaaataaactgaaatgtattgccagccaagactccttggcaattctgaaacttaagcaaaattctatattggatgtatttaaaatatttttcttgatgtgatatacttgctgacatgtttgataattgnnnntaaatgatgccccnnnngatggcattccacttacc

SEQ ID NO: 756 - DNA, 359 bp, Canis familiaris
  misc_feature (1)..(359): n = a or c or g or t
agagagcaacgaggnacagtgtctcttcccttgagccgctnnnncagcattgannnnnggcaggtagcccggggctggtgcccctatgggattgctcttggaaatctggcctcatcgggtgtcccacccagcattcccctaagtgcgcccacctcagcagactgtcccccattttgggtctggaaggcattggcgccataagcagtggcccactagaggccttttcaggacacgctccggtggggcctcaggccagagaaggttcttgctattgtggaacaagtcctagaggttgtctcaggggtgactggaggccccaggccaacatggtaaggaggaaagggagcccccctcccttt

SEQ ID NO: 757 - DNA, 337 bp, Canis familiaris
  misc_feature (1)..(337): n = a or c or g or t
ctcagaaggtccgttgttaggagctggaccagccaggggaatgagccgggaactcttcttnnnacattggtttctatcttcggtgggttgattacagtccaccccttccaaaagnnnnnnnnnnntctcaaccctcaggacctgtgaacatgaccttagttggagaaataattaaggatcttgagacgaaatcatnnnnnnnnnnggtagcaggtgtccttataggaaaagagagaaggaggctggagacagagcagaggggagaagccatgtgaggatggagagatgcagccacaagccacaaaatgcatccacaaaaggatggagctagaggagg

SEQ ID NO: 758 - DNA, 581 bp, Canis familiaris
  misc_feature (1)..(581): n = a or c or g or t
actgggctngngnnnaagatccacgaaggggtgagcaagacatgtcctgtattcatgnaccacccaccatnnaccagcatggagcatatgtctcaaagaccctaaggacacaaggagcatgttaattctggcttttaacagacttcaaaatcacaaaaaacagtcaccgaaaccctgagcagaggtcagcctgtcctatttgcgtgtctccacttggcgtattaaagctgcagggttgccaggctgggatgcacatccgaggttcttcaccaaggtaccagttactcacctgtttcaccccaagatgcctaagccagctggagatgcctcgtccccactccggccctcggtgacatctcaccgtagaggctggcacaccaagggccgcggccacccccgccaccctcactcgttagcgcagacccagggagacacctgcggggtcatgggccaggtgacatggacacaggatgtgtcactgactccatcagaacaacagtcccatctctggaagcatcaagaattgtgccttcttgaaaattcacccatattgacaaattgttgtttccnnnnntgggtta

SEQ ID NO: 759 - DNA, 694 bp, Canis familiaris
  misc_feature (1)..(694): n = a or c or g or t
atgnncgcaggggtccccaccatgcgcgagagctctcccaagcagtacatgcagctgnnaggccgggnnctgctggtcttgatgttcatgaccctcctccactttgatgccagcttcttctcgattcttcagaacatcgtgggcacagctctgatgattttagtggccattggttttaaaaccaagttggctgctttgactcttgtcgtctggctgtttgccatcaacgtgtatttcaacgnnttctggaccattcctgtctataagcctatgcacgacttcctgaagtatgacttcttccagaccatgtcggtgattggaggcttgctcctggtggtggccctgggccccgggggcgtctccatggacgaaaagaagaaagagtggtaacacaccccttccctgcctggctgagacccgtggccatcgaggactggttcggggtggattcgacaaaactgccagcatttatgtatcctcttcccttctctcccttggtaaaggcacagatgttttgagaatttatttgcagacacctgaaaattgatggttaaatctgctctggacccacaccctagtatcggccatcggggctggccagctggccggcagtacctcccccaccaaagcaaggcctcggcctcggagtgagtggccggctgggctgtggcctcagttcctgttnnntnnngcg

SEQ ID NO: 760 - DNA, 521 bp, Canis familiaris
  misc_feature (1)..(521): n = a or c or g or t
cacttgcnnnaaggggagatgtcttgagaagaccagctcgatggattgggtgaattnnagagccctcctcgggacgtgaggtcctagagaccccgatgatggatgctgagaggtgcctgaccttgcccgatccatgataacgggtcgaactctccccgtgagggtttggggcggcttggttgccggctggctgagctgtgtcaagctgagagctacttaaccctaaagcatggggaaccaggacgcccgccgtcagacagaagacgcccttctcctgaccccgggcccccctctcttgtgtttaactctgaaaagagcagactttttgccgagaactttgagaagataccctgatggatggtgagaagccccgaatccccctttggaaaactttcttcccattaattgaggcagtctaggacctgggaggaaggggctggggtatcttagctcctctgatcaactaatgacccctcaagacctgtactcgatagttctaatggggaacgctgactcctgca

SEQ ID NO: 761 - DNA, 640 bp, Canis familiaris
  misc_feature (1)..(640): n = a or c or g or t
taagataacatacccttaggcttcactgatagctcattatatnngaatatcnnaaaattgctaaannataaacacgcatctagaaatgccttttttttggaaataccttattttttaaggtaaaatacaagaaagctgtgaaacatgaattttatttgcatcattgggaattttgtgtggcttcataattccaaaattagctgccttcagcctccattagtgaggctgagctttgatttttttttcttcccggctgttctaaatcaaaacctaacaagctcatttcaattaaataccagcgaagagagaacgtggcctaaaaatgcctccttagaaacccagaacatggtcttaagcagaaccacgttatttccctaggacagtgttacagctcgtctgctttagaaggagaggagaagtagccttagatcagtgacaccaacatgtggcttgtcttgcattctttctccagggccaccttctctgctgcagctctgtcgccttagaatccgcaagtgctttgggacccagcagcatcataagatcaacggactggtcctcccagaggagctgaaacggtttctcctgcacatgtaaatgtgccaaggggatggaggcacacacgacccacaaatattgt

SEQ ID NO: 762 - DNA, 549 bp, Canis familiaris
  misc_feature (1)..(549): n = a or c or g or t
actatgcanctgttctacgtgcgnnnaggtgtgtctcgngnnatgctgctgcgnntcttcctnnccatggagaagggcaggcacatggagtatgactgtccctacctggtgtatgtgcctgtggttgccttccgcctggagcccaaggatgggaagggggtgtttgctgtgnnnnnggagctgatggtcagtgaggctgtgcagggccaggtgcacccagactacctctggatggtcagtggctgcatggagcccccagccagccagaagcctccccagggaccatctccagaagagcccttgtgactgtgggccttgccgtgctttagcctccttggtcaactctggcaggaccctctccacccttccgccaggactggagggcctgtccgcagctcatgtgccagggaggaggaggacccctgaagacggtgggaaggtagaggctgtgctttgggagggcaggctctgcctaccaaaggccagcatgaggctctgggccaggagcccagctggttgggcctccctgcctacagaagccactcccat

SEQ ID NO: 763 - DNA, 585 bp, Canis familiaris
ccccctcgtagcgtgtttgactttctgaacgaaaagctgcagtgccggaccccggcggcgctggaggctgcggcggcccccgcagggaggaggagcgggaaggagatgtaccatgccagcaggagtgccaagcgggccctgggcctgcgactcttccagacggagaagaagatcgagcagacccagcgggacatccggggcatccagaaggctctcgcccgaaacaccggccggcacagtgtgacggcggcccagctgcaggagaggctggcgggagcccagcgggagctggggcagctccaggcccaggaggcgggtctgcagcgggaacagaggaaagcagacacccacaagaagatgaccgagttctagagccctgtgtgccgtggacggggctcagggaccccagctcccgggtgccctcggggagaccagctgtcacccgactagatgctcctggaagaggggctggcctgctcccaggctacaccccacggccagcggacactgctgagaggacatggggctgcagggctcccttctggacacttccttgccactgagcccacccgccagtgtttcggg

SEQ ID NO: 764 - DNA, 592 bp, Canis familiaris
  misc_feature (1)..(592): n = a or c or g or t
gtcatgatttggggaacagatgtnctgaagaacagaagcgtcacannagnngccacaaaaaaaaagaaagatgcggtccctnngccacccctctcgcctcacaaactaagcattgtcagagagtgcttgtatgacaggatagcacaagaaactgtggatgagactgagatcgcacagagactctccaaagtcaacaagtacatctgtgaaaaaatcatggacatcaatagtcctgtaaaaacgaagaacgaagggaagcaaagtacaatttgcaataaactttggatttttcataaagccttatcgttttccttgcgtggcccgtgatcggggcgatggtgccgcccagaccggccgccatccgtggcggtgcgtgcgccgggagccagccggtttccagggcctcggcttgccctgaacttggacttcccactccaaagacgtcagccggacgtgccgagactcgggcagcgccctggcgccagcgtctttgtggggatggggaagcgctgtctttgcggagggggacggagtgtctgagctgcctacacacttgactgagaatttgaactaatatttttaccattcaagg

SEQ ID NO: 765 - DNA, 374 bp, Canis familiaris
  misc_feature (1)..(374): n = a or c or g or t
tgtttttttttttttaatnnnaannaagtaatgtttnnnntatttnnnnncagtcataannnnnnnnnnnnnncagcnnnnnnnnnnnnntnnttacaatcannnnnnctctcancntgtnnagtgtgaatnnnnnttcctttttgtncnnnnnnnnnnnngtattttgcnnnttnnnnnnttgtaagnnaatgtaannnnntgtcaattttccttgtttgaatnnnnaattgtnnnacnnnnnnngtgtacatttccagagccttgtgtatatttccaatgaacttttttgcaagcacacttnnncnatatgtgtataattaacaaacctgtgtatgcttatgcctgggcaactattttttgtaactcttgtg

SEQ ID NO: 766 - DNA, 543 bp, Canis familiaris
  misc_feature (1)..(543): n = a or c or g or t
actctgaggatgaaatcgtacaaagaatataaatctctgagcatagtgcccgttccatnaagaaataaaaatgcccaataactggcagctggtcacctgnagaaaccttcagagtatttctgttgctgcataatggaaaagccaaagcatgtcagacttaatattgtcctgcccaacctattttctggggcagcaaagggctctctgttggagagctgggattgatggagacctgagttcagccgtacttctgaacaacagccttcaagcgttccttcacgaccctggggaagaggtctaggaggaaatgaggatccccgttaccgcaaagggtctggcgaggaagatgcccaaaggattaggggtcctgagcaggccctgcgtggtgggcagaggtggacaagatcgccctggggagcacacacatacgggccgccactcctgggaacagctgagacagcaaatgctcatggacacagaggacaaaattttagaactttttaatccacttctgacatttacaaatggggacacaaaggccct

SEQ ID NO: 767 - DNA, 582 bp, Canis familiaris
  misc_feature (1)..(582): n = a or c or g or t
tcgtttcccagactgctcagtcagcctggtccaccagggattagtgaccaggttttcaggaaaggattagcttctctctagaaaatgcctgaaagaaggattttattttgtgacgaaaggctgtatgaaaataccctcctcaaataacttgcttaactacatatagattcaagtgtgtcaatattctattttgtatattaaacaaatgctatataatggggacaaatctatattatactgtgtatggcattattaagaagctttttcattattttttatcacagtaattttaaaaatgtgtaaaaattaaaaccagtgactcctgtttaaaaataaaagttgtagttttttattcatgctgaataataatctgtagtaaaaaaaaaaaatgtctttttacctacacagtgaaatgtcagactgtaaaatcttgtgtggaaatgtttaacttttatttttcatttaaatttgctgttctggtattaccaaaccacacatttgtattgaattggcagtaaatgttagttagccatttacagcaatgccaaatatggagaaacatcataataaaaaaannnnnnn

SEQ ID NO: 768 - DNA, 524 bp, Canis familiaris
  misc_feature (1)..(524): n = a or c or g or t
cttgacttccagacttcccctggagttcannngctgggaaggcccagaagtgcctgtgacagacacgaaggggccacctgggcccttgctcccagctaagccttcagatctcacatttgggaagagcatggcaggtagtcaccgtggtcacgtgtgttcatttcccaccttcgagagaggccaccacgtccgttctgtggctcggtattccacagcacaggtgggcaggagnctgctggagcccgggtcctggatcagtgattctgaggggcagggaggccacgcactgcttggcacttgcatgttctttctttcacggggacgcccctgtccccaggcctggcctctgtctcctcccagacctcctgctccagtgtgacacagtctttagtggatcttttctggcctgccaaatcagtttcctcctggcaagaggaagagattcacaaagaaccaggggggctaagggccttcccatcagaagggccgctggctggccctccctttggggatggatgggtgag

SEQ ID NO: 769 - DNA, 378 bp, Canis familiaris
  misc_feature (1)..(378): n = a or c or g or t
ctggcctnnatatgaaggaaggtaccatcggagatatnnnagtactgggtataacagaaagtttccnngtnnngcgacnngnncttttgagtgcagctgaagcagcagaggtgattctgcgtgtggacaacattatcaaagcagcaccaaggaaacgtgtccctgatcaccacccctgttaaacattcccatgtgctgtngagctctggaccagttagttcatagcaaaggtgtgtttgaaagacttcgacctctcaaagaagactgtnnaatcgaagtttatctgtggctcttatatnnntaagtttnnacgtataactgaccttctattnnnacatgggtctaatttatttgctgtttcattttccataagattca

SEQ ID NO: 770 - DNA, 585 bp, Canis familiaris
  misc_feature (1)..(585): n = a or c or g or t
gcatcatcgcggccanngtggcacgtaccgtttactgtacagatgtcggnacagatctcttggccatgtgccagcgaaacattgccctcaatggccacctgactgctgcaggcagtgtagttaaggtcaaagaactggactggctccaagacgacctgtgcacagacccggaggtccccttcagctggtctcaggaggacgtctccgacctgtacagccacaccaccatcctgctcgcggccgaagtgttttatgatgatgatctcaccgacgctctgtttaaaacactctcccgcctcgctcacaaactgaaaaacgcctgcacagccattctgtctgtggagaagaggctgaacttcacactcagacacctggacgtcacgtgcgaagcctatgaccacttccgctcgtggctgcagcgcctggagaggcttgcggatggccagctgcgctttgtggtggagccggtggaggcctccttcccgcagcgcctcgtgtatgannnnntccagcagctggaactctggaagatctttgtggaaccggnnnnnntgacccatcatcgcatccacaggcatggcttct

SEQ ID NO: 771 - DNA, 264 bp, Canis familiaris
  misc_feature (1)..(264): n = a or c or g or t
gtggggcccaggggccagacatcggggcagtggccacaggccagcccatccnacatgctgtcattggccagtaggatagccctaccatacacatggggcggatgatacctgagggttagacgtctctaaccgctaaatgagcatttgccttcttgttaccacaaatctccccttggctcttttgacaactactgtcccagacttgatcacagcttagacttctcagcannnaggnnnnctttgtattgtcatcccagnnnntgc

SEQ ID NO: 772 - DNA, 61 bp, Canis familiaris
  misc_feature (1)..(61): n = a or c or g or t
aagaattnnnctttnataatgaatctttctccataaaaatgctaggtcttcattattgata

SEQ ID NO: 773 - DNA, 563 bp, Canis familiaris
  misc_feature (1)..(563): n = a or c or g or t
caccccgcgccagcgaccccgcgccgggcntggannacgaccccgaggcgcccgccgcgcagctcgcccgcgcnntgctccgagcccgcctggatcccgctgccctcgccgcccagctcgtccccgccccggccccggccgcggcgctcagaccccggccccccgtctacgacgacggccccgtgggcccagaggccgaggacgccagcgacgacacccccgacgtggacccggagctgctgaggtacttgttggggcggatcctcgccggaagcggggaccccgaggctgtggctgccccgcgccgtctccgccgagccgcggaccaggatctgggccccgaggtgccccctgagggcgtgctgggggccctgcttcgggtgaagcgcctggagaccccttcgccccaggcgccggtgcgccgcctcctgcccccctgagccccggcagaatcctgcgctccttggggcccaggactgccccacccctacaccccgactgctccctgtcggcacattgagagcggcttaccggcttaccgtcagccgcagttgcggccctcg

SEQ ID NO: 774 - DNA, 513 bp, Canis familiaris
  misc_feature (1)..(513): n = a or c or g or t
atttgaattttgtgtatgtnccacatatcatgcatcagttagnctcaannnngattctgttttgaactagatgtaacctgtcaagagtntgccaagtaatcccattgcttcctccaacggcaaaaattcagtgatatttcttctcaagtggtattttgccccagcacttttgagtttggtcagcaaagagaatggatcttttatatcagaaatactgtgaattaaaaatgccaaatcccttctcagtatattctaaacacccctacaacactttacctccctgtctttaatggtttctaactatacggccaagtttaaacttgggtttgtttccctttggtgaagattatggcatcaaaacatttctaaacaaacgtctgagtacaaggctagattggaatgtcagatttctaggactgtgttgtaatttggtttgaatgtgcttaaagtgagcaattacgatttgcctaagtataatacaacaaatccatcatgtatattccacttttttct

SEQ ID NO: 775 - DNA, 520 bp, Canis familiaris
  misc_feature (1)..(520): n = a or c or g or t
tagnaagggactgtcntgtccctcatccttcttcagnnnnnntgcctgnnatgtctggacagatggcctgtgtgggaggtgaagaccatgtctgtgcctgagtgagcggctgcttggagttcactgtgatgccaaagtgtatcccagggtgactctcacactattccagactcttctattaggcaagaaagactgcagtataatacctgagcaaaaagccaaggagctaaattaagtcttatgtctttctgtaaaatccaaatttgcctttggcagatctccagggtatggccagctctctctgaccatgggtatctaagcaggcagaccaagagactgggcaccaaacacgcatgccaaagtgaccagtcatctcatgaggacccagacatgaccctgtggactgttccacctgattcagaacccactttttannngctccccatacctctggcctttctctttcccctgccatcctgacactgatagtttgtcacataaattcccctggnngtgtttt

SEQ ID NO: 776 - DNA, 659 bp, Canis familiaris
  misc_feature (1)..(659): n = a or c or g or t
agagaaatggtgtatnanntgactgcnnaacagatggntctgatatggtcaatgaccttgaacaggaagagatgaaaatcctgagggaagttcttagaaaatcagaagaggaatatgaccaggaggaagaaaggaagagaaaaaagcagttatcagaggctaaaacagaagaacctccagtgcacgctaatgaaactgcagaaatgaagaattcccagggggatggtgaacattttgcacacccaccctcagaagttaaagtgcattttgctaatcagtcagtacaacctttggcaagaaagccggaaatgctgtctgaaacttcctccttcccacaaaaaggcctgaagatccctggcctggaacatgcaagcattgaaggaccaatagcaaatttatcaacacttggaacagaagagctccgacaacgagagcgctatctcaagcagaagagagataagttgatgtccatgagaaaggatatgaagactaagcagatacaaaactcggagcagaaaggaaagcctgctggggaggtagaggaaatgacagagaaaccagaaatgacagcagaggagaagcaaacattactaaagaggagattgcttgcagagaaacttaaagaagaagttattaataagtaattttaaaaacaacct

SEQ ID NO: 777 - DNA, 530 bp, Canis familiaris
  misc_feature (1)..(530): n = a or c or g or t
ctgtnnngctgcgtgnctcgcattcagtcccagactctaagaccttgtgtcacaccccccagacctccgagaccatctcttgtgtccaagggattgctcccagccagtctgagcctgtccaggagcttcaggagaagccagtcacacaggcttttgagactccgccgccaccagcaggccaggagctaaagcaggaattccctgccacagcatcctcaccccccgagtcagggcctccagctccccaggcccagcagtccttgtcccaagagagcagcacacctgcccctgcctcagagaagaaaagtcagcctccctagtacagaaccagaccccagcccacggagtggcctctcaggcctctgccaaaaccaccaactttataaaagcacaaatacttaccgtaacctcgttttggaaacctccatgtggagtcctgacctatctcagaccagcaggcctgctacactgcctctgccaagtgtgcgtgtatcagtgttggggagagttttccagcatcatatcataaa

SEQ ID NO: 778 - DNA, 660 bp, Canis familiaris
  misc_feature (1)..(660): n = a or c or g or t
cttgttctatgtcttnntagcttttttgnnattaaaaattacattgtattccattctctgaaaatacaacagtttaaatacccnnactactgttgataataagaagttgattctagttttgtttttggttgttgctttanctacaatgttgccataaacattactgtacaaggtgtactggtaaactggagcaagagtttctctaggtatatatctaataaatgctggcacatagggtacatcttcaactaagtaatgctgaattgttggtcaaagtgtctatgccaatttacatccccactaatcggtgttcccattaatctatgtctctagcaactccattatgaccagtaaagtgagtacataatggtatttcatggttttagtttgcattttcctaattacccctgtggttgagcatctttttataagtttatcagccatttaaatttcttcatccatgaaatgtctatttaggtgtttgcccatattttctattgtgttgtttttctcttattgattcataaggttacttttgtgtatgggacgcctgggtggctcnnnnnnnttagnnnctaccttcagcccagggtgtgatcctggagtccccagatcgaaatccacgtcgggctccctgcatggagnnngcttctccctctg

SEQ ID NO: 779 - DNA, 643 bp, Canis familiaris
  misc_feature (1)..(643): n = a or c or g or t
cggtcattgctgtgnnnctgaaatgcagtccagagtcnnnatgtattttgcttctctttccttacctttctgtatatcttcttgggccaggtgatctannagctcttattcccctcagcccgaggcctgaactgggcttcgtgtgttagtattttattttataggctctgcatgccagagatgggccaggggctggtaggaaacttgaactgcagctggctctcttgcttctcatgcacacattcctcagtggggtggaaggcaggcagccacgtggcccagagagttgctagtggtcggtcccctgcccccttctcttggaccctagcatgtgaagagaagacttacgcaggcataccgcagactcttctgcctgcccagctggagccagcaagccagcaagttttgaggctgtgggaaagaagtgagggggatctgggcttctctccccacccagttttgtgttgtgtcctggttctgttgcccctcttctatctgttgctatttttgtgatgtcttcctccccaccgccatctccgcctttttgtaagtggctcctgggagagggagtgcgtcaatccttctcttcctctcactccactatttggaagaaagtgggggtggcagagatgtgggggtgggg

SEQ ID NO: 780 - DNA, 493 bp, Canis familiaris
  misc_feature (1)..(493): n = a or c or g or t
ttttccccccataaactggagtcnnagtcccggnnctcttttccctgacctactatcaggtatcagtgttttgaatgcatactgcttgtgcatcagacttacagtactgtcattaacaagaaaagagttatagccttgtgccccatgacctcattcagttcattcacaaatgcctaaagcacacttatcccaggtataagcctcgggattaagaactagtcaataaaacaagagcgatataatggaactatatctagcaaagcggccatcagtgaccatttttactttaaaagaaataattccttgaatacagatctacatctaagctttttttctttacaaacaatattaatcaccatatcataagatgatttatgcaaacttgcctccattgactctccatgtgagctcttttaaaggggcatctactttgagttgttttcacattaaaccagattacttagcactacatgttaatatcttgttttaaggt

SEQ ID NO: 781 - DNA, 504 bp, Canis familiaris
  misc_feature (1)..(504): n = a or c or g or t
ccctcatcctgggcggcnnnagcaagcgtgcagagcagctggcacgtgacttccgcattccnnacaagaggctctggtggctgaagctgaccgccctggcagatctggaagattgggaggagctagaaaaattttctaagagcaagaaatcgcccattggctacctgccctttgtcgagatctgcatgaagcagcacaacaagtatgaggccaagaagtatgcctcccgagtgggtcccgagcagaaggtcaaggccttgcttctcgttggggatgtggctcaggctgcagatgtggccattgagcaccggaacgaagcagagctgagcctcgtattgtcccactgcactggagccacagatggggctacagccgacaaaattcagcgggctagggcacaagcccagaagaagtgagggactccccctgcacatctccttgagccctaggcttggcagaagcatcactgctcatccagcttcttcagagccgagctgagctgag

SEQ ID NO: 782 - DNA, 629 bp, Canis familiaris
  misc_feature (1)..(629): n = a or c or g or t
gaatggattgtcttgagctagagtataaatacattttnnngttatatgatgttttctttggtattataatgtgtgatcgaatgctgctttgatttgctnngaaaaaataatgtattaccaatgcttgatttctgtagaagaaaaagaattacattcaaaatctttattcgagcatggaaaggttaaatcagttgattaagacttttggtatttttctattccagcaatattttcatgaaggaaaaaacttgaagtgctacttcacttactatttcagagggtggtcaatttctgtgtaaagaatttgagatgaaaaactaatactttaaacctcccaaaaagatataaccaaaatctgaaggttgacacaatgcaggcgcactttacttgattgtgctttgcagatgttatatgtgctacagattgaaagtggcagccctgcattgaggaagtgtattggcaccattttttccaaaagcatttgctcactttgtgtcttggtgtcacattttggtaattctcacagtctttcaaacttgttcattgaaattgtatttgttctggtggtctgtgatcggtgatctttgatgttgctactgtaatcgttttggggtgccacgaaccagacc

SEQ ID NO: 783 - DNA, 412 bp, Canis familiaris
  misc_feature (1)..(412): n = a or c or g or t
tacaacacgtccttccacaagcnnnacggcaccaagatcatccggcgccagcgcaagaatgccacccaggaggcgctgcgcaggggtgacgatgtcaggttcgaggagtttgtggcctatctcatcgacccacacacacagcgcgaggagcctttcaacgagcactggcagacagtgcactcgctctgccacccgtgccacatccactacgacctcgtgggcaagtatgagacgctggaggaggactcgaactacgtcnnnnnnnnnggcgggcgtgggcagctacctgaagttccccacctatgccaagtctacgagaactactgacgaaatgaccacagagttcttccagaacatcagctcagagcaccaaacgcagttgtatgaagtctacaaactcgattttttaatg

SEQ ID NO: 784 - DNA, 584 bp, Canis familiaris
  misc_feature (1)..(584): n = a or c or g or t
cttctccgtgtcctcctactccaccantgtgcanngcatcgccaagcccttcaaccccatgctgggggagacctttgagctgnaccgcctcgatgacatgggcntgcgctccctctgcgagcaggtgagccaccacccaccatcagctgcacactacgtgttctccaagcatggctggagcctctggcaggagatcaccatctccagcaagttccggggaaaatacctgtccatcatgccgctaggtgccatccacttagaattccaggccagtgggaatcactacgtgtggaggaagagcacctcgactgtgcataacatcattgtgggcaagctctggatagaccagacaggggacattgagatcgtgaaccataagaccaaggaccggtgccagctaaagttcttgccctatagctacttctccaaagaggtagcccggaaagtgacaggagtggtgagtgacagtcagggcaaagcccactacgtgctgtcaggctcgtgggatgaacagatggagtgcgccaagatcgtgcaaagcagccccagcagccccagctcngnnnggaagcagaagacagtgt

SEQ ID NO: 785 - DNA, 536 bp, Canis familiaris
  misc_feature (1)..(536): n = a or c or g or t
gactggggcanccacttcatttaccctgtgctttccttgaagatgttcagagcacagcacaaatgattttattaactctctaaaattcaggcagtggtgaaagtgggncttggtttcaaaatcgaagacctagggcgacagccgttaccatatggcgatgtcacagactctttgcacgtccagatggacaggatcttagaaacaaccccacagatatgacacagaggctaagagaccagaaccccacagatgtgacatagaggttaaaagaccaggctgttgtgctagaccatttgcattacgtcactaattatccttagtatccttactcccctgggcagcttcttaagttctccagagctctgttcccttgtctataaatgaggacaatgaaaataccaatacccacctcttaggtttgttgtgaggacaaaatgagatactttacctaaagtgctgatgataagcattcaattaacgttttatattgttgttattattttgctatatttccctcctcactttacagaaactga

SEQ ID NO: 786 - DNA, 663 bp, Canis familiaris
  misc_feature (1)..(663): n = a or c or g or t
tgccatgttattatgccctgtcaacatgctgtcaaagttgtatgataatatacttnnnnngctgagattnctaaattgctttaatgaacgctaatcctgagagtttccctgcangaataaaatgagagaggtttggggactcgtcagaactctgcagggacatgaagccaaagccactgcagtgtgtcacctcttagagcattgtaatcacgcctaagctgctttcacactgttagtacaatcagatgaggaaatccaaaatggtcagagaaagctcagattgtataattgaagccagtggcgcagaatatgtaagtcacgccaaaaactcttttgatttctgttccagggtttgctacaagagggggtgcagaggatgactcaggagggtgggaaggacattaggagttgtctttattcttttacctttggaagctgagctgccaatccagcactcgcctaactagaatgtatacccatcagcaggactacttcattaaatagagacactgtactcattggggcctcgggggtactgctgttccaatgtgggattttaatgttgtaatgtattgcatcctaatgtattaaattcattttgttgtactatattggttggcattnnnntaaaataaattgtnnnnnnntcatatttgtatgttt

SEQ ID NO: 787 - DNA, 571 bp, Canis familiaris
  misc_feature (1)..(571): n = a or c or g or t
cntcnntccacttttgattgtattcaggtcactcacagattnnatgatgcccacctgtactggggacagcagnctgctgagtnnaaacacnnnnnncagatgcgtccagaaataaggtgtaatgtggcaccccatggccagtcaggcaggttgacacggaaagctgaccatcaccgtctgtgctctctgctgggcaggtcgatccttgtagcagagggaaaaatcctgtcctaggcctggtggcctggttcctactgtcactgtgataactgtgtgttatatgcacgacgtagtgttatcctttcttcctaatttaaatgtaggtgtgtttaatatttcatgtctttctacatatgaaaacaatggcattatccctttactttgctgttttaagtcttgcttgatttttctctgtaagaaaaaaaaaacactttatctgcttgaactatttcttcctaaaactcatagtgaacagctgtggcaataaatgtgtctgattcttgtagaatgggtaccgaggtgagcaattagtccctaatcattagcatgtaatttgttacattaatctggg

SEQ ID NO: 788 - DNA, 600 bp, Canis familiaris
  misc_feature (1)..(600): n = a or c or g or t
ctcttttnaatatgccttgtntagntcatattcatngctgaaacttgaccacactgttgctgattgtatggttttcacttgagcaccgtgtagaatgcctgattccttgtgctactcttctgctaatatgctctgggctggagacatgaaatcctcaagccatcagaacttgctacttaagtggcttgacaactgggccaccaaagaacttgaacttcatcttttaggaattgagctgttctggaacatactgctgcactttggaaagtcccaactaagtgccagtggcacctttttccatagggaatttgcccagctttgctttaaacgatgtcttgttttttatatataagtagtctgtaggtccaatccgcctcaaggccttggtcttggtgggtctccttcgtcattcaatcactttaattaaaaatggctgcagctgtaaggactcttgtctgatatatttgcaactctgctcccatttataaacctgctctctctctaatgctcagttggcagactcgaatgcaaaggtggtgtggactccctttgtgtgggtgggatttgtgggtcatggtgagggattgatatgagaaaaat

SEQ ID NO: 789 - DNA, 636 bp, Canis familiaris
  misc_feature (1)..(636): n = a or c or g or t
agtatggtgtagacaggacaggaagagagcccatcctccatcagagctctattnnngnnnaataacagctgtgatcgtgctganctttnngggctgctnnnaaccattctagcacatggcagtgggacagggtgtggtgccaagatggagagcctggtgaagttggggtgaggaggcttcctgtggactggcttggattgatttgagcttttaaaggccctgggtggaagcacttggactgaagcggcagctgtttctctgcatcatggccctaagtggggcctaagtgcttcatctgcagaacgcagggtctcggggagggtggaccgtggttgaaaccagccccaagatgctaacacacctctggggtgatactgtcccttgggtctgggtacaatcattggaattgcctggagcaagtttaaatacttgtcacggaagcttctgagcttcatcactttgtatccagctgcatccaggcctgaggcggtggccacttgacaccaggagccacttagtgcccctttggatcttgagcagagaagcaaggcttgggggaggagggggttgggagctgatactgagtgcctgcagcatctactctgtcttcactattcagaacttgtaactaaaata

SEQ ID NO: 790 - DNA, 492 bp, Canis familiaris
  misc_feature (1)..(492): n = a or c or g or t
ctgatgggttctcccaaangcnnnnnnnnagacaaggatttggtacacagagttcatnnnnnaatgatcccaagaagtacaaagagggagcaagnaagtagacaaagaaaggagaagagccaatgaagggtatggtgatgagccaggcaccactgaaggcagtcccctgctgggacttgtttagagacggtgcagaacgcaagtcagaattgttccactggttgcagaaagctggagtacttacctgtggattcctttccctcatggagggtgtctcctggaggcatggatttcccagcacttctggtctgttctgtgaaagggcgaagcaaacttccatggccaaaagggccaagcaaacttccacggccagagaacaccttcaggcagagaacatttgcagcctctggtgtgtatgggaactgtctataggcaacctccacggtggcccgaggggacgtaggtgggacactcacatctggtacagggctt

SEQ ID NO: 791 - DNA, 565 bp, Canis familiaris
  misc_feature (1)..(565): n = a or c or g or t
gatttccttttctttnntaaagtccttaagtgtattattataantatataggcatcagcatcttatttagatagaaaatctttgatggtaagcattaaagattcaggtagcactcacatccaaaatatttggattgacccacaaggatactttctttcataacttaaccatatgcatgtattaagaaaagcttatgtagtacagacagaaagctctgtgtccctttctttggggtatcctaaagtctgaagggtcatagatgcctggttgagatctataagatgtcaaggagtgacagataatttgtagattatttaaactctaattaatgtgcctttaatatttctagttacagagaatctgcattttggttcaagagatttacagaatattcctataatttaattcccattattgcctggtaccaacctaaaatggcactgtgaagggaggcattttgtactgctgtggcagaaacatgtcaagacaatctgtgtttgggcttaatatgtcctaacaatccttgtaaatatattattgtaaaaatgcttattattttctaggt

SEQ ID NO: 792 - DNA, 587 bp, Canis familiaris
  misc_feature (1)..(587): n = a or c or g or t
atgcggtcgtctctctggtcactctcatgttngacacgggcctgccctgcttccggggccagacaatcaagcttttgaagcacaggttcagccccaacatgacggagagagaggctgcaaatttcatcatgaagattattcagagctgcttcctcagcaacaggagccggacctatgacatgatccagtactatcagaacgatatcccctactaagggtggagccagaccagctgttgtggccacccccagccgtcgtcccacaatcatggagccgagcgagcacatccccaccctggctgccatgcatggtcaaaggggtgaactactagtggccccgtcattccatccactggagttatttttataggacaaaagtactccaagcagagcctggcaatctactccttcctggcatgacccacatacgacatgtgaggccgaaatgacaatcatctgaggacactccgtgcatgggtgtaaatacttcatttgcaccagacacattcccaacacattccctacctgtctcacggcataggtacatgaagtattttcttgtgtataaaaaattatattcaacttaag

SEQ ID NO: 793 - DNA, 557 bp, Canis familiaris
  misc_feature (1)..(557): n = a or c or g or t
gtgtgtgatgacnnctggnacacgaannacgtggctgtggtgtgncnnnnnntggnctgtnnnncggccaagcacacgcccccgggnnngctgtacccgccgctgccagnnnnnnaccagcccatatttattcaagtggccctgtgcaacgggaccgagaacacgctggctgaatgcgagcaggttgagatatttgactgtgagcacagcgaggatgcaggagcagtgtgtgaagcattcttgccccattttacttgaagaccacaggcctcagcttctctcccctggggccttacatgccaggtgggcctgaacctttcacctgtggctcccacagcccctcagcaggactacacgagcgcctcaacccagctgtatttggggccacacccagctcccaaaggagccaaatttggtaacaccctggcccagaccctgcatgttccagcctcttctcagggatttttgggaagctccagtgctgtctccttggagagctgtggcatctcctgaggacaggacaaaccaggaatgaattgagatgggccttgcatctg

SEQ ID NO: 794 - DNA, 623 bp, Canis familiaris
  misc_feature (1)..(623): n = a or c or g or t
tacctatcngtgatgcccantngccagtatcntatgctgctatccattgcaaaatatctnntagaattcaaganctagntaatccaaatacaannncncctgtgcatattgtatactacgatccagatgtcnnnanngtcaagccagctgctttgaaaacacagtgtactccaaggatccaagaattggcagaanntattgtgcgnnaaaaacagaaagccacatcagtcagactctagttatatatctagaaaacattaggtgacttagttccctatactggtcccatcactctgtattcccctatctctccaaaacccgtatgaggcccccaggaaacaccagttcctgctattacctgtagtcatgtccttagcaaggtttggggactcgagcatgtaataaaatgaaactgagggggcctgacttttccttactatctctccccatgagcatcgagaccatctcattgctctgactgacctgaagaaacactcttccttatgtttgctgggcttctttttcttttcctggagagatctatattccccagcagctggtctctgctcagtccctgctctaataagtcctgagaattgaagtaattctttgtgttacttttc

SEQ ID NO: 795 - DNA, 539 bp, Canis familiaris
  misc_feature (1)..(539): n = a or c or g or t
gatcatcatacnngaaaaagaatcatcccaantggannggctacgctgggnancgaannagagnnnnnntggacacaaaatcccacatgtatcgtcgcgttgctctgacgctgagctcctggtttgggatccaggagagcgtgcgcaactctccctggatgctgattcagggacacggtgggggtggcaggtgacagccgtcccagcccttccctgggaggcggtgcagtgtcctgtggggcctgtctttcctctattaaacgctgtcctctctaaaccgctgttgtgaggcccagttgtcccagtacccagcagtgttgtggcctgccggactgactgcaggccacagggtcgtggtggacgatgagagatgtttcctgaaaggcaaacagctgctctctgttacctggaggcgggtctgagaactggaacttggcacttttagagctaaacttctcgagccttagagttggctccgtgtgaagagcccagcatgggaggcannntcaaaaaagagagagaaaaatatccaacaattt

SEQ ID NO: 796 - DNA, 619 bp, Canis familiaris
  misc_feature (1)..(619): n = a or c or g or t
gnctttcactttcgacatnnngctggatgatctacccaannngngtctgaaggagctcatcttccannagacagcccgcttccagnntggggtgctnnaagccccntagtctggacagacacctctgttccttggggcctggctctgcctcctgcctgcccctcccctgccggactgttaggaaatggacactttgccccacccagacccctggtggcccaggtcggggcagagggtgcacctggccaccttccacggctttgctctggcctcctgctccaggcaggccaagtctccctctgccccgcctcccctcccaggacctgaggggcttaggtggccccaaagtaaatcgccctctgctgcttgccttcgtctaccccagctatcccagtctctggtagttctggaatggaagggctctggctgcccggggaccgactgaagggtggtggggggatgggggacactgacccattaaaaccccaccccgttttccctgaaggaatattcctaaggctccagggctagtccccctgaggaacagggcccaggcctaaaccccctccctcaaagctgccacatctaacaccccctgctgcctctgtgtgtgggtgaa

SEQ ID NO: 797 - DNA, 473 bp, Canis familiaris
  misc_feature (1)..(473): n = a or c or g or t
accagttcanntgccccgacggcntnntgctccggcacaagatcngnaccccgctgacccnnnngatgtactacacnnagatnnaccccgagcgccaccgaagcatcctggnngccatcggggcctacccgctgagcngcaagcacggnaccgagacgcnntcggcctggggggagaactaccgcgnngtcaaggaggggcccaaggcgcccacccaggcgggcgcggcggcgggggcgggcgcggcgggggnnnnngccaccgagcccccgggaaagccctctgccccgggagagaaggaggcgccgcggaaggcagcgggcagcgccccgcccccggccccggccccccagtgacggcgcccgcacctgcggcccggcgcccccggcggcacccgtgaccgccctcgcccgacgcgctcccctcctgtggtcgtgccccgcctccgggacccctcgctgatgcccctgccc

SEQ ID NO: 798 - DNA, 566 bp, Canis familiaris
  misc_feature (1)..(566): n = a or c or g or t
gcatgtatgctaatttgggcatagggatcccgcnnnnnnncagcaactatatcagcccaaatatcacagttcatctgcaaagtgaaaatggaatcctgggtttgggtccgtatccactacaaaatgaagttgatgcagatctaatcaatgcaggcaaggaaacagttactgttcttccaggagcctcttacttctccagcgatgaatcatttgcgatgattagaggggggcatgtcaatctaacaatgctcggagcaatgcaagtttccagatatggtgacctcgctaactggatgatacctgggaagatggtgaaaggaatgggaggggctatggatctagtgtccagtgcgaagaccaaagtggtggtcaccatggaacattctgcaaagaaacagcttcagagaagttaacttgcctgaggtcacataactattggaactgagattagaactgagtgtctgtgattccaacgtccagtcttctaactctagagctctcaatgtaactatgttccttgttcccaactcagtgtccttgaatcagttgagttgagcctaattgcc

SEQ ID NO: 799 - DNA, 631 bp, Canis familiaris
  misc_feature (1)..(631): n = a or c or g or t
caaatgttcctatannngagggcaaaggnnatgtgaagacacaacaagaagatancanctgcaaggcaagaagagaggnnntcagagaaaacaaccccaccagcaccctgatcttggacttttaagcctccagaacaagaccaaatctaggaagaggccagagagctcactgaaactgaggggtgacgtgagggaatggtaactaccctccactggcaaagagacagccggtgtgctggaggtggagcccttcgacgcagtgctccccacatcatggcacacaaaggagatggaggcatttgaaggacatcctggggaaatgaaaggactatacagctgagcaggccccacctaccacagaaagttaagacttatcaggaaccttaactagatgagagccatgccataaattctgaaaaagagtttctgagaaaaagaaaacaagctgtcacaagtcacaggacacttgatccacaggccagtaaagatttacagagccaacttctaaccacagactgaagcacacaacagggcatctaaaagaattcccatttgtgccatcctgacatcttggcattcttagcatgctatggatgacctcattgtcccaacgctagagctgaggatgagg

SEQ ID NO: 800 - DNA, 545 bp, Canis familiaris
  misc_feature (1)..(545): n = a or c or g or t
caanncatctgcagattcagaggcagtcacctggggggggggttcctttgtcgctaggcaaccaggaggctccttcctcagggcagcagtcaaggggagtcctcctgggagacctgcccaggagggtttggccagtgtacctgtcctccccctccagccccaggcttagcattcccttcaccctccctgatgatgatgataggcaattccatttatttctgatcattataaacagaaatccctcctccttacctgttaacactcttgttatcttttctcttggaatgatctttccaattgtattttaatcgtggagctttcctctgtaaacacgatttgggtccaaatcactttatgcgcatttgtgactttgagattattagtcaagaatgaggatattacagctgtgacttaacttgggttgcagccttttaatccttgccttcagctgggagtggagggtgagtttgaagaggctctggctttcttgtgactggggagagctgtgaccaatgcttggaattcctcaaactgctttgggtaat

SEQ ID NO: 801 - DNA, 640 bp, Canis familiaris
  misc_feature (1)..(640): n = a or c or g or t
gtatnctctaaaatgacaatctttttttttttttctgcaacaccatttggccacaatattcgnnagactcctaagaaaaatgaccaaataatggatctataaattataatcccatcttgcaatggatttgttttataaaaagatacttggaaactgggcctttaagattttgtttgcatcttgtttgtgtatttgtatatgtgtccctgtatattgtaaatgtaagatgtttcctaaaatgaattttttaaagtactccatttagttggcttaaaggcaaacgcttgtaataatcaggcattctaaaactcagaaaatggaaactcaaacatttttcaaagttatgtgatctgggaaaatgtttgatattaaagctaatttcaagttgttggtattattacattggacctgtcttcagagttatcaacattagaggtagaatttctgttctacctgtttgctgaaaggcaggttcgtgttatctctattgcaaaatttgtcagaagagaaaaaccgcgtggtgttggtctttctaccacagttctatgtatttgagtttgtttctattttgtttgttcatttgtttttgtttcagagagaaactttattactttgactagtgcagttttgtgggtaatct

SEQ ID NO: 802 - DNA, 619 bp, Canis familiaris
gtagccacagaaaggggaatattgtgtgtggttatttttcttcttaggccatatccccaagtttttcagactcctttaagtaaaggctaaagtgaggaaggaatagagccaagtgaggtaggtgtctgagccatgaagtataaataccacaagatgtcgtttttattcaggaaataggggagattcaagtcatataaattcctattctaaaaacttcacacctgactttccaggatgcacattttcctatgtagaccagtctcctctcagtttcttcagttaagtcaaaactatgtgttcctctttccccatatatttttgcttgttagtgtatttcttgagctgttttcatatttctttcctttctgtgaaatggttttttttaaaaacttgggaccaccaagttgtaaagatgtatgtttttacctgacagttataccacaggtagactgtccagttgagttgagaagagtgaattgatagcttgtatttgtttttaaaattaaattaatcctggataagagttgcttttttttttttttttaggagttagtccttgaccactagtttggtaccatctctattttgggtgacctgtttcaccagcaggcctgttact

SEQ ID NO: 803 - DNA, 560 bp, Canis familiaris
  misc_feature (1)..(560): n = a or c or g or t
aagggctacagctgcccagagtgtgcacgtgncntcgccagccctctgcggctgcagagccaccgcgtgtcgcactcggacctcaagcccttcacgtgcggcgnntgcggcaaagccttcaagcgctccagccacctgtcgcggcaccgcgccacgcaccgcgcccgggcaggcccgccgcacacctgccctctgtgcccgcgccgcttccaggacgccgccgagctggcgcagcacgtgcgcctgcactgaatcccggaccgtcggggccccgcgggccacacggcggatcccccaagcgcccccgcctccccgcggccactgccttacccggggcctgggtgtctccgtccgccccggggacagacaccattccttccttacctacccgcctagctgcgtgatcccctccctagcccggctgtgctgtgcgagcctttgctggtgacacaacctctcccggcctcggtcttctcagtggcgaccgggtgtgcgcacggaagacttgacgaagagcacggcacggtctggctcgnnnnnntatctcccactttccattc

SEQ ID NO: 804 - DNA, 478 bp, Canis familiaris
  misc_feature (1)..(478): n = a or c or g or t
ctccgtgccccgcccaccnnnctgnctcggcctccctcccttcccgggccgccttcccctcggccggctggccaggcctggtttggcctgtctgccccggcttcggcctccgtccccatcgcggccccccagccaacgctgagactctagcagccccccgcctcacggccccccatctttgctgctgacaaaccatcctcctgtatggccccttcttgactccctgcctgggaccgcagatcctcctattcccctcccctgcccccgggatggaaagatccttggtcttctgggccacccctacactcctgtggcgaagagaaacaggccggagggagcaaggactttcccaaggccacgaagctcattcccagcaccagctcccggcccagtgtgtggtgggtggcgttctggaaggctctacagaagtatcccaggctcccctcccttccccctcacctcaaggtctggccccagt

SEQ ID NO: 805 - DNA, 501 bp, Canis familiaris
  misc_feature (1)..(501): n = a or c or g or t
gcggcagctggtgacnnnnnnctcggctcccaactactgtggcgagtttgacaatgcaggcgccatgatgagtgtggatgagacactcatgtgctccttccagatactcaagcccgctgacaagaacaaggggaaatacgggcaattcagtggcttgaaccctggaggccggcccatcaccccaccccgcaattccgccaaagccaagaaatagcctccgcgtgcccgcactctgccccagatggtggatttgtacagaaattatgtggccatagggggttcacgctggccccccaggcccacctgtcacggggaacacggagccttggtgtatttttttttttttttaatgaatcaatagcagcgtccaatcccccagggccccttccgcctgctatagtggtggcaagcaggatcctggggctgaggctgcagctcagggcaaagcagggccagatgtgggtttccagccttgcttggcctcagggctggccgacagat

SEQ ID NO: 806 - DNA, 482 bp, Canis familiaris
acaacacagagaagaatgattactgcccagaaataaacaagagtgataatttcccaactaccaggagaaaggagttacttccttatgttcagatgttctccccatgttagggtatttgggcccacaggacacctgggacccgggacaggcctctgggtggaccacggtgaacaggactctgtggtggtgatcgggaagcgcttctctgcctctgggatgctcttcctccttctctttcctggcaaggagctgcctgcacggaccatctcacacccaagtgatctggccatgactgttggaaggtgggaaggtaggggctggacctccaaccaaggcttgcctttccaccctaagtatatagagggccattcatgccatcctcagggtgctttagttcagagcccaaatgagctttctgaactgacctgaaagctgtgtgctaaggccccttctctggtgtctccactgccatgtagaaaagc

SEQ ID NO: 807 - DNA, 476 bp, Canis familiaris
  misc_feature (1)..(476): n = a or c or g or t
agtaggattggnnaagattgagtttttgactgaaacatnnngnnntcactactttttctggtttcttgaagatttggaacataaaaacatcngaagaactnnnnnnaaaatttgagcaggtcaatgatggcagaaatcattttaaggggaaaaatgctctcatgtagttactctaaactttaaggagcattgctggtcatannncttagttttcttactgctattaaaaagcagcaagtaaattgtttcaaagtaggttttgtttatgcatatgcagagtataaaaactgaattttgatgcttctagcacctgccctgtgcatttgtatcaaaattcgtctaccactttatgaaggaggcttgttcttcacacctcagcttatttcacatgaggcaagttgaaagagaacactcccatnctaggtgattctatggtgccatgaaatttaaaatatnnnnaaaaagaattaagagtc

SEQ ID NO: 808 - DNA, 519 bp, Canis familiaris
  misc_feature (1)..(519): n = a or c or g or t
cagcacgaggagatcatcggcaaggtgtgtgagctcatcaatgaggtgaannagtcctggaccgaggaggnngacttcgagcccacggccaagaagccccgctccgccacgggcgagaaccccgcagctcaggaagacgatcggcttgggaaaaacgaagtgtatgattacctgcaggagcccctcttccaggccactcctgatctcttccagtactggtcgtgcgttacccagaagcacacgaaactcgccaagctggccttctggctgcttgcggttccggccgtgggggccaggagcgggtgtgtaaatatgtgtgagcaagcccttctgatcaaaaggaggcgactgctcagtccagaagatatgaacaaactcatgtttctgaaatccaacatgctttaagacttcagaacaataagaagagaaaagaagagaaaaaagaaagaagagaaacgttagaagaaaaaaaaaccacaaacacacacacacataacactgtcgcaaacaaagaaaagg

SEQ ID NO: 809 - DNA, 605 bp, Canis familiaris
  misc_feature (1)..(605): n = a or c or g or t
ataacatacatccagcactccccaccgnnaggcatcatcacagtctcctacagcagctactgtgaggagtccttatgcaatagcaaggagaacttactgcaactgtggagggaggaagagccccaagctgccagcacgtcagcacacctctactgcccaacctgtgtggctctgggggcctgttcaaatgctccttctcttccctgtcccaatgatacagttcagtgctatcaaggaagacttcagatcactggaggaggcatcaactcccttttggaggtcaaaggctgcacttctataactggttgcaggctgatgtccgggatctttacagtagggcccatatgggtggaggaagtctgtccataccggtctgtacttcaaccccgaaagattgaaaaccgggctgcctggcttcctgtttacatttggagattagagctagcgctgctgctattactacagtgacttgtccattgttcctggaacgtgaaggcgcttctggtcctggaccacaggatgcctcttccaactgggagcctttctgactgctggtcataaacaagttgaggagcaaagtggagagctgaagaacagagaattct

SEQ ID NO: 810 - DNA, 266 bp, Canis familiaris
  misc_feature (1)..(266): n = a or c or g or t
aagatattggtaggcaaatgttatgctataacagaagaattcccatccctgagcttgaagcaagaattgatgctgtaaatgctgagacaattcaagaagtgtgcaccaaatatatttatgataagagtccagctcttgctgctgttggtcccattgaacaactgccagactttaaccagattcgcaggaacatgtgctggcttcgtgattaaaatgctcctattcnnnntattttggacatgtatatttataaagctaactgatct

SEQ ID NO: 811 - DNA, 137 bp, Canis familiaris
  misc_feature (1)..(137): n = a or c or g or t
gtgggctgaannntgtgggccaccggacctgcnnttggnnngatcagctttncnnggttgggggctttggtgaggatggcaggacacccagtccacaggtttgcatcctggacctatttannnaaagaatagtgcca

SEQ ID NO: 812 - DNA, 664 bp, Canis familiaris
  misc_feature (1)..(664): n = a or c or g or t
aaatcatctttnnattcttgaagttttngtaataatccccatgtnactacatcttgctgttccctgtaatgtcaaatgannnncagtaatttctaatcatgaaaattgaaaacaggtttcagagccaaaatttagttttaaaccagtcttggaaaaactagttgtatttttccttcaagtacttgggtaacttcagtttgcttgggccctggctatttatggaaaatatatctgctttgtagtggcaatgtggagcaaaggagactgccttacatgacttttactgaacaaataatttgaagacaggttagggaaataaggctatgaccttaaaggatgggaccaaatagaggttcatagacatatgaataatcttatatgcttattattgaatcaggaaagcattttgtgacatacccgtgtgaaagacgctatgtgaagttttaactatctttcaaaagactttttctttcgcactttcttttggtgtttcttaaagccaaacttaagcaggaagaaaatgttcttaaggggtgacaatgggtgggttttctgtgggcttttgttggtttttctgtgggccctctaatggaattgatctctttggctgttcaattttttcatattgtatttttaaaatttgttgtacggtgccctgtgagca

SEQ ID NO: 813 - DNA, 581 bp, Canis familiaris
  misc_feature (1)..(581): n = a or c or g or t
cacaattgaaagctnnnngnnngagatggnngccgtgagccatgaaaacctacaaagcgcctggcggtgggccctgactctgcagtgtcggggcagcaggaatgtcctcagcgccctgcggaaggctgtggaagtggacttcaaggacaaagacaaacaccagtcacagggcatctacctcttcacagggggcatccctgaccaggacatgcccatgctcagcgcctacatgactgaggcctgtgggggctgcgacctccacttgaacgtgtgtctcttctacgtgggtgagccccagatggacatcatgccccctgcctgctatgccagccgcacagacacagccgccgcnnnncgggaggtcacccaggctactgctgggcgcttccactggnnnnnnnnnacaggtatttacgaaagcgatgacattaacgccatcatgtctgaaatggaaaaagcgctcaactactcgcagaagtgtgccttgctggtgtcctccctgaagaaccaatctggaaaggaactagagagtgcagtcctcctgaaagcaaagccaaagatattcaagcaaagaagtcagc

SEQ ID NO: 814 - DNA, 426 bp, Canis familiaris
  misc_feature (1)..(426): n = a or c or g or t
tggtatannagntcaaattgctgaaggtgttatgnnnnctctcatgacctccagaataaaggtgtnaccaccctcaagttgcatatatnaagctgtatgccctcatacagcagatttttggactnntcagagagaaatggatgttttatagcatcaagccttaaaaagcacacacagcaactacacaagatatattgagtgcagtagctgtttgattcctcatagttagaaataatatggtgaatgtttagttcagtaagnntgtaccttgttcagtagtcatggatagtatttcaggaaactgaaatgacaatgatgataatgaggtttgnnnaacattggannnnnnnnagcatgtatgtgtttannnnnnnnnnngtaaaggcagtttaaaaaatgcatgtttctatattatttgttttaatg

SEQ ID NO: 815 - DNA, 642 bp, Canis familiaris
  misc_feature (1)..(642): n = a or c or g or t
cagnnnctcatctccggtgacaatgctgagattgatcnnnnngatnnaaagaagcacacggtgtactacggtnnatttcacnnnngtcacagagtcatcatctggctctggnatannctggnctccgacttcacacctgacgagagagcaatgtttctgaagtttgtgaccagctgctccaggcccccgctcctgggatttgcctacctcaagcctcctttctccatccgctgtgtcgaagtgtcagatgatcaggacactggggacaccctgggcagtgtcctccggggcttcttcaccatccgcaagcgggagccaggtggccggctgcccacctcctccacctgcttcaacctgctcaagctgcccaactacagcaagaagagcgttctccgggagaagttgaggtacgccatcagcatgaacacgggcttcgaactctcctagccctcactcccatcaccttccctggctggctcctgggagcccaggaaccttcagctccagggggacagcgtcgccctgggagtgggtgaccaacaagccaggtgacctcttactctctatagccatgagactcccctgtggcctcaacaacttgggacgcacgtgacgactacatagcattctccaggtgacact

SEQ ID NO: 816 - DNA, 325 bp, Canis familiaris
  misc_feature (1)..(325): n = a or c or g or t
atttttanngcaatccctgtagnaagagataanncnnaacatgaaaggggaagaagaaaagcntgcaggtcaggaggcatacaaattcatattttaaccacacccagaacnnnannnaaactttttannnntaactgtatnntagcccagcaaaagttatcctnnnccaacaaatactctacctgtaagagnnctttggaactgtgggtaaaactaaagacttcagtgtttctatttatcccaagttggtgtgtgaggttgaactggaaaattgccctgnggcannnntcagccagattttgnnnnnggagntatgngagatgac

SEQ ID NO: 817 - DNA, 559 bp, Canis familiaris
  misc_feature (1)..(559): n = a or c or g or t
gatgtagagnctgctctgaacaaaagtgagnnctttctaacctggctgtaatcaataccattgtaacgtnnatgcagccgtgacctgacatttcctgggcctcttggaaaaagcaatnnagcagagtaagtctgcaggtgtaccactttctgcctccatgactcaatgctccctcctttccatgcggccagtttaatcattgcctggatttgattgacagtaacttaagttaaacgcaaatgaatactctattttcattttctgcaggcctgcatccctgtgatgggctatgcaagaattgcttctgcagaactgagaatgcagaattgcttctctgtttttctctctgctgccccataactaagctttaggggtgtcagttgaaatttgtgcatccattgattataaaccataaaaagccgaccacaggcagtgacttgtgacaggcagctcggtccaggaaatgtacacgaaattagacctgatttgcagttttaaaaactgtattaatgacagtagtnnnnnnntgctttaaaaaatnnnnnacgtgagctttaaa

SEQ ID NO: 818 - DNA, 509 bp, Canis familiaris
  misc_feature (1)..(509): n = a or c or g or t
aattggtatttttttaaaatgngnnncttaaaacgatataatcagcggcaaagaagtattaatcatcgctcctgcaaaaatttcaagttgccaaatgacaaagaaaggctaatattgnnntttcattaaaaaaaaaaaaaagattttcccttgaaatgttagtgaatggatttactttgctgaggtttatgggaactatctgaaatatgtattagaagacattcagtcatcatgaaatgaaatctacttccagccaaacctcaaaatatttacagtgtcttcttgattttcaactctactgcacatattttaaggaaaagtaaccaaactgagttgtttaggcagttaatattcaacctgagcaaatttttttttttaattaactctaagaagagatttgctgaaggttatagaaaagnnnnnnttatgttgaacataagaatattcttcttccaacaagtgaacttttgaaagcttagtttggaattagtggaaactgtccctttgat

SEQ ID NO: 819 - DNA, 630 bp, Canis familiaris
  misc_feature (1)..(630): n = a or c or g or t
ccttctttgacctacagacttctagataagtattgacccagtaccccttaggctttcatatgttgtttattcagatgtgtatttatttatatttatgttactttgtaaatttgttttgtgtgtggaatctgtttcccatataggttgtaagctccttgagagcaggaaccatgttatccctttacttttgtaaaccactccattgttcttcactgcgcctagtgctacttgcctagtgctactcgttatgtgatcattggacttgactgacataaagacttgtaacaggtttattgtagactgcaaacaaaaggccttagagtcatctctttgtaactctttgtctcttccatctgcttaccctggattctgtattgcttttcctctgtcacccctctcccttccctggctcttcgcctccattccgtgcagcatacagtaaggctgtcagcttccacgcaaataagtgggtacctttccaaccatttttcttttcaatggcatataatactatcctaagcaaatttgcctttgcttaactcatcaggcagccttctgggtcagttttttgtatcttttgccttgatgtcctgttctcttccacagcatnnnggtctcatgaatttttct

SEQ ID NO: 820 - DNA, 677 bp, Canis familiaris
  misc_feature (1)..(677): n = a or c or g or t
tccaagccagcgncttatnnnnnangaacagctgtgataaatggagaattcaaggagctcaagttgactgattatcgtgggaaatacctggtttttttcttctacccccttgatttcacctttgtgtgtccaactgaaatcatcgcctttggtgatagaattgaagaattcaaatcgataaacactgaagtggtagcatgctctgttgattcacagtttacccatttggcctggattaatacccctcgacgacaaggaggacttgggccaataaagattccacttctttcggatctgacccatcaaatctcaaaggactatggcgtatatctggaggactcaggccatactcttagaggtcttttcattattgatgacaaaggaatcctaagacagattactctgaatgacctcccagttggtagatcagtggatgaaacactgcgtttggttcaagcattccagtatactgaccgacatggagaagtctgccctgctggttggaaacctggtagcgaaactataatcccagatccagctggaaaactgaagtattttgacaaactcaactgaaaaatacttcatcagctgaaaagtacttcgtcaggttgcaatgcttgaaggttcttagtaaagttcaccgttttagaacttagtaaagttcaccgtttcagnnn

SEQ ID NO: 821 - DNA, 540 bp, Canis familiaris
  misc_feature (1)..(540): n = a or c or g or t
gccagaaccagggcangttcgagnaggtnnagcagcactatgcccgagccctgagcatttatgaggccctgnnagggccccacgacccaaatgtggccaagaccaagaacaacctggcctcggcctacctaaaacagaacaagtaccagcaagcagaagagctgtacaaagagatcctgagccgggaggacctgcctgctcccctgggagcccccaacgtgggcacaactggtgatgcagaacagaccctccgtcggagcagctccttctccaagatccgtgagtccctaaggcgtggaagtgagaagctggtctcccgtctccgaggcgagggggtggcaggggcagccgggatgaagagagccatgtcgctcaacatgctgaacacagatggtccaaaggctgctgggacccagttcccccatcagcacctgagcgaggccgcacggaccctcagcgccagcacccaggacctgggcccccgctgaagctgacaggacagtgtggctgctgcttctcagaaagggggggaggggnngg

SEQ ID NO: 822 - DNA, 415 bp, Canis familiaris
  misc_feature (1)..(415): n = a or c or g or t
tgttagggtcnnncccactgcccacnnnaagccggnntaggatggnnannagcnnnnnnngcgttcatccnnagtaannncgggatggagtangctgtccgcctgcacatgagtctgggggaacaggctggggactagaggnnnnnngggggttccacgtgcgnnnnntgnnnagcaggtggctagacgctgcccagggctgacacctgaagacacgtgcttcctcaaggacttacggtgaagcctccaggncnacgagcatccttgagcanctgagggttcgccctccnnncgtggcccttggccctgcccannnnnnnnnnnnnnnnnnngtgggctctgtgctacccaccttggtgtgccnnnnngnnncnnggggggacctcccatnnnnnnnggaccctcaccaaagccc

SEQ ID NO: 823 - DNA, 587 bp, Canis familiaris
  misc_feature (1)..(587): n = a or c or g or t
cgctgccactgctggccctgaccntcatcacagaaaacagtctggtnnnagcgnnncacgactgttttccggtgctgtttacctatgacagcaccacagggacactgagttctggtgggcggctggacgtgcccaagcagagctcacagcgtggcctgaccgcccgagagcgcttccagaacctggacaagaagtcgagctcagagggcagcgtggcttctggctccggcctggactcactgcataagaacagcgtgagccagatctcggtgctcagcgggggcaaggctgagtgctcacagttctgcaccacaggaatggatggtggcatgagcatctgggatgtgaagagcttggaatcagccttgaaggacctcaagatcaaatgacccatgaggaatatgttgccctcatccccactgctggggaagggggtcaagaaggctaagggtcgctttgctgaatgtttttagggtagtagtctgggtccccctggagactgctccagccagaggggagggcaaagtggggaggggagggaagcttttcttacctattgaaggaacataggtctttttgtcagagaa

SEQ ID NO: 824 - DNA, 672 bp, Canis familiaris
  misc_feature (1)..(672): n = a or c or g or t
cttcctgcngntgtccatcagcacatcagtgatnnncatgcagcanntgctgnccgccagctactgcganctactgcacnnnnnngctgcacanctgggctgnnnnnagaaggtggacccagcgctatgctccaatgtgctgcagcacccgtggacnnaggaatgcatgtggccacagggcgtgctggtgaagcacagcaagaacgtctacaaagcagtgggccactacaatgtggccatcccctctgatgtctcccacttccgcttccacttctttttcagcaaacccctgcggatcctcaacatccttctgctgctggagggtgctgtcattgtctaccagctatactccttaatgtcttctgaaaagtggcaccagacgatctcactggcgctcatcctcttcagcaactactatgccttcttcaagctgctgcgggaccgcttggtattgggcaaggcctactcctattcagccagcccccagagggacctggaccaccggttctcctaagccccagggtgaccccagggacagcatccaggcttcagccaggggttctctgggaaggggctgttggggagggttgggtgaggggcagaaaaacccacaaaaagagacaaaaaaaactnnnnagagctttgtattnnnnntacatactgtttgtttct

SEQ ID NO: 825 - DNA, 563 bp, Canis familiaris
  misc_feature (1)..(563): n = a or c or g or t
cgcgacgagatnnncaagtggccgtnngtcagattggatgcatcanttaaggggaacgtagaaggggccgctaaggtccgcactggcaggcggcaccgaatgataaagacaaaggacaagttacgctacgagctgacacggcaaccccgacacacagcacccactcagaatcggggcagacactcacgtgggcccggaggttccagtccagacaccccgcccctcgccaacgtccgacttcctctctcctcccagcttcccacaagggtttgttctaaaaaaagtttgtggcccggattgaactatccccggttctcaggagccgccaccggggggcgtccgggcgctggcaagggtttctccatgtgctgccgggtgcacccgggatcgcgggcccaggatgcatgcaaagcacagtgggtttgccttggcaggaatccctttgtgggcccgtgatgatcggaggtgtcctgtgcctgtgttttcttgtgaatttgaacacttaagtctgtgagtacctgttgtgctctgtgtgtattctttgtaatctgtgttactcgggt

SEQ ID NO: 826 - DNA, 651 bp, Canis familiaris
  misc_feature (1)..(651): n = a or c or g or t
ctttcagaactctgtatccaangagctccttcatgacactggccatctcagtcacagatgtgaagtagatttnannntataaacagccacccctgtatttagactcctgagtgtccatatgcatcttttgtggtataatatataaaggcaacagggattcactccccttacccttagggcatactactgtcgggactgcaagatgtgaataaaagtaattacggcttcgagtgtctggaagaaactcattttccacttaacaaaataatagctctatcctttttcctttcatatgggtgggtagaatattatccaccccaatttgaagcatagaagaaaatagatactgaagttttccataaccattcctattctttgtgttcccttagatactcctgtaatacttaatgtgaatagtttgttaatattgctgtaaagtattatattgtatgattggaagacggactacatgtcattttattatactctgtcaatctataatatattagactgatgctttatctaaaatgctttgagtttgtatatcttgacaaattttactaccatatgtaatgtaataaatgtgtatttttgtacttgcagaaactgctgctaacttttaaagttgtttggttttcaaagcactgataa

SEQ ID NO: 827 - DNA, 589 bp, Canis familiaris
  misc_feature (1)..(589): n = a or c or g or t
cgcctgttcagtatgncgcttatgtgactgtnnnnngcatcacctccgttattaagctgatgtttgcaggacttttctttttattctttgtgaagtgtggcattggcagacagcttctcataaaatttccatggctcttctcctttggttatttttcaaaacaaggtccaacacaaaaacagatggatgccgcctcgtttacaatgacattctttggtcaaggatacagtcaaggctttggtccggagaagaacaaaccaaatatgagaatttgtactcaggtgaaaggaccagaggctggctacgtggctacccccatagccatggtccaggcagccatgacacttctaaacgatacctctgatcttcctaacacgggcggggtcttcacacctggagcagccttctgcagaacaaagttgattgacagactcaaccaacgtggcattgaatttagtgtcattagcagctctgaagtctaaacatttaaagaattaactgaaggcatagaatgcatgaattaacggcttttttttaatgtaaaatttgaaattcttctatatcctgtctgtatgtaaaaaagattgtc

SEQ ID NO: 828 - DNA, 547 bp, Canis familiaris
  misc_feature (1)..(547): n = a or c or g or t
cccggtgatactaatgtgcagccagaattgagaaccactgtactataacatctgttttcaatgatggtgagaatggaatggcatatcaaaatcacctgaaattgagggtaatttttaaaattctctccttccttcacattattgccatagtaagccacagttaatgatggaaatgtgtcatatccctcaggtgcattaggacaggaataaatattccaaccattgctttagaacatgtggtaacaagcttctgtaatttgctgaccattataggtgcagtaatttacatggtatataagggataccatgacaatattctaaaaataagtattcctatccctagcaccatttgtttctccattatgaacttttcaatatttatattatttgttcaatataggtctttnnngagcctttgagaaaagataagttaccgccattgataaaagctgaagtctttttggttttgtttgttaaaannnnnngttatctcaacaatttgagtgtctcttcactcttatttctcctaaagagctattaatttgtt

SEQ ID NO: 829 - DNA, 561 bp, Canis familiaris
  misc_feature (1)..(561): n = a or c or g or t
ctaggctgntagcatgggtgttctttccctagnnnngctgtaagcagatgaagccaaaaaggnnngctagttcttnnaagaagaggtccactgaagctcccagacatttggggccagacgccagatcagcaaatggaggaacctcggagtagaccagaaggatctccattggttgcacaaggctgtaagtagtgatggtcttagcgagcatgatttgatctgatatgaaatactgtggcagagctactgttttctgaaagtgagaagcaattcttagtttagaccaacccttaaagagaacttttggcagatctggttggcagtggtgagacacatctagaaaaagctgctcatggaactagttatgggaatggagtttaataacatttgtaatttattacactcatggctttttattgattatagtattgtctgactttactatgattccttcaacagaaaagttaactcttgtgcatatattgaagtgtttttcctgctatgaattctttaggatagagatttatttaccaaatgtgaattcttttgaggaagtatgaa

SEQ ID NO: 830 - DNA, 505 bp, Canis familiaris
  misc_feature (1)..(505): n = a or c or g or t
catcaactantacaagggccagtatatccncncantgtctgaggacatcgtggatgggcatgaaaganntatgctcanncggctcnnnnnaatcgactccaagtgtttgcacttcactcccaaggactggagcaagaggggaaaatggtgaccaggcactgtctatagcagtggcaacaaagcagaactggggctgacagcacatcccacccccaccagggcccccaagaggcacacaagggaggtggggctgaggacagcttcataaggagaggacaggcctggtaggggctagctgcccagcaccaaggcgagctcagggctcaggtcaactccaaggtcaactggctgcaggtctgggcctgctatgaagcagggactggacggagccaagcagctatgtacagtgagatggggggtgggtgcactctgtacagagggctagtggctgtaaaaatttcttttgtaagtannngttgggaggaggggtgggtactggcagcaa

SEQ ID NO: 831 - DNA, 577 bp, Canis familiaris
  misc_feature (1)..(577): n = a or c or g or t
agnnngcatcagcannnccttgagcagtancagcanctgctacannnngtctattcccctcttcancttccttttcaaatggnnnactgtnggttctccctgaagtgttttttacactgggtgttcaagtttattttaaaagatagggagggaggggaagaatataaggggaatgcatacattgctagtaacatttttaaaactaacattttggaatagtgtttatgaaaatctttaactggcttttaatcatttttaacaatttgaacagtttaataaactgtttgnnnctgctgtattctgaatcccaggcctttaggcatcatggcaggtgcgggaggagctcagtgcaaaaatcactttgggtcctgatgaaccctttagagaccagctttgcccaaggctgccgaccaaacgcttagggaagattgataccagcttcagtctctactggattagccctactctttcctttcctattatttagtgactctgtaagttaaaaaaaaaaacctttattatctagttgttaagtaattataatgaaatctgctgcaaataccctcttggaatcatt

SEQ ID NO: 832 - DNA, 301 bp, Canis familiaris
  misc_feature (1)..(301): n = a or c or g or t
gcagctgcctgcatcttcacaggnngacggggtggcacaggtgcccaggacccaccggctgatcacgcttgctgatcacatctgtcaaattatcacccaagattttgctagaaaccaagtttcctcacagcctccccagcagcctcccacttctacattccaaaattcaccatctgctttggtgtccacacctgtgaggactaaaacatccaaccgttacagcccagaatcccagtctcagtctgtccaccatcaaagaccagggtcaagggtctctccagagnannntgtggacaaatct

SEQ ID NO: 833 - DNA, 616 bp, Canis familiaris
  misc_feature (1)..(616): n = a or c or g or t
gtaatgccagggggtggcataacagacagaaatctacaaaggatccttgagggttcgggtgctacagaatttcactgttctgctcggtcagctagagattcaggaatgaagtttcgaaattcctctgttgccatgggagcctctctttctagctcagaatattctctaaaggtaacagatgtggcacaagtaaggactttgaatgctattgcaaagaatattctggtttagccagacctctctgagaaacatggatatcacaagatgaaggtagaagagtagtctgtaattctctctgatatagctttaaccttcttctctggccaggacagtcacagtctttaagtctcacacggccatggagaatgtttccaagaagacaaagaagtcgaacaaagctacaatcacttcctttgcttaatcttgccagccatctctgttatcatggtttaatgtggtctatgcttatttgacagacagaggtttagtctgttttgcagaattaattgatgaactgggaaaactgaactgtaaggtatgaattcaggtgtgacttcagggtcaatttaataacagtattttgcttttctatttataaaataaaaatttccannnn

SEQ ID NO: 834 - DNA, 687 bp, Canis familiaris
  misc_feature (1)..(687): n = a or c or g or t
aaaatgatgtcagaaactttaaantnctaaagaagctnctangtagctgcttttaatcaatctatattatatagtatgatgtaacgtggccattttcttttagattttgtgcaatatttaacattgatttattttgtaatcatttaaatattaatagatactacttaaaaacaattagacttttaggtaaaatgtaagaacttggtctgtttcttctcatataacattgattttcgtacgtatattaatcatggaggactgtagaaaaagtttaagcgatcttgccgttttagacttaaatgcaatatttcacatgctatttacaatgcagagattttttttgagtaattctagcctttaaaaatgaacgaagtccttctaatgttaattggtgacgctgccgcatagtgagtgccactgagaaggtcaacagctgcagcttggagttgtgggcaccatacaccgcaagactttgatacttcagtgtgaattgccacttgtcttgtgctgacgagctacacgagcatgatcttgttaatgcattttttggatgggaaggaaacgtaaatgtttaggaagaggctttatgataaggatggaaagcgacttcttgcttgtacatacgggggctatactgctatattatttagcctgttaacactgtttaaaagtttaaggattttctct

SEQ ID NO: 835 - DNA, 484 bp, Canis familiaris
  misc_feature (1)..(484): n = a or c or g or t
gtggaggaacgttggtagttgaagagctcacgtcttggatttcagaatggctacatccttttaagaggattgttcaactcttgggtanttgtgtttatttttaaatccctttccagggcaaaattaggcttagaaggaaaaagcatgcatccaaatagtgttgcacctgttcttcagactggtatatatttagaatgtaagtagtagtgttcgctgatatatatatatatcatatatgcctacggtgaatagttaggaagatacggtgttgcaggaaggaagactggattaacttagggtgtcttcaaacaaatatatatttttttagtttaattttgaattagttatctttgattctacaaagttagtgaagctaaacttttaaaaaggacttttatatatcttgacactttatcaagtcttcaaaaaacttaattataaattaacacctgttagtcaattcaatgttttagaattgtgtttt

SEQ ID NO: 836 - DNA, 422 bp, Canis familiaris
  misc_feature (1)..(422): n = a or c or g or t
atgacggnnnnnagtcgnnagggnacgccatgnaagtcagctctgaacacgcggcccccctcccagagcccgtggccgaacggcggacctacagccacagaataccttctaccatctgcttcggtcaaggggcgtcgcgaggatttaaaagcagcaagaaaaaaaagaatcagcagtgaccatctggtcagaaagccacaggcctccaagcagaccccaaggggggcaggtgacctccacaggacaccgtgtcagtagtgcgatgtctccgccttccgcatggctgccccgagaccctggtccctgtcaccctggatgtcggtcctcggcgaatgaccacgtgaccgcgggaacagtgacggacccaccggctgtgctctggcgagtgcagcggggaccannnnngcgccaccctctgcagg

SEQ ID NO: 837 - DNA, 579 bp, Canis familiaris
  misc_feature (1)..(579): n = a or c or g or t
tgtgaggaccaggggaaagcacagcttccacagggccctgccnctgnnnnncgagaatgtggcttccatnnnnngctactgatgggatgtgagcagagatcacatctgcagtcatcctgttgcaagatgatttctgttgcctctctcatggatgtggttatttgagtgtaatgagatgggcagagcctgcttctgagcctcatgagagacctgggtccaagtctcctatggaaccaaccaccttgcatgtcacctgccctgtctcctctcacaagtggctgtctgctagttttgattttccagattcttggatcagaaacaaaatgaagattttttctaaagtattaccaaacgtaatttccaacaaaactgcttttgagacattgcctcagaacacaagctatggtcagcactgccctcgcctggggcttacattccttcttccattgactggtctccgccctgaagccgtccacatactgcatgtccaggacagtcctgccaggagacaaaacccatggcctgtcttggccatttgttgaatgaatgtatagacatatgttttttattagctctatg

SEQ ID NO: 838 - DNA, 564 bp, Canis familiaris
actcaaccatccaggtggtggagaatggggagtcccctcagggccgattttctgtacagatgttccgttttgccgggaactacgacctggtctacctgcactgtgaagtgtatctctgcgacatcattaatgaaaaatgcaaacctacctgctctgggaccagattccgcagtggaggcatcatagaccaaagccgcgtcctgaacttgggtcccatcacacggaaaaatgtccaggcagtggtctcaagggctgcttccagcagcttggggttcctgaaggtctgcctgcctctgcttctatcggccaccctgaccctgatgtttcagtgattggcagctggaaaccctgtgctctgtggcttcatttcctgctggctggggatgatgccgcttagtgctccagccacagaaaagggaactcacacttcagtcacctgctcctctttccccacctttaatcctcattatcacaaaatatcttaatatctttaaattctgccttctttcaaaatgggacttgtgacatgtgtgcacatgaggccccatgtctccttaaagattg

SEQ ID NO: 839 - DNA, 619 bp, Canis familiaris
  misc_feature (1)..(619): n = a or c or g or t
atcaaatatggcangatttgatgggctagaatatggtcacaggtgtgacattgatgtgtctactgaagccatgtatgctgcnnccaggcgagaagggtttaatgatgtggtgagaggaagaattctctcaggaaattttttcttattgaaagaaaactatgagaattatttcattaaggctcagaaagtgagacgactcattgctaatgattttgtgaatgtttttaactctggagtggatgtcttgctgactcccaccaccttaagagaggctgtaccataccaagagttcattaaagaagacaacagaacacgaagcgcccaggatgatatttttacacaggctgtaaatatggcaggattgccagcagtgagcgtccctgtggccctctcaaaccaaggattgccagtaggactgcagtttattggacgtgcatttcatgaccagcagcttcttacagttgccaagtggtttgaaaaacaagtacagtttcctgttactcagcttcaagaactaatggatgattgttcatcagtctttgaaattgaaaagttagcttctgtttctctaaaacagtagtgataaatatagcatgcaaattaaaataacttaaannnn

SEQ ID NO: 840 - DNA, 460 bp, Canis familiaris
tctgctggcagcattttccgagttccaagagaagggtctcaagattcaatgggttgatgacacacacgcgctcggtgtctttccctgcctggcctcagctgctgaagccctgaccaaggagtttcctatgctcaagatccggcccctcacgcaaggaaccaagcagtcaaagctgaaagccttgcagaggccaagtaaggaagccacttgtgtcctgatgggaaggctagctcctgcgtctggcgaaggtgagaccgcagaccaatacagcggtggccaggaggctggtggcccgggccctggggctccaacacaagaagaaagagcgacctgcagttgagtctcctacctccctgaggccctgaggggcccagcaagcctggattggcacccccaaggactagactggtgccccaacaccactagcctttcctgacactacaatagccctgtactgttt

SEQ ID NO: 841 - DNA, 589 bp, Canis familiaris
  misc_feature (1)..(589): n = a or c or g or t
gaaggctgctcggacagnagcccgaagcccgcactcctgcgtgtagaacacannaggcggcctgaggtaaaacagcgctggaggagcggtcagccccagctacgcggagaagggcccttggtgtgtacatcccacccggcccgtgggcccagggtcggtgccgttacacacccgctcccggttgaccatgagctccggaggccctagacttgattcttgtcacaccaggatcgtggagcccagccctcacctcaccggggcagacctcctgactagaagggcccagcgcccctcgctggcgtttgttttgtttttttttttcctctgctcaccgcacccagctcccaggatgtttcctttggtcttcgccagccctgccaacactctcttgcctgctctctgctctgtaccacagtgtgaagtccctgttgaccagcccgcctcagctttcccaccagtctttgttgttccccagagcggagcagcacacagcctaaaacagggcaaggcctttcctgggcctcaggttcctcatctggtcccagatatcnangacccttgagcggcnnnnnaacggctgtcggtccta

SEQ ID NO: 842 - DNA, 291 bp, Canis familiaris
  misc_feature (1)..(291): n = a or c or g or t
taggtcaggctcgtgctgcagctgcccacatggagaatgggtcagcatccttccccggcnnngcatcccaacaagcatcacatgtagtccattcattctgtgatcacccacactgcccttcctcctgttgtactgttgtagaacattacccatgtcaggaggctgacatcagcctctnttctacatgtctaatccagattccatataccagccaagcaatccttctaaaatgcaaatcatggggcgcctgggtggctcagcagttgagcgtctgcctttggctcagggagt

SEQ ID NO: 843 - DNA, 619 bp, Canis familiaris
  misc_feature (1)..(619): n = a or c or g or t
atcaacatggtgttgctcaaangagccaaggnncctgctcntagtnngcagatcatcccttttgtaatctgagagttttagcatcttnctaacatgctggagttgacntgcaaaaagatcttacatannnctngtgaaacatccacccctactgagaactctgccttttcaaaacagcaaccgaagactgttgactttcgggggaggggagtttgaaagttgtaaaatgttgtggattatcaactctctcctggaagaaactggttttaaaaaatatcttattaagctgaatacaaattagcttggtggtaggggatttcctacccaaagttatagagctattctttactgcattgtagaccttttatagtcttgcttttcgcatttggttttagnctgctctgaactgatttttgtgaaaagtatgagatagttcagttgaatgtttttttttttttttccatatggataagtggtggttgtcccagcaccactctatgaatgacttaattctttcccactgatctataacaccagctctttcataaatgaagtctacacatgtgggtgactcactnnnnnatttgtctagcctnnnnncagtactatacaagcctga

SEQ ID NO: 844 - DNA, 680 bp, Canis familiaris
  misc_feature (1)..(680): n = a or c or g or t
tcctagcgctcaaagaatgcatccgagctttgggtcagaacangtctcacaccccattcagagccagcaaactgacgcaggtgctccgggactcctttataggncagaactcctccacttgtatgattgctaccatctctccaggaatgnnnncntgtgaaaacaccctcaacactttaagatatgcaaatagagtgaaagaattagctctggatttaacgccccaccatcgttgtgtctatccggttggacctgaggtgccacggatgttggaaaatcacattagaaattcaaaaacatcccttcagagggatggatttattaatatacctaatatacagagtgaaaaggaaaaacaggctaaagacatcgaaacattatccactccgttagtggaggatacagggaggacttcatggaaggaatcaagccaatggccagggaacaacatccaggagacagctggtgagggaaattacgatgctgatttttgcattgcccagttattgtccattttggatcagaaaataggtattctgactgagattcaaaagaaactgaaattattacgagctgacctccaaaagaagaccaagtataatggagccaatggtaagaggtcagatctgaaatgatggatacactgctgtggcccctacctctcttataaaagaaaatgt

SEQ ID NO: 845 - DNA, 584 bp, Canis familiaris
  misc_feature (1)..(584): n = a or c or g or t
gacnnctcagccaggcttggacaatgagcctgccaatgaagcttctagcgccccatcactcctgcctactctcccaggaccctannntcaaaatcagaaatatcagaggataaactatcagatttgtatgtagacagagctatacctggggggtggggccaggagtcagcctggctctcaagccctggtcccagggcagcctggccccatctcccccaagttaggaaggagttaaggcctgatgaggagggagggaagaggacacaagctgggggcagaggaaactggggtcaacaggatattcaaagcggccactcccccacccccctctgcttccgctccctccccgcccccccactgccagtagccacaacccctcccccacttaaacaatcctctggccagggacccaaggcagggtgtgcaaagaagagtcacaaatgttggagcagagcaggtagggattccctgagataagcagagggacccctggagacaaggaggagagtccctctgggccccggaagcccactgctctgggtgccctgtctgggggaagnnnnnnnacaaaggggggtctgttc

SEQ ID NO: 846 - DNA, 434 bp, Canis familiaris
  misc_feature (1)..(434): n = a or c or g or t
cccctgnnactgatgccaatccctcctgcaccagcattannnnnnnngcttcgatttgtatgcacaaatgaaagatttttatnnnaccaccattgtttngaaaagttgtgtaaagtgtgcaggtgcaagcagggggagatgcagaaggagaaggagagaaaatcccannnnnagtccatnnngagcataaagcccaatagagagagnnnaagcaggagcagcaggcagaggaagagggagaagcaggctccccactgagttgagagcccaagtaggacttgatcccaggannntgggaccatgacctgagccaaaggcagaggatcaagtgactgagccacccaagcacccctcatcattattttcaaatggattgatacaaaattatttatagtattaataacttatctatagccatgggtacacccagctgg

SEQ ID NO: 847 - DNA, 581 bp, Canis familiaris
  misc_feature (1)..(581): n = a or c or g or t
caaaccatcatactgtacaccttaaaccttatatactgatctatgtcaatnnnnnnntaannnnatggggggagggggagaaggatgaaaaccaatatttgaagctgttgactactaacaaaaaagtttcattcactttctttatagcgcctccagaggcattttttccaaggccttataaggaaaaaaaactgatcgacacgttattctttaaacaactaacatcttctaacccagcaaaaagctatggagattttccttcatatactttttcacccaagtttctaaaacgtaggttgaaaaattggattatgaatctgtgatgaacagagcttcagatcagaactcctaagagatcctgtctccagtgatgttgcttcatttcttttactggtgctaggtatctttcattttgaagtgagcttactccagttattgcaagtttatgatattatcatttgtatctttaaacactgaagttgttttaaaaagtcactaagagatttgttcttttattattcaattgcaacaacaaatctgtatgatgattagaattttaaatgtacaattcttttccttct

SEQ ID NO: 848 - DNA, 522 bp, Canis familiaris
  misc_feature (1)..(522): n = a or c or g or t
ttctttgaggccagcgncaaggagaacatcaatgtgaagcaggtctttgagcgncttgtngacatcatctgtgagaagatgaacgagtcccttgaacccagctccagcccggnnagcaatgggaagggcccagccttgggggacaccccaccccccgagcccagcagctgcagctgctagaggtggtccccaacccctgcccaccccttttggccttggcagggactgtgacagaggcatgagccacaagggctgtttccaagctcagggcacccccttccctccggtcagctgccccgactcccgcatggtctccagcttgcccaggcagccttctcacaagctccannccctggggatcctgcactgcaggcagagtctggggatgttgacatgcacgagcttgctgcttttcaggaatttgaatggagggaacatgagcagcatgtcccaccccgcctggtggaggggtgtccacagtgccttcggggttgaaactgttgtcctcatccattctgtttg

SEQ ID NO: 849 - DNA, 609 bp, Canis familiaris
  misc_feature (1)..(609): n = a or c or g or t
tgtggtctgtacgaagannnataaaagcactggcattgnnnnngcatcacggatcatgaatttgtaccaatttattcagctttataaagacatcacaagtcaagcatcaggagtattggcccagagctccacctctgaagatcctgatgaaaactcatcatctgtaacatcttgtcaggctagtctttggatgggaagggtgaagcagctgactgatgaggaggagtgttgtatctgtatggatggtcgagctgacctcatcctgccttgtgctcacagcttttgtcagaaatgcattgataaatggagtgatcgacacaggaattgccctatttgtcgcctacagatgactggagcaaatgagtcttgggtggtatcagatgcacccaccgaagatgatatggctaactatattcttaacatggccgatgaggcaggccagccccacaggccatgaccttggggtgaaggtcttctgttgctattatgagctacaaacactttggtcatgggagaagaatgcagggatattgtggcacagacacagagaaatcaattttcctaccctcttattttcgctattctgacaatttgttccatttcttttga

SEQ ID NO: 850 - DNA, 631 bp, Canis familiaris
  misc_feature (1)..(631): n = a or c or g or t
agaataatgtngaataaaatgntngtcatnnntaacttgccctggactttatnnatntacttatttttctaatctatttcatatttctccaggttaattgaagtgtagatgacaaaattgtatatatttaacgtgtataatgtgatgatttgatccatgtgcatattgtgacaggattaatcctcatacttactttaaaaaagaatatttctaatgtttctttatttagattgatttttgctcaaatggttcttaattgaactaaattcctttttattctgtttctaagagtgtattttaaaaaaattatgaacaagtttggaatttatcaaatcattttctgtgtctattaaaatgacagtatggttttctcttttaataagtaagtgtggtatcttacctttatagcttttctagtgttaaacttcctactcattcttggagaaaaactaatttggtctcaatgtactattttttaagtactatgcattcagttttccaatactctgtttaatttttcttctatattcatttgtgaggttggactaaaatttttctctttctcttcttctggttttggtaataaggttatgctaatattacaagtattacctctttttctattctctga

SEQ ID NO: 851 - DNA, 614 bp, Canis familiaris
  misc_feature (1)..(614): n = a or c or g or t
tcctctgtatctcctgatatacttttttcttttccgtagaagaatatnnanngcattgtttgacaggtagaaactcatgcatctgtagttcatgggttatatcctggctcagtcgagtggtatttaatatattatttttggttttccttcagtgtcttatattaagattaacattagntgctttgtttattaatctcctattggtgttttaataaatgagataaccttgcctttagatctgtgctcatattgactgcttgctagaattgggtttgatcagtggaatagttggtttaatgacacatttaggcttattcattgaaatgttgtactatatggctttaaaagagggtttattttgggcgtgcatatttagaatgctctgatttaagtgaattacaatgggaatgaagaacagaactggtatttgctgataaattcttacataggcaaggtgcccggtgataacaccaaccagaccatccctatctgcatgattctgaacatcctgatgcctgttgttttgtgtatattttgtttttaatatattaacttttgtggattcatttaaagtctgctcaaaagtaacactgttgaaaccactaaaatgtatg

SEQ ID NO: 852 - DNA, 683 bp, Canis familiaris
  misc_feature (1)..(683): n = a or c or g or t
aagctgcangactactccattttcaacaagtacctnnagaaggtggtnnagaactcagagnncgaggagatccacgaggtgatttcacgctacaagacgctggtaagcatgcaccaggacctcatgcagtcggcgcannagggccaggagaagatcgagcgggccaaggcgaggctggcgcgctacatggaggagaaagatgacaagatcctgcagcacaacaacgaactggcgcgtctacagatgcgcttcgaccgagcccgcagcgatgtcatcatctgggaatctcgctgggcacacatccagaacactgcagccaagaagaccctcttgcttggcaccattaagatggccacactgaaccttttccagatcgtgagcaagcagctgaaggagaccaccactgtgtccctggaggacacgcacaaacagctggacatgatccagcaatttatccaggatctgtcagacatctgggcagaggtgaggaagaaggaacagcagcaaatccgggtttaaggctgcagttctagaatgttctgagacagcaactcagagagactaagttcctggtgagcttgtggtcccattagnnnagcccagccttctgggaccccccttgtcgnnctgctagcgaacaccctgtgctatgtcccccatcaggcctccaaccatccccatcc

SEQ ID NO: 853 - DNA, 505 bp, Canis familiaris
atcattaaccttcttgacgccgaatgggaactagaggccagccagtcaccgacgcatcaaagtgcagagaatcataggaatcgccgagaggagacaaaaagcacccaaaagacagttcttgcctttaaaaacgtgtaaggcaagatgtcagtgcaaatcccgtggacaaggttacatttactttcttgccttgaacttctctctttcccttttgcaaaagacagtggactaaggggtcagaggaggtgggggcgtggggggtgggagggggagtcgagatcctcagtaatctatgaagtgggggtgtaggcggatctctgaacgatcagggcccttacccatcttcgtaaaagcatagggattaagaggacaggctttgaaaatagatgaatctgagcctggtcacttgaacctttccaagtccctgtttccttatctgtcaaacgggagctacacggctgctctccggtgtggccgaaggatttagcaagggcttggcaaagag

SEQ ID NO: 854 - DNA, 563 bp, Canis familiaris
  misc_feature (1)..(563): n = a or c or g or t
ctgtatgcttcatccccnnagagggtcacagnntgcannagcaccacgtcgtgctcgtgcagggtggnngcacccaggacctgcctggcgtgaagctcactgtcgtgcgtggcaagtacgactgtggccatgtgcagaagaagaagtgactgtccgggccgcagcaggctggggttcacccagaacaggatctttctctctggaggcctgcagtattcttgggaagcttccagttctggaagcnnctggtcctgggtttaagtcctggcttcgcctcttccatctggaacactgcttgcccataggggttctggatgtgagttaggaaaagcacccctctgtccacacccttgccttccttgtgtagtgcattgactcgagggacctcttctgctgagataaggaaggccctgtactgctgtctctgggaaggggttgcaataaatacagacacacacacccccatggttgtaatgtgaaccctcttgcacaatatttgcctgctgcgtggtattagccactgacatcccttatgggcttcagttttctccagaaaatagctc

SEQ ID NO: 855 - DNA, 566 bp, Canis familiaris
  misc_feature (1)..(566): n = a or c or g or t
tgtgctcttctccaacttctggtatcactnnnnnnccaaaggcanacggctgccccgtgtacntcaaaacnnagctccaggtancgccaaagtcaaggccaactgagaaacgtggcctagctaggtgcccacctaagtgcctcaggactgcaccttgggcagcatctgacgtcctccccgcctacaccggtgacctgtgaccagggccctgtgtggtccggactgagcagggggcaggccctcccctccccacagctggcacacagggaccacggcttccgtcgctcacccgcttctcccagccagctccgaggacacggccgcaccaccctctgccactccagagccgggggctcaagggttgggacactcatcttcccctcccggccttaaacttgggaggggagcactcaggactggcccccaccagggtcttgtggcctttttcctcacactgaagaggtcagcaataatctgtcactctggacccatgacccctcctccttctnnagcccacactgaagcagaagcttcttgaccaaaggtcagagtgggtggggggcctg

SEQ ID NO: 856 - DNA, 555 bp, Canis familiaris
  misc_feature (1)..(555): n = a or c or g or t
ggagttcaaccctgccctggcaccacagagatctcccccagggcccccaggagctggtgctgaccccccgtcccctcctggtgccgacccttcccggggggctcctgtaggaggcaggtttgaccgacaggcttctgcggagggctgcttctacaatgccgactacctggcggcccgggcccggctggctggtgaactggcaggccaggaagaggaggaagccctggaggggctggaggtgatggatgttttcctccggttctcagggctccacctcttccgggccgtggagccagggctggtgcagaagttcgccctgcgtgactgtagcccacggctcagcgaggagctctaccaccgctgccgcctcagcaacctggaggggctggggggccgggcccagctggccatggcgctgtttgagcaggagcaggccaacagcacgtagcaggccccggggccctgcccctccatggagttcccctgtctgccagccttgggaagggtgaggcaaaatggatggacagatggagagcttgttgctgtnnnntttta

SEQ ID NO: 857 - DNA, 409 bp, Canis familiaris
  misc_feature (1)..(409): n = a or c or g or t
caagagcttgcatggtctatttagggaggatggcnnntttcaccaaatgcacactcgatacccgccccctcccccttgtaggttgcaggagctggtgttgggagaggctgctggagaatggtggtaccatgtcttcccccttcacctcgatcctgcaaggagagagcctgcaaaattatcatggaaagaaagcttattcaggatattaactttttctagtatctaagacccttaaaagcccagttctaaggagaggcagctactctggatgagggtgatttgggggtcatccatactggctgcttatgttctgtgggtggaaaagcaccatcaggaaacactgcatcagaaccaacccatcaggactcggcctcgcttctccttccctaannnngnggtctgtttccaa

SEQ ID NO: 858 - DNA, 627 bp, Canis familiaris
  misc_feature (1)..(627): n = a or c or g or t
cccggtgtacagcctccctccacaggacagtctgcnagcagacctgtcccaggctctgcagtgaaaaaaccacctgtttcccagaagctgaccctggtggcccctccaggtggtccaaatggagactccagcggtgggacccagggagtggcaaagctactgacctcctccctgaagtccagcgcggttagcagcgtgacatcgtctacctccttgccaaaaggaacgagtggggctgtgctgctggccagctcctcgcccttaaatctgctgtctgcatcgtacaagtccggcagcccgaaactgcccggagccatgaattccaactccttggggatcatctcccagtttcctctccatgtgctctccttcagcgccgaatcctctgccaaagcaggggtttccaaggatgctattgtcacgggtcctgctcctgggacattccatcacggcctcaaccatagtctcctggctggcttgcactccagcccaccccgtgcagcgcctctcccacacgctgccgtgtccacccacatcccgcaaagtctgccagatgcttctcaacttcatggaaaagggcctggtgtaccacggaaattgtgacctcttcagaggaaaggcccgact

SEQ ID NO: 859 - DNA, 611 bp, Canis familiaris
  misc_feature (1)..(611): n = a or c or g or t
cattggccncctcaagctcgcatgggcagtcacgtacaacaagtacgtctggcccatctgcctgcctggcttggactttgaggtgaaggacggctccttctgcactgtgacaggctggggactccccagggttaacggcatatggccccagttccagaccattcannagaagggggtcaccatcctgaacagcaaggcgtgtgacaagatataccacaagatctccaaagtccccaaaatggttcggatcgtggactccaagatggtctgtgcagaggactttgacagggagcagttttgctacgagataagtggtgagcccttggcctgttctgtggacaccatgtggtacctggtgggcctggtgagctggggccctggctgctcgaagagtgaggccccacccatctacctgcaggtcacctcctaccagcgctggatctgggaacgtgtcagtgggcaggaccttcccgccccatccagggccctgctcctggtgctatcactgccccttggcctgctctcggccctctgacaccctcatggtgtccctggggttgctgtcctcaccctctgtgctcaggatcctgcaggtgttgctcccctggccc

SEQ ID NO: 860 - DNA, 592 bp, Canis familiaris
  misc_feature (1)..(592): n = a or c or g or t
actgtnngcaactgttaaaagannctgtagcanncgagtcaaaattcggcgagctcatccagccctattttcagaaggagatggcagtccctgacagcatcatcatgaaggtgctgagccagcgnntgagccagcaggactgcattcagagagggtgggtgctacacggcttccccaaagacctggaccaggcacacatgctgaacagcctgggctaccagcccaacagggtgttcttcctgaatgtgccattcgattctgtcattgagcggctgaccctgagaagactcgatcccgtcacgggagaaaggtaccacctcatgtacaagccgcctccgaccctggaaatccaggcccgcctcctgcagaacccgaaggatactgaagagcagatcaagctcaagctggatctgttctacaggaatttcttggagctggaggagttctataggcaggccaccaccatcaacgctgaccaggacccgtacacagtctttgaatacatagagagtgggatcattaatcccctgcccaagaaagtcccctgatgtgctccaagcaaggagcatcccccagggaaacaaagttaatg

SEQ ID NO: 861 - DNA, 558 bp, Canis familiaris
  misc_feature (1)..(558): n = a or c or g or t
aaagtatnnntcccttatcaaaatgatgtactacatgnnngctaattgaatttanntaanaacatttataaaaatgaaagctatgactgtaaagacaaaaaaagccctgcatatattgcaacaaatccatactttcctaccatcccccaatatttattcattacaaaggtttcagtaaattatctcaactttgttaactaatgaccttgtaggttaaatcctgataaattttctaaatgaaaaaaaatcttttactccagatttttccaatatattttatgaaaaaattcttcctcataaaattgctctagtaacacagtttataccacctgctatatatttagaagggaaacaggcaggtaaatggaccacattgtctgactttctttacttttgtcatttcagactggcaaagaagtttagaaataaaagttaaaagcaccttcaatttgtgtgcaacttagagatatacagctgaactgtaccatgctgagcacctttaattttatttatttgaaaaagaaatagagatcctgcngnnatggtggcagccatgct

SEQ ID NO: 862 - DNA, 634 bp, Canis familiaris
  misc_feature (1)..(634): n = a or c or g or t
agaggggtngaaaatacttcttgactcgtgctctgcatctaaggtnctgnnnctgttctacccaccccagcatcttctgcaggcagcgtgctgactgcagtcacaggaaaccagaagggagagccctccccctggactccaagctttacggcttcatcgactgttcctgaaattattcacattcttgttaagtctgaagagactgcagaaaagatttaaatatttataagaatcattaggaaataatttctgtaggttctgctggggaacgtagtttgcttggtgttttaaatctgagtacagaaacggtaaaaacgtggaattcgcgcaggcctccccatttccccgggaccctgggtcctccaggaaaggccactgaaggtttcccgtgtgtcgcctacaggcaggctcaatacatctgttcctgtcactttgagagagtccgggttgaaggggcagcatccttgcgtcccttggtgcgcagtgggggtcctgggcccccagaccttcccggcgccctcggcagcccccccatctggcctgcccaccgttgtctgcgccgacttccaccgacttttggttcaagaagctcccttccgggccggcgggagctgttattttcctaagtgcaaat

SEQ ID NO: 863 - DNA, 561 bp, Canis familiaris
  misc_feature (1)..(561): n = a or c or g or t
ctgtgttactatctttnacccgttgtgtgtctttttcagcatttcnnnnaggtttctatgggcccttcatanncnctgcatgcctctgtatctcctcatgcccaggcagaggcaaacagagaccatgatgccaaagctgcaagtttgggagccaggtgtccgggactgacccagagagatgcttcccactgtgctatttcaggctcttaggacatgggactgtggaatctcagcattggaagagagagatcttaaagctcagctgattcagcttctggtacctgaatcccctctgacaccagcaacggcatccttatcgagtgcatgcccataggtcatcagaagattgcaaccaaatgcattgcacacttaatagactgcagtgtagtataaacataactttatatgtactgggaaacctaaaaattcatttgattttattgcaatacttgctttgctgctgtggttcaaaaccaaacctgcaataaatctgaagtatacctgtatatatgtatatataaacatgaatatattaaataatacaattgtatcatgtatatg

SEQ ID NO: 864 - DNA, 595 bp, Canis familiaris
  misc_feature (1)..(595): n = a or c or g or t
angatgttttctcgtgctnntgnnnactcagccatcgggctgtnncaaagagaaatcagactagcaaatgccagctggctttcaaaatcactcttcctctnnaaccacaacccttatcctacaatcaagctcttgtgtcttgacccctcttacatttnnaagaactcctttccagtaagctctttgttcctccatgtaaatagaaacacagctgtctggcctcatgagccctcgaagcatgaccagactttctcaatccccagattaggttaggttttgctgattttatcattaattgcagttctaactcatcagccatagctgactgaaatatcctggaggagggtatagggtcagaggaaagagcacctgcatcagttaataccatctgccagaggtacaggaggcaggggatggtaacaggaaatctcagtgttacccaagttgagcctgaactgaggccagagggtgcagcaagatcctagcctgcgaatccaggcaactgaaggtgacgagttaggagtattgtcaggactgtgtgtatggcagccaggggcatggtgtggggatgagaagaccgaaatagcaaatacgc

SEQ ID NO: 865 - DNA, 577 bp, Canis familiaris
  misc_feature (1)..(577): n = a or c or g or t
gaatggtgtgtggaaaatggaatccatattcagaaaagttgaagcagactggaacatggtatatttagnccgaagggaaggatcatcttatgcttatatttcctggaagttcaagtgtgcatcagttggnctaaaagtagataatgtttccattagnnnaagtagtcaaacctttcagactggaacaatacagtggaaattgcgatctgaaacagcccaagtagaactattgggcgataaaactcttcgctcatatcatgatttttctggtgccactgaagttattttggaagcagaattaagcagaggagatggtgttgttgcttggcaacacacccagctgtttagacaaagcttaaatgaccatgaagaaaattgtttggagataattataaaattcagtgacctttgagaacctgaacattatagaaaatctggcaaaaatcatggacttaccgtgnnnaaagtagtctcttggttcagtgcatgcttagttagcaatttactaccctctgctagcattatttcttctgctggctatccatcatgtaccccctcatgaaaatatatctttata

SEQ ID NO: 866 - DNA, 655 bp, Canis familiaris
  misc_feature (1)..(655): n = a or c or g or t
angagagctgctgccttgtgactttcctnnctgtggaaggatcttctccaaccggcagtanctgaatcaccacaagaagtaccagcacatccatcaaaagtccttttcctgcccagagccagcctgtgggaagtccttcaactttaagaaacacctaaaggaacatgttaaactgcatagtgacacccgggactacatctgtgagttctgtgcccggtctttccgcaccagcagcaacctcgtcatccaccggcgcatccacactggagagaaacccctgcagtgagatctgcgggttcacctgccgccagaaggcctccctgaactggcaccggcgcaagcatgcagagactgctgccactctgcgcttcccctgtgagttctgtggcaagcgattcgagaagccggacagcgttgcagctcactgtagcaaaagccatccagccttgttaccagccctacaagagtcacctggcccactggagccctgtcccagcatctctgcctctgtgaccctgaggtctggtgacaagtccaggccttcgggttcctcagactctgactgtactccctcagcagtgagcatccctgggctctgaggagccagaccccagggactggagagaagtgccagggagtgcagggtgggggcaaa

SEQ ID NO: 867 - DNA, 628 bp, Canis familiaris
  misc_feature (1)..(628): n = a or c or g or t
atcannaggtttccctcccaaaatcagacattgctccaacttccccaccaccatctgtgacagaaaggactgccattggnctacttgctctttcaaaattgctatctattcctctccaaaggccctcaaagccctgtaaaacatttaaaactttagcctttatgtcaaattagagaaaccaaacaatgtgatggtagatgtgataaaaacctgagtttattttttctcccgcttatgaacgtgtatttatatttgccgaatgaatatcgtggtgtgtgcttcggtgaatgggatttcaggctctccccgtgcacagccagtgggtgaaggtcaccttagatgactttttcttcccatctgtctgttaatccccaaaccagttgctttttccagttgcttcccgggtgtctgtacatagtttgtctgtgtataggagcgctctcctgtgttctaatttaacagatgatggctgtatgaggaagacaatgtaaatagaatacaaattaaactggatctctatggcctaggttttgtacatacagaaactgcatggtatttaaattattgtttgtctctgatgatgtatgcagtttctttaaaaacaaaccaaaaaaaaaaaaaaaagtnn

SEQ ID NO: 868 - DNA, 620 bp, Canis familiaris
  misc_feature (1)..(620): n = a or c or g or t
cgnaccatgatnnaagatttcagaaaataccggaaaatggcccaggagctctacatnnagcagaagagtgaacgtctggaattgcgannaggcgtngacaccgacgagctggacagcaacgtggaggactgggaagaggagaccatcgagttcttcgtcactgaggagatcatccccctgggaaatcaggagtgacctaagcacagggtgtccccacgtcttgtgctggaaccaggttgtcctgcgagaagcctgcacaatgcctgaattctcacctgtgctttttcttgctctagactgtgctcccggactcccccatcttccacacattactgtgcctttaacccctggtctccaccgcaggggaggatggaaggcactactttaaattttttcttgtttggggtttttaaaatcacgccaccagtgtttgttactcacactctcgtgcactgccacagtggcccctcggcctcctgaagtgcacagccgagccgtctcccctcaaggacttgtctgtcccgtgtgcgtgggccagtgtggctgtgtccaggacgcaacagggaggcagcactccacagtgtcctggtgccattcaggttgtgccaggttctctcaac

SEQ ID NO: 869 - DNA, 610 bp, Canis familiaris
  misc_feature (1)..(610): n = a or c or g or t
cttctnnngctcctccacactgctgcagnaccaccgggtgcacagcggnnnnnnnnnntacaagtgcgatgactgtnnaaaagccttctcacagagctccgacctcatccgccaccagcggacccacgcagccggccggcgctgacctggggccctgccaggggtggggaggtgatgggcaggagaaacgggccagggagctgagaaacctttagagggaatagtggaaaacctgggggaggatggaagagttgagggccagggtggaggaagttacgtgccctggagacttctgggaaatgggctatgaagaggggttggagagaggccaagcaggcagtgggaggctctgggagagatccagaaaagaggtcagtnnnnagctggcctcagcagcagcatgccccttggtgggtgcctggcttggcaaagctctaggctggggtggggggaggggggagggttacttaattagagtgggtagcttagattggtagctactgagaccctggttgagtcaggaaggggtgagggtaggtggggtggggagtggggccctggggtggggcttgggcctcagtgcaaactccagcctccnnnnnttcctcag

SEQ ID NO: 870 - DNA, 475 bp, Canis familiaris
  misc_feature (1)..(475): n = a or c or g or t
agggnnncttcccgaacnnnacaaaactggggaatggagcnngcctgtctgtgagcaaacagccaatgatgannnagccccgtcctggactgtcgccatcgtcctggcagcctcggtgtgcgtggccctcctgctgctcggctgctccgccctgctgtggtgcctgtacaagaggaccaagcacgtcttctcccccaggaactgtctgcctcagcatctgaaagagtttttgggtcaccctcatcacantacccttctgtttttctccttcccgccctctgatgagaatgaagtctttgacaaactgagtgtcattacgcaagtctccgaaagcagcagacagagctccggcaacagctgtactcccgggaccccgtctgggcagggatcctccgagctggtccccaaggagggagnnaacacacaggggtgcagcacccccctgcttctctcgcctgccactgagggtcaccag

SEQ ID NO: 871 - DNA, 525 bp, Canis familiaris
  misc_feature (1)..(525): n = a or c or g or t
atctttgcgnnngatattcagcctgttgtcatctgtaaggcaggatggtggccattcgtcagtgcctgtggggaggaagtgaggctcgtctgtatgtggtggagcagtaccctgtctcttgttgaattgtaagctgtgagaaagcagggaccaagactattcctcacagttacactgggtcgaagaagaagctaaatgtttaaacctacatccctctcccttgtctggcctctgggcagggttaccctcaaagcatttttccagccaagtgtgctgttgtctctccagccaacctggggagtaggttctgggtctcccattagtacccgatcctggcagttccataaaccctcacttactgcttttaaaattgtatgaacggttcactcgggtaaaaaacaactttaagacccaccaccacatgggcattcactcagtgtcatgatgcagtcttgtctggtgtttttctnnnnnngtatgtgtgtgtcttataaaattgatgtcccgccttatgtgtagtttttt

SEQ ID NO: 872 - DNA, 562 bp, Canis familiaris
gaaagaaaaaagcgacttgaggagattatgaaaagaaccaggcgaacagaagctacagataagaaaaccattgatcagagaaatggagatataaccaagggagctctcactggaggaacagtggtatctgcactcccatgtgtgacaaactctccaggaaatggagaaccagtggccagcccacacgtggttacctcacaccaatcagcagtgactgtggagagtactcccaacttggaaaaacaaccaagtgaaaatggagtatctgtgcagaatgaaaatttcgaggaaattataaatttacccattggatccaaaccatctagattagatgtcgccaacagtgaaagcccggaaattcctttgaatccaattctggcctttgatgatgaagggacaattggacccctgcctcaggtagatggtgttcaaacacaacagacagcagaagttatatgagcatttcttctgaagaaccaaagcagaaatttaacaagaatttctacaattaatggaatttcttccatgctataaaggagcatccccttcctccagttttcta

SEQ ID NO: 873 - DNA, 598 bp, Canis familiaris
  misc_feature (1)..(598): n = a or c or g or t
taaagcactgagantgctgccnactatcnnngctgataacgcaggctacgacagtgcagacctggtggcccagctgcgagctgcccacagtgaaggcaacacaactgctggcctggatatgaaggaaggtaccatcnnagatatnnnagtactgggtataacagaaagtttccaagtgaagcgacaagttcttttgagtgcagctgaagcagcagaggtgattctgcgtgtggacaacattatcaaagcagcaccaaggtatctacgcaattatgttaaccacccgtgttccgttatgccgaggcacctgtcgagccgtagggagcagctgtccggccccgacatttcctggtgccagcctcgggcacaagggtccttgccagcgggatgtgggcacaagtgacacgcgtctcctctaggcctggctcatgtagaaccaagcttgccttcctccactcccaccccgtctgcctgccggatggcaacaccgcagggtgaccttagacgcccccgtgtggaagtcacacgttgaagccggcagggcctcggtcaccccggatccccaaataggcgccaggatcggaacacgtctcctgtt

SEQ ID NO: 874 - DNA, 611 bp, Canis familiaris
  misc_feature (1)..(602): n = a or c or g or t
cgcacgaactcnnggtnnggacggtngnaggcactcagtcgacgaaggtagcgtgtgaactgctggctgatgactcaggaagaaaacagctcaaaacttctctgtaactcggagaatgagtacagtggaccccttcaaaagcagagcaaggtgtgtgggcttttcagagagctgtatacctgacagtgcgttcttcacgcatggggaacgtctacctcgagcacaccggctccaagtgccttctaggtaaccaccctgtgggagctgacctccctcctgcaggtgcacacctggcctcctgcagctcagcctgtgagacggcgtaggggaccacctgccaccacaagtcacagctccacggacgcagtcctgttctctctgaatcatcaagtgtctcagccaactcagccccaaaggtaaaacagaaccaaatatgccaccaataagtaaaagccctggattcactgatactaccttgcaatgtggccctttgttctgaactatgagtggctcaattacctgtaaggctgttaacaagtcggccggccggaagctgtaagatggtaacatatatctttacagagttgttcttttcaagggactatataaaa

SEQ ID NO: 875 - DNA, 549 bp, Canis familiaris
  misc_feature (1)..(540): n = a or c or g or t
tnnngactcaancactcactctcttcccccacccagtaatcaccccccactctcacccccacnnngggtggnctgactccagcaacccaggcccctcagagctttggntccttctctgggcctgattttctcactgaactccaacccaccaactgttctgagcccctggggtggccagaacccaggttcaatgctcaaagtcccagaatccaaagcttgtttgagaagttcagggacggaccagggagatgggacggagatgaggacactgcttgctcccctctcgaggatgttcagctggctttggcccctgcttgggagcaccccatcccacccacacaaccgccctagctgactcctgagaagtgctcttggctgacccctctggtgtgcggtgaggggctttctcttccccttcctgtttcaaaccctccaccacctcctcacgtgggtgtggggggctgggggtggtcccagcagagagttttattattctcgctttatgtttttggttattggttttttttgnnnngaccaaagcaaagaaaa

SEQ ID NO: 876 - DNA, 496 bp, Canis familiaris
  misc_feature (1)..(496): n = a or c or g or t
aactgctccntataattnngatagtnnnantgctttctcnaatttgacagtgggaccacatnnagtannatctgtcatttgtgtnnattcatttcagatnnctgggnnnattgatacatctttgtgtctctcagaaagggtagcaggtggagaaaagtaatttggtacttaactataggcctccttatctagtgttttgactatcagtgctggaaagaaatctatgggatgttaatacaatacactcagctttcnagattatctccttcccttatgctgtgatttactttaatgtataagttatggtctcaaggtagtacaggtagcctgagtgtctagaggcctttagatataaaggaatctagccagtgagcataattctcagtactaaactgtcacaaggaagaagcttacttaccctgtatatcagggtccaaaaaaaatcaaagatgtgcctaaatagtttataaagatttaggccagtcaaaagctaaca

SEQ ID NO: 877 - DNA, 688 bp, Canis familiaris
  misc_feature (1)..(688): n = a or c or g or t
actanngcagnagacttctannagtctttggggatccnnnaccacattgtgaatanngtctcaggtnnnnngaatcacgctgccagtaagaagcttgacctggaggcnnggtttccgggctcaggagncttccgtgagttagtgtcctgttctaactgcacagactatcaggctcgccggctccgaatccgatatgggcaaaccaagaagatgatggacaaggtagagtttgtccatatgctcaacgctacaatgtgcgccaccactcgcaccatctgcgccatcctggagaactaccagacggagaagggcatcgtcgtgcctgagaaattaaaggaattcatgccaccaggtctccaagaactgattccctttgtaaagcctgcacccattgaccaggagccatcaaagaagcagaagaagcagcatgagggcagcaaaaagaaaggggcatcaagagacgtccccctagaaagccagctgcagaacatggaggtcactgattcctgaacattccttcctcccagtttgtcaggctttcatttctgtccactgggatctcagagcctgcccacgggcagggaagccaggcacccactcatcacccgccccatctgactgcattgctaaaaggggaacagtctgccatgtacaacgcgatgttcctgtctccttgcatgggcatagg

SEQ ID NO: 878 - DNA, 547 bp, Canis familiaris
  misc_feature (1)..(547): n = a or c or g or t
agnagtgaatgagctgttgatnnnngcccagttgctccaggtatcccttcctgaaattcannnncttnaccagactntacntgcaaagccaacccctgctcagcaaactgaccgaagctcaccagctagacccagcagtgagaagaatgagtgctgccgcgggaagagagatggaatcaacaatcttgagagaaaacttaagagacgcctggaaagagaaggcctctccagtgatcgatgggatcgagtgaaaaaaatgcggacccccaaaaagaagaaaatcaaactgagccactccaaggacatgaacagtttcaagttagagagggagcgtagctatgaattagtccgttctgccgaaacccattccctgccctcagacacatcctattctgaacaggaggactctgaggatgaagatgccatctgcccagctgtgagctgcctgcagccagaaggagatgaggataacctgctgcattgccatcgagggatggaattgtgatgtcatttgatgtattccaggtgagtggaggccaaaggacta

SEQ ID NO: 879 - DNA, 644 bp, Canis familiaris
  misc_feature (1)..(644): n = a or c or g or t
cagctgacnngtcaacgcgtaatgagttccgaaggttcatggagaagaatccagatgcttacgattacagcaaggctcaggtgccagggccactgacgccagaaatnnaggcacggcaggctatgcnnaaaagggagcagaaggctgcccggaggcaaagggaggaacagcagcggaagcagcgggagcaggaggagagggagcaagaagagcagcggcgttttgccgccctcagcgatcgtgagaagagagctctggccgcagagcgcaggctggctgcccagctgggagtctccaccccgcagacacccggtcctgcaaccctttgtgctcagcgctgctggagttgtgggacatccctccaaggcctcattccctttcactatcttgacttctctttctgctccacacgctgcctccgggatcaccgctgccaggccgccaagccctcttcctgacctctttacagctgcacctgggccaactctgggccctgagagggtgcattcacagtagccctaggtttcttctttcccgtgaaaccggagtatttggaagattaagaaggacactcaggaaccagggcaaagacagggccatagaggggtgtggagctggtactgtctctggaactttaatcgtaa

SEQ ID NO: 880 - DNA, 529 bp, Canis familiaris
cctgcgccagatgcagcgcaaagccacctgggagaaggagcggaaccaggagctcaggcgcctgcaagatgaggcccggaaggaggaggggctgcggctgacccagcgcctgcaggagctagagagggacaagaacgttatgctggccaccttgcagcaggagggtctcctctcccgttacaagcagcagcgactattggcagttcttccttccctcctggataagggaaagtctgtggagtccagccccagggacccagggtcttcagcagctgtgcctctggcagcacccaccaccagggagtccataaaaggatccctctctgtcctgctcagtgatctgcagggcctgagtgaggccatttccaaagaggaagctatttctcaaggaggcaacccgaactgtcctgctccagtgtgtggctgaacagctggggactctgcctctgggggctcagggtgaacagctggggactctgcctctgggggctcagggtggggggccggccagctgccctcgtggatacca

SEQ ID NO: 881 - DNA, 490 bp, Canis familiaris
  misc_feature (1)..(490): n = a or c or g or t
ttcgnnnnnnnccacaaatgtttannnggnacactatgtagagannnagngaatgtgtgtgtgcaagtgtgtgtgtcaccgcntggcacatggacgggcatggaagagctggtggcatcctgcctgagcacaactgagcccctgtatcctgtggtgggtccagggcccaccagcatctggtgttgctccttccccaccccgggagcgtntcctgggccctgctgggcaggggtctgcagccctttctcagnnacacaccctgatagcacaatctccctggggcnccgcccacctccaggcctttcctggccccaggccctggtcccctggggagaaagggcttctgcagcaggaggggcctgagcctgccccagtctctggcccatcctgcctgggcatccctggttctggggaccatgccaggccatgcttgctgtgattccacccctgcccctcctcccccgcatgtgggtgccccctgccccccatt

SEQ ID NO: 882 - DNA, 581 bp, Canis familiaris
  misc_feature (1)..(581): n = a or c or g or t
tagngagaaacattcaccatcattcccctccctatcctgacaccannaagaggcacttgtgtagacaatcttgaggtgtccttgtttcactggttccgtgtttgacatttgtgtgaagtaatgcatgcactcttgtactgtggtgtgagaacaaaactaactgcattagaatctgttaaaatattagatatctttagtgacttgtagactgtggcaaatatagaaacatgaattctgaacacattccatagtctctcagacatcaaaaaatgtttttcatcgtgttctttgttcccctggaagttcacagtcccaagttcgtgagttaatttggttgccttcctcagccttggttccttgtgagttttgatgtcttagtgacttagtccataggatgctcactctgtattttgaagcagattctccttgcaggtccctgaaacattgtctacatgttcataataactgagaactgtaggtaggaagatatgtagggaccagcttgtagcagcaggtacaaaggaaaagagcagctggagagtgagaaaatgtgttttgtgcatcaaatacttgtgaacatg

SEQ ID NO: 883 - DNA, 668 bp, Canis familiaris
  misc_feature (1)..(668): n = a or c or g or t
gtncgctcacancaccagttccatgtgnnttgaaatccgctttccagtccctnctttcctccatgcaggnntnngccttgtgctgttctgctctggttccaagagcagcagcagcagcctcgtnctagctgtggccggcaccgggtctcccggacacagtcccaggtcccatgcccactccacgtctgcactatgaccgtggccaaccttctttcctcgccagctagtcttgggtgtcctctctctgccccaacccacacctgccttcttcatgcctcacacccttccagccccttagctgaaagcacaattggtgaaatcagtcgtcatccccatctctaatatactaaacctaaatgcctctgtggcaggcggcccctctctacgggtttggtgttaccttctcctgggggttctgctacaacacaggctccgcaggatggtcaagctgtcagacatccaagtttacatcattgtaattattacaagtattgacaatttgcaagggtttggggttggttgttttgttttgctttgtttttgtacaaaagagtctaacatttttttgccaaacagatatatatttaatgaaaagaagagatacataaatgtgtgtactttcaaggttttttttttttaattattttaatcctaaacatcttcctgag

SEQ ID NO: 884 - DNA, 485 bp, Canis familiaris
  misc_feature (1)..(476): n = a or c or g or t
ccaggatcctgttcccccagaaacaccatctgatnctgatnnnaagaagaagaaaaagaaaaaagaggaggatcctgaacggaaaaggaagaagaaagagaagaagaaaaagaagaaccgacacagtccagaccacccaggcgtgggcggctctcaggccagcagcagcagcagcctccgctaacaggactctactggaagggcttttcctgctgtcctgaacctgctgacaaaagctgccttccaggcccagactctgccgtgggagcgtcccctgcaaccgggatagaagccagctccaactgtgctgggctaagattaacacattatatgagaagggccgtgcttttgtaaagctcggcccagttggctttctcacggacatctcttcctctcctgggaagctttcttttcatctcttctgtgcaattggtctgatttaggacattgtctgatctgttagggtttttctnnnnaaaaaaaaa

SEQ ID NO: 885 - DNA, 705 bp, Canis familiaris
  misc_feature (1)..(705): n = a or c or g or t
acagtttgaaatactattttnnatcaagtttnatnnaaatgcagaattttgttttacttttttttttnagctatgttgttagcacacggaacacttcattgttgttttgggggaagggcatatgtcactaatagaatatttccaaagctagattgataacgagggaaaaacaccttccccttctagttttgagaaacttnntcttggctcccaggaggagggattccttgatgttgacacacatgagccaccttggtggtgtggaaaaactaaaattcatttttttatgtcctcttctccctctctgccttcaacatagacttgactcccttaaacccagagacctgttggaacctgatcccatgaaatggttcccagtatgtcaggcaatctggactttacggtgtcaccactgagatggcgtccctcaaaagagttcctttttttagcttgtggatcttcagattgataattctgccattttcatttcatttcctgaaagtcagggtcggcttgtgaaaagttgttaaacaacatgctaaatgtgaactgtcaaccctcactctaaactttccctgttcagagcatcacatgaagacttcattgggttttatagtggctttctgattttggtagtccattgaagaagggagtttgaaagttgttgtatactgttaacgatcgtccgcccatgtcctgcctgaa

SEQ ID NO: 886 - DNA, 504 bp, Canis familiaris
  misc_feature (1)..(504): n = a or c or g or t
ctcccgccgnnnaacaagctgacacgctggcaagccatgtgtgtcaaggannagtgcctcagtgacttcaagcagcgcctcatcgacaaggccaacctcatccaagcccgttttgagaaggagacccaggagctgcagaagaagcagcagtggtaccaggagaaccaggtgaccctgacggccgaggacgaagactggtacctgagttactgctctcaggccatgttccgcatccgcatcttggagcagcggctcaaccggcacaaggagcaggccccgctgaaatacctggctctggaggaaaagctccacaaggacccccgcctggtggagttcctgaaagtctttgtttgatgcccctcatggggcctctgccaaagctaccagagcaagaaacctcccccacagcctggccaccaggctacctactcccagcaaatgaccaccccctcgggcatccaaccgcactgccacaccacctccctgcaccccagtctgctcctg

SEQ ID NO: 887 - DNA, 588 bp, Canis familiaris
  misc_feature (1)..(588): n = a or c or g or t
cattctggcgaagaagagaatgtacttgnnagttcaagggacttcnnacttccacaaagaaaacccactgcagaaccctctattggtnnaggctgagaagaaggtctcctacaactgctgcagccagggcaccatctgcctacaaatccagatggagaagaacaccttcacgccgggggagagggtcatcttcaccacggagatcaacaaccagaccagcaagtgcatcaagacggtcatctttgccctctacgcccacgtgcaatacgagggcttcacccccaacgcggagcggcggtcgcgggcggacagcagtgagctgctccggcaggaggccaacacccagatcacgcctttcaacaccaccaagatcgtcagcgccctcaacctcccgcaggtgctgtccgtgagcagcagcacacgcgacagcgagatcatgagcacccactacgagctggtcagcaccgtccacctgccctggtccctgaccagtgtgaaggccaaggttcccatcatcgtcaccagtgcccctgtggacgcggccagctgccagccggtggaggggacggcgttagccctgagccaaga

SEQ ID NO: 888 - DNA, 597 bp, Canis familiaris
  misc_feature (1)..(597): n = a or c or g or t
agcttnnnagcagcccattgccngnctcaggcatctgctgagtccctggatctggaggaagannnnnatgactgggtcttccctgtgtgtccctggtgagaagcaaggctagctctgcctgccacgtgcttctcaaggtgtggagaagcctagagacccagaaatccttttggaggagcatcactcatagggatgctaggaagggcctacctcctaggcacgctgcttgctctgtcatccccacttcccctctaccactcaacacaagaggctaaggctttgccctggggccaggaggccactctgccacaggggcaaggtcctgtccagtagtcacctagatctggagacttctggcatttgagaaacaaggaaagggcccagcagccctgctgcatccagcacagtctccccagcccacccctgtcctgggcactgcacaaccttcctaggggccagctgccccactgcctaaccccccttgtttgtgagtccttggctgccaccaagcatggtggccattgtgtgcctgccttagtgactcagtggtttcgtgagaggcaaagtatgtatnnnnnntgtttgtttgtttggctc

SEQ ID NO: 889 - DNA, 247 bp, Canis familiaris
  misc_feature (1)..(247): n = a or c or g or t
atattgtttgtgnanaatattttttattgtctcctgtttaannagtgaacagtgcctagtgaagttaggngacttttacaccttttatgatgactannnttggtggagttgaaatgctgttttcatnnngnatttgtgtagttcggtgctttgttcaaagttaagtgttttcnnaaaagtatgttttgcatgtatttttttacnnnnnnnntnnnnnntnnnganaagtttcnattgtacaaanntt

SEQ ID NO: 890 - DNA, 531 bp, Canis familiaris
  misc_feature (1)..(531): n = a or c or g or t
gagatggtgnngggggcacanntgagagtgactgccccacatgtgctgcttggccccaggaacaagctcaatccatnnnangatcaacacnnnnagggaggtatgattattataatcannntgcaaatgaagaacttcactgcccagaggccacaggctgctcgggactgagaggacgcttgcattcggatgcggagccggctctcccaaaggcttagtctaganctcccaaagtggaggctnngtcatnnnngcacagatggtctgctgcaggcagccaaggcacagcacgcctcacgacnctgnnnctcagagacgtcccacagctcctgatccacgttgaatgctcctgcgggcattggctctgtggtccttgtggcctatcctgtgaatgtcctctgntggtccaagaaatgcaagnnnnnattggcatgggagggactgtctgtcggtgaccccccaggcgtgctgagagctcctgagcagtctccagggtaaaatcnctgcatcaagcccttttatacttgggtt

SEQ ID NO: 891 - DNA, 434 bp, Canis familiaris
  misc_feature (1)..(434): n = a or c or g or t
taacagcctgtggacannnctgcatcttaaccttgtttttgactctccatgtgccccatcccaccccccccacccctgattgaaggcatagtcacactttctactatttaaagttttgcagaaaccgtattgtaacgagccgctctccagacaccagttcttcacgcagagagaatcagaaacgtttctgtgtcttactaatgttttcataatcaacttgtaagtagtttacttaattaaaaaaaaaaggtattttaactattcttgtaaccctttgctactcaacacccccccacccccagttttgcgatgagatcactaacttttactacagtgaaaagacgatttcttaatggagggcttcaaggcgctctttggtgaaaaatatctaaccttgatngatgtaaaaatgtnnnngtggagtcgtgtccgtt

SEQ ID NO: 892 - DNA, 656 bp, Canis familiaris
  misc_feature (1)..(656): n = a or c or g or t
cntatgtttttgagnncatttctgtgtgtctnncgttgatgattaggtgacgaattcatagtccctgcccttgaaggctaatattttaaagaatgatggagaagtaggatgtgatgtaaataaattctgttttgtaagaaaacaaagtgctatgagaatccaaagcacagggtgccctatgccccattctaattacaccactagatagctctgagatcttgggcaagtttctgaacctttctgagtttcaactgcccgctctataaaataaaggggagggaacaataatattgcctaccttgcagggatttttttaagtagtatttgatagaaggcacaaattaagcattttatctgttgtgattttcttaattctcctgactctcctgaagagattgatttcacatttgttctattttagaaacaaaaggttaaataaataaccaaaattctgacagctccaagtggtagagtctaggttatactggggtctactaaacttggagggattgggggggggggacttttttgattaaataagagaatgaatggaaaaagttaatatgtggtaaggcctcaaaatattagctatctttattatcatcaccgtaatcatctttttgtttatatatacctattatttttaaatatgtaga

SEQ ID NO: 893 - DNA, 618 bp, Canis familiaris
  misc_feature (1)..(618): n = a or c or g or t
cagatccgtgtggggaacccatgggactctgatgttctctatnnnnnactccacaccaaacaggcagtgagcatgtttcttgcagcagtggaagatgcaaagaaagaaggtggcactgtggtctatggtggcaaggtcatggatcgccctggcaattacgtagaaccaacagttgtgacaggtctggcccacaatgcgtccattgcacacacagagacttttgctccgattctttatgtatttaaattcaagaatgaagaagaagtctttgcatggaataatgaagtaaaacaaggactttcaagtagcatctttaccaaggatttgggcagaatcttccgctggcttggaccgaaaggatccgactgtggcattgtaaatgtcaatatcccaacgagtggggctgagatcggaggtgcatttggaggagaaaagcacactggtggtggtcgggagtccgggagtgatgcctgaaaacagtacatgagaagatccacttgtactatcaactacagtaaggaccttcctctggctcaaggaatcaagtttcaataaaggtgacggtaaatcagcattacttcaagtcttctaggcattcttgcagttctttgttctgaa

SEQ ID NO: 894 - DNA, 553 bp, Canis familiaris
  misc_feature (1)..(553): n = a or c or g or t
ctcnaggtgttctgnagnaaacagccacttagtgctttgtcctggactctgctcggcctcagaatggggaatagaaaagaagggcagcctccacgcagacaggcaagatcagaaagcggcgaagatcaggaggttttcctttccagagtgggcacgctatctccgaagcccttcccacactgtgaagcccccaactgccctgttgggccacaaacagcattaagggagccgctagaggccgggccaggcctcctggcctgcccatccgcccgccgtgggggcccagagaacatccgaaggcagagaagagggtgatgtggccatgaggaaggcagccttgggtctcctgcctccacagttctttgcctctcgaacttgctagcagtttgaactacctgcggaggaggtagggcaggaagggtgagggcctgcctctgacttgccctgtccttggaggctctgggggaagagcggggctctccctgggaagagggtgggctcctttctcagcttgttctattccccactcacacccccaggcagggttggaaat

SEQ ID NO: 895 - DNA, 137 bp, Canis familiaris
  misc_feature (1)..(137): n = a or c or g or t
ggcatgtcntcccccaagttatgcatgctctttgccttttcataagcaatgaaccattccagttccaacagggcttatggaaaggaagaagtcagcaatatcaagtgctaaagagctggacagaggcacacagtgag

SEQ ID NO: 896 - DNA, 578 bp, Canis familiaris
  misc_feature (1)..(578): n = a or c or g or t
ttcatggtttatactgaattngcnaactactgatattatttttcaataaccacttgtatctatcatcaaccttgagaggtgnnaagaggtacgctgtatctctgcaataaaacttctgccaggttctacctctgctgagcaaaggatacttttatatgtaggcgtagatcttcctcctttactgatctgacttggtgcatcttgagacaacgtgtgatggaatccaaagacaatttgaaacaaaggtggatataaactcttggttgtttttatttggttctctttttttaaatctccctttttatattgctcctctgtcttgaatgtccgttagtgtatgaagggtacgcactgttctgatgatactgcactgcttcattcagccttccacggttaattcagtaccaagtgtccagaagcgattgttccaaccattttgatatgtaactttaaaaattgggtttcatgcaataaaaatgtgttggctgcgtttagcgaggtttacccttgcaagtaaaaaacgatcaaccatgaagcataacaaactctgtatttagttttttgttgtcgtgtttttt

SEQ ID NO: 897 - DNA, 647 bp, Canis familiaris
  misc_feature (1)..(647): n = a or c or g or t
tttccaaaatctgtgtagaataantgacatttttctatcggaagtacagaaagcgatccaagctnntcaaagtgaaaatatccaagatgtttaggaagggagcagcggacttgaccgtgatgcagccttctggttctcgtggtctagtgctccatgtctgggtttagcgtgaaaacattagtttcaccaagtggacaaaaggtttccttgccaggctcgatcttcgaacttgaaactagaacctaactaggcttccactggggcgttggcttcgcagcactagcgcctccatgtggaaggcagtgagggtgcagcctgtcaaaacccacacgctgctgttgcactgggatctgggcagagttaagactcgttttgttttcttttttcaacaaaaatgtgaaaacattcaaagttgaaaagttgcatttgaagttatcatttaatatattcatattaccaaaactgtaatactggaagtggtttctttttgtgttataaaggtttacataagtcagttacagttactcaatgtgatttttaacccttaaaaataaaaaaggtggagatgtatacaattgttaacaatgccatgaaagcatttcctttctcctgaggaaacaaatttcttatcagaatatctggctggc

SEQ ID NO: 898 - DNA, 630 bp, Canis familiaris
  misc_feature (1)..(630): n = a or c or g or t
tcattngaatnggtcannnaataatatggtaatttaaatannggcttnnnnnnnnncaggtttgatttgcntggtnnncaaattacttgtgaccannnnactagctaggtcattcacgngagtcaaattagcacaaaagaaacatgtnnnttttaaatgtagtgataaaatatgctccttcttaaactcttctgttaaaattagttgtaaagaggacagtttgccaattctgaagtactcccaattgctgcagaatatcacatgcttttgatgtcatataggaatcctatttaacttttttctgcctgttttgcagactgagtacttcagtttttagggctcttaatcctttcagaacagtgcaaagaatataagcttccccacaactgaaaatatgtgtatttaaaccaaacccaaaaagccgataacagctgcttagaagtagtatttatttcagaatcatacttgtaaacatgagaataacttaactgtggatcccagtttagctttttttgtaattgcagttatatttatgctgctgttgtattagaatttttaaatgtcatcttgaaatagaaatgtgtattttaagtactaatgcaaaggtaaatgaaaaatactttttaaatg

SEQ ID NO: 899 - DNA, 681 bp, Canis familiaris
  misc_feature (1)..(681): n = a or c or g or t
ttttagcnattactngaagaaataccataatactatatgnnnnnnacatcccattggggtgttattaaatgctatcacagagctccagnnnnnnnnnntnnnnannagcntttnnnnnnnnnnnnntncccagtcaagncagtgtagannnnnnnnngacagttcagtgannnntncagcgnnngcactcacggtncactgaagctctgaatnntcagnnatgccacntgcacatactcattctctgtccggggtcncagnnnagnccttaccaagatactggncctggtttggggggattctgaaacctcaaactaatagaactttcttctcttcttttctagtaggtgtagtccttccttaatttcaattcattaaaaaatgctttatagtatagggcagtggaaggaaggctggcaaaaatattttgatcaaaaaagatggcaatgtgaaggcccagttgtggcagtttttggaaagtaacttgtaaagcatttaccatatcctaaatttgcactctttgcagacttgtgcacatatattccgctttcagaatagttttgcaaattgtacacaaacaaacaaaaaaagggtggaagctttttaataaagaaattgcatttataaatgatctgtattagaatataataaatctccagttatagtcaattactacccgtg

SEQ ID NO: 900 - DNA, 612 bp, Canis familiaris
cgctatttgtattcgctgacttacaaattttgtttctgctaccaaaaggagagctcctagacctgttatggaggccatgcctgccatattggtaaaactatgatttcatccctaccccaaatcatcacaatctttaggatttcagagaaactgtctaatggattaggatagaagctatgattgtaggtgacttgggcaatactgagttccatgtgcaagtggatgtgaaatcctggtgtaaaccaaacattatacttattagacaataacctctgccctcacctccagctcccaagtatatagccctgctgggtcatatggcaactgaagtttcctagattcactttacattcaaggtcatagcccagttgaattggtgggggaggaagtcaaggaggaaaggctattgaagatccttctcctgcttgagagaaatatatgtcctagagctgctccagtacccttggtatatgaattttttttatatattgaatatggattagatgaatgaaatcagatgacatttgactgcaaaaaatgtttatagcttagccttcttacattttggtataaagctgtgaacttcataactttgtaaaagcaagatataaa

SEQ ID NO: 901 - DNA, 629 bp, Canis familiaris
  misc_feature (1)..(629): n = a or c or g or t
gcagtgagatgtgaaaatggtggaatgagcactgggctgnnaatcctgagtcctggcttccaatttggtttctgctctgtgacngtgggcaagtcactgtccctctctgggcacctctgctgcaaatggacgagattatttcagaggtcgctgaagactgtgattccatgcacctgccccagaatgggaggttttcctcctagggggcccccattgcccacccttgcttcttgggttccctggggctgggctgaggggctgggagctggctatgcccgttacccctcgtggaccctcaagctcaccacagacctgccgatgccctgtctactgcctccacctgacagacaagtgccccccttagggggaagggggcctccctggcttctcagccagcacccagcttaacccctgccatcccatgctctgggcactccaggtcgaggggtctcagctggcctagagttacgggcctcgccgctgcgccctcccccatctcccatggagggggcagccaggcacagctgctgtgagcccacatccttgtgtgtgtctgtccacactttttaggcaccatgccaaaggccagccttccggccccaacacccattttggaagcccccgtggct

SEQ ID NO: 902 - DNA, 584 bp, Canis familiaris
  misc_feature (1)..(584): n = a or c or g or t
tgcagacagtggtcttannactcctggaggtttctcatcagtgccagctggaatggagacccntgaactcattgagttgaggaagaagaagattgaggaagcaatggacgnnagtgagacnnnnnagctgttcactgtgttgccagagaagagaacggccactgttgggggagccatgatgggatcaacccacatctatgacatgtccacggttatgagtcggaagggcccagctcccgagctacaaggtgtggaagtggccctggcacctgaagagttggagntggatcccatggccatgacccaaaagtatgaggagcatgtgcgggagcagcaggcacaggtggagaaagaagacttcagtgacatggtggccgagcatgctgccaaacagaagcaaaagaaacggaaagctcagccccaggacagccgtgggggcagcaagaaatataaggagttcaaattttaggtctccctcacacacctggcctcctttaggccttttggatgcttgggcttcacacatggtccccaagagccagctctcccacaattcccaagggcttgtcatttcatgttcttat

SEQ ID NO: 903 - DNA, 620 bp, Canis familiaris
  misc_feature (1)..(620): n = a or c or g or t
cccnnacagactgatgttgnagagtngacntcctgggatgaaganncccccacnngtgtaaagattgaaggagggaatgggaatgtngcaacacaacaaaatgctttngaacaactggaacctgactattttaangacatgacaccaactataaggaaaactcagaaaatcattattaagaagagagaaccattaaattttggcattccagatggtagcacaggtttctctagtagattagcagctacacaagatatgccttttattcatcaatctcctgaattaggtgacttagatacttggcaggaaaataccaatgcatgggaagaagaagaagatgcagcctggcaagcagaagaagttctgaggcagcagaagatagcagacagagaaaagagagcagcagaacaacagaggaagaaaatggagaaggaggcacagcggctaatgaaaaaggaacagaacaaaattggcgtgaagctttcataacagatgttcttcacgtgtcatcgtgccagtaggagagatgtgagctccacaactcaagcagcatttatatggatataagagtattttcagaatnnnnatacattgcttgatnnnnnntgcattcatcagac

SEQ ID NO: 904 - DNA, 574 bp, Canis familiaris
  misc_feature (1)..(574): n = a or c or g or t
tatatatatatggnctgagnnnnagcagtngnnatgagncngnctcacaagagaaactgacagtgaattnnaatgaatgcagtaaatgaatnnnnnctttgtttttataaaggtattttaggtgctgcaaattgaaaaagaagactccagtattttaaattgctatagacacctttaagaaatttagaacccattgtttattgccatgcaaattacaaccttgaatgaatgagtggtttttttcaatatttaaaatcttagaaaaaaatgtgtagtaaggatgcaaattaagaaaatgaaattctgcattaactgtgaattttactaaatatgagtgtctgatgaagcaaatttatccatcaagaccatttggtatgtgttgtgtatgtattctgttggtgctggaagatgtctctgtgcctgtatcaaccttgtgactccatgtaaagattctcaatgttcacagttcttggcaaatgcagttttaatccatataaagccagcagtggatgttactgcaggataatggaggattaaaattgtccttgtgtataacatgtgtgaatttttttct

SEQ ID NO: 905 - DNA, 121 bp, Canis familiaris
  misc_feature (1)..(121): n = a or c or g or t
ttgttacttttctgtgtgtgtgtgtggncttttttgttttgtttcannngacttcaaattcagttgtttggaggaatgaacatcattgttttattctnnngngaagttctnnnatggtgtt

SEQ ID NO: 906 - DNA, 570 bp, Canis familiaris
  misc_feature (1)..(570): n = a or c or g or t
agacatcagataaattgcnngtcncagctgatctccccatcctanngccaccaccccacataccacatcccatgctgtcaagtctgggtaacattttagagccatcagtgttctcatttgctcttcctaagcttaacagggtggaaggcaaaggttactgcttcccttttatggagaattacataacaattacgtttacttcctaaagtgcaaatctgaccccatccctcccctgcataaaactccctaaaggctctgcttgtcctcagggtcatccccacacctgtaggatcaccccaaccccaaccttcccttttgctgtttctggaatgtccatctagaatagcacacagaagctacttcactgtctttgcccagggagctacacttgccttcaggcccaacctggtcccactttcttctcaagatgagcacttgtacctttatacatctctgcctggctgatactagattgtactttttttcaaataatctttttccatgtctcttcccacagggaaaggtgttctaggtccaatgcgattatatccagttgccagatgtaggcac

SEQ ID NO: 907 - DNA, 286 bp, Canis familiaris
  misc_feature (1)..(286): n = a or c or g or t
ttttgtcnnntttcaaatattatttctttaatagaaagtttnnnnnaatttttaannnnnnnnttattaatgatttgggtattcattgctgtctaatagatttaagattaggagtcttattctttagtaaaacaaattaggaagcctttcatgtttacccaaacagaacaataaaacatggcattataccaagcattccctttgaaatgcaaaaaaaaattagcagtaaaattactgggatcggaaaatggaggggagagaagtaaaagaggctcagttcttggtt

SEQ ID NO: 908 - DNA, 273 bp, Canis familiaris
  misc_feature (1)..(273): n = a or c or g or t
ccccccccccccccgccnnncatggactgggggttgcacatggcaggggctgccctgacgccaagtgtgggctgaggtggctcagcttggactgaacccgtctttccctgctccccatccccccacannnnnntttgtggcctgtgcccgccgggtgagccagcccttgtgtcatgtgtatataccgtgccttttctcattagtgtttaggggcgggagggggtggtttttcactgacggggatacacctatggcttccttgatatggaatca

SEQ ID NO: 909 - DNA, 464 bp, Canis familiaris
  misc_feature (1)..(464): n = a or c or g or t
agattatttaagaaagcagcgaacatttccagtgtgaaaatgaaaaggcttncttttaaaatagagttgtcatnnnnaagtcacagcgcagctggggtctccattgtggtcgatgtcattgcttctcaccctgacaatgcngggaggcctgtttgaggggaaatattggtctgagaaatctgtttccctcctccactgtccttgccctctctgcctaggggtnnncctttgggcccctcagnaagatgatcgctgctggctccaaggggaggggnnnctcatnnncagggagaggtggtggcaacctaaacattcaaaacaaagttttgaatgaaaaaaaaaaaggagcatatttattcaaatatcctgaaaatatagggaaggggcggggggcacatttactcacatacaacccagaacttgtattccgcaaaatgaatgtatattgaatcagtcccctgatt

SEQ ID NO: 910 - DNA, 550 bp, Canis familiaris
  misc_feature (1)..(550): n = a or c or g or t
acagatctcgccagaccgaacggnnagagttacagggcttccccnnnnaatcagctcactnnattccactcccccaagtgnnnnngcnnacggatgtcaccccagttctacagacatacacacaacccgttggctgtagagccgaacccacggctacacccagcagtctagggcagagggctgtcttccttcttttcacccgcaggggagagggcggcttcctcactgcacccccgcgggagaactaatcagaaaactggcatggaagcaggttcacacccttcttcccacccccctcccccgccccccactgcccccagccctctgctgtgtgtggccttgactctaggaggaaaacaagacttactgaatttaattcttttactaattgctcagtctgtgcctccagcatgcgtgggggtgagggggccagacccccaacctctgcaaatgctgtatccccaggcttgcaggggtgctgacaaaggctcaggacccaccagacattctcttacctcagagccctccccacactgaggttcagaaggaa

SEQ ID NO: 911 - DNA, 353 bp, Canis familiaris
  misc_feature (1)..(353): n = a or c or g or t
gnccaaaacaaaaaancnnncaaccgaggnnagcttggtatcagggtctctttttccccacttctttcttttgttgctgcccaggccatgcctttattttatgagctcccattttctgggtttagtcagaaacaattcaattctaaacattgaatttaggaagcgtatgttattacattaaaaagtcatatacttaaaaaaaaagaaaaaactatccagggaaatatgttggaaatcatgctactgaggctccattttctctgatgttttggttcggtatttttatcataaaacaataaagcttaaaataataaacttacgcttaaaaatttcctgataggggatccctgggt

SEQ ID NO: 912 - DNA, 635 bp, Canis familiaris
  misc_feature (1)..(635): n = a or c or g or t
accaagataannnctcggtgaacctattngtagtgaacaagccctggcttttttccctgctctggtgtgcaggggtggattcggtcaccaccaatgactgccagctgctgcagcagatgcgataccccgtctggattattccccctcaaacctacctaatgatgtggatcatcaccaactgcgtctccaccctgttgcttctgtggaccttcctcctccaagggagatgtaagaaggagagagagaaaactgggtttcgacctgaggtcgttgggaagacagtgagtcatgggaagttactcccaaaatgaaactaggatggagaaagtgggaaggaggttgccaagataacgtttcagacctgtgtgcacgagttcttgtgtagaaggcacagggtgtgtcagggatggaccagtttggatcagtgactgaaggagatgacagaacagcctttcctggagaacgaagatgatggagacactaattccactccattcgctatctcttctgactccctgcaaatttaactgctttcctgcctagatactgggggcaaaagagcccatgtagccatttaattctgtgcctataggtggctttttgctgcgcacagccttttcttcgagacaggctgg

SEQ ID NO: 913 - DNA, 530 bp, Canis familiaris
cccaagtgaccttttagtaaaactaaggttgtgttttctagtcatggcttatggaacaactgtatttcaccctttattatatgcattcaccagacaaaaatttcagaaggtcttgaaaagcaaaatgaaaaagcgagttgtttccatagtggaagctgatcctatgcctaataatgctgtaatacacaattcctggatagatcctaaaaggaacaaaaaaattacctttgaagatagtgaaataagagaaaaatgtttagtacctcaggttgtcacagactagggaaacacctaagtttcattaagcccacatgcagaagttttacatttaaactgtaaaaaaatgaaattactgccaaacagaagaaaaaacattttaagtattggttatgttgtaaattttcaatgtaaatgtcaagattagattaggtcatatatattcaatttcttcattacaatgtatttgttgcatggcagtttgttaaagtaatattgtgtatattttgtcaatatcatgtccatcagaagat

SEQ ID NO: 914 - DNA, 564 bp, Canis familiaris
  misc_feature (1)..(564): n = a or c or g or t
actataagcagatgagtcaaacaactatgtaaatcacaaacaaaaaaactaaaaatgaaccaangtgaannnnatatgttccaggcagtatctttctattgtaacnngttatttaagggaatactagtgattcgttctaaatannatgtaaaacttgttccaaattactcctcagtcctgcctgccaagagctcaaatgtaactgtgatatagcaacccttcccaggtgtattggcaggtaaatgtgtgatctcagaatacacaggtgacatagatatgatatgacaactggtaatggtggattcatttacattgtttacacttctatgaccaggccttaagggaaggtcagtttttaaaaaaccaagtagtgtcttcctacctatctccaaataaatgtcaaaaaagaagggtgtttgtgcttcagctttgtttttgctcagtaatacagtcaagcaagtttgtttccaanntgannnnnntgannnnnngtaagcttttttgtttatttcaaataaaatatatttgtattatgtgtcattcatactatatccattcatacca

SEQ ID NO: 915 - DNA, 692 bp, Canis familiaris
  misc_feature (1)..(692): n = a or c or g or t
gagatgagcgggtcccccctcccaggttccnnnnnaggtaccgaaggcctttccgcnnnnggccaccccagcagcctaccacagaaggtggggatggtgagaccaagcccagccaaggccccactgatggttcccggcctgagccccagcgcccacgaaaccgtccgtacttccaacggcggcggcagcagcagccccccggacccaggcagtccacagccccagagacctcggcccccatcaacagtggggaccccccccccaccatactggagtgactccaacatgaaggacccccagagctaccatctggttatctgccagtttttccagctgccttctacccaacccagcaccccctcccccttcccagaattcatgacatcagaacaccggctttccccttttccttgagactcaggagggccgaagcaacagccttttgctttttctctctcccctaccaaggggtgaaggaagggatccatcctattgttcagaggcaccagctccctcccctaaatcaggctgagaaggaaccagccagctcttacctcctcctggttgttttctttcccaccccagtttattttttgtctcccccccctccccacaaccccagcccctacctctgaagccattttatgaactgtcatgtgccacctgagcctccagtaaaaacaaaaaacagn

SEQ ID NO: 916 - DNA, 641 bp, Canis familiaris
  misc_feature (1)..(641): n = a or c or g or t
gtgctgnnnagcgtgagttcagnnnnnngggtgacngtctcaccaagatcttnnnnnctgatgnnntgaggggtctctaccagggattcagcgtctctgtnnagggcatcattatctacagagctgcctactttggagtctatgatactgccaaggggatgttgcctgaccccaagaatgtgcacattattgtgagctggatgattgcccaaagcgtgacagcggttgcagggctggtgtcctacccttttgacactgtccgccgtaggatgatgatgcagtctggccggaaaggggctgatattatgtacaccgggacggtggactgctggaggaagattgcaaaagatgaaggagccaaggctttcttcaaaggtgcctggtccaatgtgttgagaggcatgggtggagcttttgtactggtgttgtatgatgagatcaaaaaattcgtctaatgtagttaaaactcaagatcattggttccagatccattgtgtggtttaatagacttttcctatgggaagtaaaaagaaagatctgggataaaaccagactgaaaggaatacctcagaaaaaaaagcttcactgagtgttcattaaaccacaaatgtattttgtatttattttacatttaaattccc

SEQ ID NO: 917 - DNA, 652 bp, Canis familiaris
  misc_feature (1)..(652): n = a or c or g or t
ctccataatgctttgagatgtcaagctgctgttttcccccagttggtggtcacaccaaggaagtcgctttcttgatttattatanngtcagtaatctccgannagccaccagatntcagtannagttatgtaanaatgtctacattgatgaggnctgaatgctgtgtatgcatcctctaaagacagagcatgttnctcaactgggggtacacatcagaatnnngtggagnccttttnacaaataaaattgcctggagattctgaaccagtatgnnnnnagtggggccngggcaagtaggtaattataatgtttacccctttttaaaatccatagcattagagagaaatttgctttatcaaagtgttcctatagcacattttcatgaacatacattattcctgcctctcnnnacaaatataattacaattgatccgttaccaacaggtaaagattcttaactaacatctagcagtttaaattttaagcttgtgttggtgatagagaccaggccngaactatgctgttcccatccagannagaattcttnngttttgacgaccaagccccaaacaaatttgctctattactgtcacttcaaaaaaacatagagtactctgataaaaacagtagctaacaactctgttattcagc

SEQ ID NO: 918 - DNA, 632 bp, Canis familiaris
  misc_feature (1)..(632): n = a or c or g or t
ccactctcntntgccaaagtctnngtccaagctccagatttgttgttaaaagattctgcttgccattctcattatacagtttctccttcagcctggatttctgtgaacgaatgcatgcgtgagtgagcgaatgagtgaacatagagtccctgataggtgccgagcactgtgctaggcgctctcgagcattagaacattttgtgactctggtgccattttctgtgtaagagtaattcataccatcgtaaatgttttccagtatgaattatgttacaaaatcattaattttatatttcatttaaattaaagaggaagagaaatggtttataatatattttaagcgatgtgttactatatagtactaacagctataattgtagttaataactagtctcttggaaaatgtcagagaaatacttgatttctgatgtaactttgactaaaatactttagaaataaataaaaacattcttattttgctatatcacttgaattatataatgaaaaagtaatgttttatagaaatgctggttattttatattcaaaaaattttgtcatgtaagtcatgggtaaaatctgcagttgtaaattatttttcctctgctaagggtcccggtcatnnncccatgct

SEQ ID NO: 919 - DNA, 587 bp, Canis familiaris
  misc_feature (1)..(587): n = a or c or g or t
ctgagccccnnnggcggccaggccctttccagcctttggtggggtcggcagctnctcccgcgggatgggcacgaagggaggcatcccttcggctgctnnntccccgtgggcgcctctgggtctccctgtgtgtgtgtgtttgtgtgtttgtttgtgtgtttgtgttggagaagacagaccactgggctttctaggagtgcagggccagggcggcttgggggcagaaagcagggtgaaaagccactctgggggcctgttctctgccgcgacccggagatcgagagcttggttaacatgaggaggctcttgcacatcgctgctcggattcgggggattcatcagcttgggaggctacgtgtgtcactgacattccccccgcccggaccgccgcngccgccgccccccccccccccatcccgaacttctgtacatcccccagttcaacagttaagagtttcatcctgtcctgaaaaccagctggccaaagtccaccttcgtccctgtgtgggtcccacccggatcctcatcccaggcagggcactgggacagaaatgggttgggaagcagcaaggacggaggggtcaaag

SEQ ID NO: 920 - DNA, 442 bp, Canis familiaris
  misc_feature (1)..(442): n = a or c or g or t
caagaccctagagcgnnacatgtgctccaggtttttcatcgacttcccagacatcctcgagcagcagnnnnagctggagacctaccttcaaaaccactttgccgaggaggagaggagcaagtatgattacctcatgatcctccgcagggtggtgaacgagagcaccgtgtgcctcatgggccacgagcggaggcagactctgaacctcatctccctgctggccttgcgcgtgctggcagagcagaacatcatccccaacgccaccaacgtcacctgttactaccagccggctccctacgtcagcgacggcaacttcaacaactactacgttgcccatcctccagttacctacagccagccataccctacctggctgccctgtaactaaccttgagacctgagggtttccacagtaggaacccctcactnnnncaagggctct

SEQ ID NO: 921 - DNA, 599 bp, Canis familiaris
  misc_feature (1)..(599): n = a or c or g or t
atganngcaatatatnnnaaaaacttcngcaggtcagcaagagatgctttcaatctgctgatgagaaatattttaaaaatnncagttatggataaagttacagactttgtactaatcctgggaaaaattctagttgctggatgtataggcatgctggccttcttactcttcacacaaagactgccaacgattatagaaggaccaacatctttaaattactactgggtaccattgctgacagtcattattggatcttacctagttgcacatgggttcttcagcgtctatgcaatgtgtattgatacaattttcatctgcttcttggaagatctggaaagaaacgatggttctacggaaaggccctattacatgagccagtctctgctgaagattctgaaggagccaactgtgcgaacgaagaagcactaagaagtgcaaactggggtcctcctgatggtgcgttacctcctcttcatctgtgtctgcacaacgcctggttcataagtgctttgtgttcggaacactgtattcaccttgttggcttttatttgcatgtttaataccaaagcttatactgtaacacgtgaagccatcggaag

SEQ ID NO: 922 - DNA, 504 bp, Canis familiaris
accaggagctcatgacttactcccatgacaatatcatctgtgggatcacctcggtgtctttctccaagagcgggcgcctcctcctcgcagggtacgatgacttcaactgcaatgtgtgggatgcactcaaggccgacagagcaggtgtcttggctgggcatgacaaccgtgtcagctgcctgggggtgactgacgatgggatggccgtggcgacggggtcctgggatagcttcctcaagatctggaactaacgctgacagcaggtagacgtcgtggcgactggaagatcattccaaccttgaagcgttacagtgatagcatttccaatccacccctactaacgtggacgccctgcaccccctcagaacttcaaaagggcaagaccttttccttcacttattgctgaaatcaagagcacaattcccacgaagagaagaacctctgtgctgtaaactcaaacaaattgtgcattcctcccgggaccattgtctttgtttccttttt

SEQ ID NO: 923 - DNA, 534 bp, Canis familiaris
caggtggttacctaccccggacactggagctcaacagctgaattattaaaaccaaatctgtgtcttcatcaaggatggtgcaaaacaaataccagttaagcaaagcctcagctgggttttcgtttctgtgtgtgaaaatatcattatgactatttatttcctcagttgaacatgaatagaaagggaaactgttcttcttgagccttttttttttttttaggtccttttgcgtaaatcgtacatttgtattggaatgtactgtagagcctagatttttctcttgaatagtgggtatagtctccgcaatgggaaccatgacaggaatgtacaatttccatactaagtagcatttctggctctctgtgctaatattgcacatttttaaaacaatgaatgaatgcatggatggatggatggatggatgaaacatgtactactgattattttattactgagttctcaaaatatttgtggttcatgttttgggagcttataatttttttgaaatgtactttgattagaaaagcaaatgga

SEQ ID NO: 924 - DNA, 557 bp, Canis familiaris
  misc_feature (1)..(557): n = a or c or g or t
gcagaatgannnnnntgatagtaatgatcctggtnngtctatcatggaaataaagaaagataaaaatgtaaagtgggcatcaaaagcatctgtgattacaccaggctttgannnggccgattccctaactggtagtctactacgagtgagtaatgacaacagtctaagtaaaatggatcaggatgaaagaagacctgcaaagaaaacatctaaggaaaagaacaaggtcaaaaagcaagtgaattctgcggagcatcttgatgacgagcatcttgatgacttaactcagtcatctgaagcagcttcagaggattgcaagttgcaatactctgattataagagttccctgttgttcattgaacttggcatggattgtaaagattctgttagcgtattgacaatccagaatgcaattcttaaatacaaaagatcaatagaattaaaaagaaaagactgtgaacaactnnaagaaaaattttacaagtggaatataaggtcaatggactagaacagttgctatcagaaacaaaagaaatgaaatctcagttagagcatca

SEQ ID NO: 925 - DNA, 626 bp, Canis familiaris
  misc_feature (1)..(626): n = a or c or g or t
aggaactaaagataaagaaggttgaactgnatanntacagggaannnatttcacaggtaaaagaaaggtggcttaatcctnnaaaagaactnntngaaaaaannaatgaaaaattcagcaattttttcagttccatgcaatgtgctggtgaagttgatctacatacagaaaatgnnnnnnactatgataaatacggaattcgaattcgagtcaaatttcgcagcagtacgcagctgcacgaattaaccccacaccatcagagtggaggtgaaagaagtgtttccaccatgttgtacttgatggcgctccaggagcttaatcgatgtccatttagagtagttgatgaaatcaatcagggaatggacccgatcaatgaacggagagtgtttgaaatggttgtaaatactgcttgtaaagaaaatacatctcagtacttctttattacaccaaagctcctgcagaatcttccttattctgagaagatgaccgtattgtttgtctacaatggtcctcatatgttggaacctaacagatggaatttaaaggctttccaaaggcggcggcgccgtatcacattcactcaaccttctcaataaaagaaaagagcagaaacggagcatttttgg

SEQ ID NO: 926 - DNA, 441 bp, Canis familiaris
  misc_feature (1)..(441): n = a or c or g or t
gnnatatggtcacgtttgcaaatcatcctcaagctttgcatcgccgttctccgcccgaatgcaaagatacgtatgtccagatgtgtntnnnnaacttctgtgcggcagaaaataagtaagagaacgcaaaaggtttcccgttctgccagaggctgtggtttaaggggaaattgttctaatttcctgctctctttcagacaatggaagaatatatgaacaagcctacgttttagctgcgcgacggttgaagacgccccgtgccagacgctgcgagcctgaaccctagcagcgcccgtgacggctcttcgcagtctcaggcatgatgccaaaaataactcaaaagggattttttgttaactagcagcaagttgtttaacatgtttagcactattacatgtctgtgttgtactgcacacccctacttggtgtagctctgggtgt

SEQ ID NO: 927 - DNA, 500 bp, Canis familiaris
  misc_feature (1)..(500): n = a or c or g or t
taaagtgggaattgggttaantgagnnagtccagcancggatttcttangctggacacttggcgtgtgggtggtagtcctttatggggagagttcaccccgtgtgttgtaggacgtgtagcaactcccggttgccgcccgcccacagccattcacccctgttgcccgtgagtcacagtgacaccaggtgccaagtgcctcctggggcacaggcgcccccagctgaaaaccagtgttctccaaagtcaggctgtattgtagggggggaaatctgcaggaagattaatgtccacatgagattcggggtgtggggtgnnnnnnnnttcgtatttaaattgtacctcgacgaatgcatttttttaaaactcttgccatagatttctcggacctgaaatcttacaacagctgtattatcctcgaatgttgtataataaacactgggaagatgaaaaattatttaacagagctaaatgttttgtgaattcagtagaaaagcccatt

SEQ ID NO: 928 - DNA, 593 bp, Canis familiaris
  misc_feature (1)..(593): n = a or c or g or t
ttgcancagccggtccccatcttgcttcagggtgatcntnnggccctggggcccaggtggnnggcatgggggggggggtgtcgcctgccccattgtgctgctgtagcagaatagtcatttcttcttccttctgctgggcagctnnnaggtaccctaacccaaatctctgtcttctcctgccaatggctgacaatagctgtaggtgtagttgagaacttttctgcctcctgctgtgttcttgctgctcagggtagggtggggggctaacagctggtgggaggggagctgggggccgagagaactgggcagactcaaggtggctcctctgcaaagccaaggttggtttctgcgggcacatacccatgctacctttgtggtcctgtggtctcctggcccctggtggacccctccccttggccctactccctggctcacccctttctccgatccacagagctcgtccgtatggtgctgaatggctgaggacgttcctggtgtgcccgagccccgtgccttcccccgtgtgagactgcatgtagccccgaaggcgtcctaggtcctcttgtcacagcacctttgccagcttgtctctc

SEQ ID NO: 929 - DNA, 536 bp, Canis familiaris
  misc_feature (1)..(536): n = a or c or g or t
gtgtgccccgcnntcgattgagaattnctaggatgggtgggtatgattccagtcaatgggggaccgccaatgcccaagcacgagcaaaggagaggaggaagatggggtcatcctttgtcatcgaatcatctctccaagtcagagagtccagctggagcatgggggcaggttcccccatggcagggtccttggggcaccccttcctctctcagctcctcccccatgtgcaacctctcgctcagtccctcccaactcccaacttatacagggcttgccccagttcagaggttttggggttcagggtgctgtgtctccccttgtctgtgcccaggttgccccaaacccttctgttattagggctatgggaagggactttttttttttgccttggaatctccccttgttctttacactgcccccaccctgggccccagcctcgtgcagatgtgccaccttgcagggggggcatgggtggagcagagaggactcccctgctccaggcagccaaaggcagtgggcagaggagacactgcccc

SEQ ID NO: 930 - DNA, 560 bp, Canis familiaris
  misc_feature (1)..(560): n = a or c or g or t
caggatgtgcgcagcgatcccgattcacagtctgaccatcgctctgctgcgcgnntcttgcacatttctcttggccctcccacggtccgccaggatggagtcatgatcccctggcgcaggaggaactgggatgctgagcgtttgagaaatgaaggaccaggatatcaacctctcccagtcagatggcaaaacccggcttgtttcactgcacagaaagcaacgtcagctccgtatagaagacccgggaggaggaggatgaagaagatccaggaggcacattttaaaaatctgaataaacatctactgccacggaaggagacataacaaagagaaaggcttagaaatggagtcaaggaaaccaaaaaggcaaaggggtgatgcttcttcatgggaagaatcagagggagggttgtttggaactgagatgtataaagttgtccattccagcctcctgtctcgatggatggcgtcatcctctgaaccagaaagggtcctcccataaggcaggatacccaggaacgtccaagggtgctgtctccacacctaccattcgcctactg

SEQ ID NO: 931 - DNA, 672 bp, Canis familiaris
  misc_feature (1)..(672): n = a or c or g or t
cgaaatccgnnaatgtcagggaaaaagttatcagttttattgagaatacatcaactcntgtnnaccggcatgtgagcagcagtgacagagtgggcnngccttaccgtggtgtaaagcctgttttcagcattggggatgaagaagaatacgacacagatgaaattgacagctcttcaatgtccgatgatgacagaaaagaggttgtaaacatccagacttggataaacaagccagatgtcaagcatcattttccttgtaaagaagttaaagaaagtggacacatgtttcctagtcatctgttggttactgcaacacacatgtactgtttaagggagattctttcacggaaaggattggcttatatacagtctcgacaagcactaaattctgtagttaaaattacatctaaaaaaaaacatcctgagctaattaccttcaagtatggaaacagcaacgcttcaggaatagaaatcttggcaatcgaaaggtatttgattccaaatgcaggagatgctaccaaagccataaaacaacagatcatgaaagttttggatgctttggaaagttaatataaaagagaattatttcaaaagaaattaaggcaaccaagagaagaaacatggacatattttgctgattgaatactaactgaagacctttaatttgctcatg

SEQ ID NO: 932 - DNA, 650 bp, Canis familiaris
  misc_feature (1)..(650): n = a or c or g or t
cctgggtgtgagcccnntctgccaaccccctcccacgtgcccaagccactggtgcaataatttttctgccatcttccaagcagaggaatcggggaattgtgttgggggatatgggcagctcgctggggggagggagcgctcgcaggcctctgggggcccagagagagtnctggaggccgactgccaccaggagccctctcctactgcggagcaggtgggtccctcccaggtccccgcacccacagggagccctgcaccggccctgagcacctgggggacaggcctgtgcctctgcccggcccggggctcctgggccctcatggccccgactggaagaccagaggggctcctgcgccaccagcctgctgctcttccaactcctgctgtgaggaaatgggattcttggccagaaacaaacaaaaaaaaggttttctctttttgtataaatggaaacaaaatccaggagaagctgccacccctcacctctgagtgcgacgctctaccttggcttcggtttctttgtcaccgtttcgtctttggtccccggggacagcccagcgcaggttctcctggttctgacccagggggtgtttgcatcacccccttttacttgtataaaaaaaatgatgggttgaaaaatgtactgagga

SEQ ID NO: 933 - DNA, 664 bp, Canis familiaris
  misc_feature (1)..(664): n = a or c or g or t
taagtttcagatttaatatctgttacntnntaatatgttnggtaccagaacataagaatttgcctgattgcttgtggtgggtattattgaagttctggttaaattacaatttaaaggtttttaaaaatgctttgaccatatgtatgtttacatttagtaacaaatcatttaaaaatcattcacaagttttggtttattttttttttcatttgttttactgactgtaattcagaataaaagctttttgttcttgtatttaacccttttttataagcagctgaagacaccatatttaatgttatatctcagtgataggaaaatagctgcattggtcttgcataagacattaattctcatgctttgtgtaaggataattagtacaatccctttctattatgtttgagttaaatttgctctaaggggaaaactataattcttaagcatcctcattatttaatttgaagattctttaacagatcacagcaaagttcatcataaaactgttatggtgtcttcaaagactttataaaatctgagacactgagagggaattggtccgttgtattctgtgtttccattaattgccaaaaggaatggggtaagattatatttgtttccattttacttcctatggatctgcatccccatgtttaactgacacact

SEQ ID NO: 934 - DNA, 90 bp, Canis familiaris
gccctcccaaaataagggttgtagaaagatagaacttctgaggtgggtgttcttttcatgcatctaaaagtcctaaacatttatgctctg

SEQ ID NO: 935 - DNA, 461 bp, Canis familiaris
  misc_feature (1)..(461): n = a or c or g or t
gcccactgtggcctctgccccnggcggtcagggcatcagggagtnggctccgcctccaccgccggggaagcnnaatccccgattcccgatgagccggtacgacaggtgtctccccgtgctacacgtgcgtgacacagagcgagaggaagctgcgaacggggcttggaccgcggtgagccccacccccacgcgggtgcggggacgctttgccccaggcagggtcccagtcccagggaggccgtgagacctgctcaccgcggggtcgtgctccgggtcctgcccgcccgcccagcggcccggagccgtgctcctccagtgttagcccgcagccttgggaagtcaccgcgtcgggggccccgggtctcctcggcgtgcaggacctcacgtctccacagctgccttagtagtgcgcgtttttacttttcttacattgtaaagaatatacccagtatnnnnngaat

SEQ ID NO: 936 - DNA, 594 bp, Canis familiaris
  misc_feature (1)..(594): n = a or c or g or t
cattctaacaatgagaacggagatgttttggcatcatggcttttgtggtttatgctaccattctgaaatcgaggcccattggagaggagaaatttacaaatgactgagaagctcaccggaatcagttcagcacagtgaacaatgccagcagttcgtagaagtgaacgtacctgtgatacgtcagctgttacctagaggctgtcagcaacatagagactggcttactcccacttcctcagtgcaaacctgtggagggcctgcctgtgcacctccttcctctgcagtacctaatccttgaactttcggctcttttactcaaattgccggcgctcttcatctgaacacagaacacagaaatgagctgcaggactaatctctcacctctcccaaagatggtgcccaggacaggaacaaccttgtgacattcaaggagtgccctaggtgttagggcttaattctctcaaggcccaactttccaagttgatgttaaatgtcatctatacttctgctgtcacctcactgctgcccagaggacagtgnnncacgtggccatgctttccaccttagagataaataaatatcgccacttnnnnn

SEQ ID NO: 937 - DNA, 459 bp, Canis familiaris
  misc_feature (1)..(450): n = a or c or g or t
accgggtgtgatgaaccaannagtggccnctatggtagggactccagcaccaggtnnnagtccatatggacagcaggtannagttttggggnnnnnagggcagcaggcaccacctccgtatcctggcccacatccagccggcccccctgtcattcagcagccaacaacgcccatgtttgtagctcccccaccgaagacacaacggcttctccactcagaagcctacctgaaatacattgaaggactcagtgctgagtcgaacagcattagcaagtgggaccaaaccctggcagctcgaagacgcgatgtccatttgtcaaaagaacaggagagccgcctcccctctcactggctgaaaagtaaaggggcccataccaccatggcagatgctctctggcgccttcgggatttgatgctccgtgacaccctcaacattcgccaagcatacaatctagaaaa

SEQ ID NO: 938 - DNA, 564 bp, Canis familiaris
  misc_feature (1)..(564): n = a or c or g or t
aaagaagggaacatggntctgtaaaaggatttttcaatacgtctttttcaccaccctatttttcatcagactgctgggctacttgtttttccatataagttttataaatccagatctccttatcaacatactgcccaagatcttgagcaggggcatcctgtggaagctaagatgcttcctctttccatctctgacacttgagacagaggacatgttaccccactgatccccaagaaatatccttgagcaaaagaaggttcatagaccagagccatgtttgaacatcaagagcacagagacgataaagcaccctatcccaagagctgaatcactacagacaattacaatctgcctgaaatcttcagactatgtgttttgagtggaagatttccttacatggtctctgcctaccatgaagcaggatgccacactttgataaatccccaaaatccttcacactctacagtgctacttctaggggtgttataaaatatataaatttaagcttcatgaagggatgaaatacattaaggggattaagagcacacttgtgatgagcactgg

SEQ ID NO: 939 - DNA, 616 bp, Canis familiaris
  misc_feature (1)..(616): n = a or c or g or t
tgccctgtccttgctgttggctnngcccaatgcccaatttgatgctactgctccccggnnccacntggagagcagtctnntgagtcaccttgtggatcccaaggacctnnagccccgggcagctaactgcactcgggtaaggggctagaggtcctggtgtggcatacacggacagagaagcccaagatgaagcaggaggaacagctacagcggcagggccgaggctcagacccagctgttgaggtgtgatggcggcccccccacccccgcccctgactaccacctcgtcaggcacgaagctgggggactgggcccctggccagcctgggcggcagatttccaaatcctgacccctcagagccagggggtggctcctctgccccctcagccccagagcgtggcccagctgcttctcctctcccccagcctgccatgtggcactgcccacaggctggggacaagcggcccttgtgttgagccaggtcagctcggtctggggtggggcagaaggacagacactcaggagggctgctaagcaactgggtaacttattggggctaggcatgggctggggggctggaggagctgggctggaccctccccacctgagcatgcg

SEQ ID NO: 940 - DNA, 597 bp, Canis familiaris
  misc_feature (1)..(597): n = a or c or g or t
catgacattggaaaataatggatgaaaataggaaaaatgattgttgttaatgctgactgtgggncntaaaaggtnctgnaagcagtaagtgtgtttttctaaaataccattcccttggaatattttcttctaatgtcagtgcttttcctgcatcatttgaagttcggggctggggagaaacagtaatcaaagctttctgaagtgggatgctttgaaaattccaagtgtagatttttaggatgtcattttataaatggcagtttttggaaatacttgattaagaacttttgaaaatggagattagtatcacctatttttaaagctgctttgttaggcttcttatgttttaactgtctttccttagtttccatttcattctttttttttttttcttcctaattttggtgacttagtgatttttgtcatttttttacatcaacttcatggtcttgtttttacatggtattgcatgtatttaggacctatctaacaggggctttaaataaatttgatcatatttatgtgtaagcacattttactgtaaatgtttgggtttctgaatttacaacagatctgtnnnttcagtatgtagtaaac

SEQ ID NO: 941 - DNA, 661 bp, Canis familiaris
  misc_feature (1)..(661): n = a or c or g or t
tcctnngtgtacaattcagttttctgagactcatcctatatataaccttgacttagatttttaatgtctagtttcctctgctgacagaactggaatnnncntctagacagaagcattgacctgatggtaggtaattctacaagccttagaacttgaccaataaaaatctgagaaggccacctcttcctcctctagagaaccacatagtcttactgaaatggggagccatacacatcggtactggcatattctacctgtgtgacatggtttattacctatgcaggtctgttcagatcacccgatgtaatcgccatctatcactcaatatattcttaaaaactccatagctcattctagccttacttatttaaaaatacccgggcctatattgaaacctgagggttgccgcttcaagggtcagtatactctgtcagttagatcttgttttatgggaaagaccaaagttgtgcagcatcacagccatgtttgttgcccctaagtggagcttctgggctttgtactgatgaagattttcataaatgttttctcatgatggtagattctttgcaaataaattgacttccagattgagttgagcagctaagactaacaccagttgacttgtactctccgtgcatcctgtcctacttctcacacgaag

SEQ ID NO: 942 - DNA, 482 bp, Canis familiaris
  misc_feature (1)..(482): n = a or c or g or t
acaggaaggaagaaggagcaggaaangtgcagaattagtgtgagagctncnngcaactttgccttgttatactttgggcttggcgtnggatggaaagaagatgtaagttgaannngggtggagagttactaaaaccanngtgtgggttttatttcataagcagtggagaggcagaggaggtttttaatgaagaaatgataagtcattgaaaagaatatnnnggaatgcctttgcaggatgaatatgagtggggaaagacaaagataaggcatgcccagtccgtaggttctgaaagtagtcaaggtataagacaatttgagcctgaacttggaaaggaaaggagatgtgggaagatccatgcttagaatgtttgctgtggaacatggaatatgaaggtctccctaggaattgggatgctttctggaacttccgaggcttctgttcagacttgaagcaaaaacaggtgnnctattaagctctta

SEQ ID NO: 943 - DNA, 659 bp, Canis familiaris
  misc_feature (1)..(659): n = a or c or g or t
ggccggtnggcacttcagnntaggtactggtgcnnnncagggganncagggctgttgcacgctgggccagggaactcagtggctggnctgagcacgcttatagnctccagcctgtcatccatgcaagatttgaggaagacggcacacgcccctgaaccagaagtgcaggtctctgtgcttcccaggggttcttcacagacccagctgaagagctgccgggagggtcagagaggaagtaatctgtctctcaccataaggctgattctctcttaactgcggggccagcggaagcaggtgtgaacagcggggcatggactgaagcgtctgcccctgtgaaggtgggtgggcctgatgtgctgccccccacagtcctacagccgggatggacttggagagtgagcaggcaagcctggatgctgacctgagtcctgctgaagacttcctctccaccccccacctcggtgtctcaaaatccccgacggaattccagcttgaaggattgcatcctgccgagtctgaacacgcctgccaaagacgtgtgcgtcctgcgttcctggctcccttgttcagagactgcccttccagagggctctgtgcctgggctttgaaggaaatggccnnngaagaaaaaaaatgtgtgtaaactgctgtcaataaat

SEQ ID NO: 944 - DNA, 526 bp, Canis familiaris
  misc_feature (1)..(526): n = a or c or g or t
tgcngcgctccatgagccgaagggatgtnntcatcaagcgnnggccccngcccctgcagtggcagtacttccgctcgctcctgcctgatgcttccatcaccatgtgcccctcctgcttccagatgttccactcagaggactacgagctcctggtgcttcagcacacctgctgcccctactgtcggaggcgcatcgatgaccccagcccatgaccggccccctcaggaccaccgctcccatcagggccacctcacatttggctgggctgtcaaaggaagaaagagttaaactgtcagaatgtgtcttctgcccagatcaagtgtgtattttagggaggggcctcgtgtaaccacggaattcctatttatggcatttcgtgccttgtaaatagcaccaggagatggcgaagagaatgtacatatattttctaagaaaaaaaaatctgttactttcagaaaggctctgagttgttcgtggcagcctgctggagtccacagatctgtcagaccattaacatgtacacttt

SEQ ID NO: 945 - DNA, 534 bp, Canis familiaris
  misc_feature (1)..(534): n = a or c or g or t
aactggcaaaactgtccgcttgctctgaagctcttgtgagcagtgttgtgtgttgcttatctgctcttgggcattgcacttcgatgcatatgtgtgcaacataggggccaatcagctgccacagttgctgtcagtggaaatagattcttagtcgttatttggttccataaaaattttctaacctagtttcagttttactagtgaattgtgttttcacttaacattttttaaatgccattgttttaatgcttttaatctgtatttccgtgtgtgtgtgtgtatacatacacacacatacatatatatatagcaagatattaagtctcttttggagatggcagtctgggtcatggtttttgtgctggactttgtaaaggcaatcatccatatgcttgaagtttttgtaatatgagattaaacttagccagagcctattattcagtgtgaagtaatgaaggaccaccagaggcttattctcatggctcccataagattnnnntaaatgggcaattggaatngattaggttaacttct

SEQ ID NO: 946 - DNA, 592 bp, Canis familiaris
  misc_feature (1)..(592): n = a or c or g or t
cagcccaggcccagcccttgctnnagcttcctagcttccttcctttgctcacctcatggcttcttggaccccttggaaaaccaagagatttttccaaccctaaaagaaagtacatctgctttggatggatgaaaatcagtgcccatcttctaggctagagggtactgagaactaagtggtagggtagacttgagaacacaaagaatgtttctgtacttatttcacaaaagacaagttcagtagactaagcaggatgattgttccctttggtgatggaacaggaaactaaagttcattaaaaatatcccttattcattttaatatgttgaatggagtaacttcagattactatgagcttgtcttgtttttaatagacttgtatgtgttgcttcagtggtttccaggttagagcaaggttattgtaatttaaatgagcagcctgaaaagcttccagcgtggtgctctggggatctctcctctgggcaaatctattagaaatgcataaaaccttaggacatggtttttggggaaaatcccatgactttaaatgagttctgttactattgaccttttacaaggagaatattttcct

SEQ ID NO: 947 - DNA, 645 bp, Canis familiaris
  misc_feature (1)..(645): n = a or c or g or t
acacgagagctgcagtccatnnctgaccaagagaaggtgtccccagctgccctcaagaagactcttctggacagagtgaagctnnaatcccccacagtgtacacattgacccattccagctcaggnaagctcctcacaaaaaacccagcttctgggggcaagaaggactgaggtagcctctgccctcctttctagaaccagagccctgagggggaccgtgcagggtgagggcaggccccagcaagcagcttttggtcctggtcataaaacctccttaagcctgctcaggccaggctgcaatagtttcctgtcttgtccatggaatatgctctgggagtggttgagggtggcagccagaggcaggctggcatacctgccaggggtgaaacaggccaggactccagtcagagccccactcagtagcaagttctgcagacttgcagctggagtcctccatctggagcccgatgcagggtccgcctgatgccacgtcaaggtggagagagctaccaaacatgacaagggcttttctctgtgaactgtaaatggataagaagcgagcaacttagaattgttacagttaatcagaaaagcagggaattagantgtgcttatattgaacnnnnnntttgtaggtgtctcatt

SEQ ID NO: 948 - DNA, 476 bp, Canis familiaris
  misc_feature (1)..(476): n = a or c or g or t
taaatatctttaatgggnngtnnnngagtccccccagcataacagatttcnaatatctgaagcagtactgtaaaaggccacttccaaaatgacactaagaatctacagtttatatgtgttgcagcttgaaaacacaccaatgttttgtcttagtaggataaaaatactcttaagcctggagagcaaatgtgaaaacccccaggcttttatcgtaagagtgcctttcggcacttctttgggcactgaaattatatttgcttaaaactatttgaatgtatagttgtctggtgttgtgtttgcttatatttatcggagctttctcttataacaggagttttcattnnngaagaacttatcatttaggagctcttaagctccccatgagcccaaagcctaggaaagcttcatcnnngnggtcnagcnnntgttgctcagggaattagcagtgggacccaggcagctgatctgtgggtgat

SEQ ID NO: 949 - DNA, 713 bp, Canis familiaris
  misc_feature (1)..(713): n = a or c or g or t
cagatcgagtgccacccgtanntcactcaggagaagnnnnnccagtactgccaagccaaaggcatcgtggtgnncgcctatagtccccttggctcccccgacaggnnntgggccaagcctgaggacccttccctgttggaggatccccggatcaaagcgatcgcagccaagcacaataaaactacagcccaggtactgatccggttccccatgcagaggaatttggtcgtgattcccaagtccgtgacacccgaacgcattgctgagaactttcaggtctttgactttgagctgagtagtgtggacatgaccaccttactcagctacaaccggaactggagggtctgtgccttggtgagctgtgcctcccacaaggactatccattcactgaggagttctgaagctgtcggtgcctgtccgcccaggtgccccgcgtccctcctcccgtatgtagcgtagagtggcctctgcccctcggtggtgggtccgtgacctgctgacgggcccgtgaggtgttgggtctcaagagcagtatcagcaggttagagtctcttccagttttgcccttcttcttgtccagctggggaatgtaggaccctggcacccttttctgactaagttgaatctataaagttgaaatagtgccactaacacctggattttggctaccgggaacggtaaccctttcatccagacttcttgcctgaaataa

SEQ ID NO: 950 - DNA, 506 bp, Canis familiaris
  misc_feature (1)..(506): n = a or c or g or t
gaagaggctcatcttcccactcagattctannnagagagagagaaactgtgcctgttgaacttgagcctaaaaggaccattccangtctgaaagaaaaatcagaaaaagtgaaagatcctaagactgccgccgatgcggtcagtggggccaactctgtggagagcagagtgcagagaccaaaagaagagagttccgaagatgaaaatgaagtgtctaatattttgagaagtggtcgatccaagcaattttataaccagacttacggaggcaggaagtacaaaagtgattggggctcttctggtagaggagggtatcagcatgcgagaggtgaggagtcctggaaagggcagcctggcagaagccgagatgaaggttaccagtaccatcgaaatgtccgaggacgaccctatcgcggggataggaggagatcggggatgggagatggccatcgggggcaaaacacttgacgcttgttgctgtgctattttagagcagaaacctctcc

SEQ ID NO: 951 - DNA, 628 bp, Canis familiaris
  misc_feature (1)..(619): n = a or c or g or t
gcatggtnngccatggggtgnccgttgtgactatttccagannnnaagtggtgtatgaagctggagttttcaatgtnnnnncaggggatgggaagtttattcntcgnaaaccatttgctgagtatatttacaaacggatcaaacagcgggaccagacttgcacacctatccccgtggagcgtaagccctacaagggagaagttgtcaccgtaaaatctagagagactgaagaagactctgcagcagggatgaggaaacaggccggcccctgagccgagtgctgtgggtaaaaatcagagaaaaggattctgctgttcccatcactgttaagcgttgtcagcccatggagaagcaggccttatttcaactccccacgttccttttgaaaaaataatcgctgcaggcttctttgatttactttcagaagcaatcgctgtctttctcgctgtgactttgttgctgtgtaagattgaagatataaatgaatattattgtgatggaaagtcaatggaaaattcattgatgatactttaaaatgtcatctttgcttgtcctgggtttcttactttgagattttcaaaatcactttcttgtttaagatttttttaatggctacatatgtttaaaa

SEQ ID NO: 952 - DNA, 655 bp, Canis familiaris
  misc_feature (1)..(655): n = a or c or g or t
tattttagagtttannnnctgatnngctttttacacactttcatgngaaagagtgntngnnagagggagacgaggttggtgccgcttattttgaagctggtgccctccctcgccgtggccgcgtgctgnnngctgcggcctcctcggactgagnntgcggtgcactggtggggcagttctgcttcttcacctgcgcccggtcatgaggccattccacgttgtttttaaactaatgttttctatattaacattgttatggatatttggctttcacgggccacacacaggtgtgctgagcaggaagccctaagctccaatcaaagggatttttagtagtgcctctgcaagcactgatgagtcagtcccacatctttgctttttctgtcagtattatttggaacggagacatgccgggatgcaccgtcgtgcagaagatcacatttcctcttggcacacagctgcacagaagtaaacataagcatgttttaacaggttttctgtttcttttttttttttcctattatttatttaaccctccattgtgtgttttaaatcttttcttcttttcttttttctttgtttttaaggaaggaaaaagcttgtcacagtctaactggctatgttattattgttaaatttatgttgttttgcaacc

SEQ ID NO: 953 - DNA, 605 bp, Canis familiaris
  misc_feature (1)..(605): n = a or c or g or t
agaacacaaagggaagatcatcatgcacgacccatttgccatgcgccccttttttggctacaactttgggcgctacctggaacactggctgagcatggaagagcgcaagggggcccggcttccccgcatcttccacgtcaactggttccggcgggacgaggcaggccgcttcctgtggccaggcttcggagagaatgctcgggtgctagactggatctgccggcgactagagggagaggacagtgcccaagagacgcccatcgggctggtacccaaggaaggcgccttggatctcagtgggctgggagctgtagacaccacccagctgttctcactccccaaggacttctgggaacaggaggttcgtgacattcggagctacctgacagagcaggtcaatcaggatctacctaaagaggtgttggctgaactggaggccctggagggacgtgtgcgcaggatgtgacctgaggctccaggctaacaagaaagcacagcatcccccattccttcctacccctcatctagggataggagagccaccaggcttgcagaaaatatgagtaatttgatataactgacannngggtgccatgaaaccaggc

SEQ ID NO: 954 - DNA, 567 bp, Canis familiaris
  misc_feature (1)..(567): n = a or c or g or t
agcagcaggtgaccacagnggcnctgacnntcccacatgtttcannagcagcggctgcgccagcgcaacacagagacagaggagagcctggccaagcggctggctgccgcccaggtggacatggagagcagtgagtgtgggcgccagcgtcccccctcccccaggctcctcatgaagcacgggagtccctggggaggagggcccatgccaacctgtgtccttnnnnnnccccccatacacaccccacaggcaaggagcagggcctgtttgacctggtcatcatcaacgacaatctggagaaggcttatcgggccctggaggaggcgctatcagaggtgggctctcagggggcactcaggcctgttgtgcttacgggcccgagggctggtagaggctacgtggcctgtcagccgaccctggccccaaccctcctcctctccgtggcaggaaatcaagaaggctcagaggaccagctgctcctgagaagaaatgctggtggtgtcctccctggtgggggtgctgcccgcgtctcctgctcacgctgccacggctggtggaccctggtct

SEQ ID NO: 955 - DNA, 604 bp, Canis familiaris
  misc_feature (1)..(604): n = a or c or g or t
gcctgnctgattcgagttccttcagaagtggtnaagcagagggcacaggtatctgcttcttcaagaacatttcagattttctctaacatcttatatacagagattcctttctcattggtccagtttcccatgtgggagtccttaaaagccctctggtcctggaggcaggatcatgtggtggattgttggcagtcagcagtctgtggagcttttgcaggtggatttgcagctgcagtcaccacacctctggatgtggcaaaaacaagaatcatgttggcaaaggctggttccagcaccgctagcggcaatgtactctctgcgctgcacggggtctggcggacgcaggggctgtcaggattatttgcaggtgtcttccctcgaacggcagccatcagtctgggaggtttcatctttcttggtgcttatgagcaaacccgcagcttgctgttggaacttggcagagcgagcccctgactccggacggtgccccatgctctgctctcaggaaaggggacgccgtgcgagcagctgcagtcgccaggctcgggtgtgcgaggaccggagccctggccctggtggtgccctcagccctcctctcagaccc

SEQ ID NO: 956 - DNA, 572 bp, Canis familiaris
  misc_feature (1)..(572): n = a or c or g or t
cccaattcccagataaacttctcattggagtgcctcatngcagatgcctgggtggctctgttggtnaagcatctgatgatttcagctcaggttctgattccaaggtcttgggagccctgtgttgggttcctctctcagcaggaacctgcttgtggattctctctctctccctctttcccctccccctgcttgtgctttctctaagataaatatatcttttttttcttaagtgcatcattggattgagtgtattgtttcatggaaattttacttgagacccatcccttcccccaacatacacaaaagtagttgtgttaagtaaatgcacatatgtttactttatcttaaggcctgtcttaaggatgcacataggatctgaaaggctcacttgaaacccatactgctgcattcattataagtattttatcttaacattagaaagtacaagggccaacccagctttcaaattatgtctaaacagaaatggtacaaagagaaatcaaaatataaaagatttatacccctgcatgtnnngagtcccatggcannnnntgtgtacctcattattattc

SEQ ID NO: 957 - DNA, 547 bp, Canis familiaris
  misc_feature (1)..(547): n = a or c or g or t
cccacgtgtnnntgcaagttcacccccatngcaccatcgnnnctctccaggagcaggtgttctcnnagtnnggcttcccgccagctgtgcagcgctgggtcatcgggcagtgcctgtgtgtgcccgagcgcagccttgcttcgtatggggtccggcgggatggggatcctgctttcctctatctgctctcagcgcccggagaggcctcaggacgcagccctctgggcccccagaagacagatggggaactaagtcgcctgtttccgcagtcactggggctgcccagagcgcctcagccagccagcctccccagcccccttcagcctggctggtcctgcccttcctgcacattcatcaatgcccccagccgacccggctgtgagatgtgcagcacccagaagccctgcagttgggacccccttcctgcagcctccacccaccagccgccaaaggtctcgaagagagaggatggcctgatccctccgggcccgaggtccctggagcctgtcctgaaactctcaggcgacttttgctgactgctcaccag

SEQ ID NO: 958 - DNA, 696 bp, Canis familiaris
  misc_feature (1)..(696): n = a or c or g or t
gtgctttacaggnnactggttagatgtctgcccatttnnaangttttttcggagtttcattttttaaagttcgnctnnnnnnctacatgtaagacccccattcctggctccaagggactgagagtgaaagcagagagaagctgtctgtgattccgagaaccagcggtcacccttacagagaccagtgagccagccagccgtgtttacaaaacacagagcgaaaggcattgcttagaggaaacctggagtttttctcattgcgttgtgattcttccaaggagatagggaatgcttaattaataatgccttttcccccataattgctttttaaagataataaagtctatctttagatttcagtagacatcgccaatgaacaggcttccttagaacctcataatgagtgttatccagagatgcttctgcctctgggggctgcagagcaacatccatgcctccgttgagcagctccaaatcagaattgcattttgattgacaaatcctcaattctcgaggccttatggggtagtgggtctgggaacccattgcattcttacctgccaaagaattacccagaagcacatccaatgccaacaccccacctgcgcagtaggggtgagaaacttttatatctcaaatgtatccctttatagcatctgctgcaccattgggaatggttttatttttaacctcagg

SEQ ID NO: 959 - DNA, 593 bp, Canis familiaris
  misc_feature (1)..(593): n = a or c or g or t
aggtcacagaacctgaacctgaccgacagctcacgtttgaacccacaccccccgtcggctctacgagggcancgcaaacgaaagctgtcaagccacgacttcatcccgtgaagccaatgaacacaacagccaccaagattgcgaactccagcttgggcactgccaccatcatcagtgagaacttgatcaacgaaaccatgatgaagaaatacaacccctcggaccctgcctttgcttatgcacagctaacccatgatgagctgatccagttggttctcaaacagaaggagacaataagcaagaaggagtttcaggttcgagagctggaagactacattgacaatctgctagtcagggtcatggaagaaacccccaacatcctccgagttccggctcaggtcggcaaaaaggcaggaaagatgtgaaccgatgtgacactgagactgttctgtgagtttgtttctacctgctcctgaggtcagggactccgtatgcctgataaccagccttcaggctccaagtcaccatctgcctccctgtgtgttatctggcaagagtcagctccaccagccannnnnnggttaattattaca

SEQ ID NO: 960 - DNA, 583 bp, Canis familiaris
  misc_feature (1)..(583): n = a or c or g or t
aggctnnnngccatgttccgtgncttcaaatctcttgacaagaatggcactggacaaattcaggtgaacatccaggagtggctgcagctgacgatgtattcctgaatgggaaccccagacctgccccctcatcgcctcgctataggagtcaccttggattcttctgtctctcccagggccgagccagtctgcagtctcgtcttcatgggtcctactgacccacaggtcttttggttcccccagcccttggcacttggcttctcagccaacagccagggcccaacatgccccaacaagccatgccccaagttacccctggctgtgagacactctaacacaccttgtcctgagggtcaccccaccctcggcacacccatcccacacccgctccgtaacccctgtcatgcacctgtgccaaacccggtagttatgttgcttccacaccccaagggcccttctctcagtctcgggaagatcactccagtccctacacactctggcacacttgttcacagttaccaccctggcagccaaactccaggccataacaggcccgggcgccaccgnnnntttgtctgtactc

SEQ ID NO: 961 - DNA, 692 bp, Canis familiaris
  misc_feature (1)..(692): n = a or c or g or t
cagctgaagatactcacggatattatgtggnnagttatcgcaaagctagctcgagaggagatggatcaggctgtggctgagggaaaacacgtgtgcgtgattgacgctgctatgctgcttgaagctggctggcagaacatggtgcatgaggtgtggaccgttgtcattcctgagactgaggctatacgacgcattgtggaaagggatggcctgagtgaggctgcggctcagagccggttgcagagccagatgagtgggcagcagcttgtggaccagagccacgtggtgctgagcactttatgggaaccacatgtcacccagcgccaggtggagaaagcctnnactctnntgcagaagcgcatcccccggacgtcgtaaggtccatggctgacatcaagttctctgtggggccaaagtggcccctnnngctgccaagagattcagcggtgaggaggaatgggcgctacagtgctcctcctagcttgggcctagagggctgagccaaactgannngngcagggcaggacctgatggagacgcnnngcctacccagcttgctggggtttggccatcactgcggatgtggctcatgggggagcaggcccctctggcactggtgcctactcttgcccaccgtgtctgttgtacctgcggctgcctgcggccagggcaaacactgaacnnnnncagnn

SEQ ID NO: 962 - DNA, 688 bp, Canis familiaris
  misc_feature (1)..(688): n = a or c or g or t
atgtcattgtgcatngacangcagggaagttcagnctgattcccaccatcannaatctggccacagcactgacttccattggagtgggctccttcctgtgtgactggatcttgctgacgttcatgaacaaaaacaaggtgtacagccataagaaattcgacaaggtgtgcgcgcccagacactcccctggtagctggcccgtgactctggctctggttttgggccaggcccctcccccagcccctccctgccctgcagaccccagccaggcctgccaagctctggctgtcccgcccccacccaagcagatggtggatactcctgagcagaccactggaccacagctgtgcgcctccgagcctccctggcaggactccacactcgcagatccccgaggtctggcccagctctgagcccaccacacactctccatcctgctgcttgagcaaggccccacctggagggtccctggtgtctgcacttccctggtaacccatggagaccaggaacccaaagatccccgtgcaaccgagtgatgcgctgacagaaatgggtggcacccagaccctggccatgtccctaggcctggagagaggggcagatttctgcctccttctcccctgacttcctctcaggcctcttacccctccccacccgggccctttgcttgcttcatggccaagaaatc

SEQ ID NO: 963 - DNA, 674 bp, Canis familiaris
  misc_feature (1)..(674): n = a or c or g or t
tgacgctnnnacataccggtgtgacgtacaaatgttaaaaaacttcagatttgtcaagaggctctattttgggctgcnngtnnttccctctaacttggtgaacctgaattttcatcagtccctcaccgagaaccagaagttagtagataagggtctggaagtgaatctggacaacggttctaagccttaccacccgtggaagaagacggtggctgtagctgtgggaatagggatggccagtggaatggtcggtgctgtgctggtgatcatcgccctgggcagtgggctgaggaagatcaacagtggtgccggccttgagtccttaaaagccctcctcctgaaaggctggctgccccggaccctggaccggctgttcaggaagccgagctaactttctaagagtatctggctggctggctgtggcctgaccaggagggagggctccccccgccgaaggagtgaatggggcacatggagaggggcaacatcgaggtggatctcttttctaatcttccctgccagaggcacccaggaagctcctaacttggaggtactgtccctgcgcctgagaagagttctgtcttccaagcttgcattccctatctcttagaacttgttgcctctccagacctctgtctcttctgagcagtataannnagtagaagggtatgtta

SEQ ID NO: 964 - DNA, 598 bp, Canis familiaris
  misc_feature (1)..(598): n = a or c or g or t
atccntcccntgnnncaatngacactgcagctctgctgtccagtgggaagaggataggttaatantnctaaaatatgaccccacctcatttagctcactgagcaacagagtngagacacttgtacttgatgagtcaggcagcaaaggaaggcctttctcatagacaggtgcttctctgggcccatcgcaagtgacagtgtccttggggagcctggggcagtctgtctcaggctgcagccaactatggggaaagtgtagcaggtcagtctttgaggtgatgccccagattgctctgtatgagtagaccttctgatgtcacagtgtaggcatgaggtggaaaggacagcccgaggaggtcactcttccccccacccccgttctgctccccctgagagtaaataggtctccaatctcctgggcccaccatgctgagaacccagcagttcccccatgggcctttctgtgagggactatgccagcctcctgcctcagaagcagagggactctgccctgctcagatcacagcccagccttcagttcccgacaatcaccagcatcaaggctgcaagaacagaggcaaaaggttgccatggggact

SEQ ID NO: 965 - DNA, 651 bp, Canis familiaris
  misc_feature (1)..(651): n = a or c or g or t
ggggatngnaatcctttgtaancnacattgaatacncaagnnaagcagaaactgaaagnnaatttttcagcatctatattttgtttgttttcaagttgaccattttcatgttgaagatatatttttttatgtgtaagaaattagaccttactgtgtatttatctatatacaaacttggaataattatgctagagagaaaaggacttctctgtaaagatgtagactacagttaagtactagagaagctctttaaaaatgtgaacatcaaatagagaacccctgcatacaaaatgctattttaactatgatttttttttaaaaaaactgtgctttaaattataaccaacagcttattagagtcacctgcnnnatatatgagaagtggtattctcttcttnngtggctttagctctggactttgctatgtaaaagagacataaaatgataggatacaaaatatttttaactggaaagtatctcctctgttactgacagttgaggtccttctgtcccaaagctgaacagagccccatctcgtctgggtctgtaataggtcccatctacttacacaaacaaaaacttgcaagttttgtatgcattttttttttnnnnnnttaaagactaaaacacttaccttttaacttgtaattt

SEQ ID NO: 966 - DNA, 590 bp, Canis familiaris
  misc_feature (1)..(590): n = a or c or g or t
cactngctggctcagcccagggatctggctcggnntgagattttagggacacttgagtgannngtagaggncgggtttctcaaaagnnagtcagacctgtgccactggccgcaggaagcctgtagtaccacggccaggagagaagggccgtgtaatcctttcccatcccagactcctgtgtccagtctgtcctggctgtgaaaacctctagaatagggggtgtgctgggnnaggggctttatgctccaggacttggtttcctttgagatactgttggaccagggcctcgttcaggnnngctggggagaagaggaagctccatctggatgcttttcttctagttgtttactgacccggctctgccctacgtggcttcccaccccctcctgtgaggtcccagtctctcctaattccaccgtgacctcagagagaggccctccctgccacccaagctcatgccctgtccttgcccacctgctttattttctttattacattgtcactggctgtctcgatttatttggatacctcacattttccacccccaccaacgctctgaggggacagactnnnnnngttccttctctctc

SEQ ID NO: 967 - DNA, 668 bp, Canis familiaris
  misc_feature (1)..(668): n = a or c or g or t
aggagcaaatggggtgatcatctataactacccaggtacgnncaacaaagtgtttcccatgtctcaccagggaacggaaaatatagtcgcagtgatgataggcaacttgaaaggcatnnaacttctgcacttgattcagaaaggagtctatgtgaccatcatcattgaagtggggcgaatgcacatgccgtggctgagccattatgtcatgtccctgttcaccttcctggctgccaccgtggcctaccttttcttgtactgtgcctggagaccccgggtgcccaattcttccaccaggaggcgaagacagatgaaagcagatgtgaagaaagctattggtcagcttcaactgcgagtgctcaaggaaggcgataaggaactagatccaaatgaggacagttgtgttgtttgctttgacatatacaaaccccaagacgtagtacgtattttaacgtgcagacatgtgttccataaggcatgcattgacccctggctcttagcccataggacatgccccatgtgcaagtgtgacattctgaaaacttaaacccggagaatcttctgaagatgtaaccgagtctttccaaagattgaaattaaatgaattctcttttagccctttatgccnagaaaaagctcaacttcatcttctttacctaagtactaaa

SEQ ID NO: 968 - DNA, 678 bp, Canis familiaris
  misc_feature (1)..(678): n = a or c or g or t
tgatttatgcatttatgcatgagaactaaatagattttnagattcctacgtnnncaaaatctttccatgacagtagcatactgatgagaaaacacacacacacaacagcagaaacaacaaaacaacaacaaagcatgctcagtattgagacactgtcaagattaagttataccagcaaaactgaagtagtttcactttctttctgtcaatatatagacttattaatcataatcatcctttttttaaaaaaatgaattttaaaaaagatggatttgacacactcaccatttaatcatttccagcaaaatatacgtttggctgaactatgtcaaatgaatgtaatataggatttatttgctgcttttgaaggctatgttttggagaaagcaatcttgctgtgaaacagtgtggagatgtaaattttataaggctgactcttattaatcaccatatccccctgtggtttgttatcagtacaattctctgttgcttaatctagagctatgcacaccaaattgctgagatatttagtagctgataaagaaatctttaaaaaataatataaatgaatgaaatatagataaacnnngagataaatatcattacagcatgtaatattaaattcctcctgtctcctctgtcggtttgtgaagtgattgacattttgtagctagttta

SEQ ID NO: 969 - DNA, 616 bp, Canis familiaris
ggcccccagaatcaagaccaagaacctggtcagcatcatcttctgtgagctgtggccatctatggcatcatcatggctattgtgattagcaacatggctgagcctttcagtgctactgacccccaggccattggacatcgaaactaccacgcaggctactccatgttcggagctggcctcacagtaggcctgtctaacctcttctgtggagtctgcgtgggcatcgtgggcagtggagccgccctggctgatgcacagaacccaagcctctttgtaaagattcttatcgtggagatctttggcagtgccattggcctctttggggtcattgttgcaatccttcagacctccagagtgaagatgggtgactagatgatctgtttgggtggggccgtgtcccactcttatttatttgtggttttcccgggacagctggagctgtcatccttggcctttcagggggcttggtgttcaggggcccccctgcacttgctgcacgtgctgcctgtcaacttggaggcactgcctggctggaccctcagtgtggggagtgggccactcactgatggctgcgtgcacctgtgtactggtgtcccaactctgcccccaacccatc

SEQ ID NO: 970 - DNA, 591 bp, Canis familiaris
  misc_feature (1)..(591): n = a or c or g or t
ttcccagtggnnnnntctcntnngtcccagttaccaactgagganngtgtaccccctggtgtgggtgcgtagtgatcaggaaagaaagctctnnagaggcgagtctggggtcttggtcagaggagggaaggacttggagaggagagttagttttctaggttcattggcacttagcttccccaggaaaggggtcacagccccatgactttggtggtggtggggagatcaggaagagagcttggctgagctccagaaacaatattggataacctcccccttcttgggggagagggattagggtgggcctctctagtcccctcagagccttcccccaactcacatggttcacattatttttaaatccaaggccgggagagatgaatccaaaaagcaatatttttcatcacatgccaaaaacgggatagagagaaggagtggcaggcctaggcccctccgattgtctcttgggggttacccctcagcccacctcagtatggtgctgggtagtgggggtacctgggttctaacctctaaataggggagaccccagcctctagacagaggcccttttattttttattctgattagcc

SEQ ID NO: 971 - DNA, 631 bp, Canis familiaris
  misc_feature (1)..(631): n = a or c or g or t
gcctgcgctatctgtccccaacccgnnnnnggtttggtgaagatgctgcctccaaactcctggaaccccgagnagtccagcagccagatcggggtgcccaggcaggactcagggggcctcgctgaccnnagccgaagcatcactgggcctgcctgttgactggcagctccaagccccctgcctccatgcggtgacttggacaggcttctggcctgggtctctggaaagtggaaaggattttttttcctctttgttctagaacttgggcaggcccagtgctcgctctagatgccagtgtcacagcttagaaaacgggcagaaagtctcgactagctggaatcctagaagagtgcataccctactggggccaggtcagaactcctctgaggacaggcctggctgagtggccccggtgccggcattgtgcggggtgaaggtggggcgtccctgggacaaagtgggggagctacctgcacccaccatgctcaggaactgtgggtaaacagcttggcagagaagcagacagaatcccatacagggactggggctgaataaccagggacacacctgctgggcaatggatcagggctatgggcgctgggacnnnnnngtgggtgctaaggggtgagtt

SEQ ID NO: 972 - DNA, 541 bp, Canis familiaris
  misc_feature (1)..(541): n = a or c or g or t
acccccacgacctcacttctggatccttcaccccagtggcctgcagacctcagctcctccctctaaacttcaagtctccaaagatcagaatacgggcggggagggggggcaggttgcagggaaaggcttgatctccatgttttgctcaggagtagttaggcttccccatctcttattctctcccactgtgcagaggacccagatctggctgcttgcattaggagggggtgaggtatccctcatgtccctgtccttgaaggctttcctttccccattctttgtcactatgctcttccttatgaccagccctgcaagaaacccggtgccaggctctgccatgatgtggggccactgtcaccagccagattccaacaccagggagaggccattcagagagccacaggtgggaatgttgcctgtggaaggggagccttttgctacaatttgtaacttattttctaaagtctattttgtaacaatttatttaagttttaaaaaaaaggaaaattgctcccccaacccccaaaaaannnttttnnnn

SEQ ID NO: 973 - DNA, 528 bp, Canis familiaris
  misc_feature (1)..(528): n = a or c or g or t
accctttgcacattcatccttcttgttctgtgcataccaagtgattccactgtctgatgggactatctactggaaaaataatatcctgagaggggttttcaatgatatatatgctcgaaatttcagagacaagaaattcatctagtcctatttaataggttaaaattgctggattagaattaaagcaagttattagtttcttatttcataatagtacaaagcattgagatccagattattgctgtataaaaaatatttttaggaaattctaatagaactaaattttctattttttctgtatcttcctttatcctcagcagggcacactgcatgcttattgatagctatataaatgtgtatatgcatgtatttggcatgcaaagatttatgtataaagatgttcatttaggagcacctgggtggcttgatcaattaagtgtctgactttggctcaggttgtgacctcagggtgctaggatcgagccctgtgtcgggtnnnnnnntcagcaaggagtctgcctctcattc

SEQ ID NO: 974 - DNA, 629 bp, Canis familiaris
  misc_feature (1)..(629): n = a or c or g or t
tcccagtgatgtatatcaatgagagtgttctcattgataaagatactgcangtcgactaaagtctgtgannnncactactttgatcatcaccaacataccctacattgtcatggcgctgggtgtgttttttggtttgatcttcacttggcttgcatgcagaggacagggatccatggatgagggaactccggatgaaagagcacccctcatacgaacctaacctaacggaggcccgagcttggtgaaggagccctgtgactgtcctgacagggacccaacatgaggaaactatccacgtcttcacaggaatgttgcctgttgtagtgaggagggaggagaccctgtgctggcaaatgaccagagcattgtggcaggaggttaaataatggactgacatggttgcctgttaggctttataaaattgttttgttttccatgtgtctagcaagtatttaataaactcttgtaatttttttgttatcaggtgctggtagctccagaattttgtgacaactgttgtggttaaaatgtatctgtatcgcttgttaacgttccctggtctaaccttactcagtaagctttattcaccaaactttgtgctcaaaatatatcaatactattttatgtt

SEQ ID NO: 975 - DNA, 526 bp, Canis familiaris
  misc_feature (1)..(526): n = a or c or g or t
tttctcaggcaggnaaaatatcannnncannnnctacagagggggccaactnnnacttccnnnnnncnnntggctggtagggggctgtgctagaagatttgatccctccctgttttcagcagaagcatctgggnagccccagtgaanagcacagtatgaggcccagcgggcactcccagaagtgcaatgaacggcccaccattnncctggcaccagaaaaggtgccagcaggaggtccggaagcctcctgtcgccccacccccttcctacatctctgagggatgaagttccccgagcagcatgggctgggacggtggcacccagagactgaactcatccttggtccccggtacggcacaagtgagtcatggatgcttccctgggagcagcagggaagagacaggagaggtcccccgagatggaggctgggctccacctcttcccatatnactaccnnnntattcagtcacagttacagcccgtgggggttgggagttgtccttctggaaaacaggggacaaagaag

SEQ ID NO: 976 - DNA, 585 bp, Canis familiaris
  misc_feature (1)..(585): n = a or c or g or t
aggaaaatctcttatgtgcattttgtntactgacattnannngatcaaanntaatttatgatgcttcctatattctgttgttcccagnnnngagtttgtgaagatcaaaaagaacagaactgctctctgaaaaaaaagtgcagcccctaatctcatgttgcccagagcttccatgttctgagcagccacaggtccactgcacccacaggatggaaaagcaccttcaatccactttttctcccgtagcttccaggagcatatccctttctgttccagtcgcatctgcgggcctctcttctgtctggcatatggggcatttctatcagggtcatgcatggttacaagcttctcgtatagtgagagggagtgtggggagttgtgtgacagggcatggttcannannagagggctgatggacttcttcctctgcacctgattttatcttccccaaacctccaaaaaaacttctggcatgagcacattgaggctccgaagtgatgaagtttaaggccctggaagagaagagaaaggtaatgcctctatgaaagatttatataaaagatgcaagtggcctttatttttgct

SEQ ID NO: 977 - DNA, 153 bp, Canis familiaris
  misc_feature (1)..(153): n = a or c or g or t
tttgatctggagtttaagagaagtggtcctttggctctctgagggtctgatagttgaaatgaggagagcagaacaaagagcgaagagaaatgttagaacatcccaatgatgaactcctgcttgtgccctcacannnnngggctagctccacag

SEQ ID NO: 978 - DNA, 481 bp, Canis familiaris
  misc_feature (1)..(481): n = a or c or g or t
ttgcactaggggctgatgacgctcctgcaggcctaacccaacactaccttcagctcggggctgaaattgcccggacctgttacgaatctnnnnatcgcacatatatgaaactgggaccagaagctttcagattcgatggcggtgttgaagccattgctacaaggcaaaatgaaaaatactacatcctacggccagaggttgttgngnnnnacatgtacatgtggcnnnnnactcatgatccaaagtacangaaatgggcctgggaagnnntnnaggccctggaaaatnnnnncnnnnnnnncnnnnnnnnatnnnnnnnnnnngggatgttnacctccgacacgagagttatgacgatgtacagcagagtttcttcttggcagagnnnnnnnnntnnnnnnnnnnnnnttttctgatgatgatctgcttccactggaacactggatcttcaataccgaggcacatcttctccctgtactct

SEQ ID NO: 979 - DNA, 535 bp, Canis familiaris
  misc_feature (1)..(535): n = a or c or g or t
tgccctcccgnntncgcctgtcccgggctgtgtctgttcagagccctgggatctggggcctgcgccactnnnnccgcgccggggcccctccacctagagccaccacccgagctgctcccgaggccccgccgggcgcgccccagccctttaccaagaccggcccccagcctgcgggtgctctccccggggccccctcctctgttagtgacccgggaacgtggaggctccctgccccagctgcggctctgcccaactttcttgccgaggtcctttccctgcgggaagactccgatgcagattgttccagttcctgcttctccagggctgggcttccctggccgaggctttcgctgcccgctgagcccagctctgcctgccccatcccccactggattcttctattttatgttttccaccttcctaccttgttagaagcgcaaactcttctctctgtaggttccagctgttctctctttaaatctcaggtcgaattcgtaggttttcaggacgatttgaaagttatctaggtacattg

SEQ ID NO: 980 - DNA, 296 bp, Canis familiaris
  misc_feature (1)..(296): n = a or c or g or t
ccagaatttggtgtttggtgtgggaagggcttggcctnacgaatggcaggtgtcagagtaacaagtctgggaagacacacactggtcctcatgatgctgaagggcctagagtagtcatgatctctgaagacactgcagcttcaccttggcagcaagacagccagaggaagcccattaagcacagaggaaagaggttcacagcactctggcaggaggctgcctcctatgcccagctctgccactgctgacccaacccagggcccagaacatcttcagagagctgggaattttacaaa

SEQ ID NO: 981 - DNA, 553 bp, Canis familiaris
  misc_feature (1)..(553): n = a or c or g or t
gattgagaatgtgttctnntaaagtatactgaagtgattgaagggaatatttattgggaacaaagctatttttcaagaatattaataaaatcttattctgaccattgtagaatttctcccacttgtataacaatttgacctaattgtggatgattgacagatttgtcctatatattactacagattaatcataattaatttaacaaattaaaataggggatttataaaacttttgtattctgtgacactcaaccatactagtagaaacttactcttagcctaattttttaaaagatggtttacaattgtatgtaaaaaatagagcagtacccagttttttaagtctgaataagagttataatttgaaaatatatatatgttatatacattagtttctctgggaagaggaggcagatttaggtgtctgtaaatttatttttctngccataatgtatagaagccaaaaattttctttattttgtttgttcatgtttattatagtttgtttataaaattaatttgtagataaaagtggaaaatatttttattattt

SEQ ID NO: 982 - DNA, 570 bp, Canis familiaris
  misc_feature (1)..(570): n = a or c or g or t
agcnncttcatccctccgnnnctgacccnnnctgcccccnnnntgtcgagtgccccccgnnnnnnncgnnnnngttctctgctcttccattctgggtgtttcaggaagatgaagaagaaaacacgtccgtgaactccatgttccttggctgtttaatcaagagagacaaaattgctgaggagctcagggctggattggcaggtgtgggctcccacgccctccttcctcgcgctgctgcttccggctgagctgcgccagctgcttctgcccaccccgcccccgggctcggggtgctgagccctgactggcggctccgagagcggccggagtcccggacgcctgcttgtccagaggctgcccctcccgccccacctgctcgaccagcttccttgggctgaggggtgggagggggactggccatgtcccgagggtcccgaggcttctgcagggcagcccgaggagaccggggtccccggggcgtgcccagtggaggggccgttcgttcgccacgtcctgtgcaccccgtcggcgctctgcatgctccgctccccgcgtgcccgctgcgctgcc

SEQ ID NO: 983 - DNA, 484 bp, Canis familiaris
  misc_feature (1)..(484): n = a or c or g or t
tnatgtactcaaaatatttattgaaagacaaagtagagtattttaatgttatacctgccattttttcttanngcacattttttttgcgtctaactgccagtgccattgtcaaaacttgtttttaaaattgttgtacatttcttattaaactaagtgcttaattttaaagtattatgttgccatcatatagtgtataaaatgtataattgccaattcactgtaactattatttattttttaaatgaaagtataagaatgctttctgattcaagaaatttgagttattaaactggtttccttatcctcttttctaatgtagcataaaaattgccctgagtttgagttataactgccagtagatgaccagtcacaagtgaaccacttctcagttgccagtctttgctcatattaaaagcaacttaacagatgtttagtttttgtatctaatctnngattattaaaatgtttataaagtttattttta

SEQ ID NO: 984 - DNA, 275 bp, Canis familiaris
  misc_feature (1)..(275): n = a or c or g or t
tacccatgaccncgcccaaagggtnnngctgatgnnncgagaannnnnncattnnnnccgggatggcnnngnnctgnngggctcccgggcnnnccgggannnnnnnctgggnctgatgggctaccagctcnnnnnnnnacnnntnnaggaactggagtnanagagaggcctgccacagctcaagagctacttgaggnnnaagctcnnngnnntgggnnnccgctgggggcctgaaggggggtgaggggatgtncatggggctcagggtgannnnc

SEQ ID NO: 985 - DNA, 520 bp, Canis familiaris
  misc_feature (1)..(520): n = a or c or g or t
gggcagcatcgccatcatnnncgcccagnanctcannngngagagggaagngcaggtggaggaatgagatcagacttgagagcctgggggttgggggggtgggcagggggaaataggaggaggagagactgtaatacaaacactaggagagcaagtgactggaaagaactggtgcagaagagggacaccccttgtaggtgagggtgaccccgagacttggcagagaggggctgcctagatagaagacctggaacaagtgtgagaacccggagatgtacagtctaggctggggctgggggatcataagtaagggctgagatccgagcagcaaacctggcctcatgccatgcggggccccggaggggaggcttttaccctagagagaaaagcatgggggatggagtgttgggggctttcaggcaagcggacagagcacacagcgagcagctggggcgagggagtgtgccttttcttcccggacagtttccttccctcacggttatgctccccccacccccac

SEQ ID NO: 986 - DNA, 398 bp, Canis familiaris
tgctcactccctccagtatcaccctccctgccaccactctgctaggtggctccccagggggtagcggcttggtctgtgccatccactgtggcatttccatcttgctttcgcctgaagattgtcttaagcagcagcccagcccccagtgggtgggtggagggggcgaaggagggctggcattcctccaagtgccaagcagccactctacaccctccccctgccccaggacttgattggattagaaagatgcctatttttcttgtatcgaactctattttctcccagagacactatttttgcagctgtttgaagtttgtattattttctgtactgcagagcttacacacaattgaagaagaatgtcagtgttcacgttttcttatcctgtgtttagaagt

SEQ ID NO: 987 - DNA, 241 bp, Canis familiaris
  misc_feature (1)..(241): n = a or c or g or t
agagagctctggcactaagtcgncaagaaattgacatggaagatgaagaagcagatctccgcagggctattcagctcagtatgcaagggagttccagaagtatatctcaagatactccacagacatcaggtatacatcttacttcagaagagctacggaagagaagagaagcctactttgaaaatcacaactcagaagtatatgaaggaaagttctgatcagctgacatcctcttaatgcg

SEQ ID NO: 988 - DNA, 624 bp, Canis familiaris
  misc_feature (1)..(624): n = a or c or g or t
aaatttatgatcaagattcagaagaagaagtataaaatnnnaggctttnnattnnccaaacttttaatccaactcaagccataaagtgaagaaggatgtgaccactgattcgcaaatccattcggtctagttaggaaaacatcaaaacttggaaagtcttgggaagaagtacactgagaggctagcaggcattcagacacaaatactggacgttacggaccggttctgaggaagaagcccttccacacgggggaagccaggatctgagcaagtgtgagccttgcccttacaggttccggtctcagctcagtgtcagttcatgtatacacaggagggtgttccgttacagctctgttttacttttctgtatcttttgtcacttctcttcatttgtctgcgcctttttgtatttagttcatagaatcatttaatctgagatttggatggggccttcagatatcatcctattttaataacgatatatagttttcccttcatttaaagtaataatttctaaagcaaagaataagtcttgatttttttctcaagcatataaatcaaattaacttttacttttatatgtcccctatttgtnnnngttttatgtagaaaagcctagatgta

SEQ ID NO: 989 - DNA, 68 bp, Canis familiaris
  misc_feature (1)..(68): n = a or c or g or t
gttttttgaaacctcagaataaattatataatgtatcctntacatgtnctttnnnntgttacttcaaa

SEQ ID NO: 990 - DNA, 580 bp, Canis familiaris
  misc_feature (1)..(580): n = a or c or g or t
gaagcactcaatcacatgtacaaactacggacaaacctgcaanctcctgaaagcacccagtctcaggacttctagagaaggctatgtgcttggaaagaaaggctttgtatctcccagcggaggcctgccgggtggtgtgtgtgtgtgtccaggtcataatggaggtactggtatctctggagctctagaaccccttttgaatgtatgaaaaactgtgtaatgaaacaaggaatgggttcataacattgttggaaagcaacaggtttgtgcttagtctttgagacattctttaattccacatctgtctctagggaaccagctgttcttttatgggggagagaaagttttggcaaaacaagttattttccccagcagagcctgcggtctcctgtgtggcattgtcatgtgggtgaacattcagtgatgtttagtgttgcttgtaagtgagaaatgtagtaggaatgatgatgtggcctggggcttttttcctttcttgaccctgatctcttgggctaaatttagactctcctagagtctgctcacacagaggtagatggcagatgagtggtaagatgttgac

SEQ ID NO: 991 - DNA, 451 bp, Canis familiaris
  misc_feature (1)..(451): n = a or c or g or t
atgttaatatttatnntannnaatgcagnncatatttttnnnctttatacagactactgacanctnngcactctataattacatagttccctgatactccttaataagcataaatggggtaatctcctgaagtttattctttttatacagtcattcactanncagctagcccagatagttagatacatgccatttaaaataaatattaacattgttatcaatacatgccatttaaaataaatattaacattgttaccttatcagtaacaatctaaagagttataaatctnnnnnnntagtttgctataaagttgnnagttaagnaaggctcttgaggagatggcatccaagccaagacctaaggatgagaaaaagccacagnaagagcagagagatgagtggtttagtgggaacaacacattgctgtctgttggcttgtgtaacattgaaa

SEQ ID NO: 992 - DNA, 551 bp, Canis familiaris
attaggttttactatcaacagtgtatttacacaggcatctctaattctgacaaaaatcctatgcaaaaaggtaactatttccccaatttttatagaggagttaacctataaaacaactggggttcaaaacaattgagatgatctggctcactgttattaaaagctggaactagaagccaggtcttcttacctgtagttcagcctgccttctgtgtactgcagttataatgtcagaccatttccaacagtgtgatatctgagcaaggcaccccactggcctttaaaaaataatatatctgctgacattgggtcagatgatcgatatattttaaatatatggaatgtgatggatagcaagctcaaatttatatataagtgattttcttactttgcagcaccagaacgactctctaaataactactttaaattctcatataggtacaattaaagttgaaatcttggtaggtcctctgtagctggaagtgggaaataacacttcttcctaagggaactattaaaatttagcaattactaacaatcactgaactgt

SEQ ID NO: 993 - DNA, 451 bp, Canis familiaris
agaaaagctccgtgaattatgcccagctggagtggatgtttactttgacaatgttggtggtgacatcagtgacacagtgataagtcagatgaatcggaacagccatgtcatcctgtgtggtcaaatttctcagtacaacaaagatgtgccttatcctcctccactaccccctgctgtagaagcaatccaaaaagaaagaaacatcacaagagaaagatttctggtgttgaactataaggacaaatttgagtctggcattctacagctgagccaatggtttaaagaaggaaagctaaagatcaaagagactgtaatgaatggactggaaaacatgggagctgcattccagtccatgatgacaggaggtaacattggaaagcagatagtttgcatttcagaagaaacctctgtgtaatgtgtataagcatcttcatcaaggaaatacacagat

SEQ ID NO: 994 - DNA, 493 bp, Canis familiaris
  misc_feature (1)..(493): n = a or c or g or t
ggcacccatgnnnnnnnnnnagcatcccctcatcagagatctgagtacaagctccacagtctccctttnnngctcccaaggaaccaaaaccaaccaagcagatcttggccagtctagaggtctggaccttccaccaagcttctaagtttcaaaaaaatcccagtctcatacttttgttaccctagccctaggggtgattgctgtagttcttacctctgtgacaccttagcatctctaatacctggctgacgacccttcacattaagttctttataaaaatacctgctatggttcctgtctcctgattggattctgactgatgcaagtccagtgaagtcctatcaatgctttaagaacactgtgctggttgttatcttccaggaggtttttatctctactaattcattctccaaggccaggaaccagtcctcaatttggcagaatcagaattgacaatggaaggagacaaaagcaaatcaagggcagcccaggt

SEQ ID NO: 995 - DNA, 697 bp, Canis familiaris
  misc_feature (1)..(697): n = a or c or g or t
attattttattatggnncaaaggtattnnnaagactttgtgactcacgtggcccatcctgtgtgtcggcccctgacagcgtgcgcccggcatccacaccccacgtgggccccgccgcactcggccgaggaggaggaagannnnnnnnnggagggcggcccctgggcgggagtggaggatgcccctgctgggggagcgcccgtcggtcaccttgtttctccaactacctcccgtcgtcgtggattcacgtgggtagccgtggtttccctggaaggccgaggccgaggccataggaggcgccgcgcagacccagtgcccggagggacagctcaggacgctctgtgctggtagccggagggcagtgccgcccccgggagcagtgagaggacggggcctcggtgcccacggtggccggcggggacggttcgttcggtgtctgcagcgtggtttctgaatccccgtcctctggccacgcctctcctcctggggctgggccgtactccttgcatcaaggggttgcttaaaaaaaagaacaaagcatctttgggggaaactgcctctagaagcctctcctgtaccgacagctttgcctgaggggagctcttgcttccagaacggtgttactgcagctgaaacgcaatccgaaagctattttcttatcgtggtgcatcaacaggcaccgcggtgcccgctacccc

SEQ ID NO: 996 - DNA, 631 bp, Canis familiaris
  misc_feature (1)..(631): n = a or c or g or t
atgaatttcatgtagctttttaaattannnnnnnggaagattgtaacagtgtgaccacntagcattttatcagccttgacttttatccaaaaggggggaaggatttcctatacatttccaggggaagtataaattgatacaggctctgtgaagggcaacttactagttgctatctaaaattacaaagacacaaactctttgtctcagtaaacctgttgctgggagtgaatccaatagatttatttgtatgttgtagactatttgtacatggtttccctatggtattgatttaagaagtaaaaatttgtaaacaaccttagtgtccaccatggggagctgggttagtgatttgtgctggaatggagaactacacagctttaaaaatggggactgtctatgtgataatatgggaaagagctccaagatacattgttaaatgaaaaggtataaaacagtgtgtaaagtatgtttccatttgtgtaaaaaatttttttggtcacacacagacaaacacaatctcctaagggtacaaagtaacaaggcatactggttgctcttggggaggagaactgggaggaaagggatgaggaataattttcattctatatcttttgatatttttggaattttg

SEQ ID NO: 997 - DNA, 227 bp, Canis familiaris
  misc_feature (1)..(227): n = a or c or g or t
gtagtnnaatgttttcattnnncnggtatatgattgcttcatgttttgtaccatcataaaattttgtgcaaattttttttacagaaatttttatttnntatgacaatatgacactnnnnnnnngttgtttcaaaatgnnnagcgaagccttaactttaaatgacatttgtatnnncagacactgagtagcannnaaatcacatagaaccgannnnnnncttcaatcc

SEQ ID NO: 998 - DNA, 573 bp, Canis familiaris
  misc_feature (1)..(573): n = a or c or g or t
cataagaattcannctaaagaagagtcagannaaaaagaggaacagnnnnntgaatttcagaaacaaaaagaagtgttactctccttatttgatgagaaacgtcatgaacatctctatagtaaaggtgaaagacgattgtcatacagagcacttcagggggccttgatgatatatttttacagggaagagcctagattccaggtgccttttcagttgctgacttctctcatggacatagacacactcatgactaaatggagatataaccacgtgtgcatggtgcacagaatgctgggcagcaaagctggcactggtgggtcctctggctatcattatctgcgctcaacagtgagtgacagatacaaggtatttgtagatttatttaatctttcaacatatctggttccccgacactggataccgaagatgaacccaattattcataaattcctttacacggctgaatactgtgacagctcttacttcagcagtgaagaatcagattaaaaccatctgcaaaaatctatgaagacatcgattactcaatctgtgttttttaaaattttctatga

SEQ ID NO: 999 - DNA, 517 bp, Canis familiaris
  misc_feature (1)..(517): n = a or c or g or t
tcaattttccnngagtaacaacaatcggttggtagtagcccgnctgcnnnnnngcgacaagtnttaacagtatttctgctctaatcttcttcccnnnctggtttctgtagacaggtttttagaagactagaggcttatggttaggatgtaggctttaaaaaaaaaaaaaaattatatacccagttcctagagcaaacggaatgggaagcaaggagttgttgataaatccgagattcaaaatagtcctgttaaaacttaaaagccagatactggttagaggactttataaaggtacctaaccacgcagccattaaaagttttcatggataatagtggggggggggggagaaaaatctatttgtaataattgctgttttctcaagtttctgccttgtgcttcgacctggattgcattatggtttatacaaaaagggggggggggaagtaaagcacaggactttcatatatattatatatttctgtttaccattttaaaataaaaacaattttccnnnnn

SEQ ID NO: 1000 - DNA, 605 bp, Canis familiaris
  misc_feature (1)..(596): n = a or c or g or t
canngctatctgctctttatttttctactattttgaattcatttnnnnntttttttctagtttcttaaaagnnnnnncttagattagtggtttgggacctttattatttttctaacattaaaatcttaatgctatgtttttctccagattgcatcccatgaactatgatagttttattttttttaggattttatttattttagacagagtgaggagaagcagatggagagggacaagactctgctcagtctcacgaccctgagatcacgacctaagccaaaatcaagagtcagacaataaacctactgagccatcctggtgccccttttatagttttattttctaattacccttgggacgtccttttatctgatggattgttaaaggtgtgtttttctgttattactattttaatcctgatacagtaagagcatgttttctataacttcagttgtattctccaagatttgaaacttttgttgaagtttgttttatggcccagaatagtctatcttggggaatgttccatgtgcacgtggtctagacaactagaccaatctccttgatgaacataagttttgttttgttttgtttaattgtcaaaa

SEQ ID NO: 1001 - DNA, 270 bp, Canis familiaris
  misc_feature (1)..(270): n = a or c or g or t
ccagacatccccatttttatattctngaaagaaaaagggaaataagcaaaaatttaagtagtattatccagttctattcannnnaatacacatacatgcacacatacgtacatattggagnnncttcaaaaataatgtatatatgtacatatattcattgcttgtaacaaaaaaagcatagaaaataactttccaaatgtttgtagagatatctcttgtggaaatgatttctatatttttatttatgtttttctgtatatatcaaattgt

SEQ ID NO: 1002 - DNA, 534 bp, Canis familiaris
  misc_feature (1)..(534): n = a or c or g or t
gagnncttggaactgtaaagattccaatgacatagtcacctgggaccagaggaccaagttaacgtgaagccagcagaatggacctcaggaaagcagggggccggcaggtgcgtttccccacgtcagcagggccctcgggtcagcgttgctggtgtcctggaccctcgttgtccagcttgtggggctgattttccaggaagagtgtaatttccatagtgcctttgcttccctgcttcgagttcttgggggctgctaacagtcaaatcaggctcttggacattcagttaatctttagacttgaaaacgcatgtgtataaggtcttcagtgtttacagatgtcacggtcaggttttcattgtgttcatcagcacctgctgagtttactaatgaagaggaaatttggggaaaaaccaatagatcagcttctgtagggatcttttatatgatttttctttaaatgtgccgggttttcagtgacctaccaaatggatggaagggaatgtggatcatgactgtgacacagggcacttctct

SEQ ID NO: 1003 - DNA, 509 bp, Canis familiaris
ggattcctgcactactaaggttgaatcagcaagggaggtgagtgtggtatgttagaaagctcaggtggtttgaatagctttcaaccagtgcttcccaactggtgtgtcccacaactgccacaaaatggattataggatggaaagaaatggccctagaattgccaggcagagcacgaatgtcaggagagagtgcctcctaggcaagtagtatcattagttcatgcaggtgtgctatgcaaatgttttctgtgtgctatgatctggaaagattgggagtgttgccttgaaaaagttgtttggtatagccaagtctctttcccaccttggaaaatagagctggtagatcctgttctataaagtactgtggagaggagaggataacagattgaggacatccattctgtctgctggaaaatatctccgaagtttgaggatctcttctcttccaagcggttcatttagggctgattccatctcctggctttggaggctacatgggcctaggtttt

SEQ ID NO: 1004 - DNA, 421 bp, Canis familiaris
  misc_feature (1)..(421): n = a or c or g or t
tttttcctctttttttttnntatattttattcattcatgagagagagacagagacacanncagagggagaagtagactccacacagggagcccgatgcgggactcgatcccnnnaccccaggatcacaccctnngnngaaggcaggtgctaaactgctgagccacccagggatcccctgttgttcctctttattatatattttttgttttataagtcactatttttataatttcatttccatttttattttcctgttatttttttctaacattttaagatggttggaggttcactaattttcagcttttttttctttcccaaaataggcacttttggctataaattccacatactgggttacctgcattctgcaagttttgattcatagaatgttttcatcatttgatcaaaaatgattaa

SEQ ID NO: 1005 - DNA, 567 bp, Canis familiaris
  misc_feature (1)..(567): n = a or c or g or t
atcttctacttnnantccactccagcatagacccaacctgatgatggggagaagtcttnnactcagcagatagcaatactggatgttgattgtatttattcatctgaaatagagagagaaagctcgtgtgcaggagcatgagcagcagggagaggcagagggaaagggggaagctgactccctactgagcaggtagccagatgtggggctccatcaggggacccagagatcatgacccaagctgaaggcagatgcttaaccatctgaaccacccagataaagctaacgtgactcctttggaatatccctagtggaagaaggaacatttcagcccataggcctgactcagcccactactttgatttcattcagccttcaggtaagaaagctctgggcatccctgcactgaacaccccaagcttctactcctgagcctcaggggcctgctgtggtcaactcacttggaaagaaaaacctctcaaagttaaggatctaaacaattaaagaaatgcaaattgtaattttggaggaannnaaggccaagaaccccnnnnctagaatttggga

SEQ ID NO: 1006 - DNA, 464 bp, Canis familiaris
  misc_feature (1)..(464): n = a or c or g or t
ccaaaacagccctgccacctgnnagccctcagggccccagagaagggcctgaagttctagcctacccacaggaaaccagaggccactgtcccgcaggtaggtgttgagagctttgcgggtgacgcctggctccaccaccacagagaaatcttctggattcagcttcaggattcggtccatatgggtcaggttgatgcagacaccaccctgacaggaaaggcgccaagttgctgattgacctccgtctttccagggccaggccacattccataggannncannnagggactgacctggtggccactctggagcccccaggcggcagtgtcagcttgtctcacagaagagactgagagcaggactctgaggtggaccgtgcatggagggcagccccggtggcgcagcagtttagcgccgcctgcagcccagggcgtgatcctggagaccctggatcgagtcgcacg

SEQ ID NO: 1007 - DNA, 535 bp, Canis familiaris
  misc_feature (1)..(535): n = a or c or g or t
cagctgnnaggccggtgaccttgttttattttccataaaccccttgtgcctggatctcccgagctgctgcgtcacggcgcgaccccgaccctgcctcgcccgctttcctgcaagtggccagacaccagcctcccaccgcccggagagccctccgcctgccctggatgctcagctgcggcaacggcgccccacgccttcccagggcacctcgcgtcctccgttggacagaagctgtaagcgcagtggagagaaagggttgtgtttcaggctccccgtccttgttctgaagccagagctgcagaatgtcagacacaaatcatggtggagaaggtgacgtaacagagttggtttacagccgcaaacttgtttctccaggagtttctcggtttgtgtaaaggcgcgtattaagtctgcagacctagggacacagggagagtgtggttggccatttccaattgtgagattatgtctgttgccagttgtctaatctgttttatcagctgctgggaggaaaggtcattaaannntctccatc

SEQ ID NO: 1008 - DNA, 591 bp, Canis familiaris
  misc_feature (1)..(591): n = a or c or g or t
cttgagatagtcatggtttnataatttcttagggctcatcnttaaaaacatgaagcaagtgttgatacatccttttgaagagagctttaaatttatatttactagctagatcttcctctaggtcataagaatacacgaaagaaaaaatagagctgtgttattaccaccaccaggtcgggaggtgacagaggtcctcacacttgggaaaaaaaatacaaataattatagatagtaagatatgaatatagctctaaaaagcactttgtttcttccatcacagcctgcctattagcacagcttcaaaggggcccagggaggacaggaagccagttatgtcatgcttagaagctttcttccacactgtttctccgctgtccacagagggcacagcagttgaaccgccagctgccaccttctaccccagctcagccttgggagggttgttttgagggatgtcactaaaatttcttctcatctccaggtatatggttctccagaaattgaagaggagttggtagttcttcattcaattgggcaacaggtggcactagaggccatataatctctannnnnntaaaccccccagatccc

SEQ ID NO: 1009 - DNA, 643 bp, Canis familiaris
  misc_feature (1)..(643): n = a or c or g or t
ttatatggctcccttgtgcataatctcgtgcagcagnnnnagctcacagcttgccaggtccatgctctctccaagccaggaccatgtttcctgctcctctgcatctcctcatggccaccagaccacttcggcccaaccaagtatgatgggaagtgacgagtgtctcttctgtgggagggtggctgaaggcatactgtgactccccacactctctgctccttacgcagtggctctggaaaccacctgccagagctgaaaaagacctagatccctgggtcaccccttcagaaagaaccactcagaacactcagcatggcatgagaaagaaagacattttattatgctaaaccactgagatctagagactgtttgctttcagaggtggcttgcactgatccatacttttctgctggatgatatccctcctctggtttttccacctggggacgtgaagaccaagcccagagattccgtctttggggcgcctgctctgacttccccagacagtcagcccagactgggctctctgtgcctggtacatagctctccaggagaaagtattaccagatattgcaagtatttctttacatgtttgccttctctgctgagcccatgagctccccaaagacaagaatcacatcat

SEQ ID NO: 1010 - DNA, 295 bp, Canis familiaris
  misc_feature (1)..(295): n = a or c or g or t
tcatgannagggtgctgtccctgcctgtcagccccatggccgcccnntaggaaatggccttcacctccacttcccggccttcctgctgaccccaggagaaccctttgcatgccccactgtccctcagatgccacaatcgtgtgaaggctgctaccaatcctggctgccctcccacccctcgtggccgtgctgtggtccctgcagcggggaagcctgacatggaggtggcnngggcctgggctccggggccctgctggccacacagcctctgggtctctttgcactttaagaagca

SEQ ID NO: 1011 - DNA, 497 bp, Canis familiaris
  misc_feature (1)..(497): n = a or c or g or t
ttgatgattgannnnnnatccaagcagtgatttcctaaaaagttactctcaccttggaatgtgaactctttgtattctgctttattcgagtcccctcggtgtgcctggccctctgaatggctctctcatccagtcatgatattccattccacctcaggcaaagttgtttcactgagttgtgcagatctagtgtttgttgattacatttgttaatgacctcactaatctcatcagacaagccattaagttttgggaaactgcccactgtggggaatacacattttccaagatgcttattcttacctgatcttgaattttatcattaccaataaatagagttttccttgatgtgacaggcttcattttttagaaagtgtgtgccagctacccaaatctgaccaactgtagttggtctgtcagccattcttccaagtaaaaatgatgctctatggagaaagnnnnnngatcagcttgtaattccctcacctaagtgcttt

SEQ ID NO: 1012 - DNA, 416 bp, Canis familiaris
  misc_feature (1)..(416): n = a or c or g or t
tgcacgtccgcaagccagagaagtatcagttgcaccttcacgagagctgtgtgctcgcnntcaaattcgnntcttgcgggcgctggttcgtgagcaccgggaaggacaacctgctcaacgcctggaggacgccgtacggagccagcattttccagtccaaggaatcctcctccgtgctgagctgtgacatctccgggaataacaagtacatcgtgacaggctcggnnnnnaagaaggcnnccgtgtacgaggtggtctactgagacccccccccccatgcctgcagccctggcctggctcctgggggaggggcgtcctggacagagacctcgacggcccccctctgctcctaccttccagtgctacgtcccgtccacactctggctgcctccctccaacctgccctcgctggaccc

SEQ ID NO: 1013 - DNA, 497 bp, Canis familiaris
  misc_feature (1)..(497): n = a or c or g or t
cagtgtgatgctgagtangnctgngnnngannngntagacccccactggnnnntggctactggcntagaaaggttgcccatnnnnnnagtcccctggcaggcangaacagcccagtcctagcaccctgctgcacttggccttgggagtcaccctgggaagtgcaacattgttgcagatgtgctggtgggtccccagggtggcacctgggctgtcagacacctgctctttaccgtaggnnctcctgaaggaggtttgagtagtcccctccacagccaccacaggccccacctctgctcactccccaacactcacacacactgcagagagcccacatgcagcagagccccgataggcagtggagaaccttctaacttcaagtcaaggttcaagctttggttattgcaagggatctgaccattgtaagtgctgaattgggactgcttgcgttttaaagtgattgtaggacttttttattacctttgagtgaccagaagga

SEQ ID NO: 1014 - DNA, 572 bp, Canis familiaris
  misc_feature (1)..(563): n = a or c or g or t
ggtgtagctcacgactgaagtactcaactccagatttgctctttggggacantaggatccactaggacgctaatctgcntagccctgttttcagagagttgatctttctcacaaccaggttccttgagttacctcagcagaagactagaattagagacagaggacagacctcttgtcctagtataaggcattaagtatatgaccttgaatcacaggaatgggttaatagggcctggggactaggtatctatccgttagcagtttgtagcacgtatgtcttcaaggctgtgaattctgtactaattatcaatatttttaggtcattctgtatatgtattttaaattatggacatgaacttgggggaaaatgtgcaatttggagggctgcttgatttgtgttgggttagggaatatttttctttttttttgggaatatttttcaacttcttgctttatactctaaaatgtggtgtgtttatgaacttgttcatgttatttaatcaaggagatttccaatcgttaattcctcattactgacaaaaaagggaannnnnnaacacaggaagggaaaa

SEQ ID NO: 1015 - DNA, 596 bp, Canis familiaris
  misc_feature (1)..(596): n = a or c or g or t
ctcggcntgtnccancnatcctaagatcatccatcagaattcggtgatgnnaatgnctnctaagaagtatatattttaagacccgagtattacccaatggccactccagtctctggaattcctcttctggcttctacgcatagggccggtggtttgattctcaaggtcattacctgaggactctgcagccgtgagatcacttgagtcaagctggatgctgattcatcccaagggagcaagtaaatggatgtggatcctacctttggttttctcaattctgctaaggccagaggagctccgaggcactgatttgggggaacctggacattgtggttgttcaaaggacaactatgaatcccttctatcatcttcttcactatggattttagagaggctggaagaggaaaaaaaaaaaggaataagaaaggaataagaacaggagtagtgatgcttatggaagagcttcttataatgggaaggagaatcaagcagacttaccaaaggtcaggctaagagcctggatatgcgcgattgtttgccaaataattggtgcttccagtggagggagaagnnnnnnaaagcaaaatttgcaaagg

SEQ ID NO: 1016 - DNA, 209 bp, Canis familiaris
  misc_feature (1)..(209): n = a or c or g or t
tttancgttacttgtcnnnnnnngactcggacatacatgaagtggacacggagtcctaccttgcgactttaaaggacactctagaatctagaaagaatggcatgataggactttcagatttcttcgttntgacaaggaaagtttaggaaacctcgagaagaaaattcagaagacagaggcnnnnnntacagaggagaatactttttaat

SEQ ID NO: 1017 - DNA, 510 bp, Canis familiaris
  misc_feature (1)..(501): n = a or c or g or t
cctcacttgcccacaatcccaaccagctcctctatnnagagacctccttattaggaaagctcagagaacttcgttctcctcgtgtcagctttttctggggtgcctcacctctcttaacagatgataagctctttagggcagggacagtatcaaaatcatctttactggaactactcaaatctcttcttttgtaccaaaacaacaacaacaaaatacatctgaagcactgagaagggcaaaataacatttagatactcattccctggcagaacttacaaaacctaaatctaatcatgaggaaacatcaaacaaacctgaactgaaggatattcgacaaaactggcttctaactcttcaaaaatgttgatgccatgagaaaacaaaggctagaaaacatcttatgaaaacaaagagaagcaatggatattaaagagatcaaacaactaaatgccgatgcatgatcacgggcaaaaagtactatgaaggtcggtattagaaaaactagtaaaa

SEQ ID NO: 1018 - DNA, 542 bp, Canis familiaris
  misc_feature (1)..(542): n = a or c or g or t
taatgtctgtcccgtgtgtctgtcattgnnggcanagtgttannnnntgagtgaaatctctggttcccttcagctttttgttctctgcnnngcccctgtgctaactctagccatgtgccaaaagcaggacggtccgggaagtgagctgctgatggtccggagcagtggctggtctgccctctgctttttccttgaaagaaaaccatttttctaccttttctttccattcttaaatagtagctactgagtggtgcttcatctggacaggcctggactgaagcaaaagagaaaatggagctggcttccagcaggaagtgaattacttcagaatctgtgagcctctgcctggtgcctgtgagcccatctgagtaaggcccgttggcaggggaccttctcatatgctatcctttaaagttttaactaaatatctgtaatagcaacaatctgaggcaagtaaaaggaatagtaangnatgannnnnnnatcaagggaatnnnnnntnnnnnnntgtttgntnnnnnnatggnnnngtatntggatac

SEQ ID NO: 1019 - DNA, 470 bp, Canis familiaris
  misc_feature (1)..(470): n = a or c or g or t
tgcagccaatgtgnngccatcatggaggttcctcgaaaaattaaaaaattaaaaaattaaaaaattaaaaacgaagcagcccgggatcccttacgctgatgaacagattaccaagagctgatatatctacaccgtgaataggagtcagccatgagaaggaacaaaatcctgccgcctgtgaccatgtgtccccacacccaagggtgtgatgcccagtgagagaaggtacaggagaaagatgaatactgggtgctttcactcatatgtgggatctgaaaaaaacaaaacaaatgaacaaggataaaccaaacggaatcgtttttttttttttaacacagaaaaatatatctttctttaaaagaatgatattttccaaaacaaacacgcaaaaagagtaaagtgacaagtgtggcactgatttacaatttggcagatctctttaatatctggattcacagggacgcctgggt

SEQ ID NO: 1020 - DNA, 621 bp, Canis familiaris
  misc_feature (1)..(621): n = a or c or g or t
gctagacannntcatttaaccttcacanctcgcgatgtaggtnctnnggtttcccccattttactgnnngattactaaactngaaaggaacttgctcagaatcctacggctaaccaaaaccggaatttgaagtagttctaaccccagagccggagcttcatttgttttctgaagatcttacccgccaaagtgcggggacatatgtttagagattttttttttttttaatgcatgtactgtttcatggattttttttcccatgttatgaatatacagattttcttgacgcattttccttcagaatgcaccgtcctattaatgcctgaactattaatgctgtttaatttcgctgacaatgattattaccattttctatcataaatttatacacatttcaaatgatttttttaggatccacaatacagttgcttgatcaaagggaaagaacatgatacatactgtcaaatttcttctttctataatggtttaacaattccgcagtggtatataatatttcacgggtcctcatcattaggtattgtccaaacgaacatcacaaatatactcatgctgtaccatttctgattaaactgtttatagagtgtaacatcactagaaaac

SEQ ID NO: 1021 - DNA, 633 bp, Canis familiaris
ctgggaaatatatatgcatacatatatatatatgcatgtatacatatgcatttaatttgaaaagggtaagtacttagacatgagaagcttaagtttttagattatatttgggcatcaattatgagaataattattacagtactttttgcattttatcacctagagtagataatttgtaagctgactcataggttctgttcctatttccctttggctaggtagttatagctatgattccattatgcatagtatcacaactatccatgtataccatatacagttgggaaagattcctcttggtaatatccaatcccctgcagtgactcagggttgagtaatggcttttggagctggaaggaccttattgtttatctaattttactcttttttattagaaaaagggaatgaaaaaaagaaaagaaaagaggaatgagatagatgagaagttaagtttctgccgagagtcatactactagtgggtgacagggcttgaattagaggtctgtactctacacctttccattctcaatgtgatagacttcactgtgtgtgcttttactttatggaactcaggtctgtaactagatgtgtcattagaacacagattttctgcctctgattttggatatattt

SEQ ID NO: 1022 - DNA, 440 bp, Canis familiaris
  misc_feature (1)..(440): n = a or c or g or t
aggcntgtgggnctggtcnctagagaaaatgaggannnnannnagcaggnnagtcactattagagggctttcttagagaaataaagatctcttttgtatctttcttccctggagctcttcattttcatccctttgctcttgttggtttaattaaacatagaaaggtaagatgttgaatccacctgcctcggggcagacccaggtcttgaacctgttcttcaaattcttcacatctttaacttccaggacttgaaacacgcaatcacaggctacatagttcggttttatgtcctattggattttttttttaatgttttaaagcatagttttatggtagtccttttgggaagaatccagtattatctaaaattattggcaaagttaaatgtattttacataactgaaagtttttggaatgttgacaagtaattgaaaagagt

SEQ ID NO: 1023 - DNA, 592 bp, Canis familiaris
  misc_feature (1)..(592): n = a or c or g or t
tnnctggtttggcccaatccccactggcatagagtttagatactaattnnctaatccccgaagtgaatgtgttggtaatgatgaaccgaggtgggggccacacaggaacagaacaggaccaggagcccaaagcagcccagggaggtgtctctgggccatgccgctggagtggagatctgaatgaggaaaggagctaatgaaccccgatagctgctcaaatcttcaacttgccgccatactatctgtgtcactttgggaggagggcttgagcaaagcattggaggaggagaatgaagagcttcgagcctggatccctggctcaacaacctgaagcaagatacttgtcatccctgagccggtctccttatctggaaaatggtgacacagtttcctgttcttccaactggttcacagcttatgaacctcagaagagactgaatgagaaagggctttatacattttaatgaattttggtaagcttgatatcattttttaaattaggagattgttacaagataatgtgtgtataatgttgggtgggcaagagcaaatgtggcaacatggtaattgggcaatctggtgaagggaatgt

SEQ ID NO: 1024 - DNA, 628 bp, Canis familiaris
  misc_feature (1)..(628): n = a or c or g or t
gctctgattggactgtgtaggtcacatgctcatccctcagnnaatcgtggtgctcaggatttcccaggactgatnnngggttaagatgtaccctttcctaaagatctggggtgtcagccccagtcaaggcccacggactgagaagagggggggattagaccctccaggaacatcaggatatggctcctggaagaaagagaaatggacgtcaagtcaaggacacctgagcatgtgtcccctgggtccttttcatgcaaatccaatcagcaccttcaagacgtaggccctaccatgctgcacttcacaaatgcgggaggaggcgcagagaggttaagtaacttgtgcaaaggcgcacagctgccatgtcataagaagatcccaacagagccccggggttctctgtatcactcccagagagtcttcttgctgtccttggtcctctcctctcctccctttgcagctcctcgatgccagcaccgcgccagacccacagtagggctggaaatgccgctcagttgtgcgtgtgggtgtctccttttggtatttgtgtgactgtttattttttagagtttctgaagactacagagtgtgcccaaaggcaaaacacatcaatttttactgcaaatta

SEQ ID NO: 1025 - DNA, 594 bp, Canis familiaris
  misc_feature (1)..(594): n = a or c or g or t
tggcaagatccgannngctctagatctacattcnncaaaaaaaaattgnnttnnctgtttcatctttcagtagcagtntgctgccatttgtattgggctgaagaaatcactattgtatatatactcaagtctttttatttttttcctcttttcataaatgctcttggacattattgggcttgcagagttcccttattctgggggttacaatgcttttatcgtttcaggcttcattttagcttcaaaaacaagctgagcacactgttaaaatcatgattttgcagaacctttggttttggacagtttcatttttttggatttgggatagactacataggagtatggagtatgctgtaaataaaaatacaagctagtgctttgtcttagtagttttaagaaattaaagcaaacaaatttaagttttcttgtattgaaaataacctatgattgtatgttttgcattcctagaagtaggttaactgtgtttttaaattgttataacttcacacctttttgaaatctgccctacaaaatttgtttggcttaaacgtcaaagccgtgacaatttgttctttgatgtgattgtatttccaa

SEQ ID NO: 1026 - DNA, 606 bp, Canis familiaris
  misc_feature (1)..(606): n = a or c or g or t
gatataactgttnaatggattatacaaaataaatngattttnacagttaataacttttatttaaaatagaatgctngtgaagacatgtagtaaatgtatgttgacctggaaatgctttatataattcttgaactgtaacttggtataagaatagaattgggatggcttttctgtattgtagatagaaaagggatttaatagcagggcacgtgttagagtttggggggtggaatttagagcttgtggagttttcaggataggagagcagagactttgtgttgagaagataaataacaggtcagtcaggttgatgaagaaactagtttactacagaggatgatctgtgttttgctaactagtttcctctatagcataaaaactcaatatatattgataaagcatgtttgttttaagttagcaggcatatactgtcaaatagcataaagattttccagggcaaatagatataaacatcacttgaagtttcaggtgattagaaatatttaggcaatcaagacagctttagaaaatgacaggactaagaaaattaacaaatgtttgaaacatnnnnnnttcaaaattaatgnncctttaaataagaggatc

SEQ ID NO: 1027 - DNA, 536 bp, Canis familiaris
  misc_feature (1)..(536): n = a or c or g or t
agcagcccggccacccactccncgtgactgcccgtgcccggtngacacagccctcaccccacgcnnnggcttttcnnngcctttctaccaaccatgagacccctgccggccctaccccccaaacctgtcctccctttcctcggggacaggagggaggaggccgtgactcttcagatggaggcctgggcaggaaggactgcctgctcctgcagcctgggctgacatcacgggcaaggtcgtgaactgcgtgtggaccgctggtcctgggcctcaggatggagcctgggggccttgtgttcatcaagacagccctctgcccccctcgccacatcttcatcaccagcaaatgccaggacctggctcccccatactcagaacccgcaagccattgcccccccggtcgggaacccccccctgccttggttggtgacagagggggtgggccagaggggtggggggttccccctgtacataccctgccataccaacccccaggtattaattctcgctggtttttgtttttattttaatttttt

SEQ ID NO: 1028 - DNA, 542 bp, Canis familiaris
  misc_feature (1)..(542): n = a or c or g or t
atgcagtgatgcaacantgnnnnatgattnnnnnnngatgaaganagtctctagactcattctttttcaaaatctgacttcactaccatatgtgcagcacnnnagtgacancttaaggccaagtnnnnngaactnnntcagccagagaaagaacttgaattgggatgtgttttcaaagaaatttcattatgttatcaannnnttttcaagttcanagttcgnnactgctagatctttataaatnctactttatgacttcttttgcggtctttgtgaacattttaatgtgcactggtaaacaggaacattttacatagacacattgtatattaatgcatgcatttcattgcatagtttattgatactccccttgtaaagcttttatggaagaaannngccacaggagtatagcaaaagaggcttaatctttataaattggggccttttctgtctctttgctaggctaggtggctgtatacaaactcgggtgggagggggnangaaannnnncttaacgtttaaggttttctacatgggtgaac

SEQ ID NO: 1029 - DNA, 528 bp, Canis familiaris
  misc_feature (1)..(528): n = a or c or g or t
ggctnngttcagattcaaaagcacaaaatgttgtatatagagtcaaggttgggctcgaaagaagacctgagagacacaaagacaaaccaagataaagtaactgtgagctgcaagcatattcaaaacatgtcctctgggggtcttgtccccacttgcagctgatacacatctaaggaacttgctcatgggacacctggagaaagcactgcctctgatcagggaatttgactgtttctgaactatccctgcaattccccttttatgacatagtctgggccaaggtgcatgcacatacattaactcctgactaaagaggcattgcttaaacctgttccaattttaacttttactgtagcccttcgattccagagagggagctttgctggcaaaagcagttttttgcactagaaatttttgctgttcccaatcaaaacttttctgggactgtatatatgcactttaatatcttatttatgccttgctggagtnnngttttgttgctccannnnnnnacttaagggtgaaaga

SEQ ID NO: 1030 - DNA, 529 bp, Canis familiaris
  misc_feature (1)..(520): n = a or c or g or t
ccttaagtatcttcagatgccttcctttgtctgctatgtcaactcttcctgcaccgtccagttcatgtactacgtcaggattggagtcttggtcatttaccctactgagaaatctgctatccctagagtcttaaacagcaattgctctttgtaccacgacgtctaggatgcaattaaatgtccgttaatcttacgataataggcctgcagtggtttcagaaacaaatcctcattagagccaacaaataccctttctcataggggatacgaaggcactctgtacaatgtgggaaacggtttctacccgacttctcatgggattaaggagtttaatttcccatttctgaggaaaataggctcacccttctatggagactgagctcccgaggattagacaggaagaattgatagagtgaaatcaacgcaaagcacaaggagaaaaaaatcacacacactctcaatcattgtttaattctataaaagtatttagcagcacttaggagataaagtctgaaaccannnnnnaaaa

SEQ ID NO: 1031 - DNA, 438 bp, Canis familiaris
  misc_feature (1)..(438): n = a or c or g or t
gggtnngtggcctgtacctnnnggntgccggctgggatagnnnnaactcctgcttggtnnnnncagaacccatgcagcttgnnngcnncatgcccacgatccacttcaggcctacagaaagnnnaaagaagagcgccaagggcatgtactcctgtccgtgctactactaccccaaccgggccggcagctccgagagagcctcctttgtcatcggcattgaccttcggtctgggaccatgccccccgatcactggatcaagagggggactgctctcctcatgagcctggacaactgagagggcctcctcttcctccccgctggagngagggtcggggactccagggaccaaggccggacttaactggggggttggccgtggctgaatttgttgcctaacnnnnaccgatggccngtcgtgctnnnnnngaaggtngaag

SEQ ID NO: 1032 - DNA, 530 bp, Canis familiaris
  misc_feature (1)..(530): n = a or c or g or t
ttcctgtaaagctggttattatttctcaagaaaactatactnnnaatatgtattaccaagatacctctgcgtgtggagtattaacatgttttgggtgagagcagaaatgaacagactnnaaaagccatctcttggttaatttctctgatgttttgagtcaagtagcagaaaggtagaaatttttatttaagctgcttctagcggtccctgatttgggtttcatggtggtatcgaacttcaccaatttaaaactggaagttgcaggcatttaaggcaaaaaaaacctcatgctttgactacagaggggttgaccttgagcaacatcagctgctaaatccttgtgttcagttcctattgaaagctggcttttatccatttccaagtatttgtaggccagccaaggaattacattaatggggcttctagtggcctctggttaacctataagttagtggctttttcctcatgagaccaaccttttatagtgttctttcttagagacctaggcagagttttaaaattctcctttg

SEQ ID NO: 1033 - DNA, 457 bp, Canis familiaris
  misc_feature (1)..(457): n = a or c or g or t
agaggcaggccccttgaagagctgcngtaaccacaagccagagggcagccccttatttgtgcccaacgtggaaaaattgttagtcacgcaccagtcatttcaggaacacctgcacgttcctggcctttgagcacaaattgaagaccgactttgaattcagacattgaagttattcacatggactgctctacaatctacagaagtgagagggagagccagaagtagaagctataggttatgatccccgcgtgtcttttgttagttccctgaagaaatcagaagggagatagtacgtgtggtgggggaggcagagatcccaggggtgcacaacaatatccaattattttataaagataaatcgtgacatcaatcttagctcaaaaataccttcctggctttcctctcttttaaaaatagagattccgggcagcctggggaagctcagcggcttagagcc

SEQ ID NO: 1034 - DNA, 561 bp, Canis familiaris
  misc_feature (1)..(561): n = a or c or g or t
cggcttcatcagccaggagccagtcctgtttggaacaacaatcatggagaacatccgctttgggaagatgggtgcctcagatgaagaggtttatgcagctgcccggnaagccaatgcccacgagttcatcaccagcttcccagagggctacaacaccatagtcggtgagcgtggcgcaaccctgtctggtggccagaagcagcgcctagccatcgcccgtgccctcatcaagcagcccacggtgctgatcctggatgaggcgaccagtgcgctggactcagagtccgagcgggtggtgcaggaggccctggatcgtgccagcacaggccgcaccgtgcttgtcatcgcgcaccggctcagcaccgtgcgtggggcccaccacattgtcgtcatggcccgtggccaagtctgtgaggtgatatgttcattaagcacctgttgtgtgccaccgtccctgccctgcgaccgggaggacgatgtccctgaccccttgaagctgtgatcttgtctggaggacagagaggcaggcaggcaggtgattgcagcacactttnnnaaaga

SEQ ID NO: 1035 - DNA, 350 bp, Canis familiaris
  misc_feature (1)..(350): n = a or c or g or t
acntgannatttcagagaactgccaacttagcagnnnccaannnnntgatacagnngccaaaaatttcaccnngtccaagttcagtctaagaaagaagtntcttacaattaaagctgttcaaaactggaagacactgagactgtcctgcagaacaacaaaatagcaagctgcccgtaactgtgactgtccgaacagaagcaggtcaatgaaacgtcagagatgtcatagaaaggattcttgaagggacgcctggatggctcagcggttgagtgtctgcctttggctcagggcatggtcctgggatctagtcccacatcaggcttccggnnnnnnncctacttctccctct

SEQ ID NO: 1036 - DNA, 527 bp, Canis familiaris
  misc_feature (1)..(527): n = a or c or g or t
ggatggtggggaaaggggcagcccgggggatgtcgggaagtgggagccnnncacatnnntacnngggcatatgcgaacacacgcatgcacatacacacactcactcactcactcacagccattaattctcttataaatttattaaaaccaacttgccttccgataatccttaacctggcactacacagagagcaatgtggctgacttattttcttcttccattaaaaaaaaatgctatgtagaaaagaggtctataaaattgtgcaaaatacccagcattaataaacccgtttcaagtattgccagcatgagtctagcccacccagcccaagcaccgacttgggagagaggtggggggccagactgggatcccttagagagccctccgtgggtagtgagagggcaaggcccccacttcctagtgtgctgcccaggaatcatgcatgagctgaggtcttgggtgcctggctggctggtttagcttcctctgacacaggctgtcccccacccacccccacctctgccct

SEQ ID NO: 1037 - DNA, 522 bp, Canis familiaris
  misc_feature (1)..(522): n = a or c or g or t
tgtatgtattcntnnntagatgttnnannaagtatttcacataacatgttttataataaccatttgaacaaagatatattnaccttaagttgcccccctttacattggatcatggtgaattttccttattgggctaattatggactacttatatgagaagagagcctgtgacattttacacnnnctaaaatgttgagattagaggtagttattcttatcattcttctcaaatatagtctggtctgatagttacccaacttattcaagaaagtagatcacagacaaaaaacaacatagttttctaagaattcactaagatttaaggaatcagctctcgcactgcccatctttgcagttttggaaaagaaattgcttaattgagaaataatgttctaaagcctttaatatagtagaattaagataaggggataatatgagtaaattaattggctattccagagataagaataataatttaaatatttatgttcctgactagtataaannnnnnctcatcagaga

SEQ ID NO: 1038 - DNA, 230 bp, Canis familiaris
  misc_feature (1)..(230): n = a or c or g or t
ttttttaanataaattagaataaaatctgtgatcatggtcatcgaatggttttgtttggaaagttacatttgtgagannttttttttttttaagtcatggtanntacaaacttgactggttattcacatttnnnnnatgttttgttcttnnnngtaattcttgtgccccatngngaattacatnnnntnnnatggtaaatnctatgtgtattttatntnnnnnnnnnnng

SEQ ID NO: 1039 - DNA, 252 bp, Canis familiaris
  misc_feature (1)..(252): n = a or c or g or t
cgggtgcctggcgaccgtgggcncggggccaggatggggaagggccnngcggccnnnnnggcgacactatgcaattcctggagcccctgccaggacccaagaagccatgtcccaggggctgcgggtcagggtcccaccaggcccagccctgctgcgtggcgaggtgatgcatgcagcgctgcctgacctctgccgggaggaccggggccggcagcccctccggctcctcccccacctcagaccccggagcgg

SEQ ID NO: 1040 - DNA, 374 bp, Canis familiaris
  misc_feature (1)..(374): n = a or c or g or t
ctactggaagggctggttcggggctcgggtgaccaacagcagcgtgtgggtggagccctgagccaccctgtctccgacctcggccgccccggagggccagaggctggggttacttaggccttagctggtagcatcctcatctgccccacctgcacccccacctgcacccccacctactcctctcccgccctatcgtccagccccacacccggaaggagcggttgtgttggcatctatctgcatctggaaaataagatgggggagggtatgggcctgggctgggcccaccgctggatcccctgcacctagcacagtgcctgccacaaagtgggcgcctaataaatattatttgtccaaggaaggaacgnnnnnnn

SEQ ID NO: 1041 - DNA, 477 bp, Canis familiaris
  misc_feature (1)..(477): n = a or c or g or t
gagaagaacagacactgngnctgatgtcgtggtggnnagtgtggnnntgnagtcaggannagtcgcagcaatatcagtggtagcttccagaagctgagaagcatcaacgaggaaagagaggctgagtcaaagaagaatcccggggatgtccgcagagccagagggtcacccatgaagacgcattgaggaaaacaagggagattgtcctagaatgtggtgacggaatgacagccctgggctcacgtctgattttacggatctggcatattcgggctctctgccttgtttttaagaaattgtgtgcatggcgtgattgttgggatttcaagtagggactgagcttgnncgcacggtttagttggaaaaantgcagctgactaaagtaggagtaactaaagttgcaagtaactcaaatcatgtttaaatgatgtatgtttnnnagtgtttaaactgtcaaaagttgtgctctgtatgccc

SEQ ID NO: 1042 - DNA, 583 bp, Canis familiaris
  misc_feature (1)..(583): n = a or c or g or t
gtgagcccgaagactgnagcaaaagcaagggtttttttttttgttatatttcacttgaaaagtaaaatttactcgtatgtttctagactgctctctcctcctgccttaaagagaaatgaatttttttagcagtttttacatgaaaatgaatttttggaagtttttttttttcttcttccaagcagctttttatcttgaaaaaaagacaagcccttaaaaatgtgttgcgatatgtacactcttaggtgtgaaaatggtcttgaagagtcttgtagatacctgtaaacttcatgaaatcctggtgtgtggtttgagtctttctctcaatgcccccacgtccctgtctgctacctacacattggtgctttctagcaatacaccttgcttgtaagcatctggttgacctagctcttcaagactcctgttaaataaagaaggtcattagatcgaggtggctctaataccatgatgacctatgtaagcaaaccaaaatctgagcctgtaaatacctgaatgttacgaaatctaaacgctaaggacaatcagtcacaaacagccaattaggcttcaaactctagctaat

SEQ ID NO: 1043 - DNA, 530 bp, Canis familiaris
tttcacatgcttgtagcgatttgtattgcttgtagctatttgtatatattctttggagaaatacctttttaagtctattgctcattttttactggattgtctttgttactgtgttgtacaagttctttatatattctggatattaaactcttatcagatatattatttgcccatgtttctcctgttctgtgagttgtctttataatgtcctttgttgcacaaaagtttttaattttggtgaaatccagtttatctatcttttttgttgcttatgcttttggtgtcaaactaagaaccactgccaaattcaaggtaaaaaagatttaatcctatattttatagttttagctctttatttaggttgttggtcaattctgagttaatttttgtatggccataccactgagatattgtgggttcatttccagaccaacacaataaagtcaaatgaattttttgttacccagtacacataaaagttaggtttacattatactgtagtctattaaatgtgcaatagcattatgtct

SEQ ID NO: 1044 - DNA, 515 bp, Canis familiaris
  misc_feature (1)..(515): n = a or c or g or t
agaaccntgtaagtacagttgtgctgattatttggtgttcacaaattcagaatcctgtattttttagattccttttgattctagtnnaggcctctcgatgctcttcaggtctgtgtgttttgaggctgggtggagaaagtaatatcatgattccgttgttgcttctcaaagtcttcccaccctatttcatatcattccggagttcttttctattagccagactttttgtagtcccttcttacctcttccctggaaattactagcttctttatttgctggtttcctatgtttgggacacatacagtaagagattgtaggggaaaatgtgtagttctccactggaagttaactcccctcccctcccattgataaaaatggtttacatttacaaaaagattcagatgcaattttcaactattctgaaaccagcaggacacacctgactttaatagttttcttagctgaaattgtagatgttttttcttcagtttaacttatgagaaaagattatctga

SEQ ID NO: 1045 - DNA, 332 bp, Canis familiaris
  misc_feature (1)..(332): n = a or c or g or t
attattgtatggtttcattaaatataatatagtttatagtatttannncatgtgcatatgcgtatattcagagagagagagaatatatatttattttcacctacatnnnnagacacataatacaactttaatcagctatgttgnnnnnnnnttggncntattgtatttatagtttctgagaagatatttaaaaaaaaaattcttgagttaaaggttataagctgtgtttcatcttcttgtatagagcattataggaaggtgtgatacgggcacccactatagtacttatgtgcattgnnnnnntaacattcattcannnnnncattcattca

SEQ ID NO: 1046 - DNA, 439 bp, Canis familiaris
  misc_feature (1)..(439): n = a or c or g or t
gactgtgaagcatgttcacgtccacgnncttccaaggaaggctggagactttcacaagaatgacagcatctatgatgagctccagaagcatgacaaggaagaggaagactccccgaccttgtggagatccgaggaggaaatggcagcagaagcctcagccctgcgggcctactttcagtgactttacaggcatgaaagtaacttgaacaaatcccaaggcataaggaaatgggcctcgttctctaggactctgcggcactggaaatgaagctaagcagactttattacatcctacaattctgcaaccttttgcgaagcattttattacacttgtggaagccatcggggttatgtttcaatcatgatgactgacaggctaacttcaaaataacagcatcgacactcccttccacacttcctgggctatgtacttagaata

SEQ ID NO: 1047 - DNA, 530 bp, Canis familiaris
  misc_feature (1)..(530): n = a or c or g or t
taaaatnntaactttctccttatttcttggcacttgtatacaaatggtgttgcctcatagganaggcatgagctattctttttctgtaaaattttccgaaactataggctgtggttctcacttttgaaaaagtattttgtctggatgtctttcaaactagcttcagatattatttaatactatgtaactgggtcccctgtggctcaatattgcttattttccttctgtagtggatgtgaactttccttaatttagttggatgaagacactctgtaataatttcaatgctaatcaatggatattcatactgtgcaatgaacaaagaatttaacattgtatttggaaatgttctttctccttcctgtcgccgcactgtgtggtactgcctaatgtgaatacctgtaaaaatataaattccttaaaaataaaaatatgaccagttggtatcaaatctttttagatagctaaataatttgcaaagtatgcttnnnnngtaaatatctttccaaagagaagtaatctctgcttct

SEQ ID NO: 1048 - DNA, 674 bp, Canis familiaris
  misc_feature (1)..(674): n = a or c or g or t
ttcannctgattatcaatgcatggccatgttcattgatgtaagagtanntatgcattactgtgtgtaatanntctaaggaaaagacatataatggcagactaggaagatgtagttcgttctcttatggaatggcataagagaaacagatgtgtacacataagtaaggaaatacaaaaatgagtaattctggtaagtactaaaaagactattcactgttcttgactatgcagtgttactaataacactgttattctgtgttaatctctataaatggatgaatggttgaaatgaacttcatgtggcaactattttgttgccatttttctcgtatcagagatgtataactaactggtcttatatggtttaattttgttaatatttacatcctgctagtagcatatcctgatccaaatctgtaattaatagaatgcagaatttggggaggagcagacattcacacgtttattctcaagtgacttagtaataccagacaatagaaagatacaggccaatatttcttttcctacaatttaatgtgggtattgagcccttaaaatatggctaatgcaaattgacatgtgctatcagtataaaatacaagattttgaagatgtacaaagaatgtaaaatatctcaattttgtatattggtgaaattctatttttgatagtgt

SEQ ID NO: 1049 - DNA, 464 bp, Canis familiaris
  misc_feature (1)..(464): n = a or c or g or t
ttagtatttcagagcctccttctnnngccagtccttatgcttcagaaagctgtnnnacactacctcttcctttgggatcttgtggagaagggtctgaggtggtaggcaaagagaatagctccccagagaataaaaactggttattggccatggcagccaaacggaaggctgagaattcatctccacgaagtccgtcctcccagacccccaattccaggagacagagcggaaagacttctccaggtccggtcactattactcccagctccatgaggaaaatctgtacatacttccatagaaaatcccaagatgactactgcagtcctgaacagtcaacagaattatagatctaatctgaagaaaatccattcaactctgaagtttacctactctggttcttctaccatagcttatatgcagcttcctcgggatgaatgctgtgtttaaattccataaagtctnnn

SEQ ID NO: 1050 - DNA, 557 bp, Canis familiaris
  misc_feature (1)..(557): n = a or c or g or t
cntattccttccccaacccccccgggaccccagccagtcccaagactgccctgacaatcaggcaggcttccccaccatgagcccaaacctttgctgttgctggcaaggttccagtgggggaggggcttggccttgggcccccaggcttcagctctgccctggcagggtcttgcatccaagtgcagaggcttgaggtgacctaggcttgcctcacaactggtaccagtaggcttggctctagtgggcactactagcggggacccccacaactggcccccaggtctgccttccctacacagccaggctgcaacaggcctgagccgtgagggtagcttcccttaccccaagcacatgaggtggaggggtggagagcattttttggttttgtttctgaagtggtgcctgtacctccagcccccagggggccttccctggccccacttctctgccccacctaggtgtcaccatcccagcactttgctccatgtcatccataggtgccctctactgaatatacctgagtgtatttaaaaggactcacatgggcatcagagaat

SEQ ID NO: 1051 - DNA, 537 bp, Canis familiaris
  misc_feature (1)..(537): n = a or c or g or t
atcccctcaccccatgcntnngccactgtgtgctctcaaatctcctcctcaaattttgacacccccaactanngctacttttctatccaacaggtaattttagccatcttccccacccctacagcctggggctnnagccactgacttttcctatactttgatgcatggaggtcacttggatggtttatattaggattttgacctcaccttgtgttgtctgctgtgcagagtgcctggtagcctagtgtggccaatctcactttgccgggagatgtgacccactaacacatggcagctctgacccaaaggcccctcagtcatgtgacagtaaatctggagccacagacagattccctccattagcagcccactgggttagaaattccatgttgggtttacatagaacgaaagatacttgaattgttgagcgcctgtgagtgcacagcttctgctacccggtatttacagatggccattgttgtgaaatgggagtgatgcctgagggtcttgatgatgcttgagccttttatgtaactt

SEQ ID NO: 1052 - DNA, 427 bp, Canis familiaris
  misc_feature (1)..(427): n = a or c or g or t
aaaaacaaatcaaaaccacaatgagataccatctcacaccggtgagaatggtgaaaattaacaagacaggaaacaacaaatgttggagaggatgtggagaaaggggagccctcttgcactgttggtgggaatgggaactggtgcagccactctggaaaactgtgtggaggttcctcaaagagttaaaaatagagctaccctatgacccagaaattgcactgctggggatttaccccaatatacagatgcagtgaaacaccggaacacttgcaccccattgttcatagcagcgatgtttacaatagccaaactgtggaaggagcctcggtgtccatcgaaagatgaatggatagagaagatgtggtctatgtatgcaatggaatattacnnnnccattagcaatgacannnnnccaccatttgcctcg

SEQ ID NO: 1053 - DNA, 516 bp, Canis familiaris
  misc_feature (1)..(516): n = a or c or g or t
aaagaagggggtggggaataaataaaaattcnctcaagacttctccagactacatcactggcccatgtactttttatgtgtattaggatgaaagagtatgaagacataagtatccggtactttataaccaaagcaattaaaagattttgggtagggaatgttggccagttttacttagttttgcatcacattatcaccagactctatcactaacccaagtaatcgggcacccagagagggagactgggatgtgcagaggtgaccagtgtgcgaatgataactactgatgaaagagtcactgactcagttagtggttggatacagtcacattagttttcctctgtccatctttgtctccctggcaaggagaatatttggggcacgatgctatgggtactgggtaaatgtggtgagaatgtacgtgtgtatttctctgctgctcagttgcagaaacaaatgctttggagattatcagtagaaagagtgttattatattggtgctgagtggtacgtgtg

SEQ ID NO: 1054 - DNA, 438 bp, Canis familiaris
  misc_feature (1)..(438): n = a or c or g or t
agaatactcatgaaagaatataggcnnccgttnnnttaggannncttcgattcngngaggnnnnnggnnnnnatttttctttgaaattagtannnagttatngnnncttcaatcagtcnnnnnnttattgttagggnnnatgttnnngttnnncatgnnnnngttnnnnntgaggtataagttgtatgtgtannnnngagataacctcttgtaatntcctagttngntcatcatatgttttatgagaaaagcngatttatcactcattgtatgtgaagaacaggttnnnctnnnnatgaatgcctttattcagcttaagagtnnnnatgttnnngatttcacattcttgttggtgagatgcagnngcannngcaacaggagcagaagaaggaagactcctnnnattnaatgtcnnnagnnnnnagaattgtttggcna

SEQ ID NO: 1055 - DNA, 636 bp, Canis familiaris
  misc_feature (1)..(636): n = a or c or g or t
aattacannnaaagaatgaagaccttgaaagcttaactgtcatatttaaaaccagctgttaaccggagtggtataatccatgaagaccaaatagaaggtagacttctattcatcatttctggaattctacctacaataatgttccagtggtgactgttaactagctttgttccaagaaagacctttacctccttagatttcagccccctgcttcccagtccctaactgtacagtgacttccccttgattgaggagaaccattattccaaccaggataaccaagtccctgtattccctagcattaagacatagtatttttatttacttgaaaatgaaaattgaagtcttaagttgaaactttaattttaatgacctcatttttttctggatgattgcaaccatcatatcagttgacagaaacatttaagaacattcctattttggccttgtactctaaactctagattctaagcagccagaaagaggtcaacaaatacaacctaaaatgaagccctttggaagtctagtcattattcttttaaagaaactgttataaaatggtcctgagcaatgtagtttattgtagaagtccaaaacaggagtatcccagaattttctggactcaaagannnnnnn

SEQ ID NO: 1056 - DNA, 541 bp, Canis familiaris
tgccttactccttgctctcctgctgacaatcctgtgcctgatactggcccagtggcccagccatctgttctctggagacccggtgtatatcacagggtgtgtgctgctgctgctgctgattattgggctcactttcatcatctggagacagccccagaaccccactccttttcacttcaaggtccctgctctgcctgtgctcccactggtgagcatcttcacgaatgtttacttgatgatgcagatgacctctgggacctgggcccgatttggcgtctggatggtgattggatttgccatatactttggatatgggatccgacacagcttggaaatcagtgatgaacagccaccagcctcaagctcccaaactcttgacaaaaacatccctggtgctgagttagcttaaccacaagaaacagatgctgtgtggaatccctccatacactggaggtatcttctggttcaagggagactttgagcctatatggagtgtgaaggtaagactggggtagaaacagtacctgccaggtaagactga

SEQ ID NO: 1057 - DNA, 590 bp, Canis familiaris
  misc_feature (1)..(590): n = a or c or g or t
tttttagagacagattgatannnncattgttgcaattaaaatatgttgttacagaaagaatgaatagatcggcacagcctgnaaaccgagcgtgaaaatatttcactgcgcccagcagtgattttctgcaatttaacacagcacagggctttctgaaaaatcattggtcaaagaagactcctctgtttctccagacttcagcaaagaatgaataaagacatacagaagagtgatgtgtgaggataacaacacgagggttctctggtcatcaactgaaactacatttacacttctgtggtcaccttaagaccctgaatagaaggcagacagctccacacagaagagaatgccagtggagggaggtgaacggtcactgcatgtgggtatgtcctagaaatggcctgagcccggcccaggcagcagaggcagtggagagcgccagccagttccatgacagcttccagctgaagacttttggttccattcagaaaccaaccaacctaatttttctgtgttgtaatttgtgatttggggactcttactttagcttcccagatttaaaattaagtggaagatctttcaccatcact

SEQ ID NO: 1058 - DNA, 547 bp, Canis familiaris
  misc_feature (1)..(547): n = a or c or g or t
antataaatttgtgaaatnnntgactaaaaataagaaactgtcagccattccagtttcagcattctgtaatgcagagaccaagttacagtttgagaagtttgtgcgattttgcttcannaaaaaagacagtacactggatgctgctgaagaaatcattaaggcatggactacacagaagtgttaataaaagtcgagtttctattagatgacctaatatggaattgttatttagtgctgccatctgctggatatggaaaaacaaatatttcagtacaaatgaagagtgaacaatttcaaaatgttgaacccactggggttttttcattttgttgtttttcagttgaaatggttgaaaacaccttccactaccattttacatcaggcaatgtaggattgtggataataattatgaggtgctggttgatgcttaacctctcagggcttcagttccctcatcataaaaggggaataaaatatagcacccactttatgacacctggctggctcagtgggtagagcatatgcaattcttgatcttggagtcat

SEQ ID NO: 1059 - DNA, 458 bp, Canis familiaris
  misc_feature (1)..(458): n = a or c or g or t
ttcaacttatgatgtnngtctattatatttcantnaaactnnaaaaagaatattttaaaaaatannnannnnngagagggggcagtgttggaaataattctgtaacacanantnnnnnnnatagtagtaataaataataatgtgaacannnatgtcgttttaaccannntgctgtaacttctgtgaggatacaggggaagagaacaatggttctcaaagcgtggtnnnnagaccannncatctgcaggaccaagaacttgtgaaaancncaannnnntgggtcctcacccagctgaaattcagaagctctggggtgggcttggcannnnatgttttaanangtttaatactaaagtctgagaagtatgctagaggaagatgacagatgagtatgttatttctanannnnnataagcagcagaagaaatgctaagcatcgaaaaggtttgctcctggag

SEQ ID NO: 1060 - DNA, 571 bp, Canis familiaris
  misc_feature (1)..(571): n = a or c or g or t
agattctgaatcctcctcatgcagangatataagatgttaatgactcctgcaactagaaaaccacaaatatttgcgtcctcaacatacaatgcttcaggagggtgttcccagggtccagggcagtctgcaaatcaatgcaaagggggagccatcaagaggctcatctgaagtattaccagggagcggcaggcagcaaacattcaaacccagaaactgtgactcaatatttcctatataatgcaatagttctgcacacatgatagatattgtcaagaagaattctgcctgaagaagatgtagaatggaaagagaggatcaacagacataaaggaaagaagaccacagaaagtaccttgccgtaagctgcacagctcttaagtggtacaagcctggattcattcccagaaatcttagccccagaactggtccggctaaccatgccttccttcacaccacctttggagctaccctacataaatactcatacctgtgcaccaggtactttactctgtgttttgcagcactgttcctacagtaaaacactgcaaagtaactgtccatcagtcggaa

SEQ ID NO: 1061 - DNA, 607 bp, Canis familiaris
  misc_feature (1)..(607): n = a or c or g or t
tacagaatcnactgttcgctccataatattataataccagaagatttcagcatagcagataaaatacagcaaatcctaaccagcacaggttttagtgacaagcgggcccgttccatggacatagatgacttcatcagattgctacatggattcaatgcagaaggtatacatttttcttagctatctggcaaacagaattttccaaactcaagaaaaagaaactggaattatatattttttaataatttgagaggatgaactatgcctttgcttcaatggaacactatatgcttgactatttttgatttaatactactactgtcatcatttattactatgaatttttacagtactcaatcagacaattctaagtacccaaggtttttttggttgtgttgtgtttttaatatcatagggaagggtccagtctacacatgataatctgtatgagccgcaggcacgcacaactttacacttaaacttatcatttctaacagtttattgtataaagatgttacttnnnnnnntnnnnatattacnnnnnnncnnnnaggcttttgtccctcaaatagtacaaaaagttaaagtatgcttaactccaatgtat

SEQ ID NO: 1062 - DNA, 484 bp, Canis familiaris
  misc_feature (1)..(484): n = a or c or g or t
gccagggnnaacagccgnnnncttcactctccccacagcccctgcccttctacggttgggtgaaccccgagggtcacagcatcagaggccggacagccactgtcaacacccactcccaggcttcccgaccatgcagggtcctcagacccgagggtcccgaagtcacccccaaccgtgaacagtggcatcaagaagcaagctctcaattgctggcagtgtaagggtctggcaggaggtcaagatggaaatttattgttaatttctgatcttccccttccgctgaaaacaagcttagagtgttttagaatattccccaggcttcctccagtattcactcctaagaattccttcaccatctcctatgagggaagcaaacaagataactcttctaaggataattctaaaacccgtgctgattgggacacctggggggctcagtggttgagcgtctgccttcggctcaggtcatgaccccggggttctg

SEQ ID NO: 1063 - DNA, 451 bp, Canis familiaris
  misc_feature (1)..(451): n = a or c or g or t
ttcaaaatgtgatgaagtattgttacatgttttgagtttcttatatagaaaagtannnnnnnanncngttcagaaaaccctaattaagtaagcaattataacatgnnnnttacatttgcaaattttaagaaaacaacactgatttgggtgagatttaaaagaaaggttgaaaatcttcatgacaatgacttctgtactgaattaatcatttatttctgtcttctgattaatattcaagagtggataataaactcaaaattttagagatttgggtatacttcagtggaagtaataaaatattaaaattacaatgaattttgaactgtagcaaaaatgtcttaaaagatcactcaattcccatactcaactggttcctcattttccttaaattttgttcagtgcatgcatacacaattccctgaaggatataaacataatctaccattctatt

SEQ ID NO: 1064 - DNA, 522 bp, Canis familiaris
gctcagctcctcaagctggtccttcctcccctatttattctcttttctatttatatgtgtggtccgggaccctcagtgaacagatgagagagggcatctctcccaggtgacccttctttcctgtcccaggagggtaggcaattaattccctttgggacaggactcccatgtctccctcaggtccccactctgaccagcaccagtgtctgcctctggggacattggcagctcacagaaagccgggccggtgccccggatggggggcaggtactccccacctccctgcctcccctcctgctcctcatccctccctcctgtttattactgtttttgtacttgatgccttctccgtgagcagtggctctgatggaaggagggagccaggagctgggtggaagccttccccggagacatggcttcaggggctttattaaagactgtgatgatgatgatgatgatgatgatgaagcaagagtagggctacacctctgtgtgttgggagatgatgatgtccattgctgt

SEQ ID NO: 1065 - DNA, 526 bp, Canis familiaris
  misc_feature (1)..(526): n = a or c or g or t
atccagagtaaccccatgctgatcagaaatnngcagctgtgctccacatgtcaagaaataaaaatggtacaaccaaaacctgtgataatccctcataatctgaaactatcctttgagaatcttatgagtcatagaatgagtcttcatccaccaaaagcccaagctgtactcaaacattcccataatgacatctcaacagagagcattcactacagactgcccattctgggccccaggacagctgtcttcaatgaactgctggcagatacctatgcaactctgcaggagacacaactctcttccttgcccagaaaggagccaatgggcaagacagtgaggcaatgagtggttggagctcatcaccttccagactcacaaagagaaaacaagttaaccaatccagtttctggcatgttagcctaatttcctcctgtcaccacaaaggtgactcacttttaccttcctgagagtgctagaattctagctcttgccactgtcttctcactcaattttcctaaagacaagt

SEQ ID NO: 1066 - DNA, 561 bp, Canis familiaris
ccctccacaatgccgactgccagaagacagtcaccatctccaagccttgtggcaaactgactaagcccaaacctcaagcagaatccaagaagaagaaaaaggaaggcaagaaacaagagaagatgctggactaatagacaccaccttctgatggaacgtgagaaggacatcagcaagcaggatcagttaactattgcatttatacctatgtaggctttttattcaaaaattatctatagcttaagtacacaataggcagaaacaaaaagaacagaaaaattttgtagtagcattttttttttaatgtataccataggaccactagggacttataataaaggactgtaatcctatttagaaagttgacttatagtacatgctagaacattgaggtaagttttttgaagttatgtgatattttacattaaaaatcgtttttttacatgtttttcttttggcagcaatttacgtgttatgtaaactactattcttgttagataattttttcacctagacttttttccccattgagaaaaatatatactaaacaaagcagcaata

SEQ ID NO: 1067 - DNA, 378 bp, Canis familiaris
  misc_feature (1)..(378): n = a or c or g or t
acaagctccaagagaatagagatttgttgactgccatatctattcagtcnncttagtnnnnaacacatgataggtatttaataatgttaaatgaatgaaagggagaacggtcatgtttgaaatttttattcannnntctaagaactatgaaatgtacttaaaagatgaattctgcaaggcttgnaggacattnaagttagacacatagactcattttcccaaccntgcaggtcctgtgaacaaatgtnnatcaacctgctagtaggtccaaaaatcacttcagggggttgcgaccagcacttttgtatgctaatactttattgaggtataannngcagacagtaacacatgtaaatctcaagctnntagcctcatgaa

SEQ ID NO: 1068 - DNA, 667 bp, Canis familiaris
  misc_feature (1)..(667): n = a or c or g or t
ccgttatttctccttattatgttacttctctgctttttatttcctttcattcactaagtcatttgcgaatgacagctttgcaggtagcggtagtgtgtgctgctattgtaagggaatatatgtttgtagattttttgattagtttaacagtgcactgataaaagaacaggttagagcaacataatctacttgaaaataattgtatatattacctaacttctagtgtaggactggttcaacaagtaacaagcaagtttttcaattgtaatgtgttggctttctttaattcatcttaattatagctttgtatgttactcttatttaatataacctctattgtattgatttcttctgtattttccttttggattttgtaaaacagaagtttaagaccacaagttggaagaaaggtcacattctttaaacaaaagtacatggggcnnngaaagatttgtatctctgtgattgaacttgaatggccttaaacctgtttcagctttaacaatagaattttacttgggcaatatttgcccattctggtgtaacttaatgtgactctagtgcttaacagctgccattgaagctagtattcttattcagttctataatgttagaatatcttttgttgaagatgtgaatgannnnngcatgtgcatcaacttttgaa

SEQ ID NO: 1069 - DNA, 624 bp, Canis familiaris
  misc_feature (1)..(624): n = a or c or g or t
gnntcataactcgnnntttcccctgacancgcatgagcactgtnntcccgtgtcngngncttttcctccccctggcccccgtgtacacacagacagtgtnnntngccatggtgctctgctcagtctcatggtggagctggnnttgtnnaaagctgcacacctgggggatagtgcaggtgccactcaagggttcaagtccngccgcggcccttgtttgctccccgcaagtgacgcgtggctgggcgcccgggccagccccagagccagctagnnnaggctgtcccgcccaggtgcccgcctcccctgccgggtgctcatttcctagccggctgtgcggcctagtcgcttttgtgtttagcttagctgtctgtgttctgcaacttggctgtgtgtgtcctctgcccatgtccacattaagatattcctctttttatttttgatgtgtatgagctcaaaatgtcacgaatactaaccgtttgtcttttatgtgtattacagatatttttccactgttatttgtctttttnnctgtgttttttctttcttgtacaaattctctttctgattgtaaaagtaatgtgtggttttttttttttagcatagaaaannngaaaatacaaaaac

SEQ ID NO: 1070 - DNA, 532 bp, Canis familiaris
  misc_feature (1)..(532): n = a or c or g or t
cccttccccagnnttcctggcacccggcatggctttgcnntcctcctgtccacgccacccgccgctggaggtggggagagactccaggggccgcggccccnnnnnnngcaggctgagggcctccaaggccgcaaagggcgccactccggcccagagatgcatatgcgccaggacacccgctggagcctggtggcccctggtggccccgagcagagctgcccgctgccctcaggaaaacggatcaataaataatgaagtgcgtgcagccttcagaaagaacagaccacttcacaggcagtgacgtggaaagaggttgtagagtggaaaaaagaaaaagcaaagctattccgtggtgacgaggatatagcgaagacgaagtgtactatgaactccaagcaaatcaaactagccagtggatggaggggctgtcctgtgtttggaaacacactgagcaaaagacaggcttcgccagctggactcacccatactatttctccctccctcttcctcttnnnatcccacccccctgtgt

SEQ ID NO: 1071 - DNA, 686 bp, Canis familiaris
  misc_feature (1)..(686): n = a or c or g or t
agcaaacagatatnntattttcaatgctgtannacagtaangcgantcttttctnnctaaaggttaannnnnngattttaatttttcacaattgagaagaattttnntnanaataaataaacccaatagattnctanagcatctacaaatannngaggaannccatatttgtagctattaactggnantgtanagtatcccaaatatatcaagtatttagagttctatattttaaacatgtgtgttcatttattttctgaattgctttcttaaaagttttccctgtgatactaaatgacttttgaagcataattctaatatgtatggttttgccttctggacttagttttgatacagatcttttatttacatttgctttttccccgtgctccatagttgtgttttttcactgatctgatttcttcattattcaaataggaaaagtaactttgcagttttgtttcactatagctcataatgacactgtggttattccatttattagtttactgttggatgctgctgttttcagataaatacnggcataactgaacttatttttttaaaaaaattaagtatataaatctaaggatgggattttttttttccttgcattttaacaaacgtcaacacatgcagttgtttagttacaattcaaagnctatggaatggtaaaaattctgttt

SEQ ID NO: 1072 - DNA, 240 bp, Canis familiaris
  misc_feature (1)..(240): n = a or c or g or t
ttaaaaggagatatagattcanatgtagcaattgatctttgcaacaaagcttcattggcatttttacaaaagcntttaggactgcggaaagattttgatcnnnnnnnntctttgattgaaggaaaagacgaaaatcttatgccagggaccaacattaacatcaccaacgaacatgacacnctacagaactctccagaagcagagaaatcnannntagattaaaagcacttttttaaagat

SEQ ID NO: 1073 - DNA, 269 bp, Canis familiaris
  misc_feature (1)..(269): n = a or c or g or t
atcctctgcatggcnnggctgaaggcggcccagaaacanntnntgtttctcnngnnnnnnnngannttcgccatgtccttgnannnannnnncagaggtgcctggaannnnnnggggccttgtctctttgccnnnntggtcatggtcaccatgtgggtgtaccgctgcgggcaccggcgcnantnntacccnnnntnctggcagcgctgggccttctacctcctgcctggcatctccatggcnnnnnnngccgtcgccatctacacttc

SEQ ID NO: 1074 - DNA, 503 bp, Canis familiaris
  misc_feature (1)..(503): n = a or c or g or t
acatacatggctgtgggcttatgnaatggcncnnccactcagaaaacagactgtcaattacntaaaagattaagttaccatacagttcagcagtttcttcctaggcctataaccaacagaattgaagatctttctataaaaaacttttacaggaatattcatagcagcattatttataaccaaaaaagtagaagcaatccaaatgcccatcaactgacaaatggttaaataaaatgtctagaatatttagcaataaaaagaaacgaagtactgatgcatgcctgctacacatgggtgaaccccaagaccagtcacaaaagatcacatgtgattccatttacatgaaatacctaaagtaggaagaggtggttgcccaggactgtggacagcaggagagggattgctactggacatggggtttattttctgcgtgatgaaaacattctaaagttagatttgggcgttggttacacaactctgaatctactaaagtcctttaaagc

SEQ ID NO: 1075 - DNA, 506 bp, Canis familiaris
  misc_feature (1)..(506): n = a or c or g or t
acacgtgnctgtacaagagacacagannagacgtgcagacaagcactggcgagaagccatgtgaaggtgtaggcagagaccggaggacagggccactagcccagaggccctggagcctccagcagaagaggcaggaaggactgtcccccagaacatgtgtggctccaggaacatgagtaccgattcctgttgtcacaagcccccagtctgtgacatttcttatggccacagaaggctaatgcaccctttccctcatgctcatccctgtactgccagggcccagggaccccacatgctgcctgaggctccctccttgcctcggaccctgttagttacaggtttgctcctgtgtctgcagccccagaggtgaagccggggctggcggcctcagctgggggctcagcccctccaagagaacaaggacagaccatccaccaccaggcaccaccgttaggggaaccccagcccagggccttgctccccatgtgacgcccctcccctgagcc

SEQ ID NO: 1076 - DNA, 494 bp, Canis familiaris
cctgtaaaatgggctagaaatatttataattttacagacaggacagcattttatttttaatttatttaaaaaggcactactcatgtaaatctgaactgtgggatatttcttctttaagagaaagagaagtaaatctcttatgcagaaactttgtggccatgattttgtataatatcatagtcaatagcgtgtctaatgtgaatttctcgcagttataaatgggcatttaacatagtatatggctacacatgtaagtgagtagctttctagtgatcataaggtatcaaggtgaaaaaaacatacagttcaataatggaaaatttagtgcaaaactacagctgtgtctccattcatcaaagcaactcatatgcactttaaatcgttcgggggcagtgagcattgtccaggcgagtggtggctgggggaggtctttgctcgataagtgtttgacctaaagacttaactaatttgtatgaggtcagtgtcttaaaaac

SEQ ID NO: 1077 - DNA, 561 bp, Canis familiaris
  misc_feature (1)..(561): n = a or c or g or t
cancagttagaccacatnnnggggccccctccgagannncatnngaagcttncttctcccatgttnnnncnntnanannnnggatgnnnnngnnccaaccaataggagantggcctggcttctcccacttagggggcgggacccccgccagcagcccagggtacaggggctgccagggcttctgagggggcacagggtgggattcataaacccggcccagagaagcctcatttcccacctctggtgaagagcccttccttcccctgggcaaggttgctgacaanntcncngnagtggtctctccaagtcccggctgagcccagnnccggctgagcccagtcccggtccctgagggttggggctgcacttatttattggggggagacagctctctctcacctcctccctgggtgggaggaggagggcctgaggcccaaacaggacccagcggtccaaacccnnngctgctccagggtgggggaggttggtggaccatggagtccctggtgctgcccctcaggtgggacccaggtgtnnncagctgtaccctctaccgatggc

SEQ ID NO: 1078 - DNA, 504 bp, Canis familiaris
  misc_feature (1)..(504): n = a or c or g or t
agcagcaggacagcggacggctctanntggagaacaagattcacacactggaactgaagctggannagagccataatcggttctcagccacggaggtgacgaacaagacactggcggcagagatgcaggagctgcgcagccggctggccgaggcggaggagacggcccggacggccgagcgccagaagaaccagctgcaacggctgctccaggagttccggaggcgcctgacccccctgcagctggaaatgcagcggatggttgagaaggctgacagctgggtagagaaggaggagccggcacctagcaactgaaggggcctggtgcagcagctgccctcccgtggggtcagcgatggagcctgctgacgttcgagcccttttggttccagaaagcagctggagcaggacctgggagccatgggcaggggtggctgacccctgtgctcagcctctgtagaggagctcaggccgtcagggtggggtctgcgctatgtgggatgga

SEQ ID NO: 1079 - DNA, 646 bp, Canis familiaris
  misc_feature (1)..(646): n = a or c or g or t
tggtcnaccccaccgtgttctttgacatcgccgtnnacnncgagnntttgggnngcgtctctttcgagctgttngcagacaaagttccaaagacagcagagaactttcgtgctctgagtactnnagagaagggattcggttacaaaggttcctgctttcacaggattatcccgggatttatgtgccagggtggggacttcacgcgtcacaatggcactggaggcaagtccatctacggggagaagtttgatgacgagaacttcatcctgaagcacacagggcctggcatcttgtccatggccaacgctggacccaacacaaacggttcccagtttttcatctgcaccgccaagactgagtggttggacggcaagcatgtggtctttggcaaggtcaaggagggcatgaacatcgtggaagccatggagcgcttcgggtccaggaatggcaagaccagcaagaagatcaccatcgccgactgtggacagatctgatgaatcttaactcctgttttatctgaacttccagaccgttcctttagctcaggagagcgcccctccacccccacctgcttgaaatagcccagtctccgcactctcactgcagttctgcgggctccgtggttcctttccccaggtatagctgg

SEQ ID NO: 1080 - DNA, 458 bp, Canis familiaris
  misc_feature (1)..(458): n = a or c or g or t
ccgggcgncagcctgagagcangaggagaagggagagcaacaggcagggggcctgggtgctgtcatgctcccctccctcagaactgcacagcctggggccgcctccaccctcaaagtgggagaacggtgttctcgagatgaggacgagggcgagccctgggcaagagaagcactctttctccttcgacctcctgactggcggtgcctcttggggagaggtccatgttgcggtgacttgtccccacctctgcgctgaccttggcgtcatgctgaggctcagcttggtgttctaatctgaatcagtggtgattgtgtgatttttatttctgccccgaggggtaaggaagagtcttctggaaggttttgccttggacattattcataatcgagctcagaggcctcgccctgcccctccatccctgcccccaatcactgcagtgtccagcccattgttgaat

SEQ ID NO: 1081 - DNA, 617 bp, Canis familiaris
ttctatgaattttttctgctctcaccaaagaagtgacacacatgttgatagtgtgacaggtgattcttattttctttgggcttttctatgtttgtcatgttttctgtaagacttcatacataagtttttgtaaaaacaaccaacagaaccaaaaaaatgcctttgttttttttaggagcatgtaatatatttgttttgcattcttaggctatgtctttctctctggtcatttcagtggggattactgaacattgtttttaattattatggggttgctatatttttatgtgttaggtatctatctgtttttcttttcttgatggtttaggtatgtccatgacattcctataatctctcctccatgaatggcaagggtagttatgaaagagtttctgctctcaaggatctgcttgctttgaaataaattggattagatttgttcatatgtttatattcctgttcaacgctaaatccattgttggaggagtattaatatcccagaatccatataaaatttatgagttttatttatgttcaaaacactgaacaatgttctgctcaacattgttcatttttatgggtctttttcttattagcacatttgaaaaaaaaatgtt

SEQ ID NO: 1082 - DNA, 535 bp, Canis familiaris
  misc_feature (1)..(535): n = a or c or g or t
gacatgacgggcgccctgcctccgagcgagcaccctgactctgctgccaataccgtgattctaaggatatgagcgaaactcagaattacagtaatgccatcacagctcaatacgtaccattccctcggcagctgaagacagaatgtattatttcggggggctcaaatccctttcatttcacagccatacccactatttctcagcttggcttgggagtcagatgggaaaagtggtgagaattttaagctcattgaatgcaagctgagatcgccttcatcggcagtcgtccagctctggtttggccagagcagagctccgaggcttggaggctggagagcgggccgcctccctgctgctctgctgggccgctggggcagcacgagctgatgttgtgagtgctgctcatgcccagaccagctggcagggagcttttccaggccaggtacaaacccactgtgtatatgtattctcaagtttaaatagattgtacatactggaatgtaaatgnnntgtannanagcaatctctatttttc

SEQ ID NO: 1083 - DNA, 507 bp, Canis familiaris
  misc_feature (1)..(507): n = a or c or g or t
aaatatacagnnggtgggatnnnctctgctagaagctcaaagtcacaactggcagagatattgatgaatccagtccctcatttggtctgtgttcatttagaactcactcattctaggagtctgctccagtgcctttacctttatcctactgcacatatggatgtttctaatatcctngaagtgtaggcctcaggcatccccttttctcccaatgggccaccaccaccagttactgggtgcttgagaaggggcaggatttgcagaggtggccagatagggctttcctacagagcagcaagagaaggccaagcagagactactgcagtagtatggaccccagcccctgccagggcttctgccaagggaaaaaatatatatgccattcacctggcaggcaatccagtctccctcaagattactgtgcatctcaggactggcctaaatttcaagactcaaccaagtttctggagtgaactttgcatggannnaattagacacatataagag

SEQ ID NO: 1084 - DNA, 407 bp, Canis familiaris
  misc_feature (1)..(407): n = a or c or g or t
gtgcnntacannnnnnnnngtcattnnanncccctgtcaagatttttnnaanatatctcaaaataatttgtcntattttttgatggtnngaatgcttgctttcnnnnngcatnnttngacnnnctaaaggggnnnnggggggnnnagngaagaatatnnnagtgatcannnttgannacccctacagagcagaaattcccgactgacaatgtgacgatgaccataggatgtattatatatgtgacacatacaacttttctggtattttctccttaaggcacaaaagntaagtgatttgaggtatgtgaacactagaggtccagcttataaagtagtatatagaactggtgggtttactatcaagtagcatagcttttcacagctcatggataacctaacatggctga

SEQ ID NO: 1085 - DNA, 564 bp, Canis familiaris
  misc_feature (1)..(564): n = a or c or g or t
gagtgacttcttttatgaagacatnnaatctttgactcagatgcttagggctttggctacagatnnaaacaagcaccgtgccaaagtggacaagagaaagcagcggtcagtgttcagagacannnnnagggcagtggaggaacgggattttccaacagaaactgttaaatttggtcctgaacgaatgtatattgattgctgggtcaaaaaacacacctatgacacctttaaggaagttcttggatcagggatgcagtatcatttgcagtccaatgaattccttcgtaatgtatttgagcttggaccccccgtgatgcttgatgctgcaacacttaaaacaatgaagatctctcgttttgaaaggcacctgtataactctgcagccttcaaagctcgaacaaaagctcgaagcaaatgtcgagataagagagcagatgttggagaattcttctagattttcagcacttaaagaccactttctaatatatattttttttaatttctaatgtatttaaactagagacagtttttatcttgggtcaacatagatagcttttgtagcag

SEQ ID NO: 1086 - DNA, 667 bp, Canis familiaris
  misc_feature (1)..(667): n = a or c or g or t
ttttggggggcnnaaagattttttttttcctgttggaacacttttacactttctaatgtatagtacttgaagttcttaccagaaaattacttttgagttttgaagccttttttcaaactacttttaaataagtggtttattgtcagtgttttgttttgttttatagtatatttttcctctactcttttctttccttcccgttttaaatatatatataatttccaatctaggatattgccctgccacccatgaaaactgtgttctggcaccaaaagtaatgagaaatgttaagtgtaatagaaaattaaagagccattcagcttcagtctctacataccatgaataaaacattaaaacatcacatggagaagtttacatggtgattgttcacctgcagtactgtggacttttaacattttgtccccttttcagtgaaccagagtaaaactattcattgaccattactgttatttgctttttttttttctttgtgatggtaatattctatccttatgacactattgcaaccaaattggctttaccatcttggctttagtaggtatagaagacaatggattaccatctttattgctgtaatgtgttaagcattatatgctagtagaatctagtttaattgtttcgggtggaaaagtattctttgagtttc

SEQ ID NO: 1087 - DNA, 559 bp, Canis familiaris
  misc_feature (1)..(559): n = a or c or g or t
tccctgtgcancggggagaaactagagctaaaagnnngtaagtggctccgaggacccagagcaannagcccaaccagatgcaccggctgggcccaggtttggtgctccactttccccagagaaaagcccagggtgacccccaagtctctagagtaggacggcaggtgtcagctgagcaggacggagtgctggccctatgcccctggagatctctggccctcctctgaaggctcagctcacatcacatcaccagcatcaggagtgcagggaggtcagccccgcttctgaggatgagcgggtgacctctgccctgggaccactgaatgacattcttgattatgtgtacggtgccctcagagagcccaccacagtctaggctcagctgtccaggggtgggctcctcaccttgggcaccggggaggagcagaatcaagtgcaggaggaccattaaaattgactgagcctgtgcatctcaatctttctgaggcatcggtttccctatctgcaaaatggaggtgtggggaggattaacacccagcttgtgttcctccagccagtg

SEQ ID NO: 1088 - DNA, 617 bp, Canis familiaris
  misc_feature (1)..(608): n = a or c or g or t
ttatgttctgtntnnctgcttnnataatgnntggnncgggtgncttttgtttactcctaaaaggtttgagtgttttgtaaatgtaatatctcggggaaaagnctgggccaaatattcataaagcacatgttagctgaagagtgtaatgtgtagtcctgctctgcagcttccttaagcttgggggaaaatgttgggccaatgacagaagtttcaggaaaatgtcacagttgacatttaataattttctgtagtctatacaaattatagcaatttaaccatctaaagtgaatgaatacttgaaaagccgattataacattttcactcattaacttttcactctggcgagtcgccttgtgaaatgcctcttatttctcaacttgctttcgttttgaactgcgcttggtatcgcctgaaatcgctaggtctctatgctgtggccgctgctgtgattccgttttttgaataggtgccatatttatttgtattcccttcgctctgtttgcacgcccattttgagccaacttgtgtgcgtctcagatgtcggttggtacgtcctctgctgttctccaggatggcctcacctannnaacaagccctgagagcaaatgcagaaaaa

SEQ ID NO: 1089 - DNA, 560 bp, Canis familiaris
  misc_feature (1)..(560): n = a or c or g or t
tcatcgtcttgctgggggnntncgtggtctgcctaatcagggtggcgcnnnnnngncannagcgcaccctccgcacngtctnnagctctggggacgacaaggagcagctggtgaagaacacctacgtcctgtgaaggccctgccagccagatgtcacccttcctcaggactccctgttgacgaagagaacctgggaagggaggggacacaagtgtcgaatgtgtgtgtgctttttaaaatagagtgattggattgtatttgtgcgatcattagggctccgggtctgtttgttactccagaaggtaagagggctgcttcctgctctcccagctgggtctgctttgggaccctcttggaggagggctctgccccagaccagagtcggctactcttcggtttagttcttcactccaggtattggttttctttgcttacattgaatcctgtagcatccattcccattacaaaagtaatgtaatagtttcctttgatttgtggttttgttgtttgtttgttttttaaataagtggaaacaaaagttttttttattaggattctga

SEQ ID NO: 1090 - DNA, 467 bp, Canis familiaris
  misc_feature (1)..(467): n = a or c or g or t
gaatcaagagcaacttttganactagcaagcattttgagggaagaangaaaagttttcaatgagaaggtttattacaccgcaggctacaacagtcctttcaacttgcttgatggaaataatgaagtgtggttgattgagaaacatgaaccccccaaagaaaataaatgagaaaaaaaccgggaagtaccatcacttactgtagacatcgacactctacttacacgtaaactgcaggtctagtagctctactgagagaactacgatgaattgagcttctttccaaggtgcctattaaagcttgaagctttatctagatgcgcagggaacaggggacagtattctagaaacatgtgaacagctctgaaggagtttgtctgcaaggctccagggaatatcctgttacttgacccttcttcactgcatcacaatcatgttgccttttctgacttggatttgtgtcatttgg

SEQ ID NO: 1091 - DNA, 419 bp, Canis familiaris
  misc_feature (1)..(419): n = a or c or g or t
gtnntgataaggggttccatgggataggacaataattggnnaagggctnntagaaacaactatagaagagagagnnnnaggggctaggtgctatggaagaggaaagagccatgggggcagtgaagatttagggaaactcacagagcaaaatgaaaggggatcgggtaagaagaggtgaatccaagtgtggatgactcaccccnnnncttccagacataaacaaagcttcttgtctgagaccaagggccagatgggcaggccctcccatcagggaagatgcaggcatcatcaagtacctggggatacactggctgtcctccccacacctggctccctggaaggtagacacagagtcaccctcaaaccctggcattcctttctgtgtactaaaacccctcacatggctcccagagaggggc

SEQ ID NO: 1092 - DNA, 251 bp, Canis familiaris
  misc_feature (1)..(251): n = a or c or g or t
gcttcccnacaactgaaaatatgtgtatttaaaccaaacccaaaaagccgatnnnnnctnnttagaagtagtatttatttcagaatcatacttgtannnangngaataacttnnntgtggatcccnnnntagctttttttgtaattgcagttatatttatgnnnnnnntgtattagaatttttaaatgtcatcttgaaatnnnnatgtgtattttaagnnnnaatgcaaaggtaaannaaaaatacttttt

SEQ ID NO: 1093 - DNA, 437 bp, Canis familiaris
  misc_feature (1)..(437): n = a or c or g or t
aattggggcttnnaccaagnnaggtgagaccccccccaggtcccctcccctttcaggatccatctctcattttgcctcttcctactgcccctgccccagactggatttttgttcagtttttaaaaacagacaactcccatcacatctgtttgggcttctcgtcccctgtaaatagaccacgccatcgatcagtatttctcgggcgcccccctcccacccccagacgtgcccctacccctcaaagagctggctgtctcggtgcccgggcccacgcgcttcacccccgtcgccgcggcagatggagggggcggggccaggtgggcgggggttcggagcgcttccggtttctcggccggcaccgcccctccccgtccccccgcaggactgcgtctctgtacataatatatatatgtatgtattgttcccggttttgtacg

SEQ ID NO: 1094 - DNA, 490 bp, Canis familiaris
  misc_feature (1)..(490): n = a or c or g or t
tgctagagnnnagagaaaaggaagaannncntgggagatttccctcactctctnnnngcatcaagaaatcttttttgtccccttacagacaaaacaagagggcttctcctagagctctctttatccgtgccctagttcccacttccaggttttaggctgccccaagattcttacaacttgagtctaagccagggatagccaaaggaaaataaacaataaactcatcactagttagtactttggattctggtctgttttctttcccaatctgtatgctactgtgtacttttcagggttctcaaatagctgccttatgcattctttccaggttttatagccgcattgcatgaggtaaacagggtgtagttaccccattttacttagaaccagaatctcctggggcacatgggtggctcagtggttgagagtctacctttggctcaggtcgtgatcacagggtcctgggattgagtcctgaatcatgctcctc

SEQ ID NO: 1095 - DNA, 611 bp, Canis familiaris
  misc_feature (1)..(611): n = a or c or g or t
tggtcagaacataatacttccataattaantctttatggttattggggctatgattttagcttttttggatgaaatttatgttactctcctgctcaaagtaccattatgttttctaaatggtaatcacattggagagttctataagattctagctaagttttgtttaagcttatggtttaaggttaacctggtttatgctgattaccaaattactaggtaaatgctgatgtagtatgtaaagttagtttcttggatacagacacacccagggcagctgttgattagaaatgcaaattgctaaattccaaacagaaacagtgactttgctgctacagatctactaaattgaccactttggttcttgcttgtttgtctcagtcatagggagttctgtaaaagatgccccttgttttccatcttccatggccttttttgttgggaaacatctaaagtgtattaacagtgcatgcttttactttgtaaatgtggtgccaaatccctgtttgccattgtttttattnnnnnaatgttaattnnnnnaatccttagtaccttcttttgccgaaatgattgcattttgggactttttccactatgttgtgtatacaga

SEQ ID NO: 1096 - DNA, 412 bp, Canis familiaris
  misc_feature (1)..(412): n = a or c or g or t
tggcntcccggggttgcgttgtgaccaggtgtgttttgtcagaataccnagggttccttccattcgtccatccgtctgcatgtgctnctaggccctcttctcctgcctnngggcctcggccctgcagcggggaggacacccctgtgacagcctgacaagaccacatctagggaagaaactnnnctggggcctaggcaacacatgcccccaagtcacccccgctctctagggggtagggggtgccacctagtccccaagtgccccatccttcctgggaggctccacgagggttgggctgagaacaggctcctcccgaggttaacgtgattagggaaggatggggccctttgtgcacaggagtagtttccatnnnnnntttttaggggatttgctgcagatattaannnnnnnt

SEQ ID NO: 1097 - DNA, 537 bp, Canis familiaris
  misc_feature (1)..(537): n = a or c or g or t
ctgcagccagcagagccaggaacagacagacccnnagtcagaggaaaacgaagcaaagaaagactcaagtgttcccacatgccagggnnagctgaggcgttnnaagaccggtcactacactttgatccatgacaacagcaagactgaatttgccctggacttacttctctactgtggctgtgaaggctgggagccagaatttggtggttttacttcctacattgccaaaggtgaagatgaagagctgctaacagtgaatccagaaaacaactctttggcattggtctacagagacagagagactctgaaatttgtcaagcatattaaccaccgaagcctcgaacaaaagaaagctttcccaaatagaaccggtttctgggacttttcatttgtctattatgaatgacagggctgggcaaaactgaaagaaagagacccctcctcggtactgggaagtatgcaaaagccacgaggtgacccgtgtgatggtgtccttagaatctgtgtgtggtaggactcctcatcactgtcctcaat

SEQ ID NO: 1098 - DNA, 672 bp, Canis familiaris
  misc_feature (1)..(672): n = a or c or g or t
ctcccttgtnntctcttgctgggcatggaggagatgnnnnggcattgctgtcatccagccttcagcaatctttatcaacccagnnaggtgagcatgtgtgcctgtgccttcccaacattataattctcccccttcttaccgttctcagatacacaaggaataaaacttctgatccaggatcatccttccaaatggctgtatttataaagatttttggagctgcactgacacatctgttctagtacatcaagttctattttttaactgagctccagaggtagtttgttacagagaccttttagagaaagctccatgtgatttccaaaattttctcccatttaaatactaatcctgggacattgcagatgctgggtattttccagtttttcagtttgggctctcaggattactgattgtggcaaaaaagtgtttagactgctttaaaaactgtgcatttagggacatttaaaagcctatctgcaatgtttatcaagattaggaagcaatttccaaatgcaaatacaagaaatcattgatatgattagaggtggggttttttttttattattattcnnnnnntaccaccctnnnnnntacagcagtttattaaaaatatttgtgaatgtattttttagtactggaagaaaaaatattctgttgtctcatttagca

SEQ ID NO: 1099 - DNA, 568 bp, Canis familiaris
  misc_feature (1)..(568): n = a or c or g or t
agannnnngtctgttccataccctgagcaagtaaagtgggaaagctggactcttctatcacagtcatgccnnaggtctcccctcctggctaacctctgctagtagtttttcctttcctttcttgccctannnntaagctttttcctttccttgtccctctctctcatcactttaattttccttttagcatacagggtattcaccttcgttttctcttttccatttgcctccatcttcgtccttgttgatctctgctattccttctccctccagaaggggtggagaaccttcttcctttctccaagaccatggttgatccaccttccttcctcaggctccttcttgacagtcgtctagaagggagaagagggaaaagaagcagttcctgatgcagatgaacagctgctcccaggtcaaagttccagcagagtgaagaaagaaattcctggaagccaccaaacaatgtgctttttagtcatcgatgaagagcccaagggaggatgatggagaaggaagagcctgggttgaggctcagtgtataataatctcttgcctaatgtgtatgcat

SEQ ID NO: 1100 - DNA, 77 bp, Canis familiaris
  misc_feature (1)..(77): n = a or c or g or t
gagacttctatgtgacatggcttcttttagggctaccttcaattttccctttnnnnnnatttcctgtttatttttat

SEQ ID NO: 1101 - DNA, 655 bp, Canis familiaris
  misc_feature (1)..(655): n = a or c or g or t
atacatgccttggtacttnnagtctgtatttctgaanngcgtgnngaacagttgtctcactcaccccgagagatgcaacttaggaaagaggggagtgtacattctttccacctgaggaaaggaacatcgtggggggccttacaggatacgtagcttgggagaagggagagctggttgggttctggcactcccactgcggtgggtttgagcatgtccatgctgattattgttcacctctttgtcctatccggaggtgacaacacccgtctctggggctgtcccttgcggcagaggcaaccatgggccacatgccggcactgcagaattaatgcagtgttcacatggcagtttccattcatctctgccacatgctcgccactggacccgattctgataacaccatcatcctggactatatgttggataatcaagttcaccagcaataaaatcctgggccgaggcatcttccaggcatgaaggagcaggccacagctgctctttcagatgtcgcctgacagcgagggctcttgagatataggccaggtatccttgtgagaagtcctaagtgcccgactctgcgcagtacccacgagcccagcttttcttccaggcagcctcaacctcccctttctccaaatggcttcctgaatttgta

SEQ ID NO: 1102 - DNA, 540 bp, Canis familiaris
  misc_feature (1)..(540): n = a or c or g or t
gacggggaggnctctgtgactccagttgagccnntgaagcagaacatcttggagcagagcagagggagggttttcagcccttgcctatgcagcatgtcctggggacactgtgaaaggcagagccaaaggggaagcacatctttctgggtaaagataaagtcattcattccacagatgctcacggagcccccttgtctctgtgccgggtgctgttccagggaccagccacagggaaacccttgtgctcctggagcacacgtgctagcgagcagaggtcccgacaataagcaaatgcgttctagggtatgtaaacgtttgctaagtgcacgctgagaaagggagtagggaannnngccgacacgtgtagaggagtgctgtggattttatagtgtggccagagaaggtctcaccgataaggggatctctgtgggctcattttgggatctgtgcactttacgtcaggatgtaaacccttgtctctcatttaagaatcatcatcaaattnanaacatataaacagnnnnnnactgacattttttt

SEQ ID NO: 1103 - DNA, 587 bp, Canis familiaris
  misc_feature (1)..(587): n = a or c or g or t
gctcatcgcactcaccattgccctgttcaccatctacgtnnnnnggacgnnggtcnnnttccgctaccactgccagctgtactccgagtngagaangaccaaccagaaagtannnnnnaagatcngggatgcagatggctntnngggcacccagcactccncnnnggcagctggannnnnnaagaaggtggcagaggagacccccgtgtgaaggccagcccagcaaggccagagacacctggcgacgccctggtatttggaaggacaaaactgcccgacccttnctgcacggccagatgctttttaggcaaagagacaccaagcggagctgattctgtgattcccatgtgaagatattttccacttgttttgcacactgttgtacacgaggacagatggatatggtcnngagctttggacagannnnnnnaccctgatctcatnctgaggtccacccggccnntgggggccnnnancnacggccataggtgaaccagggcgcccatggggctgggaggttctgcaagcttcttgtgcttctctgcacctggcaggctcgctttcctggcannnntgactttataaag

SEQ ID NO: 1104 - DNA, 541 bp, Canis familiaris
  misc_feature (1)..(541): n = a or c or g or t
tatatatantntaangagacactgtttacngcagnnactcannnnctgcttttgattcacnnnnnnctgctttcaganannaaaaaaaaaaaactttnnaaaagggtgcattgataaaatctgaggtntgtttttttttctttgtaaatttttttnntaagtttatggcacagggtacaccttaagtattnctcctccatcctccccttggatcctcaagttgtnctgaattctaattataccttacatcagcaagttaaagagagtactttaaagtaaagcagaaggagactgttgttcagccatcaggaaacagttatagtcagaagacatcattggtcctgtgtttcctacggaaataagaaacaataaatgttgcactgaatgtttgtggtttggagtccctaaataattaagagggaacatatttgcagaaagttgtgtggggtttttttatgcagaattttgtcaaaagacaatggnnnnncatgtttttctttgannncaaatnnnnnnngctannnnntttntnnnnnnntgg

SEQ ID NO: 1105 - DNA, 587 bp, Canis familiaris
  misc_feature (1)..(587): n = a or c or g or t
gatcccagctggtgttcctttgtttgttttctccaaatttacgagnnnantggacagctgttctatccattatggtgaccactagccacatatggttattcaaatcaattaaaattacataaagttataaattcattcctcatttacactaaccaagtgctcatttgccataaatggctcggctgctatacggaacacacagatggagaccatgtccacctgttgagcctcagtgctagagaactaaactggcttaacaggtcccagccccagccttgctggggtgacctttgtctcccagggtgaagggggcatgagnnagggctgatgggggctctggctctnnagcttgttatctgtgaccctccctgtccacaaagtagaggcctggggcttagcctgnnaagtctgcatcttctcctgaccccactggctggggtacagnnnnnncacccntgccctnnncacctttcaccaccacaacccagggtcccagctggctgggtcctctgcaccgccccacctcccccacccatgtcctttccnnntgnntatgttgggagtgagcacctcttcttgtagccact

SEQ ID NO: 1106 - DNA, 619 bp, Canis familiaris
  misc_feature (1)..(619): n = a or c or g or t
ccaataaagaagagctgatgaagcaaaggaagtggcttgggaagggtcaagacnnnnaaacatcagacaaggggaagaaaagttgatggncctggtcaagataagagctggccctgtcagaggtgtgtacgaagggatctgattgggtgacaatggaacccaagttaagcatgtggtgacaaagtctgagtagctgcattgcaaatacagggtgggactgacaagagtgtaactcagaagacagcagggaagaaatctccccaagcagctctgctctgaactctgccctatccaagaactctttacccagccaagagatccgcaacccagtggagagtccatggactcagtaagaaagagtttacagcttccttcctcaaaagtctccaagataaacagaataaacaccagttggtctcagctggtcgcacgttggcctgcctggaagagggggatgccagagatagcttcttgaggttgcttccagccctgcatttctaggaaatagacaattatgaacaacatggattttattatcgtgacatctctaaggtctctgcataaagcctatatttaaaaatataaacatgtaagtgaaaaaaaatgtcaggggnnnnnn

SEQ ID NO: 1107 - DNA, 587 bp, Canis familiaris
  misc_feature (1)..(587): n = a or c or g or t
accactcagtgtncgcatgccccatcctcannnagcagacgtcagattccaaccctcccatcaagctcatatgtggccacgttatctcgcgggatgcactcaacaagctcattaatggaggaaagctgaagtgtccctactgtcccatggagcagaacccagcagatgggaaacgcatcatattctgatacctgctcnnnatgaactttgtcagaggggtttcccacctatgagctgtggtctgtcttggtgggcgtggctgacttcagattgtggtttgcttcagagcaaatgactgagtgccaccatgggtagaggccaagaaaggagacaaaccagtctgtgatgggcagctggctccttggctggaagggtgggagacatgggcctctgcactcctggtgtttcctgtttatacctgccagtgacttggttgcgaccgacaagaagcagaggactgggccaacaacgcagacgtcctttcagtcacatggctagccaggtggcttatggttaacaccccttctattgtacagcttcacaactgtatgtatctgttccccgctgtaaatagtccgggttccaac

SEQ ID NO: 1108 - DNA, 565 bp, Canis familiaris
  misc_feature (1)..(565): n = a or c or g or t
actgcccnntccctgccatcttcccttctgctgctccgcctgggnnagttcatngctggggaagccagcacagggttaaagtaactcccagcagtgcccaccagggggcccaagcacctgctcanntcaggggcacagttcagtcacttgccatttgacaggagccagtttgacctttggttctgttgctgaagcaaatttgggactttcctgtcttggtaccattcactggcccgcaggagcttttgaaaccttgaatagacttgcttggacaatggggttgggcatagggttgtctttcctcttaaaatgccatctgtagaccttgtaagtcagatgtccagatgtttggcaggtgaattcctctgcttgacaccctccctgtcactttggactcagtgggagtgggcatctccacgcacctgtgtatgtgaaagtcattttacatttcaaagcagtgtgtgtttcttatttttatatttttaactctttatccttggatgtataaagtgaactttttggcttctgtaagtatgctctatgcacctctaatgttttatcatgt

SEQ ID NO: 1109 - DNA, 597 bp, Canis familiaris
  misc_feature (1)..(597): n = a or c or g or t
ttnagaccatttgttnacagactatattactcattgcagncnnnnaaaagttcttaacttttacatattaaaaatgaggagtgcttgattcagtgcattctgttttagcggggtagctgacccnnaacaacataaaaggctctattttaaatgcagcctcttcccccctccctgcccacatttaggaactaacgtgtaggacttgggggtatttctttgatgtcagggttgatgtgtggtgtccaggaaagagcccttgtttcgtcttcatgcattttatttttccacgtacagaagtctttatcctgagagtgtggtcaaaagcaggaaacgtgtttacaacaggaaaaacatttccagaactcatgtcatcccttttaccaaagtggaagtctgcatgaatatgctcagaattgaatactcagtgttattatattgtaagtgaagtcaatctagaaatatatttaatatattgaatttatttgtacatatgcagaatattatggtatttgtgtatggaatctgtgcttcctattttttttccagttctttgatgagtaaatattaaatgtattattatggaaatctagattattg

SEQ ID NO: 1110 - DNA, 571 bp, Canis familiaris
  misc_feature (1)..(571): n = a or c or g or t
tgggantggatttccagccccagccagcttcttnnnnnccattccctttccccctaagtaattctnnagctgtcaccaggatcctggttggatgaaatagaggtcctcccgatagctttccttgggtgcatcccaaagtaagcatttggacccttttgttacaggatagcttgcttaattatcatgaaaagcagactgaggctgatagagaatttaccactcgggtcctttatattcttggggacgaaacaccacacacctccttgttctctggtcctgggggagcccctgcccttctctgagggctgcactgccaggcccggaatcacttggactcctgatggttccagctgtggacatccttcactaggctccccatttttgcctttctccccttcctcatcccaggccaggcagacaagctaatgctaatgtaacacgagcaagacacttccaccaagagttggcagcacagctctttgttttgcagtctagaatggtacagatgttttgtgactttctccctctgcagtgagaaggacaaaatcaccaccaggacactgaaggcccg

SEQ ID NO: 1111 - DNA, 472 bp, Canis familiaris
  misc_feature (1)..(472): n = a or c or g or t
tgaccatcgtgctcctcaccgtggccacctgcatcctggtcctgagtgggacccagcttgtnctgcacatctggcagctgagggggcatcgtaggtggccgccagagacccagctgctcctggagacacggccgccagcagaggacacctgcagctgccagttccctgaggaagagcggggggagcagctgtcgccagacaaaggccanctaagggacctgtgggtgtgaggcctggctgtcctctgctgctgcagactcgganctggcccacccaggaagcaccctgggtggacccnnnnnnnnnagggctcctaccctgccatggggccccagctctgggcctggccctgctcccctcgatggcggaagtgggtggggggtggtgaccgtgacccatcccccagancntgcagaagagacagcagctgtgccagaccccacaggagatacagannnnnccatnactgcct

SEQ ID NO: 1112 - DNA, 425 bp, Canis familiaris
  misc_feature (1)..(425): n = a or c or g or t
agaacccctggcctcaaaattcttgcnnngctgtgtccaccaatcctaggctgttatatcatgactcttatcctcaacttttgcctctactttcacattgaaagatcaacccctccgcccaaaccaaacttcaaagtctcaataaataccactattttgtcctgcttctgagctgcttctacaactttgtcaagagaagtgttcttcctcactgaggcaaaagaccctgcaggcaaaacatctcctgctaccccctgaagcaacaaggattgccctgagccagcaggactccaaaagaccaactccaagacagtgatagacctgacctttactgcccacctgtttgaacccactgacctttgtcccacattttcctcgtagaaactgcaagtattttcagcacttcacagacggtctttgagact

SEQ ID NO: 1113 - DNA, 593 bp, Canis familiaris
  misc_feature (1)..(593): n = a or c or g or t
gnctggaccnggcgggcacgcacctgaccgccttcctggcagagatgctgctcggctcgggcttgacgctgggccagcaggacctggacacggtggagaacatcaagcaccgctactgctacgtggcccccgacttccccaaggagcaggcccggctgggtcaggactgccagcaggtcctgaagctgcccgacgggcggacggtcacgttgggcaaggagctgttccagtgcccggagctgctgttcagcccccccgagatgccggggctggtgcccattggcgtccccgctatggccaaaaagagccttcagaaggtgcccctggaggtgcgggccgatgtggcccagaacgtgctgctctgcgggggctcctcgctcttccagggcttcgagggccgcttccgcgcggagctgctccgcagcctgccccccgaggcccacgtggtggtggcggctcagcccaccagacacttctccgtgtggatcgggggctccatcctggcctcgttgcgggccttccagtcctgctgggtccttcgggagcagtatgaggagcaggggccccacatcgtgtaccgcaaatgctactga

SEQ ID NO: 1114 - DNA, 521 bp, Canis familiaris
  misc_feature (1)..(521): n = a or c or g or t
actatgaagtaagaagctgatgagcntancaacaatgtgtcacgatttctctgaccttccgaatttagtgcttcacacactctgaaaacaaccaggaagacttcccaagccacatgagcaaaagcatctctctaattcaggaacagaattacacactcacagggccaagaaatttggtcatttgtttttagacaaagcaaacactcaagaagcaaaaactgggatctaatcttcacttcaggtttggatgatttcaactgtctcacatatgtggctcttctaagaccttattctctaaatgtttgtttactgggtaccaaaaatatgtaccccagacttcactgtgcagcatctgccatattctcctgagatttctagaacatgtcctcttaaaagacaaaaacaagaacatcttctctctacttcagtctaaattctctgatcatacaaggcttaattgcaggaagaaaagcttggagaggatccaggaaacccaatannnnnaatgcgtttttatgaca

SEQ ID NO: 1115 - DNA, 532 bp, Canis familiaris
  misc_feature (1)..(523): n = a or c or g or t
atanngagatgtactgtgattttactgatgtttcatcacaagaagggagtnnnnnntgtgccattannnnngtagttggcaccgccactaaatgcttggagcagtcacatgcaccgcaacaggtaaaatctcgagtgaagcgtgaacaaaatctctccgcttgtgcgcattgtggttcagaatcagcaacaatgaaactcgacttgtaaggataaacagttttctttttgttttttttcctctcagactttatggataatgtgacctggtcttatgcaaattttctattctaaaactataatctacacgtactgttcagcgtaaggaaacaaaatgctgctgctttgacagtaaagagaaggaagtattctgtttagctgtatttggtattaattgcatgtttaaacactggaattttttttcttgaaattagatcattttttgtttctttcctcaagatattttattgctgacactgaagaagaaatgtaattcataacttgcactaaatgtatatttctnnnnttaaaaa

SEQ ID NO: 1116 - DNA, 516 bp, Canis familiaris
  misc_feature (1)..(516): n = a or c or g or t
tgtatttcccaatcagcctggtnnaataagaatcctgaaaacaccatctatttngnnngctatttttgatacaccagacgaggatccaaattacaatccactacctgaagagcggccaggaggctttgcctggggtgagggccagcgcctcggtggttaaagcaacagtgccaataatgagacccagctgggaaggactcagtgacatgccctttgggattcttttatcctttgtgttgcaaaagtgcggacacttttgacggcttggcaggttttaactccagaagcactttatggaatggtacactaatggatccagaagacacttggagcagccggccagtggctcctcactaccctggcagtgaaggtataatctctccaagccaaaccactggagaaacaagtaccctgctgcctctggcgaacaagtacaggagtgcttgagttctggggtgtaaggcagagctttctctnnnnnttcttctttgatannnnnggccatggtgtaaatgg

SEQ ID NO: 1117 - DNA, 543 bp, Canis familiaris
  misc_feature (1)..(543): n = a or c or g or t
ttatttccctncntgacnactttggtataaaaaccaggactatgaatgcacttgtatcatttaantaatttgatatggnncttttttggtaatagtgagattttccctccattttgaagtaagacctttagcaagtgtaaaagtaggtgcatttaattttagccaatttatgtttcagcttttaaaaatataagtggtagaaattttgatccaatttatataatcaattttattgggaggaaaataggcctttttaataaatgattatttccagactatgttgataggaaaataaaatcacagaatgcatgttacaatacccaaaaaagatggtgcttagaaaactaatgagtcatgacagatgacaaatacatatccatgaagctttaatcacatgcagttacatatttctcataagtcatcaattgtttatctggtcttcacacttgggagatttgttcagatgaaaccgtttatgatttcagttgttaaactatgattagtttnnnncagcattttttcagtgcattctgatttatttcc

SEQ ID NO: 1118 - DNA, 442 bp, Canis familiaris
  misc_feature (1)..(442): n = a or c or g or t
acacggnagacagtgccaaagtgaccgagaatgtggtnnagcccatgaaagaagtatatggaattnnnntctcagatggtcnctcagaagaggatttctccatttactcaagatttgttcagctgggtcaaagtcaacataaacaagacaggagcagccagcagctctgttncaggtgcccagatggtgttataaaactaacacctatctcagctttctcacaagacaatatctacgaagttcagcctccaagagtagatagaaaatctacagaaatcttccaagcccacatccaggccagtcaaggtatcatgcagccccttggaaaagaagacctctccatgtaccgagaatacatcaggaaccgctacctctgacgagaaagcaggtccacccatgaaattgcttacgttgtcgtctgttttgtctcatcttaaaaagt

SEQ ID NO: 1119 - DNA, 604 bp, Canis familiaris
  misc_feature (1)..(604): n = a or c or g or t
gagctgtgccatttatggtactctttgcctatgcatctccttttggaattatttttggtcttaactgttttttatcatttctgtaggnannnggcttgtgaccagtactaatcttgagtacagtttttttttttttttctgtccacaagtaaattaatgtctgcttttaaatgtcatttatctacttacactttcttgggggaaaaaaatcaaatgtcaattttagcagatgttgcatgtaaattgttagcaagtaatgactacaactcagatgattaagaattttgtaacagaaagctctgctatgttttaatttttatatacaattatgatgattagcacattgtaagaatataaacctttgctttttaaagtttatttttactatttctttatcactgtttatggtatcagcattggtttcataatgtaaatactatatattgaacaaattaaaatgtcaaattttttattaccatagttcatgttaatagtggggctttcaggtgtttagagatttttttggttaacattcaatgcagaagtactagatggtgttataactnnnnaattgaattttaagggattccctaatatgtatact

SEQ ID NO: 1120 - DNA, 552 bp, Canis familiaris
  misc_feature (1)..(543): n = a or c or g or t
agaggatttncaagacggagcaatgctgccaatacagttcgcntctagncacagacggnnnnntnnagcctcagaagttaacttgccacttgagcaaggagcttgccaggaagtaaatcatggttcgtatcattgaaaagacttccagggcctggcaggtgtgtaggtagatttctgagaacaccggcaatatttttacttctacagactctgctcttctctcttcaggtaaaaagtaacttgtgtttagtttgtccaggggactgtgacttgaaaattgctggccagctcttttggtagtgtacacaatgtttgaaatatttgttaggggagaaatgtgttctccatgtattaatgcattgcagaccaatttaactgacctttttcaggaaaattctttctagtatagtaaggaagctggaagttttattttttatatttaatgcttaacctccctctcatattgttaaaaattagcctgcaggtaattcccctcacttctgtgggctcttgggagatacccgtacgaagagtgaaacaagtaaacaaaaa

SEQ ID NO: 1121 - DNA, 294 bp, Canis familiaris
  misc_feature (1)..(294): n = a or c or g or t
ccctcccccccaccaaacctcgacccctgaggttgggccagatccatctgcagtgtggggtaaggacctgggtgtcctcatcaccctcctgggctggcaggctcccaactcttccagtatcctcctctgcaccagagccctctgcaggatcctgggttggtttgcatgtcatttgcatatcatttgcatgctcatgcccacccatactcagggcactatgggaagcctcagggtgaccttgccaagtagcaataatttgggcccagtgtcannnnctcctccctgatacctctg

SEQ ID NO: 1122 - DNA, 633 bp, Canis familiaris
  misc_feature (1)..(633): n = a or c or g or t
angangagcaaaaannagtgtcagtaacataatatcagacatgaaagttgccaaatctgccacaattagagnnngtacaagaccagtgcatcaaattcagtttgatgaaggatctgatgactacatgagccaaaagaccagtgatgttaaaaaaagtcttaggaaaaatatgctcaaagggaagagacttaatatttttgaccttaaggcagttactgaagagacatctgaaacagagactacaccttcactctgggatatagaatttgctaagcagttagctgcagtaaatgaacagccgcttcagaatggttttgcagaaatgatccagtggacgaaagatgggaagctgtgggagtttccaattaacaatgaagcaggttttgatgatgagggttcggaatttcatgaacatatatttctggatatacacctgaaagattttccaaagcaaggaccaattcgccacttcatggaactggtgacctgtggcctttccaaaaacccatacctgagtgnnnacagaagattgaacacatagagtggtttagaaattattttaatgaaaaacaagacattctaaaagaaaatggcatagagttcaattgaagaccatggaaattgttatttcaa

SEQ ID NO: 1123 - DNA, 174 bp, Canis familiaris
ccacccccacccccacccggcccggctccagaagcgccctgccgggggccctattaactcaacgcgaggagcccctcgagcagagcctcgtccccctgtgctctcctccgaggcaggcgggagaggggcgagccagggcgcccacaacagcgcctccagaagacatcagccacc

SEQ ID NO: 1124 - DNA, 585 bp, Canis familiaris
  misc_feature (1)..(585): n = a or c or g or t
taaatgatagataataggagtcaggtttcttacagacagagaaagaagttgcaaataaagccaagggagaaagccagaaagaatcccagggggctggatgaagtggataaagagttggaggcagaagcatgaactcaggtttattttcagcacaacagagaagtaactgtaggtatgtgtatgtcctgtgtcaatatacattcaaccagtgcatccgaccatcaagccttgcattctgagtatcattccccaataaaagggaacaaggctccttggagaaatacaagatgaacctggaatattttgtggtgtcaggaagtaaggaagcctcaagagagaaaaaaaagttaaaatgatgtggctcccaatggtgaaaactagaatgatctgagtgatgaaacattactttacagtatttgattgtaacacacaaaaatacatatccataagcctatgctgaaaaatgaccgatgagggagaaggggcaaatctcccttctattaagaattccaaataatagcagcgcctgggtggttcagccagttgggnnnntaactcttgatctcnnnncaggtcttgatctca

SEQ ID NO: 1125 - DNA, 538 bp, Canis familiaris
cacagagtgcaggagctgcagggactgccctccctgccctgacttaagcactatttctgtgtccagcactctaaggctctgggctggggggatgggaggagaggtctccggggacatccccgaggctggacaccttttccagatggcctgtttggccgggcttgccctacagagggcaggagtcctgggtggtggtgggatggctgcccgtgtgtccccgggatgggacgggggaggaggcctgacgagggaggggcggtgagtggtggtggtggaaattgatagagcagccccaggctggggtgagggccagggctgggggaggggggtgggagctgggagcagagcatcagagctttctttttcttaagtgcaataaatctatcagggagctggggcggggagcagccagggttctagagacccggctgccctggccccttgaggctgcgccctgagaggcactacaacccggggggcggcgtgggtgtggggtacgggggaggggacagggcgggggaggggctactcctgtcgg

SEQ ID NO: 1126 - DNA, 557 bp, Canis familiaris
  misc_feature (1)..(557): n = a or c or g or t
gccgaggcccttggaccaccnnagnctggcaggcccctgggcagagccccaaagctgctgcgggaaggtgcctgtggtnnagggccccgtgggtctgggagaagagagccagggtggaggcaggagctgagttccctgacgggagagcaggcgggctcccaagctgcttggccccctgcccccagcccgccaccctccccagcttctctctctctgaacacctctctcctgcttccttgttttttatcaggctttccctgtgggggacggaggcccctgggcactagagtgcttcacccacggctcggtgccccctcgccccttccccctttttatacagatgtttttatatccatgtgcttgggtttgccgtgatgcagggctgagctgctgtggcatctttatttctctccttgggtctgtgtcccctcccctgtgcctgacaaagccagttcattgttttctcctcattacacaggacagcgggggaaggaggggagcccagccctggggaggcaagtgagcggcgggagggggcaggcctgggcttggatgaa

SEQ ID NO: 1127 - DNA, 644 bp, Canis familiaris
  misc_feature (1)..(644): n = a or c or g or t
agagctgtagannnnntantgtaaaatanntccttgatatnggggctaacttccagcnnnaaaatagaaagggacataccgccatnnatattgcaaaggcgtacgctgactatagaataattagtttgattcaagaaaagttggataacttgccaaaaccagcagaaaatcaaaaactgaaaggcaagccacctcctaaagtgaagagcgaaggccttgaaattaagaaagaagaggaaccacttgtatcagtttattctgtgccaactgtatcagaagaaaagaaaaaacgtaaagacaatgtggtttatctcaattcattgattaccagtggtcataccaagaaagtggatatcacatttattccacggaggacctggagtcctgaagccacaacagcagagctgatcaggaaaagggagttgcggcgagagaggttcagttatgaggtggactttgaagacttcatgatgccctttcagaagaacatcacagaaaaagctaaagccttagaagccaccttcaagacctaaatcacagcagttgcttcttgggatcaacatttcgaggcccggggaccagacttgagagaaagtcagtatttccatcaaagccaaagcaatcggcaaattaagaatttgtaa

SEQ ID NO: 1128 - DNA, 585 bp, Canis familiaris
  misc_feature (1)..(585): n = a or c or g or t
agaatagttttnnnnnnnctttatanntctggtattcaaatataagagagggttgaaattataaagctgaggtaatttctttattagaagcatctgtttgctaaatttagggagcatttgagatgtcacattttagaactttcatttaaatagttcaattggggtgcctgggtggctcagtccattaagtgtctgcctatggctcaggtcatgataccaggaccccgggatccaccccctcaggggactctctgcctcatgggggagggaagcctgcttctccctctccctctgtctgccgctccccctgcgtttgctctctctctctttcaaataaataaataaaatattttaaaaatcgttcagtattctcagaactaagctcacagaatcctggaaaaagtaatatccattgtattggtggttctgaaagcgtctacagtctctcaacaatatgaatgtgtggaggaggactcattttcactttcccattatatatcacctttgcacacaagacgcattgttttattgcttttttgttaaaatgtattttctacctgtgaaataatcttgctttattttggc

SEQ ID NO: 1129 - DNA, 520 bp, Canis familiaris
  misc_feature (1)..(520): n = a or c or g or t
ccactcnnngcacaaggcctgggtgtannagntggatctgtccccagcccgnnntgtgtgnnaggtgatgnnnncacttcccagtgtggnnngcggtgtggcanntntacccactcagggtgccggtgtgcaggcaggcggcttcactccctagcctcacnnnnnngagtccttgtgcctggtgctgaggatctcaagggctcaatggtatcagtgtgagctatgcanngtggggtgtggggcttgctgtgtttccacatgatggggaatagcttgtgggggtgtgccaggtgcatgagtcagatactctcaaacccacacaaatgaccccttcctcatccaaagtcactgatggagcttctctggaatcgtttgccaaaatcccaaggcagactccaagggtccaagaccatttccatggagcatacgttttcctttnnngtaggaacttttttttttctttttaaccagcaccacaccatgcttccaaaggccacgtttcatctttnntggatcacta

SEQ ID NO: 1130 - DNA, 682 bp, Canis familiaris
  misc_feature (1)..(682): n = a or c or g or t
gaaaacttgatangagagaatgnnnnnnaggggaangggcttttgtgtttcaagaangaagaganangaaagacctcttcctgnntcttgactaaaagccagcttttaagtcttagtatgatttaccagggcaggttataacaatgtacattctccagttgctggccctctgccttctaaagctatcttaaaagctgaagtgtgaattgcagcatctgcttgacaggtgcccagttcctcttggcaggggaaagatcactcctgtgtatcttcctttgcctcagattcctgtggccccaactagcgcaccaatcctcactccccctaaatgtgttaaaaatccattattgtggatattaaagtagcaattatactgtaagcatatttatgtgctctttttgtctggtttttttcatcatgtataatctgaatccaacattagtttctcacatcttccacaagtgtctccaacagaatttttatgttcccaggttgtgttaaatagaggtgaaataatatagaggtgaaataaggaaaatagatttaagggaaacttgtgcaacttttctttaagcattgttctcgaccatttaatttattgaaaggagatgctgtggttcttgatttagcagcaaccattcttttgtttacatagagttacagttttatttgttgttttgct

SEQ ID NO: 1131 - DNA, 532 bp, Canis familiaris
  misc_feature (1)..(532): n = a or c or g or t
agnagatgcttctgtagagaatcgtatgttagtgtaatnnncacttgtgtgtatagtttatgannnngatgactactttggaaagctttcaaaaaatgttaattnnnnnaanntgatatcattaagaatgaaggctttatgactattacacnctgggtacagaaagtgtcagtcttacagggttttaatcgttactttataaaaacgataataatcaatttggtatttgttgtgtagtgtnnnctgnncttcagacatttcaaacaagcttgggactaccagttatacttacctgtgtgttcttaccacttttgagtccaggagctttgaatnnttcagtggtggtggggttcaagtaagtgagaatgacacccctcccctttttttttggaaaaggtagaaaataagtatcttagaaggtggttgtgaatgatttgtgtgctgacaaaaatgcttgaaacccccatattcattaagttcaaatgtnnnnnaaaggtgtcnnacntgcaaaagcatnnagcncnnngtgnga

SEQ ID NO: 1132 - DNA, 637 bp, Canis familiaris
  misc_feature (1)..(637): n = a or c or g or t
gtanganngcatcatcaagaganntccccgccagccaaaatctnnnannctgagccagttgnnttttgcacttaaccatctttggtgggtctcccacaccctgtctgcccttcctgaagcccagaagcttccagaatcgactgttaccacttggacattgcccctgcccagatgtctccttttaggcgcctcatggagccctggctataggagccttgaagactggattcggtggctgtttggctcaccttttagacgctcaccctggcagaggcctcttgggtgtccccatctggcatggctgctggtgggacccataggagtggcagtggtgtagggggaggtcttctgcttagggggtggtgtccgagatggacttctgggccctggggggtcccagcccgttgaatagccacactggcctgttggtgacagttcagacactgtgttggtggtgacctcctggacaaccagccaggatggctcagacctccccatcggccttgctggtggcacatcctggactcctgttgttaggactggccgcccagactgtccgtccctccctcctgctgcagcagcatccagcccctcaaacactgaggccagggctgtcgcacgggggcctttacacgca

SEQ ID NO: 1133 - DNA, 512 bp, Canis familiaris
  misc_feature (1)..(512): n = a or c or g or t
gccncgtgcccttcccccannncgctcacccagggcagccacaggnncaccccagacctcctctcctccctgccctgggcctggctcctcgctttcttcctgtcccttcctggcgcactgctccgcacaccagcttgggaggtgaacgaggtggggaggccacctgggggtcttgtgggatctaggagaggggaactggattccaacctcctctttgggtttttcggaccaaacccaagagacactgacatagctgtcctcctcactgggcccacccggagggaagaatggaattggatggccatgtggtggccaggtgcggactgcatctctcagaacccgcgaagcccctgcctctccctttcatccctcggtgctgcccaccgtgcaggtggggccaagcgcgtctcaccctgccccaagttagctaggggtcagtcctgcctgtccctgctgcttcccatacctgcctagctgctgtcacacttctcttttcttgttttatccttttt

SEQ ID NO: 1134 - DNA, 544 bp, Canis familiaris
  misc_feature (1)..(544): n = a or c or g or t
gccccgggtgacatgcccctgtgtgcccagcccccgccctnngcccccccagnnnaccctggctctgccangtgtcccagagaaaggagtcatagcgactggactcagacccgagtcctggcggagatgctgatggaggaggaggtggtaccctctgcaccccccctgcccatggggaccccgaacacaccaccagtgctgagaggtggggctgcagttccaaacctggcccggagactggaggccctcagagaccagattggcagctccctgcgacgcggccggggccaggcaccccccagcgaggctgcacggagccccagccgcgtcctcccgccctgctgagggcacagcaggaagccaggagtgcaccgtgtgaccttggctgggctctgcgctcccgggctcggtctccccgtccgctcagtgcagctgctctgggcagagggtagtgcccgggggctgcgggtaggggctggtgggagcagaggggagcagagggagggtggggccccagactgtgggagatgacactggatttggg

SEQ ID NO: 1135 - DNA, 454 bp, Canis familiaris
  misc_feature (1)..(454): n = a or c or g or t
ccagnnnctgagtcctgactgcagactggctctcaggaggtgagatnnagacagnnnacgcagtgagacagccttttcctccctctcctttcagtggattgtgaacacttcagcacacctttgaacaatccacacagaaatactgttctagtttaattagacatgacttttcttttcattcttttttttagaggttttatttatttgacagagaaagagagaggacgcaagggagggaagggagaagcagacgccctgctgagcagggagcccgacacaggactcgatcccaggacccgagatcatgacctgagccccccaggggcccataacttcccttctcagacacacacaggttctttggtgaagtcccttcccatcacaatgccccatcatcggtgtgatgtttgcagggttactttgtcatcgtgaaatgttggtccatatgcgcatg

SEQ ID NO: 1136 - DNA, 620 bp, Canis familiaris
  misc_feature (1)..(620): n = a or c or g or t
gaaatccgannanntcactttcttgttcaaaatctgtcagcagcgggccccaagcacttatgtaatatctcctcaaatatcaggctatggtctttggccttgtcctcttgcggctgatggggtctcttagacgtttgtaaaaatccttttttaattttaagaacatttaaaatttaaatagatgcatcttctgggtcatttgatggactcttgtgaccaggagccaagcagccttatttttattgtcctgggctattgagaaaataaatgaaagggacacctaggtaagggatgtgatggctatgtgacatcaccacagtctctttggatggcagtttcatgctagtttgatttgaaagaaggattggatgagttgagtcattacttagcgcatggtcatttaggcatattgaatttaaaataatgtacgtacacgctttctgtgagtgcacagtcacacgccaggagccatttggtttcagttaaacagtaacatccattgcattaagtgaattttgttaatttgcattagattgggttttaccttatataaatttgttttggttttattattgtacaaggattgtaaatgttgggattatattacctggtttatgttg

SEQ ID NO: 1137 - DNA, 620 bp, Canis familiaris
  misc_feature (1)..(620): n = a or c or g or t
ttccgccgctgactgtgcgctgccannnctgcagagctagtttcagctccccgaagttgcatgtcatgttgcccaaggacnnagncangctggtccctaaaacccatctgatgtctgaatctgaatggaggaatcttggagttcagcagagtcagggatgggtccattatatgatccatgaaccagaacctcacatcttgttgttccgacggccactgcccaagaagccgaagaaatgaagctggcagccactttccagcctcaagctttacacagctgtcgtcgcttgctaacatcttcctgataacatcattatgttgccttcttgttttctcactttgatatttaaaggatgttcagtacactgtttgtgctgctgactgttttgcttgagcagagccaacagcaccatggcccggccagttgagtgctctttgggctgcagcctcagctgagctgtgtacccagcagagcacacttggtacatagaggaagcatctgacgataggccatggctgtcacggggattgtgtaaacttgcagtttttttttcctgccaggtgttgtatgtatggtggtttatgtttcaatatattggagacttttcattttattcaagg

SEQ ID NO: 1138 - DNA, 521 bp, Canis familiaris
  misc_feature (1)..(521): n = a or c or g or t
aaggattgcnnannctaatacatcatcagcaacgtgtggacttcttacctgaggctttataaacacgtatttcgtttanntcttgatatctagccctttttacaacctgtactctctctgccatgcagtcatgtttatacatttatcagccaataatcaaaagagcctcatgctctccagtggattaatgccatttgttgcaataagtggcggatgtccttggaaaataaatggcagcaaagtactgatgttgacaagatgagaaagggagttccaaagaattgcagccctgaaaaggtgggtagatatcaacaagacaaaataatgctccttattaaggtggttctgatcttgcttcccaggaaagttatagggacataactgcaagtcactgaatgtgaatattcacatttccggggctacagcgtgcggataagatggatgaaaattgggacgggggttatcatattgtctgttctgattgctggtttgtaattggggcactataaacacccagatac

SEQ ID NO: 1139 - DNA, 618 bp, Canis familiaris
  misc_feature (1)..(618): n = a or c or g or t
tccgcatggggaagagcctcctcatcntgaccnntctgctggggctcacctggggctttggcataggaacaatagtngacaaccagaatctggcttggcatgttatttttgcattactcaatgcattccaggtgagaacaataactctttctttctttctttctctttctttctttctttctttctttctttctttctttctttctttctttctttctttcttttctttctttctttcttaaaatcatcaggtgactggaataattatagagaactgaggtttgtaataccactctggaggctatctcatctctctgcctccagtgtgtaaccaacactgcctggcaacagtgaatagaaaataaacacataagcaacaggatccatattttctaatagttattctcacactaaagcagaatattagacttcttcaggaatccatcccaggattttaaacatttgagttcatagagctaatattaatccctcttgctgccaactcagtcctctttctcttgggcagacatctgcaaaagcacacaggggaagggaaagaaatcatgagtgcttgttgactctgaatggtgcccagtctctagaacatgacagaggagg

SEQ ID NO: 1140 - DNA, 578 bp, Canis familiaris
  misc_feature (1)..(578): n = a or c or g or t
ctgactggtgccttccaggacctggggaccatcggccagaacttctcannnnncaagggcatgtacctcctctgcatcccaggtactctaggattcnttcgagggtcctgctgggccccctctttgggttctnnaaacttctagaggaaagttcttccttcagagctacctactgctgtcatggggcaacccttcccccgttggtgagcatggaggaatgccagttctagacagggctcttcaccctaacccccgcccaggccctctggttcagcccccatcccctctgtcctgtctcctgtcctttctgctttcaggggcttggtcggtccctttagagaaggcctctcacctctgacgtatgatcttgtccttatggctgggaagattccagccaccttgggtggcaaacaacctcccgcagcctcaaggccgggaccaggcctcacagctcaaaaagtgtttggagatcctccaggacccctgtgattgtatggtgtataaaattattttttattttgagactttccgcaaacattgagagaataatatatcagcaacacaatctgccaatcata

SEQ ID NO: 1141 - DNA, 211 bp, Canis familiaris
  misc_feature (1)..(211): n = a or c or g or t
aatttcttctccccatggaatgtaagtaaaanntagtgtttgtcaccaataaatggtannnntaaattttttttttttttnnnntaatttattctcaaatgccactnnnnnnaggttggttccctcccaacctgcctcttaccctttttttaagaaggaaaaaaaaaaacactttgtaatgctcgtgacttctgtttgggcaaaattctga

SEQ ID NO: 1142 - DNA, 539 bp, Canis familiaris
  misc_feature (1)..(539): n = a or c or g or t
acacntgcagcatagggccttccacatgcgtcttccagnnnagggaggggcctgcaggtcaggagaggggactgtggggcgggtgtccccacgtgcctagctctcgggcctgggtgaccatccagggtgggggctgggcgggcatcttcggtcgccctgcatccccctcccctccagttctacatgagcatctcagctgtgcccaatggccccaggcaagctcccaggccgcccacatctgcgtgttctagatgcttccatgtggcctcccttctgttgggcagaggggcagctctggcatgttagcacaggcggtgccaaagctcagtggtgtctgccctcaaagctgtgtgctgctcctgagttttcctgtggactcttgagtgtccgcgtgagggtcctcgctgtgacctgggctatcagaggctctgagcacgtttgtctcctacacacgaaggggccacagctgtgaccgcacacacctggctggggagactgtgtcagcactgtggctcgaacacaataaagccctcnnnnnn

SEQ ID NO: 1143 - DNA, 645 bp, Canis familiaris
  misc_feature (1)..(645): n = a or c or g or t
aagaaaaagtctgccctnnagcaggagcatcagggtttgcttgnnagcacaacataggtgagcaaggggtggggccagcccctggtggcactgctacttgtgaggagccacttcgcctttgtatcggttgttaaaaacagaatttggatcctttggtcaggctcccccaaattctttttaaaaagtgaccatgttcaactgcttgagctttgttttggcaaccccctgcccaaagttgcttacagactgttcctcaccttgtttccaaggctgtggaacagaaagtagcctctgttttgaggaggtggaagtttaagtatacatttattttttactgtgacttgttcaggaccacattttacaaaatgccttgtttcctttattattgtttctggaaaggaaagttctattaaaattgttttagtttgaatatagaatagttttattaattagggcttattttgaaaaattctgagtttaattcaaatgtatgccagtaccttccaaagtaaggtaatattcagagacagttctgatcagatggcttagagaaattttggaatattcatattcgaagattccttattaatgaatgtctttgacttnnnnctaaccaaaaactgcaacattattctttgtacattt

SEQ ID NO: 1144 - DNA, 504 bp, Canis familiaris
  misc_feature (1)..(504): n = a or c or g or t
gctatcacaccnnnnnnccactaccacaaaaggtatcccattgctgagcagcgttcccatgtatggatacagcacaatttttgttcacacattggcctatttcacacaaacagcacttgggctgtttccactttttagctattatgaataaaaagtgcagtgaacatccatgtgaaagtctttgtgtggaaacgtggtcatttgtcttaagcaaatatcaacaaatggaataactgggctacgtgacaatgtgagtttagttgttctagaaacttgcaaactgttttccgcaatagttgtaccatctggcatttctgtagcagcccacggaagttccagatgctgcccttagtactgttggggtctcatccccccactaaatttagccattcatgcgtgcgtatgtgtgcgcactgaagtgtgttcattttgtttgcaatttgtttttctctggtgattactgttgttgaccatcttttcatgtacctatcggctaattcacgt

SEQ ID NO: 1145 - DNA, 530 bp, Canis familiaris
ctaatactgtatattttaaagcactgaaatacaaaattaactttagactgaggtggttcagtgtcaatataaaaatgataagcactgaaatttgttagctattgtgtgtcaagcacttaagtttctgaagtagatactaacttttatttttgtaggtaaggaaacagaaccaaaagtaatttgcccaaggccatagagccagcatatgggaaattctgtgtatgttcagagttcctgctgtcatgctaccaaaactttaagccaagttttttatttagttagggctaatctacatctaagaatcaattatagctaaaaattgaagcaatacttattaatacatttttaggtttgacattaccattttgtaaattgccagttagtagacaaaactacgaattttatgtggtgcatgaatatagttaatacagataaccaattcttaatacatgctgttctgttctgtgatttttaccaggaggatgaaattgtaaaatttaaagtatataatcttgaaatgtttctaaatt

SEQ ID NO: 1146 - DNA, 543 bp, Canis familiaris
ctttgaaacttgccattaggaccctgcctcgaacaccatggggataccctacaagcaccaaatcacctgtttggttttcacctgttatttctcagagtgctcagcatgaggaccacccccccaccagtcgctggctaatgaaattagctagagggccactctcagttacatgtttctgagggggtcattctcagtttaatttaccatctgaaagaaatgtgtttttgttcagccatgaaaatgtcaccatcacagtttgacctctcatcctcttatttgtgaaatcgacttaacaggtatgccaaggatgccacaatgccatcgatcctgaagtgcagcgggtgacctataacaatttcagctggcatgcatccacagagtgctttttgtgttcctgctgcagcaagtgtctcattgggcagaagttcatgccagtagaaggcatggttttctgttcagtggagtgtaagaagatgatgtcttaagaggaaagcaccaagcaatattgagtcatagctatcctaagtggtctgcatttctact

SEQ ID NO: 1147 - DNA, 543 bp, Canis familiaris
  misc_feature (1)..(543): n = a or c or g or t
gggnnnnngccaagcctgtggcttctctggccacctaccagctgcctgccatttgctcggtgctgcttggctggttcaggattgggcaccagagcgggctgcactgtcggtggggctgcatcacaaacgagttgctgcccataatttcgccctgccccctcacaggaccttcctgctgccactggtcctgtgggcaactcttggggagggcccttggtgctgggttccccctccatgagcaccagccccaggacattggctgccacttgggaaaaagctggaagcagattgtgcatttccaggtcccttggaggccgcagacccctccgtaacagaggctggcctcctgacctccgagagcacagtctcagccccccaaaccctggggctctggtttgggagatggtgaggccagggtggccggggctgtgggcagtgaaggaagctgctcgcctggaggccccggggcttctggatggccgaggtgagttaagcacnnntgtcacatagcacannaggccttgcagtggtgcttcccccgag

SEQ ID NO: 1148 - DNA, 506 bp, Canis familiaris
  misc_feature (1)..(506): n = a or c or g or t
cagatcatcannagcnggacagacagaaagattgcttactgggaagtatttgatgggtcggtaatcagagagttggaaggctccttgtctgggtcaatcaatggaatggatattaccctggaaggagtgcactttgtcacaggtggaaatgaccatctggtcaaagtttgggattataatgagggtgaagtgactcatgtcggggtgggacacagtggcaacatcacccgcatccggataagtccaggaaatcagtacatcgttagcgtaagtgctgatggagctattttgagatggaagtacccatttacctcatgaggcctcagagatttctgggatgcaccaccgcgtagggttctgttgaaagttgaccttagataactccactcccaagactggttttttatttctcccatccaggattttgttctttactcaaaatatgttaagtttccctttttctttannngatgcattttgtatnnnnnaattgtatattaaacttg

SEQ ID NO: 1149 - DNA, 560 bp, Canis familiaris
  misc_feature (1)..(560): n = a or c or g or t
agcagactcaagagcagtttcagatgataatcatttcnntaaaagaggagttctattccaaagccgatgcgctgataggcgtctatccagatcatgatgactgcatgttcagcagagttttgaccctggatctttcccagtatccagacaacgaagaccgagaaaacagcaaaagaaaccacgagtcacgttaagacctcgcatgactctgagccaacaggacagtcaggcaggtcaggatcaccccttagtccttgctcttgaacaacaaagtgcggaagcagttgagtggccaggcgctggagctggcttccgtcccagtttgggccccttccccataggtcaagtttccccagagttagtgtgacaggtacaattttgtaccatagtcttaactgccattttgaaagccagtcagaaaaatgttgaattctgcattttttttcattcaggtctttcttgccttgtacgtttaatctttaaggaaaattcttaggtctcnnnnnnactacttatacggcattgaacccaggttttatgggaagttatttcagaggaac

SEQ ID NO: 1150 - DNA, 423 bp, Canis familiaris
acgagctgagcttcaatgtgaacgaggtcatcgagatcatcttggaagatgcctcgggctggtggaaaggccggctgcatggccaggagggcctcttcccaggaaactacgtggagaagatctgagagggggcccgggttcgcctcctgcctgcctgcctgtcagggagccaggccctgccagcgggggcctcattctccttggccgcattagccagaaggtccagtcctgtggcctccagcccaggccctgggtctgggggtcaccaccgcagccatcccagggccctggcctcccccatgtcacatgcgttgcctcctgtgccaaacaggactaacagcaggatctacctcccaagctgcctcatgagtataattgagttgtgtcctgtccgcaaagtgccaagcacagttgggggcacct

SEQ ID NO: 1151 - DNA, 521 bp, Canis familiaris
  misc_feature (1)..(521): n = a or c or g or t
gtnngctggctataacgnnaccccgctgcagtgcatctgggactggattgacattgctcttgaacttggaactccttatatgtgtttccatcaacatttaatgtacatgatggaaaaaataacntcaaggcangaaaaaagagtgtttaatgctttgtcaagcacatcagcagttttagattaccttacagaccattatgggatttgactggacttnctaaagtattttaatatttacttcactttatatctacagtgaaaccacccaaggtcacattttggtttttactttaagtcagtgtctctcccccataagcataaaaacagtgccctgagannnnnnnnaaaagttagtcctagaccccatcctcannnatnnngattcagtacatctgtaggatggnnncaaaatttagttgtaaagaagaccccaggtagagcaaacatcctggtcactctaccaaacattgacaaaatattnnnnnngaatcctattatggatttaaaaaaaaaaaaaattt

SEQ ID NO: 1152 - DNA, 624 bp, Canis familiaris
  misc_feature (1)..(624): n = a or c or g or t
ggccagcggccaccaaggtgtaccactgcagtgagtnnnngcgcttcttnnagcagcnnnnnagnntgctgctgcancagcgnntgcacacannnnncagccagggctggncagcttgtccctactgcggcaaggccttccgcnggccctctgacctcttccgtcaccagcgcatccacactggcgagcggccctaccagtgcccccagtgtggccgggccttcaaccggaaccaccacctggctgtccacatgcagactcacacccgtggccaggcgggcccacacttcccagctccctctgccctccctgggagtccacccctgccacggcccagccacaccgaggagggctgactgggcaagaacctgcacgggtaccctccagctctcctggggcaccccggcaggacctctgtccactttcaggcctttccacttgtgcctgatgctggttcttcgttctggaatagctttggagagatcttttttttcattcagatgggaagcagtggcctttttggtgacagtatgtgtgtgaccagatgcctcaatttcctgtttcctaagtttgtcactctttgctgccttttctacattcctgacttataaaggatcccnnngn

SEQ ID NO: 1153 - DNA, 519 bp, Canis familiaris
  misc_feature (1)..(519): n = a or c or g or t
cgagggcnncannannnnngtgtttttcaacatanntcagatccagtacaaaaatccttgggtacagatcatgatgtttaagaacatgacgnngtccccctttctgcggttctatctggattctggggagcaggtccttgtggatgtggagaccaagagcaacaaggagattgtggagcacatcaaaaaaatcttggggaagaacaaggaaaccctggaagaggaggagcaggagaaaaagcagctttctcacccagcccacttcgggccccgaaagtactgcctgcgggagtgtatctgcgaggtggaggggcaggtcccctgcccgggcctgttgccattacccaaggagctgaccgggaagtacaaagcaatgctgacggccagcacccaggactgaggcccaggccacaccctgggagggtgtccctggagggactctgaaaaatctgtgccataagaccgtccccttcacacacctgtgtgcagtgacacaggagggtcggggaggatctgcag

SEQ ID NO: 1154 - DNA, 175 bp, Canis familiaris
  misc_feature (1)..(175): n = a or c or g or t
ctggtggtnnncgtggagtagcccnnnnnnagnnnngcacccagagccttggcacgtcccgctcccgcaacannnnnggccggggtgggccccggngnnnnnnncaccccctgcgtggctgngctnnnnnngccgnggcnnnnnggnnnnncacacttngnnaatggggaccggt

SEQ ID NO: 1155 - DNA, 531 bp, Canis familiaris
  misc_feature (1)..(531): n = a or c or g or t
gagtcagggtgagggacatgggctgggcantagggnccgtntagaaattgtgggggagcatttgactcctcctcacctgtaggatttcgaacatttactgtacactggcctttaattctaacttttatttcgttgtcttattttcttctgtatgttcacaataccaagctttaactgtattttactaaaatgttctaaatgaaagttagctaagttagatgaaaacccactttgattaaaaatcaggcaacagagagatgctccagaatataaatactcattttctttcagaagggtgacattcctccttaggaaagcaaattactgaagtgttggtacacacttgtgtttctgactctaaaaaaatgaaccgggattgcattaggttgaagagcattagaataatttccctgatgtgaaatgagaagtgacaggtgcagttgttttgtttttctgatatggaaaacacggagcagttttcatttatttttcagttatagaagtcagaagatttctggttatttaactcgt

SEQ ID NO: 1156 - DNA, 439 bp, Canis familiaris
  misc_feature (1)..(439): n = a or c or g or t
ctgacaacagagctgtgnnncagtgtctcgctnntagaacatctgccctccgctgtgtccttcctgacactcagcnnnnngctctnnctgcagagtctccagccacttctgtgagggcaatggaggagcagatgaaagcagagcttgccccttcccctcaggctcacaccttccttgcgtngcggtgacagagtgatgtatgtcaaggtttggatggctttatcttacaggtcctactgggctacagcaaacaatgattgtgtgtaagcagcctggccctgttcaaacactgtcagtgagaatgtcnacaagaaatggaaagatttggaggctgtgctcattggcattcagcctctggtagttgctgtaatatatntctttttctttcttttttcctcaccacaccaccccacaagcccagaaaagtgcaaaagaatca

SEQ ID NO: 1157 - DNA, 474 bp, Canis familiaris
  misc_feature (1)..(474): n = a or c or g or t
catcttcacctccagacaaantgctaaatggacagaggaagaattccaaaactaggaacttcaaaaaacagactgatctagagcattcaaaatctcggagaggctccaaaaatgaaaattggcaggcatctttcaagatccagttgaaacattcagttaatggaagaaagatgccaaattcttctagagataattgtaatgtatctaaaagtactccttccctacagcctagtaagtcacagaaaagtatttttcagatgttccagaggtatacaaagtaattcatggggaagagggagtattttataatctagtaaagccggattatgaagctctcttctttatcatagaatctttataattgttaaactcatcatctataaaggactgtgtgatcacaagggaggaatataaatatatttctgccaaactcagtaagcaggagtcccaatccnnnncttttttaataactgt

SEQ ID NO: 1158 - DNA, 598 bp, Canis familiaris
  misc_feature (1)..(598): n = a or c or g or t
tttcacttttcaaattgggctcaccactgttgttcaggaaccccttcctgactgatttttttcatcctattttttttttttttaagtaggcttcattgcctagcatggagcccaaagaagggcttaaacacatgatctagagatcaaaaccaaaactgagaccaacagtcagacacttaacccactgagccacctaggcatcccttatcctcctaatctttctatataatctataccacattatttcatccacctttaatatcatcttctgttatttcacatttgttcattatgtctctgcaactgacccagagtaaagtcaagtcatgatttttgttttgttttactattactccaagggtccaacatgatgttgaacatggtatgggttatttcacaaggagttactgaataattagagagaaaatttcaatactgagtgactagaattgattttaaatagttatgtcaannnnnnntagagaaaacagtgctgcactgaatgcacacttaccagagaagacgctaggtatcttggaaagaaagcttttgacagtacgaataggaattccatttttttcatcttgcatgcgagcta

SEQ ID NO: 1159 - DNA, 418 bp, Canis familiaris
  misc_feature (1)..(418): n = a or c or g or t
ttgtgcaatgtgaatgtgcacgnctatgctaaaccaccattttatttggtttttgttttgttttggttttgctcagatacttgccaaaatgagactcttngtcagcagctgcagggagnnnnngcggctctctttccttttggttttgggggatcgcttttgctcccaggggaaccaaagaggtgaggtgggcttcctctttccctggggggttggggggccgtgggcctcggtgccctccggcctgggccgcccacaggcttgtcctgcccgcccccccagaggccctggctcctggtctggaagggaggtggcctccagccagcaagcgcagatcgctggggctgggagcagggaaggacagcttggttctcttctttggggagaacgtagagtttcatnctagatgttttatgta

SEQ ID NO: 1160 - DNA, 514 bp, Canis familiaris
  misc_feature (1)..(514): n = a or c or g or t
cctgggcgcagcgacagccacacaaggtggttcccctgaagggcctgtgggagnacgtggcacctaccctgccagatggccactttgacgggatcctgtacgacacgtacccactgtccgaggagacctggcacacgcaccagttcaacttcatcaagggccacgcctttcgcctactgaagcctgggggcatcctcacctactgcaacctcacctcctggggggagctgatgaagtccaagtactcagacatcaccaccatgttcgaggagacccaggtgccagcgctgctggaggcaggcttcaggcgggaggatatccgcacggagctgatggagctggccccgccggccgagtgccgctactacgccttcccatggatnnnnnngcccctggtcaccaagcactgagcccggccgggcctcaggcctgtcccgtgcccagcgcagtgccttacccctgggagtgtgggcctgggtcttacagccgtgggcgccagcccgggccacacctg

SEQ ID NO: 1161 - DNA, 584 bp, Canis familiaris
  misc_feature (1)..(584): n = a or c or g or t
aatgaccaacttctgacaacctataacaagtgtgtnnnggccctggtnnagcttcgcagctatcacatcactgtggtgaccaaatacctcatcacagtggccaccaaagcaaagggcaggaagccaaaccatctccctgggccatcacaagccttagaagagaggggcacaggtggcactgtagttctgagcttcctgaagagtgtcagggacaagactttagaggcaattctccaccaaagtgattaagagactgccctctgcccaacaatgcaaaaccagcaaacttgggtgtccctttccctctctccctttggnnnncacatgggcctgaagaataagaatgtctggaataatctgaaagggatatcagccttatatatgttcctgcactgtagaacaccatctcctcctgggttgagagctgtttgtcttcacagaggaaaatttctgcagccagaaacgttcctttccctgattactgcttaatagcaaacagctttggacacttcctcattcagaatgctacagaggagcaagtgtgcccctattctatttgcaaagtgttagaaaacnnnnntaaa

SEQ ID NO: 1162 - DNA, 593 bp, Canis familiaris
  misc_feature (1)..(593): n = a or c or g or t
gtatctccccgaccccannnnnaagcagcagtgacttgagctctggtgcccttgctcgggaagaacccctgtgtcactggctgcctccgttcccacagttccctggacgctgaggggctcggccaggagggtggcattggcagcaagtcccgctgccttccctgcagtacccctttcctccaccccaagcgcccgggctcagggaccacagaaaggcagctgtggattgtgttacactggccttgcctggccccaaggtcccctgccccctgggccaggccaggccttgtatgcctgggaccatgggggaccagcctggacaggccgggcagcacagcgagaggagccaggtggggccagctctcgccacccctggctggtcagtgtgcctcccgggctgtccagccccatagccccacgtcccgttcatgccactgcccacagggtgccatcctgcccgccgcatgcccccttgtgccagtcgcgctgccgtgtgtggtgtcgcgccctctccccctggggctgggttggcacaccctcccctcccatctactcaccccctggggtgttcctttgccgatttttgaatgtga

SEQ ID NO: 1163 - DNA, 655 bp, Canis familiaris
  misc_feature (1)..(655): n = a or c or g or t
tgcctgtccacntgtctgtctgcccgtccccttcacagcccactccgacatccccctgggggctgagaccacctttgtctacctccttcctcctgccttaaaaatactctttcaaagtcatcatcccagcccaagggcatcctagagtaggggaaggagtttcagaccccaaaatttggaagacacagagatcatcctgtccagcttcctggtgtgacagaacaggagacagaggcccaagaggaggaaggacttcatttggcaggttggggcaaaaccaggactgcagccctgtcttcagcatacctcactgcctctcccagggacagactcatgtcttaagggtgcatatggctccctaaccagtaatcacctctgggggccaacaggtgggagaagcattcctgtctgagtctatgccttaggatgacaaataccttgtctatactttggccccaattcaaagatacagggcctttcctggcccctggccccctccctgttctgggagcccaggtaggaggctggccttgggaagagctgcagaggcatcacctctttctgctgcttccccccaccaccccagagggtctgagggctgtgcaacttgcccaactgcctctgccctcctgggggtctcagcccactgctgaca

SEQ ID NO: 1164 - DNA, 666 bp, Canis familiaris
  misc_feature (1)..(666): n = a or c or g or t
acagtgtcactgaggcagggatgnnatgcggtgggaataaaggaacgaggtgttttatccaaggatgtacccaaaagaggtggcaannaangaggagaaaggcttgtgagagttttacagccaccggtttgtgcttgttacagagtacgcaggggtaacgaagctcacagacaagcatccgttgtaaagagggagatggcatgtgattgttcagacgcacagggccggcctcctgcaacagaccaagacacagggaggccgctcgcagagcttgtgcctggggacgggggacctgagctgaactcagaaggtacctgggaagatggaggacaggagagaggaggctcctgaatataataagcagtcatacaaaagcaaagaggaaggagatattgcacttgttttagattctgctaaacagttcattatggctaccatatagagtgtgagaaaaattaaaaggagaaggagatgaggttggggatggaggcagtgactagaccacgagaacgcgtgtaatgctaactggcttggggggcacccgggtcgctcaggcagttaagtatctgccttgggctcaggccttgatctcagggttctggagtcgagacccacgtcagtctccctgctcagcaaggagtctgctccccgccccccgcnnnngct

SEQ ID NO: 1165 - DNA, 671 bp, Canis familiaris
  misc_feature (1)..(671): n = a or c or g or t
taccaaaatttcnacagatgtgagagctagaacacttgannnnagtcatatctgtgtgtcangcantaatctagaatgagaaggaagttgttagcttttagaaggtggcctagagcaaaggggnaggtgactcgggagggttcctgagggtgtgcacccgtcccggcgttcctccagctgcgattatcctcagaggttccaaacagccctaggaggttttacattcgggctccgctaggaatgaatgccctgttctgatttgacagttttgtgcctcagagacgtcctttcacgacctgttctgctctggtacgtgtcattcccctttgcttttggaaaacaacccgcaggctgaggaaggtgagacgaagccacccactggacttggaaactgagattgttaaaaggcccttgtagcagccacggcgtgcaggggtcactagtgggcggcgcctgcccagcctcctggtcctaagatctgtcctctttcaacaaccagacatcaagagttctgggactcctgggcagctgggaaccagtcacaacccaaataactttacgtcgtaaattctttcttcagtctagtgctagatgtgcttcctttagaattagtgaactgaataaaataaaaattttaaaatttatattaaagggcaaaagattnnnaacnn

SEQ ID NO: 1166 - DNA, 634 bp, Canis familiaris
  misc_feature (1)..(634): n = a or c or g or t
cacccagcatatgttcannnngtnnnnagctccatgtnnnnncaaccacagccaacagttgctatttggnnaacactgacannatcnggcaaatatttgggacagacccttgccccgttatcatttcagttctcagatgactgcttcatactgaggctgctgaccactgcgtnnacctgcattgagacacccttcttcttgccttgctcccctaactgttagaccccccaccaagagattagtcaacttctcccctcattttataaaaggaaagcaaccaaggccggagaaggattgatggcttaccccaaatcacagacaaagctgacattactgagaaagccagccagagcctgaggatcggtcagtgatcaaaaaatgaaagacgttacatatggcccaaccaaggatggaaacatgtcccccggctcttaagcagtgcctggaccaggtgaaggagtacaaagcatgtatgagacagggagtctcctgtttaggagctctttcttctccttccccctcttcttttccaaaacctagaaagctgactaccagtcagaccatagagcaaaacactgtggtaaaagcatggattccaataatccaagccaaggtggcacaaattatattatag

SEQ ID NO: 1167 - DNA, 480 bp, Canis familiaris
  misc_feature (1)..(480): n = a or c or g or t
ggtccaaggtatcnnnnnncttctgtgtcggtgnngaccntaacnnnaantggnacgcaggttttggagggccaggagccancaacaatccttgctctgattcctaccatngaccccatgccaactctgaagttgaagtgaaatccatagtggacttcatcaagagtcacgnnaaaatcaaggccttcattaccctccacagctattcccagctgctcatgttcccctatgggtatacatgtaccaagtcagataatttcgntnnnctgaatgaagtggcccaaaaagctgcccaatctctggccagnnnncatggtaccaagtacaaagtgggacctatnnnnnnagtcatctaccaagccagcggaggaagcattgactggtcatatnactanggcatcaaatnctcatttgcctttgaactgagggacacgggtcgatanngcttccttctgccggccaatcagatcttgcccacag

SEQ ID NO: 1168 - DNA, 619 bp, Canis familiaris
  misc_feature (1)..(619): n = a or c or g or t
cacgctcaccaaacaccaggaacctgnnnacagcgtagcttttagccccgacgggaagtatttggccagtggctcctttgacaagtgtgtgcatatctggaatactcagagtggaagtctcgtgcacagctaccgaggcaccggcgggatcttcgaggtgtgctggaacgcccgaggcgacaaagtgggcgccagtgcgtccgacggctctgtgtgtgttttagatcttcgaaagtaaacacaaaatattatagaaaagaattctaatggaccagcagtgaatgtgtggggttgcagcgcgcgtcagacacagttctatccgctccaaaactgtacgaacttgacttgcattagagtgtacttggaaacgaactcatccctggccacaggagtctctattttttcgtaactttcatcaagaagtttaagaaacatacagtcctatcaaagggggaaagaatggttcccacccagaacattcagcctgggaagcacgaagccaccagctaaacggtgcacggtttggtttccatccagaacaggctctgatggcagagaggagaaaacaagaaggaaaaggaaaacaggaaggannnaaaaaaaaaaaaaaagnnnnnnn

SEQ ID NO: 1169 - DNA, 686 bp, Canis familiaris
  misc_feature (1)..(686): n = a or c or g or t
tgtagtaaacagaattttttcccctgtgatctttatgccttggtgttattcctataaacatgtgacttggcaaaagggactttatagataannnnaaagttgctagccatttaannnnaagccagagagattaggggtgcctgnatggctcagtaggttangcgtctgnnttcagctcaggtcatgatctcagggtcttgggatcaagtcccatatcaggctccatctcagcagggagtctgcttcttcctctccctctgcccctctcctccacttgagttctttctctaataataatatctttataacagattatccaggtgagcccaatttaatcacagggaaccttaaaatcagaagaggaaaacagaagagtcagccagccagtcatagaaatatagtgacataagaggcaggagaaattcaaagcatgagccccctgttgctggccttgaagataaacgaaaacatgggcctgtaaacaatggtggcccttagaagctccaaatgatccctagccaacaaccacaaaggaaatgggacttcaatcccagagtaacatggaactaaattctgccgacaacctcaaagagccttgaaacagtctactccccagaacccaaccctaccagtgctttggttttcagccttnnnnnntctgaagaagcaacagtgaacttctgact

SEQ ID NO: 1170 - DNA, 396 bp, Canis familiaris
  misc_feature (1)..(396): n = a or c or g or t
gatccagtcacacccccggtnnnacactatgcgtgcgttccagcattnaatgtagctacgccccacttgagaannnnnnnctcccccagaaaggcgtggnctgggataagatttcctcccccctcnnnntccctgacttctccaccacagtaaaacgtgggcanctcacaacctctaagtctgacccttccttgcatcactgccccagcgcagggttgggcccagtgtgtgtgaactggtgtgccaattggnnncgagtccctgccttgccctttggggtcggagcctctctgcaggtttgtctatgccngcgtctgctccttcctgctcgcctcctgcctagggactgatagggctggagcggctgtacacaggtgggatggnnncctggcttcc

SEQ ID NO: 1171 - DNA, 645 bp, Canis familiaris
  misc_feature (1)..(645): n = a or c or g or t
gagcacnnccacgtggagatcgtcaagctgctgctgnctcagccgggctgcaatggnnatctggaggacaatgatggcagcacngcactctccatagccctggaggctggacacaaggacatcgcggttcttctgtacgcccacgtcaacttcgccaaggctccgtctccgggcaccccaaggcttggaaggaagacatctcctgctcccacccaccgaagttcctttgactgatgatacacaaataaccgtccatttacatgccaccattaagctgctaaatgttcctgttggggtgacagatactgaatgtatatgtatcgtgcctgagctcaccagcaaacagaacgggagggctgaggcctggagctgcacagcggaggctgaggcagcaggagcttgcccccggcccctgccgcctccctcctggccatcttccctctgcctcgggtgtgcttaccgccccccgccccccggctctgttgctgtggagtctctgctccgttatgtacagtcgtaggatgtcgtaacctgacctgagcgggcaccgtctcctccttccctcctcccctggcccccaccaggaagtgtccacttgtcaccggctcggtgtttttaaaatttaaaaatgttccacaagtattt

SEQ ID NO: 1172 - DNA, 601 bp, Canis familiaris
  misc_feature (1)..(601): n = a or c or g or t
tgagacacttgatccagactttcagatttactcagtttgtctnnncnnnnnactagttggtctaaaaatgatatgcattatctcaagaagtttcagcaaacttcacttaagaattctatcacaatgctgctgcttctagaggagtatttcatggattttagaatgggaaatgttaaagcattcaccttgcagatttgtgtttaagattaatttaagaatatatccttaaatttttatgcatataatttatataatttgtaatgtaaatttatgtagctcataagtatataatgtctatgatttatttcaatttaataagaattaatatattttacgttattggggcaatagtaaggaaatttgtagatagcttccttctaaaataatttgttatttacattgtttggaaaatacaacagaatatgtacaatggaaaagctatctcataatacctaaggcaaattttattcttaaaaaaagtgtatcttgagatccctgggtggctcagcaatttagcaccgccttcagcccagggcgtgatcctggagacccgggattgagtcccactagggctccctgcatggagnnngcttctccctct

SEQ ID NO: 1173 - DNA, 286 bp, Canis familiaris
  misc_feature (1)..(286): n = a or c or g or t
aaggtggnnngtctcacaccnnntgtccccccccacncnnngnnncttttccatcctggacncattggggannnnnnaattcttcacccngnngtccagnnnggcccgtcctccnnngcatcagcttcaggatggcagcagctctccaggnnnnnnatgccaccgagcacccccctccacgagggtnnngngcagccaggcctacccccttgctgtgnnnnnccccgtggccccggcagtccctttggacaggggcatggggctgatcctggccccgaactannnn

SEQ ID NO: 1174 - DNA, 617 bp, Canis familiaris
  misc_feature (1)..(617): n = a or c or g or t
anngtcagtgccaatgaccatggcnnaangaaaaannagcacccctggtgggctccctgggggcagtctggggtcctttctcgcggctgcaggggcccacagnntgctgcatggggtggtggcccttcttgcgagtcatggccggggcctcaagctgctgcttaccagcgggagcgctaccacccaagcccaggccgctggccatgctgctcggggcatcttgggccaggcttagctggctgctcagctggctgcgtccacactgctccagcctctctaacccacggagtgggagcacacaaggggaagggctggggctgcacactgagctgcccagagagcggggcaggcaccacctgggtccacaactggcttcccggaccgggcagaggggaaggtctgtaaaggccccagctcagagcccttctgggcttctttgggatggggaaagaaaactatttgcaaggctcaactaaaaccattcacagctttcccacacatagactgtagttgtttttgtctccaaaacttttggctttttgtattttttaattttaatttcactgttatccttgattatttgtcttttttattgagttgttggagaagcaggagct

SEQ ID NO: 1175 - DNA, 128 bp, Canis familiaris
  misc_feature (1)..(128): n = a or c or g or t
aatnnnaaatgtttgtctttggtgcatagtgaattctcaaaccagnnnnnnctatagtcannnnnttacttggtagtttttaataaagccatgttgcacagaaccttcctgaagtgcttctgtagctg

SEQ ID NO: 1176 - DNA, 525 bp, Canis familiaris
tcctgtcatagaaaggcttgtcacctaccgaaatttgatcaacaagctgtcagttgtagatcagaagctgtcttctgaaattcgtcatctcctcacacttaaaggtgatgctggaaacaaagaaccgatttcaaaagcgaaattcaccaaggccaagccaaaatctgtttcagagactcctgctgctgcctctgctgttacagacgtatctgatgattctgattttgatgaagaagctgcacggaaatactataaagaaatagaagaccagcaaaagttgaagagaaagaaagaagaagacagtattgaagaacaggctcttgaagatcaaaatgcgaagagagccattacctatcagattgctaaaaataggggacttacacccagaagaaagaagattgatcgcaatcctagagtgaaacaccgggagaagttcagaagagccaaaatccgcaggagaggccaagttcgtgaagttcgtagagaagagcaacgttacagtggtgaactctctggcatccgtgc

SEQ ID NO: 1177 - DNA, 461 bp, Canis familiaris
aatttgacactttgtggttcagtctgtttaataataattaaagaataattttgtagcagaaacatacatgcagattttatcctgattttcattttctcacagtgccttgaaaatgtgttgttgtcttagggaatattattttgaaaaacagtaagttttcatatgagttgtgctttaaaatgattacattttgcccagattgcacaatttaaaaattcctctctcaaaaaagtttgtttttatattatgtatatttaaagaagtatcaagtattgaagtaattttaatacttatttttacatgactgttgttgtggattattgaattctcctttagtgaggcaaagtttgtatccctaagaatataccctctcctccatgggggttatgttccaagaccccaatggatgcctgaaaccatggatagtatcaaactcaacatatattggtttatcctctaca

SEQ ID NO: 1178 - DNA, 291 bp, Canis familiaris
  misc_feature (1)..(291): n = a or c or g or t
gtggtcattgaggannncantnnnnncgattnnnnaaaggccatgaannagcacaagaccatcaagaacatgnctaaggagtgagctcctgcttctcccttcctgagacagaggaacgactggggccagcagccggatcgcgctgtccccaccgcacccagtgcctgtgactgtggctgccccagacccctgggcccgttggccagcagcccccctcatctctgcattttgctcagctaccaacttatctaggcagctctttgtcctttcagcccagatnnnnnngtaggt

SEQ ID NO: 1179 - DNA, 393 bp, Canis familiaris
  misc_feature (1)..(393): n = a or c or g or t
cagcaacagtcaggacagtggggaatnngcnnctgacaacaggcatatatttaaccagaacaatcacaactttggtnnaccacccnatannnnnncagtgnnnnnngtgaacnagtttgactatcaggtgaaagatattttgttgctttaatattgtagatgtgcacgtaatccattctnnnnnnntgtctcatcaagagtacctaagatctgtgtttcacttttcagtcttgtacagataaacacataatattatgtctcagaaaagttaccaatttttgagtattaaaatcattagatgcttatttnctggtttttgatttgcttaggagaatgatataaaggatcatnaggaaagatttggataaaatgaaaaatgtgtaagttcaatag

SEQ ID NO: 1180 - DNA, 567 bp, Canis familiaris
catggcactaatccgaggaggaggaagcccccagcggtggccccgggggccgaggcccttgcccctttgagaacttgacgcccttgctggtggcggggggtgtggccgtggcagccatggcactaatcctaggtgtggccttcctggcccggaaaaaatgatggccggtgcccaggtgggggcagagccactctgtacagacctcaggagcgtagtgcatgcccagctcacgcagctactagacgtccctacctgtgtaacacatatatgcgcagcccccacacacgcgcaggcaccgacacggaccggcccctgcaatggaaagcaagccccctcgaggcccccagcacttcccctccccgtcccgggcagacgtccctgctggggccgtggtccgggggcggtgggggcagcggccctccggtgcagcctgcccgcccgccagccgcagccgtgtcccccctggacacactcccgagcgcccgccggccccgagagaggccccggtggtcctgtgcgctccctggcagcggggtgcggacgggtccccagggcacaggcctagcc

SEQ ID NO: 1181 - DNA, 206 bp, Canis familiaris
cccccccttcccccccccgccaccagctttcttgcccatggatccccttttgaggatttagaaccataatgacatctaatgctttctgttcctatgcctaagacaagaccttcaaagctcagttccttctctttgacccagtactatccaggcaggaggaccaaagggaatttgatgtgggccttcaaatcttttccctccccatt

SEQ ID NO: 1182 - DNA, 576 bp, Canis familiaris
  misc_feature (1)..(576): n = a or c or g or t
gtcacattgtttgatcccaaattgcaaatgaacattcactatttttcggcctcccgtagatccttctctctccttctttcacgtngatacatggctgcagatgcacacagacgcatttacgtgtgcgtgcatctacacattgttttagctccaatccaagcaggtttgaatttggacagaggtgaccttgccacgtttatggcttctgcagactgattttcctctttctcaaagtaaacttcacaaaacgtaaaaattggagccgcatatcccagggtccaccgtcgtctgtcccgagccgggcagtgcagtagggagagcgccgcggcctggagctggggcttctgtaccaacaccccccacacacacccatgaggtgaaggcaccctcttccctgggagcaggaaggtgccgtgtttcagtctgtaagagggatctgaccaggagggacccggctggggaaaatcccactttctcactctctgacgctgtctccccgccactcttctaacatgtcgtcgtgtcgtaaatactgtcgaatactgttcacccatgactgttttggtgtgcgtgaca

SEQ ID NO: 1183 - DNA, 502 bp, Canis familiaris
  misc_feature (1)..(502): n = a or c or g or t
tgnnncaaagaattccnnnagggtttgcatggccctgattccagttnnatgctggttaaatgttngagaaggagaagaagggatgnngtgngagttnctgaggctggctaaccaaaggagcaagcagacagattctgaagactgaacttcatcataaattacaaacaaaggaaatagtncagaaggtggtatgttggaaaacaaaataggaccagcatgaaaaagcactctgtagacacatgaagctgtcttgtttccagaaaatgtttcctccgaccagggagacccagnnagcccctcaccatcttagtccaagctttcaactctttttagctcttttcctacannnnatgagcacnnngctggtntatttaagtctttgctttcaggcctnnatcccatcttnnactcaggcgcggtgggggtggcactgtgactggattggggaaaataaatccagtctttgcactgtcatctctcatttcggaattggagtgaatct

SEQ ID NO: 1184 - DNA, 561 bp, Canis familiaris
  misc_feature (1)..(561): n = a or c or g or t
gcagagagtcacagagctgtgtacagtatatcacctaccctttaaagattgatatncaactgctgtagcttcaccatacttggttccatgagccatgcctttttgtatagcaagtgagatattttgggattgctttggttgttcttctgcaacacttataccaaatatccacacctttaatttttctttctttatagaaagaatgacattttcgtggttggttgggctttctgaatcctgcgtgtgattactactggaacatgaaacattaccttctaaatgttggggggcggggggcggcggaaataatgttaggggaaaaaatgtagcacttagttgaaacgactgagtggtgttcttataattgttgtgcctagatttaaggttttaaatgttcttgagcttagaaaacctgatgggatgcaaattggccactaatactgtgacatcctgcttagaannngccctctggtctgcagtggaaatctgtcaccttgcgtgaaatccatcactgtgatgtctatattcttccctttttattctatttaagagtctgagctg

SEQ ID NO: 1185 - DNA, 520 bp, Canis familiaris
  misc_feature (1)..(520): n = a or c or g or t
catgagagatccaccaagccaagnnnctttcaacaggtcnngcaggccccacnnnacgtcaccacagtggccatnnaggagacagcatccatgccccctgcgggggtatgacccactcactgatnnacagctccaggatgcagatgtctcagccatcttgggccatgcctgctgggagctgccaggcccctcaagggcagaatgggggtcgtccccgggcgcgcttcacactcctgcagcagagggagactggccactgctcagggggctttgggggccccacatgtctcccattaatttcatgaggggcccagagccctcccacgtgaagacacagccactagccactcttgggaccaagcccactctcccagccccctgagcctcagtttgctcatctgtaggatgggcctactggcacctacctcatggctggggtgacactggacggaccacaaatgcagtgcatgaatgactgttccactgggaagggatttctaaattggagctgtgtttgctc

SEQ ID NO: 1186 - DNA, 610 bp, Canis familiaris
  misc_feature (1)..(610): n = a or c or g or t
tttgtncttcaccatgaccagactccagcatcgcncatcctggaaggaaactggtgccctggnncgggcagcctcaccacctccatgcactccttccatggccagctgccggtgaccaagccacccagccgccacgtgcctcacgataaactgaagagccacgtgtgcctcggggactcctcgctgctcgggcagttcctccagacctccatgggctcggactattgcccccccgagaaggcacagaagtcgcagaaggcgcccagtctccacttgctgcagagcagcctgccccagggcacctacaaaacagattttttaaccacgaaccagaagatgctgaagcctcacagaacagctccggcctccgtgactgaggacatgctacagcggtgcaagtatggccacattgagcccccgctgggtggacagcgcttcttctcaacccaatacgaggatgagtttgtctccaagttccagggcccagcagtgttgagattggtcaatcttcaggacagccatgtgcctctgggctcccctcacccctggggctgtggggctgggaacatagaccctcgggccccccagacccctacctacccatgcccta

SEQ ID NO: 1187 - DNA, 658 bp, Canis familiaris
  misc_feature (1)..(658): n = a or c or g or t
ctatgagaaagtgangctgctggagatcagtgcagaagatgcagaaagatgggaaaggaagaagaggaggaaaaaccctgacctgggattctcagattatgctgctgcccagttacgccagtatcatcggctgacgaagcagatcaagcctgacatggaaacctatgagagactgagagaaaaacatggagaagagtttttcccaacttccaacagtcttcttcatggaacacatgtgccttccacagaggaggttgataggatggtcatagatctggaaaaacaaattgaaaaacgagacaagtacagccggagacgtccttataatgatgatgcagacattgactacattaacgaaaggaatgccaaattcaacaagaaggcagaaagattctacgggaaatatacagctgaaattaaacagaatttggagagaggaacagcggtctgatcccttcaggaactgtttctggaagcttgagaatgctagggaaattgaagttctcttcaaagttatcccaggaaaccagcactcagtctactatgcttgcccactcagcgtttacaaataaatgcttcttcttaaacatatgcttccatgtatattaccacatttctgtgctttgatgtaagatgtattttaagaggcagcgtactt

SEQ ID NO: 1188 - DNA, 558 bp, Canis familiaris
  misc_feature (1)..(558): n = a or c or g or t
aantttggaacaaaaggttttatagaaattttaaaacatctgaaaaagaagttnaggttttatcaccctttttcccccctcatgaattcttttttttttttttccctcatgaattcttaaagcttcctttatctatcctattgtcctggaaaatacctgtatttcctttgtatcatgttcaaccaatatcactatgaaatgaaccagaaagcccatgtctataaaattgctttaaagaataaattatactatttaaaaaattcaatttgaaaggcaaattgacaggcaatatttctgtaagtcttcagaaacatgactctggttgtgaattatagatacgtcttatctcttatgaaaacccagatgaaacacacagtgaatttagagtgggtttttgacaagtccagtgtaaagtgtactgctcttatgttaccatccaatgtgtttgtagagctggtggacattgttgagaactacgattgctgttacaatgagacacttaagacccaaattaaagaacagctgtactctcatnnnnnnntactgctttactttttc

SEQ ID NO: 1189 - DNA, 138 bp, Canis familiaris
gaaccaccggggctgccctccgccggcttttgattcgattttcctctttccagagcgtgctttcctcagtttcccccttggatttggttttccagagctttttcagaagccagattcctgcatttgctcgactcccct

SEQ ID NO: 1190 - DNA, 363 bp, Canis familiaris
  misc_feature (1)..(363): n = a or c or g or t
ttaatttnnncagtaaatgggnnnnnnnnnnnctctgcnnngntnnnagcttttcttaacctnnnnnnnnnnncnnnnnnnnnnnnccttccttgcatccaaagttttgtggttttaaaacntgtnnnnnntaactttccaaggttacctgtattnnnaatannnattcctgcttnnnnntagtcatagtttttcctttcctttctatccataancnggcanaattgtttccagttatgtcatggtgatgtcaggnnnattattnnnnnnanaacttgnnanctaaaagnnggtnnntttttgcnnnnnnnnnacnnnnnnnnntgacctttctcaacctttcnanttaattcaaannncaga

SEQ ID NO: 1191 - DNA, 529 bp, Canis familiaris
  misc_feature (1)..(529): n = a or c or g or t
acccgagaaatttgccctgaagctgtgctcagagctggggctgggtggnnagttcgtcaccaccattgcatacagcatccggggccagctgagctggcatcagaagacctacgnnttcagtgagaaccccctccccacggtggagattgccattcggaacacaggtgatgctgaccagtggtgtccactgctggagactctgacagatgctgagatggaaaagaagatccgcgaccaggacaggaacacaaggcgtatgaggcgtcttgccaacactgccccagcctggtaaccggcccattggtgcatggctcccacggagcgttcagaagatcggaccgcctctccttcatcttctggcaaggagggaaagggacaggccggggccatcctgaggagtatggggcgtggggagggcttccggtcaccctcccctgggcacacattccatttgttgggccctagtcgccacccaagtctctggtcagaaagaggcctcgtttttgannngtgttttgtttttgtatag

SEQ ID NO: 1192 - DNA, 355 bp, Canis familiaris
  misc_feature (1)..(355): n = a or c or g or t
tttgtaaccagctccctgcccactcttccctgccctgcctcagggcctttgcacttgttgttctcctactcttctagccagctggctccttgtcattcacatctcggctccgaggccatctctggctacactgcctaaacgcacccttccaaccaccctctctccccgtcctgctttttcttctttgcattcagcactactgcaaacccacatactaatctgtttatttattgcttgtctcatccaggagaacagaagctttttctggaaagggtcagagagtaaatagttttggctnngcaggccagtcccaactcctctctgccattgtatcacagcactatagacaggaatg

SEQ ID NO: 1193 - DNA, 591 bp, Canis familiaris
  misc_feature (1)..(591): n = a or c or g or t
gaagaaacttgttttccaaaaatgcatatcaccttttattgatttgttctctatacccattgttcttgtgttttgtttctcatccntaataaatttcttatgagaattttgtgaccccatttgtttctcagacaccctcatgttcctattccatgtagctgcctccccaaagcagatagctttttttaattaaaaaagtaataaatgcccatttttaaagcatatattattcacatattaaactgagagtgtagaaaacaagtagctcccctgttccattactgagggcagccttcccccttttgctagttacagccagtacctactgagctgttctagatgttttacaggttattcatatgtgtatattaattagtaatacaatacgttgtattatcttacagtggttacattggcaatacagtagtttgcttgtggctttaagactacagttgggggatccctgggtggctcagcggtttggcacctgcctttggcccagggcacgatcctggagacccgggatcgaatcccatgtcgggctcccggtgcacggagcctgcttctccctcctcctgggtctctgcctct

SEQ ID NO: 1194 - DNA, 646 bp, Canis familiaris
  misc_feature (1)..(646): n = a or c or g or t
tgtattcagttttaaggtgggccagggnnacccacatgacccccccaaggtgaagtgtgagacgatggtctatcaccccaacattgacnnnnnnggcaatgtctgcctcaacatcctcagagaggactnnnngccagtccttacgataaactccataatttatggnntgcagtatctcttcttggagcccaaccccgaagacccactgaacaaggaggccgccgaggtcctgcagaacaaccggcggctgtttgagcagaatgtgcagcgctccatgcggggtggctatatcggctccacctacttcgagcgctgcctgaaatagggtttgcgcacacccacccctgccagggccaccagccccggcgtcccctgcaaatatttattgggggccacaggtggggggcatgggtggccggtgggggaatcccatgccctgaccttgcctcccctccctgccacccgctcctagttattattttttttttaaaccaccatgtgattaaggtcggcgctgcctccgacccactcagcaatgggaaatgaattggcttgtctagcccccagctgggtgctgtccagccccccactctgggctctggggtgggtggccaaggggactgggtggttggggctcgggcaccct

SEQ ID NO: 1195 - DNA, 546 bp, Canis familiaris
  misc_feature (1)..(546): n = a or c or g or t
gcacctatgcacacaggctgcaggggnntccacctcagtgtccaaagccagacccagaacttctcatctgtgtgaagtacagatttttgaagactggagaggatagaatgatatcagtactgcttttatatatattttttagcttgttagaagttgctcattttcctgtttctttggcaaagctgggtcccttgtgcctgtggctggtgatagaccgtcactgttacagtcttattcctgtcaagacacacagctgccctggcgggaagtttcaggtcccttttattatggctatgttggttttatggtcccgtgtttcttttaattattatttatagaaagaatctataactcatgggtctcgtagactgcgaggactatggagttgcacattcacagtgcacggtactgtggtctcagatgacttctgtgcctttgtaacaaaaggtgaaataaactttttctcagagtaagagctgtcttatgatactaattggggttttatgtgcttttgctgatggagtgctttgcaattctggtttttaa

SEQ ID NO: 1196 - DNA, 553 bp, Canis familiaris
ggccccaccctggaacagtgttcatggcctcctgctgtcagtcggcggctcacctgctggtacaggaggagcactgtccacaggaaaggaccagagatggatgtaggcagactagcctgggggcaggaagccggggcacagggccaggtgctgggtcaccctcagaaacccacctacaggggcccacagccagccggtgcacccaagacccacagacccagcccagcccaactccagagtcttcccttcctttactgcagagaacacagctccgtgctcgtacacctgtggggaagaggattctctgtgtgaggaaggaacccgccagcagcgccccgagccaggacgcccagggaggtgaccctgacgtccccacccggcttggtcctccgctagagcttcagctgctcttcctgcgttaaatctgcatcacggtcgtcctgcaaggcagacatcaccacagcaagtagagcgttctgacctgggtggagtgaccccgacctttgtaccagacccatgaggtcaaggtcaaagtgcttttggggaaataaat

SEQ ID NO: 1197 - DNA, 488 bp, Canis familiaris
  misc_feature (1)..(488): n = a or c or g or t
ctcttgtatccatgtgcaatatgtttttatgctgacttgtggcttgtgctcgttgtatttttttggnnggttcggggtcagggnnacacattgttcacccatcagaactgggaggtgcaaagaaccatagaagcatttttttgtttgtttgaagaagaaccatcttgattttcttggctgatttgccagtccaggagactggctcggggactgccaggaaggcggctgctgaattggatccgaaggtgattttcagagcaaatgaaagcttcaacatggaagcagaattaagaagaggtgacgtggatgaggtgctactgccactttgtcgcacgagtgtggaaaaaccacacgttcatttgttgcttatctctttttttcctttgccaaccttctatttatgtgagactagtttggattccaagttaatgtgtctgtctattctgggactggggcttgtgaggggnnnnnccccgtagaacctcaca

SEQ ID NO: 1198 - DNA, 637 bp, Canis familiaris
  misc_feature (1)..(637): n = a or c or g or t
gaagacacagccctggtgctggaatactactcctcgacttccatgannggcggtgagccctgnaccctcagcaagcccctgggcgtctccgtgttgccactgaagagccgtttgtaccgcaagatgctggcagggaaaggtctgagtgggcttcgtgtggagaggctccccatcactgacaccaagctgaaaaccataaatggtgaggcccccacagtggatatctccttccagctgctttcctctgagggaatgtggaccagacaaccagcaagtgagttcatgagtagcatcagctcctggtaagaggcctgacgaaacccagtgagagcaaacacttgacaggctctgaattccttgcctcttcctgttgcacctatgatgttgtctgcaaattcatggtggaaggtacctggccttcatgtctgcattcttgcctgagggaccacgaccattgcttcttccatcttttaaatcaaacactgctcaaagctccatgagccaccgcctgaagcctgggatcttagagtcccaaggacactctggctgcaggggggcttgggataacgggcctcctggggcccctcgtccgtgtggctaatggttccatctcaanngcaattccctgcaagtagtc

SEQ ID NO: 1199 - DNA, 125 bp, Canis familiaris
cactcttgccccctggagaaggttcaggagctgtgtggcaacgggagaactgtctctggatcagctgtcctggggcacagtccacacatggcttcacatctgtgtggagattctaggaaataaaa

SEQ ID NO: 1200 - DNA, 527 bp, Canis familiaris
  misc_feature (1)..(527): n = a or c or g or t
ctatataaaatagaaganntanannnnngccccaggcactcttatttctnngcatgatacttctgcttattgtccttcacactagctacatgattnatagtcttgctccccaatatgttatgtatngnagccaaaattatttaatagagagcaatataacttatgatgaccataaaaacaattcagccttccctgtgccaaagagatgtgatgctgatgcccctgaagatcagtgtactgttacgcgcacatatctgttccttcacaagttctggttctttagtgctgcatactattttgggaactgggcctttcttggggtattcttgattggattaattgtatcctgttgtaaagggaagaaatctgtcattgaaggagttgatgaagatgattcagacataagtgatgatgagccctctgtctattctgtttgacggcccctctcttaggggttttataaggctgattgaatgtctattatgcatttttaaagtgttaaactaacattaggataaactgactag

SEQ ID NO: 1201 - DNA, 573 bp, Canis familiaris
  misc_feature (1)..(573): n = a or c or g or t
tcgggggcacgcactcaccactgcgaggtnccgttgttgttgttgaagtctctgtggacaggaacggnnagggctgtttggggctgccctctgcatgcgcccccacccgcccagctctgctgcccccactcctggacccctgcagcacccccagcaccccttgggatccaccaataccttcaggatgggaggcttgcagaaagaccagcccccccccggccaccaagactgcaaatcagggcaagggggtcccccttccctgagaccggggggccccccagcacccctgccccggggcagaagccagcccgcctcctgccctagcaccgtgctgcctccggaggcagcgagacacgacccccgtgctgcccagtgcggtggccgcagccacgtgtggctcctgagccttcgcacgtgactggtgcaagttaaaacgtcccgtggtgtctaacagataccaggttttgaagtaatcagtgtgggggaaaaatgtaatgtgtttcattaatgattttatattgactgcaaattaatattgtgaatgtgttggttaaacaaaaatattaaaaatgc

SEQ ID NO: 1202 - DNA, 682 bp, Canis familiaris
  misc_feature (1)..(682): n = a or c or g or t
tncagnngaatttgtgtagcagtnnnnctccatgtacaggnnaggattgcatannnnnnngnctgaaggggctcccaagggggaggcagctgtaggggaaggagctccatcggaaggctggaggcctgcagccctgctgcttgtcctcgctggccttgagcaagttgcccagcccctttttggtttccttgtgtaaaacgaagatcggacctccttacagagtagtgatagcattgagaaaaatctcacttgtgacaggatcatgcagttcttgacatgtggatgctcaggcaagttttttaaagtttatctaaaaatctcaaaaccaatttaaaaaaaaattagaaatgtaatataggtattcattccagagaactaaaaaaagttctggatatatatcagaaaatgacagtcacctgtaatccctgctcccagcagcagtcactgttgacagtacagtatctgactctgaccttcccagcttttttttcttttctctttttaagatttatttattgagtagaacaagtgagtgcgcacaagcgggaggggcagagggagagagaatctcaagcagactccatgctgagggtggaccctgatgtgaggctctatctcatgaccccaagatcaggaactgagcaaaannnnagacttggacacttannngattgcaccacac

SEQ ID NO: 1203 - DNA, 473 bp, Canis familiaris
  misc_feature (1)..(473): n = a or c or g or t
aaaaacataaaaagcatttatanngctgctcttgatnaccgttaatgtttgcatatatatcgaaaatcttacattttttttcctcccacacagtatttaataaggttattttaatgtttgtgtaaatatttcatgtataattgtgatctgaattgtaagagcttgattctgcgtaagtctttgaactcgtctaaatactgcacacccactcaattgggatcagccaattaagttcaccaaatgtagttttggaataatataacatgcgacatgtatataaatagtgtatattggcatttatctgtgaaattttatacatccagaagtgtcttctccctcttaaattaaaaacaattttattttggccacactgtaatgggttttgtgttgcaggttgttgatagtataaaaatgttattacatctgtgtactaggatgatatttttggtttaataggaaataacagggttgtt

SEQ ID NO: 1204 - DNA, 225 bp, Canis familiaris
  misc_feature (1)..(225): n = a or c or g or t
tgctccatggcaaactgcctgctcctgatgaaggtacgtgcgtcctgaggagggtgtcagcagaagctgcgggggcccggctggcacacgggtgcaggagtgccccgcggtgggcaggaggctttaccgagcagagggctgcgtaccacatcgtgcacggcgttagtttatactgaaagacatctcagcagaatatnnngcttacattgtcaagttcaattgttc

SEQ ID NO: 1205 - DNA, 581 bp, Canis familiaris
  misc_feature (1)..(581): n = a or c or g or t
atttngtctgcctcccatgcttttctcttcctggggncttngcctttcacaagtaaagaggagggacttttctagtcttcatggtnnaatcacaggtagtgggagcaggtaatcaggggacccgctgaggacgagagagctgacctaagtctgcagtgggcccatccgggtctcagatgctacctgcccgaggggtttttcttttgctgtgtcccgttccctcattcagcgctgctgctgggagctcctgtagctctactctgcaggaaccggctagccagcaggggggtgggggggggctggcgaagagcaagagcaaggaatgaggggtgatttcattccaaaggggcctgtgttcccgtggctgttcctcacggcccctctccagcagggctggggtttatctcccctgagcctcctttctgccgctgctcacatcgactgcggggccacggctctccacacttgatagctggtgtgtgcctgtactcaggctgctggatagaagagaaagtgccggagaggccctctgtcctcgcccccaagctgtctgcacctttaccttccgctccgtgccgtgc

SEQ ID NO: 1206 - DNA, 629 bp, Canis familiaris
  misc_feature (1)..(620): n = a or c or g or t
acncaccaccaccatacanngctgctctcttccaccccatcctnntctgttnngcctcagagtgtnntggcccccgtgtcgaacttctgttcccattatcagctcatggtcgtgagctgatcatgatccaagttgttcttgttggaggttgataagtgactttcctggatttgcacagttgaattcctggttttcctttttcctaccctctgttgacacaggcagttatctctgcaaatttagaaagtcctaggggatagctgggaaatggaaccttcttcaggttttgattttcccatgtatcctaatgtagacaacccaatcttcccagtactttggggcctattctaggagaatattatatagaaattttatcgtctgccattttggtgcccacctaattccaccattgtttataagttggcatggagttttgctaaaatctgagcatcacatttcagaataaagaaactttaattgggcagaaccacttagactttactcttgagtgtctccttttgatatggattgtttctggaccagtttgtctaagtcctggctcttcttggttcatatgaaataatgttatcttcactttgtatattatgtataaattagaaaatgaaaaa

SEQ ID NO: 1207 - DNA, 219 bp, Canis familiaris
gaggggggaatatcacagtgtgaaatttgactttgtaatcatccttcaactgggttttcttgtgttagtgtaacataacatgattataggcaggttttgtctactctgttagctgcccccaaagtgggtatttggtaggtaaaagcctgcacccataagttttctgattatagcaaagaccaacttactgaaattctagtcctagtccttacctgtgga

SEQ ID NO: 1208 - DNA, 505 bp, Canis familiaris
  misc_feature (1)..(505): n = a or c or g or t
atctactggattttanaaacnngttcccttnnnattccagcctcaccaccaaatgagtagaagcttggtgaaggattctcccatttactaccctcctttaaaagaagtgatagagacagggctgtttttaagttggactgaaggagaaaaaaattcttgtcctttcatcccaatcctagttgttagaacacagttaaacttggaagttgtgattgaacattgtacacattttaagtcttgcaatggtgctttaagtatcaatgtagcatgtgaaaggcgttgtatagacaggtaaaatttccttttctgagtgtccagtgtgataacagcacctcttcatctttaacttgaaatcaaaactatcagattttatttttgtataatttaaggaaggtgaatttaggggactagaagactctaaattggcttctacagatccagtgacttaaatgtaaccagtttgttgggattttatagctaaaattatatttgtgtatataacttt

SEQ ID NO: 1209 - DNA, 475 bp, Canis familiaris
  misc_feature (1)..(475): n = a or c or g or t
acagagtgatggnnagagtttgtgagtgagaacaagagagacattatttcacaaacatttctcacgaatcatnngaatctgattcaccatacaaattccccatgtcctatcagctctgctccctgtgtatatgcattctgtgctttctcattaaagggggagttaggagaggttggaggatgaaggtcattctgatgagaaatccaagaaatgcggtgccctgagagtggggaagacctttgggaacatatttgtgacctgttgattgtatctgctggaagaagtcatctgggcttgttgggttggtgtcaaatcaggggattaagcannnnnnccttnnnnnctttcatataattgcctctttttaaaagattagtttattttggctgaagcttcccaggaaaactttgtaagtggcttctattatttttttaatttttcaaatttatttagattttgcctggaggaagaattg

SEQ ID NO: 1210 - DNA, 544 bp, Canis familiaris
  misc_feature (1)..(544): n = a or c or g or t
ttttcatgtnnattgggaagaaattnnnagcacccaagttnnnannacaaaaccaaacagaaaagagagaactgtcggaaagccactatagttaagaaggaaaaagaaaaatctacgaatatgcacacacagaggagctgagaaaaaaatgttcaacattgtgaagggggtgtgttagttgtgtacttacattttagcctctaaaattctcttctgcggtatgtgttatgaatataatggagcaacaacattaggttttgaggcttgttaaaaacggattcaagagaaatgaaatatgagtcttggtaattataactgaacagttgtcagaaggtaacacagcttgtgcttggtgctggttttagtccccacacgtggacttactttgttttcatgttgagaaaccaaatacattgattcctgtataagtcacacattatttgacatctttattatgtattctgttccacctattcagtcttccacttagggtcggcctcaaatctataggatctatgacaaatgtattatatctagttaagtt

SEQ ID NO: 1211 - DNA, 177 bp, Canis familiaris
  misc_feature (1)..(177): n = a or c or g or t
gactcctgccagaaggattgcaccctnnncagagcttcnnnnngtgaagtnnccaccccattcggtgtcagggccctggagcccccggatccctggagctcgggacatnnnnnnnnngcacccannnccccnnnnnnnnnggtccaccnannnnnnnngcannnnnnncagtgtagc

SEQ ID NO: 1212 - DNA, 635 bp, Canis familiaris
  misc_feature (1)..(635): n = a or c or g or t
attcatttccaccttcccataagccagtaggtcagtggctatttacaaaattcatcaagaacaatgattctcttaaatgtnnanntagnnggtgagtacccactagccctcaagtcccagagtgctcctttatgcaaaataaggagaagatcctcacctgaaaggtaacttcacaatcaggcagatcttcagagttctacagctcctgtctatcacttaaaggctgtgtaggaacacatgtgcagggaaggaccaggagatgaacagggctggttcctacactccatgtatatggccctccccctggtatttattgccttatccaaacgtctatggaatgctactgttcaaatttttgcaaccttctcaggactataccttaactcttcctattttctcttgcttcttttcctttccagttgtggggaagcctatggagcaggtgactcacaatggggaaaacactaatcaaggatagttgcatagaatctaaaaccccttcctcattatgctttagaatattcataagagttcattttgtgttctgactgggtgactggcatcaaaatagtggcaagtattccctaatcccttatagatacagaaatggcgttcatccagtgttctgagcagag

SEQ ID NO: 1213 - DNA, 659 bp, Canis familiaris
  misc_feature (1)..(659): n = a or c or g or t
ctccagtgctgcctgtaatgggaaagagatgtcaccaaccaggcaactccgaagatgccctnnaagtcattgcctgacaataactgatgttcctattactgtctatgcaacaatgcgaaagccacctgcacaaagcagcaaggaaatgcatcctaaatagcatcattaagtcttttgtagaggtttgactaggtcaagggtaatgggccagtatcatcttatgatctggtaaaacaaataaaagtggtggcacctttggatgatgacagcagttgaaatattttatttttagtaggagaagacacagtgtcatctggaacacgtgtagtgataagccatcagttatgtttgatagataagacggaatgatatttcacaattagaatgcactctagtgatcatcttgctcacagtggatcattaatatcaataactgaagatgaaggttaatctaccttgattatcagtcatgaaggccctgttctaaatacttattgtatcctaggctggtgtcctttgtttgtatttgggttgccacttagctgaatcctctcacttgaataccctaagccagttcctggcttgatatcttttgataacgctctgcggtaattatattggttaagaaaaggagcccagtagattgtgcatttggggaa

SEQ ID NO: 1214 - DNA, 477 bp, Canis familiaris
  misc_feature (1)..(477): n = a or c or g or t
taaattgtgtgtgtgtgtgtttgtgtgtgtgtgtgtgtgtgtgtgtgttgacacaaaacaatgctggcatgtgtcatggatagtcccctgcatgtnctcntggagagagagtngaaaggaggaggggatcagcccaccgagagacctgaattcttaattctttctgtggctggagagtttgaggattgctttttaaaaaagacagcaaactttttttttttatttaaaaaaagatatattaacagttttagaagtcagtagaataaaatcttaaagcactcttataatatggcatctttcaatttctgtataaaagcagatctttaaaaaaatatttctgtaacttaagaaacctggcatttaaatcatattttgtccttaggtaaggtttggtttgtgtttgtgttttgtttgttttgcttgtttccccgccccccaaaccttttgttctctctgtgaactcatctttcctttttt

SEQ ID NO: 1215 - DNA, 468 bp, Canis familiaris
  misc_feature (1)..(468): n = a or c or g or t
tggctcagnnagcttcttggcatgtgctgcaagaggtcacaactcagaagcatgatggcaaaaggtannannaggcagaaagggaatcccgttaggtaaacaaatgcctttgtccgaagtataggaggatttgttcttccaaatctccctgccgggggctgaggcatggcccctgctcctccccagcccagggtgtagaacaagggccctcacagggtttggggggctggtactcctagacccctccctaccctgccctttgtgttggctctgtggccgtccaagtgccaattggcttccccccaaataagggctggtatttctcctctgtccttagaggggatttcccccctgacccctcaccccaggtgagtgaccacctgggtgccagttacaggtgtttccagagaccatagaaatgtgttttcctgagagtccgtgtcattcgtgactttttttgtaaagaag

SEQ ID NO: 1216 - DNA, 624 bp, Canis familiaris
  misc_feature (1)..(624): n = a or c or g or t
aanngnctgagtgggcntcgtgtnnagaggctccccatcactgacaccaagctgaaaaccataaatggtgaggcccccacagtngatatctccttccagctgctttcctctgagaatccagaaaacttcttgacgccaaacaacagccaagttcttcccatcctagaccccaagatcttagatgaaaagctgggtaccatccgtgaatcctggtccaaggccacggtgagctctacaatggaatccagcacatctaccgctcaggaagcagaggaagagcctcagtcacccaagatgccccatgagatgctgatcccatggggaacatggatcagaaagatcctgaggaaaggccccagccaaggccactggcccctagggaagcccagggcctcttcctctcaggacctgaccctctccaccgacagcctccgcatcttcccctggcacttctgcacctttctgaaacatgtcccgtcagatgagtaggaaggtttgcagactgctgggtgtgcccagggtgctcccacgtggactgcccctggccaccctggagcaggtccaagagcactcacgggccaccttctacacccccttgtctcacctctgccccttgggaaacag

SEQ ID NO: 1217 - DNA, 644 bp, Canis familiaris
  misc_feature (1)..(644): n = a or c or g or t
tagggaagtatgtagaagangcaggnnggagtngagaagggaggttaagtaaaaatgtgttaaatgtgcaatgccttgtacacattcaaatgcaatcaatatcaggttgctgaatataaaagcttaaagcccaggaacatgataagcaccaaaaatacaattttaagaatcaccagtgaatatatagtatttacagccaaggagctggataagatatcctagagagtgaatccaactggaaaagaaaggaagttcaaagattgagcccaagggcactccaatgtttagctgttgggagatgaggaggaagtcaaaaagaagcaatctcaagggagacagaaactaacaggtcagtgtcccagatgctaagcaaagagtattttcaagagcagagtgataattgtgctaattctgcagtatctgtcaaaatgcaaagtgagcagagtctctcattcagcaatcccattttgaactatttattctatagtaacatataagcacatatgaaaactgctctgcatggacatttattaaattatcatttgttatagcaaattaaatgctcatcagcaggggactatttaaattacggagcatctgaacaagagaataattttttaagaatagaagaggtaggttactgg

SEQ ID NO: 1218 - DNA, 492 bp, Canis familiaris
  misc_feature (1)..(492): n = a or c or g or t
cctggcaccatcagaagggggtcnnccaacaggggctccagaaccatccccgtgcgnnnncctttctgcccagcagcagccctcaccctcccaaaactgagctgtgccaaatatgcagttctggggattggagatgtgtttctagaagnnacctgtggaactcaaggtttgcaaagcctttgactcggggnctgggcgattccagggccagtgtgccctgcccagggtcttctagcccatgtttgctcaagtgtaccaggcactttgtccacatccttgttttataagaagggaacttaccggaattcctgaaccagaccctcccagcgccatcctccggagcccgtggccccttccgtgcctcggtgcggccctggggtgcgggccacaccccactgagccccgccctgcatgcttctagggagcgtctcttctgtttttgaagaatttctgttctggnnnnttgtacttcctttgcagctgttttgaatg

SEQ ID NO: 1219 - DNA, 629 bp, Canis familiaris
  misc_feature (1)..(629): n = a or c or g or t
tcaaaaccctgaaactgttgcacangacaagacctcacatgtaactgactcagaaatgttgctagatgaaggcccatctgatgaaaaagggcacactgaagagaaactgccgctggtttcaagaaagaaagcacattttgggagttcagacaatgctgctactatcccaaatgaagaacgatccgacagtggttttccaaactctgtgatagcggaattttctgaggaatcaatctctgaaaatttatcacccaacactacttcttcattggaagaccagggtgaggagggggtacctgagtcccaggaaacatctacagctcttcctcagagctctctgatagaggttgaacttgaagatgtgccgttttcacagaatgcgggacagaagaatcagtcagaggagcagtctgaagcatcttctgagcaactggatcagtttgcacaggcaacagaaaaaactgtggacagcagctcagaggaaatagaagtggaagtacctgtggtagacaggcggaatttaagaagaaaggccaaagggcataaaggacctgctaagaagaaagccaagctgacatgaatgaagaagatacgcagatgataaaccctcttctttgtaaaataattgt

SEQ ID NO: 1220 - DNA, 538 bp, Canis familiaris
  misc_feature (1)..(538): n = a or c or g or t
agcaaatgatgtagaacannnangatgaggggagaactccccatctgatccaagnnnnaggtttcctttccaaatcctacggccccagccagagaagtcatctcagcatgtctggtactcttgctcaggggctttcccactctccctaggaaacccatttcaggacccatgcacccgacaacgatccagcagtgctctcggaaatgttcagctacccccacatacactgcagtcctcaccctccactttgccacccaacataccagggtctcctgcaggcctcacaccatcctgaactgaatgctgaggtccccaaaccacccgtgttccctgtggtaagagaaacctccctgctctggttgcatctctcctcctgctcaagtttttacttcccagcctgagcacctggtttaacatcagggcataagacatcagaaggaggggggaccagggtgtatggacagcagtgcttatcatgtgtctttggagaagatgctggagaaatttttgtctagggctttagacaatcccatacctc

SEQ ID NO: 1221 - DNA, 441 bp, Canis familiaris
  misc_feature (1)..(441): n = a or c or g or t
accacttctgaatcccaggggcccatcaannatgcagagcccgtgggtgctgtgtcccgggacgtggcaggacatctggacacacagtggcccatgcccacaccagccatctgtgtgcgtctttaggtagctttcaggtagactcaagaaggcagccaccctggccccgggggctttagtcatgatggggagctgaaccgaacctggtttgggcgtgcacaggccgagctccagctttgcaggcccttgagtctttccccctggcgccccggggaacaggacttgaacctgtcagcagggaccacaggcgcatgacgttacccacaagctcagtcgagaggcagcagcccctggagggcgagggaaagctgtcaggcggcaccagcaatttaatcgctagttccacataatgcaaatggaagatacgtgcttttatttaaa

SEQ ID NO: 1222 - DNA, 486 bp, Canis familiaris
  misc_feature (1)..(486): n = a or c or g or t
cgatgactaattccccagggactggcatccgctcccctactccaancttccctggtggtttttgatcttcaaagacttgggggtcccaggcttccccatgtaaccaagagcccccacttgnnnnncctggagggccccccaaccttggcccaacacccctttgattctctannnagcaggaaggggaagcacccctcccaagagtttgtgggaggaggggctgatccggccatctcccagagctgaacccttggtgtgactctccccatcccctggtgcccacagcccttgtctgggtgtccccgccctcccgcagcgtaactgcctgtgtatagtataaatatatatattttctatatataagatgtataatataaggctccataattctatctatgtgtgtgtgcgtgcgtgcagtgaatggcggtccccatcctgggcccctactctggactccctcaccacctggttaagtctcaagagtga

SEQ ID NO: 1223 - DNA, 639 bp, Canis familiaris
  misc_feature (1)..(639): n = a or c or g or t
ggtatcntcancntgctgcatcgtgactagcacttatggctggactgccaacatnnnnnggatcatgaaagcccaggcactccgggacaactctacaatgggctatatgatggccaaaaagcatctggagatcaaccctgaccaccccattgtggagacgctgcggcagaaggcagaggcagataagaacgacaaggctgtcaaggacctggtggtgctactgtttgaaacagctctactctcctccggcttctcactggaggatccccagactcactccaaccgcatttaccgcatgatcaagctaggcctgggcatcgatgaagatgaagtggcagcggaggaacccagtgctgctgttcctgatgagatccctccacttgagggtgatgaggatgcctctcgcatggaagaagtcgattaatttctccttgcagaccttgtgccctctgtatagtgtccccatggctccccagcagccctgagtggccccggttcacctggttccctctgctgatgtctagtggattttttttttttctcctcctgtctttgttagaggcaggacagaagggccttaagccnnngccctcatgacatttgacaaggggtttggatgtgtattgtggtgtttgttta

SEQ ID NO: 1224 - DNA, 88 bp, Canis familiaris
  misc_feature (1)..(88): n = a or c or g or t
atctgccccncnntggaacaannnggatttcacaaagacagtgatcagaagtcaaancatgttactggaaactcatctggcaattttt

SEQ ID NO: 1225 - DNA, 539 bp, Canis familiaris
  misc_feature (1)..(539): n = a or c or g or t
cccacaggccctttnnncnaatcagatttttaaaataaatacatggnncnnnnnaaaggcctgcngttttgtnactgtgacattgaatagaacaattagaacattgctcagcctctttctcccctcattaggtcctatgtaaccattctagttaaaacagcatgaactgaacccagttgacattaatattctatgggcaatactattgaattttatgaactgtttctccactgttgcctgtcagatattaatgtgggagtgtcctgtagggtgtggagcatatggcctgaggtcagagctaaaaagctcatgcccacaagcttggtaaatgtgcttgcttatgtcaggagtccagagcagctcaggtggccatggggttgcaccgtcaaattgatacccgtcacacaactagggtagcccttcctttttgcttgctctcctgtggaaacctgtgtccttgcaactttatccttcacccctggtcgggtcccaaatacataagatgtacaaatgtaaacttgttgattttattaaaattc

SEQ ID NO: 1226 - DNA, 703 bp, Canis familiaris
  misc_feature (1)..(703): n = a or c or g or t
atcacagctaaggnnttnaggttgctctactactggcttannaaatgaaaatggcactaaaaatttcttgggatcctttactctgtgccttcaccagcattcaactctgttcatataccttagcattctccactgactctctttgaaatatagtctgtatgagaggctctgatcttggatctttacaagatttgggatcattgaggtagtatggttggaaaagcctgctttgttccatcgtagaatgactatccatttttttagctgttctaatcaaatccagaacttggggtacagattcctctgtgatgagtatttaagatgttcttcactcttcagtgtttggatcacagcaggggcaaaaaaaacctttcggttctatactttttcaatagataagtgagatgaacagggggaaggatctttaaatactgtgctataaagaaaaatctttcagtaaatttctaccaaaagaaggaggctataggaaaggctccacttgcctgccagggaggtgtaccagaaggtgtgacaatatgacagtgccatgtgcctttcatacaaagtatttccatatgttggtctgctctgcaatgatggacacaagcaagggcacaccttcgagagaaaggagatgatgatggaaacttttttatagaactattcttgcagtgagggggtgagtcttttttctgattcttgc

SEQ ID NO: 1227 - DNA, 535 bp, Canis familiaris
  misc_feature (1)..(535): n = a or c or g or t
agtcctatcactgtattcaggtagaggagatagggtgtnnnnnnngnntcnnnagaataagatcnncgcntnnntcttaatggnnatccctacccaaccaagaattaggggggaaaggggtgctgcagagaaaggactgannaagaaacctattgtaggttttgttcttaatcacgttctttgctcctctctgccccaacaccaccaccctatccatccccaaaaaagtgatcaggggtgtgtgtgtgtgtgtgtgcgtgtgagagcgtgcgtgtgcgtgcatgcaggagtgtgttcattcacatgtgtgcttgcgtttggagatggcatattattgagccaaacccttctctggccctcagctcaggggaggatgagcatgaaacagcccccccaccaccaccaccacggaacctgaagggtgcttgaggtcccagaaggagctgaggaactcgatttaggggagtgaagggctttgttttggaggggggtttgggattgattcagcaggctggttagggtgtttaacccaagc

SEQ ID NO: 1228 - DNA, 613 bp, Canis familiaris
  misc_feature (1)..(613): n = a or c or g or t
tngcgctctgtcttgcccatttcccagaatctttannntagntaagcnngctctcacngtcccacgacgcaccttgcccacgcacaaaaaaactagttttttcccccacctttgtggctctgtgcttgtcctttctcctacatgtaacatcctctttgtccaagttctccccacttgtccttagaatcctgtattgtgatagctgggccttgaagaacatctagtcttcaccttctcttgtagtgttgatcaagccaaggccaggagaggtggaacttaattgcccaaggtccacaataagacactgatatttggaggactagaacacaggtcacaggtccattgcctcttccgccccacaggatgtatgcctcaaccaccttcttccactccctgccatggtcaccgatggtgtccctttgtgtgggtttactctgcactaggttgttatgtgctactcagtgctactcagtatatatctgtaagtcttattgtcctgtgaaatgtcagctgaagctgattttaatttctttcaggatagcaatcttgtcttttcttccttttgtatcctcccattatgtctggatacaaaggtcattcattacacactagc

SEQ ID NO: 1229 - DNA, 653 bp, Canis familiaris
  misc_feature (1)..(653): n = a or c or g or t
tatcagaatatttttcatagatgtatttattaatatctacatatccatatatttataatatgttgatatattccatttaaaagggaaatatagccacacctgggtggttcagtggttgagcatctgcctttagctcagggcatggagtcctgggatggagtcctgaatcgggctcnntgcagggaacctgcttctctctctgcctatgcttctgcctctctcagtgtctctcatgaaaaaataaataaaatatttaaaaataaatgaatgaatgattgaatgaatgaatgaatgaatgaataaataaataaataagaaatttagataaaagagaactactgagttcagtactattcagaactattgagttagtcaactaatagttcatctccctggaaatgaaacctgtaacactgagtatggtccatgaactaggtaattataaattcagttgaattaatgaagttatgaatacaatttattcattttccactaaaaactgatgcttatgctttattgtgtttacttctccgttagaaaaagtagagcatcaagggctttttcataacagaatttaagatttccaactgtatgccttgaagaatcaactaaagcaatccaaacacatattnnnacttctacaatgctcaata

SEQ ID NO: 1230 - DNA, 609 bp, Canis familiaris
  misc_feature (1)..(609): n = a or c or g or t
cntcgannagcccatgtncgggatgagtgaagccgggatcnntcagagtcctgatgactcagacagcagctacggttcccactccactgatagcctcatggggtcctcccctgttttcaaccagcgctgcaagaagaggatgaggaaaatataaaaggtaaaggggagactttctctccaagcttcatgtattacatttgtttccataaaaggtgacgtgactcttactctgaaacacagtgaactttcccgatttcattggagctgactttaaccaattaggtttgcgttttacttttacagctagtttttgtagttttctacaaccaagccacctttcacagacacttcacaataccgggatggtaaccgggagaccaatgcactgtcccggactgttgtctttgcacaactgagaagaatcctgctgcttggctctatattgcagggatatcgtacagattgagattcttatcaaacctcaaagctatgcttgaagagattcacaagtaaatatatgctgatgttaaatgtcagtgttttcactgaacttgcttcactttggggccaaatcattgggaacctggtactaaaacctaacaggaaata

SEQ ID NO: 1231 - DNA, 370 bp, Canis familiaris
  misc_feature (1)..(370): n = a or c or g or t
aagaaaaaagaggagaaagnnntgcataaaactcttttcaatcacttttgaagataatccaaannncannnaatccatggatccatcaaagagtgactgaatagaaggacttactgatttagaaagagcttctatatgagaagataatgagagaagacatatttaggacaaacacaaccaaatttcatttccnacacttacccttccccaagagaaaaactgctgtgggaactgttgaagccaggtgatggggaattattgacatatgtgatcnnnnnncnnnnnnagaacactaaaaacaaagaacaacttaaatactgaaaaagtacaggtgaccctagtgtcnnnnnnnacattgttactcgaatag

SEQ ID NO: 1232 - DNA, 505 bp, Canis familiaris
  misc_feature (1)..(505): n = a or c or g or t
agggagcacttcgctgggacctnnnncgggttcaaggtggctcccagctgtcgggcctcttccagatggatgtnnnnngcctccctgggcctcctggccagggacactctaccacggccccnctgggcctgggccccgccagcctctcttttgaacttccccggcacacgtgctcaggcctccaggttcgcttcctcagnntggcattcagaccctgtggcagcaccagcccccacaagtgggtgcgacacttgagccacanngatgcttatgtcatccggatctgaggctctccagatggggacatgggcagnaaacatggtagtccgtggaatggaggatgatgggtgttttttctcccctnctggcctgtggctacagaccnngccgaagagtcctgagtcctgagaggccaggagaccagtnntggtccanaagtttgaccttcctgtggtacctgacacaggaaggtacgaggtggatcagnacttacaaatnnnactct

SEQ ID NO: 1233 - DNA, 565 bp, Canis familiaris
  misc_feature (1)..(565): n = a or c or g or t
gaccccattnctcaaacccagcnnnctacatggaattattcaaagggaacccttatcnnnnnnccttccagctccggtgtcatccatcttctaaaggtcatgtnggctgcttttcaccttccccgtctgtcaaagctaagtgcagaaatcccaaaagagagtgtnganntaagacctgcaattagcactcctggcagatccacgtgtttgaaaacaagagagacgcagagacacaggcagagacaggagcaggctccacgcagggagcccgacgtgggacttgatcctgggtctccaggatcaccccccaggccaaaggcagcgctaaaccactgagccaccagggctgccctggagaaagtgtcttgcattcaccttctaccttggaaagtgagatctcccccatctcattctgagtgcaaactggaagagaaactatggcattgccagagtttgaattcatttcaatgtgtgccagagtctgcttcttccatgacacctggaagcatcatcacatagaggtaaagagtatggactctggaggcagacttctgggtccaaatcc

SEQ ID NO: 1234 - DNA, 621 bp, Canis familiaris
  misc_feature (1)..(621): n = a or c or g or t
gaaagtgatacttctccagacttccacaatcaggagaatgagcccagccannaggaccctgaggatctggacggatctgtgcagggcgtgaagcctcagaaggctgcttcttctacttcctcagggagtcatcacagcagccataaaaaacgaaagaataaaaaccggcacaggattgatctgaagttaaacaaaaaaccacgagctgactattagaagactcattagtgcagaagcttccaggctgtagagccctgcttccctcctccaacctcacaaagataaatatccctcacctgagtgcgcggccatccacctctgctttcccagacccagtgcctgtgactctgaatagtttgttctgaaacatggtgacaagtcatttctgtaagaccacactggatcatttactgtgtgtcctgtttagtaacagaactgcaagaagaccaagacatggttataattccagcaagttgctaactctgcatttctcccttcttggaatgaatgtgtatcccctacccccccatccccaacccccgcccccaaaactggctggcaccagcttcatctgtgatacccattgagaaatgttctctggttttgtttatgctgaaggta

SEQ ID NO: 1235 - DNA, 564 bp, Canis familiaris
  misc_feature (1)..(564): n = a or c or g or t
gagcagctgggactccccgagcacggnntgcaagcacaggaggactgagcctgcttcccccgccnnnaggggggaaaacctccaccctgatccctccccctggggagcagttgtctgggggcgcccccgtcgtccagacagcagttgctcccagttcaggaggtgccaccacgtcctggccacaacccaagcctgccactactgccaccaccgacatctggggagactttaccaaatctgcagggtcgacttccagtcagactcaaccaggcacaggctgggtccagttctgatctgagcatacccttctttttcctcataacaatttctggaaaggagccgcctcacctgggccaaaggaaggaggacgaagcactccctggccagcttctgtttggagcgtgactgtctctcctcacccgactttcttgaaagattgacatgttaggcagtaaattggcaccatgtcagtgtttcttgggattcaagtgtgcagccagaacacaggaggagaaaagctccagtatccctgtccctgtctctcttgacatgagagactctgag

SEQ ID NO: 1236 - DNA, 665 bp, Canis familiaris
  misc_feature (1)..(665): n = a or c or g or t
gagtatgaaccactttactacaatccntcttgctgtgttgaatatgcctgctcttgaatggctcgacatggnaagcaacaaacttgaacaacttcccgatactatagaaagaatgcaaagcctacatacattatggctgcaacggaatgaaataacatgcttgccagaaacaatcagcaatatgaaaaatctgggtactcttgttctcagcaacaataaactgcaagatattccagtgtgcatggaagagatgaacaatctgagggaaataaatgtacacttctatggcatctataaaaatactgttttttggtgaactgctaggtttgtcaacttcagagacaatccactgaaattggaagtaacgcttccccccagtgaaagcctggatgaagaagaggaacgggaattatttggtcttcagtttatgcacgcatatatacaggagtcacggatgaaagcagataaccaagtcaactgttccactactttaccaatctccataaatactgatggataatttaactcaagatgccctgctgaagagaattactttgggaatttggtgaattcgctaatgtttggacttttaaagtaaaaagaaaaactattaccaaagttcaatgaggccacaacatttttaaaaattcatattatctgctatg

SEQ ID NO: 1237 - DNA, 522 bp, Canis familiaris
  misc_feature (1)..(522): n = a or c or g or t
agggcncttggnctcccctgccacccttccagcaanntccannagcactgagctcagtgagaaggaagggaggagccgggagttagacttgagccccgcgtgttcctcttgtggacataggagtacagatgggcgtgaaccccttgtgcaggagggcaggtgtgtctgtggagagcacgggcctttgcaggctcaggaaccttctcttttttctaattgcactatgcttgttctagcttcagtctggagatatttaagacctccgtggggtcacgatccatagacttagcaagtcttgccttattgctggagctcgacggggagaaatgtgaccattgtctgacgtccatagttcgtttcctctcagttgtttctttcacagattgtgttcatctgaaccattttattttttatttaccaaagtactgtacttggctatttgcagtgttttcaaaaccaaatgtttcttttttttgtgtttttaatcttccatacttggtgcaatagaagctgcaaagatgt

SEQ ID NO: 1238 - DNA, 589 bp, Canis familiaris
  misc_feature (1)..(589): n = a or c or g or t
aaatnnatgccagtcannncttgttcccgctactgaattcatataaagtggtagcaagatagcgaagggataanctgagaatttttttaagatgatttaatgagaaaaagcacaattttgattgtgatgagtcactttctgtaaacaatcactgtctatctttacccttctaccttatctgtaatttaccatttattgtatttgcaaagctagtatggttttgggtttttatcacggtaaatcctttgtattcaggagtttagggcagagccctgagggagtcttattttacataacccatcctagagtaacattttaggcaacattcttcattgcaagtaaaagaaccataagtagcgttttacacagctacagatattgttatagctaatcctattttcaaagatttttggtaatattaagcttaaatactggtaacactgatgcaatatagggaagctgcacaacctgtatattgtatgcattggtgagtggaaggctgttcatttcaaccttttttaaaattgtgttttttagtaaaatggcttatttttttttcccaaaggtggaatttagcattttgtaatga

SEQ ID NO: 1239 - DNA, 609 bp, Canis familiaris
  misc_feature (1)..(609): n = a or c or g or t
atcagcagagnctgggatatagtcccatatcttccatcatagatnnagaaaccaaggttttgaaagataagactctcgctgtgaccctgctggttagcagctagctgcagctaagatttgaaagctgctgttatttagaggatcctgggaataaaagttaaaattaatctagagtataatgtccctttcagttttgctataggttttgtttcttttttttaaagcagactttttggatgtaaggagggaaaaaccatccccaaccccagtgcatctgaatatcccttcccatcccctcccctggggcactgtgggaattcatcatcaaatgcaaacttggggaaccaagccaggtaaatcaccctggttgctatcttagtgacttcctttcatcccaacacatttgtctgcagtactggacatgatttacaaatcaacacgtttacaaaggtatatgcagcttatgtgggggaaaggggacaatatgcattttctctgcatggatttatgccttttactcctgtttcttgtctcaaggtaaccatttaaccaaaatgaggtggatcttgggtggggcccagaggaatggcctgtgttataaatttattt

SEQ ID NO: 1240 - DNA, 492 bp, Canis familiaris
  misc_feature (1)..(492): n = a or c or g or t
tntattttttntnnntattnctttttacaccnncgtgaaccactatnnagcaacttaaattttgtgccataaaaatatttttgtggtaaggtactatttttttagctctagggatagatcagtgaaaatnnnnnatacactttgaaagacctaattttatgttgaacgagcacaatataagctgaagcattgcaaggagacagccagacagcagttagatcgtcatgtctttttcattgttaatttattgtcctacatgggtttcagatttataaaggcatcacaggctcattgcacttaatacctgcaatgtttgctcctgtaccatgattgattttcaatactttattacagaggatgagaaactgtaatgttttattaanaatgcttctggaaatggatgcattttaaagcaaataaatctttttgatagancttttacaaaacccatttgnnnnaatgaatgctttcttatggtatatgacttaatat

SEQ ID NO: 1241 - DNA, 573 bp, Canis familiaris
  misc_feature (1)..(573): n = a or c or g or t
agctggtataggatatgcagtaagtngtagtccatgaattacttaaaaggaccagggnnnctaattcttgtcaggtttccagtccaccttggtgccattcatgactcaagctgtttacaggaaatataatttccatagcaaagagtagtttttccctttaaagtattgaattcagcttaaagtgcaaaataaatatgtgtaagtttgtcaaaaggaatagagaatgacaatagtcctctatttcctgtactgatgtagtagaggtggagattcctgaagcaagaaggaaaccccagattgtcaaatttagagcttagaacatgacttgtaaaagtagttgggaagggcagaacagaaggaagttctgtttcttggcatatttttctttattaagatagtgttttcttgttttaaaaatgttcttttgtctacttgccagcattttttttttcaaagttnnnnnnactgctgctacctgggagatgtcttacttcattttgtacaactcttatgtgattttgccattgtcattaagatgaattgattttatttatgaggtctgtgattttaaat

SEQ ID NO: 1242 - DNA, 401 bp, Canis familiaris
  misc_feature (1)..(401): n = a or c or g or t
aangttagnctcgnctgatttccccaacatcataaggtttgtaatgncnaggctgaccacaactgtnacgcagttttggtactcagttcaaaagtgtcccccttccattatttattttcaaaaaggattaatttctatttcaaaaatatcctcccattgacttaaagtaaggaacatttttttatttggcgtgcccagctgtatttgcagaggagacttggagacctgaccgactaacagcattgatgagatgccttctcccccatccgtaccatcccttgggcgacagtagggagggaatctcaaaaatcattgtacatctctcagaataaagatccttccttgtcaccattttttatatnctcttagtgctcaacaaagagaaatagcttccttttttc

SEQ ID NO: 1243 - DNA, 310 bp, Canis familiaris
  misc_feature (1)..(310): n = a or c or g or t
tttaagacaaaaatgacatgcnannnnnnnaatagtgtcannnnnnnnnnacaaaggtatggggnnnccttcctccnnnnatttatttgggcaaattatttggttgtttagataccaaggcctaattacctagaagagcttatttatttggaataattgagcttgttactcaggttatggctgtaagcatagattgggtgatctttantgtatattttctnnnaagcaatttaaccaaatttgtggttggagtnntttttgaaaccatcannnnatcaaaagtagggacagaacaaaaaaggttttaaat

SEQ ID NO: 1244 - DNA, 586 bp, Canis familiaris
aggctgaagcagattgagaaggaatacactcagaagcttgccaaatcttcacagatcatagcagaacttcagacaaccatttcctctctgaaagaggagaacagccggcagcagcttgctgcagaaaggcggctccaggatgttatacagaagtttgaagatgagaagaagcagctgattagagataatgaccgagcaatcaaggctttacaagacgaactagaagcccgcgctaaccaggtgcggtgcgcagagaagaaactacagcacagggaactggagtcccaggaacagataacttacatacgacaagaatacgaaacaaaattcaaagggttgatgccagcatctctaagacaagagcttgaagacaccatttcctccttaaagtcacaggttaactttctgcagaagagagcctctgtccttcaagaagaactgactacataccaaagcagaaggtaactgcaccaaggcttggccttagtagcacaggcgagggcagtggatgtcctgtctgagtgcactgtggatttcttccagcaggtttgaagatttggatgttgtaaactgtgagctctgtggt

SEQ ID NO: 1245 - DNA, 544 bp, Canis familiaris
  misc_feature (1)..(544): n = a or c or g or t
tnncgnccaggcgctggccgagctcancgtgcaggagaagaagctagaggtgtaccagagcatngcggacctgacagtgggcgcgaaggaccaggcggtgttcaagtgtgaggtgtccgacgagaatgtgcggggcgtgtggctgaagaacgggaaggagctggtgcctgatnnccgcataaaggtgtcccacatagggcgagtccacaaactgaccattgacgacgtcacgcctgcggacgaggctgactacagctttgtgcctgaaggctttgcctgcaacctgtcggccaagctacacttcatggaggtcaagatcgacttcgtgcccaggcagggtgagtctcgggacctcttccctgcaccccactccacccatgtccctctccagtcccagacagagggaagagcaaggaacctgcagcggggaccccaagacccagctccagctccagtgctctcaaccataggccaatcgtaatctctaggcacctcagttccctcatctataaaatgggactcctcatagtgcctcctccatggg

SEQ ID NO: 1246 - DNA, 626 bp, Canis familiaris
  misc_feature (1)..(626): n = a or c or g or t
gantcagacacccgccacttcatcnnnagtcacatcccgagtagcgcaagaanactgcccattgttgccggcattcnncctcaacnagtngacatggagagcatgnnagcgctgggcacccctcattcagcagcctcatacacattcctgtccttttaggttgttcttgactgtgcctcgtcatcactccacagaagtcacatccagcatccttagacttgctgtgtctgtttcctggcacttagngnaccctcaccagtgttgctgtctcactgacccctcaatctaatccccctttctgttcgtttgtaacaacctttgtgggacacattaataaatttgactgttctcaaagcagtggggatgcctatattttccttgagtttttgtgactgactttggctatatatacctttctgggattttttgttttttatttttattttgcatactgagggtatttgggggtggggttgttttttgagatgtgtaattcttttatggagtttttaaaaagaattttcatattgtttttctaacatggcttcattaaacgtttaagtattttaaaaatatgtaatatttggaccagatgttgtgaataatagtagagataaagctatttt

SEQ ID NO: 1247 - DNA, 535 bp, Canis familiaris
  misc_feature (1)..(535): n = a or c or g or t
tttcacaagaccgactttagtgacagcgtagtttgaangcggtgcannatgtcntctgggagaatgtgaaggattggagaatttgctgtcctcgggggacgttcagcatgatgaactgagcttacaagtgagctgaccatactcttgggaaataggtgttcacggggcactcaggaacatgaaaagtgactgttttggttccctggagtcacagggccattcactgggctcctgggaagtcgcctctcctgcacttgcccccgccagaaaggaccagtgccacagaggcagcacctctgcctgtcctcccgcaggcccccaggggacccccattgtgggtgaagaactgttggttgtcagcagtccctttgtgataggagttcttcagaattctacatgtttgagatattggaaccaagctgtagcacagctcatnnnnnnttagaatcttgtttttagaatgaatttgaatctatatttattgtcttttgtatcttggaaattggagacttgctatatagacttactcatgata

SEQ ID NO: 1248 - DNA, 158 bp, Canis familiaris
  misc_feature (1)..(158): n = a or c or g or t
gaatcttttcataattatttttattggcaagtagtacangagaaaaatannntattnnngttaaatgccangaaaaaaacggttttatattgaatannnnnnnattcatttttaatgtgttttttaattttnnnnttacttnnnatgatgtcnatatt

SEQ ID NO: 1249 - DNA, 167 bp, Canis familiaris
  misc_feature (1)..(167): n = a or c or g or t
aaataagagtnaaattatcaagcttgtctgctgtgtttgtaagaaaaaaatagttaaattactgattaannntaattggagctgattttnntnnnctccgattaaaatgaggatttccccccctagatttctcatgttgtcttacatttatatatctaaccattaat

SEQ ID NO: 1250 - DNA, 576 bp, Canis familiaris
  misc_feature (1)..(576): n = a or c or g or t
acagaaccacaggcagcnnnctgagcagaagtggattctacgncgctcagggacatagggcccagggatttgttcttgtggcagatgggaaatggttcacatggaaaggnntccatggcgcctgctcccggaaaggcactccttacagttatcctgggctgcgagaagtacctgtggacttcgggtccggagcctgacccggacagggtggccctgcggtggttgatggctcacttctcagctggagtggccgctggctgcttagggccatccaggctacaaaagaccggtcagagccagtgaacataactcagggtcatttgcccagaggggagctcaccaggagggagagtgtgggaaaggaagcactcagagcatggggtcgggctgtggtgtacccggtccagtcacagcagcattaaaatagcttgggccccggaaatgaaatgaacttgcccaaagttgcattccttgtttgtgaggtgcagacctgggacccaaacccaggttcatcctctccctgcagtgtagcccgtcccttgggtatttgaagcagaggaattgaggatcctccac

SEQ ID NO: 1251 - DNA, 639 bp, Canis familiaris
  misc_feature (1)..(639): n = a or c or g or t
cgtttgtgtnaaatcgtttgatcctactnncccagcttcctgcaaagnngctacatgatgtcnnnnnctaagttcatngnnaccattcagtatcctgactagccaaattctttgggttnnaacattgaatataaattactctgctttttgactcgttcaggggcttttatccctggcatcgtacccgaaacaggtctgtttgcattgccacctttccatcttaaatgttatgtttgctcgtataatctgccctcgcctcatccccacccggagaagggaatttgagggtctttaatcccttctctttgtcttgcttccttcttagcatcaccagcactaagttgcttgggaggcctggtcagagcagcgtgtaaggccgggtccgctgtcaggggctgggagggctttacaggggtgttcccagctctgaccacacctccagggtgtcctctgggactgctagggtgggggttctgtgtcctcctaccacctgcatagccaaggagcaaggaacctactaaatactccactgtctccatgtcaccctnnnnnngtattgtttaagaaggtggggtggggtagaaggtgaattatatgaataaatgcagtgtgttttctctccggcaaaaatgacaacta

SEQ ID NO: 1252 - DNA, 591 bp, Canis familiaris
  misc_feature (1)..(591): n = a or c or g or t
tatgcaaaagaacgaaaccagactnnnnnnntacancatacacacaaaaaaatttaaaatggattaaagacctaaatgtgacacctgaaaccataaaagtcctagaagaaagcacaggcagtaatttctccgaaatcggccacagcaacattcttctagatatgtctcctgaggcaagggaaacaagagcaaaaataaactcttgggactatgtcaaaataaaaagcttctgcacagcaaaggaaacaacaaaactaaaaggcagcctctggaatggaagaagatatcttcaaatgacatatttaatacaggcattatttataataaccatatgagggaaacagcccaagtattcctgactgatgaatggatacaggagatgtggaattatgttacaaaaagaagatggctccactacctctatgtgtatttcattatggaaaataatcaactggttgattaaaaagaatgacaaatctaaatagcaccaagaacaaggaaaaaactgaagagttgaaaggaaaccaaaaagaaaaaagatgttcgaaaaaacacatcatcaaaatgagttttgacactccatggacaaga

SEQ ID NO: 1253 - DNA, 508 bp, Canis familiaris
  misc_feature (1)..(508): n = a or c or g or t
ggcctccagaaccacagccatcagcaccaccacacctcaggtcctgaagtcnnnnntctagaaaaaacaaacacatctcagtgtggggaagcgcggagcccgcgcggagcgattgtgaggggctctgctggaatttggcagcgcggaggcttggagagcagccccatgctggctcctattcagccggccagttctcctcgagctttggaagtttcgctcagccgtgcactcaatggcttcacaaagctgattacaagcttcagcgcattcctgaaggagccaaaagcgacgtcagcgtttgggtgtttttcggctgttccccttcccttgggaggcgttaccaccaccgccactgccgccaccactgccatctgaacaaaacaaacaaacagcagacctgagcaagaagctacagcccctgaaagtgctttctgcggagcaagaatggaattgcttccagatttgnnnnnnntatgatggactcatnnnnttaaaaatctgtggagtc

SEQ ID NO: 1254 - DNA, 502 bp, Canis familiaris
  misc_feature (1)..(502): n = a or c or g or t
ccctnntcccccttccctcccgagatgccccgggtnntcaggcagaggcatctagcccagtgtctgcagannngggtggtgtnnngannngaggcctacctgctgccccatccccctcaaaggccacctggctctttcctctgtggcctttctggatgggaacccttggccagggtcgtggactctgtcacctgacagtggcccatcagagctgccaggccttagggaggcttggcctagtcagctgctgcctgcagagccctgcttggagccccaggccccctctggaggacactgctggagtttcccgccacgctgatgctcccgcgtctccagccagtgcactgtgcaagctccaactgttggcagttactgctcccaggagccaccctcggcctataagaaacaggacttagagaaaaagaccttggcgtcattgtccctcagggcgacagctctgaagtgtattctgtgccagttgtccacagtgataaccttctca

SEQ ID NO: 1255 - DNA, 501 bp, Canis familiaris
  misc_feature (1)..(501): n = a or c or g or t
tgcaggccnntcgacccaacccnngnctgctgactgcagtgtcatctccaccacagagaagctggactcaaagacaaaactggannnnggtggccacgtgangcgcaaacatttgtcctatgtggtttctccataggctttggggtggtggcttgacaggggctccctgggagcagatggtccttaagccactttctggtttagttgaggttcacagggaaaggttttcagatcccagaatgaaatattcgaacccaccatctgaaagagacagggttagagcggccgggacgcatgctcaggctgggaatccctgattttgctgttccgacccggagtgtaaagatgtgcaggcagagagagaaggctttgtgagcacgttagtgacccatagaagcctgtggtggaagcacaggctatagttgcaggttaaccaattagttgctaccttagagtcacatatattcagaatgataaaacaagccagaggatggctcctga

SEQ ID NO: 1256 - DNA, 543 bp, Canis familiaris
  misc_feature (1)..(543): n = a or c or g or t
actgctnntcctcncagccnagcccccaaggcntgctctcacagaaagggnnnnngagcaggctggcatctggctcccagggctcctcctgccctcctcaccctgctacagagggggttccaggcagcctgggctccctgagcggctccaggccagggccacgtgcaggatctgtcagctgaccacaggcgagcgcagaggcttcacctgcaggcctctggaggcggggggagccgcccaccccccacccggcttgtttgcccagtgagaacactgtggtctccgagggagctgcaggaaggactcgggccgctggcccagtgaggctcaggacacagcttactcctggtcagggcatctccctccagaggcctgcaggagaccttggccaaggtcttatttctgcagtctgttgccccaccccatcccaagcccagaaagagcaggggccctttgtttggggctccctctgcattgccagcagctgacccactttgtgcctttccatggaggagagaggggaacgggggaggccgcacctcg

SEQ ID NO: 1257 - DNA, 581 bp, Canis familiaris
  misc_feature (1)..(581): n = a or c or g or t
ttaattnnacattggttttcatcacctttcctttctgttttggaatgtttgtgattcagaaaacccactttgcactttttcctattagaaagtatttttgtctaaaaaaaagaaaaaagagtggtggttttcatttcatcacaatttgtgggtaataccagcctgtgaaattagtgaagtcctattaccttaacttcaaacatttgtcttcagaaaattcgccttttctaaaattggaaaaacagagttcctcaacatttttatttataatctcatgtttaggcatttataaagtgataattcatgtcttttaaaaaaatcatatacaggtatatttttatatttatttataatttatttttttatatcgtttaaattctcctgattctttaaaagcaagtatgaggaatagcagaacacaatataaatacttctatgtaatacccactaactttacaaggataggttttattatagtatgaaggagattttgtttctccttggggtaaccacttgtttgtactcaaaagaatccaaatttacatttattttaacatgaatatgtattaaattatcttcaa

SEQ ID NO: 1258 - DNA, 598 bp, Canis familiaris
  misc_feature (1)..(598): n = a or c or g or t
agctgatnncggctgcagacaccactgcnnagcagcggcgcacnnaacgcaaagcccccaagaagaagctaccccagaagaannaggncgagaagccggctgttccggagactgcaggcatcaagtttccggacttcaagtctgcaggcgtcaccctgcggagccagcggatgaagctgccaagctctgtagtacagaagaagatcaaggccctggagcagatgctgctggagcttggtgtggagctgagcccgacacccacggaggagctggtgcacatgttcaacgagctgcggagtgacctagtgctgctctacgagctcaagcaggcctgcgccaactgcgagtacgagctgcagatgctgcggcacaggcacgaggccctggcgagggcaggcgtgctggggggccctgccacaccggcatcgggcccggccccagcctctgctgagccagcagtacctgaacccggtctcggccctgaccccaccaaggataccatcattgatgtggtgggcgcacccctcacacccaattcgaggaagcgacgggaatcggcctccagctcctcttctgtgaagaaagccaagaagccata

SEQ ID NO: 1259 - DNA, 651 bp, Canis familiaris
  misc_feature (1)..(651): n = a or c or g or t
ctnnncaaatccgtccatggtcccctcagagcnnnngctctgannaggcccgggnngagactctttgtgcacccaaatggaggtggcagtggtgggttctcccttcctttgcacttcttagtgtagtgtaccgtctttggattttcattaaattagagcattggtcactggaaagatccttttcccatctccttttctgacacacaccatctccatcctgatcctctggcccccacggagatgagcttttaatttatattcactttctcacttatcaggaggtcctgaagagatagaccctgtaagacaggcaagattaataacccttttacaaaggaggttgagaaaagcaaaggggttggttcactgctcatgagctaatactgtccacctttgtatcctcaaatgctcaattgcattttagttttattttgtgtgattacagaatgttcagtctttctgtccaagccttgattttgctgatgaagacactgatggtctgatcagttattcaactgcttttggctcttgggtcctggagttgatcctaagggtttcatgaatccacatggatgccaggcattatcataaactgaataaatcttatgtttcttacatgtgtgttttcaaatgtgtgtagatgctattgtt

SEQ ID NO: 1260 - DNA, 390 bp, Canis familiaris
  misc_feature (1)..(390): n = a or c or g or t
atgcacaatcctgtgactctagccaccctgaagnnnnnggtcgccaccacgggctacaacatgacccggaatgcttggcgcttcnnncgagtgctcaaggggctggtnnacaagggcantctcaagcaggtgactggcaagggggcctcaggctccttccgcatgggcaagaagtttgcctccaagttcaagttcaggacccagagacagcgccagtctgggcagcgccggnctgnnnagcgccggcctgggcagcaccggcctgggcagcgcaggttgctnnngggctcccaaagggggcacannnggctacccaagggggttcacagggtggccaaatgccaccgcaattaacagggcaggcnnnnnnnggaggaggcagggtgccag

SEQ ID NO: 1261 - DNA, 678 bp, Canis familiaris
  misc_feature (1)..(678): n = a or c or g or t
cnacagggggcctgnnagactcatgtcgaaagcaaaccgttcatcagtgtttgggatgtcagtcacacaatcgtgaaacagtttgctgcatgacagcgtcaccagggagcatgtgttgtgtttttgtactggttgtgtttttttttttgttgttttttgggttttttttttgttttgttttgttttgtttttttagactgtattaagaaacacgtacagcacaagctggccttgtgttgctggttcctgttcagtatttcctggggattgtttgcttctttaagtaaaacacttctgaccaatagtacagtatgtcttaatggcacaggtcacatcagcatctttctgcttttgagactctctcggctggctgcttcacctggattcagggagacccgtagcctgtgcttgggtttccacgtgctgcgatgtatcttgtatagataagcacaaaagagaaggtgctcactaacagaggtacattactacaatgttctcttaacagttaaacaagctgtttacagtttcaactgctgaatactatttgagctatttaaagcttatattttagtatgaactaaatgaaggttaagacatgctttagaaaaatgcactgatttctgcattatgtgtacagtattggacaaaggatgttattcatttttgttgcattatttt

SEQ ID NO: 1262 - DNA, 605 bp, Canis familiaris
  misc_feature (1)..(605): n = a or c or g or t
gaaccccttaacgcngagcatgcacgggagacacgacgactgcntcatctttnnngagtgacttctcctgcacnnacgcttctccggggcagaccctctgttacgggtctctgtgcctgaccctcaacagcagttggtgtaggtggttgtccgctggtggtgatggaggtgttcttaaaagacgggaaccttggactctcctgagaaagctaatgtcgatgggtacttacctttcctcaagtgagcctcgcagagcgaaatccttgtggaacaaactgctagttagaccctcccatcttgcctttccttccctcttgacctcttcccccacatcccagaatgattaaaaccattgtctcctgagataaactcttagtactgtttttctttctggttatcctaggtatcagaacaaggtttaatagaaatccttgaaaaagtaagccaacaaacagaaaagaaaaccacagttaaattcaacagaagaaaagtcatggactctgatgaagaggacgattattgaaatttaagatgtttagagactggaacttaatggaacagttctaagataatactgggtagaagtgaagatctgattgtttact

SEQ ID NO: 1263 - DNA, 570 bp, Canis familiaris
  misc_feature (1)..(570): n = a or c or g or t
ttcttttcatctatnnngcaaacgtgnnanctgaatttttttttttcctgtaagccactgatggnctctgctaannngntgattnnnctttttcagaagtttgatccctgagcaccttcaactaaatcgtagcatacttcaatcaggatattatttactccactttacagataaagccaagtattttttcagcaggatgaaacctatctgaaagaaaagaaattggtgtcagggaaagaggtagaaaaaggggaagtataatgaattactacctgtgtccctcaggaagttagtctggttaaccaagtggtggtattcttgcagtactgaggttactgattttccaggaagttgataaagccagagaactctttgctgcatgtattataatttggactctgttacattatcttagtgtgtccttgttacaactcccaatactcagcaaacttgttttttatatttttgcttccttatacattcttactacatattttttgacttcaaaagaatgacatctttagaactgtttcagagccaatgatgatnnnnnctttagataattattat

SEQ ID NO: 1264 - DNA, 550 bp, Canis familiaris
  misc_feature (1)..(550): n = a or c or g or t
gacagctgttacctttgccatgttgctgaaccacagctattctgtnnnnagaaacactcggtttctggatccatagccacagaaagagacagaggtgcaaagtattaggctgctgtcagggagaggaacggcagatggaggcatgaagcacaaagaaaatacacaacctgtgtcctgctacacgcatgtgtgcgcacacccatgaacccatgactaactttcttccagttctactgggtctactgctgccagctttcaacagagcaggccataggacccagagaagagtcccagcattgcttctggtccacccttcatgatagagtcactgcctcttctctgggaatgactaggcaccccagctcccaccggacctcacttctggcaatagttcctttttcctgccttcctgggaattctacactgggaggggtgtgatgggtgcccagaaacaggaagcctagccttccaacttgggctgcgctgatagtgctgagggagataggaatttgctgctaagatnnnnntttggggtggcatgtcctctgtg

SEQ ID NO: 1265 - DNA, 660 bp, Canis familiaris
  misc_feature (1)..(660): n = a or c or g or t
ctgctcctcatccgagatgagctgcacacagagcaagatgccatgctggtggacattgaagacttgaccagacatgcnnaaagtcagcagaagcacatggcagagaaaatgcctgcaaagtgaaagaagccatccgaccagaggacgagctagaatttcttttgcttctgtggttgtaaaaatgctattgctaaaggtggcgcagaaacaaacgaatatcagtgttagtcattgataatgtctgaagcttaacgtccagtgattggcctttgcttcttaatttattttaatttttttactgtgccactaaatatcaggcattttaataaaatattgttacaaaaaatgtacagtactgacaccatcacaagtcatggttatcaaagagggtagttttaactttatttttatttgtttagagattttaagttggagcagtattttaccactgactactttcattcttcactgtagttttaaagaagaactgtaaatgacggtgctatctatacaagtcagaaaatacatgcctgcctcgtagtgaagttgtagctctccgtaaaacgtacattttaatcagttttcaacattttgtgaatgttgactacctgaagttcatttttagatgtgctattaacattctgttggattcagagggtt

SEQ ID NO: 1266 - DNA, 560 bp, Canis familiaris
  misc_feature (1)..(560): n = a or c or g or t
agagaagaagnatgtcgtggggagagcaaggggatttgttccttatattggaattgtgacgatcctcatgaatgactatccgaaatttaagtatgccgtcctcttcttgctgggtttattcgtgctggtccatcgtgagtaagaagtctaccttgctgttcctggaagatgccgtacttttcgttcctgactgtttggagtagatattggtctatgattggtggagtgcagaacgtacatgttggcgcttcttggtagcaatggtttgcattagtttctgtttccacgccagggtctgtgtgggcgggtgcaccaagacgcgcaccgaggggactctcaatcacaggatttcatatgttgtcattgtcacactttcacatttttgtacatcagtgaattttttatattaaaaggttgagccaaagcccccagtgtttgtattttgaagccaagcttcacttctaaagtgcctacagagttctgtaaatgaaaatgcagctctgcacgagtttgaaaccgtcattcctctttataaaatgggaatggcatatgctgaggtg

SEQ ID NO: 1267 - DNA, 611 bp, Canis familiaris
  misc_feature (1)..(611): n = a or c or g or t
ggtttacctgcaactcgtgtattnnnaagtggttgtaatctagactctgcccgtttccgttacctaattggagagaagttgggtgtccatcccacaagctgccatggttggattattggagaacatggtgattctagtgtgcctttatggagtggagtgaatgttgctggtgttgctctgaagactctagaccctaaattaggaactgatgcagacaaagaccagtggaaaaatatccacaaacaagttgttgaaagtccctatgagattatcaagctgaaagggtatacctcttgggctattggactgtctgtgacagatctggtaggatcagttttgaaaaatcttaggagagtgcatccagtttctactatggttaagggcttatatggaataaaagaagaaatctttctcagtatcccctgtgttttggggcaaaatggtgtctcagatattgtgaaagttaacttgaattctgacgaggaggccctttttaagaagagtgcagacacactctggaatgtccaaaaagagctggtgttttaaagcctcttaatgttccactgttttatagaacagaagatatcagattgtatattttacattttgaa

SEQ ID NO: 1268 - DNA, 583 bp, Canis familiaris
  misc_feature (1)..(583): n = a or c or g or t
attaaaatctnnntacttgacgtntnngtatttgataagcattctgtttccacttctctggcgggtgnnttagcagcgcggccctgccctgccctgccctggccctgccctggccctgccctggccctgccctggccctgccctgccctggccccgggctgcccctgcggaccccgccggaggggcagggctgcggtgactgcctccagcgaggagcttccagggctgcttcgtgctcaccgcagacaggccagggattccaggaaccgcaaacgtgtgatgttcatgagtgtataaatggccacagattcatataattaagcagtgttttcacttttgaaagtaagtggggccaaataagaggtggtgggagaaggtgagaggtcaactggcatatctttgccagttctcggaagaatccgggtcttaatcttagttttaagggcttcaggaactagccaaatatgagaagcagcaggccagcttaggatttccagaaatcaatgttgggagcctctttgtctacatcctgcaatgtgagctgaatccatactcccttctgtaggctgaaagtctgtccttg

SEQ ID NO: 1269 - DNA, 595 bp, Canis familiaris
  misc_feature (1)..(595): n = a or c or g or t
cgnctgcagagccnggcgtgagtgncgtggtncggaccatcaaagtcagtggctatctcaacctgcnnnccaacaccatagatnncttcactcatgggctggctgtcgctgccagcttccttgtgagcaagaagatcgggctcctgaccaccatggccatccttctgcatgagatcccccatgaggtgggcgactttgccatcctgctccgggccggctttgaccgatggagcgcagccaagttgcagctctcaacagcactggggggcctgctgggcgcctgcttcgccatctgtacgcagtcccccaagggagtagaagagactgtggcctggatcctgcccttcacctctggcggctttctctatatcgccctggtgaacgtgctgcctgacctcttggaggaagatgacccatggcgctccctgcagcaggtgctgctgctctgcacaggcattgtggtgatggtgctgttctcgctcttcgtggagtgaccgtccccgaggcccccccacagcaataagagactcagattcactctgtgactgtgaggcagagggcgagtgcctgagagcacacctctgaccagatgaga

SEQ ID NO: 1270 - DNA, 630 bp, Canis familiaris
  misc_feature (1)..(630): n = a or c or g or t
ctgttctcatgatgatgtcttatggggtgaccaaactaggtctgaccaagtttgaggctaaaattnnncnnngaaatgagccaagtatccggatgtttcagaaacttcactttgagcaggtggcggtgagcggcgtcttccaagaggtgacacttaggctgacagtgaatgaacatgagcggcagtggcttctggagcagaccagccatgtagaagaaaagtgctatagagatgggtcgtcggagtcccattgacagccagctggcctttcgggcagggcagccaccttctgtgaagtggagtgttggaaccacgcaatccaaaacaccagagccctgtaacagaaactgaactattggggcatttgaggcataatgcccctagcccctctctagcctgggaatctcctttaggggcccttcagactctgggccagacttgccttggccttcctcaggctggcagtgtggataagtgactccaggtccaggctgtcctcctgaccagacctggattcttggaacctggagcggatagcacgaatccacagagggcagggtgggtggaggtgggagcagaggcgagtgggcctggtgcatggaaggccagagggggtagagtccctggggt

SEQ ID NO: 1271 - DNA, 528 bp, Canis familiaris
  misc_feature (1)..(528): n = a or c or g or t
gaaggagtcanaccaggtatttagggggcttgcanntctggcttcctgtggtcctgggtgacgctcacagagctgcagcttgtaggactcagcatccggcccctgccagcagtctcaccggggagaccagtaaaccctatggggctcaggatggaacatcctgtttgtgtgggggcctcccacgtgtggctcggcagacagacggggggccagctgaggggtgagacggggcaccaggtgtgagaaccctgagtgcagggcaggtgtgcacagggccatccccccaccatgtcaagggcccctcaaaaccctgcaggagcccagcgaaaacccatcccaccctactgtgacaggctcccgtgccagtcagtagagtgtccctgagaataagacacggggtcgtgacaagttcaagtagagatttacagagttagtgtttcctagtgactcccaaacccggtttttcaagctgcctatgtttacttcttactgtgagcttctggctatcaccacgtaatatgtaaaaat

SEQ ID NO: 1272 - DNA, 581 bp, Canis familiaris
  misc_feature (1)..(581): n = a or c or g or t
gtcctggctcnnctgccagtanngcgggtctgcnagtgnnnnatgagattgtggagtttggctctgtgaacacccaaaacttccagtcnnngcataacattagcaatgtggtgcagcacagtgaggggaaacccctcaatgtgacagtgatccgcagaggggagaaacatcagcttagacttgtcccgacccgctgggcaggaaaaggactgctgggctgcaacattattcctttgcaaagatgattgttcccagggaacagtaataggaaaccatcttcccttgccctggatgtgggtctggtgggaatttcttccttctcttctctcccggaagcttaaggatttggaggaggctggaagcctggacttttgggtgatggaaacgctgtggccttccagtgtaacctcttgggattaaggcattgttaacttgnnnnnngcttggcatcttttgcgaattaggcgatggccctaaatgggagttttctggattgtggggaagtgggtgggagttattctggcaggtgttgataggacgttattctttagatttttcctcctgaataaacacaggtttca

SEQ ID NO: 1273 - DNA, 579 bp, Canis familiaris
  misc_feature (1)..(579): n = a or c or g or t
aggcacatcaactctatgttccgaggtcttaaaaagatggggcttctgtgagctgctcagtctagcttctaggcctaaagttcttgatctccttctgtgagatgcagaagcctctataaccccattcccgcagttccattgtcagttgttaaacctgtncttcctcgtgcctgacctgaaattgggactcccaaagcatacatgaaaacgtattcaatattaagacagctaacacttctatagtaccttctatgtgccgggtactgttccgagcatgttataaaacaacactttgaagcaagtaccacattacagaggaagaaacaaaggcccaaggaggtcaagtaattgtccaagcccacacagtgaacagtagagccagggtaaagagtaactgcatagacatctctcatagcagcagcagacttgtagaactagaaggacttgggcagcccgggtggctcagcggtttagtgccgccttcagcccagggtgtgatcctggagacccaggataaagtcccacatcaggctccctgcatggagcttgtttctccctctgcctgtgactctgcctctc

SEQ ID NO: 1274 - DNA, 442 bp, Canis familiaris
  misc_feature (1)..(442): n = a or c or g or t
actcaactgttcaaggagctcataatgtcatcttagagtcttggggtgnnactgggtcacattgctagcacagagaaggcgtctgtgagtttgacccttttttatcacaagcctcagtgtttggaaagttgttaccaatacttttaaacaatggnctaagaaaaattgcttttttttctttttcaccactacagagagagtagatttctcctacagagaagcacagcctccaatagtaagggtgatgatatacatcagaggtgaattcatcattgagggccaggtgggaggtgagggaggtctagaaatggcagggtgacctggtagttctgtccttgggaaggggattgggttttgctgtttgtgtatttatactgtatcataggtaccacactttttcttattatctgtgtatgtattgattttcttgtttatgatatnt

SEQ ID NO: 1275 - DNA, 657 bp, Canis familiaris
  misc_feature (1)..(657): n = a or c or g or t
agacnnatatcatttgctatttctgangctaaagagaaatggaanngcgagcttgaaaatatgaaaaaaagtggaatacctggaaaagaattggaagagaagattcattctcttcagagagagcttgagttaaagaacgaggaagtccctgtggttgtcagggctgagctggcgaaggcccggagtgaatggaacaaagaaaagcaagaagaaatccacagaattcaggaacaaaatgagcaagattaccggcaatttttagatgatcatcgaaataaaattaatgaggtgcttgcagcagccaaagaagactttgtgaaacaaaaaactgaactacttcttcagaaggagacagaattgcaaacatgtctagaccagagtcgtagagaatgggccatgcaggaagccaggcggatccaactggaaatctatcagtatgaggaagacatcctcagtgtacttgaatttctcttgaaggacacccaaaaggaacatgtcagtggttcagaggacaagcaactcttggaactcatgtcaacttgttcttcaaaatgggtatctgcacaatattttgaaaaactaaaggcctgcatacagaaagcatttcaagatatcctctccctagctatagaaagtaccaactcagagtgggaaaag

SEQ ID NO: 1276 - DNA, 641 bp, Canis familiaris
  misc_feature (1)..(641): n = a or c or g or t
cctgattgancgtgnnggtctgtactgattaaatttggtgtgaaaagcaggttgagaaaccattttatgtcaagggcagctttgctcatttcccattatttcataanccacannatttgagaagctgctcagtcaacttgcataatcagttttagnctcaataaaattatagctctaatgtctgcatataagggaagtagttatcatgttagtaatacctctaacagtataaaccccacccccaaattagccagtaatcctgtaggaaggtactgtatgatcaaatgtttaatcatataaatagaatgtaaatgtatcactgagcactgttttctagtgtatcaaagttcttttatttcatcattcacttcactgtgctgttgttatgatgtgcttaacagggaacgtggttagtgaaaggaagataaacctggatgttactacaaaacttagtttaacgaatgtttaaaaaacctcaaattctgcctctcataatttggatctcttcttatgtacatagtgctgataacatgaagacctttctctgcactataatgcaaacagggtaactaaacaaagccactttcaatccttgaaggtatatccaggtttatgacantaattgtgtttacattttatgg

SEQ ID NO: 1277 - DNA, 573 bp, Canis familiaris
  misc_feature (1)..(573): n = a or c or g or t
gcattgacanngtgattcgnnacgtggcccccattcccagccactatgacgtccaggaccgcttccgcattgagctgtctgaggagggagctgagggtcgagtggtggggcgcaaggacatcacctcggttctgagggccccagcctacccacttgagctccagggacagcctgacccaacaccccacccagggcctccttcctggacaacaccacccacggccagacacttcccagagaaccgccacccacaactggccaccagctccttcctcctcttcctgctgactggcatagtctctgtggccttcctgctgctcccgctccaggacgagctcggcagccagctgcctcaaatcctgcacgtctctctgggacagaagttggtggcagcctacatcttgggactcctcaccatggtgttccttcggacctgagcttcctgctcaacctccagccccctcctagggcagggatgtggacgtgctcatgagacagccactgtgatgctcattcctcacctcaattcctactccctcttcttcctgcccatcctccctcccctaaggaccc

SEQ ID NO: 1278 - DNA, 344 bp, Canis familiaris
  misc_feature (1)..(344): n = a or c or g or t
acaacccacgtgggcagcagaaccgaccagaaatctggcctgtgtttnnngccacttctcacaagatagggcctgttgtgtttctctgagaggatgggtggtggccggggactacagattgacgagccagaaagacacacacacacacacacacacacacacactctgccaggatgagcctggttgaaccccagggttaactacccagaggggccggtgttcacagagccacctgtgctaagccctgctcagagcccccggaggacatcccatgaggggctgatggtgaggctctaacagggacagagcagccaggccgtaggcccatcttggtccatatcagc

SEQ ID NO: 1279 - DNA, 624 bp, Canis familiaris
  misc_feature (1)..(624): n = a or c or g or t
cccnnagtggtgggggatncnnnnnnnnnnctctgnnngggcccttgtctgagaaaacccaaacnnnnnnnccccacccatgggaaatggaaggcaagaaatacagaggatcatgtgataactgtagagcttgcaggggggggtgggagagccagcggcagggcccagacttgcaggggctcccctgcccccagtggtggcagtgtcaccacctgacagactgcaggattcgctgccctccagagaacagagatagacatgaggggcactggggcctttcttctggctggtgtccatgaggttctttctgcaggccatccgactctgttctaggtcccgggagtggagggaggggggcaggagtaggttctcggtccagaggcttgatcctatggttggcctttggccatgctgctgcccaactctgtcccctcccagctactggcccaggccaagttccccttgtcaggtgggctctggcacagggtcctgcacttgcagaggttccccatcccaggggaggggaagggaaggatcaccgctcctccagtggacgaggagatccacctagtcacagggagttccttggcctgatcccttcccccacccagggaaagcgctctc

SEQ ID NO: 1280 - DNA, 466 bp, Canis familiaris
  misc_feature (1)..(466): n = a or c or g or t
cagctctaccaagggtnnnatgaccatgctcaccaaagccatggcctcagagctggggccatacaagattcgggtaaactccgtggaccctacggtggtgccgacggccatgagccagaagatcctgacggaccccgagttagtccggaagctgaaggagcggcacccgctgcggaagttcgctgacatggaggacgtggtcaacagcatcctcttcctgctcagcgaccgcagcgcctccaccngnnnctcgggcatcctcgtggacggcgggtacctggcctcctagggcgccggcgcgggcgagccagcggggctcagctcggtccaccgggccccgcccccgcccgccccggccccgccccggccccggcagcccatctccggtgcaggctccgtgtgtggccgcgctccgcacccacagccgcgccgccgtgaaactcgcctcatcgcccccgcccgctgt

SEQ ID NO: 1281 - DNA, 419 bp, Canis familiaris
  misc_feature (1)..(419): n = a or c or g or t
acttaattcaactngaattatgaaagtatattttgtattttcagaagtttnnnnnctttnngttagagcanctttttccaaactcaccttccatagttcttacgtaattttgcagaacttaaaatttgaaacattttaacatttattctttttccaacccaggatctttgtgtttgtatattcttttannnnnnnntaactagtattactgttattctgttaacccacattgnnnnaannnnttaagctatgcatattcattaataacaacgcagtctctcacagttttctaaatatgtacttccttaaagtgttcataaatgaaaattaagattcattagagattgtgacagccttgactgttggattgtacaaaccatttacatcaaaagtactcaataaatcaaccactaatgttc

SEQ ID NO: 1282 - DNA, 489 bp, Canis familiaris
  misc_feature (1)..(489): n = a or c or g or t
tcttcttcagccccatgtgaagtcnggnnnnatgtatcactttagttgtgtggcatcagttaaaggggccctggngaaatgggcactggggctccaaataagaagtcagtcannnctggggtggaaagtacacattgtgcttgctatttgtgttctattactaatagtatttcctttnnnataatatatctttgaattaggttcatgatcaatgtttataaatgaaattgctcatttgtgatccccatcttattttactataaaagctcagataactgtgtaaaatgcattggtgatatttacatctttctatnnnatggaagagaatataaagttgttttttaactgtttgaaataattagnnnnatggtatggtgcaaatgttaagtannnnnagtagcaatacacnnnnnaaaaacaaacacaaaatcacttatccgtggatgccttctttgtgtctactcttgtgtaaggaaaaaaaggctggta

SEQ ID NO: 1283 - DNA, 581 bp, Canis familiaris
  misc_feature (1)..(581): n = a or c or g or t
ctcagnnnnnnctnnanccagaaaagcnntnnatcagctctgggatctctgcattcagtggctgagaccagacatccacacgaaagaacagattctagagcttttggtgtttgagcagttcctgaccattttgcctggggagatcaggatttgggtaaagtcacaacatcctgagaatagtgagaaggtggtgaccctaatagaggatttgacccaaatgcttgaagagaaggaagatccagtgtctcaagagtctgttatttcccaagaggagaaccctgaagaaaataaaatggtttctgtccttcggagaactgagtccctggaatctgtgacattcaaggatgtggcagtgaacttttccagaggagagtggaggaggctggagccttttcagaaggagctctataaggaagtgctactggagaacttgaagaacctagagtttctgggctttccagtttccaaattagatttgatttcccagtttaagtgggttgaactgccgtggctgctggaaaaagaagtttcaaaaggctccagatcagagtgtgaacctacaggtgaattgaaggaatcct

SEQ ID NO: 1284 - DNA, 639 bp, Canis familiaris
  misc_feature (1)..(639): n = a or c or g or t
agatcaaagaaacatgnnatcatgnnngccccagataaagaatatcttttgattgtcattcagaacccatgtgaatagatctgctanagcccagcctgtcctatgatgtcagattgaaaacattttactttattactaagattatattccaatctaactgacctttcagacactgttttctatttttacatttaaactatttggcacgtctcatttagtccctttccaatgtattataaagttgtgatttagctacattggaactatggtcgtaaatgcagaaggcatccctattcgaacaacgttggacaactcaacaacggttcaatatgcaggtcttcttcaccagctgacgatgaaagccaagagcacagtacgtgacattgatcctcagaacgacctcacttttcttaggatcagatcaaagaaacatgaaatcatggtagccccagataaagaatatcttttgattgtcattcagaacccatgtgaatagatctgctacagcccagcctgtcctatgatgtcagattgaaaacattttactttattactaagattatattccaatctaactgacctttcagacactgttttctatnnntacatttaaactattnngcacgtctcatttagtcc

SEQ ID NO: 1285 - DNA, 680 bp, Canis familiaris
  misc_feature (1)..(680): n = a or c or g or t
tcctccccatgttcatannacactgagacttgatggctngagcaacatgacaagggnngtgcannnngnaagtngagaagctgggatttgaacccaagctcatggctnnagagccgggactcctcccagcacacgcatgttgcagatggaggagaacctcggatctcccggagtgcggggcctgagctgcagccagagctcctgtgagccagctggagaatgcgcgtgcaacggtccttgtaagagaacgcgtgtaaaatgctgttctatcccgtctgtggcaactgttgatggctcgccggcagccctggatggcgactgcgcgaccttaccgaccaccttgccgctgtcccttgtgcggataaaacgactcgctaacgaacacgggcctcttggggctcagctgttgacttcctcactgccctcgctgtctggatggggtgcttcgtgtggcggggggccctggcttgttcacccatgggtcccagcgccccatacgggttgaatgactgcaggaggaaaccactctcattcagcagatcttgtacaggatttcgttgtttgaccctcaaatattgacagagagggaaagtgtgctaaaatagttacgttatctttgtattgactttgatagttgtcaaacnnnnntgaataaatctaaaaaacaaccnnnngacnnn

SEQ ID NO: 1286 - DNA, 505 bp, Canis familiaris
  misc_feature (1)..(505): n = a or c or g or t
gttcaccctcctctgtccccagacccgacccttcccgcggcacagagagacagggcaggatccacgtgnnnnccatggaggcagagaaagtgttttatatacgataattatttaatatccctttttaattagaaattaaaacagttaatttaattaaagannnnnnnttttttcagtattcttggttaatatttaatttcaactatttatgagatgtatctctctattgctctctcttgcgctcttatatgtaccggtctttgtgtttaagattcatgtttccaatctctctctccctgatcggtgacagtcactagcttgtcctgagcagatatttaattttgctaacactcagctctgccctccccttgcccccggctccccaccacacattcctttgaaataaggtttcaatatacatctacagactatatatatatttggcaacttgcgtttgtgtgtatatatatatatatatatatatatatatatgtttatgtatata

SEQ ID NO: 1287 - DNA, 571 bp, Canis familiaris
  misc_feature (1)..(571): n = a or c or g or t
cttanngactactcattaagctaaaattgtaaaagtgnnnnntctanctcttttcctactttcagtaaatatgagataccacatgattaantctgttttnnnntagttttntaggtaattttccatcagatagaattttatannnctagtanaaatactccccactcagccntncgtgtgcnnaattnctgctcaagcattgagaaatttatccatttgaatgttagcagaggctgaagagaaanagcctggctatgtttgtatagcntcaacanagtnnnnagggtgaagaaaattaggccataagttatgggactatctcaattcttgacttgtcacctcgagctgtctcccaagtttgaatctcccaaacaacaaatannnagggagnnntggattgcagaaaagtggggggacggagagatcttataccaatgccatcaatactcagnagtgagtggttatatccattttggagaatctccataatttgcaacttagaagtttttttaaggcatttctgtgtgtgacttgattggtgttatcaatgtttttgtaaatatttactatg

SEQ ID NO: 1288 - DNA, 489 bp, Canis familiaris
  misc_feature (1)..(489): n = a or c or g or t
gcgcggtgcgcatttcccgccctccgccctgcggacccacgtgccgggatcggcgggctagtccgggtgtctgcaagtcgctgaggggcccgcgggggcgggcttaagggttgtgccagccctctgaggctgggtgcatcagcaggacccgccacctcccccgctggcatccagggcatctgtcactccaaaaaccaacgtcagcgagaacacgtcagagcacccgtgtttccagatgcaggctccggggagctcaagtgacccctacccagttctgttatgtcagagtggacgccagaaggcaccgtgggccccctaaatggattctctggcccagagcccagtacccatgggcggtcccattaggttggctgaggacacccatccccagggctggccacagtggcttgggctgtcatcctgtttccctggtcccttcctccaccttgaccctgtgagaagcatagatannnnnnccgggcctgaatg

SEQ ID NO: 1289 - DNA, 554 bp, Canis familiaris
  misc_feature (1)..(554): n = a or c or g or t
ccaaggctcgccagttggtgaaaagnaccantgnntcactatttggttcacatggttttgtccgattcctggagtgccatgtgctaatgttacaaaaaatgccagacagtgtcttcatgcacactctgccagagacttgcagccaaaccctcaagtactgtaaggagttcttctctcggtgtgtgacctgcccagtctatcaccagtgggtctctgagcttaaagcctctgtaatgagatatggaaagagagaatccatgtcctcgactaacatcatcagaccttttgacacctgcttggccaggatttggatagagggagaatacctggaggaaaaccactcctttggaggacatttaggaatacagagatttgacagaatggctgatgtcaaggagaataagaatgaagaagaaattcaagaatgtacatgttaaaaaaaaagccatctaaagggaccatggttttcttgttgtatataacacaaagaaatgacccaagttctccttttgaagatactgtatagtggacatattcaacatattaccctttta

SEQ ID NO: 1290 - DNA, 483 bp, Canis familiaris
  misc_feature (1)..(483): n = a or c or g or t
ctcagagttaaggncttcactgggaaaggcannangagatgaggaaccacacagagcattctgggggcagaatacaaaaaaaaagctttgaaggccaaggtaagagaaagagctcccaccggaagatgaagacaaactctgcctaattcatttggagcagggaaaccattactatggtgagatttcactttttctcctgctcactaagtaggagtctgttgacaaatgcctttccctggattgcccacctgccactggcagctctaattatagtgaattgcctcatcctagctggtgtcattgcagagaaaaacatcaataagtgaaatgaactaaaaggtatgtgtcctcgtttatcttcttgttcctgttgcatttttaaaaagtattaaactaatgaatctcttctattgtgatctattttccttttgtctgactcagaaaatatgttgattagagattagtctttcctcatnnaaatat

SEQ ID NO: 1291 - DNA, 643 bp, Canis familiaris
  misc_feature (1)..(643): n = a or c or g or t
gctcacgnntgctttgagacnntcttttgccgatgctccggcaaactggtcacctaccacgaccctnnnctgctctttgacctcaccagggatccctctgagtccacacctctgacacaggacacagagcccttgtacgatgtcgtgatccagacggtggccaacgccgtgaaggaacacaggaaaagcatccttcccgtccagcagcagttgtccgaattgaattatgacagcccgtggctgaagccctgctgtggagtgttcccattttgcctgtgtgacacggagggaggcacctccactgtgcgggcataaggggaagcaatgattgagatcgagcagtcaatgttggccaatatggcacctgcaaaatttcgggaaggaactggagagccagtgggttcatctaccattgcaggatgactaaatgcccattggttgtgacgctatcgttaacttcttttctgcttttggtgataggtgtgtatctaaacctgtctttcggtgctagaaaacacgcgatggcatccatttgtgccattgtctctgttgctctccaaagcaaactctccctataaggtcctgtgtgcatctaactggctgatggggaacggaaaaatagccactattaaagcatnnnnnn

SEQ ID NO: 1292 - DNA, 705 bp, Canis familiaris
  misc_feature (1)..(705): n = a or c or g or t
tgcagaaggtgatcatcagtgacangcactgcttcgagctgtacggctacgacatcctcntngaccagaacctcnagcngtggctcctagaggtcaacgcgtccccatcgctgacagccagcagccaggaggactacgagctcaagacctgcctcctggaagacaccctgcatgtcgtagacatggaggccaggctcacaggaagggagaagcgagtgggaggctttgacctcatgtggaatgatggccctgtcagcagagaagaggggactcctgacctgtcggggatggggaactttgtgaccaacacacacctcgggtgcatcaacgaccgtagcaatcagctgaggcagctgttccgctcccttcagagccagaagaaagcctccagttagttcccagatgcagggaggacagcgaccccaggaaggtgccctgcagtccttgcctacccgtttccagcaccatggccggcgacctggagcccttgcctcccctcctctggcctggcagcagctttgcggactcagcggcctgtggtacgctggtcactgctcattctgggccccctggagaccccagccccaccctgggcaccttgtgctgggagacagccagtccctgggaatgggtgtgctttagccttgcaggactggcttggcgatcaggcccagggaggacagctgcaagccctgctaccccaga

SEQ ID NO: 1293 - DNA, 474 bp, Canis familiaris
tctctgtgtctgccgggagtggggtgcagatggatgataactttgtcagccccacgagacaaggatatcttcactcccagcttgaaaggcctctctcctccaccccatctgaagataaacaaggccagaccttcgtacaatcagctggtcaacattacataaaatgaagtttcctctcaagtggatgcaaggcagtattgttggtggacattcccttttcaatagctgtgcatctagagtgaattcatgaaaaattcttgagtgaactctgcagcaagctaactccttcagctgcagttgctttattgagaaagtgagaaagtgaccacctgacatcttggccaacggttgctacaattactgtcactgggcatctatattctgcagactggaaactaggcactggttctttggagatatgtttatgtcatatggtgggctatgctgaaatttttaaacacttggctttgcaga

SEQ ID NO: 1294 - DNA, 520 bp, Canis familiaris
  misc_feature (1)..(520): n = a or c or g or t
gaagaatngaattaatgatannnnnaaacacaggtggttaaacggtttcaattgggagggcctgaaagcgcggaaccttccatcacctttacagagagagctcagtggacccacagaccacagctacttcgacaagtatccccctgaaaaaggagtgcctccagatgagctgtcaggctgggataaagacttctgatagaagaaaagatgattattgcctatacatccagaagaggactataaggaccaataatccaatagtgatgatttctctctttggagtattataatgtcttttggaagaccattagggaagagaaatccctgcccaagagctgggtggacaatgtggatatgaaggtggttctgaattataatgtctcatttatatgctctgaattattcatgtattctattctttgcttttctcaaatgttggaggctattctattcccctctccacaatcagaaccatttttcttgatggggcatcattttctctgcaatctgttgctccatc

SEQ ID NO: 1295 - DNA, 290 bp, Canis familiaris
  misc_feature (1)..(290): n = a or c or g or t
gtntatcgtcatcactggggtccctgcctaggngnctggnnnctgggacggnnaagaggctggaggctggcatgtgggttggtttgcatatcgtttctaggcaccattgcaccttctcccttcaagctcggcgccctgatggcaaaggagaggttttccaatcacctctgtaacattggtctgctgtatctacggagtgagtcctctcaaggattttttttttttaaatacacagggaacgatttgagatttttnnnnnaagaactgggaacnnnaggtagatttcaaat

SEQ ID NO: 1296 - DNA, 452 bp, Canis familiaris
  misc_feature (1)..(452): n = a or c or g or t
agtgtccccccactcccccaacacgaccacgtnnggctcctgcccagccctccacccagtnntgccacccaccccaatgggagaatttctgcctataatccccaccctcagcccatgggggctcaatacgtggtcacgaatctcttggtactcttcaggaggcgaagcttacttgccatcccctcgagcgactaatgaatagaaagaagtggaagtgatggtgcgagaccttggggaccaggccataaaaggcagtgcggcgtccttgctcccctgggactccccccccgccgccccccgctgggtgaagtgagctgccaggacctgcagacactccagtggccagagaggggccacctggactcaggcctccgtcaggccttcaagtgcccagagtcccagttgatcccggcaaacaccccagatcctgagccaaaaccaccctgctaaac

SEQ ID NO: 1297 - DNA, 701 bp, Canis familiaris
  misc_feature (1)..(701): n = a or c or g or t
tatgattcattcattttttcctgctgcatactgtcccactgtagaaatataccacagtgtatcctactannaatagatacttgggtaattctgtcaggtttctgcccatttcaaatactacaatgactatttttatatgcctctagatgcatttatgaaaaagtttctccaaaccaaggaatataattgctaggttatagggtaaggccatgccaattccagcaggtaatgcccaacatttccaaaatagttgttacatttctagcagttgtaggtgcaagttcctgttgctccatattttgtcaacaaatattctctaatttttttggcctttgccaatttcgtaggtctgaaatatatctcatttagttttaatttacattttctttattaaaatgatctaatgtttatattcattataaacattttcttcaaaatgtgtcttttgtccagtttttagattaggtgataatttcttactgatttttagaaagttttttatatattgcctatattaattttttattagttttatatacttaagtatctcattccagcatgtggtttgtctttgttactttcagtagggatttttagtgaaaagaagatcatcattttctttagcggtttttgcttgcttctctaatctgaggtcataaagctgtactcctgtgtggtcttttaaacatcttatagtttca

SEQ ID NO: 1298 - DNA, 616 bp, Canis familiaris
  misc_feature (1)..(616): n = a or c or g or t
agagttgagtagagaaaaagaagagagagagagagagaganntatattatatattatatacagagagagagtgggtggatggagagccannagcaggcccggccaggcagggcagctggtgggacctgcttcccatcccggtggggtggggggtgggggtgctgtgtagggtcctggggccgttgcccactctcccctcccaccatgcctccagcctccagtgcagatgtccacacccacacttggtcaggtccacctcgggggagggcccgagtgggggccgtgcctttgcccaaacccttgccctggaccctgcactttgaccctggctgggagataaaggacccacctggctctgctggctctgtgggagctggcagtccccatccagggggtttctccggtgacattcccatggggccctgatgcactcactgagagccccctcttgcacctcccatggaccccgggggtggggagttggcgggggtctggctggggtccccttcctatgcccaagggtctggggtccagcccagctgccaagtgaccttgtcccagctccttctccccaggctggcgtgagtgtgcgtgtgttcgtgctgagcttctattt

SEQ ID NO: 1299 - DNA, 239 bp, Canis familiaris
  misc_feature (1)..(239): n = a or c or g or t
ggtgggnnnactccaggcatagatnnnnnctcnnnnnnnnnncnnnnnncttcagtatcacgannnnnaaatnnnctcctcctcgctgtgagcatccatccagagtcnngtgaagagtctgtgacnnnnnnncactnnnagcatcancccacaactacagtcagncttatgccctgtcanctccaagnnnaagttaagtttcagaacaagcaaagagctctantttagaagaaatgtgt

SEQ ID NO: 1300 - DNA, 570 bp, Canis familiaris
  misc_feature (1)..(570): n = a or c or g or t
atgtatttaannagtccatgggctgagatggggggcatcctttcttaatactacagtgttgctagatacaccgccagacacctgggggttgggcatcctngcgataccttcaggtgctgacatctgcagcatggtactaaggaagttaaagtttgaatgtaaccactttatttaaaaaaaatttttttttaatttaaatgaaatgaggttgaagtgaacatgattttgttgaccatgttcgtgaattatagatgcaacatgcattggtagacttgtgtgatggtcttttgtgatacttaattttttacatatcccagtctctgtatgtatctgcatagacaaagaaaaaacaaactcctgctttctttattgaagggtctccaggactgcgtgtctgctcctgagctctgttttgagtatgtgtatcctttgcttgtattttgtattaaaaaaaataagaaaaagaaccctttattgttnnnnntgttggcattgtcccctttatttttttctctttttgggacatatgaagcaagttattctttttctgtatctttttttttcttttgt

SEQ ID NO: 1301 - DNA, 362 bp, Canis familiaris
  misc_feature (1)..(362): n = a or c or g or t
tacntgagactgttggttaagctgtncaggtttctggccagacgnnccaactctacctttnnnnnggttgtgtnnannnggttgttcatgagtcgcaccnaccggcnacctctgtccctttcccggatgatccggaagatgaaacnnnctggccgggaaaacaaancagctgtggttgtaggaaccataacggatgatgtgcgtgtcnannnggtgcccaagctnnaggtgtgtgcactgcgnnnnngtnnncgtgcccggannnncatcctcaaagctnnnggcaagatcctcaccttcgatcagttggccctggactcccctaagggttgtggcancgtcttgcnnnnnggtcnnngcaa

SEQ ID NO: 1302 - DNA, 611 bp, Canis familiaris
  misc_feature (1)..(602): n = a or c or g or t
acaggggtgncnnnagtagcacaaaagacagtngagnnagcagnnagcatnncagctgctactggctnnggcaaaaaggatcagttgggcaagagcgaagaannaggcccacaggaaggaattctggaagatatgcctgttgatcctgacaatgaggcatatgaaatgccttctgaggaagggtatcaagactatgaacccgaagcctaagaaatacttttgctcccagtttcttgagacctactgacagatgttccatcctgtacaagtactcagttccaaaatgcccagtcataacattttctcaaaatttttacagtgtattttaaactcttccatcagcagtgattgaagttatctgtaccagcccctactcagcatttcagtgcttccctctcactgaagtgattatatggtagcagggtcctcccttgtgtgctgtgtggatattgtggcttcaaatctaaaatgttaaattaaagcacctaagtgactaccacttatttctaaatcttcactatttttttgttgctgttattgagaagttgtgatttactatcatatattataagatttctaggtgtcttttaatgattatttctgtttaaaaa

SEQ ID NO: 1303 - DNA, 592 bp, Canis familiaris
  misc_feature (1)..(592): n = a or c or g or t
acnnnnnngcangaagtttctactgacaggacagtgtgactnnggctccaactgcagattttcccacatgtcagagagagacctgcangaactgagtatccaggtnnaggaggagaggcgggccagggagtggccactagatgttgtcgaactccctgagggccatctggaagactggttggaaaagagagccaagcggctgagctcagctccgagcagcagggctgaacccatgagaagcaccatcttccagtaccccataggctggccaccagtccaggagctgcctccatccctgcgggcacccccacccggggggtggcccctgcagcccagcgtccagtggggctgagcccctcatccccactttgacccccatctggtcagcttttgtgtcagtcacaataaagataagggctcatactggggatgccaagggcctctcccccgcctgctgccccctgtggagcctctgaaaccacatgctgctgggcctggcttgactaaggccccagagttgccccagcaggtatagccctggtcctagctctgctccagacagctccatcctccctccctcttgggacatctt

SEQ ID NO: 1304 - DNA, 504 bp, Canis familiaris
  misc_feature (1)..(504): n = a or c or g or t
aagcntatcagtatcatagnnacaanggttggaatagagatgcttatncnntgagaatttggggnctaggatttttanntcaagcatccatagacttaactcctcagactttcaatgaaaaagttctacaagggaaaaatcactgggtggttgatttctatgctccttggtgtggaccttgccaaaattttgctccagagtttgannncttggctagaatgattaaaggaaaagtgnnnnnnnnnaaagtagattgtcaggcttatggtcaaacatgccagaaagctggtatcagagcctatccaactgttaaattttatccctatgaaagagcaaagagaaatatttggggagagcagatagatgccagagatgcaaaagaaattgctaccttaatacatgaaaaattgaaaaatctccaaaatcatggaaagagagataaggatgaactttaatgatgttgaagatgaagagaaaagaaaaggagttctaacaaatgacatc

SEQ ID NO: 1305 - DNA, 538 bp, Canis familiaris
  misc_feature (1)..(538): n = a or c or g or t
acaagnnaaaaagattttcttggcaatttcccccaacagtgtaagtcannnnaactttttnctaaaatcctaagggaagnnnnnncctgttttaaatcctcttgttcttttggctcgtcacagagaannaactaagggagcagcaggacagaagcaacctgcaggtgtttggaagtggtgcggagccggacaatgagtccgcggcagataggaggggacttttgtctcgcaccatagtgcaggctgtctctgaagaaacggacttcactgtacatatgagactatttacgtgtaaccagcgtgggaatgcgtaggggaatctaatgagaaaacccagttctcaagagtggtggtgtcagtgaacgctctgtggccagtgtaaagaaaaacccttgcagttgtggacacttgtccctgaccagataccatttctgccagtattcctctgttatctgccccagaactgatgttttttaaagtactgaagagaaatgaagttgatgtctgtctgtcccaggnnnnnnnnaannnnnnttgt

SEQ ID NO: 1306 - DNA, 673 bp, Canis familiaris
  misc_feature (1)..(673): n = a or c or g or t
tcaaatgaaatatttcagtannnagagaatattnnagttttgcttccttctgatcagtcctggtctctgaggcattaaacatctaattaacagtgaagtggcagcacagcccttggtatctaaggagttggcaagcttaacaaaacccagttttcaatagatttccatccttctacatttgttgataccactaatgaaatgctttgtaatagacttggctaattatgcaaatgatggtttgtaataattggtccagttttacaaacaacagatttttagattagggaggttaataagggagatgcctactgtgcctcttgcgtgtgctgggtgctctttgaaagcatcagcaaaaactacaaagcaagtaagatctgagcctcaacagattgcctggttctcattctcccagctttctttttaatagaaatgttatagttcataatgaatgtattgcattaaaactttatggctttattattgtaaaacagattcaagatacagtaagagtatcttcacagagatttgcattaatgaagactacacagaaaaccttcaggaggatttgtgtggatctgatatttagcaaaattttgtgtttcacactcttacagaaaaatcagaaataatcatttgtttaagannnnnnatataaataaagtnnnaaaaaaat

SEQ ID NO: 1307 - DNA, 545 bp, Canis familiaris
  misc_feature (1)..(545): n = a or c or g or t
agacaggannnaagctatgggaggtncagtgtgagtctccaactttnannntggcnnnnnaccccaagaggccnctgctggcgtntgcctgtgatgacaaagatggcaaatatgacagcagtcgggaagcaggaactgtgaagctgtttgggcttcctaatgactcctgataggaggacctcagggagagggggccctggcagaggccttcctttgtgtattagtttggtctgttctcttggagttggtgggcacctaaggtatttgtaaattggtataaattatacaagtctttgttagtttgcctattctagttcccttcttgttatgtgagcttttcccattctttcccctgcaggagggctctgcacgataacatcagcatatcttaactctggggacctcctgtcttctctgctttttgggtatatggtagactttgttgggtttgcttctgcttggacaatacctaccttgagtgagtgagtgaggaagggtgagatggggatggagatttttttatagtaaaaagaaatgtatataat

SEQ ID NO: 1308 - DNA, 455 bp, Canis familiaris
  misc_feature (1)..(455): n = a or c or g or t
cgtgnnatcagtngacnaggccacaggagcagccaggnntgggcnnnngcagctgctggccngagagtgncnctccnnnctgncgtccacgcnaggnnnttggtaggggggancccaaagccatnnngggaagggctcnnnaggaaggtccagnnnaggccccnnnaaggnnggcagccccccaccnnngcnnnnnngcnnnnntgagaagnnnnnnntaactcaccacaggctnnngagcctgnnnnngcctgcttccccancttcccaatccctttctnnggttcagncnaggtnnnnnnnnnccttngnnttcttcccagattggaggttcccaagaggnnnnccaggggagtggtaatgggcacttcccttgtgggtannngcaggggccatgncnctcctccctctctggcagggccctanncngggcagggggnnnggggatgggccca

SEQ ID NO: 1309 - DNA, 401 bp, Canis familiaris
  misc_feature (1)..(401): n = a or c or g or t
cnnnacctgtgcaggtcacaggcaaaccctgctgccctgtctccagccctgtccctcaggttggcccctcagcagggctgggggagctgaagccctcattcgatccctgctgtgaggttcctacagggtgctggcacggggggccaggggccccgtggccttctaccttttcctgagaggtcagctccgggtaggtgcttggaactggctgatcctagagatgtattccccaggatccaggccaaagggtccagattcagctggggaggggagtgtttcctgctggagaccccgggccctggaagccccaacatacctcaatcctgacttgggctagatccttcccagccctcatcccagcactgggaccctccaaagtcctgtaaatgtgtatacagtgt

SEQ ID NO: 1310 - DNA, 586 bp, Canis familiaris
  misc_feature (1)..(586): n = a or c or g or t
cccntnngtctgtgcaacggggtgccctgtgaatggcccccacaccannntccgaaacgtgcannngcccacggcagtcagacgaacccgngtcggggggatcgctggggctcgtgattgcaagtcgcgggtggcgctgccaccgcgggcccccagtgggaccaaactggtgacctgaatgaacctggcctgggttcccgcgtgtgttctctccgtctctccccgattctgtatgttcacgctggtgggatgcgccccaggtcagcaagcagtctgggtgatgtgcaataacccgtggggcgccggccaagaggggctcggtctcggtaacaaggcaggatgcccccccccgggctggcatgtccaccttggggtccgtcacacaagggcacacaggtgagggtgggcccgagcacatcccctctcctgtgcaccccgacttcccttgggcaggcacagggtctccctgagagctgataactgggaaaaccaaaaaccaataatattcctgataataataataatgtaataataatgatgtattttacactgactgtgctacgctgcttttgtctttatatacagt

SEQ ID NO: 1311 - DNA, 564 bp, Canis familiaris
  misc_feature (1)..(564): n = a or c or g or t
tgagcancttacaggcntgccatggctgtgtgcctgacctcaccctgnnnctcngtggctgccagccgccnntaccagggaccaagcctgggggcnntgaaagccaaagaatgacaccttcctggatcaacagccccaaccagtgcccaggggaggggaggcagaggaggcaacagaggacaaaggagctcacctttgacatgcctcacagctccagcactcctatggtgcatagggtgagcttggcaccatcaaaaggtccctggccaccccccttgcccttgttgccttcaccatctggggcagcctggggccccccaacagcctttgatctgctgaaaagcatctggctggtagccacaccgccccctccgcggccctggggggttgggccacaacagcccctgcctcagccaccatcacccttgttgcccggaacctctgccctggactggagccccagcccccctgccccactgcccagcctctcctgggtagtggcccagagcagcccagaggcctggtcttttccacccatgagactgtactgagggggctggacag

SEQ ID NO: 1312 - DNA, 620 bp, Canis familiaris
  misc_feature (1)..(620): n = a or c or g or t
gagatgatgggagaatgtccaagnacaagctnggtgnacgaccagagnctnnagtttgcccgggctctgtgtactttgtctgccattgtcattcttcctgtgctgatgggcannannnngtgtcctgcatcaatgcaggtggcctcgaccaccctggaaggaagcaccactcctcccactctgctcatgagggactggagaccctcaggactctccaaggccacacagctacttaagggctaagcctgaattcaaatccagatcttctgactctccatcccctattgcacaatgcttttcatgtggaatgcgaagtgtttcttccatttggatgcttacaaagttccacagtcatccagagaagctgggccaacgaccagaagctgcagaaatgaaatccactcggtgaacacttgcacttccctcgtgcagagctcaccttggttagaaagtgctacagctttgtgtcccctgccatggctaaaggagcactttttgcccacagggagccccaccccccccttctctggatgcttgccaccctgattctgcataacacagagccaccacttcctacttcttatcacaagcctccaattagcttcattcaactatgagtc

SEQ ID NO: 1313 - DNA, 559 bp, Canis familiaris
  misc_feature (1)..(559): n = a or c or g or t
cctagttacagagaaannaaatactgtgttagaatttttaataggtctctttaaacctnnngtggaatgttntcagataatttgcaaatacctcttgaatgaagaagatgacaacttcactgagaagcagtacttggctggagttcgaaaattcactaatcagcttcttgatcaaggcacctnnnaatgttnnnacgtactgtcttgtgatgtacagaaaaatgccttagcagcttttgtgaggctaggtgtgatagaaaagaagaaagtaaatggtnnnagtgtatttaatgtgaatgaacctgccatgacaaaattagaagagatgcttggttgtaagacaccagtaggaaagccagcaaccgcaaaactttaatattgccaaacagttatgagaaatttggtcacataattgctatcannnaaggactcttactccaacaagcagggacatgaaagaagagagccatctgctcgtggtctgtgagagccatgggctcagcggaaaggaagaggtgacaggtgnnngcaatcnnnntgaccctctcnnccacgacag

SEQ ID NO: 1314 - DNA, 430 bp, Canis familiaris
atctggctccctcttaccacttgggagactgcctgcctccttgggattgttggcctgctccacccatctctgggggaagaggtgccagccacctgggccacagggaagagtgttgttacccataacatgtgttttaataaaaaacatcttaatagtggggtctgggtaggagagagaagcccttcttgtgccaaactggtcccttatggtatccttcactgccttgctatctgtgtaccttacaagcctctcttcttcctcctttcatcatgaatgactttgctaggcatgaccaattacttctgccactttcccccaaaatagactgaaacacatattccttgctgggctgagtatctctatttttgtataacttcgttgcagcataagaacagaggctcaaatagagaagatttttccctcaagaaaa

SEQ ID NO: 1315 - DNA, 555 bp, Canis familiaris
  misc_feature (1)..(555): n = a or c or g or t
ccaaggattcctaaagatctgtgatctttagatcataccnnncatgtgccgtcannnccggactccccccaaatccccccaaagaccccaaacctccaagttgtcctcaggcagtaaaatctcaatagttctgctggggtaggtgttgggggtaccctgctgctcagacctgagccctccaggcagcagagccccctcctcaccctgtctgttccccaaaggcaagagggaagggataccccagcctgaggcagagcttccccatcttctccctcctgcaggcaggagnnncagggtccagacccttccctgagcccccactaccccaattcctgtctacagggaattaagccctagcccaggatgagaaggggtaagcctcatgcagtatgccttgccggccccagccctggaggaagaatttgctgttactttgaagactactgagtccttttactcctgccctgtgggatgcaacccaaacatctcgcggggggggggggggggggttggaggctggggacacaatactcttttgtaatatagcatttccta

SEQ ID NO: 1316 - DNA, 382 bp, Canis familiaris
  misc_feature (1)..(382): n = a or c or g or t
caccgcctcaaggaagcagnnnggctacctgtnntggcctcttggccatgttggctnncctcccaggctntnnnngaggcagagtagccagccagcaccttgggnnncaagcctttnnnnnagnnnngcctcctcacatagannngttaacatcctgtgggtggaatcacatcgccccnnnnngggnnnnngnctcccccccccccccgcccccctgannngctccccttgagtttgtgagtgaaagaagtggaggagcccttctcacctccgnctnnnnnnaggtcttgtnnncagctctcatctcccttccctggctttgaatattcatcccctatcctcctnnnnnnnggggaggcgggggnnnnnnnagggggctgac

SEQ ID NO: 1317 - DNA, 494 bp, Canis familiaris
  misc_feature (1)..(494): n = a or c or g or t
gccaccacgagactgctcagaagtnnnnnnagtcgaatcaccccggacccccaacagtcctggccctggcagtgtcnaggcttccactnnnctcttccgtcccagctgtcaccttgggatttgaacatgccacttgccctgttctgtgtcccggcatttctggctgatctccaacctttcatctgtatttgtgccttgactgacctcattgattcactcaacaaacatttgttgagcacctgcccatgcggtcctaggagccgggcaagacaactgaggacaccttccctctcccttagagcttccaaccccgtgggcatggttgctgacccttcaggggtcacccagccttgacagagggtcttgctgcttaagtggcccttaaacctaggccctgccctctgcccgcccccaccactcccccttgtccacatgcannnnnngctttaggtgtcccccaacctgtgctttcagactccccttgtgggactggg

SEQ ID NO: 1318 - DNA, 664 bp, Canis familiaris
  misc_feature (1)..(664): n = a or c or g or t
catctccgactactncttcaannnagcagggcttgtgtaccannnnnnannnnnnnnaaacatgaccatcacggacgacatgataccaaagaaatccaaattccgactgacnnncgattttttggggaccctcataccccaggtggccgagatgttccccaacatgacggttcaattcaacgtctgggcctcctccccgccgcacctcaccatgcgccccgccggcctcatcttcaccccgaccttggacacccaggcctttgccgtcctcccgaactcctccttggctcccctcttcgtgcttggcctgagcacgaacctttccatggaggtcagcgccaggcctgacaggcttgtcggacagctcagtttggacaagctgctcctagaactgaagcactcggacgtcggctccttctcggttgcagtgctgcagtctatcatgaactatgttgtgcccactgctgtgcttcccaaggttaacggacttcctgctgtttggtgcagatgttcactacagcggctgaagtcccgaattcagcgtgggtgccggggggctgtcggcccggccaggaggtgtggggctggtggctctggctcctgacccgcccgtggggcacaggctgcctttctccaacccttgaaccagacacccttgcaaatg

SEQ ID NO: 1319 - DNA, 594 bp, Canis familiaris
  misc_feature (1)..(594): n = a or c or g or t
tgcaaattcgaccatggnnnnnnngtgacagtgactttgtaatnnatggnnctcagnctttnnaccccagaaaaactatctttgttgggggagttccacgaccccttcgagctgttgagttggcaatgatcatggaccgtttgtacggtggtgtctgctatgctggcattgatacggacccagagctgaagtaccccaaaggtgctggccgtgtggcattctccaatcagcagagttacattgcagccatcagcgctcgctttgtgcagctccaacacaatgacattgacaaacgggtggaagtgaagccatatgtgctggatgatcagatgtgtgatgagtgccagggcacgcgctgtggcgggaagtttgccccgttcttctgtgccaacgtcacctgtctgcagtattactgtgaatactgctgggcgagcatacactcccgtgcggggcgggagttccacaaaccgctggtgaaggagggaggcgaccgccctcggcatgtcccgttccgctggagctgagnnnngggcagacccagccacaagtactggagtagataacaaggagggaaaaagagagggcactgcnnnn

SEQ ID NO: 1320 - DNA, 551 bp, Canis familiaris
ttcttggcattttgagagttccccatacacttccccatccctacttcacctacctctttctgtttgatttttaagaccgtgaaaaataagcagcacttcacttgggtgtacgatgaagggattaaaaggaaggagacaggctgggggccaagggtgtctcaagcacgtattggcattgggcatccaaagacttgcttttcagggaggagcgtgctcccatccctgttccgtctccttccctctggctgcattttcccaggagcccgcaggtactggtgggctgggagtgggccctgctttccaactcccgttctccacgtggcctggggacagcaggcctcagcctaggatttttggattctgagctctgggcttggctcagctggatagcaaggtccccgcgttccagcaccgttcaaaaacactcttgcattccgatctctgccaggagaggggtgctggcgagagacacagttggggtcagacattttagggaaaccttagtcttccatcctcctgacatgtgctggaaaggcacactctggattttt

SEQ ID NO: 1321 - DNA, 504 bp, Canis familiaris
  misc_feature (1)..(504): n = a or c or g or t
aggatcacannnngagccaaaggcagatgctcaaccacngagccactgaggcatcccagataacagtacctaggacaacctggaggaacaggnnctgcaaccctgcccagctcacctgttatctgataccaccacttagatggcagaatgagcgtgtaacgggtttggaaatgtgcccaagctgaggccgcaaatgcaagaagcagccctcatgttgagaagtgggaagggtaggacaaatcactacttgacgtatgccagtcacataatttcacaacagagtggataaaggaaccccacacaaaaggaaatagaaaaatgttaaagtgaagccactatataacatacatgtttttcatagatcaatcctagaaatataagacatgaatgtgcacccccgttnnncgannnnnnnaagagacagttttacctttatcaagatttccacacttggtttctggtgcacgtgcgtccgtgcccacacacacacacacacacacacac

SEQ ID NO: 1322 - DNA, 616 bp, Canis familiaris
  misc_feature (1)..(616): n = a or c or g or t
tagtcttttatgagataatctcatctgtgacaaannggtaggtaaattgggatatagaaaaaacctagaattttctgcattgtaaaataataagtactgtttatgtttgtatatgtagaatttaacatttgtgtttaattttgctgtggtctagaattgtggtgcttctgtagtggccataaaggcctgaaatgatttattatggatgtcagactttatcatgagaagtcctaggtaatgacttttcttgatggtgggactctgactcatgcatttatcaattacacaaaattatttgcaatagattatttgacttttcagtttttactgaaattttaaacattttgcatgtaaatacttgtatttaccaaagatttaaagcagttgattaattaatccaaacactgtgaactgtctttgaaatactagagaaaaagaaatgttaatatcacagtaacatcaactatactgtataaatagagttctataatacagaaatagtctacattggtatttgtgaaatctatggaagaactttaggattctagcagatggatactgaatgttcaggcccacttaagttattgatgtataaattgtgtttttgtctctatgt

SEQ ID NO: 1323 - DNA, 584 bp, Canis familiaris
  misc_feature (1)..(584): n = a or c or g or t
tccatcatgctggaannnnnngtgtnnnnnnngtgtacactacccagcctgggatccagttttacacaggnnncttcctggatggcacgctgaagggcaagagtggagcagtctatcccaagcactccggtttctgtctcgagacccagaactggcctgatgcagtccatcagcccaacttccctcctgtgctgctgaggcctggggaggagtatgaccacaccacttggctcaagttttctgtggcttaaggaagtgtaaagatgtgacctcctccagggccaggctgggagccccttcagcagcttgtctcctgcccagagagatttagaggctttaaaagtgatcctgtgaatgaaacccacataaagggtagcttcctaatgattagtctgagtattgatttttctttcccagtgactgactacaggtcaggtctatgagcagctctctcctctgtgtagttaagaggactcactgggtggctcagtgattgagcatctgccttcggctcagggtgtgatcctnngtcccaggatcgagtcccnnnnnaggttccccgcacnnagcctgcttctgcctct

SEQ ID NO: 1324 - DNA, 683 bp, Canis familiaris
  misc_feature (1)..(683): n = a or c or g or t
tttggtcnagctctttgttcttcctgttctgttcanngctgttttcntcgcattgatctaannatcattccccacaggattctgaaagttactgatgatacccaggatagaactctcctatttaaaaaataagaatttcacacctcctactttcctattcagcaggcattcgtcagtaacacagtactatttccaggctttcaagtaagcccctttaagaatcaaatcacgacctaaagacagcattaatcacttttctttaggttccactaacatttcataatcagaactatgcttttcaccactaacctcaagcatctcctgaaacattgcgatgtgattccttttctcctttaatcaaagtttgaaatacatgcttcaaacttaaacaaagagcaaactcagcagagtagttatgatattctccagccacttctgaaaaccatttgcaggagaatcaagtagagaatttggcttttaattctatttttgttttatgccaaatcctccaggcaatatgtcctgattcctggccaaaaattatagcatggatggggatccctgggtggctcagcaatttggtgcctgccttcagccctgggtgtgatcctggagaccggggatcaagccccacatagggctccctgcatggggcctgcttctccctctgcctgtgtctctgc

SEQ ID NO: 1325 - DNA, 563 bp, Canis familiaris
  misc_feature (1)..(563): n = a or c or g or t
gagaactcgaggnnttcctgttgnntcgacgttctcccctgcatggtcagtnnctgttttannagcattagtctccatctgctgagcccttctcatttctgtctagttttaagttttgcatagaggcccgtatgtgaatgcactgtgtccactgcaagaccaggagaatgcaaactgtaagaaatgttagcacatgaggaggggtgcaggtccacttctgctagccctcctagctgccagagcagtggagagcacaggtgggtggtttgatgggctcccccgcatgtcagcccctggcataagggagcccagacccgtcgaggtatgaagaacacctagcagggtaggtgtcctgggaataatttattattttttaaaataggactaatgaagcaataatgtgctataatcagactcgggttccaccacacaagcgcctcgtgggcctcttttctatcttgctgtgctatgaagactgttgggtgtaaaatactagtttgttaatgaattctgtgaattccgtgaacagtaatgtgattgaaaataaatctaaaacagctgta

SEQ ID NO: 1326 - DNA, 546 bp, Canis familiaris
  misc_feature (1)..(546): n = a or c or g or t
ccaaactgggcttcaaggtcatctccaannaccttaccaacagccacttcttcttgtttgactttgaaaagactgggcctccgcgggtagggcccaaggctcagctcacaggcctgaagcttcagccatgtctctacaagcgcaggtgacctctgggcccaccttgaaaggggaagcaagtcttgaactccaggctcagaactctgaagactgtatccagccaagctctgactcaggaactggtacatcccttcctctgtcccaagactaaagtgtaatgaaaccccctgactcagcccaactctaagggaggcttcttggttgtgagaggcataaagtcacttgggctagctaaagaataaggagtttattgttaaaatacaagtgtatcggggaattatgagtcttccagatgtgggaactagctggtttggaattccaggcatctctgggtttggctcttctttccatctctcaggagccacatggactttctgtcctgtcatctctactctcttctgatttccatctgctgaggaaatctac

SEQ ID NO: 1327 - DNA, 369 bp, Canis familiaris
  misc_feature (1)..(369): n = a or c or g or t
agtccaacaactcaatggcacaagcnatgaagggggtcaccaaagccatgggcaccatgaacagacagctaaagttgcctcagatccagaagatcatgatggaatttgagcggcaggccgagatcatggacatgaaggaggaaatgatgaatgatgccattgatgatgccatgggtgatgaggaagatgaagaggaganngncgcnnntgtatcccaggtcctggatgagctgggattgagcctgnnagatgagctgtcnnnnnntccctcnnnnggngncncacncagtgtggctgccagtgggaagnnnncagannnnnntgcctcagcnnnnnnagatgccgangcagacctggaggagcggctca

SEQ ID NO: 1328 - DNA, 465 bp, Canis familiaris
  misc_feature (1)..(465): n = a or c or g or t
gcngnctcacctgcnggtgttcccctatncgcttccccccttnnnnnnncntcctcatctccatggctcctttggtggtaggnnnnnnnggctcagcctccccccagcttcctcactcctcagggcaccttgctgctcggcctcaggcaggcttgggcccagctgtgccctccagctgcccaccggatgttccactcaagtggctgtttggactgaccagattgcctgacgtgcccacctgtatctctcattgtctcctgtcaccagaagtggcacctcacttcctccctggcctcagaagcacaagtcagacctaccaaccactccttgtcgcccacggccaaggcctaagtgccctagagccctccacactggcaaacccaagcacatgcctggagctctgcgtcatggcttcctgctcaggctgatgaacacnnnntaacagctgctcannnnngatgcttc

SEQ ID NO: 1329 - DNA, 509 bp, Canis familiaris
  misc_feature (1)..(509): n = a or c or g or t
tggtgagatgngcagnntaccctccccgttgacatatctcnnctatatccaggtttgcttcctgcctccctttaagattccttttggcacattctcttcttaagnnngcaccagtttttcagaaacttagagagggagggcagagtcctttaaaaataccaaaaatgtttacagcgttgggtgctgagctgcagggctcaggcctgaccagtcataaccaaagggtgaggcaggccttgctgactgccacccccaccccaggcctgttagagtagaagccttagccccattcccaaccccaaccccaggactgagcctcagcctaccactccagatccaaccacctgccttctctttgatttctaaagagggattcagcagagaccccactcccaattttcccagctcatctgagctgcctgcctgcccgcccacccgcccgcctcgtcgcagtcttcacgtctcagccccctcctgtctctgtctgggccatgtgtgagcagtgtcct

SEQ ID NO: 1330 - DNA, 530 bp, Canis familiaris
  misc_feature (1)..(530): n = a or c or g or t
gactccttgctgagtgtnnaccccgacatagggctcgatctcgtgaccctgagatcatgaactgagtnnnnaccaagagttgatgctcaactgatnnaggcccccaggcaccccaaacttctctgaataggtgccaactgtagaatgatggtggggagagccagacatgcttggtccctgccttcatggagcttagtcagtcggggagagaatgccaacgaagcatgtttggaatgacagctgcaacgagggcccagcatggcagttggatggcttccaggctcctccaggtgtactcaggatgctgaacgtcaggccctgggacgtcaggtttctcctgaccacactcctgcccaaggccaatgcttgtctcaggctttgtttctagggagcctgacctgctgataacctccctagatggattgttttaaagaatccccgatgccttcatgacccctcctggtggccttccatccactgacaccgtcactccgcttcgtggctacagatccccagctgtctttgctgta

SEQ ID NO: 1331 - DNA, 649 bp, Canis familiaris
  misc_feature (1)..(649): n = a or c or g or t
ctttcctctcctgccccttcccatgtaagtgtanngtcatnactaccactatttccttaaggtnnncagcagggcagaatccattgacaagaagatttctcgactggatgctgagctcgtgaagtataaggaccagatcaagaagatgagagagggtccagccaaggtatgagcagcagcgggacaatcttgcccaacagtcatttaacatggaacaagccaattacaccatccagtcattgaaggacaccaagaccacggttgatgctatgaaactgggagtaaaggaaatgaagaaagcatataaacaagtgaaaattgaccagattgaggacttacaagaccaactagaagatatgatggaagatgccaatgaaatccaagaagcactgagccgtagttatggcaccccagaattagatgaagatgacctagaagcagagttggatgcactgggtgatgagcttctggctgacgaagacagttcttacttggatgaagcagcatctgcacctgcaattccagaaggcgttcccactgacacaaagaataaggatggagtcctggtggatgaatttggattgccacagatccctgcttcatagacttgcatcattcaagtacatcgtgtaaaataaacacannnnnn

SEQ ID NO: 1332 - DNA, 536 bp, Canis familiaris
  misc_feature (1)..(536): n = a or c or g or t
ggctgtgccaggcagacctaatnnacatcagtcatatgcactcggaccatctcagctacccgacactgaagaagcttgctgagagaagaccagatattcccatttatgttnnaaacacggaaagacctgtattttggaatctgaatcagagcggtgtccagttgactaatatcaatgtagtgccatttggaatatggcagcaggtagacaaaaatcttcgattcatgatcttgatggatggcattcatcctgagatggacacttgcattattgtggagtataaaggtaccttctcaccctcatcaataatgaaagagaaaaatgctcctggaaagaagggtgataacagccatctgaaatttcatcctatgttcatcttcttccatcttcacttcccatggaatataatatgttccatccttgtcttagaaaaatgggctatcattcagataatctttccaaagaacatattaactgtaacgttgtctatgtaatgagagatgcaaagcttcttttgtaaggcaacagatattttg

SEQ ID NO: 1333 - DNA, 545 bp, Canis familiaris
  misc_feature (1)..(545): n = a or c or g or t
ggnncaaattgagnnnaatcaagtatagattaaaagtatacaatcannagcaggttaatgaatatctcagggcttatgaaatgtagttaaatttattaaaataaaagatnnnnnattagggtacatagctggtcaccaaatatgaagtcaatctagttatttaacctggaaaataaaattaagtttgcatattactaataatactaatatgtttagagagtggaatcatgattcattgcattttgaggggaaaggcttatattagtactgacaatattaagatagtagatagtattcttgtaggaatactacgtgcatgtttgatatgttgctgaataacagtaattgtttaatgtttaagaagaatattaaaatatgaggatagagtttcatgcagtgatctacatttttggcacgtcaaaaattctcacagccattacctttattttcctttgcactgctagcttttgtgcccttgaagattataatagtgaccaaaatatctgtgcggttaaggcttgcttttggttattattattgaagcc

SEQ ID NO: 1334 - DNA, 498 bp, Canis familiaris
ggctagcagaacagccaaagtgactgtaagtccctgcccaggcaggagatgaagattaccacccgaacactactctcccactttacccctgtggtctcctcatccgccaacaatgccaacaatggtggtggagtgtcaggctgagccaccttttcccagctgtacatagaaggcctggccagcacagaggactttgcctaataggggatggatggaggtgtacaaagtacagaggatggagttctctctgtgggattgaagctatctggcacttccatggcattcagaagcattgaggacaaaacagctgtgatgtttaagtttcatagaattgccaggaaccctcttggggggtagagaggccagcccccagttttacccatacctggtaaaacttcagagattagactctacctggagcctttctcccttgccctgcccttctccctcctttcttccatgtttgttgggaggggagatggttttgtagaaataaac

SEQ ID NO: 1335 - DNA, 534 bp, Canis familiaris
  misc_feature (1)..(534): n = a or c or g or t
ggttcacatgcccatcctgaaccaatcannggnnagagtgatnnnnccaccatgattnncttggattcctcaggattccccctgccacctgaaactgaagctgaggctgagattttggtttggaggctggcgaatgtgtgaacaaaactggacttctattagaaaggcaggaggggaagaatgggcagacatggatcaacgaagcagtcaaggtcatcatgtacaattgtgcaggtcgggaccaacacaagggatttccggctggcagggtggaaacacacaggggctgaagttcaaggctgaaaatgacccaaaggggcttctttttctagttaacataaaggctccatctgcaggcagtgacctttcaactggtgtcctcataccagagagaagagtttataaaggagacagaaaaagagttccaggggagtaggaaaaacgagagggtggggagaatcggtaagggatgagagaattttaaagaaaattcaccattgtcaaaagtcatgctaagaagtcacccaagattgt

SEQ ID NO: 1336 - DNA, 622 bp, Canis familiaris
  misc_feature (1)..(622): n = a or c or g or t
gggnnagtggcttctaaganctctgagtacagtacgagcccacccttgcgtgtcnctgagacattcgtgttgtggttcctcgtncttggtgttacgaccctcccatgcaggactctggctctccatcctctgtgacccggcgtgactgggtgctgggcgaagtcccccttggtgcggagtgggggaagcttgaggcctgcctctggggcgagaggtggacagggaaaggcagggagagtcacggggcagcagagtgagtggcggcctccctccttccatacacatttcccaagctggcagctgctgccgctgggcctccaccactgtggtggagcagcacccaggggctccttttcactgagcagcaatctccctaaggtctgccttgcttttggcatcagagagcaaagtggtcaggctgggagtgccccagagaccactggctaccttgcccagggagcagggtggggtggggaagggctgagctcagtatacacagcagggtctgcaggcagagtctcctggcactgggtgccagagggagggacagcctgggagtgggcaagagataattgtacatagttcagctctacgttatttatagaaaatgtacagatgtgtg

SEQ ID NO: 1337 - DNA, 553 bp, Canis familiaris
  misc_feature (1)..(553): n = a or c or g or t
aagagtnnncctgcccaggcccagtttccagaccactccagccttgctgggagagagcagtggtgctccagccaagaaaatgattggtgtgtgtctcccgccccagagaataggatcagagtctatctagatttttctttttcaacctgttctccatccaggagcccttgggatctggggctccccagcctggctagagctggattcccccccaggttgggaagagagcaaagaggcagggggcggaggagcaggagtacgctttgaatgatgagggtgattatttcagtcgtgaccccgactgggaggcttggagagttgactcaggggcctgtgcccactgccagcaggcagagacaagacttcggacaggtgcccccgatgtgagtgtcccttttggggaaggggaaggagggatgctgcatttctcagctgggcagtaatcaatttaatggtccttttaaaatgtctgtgtattaaaaatttaagaataccacactttaatattaaatattcataaggtctagtatcttgataataatgtagatgtttt

SEQ ID NO: 1338 - DNA, 629 bp, Canis familiaris
  misc_feature (1)..(629): n = a or c or g or t
gcgacannagtagaactgcaaaagaacgagtgggacccaatcatagaatgngncgagaaaagatatgatgtnnagatcggctcttctaccagcataatggggcccagcatcccagccaggactcgagaagtgctcatcagtcacctggcatcttataacatgtgggccctacaagggattgagtttgtagtgacccagctcaagtccatggtcctgaccttgggcctgatggacctgcacctgacggtggagcaggctgtgctactgtcccgcctggaggaggaataccagatccagaagtggggcaacatcgagtgggcccatgactatgagctgcaggagctgcgggcacgcacggccgccggcaccctcttcatccacctctgctctgagagcaccacggtaaagcacaagctcctgcagcagtgaggcctggcccagcaggatggaggctacatggccactgcacgcccccccccagactgtgggggtgagagggccagctcggtggtactctgaaatgcccctgggacccagaatgcctgtcaaagtcagctcgagtccaacccaggtgcccctaccccagctggcagcgagtgagcaagcgggccaagcatatgagtgacttt

SEQ ID NO: 1339 - DNA, 588 bp, Canis familiaris
  misc_feature (1)..(588): n = a or c or g or t
gcatatctaaaagcacagaagcctcagagctaatgggacnagtgtaggtgacctgcagaatgttgcagaggtcgtnnnnnntcagaagaatgtctgggaaaagatcccatgagagagaaactgatttttctaagaaagttgaggtctcagactcagtgttgtagacttgtttccagatactttaaaagtagcttctggtaaccagagcccccagtctgagggtgaagggtctaatggaggctctgcagccttcctacaggtctgggggttctcttgggctgccatgtgagcctgctggcctggcatcttcctactggcctctgccggctgcaggccctcctggttctcacggcgagtagcagggctcgtgtgcatgcgtagggatctggtccatcctcccgctgtccagagccctgggcccccacggctgactacccggggcatgtgtacaacgtggtctgcatggcgaaaaaaagtcatttcctggagacttcctaataacctctctttacactggaaatgctgtttctgctgtgacaattttttagtctgtcaggtcttaccttctctctagaaaggaattgctta

SEQ ID NO: 1340 - DNA, 452 bp, Canis familiaris
  misc_feature (1)..(452): n = a or c or g or t
ccttccctcctgttgcttcctcctgggttctaaccctcctcctcacttgtccctcgagcctccctgtgaccccgttggggcattgcccttggccggctcactgtgctgttacctggctgttacctgcacagagcagtttgctgcagaaccacaccatcttcgccttttgagaaaagatcaagttggatgagccactcactatgatatgtcagnnnttcattggaaatttcgaaaacctctcaaatcatccttggtttggtaaatgacctgtcaacctgagcccagcacgaggaaaaaagcttctggagtcgcccctgtccccactctttgttttgtcatttctttgtacctccaccagctctaaaaccctacgtggggggatctccggggggctcagcggttgagcatctgccttcggcccggggcgggaccccggggtcctgggatcaagt

SEQ ID NO: 1341 - DNA, 628 bp, Canis familiaris
  misc_feature (1)..(628): n = a or c or g or t
gctgaaaaccagactagnagaaaaaaatgaacacttngagcaangactcatgatagnacaacnnagcaaaatgttctttactactaagcaccgttggtatcntcgtngacagtatcatagacgtcgtaggaaactggatcctccaaaagacagatgatactgaggttttcaggaatcaaaaannntgttatcttgtgtctcatttgccatttgagaaacgcaattgagtattttcactaatatgttatatagcaaaataataataaaatgtcttttcatatgttagaatgtgtatttctttatatataatagggaattgtggatttgacattcttatttacagaaacctatttcatctttgcttttgagatattaaggtctaccatttatttttatgtgtctagtgtgattaagtatttatacataatcagtcatatattgttagtagtataaatatgattaatagaaatgtgcatggttctccttctcaaggagattttcaaatagcttttgaaaagaaacgcatgaagtccacccagaaaataaatgttacaattctttgttgtggcttctaggaaattattaaattactgttgactcttgaacaacatgagtttgaattatgtgg

SEQ ID NO: 1342 - DNA, 591 bp, Canis familiaris
  misc_feature (1)..(591): n = a or c or g or t
cgcttccagtgacnagggcacagtccatatctttnnnctgaaggatactcgcctcaacngtcgcnctgcgctggctcgtgtgggcaaggtggggcctatgattgggcagtacgtggactctcagtggagcctggcaagcttcacggtgcctgctgagtcagcctgcatctgcgcgttcggtcgcaatacttccaagaacgtcaactctgtcatcgccatctgtgtggatgggaccttccacaaatatgtcttcactcctgatggaaactgcaacagagaggcttttgatgtgtaccttgacatctgtgatgatgatgacttttaaggacactgtgggttgtgcaagggtcctgcagtggcagcagattgcaaagccttcaggggatcaggagtgctgtggaagctaccagcctgcaagcattaatggggcaggtgcccaccttccatttggcagcactatgcctaaacagctcacttcccccaagcacttctcgtcactgtgtgcctgcagggccaggccagggacccagggagggagcagacctcctggggctcccagcctgaagaagactgctagggacccagagggag

SEQ ID NO: 1343 - DNA, 518 bp, Canis familiaris
  misc_feature (1)..(518): n = a or c or g or t
tcaggcacccaagaagctgaccnntacagagaaannccgctgtgcctccntnnnnnngatcctgtccnggcgnnacgctgtccccccctgcaccaacccgctgcggcccgannacccccccaccctccttccgccccacccggcccagctgtcccggatccaggacctggtagccaggaaactggaaaagactcaggagctgctggcagaggttcagggcctgggagacgggaagcggaaggccaaggaccccccttggtctcctcctgattccgagtcggaacagctgctgctagagacagagcggctgctgggagaggcgtcgtngaactggagccaggcgaagagggtgctgcaggaggtccgggagctgagggacctgtacagacagatggacctgcacagccccgactcccacctcagaccagctgctcagcacagtcagtaccgcaagagcctcatgtgagggaaggggctggcatctggaactcggggggctcggactcttacctccaagt

SEQ ID NO: 1344 - DNA, 673 bp, Canis familiaris
  misc_feature (1)..(673): n = a or c or g or t
aaacaccaaatggggtnnangaatatgagaaagatacgtggtccaaagctatctggttatattttgatgttgccaatattgccaagccaaatttttaatttgcttatttaatgtttgttggccagagatctatttttatatcaatgtgccttgcatgtatattaaaaaagtttggaaaggccatgtagtaatgcctaggatagttgacggttcttaccacctcactaatttttatgcagtatgaaatgctcattctatcgcccaactggtgctctctgtttaaagttataggtcttgtcacaaactggaactattttataaactggggaagtgatttaatttactttttttgttgtttctttttttgttcttaatctgttagtggctgttctgtagtgggaaatagtaagaggattcttcgctcccttaccctaccccctcagcaccttcttcaagtaatgtgatgacaccatttcttgtgtgctttgaaaaaagtttcagcttgctgtctcctttagtgttataaaannnnnnttataaaaagnnnnnntttgcaaaatctagggagataatggagtccactttaatttggaattctatgtgagctatgatcccaagttactggctctttccaacttaaaaaaaatattgtaaaagnnncttggcttagaaa

SEQ ID NO: 1345 - DNA, 195 bp, Canis familiaris
  misc_feature (1)..(195): n = a or c or g or t
agtcaggcntgtttgggacagcaggaggaaaaaattctccagctgnagagggaaggggtctggtncaggctctccccatccccatcccatttttaccaactggggtgccatgactnnnnctccagnntctaccagggacgnntccatgccacggctgctttcaccaagctgtctcagacaagtggggctaatgta

SEQ ID NO: 1346 - DNA, 584 bp, Canis familiaris
  misc_feature (1)..(584): n = a or c or g or t
ctatctatcatggttcatatgttttttatcatannnaaaaacaaccaccatctggatcacctaacaagccagtaagaggttagtatgtcagcgtgtggcctgttgatggaatactgaggacctcttccatggtgactgtgcgtccaaataaagtgcgtggcgtactggaagtgtgagatcaggtaggagtgtctgggccagctcagcgacagacactaaagcctcgcggtcacgcaacctgttgtggtgtaggtttctctggaacacttccagctcggaccagactccaggggttttcatcgccttcattgtttcagaactctacttgtaacattgaggctccagtgtggggaaagagaggccaataagctaacgacgcgccctctgatattctgcgccattttgtgggagaatcttacctgggttggatttcacagacaatgagagttgtaaaataccagctatgagaagctagagtatgtgatggcatagagttttcattagctttatcacaatattcacgatggagaattatattacatggtagcagaaataggcatttnnntgtgttgcttatattttac

SEQ ID NO: 1347 - DNA, 545 bp, Canis familiaris
  misc_feature (1)..(545): n = a or c or g or t
gggggcatgttagncgtgacgtgctagcgctggtctctgtgtgtgcctcgatggaactggggtcacactgtggctggctggctttgcccaggttgatgggcccattcccacagagaacagggggcttgagaggagcaacatgggcccagaacctggatcctgccaccatggaaggaaacggggtttctaatcctgctgccagtgctgagctggggctgggccttctgtctgtgtgaccccagtgctggccctcacccccagcccctgggcaggtgactggggcagccctgtcacctgcaggacacaacactgaacaagacccgcccctgtgggtgtccccaagtgtcccctggccccagggcgccctccccctgcttactcccaggacagacaaggagggtgtctggctggccagcagggtatatgtcataagggcccctcccccaagaggggtgacccagggacaggttctagggccaggtcatcggggtgactgagacaccaggcagtttctggggggagcagaaacctagtctccttgtgat

SEQ ID NO: 1348 - DNA, 542 bp, Canis familiaris
  misc_feature (1)..(542): n = a or c or g or t
ttttattnnggtttnnggnnannataatgtagtaggnnnaaaaatgatnnnntctttccaaggtgtctatgccctaacccccagaacctgtgaatgtcaactctatatggcaaaagggattctgcagatatgattaaggaccttgcaatggggagattattctggattattcaggtggacccaacctaattacatgaagctttcctggctgcagaaaaccagacagatggttcatgagaaagactcaaccggctgttgctggctttgaagatggaggatgggtacatgagccaaggaatggtggagcctgtagagaccaagaatgaccttcagtttacagagggcaagaaaatggggaccttggccctatcaccacaaggaaatgaattcctggccagtgcccacgccgtgcctgacacctgcaggccaacagcctgatggagcaggaaatggaaacctaggaattagttctaggttcacctagagcctccagaaaggaatgcagccttgctaacacnnnnnntttagtctgatgagacctg

SEQ ID NO: 1349 - DNA, 471 bp, Canis familiaris
  misc_feature (1)..(471): n = a or c or g or t
gcgtgtgantgcttgccagaaaactgcacatgactccagtgtcctgcacgttgccaaacttccaaacaggtttttttaacatgtggggatttngacgagtgaacaaacaagccagccagcctattaaaaagcagcaagaaaatgctactccatgttccctggagcttattggagatttgattggacactcctcgtctgtggagatgtttctgtactttgaagatcacggactagtgacatgctctgctgaccatctcattattttgtggaaaaatggagaaagagaatctggattacgcagtttaaaattatttcagaagttagaagagaatggtgacttatatcttgctgtctagttgaaggaatttggagtacatgtgcatgaaccttgaacatcaaatatagggtaatattcaaatttgtaatgtattatttttttttaagattttatgtttgaggggatccctgggt

SEQ ID NO: 1350 - DNA, 589 bp, Canis familiaris
  misc_feature (1)..(589): n = a or c or g or t
tgcgnagtttcannnnagcatgtcaagatgaaganncnnnnnnntngnagaccgacnannnnacatggtagatccttttcatactttatnnnnaattgctggattgtcacttttgggagaagaacagattaaacctgttagtcctgttttttgcatgcctgaagaagtgcttcggagagtcaatgttcagcctgaactagtgagctagacattgatggagatacgagataatgcttagtatagttttgccatcttaacatttctgtaaagtgcttctcaaatttaatgactactgtgtcactattttgtatatgaattgtattaattttaataaattatgtaattatacatactgtaaaataaagatctttatcttcagctttagatttttttcctgcaatgctgttatcctgagtacagtattttgtttctgcttaagtgtatttatttgtatgtttccttaacagtaaactattgacttaaagtttaagtcctgtgttctacttgattttcccatgtgcttctttcatgtcatataataatggttaatgtaaattgacctgtatcaatgagaatgtaaaatgataaa

SEQ ID NO: 1351 - DNA, 654 bp, Canis familiaris
  misc_feature (1)..(654): n = a or c or g or t
acttcntgtcaacaatgtnntcttccatcaaaacggtgtatnncgtgctctttgacagcgagagtataggcatctacgtacaggaaatggccaagctnnncgccaactaggctgaggaactacagagccagcctgcaccgtgcccctgcctccaccttgcaagaaagaaagaaaaatccccttcactcctgttgggaggcgggaccctttcatttccaattttgctcatctagggaaaataaggttttggtttccagtttaattgtttttgaccttctaaaatgtttttacgttagcactgatagttggcattactgttgttaagcactgtgttccagaccgtgtctgactttagtgtaacctaggagattttatagttttattttaatgaaatcctgcttgacgcagaacagcggggagagcagtgtcttctacgtgtggccgaatccaggaagcctgttttgtaaccgtgtgttgtggtgctttattgtacacccagtggcgttctttttactataatgttcctttttttttcctcaagaagaaaaatcatgaatttgcagcagacttaattttttgtttactttttgtcttaatgatggatttgaaaatgaaagatttaaaaaggcagaacagaatctgttgtccttaatt

SEQ ID NO: 1352 - DNA, 576 bp, Canis familiaris
  misc_feature (1)..(576): n = a or c or g or t
ttggagcacaggcatgcagctcaggtacaatataagccaactngaggagtggcttcggggaaggaacctncagcagagcggagctgtccagactctggagnnnnngatccaagcagctcaactcctgcagttaaagaagaaaaccccagaggatgcggaggccatctgctccctgtgcacctcgctcagcacccagcagattgtcaaaattttaaacctttatactccagtgaatgaatttgaagaacgggtaactgtggcctttatacgaacaatccaggcacagctccaagagcggaacgaccctcagcagctgctgttagattccaaacacatgtttcctgttttgtttccatttaacccgtccttgctgaccatggactcaatccacatcccagcctatctcaatctggagttcctcaatgaggtctgacaaggtgcagtcccacctgtggctccatttccagtgagagcaagaaggaagcgtactataaagtgaatgtaagagtctgtaaaagtggatcagatccgagacagcctgtgcagagtactgaactcttcggagtaagacatatc

SEQ ID NO: 1353 - DNA, 627 bp, Canis familiaris
  misc_feature (1)..(627): n = a or c or g or t
tcagagaccatctccttcnncanagtcactnnnnnggctcaggacganntgaggaaggtcacacgcattgcctactctatggtgaagcagtttgggatggcaccaagcattggacccatctcctttcctgaggtgcaggagggcctcacaggcattggacggcgccccttcagccagggcctgcagcagatgatggatcatgaagcaaaactgcttgtggcaaaggcctataggcacacagagaaggtgctgcaggacaacctggacaagctgcaggcgctggcgaatgctctgttggagaaggaagtgatcaactatgaggatatcgaggccctcatcggtccgccacctcacggccccaagaagatgatcgcacctcagaggtggagtgaggccgagagggagaagcaagacgctggggaggaggaggcacctcagcagcccccacttcgaggggatgagccatcttggcccaaatagttggacctcctcaactgtgtctgcgggaatgtgatgttcctgccagccgcaggaaggaactccttacttagtgccaccacccaccccaccatgcccgtttctcccagcccccactggtctctgaaaggcttctgggatctatttatt

SEQ ID NO: 1354 - DNA, 619 bp, Canis familiaris
  misc_feature (1)..(619): n = a or c or g or t
agtgggtgcccccgctggganctgcctccccctgcccccagcccacctccctcntgtgnnnnngggctcctgttccctagaagactttggctgnnnnctctgcacccagggtggccnnttagtttggcccgtgtctctgtctctcccccagggccatgtgctggatgagggaggtgggggtgtcactggcggccaggggtgggatcgaaggcgacccttccctactctcctgtccatggaggccttccttccctggggctccctcagctgggccttcatggcttctcttctgtcccctcctctgtctctctttccatttcactccggggacccctgcttcttcaccttgcccactctccttccttttctgtcctctttcccctcttctccttgcctgaggccctacagcccctgccccttcctacacgacctggttgtggctaggttgtggggatggcagggggaatgtgtgtgggggggccaggtattatatataatgtatattttttcatgttgctgtgagcgcaacccctgtgttctgtgtgtagctcacagccttgtgtgtgtgtgtggcatcgtcatgtcctggggtgggggtagggggatgggtgtggtgagg

SEQ ID NO: 1355 - DNA, 719 bp, Canis familiaris
  misc_feature (1)..(719): n = a or c or g or t
agggtnnggtgaaaagggttcaggcattcctnnctgagtgtgacactgtnnagcagaacatctgccannagacagagcggctgcagtccacaaacttggctctnnccaagtgaggtgaggcnnagagaggctgggccgccctgaagaacagctccaccagctctgccctctctgggacagaagtgacctgatttcaccagggccgctggggacaattggccacttgccagttttcctgaacctacccctgttctcgatgaacaagtgttgtctgcagtcctaagtagagcccctgtctgttttctcattgtttctctgtgtggctgcgctgtccagcagcctaccttgtctggagaggacctcccctgccaagtcttccccgctctttcgacctttgggtacttcccttgggttggcagaacctctcatttgtgttggagtaattctgggtttatagccccccggtcctcagattcatgaggcctttttgcccttgtgattctatagccggtagatgtaacccagaatcaccaggaagttacatctagtcaggaatggtgggagtggttcagaacaggtgtttggcacacggagtagtccaaatatttcttgatttgtaaccgaattccggaacagatgtctgggttgttggttcacagacctcaccacccggccacaggccatgagatctcagaggcccattcctggggtggggcttg

SEQ ID NO: 1356 - DNA, 424 bp, Canis familiaris
  misc_feature (1)..(424): n = a or c or g or t
caaacgacgatcccagtgcttcccacaaaannnaggaggttctcaagtcctgcctgaaagaggaggagtcatttaacatccagaactccatgtctcccaaactggagggtggcaaaggtgaccaggctgacttggaggtgaactgtcttcagaacaacctcacctaaagcagagcaagaagagagggaatgggggagggcagggggggggtggcaggggaagaaacatgacctcctcttgtacagagnnnatttcttgtaaccatttgttaaactctcttctttttctngtctcatggcatgccttgatgtattttgtacaggagggagaaaacacaaaataagcaaagaacctgaacagaatcgcatacaccgggttgtttcgtctgtgctgtctgtatattgcttctgctgctgtgatttct

SEQ ID NO: 1357 - DNA, 600 bp, Canis familiaris
  misc_feature (1)..(600): n = a or c or g or t
gagaggggaacgtgctgttccacagttncntgcacaagaccgannannagctgcannncatnnnnnnagccaaggaggagaagctgcggctgaaggcccagaggcangaccagcaggctcagaacgtccagcgcaagcgggagcagcgagaggcacacaagaagaagagcctggcaggcatgaagcggacgcgggcagaggccagtggggatagcgatgctgaggaccctggtgcccccccggagacagagggggctggccagcaggaggaagaggaggacgaagctgagtatttccgccaggcagtgggagaggagcccgatgaggacatgttcccgaaagcagccaaacgcggacagttcaccgggcccccaggcaagaagccacgaggaaaagagcggaggccagatggaggcacttaccacaggccttcaaaggccaagggcaagccccagcgggaccaggccaagctgggacggagaggagctgtccgggaccgcaggcgaggccaagctcgaccacctaagaaagtagtctgaggccaagctggagcagcggatggaataccccaaattggggcccaaagacctgctttggact

SEQ ID NO: 1358 - DNA, 668 bp, Canis familiaris
  misc_feature (1)..(668): n = a or c or g or t
gcactatacnaggnntatgcctgatattgacacgctgatgcaggantnntctccagagtttgaagagctcttnnncaaggtgagcttgccnacagccgagattgactgcagcctnnnngagtacattgacatgatctgtgccatcctagacatccccatctacaagagtcggattcagtccctgcacctgctcttctccctctactcggaattcaagaactcccagcattttaaagctctagctgaaggcaagaaaggattcacccctccatccaacccctcttcccaagctggagatgcagagacattaaccctcaactgagacacccccaggtctccccgttctgaatctgagctggctcctgtcccccaactgaggagagacagccaccagctacacggcggccacacggcggccatgccgcaccacagcctgttgcggggacgccgatgtcctgctgccctctgcctctctgtgtgccttccgtgaatggcttctgctcatctcgggttttcttgccacgggaattgtatctatgctgctgtggggacttgagttataaaatagaaggattggatgtgtggggttccagggtgctcaggctgggaggaaggcttaaaagatgttctctttgagatagcgatgcaattcttttctttcattccta

SEQ ID NO: 1359 - DNA, 521 bp, Canis familiaris
  misc_feature (1)..(521): n = a or c or g or t
aaacagcagcgctgtgctactccagtggcacgaaaaggcattnnnagtaggaggactaggctccattataagagnncttacagcaagaaagactgtttaaaaaaaaaaaaaaaggactcatgttcccttgagaagaattttggatgcacaggctgatgaagaagggattgacaatggaccatcttcctaggaactcccaactaaactatttcaggacatgcatccgctgaagtgtattttattttcaaggtggagggagaaattgtttcctaaatcctttgcaggatctgatagtctatgcctttgtccatgagtaacacagaactgacatcgtaactgtctcctggagtggctggccagcgttggtcggggtacctgtgtgctctgcctatttcaaatgggggagggatgatcgggcacatacagatccaagggctgtggtaaaagggagagcttgttttttttgaagtagtaaaactgagggttnnnnngacatcccgttttcccngagaagacgggct

SEQ ID NO: 1360 - DNA, 625 bp, Canis familiaris
  misc_feature (1)..(625): n = a or c or g or t
gctgcagcacatgctcaagtaccccctgctgtgccgctcttccangnnnangctggataagcttcagaaacactatgttcccaannngaaacgggcccagaggatccctgttcccccacctcnnaagactcgagcccagctgctggatgacatcctcatncgcatgcgggatccccggaacattactgaggctcctctaggagctgtcctgcgccagcggactgagcagcgactgatgaaccagaagcaatacctggaggccaagaggctgctgaaggagtttcgggcccgctaccggcaactggtgcactgctcactgcgaaccatgttcagggccgcggcgccgcccccaggccgcccggcactgcgtgagggccagcctaggttcagccgcttcctccagttcatggatgagttctgccaggagcccacggctagtgactcgaaaggctaagggctgcgcacagggccatgcacactgcctgtgccctctgccctttgcaggctccgagccccggaccgcaccttggggttgggtggccaggtacaggcctcagaccttggcttggccttgcttgctggctgcagagaggggggcactggtcaggacctcccctccccagcc

SEQ ID NO: 1361 - DNA, 631 bp, Canis familiaris
  misc_feature (1)..(631): n = a or c or g or t
ctcaagggccaagcnnaagaggattcccccgttttgannagctgtagtgtgnnangcactnnntgcnngtcacctgttcatgnnnnnntganacggctgnngnngatgccatgcccattttacagacgnngtcaccgaggantagagtgattagatgnnnnntccccaangcacccagcttaaagatggtggaaatatttgaatttggatctgtccaagtgcagagggtaccagagaacagcaataggactgaaacagaatgccacagtngagggaatggcctgggggcagtttgatgcctaattggcctggaaatggcagggcctttgcagggccagggcgtttacgattctaagagaagggtcactgggaaaaaggaaggatccaggggattggaaccactgaagactcagattttaaaagcaaagtaagaaatccgataagtgaacccaaagcattaatttctcagcaaactttatttaaaagtatcctttttacctcaaggttactttacttcagctgtttgaatcaagagatgtgctttttggtttaattgttacacggtagcagaaaatttggcaatttacagtttggagccagcctccctgagagccacatggtggcagtgttt

SEQ ID NO: 1362 - DNA, 508 bp, Canis familiaris
  misc_feature (1)..(508): n = a or c or g or t
aatgtcaaactacatcttgcaaaaaggcaaggtaaatctcacaggcatctnnagagcaaagaaagaaagaaggccaaatctgacttatgtagaaaggacaacattcattgggactgtgattacagttatacacagaataaagagaaatgcacaagaaagaagaaggtatgtcattatgagtcagaaaggtcaagttacttcccaggccgacttgagttatcaaagccttatcaagaggatatcagcttccattttgaaagaaaacaaaaccagccatttttttatgcctgtataccagcagattcactggagattataccccaaactgttcgctggactattcccccaagaactttaaggaagacaaacttcagagttcctctggtggcaaagatttcaagttctttcgatatatggacttcatccaaaaagttcttggagtccctcttggggtccttcagtccagttaattcaaattgataggagcatatgtagattcatctgaagt

SEQ ID NO: 1363 - DNA, 377 bp, Canis familiaris
  misc_feature (1)..(377): n = a or c or g or t
ggctctaccatggagtgactgaatnnntagggatggctnnggctgacacagcnncttccnagtgggtcagtaggccagacccacctccaccccttggagtttggggagaactggacctatactaggattgcagtgaaccaaaagagaatttggctccttacatttggttcactgttaactcttccaccacaaggctgaccatcaggcctggaggtcagatcttgatggatgggatccctacatagttcatcacggaggcctccagttctcctgtgacccagacatgcccactccactcccagccccccatcctcacactgaatgtctcctcaatagcagattgtggtggaaattatnnncgtgtgcctctatttatt

SEQ ID NO: 1364 - DNA, 477 bp, Canis familiaris
  misc_feature (1)..(477): n = a or c or g or t
cccctgctgagcgtgatgatctagcctccatcatgaagaagctcttgaccnnntntnacaacctatttgagacatcctttccctactccatgggttggcacggggctcccacaggatcagaggctgnnnccaactgggatcattggnnncttcatgctcattactaccctccactnnngcgctctgccaccgtccggaaattcatggttggctangaaatgcttgcccaggctcagagggacctcacccccgagcaggctgcagagagannaangatgcttcctgaggttcattaccgcctggggcagcagaaggatagggananannnnccatcgcctgaccacgnnnnnnnnagggnnnnntgcttgagggaaccagggccgagggttgggaagatgtgggatcaataaaactaaattgtgtttctcaaacttattctantgacagaggagtangaacnnnntncttggggatct

SEQ ID NO: 1365 - DNA, 487 bp, Canis familiaris
  misc_feature (1)..(487): n = a or c or g or t
tgaaacgaccaacaccaacttttcactctagtcgaacatccnttgctggtgatactagcaatagctcttccccagcctccacaggtgccnnnacgaatcgggcagaccctaaaaagtcagccagtcgccctgggagtcgggccggtagtcgggccgggagtcgggccagtagccgacgaggaagcgatgcctctgactttgaccttttagagacacagtctgcttgttcagacacttcggagannagtgccgcagggggccagggcaactccannnnnnnggctaaacaagncttccaaaatcccgaccatgnnnaagaagaccaccactgcctcccccaggactccgggtcccnnnnnnnaacannnnncaagcacccccaagcctctatccactttnaagcctgctccgtacattgggtgtatatttattctgaacaggagaagttatattgttaaaagtgtaaaagaataattgtgttatgaag

SEQ ID NO: 1366 - DNA, 570 bp, Canis familiaris
  misc_feature (1)..(570): n = a or c or g or t
gatctatgatgtgggctaccagtacnnnnaggcggtgttcgggggcnnnnnncgnnncgacatcattgaaaagatgctcacggacnnnaggnctgctgacnttaacgagagnngncgtgcgnacgtgctggccttccccagctctggcttcaccgacttggcggagattgtgtctcggatcgagccccctacaaccagctacgtttccgatggctgtgccgatggggaggagtcggactgcctgacggagtatgaggaggatgcgggccctgactgctcacgggatgaaggggggtctcccgagggcgcgagccccagcactgcctctgagatggaggaggagaagtcagttctccggcaccggcgctgtgtgcccctggagcctcccaccacggctgcggatgcctgaggacctcgagaggggtccccctggggctgggtcagggctgagccctgtgagggtggctcactcctctgcctgctgctattcctgcgaccctcctgggtcccccttgaacccaagcccccagggcccacacactggactgccnnnnccccaaggggagggac

SEQ ID NO: 1367 - DNA, 126 bp, Canis familiaris
caatagattcctcgaccactctcatggcaaagcacctttagtctgttgatactggagagaacaagatcccccctaccttttctctcctccggagagcagttcttatgtgcgtgctgcagtgatctt

SEQ ID NO: 1368 - DNA, 514 bp, Canis familiaris
  misc_feature (1)..(514): n = a or c or g or t
tgtacagctctgaaggtgagccatggagtaaggccttggntattngaattaatccatggaagacatnnaaaatggtcccagtgattcnnnaacgtttnnnatctcagttggcaaccatcaatctggaagctatgtctggtncttagagatcttggaacaagaaaaatcaggaccaaagtcacttttgtcccacattccagaagaaaagcacctgactggccagtcagcacactcctaagaaagaacctggccgagtctccaaggtggccacagaggagacttctggagtttgtgtctttcacctgattcccaactacagacttctgttgctcatcaggaaatttctagtttgaggaccaggccccagctgccatcactgggtttggaaagcaccttaattgaatcatgggagcatcaggacataagtagcacttccttatcaaatttgggagccagagacttcaaagcacttctaagattcattggttgactcnnnnaatagaaactgaagttt

SEQ ID NO: 1369 - DNA, 506 bp, Canis familiaris
  misc_feature (1)..(506): n = a or c or g or t
annctgggnctgaattttcttttcctactgcttaacagccaagaacttgattgctcaactcaattggcgctgtagacaccctgccctcctgacctttactgccagctgaagtcttagagcacaagcccgactcctgcatgttaataccattgacagagcctgtccctaccccaacctttattttctatctgtttaaaggcattatcctttatcttctctgtcccccaacacccccacacccagatttctgattctctgagtttctgctttctctgtctatgcccaactagacaggttagtaggaaaggactttttcaaagcaggaatatgctgaagatacatgtacagcagtgaatggttaagatagtagctccctctctccccacaaaactactagatcaaaaaaggaaagcacacccaactcagaatctgtgaacctacctgacatcagaggggagaggctgtataattggcatcttnnnnnggaagacgcaagannnnnnaca

SEQ ID NO: 1370 - DNA, 514 bp, Canis familiaris
  misc_feature (1)..(514): n = a or c or g or t
ggcccctgnnntgacctgccagtacactgtccagttttttcccgactgccttggagactttgatgattttattttagnnnngacccaatcagctcacacactcctgatccccttgcaggccaggaggccacccccagtgctgacgctgtcgccagttttggattgtggttactgcctcattgggggaatgaagataaccagattcatctgcaaaaacgtgggcttcagtgttggcaaattctgcattatgcccaaaaagagctggccaccaccaagtttcagggtgagtgatcacagaccactacctggagcaagagcaaatccatcaaaggaaatccctccacccccatcccgtgagggatgtcctagagtacacctgtgaggggaaacatgcagagaaaagatttgtgtgactctctcccagctgccatatctaccatgtatggagaccagcactgtagttcttgttatgccacctgtgtcacccgggcatgttnnncaccttccttatcct

SEQ ID NO: 1371 - DNA, 176 bp, Canis familiaris
ccgcctttagactatacccacaatggttcccctggcaaaatgactggaccctgcccgggaggggtgctggccccttgcggaggggtgacaccagagctcatgtcttaggacaaaggtgagaactttgcctgcagagccagcaaatgtcacccaagctaggagcaagatctgacctc

SEQ ID NO: 1372 - DNA, 635 bp, Canis familiaris
  misc_feature (1)..(635): n = a or c or g or t
tcgantcagtgcccccaaattcaattctgtggnnncaaaatattgagccagnngtcaccgctcggntacatgactggcagacaaaactcnnnntcgnnnnnnnnnncgnnnnnnnnnttgttgttgttgttgtttgtcatttccacccgcacagccttattctcataattaaaccntgattcattttctctttggtgttagcaaactccaacagcagagatggcatctgtgtattgataattggcatttaccctggcaggaggctaatcggataggctggtctcagacgtggatcctaccatctgatatttttcagggaaagaaaaagtaaatccctttccattctcctcctcgcaaatctagaagccctctttaccaagagcatcacatttcctctgtaatccatcgactcacagaaaattgcatcatggggagggcggaggggggtggggtggggggtggaggggagggcagtccttccaggccaggctgcagttcttgcccctttctgcttctgacatgagatgttaatgaatcattcatcaggctcacatggggttaggggacactgaactgcttttccgatccatgatcaatcatcgttcttctaagagattggagctttgctgtttcat

SEQ ID NO: 1373 - DNA, 451 bp, Canis familiaris
  misc_feature (1)..(451): n = a or c or g or t
ttgcctgctgctgagaatgtgtgagcaccccccaggnnctnntnngatggatcattccttcgcagccagaccaactgacgacagcttgacagacattcccaagggcccctgcggctcctggggagtgagctccagccctgcccccgggcagagcaaggcagtattgctggggacccacttccctccctcgacagcccctgccaagccaggtatgcggcctgcagccccagcccacagcaaccgaagagtccctgtggcaacccccccgaagccagcatggaggtgccctttccggccccccgcagcccttgcccccaaagcctgactgtaaatactgtaaatgaagctctgtttgggtcaagcttccctctttccacccccagactttggcctctcagtgaattgtctccctgccatgtcgggcttctcnnnnnnatgcttcttccttttt

SEQ ID NO: 1374 - DNA, 510 bp, Canis familiaris
  misc_feature (1)..(510): n = a or c or g or t
tnntacggatgtttgtggcaactcttnnnagacatgtggcagtgctgcaaggtnntgagcccactgcgatgaaaannagaagagggagctactcctcactctccctgtagtgccaggaggaggacaagtgtcaggaggaggacagcagcaaggaaagcccagtcttggcacctggcagacctggaggagcttctgcaaatccagatccagctggagaaacagggggacaaggccccagagcagatggctgccctttggtgcccacctggctgtgaacgtcgtgaggagctctctaggcagtgggcccagatgacaggagccaagcagggcagggcagtggcagggggagctgaggggtctcttccctggcacacaagagctctatgggaaccccctaaataacgtgtgtgcaaggcccacagtagcacactgaagagaaatactgtttatttctgctaatgtgaccctatcttagcctcctggccaatgtggctttggatgcatatgatt

SEQ ID NO: 1375 - DNA, 517 bp, Canis familiaris
  misc_feature (1)..(517): n = a or c or g or t
agctcccatagtcctcatnnnnnnaggnnnnctgctcttcaagctgtaccccatngacgaggagaannnnnggcagaacannaaggccctgcaggctctgagggaagaggccagcagctccggctgctctgacacagactctacagagctggccagcatcctctagggcctgctgtgttgcccgaagcnactacccacagggcctgggnnncagaccacaggagaaatcagggcctgcttgcctgtttgctgattagctggtctccaggtgccagaaagggagccaaaagactcgagagtaagtggcccaggatacctcctgtgcctaccatggggagggctgttcatacagccacctgcnncatgtctgcctgcccacggggccaagcccaggggctgctactgtgaatatgccaaggactgatggggcnnnncccagaacactaatgtnnaaacgttttatacagagactaattaataacttaatgaccatgtacatagcnntgtgtgtgtatgt

SEQ ID NO: 1376 - DNA, 525 bp, Canis familiaris
  misc_feature (1)..(525): n = a or c or g or t
ttcattttcnnttttgcatttcaatacctatcgtgcattaaaaattgtcattcctacaagatccgatttttcttttttcaaaagatctcttannctccattttgataaccctctgcttttttagcatttccttatgttgaaattatgttacatttccatgcttatattttaaaattatttatatattgtcaaccttttcatgtctatttttctgaaattttaaaagtttttgtccagtaaagtttattttgtaataccaaattggattcataaaaatattaaacatgttttttatggaaaagtacaatatcatctgtatcatctctattaattatagtttttacattaataattacttattatatggaaaataatgttattaggtcctcatattaaaaactgttgaagactcattgtttcatatgccaaaatgtcttcaattacaatttattttaccgactttaacttcactttggattactattcaacaaagatacttgggataatctatctgtgataatgaga

SEQ ID NO: 1377 - DNA, 615 bp, Canis familiaris
  misc_feature (1)..(615): n = a or c or g or t
tgactcctgctctgaagtgttaagtnncaatggagtttagtattgaaaacctttaaaacatctcagtgggcaaattgncttaagtgtctgtcttgtaattctttcataaaaggaggaataagatagttttatttgctttgtatgatatgccatcacagatacacatacacacaaaagattaccctgattaacttacagccaaatgtgctaagtagattaatgccccaaataagtgaagataatttttgaacatgattgatatttatttactataagatacacaaaagtctttgtgtttttttgcatttaatatgttctaaaattctgagagaatgcatattagtttttattttcaaaattttcctggaaatcaactgagaactactgatatgaacatactatctgataatttcccctgtggcaaacttactagcctgtttcaaagtgatttttcttaaagttaaatgttacaagtagtgaatctatttttttcaaaatggtatttactacatctgtacccagctctgattacttgttcattctggatttctttaagccatatgtatgtattttatgatagttttgatatgctttttaactgtaatttttatttcc

SEQ ID NO: 1378 - DNA, 668 bp, Canis familiaris
  misc_feature (1)..(668): n = a or c or g or t
acagaaacagtgnnnctaaaganatatttacaaatgatanctactgnngnntaaaataannaatacaatttccagaagtacttctnnaccaannangatttcttacctacactgtattaaaataaaagacctctttaggacctcaaagattgtgctatgtgtatggccagcatctgttcatgggattcctaggactataagaaatattgatttgtatgttttgtttttgttttattaaaaaaaagtcttttccccttattttaacctagatgctcaaggctaggttaagtatataatactaataggaggctaggaagctaaaatagatctaatagcaagaattatcaaaaagaaaaattagttcttaaaaagtacaagtctgagatgtccattcctcttcctcattgaataccttaaatgtagatattcccaggttctggcaccttccctctgcttttctctcattttgcatttttctatttacaaaattaatacaagtatgcaaaaattctgggaaacaccaaaaagtgcaaagaaaatggggcacctgggtgactcagtcagttgggtgtctgcccttgacttaggtcgtggtcctgggatcgagtcccacattgtgctccctgctcagtgaggagtctgcttctccctctgcctctgcccctgct

SEQ ID NO: 1379 - DNA, 577 bp, Canis familiaris
  misc_feature (1)..(577): n = a or c or g or t
gcagtcaatatatnnnaactattcacgtgaacaagtaaaatcaaaaatgcgctgtaacatattttttcaaagctgtattattggaatttttaagtctgtaaagtacatgacagctattctgttgtaactgtatgaattcaagtcttggtncttcctgttgatacttagaatgcacttcatctctgtcactttctgaacccctctacctgttttaagatgacgagaagtgggaagggctgcccatgggacatgtatatagatctagcagtggattggatgggggttacagaggagaaagaaccatgttgttaagaactaagtctgggctttctctgacaaagcaaaaatcttctgatcgaacaaatggtgggagcaggttcgttttttgagtgaggtgtgatgtgggttacagagaaaatcacagggtcgcagtcctgtttatttacaccctgtctacaaaagtccaagagaggcaacttgtggtcctttgtgtgggtaaaacagagttctgtatactctaagtattagcattttgtctctgaacctacagaggggaactcacatggacattttattc

SEQ ID NO: 1380 - DNA, 191 bp, Canis familiaris
  misc_feature (1)..(191): n = a or c or g or t
anctctgtgttttaantggcccaancatagtgctatctggtattcccaagcatgagaaggctgtgatgtactttacgaagaaaacgtgtgttagattagactcagtgaggcaggggttacagtattgtttgccttgtttcatgttaatgaatcaatataaattaaatcaatataaattaaatttgtcttta

SEQ ID NO: 1381 - DNA, 684 bp, Canis familiaris
  misc_feature (1)..(684): n = a or c or g or t
tcccccctnnagcagtacgagcgaaaggtgaatgtgtctgttccaaggggttttcctttccactcatcggagattcagagagatgagctggcaccagccgggacaggtgtgtcccgagaggccgtgtctggtctgctgatcatgggagcaggtgggggctccctgattgtcctctccctgctgctcttgcgcaggaagaagccctatggggctatcagccatggagtggtggaggtggaccctatgctgaccctggaggagcagcagctgcgtgaactgcagcgtcacggctatgagaaccccacctaccgcttcctggaggaacgaccctgaaccagccccttcacccctttggctgagctcagaccttccctcttcctggctccccagaaccccaactcccagcctgggggaggggtctcaaaaatgttcatttcacactctttgtgagggggctggaaattcttatttcccctttccgatcccaaattccactcccaagaaatccccaggtattcctagctgcctccctgcttgggactttctcatcttaatttattttgtaagttaatttattgttccctgaggtgaccaccagcttggtcccagtgtttgttgtttcctagaactcaccctcccatgtgctctccactaacaacccaataaaatcctttaccccannnn

SEQ ID NO: 1382 - DNA, 469 bp, Canis familiaris
  misc_feature (1)..(469): n = a or c or g or t
aaataaaaatgaaaagnngncgccctttttngagcggtatcttgnnnnacaagtggcnnctctgngaannacttgtnnnaaatagtggcctctgtctttgtaaggtgtttgatagagctaaataaatggaacagccaaacccatcctgttggtagcagttnnnngtcctatttcattttattttattttttctgatctcctttgtttaaatggtaaaccttaacccatactttcagcaggccggtttgcagtgaattttcatttctttcctttttcacccccttgttgtaaaaagcccagcacttgaattgttattactttaaatgttctgtatttgtatctgtttttattagccgattagtgggattttatgccagttgttaaaatgagcattgatgtacccatttttttttttaaataacaaggcacagcctttgcccnaaactgccatctaacgtttgtcattcca

SEQ ID NO: 1383 - DNA, 214 bp, Canis familiaris
  misc_feature (1)..(214): n = a or c or g or t
aagcttatattttggcttttaaaaaatgtacatcttgtgttaaattattntctgattagtctcataagggttttgatgttggaccagccataatggatttttagtttggagattaggagatatatttttgttgcaaataaaagggcctgacggggttcaaatgggcaagtggtaggacctggtggttggactggcnnnnagatgggggcgacca

SEQ ID NO: 1384 - DNA, 617 bp, Canis familiaris
  misc_feature (1)..(617): n = a or c or g or t
acgctttgtctatgatgtcatcgntattttatnacctttagaaaccaagtcctgttcatgtcacagcagatactgctggnaagtggcttaatattaatatcaataaatagatgaatcctcttggaattcttggagtttggtgtgtttgtaggtgtggactctgctctctgcatctcgtggccgctcctgggaggacctgtgctgtgagcacagacgggagattggccccattacagaggagagaggttaaccactcatgtctctctgcagtcatttctccaactagaagcttcccgagctgggccatgtggagccgggacaagcagtatcgtgcctcaacaaaccagcgcaccggggctgggtgggggcagggtttggaaccccgtggtcatcccttctgtgtccatctctgggtgctgtgattggggcatggactggttggcttttccctttcctgtccatattgtcccaggccacagaatctcagtgatgcttctctcatacgtggatataggttttacccctgatgtgtgatacagattaccagcgtattatggtttggcttcaccctacatnnngatcatgggcaaggagcttattttcctgacacttgtatt

SEQ ID NO: 1385 - DNA, 598 bp, Canis familiaris
  misc_feature (1)..(598): n = a or c or g or t
ggactngagggnnacactcgtnntnnntnnagacagaaatcaagtctggcccttagaaggtgataataagaggaattacatgtcttataaannnngcgnagatttttgttaataaaattaataggaccaaactatctgaacatgccattctagaaactagaacttgtgaaaagggtttcattgaattataagctcattagtccataacaaagagcaacgtggagttctattcatcgaacagtctagtcaggtaagggttttgtgtatatcttacgtggattaccagtttttcaaaatatatagttctgtgtaaaaaaactaaaattatactaagcaaaatttcatccattctggtcattcagaaagtactttaagatgttacagcatttcacagttatgaactgttatgaattactgtttaatattacttaggactttctggtgtttgagtgttatggtcatttcaatactgtataaagataatagtaaatcaccctttacatttgaacttttttccagttacttcactgatgagtttatttaatgtaaagtcattggtcattatagcatatcggtaatctcttggactttgataaat

SEQ ID NO: 1386 - DNA, 559 bp, Canis familiaris
  misc_feature (1)..(559): n = a or c or g or t
ggacaccagttgcctggcagagcagtggnctggcaagaagggggacacagctgcnntgngagggaagaagtctaaaaagaagagcagccgggttaaggcatcgnncagcagcagcaaacagaggaannagctaggtggcctcgaggaagaccccagccctgatgaggatgagggcatccagaaggcatcccctctcacacacagccccccggatgagctttgagcccaacccagagccctgcgtaccgagacccctgagctggaggccagaagaagccaggccgcagccctggcaggcgggacagccgtcctgctccaggtcctccctgcccggcgttctgctactaagaaggacacaggcccggggaagaacttgccgcctccctctgccaggctgtgtgattgcacgcctgcccaggactccagtgtggacccaggcggggcagggcgccccggccttcacctcccctcactcctctccagcagggaagcaagactgcgggccactccaaccctgctcacccgctcctgtggtcaccttgcactctgcctggccccc

SEQ ID NO: 1387 - DNA, 458 bp, Canis familiaris
  misc_feature (1)..(458): n = a or c or g or t
ccccccccccagcaggtcttgggacaatgatggcttccgcnnacgnngagcctcccannnnccgccaaagggtgcaccctggaggggcccggggtggggtggggggcgggcagcctcggtgaggggggctcctagccccaagacctctgcgcagcctcgcggggcagctccccaggtggcgaggagacgaccgggagcgcagggggagaactgaggcacagcccggtgcccagacgctccagccatccctcccggagaggggtgcggtgcgcccaggagtaaggccctgactctggggccgcgggggggggggggcgggggggcgggggaggctcgctctcacgcccctacctggccgccctcccgggaccctttccagtgaataagagcgccagggctccctttggggtgcccggttggctcagtcggaggacttgccagttgatctcggaggccgt

SEQ ID NO: 1388 - DNA, 403 bp, Canis familiaris
  misc_feature (1)..(403): n = a or c or g or t
cctcttcccttccctctccccccattacatgtgaatgaatgtccatccacacgcacactcatcagaatgttaatttattttgcttcttttgtttgctatgtccattttccaaatggtagaagggagtgagtggtagggatgctactcgaggtctgatggnnaaccagggtggagagggagcctccagccattttcgtcctttcctcctcctggtccattcctaaacatgtggcctccatgtgggtgctaggggcatgggaagaaccactgctgtgcccgtaaactgttctctgctgccatcctcccctcagatggtatgnnnaagatgtctnnnggtgtccnnacgaccacctcctgtccccccaccagtatttccctttggatcagtttctctnnncagcca

SEQ ID NO: 1389 - DNA, 557 bp, Canis familiaris
  misc_feature (1)..(557): n = a or c or g or t
agnncntcccagccantgccatccaccgagggatgccccannannaganncttnctcggtatcagcagtttaaagattttcaacgacgaattcnnnnngctaccaacctatttggccgaggcatggacattgagcgggtgaacattgccttcaactatgacatgcctgaggattctgacacttacctgcatcgggtggcccgagcaggccggtttggcaccaagggcttggccatcacatttgtatcagatgaaaatgatgccaagatcctcaatgatgtgcaggatcgctttgaagtcaatattagtgagctgccagatgagatagacatttcctcttacattgaacagacgcggtagaggacttacccacccattttggaatgtgacagtctgtccctcttcaggagacgacagtagacatggggtgaaggagacactactgccacctacccgtgacaacccccaccccccaccccatggcttcccccttttgcatcaccaccactcctgaatccctgtttcctgaatngtcggaaatttttttttttttttnnn

SEQ ID NO: 1390 - DNA, 296 bp, Canis familiaris
  misc_feature (1)..(296): n = a or c or g or t
ctaccaaaaagaaagnnnnnntatattgactcaggatctcaaagctgggtgttttagcattactgtgtaaagacttttgaagggacagaagtgaagaaataagctgcaattttgtacagataccaacttctgaaaaaaagctggtgtttnnncaactagcattgaatgcagtccaatttgcagtagtactcttcaatagacaagcagctttgttgctgcctttatggacatgggtaccaattgcttttgtaatatggtaaaaatgtgagctagcacttctgcnnnnnntttgattt

SEQ ID NO: 1391 - DNA, 583 bp, Canis familiaris
  misc_feature (1)..(583): n = a or c or g or t
tcacangtgtggggctctaatcctatagagttggtatccttataagaagaggaagagacggcnnagcttcttttctgtgcatgcacagaaaagaggtcacacaaggaaggacacagctgcctatgatccagagagctccttgatcttggacttctagcctccagaactggaagaaaacaaatttctgttatttaagccatccagtttgtggtattttattgtagcagactaagtaactaatgtaccatgcaacgtaatactattcgttcataaagtaatcctgcatgttacaacatggaagagacttgaaaatattatgttaagttaaagaagctggacacaaagagccatatattttattatttcattcagtgaaatgtctagaacaagcacatccatagagaaagaaggtagtttaattgttgccagtggatagaggaagaagggaattgagaggtatgtggtatctctttggagtgataggaattttctgaaattagtggtgctggttgcacaacattgtgaatatactaaaatcctatcaattgtaaactgtaaaatggttaaaaatggtgaattttat

SEQ ID NO: 1392 - DNA, 534 bp, Canis familiaris
  misc_feature (1)..(534): n = a or c or g or t
cctcccatcaatgtganncaaaccaatattccccttgagatccagaaactgcagcccaacctgaagaactctttgcacagtcccagggtccagtccaccataccccagcctgtgattatccgccccagattcgagagcagcctcaggggtgaagaccaggcgaccagctccatcgatgggaccgtgcgcaacttcagcccattaaccagcctgcaggttattaaacccaaccgcatgctggctccaccaatgggcatgacaaccaagtctgtcaagaaagaacgacctcgcttctacaagacccttgatccctttagaatgaacactgagttcatgttgttgacggtaaaggaggagaaagagtatggggaagccaagatgaaggagtatcaggccagagagcccagtggagtggtcaatccagaaaaagccagcaaagctgcatggatcaggaaaatcaaagggctacctatcgataatttcatgaagcgagggaaaacagcagcccctgaacttggacaaaacatgtttatc

SEQ ID NO: 1393 - DNA, 673 bp, Canis familiaris
  misc_feature (1)..(673): n = a or c or g or t
ccatgcactccaagatgctgatngacatagagaaggtgcagatccactttgnaggctcggtcaaggnnagcagccagatgatccgtgagctgctgcaggcacagtgnctgagctccccctgctacaaacgggtgccagaaacggctgactacacgtactcgagcgtgcctcggcgctgcgggggcagccacacgctcacctacccctaccgccgcaaccgcctgcagcacccgtcccagggcctgtaccccaccgaggaggtccagatcgccatgaagcatgacgaagtggatatcttgggtctggatggacatatttacaagggacggatggatacaaggttgccgggcatcctgagcaaagacacctctttctcggggatgccaaagcacaaggccaagcagtcccggccccacgtgcaccggcaacagtccctcagcgacaacagccagctgccctcccggcctcagagcgctcagatgctggccggcagcagttcagctccttctcagccgcagaaagacaggcccgtgtcctccgaggggcacctctctcagcccagtgttgcccacccgcccagccccaacgagatggccaacctgcccgcggggccggagacgcacagggatgtgcctcctggggaggggctcgaggagcccacccgggggccgcg

SEQ ID NO: 1394 - DNA, 600 bp, Canis familiaris
  misc_feature (1)..(591): n = a or c or g or t
agcccctgngaaacactctgaggtgtacaacaaattgagaacagtggaacacatgactgtctacgagaaagaagccataccaagcaggttctattacaagaaagggaaatttgtctctcctttgactttagtggctgatgaaggatggttcataactgagaatcgagagacacttcctttttggatgaacagcactggcaggagggaaggctggcagcacgggtggcacggctatgacaacgagctcatggacatgcgtggcatcttcctggcctttggacccgattttaaatccaacttcagagctgctccaatcaaatccgtggatgtctacaacgtcatgtgcaacgtggcaggcatcactcccctgcccaacaatgggtcctggtctagggtgatgtgcatgctgaaagaccaggccagctcggctctgtctgtccaaccgagcagctgtgttctggtcttgattctcctcctactatttgcatagatgctgctattgtcgtttccaaacactcagccaagtgtgcctccacggtggggcagttttcattttctatttgaataatagcttcattaacacaatcaaggccacaaaaa

SEQ ID NO: 1395 - DNA, 655 bp, Canis familiaris
  misc_feature (1)..(655): n = a or c or g or t
atctctcacgtgnngctgtgacacnngctnngtctccaggttaggtgttcatctgtctctgctttgtaggcctnngcgaaacagaaatctannagggctgtcgccccagatagtcaatgtttctcactgtataccacgggactgactgaactttgatatgtagaaatggctaataaccaactgacttcctgcatgggttttgaaaaagggtgggatggggttgggaacagggggtgtggatattgagtaaattattgaaatgctgaaccccattgaatatcctttgtgtgaccctgtttgcctagctgggactcgggtacctcactctcctgggagcccaggccagtctccaccacacagtgtcagggattctttccttctgctgcaaaagccgtgtgaactttcctggccagtactggaaaggggaatgctatttatttttatattgtgtatattttgtcgtggtctgctgattccctgtttcactgagagcgacacttacctcagtagttagttcgatactgtgtgttggataattttttaaaagaactttttaaaaagctttttgatcctcagaggtctgtagatttatttccatatgaactggttattttgtataaagtacattcttaaaatagcaaggctctgnnnnnnn

SEQ ID NO: 1396 - DNA, 608 bp, Canis familiaris
  misc_feature (1)..(608): n = a or c or g or t
gncttcccaggccngcgctgtcacgtggtccagaggttccgcgagggctgtgctggggccccgactcccaggtctacgctcgctctggacttagcaaaggcgggtgctgccctgtgactcaacagattcccatctctaatgcgagttgaaaaaaagcctaccaagtagtcttttaaaataagcatgaatatggtaacttttggcgtagaagttacaaattttaaattacttctctaactgtagcatgtgaataaaacccactaatgtaaattctttctgtaaaatgatttaaaattttcagataaaaatgacattttaatatggctatttgtgcccttaaagctacagatgccaaattgtccttgtccaggtctatcctggttgattttcccccgtaattgggctttaaacagaggcatggcgctcgggaaccagggcccagcgtagctgcttccagacctggtgagcggggcccgccgaagggagtccctggacagctgcaaaaactcacataatccacagcttttctggtttcagtttttggttgtttttttaaataagctactgaaatgtttgaaaacacttcattgagatcatagtactcagtg

SEQ ID NO: 1397 - DNA, 685 bp, Canis familiaris
  misc_feature (1)..(685): n = a or c or g or t
gatgaaaattctttngcctcagcaagcacagtttccaaggatcttcatgagttngcgctccagaatttaatgcatattgganntctgtatccacatgctttcaagacagtaatgggagcggctcctgaattgaaagtacgtttggaaactgctgttcgagcaagccaagccagcaaagctaaagcagctaccaggcagccaacccctactgtacattctacaccaacgattaagctaaaaacaagttttttttaatttgatattccattcatttttgtttatattgtcaactgacaatttgttagtgatagccactgtaccatcctgggctacaggttctactttatttgtatatgtgtattgtatgctctaagtaggttaactaaaataatgcttatgccactttctgatttggaaggagtgattgtttttatcatgtggtgtttgtgctttcattttcctcctaattcttttttattaatttgttttttaagtactgagccacagtctcttaaatttaagtgctaaaaacaattatatcacatagttgggtagcctattggtattgtccggggaaaaaataggtcaatattcggcatctgtcaagaaaaaatttaattgagaaacaagcagaatttaaattttgaagaaactaaaagaatggaaaatgtttcgtggtgtatat

SEQ ID NO: 1398 - DNA, 640 bp, Canis familiaris
  misc_feature (1)..(640): n = a or c or g or t
atcnnaagaaatagtannagntccagaagacacagtgaataatnnnaatacatgcnnatctccagatccgtatcntgggcgtnntaacatttagtcacagtaggactgatgttaatctttgttaatttcctactgccnnnagactacatgtcagnngtgacggaggactactcagtactgctaaagcccaactgtgactctaatcttaaaatataaatggtgggaatacttaattgcaaagaaaatggaccatacttacaatgttcgtcaactcataaggtacagatatgtacctgagttgtgaaaaggttttgaagatataaaaaggagcctaaatgatatagcaggatggtagacatgtttttttttccttggagaccatattttggatctatatagcttttgtagacagtaaaaccaataattttccaagatgattccttttaagtatgatttcaggcaatttcttacctacctagaatatttggcatatctcagagatattaaagatctatacaagtgttggaagttttgatcttgtataatatttaatgaatcaccaagctttatttattagatatgttgagtgctaattttcttnnnnccacttttgctacnnnnnncagataatttgtaaccc

SEQ ID NO: 1399 - DNA, 528 bp, Canis familiaris
  misc_feature (1)..(528): n = a or c or g or t
ctgccaccacntngagagaatcaagtttgcttnntatgagcagtttgccaactgagnnnnacnaccaaagtgagctgtgtctttgaagcacaaatgcagcaaatnnnnctccccgctctacnagtnnagctgaaacagccctggggctctgggcccaacagaggtcggcttgctctctttgcactttcagnnaangaggacccacactgnnnnagcaaaaactacacagaagtggctcttctgccagtngaaatgtgggcatctcttggtcagcagattgcagttaaaaaaaaaataaaggttgtgaagaaaagactcctgtaagaagaataagcatttctagtggtgtggcctgaaaacgaagaataatctaggctgcnnnnaagcacccttatggttgtttcctttctgttctgttccttcccattgtagattgaactttgttctctactttctctttcttnnaaagagaggacatagctttaagtcagcactgatttgggactgtgcctaaggcatatcagtgct

SEQ ID NO: 1400 - DNA, 407 bp, Canis familiaris
ccctcttggcccacagccctcctcctacgctggctcctgtctgaactggcaggcgctctcaccttctgtttcctctgctctttctgtcctggtccacgcttccctgttgggttctcgcagcctcccagcccctcccattccgttcaggtgcgtccataagccccgcctccctcttccctcttcactgctgcctgggagcccaggagcagagcacagggcaggggcggcgggcaggccctggatccagaggagaccgaaggaaggtgacccctctccagcgggggagggcaaggggaaggggcgacgcctttgacggggtggaccaggctctgctagtgagctccttgatcttgcccctctctgcggttgggaaggcatgtgatggacagagatgcctgttcctggga

SEQ ID NO: 1401 - DNA, 617 bp, Canis familiaris
  misc_feature (1)..(617): n = a or c or g or t
gccatccacaccgctgctatggatatgctgngaggatctggtattgaaagccagtgtagaaaagttgagatcattgctgatgctgcctattccatttttaaaaggccaaaaagttttactggaaactttattattgatgaaaatatcttaagagaagaaggaataaaaaattttgacatctatgcaattaaaccaggccatcccttgttaccagatttcttcttagatgaacacccagatataattatcaagaaagcggaatcacgtgatgttattccggaattgaaagaagagaagccacagccaccaccaaaacaacgttctggagctgtggaagaaacatttagaattgttaaggactctcttagtgatgacattgttaaagccactcaagcagtttatcagtttgaactctcaggtgaagatggtggaacgtggtttcttgatcttaaaagcaaaggtgggaatgtcggatatggagagccctccaatcaggcggatgtggtgatgagtatgtctactgatgattttgtaaaaatgttttcaggaaaactaaaaccaacaatggcattcatgtcaggaaaattgaagattaaaggaaacatggccctagcaat

SEQ ID NO: 1402 - DNA, 589 bp, Canis familiaris
  misc_feature (1)..(589): n = a or c or g or t
tcccatctacatatanntgaaagatgatgttgaaaactctgttatttgaccagttcctnntagacatanncaagaaaaactggnnttgcaaattcctcagcangacatagcagggaaatagttgaataaggaaactaatgacagaactatagggcacctgaagagactctgatgctctttacatcaatgcattcactaaacacagggaaactctggtaacctgttgagttctcctactaatttaggaagctgtccctctcctcttcatgccaaattttctaagctcttttctcacctcactcaaactgttccttacctatcatggggctggagagggaggaagtcaatattaagcattattccactacagacatgcttcccatttcatggaaaggtttcttctgagtctagccttgctcatgaataaaccaggaagcaggcaaataaaatgggtcctcagcataccctgtcttcacttcatttccctgaatttcaaaagtcacattttcagagatttaagaaataattttttaaaaataccactaaggttagactttacatgcattttcacttagggggctataaaggg

SEQ ID NO: 1403 - DNA, 339 bp, Canis familiaris
  misc_feature (1)..(339): n = a or c or g or t
gaatttatggagtcagatctctagatctgcccggctgaggattcaagaggccanagtgagcatctggaaatgtctgttgagagcctactatgttcgagcaccaacccgagggctgtgaaaacaacacgaagacacaggtgcagcgagagctctctggtctttcactagcatcaaatacatatactccaccgagtcccccaccaagggagccaagtggacccagggctcaaagtcctccatatgtcagttctcaaaaggcggtgaaggacgaaactacaccgccatcctgcaccacatggctctcaactgctcgccttgtggtcttgaccctgccagcca

SEQ ID NO: 1404 - DNA, 470 bp, Canis familiaris
tcctcctcctctcaacctgcttgtgagagagaagagcagagaggcaggtacttgctcatggccacttcgttccctcccacgtgttggaccaagacccctcccgccacctggctccgcccagagggctagggagtgggagccaagccaagcaggcactcaagcgagagctgagctttcctgcattggttttgtctgcttccagtaacctgtaagcctgagttctgatggcaaggggccttgtcctcagggccaaagcagtagcgaggggaggccagtgcttccaggcctcggctgacgggcctcggctgaaggcaacctctgctccagatagatggtgccagtggcttattaattccgatactaatttgctttgctgaccaaatacctggtaccagagggtggggaggcagaggcagggagcagtgtcgtggccctggggcccagccccaaatggggggcattgtacatag

SEQ ID NO: 1405 - DNA, 594 bp, Canis familiaris
  misc_feature (1)..(594): n = a or c or g or t
tgtggnctnnaacacaaccgcttnctgttcccaattcacccaccctgctcgtttgagaaaagcngncnctttgcacttgtggncgaacacatcatccttggctccgccagcannnnnngggggggacaccatggcatggcgctttacaggccccagtgagggactctccagagctggcgagtcctctttccagtggcaggaccaattactgagccccttgaatggtgtcccaagtgaatggacaggcaggtagtggtggcctaggaggggccgggggaagctcatcctcccctcctacccagacctacagaaacatggtaagttgctgctattgattcaggggctggtgttggaggccaaggagccttggtgtattgggaaaggggggggggggggcaggtcagtgcctacaacacctgtccccaggtaataggtacacagtccttagggagccgctgacggtggggccaggattcaggtttcctggggacgctgtgaatttctcctgcaggagaagccatttgaactctttcaactgtatcagtagcacagtatttttgtatgaaaagtaggagacttctgaacagtaattca

SEQ ID NO: 1406 - DNA, 629 bp, Canis familiaris
  misc_feature (1)..(629): n = a or c or g or t
tcattnctcatgactgagaaccagttttttngnncacagacaggacttcaaagggactgtgtaccaaagagataggaatcagaaatttattcctgcctacacattcctctgctcctctaacctggggnnntggagtgccggctcccagagctgagtctcataacaccattaagggtcagtggctggttaggcttcaactcattaaccatccattatgtgccttggaggagtataaaagtcataaattccacattgggtcagataagccacttacctaacaccatgttctgtccctgaagtggaaacgagagttcttccattaaattggcctcataggttaagggctccgaacatttttgaattcctcttcataatccactataaagtaatcatctgtgaatttgacatactgattttttaatcttacaggcccttaggatagagttccaatgtttatcctccctttccataaagaagtacatattttcatttgtctgcaaactattccctttaagcttcagaacaactcctgagacaatgtttaccatatgatcttatgattcagctttcttctctgttctgtgattcctctctacagaagaccagaggagtcctnnnaccacattttt

SEQ ID NO: 1407 - DNA, 74 bp, Canis familiaris
  misc_feature (1)..(74): n = a or c or g or t
tgctgggaannntgtttctgggcacgnnggccggagccctggctgacagcctggggctgcatcnnngcttctcc

SEQ ID NO: 1408 - DNA, 488 bp, Canis familiaris
  misc_feature (1)..(488): n = a or c or g or t
acaggattgatcgattccgcgtcacgttctctnnncgcacacggcaatgcaccctggattcccattccctggtaggcgggctgtgggggcgcccctagtgcgtttgcttggggtctcgtgntctggtccattcagtggggacgctgaggccacgctgaccctggcccccggcacactggccgaagccccccaaccccaaggtcccgcaggctggctttgtgccaggcccaggcccacccggtgggccccgtgagccgcgggcgtggacctcaggccctgtctgcccggccgggcagtnnnnnnggtcagccacggtggccaggtccccgcctgccccctgtacatactgcagccctgccccacccggcctctgagtgagcactgtggccagaggtgctggagggcgcagcccctcccccgtccccccacccgtgtttccaccccagtgatcctcctggaaactcctccccaaagccatggaaggtgtg

SEQ ID NO: 1409 - DNA, 514 bp, Canis familiaris
  misc_feature (1)..(514): n = a or c or g or t
tnggcccgctgcttctccannnnnncccgccccannnnggggacagccgacttgagctngcaggtcccctgggcaagcnntcaggaacagacgccccttccgacctctgcactgcccgttgaggcgctggagaggcacctgggcagcactgcccagatattcttcaaacctcctggggaagcccaagcactgagtccaaattcagctccacaaggccggctccctggcccctgcgagaagtgtcccggggcaggattccgggacgcatggggtgcccactgaccacgccctcagctgcaccccatcttcgaatgctcccgcccttgtggagctcatctcccacctacccctggcccccagggctcctggggactcccagctccctgaggcaggacggggtcctcccagcaggccacacagcaggcagcagcaacctgcagagagtggcagggaggaggagggatgagacgacgggcgtgtgacactgccaggtgncntgtcgggattctgcata

SEQ ID NO: 1410 - DNA, 553 bp, Canis familiaris
  misc_feature (1)..(544): n = a or c or g or t
gtggtgctggggaggggctgtgagtcaggctcaggaannngaacaaggtggggtggggctccccagaagtccctgggcgggcagttcccactgctcctccccacggcctgccccctgccctcgggcactacccaggcccccggcggcctccccacagacctnntctcaccaccatggagttcgacctgaccgcagccctggactccaagaagccccacgggacaggccaggtgggagaccacaaacanagcgcccccaaagctcagggcgcgtcggcggataaaccgaggggccacggccaccgcagctcggactccagcagcagcagcggcagctccagcgactccgaccatgacgggaagcctcgcgccgccgccccnnnnccgcacggaagctcgccgggcaaggccgagaagcccaaggtgaagaagaagaaggagaagaaggagaagaaggagaagaaggggaaggcgaagaaggaggctccccactgacgggcctgggcgggtctcaataaacctctcctcgctcgnnnnnnnaaaaaaaaaaaaaa

SEQ ID NO: 1411 - DNA, 572 bp, Canis familiaris
  misc_feature (1)..(572): n = a or c or g or t
agcaggctcnnnctggnnagcccgatatgggactcaatcccaggaccccaggattacaacctgagccaaaggcagatgctcaaccactgagccacccaggtgctcctgtattaggattctgttacatttctgatgcaaagccaaattggaatttctgtaaggctgcatttcccgtgttaggcttacacatatattcttagctactccccctgcaatttaataccacaaatatagtattgatgtgctgtatctttgctctctgcctaaaaagagtgggatttttttttatttttttcaccccataagaacctgttttcgaccctcatagggggcagtattatccttgttgtgaatgtgcgatgtaaaatgagggtatgcttgttaaagacccaagatttgctgggttccgtagtctccagaagaaggaagagggtggactgatgttctttcttcatgattattttttgattgtataatttaggcccttattagatttcagaaaaggaatggctctttcttttttttaattgtttattcagttgtgagcttggtgattgtttcctgatccataa

SEQ ID NO: 1412 - DNA, 585 bp, Canis familiaris
  misc_feature (1)..(585): n = a or c or g or t
agccacgtgacaactgcgnttatcngtcatcgnngtcacccacatgacgacgnnnnngctccccactgcgcgctgctccgatgcgtcnnaangtgagagacgctcttccgagggcttcttgtttgtttgctgtttgctnnatnagctccttcaggcaggatgggggcagggggagagggagaaatggaaattcagtcaggaaaacaattaaccagcacagcttcgctgcacagcaacatgaaatcctatcgcctttagagccccgcgcgcccggctctggtttcacgcgcatttaaggatgaaaactggtccgaacgctgagctgatgctggcctgcaaatgaaaaaatcaaagaggcaaacattgtaaaatctcgttcgctgcctaatcacatctcaagaatggtgatctgagctgggagtatttttagtctgtacacaagaaaatgcaccttcgctctccttaggccttggtcggttgccagagaattgtcaatctgtctttttctttttttccacgttgcatataaaaaagttaatgggatgagcgctgggtgttattctatatgttggcaaactgaacacc

SEQ ID NO: 1413 - DNA, 653 bp, Canis familiaris
  misc_feature (1)..(653): n = a or c or g or t
gttacagnagctatggctgagaataaggnnnnnnnagatcnnnntaatctgatgccnnnnnngaatcagatgccggcccctgaccagccatttgcgctannnactgtgagagaggaatcatctattccaagagcagattcagagaaaaagtgggtctatccnnctgaacagatgttctggaatgcgatgttacggaaagggtggaagtggaaggatgacgatattagtcagaaagatatgtataacatcatcagaattcacaatcagaataacgaacaagcctggaaggagattttgaagtgggaagcccttcatgctgcggagtgtccctgtggtccatcattgatccggttcggaggtaaagcgaaagagtactcgccgagagcaagaattcgttcctggatggggtatgagctgcctttcgacaggcacgattggatcatcaaccgttgtgggactgaagtcaggtacgtcatcgactactacgacggtggcgaagtcaaccaggactaccagttcaccatcctggacgtccggcctgccctggattccttttcggccgtgtgggacagaatgaaggttgcatggtggcgctggacttcctaaccnnngctttgttagacatgggaaaatagaaactattttttttcctg

SEQ ID NO: 1414 - DNA, 651 bp, Canis familiaris
  misc_feature (1)..(651): n = a or c or g or t
gggtatgtggcgcannatgccaagcataccccggtgggcctggccagnnnnnccaagggcnntcactcacgtgagatagtagggatagttagactcaccccactccccacagacctgcctccagagcaagaatttgcataactggagatgagctagtggagagttggttttcaggaaatctcagtgagcgaatggatcatgaggtgggaaaaccctgcctggatattccatgtatccccacactgaacagtattcccatgcggaggtgccagaattctgactccctgggcaacagggctctcaggccctgagtgtccatgggatagggaccctgtagctagaatttgaagagagaatgtagcagcggcagcagccaacaggaggcagcaagaaccagggcaagaggccttctctccatcctctgccaggctggtatccaggcccttctggggattctggtcttgacttacccaccctcacctctccgcatccgtccgctgtttatgatacagaaccagctttctggtaggtgtctccactggcacccctcccagctgccccccagctgggcacccccctactacacagcacccaccctgtggaggtgtaccagttcctgacagggatggtttgctggcctggctgaaggaa

SEQ ID NO: 1415 - DNA, 658 bp, Canis familiaris
  misc_feature (1)..(658): n = a or c or g or t
atgcnactactctaccccctgatttttcanngaaaaaaaatacatggtattatgtaaaccaatctctccatattcatagtgacttttcaagtatttgagcctaaagattttaatcctacatttttatacctgttgaaattgttcactgttgttatgacatgtcagccatcaaatgaaattgtactttaaaaatttactacaattctgtacatttctaagtcgaacacttgtgacttttgctttaatgacatgaaactatcttgcctccttgatatttgtattactgctgctgctgttttttttttttaccctagaacagaggttataattgtatggcttttcagaactgagatacaggtgaatgattcaaagagtcaaaagttgaggagaataatgtttctttctggcataaagactgattaataaaaatccttgcctgtgttttcctgatagcacatgacaaatgtctcttaggtgacaagatgagagagcaggttaatgattgtgtggtatttggaactcagagaaatattttaattttcaaatgtagttacaaattagaacgtattcatattttgtactttctgttaaaatgcatgattgcaagattgttacttcaatttttgtgtttattcctaatgaaaagcttggtttgttc

SEQ ID NO: 1416 - DNA, 528 bp, Canis familiaris
ccatagtacaaaattatcagctctggaataaggcaggtgctagggcagccggttctagaaaatcctctttattccagtccccaggaggacacagagacccaggctgacgaatctttgccagcttttgtttctcaagcacaattagcagagttggcaaatcttaatattaatattggagacttgcttttgatttattaagagccaagacattttacatgcttaaattatttactattactcaagtctgcatagttctgaaaacctatgaaaagacagtcagaggcaaaagacaagtaaagtagcctccatttcagtggctgaaatggcaggacgtgctgacacaaaggtcgttagacgtcaacactagcctttagcattacagggctgcacgctctgaacttaagtcaaggatgtgaccttacagaagggtctccacagaaccttccctgtagccgggatgtgttcagtgtgttatcagttggctgaccgagacctccacaactagacggatatttgtgggaaaccttt

SEQ ID NO: 1417 - DNA, 694 bp, Canis familiaris
  misc_feature (1)..(694): n = a or c or g or t
ataagcattnactgcatatatcatgtcagattcaatacatatttttttcctttnncactgtgacaatatcgtttttcctttttatcttttcattcaggtcnnagtttgtgagctttctaggctttcaaaacgttaactttcaatgaacttaacccataacattgtatttcaccttttaaatacaaagacactatggctgctcttacataagttttttatgattaagaaatgcaacacttggttaaaatttaaaaatggccatgccaacttttctttaaatgctgcctgcttaatgtatgtcccaactttcttctgtaaaacattatattccttatatacaagcctggattaataataaaacaattaaaagtaagataaataagcaacatttaaactgactacatgtaattttatctagtatttcttgaaatttgattgcacaatactagaaaagagtcttatttttctcactattttgatttcgtgtctattacaaaacctaaagctagtttgcacttctgttgaaaagagtaagaattatatattaaaaccttctataacgttaggaaggtaacccaattataacaatttttttatcttgcctcataaagaataatgaattatccattgatgtatcttctttttgggtatattgccaaaatgtttctgggctaaaatatctatgtaaagaaat

SEQ ID NO: 1418 - DNA, 183 bp, Canis familiaris
  misc_feature (1)..(183): n = a or c or g or t
ggtggacagtnnatnnnnngtannanntcacannnncaaaaggaactcagaannntnnnnnagtgaaggtgnnctgatgaaaatacatgatctcagaatggtgtgcacattattagacacnnnngnctagcaatagcaaaaaagggggggnnaggtattccactaggtttattttcctcagaa

SEQ ID NO: 1419 - DNA, 572 bp, Canis familiaris
agctctgggggcccttgacccagactctgggggtcctggctgggttggtggtggtccctgtggctctgaacagtggtatgtccctcctggtgcttgcactgtgcctctctctggcctggttctcgtagaggctgcttatggggcgcagcaatgataggcttccccctctttggagtctggggtaggcagtccctatacccccccaggggcttctgatgggctatgtggcttgtatagtgaggggtcttttgcttctgagaatgcctgactggaaagagaccttcccatccctgaggacttgtgggcacagggcttcttgcggtgataccagtggaggggaacagggctcggtggatggtgtgagatatcttttcagaagggaactgggcatgtcctccctaccccccaagcctgtatttatttttgtataattctctggacgagggagagtggtcgtgagctggtcttggggcacaattacccagagatatatttattaacagccaacctgtgcaacctgctggagctttatttttaatttaatttatatagagtacctattattatatgcc

SEQ ID NO: 1420 - DNA, 571 bp, Canis familiaris
  misc_feature (1)..(571): n = a or c or g or t
ctcnangatatttnnncacttgattttaaaattggttttganatgtnctctggtcaattgggtttcagnnnnngaccatnngtcttttaaaatactttaaagggcaaaannnnnacagccattgcagtaannnnnnncaacttccatgatggcaaacctcttcctgttgaaagaattaaaaaaaatcaaatgaagaaggtaaagtattagtgtgttttctctgaagtctcnggttcattataaaaccttttaattttgtcattaaaaaataatttgccaaaatattgatagtatgcaatgttttcagagaattgatgaatggcctctcttatgtgttgctaagagcaaaagtggggnnntacattattgagggtaataattgggtaatatatatcaagaatcttaaaagcgtttataatctgtgactcagtattgccatttcagagagactgnnnaannnngttatgagggggcacctgggtggctcagtggtttagcgnctgactcttgatnnnngnttaggtcttgatctcagagttgtgannnnaggccaccgctgggctccacactg

SEQ ID NO: 1421 - DNA, 544 bp, Canis familiaris
  misc_feature (1)..(544): n = a or c or g or t
tgngagccaagaatttgcctgtgcnntcagatggtaccctcaactccttngttaagggctgtctcactctgccagaccaacacaaactgaagctaaagtcccccgtggcgaagaagcaggcttgtccccggtggcagcactccttcgtgttcaatggcgtgagcncttcccagctgagacagtcaagcctggaattaancgtctgggaccaggccatctttggtgtgagcgaccgcctgctgggggaagccaggctgggttctagggaaaacgtagctggtggcagggacatgtgctcacagtccgagctccagtggcagaaagttctttctagccccaatctgtggacagacatgacactcgtcctgcactgaagccagagttccagtctgcagcaggaaggttggctggaggcatgggtgtggacacatggctggcacagtccctgtggagcatggacactgtctgcagctctggcacggggcacggaccctcttccatagccctgtctgtatttatgttcaacacagcacttgctgatatt

SEQ ID NO: 1422 - DNA, 488 bp, Canis familiaris
  misc_feature (1)..(488): n = a or c or g or t
gtgcttnctaggacgtaggcgtgtacgtgcgcagctataggttccttgaattgtgtgtagcgtttccacaaataagttgtcatgtgcgtgctgggtactgctgatggtttcctgtggagtctggtgtctcctcacactcccccctccctgccttctgtcaagatgttccactgatgttacattatatacagcaaaacgagatgaacctcgcaccccagcccccttgggtggtggctcttgacttttgtctcatcatccttaattcaaaaacttgagacatctagcccccactgaatgtcccatgagaactggcccggcctgctgtctccaaggggactggacagtgcagaagaattgggactgtgccgagtccttgtgcctcttgcagctgtcacctagacacccagcagcctgctgcgcctgctttcatctcgccgggggcttcgccaccggatgcctgtggctctgccatttgattggtattttta

SEQ ID NO: 1423 - DNA, 430 bp, Canis familiaris
  misc_feature (1)..(430): n = a or c or g or t
taacttttngaatgagaaacttnnaggtaaagataaactgtcagataatatttttcagatgcatttacgtnnaactatggggaaatgattgtggaaaaatattaacagtcatggttttttgggtttttttaatttggaagacttgagaaattctgtttcatgaagtgacaatataaaaacacatacttagttttatactaaatctttttttaaggtcttggcatttaatataaagcagattcacacattttctaactttccacaagttccaaaaggtgaaggaagaaacctcagtcttgaaattttggtttttaaaaatcatgacactgttttaccatgaaattgagtagctaacttttggtaacaccttttgttcatttgtatgtttgtataatggacattttgaaacacaggaatgttttggtttgta

SEQ ID NO: 1424 - DNA, 551 bp, Canis familiaris
  misc_feature (1)..(551): n = a or c or g or t
atcccanngtgnncttttgaggatgcttatgtaactagctctttttttttttattattttcagggaagaaaaaaaaaaaaaagcccttctcagttttccatctccccatttgcctttttatccttgtgaataaatgttctttagtgttttaggaggaaaaagcaaacctagattttgataatccagaagatttcagattaataaagaagctttgaaagaagaccatttttcaaaattttagtgaagtgtgaatattttttgtcaatggctttctcaaagagaatgaaacttttgcaccattttcagagtttttatagagatgccaaattgatatatttacatgtaatggaaacatgaaaaagttttattaaacaattgttcatagctgtgtagacattttaattcagtttccaaagctctcaaagcgtatttttggagtacggagtgatatcggtttggggtgttacttacggttccaaatgactcgattgtccgaatacttagatctttccccagtgatcaggtttgtgttaaatgctgtatgttaacta

SEQ ID NO: 1425 - DNA, 534 bp, Canis familiaris
  misc_feature (1)..(534): n = a or c or g or t
cnctatataatgtgcaggtcagaaggggttctttgtttgnnatcatttcttttccagcaaagactgctttaattagcataatgtatgcttcatatgcagcactcatttatttgacagtnngtgttaatgctgtgctnnagaagataaagaaaattttccaagaagaagaaaccataaggcaaaacagaaaagagaatgaaaatcttagaaaagccttttctgagcctgtgctttctgagcntacatttcctgaaggtgaaatcaaagcaaaaccttacaggtcattaccagagaaaccagacagtatttcggatcgccccaaacttcctgctaataagttgagtaataagatccaagttttacattctgtgtttgaccaatcagctgaaatgaatgaataagcaaattggaacatgaatattaccaagtggagcttaagagttatctatctaatcacatttcatctgataaaaccaggaaactagttttcatatattgagtgctctgctttaagaaaagggttggagaactact

SEQ ID NO: 1426 - DNA, 513 bp, Canis familiaris
  misc_feature (1)..(513): n = a or c or g or t
catgncattaagtctggtttgctgtaatccccctgccctggaaccctcctcccacccatctaatccaccccaccactgtacttcactcatctatgccacctgcctggtcctggtggacatttgagtttacaaacctgtggcataaagggtggtatacatatttttcattactttcagtttctctggtgactagttgaagagagaaggtctttactgggatttgtgttctgcttcccaaccaggaaacatgggactgagatactttgggacccaggttggctttttcgacacatggcaaagataagcatgatctttttaggaataatctggttgatatttttttagcagacagaagagttaggtgctggaagggatgaccttggtggtaggtctcttccccaaggactctcagaaggcatgaagattggggtgggccaggcgagggcctccaggcaagtcacagtcggggctggtgcatattaatccttctaacatggcagtagttgtgctgct

SEQ ID NO: 1427 - DNA, 483 bp, Canis familiaris
  misc_feature (1)..(483): n = a or c or g or t
cacccaccccccagcgcttccaatcccacccnngcagccccagcccccccaccaagggtcacctttccatggtctgtgcccnnnnnagacacttttattctagacgggcccnntaagggcctcttcccgctgcctccctcatcctttgggtctcccctggggcagggaagagccaggttccaagagcaggagagggtgtccctacctattgctccacaccttttatgagccacatacgattttgaacctaatgtgatttaatggcaatcaacagagattttagacaacaaaaggaaagaagttagagcaaactgttctaaagcaaatattggccaggggcacccgggtgggtcagtctgttgagtgtctgccttgggttggggtcatgatcccagggtcctaggatctatcgagtcccacgttgggcttgctgctcagagggggcatctgcttccccctctgcctctgcctgttgctccccct

SEQ ID NO: 1428 - DNA, 620 bp, Canis familiaris
  misc_feature (1)..(620): n = a or c or g or t
ccccacacgccaacgcannagncttggtgtatggacgggagtcgtgatggctgtcgtcgggggcannnctcgtnnggctacagccctcntagctctgggatcctctgacagctgtcccctttgtcctggggtgcccgtgcttgactctccccacacctcaggcccagggttgccctggcacaggtgaatttaatgttggattttgccagaaggggttagggctgcttctcacgcgtggaatctttgagatcttgagtgagggtagcaggaaagtcagattcagtttataggaatctccgctacagccaagatcccaggaatgcgtggctttttctaacttcatatggactgtattatttatttaattacaaaagtatgttctcgtggtcctaagacaaacagagaagcttctagagaaaaacctagtttcccctccggccgaggcctcctttcgcatcttgccccccacggagggacaccccgagcctacctcagtcccctgggtcgcctcactgtccccagtgcggggcccacaggctgatgagccacttccctcaggcgatcgtagttcccacacgtagcggtgcttacttctgtagaacttctcctggagggaattt

SEQ ID NO: 1429 - DNA, 578 bp, Canis familiaris
cctggaaaagggaatggcttcatggatctaataaaaagaactatcaggatgtgcagagacatgttcaaccacctgggggcaagggccttcagctattggacaagaccaaattagaaaaggtgtctgccaaagaaaccacccaaacccccatcctctttcaaaactacagggattcctggaatggagaagacacagattctgggaaacaaagcccttatcccgtctctgtgttttcctgggacagtgaaaagaatgacaaggactcctggagtcagcttttcactgaggattctcagggccagcgggtcattgcccacaagtctagagctcctttccgagatataactaacaaccaggatcggggcttagggcagtttcttaacagctcttgggctcagtgccaggagaagcccactcagttaaatctccagcctgatttgctctttacccaggactctgaaggtaatcaagttatcaggcaccaaatctaaatgtctttaaaatggtttggttctaaaagaaatgagagagccatagggaaattttggggggtgggagagacaagggatgaggttatt

SEQ ID NO: 1430 - DNA, 654 bp, Canis familiaris
  misc_feature (1)..(654): n = a or c or g or t
aagacatggtcagtgtgangagattccagannncactacatgtnnaagaggttgttccgaatgtaatngaaccctcctttggactgggcaggatcatgtatacggtatttgaacatacattccatgtgcgtgagggagatgagcagagaacattcttcagtttccctgctgtnnnnnctccattcaagtgttcggtcctgccactgagtcaaaaccaggagttcatgccatttgtcaaggaattatctgaagccctgaccaggaacggcgtctctcataaagtagacgactcctctgggtctattggaagacgctatgccaggactgatgagattggcgtggcttttggcatcaccattgacttcgatacagtgaacaagacccctcacacggcaaccctgcgggaccgagactctatgcggcaaattagagcagaggtctctgaactgcccagtgtggtctgcgatctggccaatggcancnnnnacgtgggccgatgtggaggccaggtatcctgtctttgaagggcaagagactggcaatcgaggaataacgaatttggcgacatctgacgaccacttgccctaatgaaaaagtagctcttatgtccactttacaaacagcattgcaattactcctgaggactgcatttta

SEQ ID NO: 1431 - DNA, 603 bp, Canis familiaris
  misc_feature (1)..(603): n = a or c or g or t
tnnagtgtgtgcnnnctttcaggtacaacttttgtgtaatnagagccagtgcattaagtttatatagactactttctatgcaagactgagatatggaatagataacaagaggtacgnatagttgggtacgtagacaatgagcatgttctcagaatnnaagccaccatcggatgtgggttgagggaggataggttgtgtatatgtttccgcccactaatttcgagcagccatattatgaagtaaatcctcagagccaagtaacctaagaatggtattcgtttcatgttataatgacgcaaatgggataagtgtgagtgctgaagtggaacatcattctcagatattccatgtcatttctcatttaaagactcttgttatgaattattagaaactttaggcaaaattgaagtattggcagcaaaataaaggcctactctgttcttatttaaagtgaaacactgtattcttgtttccctccaaagtgaaattaggcatttatgatttcaatcgccttgatacgtttccaaatcaccgatttatgctgaagattttactatattgttgcacaattttacgatannnnnngcctcaatgtcaactttt

SEQ ID NO: 1432 - DNA, 446 bp, Canis familiaris
  misc_feature (1)..(446): n = a or c or g or t
tgttcctataatgnncaatacctagatacttacagaggacataagggtnnagtatataaaatagcgtggaatccattttgtcatgatgtgttcttaagctgttctgcagattggggtgttattatatggcaacaggagaataccaagccatttttgagcttttatccaactacttatgttgtttatgatgttgcctggtctccaaaatcctcctatatatttgcagctgcaaatgagagcagagtagagatttgggaccttcacaccagcactttggatcctctcattgtgaatgttgctaaccctggannnnagttcacaactgttctctttgccaaacaaacagattgccttctagtgggtgacagtgatggacaggttgctgtgtatgaactaagaaatatgcccactgcgttggattctggccgaggagatataatagatac

SEQ ID NO: 1433 - DNA, 580 bp, Canis familiaris
  misc_feature (1)..(580): n = a or c or g or t
agcagcagcaagaaanngtaaggaacagatgccagtgaaagaggagacagaacaagagagaaagggctgaaaccaaagccagttctttgaaatggtcagtggactgaacctcacaacagtccggaaggaaaaagagaataaagtgagaaaagatagaacgtcaggaatgagggagggggcatcccctcatgtggaaaccatgaaaggataagagtatcatgagcaatgtgttgtccataaacccatccacttgagatggacacactgtttcaaagacacgagctactggacctgctccaagaattagatgacccagaacggttgaatttgtagttaaaatctcacacaccaaaaacaaatggcttgtaggcctgcgtggcttctccactaccaagcatttaaggaagaggatctattcaataggagctcttccggaacagagaagaggagggcacacgggcgcctgaccccaacaaagtgtaggacaggaaacagcacgaccggtggaggtggtgtgtcgtcattcgtgttacctacctacgccggttcctcagtatctagggagggcacacagactgga

SEQ ID NO: 1434 - DNA, 360 bp, Canis familiaris
  misc_feature (1)..(360): n = a or c or g or t
gcctngaaatnngggtgtcgatacnnntgaccccacacaagannagtcatgaacttccagnacagagctcagtgaagccagacctatgnctgnnnggctctttgcctgcccacacccctacccctgccatcccctgcctgncagcagctagtggtaggcaaggcttgnnnctccctccctgacagtgagctccccaagggcaaggacagtcagggcagtcatcggtactggagccccgtagctgaaaggcccagacctggatatgctcacttgtatcctcagtgtcccaatgaagtaagcaaggnaagctttccctccctgtgtgacagaggtnnnnnnnnnncccagagcaaggaaaga

SEQ ID NO: 1435 - DNA, 651 bp, Canis familiaris
  misc_feature (1)..(651): n = a or c or g or t
attctggatctagtatgtannnaataatgtgttatttttctttaaatcattgcattcaatttttaatgttgagactaatggacagttgttattggactaccaaaaatgacctttcattttgctacttcctagaaagaggttagattctaaagcgattttggagaccctgggatgaatgtgtatttaattgcagagatggcattatagcatcataatctgacaatgataagaccctcttgttttgagccttaacatctagctcacccattgtaattttaagcttttccctaaaacctgttttcaaggggttcggttggcttcgtcctggggcaacatgatggcccccagaagctccacactgacattccaccagcttcctgatcctgctggaatgagagcttcttacataatagctccagcgaagtccaggagctcactgtcattggtctgcttgtgattacgcatttgtgaaccaggacagaaaagttctactctgattactagctgtgtaccacgtggacccatagtaggagagcagacagttcaccacaggaaacccgggtgccattataatagcgggtgtttggcagctcaaaacaatagatccttactagactctacatctgccttttttatatcaaaagtcnnnnn

SEQ ID NO: 1436 - DNA, 481 bp, Canis familiaris
  misc_feature (1)..(481): n = a or c or g or t
tggttcagtctatgtnngctnctacacttctgatatggannnagtatggaaggaggcaaaaccggaagaccttatggattcaaaacttagatgtgtgtttgaattgccagcagaaaatgataaaccacatgatgtagaaataaataaaattatacccacaactgcatcaaagacagaaacaccaacggtgtctaaagctctgagttcttctttggatgacactgaagttaagaaggtgatggaagagtgtaagaggctgcagggtgaagtgcagaggctccgggaggaaaacaagcaattcaaggaggaagatggactccggatgaggaagacagctcagagcaacagccctgtgcctgtgttagctccagctgggaaggaggagggcctcagcgcccggctcctcgccctcgtggttttgttcttcatcgtcggtgtgatcatagggaagatcgccttgtagaggcagtgggcacagggc

SEQ ID NO: 1437 - DNA, 523 bp, Canis familiaris
  misc_feature (1)..(523): n = a or c or g or t
cctggtcacaagtaggtgnngaaccttccatcatgnnnncnnnnnnnattccngcaataaagcaagctgttgcaaaagcaggctggtccctggaggatgtggacatatttgagatcaannaagcctttgcagccctctctgttgcaataactaaagaacttggattaaacccagagaaggtcaacattcaaggaggggctatagccttgggccatcctcttggagcatctggctgtcggattcttgttaccctgttacacacaatggagcgaaagggtggacaccgtggtgttgctgccctgtgcataggggnnngggatgggcatagcaatgtgtgttcagagaggatgaaattgcttnnnaattacctgtgttggaactcaactggaacctaatctctttttaagctaatatggtactaagttacagtgtatgaaaccacaggaccaaaaggatggaaacttatctttcataagaacccaaggcttgacagcttgttatttttaatgtgtaatactagagg

SEQ ID NO: 1438 - DNA, 509 bp, Canis familiaris
  misc_feature (1)..(509): n = a or c or g or t
ctgtttgtatgcccccnnnannnnnctantgggtnnnngtggcnnnnagtggnngggatccnnnngctccaggctcaggtctgggcccacatcctccnngggaagtggcccccatacagcaggcccagctggcaagggagattgtgagaaggcntctccccctcagagccctggcccannnnngcggtttgagtcctgagcccagtgcccagacctgctctcctggctgatggagccgtgtgcccaactatagccccgagggccccagacaatccccatctgctgagtgaggcaggcttcccccactctcccaccccctgcctctctctgggctggctaacctggggccccctccccagaactctgaccctgggccacatttagggcaggttctgtgccagagtctggggctgcccagggggcctggtgctggccaggtcagcgaatcacaaggtcttcgccggagagaattgggccacccacctgcctgttcaccgggagggactgtg

SEQ ID NO: 1439 - DNA, 182 bp, Canis familiaris
  misc_feature (1)..(182): n = a or c or g or t
caccccagcacaccacacacacaccctataactaatccatcacagtttctcaaatccttccacttaccacctccaccaccccagcccaaactaccttcctttccccacgtggctgacactaatgtctacctgtgtctacctgtgatagaatgaccaagtatcctgctctaagcaanncttac

SEQ ID NO: 1440 - DNA, 614 bp, Canis familiaris
  misc_feature (1)..(614): n = a or c or g or t
gtattacatatttgatgtggtaatttatgcagtttatgctcttctcatagntttctnngtagattaaatacaaatctcttaagtcctaactgaaactaaatgatttaaattgcagaaatgaccttgcctgatacgcaggaaggaactgaaaaatttgggatgctaaccttgttttctcatgcctgagtttctcttaccttgtcattaggctccctgagacagggccaaaatgcctttccttgaacctgtgccacgagaaaagaaagcattactatctttagagagtactttactctccaaccttatgatgtctggcatgctgggaagggagtttgcttttagaaagggatttctgatctctagcaagtggagcagcccagggaatgctgagccctagcagcaactcatcagaagcagagcagttgatttggtggcacacttgggcagactcattctggctcgcaagagctaattgttatatttttaggagtttttgtgaactggttgnnnaagttaaatgtgtatgtgtgtttatatgtgtgtagacatatatacatgtaaatacatgtttgtactaggtaatgtataacatattgtatatatatgtttatagt

SEQ ID NO: 1441 - DNA, 558 bp, Canis familiaris
  misc_feature (1)..(558): n = a or c or g or t
aggtcacntggtcactgtagctcagagagtatgtccagaataatcacggtgantcattcaacaactattttcctcactgcccgtgatgtttgggccaggcatcnntctggccagcaaaaatgtcttcagggtccactatacagcaaggcccaggccacgacagacgcacaaaggggaacatggggttgctttcaaggaaggcccgggccatgccaagaagtcgttttacagcatgacaagtgctctgatgaaggcagccagggggagctgtggacctgggctggatcatctctcccggctcagaggacctggcctgctgggctgtctctccctgctcagagcctggtgatggctccacctcactcagggtgatgatgtactaatggtgtttcactgatttgctgacattactgcattcacacaaggtgagcctctgtgactgtcactggcaaggatccatgctgggaatgtcaagtccgcagatgggaatcccacgtagctngacaccanncggcccagaacatggaatccagacacacttacacttagcacgactca

SEQ ID NO: 1442 - DNA, 619 bp, Canis familiaris
  misc_feature (1)..(619): n = a or c or g or t
attaaagatcagtacnntngaacatgaattttcaataaaggaacatnnatttgaagttcaactcagagagatnnaagacagtaatcgaaattccactgttgaactgaggcatctcttagtgactcaacagaannnnnccaataggtggaaagaagaaacaaagaaacttactgaaagtgcagaaattagaatcagtagtctaaagagtgagctgagtcgacagaaacttcatacccaagagctgctttctcagctggaaatggcaaatgaaaaggtagttgagaatgaaaaactaattctagagcatcaagaaaaagccaacagacttcaaaggcgtctaagtcaggcagaacagagagcagcttcagcttctcagcagctcagtgtgattacagtgcagagaagaaaagcagcctccatgatgaatctggaaaatatttaaaaatattcatagttcactcacagaactttagacttgggaaagctgttggactagaagtgtattgaaatggtaaaaacctgcagaaagaatggttaaggcttgtgtcattttgcataagtgttttccattctgttttgagggttattggaaaacagaacagtggcagcttcctgtatg

SEQ ID NO: 1443 - DNA, 575 bp, Canis familiaris
  misc_feature (1)..(575): n = a or c or g or t
gctcccaggctctcccagcntggnntttgaccccacagaggacatnnagccacaccctgcccatggnnagcncttccgtggnntctgnntgagggggacagcactgccacgccgggcggtctgcgcaggggtatttgccttttccttttcctggctctaaagggtgctgactacagctgttagcgaggctcagcttcagtgaactgagagtttaggaccaaagtctcagtgggtcgtgacagtttgggcagcagtaggtgatctttccggaccctgccctgtgctcccagttctgtccccctgcctgcgtggcagacagtgagcagtgcggacaggataaataactaagccccgatctgtgcataggatcagcaaacgtgtccttccatgtggcacgccctcttctactggccctggtgtgtgcgctcccctgactctgcctcagaaaccagagcagcctgtgcctgctgtctcaccctgtctgtcctggcccattcatgtctgcttttggagtgagcactgccctcttgtgacccgaatacccccgtgtagaaaccaatcccttcccgggnnnn

SEQ ID NO: 1444 - DNA, 435 bp, Canis familiaris
  misc_feature (1)..(435): n = a or c or g or t
ataannnctctactaannncagatttgtttatcgacttaggcanatgaggnnaggnacaaaagctaagtatataggggtgnnnagtccacatgtaaacacaacagattatctgcnnctagaacagaccttttttcctcctcttcttagctaacgttccactngcnnttcagaatcccaaactcaggggtagaaaaggaaactcagatgccatctcctccatatagccttcctaatctcccaggtggagccaagtgcccctcttctgaacgcccttatcacatatcacatgggaccacttgaggtctgtcccccctggaccaggagctctgtgagggcaggggtcgcatcgtacccagctcagcactcctctgtgcccaatcaggacctggggcattaagaaatgactcttaaggggcagcccgggtggcttagca

SEQ ID NO: 1445 - DNA, 585 bp, Canis familiaris
  misc_feature (1)..(585): n = a or c or g or t
tcntatctttcnnnnnnnngatcagatggggnnnnnctctgccagaaggtagtgcagccaaaccagactttctcaatttagctaatagtacagctcctgttgtgttctcatggtttgccttccttatttctgaaagactcagtgaagctatagtcacagtaataataggtttggggatagcattacacattgaactttttctcttgccacattatcccaattggttcaaggcccttaagatagtagtcactttagtggccttgttttcatttataatcactttactagttaaagaaatttatccagagaaaggacccaagagacctggtcaaatagaataaataaaaaactactctgtagatgacgttagcatgttggctataagccttggaatgttttgttttagcatcacctttttcctcctcctgtttagctttttttctccatcaatggttatttatccttaacagattattttcatttctagaaatctttattgtcaaatatttacttgattgataacagtttgaaaatccctaacaagtcattttcacttaacagnnnnnggtctttatgaatatatat

SEQ ID NO: 1446 - DNA, 636 bp, Canis familiaris
  misc_feature (1)..(636): n = a or c or g or t
ctnnaaaatgccataatatccactttgttgacagcatnnnngctagaaaaataagtanncnnaggtggcagtnnnnaccatatttttatganngtctccctttttttaccacaaccttcagtgtgaatcagagagcctggtggcaggaggggtggggaggggaatggagagctggattccaacccgaagggtctcctggcttccgaggccagcttgctaaaaattgcattccctgtcctgggtcaaactgtcaggcacctggacttacttagtcactaccatatgtggccggtttaatttacaacgcaatatactctttggttcagcgggatatgatagttcccgaagcacttccccccgccttcctttaggtataaacagaattgcttatgttttaggattagaatccggcctccgaatacgaaaatgaggtctccctgaataaaaggggccacccttcgcattccttcaatgccaagaggactttcaaatcctagcgttcagggatctgttccttcctagcacagtatgatcccacaaacgagtctaggcccctttacaaagcaaagtcttacagaaacggagcagtgcttcaaactactctttgctttcaaaatactaagggccagggtnnnn

SEQ ID NO: 1447 - DNA, 574 bp, Canis familiaris
  misc_feature (1)..(574): n = a or c or g or t
gtgtgctgatattgtttcttccatgctcngagtcacgtgtcaactatttgatcctccacaactgtataatttaggttggaggagagtnaaagcattaaagtagaaaacangaaatttactattgattgccctaattttaggaactatatccctaaaaannaactgaaaacacaaatgctaggtgggaatgataaatgagaaagatgtatttatttcagtggaattttgcacatgtgaaaattttgttaaataggaccttaaagatcctaaggtttgcttttatggtgggaaacaaaagtctcgctaatgatgacattttgaggtgatagatgtcagagattgtttccttggggttgaaatagcagccaaaacattttctctacttaggcacttgggatgtggctgttggcaacacattttatggtgggatctttaatccagtgataaaatttaaactaaaaacaagccgaaaatgataggtttctttattttcactaaacaggcaattgaaatacatggtacaaaaataagtggtaagattattgtaaaatgaaatnnncagaataaatattca

SEQ ID NO: 1448 - DNA, 109 bp, Canis familiaris
  misc_feature (1)..(109): n = a or c or g or t
gtcatccattaagaacttatgnnntactctgggcatatttatccaaataattttgttctaaatattagtataaantngaaaatttgtgatcaatatannttatgnnnnn

SEQ ID NO: 1449 - DNA, 647 bp, Canis familiaris
  misc_feature (1)..(647): n = a or c or g or t
cagatggcaagacactgngatncttattttccttgnnnnnnctgcacagnnctgngagtcctnnnanactgctaaagttttgtttatgccactcaagtcttacggattttatcttgtaaaactttgagttgaactactgcacttctttgggtgtacagatcttacttccttacacactctggctgccctgcagtgctccccctacccctttcattccatgaaagactggnnattcaaatgggtggagaccttaaactgacttattttcctacggttnnntgtcacctctaaagttgacagtcgaaaaatgaaaatactctactgttagcccaaagtaaagactggctgggaaactctacactagatggataatataactgtggcaagagagacttagcatggatacttttgggttccttctcctctgtgctgtgggccacagaaggacccttcgtggtctacaaagtaggctagagtgttggttgtcacctctgagtttggatggggtattgaggggtccgtacatgtaagccctccaaagacaccattcacataacctgggagaatgtcataaattattcagataattaggactgctttaagctgacccagcatagcatgcatttacttatgtcatggctttaatt

SEQ ID NO: 1450 - DNA, 570 bp, Canis familiaris
  misc_feature (1)..(570): n = a or c or g or t
agggggtagtatcaggacccctccctttttttttttnnagactatttttttaagagtagttttaggnnnacaacnnnattgagaggaaggtccagaaattttttatataccccaccagagtgctacatttgttcaattgatgaacctgcattgacatcatcattaccccaagtccatagtttaccttagtgttcatccttactgttgtatattctgtgggctttggacaaatgtatgatgacctttatagtatcatacaacgtatttttcatggcccaaaaaaatcctctgttcttcctatccgtccctccttatccccctacctctggcaaccactgatctttctattgtctccatagttttaccatttctagagtgtcacatagtagggattgtacagtgtgtagcctttcacattgacttctttcacttaatgcatttcaagttctaaaacttgaagttttagaaatttgaaaaagcttctgtgttttttcatgtcttgatagctcactcacttctttagcactgaataatattctgttgcctggatgtaccacagtttataaatcc

SEQ ID NO: 1451 - DNA, 405 bp, Canis familiaris
  misc_feature (1)..(405): n = a or c or g or t
gcccccacccccaccccctccttgagtttctgtgaattaaaatatttgcaaatccaaagagatgnnntccaggatgaacaaaggagngcagctccagaggggcgaggggcggggcgggagctccctgggctgcagctctttgttctccagcggtcacaaattcacacctgtgggagggggcacagtttcccacgggtcctcttccagtgctgggagacaaatgcgggttctccaagaccccagaagaccccagtagtcctgcctcccctctggtgtgtgtgtatgtgtgagtgtaagcacatacgtgagagaacatggtcacacacaaatgtaagtccaccaatccacttttagcccctccgtgtaatcattannnatcttcannnnatcattgtgcagtcacaa

SEQ ID NO: 1452 - DNA, 523 bp, Canis familiaris
  misc_feature (1)..(523): n = a or c or g or t
ccgctgtgtgcggcgnngacacggngacacacgcnntcggcggcagctgcttgattcttgaagcccccacctcaccgcagcagctcctctccnggtngaagagcgaagtagagaaggccctcctgggtcggccgctggagcttgtccgcctctgacatcttgcgattgagggacacgtcgttggaggatgaagatggctggggcttggacgcccgtcccgtcaccggtcacggatacggaagtcctagttgaattcttgccctattgcttgtgctgctatttctttgcccccccaccagaaactctgcaccctggggcagcccgattctactagaataagccagggaggaagggaacagtgaaaggatggaattccagacactccttccttctgcccctttcttagccacggtcagaccagctgtgagctgctgcacttgccccgaggtaggggctgtgtggtgactgagtggtctgtgttcctgttgctgggggggcgacggagtggcctgaaaaccacgca

SEQ ID NO: 1453 - DNA, 281 bp, Canis familiaris
ttgtgtatgacttttgctgctgaaggacagaacataccttcctctgtgcagagctggggccgccagcctgagtggaggcccagccgcgggcctgggaggcaccgctgacccagctgctcctccagcccttcagacaagatcctgtttcagccaaatgtggggaaacacaattctttttttaagttttgttttgtttttcctccagagccttattttaggccccacagacagtggtgggcggggaggagataggaaacactcatctccagttgtctattccc

SEQ ID NO: 1454 - DNA, 285 bp, Canis familiaris
  misc_feature (1)..(285): n = a or c or g or t
atcttttcacatttcnnnnnnngnnnttggcnnnnnaggnnnnacatnnnnnnntnnnnntttgtnnnnnnnnngttnntcctctttgcnnncatctttatctatagattgnctaatacctcatnntatatgtaaaaacagccagtaanttctnnnnnnncnnattatgtgcaatatttttaaatnnnannaaatgtnnncttttgtnnncatatnnnnntatntcnnnnnnnnngnactttttgcatcatactccatatgagtattaatcnnatggatacatat

SEQ ID NO: 1455 - DNA, 536 bp, Canis familiaris
  misc_feature (1)..(536): n = a or c or g or t
agncacgccaaacaaccacagacctcacgtgcagggcgagnntccagcggcgggcacagatgttcccacaagtaagaggaaaggtgactgggaagcagggctgagccacagaagagagagcagggccttcagtgaaggggaccaggagagctggagccccaacagcaagcactcgaggaggaacctggactgggacaggagagggctggagaaggatgacagtggctctaagaaaagaaagcttttatagtacagcctggtgacacgggctgcagccacagcagcgtgcagacttaggtgaccagtgaacgggactgttcacataagattattttttttccttaaaggagttggtgtgctgttggaaaaatggaaaatgtatcctaacacctgtgcctcttggtcatcttccatagtttctgtcagttnnnaagctttcgagggcctccgtgtgttgtaatgtccataaagtgggagacttgagatgttggtctcttgtccttctaagataagggctcagactggagtggatgttg

SEQ ID NO: 1456 - DNA, 464 bp, Canis familiaris
  misc_feature (1)..(464): n = a or c or g or t
anctgatgtgtcaagcaacgttaccctaaaaagtnacaccatgcactttgagggattagncgataccaaaatcccccactnnnnnacacccgtcagtattaggagcaaccggagcatatccgtacttcggatcccaagtcagagccaaataagccaaacctattcccaaggctctctccaccgcagtgtcagccaactcatggaccttcaagacaagaaagtcttggttgatgactcgctgtgggaaaccatcatgggccacgatagtggactgtacgtggatgaagaggacctgaaatgccatcaagggtttcagctctgtgactaaggagcacaccacgttcaccgacacccacctgtgagagatggaaccttgcaagacatacagctgaagtgcctgctgcatactccctccctctcgggttgtcactgaccgacacaccgcatatgctgaaaagccattg

SEQ ID NO: 1457 - DNA, 499 bp, Canis familiaris
  misc_feature (1)..(499): n = a or c or g or t
tactctttgaaacagaaaacagaatgtaaattatattcagccaaggtgacagacgacnntaaaacatactgatactgaacattaaagnacgtcttgatccagatggtgcctgcctgtgagagctcaaggaaatcaagggtgacattagatcattgaacaaaatggaacccctctaaatatgcctaagtgtaccagacaactggcagattgtcagcacagctcctgtcttcaggggctctcggggtgaccccaggaaccacacgccagagagcctcaattccactgatggcaggctacagacaatctataataaaatgtatagagtcactgagtgcattgttccatatcttttgtgagggaaacacactttcaaaaatgaggaagtgtgtctctataagctgtcgattccttgagagtgtaagggaagcatgtgtacaagaaggaactagattttcaaaatgacacttaaatttttttaaagacaaaaagccccactaac

SEQ ID NO: 1458 - DNA, 654 bp, Canis familiaris
  misc_feature (1)..(654): n = a or c or g or t
catgatatctattctntagcccatngatcaaggaataatatcgactttcaagtcttattaaagaaatacactntgtaaggctatagctgccaaagacagcgattcnttngataaacctggacaaagtaaactgaaaactttctggaaagtatttgccattctagataccattaagaacatctgtgatttgtgggaataagtcaaacatgtaaggagttgagaagcagtagataccaacccttacggacaactttgaggcattcaagatgtcagtggaggaagtaattgcagatgtgccagaaatagtaagagaactaaaattagaagaggagctaaagatgtgactgagcaatctcaggataaaactttaatgtagttacttctcaggtttgagcaaagaaaatggtttttaagatggaatctactcctggtgaagatgctgtgaagattgttgaaatgacaacaaaagatttagaatattccataaacttagttgctaaaacagcagcaggatttaacagcactaacttcaattttgaaagaagtactactgtggataaaatgctatcaaacagcattgcatgcaacagagaaatcattcataaatggaagagttcatcaatatggcaaatgttactgctttaagaaanngtc

SEQ ID NO: 1459 - DNA, 656 bp, Canis familiaris
  misc_feature (1)..(656): n = a or c or g or t
tctctatcatagatccctttgccaaatgcagganctgcagacttgctaccggcaagagtgaagcaagtnngggtgtagagctatcctggtgtgggggcatcnnttagagttcagtctggatgagagtgtcagtgcaggaatgggctcccaggaggtgaccgtgtctccggacaggacctgcccaccacatctgggccgtgatggtgtttgaggtggcgggcagggtgtctgccttctggtgtactggggtgagtagctgagccagccaagaagaggttggatgattaagcaagaaacaagggattcttggttaaactgaagacttcatttgggaaccaaaaatcttatctcttggaccttgagccacatatttcccctgaaaagtataccttttttttttctccagcaaaattttgttgggggttgtgttactnnggaatgaactgagatgagtatgtggaacatttatttaatggcatactatactagaaacctgaagacctgcaggagatttgaaattccaactcttgttacaactttttaaaagattgtgaaattataaaaatgcacatgaatcaagttttaatatactgtatgatgggtgggtgaggctgtccattgtaccatttctttctttgaattctcaggcanngttt

SEQ ID NO: 1460 - DNA, 480 bp, Canis familiaris
  misc_feature (1)..(480): n = a or c or g or t
tgaaatnnnaatgaacttctttttgnnaacacataaggctagtgttaaacgttctcctttcatnaagttttacttttatgtttgtctatgtgtgtcatatctgtgtatacacacacatttctttattcnncaaaccttcactgagcacttattaagagtcaaatgttagtaaggcacaaaaaactcatggtccnngcccacaataanctatgtgcccttcatctatatcaaattaggttcatatccactagtccccaagacagatcctggtgtagccagcaggtctcctctgtgttcccnnaagcccacacttggttaccaaatcccgtgggtttcatcacattatttatcttggactggagacatccacaatcagcctgatttattactatcccacagtgatctcccatttctaaacttctgcccttaaattnnnnngcttcatgtgtgaaatgnnnntngatgttaaggatgcagaaa

SEQ ID NO: 1461 - DNA, 624 bp, Canis familiaris
  misc_feature (1)..(624): n = a or c or g or t
cagacatgctcaatcaggcgatcacanntctcacatctttgagaggccccctggaccttcgnnaggaaaacgatgtcccaggaggtgtgctcaagattcgagatgccagcgannagcccaggccaaggaggggcaacgtgtggctcatcccacctcaggtgtacctgaaagctgaggatgaagagggccggaacttggagaagaggcggaaccttctgaactgcctcattgtccggatcctcaaggcccacggggacaaggggctgcatatcgatcagcttgtctgtcgggtcctggatgcttggcagaagggcccatgtcctcccaggggtttggtcagcagccttggtaggggatctgcctgcaacagtaccgacgtcctctcctgcatcctgcacctcctgggcaagggcacagtgaggcgccatgatgaccagccccagatgctgtcctatgcagtccccatgactgtgatggagcctcacaccgagtccttgaacccgggttcctcaggccccaacccacccctcaccttccacaccctgcagattcgctctcggggggtgccctatgcctcctgcacaggtacccagagcttctctaccttccggtagccctggaagt

SEQ ID NO: 1462 - DNA, 221 bp, Canis familiaris
  misc_feature (1)..(221): n = a or c or g or t
tggagttgttgcagtagtgctctgtgtagctctgcacctgtgagggcccacacgatgggagctgaggcagcaccactgggcccctgggcctctccctgggaaagggatcttccataggagaacaaaaggtagtctttacctcacaccacacaccaaaatcaactctaggatgaagagcnnnaatgccaaaacaacnnnnnnagctcccaagtgttccaggt

SEQ ID NO: 1463 - DNA, 677 bp, Canis familiaris
  misc_feature (1)..(677): n = a or c or g or t
ggggaagatgtncnnctccatcggnntcagtatggctgctgtgcagggggnntacgcacnnaggatcagccctggtggggagatcacagctgtgaagcgggccatcctgctgctcgtgnnngccttcctcctcatcggctgggggctcacactgcccgtgctgggcttggggctgctgctctactccttcgctgccgccgtggtggtgccctgcctatcctccgtggttgctgactatggctcagccgggcagaaaggcacaatcatgggcacactgcgaagcctgggcgccctggccagggcggtgggacccatggtggctgcctcagtgtactggctggcgggggccagggtctgctttaccgtgtgctctggcctcttcctgctccccttcctgctcctgaggaagctgaggcctccagcccacacactcaaggccgagtagctgagccagccctgcctgcccagagctgggggacaggaggccctgggccccctccctgcgcccctctcccccctggcccagccccagggtccctgagacactcctagcccctccctacgtgcagacgtgcacagccctgctggttgggctgggagcagtgactccagaaccttccaagctttctgggggcttttctctcggtaacacaggtgtcagccagaccactggatgg

SEQ ID NO: 1464 - DNA, 511 bp, Canis familiaris
  misc_feature (1)..(511): n = a or c or g or t
tcccactccaattcatgattctctctaactcattgttgctnngnntcntggnnncttctgtgctcttgggcctgaccctcggttcctgctggcctgttctttctctcatccccctccacccctttggtccctggacctcttatgtgcaccgcacccagcttgctgtgaagcccagtccttaggggagaaggcttccccgaggatcacccaccccaccagggttggtgggtgggcagagtcctgggcccccagaggcctttgctcacaggcacacactcccaccccactgccaccatggccaggcccagacctatcggtgtctgtccttccccaggattgtgcaatagtcagagtgttcctcttcccnnnggactgggcagtgggtgctcatcttaaccccttctctccatgcaagtgctgttttgggcaggagtcaccgtgcaagggtgacattgacaaccatgttcaaagccaccacagctgctgctgctctgccgcctgtacagaagaa

SEQ ID NO: 1465 - DNA, 518 bp, Canis familiaris
  misc_feature (1)..(518): n = a or c or g or t
gnnagacacacatccacatgcaggtgaaacacaaacactcacaaactcaaactgcaattatgcgtctctgtagactcatttaatctgacacaatttnngtcntctttgaggtcacagctcagaggcacttgtggcctcagggaaaaagtcccatcctgagggaccccagaacattttcatggtacaccaaccttagactgggggatgcccaaactcaatcccagccccagctgtcttctagcacaaggaaccccaaaagaagagacggctgcgcactggtcagccagatgccccagacagacccttggaagagtcctcctgtcatcatggagaaagaagccagacaatttcatcccaactcccgcagggaggagaccagggaacaggacacacctgtttttctggctgggattgtgcccctgaacttctcttggctttacaaatcgctgtgagccctcctctgagggataaacagcaagtgatgtgggggtgttgtgttcctctcaggggagggcttt

SEQ ID NO: 1466 - DNA, 569 bp, Canis familiaris
  misc_feature (1)..(569): n = a or c or g or t
caaaanngctatttatggagaataatcaaaatagaannnnttattgtncnntgaaaataataagatgcaacatttgttgagnnnttaagattcagcagcttggtaacttcattagaaaaataaaccattgtttcttcaattgtgactgttaattttaaagcaaaatatgtgttcaatcatgtatgagatcaaaaaaaaatttttattactaaaagtaaaataaatggaaatatcactgagcagttgtttatactatatatagtaccatagtattctgactggactgtggatacgttgaaatgtttttcaatcacgatcatcctccaagtattcctgttcattcatgtctgcctcaaattgctggtaaatacataaaatagttacttgctaatcatttcaacccactatcctttcttgcctcccttcttgtgttagggtggatattatacattcatattctagccatattttgatatgtctatagtaaacatcccacctgagactaccttgggaatgtgtaagaattgactgttacgctctagtagagactgtgttttgtgttttgttca

SEQ ID NO: 1467 - DNA, 506 bp, Canis familiaris
  misc_feature (1)..(506): n = a or c or g or t
agggcttaccggaaatggataaatgacaagaggcagnnagttgannagnctctcctaccgggcatcatcttcaacaacaaccagctcttcttcctgagttatgctcatgtgaggtgcaattcctacagaccagaagctgcccgagaacaaatccaaattggtgctcacagccccccgcagtttagggtcaatggtgcagttagcaactttgaagaattccagaaagcctttaactgtccatctaattccacgatgaacagaggcatggactcctgccgactctggtagccggaccgctggtttatgccatccagagagccgtacggtgccagtagaggccacactgagccctcatcaccactaccttcagcctctattcctccgaggactcctgttttcagtgcatcttccattatttgggtgttggttgggtttaaacaatatactcaaatggtagggcttaagaaatggaatatgagaagtgaaccaagcaagtatnnncttca

SEQ ID NO: 1468 - DNA, 626 bp, Canis familiaris
  misc_feature (1)..(626): n = a or c or g or t
actggagtacgagactccgnntaccacacttgatcaaatccagcaactgtccaaactgttaaatgcttctaaaactagcatttggggtgagaaaatgattgctgaaatcttgtttctaaggcagttctcaactttggctgcagacggaataacctctaatatcttaaagctcaagtgattctaacagaaccagttctgtatcagataaagagatcatgaatggctgtccttagtcattaggacgacagaacttctgagtaaaagctcagaagtgaattctaaaagtaactgtaacaaagttaacacctattgttggaaaagaaaaagtcctgtaagattattgcagtagctactttagcaagatggtgtaagaaaacacggattcttaaaatgattactacagttgtgaatattaatatgctgataaaactgccaaaaatacgtttgatgtaaaggcagggattaaaattacactttgtcaaagggtcagctttttaaaaattttattcttaacaagtatgttaagaagcagtcacatttttccttttgtggttttaatgaggacaatgttgtagagaatgtaatactgtgttctctgtatgctaaagattggtaaataaaaattg

SEQ ID NO: 1469 - DNA, 471 bp, Canis familiaris
  misc_feature (1)..(471): n = a or c or g or t
caggatagatctgtgtcctgccannctgctgacagatttaatgctgcacccacagatacagganncctccttccctctttgcactgtagagaggctgcactgaccccatatttcttccttttggatgtttccatgattggaataagcacttgtgagtgtatttggcagcttgtgggaactttcccgtatggctgactagctgacttctatgtaagagataagctctgtatgcttcgtttttttctgttgttacatgtggtttctcagtgtttaattttttcattcctaatatgtgattcaaaacagtgggatttttttggtgtgtgtgtgtgagatgtaatcctccatattacttcttagaaagcctattacctgggttttcaaatctgttacatccttctaagggccatctcttatgattcgttacctgagaaggtatgttaaaatgttatgcnnnnnnagtaattaatt

SEQ ID NO: 1470 - DNA, 540 bp, Canis familiaris
  misc_feature (1)..(540): n = a or c or g or t
agagggtgcaagggcttggnnnnnngccaagggggttgantgtctctaatcaagggatgtccctggacaccccgcctcatggccctgnntnntggggaacccagctggtcccgtggcagccacattgctctttacagatattgcccatcttctgggcacatggtagggttacacttctcctcccttggagttagatgtggccccacggcttgctctggcctctgaattaagatgagaagtaatttgtgtccttgtgggcaggactctttatgacccgctgtgcatgttctcatgtcccttttccctgtgacagaaagtgtcatgttcccatctcttgtactcactgcgtgtagcttgctggaagaccttaaatgggttcattcgggggcgcttgggtggctctgtcagttaagcatctgccttctgctcagctactggtcctggggtcctgggatcaagccccgtgtttcaggctccctgctcaggaggagagtctgcttctccctctccctctgcccccctcccctgctcatgcttgcg

SEQ ID NO: 1471 - DNA, 586 bp, Canis familiaris
tcagcacaatgggagagataagtgaaaaactaaagaagggtatatgtgaagctctggaagactctgatggaagtcaggactccccagcaggggaactgccaaagagggtccaccagccaacagaatctgagccagtcaccataaatatccgagacctactttcctgttctaattttgcagtgcaacaccggtatctgtttgaagaagacagtgtttcacggtccacacaaaaactttttcattcaacaaaatcttcaggaagtcctttggaagaaaaacacgatcagtgcaaatgtgaaaatcttataatgttccagaaccttgcgaatgaagaagtgagaaagttaacacaacgcttagaagaaatgacacaaagaatggaagccctggaaaatcgcctgagatacagatgaagatttgaaatgttctacatacttgtacatcattctatcaagggttacagtgaaagcagtttggagcgtcagtgctcaagctgtgattaagtctataaagttgtaaagtaaaacataactagtactgatagctagtttgctatagaacaaagagcacgtccttcagaatccta

SEQ ID NO: 1472 - DNA, 655 bp, Canis familiaris
  misc_feature (1)..(655): n = a or c or g or t
tgnngctccacacgctnnagctnnnnngtgacgttcgcccgggtnnnnatgagcgcnannngcnnnnngnnngactgtgccagcatcagcatcatcgagagctgcntgtgcagaggnnnngtgtgaggcgcgntcccacccttggctggcggggcacnnannaggtgnnagccgctttagtggctctgctgtgccagagctggctgccccccaagggggtgacccaggcctgaccagcgaggtggcccttcatcctggctctgcagccctttcatgtcacgggacgcgtgttccctgagggggcaggtgccacgggcgggtaagggcaccatctcgctactgctgggcacctgcttctccctagggcaaggtcactgccgtccgcttctccatggtggccacgaggccatgtccttcccacttgcagaagaggtgggggggggacctggtcctaccagctggtcctccatcccatcagcctccccccacgctgctgcgctaaattctctcagaccacagtctgttggcttgtttattaaaacccacaaacagggcttctgggggctcagtgattgagcgtctgccttcggctcaagtcatgatcctgggtcctgggatcgagttccacatggggctcccgcagggagcctacttc

SEQ ID NO: 1473 - DNA, 626 bp, Canis familiaris
  misc_feature (1)..(626): n = a or c or g or t
gcttgtgtcagaatatcaggaccattggtcattttaaaaatgcatcatnnnagtgtaagttcacacgagcacttctanntgggtgtntaaaggcatnnanngtcagcagtgatcatgacaacatcacaacaaaagatgctgacagattcacttgtggggncttactgttattttgtcccaacaaatagcctccaagtcctaaaagtccaggcacttcatcagtttattggcacacatgacaacatttctttggccccgagcccaacgcagtttgtacttcatgaaatatattgtacattttacatagtttaatttaaaaaatacattttaagctggttgatctttgactgccttatttattataacctttcagcacattccaaggtttcagttactcaggaaagagttaattaaaatgattttattttggtctgatggatgttttttaaaaggaaaattattattatgaaccttcagcctactttccttgagtgccgtaaaagtgcttgtaaattttttttttaagaagaaagaaaaaaatggtgtttgacatggatggaaattcaaaaatatatatggaactgaaacatgagcttagctaaaataaaagcaatctgtgtttgaga

SEQ ID NO: 1474 - DNA, 505 bp, Canis familiaris
  misc_feature (1)..(505): n = a or c or g or t
cccactaccctcagctcaccnnnnagggcatgattgtggataacaccaccatgcagctagtatcccggcctcagcagtttgatgtaatggtgatgcccaatctttatggcaacattgtcaacagtatctgcacaggattggttgggggagcaggccttgtgcctggtgcgaactatggccatacacacgcagtgtttgaaacagcttcaaggcaatcggccagaaatttagccaataagaatatagccaaccctacggccatgctgctagcaagctgtattatgctggactacctccagctccactcctatgccacctccattcgcgctgcagtcttggcatctatggagaacaaaaatgtccatactccagacattggaggccagagtaccacattggacttcattcataatataatcgaccacatcaatactgtccattaaataggctgagctatccctccaaatccctcccactctttaccttacccttctcagaaactcca

SEQ ID NO: 1475 - DNA, 613 bp, Canis familiaris
  misc_feature (1)..(613): n = a or c or g or t
ggccatcggtagggaatttatccagatccagtgtgagagggaatctgattctcccttccacttccccacctgattctccctccacccgtggggtgtagcgcagccctgcagtgactgcnntgagcttgggcagtccagtattcctgggttctagtccctgctgtgctgcatgactttgggcaagtgactcgccctctctgagtctccctctgaaacagaggaggtggctccccttccccacaccttggagtgggtgggagggtaaggaagagggcctgcctccttttatcccctgcatcccagcccccctggttcaccagggggatggatggggtgagggatggcagcatctcacctgcccccatcactgtcacccccagctgaggcacctgaggtgggcatgggggacccaggcctccggctgccccttgtgggagccattggaatgtatcgcctggccggcccccctcgccccctgcactgcactcccaagtatttgagtttgattccttccacacccattctgagtctctgtcctccccaccgcccccaccccccaccccacccagggtttcccaccacaggggtctggaagtgtgtatgatgcccattg

SEQ ID NO: 1476 - DNA, 690 bp, Canis familiaris
  misc_feature (1)..(690): n = a or c or g or t
ctatccccactatcagcattgacagattcnacactccntgnctcannnnnnnnnngnttgtcctcnnngctnngtgnnnnannagcattacagtgtcctgtgcacacacacntgtctccaagaggactgggagctttttgaaggcagggattatatcttctgctaattccctgataaccggattcggcatagtggctgatacaaaatgaaaatatctagtacctgtttataatgaattaacagctcttggaatggcagtttggaggtttctgatgaccccactctgccaaaagggtggcaccattaggcactccacacacaaggtaggagatttatggcccctcctgttcttctggcaggtgcctttatcacagcgtgtatggttcctgaatcatttgccaagggattcatgtctcaatattataatctccaaagcgatgatattagaaattcaattttaaaaaggaactgtttagggtgtcagcacgttatgataattatctgagaggatttttcccccctgcttgttcttgaactgcactggtaagctctttttcacctcaatacaatgaatccggagaatatggactatttatgtgtatgtcccccacccccaccctcattctcatctcccatccccatattgccaacacatggggagcggtannntgttccccggagcacacgact

SEQ ID NO: 1477 - DNA, 461 bp, Canis familiaris
  misc_feature (1)..(461): n = a or c or g or t
gatgnggtgcattatcctatctgaccnnnatagaagatcagcnnngtcactcatcttttcaagtcttcctaaaaaggatgcatgtannaagtggtgtgggataggaatggatttgagttgtnnctctgccatttaaggantgtnngactagacttcatcttnnngggcctcagcctactcatctgtaaagggagatgataatgatgataacacnnnntttatagggttaatgagaggcttaattgaaggaatacacagaaagnnnctggtnnagtagcttgcttattaaatattagttttagttggttagttagttatagctaagcctatactttaataagagatttggattcaaaggggaaaagcnnnttaagataggtaagatatatttgcttctgaaattttgcttaaataatagggatttctttttctgacnnnntgannnagttttttttgnnttc

SEQ ID NO: 1478 - DNA, 535 bp, Canis familiaris
  misc_feature (1)..(535): n = a or c or g or t
cttccactacttcnagnncatctgaggaggaagagaaccaagaccatgtgcagtgcctaccgtcctgaatgcctcatccctgttccagctagctgtcacttcagtaggctggactttaagtttaaaattcagtttaactaataagtttgtttttgtcttctatctagtttccataataaaaactatctcttccatctctttactctcccttcttttacattcttcctctcccattcctttcctctcccttggtttctttactcctctctctttacccattatatctctgtaagacaatatgtaaggttttttaatttggtgttttttttttttttaacctcttttcatttattttccatagggggaaaaaatcccattttcctatggctcagctcttatagctgacttctaaaggtttctagttctggtgaaaaaaaattaatagccttattgaatctttcttttcatttctgacaccctgaaaactatcacctttttttcatctttagcannnnnaagttaatttctctaattg

SEQ ID NO: 1479 - DNA, 684 bp, Canis familiaris
  misc_feature (1)..(684): n = a or c or g or t
aagctactcnttttcaaggtggcaagtgaaacttaaaannnngtcctagtgattttgctcaggtttattcagcaagttagtggtgcatctaggacttgttcagttctcatnctagtcttttcagaatgaggatgactccaaagaggcaagaattatctttatgaaacaaaaatcagcatataataaaagacaagtactgagatatttgagaaaaattcacaaaaacatttgcttctttgtccacaaccactggaaatgtttctgtgatgaaatttcctgcttttgtgataatgacttaaaatttgacagttcatttctaaagaagtctgcttcctaccagttttttttttttttccgtttccgatatacccttgctactctataatatacacaccttttttcagagcagaaagataaaagttcagcttccagtcctagcgtgtaagttttaaaagctatgttgagcaagtcccttcagaactgttaactctggtatgtaagagtgcctggatctaatgctgaatgactgtattcccaacattttcttaggttaaactaaaaatacataaatctaacttttggtcttggattgacctctggatagagtaagtcttaaataactcagtataattgtaacatnnnnnntgtgtactagtatggaaataaataagcacttttccnnnn

SEQ ID NO: 1480 - DNA, 426 bp, Canis familiaris
  misc_feature (1)..(426): n = a or c or g or t
ctgcccagactattagtnntgtagggaccccttactttggggctgatnngtataatannngagcctttctgtctactgatcatgacttaaacattcctaagaataaaggtgnnnnngaatgatttaanntagaaagaattttaattacatgaaaatatttaatgcaatgtgctttctgtccactcaagnnnnttctccatcnnnnnnnnnacatttcttgttaanctatacactgctttttatgcnnnnnnnnnnngaaactgaaaattctagtttcactccgnnnnnatgttgttaaacatttgaatgtgtacccctcatatgtgaacaattaaattatgatctattagtcatagataaataatcagcttcaaaagagttgatatcttttgaccatttctgtgaggtttgctattcttgcatttt

SEQ ID NO: 1481 - DNA, 593 bp, Canis familiaris
  misc_feature (1)..(593): n = a or c or g or t
actactaatgagcccccacnnnaaaatgtggtccaacaagtgttgggaagccaatttaatatgaatatgtcatatcgtggcgaagcccagaaccagattagcccttgcctcatacctcagtcttcatgctccccagctgtgccttcagctcagtgacatccctgtacagttgaccaattaagtgatccctggggacagaagaacaaggctgctttcaccaggcttccagctctttccttctaaaggcgagctgggagatcaggggaggaagttaaaagctggtgttcatttggggaaagttctttgaaattccataaattatatgctaagaccctccgtgttaccagattatcacatccccagattatcttggcctcatctgatctccctctgggattacagacacccatatttggggatcaagacacttctcttcctcagggcccaagtgtcacggagcatctcgccaggtgagatcagccggaccctggcatcatgtaatttctgtaccacctgcctgcacccagcatagactcacttctcatccttgttcacaccgttttgactgttgaaattgaaggggtcactgctga

SEQ ID NO: 1482 - DNA, 636 bp, Canis familiaris
  misc_feature (1)..(636): n = a or c or g or t
gcgaccgctgctcggcctgctgatgccacacaccaggcnacctcccatcccgcctccccccaccccctctaccaccttgcctcaggnctgcccctccttcccctctgccagggtgcaggcctctgcctgctagggactgctggatcaaaattgtccttctctccctcgttcccttccttcccctcaccccagggctttctgtctggggggccccaggagtggggaaccagaggccacccacatgagtgctcaaggttgttgggggtgtgggcagctcttctcatctgtaccccctttctcttccctctccctctccctgcggccactggggacaggagataggatgctctgacagcatccaattgtgaaactaatcttaaccccatgttgtcagataccctatttctggagtcacatcagtggggagggaagtgggcaagtggaatggaaggagggtggtgtggatgtgtgggtggagaagggagggtaggagaggcaagaaaaggaagaatagggctttgcgtgccggtcttgaggaaaaggaggacaggtctggggaggaggaattagggagggagggaggagcaggcagataagtnnnngtgggagttggtcannnnnacccttgcctctagt

SEQ ID NO: 1483 - DNA, 443 bp, Canis familiaris
  misc_feature (1)..(443): n = a or c or g or t
atctgntccctcaagacctttcctaccatggaaatgttcgagtatgtcagggtaaggcagtggtgctgcagctcccaccannntcccccgcacccagatcacaggtccactatgcggggcagcagtccgccttcccctttcctgtcttccccctcaccacctgccttccacctcctcctcggccctccagaatgaccgtgatggctggaatccctccgtgtgcatgaacttctgtgctgccttccttagctttgcccagaacacagttgtccaggatgaccccaggcttgtccatctcttctcctgggagcctggcagcccagtcacggtgtctaaacatcaagatgcaccctatgccttcctgcccacgtggtatgtggaagccatgacccaggacctcccatcaccccccaagacaccttcccccaaggactgaaacttca

SEQ ID NO: 1484 - DNA, 473 bp, Canis familiaris
  misc_feature (1)..(473): n = a or c or g or t
tccagcgggnagtncagcggggaggacgaggagngcagcagctcagaggcagacgagatggccgcagcgcttgaggcagagctcaacgacctcatgtgacctgtggggcagggcgcagggcagacaccgctctatccctggggggctccaggccgcatgggccctcgcctgaggtttccttttctccgggaagacatgtatatttgcagagctccacatacagaaacaataattttgcagaaataggtgtttttagaggttttactacagaaggtctacttttctaagggacagtgtcctgggaggtggtgtgccaaagatgccgcagtggcccacacagcctggtatgcagtgggcaggcaggacatggggcggcagccagagctgcccctgtgggccaggcagcgggcgggtgcacggggccctcctcctccaggacacagatgtaaagtnnnnnatatctatttcgcatt

SEQ ID NO: 1485 - DNA, 655 bp, Canis familiaris
  misc_feature (1)..(655): n = a or c or g or t
agtacattnatatatatgtgtgtatatatatatatgttgctgcatcacttgtgtagntaaattgtatttcaagacagtgaagaaaaattgacatgtatatactgttcattattgtttatattaagtcttgttttaaatatgtattatgtgtatatattgtttggagacattattgtttatgccttagaagaactgtagcattttattttagtctgaaggtaattatagctatacagcttgtacagtaattatcctctaccaacactgtggcgtctccttgatcttggtagtgcctgcctttgaaacagggtgtaggggatattagttttccatttttctattttgttatataattttaagccaccagggcctaaattaaagtataatcatttgtatccatgtggaataaaattgtgacaatttcctacacacacagtattttttcatagaaacatttccttcccatttgccttgcctcagaaataaatttaaaagacatttgtaaccactgtgttttatctactgtgtgttgtggtggcctgttggaggcaaatagatcagatttttttttgtacgtatgtaagagtacttgaaattttatttaaaataaaatgttgtggaaaaggtagcattcttttttttaggagtgttattt

SEQ ID NO: 1486 - DNA, 621 bp, Canis familiaris
  misc_feature (1)..(621): n = a or c or g or t
tctgccccttcctatnctgaagaatgacaggctctggtttgggggtgtgtcataggatgggctggcagcctccacttgggttcctctgagtganngtctttccctacttttcttagcttccagttccagtgtggacccaaccaagggtgcccccttccagcccagtccctctgaaggcttggggctcaggcccaagaggtcctggggggcctcagaggagtctacatgtcctttgtgcaaaagaacccgctctggggctctggagagaccataaggatatgagtgccaagggctggctgtccccatggggacaggagggaaaaggatggctcaggaggaggaggcaggtccagacaggaagggctcagcccctaccagcagtcgcccccacactgagacaccccagcagctgcccagcaccagagactgggccagcctcaggaaggctcaagggggggaggaaggggtaggtcccatgggtagaagagaagaaatagaagcccttgcagcctgctccaactcaggtcagccacttgtacctgggaggacagactgagcggagatttgggctccgagaggccggggagcccacnnnnnngattccaataaaagccaaggcnn

SEQ ID NO: 1487 - DNA, 552 bp, Canis familiaris
  misc_feature (1)..(552): n = a or c or g or t
cacgctggggntgtttgggtgaatgagagtagccagagggtggctgccctgggngtnnnnccgcctgcctcttgcagggggagctccagctccagttcgaaatatcaacctgtcctgctggcaaaaanagggcccctatgcggtcaccttcagcggtcacgctgcagctgcccatgtcaccccaggcaggcacaatgtccccacnnnagcctgtcccagccaccagagcccgggtctaacctaaccagcctggcccctgggccccttccctcaggtcgaccctagtactgcaaacgctccctcaaccctcctatgcacacttgactctctgagcatccccaggccctacacagagctggacggctggcgtggggaagggaaagctctggtcagtgagggaagggctggggaccaccctctactcagcgtgganaannnnnnngccacccacttcnngcacatgtgatcnnnnagtgtcagcccagggccagggatcaacacatattcttgcctgtattttccgcnnnnnncccctgaaacacacnnnnncgc

SEQ ID NO: 1488 - DNA, 677 bp, Canis familiaris
  misc_feature (1)..(677): n = a or c or g or t
agagctgcagctggtatagaggattctgcttgtattccatgggcnnactattcaactgtggatcaagnnaangatctctatagtggattaattggnacactgattgtttgccnnagacattacacggaattcttccatcccatattaaaattggaattctcccttctgtttttggtttttgatgaaaatgaatcctggtacatagatgacaacatcaaaacatactctaaccaccctgagaaagtaaacaaagatgatgaagaattcagagaaagcaataaaatgcatgctattaatgggagaatgtttgggaacctacgaggcctcaggatgaatgtgggagatgaagtcaactggtatctgatgggaatgggcaatgaaatagacctgcactcggtacattttcatggccacagcttcggatacaagcacaggggcatttataggtctgatgtctttgacattttccccgggacataccaaactgtagaaatgtttccaagaacacctggaacctggttactccactgccatgtgaccgaccacattcatgctggaatggaaactacttacacggttctatcaaatagagacacccagtttggctgaaagaaataaattggtgataagtggaaaaaaaaggaaaaacaatgattcataataatgtacatgaaagt

SEQ ID NO: 1489 - DNA, 380 bp, Canis familiaris
  misc_feature (1)..(380): n = a or c or g or t
tgagaaacnncatttttttnnnntagtttcannnnnnnntcagtgaactgctgagaataacagattaggatcatntnnnnaggtatgcagatatgaaaatnnactgaattagaaatatnngcttaggtacattttctaaattgtnnnacaaaatannagtctgtgnngnnntgagaaaatggaatgctagtcacaatacgcttttacctgtattggnngtnntaattatatatcatttatgcctactgaatgataaatacacatcacattcannntcaaataagctaaatattttcccatgcatgtnnnctaatttaccttttttgttctgtcttttttttcatttttcattttcaacaatgtattggatcagctgacac

SEQ ID NO: 1490 - DNA, 602 bp, Canis familiaris
  misc_feature (1)..(602): n = a or c or g or t
tttatactacatatattgtagnacaannatatagactantgggtactgttacttctgacactcannnagctattatngctngaagattaattttatccttgctagaaatgaaagtaagctattttaaggaatcttaccttaacctgttggagcatgtgagtaatgtgctacatttttctgagatgatctttttttcctttttaaatttttacttaaattctagttagttgacatgcagtgtagtactggtttcaggagtagaattcagcagttcatcacttacatacaacatccagtgctcatcataacaagtgccctccttagacgtatcacccacccatttagcccatcccctaccttctgagatgatttaaacaatttttcctgtagtggaatgtttacctcttttttccccagagtattgtatttttccccaaacttacatcagaaagttagctctggttagagagattggttttaaagtaatctaaaaaacaaatgctcattacattttattttgtttaataaagaatattctcccaaagtagatactttggcatttacagaagtgagcattcannnnttagtatgttgtttcttgt

SEQ ID NO: 1491 - DNA, 691 bp, Canis familiaris
  misc_feature (1)..(691): n = a or c or g or t
cagatccgggnagtnngaggctgtnnaggtgctgacggaagaacccgacaccaaccagaacctgtgtgaggcactccaacngaataatctgtgagcctgcacgtgggctccctgtcacgggacagaggggnnggggagggacccgaagccgagacgggagggcttggccacagcacagaccatgtctttcatttcaccagtcacctgggcagggtnnaggtcnagccccctccaatgctcagttactcctcagacttgcagggtggtgatggagctgagggccacacagcgtaccccgggtnnagcagtcccccggtttctgcatagttgtgctggtgagcagagccagcaagggtttaacctggaggctgctttagcctatttgtggtcctaactaggtgannaagcgaagcaaggacccagcttggctgattcctcgggcctgaggagaaatgacaagaagccttgctctcctgcccttcctggggtagggcatctcaggaatggtgagggcatcgagtcatccctcagggatctgcacctgccctccttcccatatgaccaggcccttccagcccttaggctgccccttccctggcagagaggaggaattcttcattaggtaacctctcaggggctgttgaccaagggcaaaaggcccattatttggcagtgaggagatagggagagt

SEQ ID NO: 1492 - DNA, 481 bp, Canis familiaris
  misc_feature (1)..(481): n = a or c or g or t
agaatgttccattnganngtttcagctcagacntngacnnnntgctggtcatgaacaannnnntctgngaatgggggcgtcgggctggcaatggggctaangaggnntctgccatgggattgatttcggtaggagagctgctctcccccaaacatggcctggcacccctggccttgcactcctccccacacgggactcaggtctgaaaccccaccaccacagatgcatcagtttagctcacagctccttgtctccattatgaagtccacgttcccctggccagggtgggctgggggacgtcatacagtgagcctcattcgccttaattcttcccgccggaatgcaagtggctctgggggctctgcccagacgccgccgtctccccatccctgctgtccccatggccgcgccagctgagccccctccgcctggagcacctgtctgctcaccaccagctcctgnnnnncagcttacccatcct

SEQ ID NO: 1493 - DNA, 469 bp, Canis familiaris
  misc_feature (1)..(469): n = a or c or g or t
cccaccccagtgctgcagnntacacatgnnagncctcatgtgcccactcccttgnnccacccagctactgaganctcactttgtgccgaggtgggccaggtccttccttacctcctcaccccttcacggggtagctcagtgggcaggttgggcaacagaagcacttatgatccctccagaccaaaggagggcagccggctgcaggcaaggatttcatggggctggtggggctgggacacctgtgatggctggtactcctcacctgtggctgcggcctggcctgagggctccaggagcagtgggtggtgggcaacctggcagccccctaatccctagactgccattccctgcctgtggctggaggtcccttctccccagaagcactgttgccccggggggttccctagcccatgtcccctcccccagcatgataccttccccaaaccccattctccagttttgttcagtt

SEQ ID NO: 1494 - DNA, 604 bp, Canis familiaris
  misc_feature (1)..(604): n = a or c or g or t
tgagcaagggtcagggtnnactcctgtgctcgtcannaggcancttgccatcggtgttaatgaagtgaccagagctctggaaaggaatgggctgctgctggtcctcgtgtgtaagtcagccaagcctgccatcatcacctcccacctgattcagttgagctccagcagatcagtgcctgcttgtcaggttccccgtctcagtgagacactcgcacctgtcattggcttaaaatgtgtcctggccttggggttcagaaaggacaccacggcttttgttgaggaggtaaaagccataattccccgagtacccagtttacatgtaccatggctgcatgggcagcctaaagaagcctgggaaaatgtagacactgaatctctggaaagccaggacaaggagattttagaaacttcctttgaagacctctctaaacataaaaagaagcttgtggaaggtcagcaggctgtagtgttacaacccctgaaaataaagaaagtgattccaaaccccagtaagataaggaaaccacccaaaagtaaaaaaccgacttcaaagtaatctcctataaacttgtagtttcctacagctgtaaaaagacactctgta

SEQ ID NO: 1495 - DNA, 561 bp, Canis familiaris
  misc_feature (1)..(561): n = a or c or g or t
gacctnnaantgagtccntggcattcagagagaggtcagctggtaggatggtgaggccatgtactgcagttctgttcgaattgtaatggtgatgacagctctaagtacaggcattgtcagaagatctacagaagtcttttacaaaagtgtcgtgcttgttttatgacagttttctggctccatctcactgattttgttttcttactgcttgtgtaagaacagctctccagttcctcattacattcatttctgaccgctcactaattcaagcaatgcttcacagtgacctttaaagtgattgttctctctttctctcctccccgccccccctctcaattttattaacttgtattaattagacacatgaagggaaaaaagtgaactgctgagtatcttatttaggatgggtaaatatccataggtctataaccctaatcagaaactcttgctgtcaggtatattgtaggattcagcattttcagatttagtaagggaatatgatttatatgtatcatacattacagtaccatcaggatttgaagtgggactccacatgttaat

SEQ ID NO: 1496 - DNA, 552 bp, Canis familiaris
  misc_feature (1)..(552): n = a or c or g or t
gaanngcagatactgtgatatgttcccannnacccccggcaaggtgagagctaagaagtattccgaggnnnagtcatggatccaccagcgcgtaaagaaaaatccaaagttaaagaacctgccagcagagttgagaaggccaagcagaaatcagcccagcaggagctgaagcagaggcaaagagcagagatctatgccctcaacagagtcatgacagagctggagcaacagcagttcgatgagttctgtaaacagatgcagcctcctggagagtgagccaccctatgctcaaactaggtgggaccctggaggctctgtttgtcagcttggtaccagttttactgagatgatgatccacttggaaccttacagatttagacaagaagacatttgcattattcctaaaactggataaatctgaacttcctgtatgtaccttctgcttcattggttccttcagtctgaattggcccaatgcttgctgaagagacttgttttgttctcctaagacaatagattctttttttttaaccttttttctattgtttgaga

SEQ ID NO: 1497 - DNA, 599 bp, Canis familiaris
  misc_feature (1)..(599): n = a or c or g or t
ccctctccctcataaagggtgagctgcagcagcccctgtgcnntcggtgcccgagcatgctctgggcgccgtcgcacacccacggggtgcccccgcctggcctcccgagccacgctgcacagccagaaaattcccccagactggttgggtgagtcctgttgggcaaacacagcggggggcagagaaccagggagagggctggcgaggctgagaaggctctggagattggggtcggtggtccctggggccgcgcgtcgccctgcactggtcgccctggcctcggccaggtccccgaaccccccaagggcggcagggcccagcacagctgagccaacccgactgtttgccctacagtcttgtctccgaggtagccagtgtggccgcagaccgtccctgtccagctgtattgggcacggggcatttggcgtgttggggacaaatgaaaccagccactcagtcctcaaggagtctgatgtcctggggggaatctggacagatgggaaattagaacaagtgggtaacacgagagtggtcaagaggcagggcgggagatggccagggcctgggaaggatgcaggggcccgtgtggtcttacagag

SEQ ID NO: 1498 - DNA, 493 bp, Canis familiaris
  misc_feature (1)..(493): n = a or c or g or t
caggggatcagggnctgaggtangatacagaacttagaagggaaggggaactttgagngccagaaatgaatgaaaattaggttattttagaaagcagagtcaaaacccaatttagtaaccggaggctgccgcaggattctggccctgaacccagattctgaaagtgaccaggagccagcagctcctgaggcccagtggtcctctcttcccaaaaggctctgttgtcctagggctgaatatcactgtcagagtcatggctctggaattatggtgggaagtgctattctggattgaagcatatttggtgttgtctaatggatagacagaaatgtatgtttaagctcaaaaagcattatctagtaggattctcttgaacatctggctcccccgactgccccgagcaagaccacctcttttccctcttctgtggctgtgttggagcagaggaagagagacagaggattgcatttatcccttaacgttcctgaaatct

SEQ ID NO: 1499 - DNA, 550 bp, Canis familiaris
  misc_feature (1)..(550): n = a or c or g or t
gtgctcacgaaacccaagtacagtgtgtgnntgattagggctttcggngtcactcggntgtcagagagggacaggattccggacagcagaagtgaggaccnggccacaatcggtgaccagcgcatcgagctcgcccctcgggccctcacgggcctccgccggcttgggacggtttcctcgaagtagtcactctgagcattggtggcaggaagagtagggaagccgtgtggcctcccgggccgccaggtgtaaagcccgtgccatgtaaagaagaggagagacaaatgaggaaatgattctgctcataatagggccattttcagcattcaaattgcatgggcattgtttatttttttattgataatttgcagtttaatcttcccatactagagttggagggattcgttacttggaacatcctctgtattcaagaaacacagtgggcacagcacagaacctttgtggggccaaggatatataatataatataatataatttatattatatatattttttggactgaatgctcatagagtgtgatcaggatgg

SEQ ID NO: 1500 - DNA, 559 bp, Canis familiaris
  misc_feature (1)..(559): n = a or c or g or t
agtttcctggctggagggaaaactgcaggctctggaccataannaagacagtggggaatcataccaaaaaatagntcttgcaaaagaccagcatattgagaaattacaagctgaattgaaaacttcccaggagcaacttacagcccataaactaaagcacaaaaggaaactgaaaaagctgcaaactgatttggcaacagcgaagcaagaggctgccatcacagttctggaactcaatgagaagataaggactctatgtgaagggaagccagcccctagagaagacaactctcgggaagagtcctatggcagtctcccgcctgtggaagaaagtgatcgaaaacttaacctgattatagagttgtcaatgcaggtttcccttcagactgagaagattacccagctggaagaagttttagaggaaaaggaaaggaagattcagcagctggaagctgagcagggatcccatcccttccaagaggctgaggactctccagaatgtttacaagaagccccaattttctttaatgatagtatcacccctgtggtctctgatgag

SEQ ID NO: 1501 - DNA, 703 bp, Canis familiaris
  misc_feature (1)..(703): n = a or c or g or t
gcaagtgatacaccgannnnnncaactgcttgaataaaagatagacgttnnnngtgaaattgaggagtnnagtgtattannctangtgagaaagagctctccctagtnntaatttccagtttttgcaaaggaaatttattttcagagtaaaaagtattttcatatcttttgaggggacgttagctcatcaggaaagaatattattaggtgtttaaatactaacatttagggtgatgcataacttattagaccctgaaaactaatttgctgaaatctgttttgtcctgtaagaccaacccttaacctacagtctgtttttctgtgctcaggtcaggacctccacttggcttttcctctttggtctcccgtttgcagctcttaaacagttttagttggacttttgaggaggacttgaggagaaagtgcatctgttcagtgttttggttcctttaataggatgctgcctaacccagctcatttctatgtcctgttgactttgttattcttgcaggtaattgaaagaaaatgtcatggatgggcgtcattaaaaccagctcaaaaatatattcctgtcctaaagatttcttgtcaagatgtcttggattgcacttttgttgagggaagacagtgtaaatagttaaagaatgttgataaaactgaaacatttggttatggaattgtgtgnngtgtttgaaggtttctg

SEQ ID NO: 1502 - DNA, 685 bp, Canis familiaris
  misc_feature (1)..(685): n = a or c or g or t
gctgctggagaangtgcaggaanatgcnnagtacatctgcagnngccgccagggggnnnnnttcagtgtggctgacctgcatgcagtngatacctgggagaagcagacccgagannagngaacccctctcaccaaatactacaaccagtggcggaagctgagggagcgagagatccagctggagatcagtggcaaagagcggctggaagatttgaacttgccagtgataaagcggcggaaggtgggagaccgtaagaatgaagacagagtggaatttaaagacctctttgatctgcacagtgatgaggaagatagtactgtggacttctcagagagagggaagcctgggtccccaggagcttggcagagggtaaaggaggaggaggaggaggaagaggaagaagatgaggaagatgaagaagatggcagctgtagcagccaagaagtcagcagttcaaaagatggaagcccagacacagaggtgggcctggatgaccaggatctgtggcggctggcccagggaccagaggatgagttgcaggatctccagctgtctgaggaggactgaggggtgccagcctggggacctgtgggaactgctgtgcagtgttcctacctcatcaggcagtcgggggggaatgtggcttcttggctggcccagaggtcaggcaggncgcgtgccatg

SEQ ID NO: 1503 - DNA, 773 bp, Canis familiaris
  misc_feature (1)..(773): n = a or c or g or t
acaagaataaganctnntatgagcancggctcanngacgacatggtggctcaggtnntcangtcttcaggtnnnnnnntgtgggnnngcaagaactacgatggggatgtgcagtcggacatcctggnnnanggctnnggctccnttggnctgatgacatctgtgctggtctgccccgatgnnaagaccatcgaggctgaggctgctcatggaacggtaacccgccattatcgnnagcaccagaagggccggcctaccagcacgaaccccattgccagcatctttgcctggacacgcggcctggagcaccgggggaagctggatgggaaccaggacctcatcaggtttgcgcagaccctggaaaaagtgtgtgtccagactgtggagagtggagccatgaccaaggacctggcaggctgtatccatggcctcagcaacgtgaagctgaatgagcacttcctgaacacctccgacttcctggacaccatcaagaacaacctggacaaggctctgggccagtagtgggggcgggccgcgggtggcgggtggggctgagctagcagtgggcctcgagtgagccccctctcaggcctttgtagggaacttttttttataagcaagatgtttttaaaagtatctgtgtgtttcccctcatggtgatgtgaggcgggaacagtgtgttttacctcagccactcagtgtgttttgcatactgtaatttatattgcccttggaacacatggtgccatatnnnnctactaaaaagctcnnnnn

SEQ ID NO: 1504 - DNA, 534 bp, Canis familiaris
  misc_feature (1)..(534): n = a or c or g or t
gtactnncgaaagtatcctgatactcctgtgnnntattttgagtttgtgattgatccaaactctttttctcgtactgtggagaatatattttatgtttctttcattataagggatggttttgcgagaataaggcttgaccaagacaggctgccaatattagagccgattaatattaaccaagtggatgagggaaatgatcccagttctcatggcaggaaacaaggagttatatctttaagtttacaggactggaaaaatattgtggcaacttttgaaatttcagaggctatgatcacaaactcatactagggatttttgttcttagtataggctgcattatctggctttcctaatgtactcaaaatggagagtaaaatccaagcagaagcacatactgtatttcatgtagaatgaaaaagtgttttcagaaacaccagaaattgttttactgtgcagtgtattttttttggtactttataaggttgtcatgatcttctgttattaaaaaatattcacttgcatgtttgcaagat

SEQ ID NO: 1505 - DNA, 400 bp, Canis familiaris
  misc_feature (1)..(400): n = a or c or g or t
tgtnnnngcttccaaggannnnnnannnaagctctttgactcnnnaactcttnnnnnccagaagactttccgnnnagaacgtcnagtcnnnncagnngccctctctcnnnnctatgnncatgtggtgctgggtggtggtnnnnnnnccatggatgtnnnnncnnnctcnnnnaggattggcaagtttgaagccaggtttttcnacttggcctnnnaagaagagtttnnaagagtcaagggtnnnnnngnnnccatcaacagcnnngccttccatcccgatggcaagagcnatannnnnnnnggtgaagatggttatgtnngcatcnnnnnnttcgacccacagnnctttgaatttgagtttgaggcttaagaagcttggatctccatcagggccagggna

SEQ ID NO: 1506 - DNA, 652 bp, Canis familiaris
  misc_feature (1)..(652): n = a or c or g or t
ggaaaacgcttggggactagtgtggggagaggagaaaaataagcgataannagcccccaggcccacagagaagaaatgacccagggaactaggaagagaaagttcagcttgctgccctgggggttctttgggggatgaggctgatcttaggtgattgcgttttagaggaagaggcccatggaattccttatcaggaagaacccaaaaatggggaaggaaaaaaaaagtgatgtcgagcctttttaaaggctgaagtttggggtgcagagaaactttaaagaatattgggaaaccacaaaaaaattagggggcagggagggatttctgttagagtgctttgaggaacgtgaaccaaggtgaagccacgtctggaaggaacccagcaaactcttggggctgccctgttcctccccgtttccgggagcttgttaagctgcaagtgcaagcagatcccagctcaggccgccagggctccctccctgcagccaggcaggactggggacttccactccaagacgctccagggatggaggggccctcctgctcattctcaggtctcactgtcaggaggtgtctcctgaaacccaactgccaccagtcttgctgccgtggcagctcacttcctcgaattctgtcctcagtggagagggga

SEQ ID NO: 1507 - DNA, 615 bp, Canis familiaris
  misc_feature (1)..(615): n = a or c or g or t
tatgaaaacatgaaaaggactttanatgnngttctccaccaccaagnaaacagccannnngccaacgggatagctgggagtatggccaccctgctccacgatgcggtaatgaatccagcagaagttgtgaagcagcgcatgcagatgtacgactcaccacaccggtcggccctcagctgcatctggacggtttggaggaccgagggcttgggggccttctatcggagctacaccacgcagctgaccatgaacattcccttccagtccatccacttcatcacctacgagttcctgcaggagcaggtcaaccctcaccgaagctacaacccgcagtcccacatcatctcgggcgggctggccggggccctcgctgccgctgccaccacccccctggacgtctgtaagacgctcctcaacactcaggagaacatggccctcaacctggccaacatcagcggccggttgtcgggcatggccaacgccttcaggatggtgtatcagctcaatggcctctccggctacttcaaaggcatccaggcacgtgtcatctaccagatgccctccactgccatttcctggtctgtctatgagtttttcaagtactttctcaccaag

SEQ ID NO: 1508 - DNA, 111 bp, Canis familiaris
  misc_feature (1)..(111): n = a or c or g or t
ggaagaaatggtaattcttgannncgaggtgtttcttttcgttcttatcactgcggagaaaatatcctgaccaaaaaaaaaaaattcannnntggggattcctttctttta

SEQ ID NO: 1509 - DNA, 629 bp, Canis familiaris
  misc_feature (1)..(629): n = a or c or g or t
aattgagatttccatacccacactntngnnnnnnnnnanncccagangtaagagaataggactggataatgctgcaaatgctcttnnnnnntttgtatgagaaaccagggagatgtgatttttccttttggaagagaatatcccaaaattggttaggctaagccttgggaatagtatggtagttttacatccagaggctaacttgacatagttgggaaaggtagatggaatgagatctgttttctgtgcttctaaatgtttttccttaggctgctattgcttcgtgtttccattatagcaggtttagaaaatcctcaaaaaggaaaactgatttgcttgcctaaaactgtaatgcccacttaacctcccttactcagtgagcatctctgacagtttgccctggctcttaagtaatgtaaagtttggagaacatcatttacatgaaatgggcaccttctctctctcttccagcatgctgcttttacaagtatcatggggtagtggaaagagcattgcgtttggagttaagatatctgggttctagttgcactccgtctcagcaaaactgatgtgnnnnntggtcaagtnnnnntaacctctatggattnnnattttctcatctgtaaaag

SEQ ID NO: 1510 - DNA, 570 bp, Canis familiaris
  misc_feature (1)..(570): n = a or c or g or t
tcctttaaaagccccaatttcagaatgtgaatcaannatatccatattacaaaaatnnaaatgtaattccatgnnncntattttttatttttttaatttatgtaattgtattagacaatgcttatattatcagatacttaattnnagaattaacaatctgcttgagccccaaaacactacttatgcacttcacttgccaaaagatttgtgcaaggttttgtaccctggtaaatgatgccaaagtttgttttctgtggtgtttgtcaaatgttctatgtataattgactgtctgtaacatgctgtttncttcctctgcagatgtagctgctttcctaaatctgtctgtctttctttaggttagctgtatgtctgtaaaagtatgttaaattaaattactctatcagacgcttgtctgtcttttgatgtagaagcaactttgtagcaccttgttttgaggtttgctgcatttgttgctgtactttgtgcattctgaacatgaatgtaacattagatattaagtcattgttataaggggttgaatttaannnnnntaagtcaaagttgaaagg

SEQ ID NO: 1511 - DNA, 649 bp, Canis familiaris
ttttttgttccgctaaaagaactagcagatctgcctcaaaataaaagctctcaagaaagtattgtttgtgagttgaggtgcaagtctgtgtatttgggcactggctgtggaaaaagcaaagaaaatgcaaaagctgttgcatcaagagaagcactgaagttatttctcaagaagaaagtagtggtaaagatatgtaaaaggaaatacagaggcagtgaaatagaagatctggtcctgcttgatgaagagtcaaggccggtaaacttaccgccagcattaaaacatcctcaagaattattataattcgtccagaataccactgcatataatgtctggtatttgaagagaaaaactggcttacttttgtataatatgaaacacaggctttcacaaattttgtattgcttttttccagttttgcagaaaatttacattctagttctcttcacacagtagaagttgtaaataatttatgattgacagtacatattcaaaagtatgcattaacagcataccattatgctgttttatttgctgaagaaaatactgtcttctatttttaatgatccattaggtacgatgtgtagttctgtagaatcttaaaacttttgtactttgaatttggtgaaaatgtattaagttgtctacc

SEQ ID NO: 1512 - DNA, 32 bp, Canis familiaris
gcatcagagctcttcagtcaatgcttgtttag

SEQ ID NO: 1513 - DNA, 539 bp, Canis familiaris
  misc_feature (1)..(539): n = a or c or g or t
ggnnnacggtgaacacaaaagttcccagnntcaaagatcaagnnaannaatacgatggattcacaatcacaattacannagacaagattggcaacatactgttctctgtggaaacgcaaaccacagaagaaagaacacagttctatcatgctgagatagacgcactttataaagacctcacagcgaaaggaaaagtactgattctttcatcagaatttggggaggctgatgctgtttgcaatttaatcttatccttagtttattacttttataatttaatgccactctctcgaggatccagtgtaatagcttactccgtgatcgtgggagcattgatggcaagtggaaaagaagtagcaggaaagatccccaaagggaagttagttgactttgaagctatgacagcccctggttcagaggcctttagcaaaatagccaaaagctggatgaacctaaaaagtatttcaccttcctataagatgctcccatctgtgtcagagacgttcccaacattaagatcaatgattgagnnnctaaac

SEQ ID NO: 1514 - DNA, 729 bp, Canis familiaris
  misc_feature (1)..(729): n = a or c or g or t
gcgtggggttttttgtaaatnngagtgtataataacttgtggtatattatgacagttttaagtggttgtaagagaattnnnnnnnnnnnnnngctatgnnnnnnntcatttgacagcaaagaagacatcnnngncagagtaaattcttcaaaactctttccattggngnctcagaatcatctctgaagagaggagaaagttcctttttacttcaaaaaaaatgaaactttccagaattctcccccctctcctgctgtctgatctttaccctttggatttaggtacttttgaattgcattttaggaaaggtaggaagagcagaatatccccacagcgacattgctcctggcattggggaatctgccctgatctcggaagaatgcttcttgtttgcctacatttgccttggtacagcagcaacgggccttaaggatcccttcacatctggatgagcaaagcagtgctttgcaaaaacttcattcttcagctctgtgtgcaactttccttaagctgcctgtatctacaagcaattaacagtctccttatactcagcccacaatctcttctgctttaagtacatatcctctcgtttggttccctctgaacccgaactgtaactgttgagcatccccataagacaccttcttagacttaaagacagtaatgcaattttcccttacctatttattttcttaacctgattttctgtattttcccatggtcaatact

SEQ ID NO: 1515 - DNA, 638 bp, Canis familiaris
  misc_feature (1)..(638): n = a or c or g or t
atgttcctattggctctcgaggggactgctatgacaggtacctgtgtcgggtnnannagatgcgccagtcccttcgaatcatcgagcaatgtctgaacaagatgcctcccggggagatcaaggttgatgatgccaaagtgtctccgccgaagcgagcagagatgaagacttccatggagtcattgatccaccacttcaagttgtacacggagggctaccaggtccctccgggggccacgtacactgccatcgaggctcctaagggagagtttggggtgtacctcgtgtccgatggcagcagccgcccttaccgatgcaagatcaaggctcctggttttgcccacctggctggtttggacaagatgtccaagggacacatgctggcggacgttgttgccatcataggtacccaagatatcgtgtttggagaagtggatcggtgaactggggaacagtgtttgattcccctgcttctctgcttcctcctcggagcccggccgtcactggacagcaactgtgtgtgtgtgtgtgtgtgtgtgtgtgtgtgtgtacacatgtgaacattcagccatcaggctttctgtgcatgcactagaaaaggagaaattataataaattagccnncttccggcccctnn

SEQ ID NO: 1516 - DNA, 521 bp, Canis familiaris
  misc_feature (1)..(521): n = a or c or g or t
gatgttagannaacgcaagacctatgtgaatacnacgctctatnnnnngntngnntacgctgggatcgactgctctgccgaagaagcagcctagaacaaaccacatccatttgtatgtaatgttgccccttccctggcatgtcagacccctgatgccaagcaagcaagcaagactctgccaacagagggactttggaagaggattctggtgtgaccaaagcccgcttgcgatgagccaccctgtattttggcatcttgttaaatacagagttgttgattagagaaaagaaaaacacatgtttctgtttaacatttctactatgtgtatgaaagaagttaaactctcagctttgcagttggcttttcccttgacagaacaacatccacatgaaggccacttgatataagcaaattttctaagaagttttaaagaacaagaaaaaaaaaagcaagaaaagcctgcttactcctgatgtcagccattatctgcactgcctgttgctgggcctgagggattccag

SEQ ID NO: 1517 - DNA, 659 bp, Canis familiaris
  misc_feature (1)..(659): n = a or c or g or t
tgacactaggatgaaaatcagtgttagggtnngtcataacatactgagaaggtatgtggtnannnaaagagcaaaannnnntggtagaaggataacagatggnnnaagacgagaaagtgaatgatacnnnctggcgagctgcaagtccttcataaatgnctagaaggacattaaaaaggcgaatagagtacagaataatncttcgttttgtgggactaacccatccaatacaggtcatccgttctccctggctgcatctactcaatggtagtaatcgttcccactgattatgaagccaataacccatccatttccaaaataccgcagtgagaaccactgacttagttatatgtctagcatcctcagattagtttacttttaccttcgtaaggagtccttctgtagaatagattcgatgcttgcttcccaaacacccaatctttaaaaaactttgtgccttcctttgttcactttttggcatctgtccaacttgttgtctgctttctgcataagaatgtaagctccttgagggctgagtcaacagccttgttcactgtgccatacctgatacttagttgagtgtttgatacgttggatatattttgtcgaataaagtaagctcaactatttacatttcaggggttgagctgtatttcttc

SEQ ID NO: 1518 - DNA, 596 bp, Canis familiaris
  misc_feature (1)..(596): n = a or c or g or t
agaaatatttgatggtatacaaccaaaaatgtttggaatggttnnnnaaaaaatcattattcctgaaattcagaaagtatctngaaatgtagagannnnnatttgtgcggttggcataaccaaattactaacagaatgtcctccaatgatggacacagagtataccaagctgtggactcctttattacagtctttgattggcctttttgagttacctgaagatgataccattcctgatgaagaacattttattgacatagaagatacaccagggtatcagactgccttctcacaattggcatttgctgggaaaaaagagcatgatcctgtgggtcaaatggtgaacaaccccaaaattcnnnnnnnnngtcacttcacaaactatctactgcctgtccaggaagggttccatcaatggtgagcaccagcctcaatgcagaagcgctccagtatctccaaggataccttcaggcagccagtgtgacactgctttgaacagcactttccagattggctaagcccacgatggtttctgaggaaatcacatagatatctgagcacagcnnnnttaaagcaagttttccttttgaacttgt

SEQ ID NO: 1519 - DNA, 621 bp, Canis familiaris
  misc_feature (1)..(621): n = a or c or g or t
gnnctctccatcctgtccccgctgtcccagtgctgcagnntaaagaagaaaacgcttttgcacctgcagctgctggcccannncgactacagactcagtgacgtgatgcgggaatctttgctagaagaccagctcagcccagtcctcacagagccccacctcctggccctggaccggagactccaaatcatcctacagacagtggaggggtgtgtggaggtccatggagaacagagtgtcatagcccttgactcagcagaacagtcagccctggactctagccaggctaacttgacaagctaagggctggatgaagccagatttcgggaactgtacctggagccagcagtggactcttgggggtggaccactgcttccttgcgtccctgtccatgctggcggtgctgggtcatgagctctggaagaggcagggcactgggatgattccacaagaaaaaaagaagagggacccactcaactttcttccttggtgtgtggcttctctagtggaactccctctttcccaaaaagcactgcttcatcaaggccacagaccatccatctcctgagcccaccgggcaatctggatatgagttgggcttggaaggattggaagccttg

SEQ ID NO: 1520 - DNA, 543 bp, Canis familiaris
  misc_feature (1)..(543): n = a or c or g or t
attcgatnnntgagaaatttccagatgcnacagaagatgagctgttaaagattgtgnncaanctnntctactaccggtacatgaacccagctattgtcgctcctgatggctttgatatcatcgacatgacagctggtngacagatcaatcctgaccagannagaaacttgggatcagtggccaaagtncttcagcacgcagcctccaacaagctgttcgaaggagaaaatgagcatctctcatctatgaacaattatttgtcagagacctatcatgagttcaggaaatatttcaaagaagcctgtaatgtccctgagccagaagaaaagtttaatatggataaatacacagatgtggtgacagtcagcaaaccagtcatttatatttcaattgaagaaatcatcagcacacattcagtaagtggggatgagaaggggtcntngccgtggacccacggttcagacaccattatcttgaaaatgcttagtctctatggggcttcctgtaagcacatgctaataatactcagactcctaagaaacc

SEQ ID NO: 1521 - DNA, 480 bp, Canis familiaris
  misc_feature (1)..(480): n = a or c or g or t
tgctgctgccgctctttggagtggtagacatggtnnacgtgacagaagattttctggnnanngccaagacgtatctgggggaagagggcaagagggtgaggaactacttctgctgcggcctccaggacttcagccccgagccgaactcctacgatgtcatctggatccagtgggtgataggccacctgactgatcagcacctggctgagttcctgcggcgctgcaagcagggcctacgccccaatggcatcattgtcatcaaagacaacatggcccaggagggtgtgatcctggatgacgtggacagcagtgtgtgccgggacctcgaggtggtccacaggatcgtccgcagtgcaggcctcagcctcctagcccaggagcgccaggagaacctccccgatgagatctaccacgtctacagcttagccctgagatgagcgggggctggcaggaaaaagggaccagtgtggggtggggact

SEQ ID NO: 1522 - DNA, 666 bp, Canis familiaris
  misc_feature (1)..(666): n = a or c or g or t
cataccatgctgcannagtgcaannngcgaatttctgccctgaactcccagattgaggaagagaagaataaacagaggcaactgaggttggattttgaggaacagctagaggatctgatgggccagcacaaggacctctggaagttccatgggccagagcagatggcccgggagattgacaccctggacagcagcaaggagcacctgctcaaagaagagaagcttgtggaggcaaagctggaagatgtgaagcatcgtctgtgttcccagtttggggctgacggctgctcaaccattgctgaggggctctttctccgcagccaggaggctgcagctgcagtgcatctgtttgaagaggagaacaggaaggcccaggggctcctggatgctgctacacatcaccatgagcagctgcagcagaagtgccaacaattgcagcagaagaggcagaggcttaaagaggagctggaaaagcttgggatgcagatccctgttcaagcccaaagcaaacaagaggaaggggctggcccaggagaacctgccaatcctaagctcctaggagtcattcaggagaaagacccagagatgcccaccaaggaaggccctatgccctcttaggcaagaaggactctccctaccctggagcctattcagtgccatgaactt

SEQ ID NO: 1523 - DNA, 412 bp, Canis familiaris
  misc_feature (1)..(412): n = a or c or g or t
attacatactggtgatttgtattgagtgaatgttatnncaggtaantggnctcaataaaataataataataataataataataataataaagattgaaatacacagaagtagaccatgcagggaaaacaacagtaaaggctctttagcctcctgtcttcaaagttcttatttccacttcaaactcctaagaccattgggctcagagcaacccaggaaaggccatcctctacctctttgttgggtcatattctgtatctatctatccatccgtattggtctacagatcatctactcaaaatttcattctacctccttttctctgcaaagttctctgtcacatttatccggcctaattcagttactatggccaacgaaaggagaagcagttttgtgtcatggtnnnagggcctc

SEQ ID NO: 1524 - DNA, 572 bp, Canis familiaris
  misc_feature (1)..(572): n = a or c or g or t
acnnggnntcgctgacacacagcaagcccaccaagggccgggaccgcgagcccganntgaagaatggccacaacctcttcatttctgctgccaccgtgcctcccgcgggcctcctcagcggccccggcctcgccacggtggcatcctcggcagtcagcgcggccccatctgcccagactcaccgccccttcctgggcaccttcgcccccgggccgcagttcgccctgggtcccatgtccctgcaggccaacctgggctcatccgtgctgcagtccttgttcagctccgtgccggctgctgctggcctggtgcacgtctcgtccgctgcaaccagactgaccaactcgcacgccatgggcagcttttcctcgggggtggcaggcggcgcagttggaggtaactaggatttctacctcaaccgcgagacctatgcaaggacaggctgggccggcggggcaggtggccggccccgggacggcgaggacggcgaggacggacggggacgaggctctactgtgaatccgcgctgcacagacctgcaggaggcgctggggcctggctccagctcgtac

SEQ ID NO: 1525 - DNA, 323 bp, Canis familiaris
  misc_feature (1)..(323): n = a or c or g or t
tcttttttttttttttcaagtttccagattttcttttgtgtatctgggatttcatctttcattacttnnnnagttttggttttttttttagaatagtnnnncatgggcatagaatatcatacatgataccatacataactgtgtaattattatcacagaaaaattgtaattacattctgctttaatataagttgcatcctgagtgatatcagagttccagaagaaactggtgtagaatcagacactggtgtagaatcagtccagacactggactttggagttttttttctcctgtgaggtaattttaagtttctcagttagtt

SEQ ID NO: 1526 - DNA, 679 bp, Canis familiaris
  misc_feature (1)..(679): n = a or c or g or t
ttgcctcatgctgtgtgctgtgaggaccgtcagcactgctgcccagccgggtacacntgcaacgtgaaggcnngatcctgtgagaannnggcagactcgacccacctggnngtccgcctggcccgtggccctcgcgtgggtgtggggaacgtgaagtgtggggaagggcacttctgccatgataaccagacctgctgtcgagatagccgaggaggctgggcctgctgtccctatcaccagggtgtctgttgtgcggatcagcgtcactgctgccccactggcttccactgtggggccaagggcaccaaatgtctacggagggagagcctgcgctgggacatgccactgagggacccagccccaagaccgctgctgtgaggcgagccgaaggactatagagtctgcagcccttgggaccctgctcggagggtccccactgctcaggcctccccagcacctctcccccaccaaattctcccaagtcccccatcctgagtcccacccccatcatggttgctggggcctcaacctaaggccttccctatctcaagggaggctgtggcgaaagccatgttacaagctgccatccctccctgtttccgtctaccctgtggccaggtgctcttccctatccacaggtgtatgtgtgtatgtnntgcagtaaagtttgtacacnnnn

SEQ ID NO: 1527 - DNA, 433 bp, Canis familiaris
  misc_feature (1)..(433): n = a or c or g or t
gccccgatcncgttcacttccttaacanngctgtttcnanataacattttgtgggggtttttttgcatgnnnnnctgaaagtgcatgtaatagnnnnnnagcctaccatagattttnnnttgcggcaataaagatagtttttttgtgtcagagaacctttttgaagntgtcatcatgaatgccttacttttcctttctcagcgcactgtgaccaatagtatttttcccaatggaaatgttagcaggcattttccaaganngcatcccagttttgcttcctaaatgaggtggtcanannnnnnnnnnntggtaatgtcattttttaaaaggcctttnngaatgatggatcatttgcctatgctgagagattatttgctttatcttgcttttggttatgtgaaagaaaatggtggnaatgttatnnnctggcaga

SEQ ID NO: 1528 - DNA, 542 bp, Canis familiaris
  misc_feature (1)..(542): n = a or c or g or t
ctggataannaaaaacagctggggagaaaactggggaaacaaaggctatatcctcatggctcgnaataagaacaacgcttgcggcattgccaacctggccagcttccccaagatgtgacttcagccagccaacctcatcctgcttttccattccttccatgatggagcagcatactgatgtactttgggagagagtcagtgtgccttttctgaagcagttgtagcaatatagagattgtccactcagtttccctgtttgtgcttcaagtaacacccctactatttgccttctctccacccaaggcctttatttttcactgtgcccacagtaggaatttccctaacaggatgcattcttaggctaagagatatgcccacagcctgaccagactgttgtcctgaggctgatgctatgcggagagtcagaggctagagatcttcagacagattctcattctcagtgactagttagctttaaccacctacaggactaaggtgacctgacctctccaagttcacttctatatcctgaaaatagaaat

SEQ ID NO: 1529 - DNA, 590 bp, Canis familiaris
  misc_feature (1)..(590): n = a or c or g or t
aaaacattcctccccatttacctcaaataacagtcagccagaacctagctaatgtgtcagaccttgaccctgaagaaccagtcaaagnngaggaacctgcacccacaaagaaaccccccaaagaacaaagaagtattaaagaaatgccatttataacttctgatgaatttaatggcattccagcgtacatgaaatcccgcttaacctattgtcaaattaatgatgttgttaaagaaatcaacaaggcagtagttagtaaatacaagattctacaccaaccaaaaaagtctatgagttccgtggccagaaatctttatcacagatttattgacgaagaaacaaaggataccaaaggtcaatatttcatagtggaagctgatataaaagagttcacagctttgaaagccgacaagcggtttcatgtgatactgaatatcttacgacattgccggaggctttcagagatccgagggggcggcctcaccagatacgttataacctgaagccttatggtctggccaactgtagggtatagaggccactcctggagctgccttatatgtaatttctttatatatgannnnnttggc

SEQ ID NO: 1530 - DNA, 628 bp, Canis familiaris
  misc_feature (1)..(628): n = a or c or g or t
cagataagatnnncagcaatagagggcangaagtgcgtgaaccagatacagacttgcccattctaggtattcaaaagagaacaagtgttcttccaaaggaggttgttcaaagatgtgaccctaaacggttctttcccttaagtcacaactgttccgtcttcccttcaaatatgacctcactgtcccctgtcctggaaggagagggaggaaatgcaggggtgacactatgcactatgcactatgtctatgcacatgctctggaggcatgaagtcaagtcaatgagctagaattcgccctgttgaacctgctgcgaagcctgtgctccatcagcatcaaccgtgacctctcagcttgtgccaaacactccagctcggtgattcaccttccatggatgcacgtctccacacttgtttatcatccaatccagtgtccttgagaaagtgctctggacacagtattccacggatcagacagaatagaaagctgtgtccacagaacgatcataatatcattaaacacctgagcacctccatcaggacaggaccatgcacatatgggcaggtaggagatacatgtgcctgtggaaaatatgccaaaaggaacatggtcataggattatcagtagtg

SEQ ID NO: 1531 - DNA, 407 bp, Canis familiaris
  misc_feature (1)..(407): n = a or c or g or t
tgtccatcccagaggaatgggtataacgaatgtggnntagctaaacaatggaatatnntnnnntctttaaaagaaaggacatnctgatccatnnnncaacatggatgaacattgaagacnntatgcnaagtgacataagccagtcacaaaaggatgaatatggtttgattccactcacaggaagtactgagaagagtcaaatttctagagatacaaagtagaatagtggttgccagagcctgggggtagggtgggcgaaaaatggggagtcattatttagtgagtacagagtttcagtttgggaagacaaaagtttttgagatggatggtggtgatggttgcatgacaatgtgaatgtacttaatgtcattgaactatacatagaaaaatggttgggatccctgggt

SEQ ID NO: 1532 - DNA, 570 bp, Canis familiaris
  misc_feature (1)..(570): n = a or c or g or t
cacgtggtccnctgaatatnnaactttattctgaaaagagggttgaacgagtcaatgtaacctgaacctctgcttcccattggtgcctcatgaagtttctgctgctccacttctgtctccgggagcctgactcttcgtctgggaagcagcagagcataggacgggcacaccacatttaccagccagggctcgcatgagcctgaagtgttgtgggattggaggggcctggcagtccctgccccatagggctgtgctggaggagcaggcaggcggtctgctgtggcctgggcccggccatgaggcacacttggcactccagcccctgttcagtcattgctgtcctgatgccccattggtgtgtggggtccactgtgtgtgtgtgtgtgtgtgctcatgtcctttaaacctcatcgtgccaagacctaggttttacatttgatggtaagaggagggtacaggctttggtcattctcacacatttttaacagagttttcaaaaaatttacttttgattgttttaaacttgctagttgtaattgttttacataatttgttaataaaaggnnnnnn

SEQ ID NO: 1533 - DNA, 687 bp, Canis familiaris
  misc_feature (1)..(687): n = a or c or g or t
canccgaagggtgcnctnnggtcaatanngcagagccaaggtcaccaaattgcctttttgcctttggtgacatgactctgnnaatcttgggnnncctgggtgtcggagaacagnnagaaatgactgnntgaaggtcacttagacgcagccctgcatgagactgaaatggacagtctccgggacagtggtagctggtcacttaagacacatagtaataaaacagctgtacctacaatttgcttttacactgccgctccgcatggccaaatgagctggtccaacctggagtaatcaatcagtgacagggtttccccaggctcagctactaaactgtcacctcaggcccatcctgcattgtatgcccttaggtttggaaagttgctctttgtaggatgccaggatgctgtgatctctctttccaattgaatgtaggctcaggacacaggatgcaggcttgtgccttagaggtgggaacaaatgcccactggccaagatgactgctaagctcccatctatgcccttggccatccatggttacaaattcttactggttctctaatcagctctgggggaagaggtcatctaatcatatggaacggagggcttataagtgatctcctaagaaggctatgacctgttggtgcctctggctctgtacctcatctgggcctctctccaagatctgaa

SEQ ID NO: 1534 - DNA, 468 bp, Canis familiaris
  misc_feature (1)..(468): n = a or c or g or t
ccccccccatttccagaagtactctttatgaaacactaacttcccatgatgcttcatagaagagagaggaaggtgtnccgnnnacnagtggtgggaaatgccccaagtgccctctttcccctgggataggcanngcatgtgagcacaatcaaggctctgagaagactggtagcaaagaaccctaacctttccccagctccttcccttttttcatgacttctgacacctagnnngtntcctgatgctgaagtggnnnaggaactgcttgggccccnnnagcataaggaacgaagtgcagaggtgagaagggngnnnaggccctgaagggaagnccagaaccngggtagnnnnnnnnnnnnnnnnnttgcaggcncnnncnnnngtgggnnncangannnnnnnnnnnnnnnnnnaggctnnngaatccnnnntcnnnnnngatttcccagctagaagnagccagctcca

SEQ ID NO: 1535 - DNA, 549 bp, Canis familiaris
  misc_feature (1)..(549): n = a or c or g or t
gggactctattccagtttttgacctgctaattctcggggtgggtnntgatggccacacctgctcactcttcccagaccaccccctcctgcaggaacgggagaagattgttgcccccatcagtgattccccaaagccaccaccacagcgcgtgaccctcacacttcctgtgctgaatgcggcccgaactgtcatctttgtggcaactggagaaggcaaggctgctgtcctgaagcggattttggaggacaaggaggagaaccccctccccgccgccctggtccagccccacacagggaaactttgctggttcctggacgaggcagctgcccgactcctgactgtgccctttgagaagcattccacgttgtagctggccccaagggacaccgcagcggggaccacaaaaagcccttgtgggcagggaccttcctgggcgggatcccactgccatcaccactccaggcttcattttcaggaagctacgtggtgctgctggaaggtcacaggatccagccgtcagccctgccctggggtgctcagcccaccag

SEQ ID NO: 1536 - DNA, 318 bp, Canis familiaris
  misc_feature (1)..(318): n = a or c or g or t
ttagaggttagacttttgggaagaaagctacaaatcttttccccaggcccaagggaagtcgctttagtctgtgacatcttgttaccctgctgttgacttgacatgtttgatatactggtaactataatcccacacagtgaaacacagaattttctgctactgaaannnnnctttttacaaaatgactgtaaatatttgtaaaataaaaacaactttaaactttaagttcaaaaggaaagctagaactatgtaggagatcttggaactgtgtcgagcacagtaactgatcacagaatgatcattgtatcagtcaaaagt

SEQ ID NO: 1537 - DNA, 587 bp, Canis familiaris
  misc_feature (1)..(587): n = a or c or g or t
gtgcggggcgtgcggggcactggccacttactcctgaaaggcttttgccagaacctgcatccactgcatcgttttggactcaggctgatacgcagacctggagacggtggcctcgctcctcgctgctgggctgccagcgaccaggccttgggcccgcggtgtcctggccccagatgtgcactttccattcagctgttaggggtggacaaggcctggcaggggtgccgccccaggaggaggggccgggggggtcaccgcagtccctcccttcctgcccggccctgccccctgtgagcaagcctcgaggggcacgtgaggccgttcacccacagacggggccgaagccgctggagaggcacaggccactcacgtcggggcttgtccttgaagtgacagacctccacgcacggcctggagttggtctcaaagcacctggaccgtggtagccgtggtggcgctgcccccggagccctctgtgcagcccccgcaggctctgtgtctgttgtgttccgtgttgtgttgtccctgcccgggccatagctggnnnnngtgtgcgattatcnnnnnnntcaatatatccgtagtcg

SEQ ID NO: 1538 - DNA, 551 bp, Canis familiaris
  misc_feature (1)..(551): n = a or c or g or t
tatcttacatnacagatgagaaaataggaacctatgaatttagggtnataattgattattaatcataacttatgtgtccaatttttatttctaaaaatctgtttttttactaactttcatattaaattctttcagatatattcatgtagacacacctaactctaagtggtttcagtcaactgcttccttagtttattgttagagacttctttactgtgtctttcaatttcttttcaaattactgtagaacactggtccttgatttgtgatctcaataactcttctgttaaatcaaatgcctaatacatcgtaggcaaggaacaaataattggacaaggaatgaatgaatttatagtgcctagattgcaaaaaacgtcagatcacttatattaaatgaagggacatggtagtttaatctattgtgcatgatgaatattgtcttttagagaaaaaatagtgcatgagaaaatggtagtttcaatataatgtattctgagaatgaattcaaagattgtacagcaactggcttgtattaagtaagtctaaatatt

SEQ ID NO: 1539 - DNA, 602 bp, Canis familiaris
  misc_feature (1)..(602): n = a or c or g or t
agagctttagtaagaatgaaacaagacagtccccacaaatatcnnannacaggatctggcacatagacaacacagaatannnaggttattatttgaaagggaactaggaggggagaagaaattatcaaatctaaatagggttttgcacaagacaaatatattcactgatatatcaaagaatatacctgtaggaggaaaaattggccaatgatttagtgggaacagattcccaccaaatccaggctaaaaacaatgttctgctttgaaaacacgatacagaactaaagcagacatcagataggatgctgaaagttgttcagagacaatagtttacctcccacacagattctattcagcttgttaagtgtgaaaagtcagatcgtagtcaggtactgtaccttatttctgtccccgagggcatggtaatcaaccagggcacctggccatgagtcagtgatccatgttgtaacggcagctctgacaatgcacgtctgtggcatctctccagggatgaaccaagtgttttcatttcctgtttagtttcacatgggtagtgattatttatggagtagcaggaggtaaatttttttttaggttgggca

SEQ ID NO: 1540 - DNA, 611 bp, Canis familiaris
  misc_feature (1)..(611): n = a or c or g or t
gttttcactganctgatgtattctattctgtgcggctgataactgnnaaggggggnnnagggtgtgcctcctggaatggatgcaggagccttgcctgccctgagacaccgctttggatgtaagcgtacgttgtctgggaagactgcaacgtgtggtgccctgagtctgctgtgaaggaaaccccctctgatgcggaagagccaagctgggttagtttgtggcagccgctgtgggcctcagccctggggctggtgttcttgcctaaggacccagcacagctgtggagaagccagcaggcgggtgtggtggggccacttttggggtggggggctttcttgggacctggttctttggctggaagatttgggggtacttggaatgtctgctaaaatgagcctcactcagaaggaaaatcagatctctaacctgtgaccttttgacatgaattattcctttttgtctttatttttcaaagaagcaatgtatattgaagtcctaaatttcagttttgataatctataggcttttttgtaaatgaacatattctttgaatgtggtttctctcttggaggccagcaggatagaagtttgctttcatactttgctgtaag

SEQ ID NO: 1541 - DNA, 701 bp, Canis familiaris
  misc_feature (1)..(701): n = a or c or g or t
tnnatatttannnaatgtactctatgatttgnngtcttaaaatttttttttttgcaaatccaatgaattnactgggtgaattaagtnnnnctttttaaaggaaattactaattttggtatttaaatttagttttccttacattttaggatgcaaataatgtgtatttttcactcattagaaattatatctcagggattaaatttgtcatgatcttttcaattattgtgagaaggcaatttaaactgcttggagtttgaacatgtcttatacatgttcaaatttgatttcttttataacaaagtagagattagaccatgttcttctttgtttccaaaaatgctgatttacttgaatgcaattaaagagtgaattttactgaacttaagcagttggagtaatttttaaaaaaaattattcatgatcactagttctaaacttctaggatcattttgagttaaatagttttatacaagatatcatccttttgatcttttttgagtggttcaagattaccacttccataagcattgcttcatatcacgtttcatgttaacttggccgttaataatgtatcattctatattaggagaagctcatctttactatcatactcaattggtaaaaataatgtatcatattcatgttatagcttcttatgtaaagactgttctctcgggagggtggggggaaaacgtgttct

SEQ ID NO: 1542 - DNA, 568 bp, Canis familiaris
  misc_feature (1)..(568): n = a or c or g or t
cagagtggcatcagactgctcannttgcacacgnnatgctnnnnnacaacaaagcagtcctgtatggtnntgaannnnnatgattgaaacttaaatgccaaaatatcnnntgcgaggcatctggagacatttttagggatagatnnncttagcaagtttacctctatgtacctgttatttaaaaaatgatgtgagaatgagttttatccaaagaaaaatagagtacatgaaagataaaattattaagtcnagagaaaaagtgaacctaatccaggatgtaaatggaaagaaatcttagggagtcagttgtccagcaggcttggaaatttcttcagttgtaactagagtctaagagggtttgtattaaaaaaggaagcagatatttttcaatggaaagtgtgataaaaatcaagtggtattcagagcntcaccttgaagcaagtgcctggtaacattcacagccttttctcagtcccattggccattgtctcttgtgatgttcatgttacctttagttgtgatatattccttttttttggtgtgtgttatttcttgctattcttctact

SEQ ID NO: 1543 - DNA, 601 bp, Canis familiaris
  misc_feature (1)..(601): n = a or c or g or t
ccacagggactcgtgtactcagccatgccaanngcctacaacactgattactcgctgactagtgcnnacctgtcggccctgcagggcttcaactccccgggcatgctgtctctgggacaggtgtcagcctggcaacagcaccatttaggacaagcagccctcagctctctggtcgctggagggcagttatctcagggttcgaatttatccattaataccaaccaaaacatcaacattaaatcagaaccaatttcacctccccgggatcgaatgaccccatcaggctttcagcagcagcagccacagcagcagcagccaccaccgccccagccctcccagcccccccagccccgacaggaaatggggcgctcccctgtggacagtctgagcagctcaagcagctcctatgatggtagtgaccgggaggatccacggggtgacttccattctccaattgtgcttggccgacccccaaacacggaggacagagaaagcccttctgtaaagcgaatgaggatggacgcgtgggtgacctaaggcttccaggctggtgttcatacttcgtgttactgcagtgaactgccctacatatctaaattgg

SEQ ID NO: 1544 - DNA, 619 bp, Canis familiaris
  misc_feature (1)..(619): n = a or c or g or t
tgtcaggctgctgtgctgggtggtcaccannnnnngatnnnnnnangnntccatgtgaaaggaacctnnacccactgctgcnnccacaccttnnnngcttgatggtgcacctgcagctctatgtcgttgtggggctgagagactccgagcctctaccagaggctctaccagaagactcaaggctattgactgaatgacaacacgttggtggccgtgcccagcctgcattggctgctggccaacaccactccacccagcccctctatcagggcaaatgctttccgctgctgcacatgaaaaacagcaggattggcttcgtgctgaagcaggaagcactgcagctgtcgggggcagcactggcctcagtggcctaggtgacagacgaagtatctgacctaccacctggttgccctggcaccagcccagcagagacaccctctgctggccctctccccgccgcatgtccccaccacgaccaagtccattccctgacccgcctcttcaagaacaaaccagcagctcaccccctagacaaaatcacttcctctttaattgctgttgaagaagattcacaccatctgcctcagaggagatgggggcatttccctctgccccggtc

SEQ ID NO: 1545 - DNA, 554 bp, Canis familiaris
  misc_feature (1)..(554): n = a or c or g or t
gtgggcccngagcanctcccttaaagtgtcagcggagnnngggctggggtagcagggctaccctgacccgacccgacaccccgcaaagggctggcccccattgactcactgaagccagtcccaagggaccccttggacgaagggaggaggcaaggctcatgcccgagctggggacggctcctctcagccagccgagcacaccctgggccttcaagccaggccccgtgtgttcccttgggttcagcctccccatggcttgtgtgttcccttgggttcagcctccccacggcttttggataatcattttccttcaatgcttgcagagcctccaggcaggctagcctcaaccgtggtggggcctccgaaagacccgtgcgcgggagagaggggcttctccttctcccttcctgaccccccacccacatataactgggaaacacagtccgtccacttctaaaatgtccctcaccacccctcccctcccgggcacgtttacctctgagaggagatgcgccaacaagttggattattcttggatgcctgcaagctgtcta

SEQ ID NO: 1546 - DNA, 576 bp, Canis familiaris
  misc_feature (1)..(576): n = a or c or g or t
gggccaaggggccccaggccctgtcttctatccctcacacnntctnnnctccaatttattcattaattcaaaacacatcagcaccttctctgtgcccagcactgtgctaggcccaccagctgagtgtgtgtggggggtctctgcaccccatcggtgcctcccccacccactccattcaccggtgcctttaggggagctgtaggaggtgggacccttcttgtggggtttgggggtctccaggaagcctggccaagctgtcccccctccactgtgccaacccacccctgtggactccgtcccccgcctcaccccctgctggctgggggcagctcccaagacctcctgccttccagctctgacttctgtgtctggaaccccttccccaaatgctgagtctggagatctaggccttgggctctgcccacggcctaactgttaaggggacccacgtaccagtgccaagggggatgtcaaacggagatctccttgcccctccacctccgagaactgggggcgggcgggcgggaggacaaggttggccggaatcggtgaccttcccttgaagtgccttctctg

SEQ ID NO: 1547 - DNA, 643 bp, Canis familiaris
  misc_feature (1)..(643): n = a or c or g or t
gtatnntacattcatatatacatgcagtctactcttgatnatctgcagaatggtnngccatcattagattgttctcttcttgttganctagcatgtagcccataactctgtgaagcctctannnnngctnnagccccatactctttcctatttgcagttcatctcaatccccaaggaaggcccttgaaatatgtcactttctgtttccctttcaccaggaattgtgagtgagaaggatagctgcttccaccaggtttgaggcttctggctctgaatgatgatggggcccattcctggcccgaaggcagctctgggaacagttgtgctcaggggcttgatgggggaagaaatctagcccttgcagaaacggggcttcattactcgcttaaattccttagctgcagtgttgtgaagccttagatgatttgatgcacagattacaactatgcatttcaatgttacttttgcatcattggtattactgtgccctattgctagcccagataatcaagatctgactgtttcttgccactggattctggaagccttgccctttcaactggatttatgtttatttctgctgctgtgaacctcaaaagtaatgcagtaggttttaatttaaaattgtttaattctattattg

SEQ ID NO: 1548 - DNA, 84 bp, Canis familiaris
ccagaactcagtttgatccaaatggtctcaaggattggcatggggagggggaagcttttttttgaatcccttttggtcactgaa

SEQ ID NO: 1549 - DNA, 549 bp, Canis familiaris
  misc_feature (1)..(549): n = a or c or g or t
ctctccctctccttctgccccttcctcctctgtgtgctgtctctttctctcaaactcttttttaaaaaaatgtttttaaaagccctggtttcaatcttggttctgtcttctaccacctaagtttttccttcaagtcccatttttatttataggtaaaatgggaacacaattctgtctttttcctggtaaaatgtaagattctagcaagtagtgttttccaaatgctacttcatactaactttgtgtgatatttaagagagttcttcatactccaattataatcaacaaaggaggaagagtggtgctatagcctgaaaatttctatttttctgttgaagtggaagagaaaatgttatatgttgttttccagatctagtaatcctgtgtattgatttgttgtggaaaattcagtatgcttttgaagaaaaatattccatggtttcgggggtcccttgggggacacagttaagcatccaaatcttggtttcagttcaggttgtgacctcagggacctggaattgaacccgaagtcannnnnngtgttcagca

SEQ ID NO: 1550 - DNA, 564 bp, Canis familiaris
  misc_feature (1)..(564): n = a or c or g or t
ccatcgcaacagaccaagaacagaaccacctgatnaggtaggagtgttcatagcagcttaataccccaagtgagaacctgggaaaatcagattctttctttgnnagaacttgagggagggtggggggagggagggcactgtgggaaggaagaggggagagaggtgcttgcctgctggctttggtttgtaaggtctctggccaaattgtctgggcctggaccctctgatttgcacagtgttgttaactgacctggcacttcctcaaaaggtaattttgacctcagacctgccaagcaacttcagggtgatggtatcccagcctcccaaagccttggaaggccaggtgccctacgtaatccacaccttggcccctgagcccacatggacccactctgataagatgcttcctcctaattagagtgggaccctatagcatttttcccccttccctctgcccttccaggtaccagggctcaccagtctgtccctggggctcttggttaccttgtgccattcacggccaaagtgaangaaccacattccannnnggtgctggcagctctg

SEQ ID NO: 1551 - DNA, 654 bp, Canis familiaris
  misc_feature (1)..(654): n = a or c or g or t
aatacaccaatcatagcatttacttctgcntctactggattatgtgctacaaatgtgctnnggcgttagaaaggnatnnatgagaagacagatctgagatcagtctgggtagaagcagaaagctgaaccttttaaaactgctgaacacagatccaaatccacatggttcaagcagccgtgaaatcgctcttcatgaagtgggcttaattctctagtttaagttcttttgatggaatgaattaattaatgtgtcaggtggcttatttgtggatgccatgattgatgatgttcattttaagctcttacctatagtacaagtacatgatgctactgaatatttttccacttggaaactgtgagctggttgttgcattaaaacacacgtacaaacaagatcaaaacaccgcggactttcactcaagctggtctttcttccccagtgtgaggcaatcctgcctattaaaataaaaagaaattactccatctgtgagggctgatacagctaaggggggtaggcagggcgtttgtgccaactaagaatcaccagacacccaccataagtacctatcgcagttttgaagtcgtttctcccccaaatcccaactcctgaaggttgctgcctgcatatttactcttcattagtgctattttcct

SEQ ID NO: 1552 - DNA, 584 bp, Canis familiaris
  misc_feature (1)..(584): n = a or c or g or t
tgcgagagctgtggactggccagaannncaacctggcaccatgaccccaggctcagtctgggccgtggctttggatgagttctgtgattcaggaacagggaggaggtccgtgtcctgccactctattccccagattcctcccccactcagtgaaaagtgttttctgatgggcaccatgtagaggctggggtgggaagggagcactggtgaagcatctatagagcataaagcagccccagggtcttggcctcccatcaccttgttctcctcaccagctgacagcactggcattatcctgcctgcctgcccacccccaccacatgccctttcctatcagatgggcctccttagtgctgcctggaggtggagtgctgactgaaatttgggagccacgctggccaatttcacaacaggatggggaccccgctttggcttacaagtctgttttctcccctgctcatctctcacttgtaatatgggttgtaggagccttgctctgctggacaaacggcagggaccaaactcttctgcctccaggggccccaggccagcccgtactgcccaggaataaaagactcnnnnnn

SEQ ID NO: 1553 - DNA, 258 bp, Canis familiaris
ccccacccttccctttccccagccccgccctggcctcggaggtggctctctctcagctctggagccagccacaccaggcccgctgggggaatttggttgcccctggtaagtgaaaggattatcctcagtgttgattgtccttttttgtaatcctcctgctgttctgttctgttgtgctgtgcaacattttgctacatagactattttatagcagaaagctagaagaatatttattatgaatattaaagcaatagtgca

SEQ ID NO: 1554 - DNA, 531 bp, Canis familiaris
atgagaagagtccagatctggcacctactcctgccccacagagcacaccacgaaatactatctcacagtcaacctctggagaccctgaaatagacaaaaaaatcaagaacctaaagaagaaactgaaagctatcgagcaactgaaagaacaagcagcagctggaaaacagctagaaaaaaatcagttggagaaaattcaaaaagagaaagcccttctccaggagctggaagatttggaattgggtatttaaagattcacagaaaccaagttgtttccagaaaccagtgcagacacattttctgttaaacacattggtgtacatgaaatatccatgtgcccgcattgaatgctcatctgtaattttaaccatttagccaagattctgcatatatgcaaaattatttaataatgtctattaaattgatgtttacatcctgcatcctgtaccatgtccacacatgatatagaaaagaaatacatgaactttttaataagtttgaccgattgaaaggcaatgtcattgtttttta

SEQ ID NO: 1555 - DNA, 556 bp, Canis familiaris
  misc_feature (1)..(556): n = a or c or g or t
gcacatcatctggatgaatcactatttcgtgtcttttgcgatcgtcacaacggctaccctagcgtacttcatcttctaccacatctggagactctgggtagcccggattcagagccggaggcggcagcggctaaccacccacctcaagcaggccttcgggcagctgcagctccgggtcctcaaggagggggacgccgagctgggcgccagcggggacagctgcgtggtttgcttcgagctctacaagcctgacgacacggttcgtattctcacgtgtaagcaccttttccacaaggactgcatcgacccctggatcctggcccacgggacgtgtcctatgtgcaaatgtgacatcctcaaggctctgggcgttcaggtggacgtggaagacggagcggagtcgttgcaggttctcatgtcgagcgagctgtctgccgccctgtcccctggcgcggaggggaccgccgccgacctccctgccccgggcgggtcggacaaaggggcccctccccagaacnnnnnccagcctcgttcgggagcagagggtgcgggtcct

SEQ ID NO: 1556 - DNA, 547 bp, Canis familiaris
  misc_feature (1)..(547): n = a or c or g or t
tgtacgtggtgnnttcaatttctgactctnnggggatccgcagcatgaaccagtttccttcttggtgtccctcacgtgagnntttggttcccgttgtgtnnggtctgctaagctgacctcacttgcccacctgcttttatctctttcgatctacccctgactctgtcaggaccactggagagcatctccatcgagagcgacctgggtctgtcccacagatcgtcttagctgaggaagatgctgcatgtgcttcagaagctgtgcaataagggtgcacgaaggtcccccatgactcaaggtgccctgactctctagtcccctcccacactgaatctgtgactggccaatgggatgctagcaagtgcgggtcaaagcagaagcgtgtgcacggaattatatcctatggctgctaggaactcggagacccccgggtgaagacgcaaaagccagcctcctgcagagagaaagaccacggggagggagaagccagaccagccagtggggcccagccgcagccacagccaacccgactgcacaggagcgaacc

SEQ ID NO: 1557 - DNA, 503 bp, Canis familiaris
  misc_feature (1)..(503): n = a or c or g or t
tgtttccaaggttcgtccatgtatcngaacttcaattcttatttatattgagatagttcacatattttaaagtgcataattcagtgggttttagtatattcacaaaatttttgtgtaaacatatggtttcgatgttcttgggaaatacacccaagcgttgaattgctgggtcatatggtaactctgtgcttaactgtttgagttaccggaaaaacagtttccaaaacgtctgtcctactttacactcccaacctaggagtgtttactcaacaaaagagctgaatctcaacaaaaacagccgattttatggtattttaaattaccctagtttcatctaccactccacagttctgtggtagccttgaaaaacaacagcccacattttcagtactaggagggtgcagagtggtcctcttttaaggcctcatccccccaaatcttcattatttaacctaatggattactggaaaaccctcctccaaagactcatctttatttgaact

SEQ ID NO: 1558 - DNA, 471 bp, Canis familiaris
  misc_feature (1)..(471): n = a or c or g or t
tagaaacgagtttgaccggaccatcgcngagacagnngccgnntacctcaagatcctnnagagctcgcagactctgcttagtgtcctgaagagggaagctgggaacttgaccaaggccacagcctcagagcagaagagcagcggagctaaggacagctgatggggccgttctggggaggggcctgcctctactgtgcccggcagtggctgggcctccgactatcctcagcgtctttactcttcttggcancagctgccccaggtaccaagaggctgttgccaagctccacctgccccaggtgacaaggaaacctctgggcacgtcccggccttgtactcatgcaggacttggggagtgcaggctctgggtcagttctgttcagggcctgaggtcgccaccaccccccatcccggtgctgccagaaaggccctgctcccttgtctccacaccatgagagtggcctcaccttg

SEQ ID NO: 1559 - DNA, 445 bp, Canis familiaris
  misc_feature (1)..(445): n = a or c or g or t
accatgtggggncagcgggnnagcagaggnnacgagggnnagtgtcccgggatccctgctgcccnnncgtggnngcgtgtgcgcgctgacagcccacgcggtgacctcgcccgggggacagggctgggggtggggggagctgaattcagaatcccagacccgcttcactgctctcagactctccccagtccttcccgggacaatgaggactggaatccagttcaggtcccactagccccagctgggttcagctgactgcggcccccatccctgcaccccaagaaacacatcaaaacccgcagaagcacatgttttgcccagtggcctctggggttttgaaacgtgagcaccccccactcccccgccaccttgtacatcctggactcagggtccccaaggatatgcagctgtatcagccggacctgcacatccacttgctttgccc

SEQ ID NO: 1560 - DNA, 448 bp, Canis familiaris
  misc_feature (1)..(448): n = a or c or g or t
tgttttcttgaactctttttcttctcatacnagccatgttttgcaagtctatgtttgggttcatttttctttgcataatccaaggaatcataaatcatgccaaagccagttgtcttgccaccaccaaaatgggnnctgaatccaaatacaaatatgacatctggtgtggtcttgtacattttggctagtttttcccaaatttctgtcttaggtactgttgccttcccggagagaagaacatcaatgaccatctgtttccgctgaagcagttggttggtcatgaacttcctggtctggatagttactgtgtagttcatgatggcggccgagcttcaagccgaaagtatgtttataacccttcgctgtcttactgctacctgtcacaaaatacaccatttattctttcctccagacattgtttactggagatacaaagatgagcttcagt

SEQ ID NO: 1561 - DNA, 497 bp, Canis familiaris
  misc_feature (1)..(497): n = a or c or g or t
ccagtttccatcatcttcnntcgtgaaaatcacctcnntnngtttgacaacccacccttgtctatagacggcatcagatggacactaaagctcttcactttctccagatgcaccttttaacctctcccatttgatgtctccaccctcagctccctgcacaattcatcagaaggctctgatttcttgccttgaataaccaccttctaaacaccaagctcttctccttccccaagatggccagtggcttcctgactgccctcttgccccctgaccatgtccctccgtcagtccccgtggtgcccactctcagcccacctccttcccatggtttgcccctaggagaaagcatgctggctgcgttgctcaagcctgacgctggtattggcgctggaatcagcatgcagcaagctcacagtgtcccctgacaaatgtaaccacttccctgcctagaatccacacatgctctccagtgcatgcagaaccacccacagcctttc

SEQ ID NO: 1562 - DNA, 606 bp, Canis familiaris
  misc_feature (1)..(606): n = a or c or g or t
aagccntnngccccggagctccagctgtncgtactcttgctgagagttttccagtttctctgcagccagagttgtcgtaactggcttcctatagaaggctnnagccatgtagtcaggcttctctgtaacagtctgaccaatctcctggactccgttaggatgatacagtcagttggcccttgggctcaaggacaagaacaggacctgacccaggaaaccctgtttttttatacccaggtattctgtcacgttctgcacatcatggccatgctcccccacgaggtgtgcgagccgctgtatgtctttgccttggaaatcctcacctgctatgaaaccctaagcaaggctaatccttctagtagttccctgctccagaaggtaaatgagcagcgcttcttaaagtccatcgctgagaacattagccctgaggaacggcgccaaaccctgctgcagaagatcagcaacttctgacttttgtagaccaggaaacagctgggccttgccttggtggggggctctaagggctcgagctgagaaacacaagcttttcggtgatgtgaaattgtannnnnnctaaaagtatatggcagtaactgtaaagaaaat

SEQ ID NO: 1563 - DNA, 535 bp, Canis familiaris
  misc_feature (1)..(535): n = a or c or g or t
ctccccagtcaggttttgctactgatgaattttcnncgtctctggnntcttgccatgccctatccctgagactactcaacgttggaagtgaattgaaatccttttctaggtggacactgattttgttggcgtgggagtgggctgtgcggagaagtctgtgccatctggaggcccccacgtgtccttttgcctcagccccgcacggagacccgggacgtgcagggcacacacaccgttggtgatcactcttcgtaaaacttaacatcagaatgaaaatgaaactgttttgatttcgatgtttctttaacaccctgcccctgtccagtccaacccccttcccacctccactagcgaaagtctcttataaaaccaagagttgttgacgtctaacttccttccattaaattaataagtactgacctcctaatatttaagtgtttactatctattgctgtaaagttttgtatattttgtaaacttctcttcccaaatagtagatgtctaaaatcgttgtacatctgattcttttatattc

SEQ ID NO: 1564 - DNA, 253 bp, Canis familiaris
  misc_feature (1)..(253): n = a or c or g or t
ctngcgcccgnnnnnnnnnnncngngaanttgggtggcctannnngccagagctagctctgggcaccagctgggcaacatctcccagcccccaccccacccccaagttttaaagactgtnnntnnnnnnnnnganntgggggggggannnnnngctctccaaagtctgccaaggcagcagtagagctggtcttctggtctccttnnngaaaggctctgttgccctgattatgaantctatantagagtatata

SEQ ID NO: 1565 - DNA, 579 bp, Canis familiaris
  misc_feature (1)..(579): n = a or c or g or t
cactgaagaagactcagagacttgggtcncaggactggatgtatccgcgctgctgccctctgacctcagccgctacttccgctatgaggggtctctaaccacacccccctgtgcccagggggtcatctggactgtgttcaaccagacagtgaggctgagtgctaagcagctccacaccctctctggctccctgtggggacctgatgactctcggctacagctgaacttccgagccacacagcctttgaatgggcgaataatcgaggcctccttccctgctcaagtggagagcagccccaggtcttttgagccagtccatctgaattcctgccttggtgctggtgacatcctggccgtggtttttggcctcctctttgctgtcaccagcatcgccttcattgtgcaaatgagaaagcagggaagactccggaatgggaccaaagggaatgttagctatcacccagcagaggtcacagagactgttgcctagaggccttggaacttggagaatatgcagagagaagccaaccagaagaatctgagggggagctggagacnnngtcctttcctaccctttat

SEQ ID NO: 1566 - DNA, 650 bp, Canis familiaris
  misc_feature (1)..(650): n = a or c or g or t
ctgctnntgagnnacgtctgcaatacccanncagagtaccagcagggcttccacgagatggtgatgcttttccagctgatggtggaatatgaccacgagaccttctggcttttccagttcttcctgcagaaaatggagcacagctgtgtcatcaacatcggagtaggcaagaacctagacaagctcaacaccctgatcaacttcctggaccccatgtttgctgagcatctacgagggaagggtgcggggactgtgcagtccctcttcccctggttctgtctctgcttccagcacgccttcaagtccttcgacgatgtctggaggctctgggaggttctgctgacagggaagccgtgcaggaacttccaggtgctggtggcctacagcatgctgcagatggtgcgggagcaggtgctgcaggagagcatgaccagcaatgacatcctcctggcctgcaacagcctcatcgaccttgacgctgacgtgctgatctcggctgcctgcttggtttacgctgagctcatccagaaggatgttcctcagccgctcaaggacttccttctctgaggactcgcacgacaggggcctcgggccgcctgccggagggggcttcagccccgaggtccaaggnnnnnntggggtanggcaca

SEQ ID NO: 1567 - DNA, 639 bp, Canis familiaris
  misc_feature (1)..(639): n = a or c or g or t
tggattgatgaaatcatgtgccctccacccttttactggccccttgtagggtgtgtgggcagagtccaagcggctcacagcctgcctgcctgccccattcacagagctctcagagtggagctgggagaaggaaggggaggctctgggttgctacagagctgggactttgatgttcttccagaaagggccacaagggggccacacgggtggttgggcagttgtctgctgatgcctgagcccggctggggcaggagcaggaatcgtgccaacaagtgacagtcatgtgggagtgtctgtccctggggagggaagagtgtagtgtctttcttggctgaatgaaaggccaaagctacaataccgagggcctctgccccagctagggtattgataactaagcagtggaggcctctgtagatcctgtattctacacagtgagctctggagtttgatgggctgtaggggggtgtgggtagctgcagaatttggagccttgtaggctttggcagataagagggcccaaggtaagaacaagagctgatgggcacaggcattctatatataagtggctcattaggtgtttattttgttctatttaagaatttgttttattaaattaatataaaaatctttnnnatctnn

SEQ ID NO: 1568 - DNA, 460 bp, Canis familiaris
  misc_feature (1)..(460): n = a or c or g or t
gcaaccactttctggtgggggtggtttggggtcnttgtggctccccttccctggtgaggccactccccacgtctgcaccgtgctggggctgagccccctgccagggggggagtgcccccacctctgtgcacctgtccccagaaccactgctcattactcctttccatttctcttctgggtgttcctccaagccagcggcatcttgaaggggttcgacccactcctcaatctcgtgcttgacggcaccgtggagtacatgnnngaccccgacgaccagtacaagctgacagaggacacccgccagcnnnnnnnngtgnnnnnnnggggcacatccgtggtgctcatctgccctcaggacggcatggaggccatccccaaccccttcatccagcagcaggacgcctagcgggcgcagagactcgggctgggctgttggaggacnnnnagcccccccccccat

SEQ ID NO: 1569 - DNA, 588 bp, Canis familiaris
  misc_feature (1)..(588): n = a or c or g or t
tgctgcggggctgcgtgtccgtggacaaccttatggggctcgnnnngcccccggcagagggccctggaagcaggggcctgaggcgctggtggagggagtccctgggggatagctgcttttccctgacagactgccaggaggtgaccgaagcctaccgccaagccctgggggtcagctcaaagctcagctgaggggggagagggcactgccccaccccaggcaggttctaaaatgcagctggctgcaccctgaggggagactgccaccagccccacctcccagtgggagaccagcctcctggccaggaagactgaggttctctcccctttcccatccttcaaacctggcccaagcctcctggactcgctgctaggaatctaaaagacttgaaaaggctcaggctgctgctaatggacttcatctcaccgggcccagattcccctggagcccaccttggacctcgaagatgctaaacttctctggcctccaagctgctcctgctactgagaatggatagttctactggccgggcttttaggaccctggaatgncgttatttattttttatgtgttcagctctctgtcttt

SEQ ID NO: 1570 - DNA, 570 bp, Canis familiaris
  misc_feature (1)..(570): n = a or c or g or t
ataaatgaaagnngtgtctactattttatgtatatgtatatttatatcttcttttcatatacatacatatgaaaagaaaagcaaagatttagatgctagggagcccctgttgctttaactcaacagattaggcaggaggaatggttatatacaactttccttatttgtgtaactaataacatgagaccaacctattgcaggtggtcacttggatatatgtgctaacaggggcatgtgaaaggaagaacagcaaattaagtgtccctgaaagtgacagaaccatacttttgacaagtttatttaattctttgtggtagaaaaggcacagctccaataaatgtatcatttaaatttttaaaaattaaaaaaacttctgaaagaagaaaagataaatgaaaaagcactctgagtacaccagacattattcgaaattttcaagtaactgttttgagaacccagacttgaaactttatgcattattaaatgtcagataaatgggtaataccatactacaaatattcaagagcaaaagtaccaacttatttagcagttttagttgcccaataggtt

SEQ ID NO: 1571 - DNA, 601 bp, Canis familiaris
  misc_feature (1)..(601): n = a or c or g or t
agagaaagcagaaaaatctgagagtatttggaccggttaagactgaactnnaaacagccagagggggaataatcctcaatatcaagtggttggagggagtgtttcatgcagcactaaacatttgcaccgcaaaggacatgccccacttacaagtgctgcagcttctgaatgaactcttcctctctgtgcactttgaagactgtgagaaagatgaagcatcttgccccaaatttcaattacaagattttgttgaccaggtctataccaagaacctgcctcagcgaaggcctttcccctggtttgatttgactgctgtgcaactcaaggaaactccctttactcagcatttctcaaccagtactgctttccgggaccaccttacctatctatactgtgatttgtttggtatctcctttaccaaagagcagcagcctggggtttccacaagctcttcctcaaaataagagaagagacctcagaaacttggattttttttttcccctccacaatgcttgtagccagattatcacagttgactttgggaatcatgtaactgcactgggtttgccacatgtttgggcattaaggaattagaaaacca

SEQ ID NO: 1572 - DNA, 600 bp, Canis familiaris
  misc_feature (1)..(600): n = a or c or g or t
ggtgaagacaggtacnatgcagacagaaacccaggcatcatgtgatctccaagacctgctcacttcttcactctgtttttttcaccacaactagacattntgtggcgtcttcaggcaaggagataaaagaaaagacgaacatgtttgttggtggggctttcagcatctcaagcttctgatagcaaaacagaactgggcacatttgtaaaacccattaacaggttaaaaaaaaagatcatcaccaaaacagaaagggttaccacaatcaggtttaaacaggcattctttagggtaaggcaaagtacatacaccctaataattttaatttcagccatgtaatgtcacatttacacgctgtttactaatttcttaggggaaaaaataccctttgtttaatctgcaccattttcactcctctgttctctgctggctgccccagctgctgggatgtctgatttttcactcgctgatttagacgctcgtatgacacatccaaccttttaaataaatcattcattttttttaaaggttggctatgtcatagtgttgtgatgcacccaatttaaaaaaataactgtttatttgatgtcaggtacatca

SEQ ID NO: 1573 - DNA, 663 bp, Canis familiaris
  misc_feature (1)..(663): n = a or c or g or t
atgtnnacgggagtttaaatnactacttgagtctgggcacaagcagtgacttgaagaagacccagctctcttttggtagaaacgtctcaagttgaacgacaaagctgttataaattccgtctcaggtgtaaatatcaaagccctctgctgtcaggaaagctgaccagtctgtgtgctgcccgtgtgtccctgtgatggcaatcattttagctgctggccttcagaagtgacgatctgatggaggttttttacgtatttattttctgttcaccctgtgtcaaaatttataaagagaaaacaggcattactgaagtggtactttctgtaatttgatactatttggtttaaccatcctcactttagtatttgtactgttgttgtactggtaactccattaagtacccaagctgtttgtcttccaccgaagagtgctttattaacaagaacctgtgaaaaccatgtttgtaaactgttggatgttctgatacaaagtgggactttggcaacctaaactggaagagactatgagggtagtattagaggaattgggagggcaaccagtcacagagctggaaggtgatggcgaagtcattcctgtgtgtgggcgagggactgcaggatggacgccacagctgcccgctgagcagctgccgggtcatagaa

SEQ ID NO: 1574 - DNA, 622 bp, Canis familiaris
  misc_feature (1)..(622): n = a or c or g or t
gatagatttatgtgaattagagcatattaatatcagaagttaatgttctatttttctactaagnncaaaatattatacatacattctcactatctatgagagaatgaannnnnntttgaaatagaactcaaatactataaaagcaaatgaattgtcacttgatgtgaattttaaattcttagtttctatttagattctacaataaaatttaaactgtagattattggattgtatatgtcacttgatctattaaataaattaaacagtcgcagtcctaaaggaatgttgtaattcataagcaaagcagtttgttaaaaccttattttaaactaaagtataaaattgtttctctgtctctaggcaagatctggtttctgtaatattactggaattgattattctccttctgcaatacagctttctggaagtattatagagaaagagggtttatctaacattaagttaaaggtagaagactttttgaatctttccacaaagctgtctggatttcatatttgtattgacaaagggacttttgatgccataagccttaatcctgacaatgcgattgagaagaggaagcagtatgtgaaatccctctctggggtgttgaacgtgaaag

SEQ ID NO: 1575 - DNA, 601 bp, Canis familiaris
  misc_feature (1)..(601): n = a or c or g or t
aannacacaaaagctgaggaaatttngagtagatccataatgaaatactgggcaacttttgcaaaatatnnacatccagatggaacccagaacaatagcacaagatggcctgcctttgaaaacactgaccaaaaatatttaaccttgaatacagattcaccacgagtatacactaaactgcgtgctcaacaatgccgattctggacactattttttcccaaagtcttggaaatgacaggaaatattgatgaagcagaacgagaatggagagcaggattctatcgctggaacaattacatgatggactggaaaaatcaatttaacgattatactagcaagaaagaaagctgtgcgggtctctaattaatagatttaccctttatagaatgttcgttttcctgtagatcaaggtaaaaatatcagtagctctcttacacacctcataagaaagctattatacagctgaaacaaaaatgccagaaggataatatcgattcctcacatcttccacttagtattgtacctagcatttcaaaatccaaatggctagaatatgtttaattaaatttcacaatataaagtttgacaattaattatatgc

SEQ ID NO: 1576 - DNA, 461 bp, Canis familiaris
  misc_feature (1)..(461): n = a or c or g or t
aagatttattatnngtgtccagttgtaaaggctataagaaatatctcccttgtagtccagaaatccgagtgctttggattacnnngattaaatggagctgggaaaaccacnacattcaaaatactgactggagaggagaccacaacatctnnagctgtgttgattgatggctttaacatcaccaaaaatatcagaaaggttacatcataaaccaggagcaccaagggattatttgctactacattccaaaacaggaaatctgctggggaaaggtgattgtagaaatcatacacttctagcatcatgtataatagaggactgacagaaagaggcattgaaattcaagtgtttaatattttggaggaagctaaagccctattcaatctagaagactactctgtcagccggataacactggagcaaatcttcctgaccattgctaatattgataaaacagaaag

SEQ ID NO: 1577 - DNA, 336 bp, Canis familiaris
  misc_feature (1)..(336): n = a or c or g or t
tttagagaaagttcaagcnnnggcctttgaatgtaaccaactcaactaataaaccagcnnngaaggtgnnnttgtttttggtggggttgcaggaaagaggacacaaanncttgtgctctctacttccgaggctgggnnnnntgtgcaaagttctcctggaacattctttgttcctgccacagccgttctcatttccaacaacaaatggcctcccagttaagtgggggagaagcctaggacttgtccctgcccagctannncgtgtgtatgccccacaggcgggccatcggtccgagtccccctgacccccactccctcagtacacctcccgcctac

SEQ ID NO: 1578 - DNA, 595 bp, Canis familiaris
  misc_feature (1)..(595): n = a or c or g or t
ggctggtggtggtgctgtgcaatctgaaaccccagaannnnnnaggcatcgagtcccaaggcatgcttctttgtgcctctatggaaggagtaaaccgcaaagttgagcctctggaccctccgccaggctctgctcctggggagcgagtgtttgtgaagggctatgagaagggccaaccagatgaagagctcaagcccaagaagaaagtctttgagaagttgcaggctgattttaaaacctctgaggattgcatcgcacagtggaagcaaaccaacttcatgaccaagctggggtgcgtctcctgtaaatcactgaaaggagggaacatcagctagctaatccagcatcctgctcccttctcctgtcaccctgagtcatctgctgtctcagtttgttccgtccttcaccccgtttccccatctcccaggacaccaaagcaggaagtttgggactttattaggtgtggaactcagtaagtggcagctcaatctccccagaatccagaaacatcctgtcggggctgctgtggtgagccactgatctcctgggtagtattnnggtcggggcagcagcnnnnngtccagctctaccttct

SEQ ID NO: 1579 - DNA, 635 bp, Canis familiaris
  misc_feature (1)..(635): n = a or c or g or t
tttgaatgattctgtagatttaaaagnagaccagattcttcctttttttcataaagagaaatccttgaattgggatgtttggaacagatggtnnaaacatgggagaggatggttgtgtaatcctagctacctggttgtaatatgagagagaaaaggcattcctgtggtgtgaataagcaggaatacctggattaagctttaggaggaggggaacagccgcagattgagggccttgacgtcttagcttcctgggcattttgctgcagccttcttactcaggggaagctgcctctatggtgctgagtcccttctgggcctacgttccaaagacttagtagagggctctgggtcatcaaaattaagaggcaaaatttcaggtcttccaaatgccatttcccttgctgccctgaggtctccatttctgacagacacttcacattttggagcctggcatagaagggcagttcagtatatccagggagcacagagctccacagtttatgtgcatgatgtgtgttggaagaggtgggttgcagcatcagaccaacctgagtgtcctagaacatacaatgccagtgtcttccaggcacatatgcatatatatagggctattgttttcttgtgcctaaaatttt

SEQ ID NO: 1580 - DNA, 578 bp, Canis familiaris
  misc_feature (1)..(578): n = a or c or g or t
ctcatcaccctgtgccctgctgggacgaggacantatcaccagggaaaatagacaacgctcaactgactggtttctaacttttggcttgaaatcgagattgaactatttagcaaagcaaagaaagttacacttgatttcactctggctacatcagcatttattgagtttcactaagtgggaagaacctcactgggctcttttattttctcccaggctccttacaaggaccttacgagatgggttatttttcacagaaaagaaatgaggccccgagacattgggtaacttgtctcaagactcagcttctaagtggcacagcagcgattcaaatccaggactgcctgactccagagaacctgctcttcacacatgctccacagccccttctccaggtgtctgttgtccacactgggactcacttctgttcaaattcctaatgaatatgagcctgtgttctagaataaccacatatgctaggcaggataatctaggttatgccacagtaacaaacaactaaaaatctgtacccaaaagcctcttttttgcctgagcagtacgtgaaattattctgaagcct

SEQ ID NO: 1581 - DNA, 599 bp, Canis familiaris
  misc_feature (1)..(599): n = a or c or g or t
tcaaagcatccgctgccgttgtnacagctttcactctctgttctgtcccccttcttgactcctagttgtgatgagatagtgtagaacagccgggcctctctggcggccagtttttttgcattcttcttccagaacctggggggcggggatgcatgaagccctagagggctacagaacaggtgacaggagggggaggcctgagtgcgtgtgctgatggccgcgcagcatttcccagctttccctgggtgtcctgaagctccccctggattacaccagcagtccacagtgtcttgcctaatggccttctgtttttttttttgttttcagtgacaaatagtaggctgacctgtagttgattttgtgctagaaacctgattggctccaagtttagactgagtacaaccaacatcctgtcagctgggggaggaacaggtcctggagggcagggcagtcccaggactgggcttctggaatcccgtggtcctgaggggccagtgctcacagaatgctgtctgctccataaccactctactttcatttccaaacctgttgcttttaaaaaggagatccctnnnnaccatcctattgctatgttgtaa

SEQ ID NO: 1582 - DNA, 650 bp, Canis familiaris
  misc_feature (1)..(650): n = a or c or g or t
tgacgcctgannnggaagagattttaaataaaaaacgatcaaagaaaatccagaagaagtatgatgaaaggaaaaagaatgccaaaatcagcagtcttctggaggagcagttccaacagggcaagcttcttgcatgcatcgcttcgagaccaggccagtgcggccgggcagatggctatgtgctagagggcaaggagctggagttctatctgaggaaaatcaaagcccggaaaggcaaataaatcttctgtcttcggtcatgtaataaaggtgtttattgttctgtcctgtgttcacgtatgaatgtccaattgctctgcatgctttccttgtaggtcagtcctagatgtgggctgtgcctttataaagctggggggacatttctcaccacaaaagttaagtgttcagtgggagcagggatgtgacgttcagaccaagcagaggctgtgtgaaggacatagcccagcactgggtccccatattactggggttgtgactggaacctgaagccatgctgcctctaaaaacgtgactctttcaagggtacctgggtggctcaattggttaagcatctgcattcgactaaggttattatcccagggtcctgggatccagtcccaaattagtctccctgcttaagtggggagtcc

SEQ ID NO: 1583 - DNA, 186 bp, Canis familiaris
  misc_feature (1)..(186): n = a or c or g or t
tgaggtcactgggcacagcacggctttcacccttgggcccacccacaaagcaggaggttaacttcttcccaccaatttccccgttnnnnttcgctctgttgctgcaaatgccatcattgtgtcccagagcgttaacttgggcagttttcttggctcggtgtttagcgngctggctggctgggtttc

SEQ ID NO: 1584 - DNA, 543 bp, Canis familiaris
catacccaccacacacacacacacacacacaccacacacacgcatgcacatgtacacacacatacacactctgcgtatctgagcgcgcccctcgcactgggtcttaccttgcaccttcttcaggattttatatgtgaagagatttttatatagattttttcctttttttttcccccagaacactttatactttgaaaaaagcaattcctggtggccttgtgcctccatcactggctccccctctgtctctagccacctgctcgggcttctgggcccgtggccctacccgaggagtctagcagaggcccagcagtggccatggcagggtggactctggtgggagaggcagggagccagccaccctttttcctaccctacctcccactaactacttcctgccctgaggggacccacaccttgggactctggacagagggacagatgggcagagggagccagaagctgtccctaaggccttgcctcctcctcctcttcctcctcgagggggtgctaggcatggaacgctggagccgccccatgaag

SEQ ID NO: 1585 - DNA, 651 bp, Canis familiaris
  misc_feature (1)..(651): n = a or c or g or t
cacgtgncaatcaggcttccangnncaaaacacttgttgaatgtcatcaatgaaaactnnngnannnnnnnnntctgccgcagatggctggatcgcttnnnnnaaagtaaatacttgatggctctgaagaatctgtgtgacttgggcattgtagatccatatccaccattatgtgacattaaaggatcatatacagcgcagtttgaacataccatactgttgcgtccaacgtgtaaagaagttgtcagcagaggagatgactattaaacttagtccaaagccgcctcaacatcttttattttctaagctttgttggaatacattataccagaagtaatttgcaacatgttgtctgtttaacagtggacctatgtaatgcttttatccatgtttaaaaaggaaggaatttgatcaaaggcaaaccatctgatgtaattagtcaaggaaaaagctttcaggactttcaaatgttaactgtttttcccatctaggaaatgctataaagctcaaattagttaggaatgacttatacattttttgttttgaacacttaagagatgcttttcagatatttatattgccatattcttaattgaatgctttgaatgactacatccaattctgcacctataccctctggtattgcttttt

SEQ ID NO: 1586 - DNA, 641 bp, Canis familiaris
  misc_feature (1)..(641): n = a or c or g or t
cctcctgctnntcgtggttgctgncttctattgcatgagacgcaagggtcgccctggctgctgccggcggggggagaaggggactccgccagctggggagccagagctgagccactcagggtcagagcggcctgagcagacgggccttcttatgggaggtgcctctggaggagccaggcatggcagcgggggctttggagatgagtgctgagcctgaggacctccaagaggctctactggacctgacatcaaagaatcagcatcagataaccagccctcttcacacggctgccgcccccaccttccctcttccctctgggccctcccttcccttccttcctctgcaggcttgggcagggacctagagcagccactgctgcggggagggagggagggagggtgggtaggaggggaccttcctccagggaatgtgactctcaggccccagaatagctcctggacccaagcccagggcctggcccgggacaggacgaggctccgaggctccgaggctccaaggctctgagggtcggcgggccagggcgattttttacctcctgcctgcattgctggtcccctgccccacctgacgtcctattgcatagtctgacactggatccccatccctgcccccacctcca

SEQ ID NO: 1587 - DNA, 448 bp, Canis familiaris
  misc_feature (1)..(448): n = a or c or g or t
taagctaaaggcaactcctaccccagaatcccaagacagaaacaagcgtttagctctccaaacgcattttaccaccgtcgtcgttgcaaaaaccagtggccaggccactcatgtggccagatggacccgcggagtcgataagaaatggaacttgaaaacttattttttttttcttcttctcttcttcaaagcgagcatggaggataataagaatcgtgtgaccagtttgctcaatctctctgcctgtttggactttgtaattattttttagcagtaattaaagaaaaaaaaaagtcctctgtgaggaatattctctattttaaatatttttagtatgtactgtgtatgattcattaccattttnnggggatttatacatatttttagataaagaaattaaatgctcttatttttccaacagctaaannnnnnntagtcgaacagtgtg

SEQ ID NO: 1588 - DNA, 546 bp, Canis familiaris
  misc_feature (1)..(546): n = a or c or g or t
tttcactttaattccgactgtnccgatataganntctgctcccagtaagcacgtnnnctagnntgcggcattggccagtntatcccagctctgagtcctgcttctcctgcctgaagcactcctccagtcagcgtagccagaaccttgaaggtttggtgcaagtcccggcaccaggatggtccctctccaaaatacgattctattttgtcgagtgttagaattcacaagaagagtattttttcccagatgcagaaagtttgcatcaactcagtctctgtgcagacttgtttttaagggagctctaagtttgccgttgaaactctccctaccagcaatccataaattggttctgcttagagcagcatgttacaaatgagtgttggcttttttttttcttaagtgttgatcccatgaatcctgttgatttccctggagtctatagttaagttaggagaaggaactggcaggtgggagtgattcatttgatattgatttctttgttgtcagttttctgtggtgtttttgaaatccaacaacttgaaactc

SEQ ID NO: 1589 - DNA, 542 bp, Canis familiaris
  misc_feature (1)..(542): n = a or c or g or t
catngagcgaatgtatggaagaaaatagttgttctctttcagcctcgcttgctgcagggagctcagatcaaataggaaaatacttgaagtgcatgtctccacctgtgaggcaaaccccgttcctcgtagtaaacctaaactgttacttctcatgacgtcgccgtttttactgacaggattagtaaaacattacgacagcaaaccggtgtctggctcttctttcgtcccccttccaactgaccttaccacctaggactgcactcgtcagcatgaggactttctgaatcattttggggaacagtgattttaaaacctcaagtttttaaacatgatttatatgttctgtataatgttcagtttgtaactttttaaagtttggatgtatagagggataaataggaaaatataagaattggttatttgggggggcttttttacttacagtatttaaaaatgcaaaggtatggatgtgaaattatgtaaattcagatgcttatgaatcaaatcattgttgaacaaaagatttgttgctgtgtaattat

SEQ ID NO: 1590 - DNA, 646 bp, Canis familiaris
  misc_feature (1)..(646): n = a or c or g or t
actttcaagntggtcgagccctgtgaaggggctaannnnnccaagacagannngnccgccaaggtggctgatcccttcacattggccaaatcaacagagaaggctgaggtggagaagagatgtgagggccgatccctgctgcagctgccgcggacagctgtaaagtctgtatccatgctcatgggctcggccctacagagcggctggcaaatgtgtacctggaagtcctctgtgagttctacctccatttcctcccagatgaaatctgggtcccctctggagaccccggaggctgagatgctgcgggaagtgtacctggtgctgtgggccctccggaaacagctacgacagctggcccgcaggcaggagaggcggaggcggcaccatatccggacccatgctggcccccaacctgaagcagttcagggcctgaaacaggatgcccggagtcccctgtaggggggggatccccacatcttccaaaaagccccacctcactcttaggtaaggttggtaggagaggttagggcagcaggccaagagttgtgggtgagaagttttcatactgtcacctcttatccagagaccaaggccaggcctggggtcccacttattccccttcattccgtttattcaatttgtaaga

SEQ ID NO: 1591 - DNA, 467 bp, Canis familiaris
  misc_feature (1)..(467): n = a or c or g or t
ctttatatctncttctttatacattcgacagttaactatggttctaatcacattcaaatgcagtcgtaactgtctcagattaaagagataaaaataaactagaatataaagaataggctgtcctcttgaaggttagaaagtggtttctgacagaaagaaagtattcttatttaggtgtttttaaaatatatgtttcagatgtatagctttataatatgacaactgtacatactacaaagtgatcaccaccaaaggcctggttaccatccatcaccacacagttgaccccttcacccattttgcccatatcctattctttttttttttttttcatatcctattcttacttaggtgtaactgtctccatctattaaatatttccacattagacattttaataaaatacatgatcctttgactttatttcagtgttccacactgtctatactgtacacctagcaacatgt

SEQ ID NO: 1592 - DNA, 568 bp, Canis familiaris
  misc_feature (1)..(568): n = a or c or g or t
aaatactaaacatgattcctactacggctgagatnnnaatcnnnncttctcaccagacagctggnnctcggtaacatcttcagccaacacttcaactttcccttcactatacagacttcccaaagaacagaaacgcactgtgattcagaaaatgtttctgagccctgacccaccccaaaaacatttccatccttctctcaaacctccttggaaggaacatacctagcagtgcgtgaaaaggcagctgttttatcttttaattgcagcatattattgcctgtatgaaatatgtgttttatatattctcctatttttagcttatattttatattgttgagagatccttttttttccttccaaggtgtcctactataaaattacttataagatataattaatctttatgctattgctgtatatgacatttggcaataaatagtaaatcgttgacaatatgattgactggtgcagtccagaatgtatattaataatcttgtaaaacatcgtcacagatattaagctaaactgttccacttttttttttgtaagaactatacatgcttcggaa

SEQ ID NO: 1593 - DNA, 625 bp, Canis familiaris
  misc_feature (1)..(625): n = a or c or g or t
ttatcannangactttngtcggctcccccnntctgnctcnntgaagaagattctngaattcataaggcagcgcatgccaggcacagacgtnnagctccgtgcccggcgttacctgcaacaactcagacgcctccatgcagcggagccagaggctggggcttcggcccgagcaaaagaccctgaagcacttccggagcccgccccagccccaactgtggggcctgctgcctcggatgggcctgaagtgctcgaggccgccctggctgctggggctgagggcttggccccagctgaggtgccagctggggaggcgaagcccctgcagatagtggtcactgctctagatcacggctgcgccctggacgagccacgtgcacctgcggccaccccggaggaggagcaggccctggcacctgcaatcggggtccccagagtgccagagccgccaatggcctccgggacaactggcttcaacctctgcgcagccccctgaccacctcgggagcccgccccagctcccaccacgcggctcgtcatgcctgcagcccaacggaggcttgcccttcccgtgtcatttcactgtttctatattttgagtttttctttaacctgtaaaatggcttat

SEQ ID NO: 1594 - DNA, 566 bp, Canis familiaris
  misc_feature (1)..(566): n = a or c or g or t
ttgtccgtgggacctgccaaagcccgcctggtgccagtgagnagncgtgtcgtgcgctctgtgcgttagatccatgcagtccccagtcgtgtccgttcccggctgctgtgttacaaactctcagaggtagtttgcaggggaggaaggggaaatgatttttaaaacaaaatattgacaacaacaaaaactcttaggatcacctgacctttgtaatgttatttatgttggggagggaggggggccgagaaggggaaatcagcggtgtacaacatctatatcatttgtactttaattacaagtcacaaggaaacaataagttgaaatcctatataacaggtttatatatatagaatatgtatatttgaagccctctacagactgagtctatgttttactaattctttgttcgctgtgttacccatcttggaatacggtgtgagtgtccgcttcctctccctgaggccttccagcttggcccctcaggagagagcgatgcgccaaggttgagtgtttccgcacaaggcttttacctctggtcccaggagaatcagaaactccagacattt

SEQ ID NO: 1595 - DNA, 535 bp, Canis familiaris
  misc_feature (1)..(535): n = a or c or g or t
ccagtnnntggtgggcnnntgtgagatnnncaactggnnnacatacagtgggacacagagggtgggatccctctaccccatcaagcagcgccgggtttatttccgnnnnnngaatnnngcactgagaggcttcctnnngntgccannncacgtggaggacatgaaggcgggccgagtggtggtgtccnngccccaagccggagncagctgcatctggtactacgaggatgggctgctaaagaaccaggcagcccctaccatgagcctgcaggtgattgggccccccagcccaggctccaangctgtgctgtgnnncgnnnnncgcnnnccccgtcnnnnntggagcnnnnntgaatcgggccatannnnnagccagatgttcnaagnncggatcctagatgtgaagggtggccggggctatnnncgggatcacgtggtgctgtgggnnncnaccaaggnncgggcgtcccaggtctggactgtccatgtgctctgactgcccctgctccccagtccnnnnggctttccctgggat

SEQ ID NO: 1596 - DNA, 694 bp, Canis familiaris
  misc_feature (1)..(694): n = a or c or g or t
ccnagctcagccactgcacagcnnnnnnantaatgcttctttcaaataaaatggccccagagcccatgtccaaataatngatctttgggttttcccnnngctaagcacaaatctaccttggtgaatcggaccttgcctgctttgcatctggttttctagatcctttatcttttacctgatgtgctcattagtaaaatgtgaagaacttgaccagttgtcatgcttgacggcatttctgtgactggtgctttgcttatggtaacagcctttctgtactagagaatataatataaggaataggagaaaaagtaccttgactttgttcatagcacatggggtgatgagcgttgacaattgttaaaattgctaagtttaaaacctaggaaagtcaaatgattgagtgcaaatccataccatgaggtaaattgagctgtgtgatgtaaatcaggtaaaatgatcatgattctgtgtaatgtaaatcagataaaataaatgttcgtgattccaagatgttatattaaagaaaaaattttaaattcttatatatttgtagcaatgctatcttaaatatgaattatgttgtaattgagtgacttttgaattacagagctgtaaatgaagtattatctgtaaaaattgttataattatagttgtgatacagagtatatttccattcaaatgatatatcataac

SEQ ID NO: 1597 - DNA, 607 bp, Canis familiaris
  misc_feature (1)..(607): n = a or c or g or t
tctagatacgtttttctgggtaaatgaggtaagtggagaactcacctacccaccactgaaggcagatgtacctgaagcttctccagcttctgtggagaagccccaagagaggcccagtctcagcatgggagcatgcagggggctcctctcaatgaccagggcccatccagcacacctgcgcagaaggtggcctttccactgcctcctaaggcttcactgaaagacactggctccaggcactccctcccatccctaccaacccgcggcctggctaaggctggagcaaggagcgccccaccattctcagcagttcctgttaccatctcaccaccaggaggtgctctgtcaacatgtggcccccttggaccaacccctctacttccatcctcttcccttcttcccagcccttctgccccctgggccttcacctgcaagctgaaaaatgtccttactgggaataaccgattttccttttgaatttatgagtatttgcgtggccacacctttctgagacactcatggtcagaacagcctgccatcatgctcacgttgaggatgcttctgcctnnnnnnggaagcgcacaggnnnnnncacaggacttcttag

SEQ ID NO: 1598 - DNA, 389 bp, Canis familiaris
  misc_feature (1)..(389): n = a or c or g or t
agaaaccactgggtgatttagaaactgcaggtgaatncttcatctgtcagactctcgtgcttttgcctcttgcagacttgggacccttttcccatggcccattcattttgtcctcagccgggtttactaatactgcctcaggctgcctccttgtggtgtaggagagcgggcaagtgctaagtatggacaccttccattacgatgttggggtctacttttcagggtaacagttcagggtggcagaagatggaacaaagaactaaaatcaggaaagaaaaggagaaacactgagagttaaagaactgttggtcaaagtggatcagtgttaaactagattttattcattgctggataagtttataaacgctctatgcattgccgatattcag

SEQ ID NO: 1599 - DNA, 656 bp, Canis familiaris
  misc_feature (1)..(656): n = a or c or g or t
gnnntctccatcccctgcttcagcgnaaggcagtcaccannnactatattctgacttttctactnggggaagaagggaaccaacatttatanntgaccagatggctaaaatgctttttcatttttgtttaagtagagctgggatttgaggtgctgatctgtggtctacagttatgtggtaactcatgttgtctaaccaacacacaattttgtcagcaaagaaaaatgaaaactacttcttagagaggctatatttttctgctacaaattattttatatttatagcaaaagtagattttctgagcccttgattgtctagggtaaaattaactccctgagaggatgtggagatttgggtggttaattagacttaaaaaaaaaaaaatttgtcaccacatgccttcactccaaagtgttctcaatcaactagatttgattggattgaagaggaaccgtggccttcccatacactgttattgccatattatagacgttaaaccaagttcatagggaataacctaaaatgaaagaacacaatcaaaattcccacataaccataagcacagattttttttaattgaaactttgaaggttattggaagcattattttgagtgcagtgtttttaaaaagccaattctttatatcccttttagaa

SEQ ID NO: 1600 - DNA, 619 bp, Canis familiaris
  misc_feature (1)..(619): n = a or c or g or t
ctgcacatnntagaagactcanggaaatattatattatgtnnatgctaagaaatttaatgtcatttttagcattagtgttgctggacttttgactttttttatataatgaaccactctttttaaaatttataacttacccttgaagacagaattttagggttggtacttgtaaacattttcattaacagtatgggaaatgatgcctggagagaaagataatgagcaaatatattgcttctttcaaaggaggaggcgagcactcttttgcgtctgaattttgttcctttggtcaaagaatgcattcctcagttttcaaagatgtccctttaaagaaaaaaggaaaattaagttttaaataacattgagtattacaccctgacatctagagcgtatttaaacatagcctatttcttgcttgatttaatattcatttagttgtagttgtccaaatgaatattaattattgcaaaggttaccttgtccataataatttgtaaatggtgttatagctgaatacctgtgcatgaaaatgggaactattttcatgtttacttgtagtgccatagaggccaatatgcacaatattaaagccaagacttgaatgtttaaaagaattta

SEQ ID NO: 1601 - DNA, 666 bp, Canis familiaris
  misc_feature (1)..(666): n = a or c or g or t
ctctcttgacccttcacccatgaccaaatggtagcattttgttctgaggaccctgtcntaagacagcagctttgtgannagtctcagagaagtgagtnntatgtcctgggttagggaggggccctggtggnnncttcactgctgggtacattctctcttttcagttattatctctgacgctggatggactgacaggcgtttcccaggaccacatgcgggctcattaccaaacaggctccaaccacatgatgttgaatatcaacctttggtcgacattattgctgggagctggaatcctgttcactggggagctctgggagttcttgagctttgccgaaaggtaccccaacatcatctataacattctgctctttggtctgaccagtgccctgggtcagagcttcatcttcatgacagttgtgtattttggccccctgacctgctccatcatcaccacaactcgaaagttcttcactattttggcctctgtgatcctcttcgccaatcccatcagccccttgcagtgggtgggcaccgtgcttgtgttcttgggtctcggtctcgatgccaagtttgggaaaggagccaagaagacatcccactaggaagagagagactacctccacttcgagaatatttaagttattgtctcaaatatggacatct

SEQ ID NO: 1602 - DNA, 618 bp, Canis familiaris
  misc_feature (1)..(618): n = a or c or g or t
tgttttgtttggctcacctcagtttgtgnataagctgaaacatatnnccaaagacctgatggaggagtttaagtccaggcctgannaggctctgcagactgtgagtgaacaggtgtctcaggaaatccatcaaagcctcaagaacatgggccttgctgctctgagcagtgacaacacagcatctctgataggacagctccagaacattgccaagaaggaaaattgtgtccgcagtgtcattgatcagcggatccacctgtttctcaaatgctgtttggtcctcggtgtgcagagatctctcttagacctccctggaggcctcactgtcatcgaagcagaactggcggaactaggccaaaagtttgtcagcctaacgcatcacaatcagaaagtgtttggcccctactacacagagatcctaaaaaccctcgtccctccagcccaggccctggacacagaggtggagtccatctgaatgcaccagctcaaagccctggcccctggatcccaggagagaagctcatcgttctctggggtggctgaccagtgaccgtcagagcaggaagccctcctccctcctgcagctggcacaccagggctgtagcaagcagcgtgtaa

SEQ ID NO: 1603 - DNA, 635 bp, Canis familiaris
  misc_feature (1)..(635): n = a or c or g or t
ttattcaaacacagatgcagtcatttatgtagtagacagttgtgaccgagaccgaattggcatttccaaatcagaattagntgccatgttggaggaagaagagttgagaaaagccattttagtggtgtttgcaaataagcaggacatggaacaggccatgactccctcagagatggcaaattcacttgggttacctgcgttaaaggaccgaaaatggcagatattcaaaacttcagcaaccaaaggcactggccttgatgaggcaatggaatggttagttgaaacattaaagagcagacagtaattcaatcacttctgcctctgtgaaatgaagctacatcacatattcctttggaagcagttaagtatgcttcatgctactaaatgttaaaactgtgtgattgttggcatatgctgaactgactacaatacttgtaataaatataaaaaataagtatttggttggaagggtagctcacccatgattgaaccaactgaatgttctgtgtaatgtaaaatccttccttgcttttttgtgttaagtatatattctatttgtatggaattcatattcaaatagattcctattaaagaatgtactcttattgaggaaaaacccnnnntatttttgaatt

SEQ ID NO: 1604 - DNA, 568 bp, Canis familiaris
  misc_feature (1)..(568): n = a or c or g or t
aagcttccctnncagggtcaggagtanngnctgaacgtcagagtgatgctggctccagacagttcnntctgccttctgtcctcttggncagccctcagtaccctgtcccaagatgccagggacacgtggtacatcccgggagtggtgttacccccatctcgcagggttctggagtttggggtcagttgatgcccaacccatccagcccatcacttctgacctcttgcccacttgggataggtggacacagccgtggcctttgccaccaggccctgagaaggggggctttggcagccaaggtccactgaccccgctgtgccccgccatagaaaactgcccccctgggcggcaccactgatatatgcaaacctgctggtccgagccctgctccgcctgtgttcctctgtccccaggctggctctgcccccctccccagcatgtacactctgctgtggatgtcccgtgggccgtgggttgggtgcccatggcgggtgggggcgggcggctcagggcgcactcggccggcccctgcccatcctctctgnnnntggacgcttttgtctttgta

SEQ ID NO: 1605 - DNA, 645 bp, Canis familiaris
  misc_feature (1)..(645): n = a or c or g or t
agttacagagtgctnngagcactcttcacttatgtgacaagaangaantnnngtcntctctgaacatacctgttactcatnnaccacannannaatcgtgtggatcctctcagccccatgaaaatagtgtttctactnnagcctcggaatccctgtcagctcctcaagataataattttttatctagaaaaactcaagacttttctccggtgtgtcactatccagtaaatcacagttgcaatagtaacatctctgcagctcagaagtggacgttttgtgatcacaagaccaccccatgcgcgttaacagtaataaatccattctcagctgagggaaacacagagcgattacagcctggcatagcccagcagtggatccagagtaaaagggaagacattgtgagccagatgacagaagcctgccttaaccagtcgctagatgctctcctgtccagggacttgatcatgaaggaggactatgaactcgttagtactaaacctacaaggacctcaaaagtcagacagttactggacaccagtgacatccaaggagaagaatttgccagaattatagtacaaaagttgaaagataacaagcaaatgggtcttcagccttacccggaaatacttgtggtttctcgatcac

SEQ ID NO: 1606 - DNA, 565 bp, Canis familiaris
  misc_feature (1)..(565): n = a or c or g or t
tctctgtgctcttgctttccctgtgtgtaccttacgtcatagcgtctggcgttgttcctttactaggtgttactgcagaaatgcagaacttggtccacnngcgaatttatccatttttactgatggttgtggtattgatggggatcttgtccttccaggtccgccagtttaagcgcctttatgaacacattaaaaatgacaaataccttgtgggccaacgcctcgtgaattatgaacggaaatctggcaaacaaggcacatctccgccacctccacagtcgtcccaagaataaagtggttgtctcaactaccttgaccttccccttgcctttacgtgtccttttttgtggacttctctctttggagatttttcccagtgatctctcagcattgtttttaagttaactgtatttgacttgtgttctcagcattcagagagcagcagtgcaacacggctctgctgcccttcctgcatcttctgacatcatagctgtctgagatttgtacatgtgtaaatagaagttcctggataccctaaaaccttggattaaacagaatgtgcatt

SEQ ID NO: 1607 - DNA, 724 bp, Canis familiaris
  misc_feature (1)..(724): n = a or c or g or t
acaccccaaaagaactgaacatggaggaagatgatgtgatccgagtctaccaggaacaagtagaggatcacgcaaggatttagaaattcttctggctttttccccttcccctcaacactcttctatttctaaatatagttctttaataatgtggtgttcacgatggaattaaaaacggacaccacatccctttaaaggtatctgataatttgaattctagtgcccaatattcatgattattcgttttcattgtgctggtttttggtcatcaaaccttagctcctgttatatcggcctcgccctttttaacaatcacctatgtgcacagagaggccactctttccagggctgtgcattttcaggccggtgataaagacgatccaccgatgccaatgatcaaaatgactttccaactggccctgaagttctggcatgtgactacttcactcctggactatgattctcagtgggagatggaagtttttcagagaactgaatggtgaaaaatgacttttccttaacttgaagctacttttagcatttgagtgtctggaccaaaggaagacaactatcaggctgaagttgagataaccgtgatcgtgagaataatgactaactccaaagatggctttgctaaggagagaacatcttaaaaatcttaccagaatccccagaaagtcctaattttcattagcagttaataaagatactcatgcagnnnnnn

SEQ ID NO: 1608 - DNA, 441 bp, Canis familiaris
  misc_feature (1)..(441): n = a or c or g or t
agatgtatcatttattgaatgagtgagnnaggaaatcagaagatggtataanannnntgagttaccgatttttcatttgtaggcaaagtatatcaaaatatcttaataggataaattgtgctnnatcattctgaaaactcaggttacagcttactcatatcattgtgggtctttcnagtgagaaagatagatgctacaaattttgtgtgtaccaatgcaaattagctgaaacaaatagtacgttttggagaaagcttaaaactagctttagattaaggttgagaaacaggagtgttttttttttttttctttttaagataaaagcgtgtgtgttttacacatattttaatgttcacagctttttcttatgaaagtgccattgttttangcttttnnnngnttttttnttnnnnnnnattattnnngttatttttgagtgga

SEQ ID NO: 1609 - DNA, 552 bp, Canis familiaris
  misc_feature (1)..(552): n = a or c or g or t
ctgataccaactgccatgaactgtgtgtctcttggtaagacacttcatttctctaggnntcattcaccccatctgtaaaactaaggatctggactagatattctctagtattctgtgatctgcctcctgtcaccatcacttctctccttgcttctctctttgtttctgttctccctgggaatgctcagggtgactgaattgtctgtatttatatgtgattgtaccaagggactcagcctcacgtagcatgtacaggggtatgatgcctaccatagtgatccggcagagagttcccccactacttgttctgcatgtgtagactcccttttcccttcagacttcccttttcccccttttcctaccccacagcccaaatccatgtaagttgctagtggttccactgaacagtagggcatgtgagacagttttggcatgatgtcttcagtatgagggggacggtgtgacttcactttgaggggatgatgtctgtagccattggaaggtaaaaatagtggtgtgattactgaaccaaaggaatttgttttgtaactt

SEQ ID NO: 1610 - DNA, 601 bp, Canis familiaris
agaaagagggaactgtaactgcggggaacgcatcgggggtatctgatggtgctggagccgttatcatagctagtgaagatgctgttaaaaaacataacttcacaccactggcaagaattgtgggctattttgtgtctggatgtgacccctccatcatgggtattgggcctgtccctgcaatcaatggagcactgaaaaaaataggacggagtctcaaggacatggatttggtagaggtgaatgaagcttttgctcctcagtacttagcagttgaaaagagtttggatcttgacccaagtaaaaccaatgtgaatggcggagccattgctttaggtcatcccctgggaggatctggaacaagaattatggcacacttggttcacgaattaaggcgtcggggtgggaagtatgccatgggctcagcttgcatcggaggcggccaaggcattgctgttgtcattgaaagcacggcctgagggatggggagcccagcgaagccccctcacactgggggccaggccacagcaaagcaagtgacctccagaaaccagacctgattctgctgcacgtggctgagtgtgattaagggataatgaggcag

SEQ ID NO: 1611 - DNA, 657 bp, Canis familiaris
  misc_feature (1)..(657): n = a or c or g or t
agcaggcntngatgcagatgagctgagtttaagtnnaaatgttgctgctcaccaagaaattccctttgcttccannnnntaantgtgccagtcagcaaaatgggggtgcccacgtgttgcttgcaattactcttggaattaaaatgatgtggcaggcagggcacttctgtcaatgcccagcttatggagggcacccaggaaatatgagaattaaaatcccattgcctgggacagcaccttctgccccagtgcctggcatgaacatcacagccaaccacaacacagggctccttcctgggccctccttccctggccaaagctgcctccagacactgagctcaaagcttccagatcctagaccctcacagccatggattataataatagtgtttgacttccccttattgacctactgtagtacttctggctccttataagctgtgtgactttggacaagtaatctaacctctctgtgcttctgttgtctcatctgtaagacgagttaaaatatgtagactgcttttccctctgcctatgtctctgcttctctctctctctctctctctgtctctcatgaataaataagtaaaatcttacaaaaaaaaaaagaaagagaaagaagaaagaaagaaagaaagaaagaaagaaagaaagaaa

SEQ ID NO: 1612 - DNA, 616 bp, Canis familiaris
  misc_feature (1)..(616): n = a or c or g or t
gnnantactgagatatatttagcatctnngagaagaagagactgatttcagtgatacttctaagcttacatggtatgtaaacctcccttcaattttttatgctaagaattttcaacatagagaaaaagctaaaagaaacaatacaaagaacagacacccatgttttgcattgagactcagtaatgaacagtcttaacaatttgttcatcacataatttattttctcatatttgctttatgcctcatacttctataattaattttttaaattattgttttgctaagttgcatatatcgtgacgcttcttggagtgtcctcttttgatgagcaggcttttgtagaaggcagctatgctcaccactataccaccaacgcacactgcaacaagatttttttaagagtggatttcacatgttctcagtagagaacatttatcagattcttcattgggatattacgatggctagtaaatttctagctgttttatatataggtgattgcgtcactttgtggcttctgcaaagttataattgcctgtttttatgttagtttcttgtggaccttttaaaatgaaaagcagacctttgcctatgctcttcttacccgtgttcattc

SEQ ID NO: 1613 - DNA, 654 bp, Canis familiaris
  misc_feature (1)..(654): n = a or c or g or t
catgtgtatttgcatngacgagtgtannngatctttagtatacacttgaatacanncanctcaaaaattacatagaggtcatttctgcatgatgaaatataattgcaaaacaactgtttaccccattatttttcagatgattacatctgagtgatacaatattaaattatcgtaaatagaggtgtttgagtcagaagtcgcttttaccacccaacaaatgtcatgtttgccgcttcattttatttttaataaggagccaactattcataacacctctcaattactattaaatttaaaataaagttataatggccttttttaatattaaaatttggtaatgtactatttctgaaaaatcagtgaaaatgtgacattcttttgttattgtaactaaatcacttactgcaattggagagtagcagagcagatgttatgctgtttaaaattcatagatctgactcaggctcagtgtggacattaatttgagaaaggagcagcaataagaagtgcagtagagagattgacattgtgaatatgacctctgtttcaaacagatgtaaatacaataactttgtagttaagtaaggtaagaattgcttagaaaaccaagcctattcccccattctgtactcttagacattgatactttattcc

SEQ ID NO: 1614 - DNA, 660 bp, Canis familiaris
  misc_feature (1)..(660): n = a or c or g or t
taccaacngngcagtcccacctnnacacgatcgannagcttcttagtngagagaacagagcccccgtcctgcttccctaccagttccgcatggaggagattgagggtttccgctatcgctgccgggatgccatgcgctcagtgaccaaacaggccattcgagaggcgaggttgaaggagatcaaggaggagcttctccactcagagaggctcaagacgtactttgaggacaacccccgggacctgcagttgctgcggcatgacctgcccttgcaccctgccatagtgaagcctcacctgggccacgtccctgactacctggttcctcctgctctgcgtggtctcgtccgccctcacaagaagcggaagaaactggcctctaagaaggtcaagaaagccaagacccagaatcccctgcgcagcttcaggcacagaaaagagagacgcagacccacagccgtgccttcctgaagtcatctgggcagcctcactgtgtcccaggccctttccagggctgagcgctgtgcggggtgcggacactggcttcccaccctggccggactggattctggggccgacctgtggtgctgctaggctggccttctgcttcctaatggactagattccagccatcctgccttgtgcttcctgcaagtagaaa

SEQ ID NO: 1615 - DNA, 618 bp, Canis familiaris
  misc_feature (1)..(618): n = a or c or g or t
cccagcaaaagaacctanctcaatttcagagaatgaaggcatctcaacaataccaagccctgtgacctcaccagtcttgtcccgccgacactatggggaatctataacaaatataggcaaagcaagtatattaggggccgctagcattggaaagggccttggtggaatgttgttctcaagatttggacgttcatctacatcacagccatctgagacatcaaaagactcaatagaagacgagaagaagtctgttgcctcgcttcccaccaccactgttgcaacacagacccttccacacagcagttctggctttctggattctgcattggaattggatcacagaattgattttgaactcagagaaggacttgtggaaagccgctactggtcagctgtcacatcgcatactgcctattggtcatccttggatgttgccctctttcttttaaccttcatgtacaaacatgagcacgatagtaatgcaaaacccaatttagatccaatctgaactctcgaaggacattaatggcccaaaactgatttatttctgttaaaatatgtatgtcaagatatggagatttcaggttaaagtgtttcagttttgtatagggcaagaaa

SEQ ID NO: 1616 - DNA, 559 bp, Canis familiaris
  misc_feature (1)..(559): n = a or c or g or t
tgcttccgcgggccgccgnncagcgcntctccgctcagggcttgctgtgtncgaacccgtgtcctccggggcctgcgtcgggcgcgcggccagcaggcccccccgctgtcctgtctccgcagggcccgctgctgcgctggctcaaggtgaacttcagcgaggccttcatcgcctggatccacctcaaggcgctcagagtgttcgtggagtcggtgctcaggtatggactcccggtgaatttccaggcggtgctcctccagcctcataagaagtcatccaccaaacgtttaagggaggtgctgaactctgtcttcagacatctggaccaagtagcagctgcaagtatactggatgcatctgtggagatcccgggcctgcagctcaacaaccaggactattttccttatgtctacttccacatcgacctcagtcttctcgactagagagatgagctggcgccactgcgcgttgttcgtgcagacttcttacagacaccttgttccccttagccagagagccctacagaattcagatttttagagaaattgctcacaaaagt

SEQ ID NO: 1617 - DNA, 698 bp, Canis familiaris
  misc_feature (1)..(698): n = a or c or g or t
ttctggcatggtnnctatgactnnnnntggtgctnnnnagcactcaactggctnnnagtcanngtggagaatgtagtccagaggcttgtgcgaaccccgtgcatccaggacagcgtgattcagttcctctccccacaagcccgccgtcgattccacgctgccctcgcatcttgttccacctccatgctgatcttgtccaacctggtgtttctcgggggcagtcaagttgggaaaatctactggaacaggatcttcatacaaggctggccatatgtgaccctctctgtcctgggattcctgtactgctactcccatgtgggcattgcctggtcccagacatactcagtggattaatgctgcccagcccatggcagcccttcctgctggccttcaaggcaaatggtgcttcaccctgacctcgcataccaagataacctccaaggaaccactgtttgatctgctcatcttttattgaagttacctcactccaagagtgggagcttgagctctcatagaaaattgacaaccagagagtcttctaactttgggaacccagagttcatccccctcagccctgtcattctcctgttgagtatcttacccagctgcacatgatgactgtgtggtctagaacccagtcctaaaggcccttggggtttctngccactttaccaagaattaaatacantanacattct

SEQ ID NO: 1618 - DNA, 633 bp, Canis familiaris
  misc_feature (1)..(633): n = a or c or g or t
ccaactccatcatgaccatcctgnaggccagtggcaagcnnnnnncagaggccaannnngtgnntgcggggcccctggaagagnacgacctggagcctttggcncttgcaccagccccagccccgcgccccgctcaggacctcatcggcatgcggctggcccaggagaaagccttaaagcgtcagttggaggaggaacagaagctgaagccaggagtgggagccccctcgtcgtcgtcgtcatcgtcgtcgtcgtcgtcctcttcctccacccggccaggccctccccagcccgaggaagccatagatttccgggaggaggggcccgagtgtgagacccccgccatcttcatcagcatggatgacgactcggggctgaccgaggccgcactcctggactctagtcttgaggggcccctacctaaggaggcagcgggcgggttgacctcaaaggaggagcgcagtccccagaccctcgcccctgccggagaagacaccatgaagacccccagccccgccgccgaggaatccggggaacccgagaccaaggggaacagttgaccgggcttggtggggaaggggagtgggtcagggagctcgggaagggcggggcggggcctagccggcggggctt

SEQ ID NO: 1619 - DNA, 561 bp, Canis familiaris
  misc_feature (1)..(561): n = a or c or g or t
cttattgctcaacgataagagggaacaggccagagannacctcaaagggctggaggagacagtgtctcgggaactgcagactctgcataacctccggaaacncttcgtccaggacctgactgcccgggttaaaaagagcgtggagctggacagcgatgacggagggggcagtgctgcccagaagcagaaaatttccttcctggagaataacctggagcagctcacaaaggttcacaaacagctggtccgggacaacgcagacctgcgctgcgagctgcccaagctggagaagcggctgcgggccacggccgagcgcgtcaaggcgctggagagcgcgctgaaggaggccaaggagaacgccatgcgggaccgcaagcgctaccagcaggaggtggaccgcatcaaggaagccgttcgagccaagaacatggccaggagggcccactcggcccagatcgccaagcccatccgccccggacactacccggcgtcatctccaacggctgtccacgccatccgagggggaggaggcggctcttcgaactctgctcactaccagaa

SEQ ID NO: 1620 - DNA, 613 bp, Canis familiaris
cgttcccttggatgatgctgtgcagttcaaccacctggaggttgtgaaactgctgcaggattaccaggactcctacacaccatctgagactcaggccgaggcagcggctgaggccctgtccaaagaaaacttagagagcatggtgtgagcatgggacatgcacacagtccctgctcagaaaaagcacgagctggccacaccctcaatccataaccaccaaacatgctatggagagccaccttgcttcagtggggaccaaaacttaggccactgcttcctgtgagagtgaaaataccccattcccttgacagagcatagagaagtgccttggtggacacatgcagtagagcaatccacggagactatgagctgcttccaggtacaccctaatggttgggcccacttaaaatcatcccaggtcttcacccaggtcccctctccctctccctaaagaaaccatcatgggagacacagaaatactccggtaaagaggtcttagctaccatgcataggtgtatatccacagaagaagtgggacagctatgttccaggctttaagagcctggacaggtctgccctccttggctgggaagtactgctgctactgctaatt

SEQ ID NO: 1621 - DNA, 400 bp, Canis familiaris
  misc_feature (1)..(400): n = a or c or g or t
agaactctcngctgaagagctatataagcgactcgagaaactcattattgaggnnaaggcgaatgatnnnnagatcttnnnnngggtagaggctaatctagatgaaagccagatgagttcnnnnncattccttagagctttaatgacagccgtttgtaaagcagctattatagccgactgttcnnncttccgagtggannntgctgttatcnagcaaagantgccgatcttanncaagtnnnnnnnntcagatacagagaaggaactgcaagnnntntatgcnctanaagcatcantagtnnnnnttgatnnnnctgccaatnnnctacggatgttttttgattgcctatatgatgaggaggtgatatctgaggatgcctnnnnnnnatgggaaagtagc

SEQ ID NO: 1622 - DNA, 621 bp, Canis familiaris
  misc_feature (1)..(621): n = a or c or g or t
tancagctttngagacnctgaaggctcnnagctcttgggctggctattacgactacaacacctttgaccagaatggtgtggtgggtccccacccactagtcatcaacatgtactttgccacgggcttcagtggccatggactccagcaggcccctgccgtgggccgagncgtggcggagatggtgctgcaaggccacttccagactatcgacctgagcccctttctcttcagccgcttttacttgggagagaaggtccaggagcacaatatcgtctgagccgtaagctctcagatgggccccgctgccccatccgtcagccttggcccacatgcacattttcctcaccatggctttccccagcactaacccaggctctcctgtccccacaccctgctcatccggcggcggggcaggcaggcaaaccgacgggctttgaggcactgcacctgaggcccaggccaacagagtgatgggtgagactgcacgacccatctctggccggggtggaggccacccaccgaagtagtacagctggactactagtatacctgaccatgtgaccgagaccggctccttcctggtacccaggcagggagcattcgggcagcctggcccggat

SEQ ID NO: 1623 - DNA, 526 bp, Canis familiaris
  misc_feature (1)..(526): n = a or c or g or t
gtnctcttcaggcancgaaaacccgcacnnagtgaaggctgtcaccagagggcagcgctgtgccatcgccctgtggttcactttgnacgcgcggcacagtgagcgngaccgggtgcaggccgatgacctggtgaggatgctcttcagccccgaagaggtggacctctcccaggagcagccccaggacacccaggaggggcccccccagcctgttgaggagtcgctctctggcagtgaggtggggcgcaaggatgagctctgacagtgcccagctcaggatgggtgagcagacccacctcgggaactgtgtcccaccctggccagcgcccgcggggctgcggagcggggaaactgatgtctgccgcccaaccaacgggagggaccctggtggcggccatccgcacggtgctgctgctctcggagtggacatggcaggacggccctccctccccgggcctggctgagggctcggcacgcaggcccagagacaccgtggggggctgcgnnnnnnnccgtgccacagcaa

SEQ ID NO: 1624 - DNA, 618 bp, Canis familiaris
  misc_feature (1)..(618): n = a or c or g or t
ctagtgatnncatttttgtaaagtacagcaaaacctacagatatatacagtatataaatatatatatatatatttatatttttgggggtgggagaaatccaaaataaaataaatgcttgtttcatttttttagctgctgatattcattccttattgtatgttgtcagatgaggaaaattgtgcagttctggtacataaagatgagtaatataaactgaaatctatagttttaagggcttaacctacgactttggaagaagccggaacactccactgaatggatatattgaattgcagtatacatgtatgattgctttttaagtgattcttttcttttgttaaatcatgtaaattcttaaatccttttgcactgatgtgttgaaccttattgtacattcaattaaggcaaacttttataattttccttttgttttcaatgaccttgaaatgttacagcatggtattctatgcaactagttctcctccggggttgacactgtatttttcacattgatttaatggttgagtgtaggttttcttgcccggcagggttctcatacggtgtgtaaccatagatgcatgtacttgtgttttgtgtaagtgttgaagtgcaatgat

SEQ ID NO: 1625 - DNA, 660 bp, Canis familiaris
  misc_feature (1)..(660): n = a or c or g or t
gcntcaccactctcngnctggtgaagacttttanngcggctgtgcgggcagagctgatccgggcctttgggctggacagattgccgttgcctgtctccggttttccccgggcatctcggaagacccagcaccagtgacttccagctgggagtgggagggagaaaactggacactgccatctgctgcccaggcctggaggggcgcccgggggtgggtggacctcaggacctggaatctgagagggtggtagaggggagctgagctgtctgcactgttgcataatctgagccagagtttgggaccaggctcccccgcttttccagatataactgtgggcctcagtatggggcagggctgagtgactgggtctggctcctggtcccaaatctgtttacacatcaatctgcctcactgctgttcagggccatgcccgtagccatgtttacatgatttgatgtgcaatagggtggggtggggacaggggagagactgagctgggagcagacttgggaggcagattgtctcccttgcctctggcccagcagaacctaagcactgtgctatcctggaggggctttggaccatcagagggacaagggcatagggaagaagcgaccacaaccatgagcaataaagttgatcccagggtttgttnnntnn

SEQ ID NO: 1626 - DNA, 377 bp, Canis familiaris
  misc_feature (1)..(377): n = a or c or g or t
canggcatagttttccnnnnntannnacacatnnngaggnnnnntnnnnnaagtnnncatatttaaaagtnnnnnaacataatgaaatttttaactatttgtnnntnnnnntgaaagnnnnnngctttatggnanaagnnnnnttcannngttnnnnntnnncannntnnntnatcatnnngtctttcannncaggcataaancntccactcttgaacaaagcagctgctttttaaaagnggtaattgcttctttaccnnntatttcttttgtaaatgaagcttttctttaagaatgtgactttaaagtgttgtnnattgcataaaacagnngacactcacttattgtaannnnngattgnnctcctgcatnnnaag

SEQ ID NO: 1627 - DNA, 663 bp, Canis familiaris
  misc_feature (1)..(663): n = a or c or g or t
tcccacntagcgctcctttccgtgccttgggcccgggccctggcctccaatcccccccttttagcttaggcctaccatcgccaggctttgggtcaaagttgccctttcccaaacctggccttggctttcttgcctcgcatccagccctccctgatctggcccagagccccaggcccaaactgtggccgggtgccaaatggccctgtggctgggagggggaggctgagttgctgagggacatgtgggccggccgcagccgcttaaatccgcagggcctggatcccagggaccaggagggtcagggtcctcacaggtgcccacattcggcaccccaagtccttgaggccacgtcgcaggtgatgtggaagcccatgttgctgccagacgcaatgaaactggctcctggtgtgagcatgtggaacccaaacacccaggtgctgctcagatcagcagtaccccagcaggaggacaaagaaagtggcacatctcctcccgttgagcagcaccccatcccgacaggtgccccaaagcctcaggtgaccatgagacaactaatgaagaacccaacccccaaagtgtggtcattcctccccaagcacctgccctattctgggctgtgaagctcaggcagnnnntctgcnnncagaataaacacnnnannnn

SEQ ID NO: 1628 - DNA, 631 bp, Canis familiaris
  misc_feature (1)..(631): n = a or c or g or t
ctcaactgcatggcacagctgtcccccgcccggcgccacgtgaagatagagcacgactggcgcagcaccgtgcacggcgncgtcaagttcgcctttgacttcttcttcttcccgttcctgtcggccgtgtgagcccgtccccgcccgcctcccccgggccgcccggctgagcgtgcgcctgtgcccaccggcctgcggacacctctggtcgccgcccgtcccgggcaccggcaccacaggaactgcctgcagcgttgggagtcgacgtggccgagagctggcggggagagcaccttccaggggaggccccgcccacccgccccttcactgtcctgcaccgctggcgtctcttatttattgggtcactgctaagcctcgacagctgtctgccggagcggggctggggcaggcagggggcggggaggggaggggcggctctgggcgcttggggctcgagggtcagcgtgcagacgaggggccgatgcacccaggatggggacttggacatgggaggcacccgcgccgtcccctcctgcgccgtccccgcccggcgctcagaagagtgtggccctgctccatgccggacacagaacgtcannnnnnagatgcagctgaaataaaaacacnnnnn

SEQ ID NO: 1629 - DNA, 546 bp, Canis familiaris
  misc_feature (1)..(546): n = a or c or g or t
cattgcntgctctgtacagaacgtcnntcgggccnntgcagccccaccttcctggaccaactcatcagaggcatcaactaccttgacagatccaccaatgccttctgtaccaatggtcccaagtcatcactgagcctgccaaggcttgcagccaactacctggaacgcgtggccaactccatccacctggaccacccagaccactccttcccccgcagtaactccagtcccatcaccagcacggctgcctctgacaactacaccaacacctgcatggtgccttcccccaggggtgtcaacacgctgcagtatacggatgagcctgccggcaccagttacccgcaccggcttcagagccggagcctcacacctgtgctgccgcagaggcccgggatgaagctgcccgagctccccttgttcggcaacgggatcttttccttaggtcgccttcccaagctctgggaagcaatccgctcgggcttgagagcccccgagcccatctctaaaccctgtagctggtggtaacatcgaccatgaaatgggtac

SEQ ID NO: 1630 - DNA, 665 bp, Canis familiaris
  misc_feature (1)..(665): n = a or c or g or t
cagnaatgagtgtnncgtccatgtgaatcgatgctcgggctctttaaagctctccgtggcgtccananctcgngncnnnnagcagcctgggtgnctctgctgtgctgcttcctgtgggcancctgggagcacagctggggagcgggggcagcaggcgcccaccctggggacacagggtgggcatctgcagccaaaggcaccctccagacctgtgtgcggcctggccccgctgcatacagaaggcatcaggaaggtgcgctggtggtgggcgggcggggagggggggtcgaccnnnnnnnnnnnnctccctccgcagctgctgacttgtttgataaacatgtaactcattcatgcttctagacctcttgagttctgttgggtcctacagctctgggctggctcattcataaaatgggcatgatgcccaccaagccgaggcctcggggggatggacgaagctgggggtgtaagtgcccagcccagggcccagcacacaggaggcctcagatccatgggtggtccctcctcccttcctgccactgcgagctctggacacttccagggccatgcccctgcaggcagctaatgccaacccctgaccctgaccctgaccctgacccgcatgagactctgcctttgggcctgggcctccttctctgttcaca

SEQ ID NO: 1631 - DNA, 591 bp, Canis familiaris
  misc_feature (1)..(591): n = a or c or g or t
tatgagcagaagctgcagcagtggcatctnnagcgggtgcacttgattcagagggagcannagcagagggagagggcaaagcgggagcatgaggcccggagagcagcaaaggcagctgcctcacaggcccgtggggccccggcgcccaccaccagagcctctctagagccctgtcctgagattcccagggaccatgcggcggcctcggccccctccgcctgcctgtcctcctaaagcaggccgtttatggtatcagagccacagtgttcaacgtcctaaggcagcgtgacttcccatgagatgctgagaaaggctgcagaactgtgagtggccagtggtcagaccgaagccccagctaaacaccttagatgcggtgcacccaaggtgtatggtggggtcagggatcgacgtttaacacagaaggtccctgatccgagggcacccgggaggctcagcggtggagcatctgcctttggctcagggcgtgacccccgggttccgagatggagtcccgtatcaggctccctacaggggcctgcttctccctctgcctgtgtctctgcctctctctgtgtatctctcatgaataaa

SEQ ID NO: 1632 - DNA, 543 bp, Canis familiaris
  misc_feature (1)..(543): n = a or c or g or t
ggttgaacttgaaannaagttngaatctgcaactaagtctaaactgcattacaagcagcagtggggacgagctttgaaagaacttgccagacttaaacagcgggaacaagaaagtcaaatggctcgtctcaaaaaacagcaggaagaattggaacagatgagactacgttacctggctgcagaggaaaaagatacggtgaagaccgagagacaagagttgttggatataaggaatgaattaaacaggttaaggcagcaggaacagaaacagtaccaggattccagagagattgcaagcggaaaaatggacagcccacgtggcaatgccctggaagaaggtttggatgattatttgactcgactcatagaagaaagggatactttgatgaggacgggtgtgtataatcacgaggatcgaataataagtgaattagaccgacagatcagagaggttttggcaaaaaacaatgccagtaattaataacatttggaaaatctttacagagactccaggcctaaattttaatttcattgtaaaaccct

SEQ ID NO: 1633 - DNA, 308 bp, Canis familiaris
  misc_feature (1)..(308): n = a or c or g or t
tcccctcctccctccctctcttccttttctgttacagattacagatgaaaccccagataaggtatattctggcttcaaataaaagtcactcctggggaaccctgggtggtggctcagcggtnnnnnnactgccttcagcccagggcacaatcctggagacccgggatcaggtcccacatcgggctcccggcatggagcctgcttctccctctgcctgtgtctctgcctctctctctctctctctctctctctctctctttctctctctctttctctcatgaataaataaaatannnnaaaaaaaaaag

SEQ ID NO: 1634 - DNA, 580 bp, Canis familiaris
tttacatattatctggaatgagatagttttttccaaaaataataccaggagactgccagggtcccatttaggctccagctactctcctccacgttgaatatccttttaatttataggtacatttgtagtaatttatctgttgagtaaggatggggaatccctcattagtaatagagattaactataagaaagaaggcattgggctgggttcaggtgagtgtaaatggccttccacaaatgctttccaggctgcctccaagccctcacttgaaaccattaacactgatttgctctactttgagaaaaactctctaaccttttgcatgagaaactagagacaggaaggtatgctgcatagtttgatataggaatgagttaattaaacttatagtctttgtgataaaagaaatacaaactattttcttattgaattaatgtttttatcttaaagcattttctagtcatagaatgaatttatctttttttcctatggtggtatgctcttctatttgttactcttaagattcctaagctaatcatctttgtcatttgagcatagttgtgcataattgttaaataa

SEQ ID NO: 1635 - DNA, 574 bp, Canis familiaris
  misc_feature (1)..(574): n = a or c or g or t
tggtctgctnntcgaggaccatgatangacacaccgactcagctgnnnnnncccccggcaccatcaggggggacttcagtgtccacatcagcaggaacatcattcatgccagcgactctgtggagggggcccggagggagatccagctatggtttcagagcagtgagctggtggactgggcagacgaaaaccaccacagcagcatctacgcagcctgagcactcgggctgccctcagccaccctgcggccacccaggatcaactacctctgtgtgcagaccccgagcccaccccggcggtctgcccttctgtcccagaccccgtctaccttccgctccatgctaccctgaggagctgagcaaccaactctatgtgccttttactatcctgagccagtaagaaattggaccaaatcctttctatgccaaagtgccagacaacctttgggggggtctccaaaattacgtagtgtaagcgcccttcccccaaggggggtgagacatcactgtgttgtggcgggcgggagttgtttgttacagttcctgccatctttcagattaggggtgaggacttc

SEQ ID NO: 1636 - DNA, 504 bp, Canis familiaris
  misc_feature (1)..(504): n = a or c or g or t
acaggtgtccctcggggctcgtggctccaggcctcccgccgccgcgacgnngangagcgcggttaagggcgcttgtgtggnntgaaaggtggattcgannaantccacgcgncgggagttgccctggagaatccttgttgtgcgtccttgtacttcccgcacctaacctagccctgttggggaaccggcacgcaggacccacctacttgcagggaacactgactggaatgttggtgttagagatcttccattttaaccaccgcagggagcatactgctccggtcacagcctggcgtgttgtgaaatgacggccaaaggtgaaagcctccggtgctgacagagtggtcacagttgtccctacgctgaagtgaaatgaagggcataggtctgcctgcgtgcgctgcgctacgacggcatccttaataaggagtgtggcatctgtgtaataagggcggtcttgcttcttttttctcctgcctatgggcgtcccacnnnttctctgaa

SEQ ID NO: 1637 - DNA, 676 bp, Canis familiaris
  misc_feature (1)..(676): n = a or c or g or t
atgttgatgtaaagactaccgatggttatttgcnncgtctattnngtgttggttttactaaaaaacgcantaatcagattcnnaaganntcttacgctcagcaccaacaggtccgccaaattcggaaaaagatgatggaaatcatgacccgagaggtgcaaacaaatgacttgaaagaagtggtcaataaactgattccagacagcatcggaaaagatatagaaaaagcttgtcagtctatttatccactccatgatgtttttgttagaaaagtaaaaatgctgaagaagcccaagtttgaattgggaaaactcatggagcttcatggtgaaggtagtagttctggaaaagctacgggggatgagaccggtgctaaagttgaacgagctgatggatatgaaccaccagtccaagaatctgtttaaaattcagacatttaatggtgaccaataaaaacatatttgtgatgtttaatttcttatcattctttttaaataatcaggctcggtgaagcagatgttttgaactgaccgtgtgaacttttcagaactattgtatggatcttatccattgctcttggctactaaatagctgcaaaagggtagtgatctattttaagctgtagtgatctggatggaagtgttctagatggttaataaaaggaaacttttnnncn

SEQ ID NO: 1638 - DNA, 614 bp, Canis familiaris
  misc_feature (1)..(614): n = a or c or g or t
ctgtgatnnctcctcatcacaacagtggcatctnnaaagctaaagtngacgctgtggctagcatggtaattcctcagtgttcacctcatctgtgagctgtgaggcttgagaagttgctggtacaagaaaatccctgatttcctgtttaaatagaaccatttttgagaggatgagatgacagatatactagagactggagcacagagtgatcatcagaaaatgaggaaatctgatttaccaagacattaacatcatttctgagctgctaaggaatttcttgcttatggtaagaaagtagactacaattttaactctataaagggtcaggtttggacaggccaaacccaggagattgacatttctgttcaaacttatttatgctttttaatccctttaataatagaatggcatttgtctgatcaggaacttgtcatggtttccttttttagaaggacttcataggaaacaaatttttttacttcaattatcatgtccaaaaataatttcaaacaaactgaatccacattacttttaacttcagaaggcctcatttataagattatatatttaagaggcagttaactattataaattattttggtgaaatatggtac

SEQ ID NO: 1639 - DNA, 512 bp, Canis familiaris
  misc_feature (1)..(512): n = a or c or g or t
caggcccagaaggttcgctangaggggggctacctgctagcctctgagggcgccgagcggtcggatgaggagccagagcagcctgcagtgctccaggtggaccagagcgcctgatgctcccgtgtgcccggtgacgggggaccggggcggctcccgcacgtgtccagcaccgccccggccctgccgccgtcgtctcctccatcctagcagcacacgcaccacccagctgtacgctgtacgagggcaacctgtccgagccccgctcccaacttgctcttaggctctctgtttgtacagtcgctccaagactgcacagaagaagaaacggagcagccgcaaaacgctgatcggtttgacggggtgaggaaagccagaggcaactcaagatcctcgtcgtggaacgggattcgctcctcaccgttccaccagcttgctgaccagcgccccagcactatgctgagtctcacagaactccgtgaatcctcacgattgcatttcaagtgtgtgatgta

SEQ ID NO: 1640 - DNA, 680 bp, Canis familiaris
  misc_feature (1)..(680): n = a or c or g or t
acttgcattactgctcaaggactcctatgaannaggcccagattgccaggnnnaatcttttggcctgtatgccaaggttttttgtgtgatcaaggtcaccctgagcagtgggcagttgtgacaanntctggtgtatctgggagtggtatgaattggttcccttgttccagagggatgtttcatattcccatattctcnnnannnnnnnttgacacacacatcctgcnnnnnnnnnntgccgatgccnntgaaatctantatntagtannnagacgtcactgtccnntaaaaagatagnnannaatcataataggcacagagatactgatgaatngnnagntgnnaacatactgtagagaatgtgacttttatacaggtaaatgcacatatgtttctatcactatggctttggtatgcaggtttacagaaattctcaggattcccgtatttgtgtctcttttatggctacagtccctgtctgagcaatttaaacattttctgcaataaactgcacatatttatagtatacagtttgataagttttaatacatgtttgtgaagccaagttttctgaattgccttataatccctcctccccttacccattcccannnnnccactcatcttgctttttaactgtagatttttgttgcatttcccagaattttatgtatatggaa

SEQ ID NO: 1641 - DNA, 469 bp, Canis familiaris
  misc_feature (1)..(469): n = a or c or g or t
aatctgtgccacagcgacacggccgggtcnntgagcaccagcgcctggtcacggtgtgtcccnnnnnggggcccgtgcgccacgccagacaccgacaagccctgtgtggccgtccgtggccatctgtgcagaggatgtacgtgcgtgacgtgtcatcaggcaccacatatcaagtccagtttaaattctcacccctgtactcccccagcagcctgaagaacagaattcttgtctcaaacactaaggcgagtgatgggacagtctaggaattcaggagcagggagagttgaaatattagacaatacactggatttgaggatttccttgaggcctttactaagctgaacatcttgatgctctactgtagtcccattggattcttttttgatagcgggaggaagtatgactaatgttagagcctgaaactatggaaatgctnnnnnaatttttatattgnnnnacgttttct

SEQ ID NO: 1642 - DNA, 621 bp, Canis familiaris
  misc_feature (1)..(621): n = a or c or g or t
gccccgctgngtctcaaaagcaacaagaacagaactgaaagaagctcttgactggctgacaggagggttccagtgttgaaatgtggccgtctcgtctctgtccacgcgtgtctgtgtatttgtgtgccggttcagtagaggtagcgctagatgggtgatgtttcctcacttaccattcctaactattgtaacttgacattaaaaagacaaaaccccacaacacttttcctgccatgggcttgcagattgaagcactttcgatgttgggcgctggcgtttgtgttctgggcaccatcctgaccctgcccagatcactataatattattttatacacaaaacttttttttcataaatgttataattttgtgtctgtctttataaactattataagtactatttttgttataattcaaaatagatatttagtataaagtttttgctgttaaatatttgttatttagtaaaatatgaattttttctctattgtaaacatggttcaaaatattaatatgtttttatcacagttgttttaatattgaaaannnnnnttgtgtgttttgttttgatatgaaactggnnncgtgtgagtgtttttgctgtcatgtggttttaatctgta

SEQ ID NO: 1643 - DNA, 592 bp, Canis familiaris
  misc_feature (1)..(592): n = a or c or g or t
gttttcacaactatttttgtagtagtgcagagtaccatagtaaaccagtaagctgccctattgtagcatttcttaatgtagcttgttcangcgttttatgaacatgattcaatgctatggatttcttgttttcaaattttgttgttgggcaactgaaaaaagtaagtggtttgtgtgatatagtcttttcattgaacatctttttcatagagttcagatagctagcaggttataattgccatcataaaaccatcaaaaagatctcatccttgtcctcttcaggcctccagggaagccttttgcctcagttctattgcacttgtagaaaatctggtcctttgccccacttgtttaacgataaaagattaaatttgtttcccaagggaaatgttcagtttttctaatgaaaattgctctttttgtaagtagtcttctgtctagtagtagtacttgtagatatcacccatgggcctttaattatttttggtcacattttccatagggttaacaccattttggcttaaaaaaaatataacttgattgctaattgagaattgctttattatgaaaaggaaatggttctgcctttgaa

SEQ ID NO: 1644 - DNA, 461 bp, Canis familiaris
  misc_feature (1)..(461): n = a or c or g or t
aaagtggttcttgctaatttctagcaaacatctagctaagagagcacacatgttgatgcactggaaagctgctttagagaatatgcgtgatttagagttattttattgggaaacaaagaattttagaaattcttgataattgagtcatacaattcttttcagtcctataatcatttaaaaaactgtgagtcctaatgattgtaactatggtgttgttttgtgtcttatttttacagtgtcaaaagaactcaactagtaaacctggcaacatcttttgagttttttataatttgttttctaacttgaaaaccctcaaataattggattttcttagattctatgtgtgtttcatgctatggctaaaagtcccattttcccctgatggctgttagtttggtaattgcttcaagtgagattctgtnnntatatcattgtgtannnnnntggtgatgcagcatttc

SEQ ID NO: 1645 - DNA, 578 bp, Canis familiaris
  misc_feature (1)..(578): n = a or c or g or t
gcgtctggcatctgggggtccttggctannacgaggctggctgatgcaacattaggttttgctttttcaagaggaaaatcaacttcatgggaaaacgaaaatggctaaaacctgtttttgttttagtaactaaagattgtacttctgaagttttgtgcttgagagacaatgccaggatgttttgcccagcctggggccccgggggtatgcccctgccgtgtcctgggggctgcgtctcctgtccttcactccaggccagcctccctcgcccgccctttctgccggcatgcctgccatggaagggacggagcaggcccagaagggagcctgctttgtactctgcctgggcggaggctggtgggggcagcacccccagcaccctcccacaggctctgccctcactccgggtcctgactgctcacagaatcggcccacagacgacctactcacgtgcacgtcaccagagctgcaggtctgctggggaggcccgtgttcagcgcctgtggtcacccccccaccccctcctgctgtcctgtctcttgggccatgtgtgaccatcactgtgccacttactgtta

SEQ ID NO: 1646 - DNA, 362 bp, Canis familiaris
  misc_feature (1)..(362): n = a or c or g or t
tcacgtggagggcnnngncnnnnnnngtccatcggnnnnctgatggcnngagatgtgctagcctgtgccaaggcttgggtgcccacgccagcagcagcatggacctgatgctcctggaggacagtgtgctggggtcaggagcctgaggtcacctcagcgtcctgggtcaaccccggtggctgcagggagnngcgccaagcccacgccggctctcacggaggncgctcccgcggtactccgcagatgagctcagctgcggctcaggcggcccctaggcccgtggcccacgcccgtctttccccagcgccagctcccacccaggcacggccgcgcttgtggctccgcacggccctcctgccctc

SEQ ID NO: 1647 - DNA, 626 bp, Canis familiaris
  misc_feature (1)..(626): n = a or c or g or t
acaagtatgccctnnagcgcttgaaggtcatgtgtgannacgcnntctgcagtnacctnnnnnnggagaatgctgcagagattctcatcctggctgacctccacagcgccgatcagttgaaaactcaggcggtggatttcatcaactatcatgcttcggatgtcttggagacctccgggtggaagtcaatggtggtgtcacatccccacttggtggctgaagcataccgctctctcttcagcacagtgcccttttctgggacccccacgcaagcgcctgaagcaatcctaagatcctgcctgtcgtaagactccgtttattttcctgaagcagcagccactgttgctgccactgaccaccaggtagacagcgcaatctgtggagcttttactctgttgtgggggcaaaagactgtatcgtggcccccagacttttaaaacagcactaaataaacttgggggaagtggggggagggaagggcccgggacctggggctgctcaacctaatgaaaaccctgttgctgcgtcactgtgttccctttggcctggccaagtttgatactgtggggattcagtttaggcgccggccctgaggacatcccnnnnnnngtacttcggagaaacct

SEQ ID NO: 1648 - DNA, 529 bp, Canis familiaris
tatctgcaaccaggctttacagatgcatggaggctatggctacctgaaggactatgctgttcagcagtatgtgcgggactccagagtccatcaaatactagaaggcagcaacgaagtgatgaggatgctgatctctcgaagcctgtttgaggagtagcacccagacttgatgttcggtcatgatggttaatgtacaacttgaatcagtattgagagctttcatgtaccgttgtgttgcatatgagtcatggattagattgaagggctgagctcttccaggtggatcctgaggtgtgtgttgggagcagcatcagctctaggaccgggacagagtcctcagcagaactggaggaattgccctaattgggaatgtcacaagaagatgtactaccttgtattctgatgcaaaaagatgaccagtgaagattcaccaccaaatcaaagtcctttcttggatccacatcatcttgatttgtctgcattttgctggttcactaaatctctcttccagggatctggatgcttccat

SEQ ID NO: 1649 - DNA, 281 bp, Canis familiaris
  misc_feature (1)..(281): n = a or c or g or t
ctagttagaannatttatggaatccagactgcatatggtagctcaggttgtttttgnaggtgggccttcctgatctgccaaatgataatgtggcctttaaaaaatgcaaattgattactagggatactcaaggggaaactctaactaccttccatgaaaaagatctcaccgatgacaagataggttccatggtcaaaaagtagagtattcatgacaaaattggcactagtgttgttatatgttggttttaccaagaagttaaccagacgggatccctgggt

SEQ ID NO: 1650 - DNA, 490 bp, Canis familiaris
  misc_feature (1)..(490): n = a or c or g or t
gaccaagttgggacagtgccatcccagccccgcagccatngncgtgccagcaggccccaccacagagatccagacaactgcaccagccagcagaatngacattccagcatcaccagccgaagccctgaatcttgatgcagcagacaaggcaccaaccgcgtgcctgtgtggcgggactggagggcaggagtgagggaggagggttaagaaacagagtgaggccctctcactgtcccttgcctacaacacgtgcattccagccttgctgtctttgctccctcagtaccctttcccccctcactgcctcttaagcctaccccaaagaaatgtgtcactcaatttggacctattcaaccagtaaatgaatgccatctttactaaaacaccttctccgagcccccagcccctcactgatcttgctttccctggtctcacgcagttgtggtcaatatcgtggtaatcgctaattgtactgattgtataagtgtgc

SEQ ID NO: 1651 - DNA, 596 bp, Canis familiaris
  misc_feature (1)..(596): n = a or c or g or t
tgggcattgcagacttgctnnacaatggnncagatttctccggcatgacccgagaggcccagccgaagttgtcaaaggtggtccataaggctgtgctgcaactccacgagaagggcttggaggcagctggccccgccggggtcatgccaaacgtgaagtctgagcctctcgccttccacttcaaccggcccttcattgtcatgatcttcgaccacttcacatggagcagccttttcctgggaaaggttgtgaatccgacctaagggtgcaccccccaccccgggaagccgcagccccagccgagcctgtgcaccagggaccccacagaaatgctctgaggagcagcagtgcccccccccccgcccccgcaccgtcttctccaggttcttctgtccaaataaataaccatcactgcaaccgctggcaggtgcggatggagtggggcagttggcaaactcggaatgatagaaatgcgatatcgcaaggggatagaatttcctggtcttgatccttgtgctgtgggtgtgtaatgtgtggaagccgggtgaagggtgtaacagaaacacaattgcttttgtaaatttttgcgaagtctg

SEQ ID NO: 1652 - DNA, 652 bp, Canis familiaris
  misc_feature (1)..(652): n = a or c or g or t
taaaaangtgaatcagcagccaaagacangtnacaaaaagannagtccccagaaagaagnnaaatatgagnnttnctcttttgctgatgacattggctccaataactgtggatactatgacttacaagcagtgttaacacatcaaggaaggtctagctcttcaggccattacgtatcatgggtgaaaaggaaacaagatgaatggattaagtttgatgatgataaggtcagcatcgtgacaccagaggatatcttgcggctttctggtggtggagactggcatatagcatatgttttactctatgggcctcgcagagttgaaataatggaagaggaaagtgaacagtaatcttcattttagctatttatgtttaggtgtgaaataaatgttatttgttgaccatttgtgtaatccagagctgtagaggaagatatttaggtggttttatgtgtttcccctctcatgtggaacaaaagagggcaaagcagaccactagtggatcaacctaaaaaaaaattacagaaaaaagaaaattgcctttggactgtgctgccctgttaagggttgcaggaagacatttttaaaaagcttatttcttgcattaatttttaaaaattctgatttgaaatgcctttcaccttctgtgataaa

SEQ ID NO: 1653 - DNA, 526 bp, Canis familiaris
  misc_feature (1)..(526): n = a or c or g or t
aagcagtctattacatgctttgtcannnctcaaagcaagaatgaacggtaagcatttaaagnagaatctnngatgaagttaaaaacatgatttcattgattgaatatgtttcctgaaagactggaaagaaaaggtgccaatagaaatttaaaatattttcttttatgttctgctgttatttgggattttcagcacctggacctacaattaattttaaaaattgaaagtaatctataaaaatgtctaatatggaaatatgctacatacttgttctatactgtgcagtgaaaagtatcattctgaaatgtgtgaaattatnnggtcaattgcagccnnatgtntacatttagtaatctagaaatgtagatcaccgnnnttaaaaaaaaatgattcttgataccttctgagaagtgtgattgttttaaatcacctggttttcaaaaattnnnttttgtggtgatcagatagcagaatttttccccagttaatnnngaaatgcaatttaaannngaannncttttgatca

SEQ ID NO: 1654 - DNA, 618 bp, Canis familiaris
accacttccccttccttctgcttccgagacagtttagagccacagggactaaaccctgtgtgcagaggctgtgcaagaagtctgtctgtccagaagttgggtcagctccgagtgacatttccatacttaatcattgtgtccaaccttcagacccacaccttgtggatttacattgcattttagagtcgtgatctcatgctgacacacactgcccctcccatcacttgtgcaccacagatctgctaatcagtcacctttgtctctgccatacagatggggtcaggccaggccttccctgtttgtttaggtcaggacgccatggctactgcgatatcagtggtctcacaagcatgacagccaggtctgaggatgcctggtggcagagccagcaggcaggctggccggccagggtttgcctggttctcctctggcagacagaagggatttggctacacgagtgcatgttcttgggctcaaactttcttagcctctgaaatggggggcttgtcagtctcagaacaacctcttttcagcccatcatggcgtattcagtgtgtgccttttggcttcatctgtacacgtcccctttcccctcaattcttttaacaccataacagt

SEQ ID NO: 1655 - DNA, 453 bp, Canis familiaris
  misc_feature (1)..(453): n = a or c or g or t
ccacagctgctccaacccacaactatgagcntnnatctgggcagggctccccattctacttcctgtatcttcacaacaaccccatgcaaagaagagcacccaaatctccatttgcatctccatggggcagtcccttttcctaaacctacgaccaccaccttctgttttcccaggaaatagaggaaccccaaaatgttatgtttaagaggtcagggatccagtcattcacgggttccacctgccagctgggtgtctgtaactccagagcccctattaacatatatttgggcacaattgtcatgcatgctacctccttacacccttgagggggtttcaaatgctcaagtgagtggccaccagccctgggactgccctcctccatctctgtctgtccacctgacctcccatagcctgacctctagcatgtctatttcacgggnnnnnngggagtgg

SEQ ID NO: 1656 - DNA, 621 bp, Canis familiaris
  misc_feature (1)..(621): n = a or c or g or t
gaaatccagccttcccctttttggtgtgttctcccccatactttccagattcttactgttatggctcccagtggggtgttggtgatccatgtgacgcagggnctcggtcagtatccagccacgtgtaagggagaggataaccatacctgccctgcctgctgctggggagccctctgcccaggggccgggggacttccctgggggagcttgggacgggttgaacgcagaggaaaatgttctacttgggagggcaggaagcaaagaaactggacaggaagtgggcttggggagcggaagtttatctcggatacttaaaactgggtctcttaatagggagatttcagaaagggaccctgcttccaatttccctcttccactcccagagctcgtacagggcttagaagaatgcccttggtctgttggtccagtggtcgtctgtcatccatttaagtgttcccactttcaagtgacaatcctctccttggccctgccgtgggcagagcatgtctggcacaccagcctgacttttatgccctaatcttgagttgaggaaatatatgcacaggagtcaagagatgtctttatatctgactgtacataaatgaagttttttttnnnnnn

SEQ ID NO: 1657 - DNA, 603 bp, Canis familiaris
  misc_feature (1)..(603): n = a or c or g or t
taactattttcacttgtgacttattaantaaaccagtgtnnaccgatggccttttttgttttcatcaccctgctgggatagggatgggggttggggagatatagtacctgatttcaagcaacttgtgataaaatatggatgcaaataccctccacataagacaaaatatggtaaattacaagtaagtggtatacaaagaaagagataaaaaggaaggcattgctttcatttggaggcagtggccttccagcgtggtggggaggatggggagaagttggccctggtgcaggcatttgtggaaaaccaaaataataataaaaccacttcaaaatcagtctaccttctctatcacagtacacttgccattctaaattatatgtgataaaatatttctctcccttggggttgacagttctcgcctttgttaccccaccatctggaaagttgaaaaaaggactcagaagaggaagtggaagagagagagaagcctgaccttgaagcagacctaaagttcttggaagaaatgtgggaaaactttcaatgcagatatggagttgcagtttaatgttgagtagaggccagattgcagaaaaacatatattt

SEQ ID NO: 1658 - DNA, 682 bp, Canis familiaris
  misc_feature (1)..(682): n = a or c or g or t
tgttgcagatgtagcatatagatccccaaagtccacagtnnagtcacttnacaaanctanntgttgaatttcttttttctncntaagaaagagacgatccttgaaaatgactccgtatttcttcctgcacatcttcgtttttctgtctctnnagtcccgacagagtggcaaagcactttacagtggtaactgagaaatctggattccttgcttcagcgacccttagtttgtacagatcgggtgatgttttataattcccggggaggcagtgcatttttaatgttttctgaagatttttaggagaggggcaaggagtgcagtcctgttctggaattcttttctactttctctttgtgaaaatccaagtaatatttcagttcaaacttgatcctgagcccaggcccacagccacctctgggatgggagctggatctacatcccaagtgacaaggtcctcgcaacaacatctgcttcccagaaggctgtgattctgctatgtcagataacagggtcgggctcctgctctgtttttggcttgaagactgggatcccaaagggactacaggcagggaatattgagatggcagcctgggtattccatcttgagatgctcaagaccaccaacctctcttctcctgcctggaaaagtaagcctttgtgaagaactgacttactgtgtaca

SEQ ID NO: 1659 - DNA, 140 bp, Canis familiaris
ggagggggagggggttgggacctggaggtaaatttaggatccagagatttcccccaagaagagttatttgtaagtattcgtgcctaaactgttgctgtttctctccaaagtggaaactttccggtgttctttccattctg

SEQ ID NO: 1660 - DNA, 560 bp, Canis familiaris
  misc_feature (1)..(560): n = a or c or g or t
acgcggaggaggtgcngaaaaacaannagctgaaagaagaggccnctaggtaaagcccagaggccaaagaagtttccagaacagccggacagctccagcagctccgcagttcctgaggcagcctcgtcggccgtcggctgctctcccagcactggggtttggggggaggggggtggccaggggtgtttcctctgcttttggtgtttgtatatgtaaagaattgaccagtgaagccatcctatttgtttctggggaacaatgatggggtgggagaggggagagaaggagagaatttaggaaaggagatagagaaagactcatggacactgcaaccctgcccaccgcagactcaggtcaagtacttggcttttcttcacagtgaacgtccaggcaccgtgttgagggaagctgcacgtggggcagtagccacaccaagtgaagggtggagtcctgggtggggcagtggctgcagggtgtggcaggagagcccagggaaagggtggggggcctggaggtgttgcttctgccctgcaacaggtgggatgaggtctgagtgtgtg

SEQ ID NO: 1661 - DNA, 587 bp, Canis familiaris
  misc_feature (1)..(587): n = a or c or g or t
ctgtagnttctaatcttgtcttgatgtgtgttatgaatgttgtgaatgacacacagtcatacgnctggatcatgcctgggtacggtcagtgaatcagttgagtcattatggggaatttgtttctgtccgatctgctctgtgcttaatctgtttatttgaatcaatgaattattaaattcacgtttgtcctttaagggcaaatcaatacaaatgactgatattttaactgtactttgtgggaagccacccatttgttactagatgtggttaggtgagccctaagcatcccagggatttaaagaaggccaataggaaaatagaagcaatcacttttctgacttgaacttagaagaaaaaaaccataaacctctttaaaaacacccaggtagaggcatttagttaattctatcaattgatggaattaaaatgctgaaaaatgcattctcctaaaataaattaagggcctttctggccatcgttttacaaatgctagatattccatcttgaggggattggcgtggactggggtcagagagtaatttctgaatgtaccttgagttaaaaaaaaaatgtgcctatgtttatag

SEQ ID NO: 1662 - DNA, 675 bp, Canis familiaris
  misc_feature (1)..(675): n = a or c or g or t
agaagaatgggggaaactcatctatcagtgggtttctannagtggccagaacaactccgtgttcaccctgtatgaactgaccaatggcgaagacacagaggatgaggagttccatgggctggatgaagcaaccctacttcgggctctgcaggccctacagcaggagcacaaggctgagatcatcactgtcagcgatggccgaggcgtcaagttcttctagcagagacctgtctcttacttcttacctcccacctttccagggctttcaaaaggagacagacccagtgaccctacagactggatctgtgactccaccagactcaaaagggctccagtccagggatgggtttcccactaccctgtatgtctgtccttggggaaaggtgaggctgaggtaccagggagaaaagatgtgcttctccttgccctgcctcctctaccatcctagactgtccctgagccagggtctgtaaacctttaacttcacatgtgttcacatacgtaagtacatacacgcgcctgcacaagcttttgtctctcccctttcccacccctttagctgctattgcctcacctctcaggctggtgctggatccttcctaaggggtgagagaagccctggctgcaggcagccttccaggcaatatgaaaataggaggcccaggaaggggcctg

SEQ ID NO: 1663 - DNA, 688 bp, Canis familiaris
  misc_feature (1)..(688): n = a or c or g or t
tcacatcctcccgttgggatcnnncntactccagagagnnnnntgcattcccactcccctttgtgaaaccagagaacaaattctggccaaccattgcccggattgatgacatctatggagatcaacacctggtttgcacctgcccacccatggaagtttatgagtccccattttctgaacagaagagggcctcttcttagttctgtccccctaagttcaagtgactgacttgatgtctttctctggagcatttgatgataactatataattttccatcccagactcaaattgggttttatatactgtgtatatttttgtaatctctgtcaaggtaattgtaaataccattagcatagtgagtggaaactcattgttggaagactgatttgcctcagtgcctgcttccatatgtagcagttgatgttcaagttgccttgattgggagccatttagttttttgcatagaaaattttgggtgtgctaagaagtttaggaagttcagagacataataaaggttatactgtagactccgacagacagattcttgttccaaataagtccttgtggactgtgccatctgtgaggaatcccagggcaaatgtttacattttatatacactgaagaaaatttttctctaatttgcctaatctgtaatagcatttctgagtgtttttcttttcccctt

SEQ ID NO: 1664 - DNA, 472 bp, Canis familiaris
  misc_feature (1)..(472): n = a or c or g or t
ctcagtccatggaaagtacctgatggtgctccaccnnntggttctttaaagaatgctgcttttgttcccttgttccctttccccctttgggtgcaaacttacttctcagcagccggaaaacattcctcctacaccttccccttcttcttccacaagaacacccacaaggcagtaggacctggtttttcaggtactagggacagttggatcactgcttggactctgcttcaagtagggatggtgaatatcctcctgcctgcatggctttaccctcccctctcccccacctgtcccgccccgtcccccagccctgtgccaggctgctctggctatcacagagttcactgagcccagctgcaaccctctggccatccagaccctgtcnnnnnnatagccatatggtacattgcagggtggagcctgtttgcctgccctgctctannnnnntgtcatcatggaaaatggaagagaa

SEQ ID NO: 1665 - DNA, 422 bp, Canis familiaris
  misc_feature (1)..(422): n = a or c or g or t
tgcagggccctgtctgccccntggtttaccctataagatgctccagcaggtcntagtgggtcccagaaacctcccctcagatgacccggaagccatcttgccatgggaaacatcagaggccaggcccatatctacagcctcccttgagagtcagtaagggacggaacttgctcttccctgcggctgcagcagaggtcagaggcagaaggctggaggcaggcagcaggaggccggctgtgccccccaccctccggaagccagctgcttctgagcagagcccagagccacccagatgtttatctagatttgcaaatttcattctttagctcaggttataggaggttcagaatttgtttctttactggaggagagaagggctccctttgttggtggtacctttgtttttctccggatttccattt

SEQ ID NO: 1666 - DNA, 599 bp, Canis familiaris
  misc_feature (1)..(599): n = a or c or g or t
agctgctcgggngctnncgggtggtgcttgggcgagnntgcgtctctcaggtgttgcagtttgttagagcaggtgagccctgcgcccacagggaccnnnnnnngcgnngnntgaatcagctgcgtggggactggctacccccacgggcacgagaacgcagccagcacagagccctgcctctggagggacaggagaaccctgacacctggatctgaaaccagggtgggcctcagagccctcacgtcacccgggacacttccccaccacttccctgtctacacgggcctgaaaagcaggcgtcaagaagcgagcagccgggaagccaaggcccggggacatgcccgacgtctgagctccaaggcggctgccactgctcgtccctgcaggtctcagggaggacgtggtgggggttggcgggcccggtgccccgacatgtttcacttctcgacgcaccaggcgcctggaactctctttagcgacggagcaccagtgtgggtttatttatttaagatgtggtacgtggtttagaagtttaagaaatgtaaatcgcattttgttatttattaagacaaactcngtcctctggccacttggtttcc

SEQ ID NO: 1667 - DNA, 629 bp, Canis familiaris
  misc_feature (1)..(629): n = a or c or g or t
cctgctgnagtgagtagtnnnctgcccgtgnnggnnagcccgtcccgttagtctcataaagtccagcnngtctccctcgatccaaannnngttttctcgaggggacgctatgggcgttgctgccgggggcgagcctgccctgggcctccccgcaccacaggggaaggcgggggtgggggcggccccccaaccaaaatgctgcaccaaagcctgggccagcgggcatagcccgcagggtttcctgccacacctgctcgtggagccgtgtccagggcccggggccccgggggcggccacctcttggccactcgagccatggtctgtgcccgggtgttcgtgggcttgtcgtgtccgtgctccacgctgccggctgagcagcaggagacaagcgccttaaagccctgtcccagccccgcaggtgtgtccggggctgggcagccctggtgggagtgcggtcctctcgggccctccggagggcctgtgctgccactcggggtggagcagctggggacggcctggcagcggtgtgtgtgtctaggtcttgctttacacggtgtacagaaatggcacttcggtttctctgacgcttcctggaagccatagagtttaggggcttttnnnaaaannnn

SEQ ID NO: 1668 - DNA, 554 bp, Canis familiaris
  misc_feature (1)..(554): n = a or c or g or t
agggcctgnnaatctgtatatnnaacagnnnnctccaaagatnnttcagatctatcatnnaaagcannaaggcagaaancnncagcantagcnncaggagtggtcctatcntggccgccatgttgcccatgtgatgctnctgctagagtctttctcctggcgcatcatttgttcattaattctacttgggaaatatttattgagcacctactctgcactagggctacagctgtgaaaaagcnnacaaataaatacacaagataagctcagccactggtaggtaatgtgagggaaacagcagagcaacgtggtagggtagtgcctcgactgggtacttcttaaacacaacagtcaagaaggatgtggtctttgtggatttctggtactgaccttcagcaggtttctcatggcgagcaaagttggaaagccagnagcgtatgctccagtcccagcattgccatcaacagctgacacagactagccacagtgtcctcatctgtaaaatgaggggttagatctgaatgttcatctctaaggtcccacccaatcccaat

SEQ ID NO: 1669 - DNA, 520 bp, Canis familiaris
  misc_feature (1)..(520): n = a or c or g or t
ggcacgggctgctggcanggccccaaccgctccaccanngtgcgnntgctgtgtggaaaggagacagtggtgaccagnnncacggagcccagtcgctgcgagtacctcatggagctgatgacaccagccgcctgcccagagccaccacctgaactgcccgctgatggtgaccatgatgagctctagccctcctgggtgcggaggtgcccacctcaactttggggaacctcaaggctcagaaacatccccaacggtgnnnnccgcccacccagcgctccgccaggggaccaaggcctgcccctccagtctcctcaccctggcattgggggcgggggggagggggtgggggcgggatccatgtggagctctgccctgctctcaggggggccgggcagggcacagcccgccttcccaggccccggtggtctccaaaggtggaataaaggagttccgcaccccctgggcgcccgcccccgccccccgcccagggtgtttgcctccctccctggtggggatgagt

SEQ ID NO: 1670 - DNA, 501 bp, Canis familiaris
  misc_feature (1)..(501): n = a or c or g or t
tgttnnacggagtccatttctttgcnnctctcgcgtctttggaatgtaaagggcagaaattgtgactccgtgccacatgtagccccagcacactggggcttttaagcgtgttcagtaataaaagacaatagaccaaagggatgtgatgaatgaagcattaacttggttgttccagatgggaaccaatctccagggcagattctggagctgctatcagctatatgaagtcatatgtgccttgaaatgtccactacttgagttcctagcatctagtgggcctggggtgctgggggcccccgaggaaactcgaccttctggtgcctgccccctggccctggcctgcatgccatcagtgggtactcgccatgagatgctccatttacacgtacgctgtcggttccttgccaattgtgcttgcttcttgtaagttatttataaagagaaatcactaatggactctactggtttgggagcttctggaactgtgtgacagattgctgg

SEQ ID NO: 1671 - DNA, 603 bp, Canis familiaris
  misc_feature (1)..(603): n = a or c or g or t
cgncatgctacgagacggtgaagacatggctccannagaaccnnntggctgtgggcatctttgggctgtgcacggcactggtacagctcttgggnctgannttcgctatgaccatgtactgtcaggtggtgaaggcggacacctactgtgcatagtttgcccactgcctgccacctctgccttgccgcgaaaggacaccgcccactgggggtgaaaggccacccactggtcctggtgctcaaggtggggctgcagccctgccacccacattccacagcagagccggggcaggctctgggtgcatcttaataaagtgcgtggatgacagccccccaccctggtgtctgttgcggccctgaccctctgcccacagaccgtttgtccatgggaccccctaacatgtgcccggtacctggggtagggttcctgcacatgcgtgggaccagccatgaaacctctgcaaactgggatgcaggaagcaaggcaagggcacctccctcccctgatgtggggtggcctccatctagccccagggccttacctgcccccagggggccctccgctcctgtgaactttaccccttaactgataatctgtaatgga

SEQ ID NO: 1672 - DNA, 571 bp, Canis familiaris
  misc_feature (1)..(571): n = a or c or g or t
cagtggngaagcatnnnggctgnngcagggcaaggtggtagcccagccgtttnnagcagggacagaggtaccagacaccccgcnctgggggtcacggtcagggcctggggccaaaggatggatgaaccagggagaagaggcaggtgagctgggcaaggggctgagctgccgccaggtgttcttgccaagcattcccacggaagctgctgggcacaggagaatgagcagcaagaaggcagatcccaaagctgcatcagagaagtggctgacatccctccccggagctaagccgggtgccgctgctggggagtctgacccccgctccagcacggacttgggacgccctctctgcagctgccagggatgcgctcaggagacccttccctctgagagtggctttcaggagatctctgagctgggctcgggtacggtagacggaggattcggagcgcagaagtccattccagaccctggccctgagactcgtgcccctgccctgggctggggtgagggacacggcacgagaacacatggagatgggacgcaggcccgtggggacagcggacaggtt

SEQ ID NO: 1673 - DNA, 536 bp, Canis familiaris
  misc_feature (1)..(536): n = a or c or g or t
gggcanctcnngttcccccacttttcaaaagtgaggaaacaggcatagagggaaatagcttccccagggtcaccactgagaagtagtagcctggctccagtgctcatgctcttagccttgactcttgacttgtggcacaattttgctgtcagtaaacatggtgaggacggtaggtgtgatccagccggtgcttacactgtgcctggtactgttctaaatggctgttgtctgtgtttagttcttgccaccctatgatgcacgtgtagctgcattccccattttacagataaggagacaggtttagaggaatgacatgagcaaataggcgcatgacttaacctagatatggccaattacagagctgctgctctgagaagataagggtttttatattgagaaagtaatccaaaagtaggatccactattccaatagcataaaaatgcaactactttcatcaatgtgtgtattctctcagaggttttccatgtgtatatatttttcatgaatgtgggcctcctttacgagtggttctgta

SEQ ID NO: 1674 - DNA, 518 bp, Canis familiaris
  misc_feature (1)..(518): n = a or c or g or t
tgtcgccgacaangagcaanctccagtgctgtggctgggaccccgaggatnnaaaagtacacatgtatacccattgtcctccttaactgtgaacctccggaacttccaagttttgcatgctgcaggcatctaggacagattgcttcactagaacctggagannnnnnntctttgatagcataagccagattacctatctgtgaggtggtgtgtgcgtgtgtgtgcgtgtgtgcgtgtgtgtgcgtgtgtgtacgtgcacagcatatatattagtttctttacccacaatacctgtatatgggtatatttctgtattcattcagggtgtgtgtgtnnnnnnnngcgagtgcgtgcgtgcgtgtgcgtagaatatctattactctcagaggagattctgttgctttcaaataggaatttgttttgtgattagttctcccccttccccatcccctacagatgttaagcaactatgaaatgttctctgtactagctctggtctccttttnnnnngactgtgg

SEQ ID NO: 1675 - DNA, 458 bp, Canis familiaris
  misc_feature (1)..(458): n = a or c or g or t
gaggagtgtagtggtcatccgcgagactgctctnnctggaaatgaggtnnnnngnnnactcttgaaactggatttgaagtaactgtaaaccctacannttcattttcatcccagatctggttgcgnnnaaacctcagagttgtcagggctggcctgggctgctgatttcagatgatactattcaacctaaaagnnatttttcctcaaagtttttttttttttttctatgtataaagccgaaattaagttttgtactcattaggatttacacccccccccattccatccccactgaaatttggaagaaaatttagtacatggctctgaggctgccagttatacaataatctattttgcatatgaaaatttgtatttaacttttttgttcatgaaaaactttacagtggttacacatttttaatttcggaaagtttagagtcggtcagaacatattttgc

SEQ ID NO: 1676 - DNA, 227 bp, Canis familiaris
  misc_feature (1)..(227): n = a or c or g or t
caacgcgccatgnanntagttcgagaggagtttctgcagagagtaganttctatcagcacagctggctgcccgcccgggccttggtacaggaggccctggcccagcgattccaggtggacccaagtggagagatcgtggaactggcaaaaggtggatgccccnnnnangagcacctctaccacctggaatctgggctctctcccccggtgactgtcgcctttgttat

SEQ ID NO: 1677 - DNA, 577 bp, Canis familiaris
  misc_feature (1)..(577): n = a or c or g or t
gttaatggnnagcataactacaaaaaggggtttaacttcttnaagaaacatccttgacacgaaaggtgnnaagagatagagacattgtttaggtgttggtctaaccaagcttcagtattataaaagggaaagtctttgcatttttggctggtgtttctattcctggtctaagaagtgattgctcacaaaatgtatatgcatatagccagtcagttttagggcctgagagaaaagcttagagtttcacagataatgtgtctttggccctttatcttcttttcttagtgtgagcagactagtaaagcaggttagaataaggtttttctgtttagtgaagcaagaggcttaaaaagatcttcctatcctctcttcttttatattttggccactgggcttactatttgttgactacaagtattttattggtaatcttttaactcttattgggagttaaggtgagcatattccgctctcttttccagagtaaactgttttctttggtttacagtaacagctataatcattccatgaagtaatcatttctagcattgaaataaacaannnnagttaaccttgg

SEQ ID NO: 1678 - DNA, 507 bp, Canis familiaris
  misc_feature (1)..(507): n = a or c or g or t
caggcgcccctgctctgtggttgaccccctgnnnngctgtnnagccagctggaccccgggctgtnntcaggcagagtgcccggnntggcccaccccagaagcactcccaccaccctcccctccagttccctcaacacagctttccagacactacccagcacctccagggccagtaaccccccggggagcaggtgatgccctcaggggaggtgcccacccctacctcccccaccgctcccagcactccttccaggggcagccccccagcccccacggggtcacccatggggagagatgcccctcgtttgcctctctctggggcatggaggctggagggggtcccccacaactccctgtatatctgtataaataaatgggatgttaatggagccctgcccccccacccccatgtcgttatcactgtgtgatagtctgtgtctcctttcctggtcctccactctcttcctctatttatttcactctctttttttgggtcccgccctgagt

SEQ ID NO: 1679 - DNA, 579 bp, Canis familiaris
  misc_feature (1)..(579): n = a or c or g or t
tgcaagcctaactttaatgaatatgcttccagagagccaatgagttgtatcatgtgaggtctcttngactcacgtagaatgcattaagacttgtattttgcttcaggactgtaagccaaagtaccatttttaattttccccaaaagcatatggcaatggaagtgaatacaggggcctgatgagcagggagcttagatacaatggatgaattttcattcagaagcagcccaactccttgcatctgattggcagtgggcagtatgattgctgtattatgctccagggataatgccttcattcacagaacaaagcccagggcagagtcactagagttctgcctactgggaatgaagaacaaaaagggtaatcagaagttcgcagtggtttcttcccctccccccacccctgtttcttccttctctcttttgttccatccttccatttcctttactccactcttcccaaggtccttttaattctagtttaattattatatgggaataaatgaatagcatattgcatgtagagaaaacagggaaaagtgtaccaaaccgtaccccactattttttaaccttttt

SEQ ID NO: 1680 - DNA, 519 bp, Canis familiaris
  misc_feature (1)..(519): n = a or c or g or t
gcctccctgannnggccccccgtaagcccttgacntagactatggactgagcttggcttgaggctgaagtggtgacccttgaagtcttcttgatgtcttgacaaatagaccatctgttcccagccaggccatacctttccaagattccctctcctgccattgctgcccacccccacaccctgctcacccttgtgctgatgggacacccatccttaagctgagacagagggtgattgtgggtctcccaacaccaaggccacagatggaagcccacccttgcgccgtgtccctctgctacgccatcccttgctggctcctctaggagtgtccttgtccagtgggtgagccttgcctgtccgcctggggctcacctgggtagagccagcagctcccctcttggcccatggggctgggggccgccagatggtcaagggcgtgctggacctgttccatggtgtctgtctgtgggtgggggaggggtgggcggggtgtgacatcacctgattgtcgacttctgtg

SEQ ID NO: 1681 - DNA, 426 bp, Canis familiaris
  misc_feature (1)..(426): n = a or c or g or t
tcatggggtgcagggagggnnnggcctgggtttgtagtgttcaagttnngtnnacttttccatttgtttattttnnnnnncccttnnnnnnatgactgnnnncnnncannnnnnaagtnnncnactgtgggcagtacctnnnnnntaatttatnnnnncatgatagcatgagaaagtctatttgcattttcaacacttnnntatannnnnnnnacatgcaattcccatttttatttttaataagcnnnaaggntaannnnnnnaaaacctatgaaaaagaaacacttttatgttatccctaatcgtcccactaaatggaatgcctatgattagcctcattaagagttttatactgtgaagattttattagaagcaatatatgaaaattacttggattaatgtgttaatcttcctctttaaaatgct

SEQ ID NO: 1682 - DNA, 638 bp, Canis familiaris
gtccaccaaactaccatattgccgtgagaatgtgtgcctggcctatggtagtgaatggtcagtatatgcagtgggctcccaagctcatgtctccttcctggatccacggcagccatcatacaatgtcaaatctgtttgctccagggagcgaggcagtgatcttgacttccctgtggtagttttttactggtgccctgtctgaactataaaattcattttatgctaaaggatgatgtgcaatgaggagtttaccaagagcatgaggaaacttgagaatgatggggatccggtcagtgagcttttatgagcacatcatcactgtgggcacagggcagggctccctgctgttctatgacatccgagctcagagattcctggaagagaggctctcagcttgttatgggtccaagcccagacttgcaggggagaatctgaaactaaccactggcaaaggctggctgaatcatgatgaaacctggaggaattacttttcggacattgatttcttccccaatgctgtttacacccactgctacgactcgtccggaacgaaactctttgtggcaggaggccccctcccttcagggcttcatggaaactatgctggactctggagttaatgacaactaattctccca

SEQ ID NO: 1683 - DNA, 362 bp, Canis familiaris
  misc_feature (1)..(362): n = a or c or g or t
atagcagctgtgtgttctctggaaagnnntctctcgacacaacnnaaagcatggaggnggcaggcacagagnngcgngaggggtgctggcagcacgcgctcctccaaggctccaggtgttgaanngtcatccctcttacactgcgaagtacgcatcccagttgctcacnnnnnnntcctggggatacacactcactgcccgtgatctcagccctgacacggggactcacagggacgaatgcccggcttccaaagcaccccccgaaggccttctaccttttggttctgttgccatcatgacattggcgtgtacaagaatcactgcattcaacgtgtgtcgnnnnnncccaaggatggtggaag

SEQ ID NO: 1684 - DNA, 642 bp, Canis familiaris
  misc_feature (1)..(642): n = a or c or g or t
cctgcggttggacttcanntcagcactgaaaacacaaaannnaggtnnnnntaaaactncttaaagacagaagtcacacctgaacaaaaccacatgcaacaaaacctggtccggcagtgtctccccacccgagctcagcttgtccctccggagcggagctgctgggacagggcgggttccgtcctgccgccccccaggagccttggagctggcactgatagatgagacagtcttttgttgttcacatgtggaattagagtattttgaggtgtactttctttacgaaataacggggtctttgacatttcagatcgctccatttctactctggaaaatttgaaatcacacaggacctttcgtgttgatttcatttggggaaaagaaacaatgtagttttgttttgttgtttgttttcggcctatggaatgatttccttttgtctgtcctgttaacgttcagatggagctacttgatgacatctgcaggttttccgtgttagagcaggtgccgcacgcatctgggacggacggacagatggacgccctcgctgggccgcatgttcaccatgactgaactgctggactcttggagctgcacttacccgggtctctttcctgctactttttgttgtttgttcctttg

SEQ ID NO: 1685 - DNA, 265 bp, Canis familiaris
cccccccccggggaggaggactcttttccctttctgtcactcagatgacccaaaagagtgtttggccactcttttatacacttacgtggataagccacttatgtgaagccacttatgccaagagtttccaagcaaagggaaggaaaggaggtgtttgatgatgccagggaggggctgatctccaaagagctaaggtttaaggtcttttcccctctgagctctgtacttccaccagcacctaccagctgacagttgcttacaaatc

SEQ ID NO: 1686 - DNA, 528 bp, Canis familiaris
  misc_feature (1)..(528): n = a or c or g or t
caacctggctatggaatgnnaaggtggcgtctgtttctctgtaggattcaccccccaccagcttctgtctcataaatagggccgatttccaaggaacctttaccccgtggttactgtgtctcttacggcaggaaatgctgattctatacgccctaccctgggtaccaccgcagccccaggccagacatgtgtcggctggaacaccaacaagtgatgcccacttcctccatccctagatgccacaacctccactctgtctctgtgatgatactttgggaccaaagtcctgtgctctgattacctgggtcctcgatgcaccctgccacgcgttacctcctggagctggatgagaagcgtgtgtccgctctcccagccaagtagacacttcgccatctgtacagtgtgaggcagaaataccaccttgcctttaatggtgggagtcatcacgcaatcccatcccaaaactgcgggagcttgtccagctcctgtcttcttgaccgcatctgtactgtattgggaaagtatccc

SEQ ID NO: 1687 - DNA, 496 bp, Canis familiaris
  misc_feature (1)..(496): n = a or c or g or t
tcgctgggacgctgttccctnctgaagctgtgtgaccaaacaccacaagccacgtgttccccgctctgcacggctgcttgggccccggacagctcagggtgtcggcaatccagacccgtgctgctgtggctggcttctgagatactggccccttgggggtctcggagttcccagctgagccactgctgacccccatcccggtctggacacaagcacagagaagagccatgtccccccggcagcgtgcctgttaaggcaccgtgttggccacggtgtccccatcgcaggcaggtgacatgagcctcccacttctgtgtaagggaagccctgacgtggacagaagacccctcccgcaactgcgaggggctgctggctgccccaccgcacccagccctcctggccacagagccccgcagagcccggcggcggcggaccgggtgccaggcctgcgtgcggtgggtggtgcgcagcccgcagctgctggaatctctgaggt

SEQ ID NO: 1688 - DNA, 646 bp, Canis familiaris
  misc_feature (1)..(646): n = a or c or g or t
gccatnnngaggaaccaggcaaatgcccacttctggtgtcctattcccttctcacttcagaaatgaggttactctttggttttcgttcttcattcagctgttgtttcctagcttcggttgagaccgaagtgtcccaaagcaaagagccatctggcggtgaccagtatctgcggtgtttccaacccccccaaaaaaacaacactggccgttcctctgaagccccccagtcccacttccttgtggggggagggcaggcatttcggagcctgtggaaggagaggactcgtgtctgcaaacccatttgccaaatcggcggcagctcctccatccccaagctggagcgccattcggcacgagccaccggcgacctgcggtcaagaatatagcctagccacgtttgcaaaaagtatttttaatattgcatctgccccggctccctgggtatttcacttttctgacccaggttagaccttggctaagtctctaacatcctcagtagctccctgattttaactacattagttgaatgcacttgatacatctgtggcctcgtttctacaaaggccaccccccagcgccgggaggacgggacacgcccacgtggtgtatccagctattaatgcggaagctgggatgtgtggctgtg

SEQ ID NO: 1689 - DNA, 494 bp, Canis familiaris
  misc_feature (1)..(494): n = a or c or g or t
tggacnnngcaggtgaggtgcaggggctgtggnntgatgagcaggtggggcacactagcggctgggcagagtgtgnactggtngnnctggtattttgtgtgtatgctgcttttcttttctaaccaagaggctggttttggcatctctgtctcattccctgggatctagtgggaggtacaagttcggggctggagaaacagggaagggctatggaggtcaaagtcctccaggcttgcaggcctaggacaccagagccctcagttaccggtgagcccaagctgtccagagctcaacatgggtgattgggaatcaggtatggaaattgaaaaaggcatgagataggccatctccccgccccttacagcctgactggggatgggggagaggtggggccagcctgtggaggaatgtcccagctaggcccgctcttgggatggctgcaatgatgagaaatcccgggaattgtattgacatgaagattcttattgcacttg

SEQ ID NO: 1690 - DNA, 629 bp, Canis familiaris
  misc_feature (1)..(629): n = a or c or g or t
gaacatcacagtaccttggtatctacaagacattatagggcgnntgaagttattttggccctannatggtcccagccatgtgatgtctnnagtatannnngcattctcattgaatactaccttgggtttacagtatttccaacacatgatagtaaggagcatttggcaatgatggaaaggattcttggacctttaccaaaacatatgatacagaaaaccaggaanngtaaatatttccatcatgatcgattagactgggatgaacacagttctgctggcagatatgtttcacggcgctgtaaacctctgaaggaatttatgctctctcaggatgctgaacatgagcttctctttgacctcatcgagaaaatgttggagtatgatccagctaaaaggattactctcaannnagccttaaagcatcctttcttttaccccctaaaaaaagctacatagatttgtaagtgtatagttctcttgaagagattttacagactgtatcagtctaattttaaataatttattttgtatagcttttgtaaatttcttacatttttgtattgccatgtttattttgcttggataatttgattcattaaatagctaannnaatgaacattttttcaagt

SEQ ID NO: 1691 - DNA, 589 bp, Canis familiaris
  misc_feature (1)..(589): n = a or c or g or t
tnctnntacagcatcntgngagggactagtcagagccgattcagnntgcaaggagccatcctggtgtacaacgatatcatgttggggcccccctggccagagcagtcccattcttatgagctattgatccgtgtggccgattcaggtccctctatcccccatctcagcaccacagccaccatcattgtgcatgtcgtaccctggaatgccagcacagcatccacccgcatccacagagtcacagtgccttcgatgatgacacccctgcttgtgacagacacggaggttttctggcagccagaaccctggttggcccagatgctacagacaccaaacaaaccagcccacgagctgctactaaacagtatccagggaactgaggagtccattgaggggttcatagaggcaccaaggatggagatgccccaagcacccagcagtgtcatgagcctggagcactttgatggcagagcacaggacccccgtacaggcagagattacctgttcaacacgctcacgggagcccggcgctggctctgaggccgagaagctgcttcactgtgtgtggaatttcttcttcccatgatca

SEQ ID NO: 1692 - DNA, 612 bp, Canis familiaris
  misc_feature (1)..(612): n = a or c or g or t
agttagnctggggtngngactgggatcagatcatgatgnnnnnnnaggctaaagagcttgctggnnagatgtgagcttttnnnngnnaagtttcatgattgtgcctataatgaatataatgnntcttttgtttatactgacacatactcaaatctaaaacccatccttcccactaccagcttcctgggtcccttgtttcttcagggcttagatttcccccatgttaggatgcctggggcagcaattgagctaaacctggggtccccttgctggggagcagatgagctctatttgggacctccagccctaggatgggtgcctccatcaagcaatgcattcctggtccccaagaacttgggacctctgtccatatctgtggttgtcaccatctcaggctttgtctcttccttcaccctgggggagaggcagtgttcacctcttgggcctgatccactaggaagccctacgtgtgcctccctattgagtggcccagcagtctctccatttggctcccttccaatttcttctcccattctgtcctaatagaagtgctaacattcctgcccagtagccagagtagcctgctaaaattcccttgtaggtaggggctcc

SEQ ID NO: 1693 - DNA, 563 bp, Canis familiaris
  misc_feature (1)..(563): n = a or c or g or t
agtcgagaaggggccatgccgggcgcggcgctgggttgccacacttggnagcgccaccgggagctgggcgctggggaaggcggggcacgcggcctcctaccgccctgccctgccgttgggctggtggaggcctcagcgttgctaggattgcatcagttttcctgtttgcactacttctttctgtaacagtggccctgtcttaaagtatttccaatctcctccttgctctgaaacttcgtcgattccattgtgataagcgcacaaaccgcactgtctgtcggtaaccggtactacgagattaatgattttctgttacactgtatagttgtcctgtggcacccctataccccagccctttcacgccctccccgcccccaccccagtatgtgggagctggcaccgtgccagcttgtgcaaagcttgccactcagccagtgaaaataataatgttattctgagaaagtggacttatccgaaatggaaccaactgacattctatccgtggtgtacatagaatgatgaagggttccactgttgtcatatgnnnnaaatttatttaaaac

SEQ ID NO: 1694 - DNA, 667 bp, Canis familiaris
  misc_feature (1)..(667): n = a or c or g or t
ctcanggtnacaattactttactggaaagaaaactattgaaacggtcaangcagctgagaggatcatggaggctgttgagctataccgagaggagactgcgaaaaggaaggaacacaaagctatttgtaaagctgcagggaaagaggttcctcttcccattaatcccatcctgatggcttatggcaatatctctccttcagcttatgtgttggagatttttaaaggaatcaagtcaagcgagctagaagaatctctgcttgtgctgcctttttcgtatgtcccagacctccttaagctccttaatgaattcatccagctgggctctgatatcgaacttctgtgtaggtgcctcttctttctgctcagaattcacttcgggcagatcactagtaaccaaatgcttgtgccagtgattgaaaagctaaaggaaacaactatttcaaaagtcagccaagtccgggatgttattggcttcaacagggcaggtcttgaatatctcaagagggaatgcgaggcaaaaagtgaagttatgttttttgctgatgcaaccagccacttcgaagaaaagaagaggaagaggaaaaagagggagaagctaattttaacatatacttagaactgaaatgtgcccccccccctttttttttatttaaaagaacttctaaa

SEQ ID NO: 1695 - DNA, 654 bp, Canis familiaris
  misc_feature (1)..(654): n = a or c or g or t
ctcatgaaaatctgttttttacgaagcccttacatcaagtttttacttcattngcaagaaaaggagagaagttggatgtgacccaggtctaggatactattttcattgggaacacgtcaaaagtaaaaggatatattgcactttctgctctcatgactaaggtggcaggggttccagaagaacctttcaagattatcaggaacatcagcatgagggccaggtcacctaacctggaccatatggagacaagcaggtctccagcttgaaaaggctgcttccaggtgagcgctggggagcagaacacttgcctactcagccgccaagtcctcttctgaagtacagctttcccacctctgctcccagcctggaagcaaaggctgctttgttccaccccggacacatttcctactcacagtggccatggcctctctgggggaaggagggctggtcagacccagggctccggaaggattgttccagtactacgcctaagacccctactctctgaggaagctgcaggcacactgaggaatagtatggccatcctcagagctcacgtatccatgaacaaatgaaggcttgaggagatttttaaacctaaagtctatgtgagagtgcacttcaacaatttgggaatgttgggacttggtcatt

SEQ ID NO: 1696 - DNA, 489 bp, Canis familiaris
  misc_feature (1)..(489): n = a or c or g or t
acnnnagccccgcccctgtgnnnnnnnncaggccncagnntgcagccgtgtannagctcgggatagtgttgatttttttttttttgctaacttttgtgaaggcctccctccactgtccccaatgaggatacctgccgtgaccatgtccacccctcctggcagggctatcctggggcttgctcttggaaatgaagtctgtcttacgtactgaatggtccccctccacccccgccacccccgacctccccgctagggatagctgggatgtttgtgcatctttggctgggctactttctaatgcttttctggatctcgtaccagttctgtcctcatcgttcagggattgagtgctaccttcacttacttgctgacgtgtacatgctagtatggtgtatactggtgggtgtttgttgatgatgttatgagtttttgtttttttacaattttctctgtagaatagaggaagaagaatgcttgtgttttcatgaa

SEQ ID NO: 1697 - DNA, 472 bp, Canis familiaris
  misc_feature (1)..(472): n = a or c or g or t
gcaaggatcaaactgtnnnggctgccacaggacagaggcccaggatgccccatgcgatcacaacctcctcaggacctccgctcacatcctccagnnnaagattgcccccgttcactgggtatcttnnntnatctagctctgaagtcagtntnntagacaataacagcagctggaaacctttaatatagctagatctccagaggagcacactttctaacctggagcccagcagcttacagctataggcccagagccttgagcaggagaaactcttctttaagggccccacaatgttcctgagtgacctgtaaggacttgtaagagtagttttgctcaccttcctctccaaggccctgtttctcttgatctagctggtanntgccctctctactgaggcttgtcactgcctgcctaaccctgtccatcaactgcaataaaatgttttaaccccccctgaaaaaaaaaaaaaaag

SEQ ID NO: 1698 - DNA, 483 bp, Canis familiaris
gcttctacagcctccgccgcgtgtacgtggtaaacaaggagatctgtgtccgcacagtctgtgctcacgaggagctcctccgagctgacctgtgtcgggacaagttctccaaatgtggcgtgatggccagcagcggcctgtgccagtctgtggcggcctcctgtgccaggagctgcgggggctgctagggcggagctggcaccccaagccctgggcctttctcggatccggggccctcaggccctgcctgacctggtgcttttctccccggcctgacattccttttattccgtaagaagttagtggactatggccccgggggggttggtctcgggcccctctcccagcctgtggccacccggggacccaaggggggctctcctccactgcccagggctcaccccctgatgaggggcatccgggcctctgatgtgccttctctgtccccctgcccccagcccctccaggtaggctgtgcccctc

SEQ ID NO: 1699 - DNA, 586 bp, Canis familiaris
  misc_feature (1)..(586): n = a or c or g or t
ccacacaatggtnntgtccccagannatgaggatgatgtgcttctgttgccactgnnnnngnngggggnnngggtggttgaagcggaggacgagccactgcttgcctgaggtgacccagctcccttgggggctctggtcgtggtgacagcaacccttcagagggcagctcagcttcccttccacttcttccttccctgagcctccatctgagcctcctattgaccctgtgtggctgctgtaacattaggtatccctccggcagggaatgggctcccacagagctccctctgcataggccctgagaccatagtctttgtcaccactgtttccctgcaccaccaccactcaggtggctatttttaaaaagtaaatttcatgaagggtcataggcctggacactccatcctttccaaaccactgcccgaaagtggcctttaagcaccagaatgttgattgagtggagacctccagcccccaggggaaggatttgggcagagcctgagattttgcctactgtcgtctttcctacggggcctggctcataaaaagagcacagaaaatgcttttgtcccatagctaggtcat

SEQ ID NO: 1700 - DNA, 564 bp, Canis familiaris
  misc_feature (1)..(564): n = a or c or g or t
gtaggnnagaagcagggctgtcgggcaggggccagganntcaggcccagccccaaccccagcctggggtggggtcgtccccacctgtctcttatgccttatgggaaggcccagccataactcgggggccatgctggagcaggaaccagctcaggcctcctccataggaaccgggtgactgggggggtgacgcctgcacccccagctctttgcactctctggtgtgtggtttgacactctttgcttttctttctcggtggccctgtggtcatcgtctcagggggcccagttgggggagccccacctgtcccccactcctcgtgggggcttcactatacccacctgcccccttttgccgtcaggcctcctgagggactgtgggggctgtaactgccagcccagaggtaacggcagacctagggccccagctgggagctccagggcccctggccaagggaggtccctcattggaatcctcggggcgtctccttgggcccctggcttctgcctcctgtgggtggcccccctctgcccatccgtctgtctgtgggcggagtggggtctg

SEQ ID NO: 1701 - DNA, 248 bp, Canis familiaris
cccaaccccagagagctgaccaccccctctcctagtctcacccctggagggagagtctggccctgggccaggagctaaggagaaatggggtggtagcaataaacactgtatgtgcacaaggggtggggggtgtgcggggattgctagacatgccagggtggagagggaactgttttgtaaaatgttcagggggctgcccaggaggagcccccaatctgactatcatggacaagagatttgatggacaa

SEQ ID NO: 1702 - DNA, 541 bp, Canis familiaris
  misc_feature (1)..(541): n = a or c or g or t
gtttgccctgtcggcacactccatcttcgagggcctggccctgggnctgcaggaggatggagagaaggtagtgagcctgttcgtgggggtggccatccacgagacactggtggctgtggccctgggcatcagcatggccaggagcgccatggccctgagggacgcggccaagctggccgtcaccgtcagcgccatgatccccctgggcatcagcatcggcctgggcatcgagagcgcccagggtgtgcccagcagcgtggcctccgtgctgctgcagggcctggcgggcggcacgttcctcttcgtcaccttcttcgagatcctcgcgaaggagctggaggagaagagcgaccgtctgctcaaagtcctctttctggtgctgggttatgccgtcctggccggcatggtcttcctcaagtggtgaggtgcccatcgcccgcccactnnacccaggcgaccccccaatcccctcccccgaagcgggggagctcaggcnntggtnncgcctgtgcacagaggggccgcgccccagatccgacac

SEQ ID NO: 1703 - DNA, 646 bp, Canis familiaris
  misc_feature (1)..(646): n = a or c or g or t
agatcgatgataacgtgatgannnagttccatggctacaactcnntgaaggaatattacgannannaaagctgcatgcgatacctgcacaggatttatgtgcctctcatgctggttaacgcagctgatgatccattggtgcacgagagcctcttaaccattcccaaatctctttcagagaaacgggagaacgtcatgtttgtgctgcctctgcacgggggccacctgggcttctttgagggttccgtgctgttccccgagcccctgacgtggatggataagctggtggtggagtacgccaacgccatttgccagtgggagcgcaacaagtcacagtgctctgacacagagcaggtggaggccgacccagagtgaggcctcccagactccggcgcggtccagcggcctcccctggaatccgcgtccctcaccggctgtttcaggtcccccatctccctcagtgacctggatctgacctcacaccatctacggggaccacccaccaggcatacccatgctggagtaggctgctgtccctgggagctccaggctatttttgtgcttagttactggtttttgccattgcattgttatccacggtgacaagtgacaggatcctcaccctcctgtccactttcagcatttga

SEQ ID NO: 1704 - DNA, 664 bp, Canis familiaris
  misc_feature (1)..(664): n = a or c or g or t
gaaaaaggtgttttcaagctnnnagttaccattnntgagaggtacccctttgaacctcctcagatccgatttctgactcccatctatcatccaaacattgattctgccgggaggatttgtctggatgttctcaaattgccaccaaagggtgcctggagaccatctctcaacattgcaactgtgttgacttctattcagctgctcatgtcggaacccaaccctgatgacccgctcatggcagacatatcctccgaatttaaatacaataagccagtcttcctcaagaatgccaggcagtggacagagaagcatgcaagacagaaacaggaggctgatgaggaagagatgcctgatgatctaccggaggctggtgactcgggagtatgcaacacagcacagaaaaggaaagccaggcccctgggaagcatagaaaagaaattttgccctgatgcttaggggcttgtcctggtcatagttaatatattctttgttaagatggtctaagttgcctatctttcttgaatatttttctttgtatttgatgacattatcacttttcatatcctatgaaacagaccttgtgtacttatgtattctgttctacattgattctctggagggtagtttgttttatttagcttgtacatacgtattttganacctt

SEQ ID NO: 1705 - DNA, 577 bp, Canis familiaris
  misc_feature (1)..(577): n = a or c or g or t
tatagtcagtagtanncagtcatcaagacagtgtgatnnnngcataaggatcnnnaacaaatcaatcagtnnaatataagagagagcctattaacaaatccacatttatatgattacttgatttttgacaaaagtcacaaagcaatccaacagagaaagaaagtcttttcaataaatgaggccagaacagctaaccctcatgtggaataaaaatgaaccaagactcccttcctcacaaaaatgaatttgagatcggtcatagaccttcatttaattgctaaagtacaaaggtttttagaggaaactgtaggtgaatatctttgtgacttcaagatagctaaagtttcttaggtcacagcaacaaccataaaagatccaaaatctgtttataaaaattaattgtcattgaaagatgcttttaacaagaataaccagtatcaaatgacattaaagaataggtttataannnnnnngttaatagatataaggatattttcttattnannnaattctttgataaattccataccttaagaatggtttattttatctgcttctttgatgattgtaaatgcat

SEQ ID NO: 1706 - DNA, 607 bp, Canis familiaris
  misc_feature (1)..(607): n = a or c or g or t
acagtcatgaatgagnctgaagatctgttcagcctcattgaaacgcatgaagcaaaaccattgaaactttatgtgtacaatacagacactgataactgtcgagaagtgattattacaccaaattctgcatggggtnnagaaggcagcctaggatgtggcattgggtatggttacttgcatcgaataccaacacgcccatttgaagaagggaagaaaatttctcttcccggacagatgactggtacacctattgctcctcttaaagatgggtttacagaggtccagctgtcctcagtcaatcccccatctttgtcaccaccaggaactacagaaattgaacagggtctgtctggactttctattagttcagctccaccagctgtcagtaatgttctcagtacaggtgtaccaacagtaccattattgccaccacaagtaaaccagtccctcgcttctgtgccaccaatgaacccagctactacattaccaggtctgatgcctttaccaacaggactacctaacctacctgccctccccaacctcaaccttcccacaccgcacgtcatgccaggcgtcagcttaccnnnactcgtgaacccgggtatgt

SEQ ID NO: 1707 - DNA, 601 bp, Canis familiaris
aggtttactaatagcagtaggatagaattgtatgaggttacctacaactacttaatgttcttacactgtaagcattgttactttaccaagataaatgtaattttattatagcttatttttcttttggaaacatgccttacattaaacactatactttttgcgttgtccagacttcttatattataaggagatgtttcttcttctgtcttttagactgaatagtagagtattgccaaaataatgggacctctgacttgaatggatagaaatgaataagctggttttggttttcaaaatggaagtaatctagatttgttctcctcacaataaatggttttaaatcagttttaactagtgagaactgtttgtttgcaggggggaagaaaaggaaggtggtttcctgttggtttgtatgtattaaatgtgtaaagtaacaaccaaatttattagaattattcctttagcatttatgattttcaactcttattatatttctttgtgtgaaattttaatcaaaagtggttgagatgttctttgaaagaacatctaaaaggtttataaatgtttgaattatcacacaaaggctgatttctaaaaataa

SEQ ID NO: 1708 - DNA, 539 bp, Canis familiaris
  misc_feature (1)..(539): n = a or c or g or t
ggtggaggtggcggtggtggtgtnnnaaagtcttcaggtccctggaataaaacagctccagtacaagnacctcctgctgcagtaattgttacagaaaccccagaaccggcaatgactagtggtgtgtataggcctcctggagccaggttaaccacaacaaggaaaacaccacaaggaccaccagaaatctacagtgatacacagttcccatccctgcagtccactgccaagcatgtagaaagccggaaatactgagccttcgtaagggctgactacctcaggtttgctgcactcgttgcggacttcatgtggatcacaacttctggacacgaaggttacagctagtaagtgtcggtgtgaagcttgaaaccagctctactggattcctatcagaaatcctgcagaaagtcagccatctgggttctgatctgctgtaaaagatgaagatttaagtgaccttaattaacctgtcctgtgccccacccttaaggaatactctgtagtgggctgtgttagacttcctggaacatgccgctctc

SEQ ID NO: 1709 - DNA, 556 bp, Canis familiaris
  misc_feature (1)..(556): n = a or c or g or t
catgtatttatcnnngtcnnngntccaggactgcagagcaagtttttganaccggnctgataacttaaaacactatttttttcttaagtaggctccctgcccagtatggagcccactgtggggcttgagctcacaaccctgaaattgagacctgagctgagatcgagttggccaccaaccacctgagccacccaggcaccaccccccttacaacacagttgaccctcatccaggccagtgggctgtttcaagggagacatttatggaaagagggtcatgatttctgacaacatggtcttcctttcctgcatttcaaatgtactcattatttaaagcaattggttccaagcaacttctgtgaaaaacccgaccaggcttccctccctcacccaagcacttgtttataatattccctttggggaaagctaataatgccgatggcttccctgacactgttgatgaggctccggggacatgaaggagggagggaatcaagcaaggccttgcctggtaagttgtcctgtgcttagtggtgactttgttctttggggctttt

SEQ ID NO: 1710 - DNA, 532 bp, Canis familiaris
  misc_feature (1)..(532): n = a or c or g or t
catcaccacnnnnggcgctgcagacacggnnngcggtcaggtctggcagtgccaccgtgcgctgttcatggaaacaggtgtgtccacacacgcatgggggacaggtcggcagacttgccttgtgaggtgcttgcctgggttcctcgccagtctcaagggcttcgaccctcaggaggaagggagagctgccctgaaggcttttgcgctgccgctcatttgggccctgctgatttcttcgtcgtacaaagaattacgtctcaacagacccagttggtgtgtcccccatctttgttctggtcaaagtctgggaatgttggaacagcatccgggggatgttgtgggaaggctgggagcgggcactcaaggaaggcccgggagtggccagccacagacgcccctgctcacaaagacgaggatgtcagactgagaaacggcacctgtctttcctcgcaagggactcttgctgtgttgacaacacgtcccatcccatggcccctgatgtatgcatgttagactcatcgcgtggctactt

SEQ ID NO: 1711 - DNA, 566 bp, Canis familiaris
  misc_feature (1)..(566): n = a or c or g or t
ttcaacaaaatcagtnnaagaagaaaatgttggatgatattccagaaaaaagcactctccagnnaagctcattataccagttaaagcttaaggaaaaagataattctttaagaattatatctgcagttattgaaagcatgaagtactggcgtgaacatgcacagaaaactgtacttctttttgaaatattggctgttctcgattcagccgttacacctggtccatattattcgaagaatttccttatgcgagatgggaaaaatactctgtcttgtgtattttatgaaatagatcgcgaacttccaagactgattagaggccgagttcataggtgtgttggaaactatgaccagaaaaagaatattttcaaatgtgtttctgtcagaccagcgtctgtttctgaacaaaaatctttccaagcatttgttaaaattgtggatgctgagatgaagtgctatataatgaatgaaatttaaatagtgatgaaggaagtttaaatagtataatttaaagcattttcctcttattgtttaaatgatcatctccatggttgtagctactgaggt

SEQ ID NO: 1712 - DNA, 361 bp, Canis familiaris
  misc_feature (1)..(361): n = a or c or g or t
accncnaggtatttatgtcattttcctcccnnnctttagttttgccttgtccctaatatttttaacttacttattcatactcctacgcatcaaatatttagtgcccacagtgggaaattttagctgcctcgtgcttggatttagtggaatctaatattttcttctgaaattaatccatgnnnnnnnnnatatcacccataaaaagagcagaatagcagtagctgctcctacagtgttgcttactttccatgtcttccaaaagaacaggatttcgagtttctcctttatgtagaagagtagctcagggcattaatacttggaattaaatattcatagatttaagatgcctgtannnacctgg

SEQ ID NO: 1713 - DNA, 571 bp, Canis familiaris
  misc_feature (1)..(571): n = a or c or g or t
tttcaactgttatagaaatcatagacaagcaagtgcacatgaaaaacatcaaaatattatncagctgaatagtgactgctgcactttcactaagatgtatttgaacacttggtgagtagggggtttatgttgtgggtttttttttttattgttgttgttgttttttatttttgtggaagcacttgctatttagaactgccaaagtatatgttcagcagtgtgcccaggcttaaaggtgtaaatgggacaaaataaattgtgaaaggaagtgtagttgactgaaaactacagttgtaataagtcttccactttttataggatttttgagcacacaattatgcaaatattttaatgtttattaatgtttacagtggaattgtgaataagttttcagtggactatcttatcccttgacaaaaatattttgtcttttttctatgtaatttcagagtttttattttgttacaaaaagacaaaaatgaaatatataacaacaatgaagttatttaacaagatttctaaagctgaaaattttgtgtaaaataaggtattatcttgcaacttgttaaat

SEQ ID NO: 1714 - DNA, 525 bp, Canis familiaris
  misc_feature (1)..(525): n = a or c or g or t
agaaggaaaatanngtagcttttgatgaaatgattgagccatacagacttcatgaagatgacaaagaacaagatattgcagataaaatgaaagaagatgaaccatggcgaataacagacaatgagcttgaactttataagaccaagacctatcgacagatccggttaaatgaattattaaaggaacattcaagtacagctaatatcattgtcatgagtctcccagttgcacggaaaggtgctgtgtctagtgctctctatatggcatggttagaagcactatcaaaggacctaccaccaattctcttagtccgtgggaatcatcagagcgtccttaccttctattcttaaatgcccaagtacagtggataagccctccagatggtacttgagtgcctggtgaagtaactgaaatcttcaatgacacattaacatcacaatggcgaactgtgacttttctttcactgtttcattaatttgaaagcacagaaggaagttgctccactgacatgtgtatggagacttc

SEQ ID NO: 1715 - DNA, 404 bp, Canis familiaris
  misc_feature (1)..(404): n = a or c or g or t
gaagacgnnnnnngccaacctgagtctgtccagtcaggtacctgatgtgatggtggtaggagagccaactctgatgggaggtgagtttggggacgaggacgaaaggctaatcactagattagaaaacacgcagtatgacgcggccaacggcgtggatgacgaggaagacttcaacagcccccccgccctggggaacagcagcccttggagcagtaaaccccccgccgctcaggagaccaaatcagaaagcgccccgccccaggctccccagtgagactgacccgcacccgcacccggacccgcacccgcacccgcacccgcaccccgtgggccgtgggccgtgggccgtgggccgtgggctgcacccacgcttgcagatccnnnnttacaggagaggaaggagg

SEQ ID NO: 1716 - DNA, 474 bp, Canis familiaris
  misc_feature (1)..(474): n = a or c or g or t
ctggtnnagagtgagctgcagcggctccgcaggtgaggnnccagccnngcgggcgcccctggagagcggggagtagccccaaggccctggcactgggaggagctgacaaagccacagccgaggaccagacaagcagacaatcagcggacagtcggctccagatggacacaacccccactgggtcccccctcaaccaggccacagcctccctggcaggggggactcgggatagaaacaccagccagcttgtgccccttgcccaggcctggctgggtgggccctggacagtcccgtttgcacagcctggggtgtcgggcccctggtctgccctggaggtgggggggcagctaggaccaagccccaagggcccctgcaagcactttatttcctgtccctccccagccttaacccagaagcccacccacaccccaaagaagccgctgaggtcagccagagcccagctggctccccagg

SEQ ID NO: 1717 - DNA, 338 bp, Canis familiaris
  misc_feature (1)..(338): n = a or c or g or t
ggcaggggcccctgtggtggtcnnnggtcctgcttactgtgcannngggccagctgcannnctggcatgttgcacagtggacacaccttccgaacctccagccacttaataaggcacctgcagggcaannnaacacaggaggaagatgtgaggcccatacttatggtgccccctgcccacatgcctcatgggttgaacacctctgtcccttanngctgggggccatgtgaacacccaggtcccaagcagctccaccaacaggcagaccagagcccctagnnnnnnaaaaggtgatncnaagaaaccgcagtcagtgtgcaatatcctcaaattatcca

SEQ ID NO: 1718 - DNA, 490 bp, Canis familiaris
  misc_feature (1)..(490): n = a or c or g or t
gcccctgcccaggggaaagagggcgctgggaagatggctggtgaggagcaagacagannagnntcaagattgcaaaaatcccacccctacccccaccagccagccgcgcagaatcctactccagccgaaagcatccctggcgctgcgtcccactggacagaggcggccggctgaggagcctggggtcaggcccagctcttgagcagaacacattgggctttagctgtgtttctcatttgttgttggtgtgtggggtgggggctggggtagggaggggagagcgatacttggattttggtttgttccctattagaaaccacagttttgtttttattttcatttggagctaagaggactaatttgataattttcgatctcttctcccttatccagattttaaaagcccttcttcttcttccctccccccccccctttttttttcgtaggcnnntgtagtaataatagaaagatttaatttgggcaactttga

SEQ ID NO: 1719 - DNA, 545 bp, Canis familiaris
  misc_feature (1)..(545): n = a or c or g or t
agacaagtggggccagaggtgatgagaagaaagatagtttcnnnanctcagcctgcannaggcacccaggcttctgaagataaaagaagggtcttaagtgtcccagtgagtagatgaagagatactaattttatttgaattataaaggaaaaggaatctcagcaggcctgcactcttgggccatctcagctgacatttgtgtttttattgagaacgataatatggaccttctgattcagaggcagcgcatcttgtcggaagtccccgtctgattgaatatcattggcagctggccaaagaatagcctggataacagaggggttgccttattccttgtcacatgtacttaaggatttaactattcaatttctctttaatcatgatgcatgatcttggatcctttacaatccctcagggcaaaggaaactaattctacacatatcatgaataatatggcatctctgaataagatgtcagaatgaaccctttaacagtcaagcgatttctaagttgaatatcctgaagtctgacaattatttgttgaa

SEQ ID NO: 1720 - DNA, 719 bp, Canis familiaris
  misc_feature (1)..(719): n = a or c or g or t
tttgcaatannagacttcattccatctgactactcttaaattttcagnnagagcatagatactgtaaaatccaaatacacacattaaatcttgttttcctgaaagtatgacatctaaaatacttgtagaaaaaccttgtcatgaactgatttgaatgtttgtattttcttttgcctttgactttgatactggcttgtaatgtctcttttcatcatttgtaatattagtgggacattcaactctacctaaatcataagaatttttcaacaataagttgtctgaagccattaaatgaacttggttggatttggctgggtgtgaccgttgttggaccttaaatcaaaggacttctaataagtatcttccaaaagcaaatgctagaatcctattcaagtgcatatgtacattgtcacagagcaaagtaaactaattggctgctatattttatataatcatttctgcaaaagcccagttttggatactaatatttgacatggttaaatcttattaatttgttggaattgtttattgttaataatgcaaatagataatttttaattatccttaagtaacatttcactattaatggtttgaaatgggtggtaagcaaaccaatttgaaataaaatatgaacatgtgccattgtattataacactatacactttcttgacagttaaatttttttaaaatgtttttttgtagcatgtattgtatatgt

SEQ ID NO: 1721 - DNA, 608 bp, Canis familiaris
  misc_feature (1)..(608): n = a or c or g or t
agtatttctttgaaaatgaaaatgtatgtatgatcttcaatgctggagagctaactctagtggagtatgggagtaatgataccctgggttctgtacgtactgagttcatgaacccccacctcatcagcgtccgcattaatgagaggcgtcagcgaggaatggaagacaataagaaattggcttatcttgttgatattaaaactattgctatagtggatctgattggtggctacaacattggcaccatcagccacgacagccgtgtggattggctggaacttaatgaaactgggcacaagcttctcttcagggaccggaaacttcgtttacatctatacgatattgaaagctgcttctccctctgcttgtgtctctgcctgtgtctctgcctctctctctctctctctctctctctctgactatcataaataaataaattttaaaaaataaaataaaataaaattttactacctggagtgtctgggtgactcagtgagttaagtgtcagactcttggttttggctcaagtcatgatctcaggtttgtgagctcaagccccgcatcaggctctgggctgggtatggagcctgcttagattttnnnnnncc

SEQ ID NO: 1722 - DNA, 582 bp, Canis familiaris
  misc_feature (1)..(582): n = a or c or g or t
agcatcagtaatatcaccccaacagacacaggatcntactattgcatgaagttccagaaaggaaactccatgtagagttcaagtctggaccaggcacctaggccaccatgagtatgaatatggcatgacatccttcttcccctggttatgacaagtcaataagaatgccctccattgtctaagcaacagctaagaatcaggtgttgtagtgggtgcccctgatttcagccccttccacatatcagagaatttgaagcctagaggtgttatgctatttgctcaaggtgccccactgggaaaacagtgggaaactctagaatccccagtctgagggctccgcagctcttaccttttccaatcctgaccagccctctggttccagggatgagggaatgaaagtctgagtgactaacccagtcacaagatctgacctcaaccctggctccagagagcactccctcaatgtattactgctctctttactcagcacttattgagcacctgctgtatacaggctctgctctgggtgctggggaagcagcagggaacaaaataggcaagagcttctctctcatgaagctt

SEQ ID NO: 1723 - DNA, 633 bp, Canis familiaris
  misc_feature (1)..(633): n = a or c or g or t
caggtgacatatgttcattctttgatcctgtctacttgcccatccatttattcaacagagannagctaaatgaataaatgatgcccaggagacccccggtggcgccgggcacctccctgccactctgagaccagcgtctgtcctgggcctcacctctgctctcaggccctctcctaggtggatgcccagatgcacagaggggctatggctgccatctcaccccaggccctgatttcactcctagcctctgggtgaaggcccctagtgggatgatggcagtggggaggaggagggacatctttctgcctctactacctttatgccagaggagtgtgcctggtttgatgggccagagggtgtggggggcctgaggacatctctgggctcttcctgggaggagggcccctgggaatggtggtcttaggcctactgggctcaggtcacttagtgggcttggcaggagacaggtaaatccatcacctgactagaggccccacacccagcattccccccagaatgtagccaaagaggttatggccctcctcttgctacccaaaccaaaatgttcctttagtcctcagtgttttatattctttatgtgttatcgattttaaccaggggcttttaaaggaa

SEQ ID NO: 1724 - DNA, 562 bp, Canis familiaris
  misc_feature (1)..(562): n = a or c or g or t
gtgtacatgtggaatacaccccagtgagaaattcctatggagaaagactcatcatcagcaataannttcatctttgtanntgtgaacactttcattaatgtgaataatatnctcaaaggctttctaaaatcggaatcatccgatacagctttctaccttaaagnnnnnaattgtaaagttgttaaataaatgtgtagattatgcaaaacatacttaaaatataaattgaatttggcaaggcaagggaagacaaacttgaaaatacaggtgttgaatacaatttgatctacatagttccaaaactcgccagtttcttaaaaatcattgttaaggctgatacaagaagtacatttctagttttatagattctaatttaatggttaaattactatgcattatgcaggttataaaactgttcttatttattttatatacttttctcattcagaatacttttcattacttttcgttgtgttggaaatatagcatcatgcatctgtttcagtgccttatttttaaaagcaatcttttgctaatggttgaagaactnnnnnntaagaat

SEQ ID NO: 1725 - DNA, 676 bp, Canis familiaris
  misc_feature (1)..(676): n = a or c or g or t
acnaaattggaacatgcttaaaatgctcntgtnnattttnnngacctgaaattgttcaggtacataaattggtcacttttaaaaacctgtgggataaactngcactgcacacagaaattttattcttgtataatatttagatttgtatgcttattatttgtgcatttgtaaatactgtttttttagaatggatcagttaagtcttaaaatgttaaagcttattgagcttgttgccagtaggttcaagaaaatcatgacctcacatgcctgacatttatcatgcctttcattaaaaactgccctcaagaacagttaacgtttgccttaactctctgcatcgtttaaaaagccagtggttatgtgtgcttttacagtaatcatgcagatgactaatcagttgataaaaatatttccaggtggtagagttaacaagcacaaatctcccacctggtgtaatctcttaaaaatttatagacaccagtctttcaacatttcagggttaatctaacctatgcagattttgcttcaatttattatggaattgctaagtgaaataacttgtcagaaattatgtacaactctcaataccttaaaagtggatcatttgcactgtctcagagtatatatttttgcaacttaacacttggtactttcaacacgtattgccgcaacaaag

SEQ ID NO: 1726 - DNA, 262 bp, Canis familiaris
  misc_feature (1)..(262): n = a or c or g or t
tgtnntggatattcttgaaagtttatatttttataatttttttttacatcggntatttctttgcagtggcttaatgtttgaaattattttatggctttttttgtaaatattgaaatgtagcaataatgncttttgaatattccnaagcccatgagtccttgaaaatattttttatatnnnnagnaactttatgtgtaaataagtaagcggtgcaagtttaaaggatgttggtattccatgtgttttttttttttttcttcct

SEQ ID NO: 1727 - DNA, 623 bp, Canis familiaris
  misc_feature (1)..(623): n = a or c or g or t
attactattattgnnancatataattnnngtactagatcttccttgctctgtaaanctaantatttttataccagttctgcctgggaagttggattatatcctgcagaacagacttgagtagtacaattgcaggcctaccctgaaaataaatagtgcctatatagggaagaaatgatcatagcacacagaaggcatgaattttaagggtgcttagctgttcatggaaagcaaggaagttctcttcgctctctcctcatctctggttgatagcttaaaatttttttttataataaaagcttcatttcttttggtttaaggtgattttatataaaaatcaattcccgtgccatcatatgactgtgatagatttagattagttttttaaaaattacatttattaatcccctctatgtgttatgaaccagaggtattgcactatgccctggatatatctgaataaatgaactggtatccaagttcttgagaaattctctaatggtggtttcaaacactaggcactaactatctcatataaaatgtcataattctttaccagagggaaaggtctcaaaaataatattataagacttaatataaaaataggttctcagtaaatattttt

SEQ ID NO: 1728 - DNA, 577 bp, Canis familiaris
  misc_feature (1)..(577): n = a or c or g or t
tgtgtgttgccctgagatggnnntcttcttccctaatcccattccatcccgttgtcctgggccccctgagctccacttgctccgtgagaagtagcttannggnnannnnnnaatgacccaccatcctgnctgctgaggatccagggttagggtctctggtgcttntaatctcctnnnaacttggagtgcacagcacnnnngcccacgcagccttgcacacccaaaaccagggacacgggatgacctggctgggaacgagggctccatttccattttcaaagagccactttcccatcaggacactgacagcagagcagctcttggtgcccagccacacctctacgacagaagagggccataaggcagcctggactcttgcctcacctgcgttaacctgtatgtaccgtgtaccataaacgtatctgtgtatggccacgtcgcacgcagataggaactctgcgacgtcgagatgttgcttcttaacattttgttgttggcgactgtagagttgttttgaatgcgtataaactaaactagantcctttgggtagttcctgaangagccaggtgggcacac

SEQ ID NO: 1729 - DNA, 624 bp, Canis familiaris
  misc_feature (1)..(624): n = a or c or g or t
agaagaagnntanaaagaaatcatgnctgctgctttagacttacagtaagcagcagctctgagccagattacaggaatgaagaactgttgcctaattgggaagtgccagcattccagacttcaaaaattaaatctgaagaggcttctcctgttttatatattatgtgaagaatttaaatcttatattggtttgcacaaattccctggagaaaaaaaattgctctgtgtatatctcttggaaaataagacaatagtatttctcctttgcaatagcagttataacagatgtgaaaataaatatacttgactctaatatgattatacaaaagagcatggatgcatttcaaatgttagatattgctactataatcaaatgatttcatattgacctttttatcatgattcctccctgtcaagcactaaaagttgaaccattatactttatatctgtaatgatatagattatgaaatttctcctcaaactcattgcagcagataactttttgagtcattgacttcattttatatttaaaattatgaaatatcattctgtcattatattctaattaaaattgtgcataatgctttggaaaaatgggtcttttataggaaaaaaactgggat

SEQ ID NO: 1730 - DNA, 453 bp, Canis familiaris
  misc_feature (1)..(453): n = a or c or g or t
gatctcaactcaggtattgannncagggttgtgagttcaagcnntgagttgggctnnannntgtncntggagccnnntttatttttatttttattttttggagccnnntttaaaaaaaaaaaaaaagacccccttattggtaaactgtatggaccaggaagactacggcagcnnnaaatgccctttggaaaatatggactttggacctacttaagcactgtgtattttgtttgtatttttttaagtaggctccatgcccaacatggtgcttgaaatcacaaccctgagatcaagagttgcatgctctactgattgagccagccagatgcctcaagtactgtgtttcttattactaagattcctgaaagctacactcatggctgtttcaagagatgttgcttcttggaaagccnnnagtttctaagccagcgtggcatctgcacccaccnnnat

SEQ ID NO: 1731 - DNA, 509 bp, Canis familiaris
  misc_feature (1)..(509): n = a or c or g or t
gatggcaaacctattcnntantngcnnnnnnnncnncatnnnnnnnnnatcnnntatnnntgtgagatttgtnnnaannacacgtaccgaggtcccaaggccttccnnnngcactttgctgagtggcgtcatgccnnnggcatgaggtgtnnnggcatcccaaacactgcccacttcgctaatgtgacacagatcgaagatgctgtctccttgtgggccaagctgaaactgcagaaggcatcagngcgatggcagcctgacaccgaggaagaatatgaagactccagcgggaacgtggtgaataagaagacctatgaggacctgaagagacaagnnntgctctagtgttcagggatgtagctcagcttctgggcttgcccaggcttacctgnagtctccttnnnctatttctcccaaccaaatgctccttaaagactttcctacttagtcttaaggtctagcgtgcgtcttgtgaaaaccaaggcatgctggcaggttgcagggctgag

SEQ ID NO: 1732 - DNA, 243 bp, Canis familiaris
  misc_feature (1)..(243): n = a or c or g or t
tgcnnacccggagagtcccagccaaagccccgtggccaccaanngccccgagccgnnaggtcctggcgtnnnacccnntccgctgttcctcagtaaacaacaagatcatctaccatatacctgactgcacctgtattaccgacttcaggaaaggaatcagagttagtgaataaattaggccctgtgcagcctagtccatgggctgtgttgagtgaagggaggaaatgtctctccagnnccggg

SEQ ID NO: 1733 - DNA, 394 bp, Canis familiaris
  misc_feature (1)..(394): n = a or c or g or t
actcaatctggatgatcatagttaatttacttgggtatccctgaacaacagccctgganctttcttgctaactaaatnnntgagatatttgtggctcattacttaaactttcctgggttaaatttttgctcgaacacttaggcattccaggatgatatttgacttagccccatgatcttttgccctggtagctgactacatcaatttttcactcttaagaccttgggttttcctgcccaagggaatcagacatcccctccttcctcccactctggctatttctctgggacttccaggaagaaaacaggaatgtttctatgatttcaccattatgtagaatattgacagatagtttacttatatattctatttcaagaagtctaagaatttttga

SEQ ID NO: 1734 - DNA, 493 bp, Canis familiaris
  misc_feature (1)..(493): n = a or c or g or t
tgagacaagnngtangagaactgaggctgnnnnnaggtagatggatcccagctcaatttcagaaaggacttnctgatgtgttgacccaggatggaccgtgaacatcttgacccagaagcacctgagtgcccatggagcccaaaagtctgggattcaacttttccaactatgaccttccaaggctgtagatccattggcccaggtgaaccaagctctcagccttgcagaggccttccggtggtggtgtagccgtggcatgggagagacacctgtgagcaaggaccacgtgacccagacagcactgccaatgccaaagtgcccagaattacatccagagcagtagtttcagaagctagaaatgaccagtgtgaatacctgaagacagcagacctgcaacaatagcctgatcatgacaagatttggcagatgagaagaccaagagccagcaggatgcattaccaaacgagaaaagtcaaaataaagggaggacaat

SEQ ID NO: 1735 - DNA, 144 bp, Canis familiaris
  misc_feature (1)..(144): n = a or c or g or t
gagnnngctttcagtattttggagttcaactctgttgtccgtcagttaggctgcagtgattgagnnntgcaccagaattttgaagggatcttnnntgtcacaagttttaaccctcttccttcatacccnncctcagcccctttc

SEQ ID NO: 1736 - DNA, 368 bp, Canis familiaris
  misc_feature (1)..(368): n = a or c or g or t
tgggggttgtcttgcatgtatatttttgttgnagataagtgnngctcagttatttctgcaaattttggtngaaatgcttnnannctttnnnnnagtatatattttcagaatatannnttttatatttctgtggtaagnnaggatatgcgnnntaggcaatcttttccattaacatcacttgttctttcaaaaaannanatactggtttggtgccaatggttttattttattttttcattagaatctantgctcttctattattggagagcaggttaattttctttttctcagngtaattgagtttgnngtataatttgnnnatgnnnnnnannnntgnnnannncnnaccattaggnnnagtnaattt

SEQ ID NO: 1737 - DNA, 584 bp, Canis familiaris
  misc_feature (1)..(584): n = a or c or g or t
taggaacagaagcattgaggatctggtgctcctcccaccgtnnnaangaagagaacagccccataagctgtccttgggatcagcagtngtcaggagcagaaggaggaggcagaaaagacttttctcctgcagggaagagggctcctcaccgtcagctctgcactcgcaggctgtgccttccctgttgaaagtccttcaattgcaagtgaaatcaattttcctgaaagcctcccctgagcctcctctgcaggtaccaactatcataccagtgtttcatgattgcaggccattgaataattggcacaactcatctctctggtgagactttcctgccaattctgtcccccggagcctgcaaggacctgaggccttgctgaggattggtgctctcactctcccatctcacacacccccgtgactcccctcactcctgtgtcttcttcagcctcctcctcttttctggttccttcactcctatggaaaacatgctgtctcactctgcgccacttccaggcacccatccgagtttgactacactctccttggacaaaaggcagatggctgggagcagaaaggaaatattt

SEQ ID NO: 1738 - DNA, 395 bp, Canis familiaris
  misc_feature (1)..(395): n = a or c or g or t
agaacagccatgttcccaaagaacacatttgcnttgagaagtggtggtagggagnaggcaaaggtnnaaaagagaaagctgtgaaatccactcaggacaggaacagagacaagatttgtggcataacggatttacctcctattcagctttttttttttttttttaagcctgaactaagtgaccagctnnagcataaaagaaaaancagctcacagacttagnnnataaattttttnnnaaagacttcattgattaaattattnnnannntattttcttttattaataactgattctctcatgctgtatcttgaattggtcannnnngattttctttcctcttagggaaaaaagagatacatacttaatcatttaaaaatgtgctttcctgtgtaa

SEQ ID NO: 1739 - DNA, 487 bp, Canis familiaris
  misc_feature (1)..(487): n = a or c or g or t
gtggttttcagcctnnnggtttnnnnactntattnnnnnnatnnnnnnctgcaggacccatacngagcccggantgaaagtatccanntggaccatctgttancnnnnnnnantnannntcannnctcttcccctcatcccagccggttcttactctgnnngaccttcaaatgcnnnagctggccttttacannagtgccatggcannnagagacttgccacatctcacactctagagggtttgaactattaattcttgtcatttttttttaaagaaccatttcaaagnnaaattgttatannntctgtcccacgtgtgtcagagttgggtttttgtggaggttcagagcaggcaacatctgaagttnctctgagatccttgttctgaagtacgtnnntggttatttgtacttctnnagctgtgtgatgctgttaattgtatgtaccgcacatctcnnnnngttaataaaggactcaannnggtnnn

SEQ ID NO: 1740 - DNA, 364 bp, Canis familiaris
  misc_feature (1)..(364): n = a or c or g or t
ttctttgtaataagagtnataatanaaacaaaaatatcataaatatataatagtttgccttctccactagtttactagaaactgcatgtgtatttaagtcaatttaatttattttaatttaactcattataaaataattttgcacacatatttattggttgccccaaagagtagacaattaattataacacagtgatgattccagctctaggtcttggctaattttttttattctagtgacattaaatctcacttcaacacttagtaacctcctgtgtgctaatctctcttttactattaacctatgaataaaattagtatcaattctttgtacttacttaacattgggtgccatttaaataat

SEQ ID NO: 1741 - DNA, 582 bp, Canis familiaris
  misc_feature (1)..(582): n = a or c or g or t
gaatcttttttctgtagcttcaaacagatatnnagatgcctgggtcaccatgtcctgggaaaacagaaaacttaaataaccagcacaattatggcagaaaataggcaaaactacccatcattcaaatttacatctttttttcctgtttccaaagactagttattgatcaaaatgggaaggggaaatacggaattaccttttattagtaataatagttaaccttttctgagcatttcccagatgctgtggatcacagtgtagtggttgacaatgcagactccagaggcagacattaattctggctccaccacttatggtaggacatcggacaatttcctcaagcctttctgaacctcagtttttacatgtatagagtggaaaatattctagtgactagctcataaagttgtcgtgaggaccaaaccaagtcaagaaagaacttagaaccatgcttacgtagcacaagtgcttacgaaatattagctattggtttcatttcatttgcttttttaagatcaataaacctgtaaggagaaactgacaattagagagtagaggtctcaaagtcacacatcaagtagt

SEQ ID NO: 1742 - DNA, 463 bp, Canis familiaris
ttgagtcctgaaaagcagaattccaagtcaaattctgtcccaatcatcttggccaccgtgggattgatgctagtcacagtcgtagctggggtgctcatcgtgaagaagtacgtctgcgggggaaggtttctggtgcatcgatactctgtgctgcaacagcacgcagaggccaacggcgtggatggtgtggacgccctggacacggcctcccacactcataagagtggttatcatgacgactcagacgaggacctcctggaatagctcctcagaggagctgggcccgagcacggatgatggaaccgcagtacctctcacactccctgtggctccgacttgggggaataaatttcccattgcgagagacccagctctgtttctgctgcttccaccaaagccaaaaggacctgcgctaaagaaatgcagccgggggagggggggggaaccctaggggggaccctaa

SEQ ID NO: 1743 - DNA, 518 bp, Canis familiaris
  misc_feature (1)..(518): n = a or c or g or t
gaatcctggggacnntgcggtccgctccggccaagngacgcgctccctcccggcgccggggtgctcgacggccggggcacttcatgctacagtcgggagaaacatgcccgggctgctctgttctgtgttgttttttttgtaagtaatttattgcctgatggagatttatgggtgaaatccgaggtgttttnnncgtctggtgaagtgatttatatatcatccttgtctatgacagttgtattcttggactgaaattctagctcgcttccatagccttgattcctgggtatgttagacactcatcaccggcatatttaaatcatctcacaaaggactcgattgtaggacaaggacttggctgtgctcgcacgtgtcacagaaagaggtgaaaatgacatatttttatggagaataggatctctgactctattagcaatgaaatatgttcctgctggacagtgatcgcaattgttgtaactctgtagtattttttcatatgactgtatatttatattgaa

SEQ ID NO: 1744 - DNA, 605 bp, Canis familiaris
  misc_feature (1)..(605): n = a or c or g or t
tctgtctctctctctctnngtctcaantnngcaaataagtcnnnnnnnaaatgncagcatgtataatgaaagacttcctaccccatagnnctgcctnnnnnggaatgtcctgtcgctggatccatacaatgtgtggccttttgtgtctggctttttccacgtagcctaaagcatttgaggcacatccaggtttgttgtgtgtatcagtagtttattcctttttgttattgtgtggtactccattgtatgaatataccacagtttattcttttgcaattccaaggccactgagtgtttccaaatttatgctgtaaataaatttgcagtcttatggacatgacttcatttcttttggttgcatatataggaaagagattataaaatttgttttccaaactggctgtgtcattttgcattcccactggtaatgcatcagattcagttgctctgcatcctcactagcatttggtattgtcattcattcattcattcattcatttaaagcagacgtaatagatatgtagttgtatatcactttaaattttaatgaacttctgaaataactagtgatgttgagcatattttcatgtgtttatttgcacttt

SEQ ID NO: 1745 - DNA, 532 bp, Canis familiaris
cccagaaaccaaagcccccttggaaatgagttccttggtcctcccctcctcgagcttgctcatggggtcacagtgcggagcacggtttcagaggagggcactggttgagggtgcccctagagagaccagagtctcctaggtaaccatgaagcattggaaaagcgttcctgggggcagacatagcgggaggaggcagtgccttccttaagcaccggttgctccctaccttatacccaatgacggattcggcggctgccccttgagatgcctgtaccagtcttgctctagccacaggccgtgccaacccaggggtgcccaccagtcctccatcactcctgcgaccttgtcttgtcacctgtgtgaataaatggtgtgcttgccaacctaggagggtcccttcttccttcatgccaagcttcctgctcaggaggagtctccagctgagtctggagttttcccaggcacagtgtatggcctgtggggaacagaggatctgggtgactcatgggtggacattttttaaaattttaat

SEQ ID NO: 1746 - DNA, 563 bp, Canis familiaris
  misc_feature (1)..(563): n = a or c or g or t
atcntcatgggcattgctnnnttgatggttgctttnngcccacaggggctccctttttccgaattgtgcagacaagtgcnnnctgaannnggcatnctactatgcctgttgatctatgtgaaatccaagcaaaagcaatggggaagtttagaaaggagagttagccaacataggctanagttgatatttaaatgatccatttaaaacaagctgatagtgttttgttaagcagtacatcttgtgcatgcaaaaaatgaattcacccctccnncctctttcttcagctaatggaaaactgttaagggaagctgattaaaaagagaccacttgctcctttccatcaactttataagaaactgtttaacgtgaggtttcagtagcgccttgttttgcctctttaaattatgatgtgcacaaaccttctttttcaatgcaatgcanctaaagttttgatacctgtaacttttttttttttttttttggttgcganngtttaagaatcatggatttattttttnnaactctttggctattgtccttgtgtatcnnnannnnnnncatgt

SEQ ID NO: 1747 - DNA, 261 bp, Canis familiaris
  misc_feature (1)..(261): n = a or c or g or t
cacactccccccccccatattagattcttttgatttccacnnctggtggcnncttccaggaaaccagctcatggtctgggagtgggggagaaaagngaaatgatccccaggtctccctggggtggggtcngagctcccaccttcccccccaccttctactgcactttcctccctaccccacgtccaaaatctgcttccttcagtttgtaaagtcggtgattatatttttgggggctttccttttattttttaaatgtaaat

SEQ ID NO: 1748 - DNA, 623 bp, Canis familiaris
  misc_feature (1)..(623): n = a or c or g or t
atcaccctgagnngccggcgactgtgccttggttttatgcagagtagtgctaatatnnnacaggannacaccaattccaaatgagagaaataaataattttgggcaatctnnagagatntccagagtcgggcagtcctggccttgatcctggtggtncttgatnntggttgcttattgaaatcagcaggggaactttnnnnnatcgagnnnnnnnnnnnnnnnnataccagnnataccagagnnnangggnntnnnnnnnnngcatgagcatntnnnnnagctctccgnnagatgccgatgtgtagnnagcttggatggccactggnntaagagnnnnngaagagagtgcttctcgatcctcacnntggatcnnnnngatgaatcnnaacagnnagttaacctnnaaatctgcaattgtgatnntgccatanntagtcctcctcaactctacagacttgctttagtacccatatccntactgtaaaattctatgtacctgnnaagaactgatannntaccaagcatggattnnnnnncattttaaagnnnnattgcatanntgaannnnnnacacaactaatcannnnnnnnnngcttngagcataatgtataaggtangnnt

SEQ ID NO: 1749 - DNA, 491 bp, Canis familiaris
  misc_feature (1)..(491): n = a or c or g or t
gctgnaagctgtgcnntcnnagggatcatacagccacagcccccaggatcnctgggggacaagggaagcgtgtccctgtccagccgacccaccagccacgcaaagaagtgcacttggcatcccactgcagagcacagtttgtttgtcttgttggtttattggcctagagagttggacacacacacaaatgcggagataaatattggtcagtttctctaaatctgggtcctcactacgtatagagctacagtctgtagaattctaacccttgcgtgctgtggcacagaaccagtggcctttccactccaccatcacccttctccccagggaacatgggcaaggagggcacaaactgacaagacttgagtaattttcaaaaagacgaaatggcaaaatcccaaatttccaacatctgaaattcacaatattcacgttccccagctttggatacatatgttttaatctccaatttgccacaatctcgtttgttg

SEQ ID NO: 1750 - DNA, 451 bp, Canis familiaris
  misc_feature (1)..(451): n = a or c or g or t
taagacaacatttgggacatacattgagacttttaggacacattttatgctaaaaagtaattctctgtttatctgaaatacaaatctaactgcaaattctgtatttttgtttaataaatctggcaattctaaataggccattcaatttggaaatgacaaggtctctgtgatctttaaaaatcagtttccaagtgagttgaggggaagccagatgaccagaaaaggagtgaatgattataaggaaaaaagaaacaagtatcaagcccttttcccagaaattggatctggaatgaaagagacatgtgctgctattttattttttacagaatttttggatatacccaaaatgataacaggattcagttaagtaaataaatccatttggttaagaccagnnnnnnacaatctcaatagattgtgccagagaatgacagaaaacaaatatctgcca

SEQ ID NO: 1751 - DNA, 580 bp, Canis familiaris
  misc_feature (1)..(580): n = a or c or g or t
aaactgccatttannnaccaaaaagacattgaaccatagtacataattttataattgttcataatagagtaatttctcagttaatttattacaattagaatttgtcaaagaggcaactgataataaaatttatatttgatgaaatctttgaaacgagtaaaaagtattgggaagtatatctatctgtgtattttactctgactttacagtcataccaagttctcaaaggcatatttaaatatgtatagacattgttacaatatatttatgctaccgattttaatgatgtactttttacactgcagaaagttacattattaagcttttctttccttagtgaaaattggaaaacaatcttaattgacaataactgctatgttccccataggaagtattaaatggaaaacattttactcactaatttgaataatacttaggatatgcagtatattagaattgctaaactttgacaaaattaccactgttttgttgtaggagaaaactatggaactaagaatttaaaaaggatgcttaacgtctccttaattgctataaagttatgttttgggtgaattgtatt

SEQ ID NO: 1752 - DNA, 491 bp, Canis familiaris
  misc_feature (1)..(491): n = a or c or g or t
tcaaacttgtcatttttttctatgtaagtgatttttaaagaactatatgtattctnnngntatttcactttggttnnaatggttaagaatggtnngctgtgaccattatcagactgactgaatgattcctgatttccagtaagtgatctaattctacatattacacaggtacaatatctgtgggtgtaaataactnnaactgtacactgattaacatgacagnnnctctttttttgttattattgatctgtactgtattatagtatgtgggtataaatacctacaagtatacacagatatgtatatgtattccactattgtaacctgaaagacagactatgtattatctttttttattccttactggtgtttgtgttatttaaaaagcaaaattatgctctatttagttgtatattataggatactttgctgtgcacaattccaagtgccttagaatattgtttagctttcttaagtatatataaatgcat

SEQ ID NO: 1753 - DNA, 560 bp, Canis familiaris
  misc_feature (1)..(560): n = a or c or g or t
tccttggtgcagtttatcaaaagttaggtgtgtcacagtgtnntgtnctgctgatcattgcccatgctttgcacgtaaggtgtgtccgagccgaggccannttaatactactgaattgcctgaacctgcaagggattgcaagggaagagagactctacccatttcttggtacctcctaacctttcattgtatccccaggctggtctagtcctcttctgacctagttagagacaggtatcctgtttaagaaccttattatttattttttacttttagatacaaattaatgagtgcatcaccgtatttctcctaaagtgagtagattttaaacgttactgctgtaacccttgcagctttaaaaaaggggagaggggaccggggttatgaaactggcacattgtggagggagcattgctgattggctgggctgacatctctgccacaaatggaaaaagtcctaaaggcttcctttatgcaccttgaggaattatggagtttttcctgtggaggattaaatgtgcagaggagaccatctctagcctgtggggaggagcagttcc

SEQ ID NO: 1754 - DNA, 433 bp, Canis familiaris
  misc_feature (1)..(433): n = a or c or g or t
ggaagcnnncgtttgttacgtcataaaagttcacgcgcgtacnntttttgcttgcntgacnnnnnnnnnnnngaaaagttggcgattaagaaaaaacttaaaaaagagagagaagcnnttggtgatnnngctccaccaaagcctgtaccaaagaccattgacaaccagcnnntatatgatgaaactatagtagatcctaatgatgaagaggttgcttatgatgaagctacagatgaatttgcatcttacttcaacagacaaacttctcccaagattctcatcacaacatcagatagacctcatgggagaacagtacgactctgtgaacagctctccacagnnnnncaaactcacatgtttnntacagaagaggactggctttgaaaaaaattattccacagtgcnnntcaagagatttcacagatctgntagt

SEQ ID NO: 1755 - DNA, 524 bp, Canis familiaris
  misc_feature (1)..(524): n = a or c or g or t
acaaaaacactgccacctatgatgtcatcntgcagcactcaagcaggggttcttaagagcattctactgtggatcccaagaacttctgcaaagctctcatcagctgtcacatgctgcagtggcaaagtaaaggagtatcactggaaagatattcagaagagtgctcagaaatgaaacccatgttattaacgtggtaagaatattagtccattccattagattttctacacaggaagaagctctgtcgagtgttaactttataggcatggctgtgtgtttgtctcagctggttccatttcttggtcacataaagactccatttcccagaaacccttgcagttaagagctggtccatgtgatagagttccaagcaacagagcgtgagcataagtaatataagctccttcccggcctggcccttacaaacatcttgtgatgtccctctgggcaccttttctgtcttgatggcgactttggaggctgttccaggcttgattggtagaagatggctatctgacctctgt

SEQ ID NO: 1756 - DNA, 545 bp, Canis familiaris
agggaagataccctcctctgccctcaaaacggaccctacagactactctgcaggcacaagtccccagtcgagaagtaggacaccccaaatcctcagccttttcctaaactgagcagcagtgacagctggggcaaagcacattccccacacttgcccctcatctcagagactgcaggggaaaactgcaataacagctcgactctccctccagtgattttaaagtccttttgtatcccatgagagaagtttttagggggagtgggaggtcgggaaagctgcatttcagaaatgctgtcgtaatggtttttaacaacttttattcttcttactggtgctattttgtagaatcaggatcaatgttgacaggttttgtggggattgttttatacactttttttttaaatcacagacttctatttttatgttttaacattttcataaaaaaaatttttttttaactggagccacataacaagtatggggaaaattgtgccttgtttcaacagtttcgctaattcttaggctgaaagatgacagatgcctag

SEQ ID NO: 1757 - DNA, 357 bp, Canis familiaris
  misc_feature (1)..(357): n = a or c or g or t
gtgctcctcnaagcagtttggcatttactagtgatagatggccttttaaaagtgtgtacatttctatataaatagagaaaccatatctgaaatagtttgataacaggagagcttccaaagataaagtcagactaactgtgcataggaacctatagcttctgctttacatgagattatatttttatctgattactggatgctagacaaacatgatcatcctttaccctacagggttccctgttcatatggcctaggcattcagctccaatgacacctgtctcactgagggcttgaggctctggtgacaagaaagcctagctgagttactaaannnnnnaataacaagcaggtggatac

SEQ ID NO: 1758 - DNA, 479 bp, Canis familiaris
  misc_feature (1)..(479): n = a or c or g or t
actgctgctgctnactgattgtttttcaatgaataattgttgagctccatttaaaaagtaaatggtaggcttttttgttgctgcatagaaaaaagcctgaaggaaatacgctgaactatttttgatgatttcttctttgcgctttcttaatatgttttacattttctgcagtaaacctctattttatcagagggaaaaagaaatgttgccacaaaacattcaaccccaccaaaaaaggaaatgctatttaaaagcttcctggtcaaatatctattaaaagcatggctgtgctttaggtactgaagccagtcatttcctgctttggttagtttaatgtttttctactaactctacttaatccaaaccaaaacagttttttgcctactctcaacttctagcttcaggtttctcatctgtaaaataagaagttgctttagatgtttctaaggcccactccacccgtaaaattctgttttaag

SEQ ID NO: 1759 - DNA, 590 bp, Canis familiaris
  misc_feature (1)..(590): n = a or c or g or t
aaaatcatcttaatttccttctannnagaaggaacagcctctattgtcatgttgcttcttggacagcaatactattactttttggccctttatctcactattatcatggtgattgtgcaagcttctttttgcttatttaacctgccactagctgatatggttgatgcagatttactgaaattcaatcggcagtcacctctttcctcaatggtttttggcatcaatgctttgtttacaaaacctgctcagtctttagctcccatgatgatactctctaagctaaaacagtatggatatggaaacccagataaaagtacaattttagatcttcatgatgctatgtttaatttgatttgcctggtccccctgggcattgtactaattcagattttggtttggagcccattctcaatcaggaacaagacagactacacaggggctctttaaggccaatcctggatatcatgggattcaaacaaaacttcagttgtttatctgttctaatagagtttacattataccagaaggcaaaatgttctttataacctctaatttgtttagaaaacaaaacagataaaacaaaaaaatcc

SEQ ID NO: 1760 - DNA, 386 bp, Canis familiaris
ccctccccccctccaccccgggtctccgtttcgcgatttagcatctcggttagggcacggttaacgctggctcgggggatcccgcgtgcgcccagggagccacgctggtgtgcggagacaccatgatgggctgcagtggccaagagagaacctcaaactccggagaggagagggatccttttttgggagtgcggactccggagggctggggctggggggtggggtggtgcctgtctttgttgagatgcttggcattcctggctccgcgcttgccttgggggtggaccgggcgtgcgcgcgcgcctggggaacagacacatgttggaagcctcggtgttattttccgagcagaaacctgcagcctttagtaactggcaaagtgtagc

SEQ ID NO: 1761 - DNA, 386 bp, Canis familiaris
  misc_feature (1)..(386): n = a or c or g or t
aacgagctcatgannntgccatctgacannntcaccgctgtcagggggaaaggatnnnnnaatgctattgttnnncnagaaaccaaagattatgatgcnnnnaaggtgnnnnnnngncnnnnnnataacggantnctggccannncgacccatggcgacatcatcaggtttgcacctccacttgtgatcaaggaggatgagattcaggagtctgtggaaatcattaacaagaccatcttgtctttctgaggaagagacagttttcagtggggtccggcgccagctggagacagcagttcgagcaagtcctggagcgctcctgggcttgacataggcatgtgccactcctcagtgtcttcaaggactttnnnnnaatatacattttt

SEQ ID NO: 1762 - DNA, 591 bp, Canis familiaris
  misc_feature (1)..(591): n = a or c or g or t
ttgttcttggggntgcagaagaatcacnnnatgcccatcntngaaaattcactctgttcatccgccagcnnaaaggatttgttaaagtggctttgacccatggtgcctccttggtcccggtgttttcttttngagaaaatgaactatttaagcaagttaacaaccctgaaggctcatggcttcgaactgtgcaggagaagctacagaagatcatggggtttgctttgcctctgttccatgccagagggatttttcaatacaattttggcctgatgccctataggaaacctatccacactgtggttggtcgcccaatccctgttcatcggactccgcacccaagcccgggacagattgaggagttgcatcagacctatatggaggagctaaggaaattatttgaagcacacaaaaggaagtacggtattcccgagcatgaaactctcatttttaaataaccgtactcttagaagacatataagaggatgagagaacatcccattgcaggatacgtgttttaaataaggtggttttttttttctttgactctggaatcaaatttgcaactcaatgcaactgaaaagtattgtt

SEQ ID NO: 1763 - DNA, 580 bp, Canis familiaris
  misc_feature (1)..(580): n = a or c or g or t
cntggtgactatcaaacccaacagcttcaagactcccaaatcaaccaagtcaaggttctctcancttcacatcattaggaaagttcttgaaactgtgatgtgttcatcagactttcaaaatactttctttccatgttcctactatacacaaaaatgaggtgtgccacttgtcccccaaagcaaactcttgctgctgatcattgaccttgacatttactctgaaaagcaattgcattcagctgctataagcaatgatttcacttagtacaatttttttcctttaatttctaaagttgtacttaaaatagacattttgaacttgggactactctatttaaacctaccattttatggactgaacattagtactgtatattctttttaaagaataatgttatcacaactgctatttttatgtattttctgactttgtaacaaatgctaatgtaattggtatcaacttgtggacattatacaaagacatcataaaatgatagtaatatggtatttttgtacagaagattcagctcaccttgttgaaaaatgttaaaatctgaagagtaatttatgttgatggtaa

SEQ ID NO: 1764 - DNA, 567 bp, Canis familiaris
  misc_feature (1)..(567): n = a or c or g or t
tagnnnnnnctgaagatcggatcannaccattacaggaacacaggaccagatacagaatgcacagtatttgctgcagaacagtgtgaagcagtatgcagatgttgaaggattctaatgcaagatattttttcttttttatagtgtgaagcagtattctggaaagtttttctaagactagtgaagaactgaaggagtcctgcatctttttttttttatctgcttctgtttaaaaagccaacattcctctgcttcataggtgttctgcatttgaggtgtagtgaaatctttgctgttcaccagatgtaatgttttagttccttacaaacagggtgggcgggggaagggcgtgcaaaaactaacattgaaattttgaaacagcagcagagtgagtgaattttaatttttgttcattgttggtggtttaaaagaaaaattccccccatgtaattattgtgaacactttgctttgtggtcactgtaacattttggggggggtgggacagggaggaaaagtaacaatagtccatatgtccctggcatctattcagagcagtgtgcagaatgta

SEQ ID NO: 1765 - DNA, 515 bp, Canis familiaris
  misc_feature (1)..(515): n = a or c or g or t
cactnnnaacacgcagcaaagcaagaacccaaaccccagggcctcctgaaagcagcgcctgtaancngtgtcccccgcgacagccccttgaacgtgaacgcgctccctacccgggccgcgccctgccatgccccgcgccgtctctaaacctagagatctaaacattctccttcgtgtactttagcagaacgcttggcacgctttcttactacaccggtgtgatccgagacgtgaaaggtaccgagtccgacggctcagactcttctggttgggaattattattattttttttaaagagggctttaaaaagtgaccccaaagaattctaattttaaggaaatccaaccaaacttgatcannnnaaacacgcgtgtgcgtngtggacccacctcgagatgttgaggtccattttagaaatgtcgtttccacctggagagagacttgcttagctgcagcgtgtgccgtgagccctggacacgtcgcacctgnnngggccgtcggggtcacggagtcct

SEQ ID NO: 1766 - DNA, 439 bp, Canis familiaris
  misc_feature (1)..(439): n = a or c or g or t
gcgtgccctgtacaccacacccagcggcctcacacgccacgcccacctgccaccnctgcttgtgacctttgctgacctttttctgcctttccctcagtcccctgagggggacaagcagggcttctttgaggagctctgggactcctgccttcccaagggcgctgagagtagcctctggtgccctcttggaccacaggggctggaggccttggtgtcccaccacctggagccctttgtggtggtggcccagccccccaccagctaccatgtggccatccacctgccccccaactcaagactgctgctgcgactggaggcggcccaggtggacggggtgccggtggccctgcggacagatgactgggctgtgctgcccttggctggggactacctccgtgggctgtcagccactgnnnnncatnnntgccagctcaggtcc

SEQ ID NO: 1767 - DNA, 509 bp, Canis familiaris
  misc_feature (1)..(509): n = a or c or g or t
gaacccattgcctttnnntaaaaatttatgtgatgctgtannatnnnnnaaaagtttaaaatcctgtaatttagaacagtgaaaagtgtcaaaaagtatcntcttgagctctgactttttacattagcgtaggaggaaagatgacccactgtttacagatgccgtcctgtggctgggccatttttaggggaaaagttcattaagtccttaatgtccacgcgccttccaagaaaaatgtggtgaattctgttttgggttgactctcctcctcttcctaaaattggcagagctgttttttgtgtcttctcttctgatgcagtgttttgtgtttgttttttgttttttttttttaacaccgattgaaacatttcatctgtggttcctgcctcgtttctgggggtttgtcaatcagagttctctaacactggctcctgagaactaaaggtctttcgatttctattatctttctaatcccagggcatttatttcctttgtcatatacacttggt

SEQ ID NO: 1768 - DNA, 544 bp, Canis familiaris
  misc_feature (1)..(544): n = a or c or g or t
tgttatccagnnnnctgctgcaaaaaaaggagtaaaaattaagcttcacaaaatcatttacngtctgattgaagatgttcaggaggaactgagcttcagattgccctgcactgtggaagagaatccaataggtgaggcttctatactagctaccttcactgtaacagaaggaaagaaaaaagttcctgtggccggctgcagagtccaaaagggacagttagaaaaacaaaaaaaatttaagttaatccgtaacagagatgttatttggaagggttcattaacctcattgaaacaccataaagatgatatttcagtcatcaaaagtggaatggactgtggtctcagtttgagtgaagaaaagatagaatttaaagtgggagatgaaattatttgttatgaagaaaaagaagttccaggcaagacttcttgggatccaggattnnnaattgttaaaaatgtaaacaagtaatgaggtgcccaactggctcagttggtagaacatgtgactcttgggctcaaagttcaaaccccatgctgggcagag

SEQ ID NO: 1769 - DNA, 570 bp, Canis familiaris
  misc_feature (1)..(570): n = a or c or g or t
gcctctttccagaagcagaatggcatctccaaaggnacagactcannanngnccactgtatcttgtgacacaaagtcccaagcttcttccnngctccaggncagcagtcagccaactcaagagatcaggggaccaaaggtgactaagaaactaaagcaacaatcagctacgctgctatcctccaagaaggttgccttcnnnnnnccgaatggccntcctaagggcacggacacagaagtgcctgtgctatccctttccaagacccaggacacactcaagcctgaggactgtgatcagccnnttagaagcaccagagggaccaagaaagtaaagcagcagnngccagcacagnnttccaagagagctgnnnnccggaaacagaatggcacccccaagnnanntgagactcccgccatgtccccccttgattccngccagcccccaccagcaaagannagaaaatctcagtccagannnagcagccatccagtgttgtcttagatgaatggctggtactagactggggtggcntactgctgttggcacagggttnnaactcttaacctctgt

SEQ ID NO: 1770 - DNA, 532 bp, Canis familiaris
  misc_feature (1)..(532): n = a or c or g or t
gtagaaganntaccagaagactagaggtaagaaaatgtccctgttttcaaaagaantgcantctagacatnngctaggaatccgtncatatatctaccaagtattaaacaagccaataggatcacagcagagattccaatttccatcagcatacacgagttctccacgccctcacatgaaatgcccaagagaacttgacttgcatgtgtgaccagccacaagactgagtaccagcatcccggttccatcaccttccaggaaagaagagcacttgatgagggcgtgtgagcccaacatctggtctcccctccacatgtctacaggtcctgtgaccctgagagagagacaacctcccttggattgttttctcatctgtatttgagatctggggacttgacagggagtacgtattacagaaccaaaatgaacaggagccctgaaaccaaccagtcttccaggtttcaattcaggaccccaattggcatccccctgctnnncctgcttccttttttnnnngtacagcatctacctt

SEQ ID NO: 1771 - DNA, 643 bp, Canis familiaris
  misc_feature (1)..(634): n = a or c or g or t
aaatgtttcactttngggtanncacattcttcataccaggaccagaggannnnncagaaaaagtagaaaatggangtctatgtgatcaagaaattgatagtatttgcagtatagaacgtgcagataatgacaaggaatatctagtactcactttaacaaaaaatgatctcgacaaagcaaataaagacaaggccaaccgatatttttctccaaattttaaggtgaagctgtacttcacaaaaactgtagaggagccatcaaacccggaggctagcagttcaacttctgtgacgccagatgttagtgacaatgaacctgatcattatagatattctgacaccactgactctgacccagagaatgaaccctttgatgaagatcagcacacacaaatcacaaaagtctgaatttttttttaatcaagagggataaaacaccatgaaaacaaacttgaataaactgaaattggaccttttttttttaatggcaataggacattgtgtcagattaccagttataggaacaattctctcttcctgaccaatctcgttttgccctatacatccacggggttttgacacttgttgtccagttgaaaaaaggttgtgtagctgtgtcatgtatatacctttttgtgtcaaaa

SEQ ID NO: 1772 - DNA, 445 bp, Canis familiaris
  misc_feature (1)..(445): n = a or c or g or t
aaaacgagaaaagcttccctcttttccttttctgtggcannnacaattttgaattcagnnntgagaaaaacttcaggttttgaaagcaagaggtctgcttttttccccaaaccccatgctctgaagagcatttataaatcccagtcttaaaccttgcacacctagtatggctattaagatatacaccnatttcttagatcatatcagcttgggttctannnnnnnnnatatacatatatatacatatatacctgatggcagatttttcacaaatactcctacacacacacatatacatatatatacatatatacctgatggcagatttttcacaaatactccatctactgtaaatattggttcctctgagttttagaaacttagtgcaatgtattaaaatcaagtgttaggaaatttcttggcctcacctataacaacttttgtt

SEQ ID NO: 1773 - DNA, 514 bp, Canis familiaris
  misc_feature (1)..(514): n = a or c or g or t
agcacctctnaccgggcctttnctgtgcgaggcagtatctcgatgctagagaggcatttgtggaagggaaaatcagtgctttcagggtgcagaaaggtgatgataagtaggaacaagataatttcaagtaccattaagtcctgtatatgaggaaatacaacagggtgatggttgaagggaaccttaggtaagatagcggggaaatgctctgggaggtggaatccagctataggaccctctggctataggaccctctggctataggaccatccagctataggaccatctgagggggcccccgcagcctgcagcctctggaggaagactgggagctcttcagctgtggctggtttgtatggagaagtgccgcacgtgtaaagggcacgctaaatttcaaaaacttactataaaaaatccccctaaaataccgcatgatttctttttcttttttttttttcctgtcggcttccaggttgatatggtcatattctggacatactgaattatgtgaaat

SEQ ID NO: 1774 - DNA, 487 bp, Canis familiaris
  misc_feature (1)..(487): n = a or c or g or t
ccaccaggggctatgcccccacnncagcttatgccggggcagatgccaccagcccagcctctttcagaaaatccaccaaatcacatcttattcctcaccaacctgcctgannagaccaatgagctcatgctgtccatgcttttcaaccagttccctggcttcaaggaggtacgactggtccccgggcggcacgacattgcctttgtggagtttgacaatgaggtacaggcaggggccgctcgcgatgcactgcagggcttcaagatcacccagaacaatgccatgaagatctcttttgccaagaagtagcacctttttccccctgcctgcccctgccccctgctctggggccaccccttccccccttggctcagccccctgaaggtaagtccccctcaggggccttctcagagccgtgtgtgagtgagtggtcgccacacagcattgtacccagagtctgtccccagacattgcacctggcgctgtt

SEQ ID NO: 1775 - DNA, 562 bp, Canis familiaris
  misc_feature (1)..(562): n = a or c or g or t
tctgtctcttttgtcctttctgtgaatggctctatannggnnnngatagtaagaagtggtttctgtcacagcccaggcgccagccccttatctaaagccctaaaaatacaattattttttgcactgtttcagaccaagaggataagtaacttacccatcctcacctgtgactgctgccctgttagaggcaaaaaaacaggtccaggtcagagcacttgaaaagtcactacagctttgctaaagtgtatgagtgactcttgcagaaatacttcagattgagcattagacttgtcttttataatacttacatttgaaatatagttctctacgcttgacaataagatataattaatagctgtgcatccttgtatagttaaaaccagttagatattaagatggtctgtgtttggagatctctgggtggctcagcggtttagcacttgccttagggccaggtcgtgatcctgaagtgtcgagatctggtcccacatcgggctccctgcatgtggcctgcttctccctgtgcttgtgtctgcctctctctgtgtctctcaagnnnnnn

SEQ ID NO: 1776 - DNA, 579 bp, Canis familiaris
  misc_feature (1)..(579): n = a or c or g or t
gtatcagccgagcnncatcaaacgcnngcacaaacacnnctngatccggcnnntgagcacgccagccggcgtccaggtcatccttcgccgcatgctcaaaggccgcaagtcgctgagccactgaggagcgcgaagctgccggcgggaccctaccccgccccccagggccccgccccattnnagcatttccccttcctggaaccgctcctgctcttgtttttgtggggagctgggacaactcagacatgagcgctcctcgaactggggggaagtctagggttgtaccgaaagtagaagcaggagctcagaccttgccgagtctctttctacgatactgaattaggaagaattccggacatacagtagtggtcaccagtgaaccccgtggattctgttcacggctctcaccaccagttacccacaacccacnngcgccctcctgtgttatttgagagcagatctcagacattgggttatttcttaagtatttcagaatgcatctctccaagaaaagggctcttaaagacataatcacaaaactttacacacctaaaaaaagtggttaagaattccttaata

SEQ ID NO: 1777 - DNA, 601 bp, Canis familiaris
  misc_feature (1)..(601): n = a or c or g or t
aagtagtggggtcaccagggaaagagggaaacgaggcagccgagagtgttgtgttgaggtnntgctcccctgaacttccctcagtgaggctgggtctgaacactagagaaagtcttgctccggtatgacaagtttatcaaaaactccaaaggcccccaaggggccctctgacactgtcttctctcaccatgctgtttttcttgactccagaggtctgagggccgggtgtgaagaaggccccagacttggtcagaacttcaactgtgtggaatctgtggatctggccttctagagcaggttctagaaggtggcgtgttgtgtggtataaagcatccctcttctggccaaactggctcatagaggaacaaacgagaacaggtggagtgtacctcagagcctgggtagatcacggactgttgagccaggtcctggctttggccatgaacctgaacgaccgtaacttcaaggggaatgaaagatgaaaggattgggccattggagaggaagggaagggccaaggagagagagcaaacaagaatcttggaaggctgcgtagcccggagagcgggactggtannnngatgggtgtcatcaatctcag

SEQ ID NO: 1778 - DNA, 560 bp, Canis familiaris
tatctttcttttttctttattttttcaatgagaaaactaccttcaactttctaggctcatgaatcattctgataatctagcatctgtcaataggttcaacttggttaaaatgcctgggattttagataagagtctaatcaataaaagccttgttctgttcatgtctcacaagttcagtaagtgttaactgctgggcacatcgaatttcataaaaaataatactggatataccagtcaggtttatattcataaataagttgttgtgcaatacgtttttccattgctgcctattatttaacgaaagattaaatctgaataaggaacaatagtagcaagtataatctttcccaatgtgaatacacataagagaacagaaatgtgagaacaacttcttcctatttcttccctaaaacttgtgatactagtgatttatcatctgtaaaaatggtcttagtattttgcaatctgcaggttattctagttcaaaaataaaagttgcttgcttctttttcattttcttcttttaacctataaatttacctcttttaacatgtgagctt

SEQ ID NO: 1779 - DNA, 598 bp, Canis familiaris
  misc_feature (1)..(598): n = a or c or g or t
tatgcannagtgagcgcgtccattgacacggatgtgtatttcattgtcatgatgagaactgcctnnnagctctaaatgtttcaaaagaagaattttngaactattatgctggtgttagtgcttctattgacaccgatgcctatttcattttaatgatgacaaaatcctggagattatgaatttctgtctattaattcttttggaaatcggagactctcagagagtggaatgactttgaaagaagtccagtgctatagatttttgacaaggtgtaaactaaagtttctgaaagatctagggttttaaaagcaatagatcttcagtcaccttacttaatggcctgggacatattcatttgcttaaatgcctgaggatatatttttaaatcagaaagaaaggaagaactgaaggaagaaaggaagccatgaagtgagattggaaagtcgttcttaggtgaaataatgtaccccttgttatagtcgtttctctcacaggggtaaatgtaggtgtttccccacacctttacttattctgtctttggagtctttagcaggaggtgatgatgnnnngattgggggatcatctgattgtgtaatgt

SEQ ID NO: 1780 - DNA, 526 bp, Canis familiaris
  misc_feature (1)..(526): n = a or c or g or t
tgctgaccaccacctatctgcangtcactccttccaaanntccagcaccaagtcctgcnnntagccccctcatccaacacaaggtttcagagtgccaactatgggccaggcactggacatccagctataaaccaggtctggcggttgcaagggtgtgtacgtctataaaaattcctcaagccgcccagcttcctgcgtgcctgtcacatctcagtacaaactccatcagtccagtgtgtgtaacgtaaaaagaggccccggatgaactcagccggcacctcctcccaccctcccgggtgcgctgagaggtgtgagagaagagatgggtcattcacatggcacagaaaaggcagggctgcacagtgggtacggatggcctgatcacctttgtgtacacggaagacccactatttcctattcctgtcgtgcctgctctgctccccacaacctgctgctgtctcttcccaaagtattgacggaggaaatgaagcctgaaatgtgcttcgacagggacgcctgagtgact

SEQ ID NO: 1781 - DNA, 467 bp, Canis familiaris
  misc_feature (1)..(458): n = a or c or g or t
ctgcactggactccaggcacacgatggggcgggnctccaacaacaaccaaagagccggtcgataatcacacgtnnaactgcaaaactacggctgtgataagccagtggtgctgccaggacctggagagctggtcaggaggaaccagacgggtccggttcagctttccggggatgagaattaacaagggaggccgagggacccacaggtgcactggtgtcttgcctgtaggactcctgaaaagatgcaggagacatgacttcgcaagttgagttataacaccccagcagtgctttcaagatcctctgggatcccaggatcccacggttatgcaacactgccgattggttttcatttgataacgtccgtgatttcctcctgcaaatctgctcccacgtgtttgagtctcagagttctctagcaagttgaaaggtcttaaagtccatcaccctgaaatccgactctaaaa

SEQ ID NO: 1782 - DNA, 477 bp, Canis familiaris
  misc_feature (1)..(477): n = a or c or g or t
cagaacaatgatgctggtagtattcaaatctgctccaatcttaaagcgagcnntcaaggtcaaacaggccatgctgcaactttatgttctgaagctgctaaaaatacagaccaagtatctggggcgccagtggaggaaaagcaacatgaaaaccatgtcagccatctatcagaaagtacgccaccgcatgaatgatgactgggcttatgggaatgacatcgatgccaggccatgggacttccaagcagaagaatgtaccttgagggccaatattgaggcttttaacagccgccggtatgacaaaccccaggactctgaattttcacctgtggataactgcttgcagagtgtgctggggcagaggttggatctgcctgaggacttccactattcatatgagctgtggctggagagagaggtgttttcacagcccatctgttgggaggagctgctccagaatcactgactgagctctta

SEQ ID NO: 1783 - DNA, 281 bp, Canis familiaris
  misc_feature (1)..(281): n = a or c or g or t
ccatcagcccanatnnnnngctcannnnnnnnngntaannnnnnctgcaaanntcaaactcaaatatgggcnnaagaaagaggcaattagtgacctagaacagctatggaaacaaaatccaaaagatattcacaccctggnnnagcttatnnctgcttactcactngtagatcctgagaaggcaaaagcccttagtaaacacctgccctcatcagatagtatgtctctaaaagtagatgtcgaggctcttgaaaattctcctggtgctacttacattcgga

SEQ ID NO: 1784 - DNA, 645 bp, Canis familiaris
  misc_feature (1)..(645): n = a or c or g or t
ggaaatgtgtaagaatttatgttttngagtagcatnngctgtacatgactcttnnaattgagaaccttcccagctcaangacataacagaacaacattggttctctttattttttattttagttgttaacattacctggggcgctctataaaatcagagtgttattttcttcacagatattagtatacatcttactgaatgagggctttgcttcaataccattcatcagaggtttgaaagaaaggtttgaaaagaaaatcatcactctgtgtttctgcttcatgaacaaagactatgtgaatattttactgtagttacatttagctgaaattgagagaaagagcttataaaatgtaacccctttataattttagtaatttctagattctgggtttccagaaggtaaaacacatctatgtgaaactgtgcctaagctcgctgtttgttactatgtattattctttttcttgcaatagtgtcagccacctgagattttgaatgttaggagtaccttatgctttgactaatgagatgtatttgtattaaaaaatagaacaatctcagaattattaagtttcaaaagattgcattcccattgggttcccattagttattttcttcattcgtcatggttctttgtctttt

SEQ ID NO: 1785 - DNA, 517 bp, Canis familiaris
ttttatatttttgtaacaattgcttttttcacgggggactgggggccggtctttgtagtcttaacaagtccggtagttttttacgaacctcttcagatgacggtggacacctgaagactttgcaacgtttacatgacttttcaaacgacgccgtaggcacacggcctgctgtgcaagtcaacgaggacctccccgggggcccacggggtcgggggttccttcctggcggagcgcgagggcgacacatttgatttttcagactgtgttccagcgtcctgttcggggcccaccaacgagggttgtttgtcgttcggggtcgcgctttcagttggcacctgcagggttttcggtgggtcgggtcggtccgcagggcgggggggccggggcctgggccgctccttcgccttgtttgcggcggccggttggggtctgggcctgcggggtccggcaggagcggcccccaggcctgcccgcctggctccactaggttctccagcccccgcccccgcccatggac

SEQ ID NO: 1786 - DNA, 341 bp, Canis familiaris
  misc_feature (1)..(341): n = a or c or g or t
gacaagagctcattcgnnacagatgancagatcnnnnggnnaagccaaantttaatgnnngctggttctgacactttcatcaattcatgagcagcctgtggacgtttgccatttttctgnnnannnnncaantngatgtgtgcggtgcattgaacctactgttttttacagtngtctcattttggaggttctgtcctccagcacataatcattcacctgatactattttttgtatatagtcttgaccataattttaacgctgaaagcagagctccatttgtaaagaaaaaaagctgttttgtttttttcagccataatcaacttttctatctttactggat

SEQ ID NO: 1787 - DNA, 355 bp, Canis familiaris
  misc_feature (1)..(355): n = a or c or g or t
gggtgggaaggaagggatttgggggagnnntcttcctgccactcccaagtgtttatttttgatnncaaanntgtattttcagctccctccctcccagccccccaatttcctgcgggcgggtacaaaggaccctttaagtgtccctggagttgggagggaggaatgggggacataaagcctgtcctatctgaattccaggctggagaggatgggttcaaaggactcctgggctcacctcctgtcagcaccggcccagcccgggcctggggacctgggggttggtgatttgggggacggtgctacacctgtctccactgtttgttttacttccccaaaaatggatctttttttttct

SEQ ID NO: 1788 - DNA, 500 bp, Canis familiaris
  misc_feature (1)..(500): n = a or c or g or t
agaagatcccgtacaatacctcagaggnctcntagctcgtgcccttgccatccagagctgggtggagagagctgagaagcaggctcttttctctgatacactcgacctgtcagaactcttccacccagacacatttctcaatgctcttcgccaggaaacagcaagggtgatgggctgctctgtggatagccttaagtttgtagcttcgtggaaaggtcggctgcaagaagcaaagctgcagatcaagatgggcggcttgcttctggaaggctgcagttttgacgggagccggctctctgaaaaccaccacgattctccaagtgtgtcaccagttctcccttgctgtgttggctggattccccagggtgcatatggtccctattctcctgacgagtgcatatctctgcccgtgtacacgagcgctgagagggatcgtgtggtagccaacatcgacgtcccgtgtgggggcagccaagaccagtggattcagtgtggagccg

SEQ ID NO: 1789 - DNA, 636 bp, Canis familiaris
  misc_feature (1)..(636): n = a or c or g or t
tctctttgggactgcactccttcattaccaattcaacccggatatcgacatgcctgatgataataaaagaattagaagcttctggactccactggnnnnaagttgggataagaaggccaaatatcaactctgaccacctttaatgtactgacttctactggaacctggacattggcatcactatattgacatggggtgttatgacctaagagcgttgagacgtcatgaggtctgctaacactttcatccaagtattttagaattccaagatggccctcaaatctccaaccactggtatagacactctatacaatctcctctccctgaatgggaacggatttggttctgtagtaagagaatctgccttagtggatgggagggaggctctcttgctggcctgaaagaagaaaactaccatgctgggagggccagatggctagggcttgagtgcgacttcaaggggcctttttaaacttcaaagtggatgagaaaaccagtcctacaaccacaggagactaattctgtcaacaacctgagtgagtctggaagaggaccagagcctcacataagaccacagccccggtcaacaccttgatnnnnnnatgggagatcctgnnnnnaagaccccgctaaccc

SEQ ID NO: 1790 - DNA, 645 bp, Canis familiaris
  misc_feature (1)..(645): n = a or c or g or t
angacaaagtaaaacttgtgtcgtgtcagacagannnngnggaatgtactggacnnaaggcagnnaggtggtccccacattcagaaatgaggtagagctagaagaggaccattgctgcaggggtgatgttttcaagacaagaggtggtggacaatctgttcagtttacggatattgagacgttaaaacaagaatcgccaactggccgaaaacgaagatctcccacagcagcacctgccccaccagatggtacagagtctgaatggactgatgtagaaacaaggtgttcggtggctgtggaaatgagagcaggatctcagctgggacctggctaccagcatcatgcacaacccaagcgcaagaaaccatgacccgaccatcttttcatttgtgttggtgatttctccaaagccatcccaggagtcttctgaatcatcttgcagaactgcagctttgttgaatatcaaagacctcagatatattatacactggtgcagatcaatggttccaaagatacctaggattcagcacactttttatattctatgccttgctatatgaacttttataatgctattgttttgtatatttcttgtgtacttaataactaattcgcacaagtgttttgtttnnnnntgggtgatta

SEQ ID NO: 1791 - DNA, 572 bp, Canis familiaris
  misc_feature (1)..(572): n = a or c or g or t
gacataacagaggnagactgctttagtttatttcctctnnaaacccttgtgtacctgactcctgactcagaacacgctcttgaagatattgatctaaacaaagtttacatccttggtggacttgtggacgaaagcattcagaagaaggtgacatttcaaaaagcccaagaacattctgtcaagacagcccgcttgccaatccaggaatacatggtcagatgccagaatgggaaaaactatcattcagagatattggccatcaatcaagtatttgatatcctgtccacatactttgagactcaaaactggcctgaagcactgaagaaaggagtttcttccaggaaaggctacgttcttcagaactcagtggaatgatggacagcctaaggagctgcaggaggcaaagctgctggaggtgctttgacagagaagcagagcagaggctggcgatggcacacacttgcctttaccttgacatcctggttcttacctagaatataaattactaataacagggaccatattttatgctcttttctatctcccatagtgcctggctcatgggaagagcc

SEQ ID NO: 1792 - DNA, 537 bp, Canis familiaris
  misc_feature (1)..(537): n = a or c or g or t
gtancttctttgccancaangaatgtnnaaaccactccagctaataatgaaggtnnaccagaacaannaccaagcgtngaaggtcttaatgcaccgacgaaggctgcttcagaggtgtcctctatcataaaaaagaaaccaaatcaagcaaaaagaggacttggggccaaaaaaggaagtttgggagcccagaaagtgacgaatacgtgctttaatgaaattgaaaaacaagcccaagctgtagataaaatgaaggaacaggaagaccgtctggccagggcagcacctaaggaagaatccatcgtttcatcactgcgatnngcctataaggatcttgaaattcaaatgaaaaaggacgagaannnnnacatgagtggcaaaaaaaaagatagagtnnnnnnnnnttggcatgggatttggaaattgcagaaggtatgtggcttccaggatttaaaccaggttgctgggatacctgggtggctcagtggttgagtgtctacttttggctcagggcatgatcctgaagtcccgggatcg

SEQ ID NO: 1793 - DNA, 258 bp, Canis familiaris
  misc_feature (1)..(249): n = a or c or g or t
ttaggtcactccnnnnnnnnnnnnttcaagactnnatnttgttttatacacaattatttcatgatagaaactggctttattgccggatttcttttttaaacatattttaactcccatangnnnnnnctgtccaannnnngtttttcataagnttaaatttttcttaagatcaaatttgtctctagcaatgatgtgatnnnnngccaaataattgagattatnttannatgttttgttcatannnnnttnnnattaaaa

SEQ ID NO: 1794 - DNA, 534 bp, Canis familiaris
tcaccactggattaataggcatctcatgaaatggtacatattcattattttttatacctatatcattgtgtcaatatgtccttcccaccaagagtgtatatttcttaattatcatttacattttttaaacaagccataatgtgtgacatttctcccaatatagttttttatacattttgaattacttagcattttaagagcactcacaaggttttgttctttagttatgtttaaagattataaataaccataaatttatcatgttatattgacaaggtgacttattgaaaacacacttaggcttcataagtcagtaggcttgtatttatttggatccaaaactccactcaatgtaaattctgagccatgtagttaataattttccatgatatgattttcattgcataccatttgaaaggcatccttgtattccaggtataatgatcattgacccccaaccatcatttcttactgccttttctgttaatgctgtgtaaatactgaaatataatgctatgtaaatattgtttatgt

SEQ ID NO: 1795 - DNA, 397 bp, Canis familiaris
  misc_feature (1)..(397): n = a or c or g or t
ccagnnnagggcctctccccatctccccccaccccatccccagcanctcctccacctctcagccatatcttccagccccctcccctggatccgcgtgtgtgtgtccccgtgtgtgtgcacccctgtaaatagccagctgttatttatacatatataatattatatatatttggtctgtttgtagttttattactagaagatttttccggttgtccttaacaccccttcctgaggttcccatctcttttctcttttcctccttccccttctgtctcttcctgaccagccctgaatcccttcatttgcatctgctatgcaatagtccctcttcctcttttccttcccttggatttagcagatccttcctcctaccctggccttccccatacctccacta

SEQ ID NO: 1796 - DNA, 473 bp, Canis familiaris
  misc_feature (1)..(473): n = a or c or g or t
ggggggttgcacaggaaccaagaaatagaaataaatcaggatggtatgtcttaaagctgtataccaaatgcaattctcatctgacccaatgacgagcaaagtaaatagttgaccagtgatgtggtttaaagcggctcttggggaaaattctgcactttaaaatatctccccactgacgcctgacgttcaacctttagcagttcatatctttgggcagaggttgccggcatcctcnngcaatcttttagaatgcaaacactccaaggatggacaaacaactgaagtcactagcaaattagtgaggagatgtcttagggaaatcactactcatttaacaaatataatgagcacctattatgtgctaggtatcctttgtgctanctaggtgctggagatactttggtgaatttccctgaactaaaaagaggaagagaaagccannnnacctatttcacagttttacctaacagtga

SEQ ID NO: 1797 - DNA, 624 bp, Canis familiaris
  misc_feature (1)..(624): n = a or c or g or t
agtnaccattttgagtcnnattcttcttataatgtgtgctccganncaaagcnagttctgctgggtttggggggatttgggaacttggggatggagcctggcacatgctcaattcaggcttcaccttgatcaagcccttgagaatttctcccacttctgagtgaccttctaaccctggcctcttagaacacggttcctggacaagcagtgggagctgcccctggcagctggttaaaatgcagaaagttgggctgcatgaaaatctgtatttcaacaagatctgcaggggtctgcccagtctagcttgagaagaactgttttggacagcttccaactttctggaatacattacatatggatcagtaataagcagaaggccaagtcaggcctgtattctcaagaaactgaggaatttttgatgtatatagctttgctctctgatagaggtacaccttgaggggttgttggctcaaagggttgttggctcaacgaagctaggaagggatcatgcttcactgtatgggnnngatgtatcatacaggtctatcttttataaaacaaaggttttcctctattttgnaaactcagcacatttgtnnnnagttatttatttattnnngacaa

SEQ ID NO: 1798 - DNA, 528 bp, Canis familiaris
  misc_feature (1)..(528): n = a or c or g or t
gaagaggcacgtccgcacgcatacaggcattcgcccctacaaatgtgacatctgcaacaaagnnttcacccagcgctgctnnntggagtcgcanctgaagaagatccacggggtgcagcagcagtacgcctacaaacaacgtcgggacaagctttatgtctgtgaggattgtggctacacggggcccacccaggaggacctgtacctgcacgtgaacagtgcccacccgggcagcgcctttctcaaaaagacatccaaaaaactagcggctcttttgcaaaccaagctgatgtccacacgccaggggaatgccaacctgagcgaggaggagaagtgaagaggaggaggagctgggagaaactccagagctggcacgttgataggagtttggggtttggaatgtcccccaccttatgtgggtttcgttcattcccctgtccttccagggcctgagctgggggatctgttctaataagggttgtcaatgatcatagaggagccaggccccccgtaacccanatcctgttg

SEQ ID NO: 1799 - DNA, 584 bp, Canis familiaris
  misc_feature (1)..(584): n = a or c or g or t
acccacaaagaaataccgtnnaaaattacatgtgttatccctgttgnataactattttatcaagaaataattcttttgccctgttatacagtagatgtattctatatttctaggcacagggttggtcactaagatgcctagaagagaaatttctttccttcatgaattcataaggaaaggttttgtatttttaaaaacactaaaagcagtgtcactccacctaatatctcactgttctgcaaaaatggcaatgcttaaactaagtgagtattttggaaactgctaaattctatgttaaatactgtgcagaataatggaaacattacagttcataataggtagtttggatatttttgtacttgatttgatgtgtgacttttttttcgtatactgtttaaatcatgtatgttatgacattgtttaaaattcagtttttgtatcttggggcaagactgcaaactttttttataccttttggttattctaagccctttgccatcaatgatcatatcaattggcagtgactttgtatagagaatttaagtagaaaagttgcaaatgtattgactgtaccacagacacaa

SEQ ID NO: 1800 - DNA, 315 bp, Canis familiaris
  misc_feature (1)..(315): n = a or c or g or t
ccatagannatatgtagtgccagctcnntctccactgaccttgcaagatccattacactgagaacatctgnnnnncacacccatttatngagcacctactatatgcctaggtattgctcaagctggtggtaaaagggcaatnntagctattgataatgtacttaaagcagtagtattttaacaaagaaaaagggtccnnaagaaaaaagctgaggtcaaattcttagatttcagatatngaaaactgcaggtctaattatcccctcttnnaagaaccaaaggagttggagttcccttaatctggcccaaccatta

SEQ ID NO: 1801 - DNA, 651 bp, Canis familiaris
  misc_feature (1)..(651): n = a or c or g or t
aaaaaaatcattaaggaagatcctcggtgcattaagttctcctccagcgacannaaaaaacaaagagagtttgaagaatacatcagagacaaatacatcacagccaaagctgacttcaggacgcttttgaaagagaccaaatttataacctatagttaatttagtgaaagatgtgaaagtgaaagcttgtgagagatgctgggattggcagccccgcagactgaagtcctctgttcatccacagaacagatccaaaaagctaatccaggaatctgatcagcacctgaaagatgtagaaaaaattttgcagaacgacaaacggtatctagtactagactgtgtgcccgaggagaggcgtaaactgattgtggcatatgtggatgacctcgatcgccggggtccacccccacctcccacagcatcagagcccacgagacgatcaacaaaataattctcagtactcttccacaggggtatctgaagtcagaacgcttgcatgagccaattttcaggtttttacatgtatgtgcattagtcaaactattgcagaaccatctgacgaacagaaggagaagcattcgtgaacagtttctgaacagagaacactttggaaataatttatgcttttnnnngtgtggcatgactgacata

SEQ ID NO: 1802 - DNA, 657 bp, Canis familiaris
  misc_feature (1)..(657): n = a or c or g or t
atgaannagcaggaaaaaaatgacttgcaaaatgctaaatttcagcaagtggatttggcatgactttcccgtcaattcagggcaaaaagtgctattgttatgagatttatttaaaagactgataacacactattttcatattttgtttatttgcacaacttttgaaccagatgactggttaaaatccaaccatacacaatttataaagtcaaaagattttataaggaaaacaaatataataaccagtgctgtgaaatgcagaaaaaaaaggtttgtatttggttgtggggttttttgttgtttttggttttttaaaggaaaaaccctgcctaaaatgttaatcttgtaaaaagtgtgtatttggaattttctttgttttaatatagaatattataaagtcaaactataataaaattgttttcagatttggagtttaagatatagctgtagaagtggctttgattcttttagatgtctcataagatgggactttttatatgttaatgtataataaaactaaaacaagattattttccatttgaaatttttgtatagtttaaaaatgcttccatattctttgttggtatggtgccactgcaaaactttagtgcagagtttatatttagctaaactgttatgttaattaagaaatgcata

SEQ ID NO: 1803 - DNA, 330 bp, Canis familiaris
  misc_feature (1)..(330): n = a or c or g or t
cgacttctnnacgccccacctggaggtactagggtgcttgcctcccacccggctacctccgagacactgagcgtcccgcaacccgccccctcgctgtcttctagacccacctgatggcaggtcctgccaggtgctaaggcccccaactttggagcaccgctgacccctctctttctctgactggcccccctcccagatctgatatgacagcaaatccggctgcttcagaatctacctagcggggcacctgagtggctcagtgattgagcgtctttggctcaggtcgtgatcctaggatcctaggatcttgggatcctgggatcgagtccg

SEQ ID NO: 1804 - DNA, 644 bp, Canis familiaris
  misc_feature (1)..(644): n = a or c or g or t
gtatantcnnactgtaannatgaggtttaaatattaggaaagtgtgtagggtagcatacttgccactattnnaaaactgtcaattaaatactgctacaatatttgtgttgtgcttgaaaatatgtacagtttttttcaatagtaagaccttctgttgtccttaaatctctcaaagcgcctttatttcaacatgacttttttttttcaaacattatcttttataaacgttaataaagagtcattgcttctagaaactctaaaggagatagtagctggaagccctctgtagcttaaaatcagtcattaaaactcacaatagggtaagtaattaggactacctattcttaacatgtaaataagcataatttgttccaaagatgaaacatttgaaacttggttcctgtctactgtaatatattactcaagtgctactggacatttcacgtgaagaactgacttccacaaccacagcaaagaccagctgggagctgctcgtgtggctcatgtggctgctctgcagcaaatggactcatgctggtgtgttagagcctaaagtatccgtattcagaacctgccgtgattttatttctaaattcatgtactgtacatccttaagtgaaaataaatgtcatactctnnnnnnn

SEQ ID NO: 1805 - DNA, 509 bp, Canis familiaris
  misc_feature (1)..(509): n = a or c or g or t
gagtngacgtgggggtgcctggcttcnnggtcntcctgcctaacctacttacctgtctttctcactctccctgccctaggtcaatgctcctgggtgtgggcacccctccagtggacgccttgtccccgttaatcctaggcatcatggcagtggccctgggtgctccagggctcatgctgctggcaggaggcatatttctgctgctgtggcacaagcagtgctcccaataccagcctataaactgaggcccactctctggaggacgggacattaactagtgggcctgtgttgctggtctgccagttgaagggttagctgctcccttctcccatcttgcttttctgcaaaacctcagggaacccccaggcggggcttccatcatactctcaggagggaccagcaacagggtgattgctagaggtggggggggggtcccttagtgatactcctctgcccttccaccattttcctggcatgagactcacagacataaatcaaaggccttctga

SEQ ID NO: 1806 - DNA, 204 bp, Canis familiaris
  misc_feature (1)..(204): n = a or c or g or t
aagannnnnnnnnnnnnaactccnagcctccccccctcnncttcctttggtatcttgagccattaatgatttttttttttaatnnnnnnggtatattannnnnncttttcnnatttttctnnnnnnntgttcatgtgnnnnnnnnnnnntcnnnnnnncttannnnncttacagaccntnnntgcacnnnnagncnnnnntnta

SEQ ID NO: 1807 - DNA, 478 bp, Canis familiaris
  misc_feature (1)..(478): n = a or c or g or t
tngcccgccccttccctccgcttcccaggcgtgacccaggcagnnaacagctggggcggggcccaccccctcccttctcagccccacagctgccgccactgaagcccccaactggggccggatggaaggggagctgagaagccagcccccagccccgcaggggtgtgggacctcgggatccaatctgtggcttcctgcctggcttcggagggcacagccaccccccaggcctgctttccaggcttccgaggaagcacaggatgagcacggccagcgcggccactgcaccttctctcctgaagccccagggaggctctgggctcgaagggggggccggggccttcctcacttgggatgtcagcctaaggcctagcagggccaccctgactccacatcccagcatttcattcataccagttaatagctgcattactgccaactgaccttataaccctgtgcacctttgaaaagatttatg

SEQ ID NO: 1808 - DNA, 550 bp, Canis familiaris
  misc_feature (1)..(550): n = a or c or g or t
aaatactactctctctagtgacacagacnngggtccttctcnnagattttggtnnagtaatccatcccactgttggacagctctttgatacctttaaggaggagcttttgtattgtctggcttttcccattgttctcctttacagattgaaatagtgatgctcttagatgtaatggccctgcttcctttgcccctgccccttgtagctccttctggccgaatgtccgtcattaagaacctgcagaacctggaccccagtcacaggataagcgaccgggactacatgggctggatggattttggccggcgtagtgctgaggagtatgaatacccctcctaagggaccctgcctttgtcggcacaccaggaagcaaccgcctggctcagaagaggcagaaaaagaaaacaatcacactcataagtcattgtctctgaagtttgacattttcattatctatttattaagttttcaatgtgaaaaatgtctgtaagattgtccagtgcaacctcacacctcaccagaattgtacaannnnnngcaaaacatttt

SEQ ID NO: 1809 - DNA, 621 bp, Canis familiaris
  misc_feature (1)..(621): n = a or c or g or t
agctgacagagtcngtgaaccacnngtgcctgttggacactgcattcttcgtcaactccagctacccgcccctnntcaggccagagagaaaagttgacctcatcattcacctcaattactgtgctgggtcccagacaaagcccatgaagcaaacatgtgagtactgctccatgcagaacatccccttccccaaatacgagctgcaggaggaggaagacaacctcaaggagtgctacttgatggagaactcccaggaaccagatgcccccattgtgattttcttcccactcatcaatgacaccttccagaagtacaaggccccaggtgtggagcgaagccctgaggagctggaacagggtcacgtggacatttatggccctcaaactccatatgctaccaaggagttgacatacacagaggctgcctttgacaagctggtgaagctctctgagtacaacatcctgaataacaaggacaagctccttcaggccttgaggctggcggtggagaggaagaaacgcccaaagagccagtgtccatcctaagtcccagcctcactaatcccatatctgcttctaaggttgggggcgcagagcccattagggctgaccggcctgcaca

SEQ ID NO: 1810 - DNA, 403 bp, Canis familiaris
  misc_feature (1)..(403): n = a or c or g or t
tgggctacaagatngatgacctcctgacttcctatattagccagatgctcacggccatgagtaaacagcggggctccaggagtggcaagtgaacagtgggagaggtggtgctggctcaggcccatcagctacctctgcctnnnnnncgaggcagccttgctgggatgcagaannnnnnnnnntccactcctgagggctggttctagccctggcttgctgtggccttcccagttataagagcctgtgatccttggnnnnnnnnnttagaccagtcctaccatgtgacctcctttgacttcaagaggacaacctagttctccacaccaggaccaaccaaaccaaacccagaatattttgaaacctaagggactgccttaattcctgtaagaccaggattctcagc

SEQ ID NO: 1811 - DNA, 542 bp, Canis familiaris
  misc_feature (1)..(542): n = a or c or g or t
cagatcaaggnnagatcaaggtcatgtgtctgtattcaatagnagtcaaggtggggaaagagtggcccctgggagatggggccctgcttttgcatctcagtggggagggatgtgggggatgactgggccgtgggtgaccaggagaagggaagtgtggcctagaagggctctggattggggaccaggatagccgggattaaatttgtgcatatgtgagctggctttgttttcttttctgagtgaccctgcgggggttgggggtgggtgggaaggcagggtctcctggaattaattctgctggcaggctccccacagtggaggctgatggtttttgctgtgtcagtggtgtggggacatagggaaagggccagggctgaggcctctgtttccttatctgtaaagggggcctgctataagggagctgctaaaatatgccttgtagcctgacagtaggaaggacccacctaaagtgctccaaacttagcttgctttcttgtttgtttttttaaatggcactaaaacctgcttgcaaaagtattacc

SEQ ID NO: 1812 - DNA, 566 bp, Canis familiaris
  misc_feature (1)..(566): n = a or c or g or t
ggctcgnnnccacggcgnnnnntgctcaccggccannccaacggcagcntggncatgtgggacctgaccaccgccatnnncggnntcggccaggcccccgccggtggcctgacagaggaagagctgatggagcagctggagcagtgtgagctggcccccctgtcttcctccaggggctccctccccagtccctctccccgcacctccctcaccagtcttcactccagcaacacctccctggctggccggcgtgggagcccgagccccccacaggctgaggcccggcgccgcgggggaggcagcttcgtggaacgctgccaggaactggtgcggggtgggccagagccccttcggccgccgacaccagcccctcggccccccacgggtctcggagctcccctcgtgccccccaaggtgaagctcaatgaaacttccttctgaacataactgccatggtgcctttggatacccaggtcctgggggtctctggtgcctccctgcttcctgtcagagccccggattcagggccagggcctccttggagtggtnnnngttactaggccccc

SEQ ID NO: 1813 - DNA, 554 bp, Canis familiaris
  misc_feature (1)..(554): n = a or c or g or t
gaagagnnagccatcagaccaggtgtcgtacagcagcgggtcagagcannaagggnnctcggatgtcatcatgctcaccagtgatgggaaggggcanctgagccctgagctgcattctctactttctccagcactgcattagtagaggacgtgggacaaaaggtaccggcacatctccgctggtggaaggtttgagccccaaggcctccagctaatgcccaacccacttcccaatgattttgccaggggctggccctgcccgaaccctctgcctcattaccaggagaaggtgctaaaactggccttgctgcctagtgcacccctgagccaggaccttgtgaggaattaccaaaccctgatagagaaccgggttgccttgcccctctgtcatctctccgaggcaccacctggaaaaaccttaacaaggaagatgaagagaagacctggacagacctaaagagcctccagctgggcaaggccaatgcatcttcagcaagaagcctttggggatgctcaaggnnnnncttctgcagaacagnnnntctccactctcc

SEQ ID NO: 1814 - DNA, 296 bp, Canis familiaris
  misc_feature (1)..(296): n = a or c or g or t
acctccggctgcagacgctgcccccagnnnagnnggcccagaagtacttccagatcttctccnnnnnnaaagacccgcnctggcaggacccctgtgaggacaaacgccacaaagacatnnggtccaaggagaagacatgtgaccgcttcccaaagctcctcatcattggcccccagaaaacaggcaccacggccctctacctgttcctgggcanncacccggacctnnnnagcaactaccccagctcagagacctttgaggngntccagttttttaatggccacaactatcacaaa

SEQ ID NO: 1815 - DNA, 620 bp, Canis familiaris
  misc_feature (1)..(620): n = a or c or g or t
gcttcacaggacagttatagacatcacatgagatcatgcacataagtacctcatactaaaaagcggctaacttaaaatcggagtcttattataaactcaggatggctaaagatagcccagtatctcccacagtgtttcagaaccggctgcttcttgacttcctgccctccatcctggagagtgagacttgagtttgaaagctggttctgcctcctacttgctacaccgcctctctgagtaccagcttccttctctctcaagtggagccggtacccctctgatggggttattgtagggagtagaagaaatagtgaatccagagtgaagccactgcctgcttttgttgagttttattggatcgcagccatgctcgtttacttatgcactctctctggctgcttttgtgttgagtagttgtcatagaacctatatggttggggcacctggatggctcagtccgttgggtgtctggctcttggtttcagctcaggctgagatcttgcagtcttgggatcaagtcctgtgtcagtctccatgctcagtgtagagtatgctttggattctttctccttccccctctccccctctgcccctcttcnnnnncatgcactagtgcatgg

SEQ ID NO: 1816 - DNA, 569 bp, Canis familiaris
  misc_feature (1)..(569): n = a or c or g or t
atgaatnncttgggcatggttcccgtggggctgcctnnacagcagcttgtgtccgactcaatctgtgtcccaggctttgatccaggcctcaacatgatgactgggatcacccccannnnnnnaatgataccaggcctggggctggtgccacccccgccgccaacagaagtggctgtcgtcaaagaaataatccactgcaaaagttgtactcttttccctcaaaatccaagagaacgacctcctgggtgtaagaccgtgtttgtcggaggattaccagaaaatgctactgaggaaattattcaagaagtctttgagcagtgcggtgatattacagcaattcggaaaagcaagaagaatttttgtcacattcgctttgcagaggaattcatggttgataaagccatttacctttctggttaccggatgcggctagggtccagcacggacaagaaggactcgggccgcctgcacgtggacttcgcgcaggccagggacgacttctacgagtgggagtgcaagcagcggatgcgtgcgcgcgaggagcggcaccggcgcaagctggaggagga

SEQ ID NO: 1817 - DNA, 515 bp, Canis familiaris
  misc_feature (1)..(515): n = a or c or g or t
atgatgtttgattgnnatagtaaaggtgatcaggtctctttcttaaagtcctaatgactaaaatgttaggnaaatttttatctctgaaatctttccttaaggatctattcctctagagacctagttatccacaaaggtcacacattttctacctgtgaattttgctgcatacagaaagtgccctttcctcaggaagttgctgtgtttcatttctttgaatggacttttacctagaatacatagcagctctgcgaagaaacagtttctaaaaatgggaacttctgcattaaaaaaaaaagtccccgtttttgtgccaactatgattagtgagggggaaaaatcatattctgtggagtacgtatggaagggtgtaaagattcttttgaaagttttattcacattgtagaacagcaattgacatttttacagtatttttttgtaaagcaaactattttgtgccttgaatttggtaaatgtgtattagtgaaatgttgttaaagtggacttctacctct

SEQ ID NO: 1818 - DNA, 331 bp, Canis familiaris
  misc_feature (1)..(331): n = a or c or g or t
cggttcctactggagcccacggtggccgccgcggcgccgganggccccgtgtggctctgctccaacggccgcctgccggctgcgccgccctcgggccctccgcggcccggcgagctggaggagctgcggcagcgcatcnannncncgcgggagcgcctccgccaggccctggtgcggcggggacagctgctggcccagctgggggacgagccccgcgacccgcccccgctgcacgccggctccgaggcaccggaagcggcgcggtgacccaccccggccctccctgcccggcgnacggacgctgcccnnnnnntgtcaacagtttattcta

SEQ ID NO: 1819 - DNA, 603 bp, Canis familiaris
  misc_feature (1)..(603): n = a or c or g or t
tnntcatgcatgtcatcagnagantagatttnngnttttgttttgaaaatgnnnnngnnnatnnatttccannnnagtttctnnnnctgaaaagacttaagtnnnntnnncaagtannatncttttaagatcattttaattttagttgagtgcagagggcttttataacaaacgtgaagaaattttggngnnnngtgatttttccagtattaaacatgcatgcgttgatcttgcagtttattttctcattgtgtgtgtacatagcttttctctgcagcacgacctctgtcgatggcgccccttggggcacagctacttaccagtcactgaatgtaccttcatccttacggctgctttggggttttcattaacaaaggttctacatatgttagcatatagtttctttgcacccactatttatgtctgaatcatttgtcacaggagagtgtgtgctgatgagattctaagtttgtgtgtttttaaatttttttgagcgagggaaggaaaagctgtatgcatttcattgccgactgcaggtttctttcagattacgttcatcggtctgtgtgtatacaatatgaagaatgatctgaagtaattgtg

SEQ ID NO: 1820 - DNA, 161 bp, Canis familiaris
tggacaggatccccacgatacataccagtggaatccatcccacctcacacagcctgggcgtggcgggggtgggggggcgggcgggcacacctgagcgcaggtgtgtgtgtgtgggcagtggtgcgtggggtcggcttcgccggcactggtgttccctgagt

SEQ ID NO: 1821 - DNA, 550 bp, Canis familiaris
  misc_feature (1)..(550): n = a or c or g or t
angactacagcgaggacttgcaagagatcaagaaggaactttcaaagactggcgaagagatctatgtggaggagtctaaagccagcaagaggctgacgaagagggtgcagcagatgatcgggcagatagatagcctgctctcacagctggagatggaccagaaggccggcaagttgggccctgccgccgagagcccacctgtgggagacaatgtcatcagcatcaatgagctcatcagtgccatgaagcaaatcaagcacattccagaaaacaagctcatgagtttggcctcagctctggatgaaaacaaggacggcaagatcaacattgatgacctcgtcaaggtgattgagctggtggacaaggaagatgtccacatctccaccagccaggtggctgagatcgtggccctgctggaaaaggaagagaaggtggaggagaaggagaaggcgaaggagaaggcggagaaggaggctgccgaagtaaagaattagggacccctacagcgccggctgccggccctgctgtgatagtgatggctgtgacgtga

SEQ ID NO: 1822 - DNA, 627 bp, Canis familiaris
  misc_feature (1)..(627): n = a or c or g or t
caattgaccaatctcagggtatgagcgtgtnnagcagggtcaggaagcagggctaggaagatgcacttgactttgtnaagtaattaacaaggtatatgattttgtgtttctcgaggacagacttttttaaggttgggacttattttcccacttgaaaagttgtaatatatatttaaagtgagtttcctgcttaagttgtgcctttcagtgtcgatgggtctaagaagcacagaaggtgatgacggcaatgagggctggtttattatcaaacctgaaaagctgtggtttctccagtaaacttttccttctactgatcatggagccattaataagagaattgtgtttattatgtaaaattgtacaatatttttttgctcgtttgatgttctatttttctaatagttttcttatagtttcttataattgtgatactagatttagattttgacacccactgcaaaccaggctatctctgctggcccctcctagtttttattttaaggacaagcatagatgtccatnnnnttttaaaaaatgtgaaactctgctctgtatcccattcttgctgacaatacagtatgttgacaactccctactatatgttgtnnaatcaaattattttgtggt

SEQ ID NO: 1823 - DNA, 518 bp, Canis familiaris
  misc_feature (1)..(518): n = a or c or g or t
gggcccagagagacacacacctacccctggccttgccagagtgggctnggagggcaccctgtctggcccactgtgggcagctttcactgtggggagaggaggagaggagatggtggtcctggcaacagaactctcaggcctatgtggcaggacttgaccagggcaggcttgaccaggaagctgccactgggtactgtacctgccctgaaaagctgggctccagactgcaggcaggttcccaccctgctcctgcctagaacaaggggactcagccctttgcctgccccgcctcgtgccagcatgaggtccttcctcaccctaccatgggatccatggtctatttattctccccagctcacccccaacacagacactgtcctgggcctggggcatcctctttccctcctctccctcaccctgtacttccttgtcccctttttatttattgggcagggggaggggtgagggcacaggcagaagagattccccgtgtcctggggtgggggggtgtcacagtt

SEQ ID NO: 1824 - DNA, 337 bp, Canis familiaris
  misc_feature (1)..(337): n = a or c or g or t
gcccccatcccccatgcnnatgccttctccctctgcctgtgtctcagcctgtttctctctctgtgtctctcatgaataaataaatnannnnnnnaaaaaaagaaatacataacgtnaacgagcagntnnntnnnagtaagtactctcagtgtgtgcttgtgccnncgccatccatctttataatgcttgatgcagcagaagtgaaactgagctgagtaacaccccatccccagcccttggcaggggcagtgcnnnntaactttcataaaattacatatataaaagttctggaagaatgatgacagcattaacaggnnnnnntcctgaagatttagga

SEQ ID NO: 1825 - DNA, 568 bp, Canis familiaris
  misc_feature (1)..(568): n = a or c or g or t
cgcccccccaacanctgggaccccaagggccccnnaccngagnncggggacggtggtgtgcgccccagggggcccgagacccgtcctgtgccagtgccgggagcctggggggctggggcccctcgcccgttgtgtgaggttggtttctctcgtcctccctggggatctctgtccccctcccactgtgtcaggcccccagcagaggcagagccgccgccggggcccccggccccccagaggtcccgaaccagcgcccgagcggcggtgcggggggcgccggcctcggcctccgcctcggcctctggtgatacttgtacattacacagtcctgatttcagacggttgaaaccttaacctattttaaagaagaatattatataaaaatactgtttttaaaccttttgtcatttgagatgcatgtattgttgtgcgcgctgggggacaggcgccagctcggcgcccagctcccgggccgaggccgcggttcggcgggcgggcggcaggcttcgctcagcgtggcggggccctgaccccttaatccagaggtagctgacggaagcggactttt

SEQ ID NO: 1826 - DNA, 489 bp, Canis familiaris
  misc_feature (1)..(489): n = a or c or g or t
ttcgcattggtgatgcctgcgattggggcgtnnagggaggtgtctggaatgttaaaggcagagatcaccctcagggcatcatccttcaccgagtcgcacagatccagcaactgaaaaacacaacgcaaagtgacaggttcttcttcaggaagttggatgaactctgctggacaagtcttcaggccttccctcttcctctgtccataccttaagtcaccaaacacaattcaaatcccttcagaagagcaacttttgactgtcaaataatggtcagtgaaaattaccacaatcaaggaattcaatcttcagctactatagactttcaaactcactgaattctcagaggctgtgaccttacttctttcccatttgtttacctttcctaaagagtcaccaacccctgaagacaaagggtcaggatggtaggtctgtatcaggtaatctgccaccttagctccaaatgcttggctagtggtaaagataaagaaa

SEQ ID NO: 1827 - DNA, 553 bp, Canis familiaris
  misc_feature (1)..(553): n = a or c or g or t
agctgcgcgccgccgagcagtacacgnngcaggccacctaccacggcaatgtgacgctgctgcgcgncaagacgggcagcatgtacggcgagggcctgggcgccgactacaacctgtcccaggtgtgcgatggcaaggtgtccgtgcacgtgatcgagggtgaccaccgcacgctgctggagggcagcggcctagagtccatcctcagcatcatccacagctccctggccgagccgcgcgtcagcgtgcgggagggctagccacgccgcagcccaggggtgcccgggggtcctgccggtgggacctctgcccgcgccctgcgtgccaccgccgccgcctcggagacctgctctggtctgtgaagagtcggccgggcggagcctggtgtgccgcgtgggtccgttcctcggttctccattcagttctatttattgcgtcgctggggagacgccggggcctcgtccacccggtaaaggccggcggcgcaggaggcccggcccagggaccccatgatnnnnngccctgtggaaaggnnnagccccgggcgccgggc

SEQ ID NO: 1828 - DNA, 524 bp, Canis familiaris
  misc_feature (1)..(524): n = a or c or g or t
cttcctgacacctggggtnngncgggtggggtcccaggtggaacggggccatcccttggnnnctgagcatccagagactgggattcctgccgtattgaggggagcttgatgaaagcagacagaaaggtgccatagagcatatcttcagcattcaaagaaaggaacttccagctggtgatatttttctaataaatgtggttataagcttctgtgcctttgtatcaagttggcaaacgtctgcttcgtaatttgaaggctaacacgtaagctctatactcaagtatgaagcatttatattttcattttttttacaggaagatacactaaatttgttataataaaactaggaagtgctattttttctttttttaaaaccagttaaggggtgcctgggtggctcagttggttacatgtctgtctttggctcaggtcataagcccagggtcctgggatcgagccccacatcaggctccctgctcagcagggagtctgcttctccctctgcccactgttcccctgcttat

SEQ ID NO: 1829 - DNA, 651 bp, Canis familiaris
  misc_feature (1)..(651): n = a or c or g or t
tgctnnggnttaaaagccatatattaantacatcttttatcattattgcttacttcctggaatagaatcatttctggctttctcaaagccacatattaaccaatgactctttgtgttctgcattttctcattttagcctttgagataattatcagacattttgcattttttaaaaatctcattttataaagaattctcttattggctatgtagaattaccacctaccaagtagaagaatttttgtacttatgaacactgccattttcgcagagctgtcttgttgagtagaataacactttgatttaaagcttgcagtaaaaatgccaaagcttgtggtaccttggaagcagtttaatctttactgtgctgtgtagaaatgtgtagttaatatgtcttactatataacttgctcattatgtagatgccacttgtgtgtttttattccattcttcattttaatttatctagtagtgatgttctgtactttctgatcaagcaggttcatggtgaaaattaaactttcagacttcttttaaggaattttgaaaaagtaatagttaagtcctatttcataagtggtaaaagtttaacatttggaaaaattttgttcctcatactagtaattgggtgaaaaagataaattatgtcaa

SEQ ID NO: 1830 - DNA, 583 bp, Canis familiaris
  misc_feature (1)..(583): n = a or c or g or t
agaaaggctnngcgaagacccttannacacggagaacggnnnnggccagggcnntagctcaggccctggngcctccnntgaggctcagggaaaggccagtgtgaaccgaggggctcaggagaacgggaccggnnaggccacgtccagaaacggccattcagcaagacaacacatggtggctgatacagaattgtgactctggggggggagtaaggctgggcagggtctggggaaggggcccctcccagcacctgaccacatgctgcctctgtgctggagctgccaccacttacattctagcctttcctgctgcacacaccctccgaggccattcctggggccctgcactgcaccaggccgaggggttctctccatcctggggcccgggaggtaacccctaccttttatacattcatctcactaagcctagagtctggtctcctttgagaaaagacatgagggagacgtgccaaagtatagagaagctaccagagttgggggggtggggggtgatgatctcacatcattcacgtgtgggcttcttccctcttcctcctctctgccttattaaaagaacttccag

SEQ ID NO: 1831 - DNA, 576 bp, Canis familiaris
  misc_feature (1)..(576): n = a or c or g or t
tcatctgccatnngatatgtnctctaaaaaccatcatgnnnttatgtttgatatgttctcatcnnnnnttnnntatgttatnnnaactgcttctttactaattnnnctgccttaaatattgttctgtcccttcacatttcctacttagttttatttcctcacactgctgcccaggagatttttctaaaccccaactctgatcatatcttcttgcttaaaacccataatcattaggatgaattccagattagtttgtatggcagacaaaatcccttagtacttgatccctgctcatctttccctggctttgtcattccaccattcctaacttagaactatgccaaccatactgaactatgagcagttccctaaatgtgttgtgttttttccattcactgctatgactttgtacactgctccctctcnggactgccttcatccttcaggatttagttcagacagtccctttgccagggattcttccttggccttccaagttatactaggtaccccttctttgggctcgtttagtctttggttagtatcannnnnnttacattgtctttttcttgctta

SEQ ID NO: 1832 - DNA, 564 bp, Canis familiaris
  misc_feature (1)..(564): n = a or c or g or t
ctcggcccccctgctgcagcctccgccgccannaggtcccgggagaggggacaggccccctggggcggcgggggcggcggcggccccctcggcgccctcgtgggtnnagcccagcgggaagggggcggcgccctccctggcctcgcagaccgccgcccaggtgaccgtccaggccctgatccggagcgactggcacccgcgccgcggggagagggcggccggcgcgcggcgggtcccacgcgcgctccccgcggatgccccgcgcgagccccggccgggccggaggatgttcagcgcctcggcctcgcagggcgctcagggcgcggccagggcggcgctcgggggctactctcaagcctacgggaccgtctgccgctcggcgctgggccgcctgcccctgctccccgggccccgcgcctaggccgcccttccagctcccacccggctcttctgcgcaaccccggatttgcccctaggtcccggtgctcctcgcccccttttgcctggccgcattcttgggattcctggagcttgtccgggcctcctgggggggagttgagcttc

SEQ ID NO: 1833 - DNA, 336 bp, Canis familiaris
  misc_feature (1)..(336): n = a or c or g or t
caagganngaaattgctcngangcatcnnnnnnnnnatgcagttccaatnnnnacacacaagccagaccctggcctgtcccagcacacaagttccaggccacccgagccccagaaaggcccttccaggctctaccaggatcccagaggaagttatggcagtgatgctgaagaggnagaataccgccagcagctgtnnnnnnnntngnnnnnnngctattacagccagccttcccggtaccgggacacggaattatagatgcctgatagtcggcgtgtccgtctccccactgccaccacctcggagcagcgctcccactgagcnngcgacggttctt

SEQ ID NO: 1834 - DNA, 581 bp, Canis familiaris
  misc_feature (1)..(581): n = a or c or g or t
gnctcctgtcccctcaactcccagctgccgtggnncatctgctctgtgcagagctgtgtggccttccctaccttcgccagccaggggctcgggtggactccccgcccctcccgtcgccaaacgaggaaggcagcttttgcttgttcctgcctcaggatggggctcctgggagagctgacagccccaggcctcccagcgtcctgatgtgtcctctcgccccacccgaggccatccacctagcctacccacctggcctcagctgcagcagactgcaaaccataaccactagctctgcatggtctataatccagatgtgcagggcccttcccagcggagaccgcctcctggggctgggcacgcccagcccccttgtgcagaagccagtgcccctcgcctccgcagctgccccccagccctgccccacctgccaacgaggagccacctggactgaggggtagccaggtgttcggtccctcgctccctccttttttatattggtgattttaaaggggactcttcaggcactggtgtaccagtaatgggggtgccagaagcannnnngtgtgggatgggggtgggat

SEQ ID NO: 1835 - DNA, 592 bp, Canis familiaris
  misc_feature (1)..(592): n = a or c or g or t
agaaataagatgatactntgcctatttaggataagtttctgtccatctctgcactaaacaattttagtgttaccaagttctgaagtgctatagagaaactgcttagaggaggaaggtngaagtgtatttatgtcgatgtctgagcacacatggaagccttgtggcaccaggacttggccctgttcttaagagtgtctgtccattctgtacctgtcatgctttgagttccagctggcctgcaatgaggccagtagctacttggcgtgctggctgcaggattaagccaattcttatgcaactgattcagtccgtgatggccgtttcttctaagaaaattttttgtgtgggggagggtatgggtgttgggatgggggtgaaattgaagtttaaattagaataagatgatgtggtctgcttgctctctgtttagacaggctttaagaccaattggatttacttggaggtcaggccagagagtgtgataattgatgacttgtttgcagacaagcatttatccaggttataatatccacattggtttgttaaagctccaggtcacgttcttacactaagagaaacattaaataaacag

SEQ ID NO: 1836 - DNA, 607 bp, Canis familiaris
  misc_feature (1)..(607): n = a or c or g or t
tgctcctttgatgccagcggcancctgaccccagagagggcagcgctcccctacttcccccgccggtacggggcccatgnnagcctccgctacaacccccgagagcgccagctctacgcctgggatgacggctaccagattgtctataagctggagatgcgaaggaaagaggaagaagtctgaggacccagctctgggtttcggatctctgtcacctccgcacatttctacccccatcacgtttcctgctcctcgttgtccagatgtggcaggccgccgctcccgccgcatctgcagccagtgaaagccaccttctcaagtcccctcgtttcctgtgggactttagatcttgagagctcctttcccagcggaaagagggaaaacctcactcccctcctgccccagggcagggcctttcaggccagtcggaggtctcgcagatccacagctcnggcccttacaggtgggcaaccccagcaaaggggcagcagaatattccctgcctcagtgttagtagggggcggggagagcgagttccggaggagggaaccctcacctctggctgcccctgaagtgcccggagaacctgggcttcctgcgcatcatt

SEQ ID NO: 1837 - DNA, 570 bp, Canis familiaris
  misc_feature (1)..(570): n = a or c or g or t
cannnactactaaaangaaaaattgtgttaccttttttaaatttcctgttaagttccccttccataatttttatgttcttgtgagggaaaaaagtaaaacctgtttaatcttatttgactttatgacattgctttcaataagcaaatgttaaatgtgttaagacttgacttgtgtactagtgttgtaatttttcaagttaaaagtgtccctaaaggccacttcctatatctgatttttcccagtaaatgaggcaaagcaattctaagaccttccacaaacatctagccttctaaaatggagaggtgaatccttctgcctatacaaacaagctagctattagagggtggtcggggtatgctactcttaggatttcagagtgtcttcaaactgaaatctcaatgttctcagtaatgaaaaacctgagatcagatgcttatgtaaggaaagtgctattcacccagtaaatccaaaaaagcaaatggataatgctggccatattttgcctttctgacatttccttgggaatctacaagaacctcccctatcccctcccccaataagaccattta

SEQ ID NO: 1838 - DNA, 573 bp, Canis familiaris
  misc_feature (1)..(573): n = a or c or g or t
gtaatgctggcagcatcactgagaggtnntcannagntgctggtggcatttgtacagnnnatgtttgggggggtaagaggatggcttatttgtggaatgaacctagaaaggaccacatgggatcagatgaagagctctgtttggggcctttggtgggagaacagagcagagannngaagggtgtggtgagcacagcaagctctccttttagaaaggcctgcgagtaggaattgagctagctcttttagaaagttagttcagaaatgacagtcttgccaaattcctagtgaagaagcagttcagtgttaccatatgcctcttgtacttcttgaaatgtttctaggggacagcattgaaaaacccccttcccccatgtctcctctacaagtgaagattgagggagcagctttgattcttctcaactgtcccctgcatggggagatacactaacccccagaaatgaccgctaagcctcttgccttgtcttcagtagctaatgatcagagagattttttttttaaattaccatgatcccaaggttccatcctgaaatttatttttctttgtatgaat

SEQ ID NO: 1839 - DNA, 624 bp, Canis familiaris
  misc_feature (1)..(624): n = a or c or g or t
tcacattttccaaacntgtccatctgccaactattntgactgtagngccatgtccattnnagnccgtnctcaatcagctcgcacttacttnnagagacatatgtctgggtttatggagtgcaatttgaatgaactggttaaacatggtctgcgtgccttacgagagacacttcctgcagaacaggacctaactacaaagaatgtttccattggaattgttggtaaagacttggagtttacgatttatgatgatgatgatgtatctccgttcctggaaggtcttgaagaaagaccacagagaaaggcacagcctgctcaacctgctgatgaacctgcagaaaaggctgatgaaccaatggagcattaagtcacaaaccagtctatatgtgtattatcaaatatgtaagaatgcaggagcctttactgatgacagtaatctatactttgaaccaaaagatgcagcgtggtcttctggtatgttttaggaatcggtccagatgtgtttttcccaagtaacttgtctgaaccatataatggtgtgcatttttctttgagagggtctatataatcattttctagaaagtatagttatctgtactaatgtttttatatgaagaacatagt

SEQ ID NO: 1840 - DNA, 526 bp, Canis familiaris
  misc_feature (1)..(526): n = a or c or g or t
gccatcgagggctctgtcacagcacanngcgtcaaagtccggccacccctcgccagcttccgcgacagtgccaccagcagcagcgacacagaaaccacggaggtgcatgcactctgggggccccgctcccatcatggcctcccccgggaggggagcncttctgacagcgatgacaagtgccaatgaacccctcaatgggtggcctgagatgacagtggccatggctgttggcccatcctgaagctctcctattccttctgccttgggaaaggaggcagctacactaaaggctggagccgtagccccccttccaggcctggggtgctaagttcttcctcctggttcatcctacctggaatctgacccagtgcccacctgcagcaagtattccatgggcaggaagatcagcatccccctggcaggataggggtggagttacttgacccctgagccccctctgagggggaaaggggtagaactaagatgggtttatactggaacctcctccaatgaccagatgtatata

SEQ ID NO: 1841 - DNA, 417 bp, Canis familiaris
  misc_feature (1)..(417): n = a or c or g or t
tcagaatcaccnnngcctgtctcatagcccccaacctctccannnaaacaagactccccatgcctgtgttcttagtcctgggccttaggcaggaggtagctcacagcctcattctctgtccactttggggctgaaaggttgaaacctcaaacttgnnnacagaaataaaggctagaatgctgaggacttgagaaagcaagaatgggaatgtggagagtcccagagnnnnnnngatgagagagtttnngatctagatcttgccnnnctcagagagccacagacgacagtctcattgccaattcttcttcaattccttatccaagaatgaatgatttctgaccntggcagtaaacacatatncgtgttcctataacgtttgnnntgcagggcacaggacaaatctctgttcttcttaag

SEQ ID NO: 1842 - DNA, 659 bp, Canis familiaris
  misc_feature (1)..(659): n = a or c or g or t
aagtngtatttttgtcacatttctgtatttaggaaaagtgnannngcagaaaaattactgatttttttccatttttgcttnannnncnngcctatttttnnaagtaagaatgagtaagtttggtttttacaaatatttgttcctccttgacaaaagtagctctgtatggatcataatttaatatgattttatcatgatagttccatcttcttggttatatttatcttagcatgagcttttcacagcaagatttctatattttgtaacataggtaaaattttaaagcatcaaaaactgtaaatctaaatttttttttctgaaatccaaccacaatgtcttttcctctgattgtctaagatgatccatgtacttactcactagtcttgtttttgagtgaacagaagagaattactgtgtgataaatgatctggaatgaggagggcagtgcaattgttgtcctggacagtcccaagggctacgcggatggacttcgttggcacaccgggggggggttaaaatggttctgctgggtccctgctattattgttcctcccaactgtacagatttgtttgttgtagcttatgtacttcttgatactgtcaaaaaattatctgaaaatggttttattttgtgaagtgaataatactttgtaatttat

SEQ ID NO: 1843 - DNA, 606 bp, Canis familiaris
aagaaatcgttaacagcacgtgtttacgttttatcctgaatcagacacgtttgaacaattcacagctacaggaaatctagaacaaaatcaaatattttatcacatcaggtcgaaaagttggagaggactttgcatcttattgaaaagaatttttcaaaaatgtttctgtacaaagagacggcgccacacgagctgcccacagacgccaggcgcagccagtccccacgcaggccccggcggcgtctgccctcctggcctggcctccctgggtgctgggctggccgagggagagccgggggcgccctccacaccccggtctgtgcgggccgtccacgtgagcgctggtgtcgggttcctctaagtgaaaaacaggcagagacgctaagggtgcgggctcttggagggcgtcgctccgtgacctgaagatgcctcagatcagtttctttagaacccgtgtctgcagggacagccaacggctaacgtttggggaaaaaaatttcaactcaaacaactaaagtaactgaactacgggctggcaggtcttagaggaatcaggttgcaacttctccttgggatcctctgagatcaacattcccttctctcaaa

SEQ ID NO: 1844 - DNA, 617 bp, Canis familiaris
  misc_feature (1)..(617): n = a or c or g or t
tcactgagctgtnacaatgcatcaaagccacagctgtctcttgagtcaagtnggaagtaagagaaagaacagtctcataggnngcgatctggacaggaagatcagagcttgcaagccaaggctcttagagcactcatgctcctgatattttnnaggcaggccgagagagcttcaagaagcctggctgtagatgtggggcagggtcagttgtgacctttggggaaacaggcctcagcctctcctgagcagcgttgttgtaaacaggttggaaggcctcgtcccagcctctgcgtgagtgtggctcctgtgcacactgtggctgacaggcatcctgctggtccagtggtccagtcccagagggagtgctaaggggcaggcactgtgactcccagaccagttcttgggccacatggtcaggatgaggggcagcaacccagtggggatgtgtctctcagcccaaatgtcagtggttgaccagaagcctgggggaggcaagagcctgtactgccaggtgtcttgacaagccagggaagtctttggaaatttgtaaatgaacagtccagtatccccacagctcactttaagcatctgttttgggggaaatatgatttaaaaat

SEQ ID NO: 1845 - DNA, 562 bp, Canis familiaris
  misc_feature (1)..(562): n = a or c or g or t
taaaatgccacantgttgattttcataagtcaannngtnctttgggtacccatcctcgcttatttgaatggatattgaactattattcttcagagagagaagggaatccaaaagtagtgtgtacatctaaacctcctatctatcttcagcatcaaggtcatagtcgaacagttgttggaattgaagagagaaaaaatcgaacattatgtttactaatatttgatcctggatgtccttctcgggaaatgcagaaactattaaagcaagatacagaggctagcaatctcaaacaacttcggaaatttgtgggaaatttaaaacataagcagtaccagatagtggcagtagagggtgttctttcttctgaggagaaaattgccaggagacaagcttctcaagtcttcacagctgagaagattccttgaagaattaagcatttcagtgatcatgggattttactttcttttccaaattcagatactataaactccctcatagtgcttacgaatctgaattctctaaatactcaacttataatttctgaaacatccatatcatacct

SEQ ID NO: 1846 - DNA, 390 bp, Canis familiaris
  misc_feature (1)..(390): n = a or c or g or t
cnnnnncccgatgnnncaaannnnatnnngcttccnnntggnnnnnnnnnacgtgtgagtgannnnngtgaagagactgtgtttnnnnatggnnnnnnnnnnnnngtnnnaannnannnnnncnnnnnnnncnnnnncnnnnntgggcaaannnnnattnnnncnnnngggtnnnngannnnnnannnnnccgatgnnnntgtcaagattgtgnnntgnnnggnnnancnnnngacccgctatgcatccgggtgcgtgaagatcagatatgagcctggaaacatggnnntggatnnnnnnnnncgcnnnnnaaatannnagcatgttgnnnnnnagtgggtttttacactcaacgtnnngaatcccccannnnnnnggaannnnaatctt

SEQ ID NO: 1847 - DNA, 546 bp, Canis familiaris
  misc_feature (1)..(546): n = a or c or g or t
gtgnctnnagctatacaaagtggtgcaggnacancagcagcttgagtcttacaagaacagttttatgaacttggccctgcccttcttcagcttctctgaaccacttgccccaccccgtcaccagtactataaccaagagtggacattgtgggatcgctttgaggtacgggggctgcagcctaatggtgaagagatgaccctcagacagttccttgactactttaagaaagagcacaaattagagattaccatgctgtcccaaggtatatccatgctgtactcctttttcatgccagctaccaaactcagggaacgattggatcagccgatgacagaaattgtgagccatatgtcaaagcgaaagctgggccaccatgtacgggcactggtccttgagctgtgctgcaatgatgagagcggtgaggatgtcgaggttccctatgtacaatataccttccgctgatttcccagtctctaaacagtcccttctagttgtggaaaaacaagtgcctaaccttatatccttttgagaacttttctttgcta

SEQ ID NO: 1848 - DNA, 349 bp, Canis familiaris
  misc_feature (1)..(349): n = a or c or g or t
ccctgtgcttcaagcccagcggcggatattttatccagtnngccactccggaggcctgtgcttcagttccccagnnaacctgtgtatttgtcgctgtctccagggcttttatttggcctcaccagaccatcaccgacccttggctaagtctgctagggcggagctgcacatnnngtacttaaatatctacggctgtagccaccacctcatgtattgtgaatcaggggaagttgtaatgaggcaaggctgccaggctctagttgtggtcctgaacctatagatgtgtggtcttgggatggtcattcactggtgtaagtctcagcgcttnnnnntgtaaactgcctgatgt

SEQ ID NO: 1849 - DNA, 588 bp, Canis familiaris
  misc_feature (1)..(588): n = a or c or g or t
ttgaccagngagggtacaatgcccaggagtactatgaccgaattnntgagctcnnnnagatcatngagcagctgagcagcggcttcttctcccccaaacagccagacttgttcaaggacattgtcaacatgctcatgcatcatgaccggtttaaagtgtttgcagattatgaagaatacattaaatgccaggagaaagtcagtgccttgtacaagaacccaagagagtggacgaggatggtgatccggaacatccacatcaggcaagttctccagcgacagaaccattgcccagtacgcccgggagatctggggcatagagccttcacgcaagcgcctgccagccccggatgagaccatctgagcctccagaccagaccccaaactaacctctgagtttgtttgcaatccgttgtgccagcccagcgcctcatccacggcggggtactggagttccatctctcatcctctccctggaaccccccacttccccccccagcctcaagatcccagtgtccagcgtgactaaggacactgctcccatcctgccctctggctccccgctccctcctatttatgnnnnngacca

SEQ ID NO: 1850 - DNA, 586 bp, Canis familiaris
  misc_feature (1)..(586): n = a or c or g or t
attcaaaccgggatcgttgggcntgcggtcggttnnncgcagtcgagtcgttgcttcggnctgacgcnnacgtgtggcccgctgcgcccgctcttcgcgccccgtcgctcccgccgcccgcacgatggcccacaagcagatctactactcggacaagtacttcgacgagcactacgagtaccggcatgtcatgttacccagagaactttccaaacaagtaccgaaaacccatctgatgtctgaagaggagtggaggagacttggtgtccaacagagtctaggctgggttcattacatgattcatgagccagaaccacatattcttctctttagacgacctcttccaaaagagcaacaaaaatgaagtctttctggggatcgtcaaatctttttcaaatttaatgtatatgtgtatataagggtagtattcagtgaatacttaaaatgtacaaattgttgatccatacctgtgcatgagctgtattcttcacagcaacagagctcagttaaatgcaactgcaagtaggttactataagatgttcaagataaatttcttctagtcagtttttctcttaatataagtgc

SEQ ID NO: 1851 - DNA, 654 bp, Canis familiaris
  misc_feature (1)..(654): n = a or c or g or t
gccagancttannctaggtgacggnnnngagagagtaaattggacatggnctggtttagtccgnnnnncagatacctacgctaatgacagcagagctgctctgtccactagaatagccactagctgcgtgcagctctgagcacttgaaaggtagctagtatgaccgagggactgatttttaaatgttaattttactttgatgtgaaataaaaagttgctataatacacagcacggggcatatagtcgaaaacattctgttaactttgtaaggtgacaagtggtaggtaattggactcattgtggtgacataatcattttgcagcgtgcatgaatgtcaaatccctactgtgtacacccgaaactagtccactgtgtgccaatgaccaagcaagcaagaaagggcccaagtcttttttaataagttgatatttgatgcatttattttaaaacttacaagtatatttgtaatgatgtgggtacggggatctatttttttcatctgtaacttttatgacagacgtaaatgcagaccaattattttttatgacagcgtagcacctaatgtaaatatgctataaatgtgaaacaaattggattttgaagaattaatctaaaaaattgtattatttttttttgtgttgatttcatgttga

SEQ ID NO: 1852 - DNA, 98 bp, Canis familiaris
  misc_feature (1)..(98): n = a or c or g or t
ggatggaccagagcggaggggcgactggccggagcagcgtctcccagggctgccctcccctcccgtgcgcacgtggacagctcnnnnnnggctccgtg

SEQ ID NO: 1853 - DNA, 663 bp, Canis familiaris
  misc_feature (1)..(663): n = a or c or g or t
gtnnacntggccaagctgggnntgcggcacatnnngcccannntcaacgccacagtcaccatttaccagatnnnntcttccaaagactccacaggtgcagcagatcccacngagccccacattgtaggaatccagactcctgatcagcaggctgccctggcccaccacaacccagcccggcctatcttcgtcgagggccccttttccctttggctccgagacaaatgtgtctattatcacatcctcagagctgacttgctgcctcctgaggagagggaagtggaggaaattccggaggaatggaatctctactacccaatgcagctagacctggactacggaaggagtggctgggatgactacgagtttgacatccatgaagtggaggaaggccctgtcttcgccatatgcatggcgggtgcccacgaccaagccacgctggccaagtggatccagggcttacaggagaccaacccagccctggcccagatccctgtggtcttccgcctggcagggtccaccggggagctcctggggtcatcctcggggctggaggatccgcccccgcccccaccagagggccaggaagaagaggaagacaatcagcagcggcagcagcagggccaaagctgagcttgggctgtcaccagcacaagctgtgga

SEQ ID NO: 1854 - DNA, 472 bp, Canis familiaris
  misc_feature (1)..(472): n = a or c or g or t
cctggcnncttttcgtttttcntcattttctttnngaagatttttnnaatttagggtcngnnnngcatgtannacaaccagaannnantgtttggaacctaaatgtgtttnnnctnnngcatcaaaggaacatttgcctcantggttgataacctttgatgaatgagataagtacaagtaacacaaattgtgagttacagtagctgatttcaatttcaaagtgcctattctataagttttattttgaattgttanggtgttaattttattatggtttgtcattctggttaatgtgaaaggattatcatcaagttcactttgcctttgagacatattaagaaatgttttacatttgacaggctaatgttgcaactgactagtttgtaaaataaatcattcctgtgtataaagcagcaaaacataataatggactgtttggtctttttttttttttttttttttaaaggaaatt

SEQ ID NO: 1855 - DNA, 620 bp, Canis familiaris
  misc_feature (1)..(620): n = a or c or g or t
gannngtgtgatggccccctctcngtctcttcattcatcctcccccacagaccagacaatgaagagagctgcantagctcagaggatgaatcgcaatnnnnnnnnnaactcataaagatgcacacagctcgggtgcgggatatcgaacagctcaccagtctgnnnnnnntccgcaagacaagccgcagctatccagaaattctgacactaaagacatacctgcatacgtatgagagtgagatctaactatctgatcatctgcagtgcagtcttatcaactggtgtatatttttatattgtttttgtatttattaatttgaaaccaggacattaaaaaaatgttagtattttaatcctgtaccaaatctgacacattactcctgaatgactccactgtttttctctaatgcttgatttaggtagtcttgtgttctgagtagagcttgtaataaatactgcagcttgcatttttagtggaagcttctaaatggtgctgcaaatttgatatttgcattgaggaaatattaattttccaatgcacagttgccacatttagtcctgtactgtatcgaaatactgattttgtaaagttgcattcatttactgttaattatgacaga

SEQ ID NO: 1856 - DNA, 534 bp, Canis familiaris
  misc_feature (1)..(534): n = a or c or g or t
gacaagannnnnaagaatcatcatcaagacaatcagaagnngaatatgannaacaagaattgctcaagcagccatccttggggcaagcatcccaagaacaggtgcccaaggaacaagaatccctggaacagccatccttgggacaagaagagatgacccagggagaaaaaaactaaacaacaaaaaccatgaaaacaaaatatcagccacgttgtaaagaacaacagtcannagctagaaaggaccagaaggcaaatgannnnnnnnttagacattttttttcacattatactgaagagatggccngngagtggataccaataaactaaaaaaaatcacctttatatctacttgacatcagtttttcttcaatcatcgtgcttccatctcacatatggacattttaacagcgagaaaatcacatctggattgaaataagcccatacactctgtcttctcaaaagctaaagaggaagattttccaatggattcnngantgttctaatctttnnnnngtggtatttctttttagta

SEQ ID NO: 1857 - DNA, 525 bp, Canis familiaris
  misc_feature (1)..(525): n = a or c or g or t
anntcattcaacaatgattcaaataatgtattatatnaaactgtagaggctgataagttctaagaaatatttatacctttttatatggaagataatttatatcatccatgtttagagctttttaaacatcaactttcctttctaggtaatgtggctgtgcaatatttttttaattttatctttttacttttctattactttttcatatattttgctacataagtatttcagtgaaactttaagcccatatgtatatctgattgtttattattggctttccacaatccttacatcagacacatcctgttagaggccatttattgcaagaatagcatgggattttaaattttctagtattggggtattatttagttaattatacattttacttttaacattttactatgttttaactggaaataaaattatggctgctaaagtatattttttgaaatcaactctagccctgtcaaaccaggtagttcataaatnacaatgttataaaagttttctataaaagtcatt

SEQ ID NO: 1858 - DNA, 532 bp, Canis familiaris
gacctgtgctctctgctctgtggagcaggccttgtatgggacagggctgggcctgctcactgtgctcctcggggaagctcctttctcagaccactgaggaggtgtgaagcccgtattatcccaaacatactcagagccacacggcaggcagcacagacgtgcatacaggtgcttctggctgtagtcgtgccaagaaaggggaacatttatgggcagccagagacagctccagggactctacgccctttactcagggctggatgctgcgggtctgatggaggagacccctgggggccagtcactgcctcagaaccttgtgtgggccccccaaatggcggctgcaccccaccccatgccaaccagtgtcgccaagacatcttcctcctttgacccagggtttggcacctggccacactcctgcagcaaccccaccccatccatggccagactcgggagctgggcttccccagagccgccagggacacaagcaccagctgcgtccgaatccctcaaaatgtattcacttcattgc

SEQ ID NO: 1859 - DNA, 513 bp, Canis familiaris
  misc_feature (1)..(513): n = a or c or g or t
agcccngcagccagctccctgctcagcaggaatctacttctccctttcactgtctatacacgtttgctctctctctctctcaaataaataaaaatttaaaaagaaaaacaaagtcccccattgtcctcttaggttggacttttcacagaaattggaccaatgtcctgcttcatttcccgacattccatcccatcagagatggagtttgaccccaactccaacccaccatgttataagacaatggatgaggacattgtgattcagcaggatgatgagatccgcttgaagattgtggggacccgtgtggacaagaatgacatttttgctattggctctctgatggacgattacttggggcttgtgagctgagcaccggggcctcctgctctgtttggtcctcatctaggagctgtgacggtcatgctccgcatattgtccagaagcctagtctggttgctgtggggaggcagagaaggttccttgtccacagaaaatatctcgttcttcttgatg

SEQ ID NO: 1860 - DNA, 477 bp, Canis familiaris
  misc_feature (1)..(477): n = a or c or g or t
gtttctccaaagttgtcgcnanncaattcaggaaattattcttcaggggccagtagtgcttcagcaagtggntcttcagtgaccattccacagaggatccaccagatggcagccagctatgttcaagttacatctaactttctctatgccacggaaatttgggaccaagctgaacagctttccaaagagcagaaagaattctttgctgaactggataaagtgatgggccctctcatctttaatgcgagcatcatgacagacctagttcgatacacccggcagggactgcactggcttcgccaggatgccaagttgatatcttgaactgaacacattctcgttgcctctgattttctccacaacactgtgtcacatcacgaaggaaaactgccataacatgccacctagtcgacactaagaatgaggaatggttttctcctccctggttcatgtgttcttgttatttatgacccaaag

SEQ ID NO: 1861 - DNA, 520 bp, Canis familiaris
  misc_feature (1)..(520): n = a or c or g or t
ctggctgngagtgcgcatgcnnnctcagaaggggggcactccagaggacatttgttcccgtgttctgctgactgaggacatacaggggtggataagcgggttcttgcaggcccatctggctattagatgcgctggaggcggtggaggcagcatccttccagcctcggccaagtgcccaggtcccgtggacagaaactgggttaaagattctttgcctgcctccctccccgtggctgttgggctgacctgagttcctccctcagtgaaggacagagctgctgggccgctactcagagcctccacagcctttggtggctcagccagggagcagtgggcacagacgcaggatgactaacccccatgtgctgcacttgtcaagcttcgttttagggcacccccaagtcacagtctctttaggaaaaatgggaaactcggtcagtgataaatagtaatgaaagatgttgagagggaggttcttgtggattccatttattcctgcttgcaaaactagagatggcta

SEQ ID NO: 1862 - DNA, 170 bp, Canis familiaris
aagtttcatagattttttgaaaaaggtcaacatcatcgcttcagacattttctttatttctgcttttgagaaaaagtccccaaacttcatattttggattctgaatcctccagtaatagaagatggaggcagctactgaagtggtcatccatttctttataagaagctca

SEQ ID NO: 1863 - DNA, 595 bp, Canis familiaris
  misc_feature (1)..(595): n = a or c or g or t
cccccatccntcgccactagggataaactttgggggaggatgnnagcgcnnannnnnngtccgccctcggtactatgaccgcgtcggcctggcgccatcctactaaccgaacacggaggactgcaccagggcctccccacagccgatgccggaagcggaggggcgggctccgctgagcgccctcaagtacttccggcccttctaggccgaggactttgttgtttggcaactcggagttcctccgagacggatgggggccgggggccggggcccgagacccgagaccttctccgtcctcctcactgtggctggcattcccatacgcattctagcgctgtcgtctggtcactgtcgtgtcctttggatgaacctctctagctgcccttcagcaaaggaatagtaaaattacccgagcctccacccagtgcaatactcgtagctgtaaaatgggaatgctctccaagatgtattgtgaggtgagaaaagcaggatgctgaaaagtgtgagctatgctaccatctgcaaaaaggggaggagatggtttgtattggatgacctcatggccctgtatttactcattaaaataggggttacc

SEQ ID NO: 1864 - DNA, 555 bp, Canis familiaris
  misc_feature (1)..(555): n = a or c or g or t
cactcaggnngctggcagtctactacaacccagaagctgtnnggcgacaggaaaacgaaagaacttacattgatgaactcattttcaaatatctcatcaacgggtcctgaacattcaagccctgaatggtaacccacaacaactagcaggagcccagcaaggaaagcaacagcacagtatgcctgtctacaccacagaggggatttttgagcgaggccttgcctcctttctaaatctttccagaggtgtcctgattatttctagagtttacccccaaagtaggggttcttcaccgtatagaaatcaggggtatctgtgaacctgatggaggaaaatcttacatctttattttcactaatataactgaaatttcactaatataactaaaatttagctttactccccaataggaatactggcaacaaatcacaatagtaaaagcagtgcctgttaccttttaccttcccaccaatacaaattagttactttttatgttccattacagtttttgcaggcatcttaagatgctgttcacgtttggcactactttgactt

SEQ ID NO: 1865 - DNA, 374 bp, Canis familiaris
  misc_feature (1)..(374): n = a or c or g or t
acgtccnctatgctnnnggtggctctgnnnnnnnnntttggcgcctgttacatcctctatctccgcacattnnagtccaagtttgtgctgtttggccgagaggtgagcccagcccatcagtatgcnnnnnccgggggcgtctcctttcccttcttctggctggctggtgcagggtcngctgtnnnnngggtnntgngagccaccctnntggtcattggctcccatgccgccttccaccagatggnagctgtggatggggaanagctgcagatggagcctgtgtgaggacctgcgggcctnnggaatcgnctgcctcatccctgttcccccctgcnccgcttggccccgaggccnnggccaaaggcctccttccc

SEQ ID NO: 1866 - DNA, 484 bp, Canis familiaris
  misc_feature (1)..(484): n = a or c or g or t
ccaatctgtngaaaagtgaggatatcacccaaattgtgnnagactatggacttgtatgtattactcgggctggaaatgatgctcagaaatttatctatgaatccgatgcactgtggcagcatcggaacaacattcacctggtaaatgaatggatcaccaatgacatctcctccacaaagatccggcgagctctcagaaggggccagagcattcgctacttggtaccagaccttgtccaggagtatatcgaaaagcatgatctgtatagctgtgagagtgaagaaaggaatgtcggggtcatcctggctcctttgcagagaaacactgcagaagctaactcataaatcctacagcatgatattttggacttccctgatgggtatttgaaaccatctgcgtgtcagtaactgggaagaggaattgtgatcctgtttcataaactaaagcattttaaatgtttggtaaagatcagggatccctgggt

SEQ ID NO: 1867 - DNA, 569 bp, Canis familiaris
  misc_feature (1)..(569): n = a or c or g or t
ccccatcnnngagtcaggcctcgacgtgacccaancntgtcaggactgtggagtgctccaggagaactgggtgtgtctctcttgctatcaggtctactgcggtcgttacatcagtgctcatatgctccaccaccacgaagactcaggacacccgctggtcctcagctacgtcgacctatccacctggtgttacaactgtgaggcctatgtccaccaccaggctctcctagatgtgaagaacgtggctcaccagaacaagtttggggaggacatgccccactcacactaaatcccagaaaatgtttctcgtctccaccttctaaggattcagatgaggcacagccccactccatcccatcctgaagacttttcagctcccctgggatgccgatttaagcatcaatacttgtaagaggactgtgatgatcaattgtaaatctccccctgcccactgcctgtttgagggactccatctaacctgcccggaaagaaacggggggcagttcagtggtcccaagagggggctgatatcctgaacctgatactctggagggagggggatcaactga

SEQ ID NO: 1868 - DNA, 542 bp, Canis familiaris
  misc_feature (1)..(542): n = a or c or g or t
gcagtgtcataactgtttagataaaacagataaataaaaactccaagcctttaagtgtacagtgtgcaagggaggaacagagagatccctgttggcaggtaaattactgaaagctggtcagcctctttgtgtgttcctcccacctccttgggtccttagggcctctggatctgggggactggtccaggagatactaggttccctggcacatacacaccactgcctcccctgtgctgggtctttgcagccatccatgggtgaaacgagggtcctctccctggggtaagcactccccaccccacttattgggaacactggcaaagaaatcagaaaagggctgcctggtgcagtgggtgaatttgttgattgcatcgtctctgttttgttaagggttttaagaagtatgtttgacataatgtcttttaatgggtttgtaatatcttatggttttagcagcctgtaacttcagctggtgcttttaatcaggaaaaaatttttgtaaannnnnnacattgtttaaaagacataaccatagaacatag

SEQ ID NO: 1869 - DNA, 545 bp, Canis familiaris
  misc_feature (1)..(545): n = a or c or g or t
aaaaggaatgcagaatcatgggcctcaccccagacctactgaatcagnnnnnncatcnnnaacaagatcnncaggtgatttacatgggcannnannnnnggaaggcaaggcccttgtgtggctcaatcggnnaagcattttcctttggcccnngtcatganntcagggtcctgggaccctgttccatgaggagnntgcnnctccttctccctctgcctgccgctcccgctgcttgtgctctctctnnaataaataaannnannnannnannnannnannnannnannnannnannnanaaatactttttaaaaatgnnnagaaggcaccgaccctgctttttccctagtaccgtggatgagtgcaggagcagcatccatctctagggaatcaccactcactgcccatttctgcccagnnnnngcatccctcctctgaggacaatcagagctcaggggaccatgagtgttttgccactttgctactgtgtctcttaccaacctttctagtgatgaatgtgcctggagctcccatttcccagcactt

SEQ ID NO: 1870 - DNA, 598 bp, Canis familiaris
  misc_feature (1)..(598): n = a or c or g or t
cagcagcnncagcgcacgggtgagaagcatcaaggcccaagannagnnnagggcgactggctgcccaagaggcgctgcgtcctccgggggcccagagcccggacggcagcatgcgtgccctggagacagcactaccctggaagttaggggatccaccgcccttccctgggaggcagcttctcctttcactgcactccctgagagcctgtcatcagtgtcgcatcatttggccactgccaggcctgaccttgcccaggtccttggccaaccgaccagaagcctcggtggccatcctctgctcctcggcccctggctccactgccaccctcagggagcctcctggagccgagggatgcctgggttcaggacagcaatgtgaccctggccatcgatcagagaggtacaagtggttgcagctcagagtgatttcgtgtggactgacggccgtgcctcctgtgtcacgttttcctctcctgctcaccccacccctcatgagcttggaaggaggccaggggtgcaggagttgggaagggtttttttctccttgtgtcagaaatgccatgtcctgtttgtaatgctgaaacatacccgcacactg

SEQ ID NO: 1871 - DNA, 359 bp, Canis familiaris
  misc_feature (1)..(359): n = a or c or g or t
gtnnnnnnnnngttcccnnngccaaagacnnnanaatggtttgtgccaatgacatcagggcnnnacccatgttnngtcagcnnnnnnnnnnagnnnnntgtgcagggcctggaggtacctatgcccttcttgtcccngtccnnnnnnngtnnnggttgnnnnntggcnnnnngnccaagggtaggggtgagnggtgacccttacagaacannncactaagnnggctnnnnnagtcattgttgtgaggggctgtctggtcccagctcccctgtgtcccccannnnnnnnnagtnnannntgcctgcnannnannnancnnngcccnnnnnnngtnnnnnnnnnnnnnnnnntngggggtg

SEQ ID NO: 1872 - DNA, 548 bp, Canis familiaris
  misc_feature (1)..(548): n = a or c or g or t
ttgcaaaaatcaagtaaaaaaatatggtcnccgaggagaatggcnnnggtgtgtttcccttagaaaaaagatttcattcggcctcactagtgaacattatcctttgcgcaacagctaggtttttttgtttgcattagaaagaaaacatcaccgaacttgttattcttgcacaagaggaggaaacacaatataaatacttatatttatgaatgttgaaacatgaaagctgaaaatttatttcactaatatacataagttcacaacaatgaacagacacagaaaatagaagtatgtacagaatgtcattacttacagtacattacagtaggtaacagcatgttataaacagttcaggattggattaaaacctttacagggacgactaattctattcagcagacacctaacttttagaagcccaacaaattcattcctgtcagggtgacggagggttttcactgttgctatggagtactttaaaaatacctgtcttttctaaatgaatgaaccacagcaactcttaagtgaacattnnnttccatgaaagc

SEQ ID NO: 1873 - DNA, 651 bp, Canis familiaris
  misc_feature (1)..(651): n = a or c or g or t
ccagcccacacatgtgctccnnnnnnccatgagagatactatggcttcagtnnagcattcaggtgnctggttgagaagggagatgttgcctttgtgaannagacgaccgtcttccagaacactgaaggaaagaacnntgaagcatgggctaaagatctgaagcaagaagactttgagctgctgtgccttgatggtaccaggaggcctgtgactgaagctcacaggtgccacctggccatagtcccaaatcatgctgtggtctcaaggaaagataaggcagcttctgttcgcagaatgctcttcaatcaacaggagctctttggaagaaatgggtttgaatacaggatgttccagatgtttcaatcctcatccaaggacctgctcttcagtgatgacacggcatgtttgactaaccttcaggatggaacaacttatcgaaaatacttaggaccagagtatcttaaggctcttgataacatgggacaatgcttacactctgaacttcaggacgcctgtacattccatgtacattaaaaactgatcaaagtgggcaactacagagatgctcagcgaccacaaatacgatggagacacatccttgcttgtctgcatgtgggcctctattaacctcagttgttttagaattacatg

SEQ ID NO: 1874 - DNA, 545 bp, Canis familiaris
  misc_feature (1)..(545): n = a or c or g or t
gcgcactcggtactnncttttgtgatanntagaaattctngcatttttctatattatccagtgtgatgatcttttcacattttatagagcaaagaccgagcagttactcttcacgttgcaatacccgtgtttgactaggaacaatagtatttttatggaacatttacaaaattatattttttaaaaaaaacaaaaacagtcgtggggtcagcatgggagagggaaagagaggtgcagacgccagagccagagcacaccccggggctttgcttgggaccactgctctgctnngtcccctggggctgctttgtcaggttccccttcctcaccgccaggaaaaacccccagggcccttggccgcgtgcagcggctgctcctctgctccacatccccccagaagcgcaggcctcctcccgccagggtcccagccccagccctgctgtccgttccctgcggaccacgaaccgtgtcggtaggccaccctgcggggggatgggtgaggctgaaagacgccgtcttactctttcagttcacggcataaatta

SEQ ID NO: 1875 - DNA, 616 bp, Canis familiaris
  misc_feature (1)..(616): n = a or c or g or t
ctctatgcggagcttgttgagttnatcntanntggagtttgttgagctncntngatgtgtagaaacaaactcaacagatgattttgcaagatcagttagggagttactgtaataantcaggcaaaagagatagtgccagcttagactaaggaagatggtcatatgctaaatatattttcggggcagaacattaacagttttgtaaatggattagatatgtgtgagagaaagagagaacaaggacaataccacaatttaggaacccaaataactgagggaaagaagttacatcactgagttggggaaggcagggaagagcaaactttgaatagagagaatctcaggagctcagacctgggcataatgcatttgagattcctattagatagccaagtgaaaatagtagtgtgtctgaaatctagacctagaattcaggagagaagtctagatcagggctatacatcttggagttgtcagcatagaaatgataaagaagactgagaggagtggtcacggggtagaagaatatcagaacatctgatatcctggatgccaatgatgaaagtgtttcaaggtggaagccatcatcaaatgtgttgaatgcagctgataggtc

SEQ ID NO: 1876 - DNA, 560 bp, Canis familiaris
  misc_feature (1)..(560): n = a or c or g or t
ggnnntggccgacccggcnngcgcctgnnnnntcaaccgcgaggtcctgcagcgcttccgtgggtttgggggggtccgcatcgaggaggacgtcgtggtgacagacagtggcatggaactgctgacctgtgtgccccgcacggtggaggagattgaggcgtgcatggcaggccgcgacaaggcctttacccccttctccggcccaaagtagagccagctgggggtgcccagtgggacgggggacccagcccggcacctgtcctcacgacgggcagcctcctgacggccctccagcggccagagacgggtgctcagagatcacacggccgtgtccccgaatgatcacgctgttcctggggcgcgtgtggggtggcgggctcgctcttaaccttctgcgggatcacaccttaatctgatactgatgctactttgcttgaatgacaaacggtggctttcaaaaatgctaatggaaaataattctgctctttagcagcaactaaaatgcgtcttgctgtcatctgtatcctnnnnctcagggaagaaagnnnnntttccagcgt

SEQ ID NO: 1877 - DNA, 608 bp, Canis familiaris
  misc_feature (1)..(608): n = a or c or g or t
cacannaangaacacagaagaagaagaagctatgatgcaggaatggtttatgttggttaataagaaaaatgcnttaataaggagaatgaaccagctttctctcctggaaaaagagcatgatttagaacgacggtatgagctgctgaatcgggaattgcgggcaatgctagccattgaagactggcagaagaccgaggcccagaagcggcgcgagcagctcctgctggacgagctggtggccctggtcaacaagcgcgacgcgctcgtccgcgacctggacgcgcaggagaagcaggctgaagaggaagatgagcacttggagcggactctggaacaaaacaaaggcaagatggccaagaaagaagagaagtgtgtccttcagtagctgccggaccagaccctcccaaccgcgggagcttggtccccagacccgaaaatgtcagactcgcagactcgttgttgacttaaaacttttaacgttttttggggggcctggattgtacttctttaccaccaccaccaccaccacccctttccctccctcctttccagataatacacagaactccagaagagctttgtttaaggattttgtgtgtgtgtgactt

SEQ ID NO: 1878 - DNA, 608 bp, Canis familiaris
  misc_feature (1)..(608): n = a or c or g or t
annagctccatcagaaggagatcactatagcaactatcatgaagaaagctgccnnnctnnaaagacagctaaaaatggagttagaaataaaagaaaaaatgttagcaaaacaacaggtctcagatatgagatataaagctgtcagaactgaaaacacacatctgaaaggaatgatgggcgatttagaccctggacagtacatgacaagtgaaattactgatgttaagagtatggacttcactaacagggaacattcaaggcatacatctattaacaaactagaatatgagaatgaaaggctccgaaatgatcttgcaaaacttcgtgccaatgacaaatcagcatgggctaaccaaaatacctatgaagaaatgggacgatacacctatcaaaaccaaataaaaatggaaaaacatgaagatagacttagccaagatcgtgagccaaacagaagtgcaacgcctccactgccacctttgccatttcaaaccaaagaaatgacgagtcccctggttagtgatgatgaagtgttcccgctgtctcccccagatatagtcttcccagcctctttggctgcacagcattatctcctggaggaagagaagcga

SEQ ID NO: 1879 - DNA, 532 bp, Canis familiaris
  misc_feature (1)..(532): n = a or c or g or t
aatgccaacanctgaagaagtcnagtgtggtgtgncntacttacaagacagcaatggggtgcnntcaacaacctggagatgctgtgagtttgcagactttttgttgggtcctgggagtctgagctttgttccctgtttgttcacggtgaatagttgaaaccaagaggacatggaatagatactgtggaggattacttctgcagcccttgtcttctgggccatattactcattgttattttaaatatgggactaccaaacaatacagatctaccagaagtatggtagaaaaataaaatgaaagccgcacaagctacagtttattattctaatgtaagtagaactatctgcatataatgtgatttaatttattgttttgtgtagaaaatgaagattaatgactgtggatataacccctgttttgtataatatattttatttctggtgcaaactggtcatttaaagtatctacttcatttggtgtttggatataaatgtgtatgtgttcttgtaaatgtttctcttaagcaagaa

SEQ ID NO: 1880 - DNA, 605 bp, Canis familiaris
  misc_feature (1)..(605): n = a or c or g or t
aaaacttcagactgacttctgatcttactanncacaaaaaaattcacacagaagtnnngncatataaatgtcaacattgtggtaagagctttagagggaaatcagatcntaataagcatgtaacaatacaccaaggaataaaaccgtataaatgctcctggtgtgggaaaagcttcagtcaaaattcaaatctccgtacacatcaaagaactcacactggagagaaaccctttatgtgttatatatgtggaaagaaattcagtcagaattcccaccttactaaacatcgaagaacccatctgtagcataaacatgagaacattagcaggcattcaagccttcttaaaaccagaagactaccactgaatggaaatatatgtgatgtccttagtatggagaagaaaatgcaaacttatgaagcataaacaattcatcaaaggaaaatttggtgatatatttctcagaaaggaatcaaggttgactcttcaggggatgcgttagttttttactaattacattattactaatcttcagggaattcataacaagaaaggtgttcaaagagcattctgagtctggaatgtactattttgtgattgtactaa

SEQ ID NO: 1881 - DNA, 682 bp, Canis familiaris
  misc_feature (1)..(682): n = a or c or g or t
tcaacactcttctgtttttgtcctgtgtgtacagtatatatatgtatatatcttttaattttttnnnnnnngcaaagactaaaatcaagcatttgatgctgcaggggcccgtcaggatctgggagggggacggnctnnaaagaaggaaagagctgcagggctggcctgggggcaggtggggattagggaagtgaaggctgacacctggggcaggtaccagctgggcacccgtggacgtccccaggtcctgtttgtttcccttgccagtctggcctgtccctgcagtgcttgaatatcacaggctgacagggagcctccagaggcgcccctctccgcccccagtctcagtgggggccagcgggcaccacccagtgccacagaccaccgggccgcaggggcgggaggccagcctcctcgctgcccccacggcccctcctgccggctcccggctcctgcccggttcccagggcccccaactccatgggccacctcattttctgttctcgttttgcagagttgcacaaggagagaactcagcatggggggttggttctttgggttttgttttgtttatttgtttaatttaatgatttgtaaagtgatgttcctcttcctttttttacacttttagctcatatttaacctctgtttggaaaatgattcttgtaactgtacatttttt

SEQ ID NO: 1882 - DNA, 101 bp, Canis familiaris
  misc_feature (1)..(101): n = a or c or g or t
ttctctgaatgagcctttnnncttttttgtcatgttatgcagtgaactatttttnnngnctaatcagtgattatttttccaactccnnntttctctaagga

SEQ ID NO: 1883 - DNA, 566 bp, Canis familiaris
  misc_feature (1)..(566): n = a or c or g or t
cattctttacaggttgcccacgaggaaattggaaatatcttggcnnnnnntattccttttttagcctgtattttccagtgttatttgtacctgttctatagtccagccaggactatgaaggtggtgctgctgctgctctttatctgcctgggcaacatatacctgcatgggctgaggaacctctggcaaatcctcttccacataggagtggcttttctgtcttcgtatcagatactgaccaggcagcttcaggagaagcaggctgactgtggagtttgaaggcgacactgtgtgattgatggatcttttggctttcttaggagggtcatctgtatttcccttctggcttctcaacctcacctcaagtttccacccttgaagttcccttcgatcaaaaactggctgagaccgaaagttggggatttttaacaggtgcagtagaaggcacgaggtggcttgatttcccagtcctggttttgtgctgagcgttactgcagaatctccaggtcagcacatcttaggacagcagaacctgggggctcactcacaaggagcattatggaaag

SEQ ID NO: 1884 - DNA, 178 bp, Canis familiaris
gcttccctccccctccaccaccctaaaggtaggaagatgctcttcctacttgttttattttgttttctcgttctccctccccaccttgtcccaccccactcccagccttctctgtcctccaccactatccctttttctccactcccagccccatttcctttttttctggagtgtgtgg

SEQ ID NO: 1885 - DNA, 479 bp, Canis familiaris
atcagaaaaaaaaaaaagcaatgagtttttgagtaaaatacaccgaaggaactagtttttgagtaaaatagaccgaaggaaccaagaaaagcaggacaaactcccagggcaggtcacgttacctgaatggtcaatgcattctttttggcgggccggttcatcatgatctttgtgatgctgtcttcagaggtcaccaccagggtttcatatccaggttgtttcctgtctgcttcaggcttcacttggctagaggagtcagacgaactcagatcagacaccaaatccacatagttctgtctggcagtttcctgaagagaagaggacaaggagctccagcccatggtcaacaaataagcattttgagcaacttacgatgctcagaaacagcaccttgcgatgaagaaagaacagatctgattcaacagaatctgtccaggcctcacaggttccatcttcaatggtttaatagtgagaagcac

SEQ ID NO: 1886 - DNA, 645 bp, Canis familiaris
  misc_feature (1)..(645): n = a or c or g or t
acagaatcttacacgatcacctaaataatggcatctatgaagtagaatgatctatttataaatgaattgcatttccagtatcattactggcaacatattccttaacaactgctatggagacagaaagtatcaaaatatacagcggaaatttgaaccccatcaagccagcggcctgacaaaggttagcaggataacgaaacattcagctctgcttcttttcttacgtttgtctcatctccatgcacagcaggaaatgtctcctttttgccccctccttcatattctaaaaaaggatgtactgctttgttttaaaattgaagccaaagtaaccaatgtttccctgtttttgaaagcatttccttcattctgatgtactttagtcataatgttgaaaagaacttttgtagagtcaatgaaagttctgatgccaatagcaatgttctattcttttttgctccctaagttcccaaggactgatatatataaatgctatagaaccttacacgtggattttatcccccattccatcaaaaaaaattaatcatcttgtttatttacatttttgtagtgagagtgaagtagacatttcatgccatagaatgtggctgtcatgttggcccagctgagctcacaacacannnnnnn

SEQ ID NO: 1887 - DNA, 548 bp, Canis familiaris
  misc_feature (1)..(548): n = a or c or g or t
aaaaggattatagacaggaaagaatggaagtcctgctgacctttggcctcaaagtcaggacattggggggggggggtcntctgtcattgggcagaaatagtggaagccacatagctaatggtggctatgtattcatttggctctgaccacagtacctgaagctgtttggaaagcaatgtgcaggtgcaaaattccaaaaacggagtataaggcattttgcatccctttctgcagacctgagctggctttggaataaagttaaagcattcggggacactgcctgactgtagggcccgggtgtgtggcattgtctcggcaggcagagctttttgatttgctgctccatctcaaggaagtggctgctcttgtcatgagcacctccgtggatgggacagggagggagcaaggtaagggaccgtcaccaagatgtagcagctgggggcaggtgttggcagtagcccacctcttagaaaccggagcagcctgaagcctaatgtgaaagggccacaggttttataaatggggacatggaagcagaaactggaatc

SEQ ID NO: 1888 - DNA, 670 bp, Canis familiaris
  misc_feature (1)..(670): n = a or c or g or t
aaaaatatgtaagctcatnntccaacntntttaaatttnnnncaagaatttaaatnnnnttntaaaaaaagagaatttaaatcatgcagtgnntctgccattagggttttcattggtaaaataaaacgatgaacccatgatgcatttctaaggtccattttaagatttaaattttatgattctttagtcttgtaattagataattaagactatgtgattgagttgacatctggtatgcatctgatattccagataatcttgagcttataagacagggaaactgtccaccaagaggtgaaaacatgtcatggaaaggtagaaaggcatgaggtaacagaattctacagaggaacagaaggcctgactgccctaccctgtggagtggcacggccacccaccccattacccaagccagaagaaaccttcatgttatctttgactccttctcactccccatcattgcagctgataatgcttctaatccatctgcttctctccatccccaccgccatttctctaactcaggtcaccaccctctcttacacaaataacttaaatagcctccttttttaaagttactttttaaaagtaatggtacaaaacttatggtacaaaaaaatacgtgctacaaannnntaagattaccatgnnnnnnacagtaaacattttc

SEQ ID NO: 1889 - DNA, 575 bp, Canis familiaris
cagggttcatactctttttccccctcagctttactgacacggaaggttgtataagttcaaggtgtgcaacgtgctggtttgatacgtgtgcatgctgtatccgcgctgccagagcgagcgcagacatcggtgcatattgtgaaatgatcacaatgagtttagttggcatccatcacctcacatagttccatttggttttttttttggggggggggtgaaaactcttaaaaaatctactcacttaacagctttcaagtgtccaacacagtcttgggccctgtcgtcactgcgccacatcaaagacacatccactcccccacgttcactgcagcaacgttggcaggatcccagacgcggacacagccgaagtgcccatcgctgaacgtgaatggataaaggaaatgtgataacacggtgggatggcgtagtggaatataacggaatattacttggccacataaaagaaggaagtcttgttgttcgggacaacgtgatcggaactcgagggcatcgtgccggtggacttctgcaaatgtccaggtaccagtcatgcgactcttacgtgagactctggg

SEQ ID NO: 1890 - DNA, 138 bp, Canis familiaris
  misc_feature (1)..(138): n = a or c or g or t
tgcttgatgatattgagaagtgtnnnnaaaagaagcagcaatctatgtaacatcctgttttttgtgttaactttctttctaaaatagactttcaatgatgatcagagaataaaaccatgtcttcaatttatttcaaca

SEQ ID NO: 1891 - DNA, 490 bp, Canis familiaris
  misc_feature (1)..(490): n = a or c or g or t
ccatgctagagatgctcctgcaccatcagatctgtaaagaggtgcaggcagagcaggaacccacagggaagcaccctgaggtcgagtctgtgacacaccacgactaccgaaaggagnnggtacaagccaggcctcctgccccaaccaagcctcatgactaccgatgggaacagcctgaaaccttctggatacagagggcaccacagctaccgggtgtcagcaacatcaagaccctggacacgccattccggaagaactgcagcttctcgacaccagtacctttatcgctggggcagcctttgccctatgaacctgagaattattcccaccaactgggagaaatatcttcccgtgcctgtcagggaggaggacaacgtggtgaaatgggtagaactactatctaaggcttgaggagggaagagggatgtggaatatagagtctatctccgtctgtactggagaggtgggaaagaagtaaattctgtctgta

SEQ ID NO: 1892 - DNA, 618 bp, Canis familiaris
  misc_feature (1)..(618): n = a or c or g or t
cagctatggcccattttcagcagagaagacaatcccnnnnnagttcatgttgacttctgcatcctttggaaacatggagaagtttccgttcaactggaagctgaaatcccacatccttgacagctccatctactccatctacccggctgaccaggctggccagtgtccactggaggaggatggcaagtgggagaacaacatccactcaggccaggacagcccccagcaggtgtctccaccccgggaaaggattgggagtgtggtagtctacccgactcaagacgatctgaagtggtcgctggtgaacctggatgagaacgtggtcatctcagtacccctgaaccttgtccgggaaggggacacggccacctttctggtctctctggccagcggctctatggcagaccacttcactctgagaattaaggcagcagcaggtgtgaaaatatcggccgtgcgagtcagcagcgagcagcagtgggcagtccaggaggacatagacggcagtggcgagcagatgacagctaccctaacctgtgtgggccaccaccccgacacgcagagcaggtacctaggagnnnaagcattctgggatannngagaaaacttggatcatct

SEQ ID NO: 1893 - DNA, 512 bp, Canis familiaris
  misc_feature (1)..(512): n = a or c or g or t
acccattcacatcgaannnnnnnnnngggacganntcagatgatgcccaacctgggtnnagtgcaggcnntacgggcaaggacaaggataaagcactgcccagcttctggatcccgtcgctgacccccgaggccaaggccaccaagctggagaagccttctcgcaccgtgacctgccccatgtccgggaagccattgcgtatgtcggacctgacacctgtgcgcttcacgccgctcgacagctctgtggaccgcgtggggctcatcacacgcagtgagcgctacgtgtgtgccgtgacccgcgacagcttgagcaacgccacgccttgcgcggtgctgcggccctctggggctgtggtcaccatggaatgcgtggagaagctgattcggaaagacatggtagacccggtaaacggggagaagctgacagaccgcgacatcatcgtgctgcagcggggcggcacaggcttcgcgggctccggcgtgaagctgcaggctgaaaagtcgaggccg

SEQ ID NO: 1894 - DNA, 281 bp, Canis familiaris
  misc_feature (1)..(281): n = a or c or g or t
ggccatttcnnnngccagcccccagtnnggggcannnnngagatggccatgctcagtacccctcccggcccgccccccccctccagtgcccccaccggggcccccaggnnnggagactttctttggtaaacggtccccccttcnnnnnccaccccccctcccccggggatgaggagaaggtggggcacacccagaaagggcaagcgggcagccccgctttggggacatgaacgttttaataatttttgctgaattcctttacaactaaataacacagatat

SEQ ID NO: 1895 - DNA, 482 bp, Canis familiaris
  misc_feature (1)..(482): n = a or c or g or t
tctccctgcagagctacacagattacatcagccttgaggagttggcccaggtggaacagatgnnggcacacctcacctctgcatctgcccaggcagcagcagcctccctgcccaccagcgaggaggacctctgccccanctgctatgctcaccccatttctgctgtgttccagccctgtggccataagtcctgcaaagcctgcatcaaccagnnnnngatgaacaacaaggattgcttcttctgcaaagccaccatcgtgtctgtagaggactgggacaaggcagctggtnnnnnnnaccacttcctcagctgcctagcccacatggcagcagcctccacccctgaactcagacccaggttgggccctatttatgagctcctcttgccctgttccccgtggaccctcccccccgcccccgccatatccaccctccctgagtgtnnnntcattggtgggagcccagccatgtcctcatcgtgc

SEQ ID NO: 1896 - DNA, 529 bp, Canis familiaris
  misc_feature (1)..(529): n = a or c or g or t
cagctgggcagggnnngcctctactgtgaaaactcccggctgtgccccagtggggccgggtgaccacagcgtggctgtccctccctgagtgaaacccggtcctgtgcttccatctccagggcgtctccagtggagcctctctttgtggaaaatgacagcagtagcagcggcctcgaggatgccagcagtaattgaagccacacccagccctggaagaggcggacgacgctgctcgtgtgacagccaggggacagccaggggatggttgccaaggctggagggccgaggggctgggagcctgcagcactaacctcgccttcccgtgtccgtgccacggagcacactgtactactaaccacgctgctcatcgggacgcgtgtcgcttgcagagccgtggccacgtccggccccacaggaggacggggtgggcgtggcctccctcccggccatctgtgtcccgagcccccggggaagaggccgtggctgtgggccccgggcgccgcaccctaccacgtacctccccaagctg

SEQ ID NO: 1897 - DNA, 501 bp, Canis familiaris
atgcagctcatgccggccaaagagcttgccaggaaatagggagcaacttttcatttgtggcttctttgcatttgcggcttcctctctcacatctgagaagcagactgtgctactgcctgagctgttccaccaaccttttccagttggagagcagatgccttcaagtaacttcctctggggaccctctgctgacttcgggtcaagtgtctgctttctggagtcagacctggatttgaatcaaagctctgcctcttcccagcaagtctctgcacctcaggtgttttcatctgtaaaggggatgatgaacactgctgcctgtggagttgtgaggactacatgaggcaagaattgaggaccattcagctcagtgcctggaatcagcccaatcaaggttaggtgttgttgttattaagaacatttaggggcacctgggtggctcagctggttaaacgtctgcctttggttcgggtcataatctgagtcctgggatcgagccccacg

SEQ ID NO: 1898 - DNA, 551 bp, Canis familiaris
ggaatgcactgcagtgattctgttttgaggtaaaagtcttcatctcttcttatatttttttgatagcagagatgcttattatccaaaaacaatctttttctcatctgggatgaatctgtagaaagaatttaagctgaaagaggacaaaggaacaagctctgtgaaaaggaaaaggaggaacctccttctttcattagagcataactgagtgaacttcttagtgtgggctagtgtggctcatgctcccagagtcccagccttctctgtcctttagggtggattgctatagttcaaagtcaagctttagaggatgggaaaagggtgaagtcagaaccttcctaaagcagagggcacaatcagtgtgaataaattcacttcagaatcccaagagaaatcacttcttgttgttttgaacaagaatggatcattactgtgtactaaagggtattagactgcctcaggtgcagtcagagtggctacagcagttccaacatagtgtagacttgtactttacccttcctatattccttccattcttactggtgaacaca

SEQ ID NO: 1899 - DNA, 610 bp, Canis familiaris
  misc_feature (1)..(610): n = a or c or g or t
gatgcctgagncttgtggatttcactccattacagcatctctcccctaacaccacagctccctgtgctgtnntagaacacctactttctctgctctgtgatttctctggtctccattcccctgtattttcagtgtctctggctttagtgtcattttcttcctagaaactgggatgctgcacctcctagaaaataatgagttcagagtctgcccaggctggcctggggaaggcacagtggcttcctggtccccttctggtcaccagagtcagccatgcccctcatcttcccagtcctctgccaatctggtcccctgctgcctctgttcagatctgtttgtagatcacattctacgcctaccttgagacccagactgaacttgcagtaagaagggtagactaatgtgcacgtttccttactaggcactgtggtgtccctgcctcactgtgtctactcccacctgcttctctggtcaccttgccctggtcacctgcttctctcctctcgttgcagtccgtggtctcagtcccactccgcatcactgagtcctgaaacccgcttccatagatgccaggggagaggagagggtcccccctgctctgctccacatc

SEQ ID NO: 1900 - DNA, 618 bp, Canis familiaris
  misc_feature (1)..(618): n = a or c or g or t
aaatttataaagtacgtcaagccttatggntaacactnncntctacaaccaagtattaaagccacatttaaaacgaccacatgaaatgctgattctaattgtgtgtaggncttgaagannaagcacacaaatttcacaaaactctgtgagtaacaaactcagccttctgtaaatatacatgcaagtttggaaacagtaatactgtacctataaatatatgctgtctgttttgtgtacagtatgtaaaaactccttttctgccacactaaaaatgcaagccatttatggaaatcctaaaaatagtattgtactaaaactttgctaatgatctttattagaggatcatccaacttttcacttacattgggttttcttttcaattcactcttacagtagtctgcttatttccagctgtttgttattttattgagtcctcaatttaaaaaaaaatattttgattcattttgtaaatacaagctgtaaaaaaaagagagatttaatgttgtcttttaaatactccaattttcattctaatatgaatgttgttatattgtacttagaaactgtacctttaatattacattacctttattaaaagtgcattgaacacatcaattt

SEQ ID NO: 1901 - DNA, 443 bp, Canis familiaris
  misc_feature (1)..(443): n = a or c or g or t
aaaataaatctgaccagtgtttccttgtatatgtgtggagcagccctctggaatttaggtctttcagtgtgnnntctatttctaaatgttattacatggtgcacaagtgacactgcatatattccagaatatttcccttgctgtattattatgaaagcagtacattaaattgattttttggtaattagtaatgttagcttgaattgaagattatgcagaaggaataagcttatcacaagggaccatcaatctgagccatgtctggttcaaatacataaaacttcaaagataattcattcttggcaaatgcttatatagctgttgttcccttgaaagaaaaataaaagttgtctcctaataaaaattattctgaattaaaaattaatctgaggtataatctaaatctggattcagtctatttctcttaccnnnattgaaagaaa

SEQ ID NO: 1902 - DNA, 323 bp, Canis familiaris
  misc_feature (1)..(323): n = a or c or g or t
gatgagctgggattgagnntgacagatgagctgtcnagtgagtgcgcccaatnnnnnnnnntgccccacccaacagtccagacaaaacccctgaccccctcccccacagcattattcctttctacannngctctcctaacccccactctctgtagacctcccctccaccnnnngctcactcagtgtggctgccagtgggaagaaagcagaggctgctgcctcagccnnagtagatgccgacgcagacctggaggagcggctcaagaatctgcggagggactaatcaccctatactaccatgagtgggaggtgggcaatcgatg

SEQ ID NO: 1903 - DNA, 645 bp, Canis familiaris
  misc_feature (1)..(645): n = a or c or g or t
ctccctgtgtatttgtcntgaaatgttttgtttaaattggtgggcttaatgtgttctggatatttatctctttgtatttagatgtatgtagttgcaattagcaccgggaattagatctatgtacatccttaatctagccatgtgagcttcaccagttactgtctgccctctttcctcaaacagtaagggaatttgtctgctaattcagagaagtgtcccttttagcttttaattcatttggttttattcagcatcttcaaatccaccttctcctgaggtatatatttgtttggacaaccaggccttgcattatttttactctgaagtttgcatgcttgcctgacctagtatttctaaacccacttcccctttttaaaaaagatctaacttatgttgcttttcactgaaattatatggttctgtcgctactcttgtaaatctgaaacttaacctgtagggtaactgggatgctaagcttgtaaaatgttctcctttgcttttatcttcagtgtatctccttaatcctctttcaatctgattcatttatcttgttatgatgagaataaggtgtaaccttgtgactgaagacttgcaaagaatggagatgttctcaaaatagtgacatgtcatctgtagtcacagatt

SEQ ID NO: 1904 - DNA, 522 bp, Canis familiaris
  misc_feature (1)..(522): n = a or c or g or t
caagacagtagatatcagaaaacaaaagtcaatgatctctgaaagatnnaaagcagacaaagtaaaccctacaattncnnnaggtcacagcttaaaagagattcaaggtcacgggtcaagaaaagggaacccaggcagagcctcacagagtaactaccctgagtttaagagacagagctgaacatcctgtaagaccaaagtaaatagactctgtaaggcagagaaagctgctcagagagagaaatctgcagatctgcagagtccacctcaagaattcagcagagtccacatcagcacatgcttataaggaaacttctcgaaagtaggttatgcctttccctggacagctgatatggtgactgatgtgaacgaagcaggcaggcatccaaaggagcagctgttttctcctaacctggtgcaactctgatgggcagtattcactgcagagctccctgccagcttggctgtagcacactgttgggaccattacaaatgtttacttcctctctgctcaatcctgcc

SEQ ID NO: 1905 - DNA, 592 bp, Canis familiaris
  misc_feature (1)..(592): n = a or c or g or t
ctcccctcactgnnncaggggccccattcngcagccctgtgcccgagncaggctgcccagttggtaccgatggctcatccccactgaaggatctaaagaggcctcaggcctcagccacatacctcacccccctacccccaccccgtccggccaggactcccaatcctgaggatgccagggtcccagggcagcctcgaggggtcactgctgtcccaccccctacctgctagtcactggacatacagctcaggaactgagccgggctcatgctgtcctcaaacctggtgttgggggagacaagcccaggagagccagggacccccagcccagatctggaaagaagagaggtcggcatcttggctggctctggctctggctctgtctttctcctcctttgtgtccctgatccaccccttcatcttactctctcttcccggatttccctctacttttcctttctatttgtggctctgaatatcagctgctgtctctcgggtctcccttgccctgtgttggcccggggaggagggagtgtcccacccccatcacccccctgtcttttcttctcttgtaattaaggacaaaatcattg

SEQ ID NO: 1906 - DNA, 541 bp, Canis familiaris
  misc_feature (1)..(541): n = a or c or g or t
gtgcacaggnnnncgcttcccacgggacagtgtgacatccacccagtgtctgatgcctcctctgcagcaggcccnntctnnagccaccacagnnngatgcagggccagccccgcgtgcccggggccgctacacctgctcccaccacgggcccctccccgcccccttgtctctgctgtcccggtctggctcatttctggctctgatgaagccaccaagcctttcaccagagcactgggcgcagtttgccctgtagcccacgccacccgtcccctccgctgggagcacgtggccaggttccccaggaggtggcccgcaccgctgcccttcggggcccgatggaggagctgcagtggctcagggcaggacatcttaaggaggcccggattcatcaccccgagagctcctcccgcctggtggttttgcctcccaccgcctggaccgtcgaggcccccgcgtgagcttcccgcagctgctgtaacaaccagcacacgtgcgctgttttacaacaaagcgaatccannntcttgtcatctgtgcgtt

SEQ ID NO: 1907 - DNA, 648 bp, Canis familiaris
  misc_feature (1)..(648): n = a or c or g or t
aagaaatggtagatgtagagaacangagaggctcaacagtgcaggcttgtgagccccactgcacggttggagtgtgggcaacagagacgcatgagctcttccccttctctgtccctgaccagagagctgccaccaatgtctcctgtccttggggccatcctcctcctaaatccagagatgttctgatccccctttacctccattctctgtgccagaggatgtccctgtttctctctgggtgagcatcttagctacttctataaaccttcagtttggagagaaacctggtcagtgaatcttcagagggattggtctgacaagggtagatgagtcctttgagaatctgggccttccttttcctatagttgctgtgtctgctcaggcattggtggtcatggcagccaggtgacaccaggtgagtttctgatcttatccatggggtgtcacactgtgcctagaggcaagcagcagagtttggaagggaagttatgaccaagtgaaaacactgataatgctctttatctgtgatagtggacctattggttatttcattcatctatacaaataaggacagataaattcgagctatacccatcattcattatgttcagaaattttaaagtgattatgaaaggctttactaatcat

SEQ ID NO: 1908 - DNA, 662 bp, Canis familiaris
  misc_feature (1)..(662): n = a or c or g or t
ttggggctactcttgtgtatgtcgatccaaacacgcgcaacgttgaannactttggtgacactttggtgaccgtgggtagtcattcttactcaaaattgcactgctcttccctcaccgtgactggctagctgcctgtatttgtgggattctttgacacttggtggtactgcattcttgccaggcatacctcctgtttgagtaggaaggagccttgtaagatccttcacaggcagtgcatgtgaagcatgctttgctgctatgaaaaagaacatcagaaagtatatatcatgttattttatatttttgcttttggtgtagagtgaagcaatttctatcaaaatctagctagagcccttcactgccatgatagctggggctttaccagtctgtctactgtgatgatttgtagacttctggttttatttctatatttatttttaaatatattatgtgggatatttagtggtttatgtctctttaagtttgaattagcgtttctaaaatggtggttactttgaatgttacaaatggatcaaggcattaaaatgtatgagatttatctttccccagaaacaagtactgatgctattgtaaaacnnnnnntgtatagtgcctaaaaattgtaatgaaaatccttttaaccatttcaatccaaatgttt

SEQ ID NO: 1909 - DNA, 553 bp, Canis familiaris
  misc_feature (1)..(553): n = a or c or g or t
accaattcatttggtgnagctgnnagaagacagctaattttttgttttcacttctgcacttcattacaagttttcnnnatactccatctctgtgaaggacttcagttgtgctgaccacacgtagagaagcttcccagtattactacttcttcctggaacgtagctgtagtattcctcactagtattagatatctgcgtacaggatgtatacagttattcaggttaatgtttcatattaaagaatgtatttgtaaaatgtaacaagatcagtagttaactttttttaagctctgaaaaaataaagattgtgttagacttgcaattacagtgaaatctgtcttaatactactacttttgtggctaacaaagattgtgcatttatgtaaaaatatttacagaatgccctcaataagagataataaagataggttttgcttttcatttttagaatcgtgacaccgctgctgtctgttatacagttattaattcttcagaagtttctctaggatgtcaaatataatttttgtttctttcagagataagtaacacctgc

SEQ ID NO: 1910 - DNA, 564 bp, Canis familiaris
  misc_feature (1)..(564): n = a or c or g or t
acacctcagggtacctngagtacccnntggtgtgtgcacacccacttnnnacactactgttttaagagcaagtgagcacannntcttggcatccatccccaaaccactgtgctggcacgcttggcctgcagaataagaaggccttaaggtaaaatccccaggagcttctaatctgggagacagggcaaacaaactcttccaacagcataaatttaagtactgaaaaacctgcccagcaggagagctgtccccggacagtggtggctacaggtgctaagaaaagatcaagtacgatgtccagagcggggggatcgctcctcttccctctctgggtctccagaagaggacatttggcaatattcccagctctctcatgattggattctttgaaccctccaactgctttagcagtatgttccccacggcaccagtgggtccacgtcgcttgaatattattgttgatttgaccaccgagatgtaatgatgattctgttccattttgaaaagggtctgagaaagtgtacaggtctaattatatatacatatttatacatgtgtattttt

SEQ ID NO: 1911 - DNA, 388 bp, Canis familiaris
  misc_feature (1)..(388): n = a or c or g or t
gtgcnncagttttctattttctcttgataattcctttctctgctannnnnnnnnngagatgggactattnnnagattgggaccagaccactacaatccttccaatctcttatatgtatagtttagtgttaaaatttttgaatgaaggaaagctaggtctgatagctaattaagacattatacttcttgagtataaaaaacagtgtgtttgatctgttacagtattctttttgaaagtctacttcattggataccagaaagaactgctaatttttaaagcatttctcccaagtatgtatcttaaaatacaaagagcaaaaacttacatggtacagaatcaaagacatacttttccattctcaataaaccacagagggcagaattcaatg

SEQ ID NO: 1912 - DNA, 432 bp, Canis familiaris
  misc_feature (1)..(432): n = a or c or g or t
gtgtgcaatacgtngcgagtgnnncatggctgggccgggggtggggggtggctcctccagttcagtgtccctgggccctctagccccctgtggtggcttctgggaattaactatttattgagcaggttgccctaggcttgtgcctctgtgtcttcttnntgcatctggagtgtggagttcccagcactctgcactggtacactgggatcctcccaacccccttctcccggcctgagcatccnnnntccacagaaggtccttagggggagaaggaagaggagaaggaagaaggaaactaaggagcctctggccgagtgatcatgctgttcgctactgaatctttctggttgctgtccagatgtctggaaactgtgagtaagtcatgtggtcgcttgggtgggtggttcatcagcttccatcatcatgaaattc

SEQ ID NO: 1913 - DNA, 426 bp, Canis familiaris
  misc_feature (1)..(426): n = a or c or g or t
gacaccacaaggctcagtggctgcactgatgggnnaacacggggctaactgaggacaaggcanaagcctggagcagcacattaacaagtccttgaaacaggcaaagggacattgctctagggactccattgcctcgatgttcatactttgctaagggcaaaaggcaaccttagcctgacccccaggagcctgtaagtctactttaacatataaaaattcctttagaaatttccttcatctctaaacccccaagatacatattggcgatcatccccaagcacatggcccgatgtacatatgaagagtctcctgactcaggttttattaggtggtagtaagtgacctttcccaacaatagctgatcccctcagggtcttggagaccttgcttccaaatttccttagagacttatgctcccccagcccc

SEQ ID NO: 1914 - DNA, 487 bp, Canis familiaris
  misc_feature (1)..(487): n = a or c or g or t
gacccatatgcttgancatggtcatcagtcttccctgctatagacattatccactgctccannntatagntatagagtaagcccagggatgtacatttgtcttcttgctttgataatttcttttgatttaaaaaatataataacatatcttcagtaattcatgtcataaaataattttcctttgggggtggtgctggggatgcaacttttttggggggagtggtcttggtttatgctccctgcccttggctcccttagtcccttactctgcctccaccccagctccatggggggaggggctctggtcttttctaaagtgggtggtttgtcttttagtctttccctttgggatgtgagtgtgtgtttgcgtgtgccgcgtgtgtggcatgcgtgtgagtgtgtgtgcgtgtgaacagcttcgggttctgctggttttgctgtgagctgcagtgttctgtgggtctgtggtatctgacactgtggacat

SEQ ID NO: 1915 - DNA, 466 bp, Canis familiaris
  misc_feature (1)..(466): n = a or c or g or t
agnnnngactcagatctnnagtgatcctgacacctcctcacccagtgatgatcannnaagnnnaacggcnctttgtagctaccactagcaaggccagatgccggctgnnncaaggttggcagaggccggactcttaacattagaaagctcagtgaatgtcactggaggctttagcacctatagctacnnnnnnnaggctgtactaattcttcccatccattccattccgagaatctgagagtagtaggaccnntacaggacccaccatcccactcgatgcaattttcccattgtgctttcaaaagtttctcttcttactgaaaggatggagataagattgtttgaaaaatactttccaggtttggcttcaacctaaagccctgttgacatgtgccntgctagattataagtgttgttttaaacaataggtcagtgtagtatcccccaaaagaacattagcctggtc

SEQ ID NO: 1916 - DNA, 575 bp, Canis familiaris
  misc_feature (1)..(575): n = a or c or g or t
gtctgagtatggactagcttgatagtgaaaaacccctcacngtcncacgttgttattattttgtcttttgnnaatttttatttttaaaaaatcaacagaaaaaacttttgctggtcactcatttctccatcatagtggtgaatatgtgaggtgaactacagagtgaacatatcagaataaacctaccaagaagaatgctttcatgttcaccaaatggtttgtttacccttattttcctaagtgttatgtggatttactcttaatattatttctcataattttactctgttacattcaacattaaaatgactttttatgatataatattagtaatattttttaaaaaattaatgatccatatgaatttatttcttaaccttcttatggataagccattgtaatttttagtctgccttagtttataaaagctgaccataaggatgatttttaaaattgccctgatcatggggcacctgggtggctcagttgatgaagcagccaactcttgatttcagctcagggcatgatttcagggtcctgggattgagctcatgttgggctccatgctcagccgg

SEQ ID NO: 1917 - DNA, 557 bp, Canis familiaris
  misc_feature (1)..(557): n = a or c or g or t
ctgtggatatgcattnnacntctgtgtatgtatggtctatgtggtatgtatatcgcgtaatatacatactatactgggtatgaatgaatatggatggaaacccacacacacactccagtctgtaaatatccttcctcactgaaaactgtgctttggaaatcatttcttgtacagctgtgcagtttcttgtagcagctgaggacaagctaagacaggtggatgattttgataaagatcacctaaaagaatacagaatctccctagcaactcatgaggacagacaacccaatggcaaggttgactcccaatgggatggcaaacttttcttctctcctttttgaatttgtgtttcctaagtgtgtcttaaattctgagtgcaccaggctgtacccgttagatcctttcaatatgacagttttgtgcttctctctgacaggacgtttctccatcgagctgtagtgcaggatgggagggagggggaaatactccttgcctgggctggagtttacagagacactgcacagcttacactcctgttaagtgtaaatattcgacac

SEQ ID NO: 1918 - DNA, 599 bp, Canis familiaris
  misc_feature (1)..(599): n = a or c or g or t
gatctgttaccccagcttcctctacnnattcactacaattttgatcccatgtggtaggcagattttaaaatgatgcctcaaatactcattctttgatgtctacaccttttataatcctctgcctttaagtgtgaatggagcttataaatatgatgtgatagtcagtcccttgactaaattatgctatatagcaaatggtggtgaaatagtcattttgtggttactttcaattttaagactccttctagcaggctggagaaagattggaagtatgagaacacctaagaaggaggtcctgcaacaaagacctgagattgtcttccaggagctgaaagtggtccttggagagccagtaagacaacaaggccctcagtcacataacggcaaggaaatcaattctgtcaagaaaccaagggagctcagaagtctatctttcccaagctgagcctccagatgaggatgcagaaggccaacacagtcatttcatacttgtgagatcttgagcagaggacactgctaaaacatgccagaagcctgactcagtgaacctatgaaataagaaatttctgttgttctaagcctttaagtttgcggtaatt

SEQ ID NO: 1919 - DNA, 428 bp, Canis familiaris
  misc_feature (1)..(428): n = a or c or g or t
cagtgcagctgggaaatcactgcccagatgtggggcctggtctgccccctccaaggccagcgagaggaaggtgctgtcaccatggagaagtcccaggggactggcaagagtgccagcaccagtaccgcgagtcccgtccttgccccagaccggggtggtggtcctcctacactcagggcagggctgggaagcagctcagggctccctgagaaggcaggtgctctggcaccccgcaccgccgacttccccgtcgcttctgattgtcagtccccacctctgngctgcgcggccgggcaggcatgtagccacgtgggtcctcggcacccagctctgaaccagagggtccctggccccgagcagtggccctggggctggcgccggcaggctgccgggctgtggtcggaggcgagaaggcgaccacatggagc

SEQ ID NO: 1920 - DNA, 490 bp, Canis familiaris
  misc_feature (1)..(490): n = a or c or g or t
gaattcccattccctnnatctggcaggtgtatacagaggtggctatgacttattggnnnggtnnannnnngccttagnnnntggagtnnncatgcaggtnanngtcagaagcaaagagggaacacctgtagatgttatcttggnnnnngttggntaaatgtttnctgnnnnngannnnnntgatgcatacttnnntgtcagtgggcttttagnnnngtggcannnatttcccagaatcatactttaaagattaatgtctttggannngcaaattaaatatttggcccngagccagcagatcaagcaagtatctgtccttgtgcatgtaantnnnttnnntttctttttttttttattacacttggtcaactttggtatgntannnnagctttgggtgatcttnnnaatcaaatnnnatcctgtacccnnnnnngcttaacttcattatattttttaatttaatgtgtgtctgaaagctcctgacaatgtt

SEQ ID NO: 1921 - DNA, 296 bp, Canis familiaris
  misc_feature (1)..(296): n = a or c or g or t
gtttctgtaggtggagaaaaggtgttggtgactcanntgnnagcnnnngtcccttggtctcccgaggaatgccagtcctatgtagagtgaggaccnnntggtcaagagagatctnnncaagttctctccgagnagtgatgcttagacccttgaagaaanaagtgtccctctccaagtccgaattatttctcttnnngtgttctctttttgtnnnggccttcatttgnnnatatttttaatgcgagaggtcataaggaattcatgcagcgatctttgtttttannnnnnngtcatcc

SEQ ID NO: 1922 - DNA, 668 bp, Canis familiaris
  misc_feature (1)..(668): n = a or c or g or t
gatacacagtagagaagcgaganngctancctcttcggccagaactcattgagagcgcaatgtacctctaccgtgccacgggggatcccaccctcttagaactcggaagagatgctgtggaatccattgaaaaaatcagcaaggtnnagtgtngatttgctacaatcaaagatctgcgagaccacaaactggacaaccgcatggagtctttcttcctggccgagactgtgaaatacctctaccttctgtttgaccccaccaacttcatccacaataacggctccaccttcgatacggtgataaccccctatggggagtgcatcctgggcgcagggggttacatcttcaacacagaggcacaccccattgaccccgcagctctgcactgctgccagaggctgaaggaagagcagtgggaagtggaagacttgatgagggaattctactctctcaagcggaacaggtcgaggtttcagaaaaaaacgatgagctcggggccatggcaacctccaacaggggcaggcacgttctcctcacctgaaagccaagaccagatgagggagaagcctgccaagcagaaggtcccactgctcagctgcccgagtcagccctttacttccaagttggcannnctgggacaggttttcctggactcctcataaccactg

SEQ ID NO: 1923 - DNA, 652 bp, Canis familiaris
  misc_feature (1)..(652): n = a or c or g or t
agcatatggtacaaatctgnnggctcttaaaagttgttcagagccaagttgagaagacctctgacaaggtcgcagtttttcagtatggtacatcattcctccgctctaggagcactttgatgtaaacctgtatacatttaagaagcaaaaaagggtcataaatctccaaaatctagatgctagtactagctgaatatttttaatgttctgtattttacagaaagtaatattgatgacatttctaaaatataaaatgtaagtagaatcattaaaaactaatgattgtgattcttccagttgcaaaagaatttggagaaagggttagaatattttcctgtgattaggagagtatactgtccaaaggctttaatttaaagaaagtaaagcagcagctttagaatagcttcctactgaatatacaaaagaagaacctttagctattttttgatccaagtatcagaaatttaccttttctcctaatttcttataaaaaacagtgaattaagagtcataaatacaatagattagaataagaattaccagcccaatgtcaaattctactttgaagagtatgtacgtattcaaacctcattcagatgtctatgcaatagtaagttagaatatgattatcagttgtttcagtgtgttaacg

SEQ ID NO: 1924 - DNA, 297 bp, Canis familiaris
  misc_feature (1)..(297): n = a or c or g or t
agaaatccagcgttannagactagaatnnnatttgaannngcagaggcgtcatcannngagtnctcnnnnngtgtgcttcataatcgaaacggctgtggaccagacgctgacaaacgcgatccacgccaaaagaattagtcttgtatcccgtatcccaagataaactgggggacattacagaaggctcctgtgtatcctcgttagtcacagcccgtccggtcatttgtttttgtgaatattgtgtaagtaatgatcctagctgcattatttttaaaaattttgttcatttattcata

SEQ ID NO: 1925 - DNA, 463 bp, Canis familiaris
  misc_feature (1)..(463): n = a or c or g or t
tcatttngccacttttgcnnnaattcattttgcaaggaacaccaggatgggacagccttcagctccacccaggatgggcggtcgtactgctacgagcatgacttgggggcagagtcggctcgaagcaccaagactgagaaacccttcccggaacccatgaagtccaaggggaagaggaagaaaaggaggtgctggaggagagtcacggaaggcaaatagcgccaggcagcggcttggccagatccaggggtaaagggccacagaggggactggcccaaggacccagctcgaagccgctatgccagccacctaggcctcctgggggggagcgccgtccaccactgagccatcctcagcagcgcccgctgcgtctgcactgacgacccatctgagccacaaggttcagaaggttcctggacaaacaagccttactccacagcattacagctacacttgaatttct

SEQ ID NO: 1926 - DNA, 315 bp, Canis familiaris
  misc_feature (1)..(315): n = a or c or g or t
atttannntcctcggggctgcccaggcaggtcctcnnngcccctctnnnnnngcnntgcnnncccccaaacctggnnnnaccccgtgcgcctgctnngnnnaactgcagaagcaagtcannnnnnntgctcccccacctcagctgggccctgcaaggccagctgccccaggagccagggaaactgagggaggaaaggagtcaggaggaggagctggcagagctggagtccagatgaacccgagccaccctgggaatgtgctggaccaggtccggaagtcctaggtcccagaagagtcacatactagccactgggt

SEQ ID NO: 1927 - DNA, 407 bp, Canis familiaris
  misc_feature (1)..(407): n = a or c or g or t
cnngnngccacacgnnnnnngctgggtttcnncaatcccagcacnnnnntgtgagcccggccacagagtacttgagcgggactcctgacatgccacgcacgcaggcagcatctgctttacctgttagtctagctctgtctgcagggggcctgcggccaccagcacacaggccccatgtgcacacgtgcacctgacaagccttcctcagaggggcgggagctctgtgagtcccgcacgcaccctcacactgtggtcannnctgttttcctggacacccctgccctgtccgagtcctcagcagtgatcactgtgcctgcctcagcgctgtcagcagggnnnngacatgcgcagagcctcgatggctccaccctggtgaatgtcccatccatacaggtgtccctcttgct

SEQ ID NO: 1928 - DNA, 538 bp, Canis familiaris
  misc_feature (1)..(538): n = a or c or g or t
ttcatagnttttaatcaaaatgaacnnggaatgttattctgnnnnnnnannngtnnnnnnnnnnnnaaataaaagggtgcagtagcttctttattcattttataggtatttaattganntattaaaggaaccatactngaaattnagatcaaagtgatattagacttaaagtagtcatgaagaaagtcttaagatgtaatgttacagaattctattccaagaagtnnnnngcactcaaagcagggacattgaaggaattggagcacatgatgtcagatctcttgaacagaaagccatgcatccatgacagaaatagtagtcacaaagctagatcaaagacacaggtagatttatttcccactcttgataatcaggcacacagctgttctcagtaaagaagctatttgggggagaaaagtaattacattttcttaaattgtgcgatcttaaaggcaaaagtttgaagacaagtttttatttatataatattcttcaaagactcagaccagaaacattacattcannnnngattcagaaa

SEQ ID NO: 1929 - DNA, 373 bp, Canis familiaris
  misc_feature (1)..(373): n = a or c or g or t
cgcccaccaaagggttnnnctcacacttgaatgtacaacccaccccggctgtcgggaaggccctccgtcctcggcccctgcctcttgctgctgtcctgtccnngagcccctgcaggtcccctcccccacccctgccaagagttcgaacaggtggccccgtgggccccgggcctggagggaagggtcactgtcagccgctcggggcagacacgagaaacctcaaggatcgatcgtggaaggcgtcctttttccttgtagctcacattaggcctgtgtgtttccctcaatatttgtagacgctccagtccctaatactatgatggcatttcggtccctcnnnngcctgggaaggggnnnngcagggacctccgcc

SEQ ID NO: 1930 - DNA, 558 bp, Canis familiaris
  misc_feature (1)..(558): n = a or c or g or t
gtatctgaaatatgtttatagatcttcaggaaagggaagggtacagggtatccaaggaaggnnctnnaggacaacggtggggcagttattccatcaagaacacacgtcgaagttgccctgaaaaaccagccctaccctgtcacgaagcccaccttctggggcctagtgaatgcctctacaccgttgctaggtggcccctggttcccacaagtcacgctggctgccgtgtttactgtgctcctagagccctgtcatgcttctagatgtgcgctgagcagccaggacagggctggagagggctgctggccaaatatcttgactcccagtgggaagcattggttcggatgaaatctcagtgtgtcagcctgtgaaatggatgccttgattcctttctgccgattttctagtacttcatgatctccagtgattatccccctcaaaaatattggtctgcattttggttgttgcggtttcatttttctggcatcgatgaaacagtgaatggaaaacaaagtgctctccccatgtctgaggtggtgtttttcaaggggatgcacc

SEQ ID NO: 1931 - DNA, 679 bp, Canis familiaris
  misc_feature (1)..(679): n = a or c or g or t
ggtntataggctgcagctcgaacagataatcaggagggaaatcaagagtannaactagctttttaaaaaattttaatatttgctttgctaacgtgctgatctgcactaactcgcctttgcaaaagggcctgctcctgcaagatgcccagcaggggcctctgaaagcattccgcaccgtctgccgcaggaactgctctgagcttcagaaagcggcgtccaagtggcctggttgccgggtcttgtgggccaggtgggcaatgcagggctgaggcaggctctgggagccaggtggaagagtgtttgagcaggaaagtcggaggaactgttctcatggaggtggggggttcggcttttctgtctgttgacagctgtctgggctcaggggctgtcagcacagttcccaggggactcgggttttctccgtggtggtttctgaagtgccttgtctgcagacaacctcttactttcttttctccttcagagactgtacatgacagaaggagttctgagtgaactggaagcctagggttgcctgtattactggtttatgagaaataattttatctgagcacacctctaaatttgcttttatcaacataccttacctctgaattgaaagatctatttttcgaagggtcaagacaatgaactgaaaaaactgttggccttttttgtggga

SEQ ID NO: 1932 - DNA, 515 bp, Canis familiaris
  misc_feature (1)..(515): n = a or c or g or t
ttgacgatgnnctgggctgtgccacgtccctgtggcagttgagaatgtnnatatccacgtgtacccatgtgtgtccgtcctcctgttgctcagaggcaactgacttctctgcgtgtttcctgccttgagggcctgggctgggcctctgccccctgcatctctgtctgtctcaaagcacaaggattttcagcccaggaggaaagcctgcggtggtggagacactcctccccggtgctgcggtggtggagacattcctccccggccggcctcctaccaccactggccctgccccaggagagggaccaagccatgtccccaggagcagctggagatggccagaagagtaggcttcaggctacttttatcccttacctaagtgtccaacaggcttctagggcaaagtggcacagaggcccaggaggtccacagactgacacaacctcaggtttccacatcggtggccacagggtagtggccacctgggaagggtgggcatatggccaaggaagcctaca

SEQ ID NO: 1933 - DNA, 640 bp, Canis familiaris
  misc_feature (1)..(640): n = a or c or g or t
ttctgtgtggtatatcgtttnattgattctgtgtggtgcantnntnnngtctcatgtgattgttgagggtctttgggggggtnnnancatggcaaaatggatccagttagagcccccattaatcttgatcattccattcttgtccatcctgttctttttgctttctcattcttatatcctccaaccccatagacactgccacatacaccacgaaaacaaacatcccccatgaccttagccccattccattcactcacaggtgggaattcaggcaaatgtccacagaggtcacagacaacatacatatgattctgttatatccagtatattaccccttcatgtcctaaggaagacctttctcttagagattttcattttagtgtatctttaaaaaatcttgtgttaagttgcctccatcttttttctgggtaagaacaacccaggaatggcccttttatgtctatgatgctgttcacagcttttgataggcttagaacaatcttgggaacagggttgctgtatgctgaaggtcagacagtagctcttagccttgcctatcttatgtagttacgctgtgcattttttttattggtgtaccatgtttgatttgtccctgataacctttggagtttttctgaga

SEQ ID NO: 1934 - DNA, 496 bp, Canis familiaris
  misc_feature (1)..(496): n = a or c or g or t
gtggaccctgnnttcgatgtaggctatnctggcaaggcattagatagcttctcctacttgcacctnnnnaacgtcctgaacttccctattggcgtggtgcgggtcaccagtgtgacgccgcaggacgaggaggacctggccttctacaagggatactacggagacagttctgacacgtatttccgggaggccttacaaggatccgtgggactccccgtggcagtgcagtgcattgctttgccatgggaagaggagctgtgtctccggttcatgaaggaggtggagaccttggtcaagaaccacagggaaccagagtgataggccactccttctggaggccttcctacagcctcctcgaagttggcttctgatgccccttctcaagaatactgtatgtgcctcatgtctcctcctccttgaagcccactggattccttttctttgttgtccttctgcgtgggtacgtaatacatggactcttcagattggcccaaga

SEQ ID NO: 1935 - DNA, 583 bp, Canis familiaris
  misc_feature (1)..(583): n = a or c or g or t
tgcagnnacacagcaatacagatttcagtgttaatgnnagaacatgctacagtgtgttagnctatngcagtcaaagtcgtagtgatgttagaactaagtaacccctcactaggtggactaaagctttgcnnnaaccagccctgcccttgggtacttgagctaattcccacattgccctggcttcatcccttcatcatcatgggttgctcctatcctgaaacctgagggctggcagccnntgagccccctcttcaccaccctacccaccccccgccacacacacaccattagaactgggacctcttaacatggaagtctccctccatccacccctcgggctggagtggtttccacatccagatgctgcagcctccccacctgcctcagacccaccaaacctcaccagcctcttcctggtgtttgagacctgactgtgccctgcacccacccttgcctgcccagcacaagctgaatgaggttgtgagtggggcgggtttcaggggaggggagggggctgacgggctggcacacatggtgattatttgaatggggtcacacattatttatctggcccctacagttt

SEQ ID NO: 1936 - DNA, 591 bp, Canis familiaris
  misc_feature (1)..(591): n = a or c or g or t
caanntgacagctgnngtnctgnngcaactcaagagtnacnaggatattaaagnatgtgaagagattgaattcagccaactcatcttcagnnaagacttcctcagcgacagctactttggggaccacctgcgcggtcagatcgccacggaggagctgcattttggagaaggggtccaccgcaaagccttccgcagcaaagtcatgcggggcctcatgcccgtcttccagcccggccacgcctgtgtcctcaaggtgcacaacgccgttgcctacgggaccaggaacaacgctgagctcatccagaggaactacagactcgccgcccaggaatgctatgtccaaaatactgccagacactatgccaagatctatgctgctgaagcacagcctctggaaggctttggagaagtgccagagtaagtgtgtttatcctctcttgtatcatcacccctggtttgctgtggacctagagcacctggagagaggagaggatgagaaagaccaataggacaagtatttcacctgagctttttggctgagagttatgagaacacacacagacggctcctatcctgttcctcactaggttg

SEQ ID NO: 1937 - DNA, 583 bp, Canis familiaris
  misc_feature (1)..(583): n = a or c or g or t
aagtcgctgtaccacgacatctcnnnngacacttcgggggattancagaagattctgctgaagatctgcggtggcaacgactgagctgtgacgggtggctcacttccgtccacctgccggcaacagcaatgccaggacaaggtcaaaagagtgtccatctgttcctaacaaatccacaaaagagccccccaggtgtcccggtgcagcccgtccgtcagtagagcctggcccgtcctcctccgccctcctctcctgctccgtgcgtcatgctcgtgctgtaggatctgggtccctctctcagggcgcctcttcctccccagccctcacagccgcttgctgctaaagtagacattttatctcttgactcgtgcagtcattcccttttgcttgtggctnnnnnnnnnnntcctattagtcacgtaatctatatttttattcggaagcatctttttttttttaatagtcctcgccagacagacacatacaggcctttgctgcgtacacatttcaggtgagagtggttggcgggggagcaccgtgtcctcagtaaggagtaaaagggaagacctttaacggtaatctt

SEQ ID NO: 1938 - DNA, 52 bp, Canis familiaris
  misc_feature (1)..(52): n = a or c or g or t
angaggatgcggagatgatcctgagtgttcgttaaaccagtcgaaagtcctg

SEQ ID NO: 1939 - DNA, 522 bp, Canis familiaris
  misc_feature (1)..(522): n = a or c or g or t
gagaggcnnnctttatggggagcttgtagacccttggagtgagaagaggtcaagaaatctgactnntgcattctgcatccatgaagatctacaaaccaggttcctgcagaacccctaaaaagtttaccagttttcttgatctgtgcggtagggtatactgacagacttggatggtggactcttgagttcctctccagttttcacattttaggatttttgtgccttttaaaaatctggcagttgagttgtcttaggttatatatttgtctgcagctgcagctcctagaggctagtatacatccttacctgtagccacaggactgtttgcagcacccactccattccccagggcaggcagagggatgtgggtggacatgtccagacagaggtttggagggcattgggtggtaagttcatgttcttttccttctgccatgagaacatatttcccagctggtggctgtttcatcagcctgggtgccagaatggtaagacacttggggcagggctgagggagctggc

SEQ ID NO: 1940 - DNA, 619 bp, Canis familiaris
  misc_feature (1)..(619): n = a or c or g or t
tctgtccccatgtgagatcaaaagcagatacccacagctcccaagttcatattccagccatatgaaccaactctctctccccattnntctttctcaaacacaaactcccatggaaggagctctttcagcttaaattggctcaggaatccatccctgatccagtcaactatgaccaggggtcagggtcccattagtcatgagcagctgttgaaagccaccctctacagatggcaataaggcatttatagatagaaatcatttaagctgagcatatacctcaaaatatatccaccactcacacccactaggatggctatgctaaaaaaacaaaacaaaacaaaacaaaaaaacaaatggaaagtaacaaatgttggctagaatgtggagaaattggaaccctcatgtaatgtaaatggtaatataaatataaatgtaaaatggtgcagttgctatggaaaacagtttggtggttcctcaataaatttaaacatagaattaccatatgacccaacaattctactcctgggtatatacccaaaagaattgaaaacaggtgttcaaacaaaaaacatgtnnnnaaatcttcatagcggcactgttcaccatagccaagaggtgg

SEQ ID NO: 1941 - DNA, 551 bp, Canis familiaris
  misc_feature (1)..(551): n = a or c or g or t
ctgttccactggtnancgtcccagtctgtctccatccctgtctttatcactgcctttcctcgctgtgtctccacctgtttgtgtgctctgcttttccctatcttctttcctttctgcctctgccccgtctcccttgtgcatcctccgtctccaggcctctccagttttttctcttgtgctctacccgggtctctcgtgcatttttctttcctgtcctcggccccctcctcgccttcattacatccagcctttgctctcttccctgccactgtcttccaattcacaaactcttacttgtggcgaaagagaaaaaaaaaaaggaaaaaaatttcaaaacacaaaaaagccaaaacaaaaacaaatctcgagtgtgttgcgaagtgccgcgtcctcccggtggcctttgtgtatgtccctgtggcccgcagcctgcccgcctgccctcgcctgtctgccgtgagtcctgcccgcctgcccgcctgcccctcctgctgatgacatggagttcagtgcctgggtgtctggtgatggttattgatgacaatgtgtag

SEQ ID NO: 1942 - DNA, 598 bp, Canis familiaris
  misc_feature (1)..(598): n = a or c or g or t
cttactttgacatggctgttgccaagttggggaacctgnnnnncggcagtccctttccagagtcnnnnctgagaannaggtagagacctctcttcctattggcttcccctccaggttttaggctttatcccaaagaggggaaagcagggtacatcctctgagcactcaatcctcctctctattcaccctttccattccacagtctcttctgttagaagacgtgaactttcatcttattttcctgacattattgtcacttttaaacatggaacagcaagcctcatggctgtcaagagcagaaagggtggcttttctatattacgaggaagtctgtgaattagttgaccaggcctaatcttgatatagtaaagggccctaccgctaaaagctgcagcaaattcttattttctctccccatagagtctgatcttactgtctttataaagaagcaagcacattatatctaccaccctgaggtttaataatagcttctcagaagaagtccgagaatgcaataaaacaagattcgaaggtgtaactaaaatgcacatctttaacgttagcaaatcatattttaaaaacaatcacagtctaactg

SEQ ID NO: 1943 - DNA, 458 bp, Canis familiaris
gcatgactaccatgacatcattaagcaccccatggacctcagcactgtcaagcggaagatggagaatcgtgattaccgggatgcacaggagtttgctgctgatgtgcggcttatgttctccaactgctataagtacaatccaccagaccacgatgttgtggccatggcacgaaagctacaggatgtatttgagttccgttacgccaagatgccggatgaaccactggaaccagggcctttaccagtctctactgccttgccacctgggttagccaaatcctcttcagagtcctccagcgaggaaagtagcagtgagagctcttctgaagaagacgaggaagaagacgaagaggaggaggaggaagaagaggagagtgaaagctcggactccgaggaagaaagggctcatagactggctgaactacaggagcagcttagggcagtacatgaacaactgg

SEQ ID NO: 1944 - DNA, 384 bp, Canis familiaris
  misc_feature (1)..(384): n = a or c or g or t
gagaccaaggtgggttgcccnnngtcaccccaatcatnacaccagtgcaagttttacccagcagcnnnngtctttcagtaagctttcacagtttctcaggatggaatcctgtcaccctgctgcatgaattgtcactggcaggtcttccccagaacgttccttcctacttctttcctnnntgtatctaagggcnnnactngaggcccctgccccaagctttcagcnnnnnnncncnctctnntacctggtgttcacacaattagctgcttcatcccttctccactattaggtaccctccaagggtccacaagacctatagcagaagnnnnnngcctgagtggctcagcggttgagcacctgtctttggcccagggtgtgattcct

SEQ ID NO: 1945 - DNA, 589 bp, Canis familiaris
  misc_feature (1)..(589): n = a or c or g or t
gctgcccaaggcatgaagaaggnntaccaggacatnnncantgacaaggtnnatgaactgntngctgacattacagaacaacaagaggtggcccagcagatttcagatgccatttctcggcctgtgggctttggagatgttgtagatgaggatgagctattggaagagctagagttgctggagcaggaggaactggctcgggacttgttaaccgtgggtgacaaagaggaagaaccccccgttgaactgcccagtgtaccctctacacatctgcctgtgggaccagaagctcccgaagcagacgaagatgaagcagcacttaagcagttggctgagtgggtatcctgataagtctgggttgcttttcccggcactgccttcattggtctcttttccttaagtgccaagtgctaagctaaaggatcctagcctgttggggaggtcctgctgagcggtgatagtgtgaccctgcctggaaaggggttgttgccctccccttcttggcccaactctgaaaaaggatgttggcgcgagaggagcccccaggcccccttctctttgatagcnnnnnncggtgccctcgttccca

SEQ ID NO: 1946 - DNA, 531 bp, Canis familiaris
  misc_feature (1)..(531): n = a or c or g or t
ttcaaggggcgtagannttggctttaaaactttctaaaaaagatttcaaattcnngtgctttagaatnnccgaggtgcctatcacagctctatctggaaatgctaaattcntgcctcatgctctatgccaaaaccaaattttgagtagccagcaatgggagctcccttcattagtggcaaccaatggcctgtctcaccttgctgaggtctagtaactaggtctctgttcttttgaggaatgcaaattgtcaattgagttttactgaaatgatacttgaagccgtagtgtttcattcattctgttactgtgtcttaatttcacaagcagtttggcctttagttgaaacaggaaatgtttgccttaatgtttttgctatattagaatctttcactgatctgcattttggtattaattattattgtaaaaattaaccacctattatgaacacttatagtgaagttattaaggaaacaccacctatagccttaaaacatctcattcatagacnnnnaatttaaatgaaagattta

SEQ ID NO: 1947 - DNA, 439 bp, Canis familiaris
  misc_feature (1)..(439): n = a or c or g or t
gtgacttgggactctnnncacggtgacatagggagcagcctttggtggtntcctggaactctgggaagacctcatctttcccaactgctaagacnnagcctcccgtggataaannnccctcccggttggcgctcggctgaggacatgccctggctctggaggagagcttgggggtgggtgtgagggaggctgggagccccctgcccctccgtgtccacctggaccccgcctgttggaccttaccgtctgcacctggaggccatttcttgacttggtgccgacttggtcccctttnnagccctgcttgtggccagtccgtgttcacctgggccacggccccgccagccccacccttatgaaggtggggtccctaaggaccctacaggacggggcaggaactcagggatgggagtcaggggggagctaccagtgggaagga

SEQ ID NO: 1948 - DNA, 162 bp, Canis familiaris
  misc_feature (1)..(153): n = a or c or g or t
gggaaaactttcatcctgcttgcctgcctgcctatttgcagaccannnnntggtgatgattccttactggtaaactgcggaagttgggtcctaatgatggcattggaatttcataatgtcctgtataaatgtttttactgctttttgaaaattaaaaaaaaa

SEQ ID NO: 1949 - DNA, 619 bp, Canis familiaris
  misc_feature (1)..(619): n = a or c or g or t
aagagcagagagcgctgtacgatgagcagggaacagtngacgaagatnctgatgtgcttaaccaagatcgggactgggaggcctattgnaggttactttttaaaaagatatctttagaagacattcaggcttttgaaaagacctacaaaggctctgaagaagagctggcagatattaaacaggcctatttggatttcaagggtgacatggatcagatcatggagtctgtgctgtgcgtgcagtacacagaagaacccaggataaggaatattattcaggaagccattgatgctggcgagatcccctcctataatgcctttgtcaaagaatcaaaacaaaagatgaatgcaaggaaaaggagggctcaggaagaggctaaagaagcagaaataagcaggaaggagttgggccttgatgaaggagtagataacttgaaagcaatcattcagagcagacaaaaggatcggcaaaaggaaatggacagttttctggctcagatggaagcaaagtactgcaaacctaaacgaggagggaaaaaaacgcctctcaagaaagaaaagaaataatggaattttctcatcaaaagcccttaggtgtttgttggtgccattgtaggcaa

SEQ ID NO: 1950 - DNA, 368 bp, Canis familiaris
  misc_feature (1)..(368): n = a or c or g or t
taaggtcttcttacttcnnngtgatgataatcctnaaattgaacatgcaaatcnnnntgagacatgaaaagatacttattaatgnnnttnnnnnaagagaggtaagtangaagcagggataattcatnnntaaatcagccagaaggtagttctcttcgtgagtccagcnnnacagtgtaatgggagaggaacgcnnncgttagagccaggatggcaancnnnggctgagagggtgggtgcncagcgtgaggacccagggcagtgccctgccggccactctgtctcatcaagcanntgctccccagaacagcacgaagcccacgttatcatttcagtcttcagaggaggcagcgatccagttacgtatg

SEQ ID NO: 1951 - DNA, 602 bp, Canis familiaris
  misc_feature (1)..(602): n = a or c or g or t
cgcntctttangtctgtgttccattgtgnnactgaaatnnggtnaatgtctatcatttgaaatcattttaagttttaatataataaaatatcctggatttgttcntnnatgaaaataagatcagaattttggaccataagtcttatattttcagtaatgtgatttcagatggtcatctgtgttttcccacatctctttgttctccctgcttttcctttcagcaaacctgaggagaagttagggagacttgattatatgagtaccaggaatgtgagtctttaaaaagttaatagtggtacatgtaaacannnnnnnaaggaaattggttagttctcttggagtaatatcccacaactggggtaggaagctcaggactgattttttttttaaactagtcatttaaaaagtacattgtattgttttttgaatgactacaatatggacaatttagaaaaaccaaaaactcctttgaaatggtggaaatgaaaactggtaactcactgaagtgaatgattactcttacattttaaaagcttatggaaaactcaatttcaaatgattcaaaaatgtcaagtattataagctggtatttaagatgcttg

SEQ ID NO: 1952 - DNA, 573 bp, Canis familiaris
  misc_feature (1)..(573): n = a or c or g or t
tgtgtgacttgaagtnnncgtgtactgtcaggggtggggagtggcttgactctnnaactattgccctgggaacatngacccaaggcagggagnaggctttttccctcgtgttggtatcctgacgctgtagaggagtcgtctctaaagagacttaagagaatcccaaggaccacatcctcacaccctagaggcctcagcccccatcactactctgtgcttcccctgctggcaggctcctgctcccacctccggagaggtaggcaaagccgagtggttctgagccaccctgggcagagtgagttgatatactgctgcatctccaactctgccttccatgggcagcatcaccctggaacagccaccgtgtcaccagttgtatgcttgtctctggcggtggcaggctgtgtcctatggacatctcggcaggctgtggaactcagcctgttaggaacagaactcggccttggggcagccaaaactaggagtatgaaagaatgaagagaaccagtattccccttctctggaagcaggtactcaaagctttctggggaaagtgtgcctcctgccttgaga

SEQ ID NO: 1953 - DNA, 395 bp, Canis familiaris
  misc_feature (1)..(395): n = a or c or g or t
tctgtggtgccatgctgtacaaagtgaagaccattagttataaagagagatgtcaggagcaataccctgtcaacccagaactagcaactctgtcttattttcatccatcagaaggtgtatcagacacatctttttctaagagtgctgagagcagcacnnnntggnnnactacttcttcagaactgagaaaatcagacacaatgtcaaaatctaanncaacagacatggnntctacagnntcagatgatactnnnntgaatgatgaatcagatttaattcagagtgaagaaccaagtgaagaaactcccactgatgaatagacaactttacatttttgtcagaaaagaagtttcttgtgacacccattaaggtcatgatgnnnnnactctactgag

SEQ ID NO: 1954 - DNA, 496 bp, Canis familiaris
  misc_feature (1)..(496): n = a or c or g or t
gagnacagaaactcatncnngaagagatcagaaaacaaatttgnnntaattccatcaccaagaacaaacatgttttttgttttttttttttaagatacctttctcctttcnncccatttatcattcagtaacaatnnctttatncttaacaaagaaaaatattacccatgacctcaaagtgcttccgaactcagggagaaactttttttttcctcttctataaaaacatgacaatcaaggcaggatttaacagtaagaaagtnnnnttggatcatgactggctctgctgcctgtgaatatgaagacacagagacaagctgagagcacaggcaacgaaggaagatcaggctgccctggannnagggcatcttgaattttccataccagtcttcatctccacaacanacaacacttttcaangnnnaanancnangaggaacannnnnntgggaaattctttgccaatattacttttactgtaaannnnnnnnnnann

SEQ ID NO: 1955 - DNA, 585 bp, Canis familiaris
  misc_feature (1)..(585): n = a or c or g or t
ggcccagctgctgctgcttgaaatcatcgaatttcgggcagctggctnnaagacgaccccggctgcccacaagtattactacagtgaggtctccgactaggcctccagctcaggctgcctcaccagcagcacaggcctctcacctacccaactccctgactctcccaaagactgtcccttgcagaccttcagtggctcctgagaagttcctcacttacatggtggtcctgccctgagcaccttctctcctggattcagggactggggaagacaccacacagacctgccctcaccgtcccatcaacctctaccccatcacctccagcctgggccatgcagagaaaggcagcttctaacacccactgcactgtgtaaccaccagtgcaagagccagcttggtgcctcagcttccccatttgtaaaatgggtacccagagctactggtgggatattttgggatattgaggggcagagcacaagtcaccccagaagctgctttttatacattttgtacaaggaccactttggaaacgaatgtatttccagtcaattttagtaaatggcagtttccatatcacatgctac

SEQ ID NO: 1956 - DNA, 169 bp, Canis familiaris
  misc_feature (1)..(169): n = a or c or g or t
cacatcatgacaaagggagccnntctctggtgtctgatcagcagtgagacatcacaaaatgttgaatcatgacatgatggagaaacatttcagaagagnnnnnntgtatgtgtgtatgtttgtcgtgtttgtgngaaagataaagacatngtctcacaagaaagtgcac

SEQ ID NO: 1957 - DNA, 588 bp, Canis familiaris
  misc_feature (1)..(588): n = a or c or g or t
gcttcatgcgtcagtgggtctccttgcctgctggcttctggatgatttggncaaggggaggcagtgacagcaggtgggnaggcaggaggagagactggaaggcaagagggtatggattccctcagcctcctgcctgcctgcctggccacaggtgggcagtggctagatttcacctccaaaaactaacatttctggtggtattttcagagtttgggtaacctccttggttctggaaacccctctgtttctttgcctctaaggcttaggggtggtaatgttagctcatggggtagattcttctgatgtcccctatccctatctacaccttcgtcaagagcttctccattctattcttctcagttactccacttgagtacactcactgcctgcttcctgcccgaaccttgactgatacagggggaaagttgtaggttataaaaatatgtgaacnnnnnntgcctgggtggctgtgtcggttaagcatctgcctttggctcaggtcatgatcctggggtcccgggattgagccccgagtcgggctccctgcttggcggggagccggcttctcccnnnncctctccttctgtt

SEQ ID NO: 1958 - DNA, 590 bp, Canis familiaris
  misc_feature (1)..(590): n = a or c or g or t
atttctcccctngccaggagaggactgtgacctcagaatggggtaccagtgtgtcatggagaagggacccgacttactgatggtgcccagggagcagagtgtnctcttagaggtcagatgttagccatacaggggccagtcctccaacagtcagggtagagtactctaaaaggcactttgttaaaaattcttaaatctgttccctcccactttctcagtgtctgattcagggatctgactttgttttctcaaggcagaattttctccatttttctttgttttcccagcaaactgctatagaaggaaaatacttccttcattcaccccgtttgtcatgtttcatatacttctgaaagaacctaatttctactatctgcatgtagaatgcagtagctgggctctttaaagcacaaagtgaatcttaaaagggtttaggagaaccaagttatgtaccagacaaaactgcattttgggagtcttacagtgaataatactcgagagagacaaataccagaacctttcctttatattattaactgtatgtgggcttccatatgcctgtaaacacatgtccctggaaaagaacctgc

SEQ ID NO: 1959 - DNA, 408 bp, Canis familiaris
  misc_feature (1)..(408): n = a or c or g or t
gggattgtagtttgggtaggatagattttcacattcatactcgcaccaggctgtctggctcactgcaccagcctcacggaggttttgcttccttcccctcttttgatttctccagtctctcctgaagcttcccttaaccagnggtntgccattctttcctcttggtttgcaaaggtctgtaaatatctatatatctaatttatgtataaatctgtgcaaaaaagaacacagaatctcaaagctgacccatgaagcctgagtnnnctggtgtatccccacatctgtaggcccaggggctggcccaggagaggaagagccttatcccagccacagggcatgcnnntggtagattggccattccaatccagcacttnnnnnaaatgtcttttggagtangtggtnnnccca

SEQ ID NO: 1960 - DNA, 617 bp, Canis familiaris
  misc_feature (1)..(617): n = a or c or g or t
aatnacacgatccaatgtaccagtatcgagttgacacaggaaattttcagggaatgaagattttcttcatggtggtgnnanccgtgtatattttataccttctgttcttgatcgtgcgggcctgttctgagctgcgtcacatgccttatgtagatctcaggttaaaatttttgactgcattgacttttgtagtgcttgttattagcatcgtcatcctttatttaaggtttggagcacaagtattacaagacaattttgtagctgaactgtcaactcactaccagaattcagctgaattcttatctttctacggcttgttgaacttttacctctacactttggcctttgtgtactctccgtcgaagaacgccctgtatgagtcgcagctgaaagacaaccctgcattctccatgctgaatgactctgacgatgatgtgatctatgggagcgactatgaagaaatgcccctgcagaacggccaggccatccgggcacagtacaaagaaggatctgagagtgactgagtcccgggccgacgcgttgctgccgcaccgcttcctgaccgcctctgccactgctggtgttcggcctggtctcagaagcagaggattcctggt

SEQ ID NO: 1961 - DNA, 532 bp, Canis familiaris
tgcaactcaaaggggagggctactgattcaggtgacaatgaagaggaacaccttgcttcccctaactattgtcccttggtgtcagggatccctgacctgacagtacccccacaccaaagctcctccatcagtcatcacaaaggaggtgaagagtgtagcatagcggtcccatttcccttcccctttgccatctggccttcaattggaaatgataagaattctccagatgggagatcatcacttggtccccagggaaggtttcagcccctgccaatgccacatcctcctcccctacttttgaagaagtcccaagaaagcccctttctcaccagacttttggtgtgagatgtgagccctggaatgttttctccatgatgtgtgctcatggccaactccattccatatatacttggtttttaattccaggctaaggctacattctcttcaatgtcttgatagctctttctctgctcctagagggcaagacactgtttctcatacatttctggatccctggtgcttagctcagaac

SEQ ID NO: 1962 - DNA, 604 bp, Canis familiaris
  misc_feature (1)..(604): n = a or c or g or t
ttctgtgagtggtggtgcttggtgcgtgtgtcccgggcatgagcataggtcacctgcatacaggctgacggtgctgggctggcctcgcacggcccaggcgccagggtcgttaataccaagtgacagcagtcannagcctcaagacagcaccgtcccctcctccgttcacagcactgccttccccgcagcctcttgctgctcaggggtgcggcccacaggccggggtggggaggatgtggggtgcctgcgcggcaggaggggcagctgggagggtgggagggcaggggccagccacgatgcaataacgtttgcccagtccagacaccagtttgaactgtacgcacagacttttctataccaaaagtattttttgactacaccattcgaaactaccagaatgatgtcggaaatgtttttttctctcattaaaatccaggcccttaggctttattttccatgtaggagtcccgtgtataatttatgtatgaacacgtgtgtaggtcctgctgtagtcagtcacctttaagcattgattgtacacagtgtggtgatgaagcgtgagcnnnnnntgggacggcctctnnnnntggacgcccccgctgcg

SEQ ID NO: 1963 - DNA, 602 bp, Canis familiaris
  misc_feature (1)..(602): n = a or c or g or t
gcancacgtcccactgtacagatggggacacgaggctcagagaggctgatggacttgcccanngccacacagcnnnactcaaacccaggnntgaggnnagtgggcatcactcctgctcggtggcannagggtgcgggcgctaagctgcagctgcatcacaggcccactgcggccagtgcagatcctggcgacgcaaggccccacgagagccagagcgctggtttccagttcctgcgctgttggcggccaggctcgagggccaagcgcctcccgggcccatccctgtttccccagggtccgcataaggcaccaccctgcctgcaagcagacacccagaccccgtgggggaggcgcactcgggagaacccgggctccccgctgggcttcacagcagcccccacccgcacctggatgggggccggagccaggcacctggtacgtattgggcacctgcacctcacgggctggaaaacagacctgagagaatgggctcatacggccagaggccgtggatccgggccctgccaccaggcccagggctgtgctgtccagctccctgggggccagggagtgaccagacaccaggaccagagcgaggcctc

SEQ ID NO: 1964 - DNA, 625 bp, Canis familiaris
  misc_feature (1)..(625): n = a or c or g or t
atggctttttacaccaactctaatccatannnnnntnntacgacatccatgnngtagtagcaagacatgcttagtgtgtatttctctctttnnnacactgtaatttctaccagaaatttccagagcattatgtaagtagaaaaaaatgcaagcaagctgttaaagatcttggatcccattatatagtatgtatagctgaaatcagcatctgtaattcaatcactttttctcttttatcctctaaccaaaaaattgtttaattttgcatcccaaatgtttttaatctttgtatattttttaaaaatccttttctcctcatcattgccttttttgtggttgtaaatagacttacttgcactttgaagatgagttactccttgtcatcttacaaatatgtgatatggtaattttcataacagatgtcagttttgaaccaagaaatggtgatttgtttataagaaaaaaaactggcttcatttctgtgaaattgctctttgaaaatttctttttacacgtgtaagccaactgagataccgtgacggtgttgatttctttcaatgatgcttaccatctattttagccactgagccttttattatttgtctatttgtaaagtttatttgtc

SEQ ID NO: 1965 - DNA, 422 bp, Canis familiaris
  misc_feature (1)..(422): n = a or c or g or t
attcactgttnnnctcggtgccagtnnncgttctaactgctttacttcattaactcatttattcctcacaaaaactctatgaggtaggtactgatggggttcagggcaggctgccccaaaatgggttgctttggcatcttattttaaaccagtgcaagaagggctctctggccccttctttgtcccctgaaagcaagaaatacatctccatggggaagtaccctccctgtcccaggagagagacctcctcatcaccagagggaattaagggccgagaaagctgtttaaacaaaccttgttatttcttcacccatcttctactccaagagcccaaaccccttggtcttgtcaattcttcacagatgtgtttgtctaaaaggtgttaaagctgcctgctctggtcatttctttaagcctcataa

SEQ ID NO: 1966 - DNA, 528 bp, Canis familiaris
ccccctccctcccagctcagtcaatacttgaactcccatcacgggcactttcaatccccagtgccgggtcttgggttttttaattcatctttttccaaaacatgggctttaaaaaaaattcctacagtgatgtcaattttttttaaatccctgtccccaaggagggtgggaactgttgctagacccccttgaattaggccggttttgcccccatcccctcaacaccctacagatcctgcctccatccaattctgccccacacccaaagcactggaagctggagatctggattcaagtgccagctctgccactgaccccatggccctggcccacccctgccctctcaaccagtgtcttcacacacgttatgtgggatggtgaccagacccctcctgcctctcccatggcttacagcttttccccagccccaagctacccagtattttatcgtccagacccatggcagggccacagggcaggacaggggaatggtggtggggggcggggggcggggaggaggaccatgga

SEQ ID NO: 1967 - DNA, 626 bp, Canis familiaris
  misc_feature (1)..(626): n = a or c or g or t
tacgcagnngctactatgtcacccgcaagctctttgnngctganntgcagcgtgtcattgccaactgcngcgagtacaaccccccagacagcgagtactgccgctgcgccagcgccctggagaaattcttctacttcaagctcaaggagggtgggctcattgacaagtagtctctggctttggaccacagccttgacctggaatgtctctacatcgggttctgatccaatctcgagggggtgcccctggtgcctgggttcctctcagcctgagacactccagccctcggccctgcagccccttctggacacctgcagctctgtcccacttttccttgtatctgaccttggggggggatctcctgggtctggggctccgcctctctaaagtgactggtggctagaggcacagccttcctggggccgtggtggcctccagccctgtccccatagagccatggagtcttggagtcctgggcctggcctgtcccactatttcctcaagggttgggactgccaattttagcttgagggaaggggcttcagcatttgaaagttcagctgggactggggggtcatgcctcaccctgcactgtctgtcccccagnggtgggggccctggggacc

SEQ ID NO: 1968 - DNA, 547 bp, Canis familiaris
  misc_feature (1)..(547): n = a or c or g or t
gaaaaaggcntgcnaggtgacccagtcccganacgccaanaccatgaccacatcccacctgaaacagtgcattgagctggagcagcagtttgactttnnaaaggatctggtggcctctgtgcctgacatgcagggagacggggaagacaaccacatggatggggacaagggtacccgcaggggtcggaagncaggcagcagtggccggaagaatggtgggatgggaagcaaaagcaaggacaagaagctgtcagggacggactcagagcaagaggatgagtctgaggacacagacactgagggagaagaggaggcaccccaggcgccaccccaggctggccatccccctgcccactttcagagccccccgacacccttcatgcccttcacttcgactctgcctctgcccccagcacccccgggcccctcagcacctgacgcagaggatgaagaggactatgactcctagcggcctctgcccccccccaggccacacccccttttagttggttttagttgctctggggggaggagagaagatagagct

SEQ ID NO: 1969 - DNA, 627 bp, Canis familiaris
  misc_feature (1)..(627): n = a or c or g or t
ctgacagagagggannnnnnngtgatcacctgcttcgagagggnnnnntggatcgctcaggtgtcnntgcangagtnggagaagatcacaaataacaccacatcacggcatctgaaaggctctcacccggttgactacgagctcacctacttcctnnaagctgccctccagagtgcttatgtgacaaacctgaagaagggtgccaggccagggaggcggtgtgtcgccatttgggacatgcagaccgggaggcccagagagccaaggcggcttggcccccaaggatggagctagcccagaccctgggctcctcagaccaccctgtggctggcagggtacgggctgaaggacatcacagggaccctgggaagcatgctgcctctgttctacctctaccatctgggcttttctttccttttatggttgctgagcttcagtttcgtagacacagtggcccggtgggccagttcctgtttttgctgcccaggcagctgccacctggccacttctccctagctgcaggcagcccctgccctggctctgcccccacccctgggacccccttcggtctgcaggatgaatgaggggtgtggagagatggcccctcagctgaaccttcgcagtatg

SEQ ID NO: 1970 - DNA, 617 bp, Canis familiaris
  misc_feature (1)..(617): n = a or c or g or t
taaanatnnctgaaaannagtgtatttaatgaaagcaagtganngctgatagttaaatgggatgaatgaatggatggatggatagatagataatgagaatttctaaaacatagccatatcggattgtagggcaattacccatctcagtaatttttaagggtatcatgttgtactagaaaattaagtggattgatattccaataaggaatattagggaaagaacattgtgattatctgcatggtctattttaaagtttaagaaggcatgttagacttatttcatcaaaggtagttaaaataacagttttagactttagagggataaacgtcatatgactaaagaacatttaaatagaatgcttcattcctgagtgatgttggatgaggtaccattgtattacatgttgatgatggttctgtgccttggttctttgctaatccaaatcaatctgactctttaacatgaaaagtttgccagtataaccaatatgctgtgataatttaataagtttcagagatagttgaggaaacatgagatctgccatcatatctgtggacattataacctagattgtaatccatttccaatatgtcttcaactgctatatctagtaaga

SEQ ID NO: 1971 - DNA, 553 bp, Canis familiaris
  misc_feature (1)..(553): n = a or c or g or t
cagcaattcaggactgtgcatcgtaaatgacgagctannnnngnnnnntgccagcgctgatgagatccagagagnnttcgccatgcctgcacctacaccttcctccagtnnagtgcccaccctgtccccagagcagcannaaatgctgcaggcattctctacccagtctggcatgaatcttgaatggtcccagaagtgccttcaagacaacaactgggactacaccagatctgcccaggcctttactcatctcaaggccaagggcgagatcccagaagtggcgtttatgaagtgatctgtagtcctgccccagaagaagctccctgtaaaatagcccttggatattgatgtctccttgtcatggctgtcgtctcctctctggccccgaggccaccccgtgactgtgactcaagaggaagggctgctggatccctctcctcacctgccttctggaagacttctggaagccttccagaagattgagcctcactggtgccaggaagccaaagcttactttgtagaactgacactaaactnnnngaaggacttaggt

SEQ ID NO: 1972 - DNA, 516 bp, Canis familiaris
  misc_feature (1)..(516): n = a or c or g or t
gcgactatggtnncggccaagtgccaacggtggcgggctagaacgggctttgcaaggggttctgcacacaggtgttgcagannagcagcacctgggcttgcaccagagaagaggaggggggtggggacgccctgaggccccttcctgccctgcggcctttccctggaaggaagggccaggcctgaatgccgggcggggagcagaagcgctcttgccccgcgtactgctttccccaggctctgcctctgctcacgcacgattctgctgccggggcttaaccccgaaaggggaaggtcgtggggtcccatccccaggcgggggtgcgggatgcttcagatccgtgtgcctccttggccgcagcatccctgggggccttcccaaccctcggcaccgccggtcccggctctccaagccagattttgaaaagcatcgttggggtgagaacgtgttccttccttagcttctttgtatgtgaccactgttcgtcttcttnnnnntgtatctttttttaaaact

SEQ ID NO: 1973 - DNA, 560 bp, Canis familiaris
  misc_feature (1)..(560): n = a or c or g or t
ctgaggaagaattcttgagaggacttccgtgcaaaagagagataggaaaactcattcctaaattcatatngnanctcgagggatcatgaattgccaaaatgatcttgaaaaagaacaagagaggaggaggactcacttcttgacttcaaaatttattacaaagccataggtaatcaaaactgtggtattggcataaagacagatatgtcaagtaatgggataaaatagagaccccagaaataaactctcacacatatggtcaaatgatttttgagagggacgtcaagtctgttcagtgtgaaaggatagtctgttcaacaaatggtgttgggaaaactggatatccacattaactcaaaatggatcaaggaccaaattaagacctgaaacaaaatttctagaaaacaggacaaaagttttgggatatccaacttggcaatgatttctgatatgacatcaaaggcacagtaacaaaaggaaaattagagaaattgactctgaaaatttaaagatattttatatcagaagacgctatcatcagagtagaaaggtaactcaga

SEQ ID NO: 1974 - DNA, 462 bp, Canis familiaris
  misc_feature (1)..(462): n = a or c or g or t
cactggagctccagaaccagctggatgagtnnaaggagaaaaatcgcagggaacttgcagaaatgcaaaggcagttgaaggagannncgctagaggctgaaaagtcacgtctgactgccatgaaactgcaggatgagatgcgtctgatggaggaggagttacgggactaccagagagctcaggatgaggcgctcacaaaaaggcagcttctggagcagacactcaaggacctggaatacgagctggaggccaaaagtcacctcaaagatgaccgaagcagactcgtcaagcagatggaggacaaggtgtctcagctggagatggaactggaagaagaaagaaataactcggatttgctctcggagaggatcacacggagcagggaacagaaacttctgaagggatgtactttcaatgacaacatagtcgtatgctgcccttctgaaaatggtactggagaaa

SEQ ID NO: 1975 - DNA, 630 bp, Canis familiaris
  misc_feature (1)..(630): n = a or c or g or t
gaaaaactggggcacagaacccccaggagagccttgctctgggcccatggnntaagaacagagtcacttgcagggggcctgnnaagagagggagacaccccactgcctcctgggggggtccttcatgttcagcttccttatacctaagaaatggctccctgtcccaccctctgcagaggtggggggaccaggaatctgcccattcacatggcaagtctgaaggagggcctctcccctctgacccagtggccctatgcagagttttgcaccagcaggaccccttcgagggtcttcgaggctcttccaggagcccccctctgccagcttccaatgtcccagccccctcctgggctcatgtcacacccacccaagggcctggggctgttgggagccaaaggccccccaataccaatcccttcacaattcctgattagggggacacccaccccctggtaatttgtaaatatttctattgggcccaacaccccctgggaactggctcaaacctctggccgcccctcagtgatggagttgggatgtgggagaggccgagggctctgcccaggagtgtgtgggtaaccctgtacacatgatccnnnnngtgactaccagccaacnnnntaaagcgnn

SEQ ID NO: 1976 - DNA, 431 bp, Canis familiaris
  misc_feature (1)..(431): n = a or c or g or t
agggatgnnnnntcaagnnnnctttgttcctgccttgaatgtcccatgaacaccaaacttttcctactatcatgngcaggaactcntggtcatagaccccatgnnnctcagaggctccagaattcagtttgatccctggttttcagccctcttgcnaggcttcctgtctggatttgcctgaagaatttggataaaacnnagcatgttgggtagccctccctgtcctttttttttttttttttccccctccctatccttcttattctaacccaaagcatttcctacccattgtnnacagtcccagaagtaaatccattactgaggcaggcaaggagccgggcttttaagggcaagtggagggcctttgccacactgctgccaactatggggagtcccagataaaggcctgcgncagctggtatgagnnntgt

SEQ ID NO: 1977 - DNA, 670 bp, Canis familiaris
ttttataagtaatatgaataaatatgagaatagtcatttatattatttttaaagtaggtagatgctaggcagaacattttctctttagatactttctaattaaaagagaactattatttgcccctatagctatttgtcatttttagtaaatgatttggaaaagaatactcagatatgggaccttttattcttaagtatagcagttacttcacaatgagaagtgtgatatattctttatttgtgttcgaattttgtgcaaagttattgaacatattactttggacaaaagtttgagatacggggtgcagagggttttagtatatacaaggagtgcttgttactgagaaggatatactacattgtcttttcccaatgtaaatattagtataaatacttaattttcattgataaatgtcatttctatattcagagaatctgtctcataaaaatctcatagaatatgaaggcaagatccttcacaaaaaaccaccaccctaagacaatttctgtgataaaaagatttcaacaccatcatttaagtctcatctatttctagcatactaaatctgaatacctcaaaattttaatgatttcatagaggcaattgtagtagaattttgttattatggaaatagatacattccatttgtataaattttatttatatcat

SEQ ID NO: 1978 - DNA, 620 bp, Canis familiaris
  misc_feature (1)..(620): n = a or c or g or t
ctgacnaggtcacagtcaaggctgtttttgaatgtgagggcagctgttccctggcccccanngtacagccctcctgctgccaggacttgcttgagctgccaggaccagannaggcagagctcccggctggcgctgtaactgctggctctccccgggcagcccaggggctaagacggcaggtggcttctcagttcctctgggctcagagtggcagcttacactgtgccacttggcagccttgcacttgggaattttaagcagaggtgacatctggttgacacctcaggtgaaaatctgggttcaaaatgtaatttttgcccaggcgccttcctgcttagtaggctaagataccccaggggtaggggtgctggttacctcagccaggtggaagacggccagtcctgagctcttccctgcccgagagccagcccaagagggcaggctgcagcaggactgctgtggggagcacgcctgctgcccctctcactgacccagggtaggcgatgtcctagcagaggaagcccctctgccctgtctggccaccctctggccagccgaaagcactcagaaaccgagcccttcctatttcctcttccccacatggtgctgaggctccctgc

SEQ ID NO: 1979 - DNA, 615 bp, Canis familiaris
  misc_feature (1)..(615): n = a or c or g or t
taagcagagccaccctttcttttagntaccatttgcatggaatattttccattccttcactttcagtctgtgtgtattcttcaatataccacaagtctcttatgacagcatgttactggttcttgttttatttatccattcagccactccatggcttttgagtaaagagtttaatgctggggcacctgggtggctcagtcggttgagcatctgactcttggttttggcttagatcttgacctcagggtcaggagatcaagccccatgtctggctccgcgttcaggagagagtctgctgggattctctctctcttctccctctgcccttgacctgctcacatgcatgtgcactctctctggaaaaatacatctttttctttctttcttttttttttttaatgagtttatgggcagccccggtgacttagcagtttagcgccaccttcggcccaggatcacacctcaggctgaaggcagcgctaaaccgctgggccaccagagctgcccctgggaaaaccattcttgaatgagttgtgaaagaaatgagaactggcaagtcaaggaagagtcttctgtatagtggcccttcggcaaaatctttatatgtttctctct

SEQ ID NO: 1980 - DNA, 466 bp, Canis familiaris
  misc_feature (1)..(466): n = a or c or g or t
caagatcctttcngcaggctaattcccntcgcccgacggcatagggagtgtccttattgctaaaaaggattctgtctccttcaaagaagttttatttttggtccagagtacttgttttccgactcatccagctagccctgcaccagctttttgaaatgcactatgcttgatcgccgatcgtgttttaactttttcttttcctgtttttattttggtataaagtcattgcctttatttgtaaaactgttataaatatatattatataaatatattaaaaaggaaaatgtttcagatgtttatttgtataattacttgatctacaaagtgagaaaaatgaatgtattcctgtttttgaagagaagaataatttttttctctagggagaggtacagtgtttatattttggagccttcctgaaggtgtgaaattgtaaatatttttatctatgagtcaatgttaagtagt

SEQ ID NO: 1981 - DNA, 623 bp, Canis familiaris
  misc_feature (1)..(623): n = a or c or g or t
atataagtataantgatctttcaaactannttagntgttgggcttcccacagtaggacagtattgtaaagtgtaaggtaagctctgaatctgattataaatggaatgtagattacctagaagttatttcttatttatattgttaatagtaagaaatgactaggttatcttaaatttaaaaattccttctgctttgcacagaacttagcagaatgtgttttaaattccatagccacccagggatccccattaaattattttaaaacatacatataactcatgagaagtgttcaaatgtaaatattagctgtcaaaatcatattttaaataatataaatacttgcaaaatatactagaatgtattaattttcttactattcttaaactgttttcattctgtttaggcaaccttagttttctctagacttgaatagatttaaatgctttttattaccctgtctgtggcttcaaaaccacaaaatactatgccatctattataaggggagctttattcttgagcttaattgtccaaaacagaacttagtcatttttttgttcatcccagaagagtgcatttctacagttcttttacctctataagttgtcagacttcctacatcatt

SEQ ID NO: 1982 - DNA, 120 bp, Canis familiaris
taattcattactccgtttcatttctgtctttctccaaaatctgagcatttttgtaccattagcccattctgttttgagtaatgttacagagcacagaaaaactgtgtagaatagaccttt

SEQ ID NO: 1983 - DNA, 561 bp, Canis familiaris
  misc_feature (1)..(561): n = a or c or g or t
gagatccaactgaaagaggccaagcacattgctgaagatgccgaccgcaagtatgaagaggtggcccgtaagctggtcatcattgagagcgacctggaacgcgcagaagaacgggctgagctctcagaaagcaaatgtgccgagcttgaagaagaattgaaaactgtgacgaacaacttgaagtcactggaggctcaggctgagaagtactcgcagaaggaagacaaatatgaggaagagatcaaggttctttctgacaagctgaaggaggccgagactcgggctgagtttgcggagaggtcagtaactaaattggagaaaagcattgatgacttagaagacgagctgtacgctcagaaactgaagtacaaagccatcagcgaggagctggaccacgctctcaacgatatgacttccatataagtttctttgcttcactcctcctgagaccccttcatcaagctggctgtcccacctctctgagctctgcaggtggctgtatgttccccagctgccctggctcgctnnnnnagcaccctgcccangagccaggcacaccgc

SEQ ID NO: 1984 - DNA, 504 bp, Canis familiaris
  misc_feature (1)..(504): n = a or c or g or t
actggggnntcgtncagcagctcgnnnagcaccaaggctacactgtacccaccgatcctgaacccgccgnngtcccccgccacagacccctccttgtacaacgtggatgtgttctactcttcaaacattcccaccactgcgagaccctacaggccctacatcatccgaggcgtggcacccccaacgacaccctgcagcacggatgtgtgcgacagtgactacagcgccacccgctggaaggccagcaagtactacctggatttgaactcagactcagacccctacccaccaccgcccacgccccacagccagtacctgtctgcagaggacagctgccccccttcgccggccaccgagaggagctacttccatctcttccctccccctccgtccccctgcacggactcatcctgacccctgccgggccacccttgtaaatagttttaaatatgaacaaagaaaaaaatatattttatgatttaaaaaaaataaatagagttggga

SEQ ID NO: 1985 - DNA, 497 bp, Canis familiaris
  misc_feature (1)..(497): n = a or c or g or t
ctccagcagaggcacctgcctgggtgtcatnnnagagaaatcctctttgactcgagcttggcagtcaggcaaggccaggctgtccatcctggtgagggtaggaggccctcgggctcccccggatgtaggggagcagggctacgggctcagggagtgctnnnntgctgtgggaggcacagctacagctgcagccggctccctgtgttcccggaggtggcctggaggctccagcgttgtggcttctagggacagccaggccacagaggaaggnnnnggagatcccggggtggggagggggccgagcagggatggatactattgggagtctccaagccctggactgtggtccgtctcagatttttttctcgtaaagaatgtacatgaatgtgagcacacggagaggtctcgtggaagaaaacaagctgtggaatcgtccagacctggttcagtcctagcctgctgccttccagnnnnnntgacctggacagaccactccc

SEQ ID NO: 1986 - DNA, 609 bp, Canis familiaris
  misc_feature (1)..(609): n = a or c or g or t
gcagtgacttcaagggnntactagagccaccagtnnnggggcaaatggtnnntacnnagtngctgatgttcccnctgaatgttgataagctcgtaaagtggtggtttcccctccacttgatgaaaagtacacgtcctcaagctccttctggccccaccttctactccacaacgtttccaattttcggagaaggcggggacacttttctctttctacctggatggaccaagggccaagtctggatcaatgggtttaatttgggccggtactggacaaagcgagggccccaacagaccctctatgtgccacgacctctgctgttttctagaggaggcctcaacaaaattacattgctggagctagaaagcgtgcctctccagccccaaatccagtttgtggataggcctatacttaatagcacttcacataagacatttgtctattccctctcagttgaaacgccaagcgcccctgaaccaatggagttaagtgggcactgaaagaaaggtaaccttggacccgggacatggagtgggcaggatcccttggtgctggccacggtgaccgccaggaaccaaaggccacaacctgaatgcaatacaagtgcag

SEQ ID NO: 1987 - DNA, 651 bp, Canis familiaris
  misc_feature (1)..(651): n = a or c or g or t
tnnncaatccaaagggttaatttcattgnnaacactgtcnnncagcatctttttcttttgtcatccattttcaaagattataatgagaccttaatgtatgtaagaatttttcacattggaaattatacaaacatttgatatgctaaaatcttgttagctggatatttcaaggaggtaaaatcaagtaatcttactggagacatacagatttggtcctccgcccccctgccttttgatggattttatgagtgaagcaaaagcaccaatctggagggaatgtgttttgtcacaccaaagagatgaaatttttgtaaatttacatccacttaggttggagattttttgccataggccaatttgctttcatctaaaattctatgggagatagggatgactcaagccaagttgcattcaacataatgttaagctaatgaggttctgttagtttgggagtttttttcttttaacctgaaggaaaacctgtttggggcttctaaacactaaagagaaaattttggcttagactagtattcagtctggtgccaaacttccaatggaattcaaatccacggaatagaaattttatccatagaggctatcctaataaattaatccttcactttgatctatttgatggtcttaaaatttcct

SEQ ID NO: 1988 - DNA, 403 bp, Canis familiaris
  misc_feature (1)..(403): n = a or c or g or t
gatgttcgtggctgactttatgccctcacgtnnttttttgttttgctttttaacgaggaacaatatggttacacgtanngagaacaatgaannnacaaggctngtcnnnnnnnnntccttctttggcccttccagtgtatgtttgcattcccactgctgtctaggccggctggccccattcccacccttacccataacgaaaaatagttgtcttgtcgcgtactgatccttacatttatatacaaacgacagactccaaaactgctgtaaataacatacaatgttcattgatacaatacgtctcaactgcaagtctggggagcacacaagcaatcaaccgtattgtattagagacattttattgaaaatnnnnnnataggaaatgtatnnnnnnctaaaataa

SEQ ID NO: 1989 - DNA, 634 bp, Canis familiaris
  misc_feature (1)..(634): n = a or c or g or t
caangtctcttcctactcatcaaaatataatacatgagaagtgatttaagaataataacataattttaactgagttaaaccacctgattggaaagataactccttgattgctctatgctactaaattatagaatacagagggtaagtctcacagtaatgtgttgacctgttttagttacagagccagggaattgtcattttggggaagaaatatttctctaggtcttcacacaaccttgaatctgttcataatggaatttgttggaagtgtgaaaacttcccagttcttccaattactagatgtatcgagaaaaggtcctgagtctcttccctcttgtagcagatcttacctaaggttgtgcagcccaatacagtaagcctagtcatatagctactgagtgcttgaaatgtggctgttgtgactgaagaattgaatgttgagtttaatttaaaaactagcagtgcaaaacattttcttgttacacacattgcagtttcgaagggacaattcactttaaaaaatttagtgtctaagttgaggtgagctgtacgtgtaaaatacgtggtacatttcaaagacttggaacaacaacaaaaagcaaaatatcagtgttttttcatatggatgacatgt

SEQ ID NO: 1990 - DNA, 638 bp, Canis familiaris
  misc_feature (1)..(638): n = a or c or g or t
gctgccaaaacntcagtacaacaaaaanntaggantggnctgcnnnanncctgctgaccctgtggactgnnngccgctcgtcctggggttgctcaccctgctgaagcagttccattcccggtacacagagcagttcctggcgctcattggccagttcatccgctccacagtggagcagtgtacaagccagaagatacctgaaatgcctgcagatgttgtgggcgcccttctgtttctggaggattatgttcggtacacaaagctacctaggagggttgccgaagcacatgtgcctaatttcatttttgatgaattcagaacagtcctgtaatttttttttttgacatctgctccttcagtcaaaggatggcccttaaatcttcccattactaaaatgaatttagaagcgaagagactcagctgctcacagaactgcattgttcccccctcagtggtgagaaacatgggatattctcagtaagatgcatctcacggccctagttaatgtaatggtttcaatcatggtattatatgcgatttgtatcatgtagaagcagaacacacttttgtactgcctcttataaatgctgaatgtaattgttacgtataaatcatttagttttgtgttctaaagaact

SEQ ID NO: 1991 - DNA, 662 bp, Canis familiaris
cagactggtatttgaataaaataagataatgtatcaaaatcagtgttttctctatcagatactacatggaaggatcacagtttctcttaataataagatggattgtctttttgctttaatacattaatacagctctcagggcatgtcttttgcatagcctaaaatcagaaaggatgaaggatgtatgtgaatataccaacctgggaaatacatttataagaataacattctaatttgaagatttgaaatatatgataaatttatttttatttccagaatagtcagaggaaaggtcttgggagaactaggatttgctacagtaggaaaaatagcaataccacgtgccaaagtgatatggttaaatcatgtctgtgatataaagaataaaatttcagtggtttctttttgctagaatcagagataacacctgcatttataaatgttaaagtacttggtggtattctaagtatgacatctttaataccaggacagagctactgagagccacaacctcctttttaaatctaattttgatgtgtgttgtattactaatctattcagttttatggtttttagaacccatctttacaaaaataaaataccctatggatattaaatagttataaatttagtatcctccatggttctgaagcatacattat

SEQ ID NO: 1992 - DNA, 657 bp, Canis familiaris
  misc_feature (1)..(657): n = a or c or g or t
tcaatgctgtgcgtaccagnnnctttgccttggnnnnatcttacacgctgtcgttatcttcagtaggaaacactaaatttgcactagacaaggtgccctttttatctcctttngaaggtcatatttatttaaaaataaaatgtcaagtgaattcaagtgttgaagaaagaggttttctaaccatatttgaagatgttagtggctttggtgcctggcatagaagatggtgcgttctttctggaaattgtatctcttattggacttatccagatgatgagaaaagaaagaatcccttaggaaggataaatctggccaattgtacaagccatcaaatagaaccagccaacagagaattttgtgcaagacgcaacacttttgaattaattactgtccgaccacagagagaagatgaccgagagactcttgtcagccaatgcagggacacactctgtgtcaccaaaaactggctgtctgcagatactaaggaagaacgggatctctggatgcaaaaactcaatcaaattcttgttgatattcgcctctggcaacctgatgcttgctacaaacctattgggaagccttaaactgtggaagtttccaggatgtgtagaggttttttgagctatgtcgtaaatgtatcttaagagcatcagattt

SEQ ID NO: 1993 - DNA, 255 bp, Canis familiaris
  misc_feature (1)..(255): n = a or c or g or t
cgctcgggagagatttcttccgnncatcaaaacgggggggaggggggggggcgggcggcgggggaggtcacctcccgcttgctctcactttaacttaatcgcacaccgaaaagacggcagccnnnnngtgttagctttatacctcgttaaattcggggttagaagcaaaattgtgacagcgccgtgcaactgcatgttactttcgctttacacgacactttttcaattattctagaagannnaaaagaagcgtnn

SEQ ID NO: 1994 - DNA, 692 bp, Canis familiaris
  misc_feature (1)..(692): n = a or c or g or t
gnnnnnnaaaaggggaagatngtnnatgccaggtttaaaacatnnggctgtgggnctgcaattgcctccagctctttanncactgaatgggtaaaaggcaagacggtnnannnngccttgaccatcaagaacacggacatcgccaaggagctctgccttccccccgtgaaactgcactgctccatgctggccgaagatgcaatcaaggctgccctggctgattacaaactgaaacaagaacctaagaaagaagaggcagagaagaaatgagtgctcaatgaagtgtccagcagtgtctgacacccgccacgcagtcactgtaggcattcagaagcccctcacactacagtaaaacagctctgagacgcacaaagcatttgctggtcacatggtggctccaatgcaagcaaaatacagtttattcgttccaagtcctgtgctttctttcagcccactttatcgccttaatccagtttgtgtatattttgaattgtgtgcatggcctcaaaactgaaatcaatcacgaagtctcaagtgtggttaatccacaaagtgcgcaaatacctaatctcacctgaatctatcttgaggaagattaccagtagaaggccttggtatgattatttgatagaaccaattattgtacataaaacatttacatatataatatatataataaaggaatgtaagan

SEQ ID NO: 1995 - DNA, 644 bp, Canis familiaris
  misc_feature (1)..(644): n = a or c or g or t
caaaggcattgccaagtatnngccaaaannnggcactttttatttaaaatttgagactaacgagatctcaacaatcagtcccaaaaaggtattatccacttaaggttataattttcacaaagatgtagatatttctctattgttttcatgtaaaatagtatagatttgttttgttggtttaagaataatacatatttagtagtaatacggagtttcttcctaagtgcagattcgtttccttctctcttgcttgcagtagaaacacagcgtgataggtgtttctcttcttattttcatggtcacattatgtcttagcatctcactttatgaaaacaaggagaaagataccaacctacagagccccgcttactaaagcgctagcttaagaaacaaaaaattatggcaatcgggggtccattcgtgtattgcctttatgttgttttttaaaatgaaaaccatgatgcctttgtatttgctgtttgcacccctgaaatcaattccgtatcatgtttgaatgccatacattttgcacatgtactgtacataggtagcgcatactgtatttttatatgtgtgcacatttatcatcagatcttttgtacatagtggcagtatggtagccgaccgggaaacgtttgatatct

SEQ ID NO: 1996 - DNA, 502 bp, Canis familiaris
  misc_feature (1)..(502): n = a or c or g or t
gattcatgtccacatcaacacacagctttagtagggggtgggaatggcacacagcctcccccaaatttgggactttgggctcccacatcccctgcctgtgtgtgtcattttcctctttatactcttgactcttgacagtaacttgaaaatggtgaaatcatcttctctgaactttcctacagcatgggcagcattcgtatcactttaacctactagatagctcataatgtgatgtgagtattaggactgttaaagccagccattgcctcagtttcccatgtttgtggaattgatggtgaaatagcaggactaaggaattcttgggtaagttttagcctgtgggtaatgccttagtgttgttttaaaagatttgtcatttatatttaaaataaatgttcacaaatgtnnnaaggaacaaaatgatcagggatggctctttgtcatgggtctcattttcactcttttctgtaagaaaaaataacannnnnntattatatatttt

SEQ ID NO: 1997 - DNA, 620 bp, Canis familiaris
  misc_feature (1)..(620): n = a or c or g or t
tctactgcagtcgctgcagtaggtggtggttttcttcttcttcagattgccagtcacagtggctatgtgcagattgactggaagagagttgaaaaagatgtaaacaaagcaaaaagacagattaagaaacgagcaaataaggcagcacctgaaatcaacaatataaattctgttgcttcttcaattatattgttgaagcaacagaatttatcaaacagaacattgtgatatccagtggatttgtgggaggctttttgctaggccttgcatcttaagaagatgaatgtctatcacagtggagtcacctataagaagagaaatggtgacaacaaggtggtttctcaatattactcaccgccagattatccagggcagcaagaaacaactaggtggataataccaaactcagcttaatgttttgccattgaagtttggcaaactagtatctgctgtaaaaacaaacccatatggtatgtgtacaatagtattcctgagcaaaacatgcctttcatgtattttttaaaaatttgcatttgttttgaaattagcctataaaataccaccattggatgtagatctatagagaaagaaaatgtgttggatatattttnnnnnngaaa

SEQ ID NO: 1998 - DNA, 643 bp, Canis familiaris
  misc_feature (1)..(643): n = a or c or g or t
gagaacccaagagactttacnaccctcnncgacctgtccatttaccagctggataccacttccctccccaatgtcatcaaggcccatgaacagctgaacgtgaaacatgaacctctccagctcatccaacctcagtttgagacgccactgccagcccttcagccagcggttttccctcccagtttcagagaattaccacctcctccactggagctatttgacttagatgagacgttttcttctgagaaggcccgccttgctcagattactaataaatgtactgaagaagatctggaattctatgtccgaaagtgtggtgacattcttggagtaaccagtaaactaccaaaggaccaacaagatgccaaacatattcttgagcatatcttcttccaagtggtggagttcaagaaattgaaccaggaacatgacattgatacaagtgaaccagcattccagaacaatttctgagaatcatgcctcttgaagcatcttctgcctaattctctttgtaaactatttttgaattgtttttcaaatccttacaaaattgtctatatactctttaccccgagttataggcctgtgcatctcctgtagtgactacataggtataacatgtctaaaaagatccttatgtaag

SEQ ID NO: 1999 - DNA, 568 bp, Canis familiaris
  misc_feature (1)..(568): n = a or c or g or t
tcggaacagctctgcgtggtntgccaaggcnctggaccgcacctgcagcccgcgcttgatagagaccaacactccgaacagcttctgaagagcgggagtcgttgggccgcatgaccagagagcgctgcgagagcaccgggcacagcagcattcagagtctcatccccctgtatctgactcggtctttcttctgtgatatcaaaattctcttcagcagatagtctcaaaatttctatgtccgattctagagagaatggacctgattggcggtggcaccaccactgcccctgtagggcagagctcccgctttcttgccacttcctggctgccaggtgtagcctgtggattaaggacccttggaccagaggatcacgcttcactcactgttcacccctggagcgcagagcggatcatgagggaggcagcctcggctactgacttatttgagggataccatggttgctttttgcaaacatctcactctgaacatgatgttagagcagctcacgttgatagcagctttcagaaaaccgtattggaactgttnctgagtggcggggcggaccag

SEQ ID NO: 2000 - DNA, 541 bp, Canis familiaris
ggtttctctgtatctatccacaagcaacaaatacttaaatgtatgatcttgcagggaaatttttggtttatttgtttaaaaaagtattgagaatcagattgacaatcggcatcagagaaccggaggtttgggtttaagagatatttataaaactttacaagccaggtaggacacatgccagaattgcccaactgaatgacatctctcctgtcattcatgcagtgcctggaatcctcaccagttaaatccaagatcaggatctggagttacaaaacacagtgtttctgacctaaaacagttcttcttgcagatgaatgtgatttcaactcaggacctgtccaaatgaggagttttaaaatgtttgggtttttttctatttttagacatctaattctatagattctaactttttctaacctcttctagacatgccaaatactggcaaaaagaattactttttgaatgttgaagcacttgtaaaaataaatccgtgagcaaaatccttttaaacacagaaatcccaagttcatcttgttggtgg

SEQ ID NO: 2001 - DNA, 557 bp, Canis familiaris
  misc_feature (1)..(557): n = a or c or g or t
tacattnnnagtgaattactggcagctgttcaaactcttcaggcangattcctgtggactttgagattcatgttacctcatcttcttttttaaactgtacccaactggtaagggtactctgtctaatgtatatttctagtgtttacacacactaaatgtgtatatgtaggaactatttacagaacatgcatccttaaactgtgacttttcacctagtgcagaacttcaaccatgctgtaaaaacaaaacctcttatcagctctggaacaatatctgcagttattctccagctgttgggttggacagcttagtcaaaatgggtttaaaaccattagaaatcactgcacagtttatttggttgtattttgttttgtgtctgtctgagtaccctctccctcaccccatagggttcagatgagcaatggaggaagtgacagctaacgatgcagttcctgctgtgttgcattagaactggcattatatagcagaaatcaactacngnnnattcttgggtttaaccatctttatttagttcaatggagttttaatttaaatga

SEQ ID NO: 2002 - DNA, 569 bp, Canis familiaris
  misc_feature (1)..(569): n = a or c or g or t
aagagcagggacaatgttttctgtatgttctattgtgnntagtacactgtaaatgctcaataaatattgatgatgggaggcagtgagtcttgatgataaggttgagaaactgaaatcccaaacactgttttgttgcttgttttattatgacctcagattaaattgggaaatatcagccctttggcacagttgtcccactacattcaaataaaagtgcaatggtggccttggggtctttcaaggagaaaaaaagtctcttatgcattggggcaaaataatcatcttaatggcttttttttactgatttctcctgacccccaggccaaggacacgaagtaatcatttacagctgaggagcattaaactagacttgaggagatggatctcattcaagtataaattataaataaaatctaaagcttgtcacatttgcctatttatgtgcattagtcttctaaaactagtttgattctgaaattgtgataatacttaataaataatagctgctaatgtttctacgtactagtgcccaatagatgaaggaggattccaacctgagatttttttgc

SEQ ID NO: 2003 - DNA, 609 bp, Canis familiaris
caagaaacccaacacttgtttctgtgcaactgctgagcattataaattatcaagggcagatcatctattttgtttcacctcttcttttgtaagaaattttgcatatgcatgaaggtaaaaggcaatcagttatacccatgaagaccattggaatcataaactgttgactactcaaaatactctaaaatatttctctgacaacacagtgtataagtgtagtcagtcatgtggtgtctttagttgtcggtttaaaagtgcattagtgttaagcatttctagagataggatcaggctactacatatatatatctttttcacactttgaaaacctaaggagaaatatttttccagtggagaatacccataatatggtgtagaaatctttgaaaatggatccatttagaatattttttatatcattatgtgactgactaagcaagaatggaaaatgatcgtaaatgagatggatggaaatgggagtgtcgatacacaaggtggaatttgatcctgttgtcataccaatacttattctctaccattctctaataaggcagccctattggttgactatttctgtaatttgtaaaagtacaatctatgtgaatttaa

SEQ ID NO: 2004 - DNA, 680 bp, Canis familiaris
  misc_feature (1)..(680): n = a or c or g or t
attctttatgcttacatttctatgctgaacattgatgatgacaccacaacagtagttcgacatcgatgctcaggctgtggttacattgtaaatgaaagatccagcacttgtactgcttgcaacaaagattctttggaatttaaatctgtttttctcagcttccacttgttaattgacctcactgaccacaccggtaccctccatgcctgcagtctcacannaggggttgctgaagaaactttaggctgcacggtaaatgagtttcttgcaatgacggatgaacagaaaacagcattgaagtggcaatttcttctggaaagaagcaaaatttatttaaaattttttttatcacacagagcaaggggcggattgagaattagtgtgctctcatgtaaactcgcagaccctattgaggcaagtaggaacttgtctggaggaggaaatatttaaaacaaaatactttaaactctggacaagaatatgagtttcaactctcttgaaagtggaaaatgagtttgaaaattatggataaaattgtattttgttcaaacatggtaaaaatgtttctataagttgctattatgtttccttctggagttgattaggggataagtcttaaaatctctcatctgacccagctcctttcttggaaggccttttctactgacttggcccattcc

SEQ ID NO: 2005 - DNA, 663 bp, Canis familiaris
tctactccttattcatacagattcatgcagaatcattcacgaagtacaaaaaaattggtttgaagccagttttttttttctttttcagcacaaaaagttcccttctcttatactcagtacattcctaaagatgcatgtgaaaattgcttctgcaaaagataatggattaaataaagaggagttttagagattttaaatcattccagaattcccaattatgcttcattttttagacataatcttaatttatttccagtattttctgcatattacttgcctttgctctttttctcattcaaacacagtccattggtttaggtcctatgagcacctggctgaggtgaaagattacttgttcctcctgatttctattcttgtcccagttgtgctaaatttaaagaccagtaatagtctgaataaatttggacacatgcaacagaaaattatttatattatcttacaggacaaaatagaagggccctaataacataaactgaaacattataaactcactttgtgtttattctttagatttggttttgtatattcagagaatgaaatacttagaattcctatttctacatatttggtggttcttaaaggctttctcacatgtaaacctatagtctgacatgctaagtactttgaagggtgatttctcct

SEQ ID NO: 2006 - DNA, 653 bp, Canis familiaris
  misc_feature (1)..(653): n = a or c or g or t
caagtcatcccaaatatggttccatcnntnnnctaatatttgcttgtatcatgggatactttgctnnannnnnnnnntacgtgaaaacttgccaagagaagttcaaaaatctggagaattcccctcttggagaagctttacgctcaggacaggcccggcgatcttcaccatctgggcactattctcagaagtcaaaatatgactcaaatgtgagtggtcattcatcttttgtgacgtctccagcagcagacgacctagaaaaagagatgcttcctcattatgagccaattccattcagtgcttctatgaatgaatctactcccactggtattactgatcatattgcccaaggacctgatcccaaccctgaagaaagtcctaaaagaaaaaatattacatatgaggaattaaggaataagaacagagagtcatatgaagtaactttaacacataagactgacccctcagtcaggcctatgcaggaaagagtgccaaaaaaaagaagtcaaagtaaacaaatatggagatacttgggatgagtgaaaaattgcatcattggacctactgaaggagtttcaatatccagcttcatctaggtggtcatgaatatctgcatgctttgagctcagcagcagtcttcataaacacattta

SEQ ID NO: 2007 - DNA, 630 bp, Canis familiaris
  misc_feature (1)..(630): n = a or c or g or t
ggtgggggnnnctactgactttcgactctgnnnanctggtgggggtgcatttgtggttttcagcaggcagctgggctgaggaagggggtccagctaaggcaagtgcgtccttttccagcgaggccagcacaggttnctctgctcttgccggctctaccngagctttccccccgcatagcgtccacctgcctgcagacagggagcagttgaggccttacctctgaggctgccagcttccccggaacaagaggtccattcagcaatgagtgtttactcattttctttttcttgacgaagacctctttagcctggcctatataaatagtacagaacattccagaccttagtgagacaggggagtgtcttaacacccacaggctgtcaccactgcctcctattcctggtttctcctccagccttctttgtacaccttggagggaataaggcgccaggttgggggtgggggtctcagggaccagtcggtggggagcagggtccttgagtccccagagggaggaagaaagaagcagattcgcagctccgtggcaccctcccacctactgcccacccctcactgcaggttatcaccaagctcttcctgaggttgagacatgaacaaattctcacctt

SEQ ID NO: 2008 - DNA, 532 bp, Canis familiaris
  misc_feature (1)..(523): n = a or c or g or t
ccatctccaagannnnnntgagtgctatgaattcagatgagctaatatcgtntcctttgaaagagtacttcaagcagtatgaagtgnnactccagaatctgtgccattcctaccagagccgtgctgactcacgggccaaggcctccgaggagagcctgcgcacttctgagagaaagctccgagagacagaggagaagctgcagaagctgaggaccaacatcgtggcgctcctgcaaaaggtgcaggaggaatctgtggttccaaccctggctgcacagcatcctgaccaggagggctggaggtggtgcggctgcctgggcctcatcccagccagacccacgacatcaacacagatgatgagctggatgcctacatcgaggacctgatcaccaagggggactaaggggctcaagacaaaaatcagctcctctgcccttcaaggcagagttcttggggggtggtgttttgttcatgggtggtggacttaccttggtttgnnnnacatgagacatttgnnnntttggagggaaaa

SEQ ID NO: 2009 - DNA, 587 bp, Canis familiaris
  misc_feature (1)..(587): n = a or c or g or t
ttgaatggnnactggatgtacagcttgcaagcagaagnntcaggnnacagattaaaccatcagtgactataaagctacaccttaatcagaatggagatnnnaacaccaaagttctgcagacagacccagccactctgcttcatttggttcaacaattggaacaagcgttggaggaaatgaaaacaaaccactgtaggagagttgtgcggaatatcaagtagttccagctttaaggatttattccctttgaatcactcgtgaatcaatgatatgcagtggttatttttcaaaattaatcttttattaattgacagtgatacatacatatagtttccataaaatttcttttcttaagacaagatattgaaggcatgatcaaaagctaaagtaaagttcctttcctggtgctaaatgtggtcagtttccttaacaaattaagatgtattttgtattttaaatgtgtaagtagaattcantnacctggaaatgagnctacactgttcatacctttcgtgtatgtgaatgtctttttttggtacttcttttgatttgttaactttattattttcttctttattgaccaaaat

SEQ ID NO: 2010 - DNA, 574 bp, Canis familiaris
  misc_feature (1)..(574): n = a or c or g or t
gcatttctgtgctaaaatccattgagttttcaagttctaaatnnaaaaagttaattccagaggcttctataagtattgttaaaagtctgccactcagagctctagatgttctgaagtatgaggaagtagacatgaagttgttagccaaggctgttccagagcccttgaagaagtatgttgaaagtagagagctagctgaaagactgaaaatagaagccacttatgaatcagtgttgttccatcagcaacaacaaataaaggaagttcagcaggatgaagctctccaactgccaaaagacctagattatttaaccctcagagatgtgtctttgtcttatgaagttcgagagaagctacatttcattcgcccagaaacgattggggctgctagtcgtatacctggagtgacacctgctgccatcatcaatctgctccgatttgtgaagaccactcagcaaaaacagatggctataaattaattgcccaaaactgatcaatgcttatgtgatacacataaacttgaagagagacagttatagcttttattcatagaagacttctaagtagtacaaga

SEQ ID NO: 2011 - DNA, 509 bp, Canis familiaris
  misc_feature (1)..(509): n = a or c or g or t
ttaggggttggagaggaagttgggggagtgttngaactattccnnnnnnatgggagttctgttgtggagcgagaagacataccagcccatttggtgaaagnnntccggaactattttcaagtgagcccagagtacttctccatgcttctagttggaaaagatggaaatgtcaaatcctggtatccttccccaatgtggtccatggtgattgtgtatgacttaattgattcaatgcaactccggagacaggaaatggccattcagcaatcactggggatgnnntgcccagaagacgagtacgcaggcnacggttaccatagctaccatcaaggataccaggatggttaccaggatgactaccgtcatcatgagagttaccaccatggatacccttactgaacagaaatacgtaaccttagccccagccagtttcccctgcagctgttaaagccacaagtggccagctacgtaaagaagtttttccacactgcctacattccttgcctttt

SEQ ID NO: 2012 - DNA, 574 bp, Canis familiaris
  misc_feature (1)..(574): n = a or c or g or t
atctagnagaactgactgctgtngnactgacagaaaaattgctcagcttttcagcatttcccntcgncaaatcagccagatctacaagcaggggccaactnnaatccatgtgctcattagtgacgagatgatacagaactttcaggaagaagcctgttttattctggacacaatgaaagcagaaaccaatgatagctatcatatcatactgaagtaggtgccgggcattccatcctcagtggttgctgcttccttcacctcttggaagcttccctcctgaggggagtcgctcgcccctggagatttgaaggtctgcaggaacctgacccacctgactgtgtatgggggagccctggccaaagaagcagaaccccagccatctgtgggctgtgctcttgtggcacacacagattattgcccaatgtgcatttccgaagccgtttcttagttaaaatttatggactctgttgttgttgaatatcattagaaactccacaccatttagggtgtttgtagggcataatgatgatgagaattgtgtgatgtttaatggaaagatgttaaattttgtgat

SEQ ID NO: 2013 - DNA, 585 bp, Canis familiaris
  misc_feature (1)..(585): n = a or c or g or t
ttgatgccaagaacatgatnnctgcctgtgacccccgccatnnnngtnacctcactgtggctgctgtcttccgtgggcnnatgtccatgaaggaggtagatgagcagatgctcaacgtgcaaaacaagaatagtagctactttgtggaatggatccccaacaatgtcaagaccgctgtctgcgatatcccgccccgtggcctcaagatggcagtcaccttcattggaaatagcacagccatccaggagcttttcaagcgcatctcagagcagttcacagccatgttccggcgcaaagccttcctccactggtacacaggtgaaggcatggacgagatggagttcaccgaagctgagagcaacatgaacgaccttgtctctgagtatcagcagtaccaggatgccaccgcagaagaagaagaggatttcggtgaggaggctgaagaggaggcttaaggcagagtaccatcaccttaggcttctccattccctcttcctcagctgcccctatcctctccctcagaatttgcattctctgcctcttatttttttttcccttttttttgggggggggggtcctagaaca

SEQ ID NO: 2014 - DNA, 542 bp, Canis familiaris
  misc_feature (1)..(542): n = a or c or g or t
caacagatgctgtcccgtnngcactacagcttccatggacaccattccaaaaaggggcaggtggcaaagttagacttggaatgcatggtgccagtgagcgggcatgagaactgctgtctgacctgtgacaaaatgagacaagcagacctcagcaacgagaagatcctctcgctcgtccattggggcatgtacagtgggcacgggaagctggaattcgtatgacggagtcttacctgaaccgaagttcttggacgcttgaaggctttgagttctgctggacaggagcactttatctgaagaaaaaaacggactcacggaatcccctttgagagacaaaatgacctctgcaaacagaatcttggatatttcttctgaaggattatttgcacagacttaaatacagtcaaatgtattatttgctttaaaattataaaaagcaaagagaagactatgtacacactgttaccagggttatttgcatctgagcgagctggaatcgagtacctaaataanctaaaatgtgctctgtgtaagctccaaca

SEQ ID NO: 2015 - DNA, 518 bp, Canis familiaris
  misc_feature (1)..(518): n = a or c or g or t
ataangcnatagntgttttacagtgtgtgaaagaatgaaaaaannnatttaagttatcaatatgcatttgtgttaaatttttaaaaagtattgacctataaggaaagatgacatgcaatctatcctgtgaatttccagtgaataattagaagttgtggagagtctctacttctgcctatgaggaagaagcagtaagcagtttggagatgccatctctgcctgagtatagatataaaagggccaacttgccacctgataagacaagagaattttcctcatcacaagatatcaatcagtatattcatgaaatttcagaatttcagaagaaaagtacaaacaaaattaaaaccttaagcaatatgttttgggggaatcatccccaaagaaaacgcagaggatattcagaaaagtgttgtcttacaggatgtacagtagaagaactgagtattgcatgcttcccatatactgaatacaaaaacttacagaaacaagtaccatcatttgtgactaagatacac

SEQ ID NO: 2016 - DNA, 368 bp, Canis familiaris
  misc_feature (1)..(368): n = a or c or g or t
cactcatacaccatctcactcccagnnngctacattttgagtatgatgccatttnacagataccatgaacatggnacacagtcaagttgtggtcactgcatgtctaccctgccctataaagaactgaggtcagagggagaccactgatgtacgttaagatgttggattgaaacctccgagtaatttcatgcctcgactttggagcaaaactataacacaagggtgttaaaaagacatcacacagatgaaatctggagagatgctaacatcagtaacatttaggaaggcagatggaggaggggnnnnnnatggttcannnnnnnggagnnaatnnnaannnnnnntggccctattatgcccccgaattc

SEQ ID NO: 2017 - DNA, 526 bp, Canis familiaris
  misc_feature (1)..(526): n = a or c or g or t
gcccaggtgcaacaggttgtgaacatagagtgtgtgtctgacttcacnnaggcaccagtcctcaacatccagttcaggtatgggggaacctttcagaatgtgtccgtnaagctgcctatcacactcaacaaatttttccagcccacagaaatggcttctcaggatttctttcagcgttggaagcagctgagcagtccccaacaggaagtgcagaacattttcaaagcaaagcacccgatggacacagaaatcaccaaagccaagatcattgggtttggttctgcactccttgaagacgtagatcctaatcctgcaaatttcgtgggggctggtatcatacacaccaaaaccacccaaattggatgcttactgcgtttggaaccaaatctgcaagcccagatgtaccgactcacgctgcgcacgagtaaagagaccgtctctcagaggttgtgtgaattgctgtcagaacagttttgatccacgaggatggaggatcaggctcctgtgtcttgcatttttcttcatc

SEQ ID NO: 2018 - DNA, 566 bp, Canis familiaris
  misc_feature (1)..(566): n = a or c or g or t
annatttgggtattcngcgnncccctgaggnnnaacatagaccttcttgtggtgaaacagatctttgatnnaacagtactatgcnnnttttnnnnnaatttcgcaatatgcaaccagataaaagtggcagtacgcataaagaaggtgcaggacagtggagacgcgtgaactgctttcctccttactggagttaaaagacattagttttgtgacaaaaaatagggtgcctctaatgcctagaagactagatgaagctgaaaacgctgccccccacctacgctgtagcccccatctgctgatgatgctaacccaccacctttagaggcagaactcaactaataatcactttctactggagcttcctttgaaaggacacaggggcacctctggtctttacaggcatcccaaatgtannnntttggaggcacatttctcagtagctttttgttatcaatgcaataaaagtgcatgatggaatgcgatgggaaaatcaaagatggagccgcaagatgtgtttgacacaattaattgagtttgcttctccaaggaatgaaaaaaaaaaatag

SEQ ID NO: 2019 - DNA, 603 bp, Canis familiaris
  misc_feature (1)..(603): n = a or c or g or t
cnntaaatcntgacattgagggtnnaggattcacctcnnnntagacccagatggtgggaatagcaaagaaaagtgtgagatcagaacattgtggcctcttggaagagagtcgtggagaaggggcctttcttttaaggggataagaaacaaactgaagacttctaactatggagcattttaagagtccaatgagttggaaggatggatgcttgccccaggtcatggacacctccacaaatcatctagtttcccagtatttttataaatggagattgggctccatgacactttacttggtcttccttcttacataggttttttgattaccctttctctccttggtgcttatatacttaagaccctttagccaaacccttgccaatgacagtatttcagtcactagttctcactgtttcctctgatcattgagcctttggaaaaaaaatctcacagagcttatatgtaatggggcttggttgaacagatgacttcctgtaactgcacctctacttttggcttctcaaaaacagtgggttggcagtaatgcagcgtggaagttttcccatttctcagtgaccagattgtgaatatttccaaatggat

SEQ ID NO: 2020 - DNA, 624 bp, Canis familiaris
gatggtgagggcattggatgctgaaggaaatacttttagtagtttggcaggtatgatgtttgagtggagtgtcgcccaggataacgaatcagcaagagaagaattgtctagcaaaattaggattctgaaatactccgaagcagaatattctccaccagtgtatatagctgagatggaaaaagaagagaaacaaggagatatgattttggtgtctgggatcagaactggtgctgctgttgtaaaagttcgaatttatgagccattctataagaaagtggcagcagcattgatacgtctgctagttttggagaatatatttcttataccatcccatgatatttatctcttagttggagcatatattaaataccgagttgcaaaaatggtgcagggaagaatgacagaggtgggatttcctctggaacactacacactggaattgcaagaccccagagctggatgtaatgggtctctttctgggaaagtggctttactggatgagaaaacagccatggtgactgctgtccacctgggccaaactaaccttgtctttgtccataaaaagtacctgattcctgttatgatggagtcagtccctcagacttttctcagaagtgtacacac

SEQ ID NO: 2021 - DNA, 592 bp, Canis familiaris
  misc_feature (1)..(592): n = a or c or g or t
tgaggcttgtgcagtgcagngncggggcttgtacccaggtatggttgnnnctgnagcctgggctcctnnagctgatcnnnctggtannnnnggggcttnnntctccaccaggcagtaggcacacggccactcctgtgngagccaggccccctagnnagctgggctgtgtttcctgtgtgtgccctaggaaccctcagcctcggagccaggctctgtcccactttgtttccagctcccctggggcccaaggaggaagataccaggcctgccagccaagagagcctacccccatctccctcgtggggccgaggtgccagcttcctagggaccacaggtgtttgacagcaggggtatcctggcacccttgccctcagccttggggtgccgtgtctactcccgggtgcgttgccctcagtcactctcatgttcctattaaaagtgcctgtgtcgggatccctgggtggcgcagtggtttggcgcctccctttggcccagggcgcgatcctggagacctgggattgaatcccacatcgggctcccggtgcatggagcctgcttctccctctgcctgtgtctctgcctctctctctct

SEQ ID NO: 2022 - DNA, 573 bp, Canis familiaris
  misc_feature (1)..(573): n = a or c or g or t
tcccctctgctgtatgnnntctgctccttcattttcctactggcntctgatgaatggctgacactactantcccattggtnnnccacagctcttggcagagtccnngtgcttcaaagtgcaagctatagggcagctcttggctttctggatttccatgccctgactgcagtcctgtcactcctcacaccgcctccctgcaggccagggcaccaccctgtgagtcccttcctgctcccctccagctgcttgcagacnnncagccccggccactctcactcttcatcacctgctgaaactgtcctgatggatggagggctcccagacctgactctgaagagccgcatgctcatccggcagttttcttgacacttctccgttctcatgatctagaggtcctcaagctctgaatgttcaaaccccgggctccttggcccagcctttcctcctgcagacccaggtccatactgccagtccccatggttcccgagtgccaagctggaattcccttctctgactccaaacctggatggtcaccaaccacccccccaccccgcactgcacctcgttaacac

SEQ ID NO: 2023 - DNA, 623 bp, Canis familiaris
  misc_feature (1)..(623): n = a or c or g or t
gcaccccggnngacgacaagggggacgccctggactacgcgtcccaccttgctgacgagtccggggccgccagcgtgcagcagctgaccgacccggatgccctgggcgtgcggagaaacccatccccagagagctgcgccgctgaagggtctggcgtttgggcgggcctagaggcagggcccggtggtcgaggcgcgcttgccctgagccgcggagaatcgcagccgccttccgccgtcccgctccacctcggtgggcccgagggagcccggccccgggggaacccgagaagaggtcccaagagcaggtccaccgtcagggtggatcgccagcggccctccgccaaaggcccgggccggcggccttccgaccccgagtcatcagatgagttcggtgagatacagctgatgagggtgagcatttgctccaaagaaagaggccaagccaagcccaacagccccgaggatcccggggacacacccagacaaccgagtttccatgtcagggagaatttccttcacgtgccaggttctttcctgtcctcggctccccgaggattcacttcggttgtggagaggcannnnnnnggagagttggacatctcctccccaccccagttcaca

SEQ ID NO: 2024 - DNA, 413 bp, Canis familiaris
  misc_feature (1)..(413): n = a or c or g or t
ctgggcacgtctgtggctcagctccatgcctggtggtacttcaaagacataannnnnntcccttatgagnnnnngttcagatcagcggcgtgcatcctattgggagagggggacttctactatgatggctctgtcgtgggtggcacgcctcnnnngattttagacttcatccaagaatacctnnaagggatgattcacgacaaggaaaatgggctgaacagcacctacgaaagatacctgaacaagtactttttcacccacaagcccaccaagctgctgtctccagagtacagctgggacacggcgttgcagctcccggcacagatttggttggtcaaggcagcgcagtgctcccacatgtgcctgcacacgtagccatgggttctagagtacacagggcccccccgagtctc

SEQ ID NO: 2025 - DNA, 567 bp, Canis familiaris
  misc_feature (1)..(567): n = a or c or g or t
cacatgcttgggacccaaggaaaggacaggctgctggtctngactctggggcctccgcagggcaatggtattctcctgaattcacatcatcgatgtaatcatgcaaaataataccttgcatgtaaagttgttcactttccctctctgttcccccaattcccttttcgaccattgctggatgaataacaatacatgatctccatggggacctctgtacagagcaaagatgctaaactattgattccaatagcaggacccataaacaccgggtcagaggaggaagatggcttgagtttccctcaggacacagaacttcattttggtttaaaacagaacaacgataggagtgatgaaaggactttatcttgctgagcatctcagcgccatgattgactcaacagagaagaggtcatttctgacacagccttttctcccatgtgtttgctgggctccagaatagtgaggagcatggactatgcccggcactgagcaaggctgcattcattatatcatttaatactagcannnagaaaagaaaaaaagaaaagaagagaaaagaaaagaagg

SEQ ID NO: 2026 - DNA, 575 bp, Canis familiaris
  misc_feature (1)..(575): n = a or c or g or t
tcagannagncaggcctggccactgcctgtgagactgggacagagggagcaagtgaggaggaagatgaggccggagctgctgctacttctactaccgctgctggtgccacaggaagaggaagaagaagacagaaggatgcagagggggcagaaactgcaaaggcgatgagtagaggcctcatgcagctgctgggagctgtggagcggaaaaattacaccactggtgggcagagggagggagatctcaggtcagtggaaacagccatgttttatttctctgggaccctcaagcctgggtccagagtcgcaccatcgccccttcctgtccagctccctgcctcattcacatactcctactcttgcccctcatcccccttcccgcctgcacccacaccatccccaccagcagcaacattcactgcaggagctccatttccaacatctccacacatgtggtctgatgcggggtcccagggaacaggaactcaagaatcccaaagagacaggagagaccttgaaccctatcagcagagaagacctcccatatttcgcaggcctggggattgggactgccc

SEQ ID NO: 2027 - DNA, 484 bp, Canis familiaris
  misc_feature (1)..(484): n = a or c or g or t
ttttctcccttcatgggccatagcattgaaacttnnactttccctggnnngctgctgacagcgggcactcccagacagaagaagcatcagcagatccaaagggaaaggggaccgtgccctgtaggctcacttcataacagccagcgtttgtccccccgctgtagccccagcctgatccccaccccccattccttcttggagcgccacagcaatgggctgcccgctccatggaattctctgcactttagtctttggacttcccatcacgtgtgttctggttttatgggaagaaggaactgctgtcggaaagcagagccagtgctctccccgccctgccctcgcttgggtggctgcagcccaggccaggagagcagcagctggcatgggcctgaggccccatggtgcccataagggatcagcgttgagggggtggggcaagtctccctagccccttcannnnntaaaatgtgagtggttttaaaag

SEQ ID NO: 2028 - DNA, 609 bp, Canis familiaris
  misc_feature (1)..(609): n = a or c or g or t
acgccagggaccaacnnnnnngcgacctttggccacctggccggtggctacgacgcccagtactacggctacctgtggagtgaggtgtactccatggacatgttccacacacgcttcaagcaggagggcatcctgaacggcaagcaggtcggcatggactacagacgctgcatcctgagacccggcggctcccaggatgccagcgtcatgctgaagctcttcctgggccgagaccccaagcaggatgccttcctcctgagcaaggggctgcaggtggacagcagcgagccaccggcctgctgacgcaccagggctctgctggccccgggccacgggctcagccccaccccagctcctgctgccctgttgccttagctcccagtcgggaaacggggtggcctgccgctcagggtgggcgggtgggggcagggtgaggagacgggctcttcgtcctccctgtccgttcctcgtgtctggtctctacaggcccccgtcggtggccagcctgggctgatggggccttgtcctcgagatgcccggagaactctgtgttcagtcacgcccgccaatttgttgcactaatccatccccttcctgggaagttttctg

SEQ ID NO: 2029 - DNA, 680 bp, Canis familiaris
  misc_feature (1)..(680): n = a or c or g or t
cagcttcaaggtgaccaaagaaaaanncatttgccagtttcttttggaggnnggcattgtcaaagannaacagcttaaggnncatggattctaaaatgaanntaaatgcgtnnagaatttcttgaataattttgttctctaaacccagtttggctgccttgtgaaatgattctctgcagtaaacggacttttcatgtatttaatcattcaaactcccattcacatctgcatgattacagaaaacatggggtatgtaggctagtaacacataagaaaattgcagtaagatggtaatgagaccccgtattcatcttaacatgtttccaatggaaaatattttgttttgagtgtttatttgttcggtttattatttttcacttgattaaatgtttttttgttgtattaaaccatgtatgttgcagcttaacaataaagaaacatctatgaatccttttgtgagcagttaggctcccaaatctaagcaagtaaatatacatattttgcctttcataattggagttcttgttctgcaagtattctaattcgtttttagtggctgttaaacccaaagctggagggggacctttgttatataacttgcattcttcttttactgacttaaagataagaataagaatagccagagccaagatttatcagaatgtagtgttaaactttaa

SEQ ID NO: 2030 - DNA, 470 bp, Canis familiaris
  misc_feature (1)..(470): n = a or c or g or t
ggcaagtnnagcatcnnngtcannnacaagtacgggggnnnnnnnnnnnnnntnnncgtnannnnnnnnaagcacggggnnnnnntcccggngnnnnnnnnnnnnnnncagnnnnngcccaagctcatcccggcgtcggcgtcgggcccgnnnggggcacggggtggggggggccgtgtgctnnnnnnnnggccccgcggcccgtgcccggcnnncatggcccttnngaccgggcacgggcnctgctgcngtaggtccccgggcggagngcgggcnnntggccccgtgggcgcggatcccgtggccgggcgggcatgggggcccngnngtccccgtccnnnnnnctccgggtccgggttgtnnnnncctgcannnnncttcctgnnnnnnntccgctttccnnnnntgtannncaataaaatgttgannggcaaaaaaaaaaaaaaaaaaaaaaaaaaaaaaaaaaaaag

SEQ ID NO: 2031 - DNA, 627 bp, Canis familiaris
  misc_feature (1)..(627): n = a or c or g or t
aaagnagtgttccacttctcccaagccgagaaggtgtacatcatgtaggctgggccgcccngcgtgcccctgcctgcntgcgtttctgtttctngcgaccaaagatcagtgagcgacgatgggtactccaaggaagggagggtcgggtccgtacgcccgtgctaggggacagccatgccgctgctaggactccgaagcgcgtgagctactggacgccttcccctttcagagagaccttcccgccgccgagggagcttcggccgcttgggaaacaggagttggtgatttcccgcgcccccgaccccgcctccgcccgccctggtggccgtcctcagctgggcccatggggctgcacctgtgccgccgccaggcgggcttagggtgtgctaggttcaatgtcacgtcattcgtgccgccttatttcctgcttgagaatgtattcacgtggaaatccactggaccgagttctgcagaggccttgccgacggctccgtaactgtagagcgaatgctgttcgttacagaaactagtagttcagtccaagtaaccaccgatgacttttcaaatccaatgaaccattgtagtttacacaaaaccataccgtagaggtttgtatttagcgcttat

SEQ ID NO: 2032 - DNA, 547 bp, Canis familiaris
  misc_feature (1)..(547): n = a or c or g or t
agctgaagaagaaaggcaaggagaaggcanagctgcagcagcagggtgaggctctgccgggaccctccctggaccagtggcacagatctgctgannangaagaggatggtccagtcctgacggatgaacagaagtcccgcatccaggccatgaagcccatgaccaaggaggagtgggatgctcggcagagcatcatccgcaaggtggtggacccagagacaggacgcaccaggctcattaagggggatggcgaggtcttagaggaaatcgtaactaaggaacgtcacagagagatcaacaagcaagctacccgaggggatggcttggccttccagatgcgagctgggctgctaccctgagggccctgctggctaagtgttgatggcatggcctggaggctggcttcagggtgggcaacaggaagcccagtgggtgtttgcctttcctcctgtggcctggcctctggcccagcttcctctcagatgcagggggtggaggacagggtcactggcctaatcagttcccccatctcctgaaagcatagctt

SEQ ID NO: 2033 - DNA, 563 bp, Canis familiaris
  misc_feature (1)..(554): n = a or c or g or t
tcaataaagacatcgagacagaatggttgaagatactccgagatgaagaaatgtatgccttggnngtcgctgagaagtctcgggagttcttggtatcagacaaccgccaactccccaacggtgtttacacaactgcagagccacgtccaaatgcctacatcccagaggcagaggccgctcttcctttgccaaaaccgtatggcgctttggctcctttcaagcccagtgaacaaggggccaatatgaggcacataaggaaacctgttccaaagccgattgaaatctgagcgtgtgaaccaatctgggcttctaaaggaaacacttcagccacacttcctcagatgcacagctggaaagtatcagcagaatagctctaaattacagacaaatatggcatcccagtcaaccaacaatggcaaacagcatgggttccttttacactcatcagctactatattttacacgatattaagtaagacatagaattttcctacaactatgtcaaagcatatatctgtattgttcattttttcctttttcacnnnnnatattgactttcaaaa

SEQ ID NO: 2034 - DNA, 527 bp, Canis familiaris
  misc_feature (1)..(527): n = a or c or g or t
agcagcagcacttttgacatttgggaatggaagagacttctatagtggataatcacaacttcatagcccctacacagcctttgtcatggggctaagtgtctcgtggatatggcatgagccaaggcaggaatgcttgtaactgtggcatttggagaaacaaattatgttcttgccttgggttatgagtttgaaaattatttccccctctttctagtggcataaaagggcccttgttcgacttcttatttaatttgtgtatgatgtataaaatactttgaaagaaggctcaagacgctgaatgtgtatgtttgtgtgggtgctctgtccatgtggttgcctgtagacaaccagacttgatcactgatgccctgttaacacactgcatcggtaaggtccttgatctgctcttctctgcttggatgttagagcccatctgtcttgtaaaagaacacttgtcatatcctccatcagttacagtggtagctgaagaaannnnncctcaaatgtattnnnncaataggaatcaa

SEQ ID NO: 2035 - DNA, 583 bp, Canis familiaris
  misc_feature (1)..(583): n = a or c or g or t
gtgctggtatcactctatatttgnntgtcccattctgcgtcagcnnnnnncagatnncaatccacccatgaaannngnctgtggtcatattatatcaagagatgccctgaataaaatgtttaatggtagcaaattaaaatgtccatattgtccaatggaacaangtccaggagatgccaaacagatatttttctgaagaaataactttaatttggaatttgtaagtgaaactgaattgtggcgcatttcagaagagaacgttccatttaatgcagctaactgaggactcccgtgtttatataagctaatgctccagaaactttgccaacattttagtgtatacaccgaggggagtgctccagatgaatattatcatagggctttattatattcttggtcttcatttttgatcaagtaaatacaccagcagttgtcattcaatgcaggtttttgtacttaattatatggtgatttttttactttttaagagcagaaacagaaatcaacctccctgccatgtgtttaatatttctcctgcttttacnnntgtcatttcttgatnnnnnnaaggtttgagaatgtt

SEQ ID NO: 2036 - DNA, 340 bp, Canis familiaris
  misc_feature (1)..(340): n = a or c or g or t
ctgggcgccccaccatctgctccagnnaggtcgggagctgggcgagctggnnnnggctgcagaggaggccatctggagagcccagggtccccacctgccggtgccacggtcgccggcaccttgcccccctgcgtcccaccnnnnnnnnggcttncaggagctccatacacacgctgccttcggtgcccaccagacaacatccaagtggcctccggcaccgccagggggtgggggacaggcacatctccccgctgccccgnccaccgcccgcagcccaggaccctcnnnnngcccccccgccggcccgagtagtgccctccctcgcccccctgcccctcaa

SEQ ID NO: 2037 - DNA, 573 bp, Canis familiaris
  misc_feature (1)..(573): n = a or c or g or t
cgaacccgaagaagaagaggaagaagagatggagacggaagagaaagaagctgggggctcagatgaggaacgcgagaaaggcagcagcagtgagaaggaaggcagtgaggatgagcgctcaggcagtgagagtgaacgcgaagagggtgacagggacgaggcgagtgacaagagtggtagcggcgaggatgagagcagtgaagatgaggcccgggctgctagggacaaagaggagatctttggcagtgatgcagattcagaagacgatgcggattctgatgacgaggacagaggccaagcccgtggcagtgacaacgattcggacagtggcagtgatgggggtggccagcggagccggagccgcagcgccagtcccttccccagtggcagtgagcactccgcccaggaggatggcagtgaagctgcagcttctgattccagtgaagctgacagtgacagtgactgagtcccaggcccttcagggttggtgcagacacgattataatgcgagcattatgcgtaggaaggcactttgagtggtctgnnnnnnnaacccttcgctttgtttccctc

SEQ ID NO: 2038 - DNA, 517 bp, Canis familiaris
  misc_feature (1)..(517): n = a or c or g or t
tgccccacccctgcccacccctgcccaccccctgggcctgatccagtccccactggcccagggcgtgagacccctgccccaacnnngcccctcacccttatttattatcgtagttatttatttatttattggagatgtcccccaggggctcgggctccccaactaccccgtgtcccaccctgtacatacggccctgtccccactctgctgtggcgtgtcgtggccctgtgaactcactgctcaccctcctctcaagaccccaccttttttaaaagtcacccccatcaacagttaccggttttgaagagggggcccgatgacaccccagggcaggctgttgggtggtgggaggtagtcgggtctgccagcctcttggctgggccgtggtgggccaaggccactggggggtgggggtggggggtgtctcagcatggaccctggggtagatcagagccaggtaatggcctgcctggctcctcacccccaaagttttacccttttttggaggtgaggnnnn

SEQ ID NO: 2039 - DNA, 567 bp, Canis familiaris
agcaaatccgctctggccagtaagaaaagaacagaccggttcaatgtaaaatctagagaacggagtggggggccggtcacccgaagcctccagctggcagccgctgccgacccgggtgacagcaggagggaggacagcggtggcaagcaggagctgaaggacttcagctacagcctccgcctggcgtcccggtgccctccgccagccgccccgtacgtcaccaggcagtgtagaaacgtcaaggccacggctgcagcccagttccagggacccctcttcaaagagtagacacttcgcctgctccctgacagcacctgaagtgacctggaatccgtgaagccaaagggactggccttctgccctgcagggagtaccgacctattccacttgatgagcctgggagagaaaggaagggagtgtgtgcgcgggtgagcgtgtgtgcgcgtgtgcgtgcggtcttcagacgagggtctcaaaccccgggaggcaggaaggcagctggttccacaccacggacgacacttgggtgcagccccgggaccgtcttctgcggctcagcctcccgcc

SEQ ID NO: 2040 - DNA, 632 bp, Canis familiaris
  misc_feature (1)..(632): n = a or c or g or t
gagctcaagccagaattgtgcctgtcctgctcatgnnnnnncaggaagtcactcttggtgtttgtgtngaatgtgatcaaatccatccctgggcttaagtcactgaggtcagacagccatttgtccttgtggggtggnnnncntggcctcagcacctcataaaccagattctgttgctnnagcttcacacaggtccccagttaggtttctccagaaaagattacaagcaggtgaaatttcatncttctagaaaagggatttttttttttttcctttaacagggtagtgacttcacaaaagtgctaaaatggcaaaattacagaagaaaacagtattataccattaaatatggaacattggactatctagcactgctcttcaaaacaaaatacagatatgtctgtagatgtagtcaaagctttaataagtaattcctttctgtatttaaatcagagtaactctgtactgagtgcagtgttttttttcgtcatgcacatgttatgttgaagaaaatgtttacaaaaatggttttgtgacactaatgtgcatcgtatatttatggttatttttaaagtgattttttatgggtaatttaggttttcaacatagtggtagtccatttacagtgattc

SEQ ID NO: 2041 - DNA, 648 bp, Canis familiaris
  misc_feature (1)..(648): n = a or c or g or t
gctggtgnnngaggcccgnnncggctggcactacggcgagagcgagaagaccaaaatgcggggttggtttcccttctcctacacccgggttctggacggcgacggcggcgacagattgcacatgagnntgcagcagggaaagagcagcagcacggnnaanntcctnnacaannaggacctggccctcccgccccccgactacggcacgtcatcccgtgcgttccctgcccagacggccggtaccttcaagcagaggccctacagcgtggctgtgcctgccttctcccagggtctagatgactacggagcacgggctgtgagcaggaacccctttgccagcgtccagctgaagccgaccgtgaccaatgacaggtctgcacccctcctcagctgacggccaggcccccaccgctgcccgctgggcccctgctccccacccgcacgcagaccctcttttgtaacagtctgcgtgctccccgctcggagaaagaaccttcccctccctgcaagccttcacctgcccagctctgccccgctgcagcctggcctgggctggaccctggccgttgcttcggaggtgcccctgggccgcggccctcggggcagggaaggacgtcggcctgtagctggaaggggagcacggccccc

SEQ ID NO: 2042 - DNA, 620 bp, Canis familiaris
  misc_feature (1)..(620): n = a or c or g or t
gttgtcaaacagaacgtcgctgnnttcgaacgtcnnnnanccaccaagtttggtccagaaacagccatcccccgtgaactgatgttccatgaggtgcaccagacttgaggaaggattgttccctggcctctcctctccctcccaacccaattctcttatttatttcatttgacttctgctccaatgtaacagaagagtctgtgttcataatgatattctccctctcaattccccagaaattgggttataagctggctggaaatgctggggcagaaaagcaggaggttatggaaagaagacgtgcctaggaaatggtcaggctcatcttgagagcctcatatgtctgatgtctgcagccttctcacggggaattataatcacgactgttggttgtctttggaccctgtcaagatgccttagtgtctgaccaggggaacattgcaacttttccagagattgaataaactgaactttttcctctgacagagaggtattgggtagtcaataacctgcctgcctgagatgtctcagaaaatgctagatctggccccagcttgaaatctatatgaactcactttaagaatatttccatgcnnnctgcttagtggagagcaaggggc

SEQ ID NO: 2043 - DNA, 602 bp, Canis familiaris
  misc_feature (1)..(602): n = a or c or g or t
cagggctaaggattaggtgtgcaatccacatccaaagtnnactcntgtctgcccattagaattattagggatttcacttgaaccnttagccagagctaatcaaacagaatcnctggagccagaatctgttggaatgtgtttaaaaaaaaaaaaaaactcttaaccatgtgatcatcacattggtgacatcaccaacaagacatatcaacatcagattcctctggtatcaagctctgaggatacgtcacttttaatacgtcactattaatgcataaccttaatgtaatcagagaaaatactggatcaaacccagactgaggaatattctacaaaataactggccagtattcctttaaaaaaaaagtgtctaagtcatgaaagacaagaaaggactaaggaactgtcacaaagtggaagagactaaagagaaattaacaagtaaatgcaccatgggatatggcctggatcttggactaggtatcagtggctaggactataattactagtttgtatcagtgttaattttctggttttgatcattgtaccaaggttatataagatgttaacattaagtgaaactagatgaagactaaaaactgttt

SEQ ID NO: 2044 - DNA, 423 bp, Canis familiaris
  misc_feature (1)..(423): n = a or c or g or t
ggcaacgtgttctttgccactnnnagccaaacctgcctcccagctcccttgcagcagtgctagtatcagtgagagccccctgcagtttatcctcggccttcacagtttcactcaaatcctgtcggaggagaggtgttatcttcacagtttgactctgtgaatggcagctgatgaagaccatagacactaatgagcttgcaggatgcttttgccaccagaattctcaaaaggcttcctctgacagttaacagtggaagccacaggcttccaagaggtgcaggaagcaggaaaacaggcctagggaggaaaaggatctgaaggggaatgagtggttgcgggccaggcagaaggactctccaccacgccttcaaaccgcagagagatctgtgtatttctaaattctccatgcagggatccctgggt

SEQ ID NO: 2045 - DNA, 702 bp, Canis familiaris
  misc_feature (1)..(702): n = a or c or g or t
ttgtgnagctggaaatcatttcatcaatgtgatcttggctcatcccaatcatacaggaattaatgcctgttttccaagtccaaattataaccccttcacatggatgtttttcctggtttcatgtnntnnctacnnnnatgannnnnnatcatggannngnntnnnagtcatgacnnnnncactgnnnnnnngggntnnnacannnntgatgagtatccagatgtctctgtgggcacaannnnnnncataaggttnnttnnagaaattnnnnnnnnatatgcatnnnnnntcagcaatgattccattcatactgtannnnnnatgtgtagaannncagtctataannnnactaagtaagacttagtcaatggnngactataatgtaacagaatnncaaaaataacagtactttttactgagtaaaaatttatattagaatttagataaannnagaataannnnnnnnnnncaaataaaaagtagaaactataggtataattaataaaaaatataatccaatatatttttaaaagattggtacttgaacaagattttcttactttattaaatatttcataatactatttgcttaagacaagtaaaatacctgaattcctaagtaaaaaattgtgacannnnagtcacttaaattgcatacattttaatagtaatttattacttactttatngttcaactttgag

SEQ ID NO: 2046 - DNA, 406 bp, Canis familiaris
  misc_feature (1)..(406): n = a or c or g or t
tgagagccagctcgtgggnctttatccaaactctgctggggaatggtcatgccatggactgggaggagtnntctgccacagtccctggactttgtgactggctgccccctcagcacagcctagctcagagttacaaacctgtgtgtatagaaatacaagtgctagagtcacttcagggaagtgctaatggctgctctaccctgcccaggtctgttgatggggagacctcaacgtggagtttctaataacctggtggccattctgagcccatggcctgggaatagagcagctttggcttctgcctctggctccatcagctcctctcaccatccctgcccacttcccttgctggatgttttaagaacaaccactgtagagatgcctgggtggctcagcagttgagcat

SEQ ID NO: 2047 - DNA, 408 bp, Canis familiaris
ctgaccccacacccccaccctctctggacatgtttgctgaggaagtggcagagggggagctggagaccccaacccccacacagaggggagaagcagaattgaaaggagatgatggtctggtggacgtgatgtgggaatataagtgggagaacacaggggatgctgagctgtatgggcccttcaccagcacccagatgcagacctgggtgaacgaaggctacttcgcagatggtgtttattgccggaagctggaccctcccggtggacagttctacaactccaaacgcattgactttgacctctacacctgagtctgctgagggcccagtttggtggtcccttctttccttgactctggaggaggccccagctgtctcaggcattgaggattttgggggccacctttca

SEQ ID NO: 2048 - DNA, 484 bp, Canis familiaris
  misc_feature (1)..(484): n = a or c or g or t
aattttaaattgttggtctctctcacctagaacacaagcnnnntgaggataaggccctttttgttctcttttacccccgtaatcagnnngctcgacctgcagtaacccagtaccagactgggtggcttacataacacaaatgtgtttnnntagttnnnnnggctcaaaatgatagatnnnnaggttggtaggggtgggaggaaagatcagctccaggcctctctctgtggcttgtaggtgacctctcctcttgtcttcacattgccttccctccgtaggagnnngaatccaaatttgctgttcttccaaggacggacagtcacactggatcagggcccaccctgatggcctcgctttaacttaatttcctctgtaaaggccctatctccaaatatgacattnnnnggtgctgggcgttaggacttaaaaattgttttttttttgtggtggtaggggtgatnnnnngacacagttcggctcataa

SEQ ID NO: 2049 - DNA, 639 bp, Canis familiaris
  misc_feature (1)..(639): n = a or c or g or t
cgctgaatgtgacagaagganacttcnancagnnggtggcactggtgcactgtcgtggcctgcacaaggattatggcgctgccctgcggggcctgtgtgannatgccctggaaggnctgctcttcctgctgctctactccctcctgtctgcgggggccctagccaccaccctctgcagcctgcccagagcctgggccctcttcccgcccagtgacgactatgatgacacagatgatgatgaccctttcaaccctcaggaatccaagcgctttgtgcagtggcagtcatctatctgagcccctcctctatgccagactggagcctgtgcccccaccccgttccttccctggctgccggagactaccccactaacccagcctgactgggctctcacctctaacaacacctctggccacggacacctacacaggacacggcctccctgctctgccccctgtactcccgcccttggccctgggagtaagctagggggtgggccaggccctggggttggcagggaggggcagccagccagccctgcacccctcacccctggccaccaggcccatccttgaagggacaggagtgcccctgccatgccccagggcactcagggccgtgatctcaatttgcagcact

SEQ ID NO: 2050 - DNA, 552 bp, Canis familiaris
  misc_feature (1)..(552): n = a or c or g or t
caaatgagtgagcaaagatactgnnnnnnataanaccctcctctcaatgcagctttgttgtctacacgnnactactacaaagaaactcctgatgtggnnaaaacaaaaacaaagcaaaaaatttctttatgaaaaatggccatcaaatgaaagcatcaatagaatctgattaacatgtgtgaagataccacgtaggaaacacatggctttcaacaggaatgtgatttagctgaaagcctggagtctgctgatatttttttttttatccttcaacgtcaaggggctgctgtgatcatttattaagttggatgttccctgttgatgatgcattcttggcaaatggaattttcggttcccaactgtacctccacgtgtgtttcttttcccaggtactggtctacttggacattaatctcttgaacaattgctgactgctaaagaaatgaccagaagggaagagaggagtttggcatgttagggcattaacaataacgaaaaggtggatttaagaatcaaaccattctatgactcttccaaaaaggcggagaacta

SEQ ID NO: 2051 - DNA, 567 bp, Canis familiaris
  misc_feature (1)..(567): n = a or c or g or t
accagaagtgagagtcatacccagatnntncaagcnntgggtttcanntcttctccnagtctcaccgaggttcctgcctcatcaggtgaccctgcnnccatgannnnctctcagaccccnnnnngaccctcacgccacctcccccagcccaagtaaagctgggcctttgcacacaactcgtgggatccagcagcgactgaagaccaagcaagtgtggccagcacattcctcttctgcccagagcctctggacccctctgtgaatatatagagatgaggctttgctgcccctggactcctacctgtcccccattgatcatggacacagtcatggccacagcccctcagacccaaaactgccaccttgttaatcccgatccatgatcctgcgtgcctggtactatgttgaagcttttgcaagggtcaccttttcatccttcatcctcaggtagcccagtaaggcaggtgtcacccccaaatacaagagggaaaagagtcttcaaggtgtagcatgacctgggcagccccggtggtgcagcggtttggcaccgcttgcagcctggggtgt

SEQ ID NO: 2052 - DNA, 624 bp, Canis familiaris
  misc_feature (1)..(624): n = a or c or g or t
atttggcatcttcaaatctgtatacagactcggcgaggatgtggtggggacnntaaanntaggggaannaactgtagcttgtttgcagttttcagtaagcttacagaccgaggagcgtgtacagcctgagtatcagaggcgccgcaggacagggggtgtcccctctgtgtctcatgtgactcatgcccggcaccaggagtcctgcctgcatacaaccagaaccagcttctcccttcccattcctctcagctccaccccgggcttctgcacagccattgtgtccctgaagtggcgactgcattttgaatttgtaacatctcgagaacccgatttggtgctcctccctcctttggagcagcccgagcctgtgacctggacaggccctgagcaagtgcccgtagacaccttcagctgggacctccccatcaaggtgctgcccacaagccctaccctggcctcatatgcagccccaggtcccagcaccagcaccataaccatctgaaaccggcaccgtgatattgcctttcttcaggatcctgagaacccagcacctggactctagtagggcccgtttttcccacgcgaggtccaatgacatggacagtgagaggcaggctttcagct

SEQ ID NO: 2053 - DNA, 415 bp, Canis familiaris
  misc_feature (1)..(415): n = a or c or g or t
gacacctgcccagaaggtcacgaggtgtccctgcgtccaccatctgtcgcggtccgtgtgccctcctccatgactgggtcggcggcnnnncggnctgggacatgtgagnngccaacgctggtttgaatgtgatcgtttccgccctcctccaaggctattttctggtcagatgtgaagaaccagtgtccacaacctacaaaaacgcccacggtgccaggggcgtctagggcttggcccggcggtgtctccctgggagaaagaacaaagcacctccagacaggactctgccctccgccaccatcccctgcagtgagccaagaggtcaacactgcctggtcactaatggagacccagggctccccctgaacgtcccctcgcacagggagggaccgtccccatttctcatggaattgcc

SEQ ID NO: 2054 - DNA, 590 bp, Canis familiaris
  misc_feature (1)..(590): n = a or c or g or t
tctcntgctcaggtgtatgcacaggctctcctccacacatcacacctcccaccctccgctacatcagattctgctactacggaatccatttctcctaagatcaaaaggaccagttattgatcaactctctgcttccttaacagaagaaattggaaacaacagaacaactaaaataaaatgcttacacagtgcaatgaaaggaatgaactagatctatataccagcgtggatggatctcaaacagaagggtgaattaaaacataaaaagtgatccggtaccaatttataaaactcaaggcaacccctctttggtttagtggcaagactaccacagaccatcctctttggaggtatgtctattgacctggaaagggggagcataaatatgaatatagttaagtaccatgctaacctgggaatcttcagggtgcctaggtggctcagtccattaaccatctggctcttgatctggctcaggtcatcatctcagggtcgtgagatcaagccccgggtcagtctcttcacgcagtgcaaagtctgcttaagagcctctccctctgctcctcctaccccactcaccccacacactc

SEQ ID NO: 2055 - DNA, 602 bp, Canis familiaris
  misc_feature (1)..(602): n = a or c or g or t
gtagctccagaggctatctttgctttccctccatttccacccacaccaccttctnnnatcttcaaattggaaggaatcgtagaggttatctggttgggctgcgtctggcagagctcgttaacaccagccccggcttgtttctgctcttcccttgggccctctttcagcttgcctgccacctccagacacatttgcacacacattcttcttgtacaggcaccaaaaccaaggcctctgccctggaggctgtgcccctgtgttctgttgcccctgccccagtcacctcttcctcacccctggagttcagccaggccaccctggagactctggagcctcctttgctgaaaaagcaggaaaaggtgggcgtgccccaagccctgagtatgtgagcagagggaggaccacggggtggagaggaaaagaaaatgaagtggactttcgtggaagattcatttcttttcccctgattgcacaaactgcatgtacttttggcctggctgcaaggagcaacattggtttactcttgtatccttaaaaagttacagaactgtgtcttaagagaattatttatagttactataactgaattgacaaatgtcaac

SEQ ID NO: 2056 - DNA, 564 bp, Canis familiaris
  misc_feature (1)..(564): n = a or c or g or t
gaaataccaaatcacccattgccttttctagagttatatttacttgtgcacagtggggactatatttccttacaaaacaagagatagttacatttgctgttttgaaatagcagaactgaacctcaaatgcatgagatcatgaaagcttagtggggtatggtacttgaaaagggacagtgggcaagttgtcagagaaagtggagatttgtgagtgatgctggatgttggaaggagataggaaatttgaaaagtagatacatctagatatccaggagtaaatgttttgtgatagtgatagaatcagaaagaattagactggaaggcattgtgagtttatttggtcttagctattgccacaatacagaagcagttccattggtaaaagcttatcaaatggtggcttacatgatcctgtgtaatttcagagaagtcccctcccccaatcttccaagattgtgtattccactttttcactgtcataccccacttaagtgtttttcttaattccataccaactgtccttttcatagggtgaggtctgagnnnnncagcaatgatcacatc

SEQ ID NO: 2057 - DNA, 584 bp, Canis familiaris
  misc_feature (1)..(584): n = a or c or g or t
cagctgctgtgcggnnngcacagcccagagaatgannaagagctggagaannagctataccaagaggcccgggaatgcctgaccctgctctctcagcgcctgggctctcagaagttcttctttggagatgcccctgcctccctggatgcctttgtctttggctatctggccctgctgctgcaggccaagctgcccagtggaaagctgcaagcccacctgcgggggctgcagaacctctgtgcgtactgcacacacatcctcagcctctacttcccctgggatggagctgacgtgccactcgcacgccagacaccagtgggcccagagacggaggaggaaccataccggcgccggaaccagatcctgtctgtgctggcaggactggcagccatggtgggctacgccttgctcagtggcattgtctccatccagcgggccacacctgctcgggcccctagcacacagtccttgagcatagctgaggaggatgaagacgaatgacttgtcctcatgctctcaggactgagttttctactctcgtacattccagaggcccctgtgtttccctgttgttggtacggctg

SEQ ID NO: 2058 - DNA, 501 bp, Canis familiaris
  misc_feature (1)..(501): n = a or c or g or t
atgcaaggnctgancaatttcaggnnagggcnnnatatccaaataactccatatatccaaaggctgnnagggcaaaagctggggtaannttcatatcccatccttccgatgggatccctgtgcactcttccttcccaccctggaatattcaatccaggatgtcaaaaacacttgagtaccaanaatgcacagagtnnnnnnaggaagcacagaaagagnnntggactaggagtcaaanagtcgcccggtgctgccacttaacttggtgactttgggcaaaatatgccanctcacccttaatacgcagggctgttaggaatattgataggaataattaatngaactttgtcaactgtgcangnnnnaagaattaatcacaaggattgtgggattcacaattatagttagtgcannnnnntaagtagcagacatctcctcccatcttccagcagccctgcttcaattccactcaactggcagnnnactgtgttctccaangaa

SEQ ID NO: 2059 - DNA, 528 bp, Canis familiaris
  misc_feature (1)..(528): n = a or c or g or t
catgacagnnntgggtgtgancntcatgaanngcnnctgcgctgctgannaagacatctnnaagttcctgggtatgatgcgagtatatgccgggannaagcacttcatctacggagagcccaggaagctcatcaccaaagacttggtgaggctgcagtacctagagtaccgccaggtgtctaacagtgatcctccacgctatgagctactgtggggtccgaaagctcaagctgaaaccagcaagatgcaagtcctggaatttttagccaaggttagtgatacagttcccagtgctttctcaacaagatatgaagaagctctgcgagatgaggaagagagagtccaagccaggcgttcggccaggcactactgctacagccagtatgtgttataggggcacatccagcagcttttctcgcctctactgatacctgagggttttttcccaatcatctaaggaaaatatgacatcacaatagggattttcatggatatgtgaaagaatcccatttactgcaacaatggaat

SEQ ID NO: 2060 - DNA, 495 bp, Canis familiaris
ggggctggagagagctctggggtttcacctcccactggtacccaactctaccctaaggaaactctggagtgagagaggaggttgggtagttggttttctgactaagccatagccatacataggaaggagaattgatttcagtgaaggagtaaagtgaccaccactttgttttctactgatttaaaagcacaatcacatcaaaaaagtcattttctattacagtgttttgaagccattcttaccgtagtctaaggtgtcttagatcttccctagtgatgtcattaagaatatcagaaagggtataaccttcttcaacaatctgaaacaaaaatcgaatacagaagagctaagctgctttgtaagaagggcataggaatgcttttttgttagaaatttaccttttctattgtactcgaatctgctccttgcagttgtaaccagtccacaagctctttatcagttttctgctcctgagacccaggaggggatgctgaa

SEQ ID NO: 2061 - DNA, 623 bp, Canis familiaris
  misc_feature (1)..(623): n = a or c or g or t
tatgagctnntancagcccattcatatctgacttgtgcctgannnnctgaggtgatctctcaagnacctactgcctngaactataaagacctatctgtgtcagtccacacacaactgaaaacctgccggaacttttcccaaaacnnnnnctaccctagagctgacaccaatgttctgccactaccatagcaaaaccgcagtcctgaaagagtgcgagaaacagaagtgcaaatatgcaaaagtaggagtttgtccagagttatgaaaagcagcaaagaaagaaccctgggggggaaaaaaaagtaaggctcatgatgttgacgagtgaaaagacggctaaatgtagagtgggatgcgagcatgctctccttcatgatcagcccctttgttcctgtactgtacccccattctaatgtcagatacagcagaatatggaaaagatgagggtttgaattttgcctctaacgcttagcattttgtgcccttggcaaaagtatctgtacnntaattcttacagggttacagtcagaataaatgagacaccctgtataagaaataggttaccatgccttgacatagatatagatataagcaaaatagaaaccttgtctttaactgtataa

SEQ ID NO: 2062 - DNA, 351 bp, Canis familiaris
  misc_feature (1)..(351): n = a or c or g or t
agagtccccaagaaaggaaaccttttcttgtggtagtatgaaccaagacaccagattatctggattcttatttccaatgtttcnnnngggaagcataaatctttattgtctgtaaatctaacattattccttttcctcttagaagaatatcgtattgttagatgtttgttaagctggtaacacccttgcaaccgctgcaatatcttcgttagtaatctgtataatgctttgtacacaggtactagtaagattgttattcaatgtagcttcagtcattaacttactagcgcaaagtagtactttcgtaatatttacaatgtattaagcccacactatattttatttcaatga

SEQ ID NO: 2063 - DNA, 643 bp, Canis familiaris
  misc_feature (1)..(643): n = a or c or g or t
attttaacatgctcagaagtgctngcagaagacagtcccccaaggccaacatagggtatctattattaagatacactcccccctcctcgcgtctcaatgccattaatcacttgttaggagcaacatgacacatgatgtccagcatccccaatttacatatttgtttgctccctctcctctgagccttgttgcctaggcctcagaaaatactacttcaattgaataaaaagtaaggatatctcagcttctgtaaagcacgtttgctcaggttattcacttgaaagcctaatactaacatcctctgatagcttgtcccttgcactagatacactttaaccacaagagcctcaataaaattaaatcctgctgctcctgcccccatcaatgctaatgttgcttcctctttgaacaaaaaatatgttgtagtatccctgagtttaaattcactggttatctgtatctgcctgaatagtaaaatcatggaagtcagcagtttccttagcatgggacaactaaccagtctgtgtgactttgtgtcttcagcacttactagaaaatctgatcttaaaacatttgaattctaaacatgtaaaatgtgacagcctacacttttgtaggcaataaagtcatggctgctatttgt

SEQ ID NO: 2064 - DNA, 606 bp, Canis familiaris
  misc_feature (1)..(606): n = a or c or g or t
taatcaaggtatgggggtggnntgcatctttgtgtnnntctggcangtagagtccatttgacaaggtatgtcttcttttttttctggtgaaacaggacctttttttgcagcaagaaatttaagggtactttaggggagagggcattgctacttcatctgtaacatgtttctaaaattatggttatggattttgagtggtttttgttttcagtcttttaaaaatatctttccccttaactcttaaattaagggaaatccctctctttcctacagggctgtgaattaaggaatgggtagagtttacatttaagcacgccagtgtctgcccaatttcttaacgtatacatttgtttttcttttcacttattctttgttcttaaaatgctagaagaaaacctagatcttcctagtgcctttgaaccaatactgcagtttgattaatttaaatcattaataacttcagtaggattactacagactgtatactggccaaaattgcaaatcttacagtgagtttgttgcattaatttcaaaagccacaccttcattgtatttcatgtataaattatatttgttcnnnnnntatatattgatattgtatgtata

SEQ ID NO: 2065 - DNA, 350 bp, Canis familiaris
  misc_feature (1)..(350): n = a or c or g or t
gccacnnacgaccaccggcccgggcctccccgnngaccaccggcccccggcctcggcccccgcagcgagcaggacccgcgcgcggcgctgcnnncccaggggcgcaccggccccgctcgcggacgcccccgccgcccaggccggccctccgctgtcaccatttctgtgtctgggaggtttcccttcttttctgtgtctgttcgtacccggattccattttaaagtttacaataaatgtctcggggttgcctcgcccccagcgcacttctctgtggcaagtccggtccagggtgagagctcagagagccagggcggcctcccgggaggaagggcccaggctgcgaggacgg

SEQ ID NO: 2066 - DNA, 556 bp, Canis familiaris
  misc_feature (1)..(556): n = a or c or g or t
gaatnnngnagccccttctcaagccctggtcataatagaagtacataggagaaacccgcaaggaaccctgagctcaggggttttnnaactgctcactcagtcagtccttacttagtttggaagtcagcagtggtggtcacaaagcccatacactttaccatctaggccctcacttggcctatgaactttctacccatgttcttagttactggttcactggtccctcagcccatgacagatgagaatgaatgatatcaaaaggaagggaggaacttctgagagtttgaatgccccagagagcctggcttagtgctgggcattcttttgaagaggtttcacagaacaatgaggttagtactttcagtttctattttacagaggttagaatagactgttaagggacagccagaaaggacaagagaagtgacagcctgaggttgagaagggccagagaatcataaaagcagacatagatctggccacctctttgtaacatgatggttcttatcacaaccctggatcaaaaagattagtttggtttataatgtttaattgt

SEQ ID NO: 2067 - DNA, 416 bp, Canis familiaris
  misc_feature (1)..(416): n = a or c or g or t
ccgggtnnnnnnnagggcagatnnntgtgngtcggccatccgccagcgcctnnngacctannacatgctgtgtgagccagtcctgaccttctatcagcnnaagaacctgctctgtaatatcttggcagaagaagctccagaaaacatttttgccaagtgcnnntctgtcgttgaaagcctgcagtgacgggagggnctgggggctgtctcccccccatcccagaannnnnatagggctcagaagggggacaggcttgtgagatttaattctatcttctatggctggctcaacatgaaggatcccaattttgaaagaaaaaaagcatgagacacacagaatgagcgagagagtgagagcccagcatcgcccaggctgtgacctccaagccactcagcaagggcttccccagcacctc

SEQ ID NO: 2068 - DNA, 259 bp, Canis familiaris
  misc_feature (1)..(259): n = a or c or g or t
tgnantgcngagannngaaaaatanannnngntgggaatttttaaacttgttttcnnntgnanttcctttaggtnaannnactnnnnnttgtntnnggttcaaaannntagnnnttttaagaaaanangaactntatnnaattgcattttnnaacnnnnnnacnnnnnatcaaaacngttttnntttatcaagtaaaggtnnnnnnttgaattactaagatnnntatttctgagccatcttccctattcaaatctacac

SEQ ID NO: 2069 - DNA, 541 bp, Canis familiaris
  misc_feature (1)..(541): n = a or c or g or t
aaaaccagcctgtccaacaaacgtgcnnncgtctctcttctcaaagagggatggaatgaacagctctcagaagaggtaagagttgaaggacttgttatcctctgagcgataatcgtcatggagagacactgctggtgttcctgaaaaccagcctgcctctgagtctcagagacaaaatatgagagcagccactgggataaatcgtgaagcacggcataaggggggagaagcctcgtagttgattgaacccatgtctacgtggcttcagctgattcccctgtaacggaggtggaaagttcccgcacgtacacagctgcacgctgcagcctggcggctgggattccatgggtggactcattcagggtacaaagacagtcctggctgcaaagtgaaaaaccccaggtggcattttcaagtgtttatggactgaaataatggctgtacggtatctggcggatgctcaacttgaggaatcggcatttttgtacagtgggagctgaggctataaacctcagcgtggcttcacataagccagaagaaa

SEQ ID NO: 2070 - DNA, 719 bp, Canis familiaris
  misc_feature (1)..(719): n = a or c or g or t
tggcttttgctnnctcggctggannagaaggttgggcagctgacccgagctcgggccattctggaaaagtctcgcctgaagaacccaaagaaccccggcctgtggttggagtctgtgcgactggagtaccgtgcagggctgaagaacatcgccaacacgctcatggccaaggcactgcaggagtgccccaactccggtgtcctgtggtctgaagccatctttcttgaggcgaggccccagaggaagaccaagagcgtcgatgccctgaagaagtgtgagcatgacccccacgtcctcctagctgtggccaagctgttctggagcgagcggaagatcaccaaggccagagagtggttccaccgcacggtgaagatcgactcggacctgggggacgcctgggcgttcttctacaagtttgagctgcagcatggcacggaggagcagcgcgaggaggtgaggaggcgctgcgagaacgccgagccccggcacggggagctgtggtgcgctgtgtccaaggacatcgccaactggcagaggaagatcggggagatccttgtgctggtggcagcccacatcaagaacaccttctgatcatcggtccccgttgggcacgggcctcggggcagcacgtggaggagcgtggggtagcaaggagaggctgggaggggctctgagctgtccaccctgctctttgattaaactttttctagatannnnnn

SEQ ID NO: 2071 - DNA, 549 bp, Canis familiaris
  misc_feature (1)..(549): n = a or c or g or t
cgagtgacagacaagctgacccctattcatgaccnnattttctgctgccgctcaggctcagcagctgacannnnngnngtagccgatgcggtcacttatcagcttggtttccacagcattgagctaaatgagcctccactggtacacacagcagccagcctctttaaggagatgtgttaccgataccgggaggacctgatggcaggaatcatcattgcgggctgggacccccaagagggagggcaggtgtactcggtgcccatggggggtatgatggtaaggcagtcctttgccattgggggctctgggagctcctacatatatggctatgtcgatgctacctaccgggaaggcatgaccaaggaggagtgtctgcagttcactgccaatgcgctcgctttggccatggaacgggacggctccagcggaggggtgatccgcctggcggccattgcagaatcaggggtagagcggcaggtacttttgggagaccagattcccaaattcaccatcgccaccttgccaccnnnnnnattcctggaatcctag

SEQ ID NO: 2072 - DNA, 638 bp, Canis familiaris
  misc_feature (1)..(638): n = a or c or g or t
agnnaaattcaacgnncgatgttggaactgttgaaccagttggatggatttgattcaaggggtgatgtgaaggtcatcatggccacaaaccggatagaaaccttggatccagcacttatcagaccaggccgcattgacaggaagattgagttccccctgcctgacgaaaagactaagaagcgcatctttcagatccacacaagcaggatgacgctggctgatgatgtgaccctggacgacttgatcatggctaaggatgacctctctggtgctgacatcaaggccatctgcacagaggctggtctgatggccttgagagagcgtcggatgaaagtaacaaatgaagacttcaagaaatctaaagaaaatgttctttataaaaaacaagagggcacccccgagggactgtatctctagcggaccagagctgccttcaaggagatggttgggcgtgtcctgacccctccgagggaggaggtgggggaagcccccggaggaaaccatgttccagttgatctttcttagcaaaacctcccgtgtacctttttgcgcgtgatgtgtaggacaccccctgggctgccttcctctgtgggtcacgtgcagtgctnnntccccaataaagcgtgctccccctccag

SEQ ID NO: 2073 - DNA, 592 bp, Canis familiaris
  misc_feature (1)..(592): n = a or c or g or t
ctgttcannagctgaccaaggctgcgatgagtggtgtgggcattgatggnnaagtgctctcgtatttnnaattggcccagttccacaacgcccaccagttggccgcctggtgtttgnnncacatctgcaccaactacaacagtgtttgttccaagttccgcaaggagatcaaatcgaagtccgcagacaaccaggagtactttgagcggcaccgctggccccccgtgtggtacctgaaggaagaagaccactaccagcgagtgaaaagagaacgggagaaggaagacattgcactaaacaaacatcactcaagacgaaagtggtgcttctggaattcgtctccagcagtcgcctgaggaggaagagataaaaatgagtaatctgacgcaccacttgttaaaagcactactgtaaaattagtcttattattagagataaattgtagttcaggtttcaggcactgatcttcctccactttcgtgcatttctccttgttgggatcaaagcacaagctccccatctatgagcctggacaaaaaagggaagctgacactcacggcattccttaaacttatatnnnnnnntttgttag

SEQ ID NO: 2074 - DNA, 384 bp, Canis familiaris
  misc_feature (1)..(384): n = a or c or g or t
tgaatnngtanaaattnngnnaaacatgtttttgccacaaaagaaaatgataaaagagcaaatagnnnnnntantagagcacaaatacatcannnnanacnngtntgacatcaatactttcatnnncnnngcataatcttgaatattnnngacaacattaagaacccagatttcagagtgcttgggcagaaagttgtaacagtttgtgctggaggaaagtttatttggactttgattacataaatattnnnanntctgccttanntgannnnnnnnnnnnattttgccagtcacattagttagcatgatggcattcccttcatgttgcacactctgtaacagcatnctgttttgtggannnnnnnngcattcannaagagccca

SEQ ID NO: 2075 - DNA, 589 bp, Canis familiaris
  misc_feature (1)..(589): n = a or c or g or t
gaaaaagttgtgcttcaaagaaaacgccgaccaaggtgacaccagcacgaaaaacnagcagagcaccaacgcngagcaaccagttcagtggactcttctggaaaaataaaagcttggccacaaatgcgactctgtgacaatccccgcaggaggacgagtctggcctgctgcgtcctcccgacaaacgcaggcaccagggcagagccagccacgccgggatccagccccatcctgtccatgcctttgttcacgctgagactctttcttttgaccttgacatgcgttgtgcctgtttgcaccacgctgggtagatgagggatactcgtgccgcgggttgcatcccgaggggaatggcgctcacgctatccgtggccgttaggcgtttccccgtggggtgtgaaaggccgatcgtccatcacagtcagcccatcaatccaacgctgaccccacaaagttcccccacccggaactctgggtcgtgtgaccaacaacgtgtgaattaaacacaaccgtcccctggcattgacccttggatacagtgacataagccttcagttagtgtcctcagaacctccttcattgggtaaga

SEQ ID NO: 2076 - DNA, 681 bp, Canis familiaris
  misc_feature (1)..(681): n = a or c or g or t
ggtacgatgcttcccggtgccccgctttgangcaggcacaggaccantnnctggatcagcagctgagcatcgtggnncagcacaagtgccagcatgccatngncntccagcacatcccattgttcctgcnnagcatcgatgaggacgatgactacttcaacctcaccaagtccgtgcggaaggagatagccaacaaactcgctggagcaggtgtcaccgctgtgttctcaggccactaccaccggaatgccgggggcacctaccagaaccttgacatggtagtgtcatctgccattggatgccagctgggccaggacacccacgggctccgagtcgtggtggtcaccgccaagaaaattgttcatcggtactacagtttggatgagctgagtgagaagggcatagaagacgatctcgtgggcctgatgaaggaaaagtgactgcccctgacagtctgttcatagttcactttcactggtttttcactttgctagaaaccacacctgtgtaccaccccctgttgaaatagaaaagtactccaggcagatttgtggatttatgtccttttgcataaaccagagggctgggtcctatcctcctatcctaaattacatacaatatagagctgccctcccttaaataaaaaagagaggcatgagggaagcctganannnaggannn

SEQ ID NO: 2077 - DNA, 533 bp, Canis familiaris
  misc_feature (1)..(533): n = a or c or g or t
ccacagctgngtcacctgtgaggaatgggacacccctttacccccttgccactcagcgttttagttttggctccctgtacccagnacgtgtcccacaacggcctagaagaggcaccaccgttataggaaggctcctggagacagtctggccctgttccctccctgcagtcacgagtggggggcaggggcacagctccctctagcccagggccctgaggggaggctccctgtccaactcctgagcctgctctccccggctcccaccccctcagcagccaaggccccacacttgtggaagcagcttgccggcctcagcctgggcccgacctggcagggggctccccagcgaggggcccggggacggcccagggagcaaggccagctcctcgcccccgccaggaagtgaggctgagaagggtctggtgacttcaaccccaggccccggggcacacggctcacagctcacgcacaccaccagggccactggctgcttggagtttattttccacttggtgcaaggcacacagttccag

SEQ ID NO: 2078 - DNA, 607 bp, Canis familiaris
  misc_feature (1)..(607): n = a or c or g or t
tttnnaatatgaactgcttcttatacagcaacttaatttccaccttattgtccacaatccttatagaccatttgagggctttctcattgatttaaagactcgctatcccatgatggagaatcctgagatgttgaggaaaacagctgatgactttcttaatagaatcgcattgaccgacgcttacctgttatatacaccttcccaaattgccctgactgccattttatctagtgcatctcgagcgggaattactatggaaagttatttatcagaaagtctgatgctgaaagagaacagaacttgcttatcgcagttactagatataatgaaaagtatgagaaacttggtaaaaaaatatgagccacccagatctgaagaagttgctgctctgaaacagaagttggagagatgtcactctgctgagcttgcccttaacgtaattacgaagaagaggaaaggctatgaagatgatgattatgtctcaaagaaacccaaacatgaagaggaagaatggactgacgatgacctcgtagattctctctagccatttgaaattgacttttcaatgctaactgatcacacggatgaagcacatcttaactttatt

SEQ ID NO: 2079 - DNA, 473 bp, Canis familiaris
  misc_feature (1)..(473): n = a or c or g or t
cgctgcctggnnaaccgtgaacccacaggacatccctgcgnnnacgtggtggnnnctggganngaacctgcacacgggacactcgtgccacnngtcgggaaacggccacaccgcgagtgcggggctcgccgtcagagggcactgggccccccacccgcccacgttaccccggcaggagccacagacccagggctgcacagtcaccaagaggccggcagccggcggcctgtccagcccctgagggcgacagatggacgccgcaaggtgggaggccggcaaatcgctggaatctggacactagggctgcggggtgcagggtggggggccccgcccgggggtgcttggggtcagcctgggccatcctgacccccccgccgccccactgggcctgcaccacacaggtgcaggaaggacctgcccccttcccgggtccctgcctctgcccacgggtnnnnnngtctgtgtccccctcc

SEQ ID NO: 2080 - DNA, 530 bp, Canis familiaris
catttcaaataaattacattaaaatgttatcctctctgtgtacagtatgtgcactagaaatgtcaaatttcagctatcttcctaggaggttctttctggaatttttgcttcttgtgcccaaatacaaactttaaaatggggtgcaggttgaaataaatgttttgatttgatctatcaagacttttgcagaggtcctgtttctaagatctgttttttcaagcattctcaactcatttacttattcatttattcatgtttcacttctgtatcttgaatctgtacctcatgtaaagtcaagagataagtcatgattgtgataggaaaagagtgttgaatctcactgctaggataggcgactgttgaaaaaattgacaccaaatagtagaaagcaaattctacttggaaattcttaatggagggggcacctgggtagtgcagtggttgagcgtctgccttcagctcaagtcatgaccccagggtcctgggatcgagtcccacatcggggtccccgaagggaggctgcttctcct

SEQ ID NO: 2081 - DNA, 131 bp, Canis familiaris
  misc_feature (1)..(131): n = a or c or g or t
ccaagtgcgtcttcacctatgtgcagtcgctctacaaccacctgcggcgccacgagctgcgcctgcgcgggaagaatgtnnngcctccctgcgcgcacggcccgcctgcggcaagctgcacccaccatcca

SEQ ID NO: 2082 - DNA, 607 bp, Canis familiaris
  misc_feature (1)..(607): n = a or c or g or t
tacaattatggaaaagaggcacattgtatngnagccattgntagttcagtngaagttctgtaagatgtgcatgtgctgtttgatatgttttcttttgctttactgcttttaaggctagcagtactctaagtgtgtgccccttagacagtaatcttacttttggtggtgtcattctaagtcagtttaattattgaagagacagaacaagtgcattctatatcattctaaaaaacacttcccatataatgaatattatgtatgattaagtattgctgcttggtttttttttttcccctccttttagatgggcattgttttttaaataaaaccatgtttgaattgaagctatattaagatagaaatttgaagtgttttgctttttctggcactcacaatcaggactaagtttgaggtcaaacctgtattcataattggcaattttttaaggagcaagtaagaaatagaaggcaggtgaagatataaaaccctagaatgcttaaatgtgctgtaaaactattgtagatgtcactggattttaccaagtaatatcctttcttcattttttccatctactgtggcttttcagttaaaattttgtttataaaag

SEQ ID NO: 2083 - DNA, 355 bp, Canis familiaris
  misc_feature (1)..(355): n = a or c or g or t
atgtttatctataatacatcacattgtacatctaattatatacaattnttagnngtcaaatatttctcaaaaaataaagaagtatagaagtagtcgataatgataaatatcctcccaggagacaacagcttgagtaacatttttcaaagtctttagcaaaagcagagttagtagcattctgtataaacagacaggggaagcttttttttattctcctcccagttttatcattctgaatgattcctttctgtttgtgtattgcttatcattaagggattattatttctacatacaaagcttcattttttaaaatgtttgcgcatcggggcacctgggtggctcagtggttgaacat

SEQ ID NO: 2084 - DNA, 61 bp, Canis familiaris
ttccttaggcctgccaaggctgaagctacctggcatccagggtgggagcgctggtagccct

SEQ ID NO: 2085 - DNA, 595 bp, Canis familiaris
  misc_feature (1)..(595): n = a or c or g or t
ataanacattaatgaggtcaagaaggnctgaagttaatgtggangctggaccatctacctggatattgactgggccagtgtgacagccagtgtggatgctcaattatctgcatggacaccctggaaatggccagagtagatgctgggaggaagcatgggtacaagtgctcaaggctctgtgagagtagtagcatgcctggaaagtatgtaggtgaggaaaacaagatgcaagcgtcaaagtaaaagaaatttttatgtggtggggaacaagtagtgatcaggaaaaaaagaatttagagaacaaatactgtgaaataaaggagcaactctgaactgaagaatgataagggaaacagtatgtgagtgaaaaactgaccattgaggcacagaaaaatcaccatgaaaaggaagtgagtgtattaggaaataagttcataataccgctagggttctaaggaagtgtattagtgattcaaagggaagcatctcaaaacagaataagaatgatcatataggctatggaaggtgaggtgactgcaggtgaagaaaaactgtcatattgcgtggttttacttttctccatgtagaacttcca

SEQ ID NO: 2086 - DNA, 643 bp, Canis familiaris
  misc_feature (1)..(643): n = a or c or g or t
acttaaaagggattatggtgtnnagctggtagaggagggtgctgacanctttannnngaaagnnaatattgaagtacagttggcttcagaattagccattgctgcaattgaaaaaaatggtggtgttgttactacagctttctatgatccaagaagtctagaaattctctgcaaacctgttccattctttctgcgtggacaacctattccaaaacgaatgcttcctcctgaagcactggtaccgtattataccgatgcaaagaatcgtggttacctggcggatcctgccaaatttcctgaagcaagacttgaacttgccaagaagtatggctatattttacctgatatcactaaagacgagctcttcaaaatgcttagtactcgaaaggatccaaggcagattttctttggtcttgcccctggatgggtggtgaatatgacagataagaaaatcctaaaacctacagatgagaatctcctcaagtattatagctcatgaattctctttcaagaaagcagagttgtaaaagagttctggaagaaaagggactgaaacatacatatttctcatggtctcatcttgatttgtgattctctaggtattgatgataatttcccatgtaaccctatttccatttttatc

SEQ ID NO: 2087 - DNA, 617 bp, Canis familiaris
  misc_feature (1)..(617): n = a or c or g or t
cnagcagatgccgcccctgaaggtcagaggnnnctgccagaagaaaatcgcagagtcaggtggtagtggggagccggagtgggggacacgacgcacagnnagagggcagggcctaggaggtcagctgggacttctggggctggcctggcctcccccaccactgccctgcctgcctcctgccgtgccctcccccctgtccacccagagccctggacggtggccccagcacccacctccagggttctctgccttcagcacctcatgccgctgctggagcgcactcttgctcctggctgccttctgccgcacgctccggtactggctgcccaagctgtgagtgcagaaatgtgctggggtcccggggcagcccgccgccccccaaaaccacaccatgggactctggactgtggctgggcagatggcccagagcagtcacaggcccatcaaatgttaaaaaccggcacacgtggcaagtttgtgataatgctgctcgctctttgctctgggttcggatggaccctcccttccttgtctctcctctccttcacaccgggttttccctcctaaagttatcttgtttatgcctttgtcttccccaccaagacgttactcctgag

SEQ ID NO: 2088 - DNA, 675 bp, Canis familiaris
  misc_feature (1)..(675): n = a or c or g or t
caaagcttgggnnaaatatgtacatgccatgttacactacagttgtaagtccatatcatccttttatccaattatgggatttaatttttgcctcatatataattaaagagattttaattatggtttaagacattccagtaacttaatctttccgtcctgttaagtgtaactggaattctttatatgattttgttgtatgagtgagttagaacaaagatcttgaggaaaaactgataatgtgtagaaatctgctgatattagaacactataattcattgatactggaatcaaagacagttttgcattggttattaatcttttctaatctgtagagctgcttatagttctaaaacatacaaattgatgtggaggaagctgtaaaaaatgaggattttgcgttaaacaatttgaaataacagcaaattctttttgttgttgttccttgctttagtttaagttaaagaggcagagtgatcttctcgctttcctgatagtgtctaagtaattaagaataaataagttccaaaagaatttgcagctggaatcttaatgacaactgtatgtggccgtttgagtctccccacactgtgactctagatctaatctgtgctaccatattaactcctagcaggaatggcttcatttcagatttggtnnnnntctctccccaaatgc

SEQ ID NO: 2089 - DNA, 532 bp, Canis familiaris
atagggatggcacacacagggccacttgtgctagggcccctactgggtcccaaagtcacttgcacttgttcagaagcagtagggaacccctacctatggatagtctccaatctctttgccctcttgcagaagcaatcccctactttccatgtatgccctgcaacacagcccgttcatgactttgcacactctacccccttcctggatatcccatcctgttgtgtaggtcttgcttctctctccaggcctggctccttgttcacaccctgcttccagccctaaccacttttcagaatatcttcttcactctccttgggattttcctgcagcaactcccagcctcagttctgctgctgtcttttttgctctcagctttacttctcaacttcctgctttttaatcccacctcattcccccaaacaatacagcaggttgtctcattttcccaggggtgggtcatgggctctatgctgctcttctgtctgtctgagcttatgaacacccccacaggtagaagtggggagtaatctta

SEQ ID NO: 2090 - DNA, 529 bp, Canis familiaris
  misc_feature (1)..(529): n = a or c or g or t
ccccccagcgcnctccccagcctgcccagctcagcgtcaggnctctggtcagcaatggcacctccacggaggggggccgaggctgccccgtccctgccgctcagcactgcaggcaggatgttaggggaggctctgtgagcaccgtggccctggggacacgggctcctacatgccgccccccacagcttgcagggggatggagtgggctgtgccacgtgtgccatctgcactatccctcctgccctgcgcctgcccagccttccggctcagctctggtggccaccaaccgccaggcagggaccggggctgggcatggggcaggggcgggacagcggaccctcccgcaccccgggcaccggcggggtgaggtagtaggttgtgtggtttcagggcagtgatgttgccccctcggaagataactatacaacctactgccttccccgaggagcccagcgacacgtccccacgggagggccgcccccatgcccannnngtgactccgggggcnnnnngccacgggccaggtggg

SEQ ID NO: 2091 - DNA, 597 bp, Canis familiaris
  misc_feature (1)..(597): n = a or c or g or t
gcctgggcagatgatgccagcaccctgggccaacaccacagacccagaaaaactgatccagtttcttcaggcatccatcactgagagaagaaagaagggttcgttttttatatctcaggtggtgctgacccccaaagctagcactgtggtcaaaggagtggccagtggcctcagagaaactatcacagaaagagctcttcctgccatgatgcagtgggtccgcacacagaagccaggagagagtggcatcaatattgtcactgccgattttgtagaacttggtgatttcatcagcactgtcataaagctcaactatgtcttngatgaaggagaagccaacacttgattgtaccattggagcatccatgagaggatctttagccaagcacacttgcaatgacacaaggatttgacttataaatatgacagaaaacaaatctttcaacatattaatgaagaatgaataaaatatagagacacacagatgttcattttgcccttttggaaagtgaaggtagaacagctaaaaaaagaatgccaaggctcatgaattnnnnntcattaacatcttnnnnnagcaaaactgacataagaatt

SEQ ID NO: 2092 - DNA, 469 bp, Canis familiaris
  misc_feature (1)..(469): n = a or c or g or t
tgnntctttgtttattccctattatgaggtcagtgctctggctctgaaggaagacatttgcgtaaggtcatcgnngaaaccagtgaagtcactcttaccgttgggaatttgtcctgtgatctgagaataacagaaagagnncagctgatttcnnccaggtttcagcactacccccataantaccacagtcatgaaaaagagaagctaagtataatttggcacagcaaaggagactttgaacagttggcaaaggtcacctctagtgcaaagcactttattgcaatcggcattcgnnnnagtnnntatctagtatttgatcttgatgttttgatttttccgaacaaaataaagccaacgggagaaggacgattttactgtttgtcttttctcnntaaatatgacccatagtgactctcctgttgctagaaactgagcagtgttgcacttgaagtcctttggtttgcttctt

SEQ ID NO: 2093 - DNA, 739 bp, Canis familiaris
  misc_feature (1)..(739): n = a or c or g or t
aagaagagaaaaggaggaggagaaagagaagctatggaaggagaaagaattgtnacaaagagcagagaagaaaaagaaaataagaaaatactgggctaaaaaagagcagaagtggcaagaaatggaaatgagagatcttcagcgcctggaagaactgaagaaattaatggctgaacaatcagtgaaagaccgagaaagggtgaaatatagacaaaaattactggaaaagcgtttggtggagaaaaaagaagtggcccttcaagaagcacatgaagaggagagagagaggcggctagaagccctgaggaaacaggttgctattgttgctcagtttgaccctgttagaatgatgtcagacacaacggcatcaaaagcaaggatgggtattggaattgaagaagaatttattcttcaaaagccactctttacactgaatacatacaatgaacaccagataatttctgaccctagactccgttttgagttagcacttcgagaagctggacttcataaaacattttatgccaaagagatcttaccaaaaatcaaccctcaaaaacctccaagaaaggacatggagtctactatatttaaaatctagagttcatctgcaaatcctattatatataaacaagatttgtctttgaaaacatttctatggataacaattactactttttaaaaattttttaaatatcagacatagaaatcaaggcgttcattaaaacaactnnntnnn

SEQ ID NO: 2094 - DNA, 530 bp, Canis familiaris
  misc_feature (1)..(530): n = a or c or g or t
gtgactttatgacntcnngcaaacttnnntaanccaggtcaaaaatcataaaatatgaagacttctctctctctcagtcttcatataccccctaactcccacagagacaaagtttgcttttgcaaccattgcctcagtgttctccattggggaaaagactattatgatcattatcaaacacaccataaggaatcacatgaaaggcaacattgtgcatggagcttattgaattgcaagcaggcttctcagaaatcaaggccatcccaccgatgcaaatcagatgcttacataatgctatttgcttggagagtgacaaaggagtgatgggattaagatgcccctttgtggtgtgnnaaaannnnnnctgtcttcttgcttaaagcagaacatnnnnncatattaactgggtcgacacaaaatgtatctaaagctattgaatgcacctatttttcttgatagaatttgtaccaaacctctttccaaggaatttgaagcagctggaagttactatgatgtttctgccgtttttt

SEQ ID NO: 2095 - DNA, 592 bp, Canis familiaris
  misc_feature (1)..(592): n = a or c or g or t
gtggtgcgacccagctgccaccacgaannaacccccctagaggtgcggctctcnnntcttcccagacctccagcttccaggccaccccctccaggcaacagacacctgtcctctccggctctcaacnnnaccggaagaagccccgcatgggcttctgagagcccaggagagctgctcccccaccttcggagagcccttcatcctggaccagtggtgccttgcacagctagaagctgggaggtgcagagaacatgctgcaggcctttctgcttctggagtcggggggacaacagaatggtggtttctcctgtttatgcttttgctagaaaatcattccaaaaggcatgttgaaaggccctggtgaccctgtcctgaaagtcagtgtctttgggattccctccaagaggcagtgttatgcttcaaagcaggggcaccagtcaagccgctgcaggggagcgggggcctcctgagtcccccgttggtgttggggtgacggcgccacctcctcacctggagtctgcagctgctgctgctgcttagtttttgttcagcagtttctaccaggatctgatgttttgtagagggaagcact

SEQ ID NO: 2096 - DNA, 535 bp, Canis familiaris
  misc_feature (1)..(535): n = a or c or g or t
acccacttggggaagagtctgacatccagtttcaggtagagttggtgagaaatgtgnnttcatttggagaagcaggggcaatgggtggcccttccgaggtcatgccagcnctcccatgcggcagttggcagcggggctattgctggaaggcaggccagctggctcaggctctgtgccagacacccctgtgcatcctntgcaggtnntgctagcgttgtgtccttggggtggcctgggggcagtgccagggagtttctatgacaaccttactgattattaaggaatgctgccagttttatgaacnnnnnnnnaaatgaatgtctgctttaggaagaggattggaacagcacnnnagcaaggctgttaattagcagagaaactgtgtttggatgggtatcacacatctgttaaatataatacctcaactttaccttttttttaaagaaaaataatagttttaatttttaaaaatttttttanctaactannngaaagcaaataccaaaggctgatgtctgtatatggggcaaagggt

SEQ ID NO: 2097 - DNA, 431 bp, Canis familiaris
  misc_feature (1)..(431): n = a or c or g or t
aggctaggctggggccaaaggnntcgcagccgaagctcccaaacggttctcttcacctactggggaagcttcttaacacctgacagcgccagagacgggagcatggtcaagccaaacggcggacaggagccaacctggattgggtgtttgggaagggagggcgtatatagcagagaacatatggaacagcttcgggggcctccttgcccccctcattctttcgctcttgcatccggtcatatctgntcttggccctcatgcctcccggggcacatgggcccaactttatttgctgattcataaactgctgcttgttaagttagggttagatggggagagagaggatgcagtgganagcccccagaggccctgtctacccgactacccttgccttatggctctagcgtgtgacctacagagcatgnnnnnna

SEQ ID NO: 2098 - DNA, 491 bp, Canis familiaris
gagcagcctgatggggtcccacgcctgagcagagagccgttttttggcctttaaactcccttcctggcttcagcaaggctcgggctctttgccttcagtgttgtagccctggcaatgggcctgccttgggctcctgggctctgtccttggagcctggggttcagaggagcccctgcccagcccctcagtattaccatgtctccctcttcttagggatagcagagacagagcagcttgcaggaagctgacaccactccccgccatgccagcttcctcagcctctgcagggcactcggtgggggacagcaggactaagtaggacaaccagttggaaccccactgttcccaaagggcctaatgccaaggggtgacgagcccagcactgtcttctggagctcaggccccaaacgtagctccatggcctctgccagttggctttggaggtgatctaagcagcccccttatctgtacatagtgactggggcagggga

SEQ ID NO: 2099 - DNA, 605 bp, Canis familiaris
  misc_feature (1)..(605): n = a or c or g or t
atagntcaacacttgtgagtgaagaaannagctaccttactctggaaaataaatctctacagangcaccttgctgagcagcagcagcagtaccgtgtaaagattaatgaggtggcatcagaactaagcaacacacagaaggagatggatgacttgaggcaacatttagacaaatctttggaagagaatagtagcttaaaggctcttttgttcagcatgaaaaaagaagcaaaaaatgcagacactgcggctacattaaatgtgcagatcactggacttcaaacaagtgtgaagaggctctctgatgagattgtggaattaaagcagcatctgacacactatgacaagatccaggagctcacccagatgcttcaggagagccacagctccctggtcagcaccaatgagcatctcctgcaggagctgagccaggtgcgggcacagcaccaggccgaggtggagcagctgcattggagctacaaggagctcaagaagactctagccctcttcccacatggtagcgccagccttggaggctgctagccccacccccacccctgggcacccatgcctcgcctctgggttttgtggccagcgcatctgtat

SEQ ID NO: 2100 - DNA, 633 bp, Canis familiaris
  misc_feature (1)..(633): n = a or c or g or t
gnttccatgacatgtgggnnntagtattgtgtnnnnnntnanncnncaaaaaacttgaacnnngncctttttgctgcagaaagtgtnntnntagtcgctttttaaaatggagtggcattttataatgaatttaatataaaagcattgatttgattcctgagctaattttggactttgcgctgaaatgattgacttaggaaaaagtaaattggctaagaaagagctagaagacttccactgtcttagctggaaatgggctacaaaattgtttctcatggtgtagcggcttgcacctagtcagaggaaaacccggcagagccttagagacccattctagtgcatcttcttcctgtctctgcagttccttaaaagtgtcactgtatcaggacaaggggagccgaagagtagaagttcacttgcagggtttgtgtcagcgacatgtatatagacgattcagagatgcgcgcaggctcgtctctgtgtgtgccgtgtacatatggacagtgctataatgtgtttcacatttgatgatattccactttcggaattttagtatttgtacatagaaaatgggtttaataactcaccgtgggtctgatttgtcttatattcatcatttcttaaaactcttgt

SEQ ID NO: 2101 - DNA, 545 bp, Canis familiaris
  misc_feature (1)..(545): n = a or c or g or t
agcagatacnnnactactcattgannatccctgccnntgagttcaaagcacagtctctggagaatgacctgatgctgataaaactgtccaaggccgctgtactcaacaactacgtggggaccatagccatatctatggagcccttaacatttaatgattcctgctttatcccaacctggacttggaatcaattcaaaaatctcagtgaccctgacatcctgacttggataaaccaacattctcatcccttcagtgactgcaggaatatgataggagagagaatggcagtaaacatcatgtgtgtgggacaacctttaagcatcatatctaaaaccaagccagaagtttcagctgctccagctgtctgtggtgggaggctacatggaatcttatcctgggacaaaggaagtgtcaccctgggaagtgaagggtttttcacagaagttcatccctatgcaagatggatcatgaaaaccattactacccactgagggtatccgcttctttgtccctcaatgcaacatcttcatgatttctatactgaa

SEQ ID NO: 2102 - DNA, 616 bp, Canis familiaris
  misc_feature (1)..(616): n = a or c or g or t
cntcacgttgacaccctcatcaccaagttnctgannntcagctctagnccttccatggctgtncggattgctgcactgcagtgtatgcatgctcttactcgtctgcccaccactgtgctgctgccgtacaaaccacaggtgatccgagctttagccaaacccctggatgacaagaagagactggtgcgcaaggaggcagtgtcagccaggggagagtggtgagtttctaggtcgtgggtaagatgggattgaaatgagcttcattgctgatgctgccaacattcttttcacctgcaggtttctgctggggagccctggcagctgagcccagtcctggcctaggctctttggacagacaatctaacctggaattactaactatcaagccatcttgcccgagttagggagactactcgcctctgattgcctctctctgggccactgttgcatggccgtaaacataggaatcctgacttctaatgactttgtgaaataacgagtgtgagactacttgtgtttgaagaaacatcttggtcttggggctcttccatttatttgttagaaaaaaggagatacgctgctgaggggtgannncagatgaatgtggaccaggata

SEQ ID NO: 2103 - DNA, 579 bp, Canis familiaris
  misc_feature (1)..(579): n = a or c or g or t
agctatttcgactggtgatgttgctagagtctggcctggaactaaaatgcctnnacaaatgggaaacaaagataggacagagtatggactgaaagtatggagaataaacacaaaaaacaatataatctatgtaaatggctctgtaccaggacatagaaattgcttagtaaagatcagatattctaatctgcctgcatataaggacttctgtaaaaatctaccattccctacatactttcctgatggagatgaagaagaactaccagaagatttgtatgatgaaaatgtgtgtcaacccagcgcaccttctattacatttacctaacctcattggacatggcaaactttaatttattttatgagctttggtgagccagaacaataatataaccaggaaatatattttcttaatcacaataccatacttatcccctttgtcaagggcataaatacatcattcatcctccaaactaaattatgttaaaaaaaaaattaccacattaaccagatcagttatgccaaatttaaatggaccggcagtttgcatatgagcaaaatctttgtaattgtgagcttcat

SEQ ID NO: 2104 - DNA, 334 bp, Canis familiaris
  misc_feature (1)..(334): n = a or c or g or t
actgnaacccaannnnnnnacctggccctgttattcanttaccatgagactannnnnaaagcntacatgtttccatatnnnnnnnnnnntatttatatcttcccacctacctccantatggtggatttgaaaacatgaaaagnnnnacatnctatataaatgtaannnattaannnnactnnnngnnncattttctcagcttagaaaaactcagatatagagaatcagttctcaanngtttattacctcccaaannctatatttaattgggcaatnnngggctccagttcctttgatttttggaggaatcatatttctatatgtgaaggtgata

SEQ ID NO: 2105 - DNA, 126 bp, Canis familiaris
  misc_feature (1)..(126): n = a or c or g or t
cactaccagcnnnnnaccctcacctttgccctcagggctgatgaccccctgctcaggctcctgcaggaggcccagaagagctgagtccacccaggggctgtcaggagaagaacgcccaggtgtggc

SEQ ID NO: 2106 - DNA, 618 bp, Canis familiaris
  misc_feature (1)..(618): n = a or c or g or t
aggcagnagggagngaataaaggaatcnanannnnnnnnnannagcgctnngtggctgttnntgcannnnnnagtcatcagcgagagnnncagaagtactctaccagtgatggtgtgggcaaaagagggactgatggttatggattgccaagtganaagctggaagatttgaagactcaagagctggataaccagaacttcagcagcaaagtagtccaaagggggcgagagttcttcgatagcaatgggaacttcttgtacagaatttgagctggagcttggcttgtggagatgccaagtgaaatacctttgggagaatatatttggagctgcctggacttctgtgtgtggaatatccactttgggataggaggaaatgagcctggaatgtgggagaaaagagctgctcagattggaatctgacagagggcagtgcacagggcaaatgtgtatggtagggcagggctaatgacctgctgggtagattctagacctgctgggtagattctagtgttctggagnnntgctcatggtctgactcacatggatccntagtattcaccnntgcttgggctctctgtatgttgaaactgtatnnnnaancngcccatgttgcat

SEQ ID NO: 2107 - DNA, 600 bp, Canis familiaris
  misc_feature (1)..(600): n = a or c or g or t
agaattaagataaacgtattcatgtnnnncacacaaacgcagaatttgtatnnccatatgacttcatagntgtgatctcaaagagggaatttctcctttatctttcttgcagttaatgtaagaacactctgaatctctaagcttctgaagtgttagaggtgttagaggtatagatggtttagtaaagatgtagtttgtaatgttttatccatttagcatgtgtttatttttccttatgtactcagaggtgacttatttgttcagctcagtgatattatacagctaagtatatcattcattagcaaaaggagaagcaatctcaatctaacatcagaaatgtttatttaatattgagttgaatatttgactctaacacttttctacatacaaaacacaagtatcttgagggttcttcaaaattgcattgtagaggaattcagtatgtcataaatacttaaagatttgacactagactgtagtatccatatgttggttaattttcttatgagccccatgatggaaagacttaaagatgaatttgagaaaaactgaaaattagattatcaggttctgttaaattgttacatgtatcttgcttaa

SEQ ID NO: 2108 - DNA, 596 bp, Canis familiaris
  misc_feature (1)..(596): n = a or c or g or t
gatgacttccgaatcggggtcgttttgctggtgaaaagcctctgtcctcaccagaagtttgattggacattgacaaaaataaatttttccagtatttagagctgctgtagctgttccttaacacaaaataggatgaatcagtagtgtgttagctgtctttcaggttggtggcagtcagttagaacatgtgtaaaattctctacctggtctgtagctgtaactgtgatgtacaggcaaagcaaaaatttaaaacttatgaaaacaaataatgcaatgatattaggatatacacttttgtatttttattcttatataaggttatttgccggctgttgttggcctctagttcagtctgtgttatttaaaatctaatatatgaattatttggattgaattcatgtttggggccacgttgttgtatgtattgatgtacagccttgaatgtgaataattattgtaaactatattttacaactttttttctggctttattatataaattttctattcggtcaatgatttaatcctataatttaatgaatctgttttcttctctttttttcaaatatttgtgnnnnngatgtagttcctggatg

SEQ ID NO: 2109 - DNA, 411 bp, Canis familiaris
  misc_feature (1)..(411): n = a or c or g or t
gtcagcactgggtcctcatacaccagccttgtgaacaaccagtgggtcccagaagtaaggaaagctaacacttcaactgtgtgctatgagtcaggtactgttctaagtactttcaggaagtactaagtaacacgtatcaaccactttcatcttcctaacaaggctatgagttaggtactatttttacacccatttgacagaaggggaaactgatacatcaaggttatgtatttgacttggtcgtgtatttaggaagggggagagcaggaactgnagaccagttaccacagggactaccctggattatctggaagctgnnnncaaggaagtactaaacccnnnngcttttcaggctcacacttaaccannnnnnnngagctgttctggtgcccagctgtgtnnnnnnccaaa

SEQ ID NO: 2110 - DNA, 531 bp, Canis familiaris
  misc_feature (1)..(531): n = a or c or g or t
atgggtatgacacagagcgatgctttgantgtcctcacngagacaaagnncatccttgctatacctttgnnnnntngacatctanagtcatcaaagataccatgttctgtgaagtaataacattgtcnnngctgcaacatctctctgngnaggttgttcgagtgatgcttgattacgttgatcaagttcaaatctgttcaaagttgaaagctgtgctccaaaaaacaggggctgtggtcagaaatccattttatcttgacaaaccctcgacccctcagacatctgtgtcgcctgaagatccggcggtgtatggggcgcttacgtctgcgctgcccggtcttcatgtccttccttccattaccaaaccgtctcaaagcatatgtcctttacaaagaatacgacctttatggacaaggaattttcacaggaacctggtagtcaaaccattctggatgaagaggacaacaaactgcccctcactactggcttggttcggtctactggaagcnnnctatcaagcgnnnnnnnnnt

SEQ ID NO: 2111 - DNA, 557 bp, Canis familiaris
  misc_feature (1)..(557): n = a or c or g or t
atgaaatcgtactgaagtttttatcagctgagagtccttcaaattctggtcccannnnctccaagtgccttttttacagtgacaacaacagtncctcacctttcttcttctcctcctcctcctcctcttcctcctcctcctcttcttcttcttcttcttctttttctttctcaactcctttaattgaactgcctggattttataaagttattaaatgataccccttttctttaaactgcatgctgccaagtgcccgtttgtgctccgaattctcatttcaccgcagtgttctctctagttcccatgtgtggtgtggattctgttgagctaagatagactagaggacactttagagattcccccttccttcctccatcccttcggccactagccaccattatggtttcattggctgtttgtatatacggttatgtattaactcgggaatcctatgggctgatcttgctcaccagacgtggagtatggactgagcaagtgaatgtgactattacagaaatcgtatgtnnnntccaaaagtgccagannnnctcttctgt

SEQ ID NO: 2112 - DNA, 465 bp, Canis familiaris
  misc_feature (1)..(465): n = a or c or g or t
agagncaaggggacttgatnnatataaagttgcttnnngcgatggaatttatagacagatcatgttgttccgaaagatgtgaataggatccacgatagcacgttgattcagaattatgtagatatttagataagcgagtgttgatcatttgatttcttagactgaggttttaattgaatttcactatgtctcccgggagaacacaggtcatcgggactaggaaattagccattttggattctgcttgccacaaacagacctattctaaacagtgctattgaattttagactgttcaaatattttattttctcctacaactactttttattataatgaacaattaagaccatttaaaacacgggagtacaagtatttttttgaattaaattaacttgcgaaaaccaaatttgcagtggttgggttgttnnnnnncagactttggtatnnnnntaaaaccaagataa

SEQ ID NO: 2113 - DNA, 456 bp, Canis familiaris
  misc_feature (1)..(456): n = a or c or g or t
ccatactcactggtggtnntgcccaccccccctggcacaaccctaaccctgctgatgttccccaacccaatccttcaggctctcctggcccctgccactgtgagctggtgctcagtggggactcttggagttcaggtcagcctcagggctggcaccctggccccttcttcacccctttctagggggagcctacagctaggacctggggattgcacactccaggccccaggctaattcccctctgctctgtgttggggctacttagggctgccctaggctttttctctgtcttccactctattccagctttgtttccagcaagtgccttgacagtcactgggctccatgtgacttctgactctggcccccctcccacagccccttcttgggctgtagtctggggctgggaccctgtttggtttctgttttggctgaggacaggggaggggtaaaagt

SEQ ID NO: 2114 - DNA, 510 bp, Canis familiaris
  misc_feature (1)..(510): n = a or c or g or t
tctctctctctctttctctcactctctcactcagtgtctctctcactctgcttctctcactctgtctctctctctggctggntctttcttgagggcanggaccaggttttggggcagagggcgtggtatggctgggcctccccacagcacgtgtcacccgccccttctcgttgacacagagcagctgcactcgcccttccgcctgcaggaggggaaggtgggcctcgtcgggaacgagctctgtaacgtcctatacagacaaagacttagcaagagcgcggcctactctgtgcaggacgagatgctgtgcgccggggacttctcgacagggaaggccatctgccagcagcccatgactagagtagtcccagtgaaggtgtgcagagacccggctctggcaggtgtttgcagacctcgcaccacagacgggacggacccctaccaactccgggctctctccacctttgctcatttcgctgtgcaggcatcgtggtatcttacagcagccta

SEQ ID NO: 2115 - DNA, 172 bp, Canis familiaris
ccctcaggtcatgttggccccccttatttccattgctctgaaggtgtcccaactccaagagaagacaggacgcactgcacccaccgttatcacctaagaagacaggccagatgcggtgatccagcaaaatgcaatttctggtgccttctctctgatctgttctttcctcaga

SEQ ID NO: 2116 - DNA, 540 bp, Canis familiaris
  misc_feature (1)..(540): n = a or c or g or t
ccccccccccccgccccgtcactcatcctcacactgggctgagaagcatccttngtgggccctgccctccctctcagaagccggacttcattcntagccacccggcggtggctggttatagcacttccacggctcatgtcagataggaagtgattgaagcagggggcagagagggagcccgtcttctttctaagcagaaaagcagaaaaaagccaagacaaacaccttgttgaccagagagaagtaaactccagaagggaaccaagaatcctcccttccctggtgagtatttccattattccgttaaggtttaatatgcattcaaattacttttactaaatagtacaccataaagcttttgttatatattaaatgtaaactgaaaggaatgtaaacatatgtattgttaattataaatagagataagaaatgacaccatagatgaaaaagtcttattccaatgtatcccattcgtcttacatcgccctattgtcgcatggtagactagttttttttgtnnnngaatatgtgaataacttg

SEQ ID NO: 2117 - DNA, 691 bp, Canis familiaris
  misc_feature (1)..(691): n = a or c or g or t
ggaccgacatngaacagttttatccacattctcatgtactcctactacggnctctctgtgtttccgtctatgcacaagtatctgtggtggaagaaatatctcacacaggctcagctggtgcagnncgtgctcaccatcacacatannatgagngnggtnntcnagcnntgtggcttcccnnngggctgnctgatcttccagtcntnnnacatgctcacattagtcatcctcttcctgaacttttatgcgcagacataccngaaaaagccagtgaaggaaaatatggaagagccacctgcagggaaagaagttaagaatggtttttccaaagcctacgtcaccgcagccaacggggtaataaacaagaaagcacnnnnnncgccgaataacagaccaagcacatatgacagcctaacagattcgcttgttttaaagcaaagactgaattgaaagttatattatgttttagcataaactaatttcttttgagtttataaatcnnnnntacccggnnngtattaatatattgccattaggttaatctgttacctgaatgcttccatgagcacaccgcgtcacctcagaactggtgcagcttctctcctcctccccacaagccgagcccctcgccagaaactgtcttcataacgccttatgcacatacaaagccaggagacatggagccttgttt

SEQ ID NO: 2118 - DNA, 570 bp, Canis familiaris
caaatattgtacatggtctttcagtcttggaaatctgtcttataattgcaatgaaacatttaaatgacatctatgaagaggaaccctttaattttcaaatggtctataacgaatttcagaagtttgttcaaaggaaggcccattctgtttataattttgaaaaacctgttgtcatgaaggcttttgaacacttacaacaattagaattaataaagcccatggaaaggacttcggtaaatacacagagagagtaccagctgatgaaactccttttggataatactcaaattatgaatgctttgcagaaataccccaactgtcctacagatgttaggcagtgggcaacatcctcactaagctggttatgaatataaccagtggcttcagttatgaagtttcaggcatacttttctaaggaactcaaagctattgtcctttaacaagatatgttactacattttcttatatttataaacctgtatttttgtatttatggggactgttacacatgtagtatctgggctttgtcttgcctttgagtcatgggcagttaccattccagtgagttag

SEQ ID NO: 2119 - DNA, 593 bp, Canis familiaris
  misc_feature (1)..(593): n = a or c or g or t
agtcacactgacccagtgctcagaaaagctnnnnnagctgatttngcacgagtacaagatcttcaacgcggaggtgctgttccgagaagactgctccccggacgaattcatcgatgtgattgtaggcaaccgcgtgtacatgccttgcttatatgtttataacaaaatcgaccagatctcaatggaagaagtggatcgcctggcccggaagcccaacagcgtggtcatcagctgcggcatgaagctgaacctggactacttgcttgagatgctttgggagtacttggccctgacctgcatctacactaagaagagaggacagaggccagacttcacagatgccatcatcctccggaagggggcctccgtggagcatgtgtgccaccgcatccaccggtcgctcgccagccagttcaagtacgcgctggtgtggggcaccagcaccaagtacagcccgcagcgggtgggcctgacccacaccatggaacatgaggatgtcatccagattgtcaagaagtagtgcctcctgctgggccccctgcctgcccaccctgtgtccccaggagtcggacccagccagacacaccaaagcc

SEQ ID NO: 2120 - DNA, 317 bp, Canis familiaris
  misc_feature (1)..(317): n = a or c or g or t
aaaataatgttgtnncctgatnnnnnnnnccnnnnncacgatgagnnnnnnatttannnnnngnnnnnnnaaaccattnnnactcaggtatgagnannnnatagnntattttgtagtcntnnnaaagaccnnnnnnnnntttnnnnnnattgaaaaatacttcatgatataattctaagaaagagaattcaaantgttagcattgttatgtctgtnnncaatnnnaatttatatgnnnnnagatgggtcnnnnnnnnnnnnnngtgannnntattnnnatgtgtgtgtgtgacaggtaagattaggagtnattttaa

SEQ ID NO: 2121 - DNA, 168 bp, Canis familiaris
  misc_feature (1)..(168): n = a or c or g or t
accaatgagacttcactttaantggcagttgggcacaaagctctgcctgtnnnnnccaaactctagcaggtcaccggggagagaagggccctannagacagagcacctggtgggagagtgacaaaagggaaggctagcagattttatttattcagaagagagagagag

SEQ ID NO: 2122 - DNA, 516 bp, Canis familiaris
  misc_feature (1)..(516): n = a or c or g or t
ttggttcgagttngtgatgctacatatgataaagctccagttgaaaaagaaggaatcnnngtnntagattnnnnatttgatgatggngcnnnnncccctaatcagatagtagacgattggctanacttgttanaaaccaaatttcgtgaagagccaggttgctgtgttgnagtgcnntgtgttgcaggattgggaagggcacctgtgctggttgcacttgctttgattgaatgtggaatgaagtatgaagacgcagttcagtttataagacannnaagaaggggagcattcaattcnnnnnnnntgctttacctggagaaataccnnnnnnnnntgcgattgcgcgtcnnngacaccaatgggcactgctgtgttcagtagaaagaagtgtnnnngaaggctggcttgattgtgcatttagggggaactcttggtacctggaaatgtgaatctggaatcttaactgtgtnnncaaagtagtgntngnttcagtactcctcnnnnnctttcttaatg

SEQ ID NO: 2123 - DNA, 466 bp, Canis familiaris
  misc_feature (1)..(466): n = a or c or g or t
atttattctaacagaagaaaaagttgctataactaatgatanctttaannnnnnnaattttattattttttttctgtgattgtgcctgttgaatattaatcatatttatgggaatgcctttgaagtaagtcttcttttcttcctgccactgaaaaagatggagctgtacggagtggtaaagggttagagcatagggaacacgcctggaattaatggtggagtccaagaatcatgtttttttctttttttttttaacttctttaaatgaccccacctgagaagaagaaatgttttacactggatctttctcatctagaacgagaagccttttggaatagaagatgtttacatgtcttgctggtcatctctatgtcttaaatactttaatattggaggattatagtgtttgggtgagtgggtttctgctagcccatggggatggctgaaannactaaatccgtccttg

SEQ ID NO: 2124 - DNA, 578 bp, Canis familiaris
  misc_feature (1)..(578): n = a or c or g or t
aatcagctgggattctgcnggtggnnnngcagaatcagtgtttggaatgtagcatgaatgaatctctggaaattgcnntagaaagctcagaagcaaattgtaaaataatggcacaatgcgaggaagaaattaataatttttgcagttgcaaagcaggttgtcagttccccacttatgaagataatccagtttcttcgggacagctggaagagtttcccgttttgaacactgatgttcagggaatgaataggagtcaagagaagcagacctggtgggaaaaagccttgtactctcctctctttcctacgccagagtgtgaaggtgtcttctgtttatgaagcgaggtgtgcaggagaaagagatgccggagcaaaatccaacggcttccacaggaagatctactccagcaccagctccggctcagagggctccggctcagagggcggaggcgagtgggcggacccgggcgaagaggagctcttttctcgaactcatctctaatcctgcagagtagtacaaattattttttgagagcgatatgtgatggcannnnnnccttttgtgaggcctgttaatct

SEQ ID NO: 2125 - DNA, 578 bp, Canis familiaris
  misc_feature (1)..(578): n = a or c or g or t
cacaagtgggacntnnannacatcgtgctcatnnnngacttcaacgccggctgcagctacgtggctgnctcccagtggtcctctatccgcctgcgcacaaacccggccttccagtggctgattcccgacanngcnnacaccacgtccacatccacgcactgtgcctatgagaggatcgtggtggcaggaagtcagctgcagcacgccgttgtgcctgaatcagccgcccccttcaacttccaggtggcctacggcctcagcagccagctggcccaggccatcagtgaccactaccccgtggaggtgacgctcaagagggcctgaggggaatggggctggcgccccctagagcctccctgtccacagtcaagcattgtggatgaggttttcctgagcaccctctccccgtggtcccctgaaatgtcaccacaactcaactcagcaactcaactcaactcgagtttgtggaaggagggatggagactggtcacctccacttccagtgtgaacacggggtgggggtgtggcaagggcacgccctccgtaccttctcgggccagacaaaagtttaacatgga

SEQ ID NO: 2126 - DNA, 615 bp, Canis familiaris
  misc_feature (1)..(615): n = a or c or g or t
tcccaccaagcacnngcagcctgacagtcntctacacaagtactttttcttttttatgnnggtataatgcacatcgagtgaactaatcgcnagtgaannancttatgatctatggatgcatatatacctgtccgtnnccacanntagatcaagacgcaaaacattttccccaccctaggtttggcctgttctttcactntacacaaacaaaacccaaaaccgtacagtctgtattgctttctggctgtcttctttcaacacaaatgcttgtgaaattcatccgtgttgtacatctatttagttcatttgtttcctcactgagtagtactccactgtgtgactgtatctctatttatccattctcttgcttcttcagattcctctcatggcattaggatagtagaaggttcgaggaaagtagcacctggaggcctagccgcagcctgggctgcagtttcctgaggcctcaggaggactcactcctggtctagaatctgaccattagccctggagcccgagcagcctgtactgtgagattacgtagagcgacctggcgcagccacagcctcaggacttggttcaagagtcagcacccattcatttatttatagtaca

SEQ ID NO: 2127 - DNA, 629 bp, Canis familiaris
  misc_feature (1)..(629): n = a or c or g or t
gtgacccacgtgatgtgnaccggtannaacaggctcctcatttttccaatttggaattgacctttggcttctgatgtttgcccccaccattcccaccgaggcagaaaggccttacatggttccacgggcctagatcccagggggttattcttgttcatcggattgttggtacccgcatctatccctttttcagtatcagtcccaatttttgccagttcagccaactccagactttgggtcagcacccagaatgtttaaaaactccctggatgtgtgggccgcgtgctgctggaagctgaccgtggatgcaagcaggtgctccatccgggactcgggaacgtgcattctgtttgtctgtgaccccggggtgggcagggccgtcctcactaccccaccccactctgcttctcttcattgatagaaagtctgtatccacaggagctaggggagcagaatcggtgggagaaaaattataggtaacttcagtgtttcctgcaaagccccctcttaccaaaacaaaagctgtgtnnnaaaggtggcctgagggccccggctctgccatttgttcttccaacgttgacgatgttcattatttatacatgtgtgtttggggagttaagaactaacta

SEQ ID NO: 2128 - DNA, 658 bp, Canis familiaris
  misc_feature (1)..(658): n = a or c or g or t
aaagaaccngagccatcatggcacgggggtgaggcttggggacatggctannntgggttttaatcctttcnncgacatccnatagtccccagagcctgtgccatgcccagcagaggacaggtagnntcctgaaaccaactcacccaaacgctgtctgcctgcactgttcctggcaccacctggagggccacggtcacccacagttctggctgcccatgacctgcatcatggtctgcggggtagcctctgtccacttgcatactcaggtgtcctccctgcagtgtttctgttttccttctagccaaccattttgcctgttttcctgttcaaaatgtatgtgatagtttttgtgaagctgaaacccctgggtcctggagggaaattggcccacagtggagagggaccgtctgacctctgatagtccctgcttctcctgacactagcttcacagaatagccagctcctgtaccccagcccagagtcctgtcctgtaccccaggacaaggtgggccaaggggctgtctggaccaaaggtggaaggggccctaggtggctgctctggcccaggcatgagtacctcggtgttccctgtccctctcttagtatctcaccagctctgtcttagctttgtacctgttgacgtgtttctgagnnnnna

SEQ ID NO: 2129 - DNA, 633 bp, Canis familiaris
  misc_feature (1)..(633): n = a or c or g or t
cangacanntcaatatgatcntggtnngtccatacttcnnnctnngttttctcnnngtccccattgtgtgnctgattctaaatttaatatggaaatcgattaaaaatacntgcaacagaacattactagaggaggttcgggagatggaaagtaacagagttcaagaacttaatcctacaatgtttaaaatgagggtnnaggcaaaaaatgtccaaatgtccctagccagccaaccacacaagattgtcttccggcatgaatctgttgaccaaagcaccccatatgggtacgcattttctcaagtagaacaagctgtgattactcaggaagaactaatctgttcttatgacactactaaaagccaaggctgtaagagcttaaataaggcctcttctggccccaactatgagtgaggtttggaccacaacatcctgtgttcttatgtccttcccccaaaccgcagaacatgccaacacccccgaacactcttttcttgtggctctggccagttatttatgtattggtttatgtatggatcacaatcccttgatataaataatgggggaagcctatttgcttttccttaatttgtcttcaatgtttcacctgacctgtttacttttctgtagttgt

SEQ ID NO: 2130 - DNA, 556 bp, Canis familiaris
  misc_feature (1)..(556): n = a or c or g or t
gggagcagaaggggaagcagaggaagagnaagctgagaaaggagannaggagccagaagaagaagaagaagcagaagcagaagannnnnaggccttttcatgcttcatttctcccctcttccagaaaactcaagccatgaagcagtatttnnnnngtctccccnnnnaccaaactcaacaaaatgctttggcgtgaagctagcacccctctctcggtacacccggggttccccaaggaattgtacctacctgacatggttagatgtacgcgggtatgtctatctaatcttagcaacgtgagagtccatgtgaagacaactcctccataccttcatgtgcctgacatctttggcttttgcttaatttttttttttttgctctgcatgaatagatcttcttactaataccctgaaaagaaatgattttgaaacatgatttccaaatatagaacttctctttgtgatgtaataaaagcatttcttcgtatgtgccttatgccacctgtctcagaatgagctgaaaataaagagctttgaaaataaagagctttccagag

SEQ ID NO: 2131 - DNA, 567 bp, Canis familiaris
  misc_feature (1)..(567): n = a or c or g or t
cggccaagtgcttctgcagccgctgccgctgagcccgtgtatcttcctngaaacagaaggcagggcaaacgggaaggtgtagaggcctgctaggcacctgaggccctgcctcctccagggagctgcctgacaaagtgccaccacatggtcacacccacccttcaacccctcccaccaaggggcccagtccccctctcctgacccaccggtctgggagctccccaaggacagggtcccctcctcacagccatgcttctctccacccactcgctccccacactggaggtggctgaggcaagggagagaagcagcaatcagcaaccccccaaatcagagggccacactgaaaggctacatggggatggaacagaaatggagagtcagaggtgctgggcaaaggagtaatggaagcagagttaaatcaagatgggggatgggaaacggagtttcgagacaactagggaaatatgactatgaactcagtgacagtattaagagatcactgctaatggtagtaggtatgaaaatgacccacgggttaccttaaaaagtcaatacccnnnnnnn

SEQ ID NO: 2132 - DNA, 402 bp, Canis familiaris
  misc_feature (1)..(402): n = a or c or g or t
tactgnnaatccccttatcagccccctaatgagctgtgacacggactggcagnnagaggagannnnnctggggctcaaggacatgcagttacataccaaatgacttaggcaatcagccagggatcttaaaatgcaccccaggtcgcctttcaagcccaaaagctgctgctttgatctcatcaagacttggctatgtagtattaattaattaattactgaaaccattatttccataaatctgtattggacaccttctgctattccagatactgaagatactttggggggacaaaataaacagacactgcccccatgaatcttaccagagagagacagatgttaatgaaggatcatgttaatagataatttccgggatgcctgagtggctcagtggttgagtgt

SEQ ID NO: 2133 - DNA, 508 bp, Canis familiaris
  misc_feature (1)..(508): n = a or c or g or t
attcagagatcanntcactgnnnctcattngnnnnacccagacgcactgtcaccntgcancagctttgnnnntcagcactnnctttctccngtctccgcgtccccttcaccctcaaaaacctgactgaggagacattctnnagggttccggtcccactgtgtgtcccctggcgctcccgcccacnnagagnnaggnaccaatcctcaacggnancttggtggcctccccctgccgtgactgcccccaggccgggaaccatcagggaagggagctgccgtccaattcccacggacaagtggcatgagaacaggaaaggggacttccgtacagggtgatccagaagtatgacgaagcggtggtcagcctgccacccgcaggcccaccaggcacctggtgaagaggacgcctcgcgcatgtgccgcgcggggaacatgcagttgacacttgaaatattccctgagggagtggctgtcgggggagggggagaaggagaaaggaagcttaccg

SEQ ID NO: 2134 - DNA, 475 bp, Canis familiaris
  misc_feature (1)..(475): n = a or c or g or t
tgctntggnngttgctgccaagccacagactcccanngtnnannctcnancatgaggtttgaatgaaagggcaaatnnttatgtccagtcacattgcacttcttaaatgggacccgctgctctgtcaacaatgtatagagtcccataccatctgagaaaaagatagctgctagctcatgtacttcgatgtgcacggcctcaagtcttcatccataaggtgctgatagaaactaaaagcggagacttcgcatcaatattgcaaacccagacgccctacgcggagaatcaccttccttaatgatactcaggctggatcccacaaatcaagaccctgacctgatgctgtgtggtgggacttggccatgaggggttttctaaatctctccatgattgagtgatgtgcaatcaaatatgaagcctacngncgtgcagcagtgtgaccaccctctcttccctgnnnacctctcatagcagt

SEQ ID NO: 2135 - DNA, 63 bp, Canis familiaris
  misc_feature (1)..(63): n = a or c or g or t
ggttttattcattcttgaatttttcctttctaaagagctcttctatttatacatacnnnnatt

SEQ ID NO: 2136 - DNA, 587 bp, Canis familiaris
  misc_feature (1)..(587): n = a or c or g or t
ttgactgtgtgaagagagcctggcaccaaggaaggnngagcatgttgctattctgtgcccatgtagggcagggtgggaggcccctgagggactttctgagctcttactcttgtagcttgcaaagccctgctcatttgcagggcactgtgatggcgctccatccacagaggccctcccagagggttggggaggcacaggtgggaacggggccttcacagccccagagtgacagtccctccccagagccaggaggcaatagacagcagagctcatgcatatgcagtcaaagtacttattggacacctgccatgtgctaggtctagctctctgtctgggggtagtgaggaatctcacaggctgtgggattgcctggggggcatctgggagggcctggagctggagcggctgccaagagggtcagcaacccaccccagtggcctacacagggttgcccaccggccctgggcccatacgctgccatctctgcctcccatctctttgtcctggtccctcccaccatccaacctcaaggataccaccccgctgcccttcccgcaccctgtgccatctactgcccctttgctgct

SEQ ID NO: 2137 - DNA, 308 bp, Canis familiaris
  misc_feature (1)..(308): n = a or c or g or t
caccancatctttnnnaccacnnntccttttcangaaaaangaaaaaaannnntnnnnncagcaaaatgcagtnnnntgacattccaagaaaccccagaangaggaatgcagaaagtnanatgtgctgggccccttccaggggccactccggggaggcgggggatcgcagggctnnnnnccggccccccaacactgacattttnnnacaatgttcttaggtccggtttgtgttgctttctgtctccacaacaattaccannatttattttttattgctctggttaactgtgccaggacnncacttcct

SEQ ID NO: 2138 - DNA, 495 bp, Canis familiaris
caagacccgagtggtgcaggagcacggcgggcgggcagtgatcatctctgacaatgcggttgacaatgacagcttctacgtggagatgatccaggacagtacccagcgcacagctgacatccctgctctcttcctgctcggccgagatggtgcagtcaggccatcctcagattgccacgttgttaccccctctgtagcaggttggaagggggaagcctcagatggacagctggtcaatgaaggcgtccagctgctctcggtcctgaggcttcagttccagagcatcacaggcatggacccactggctcagggagctgggggtcccaggcatccatggttggagaagaggaggcccagctcacaggactctccacctccagcaaacaaagaaatgtatatgaaagtgataccattttccacatatcacttggcaaagttaactgggagagaaaacactctgctgaagggaacaaaaggatgtgtgcacagaaattg

SEQ ID NO: 2139 - DNA, 639 bp, Canis familiaris
  misc_feature (1)..(639): n = a or c or g or t
cattttaatcagtgcttcnantntatatctctttgttgctctntagtctnncacantctttatttacnnannntatactcaagggggatccctgggtgctgggtggcgcagcggtnnagcgnntgnntttggcccagggcgcgatcctnnagacccgggatcgaatcccacgtcgggctcccggtgcatggagnctgcttctccctctgcctgtgtctctgcctctctctctctctccccctgtgtgactatcataaataaataaaaattttaaaaaatacatactcaagggatcccacaggaaaccaacaggaatgatgtatttttcacttgttggtcagagtcacttgataaaatgagaactgagtatttatttactttgcaaattcagagttggtccagatatgtcacagaattcatttttcatttatttctatattaatttatggttgcaaaaaggcactgtatattcctgattgaattcaataaaagactttaagattattggatgtaatttaattagaattgttagatactaaaatatctagtactgttagtgattaacttgaatttaattcctgaattacaattttaaagtttnnnttatctttgaaagatcagactttgacttcaaatagt

SEQ ID NO: 2140 - DNA, 294 bp, Canis familiaris
  misc_feature (1)..(294): n = a or c or g or t
ggtcatnnnntatnnnnnnncatttgtgcttgtacttgtgctnnnnnggccacccannngatgnnnnggggnnngcatnnntgctnnnnnaccccttggagggaccccggcctccctgggggcagtgtgggcactctggcttnnnnngggctgnnnggggtctcaccagcaggagtgnnngcgggcaggccagtcatccnngcacctcagnnccgagcccnnnnngccctggtctncatgtgctttnnntccctcagcctgcaagggtcngnnnngccatnnnnacnnngancn

SEQ ID NO: 2141 - DNA, 642 bp, Canis familiaris
  misc_feature (1)..(642): n = a or c or g or t
ccctgcacgcccccgtcttttgannaggccaccannnnntccatcgctacaaccctgtcctccacgtctctctccatcccggagcgatctccctcggagtcatcagagcagnngcggtaccggaggcgcacacagtcttcaggacccgatggccggccccaggaggagacacatgcagaggaggacctgcagcagatcacggtgcaggtggagcccgcgtgcagcgtggagatcgtggtccccacggaagaggacgcgggggtggaggcttctccagctcatgcctgtgcggctgccgaagcagaaaccaccagccaggcctcggagcccgccagccaggcctcggatgaggaggatgcacccgccacagacatctactttcccaccgatgagaggagctgggtgtactccccgcttcactatagcgcgcacgcccacccagcctccgacggcgagagcgacacctaattcctatgcagtcaccgacccggagccgagcgcccgccgccgccccggctgctccccggaggcccgcccgcaggacctggctgcacgccggccgccgccgccgctcccgtcaactacctatgcctgtgagactgtgaacctccctgagtgtccgatcatgtatttattttgggt

SEQ ID NO: 2142 - DNA, 235 bp, Canis familiaris
  misc_feature (1)..(235): n = a or c or g or t
ggtgttcgggacattcgggattccatttttgctcaggatnnnnnngggcgaacatttcagagaagtcatgaaacggattcagagtctgctagacatccaggaaaaggagtttgagaagtttaaatttgccattgtgatgatgggccgacaccagtacataaatgaggatgagtatgaagtgaacttgaaagactttgagccccaacctggtaacatgtctcatccnnngccttgg

SEQ ID NO: 2143 - DNA, 596 bp, Canis familiaris
  misc_feature (1)..(596): n = a or c or g or t
gcaagaannggntgctggtgctacannnnnncagctgtgacattttctctggttctaccttattttttaaaatcattacacttctcagctaccntaatccaatctttataaaagaggcagtctcgagaactaagactgctcagccttatcctggagtggagtatctagccagggnctcagttttcccagaggggtagaccgtatggtaaggtaaggaaatgggtgggacgtaggtgtgcctccacaatgggaggtagggttcttctagctcgtgtgacacaaggagtaaaatctggtactccccctcttccctctggatcgcccaactgtggccatggcccagtcttctttgttgtcactctgttagtattgatcgttcctcctgtgtccatggcagggtcaccagccagtgcagattgggttggcatcattctgattcgctgcaggggctagaatgtgtgtggcacatgtgtggctgtcattctttctgcatccccctgctccctttggtttatctgttgtgtcttctaccctgcctttcttttcagttccaactctgctctgtcctatagctttattaaaacgggagtgtgtgg

SEQ ID NO: 2144 - DNA, 505 bp, Canis familiaris
  misc_feature (1)..(505): n = a or c or g or t
ttttagtgttcaggtagtgttcaggtagcactctactacanngnnnttttcactgtgcttaagatcatcagtttttaggtgaacataacatgnnntnnnaatgaaaggggcttttaattttctcaatatcttttttgcattaaaatacacagtatttcaaacattgaaaaatgnnnctgtttggaggaaaatgataggaaaggtctttagaattaagtgtccaaaaatgttatggaatttgatacctttttaaaaaactattattcagtttggcccatctgtnntactggaggggtggaatagggatgcagatgagtttcacatgcaaaacactttaaaatccaaaatactaccnnnnatacatgttaaagtctacttgtagacttaaattanncgagttactcagttcatatacttgtnnaattgtgattgaatactgactccanatgtctatccagtagggctttgtnnctgatttaattgtgtggcnnncnnntttacttgt

SEQ ID NO: 2145 - DNA, 571 bp, Canis familiaris
  misc_feature (1)..(571): n = a or c or g or t
agcttgtggggatgatgccatccgtgtgtnngagnannatcccagctcagatccacagcagcccaccttctccctgacagcccacttgcctcaggcccattcccaggatgtcaactgtgtggcctggaaccccaaggagcaggggctcctggcctcctgcagtgatgacggggaggtggccttctggaagtatcagcgaccagaaggcatctgagccacttgactttggacagaattatgattccccagaaaatgtcataagactttcccagccccaagaggacctggaggagcatccatgacctttgtttaacctggctctcttccattcagacttgggtagaagtgcagagccacagaaccactcactcttcccctcctttgacatggggcccatggtaaagagctatggaacatcagtgtgttgtggttacaccacagattttgctttcttgagagcagtgnnnattttgcaggggtggtggtgaatatagtatnnnnnnnnnatatctttatgtacaggggatgatacatcttaagcttttcagaaattggaagctttatagaaata

SEQ ID NO: 2146 - DNA, 625 bp, Canis familiaris
  misc_feature (1)..(625): n = a or c or g or t
gtttatatagaataacagaaactaatctgtacctttatatatatatgtacatatatacatgtataaactgtatagtgtacatggtaacgatctattgatacgtcccacaccgtcacgcggttctcagcctccgcatgccctcactttgcggtcgggtaacttgaatgtgccctgacgattctgctcacctccgtgtttggacgtttagggaaggagggttttggtcgtaccctccttatcctcacgcacagaaatgctcagggtccccatgtgcctgctgttcacccctctcttgcgtctcattccctttctgagcatgtggcccttcccggtcctgtaacctctctgccccctccccaggctgggggcagctgccttcctcctaacgtgtaaagcagtattaacatcattactgcatgtgcgctaaaaacccaagtcttctgttccttgggacagaacgttgcatgtggggtggatgatcaagtttctgtgacccatgtcagttacacagcaaagccagaccccatagcaaaatcccacaaaatggaaatcaaacttaaatttctttattagcattgtgtaaataaatctggatgtgtttannnttgtactggtaattttctgt

SEQ ID NO: 2147 - DNA, 589 bp, Canis familiaris
  misc_feature (1)..(589): n = a or c or g or t
ccnnncctctacccctggatgttgatgaattggggctgccaccactgcccccaccagactttgggnntgaagagcctagctgggtccctgctgcatacttggagaaagtggtgacattgtacccatacacccgccagaaagacaacgagctctccttctccaagggcaccgtcatctgcatcacacgccgctactcagatggctggtgtgagggcgtcagctcagacgggactggattcttcccagggaactatgtggagcccagctgctgacagctgagggctctctgggctcccgatccggcaccccttgagctccagtacaaagccagccccacagtcaaggctagactagggctgcccacttcttggtctgcgagctgtgcctacccttcccctccttttggtgggaaggggtcccggggagagacagaatggacccaaaggcccgctgcagacaggaaagaactggaagccagagtttgatgatcttgtccacagaggacaccctactccacgcaggatggggtctccagctgcaagtaccaactttgaataaaactctgatgacctcctggtgattgccctgc

SEQ ID NO: 2148 - DNA, 665 bp, Canis familiaris
  misc_feature (1)..(665): n = a or c or g or t
cccggagacagnnnctgagctgccagggattctgatgcacccccttcagagaatatgctctctttctcctcacctcctgaatatcactcttacagaatgctgaagtgtagctgaggaacagaagaccacttcctcagtgaaccagtttgttaactttgattttttcctgatggtgtgagtacatccattgctggcagtggagggcttgccatgaaaatgcaactatttaagaccttcaggagaaatattagatgtaatactcctttcagaagaagggaatattagggtggaacgcattatattggcaaggaagctattaagataagtgatccactttgtacaactgtcttgcagcctactggttgcttatttttatcctttggttcaagttctgccttttggagaaataccgaacaagtcttgcagtttttgtgtgatgccctctgaatatttggaggtgttgattgtatcttcaggttaaaagcccccctgcttcatttattctgcatttgttnnnnnaatatttaattgaatcagctgtttcatctgagatagtttctagaaatttcactctcctggtgtttctgtggatacattctagtttgccattttttcaannnacaaatgtcctactnnnnnngaaatgacatatatagtggtgattg

SEQ ID NO: 2149 - DNA, 507 bp, Canis familiaris
  misc_feature (1)..(507): n = a or c or g or t
cagctgtgccttngacaaccnntcagagcctgagtgacagttttggggccttccttagaatcactcatacctgcatagtggcagccctctgccttggccttacctcccaccacagcgcaaagaacttcgggagcagcaatctctgcagtgtgttcagggtgctttattttgaacttgccttctggctctctacctcaagggcattcttcccaaaagccccccatcctcctcttttaatattaggacttaaagacctttcgttggcctcctaacccaaggccgtttggtcttgcccacgttgcctcccccagtaccttgaagagcagtattgaatgaagttctcagcacaatcttcgttgggggtggggggggtgtcactataaaggtcagaaaggcggggtaatggacctggaaagaggactcttgggcttggaagagtcgatcgtggggcgggcgccccatcgccaacccccgtagctggctgggaccggcagcggcaaggccgcg

SEQ ID NO: 2150 - DNA, 605 bp, Canis familiaris
  misc_feature (1)..(605): n = a or c or g or t
agatcgatcgtgagtcaggcaaaacagaagttnctgaaccaaagaagtggacaggaactcagtttggncagtgggatactgctggttttgaaaacgaggaacagaaattgaaatttctcaaacttatgggtggctttaaaaacatgtccccttcattcagccgcccctctaacacaattggaaggcccaacatggctctcaacaagaaggcagccgacgccctgcagcagaacctgcagcaggactatgaccgggccatgagctggaagtacaagcgtggtgctggcctcggcttctcctctgctccagacaaaatcttttatattgacaggaatgcttccaagtccatcaagtttgaagattaaagtctactactgtctagtccttcaaaacagccaaaattgcttttattattcagttatgcagttggaagccatctgacaactgtctcaaatcacacctctgcagagattaaggaaaactatgcccatgtgcttggatgaactggggtcagggagctcatgtttcagaagccaagaggacatatgagtggctgacacctcctgttttctgtattaaaattccatccctatttgaagacatca

SEQ ID NO: 2151 - DNA, 623 bp, Canis familiaris
  misc_feature (1)..(623): n = a or c or g or t
ttcagtgtcctttatgtaaaagtngtactctaatgagatnctagtattgaaaatccccagttggnnagcttggctggctcagtcagtnnagcatgcgactcagttgtgagttcgagccctatgttgggtgcagagattattttaaaaataaattttaaaaaaagattcagttattaacaagctactgatctgccaatactcgtcctgtttttagtctgaggaaaaaatagttgccttttctcaattgctcatcagcttctaatagcactgatataacttagtcaaaattgatatctttatcttttttggtgtcaaataaatgataaatttgtctcatttattaaaatggtaggtgctgcttaatagaagctcctgcaacatgaggaaaatagatatgtgatatgtttttagaaaagccagctaacctatctttaaggattataattacatttgaaaataaatatatcactgctctttggaattaagtaatttctttgtgtactgtggagggaaaagagctacatatattctaaattatagtatatttaacttgatgtctctaaattctttacagatcctagcatgctacttattctcatcttgtatatatagaaaatataagt

SEQ ID NO: 2152 - DNA, 170 bp, Canis familiaris
  misc_feature (1)..(170): n = a or c or g or t
tgaacaaaagnnatncctgtgagtgaggacacactnngnngtcnccntgaattcgtcatgcttacattcnngaacatgtatcccnnnnagagatatnnnnnntcagaannnnnnccacnnncatnnccctatatnnanttagcatagttcactcaacatacatgctgacc

SEQ ID NO: 2153 - DNA, 448 bp, Canis familiaris
  misc_feature (1)..(448): n = a or c or g or t
gcgggtgccaccggccntgcagcgcggcgggcttcgctcagcagtggctcatcaccccctctccgcccttggggtgtcccgtctgtccttggggagcccagtcacacttggggatgaagggagcgagacacaggttcgggtcatgcatgccaagtcagactttccaattttatccttttaaaatagatgcgatatacctatacatgatataatatttgtacatatgaaatctatatttgtttaatttgagccactcaaactaaaccaatgtataggtgtacaatgagaaatctaaatgcttagttattttttcccaacacagtgtaaaataaccctgccctgatggtgggatttgccaacttttggtgttaacagctttgctcacttcctggcaaggacgggtcagtacccaatttnnnacggagcccagggnnnnnaagataccttt

SEQ ID NO: 2154 - DNA, 294 bp, Canis familiaris
  misc_feature (1)..(294): n = a or c or g or t
ggctctgtaagacagaaagaatnacaggacaaagagagatcagtaaatatcctggagggttggtgcaaagagaatggaaataaaaattaaaaaaagtaatctatgtccaggattggatttagaagaacgttagtaaggattaacacactgaaaattcagagcctatatgtccaagagaaagccgccttggcggaaatggtgtcagaaacggtaaataagaaaagtcattcctctacatttgttattagtatcactacattttttattgcagattgtcctgagggaactaaatta

SEQ ID NO: 2155 - DNA, 198 bp, Canis familiaris
  misc_feature (1)..(198): n = a or c or g or t
cgnnacctggctccgcccagnnnnctanggagtgnnnnnnnngccaagcaggcactcaagnnnnngcnnnnntttcctgcattggttttgtctgcttccagtaacctgtangnnnnngttctgatggcannnnnnntcgtcctcagggccnnnnnagtagcgagggnnggccagtgcttccaggcctcggctgacgng

SEQ ID NO: 2156 - DNA, 320 bp, Canis familiaris
  misc_feature (1)..(320): n = a or c or g or t
acatcccnnatagaaccttcccatttattttaacaagcantnnnntgcatctccttcagtgcccagcacaatgctnnntattatgaggaatctttggatgcacaccttgccctctgatcgattacaatttaatttaagatacggagcagacagatccatggagaccatattttagaagcannnnnnnttgagactcagcagggacccactatagacctaaggacctgggaaggcttcataaagaaggtagatcttgaatgtggctttggagaaaagtctttctagaatataaaataccatgatttatgtttccttcactt

SEQ ID NO: 2157 - DNA, 459 bp, Canis familiaris
  misc_feature (1)..(459): n = a or c or g or t
ccttcntctgccctcccgcacttccaccccaggagtggtcactcggctggcancactctatagacttttctcctttgcgtctttgttcactgctgtgtctccccacacctaggacggtgcgcaggaggtgcttaatgaacaggtgttcgttgaatgaaggcagtaatgaattgttttcccttttttgcaaggaaaagtttgcatttcaatgaatcagttctgattattcagtgcatcatctctatacaacacacccttccgggttatctgattcatagcattgtctttgaactctcagctctggannnnnnnnngcaactgctagcaatataaaaccacttatctgtagacatgcaaattccatcccggccagcagaggtttcgttgacaaccctcctcccctatggaaaaaacaagttgcccccatctgcacgtttgtttgtgcaaacagtctgataa

SEQ ID NO: 2158 - DNA, 635 bp, Canis familiaris
  misc_feature (1)..(635): n = a or c or g or t
agttcatgttccatcttcgaagatctccatttctccaagtgtnnnncaacagccctgatgagtcgtcgtattataggcaccattttgccnggcaggatctaacccagtccctcatcatgatccagcccattctgtactcctattcgtttcatgggccaccagagccagtactgttggacagcagcagcattctagctgacagaattttgctgatggatactttcttccaaattgtcatttatcttggtgagaccatagcccagtggcgtaaagctgggtaccaagacatgcctgagtatgaaaacttcaagcacctcctgcaggcaccactggatgatgcccaagagattctgcaagcacgcttccctatgccacgttacattaacacagagcatggaggcagccaggctcgattccttttgtccaaagtgaacccatctcagacacacaataacctgtatgcctggggacaggaaacaggagcacccatcctaactgatgatgttagcctacaggtgttcatggatcatttgaagaagctggctgtctccagtgcttgttaggctggacatgtgagcagaacattgaagagcacagggggttgtgttcataattgctaataacagcttagaaac

SEQ ID NO: 2159 - DNA, 608 bp, Canis familiaris
  misc_feature (1)..(608): n = a or c or g or t
atataggttttacattnnnaaaaacccttttgctaccccatctggtttnatnnnctaagtttcttaacatnnggcataaataaaggggcttgtctggagtaatacgtattttttatgcttttgcatttcttacatgattaatattgcattcacctttggtcattttaacaaaggtttgtttttgcagatatatgtagtacctttcttaagcagtaactaaattgaatcaaccagatgatttaaatgagagaatgggcttaatggtcttccagtggaatgatttccagacttccacatgcagtggttgtgtctggaatcctagaactggtactttctgccttactgcttggaatatcacagtgaattatatccatttaaagtgaattaaaggattccttttttttaatttaccagtacaaatacaaatactgtatttgattgttaatgatgacttcaagattgataatctgatacaataactgttgaagtagttttaacttggttctgtgtaaatagcatgtattttattataattcacatttttaaacacttggtttacattaaattatggtatttaactatttttatnnnnatactaggtaaggttt

SEQ ID NO: 2160 - DNA, 602 bp, Canis familiaris
  misc_feature (1)..(602): n = a or c or g or t
gaaggcacagaaggactgctgnnagacagagctgcttcaactgaaagnncaaaatcagaagatggccacagaaaatgagaagctgnnagtccgagtggagcagctccaggcccagctttcaactcaagagaaagaaatagagaagcttgttcagggcagtcaagataagacagagcaattggagcatctgaaaaaggaaaagagccaactccttctcactttaactcaacagagggagcaccagaagaagctggagcagacggtagaggaaatgaagcaggaagaaacaactgccatgaagaaacaacaagagttaacggggcctaggaacaagaaaacagcagtggaggagcagttagtacaagaggtggagcgcctaaaagcaaaggtagaggccgggaaagcctgtttcttagagaagtacaaagagtgtcaacgactccacagacagatcaggcaactcagggctgctgcactggaagtgaagcaggaccagaagagccagcaagagccaatggggatggggagccaggagcctgcagtcactgtcatcgggtagcctctctggcgttactacttcagggtcggctagaagcgcacag

SEQ ID NO: 2161 - DNA, 659 bp, Canis familiaris
  misc_feature (1)..(659): n = a or c or g or t
gtcagtgttngacagtgagagcagcagtcactgccctggggacatgtcagagggcttctggtcagcagagggccctgctgccttccagagctggccaggctgagccctgtggtggccggccaggtgggacacgtgccttcaggtgtccgctgggaccaccttcctcaaacaagcactaggttcaaagggctgtgagctctagactctccaggcgggcgggagtgtgtgtgtgtgttctgtgtgtgttctgtgtgtgccgtgaacaagacctgtctacctcccaagaggagcactcttggctcattcttacccagggagtgggacttggggtcacctgggcccaatcctcctgctccttctgcaggagacaggctgtctgtgatccaggaaggatgcacctccaccctgtcaggaagtggggtgttgagtgggccctagaagcaggggaccggggggggggggtgctccaaaccctcccacatgtgcccgaggttcccagcgagtagagctaagcagtcctggagtcggtgaccatccctcggtgtgaggtgcttccccatgaggaacagccatcgggggcagaggggctgggccgccagggtccaccctgcccccatgggtctgcactgtctccttgggggcctcatgtacgctgtgtt

SEQ ID NO: 2162 - DNA, 529 bp, Canis familiaris
  misc_feature (1)..(529): n = a or c or g or t
aatcnnnggcacatcccagttctatnnaactagaatatctggggatggagcactaannnctgtatttttaagtatcccagatggnntttttttttttaattatggncagccaagtccatttggtacattacatttgagaaaacttgacttctggtggccagnnctgccaattgctgattatgtcgccttgcaaaatttactttggatctcggttttacttgagcaatgaaggagcttaactggataaatcaagttttcttacagtcttggaatacaattcaaatgctgacatatgtctttaaacagatgtccctgatccactaacagtgggtaataataccagcccaaatatcctacctgggtggaaagagcaatttggtctgatgtatctgagatctcattgtttgaagttgggttttcacccctgtgtttatttcctcatgcctctgtagaacccactgacaaatgtttattctagaagtggtaatgttgttttttctggtttctttagaccccaaacactctgcaa

SEQ ID NO: 2163 - DNA, 494 bp, Canis familiaris
  misc_feature (1)..(494): n = a or c or g or t
ggncagagaatnntgtgcatacagtgctnnntgctgtaacctgcccggctnngggcacaggccccgcacctgcagagccgagcccagtacagcaccaccttgccgcatcctccaggagccgatgctatccaaatgctcaaggggggaggaaaaggaagcacataccaaacaccccctgccaccctcctggcgatgccctgacctagccagcctgcctcaacacccctcaccgagacggcactccatccaacgggcgctccaggcagcctgtcccctcggggcgatggacctaaatgggtactgatgagattcgagcccaaatcctgatctcctgatcacctggaacaagcccaggacagggggagcatccacttttacagaagagaaaaacaggcctggacacccgaagcttgctgacagggcacatgagtgtctggttacaaagcgttccgtggcctgggccatctcccagctttctcctaatgacccctgag

SEQ ID NO: 2164 - DNA, 632 bp, Canis familiaris
  misc_feature (1)..(632): n = a or c or g or t
agagagacaaaggagttacaggaatnnnagaggaagagggatattcagaccctgaactgaacagggagcctgacatgatcttgggatcatgatgcgagctgcagtcagacacataacctattgagccaagaaagccactgtatcctgattcctatgctgcttcacaaggaagattattttggtcactgtgaagactcagatccttaaatcaacatccttctagtgccttttgttagccttgtattcttcccacttgaattctggctttcatgatgtgtctacagaagttacaccatggctggtggaacagaaccaaagatagcacattgtaggccatccctcgtcatggcattgatttcctacagcctcagaagctgattctgtctcatgctgggataaatcaggtctcctgaggggcgtccttcatctccaaacaactgtactctgcataaacactgtaaaaattagcctgagagcctcctccccatgaggtcatgtgactacagaccttggctctttaggcatcttgagtggtaatgtccgaagacaaaacacacatggaacattgtctaatgtatggaagtgttgaatcactatgccgtataactggaactaatacaacattgtatgtt

SEQ ID NO: 2165 - DNA, 558 bp, Canis familiaris
  misc_feature (1)..(558): n = a or c or g or t
gtgtgtnccaccagnanntgcgcgcccagagaggatgaagatggcancagnngcggatccgtgcacttccccacgngagagccgcccatcccccccacgagaacggcccccggcaagcgctgggcgctcaggcgtcgtccctggccagcaggggttgcagaaacagccccgcggtgcccagaatgcacaccaggatgaaaacccacagaaaaatgcggtcgatgaccatggcaacatacttccagtcgtcctggatctgaaaaacagaaataaacgctgtgaaagaggaaaaaataaagcacgacaggaaggcagagtgaacagggtttcggtactgagcatcggatacacacgcggcagcagagccgccctgccgccaacacgcgagaaacctcgggtcctagtggggtctgaggagcgccaccatcctcacgtttctcctcgtgcgctgcgagaaacacgtnnnactattcacggctactctgctgggatcagcgagttcccagcgcactcagctggcccaacgggtagagccacatagggcctgtggctcctgat

SEQ ID NO: 2166 - DNA, 502 bp, Canis familiaris
  misc_feature (1)..(502): n = a or c or g or t
gctcgaccagcttccaccccanggtggtcccactctccacaaatggnnnnnggggccacagccaggcggctgctccagccctgtgaccctgaccatgaggatgggggnntctggcgaccaccctttcacccttggccacatgctcacgcaaacaattaggatccttgtgcttaaaccatgtcggtaaatcttgccactgtacccctcaaatcatcaggagggacaaggactctacccccacccttgttgtcactcaggaagcctccttcctgaaatccggccttggctactccactctgggccagcagccactgtggttcccccaagcccctctgtggtccccatagcacctcaggctccctgctccctccacaagggcacatgctgatcctctgggtgcagctggccagggggcagaaggtagtgggaggctcatcctcccactcacttccgggtgggtgggtggctcattccgaccctnnngggaggacacttcctccgt

SEQ ID NO: 2167 - DNA, 491 bp, Canis familiaris
  misc_feature (1)..(491): n = a or c or g or t
tgagatgctctatggnctgcctcctttttacagnngcaatacagctgagatgtatgataacattctgaacaagccgctccagctgaagccaaatatcaccaattccgccagacacctcctggagggcctcctgcagaaagaccggacaaagaggctgggcgccaaggatgactttatggagattaagaatcatgtcttcttctccctaattaactgggatgatctcattaataagaagattactccccctttcaacccaaatgtgagtggacctagtgacctgcggcactttgaccctgagtttactgaagagccagtccccaactccattggcaggtcccccgacagcatcctcctcacagccagcgtcaaggaagcggccgaggccttcctaggcttttcctatgcacctcctatggactcttttctctgaatagtccgagggttggtcttgaaggattttatgtgtgtttttaagtgttttagttagc

SEQ ID NO: 2168 - DNA, 204 bp, Canis familiaris
caaccttcccgtgggttaaacacatagagacaggggaaatgatgaaatgctttcaaatactgccctgtgtgatcatcagaccatccatggggtgctctacccacagatctgtgtacaatggtattcaaacgaggggaaaaaaatgtaaagccacctaaagatgtaactatccaaggctgtttaaataaattaggatgcgttcag

SEQ ID NO: 2169 - DNA, 659 bp, Canis familiaris
  misc_feature (1)..(659): n = a or c or g or t
ggtactatgcagctgcttnngcagaaatcacgaatttcctgtnnaataaagatggtccaaaagtaggcagaaattaaatatatatatattttagtaatttatatagatgtcagcaattaggcaggtcaagttttcgtttcatttccactgttaaaataaagcttacatagtttcttccttgaaaagactgtgttgtcctttcacatagatttttaaacacacgggtgttgaatggaaacatctgttcttactgttcacctccaaaccaaaactcgtgtatcgccaaagccaaacccgggttcatgagcgtgtctattaccatgaaacatgtattttgagctttttgtttttatactgtattaaatatcttcagggttttaaacactaatcacaactgaatgacttgacttcaaaaaccagcaaccgtaaaaggccttcgttttattcgtattcctcattctgcagcctgatgtggaaaacagctctgtagaatcttagtgtcagtatcccagtggaagctcctttgaggggcttcctcattttggcaagcgctgtgcaaacgtcagcagggaacggatggattgaccactatgcctgaaatgacatttcaccaaaagtctccaaaacgtttctaagactactaaggccttttatgtaat

SEQ ID NO: 2170 - DNA, 577 bp, Canis familiaris
  misc_feature (1)..(577): n = a or c or g or t
ctgaaaaagttganaagacngtctcaaatcacagaaatgtaaataagccagtnnnagngattaatgttgccgaggcgttcatcaaaaaagaattaaaagaagaactaaagtgtgcagatgtggatgatgatgactgggacatatcatccttggaagaagataaatctctggggaaaaaaactgggcaagaacagaaggaacctctacctgtgaagaatgagtcaaattctactcaagtgccaaatgcctggggtgcacctaatctgaaggggccaaagggagaaggtcttcaagatgaatccagcacactgaaaagcagcctagtaactgtgacggattggagtgactcttcagatgtgtaacaaccagagcctgggagtcagaaggtcccgacactaacaggattcgtcatctgcccacaagatccgagcactcctgccttacagcatttcccccaataacaaggaagctgactcaaagaaccagggtctcttgaacagcacctaattcagtcctgaaaaacaaaaactttccacagtattttgaagcatagagagtcatttaagacttctgctgc

SEQ ID NO: 2171 - DNA, 638 bp, Canis familiaris
  misc_feature (1)..(638): n = a or c or g or t
tagnnatgatctcttaagttgacaattgatcttnnngctatcacannnnatgtgtatgtatgtgtgtaatcacatcatgaaagctatactaaatatttactgtgtattaagcatgttaccctactgcccttggtgataggtatttttattatatctgttctacagatgaagcactgagggacagagaagtaacaaggttatacaactagtgggcaatgggactgtaatttgagtccagctagtctagctccagaacctgctctcttaggaaaatggttagtttcttagcatcataaagaagttccaaaattctaggaggtggataatatagtcattgttaatccattttacaggtgagaatactgagttacagaagttccctgacttgctcagcttcatataacaagacaatatctgagccaagactagcttctgaacttttggagagatagtgggcttctcactaaacctataatttcctaattaaataatacctatagtctggccaaagttttttctaataagtaaatttatgtatactatatatcatatatataaaagccattaatatttataaaaataaaattatatttaattatacatttaatagattatctttcctaataaaataattgcat

SEQ ID NO: 2172 - DNA, 407 bp, Canis familiaris
  misc_feature (1)..(407): n = a or c or g or t
tccnncttnnnnnnnnnnnnnnngtctgatatgnnagnnnnnncagcnnnnnngtnnntctcttgtgggcatctagctgttcagaactcatgnnnnnnttnnnntcccagatnnnatgnnnnnnngagacttnnagtngaccaggagtnnnaannagntggcnnnnngncctgtgnngccacannnnngtaaatagannnnnncctgatgtgcttggttcagtctgtcctgttacannnnnnnntcaactttgtnnagttnnnaatacaaggcntctnnnaaaagattgactgtatgnnnncctgagaaagggtgatcttgctgaatctgtctcccaaagcttttttgtaatctgaaatcctctagatttctctgaccattttgaagaattaaggattatgnntaaa

SEQ ID NO: 2173 - DNA, 493 bp, Canis familiaris
  misc_feature (1)..(493): n = a or c or g or t
aatcggcaggagtnngttgatgcttatgtggannncatattnnntaaatcagtggcttccnngtttgatgcttttcatgcgggctttcataaggtctgtnnnngaaaggtccttcagctcttccagccaaatgaactacaagcaatggttattggaaacacaaattatgattggaaggaactggaaaagaatacagaatacaaaggggagtattgggcagagcatccaacgataaaaattttttgggaagtatttcatgaattaccattggaaaagaaaaaacaatttctgttatttttgacaggtagtgatnnnntacctnnnnttggtatgaagagtctaaaactagtcatccagtcaacaggaggtggtgaggaatatctcccagtttcccatacctgttttaatcttctggatcttccaaaatacaccgaaaaagaaactctacgctctaagctgattcaagcaattgatcnnnatgannnnttcagtt

SEQ ID NO: 2174 - DNA, 513 bp, Canis familiaris
  misc_feature (1)..(513): n = a or c or g or t
tgcatgctataattatcaagaaggcatctccaagtcataattacttcgnngctcccaaaaaagaatgctcattttctccctccctccttttttgctcctcttccttccctcttttccttttactccttttctcccccagaatgtgcacttcatattgcacatgtacagtgttaaggaaactatgtaaaaagatgtcattttcttttgccatttaactatgtcttctgtcctgctgttttattttcaaagaaatagtaactccattaacactttctgtagcaattaactactgcccaatttatataattgttcagatttaaaacattgttgatattcataaatttagtgtaattctttaaaaaccccatcagatttacatgttacttatatagtgactaggagcatttgtattgtttcctcattttccttcatctgataaatgtaagaactcaaggaccatctttccttcaagattacatttttttacttggaatcagttaatacattagtttt

SEQ ID NO: 2175 - DNA, 604 bp, Canis familiaris
  misc_feature (1)..(604): n = a or c or g or t
catttccaggagtgcttcagagaatttagatgagctctcttcctccagtagnnnnnnacttaaccagaagnnnaataagaaaangagaaaagacaggacaagattgaaatctccatccttgactatcatgagtacagcagctcgaacaaggccacttcagagtttccacaaacgaaaactctaccgattgagccctactttttattggactccacaggcaactgttacactacttgttctaccaaagcaataagcatgaaagaaataaaggtcctcctgggcttcactttctctgcagggaacaaaaaggccttttcctagatgcccctcacttgtcttcataattatttaggatagtttcaaattggctaatgggtttcctggatttggaaaaattgcaagagaaaactaattatatgactttgccttcaaaagaaaccacgtttttaaatactacacaaatgccctgcttgcaatcagcttcaacttggagtagctgtgaacacaattcaaaatctcagatattaagagaacatgtatcagaattggactcttctttccattctgtcctatcattgccatcagatgtgcctcttcattttca

SEQ ID NO: 2176 - DNA, 661 bp, Canis familiaris
  misc_feature (1)..(661): n = a or c or g or t
tacatgtcannatgatcntcaatgcagacatagaagctnngatcagnnatcnnctaattcagagaattgcttttttttttaagattttatttattcatgagcgactcacaaaaagacaggcagggacataggcagagggagaaccaggttctatgcagggaacccaatgtgggacaggatcttggactctgggatcatgccctgggccgaagccagatgctcgggcaccaagtggccctcggtctgagaattttaatcctccacattactctttcctttccccactctctccagtacaacatgaatatccagtcactcttcttatgctccttagtttgactaaaatgtttcaagccatcaaatatatactgaccagaaccttccctttaacaagtctctgattaccagtatcactgtgatgtcctgtatattgcaacatcagactctgagcgacgagtgtcctctttacctttggcagttggagtcatcagtgtctttccaactaatcctcttgaagcaccaattcaagaaatccagagtcaattcagagaaatcattaggattctgtttctcgtagaaccattcctggcaccaaaatttaccttagtcagagttctaccagaaaaagaaaaccattagaaaagaagcttccccannnann

SEQ ID NO: 2177 - DNA, 498 bp, Canis familiaris
ttttggcctttttatgggtctggtcctggtggtaatatcagaatgtttctatataccacttccaaggcgtttatctgaacatgctgagcagactcagaggccagaggatgctcacaaagctgaacagctgcaggatgcagaggaggaaaaagaggattcaaatgaagaagaaaacaaggacagccttgtagatgatgatgaagagaaagaagatcttggtgatgaggaggaagcagaggaggatgaagaagaggacagctctgctcctcctgtgggtgaggggagaaatgacacccagggccaagggcccctgagagaagtccagcaggtgggcgaacttgagcctgaagaacaggtgcctgtgtggcccagctcagtccacgcggaagtagccgaagatacattgaggcagcgcaaaaatcagcatgctgataagggaccataggtctaatgacagtatttcagagaattcagaccaaaggaataggtcagcctccc

SEQ ID NO: 2178 - DNA, 619 bp, Canis familiaris
  misc_feature (1)..(619): n = a or c or g or t
agattgaatnnaactccagggtagtatctacatgccattctttggtggttgggctttttggcctgtaccttttcttttttgatgaggctacaatggctgatccactctggggtgattcatcgcttgtgaaagtgaatatctctattgctacaggctacctcatttctgatttgttgattctcattttgtattggaaagtgattggtgacaaatattttataattcaccattgtgcagcgctgtatgcatactactatgtactgaggtatggagtcctggcatccattgggaattttcgcctgcttgcagaactttccagcccttttgtgaatcagcggtggttctttgaagctctgaagtatcctaagttttccaaggctaacgtcatcaatggaatactcatgacagtggtgttcttcatcgtgcggattgccccaatacctcctttttatagttacatgtattccgtgttaggaacagaagcctacataaggcttggatttttaatccaatgttcctggatctctacttgtgttgttttggatataatgaatgtcatgtggatgatcaaaattacaaagggttgcatcaaagtcatctctttcatcagacaagagaa

SEQ ID NO: 2179 - DNA, 466 bp, Canis familiaris
  misc_feature (1)..(466): n = a or c or g or t
ccnaggcatgacagtgggcancatcccccagccttgnnnnggcccagcacctgtgttctgtgttagaaaggttatatatatatatatatatatatatatatatatatatatatatatatatatatatatatatatataattacatatatatatattaaaatatatgtaatttggggggccctgttccttgcacattttacagttacctcatttttcccatgtatgtatttgagaaaatgctaatatatagagaaaaaaaatggttcttaaagcttaaatgtgtggtttttttccattccattggattcacattggtttgtagcatttaacataactagtatgttgtattatatatatgtgtatactgattgaaatttttaacagatttgtactttttttaaaatgaaagttgctagttctgcttgaccaagtagtgcaatcattattttttttaatattgttgctg

SEQ ID NO: 2180 - DNA, 606 bp, Canis familiaris
  misc_feature (1)..(606): n = a or c or g or t
ggtaaacttaaagaagagnnnctcagatgtctgtatagatgnnntaataantctctatannaactgtagttttttctattcttttaattcagtggtgtaaaaataaaaaacagtgctgttttcattcaggaaattagcagtttctaactagctagtttgggagctatgctttccaggtttttcttactgtaaaaaaaacttaaaattttaatgaaaacatttcatatgaagccaagtttatgactgagatcaccctaccattnnntaactcagaaaactttcacttgcaaagtgtttggaattttatgtacgttatggaagccgtccctttctgttcttaatcacatgtctacttagctgattcaggtttgtttttctgtttgnagcacacaaaatgaagccagaagcctttcacgtatgaaattaccttgaatgcgaacaatgttctttcagatcactaatgctgttttcacaattacgaagctaaaatgttcccaattttaagaaatcctacttctttccacattgatcttttaacttcttgctagcttttgagaatttcaatacttgnnngagatagaaatacatttttcttataaggtctag

SEQ ID NO: 2181 - DNA, 526 bp, Canis familiaris
  misc_feature (1)..(526): n = a or c or g or t
gcnncgaggccctgcgtnncagagcccngagtccccgtggcctgtcccccntnnnctcctgcctcccgccttccacaaggtcttcccgggccagacacccccgcatttcagctcctctcttcggatggctccacagcccagccccgtgccactgaacacctgctcattggagagagctcaggtgaagggccacctgctcagagggtctgtatctgagcccaggtcaaaacagcaccttctgacgttctcagcacttttcgcaactgatgtttttgtttgcatgttggtttaacgtccacgcggctgctggaaaatcatgtctgtgaggacaagggctgtctaccttactcagtgctgactcctagggctcagtgcagtgtctggataaacattgtgccagtttagggccactacctgtaaatagtgtcctgcagggacgcctgggtggctcgctgttgagcatctgccttccgctcggcatgatccccgtcctgggatgaaggcccgctttgggctccttgcgagg

SEQ ID NO: 2182 - DNA, 511 bp, Canis familiaris
  misc_feature (1)..(511): n = a or c or g or t
ggcataccagtgcaatcactgcatggtaacagagaacagtatgatcgtgagtatgctctggaggactttaaaactnnaaaagtgaaaatattgattgctactgatttagcatccagaggtcttgatgttaatgatgtcacacatgtatataattatgacttcccatgcaatattgaagaatatgtacatagagttgggcgtactggaagagcaggaaagacgggtgtatcaattaccctcataactcaaaatgattggaaaatcgctagcaaattggttaagattctaaaacgagcaaatcagagtgtcccggaagatcttatagcaatggcngagcgatataaaatgcataaacaaaaaaaggacacaagaaaagaatcaaaatcgcatggaaaagccacggaattttattgataccaacactgaagagttttactacactactctaagattgaagatctattaaagattcgtagttttcaagatacataagtattagaaacactttaag

SEQ ID NO: 2183 - DNA, 651 bp, Canis familiaris
  misc_feature (1)..(651): n = a or c or g or t
caaaacagggacntcaagaagaaccannannnacaaatttcaccccagtcaagacctctttctttnnacactanntcaaggtcaatcagcagcatcaataangagctacctcccttnnaaaatcgctgctacagaagaagaggttaagaaggcaatatcaaatcagtttatttccaatactagaagagactttgtggacagagcaaaagctcagaagattaaggaaagttctcaggtgcctctggaatggaaaaagttacttcctcgacctgcagacactgaatttcgaaggaattaccaagttccagctaaaattcctgagctacgggattttagtttcaaatacggatgctactcaaggctaccagttgcttctcagggtctagtcccttccgtgctgttcagccacataaggaatcaagagcgtacaaagaagcagactatctaccaaagtgattacgggaaagcctacctggatttcttaatgattttaaactcatttactccttctcaagtcacagagtaccttcagaatgtttcctacaaagacagacaaattcttgatcgctttatccgctctcactgtgactttggtttggagcagaaaaataaaggaaactgttgaaatgaagaaaattganannnnngaaa

SEQ ID NO: 2184 - DNA, 516 bp, Canis familiaris
  misc_feature (1)..(516): n = a or c or g or t
cctgacttcgctcagcanngcagcaagatctgcgatgggctcannaagctgctggacgaggggnnnctctgaggcccgggcccagcacattctacctcggccaaacggcagactgagaaaacgacagccaacaggccttctaaccctgctcatcagcactaatgcttttcaatcctctgagaccaccccacccccaaactactggtggagaagaggcagagccgggggttgaggcctctctccgactccagccccaggacaggaaacaaagctgcctgaaaaagacgaagtgaaacttggatctctacttcccccatcagggacattcgaagcagggaagcccctcccttgaggaccagggaagagggcatagcccaactaacccttcaggggacactagagacgaaagggggtatgggggccctttggagccattctagacctccagctccaggcagagcctggacagatgccagaggctctgccccagagcacaggaagaaagggccagggcag

SEQ ID NO: 2185 - DNA, 606 bp, Canis familiaris
  misc_feature (1)..(606): n = a or c or g or t
tgaaattaacttagannnnnactagagttaaatcaaaagatgcagaactgacaccaatacnagcanctactgatatgtattgagtactcaccgtgtaccatgtacagtgctggtctatttagatgttatcttacttatttgactggttacagaactgctgtagcaaagcttccccctccaacttttgccaaaactcatctttgtggaaggaaaagttctcaaaaccctaaaattcatccatatacaacttcatgtagaagaaatcattttgaatgtctcagagataagcaaaagagacatggtctcagctctcagggaacatgcagtttagtttataagtttaagttctaaaatatgctaagaaaaagtttaaaataaaatatgctaatcacattaaaattatataaaatcatgtatacaaattattcaaagaataatcagcactatgtcttcatcatgcaggttaggaaaagagtgttagaaattccctttctccttgtttgcatctctccttcctccccaaatctagagttaaccgtcaaatcatattctgtgttaatcattcccttacttttattgaaattttacatctatgtatgtacccat

SEQ ID NO: 2186 - DNA, 594 bp, Canis familiaris
  misc_feature (1)..(594): n = a or c or g or t
gtccccaaagagctctttcacagactcagannagctgaggaacctgaagaaagctgaaagaaagattgaaaacttagagaaggcactacagctaaagagccaagaaaatgatgagctaagagatgcccatgaaaaacacaaggaaaggctacagatgttacagaccaactacagagcagtaaaagagcaattaaaacagtgggaagaaggcagtggcataatgaatgagagaaatagacctaagactatcatgtatctgcctaacagtttgctttccaaggactcatgccagaagaataaagagagcaaatcctgaacaacttcgacaagaagattctgatgctgtatggaatgaactggcctatttcaaaagggagaatcaagagctgatgattcaaaagatgaatcttcaagaagaactggataaacttaaagtacatatatctattgataaggcaaaaatacaagaattgaatacatgtatggcagagaagagagaagaacaactctgtagaaacgatgaagatgatggggtcaagaagagtactccagagaagaatgggaaagaaatgnnngagcagacattgcagaagg

SEQ ID NO: 2187 - DNA, 508 bp, Canis familiaris
  misc_feature (1)..(508): n = a or c or g or t
gnnacaatgtgttacaccactgtcacttattagattagcaaagattaacatgaaaaactccagtgtctgcnannatgggaatacacagacactcttacactttatnggnnnnagtataaattgnnaannnnngctttttagtattctgaagagtccaaaagatctcactctgaggaaaaaaataagtattttccaaaatgcaatctgtgatgacaactgaatnnnnagtcagnnnnaaggtatgtttggctttagtagaaccatgggggnnngaagactctttgaagcactttgtgacccccacccccacctcctgnnnnnnnntgactagaccaagataggcattagccacaaggggccagtttccctcccaggaaagtagaactgggtctctgatnctggtttattnnngtcacatgtactgttcaagaaaagaaatnnnactcaagcactnnntctgaagtctcacattcctcggatactgtattcctatttagcatataaacaa

SEQ ID NO: 2188 - DNA, 575 bp, Canis familiaris
  misc_feature (1)..(575): n = a or c or g or t
tttgataannnctcaaaaaacttgaagttcaccatgttttgcaaatactaataaatacaaggctaagacctgtcagtctaatctgtaggagcagaaccnctgattgaccaaaaggcatgtggatttaggttcattttttttgtgtgtcagacctctctatactgaccatggcaagtttttctggtcagtggctnnggttgcaagtggcagagagctttgggcctgtgtgtactgctgtcgtgggcctctccctctgccagtaggggctgcagatgcctagtaaccagcaaagacggggccctttgggggcaaaagaattttttctaatgtgatgttgcttgggagggcccaaatgttaaggtccgtgtcttcactgtaatttctggaaaaagttaactcagacctcnnngaatggagaggtctaagtttggagggaaatttgacaaagnnntcatttgagggaacgggtgagtgtgtgtccatttctctggtggtaccaagaaactgaattccttgtattaagtgcacttcatgtatttctaataagaagnnnnnccagaaagtgaaatttgtta

SEQ ID NO: 2189 - DNA, 657 bp, Canis familiaris
  misc_feature (1)..(657): n = a or c or g or t
gtgtgnactgtanncattgacacccccagagactgagctcatnnaaacaagatttaaggtttatcaatgagttgcctatannnngcccttgataaggaccagattttggtgacaggatcctgtacttctagnctgagccgaagccagaacctgatgccatcacagagggatttgggaagaagtgaatatgctttttcatgcaggaggcatgttagcctcctagaggctagagggagaactatggctgtttaaaaacacaggttcaaattcattgagaggtgggggcctgtaccatcccctttgaatctggatggacttacaactactttgaagaatagagtgtgtcagaaatgatgcagtgtgacttcccaggctgactgatataagatcagatggtctcctttgttccctgccacacctgctctggaactctgaactgccaagcaagaggtgaccactctgcggccaccatcctggagggatctctcgtcaatgttctggttgacaatttttactgagttcagccttccagccatccctgccaaggtactggacatggagttgaagttgttgtggacccttcagacaagaccagccctagttaagcaccaacaattacctacgttgataccttgtgaaacaaaagaagcacccagc

SEQ ID NO: 2190 - DNA, 642 bp, Canis familiaris
  misc_feature (1)..(633): n = a or c or g or t
taaagtacgtcaggacttgcccnnnnnntggcttgagtttgcaggtggctctgtagnntccaggctagtgcattcctgggnatagtagggctagggtcacaacccctaacttgtaaaacaatcagaaccattgggagggaccttagggttcctcaagccttttggacacaggaccctctgggagcccataggggtaaagtgatgcctaaggtcatagagcaagctactggcatggccaagaggagaataacatttctccacagcactgtgctgcactgagccagtgggtcagcagggcctccaagccctgatgtcacacttggaggccttagtagtgctccctatccagagcttccttcccaaagcctttccactgccccacatggaggggaggggtcagtagggcccattctcttcagcagactattcctgggagtggtttgctgaggggacctagggttcaagggtcccttggtgttagttgataccgaagaaaagaacagtacattactggtttctacttttctataaaagcatttctctgtgtacatgttttatatacctcattctgatacctgcatataaagtgcaggaaattgctctgcatttgacttgtataaatttaaaaaaaacacaaaaaaa

SEQ ID NO: 2191 - DNA, 530 bp, Canis familiaris
  misc_feature (1)..(530): n = a or c or g or t
tgcagnngtatcctgacctctgatcacaccaagttggtgcttcgctannccaacaactcaaaccccagcatccaagagtngagatgcctgtcctggatcctacaaccacccctatcagatctctggtactgtcctagaaggcagtagacaacgaagtcctgctcacctccttgtcctcatctccatgagtttccccagtgaacactgcttccacaggaggtctcaaccaacccatcatctctgtgccttcaggaaagaggacattcaaaccacttcagacaaggagctgcctccagttactttcaccatctcttcaggtgtaaggactgtggacatccttgtgtgtatattcagaaaagcacagttttggccttttctctatggtcagtggagagccatgcagtttcaagtaaggttgtgatggctggagttgttgacacagggggttgtggtggatgctgtgtagatgggagagtaagtgagctggctttattcacagcacatctcaggggtgttcctcaaatctgtcc

SEQ ID NO: 2192 - DNA, 574 bp, Canis familiaris
  misc_feature (1)..(574): n = a or c or g or t
tnnaaaccatttaaataggnntaaatatgaaacagagatagtcttctgttatttttaatgtttcttactataaattttaaacaccagtaactgatcagttacttggataatgttttattcaattagtaactatacacaagctattatacattttattgcagatttctaccctgaagagtagtttttcattgtattatttgctagaatatcaatataattaaagagcaagtgggagagactaaaatatggaaaagagcatcacacaaataatatttgaaagacagcttagttgatcatgctctagttctgaatgtttcattttgtagcttctttcctctttgcgaatattcttttgctatatagttttctagtactatccaggaaatctaacttcaatacatttatcctaggtttcatacaagtttttaaagggaaaaataagtacttatttactaatatgacatctttttcacaccaaatttatgtgcagagttaaacatgtaactgataatatacttatagttgtgttatttatagttgttgactcaatttgaaatgcagaatagaaaatatt

SEQ ID NO: 2193 - DNA, 294 bp, Canis familiaris
  misc_feature (1)..(294): n = a or c or g or t
cnnntctgtaatggacacaccacggggatggatgtcctcngggcaggaacacccatggtgactatgccaggagaaactcttgcttctcnagnnncagcttcccagctcacttgtnnnggtnnnnnnnagcttnnngctaaaaatagacaagacnnnnnnnacatagctgtgaaactgggaactgacctagaatacctgaagaaaattcgtggcaaagtctggaagcagagaatatccagccctctgttcaacaccaaacaatacacaatggaactagagcggctctatctacag

SEQ ID NO: 2194 - DNA, 544 bp, Canis familiaris
  misc_feature (1)..(544): n = a or c or g or t
ctcatcaaagacaactttaaaaacattttaantctttactagttacctcctgctaaagctgttctgctaaggctggctcctgctcttccatttctctaaatctgagtactcatgtcgccaagtggaaatactacagatgacttttaaaaactggacaattcacgtatactgtgtaggacattacctccttaattgcccagtagaattaactgtcagcagatgtgtccatctgattatagtattgcagttttatattaataatttgcagttttatctaacctgcactcgtgtacagattattaaaagttttaaaatgtaactgatgaatcagtatttgatcaatcactgtcttgatttttttattaaaatgtatatttctaatcatattttataaagtctagagaactggttgaatgtttattttcctgaaggtatttttaagataaagcttcataatggcctgtaaactttgcatatctatgtagtttgatatatattgttgagtttgaaaatcttgtgtattgtactggttttatacaaaata

SEQ ID NO: 2195 - DNA, 508 bp, Canis familiaris
  misc_feature (1)..(508): n = a or c or g or t
gaaaggaaatagagtatgtatgaactcttaagnngaaaatttaatgtggtnnnnatgtgtgcattaatccatttttagaaaataccactacctgttaattatggcccaactatgagttaggtgtactgtacttaagaacagtactccatgaacatgagtggtaataagagttctatcctagaatgctgactggtgcaacgaaaaagtagattagatgctattaagaaggcacctaacagtatatcatgtaagatggtaactgtattaaagaaaaagcaggaaaacaaatgtttgatttttgttttgtttttttcttgtctgtagaggtgtttggcatagcaggtgttcaaagccatttttcgtacatttctaaatagaacttcttccactgaggaagtaagtgtacaatgtttggtttgctgtgtgtctctgtgtgatttgttgtttgctttttaactnnncaggtgatccttttctaacaagactcattgttagtggtaacttccca

SEQ ID NO: 2196 - DNA, 555 bp, Canis familiaris
  misc_feature (1)..(555): n = a or c or g or t
tttgccaggctgtcaaggacaaactgcacaacanntnngagcntatcaatctgaaaaactgatnnacattgatgaaatgaactctgtccaccctcaaagagtctacagactcacgtatgtcttttcttaacacccttcccccttttccattttatttctgatttccttccttgtgtaacactaaggtctccagtgtcacagtgtgccatatatatatatttttttaatgacttaacattttcctggataaaatggtgggcaattatctctggaatgctgcagaaaagaattccttaagcctctggctagttccagaagggcttacattaatcactctacccacatgcttgtctcctcgtggtaatgtccaatgtcnnnnnngacagtccatgcagggctcctgatagaacgttaaaagggcattaccacacactgcaggtggccagcaagaacaaagcccttggccccgagtaattttaataatttctgtacaggtctaatccgctgctttggggagtatttgttgctgaaatcctnnnnncactacttgccata

SEQ ID NO: 2197 - DNA, 570 bp, Canis familiaris
  misc_feature (1)..(570): n = a or c or g or t
agatgaagaaggccctgacttnacaacacatggtgaaatgagtagacaacttcaagcaccaggtgcagctngaaataacagatgcttcactctnnnnaattaccctnnaactctttaagggctacaatgcccttaaactcatgcacagtccaataatgtactcacatataacatacaaacaggttgttttctactttgccccttctttcaagattatgtccccatgaaacaaacactgccacattgtgtaatttaagtgacacagacattttgtgtgagacttcaaacatggtgcctatatctgagagacctacgtgacctaatgagaagacacaaatagctccctactgtggggaggttgattcttagccagtggtgctattgtaaccactgaattcactccaatcaacagattcagaatgagaatggatgtttttgtttggattttttttttttttaagtaattacatcagttcatccacttcatcattaataagtgaaagatacatcaaaaaatattcacactccattaggaacttttgtaaaacaatgccatgaacagatctttag

SEQ ID NO: 2198 - DNA, 631 bp, Canis familiaris
  misc_feature (1)..(631): n = a or c or g or t
aattgttttttatacatgtatgtacaaacttttatannaacgccntgcatctccctnataacccggacatgagtcttcagagcaaagcctgcacagctgccacacgtcagaggcccggacctgcacgaggacggcttggggcccagggtctgagggccaggaccttgcccaagggatctggacacttggggcacaggactgcccccaagtctttctcagactcatcctctgcccggctggcagccacctggctggcatgccttggaaggagtattggggcccctctggggttcaaggctggtggctggagtcaggacacaaggtggtaggcagcctccacctgcagcaccacagacctcacatccgagggacacttgaatgtggccatcactcttctgtccaccatgccctggactcaggaggctggaggaggctgccctcggcacactgcccactccatgtggcaaacaggagccgcgactcaggaccactcacaggcagggagggcaaggttgtacattcctactggacaacagtgacagcctggggctctccggagttgggcttcccctctcttaggcttggctcactccccagacacatggccacaggtctgggatgagaggtgggt

SEQ ID NO: 2199 - DNA, 671 bp, Canis familiaris
  misc_feature (1)..(671): n = a or c or g or t
aatgttatacagaggggaggtgggaatgaaatgagttgcagtcngacagtaaaagaacttgaaaaacaaataggagaaaagattttcagaaacattaaaactattttcaaagccttcaagctcattgatgttagcaagactggtctgatccagtcctgtgaactgaggaaagttctcgagaccttctgtttgaagatgaaagatgatgaatacaaaaagtttgcaaaacactacaacattgataaagatactgcagtggattacaatgtttttttgaagaacctcagtgcaaataatgacttgaaccttagatattatatgggaaaccaagatatctcctggaagaatcaaccagtccaaaattccaaaggggagtgcctccacagttctggttcatctgaagatgtctggaaaaactacaacctagacgaaattgagagaactttttgccaagagcttcccaagtgctatgaaaaggttgaaaaagccctgagtgcaggggacccctccaaaagtggatatgtatctttgaattacctaaagattgtcctcgacacctttgtataccgattaccaaggagaatttttatccagttaatgaaaagatggagccatgtgctgctgtaagtctctacctgaattcatgggatgggaaagttgtatgggaatgc

SEQ ID NO: 2200 - DNA, 528 bp, Canis familiaris
  misc_feature (1)..(528): n = a or c or g or t
gggccctnnnnnagctcagnntcctcccacttatgccacccaccaatgggcagttgtagggnntatggggtaggagccccaaatcagagcagttctgcagaggagcgggccagaggcagggggaccagagggatcttattttgtgcttgtgtctcttcatccttctgggattctgacgtccttcctctgccttcccatccccgggccttatgtctgtcccagataaaggcactgttctcctttcctccccaccccatcctctccatcaaatcactcccaacatcgagatccaaaggctggagcttctggcttcaggagtaagacgaggaggcctagcttaggccagcagggctgagaagcagaccggacagcaaagagtccatttccctttccttgggagtgggcagtggggtggctgatggtcttggccaaccaggggcctgttgcccaggcaactcaccagctccgcctctgttgattggctgccacggtggaagacagccaagatttaaagggacgccagcgatt

SEQ ID NO: 2201 - DNA, 651 bp, Canis familiaris
  misc_feature (1)..(651): n = a or c or g or t
gnngcaggnctcgctctcgatctcgttcccccaaagaaaannnaaaanntgatataaagtcaannnnnaggtcaagaagcnagnctcgttcaaattctccccttcntgctccaccctcaaaagcacgtnnngtgtcccctccaccaaaaagagcttcaagatcccgttctagatctcgttcaaagtccaggtcacggtccagatcgagttccagagattaacctagaactctacattctttgcacactattatggaacactttcctacttgcttaggcagttactcttccatgtttgtacttggcctcttctgcaagaggaatctcctgaaaatgggggcacacagaaatttgatttgtggccaaatttgatggaaaaaaaatgaggttctaaggaaatggtggcatgaagaccctctcccttctttgtagaattaagataactttgattttatagcgtttgagctaaaataacttttgtaaagattaagctcatttagattttttttaagtatttcagcaggatctgctgcaggggttttgttgttttgtttgcttacttttaaattaaccgtttcaagctttgaatacctaaggctttagagggagatcccgattttcaattatgttggctttttataaagcttgagtt

SEQ ID NO: 2202 - DNA, 541 bp, Canis familiaris
  misc_feature (1)..(541): n = a or c or g or t
gtcagtnncagcagaaagaggcagcagaaggtgaagaggttataggtgatctcttgccatcaaagctgcctttggtgacacactgagtgaaggggactgggccagcttggtggacagtgtggaacaggaacagctagagaggagtttgaggactattagaactggtcccccttcacccttccctccagtcacagaattctaattcatccttccttctgtgcagagctgtgtagtgctgcgtccatccatagtgccatatttaaaaggttaaaaacttgagaattcctatcttccccttaggctatgtagctaatcatttaagtttgttaaatcctgggacttaaggaatcttgccttctcaagtaccattctaaagtccattgcactttgcaaaagaatatttctgccacctcaccaacatttttagctgaaatgatttttctgatgtgtctaaatctgtggaagaatttttgtataaaatgggtgctgctaaaatttcaggccattttgcagccactctgtgaagtgacctttagtaaat

SEQ ID NO: 2203 - DNA, 574 bp, Canis familiaris
  misc_feature (1)..(574): n = a or c or g or t
tacnnntgatgaactgaatattgaattactgnnnnntaaattgtacannncttanntcgnngcantctataaattnngtaagaatcatggtgatgtcactgcagaaatcatgtgtcccattcttgagtttgaggctgacagacgggcttnnatcatcactctcaactcntnnngnaccgaactgagcaaggatgaccgggagaccctctacccgacctgtggcaagctctatcctgaaggattgcgcctgttggctcaagcagaagacttcgatcagatgagaagagtagcagaccattatggagtatacaagcctttgtttgaggctgtgggtgatggcaatggaggaaagacattggaggatgtgttttatgagcgtgaggtacaaatgaatgtgctggcattcaacaggcaattccactatggtgtgttttacgcatacacaaagctgaaggaacaagaaatgagaaatatcgtatggatagcagaatgcatttcacaaagacatcgaactaaaattaacagctacattccaattttataactcanngtggggcctcaaatgtagaaaatc

SEQ ID NO: 2204 - DNA, 524 bp, Canis familiaris
  misc_feature (1)..(524): n = a or c or g or t
ttaggttnnatgatctcttcnnagagtcttttgaaattacagatgtgaagcccctaaagggagaccacctgtccagggcaataggaagaattgctggcaaaggaggaaaaaccaagttcaccatagagaatgtgacacggacacggatagttttggctgatgtgaaagttcacatccttggctctttccaaaacatcaagatggcaagaactgccatttgcaacctcatcctgggaaatcctccatcaaaggtttacggcaatatccgagccgtggctagcagagcagcagatcgattctgatttcaaatcagaggcttaccttgtctttggactcgagtaaataaaagcccttgccctctgcctgtggtcacaggaaaccacgtgaagaactttttagtcacttgcagccttcatcgcttcttccntnctcagccagaagcatcnnnngaaagcaaaggtttgataatacagcaacttgaagatccttcccgtatctgaatttaataccgtaattatacatca

SEQ ID NO: 2205 - DNA, 557 bp, Canis familiaris
  misc_feature (1)..(557): n = a or c or g or t
ctttnctgccttgtcaagaaagctggtgtgttgttttgaccattagttttgttggttcnactgggcccaccgtttccccaaatttcctgccctccctggagactggaggtctaggggaaagggcccaggatgtggcaacagagcccgataggactctgggcagcgggacaggatcctgctaaagtagcaggaagcccccagagctctgtccctcaaggatgaaacaggaacaggtaggcctgggctnntgagtcagcagaaaggggcccccgtggggtctaaagtgaggaaggtccagaccacttcactagcttcacagcagaggctgagcatgtgggggtctcagaagagggtcccctcctttgaggcaggactggaagcagccccggtctgaggaggtcagccaggcccctccaaaggtctgataactccactccacccataagccttattgctctgtttacagtgacctgccccaggcccctcccctagggggactggggtgtctggggtccaccctctgggtcaatggttatttgatttgattttattttttt

SEQ ID NO: 2206 - DNA, 380 bp, Canis familiaris
  misc_feature (1)..(380): n = a or c or g or t
gtcnacacttacagactcaaggtgnnnnnctttnnnaaacgttcatttgttataattatataacctgtcttcaanatnncntnnttcagggcannnncctnnnnnnnnnnttccctgtcctctaccatcatcactgcctcccacccagcccgaagccctnnnnaagaccctacgtannnggaatgtaacggcaaagctgtacggcagcttagatgcaacgaggggcagaagcnaggcatgcaacctttttggaaacactgtgatgtcctactcgggatgtaagaataaaggactccaggtcacaagtcagctgcttgtgatgataacctttaccatctaaaggggggggggggggggaccctggatggctcagcagctta

SEQ ID NO: 2207 - DNA, 677 bp, Canis familiaris
  misc_feature (1)..(677): n = a or c or g or t
tncnctcattcgnnggcatagtagcaantaattttnnngcattctcaatatgtgtgatgttgggttaagcatcctgtgttcagagtgttttaagaaagtaatccatcccttgcatagagcgtggttctttgcttgaagaaaacagtataagaatacaatttgctttccccaaattctttgttcctttttttttcttgtaacttgatggttttatttttaaatcacatcctgattaaaatgtgtctctctaaaggggttactaatattcaccttttaaaaactctatttaggggaaaaaatgaagcaagtaactgaattatatggaaaaataaggttcacacctgtggatcagggattattttttaaaaattagatattaatttggtatcagacaatggtggtggcatttcttgatagtaaataaaataactaaaagcaaatttaagaacataagcagttgtgattcattataggcagtgggaggtaactaactcctagggataaccatttgtatcctattccaaagtcttattttatagtttgaaaagtactttgcacacagttcttgnnnnnnaaataaagatgtaattataggatatggtgttactgctttgttaaaaagaacctcatttaaaattttaaattgacagctggtatttttttaatgatcttctttt

SEQ ID NO: 2208 - DNA, 535 bp, Canis familiaris
acaagacggccccgcaggccagcggctgtgacctcatgtgctgcggtcgcggctacaacacccaccagtacgcccgcgtgtggcagtgcaactgcaagtttcactggtgctgttatgtcaagtgcaacacctgcagcgagcgtaccgaggtgtacacgtgcaagtgagcctgagacgacggcgccgccctagggccaggtgggcgcctccagctgcgaggcagactgcaggagggaccggacagctcccgggctgcagtcaccctggcaggtctcttcaggggcctccacggggggaatgctgagcttgagcttgtcttttctgctatggggacacttctcctgggttttctgcaggcgcccaaatgaaagatctccccagagcctgggactgttctcgtccgtagccactgctgctccaccccgaccccagacagcgcccacccagggccctcctcggctggagcagagcctttcgcaccaggagctctggaccctggggcctcaacatagcaatatttaacaatttattctga

SEQ ID NO: 2209 - DNA, 542 bp, Canis familiaris
  misc_feature (1)..(542): n = a or c or g or t
gccgacacccatcggcacggtccacaccgacctgcnnncgcagnntcagnntcgggacaaagcccagctacacagcaaaaaccaggcgctgaactccaccaacggnnagctgaatgcggacgaccccactgccggccactccaacgcccccatcacagcgcccgcagaggtggaggtggccgatgacaccaaatgctgctgtttcttcaagaggaggaagagaaaagcagtgcagcgccacaagtgaccctggggcggtggcgccctgaacccttctgccgcagcccccggggcgagcctggcccctgccgcgtggcctacagccaggacgcagactgcagggccggcctcagccgcccgccccccacttggggtcacgtccttcacatgagactttggccgaaatttctacacctgtgtnnagtcctcccctccaagagcattaactatttgaaacaaggagaagagaaacacagtggccaccctgccctgcgcccctcccgcccgcctgctgaagtgagtagtgggctgcccgtgccggc

SEQ ID NO: 2210 - DNA, 608 bp, Canis familiaris
  misc_feature (1)..(608): n = a or c or g or t
tgaaggaaggtggcatagatatagacgcatttcaggaacgtgaagagggccgtgcagggccagatgataatgaggaggtcatgcgagcactgctcattcacgagaagaagaccccctctgccacagcaggctcagtggggacagccgctcccgtgaccactgccaatggcagtgactcagagagtgagaccagtgagtcagatgatgactccccacctcgaccggcagctgtggcagcgcatcatcgagatgatgacgaggaggaggaggatgagtttgaggaagtagcagatgaccccattgttatggtggctggccgtccattctcctacagtgaagtgagccaacggccagagctggtggcccagatgacaccagaggagaaagaagcatacatagcaatgggacagcgcatgtttgaggacctttttgaagccaccagaagagatgaagtctcccttcctctggatgttatgtgtaaatttgaagcctggaattactagagtcatcttgcaaccatcctgaggataaagccaacacacaaaaaggtannncgaaaagagtcataaagagatgaagccaaagccctgattgaatcataaccaatc

SEQ ID NO: 2211 - DNA, 523 bp, Canis familiaris
  misc_feature (1)..(523): n = a or c or g or t
ggagcagggactcggcacagaattcactnnaaacggggctgaaggagtgtccctcctgtatgtgaaaagaaatttgttttattcttcattctgactttnnaactttggctcacttccagttaatttggatgaaagtaattttctacttggagtcaaggagggcaggacatcatttctcatcggcacgatgctaggtatgtctgccctctatttggacgtcattgccattaagttccttctgggcttcatggaaactcttttgttaggttccagcagtacccagacttcagaaaccaagaccgccatgcagccaaaatctcctttaagttttgtgcttaaggacaaatggttgatcataaaggttgtattccttcatgctaaattaaattggggaaaaaatgttgagtttctaccattcagaaactgcaaaataggaaaagattgataaaaaatcattttcctttcttcattgtacatagttcaaatctttctttgttacatttaaactatatccatgtacatc

SEQ ID NO: 2212 - DNA, 525 bp, Canis familiaris
  misc_feature (1)..(525): n = a or c or g or t
gctgactggtgtttgacactgacatgtcagcaggnnatctgaaccgaggtgacgttaaggtgtgtgcacacgcacatgcctggnnggtttgnnnaggctgaaacagccagagaggtgcagtggtaccccagggattnnnngctgcannaagcggcccccaccctggactccgaagacctnnnnnttgtttactctttagattcggcgaaaatcgaaggttctaaagcccaaggttcagatggtggcagcctggacactaagccttgaggtccactgtcctctctcccctggtggcttcgtgaccttgtaccacatgctcctcatgtctgcgcctgtcctcttcctccacactggccaggtcgtccctggacgtgtgtcaccccagagcaactgtgaacactgctgtacaaaaatcctaggtgctatttttgaacattttctctgaacttgtgnnnnnanttaacttggaagaacacctcagtttgtatcatgacttaaaagttatataaacctatgtctacacag

SEQ ID NO: 2213 - DNA, 564 bp, Canis familiaris
  misc_feature (1)..(564): n = a or c or g or t
aagcaatgcangagtatatngcagtagttaagaaattagatccnggttggaatcctcagtcaccagagaagaaaggaaaagaagcaaataccggtnttggtngacctgttgttagttctctgtatcatgaagaaatcatcagggaagaagacaaaaacatatttgactactgcagggaaaacaacattgatcatgtaaccaaagtcatcagatcgaaaaatgtggatgtgaatatgaaagatgaagagggtagaactctactccattgggcgtgtgatcgaggacataaagaactagttacagtcttgctacgatataaagctgatattaactgtcaggatgatgaaggtcaaacagctctacattatgctgctgcctgtgagtttttggacattgtagagctgctgctccagtctggcgctgnnnnnnctctccgagaccaggatggctgcctgccagaagaggtgacaggttgcaaagctgtttgtttggtgttgcagcaacacacgactggcaaggcttaatcaaaagactggaaaaccacagtctgtaacagcatagagc

SEQ ID NO: 2214 - DNA, 666 bp, Canis familiaris
  misc_feature (1)..(666): n = a or c or g or t
ctcctctatcagaacaaaggagtgtcagtatcctgtaccactcttgccatcttcccatctcattcccactgcagtgtgggcatctttgggtacaatcttaggagttcttggtctgctctgacatcatagnctcaaatctacacgtacagtcccaactccttccccaaaccaaaaagccatgaaggcagagcaaacattcccctttaagagctcccactgcaccctcttacagagggacacagctgtgggaatggtgcttaacctccacaggtatctgagtggatgtaactaggacaccctcaagggcaagtaggccctgagtgtacaatcttaagacaggaaattttgtcttctgttgactcttgtcagacattcagcagaaccctgaccctagcttctcttttttgaggcttagccctgctcctacctctactcccactcccacctcccaagaggaagaagagcctgggcatccataggtggtctaaatgggagataggcatgggaatgggagtgtagagtgtagaggtacactcttagaatacagggctggaccttgacttcaactcctatgagctctggctgaagcaatgggtgggacagatgaaggccccagtgggatcccccaagagtactttcctgctccttcaactatctgccatcagt

SEQ ID NO: 2215 - DNA, 679 bp, Canis familiaris
  misc_feature (1)..(679): n = a or c or g or t
actcaaaccgangagagtgagcnnaacaccatgaccactgagcctgtcnnnnaatcgctggacatagaaacccaaacagacttcttccnngcagacacctctgctcagtcctatagttgtaggggaaattctaactttttaggccttgaaatgtttgacacacagacacagacagacttaaacttctttttagacagtagcccccatctgcctctgggaagtattctgaaacactccagcttttccatgagtactgattcatctgacacagagacccaaactgaaggaatctccgctgctaaaaatatacctactatagagagcaaagttcagttgaacagtacagaaacacaaaccatgaattccggcttcgaaaccctggggagcttgttcttcaccagcaacgaaactcaaacagcaatggacgactttcttctggccgatttggcctggaacacaatggaatctcagtttagctctgtagaaacccagacatgtgcggaactacacacagtctccaacttctgaaaatgatgtccgtgcgtgcaacagctgttacaatttccttctaggtttgggaaaatgggagagtgggacaacagtgttaacactattgaatgtagttactgatgcatttacttctattcttggagggtcttttgccttttgtacttgtaaa

SEQ ID NO: 2216 - DNA, 601 bp, Canis familiaris
  misc_feature (1)..(601): n = a or c or g or t
gctgccctnnagaagactnnacagtcccaaacgcgtgtccggggagaggagtgttgatgacccttccttaaaaaggnnntttatcaggacctgccttgttgctgggtgatttcgctctctgagcatgagctgtgggagccagagtgaccctcactactgccggcggggggtgggggggggaggtctccttccgttttccctctgcctcgcccagcgtttcctgtcactggggctgtgggatgtcctatggaattgaccagaattagcaatatgcttttaaatgcgnnnnnnnctgaatgacacttttaagacaatgaccatatcaaaaaaaaaatgtataatttcataatttgaataataaattaagtgtttaaatgctatttgtagtcttgatatacagaaataaaataattagggtttgtccttggttttatttttatcttaggttgggttatattgaatgttctgtatcttcttataatagnnnnnnntattttattatcagtattttgaaaatggattacctgggactgaagggagatgggtggttatctctacttgggttgtttttttttttttttcttagcttctctgagcttat

SEQ ID NO: 2217 - DNA, 654 bp, Canis familiaris
  misc_feature (1)..(654): n = a or c or g or t
tgggtagtnnaccatgagctnntgctgacgacgaaggagtacatgcgtgaggtcancactanngaccccaggtggcttgtngagtttgctccagnnnncttcaaggtctccgacccgaccaagctaagcaagcagaagaagcaacagcgtctagaacccttgtacaaccggtacgaggagcccaacgcttggagaatatcccgggccttccgacggcgctgagaggcaagacttatctgcctgcctctctcctgcagtggtggcctagggcctggactcaactcttagcaaggaaaagctggtcctggggatacagctgtccagtgactaaatatcttcactggccattttctaaacttgcctcttaacttcttccctggtggtaaaatagaaacagggatttacgcctggtttgaccagaacccgcagctctgaccccatcaagacactgtggccagctggggctcacagctagtgtgggagtacagggcattgtctccacgagacggacaactcatgtagccctaggacgggaagagtcgtgagcatctgaacccagatgtagtgagggcctgatgccctagctgggactctggagaagggaaccatgaagctcattgacagttggccccacctcctgcccctgtccagccc

SEQ ID NO: 2218 - DNA, 636 bp, Canis familiaris
  misc_feature (1)..(636): n = a or c or g or t
aacatgagancntggntatgagtgnnncagnnaaattcttccattgtatgaaactcatctnnnnntcnannnnnnntggttccaactagtagtctagtaatctcagccnnggtcattacaatccatttcccttcttatgctaatttatggaaatagtttattaaaatctgtgcttcagcactcatcttaaaaataacatttaacataaaaacttgtatttacacggagatccaaaatagtcacgtttctgcagtatagccaatttaaacctgtgcttttttatatttaagaaaaccagaaactgtgccaaagatggtggaaaagtaaacaaatgttcaatgttgactacctgtaccctgaaagctataagggaatgatcctagattgtcgagtacacatcataaacgtggaccagtgattcaatgtgagtcttcaaagggaaatattgatgttgtgcagnnnnnnnaaatctaaatatcgatgcagttgaatccataatttgtcatgggctgaaaggtcctacccccttggcagtttgctcagatctaaggcacgggagttggcagagctgttcgtgaactgcaggtcatccttattttggagtgagtttgtnnnnagcctcttaacacnnnnnnc

SEQ ID NO: 2219 - DNA, 632 bp, Canis familiaris
  misc_feature (1)..(632): n = a or c or g or t
tnctaaggtttaaaatcccttttatttttgnncttcaaatggtnctaatctgtaagcatttgtgctaaaatggccctgatacctgctaggtggttttactgagctgttccccgaaaattgaaactgggaagggagagttctgtgatcccgacatcctaataaagagtccttaacctacaagcccgcgtatccacacagttgctattacgtgagaagtgttacatctattttctgtatgcacctgtcgcctgggtaaccagcctgagccatgcctcctacacctgccagtcagtgtggactggcggtaccctgggcggagggaggctgagctgcacaatggtcgtgaatggtcgtgaacgtgggcttgacagaaggcagcagcagggctgtttgcagctactttgatttattagattacgagtttaaacatactctgttcactagttactgcgtgtgtaaactgcttatcggtcattgtatctgctggaatcttaatgcagattcctgtgaatcctgtatgcaataaaaatggctctcgggcacatctgctccacatgtgtaatatccccaaatttagctttttcnnnnnngtgtaagttccctctttgtcctataataaaatctgtnnnnnn

SEQ ID NO: 2220 - DNA, 613 bp, Canis familiaris
  misc_feature (1)..(613): n = a or c or g or t
cttgctcacgtatttgcnnatngtcagtgttctcactactattcctgtatagcaaatcacctcaaacgtagtggtttaaacaacaaccattttataatagtcattaattctgtgggtcatgaatttggacagaacacagtngaaatggcttgtctctgtaccataatgtatggggcctcgcctcagctgggaagacttgaaggttgaggtaatttaacagctagtgtctggaaacatctgaaagctcatccactcgtgtctggcagttgatgctggctcttggctgggatgtcagccagaacacatgtgcacagcctctacacatggcctgggcttccccatggcatggcagtctcagggtagttggatttcctacatttcatctcaaggatccaaaggcacatgtcccaactaacaaggcagaagctgcactgccttgtctcacccagccttggaagtcacacaaaatcacttctgctgcattttgttggttacaaatgagtcacaagtctgcctcaactgaatgcaaggggtatgagacactaccttttaatgaaaagaggcaaagatctagaagaacatgtggccatttttggagggtgccatgtccatc

SEQ ID NO: 2221 - DNA, 308 bp, Canis familiaris
  misc_feature (1)..(308): n = a or c or g or t
ttgtttgggactttgtgtgttggtttaaaataaataaataaatgtttnntaaatannnnnnaccannnnnaagnnnnnnaatannntggtgctaattgaaatagaagacaaatttcagattnnaagacttacaatataaaatgttcacaccagtnaaactaaactgcactttcccaaggggacagctggtatctacctgcaatgggcagcagtaggaccactgaatgtttacagtttctgtggcccatttaagtgtagaacataaagatggcactgtccccccagagttgaggatttgccaccttggt

SEQ ID NO: 2222 - DNA, 487 bp, Canis familiaris
  misc_feature (1)..(487): n = a or c or g or t
agccgccttcatcgagcgtcnnnnnatggagcaggcccagaaggnnaagaacccccaggaacagaagtcctttttcgccaaatattggatgtacatcattcccgtcgtcctgttcctcatgatgtcaggagcgccagatgctgggggccagggagggggtggtggcgggggtggtggtgggggcagtggccgctgaggggctggggcctgtcagatccctggtcctctctcatccaggctactcccttcctgcccagagtgctcctatccttgatcatcccaagaaggatttgctagctcctcccatctccatcccatgagggcaggaggacacccctccccaggagtcctttccctctgggtggatgggtaaccagattctggtgcacccttcctgcccctgtggtccctttggagccccaaagacttcctcttgcccacagcgtgaagctcaagctccccttccagctctgaccctgtgtctgtc

SEQ ID NO: 2223 - DNA, 543 bp, Canis familiaris
  misc_feature (1)..(543): n = a or c or g or t
acccatgagcgcaangaggctccagaagnnaggctccaggcctatgtctgnctgggtgtnnaacccccagtgctcacacaatccagtcaaggaacatgacccccgcccccaggaaagaaacggattcaagcaagaccatggggtagaaggaggaaggggctactgctggatgggattggagggccataggggagaactctccagccatctctgtgtccctgtggagggctgcagagactgcagggtgacctgctttccccaaaggccaggagtactggcctggctagaccaggggaccctatatttggtgaatgaggttctggtggagaccatgtcattattgggcccctgagtgtaatctgggttctgcctctgcccttggggtcatggtatcagaaattcgccccattttctttacagagtctcttttgtgtctgtcatttctctttcaaaaaggcagtgttttttgttgttgttggctttttttttttaaagaaaagttctnnnnncactaacggaaacnnnnngagtttgtcctttgta

SEQ ID NO: 2224 - DNA, 508 bp, Canis familiaris
  misc_feature (1)..(499): n = a or c or g or t
ccaatcctcacccagtgcctggggacggattgcatcgggcaggttttgatgcctttatgacaggttacgtgatggcctatgtgggagtgagccagggaccccagccctgtagctcttgaccctggctacctgaatgccacaataaggtgtacctgagtggcaaagctgtccccctcacggtggccaagagccagttttcccgttcctccaaagcccacaaccagaagatgaagctggcttggggcagcagctgacctagcttctgcctaggactcaaggcctgggaggagaactgagtggaacagaggtgtctgggtccctctaggctgtgaatgtcctactcccaccttccacagaggggggcagtcctggcagagacactgctgcaccacttgtggaccttcccattcccctagaggctgaggaaccagggtatacacaaggaggctggccagcacctgtaacananactttatttatttttaaatctgaaagtgtcttaggaaaa

SEQ ID NO: 2225 - DNA, 545 bp, Canis familiaris
  misc_feature (1)..(545): n = a or c or g or t
gtgatgttgnntggtattttatatgcattacntgaancngaaagaaagctgcagagttccattcannatttgtgtgtcacgtggtnggagaaaggtctgcctgccaaggaagatatgggaaagactgcttttatcatgctgttaaggaagagcctgcagactaaaacaggcacagacatatgtcggctttggcgtattcatcaggctttatattgctttgattatgatttagaggaaagtaaagaaattaaagatatgctacttgagtgtttcataagtgttaaatatatcaagaaagaggagggaagaagatttcttagttcactcttcatttggaatgtaaattttattaaaatgatccacgagaccattaaaaaccagttacaggggttacaaaaatctttgatggtatacattgcagaaatttatttcagagcttggaaaaaggcctcaggaaaaatattggaggtattttcattttattaaatgttaacattcatttttgttgtattctagtaaataataagttgtcatggatagtcatt

SEQ ID NO: 2226 - DNA, 572 bp, Canis familiaris
  misc_feature (1)..(572): n = a or c or g or t
ctacgagtgctgnnnnnagctggaggagactggctgcgctgcagccgtggccctgacaccggcctggtgnntctggcctatgtgaccttgaccccaactccaagtccaacccctnnaagcagccaaaactgaggccctgtgcatgctggtggcctcagggaccctcataacccctgacttggagcctgagagcccttcccaagccctctggcttggccacagagagtagactgagagctgggggccatacatccctgtgctcagtgttaattactccccattaactgtcccagtgacctcatccagacctccacccaggaaaggagggaagggatgcagcactgggctgccaggatttccctggcccatctgggccagcccctccatagatatggataagcacttccctatgaagggaggtgaccagagacccatttgcagggttccctaggccaggtgatgaggaggaaaggtgacagtattggggccagctccctaagcccccaaatgtaaataagctgtggccagtgcctggtggtcagaagagggaggaggagcccaggcttctgttt

SEQ ID NO: 2227 - DNA, 214 bp, Canis familiaris
  misc_feature (1)..(214): n = a or c or g or t
gtcntcataaagcagcagaacttttgctgaaaacccagacggtgttaactgatcagcctgccnnccagcataacattttagaatgcacaaatactctcgatggtggaaaaaagaaaacaaaaaagcgatgctctgtttcttgtgggtgttatgtttactctcccatataccttcatgtcagggctgggggcctgtatgtttaaactccaaccac

SEQ ID NO: 2228 - DNA, 706 bp, Canis familiaris
  misc_feature (1)..(706): n = a or c or g or t
gctggtggtgctaaattttcccatggtgccattccttcagacagaggatgcagagagcnntgnnagncaggnntgcannagaggcttcannagctgtagtgcgcttgtgctgcntaacgggacatggctggctgtcactaggaagcacagtacggttgccatcacntagcccagggaaagggtgacagatttcactgggagtatgccaaggacacctctaaactcccccatgtcaggcagatgaagtaactactttatttcgccaccctgcaggtaactgaaactcaattaccacggctgcttgctcagtcccgtccccctgagtttagacagctcccgtgcctctcagaactcccctgtctgttctctttgctctaccccaggggtgagcctgctggagccagccaactaccccttctttccagaactcacttatctgaacattgcagctctccctcgaagaccttctgcattggtctctggagcccccatgctgaggcttctaatgaggagctggccagaagcctccccacaccttggggtttatttgaatatgctagctcttgggttcgggctctgtagaagatacataatgaaatttctcttgaaatgagttaccatagtagaaaaaaaaatgcacctatattctaaaatgaaatgcctctgtaatgcctctgtataagcttgcttgaacaatgatgtaaat

SEQ ID NO: 2229 - DNA, 557 bp, Canis familiaris
  misc_feature (1)..(557): n = a or c or g or t
aatccattaaagctaanntatttttcaatatttatgataatctgtacatacattgtctgtccatatgtatttgtaatatatgatgtatataatgtcaggtttgggtcttgggttcaagtgtatatattcctataagtttcttaactgcattttgatgaattcacatgtatctataagaattgtccccaaagtacctgtacagagatttcaatataaacaaattgactaattatgtaaacactaaaaatttaaaatattgcctaaattgcatttgcaataaacagactgaatgaacatcacttttttcatgaaaacttggtgcaaattcagatctcttatttaaattttaaataaggtctaattttcaaaatgcagtagtttcaaaatgtgatctaaggtaacggaatcaaatgtgatctagtgtaatgaaagatctttgagaacctgggtgtgttagctttctgtatatagtgtaaatacccccactctgctgttggaggccaacagttccactaggacttgttggcaaagagtgctacaccgtttcaatgaaacaa

SEQ ID NO: 2230 - DNA, 511 bp, Canis familiaris
  misc_feature (1)..(511): n = a or c or g or t
gnctgtggggggncactggcaggtggatgttgagtacagctgggcttcaggggcgggaggtaagggttgtcatgtctgtggttttggttgtgatctttgtccagccaggcaaggggaagcccgtgtggactgaacgaagcagagtggtgtgacggtggacacctacctactcttcacatccaagggatggagaatagccgggaagtctaccccttccagaaataacgacagtgaagttggtcccacgcaggatgcctgggtgtttaggggagtagaggcagagaggtggccgaggacccccgggggtgagggccgtgtgttaagtgtgcagtgtgcacacaagtgtgcgtgtgcctcgtttgtgtgcatggggtgttggtatgtgtgcctccctgtggatgcctgttttccgctgttgtggagagcactgcacacaggccccgcagcctctggccaagggcagaggaattctttatttccatggccttccacggtgattaagtctccaaac

SEQ ID NO: 2231 - DNA, 607 bp, Canis familiaris
  misc_feature (1)..(607): n = a or c or g or t
aagaaanncagagcagctacagcagacgctanagcacacagnnnnnntgtgaacctgcagtctgttctgctggcccttcccttctttgccaccatcttgggaggaaaaatggaggtcgggagcaagcaaggagggaggtggggagcaagcgttcctgtgagttatggtgagcctgaaaccctgtggagagacagacngnatcgtgtcccaattccataggagttgcttttgggaacttacctggcctacttcagccttggtttccccatctcctgtggagtggtgctcacacctacctgccagggtgggagtgaggactatggagctctcatgcgtgcgaggggcttcatacagaagctggctcagggagctgcctgcatggctgtggccagttaccacagcgaggaagccctgctttgcagatggggagatggaagcacaggcagtttgagccccttttcagcaaaggagcagccaaaagcagaaaagtcgcactaggacttgaatatctccaaggactctcagccagagggatgagccagcatgtttgtgacctgccatgaattatatgacttaaagttactcagagacatctgtatgtacttca

SEQ ID NO: 2232 - DNA, 588 bp, Canis familiaris
  misc_feature (1)..(588): n = a or c or g or t
ggtgtntatcataaagagttagnnagacgttatgaagaaaaatggagtaaattgcttttaacaacaacagaaaagtcttacatagatttattcccaaaggatagtattatatatttaactgcagattctcccaatgttatgactactttcaagcatgataaaatttacgtggtggggtcttttgttgataaaggaacgcagaaaggcatatccctagccaaagcaaaacggctgaagctggcaacagaatgccttccattagatagatatttacagtgggatactggtaccaaaaatctcaccttagatcaaatgatgcgtattttgttatgcctgaaaaacactggtagttgggaagaggctctgaggtttgttcctaagagaaaacatgctggttatctggagatatctccgtcttctcaagaagagcttgtcaacagattgaagaggtcaaagacttttaattcatttccaaaagactctctaaaaatacacacacagaaaaggtggcttaaatgagaatactggataacttaaatggtcacaatatatgtaaatcaaaccatgatgctgtatgcctccaattta

SEQ ID NO: 2233 - DNA, 660 bp, Canis familiaris
  misc_feature (1)..(660): n = a or c or g or t
ttgggaccaggggccagtnnngcagctcgttgggaagaacttcaacgtggtggtctttgacaaggaaagggatgtatttgtgatgttctatgcaccctggtcagaaaagtgtaaggcgttgttcccagtgttggaggagttgggcagaaagtatcaaaaccactcgacagtcaccattgccaagattgacatcacggcaaatgaaattcagctaatgtacctagaccggtacccctttttcaacctgttccccaccgacactcaacaagctataatgtatacaggagaacataccatgaagggcttttctgacttcctggaaagtcaaatcaagaccaggattgaggatgaggatgagctgttgtctattgaggaaagtgaattgacagaagaggaggcattagctgaagaaaagaagttaccttttatcaaggaagagttaactgaacagaaggtgcttgagctggagaatgtgacaaagctggaagagccagctgggcagaaggaaacagccaaggaggagaaagaaaaggtggctaagccaaagggacctccaaaacaagagaagaaaccaaaagtgaaggaagaactgtagtttctccaaagccaagagccatttcccaggtcctggcatcattttctaaatggatatagtccaaa

SEQ ID NO: 2234 - DNA, 526 bp, Canis familiaris
  misc_feature (1)..(526): n = a or c or g or t
ccgctgcatcaagtcctgccgccccaacgatgtcacctgcgtgttggactccgtgcacaccatctcccataccgttgtgtcgctgcccaccttccgagagttcacccgccctgaagagatcatcttcctccgnnnngtcatgcccgtgtaccctgccaaccacgccgacattatcttcgacatcacagaaggaaannngcnngactcctttgacatcatcaagcgctacatggacggcatgactgtgggtattgtgcgccaagtacggcccatcgtgggtccgtttcatgctgtcctgaagctggagatgaactacgtggtcgggggtgtggtgtcccaccgaaacgttgtcaacgtccacatctttgtctccgagtactggttctgagggcccatccgtggtgcagccacacctgtgcctccaggccaagtcattgctacaacaactatgcctgtccctcttgacgtttctcaaattaacatatttgtttgtagcgttaggccaacatgtattaagctgggccag

SEQ ID NO: 2235 - DNA, 609 bp, Canis familiaris
  misc_feature (1)..(609): n = a or c or g or t
ttccttgtacnnggcntctatgtnnncttgttttgactcctaaaaatgcatttttcntnnnnntcgnnattnnnntaagaacttttgactcactgatgggtacagtgagaaannagacaatggataagtagttaatataaaaagtttagctcattaatgtgtccaggaacaatgtgnnnatgagctggggaaatttttaatttcccaaatgccttgagatttatgtgggaaaatgttatttattgaaagagggaaatactaggatatgaaaattaggagagattattgcttagattgttggtttcaaaagataggctccaaataagaacctgcaaagctttttttaaatataagggaaaatcctattttctaggacaatacctctcaggtatttttatggttgttttactgaagttcacactgaaagaaactttatctcaaaaattggaatcatcacttaatttgttttacccaacaaccactgaagcagcagctagtactaaatattggattactgataaaagactcagaacctcaaattcagtgttatggaatatactggttgtttgcagtgtaggttaagagtttctgtttaatgcttctaattgc

SEQ ID NO: 2236 - DNA, 544 bp, Canis familiaris
  misc_feature (1)..(544): n = a or c or g or t
tctttccagannncagtcagtgacatgaacatcgccagcggctgcccccttttctgccccgtctccaagatnnaggccaagaactcctatgtgcgcgatgacgccatcttcatcaaggccattgtggacctgacggggctctagctttctcccaccagggttgggggtcgcgggtcacaccgggctggagcctcaccgtgggtgggcacctgccacgctcatgtccactgggaaggggccgcctcctgggagaggccactcagcctctgagtggggcaggctgcaggcctgtcagtacctgctcgtgggccatcagtacaggtgctcaggcgaggtgagcagagggcgaggtgaggtggcatctcgtcctgtcctttggttggagagaagggacattcccgggcctggccgctcctctgaggagaggtcctgctctgcaggcctggccaggctggcgggcacagagggcactcttgtgtcctcagggcatcctgtcggctgcccctgtggcgagtgcggggcacacactgggccctgctgtcgg

SEQ ID NO: 2237 - DNA, 525 bp, Canis familiaris
  misc_feature (1)..(525): n = a or c or g or t
tgcatatcatgacccttctttgcattttctctctgctttggcttatctantaagaaattactaatccaatctgttacattttgcaggtgaagtcagaaggttaaaatggtctctcccagattttagcgatttcccctccccctcgaatctgagactgttaaacattttccttccatggagactgctccgaacccccagacatgaagcagagcagcagcaatgctcttctgacctgtttcctgtagaaatgtcctctgtgagctgctgtgtgtcccaacatagaccctgcccatggccagggctggtccagacctctgaggaaagggagaagagcctcaggaactcctctaccccaagaaggaatatttttaacagtcctgcttttccattccacaatttcctatatacagacttttttgacaatgtactttgggagaataataagattctaatttctgcagagcctgatagggccttataaaaattttctttattgcttccaatgatttgaacattattttaatg

SEQ ID NO: 2238 - DNA, 491 bp, Canis familiaris
  misc_feature (1)..(491): n = a or c or g or t
gaagcagaagaatcgccaaatgcaaggatatagtacataccttgtccctgtctgagcagcctgtagccggcacgcagtctccccccagggtccccattccagacatgtctagagggtatcgncgtggcagacttcgttaatcaagcacagcatccctttgtaatggacccagacacagcctgcctcactaccctcaaccctcggctctaagcagtccccacgtttattcagagttggcagagaacatgtagcctgcttggtgtttctggcctaaggacacctcaggggtgacaggacctgggcagagccccagcaccaagagtacagtcaaaggggatgacggaggtcctggtgctggagagccctgatctctgaggacctgtgttatacctgcgtgatgaggatcaaaccatatatactactgggaggaagactgttgacctaggtaatggcagagtagtaaagtcaaaagagaaaaaccaagtgttggg

SEQ ID NO: 2239 - DNA, 674 bp, Canis familiaris
  misc_feature (1)..(674): n = a or c or g or t
aactgacnncagacagattaacatgacaaaangcacacacatttatttgatattaagagatttgcacagcatgaggggacttcatagaagagaggcttggagacatttataccattttggcacaagaggaaaaattaaaagagtgacaagattcaggaaagagactttgagcttcaagaggtggcaaattgtaggaaggcaagcatatggagggaactagtggtaaataaaggctagttagcaaagtttgtgtaaactctttcttggtgccctctcctctcatgtcacaaggttgttattctctttctggtatgggaaaggggcatgcaccttccaaaaagaggatttatgatcatttcaggaaggtagggggatagcagaaagctcatcctgtgtctgctttttctccattgccttcagctcaaaataatccttatgccaagagtggcatattttgggtggcatattctgatcttctatatatccatagatgaaatttggaatttactttaaaatgatcagtttgaaagaaattagtaaaataaataaataaataaataaataagcaacccagtttggaagggggagtatacaggagtatatatgaataagattggtgatatgttgataccttttgaatcaaggtgataggtactaggtcattatatnnnctc

SEQ ID NO: 2240 - DNA, 553 bp, Canis familiaris
aaggtgtactcctattacaacctagatgagagttgcacccggttctaccacccagagaaagaagatgggcaactaagcaagctctgtcacaaggacatgtgccgctgtgctgaggagaactgcttcatgcagcaggtgtatgacaaggtcaccaaggatgaacggctggacaaggcctgtgagccaggcgtagactacgtgtacaagaccaggcttctcaggaaggagccagcagaagactttgacgagtacgtaatggctgtggagcagatcatcaaatcaggctccgatgaggtggccagaggacaggagcgcaggttcatcagccacatcaggtgcagagaagccctgaagctgcaggatgggaaacgctacctcgtgtggggcgtctccaccgacctgtggggagagaaacccaagatcaactacatcatcgggaaggacacatgggtggagatgtggcctgaggccgatgaatgccaggatgaggaaaatgagaaacggtgccaagacctggccagcttcactgatgacatgatcacctttggctgtc

SEQ ID NO: 2241 - DNA, 568 bp, Canis familiaris
  misc_feature (1)..(568): n = a or c or g or t
cagagcactgcatgacaactgannnntccaccgcnnnnnnggacaaaccacanntaaataatgatgaatagatcaagacttgtaaaaaaccgagaacgtaacgtacttttgaagcatcatcggnnatcagattcacagactctgaggtggtgaaaatgaggggtcctctgtaactcccccaattcactgttcttgaatgagcttctcaaactatttattaatgagtttggctaagccctgctttctctttcccctctctgcatcttcccttggcataggaacttcttttacctgtgtagtgttcttttatagaagctttctgagaaattcattcccatcccagtcacacttttcccaagtattttagttcttaaagagtgtgagtgtgtgtgtgtgtgtgtgtgtgtgcgcgcgtgcatacatgtgtgagactatgggttgtctttttttcacatgtagaattttatccagaagtcccttcactcatgttgaggtgaaaagagataatgttcaaagattatgtaatggatttggatctgtgcgtgtgtgtttttaaagcatttgataa

SEQ ID NO: 2242 - DNA, 519 bp, Canis familiaris
  misc_feature (1)..(519): n = a or c or g or t
tgttcaggggccaganntnngnncngattgtagtgccccgaggctgccgagacttnggctgggacccctgctttcagcctgatggatatgagcagacgtatgcagagatgcccaaagccaagaagaatgccatctcccatcgcttccgggccctgcttgagctacagaaatactttggcagcctcactcctctggtagttggtgatgattgccctggcaggggatctggggaaggctagtttgccatctctcccatcagacaggcagccctccaggtactgccttcagggttagaccttcctaggggtgttgagacaacctcaccagccctgtttggaggagcagctggctctgcttgtagaaacttgggataagggacactattttcttgccctcggggattcagtggtccctcctnnngcctcctggcctgggatcctgaaaggaccttggatgttaaactggtcatggcaggatccagggtttgggaagaaccacacaaatagcccttgacatttt

SEQ ID NO: 2243 - DNA, 563 bp, Canis familiaris
  misc_feature (1)..(563): n = a or c or g or t
gttttttttttttttttttaagacccaaaccaattncttagatattttgaacttnnacataaagaaaatggtaaagatatgtaacctatcactatttttcagtttgtnngtaactataattatttgagtacagaacatccaatttcaaatgaacttcaaattaaattcagttnnnattaaattaaatctgaataggaactgtattgggacatagatcttagtgtagagcatcctgaatatttttgagttttaagtctatttctgaacccaatgtaaattactgtcttgaaataatctgttaatttcagtatcctctctaagcaactcaattgctagtgagagcttaagatgtttagcagtttattatgaagttaaaatcctatttacataattcagaatgtaagattgaataatggagagtttaaatagaaaacatcttattctttaagaacttttccaaatggcctgattatttttcagattttctggattttaaaattttcactgcctttaagaaattaagctgagtttttattttacttgaatgttatcttaaaatgtga

SEQ ID NO: 2244 - DNA, 487 bp, Canis familiaris
  misc_feature (1)..(487): n = a or c or g or t
gtncgtcctggtgatgatactttgtcttcttggggctacagctttggccccagagcaacaccctaacccacctcaggagcccacccnagctccgactgtggggnntgtggcannttcagggcctgaggtgaccgagccggtcccggctgctnnaggtgagggcttggcccaagctgagatgctggctactgagtccaagtcaatgcacatggttttggcacctatgattccccaccctgatgaggagccacctgcacccttggccacccggtggaggagtaggccctggcgcctgcagtcagggtccccaaagtgccagggccgccacctgcctctggagcaactggcttcgacccctgaacaaccccctgaaccacctcaggagccaccccagctcctaccgcggggctcgtgatggctgcagcccaatggaggcttccctccccgtcattgtgctgtttccatattttgtttttctttaacctct

SEQ ID NO: 2245 - DNA, 526 bp, Canis familiaris
  misc_feature (1)..(526): n = a or c or g or t
cctgtgtgcagtttcaggaaacggctgctccaaagcctagcntccggcagagcaacatcgagaatgggatagccacccgatcatcgacatcagaacgggtgtccgggagtgtcgggagatggctggagagtttgcccaaagccctaagccccagggcccaggaggaggccatggccagcgtctcgttgttctgctgggagtgccccggcctgcccacccaggagccacagagtcacctgtctgaggatgccttcatgaacagcctgcccttcatccccagggccagcacacagaggcagcaaggtgacctcaaaaccttgctggacaccgaccacactctggagccagtgggcaaatcgccctgctcctggagccagaagctggaatccttcctgcccagcttggtgctgcacacaatcctgaagcgaggccgccctaagggctaccggctgctcctgccctccacgaagtcacagcaggctcctgggtgaatggctactggagctccagcccatgtgtggacacg

SEQ ID NO: 2246 - DNA, 622 bp, Canis familiaris
  misc_feature (1)..(622): n = a or c or g or t
tgtcttcctggctcctgttttaatgctctctctctanntantgcatctgagagataataatgaagttcaagtccctggattctaatgaatgaaatcacacagagtactgaaaaacagaattacagaannacacaaatgagtaaaaccatgttactacttcatcctggaaacattacagacagctgccccagtaagaagtcacttggtagagaacaagaggacacaagcagtgggcagcagaagaagagggagaagcaggctccccactcagcagggagcctgatgtgggactcaatcccaagaccccaggatcatgacttgagtcaaaaggagacatttaactgactgagccatctaagcacccctaatatgccattctgaggaacttttgccaaatctgtgggaacccagtacctggaagtgctgggaagctaacatctctgagagttaccctcaaccaacgacaatggaagccaatggacaaatgctgccatttcccaggccaaagagaattttggaaagcattctgtgatttgaactctcactgcctatcacagtagagaatttagaatgcagcctttattggcttttcttacttccatttcattccttcctcttttct

SEQ ID NO: 2247 - DNA, 595 bp, Canis familiaris
  misc_feature (1)..(595): n = a or c or g or t
cnactctccccaggggccctgtcctccactccagatcattcttttagtttagagctaggcagtgaagtggatatctctgaaggagatagaaagtcagattctactgcttacattaccgtgatccctcagtgcataaaggaggaagatgccccctcagataatgacagtggcatctgtatgagtcctgagtcctatcttgggtcccctcagcatagcccctctacctccaggggctctccaaataggagcctgctgtctccaggttccctctgtggttctgcccgccccaaaccctatgaccctcctggagagaagaccgcaaaagtaaaggttgagaaactagataagaaactgaaaaaaatggagcagaacaagacagcagccactaggtaccgccagaagaagagggcagagcaggaagccctcactggtgagtgtaaagaactggaaaagaagaacgaggctctgaaggagagggcagattctttagctaaggagatccagtatctgaaagatttgatagaggaggtcagaaaggccagggagaagaaaagggtcccctagttgggggtgtcaggaatgtgtgcttgtacat

SEQ ID NO: 2248 - DNA, 560 bp, Canis familiaris
  misc_feature (1)..(560): n = a or c or g or t
angaananntggggaacantgttcagtncagagagaagcatccactactgctggtatcagcttaagtaaatattggattagtcttggaccagattattcttttctgtaannagcaaaattccacatacctgtaggtggcacaaacccctgtgctcaccctggcatttcttcagaggcagggtgggtcacacttgttttactttttccctcttcaccaaactatgacacattaagtgaatacggttcctctctggaagtctgtcatgcctacctaccaccctgcctcccaacccccatccccagagcacctcagtgtaggtctgcccccagacagggggttttcatacagagaagccaggaagagccatagaaattgagcaatctaatattcccccagcccattacatatgcaaggttactgagctaggaggagtataaatgatgtattgaccaagacttgcttgagctgagattgccatattcacttcgttcacaaagcagccttcacttgtctctttgagaattcgatggacacataccctgatgagcaaggagcatca

SEQ ID NO: 2249 - DNA, 648 bp, Canis familiaris
  misc_feature (1)..(648): n = a or c or g or t
gtagaagntngtcagttacnnanngcntatnnnnnnnnntcnnnnnntcctataacatgctatcaggtacannncactgaagattttacaaaggtaatgattgttcaaacttcagttgatctgaaaaacttcagatnnaacactagaaaatatgtaccttcacgtaaaccatctcttccaacatctacaaccagactgtataaagaaggnnttcaatttgagaccaatattgagattcaacagcctagtgggttacttgatagtatcaaggaggaaatggacttctataccgttacctagaataaaactaaatgaaaatctggaatggttgacaacactgttttgaagactgacacacgtatgggcactgctgtcacaagacgcctcctgtttttcgaacatatttccctgcatcaaaagggagcaacttcaagctagatcctgtatggatgatcctggtgccacaagaaaaggtgtttgaaccttccaaccattccatctaaaatatgtttcttggaacattttcttgatttaaaatagcttttattttaaatatctaaaacatctcaaaaatcgtagagtaaggtttagttttagaaccacctggagtcatttgcataatgctctcaaagcaaaaatggttcgatt

SEQ ID NO: 2250 - DNA, 550 bp, Canis familiaris
  misc_feature (1)..(550): n = a or c or g or t
cggnnaggannagccattccannnaagacagagatccaaggacaaagctgctactccaagaaaagatgcttccaaacgttctgtactgtccaagtcagtccctgggtacaagccaaaggtcattccaaatgctctatgtggaatttgtctgaagggtaaggagtccaacaagaaagggaaggctgaatcacttatacactgctcccagtgtgataacagtggccatccttcttgcctggatatgacaatggagcttgtttctatgattaagacctacccatggcaatgtatggagtgtaaaacttgcattatatgtggacagccccaccacgaagaagaaatgatgttctgtgatgtgtgtgacagaggttatcatactttttgtgtgggccttggtgctattccatcaggtcgctggatttgtgactgttgtcagcgagcccccccaactcccaggaaagtgggcagaagggggaaaaacagcaaagagggataagataaaatagctttctgaccccaatattgtaannnnnnntataaatgaaatatt

SEQ ID NO: 2251 - DNA, 589 bp, Canis familiaris
  misc_feature (1)..(589): n = a or c or g or t
gtgaccccacgccgggcctnnnnncgcgcnnctgccgcccggccagaactcggcgacgccggaaccnnagcccnnaggattgtggttgttgtagtctcgcgcttcccgacaggctccggcgtnnttcggccgccgannnctggctggtcacccgcccccctcctccgccnnnnnnccagccccccttgggcccaccagccctgcttcacacagagcccgcccgccggcctccctagcttagcctccagccccgtgctattccgtgggcttcctccgttgccgtccttcccagtccagccaggggactctccctcactttgctcgtgctgtttcctctccctgaagcatcttcttcgtgctcaccccgttgcccagctaacgcccattggtccccagaaagcagaggcagatgatgggcctgctctgggctaaccctgctgccctggtgattcttatgaaacttaagatcatgtcactggtttaaaatgccatttcgggcagccccggtggtgcagtggtttggcgccgccggcagcctggggtgtcatcctggagaccccggatagagtcccacgtcgggnnnnnngca

SEQ ID NO: 2252 - DNA, 489 bp, Canis familiaris
  misc_feature (1)..(489): n = a or c or g or t
anannaccatctccaggcccaangntgtcannaagcacatgccttnnnnnnnnntcctgcccccgagccnnnnncagatgngnnnnnnngaatcggcctcactcacctgcctggtgaaaggcttctcacccccnnntgtnnnnnnnnagtnnnngcagaagggcnagcccgtgccccctgncannnnngtgaccagcgnnncgatgcnnnngccnnnagccnnnggccnnnnntttgtcnnnagcatcntnnncgtnagnnnnnannnnnngaatgccnnggagacctacacctgtgttgtaggccatgaggcnnngccccatgtggtgaccgagaggannnnnnacaagtccaccggtaaacccaccttnnncnnngtgtnnnnggtcttatctgacacagccagnannnnnnnctgaccgctgggccgcccactccaggngggtgacctgtcgctgtgtgtgcacatntncaaactaaccatgtcaa

SEQ ID NO: 2253 - DNA, 483 bp, Canis familiaris
  misc_feature (1)..(483): n = a or c or g or t
accatcacatctgagtcagccaggacgggctggtgccccgtggagatggtcgagttggtatcttgatatgctaaatgtttacacctactatatttgttccttagtctttcctgtgtccttctctcccccacctgcccccttcaggtacatttctccagctgtctaattttgtgttcattgtaaaattcagttaacctaatccaacctgtccccttctcggcagcagcacccgctcctcctccccggtgagggaagtcaggcatgtttgggacagcaggaggaaaaaaattctccagctggagagggaaggggtctggtccaggctctccccatccccatcccatttttaccaactggggtgccatgactgttcctccagcctctaccagggacgcctccatgccacggctgctttcaccaagctgtctcagacaagtggggctaatgtacaaaatctgcannnnnntttttacctgcaccatt

SEQ ID NO: 2254 - DNA, 487 bp, Canis familiaris
  misc_feature (1)..(487): n = a or c or g or t
aaatttacacatctnnaggntccgangtcggaaactcagctctatatttatttgagtgctatgacaccagaactgaaagttggcacacaaagcccagcatgttgactcagcgctgcagccatgggatggtnnaagccaatggcctgatctatgtttgtggtggaagtttagggaacaatgtttctgggagagtgctgaattcctgtgaggtttatgatcctgccacagaaacatggactgagctgtgtccaatgattgaggccaggaagaatcatggactggtatttgtaaaagacaagatatttgctgtaggtggtcagaacggcttgggtggtctggacaatgtggaatattatgatattaaattaaacgagtggaagatggtctcgccaatgccatggaagggtgtaacagtgaagtgtgcagcagttggctctatagtttatgtcttggctggttttcannnatgtatggaatgagccatgta

SEQ ID NO: 2255 - DNA, 432 bp, Canis familiaris
  misc_feature (1)..(432): n = a or c or g or t
gnatgttttcatatttacattttaatgataacgtgtattagtctctttngntgtactntannaatacattaagtgantcannnnnaacatacctctttnnnaattgaatattatagattggatgatgaattcttttnnnagcattatatnttnnntactctgttactttatgnnncagttttaatnnnacattaagggannnnagtattttnnnnntaactctgtcaatatctttatccnnagttcctnntgccatttttgtnnncaagaaaggnnnnattacatttttttttttttttttcagatggagtnggtgtattcttggttatcaaaannnncatagtttggnnnntttgacannataaatattcatggtgtgtannnncatgatacatnnnnnnnnnnnnttannnnnnnnnnnnnnnnnnnnnn

SEQ ID NO: 2256 - DNA, 404 bp, Canis familiaris
  misc_feature (1)..(404): n = a or c or g or t
ctcgtggtggtgctcgtcgcaccngagctcgtcttcattctgaacgggtgtaatgtcctgagccgttgttttggttcgattgtgattccgcttagagtgaccagatggatcgtgaagctgctcttccccgtgtcccggacggtcccatccaccgcggccaccccggttcccggacaattgcagttgcacgatctttcctgagtttactgtcctaacctgcgtgtgtgaacgctaagatgcaagaccgcccattctcgcgcttcctgatcggttagagggcagaaagcatcggaatggaaaccgcgtcgtcgtttataagttgtttaaagatgggtctggctcgatcggccaaaccattccgtcggcattaacatcaagaaaactagcgattgggatccctgagt

SEQ ID NO: 2257 - DNA, 622 bp, Canis familiaris
  misc_feature (1)..(622): n = a or c or g or t
ttggattcttgggtgctggatactcatttgtcatctcggccatctcaatcaacaggggtnntangtgnctcatnnacaatagcacgtgnngctaccccttccatgacggggatnanntcaatgatgaggncttatggagcaagtgcctcaagcctgaggatgtggtgccctggaatctgaccctcttctccatcctgctggtcgtaggagcgatccagatgcttctctgtgtcatccaggtggtcaatggcctcctggggaccctgtgtggagactgtcaatgctgcggctgctgtgggggagatggaccagtttaaatctcgttgaggagctgctctaactggacggtgtatgggacactacattagacttcttcctggggttggcaattcctacctgcttcctaactaacaaagcttagggacagcagagttattccttctactttccaagcagcttagctcaactcagatttttatgcttttttcaaatgaaaaatagtttggtcatggaagttaggtttctttatctttcagattcccttccttccagaattgaagaataggttcagagcaaattgttcgtaatttgttttcagtgaaaagtgtgtaaggtcacacct

SEQ ID NO: 2258 - DNA, 549 bp, Canis familiaris
  misc_feature (1)..(549): n = a or c or g or t
actactccatgaantaattgaatccntggttgggaaattgactttgtttcattttcctgagatcttgtaaaacatgacttccctttaaaggatctaggcagtgctcaatttaaaaaaatgacaccataagaaaaaaaaaagtcatgtagcgatagagcagtatatgctttattagaactaggttaaaagctgtttgttgcctaatggagtagaagttgctgaggtcaacaagtagactgaggtctggcataatatatgcccactcgttattgtctaattatattcttttgacaacaggcagcatttatcacagcattaattcaaatgagagttttggctatcaagatgtgttgatttgaaacataattgaatgagacctgattaaagtctgactttcctggcctcagtgttttgcaggttggctattcccatgtatcagccccatcactccataaagttcttagctgcaccaagcaattggtgaacaaggacaacaacaaaagcagcatacattgtatggatttatctcaacgctattgtttaatggct

SEQ ID NO: 2259 - DNA, 556 bp, Canis familiaris
tgaactgctgtatgcaacatgttttccattataatccagtcaaatttatatccaagcaactgaaacaaaattttgagaaatgattcttacctttattatgtgtgatgtgctctgatgcattctgttttgttctttttttcacttttttcttaacacaggtcaggagctactttggctataacctacagtttttaaaacaacgttctaggttatgtttgctcaaaaatggcttattagatttcctttaataaagacttcctacatccaagctccgattttacctccccatcccagagacagagtggaatggcattcctcatccaagcccaggattctgcagacttgctacatttgatagaaacaaaactgactcctacaataagtcatgtttttccttaatattagtggccagaaaagcttaaacgtctggaaaaagacaacccaaacaatagaagatccagaagtgatgaaaaccaacaattctactgaaatatgacttgttcagccaataggaggccactgttctgcagagatgcttatttgggctcttggctga

SEQ ID NO: 2260 - DNA, 525 bp, Canis familiaris
  misc_feature (1)..(525): n = a or c or g or t
ttctcagggcttcactgtgagaaggggctgattgagaagtcagcaggnnatgtnnncgccctgnnntttgacggacagacctacgtcgagtacctcaatgccgtgactgagagtgagaaggccctgcagagcaaccactttgagctgagcctgcgcacggaagccactcaggggctggtgctgtggagcggcaaggccacggagcgggccgactatgtcgcactggccatcgtggatgggcgcctgcagctgacctatgacctgggctcccagcccgtcgtgctgcgctccaccgtgccggtcaacaccaaccgctggctacgagtcagggcacatagggaacnnnnnnnnggttcccttcaggtgggcaatgaggctcccgtgactggctcttccccgctgggtgccacacagctagacacagacggaactctatggctgggtggcctggagaagctgcccataggccaggccctgcccaaggcctatggcacgggctttgtgggctgcctgcgggatgtggtg

SEQ ID NO: 2261 - DNA, 708 bp, Canis familiaris
ccccactttctatatcctcatgatgacagatgcttcagaggactcttaaagggtgtagtttttgacatggagaacaaaggcaaaaggaaatgtagataaaattaaacctccttataacttgtagcccactgacaaacacttgagacaggtagagtaggacagtcctccaggaactcccaactgtcttaatgtaatgctttgctggtggcaaaatgcaatcttagcttgacaatagccaggcctccagaatcctgtgatgttaggagttagttagacagtgaagtagttagggccaagggccccaacaagaaaagatggagtcaggacagttaaaataaagcagcactaacctcctgttttgcagcttagacaggaccatgctagcattctgttttgaagcctttcagaaatgacttctgcaaaacgtcctaagataaaacaagtcaccacaagcattcatcaccatcctaggcaagaggtacttaagacctaagcccccagatgtcagccaacaaaagaccatcagcacatggacattaacctgataagtagatacacaaccaaagccctgattgtcccaacttagcacacccccattgtttaagatagttctgctaaagagctcataaaatcccctaaacttagaaaccccacgggcaaccccctcaggtcctcttcccctttgagagctttgtgctattgctcaat

SEQ ID NO: 2262 - DNA, 445 bp, Canis familiaris
gagtcccgcccgcgctcggccgcagaaaaccgccggggggagacggcctgtccccgcgcgttccttcctccctgcaggagccacccagaaacgcttaggggcccgcaaaacaatgcaaaatccctgacaggcgtttcccaaggaagagagcgcagggagcttagaaaaatctaacaacttcggtgtttttccttcccgggtctcagggaacaggccccggaggagtgcgtccctccggacaccctgaaaccttccccttcgccggagttgcaaacacactgtatatatatttatatcaataacatatagggtaggcatgtctgtatgtatttacctcatacatatttctataaactccagcgtctagaaggggtggggggtaaataacacggaacggttaaaattatggagaagggataataactgattactaatttgaaagtaa

SEQ ID NO: 2263 - DNA, 486 bp, Canis familiaris
  misc_feature (1)..(486): n = a or c or g or t
gcccccatgtactgcagtcnctgtggtcccctcggagcacaaggttcccggtgcagaagagaacagatcgagctcagaacagctcagacaccnngtctcggatgaatgtgctcacctgagccaatggattctggggcccatggagcagaatgtnctcagactcttctccagacccgatcctccccacccccatcccagcccaggggttagaaaaaatctgccttagactctgcagtgaagacaagcatttcaagaaggaaataattacctggatcaaccatgcttaactgtgacgcctcattaactgtccactttatcttcaccgaaccagtcattcttcgtttgtgatggccaatggatttttaatgtggttttcatatcaaaagattgtgttgtgattaactggctttttccacacacccccgtcccccaaataaattctcaggcagggagtgtctttaaaaatagtaagggaatagatatact

SEQ ID NO: 2264 - DNA, 584 bp, Canis familiaris
  misc_feature (1)..(584): n = a or c or g or t
gatttgagattttctgacaaaatatctgtcagcgggcttgcatctccagaagtattgcatgttttaatttnntgccttaagaattaaaactnngtctctgtggggcagtaaaaatatcacagttcttttttaactaatgaattagtttgggctgttgatatgagctgtccctgttgctgctgagcgctgaacgtaacagacgggtgctggaccgccctcccaggagcagctccgcgtttccgtgctgcaatcgtgggttctctcggaggccctgactgtcttctgtcttcagtgtcgtaaaggttcttgccttgaggaaagctcaagctcagagcatcctggaggtcctgaggatcattcagtactgcacggagtctctgggacggcctcattgcttccacccgccgtgtatacttttcctgatggagcttctcacctgccagaaagagtttaccaagtaaggatcaattacagatctgccaggaaaacagggctcatttcagagaaatcctgacgattgtctttaattagtgactattatttccacataggatacaaatttatgtttttggccaattctttca

SEQ ID NO: 2265 - DNA, 609 bp, Canis familiaris
tggtgggaattttttccataatactccttgtcaccgacaatggcctctccttgtgcatacatgccttacaccgtgctgagctggatattgtccttgtgctgaagcatccagcttgtacttggcaagtgtgtgcgtatggtcctttccccatcctgggtaaccatgttaagttcctgaaaagtacacaggaagaaaattcaggtgtttgcttatctttgtaatgctacagcacttggaattgcaccatggagcatgctcagaaatacttagtttgtctcctgctgggatgcagaaggtctcgatgtctgctgagaagtggtatgggaaaatgctcagtcgtttagtagagtagcgacataagcattggtcactagcaactgtcgtgttggtttttgatacaggcttcatgctggcttcatttgccagtcgtgttgtttagttgggaagtaaacaggaaagggtcttgagatggagggctggggccagttggtttgacactgatcagtccctggctagggcaggagtttgttgctgtactctgagtggcatctcctttgtcaaaacatagccaagatgtgaaattaagattgtggttctctttatttaaaa

SEQ ID NO: 2266 - DNA, 695 bp, Canis familiaris
  misc_feature (1)..(695): n = a or c or g or t
tcaccagaacttgacccactgttcccgccatgcctcagggcccaacatcattcttccaggagagtcctccccaggtttctctaaggagattgcggcagccctggctggagtgcctggcttcgaggtgtcagcagcggggctggggttggggctggggctggaggaggagctgcgcatggagccactaggcctggaggggctccacatgctcagtgacccttgtgccctattgcctgaccctgcggtggaggactcattccgtagtgaccggctgcaatgatgggcctcctgggcacccctctccgtggccctgccccatcactgttcctttcctcccttccccctggccagtagactccactctgccccaagatcctctttctaatgtgaatgagggatcccaagagtgaggaaaagcaaaggatttgtccaggtggcccctgaattctgcacaaggggtgggcctaggggagctcaagggagggcctaaagcacttgtaactttgaaccgtctgtctggaggtcagagcctgttggagagcaggggtggaggggagccccggaggcagggcttgcccagatgcctaggggtgggcagtgccagcccctcctcaccactcttcccgttgcaatggagagagccagagtggatattattttttattaaatatattacacgttaataaaaaaannnn

SEQ ID NO: 2267 - DNA, 619 bp, Canis familiaris
  misc_feature (1)..(619): n = a or c or g or t
agaaataagtgnnnccagtgaatctctgaaaannnnnnnnnntgnacttcgnntctactgtgatctcctaatgcagcaagttcatactatccaagaatttgttcaccatgatgagaatcattcatcgcccagcgtagagaacatgaatgaagcctcttctctgcttagtgccacatgtaatacattcatcacaacccttgaggaatgtgtgaagatagcgaatgccaagtttaaacctgagatgtttcagctgtcccatccggatcccttggtttctcctgtgtcaccttctcctgttcaaatgatgaagcgttctgttagccatcctggttcctgcagttcagagaggagtagccactctgtaaaagaaccagtgtctacacttcaccgactctcccagcgacgccgaagaacctactcagatacagactcttgtaatgataatcctcttgaagacccagatagacctgttcactgttcaagaaatacacttaatggagatttggcatcagcaaccattcctgaagaaagcagacttatggccaaaaaaaaatcagactctgaagatcctcttccatccttctcttcctgaggaaacggaagtgtccaacttcctcta

SEQ ID NO: 2268 - DNA, 383 bp, Canis familiaris
  misc_feature (1)..(383): n = a or c or g or t
ctaaatctgttgattgccaacactaccactacagtatcccacaaagggctttaggtgtcagctcagtgcgacctcctttaactcnnnnnngctgctnnngntgccggtatagccttggtaggtggcttttagagctctaccatgtttgatggtgcatcttcaaatttatgcatcaagctaaagacatgtccaagtccattttactttactcagtgtttttatgagaagttttatggacccccccccattgtgttttaatttggggtgaccatgttcttatttgattattacaatgatagtctgttttcaagtgatgcttttgtttgaacnannataaaatttagtgaaactttgtaatgatcttnnnnnncttttaattgtaa

SEQ ID NO: 2269 - DNA, 513 bp, Canis familiaris
  misc_feature (1)..(513): n = a or c or g or t
gccaatgtagaatgaggnncaaaaacttttttcagagtaaggatgaaaccaaaaggtgggagaacagtgaatgtaagttattaaagaaatgagcaagaagcatgcatcagggaaaataaatgcttcttatattgtcataaccatagagccctcccctcacatacttgatgatgcatttattttggaaaatgccattttatgctgaaagactggcatcgaagacttcactccttctcaactacatcagaagcactctcgctctttgggagaagctgcggcccttaggatcggactcccatctcccgtgacaggtggcctcagctgccctgagaaacatggtgccggacggacagggccttggaaacctgagaggagtnngcnnggctggactgaggaacatgtaaatatcttccgccttcttggtcaacaaggatgaccatctttctttagtagaggtaatcgtgtgtatattgtgactgtagtttgtgacaaaaacacaatgatttgcttcga

SEQ ID NO: 2270 - DNA, 478 bp, Canis familiaris
  misc_feature (1)..(478): n = a or c or g or t
acccactctcccttatctaggttnnnnncccccctccccttgtttttagncgtcacatccctgccctggctgcatggtggagcatacggttccaatataagcaaattagcataatgccaacctaaaaaaagcagccatagtcccatccctgccacagtcactggttggcagtgggcatgacacaatttgggacaatgagaggagcaattttactgtggccttttggggaagtttttgtctatttcacgtattccaagagaagttcatcggcaatcttctctttctgcatgtattccaaaagtcaggaagcataacaacaataaaaactgaaggaatatcaccaaaatgttgtatggaaaaaaaaaaattaaggagcccctggattgtgtgggcagctgtcttccaagcaaaaggtccagcttggttaaataaagcaggcatgcagaaagcagagatacgatctctgggccgccccggt

SEQ ID NO: 2271 - DNA, 470 bp, Canis familiaris
  misc_feature (1)..(470): n = a or c or g or t
gcaaccggcagtcctggtgcctcaagcgctacgacctcgagtactgggccttccacgacggccagcgcagccgcctgcggccccgcgacgaccccgaccggctcggcgtcttnctggattacgaagccggcgtcctcgccttctacgacgtgtcgnnnggcatgagccacctgcacaccttccgggccagcttccaggagccgctctacccggccctgcggctgtgggagggggccatcagcatctcccggctgccctaggggtgcgcaggggtgcgccaggcctgcccggctctggtcgcaccggccccgtgtggctgggctaccgccgcaccgcgtcctcggacctccccaccgccaccggggcacttagaccaccttgcatttacggtccgggtgccaccaagggagccctaagcatcctgaccatgtcagaatgcatttcccctcnnccacagacctctccctccg

SEQ ID NO: 2272 - DNA, 399 bp, Canis familiaris
  misc_feature (1)..(399): n = a or c or g or t
tgcagaccaggtcagnntcattccctnnnancgccgcgtgtcnnncctgtgcggttnnnnncacttgtatttgaatgattgtgcgaatcnnnnntagatgtcnnnnntagatgtgcgaatccnnnntagaggtccgctcccgggactgccggttccncnnaggcaggaacgtgtccgtccgtccgccgcgtggtcnnngctcccgcacaggcccggtgcccgctggagggcgctcaacgcaaacattagtcctnnnttcgtcctctgtatttgaaagccagtgttggacgaagtaactactggaggaaggaagtggcagctcggactagggacctccaagggaggacggtcaattagaccgaagcgggtctaatcgnncgggaatagggatcccngggt

SEQ ID NO: 2273 - DNA, 555 bp, Canis familiaris
cctgtgtgagttttttattggtacaaacgttgtatttaacactaggggttttgtacagttttttgccttttctactagaaaacaatgtaaagtgatttcacaatgtgaagagaaaaaaaaattgccactatgaccaaacgcacagtctgttctgcagcaacaacgggattcaatcaactcaaagtcgtgattcagccgtagaaatgcttttcctttaccttgtttgagcttttcctttctttcctgttttgatttgcaaaagaaaatgtcttttttgtgtgaacttgtgttgtactatgtagaaaattatggattttactttaatggtttaaaaaaaaaaggcaagaagagcctttgtcgcttttctgacctgatcacagagtttgtgtagtggattaaaaaagaaaaaaaaattgttacaagtttggagcaagggagtatgtgtttaaaaggaatctccttcctttttgtgtgtttttccttttgtcccaatggggaacctaaatctgttttaattgcacagacacacggacaaaaagtcattttgtatctgcc

SEQ ID NO: 2274 - DNA, 418 bp, Canis familiaris
  misc_feature (1)..(418): n = a or c or g or t
gtttnnngacacccagggatctgacccntgannttntgtgactgcngaccnnngagccacccccacccccagcagcgtgttctggtccnnnnngcccttccccaactccagcctcaggactatgggagccgttcccttccctacccacctcctgcccagggagcaaagccataaggggtgggggccncnntatggcatctccccagaagcccaggcctcaggaggagtgagattcacctaggggtggcactccctagnnnctgtactccggaggggaatggacttgctttcagtnctgcgactgtccgaggtggggggcaagcgggggggttgtctgagacatgccctcaccaccctgtgggtctcagggaggccggnnnnnncctcatctttctcatggtgctatccctggtgctan

SEQ ID NO: 2275 - DNA, 460 bp, Canis familiaris
  misc_feature (1)..(460): n = a or c or g or t
ttgtgatnanntgctgcatgaaaagtgcatgggggaccntgtgcatctgtgcatnnnnnnnnangncnnnncnngtcagatcagatgttcatcccaacatgacagtattccnnnnnnggatatgacttctgtgnnnnnngctttgtgaaagaatgtgctttgaatccangnnnnntaaaactttttaaaatcnngtcaaccacttttcaacattaagagttcacacaactactttcatgaattttttaatcccattgaaaatgtaatattataccaggagtattccagnctgctggaatacagggacattaccgttcatatgaattttggggtttacacaaccaattttaatgctatcggcnnngtaatataatttgtcatttttattagaaatttnnnttcttcatgtgatatcatgaaactgtacatactgcggtgtgaatttttnnnnttttgtttt

SEQ ID NO: 2276 - DNA, 231 bp, Canis familiaris
  misc_feature (1)..(231): n = a or c or g or t
gcagctcctactcaggactgcttggctgtcccttccnnnnnngcacctcccagcccaccgggctggagcagtcacatcctgctcacgctgaattcgctgcctgcactgttttgccatatgtcacttaccatcactggaaaaaacatggtctctttacagcttattgtccaccccagcactatggtggtcccgtgnnnanctacccacctgatnnngcccagggtctagaaa

SEQ ID NO: 2277 - DNA, 511 bp, Canis familiaris
  misc_feature (1)..(511): n = a or c or g or t
agcctgnanctacanagcatgttctgnncntccaacangagtnnngcaaatctctgccatngtaannnccaattccacatttgnnnnnntgnctaatacagacaactnnagtcattttgacccctggggccacatacaaagaaagcagcccagctgatgctgccaagagaaacggctaaaggaacggacatatcccaccgaggggcgtggggcctttcacgtggactgcagggagtccacctggtagacattctggttggagggggtggtgaaatagagctgctgcgcggggacccgattgtcacaggggctgctgagtccaagcgtcctctcgaagtccagcagctggcccatgaagttgaaattgggggagatgttggatttcttcatcttgacaatgtcgtaagcatcgttcattgacagattgagcttctgcataagataagccacagtgacagtgaccgagcggctgatgccnnncaagcaatgcaccnnnacaccacagtnnnng

SEQ ID NO: 2278 - DNA, 497 bp, Canis familiaris
  misc_feature (1)..(497): n = a or c or g or t
ggacaggttcctgncttttnntcnnnnggggcnaggaaagccagccgctgtaaacaggccattatagctgttcagtggtaccttcgaatcagaataatttaatgcacgaggttgccccgagatgaagctgtgacattaactaccctgtgccgtcatatgacctcagttggcggcagaagccatgggaacccagagcttggccttcggaacattatcggggcttttgtgaagggtccttggccctggcattttctcccggcctctgtgaatcccactggtttgctgctgtggtttttgaggagagtctggggggacggaggggagaagcagacaaacctgggaataaacccactgcaagctgtgcctagttggtgaagtggtgaaaaatggaaatggcccgcacatgccgggggctctggaggaaagtaattgtgtattttcggaagggctttgatttatctgtgtttaatgtactgattatgtatataattcacttt

SEQ ID NO: 2279 - DNA, 603 bp, Canis familiaris
  misc_feature (1)..(603): n = a or c or g or t
acnnggtagttcatgctgacaacgcccgtgtcaactttnnnntnncnggnnnngncnnncnnnnnctgctgaacgtctatactcagtnngctgagagtggctactcttctcagtggtgctatgagaacttcgtacagttcagatcaatgcgccgagcccgggatgtgcgagaacagctggaggggctcttggaacgcgtagaagttggtctcagctcttgccagggggactatatccgtgtacgcaaggccatcacagctggttacttttaccacacggcccggttgactcgtagtggctatcgcacagtcaaacagcagcagacagtgttcattcaccccaactcctccctctttgaggaacagccacgctggttactctaccatgaacttgtcttgaccaccaaggagttcatgagacaggtattggagattgaaagcagttggcttctggaggtggctcctcattattataaagccaaggagctagaagatccccattctaagaaaatgcccaaaaaaataggcaagacacgggaagagctaggataaagagaaggggaggcaagccgaactcaacatcagctccttttccttctgtacg

SEQ ID NO: 2280 - DNA, 579 bp, Canis familiaris
  misc_feature (1)..(579): n = a or c or g or t
gtgttctcacattcacatgcttcctctacagaagnnaacaagaaagaaaatgtatatccttctttctcacagagtgagaaacaggattatgaaacccatcagaggaattcagaaatcaattttatagagctaccagagactgaagataacccagctaaagcagaaagtgtagatgctttaagtgataagcacagcaaagaggaatgtgctagtcttccaagtaaaccatttaatattgaaaaatgttgtcagaattcttcctctactgtttcattggaagatattgcgtcattaagtcggcaagaatcctcccagccttatttacaagctctagtttgtcctgtttgtaacctagaacaaaagacttcagatcttaccctgttcaatgtgcatgtggatgtatgcttaaataagggcattatccaggaactgagaaaggataaagttaacctagctaaccaacccagagaaaacaccaaaagtactgataactcaggcagagtgcagaagactgcaacaaaaccaaaaaggccgggattgatgacaaagtactcagcatcaaagaaaacaaaaccaaac

SEQ ID NO: 2281 - DNA, 546 bp, Canis familiaris
acgcacatttccagttgtgactttcatctctcccttgtgttctgtctcatttgtgttcttgacctggacctgcaggtgtgtagacccttctctctgtccttccttgcatgtgtccacctgccagcctgagtctcatcccctgggtcccacggctgttctgttgggtgggcttcccacctcctctccctgccttgcccagaagaggcaggagaggcagggacccctcacagagagacggtgtggggacctgggggcccaccccaggcaagtgaaaccagatgaatggttgggcagcaccccctctgagccacaggctgggtcactgaggggagggccccaggtcctgccggcccccgtgtgccccccaacggtggctgtcagccgggtgggcctcagggctcctcccacccccagccccgcacacagctgggcttgtgcccgctgcggccacacccctcccactggtgtccaccctgatttggagttacattttgatgccatgaagacactttgtttatatataatgtttatatattttaaagattt

SEQ ID NO: 2282 - DNA, 178 bp, Canis familiaris
ccagcagctcttaacaaaagcagctgaggctggattacaatggggtgggggtggggagtggtaaaaatgaccctgtttcaagaagggacaaaaaaaagcacatactcaatagattttgagtgtggtattctgtatttttgcagcttatattttccagatgagcagtttagaaatatgt

SEQ ID NO: 2283 - DNA, 606 bp, Canis familiaris
  misc_feature (1)..(606): n = a or c or g or t
gtgaatngattactaaagaactccccaaagtngaatatctangnntaaaaagtttccanggctcccaaagccatcgaatcctgtttgtaatcattgctttcttttctgcaggagcctgaatcacccattcttctgatggtaataggtgtgatgctataataaaaagcctgcccagatatatcccccaactctaacccttggcttctagttttgttgtctgaggtaaggatggggtggagaaaaacttagggagagagaagtagtctatcctcttgttagggagtgaagatggaacccccatgggtcccaactactatctggtaagaaatgtggctgctgagcctcgggctgcacttcatcccaccatcccttcccatctccggaactcttccaagggcaggatctgactacaaagcttcagcactttatgaggaacaaggtatatgcatatgtgagaagtcattttattctctatgggttttgttctcctatatgttaaagaatttgaccagatgatctgggcttcaacacagggactctattgactctggttccagggaaggttcttgggccttggccaactggtcctgtctcctttcttctgca

SEQ ID NO: 2284 - DNA, 538 bp, Canis familiaris
aaattacatggagtcactgtctcttcttcttttcttcttttgcaacaactttacacaaacgcattttttttaatgcctccccgccccggttttgtttttgttttcatgaggaatctgagttctctctaacccagcttactgcgggacataggaaagctacgtataaatacctttggtgatctcggtcgggtgtgagtctgataagtgaaccacgatctgcaatcttgtacatgatatagtattttgaaggttatggaaccttatgaaaaaaaaatagttaattagttcttttttttcccccagaggggaaagttacattctgcaaatagtctgtatcttattttactgttgaacagcaattgctatttatttttttattgcctagaacttctacatgttgtgtagggatcccgtagcgccaccaggtaaattccaaactctcatctggatgttaccaccagacatcagtacgcttgtcatttcacatgtatttaatgtgactgttttttcagtactgtatgtgttaatttctactttt

SEQ ID NO: 2285 - DNA, 643 bp, Canis familiaris
  misc_feature (1)..(643): n = a or c or g or t
tatgtgtatcagtcaatcgnnnnnnataatnactgggtagatnganngtcctgttctcggactgaattatcttctctttggnntagtcacaaggaattaataaacctagannngaatgtatttccatcctctcagtttacagatacatgtggntaaaatgagagttgacccaatttaagcctgttagagtcagttcttatcccagcccacataggaattaagcactaccccagatgatgcttacccaggcatttgggggtggcagtgtgaagggactagagtaaggaatatatatatttttgagagtgccccaagttatttctactgtgctttactgtgagtgttgtaacattttaaaaatacttctgccatagctctttgggacttggtgtgttaaggagccagtggtctcaggaagtatacgaaaatgagtcattaggaccttcaactgtgtgggactgcattgtttgcagtgacacaaccttgaaagtaacaaaatgaaacaccactccatcaaggaggtttctttatgttgccactcccacttaaaaacaaactcaactagggcaaggagtatgttttgtgttctatacaaaatctagccgactgcgggtattcatattttaattgttgaatgacttac

SEQ ID NO: 2286 - DNA, 629 bp, Canis familiaris
  misc_feature (1)..(629): n = a or c or g or t
tttgaaacatccctgtgtttgttgaatatannttctannagccaccnnnctctaccatctnnnnaaagagggccaaaattaaaatttgaatcatctccaaacatgaatctaacaatgaaaaaaaagttagcaatttctttataaaaagcaaatctgttttgtaattacagatttttatacaaatttcttgtatcaggaagaaatatagattttgttatgttactctagcagtttttctgagtctcagactaggaacaaattagaagtatacccagtaccagaaaatgtttgaattcactcttatttttaatcagtcggcatagtaaacatgtcagtactaagctggtagtggctnnnaaggtacatttaatcagtaattcaggctttacatcatgtannnnnnnnnntctgtatgaggggagataatgggttaaacctgtgtatcatatgtgattttgaaatgaacaccttgaatagcactaatttttatttgtaatatttttctataataaaatgagtagcattaggaaaagaggttttattttgtaaacaatcatatgtgacctcaagcattctgtagttaatnnnnnagtaaagcccacannnnnncttctaagatcatgtatgag

SEQ ID NO: 2287 - DNA, 488 bp, Canis familiaris
  misc_feature (1)..(488): n = a or c or g or t
cacacatggttccctccacactccacctcctgattgtannagtcatgaaatcttagacccctnncaactatatgccttttaatgacttaacattttattttatgcttttaaaatgttctcacacataatttcctttgatccacaaagaatcctgactggtgggtatgtcaagcagtgtctcattctctgggtgaggagctgtggccccggtgctcctgtgacaggtgctgttgtacacactcctttgcgtggccctcgggccccgggcagtgaaggtttccttgtctggaggtcaataaagcctttgactggagatggagagctaaacttaaggtttagggaaatacaaaaatgggcttgaacttgtgagacctgggttctacccacagagtagctccgtgatttaatcaaaccacttaaactctgtattctcatcctcaaaactggggctgttcaaacccaccccatggagtggcttgngnnnnnnt

SEQ ID NO: 2288 - DNA, 388 bp, Canis familiaris
  misc_feature (1)..(388): n = a or c or g or t
ccganncaaaagaaggtttgtggctggtgtgcccgccaatgagaagactcggagaggaattgcatnnnnnnnggaccgtgcgcgagccgagaggacggcgnctgcgcaagggctctggaaggacgctaggccaatcgaccccgcctctggtgataggttgccggggagcggtactttgttagtctcgttgccagggggcggcgccacaactgtcggctgtttccgggagccacacctccgcggccggcgcagcaggcttttgaccgcagcggttgccaggcaactgggagccgctttggcccgtcgtttggcctccttcctccccttactggcctctctgatctccagatcctttctttaaccccnnncaggacttccccagccactt

SEQ ID NO: 2289 - DNA, 251 bp, Canis familiaris
  misc_feature (1)..(251): n = a or c or g or t
tcagtattaatcatcttccaatggaaaatcattacctttagagtgcattcggggttccnnnngttaggnnnannnnnnnnnnnggcnnngaccccccaggcncnnctgtagggctcagagggcgccagtgccccatctgaaggggtannnnnnnnnanctgggggnnncggnnnnnngtcccaggattgccncagcatgttcaatnnnnnngaggtttcctatatcttcaagcacttatatcanngtctgt

SEQ ID NO: 2290 - DNA, 612 bp, Canis familiaris
  misc_feature (1)..(612): n = a or c or g or t
aagaaggannnnnngtgagtgagggaaagccaaaagaagaannaanacnagtgagtgagggaaagccaaaagaaggaaagctagtgagtgagnnanngccaaaagaagaaaacttagagagtgagggaaagccagtgaatgaggaaaagccaaaagaagaaaagccagccatcgaaccaagggctgcaggaaagcgcccagctggggatgatgtacccaggaaggccaaaagaaaaaccaacaaggggctggctcagtgcctcaaggaatataaggaggccatacacgatatgcatttgagcaatgaagagatgataagagaatttgatgagatggccagggtagaggatgaggtgaagaaaaccagacagaaattgggggggtttatgtggatgcaaaaaagtttacaggaccccttccacccgaggggcccaagggaactgaggggtgggtgcagggccccacagaggggctttgaagacattccttttgtgtagtgcccttggcaggcatttgccctgtgctttaaccttatgctaatacttgctttagctatcactctgttatccaactgcaacccttgatgtttcagtagatttttgtccattgcat

SEQ ID NO: 2291 - DNA, 480 bp, Canis familiaris
  misc_feature (1)..(480): n = a or c or g or t
cttgncttttnntcaccctttaaagtttatgtggtatggtgannnaaatttttggcattgnncnngctttgtcccagaaatctaatatcaaaattgtatnnnctaaacaaattgacccttgtgggtaattggtggtccacattgtcaggtttttgaaaacatgttcctgaatccatcctttttaaactagcaactgacccaactgcctaccattaagtctgttatataattgttataagtgagttcctttaattagagcacggagacttcaggaatttgccatggaaaagataatcatctactatttagtatttccatcttatcatgaaatcagtcagccctttatcagaggaagccagggaacagcccacctagttgacagaaatatgccagcgtcaaatgagcatttacagtagagacagaggttataggtcagacctcagatccacctctttctggctttgtgacttagtttaatta

SEQ ID NO: 2292 - DNA, 442 bp, Canis familiaris
  misc_feature (1)..(442): n = a or c or g or t
acccactcnnttggtggtgccgcctgccatgganntgccccgctggctaccagtccagagacattnnagggtccagggtgtgggtncagggccttcacagcnctccgtgtggatggtgtgggtnngggtgtgagtgtgtatggctgtgagtgtggccatggcagcgtgcttgtgggcactgactggaagtgaggtgggcaccccaggggcnnnnagtgcttcnnnnnncnctgaaagcctttaacttgcttgctcctcctcggagnnnnnnnnnnnacattctggacaaggccaaggccagcagaggcagcctcgggactctccagcctcctcacccacctcaccagcaccttgcccatttgaannggactgccctccctcctcccctgccttccaaggcctgtggcctgagattcagagccacagtcccatagtccccttg

SEQ ID NO: 2293 - DNA, 125 bp, Canis familiaris
  misc_feature (1)..(125): n = a or c or g or t
ctgctttttttaaannactttacctgaacagaaaaatataatatttttcctttgggacannnnacttacaaagnntcacttcattttaagagtaaaaagaacccatgtgagaactccactatcag

SEQ ID NO: 2294 - DNA, 411 bp, Canis familiaris
  misc_feature (1)..(411): n = a or c or g or t
ccagcttcacgcagcaccaccggcctgtcattgccgtgcacagcgggattgcccggagccctcacnnnnnnnnngcgntgcacttccccaccacgtccatcctgccccagacggcctccanntacttcccgcacacggccatccgctacccgcctcacctcaacccccaggacccgctcaaagatctcgtgnnnnnggcctgtgacccggccagccagcagcctggacnnnnnnnncnacgcccggcacgtcccctgcaaaccgttcctttgtgggattaggaccaagggatccagcgggcatttatcaggcacagtcctggtatctgggataagaaagatttcgtcccacgccctgctccntcgtnnngggaatcccagggggtcgcccagccggcccccggcccacgtt

SEQ ID NO: 2295 - DNA, 523 bp, Canis familiaris
  misc_feature (1)..(523): n = a or c or g or t
gaaagtgnntatcttgtaaaaaaataaaacttatgtgtaatgaagttgtatcaaatagtttggtgagattgttaaaaatcacagttcttttaagtaacaatgtaaaaagaattgaggttttctaaataatagtaattaggacaaaaaaattctcatccaaaatcgtacttccttttatattttcaagaaggtagtgaggtgtgttggtggcagaggtctcagaatagctgaagaaggggcatttttctctggtaacatcgtcttagggctctaaacctcagttaactggaacatctatggggtgtgtggctctggttaactaaagattaaccagcaaacactctgtagtaacttatgggaagtactcgtaccttacaaagtatggtgtgccctgggtcagttcatgtgtttttgacattcgaagccttttggatgcttctcatgtgtgttgtactgaaggatgattgtaactgaaggtagctgtagagggtgtaaggactggaactgttgactgatgtggaca

SEQ ID NO: 2296 - DNA, 518 bp, Canis familiaris
  misc_feature (1)..(518): n = a or c or g or t
agaccatgtgaggggcaggggatgctggggaatcaggagttcacacttgacacccaagcagagctggggagtangtggtggatactcaagcctagaatnctcgcnnnctcggaatttgagaatgtaaacatcggcattttttgatgatgtttagagcccagaatgtgactgaggttacctnnggggtccaaggntnnnnntacactttctatgcttagaggagagggagaaggcgacggagaaggaaggtggtggggctggaggaaaatctggaggcatgggcctgggaggcctgggcaggaggtactccagggtctcagatgctttggagaggcttgtaaaatgaagcctgagggcagaatgctggacttggnnntnnnnnggtcactggggacaagaagtttccatgagtgccagtataagagtgtgccagagggggtagccccagtggcgcagcggtttggtgccgcnnnnnncccagggtgtgatcnnnnnacccaggatcgagtcccatgtcg

SEQ ID NO: 2297 - DNA, 515 bp, Canis familiaris
  misc_feature (1)..(515): n = a or c or g or t
tntntnctcctttcccnnncngcttccttgcttcccnnnnntcttcacctggnnntcnccctctccccnncttcttcttcctcatcctctctcccccnncttcaggtnnntcccnggatnnnccttttccttctccctctcgtccnctactaggtctcccctccccagtcttattggctcttttatacctcctccttctgtnnntgcctcctggctacccacccccctcaagngnnngctcctcctcccaacttgctttggccactcagtgaatattttgtgttncttgtgtgctacacacantgtnntgagaactctggatncagtcatgcataaaagaaagaatttgtcttagaagaagagttttagaacacttttattgatatcttcacagattcagatgagtnacaaaagactaagtatttcaaattaggnnnnnctttaatcttttatcananaattttcccattattttggtggagtggcnnntatttttcatatttgtatntnnnatg

SEQ ID NO: 2298 - DNA, 481 bp, Canis familiaris
  misc_feature (1)..(481): n = a or c or g or t
ttttccannttgtgcctatcaaggcacatgtcnnnngagaagctgtttggttcttnnncgtggaattgtnnagactctgcctgttttgtgtttcttcgtgtctggagttgtcagcctttgacaatgaccccagcactcaggtgtgagtcctccctgtatcctgctctgaggtgctgtctgtttgggtgcttttctacccacaggaactcgggccccatttataaacagtctttacccgcagagccctgtgccatgtcacagactaaggttttgtgtccgcttggcccctcagcctcccagtcacccagcagccctctccctgcttgagagccagcctgcctgccagggtggccttgggggctggtggccaccattgtcctggtgggagtggggccaggccatgggaacactcgcttcggagtgtgtcactagaccttcccccgggacatctccccctatggagtgattggtgctgactggc

SEQ ID NO: 2299 - DNA, 345 bp, Canis familiaris
  misc_feature (1)..(345): n = a or c or g or t
tctctgataccanncagaacctctgggacgctcngnacacagctttgnagaagtatcacctcatcctgacccnnngggccacgctgctgatagaaaacaactctnnnnngcagcagaacacagagctccagatgctgcttcaacagtatctagattccaagataaactccgaactgcaagttccaccaactcaggtattccgagtacccacaacatagagctgggccacaaaaggctgctgtgttaaggtgaatgctggcactggcattggtgttggtgctagagccgaagctagcacgtgtcacccggggagctgcctgggcccactctggatttcccagagct

SEQ ID NO: 2300 - DNA, 604 bp, Canis familiaris
  misc_feature (1)..(595): n = a or c or g or t
tccccangncgacatagatccacatctncttccccttctcgactcaaagaaagaagagatgaggaaaagaaagaaacanannnaacaaaaagcaaagaacgtcagattactgaggaggacttagagggcaaaacagaggaagaaatagaaatgatgaagttaatgggatttgcctcttttgactccacaaaagggaaaaaggtggatggctctgtaaatgcctatgccataaatgtgtctcagaagaggaagtacaggcagtacatgaatcgaaaaggcggattcaacagacctttggatttcattgcatgagaattgaaatgatttttctttcccctaccttgttcagaagagtggattttgtatttcatatttaatatgcataaaaaacaggatcacagtcctccctccttgtaaagtaagaaaattttatttatgatgtgtgcagttcacttaccttgactcaaaaaaaagaagattaaatattgcatttttttcttttaggaaatatcatttggggcaatcgtcagccccattttttgttcttactgttgtggaagctgtatatgttttcttcttggatgcttgttaggactttttaaaa

SEQ ID NO: 2301 - DNA, 573 bp, Canis familiaris
gcagggcccagtcccatagccttttagggactcatgaagaaaaactaaggatgcagctgaggccattcagaactaccctgaatcccaccaccacattaccactctagggcttttctagcatccgggtgggctggcacagggctgagaggagatggggctcttgtccatcctgcacagcacctactccctccaggcagctcagtggtgtttagtctgcagacactagcccagaaccttgagtgggcccccgaaagagcagggtggcttggggctcccctggtagttttctgtctgttccagaggtgcttccctgatcttcctataatagcagggatggagagtctggatttgccttggtggcagtcatctccaagtgggcaacggctataggccaagacttgagtctagcctataggatgggaccccagagccagagtctggggttgtgctgctggactggactgtgctgctttcccacagggtttctgtggagctggattttctctgttatgaacacacccagcatctctcctttcattcctggatggtgggctcttcgtggagctctaagca

SEQ ID NO: 2302 - DNA, 707 bp, Canis familiaris
  misc_feature (1)..(707): n = a or c or g or t
acaagnagtccatctgtnntaaaagtannccccangtcttctttnntaagttcacaggtcctcctgctctctaagggcatcagcccaaccaacacaaaganncaagagcccannntnnnnnnntnnnntgtttnnaaaatnnnnctttcaatnaggtgnnatctcccaaactttaagtagtggcttaaatttctttaaatactgtgtgggtcacatcaaaccaatcgctaggcagtctccaccccaggaccgccaggataaaaactgccataagccacagcccacaggaagtcaagtaaagctttctggggcaggcaggatagtctcacacacagggtatatttggaagatttgcctggcaatgtgacatagaatacagagaagaaatttgtgtggaggctgcttttaggcaataggtttgagcaatggaatgtagaaagggcccacggtaccccgcccgcctggctgaatcaaacgggccttcaggtgacccacctcaaaatagccagaggcccaaggcacctgggtggctcaggtggttaagcgtctgactggtgatttcagctcaggtcatgatctcaggggtcatgagaccaagccccacactgggctctgtgctcagtgaagagtctgcttgggattctctccttctgcccctccccacaattcccccaccccactcactcactccctcaatctctctctca

SEQ ID NO: 2303 - DNA, 565 bp, Canis familiaris
  misc_feature (1)..(565): n = a or c or g or t
angccatcccaggctcggccagcacggagtggggagccacagagnnnnnngtcctgcctagagctggagagacaactagacagtcactgggactcagcttaccctaatgccttagaggaagtctccggaaggactgctttgtcccttagaacagtacctgacattcctgtgttcctcctcgggggtcattaggagtgaggtcacctctttattctaagcactacatttgctctctgcctgcccccccccgcccccggggggaggtgcagtaatgctgttgttgctagtgatcttagagcttcgttatttaacttattcgagggtgccgtgttcaaccctggccgcggctgcaaggctccccgggcctcagatctgctgtagactgcacagagaccttactgtccaggccatccctctggcccgggcccaggtacactggtgacctgaggacaaagagccttgctcctgggacctgcctcttcctagtaggcagctgagaagagttgttggcctagaggacagggcaggggtgtgttcgagtggctggtttttgactgcttgtttg

SEQ ID NO: 2304 - DNA, 432 bp, Canis familiaris
  misc_feature (1)..(432): n = a or c or g or t
gcatgcacagaggnnagggtgagatggaagatgagtgtgcagaatggnnannagcctctaggagccctgacggacacacaggggttagacctggaactagnnngccactgaagattccaggtacacnnnagcctgagtggaggagaaaggaaggatcaaggaggttatttcactcattaccatcatccctctctggacttcaagtgacagatgcacaaattgaaaatatctcaacaacagaagaaagagctcaggatccttgcaggcagaattggccaggaagctggaagcaggaccaagctctcatctttcctttgctccaagctgcctgcagtctggggccgctgcgctgacatcttctgtctcttcctaactgctctgaaccctcatctttgtactgatgggcaggatgggccccacactccctcctcc

SEQ ID NO: 2305 - DNA, 307 bp, Canis familiaris
  misc_feature (1)..(307): n = a or c or g or t
ctttgttcgacgnnntaagaggctttgttctcagcgttctaagatgctctgttctcaacgttctgtggtnntaagagtctgagcctgactttggtttccaaggttcnnnnctggctcccctggctccgcaagccgggctggcgccccctcaggtggccagcccgtgtcactacgccgagtgtgtgtccctacaaccttcaagatctagctccgacattcatacccatttctcagacagatcttgactccctacaagccagggctcacagaagatcatgtgagaacttccctcttttatgatctcctc

SEQ ID NO: 2306 - DNA, 439 bp, Canis familiaris
  misc_feature (1)..(439): n = a or c or g or t
actcgaagtggggtcgctgnnntaaacgttnnctgcctttgtcatttgggaagataacagacaaaccaccatgagnaagctgtcctggaatgtctccccattggaatcaagggcagggnntctgctgagtcacccctggcctctgggagctcagctcagggtctagctcattgtaaaagcaggtacctttcctttgatgccacttgcacactgggcccaatgctaagtccacatgctttcgtgtggcacaaacacactttcttatctccgttttatacaagagggcactaaggctcagagaggtcaggacacatagctcgggaagacagaattgtggttcaacccaagatgaatcaaattccaaagtctgtgctgtttctagcctgctgcaacttctctcatacgtgctaggtgctcagaaaatgagggcagcccgggt

SEQ ID NO: 2307 - DNA, 584 bp, Canis familiaris
  misc_feature (1)..(584): n = a or c or g or t
annctattcattcttgctgaaactgnnntgtaatcaagagcacagtgttggcatgcagnnncaacatgtnnnnnnnncttctgtgttctcccttcaaaacaatctgtttgcatttgaaatagaagtgttcaagctttttaggagttacttcaataagagaatgtgaatatgctaagaacttttcagatgctgttattaattattttattgttaacaagtgctttaggataagcctctccatgtttttgcttaaaattgggagtatatctgttgaattgcaagtctcccttcagtttttatgtatcaccaagaagagattctttgagccattgttctgcctaggccacttaaatgcagcttcaagtgtcacttttagggtttacatttcatgctgggatcttgattagttgcatatgttgagtcaaaataccactgccactgccgaaggaccaagttttggaacgcacagtgttatagactacaagcaaagcaaacaagagttgatcctcacacatgccatccttctgtgtcattttatggctgttttgtgtttttttttcccnnnnnnatttattattgttaat

SEQ ID NO: 2308 - DNA, 467 bp, Canis familiaris
  misc_feature (1)..(467): n = a or c or g or t
acaaatgggcttgaaagggggcccatttgtgctnngtgccttggaagggggctttngnnnaagataagatnnnagaaaanaggtgtccactgatgggtcctgattgccaaactgacagctggggaatactnnnnatgtgtgtattttcatagaaaaagaagtttgaaaatttcagtgaaggacatgagagagtaccccaaactgagggcagagctannngcaccaaatacacttgtctgaccaggactcagaggagaaaaggacactcatctgatcctaataatntnnnngtttcaccatatntttactccaaggtacnnancncnggcccannnaaaggaanccttgnnnngggcttttctcactaaacatgtaatgatctgagaatggaaatatgtnnntgccatctgtgtccttatgagctcacagaagtgtgtatgtacacacttgcagatnnnatgaatgag

SEQ ID NO: 2309 - DNA, 472 bp, Canis familiaris
  misc_feature (1)..(472): n = a or c or g or t
aagcaattgcatctatgagctcactttttttttcacccagcgtccaaaggctnnnagatggcattgtccccatgctcgagctgactggtgataaaatccaacagtttctcctgggaccagaacagacatcccaatgcctggcctggaggcnntttggcccacagacccatactggaaagttgcagcaggcagatgccgctccagagccaggagccaagagccatgactggagtgcaaataagtgaagagcaagaacccacagcacttcaccattctttggccctgttgaattcctactccctaacagaccccaatatgtgctcttccttctaccttcttcatccccaccctactgcttgcctctctgtcccacttcatgaatcaaacccaatcttccaggccagactcagaggccaccacctctagggagacagcctggtacaggtaatggagagtnnnngacaaccacctt

SEQ ID NO: 2310 - DNA, 453 bp, Canis familiaris
  misc_feature (1)..(453): n = a or c or g or t
gaggactttcaggggtcaaaagcaagaggaaattttatggagannagtcagtctagtgctgaataaaattttcgtcggatctgttgcctacaaggacagggtaaggagacgaagagccaaacttgatttccagatctcaggggcagtatttatgttactttctctgcttgaccctggatcatgcaggtggtgtagatttagacccaatctcacacaaaatgcaaggccagacagagnncttgggggaagctcttttcccatctgaggaannngttgtataagcctttgtatttcatcctgtactgggggtggatttttttctagcttagcttttcaccaaaggttcagctccttgaggttcctagtgttttacagtgacctctgttcctcctctgcctcccctgggctcaaagtcctcagcccccataggcattaaactcctaagttcctgga

SEQ ID NO: 2311 - DNA, 584 bp, Canis familiaris
  misc_feature (1)..(584): n = a or c or g or t
antgggggtgtgatccaagtatagtgtgtcaaagccaaggtnnagaatttgctatgggagtagaatatatattgaattttgtatgaagaactatttgtttaaattatataactgggatattttgccacttttaaaatgatttcagaagaggtcctagagagctaagattagtaatttgtgtgggtatatatgtttagatatttaaggtacatttgcatagtataatgggaatataagtaaaaggcacaatggggactacagaagtaaaatataggctaacatatgccagtcccacttgaactttgtttttgcatttgaagaatgtatgtagcactttcctatatattttttacatattgaaaactggacttggtataactatcttataggaaagtagaaactgtattctttattttccatctttgttttctgttatcctacaaagttgatgcttaagcatctggctgatttctctggtgcatgaggagaagtgggtgtgctctgcaaggaatcagattccctatgtgaagcagtttcaaatggcattcaatgttcagtgctcaggtatggagtaagtactgtag

SEQ ID NO: 2312 - DNA, 583 bp, Canis familiaris
  misc_feature (1)..(583): n = a or c or g or t
tnnaggggatcgagggatcctgacagaccatggacagaggcagaaaggaaggtgacagacactgaacnnnnnnntgagacagtggggatgaagacnnaacagacacactggcactggactcctnctcgccccccccccgccatgggtcccctcattttccctggttggcccccccttgcttccctctccttcccatcctcttctgtcattttttatctcttctcccaccatgaaattaatttttttcatatttttggtcagatagaattgggagggtcccacactcccctattcaatccccttaccatcccaagctcccttttcatttctggtctttatgaatatatttatatggacagaattaagaaaagcaaaattgatttcccctttctctcacttcccccatcttgtctccccaaaccccaaagagttaatacttgggcctcccccccacctcccagaacacttgtatattgtttgtttgagttcgtgccgcagtaacagacagtatttaattgcacatacagatgtttgctgggtatattcactgtaaattttatttaatctgattttttgtttgttt

SEQ ID NO: 2313 - DNA, 462 bp, Canis familiaris
  misc_feature (1)..(462): n = a or c or g or t
atcttcaggaactgttttgannnccaaattttaanagtaaaccaggactattacctttccttttataattggtaaaaaaaaaaaagtgttctataactatgtatttccaatgcttacatatttattattcacttgtttcagaaaaaaagtcatgtatttctgtgttcaaagtgtgcttcacgtatgtacctgctgggcttaaaattcctagctacaaacatgtgagtcatcatcatccttagatttgtcatgtttgacttgacctagagttgaactagggagcttcagaaatagaatgctaaattggtaccaatttttcttgtaagctatggtaggtggtgaaaggaaggggacagtggctactggaaattcaccctggccaaccctctccagaaatagtcacaattaacaggtgcttgcctatcccatgctctaccccagggcccaggtacatttacaggg

SEQ ID NO: 2314 - DNA, 649 bp, Canis familiaris
  misc_feature (1)..(649): n = a or c or g or t
accggccctgggtgcaagggtgtcagacgggtgnnngtcccggacggggcgncgggcaggagtgccgaggccccgacacagcaggcttcctgcagacccagcgaagcccctgcctccagcccaggcccctgggggctccccctgggctcgggaaggacaccacgggctgcgccctcacggagcagggggcaccgggggtgcgtgcggcagggtgctggaggcccggggcagcctggggggggggcgctgctctcctggctgtgaccccgcctgcccaagaagggccccggggggggggcggggggcagctggagcctcaagcagcagagctcaggcccacccgttgctgtgtctgctctgagcaccgagcacctgcctgcggccctgagtgggatgtttgggacgcttcctcatggatggggttgaaaatctaattcagatattgattcttttgaaaacactctctgtattaaaatgtgggcactggaaattctggaaaatcaggaggctgcctcctaaaagctgcctcgagcctggatgtgaatcgggctcctgatttacaacttgggggaatcaggacagatgggtccaccgcactttacagcttacaagcgcctgagtggacgagagcatgcttgnnnnncgagga

SEQ ID NO: 2315 - DNA, 297 bp, Canis familiaris
  misc_feature (1)..(297): n = a or c or g or t
cccagcattccnntgcattgttttgtnnnttnnntgttttagaaggtatattttttttcattcaaannaatcttgaaattaccttagaatctttattcggggaagaaaaaaaccttttgatattataaaacccatcagaccacattaggtgaatatttatttttggtggcatatatttgaaattaatttaaattgttttctattatttagccagttacaaatggaaataacagattagggtcagactttatcagattacagtctgtattaaaaatgttgacacagggatccctgggt

SEQ ID NO: 2316 - DNA, 634 bp, Canis familiaris
  misc_feature (1)..(634): n = a or c or g or t
gttgtttttaagatttaatttgtaagtaatctctgtgctcancgnnaggctccaacttacaacccagccaagatcaagagtcgcacactctacccacngagccccaaaagactgggtccttggcgacgctcttgagcggctccctcagcgcagggctgcttctacgtctcattcctggaaaccatacacccctacttgtagacacgcgccccttacatgcagcctaatgcagtcctgactcgtcaaatactcgtaagcaactgcttcccggtaaatccccgttatttacaccaaactgtgaattttgccccatggcctccagagcatcctacgtcctgagaggtggtggcctatgtaaccaccgcagctcactggcaccgtagaggaccctcctctggtatcttcctctctgcttctttctcgcaaacgcgtggcttagtgtcggaatcatcatcaacgcccccaacaacggcaagaccaacaggcggggagcatcagccccactccttaagcaacttgggattgacggactgacttccagcagcgctgcttgatgtagacacatttttcccggacgacgggcacgagggagggcacaggacgacatataacannnnntgttactctatgtgtt

SEQ ID NO: 2317 - DNA, 611 bp, Canis familiaris
  misc_feature (1)..(611): n = a or c or g or t
atactctcccaaaccccgaagtctnnaactggcaggtgatgcattctgtacttgtgtagatgttttcactgatgttgtttcttgtggcaaaatatgcatcacataaaattgaccattttaaccatttttaggtgtacaattaagtggccttaaatacattcacacaatgctgtgcaaccatcagcacctccatttccagaaattttcatcttaccaaactgacactgtgtccccattagacaatcactctccatttctgcttctccactcctggtaacctctgatctgctttgtgcctgtgagcttgacgacttgtgtgtggcttctttctctgagcatgatgtgtttgaggttccccatgtcacagcaggtgtcagcacttccttccttcttagggttgagtagtttcccgctgtatggttggacattttgtctacccgttcatctgtgtgtggacatctgggctgcttttgccttttggcttttgtgatcggccaatcacagctgctgtgagtaggtgctttcgagcaccctcatgtttctgtgtctttcctgtcatatgtattcatctttctttgttaaagcatatggtttgcaagtacaggttattc

SEQ ID NO: 2318 - DNA, 663 bp, Canis familiaris
  misc_feature (1)..(663): n = a or c or g or t
atatgtcnnnacacatgatttnnatattnngcatataccatatatctaaccccaaatacttggttactacatgcacatctgttgattttgagtcaaccatccctatatgaatatttggtttctctatcatccactgtcatttgtcaaactgctggccaacaagagcaagaagtgtagtttgggatctggagagagagagagaggtgggaggaggagaggaaatcaaatggcatattgtaaatatcagatctataattgtaaatatcaaacctgcctcagttagaatgaatggaagcagatctccaatttgcttatataggaatatcaggttaactatatagccatacttgaaaatgcttctgagtggtgtcaactttacttgaatgaatttttcatcttgattgacgcacagtggtatacagttcacttctaaagctagtggttaacttgtgtaggaaacttttgcagtttgacactaagataatgaactctgtgtgcatttttctatgctttttttaaacttagtttcatttcattttcatgttcggtttgtctataaaacctgaggatggttataaatactgtaagtattgtaatgttatgaatgcaggttatttgaaagcgtttattattatatcattcctgataacgctatgtgagtgt

SEQ ID NO: 2319 - DNA, 373 bp, Canis familiaris
  misc_feature (1)..(373): n = a or c or g or t
gagaaaatcccatcactctccagnnnntcaagaaatattcnncaaatgttggcagattctatcaatcgtatgaaggcatatggatttcaccaggtaaagacttaaattctgtcttcacggggctaaattcatagccatttccactaatatttcacaaactgctatattagtctcatgcagaaatgaaagcagcagaatgtgaaatctgtctttaaaagcttgtgaacatagctattcatttttacctgtttgtctggagttgcaaaagtcttgaggattgtggaaagaacagctgccaagacatatctgctaaactcctcacagaagatctaaaannnacaacatcnngggctacagtgaacacggagggaac

SEQ ID NO: 2320 - DNA, 558 bp, Canis familiaris
  misc_feature (1)..(558): n = a or c or g or t
gaaccagtgcaannagatgttgggtcattnnnaaaaaagtgangtngagacaggaagagtgcnngcccagcaaacactgctccacagcctcttcagacacttgccccagtttcctgtctgtgttcttgggggagccagtgtgccattctctctgcacatgggcagctggccagagctgccacctccctcctgggcttccggatgccgctgatgagccccgccaggactttgggcaggcaaaagcagcactcaggactctcctcgaccctgctgttcagacttgttaagattatcagaaatcacaggaaagaagtcactgtttcactaaaagcacccataataatgaaaatacaaataaaacttcctccaagcatcacagatcattttggacaagattttccaacctggcttgctactttagtttggacccatttttttctcttacttgattttgcttatgcagaaaatagtttccagcgcatggattggtctgcaggagaatgagactcaattgtggatagtctgttctctctgagcatgttggccaaactagtatcg

SEQ ID NO: 2321 - DNA, 207 bp, Canis familiaris
  misc_feature (1)..(207): n = a or c or g or t
ggnnnattgataactttggtttaaatcttactcctagtgttaaatcatttaaagttttttttttttttttttttagtctaaaaatcatnnnngtatcaggtannnnnattaaagtttnnnaaatggtttcgttctctgcaatatgcattcanatttnnnnannnnatacatctgnnnnngtaaagaaccngaagnnnttaacactta

SEQ ID NO: 2322 - DNA, 466 bp, Canis familiaris
  misc_feature (1)..(466): n = a or c or g or t
acttcctgtnagcttctcagatccttcctgtccacccagcagtctcctggaggagagctctttattaatcntagagcatctcaagcaactcctattctcactctgctgcagttgcctctgaagacttgagctgaccaaagtcaatagcagaacatatcctatgaaacaggattcaacatctccatttactgatgaatgagtggttaatgaacaagagttagtgacaaatagcctgcttaaaaatttcctcagaaaggactactactggattggtctcaggaacagttctggttggaggtgggaagatggatcagccttaaaccactcaagtattctctcaaacagcttgatacagaagtgtggtaccttcagcgaagctggtctccgagcctctagctgtgaagttcttttgccgaacatggactatatcttatccaccactgtatcccacacacctaaagtagtg

SEQ ID NO: 2323 - DNA, 635 bp, Canis familiaris
  misc_feature (1)..(635): n = a or c or g or t
acaccccancgtaaaaannatgaatcagcaagagannccaaaaangaacggctagaacattcggaggaaaaccaggtcacggtgttgtcctgaaaaccaagtgaagaaagtatttcttcagggcccagagagtgttgggcggtgtcacacacagctgacagggcacggctgatgaagactgagaattgacccttaggtccaacaccagagaggtcatcggtggccccggcaaggtgaaggtggataaagaccggcagatggtggtgctcgaggaagaatttcagaacatttctccagaggaactaaaaacagagttgccagagagacagcccaggttcgtggtttacagctacaagtatgtgcacgaggatggtcgagtgtcctaccctctatgctttatcttctccagtcctgtgggttgcaagcctgaacagcagatgatgtatgcagggagtaagaatagactggtgcagactgcagagctcacaaaggtgtttgaaatccgcaccacagaagacctcaccgaggcctggctccaagagaagttgtccttctttcgttgacctctgggctggggaacggaattcctgatgtccctgaagaaactggggactgggaccccaagaactggaact

SEQ ID NO: 2324 - DNA, 412 bp, Canis familiaris
  misc_feature (1)..(412): n = a or c or g or t
ggnannaacttctcanncttttgtgtgtnnannccacnngtcnnnncgccatctgttgacangttcttctccccccacccccaccccactgattatcttgacatctttgctgatcatccattggtcgtatatgcaagagtttatttctggattctcagttctgtcccacagacctgtatatccttacaccagtgctgcagtgtcttggttaatagagccttgtggtgtattttgaaccctggaagtaagtcctctagctttgttctttttcaaggttgttttggacattctgggtcctttgcatttccaaatgaattttaggattggcttgttaatttctaccagaagagggcagctgagattttgatagaaattttcttgagggcagcctgggtggctgggcagcccaggt

SEQ ID NO: 2325 - DNA, 242 bp, Canis familiaris
  misc_feature (1)..(242): n = a or c or g or t
cnacaanngtcgagctgggctccatctttcagcagttggcccacatggtcaagnagcaggaagaaaccattcagaggattgacgagaacgtgctgggcgcccagctggatgttgaggctgcccattcagagatcctcaagtacttccagtcagtcacctctaaccggtggctcatggtcaaaatcttcctcatcctcattgtcttcttcatcatctttgtggnnnnnnttgcctgaaccctc

SEQ ID NO: 2326 - DNA, 101 bp, Canis familiaris
  misc_feature (1)..(101): n = a or c or g or t
agagaggtctttttcctatcccctcagttcctctaccttaaannnnnngtgtgaggacctgtgggtcctaagtgagatagtgccactcaccccatgccttt

SEQ ID NO: 2327 - DNA, 594 bp, Canis familiaris
  misc_feature (1)..(594): n = a or c or g or t
anccatgcacttgtacgtcttcaacattctttggtttttgatcagtnnatntaaaattgctctataattnaccactgtgtgtatttaactcactcttgtgaacaacatcttccattatatctttgttcctgaatgctgtgctttgtctctattggaaacccatgtccgtctcaggcggttgacaggctagcctgtgggctggccagcagcatggcctgtgacgggctggagctactgtgcagtgtggaggcgcctcgtgatgagctgtgggccctggggcagtgccacactgccgtgctggtccaggccttgcctcagtccacagctggtatctgacccaaacacttagtgtttcctgcggttttcaagaggcagattacttagcaaatattttacttaatgtgggttttctcgccgtatgtgaaatctcaactattaaaaactctttgtcagcggtagaaatagatccgtgctgtacagagcattcacccagtgtccaaggtggcgtgctatctgaagtgacccgaggtaaaagatgaccttggggtgcctggctggcccagttggaagagcaggcgactcttcatctcgtgg

SEQ ID NO: 2328 - DNA, 414 bp, Canis familiaris
  misc_feature (1)..(414): n = a or c or g or t
tgtcagtatccccnngggtctttntntnnnntannngtcagtaaaatagnngggctntgctttgctcctggcagggttgctgtgatggaggagagcccccaaggagccacatggattcagactgactaggaaatggttccttttttttttttttttttttnnatttttaaatnnnnngtttttttnagannnnnnnnnnnntncttttnnnnnnnnnnagnnngcannntcttnnnnnnttaaaggnatcnnnnnncncngcnntgaacttnnggtgtcaatcaatataaaggaatggaacatccatcttgagccagttccattatgtgtaaattcatactattttaattttttatgcaatctgatgagtagatgagctcagatttaaaattcttaaaagcacgtttattgtaa

SEQ ID NO: 2329 - DNA, 690 bp, Canis familiaris
  misc_feature (1)..(690): n = a or c or g or t
acatgaaatgaatnatagtcantgtgtggtnnggggacgtcanatnnnctttttcttgtatgtatatttggtgtcatnnnccatgtaatataatatattttggagctctgagaagttgtgaggagtcaacnnnaagtatccttcacagcagccagaagttaacagtggtatcaagtaaagtatggttgttggcgggtgatttttttttttttttaagtgtaacgaacaaaaccaacaacaaatacttttaaaattacaatgaataatttgtaaatagtttttagtttttaaaatttaaagtgttttcgagtgtgaaaagttgagtaaaactctttgtaactgcttttaagaaaagaaaaaaggaaaactagaaagaaattgaaacaggcagggacatgtgatcccatcatcttctgaaaattttactgttttaaaatgtattacaatatcagtgtgaatatcttgaattctgttacaaatcctgcgctgtatgaaacatgtaaattaattgtttgtctcattagcaaatccaacccccctaatggggaggtctttatgtttgaagaaccgtgtaactcagtaactgacttgttctgatgttgtaactcaatagaagtgatttggaaggaagcatggtgtatgagatggtgtctgttcttttgtgccagctctgtatgatgtttgtaagac

SEQ ID NO: 2330 - DNA, 549 bp, Canis familiaris
  misc_feature (1)..(549): n = a or c or g or t
agaacaaatatnntanngcaaagatctcttacttgcaaaggatcactgactcatnaggtnntaagaatctggtcagaatcaaagtgaggagaaagaaggttgctttctttcatggcgggctggtcattctaagttcctgggattcctcaggggttggtttgttccaatctagtggggaagttagtcttttgtgtagtgggtccagagcctaggtcagtccaaggccttgctggagacagaagagagccatggctaggtccagcttttgagtccaacccaatctagatcatattctgaggagtaggccaagtcgtattagcatctgcaaagtgggccagaaatgggtggatgatattttccaagcctcatgcttggactcagcaccaccaggctttgctggactacccaactctctaaatattgaagtctctcttgttgtataaggaaacccttgtgccctggccattactttcttctcttacctggggttcgttccatcaggctgactctgcacacatggcagccactacgggaatgtgtccagcagaa

SEQ ID NO: 2331 - DNA, 183 bp, Canis familiaris
  misc_feature (1)..(183): n = a or c or g or t
acatgttcancatcaacaacgacatcaccctgctgaagctggccacacccgcccgcttctccaagaccgtgtccgccgtgtgcctgccccaggcgaccgacgacttccctgctgggaccctgtgtgtcaccacgggctggggcctgaccaaacacaccaatgccaacacccccgacaagctac

SEQ ID NO: 2332 - DNA, 408 bp, Canis familiaris
  misc_feature (1)..(408): n = a or c or g or t
ttccatgtcacgtgtgctcatgctgctggggtgctgatggannntgacgattggccatacgtggtgaacatcacatgctttcgccataaggtcaacccaaatgtgatgaacaaactgaggctgataaaggttcaagatcacaagatcacgcagctaaagtccaaggctggcgagaagggtatctctgtggggcagacagtcatcaccaagcaccggaacacccggtattacagctgcagagtgattgctgtgacatcgcagaccttctatgaggtcgtgtttgacgatggctccttcagcagagacacattccctgaggatatagtggtaaagattattcagtccttagaggagagctgtactccagcagtagtccctgcaaaaacccaagcctggggatccctgggt

SEQ ID NO: 2333 - DNA, 620 bp, Canis familiaris
  misc_feature (1)..(620): n = a or c or g or t
gtctgtctgaggatgaattaagttcttctacaagttcaactgataaatcagatggggattccaangaacnganatgtcatacaaatgaaatgagtgacttggtgcagttgatgactcagaccctaaaactggaatctaaagagagctgtgaagatctcctggttccagatccagtgtcagaatttaaacttcatcggaagtaccgggatacgctgatacttcatggaaaagttgtggaagaagctgaggaccttcattttaaacaactaccttccgctgtcatgccaggttctgaaaagatcagaagaatagttgaagtcttgagagctgatgtaatccagggcctgggaattcagcttttagaacaagtgtatgatcttttggaagaagaggatgaattgcagagagagacgtttagtttttcctgtgtgccaggtgctatgtcaggagctggggatatagtgacgaagattatgaagagatggtctaaagtatttataaatcaaaaaccagctgagttagaagtgaactataaagagaacaaaatctacacacagctgtgctgaaagagcagcgatgggtttaagctcatgttttggatatgaaaacaattgagctca

SEQ ID NO: 2334 - DNA, 487 bp, Canis familiaris
  misc_feature (1)..(487): n = a or c or g or t
agattcatcccactnnaaaaatgtttattctttctgatnnagaaggaaaaaatngaancantgagttgatnnagccnnttgatgaagaaatctctggaatcgtnnaagtagttggaagagtaacggccaaggcaaccattatgtgtgcatcatatgtccagtttaaagaagataaccatcctttcgatcttggcctttacaatgaagctgtgaaaattacccatgagtttcctcagttttttcctttgggggttgtgcaatatgattgatcttgatgagcacattgaagactgtcatagtaaacccctgatatttgagggagatttctgtgatttttaatatttaacttgttctcttttttatttcatttacctaaccttatgaggtactgcaatatcccacttttgatgaaacctgtctgtatattgaaacttaagtcctnntaaagaatcccatctccagtaatatggtcagatcagatgcaaga

SEQ ID NO: 2335 - DNA, 534 bp, Canis familiaris
  misc_feature (1)..(534): n = a or c or g or t
tatancctcccgctgtanngcgccatgatgggggncagcgggnaggcccaggccctcgccagnnagacnntcgcggccactgccaagcagctccacagcaacgtcgtcaactatgtccagcagatcgtggcgcccgtggccacatagaggctcgcggcccggccgctgcgtctccaggctttcccacattgcggttctccggcccacgtccccgtgtttactcccccgcgcggaagcctgttccctgggcttgggtgtcggtggtgcttggcctctgctctgctggaaacttctctggaccagccggtcccgaggccagagaaccttccagggctctggctgcggctcctggctctggtgaggtccccgtcttctccctcctccccactccctggaaggagcagagacgattttcttatcctacccctgccctcccctcccctcctctcccctgccctcccttgctctcccctctcctgctttcccctcttctccccttttattttcttttctgattcttgaaatactatgcaa

SEQ ID NO: 2336 - DNA, 298 bp, Canis familiaris
  misc_feature (1)..(298): n = a or c or g or t
gagaggngaggctgattgatgttttnnnagcatctcagatgttncntttctcaactagttgagggnnnnnnnnttcccctctactannnnnagccatctgttttggnnnnnnnntggactgaaagatcagctgtctcctaggaaagggatgagaactggctaggagagggacttctcctcccagtgagccagagagacgtgggtgtgggctcggctggtagtggctcacagatggggatgacacagccgctctagacgagnnnnnnnacagtctgcctgccaggcacaaggctgtacc

SEQ ID NO: 2337 - DNA, 511 bp, Canis familiaris
  misc_feature (1)..(511): n = a or c or g or t
tacagcccannctcagtcatcnngcatgcagnnatccgcactggnnactatccaagtgancagctactgagacctgtcaggccccgagctggcaaaggtgggatccacagagtcatgaaaatttagagctcattccaccccaggtgcttggcctcagtctcctactttatacataagaactcgagacccggggggatgaccaccactcagctggtagtaactggagctggaactagaaccgggtatcataatttcccggatggtgcccttcattaccattgaatctttttctgggcttaggcaggaggggatggccacagatgcagagaaaggagattagtatgggggcgcagggcgggggttgcctgggggagggaaagagatcatctaagacatagctgactgcatgctgcaacacctgtcatttgtggattatctgcatttcagaatttaccaggctttttccgtgctgagcctcctactctgtcaactggtctccactgaaacatta

SEQ ID NO: 2338 - DNA, 343 bp, Canis familiaris
  misc_feature (1)..(343): n = a or c or g or t
caatgacatcctcannnnnnnnngccatgaatctaatgcccctgggtctgctggtnnnnnannnncagagaaaccaagggagggggcaggnnnntcccggagggcactgcctttttcggagaagaagaaaaaaccagagacatttaacaagacccagaaccaggagaacactttcccttgtaagaagtgtggcagggtgttctacaaggtgaagagnnnnagcgcccacatgaagagccacgnnnaacaggagaagaannnnncctccnnncacccgccggcnntgcgcgaggagagcagcgcgggggagcggggctgagcccgggtgccgggnnnncccnng

SEQ ID NO: 2339 - DNA, 606 bp, Canis familiaris
  misc_feature (1)..(606): n = a or c or g or t
gcagacatgaaataaatatttatnnattaaatgcatcaatatataagtattaaaagtatgtattaatataatcataaagtatccaattacaatttttaaaacttagaattgcacaaagaaaaactagcatcctatttattacctagaatccacacttctagtcatcctaaccatctagaacttaaaggcaagaaaaagaaaaaaatttttaccatgtggaaaatgactgtcataaagtccacatatttaactcctgaaaagaagtggatccaccctcaagccatcattctgacaattgggtgtaaagtaaggcaggggatgacagcagctgggacacctgacagctggcgaagtgacagccaacagcgacaggaggaggcagagtgtgaaagtgcaggctggctttccagcacagcagtctaaggtacttcatgtgaaggccgcctgcccacacaccgccggcagccccccagagacaccctgccaccacagagtgccatggctgatgttcaaggaaggccacggagtttcaataaagggaaataatgtctgtgacactcagggtatnnnnnaagggatatagagnnnnnagcaatgtctgtgtct

SEQ ID NO: 2340 - DNA, 560 bp, Canis familiaris
  misc_feature (1)..(560): n = a or c or g or t
gggctatgcnnntccgccactacaagggggatccctgggatgaactgaatcagcagagcgtgcttcctattgaaaaggccctgggttcgatcctcttcattgttggagagaatgatgaatgcatgaatagcaaggagtatgccgagcaggccttgcaccagctgcggagccatgggagaaacaacggaaggatgctgttataccctggggcgggccatctcatagagccgccctattcacccctgtgttacgcttccccaaacaagaacttttctctgcctctgctttggggaggagaccctgctgcccatgccgcagcccaggagcactcctggggagagatcctgaaattcttcaggcagcaccttactcaaaccaggagcaaactctgaaccagggctaagggtgatgatgagacaaaaaaatgagaaggcagggatatgatgggaagagggagttctcctgacttctgtagatttcatagttatcctgggtcaattggaaggaaataggacaaaaaatcaaggaacaagggcacaggtgcaccagaagtatttctg

SEQ ID NO: 2341 - DNA, 580 bp, Canis familiaris
  misc_feature (1)..(580): n = a or c or g or t
tatattctannnagtaataatnnnngctataatttatttgttaaatgggtgnnnctcaggnnnnnncttttctgttctaacacttccctgttaaatnnaactatcttaaagctataatgggggnnnatttcgttaactgacatttgaatgctatttacttatttagtctgttttttttctgtgaagaaaaaatcgagtcttttgttatnnntctgactttagaaaatatttgatgaattcttggtttactccaagggaaaaggaggaaaatgaaaacgcaatcaaggatctttttctcaccccttatatcattcttctttagtaaaaagatggattggggtggggagctccattaataaaagtaaaattttgaaatgtataaaaagtaaaaggttgcattgttttgctcactttgaaagaaaatgaatacacatggcataagaaacaagtctgcatgacctatgtggttatggaatttttttcttagcaagtgattacagatggtttatggggactagaagatattttgctatcatgtaaggattttccccccagatcnnnnnnncttttcactgtatcg

SEQ ID NO: 2342 - DNA, 529 bp, Canis familiaris
  misc_feature (1)..(529): n = a or c or g or t
gaatgggtgaangcatgtctacagagaaaagcatgtgnnnaagaggaaaaatatgagatanntgangnaccccatcgaagcaggctcaacaannaacagctgctgccaaagctgtttgacggatgctacttctattttgggggaaccttcaaacaccatcccaaggacaaccttattaagcttgtcactgctgctgggggccaggtcctcagtcgaaagcccaagccagacagtgatgtgactcagaccatcaatacggttgcgtaccatgcgagaccagattccgatcagcgcttctgcacacagtatatcatctacgaagatttgtctaatcatcacccaaagagggttcggcagggcaaagtctggatggctccttccagctggtttatagattgtgtgatgtcctttgagttgctccctcttgacagctgaatattacaccagatgaacatttcagattgaacttacagattgaacttacacggtgtgagaacccagccattgcactgttgtgatcattcacatt

SEQ ID NO: 2343 - DNA, 306 bp, Canis familiaris
ctagtaattcctagttactttataaagttgattctaaattggccataatttgcaggatactttaagctagctgattccaaccttataaaacatagatatttacacatacatacgtgtattcacacacatatgtatctgattaggattagaagttcattttgagtaccagtttgatgaacatgaagttcctctgtccatctaaggagtagtaatttagtttccttcttctgactaatgaaactgcttgtcattctgaagaccaacttcatgggaagtcctggttaaagactccccctctcctttgcc

SEQ ID NO: 2344 - DNA, 498 bp, Canis familiaris
  misc_feature (1)..(498): n = a or c or g or t
agaagagctgtnngcggttcatgttgttccgtgaggcgaacgagctgcagcagtggatcaacgagaaggaggcagctctgaccagcgaggaggtgggcgctgacctggagcaggtcgaagtgctgcagaagaagttcgatgactttcagaaggatctgaaggccaatgagtcacggctgaagacattaacaaggtggctgaagacctggagtctgaaggnctgatggctgaggaggtgcaggcagtacagcagcaggcgagtatctggattttacactgaagctgtgtgactggcagaaaggaacttggttccttcctgtgtccttgctagcccaatatgccatgtcctgtagcatggggttgggggtgggggctgggtgtggtcaagtcctctccatctccattttgtttaccttcctatatcaggggaaagaagctcctgtcttctccatatgtccatttaatattgtgaaagttagttactgtttatatggccct

SEQ ID NO: 2345 - DNA, 431 bp, Canis familiaris
  misc_feature (1)..(431): n = a or c or g or t
tctggttggtcctgctggnnntgtttgtggaactggaatttggcctggcctattnnntcctgtccttgnnctnntggatgtacgtcgggacacgaggcccagaagagaggaaagagggagagaagagtgcctactctgtatttaacccaggctgcgaagccatccagggcaccctgactgcagagcagttggagcacgagttacagtttagacccctggtggggagatagaccaactnnnnnnnnatgcagctagcctcacatgtagtcctcagagcccttctgtgtgggcttgcgggtttgacttcaggtgcccaagaataaggacagcttgcaggttagttctgggacgctgaagtgctacattctttcccagatcttttgctgcagttttnnnnnngaacttttctttgnnnnnagtgaaaccctgtg

SEQ ID NO: 2346 - DNA, 184 bp, Canis familiaris
  misc_feature (1)..(184): n = a or c or g or t
tgcacgtggggcctaacannntgcagatttgctccgaaacgtgtagtattatgttaactaccctcttatgttaaggtttacacaataggatttttaaacaaatgtgtttaattttctaaaatctcttgtattaaacttttcttttggaataagctgtggtaattttgttacnntctggttcaga

SEQ ID NO: 2347 - DNA, 494 bp, Canis familiaris
  misc_feature (1)..(494): n = a or c or g or t
tgtaaaaaggtatanncttattaatttataaacgtttnaanngctgcataantcagtatgannncaaaagttttagagatnnattanngnnacnncagtngcatttttattagatannttcaggctgtgctcaaaattcatttttttttanctaaagtgctaaaatagccctttgtttatactattcaggtattaaaacaaggtgggnnntttnnatcaagnnatactttagtagttatattatgtgtgctttttttacttggagnnnnntngatttcctttaccaaaagtagactctgaaaaattaaggattattaacctcaaatagaactttgtatatattagaacttactgtttttttttaaggcaagaaaatataatcattcaataaatggtgtcagaaaaataaactatttgagagtagggaaattggattcttaatttacactttaccaaaaataaatgccagtggggaaaaaagaactaaatgtaaa

SEQ ID NO: 2348 - DNA, 574 bp, Canis familiaris
  misc_feature (1)..(574): n = a or c or g or t
cctatacttaggtcatagnctcatgctagtctccatgtctnnnaaagttnnnnnnncagctccataaagtccatcttgggaagcaggttaagaataactatttggaaaaaaaaatgtcactgtgattatgactgtcacccctcatgcttcctccagtctgaccttgtgtctaatttttgggaactctcaatcccagacagacacttacagaatagggaatactttctcccttcttccctcattttaccccaatgcatatttcctaacgttgtatataaattaaacatttgtaaatgagttatattttaagtgctaagtgacaatgctatgtagagaaatgctctgaaaaaccattttgtagtatgaataaccatttagccgctctgtaattacatagtttgcatttgcttaagataggttgtacttgatctctggacttcctgtcccctaaattatgggtagacagacgtaggactgtgtttgtaaacatctgctttccacaattggtctttgtaatgtctcttagtttaggttttttttttttaattgttttgtgatttgtttttacaaaaca

SEQ ID NO: 2349 - DNA, 570 bp, Canis familiaris
  misc_feature (1)..(570): n = a or c or g or t
gtttacagagttctctgacatnnnnngtcacacttcaannnctggagnnagtctaggtatggggatagcctcctcatcttgtcttcctacccctgagccagagtcggagtngcagatcgccctcattgccctcttctcagagatgctctatcgcttccccaatatggtggtggcacaggtgacccgggagagcgtgcagcaggccatcgccagtggcatcacagcccagcagatcatccatttcctaaggacaagggcccacccggtgatgctcaaacagacgcctgtgctgccacccaccatcacagaccagattcggctatgggagctggaaagggacagactccggttcactgagggtgtcctgtataaccagttcctgtcgcaagtggactttgagctgctgctggcccatgctcgggagctgggtgtgctggtgttcgagaactcggccaagcggctgatggtggtgaccccggctggtcacagcgacgtcaagcgcttctggaagcggcagaagcacagctcctgagggcggctgggaccggggcggggcggcctcagaactct

SEQ ID NO: 2350 - DNA, 603 bp, Canis familiaris
  misc_feature (1)..(603): n = a or c or g or t
caganntttcgggatgnnaangagaaagttcttnnnnnnnccaatgtctgtgctcgaggcatactgtgccagcaaactgcctgaccaaggtatccgcttccatgatgtaaagccaggttttactggtaaattgtggctttaaggacagtttccttggcagatatggtttgtgaataggtgtgtcctaaggaaccaggtgcaggaccctacagcacctctcctcttccagggatcgatgtgaagcaggtcacgattgttgtgaactttgacctccctgtaaaccaagcagaggagccagactacgagacctaccttcaccgcatagggcggacaggacgctttgggaaaaagggcctggccttcaacatgattgaagtggataagctgcccctgctcatgaagatccaggatcacttcaacagcagtattaagcaactcgaccctgaagacatggatgaaattgaaaatattgaatattgaatattgaagacagaactttattgcttgtgaaatatcctagtttatgtgagactgtcccagtgggtttcaaaggtaatttttcccattggggctttttcaaagtgaaactgttaaatatggcaa

SEQ ID NO: 2351 - DNA, 409 bp, Canis familiaris
  misc_feature (1)..(409): n = a or c or g or t
gtnggctcctcatannnnnnacatgcatctcnnatatgtcnncnnnnnnnnnaggtcttactctttagncttgtttgagaaacctatgacctnnnaagaactctggggattttttttttttttttaannnncctaactaagcaatttnctctnnggcattagcaannnnaatttganngcccgnngtataagaacaaagtgatnncctatccacctgattatgttctctggttagtttagccactttgaacttagtgcttttggctaaacatactgaatgctacttgtatgcagaaaagaattagatgnnnncatgttnnnnccttttagggtggtaaatacatgtacaattgtttacatactaaaaggaaaaagttgagtaaatntcttgtcatatagtggctctact

SEQ ID NO: 2352 - DNA, 127 bp, Canis familiaris
  misc_feature (1)..(127): n = a or c or g or t
tgaactactttagtcattatcagatttggattgagtcactttttaaaaatatagcnnnnattgagctatatcaatcacctgattggtcaggttgttgtcaaaacaagccttatcgggatccttgggt

SEQ ID NO: 2353 - DNA, 391 bp, Canis familiaris
  misc_feature (1)..(391): n = a or c or g or t
atctncttctatgactcggagaatcctcccgcatcannggtgatccgaatccagaacattttaacagaagaacccaaggttagagtggtttatncagacaatggtacagtgttgcaaggaagtaccgtggcctctgtgtataaagggaaactgctggtcggcactgtgttccacaaagctctttgctgcgagctctagcaggtcaatttgcacccccatgccacagacactgtgagcccgccatttcaactgcttgccacttccctggggccacagtgatctcatctaaacagtgaatctgaccctgaattggacatgtggaaggatgaaagtgctgtttaactgggaatggaatcaatgcataaggctttttttgaaagtactgtagcaa

SEQ ID NO: 2354 - DNA, 170 bp, Canis familiaris
  misc_feature (1)..(170): n = a or c or g or t
ttataannngattcacttttctgacattttttagtgctctcaagtggatatgaaaatataatacatgttttttatcctcaaannnncttgaatactcgagaaagattcaaanaacgatcagatgtgattatacaattaaaaagaaaacactagtatttagacagattact

SEQ ID NO: 2355 - DNA, 495 bp, Canis familiaris
  misc_feature (1)..(495): n = a or c or g or t
cgnnccattctatcagcaactaagatgaacgtcaggttttcagctgctaccaaagataatgaacataagcgttcactgaccaagactccagccagaaagtctccacatgtgaccgtatgtgggagtaccccaaaaggccaggctgtgctcgggacatgcaagttaaagaccgcaaaggggaattctgcttctgttgttaccccattcaaattgacaactgagacagcacagactccagtctccaacaagaaaccggtgtttgatctcaaagnnngtctgtctcgtcccctcaactatgagccacacaaaggcaannnnnaaccatggggtcaacctaaagaaaatagttctgtcaagcaacatgccaacagagttagcttccacaagaaaacttataaacaacctcctctccagactcgggaagaacaacggaagcaacatgaacaaagacgaaaggagaagaaagcaaaggttttgggagctcgaagaggcctc

SEQ ID NO: 2356 - DNA, 547 bp, Canis familiaris
  misc_feature (1)..(547): n = a or c or g or t
agtaatttaaaattttttacaacatatttacgcannactctnataannaatattaacaaatctgtactattacgaacaacaagaaagtttcttcagtttggaaaacagtctgaggagacatatcatcaacgtgtgcggtcacaaaaggatagagagaaggaacgagtgaaggtaggatggagaggagacctgaaatattctctaatctcagactactcacaactctgccactatcttcctatgagtacttagaaagctagtgctgtggaagagctatggcagggagaaaacaatgctaaggacaccaggaagtgtgtgtttgtgttgttcttaaatttggagtgaaagggaaaatgtgtggacccacatcaggcttaggaccagagagaccatgttaagagaagacaggagaggaaagaacattaccacttcccctttctttccctttctgtcaaggacaaaagtcttcagactagaaggtagaacaaaccagcataaaaggattgaaacctgaacattttgctgctggagagaaannnncccagag

SEQ ID NO: 2357 - DNA, 589 bp, Canis familiaris
  misc_feature (1)..(589): n = a or c or g or t
cccagnctctgcngntagggtgccacgcctgcctnngccccaagttgtgtgccggccgggtcccacacctcacnnnnnggctcagtgtgggncnnnnnnnngtnnctgtcctcctggggctgccggtcaccctagccagtgacacttcccgcggatnctgctccgtgtccttcagcaagggctaccggtctctgcagatcttgcacgttctggcctgttttgccttcttcaccgtgttgccactaggtttgttaggagccaaggcgctgacgaagacgttgggcaggtggccctgtccctgggttaatgtcctgtgggcctggtttgttttctggtggcctcacggggtgactcaggggttggactttctggtgaggtccaaaaccttggtactgtccacatgcctggcccaacaggccctggacctgctgcagcacctggcggaagccctggccatcctgcactgtgtggccacacccctgctcctggccctgttctaccaccangccgctcgcacagccctgccctccctgcctctcccggtaagacagccgtctcctctgcacacccnnnnnggcaagtcctagct

SEQ ID NO: 2358 - DNA, 482 bp, Canis familiaris
  misc_feature (1)..(482): n = a or c or g or t
tagattttattttatctataatttcctaaatttacatgacaanactaaagtttttccagtttgcccaatnctctgttgcctaatatatgtaatttttaacaaatggtttttctgtatcttgtatttatttttatgtaaatgcatgtaatacatgtaaatgcagttttgttttgcttcattttgctttaatggagcattattttattttggctgttagtagtgtctgtgagtacgaatcatattttgatgcctctgtatgagatgttttatatgataactctgcttttagagcagtggccaaaattgtgagatggattagcttggtcactacttgggttactcctaacacctgtaaaccnntagtatggaatggaatgggttctttcaatgctacagaaacagtgtnnnnnagaaatatttacaaatgataactactgaagcctaaaatannnaatacaatttccagaannacttctttacca

SEQ ID NO: 2359 - DNA, 516 bp, Canis familiaris
  misc_feature (1)..(516): n = a or c or g or t
gcagaacaaagccaagtcagtnnagtcagtggcagatgaaatggaggagggctccatggtgggaatccaggagcatgtcccttctccaaagaagtccatcctgaacttccaccaagagaagatgcttttgcttttgtacctcctctactttctcctgcaggttggtgcacagtgcgtgtttttagtccttctcatgtaccaacacctgcccctggtgagccaagccgtcatgcgctgcagcaccgagagctgccctggaccctatttctgcctgatccggggtactatggagaagcgaatgtccatctacaccctcattaccttgtccttcatgatcatcctcttctgcttaggtttcttcatgtacagcatccaccattacctgttaaaagggcttgccagtgctaagttttggcttgactaacttttggaagttttcactgagagtctccttccttacactaggaagcttgtgttcctttaaatattgtgtctggggcagggcttcctcctgct

SEQ ID NO: 2360 - DNA, 621 bp, Canis familiaris
  misc_feature (1)..(621): n = a or c or g or t
cttcgggaccttgtnncagagcancaagccaaacagagtctggatgtgctagatctctgtgagggcgatctgcccccaggactcatagactctacagctccctcctcagaggtgggcaaggaccacatagaagagttggctgcatctgcccagaagatggatggagcagttgaggcaacccctcaggatctggacacaatgaccttggcaccagggaaggcagctgaaacagatgttgtgaatcaagagatagaccccctctgtgcagagtgccggttggtgcgacaagaccccttgccccaggaccttgtgatgttcctgcatgctctgtgctataaagggccagggtttgagtacttttcacccatgcctgcctgggcacaggatgattggcaagaagactgaggactatggccaatggagcaattgcttcttgaagtggaaaaggaatgggccatggagtaggatctgaccttgtgggctagtactcagggtttctataggagtgaggttcttaaaggatctgcttatacttgctacctccttctttcctctccctctagctagagttagggaacatattggtttgtaaatatatctttttaaatatatctttttnnn

SEQ ID NO: 2361 - DNA, 373 bp, Canis familiaris
  misc_feature (1)..(373): n = a or c or g or t
atgtgagtcnggattccctccactgaaagaatacacagaacactgcctgtgagnnctagaacattcagagggtgatgggnctttgtatttctagggacaagnnnggctgagaggggctccaagcataaggttttcaccctcaagnnnnnnnnnnntccagagaactttctgcctttagagaaaaccaggccacatcttatatttgccatctggtgtcagacaatcattagtaagtctagatttgtgctggtcaagacagcagtcaccagctacatgtatgtggttatggagcacttgaggtgtggnnagtctaaagagagctttgctgtacatgtaaatatacaccagatgtattgaacacaatacaagaaac

SEQ ID NO: 2362 - DNA, 546 bp, Canis familiaris
  misc_feature (1)..(546): n = a or c or g or t
ctggccacactgacgtcaagtctgtccaaagaaattcctcagaactnncgacagataaaaaaaaaggtcagatcgggaggggccctggccagggggagatgactgtgggcaggttgggacagggttcacacccaggaagccttagggtctgagggtttgaccagcagcaggaagagtggcagaaatctcaattccatcaaagatggaggtccacatcatttcttgggctcggaggatctgtttcatcctttagcacaagtgccaagggtcctatcactgtgagattggggtggggaggagaggagagggcggctagcaccgccctcctgcctgtgaatcgggctccctcctttcctgccaccacgacccctgctcagcaatgctggtcaacttgcgactctcagggtcgcacttccattccaccagaatggcctggtgaggacaattcaaataggatgcaaagatcaatgcaaaaattgttatatataaatctagcgataactggaatttgtgaaaaagcaaattaagaaaggattggaagttgtc

SEQ ID NO: 2363 - DNA, 131 bp, Canis familiaris
  misc_feature (1)..(131): n = a or c or g or t
tgttactgttttattttttattttgttgaatacacatctgttttactggcagtccagataaacaagtatataaaggaaatatttaaatttttcttttggcaggtgtcaaactnnnnnnattaaaatgcctc

SEQ ID NO: 2364 - DNA, 670 bp, Canis familiaris
  misc_feature (1)..(670): n = a or c or g or t
aattgaaacagaccntnnngncttgtgatactgaatatccagcgtnngtctctgagcgtaccatcaagnaaacctcagggaacattgcttgtgaagactgctccaagtcctttgtcatccaacaaattccaagcagcaatctgttcatggtggtggtggacagcagctgcctgtgtgagtccatgacccccatcaccatggcgcccattgaaatcaggtataacgaatcccttaagtgtgaacgtttaaaggcccagaagatcagaaggcgtccagagtcttgtcatggcttccatcctgaggagaatgcaagagagtgtggaggtgcacggactctgcaggccaagatggtccttaccctcttccctctgctcttaatgctcttctcaaggtgacactgactgagatgttctcttggcatgctaaattatggataaactgtgaaccaaaatatggtgcgacataggagacatgaaatatagtccaaccatcagcatctcatgattttaaactgtgcgtgatataaactcttaacgatatgttgacaaaaaaagttatctttttactttgccagtcatgcagatgtgagtttgctacatgataatcacccttcatcagaaacgggactgcgaatgggcagtgtcccttcggcttgaaacccattgaaacc

SEQ ID NO: 2365 - DNA, 599 bp, Canis familiaris
  misc_feature (1)..(599): n = a or c or g or t
agacctccctattnngcaaggctgccactgagattcttggagtttatgaggtaccaagagtctacatgcntcntaggctgcatgacatgcagctggttgggcaagtcaagtttgttacaatctttggaaaatattggcctgtagctggatcctgcagaacagttttgctatgctgaagaataagagacctggtcatgaattacattcttctaaggactttttctgtttctgcatctgtaaagaggagatattactttccatatatgtgtataccctcagggaccatgaagtgatgtcacagagagaagtagggtgagtgtaggtcaagaaggcatgaggataactgggggatgcaggacctgcataaatgctctcaaatttaaaattcgtcaagccaatttgtaagctctgttgtaatgagtttgggcttctccttggaaggaaagtaatatacaagtaagtctaagtcattatcatcagcaatcacntagtcaatagtattatttatatgctccctatggacagggttccatgcatgtgctaaagaagaattcacaaaaatttttaccatgtggcccctatttttaaggatttaatta

SEQ ID NO: 2366 - DNA, 526 bp, Canis familiaris
  misc_feature (1)..(526): n = a or c or g or t
caagcccgctgcccaaatggacccagagggnnnnntccntaggtggctctgnacaattgtctgctgnnnngggtgctgagcccccaagtgtccactactgagaatgctgggtgacaactggagggaccccagccatcgggaccagccgatgactggactacatgctaagaccatctccccgtgaatcaccgagtacgggaaatggactcaggactgggtcagagaagacagagccaatggagtcaaggctactccctactgcatgtactgagagctgcctggaaacacagtccttagtaagatgcctgacaaagtaaagcaggttctccccacttccagccaggacagcctccccccgccacgccactctgggcccacacaggagacccacggtgggcctgctggggacgaaacactgaagaaccaacacccagatggtaagaaaacctttgcgattcactgccccgcactccaggggaaaaagggctgctttccttaaagagagaaaacgaatcaccatgttcgt

SEQ ID NO: 2367 - DNA, 472 bp, Canis familiaris
  misc_feature (1)..(472): n = a or c or g or t
tttcacgagcannnacttttgggcannagtacnnganaagtaaatgttgcttttaatgacaacaatggtctggtncagaggatgggctccactcagctgccatcagccacctcttcgtaagtnnnngcttctccggggctgcccagcactganngtctttggttcctcttcagacttctttaggatgacatcacctcaccctgcttcaatggcgactgacttgagttatatcagttattaaaaatgatctaatatttcccttttaaatctagggccctggctcattctatgattaagctagtgatttatttataatatggtacgagacggctgcagccactctatgatgtaatctaagaatgacatgaaaacaaaataggcttttacataatgaaagtgttcctgtaatacattttatagcaaggcttttttttcccccattgagaatggagagagattcttgcctttcctc

SEQ ID NO: 2368 - DNA, 421 bp, Canis familiaris
  misc_feature (1)..(421): n = a or c or g or t
aaaaagggaaaggcttttgaaaannnnctgtgctgatcagatagaagttgtttttagagctaatgctattgcaagnntctttgcgtngactggagcacaagctatgtatcaaggattttggagtgaagcagatgttactcggnntttngtctctcagggcgtgatcacagatggaaagtacttttcctttttctgctaccagttaaatactttggcactgactacacaagctgatnnnnnnaaccctcgtaaaaatatatnnngggggacacaaagtaaacctctctatgaaacaattgaggataataatgtgaaaggttttaatgacgatgtcctacttcagntagttcactttctactgaacagaccaaaagaagacaaatgacagctgnnnnaaaactaagannnaataattgattca

SEQ ID NO: 2369 - DNA, 415 bp, Canis familiaris
  misc_feature (1)..(415): n = a or c or g or t
agaaaaacctctgttctttccaagagcaggatgaggctattctatnctagtttgagggatttttcttggcactgggtnnnnncatgtctgcacagggagttaggttatgtattaaaattacatacacaccaaaagaggtaaattgcaaaatgatttagatcagaagcaaataagtttggaccaatgctgttgataaatctaaattgttaagagagatcttatattgtattgtcaaattctttattagatttttctcaagtactggctctttcnnnntctggacaagaattgagcagcttgtccaatgactgggaaaggaggacctgcaaccatctgatttggtctctgttaatgacgtctctccctctaaaccccttttaggactgggagaggcagagtaagccccagagcccaa

SEQ ID NO: 2370 - DNA, 629 bp, Canis familiaris
  misc_feature (1)..(629): n = a or c or g or t
tattncacaaatgaagtattgacaaagacntataggatgagatcagaaccagatgnntctgatccnnnnnnntttgatngaccagaaattatgggnnntacagggtgccagatagannngaaaaaaggaaagaatgtcactttgaaaaccattaagaagaagcagaaacacaagggacgtgggacagttcgtactgtgaccaaaacagtttccaatgactctttctttaatttttttgccccacctgaagttcctgagagtggagatttggatgatgatgctgaagctatccttgctgcagactttgaaattggtcactttctacgtgagcgtataatcccaagatcagtgttatactttactggagaagctattgaagatgatgatgatgattatgatgaagaaggtgaagaagcggatgaggaaggggaagaagaaggagatgaggaaaatgatccagactatgactcaaagaaggatcaaaacccagcagagtgcaagcagcagtgaagcaggatgtatgtggccttgaggataacctgcactggtctaccttctgcttccctggaaaggatgaatttacatcatttgacaagcctatttcgagttttttgttgttactgtttgct

SEQ ID NO: 2371 - DNA, 588 bp, Canis familiaris
  misc_feature (1)..(588): n = a or c or g or t
attttttgnaagatgaaatggtngcnnnagtgatgnnaatgaagatacaagttnntaannnaaaaatcaatttaaaagatgacagtcctcgtngcagtacaatatccctggaaccagctcctataactgttcatattgaccatcttgtggtggagagaaatgatgatggctcttttcatatcagagatnctcagatgcttaacactggaaatgatttgaaaaaaaaagtcacaagtgattcaatgctgcttaccagtgaaaagtatgatatgaagaaacaacacagtgttactcaagccacgcagacgagtccagaggttccttggccttctcattcagttaacttccctgagtgctcctttgattttactagagaacagctcatggaagaaaatgaatctcttaaacaggaattggccaaagctaaaatggctcttgcagaggctcatttggaaaaagatgctcttcttcatcatataaagaagatgacagttgaatagcaggagtggcagtcagattcaaattacagctctggagtagggaggttatatttgtaatgttatgttactagttagtgggagacttttc

SEQ ID NO: 2372 - DNA, 482 bp, Canis familiaris
ccacccccgccccaccctcgggccatcctgcaagccggcccaggggcctggcacccctgccagggggcacctgcctctctcgcagcagcctggtgaggcgggcacctgccagacacggggagcagcagggacctggcagctgcagggcagccccgggggccctcgggtgctccagggaggccccacctccccagacagaagcaagaaaatgctggaccagccagaaatggggggacccatgtttatactcttctgtctgcccaggtgggccagacagcctgaatggggatggccaaaaagcagcagtgcgtcctgctaggaaggagtaaacagcattgcatggtctattgtaaagaaacggatcctgtatgaagcccatcctgacagctttacctcaagtggcagttcaagaggctggcttgcttggccagctttttatgtgaagtgttacatgaacctccttcccccccaattattaatgt

SEQ ID NO: 2373 - DNA, 562 bp, Canis familiaris
  misc_feature (1)..(562): n = a or c or g or t
cctgcnnntcgcaganncagaggncttcctcaagaaagctgtggtgcaacccccacaggtcacagaagtcctttaaggggtggccttggatccaggcgcagctatgagggctcctctgcatcatccaccaggatgcctggaagagaaagagacggatcgaagccggaagtggcctgggcccccgggggtgggtcctcttgttatttttactctgcaccttatagactgacgtctcttgggccggagccagaccccgcccctcagtgcattcgtgtgctcacgcgcgtggccaccccgctccccacacacacatacactcacagcctctctggcctcctccctcggggggggggggcgcctgtagtatctgccttggttnnnnnnnnnnagtggatgtgaatactgtaaatagctcgtgctcagacccctctgcgtggagggggcgggtgcaggaggcagaccctcccgagactccctggggtgatcttcctctctctatttaactgtaactgagggggcacccaggtccgggggtggggggcaccttgggccacaggagact

SEQ ID NO: 2374 - DNA, 480 bp, Canis familiaris
  misc_feature (1)..(480): n = a or c or g or t
agcccccccaatcccccaaaccctcccaccccacccctgtggnctgcggtagacacaggcgcctctggacactgtggctcctctgaggccctccgccgcctcccgtgctggcctgtgagcccctgggggacaggacctgtttctgatctgtcttggtctccacagtggtacaggtaaagaaatgtcatctgctcccatgcaggacagtgctgaccagagctcctcggaagatctctgctacaccctcattaatcacagcgtccttgggggaaagtcatcagggatctctgctgagaggcattcgtcttccccagaagatgcatatgaactcatcatacctaggagnnnnttctcctactccctgcaacagccacatccaccaacaccacatttggagaaccgggtttcctactgataacgaaacagttggaccagcgcccgtctaatagcaggatcagcaaactgtgacccaggggccaa

SEQ ID NO: 2375 - DNA, 601 bp, Canis familiaris
  misc_feature (1)..(601): n = a or c or g or t
tgtctctctcaattgaacatcagcttcaagagagtaggatttttattttgttctttgctagtcttcagcacctagtaggcttgaaaaaatgtttgtagaatgaatgaacaaacaaagttggcaacatggacctaataaccccaagagaatgcttgacaacttggtcaaatctgctactttccagctctaaaactttggacaatttcatgagcttcaattttcttatctgtaaaatgagtctaataccaactttgtggaattattatggcaattagacaaagtatgtgtacagggtctggtacccagtgtgctgctcagtaaagctgttaactgcaactgcttttataaggcataagaagataaagggtgtgtataaggaatttggccttggccaaagaggtctggcttttgctcctagttcctaggaggtaacctttaaaccctggtttaaagttttctgagggttattcatggtaggcccctaagcccacccctggtagtttatgctgaggtgactcatggtaggctgcttgggccaggtaataggaacctgacctccagggagtggagtggggctagannnnnngctccaatttcatgg

SEQ ID NO: 2376 - DNA, 513 bp, Canis familiaris
  misc_feature (1)..(513): n = a or c or g or t
agaggcnncgaccactnnntttgggaaagaccaagattggccagttctagctgtggatttggctcatcacctgcaagtcagtgaagatgctgttcgaaggcattacgtgagcgaactctacaannatggcgtggaccacttaggagaggaggccattctccaggtccaggacaaggaggtcctggnnnngcagctgctggtgttaacggggcagagactggctcacgcgctcctccacacgcagacgnaggaagggatnnnnctgctcgccagacttccacccactctctgtacttggctcaaggccatgaatccccaagatcttcaaaacacggacgtgccaatcgcaacaacggctaaattagtnnnnaaagtaatcgagcttttaccagaaaaccacgggcagtatggtttagncttacacctcattgaggctgtggaagccatctctctcccttccttatgacccttccgtactgaaaacggtctaaaaccgtgtgactcncttagtgc

SEQ ID NO: 2377 - DNA, 513 bp, Canis familiaris
  misc_feature (1)..(513): n = a or c or g or t
tccttgctttgcnngtgaaaagctatgcttgacatgttttcttaaagggatatgnnntgtccccgataacattngaagagacccacatcaagtacttcggtatccaaaataatcctatctttccgatgtctgctgtgtctcctttaaggaaaagaacatcttggtgatgaagattggctactttcgcgtatgaatagctatcattgttgaaaaaacatggacagattgtgaggtctgagctcctgcccaccccacccacacacaccccctacatgtggggagggagagctgcccaccccctctgaggggttcctcacactcctgactaacggccctcagccctcgctgcatcccgtcactccttcctgccacagactgccttgaagctctttcttttgcacagtttcttgccctgttacctcctctgagctcaaatcactggacagaagggacttagaagcccggattcaacaacttctcgtccaaatcccatatggatggctccgcggcccc

SEQ ID NO: 2378 - DNA, 495 bp, Canis familiaris
  misc_feature (1)..(495): n = a or c or g or t
ttttcctttttttccnncgccngactaaattctnnnctctgtctctctctttccaaccttacactgtggccaccagttcgtttcagccttccagtgctacacccacttcttggnngacacacttctgctctgaggtgactggttttcttgcccattttcagagagtggtactaacgcctaacctgctttccgtgccccgtcctccccgccgccgtacgggttgtgctaactgtgaatatccggcagactaatggactcattccatggcatggtgggttgacgctgtggggtggcgttccgctcaaaagccatggttgattctacttgcctctgagccggcagcccggtccacaccannngcatggcctgcctcccttcggccccctgcgcggcctgcatgcacgtgcctttcccgtcgcgaagccacttaccttcctgggacggtcacccccagctgtgagacaggacgctagagagggctctgttcacctttgg

SEQ ID NO: 2379 - DNA, 555 bp, Canis familiaris
  misc_feature (1)..(555): n = a or c or g or t
gttttatnctcgtcacctactcnaggtaagatggacctgagaattaagaagcttgaaataatttgcagatagactgaaatttctcactaattttttccagactaaatagattatctgaatcattcattccaactaaatactctccctttaccatgaaaggtgcagaagatcttaagggagttctcagtttcatttttttctcaactcagcctaacggactaaatcagtgggtaatgctccactgctatttcatggcaagatcaaagggtctatgcttaaagcctaagtaccgtgccttcctaagtagaaatagggttcattttactccaaggatagaaatcctggctgtcttttttatccttttagaatcagtggggttttcagtcacctggagaaactcataataggactagggctcccattatacattttggaagcttttgccagtgtgtgtccctgtgtagtctctccacaagggaaatcatcaggagtatattgttcactgtcacatctttttgagtgtgggcgagctttagcatcattcacttggttact

SEQ ID NO: 2380 - DNA, 538 bp, Canis familiaris
  misc_feature (1)..(538): n = a or c or g or t
aacatgctctttggactgcctnnaagaactggtgtgaaattttcacagatatcataaccactttcatctgatgtctcttttcatgatcttcgctttgggcctctttctggtctgcggttctgggctgttttcagtctgataagcctcagatccactggcccttcaaaacgtcagccacaaggaataagtgaaagaggattggaatgtacttgaaataaactatacaaagcaagtggtaaaaatcagttttagaatcaaaccattgttgatatatacatcaggcactggatggaaatcatttaaaaggacttctgggtatgtacatatgtagtcagtgaacacaataaagcttcagaatttgctagtactctttagtatgtatttttgtattccgcaagcaaagtattcttattcacatataaattaaaacagagtcccaaagatgttcatgtttttaaaaggtatnnnnnncagatacttgattcactacattctaggtattttaccccaggtatataaaaatattgatacattgtat

SEQ ID NO: 2381 - DNA, 584 bp, Canis familiaris
  misc_feature (1)..(584): n = a or c or g or t
tnnagcttattgtagtgtaatattcttcanatatgtaaattctgccagttatctaaagcatgctagtttggtgctacagagttttgatttttgtgaagtccttttgtcatgttcctattagaatgtagctgtgaaaactcataattgtcaatagagacaaatatttgcttggaaaaaagtttctgaagtaccaatgcaagtggtttttcttttccagcccagaaaactaaaggtttaaatttgcttgtactagctgtgccttcattactttgccatagaaatacagtacttagattaattagaacagctaaatagtgaaatatgactgcttgaaaaaagattagcataaatttaagaatgtccatcaagaccacatatgatatgactgaacttatttatgtgacatagtgatctataaattaataataatgaaattattgtttaccactgaagtgttaatatgacatagtattttttaagtttcctcatcttatactgtgtaattgtaaactaaagttactaaccacattttctttataatatgttctattttgtctttcactgagatgatcactttatatcat

SEQ ID NO: 2382 - DNA, 656 bp, Canis familiaris
  misc_feature (1)..(656): n = a or c or g or t
atgcgacgtgccattgagccacttgatagtcatactggtgtgtaaatcggtacgtagagaggangagtgctctagggaacagcacttgtcggtgggggaacggttggaataaaaaggatactacttgtcagtaattacgaatattattggccttttggatgtaaattaacatcctgtcatctctcctttaaaattaggttgtatggtttgattgtttttttctttttctttttaannntctaacttttcctccagttggaagccacaggtatcgtgggtgggttcctcgtttacattttcccagaccctgtttgtaggtcttaagggtagtccccaggattccagcctcgcacgttctcttgcctcnnnggtgtgccatttaatgtttctttnactgaggtggttccctgatgccgcttgagnntgatttttctgttgcctgagaaatctctgtgttttgtcctcccccacgtctccttcactggtgaaaacatgcccatgcgatgctctccggtgggtgaacatgggacagagccccagcttcccgactcgggtgcggccctttcaccnnnggcccttgtggcctgagnngggtgggcttgacctgtgtctgcctcattttcnnnactacaaaggacagactgacctacctcaca

SEQ ID NO: 2383 - DNA, 155 bp, Canis familiaris
  misc_feature (1)..(155): n = a or c or g or t
gntagtcttcccctnnnntttnncgaaagcttactgacccagtggcccccaggtgcgggccgggcctcggtttactcttccatannnnnnnncttttccgggcacctnnnngcatcagnnnnngtcatcagngtagntgtgagcagggaaaaagc

SEQ ID NO: 2384 - DNA, 456 bp, Canis familiaris
agaattattacagctcggcaaagaccctgtcgatggtaacagttcatttctttcattggatgaattaaattacagtggcattcttaaagatttccctcgaaaagcaatcttaaatgaaagtgtatgacttataagaaaagctagctatcttttgatgtgctgtttcccaaaatctctgacactggagggcagctgtcttgtgcagtattttgtttccagcactgacattgtgggaaatgttgctgtagactgctgcgcagtcccaggtgcattctgtccctgcccacctcacggtccccactttaaagattgtgcagctctttaaataataaagctggaaaatatttttagtcaggttatcaaatttgatttacaaaaatgctaataactttgaaatgcgaaaagatttgaaaaaatatattaagtatactttgtattctggaagcgtgaattgct

SEQ ID NO: 2385 - DNA, 502 bp, Canis familiaris
  misc_feature (1)..(502): n = a or c or g or t
atactatctcaagagaaatgggcttnatagctgtaggtcatagaaatggnnnaactttgagcccagaactctcccagatgtttgatgatgtgacttgtagctcctgnnagctgaatacnnnngctcatggctttgggaaataaagtgaaagattctagtgccccaggcaggaaaggagttcatcttcaaatgaactgcatgaacatggtcagaaaacatcgctgcagcaaccaattctcactaaccccaaagttcttcaagttttctgggcaaaatatggctccctgggatgttagtaaaaccctaaagatcattgagggtccttacctctaccaactgcctttccagaatacgatgcatgactaagaatttcctgtcatctctttgtgacaagaagaaaccatgttagatctctaaaaaggacgtggctggatgttatcttgagtgccagcagaaaatattactgagtacagacagaacnnnttgttgtactcatagtgat

SEQ ID NO: 2386 - DNA, 532 bp, Canis familiaris
  misc_feature (1)..(532): n = a or c or g or t
attggggcatcccttnnaaannctgattcatagctagattnnngaaacagggaatggttacatgtagtttggtggttggannaagtaaagatttgggatagagttgtgaatttgaatcatggcattagcccagaggtgctgtgggctgaaatgaccatagctctcaaggattgatttgtcctcatttatcaaatgaggaatatgacacttgtactcttctcagattgtttcataaagatctaactacaagtgcaatttattgagggcttgttgtgaatggtttaagaagtgggctaagtaatgcattttcctcttagtatagagagttagataagagagtcacatatattttttcattcccactgtaaaatgtgtatcctagtgtgggctcctggttgacacctgtacgtaacaactttctgtgatctagcaaattcagcagctagaaagctgattatcagtggacacatcatatttgatatttggcagtgtcattgttgttgtgttgtttgctttacagtaaaccctgaac

SEQ ID NO: 2387 - DNA, 390 bp, Canis familiaris
  misc_feature (1)..(390): n = a or c or g or t
agtataactagtttaaaaagcatatnnnnnnntagatgataaaaannnagttaaggtaaaacagggaantttgtggtatnaannctnnnagttaannnaaaagattatttgtnnnctatattcagaagaaaataccagagtttaaaatggaaaataagagatcaaaatgantataatctaggaagagntgtttgattagaaattgcaactnnntnnnttattaagggtgttaagtcttaaaaaaaaaaggggggggtgttaagtcttactatttgatttattttactgttttgtcnnntatgcaaatnnnnnaaannnntttctcaaacttaannnnngaaagnntnttnnaatcaanntaaatatttannntnttaaagntatttatng

SEQ ID NO: 2388 - DNA, 521 bp, Canis familiaris
  misc_feature (1)..(521): n = a or c or g or t
aaaatggtagnctcatgattagaaatccaaaattatacaattacaaatcaaattataaaattaagactgagtttgtgagtaccttgaaaaatcttttattatcgatttttacnnnaataataccttaccttttaccttgacttatattaatacattatctacaatttgattcagatgttggaggactacttcagtgttccccaaaatggcttgcagactactaaaatagaaatttgggagtgggatccaggaatttgtattttaataatcatcccagataacgtctaaggtactagcttgagaattcatcnaatctatgtaccaggcacttcatttggagttnnnaatagaaaaaaggtgggggaaaggcntnnnnnctttttgaagaaaaatttggtngaggagnnnnnnnnnnnnnnnntnnnannnnnnnnnnncannnnnnnnnnnnnnnnannnnnnnnnnngnaggnnnnanannnannagnnnnnnnggtgcttttcatttnnnnnnnnntctc

SEQ ID NO: 2389 - DNA, 538 bp, Canis familiaris
  misc_feature (1)..(538): n = a or c or g or t
ccctccagccagcccctcacatgacnntaagacgagtagtctaaaggggtagatagcccgaggacccaaattctcaccatggcagacactgctgggagcctcctctgttctggctggaaagactctaaaatccagtgtggtgctatggaaagagcacaggactgagggctctggactctcctgcccagagagggtcaggttatggcccctcattgaacctccactcatttatatgtaccatgaagtcactgaattaaggagagcagtgaacatcaaactgtttcttagagctgtaagccccacataatttccctcaacaagggcaactcctgctttatatatttgatatgtaggtgttcagtgagagatttggggtttgaaaagaacgattttcctgcattaaagaaaaaaaaggatttggaagcccgagagctgaatgatttccaagtctgtcctaccccacctcctacacttgggaactacactgaagacctagagtagggtggttgattggggttgggagctggtgcgaagagaa

SEQ ID NO: 2390 - DNA, 549 bp, Canis familiaris
  misc_feature (1)..(549): n = a or c or g or t
gcnagcgcngcctctctaagggcagcttccccacctcccgccgcaacagcctgcagcgctccgagcccctgggcccgggcatcatgcgaaggaactccctgagtggcagcagcaccggctcccaggagcagcgggcaagcaagggggtgacattcgccggggatgttggcaggatgtgaattcagaacagaagccatgcgtctcccccacaccagggcccaccatggagcttgtacactcagaatctgctgaccaacacaactgtgcaagaagaccccagtactgagggagtaaaaagctttcaaaggggcatggagagtcctgcttccataggaaagagccaaacatgtgggaactatttactnnnnnnnagaaggtatcagttctgcagccaaccatcctcatgcctccacctccccaggcaagggtcaaccactaagcaatcccactcaagccctgatgcttctagagggcatactcccagctgaccaagtgtatggggtgtactcacactagacttagcaacagccaataaaaatgnnnaannnn

SEQ ID NO: 2391 - DNA, 631 bp, Canis familiaris
  misc_feature (1)..(631): n = a or c or g or t
tcttttnaaaaagataaanngttttgaagaactagnnntgtaaagagttttaagaattacnnnnnnnnnnccaagactgtcaccatcaggaccactctgnagccctnntnnaangaacagtccatnnncaatccaaatactaccctcataaagcattcctgatttatctagctgaatgtaatctttgcttccttgaaatttccctatttttatatttaacttaactcatgctatattactttataccttgtatatatttatttatatttattatttgttggtgtcttatctcctctcaacatcttaggacaggatctctgatggactcatctttatgcccatatcatctaagcccagtaggcaggtgctcacaaagatgctgaaggaaattatgtagggagactaaagctgctctgaaattaccataacaaaagataggtgggaaagaannnnnnnntcgtgttgaaatgaagcacgaaggaacggaatagaaatctaaggctaataaggaagaaataatgactgtgaatgcattttagccattcccctttattcttaaatattgatatacttatttagtttttggtgtagatttcatatttgtttagaattaaaattagaattctgtatt

SEQ ID NO: 2392 - DNA, 499 bp, Canis familiaris
  misc_feature (1)..(499): n = a or c or g or t
gtatntagggcatcaggtncttggtgnnacactacgatnaagtggaatacctactctcctacttaggactcttaacacatttccttgactcttgtaaatattaatgtaaagcttgttactgtttatatgctaaagaaaaagctttccaaaatgagactgaaattcagaatatcattgattaaagttttatttatatagctttaataactctgcagagcatcccttaacattctagcataagaacttttaaaaattgcatgagattcaaagcccattannnnnnnnnntaatttaaagccctaatgtaaattgcaaattttagaatttatttttaactcttatttatcacatgctctaatgtatgtaaataagtttctgtggcttaattaatgttattatttgataagtttttgtggtgtgaatgattaatgttatttgattgttaataccatatgtgcccattaagattctttttacttataaaatatttcaaatatac

SEQ ID NO: 2393 - DNA, 468 bp, Canis familiaris
  misc_feature (1)..(468): n = a or c or g or t
agnnnnntcagtgcaaanctncnnaagtcagttgatctatacactacagcagaatgannnnngattgatnnnaaggagcacctaaaacttcacaactcaaaactttcataagctttgctttggatttttcaaataaggcaatttcaaaatgtttatgaaaaatctgtaaatattggtaagaatgagccaattcttaagcttaaaggcttaagtcctaatttaancgacaatgctgaatanntagatcaaatttctgttcccagttccccaaataacgtaacagtgtcttttgaacacttgaagatgaggaggctccactgaaaaagttaacttatctttctatcagaatccactcttctagagataaaaactcacaacacccactccccccacatacacacacatgcaagtgcatgtgcgcacacacactcaccctaaaagtccaatgaaagactgagaagaaatgac

SEQ ID NO: 2394 - DNA, 343 bp, Canis familiaris
  misc_feature (1)..(343): n = a or c or g or t
acacaaggcannntaaaacttcagctctctcaagagccagatgaatcaaactttgacaggtattgttctgaagactgaagaatgcagaactcttggcctgtaacagctccatcacaacttctacaccaagagaatcgaccaagctagtatggcttcaagtagcgtaaggccttgtccctaggataaccccagatccccttaaaaaacctgcctggagggaaagttaacaatgcaggggaattgactgttccaggcaaagtcttgtgataggcagagagtacctacaccccctctcttagagcagtttctttgtagagcttgcatttataaatcctttctctgc

SEQ ID NO: 2395 - DNA, 401 bp, Canis familiaris
  misc_feature (1)..(401): n = a or c or g or t
taagtcgtctgcttttcnaggcagccnngatggaaggggncaacagcagacttctggtaggatcaaaacagnnnggttagagcatgtgggttcccccaggggactggtccctgggggcatgggcccccagctcttatctcacttctggagacattatcagacttgatgttttaagactcagctaaaatgtatgagcactagggggaagggacaaagacgatgtccnnnggggaaaaaagtcaaaacattttagcnacatgcctcaatttaggggggttctctggaaataccagttgaactcggccaaagggagactgcatctggacaatacacttgcaaaaggggaggaagcacatctagttcatctgtttcagaactggaatggtcccagggattttcac

SEQ ID NO: 2396 - DNA, 356 bp, Canis familiaris
  misc_feature (1)..(356): n = a or c or g or t
cggagcgccctcggggcagggctggtctagcaggcgggggcctggccgagggcccgagggcgcgcgtgtcccggcgggtgggggtcccgggcgggtggggcccccttggggcggggccgcggaggagccccgccttcggccgccgcggggtggcccccggggttccgccgggtgtttgcaggcgcggccccgccgggggacccgatcccgcgccccgggggacccgatcctgggcccctgcagccctgggcgggaactcgcgcgactgcagccgcagggctcggtggacagaggccgcgagggggcgcccggccgcgtggtcaggctccgggcannnncnacnngacaaaaagtgt

SEQ ID NO: 2397 - DNA, 257 bp, Canis familiaris
  misc_feature (1)..(257): n = a or c or g or t
gttgtttaaagcaatatgaactagctgaggaagnnnnnagcaaagnnntgtctttgaaacctgatgatgcnntaatatataatcttagagcagaagttcgtggtaaaataggtttgactgaggaagctgtgtctgactacattcaagcacttgatcttcaagaatattcctcagtgatatgattacacacagaccatggtttctgtagcagtctatacagctcttcttccagaaatggaagcttatttgttgtttaa

SEQ ID NO: 2398 - DNA, 571 bp, Canis familiaris
  misc_feature (1)..(571): n = a or c or g or t
cattggaattttttaatttctattnnngctgaagattntatcccttatgtaaannagcaaattgaagatgatntagttatattggtggtnnattagctccttgatgccattgaggnngcaacccagttcttgaangaattaannaaaacaactgtcttacaaattgaggacatcctgtacaacttgtctgacaaactgagatccagaaaagttcacctgtccttttgccaatcgccaaaccaaccctattcatctcaagaggcttgtaggtgttttcaaaatctggatttaggaaataaaattccttcttggaggaatttcacgttcttcctctgtgcctttgagatgtaagcattcttcctgggttctctcagacttgagggccatctctttgaaatgcaaacttcagggaggtttgactacttaagaaaactcaatcttctcaattttaaagccactaaggtttcttataactacgtaactttctgtatttgcctttgaagtctttaaatggtatgctgtgttctctcaaaagttttaaatgcatgtgggcagccagtggccggtgaca

SEQ ID NO: 2399 - DNA, 435 bp, Canis familiaris
  misc_feature (1)..(435): n = a or c or g or t
cccctttatctgcttcaaggctgggggcctaaatttgatnngctcctcagttagtgtcatacccacannaacccggagggctgtggaagagtgtaggatgacaacaacttcatagattcttggtatagagatacacacagaacttccctctctcaccattgggtatttatttgccttctggtgatagctttcagggcaagagagttttggattgtgattctcattgctctcactcctggttcattatcacataatgatttgggatgaggttctttctgcttgtttgttttcttccctaaacctattgtaaatctctgttttttttttctccctgcctttacccagagggtccccagaagtattctaattaactgaacagttcctctatttcactcattttttccgtcagaagggaaagcctagggatccctgggt

SEQ ID NO: 2400 - DNA, 572 bp, Canis familiaris
  misc_feature (1)..(572): n = a or c or g or t
caccaaaattgancggagaagggagccctgataaagaatggtaccctccctctgaccttgacttctgtgtgtatgtggatgaagtgaccaaatcgatatttcccataancaatattgaggaacagattgaggctctagcaaagtatgtggcagaaaaaatgggtggtaaagtttcaaaagagaagctacatgattttggctgggaacttcatataagtgaactaaaatttcaacttaaatccaatgttgtaccaattggacagatcaaaaaaggaatcttctaccatcgagctttgcttttcaaggctctggctgataaaattggcatcggctgctccctggttcgtggggagtatggcagagcttggaatgaagttaagttgatgaatgaatctcgtaagggactgattggggctcttcctcctcttgaggtgtatgtagttgacctcatgttccatccaggcaggttgatgaagttaagaagcaaagaggcagacctttacagatatctctaagctatcaaatgaacaannnnaggctcacacaaaaaaaggcattacatacactttcta

SEQ ID NO: 2401 - DNA, 518 bp, Canis familiaris
  misc_feature (1)..(518): n = a or c or g or t
ctggggcaannaactcnccggggggtccagcgcggactctaccatttcgtggggtgggnntgcgggctccgactgcaccacgtnntggggctcggggctgcaggcggactgcaccacctcttcaaaggggtaccagacttcagatctccccacgtcctccgaacccagccagcagtcggaccgcgtaaccttggcttgttaccccaaaagtaaccaccgaggtcccattcagctgtggcagttcctcctggagctgctccgagacgggcagcgtagcaactgcatccgctggaccggcaacagccgcgagttccagctgtgtgaccccagagaggtggcgcggctgtggggcgagcgcaagaggaagcccggcatgaactacgagaaactgagccgaggtctacgctactactaccgccgcgacatcgtgcgcaagagcggtgggcgcaagtacacgtaccgttttgggggccgcgtgcccggcctggccnnnnnggactgcgcggggcgtgnnnngg

SEQ ID NO: 2402 - DNA, 668 bp, Canis familiaris
  misc_feature (1)..(668): n = a or c or g or t
atgacatgaaaaagtctccagagattatcagtnnnnnnatgacatttgccctctgttgttactccttgacattcatgagatttgcctacaaggtccagnntcgaaactggcttctgtttgcatgccatgccacaaatgaagtagcccagctcattcagggaggacgccttatcaaacatgagatgagtaaaaaggcatcagcataacagtggaaaatgagcaaccaggtgtttgaagggacagcgtcagcgctgctgctgagtcacagattccatcctcagaatagtcttgctaaggaaaataagctgaatgctatttttactaaccaatttttctagaaatagctgagagtccctaagccaactctctgctgccttacacataccaagtattttacttctcttcataaagagtagctcaaaatatgcaatcaatttaataattcccaatgatggttttatctgcagtaatatgtatattatattacttgctagaatttacttaataaaaaattggataaaaactgtaattattagcacttaaatactcagaatctttaactctttaatgaccctgagaccaccgacagccggccatacttacactgtcatggccagtgttagagaaagtgtgcttccatgcnnngtgtatattaaagtgctgtaact

SEQ ID NO: 2403 - DNA, 562 bp, Canis familiaris
  misc_feature (1)..(562): n = a or c or g or t
aaagagataaactngnacttcacattttagtagacctgcttcnnnngctactagtcctgtagcaaatccagtttagtctgcatcttagtgggtagaggatggttcttttcccaccctcaccatttggaagtggcaagaagtggaaacacagtttgagagtagagctaacaggagaggccaagagagaaggaatcttcagtctgagttgattatccaggcagaggcaaatcattttgttctagcttttagttgaagtataacatacacaagtttttggtttttcacaaatgggccacaaatacaatcaccacttcaatcaacaaactattaccaccaccccagaacccccccaccatgttcccttctggtaactacctccccaagggtaaccactatctaacgtctgagaaatagattagttttgtctggttttggacataatctaaatggaatcaaatagtctgtattcttttgtatctggctggtttgctgtacatgatgtttgtaagatttttgttgcatgaatttgtatgtggtttttttttttctctcnnnnnntgta

SEQ ID NO: 2404 - DNA, 435 bp, Canis familiaris
  misc_feature (1)..(435): n = a or c or g or t
atacactncctgaaaaagaanncgatggttatggcatnggaaacccccatcactatgacacaccaccccccacccccccatataagagaccactaaaccacatatatatgcacacagacacaggcagaaacagacacagggacactgccttagggagtgaggtgcgcccccccccgcaagtgtagactccagcaagtagaccccttcaggtaagcatttgaactgagggaagagcatgaatgcaagactcgcacataataagacctttgtttcattcttttgacatgcttatatctttttatttaaatgttaagttattggctctaaatatatttaaaacagtattttatgttcttacaacagaaacatttttctcttaataaagtcagaataaactannnnnttgtaaattttttataaatttcaatattttcc

SEQ ID NO: 2405 - DNA, 567 bp, Canis familiaris
  misc_feature (1)..(567): n = a or c or g or t
ttgggcatcggtcaggnctgnatgactcttcacagagnatagctaatcagaaactcttcgatgtcatagattgcataagatgctgcttnnnanntagctttgtcatctgagagacttgtgtgagactttcatcatctgggtgggtggcttaaggatgggaattcaggtaggcatgcagacaggcaannagatgctgaaggaggaatacagaggtgttaccactctggcccattgttactggaggattctaaaattcttactcacatgttagcatgtgacttagaaagcaactacannnggggggtactgggacacgggctttgtttagtatctgtttccctggcatcactgaaacactgcaatgttgaagacatgccctgcaggatgcccagctgtgagaaggaagcagcagtcaaatgtggggcaggccatgagcccacccttcactcaggagctctggccaggtctgactgaaatcttggtgctccctccttgcctcgtgcctagccccatgtaacccgctggctcctgcgttaacccaggggtaccttgcttgtatctgtgcat

SEQ ID NO: 2406 - DNA, 466 bp, Canis familiaris
  misc_feature (1)..(466): n = a or c or g or t
gttgccgacnnctactcggagaacaacgtttttttatnnacaccacgcgaagatcgtctgcctggcctggtcaccggacaacgagcactttgcttccggtggcatggacatgatggtgtacgtctggaccctgagtgaccccgagaccagggtcaagatccaagatgcgcaccggctccaccacgtcagcagcctggcctggctggatgagcacacgctggtcacgacctcccatgatgcctccgtcaaagaatggacantnanntactgaggagccccctcctttggacagaccgaatcagggactagagcttaaccgcagcagaacacgtcatttctctaaatatttctgtaatgcgcccccatgccccccacccgctcaggagggagggccttcactcgagtgccctcatctctctgcagggtgttcctatctgtacacgtccttctgaaagctttagacagt

SEQ ID NO: 2407 - DNA, 440 bp, Canis familiaris
  misc_feature (1)..(440): n = a or c or g or t
aagnnnacagagagtttgatgacttcactagctcngtgnannnagnncttccagcactccatgtaaaganngctgcccacggactggagtacaaaaaagagttgccaccagtcttcgccctgtccctatcagcatctgcccctaagtgactgtggtatgtggcttcctcatacatacatacattcctctcacattggccacttcaacttcaatgctgggggtccnnngcntnacganannntattaccacttgngnnngcagtnngccccctannttcnnaatgactcagacacctgtattctcctttccatccaatggcctctgtcannncannnnnngggtcttcctttggtcacaccaatttgtgtaacatgaacttgnnncatgtgctacacattgagctgggtatggggtcaangntgtccaaagnnnnnnccnn

SEQ ID NO: 2408 - DNA, 355 bp, Canis familiaris
  misc_feature (1)..(355): n = a or c or g or t
ttcccagggaaccggtgaatgggcnnncgcagccatttatgagcacgtnnngtgtgcnnngctcttnnngaacataatgatttcacttcattttcaccgctgctcacgcggtangaattnngccccccaattcaaagacatttgtggcggattgggccccagctactccagcctctccacaaaagttccaagatttggggtaccaccatcaaggccacgctgagaccggaccacatacgtcaccggaagcactgccccacctaggcgggtgcggtctcataagccccactggcctcggggtccgtggtgaccaccagatttaaagaaactaggtcatgggccgggggtctgggat

SEQ ID NO: 2409 - DNA, 60 bp, Canis familiaris
  misc_feature (1)..(60): n = a or c or g or t
aatgagcctgtcaagagtncnctgtgtaattggtctcatgatgccgtacatgaagcctta

SEQ ID NO: 2410 - DNA, 617 bp, Canis familiaris
acagatcccagtttttcttcctaacaaagtcacagagtttattgacattcagtacgaagtctccagaagagaaactcacaccaacaagcaagcagctgctagcagaagaaagtcttccaacgacaccattttatttcatactgggaaaacacagggaacagcaggatgaaaaaataaatgaagctttggagagtgaactaatacaactacccttaacagaaaacatacctgcaattaatgagcttcttcatactccagctcatgttttgccatctgcttctttcctttgctccaagtttgttaattcattgctgctgtctaaggagacaaagagtggtgaagaaatcccagaagatgtagatatggaaggaaaagaaagtaatgattcagatgaagaaaaagattttactgaaaagatagaagatacaaacagcacagatttgggagaagaccttatacatcagttgtcaaaatctgaagaaaaagaactaagaaaattcaggaaagtagactacagctggataactgttctctgagcattggagatagaggaagattcttgcactttgtgattttttttattatatgttgatatttcaaaaacatctactttattt

SEQ ID NO: 2411 - DNA, 411 bp, Canis familiaris
  misc_feature (1)..(411): n = a or c or g or t
gcncnctgagctaggatatttgggnanccatccttcaaatagtagccttaaaagtggagcactatatgtgtggtccaaacccttcactcgcagggaaactctgggagttgggagttccctcccaattgtcaggcactgtgccaggggtgaggcttatagtctgtgtctcagtatttcctactcattttgatgtgagtgttttctcagtaggctgatgtggaggagttactcagttggtttttaggtttctttcggagggtaatgatccatgtgtagctgtatatttggcaaatctgtggnaggatggaaagtcataagccactattttatcatcttggtcaatctaagacatttgctttccaatactgtattcctgttatttctttctttaaatgattcatgtcactgttc

SEQ ID NO: 2412 - DNA, 633 bp, Canis familiaris
  misc_feature (1)..(633): n = a or c or g or t
caggctagtcgncaatgacacnngtccatttatttttnnnnngctggctactnnnaatactgtcataatggctaagaaaacaaattggataaactgtctaacntaatcccttcagtacctggtggtgcatttcagcaactgcacttgaacactaaggaccaaaagtaactgaaagcatgaggtgatttcttactgcatccaccagactaatgtcaacttagttttgatttgacataatcacccatttacttattattactgtcgagcaagtaagacataaagcaacagtaaccgaactaatgagggtaggagaggcaggtcagtccctggcgttgaacagatcccaggcctttaatggggtcgtgcaaaccttgtctgtatgtaaaactgtattttccttgcttcaaaccagtgaagtctgggttctcttttgtgctatcagttgccaaaacagagcttcttatatattctactggaataactgcatcttccattcagtcactacaaaagcccatagtttcagtttgcatgactttcccccccccccccccttcaatggttgtgttgataaggatccaattctgggacagaattgttatttttaaagtcattttttttttgaaatggatatgt

SEQ ID NO: 2413 - DNA, 565 bp, Canis familiaris
  misc_feature (1)..(565): n = a or c or g or t
agacctacatatggaaagggtgatcagttatgaagaagggaaagcgnnagcagagtcttggaacgccgcttttttggaatcttctgctaaagaaaatcagacggctgttgatgtttttagaaggataattttggaggcagaaaaaatcgatggggccgcttcacaaggaaagtcttcctgctcggtgatgtaatcctcctgcagaacctgaggacacgggagtcggtccagcctgaagaagcagactgcccgttatcctttaagataaactcagcttctttttccttctgttaacctgaaagatttcatttgggtcagagctttttcctgccccaccccccttcagattatgttaaactctgactctgtccaaatgagttcacttccattttcaaattttgagcaatcatattttcaatttatatattgtatttcttaataatattatgaccaagaattttatcggcattaatttttcagtgtagttgtttaaaatcatgtaatcatcaaaatgatacatacataattgttacactactattaactaggcttcgatatatcagtg

SEQ ID NO: 2414 - DNA, 544 bp, Canis familiaris
  misc_feature (1)..(544): n = a or c or g or t
tctccnnnagggattgacacagcccccggnnngaaccccctcagnnactacnnngnnnaggtcccactgaacagctctccagttgccttgccacccccttgccctccagagacgccccccaccagcccagccgccctcagacaggcctcagagtccctggcacctccctctgctctagctgctggccaccatcctcttggagccttgtggccactcactcagcccctgctgcccaggctgcctccaccccactgtgtggcccagcccggcccatgcaccaaagaccctgcacgccgtaggcattcagtgcattgtggtcaaggagcagaccgaggaaggaatggctggatggcttcagcaaggacatgtaagccctcttcccccgaaagggcacgagtgagattcaggctgccgttcctcacacccccgggcctctttgcccaaaaaataggaagcatctgttaccctttgtacctcccactgccccatcctgccaccccaaggctttctactgggccttgccaggaccccagcccatgaggtc

SEQ ID NO: 2415 - DNA, 543 bp, Canis familiaris
  misc_feature (1)..(543): n = a or c or g or t
cagctatagngcaggcccctgttacaaactggtcagaccacgcacagccctgccctgccctgccctgccctgccgactgcaaggcctccatctgcccagagacctacgctgccacttcaccaccgtccaccacattccagcgacagaacacagcctttgaaaataaggaccaacctagaagatgcctgagttggctctatgtccttggacattgatttggacagctcaccagcccctgaaggggccagtctttcaacctggttagttccctgcctactcccagggtcctccccttccccaccagattgctgcaggggcctagtgcgcctggcagccaaattgttgacatttcttttctcctatgcaccagttttgcacagctgtcctttttctttccaaactgcagcagtcccaacagatgtgtgcatttggacagaaatactaaaaacaaaacaaacaaacaaaaacaggcactcagcccagctcctcaataccacctggaaaaaagcatttacgttcttttcaataaatatcangnnnnnn

SEQ ID NO: 2416 - DNA, 259 bp, Canis familiaris
  misc_feature (1)..(259): n = a or c or g or t
ttggaaagagaatnnntatatgaagagagactggttggtttattttcaatgtgctcaatatattagactactatttattttgtgagtggatgtgataaaataaatattcaggtgtttagtgtatgattaagagtgggatatagatttctttgnnnntattaaatccatcatgtcttttacataatnnnnnnatcnngttttaaaaaagaaaacanntacatagcttagcttgttttctggtgctgttgacnnncnnnag

SEQ ID NO: 2417 - DNA, 507 bp, Canis familiaris
  misc_feature (1)..(507): n = a or c or g or t
gnnnctnncgctgctgatcctgctgnngcannnngaggtnnagggtaaaattcacgaggaaattgacagagtggtnnnncgggaccnngtnncctgcatgaacgacagggcccagatgccttacacagatgccgtggtgcatgaggtccagagatacatcaatctcatcccctctaatctgcctcatgctgtgactcaggacaccgagttcagacagttctacattcctaagggcacaactgtgttcccattgctctcctctgttttgtacgacagtaaagagtttacgaacccacaaaggtttgatccgaaccattttctggatgaaaatggcagctttcagaagagtgacttcttcgtgcctttctctattggtaaataaaactccacatttccggccatctatcaatttaattcattaaaatggaatcacagataaatcaattcagtatattttaaaatatagtttgtaataaaatgattgtggaaatgattgtgaaatgattt

SEQ ID NO: 2418 - DNA, 611 bp, Canis familiaris
  misc_feature (1)..(611): n = a or c or g or t
gggactggctcancatctgagaggaggaccaacaggaagaaaatccaaattagaacacagcattcttccccctttatctggcctttcttccattcataagaactggggctgtggatggcataatgattttaatgtttattttggtctttgtcgcatccccgttcctttagcatttaagcccagcttcttttggcttttctccatatgttcccccaagcttgaatttaaaataggaccgggtttctccctctgtaaatgaattataaacatttccaccaaatcataacaatactgtggctttcaggaatgactttacagaagtccattgttagcagagggtgtccctggatttcattctctgaaaatgacagagtctgagagaagatgaacttacatgaaatagcaacacacgcacccttttatcttctagtgtgtgcataattaagctaattgtcatccttgccaatgatttatgatttgttccgcatgtattctgtttattgtagaaatgtttatataacatgctttccatatcagggaaaatcatatctgtttaataaattggctataactttaatatctgtggacaacttgtaaaatttggaatgtat

SEQ ID NO: 2419 - DNA, 194 bp, Canis familiaris
  misc_feature (1)..(194): n = a or c or g or t
cttcctataagggtcctccgnnnnnnnnnnncnnnnnaacatcnnnanagtcagaagnnncttacttttgtggcatttcagcttgcacaagtctgtgcaatnnacagtcccaaaagacaaaaactgagaagagggctnnnaacgaaggcgatctanagtccaagaccaaggaaaattgataaaaactctaatac

SEQ ID NO: 2420 - DNA, 545 bp, Canis familiaris
ggcctgccttttgtgcctgaaattgcaccataacctagtgcccacatcacttgcatcgcagccaaagacaaataggagaaatggttgttccctgccaaatgtcatccggacagatgactaagcctggaaacggtttcttcagagcctgttctgtttggatggtgatacgagtttgttccaagctctgtgatatgtttaacagattcagtgctatagtttcttttaagcttcacggacaatgtcagaacatttttattgatactgagagctctaagagaactactgggaaaaaaaaagtaaaatgttattttgtagaacaaggattattttgtctatttagtatatatatatagccgtagctttgtaaaaagggatctttgtaaaaaaaattgtacgaatgtgcactcttatttattgattattgtaaatgaagacataaatgactatttgcataatttatacctgtgggaaattaactggagtatttgctatttgaccgttttctattaaggaatagtaggctcggtgctatgatgaatggtctt

SEQ ID NO: 2421 - DNA, 604 bp, Canis familiaris
  misc_feature (1)..(604): n = a or c or g or t
ctnntcgagtagaaggtagaaatggttccattactcnnntccctattctcaccatgccaaatgatgatatcactcaccccatccctgacctgactggatatattaccgaggggcagatctacgtngacaggcaactacacaacagacagatnnacccacctattaatgtgctgccctcgttatcacggttaatgaaatctgctattggagaaggtatgaccagaaaggatcatgccgatgtatctaaccagctgtatgcttgttatgctattggtaaggatgtacaagccatgaaagccgtagttggagaagaagcccttacctcagatgatcttctttacttggaatttttgcagaagtttgagcggaacttcattgctcagggtccttatgaaaaccgcactgtctatgagactttggacattggctggcaactactccgaatcttccccaaagaaatgctgaagaggatccctcagagcacgctgagtgaattttaccctcgagactctgcaaagcattagctgctacttcatcgctggctcgatacacttgtgaaatactggttctgttttctttattccttttgcactccccatccccc

SEQ ID NO: 2422 - DNA, 299 bp, Canis familiaris
  misc_feature (1)..(299): n = a or c or g or t
gatagtgagccgctncnnnnagggcnnctannnnnacgcnnctgtgtgnnngacactcatcatcgggcnnnngnnnnnnntgctcatgtacgnnnnngactactatgtgctccactatgaggctcccgtggtgggggnnnnnnctgccccgnnnggtnntcannnnnacctcctcacctcactgcccaaggccaganncagcccccacnngcgtgctggggannnannntggctctcnnctgcctnnnaccagcccccagaaggcctctctgcccctatggggctccctnnngccnnnn

SEQ ID NO: 2423 - DNA, 510 bp, Canis familiaris
  misc_feature (1)..(510): n = a or c or g or t
cacgcgcagaaatcgactacagcgacgcccccgacgagttcagagacccactgatnnacaccctgatgactgaccctgtgcggctgcnntctggcaccatcatngaccgctccatcatcctgcggcacttgctgaactcccccactgaccccttcaatcgacagatgctgacagagaacatgctggaaccagtgccagaactgaaagaacagattcacgcctggatgagagagaaacaaaatagtgatcattaaaccgtcccccgtgcccaccctctgctcgacacagccaaggccagccaggcaaccagaaggggcgtctctggtagagacgctgttcaaatgttggaggcccagcaccgcagaagaccctgagagccccctgagagtgaccagacggtggagatccgaaaggacgtgaatgagaagaggagcccaattcctgtacatatatttaagtgataaacatgatcaaaagcttgagagacacactttacgattgcttgtgtaa

SEQ ID NO: 2424 - DNA, 390 bp, Canis familiaris
  misc_feature (1)..(390): n = a or c or g or t
acccccatcctaaccaaccattcattcccaatccaccaggaaaaccatgccaggaacaaccacgtactgcctggcaataagcagattttcttgaaaacccccattcgactggtatttttcagaaagcattcaagaaagcaacattgtgccccttagttaatcccttctggtataagtgattcagtacttctatttttaatatcctcaccttatctaatctttgaattttgtcatataatttattgcttcataaattttacttttgttacacaaaattaaagnnaataaccaaaccatgcagcacctttaacttttgtttttggcttctggagtatagatgatagaaaaatttatcaggtttatccatttcannncttttgttataggatg

SEQ ID NO: 2425 - DNA, 548 bp, Canis familiaris
  misc_feature (1)..(548): n = a or c or g or t
tggcccccagctgaccagnnagnnnnnnnagggtggggctttnngtagaaacngtngattcatcttttcttattggtctcactttgttactcgtacctgcccttgagggtgggagagggtgacctcagggtgctgattgctgggctccaggccccggggcaggctcactctccactgcctctctctttagctctaggggcctctggtgtgggcctggggaggagcgttttcaccctggaagctgaccttggacctgacaccccaggcacctgctcctccccgtgccccagtccctgactcagggtgttctggggaggtgtggccaggccctccctagtttccagtctaaacaggagnnnnnnnnntctgccccccccccgggctctcacactccccagcctctgcctcccccaaatcgccttcacagtccctctaggaggcaagctggggcagagccaccattacgaagccagactttgtgtggcacagacagtggttggtttgcactgcctttggagctagagggagaaacaggtgtgtccacctgc

SEQ ID NO: 2426 - DNA, 511 bp, Canis familiaris
  misc_feature (1)..(511): n = a or c or g or t
gtttttacaacactngaatnncttgttgctttaattaaatgtnacctcanctcattttattnnnactgnnagtttaaaagttaccatgttattaaaaagtctttgaaatgctggtaacaaagaacagaaaaaaaaattaaatttagaataagaatgatctccttaantcttccttcttgtttttatttggtctaaaacattgagcttctgtaaatattgatttaatgtatcttggatctcattactttattcatctaagacttattatttcaatacagaggaaaaaaagatttagcaacttctttttatcttgctaacatgtaaagtttgccatcaagtcatttaagagcgatccttagcttgctggcaatatgtatttgaattcacattatttgtttaaacagcagttttgaaaagcatgtcaagtgccaccgattgtcgtattatttttagatgatgtaacatagcgatcaaaattgatattaagtatgcctaatactgtggtatgtaa

SEQ ID NO: 2427 - DNA, 543 bp, Canis familiaris
  misc_feature (1)..(543): n = a or c or g or t
gtggctnnnagccatgcacaaggccaccaagctcctctacgaatcgcgggaccagtaaccgcaggcaggacggacggtcagcctgcgacagcggagcctgctccccgcaccacaggcaaccgaccctcacgtgctgggagacgcaggtcccgtggttggagaaaacggaagtgctcgcttatctagtgcaatccgcacagtctagtaatgctctcggcagcctcatgctttagagtgtgtgtattatctcgtcgatacttaattggaggtgggagagattgaattacactactgctaaactacttttagcataactgaaaaccatgtttttatgggtgcccaggtttgctagaaggttctggcccctcagtgttcactcttgcacagcgaggatttgggcaggcctgacgcgctcgggagtccggctctgtgtgcggctgtacggtctgcgcgagcccgttagagactgttcacttcccacatcactaattctgggctacgaacaaacctttgatactttacttcactaagggggaggagcca

SEQ ID NO: 2428 - DNA, 501 bp, Canis familiaris
  misc_feature (1)..(501): n = a or c or g or t
ggannagtgatcttgggtgactgagacagaagaacagaaacgtgattgcttctcnnnnnnctgctcttagacctagtgttatccctnnnnagagacttgtttttggagtggggatgatttctaaccattctgcccataaaggtctccctttctgggcatgggaagcaaatggcgcccgaggaagtttcttagatttcttaagctgcttctcttggccagacacatgtttttgtgtcaatcaagttggtgtcaactgggtcacatgtcactgaggaggtaccaggctccagagccacgtgggcaggagcgctacatgaagatcagagggaaagggaagtgttccatgtttgttacaggagaatgtgagcgaccgctttgctgggcaacaggatctgccagcttgctggagaacttatttttttcaaacagccagctgggccaagtccactttgcttattctctgtcttgctttggagcttggcnnnngcagagcagagtggt

SEQ ID NO: 2429 - DNA, 578 bp, Canis familiaris
  misc_feature (1)..(578): n = a or c or g or t
gcagctattgaggacgtacgtgggccccatgacagagagcntgntcccaggctaccacaccaagnnnnggncagtgatgaactttgtggtccgttaccggccagatgagcagccctctttgcggccccatcacgactcatccaccttcactctcaacgtggccctcaaccacaagggcctggattatgagggaggtggctgtcgcttctngcgctannnctgcatagtctcatccccacggaagggctgggggctcctgcaccccggccgtctcacccactaccacgaggggctgcccactactcggggcactcgctacatcatggtgtcctttgtcgatccctgacactcaaccactctgccaaaccttcgctgccgctgtgccttcctgcacccccctccttggaagggggtctgtctggcgcctcctttcctgagcggatgttcagtgtgcctgggactgaatgtgtcgcctccccaccccaacacacggccctctcaggaagctcctggagcccccatgcccctccccatgntnnncaaaggttcctggggnnnaggcttctgggggctcccca

SEQ ID NO: 2430 - DNA, 555 bp, Canis familiaris
  misc_feature (1)..(555): n = a or c or g or t
gtgatcagcaggtgccatcacacctccacaggcacctgttgtcgtctgtgnnnnnccacacaactgtgtgtannaactcttgtcccagatgcaaggacacaagatgcactgcaattgggtgcagaatccactggtttaagagccttctgtccaggcataatctctcgtggtaacttcttaaccctgctttgccttagggtgaaggagattctcttagttcctactttttagagagagattttgttttttttttttaagattttatttattcatgaaagacacaggcagagacacaggcagaggaagaacccggctccatgtagggagcctgatgtgggactcgatcccgggactccaggatcacgccctgagtcgaaggcagccgctatccactgagccaatcagggatcccctcagagagatttaaggcaatttaaacttcctcaattacttcccctacagctatgagatatgcagagggcttttctccttctcttaccatggtaaattgcattgattgatcttacatattaaaccaaccttgcattcctactg

SEQ ID NO: 2431 - DNA, 546 bp, Canis familiaris
  misc_feature (1)..(546): n = a or c or g or t
gttgtggtgatnngttccccagcaacagaaaactaatacatggggctcgnntttgtagatcttgattcagaaagtctgggatcagaactcaaagtctgtaatttaacaaataatccaggggaatttgatgcacatggtctcttccctagtttgagaaaccctgaattacttctcataattttcatctttcattaagatgtaggaaaagctcagcattgtgattttgtgcccgggagaactgcatgtagccagagttttcattccttcatttccttcaggagaacattactcactgaaaggagcttaaaatctgtaataacctgagaaagaccccagagctagagaatctacaacatccatggcactcgagacataaaacagcttgttccttccgaagattgggtaattcaatcatcttccagaaggccaccagcaggagaatgatagaaatgacatatttgctgttcatggaagaaaaaaaatgtaattggaaggaaataagacaagatgttcgcagataaaggnnnnactatctgctggtttaaa

SEQ ID NO: 2432 - DNA, 493 bp, Canis familiaris
  misc_feature (1)..(493): n = a or c or g or t
caggccacannnnntnntnnnggtnnnnnntgcagtgctaaaagccatccctgagtacatggcagtctcccataaatgtgtggaagtccaagttgatcaagaggtgcacctgtctatgaatgcagctggaggtgtggaggtctacagtggcaatcagagaataaaggtttccaataccctagaaagtcgactggatctcttagcccaacaaaagatgcctgaaatacgaaaggccttgtttggagccaatgccaacagaaagttctttatataagcctctgtgaagtgaagctcatgttgaattgctaagccattaaaagcctaagttattagggcaaaggaaactagtaatgtttcctcctctttgttgttttcacaggagtctattatctttcatgaagtgccctctgaatagctaaaagcgtattttggaataaaacctgaaaatgcttnnnnnnctaattctggtttnnnnntacataccacatcttct

SEQ ID NO: 2433 - DNA, 455 bp, Canis familiaris
  misc_feature (1)..(455): n = a or c or g or t
catggggnnngcgtgccccagcgtcgnngctaannnngagccacatcnnnnccatcagcgaggggcttccacctgaccctctgggcgagctctgcctctatcatctgccgcaactcggggcttggacccagagctctccagggcccgcagaccccttcctgtgcctggagttccaagggcatctgtagcgggatgccacccaggtcacaggcggagattgggtctggggcactggcggcttcctcccagagggcatttcctggaaactgataaatcagattgtgcctctttactcttggcttttgaacaaatcgatgttcacatctgcgatgggcatggactccacagggcagcaccagacccaagcctcctaggaggggctacactgagcccagcaccggggtgtgaaatagaatttattgtggctctgattatgtacacgtgagatgtgtctg

SEQ ID NO: 2434 - DNA, 564 bp, Canis familiaris
  misc_feature (1)..(564): n = a or c or g or t
agcctcatggcacatttggcatatnngnnaaggtctttgggggctgcacaccctcagnntctttcgcagttggctgcagcacctgctggagaggaacctctctgttccagaaggaagtcgtggcgccccacgcaaaggcagcagcaggtggaagaagtggaggaaggaatgtcctcggcagcctccctcctccacaggacagatgcctcattgccttattccctttgccacctgggactgacctggggtctttgcctggagctgagcagtgtggagaaggctgaaccaagtgaccaggatggctcccaagctgttcctgtccgaattccgtgcggtgggaccaggacgggctgtgctttctgttaccattcgtcccagagtctgtgcaagccacctcacctccctgggcctccatctacccacccactggggatgtgggaatgggatgtggacaataatgcctgccttgcaagttcagtgtgagtttacaggggagcatttagctgggcccagcaggctggagggggtgaacccctggnnnnngttgccagagaacatacttgc

SEQ ID NO: 2435 - DNA, 608 bp, Canis familiaris
  misc_feature (1)..(608): n = a or c or g or t
agatcattacacnngactttnctccccatttcagcatgtgaaaataggtcagaaaaagactcttnannttgaaagnnagacaaaaaagcnnnacagacattaaaaatagaaatagtcaaaacattttgagaggaaagaattatctttttgcttactactatcagtgagaaataaattggaaatttgaaatgaagactcccagtgcctcatttctagctatgcattttcacactgcatctcctcttacccacacagttgatgggacattgtatctattttaaaaggcatatgctctttatatattgaaagaagcaaacctgtttttgttgttgttgtttcattttgtgaggcacagaaaaagtttattaccacaagaagcaagtgcactcatcctacctcaccaacagagtcacagaaatgcaacttcacataataaagtacaacacagacttggggagaatggtcccttgggctatattggctgtaatactgaggtaaccaattgaccttgttcagcgaaaatacctctaacacaatgaaaaaatcaactagttataacatccaattcatatatacaattcaaataaaaatgtatattatttgcttcg

SEQ ID NO: 2436 - DNA, 532 bp, Canis familiaris
  misc_feature (1)..(532): n = a or c or g or t
agccctgngctccccgggggagagacgcgggcccacccctccccggggccagagnnaggctgnngcagctcgcagctcggttagggtcgcagagcngtgcgtgcagctcttgcagctccgggggtgagcacacaatcctgctaccgctcagagtcccagaaaccagcagggcgtgttttagacacagggtgtcagtaagtgatagaacttggggtcctaggaaaggtactcgaaacatggactcagaacggggagatgatgaagtttcaatttcatgttagacattttcctgtattttgagaatcttaagacagccaagcgctattttatgagaacaaagatcagggtgcaattcatatgtatttgcgtattctaagtgtagtgaagtaagcatgcttattatatcctcccctttgatcctgaaaaggctgtaagtcttcccattccaggagtggaggccacaggctggggtaacattctgtgtggagaagatggctgtatttattgttcagtttgatgaactcatggtgaa

SEQ ID NO: 2437 - DNA, 232 bp, Canis familiaris
  misc_feature (1)..(232): n = a or c or g or t
tnnannaattttggggggggtagaataaaataattaattggttactanngctgcatacccagggtggggtgggatgggatggtnnnnnnatcannnntatttttaaaacannaggtttcaatataaatacaactcacgactgctagacttgggnnnnnngggtggggggagttgtgtgggttttgttttgtttaatttattggttagtctttaaagtaggtcaattttcttt

SEQ ID NO: 2438 - DNA, 516 bp, Canis familiaris
  misc_feature (1)..(516): n = a or c or g or t
tccgacagttccagtaccgcgtggcaggtgggccacaccgtgcactgggccagcnctggatgctgtgccgccagtggctgcggnnngaggcgcactccaaggagcaaatgctggagttgctggtgctggagcagttcctgggtgcgctgcccagcaagatgaggacctgggtgcagtcgcagggtcctcgcacctgcagagaggccgctagcctggtggaggacctcacacagatgtcgcagcaggaaggtgaggggacgggcctcacccctaagagcgagtggctgccggttggggggagcagatgccgggtttgggttctggccagtgactccgtggcccggtgcccaggatggcgcttctttttccttttggactcagagtgtcgcatccacccagccctgctcccaccccccccacacacacccgctcctgtcccgttccctctcccgatcagcagcgcccaggccatccgagcaaacctcttccctgcacatgtcctgccagtgcacattg

SEQ ID NO: 2439 - DNA, 686 bp, Canis familiaris
  misc_feature (1)..(686): n = a or c or g or t
ctcttcccatcagtttaagggcatgtgctgaagcccgnncnnncttcaggaccctcacatctctctttcnaggtnntcactctttcggtcntannaaacaatcagatannttggcccacaccctcaggtctgaaggcctgagcatggggcagcagaaagagaggaaactgctggaggggcagggagaacgaagcagcacaggtgctggcccagctctgcccctcctgagggccttgggattgcattggaccatcagctcttgccagtcatgggagccgccaggtggcattgcctcacagatttgaacaaaaacctggctgccaggctggtacctcttcggcacggacctgactgcagaagtggcagcagtgtcgttgccctcggtgaccccggggtgggggggcgtctggcaccgtgagcgttaagaaccttggactatgtcatttcgacagctctttgtcctttcggattataaaaaaacaagttgagagccttgtttagagcttgcacggcccctgtgccagggggtgctgtgcactctaggcatccctcacccagggaatttttttagtagatgtggggacagggtgagctggctgtgcccatcttgaagtcactgagtgaaattttgttttttattctctgagaagatgagtttgtatgttctgcgaataaacacnnnnnnn

SEQ ID NO: 2440 - DNA, 520 bp, Canis familiaris
  misc_feature (1)..(520): n = a or c or g or t
cccagctacgtgtnntgagcgccattacacgcaagttcaagctagagccctctgtgagcttggtgaatgtgctggatcgctgtcctccccagctgacaggcgcagacctctattctctctgctccgatgccatgacaactgccctcaaacgcagggttcgggacctggaggaagggctggagcccgggagctcaacactgctactcaccatggacgacctactgcaggccgctgcccggctgcagccctcagtcagtgagcaggaactgctccgctacaagcgcatccagcgcaagtttgccgcctgctaggagcctcctaccatctgggaccctgcccgcaagggctgaaggtacttaggtgtccccacagagacctgagagagcaaagggctcctcagcaagctgtggctgcacccaaaggctgcctatctccaggagatcccctacatgccaagcagccccatggggactcagagggcatcatcccctgcctagctgtccttccaggccagctccag

SEQ ID NO: 2441 - DNA, 193 bp, Canis familiaris
  misc_feature (1)..(193): n = a or c or g or t
ccatcagtaaatggagtgagaaagnnntctgatatccaaatccgaagattacagagactgggtattgaaaaaactgaccctaccacactgactgatgacgagataaacagatttgcaagattggacattgatccagaaaccataacttggcaaagaggtaccagtgcagtctacatcccccagttgcttcagt

SEQ ID NO: 2442 - DNA, 602 bp, Canis familiaris
  misc_feature (1)..(602): n = a or c or g or t
gtgcctgctggaatnntgncnnnannnnnagtnggcnnagnntgtgtatgacacggttcagcgccccctggatcgnntcttctgctctgttgtgactgttgctgagcaaaagtaccagtccaccttgtgggacaagtctaagaagtnggcggagcaggctgcggccatcgtctgtttgcnnagccgcggcctccctgagggtcggctgggtgaagagaacccctcctggcacaagcgcaagcgggaggcccctgaccaagaccctgggggtcctggagctcaggagcacgcagtgcctggggagctgtgcaagaagctctttgtggccttgggaagtggtgaagagagccctctggaaggctggtgaccattgtccctaccttggtcactcacttcagaagcctggccataagatgtctgtgggtatgaaccagatgccactggacaattctctgttcctgacaggagttaggaggtccttacctgggccatcagcctggagcactggctaaagggtgcctaaggtgtatatctcctttggtgggtttgaggagcaaggccaagttcccagtgacttcagtattttctttgaaaacgggagc

SEQ ID NO: 2443 - DNA, 338 bp, Canis familiaris
  misc_feature (1)..(338): n = a or c or g or t
aanncctgtgataaatannnctcagtcccacacagcaggagtctttaagaannnctgctttaataacannngagtttaannnnnnnnccaangagttatnnnnnnngnnccnagnntnnnccaccccagnnnnnaacacccgataccncnnnngcatacacaaattgtgagaccnnnaagaacaaagcttttcatctcttttgtttccaannnnnncaacatggtcatatccnnnaaatagatattgaatnnntcannnnnnnnataagaaaatacattttcatcngaggcannaggagccctaagtgtcannncaagtnnagacttgatnnnnaggg

SEQ ID NO: 2444 - DNA, 524 bp, Canis familiaris
  misc_feature (1)..(524): n = a or c or g or t
gtcagcaaagtcaagcacagggggcaataaaaagcagcatctaccctgggctnntcatggcttctggtggtagagaggacannncgtgttggcagctgtctggtccccattctccaaagctgcctggggcctccctgggtgcttnngagatctctcatcagacacctcttgcttcttgttgcccaggttgctcagcagaaggtgaggagcgaaggtcaggaggtggggtggtttgtaggatcctaagtgtggccagggagtnnncagggtaaagnnaggccagggtgggggcagggaaaatgccctgggggttctctacctggtatgagggaaatgaaagcctcctgtgatgtccatggaaacnnnnatgttctttctttacattaacctggggaggaccttgaacgaaagatttcccctcaaagtttgtgctgggggattttagacttgagccttaaacctgcctctttctttgtgacaccaagtgcctcaagcggggaagggggaacaagagtnnctgttgt

SEQ ID NO: 2445 - DNA, 568 bp, Canis familiaris
  misc_feature (1)..(568): n = a or c or g or t
tgaactcatgnntgaaaaatatctgagagaacttcagtgacttattctgtgtttgttcctctcaaatctgaaattctaatcacgatcttnnnaatcaggccnactgcatattcaggtattctcaaaaataggtngactctccttctagcttgagatgttgacctgagtcatgagcaaaccacatgggcaagtggtctggttggagggcttactcagtctctaatcatttgcaagatatgatgtgctctgaggaaccagcaaatagtaatcagaccgatattcatccaccattgtaattctgaaggttttcaaatgaaaaccttggtaatcctataaaatgacttattattaaaccactatgattttgtacttcataaatatataagcacgcatactgaaattcattttgatagaaaattcatgtctttttaatcagaaaattgatgtcatttattatatcccaagtatcattctattaatcctttctgggaagcccagaagtaagctgatcaaagaaaagagcactacattataaaatgatacattttatgtctgtttgatatgaaag

SEQ ID NO: 2446 - DNA, 563 bp, Canis familiaris
  misc_feature (1)..(563): n = a or c or g or t
aggaggcaacaggctggggcaggaggcagctcacaagagggggtgcannnnnnacacccagcacctttgctctgggttgttctggaaactcttggtgaggaggagagaatgctaaagtctagtgggagagggagtgggtgtctgagcttgtggggctaagtggtgtggcccgctgaggatgcagacagatcatggagaaagaaagggtggcccatgggagagggagccacaggaccaccccaaccaccagggtgggctcacccctcaaggtcccactgctccttccaagctgtactaagggggcccggtgggcctaggtgtgagccagagaccacctgagggagccagtccagggctagtgttccacataggagagggagggaagagggaatgaattccaggcccccaagaacgtggcatttggaaatccaggtagacaggaaggacaagccccaagaacacacacccctgtactcgtgtcactcaaagctgcttccgaggagagtgggagggtgggggagaaaaaacacacacacctctttttatataaggtttcatattta

SEQ ID NO: 2447 - DNA, 506 bp, Canis familiaris
  misc_feature (1)..(506): n = a or c or g or t
ctgtgagcntgtcctcctcctccccgggctgttnggactctctccatccccctggnnaacagccagcttccccaccattggctcagggtgtgtacgcacccagaagactcctgatgtggtacctgcctctcccagtgcccacctcccacccttcctgtccgtgggggtccaagcctggctttccctgcagccaccagcccctggggaagctgtcaaccccagagttaacactccttctgtgtgtaaaatctccaggctctcctggaggacggggcgggggggggggatatttatttcctaaagtttgcacttaatttgtgagggtctcaggatcgttgggggctatcgcaaagagaaatgtgttgtgtctgtcgtcctgctgtcccaggagtctggtgttcgtcacnnnnnntgcgtttctgcgggcagagcctgttctggagggtgggtcagtgaactcgaggttgagtacatccatccacccactggnnnnnncttccggatat

SEQ ID NO: 2448 - DNA, 622 bp, Canis familiaris
  misc_feature (1)..(622): n = a or c or g or t
ttatcctcanctcacagtnnaataataatcttcttatcnnatttttctagtagagaagctacacatcaaacttattcaaatccagtttaagaagcctcttgcaagnnacttgttttctcacctgaggtactttccctcccaacctcacacctctacccccttcctttcttcccccctgcaagaggaaacatttaagataactgagtctaatcacaattatgtaacaatggatacattaagagcatttaacttcctaagaaaatgtgtaagctaagttgtaggcaaaacagggggaaatgctgagaagttttccaatggagggaaataatccggatcatttcttctaaaagttccttataagtcgtacagtagcaggatttgggaagaccaaaaattttttttaaatgccagaactcgcatctttgggagacacgtcccagagacaggagaagaaatgaaaggctgaaaatccatctgtcagcatttatcccataagtttttcatttagaaacaattgtttatcttctgattttgtagtcagtatgttgtgtactatgtgacttatacttcttgataaataatgcaccaaacatgtatcatgtaaccacgatcacctatattg

SEQ ID NO: 2449 - DNA, 617 bp, Canis familiaris
  misc_feature (1)..(617): n = a or c or g or t
atacatgtaatatatagagttccttcccaaaacgtaaannnnntttttaaacatgttgagaacatatttttgggtatgaaaaggtaaagggcctgtaatctttcaggaataaatttaggcataaagccgtagcctgtatggaaaagatgtgtacagcactcaaagttgctattatttcctaacttttgactagggctcttacagcatttaggagcatggctctaatgagacagtggagggttcctgacagcatataaacactgccatcccaacagattgggttgagctgccaaaaatgacaatcagggattcattaagatatcttggtcattaaattgattttacatatttttttatcttttaagaatttgtcacaactttaaaacccatcatttccttcccagtgttttccttttaatagttaagatattgttcataattagtgcagtacatttgattatagaaaaatttatggcacttttagcctttatataagtctctaggattctgtgaatttcaacattaattgaagtagctattcagttatatttacatgtgttgtaattatgtaaatatacttttagtttaggtaatcttccaaaattacaaagcactcc

SEQ ID NO: 2450 - DNA, 568 bp, Canis familiaris
  misc_feature (1)..(568): n = a or c or g or t
gtgcanncgcacgctctccttccagctcctnntcaagagcaaggtcacggcgcccctnnagtgctccttcctgctgctcaagggnncgtacgatgacgtcaagatcagccccgtcatctaccacttcgtcttcaccaacgagagcaacgagacggactacgtaccactgcccatcgtcgactccgtggagtgcaacaagctgctagccgccaagaacatcaacctacggctcttcctgttccagatacagaagtaggcggcgccgctgggctgcccccgccggcccggcagtggcttcacagtgctgaccattttagccaaggagaaggaacaaacgcgaacattgggaaagtctgcatgcgtgtgcgaaggtgtgagcacttacacctcgccctccgccccgcctcccctgtcccaggcatcagaggccgggccacctgcagaggagacggtggctcagggacacagcagggctaagcccagcggccgtgccccggcccccacgcgcggtgaggcgcaccgtctgctctgggccgtgcacgacccctgggccgggctcggggagcac

SEQ ID NO: 2451 - DNA, 514 bp, Canis familiaris
  misc_feature (1)..(514): n = a or c or g or t
agaaaagagtgtactccggaaacggaggagggtgctcctcccanntcngatgaggagaagaagccaatgccaggagcgaagaaacttccaggacctgcggtcaacctatcagagatccagaacattaaaagcgaactgaagtatgtccccaaagctgagcagtagttggaagaaagaaggtttgatgtgaagaactgaagagaaagagaatggattcaaataaaaatagctcatgaaaaaattttatatatttgtatgaagattacgaacctcctgaatgcctaagcctctagcaggaatgtcttgtttgtacatttgtatctctgccttctcgttggcttcacttcttactttaccttcctgtttggcacctggcaaagcaaatcagctgaagaattcaccaactggaggaggaactggatttcacagagagggatagggcaatatgcatgacaataattttgataggaagttctctatacttcacacactattttggtcaatatttggaatg

SEQ ID NO: 2452 - DNA, 638 bp, Canis familiaris
  misc_feature (1)..(638): n = a or c or g or t
gctcannaatacntccccaagctgctggggcttctgnngcccctcctggcacgnnngcgccatgatcgggtnngtgacaacatctgtggggcgctggcccgcctgctgatggccggtcccaccannaaaccagagcctcaggtgctggctgccctgctgcacgccctgccactgaaggaggacttggaggagtgggtcactatagggcacctcttcagcttcctgtatcagagcagccctgaccaggttgtagatgtggctcctgaactcctgcgcatctgcagcctcattctggctgacgacaagattcccgcagacaccaaggccgcattgctgctgctcctgacgttcctggccagacagcacactgacagcttccacttggcactgggctcgttgcctggtgacaaagctcaggagctccaggctgtcctgggcctcacctagactgggtgctgaaccaggccagagggaaccgagtctgccaggctccgggcctggctctcaggccagtttcagcatacgccttaccaaagattctgggcctcacacccacttggaatctcagccccgatttgctgcttcaggagggtgtctctgggttcaatcggttatgccgcggacaatacaaatggatt

SEQ ID NO: 2453 - DNA, 488 bp, Canis familiaris
  misc_feature (1)..(488): n = a or c or g or t
tttttgtaatnnnaatgtatctgatgtngaccaaattcataccactatgtaaaaaagcctctcttctcatagtgcaattacagtttagaaataaaacttggtcctctacccttgctttttaaagtaaatggctagacacagttgtcctagcccgggtttccctggcagagaaactcaaaagcattttgaaattgcttagttcagaattcatcaaactgttttaaattattgaatttggtaatttactatcatttactttttacaacaagtgcaatagtttcacacagtagaactcccaagtgggtgaaagatgtgatgatggtacctagtctttctggtgctactttatttaagcctttgttttaaaccacctttccttgaatcttaagaacgaaaatgtttcccttgtgagtacatgcagcccagcaagaaacgaaccggaaactcctcctgtcctaggccattaggaggagaactagcattctttt

SEQ ID NO: 2454 - DNA, 512 bp, Canis familiaris
  misc_feature (1)..(512): n = a or c or g or t
agtattcacacnagtncnngcctcggaatgtatggacctgtgattcaaaaagaagaaaaatgtcagaaaattcacttatttgaangcaggtggccttggacatgaaacacatagatgacatcaagaaacaaggacttcagtgggagtgagatccctcactgggcctttctttttttttttccagtgaggtggagttacaaacagacctgagaaaacagagatatcctttgatctctgaaaatcctccaccgatccaccatgcctcaggccagaatcagaaaggaatgtggagcaacagtaagattatagggccatgccatcagctaaggaatgagactctcaccaccccaaacaaagcactgtgtggataaaccccagatagcccaggccggtcatcataacctgcgtttaactcagcaagttctggaaggcagaactcaattactgagtataacaactacggatgcaatttgggaagatgctcatcagagctttacttaaaaaaaagcatc

SEQ ID NO: 2455 - DNA, 556 bp, Canis familiaris
  misc_feature (1)..(556): n = a or c or g or t
ctcagggctggacaggctgggactggggcggagtgcgaccccgggggttgctgggcggcgccgacccccgtggagcacagaaccgagaaactgcggnnnngttccgcaagggggcgccgcgtccgcgcgtcgggggcccctgactcgagcgctccttccttggcggtccccctcggtgagcctcaccgtcgccttggagacggacgctcggattccgggagcaagtaggtactgaaaggggcgcttttccctccacggaagtgtccccggataccgggaaggggctggaaaagccgggaaatgtattgctgctctcgcccacctcagcgggtcccgtcgccctttgtggctactgcagtgttcagtgaatcttaaactcgaggtttcacacccacgcgctgccactgctggcgtcgtttaaattctctgaacttgttttctcctctctaaaacggagggaatgccttacgggggttgtagtgaatgcgtgcttgtaaattgtaagccacattcattcatctctaccctggtgcctcgcagagtgcagaaccataat

SEQ ID NO: 2456 - DNA, 543 bp, Canis familiaris
gtcaagatcaccatacctagacaggaactccaggggaaaggagtcatagctcatgccaaccctcagtgccagataaaccaagtgaaactcaagtttcactcttcccaccgagtttggagaaaagaccggactaccattgttgggaagttctgcactgctcctttgcccgtcaatgacaacaaaaagatggtctgcttacctgagccagtgaacttacaagcaagtgagactgtttcttatgacctgaaaataatgtgtgtttagtataaacctgggcaggatacatctccctgaatttcagaggagggtgggagctatgttcaacttattctaggccactactattagaaggaaggcaaaaactcttggttgttttccctataattagccactttagaggggagagttagctctctaacagagctttgtctctattaccaatttgaacagccttacaaaaatacattttgaacttttctattcatatttaactgcaattgccccatatccttgaacatttgtatctaggattcagtagaaaca

SEQ ID NO: 2457 - DNA, 515 bp, Canis familiaris
  misc_feature (1)..(515): n = a or c or g or t
acttctggngccatgggacagcctacttggnnagccggnannatggcccacagctgcacggttatcaccagcggcgtggaatactttggtctctggggatcctgggaattgcctgccctgggcttggtgctcctttcagcctgtggcctgtccacagagctgagccttgagggccggaggggacctaggtcagggggctgagggtcatgtgggagctcctctttgtgactccatgacccccgtatggccttagactgattgacactggccttgagaccctgtggccccacctgccaccggggaggcctctgctgggtgtggaggccagtctgtcttgctggggagtcctcctgtggtcaggccgcctgccagcctctgcccaggattcctggccttccctccggagcccctccccattcccagggccctcttccagcagacagtaggccctcagctctgggaccgatggtggcnnnncttccatggcttcnnnnnncccaggcaggggggacatg

SEQ ID NO: 2458 - DNA, 557 bp, Canis familiaris
  misc_feature (1)..(557): n = a or c or g or t
ccaatttgctgtttctaccacaggnnctggtntggggctgtggcatgccntnancaggnnaacgtntcaaccccatcaaccactgtgctctgtaaaggtagattaacaagcaggcttgacaaagtgatgctgtatatgttaatatactcatcagcgtttgccagaaagatgcatgacctatggagctgctggcgtttactaatatgattgtcagaccagatgacagcataatgacatctcctgacacttctgctggagcaatacctagggacaagataatgtgaaattcatttgactactgcacaaaacgcaggacacaggcgtcagctcgaaatccaccctgcatgtttccttacttttctacccactatcgaatcgaactgcaataatcccgtgttctctcacagtgcctaagtacactcatgaaaggaaatgtgtcgtacagtatctttttgcatcagatcatttcaagtaaatggagctgcaaaatgaaatgttggaaatgaagatgattatattcattacgcctttgtgtgtagcccgtttcttggaaattt

SEQ ID NO: 2459 - DNA, 702 bp, Canis familiaris
  misc_feature (1)..(702): n = a or c or g or t
ctgtgactacctcatggcntaattcatttaaatcatctcaagtatatctgaaagaagaagaagagaagaatgagaannnncaaaaactngtcagaaaaanncaacangaggcacagnntgnannnnnnngcagatacnnngngaatgtnnnnnnnnntnancaggaaatgaaattgagnnnnctnnnngagcgcttttatcagatgacaggtganncctnnaagttaagcacnggtcataaacttgggggtgacgaagatttggggcttgaaaatgagagccagacatcttttgaaacatcaaacagagaagcagcaaagagaaggaacttgcctaagcctctaaccaaaatttcaccatctgctgagcagcctacgcagaaggaggttcttaatctacctgaagaacctcctgaagcagctgaagaagtagttgctgttgctctccgatgtccaagcgggaatgtcctgagaagaagatttttgaagtcttgcagttcacaggtcttatttgactggatgaagaaaatcgggtaccacacatcccaatacagcctttctacttcctttcccagacggcctctggaagtggggggaggctggtcactgcaggacataggaataaccgtggatactgtactcaacgtggaagagagagagcagagcagctaattcagaaatgagaactacctgttctacataa

SEQ ID NO: 2460 - DNA, 412 bp, Canis familiaris
  misc_feature (1)..(412): n = a or c or g or t
gtacaatatcacacccannattnnaacattgactcaaactaccaatctcattcagattttccaagatcaccttgtatttatttttctgggtatactgagttctatgcaattctatcacaagtgtaggtttgtggatcaagaactcagccccatagagcaattccatcttaaggatccctcagattgccttttaataaccacgcttctctaaccttatccctaacctctggtaactatggatctgttttacatttctataaatctgttatttcaagaatcttacataaaggaaatattacagtatgtgatgttttgggactgaatttttctctcattatatctcactgttgattgacttatgtcgttgcctgtatccatcatttttccattttattcctgaggacaattgcat

SEQ ID NO: 2461 - DNA, 332 bp, Canis familiaris
  misc_feature (1)..(332): n = a or c or g or t
gaatnnggcttggcatgttatttttgcattactcaatgcattccagggttttttcatcttatgttttggaatgctcttgganagtnnnnnnnnnnaattnnngtnnnacaaattatctcctttcagctcttggaagcaagcatcaaagcaagactcatcagntgtannngccaaacccaaattcccaaagcnnntcaacccatnnnagaacaaaggcatttatgtactttctcatactggtgaatcctcaaatnnnatcatnnnnnctcagtttttatcanntgaataangnnnnnnnncntnnnatcaaggaaaatttttttggtgnnnnn

SEQ ID NO: 2462 - DNA, 479 bp, Canis familiaris
  misc_feature (1)..(479): n = a or c or g or t
ccacagtggtggcatatcaccaagggctagcaagagcagcccttttctagctaccctgggcnnaagctgtcagcctgactgagggggtgctgggacagggtggtgaaagtgggggctatgaggagggggctactgacannagctgcagcctacgcttgccaagcacagccagctcagagcaatcatggtgccaaggactggggggcaaatcccacggaagccctggacaaaggaacctctgtgcagcccatagatgtgggcattcccctacggctggagggaggatgcagagtgtagctggacgggcaacagaaggtaaatgcttggcacgtgggcccagagactgtgacttcataaaggaaatggaaactgcttatgctttccttatcatttcagttctaaatatttcgnaatttcattgtcatttcctctttaactcnnngatgatttannnntatggttttagtgtctcagcctat

SEQ ID NO: 2463 - DNA, 218 bp, Canis familiaris
  misc_feature (1)..(218): n = a or c or g or t
gagttctttttaanaagaaatctggtctnncttgttagaaaatgaaattttattttnnnnncagttaagtttnnnnnttatttttgnnnnttatcttgatnnnnnaggcnnnangnagctttctcccatttcctcattaatttnnncatgaatatcanncaaatnnnttagcttttaggtcaagggctaccatatttctggatctnnnnntaataaga

SEQ ID NO: 2464 - DNA, 578 bp, Canis familiaris
  misc_feature (1)..(578): n = a or c or g or t
aatcccacatctgcnncntgagctcatgcagcnnacgcnatgccatcaccagttcctacagctccactcgaggtttcctacccttacagannagnngtcgaggtgcatctggggtgccggggccagccccatcctcagtccagccccagctgccgacaaagaaagccagtgaggaaagctgtcattctagctcgtcggcctcagtggaaccacaaagaaagatcaggaatgaaaaggttgcagatgcaccttctgggcgaaagcacactctaaagaatcgctcactggcatctgcccactccaggccgcagaagcgcaagattccactactgctgtcatcgaggggaaatgacccaatgatcctgcctccaccgccccagctaggttatcgagtcactgctgaagaccttgacctagagaagaaagctgtgatccagtggatcaacaaggtcttggaaggatgatggagctaagatccagagcaaacttgaggacagtgacatcatgactcatgcatatgagctgaccctcaaatctgagtgtctaggttgtactnnnnnnttgtagagcaatattac

SEQ ID NO: 2465 - DNA, 618 bp, Canis familiaris
  misc_feature (1)..(618): n = a or c or g or t
gattctataangcnnnaaagnnatanagannagcccagcnnnnnanntgnctcagagaangannntannnctcannnngatttaagcattcagntnnctgatgatattaatgaaataattcaaatagatnnaaccggtgatgcatcttccaatgatgaaataggaagtacaagagatgtagatgagaacgaatttctagggattattgatgcagnnnanctaaaggtacttgaagaagaagctganagtatatcaaatgaagattcaactgccaacagtagtgataatgaagatcctcaaatagacattgtagaagaggaccctttaaattctggagatgatgttagtgagcaggatgtgccagacctgtttgacacagataatgtaatcgtctgccagtatnacaagattcatcgaagcaagaacaaatggaaattctatttgaaannnnnnngttatgtgttttggagggagagactatgtatttgcaaaangnnnnntggtgatgcagnnntggtnaaacttaagagctcaatannncataaacatcaatgggactatattacatactgtgaaatttatttttattttaaanntagtccaatatagagctcnnca

SEQ ID NO: 2466 - DNA, 385 bp, Canis familiaris
  misc_feature (1)..(385): n = a or c or g or t
gtnntgtctcgcccagctggtgggtgcgtnnccgtgtctgtgcgctgagctgccatgnnncgtcccatgtgnnnacgctcgggnnnncgctgcccccactgccnnnaaactcgctttcattgaagccttaanctctgctttatgctcttgtgggaggcgacggggggcaggtgggagcaggcccnngnnngacgctgccaccggggcccatgagacctangagccccccctccctgccaaactggagatccctcaccccaaggcatgcaaagtccaggccctcatgggaagcacatcagggagggggtcagagtttcgcctggcgccagggacccgagannnagcacacggcagcnnccgcttgcgttgtgtctgttttatgttt

SEQ ID NO: 2467 - DNA, 687 bp, Canis familiaris
  misc_feature (1)..(687): n = a or c or g or t
ttcatttcnngtgagctcgccaattttttatgagctacagaaagngnnngctcttatcacnnnnnaaagagaagaagttgcccaaaatgtcatcaggatggggaaacatcgtatacatatagaagatgtagatgtngaggttgtggccaagccagttccattaaattcaggagtcagattccaggtccatgaagaagtgtctaaggtgaagatcaatgttagtgaaattcccgacgcactgcctgaggaccagatgagagacaagctggaactgagcttctctaagtcccggaacggaggtggagaagtgctgtgtgtgcagtaccataggccatcccacagcgccgtggtcacctttatggaggctggagttgctgacaagattttgaaaaagaaagactatccgctttatataaatgaaaactgctacaacgtcattgtttctccatacacagaaacacatttgaaacagtttcagatgttttcgggaatatcggaaaggacggtgcttctgactgggatggaagatcttcagatgatggatgaagaaattttgcaggatttagttaacattcactttcagcgggagaagaacggaggtggagaagtagaagtggtcaaatgtgctctagaccaaccttgcatagcnnnntttgaagaatagagnnnggtagagcctctgagccc

SEQ ID NO: 2468 - DNA, 607 bp, Canis familiaris
  misc_feature (1)..(607): n = a or c or g or t
cgtactgagcgnctaccatgttcaacacactgtgnnannagctagannncntcactgccaagtagaagtgactccgaggnnnnngannagggtgtgccccaggcgtggtcccaccaggttcaggcccaggcccaggcccctgcctcaccaagcacaactccttgcctctgccatcactgccaagcagccagaggtctcagtttccctgcccgcgcccccgcaggctccttcccaagcctattgcacttgtcctgtctccttagcacagccgcccactgccagtccccgagcctccactgctggcaacagatgtctgagctccaccctctctgccatgtgtggaccatccccaccctgtggcccccactccagaacaggaacacatgtcttctgttgagtccccacactctctgtccccgtggtagaactggcttcttgtagatggggagccacctcctccctgtgcctggccctggtggcgtccccccagagggtgagggatggtgggcactagatcccgcaggagaggggcaagagccggaatccttaggtggcactttgcttcccatcctttcttgtttattcttattattcaaccatgtaataa

SEQ ID NO: 2469 - DNA, 587 bp, Canis familiaris
tgacgaggaggggcttgaaagtggcgactgtggcgacgatgaagacgagtgcatcgggggctccggggatggcacgatgaaagtgaggaaccagctccgcttccttgcagaactggcttatgatctggatgtggatgatgctcctggaagcaagcagcacgtgaaccagaaggacaatgagatagcagcctctcacaacctcgggaatggccattcccccctgaaggcccttaccagcttggcagtctccgtggcgtgctttttcttcctggcgcactgacttcccagtgtgcagctgccgtgctgcccgtcagcaccctgtggccttcctctataaaggagccaccttcttatttttttctatttttttatcttgtatacctcctccagccattaagtagaagactaaccgtgtgttatgttttcgaaaatcaatggtgtctttgaggaaggtaaatagtggtagtgtagattgtctttttgcaaagaaaaaaaaactcaagttgtgccaaattattttcctatgtttggttgctagaacatggttaccatgtctctttctctttccctctctctttgtctttttc

SEQ ID NO: 2470 - DNA, 571 bp, Canis familiaris
  misc_feature (1)..(571): n = a or c or g or t
agaagtaantcattnnatgtaatgggaaagtggtgacttgacatggatacgaagtgcctagaacnncaaaaactcagctgtgtgtctgtccctgtgggtgtatgtgtttgtgtgtgtgatgcatgtgagtgtctcttgatgcacacacacttggatatacaactctgtatgaacttacgcctctcaaaggaattagcatatgaagcctttaccctgttggttacctaaaccataattatttggacttaggggggaaagaatcagttttaaaacttttttttttttaaagcaaacttcttttgtacatttcttataatattcatccgtggtctttttctattccaaatgtttgtgatgcttagaggtgaagttcattttatgtgatcttcatggactgtaatctacttttggtagatatttaagaatattaaactctcatctaaatgtaacgtaaaacagctttaaacacgtaaatataaagcagcttccattggaaacaggggacaggcaggaactccattgcacagaannnnnagatttctcagtagtangacatgatgtcatcngcatg

SEQ ID NO: 2471 - DNA, 550 bp, Canis familiaris
  misc_feature (1)..(550): n = a or c or g or t
tgtgtnnncagtgaggctcgnntcntcatctcccaggtgactctannaggctcagctgnnnnngcanggctgcaaatgggagatgtgattctggaggtgaatgggtatgccgtgggtggagagaatgatctggaaaagcttcagcagctggctgaggctgagccacccctctgcctgaagctggcgnccaggtcttgccaggactcggaagcctggaatcccccagggtctggagaggactgggctctggcgtcagagctgctgtagcctctgcttggcacgcatctgcccagtggctttcctgtcctcactctcctcgcaatggtaggagctgagaagctccctttgagccagaagggacgtctcaaggattctggacaccttccatcacaggatcgcccaggagctccctcccttcccctgggcccaccttccaggagacaggccttaggcaggcccactggaggggttctgccctctgactccagaggacatcctgtgggagttttgggagatgtggcccccggatgaagttctgctatgaaatgac

SEQ ID NO: 2472 - DNA, 468 bp, Canis familiaris
  misc_feature (1)..(468): n = a or c or g or t
tttgggccaattaagtcagtcacnnnnnnnnnncggcaaagtgccatcgtggtgtttgaagacatgatttcagcctgtaatgctgtgaacgcttttcaaagcagggcccctggcacaatgtttcagtgttcctggcaacagcgattcatgtcgaaagataaagtttattcaagaagatatactgagaagtcaggacatactgagaagtcacagcctaaggcgtgtaagtgggaaattgaaaggaaacaccagccatagctaagggccgcagacagtctaagagagattgattagaagaaaaaaacagaagtgagggaacctaacataaattagaaagttacttgctgtgtattatgtaccatctgctctcgtggacactgggggatatattcacctctccccaaggaaagttttggacacatagaacctacccgaagtcaacaaattctaaataacaaatgcccaact

SEQ ID NO: 2473 - DNA, 532 bp, Canis familiaris
  misc_feature (1)..(532): n = a or c or g or t
actccccgctatccctgttcagctgcagagtgnnnaccggctggatgaggaaggcagttngaacaggtcaggaagaatgataagcaatgccagcactagccagatacacacagtggatgaataaatgttccagaaagattgaatncttttatgccactggaatgcactgaatgaaaggacaaatgaattcaatattgatggggaccaaagatgacaacttagctgggtacgctgctgaccactaggtaggtgctgcctctgctatgtctcctaacaagtggtttttgtttgttggtttttaaatcatctgatgtgctgttgcagctggagccaaatgtttcacacctggctatcattagcacctcactggcaggcacatatggagcatagggcgctcatgacaacaggtgggcagtgtttgaggagtggctcattcctctcgcttattagcccacatcaatatgctggaaaaaaaaaacccacctctccctcttgaaacactaggaggaaaggtcgaattctgcaaattgta

SEQ ID NO: 2474 - DNA, 552 bp, Canis familiaris
  misc_feature (1)..(552): n = a or c or g or t
gatccccaaacttcagcttatggcctgctcttgaacagttgatgagctaagaatacttttgcattttaaaagggnnaaaaactattactatacaaagatgcatgtagcccacaaagcttaaaactaatctgtccctttacagaaaatatttgctgactcctgatctaagctatcattcccaggtcaacataaaagttcttttaaatgaaaatttagttctaggtacaaattaaatcctcctaccctatgagaagttgtgaagttagaagtatgttaaagcaagttacctcttctacattcagaataagggcatgaaatctggtagcctcaaagatggtcttgttattttttaaaagattacatagcttgtaacttaaatatattctgaaaactttaagtataaatttgctctaagagtaagcttaatgccacaattagtttactgttttatgtttagtactagtttttgtcagtgctaaagtctgttctaattgtttttttcccatgaggtgagagttgtgaacattttgtatgggtgagaaaacaannnnn

SEQ ID NO: 2475 - DNA, 622 bp, Canis familiaris
  misc_feature (1)..(622): n = a or c or g or t
ctcaagggggttccaatcagacttgaagttgggccacgtgatatgangagctgccagtttgtagctgtcagacgagatactggagaaaagctgacagttgctgataatgaggctgagactaaacttanngctattttggaagacatccatgtgaacctgtttacaagggcttctgaagaccttaagactcatatggttgtggccaatacaatggaagacttccagaaaatgctagattctgggaagattgctcaaattccattctgtggggaaattgactgtgaagactggatcaaaaagaccactgccagggatcaagatcttgaacctggtgctccatccatgggagctaaaagtctttgcatccccttcaaaccactctgtgagctgcagcctggagccaaatgcatctgtggcaagaacccggccaagtactataccttgtttggccgtagttactaagggataaaacagaactcctatctccaaccctcctcactttttaaaaaattgatattaatatcttccctgatataaacagttttatgattttttaaaataaaagttctaatagaaggtcatgtgagacacaaacaccatattcttatgcctaaattaacag

SEQ ID NO: 2476 - DNA, 537 bp, Canis familiaris
  misc_feature (1)..(537): n = a or c or g or t
gcaatctgtngataaggtcacttctcccactaaggtttgagacagtnnaagaaagaacccaaagtagncgctcaagatgctggaccagctcagttgaagaggggctagtttgttctgttttatatttatgttgatttactaaattgagttcatttcctcttgttttatttttcattatcccagtaaacccatgtatattgtcactatatttaataatcacagtctagagatgttcatggtaaaagtactgcctttgcacaggaacctgtttctaaagaaacccatgctgtgaaatagagactttcctactgatcatcataactctgtgtctgaacagtgataccaaccacaccagaagtcaacaaaaggagcttcaagttgaaaattgcctgaggaatgtgtgcagtgcccagaaaaacaaaaccacgagtggttttgttttgttttgctttgttttgttttaaatacagaagtcatgttgtttctgcactttaggataaagcatggaagaaattnnnntagaaggcaattctaaca

SEQ ID NO: 2477 - DNA, 668 bp, Canis familiaris
  misc_feature (1)..(668): n = a or c or g or t
agacttgcttcaatgtaattgttatggnncttttcactctangtcttccaatacacacattcattttttttaagattttatttttaagtaatctacacccaacgtggggctcaaacccacaagatgaagagtcacatgctccactgactgagccagccagctctcaattttaatattaggcaagaattattcattttacactgatatcacagagtattatacctttaaggtgttacatttcagtgggttaagatatataagagactttgattcttacctgactctgtgactttgggcttttctctgggtctgttttctcagtacattgaaaggcttgaccagtatccatccagtcactttattctttaaatgttgtaaataaacgaagctttttagttgagccatttagtatagtatacagactctctgtaaggaactcagtgtactgctacacagcttccttaaatttaagtagcatattaaatatatttatagttatcttgatgtttcagtattattttaaacactggtattgggctttaataccctgatacccagagagcttgttgagaataacagaactgtttgctcattttttgttatggttccagctgattgtttttgcagtcttttgtctctttctttctctttctctttttcttttatct

SEQ ID NO: 2478 - DNA, 611 bp, Canis familiaris
  misc_feature (1)..(611): n = a or c or g or t
cctatnntagggtttcaggagtatatnnnaggcccacttccatcctacctgaaccagttggtaagggtnnncatgacatagagtgatgcaaggaagaagacaaaatggaaggcagaatagctgtaggagagatgctgggcttgcactggagtagctggagaggnctcttggtcagctggcctggcagccccacccctctgccctggagagagggaagggctgctgggtgcagtgtggctgaaacacttcttccctcctccccagtttcttttgtgaaggcgctccagggctctttggcactctgcagaaatctacactttcttatggacatgcttaatgacactcaccttcctctggtttcacggtttcagggcagcagaaacagagtgaaggcttctgtaaaacaaaaggcagcatgttttagaatgacttaagaaagaatgtgaaggtattaatataggaaattcccctttgaaaagattagtcgttgtaaaaagtggaggcacatctgggttcaaattctagatccagtatataactggctatgaaaactttggtaagatgtttaaccttttgtgcctcaatttctccatttgtaaaatggagcaaat

SEQ ID NO: 2479 - DNA, 401 bp, Canis familiaris
  misc_feature (1)..(401): n = a or c or g or t
agaagtagattattgatcaagagttctgtatatgannnagtnnnnnaagtaattgtaaaatcaaagactcttggataaatttgacatttgccttcactagaataagatcaactaattagtaaagcaaaattgttgaaggccactacagctatnnngagttgccttgttatttcagtacatgttagtttaaaaggaaataaaatacagtgagaggagatcttagaaatcagtgatatagttatctgacaagctgtaccttgttaacagaagggaagactcaaaaaaactgaaactttattacttgatcagaaattaaaactgtagacatttagatttcttggttgctgttgttaatggggacattctatttggaatcttcttcaggtgtaacagtgttacca

SEQ ID NO: 2480 - DNA, 473 bp, Canis familiaris
ggggaggattcccaagtggaggtggtggtggtggcggccaacagcgagctggtgactggaagtgtcctaatcctatatgtgagaacatgaacttttcttggaggaatgaatgcaaccagtgtaaggcccctaaaccagatggcccaggagggggaccaggaggctctcatatggggggtaactatggagatgatcgtcgtggtggcagaggaggctatgaccggggcggctaccgaggccgaggcggggaccgagggggcttccgagggggccggggtggtggggacagaggtggctttggccctggcaagatggactccaggggtgagcacagacaggatcgcagggagaggccgtattagcttggctcctgaggttctgcaacagcttttcttcttgtacccagtgttaccctcattattttgtaaccttccaactcctgatcacccacgggttttttgtgtcggactatg

SEQ ID NO: 2481 - DNA, 621 bp, Canis familiaris
  misc_feature (1)..(621): n = a or c or g or t
acatgatgtnnctgatgttacatacaactgatgaatcactgaactctacctctgaatgttaantaaagtaaaatttttaaaaattctgtccccctgcagccaccccctcccatctctctctctctaaaagaaatttgaaaaggaagaaaaataagccttgcatttgcagatatgaagtcttaagtattttcactccccaccacctcccaccttcaccgcaacatcctatggtgcccccaacttaccatgtgctttgtaagcccacgattcaccatgactatattcttagccaggtgttgcataacatttagaagggattcttcagtgtaggacagataatgctgtagagttggtgtctagggcaacaaaagttaatgttagaaatgctcaacaatgtttttcatacaatttctgtatattaaaagagtaggaagagattccataggactgactataattgaaatttacgataaacttaagatgctttcttcctcaggtactctttttttcatgctttctctaggatcctgtgcttaaatctattctacacatatgctcaaattctttgacgccaacttcctcatgcatagttccactcctagagcctaggatagcacgggg

SEQ ID NO: 2482 - DNA, 600 bp, Canis familiaris
  misc_feature (1)..(600): n = a or c or g or t
gcttgtgtgnacangtganaagnnactttncttatctttctaccaaaatcacgtgtcaggaaaagaacnnnnngctgtnnntttgtagtgaccgtcccctcccgtgaggtcctgtgcgttgtatctgtcctctctctggccccnnnaagctatcccaaggnntcccccagctgggtgttgtgcagcctgtggtcgcagggttgagacgccacggggactgccccctggcacagctgtcgtcccccagtcagcacccatcctnntctgtcaggaaggacacaggcactgggccctcaccacctcggtccacctgttcatgcttcagcctgttgactgaggcacgggtgggccacggggccaccatggaaccttccctacagggataactggagttagctgggcatgaagggggggtcacaggaagtgtgagtgggtgggcggaggggcgaacaaaacggtggcgtttctttggctcagactcctagaatgcttgacgagacggttttttttttgttttgtttttgtttttgtttttgttttttgtggaagaacctcatctcactgtagttacttttaccttgttcacttttgttatatatg

SEQ ID NO: 2483 - DNA, 255 bp, Canis familiaris
  misc_feature (1)..(255): n = a or c or g or t
ctcggggaaccccagcnngtatgatgtgtnngtgacgctgagaaacnnncagctcgaagatgtgggcacctnnnnnnnctacatcatnnncccgcccgaccgccaccgcggccacggcaggatccaactgcaggtcctcatggnnnagccccctgngnnggactccacggtggccgtgatcgtgggcgcctccgtgggcggcttcctggcggtggtcatcctggtgctgatggtagtaaagtgtgtgaggaggaa

SEQ ID NO: 2484 - DNA, 394 bp, Canis familiaris
  misc_feature (1)..(394): n = a or c or g or t
ctctccccccannnnnnnnncgtcnnnnntgcntgcacacagttagagtttgcaccncttccacgtgagccaagggaggnggccannnnnnnctgggatgaccccctaccctggctggctcccanntcgatctcacctcttannnaatgcttgtgaatctccagcccctccaggccaggcttctgnnnntcacccgggccagcctgcaagaagataagtcnnntgtggctttgtccccacacatgaggggcctgannntnnngattcaagagccagagcaaacccacaacnnnnccaaaaacntgcagggctcattgctnnatcaaggtcttggcagaaagcagcactgttcaaattttaagatgggtcaaaccattttaagaggagctggtca

SEQ ID NO: 2485 - DNA, 555 bp, Canis familiaris
  misc_feature (1)..(555): n = a or c or g or t
aaccttttcattgatttttggttttttttaatttctatattataaacataaaataataagtaatgagnnntttctactcnngcaataaaaaaaatcccaaatatattaatcctgcattcagcaaagtggcataaaaaccacctggtaagtatgcagtatattgtttatatgccgggtaatgcggtatttaacaagttgtgtcatcagaaaccacagaaccatgaaaaagctgcctatgttgttgtttttttttttttttcaactgacctaggataaagtgacctgtagatttcaaatagtttgatttactttcacagacgggattagattcattttattcatgcctaactcatctatgcattaataacatgtcatccttctcactttgaccagatgctttttaaggaagaaattttaatactgaaggactattttattattttttctaaagatgtttgtcactagttttacatcatgaaatgccaagaacaataccagaaagtttattttctatactatacaattatgattctatnnnnngctatatatgtaatg

SEQ ID NO: 2486 - DNA, 724 bp, Canis familiaris
  misc_feature (1)..(724): n = a or c or g or t
aaatcgttgacaccatctctnncgnggtcgaatnnctttgannntgccgtcttggattatatcatttgtcatcttgatctatatgattcccaaagcagtgttnncgatgtaatccgagccatgaatgtcaatcccaagatttcatttcctcctgaagttgacttttgtctcctcagtgacttcatccaggagatatgctgcattgcctttgcaatgcagactttagacccacccctagatatcgcatttggggcagatggagaaatttttaatgattgcaagtaccgtcgcagctatgactctgacttcactgctcccttggtcttctatcatgtgtggcctgctctcatggagaatgactgtgtcattatgaagggagaagctgtcaccaagagaggggcttttgtacggtggccttgcatagtgacaattcatccccagtgtttgattcacaatggaattcagtgcgatctgtaagtcgatgtcgaagcaggagtttaagtcccatctgcccccgtagccgtattggtttaagcacgctatctcgaagccggagcccttctccaataagatgtggattgccaaggttttaaggccacccgacatgttcctttgccacagtacatctgcaacagccaactttcccagcatctctatctcctctgcctgcctcagaactcacttaagataatgtgaaaacgcaattctgtgtatcactccacac

SEQ ID NO: 2487 - DNA, 609 bp, Canis familiaris
  misc_feature (1)..(609): n = a or c or g or t
cancagagaatctatgcannagaaaaatcnnataaatgtgatgaatgnnnnnntgttttgcatnnaaccatcagctttattcatcattgaagaattcacactacaagnaaacccagacagtgtgaggagtatnnnngtcttcaaacagtggttggaccttggttaacgtcagtgaatccataccccaggagttcttataaatgagaggatcatgggatgttgcatggacagagaccaagtctcaacaacagaatctccacattattggaaaattaaattaatgtaaaaaggcaagttgtatggggaatgggtattcttaattgcccaatttagccagtaaaaacattcaatgaatgtctcaggtcaagaaaagaaaatgtcagccattctttttttgcattctagaggaatctatagatgtaagcaaccagaacttttgaaataaggtgctcatctgcatcccaggatctgtgttactgtcttcttgaggactgtgtgtacatgtttctgccaggcctgctgtaatctcatattttaattcattcaacaacagtagatattgcctactgttatattttattttttttatgagctaaataggcttatgtc

SEQ ID NO: 2488 - DNA, 616 bp, Canis familiaris
  misc_feature (1)..(616): n = a or c or g or t
catcgatcatgaccanncgctggcgcannnnatccnnnnnncccgnnnnnagcaccccgacatgtcggtgacgagagtggtggtgcacaaggagacnnagctggacgaaggggaggagtaggcaagagaacccatcttttaaacaacactcgactttgcgaanntgaggagcttcggccctcgcagatgtccgcgccgcccccctactgccgccagtccgtgctacgccggtaacccgaccaggagcctgaagaattaaaatgccgacaaccaaaccttacctaacagccctggtctatcctgttcccccgcattttaatacattattttgttttataaccacttctaaacattcttgattctttttttttttaactagggagttttgtttttgtttcccgtttactttgtgtacaactacctgctttttgtcactcattttgatcgatgacggtgaacaaagccagcccggctggcgaggtgctgttcacctgaacaggtgctgttgtgcggaaaggaaactgtgtgactaatcccgatgctggctttcccaccttcgctcccaccgccttacgggccggtgcccgcctcgcatcctggcagcctcccctgtact

SEQ ID NO: 2489 - DNA, 577 bp, Canis familiaris
  misc_feature (1)..(577): n = a or c or g or t
aacaattactgaacangtgnctacaataggcanagtattttcttttttctttccttgcagtttgattcgtgataggctataggatttttacagggtaaaactacttatgaaagtagtatgtacagcagtagccattcacatatatgtaatatgcacttgtgcatacccagcctcagtgatatgtatgttactactcatagggtatgagctacatacagtccagtttaatgtcagttttataaacggtcttctggtggaccaaacaaatatagggtaaatacttgacctatttttttgaaaaacttaaatttgtttaaaatatttatttgaaggacttacttagtatgtaaaaatgattatcttgctataccagcctgcagactttttttaatgtgaatttttttcccttcatttttaacagtagagatgtggaaaagcaagtttgatatttttgtaagataatttatttggggattcaaattccctgttagacaatcatgacctttttcccttgcctttttatatataagtaagccgtctttcatttgttnnnnnnttgttaagaagatgtgctaga

SEQ ID NO: 2490 - DNA, 646 bp, Canis familiaris
  misc_feature (1)..(646): n = a or c or g or t
gcacatttcaattgcctggttttctccattcccancagtacangagtcaacancnntgtaaagaaaattttgtctgtttttcagctgtttnntcaggagagagttccagaaggggaactgctgtnntaggctgtggaccctgtttgctgatggtcgacacactggccctgctgcccatgtccctgccagagaagtgcaaaggacaggtgccttgcaccccgnnnnccagggacccttcagcacaggccctgctgttcccatggtgcttctcaccctgagctcctgtagcctcagccagggaaagagtggatgagcagtgagctggtttcttgccctccagtggcagcggggagcggggggggggggttgagcttccctttgaccctcttccccccctttcccagatcttcaatatttgttgtgatgtaacagctacaagagctgtaagaggaactatgggctttgggtgttttcttgggttgaaaagggatggggggaggggggggaaatgcatgcaggggtatgaaggcagcccaaggattcccagagactcgggaggaaacctgtttgaaacaaaaatgtgttattgttattgtgttattgttgcattactgtgttgtgaagataaattgttctgtatgctaaa

SEQ ID NO: 2491 - DNA, 559 bp, Canis familiaris
  misc_feature (1)..(559): n = a or c or g or t
cgtcccacttgcctaccaccctaaccccacgtcgnnagggcttcaggaccataggnnttagtgtcacattcctggtccctggtcaccccgggcctagctacattccgcaaccgccaagcactcgagactcgcgccgtgaccatccctagctgccactggcccctcctgagccagcctctgcccccaggactgaaccccaacagaagcaagtagagtggcttctccacttttcctccacctaggacaggaagaaggggtgacgttgggggcggggagggggccagtggccaccccacactcctgctggctgtgggcaaggacctcggaactggggggaaggggtcaagcgctctcacagcagtctctgtgccactagacattcctggtcacccgctggaagggacctccatgctgcccagcagtcagtcccctgtgtcttgagccccctgaatgtccctctgccccaccagctcccccaccaccccagctctgcactccatggcccgcccacctcagcgcacctacaggggatccctcgctaccagaaatgcagaaacag

SEQ ID NO: 2492 - DNA, 586 bp, Canis familiaris
  misc_feature (1)..(586): n = a or c or g or t
gatggnnaggcccatnnnnctctgcnnaancaatgtatgttcttctggtcaanntctgcatgcagaggttaagagagcctctttgcgtgtttcttttaagtataatgagtncttctgaagaatgtgatgagttgaaattgtattttcaaatcatgaagccagagcctgtgccagaccttctgctacctctcatagatttgctctaattctaaatgtaaaattaggagaagtggaaaaggataagataagccattgcctttttacctctgagaattggctgctatttctatgtaattttcttctgagacagccatagagttggttagaaaaaggcttttactgatgagatattgttaagcattcttgtatcaatattctcaatttagcaaccagaaaatttttcctcaggaaaggagtactgtgtgatgaaaacccagtattcagcatattttcccccattttttggaagtgacatttcacacacaggtgccaaaagtgaattggggtggggagagtgggaacctttcaaatttatagttattacagaaattgtggaaattatgannngactggaaagcaatcttgt

SEQ ID NO: 2493 - DNA, 729 bp, Canis familiaris
  misc_feature (1)..(729): n = a or c or g or t
gagatctgtgtgacagaagatgcttttgcacgggttcccatgaatattgtactcttgtttatataatgtnnaacaaataactcttctttgccaccactttgccttagataaccgtgtgtgtgccagtttgaactctgacaccacgtttccttctatgcaatcatgccctatctgataatgttgccttgctttgctctgtgcttcagtgggttccagctgcacattggcctatgttgtttttcaatttgctatactagcagttgccctgattgtaatttatataccttcaaacaggaccacaactgttcccctgtcttacttagttgcttaattgattgagcacagaactgaggcaatataaatttctgggttcacgcacaagctgggataagaaggggaatgagccatatatcgtggagaattatagtttgcgggtataattatatagtgctttttttccctcagtatttttctagccttgaattcattttatcttcattatccctgtgaagtaggtagggcaggtatgaggggaggttgggtgctgaatttttaggccaaagactgatattaatacaaattcttcactaactatagaaccttgggcacttcagttaactgctctgagagtcactttcctcatctgttaaatgagaagaataatatcagtgctgcctacctcacagggttgttgtgagggtcaaatggaatgtatgtgaaannnnngtc

SEQ ID NO: 2494 - DNA, 510 bp, Canis familiaris
  misc_feature (1)..(510): n = a or c or g or t
tcatacttttgtgccatttacccctcacttacgagtgaattctgtgttnnnaatgccttagttctgtatcagcacaacacatctcatttatcttatggtctttatttttaaccttaactttcttctgtgcagccctgtagcctgtcctgtgaatcctgaaccaagtaaaacatttcttgggatggggcattgggctacagtatacaaagacaaattactggttttaccatgtatattaggttacttattatcttctgtggacatctatgtaactatgaagtttctatatttaccctgtggctgataaaaagagaaagctaaaggtgttttatttacatgtagcatttctgtaacagcacttattagtctggattctaaaatcaactctacaatggtatttggtacttgtctcagaaactgacactaattctgtcatggtctttatagtttatttatcttgggccaaaggattaggatctttataatttattttaaagatctttaaatcct

SEQ ID NO: 2495 - DNA, 645 bp, Canis familiaris
  misc_feature (1)..(645): n = a or c or g or t
ggggcgtggtactcaaccaggnntnnnncgggctgctggtggctgttgtcgtcaagtacgccgacaacatcctcaagggctttgccacctccctgtccattgtgctgtccactgttgcctccatccgcctctttggcttccacgtggacccattgtttgccctgggtgcggggctggtcatcggtgcggtctacctctacagccttccccgaggcaccgccaaagccatagcctccacctccgcctcagcctcggcctccacctctgggccctgcactcaccagcagcctcctgggcagccgccgccacccaagctgtcttcccatcgcgcagacctcagcacggagccctttctgccgaagttgctcaccaaggtgaagggttcgtagctgctgggattgaagatgctggcttggcctcgttctcccttcttgccctggcccagctgggaccaaactctgatcagtactaggggtggggggaggtagacactgaactccaacttggcctcaccacctcctgctcccatgcaggggtgacacaagcaaactctggtaatgagggtgggacaggacccacgttggcctccagcccatcacccccatagccctgccactcccgcactttcttaggtgagtttttgca

SEQ ID NO: 2496 - DNA, 566 bp, Canis familiaris
  misc_feature (1)..(566): n = a or c or g or t
caggtattaatctcatatnntatgtatnaganctaaatnnnaatgctagaaaantnacgaaacaatcaaagaagaactaaagaaatagagctacatcccatgttcagggatagaaagactcaatattgtcagggtatccatactttccaagttgacctagggattaaaagcaatctcgatcaaaatacctgaaaagtactttatgtatagtaacaaactgattctaaagcttatatagagaaattaaagatccagaatagccaactcaatgttggagaagaataaactagaagattgacatcattccactataagacttactagggaactccaggaatcaaaaaggtggcattggtgagggactagacacacaaagcaaagcaagagaatagaaagtccagaaatagacccacataaatacagccaactgatctttcgggaagtaccaagatagtctttaacaaatgttgatggagctactggacatgtgaacatacgtgaaaacaaattgactccagacacagacctcctaacagccttcataaaagtaactcaaatgtagacat

SEQ ID NO: 2497 - DNA, 694 bp, Canis familiaris
  misc_feature (1)..(694): n = a or c or g or t
acgcacacacacacacacacgcacacacacacnnnncatgttcagnncactaaaaganngnnnnnnaacgtatactttcnnnnnnnttgtnctgattgggctgccctccagtatccggagaccaggaacaagcacnntcagtcatccagaacaagacaaggactggagtgggcagcgactcccatctgggggcctccccaggccttggcatttcctaacttgctggcagtgcctttagtcgtttccaaatttgctaacactgatagggacctggccaggggtctctcctggcctgagcagggaagaggaaagggcccatgtcctcctcagagttggcccccagcccctatgtctcatgcactggcgtgtatggtcatcttggaagggtgggcccgggagcccccttactctgaccatggagaccctctctccacacccttcctgccagggcagtccctccaggaagaatgcccaacgccgaggggctggacatggcctggtcacctgggacccatttgagggcagcctcttccctgctcctgaggctgcaggagccagtctgacccccagccccctcgcttcttcagctacagctccaaaggtctggtttcagatggggtttgtttggctctgtttttgtttggggtgcgtgggtcattgcggtcttagattatnnnctcttgctaccagtcat

SEQ ID NO: 2498 - DNA, 688 bp, Canis familiaris
  misc_feature (1)..(688): n = a or c or g or t
gcttcagtatntgacccaaatgggacagttttctnntcttacacaaatgagacaaaggaaacaattggctccttttattctttttggtgcacaggtgctgggaaaatgtgaactagcagtagtgtaantacagaacactgaccaagtaccaccagaccaggccagcactggcaaatggttaggcggggctgattttggctttgtttacagaattgccttttgcagcctggagtgtgagaatgagtatttagtttcatggttcagatgaaagtctttgattattccccatttgtcttgtcgttcacatgactccttgaaggagttactgcttccctgtttagtgctgcccaaggcctgatagctcccctttcctttctggatgagggctggctgggtcctccagcctcatgatggagccagcatgcatgcccatcagtgagaaggcttacacagtattcctcatgccctgtgctaatgttttcctctgtaagggacagatggaactgtttcttgttttcagtccaattttggcagagtaaatataactaacttatattttccctttataaaggatagaagttatttttatgtcatttcaaaactttatacaaaacttttgtaaaatgttttctggaaagtttaactgcgagaatgtaaatatgcttctaataaaataataagnnngaga

SEQ ID NO: 2499 - DNA, 529 bp, Canis familiaris
aagggtattgtgaggcgtaaatgagatgagcactgtggaagcactttgtaagtgaggaagcatcccggaaacactcaaaattggagtttaccagcaagcctggcatgtcccaagaagggtgtgatcagagcatcggaggaccctgaaatgatgtcacacatttatggtgacagagcctgaaagacccacaccttccactcccaggggatgctctgcaggacccaactcggtgcagatgtgacaaagtgcaggtaccctccagggggcttgcatgagccatccctgagactgagcccccagtgcctggcccacaggctccatcagtgacagctagacccctggaattgggtggccatctgcaggagcccaacgagagccaagcccgtcgtcttccccaacgagagagactgcaaatgctctcttcccttcctcctccacctctccttctccgcccctcctcctcattttcttgttattcctctctgcctggcaaggtattccaagagctctaattatttagttgtcatct

SEQ ID NO: 2500 - DNA, 650 bp, Canis familiaris
  misc_feature (1)..(650): n = a or c or g or t
agtgagcgctgacanncgagaacnngtgaccccaanangncagnnnntgccacagtcannnccnntacannnnnnnnnnnnnatatcatcnnnnnnnncctgcnnnnnnnnnnnnnnnatnnnntgccagnnngnagtactcgatcgctactgctccatccccggctaccaccggctgtgctgtgagtcctgtaccaagaaggccctgggccctgacaccagcccggcccctagcctggcctcaccaccacccttctccactcccgggagccctttaccgggacctaggtcccctccagatactgtnnagccgactgcggggccaacgggatcagatgaccatcagcatggccaacccacccaactcccaagacctctgggcaccagctccccggtgacccagcaccgctttacttcccagaaactgcgccctagagcatcgtggggcacttcccccagcaccccccggggacagccttggggctggaccctggcacctacgtcggtctccgaggatggaggggagctcagggaagacccaaaacacccaggcaccagcctccctgccacctccttggtgacatgagccccaccatgcctatcccgccagtcaagtttacactgtgtgctgcctcagagaccgccagctc

SEQ ID NO: 2501 - DNA, 409 bp, Canis familiaris
gattataaaaagaagcgagtaggtaagataccagatgaagaagtcagacaagcggtagaaaaatttgaagagtcaaaggagttggctgaaagaagcatgtttaattttttagaaaatgatgtagaacaagtcagccagttggccgtgtttatagaggcagctttagactatcacaaacagtccacagagattctgcaggagctccagagcaagctgcagatgcgaatatcagctgcatccagtgttcccaaacgagagtataagccacggcccataaaaaggagtcctagtgagctcaatggggtgtccaccaccgcatcagccaagaccacagcctacagcagactggaagcagcagattagaaaggccaagggactgcttcgggaaggcccactgacggcaggaagg

SEQ ID NO: 2502 - DNA, 573 bp, Canis familiaris
  misc_feature (1)..(573): n = a or c or g or t
gccctgggtgtaccccaggnnggcancaacaaccctagggnctgtgtaactgnnagggccttccaaggctaccatctctcaactgttctaattctacataggacagagctaaagcccggagggcagataacttacttggagccaaatgaggccaaagttgagactagaatttcctatctcttggtgagagttgcaggaaaatttcttctcccctcctccctccttcccttcctttgtaaatattcttggctatattttacccctttattatttcagaataaatcctgttccagtttacaagtccattttgcccttgtctggagaacgtggttgtgggaagtctactctgatcgccaactgagtgaattatttcaaaaagaaatacctgtgaaagcagtgacatcatgtctgtgatacattatttcatcacagagttagagtacaaaaactatggtactggaatcaagctttaactttggaaaatttgtgttagagattatatatcctgtcttgctgtttctgtggctgttttcctcctgttccactgtaagnnnngtcctgtctcaccagcat

SEQ ID NO: 2503 - DNA, 576 bp, Canis familiaris
  misc_feature (1)..(576): n = a or c or g or t
caggnntngtccccgaagcagagccctgtgagcagccccacaannagccggtccccctcccgctccccgtcgcccaccttctcgtggctcccgaacaaggcctcacccccatcctcgcccaaagcagcctcagcctccatcagcagcatgagtgagggggatgaggatgagaagtaaagggtgctggcagacagcaagggccacaccacacaggctggggcgagggtggggtcaccgggaacgcctgggtggggttggaagggtaatggttgcaggagctgcagctcagctaagggaaggcctggagaccagctctccctcagcctccactcagcctaagacttgggctctgcatggaggtttccagccggacaaccttgacaaaccttcttagcagcatctagaaccactccactttaacctcgctaagaaaaggtgcagagcacccccaggagacttgcactgagtggggtgtcttctgctttggtccttacacccacccctatcaagtacaccacccatggaagcggctgttccctcaatctgctacttccagctcataagggccctgcacgt

SEQ ID NO: 2504 - DNA, 509 bp, Canis familiaris
  misc_feature (1)..(509): n = a or c or g or t
cactggacannnatctctcagcttgttttgagactcacaaaattgctgcgtgacctcaagcaagttgctttccctctttggaccaatttttttttttcctgctgcaaaatgtgggaactgggctgggtcttttctgagctgaagttgttttgaggtctgagcttgggcaccttccccagggcagagaccggatggccagcgtagcgccacccctcccaaaaccccccgcccatggacagggatgccaagaataatcccgaactggaatccacagagaaatcctccccctctgcctgcagcctaccatgctgggatctcgtttctgggggggcctttttctggccgccaccatggccagagctgcctcctgccccagtggaaggccaaatacccctctgcttcagccacatgtgctggctgtcccccacttctgactggcactcagctagccacgggggtcccggttctgctttcaggccgcggggctggagaaaccaggggtcactgct

SEQ ID NO: 2505 - DNA, 563 bp, Canis familiaris
  misc_feature (1)..(563): n = a or c or g or t
aagaatatcacctagcnctctttggctgtccagaagacatgggattggcagctgccagaatgtgtactccttctggatataatggtcctgggatcctaaaatataaagaccttcatcatatggttttattccctctgttactgaaacactaacaaaaggaagaggtagcaatttggtcatatttttcatgtgttggaaaacattatcagaaggcctctcttcctagtccacccttgctcttnnnaagtctcactcacccctccttccctgcgaatcacaaacattacattacgtttgggggatttccccctggtcaggctcttccctgtgaagttccctaattgatgtcactttggtgacaagtctctgagagttacaagcaccagagaaattgctctacatcaagcgatgcaccttcagtcaaagcatttaaaagcccagcattcccagaggtatcgaggttcccaaatgctttgtgatcataacagaacagaaagtaaatgtgaaatgtctccagtggcctatgttctataagctaacannnnggaatttttttttttctt

SEQ ID NO: 2506 - DNA, 670 bp, Canis familiaris
  misc_feature (1)..(670): n = a or c or g or t
attcaangagatatgccattgttnnagcagatctccgagattnanntgaactggaagagaaactaaagaaatgtaacataaatccacaattgccaacactcctgataactgaatgtgtgctggtntacatgactccggaacagtctgccaaccttctcaaatgggcagccaacagttttgagactgccatgttcataaactacgaacaggtgaacatggatgaccggtttggacagatcatgatcgaaaacctgcggaggcgacagtgtgacctggcaggagtagagacctgcaagtcattagagtcacagaaagaacggctcctgtcgaatgggtgggaaacggcatcagcagtcgacatgatggaagtgtatagcaaactgcctcaagctgaagtgagcagaatagagtcacttgaattcctggatgaaatggagcttctagaacagctcatgcagcattactgcctttgttgggcaaccaaaggaggaaatgaattgggtttgaaggagattgtttactaatctgtgggaggtccatgctgagccaggagccgaagccactgaccttcccagagtcgatgggccaagtttcctgagtggtggccagacctggcccaccagcctcatccagaactggagaagcctnnnnnnctagggttgtcgcacca

SEQ ID NO: 2507 - DNA, 588 bp, Canis familiaris
  misc_feature (1)..(588): n = a or c or g or t
agtaagctnnnaannngccattggggggtctttgtggcttcagaaagtctcctgttaaactggagnnnnaattttgggnnaagggtggggactcagccaagtgcctcagtgtgccctgttaaaacttgggtttttccacacaattggattgtatcctaggaggactttttccttttcccctggttttttggttcctcctgtagaagaaagaggtgattttgcttggtggcctggtggggcaccagacctgccacctgccacttaaaaacctcccaacctctttacttttgcgtcttttataaaagtagttgtagatgagggaggggggagtgggcgggaagtggacggcaagacatactacagttgattttgaattgctaagtagtttcacagagctaggtctgtgtgtctgtgtgtatatgtatatatacctatctagggctagtactttcgtctcacacccgggagctgggagaaaaaaacctgtacagtcgtcttttatttttaataatataggaaaatgcgcacttgcgcgtggtccgccccccacccccctttttttttaaannnnnngttatttgtgccggg

SEQ ID NO: 2508 - DNA, 614 bp, Canis familiaris
  misc_feature (1)..(614): n = a or c or g or t
agannagagtcttcactcactgactgctacggacccttctcaggacagctcatcgccaccatgaaggaagcctgtcgctatgccctgcaggtgaaacctcagcgtctgatggcagcaatgtacacgtgtgacatcatggccaccggtgatgttcttggtcgtgtctatgccgtcttgtcaaagagagaaggtcgagtgcttcaagaagaaatgaaagaagggacagacatgttcatcatcaaggcggtgctgcccgttgctgagagcttcggctttgcggatgagatcaggaagcggacgagtggcttggccagcccgcagctggtgttcagccactgggagatcattcccagcgaccccttctgggtgccaaccaccgaggaagaatacttgcactttgggaaaaggctgattctgagaaccaggcccggaagtacatgaacgccgtgcgcaaacggaagggtctttacgtggaagagaagatcgtggagcacgcagaaaagcagagaaccctcagcaaaaataagtagctactctactgacaagttctcttctttatagtaaatgtaaaagcatcacccagggtttgnnnnnnnaaacacttctttatgctg

SEQ ID NO: 2509 - DNA, 645 bp, Canis familiaris
  misc_feature (1)..(645): n = a or c or g or t
actaactggggcaaatcaggaccgnnnnnnagcacatttaaagtcaaaggactagacttgatcttgaaattgcgttcaagtcctcacattctgtgacgtgtctcatttgagtgagctaagcatcctgcggtaggattgtgcacagagctcctgattgagaggacggtgtgggttggagtcttctctctgttgccttcttactggttatgtgatactgggccagtcattgtccctcgggcctcagcattttcatctgtaaaatgggaaaatgactaactcatacgtcttgtgaggattaaattggatactggatattagaatgctctgtatatgggaaaggactataaatcgcctggtgaaccaccaaggagagcatgtaaccctctacctgtaggtgtacatgcgtctgtacacgcgtctgtgcccagcctcccttcagtcggcgcgttctacaggctggagggaaggttcccctgtcccacgactcgtactttcttctgtattaaagctgcactcctccttttcctcctctccctacttccacctccaccccaccaactcctccccaccctcgcctccgtatttgaactaaatgaatgtgagtgaacaaatgaaggatggcagatgatgggctatgaaattcct

SEQ ID NO: 2510 - DNA, 580 bp, Canis familiaris
  misc_feature (1)..(571): n = a or c or g or t
aagggtcactcaaaatgnagctnctantatgngcctgcancntgtgtgctgttcttgcaaagnnncgcttccacttccnnggtgaggattacagtggcaatcattacnnagttagcccatctctgactattccttacccaatatcagacattgattttgttcctccttttcgnncttcaaaaaaaaaagcccccaattaccttgggaatcctgaccctgatacagggacaccaccctattcctgggttctcccttctcctnnngcccccctctaccgcattcctagttttcccttaactacttggttgagcccttctcctcagaaaccttcccactttgtccctcctgcaagtagaatggaaggacctttttccacattcaatgctcccatgcctatgcctgcagaaccttatgtagctacacctggtaccacacctactacatcacctcccaacccaaagctnnnnnngttgagcctgggcccnnnnnnccgatgaagccgagcctgctgccgcagaacctcagccttctacttctcctgacaagacattgttgcagaaatcaattaaaatctacaaaa

SEQ ID NO: 2511 - DNA, 575 bp, Canis familiaris
  misc_feature (1)..(575): n = a or c or g or t
tacacaaagattatcattaaataaagagatatgagactttatgtcaaagnnnnaatgatttcannnagtaaaatttatggctgcctttatgaaaatatatggaaantgcaaaaatttaaatacacctttgcaaatttacaacttgctgtttacctgctcactaaccacaggtgacagcatttgcttttgctatatcaaatagaatcattatggaaaataatgaactcattcataatgtgtacagcagctccatccaaaaagcttataatgctaataataagtcaccatattattattttaggcttgcaaactattaaactcattgtcctcaatgaagaaaaagaatggggaaatttctctactttatgaatattaggaaataaacttactcattctgctccaactgaaatcattacctgtattggaaatattctttttcttttgtagcttttctggaagctttgtattttttggtaaggataaatatcgagaggctgaagtggaagcctgtggaaaacatggaaaatcttatttagactatgcagaggtcnnnnnnctgtatatcagaaatttaa

SEQ ID NO: 2512 - DNA, 591 bp, Canis familiaris
  misc_feature (1)..(591): n = a or c or g or t
ctgctntaaatttattgatttattttgacagagtcgnntnnaatgctnnatcttctgnagcttacaaatatactgtnngnncaaatcacgatnnnnnncacatttgtnnnnatcttattagtgactaagtaataaagcctctcagatgttttgttgttacgatctgtatattaattttttaaaagtacatatgaatgagtttctttgacgtgtgttcttataaattgtcatgttatgaattttaaatcctacagttaaggatgtgattaattatatgattttttccctcaattttgcttttacttttataattttatagaagtaatattaggttagtgaatttgaaagttttgttgaactggtttattacaaatgttgaattttatttatactttattatacttaaaatattttgaccctttcttttaaaaatacttttccaaattcttttgnnnattaagttgtcacacaatttggattgctgtcttttgaagtgaatttgctcttgtaattacctagatttgatttaggacagacaacttctctactaatcctaaactgattttttttctgaaaagtaacggtaatttg

SEQ ID NO: 2513 - DNA, 575 bp, Canis familiaris
  misc_feature (1)..(575): n = a or c or g or t
ttgtactgctgccatttttattggcatttgattattngaatggtgccatattttcattccttttatttgctttannaagcagagttagatttttgcacattaaaaaattcagtattaaactgaacttataccctttttaagaaagagggccaaagatgcaatgttgaaaaatttggacagctatgtatcttttccttaagggcaatttggcttgaagattaaacagttgataaagcttctaacaacaaaacagataaaatactagcatacaattagacaagaatattttatagactacattaaaagagagaacttttcctagaatatgcctttgattcagtatcataaaatattaccctttgggcttataattttaaagttggaaatcaataaaacatgaaaggcaacatgccataaacctagagatctgtctagaatccttagagctaacattatatattttaagataaccaggggtgtaattagaggtgggtacaatataacttagtaactgatattacttcctcatcatactttttgctccctgacctcctgttgtcaaaattaaccatgtt

SEQ ID NO: 2514 - DNA, 625 bp, Canis familiaris
  misc_feature (1)..(625): n = a or c or g or t
aggttnaagangcgtnnaggcatcgaaactntattcnagcagcttgcccctttgtatgaaatcgtcatctttacatcagagactggcatgactgcattcccactcatcgacagcgtngaccctcatggcttcatctcctaccgcctgttccgggatgccacaagatacatggatgggcaccatgttaaggatatttcatgtctgaatcgggaccctgcccgcgtagtagttgtggactgcaagaaggaagcttttcgcctccagccctacaatggcgtcgccctgcggccctgggacggcaactctgatgaccgggtcttgttggacctgtctgccttccttaagaccattgcgctgaaccgagtggaggatgtcaggaccgtgttagaacattacgccctggaggatgacccactggaggctttcaaacagcggcagagccggctagagcaggaagaacagcagcgcctggctgagctctccaaatccagcaagcagaacctcttctttggctctcttaccaaccgcttatggcctcgctccaaacagccctgacttctgagcctcttcagactcactgcctgggtcctnnnnccgaggccccagtgctcccagatcatggctt

SEQ ID NO: 2515 - DNA, 104 bp, Canis familiaris
  misc_feature (1)..(104): n = a or c or g or t
gtgcacactgtgtgttgttcatgatagcttgtnnnaacttgactatgttggagttctggtaatagtggcaatcttgacattggtcagagtntagagagnnntaa

SEQ ID NO: 2516 - DNA, 205 bp, Canis familiaris
  misc_feature (1)..(205): n = a or c or g or t
gtgggagaaagagtnngtntnnnanagtgggnnccatgacccagatgtaagcatagggannncaggaatggggaagaaaccccagagtatgagggcatggncttccttcacacacaggagagtagagctatttagggcatctgtttatgtacaatggggatatggcccttgaattcaccagnnnnnngttacttcttgcttttac

SEQ ID NO: 2517 - DNA, 584 bp, Canis familiaris
  misc_feature (1)..(584): n = a or c or g or t
cttnnnncaggttattgccccacatacatgcctgatctggtgcttcacgggaccagcagcgatgagaaactgaagcagtgtctggtggctgatctggtccacacagtccatcatccagtgcttgacgagccgatagccgaagctgtctgtattattgcagacacggataagtggagtgtccaggtagccacaagtcagaggaaagtgacggacagcatgaaactgggccaggatgtcttggtctcgagtcaggtgtccagtttacttcactccattttacagctttacaagcttcacctcccggctgatttttgcatcatgcatcttgaagatagactacaggagatgtaccttaaaagtaagatgctgtctgaatatcttcgtggacacacacgcgtccatgtgaaagaattaggtgtggtactggggattgaatcaaatgacctgcctctgttgacagctattgccagtactcattctccttacgtcgctcaaatactcttataagctaaagctcaggacagttcttccttggaagaaaaaaaaaaatcagattctcaactgaaagtgaaaagaataagctc

SEQ ID NO: 2518 - DNA, 519 bp, Canis familiaris
  misc_feature (1)..(519): n = a or c or g or t
cagggatccccatgtcagtcctnntnanataaaagtcaaagcnnnnnnnnnngcactctccctttcatcccagaccactgtcctatttgctgtctgctgttaggcactctggtcttccatatgctctgtgccttatcctgcctgggggttttgcatatactgttcctctgtttggacagctcctcaccatccttccccaacccgcaccccacccctttcctgggtaattcctgttcatcccttgaacttaactcaaatgtctcttccatggcaaaacctcatctgctatcagagaacctatcaaacccccaggtgataccctttcacaatttgccataacttttttttttatgataaatagcatgataaaccatgatttatttgtgggattgtttgattaatatttacctgtaaccctagactctaaatttcttgggttaaggggtatctttgtcttgttaacaacatatttcaagcacattgcctatttataataggtgctcaataaatnnnnnagan

SEQ ID NO: 2519 - DNA, 623 bp, Canis familiaris
  misc_feature (1)..(623): n = a or c or g or t
gtacangaaaggaaatatcaaagataagagtngaaataaatgaaatagagacttaaaacaatagaaaaataatggaattaggagctgattctttggaaagccaaacttgatcaaccttaagccagactcttcaagaatagcagactgaaatcagaattaaaagggaagtaataacccacaccacagatatacaaggcctataagagagaagtatggaaaataagccaaagaactggacaacctaggaaaaaaatggataaattcatatttatccaaaacagaatcaggaagaaatagtaaatataaacagactgatgattagtaacaaaattgaatcaacaatcaaaaaactcccaacaagtaaaagtctaggagcttgatggcttcacagtttcaaagaagagttcatacaaacattcaaagagtgatacctatttttctaaaactattccaaaaaagaggataattgcaaattacatgtgtgataaagtacttagactagacgggagacaccatgtacttcaataatttaattaaaaaaaattccccaagagtctaaacaggcattttactaaagaaaatatttaaagggatgacatgaaaatggaatgatgtttgacatc

SEQ ID NO: 2520 - DNA, 479 bp, Canis familiaris
  misc_feature (1)..(479): n = a or c or g or t
ccacccaaccaaaaccacaacgtgaattngcaacaggnnannaaaaaagaaccaaaacttccaaggccctgctttttttcttaaaagtactttaaaaaggaaaatttgtttgtattttttatttacattttatatttttgtacatattgttaggggtcagccatttttaatgatctcggatgaccaaaccagccttcggagcgttctctgtcctacttctgactttacttgtggtgtgaccatgttcattataatctcaaaggagaaaaaaaaccttgtaaaaaaagcaaaaacaacaacaaaaaaacaatcttattccgagcattccagtaactttttttgtgtatgtacttagctgtactataagtagttggtttgtatgagatggttaaaaaggccaaagataaaaggtttctttttttccttttttgtctatgaagttgctgtttattttttttggcctgtttgatgtatgtgtg

SEQ ID NO: 2521 - DNA, 309 bp, Canis familiaris
  misc_feature (1)..(309): n = a or c or g or t
ttggtttatttttgtaatgtgaaaaataccnnnctaaaacacatttttatttaacaaactaaaaatattcctccaaatctcttgcttgtcattgactcttgcgtgtcaatttccctcaggttctattttcttaaaccaacctttaaaactgtcacctctgttaaggttgaactttgccaaaaaaaataaaaaagaagttactttgtaatttttggggaaaaaagcacatacattaaaactaggtaatgttttgtatatacagttattttggatatattattgnnnnttgtacaaatgtattttgaagaa

SEQ ID NO: 2522 - DNA, 672 bp, Canis familiaris
  misc_feature (1)..(672): n = a or c or g or t
aaactgaagcctgnnntcaagcagggcggctctaccacggctgnnaactctagtcaggtgagcgatgggnnagctgccctcctgctggcgcnnaggtccaaggcagaagagttgggccttcccgtccttggggtcctgaggtcctatgcggtggttggggtcccacctgacatcatgggcattgggccagcctatgccatccctgtagctttgcaaaaagcagggttgacggtaaaggacgtggacatctttgagatcaatgaggcctttgcaagccaggctgtctactgtgtggagaagctaggactcccccccgagaaggtgaaccctctggggggtgcagtggccttgggtcacccattgggctgcactggagctcgacaggtcatcacgctcctcaatgaactgaagcgccgtgggaagagggcgtacggggtggtgtccatgtgcatcgggaccgggatgggagctgctgctgtctttgaataccctggaaactgagtgaggccccgggctaggggcgctccctggctctgctctggtggtggtggcggcactgggactaacatgagcactggtgacacagtacaggagtggctgaggtacagagctgccctctgccaggtcacccaggccactgtgtaagtcctgggagtgaggaannngnagacn

SEQ ID NO: 2523 - DNA, 604 bp, Canis familiaris
  misc_feature (1)..(604): n = a or c or g or t
agaaaagcatgagagaagaaataattatggatttaaatcataactttagtgatgcagaatctgccagagaaaaacacatagtgaaagagtgacttctgaccacagcaagagaaagaacagcaaacactaaaatactaaagataatgaatatgaaaaaatagtccatacaacttgtgagtgaatactagcaataatgaaaataattcctaccacaataataattacagacacttaatgtgtaccagattatctcaaatattccttacaatattgcaatgcaatagtaattttatgacaggtttagaaaaaaatacgaaactttcccaagtcacacagtgagaatgtagctgtgccaggcttcaaacttcagccacaccacttaacaactatgccaaaatgctggaaagaggggcataagccttgttatgaaggctcatcaaagctataccggattattgaatctttaaaaattaacaaaatgtgggatgcctgagtggctcagtggttgggcggctgcctttggctcaggtcatgatcctgggatctgggatcgagaaccacactgggctcctgcgaaaagcctgctctccctctgcctnnnntc

SEQ ID NO: 2524 - DNA, 624 bp, Canis familiaris
  misc_feature (1)..(624): n = a or c or g or t
ggctactgttacttacctggctcaggaggatgggnntgtcgtgattggctttaccagcgcccctggacagggagggatcctggcccagcgggagtttgatannagattctccccgcattttctggactgggcagccttcggagtcatgaccctgccctccatcggcatccccctgctgctgtggtactccagcaagaggaaatatgacactcccaagtccaagaagaactgaggggcttccgaggccgctgcctaggagatccaggtgctttccagactccggagggcctctggagtgcggtctctcatccccagcccctgccaccttctccaggatcctgcctgctctcaaccagagtcggggaccaggcctcggtgtctgtgaaagcctcctccttctgtcccaaagccatatgagcaagaacgagcaggaatgcctccagcaacaagcctcgggacctcatctgtgtgccttgtggtgctgcagtgtgaactgaggggcccaggagggggcactaaggaaactgcctgactacccccatcccctgctctcccctctcggaagagggtggaagatcagatgaaggccaagtgactcggaggctacccaatctctgttctggg

SEQ ID NO: 2525 - DNA, 673 bp, Canis familiaris
  misc_feature (1)..(673): n = a or c or g or t
agcacgagaacatgagagcagaggcgtcactggtgctgtgggcgnnnnnntgcgccagatnnnnnncgcagtggtgannnntctgattgtggccacagaagcaacatcaaatgtattaggtggcatgagaaaccagattagaccagatgttcggcaagacgagtcacagaaatggcgccatggggaaagactgatatttccgacacaattctttatgaagatattatgagggtggaaataaggagtgatgtcccattggcagctttagaggttattcatttaactttattgtgctcatctcaggaacaaaagcatttcttagctaaataatttaatatcaaagcaacatgcaaccaaaaacttgtgacattttagggctagtttggtacttgcctagagaaatgtttggtggctagtgtcaaaagtccttcagtgtttgctgccaagtgagtggaatccttgcttttattaaaatggctgtacttctccttggtatagataagagatcattggaagcctgttacagtacagagtgctcagaaacatttgcgtactttgaaagcactatttatgttgccctgaggagttgatttatttctcaaggtttaaaaaagaatcacagcttcaaaactctcattgagaatgagagacagaagccacagggaaagcacag

SEQ ID NO: 2526 - DNA, 445 bp, Canis familiaris
  misc_feature (1)..(445): n = a or c or g or t
ctgctttttnnaagtcatccaangacacctttngaaatagtagcatatccacctctctcccaacctcaaatggcagnnncataacagataatgtatttcacaccgaaggatcaactaacaacagaagaactagatcaatttcaatccaagaaatttactctgggaaaaattcctttaaagcnnccacctatggaacttctaaatatttgaaannnnnnttctaaatacagaaaagaacagctcttaaaattgtctngagtggtttgtataaaattgctttgagtggttcaaatatatacgtatatatgtatacgtacatatacttacacgggatataaactttcaataataactttaggggatttgaaattcaattatttttttctaagtaaagtatatgaaatnnnnngcaagaagttttttnnnntttactttaattatgaat

SEQ ID NO: 2527 - DNA, 589 bp, Canis familiaris
  misc_feature (1)..(589): n = a or c or g or t
tcgattctgctgcatttagtgtgcaagctccagtgggatctgctcnnnctttcgttttagacatcatatccctgtggcatgatgtcgccggtctctcgtcacctttatcagagtggaagctcattcattcagtgccatcaagggagacctgcagtccttttgggaagcagtccgtcttggttctgggggttttgtgccatcttggatcggtctctaattgcagatgtgacagagaatggattgaccctagttggttgatgttgaagactttagcctggaaagtgcttgccttttccagcagcgtatagattggaattatttcaaagcacagaacgatgcgaataaacgaaaacaaatgctataacctagtcagttaatactcttggatagtttctagagctcatcgtttttcatattacctctctccactggcctctgccaagagttgtctgcagaactgcgcaacacaggccagggtccaccaagtggggaggtggacacatctcattttcattagaactgttcggtctttattctgtattttcctcaagtgactgcctaatacttggttttgagatttatttccatt

SEQ ID NO: 2528 - DNA, 554 bp, Canis familiaris
  misc_feature (1)..(554): n = a or c or g or t
tnnggtttgatttgtattgggttcgcaaaatggaaattttacnnantttnaatagnntagggcatctccacnncaatnnctcaaatggattttctgttatnnntgttcttgacaattttattttcatttataacagacattcatattaataagtttaatatagactagtatctacacttaggtcaaatataggtttatataaaacaacaaatnnagatcatcgacagaatgcaagtactttttttatcatgaaacatattttaatataggaaaaatctaatgatagagtcatattggttgaaaaaatattttttaactgttggtaatcactgactctcctccttccacttcagtgttatatgtaggaatcaagcactatgtcacatcatagtatttccctgttaaaaattaaaaactggagtgatagggacatggtcagaattgagaaaacactttgagtcaagcaggaacaatgtgatgtactctattttattatgtttgtatataaatactcttgtaaattgttcagaatgaaaacacttgacaaaaatcta

SEQ ID NO: 2529 - DNA, 586 bp, Canis familiaris
  misc_feature (1)..(586): n = a or c or g or t
agtnactagctgagnnnnnatcaaaaccaattccaattatgccagcgagtccacaaaaaggccacgctgtaaatctgctggatgtgccagtgcccgttgcacgaaaactatctgcccgtgaacagcgagattgtgaggtcattgaacgactcatcaaatcgtattttcttatcgtcagaaagaacattcaggacagtgtgccaaaggcagtaatgcattttttggttaatcatgtgaaagatactcttcagagtgagttagtaggacagctgtataagtcatccttattggatgatcttctgactgaatctgaggacatggcacagcgcaggaaggaagcagctgacatgctaaaggcattacaaggagccagccaaataattgcggaaatccgagagactcatctttggtgaagagaattatatagtactgagactttgttgactcaaaatttgctagttactgcctacttgagtagaattttatttatgaactgtgtattgcaatggtatgaatctgctcatgtgaagagactggctataaactgataatttcactctgtattgcagaacaaatcatacattta

SEQ ID NO: 2530 - DNA, 623 bp, Canis familiaris
  misc_feature (1)..(623): n = a or c or g or t
ttttctatatgtatatagaaaaatgtatggtttttaaaaacagataagagatcagattgtgctcttttataacttgctttttccatttgacaaaatcctgacttcccatgttaacagataaccatctatggacacccttgtatttctgtactataatttacttaaacaatctactattagattgtctccagtctcttataaacgatgtgatgtaacgtgcaactttatagttaaatctggatacgaattcttaactattttctacattactagaagtagaattgtagggtatgcacgttttcatggatttgctctcttgacacatactcttcagaaacagctgtgctaattcaccgtccttcagcagtataaaagagcactgatttctctgaaaccttcctaacactgggtatttattatcattaaaatattttgccactttatagaaaaagtatctcattgttttaatttgcatttattttatgtttaatgaaatttttatatacttgttggtcatttgtatttttggtttttttacagaattgccaaacattgttgccccagtagccaaaaataccaagttgttattcttgcctttgcagtttaatttgaaagaannnagg

SEQ ID NO: 2531 - DNA, 631 bp, Canis familiaris
  misc_feature (1)..(631): n = a or c or g or t
atattgtnaagtcncgtgtaacaggtcatgnnntgaagtagtcatgtgtctaccatcctcctccctacttcttacatatggagaaagaagtaaataaagatccatgggcttttcaggatataagttgctaaagccagacatgaagaaacactgagaagtcctagccttttgtcatttgtgtagagaagttcagagagatcagtgttgacggttaaacaaaagtgacacggagaggagaaagatcatagcaacccataggcacaggggcagggggtggagttatctgaggggagagagacagaaagtcccaccatttgagaagacagagggagaccactatggtcacagaaatcccatgtagatggaatgcctttgatgtgtggcatgtgaaggtgatgtcagatagaccttgtgcatcccgaagggagccggtgacccaggccaatggaagtctgattccctgagtgtccaaaataaaggaggggtttacagtgggtgttatctttctgtgatatcgttaaaaagtcgatgaaaatcgtgtctcatttgaaagatgttagttttgaaatgagaagctacaggtttctaacattatgactggggatattaaatcatgtcatagtagtatgtc

SEQ ID NO: 2532 - DNA, 363 bp, Canis familiaris
  misc_feature (1)..(363): n = a or c or g or t
ggaaagtattgaagannnaactcattttcacagattatgattttccacttacaaaatacaaaagcattattaataggtgttggatttaagatcaatatacagaaatcaaatgcacttcagtacactgacaacacgcaaaatgtgattcaaggaaaaagtaccatttataacaacaaaaagtacctccaaaagtaagcaggacttaaatctatcaaaaatgttcatgaccttagtggacaaaattattaaactgctgaaagctgttaaagcctaaataaatggagacctatactactatcggtggataggaagacttgatattataaagatcctcaacaaacgtatttatagggatccctgggt

SEQ ID NO: 2533 - DNA, 578 bp, Canis familiaris
  misc_feature (1)..(578): n = a or c or g or t
ctnnnctaccaactcagattttatagcttctgttttaagtgattaacctatagccattggcatttaaatcctttttgtgtcctactccctaaaaattaagatttttttttttttgtattaaggagcaaagtttttctatttcacaaatatagaagttaaaagaccagactgggaaaaattctattccctgaaaagtaaatgtcatgaattatgattttgctttgtgtgtgtgtgcgcatgcgcaagcgtgtgtatatgtgtgtttcaatagtctttcagagatgaaagtcttaatttctaaaagccaaaatggacatccctatataaattaataactgcctggaatttttaaaatgtacttgaaaaccataaattgtttcaaaatagaatataatgacaaataagcctttagaagcatgatctgcctataaagtacttgagagcatggcactgattaagttctagggtgctataagtgaggttcccccccttttttttcagtttcattgagataaatttgacaaagttgtataggactacttttgtttctctttggtttttacgattcatatttttta

SEQ ID NO: 2534 - DNA, 538 bp, Canis familiaris
atacacctttatcagatagtttaaaattgactatttatagtactttgaatttaataaaattctatgtcatttcatattgtatgccagaaatgaggctactagttattcgaatcagtagttaacttcatattagataagattagagattactgataagcaagatgacattatattgtggaaaaacttgtaaatgtagaattctgcttcatattattttacatattagtacactcatagtcagctttgtaataaatttgtgttttctttagtaactttagttcttcaacgaatggcagatgctggcctgtaatttttttttctttccaaggatgataatttgtgtgttctttgacttgtttatactttacatctctgtagttttatttttagaagttctgagttgttggatgtgtggttattttcctttctctgtattctttattgaaacctaatttttgaaaaacctatgtattattgatacagctttggtttgtacattctgtatagcctaactacatacatcaaaatgtatgtcaac

SEQ ID NO: 2535 - DNA, 589 bp, Canis familiaris
tgtcattgatgagtcagaaaagtatgcagagtaataatgagccactcccagagataaaaccaataggagatcaaatagcttttaaaggcaataagaaagatgccaaccagaaccacatggggcaaaaccatcaggatacttcacccccagatatggagagaagatcaaaatcttgtacaatactataaatatatatttatgtttccgtggtcaccaagcacattgtattttatacttgaaaaacattttgacttctgaaagaaagttcctgataacaaacttttaaagatataataatatgttttatttgatttgaatattatgaccagtcttggtatttatttatgctaatatttttgacgagcaatttcaaaataagtgtatctcaaactctccttcaagtgttgtggccttaactgttcagtgttggaataaaaaatatatttttatatgtgaagtttaaattaagacattcatagtttttaccaaacaacttctttataatttcataaggcaatatttgtaatctcatgacactgtaacagtttttaatgtaattgcaatttttaaaaactgagtcaaaattgtt

SEQ ID NO: 2536 - DNA, 439 bp, Canis familiaris
  misc_feature (1)..(439): n = a or c or g or t
agcaggggannnantnnggccancnntnngtaaggtatgnnnaaannnccnnnnnnnnnngaaagaattggacncnaacatgcatnttatganngnanttgtncnanagcannggtangnacaatgccttttctnnnnnnnnnnannnttcctttcatgaacctcaggaccactatgtcagnnanngnnnactggttcctgctgctgtcctatgatnctgacattttcctgttgctaaataggnnnnnnnncctgacacactctgaacacctaatatgaataaaggtgcgtacatcatcagaggaaaccatgagcggcttcagaaatacagggttgataaagtatgataggaagataaaatacctgtttgtagttcagttgggagataatctttaggcacattctaattttaaagaaataggaannnnnnggcacatta

SEQ ID NO: 2537 - DNA, 78 bp, Canis familiaris
  misc_feature (1)..(78): n = a or c or g or t
ttttcatnanttactanttatgatgtatttnngtgttttattcaggacagagttctgtagggggtnnnnnnnannnnn

SEQ ID NO: 2538 - DNA, 581 bp, Canis familiaris
  misc_feature (1)..(581): n = a or c or g or t
cgnnncttgccaatattggattttattagaagcacccaattgaatgggagtttccacgggtgctcaggtgtnnnnnagaagttgcaatatgccagcctcctcagccagctgcagagagtaaaggagcagtcccaggtgatcaatcaagcaatggcagagctagcaaccattccgtatctacaggacgtcagtcaacaggaggcagaattgctgcagtcactaatggcagatgccatggacacccttgaaggaagaagaaacgataaagaacgtgtgtggaatacaatccaaaagaaattcaccattcnnnnnnnnnagtgtgaagatagcgaagctcctctgcagagaaacaaatgcaaaagccctagaaccgggtggtgccgagctcggggctctagcccggctactagctgccacggcgggaagtggagccagcgcggtgagcacctgcctgtgctactgtgccgtctacctggccatctggaaaactactgctgcaccaacgcaagaaaaatgtaaaaaggaagccttgggtgaggtgnnnnttttcaggtgttattcaaatcctacagctgggtaaa

SEQ ID NO: 2539 - DNA, 535 bp, Canis familiaris
  misc_feature (1)..(535): n = a or c or g or t
agttcntnnactttcttctcagcgnncttctggagatgtgggcttannnnnnnaaaggggatgtttcaggaaagaaaaannaaatggaaaactgtaactttgcccttattgtggtgatgagtattttttnnnngttgctagttctgttgaatgtgacgctgtttctgaagctgtcaaagatagaatatgctgctcagtccttttaccgtctccatctccaagaagagaaatctttacatttagcctctgatatggtgtcagaagtggaaaatattcagaagaaaagagatcaggcccgtcgtttaaaaggagtactccgagactcggtcatgatgcttgaacagttgaagagctcactcattatgcttcagaaaacttttgatctactaaataagaacaagactggtatgactgtcgaaagctagtgatctcaaggcctgaaattgtagagatacttggaactaaaagaaaacaccttaaagaaagccagaggatggaagattttaattgtcatgggaacatttccacattttct

SEQ ID NO: 2540 - DNA, 576 bp, Canis familiaris
  misc_feature (1)..(576): n = a or c or g or t
gctgtgtnnantgctcaggtgagaggtnacagctatgaaagcggctgtttannaagaacaggtgctcgagtnnngctcttcattggtttcatgttgatgtttggatcacttattgcttccatgtggattctctttggtgcatatgttacccaaaatactgatgtttatccaggattagctgtgttttttcaaaatgcacttatattttttagcactctgatctacaaatttggaagaactgaagagctttggacctgagagcacttcttagagcacacttccttttcttttgttatatttgtagataagttttcttccctcgacatgatttacacattgccaaacgggatagattgtacattaaatgttctgtttctttacacttctgtgctctgagttttaaaatagtttgatgaagtttctgtgcttttttaaaaaatcatttaatagattgttaatatgtatataatataaaactatatggatgggatgataagaatcagttttttattcctaaagacttaaaagcttgatctattccttgagccagggttatatcttcatgtcattttaaga

SEQ ID NO: 2541 - DNA, 700 bp, Canis familiaris
  misc_feature (1)..(700): n = a or c or g or t
gcatgtcctcttanctttgttttcttttcagnncttgaactccnntaaaataagaatatgtctgaaacctatttattgtgattgcattaagaatgcttgtggccaaaatgtgtttttttatataatggttataccttaaatacttcagcagtcatttcaacaaatatttgagcacttactctgggccaggtacagtactgagcaaaaaagacaaaaatccttgcctttatggagcttacattctttctctaaatgttagtaagaatttacattctaggagtgatcaactagtgtttaatcagaaagttcacactcccaaagcagctactaaaagccgtcagaagctattcctattacataacagatactcctttaagtaacagatgttagaaatgggctctttttgaaattggtgacatttgatacatgtgaattgcctaaatattttgaagatattccccttacttagaaacaggacatagatctggtaaactttatattctttccctcttagaatggcattgacagtgaaatgtggaactgattttggtagattttaattgcctgttgcccactacaaggtaacagtaatgcctatggggtattgttgcatctgtctggagtgaaccttttatgcaaaaattgaagcacccaaagaaacacaaaactgaaatttcannnngtataccaaacagtgcaa

SEQ ID NO: 2542 - DNA, 563 bp, Canis familiaris
  misc_feature (1)..(563): n = a or c or g or t
gctttacgtcctttcagaacttgcgtttccagcntctcccctgcagggttgagagngaaagcggggaaggtttaagtacagccactctgggctcctgggcaacttgatcactccagagtttgaagagcctgcaggagggaatactgctgtcagtactcagctcagataccagccccaggaataagaactccatttcaaacagttctggccatccatcgtcctccactagaggggctcagcttgactgcccttagccaggcaagcacagtaatgtgtgttttattcagcattattatgcaaaaacccactggttaggttggtttgttttaggataggaaatgaaattgcctctcagtgacaggaatggcccaagcctgcttcctattttagtttttggtttattttatttttttaaactgatggatggtgcagcatgtctacatggttgtttgttgctaaactttatataatgtgtggttttgattcagcttgaaaaataatctcactacatgtagcagtacnnnntatgtacattatatgtaatgttagtatttctgctttga

SEQ ID NO: 2543 - DNA, 644 bp, Canis familiaris
  misc_feature (1)..(644): n = a or c or g or t
gcntgcccttccacgagcctgtcagcccgnnggcccggcannactaccagattatcaagaggcccatggacctgtcaatcatccggannnngctgcaaaagaaggacccagctcactacaccaccccagaggaggtggtgtcagatgtccgcctcatgttctggaactgtgctaaattcaattatcctgactcagaagttgcagaggctggccgctgcctggaagttttctttgagggctggttgaaggagatctatccggaaaaacagtttgcccagccgaggcaggaggactcagactccgaggaggtgtctagcgagagtggctattccactccccagggcttcccatggcctccctatgtgcaggagggcatccaacccaagaggcggcggcgacatatggagaatgaaagagcaaaaagaatgtcattccgcttggccagcagcgtctcccaggtgtgagagctggcagtagagcaccctggcagctggtgtcccatcctgttgaccactcctccccacctttcagctcattctcttcagattgtggatgtgagacaagtcttgttgagctgtgtagtgctcttctttgccgtttgcattttacagcattcatttgggagccatagtgcatccactaca

SEQ ID NO: 2544 - DNA, 558 bp, Canis familiaris
  misc_feature (1)..(558): n = a or c or g or t
aagnagcgcatcctgcaagtgccnntgtgcagagaggactgtgagcaatggtnnnangactgccgcacctcctacacctgcaagagcaactggcacaggggctngaactnnanctcaggagtgaacaagtgtccagctaggaccacctgccgcacatttgaggcctactttcccacgcctgcagccctgtgtgagggcatctgggatcactcctacaaggccaccaactacaggcgggggagtggccgctgcatccagatgtggtttgacccggcccagggtaaccccaatgaggaggtggcgaggttctacgcaggggccaggaacgctggggttatgccccaagggattgagcatctcctgctcagcctggcccccatgctgtacctctggctccttggccgggtctagcccgacccagatgtccactccgcatgtcccgggttctgatgaccaagttgggttcagctcagctctcacaaatgtgggtaccctaagtgagcctccatctattatccatccttcccttttgtcatccagtttctgctccatggtggg

SEQ ID NO: 2545 - DNA, 600 bp, Canis familiaris
  misc_feature (1)..(600): n = a or c or g or t
agaggctnctgaaggaactctacttgttcgatgtnctccgggcagatcgcactacagctgcccacggccttgaattgagagtccccttcctggatcatcgattttcttcctattacttgtccctgccaccagatatgagaattcccaagaatggaatagaaaaacatctcctgagagagacatttgaggactccaatctgatacctaaagacattctctggcggccaaaagaagctttcagtgatggaataacctcagttaagaattcctggtttaggatcttgcaggaatatattgaacatcaggttgacgatgcaatgatggccgctgcagcccagaaatttcccttcaatactcctaaaactaaagagggctattactaccgtcaaatctttgaacgccactaccccggccgggctgactggctgacccattactggatgccgaggtggatcaatgccactgacccttctgcccgtactctggcccattacaaggcagctgccaaagcctaggtgccctctgcactagcgagtacaaggcaataaagagtagggggcttgggagtaagaggggagctgtgaatgtcaaccacgtagg

SEQ ID NO: 2546 - DNA, 508 bp, Canis familiaris
  misc_feature (1)..(508): n = a or c or g or t
gtggctttggaggccgaggtggtggcagagnaggccgaggtnnatttggtggcagaggccggggaggctttggagggcgaggaggcttccgaggaggcagaggaggagggggagacnnnaagcnnnaaggaaagaagacgaagtttgaatagtttcttccatccctctgtcttttcctcttctgtttgaaagaaaaggactctggggtttttactctgttacctgatcaatgacagagccttctgaggacattccaagacagtatgcagtcctgtggtctacttggaaattcgtatagataacatttcaagggagataccctgttggttttgactggatattcatataaactttttaaagagatgagtgatagagctaatccttatctgtaagttttgaatttatattgtttcttcccatgtacaaaaccatttttttcctacaaatagtttttgtttttttttttttttgcgttggggggtgtaaagganngcagaatgttttatca

SEQ ID NO: 2547 - DNA, 639 bp, Canis familiaris
actcccagaacctgatccttgttttcacatcccagagaaacaacacactctgtatttttgttttatttagaaatgatttaaaaaacattatacaaaggctgatcagtttaaaatgtgactgacactgaaatgctgtgatgttccccaggccgaggggaagctggactctggggtccccagtgctgtgcccctctgtctgtctgccctgtcctggggtgatggacaaacagatgaccacaagacaggagaatccgagattggaaacctccaggctgagccctctccgggcctggccctgcatccctcacatctgcagcctgcgctgcctgcctccatctcctgctctttctcagctggccttggtagtaccaggagccagtggggagcctggggagcctagagctttcaagaagtgagagcaccaacctgaggagtggagagggacttaaaaggggagaaaggaggccaggaagagatggataaaagagacccttctgatctcatcttggaccctagaggcgtccataggtggggacccaaggcccaaccagcccacccgatggcctgggcgagaaataacctctctgtgctttatttgagggcacggtgagagttaccctaggcttcccagggcctgca

SEQ ID NO: 2548 - DNA, 624 bp, Canis familiaris
  misc_feature (1)..(624): n = a or c or g or t
cgtaggaccagatctggtcactgctgtgcaattccagtcacatnnagagcccnnaggtgtaggacntggcagtttcaaaccagatttcctctacagctctctnnnnnnggtcaaacaactgctgcaagtgcttccacccagtttttgcagtaatcatgagatactcttcattctctgggtgtagctggcaagagtacgccgccatgaccagggactggcaaaagcgactgcacacgagtagaaacaaagctcccctctccacaggcgtcagcgggatgacactctcaaaccccgccaggacgtgacctcccacgtgcatgggactcttgctctcaatcatcatgtacatgatggtaatggccgcttcaaacacgtagtagccgtagctcatgtcatcgaagtctaaaatcccagacacttgatatgcagcatctccacaggctgacttactggactccactaggatgttatggtcattaagatccccatgattgagacctaaaagaagaaaaaccaagccatgtgaaagcattgaattccccacttcattgtcttcccatttcctgtttcttgggcacagccactccgatgtgatgagcagtccgaggtagagccaaaccctat

SEQ ID NO: 2549 - DNA, 629 bp, Canis familiaris
  misc_feature (1)..(629): n = a or c or g or t
cnaggagtctacctgggtatgcntggttgcctgcctgcatatgatgcccttgctggggagttcatcagggnntcaggtgtnnaggnnngccaggcgctcttgaagcaggggcaggacaacctcgccagtgtgaaggacactgagaagaagtgggctgagcaatatctaaagatcatgggaaaggtcttagaccaaggggaggacttcccagtgtcagaaatgacccggatcaccaagctgattgagaagaacaagatgagtgatgggaagaaggaagagctccagaagagcttaaacatcttgactgctttccagaagaagggggtcgagaaggaggagctgtaaaaaggcactccaggttttccagggtttgggggtggggagaggggagagttaatctgttggctgtgagagaccctcctgggatacgagagagtggtggttaaaggggtactaagctggaaatctgagcatacctggacattgacgctgatgtgaccatgcttaggacattactagcgccagtttggtgtataaccagagcacttaccagatggcttgtgaaatcccccctcagaaggaattggtgctataaaaaagagtgtactgcccaggtccttgacaggtgt

SEQ ID NO: 2550 - DNA, 463 bp, Canis familiaris
gaaccgaaagtcgcatcccctgccaaatccaggccacctaactctgtgcttcctagaccatcatctgcaaatagcatcagcagcagcacatcttcaaaccacagtggctacaccccggaacctcccctgcccccagctggaggtgacctcaccagccgactgtcgagtgatgaaggggagatggacggtgctgacgaacccgagaagttagactgtcatttctctacccaccaccccagacctcttgcgttttgctcattcgggagtcgcctcatgggacgcgggtactatgtgtttgatagaagatgggatcgttttcgattcgcactaaactccatggtagaaaaacacttgaattcacagatgtggaagtaagtgagccatttttgtgcaatatttgctcagagctgccccacgactgtctgcgccctagctttctggatgaacgtggtagttggctttt

SEQ ID NO: 2551 - DNA, 551 bp, Canis familiaris
  misc_feature (1)..(551): n = a or c or g or t
ganngcatcagggaaactgagtnntgnaggggaaaggacttgccagaggtcacaccaagagtcaaagagagcaggattggtcctcagggctgctaaatcccagggcagaaatgaactcaccagggaggctctgactgagggctgatgtcaccccagagggccgctccatctcaggtctcagagagggccaggcctctggcaaggtctcttgactcccagcacagtgctccctctactgccctaagcagcccgtggttcctggccttgagctacccgtgttatggaggagacaaggaaagaaagtgcctcctctgtctccagaaggaagcttcaggtctctctctgaagcagaagcctagaatcccatgcaagaaggcggagattagcgtgggcttgcggagtcctgaaaaatctgtgcgagagggtcacagaaccaaggagaagatcggcatgaaaaagaaaaaaaatgcatcagttaatggcaggaactggctgactggggagccaggagccggagccccggaaggatgggaagaaggcgagtgaaggag

SEQ ID NO: 2552 - DNA, 586 bp, Canis familiaris
  misc_feature (1)..(586): n = a or c or g or t
acatcatcatttcccccctgaaatcctccacatacacagtagctgcnnntgccagnnnagccacaataagcaagaaatggtttatgcttttcctgcgtactgggaatactcatttgtcagaaaactatccagcatgacctgcaactagagtgctggacttgcggagactgggannngccactggattgtggaattgcaaaggtctgaggccttttgtctaccccaaacaaaaagccttccggatgccccaggcttttaactaagaacacagtccttccgagagctgctaggagagccctgaatgagcaaagaggnnnncagatcctccaggcggagagcctcctgcctgagaacaagcagccgtttgttacaggagggaaaggggcaccgaccatctcacccaggagaggaggggagggtttaatgcagggagctgctgacgtgtctcagcctggccccactgatgcccagcaccccgggtaccccagggcctgggtcccgacagactgccatctccgggggagagggggagcatctggagtggcnnngccttccctccctnnnnnnntgacaaaggtggcgcagt

SEQ ID NO: 2553 - DNA, 481 bp, Canis familiaris
  misc_feature (1)..(481): n = a or c or g or t
aaataggccacaatttactgttttngactagatagggacaagatgaaagtctgcttttttgcttttgaaatcatcttggtgaccagtacatatgggatcagcagtaaggagtctagcaactgttttagtgtttgaaagggacctccttgaattctctaagccccatgtctgtataccatgaagctcatatagagttggagtagaggctcctacattaaatagtaggtatgtctattcagcttttattgatatttataatccagaaatcataaactctcatttctcctatgctcctttctctgggaagtgtgaagaggtgtaagttatgggaagaactttttcttgcacctcttggattatttttctcaaataacaaccagtaagatcccaaagaacttgagaaaaattgttcccttatctgtccactttcattgttaaagattttacttaccattttagtacttcctatgtattttatatg

SEQ ID NO: 2554 - DNA, 613 bp, Canis familiaris
  misc_feature (1)..(613): n = a or c or g or t
agaganntccccctnncatnnatganctggatgatgattctgacagcgctgacgcnacaagtaattaacttctgtgacagcagagctggggaagaagttggggcatcatccagtagctccaaaaagctagggccagggtctttgccagctcttcagctgtggggatctgggatctctgaactttcctagaagctctttcttttttaaaaagtttatttgagagagagtgtgtgtacacacacatgtgagcagggggaggagcagaggaagaggaaaagagaatcctaaagcaggctccctgctgagcgtgaagcctgacatgggctcagtctcaggaccctgctgagatcatgatcaagagtcaattgcttaacccactaagccaaccaggtatcccttttttgaagctctttttaaggatcctcttcatattttttttcttcttcctaggcacctgaggaagaaggtgcctagatgcatcagatggcaggataggagaggaatagactgtttgggctccttcctttctcccatttggctgtaatccttgtgtttaggccactcatcagggctctcttgagtatttgagcatgtgtgtgtacgtggtagagca

SEQ ID NO: 2555 - DNA, 659 bp, Canis familiaris
  misc_feature (1)..(659): n = a or c or g or t
acgggcgtattgtgatagcagctgccaaagaannantcacagctgttggttatgaannaaacccatggctagtttggtactccagataccgtgctnggcgagaaggggttcaggactctgccaaattttatatatcagatttgtnnaaggntactttttcacagtactcaaacgtcgttatttttggtgtgcctcagatgatgctgcggttgaaggagaaacttgcgcttgaacttgaggatgacgccagagtcattgcctgccgattccctttccctggctggaccccagaccatgtcaccggggagggggtagatactgtgtgggcctatgacatcagcactctgagaggcaagaggccccaaggaccagcgcacacccagtcagtcactcaaatgtagacttttatcaagcgtggtttcccaggtgttggccgtcttcgattttatagagacttccatctgtgtcttcagcaaagagtatattattcttcagtatggaatgaaaaactactgttcctttccttaacttttggaagacaaacagaagttaagagcagcaggtagatttaaagtcccatttcacagtgtattcaaaaaagaggtctgacttctttccatgcactcagacacatgaaaatatgaatgagtcataatcac

SEQ ID NO: 2556 - DNA, 410 bp, Canis familiaris
  misc_feature (1)..(410): n = a or c or g or t
gatctgggactatctgnaactagtgaggattnacaccaaacccaaaggccagttgcctgattatacatctcnagtggtgctgncttattccaggactacagtggaggatttctgcatgaagattcataaaaatcttatcaaagaatttaaatacgctttggtttggggtctgtctgtgaaacataatcctcaaaaagtgggtaaagaccatacgttggaggacgaggatgtcattcagattgtgaagaagtgaaaccttctgcccatctgctgggccaaccatagcagcttttcccgtgaccaagcaccctatcccaaaccccttccggctttggcagccagtggatcaggattcaggggagggagatggaggccctcaaactggaannnnncttgtcttatcttggtgt

SEQ ID NO: 2557 - DNA, 529 bp, Canis familiaris
  misc_feature (1)..(529): n = a or c or g or t
atagctattgtgacacctttaaatccgttttgaatgtttttngagcccacaagaaatgatgttttanngttattcccttgctactttactgatacctttatcattcctgggacagtctgctgatttaaaaaatgtagcattccatttgtatttatttttctcccttgccaaaaagattttctaatactgcttgtaccagccagggaaatgctccaaaacactattcagatctcttgcactgaggaacttctattttttctccccttaatgaatcctggctttcatcagccaagcttaccttagtgtggtttggatttgatagctcattagttctgtgctggttgcaaagagttcatatnnagatgatttttaatacccagcagattgtcttcctttatattgtatcttttttatgttgcatgttgctttttggtatcagcctgactctttgcccagtatatgatagttctgctgatgttttattgtttattggtgaacnnnnnntcattaagagtttnnnnnnactcat

SEQ ID NO: 2558 - DNA, 526 bp, Canis familiaris
  misc_feature (1)..(526): n = a or c or g or t
tgtgcagctgttccgggnncagaggggccagagtgacagagccagaggnagaggnngnnnntaagcaaaaacaacaacagcaacacatgcaattgcactctgagacttagattgctaacaggaggagaaggatctggaagccggctttggcttgtagaactggctcccagatccatttcctgtgaagggcaggaggcctctggcagaatgagtatggcagtagtaagggatcctagctgtccccctgggggccctccggccctgttttgtgaggcccaaccccctctatggcggctttgatatgttcatctccaatgggaaggtctgagctgaacagaagaactttcattctcagcccatgtccacaccatgggcagttcttgagagatccatgcgcacccattctgctctctgttctgctctcagttttggctatttgggcttcccggccctggtgcattcagagagggcacggggcatctttgtgagctattctttgtccatccaggaggatagagttttctcc

SEQ ID NO: 2559 - DNA, 555 bp, Canis familiaris
  misc_feature (1)..(555): n = a or c or g or t
gatgttcatgcttactcttgtgaaatgccccagcaggcttnnacccccnnncccacccnnnnagaagctgggggccccaaagctcccagcttcttccttctgagcattcaccgcttctccaaaaggaagctgctgctcagaaaacattcccaaggcacctctccctgaaggggcttctgagctctgctgagatttttctggcagaattgggaaggaaagaaaggcacctctttggcccaactagccctccgttttgcccgtgcctcatgggccctgctctcagaaaacttccctgactgtggtttacctgcagccaggtgtggggcagctaagtgctgcaggtcagcttgaaagccagctgagggcaatctggttcaagtgcagctgccctggtgaggaagggcggggcggcccaccgggcagccttggggctccctcctgccagattgcaagaccaccaccgaggacagcttcccctacaccatgcttttgctttctcctctccaaaacctccctgtctgggccttgtaagggcatctaaccagggctgcagcc

SEQ ID NO: 2560 - DNA, 605 bp, Canis familiaris
  misc_feature (1)..(605): n = a or c or g or t
agataacaggagaataatgaatgannncaaagatttnnnnnnnnnnncaagcccanctgnnnnnttnctcgatgatnnncatttgactcnnncccatnnngaaagagtancatncnnggntgctgaaacnnnnngggcacgnnacactctcgatgaattaaatccacagaaatctnngcaccaaggtgtaaggaaagcaaaatggcatttgggaattagaagtcaaagtcgaccaaatgatatcatggcagaagtttgtagggcaattaaacaactggattatgaatggaaggttgtaaacccttattatttgcgtgttcgaaggaagaatcctgtgacaagcacctactccaaaatgagtctacagttataccaagtggatagtagaacgtacttactggatttccgtagtatcgatgatgaaattactgaagccaaatcagggactgctactccacagagatcgggatcagttagcaactatcgatcttgccaaaggaatgattcagatgctgaggctcaaggaaaatcctcagaagcttctcttacctcatctgtgacctcacttgannnnnntcctgttgatttannnncaagacctggaa

SEQ ID NO: 2561 - DNA, 527 bp, Canis familiaris
  misc_feature (1)..(527): n = a or c or g or t
caattnctaagtgttgggtgnnaagatgaaggggtgtctgtccgggtaggcaagactggggacttcattggcctgggggcttgggttaccaaggattctggttggtcccatctctctcagaggctagcccagcgtgcaggcctactaccactacccttaggaccctatccccagggctagggtgaaccatgccaaaggaaggggccagcctgtctgtgtgtctgtgcacgtgagtctgtgtgtgtgtgtggtctgtctcccagcctgtctatgtcttgctctgccatctgtctctgtcctgctgtctaagtcttatagggagagagcctcagggagttgctgagggggtgctgagcctagcttagagagctgggaccccaccctgcctccatcagtgctttcctctctgtcccttctgcactgagagtgagaggaggggcctccgatgactttctagggtcttaagacctaaggcacattcaatgcaaaaggagcaaggatgggtgggacaactctatcccttgctg

SEQ ID NO: 2562 - DNA, 617 bp, Canis familiaris
  misc_feature (1)..(617): n = a or c or g or t
agaatagagagtnnactcaattagttttggtggagnnnnnaaggnctggcagggtcgagtgcattatttgaaagaagctgtaaagaaggtgattcttgaactgagttttggttaaaaacacatgttcaccaatcagatgataccaggacaagagaaccttaaatcagtgaaaaattaagaaaaggcattggggtcatggcactatacattaagatacatggaattgtctgtatgtttgcaataacatacagagcagctttctgcctgaaattctttttcatttataaataacattgcttatttaatttgtgaataaattcacttggcatgttttatcatctttcatttttaactattctcacttgcttaaacaaaataatggtaaacagaatattgttggaatttattgtttcaatttaaacccaagatttcctctcattaaattgaagtagttgctcaaatttaaatattttgaaatataataccatgttttgtattttttacattctgaaaatttcctttttttaatgtttcatatgaatcaagttaaattttctttatagttactggtaacttgaaaaattgccatctataagtaatcaaatttattttttatt

SEQ ID NO: 2563 - DNA, 562 bp, Canis familiaris
  misc_feature (1)..(562): n = a or c or g or t
gataagtagtacnctgngcaatccagatcactttcaacttttnnnnccaaaaggcgnagtttcaagcaaaaaaagatgtctgattgaggagatttccagtacagagatccaggtagagatgaaggaaccaacctatgaattaaaaattgtggctgaccagaaggagaaacctcagaaaattgaaataaaagttgaattacctggtattaattcagtgtctctctgtgaccttagtgtttctgaggatgatttattgattgaggtctctgagaagtacagattacatctgaatcttccggaatctgtgaatactgaaatgactacagccaaatttatcaaagagaaagctacattaatcatcacaatgccattggtataagtcaagagcatcatctgctttgggttttcagtgctgactaaagtcatgtgaataataggaccttcattatgggtgacattatgggtgaagaagtaatggtttacctgaaacattagtattttctaagagttctttttgatggaatgagattttctcatcaacttatgtttgtctttttttcct

SEQ ID NO: 2564 - DNA, 573 bp, Canis familiaris
  misc_feature (1)..(573): n = a or c or g or t
tgctctnngtctccaggcagttatatcgtatactttgaacgttgtgtaatagnnacccactgctggtgtttatgtgaacatttctataaactcagacccgccccccggcccctgcctccccaccccggagtttcacactatgccactttggggcgagcgcaaggtctagaataggactccccactcaccgcggctctgtatgcttctgcttggttcatcccttccctctccagtaggcacgacgttaggtggaaagcctcgcatggggaacaaacaagagtcccgcttttcaattcccgccgccaccccaccctccccagttcccagattagacttcaagccgatttttccttttccaaagcctctgacaaatgacccagttagaaggaagcaaaaatcccttcatctttgtgcactgttgtgagaccaatgccttcattaaagaatgaaaaaaaaaagaaagtcataatagagaatatttttggcattcctctaatgttgtgtgttgtggtttattatttttttttgtgcggggcgggggagggtgattaattttaattttaaaaattttag

SEQ ID NO: 2565 - DNA, 274 bp, Canis familiaris
  misc_feature (1)..(274): n = a or c or g or t
gggtcctggagggctcaagggnnagtgtncacnnnncagaacncgcntgnnagcagctcatctccaagaagccagccagagtggnnnctgccaccctgctcctcctccaactcggggctggtttgggggtactgctccagggccctgtttgctggctgtcacaccccaacttgggccagcagacaccagcggatgagcctctttgtgcgagtccctgccagagactacctgccactgctcccccacccccacccccgccctcctttgtcagagt

SEQ ID NO: 2566 - DNA, 238 bp, Canis familiaris
  misc_feature (1)..(238): n = a or c or g or t
ttcctctactctgcgcacctgccagagcgnnnggnnnctnnacgctnngactacatcggtcacagtcaccagctattccatgtgtgtgtgatcctnnnnacttacatgcagannnnnnccatacttctnnacaagactctgannnaggattggctcctggtcaactcccggcnnctgtctttccctcagnnngctnnagccatacttctgtgcctcatcttcagcctcagcaacataa

SEQ ID NO: 2567 - DNA, 572 bp, Canis familiaris
  misc_feature (1)..(572): n = a or c or g or t
ccctgcatgtcgctctcaaagccttgcactctagaggtgatggtggccctaaacccttgaaggggctgggctcccaccccgacctacagctgctgctccggagtagncggccagaggaagatgacaatgaggaggaggaggaggaggagtactttgtggcccaagggcagcagtgaccagccggagaccagctgggaaccaggctgctcccaagcctcacacctcacaccagcttagggacccaggtggctcttcacaacagctggggagcagtgggccaggattctcctgggctgggccttggggagcacgtgaacacacagccaggcttggtcagggagctgatggaacagaggggctgggcaccagaccagagcagggcccaggccatgctggaatcacagcgagacaagggaacgggctggtctcagctgcttgccaggctctgccagccaaggtgatttcctagggcagagcaggagagcaggtttctaaggggtctgggtttagactgcagcgcagttgggaaggggagatggagaggctggagcctcatcacctggagagcgtct

SEQ ID NO: 2568 - DNA, 611 bp, Canis familiaris
  misc_feature (1)..(602): n = a or c or g or t
cagagaggnnnccatccggaccccaganngtaggatnnagagattgaaactgagagnnnnggcccagaaggcctttgcccccacccaagggggaaaggcaggggcgtccgaagacctcccccacccgcagcgacgcacaaacagccttgccttggcttatgacctttcgcagttgcgatggatgtttacaggaacccagccagagtctgcctccccgctcttcacccccgactgcacctgcttctcccacttaatcttcggagaggatacttcaaactgcggacacgcgcacagaggccactcccagctccatctgctgccagtggagcccgaagcccggcccgctttggcccgaggctggccctagatgcaaggattgtttcagggagttaaatcagaaggagaagaagccgcannnnnngtcggnnngaagggtcgtgtcgggctgaagggtcgggcttgacttatccatttcaagttcctcgttcttcaccaagttgccagaactgatacatcacgccgagggggagtgccacgttgctcctccagccggaaacattttttgaaaatgtgagtggtgtggatacttgatggtgatannncttgtaaaa

SEQ ID NO: 2569 - DNA, 198 bp, Canis familiaris
ctagattcctttcttacttcctctgaaactatcccttcaaaattgaccagtcttaaaagattgtctgcatttactggggccagttcctccagcattgctaagttacctgacacatcatcccatgccacccagaggagcttgcctaaagcactagtagaagccatttcacagcgtcacattgatgagctaccaccacca

SEQ ID NO: 2570 - DNA, 649 bp, Canis familiaris
  misc_feature (1)..(649): n = a or c or g or t
tcccctcccctgtcnctgctcgtgctgcacaggctgctgtgtgaccactacagggtnntgtccaccgtccacacacactctgcagtcaaaagcgtgccagaaaannnnntcaagtgctttggcgagcagactaaaaaccagccccgtcacgaatatcagctgggttttactctgatttggaagaatgtaccgaagactcagatgaagttcagcgtccaaacaatgtgtcccatcgaaggagaagggaacattgcacgttttttgttctctctgtttggccagaagcagaatgctgtaaatttgaccctcatagatagctgggtagatatagctatctttcagctgaaagagggaagcagtaaagaaaaagctgctgtgttccgctccatgaactctgctcttgggaagagcccctggcttgttgggaatgaactcactgtggcagatgttgtgttatggtctgtgctccagcagacgggaagctgcaatgtgacagtgccagccaatgtgcagaagtggatgagggcatgtgagaacctggcccctttcaacactgccctcaagctccttaagtgaagtttaataactgtaaaaggttgacttcaagaatggtgctgtttcacgtgtattgtgggtaaaggaacttgta

SEQ ID NO: 2571 - DNA, 691 bp, Canis familiaris
  misc_feature (1)..(691): n = a or c or g or t
atccagctcccnnagncagtcnncagcagtcaccccatcctccaccannncntctacccgagccaccccagcccnnnctgctccagcagctgcctcggtgaccagcccgagccccgcacccagttcaggtaatggaaccagcacggcggccagcccaacccagcccatccagctgagcgaccttcagagcattctagctactatgaacgtgccggccgggcctggaggcggccagcaagttgacctggccagtgttctgacgcccgagatcatggcacctatccttgccaacgcggacgtccaggagcgcctgctgccctacctgccctctggggagtcactgccgcagacagcagaggagatccagaacactctgacctcgccccagttccagcaggccctgggcatgttcagcgcagcgttggcctcggggcagctgggccccctcatgtgccagtttgggctgcctgcagaggccgtggaggcggccaacaagggcgatgtggaagcatttgccaaagctatgcagaacagtgccagatccgagcaggagggtgacgggaaggacaaaaaggacgaagaggaagacatgagcttagattaattgtctgctgtccccaaggggttgggattcgcggctggcgacctcagtgatggggctggtggcgcacgccctcacctccattccagc

SEQ ID NO: 2572 - DNA, 576 bp, Canis familiaris
  misc_feature (1)..(576): n = a or c or g or t
tggannggtcagagtgtgagnnntagcacaggcaaagggactagcatnnnnaggtcagagtgtgagaagtagcacaggcaaagggactagcatgtgcatcagagacagcagttgacacattcgggatttgttcatttttaatggctgtgtaacaaattaccccaaaacttagaggcttcacacaacaaatgtttatgacttccttgtttctgtgggtcaggaattcaggagcagcttaagtgagtgcttctggctcaggagctctcaggaggttgtgggcaagacgtcagccagaattgcctcatctgcaagctcgatgagctggaggagccacgtccaggtggctcgccacagggctgttggcaggaagccccagttccttgctgactattggtaggaggcctgggttttttgctgtgtagactcttgagtgtccttataacatggcagcaggttttccctaaagcaggcagtccaaaagagagtgggagagaaactgcaatgcctctggggactgagtctgagagattatgcatcatcttttctgtcctattctgtttgttagaaggnnnnnca

SEQ ID NO: 2573 - DNA, 626 bp, Canis familiaris
  misc_feature (1)..(626): n = a or c or g or t
gcagacacagaannagctacanctgagtcaggagcgtttgggnatanngtcttatcatcctgctgcaaacacgtttcctgctccattactgcatgtgcaccagaaagggaagaggagtgtggagcgtggcccggagggacgggttcccagcacgcaggatctgatgcgcggagcctctgcccaggagctcctggcccagtgcctgtcccggagtctgctgctggagaaggaggagagcaagaggtttgacgatcagcttcagcagtggttgtctgcagactcgggagcatttatggattcgatgtcccttcctctctaccttcctcagactctggtgtctctgcctcagagtattgaccctgtgatgaagacagtgacccctgctagccctcagaacaaaaggagaggagagcagctgcagttgtcagaggcaacaggcacttctgtaagcgaacggctgaagcacttggagaggctgatgcagagttcaagggaggaggaagttgcctctgagctgcatctctctgcactgctggacatggtggacatctgagctgccagacctgagagcgggaaggtctccaaaagatgtctgcttttactcacaatgatgttattcagatgct

SEQ ID NO: 2574 - DNA, 633 bp, Canis familiaris
  misc_feature (1)..(633): n = a or c or g or t
tgaggcaaaagaaacattnnaantcactgcacattccaaaagccttgcagaaggcnntgccatttaagaacnngnnnaagacgcnngcaaaggcaggcaagataccgaaggacaggcnnagaccagctgtcataagggaacctcatgagaggaagatccttgcactgttggatgctctgagtacagtgcacagtcagaagatgaagaaggccaaggagcaacgacatttgcacaataaagaacactacaaagtgaagcagaaggaggaagaagagaaactgaagcgacagaaggacctcaggaagaagctcttccgaattcagggtcagaaagaaaggaaaaatcaaaagtccagcctgaaggggtctgaggagctatcaaaatgagcttcggacagatactgtcatttggatctgcagagaaggatggtttcaaatatgacagtatttgtaaactggcagcagggcactagagcccaagaaagacctttgttggatttgttgcctagactgtgccttggagaagataaatggaaactctactgatagaacagctattcattctcagcctctaggttatgtcaagatttaaagnnnnattatttatgcttnnnnngattccttcacattcctc

SEQ ID NO: 2575 - DNA, 569 bp, Canis familiaris
  misc_feature (1)..(569): n = a or c or g or t
tangaagatctanngcattggccgggggctgcacatggaagaggggaaggtggtcaagaacaacgcggccaccagctacgacgtgaccgacaagtccattacacctctgggcggcttcccccactacggcgaagtcaacaacgacttcgttatgctgaagggttgcatcgcgggcaccaaaaagcgggtcatcaccctgaggaagtccctcctggtgcaccacagccgccgggccctggagaatatcgagctcaagttcatcgacaccacctccaagtttggccacggccgcttccagacagcccaagagaagagggccttcatgggtccgcagaagaagcatctggagaaggaaaagccggagacctcgagagacctgtaggcggcctgcgatggagggagccggaagcagcgcggcgcctgtcgcgtctgtctaataaagtgcagaggccggcagcccagggggcccagcggtttagcgccgcctgcagcccgggcgtgatcctggagacccggtatctaggcccacgtcgggctccctgcctggagcctgcttctccctttgccag

SEQ ID NO: 2576 - DNA, 395 bp, Canis familiaris
  misc_feature (1)..(395): n = a or c or g or t
ctcacctgggagagagagaacaagctctcctgtgtccccttcccaagggctccaccctcatgacctaatcatttcccaaaagcctgtgtgctaaaactgtgatgcataatataggccactggtgtcagccttctgtgaccatctcaagtgacctcaaggagaaataaaaagcaagnnnnnnnngaaagccagttaggctgaggtatgaaagcaatatttnnnnaaaannngatacggaaacatgatgtgttaaggtgacctaagtctttcttgtgtccacgtggaaattggtaaacctgaatttttataaccttagcagattatgccttgtgacgtgcaagtatttggagagctgcttgccagtgggaagctctttacccttctgtatatatgtg

SEQ ID NO: 2577 - DNA, 363 bp, Canis familiaris
  misc_feature (1)..(363): n = a or c or g or t
gcaaaaccaaaggagtacccctgagatggaaagacagagagctgtgnnncatcnnnctactagacttgttcaaactgctcgaaattctcaattggatccagacagtttacgaatgtatttaagtaatctcaaaaagaagtatgaaacagatttttccagggctgaacaagtttcacgaaagactgaagaatgacaattcacattatgtaataatgaaataatatatctcaatatggggaagctagaattcatttttcctaagagcaaaagaaaatacttgctaaattttatatcttaatggaaaattacattatattaacctcataattatctatatattgtgtataagaaaatatttgttat

SEQ ID NO: 2578 - DNA, 672 bp, Canis familiaris
  misc_feature (1)..(672): n = a or c or g or t
tcagcccttcccatgnnntgtccatcttcagatactgtgccccagccgcctacaccgccagccgcttcccccgatacctctataagaagatgcgatggaacctggaaaccaccccagagcccagtggcagggggcaagattcccatgtggattactacttcctgtgctatcgagatacatgggaagacacaggcaagagcccggccaattcgtgcccccagatccagaagctgtggtccattggccgctgggtgccgctgggacctgcggaggatgacctttattcatggattttgtgcccgcagccgccgggagactaccagcagctgctgaccatcggcttcgaggagccctcgcacatgctggccaccgacctgctggtgcagattctcaccggccaggcaggcccggcccggcccccgagcgcggccgggcccgcggcgtgggccgcgcaggggtcttgagcctggagagaggatgggagctggagcttgacagttccaaactccaggagagggagcaggggaggggctcactcgttctcccagggcacctcggcctcgccttccaaagggccgggccgagctggccagtccgcgccgggtccggcccggccgcggagcactgcgcgtggacacaccagttttgcgttaaataaaagaaagaaagagn

SEQ ID NO: 2579 - DNA, 721 bp, Canis familiaris
  misc_feature (1)..(721): n = a or c or g or t
cagagggatttgtggtgagcaaaaatcaaagcaaaggtgtgctatgaatgnnagagactgattctnnnnnccactgtaacagnncttggaacctgggtcctctcactggcatatacactactccttgctgcagggcactgttctatttggactacctggatccagttgtgacgtttttatggaaagttgaaggcttctcttagttctactggattctcagggagccctctgtggccttttgctttgagtgctgtgtttcccttttaccagagggcagcactgcataaattcctgtttttccccatagcatgttctgttggattgcatttactggcaaagaaaggacagatcacatactgggcagaagtcaccattcaaggctaaggtgggcttccagttgccttaatagaagtactcaagtctcttgggtaatgagctggaatgcccacagaagaggggttcctgttttcatttgaaaactttatgattaagagaacctttaaaaactgatttcaagtaagtttttggtgcccattaaaatggtggctgtggttcactactttcctagatggatgagactcttactattataacttaacgtgttcctttgccccctagctgaggccatccttccccagagggatggcattgggatcaaaagataggactctggcttctgtgtagtgtaaatgtaaacacctgtttcaagcaactttaatgt

SEQ ID NO: 2580 - DNA, 510 bp, Canis familiaris
  misc_feature (1)..(510): n = a or c or g or t
atgctgccaaatctcaaaaatcagataccccctttcaccnntgagctgtttttaagtagaaaatnnnaaggatctacnnnaagatnnngntggtcagcataagccgattctgttactcttaggtgtatattagccacttagccatccctgcactctttttccaggaaaccagttactgacttcctcactacttgcagtagcctgtctgccccaacttcttgatccaacgcttaagtgaaactcttctctctgccttgacctgaggaagaccatctaattggttgtgttactttgtatgtaccctgtgcttaattgctagaannnnnnaaaccagtacatgggagggaggaggaatgcctcggtcactctgggggcagtttagatgctgtgaaattaaacctgttctaagtgtacttgtttgaattaattgtattgtaatattatttgttgaatgtagtaattaggtatttatgaatatattgctgtaatnnctgacaacatccaaaaann

SEQ ID NO: 2581 - DNA, 636 bp, Canis familiaris
  misc_feature (1)..(636): n = a or c or g or t
gcttttctctcttttcttttttgaatgtgcnnaaaacattttcctatacttccatgttaccagtgaccctgaaagtttggtttgagttaatgttcctttgctccttttgttttaaggagctgtgttgttgttgttttagcccaagatcatcactgttcatttacagtcaatcaaataagactaaaaggcaatttttttaatcatgaagagtatatcagtattagtctagtttattcttcacttctcattttttctcactgatcattattttttttagtgcaggagacaaaaatatctgttaccttaattttgcattttatttctgtaactcattgaagtttccttttaaataagaaaaccaatataatctcatgtatgagcttaaagaagtagatttttagaaattatgtatggcataattctaaaataagaatttctgtatgtttccatatgctcttttcttatgtctcttattatattttattttctcttgtgctttatcattattgaaatatgtcagatgtccatttgttgcttgtactatgctgagaatgtacaaataaagttgaacagatacatgtctcatcctttaggaattttgcagttcagtacgaatnnngagacaaatataaagat

SEQ ID NO: 2582 - DNA, 595 bp, Canis familiaris
  misc_feature (1)..(595): n = a or c or g or t
tgacatctgagccctcgcgnncagagcnnnnngtctncnnngccaccctggaccgctccctgctcaagacctacgagcaggtgctggagaacctcgagtctaagaggttccagctggtggattcacggtcccaaggacggtacctgggcactgagccagagccagatgcagtaggactggactccggccacatccgaggctcagtcaacatgccgttcatggacttcttgaccgaggacggcttcgagaagagcctggaggagctgcgtgctatgttcgaggccaagaaggtgaacctagcgcagcccctcatcgccacgtgccggaagggggtcaccgcctgccacgtcgccctggccgcctacctctgcggcaagcccgacgtggccgtctacgatggctcctggttcgagtggttccaccgggcacccccggagacccgtgtgtcccagtggaagcgcgagaaggcctgagcagggtccttgtcgccggctggcagctcccatctgtttagtgaccgcagcctgacatgcagctcgtatctctttagcaaaggagactgaccaggttttaaaattgctgtgtaaagccctcc

SEQ ID NO: 2583 - DNA, 675 bp, Canis familiaris
  misc_feature (1)..(675): n = a or c or g or t
gaatccagatatggntgctnnagaaaaaaggaaatttgtcatgaaacctcnacaggttgtnngagtaggnncaaagaaaacttcttttgtcaactttacagatatctgtaaactattacatcgtcagcccaaacatcttcttgcatttttattggctgaattgggtacaagtggttctatagatggtaataatcaacttgtaatcaaaggaagattccaacagaaacagatagaaaatgttttgagaagatatatcaaggaatacgttacctgtcatacgtgccgatcaccggacacaatcctgcaaaaggacacccgactctatttcttacagtgcgaaacttgtcattctcgatgctctgttgccagcatcaaaaccggcttccaggctgtcacaggcaagcgagcacagctccgtgccaaagctaactaattggctaaccaccactgattttgcaaagtgtgttgtggagatttggctggacaggtttaccatcagagtggatataccactgtattaaaaacaagatagaaaagctgccaggttctttggcgtgtggctggttggtctgaaatccttgcaagatgctgatgctcaagctgttgacatactcattgcctactttaacaactgtcagaaaaacatgatggggtaaggcggtgcttttttaaaat

SEQ ID NO: 2584 - DNA, 591 bp, Canis familiaris
  misc_feature (1)..(591): n = a or c or g or t
aaaacgtaaaattcatcctgatcagaaatatattaatgcttatgttgtgtttaannatgagagctctgctacaaaagccttgaaaagaaacggtgcccaaattgcagatggatttcgtattagagttgatcttgcatctgagacttcatctagggacaagagatcagtgtttgtgggaaatctcccgtacaaagttgaagaatctgcggttgaggaacactttttggattgtgggagtatcgtggcagtaaggattgtgagagaccgagttactggagttggcagaggattcggttacgtactctttgagaatacagatgctgttcatcttgctctgaaattaaataattctgaactgatgggaagaaaactgagagtcatgcgttctgttaataaagaaaaattaaaaccaaannnaaatcccagtttgaagaatgttggtaaacctaaggagggacttaattccgcttcaaaaaatgtaggactgtgtaaaaatttgtttattggagaaaaagctgttctcattaagaagaagaagaagaaaggacaaaagaaaagtggacacactaagaaacagaaaaaacagaagta

SEQ ID NO: 2585 - DNA, 635 bp, Canis familiaris
  misc_feature (1)..(635): n = a or c or g or t
atgataatcatgagtttgagcccagaagtgatcctngtgatcttcttctctaaatcccccaaacnnnngattaaannnnntggtttcagctcttcatggnnntcagtgaaannnctgagcagagtgttcctaacaaggcttcatcacacctcccaaatcctctggatggcatcctctgaatagtcctctctggtaggaaaaacctcaaatgcacatattaaaaatcaggagagtgctgaaatgaaccatttctctgttttccggggccttggacagctgcaacattgccctgaggaagtagctgggtccattctgggtcctggaacgtggtgttggcacttcagcccagggtgtgtagcaggaaagccttcccaggaagcagttttcctttgaaaataattctaaaaggacagcttcaaaatcaactgtagagagtagtgagcacaggattgtctatttatggtgtgattggaggtactggctagaggtttcagtgggataatttacatgtccgtcgtttggcttttgcttctacagacactgctttgtacatgattcagactgtgaatccatcttttttaaatacctttcaaattcttggtaagatataattttgatagatgattgcagatttt

SEQ ID NO: 2586 - DNA, 529 bp, Canis familiaris
  misc_feature (1)..(529): n = a or c or g or t
cagttaaataaaaatcaaggagaatatgaaacagaggttaattatgaagaggacattaaaacagaggttccagaaacagatggactaaatagcaaagagcagtcagcaagtggagttaaaaaaaatttacctcaaaatttactcaatatatttaatcagatagctgcatttgagaaagaaaaaggaaataagccaaaaaattaatacgttggagaatccgcaccattacaaaaaaggccattaactgaaagtttgggtcttctagtccagtgcagaatctctgctcctaaagctatattatttgtagagattgcagaaagcagatgctttttagctattctcaaagtatatttgtttcaatcatgggtctcctaacagcttgatttttttttttttttaggcttttcatgtgtatgtttctgtatagtatttcttactgtgatgatctaaacttcacctaaaaataattctcaaagtattgcttcctcactgtattatagtgtatgagaatcccttgggtcnactttat

SEQ ID NO: 2587 - DNA, 572 bp, Canis familiaris
  misc_feature (1)..(572): n = a or c or g or t
aaaaattccatgattctnnngcagtaaaatagtagaaataaatactatataagaaaactnanctattngaaaacatggctatatcagaagggtttattatgtagagctcttccatgtgacagaattgtaaggagtagaaagatagcttgctccgaggcagttagaaaaagtaaagtactttgatggtctgtattcatatatagactaaatcagggtaaaaccaaggttaataaaagttaagggtaacttaacagatagcatttctaagatattttgattattaggtcagttggtggttttcagtagctaaaagacatttctcatgttttgaaactatgaatatggagaaaaggcttaataccagtgtttgcatgtgacatgcactgtatgttttgacctctcagataatggtttcatctatagatgaaaagttgtgaattatttcaataattggagtttttgctttttgagaggtcttacaaatgtaactaggacccactgttttgagggaactattgctattatatcaggtccttaatacaatttaaatttggacagatttattctagtta

SEQ ID NO: 2588 - DNA, 584 bp, Canis familiaris
  misc_feature (1)..(584): n = a or c or g or t
ctgncnctgggagaggctgaanncagggagtccagtnnnnnngctggtaccgtggtagcccagatnncggtgggaccccccgactgccctgtgggagggnngctgaccttcccgggccggggttccggggctggggtgggggcagccctggccccactgcctccacccaagatgcccccgccaaccatcctgagcgccgtccctcggcagatgttcagcgacgcgggcagcggggacgatgccctggatggggacgatgacctggtgatcgacatcccggagtgacccgcccccctgtggctgagcccctgcccctcgcccgatgccagcacacacaagccccccagcttccgcagagacgtttattgacgcccagttgccatgccgcggccactgacacaatcagaaaaggcgtaaacatgcacgaatgtcccctggaaggtgggtccccactggggaggggggccctcccatctgggccccatccaggggacagttagttaaatgagtggccaggagcatctgccgcctctcagagaggcggagaccgcatagtggtccccccattcaaaagggcagctgta

SEQ ID NO: 2589 - DNA, 708 bp, Canis familiaris
  misc_feature (1)..(708): n = a or c or g or t
ccactgaactacaggancagccctgtgctacatccttttcccttgttatataatttgttaccataactatttcacaaatgaagacacccaggctcacagaaagtgcaaggctttatgcaaagnnnctcagctggaggcagtgggataatccaggattcagggatggagatccaatgttctttccacaatatggggcccggcctttctccacttcctgcccctgcttgtggcctaagctctggaatcagcatcttggagaagttgcaggaaccacctgctgctatggggcaaaaaaagaagaaaagaaaagaaaagaaaagaaaagaaaagaaaagaaaagaaaagaaaagaaaagaaaagaaaagaaaagaaaaaagaaaagaaaagaaaagaaaggaaaagaaaccaagagaaagacagatggaattttgtggatgagttcaaatttcagctctcatgaagtccactcatgacctcaaggaggttgctttactctcccggaacctcacatctttcttctgaaaatggacatcaccgtgtggcgagcctttggggggaacaaagtccatgagtttccagaacttagtgaacagtcaacacaagtgagcagtgccttgctcccaaagaatgctgctaagggtccctgccaagattccacttggggagacaagtgagacaagacaacgcctagacgccaaggaattgcca

SEQ ID NO: 2590 - DNA, 555 bp, Canis familiaris
  misc_feature (1)..(555): n = a or c or g or t
gatccaagaagttannacntcagtatcaaagtcagtatgcagcacatgaagttttccataaaacaaacaagggtgtaatatgaaagctgcttttttaaaagagtaaaagcacattccatgtacgtaaatgaatttaaaataagttgaggcaaacagttaagaggttttatttttagaacagcaagttacctgtaaatattttaatgttagtttgctcatctatgatctgagatcatgctgaagtgaggaaatacgtcccccaaacaacaacttaatgcattgggaaaaaaactaaaaacagtaattctggctacaatcttcagatcacccttgtaatgtgttatgggtccatttttcctggaatagcttaacctgaagcagtttcccctgttttggagattttgtagttaattttaattttggctattgtttggaaaagatgggctgtctgtgtagatatgaagtatagtttttccataaaacagatgtttattttgtattaaaaataccactgtacttgttttacaccatttgtatacatgtggtgatattaat

SEQ ID NO: 2591 - DNA, 609 bp, Canis familiaris
  misc_feature (1)..(609): n = a or c or g or t
cagccgacctgtttactaagttttttgcatctttgggttgatgcctgatcgagcttacggttcaggtnnagaactgagcttgnctgaagtaggaggtaaaccccggtatgtnnnacggactcactcagctccgctgctgtgtttaaaatacacattttaaatccctatttacagacactaaagtaaaataaaaaatacggctttctgggttgtaaacatgtggtagtactggagtgttgtatagtccatgttaaataaaagccaaaactggaatgtgcagaaaataggatctggttaatttgtggactcatctttatttttgtctttgtttaacttttttaaaaacgagattcctggagtaggtcggtatattctgttaaagagtcacagtgacccattttgcttcttaccctgttgcttcacaagggacctgcccggggaccatgacctgctgctgtgttcacggccgccgccccaccgggacgccaggtagcaatcacagccgaggacggcgctcgttgaggtgcaatatccgactcccaaagttagtcacggtgggtcttcgttgttcttnnnacaggatctatccannnnnnngtactcttcatt

SEQ ID NO: 2592 - DNA, 668 bp, Canis familiaris
  misc_feature (1)..(668): n = a or c or g or t
aggtagcacagactnnnatgccatcagaataccagaacatgactgtggatnnnntctgcaatgattgtaatannagatctacagtccagttccatatattaggcatgaaatgtaatatttgtgaatcctacaatactgctcaagctaaaagaatttcactagatcagcaatgaccaacgtatactgcactggaaaactcagcattttctgatctagaaaaaggctgtctttagtattcagttgttataatgtgtcagaatctatgcattagagtcgatgtgttttgtactagtgtcacagcataaaatcatattacacatacttaaggattcagggtctcgttatagaatatcatagctttatgttggatgaaagccactgtgcttgtttattgattggaaactctcttagtgtcagttgtttggaagccaatgatgtttgccactgaaattcacatccatagaagtatattctgcttccatggaactttgctttaagtgacactatgcacaaagagttcatttctagttcttgatagaactgcacttatttctcagtattattcttgactttttaagggctgtgctataatgagaatatgttctgtcttactgttgaaatcttatgatatatactttagaatttnnnnagacagccctttggatcct

SEQ ID NO: 2593 - DNA, 539 bp, Canis familiaris
  misc_feature (1)..(539): n = a or c or g or t
gggttgcttgtnnaatcacannnantggtagaagagagtgctgttcaannnnnagannnnnctcttgnnttaaatatagnnnnntttattaatcagtttcaggtaccnatacgtgtatttttggatctatcctcattgtcctgtgtacctttaagcaagccagtggancnnntaannnnagatttaatgactcngtatttgaacacctnnnncagagaagtaaaggtgcacatttgtaaatnnngacaagtganngccattcccttttggtatcatatgtaccttgannacgagattaggttggatacttcaagtgaagcctcccactggaaacnngctgcagttgttttagataatnncnnncaggtggaaatgggagaggaattagtactcaatgtccagnnccacaaaagcaatgtcagcatcnnnnnnnnnnnatgnnaagtatttnnnnnntgaaaaactgtccaagtagagcagcaagtacacantnnnggnnnnnattagtagtgnncttgtaatcataannnnnnngtata

SEQ ID NO: 2594 - DNA, 603 bp, Canis familiaris
  misc_feature (1)..(603): n = a or c or g or t
gaaatccgaaactaatgattttgttnngtttgaatcctcagaaaatcaaagaaaaattacaatggnnannagaaagtggctgatcattgtactctttggttttctcattttaatttttaaagactacttcacaaggtgcattttctgcagaagctaacatgacacatcttaggaatcttatgttggtgggaatctgattctggttcctttttagaaatgagttggggagcatacaggcacagaaggatagatatttgaaatctttggttctgaagtttttttaatgacccccgactcattgtttactgccttttgtcatggagaccttaaaataatttcccttagaaatagaattacttcattactgcttctacagccaatttagtttactgtttttagtaattcattcatcttcgggaattgagatttcacattgtctcattttaattttttaagcccttttatcatctctgaaatctttctgttctgcttggttctggttgtacttggaatcaaattgattatttgtgatcatgcctgaaacagcttggccttggagaggtgggccttctattttcagcctaacagtgtctcattgcacat

SEQ ID NO: 2595 - DNA, 660 bp, Canis familiaris
  misc_feature (1)..(660): n = a or c or g or t
cccnancagcagcacatnnntgctttttactgggtcatcgactgggaaggaatgatctccgtgtccagccttgtggngctgcttgagaaacacttcttccccangtggcttcaggtactttgctcttggcntagtaacagcccaaattatgaggagatcaccaagtggtacctgggttggaagtccatgttctcagaccaagtgctggcacacccatctgtcaaggacaaatttaacgaagcacttgatatcatgaacagggcagtgtcctccaatgttggtgcctacatgcagcccggagcacgggagaacatagcctacctcacccacacagagaggaggaaagacttccagtatgaggccatgcaagagcgacgggaggctgagaacatggcccagaggggcattggtgtggccgccagctctgtgcccatgaactttaaggatctcattgagaccaaggccgaggagcacaacatcgttttcatgccggtcatcgggaagcgacatgaagggaagcagctttacacctttggccgcatcgtcatctacatcgaccggggagtcgtgtttgtccagggcgagaagacctgggtgcccacctccctgcaaagcctgattgacatggccaagtagagagggcaggctgcagcaggctgg

SEQ ID NO: 2596 - DNA, 489 bp, Canis familiaris
ccccacccagcccagggccccttggaaggagctgtgcagacaccgggcgacacttccatggtggcaatctgggcaaggtggagactccactcctctgaccgctctctactgacaggggtcccgagtactcaacgtttgtcgggcatactagtttttttttttttttaaagcaaaccatcataaccagcaagcatttgttagtggttctgctgtctcatcctgacctgatatgtcactgacttaaggcttctgttggcaccgtgtatatttatttgcagaattggcgtccatccttgctgctacacagtgtcccgtggtcctggcgtccccatgcgtccctgtgcttcctggctatagcagcatggccaggacacctgctgcataaaggcgtgtgtggcataacgtctctcttttcccatccgtggctaacttgttgcacttagctggtgcagggtggggagttcaggggttttttttgtgtgtgtgtag

SEQ ID NO: 2597 - DNA, 663 bp, Canis familiaris
  misc_feature (1)..(663): n = a or c or g or t
ctacacctgccaagggcatgacnnccncctatgcaacatcttctctggctttccttccccctttcctggggggcttannnggtacagactgtggggacaccatggcccatggcccattggggtngagctttactttccctgtggcgatggcagagtgggaaaggcagannaggccagggaaggggtggcttgggccagagggaatggctgcccactaggtttccctgggcagcggtggccacctgcctgccagcacgaaacctgcctggcccctgagtctgtgctccttgggggcctggcagttggagcacctctctttttgaatggacatctgtgaggtacaggtggtgagctgtggccgcaggccccggttctccgccagctggcacctggatgtcgtgctcttgtgtgaaggcagcccagccacttcacgactccaaggagggagggactccgctccttctctctcaggtccattcctgacacagaacctgagctaggaggaggggacagggcgaggggggggggctattattatttttgcctgtattgactgtgtctgcctaggtcttaacacagacggcctcaccttccacacatgcacagacttagagagaaaccaattctttggtctattttnnnggtagctttattgattgccag

SEQ ID NO: 2598 - DNA, 608 bp, Canis familiaris
  misc_feature (1)..(608): n = a or c or g or t
caccctgcaccacttccaacctcacaagccccgtnnnngctgcgggnnnaggccaaaccccatccagctctgannagggcccctcccgacccagcctgacatctggaaccacccctgcagagatgtaccccccagtcaggttcagctccgagagcactcgttcctatcggcggggtgggctggagcctggaagatcgtccctcaaccaggcagcctctgcccagaaggagcatgctggagccttccagtcttggggaaggaaagagctaagaacggaggaaggagaaaataagaacaggagggcagggactgaaggttctgcttcccagtcccagaagtgtcaccgtgactttcagccccatatttgaaagcagatacagctacgccatcatcagtctctaacacagttgtatgggcaccgggcgctgggccctggcagggatgggccaggccaaacaggagaggccagcgggtgccaatggccaacgaagcagtctggccctggaggctgggctgtttaccctggagacctgactggtctgggatcccacaggagcagggctgtctgctgggccctccagtgtctggttttgctcatctcagacttg

SEQ ID NO: 2599 - DNA, 528 bp, Canis familiaris
  misc_feature (1)..(528): n = a or c or g or t
cacggaccctgccaagggccacaggtcccngagcagcgacagctggacgtgcgcagacgcctcggccgagaagaggagctcggacagctgggatgtgtggggctcgggctccgcgtccaacaataagaacagcgaccacagcgacctcggggaggcatgggggggcggcggggagggcagagccaagaccgccaagaaggctgcgccgccggccgtgccggttgacgagggctgggacaaccaggactggtaggcgcgccgcgccccggtgccagcagcggcccgtgtgtgcactctgccctcacgcctccttgtgtgaccccagaaaccagccgtggcgccaagacagcacctcgggtgggcgcgggggtggtgctgctggctcgcgtgggcgcccgccctgcaaggccacgtgctgcccacggtccgggtcccggctctcccgtggctcccgggcagcccgcagaaatctggccggggcgacgcggagggcagggtctgcccccgcgggaggcgggccgcaccatc

SEQ ID NO: 2600 - DNA, 554 bp, Canis familiaris
  misc_feature (1)..(554): n = a or c or g or t
attctcaagacctnnaancagctattattaaaaaaagctgcctgttttctctctctgattgcattaacttgcacactgnnnacaatatgtggtatttagaatgccttcctaattctttttgagcagccattgcctatattttctgagcttctccctggtttccttgcatgagctcatctgacaaggaaatgcagctattttgtttgtcctctctccatactggaccatttatgtcagtgttctaattcatcctgatggtctctgagatacacagactattccacaagactcaatagttactcttaagaaatttttagatagaattggtccctgttaggaggagactctcggtgtcacttttgttatcttgaaagctggtcccttccctgaggctcttaattttttgaaaacttgatgctgtttcaactgaaaaattggcaagaatactaaaaaaaacaagttgaggggagctgtttaagaaattgaaaagtaattgcaaacaacattggataattgtgactttcagttgttctgtatcagttaaatttttgtgc

SEQ ID NO: 2601 - DNA, 552 bp, Canis familiaris
  misc_feature (1)..(552): n = a or c or g or t
cccaccaaggctgtgacttcnnggctgacagaccagattgcccctgcatactnnaggcccaactcccagatcctgagctgtaacaaatgcgctacatcctttaaagataacgacaccaagcatcactgccgggcctgcggggagggcttctgtgacagctgttcatccaagacccggccagtgcccgagcgtggctggggccctgcgcccgtgagggtgtgtgacaactgctatgaagccaggaatgtccagttagacgtgaccgaggcccaggctgatgatgaaggcgggacgctgatcgctcggaaggtgggagaggctgtgcagagcactttgggagccgtggtgacagccattgacataccactagggctggtgaaggatgcggccaggccggcgtactgggtgcccgaccacgagatcctgcactgccacaactgccggaaggagttcagcatcaagctttccaagcaccactgccgggcctgcggacagggcttctgtgacgagtgctcccatnaccgtcgggccgtcccctcccgaggctgggac

SEQ ID NO: 2602 - DNA, 561 bp, Canis familiaris
cagctaatggcgcataacgtagggtacagaatagagcgtgtgctgttgataatctctccccactccggcccctcctcacctgccctgccactctgcatgatcttatttcaacctggtcgtacgctccccacgtgtgaagtttagtggcgcccatttccagtctctgcattcgtctgacagagttatttattggcccaagatgaaaagtcacgccatccgccaggccttatggggcctctgcagcccgtccttggggacacatcccctgtgtgaaatgtattatcaccagcagacactgccgggactcctcctcccaggggcatcttagctgcttcctcccgtcccagcacccactgctgtctggcgtcccgaggatcccatcaggacgtgtccatgccactgagtcgtgtgtccgtggaactggtcagagccacttcgtgacagtcttgcattctgtctgtcttgggggtggggggaggtgggcagttctgtgggaaagtgtcttgtctccatttgggtaaaaggaaccaaaccaacaaacagtgccctcattggaattcc

SEQ ID NO: 2603 - DNA, 641 bp, Canis familiaris
aaaacctaccacttcgtaatttttacaaagttttcttatcttgtttcgtttaactttctttgtaatgtaaatacaaatttaaacctagacttaatatagttttttctccccttcacccaagtgatgtcacaaatcaatgtaaaatcaatgatccgaaatggtcagtgggtaaaaataatccaaagtgtttctggagggtgagttggcatgtaaaaaatcacattgattacagtgtgttctaggtctggttctgtttgtatgtgtatgatgatgcaaagttgaaacagagcctggaaatttcattctagatctcactaactactggaatcagtgttttaatctcttagtggaaactttcagttgcttaattctgtatttgaggatttttttatgttctacatcatttatgttgtattacaatgtatgtagaaacagtaacctgtgaactatgctttcccataactttttaaatatatatatatatcttaaatgaatgcaatgtgcataaatattttttaaacgcaacagtgaactatttgcaccttttgctaatgcctctatttacttgctttggcataaagaatgagccaatgaacctctgtgtcctgtggaaaatgtataaatgttatctgatattgctc

SEQ ID NO: 2604 - DNA, 538 bp, Canis familiaris
gagcccggctccagaaatcaatcgatttatttgttcttccgtttccctttcacctcatgggggtcaaaacaacttgcctttgatcatgcgattttcaaaccacggacgaagccggtcaattgtggtctttgtgatgtgcccctaggaggaggagggcaagtgcttcccaccccccacactacccagctatttccggctcctctcacaggaatagcaaacacaaccacaggcctttgaagcagtttgagttttaaaagggaaaggcttccacctactggattcttcgagtaatagagactacgtgagtccacattagattttctctggccttcggcagtgcaaaacccggtgtgtccacttggagatttcataattcttttaaattgcatttcattttaagactctagttgttaatgaacacattcagattttacaaaacataaccaccgctttatgttacacaaggaagtcaaaagaaatgcataccttgccttttcccttaaaaaaatgatatgaaatggtaatatactcagccaaa

SEQ ID NO: 2605 - DNA, 697 bp, Canis familiaris
  misc_feature (1)..(697): n = a or c or g or t
cttcttgctgttaaagnncagacgggatnnnaaaaancnncagtctcaaggtcacctggggcaggatctggtactgagagataataaatagtccaatcctnnagcccaggctgagttcccttggggcaaatgcttgttgtattcattgtcctattttaaaccgccagccagttactccactggttgaattcgtttccaacggaggcaaagtgagagaaagaagccggcggtgccacatgactcctgggcaggatggacagacccacaggggcctcagcactgtttactgtctcgacagcagggtctgacaagtagggtaatggcccgacagctcatgcctgaatggatgaatgtttgataaggctccattacagctgatcccacagcagttactcgcagggctcagtcaccccaatggactgttaggcacctgatagaaatggggaagatgtgcagttttcagggtcagagcacagctgctggtacagcagcttcacacaggtgcccgatgaagaacgagctgacgtcagaaggagaatgctcatcattaggggtccagttctcattgaaacctaggcagcctttcatcaaaatcagacacaagcgaggtcttgtgtcatacatacagaccatgagcgcccccctcccatcagcagcctcctgcagccnacgtcatagtcttcaaaacctgggagca

SEQ ID NO: 2606 - DNA, 504 bp, Canis familiaris
  misc_feature (1)..(504): n = a or c or g or t
cttcagcacagcttgagttacatccttgtgaaaaggcnnnnnnttatttctgtatattatagtgtaggtcccttcactttttggagaatagtaaatcaagcttctttgtacaaacgtagagcttatccaaagattttctccttttacctcattatttcttagaaatttaatgtgcatacgtnctgttttcctatgccttttagctcaagcaacatatatatcggtactttttctttcttagatgtagttaaaataattttttttttttgtttaaaagaaagaaagggattaaatatttttttccctaaagctttcttgaaggtcaggggctttatctatgaaaaagtagtaaatagttaattgtaacttgtgtgaagcagcagccagccttaaaatagtcctttctggctaaggggcagaacagcaaatactagtataattgtttgggctgcttttattttctcttaatcaaaattattagatgnnngaattcaagaacttgtt

SEQ ID NO: 2607 - DNA, 201 bp, Canis familiaris
gccacccagggatccccctcttaaaggttttaatacgctgaagggcatgatgtatctccaagaggaagctgaggcaaaggaacagagaaagctgatctatggagagacccaagaatgaacagatgcacagagcaaaacagaaaaacaagagtactttcccagttctcccagtcctgcccattttcatcctttcctgggctg

SEQ ID NO: 2608 - DNA, 554 bp, Canis familiaris
tttcccgtgccatcttgtgctctcaggttggctggcataaactccctgcctcatttccagctgcctgaggccctgaccagccccacgcaaacactggcctgtcacttcttgtgattagggcttcctggaggcaggactgggactgacttagggtgtggggagggaccagagagaggcctctctgtcctgttcacctgatacgaggccacagcagatgggaacaaagacaagggagtgagggcccctgccccaggagagtagagtgtatggggaaccccacggggcctaatccaggctgctcacccctaggaaggcgcctttgcacttttccctccaggggcaccaggaggggggcggaggctttttccagcaaaccctagacagatggactccactagcatgaccatggttactcttgaagcggcttccctcagccagtgactggtttaccttccactggaggacaaagggcagaagaggacaaggctgagagggtataagcaggcgcagtttctctcctccttcagaacagcctttagaaggatcttcattta

SEQ ID NO: 2609 - DNA, 685 bp, Canis familiaris
  misc_feature (1)..(685): n = a or c or g or t
cacctccccanctcacctgcttgtggcccacntggcacagtnnnagagcannaaggggtcatacaggccataggccacactcaggattcacacaggagatccaatcccccattcacagagactgagtttgagnacannnnagatgnnncaggnnnnnccaagaaagtgtnctgctcnannagctgcccttctgtcactcctgacaaggcctaccagtgccaggactcactcatagctagtgatcttgcttggagccgtgtgcatgaaccccaggccatgcagggagcagagcatcaagtctgaagagcagggaagcccctctctctgcagttggggctcagcagggatggacagggccagctggaggtgggcaggtggagggatggggccagctgggtggtggagcttgtagttttggttctgggagggtaccaaggctctttggagttgtcctcttgcctttggaaggaagatgagaaatggagcatgaggcccagcagggctggccatcgggaggaaaagccacgctcagtcacacagagctaaatgggtgaagactgaatctctcagaattctcagtgaccccggccttcccctccccacctgctgtgatccagctgacattcagcttaggttccttctggctaaggaccatgactatagcagagctggagtgaagtggaac

SEQ ID NO: 2610 - DNA, 366 bp, Canis familiaris
  misc_feature (1)..(366): n = a or c or g or t
tggtggcagtgggcacccggcaggggccagccccagggnnnnnnaccccacacacacaacccagcctcctcagaccatatgctgcccccctcctccccggtgacctgcgacctgcaccctgcacccaggatgcctgtgagagcacctgttgccagcagggacagagctgttcaggaaccacttgctccgcccttcccctcccccaggacctgctgcccttcccctcccccaggacctgctgccactccgggccggccaaggccttgggggctgtgctgtcagggcctgcttccagtaccctccacaatgtgcacctccacccccacgccgctcaaacccgactnnctcaggggactgctctccgaa

SEQ ID NO: 2611 - DNA, 485 bp, Canis familiaris
  misc_feature (1)..(485): n = a or c or g or t
tcatgtganctgtatcctggcataccagttatattttgtnnagactnnnnnagcaccccatcgacaggaatgtatcattttgttgtcaatggcagcattccagaggatcacgaagactgggcttccaatggggaggaggaacggtgcnnnntgtccctttcccatttcttcaaactgaaaagtgcttgtggggaacctgcttacacaaattatgttggtggttttcatggatgcctggattacattttcattgacttaaatgctctagaagtggaacaggtgattccgttacctagtcatgaagaagttaccacccatcaggccttacctagtgtttcccacccctctgatcacatagcacttgtatgtgatttaaaatggaaatagatttgtttaatgtaatgtaatttaagtctgctttaataggaatttaatatgaatcaannnnnntgtgtaaccttcaannnnnaaaactagaccgacac

SEQ ID NO: 2612 - DNA, 559 bp, Canis familiaris
  misc_feature (1)..(559): n = a or c or g or t
tnnncattcagtacagctcatgaagatcatgtcttttcactgatacttttttgatagtttttatatnncaaaatccttattctatttataacttcagataagaaggcactataaatgaatccctaacgtaatatatttgtgggttacctttcactatttttatgtcacattaatttttagctgtaaaatggttaaattgattcttaacggttctctcttgactgttttttatgttttggttttcagctttgtgtaagtgtcagaggatttcttctgttaggaacaatgtatgacattgcaatgttgaaaaataagccaccaaaattcgcatgccttatgcatgttttgattgattttctattttctttagtcaaaggctgatgtcaccgtgaatcctttgcagtcattgattctcccattctcctttgtgtgatcatagcatctcatcaagttaatcctatagtattttcaaggacttgtgattgatggttagtggggtattaggaaagttcttaatttgaggatgaccatgtgtagccacttagtactacaatgtaga

SEQ ID NO: 2613 - DNA, 517 bp, Canis familiaris
  misc_feature (1)..(517): n = a or c or g or t
gngagggtgccgctatggcttccagcggggtcggcgtgagcgcggccggcgcgccaaatgaagcacccgaaattccagacaacgtgggagattggctccggggcgtctaccgtttcgccaccgacaggaacgacttccggaggaacttgatcctcaatttgggactttttgctgcgggagtttggctggctaggaatttgagtgacattgacctaatggcacctcagccgggggtgtagccaaatagacacatggaaccccctgtgctgtacttgaaccttccaaaactagagcctccaatttatgaccgtcacaagacttagccctcttggaagttgaagcttcaatcagaccaccttcccttcccaattgcttcgtctccttgagcccactcagaactccattctctggtcagcagtcaggtttcagccaaagtgttgtcctctgttctgtaaagttctgtacatagttcctaagtttctgcaggaggtgatctttgctcttgtcctgaggaata

SEQ ID NO: 2614 - DNA, 632 bp, Canis familiaris
  misc_feature (1)..(632): n = a or c or g or t
cctatgcacggggggcatctnnaancttggccactgaggaccttgtctacatgctgtctggcttgggcattcacacgggtgtgaacctccagaagctcctggaagctggaacctttatctgccaagccctgaacagaaaaaccagttccaaagtggctcaggctgcctgtaaactgtgaatccctttgggggactctgtgggaataggggcacacatgaatgattcgggaaagggcacatgggaatgaaatgaacaggagcaggcacctgcctggcaggtctgcacctaggtctcacctgcagaggggaggtgggaggtaagggacaggagctgcttggccccaggccctccctgccagaccctggtcagagtcagaagcctgagcgcctgggggctccctggaaccaagttccctggtgctgaggcctcatctctgggtgaagtcggtcagctagctacacagcctgaccctgctgtggccctggggctatcgcggagtccggagagcacaggggcctggaggagttgttcccaggctggcagagggcctttgcggaagggcttgagggctgagctgctctgctgaccacctgccaacccttccaagcgtctttggaaaatgtcccctctg

SEQ ID NO: 2615 - DNA, 564 bp, Canis familiaris
  misc_feature (1)..(564): n = a or c or g or t
gacttcgatgactggtgccaacaagtcaggcagctgtcgctnntcggaggcgccctgcccatgttcgagctggtnnagcagcagccttcccacctggcctgccccgacgtcctgaacctgtccctagattcttctgacgtagagcgactggaaagattttttgattcagaagatgaagactttgaaatcttgtctctttgaaaaccctgcagttgggggacggtgtcccctggccctccctgggggccgtcgagagcccggccctgcctcggggcgcttggcgccgctgcatttcatccatccagcctgcccgtccgctgaacgcccgtgccccgtgccgcctccgccctgggacggaggactgccctgttccgggggccctgccgccagccccgggactgcgcaggcccagagggcccggccggggcgccgccgaggagccgccgcaggacgccccgtgcagccaggccgggagctgctgagagcggagccttcacacccgcgagcgctcgccctgccacactgccagccccgcattagcnnnnngcctctgccctgcttcct

SEQ ID NO: 2616 - DNA, 572 bp, Canis familiaris
  misc_feature (1)..(572): n = a or c or g or t
ggttggagggggcgatgcacagannagctggnanncaatnnaagaactggcangcagtgaagtcagagggacttcatcagagaaacatcgaagagcgagttggcagggctgtgctcactctaagaggcacctgtatcctgtctgctccnnnnnttgctgtcatgcttttccaaagtttgttgctaaggaggtaccacctcagccctctagaaaacttgtcatcccaaataacacgctctgagaactgcagaaaacnnnggtattgtgtgacccaccgtggtaacaagaaaaatgtggtcgggaagagaggtgacgaaactgcaccacgcagaggacagcggacagaactgggcctgttcctccaggagaacagatctgggcggtaaaggagttgcccctgaacatctttcctggggaagaagcattgaccaaactccaggtggaacaaagaattggacttagaacaaaaggctgaaccatcagagtgaccaaaagctttctcttagagctagccaacattggctagggtcatgagaggtccctgtcatgggagtgtgcaagtggggaggaga

SEQ ID NO: 2617 - DNA, 704 bp, Canis familiaris
  misc_feature (1)..(695): n = a or c or g or t
gatctcaggcntacataaaganntccatccacttacaaaagtacttgtcactgttaagatgacatgtggtcatttaagtaaaaaaattacatgggtatcctattcataganntnctgtctgaccaaggcnngtgttaattttattgacagatcatctgaagcccctttnnnnnnngccataaccatttttttctgccaaatcactacacaatatctcaatgaaagcagtaaacattaagtgacaaaaccagtggcattttggtgagtaacactcagtgggatgctgacatatagtttaggtaagattataaaacaccaaaggctgaaatctacgagtaccaggaactgtgcatatagacttagaaattgtaaacactagaaggtggagtgaatattttcagtaagtttttttaatgaacactggagtttttgaataagatatttctaattggagttatactgttttacaatactccattaaaacctcatgcagaatattagtttattgtcatgcattgggctaacattcagggggcctcagattccatatgtcttcagtggattggtgaatttcaggttaatttgtgcctgcctcagccatctctcctttaccttgaggtattccatgatcctctcgttgcaggtgctgccaaaaactcaaaattatgtatcaaatatttcgtttcaactgtaaaaaaaaaaaa

SEQ ID NO: 2618 - DNA, 538 bp, Canis familiaris
  misc_feature (1)..(538): n = a or c or g or t
ggcatacaaagaagagataaacagaattcaagaacannnaactccaagtcagatcatgtctttggaaaaagaaatcctgcaaaaacgtctaaaaaagaaagcattaataaaaaaaagagagttaacaatgcttggaaaacctaaaagacctcgctcagcttataacatttttatagctgaaaggttccaggaaactaaggatggtacatcacaggtaaagctgaagactataaatgaaaactggaaaaatctctctagttctcaaaagcaagtatatattcaacttgctaatgatgataaaattcgttattataatgaaatgaaatcttgggaagaacagatgatggaagtcggacgaaatgatcttctacgtcgctcagtaaagcaccaaggaaaagatgacactgaggagaattaaaatagaagattgagttatgttcgtaatggatagacacaagacaccaattaggtctcagtacctgacgctgttgaaaattagaaaggataaagttggtgaacattttatatttaattcctt

SEQ ID NO: 2619 - DNA, 216 bp, Canis familiaris
  misc_feature (1)..(207): n = a or c or g or t
aggcaatatttactcatttgttaggaaaatcaagatgtggctaaagatcagaggctcagtagcaacctgtgttgtagcagtgatgtcagtccattgattgtctttagagagttaatgttggaaaaaaaaaaaaaatcttactgatcagacaaacatgatctgctgaagacacatncnnnnnttgtagaatttaacnnnnggtgtttttctgaaaaa

SEQ ID NO: 2620 - DNA, 580 bp, Canis familiaris
  misc_feature (1)..(580): n = a or c or g or t
tgtgggnctgccatgatttggggtgagttctcacgccctgcctggaacgatctctccttcccntagcacaaagcactggccttgctcacaggaccttgcttccttctcatcttgcctcacttagctacccatgtgaagagagaaaatgggaactcgcccagagatggatgttggggggcaggcccctcaaactgatggacatgggagtagcactctgacaggccttccttgagaccttgacagccttgacagtagcctggcaggtgggggctactctggtagaaggaggagccttgtcactgtctcctgtccagagtctgtctcacacttcacctcctgctgcagtcagactgaaaaatgaaaaggtagtagtggttgaggggtgggtggagatgtaggaacccatcccttcctttgacagcctccccccagacctgggcacacacagtgtagactggggtggggggagcacaggaccctggcctgagaagtgaggggggatggttagcctgcggagatgaggtgctggggctgcatgatttttgccctgcagctcttttctctggggttcctttccctt

SEQ ID NO: 2621 - DNA, 592 bp, Canis familiaris
  misc_feature (1)..(592): n = a or c or g or t
agtcggctcaatgaagctttacaagcagagagacagctgtacagcagcntggtgaagttccatgcccatccagagagctctgagagagaccgaactctgcaggtnnaactagaaggngnnnaggtgatacgtggtcggctagaagaagttctnnnaagaagcctggagcgcntaagcaggctggagaccctggctgccattggaggagaatcagtctattgatcattctactaaaaatccaaggcaaagttaacgctctggaatgagtgaatgcttttgtaatttatttaactagaggaannnagaggaagaaacctggattattctctcaaggaagtgagactaaagaaacagcattacacttccctcagaaatgtgaaatgaactactttatcttaaaaactctttcttgttctccttgctgttctcctcttactgttctccttgagaacagtagcaaacaggatggagatttgaggagcaagctgttatgctggggggtgttattcctgtaaatanncctggaaaggcctgctgcttatgctctttgaggggaacaaagaagccgtgagcaggaaaaattccttgacat

SEQ ID NO: 2622 - DNA, 671 bp, Canis familiaris
  misc_feature (1)..(671): n = a or c or g or t
cgggttttcgcgtgannngctcttcagaggcatttnnntacgagacgatttccgtggcctggctccccagttgnnagcaggggcgnganngtnntggggtgcacgggaccaggtactgggacttcttccactcgagcattttgatggacacgcgtctcatctctgatcctcttatcccagtactcctgaccgaccgaccccaaggggcggatcacgaccttggggcccgtccccagctgggcgtccagcgcacccccttcggcccacgggcgatcctgccggccggcctgtctgggtccttggcaggctctcttggcctgtttggggctggggggaccggcaggggctcctggtgccacccgccttggcctgacattgccacgcggccaccagagctgcttccagggcgggcaggcctgccagccgtgaccgggcggcctgcccaggacacgaggccactgcagaggtccccacggcctctgctggcgtgggatggggggagggcaggtctgctggcaccagtgttggcagctggcttgtgggaggtcccctggtggtcctggccgtctgcgaggtagatccagtactgtgtgttgtaggtaactagtagggagacggccgctgcccgccacccgcagtccgtcacgtgtctggcgagatgtgtcctaact

SEQ ID NO: 2623 - DNA, 549 bp, Canis familiaris
  misc_feature (1)..(549): n = a or c or g or t
tcttcagacaataaattctactcattaacacgaccccccaacaccctatattttacatggnctgagtacaggcaagcctcngtagtcaggaacccctcatcgtgcagcaggccagaaatccactggtgtgagaagacaagtggaccaggagggagccccagtctcctctgtggggttagcgtctgctaggccggccgctgtgactcggtgcttgggtgttggaggcaggagcccagggctgcccgggaggagtgtcctaaccattttcacccaagagaaatgtgacatgaatgttttcagattaatgctcagggattcttcccgtgtctttagtttcgtacgtgtccgtgctgtcaatgctcctgaccccactcctagttcacgaagcccttactcacctgccttccttgctgcgccatgtccttgcaatacgaacagatggacagaaggacaaccgataggtttttctggttcagctcttttggctgcgataataaatgatgcttggtactggctgatgtgtgcaggcagcacgataccactttgtaa

SEQ ID NO: 2624 - DNA, 494 bp, Canis familiaris
  misc_feature (1)..(494): n = a or c or g or t
gttgtgggggatnnaagaatgggatatgctgaagaagccccatatgatgctattcatgtgnnagctgcagccccagttgtaccccaggcgctgatagaccagttaaagcctggtgggagattgatattgccagttggtcccgcaggtggaaaccagatgttggagcagtatgacaaactacaggatggcagtgtcaagatgaagcccctgatgggagtcatatacgtgcctttaacagataaggagaagcagtggtccagggatgaactgtaaaaacaccatcagcttgaccagtaaataatattacagtggattgctcatctcagtcctcaaagctttttgaaaccaacagcatcacagcttgttttggactttgttacactattattttcagcatgaaaatgtgtggttttgtagggtttctanntcttcaaagaggcacagaagccgaattggtaaaggaacgatgcaaagtataaatttgtgtattatta

SEQ ID NO: 2625 - DNA, 487 bp, Canis familiaris
  misc_feature (1)..(487): n = a or c or g or t
gtgagcaagatnngcgcatnnntcnnttcannncgnnnnnnnaggtgcannnnntnnncntnnnnggtnnnnnncgcaggnnnnnnntgtnnnttggcaagaactccnnnttccanancgaagtcctcgtnaaggagtannnngtcannnnngctgnnnncannnnnnnnnnntcnnntcccatccagtggnnncagcactacgaacggnnggcnnnnnnccgccagaccnacgacaacggnnnnnnnttcttcaactggtnnngtggnnnncaccnnnncgggtcaggcaggannnnngagctcatcatggatgacctgtggcccaatgtcnncaagtnnnacgngaggaagaaggcgccgggagagnnnngcnanannnggacagnnngcttcaagntgccgagatgaatatgngnnnnnggnnnnnttgtnnnnnnnnnnnnnnnnnatacagatnnnnncnnnnnnnnnnnanggcnnnnntg

SEQ ID NO: 2626 - DNA, 605 bp, Canis familiaris
  misc_feature (1)..(605): n = a or c or g or t
agaaagtggtggtggtaattttngacaaagagcaccgcccggtnnagaaattcgtctttganatcacccagcctccactgctgtccatcagctcagattccctgctgtctcacgtggagcagctgctccgagccttcatcctgaagatcagcgtctgtgatgcggtcctggaccacaaccccccaggctgtaccttcacagtcttagtgcacacgagagaggctgccactcgcaacatggagaagattcaggtcatcaaggactttccctggatcctggcagatgagcaggacgtccacatgcacgacccccggctgataccactgaaaaccatgacgtctgacattttaaagatgcagctctacgtggaagagcgagctcataaaagcagctgagggtgtgagtggccccggcagggatgctgcaacggctggacgtcgccggagccccagcctagggcagtgctgcggggccaccctggtttcaagtgctcttactgcctcggggtatggaccggcccccctccagcgcggcgggctcaggtctggctgccttcgtggacggattcgccccaggagnnnngggacgatgctcggacctggatt

SEQ ID NO: 2627 - DNA, 559 bp, Canis familiaris
  misc_feature (1)..(559): n = a or c or g or t
agataaggaattagtnctgtgtaagttcactaggtgggtaggttatattggtgttacnnntaacaatgtatcctcactgttgtgttgcatgaaatagggaagtaaaactgaaagaaccatttcttatatttgtcaaactagccttttctagtatctgtgatctaattagaaattagacaattnnnaatacgctcttcaacctaactgcaaaacactgtgtaatagatgaattacccagcattcactctattaattagaagtgaaggtcaatgaatgcaatacaacatacttattgagcatctactgttatcccaagtactgtgttagaatttgagtattcaaagttgagtaatagcctttgccctgcggaagcccaccatatagaaataattgtcagttatttccttaaatgttgagtattatcagtcatgttgtaagtaccatatgtaagtcaagaagcagtctcaccactacctcactatgatttggtgattaattgccattcacggttcttctgtttaactttcactttttcgtttttccaaaatcatgcagcatc

SEQ ID NO: 2628 - DNA, 718 bp, Canis familiaris
  misc_feature (1)..(718): n = a or c or g or t
gcanctgtcgctgcgagggcancatctacctgtnnnactgggacgataaagtcatcatctccgacatcgatgggaccatcactagatcagatactcttggccacattctgcccaccctggggaaagattggacccaccagggcatcgcgaagctgtaccacaaagtgagccaaaacggctataagttcctgtactgctccgcgcgggccatcgggannnnagacatgacgaggngctnnnngcactgggtgaacgagcggggtacggtgctaccccaggggccnctgctgctcagccccagcagtctcttctcggccttgcacagagaagtgattgagaagaagccagagaagtttaaagtccagtgtttgacagacatcaaaaacctgtttttcccaaatacagaacccttttatgctgcttttggaaaccgaccggctgatgtgtattcatataagcaagtaggagtgtctttgaacagaatatttactgtcaatcccaaaggagaacttgtccaggaacacgcaaagaccaacatttcctcgtatgtgagactctgtgaagtggtggaccacgttttcccattgctaaaaagaagccattcttcggacttcccctgctcagatactttcagtaatttcaccttttggagagagccactgccaccttttgaaaaccaggatgttcattctgcctcagcgtaaaatgttgcaagcag

SEQ ID NO: 2629 - DNA, 615 bp, Canis familiaris
  misc_feature (1)..(615): n = a or c or g or t
gcgtaccatggagaaggagtctaaaaccacccgtttcngnctcatctgcaactacgtcagccgaataattgaanctctgacgtctagatgtnnnaagttccgattcaaaccactgtccgataaaattcaacagcagcgattactagacattgccgataaagaacatgtcaaagttagcaatgagggaatagcttatcttgttaaagtgtcagaaggagatttaagaaaagccattacatttcttcaaagtgctactcgattaacaggtggaaaggagatcacagagaaggtgatcacagacattgctggggtaataccagctgggactattgatggaatatttgctgcatgtcagagtggctcttttgacaaactggaagctgtggtaaaggacttaatagatgagggtcatgcagcaactcagcttgtaagtcaatttcatgatgtggttgtagagaacgataatctttctgataaacagaaatccatcatcacagaaaaacttgctgaagcagataaatgcttagcagatggtgccgatgaacatctacaactgatcagcctctgtgctacagtgatgcagcaattaacacagaattgttaaaattttgtagg

SEQ ID NO: 2630 - DNA, 634 bp, Canis familiaris
  misc_feature (1)..(634): n = a or c or g or t
agtgcgaagagaggnngaagaccttgaaacccagacagtaaatgttgctgatnnccagcgnnattccaaatcctgtggtgtgacctttgacaaatacacttaaataagggctggtnntagagagtagaaatatatgacccagcaaaatgcctcttcgagtggtttctacttgaaaagagaaaactgacatttgaacaggactttcaatttgtctggatcttgtccttgcttttaacagtagaaaacaagtcattcttattgtagaaaaagtgacagaagtagtccggtaagattatattttcctgtttctggtaaacctcatctatgatcctacataggccaatattttaaacagtgaaagcagtcaagggctgaaagcctttcagagagcggcaagcattctgtatnncgtgcaataatcatccaagatcttttttgaaagttttatttataatacacattttgtatgaaagaagtgattggtacagggtgcatattgtagtgaaggatcaaaattgttcatgttaatttgcaggacttttttgttttttcaaacttacaataaggattcattttggaaacaacattttaaactttggaatcaaactgttnnnnnncgggaggataatgtata

SEQ ID NO: 2631 - DNA, 285 bp, Canis familiaris
ccccccattcagctcttgggccaacggcctccttacagcccccggactctagggggtgggatcactgcacttttcccagtgacgggcacagatacaagcatttgatgacagaatgacacacctgtgttccctgtccatcctggaagccatcacccgctcgaggcttccctggcactgccttccctgcctgccaagaccgaagctactttgtcttgagttagcagttttggcttttcccagataatgagcttctcagctggcgtctttagcagaaatcttttatca

SEQ ID NO: 2632 - DNA, 679 bp, Canis familiaris
  misc_feature (1)..(679): n = a or c or g or t
gagattncgagagagcaatcagaactgaagacaacatgggtnnntgtnnagttcgnacctggggatcaggtaaagataccagtgacatnnagcagactgcaccaatnnaagagatcacagcggtagaagagtccccaggccctctnnaggannaatctccagacaaagttcctgagttggagttagaagaagaaactcaagttcaagagatgaccctcgatgagtggaaaaatcttcaagaacagaccagaccaaagcctgagtttaacatccgaaaacctgagtccactgtcccttccaaagcagtggtgatacacaaatccaagtatagagatgatatggtaaaggatgactatgaagacgatgcccatgttttccggaaagcagccaatgacatcacatcccagctggagattaatttcggtaacctccctcgtcctgggcgtggagccagaggtggcccacggggaggccggggaaggatcagaagggcagaaaactatggacccagagtggaagtggtgacacaagatgttgctcccaacccagatgaccctgaggattttcctgctctggcttgagagagccctgtttccctagcaacctgacaccgtgtctgcgtacctatgaagagacttttcttgccgtgaggaagagtcagactctaagaacaatagat

SEQ ID NO: 2633 - DNA, 609 bp, Canis familiaris
  misc_feature (1)..(609): n = a or c or g or t
gcaatgaaacagttcnanngcatgcccccttgcacatacacaatgccaagtcagtttcttccacnnnnnnnnacttactttcccccgtcaccaccaagctcagagnngnnnnntnnagatagacangcagagatgctccagaattnnaccccacctccatcctatgctgctacaattgcttccaaactggcaattcacaatccaaatttacctgccaccctgccagttaattcacaaagcatccagcctgtcagatacaatagaaggagtaaccccgatttggagaaacgacgcatccactactgcgattaccctggctgcacaaaagtttatacaaagtcttctcatttaaaagctcacctgaggactcatactggtgagaagccgtataagtgcacctgggagggctgtgactggaggtttgcgcgctcggacgagctgacccgccactaccgaaagcacaccggggccaagccgttccagtgtggcgtgtgcaaccgcagcttctcccgctccgaccacctggccctgcacatgaagaggcatcagaactgagccccgctgtggcctgccgtgcctatgcaattcaccctgccgtcctgcggttcc

SEQ ID NO: 2634 - DNA, 469 bp, Canis familiaris
  misc_feature (1)..(469): n = a or c or g or t
tctcccagcgtcatctactgcatcagcatgcagtggtnncgnnagtgnnnnnnntttgtcaagggcaaggacaatgagcccccggggcccattgacaacagcaggatcgctcaggtcaaaggaagtggccacatccagctgaagcagggagccgactacgggcagatttcagaggagacctgggtctacctgaacaacctgtatggtggtggcccggaggtcgccatccgacagagtgtggcccagctccaggacccagagagcttacacggggagcagaaaattgaagccgagacccgggccgtgtgacttggtgccagtctcatgtggtccaagaacaagcgccctggaaatcccttgacatttgctacagtctattgaaagttcctgctgcagccggctgccggctgcaggtcgccccccgctggtgacagaggttccgcgccaggttgcaaactcgccgatgtct

SEQ ID NO: 2635 - DNA, 665 bp, Canis familiaris
  misc_feature (1)..(665): n = a or c or g or t
gttgatgcnncagnctcagtgnnngagtnntnnnccaaatttacagataacaatattctccgttcccaaagtgaacgcgcannnnntgccaanctaagagatgacattcaaaacctcttggttgtgactgccaatgagatgtggaatcaattcaacaaagtgaatgtatctttcaccaatcgcattgctgagactgcagatgctaaaaataagattcaggttcacttagcgaagaccctgcaggagattttccagactgaaatgaccatagaatccatcaagaaggccatcaaagacaagtctgccttcctgaaggtggctcagaccagactggacgagcgtacgaggagacccaacatagaactctgccgggacatggctcagctacgtcttgttaatgaagtgtatgaggtggatgacaccatccagaccttgcagcagcgcctgagggaagcggaggacaccctgcagtcgctggtccacaccaaagccacactggagcatgacctggctgtcaaagccaattccctgtacattgaccaggaaaaatgcatgagcatgcgcaagaccttccccaacaccctccggctggtgggcttctgttagggaccccaccaggaactggaaaagtggaaccaaagccctgtggcagcaatttaaactga

SEQ ID NO: 2636 - DNA, 486 bp, Canis familiaris
attactgcactctggaatttgagcagaaacttaaatctccagactttctgaagcacaaaatataaataaaagctgggaaagtaaaccaaattctttagattgttcctcatgaatattccccccttcatctgcaactccccagagtgatgagcccagactcctggaggcagtgcaggtgaacactgagcctgcctctcagttcattcctcctcttcctcctgaaggctgaaggcagggcccttccagtcctcacaacctgcccttcctcctgacccagggaaggaggctttgagtcccacaatgtggtgacgcagagcgctcactgtcactgcctggctttatttaaaggaaatgcggtaggctgcccctgtagagttcctgactgtagcgaggtcttgtatgttttcacttggtcaagtatttctcacatcttttgttatgagtaccattccaatctctttacttgcagttgtgtggaaaactgtt

SEQ ID NO: 2637 - DNA, 519 bp, Canis familiaris
  misc_feature (1)..(519): n = a or c or g or t
tcagggagcatcccctnnagctagtttcttgctcctggaatggagggtgttgtnnnccnnncctgagtttcgggggtagtttcagggcctcagacccctctgtacagtccataggaaaaagtcggaatgctacgacagcccgtcccagcctgggacaggccccctcttccctttctctgcaggctgggaaaatcactctctcgccatgccacaagtgaggggaggtgggccccaggtcacccccacaccccagccccccgcatgcaggtgccctcgctccgccccaccggtccctgcccctgcccctcacacagacagccctgctgtggccgggccggagagtggagcagaaaggggaccccggagccgagcgaggaggacgaggcagccgccgctgccactggctaagctgccacctgcgctaggtaggcgtcctgctcgccgactttcagttcctttggagggtgtcgggtgttgtcctttttcaaaagtgttttggagctttctctgtcccctccc

SEQ ID NO: 2638 - DNA, 626 bp, Canis familiaris
  misc_feature (1)..(626): n = a or c or g or t
cagaagattctataaacaagcattcttcaagaagacctctcacctgtgggtgcaattgatgcaagaactgctcacctattcatcttgctgaaagacttctatttataannngttattgcttttaaagttttttctctctgttactgaggtattttcggacatnnnatccatcaactggaagctcctttttttttcctcatttctctcaacacactcctcaactatattttttaacagatttaaaaagaaaatcataaagccaaaatttgaaaaataactccctgcatttccagagtgaattttgtaatgttatcatgaggtttttgaggaaactttttactctgggagagtttgtataagtttaaaaagaaattttatgaaatggtgaaataatgtgcatgattttaagttgccatttttgtaatttgggtgacttatgttgatgatatcaccatctccttaaattgtgttatgtttggttatttcgttttgtgaaagtcagtattaaccagaaaatattggcactcagtgtttgaaaatattggcactcagtttggtatccacatgtctgtcactaatcattacnnnnnngttctgtatggaannnnnnatgatacacatgaaat

SEQ ID NO: 2639 - DNA, 567 bp, Canis familiaris
  misc_feature (1)..(567): n = a or c or g or t
caggggcatnntgggggncagccaaaannagccccagtgactnaagcaattcctcttaccaaaatagaaccccagcccttgaatcattaatctgatcactgcccattttgtggaattgcttttgaaatatgcttggcctctgctcaccgggagacttgctcttaaggtggatggtcctgtgtctgtatgtactatgagcctaatgacacagttgggtctatttctgccaaacctgtgtaggcattttataagctacatgttctaatttttaccgatgttaattattttgacaaatatttcatatattttcattgaaatgcagacctgcttgatcagttcccttgactatgggagtgacatttgccttaaattttttcaagcttgttctccattttgtcctgctcccctctatgactgtaatgcatttgccttgtcccctaggagctgaggaagcccagctgttgtttattgaatccacaacttcaaaagagaaatccacaaagcaaatacaatgttaaccctgttaataaaagagttaacatcccatgacaaagaagcccgtattct

SEQ ID NO: 2640 - DNA, 632 bp, Canis familiaris
  misc_feature (1)..(632): n = a or c or g or t
gcttggtttgccagctnnngtcgtgaacgtaactccggcaccaaactgttcaatatctctggccatgtcaaccacccttgcactgtggaggaggaaatgtctgtacccctgaaggaactgattgaaaaacatgctgggggtgtcacaggtggctgggacaatctccttgctgtgatccccggcggctcatccacaccactgatccccaagtcggtgtgtgagacagtgctgatggactttgatgcgctggtacaagcacagacaggcctgggcacagctgccgtgattgtcatggatcgctcgacagatattgtgaaagccattgcccgccttattgagttctacaagcacgagagctgtggccagtgtactccatgccgtgagggtgtggactggatgaacaaggtgatggcccgctttgtgaggggggatgcccggccagccgagatcgactccctttgggagatcagcaaacagatagagggccataccatttgtgccctgggcgatggagccgcctggcctgtgcagggcctgatccgccattttcggccagagcttgaggaacgaatgcagaggtttgcccagcagcannnnngccaggcaagctannnnnngagctcgatgccctg

SEQ ID NO: 2641 - DNA, 608 bp, Canis familiaris
  misc_feature (1)..(608): n = a or c or g or t
tcccttttacttctcaagaggtatcttcatttgaatagtgtttgtggtcaccctcccagtgcccagcntagtgtctctggtccatggcagatactcagccactgtttgaacttatctaagaggtgctaattgaaacagataagtgtggattttattggaacagctgccattaagatgaagataatgtcctgaattgcctctaccatgttgttgggtctttgacaggaacattgctggtttggggatttaatttttttagaaaaaggaacacaagtacattgtaagaaaattttaacctctccctgtgtattattttttgagactcacagcattactcttaaatttttattttgaagtatacaatacagaaaattatttttaaacagtttattgaggtatacataacatcaccattactttttaaaatattacagagaaagacagccaaagagactacctacccctagattgtatgtacagaagccagtttctatggatatttttctatgtgaaaaatcctatggactttgaatattgtttctaatgcaattctatatttgtaaattaatttataatgtaaactgggacaaaaaaattttttttgccaa

SEQ ID NO: 2642 - DNA, 593 bp, Canis familiaris
  misc_feature (1)..(593): n = a or c or g or t
acatcgtgtatatgctgcaggagatcgacatcctagaggactnnacagccatcaaaaaggctagggcagctgtgtcccctcagaagagaaaagcagatggaccatgaccctgctcttcagagccaagggcccccttggagcagctggcagcaaacccaggatttgcgttttcctgctgtaggaaggcagattgacaagcccctcggggtctgtccggccagcttcccagtgctgctgcatggccttcccctccagctatcactggtctggactcctctgccctcctcggggcctgcacactgtgtggcccagagctgccttaaccagacaagactgtcttccctgtccccagtgagcccacccccccacccccacgagatcagccttctcctcaccatcccagacaaagaagatgtggctcctcttaagccaaagcaacattcttcctgctgaccttggactagtcactgagctagtgagctgggccccacttcctgggaactttgaaccagaaattatattttgggggggcctgtctctcctggccgttgttggagatgagaaggcaggctccccaggtcttctcaaggagg

SEQ ID NO: 2643 - DNA, 641 bp, Canis familiaris
  misc_feature (1)..(641): n = a or c or g or t
taaatatcagttngagcagaagagtccaatgacgatcttcccagtcgcaaagaccaaacccaactgaagggagagagtaggccaacttgtaaaagtnccttcggcatcacaaactgacatttaatttcaccatattcagcttccagttgttcacactgagccaccactaaggcaagcaggttcgagccgccgaatacccattagttctcgcattaaactactactaatgcattctcttgcaacactgccagacatgggactgtcaccacggagttagcgggggccgtgccatgtctcacacgtcagtgaccgaacctgcttgaagaccaagactcatcctcagatacgccacgtgtacctttctgacaaagctgtgtcgagtattagaagctgatgctctagaaagatcctagttgcctttgtgtatatttactgcctgcttgagtgtttctatgtgtgggtttcctctgtaccttgtagaaatgttggggtgttctcctctgccatatggctcgtggcccgcgagccaactactttagctgtatttaccttcatttttgatgaggtggtatcaattttgtttcactttgtgtagtggccccacagtagttttctgattgttgttaaaaaaaaatgactta

SEQ ID NO: 2644 - DNA, 556 bp, Canis familiaris
  misc_feature (1)..(556): n = a or c or g or t
agctggtgttccaatgcnnnaggctcctgcaggacttgcagggcnagtccgaggggttggnnnnncatcccagcaggtgatgaccccgcagggaagaggcactgtggctgctgctgcagctgctgccactgccagcattgcaggggccccgacccagtacccgcccggccgtgggggtcctcccccacctatgggccggggggcaccgcctccaggcatgatgggcccaccacctggcatgaggcctcccatgggccccccaatggggatccctcctggtcgaggaactccaatgggcatgcccccgccggggatgcggccccctcccccgggcatgcgaggcctcctttgacccttgaccacagagttatggaagtagctccacagaggcgtgggcccgattgccacagacgtgtttgtttgttatgccgttgttcttggagtctcacaggattgtctggtttccctttcagggccccctcccccgggaatgcgcccaccaaggccctagactcatcttggccctcctcagcnnnctgcctgtttcccnncaggc

SEQ ID NO: 2645 - DNA, 552 bp, Canis familiaris
  misc_feature (1)..(552): n = a or c or g or t
tncnagcnnngnntccaaataggataacgcttcattgagtatcacatgctccagcttcttgttgagagtagaatttgaagtttcttttgaatcccttaatttcctcatctcaaagtgatgcctgcacctgcgtccccaatctctgtcttgggtataggcagcgcttggatggtttctgccctactcatccttcccataccctggccagaccatctcactgattcttgaattcttttggcaaacttcactgttgtttgtgttccctgattgaagtttgggtggagcaggacatgggctgggaggaggccttaaagttggaggtgcctttgatgtgcgcttggatattcaacaggctctagtgctgcaacaagcccctcaccttnnagtccaactcccccacccccgccattattctctcttccccaggaaatttccgggcaaagtaagtgagaaacaggagccctatgaggtcagaaatagaggtagcaaagggggcctggatggctcagttggttaagtgtctgcctttggctcaggtcatgatcccagggt

SEQ ID NO: 2646 - DNA, 495 bp, Canis familiaris
  misc_feature (1)..(495): n = a or c or g or t
gttctctctccagccaaaaacagttcttgagtgtttgaaaccagccagnactgcacacaggcatttggtgacgtgcataggggctgcctaaaggggtcaggagaaagagggacgtactggctctggacaacgtgaaaacagaggtcatggaggggcaagtaggctcagtagaaatctgaggtaagaggtttacctataaaaaggataacccagggcaaccctggtggcttagcggtttagcgccacttgcagcccggggtgtgatcctggatacctgggatcgagtcccacgtcgggctccctgcatggagcctgcttctccctctgcctgtgtctctgcgcccccctctctttctgtgtctctatgaataaataaaatcttaaaaaaaaaaaaaaaggataacccagatagaagaaaaaagaggctgaaaataaagctacacgataagcatttagaaaaataatccagatgggacaaatgtgaaagtgggctct

SEQ ID NO: 2647 - DNA, 516 bp, Canis familiaris
ctgcaaaccaccaggcaccgccgttgaactgtactctcccgaggccatagatcactgtctttttagcccgctccgggcaagatgcccaacgcgtccaccaaggcggagccccagtctgcagccaatgggagcgggtcagcccagctctctggccaactgccaatgacagctgctgggcactctccatccgaggctgccagttgtcgctgcataggagcaaccaatcagaacgtctaaaggaaacctaatctttctgtcaattgccgctgctcaaaaggcaggtcaactgctgatcagctggtccaggctcaaggggttgggagccttgtgtcaggcacacggccgtgggtcaagaggaaccagagaccatcctcacttcaagactcatgtccactcaggccccaacaaccttaggtgccttcgctgcccaggtccctcactctttctgcagaaactacctcggtctggatctttcttctaccagtggcctgtgcaatatttattggtctgtcaatt

SEQ ID NO: 2648 - DNA, 708 bp, Canis familiaris
  misc_feature (1)..(708): n = a or c or g or t
gttccattcagnntgcagctattcacacacatacacacacacacacacacacacacgcacacaaatattgcttnnactacctatcaatggacttgcttcntgtgtttgaaacacttgtgtgcatgagaatgtcatttgctaatgaattttaaaagcatatattataaaacaaacaacctgccacaatgtgatatgtgtaacatcatttcgtaaaaacccttctcccttcaagcctgggcagaaatgtgctgcaaaaagttctatggtttcttgttcatgttttgctaatgctcgtgtctccttgattacatgttagtagcactgagacccccctggtaatgtaacttaatataagctgtgtcaccattctcgtgtaaaatagtactggacaggcacatggagaggccttggcttccctgtgtggtccgcactcaagagcttgtattatcagtgaagataaatgtgctacctttgcatgccttttaggtttgccttaactcttacctcatttgcattctatcaatctggaaagagctatgttggaattactgcagtataaaacttaaaaatcctgctacatgactcattaattaagtatatctctctatatatacatatacacaaagatattatttattgaaagtaaaaaaaaaaaaaagctggaagtgtattgatttctgcttgaattttcaaaggctcccaaagagg

SEQ ID NO: 2649 - DNA, 610 bp, Canis familiaris
  misc_feature (1)..(610): n = a or c or g or t
acactctnnngagagacggagnnaagaaaggagtgtccccactgcctaccggatgagtaacagcccaggcgtcagcannaagcnnacccggtccagaagcccccacgaaaaaaagaagaagaggcgctcacggtcacggaccgagtccaaggccgggtcccagtcggcgtccccaagcaagcaagccacacgtcggcacacggcccactcagccagcatctctcccgtggagagtcggggctccagtcaggagcgctccaggggagtttctcaggaaaaagacggccagatctcctcagcaattgtctcctctgtgcagagcaaaataactcaggacctcatggccaaagtgagggcgatgctcgctgcttccaagaacatgcagaccagtgcctcctgagatgcgggggtgccactggcccagcgccaggctgggggccggagcgccgagcagcttccacgcacagaccatcgatcgccgtccatcctcctccagggactcctctgggcagttggtggtttttgtaaattaatttttgatgacattttcagtttaagatttttgaccagcagtctcttacctgtatatttgtaaataatatcatgtttc

SEQ ID NO: 2650 - DNA, 652 bp, Canis familiaris
  misc_feature (1)..(652): n = a or c or g or t
gtgtgcaggacnntactactgaactccagctttgatnnnntgactttaanncaaaacaanncaaaacacagggactcatgggagcaagcaagggnnnnnngactccccaccctccgggacagtccctccctgcgtcttcctgtcttccaggaaggacaggcggcccccccatcactggaaatcatctgcagtgggggctgctgtgggtggagagaacactacgaaaggggggtgcgtgtgtgcgtgcgtgagtgtgtgcacgtacgcccatgcagaaggtccagctgctctgtcctccagcctgcgagtgggtgtctgaggccttgcctgacatacggcgcagcccccggcccccctgagccattgcgggggtcgatcatgaatgtctgaagagtggcctttctccatgtcctgcaccccctttctgtggctggctggggagacggggaccagggcctcccgcccatccccagcctctgcagatgactactgcacctggacagcctcctcttttctagaagtctatttatattgtcattttataacactctggcccctgtcccgacctggggacagacggggtagccccagggacagaaccaccgcttgaagaatcaggttcctgtccctttggcgcagccccacccccacc

SEQ ID NO: 2651 - DNA, 637 bp, Canis familiaris
  misc_feature (1)..(637): n = a or c or g or t
acaaaggaaaggaactttctggactgggcaatgccctcaagaatcnnntcgggaatgnnnnnnncctgctaggagaggcaggcaaacagctgannnggcgggcagggttgggcagcggcctgagtctcagcggcatcatccaccaggagctgaaccggagcggcgagctgaccgtgcaggctctggagcagtttgccactgtggtggaggccaagctgataaaacacaagaaggggattgtcaatgaacagttcgtgctgcagcgcctggcagacagtgccattgacctctacgccatggtggtagttctgtccagggcctccagatccctgagcgagggccaccctacagcccagcatgagaagatgctctgtgacagctggtgtattgaggccgcagcccgggtccgggagaccatggccgctctgcagtctgacccgcagcaacaggagctcttccggaacttcaaaagcatctctaaggccttggtagagcgaggtggcatggtcaccagcaaccccctcggcttctgagtgctccccgctggggcctggccaggcctgtgccttctctctccagcccagcctggccccgattctgccttaaagaggccctggccccggggcgctgctgctct

SEQ ID NO: 2652 - DNA, 528 bp, Canis familiaris
  misc_feature (1)..(528): n = a or c or g or t
cagctgggttcattttacccagctatagttgaccttaactcaggcaagagaattcatgcacacatcatctcctggcaactgaagatacactctcagcagaacaagaaataacccttaaggaactagcctcaagtctaaccttgccatggcctcattggttttaaccacacacacaattttagacaaataagcaaaaaaaaaatgagataatgaatcaaaacaacatataatggtatagtgtcatattagttatatatttaacagttattttcatcaccaatgatttttttttgcacgtggaaagttagtcacccgtgttcacataaagtcaaaatttttataatgtnnnnnnttcatctttattctatatgttcagtccccttccttcatttaaatcagccaatgattttgtcatgcccataaaaggagttgcttgagatggaattagagacttgcttgacaagggatgtgctacatagaactggaaggaagatgctnnnnnnttataagaagaaannnnnnatctca

SEQ ID NO: 2653 - DNA, 542 bp, Canis familiaris
  misc_feature (1)..(542): n = a or c or g or t
aaacatgagctaaagccaaacaatcccacagannaaggactggcaagtattcacagtgtcctttttagaaaagacccctttttatggagggctgccctcctctactacactgtttatcgagccagccaaatgtctttttgcgaactcttcaaagatattggaaaatttgtcaaggaccccaatacaagatgggattattgtgtacgggccaagaggggatggactgatacttctcagccagggtgcttcagtaaagatcaggtatacttggatggtatcctgcaaatcctccgatacagagagaccattgactttcatctactgactgctctggggaaggtctcttatgaagatgtggatcgcctaaaaggattggcagttattgaaaacatgagggtccctcatttcctgcaggatcatgaccgatacatggagcatttagagaaaatcatggaagtgaatgaactgactgacagggaactgaaagatcttatatattaatcagcattcttgcagacatagctaagctatacctctatgta

SEQ ID NO: 2654 - DNA, 695 bp, Canis familiaris
  misc_feature (1)..(695): n = a or c or g or t
gtactcagcacccctgcntgcagnntcagcttcttnntnntgaaaaccgggctttgatttaggttgatgagaatttccaagaatgccagatacctttccctttagcacgtttagagttttgcgtatttaattgtaaactgtactagtctatgtgggactgtacacattttatttcctttgtttcgatttagttggcttctgtttctaggtgaggagtttcttaaaagttcataacagtgccattgtctttctatgaacatagactagagaaacagtcctcttcttccatcacactactaatctgatggaaggtttgctcatttacattttcgagactcttctgtatatgtaaataacctcctctgcttgaacacagtattttccccatagcacttcattgctgatgtctgtctttggtgcctttcctggtcagcattctcagcctgtggcagtaaagagaaactttgtgctgcgtgaggacaaagctgctaaatctccttctatttttttaaaatcactaacattatattgcgacgagggaaagaaaaaaaagtctctatttaaatttgtttttttaaaattttcctcttcagttggtgtgtttttgggatgttttatttttagatggttacactgttagaacactattttcagaacctgaatgtaatttgtgtaataaagtgttttcagagcan

SEQ ID NO: 2655 - DNA, 393 bp, Canis familiaris
  misc_feature (1)..(393): n = a or c or g or t
cntggactaaacaggagcagggaagcctggggcctcccaggcagcccccggcctggaactcccaggcacccccccaagccagggcctcccagtacccccccaacctgggcctcccagcgaccgcccccccccccccagcctgggcctcccaggccctgtcccccagcccagggatcccatcctctagctgcttcctgcctggagccacccccaacaccggccaccagagggccctcctgctttcacggagctccctgaactcagagaaggtactggaaggtttggacgaaagctcaccacagtgcccccaccacccagccggtttccgggtccagaagccctgggacctgtgcggggcagctgttgggttttccatgctgactttgacttccc

SEQ ID NO: 2656 - DNA, 553 bp, Canis familiaris
  misc_feature (1)..(553): n = a or c or g or t
ccaactgttttcacagacgnnnnnnaccacatgttcatagncaaggangagtnctttgggcccatcatgatcatctctcggtttgctgacggcgatgtggacactgtgctgtctcgggccaacgccacagagttcggcctggcctccggcgtcttcaccagagacctcaacagagccctgtacgtcagcgacaggctggaggcaggcaccgtgtttgtcaacacatacaacaagacggatgtggccgctcccttcggaggcttcaagcagtccggctttggcaaagacctcggagaggtggccctgaacgagtacctgcgggtcaagacggttacttttgagtactgaagaaaggtctcctgagagaaagccccttccccacgatgtgttcttgccccccacaacccagcctgcctgcccaggggaggcctgggctgccccctgagtctcggcctctcaccccttcctgtgcatgtggcacctccatgtggaagccctcccacctgcacccgctgtctgatcacagtggcctctggctgagtgggaaagtggc

SEQ ID NO: 2657 - DNA, 617 bp, Canis familiaris
  misc_feature (1)..(617): n = a or c or g or t
gaccacgnnnggcttccggctggtnnagaagttcnngctnnnggtnngcggnnnnnccgcccaccgctatgacctgggagggctagtgatggtgaaggacaaccacgtcctggccgccggaggtgtggagaaggcagtgcaggcggcccggcaggtggctgacttcaccctgaaggtggaggtggagtgcagcagtctgcaggaggctgtggaggccgccaaggccggagcggacctcgtcctgctggacaacttcaggcctgaggagctgcaccccacggctgctgcgctgaaggcccagttccccggtgtgggcgtggaggccagcggaggcatcacgctggccaacctcccccagttctgtgggccccacatcgacgtcctctctctagggatgctgacccaggctgccccggcccttgacttctctctcaagctgtttcctgaaggggccacgcccatgtacaatgcccacaggtcctaaaggcaaagaggatgcagccaccagtgggatagcatggtttcttgggaccctcaaggttgcccctaagtatagtacacgactctcccggcactggcctgggctgcagtctggctctgccatctnnnnnttatgt

SEQ ID NO: 2658 - DNA, 617 bp, Canis familiaris
  misc_feature (1)..(617): n = a or c or g or t
ggattgcttaataantagtannnnnngacaannngnnntcaaagtaagagttagatctgtagctcacggtttccaccaaaattagntccagagggaagaaaccaaaacagttaagctacaaaattcattgaagaaaatacagggtattattagatctctggtgtgggaagctctgttttaaacataacacaaaacctaaaagatacaatacgggaagagatgttttaccaccaaaaattattgaaagtttatgtatgatggaaaacatcacagtacaacacaaatgtcagattgggagaaaatatttgcagcacttccaatattgatgagttaattacttcaggagcaaagcttgctttggggtccccagggcctgctccacagctgccggaagatcaagagtttttccaggtcatccagagctgttgtcaccagcatcaagccagggcatgtggaatcctgtctgtatcgtagtagaagaaataagatacatagaagagttcaataaacaggaactgtaatcttattagtaaaggacgctgagcagttatattatagcaggtgttatttgctggtatcatatgacttgtaatcaaatgataagggagactctgtga

SEQ ID NO: 2659 - DNA, 663 bp, Canis familiaris
  misc_feature (1)..(663): n = a or c or g or t
aatcccatgtgtgaacttcannagctnnnggcagaccaggaacttgctcnnngggccacccaccaagactggtactgacgtcccttttgactctaaactccctatgagccctttgtgatggtggctgtgtcacttctgccctgtggtgtttccgtgtcttacaactgcacagctcagggaaaggagtgctgggggtggaggagcaggtgggcagccttgaggcaccctgcccttccccccaggtccctctctccctgcagtttataaagtgagactgttcctagtctcacccagcaaccactgcccggcctcactccaggctgagggctcatgtctgctcctgaaccactgcaagcctgagaatctgtggaaggtcacttctcaactacagaaatttgagttttgaagaattggaattacttccttgctgttgttttttggcttaaatttttgtctttgaacttgaaatcttgaccctaagaaagaggagcaggagtgtcaggctcctcctggtctttccagtttagaaaaggcactgggccaggtagggaccacaggagccgaggtctgcctgcccctgtctttttttaccctcggttctgtgttacaagagttgctggagacagtttcagatgattattnnnnnngtaaatattgtacaaa

SEQ ID NO: 2660 - DNA, 679 bp, Canis familiaris
  misc_feature (1)..(679): n = a or c or g or t
catgagctggcccnnnagacggaaggctactcaggtgnngacatcagcatcattgtgnnnnnnncnctcatgcagcctgtcagaaaagttcagtcagcaacacacttcaaaaaggnntgtggcccttcccgcaccaaccctagcgttatgatcgatgacctcctgaccccatgctcaccaggggacccgggggccatggagatgacttggatggatgtccccggtgacaaactcctagagcctgtggtttgcatgtcggacatgctccggtctctggccaccactcggcccaccgtgaatgcagatgacctcttgaaagtgaagaaattctcagaggactttggacaggagagttaaaaatttcttcacttggtgatggtgaaggtgggaggtagattggggtaataaatccacggcactccccaggtcagtggccagacagggcactggggctcatcttaacgtcactacagcgtcccctctgctgtnnnnncgccagccggggagcataaaagaagggcctccctggccacaaaggcacagaagcacattcggcactgggtggaatactggttcttcctacttcctcctcctcctcctcctcttctggatgctcaccaactccttgtcctgcccctgtnnnntgttttgttttttaaacctttctttgttcccctaa

SEQ ID NO: 2661 - DNA, 592 bp, Canis familiaris
  misc_feature (1)..(592): n = a or c or g or t
acaaagcctgacanagcaactgctgacaagattaccttcagttttccagggctttcttcctcatctctgtctttgccacacttgttgctcttgtctggctcatcagttcttgcctgtctagaagaggaagcataaccaccaacttggatctgaaggtatccatactcagcttcatctcagccatctccttgctcctctgcctcgtcctatttctggcacaggtttactggcatgctaaggatgccttggagccagatctcctctggacctatcatattaattggtggagtgacttcttatacatgttttctgggatcatctccttcctcaactatatgactttcagctttctttcccttgatcgaaatgtcagtgcaattcccatagagaagtcaagactgggggttggtccagtgactacagtattacctgatgaagatggtggaaagttaagccctgaaaaggaatctccaactgaggaagtgaaaacagactcaagaatggaactgtgatgataataggaaaacccaactgcgcttgtcttaaaatggaggagagtctgagttggaaatgatggtgcagattctaggaa

SEQ ID NO: 2662 - DNA, 555 bp, Canis familiaris
  misc_feature (1)..(555): n = a or c or g or t
ctgtcaccnacaataagtttgtccagcccatctgtgttatgatctcctcctccgagttccagaaccggaccgactgctgggtgactggctggggggacatccaggaaaatcaggcactgccatccccctacgtcctccaggaagtgcaggtcggcatcataaacactgccatctgtaactacctctacgcacagccgactttccgccgtgacatctggggagacatggtttgtgctggcaaccccctcggtggccaggacgcctgctttggtgactcaggcggacccttggcctgtgagaagagagggctgtggattcaggttggaatcgtgggctggggatctggctgtggtaggcccaaccggcctggtgtctacaccaacgtcagtaggcacttcaagtggatcaggacgctcatggcccgcaacagcattcagaggccagccccctgcctgcagctgctcctccctctgctctggcttgcctccctcctgtagctggcctgagtccagcagagcccctgnnnnttggggccgtctgctgagccaggcccgg

SEQ ID NO: 2663 - DNA, 557 bp, Canis familiaris
  misc_feature (1)..(557): n = a or c or g or t
ttttgtctttacatttatttatttattcatgagagcgagagagagagagagagagaganncagagaggcagagtcagannnaggctccatacagggagcccaatgtgggacnnnatcccggatcccaggatcacgccctgagccgaaggcagatgcccatccgnnnngccacccaggtgtcaagaaatggtgtttaaagtgaaaacaaagcaagctaacctttagtatagagtcaagggccggatgatataaatagaaccccttcccctgtctggagtgtcttccctgggaggaggcaccaggagaggactgcctggcctttcgtatttatcaccccccccccttatctatgtaaaaatattgacaatatattgaaatacatcaatgttttgaaaaggtacaacttccagcaaccaaatccaactgttgatttggttccaaggaagtcctgctgtacagactttattgaaccttgctctttgcttcacacgttactcggaaacacacagaagcggctgtcacggtcgctgtaatgcctgcgtgatgctccatggtgt

SEQ ID NO: 2664 - DNA, 611 bp, Canis familiaris
  misc_feature (1)..(611): n = a or c or g or t
tgcaataaactgaaaagagccatgctgtctagtcttgaagtccctcatttaaacaggtcnagcaataggcgcctnnnagtgtcccgcctgaaaccaagcagtcacgtgatgtttcggtccagcccagagccccaagatcacagacggctatgtctggccagaagctcctcggttctccctcttcagagttccccaccctaagagaatgtcacctgaacagcccacggtgaagctgagaggccaggatggggtaagacagcaccagcagctgtgctgctacagggagtcattggtagtcaaagaaagatccctggtgtctccaacggacccggtgggcagagcttagagtggccaccttccctatagtgaggtgtgataggacatctgacttgccaccaaggtctttttgaccagacatatcctagctaattgatgtccaaacaccagaatgtgaggccaatcttctgagttaaacttttgacaagggaacaaacttaaaactgatgtatccgtcatgtagctagctgtagagcttgcaacttaatagcaacagctgcccaatgccatgtgaagtaacagactggtttttggtttatttcttccttcagttt

SEQ ID NO: 2665 - DNA, 484 bp, Canis familiaris
  misc_feature (1)..(484): n = a or c or g or t
gagtcaaaatttatgtncaatgcactttatactcaatggtgtctaaatgcctcagtcagtgcctaattgcacacacaaaaattagacgatctttctaatttaccataataaatgctggtggcatttctgttatttaaatacatctttggttttcttttcacgttttgttctgttttccagctaatgttctatgtaaagacatgtttacatgtctatgttaatgttctatgttaatgttctatgttaagatggaaggaaatgcaatccccaaagtttttttctaaccaacttgcagtagtgctagaagcagtatcttgaagtcaataaatgatggaatataatttttgaaattagaagatagtctcttaaagttttttatgatcaataaaataatcaacaaaaatcagcttattttaatcaatatcacaaaccaagggagtaatgagcaacccacagagctgccagagatgtctacagcctgact

SEQ ID NO: 2666 - DNA, 482 bp, Canis familiaris
  misc_feature (1)..(482): n = a or c or g or t
ctgnnngcgttggtgtagactngacccggnntnncaggatccagggatgggtgcctggggtcctggggagggggccagnnnangcccnnnttttgcagcagcgntgggaagggtctcggccagtcttgggggggggatccttgcccggcgggnnnntctgtgcccacaccttccttcccagcgcccggcgagatgccttagtctgcgggggcaggctggggtcccctttccccctgtgtcttatggacgtcctctggatcgtcccatccctggctggtgcctctcacagaagggggaccgtgggtccgggggcccaggaggctgaggacgcgtccaggggcctggagagacccgtgcccctcctcccccaaggagctcggggccactgggacctggttgcagcctctgagctgtggcatcgagaggggggagggggaggggctcccagggactcgtgctttcaggtgaccccccccccctgc

SEQ ID NO: 2667 - DNA, 76 bp, Canis familiaris
  misc_feature (1)..(76): n = a or c or g or t
acttcttnnncaagcacatgttgtacccatgccaccagaagcagggggtgttccttgatgtttctagttctaactg

SEQ ID NO: 2668 - DNA, 619 bp, Canis familiaris
  misc_feature (1)..(619): n = a or c or g or t
atgtatatatgaatacaaaattgaaggcctctanctcctggagtnatacaacttggcttgtttacctccacatgctgatgatgactattttttttttttaagttcaatgtggagacttgaaacttgaatgtcccttccaacttttatattaaaaataaaaagacaagaaaattgaagattgtttttcacctgtacaaggaatactaatggatcgtcttaaaattggtctaggaaaaaaccttgttgtgtgttatggacaattaactgttaaagttattgtaagttatctgtatttagcagagtattttcatcttgagtaatctgagctgaatttgaagactattaataagttatgtttggaagttttaacttcaatgaagtaattatttgctgtgaaagaaacaaacattgaattactaaacaaagatggtgcaatatctttgtttttttttttatgaggctcctgagaatcaacccaactgaagcatttcaattcacttgaatgagaannnnnntttagtatcaaaagagcccaagaagacactggtgtgaaaggtacaatctcagaggttggtcaattaccgtggcacacttactggtcactttgtacaatgtagat

SEQ ID NO: 2669 - DNA, 560 bp, Canis familiaris
  misc_feature (1)..(560): n = a or c or g or t
tccntgagcacctccagatgacagttnnngacacgcaactcagagttaatcctaacccgnagcattaactctcttgcactttccagcctgccctccacttgggtgagggcaaaaacccctcggacgaagaattccaagagtttacaataagagaggtgaatgccaagggtatgtggacacagcactgacaatcctttactacttcgattttgtacaggaggaactcaaggcttattgtgacactgctaagaataaaccccaggctcttctccctccagagccctactcttttagacttaaagttgcctctagtttaacaacatttcaaactaacatgtcccccccccacccatgaacttcagttataagatcttgtaccttgtaaaacgcaagctgtataaaagacctaaatataaagcctaacactataaaatctctagggaaaacataggagaaatttttggattgggcaaagatttcctagatagaacaccaaaagcaaaatctgtgaaagaaaaatgaaaaattggattttgttgaaatgtaaaactttgctcttt

SEQ ID NO: 2670 - DNA, 646 bp, Canis familiaris
  misc_feature (1)..(646): n = a or c or g or t
gcannagaaaggagaaaaggaacagatgtgaatgtgttcattaccatcnnnaccaccagagcctatccccaccnncgccaagtgtttcagaaataccgcaagtacagtaagcacgacatgaacaaagttctggatctggagatgaaaggtgacatcgagaaatgcctcacggctatcgtgaagtgtgccacaagcaaacctatgttctttgctgagaagcttcatgaggccatgaagggttctggaactcgtcataagacactgatcagaattatggtttcccgttcagaaattgacatgaatgatatcaaagcatgctaccagaagttgtatggtgtctctctctgccaagccatcctggatgaaaccaagggagattatgaaaaaatcctggtggctctctgcggagactaactttcctttgatgatcacaagcttcttgatcagaagactttttaatcatatcttttcattccatatcatagacttaaataggaaagttttctcagcaggaatacagtctagctaaatactttctaaaaaatatagcctataaattgtttttatatcgcaactccatgtaagtttttttaaaactatatttannnnnnaaatataaaacctcataaaagattgtcctaataac

SEQ ID NO: 2671 - DNA, 628 bp, Canis familiaris
  misc_feature (1)..(628): n = a or c or g or t
agtcccaaaccgttcccttcaatnnaatccaataactggctgcnnactaaggtcaattcggtacnnctgaggggctgagtaattgttagttcgaacgaaaattcaggcagttgccaaacgccatccaattgctacttccaggaaatgccagttgttacaattaccgaactgtcctgaccaacacacaattgttttgctgaagacagacgatcgtcaccaacaaccagccgcatgtaatcagtgtagtggtgcagcagtgggatccgtgacgagggtggcatcaggcgaggctgtctccggcagcaagctggcgggccattccgcagggtggcccatctgttgccaattcaggcaggggcacctctgatctgcccaatgcttgtgcttatgcagaaatttagccctgacatcgggcaggtccgattgctggactaaatccacatgtcagttcagtcaaagcaggcaaactctttgtgggcgcagaccctgccaggggggcttgtttcggtggtggcagaagggaagataggtcctctgggatctgggagtgggggttcagaaggagagggctgtgtaagaggctccccactggcacccctttgtttaattgctttgtgtgtgttgggga

SEQ ID NO: 2672 - DNA, 563 bp, Canis familiaris
  misc_feature (1)..(563): n = a or c or g or t
gacccacnntcatggggacgagttcctgcctgtgttggncagannatccgagcgggagacgggctacagnngagtgaatgagaggatgctgaacctcagggtgttgnnttcaggcccagaacctagcagcatgagccaccggcagttccagcccccacagcgggtacaacagacaaacattgccctgctgggccgggagaccgtggggaacaaggagcccacggggtacagccttaacaaccccagctacgtccggagcccctatgaccccgacatggacaatcggtacctgagcacctacaaccaagggtactttgagaatatccccaagggtctggaccgagaaggctggactcgaggtggcatccagccgcagaagcctggaggctatgccctcaaccagccagtcacccgcacggagcccactcccaaccgcatggagagccttcggcgcctgcacccccacgtgggcagacccctgacctctgcagaccccttctaccgagctgagtctcatagcagccgcttcacaacaccaaactgaacccgaggctgggtttgct

SEQ ID NO: 2673 - DNA, 606 bp, Canis familiaris
  misc_feature (1)..(606): n = a or c or g or t
ggacanctangcggtaaatgggatcgcgttccatcctgtccatggcanccttgcaactgtgggatctgatggtagattcagcttttngnacaaagatgccagnncaaaactaaaaacttcagaacagttagatcaacccatatcagcttgctgcttcaatcacaatngaaacatatttgcctatgcttccagctacgactggtccaagggacatgagttttataatccccaaaagaaaaactacattttcctgcgtaatgcggctgaagagctaaaacccaggaataagaagtagtggcgagagacttctgggttgtccagagttgttttctctccactctgcctcgtctttgtacggatctgggtcccagtgttggtaggttgtcagccctggacatggatttcaagccctggagaaaacgacgtcttgaccagcagtcaggagcccagacggccacagtgactgtccgtctctccattccactgcccgttacaggttgcttctgtaactccacagggactgaaatcatatagaagttagattcctgtgggcgactgccaggtatctgcagtgcttcattcagccacgtacgtgttagagagcat

SEQ ID NO: 2674 - DNA, 616 bp, Canis familiaris
  misc_feature (1)..(616): n = a or c or g or t
tgaaggtatttnggntctgttttcctttaannnnntcactttttaaaaaacatgggtccactgttaaaccaaanatatgtatgtgcagctttacattttattttacatgaagcacgtgatnannaaaacttattttctnntcnagcctcaggacctannngangagaagttggggggggggtttgtggggggttttttttagctcaagttgtgcatgaattactgaacatcttctctgcttttcttcatgaaagatacttgctttgatactcttcactgaaaattgatgaaaacatttctcatcccccttttgtgccttttttaattttgccaaccatgtttatagaaagaacattactagagagacattttgcaaattaaaacacattcatacggacaaagcagtcctctaaaaatacaagtctacaaaaactttgtcgtcttattttgttgtaattttaataagatcaacccagaatcagctgagaagaacgaaacgtgtatattagcaaagtactattggagactgagtgtgatcagatgctccagttgactgttgctcagtgtggtttttatcagctcttaagagttccgtccagcataatattgagagcga

SEQ ID NO: 2675 - DNA, 701 bp, Canis familiaris
  misc_feature (1)..(701): n = a or c or g or t
aagatcttcntnnagaccaagctttcnngtcccaactctngaaagagtatgccaagnnagacagccgatacatnnngagtgacaactttacgatatgcatnnnnaccatcacagcttgcctttggggaccacttagcctgtgggtggtgattgcctttctccgccagcagcccctgcgcttcatcttacaacttgtggtctctgtgggtcagatctatggggatgtgctctatttcctaacagagcaccgggacggattccagcatggggaggtgggccacccgctctacttctggttttactttgtcttcatgaacggcttgtggctggtgctacctggaatcctcgtgctagattctgtaaagcagcttgctcatgcccagagcgtgctggatgccaaaggcacaaaagccaagagcaagtagaactaatcagtagtaagctgggcttgaacattggctgatgaggaaccctccaccaggaagaagaatccagtccatactcccacaggtcggaggaacaaagcaaattgatctgtcaaactcaagctaatgggtaaggaccagaaggaccaaaggcaggggcaagaaaggagttgtgtggagctactgccaggagccactgggacaaaggtgcagaagaacctaggagggtcatgatggtggcagtttttaaaatcaggaaataaaagatcnnnccnn

SEQ ID NO: 2676 - DNA, 579 bp, Canis familiaris
  misc_feature (1)..(579): n = a or c or g or t
atttgatggtgtacaanctgctnnagatgacagagtgcttgtaatgggtgcaactaatannccacaagagcttgatgaggctgtnctcaggcgtttcatcaaacgggtatatgtgtctttgccaaatgaggagacacgactacttttacttaaaaatctattatgtaaacaaggaagcccattgacccaaaaagaactagcacaacttgctagaatgaccgatgggtattcaggaagtgatctaacagctttggcaaaagatgcagcattgggtcctatccgagaactgaaaccagaacaagtaaagaatatgtctgccagtgagatgagaaatattcgattatctgacttcactgaatccttgaaaaagataaagcgcagcgtgagccctcaaaccttagaagcatacatacgttggaacaaggactttggcgataccactgtttaaggaaagacctttnnnnnctgcagaacattttgcttttgaagagagaaacaccatctttattgaatagttatcagctacagaaattcagcctaagtttacaggacttttcnnnnncttacaattacttgtac

SEQ ID NO: 2677 - DNA, 454 bp, Canis familiaris
  misc_feature (1)..(454): n = a or c or g or t
ggggcaccatggccttgtcaggannnnaaaaccgacgnntttccatcaaagcactctatgtaccaataacgtgcatgcatcctaccatgtaatcgcagcgtgaatcggttaattttggaaccttgcctactttagaaaacggggacgtgtgcantagccgctagcacgcagcatgtgtgaagaccagcctggactcatcatcctcgccatgccctggacactgggtgcaagcaccagaagcacttgccagtggccgtttctttatttttagccctgtccctggtcgggccttgtgcacggagtggactccttcgacgcttctgcacctcctgcacctcctgcacctccattctcttacaaaagcctccagatgatttacacctagttggtaatgctgacctctgggctgtcactgtttgaaaccgtgtattcctttttttccggatctctattg

SEQ ID NO: 2678 - DNA, 627 bp, Canis familiaris
  misc_feature (1)..(627): n = a or c or g or t
ctacaaaaatannactaaannngnnaattcttctgtttacaactgatgttttaagagaatccttttattaantagtcggcattgatgtggtcattaatgtgatgtaatatatgttattgagaaggaatattaacttcaacaataactttacaacagtacaatcatggagagacctgtgtgcctgcaactggtgtttgttgcatttctgagcccacttgtattcatgagaaacaaaaatattattgaatattgtaagctaccagtattttaacattttatgaaaagtttgggactttatcaacagaggatattgaaaatatatgtacttttactttagtcaaattatttttcattgtctgacctcttagttttatgtatttgaaatcttatgaattagggatatctatataagcatatagatatatagatatttaaaacataatgataatgtaattcagcaacatgattcaacaattaaattttcttttcaggacaagatatagttaagtgcatcaaatttataagttactttgatggtaaatgctctaaaaaaaatatttaagctacttcaattctgtacctccattttccccacaggacacacaaaatgtgatgttatattaaccc

SEQ ID NO: 2679 - DNA, 624 bp, Canis familiaris
  misc_feature (1)..(624): n = a or c or g or t
gagggcacgngcangaattggtgtttactggnngnngggccatccttnnaatgtaggcattaggcttcctgggcggcagaccaaccaaagagcagaaattcatgcagcctgcaaagccatcgagcaagcaaaggcgcaaaacattaagaaattagttctgtatacggacagtatgtttactataaatggtatcactaattgggttcaaggttggaagaagaatgggtggaaaacaagcacagggaaagaggtgatcaacaaggaggactttgtggccctggagcagctcacccagggcatggacatccagtggatgcatgttcctggtcattcgggatttacaggcaatgaagaagctgacagattagcaagagaaggagctaagcaatctgaagactgaacgaaatgattttaattcttggaaaaacttgattggcagcatcgagtctcaggaggttcgagttgacttgtaccttcccgtggattagagcgaggcagtgctctcctggtggctgcagcccacgcccgggcccccgccgtagcagagggagtgcagcccggggcttacctggctggcacccgtgtacaagacaagcctgcacgtagccctggctcttgatcttt

SEQ ID NO: 2680 - DNA, 501 bp, Canis familiaris
  misc_feature (1)..(501): n = a or c or g or t
ctcgaccgnngcacagctgcactgncngcancntatgcccagggtggagtngagttctatgagaagattttgtcgggcaacatagcnctgcgcagtctcttgggcangcgtggagagcagctgtatacgcccagtgggaacatcgttcccagacactggtttcgcatcaaacatttaccctacacaacccgccgggattctgtgctgcagatgtggagggcaacactcaacccaggccactcctgagggactcatcacaaggacagatgcagctcctgcaagcaccaccctgatgttgactctgggggctctcggtgcctctggacccatggccacatgtcagtgaatcatagactttggaattaaacagcctagattttaccccagcccatcgtcccagtgaccttgagcaagtcccttttaaagctgagccttggtttcctcaggtgtaaaatggggatgcttaaattacctggcaggatttgggggttgcgtgagcta

SEQ ID NO: 2681 - DNA, 549 bp, Canis familiaris
  misc_feature (1)..(549): n = a or c or g or t
gcnnccaccagatgcccgttccagttcccattctggccgagaggttgtcatgagggtcaccacggtgtgaaactgaattccaggagcagggatcttgagtcgatgcattggccagaaatatgctgtcatggctgctggaggtaccaccaggacaaggtgtttggggcaccctgcccctgccactgaggatctctgtgggcagcctcaagctggagacattgtctggcctctactacccattgggtagagacacctggatgacattccagcccccgccgatagctcctcacactcatcctggggcagtcagtgggcaggtggggagaacatcttttcttccctagagaaccgtccttacctcagctcctagggcctccagccccccagctccaccatggtgacttggtgaagggggaccaatgccagaagaaagggattgtagaccctccattccccaccccatggccacagggcagctggcaataagactagtatacattgacctcccgttccctgcatgagggcggggggggcacctccccctgctcc

SEQ ID NO: 2682 - DNA, 462 bp, Canis familiaris
  misc_feature (1)..(462): n = a or c or g or t
cccagcccatccagttcatttcctccttttcctcccnnnnnangntgtgtnnnnnatccctgaggagnngaagaagaaaatgannntctcnncagntgtcccatttttttaagactgctttaaaaaaaannaaagaannnaagnaaaagaaaaagaaaatctaatctgctgtgcttgaatgccannnggtacaaaggaaaactatcatggagatattatgcaaattcccagatttgaagacaaaaatattctaattctaaccagagcaagcttttttattttttatacaggggaatattttattcaaggtaaaattctaaagaaaatataattgttttttatcttttctacagcaaatttataattttaagattccttttcttgtttatcggcagttgtnnnnnatccttgtggcacatttttttttaattttgtaaaggtgaaaaagcttttatgagctca

SEQ ID NO: 2683 - DNA, 593 bp, Canis familiaris
  misc_feature (1)..(593): n = a or c or g or t
tctgtctgtcactctatctgccagcnncttcagctaaatactttaagaggggtgaggnnagagagaaattcataacaaatcagactaccagaaaaaacaatgtttgggaagagaggaaaacagggtgatcaggcttttactcggattcctgatcaagtcagcctcttttccatttccaacaaaatctacagcttatgcccaagggagagcaaagacaaaacctaccagtaccatttgaccctttcagctccctagctagtttattcattagatcgtgtcgagggtctgattctaccaagaccaactctccgtgtggggtagccctaactgtgcaagcagcattggctgctgggacctaactccgggtgctgagataagcaatcagctctagccttctgccttaagatgcactctactgggggcctcctggcgtagttaagagcgctgcccgtggtcggcgaccaaatcttccctcagcaactttcagctttacggaagagctcagttaaggtgaggggggcacactcctaaattgctggatgactcaactttggatttcctctcccctttcacatggatttcatgtatcttta

SEQ ID NO: 2684 - DNA, 534 bp, Canis familiaris
  misc_feature (1)..(534): n = a or c or g or t
tctcagaaatctnnntntacnagtcaattgtacagtgttgtttctcttgcaaatcatatttttgttttagaaagggattagatcttttcatgagggtgagaacagttttatcagttttcttttaaatggaatgctttgaaaagaatgtcactaatgccatgccatttaaagtattttttagattgagttttaaagtcaatggggattattggttctctttatatataaacactgtaccaagctttgcagatcttttcaaacatacatttttgaagttttattttcagagattgcacatttgaaaaccagtcttttttccataatgtttcctttatttgaacaattcacagagggccaattcaaacatacccacatataaggttctttaagaaaatagaataaattggcttcttggtgttagctcagtgagctggcaaagtaccaatgtatttgtatttgctttcttcaaatactcttggttcctgccactgtccctaaattgtcaaatttgggagggatttttaaaaattccac

SEQ ID NO: 2685 - DNA, 585 bp, Canis familiaris
  misc_feature (1)..(585): n = a or c or g or t
tgcagatgctgtcgcgcaagctcacgctcaaggccgaggcnctgcacgcgcgcatccagcagaacctggaccagctgcgggaagagctcagcgcttttgcgggcgccggtgctgacggcgcggatgagggggcnnaccccgacccccagatgctgtcccaggaggtgcaccagcgactccaggccttccgccacgacaccttcctgcagatcgccgacttcacccgtgccatcgaccaggagacccaggaggtccagttgcagctggccccgcccccgccaggtcacagtgccttcgccccagagtttctccaagctgacagcagcgaggcccggagcaagctgcaggcccgtctccaagacctatgggaggacataaactacagccttcatgaccttggtctcagtcatctagaggagccctgagggtctacttgtccaggctcactgccctgctccttgtctgagcccaggatctgagcctctggctggctctgtccttgacagtggcctgtcgggcagagggtggagggccctgcacaggataggcgaggccgccaaagggactgttgtccctggcatatcc

SEQ ID NO: 2686 - DNA, 509 bp, Canis familiaris
  misc_feature (1)..(509): n = a or c or g or t
aaataagaacttttaaaaagtgacttcttagaatttgccaggactttccnnnnnnttctttttgcctgttgtagagctgcagccacgtgactgttgtggatagagcagtgaccatcacatcttcgatgaaaatttgactcaaacacctcccaagaactataaaaccatatcagtgtactgtagcctcttaatttaaactttccagaaaactctggaagcttttttagacagaattgaaagtgagtataacctgggggagaactaantcttctgtttctggtttaaaaagaaataattggctgtactttttaggcaagtgtggaaaatggcatgataatncnannacaacnnntcagtatannngtaannaaaaaattaagttgaaagaatggtataatgaatncttannnnngccctttnnnnncgnttnnncannngtnnnaatatttttttccccnnnnnnnnnnnnnnnntnnncnnnnnntatgtttnnngttgtttacctttgg

SEQ ID NO: 2687 - DNA, 518 bp, Canis familiaris
  misc_feature (1)..(518): n = a or c or g or t
gttgaccatctagaatggatggagtgatgcttctttggcnngccagaacactggttcctggnngacaacctagaatgtcagacttctggttgacttaagacgtaggcattctctaatgtgaagctcctgacagaatcatctagaaagataggggattcttattttgcattctagaattctgggcagccctccagcatgttgatttttttcactggcagttcagaatgttgtgctcttgattgctgatccaaaatagtggctggtatgccagatcagtcttgctctgaatgcctagaatggtaatttgattcattttcctgttcagtgagatacccccaaagcaggagaatctacagcctaaccagagtgcattgcctgcctctgtgcctgccccaaggacttagggggcagagtgttcttcctgggatgctgactcagaccctggtccaaggagatagaacaggtgggctttttccaggtcattggttggaggccaccagagctctgttgccatcttt

SEQ ID NO: 2688 - DNA, 606 bp, Canis familiaris
  misc_feature (1)..(606): n = a or c or g or t
gagnnnncacagccannnggtgtgtnnactgcgctgggccccagatnnacgacatttggccagcggtggcaacgacaacttggtcaatgtgtggnntagtgctcctggagagggtggctgggtgcccctgcagacattcacccagcaccaaggggcagtcaaggctgtagcttggtgtccgtggcagtccaatgtcctggcaactggagggggcaccagtgaccgacacattcgcatctggaatgtctgctctggggcctgcctgagtgccgtggatgctcaatcccaggtgtgctccatcctctggtctccccactacaaggagctcatctctggccatggctttgcccagaaccagttggttatttggaaatacccaaccatggccaaggtggctgagcttaaaggtcacactgcccgggtactcagcctgaccatgagcccggacggggccactgtggcctcagcagccgcagatgagaccctgcggctatggcgctgctttgagttggatcctgcgcggcggcgggaacgggagaaggccagcgcggccaagagcagcctcatccaccaaggcatcnnnnnnggaccaactcattatcccag

SEQ ID NO: 2689 - DNA, 660 bp, Canis familiaris
  misc_feature (1)..(660): n = a or c or g or t
ctgcatgcactttcactgcacccaatgccgccancagnnctgcagcggctgctacaatgccttttacgccaagaataaatgtccagaccctaactgcagggtgaaaaagtccctgcatggccaccacccacgagactgcctcttttacctgcgggactggactgctctccggctccagaagctgctacaggacaataatgtcatgttcaacacagaacccccagcaggggcccgggcagttcctggcggtggctgccgagtgatggagcagaaggaagtccctaatgggttccgggatgaagcttgtggcaaggagactccagctggccatgctggcctctgccaggcacactacaaagagtatcttgtgagcctcatcaacgcgcactcactggacccagccaccctatatgaggtggaggagctggagacggctgctgagcgctacctgcacgtgcgccctcagccagtggcaggggaggatgcccctgcctaccatgcccgcttgttacagaagctgatggaagaggtgcccttgggacagagtatccctcgcaggaggaagtagtggggtggaggggggcaaggatcctcatgagtgtctcaaggccgaacctcctcaggaacagctccagcaccaataaagaggcatctccnnnn

SEQ ID NO: 2690 - DNA, 584 bp, Canis familiaris
  misc_feature (1)..(584): n = a or c or g or t
ctnatcaaaaacgaagacattttattnnaaattttagnttgccggaaaaaaaaaagtgttttacagatgaaggaatgttttatagtaatttaattggctcttnnngctgaattctttcttggttagaagtgtgggcagntngccagattaaaatgaaggaactttccattgtcttagtagcaccgctcagctgtccttgtaaaacagtgaacacacgctctccagttctagtaaccctgggtgtttatcatggtaagagaaactcaagctattgcatgattagcctcctctttggcaagggaaccccacacaaaggagacaacaagcctgcaccgcctctttttcccgggtagtctgtggttgtaattcagcatgtttcgcagagtaaatctgtcgtgacttcgcttttgggttctgtgtcattggtttctgacgcttctataaacatgcacacaagtggatgaaacggcacctctggctgctgcattgccatagactataacatatgcctacttttctcaaatgctttatttctagtttctcttagttctgctctaacctagtcctttctttccagcaaaagc

SEQ ID NO: 2691 - DNA, 563 bp, Canis familiaris
  misc_feature (1)..(563): n = a or c or g or t
cttccttcccctcaggcacctatcccttccctccctagnnggcccaggggcttccatgagaaccttggaagttccttgggggccttgcccagggacctaggactgcccaggcttcaagctgttcccttacaggcctggactccaccttgctcccccaaacctgagttgcctgcccttttcctgtcaggggtcagcatggtccagtcctgggtggagaaggctgacgctgtgggggcctggctcagggcaggcgtaggagccggggcaccccagtgccacccccatgccacccccacccaggtggtaccaacctggttggggaggggcagccttgagtcctgtgcttggtccgtgatcctgaggtctaggcaggacttgcagggccgccattcccccctgctcctcaccccccacccccgcctgtgcctgctttgcaacccctttgcttgggccacggtgtctctgcattgcttgcctctttgcctttacctctttttttcctccaccccagcacatgtggggtcttggcccccaggctgtgagctccttgggggcaggccctc

SEQ ID NO: 2692 - DNA, 571 bp, Canis familiaris
  misc_feature (1)..(571): n = a or c or g or t
gagcntgtgtgaaatcaactgatcattttngnaagnagcagcttgtacntggtcagggagtgttttctagaaagggcatnnaacaaggtgaaaataaagtgagaacccatcatagacagggctggggcccccaggatgacctggttctttcctagatgcggtgatggggatcgagaactgggagtccaccctcattaatccgtgactccacttctcacatcaaatcagtgtgtattggccgagtgcccatcggtcaagacctggcacgggtctatccatttcaatttgagagatgaccttggtgtgggttgagtgacccatcactccaaatgacgctgtgtagagagggtaagttggaagagaggctctccgggggcagttcctttgggatggaaaggtagccacggcctaagccaaatcgaggcgaggacccccaaaagagagacctagtccttgtgatttgtttctgctgcctgtgtttcctgttgtcagtgctaagtgtgtgtttgttttgcaatcatgaaccgaannnnnnaaagacgcatgagnnnttgtagtcctatgtctggtg

SEQ ID NO: 2693 - DNA, 621 bp, Canis familiaris
  misc_feature (1)..(621): n = a or c or g or t
ctcatccanncagtgacccgacgattttccactgagtttgagctgcagcagctnnagcaattcaannnaaacaacatggacacgggcttcggctcaggcacccgggctctggagcaagccctggagaagaccaaagcaaacatcaagtgggtgaaagaaaacaaggaggcagtactccagtggttcagagaaaacagccaatagtccttggtccttaccatcacctggcccccacgggagatgcctgtatgtgcctgtccctgtggcccacagcaggaccccatgtcggaccctgaggcaatggtgtcctcccctcagggacaaagtctctggcccatgttttctccactctgcccatgggggccagtccagttcccaatggccagactgtccaagcacctcccaagccgctgcccctcatgccaacccctaccccaggactggcctggtgtctgtcacccagggccctggggctgatctcagggaagcccagctctagggccagatgagcagaagcccttgatggacgatggatggccttaggggagcagccctgtgccctctctcacctttccatagagatcctgaacctgaagaatcaacaggggacaagatctatat

SEQ ID NO: 2694 - DNA, 506 bp, Canis familiaris
  misc_feature (1)..(506): n = a or c or g or t
gtggccangtgaatggccccagagnagtctgcttcattcctgtggnnaggaggttggtgactgaaacgttcacacagggctcctcggtagacccacagaagctcttagcttcctcggggtccgtggaattgttgaatcttaattgtttttaatgtacaagttttatataaataataaagaactccttattttatattacatctaatggttcaagtgttggtcttggagagagaagatggaccctgaagaacattccagtaatgccgtggcagcgtggagagcctctgagtggttgtgtctgcagtactgttgtggaagattgacctttgctgttgtatgtaaagtttaaatagcttctgttgtgactttgagccagtgacttcttatttatctgatcttttcacggaagtggcagtgaacagtgtgagtcttcattctggtgactgtaaccaatatcatcttgnnaaattaatggtttgtacaattactaagttgtataaatttgt

SEQ ID NO: 2695 - DNA, 607 bp, Canis familiaris
  misc_feature (1)..(607): n = a or c or g or t
tctctgccccaagcgtgggctcccgctctgccagtggtacgaggaaacagtgaagccggagtaatctgaatggacacttcatagtgagaaaaggatctatttcctcaccttccaaagtagaatttggctttcaaaaatgtttcaagattttagtgaattccaccaagtaactaagtaaaagctgcaaattcatcatcttaatttacttatcactcaacactccttgctaatccaataaatgcagataagcctatatcctaccatgacttttaaaatatttttttattttaaatcatataaagatgatatttatgtatgtttaatatatggggcattattgtatattatccatgaaaaaagagcatacacattaggatcaaacagaaatctaggattgcctggaaaatcagaacttatgggttaggagtaagattaaaatcaaagccgatacgcatattgtgaaatatttcatcattggatatttatatgaagacattcacttttatctgctccttatcagtcttgctctcgtgttgtccgatgggttagatgtggattatactttgtgggggatgtaccttacnnnnnncaaatgctgtgaaaaaac

SEQ ID NO: 2696 - DNA, 586 bp, Canis familiaris
taccagcgctgaccctgaagtacccacaccctctgttcaatcagagccacggcccctcatgtggccaaagctgcatctggtctttttagcctccgaaaagggctccggccctcctccacccacttcttctctagagaacattaggagatggatttgtgaccgtcattgcagcctgttcattgtgagacaccccatcttattcttgggtttctctgagaaaactccccgctgggttggagacagacctcccaaccttggtgaagacaaaagactgctctgctggacgtttcaaaactgaaggtaacacaagatgacactgtgaccctcgccagcaaaggccagacattcttcaaagggaagtatctcaaagccagcaattggtactgaagcttaggacattggtagagtgactgaaggcatctccactgaccagggtcaagcagcagtataggcaaacacactccccagccagaccctcccatgagcatggcaagctcacagcacctccagagtgatttcactctaaaacatgcctgaaccacctgaggacatgaccaccttccttctgccccatgatagtgggagt

SEQ ID NO: 2697 - DNA, 536 bp, Canis familiaris
  misc_feature (1)..(536): n = a or c or g or t
accccaaaccnncntagctcacggtcacaagaactnntgnntcaatgcactganctgagcaggnnnncttacgtcatcctcagaatgacannngattcctgtcacgaggcctgattnnnaggataatctgccaaatgtcaaagtnnaacccagtgaggattcatggctacaaatggggaacannctgagagagagagagaacaagagagagggccaagagcgcctcggcgtctcccttgggccctggtgagcaagctccccctctccatggtgggtgtcatgggatgggcccaggggtgaccccttgagggattcactcaagacagaagccatgggcacaaattgaggccttggtggctttgagggtctcctggacctgaaaccagacaaatcagggggnnngggggcaactccctnnnagcacgtgacccaggcaagcagaacagtcccagtgcacaccgaannngcatcccttcccttctccacccagaactggaaaggacagaaacacaanctcggccttggggaactgtttg

SEQ ID NO: 2698 - DNA, 571 bp, Canis familiaris
  misc_feature (1)..(571): n = a or c or g or t
aactgaatctatggctttaaataaattaagaanntaaatnctctagcttaaatgtaaatgaagtagtttccccactngaaccattgcctattgtgttcctagaaccttctagaacactctactgcgtaccctctggttaggagacgcagccaccacaactcctcagatgacactgttttgaataaattttaaaatccttactgttcaaagttgtctggggttccgttttacagcataaaacctaaaagttaaaagcaggcatgttttttaatcttgcttcatatccacatttatagagaatttttaaagtaaaatggaagcaagtccaacttctcttagacacttgggaatctgacacacttacaaacctttttaaaaatataacttctcttcttgaatattattttctctgaagggcaaaaaaaaattttttttctaatctcctgctagatcgtgcaaatgagggaaaagcattacttgtctctcctctcttcttccctctgattcttttttcagtcagttttgttcccaggttcatataacataacttccctttcacaagcaacagagn

SEQ ID NO: 2699 - DNA, 467 bp, Canis familiaris
  misc_feature (1)..(467): n = a or c or g or t
gctttctctatcaagagacgagtgctggacagagatnnaaagcaagaagccaagagcttcagggctcagccataggcctcacaggctctcggatttcctgcagagtgtgacagtgtggctgcattgaacaggaatcacaccctttcattggcgaggcaggnnctccatccaaaatggaggatgtgcacaggcatgacgggcctttgacggtgaattcttcagatggtcaggaaaatgaagcatctgaccacagaatgagaatactatgtgtcttactctgacttgataagaacacactaaacatggatccagccaccgactcaaggaaattgaccatcttccaggacttgtactgtttggggtcagaaggtgatattaatgaaaaagatacttgcttccatccatctgggggagaatacctaacaaaacaaaaaccaatgatatgttctccctccctgttccagtaa

SEQ ID NO: 2700 - DNA, 628 bp, Canis familiaris
  misc_feature (1)..(628): n = a or c or g or t
acacacattagatcaaaagaagaatgaaatcctgtctgactttgagaccatgaaacttgcagnnatgcangcctatgacccagagatcaacaaactcaacactatcttgcaggaacaacgaatggcctttaacattgccgaggctttcaaagacgtgtcagaacccatcatatttctgcaacagatgcaggagttcagggagaaaataaaagtaatcaaggagactcctttacctccctctaacttgcccaccagtcctttaatgaagaactttgataccagtcagtgggaagacataaaattagtagatgtggataaactttccttgcctcaagacactggcacattcattagcaagattccctggagcttttatcagttgtttgtggtggtccttctgttcagccttcttgttttctttggtcccactatatttctagaaggatctttatttgatgaactcacaatttggaaagaccatctctcaaacttcagttcctatctgactaaatcagctgattttgtagaacaatcaatgttttactgggaacaggtgatggacgggtttttcattttcagtgaaaaatttaagaattttatgttggtggtgctgaacaatgtggcagac

SEQ ID NO: 2701 - DNA, 480 bp, Canis familiaris
  misc_feature (1)..(480): n = a or c or g or t
ccaaaagagacatctgatcagaccccttagaccacctccatccccggattccggccccaaagccggccatcccnnnnngggatgccttctttccattctcctgnaggtcggggaccacacacttgggcttcccagtcttgccctagctcccttcctgggggctggggaaccctcaggctagggaactcccatatcttgctcttcacactccaaagtgggcatccaggaactctgcgccagggattaacttatttttgccaacatgaagagccttaggtcccctgcccgctgatgtgcagatccagactcatctagatgtaggcccctcacctctgcctcaggtctcccagggatctggccaatgaaaggggagggacggtggttggtggaggcagccctcacctttgctgccctcagccctccgccagctgcgttctcgcagttctccgtggctccatccnntctgtgtgtcggggaggg

SEQ ID NO: 2702 - DNA, 62 bp, Canis familiaris
  misc_feature (1)..(62): n = a or c or g or t
annnnctccatggagcnnanggaggaaggnnnnngnnnnnggctnnncgatgccatnnncga

SEQ ID NO: 2703 - DNA, 529 bp, Canis familiaris
  misc_feature (1)..(529): n = a or c or g or t
gcntagtctcttccagtgctcccaatagaagacacatttctctctccctctcacnttcgtcccntgccattctcccatatccttccctctctctgcacggnnaacanatcattgacagagactgctacccaaacaggacctcgctatcccaaatctccacatcctcatatctcatgggagagtgaaggcattgtttgaaagaagactgaagaaaagacctgcctagaacaaatggggagttacatattttgctaggaccaccaatagaagttcagctacaacccaaagagggaacagtccagtcttcccatcagcacgggtgatacctttctcttagctggcatgcctcaaaggccagctatgtgatacaagagaagggagaatttttcttcttaatgatcttctttgggaagtttttgtggcctttatttaatttctatctacatacttgggtgcctatatgaaatacaggataatgacagcatttttactttttttaaaaaagcaagtgcatgttcacacatacatc

SEQ ID NO: 2704 - DNA, 573 bp, Canis familiaris
  misc_feature (1)..(573): n = a or c or g or t
gtctctctatcnancttctattccnnagcattcctcgtccnggtcattgatgccacaggagttttgannaacagaagcctattattttataggctgtgcttcagtttgggtttccctgttgttgcttcatgatcacgatggtacacagacacccctcctctggccggactgacaaagtgaagacccccaaatgcacctgggaatttctgagtcttgaaagggcttcttcccgtgtgcccacccaccagctgtggctacagcaggtccctgccactgccagtcttcctggccatgctggtggcctggggatccacttggagaagccccccgggcctgagagaatgcatcaccctgcgctcttccatcggcttctctggaaaggcctgggctcctggcagagctccatggccctgcttccctactggcatttccttttatccctcaaatctcatctgaagagaaatcccaaacccagagctgctgtgtcctgagaaagagcctggaagatgtcctgtggctgtgcctgcagtggcctcggaaggacactggctgcagcaggcccagccttctcat

SEQ ID NO: 2705 - DNA, 117 bp, Canis familiaris
  misc_feature (1)..(117): n = a or c or g or t
ccatccgttgnnncaagagtatctggaatgggaccagggaactactatgtgtgttttcacagttcnnngacaaccnnngagagtagagaancccttcctctcactccccagggccgg

SEQ ID NO: 2706 - DNA, 633 bp, Canis familiaris
  misc_feature (1)..(633): n = a or c or g or t
tgttaaccatttnnagccatactttgacagccatgggtcntnntncgatttatactggatcaatgatacatacgaacataaccgttgactctcttgagttaataattgtaggtcaatcaccattcatgttttgttccaaaattaagtgacaggtgttcnttaactctttaaaattaaatgggctatatgaagttcacatagctagaaagaaagaataaccgaggaaacgtggaatttggaaacattaatattttatatttaaagccataattgttcaatactgtatccaaatatgagctcgataggtccctctcagatagggttatgttagttctttcctttattgggcttaaagacactgccttaatttttccttctttaaccaaattctgagcaatctttaagtattgaaaaataactttagtcagtgaaactacaaagggtaatgattcaaaaggaacaaaaaaataatttcttcctcaaataggaattctctaaaaaatttctggctaaagtataacatcccattttttacacaatattggtactgaatataaatctgcttttttcttcctgttctttatctttgttgttgagatacttgcataaatgtcttttgcttttattaagtgc

SEQ ID NO: 2707 - DNA, 609 bp, Canis familiaris
  misc_feature (1)..(609): n = a or c or g or t
actctgcccagcggctcagatnnaaacccgtgtgccnnncagcacaggggactgccacgggcgccagccgtggcccccggtggccgtgcctggagaaggcgtggggctggtatgggcgggagtgggtcccctctgcatgcatgtgacagcctgtgacccagagctacagcccacccagcccgggcctttccctccggtggcggagctggtcatccttggaggtgggacgggggtgggaggcgaggagaccaggccaacgcagttccttccatttcaggttctctagcaaaatcacaaataaaatgacacaggatccccctccgcccccgagggtgctcactgtcgggtccctggctcgggggagccttgcccctccaaggggatgcactcacctcactaggcctagttagcaggcatccccatccccgtttggagtatttatttcccatacaatgatgagttctcgaagggcgtcctgctgggtcagagacccttccatgtgggagtgaggatattttgacgtgactagagcagctccctaaggctctgcgtgttacacttgaggattttagaaatgtgctttattttccttcctttgacccatgagtg

SEQ ID NO: 2708 - DNA, 674 bp, Canis familiaris
  misc_feature (1)..(674): n = a or c or g or t
atgatggngnntgggctgagttagaaagggtgcattcagcccataggggcagctgtggtagagccgtggccagttggtgccacatgagaatgccgtaggcccagtattgccaaatagtctcaaatttttttcccttggagaagccagaagtccagacttttatatgaaatcttatagtttttaaatattggcaacagatgatttttttaaaacactgtgcaggccaaaagggcaaaaccgacatgtcagtaggggaaatctggcccactgtggccagtttgcatcctctgatgtaagaacatgcattccttgtcctttcagtcttgagacgactcctccagggttgtttgtccctctgcagggccggatccatagggtctgacccacagagcaggctcttgcagggctagggacgggggaggcagcctctcagagctgtcggtggcagggatcatgaggctgcctgccccagccttgcagcattgtcaggctgaatggggcaaatgcggaagagttggaacccaccagcagctgctctgtggagcaaagatccaatgaagagaggtggactcacctcgggttcctgggttcgcccatcgtcccgtcctccatgacaacctactgacccctggattacccccagctcctgggatcatttgaagcttggaatggca

SEQ ID NO: 2709 - DNA, 647 bp, Canis familiaris
  misc_feature (1)..(647): n = a or c or g or t
cattcccatttnnagcagcttgtgtccatgcagaccctgtgcccttggggtgtgnntcagggacccccacttgcctacagagctgtgtgcagggccccagactatgctgggaagtggctgctgggcctgggcccnntctttgcccatcacaggccccaccactctttcctgggctgggttggcccttgtcaaggtggaatcagaacccccaggcccttctgtggatgtccagggtagggatctaatttatttatttattgcctggcctgtgtgctctaggggaggtggtggccaggtcagctgctcctgcgcccaccaggcttcagactgaatgcagggacacaggtcctgnctgacagtgggggggggggggtgaggggagatgggagggggccgtgtttcagctggcggtggtggggatgtgaccctgaggggtaagggggcacagatgcccacagctgccgtagaggctgggtctggggaagaggggtagccagcccacccttccttgctgtcctcgagtgactgcccacccactcacgccgcttccttcctggcgtttctggcctgcacacatctgcgctgtagatactgtatcgagtcggagtgtccatccagatagttaatagagctgcttctgtgtaaat

SEQ ID NO: 2710 - DNA, 479 bp, Canis familiaris
  misc_feature (1)..(479): n = a or c or g or t
gctataacactcagccagtttctannnnnnnnnnntgccnannnnnnnnnnnncnggggggcatggattannnnnnnatgcnnncgcnangacntcnnnnnnagcctgggtatgggtatgcccccaaccaaggtcgttactatgaagcctcttgcccagcagggnnnggctatgggggcaaaaatgacnnngatccgnnntatggtcannnnggtcacccaaatacctggaannnagaacaagggtatcctccttttggaacaggaaaccagaacccggctgggatgtatccagttgctggtcccaagaagacctatatcacagatccagtttcagcaccctgtgcatcaccactgcagcaaaagacatttattgggcanttannatgtgccaggctctgtnctaagtgttgaatataccaagatagagaagaagncatccctgctcaaagagatttcagtgggataaaaaagcannng

SEQ ID NO: 2711 - DNA, 571 bp, Canis familiaris
  misc_feature (1)..(571): n = a or c or g or t
tagaaacacagaaagggnannagacgggttgatcctgaattccgcgncaannaaggctttcctgctctgccctactccatggaggagncgatgatgagtctttatcttatttctgtaccggttactgttttcatcttcaccctggcccttagattactcttagctggtgagacgttgaagcccttacagtagaagccggcaagataaaacttgtgtcataccttcttcaccagtaattcttcataccacatgcactgacaaggattattcaaggtcggctcagacttacttaggcgacatcacttaagtttgtttttagtgatgtgtgtaggtaaaggagatcagttcttttgaaaataagtgccatatttcctgtccaaaaaaaaatttttattacaaatatattttaaattcatattgtaaaacactgacaagaatagcaactaaggtatgatggttgggttagtatggtgtattagcaattttttttttccttctcacatctctgcaaagaggtttatttatttatttatttattttttgcaaagaggtttaatatttaatgatttgt

SEQ ID NO: 2712 - DNA, 679 bp, Canis familiaris
  misc_feature (1)..(679): n = a or c or g or t
gnngtgctcctgngtctggcgggggtcannngcatcctggcanaccagtgnnngacgctnntgcnngacaacgcgctnnnngnnagcntnntgtnnnnaaatctgnnggcgcnnnnnnngncgatcgnnngagcagcgcnnnnnnnnnagaagatgnnagctggtgacgtgagtnnnnncgatgagnctgcgtnnanntccanngacnngcctccgtacctctggnngcagctcggcgactccgcttggctccctgtcaccctcaactccgtcctgtatgggctgccccacctggccgtcgggtgaccccggggccagggcctgcagaccctgccgctgaggagccaccgcccagccctccccagacgtcggctcccctcctccagtggccccgccctgagccccagtnctgctcagggtcaggccagggccctccgagtctggccggctcaggggcttcctcctcgggaccccctcccccaggcttgtctggggaccctggtggaggaggagagtcggaggggtgcatcgctgaccccatggctgccaggaccccagaaccctccccggcactgtgccttccctcgggccccagtggtggggggcggctgtatttggggtagggctggtcctgggctgcggctctccctgggggtcccccgggtcccggacaaggaac

SEQ ID NO: 2713 - DNA, 588 bp, Canis familiaris
  misc_feature (1)..(588): n = a or c or g or t
ggcttggcgtacacacacactcatgggattccagnnattacaaatggcttccacccccctgtacccccaatggttttctttgcaagtgcttttggaactaagaagctagtatcctggattaactgatgcccgctagtgcttctgattactcgaatcctgtttcttgctttaaaggaaaagtaaagacaagactgttggaccaatactgcagttctgtagtgtcatttcttattaaaaataaataatttgattaccaaaattggtatatttaaagcctaacaccattctaataaaggcacaaatttctttttaatacttgtttcaagctcttcaatctctttataagttaactaatctattttcttcaaacctctgcaatagttctttaaaatcacaacagttggttagcaagctgacttttttatgtgctctaaacaaataattgtgaacttttaatatgttgactgctttcattttgataactggatctccatttgatattttcatttgtataactcatttgcagtctgaaaatttttttagtgccannnnnngacatatcatggaaagttaattttctttgcattt

SEQ ID NO: 2714 - DNA, 664 bp, Canis familiaris
  misc_feature (1)..(664): n = a or c or g or t
tgtnnacagaagctnnagctcagtcngaacttgaaaatgcattggggatnnnngggtttggctacccggccatggctgccattaatgcccgcaagatgaaatttgctcttctaaaagggtctttcagcgagcaaggcattaacgagtttctcagggagctctcttttgggcgcggatctacagctcctgtcggaggtggggctttccccaccatcagcaccagagagccttgggatggcaaggatggcgagcttcccgtggaagacgacattgacctcagtgacgtggagctggacgatttggaaagagatgagctgtgagaggcttggcacagacttcagttttcttttcttgggagcagatttccccagcagtgaaggaacattcttcacactcagatgagtctaccagtggcctttttaaccaagaagtagcacttgattggtcatgtgaaaacactgcaacagtgaactttgcatctcaagaaaacaatgaaaaattctatgaattgttgtagccagcgaattgggttgtcttatcaagtaatattttgaggaaaactgatggctgttgacatacttttccctccctctgactgctgcttgaatgttcttggagnnnngtttcttatattaagnnnnttaatgtgattctttcgtttgaa

SEQ ID NO: 2715 - DNA, 587 bp, Canis familiaris
  misc_feature (1)..(587): n = a or c or g or t
tacaatccagcgcnctaagaatcactatcaaaaaagagcataccaatgtataaaatgtatggtagcactctnnagcaattgtcctgttgcttatcaaatattacagggtaatggagatcttaaaagaaagtggacctgggcagtagaatggcttggagatgaacttgaaagaagaccatatactggcaatcctcaatatgcttacaataattggtctcctccagtgcaaagcaatgaaacatcaaatggttattttttagagagatctcatagtgcgaggatgacacttgcaaaagcttgtgaactctgtccagaggaggagccagatgatcaagatgccccagatgagcatgagtcctctctaccagaagacacctcattatatcctcattcctcgggatctcactatcaacagaaacattgggagcacatattgaggccttacttctggatcagaccatgctaatttgagcagacaacgagaaccctggccagatttcctctgatggctccagtagagctgctggtgacccatcttgctctcttagatgcaaggaggaaaaagaataatgtatctattctttcag

SEQ ID NO: 2716 - DNA, 493 bp, Canis familiaris
  misc_feature (1)..(493): n = a or c or g or t
aagaannaaggccctcgaaacggcaacggggtcannttnnngcgaagcgaagccaacattaagcacgagcgatgatggcaccagatctcttctccgcctctgagcccggagccgggagctcccccttctagaacatgcaggcagcccagctgcggtttggccttcagcctgacagcacnnnnncctgggcttccacctgcctcccgcctttgtttgtggacgttttgggacctctggtgggggagggaggtgccggatgggcaactggcaagcccggtgggggctgagctgtccttgtcctctgtgggtgcccctggatggcgcgtgcagaggactgagctggggctcccggggcgggagcggccgtcccaggccccaggccctgtccgggccacgccagaagctcccgttggnnncaccagtcctcgatgctctggctgcaaattacataaagcttttaactgtgacggagctgagcactcttctcaaacat

SEQ ID NO: 2717 - DNA, 644 bp, Canis familiaris
  misc_feature (1)..(644): n = a or c or g or t
agtgaggatngtcctgnnannanccacagtgcataacacgaaaagtttcctagaggaagttctggnntctggactacacagccgaagcaaggagagctctcaagttacatcaaggtcagcaagcagaagatgaaatggtgatggcaaggcgaacagaatggctcagcttcccttctagccttgctgcgggcttccccgctgaccagaggtactggagaagagccttgggttttgtgcttgtcgttataacccatctccaagtagcctgctaattcccaaactgttggcacagacaccaagactctgagcaatgatgagttgagaataagtctgtgcccatcccaatccacttttctcatggtttccttatcagataaaccttgtattccttgtacttggcagcacaatcactttagtttctgatgaattttgttgggatcttacttgagaaaagagttatcagagctcagagaagtttaaaaagtaatcatttgatacacatgctacacatcctctcttctcttgaccacttttacttttcattaaccacattcctgaacacctcatttttgagaactcatcatgtttctgtaaggaaccatccaaaaattgttcctacattgcaattttctgtggcactgaga

SEQ ID NO: 2718 - DNA, 477 bp, Canis familiaris
  misc_feature (1)..(477): n = a or c or g or t
gcacatcnnngaggcccagaagcatcgttnnnctttggtaatcttcagctttgggatgacagttattccctgcattgatccctgtcacaccattccaacaaaggcagcaaatgaaaaccactacccatcttcccagtatgggtcccactatcctggcctctgactcccaggcgggaaccgttatggggccaattgtggggtttcagtatggatcagtgtatcctgagaacctcaatgactactgtaccactctgggaatcataggagttaccatttaacagagtctctttctgaaatgggataaaagaggactggtttcagggcccctccttactttctgggacaggaaacatttggttcaggcatgcagcttttgtcacgaccaccagaaagactggactgaggggtcatgacaaatattcactcctctgggggctggaagctnnnctcatgaaccaccaaagctgtgtctttgga

SEQ ID NO: 2719 - DNA, 589 bp, Canis familiaris
  misc_feature (1)..(589): n = a or c or g or t
ggaagatnctgnacaattcagagacgcttccaaaatccttgttgatgctctgcaaaagtttgcagatgacatgttcannntttatnnngnnnatgcagtggtggagttagtgactgtccggtcgtttgacacatctcttgtcaggaagacaaggactattcttgaggcaaaacaagcgaagaacccatcaagcccctataacctcgcatataagtataaccttgagtatccggtggttttcaacatggtactttggataatgatcgccttggccttggctgtgattatcacctcttacaatatctggaacatggatcctggatatgacagcattatatataggatgacaaaccagaagattcgaatggattgaactttccttacgccaaacttaaaaaagaggtttggaaattggctgttctgttaaatcttctagtgtaaagtagatggtatactttaaatttataaaaaagaaattttgttttccgtgtgcctgtaacgttcttttagagtgaattatagtattgatgtgaattgatttgtgtggtatagattccatgatatgttcaaatatgatataaccatttaa

SEQ ID NO: 2720 - DNA, 461 bp, Canis familiaris
  misc_feature (1)..(461): n = a or c or g or t
ctgctcccacatgctgtnngcaatgttttacatctanntcggcaaanntgccaggcgttctggctggatgatgctgttcacattctgaatgctcgtgtttacccanntctctgctgaacaaatttacaagaagacttcactggagctcagagatcttcattagcctagggatatggagctgtgtgagtggtcaggttgccactcaaagtcagagccatctgatccccaagtcccccccacccccgaccggccactgtgcgcatcacctcccagaggaacctgctcttaggtgacccagctttgcttcctgccagctctgctatctcaggtgtttgtatccactcagcccaggctcgagacacctggagtgaagaaggtttcaggatgaccccagcacccactatctaccttctgactgcaggtgcaannnagactccccagggnnnattgcccaggtgaac

SEQ ID NO: 2721 - DNA, 641 bp, Canis familiaris
  misc_feature (1)..(641): n = a or c or g or t
ggctnngtgctcctcaacctactgntatnnnnnntgatccaatgtgtnnaacannagcaataccaatagagggggctactgantggtctaactgttatcatattgctggtgataataatccgttggctgtgaatagagcagcaaataacatctcatctttattgaccaagagccaaattaaagaaggcaaagtgtcctggggcttgcccatagatgctgttcagtgggatatctgcaatctgccattgagaactggctctgtggacattattgtaacagacatgccatttggaaaaaggatgggctccaaaaagagaaactggaacctttatccagcttgcctacgggagatgagccgtgtctgtagaccagggacaggccgagctgcactacttactcaggacaagaaatgctttgccaaggcattatctggaatgggacatgtttggcggaaggtacatactgtctgggtgaatatagggggtcttcatgcagcagtttatcttctgaaacgtacacctcaagcttttattcatccttcagaacaagatggggaaagaactccttggtgatgcaaataatgaagacggttaatggtatctnnnnnncccaacacagggannntcagcatgatgaacttg

SEQ ID NO: 2722 - DNA, 464 bp, Canis familiaris
  misc_feature (1)..(464): n = a or c or g or t
cgatgggctgtcggactctcagactgacaccgtgactttccgtcaagagcacgaatngcgcctctcaaanntagaagacattcttggaaagctgacgcagacgtctgaggctatccagaaggaattagaacagaccaagctgagaacagccagtggagctgaggaagagcagcgcctcctctctgtggttaagcatctggaagaggagctgggtcatctgaaatcagaactgtccagttggcagcatttgaaaaccagctgtgaggaggttgataccatacatgggaaggtagacgcccaagtccgagaaactgtcaaactcatgttctccgatggggagcagggtggttctctcaaatggctgctacagacagtttcttctcagttcgtgagcagagatgacctgcaggttttattacgggatttggagctgcagatcctgaagaacattacgcactacattt

SEQ ID NO: 2723 - DNA, 672 bp, Canis familiaris
  misc_feature (1)..(672): n = a or c or g or t
cttatctcttcctttcttcagactccgtccaannagatgctcttccccgatcttctgctgcaattagattcctttcctttttctccattccttgttcttcttttcccaaggaaaggagggagcaaatggttttaggtgcaagctttggccattaatgtcaggctatgtgggagggggattcctaagattttcaaggttgccatgaacaccccagaggatttttttttttttttggtagtgtgacattttgtctttgccacctgtagagtagtgggttaatttccaggtccagggccaccacccatcctgacactcctgctagcaataggtgggcccacctgagccaccttggccttgtctgctaccctggtgagtcctttccatgctccctgagcacctgagctgcctcagattccatttgttcctctccttcctggaaggtttctttttaaattttattttaatcccaaacatctcaatgttttgcagtgtctaggggtttgagccccttgtttttcgttctacttcttcttttctctccttttctctcatggagtgattatgttgacaataatgtataatgcgcgttctcttcactggtttatctgcagaaatttctctgggctttttttttnnnnnntatgattcaacactgcgttaaagggggatgtt

SEQ ID NO: 2724 - DNA, 512 bp, Canis familiaris
  misc_feature (1)..(512): n = a or c or g or t
gtgtgtgttcttgtnnatgcctgtnnnagatgtatgtgccgaggcncgtnntgctggcttgcaggtccctcccctgctccctcccaggctnnnngggccctgggccctccccagagtgtggctgggtgtnnncctcgctgttcaggtgggcttgcaggttctcacttcaaaactatggaatggaggttttagcacctttaagtaaataaataaataacctagccttttaatttatatagcggtatgctgacaggctggcgnnnaagctctcgtcgcctccgcacgcagggtgcaggtagctgttctaagaggcactggtctgtgtgtaaagatacttggcttgttttgtatctcttttcctggtggctgtcctagcgcttgctgaagtcannngtggtaagggaggtgacaagaggcaacccctcccccacacaccctccaccgctttgtgtctttcttgttcagttaccgaaacagcnnnnnnnccatctacaactaggnnngtggacatt

SEQ ID NO: 2725 - DNA, 579 bp, Canis familiaris
  misc_feature (1)..(579): n = a or c or g or t
tacgcaggtcctnnaggggccttgcctcagagcccggtccccggnntgggcntgtggaggaaaagccccgcttcccccggggagctggcccacttctgcaagcacgtggatgggccagggcagaaagtgtacagacccgtggttctgaagcccatcccgaccaagcccgctgtgcccccgcccatcttcaatgtcttcggctacctctagcctggctggcagggcctcggctcccacctctggcccgcgggggtgttggggagccccccgggagcgctccatgtgcagagccagctgagcagtggtgtggtctcnnnnnnacccttcctttgtgtgtgggtgggagggggaggacgcggctggggcagcctctgcagccttgggagctgtggggctgggctctgctggcctctctacccgaccagaccagagtcccactgtccttgtgcgggtcttgggcagtggggctttgccctggtctgccagccactccagaagccagaggtacacatctgttcatctgccacccactgtgtaagccactatctcagttctgttctttctgggttttttggtaaa

SEQ ID NO: 2726 - DNA, 228 bp, Canis familiaris
  misc_feature (1)..(228): n = a or c or g or t
ctggcagggnntgaggctcgtgcgggcnnngngaggtgcgggggccccttnnnnnnncggggtgtcctccggcgtgctatcgggtggtcccatgactccccgtctgtcaaagcgcagcaggtcgttcgctcacactcggcgagtgtctgtgtataaattagacctcggaagagctcagctttggaaaagatgtaaagaccgtgcgtgtgacacaaaaacatcaggagg

SEQ ID NO: 2727 - DNA, 551 bp, Canis familiaris
  misc_feature (1)..(551): n = a or c or g or t
anagctggngtcacaccaggaccttgacgctgatcaggnggcaaacattgaggagaagattatnnnngttaaaaagcaattagaagaaatggataacaaatgtgttcaggaagatgtttgtaatgaagctcatgaattaaaggagaaactcattgcaagaataaagaacttttgcaaagacatgactctgctgaacacaaagctggggatgtaccaaaagcaagaagagaaactagactctcagagtcctgaagaaatgggtatggaaggaagtgagcccctgcttcctcaggtggcaccagccccattagtgcagaacactgctcctggcattacaatgtggaagcgtgcactgaggattttcatcatattttatgtcctcaccttcactggactttcatgttacatactagttttcgatgctacatttatctttgaaagcttactccctgcaatgctcggtcgccgcagaatgtgggaactacgggagatcattgagcctttcttgaacttggaggtggaagacttgttaccctcctaaagatatagaa

SEQ ID NO: 2728 - DNA, 579 bp, Canis familiaris
  misc_feature (1)..(579): n = a or c or g or t
ccgggtncactctgccctctcccaccttcgacagcccccagctggctnnagcccccagcacagcaagtacaggcccaggagggctagacctccaagctagggcacccacagctgagggaggcatccaggttcacccaggctcgcctgtcagttgcccgatctagaaaaagtctgatgttttccgaggaagggcgttgcttcccaccacaccctctggcaggctcagccctgggatcctgcatctcactgctggtcttgactagacccctcccctgccccccagagacacacagcccgggctctttctgtcaggtttgtccttgttacagagggatctctgtaagacaaaatggacaaagtcacagaatagaaatcatacccactcttcgtatccaaagaaagcccttgctaacattttgatttttttcttagaaatcacacttctgcattttatttaatttttttttaaacacatgttgttttgtaacttttttctttccccacaggactatatatcttgaacatctttccaggtcattaaatattctactaccaagaaatgtcaatgactgcctagga

SEQ ID NO: 2729 - DNA, 582 bp, Canis familiaris
  misc_feature (1)..(582): n = a or c or g or t
tngggtcgtnnnnncggncngaagcagctgaaaccngcagnnctgtcccaggantctttcctgnnaacgggtcaggccccttcccccagacnnnnnnccggagtccttcagagcacggatggacagacggacgcgtgcggccttgaccgaattctggaaggaacggggtggggtggggggctcctggacaagccagccgggtcccgggtacttggatcccttgttgaaaattccactggactcggggctggacttggatctgagctctggacggtaggcgagtccagccagtgccatgaggagaaagagcttcccagaaaccaggattcccttggagtccgacgtccggctgcccggccgcccctgcccctgcccctgccctgcccctgccctgcctctgcccctgccctgcccctgccctgcccctgcccccggcctcgaggcggtggagcgtgtctgccccctggtgggccgccccgggacgacctcaggccccgctgctctcccagggcagctctgaccccgaaggagaccctccctggggggccgcggctcccaggcttgttgatccccgagtttgta

SEQ ID NO: 2730 - DNA, 531 bp, Canis familiaris
  misc_feature (1)..(531): n = a or c or g or t
acatgcagctcttctaagaggaatgaattcaaaagctgtcgnncagctctgatggaacaacacttattctggaaatttgaaggggctgtcgtgggtgtggccttggncttcgcttgccttgtcatcgttcgtcagcgacagctggacagaaaagctctggaaaaggtccggaagcaaatcgagtccatatagctacctcccactcttcaatggggtctaagagattatatctcagaaacagacagaatgaatggatttgtgcccctccttcttaggaacctgtggtggtaccaccttctctatctcttgtttagatcattaatgagcaaaatataaatagtttttttctctattataatttggtttaaaaaaataataataatttggtttgggacaggaagtcctggcggcagaaatgagatagcaaccttcaaccccagtttaccaactacctatcttcttcttctacttatttaaaactttcaagatgtaattccaggaaaaaagtttattcctcagcccaaacttctg

SEQ ID NO: 2731 - DNA, 587 bp, Canis familiaris
  misc_feature (1)..(587): n = a or c or g or t
cttccctctgttccactgatgaagtgtgtgcaggatctngnnnnagnnnctggctccagcaaagtcccnnaaacagtggggggagcgggggtgtgaggaacgaaaccagaatgatttagttttctcctctctgacagtcacctaatggaaaatttttgattaccttgacatgccttaaatctactaatcttagggtaccagattttaattcancgtgactttgctccttcctttcctgagaaaatgatttggactttttcttccagttccctcccagctctccttttgaggaatctctctttcgggttttctttcacctgaaccagcaggagctattagccagagctccttaccacccttcctgggctgtgagcatgttcacttgctgttttatttcatggtatggtgtttgcgccaaggcnctcctccatgcccnnnggaaacctcatgtccgagtttccttgaggccactttccccccagtgtgtcacaacagacactgcagggctcatgtccagtggtcttttaaaagtgtaaccccaatctcannnatttttgtttctctttnnnaggtttgtatctttggaa

SEQ ID NO: 2732 - DNA, 648 bp, Canis familiaris
  misc_feature (1)..(648): n = a or c or g or t
aatttcctcttcaacccactgcttcctgacttgttctgctccgttgnncgactnnnnctcaggtcagccctgtcntcggcacactggccgtgacctggctgggtcggctgaagaaccggatggaagaggcagaaagaagcccccagaggagcgccgccctgcaccacccagccttccttgctgatggtcacctggcatctcatgcccagccctgtgcctcttcacttcttcctgctttgggttggaagacgccatctggaatcctccgtggaaggagagacctggacgcacgacttagcaccctccagctttcaaatccctccgcagccacagggacaccctgcacacgttcccgcgggacaggccggacccaaagactctggaccagggccgccccctgcgaggaggggcatgccctcccggcctctccttgcatagccacccgccctctgactgatggactacactgatctgaggctcagacacgtgggctggacccctacccacccctcacgaaccctgagacttgggggagccaccgagccttcactgtccgcacctgagaagtgggctcggacaacctacctcacagggttgttgtgaggagcgagtgatgcggtttgaaagcgcctgacctggggcttggca

SEQ ID NO: 2733 - DNA, 584 bp, Canis familiaris
  misc_feature (1)..(584): n = a or c or g or t
ctccccattgacaccacacagnnnaggtgatcccaccgactgggnnnnnnggacctccccccgccgcactggcttctccttccccacccannagcccagagcccagacccagggtctcagcacccctgggtcaactctgtcccatcctggagactccagccgtcccctggacctggggacccccaccaccaccactcagatacactggaccccgtatcgggcgatgtaccagtacaggccccagaatgaggatgagctggagctacaggagggggatcgggtggatgtcatgcagcagtgtgacgacggctggtttgtgggtgtctctcggaggacccagaagtttgggacattccctggaaattatgtagctccggtgtgagtcgtctccgtggcaactcagagcccagccaggatggggtgtggagcagtagcacttacaggaaggaaagaggatccccctccatcctctccccaagacccgagctgctggcatctgcagactaccccagcaaccattctttggagcccccctcaaagccccctggaacgcttcccacccacaactcacaaacattcctcca

SEQ ID NO: 2734 - DNA, 599 bp, Canis familiaris
  misc_feature (1)..(599): n = a or c or g or t
gtggttttcaggatggcagcggaggacagggagatgatgnaagcccggggagcaggagaaagctgcccaactttccccaaggtggtgcccgatgaccccatgtctgaagggaaatcaagagcctctttggaggcagagtccccgaagccagactcttcctacaaccacctggaggagatggaagctcgcgaagacggaggctgcccggggccccccaagtcaccgtcctctaaggcaggccacaccaccaagggccaggcgggcgacggacccggcctcggggagctggcccccgccccggccgcccccgagcccccggggacggagcgcaacaccgagatggagctggagaaggtgcgcatggagttcgagctcacccggctccgctacctgcacgaggagaacgagcgccagcggcagcacgaagaggtgatggagcagctgcagcagcaggccacgccccgcctgttctcgggagggctccaggacctcctgctcccccagaaccagtttgccatgttcctgtactgcttcatctttatacacataatctatgtcaccaaggagatgatctnnnnnntcttctccaagcactacct

SEQ ID NO: 2735 - DNA, 679 bp, Canis familiaris
  misc_feature (1)..(679): n = a or c or g or t
atgacaagnnttcaannnntgccaagtatgnactggtgaangcacttgccaattcaaagacagnnnnnnnaatctttgggaatccaaattatttgaggctcagaactnanntgagtgagggtccatactatgtgaaacctatttccacaacagctgtggaannagctgaatgatttcttctagagtctagaccatttttgaccaaaacacctcccaaggtctttgacttcatctgtaagctacacaacagaggcttctcttcccccagaattatcatggagtgtctaatgtaattacattacctacatttgtggtgtttctacattgaaatacagcgtggaaccaggaaagcaggcaccttggtcataatagcaccaggtgtttttcagattcccttgactgccttaatctttccaagaagatggaggttttgtttgcttaggaaatgttcatggacttactgtcttatttaaaattctccttcaaatagaatggaaccaagttgttcggaattctctttaccacctattttttttcttttgggtccttctgcctttctgattccactctcaaagtcttggatataaatattctttcaaacaatgtggaaccttgaaattatgttctccacactaagaataaatacttttaataaggtgtctttggatttttttttttt

SEQ ID NO: 2736 - DNA, 533 bp, Canis familiaris
  misc_feature (1)..(533): n = a or c or g or t
tgagaaatgtttcntnnnagcataagcanaatcatgttaaactcttacntggtcccttctctagagctgctttcccatgactttcaaaacatcaggctattgaggggcttcagtnctaatatcctnnnngtccagcaaagctttgtggacaggagatgagcccagggagtannagcaaaagtgaatggttgtggtgctttagacttccagggtagggcagaaaacagnnnnnctccaggtccaaggtgggtgctgctgtgtgtgcatgtagagtgtattgaagatgggtgagtgcagcacacgggagctcatgggaagagcagctttctaagtcttggcgaagaaacaagctgacaatagagatctatatattttttagaaaggggcggggggggggttgtcagctgaggtccatcactggtcttttgccccctccctccccatagattgtcagctgtaagtgaaactcttagtgaaaatgaggggaaccctgtaggagtccccataaacatgtactgtaattctttgtatat

SEQ ID NO: 2737 - DNA, 572 bp, Canis familiaris
  misc_feature (1)..(572): n = a or c or g or t
gactatgatnnctacagtcaaagannacaaatgcnngtgtcagtgagatgtgcagccattnnaactctcatacctggctggtagagatggaaaatagtacagctgctttggaaaatagtccagcaattcctcaaaagattaagcaaagagttatcctatgacccagcagttctactcctatatttccaaaagaaatgaaaacatatatggacagaaaatcttgtatgtgaatgttcatagtggcattatgcaaaatggctaatagaagcaacccaactgtcatcatcatccaatgaatggataaagcaaatgtggtgtacctatacagtggagtattattctgtgctaatatgtgttacaacatggatgaaccttgaaaacattacactaagtaagagaagctaatcctaaaagactatgtattgtgtgattccatttatatcaaatttctggaacagtcaagtccaccaagacaaaaaaggaggttagtggttgccggagttgagggggaggcaagaatggagaatgactgccaatgggttggtttccttttagnnnnatgaaaatgttct

SEQ ID NO: 2738 - DNA, 703 bp, Canis familiaris
  misc_feature (1)..(703): n = a or c or g or t
gtntgggaanncaagcatttttacnacgcacgtnnattggtcagcangaaagggngnnnangagtggtagcagatggacctatgatgcccttgctgggtttcctttttctctaggactgtgagtggggggaaatggtttttagaggtgagggttattagtccctgtggaggaaagaaatgtctctggggacagaggatcccgggaatcccatcgcatttcctgtaatctgctctgagatgtggccttgccaggagagcctgccctcagaacgcagggccagacaccccgcctccatctttccaagcaccggggcgaaaaaccacaaaggaaaggaagaaaatttatatatatataatataaaatcacttggtgattaaaaaataactgctccataaataaaactcctaaagtcactatgtttaaagggtttggttgtgtttttttgtttttcggagaaatattgtaaatatatattttttgttgctgatttagagtcaatctccaatgttgtgctaaaaaatttaaattaaatgtaagcattaaggggacaagtcctgctatctcagttgagacattggggttattttgggccagggaaggagggaagctagttggacttttgttttctaaacgttctccactattggttttagaaagagcaaggacatctttcctctgacacatgggaatgggagatatttg

SEQ ID NO: 2739 - DNA, 573 bp, Canis familiaris
  misc_feature (1)..(573): n = a or c or g or t
tggtnnngagaaagagactnnactccagaattgggaaggtggctnnatgctttattggcttgtcttgaaaaacctttattacctgaggctcattcactgattcggcagcttgcaagaaggtgctctgaagtaaggctcctagtggacagcaaagatgatgagcgtgttcctgctttgaatttattaatttgcttggttagcaggtattttgaccaacgtgatttagccgatgaaccatcttgaagtagctggtctctcaggggtagaagatacttgtgatgaagtatcagccagagtctgaagatgcacagtgacaacaaagtgagaattgcatcacatcttcaacttatttgaaggttcttcatcttaacctgtgcatctcaagttgacattcagaagataaattgtaatgatttgagtatctgaagtatctttggaaaatcccaaccagccagtttttaatgaagagtnnnaccgttttctgtaatcacatgcttttaagacaaattgagtgccatttattggtgaaacatcctgtacagaaactgtatgatgaaattttacttagatcct

SEQ ID NO: 2740 - DNA, 576 bp, Canis familiaris
  misc_feature (1)..(576): n = a or c or g or t
ctgtattctgaatttcctgtctcctcaaaagaccatcaactctgaaagatttgagactaaagactgatctcagagatcttacttaccctgaagtaaaaactacttgaattgggaccattgcttgccttngaagtagaagagtaggaatgtttgccaaacattggagaatcttaacatgtctcttactgaggataatgactctggtaccaggttggagctctggcactgcagtattgccaagaacctgtctgctcctattgggccagacatcatgggtgatgccaatcacaacttcttcatgtgaactcaggaaagcggcctttttatttttgcatacaaccatgtatgacaaatctgcaaagaatattttgcatgttgaagcctaggtctgtttgaattatttttccttctattttgtttcctgacagcttcatttctaagcaatcaagatagaaacaaaagctgaaaacagttcttttaaaaaggcagactgcatttgtcctgtagaagttccatttttgggtcaaatactgggaaaattgttaagatggattgaggccagacacctggcactgt

SEQ ID NO: 2741 - DNA, 626 bp, Canis familiaris
  misc_feature (1)..(626): n = a or c or g or t
tatattaccaaagaagattnnngntagtaaatatctgaaaatgcttaaagagaagagggacgaggacgaggagaatgacagcgatgatgggagtgacggggacgaagcagaatcctagaccaaacaggaagtgctttagaaatcaccctgctgaggaccctcctggattagcagcattgcttggaagtaagcacagcgctgtgtgactttagactcctcacttctcagagacttcaagtacattggatttcttcctggctaagatagagcacctgttgtgcccacatcacaaatggccagaagaaaagtgacccagacagcagcctctctgaggggcccgcactgcagttcgggggcacagaggcaccaagaaagctgcctgtatggtcaggcactgccagttgatctgctgcagctgaaagctgtggaggcagacaattttgcttcactttttaatttacagatgatagattttgaagagcttctaaataccagttgtataaattcatagatgtatatctggaaattagttcttgtaaacaactagatgtagtttgagctaaatacatagtatatgggtagtatgttacatttgaaaatttaatgatttgttcaaatactacaat

SEQ ID NO: 2742 - DNA, 508 bp, Canis familiaris
  misc_feature (1)..(508): n = a or c or g or t
atatacttaaaatgtcctgatgggctcagagtattttcntggatcttggnnaagtactccatatgcaaaagctgcaaagctggacttggggatttcctctgcccagcagcactaacccaagagctcactgccccatctatccagacaagacttacctagatgcttgagctctaaaaaatgtaaacaagcttgtgtctcctcccctgagccactggggaggatggccccttcttcattccagcccaggcagacgggagtatgttgaataagcatgattgggaccctatttggagatctgttgcctgaaggaactttgtttataaagcactgcttggcttcatatcccagctgattgcattgtccacaacctttccaccaccttgtggccagcactgttagcacacctgagacagattgaggcctccctaaaaaagggactgaggaacagctctgatgctcctaggctgggacccgcaaatggttttggcccacgtttgtgggcctggag

SEQ ID NO: 2743 - DNA, 509 bp, Canis familiaris
  misc_feature (1)..(509): n = a or c or g or t
actcttcccctgtcaaagccagatgttgttgacatttcctcactgttcagaacacctacagttgtaggnnnctgggctccaaaaccaatcccgtttctattgttttcttcacaagaaagctaatctgtggtgggacggcagggcgaggaggaagagctgtggtttataacctgttcaactcaggcaatagtgattttagctttatttaaggtcttaggttgagctttaagcactttgtaagacttggctgtaagcagcttctctgtcagaactccagagagccacgctgggttaatagccattgggtttgttcctttacctcacacaatcccagttaactgtggtggtatttagaggtgaaataggcaagtgagatgaacacctctgctgtgaatgttttagggagagaaattctaaatattttgtaactgaaagccaactacaatgttaaatatgggtatcagctttannctacactttgantcttaacatttctcagtcaacttcta

SEQ ID NO: 2744 - DNA, 546 bp, Canis familiaris
  misc_feature (1)..(546): n = a or c or g or t
tggtgggtgtcccctaccgagngnncgccaccgctctgtncnnnntccctggtgagggccagatgggacagctggagaatggaatgagtgagaaaacactgaagaagtggctcaagatgttcacaaagaggcagcttgagctctatcttcccaagttctccattgagggctcctaccagctggacaaagttctccctacgctgggcatcaaagatgtctttacctcccacgctgacctgactggcatgaccaacgacactaatatccaggtgtctgagatggtgcacaaggctatggtggaggtggacgagtcggggactcaagcggctgcagccacagaagcaatcttcatgttcaagtcagccccaatgaggcctcataagatcatgttcaacaggccctttatgatgctcattgtggagaatgccacgaacatcctcttccttggcaaagtgacccatccctgaggtgggtgtttctcctgaaaggccacaggcctccatagtggaagtccctactgggagctcgtgattgacacaggttttg

SEQ ID NO: 2745 - DNA, 265 bp, Canis familiaris
  misc_feature (1)..(265): n = a or c or g or t
aacannnnnnnnnnnanntnnnnnnttctgtagatacaggnnntcannnnngntattatttctctgattttatannngctacgctctatggtccaacctatctccctctgtgctattatagctgaaaatctaatgagagnnacttttgacannnnacagactnnnaaatttagatatctaaactacttnnnnnnnnnagcaagtagaaggataattttcacagtctgtgatgttcacaatctgcttnnnntgaattgctgctgtg

SEQ ID NO: 2746 - DNA, 548 bp, Canis familiaris
  misc_feature (1)..(548): n = a or c or g or t
tacccaaaagtnnacaccaaagatnnagagacaatgtgcttttgcnnaactgtncggtttttctttnnanncaaatataancagggcagggatatatagatacatgtctaaatacgaatattgaaaggaaaagaaagtgaacaaatctaattttacatgaaattaaatatctggggttagtagaaaaatttgaaaagagttaagaggataccaagaagcttaagctggactagccttatttgcaagtgaaggatctggtgctgctttcagatgtttatcctttgtgttttaaaattttttcttaagctttaatctttgttattgtcttaaagtcagctggtgtttcttgttcatggactttggtacgatggtgctttgcaaggatgtatttatattttaatggccaacatttggtcagcccgtgtccactattcacttccccctttttgtaaaataagtgctttaattgtaaaatgtataaaaataccttgtataaattcccttttgattattacaataagctgagttgtaacaaatgaaatgttgat

SEQ ID NO: 2747 - DNA, 313 bp, Canis familiaris
  misc_feature (1)..(313): n = a or c or g or t
cacccccaccctggcnagcaatgtntanagnacagcctgccctgccnnnnccctgctcacctgcctcagtggccccagccccagctcggacctaccccatgccctgggggcgaccccgaacattctccctggacgctgtccccccagaccactcccctagggcttcccacgcggttgcccctctcccccagcagcgatccccaaggtccagaggcctcttcagcaaaggcccaccccgcacttggctccagtnnccagtatgagacagaaaggtgcttgcaacaggatctggccagaggaagagaggacctac

SEQ ID NO: 2748 - DNA, 608 bp, Canis familiaris
  misc_feature (1)..(608): n = a or c or g or t
catgtattttagtatcttaatattgtaatgnngntgggttcatttttttttttcttgatatccctttcacttgcttagtggatggtatttcgggtttttaaagagaccataataaagaacagaagttggagagttttttgtctggtgcgttctctctgcaatgtgtgtgaccacttcacatggccactgatgaagagtgccatgttcaacacctctgtcagggtctttgcttcacctaaccactgtgattaagtttctttatcaattggaatttgccaggttccacaaaatggtaattttttttttaaatagttacagtagggtatctttggttatttaacttggtggaggcaggaccggagctggatgtaaatcagtgagcctttgagtaggggccaggcagtagggctttagatccattgttaatgattcatttcctttgtggtcctataactgcacaactgaaaaggaaaagggggaaatcgttgaaaatgtcacttttaggtgccaataatacattgcactaaactgacagaagttatccagagtactgtatgacatcttgtttattatttaatgttttctaannngaaaaatgttagtggttt

SEQ ID NO: 2749 - DNA, 454 bp, Canis familiaris
  misc_feature (1)..(454): n = a or c or g or t
ggacgggactnngcgccccaccatctgctcnagnnanntcgggagctnnncgagcnnnnnnnnnctgcagaggannccatctnnagagcccagggtccccacctgccggtgccacggtcgccggcacctngcccccctgcgtcccacnccgnnnnnggcntccagnagctccatacacacgnnnnnnncggtgnnnnnnnnacaanannnaagtggnnnccnnnnnnnccagggggtggggnacagnnnnatctccncgctgnnccnnnnaccnnnnncancccaggaccctcnnnnnnnnnccnnnnngnnnngagtagnnnnntcnnnnncccccctnnnnntcaanntcgggaatgnnnanacnnnnnnactttgannnnnntgtgctcnngnntttccccatatgccgctagtgtgtaggcagatgtctgngncnctaggtnnnnctagg

SEQ ID NO: 2750 - DNA, 604 bp, Canis familiaris
  misc_feature (1)..(604): n = a or c or g or t
ctggtgagcacactgnnnngccaatgctgtgcactgtggtacgggctgcctgcccagatggacggtcctcaccgctttactcccagcaagtggccacagctcatgtgtagggtcatcatagcccttagccgtcactggtaccttccttcccactgcagttgggagaagctgctgggctacagaaggggtcactcgtcagacctgccctctcttggttctgcagaacctgcaagtttgatgcagaccagggccacccacagtagggctgaggggccccacaggcccacactcagggtgagccagctcgcgggaccaggctccagcaggactgtgtgggcaggcaggcaccacttgctcagaataggtaacccccagtgcctgctgttcaggacagccctaaaacctactcttccaaccaagcctgtgtgcaaacccatttacaaatgggaccatagctccagggtgtcctgtctataccacaacttcctgatcaccgccgcacagctactgctgacggggtggcattaccttcagctccttcctggtggcaggaatgggnnnnngaggatgtttcttaaaactgactccacctgtatctttgtca

SEQ ID NO: 2751 - DNA, 536 bp, Canis familiaris
  misc_feature (1)..(536): n = a or c or g or t
cctctcctcctgtccccaaggcatctggctccactctgagcagtgggtctggcagctgtcccaggacccagtctgatgacagtgaggaaaggagcctcgataccatctgtgccaaccacaacaatggacgcttacacccccgcccccctcatccccacaacaatgggcagaactttggagagctggaggcagtagcctgctcttctccaggacattcagacactgaccatgataacttgtccctgacagggacactcctacacaaagattgttgtgggtctgaaatggcctgtgagacccccaatgctggaacaagagaggaccccactgacaccccagacacagacagcagcagggctgttcatggccatagtggcctcaaaaggcaccgagtcgaattggaagatacagattcagagaattcctcctcagagaagaaattaaaaannnnnntaaatacaaagggaaaacaaaaagctatgaaaagtagctttacaaaaaaaatttttaatcctgtttagtgaacacagaggnna

SEQ ID NO: 2752 - DNA, 548 bp, Canis familiaris
  misc_feature (1)..(548): n = a or c or g or t
aacagggtgggtgagcagagacggctcntcgtgcacacgggctcactgtttccataaggttgcaccaagttcgactctgtcaggggtcccacagccagaaacccatattactccctcctgagaatgtatctccaatgaaaggggagcagtgatgcagcttctcagaggtcaaaagggatctggccgtctgattcttcaacaaattttcaacggatcatcatttccagtctctcttcttcacctcatttccaggagaatctgaggctgccaattcctgggactttgaggattttcagcatcaaacaagtcaccccttggctttgctgcttccagcaaagggatttggttgagggagacctgctaagtcttttacaacccatccaccatctctcaagtttccagtctggttccagttgcttctcctccccacttcccctctttgaggccttttaaaagttcagtcattgtttttgggtcaggtcatgattgcagggttgtgaaatggagccctgtgtccagcctgggtnnnnngcctgcttaagattcac

SEQ ID NO: 2753 - DNA, 579 bp, Canis familiaris
  misc_feature (1)..(579): n = a or c or g or t
gtgatcantgaggatggnnatgcatatgccntggtgcagcacaccacnnnctactgcggaaagtgccataatgaggtggtgctggcccccatgtttgagaggctctccacagagtctgtgcaggaccagctgccatattctgtcacacacatctccatgccagccaccgccgagggcagacggggcttctcggtgtccgtggaaagcgcctgctccaactatgccaccactgtgcaagtaaaagaggtcaaccggttgcacatcagtcccaacaaccgcaatgccatccaccctggggaccgcatcctagagatcaatgggacccctgtccgcacactccgagtggaagaggtggaggatgcgattagccagacaagccagacgcttcagctcttgattgaacacgatcctgtctcccagcgcctggatcagctgcggctggatgcacggctctctccccacatgcagaatgccggacactcccatagcctcagcaccctggacaccaaggaaaatctggaagggacattaaggagacgctccctgaggcgcagtaacagcatctccannnnncctggc

SEQ ID NO: 2754 - DNA, 606 bp, Canis familiaris
  misc_feature (1)..(606): n = a or c or g or t
cccggttccgttgggttgtnnagccctgggnnngcagccttccctatttatctttcccccttgtgccaccaaatggtcactccttccagagcggacactggcagaccacgcaaagacagccagaacctctgatcctcacacaaatctgtggctgggggtaggccaccaggacagggacaccaagagatggagaaggggggactgcccagccacccagcgccttcctaccccttaagcaagcacaaagaagatgaggcagagaactgtcagagctgaaagtttctttggttgctcacaactcaggtatgcacgccgtgtggcagccaggcagcagagccctacttgaccgccagtcccgtgcaccagacctgtggcctgttcatggactctgaatgcctcaggtgccgcctctttgcatagggttttcctccattagtaactacagctgaaacagatgtcctccacattgtgcacactggttctgcctttgtcctcgcaagttgatatttggcattagcatgaaacttgtgggcgtgggagggtttagagagaattctaacacaaaacatcctattaaattgtacttgagagatgaaaaaaactcct

SEQ ID NO: 2755 - DNA, 633 bp, Canis familiaris
  misc_feature (1)..(633): n = a or c or g or t
actgttggcgagcgcttcccctcccccatacagctcgcagctgcggctcccgggggaaagcccntggaggnaggctcctgacggggtgtgacagctgtcggtggaggagaaggtccggtgccctattttcttatctacctttctccttgcgaagtacttacgtaaggtggcaggttcctaatgtgggagtcgccatcaactgtgagcccctgagggccgctggcctgagcgaaagagcgaggctagctgggccacaacgtcaagaagtatcagttattttccgggaaaacgtaaagttgctcgggtaccagtagacaaatacttaactaaatttggaagcaagtgtaaaaggtgtaaataacacccaggaacatttaaaatttcctgagagttagaagaaaccaaggaatatgccttcggaattttgaggacccttttccttttcaggctttctgttcttccgtctgtacttctcatatcctcccatctgtatattctacaagaaatgtnnntnttagtggatatgcttttcttttttatttaggcgtggttagtaataacagaataaaagctgttagtgttgtaatctgtttgaagttctaaggatgttttcaatatttatgtttctctgtc

SEQ ID NO: 2756 - DNA, 321 bp, Canis familiaris
  misc_feature (1)..(321): n = a or c or g or t
acagaatgcccaagagccnntcacctttgtgnanagnctgcaggatnnntcaaannnaggtccccagcttggctcagtagggacccatcaagcaggagagcaatccaancnnnnnnnntncttaggaggaacaaaancncnnnaaggccctagtttcangnnntcnnnnnannnnaatccagataaatanacggagcannnnnnntnnnnntcnnnnnattacannnnnnagtggtgatccnnngatagacnnnnaacnnnnnnnnncatcagcaannnnnnnnnnnnnnnnnnnnnnnnnnnnnnnnnnnnnnnnatnan

SEQ ID NO: 2757 - DNA, 609 bp, Canis familiaris
  misc_feature (1)..(609): n = a or c or g or t
gcgaaagccccagctgagagtggcatcaatgncttcatatttgatcacaactttcagttaaactaagagnntgattaaaggggggaattgttaagagaaaaccataggctcaaaataggattactnaaaccaagttcccaaatctgggctttccacccattctaactgcagtttcaacctcctccagaaatgcaggcttaactggtcagtgaggaaaaattttctgtcagcaccaatgagcctgtcacctggatcctctccatcccccaaagaaagatgagggagacagaacatgaagactcctaactctgggaaacaaactaggggtggtggaaggggaggagggcggggggtgggggtgactgggtggcgggcactgaggggggcacttgacgggatgagcactggtgttattctgtatgttggcaaattgaacaccaataaaaaataaatttattattaaaaaaaaagaaagatgaggttgttccccaccccaaccccacaaacagcctaatctggaacaatccttttcttttgctaataatcttctggcccccaccttccatctataaaaaccttccattccagacaagttagtgcctgtctaac

SEQ ID NO: 2758 - DNA, 688 bp, Canis familiaris
  misc_feature (1)..(688): n = a or c or g or t
acaacatcntgtgccacnnctgtgccagcatgatcagtggcttggtcaccactgctgcctccatgcccgtngacattgtcaagacccggatccagaatatgagaatgattgacgggaaaccagaatacaagaatgggctggacgtgctggtgaaggttgtccgctatgagggcttcttcagcctgtnnaagggctttacaccgtactatgcccgcctgggccctcacaccgtcctcaccttcatcttcctggaacagatgaacaaggcctacaagcgtctcttcctcagcggctgaggcgggcaaggggcctggagccggtgtgctggggcttctgcttacccgctactctcacccgggggcctggactctgccaccctgggcccctctatttattttccctccacagtgtggttctgtcctctgccgtaaaggacttggtctgtcctatccctgctccgccttgctctcctggtcctgatcctcatgacctctctgcccctggctgtgccttgggtgggggaaagttgggaaactctgcaggtttccaggcctcctctggggtgttagtttcagggcatgtaggatggcagagacccccccccttcttggtaaaccaaggcagggccaagggacaggagacagtagaagccgtcaggatggtcaaggnntgcagtggaaggacgtga

SEQ ID NO: 2759 - DNA, 526 bp, Canis familiaris
  misc_feature (1)..(526): n = a or c or g or t
gtaaacacccgactgattctccagtacnnnnnnncagagagaagacagattctcatcgccaagtccccgctggctcccttcacctcattngnntacaccatcaagaaggaaggcctggttctacaaggccaacagaggccgtagctatggactctatgaccattgtctagagctgctgggggcacaatttgtgaaatgaaacaggatggtgctacttggaagaaggaaacggaagccaacataatggggattaattagttgattgatgttgagatggtaacagatttgcccccataccatttagccagccatctcagacctagcagggaaggtgaggatgaagaagcctttgttcaggtctgtagatgcgtggggctgaaggctttgccaccatgggatgtcaacagccataataataataatttgcacttatatagcacctttcaactgggcacctcaaagcggtttagcaacgttaattaattanngcccacaatccccnnnnnnnaggaggaggaggactaac

SEQ ID NO: 2760 - DNA, 706 bp, Canis familiaris
  misc_feature (1)..(706): n = a or c or g or t
tgattatattcttctttctctggtacgaaccagnnnagtgggcnanctgagggatgtnnnncgnnnngtggtngccatgtctagagccagacttggattgtatatctttgcaagagtatccctcttccaaaactgttttgaactaactccagctttcagccagcttactgcccgtccacttcatttgcatataattccaacagaacctttcccaaccagtagaaagaatggagaacgaccatctcatgaagtacagataataaagaacatgccccagatggcaaactttgtgtacaacatgtacatgcatttgatacagaccacacaccattatcatcagactttattacagctgccacctgctatggtagaagaaggtgaggaagttcaaagtcaggaaacagagttggaaacagaagaagaggccaatcctgctcaagctgatctatccagtctgacagatgccacctccagtcaagaatcctcagcatctcagactgaaagcacccccaatcagacaggagctagttccagtccagaagccatccctactacatctgatatcactgctactgtggcaggacctgtaactgtaccagcagaggctaatgcctctcaagctgtcacacctgccccagaggagaccaagtagccaaactgtggcctttcttagggaggacatttcatttgtaaagtctaataagta

SEQ ID NO: 2761 - DNA, 673 bp, Canis familiaris
  misc_feature (1)..(673): n = a or c or g or t
agaccagctcttcagnnaccagctacagctccgagttcagcaagcgcctgctaagcacgtatatctgtaaagtcctgggcaacctgcagctgaacctcctgagcaagtccaaagtgtatgaggacccagctctgagcgccatctttctgcacaacaactacaactacatcctcaaggccctggagaagtctgagctgatccagctggtggctgtgacccagaagactgctgagcgctcctaccgggagcacattgagcagcagatccagacctaccagcggagctggttaaaggtgactgactacatttctgagaagaatctacctgtattccaacccggagtcaagctgagggacaaggagcgacagatgatcaaagagcgtttcaagggtttcaatgatggccttgaagaattgtgcaagatccagaaggcctgggctattcctgacatggagcagagagacaagattcgccaagctcagaaaaacatcgtcagggagacgtacggggcctttctgcacaggtatggcagcgtgccgttcaccaagaaccctgagaagtacatcaagtaccgcgtggagcaggtgggcgacatgatcgatcgcctctttgacacctctgcctgagcctgctgctctccctgcctggtactgcccggtcagcccnnnnntgg

SEQ ID NO: 2762 - DNA, 511 bp, Canis familiaris
  misc_feature (1)..(511): n = a or c or g or t
cagannagctgctggctngcgtttggtgccctctgcaggatccatgaatataagttggcnntaactcctacatggacttttatttatctggctaggagaaaagccaggcaagagaggggacttaagtcattgtatggcccagtgttctcaaccatgatggggatgtggagtatatacaggttgtagaatgactgcaacaaccaccctaattctcacacctccctgtatccacacctttctaacatactttgctactcctcccatcagctggtgaaatgcaatgtatttgcccaaccccttgattctgaacttgatcttgtgacttgcttttggccagtgacatgttagcagttgtgacagaggtagtggtgtttcgtctctcactctagcacctttgcctttgccatgacaatatgcctatgctaggctggccaaggccatcctcgatcagctgaatccgtcaagacatatggagcccagtcaagaccaggctgtccaggaacacccagtc

SEQ ID NO: 2763 - DNA, 583 bp, Canis familiaris
  misc_feature (1)..(583): n = a or c or g or t
ataagaattctccagttacattactaaaaaggaatcgtaatacagnnnnaaattcaaggcttttatnnnaaggcactgacatttgaaatgaggtcttacaaggtatgtacaaaaaaaccgtaaagcgttttttggtgatttctaagattgatgcctatattttgaactgttgacatatgctaatagcccttagaatttgaaaaacagtagttgagcttcaaacatgactccatttccttaaactttttggacttaaatatttctatttactttggtcatagcttttgacaatgaattcattaaactataacaattatagtaacaaaacagcttatttggaacctagtgacgaaaaggtagactctagactaattttcttaagtagtatcatggtctgtggtgacaactgtctctaccccattacagaaccaagttcctgtttaaaaacctcctgtttaaaaaaaatatatatctcctgttggagatttttgtttataagttggtttgggacccaagtaacaggtcaaataagagaatttctcacagaaatcttctcatgtagtgatttggctcatatacaatc

SEQ ID NO: 2764 - DNA, 587 bp, Canis familiaris
  misc_feature (1)..(587): n = a or c or g or t
gtnncaatacccgtttnggcatcgctgctaaatacaagctggattgtagaacttctctatctgctaaagtaaacaatgccagcctgattggactgggnnatactcagactcttcgaccaggagtcaaactgaccctatcagctttaatcgacggaaagaacttcaatgcaggaggtcacaaggttgggttgggatttgaactagaagcttaatgtggttttgagtaaagcatccgatttgtccccggaggtgaagagaacccactatgttttggccttaaaattcttctgtgaaatttcaaaagtgtgaactttttattcttccaaagaattgtaatcctccccacaatgaagtctagagatcgcaagtgcatcctgagggaagtacttgaaggcatgcctggaagttgtcatgtttgtgccacatttcagttgagttccgcagtgttattttaaatgtgttcctcagcgacaatgtagtgtcacattacaaaggaaatgacccaaccctccagtttgtacatcacgtcctgcatgtcccacaccactttttnnnnaccttttaataatnnnnnngtctctgtgctg

SEQ ID NO: 2765 - DNA, 607 bp, Canis familiaris
  misc_feature (1)..(607): n = a or c or g or t
gaaatgactaatcatcatctatacagtgagaaagaaagnaatggacnaannagtgtagatgtgtcaaaaaattcaagtgaaaaagaatcatgcattaaaaatttctatgaaggtgcagccaagtatattngccatgaacttgtaagtgcggctttagtggctggatccagagacaacattacagtcatggtaatacttctcaagggaagtgagtatcagtttctgacataaaaagataaatttctgattatctaagagtacaaaaatgtaaagacagttcttcaaagaaccagatattaggataatacatcaataccacacaaattttaaagaacatattaaggaaactataaaagcattattttaggttacatgatactatttatatatatatgttcactgttccatgccaagaaagagaaaaaccagtacttgctttttataccactttattccaacctgagcacctcaatataaaactaaacactggtgaactgttttccttactaattctgaattactgtaaatgtacaagttctgctagcagttcaacacttaaatagattaaatcanctctgacacatggtnnntttcatataatgaaaat

SEQ ID NO: 2766 - DNA, 695 bp, Canis familiaris
  misc_feature (1)..(695): n = a or c or g or t
aggcccacctcatnnngatccaggtgaacnnaggcacagtnnnngagaagctcgactgggcccgtgagaggctnnaacagcaggtgcctgtgaaccaggtgtttgggcaagatgagatgattgatgtcatcggtgtcaccaagggcaaaggctacaaaggggtcaccagccgctggcacaccaagaagctacccngcaaaacccaccggggcctgcgcaaggttgcctgtattggagcctggcatcctgcccgagtggnnttctctgtggctcgggctgggcagaaaggctaccatcaccgcactgagatcaacaagaagatatacaagattggccagggctatctcatcaaggatggcaagctgatcaagaacaacgcttccactgattacgatttgtctgacaagagcatcaaccccctgggtggctttgtccactacggtgaagtgaccaatgactttgtgatgctgaaaggctgtgtggtgggcaccaagaagcgagtgctgactctgcgcaagtccttgctggtgcagaccaaacggcgtgccctagagaagattgacctgaaattcattgacaccacctccaagtttggccatggccgattccagactgtggaggagaagaaagcattcatgggaccacttaagaaagatcgaattgcaaaggaagaaggagcttaatgtcaggaccag

SEQ ID NO: 2767 - DNA, 651 bp, Canis familiaris
  misc_feature (1)..(651): n = a or c or g or t
cagttggtgaagtnntnaaaggcttgttccttggacggtcccacatcnnnntgcccagatccgggctgaggatgggggaatgtgcccacggatgggcccacccagagcacaagggcaggtgggtgtcctggggctcccctggactcctgtgagtgccttgagcccaccagtgggagcctggaatgagggcaggggatgagtctgtcaagcacaattgttctccgagtggaaccaaagaggggaggagccggggccgggtcctggccccccgggagcacaaggacagggtcctgcggccctggccacaggtacaggatgggggagcgctgagcagagacgaggggtgggctcgttgcctcctccgagcttggagctgttttggaagataatgtggggggaagggagagccacctggtacttgtacaccctgcctccccctcgttctgaaattccgtccccctcggctttgggggaatgcagcctttttttccttttccttctcacttttgcatgtttttactgatcattcgatatgctaaccgttctcagccctgagcctagaagaggaggtttcgacacctcctgtcagacttaggtgctctctggagatgaaactcttaaatgctttgttattttctcaattagatccct

SEQ ID NO: 2768 - DNA, 558 bp, Canis familiaris
  misc_feature (1)..(558): n = a or c or g or t
caattnnnaacgttaattganttaaaacaannnnnncaaaatnnggtnngtaaaactgactttttcattatgtgggttttgaaatctagccccagacatacagtgttgagagatacttagccgggagtaggttttgaagaggttgattctgggagaggggctggccacctggattgaatttatgcagagctttttagccttgaaaaatctttcagtaatagtactaatacttaaaatttcagtatttaaaaaagacaaaagtgttttgtccatctgaggtctgcactccatgaaaagctcacttggacactggagccaaaagctgatgatttttttaaattgacagttgtcaatattgaactgttcccaaggtagttagtcaagtatgtctcaacactagcatgatataaaaagggacactgcagctgaatgaaaaaggaatcaaaatccactttgtacataagttaaagtcctaattggatttgtaccgtcctcccattttgttcttggaagattaaatgctacatgtgtaagtctgnnnaaataggtagcttaaac

SEQ ID NO: 2769 - DNA, 358 bp, Canis familiaris
  misc_feature (1)..(358): n = a or c or g or t
ttctccttgtagtgtagtttcctcttcccttcagtaacgtgtnnnnagtaacttgtatttcaagttctatcctactgaagtcctcttgtcttaatagtgcctcccccagagacctcaccctggacagaggtcagcccctgctgccctgtgcaggtgacaccaacaccgctaattgtcactttccagtctgttcttctcaaataagcaggccattttgtaactgcatatccccaggctgtgaggctgtgtgaagctgtttgtgtggtctccttgtaggtgctgtgttctcagcaccgccttgctctgaacactggtaattccaggtgctgcgcttggcagaggggtctcgccaaagcgc

SEQ ID NO: 2770 - DNA, 123 bp, Canis familiaris
  misc_feature (1)..(123): n = a or c or g or t
tggcctgtcccggccgatccggtggtaaggtgtccctccagcctccgtcctgttcacgtacatggctgttnnngaaatgtttccgtnacctttttctaacttctcaagttctagagaaagaat

SEQ ID NO: 2771 - DNA, 463 bp, Canis familiaris
cgttttccactcaccagccctcaaagagctccatctggctggactcgctagattggctttgggctgacaagtcttttgtgtttccctattttgatagtctggtgtttgctgtgttgcagccacaggctagcaaaatcgtgaagcaggtttgtgaaatcattttgtgaatggacacccacttccaagccctggttccctagttggcaggaaaaagctgttttatcttgaaatcttgccagctttcatacagacgaatcatttagagtagttattcccagtcttttgtttgtatggctaataacttggggaggagtgcgggggtcatcacttatttgcttagacactggccaggtacaggaagtaagagctgagtcccgcccttgagagcttgccatctactgggaaacgtgccagctaataaagccctaaaggaagtattctcacaagcttctaactttaaaat

SEQ ID NO: 2772 - DNA, 531 bp, Canis familiaris
  misc_feature (1)..(531): n = a or c or g or t
ggncagtatggcnnagtggctgcctgtgcagctggtgggcagggccatgctatgattgtggaagcttatccaaaataatgataaagaagaggtgacctggagtttttgtgcaacactcgcactaggcaatgccattccaatgcattactaaatgacatccatagttcctagctcctcttaagaaaacacaatttgtggccttctgttaaatactttgcaattaagccttgctagtgttctgagctttccagtaatcatggcttactgctctttcagggatttcttagtcaccacaatcatacagtgataatgtttaagcaattatttgggggctctgttttcattaaatattaacagtggttgcaatttgggaaagaggttagctgagatttggtatcatctttgtaacatttgcaaattatactctttcctgtttgtgatctaaagataagtgttttctataaaatataaaccaatgtgcctaaagaaacttaattatgggaaggtaattcagaatttaaatgtcactga

SEQ ID NO: 2773 - DNA, 582 bp, Canis familiaris
  misc_feature (1)..(582): n = a or c or g or t
gagtnggatccaaagttnctacatccaaggtaatctgtgaaatgaaatcttctgatatttgattggtcnctcagtgtggagtctatattgtgaacagcattaaagaggcattaggaatgctatgtcactcagagggcaaatatccatattcccaactctgagctgcttcttttttaaacctgtgcaattagctgtttgaagtgagtgttaaatagttcagaaagggtggatttcatgtatttgagctcctctctagttgatgtcaatttttattctgctgccaacctgtgacttgttctttcatttcaggggctgttccatgactcacatcagtaacttgattattacaaggtgctgaatgtgttggtaaccatactgcaatacacctcaaggaagagggttcagatttttatttttaggatattttcattttcttctcttttgaattttatatccatttatccactcagacatgcctagcctacagacagggatatatattacgaaagggtcatttttctgaagagaatattttgcgtgaaatgcaaaggaatgaggagatttgtngnttgttgattttgt

SEQ ID NO: 2774 - DNA, 517 bp, Canis familiaris
  misc_feature (1)..(517): n = a or c or g or t
gcgtgccagcgtggggccgacggcgcgcggggctccagnngtggcttcgtgggccggtggcctagacgtgtgtccgctggccttccgactgcggctcccggaggacggttcctgcggccactagggcgtgcgtgtgggaacagcctccgatgggacacgctctctgctcgtcgtgaactagggacgtaggagcatccgtagcaggtgcttaggaagcctcttgcgcggggtgctctcctgggggatggttcgggccggaggggtctctgtggagtgggatattgactctttttcctgttttagattctaggatagattttaacacctttgcaggccagggtaggctggtggcttagtcttctcaaacctagtctgtgaccacttggggtttttttttttttttgtctcatttttttttctatttatatcaccaggtnnnnnnattgagttaatatttaagttgtcaatagatacgtgtccctgttttttatggcataatatgaaannnctgcatttc

SEQ ID NO: 2775 - DNA, 551 bp, Canis familiaris
  misc_feature (1)..(551): n = a or c or g or t
ggcntnnacttccctgccatccagcatgtcataaattatgacatgnctgaggagatcgagaactacgtgcatcgtatcggccgtaccgggcgctcaggaaacacaggcatcgcaaccactttcatcaacaaggcctgtgatgagtcggtgctgatggacctcaaagccctgctgctggaggctaagcagaaggtgcctcctgtgctacaagtgctgcactgcggggatgagtccatgctggacattggaggagagcgtggctgtgccttttgtgggggcctgggccatcgaatcactgactgccccaaactcgaggctatgcagaccaagcaggtcagcaacatcggccgcaaggactacctggcccacagctccatggacttctgagccatctgtcgtcccttgtctctgagaggcttcagtctccagctaccaaccacatacaccagccccctggacaaaaagccagcatccttggcccagctggcctgggctgggccaggctgggcctggctgcctgctccctgtgtcccccagaattactatttttg

SEQ ID NO: 2776 - DNA, 672 bp, Canis familiaris
  misc_feature (1)..(672): n = a or c or g or t
aggggaaaagaagtaagtacanntgagaccttcagttggncttttatttatttagaataaaaagtagtttgataagctaccagagttagtgctgctttaaaaacactctctgaaaagatggcaaccgtccctcaggaaggctataaaagctattcccaatacatcgcaattgcttttgatttttaatcctttggagcaaatgtctgatgttatgtctgatgttatgtttttagagctgtgggggagaaatgtctaaacaattttaagggggtattatttaatgattatctgactgaatcatatgtgagctaggttctagggcagctgtccggttctttttctgttgtcctgacagtaacacagatagtaagcgatgtcttgaaaagtgattttcttatttcatactgacatctaaagacattagccttctgtttggtaaccctggggatactcctctgcaccgtgacttattaatgttttttttagatgaggctaaacctggattactctctgtatttatactttcactattcatataccagctgctaaaagaaaaaccataacttataatcttgtcttgaaattactcctaattatgaagttcactaaattcttcatgtttagggaggattgctgctagtaatgtcagtttgcagtgttctgctttaggta

SEQ ID NO: 2777 - DNA, 523 bp, Canis familiaris
  misc_feature (1)..(523): n = a or c or g or t
cntnaccacaccaggagtngacagcaggaatgggcccccaggtgagcaccnagcnctccactgggcagatgacattactgccttcttgtggggagggtccggtgcccacacgcccacgttggcccgtgggccagggtaggaggccagtgctccaggggctgtggccacagctctcgtgcaggcccctgccttggccagccaccagcccctccagcgagttcctggccccacagcacagcccctagggcatgaggggcgcctcctccccagggggcgccccagctgggctcctcggtctttctcagtggctctccaagtatggggaggctgctggacccccatccacctgcagtgcagcctggggcccaggggccatgccccgaagggtatgggtgggggcccaggtgcggggtcagatgcacaacacaggcttcttcttggccgccccacatacttgaatgtacatgcatatttattgctcacacgtgtttgccatgctgtcagtgggtcctttccaacccaa

SEQ ID NO: 2778 - DNA, 495 bp, Canis familiaris
  misc_feature (1)..(495): n = a or c or g or t
gatactatatnnagtnnnntgaacnnnnctttaacatatgaggaaggttgtcctgctaaagatgcaattcaatgcttccttttttattactatttccaaaaaaaaaaagaatatatatatatatatatatatattaaagtcagatgataatcacaatcaaaaagccaatgttaaaactggtttcttggtttggacaggtttggtttgggtgagtttgtttcctggtntctactgtagattctttggggtaatttgataacttgagtggtctttttcatctccttcttctctcttactcaaggggacagcgaaacaactgcagaacaaggcatatctgaaggacgttttgtactaaacttcatttattgcatttttaaagggggaagaaaaggcgtggcaactctcccaacaatgagctgtttatttaaatttcactaagaagtaaaaaaaaaattatggtgaggagcacgctcctttcgagttgtttggtactgc

SEQ ID NO: 2779 - DNA, 542 bp, Canis familiaris
  misc_feature (1)..(542): n = a or c or g or t
agccgtcacgtcctgtgcctcgtccacacgtgcttttcnctcctggcaaagcagtccctctccctctcccccagccgcgcacttcctcttccactctccagctcatccacccgttgacagacagtgtcaccttcctctcctccttcccttttcccggttgctgaacccaatccagtctgtaacctagatgaagatcatttatttaaaagtaccaaacataacctagagtacacggaatatggaccgcacgtaggtagccttctgtatgtaatgggtttctgctttctcaccagaccagttttctatttataagtctcgtctattcatgatgtttaaaaggaagctccatttgctgttctctacaaacgacagtgcattcagtggcccgatgcctcgagagatgccatgcttctgaatccttccatgtgaatgtcatgctctcctcctatagcctgtgtccaagtgaacatacccattaaccagctagttaccttttcgactgnnnnnnagaatgtgaaaatgaagatttatttcttttaatt

SEQ ID NO: 2780 - DNA, 386 bp, Canis familiaris
  misc_feature (1)..(386): n = a or c or g or t
aatttaatacaccccagcaaccgaagaagaaataaattttagctattcggataaatgtacaacttcctaaaagggatatgatttttttaaattaaaatttctgaaaactgagggacaaataaagttaggggatgggaatcttctaaaaacagaattatttttgttttaaaattaaaatactgtgtacctccaatgaaatgcaagttcactgaatgtgaacagctttgcttttcacgtgattaagaccctactccaaattgtagaagcttttcaggaaccatattactctcatgatacttcattaatctccatcatgtatgccaagcctgacacatttgacagtgaggacaatgtggcttgctcctttttgannnnnnagataatgc

SEQ ID NO: 2781 - DNA, 596 bp, Canis familiaris
  misc_feature (1)..(596): n = a or c or g or t
tgctgananctagtgacttggacccnntcatcctgacgctctccctcatcntcgtgctcatnntgctgnngctggccgtgctcgccctgctctcccaccgccggactctgaagcagaagatctggcctggcatcccaagccctgagagtgagtttgagggcctcttcaccacccacaagggtaacttccagctgtggctgtaccagaacgagggctgtctttggtggagcccctgtactccccttgcagaggacccacccgcacccctggaagtcctctctgaacgctgctggggggcaccacaagcagtggagccaggggcagatgatgaggggcccctgctggagccagtgggcagtgaacattcccaggacacgtacctggtgctggacaagtggttgctgccccggaacccgtccagtgaggatgtctcacagtctggtggcagtttggacatagtagccatggataaaggctcagaagcatcctcctgctcatctggtttgtccctgaagcctgggccagagggggccttgggcgccagctttgagtataccatcctggatcccagctcccagctcttgtgcccaagggca

SEQ ID NO: 2782 - DNA, 622 bp, Canis familiaris
  misc_feature (1)..(622): n = a or c or g or t
anctgtcacntgggctccccttccttgtgaacactgcctgtgannncagcccanagnnnnnaaggtcttccctggttgcatcaggtcntcctttcttgttcgcgtcctgcnnctgggttcgtggcctgtggcagcctgccattctgggggaggggggccgcactgcagatcctccaaggcaggcgcaggacgggctgatgacacagctgcggcgtggccacgatggacgctgtgcaccagggcggctgctggtgtttggggacctgtgcctcgtggccctgtacatggccaggtggctaaccctgggaccccggggggctggctgctggtgtttcctccagatgcagctcccccccccccactgacagcgaggacagaacataggcttgtgccctcagtgtgtgccggggattcctcccatgtccggcatccctgaaggtacccctccccttaccgacaaccctctggtggcagctctgtgcccttgtgggaatgattctcagagctctgtgtttctgatgcttcggtcggggtccagcgtccagattgatctttgattgtaaagtatatttttgcttttcagccttctaatttaatacatgatatctataaaagtagaaga

SEQ ID NO: 2783 - DNA, 548 bp, Canis familiaris
  misc_feature (1)..(548): n = a or c or g or t
gctgcctgatgccntgcgntcctgcccggccctgcgcagggcnttggctgtggactcggcctttcgcgaaggcaacaccgcccgcctattccgcctgctgcggatcctgccctacctgcagagctgtgctgtgcggtgccacatcggccgcgcccgccgaggagccctggcccgcctcgctcgtgccctgagcacccccaaaggccagaccttgcccctgggcttcatagtccacctgctggccctggatgggcctgaagaggcacgggacctgtgccaggcccacggactgcccttggatggacaggaaagagttgtgtttctcaggggtcattacactgaggaagggctgccacctgctgggacctgcaaagtgttggtagggagcaaactcgcagggcgcaccctggaggaggtggtcatggcagaggaggaagatgagggtgtggacagacccaagtccccagcatgaggaggagctgtgcactctcccagagcccaggactggatccaagcactcagnnnncttttttcataattcctacaca

SEQ ID NO: 2784 - DNA, 544 bp, Canis familiaris
  misc_feature (1)..(544): n = a or c or g or t
aaacagatgtntnantttgctnnaatgtccccantnnnnntgnngccctattccccactcccccccagcatgcnngccccagcatgctgctcctcctgctcttctagtttcaccagacccatctccctgtgcttcannngagcaaactgagctcgtggggtggggggtgggtgggtaagggagaaactagaacccagagcagcctgtcgagctggttctccagggctaccatccccaccctgtccgtggcagagttccttgtgtnnngagctccagtgccttttggctgggccctccttgggtagggacggagaatcctgacccttggacggccttggccgtggctccatgctgctgcctcctgcatggaggtgcctaaccggtgttaagcgtccagaggtgtggccgctcccgaaggtgggatggagagaggccttgaagtccgtgtccttccagtctgggcagggacttattttgacctcagcagtggttccctccacgcttcttggttctttgtaannnnnngttaatttgaacaaaactg

SEQ ID NO: 2785 - DNA, 491 bp, Canis familiaris
  misc_feature (1)..(491): n = a or c or g or t
tgcttgnntgataatagagtggagatgaaagagtgatgtctataaggcttgattcttannaaactgacaggcactcacagtgatgtccatcttgggaaataatcagagtaaacaagagtagctctaacaatgtgacttctgagagaacaattttttaagaccaagtgctattttagcatgagcctaggggtaaatgtctatatagtagagagctttgagacttctgcgttatctgggtataaatagagcctttgagccccttagaagaaagcttaggtatttaccgagatgaccattattttctgctgctgctgaccagtgaaatactttccaaatgctgttttaattccaccagcgcctttagatggatggcttgatatgcccttatttattatgtgacttacagaaatgacagacccatcaccaacgtgacactgtctccccatacatctcagtctgcaaaactagtaccaggtacttgtttttccagt

SEQ ID NO: 2786 - DNA, 151 bp, Canis familiaris
  misc_feature (1)..(151): n = a or c or g or t
gccgctaccatcagtgctacaatggctcgggcacagattacagaggcaccgccagcaccaccaagtcagggcaccagtgccagccgtggggcctgcagctcccccacagccaccacctaaccagcgcagacttcnnnnagctcggaggggg

SEQ ID NO: 2787 - DNA, 647 bp, Canis familiaris
  misc_feature (1)..(647): n = a or c or g or t
aanngtgggcagaatncngnctcacacagaggcccagattgtgaacatgaagacaggaaacctagtagagctgaacacacccggagagctgttcatccgagggtactgcgtcatgctgggctactggggtgagcccgagaagaccaaggaagcaattggaccagacaagtggtatcggacaggagacatcgccgcgatagacaaacagggcttctgcaagatcgtgggccgctccaaggatatgatcatccggggcggggaaaacatctaccccgcagagcttgaggacttctttcacaaacacccgcaggtgctggaagtgcaggtggtgggagtgaaggacgctcggatgggggaggaaatctgtgcctgcattcgcctgaagaagggggagaagactacggaggaagagatcaaggctttctgcaaagggaagatctcccacttcaagattcctcgatacatcgtgtttgtcacagactaccccctcaccgtctcagggaagatccagaaattcaaacttcgagagcagatggaacaacatttaaacctgtgaataagggattgaggggtcctcacaagccctccctgcccttcccccacatccccatnnnnnnttgtgacttgacataaagagnntctcnnnn

SEQ ID NO: 2788 - DNA, 439 bp, Canis familiaris
  misc_feature (1)..(439): n = a or c or g or t
acaacttcagccgcctggcnnannagnagctcaaccacaagatnnagctcagcaaggagatccgcgaggcgcacctggcggcgctgcgcgagcggctgcgggagaaggagctgcacgccgccgaagtgcgcaggaacaaggggcagcgggaggagatgtccggctaaggggctgcgggccgcaggcgcctggatcctgagaggagacgtccacacacgcgggctctggtttcgtcttgtcccactttgtctagatgcaactcttgttcctgctccctcctcccctgcactcccagctcctgcttctctttccgctctgagctgcccagtcctcgtggcatgtcgctctccacaggcgcgccctccaggagccaccagggcgtggcacggtccctcagttcaggcacaggccaggcactnnncaggccccctcttggtgg

SEQ ID NO: 2789 - DNA, 513 bp, Canis familiaris
  misc_feature (1)..(513): n = a or c or g or t
cannanngctctgctcagccacnngcagagcnctggcgcatcctctctctgcccagcagcannnggccccgggccagctgagagcggccactgtgccaaacagactgtgcgagtctaactgctcggatgcttctagagaaagagggagaatcgatgggctcctttgtaaacaacttcttgtgctctcaggctgtgactgacttcaaaggtggcataacttaatcctgtcacagattatgccatggaaatcttgagatggttttctttgtaaggaaatacctagggggctacttaaaaactggatgcctacaggtaaacagcaaatgacaaaagtaaaccaagtgcagctttgagcaagtaagaaaaactacacagccaaatataacttctactcactatttaaacaccatttgtggtaaaatcttgcagatcttaaatattaaggtttgtgttgcgctaggacatttcttcatttgctcatctccattaacaggtcctgattgacagtactga

SEQ ID NO: 2790 - DNA, 606 bp, Canis familiaris
  misc_feature (1)..(606): n = a or c or g or t
taccctcccacaagtccatngattcagtngacttatccatttgtgannactcctcacantgtngcnnnnagcgatgcntggaacattcctggcttatcctgggaacnnnnnncagcaccctcaccctccctcccannnnncctcccatcagtnnaggctngactcttcttactcagaggtctcgtcctgcccatacccaggtgcccaggggtgagcatactcctagatgccaatttggtctccacatttctgcttccccctgtccctgtggtacagttcttcagtggtcctggcatcaatccagtcccctgcagccctgctgtaccattgtaactagacacaagggaagaggcagacatcaggtgctgtactcacttctgctccctagggaattggggaaaggaactgaaccctggctggagggggtgggagggcttttaatttatttctctttcttttgaggcttcccctctctgagccagttttcatttcctccctgtggcattaaccactctggcctcccaccctagacctgtgcccacaactggggaggtgggctgggagcaaaaggagagggcgagacccagttttgtgtggttggttttt

SEQ ID NO: 2791 - DNA, 622 bp, Canis familiaris
  misc_feature (1)..(622): n = a or c or g or t
catcacggtgaacgctgtgcgtngcttccccatgagcgctgccatgttccttgggtatgagctctcactgcannnaatccgcggggaccacacggtgaccaaccnntgagcaccaggccaggatccactgtcccagaaacttgctggaataatgcaggtctgcttcttgctgtgacattcttgctccagacctcattgatctgctttcagttcctggaaaatccattttcaaggaatgaagatgcattcttcctataatacctttgttggacatttacgaattgccacggacaacctcatggcccttcacatctgttctcaggggtgatactctgccaactgttgcttcacagaaatgattttctcaatgatttgttgacccttgggtcttgctgactgataatcccggttagatgaaagccttatttttcatcctttttcccaagggccagtgtcacctggccggatatgttgtgccctgaccacagcctcattttgctacaggctgtgccgaggtcagccacctgtagaggcaagtcttgggagagcctccctgcctgagcagcggcacatgccaaaaaggcacttgggaggtggtggcgctgagcgtgctgggcccggc

SEQ ID NO: 2792 - DNA, 629 bp, Canis familiaris
  misc_feature (1)..(629): n = a or c or g or t
tattcgagaggtgtatcagtatatgcatnnnnnnatnactgtnnnnnnnngnnntgaattnngtgncannnnnnnagcaaannnnncagnngcagcttttgcagctagtgaannncactcccaccntcgggtagtcgaactgccaaagactgatgaaggnnttggttttaacgtgatgggaggaaannagcaaaattcccccatttacatctctcgcatcattcctggaggcgtggccgaaagacacggaggcctcaaaaggggagaccagctgctatcagtgaacggagtgtaccatttggggaactcaacatggaagatactgagaccatgtcattactaaccaagaacaaattttagaagagaatgatgtgaagggctgaagcaaacctgaactacttcagtgcaagtactctggggaaaatttcctaaagtcctacttggaaagtgaagaaattattccatggatctttaagcatctgaaaagacatttgataggatgtcttgattatgtatgtttgtttttattccttccctccttnnnaaaggataggtcacagtgtctggtaaaaaataaaacatgtatatacagaactattaacatgacatgttaggaaataaagtaggat

SEQ ID NO: 2793 - DNA, 455 bp, Canis familiaris
  misc_feature (1)..(455): n = a or c or g or t
tgctttttttaaaaannannntnntttnnnaatnnnaatnnnagnctggtcccgtagccctgccccagnngatnnagtgnnngcttgtntnnntgtgtgtgtgtgtgtgtgtgtgtgtgtntgcacgcgcccccagggttaactggtgatgagtgtcntgccctgannnnacgctaaacccaccttnngtcctgtcccctcgacgccagtgtgggggagggggcagacggaaggaccccaggatccagcccagggccggagggcggagcnactctagcctcccagattttcccaggttnnggtccagacactaacttagttcctgaatccagtacccccacccnnnaccccatcggtgctgtttccaatagtgtggctcccacataggggaggaatcagaaggggctgtgtagcccctgccagctgcccttgaaacccattcagaccgtggtcag

SEQ ID NO: 2794 - DNA, 586 bp, Canis familiaris
  misc_feature (1)..(586): n = a or c or g or t
tgcttcctgatgnctcctgactgtgcaaagagtagcangatgataaataatgggagacttccgagatgttgattcaangcataagcagtgggaggatgatccctagctcctgaagagggaaggaaacgtgaatggcaggaagaaagtctggtccttcgtaccctttggcctagttaaaatatgtgcctttttggtgtgtttcgttcatcactacaaggtaaaaaggaaacattacaattcaggtctttaaaaagttcatttattgaaatccatatgtgtaacagcattacaaatgagcatatctaaaaacataatcacttcaagccatttctggaaacatcctgcaggagggctccttgtctggcaccagagctgagctgcagcccacccggctcgcaggtgtctccaggcagtggacagggcgcggacccagcagcccgctgccctccaaggctctggccgctggcaaggtcgtggtgcgttgtggcatctcacgaacaaatcaaatgaatgtaaatatctctttgtaaaccatttctttcactctgtttcgtccaggtcagcaatcagattgtcgcatgctggg

SEQ ID NO: 2795 - DNA, 614 bp, Canis familiaris
  misc_feature (1)..(614): n = a or c or g or t
tgcnnncgagtcgctgcggagtccacacgggagaccgcgtccacgtgccacctccacaggctnnagcgagcgcagttccgagcttttcagctgagggagcaggcccaagcggggggaggaccggctgccggggagggaggaagccgacgggccgcggagcagcctgcacgcccagcccagcccagcccagcccagcccagccgtcccctctggccactgctgcggacacctgccttaacacggacacctggagtactccacagttttgccttaaaggacctccccgagatgccccagccctgtctgcttctccctccaggaccgagaggcacttgtagaattgggaggggggagctgagcacgactgtccttccggtcaggattacgtgatgtgagaatgtgcgtgagagcgagcgagagcgagagggggaagaggaggaaggaataggagccttctctgaggagaggaggggggagatgggagaagggagacagggtcatttccagcagagtctagaaatctctctgtaaggcaaaaataacctaaaaagactaacctgccctcccaccctgtacggctgtgagattgtccccatcctgtgctcctgtctgca

SEQ ID NO: 2796 - DNA, 626 bp, Canis familiaris
  misc_feature (1)..(626): n = a or c or g or t
caacgcnnagcaagnatacnntagtttagactccatacccatagctcactgcagaagagctcccttggaggggttttccctcttctgcaaaataagccatgtcactaaagagaactcatcaaggagacagtgattggtggcatgcacttccaactcagtcatttcatggagcaatgcacagtgccagggaacatgtatcagcctggaaggtgatggggtggttctgtcccagctctgcctctaatgagctcctgccatgttgggtgagcacatccctgctctcagcctcgacttcttattagtttcatgacagggagggactctatagtccctcctaccacagaaatgttgattcttctctctctcccataaactgacaaaatgagcatgactatcaaataattacagtaaataatagatggagggcttacctggagacaaggcaggaaaatgttcatattctgagatttgttcttgggtcatgagaagatgttctccagatttggggttaggaaactaaactcactggaaatgccaacatgccttcctttacataccagaaatatttctggaaatgtcataagatgaaaaccgatctttttcaacactcaaatcatgttttaaac

SEQ ID NO: 2797 - DNA, 609 bp, Canis familiaris
  misc_feature (1)..(609): n = a or c or g or t
gtgtngaaagtgggaaaaaggaatattctctggacacgagaggaaaattcattcttagtattgcatatagccctgatgggaagtatctggccagtggagccatagatgggattatcaatatttttgatattgcaactggaaaacttctgcacacgctggaaggccatgctatgcctatccgttccctgacattctccccggattctcagctcctggtcactgcatcagatgatggctacatcaagatctatgatgtacaacatgccaatttggctggcacgctgagtggccatgcatcatgggtgctgaatgttgcattttgtcctgacgacacccactttgtgtccagttcatctgataaaagtgtgaaagtttgggatgttggaacaagaacctgtgttcacaccttcttcgatcaccaggatcaggtctggggagtaaaatacaatggaaatggctcaaagattgtgtccgtgggcgatgaccaggaaatccacgtctatgattgccccgtgtaaacaccagtctcgcaggctggtgtgcaggtcatgacattccgtacctctctagctttaacaaaacagagtnnttattggaacagaagcttaa

SEQ ID NO: 2798 - DNA, 630 bp, Canis familiaris
  misc_feature (1)..(621): n = a or c or g or t
ccccattgaatgcctgcatgctgcttgaantgtaccacccacacctccatgaccaagggcgtcagagagttctgcagttcaggnnnaggccactctctgcttttcctgtctgactcttgtaagtcctccctcactgaatgtagaattgttgccgagtttttgagaagtgttgattccctgttaacatggggtatcagttctgcctcacatttcccacttacagtcgaggctcattgcaaacaacaccttgggccatctcaacaccatccgtggatgaaaatggggctattaatatacactctaaaagccataatcaaaatgctcagagggaactggataaggacagtgggcctggctgttgtctactgcgcatggttttgtctggtactgtttggaaatctgccaccttctccccgcccttgttattttgaatgaaatgcttttgaggttatttatgaaaggagtgatcctggggcaggcaggaggcagtgggctttatggctctttggagttactattgagcttgaccttctctttggctacttttagacaaagaatatgccaatacttgggctctaagttttacaattgatatttatttgtatcannnnnnngtctaggaatgtaaaa

SEQ ID NO: 2799 - DNA, 631 bp, Canis familiaris
  misc_feature (1)..(631): n = a or c or g or t
gaaatgaactcggaagaaaaacgattgagtgcttctctttaagaatagaacatggctacattgaatgtatattttcaattnctttagagaaatgatattttatattatactaattatgtatgataattgtatgaataataaatttattattggactatattggcagtctggagcttatatgtacaagctgtcntaagaaattgacatttgttaagagaagaaagttgtcgataaatgggaaagtattgtaagtaatattttattttagaacatcacccttagaggtctttatttaccctgctgggctgagggtccaggtcagaaggattctctggttgtcctaaaggatagtgaaaagggcgtctctgggtacaatttatcatattcaagttagagtttcttttctctttccggattcttgtttgttttttaatggcattgtgtttttatatgggatgctctatgctgcaggctagtgttgttggtgagatataaatatttcttgtaagaaaaaaaatgccagtatgtccatttcttaaaaaacattgattggtccaagaaaatgtaaataacatcctgaattagcaaatggtttctgaaaaccttgnnnnnnttatttatttttatcctg

SEQ ID NO: 2800 - DNA, 456 bp, Canis familiaris
  misc_feature (1)..(456): n = a or c or g or t
ttgtcctgtgtttgtgtannccctactatgctttccatggatgaggcttgagttgtacannntgaaganngccaaacctgtaaaggnnagttataagaacattgactcttgttcaccttggtgggacaggctaaagggggaggtggnngaagtccacagagttatgttcttcaactccacacttctgcacccagtcttttcgaaatgtgaaaggaagcttctacctatcatgagtcagacctggagtccataacctcagaaggcaatactactggctgagaatgtagaaggatcaaganngctttagtnnnnnncntgacattcnnnatnacaggtgcatgttgatgcccnatnnnanntgtccttgtgctttaagaagaggtcactgatngaggaagatctccnnnctgttcttggctctaccggtagaacagtcttggggtgggcgagttatag

SEQ ID NO: 2801 - DNA, 423 bp, Canis familiaris
gtcatcctttccctcatgcccacgccccctcagacctgctgcagaatcaagagtaagcccagaactctgtggcccggtgaggcagtctgctcatctgtgctgcccaagttgaattataggataaaagttaaaattcagttccccaggcgcaagagccatattccaagtgcttggggacaacatgtgcctggctgacggcaaagacacagaacactcctaccagcaagagccacctctccagctgtggcaagataaatttcaatttaaaaaataaggaacctagaaatttagagacttaagaagcatcagccaactgcaacccctgtaccgtttttggatcccaaaccccttgaaaacctcatgggaggttagcatgtgtggagagtttgcattaattagcttcactgtggtaatcgtatcact

SEQ ID NO: 2802 - DNA, 250 bp, Canis familiaris
  misc_feature (1)..(250): n = a or c or g or t
catagnagtgcatcactctcggtggtatgctagtagcaggagaatgcaattttaggacatnctgatcctgtgtgtcgnnntggcaccatttcaatttatgtccctnnnaatannngatactagnnncttttttttttttttttaataaanannnnagaacaataagattggcctgtcagtnnaattaatagtctgtanagtnctatatcttctttcagtaannacataatacatatatttccngaatttt

SEQ ID NO: 2803 - DNA, 565 bp, Canis familiaris
  misc_feature (1)..(565): n = a or c or g or t
tgttaatccacnngaaaaaaaatcaagtcattaatttcttttaanatgtgcacctngacatattaacaggtaaatcaaatggatcatgatcttagaanattacatcacttcannnagatttgttacaaatattttggagattaatatgatagagtatcatcgaaatgccttcattggggaaaagcagattggcagttaggtagacatggcttgaaattgccattttgtttctgcttttcaaatttcagtctttaaactacattttgtgaaaattaggggatggtgagaaatccaagtgatatgtcccaaactaagcaaatgtagnnntctatgataagcagctagattgtcctttccccacacattgtttctctaaaagctctttgaatgcatgagtgtcccctgagagaggatgtccttctattcctaatctcttctctgctctaacaatagagcttcacagcacagttcaagactcatcattttacatgtaggtataggggccttcctagaatggatgcanttggaccaaatccaataatgtaattttcaaaaatcattttta

SEQ ID NO: 2804 - DNA, 237 bp, Canis familiaris
  misc_feature (1)..(237): n = a or c or g or t
gnannnctgnngagaacttnnnnnctttnnnccacnagtttgncnggtnnnnnnaannnnctnnnnnngaantctggcanccgttgtccctgtgnnntcannnnagtcnnntngggcagngtgtgccaccagctgaatatcaggcacctagtgggaagtgggtgatgctcatgtgactggctggagctttgggggtggggtgggggttaactactnnnnntttggccatgatctctt

SEQ ID NO: 2805 - DNA, 599 bp, Canis familiaris
  misc_feature (1)..(599): n = a or c or g or t
tgcaacggcattaaagtcaacagctctgnctaccacagtgcatttgatggtcacctggnnagcaatggcnctctgagagtgaacgagtacctncaggtnnagggctacagtcacatctatgccattggcgactgtgcggacgtgaaggagcccaagatggcctatcacgctggcctccatgccagcgtcgccgtggccaacattgtcaactccaggaaacagaggcccctcaaggcctataagccaggtgcgctgacgttcctcctggccatggggagaaatgacggcgtgggccagatcagtggcttctatgtggggcggctcatggtgcggctggccaagagccgagacctgtttgtctcctccagctggaagaccatgcgacagtctccaccttgaagcggagctgggcgggagacagttctaaaacaacaggaagaaaacacatggaaagaaaccccttgtggagacctgggtaattacagactgaggctcttttaaacgagattataaaatgcagagggctccttccgtgggcaggacctgcgccggtggcctccgtgacccgctgccnnnncagctgccctcggctcccctgc

SEQ ID NO: 2806 - DNA, 415 bp, Canis familiaris
  misc_feature (1)..(415): n = a or c or g or t
ccacaaatttcaatcactttgtgcccactcatgaaaattctnnnnnnnnnnnngggttccaattctgtnggttcattctttactgtccgtcttggtattgcaatagcttctagagaggatttagaagagtaacttaaatatctagatccctctgtgtttctagactgtcttctgttcattgcatccctccttctcatgaaaattagaagcttgaaaagcccaacaaagaaccctgagggttctcctgtgaaacctttctttggaggtgcctttcttcagggagagctttccctcttaatcccagggaccctgttgctaactaagccaaagtcctgggatgataactaggtttgctgctgatcttacacgtttcatgatattctcttatatcagctttgtgctattattgctgctg

SEQ ID NO: 2807 - DNA, 501 bp, Canis familiaris
  misc_feature (1)..(501): n = a or c or g or t
acgtgttctgctttcgcccgctgccggaagcgtccggtgaagtccccgcgcaggcccaggtgatcggaactccgcctgcaccacgccgggcgtgctgccctgcggccccacgagctagaacccgacctccacagactccgtcacctttcggacttctcgggcatttgatagcagtttaaagtactatgaagccttcctgctctcggacgccagccgcgcggttgtctttctaccgtttattcctgagaaactctgtaacaggctttagcggcctttgtatccatacagtcccgccgtgtaagatcattcctgccttgagtgtaggttgctgagctcccgccctccacatccacactgtgtatctgatcccttctgggnnnnnngcccacgccagggacctggagggctgtctcggtccccacgcttttttctgaaatagccctaagagcagctgatctaacctcaaggaaaccgtgaagctcagagtgccttaattttaac

SEQ ID NO: 2808 - DNA, 514 bp, Canis familiaris
  misc_feature (1)..(514): n = a or c or g or t
tgggccnnggccatcattttccgtcaagccaagatgcacctgggcgagcagaatatnnnagccaaatttgccctctttcagacgctcctcatcctgactgctctgcagccatccatcttctcagtcttggccagcagcgggcagattgcttgttcacctcccttttcttctaaaatcaggtctcaagtgatgaactgccacctgctcgtactggagacttttctaatgactgtgctgacacgtgtgtactaccgaaggaaagacagtaaggttggatatgagcctttctcttcctcagacctggatttgacctcaaagtccaagatagatggtttggacattgaaagagactctacacattaaatgggcacaggatttcctcactgtccctcaaccttgaccaaatggagatgaattcattttcagcaccagctggcggattacatttgactataggggcaaaggagaattatggaataggaattccataataataggcaattattttggatct

SEQ ID NO: 2809 - DNA, 601 bp, Canis familiaris
  misc_feature (1)..(601): n = a or c or g or t
actcagcaagaagccacagctcagcatccagaaccttctggtgaggtngaaccatccccaacccagcannagggtccagctcactctccagagcatcatgtggtaacagtttctcctctaggtcagagtcaagctgagcttttactctcccccagagtcactgttaaacctgtggatctggcacttataactccagagtccactaatgaagttgaaacttctctaccccaacaagaggcctcagctcagtctgctgtgtcccaggaacacttgaaaccttctgcaatccagcaagagtttccagaacaacttccagcccctgctgaaaatgttgaaccttctccagtccagcagggagtcccaacgcagactggagatcttcctgaggaaactgaactttctccaagccagcagtggagctcatctctgcctcataataaagattagtccatcaattatatcaattcaggcaatttacgaaatgaaatcaacaagaatcacagagattcaagatatcagtgactctaatcctataataattctctgatcaaggtttatttttttctttaaataattgttacagttgaagtcattgggtaat

SEQ ID NO: 2810 - DNA, 617 bp, Canis familiaris
  misc_feature (1)..(617): n = a or c or g or t
gtangacaagaccatcaaatccgagagctaactgctanantnnnnnctcagagcatgcatgtaagtgagctcaaaagaaatatncgaaccnntgaggacaaagttgctgaaatngnagcacagcagtgcaacgggatctacatcnnnaagatcggcaacttcgggatgcatctgaaatctcaggaagaagagaaacctgttgtcattcacagccctggattctacacagggaagcctgggtacaaactgtgcatgcgcctgcacctccagttaccaactgctcagcgctgtgctaattatatatccctctttgtccacaccatgcaaggagagtatgatagccacctcccctggcccttccagggtacaatacgccttgcgattcttgatcaatctgaagcgcccgtcaggcaaaaccatgaagagataatggatgccaaaccagagctgcttgccttccagagacccacgatcccacggaacccaaaaggttttggctacgtgacttttatgcatctggaagccctaagacaaagaaccttcattaaggatgatactttattagtacgctgtgaggtctctacccgcttcgatatgggcagtccccggagggaagg

SEQ ID NO: 2811 - DNA, 586 bp, Canis familiaris
  misc_feature (1)..(586): n = a or c or g or t
gcatctgcatcctggtgaatggggtngtaccccaagatcaatccattgtnnnnnnctcccttgctgtgctggnnaaaggctgcctnncagcttctttcaactgcatcttcttatatactggnnagctgtaccccacagtgatccggcagacgggcatgggaatgggcagcaccatggcccgagtgggcagcatcgtgagcccgctggtgggcatgactgctgagctctacccctccgtgcctctcttcatctacggcgcggtccccgtggctgccagcgctgtcactgccctcctgccagagaccctgggccagccactgccagacacagtgcaggacatggaaaacaggagaagaggaaagccaaggcggcaggagcaagagcagcagaagcagatggtcccgctccaggcctcagcacaaggaaatggactctaagcactgagaaggagccttacagagccagaaatggagtgagggtcctacaggtcctgagccacccactccgggaagggaaagggaaagcccaagggtccaggctgtggttcaggaaagcccatctcagggctctcccgccctgagcagac

SEQ ID NO: 2812 - DNA, 555 bp, Canis familiaris
  misc_feature (1)..(555): n = a or c or g or t
gnnaggtttcagctcccctgacgcttcgggcaagccctgacccgggtctggggggtgaagcaggggaggaggcgcctctnnnnncccagctcagcctccacctggggctccccctcgcaaggagccggctgtgcggacttgcccccagacccccagatggctcgtgacgggaggacgttctgttcgctgcctcacaggatgactgtcccctgcaccttctcggtttttaaatgatcattttgtggtgtaacagaactttttagaattttagattcagtttctctgtatgaaaaaggcttagcagatatccgaacgtctaacagcagatgggtgataaccctcctaggagtgtgtttgctgagaagccactacaaatattaaccttaggtccagacgggggcaaggcccgcggggtttgcaggcggcttggctcctgctcctgctcctgctcctgctcctggtcctgcggctgagcctgagctcccctggcggctcctgcagccctcggctcctacccagtctgaaggacccttcnnnnacacagcaaataacttt

SEQ ID NO: 2813 - DNA, 647 bp, Canis familiaris
  misc_feature (1)..(647): n = a or c or g or t
gaagacatccagaagtacctngacgagcaggnnaacaccgacctcccctacgaaatcgagagagaggtccttgccntgaagcaaagaatcagccagatgtgatcagacccgagagcgtcacctttccaatcatccccttttctagtccttgagatgtaccgggagcaggagggagcacgatgtcccgagcggacgccgcctatcccaccgtaatgaccacactgatgagccgattcattttcaaatgaaaaatgctttcatttttcagatcagactgcagattccaggctcgtaactatgagatcaggaagggaaatcatagcaggtctccaaaattcactacccgatgcacgtttgttcaatcctgaggacactaggcagttaggctttcccattcttatcacttcagctctatcagttagccggaatgcacagataaaatacttgagctgtatatatgggtgtgtgagtgtgtgtgtgtgtgtgtacttcttgttatctgaggtgtatatagtaccttaggaaaaatcttgggcaagatgacctagttgttgctagaaagaaatgttgctttattattaatatgtgtgtttaaattatttttatatactcctgttacttgcctttacgtaatttcagtgttttcc

SEQ ID NO: 2814 - DNA, 566 bp, Canis familiaris
  misc_feature (1)..(566): n = a or c or g or t
gcaagaaagattccccatgaatatanngtagatcataaaacatgggaaaaatcagccctctttaaacatcagatagtacacatgggcaaaaaaccttacgagcacaatgaaaatggaaataacttcaacaaaaagtcacatctcacccaacttcgaagagctcactcaggtgaaaaaacttttgaatgtggtgaatgtgggaaaacattctgggagaagtcaaacctcacccagcatcaaagaacacacacaggagagaaaccctatgaatgtactgaatgtgggaaatccttttgtcagaaaccacaccttaccaaccatcagcgaacacatacaggagaaaaaccctatgaatgtaagcagtgtggaaaaacattctgtgtaaagtcaaatcttacagaacatcagagaacgcatacaggggagaaaccgtatgaatgtaatacatgtaggaaatccttctgccacaggtcagccctaactgtccatcagagaacacacacaggagagaaaccctttatgtgtaatgaatgtgggaagtccttctgtnnnagtcaaacctcatc

SEQ ID NO: 2815 - DNA, 134 bp, Canis familiaris
  misc_feature (1)..(134): n = a or c or g or t
tagggactccaaaccccagactcctcttcccaacactgtacctcagttcattgccagagagccaacgagnnnnnntgcctgcactnnncccagtagccnnnngtgtgggccccgtacccnctgacccagcggag

SEQ ID NO: 2816 - DNA, 553 bp, Canis familiaris
  misc_feature (1)..(553): n = a or c or g or t
tttcaactancntgaaaaattgaagtatgaatactatctcaannaatccttgaaacaaatgaatgttggtgaagatttagaaagggaagattttgacagtcgtagatacaaatacttggatgatgatggatctctctctcctattgaagagtcagaaacagtggaagaggctgcaacaactcttgaacatgatgatggatgtgatatcaaattggtggacaataatgaattcatagtaagttctgaaataccaaagaaaatgaatctgtatttaggacaagaggaatatactgaagaagctgcttcgtctaaaaagagagcatcaaaatccaaaaacatgggacagaggatagaatggtctgaaaaggaagagataggaatatgaatattaaggcttttcacttgaaaacagtgtctggacttaaagggctctaaagaaattggacctcaaagattacaggacagtgacagctgtggattgaacaaaagtttgttttaaaagtgctattttgaagatcatcactctggnnnnngtggaactatggtgattggc

SEQ ID NO: 2817 - DNA, 570 bp, Canis familiaris
  misc_feature (1)..(570): n = a or c or g or t
cgtccatgccagcgctgaccccagacaggnncgagaaatggtagaaatcctcacaaaggaatttattttaatggctggaactgtggatgtggtnnagctggagcgggccaagacacagctgatgtccatgctcatgatgaacctggagtccaggcctgtgatctttgaggacgtagggaggcaggtcctggcgacccgttccagaaagctgccccacgagttgtgtgcgctcatccgcagcgtgaagccagaagacatccggagagttgcctctcagatgctttgcaggaagcctgcagtggccgccctgggcgatctgagccacctgccagcctacgagcacatccaggcggcgctgtccagcagagatgggcgcctgcccaggacctaccggctcttccgctagaggctggccaagatctggcctggctgtgggctgtggactcagcgtgtgttcacacatgtctctttgggtgtgagtttcagcaaagatttataaatggtgcaaaccatgggacttttctcttaaacacaagcgaatttaacgttgctgagtatagctcagtttct

SEQ ID NO: 2818 - DNA, 527 bp, Canis familiaris
  misc_feature (1)..(527): n = a or c or g or t
taaaatacnnntgttccaagatnngtatatttttaaagattggaatattcacatagctcatannatgacaatttttggggnnctgtttaaattttggnntcagttttgtgagtttaggaagaacttaactgatgaaaaaattatgagtgttttagagagaagacaagaatataataagcagaaaaaaaaaattggcagtcatagaagacgaaaattttgcaaaggatggaatcaaacaatatccaagttcttcaggatctgcaatcaaaacagctgctttagccactgacccagttttaggcctacaagcatatggccggcagccaacctggtgctactccaagtacatagaagccttagagcaagaaaggattcttcttaaaattcaagaggagctggaaaaaaagttatttacagccacaccatcttttacaaacttcaagtctactgcttccactatgtctttgaaaaagaccntatcttccnnnaacatccagagaatttnnnnnnnnntatttnnntgatat

SEQ ID NO: 2819 - DNA, 189 bp, Canis familiaris
  misc_feature (1)..(189): n = a or c or g or t
cgctggtcactcacggcacacgnnngcatcatgatcgagnnngtatcacctggttggnnatgaagaatcagtgaccacatggctgctggctgctgtnntagactgnnnannnnataaaggtgactaccaggactgtggccnnnnnnnaannctnctnnagcactggtttgctcactgaaaggaaatgac

SEQ ID NO: 2820 - DNA, 537 bp, Canis familiaris
  misc_feature (1)..(537): n = a or c or g or t
gaccanngcactgccctcccctgattgtgccaaaggttggcntggcnntgggctgcgcacaccctcaccctgctctgcnttaangcctgggggtctgaccagcccctcgcctctgcccctgtccagctctgcactccacccctagggcccctggggtgacacaggccattgggcacccttagaccctctgctggccaggcttgacctcctcaatgggctcttctctgacatccggtaccgatggccggtctggggctgagggaggctggggcaggtcttgtccccaggacgttatttattttgctttgggaaaaggcttcctcatcttgctctcacgcagggaggcccccacctgagggaagccatggacgtggaccagggaggggcagtctcaaggtggtgggctgggtggcaggaatggagaagctggccccaccggccacacaaggggccagatccccccccccgcccagctcccttgctgtcccacccagcttggccccccccatacccgctcccccgggagccagacctgta

SEQ ID NO: 2821 - DNA, 608 bp, Canis familiaris
  misc_feature (1)..(608): n = a or c or g or t
agtggcnctaaaaaatgagtaagccggtatttagtcaatgtctacctattgaaatgtttttaaagnctactgaaaatgtagtttctttttcaagagaggactgacaacctttgttactctatgtgaactcgagtcttaaaattcaagccagtattttcaactttaaattcaatttctattatttttcaatgaaggagattccaggaaataacggttttatgttctgctttttaaaatctcatccctaatttaagatacaactaaaatccactagacagagtagagattactttctgattcaccaagacgcagtacctgttcctaagaaggtgggcgtgtgactccctggtaccactgcctggcccatcctgtcccgaaaccaactcaacttaatcctgaaaacatacatgtcctcccaaagagaggatcccttacgctttctgtaatcctgagggtgtatacctgcagttctcaaggtatgagcctgacaccagtaacttgtcaggaaggtaaatcaggcttttaaacaagccctcctggcgaggtgatttacggtttaaaagctaccaggctgtgcgatttacatgtaattactcaaaacttcaaga

SEQ ID NO: 2822 - DNA, 672 bp, Canis familiaris
  misc_feature (1)..(672): n = a or c or g or t
ttttccgggangagatgaaaattttncgcgagaaaatagaagacttcaggnannagatgtnnnncttccgaggcaagatccgtgctttccggggtcagatcgtgggcttttggnaggaggagagacctttctgggaagaggagaaaannnnctggaaagaggaaaaaaccttctgggaaatggaaaagtccttccgagaagaagagaagaccttttggatgaagtaccgtaccttttggaaggaggacaaggccttttggaaagaggacaccgccttatgggaaagagaccggaaccttcttcaggaggacaaggccttgtgggaggaagagaaagccctatgggtcgaggaaagagctcttctggaggaggagaaggcgctgtgggaggacaagaagtccctctgggaggaagagaacgccctctgggaggaggagaaggcattctgggtggaaggcggtggcccttttgctgaggggcaggtccctgacaacaggcccggtgtcgtcgacggggggccgccgtcaccagccttcccccggggcagagcatgagcacacggggccctgctggacgacgtgcaagtccaggggcgggaggaagaggcacttctcggtctccttgcttcaaagagctaatannnnnncgaggcgacgtttgggaaaacgtctn

SEQ ID NO: 2823 - DNA, 590 bp, Canis familiaris
  misc_feature (1)..(590): n = a or c or g or t
atcttgctctcgatcacnnncttccctgtgtgtattagaatgcatgtatngnnntctaatgtcctgatcaaatccacgtgcttgaaatacnnngctctctgcttattaatgtgcccatgtatgagtccaatctacctttgcatgatctgatcattacatggctgtggttcctaagacttgctgaaatcatcgccactcagtgatgttttccagtaagagatatttgccgaattcctggcatgacactctggtgacttcctggtgtggcccagcctgtccttgtccagctgggtcccactgcaactcagacattccaagggtatgggaagccgtagtcacacctcacgctctggacattcaggcaagcagggtcccccccaacaccttggggatcagcctccacggtcagaagttcatgctcttcgcgagcagactgtgattgggaaccaaggctactgttggaaaccacacgtcctgaagcaatctgggtgacagtccctcggagtccacctcccaccgtccccttccaggggccttgctgagagccacgtctgcccccgcccttgaactctgggggactgatggtgctc

SEQ ID NO: 2824 - DNA, 213 bp, Canis familiaris
  misc_feature (1)..(213): n = a or c or g or t
aaggtttnnttatttatgattatttaaaaatggaaatgcagaggatatggcaggatgacaggtcacattacatgtttaatcnnnnnnccannnnngcnntgaagagtagttgctgtgatgattcacttttcagtgctnnnnnnnnnnntatttgatgcacactgttgatttttatggacgattcaagaactccctagtgaggcactgcacttg

SEQ ID NO: 2825 - DNA, 486 bp, Canis familiaris
  misc_feature (1)..(486): n = a or c or g or t
tctctcagaaaacccagaccctgatgactggtacttctcattccaactgtgtctcttagaattacatgccttcctggtgaaccctgnnaaccccacttcctgcagccttgtccctggcagcagagggaannacctgctcagtggccttgccctcacagccttggccagagcctgtactgtgcagcccttattgaccagaccagccccatctgcgagatgggtgcagcctgggtcctgactcctgagctgtctccccaggacattagcttttcaggatcccgggggcctggagtggctgctggttccctgtcggtccccgcctctgtagcccgagnnnnnnnctnngctttctgccctcctttgtataccaggtgttgcgcacagccccatttactggggagcctcgtggatctatttgatctttctcctgtaccctgtcccactggacttgtacccggggggaggggagagtactgtgaatcaagt

SEQ ID NO: 2826 - DNA, 611 bp, Canis familiaris
  misc_feature (1)..(611): n = a or c or g or t
ctgtgctgacagacaccaggcnnntctnctgctccgtggaacagaacgcnnnggcagacatggctccccccaacccccacaccctattctttgagatcctgtccctgctggtnnngatgctnnnnnnanntgagacagnnntagannngatcaccaactattaccagaagaagctgaaggaaggcacctgcaaggcccgagagatggagttggccataggccggctgcggtcccggaagaagcttccttacaacctccaggaggcagacttggaagtcccagaacgaagggtcctcaggattctgagccggctgaagcagcagaactatgctgccaacctgcagagcccctatgcccaagtgccctgcatcccactctgtccgaggttggacaagaagatggttcgtcggaagcagggcagccagtatgtgctggacccatgcacccctgccagcctgggccccgacatccatagcctcctcttccagtcaggatctcaaggaagcagggaacatggctctgagtgccgaaagtggctcagctctgtcccggctcgaacgcactgacctatggagtcctgactctgggcagctgttcaggtcatcaggcag

SEQ ID NO: 2827 - DNA, 456 bp, Canis familiaris
  misc_feature (1)..(456): n = a or c or g or t
tccatgcctcttgttttgtcttggnngtgacagtgcctggctgctgtccagtgtcctggtttccttacnaagcnntaggttccctgggccagccccaagtnctcagagtctgataacagaaggtgagagtcagactggtctcactcctcctaggttatcacatnctcatttggagccaggaggaagccaggatgcggccatgagagacactaannnaggtgtgggccaagcaagagcttgnnnnngcctgaggacaaatcctgtaagaagangcggctgtgtattaaaagggccaaaggtatccaagtcttagggttggagcagggacactgtggcatgggacactatgggactgggacactggcacgttactnnnctggactcagctccagaaacttctccagagttggtgccccaggtgccccaagggcccctgctgtatctagcctgnnnnna

SEQ ID NO: 2828 - DNA, 312 bp, Canis familiaris
tggctcatcccacccccccgccccatgttgcttgggcttccacaccgccccccccccacccaagacgggcctgacagccgaggagctgaaatccctggatgacgtcttcaacaaagtgtacaaagccaagtaccccattgtgggctacacagcccggaggattctcaacgaggacggcagccccaacctggacttccagcctgaagaccagccccattttgacacaaaagatgagttttgatgttctatctgcagaagcctgttcctgatatgtgggggtgcgggcagggagacctcatgtgccaaatctgc

SEQ ID NO: 2829 - DNA, 552 bp, Canis familiaris
  misc_feature (1)..(552): n = a or c or g or t
gtgannggcttataggtaaaaattaaagttttatattttatcttgtttacttctcaaatatgttgtgagaattttttgttttgaaaaaaatgtgcataccatactttgtattatannnaaactttcttaaactatttgaaaagtggtaatttacctgaaagtactttcaggagtgagcaagtcctgctttgtaaacctacattaattaatctttttgaaatattcttaatttaaaggagataaaggcataaaagtgggaaactcactacagctgtaaggtagggttttatttgggtttattttatttgatatattttaaagttataaaactgccattgaataacttacacaaggtgtgggaatggtagactctatgaagaagtaggctgatttttttatttcattttggggctaggtggtatgggggttattagaagaagatggttgaaaagttnnnatttctgtccaaagaaacattttaagactctttaacaaaaagaggtcagtaacctatattaacattactatttattttgtttgcaacagggacat

SEQ ID NO: 2830 - DNA, 655 bp, Canis familiaris
  misc_feature (1)..(655): n = a or c or g or t
gtngataantaatttatcaattgtgaggtgtactnnacttccacaagggcatactttattgctcctacagttttcatgatctagccttgcactggggaattcagtagctantnnnnacatgtgactctgagcacttgaaatgcaaatagtgcaactgaagagctgaatttttaatttaaaaaaattttaatttacnnncagcctgggtggctcagtggtttagcgccaccttcagcccagggcgtgatcccggagatccaggatcgagtcccacgtcgggctccctgcatggagcctgcttctccctctgcctgtgtctctgccccccacccccctctctctgtgtctctatgaataaataaataaaatctttaaaaaataaatgtaaaaaaatttaatttacatttaaatttcaaaactaatacttgattcagtcattaaaatcttttaagtagttttggaaagatgcgggtatgtgaatctgctttttccgctataaattttatgaagtttaaatatagatacgtattcccaatgaaaatttagtgttctaattaaaatacaccgtaagtgtaaaatacatgctggatttctaagacttcgaatgaaaaaaaatctgaaatatctcagtaataattttatattgatcacaagt

SEQ ID NO: 2831 - DNA, 623 bp, Canis familiaris
  misc_feature (1)..(623): n = a or c or g or t
tccagagaagatagaaaatatctacatcaggagtagaccagtgtcacaaatttttgtgcacggggacagcttacggtcctccttagtgggagtggtggttcctgacccagaagtactgccatcatttgtagccaaacttggggttaaaggctccctcgaagaactgtgcaaaaacaataatgtaagggaagccattttagaagacttgcagaaagttgggaaagacggtggtcttaagtcctttgagcaggtcaaaaacatctttcttcaactagagccattttccattgaaaatggactcttgacaccaacactgaaagcaaagcggggagagctttccaagtactttcgaacccaaatcaacagcctgtatgagaacatccaggagtaggttaagtttgctgctgagctggaagctctgggggaaggagtttaaactcacgtcaagtgcacttttccgtaaatgaagctagctagaactgtgggaaaaataatctgaactgggaatagaagaccaatgggcaagcatgaaacatccacaacaggattgtcttctgggaaggaactgactgatctcttctctgctggactccagttccctccntgccttacccccagacaac

SEQ ID NO: 2832 - DNA, 632 bp, Canis familiaris
  misc_feature (1)..(632): n = a or c or g or t
caggtgttcaaaggtatagtgaagatccgaaaagggcangcagtnnctctaatgatggatgctaccaatatgccagcggtcaaagctataatataccaatatatngaagagatttatcatagaatccccagctcagacccatcttctggtaaaacaaggcagatcatctctaccatcaggacacagaatcttcccaattgccagctgatctcccgaagtcactactcccctatttacctgtcgtttgtcatgctcttggccgccttgagctggcaatatctgagcaccctgtcccaggtcacagaggactatgttcagactggagaacactgatgggtatcagtccagaagctacagttcatcacagatcgaccttttcttcaagagaaaggatatcagtacaccccccacccctttttttcccttcctgctttaatccctgaaagaacttggtggacttgggacttttagaaactgtgacaggcagttgagaagctaagaataaaaggggtggatacgtccccctcagcaagcaggcacttgtgggcagcactcacctctgtgcggtggcagcaacggagcgctcctggctgcccgtcaggggaaatggttgcttatggggctgccgagag

SEQ ID NO: 2833 - DNA, 626 bp, Canis familiaris
  misc_feature (1)..(626): n = a or c or g or t
tgccaggcccgagcctcgctccccaccgttgcctgccagggtnntcctnnannagatgccccctgccacaccctccccccacctggcactgcctgctcgacacaatgccacccgcctctagcctgcagcccaaaactgccccaggggccggggaagggcctgtgctcggtgccactgtagaagggcaaaggggtgtgtctgtgcactctgggcatgggcctgtccttgtgcagctcttcagaggtctgagcttgtgtgactgagagtcagtgtgtatgcgtgtgtgggcgtgttcaagtgagactgtgtgtcatcttgcatgtgtgtactaaagcacctgtggggggctgtgtgcaggctatggggcacctggtgaaatttttgagtcctttgcccacaagaagatcttgttcagaggcctgtgtttggttttcctgtacacgcaagtccgactcggcgcagcaggagtaagggtgtgtctgaggacatgacttgcagctgtttgcttgtgcatagatgtgggtgcctgagtcactggctgagttctcacccctccctgtcaccttccttcctccctgataccatcctgctcatcctcacccagtnnnnnngcagcaccgctacaa

SEQ ID NO: 2834 - DNA, 490 bp, Canis familiaris
  misc_feature (1)..(490): n = a or c or g or t
aacacccctgtgaagttaagtcgtgcatttccatgagtggaacagttgtgcccttcaaaacgcagaggtataaggaagaggcaggggcgtgcgctcatcgcggcaacacgagccaggaggggtcgttcaggccnggcaacaagggagtggggagcaaagcccgtcctgctatgggcatttccaccagcggaccccagccccatccgtttggtgggaccccaccaagagtgcgcagtcccagtggaagctattcctgtgtcatacggagtaggggttcgcgtgcgcagagacgtccttggctgtggggcctgggggaagatccccatcctgttggaggcccgtcctgggcgcgtccagtgcgacgagccgggtcctcatgcagtgacctcccagacagagcaggacaccgagtacccaggacggccccccaattctgggcttccctaagtcaccagggcatgtgttcaccaagaatcacttgaagaggccc

SEQ ID NO: 2835 - DNA, 525 bp, Canis familiaris
  misc_feature (1)..(525): n = a or c or g or t
tgctgtgtgtcatcgagggcncgcgggccggccgcgctcggcgtccgcaggggcnnncataggctagtgggactcatctcatcacagctgcngtcnnncgaccgcgtgttgtgnnntagccaagctgcactgaggctccgcgtccccacggacccgtgtctggcgcctgctggacgtggcgtgcacggcggcagcacccacctgtttgagctcgcgtcccccgtagatatactgtgccacgtctgtctgtcgtttccttgaggtggtagctctgtgtgttcagtttatgcaatgaatgtcgtaaatgccgtgccgtagtttggggttaatacgtggatggtttttgtttccaaaaagacaaaaaaaaaaaaattttttttttcagtgttcacccttagaatgaggttatcaagttcatgtggataataaaggaattactctcttcttgttaaattatctaaataatgtaactgcggataggaagggcttatctagggaaaccgagtttccgctgaaagaggaacg

SEQ ID NO: 2836 - DNA, 278 bp, Canis familiaris
  misc_feature (1)..(278): n = a or c or g or t
taccagggtacaggtnnnngcccatacaaacatgatgactttaggcaattcatcttctctgggtatcttttttttttttttccttgtacataaaatgagaataaaatctgctccagttcatagagctatgnnnnnnnngaaggaataatgtatgtgaaatgaattggaagttcttgaaaaggactgaataaagttgaggaattattattctaaacctgccttcaaaggtagctttcattaatttgcctatgttttcctattaaaatcagcatcccaaa

SEQ ID NO: 2837 - DNA, 547 bp, Canis familiaris
  misc_feature (1)..(547): n = a or c or g or t
gcccctccccagtgccgcggtgagctcccgccgtgtgggctcccgggagcagagccccggcccgggcannacccccggagtggcggccctgcctgctgcgtccttgannaaccttggtcttgctgggcgacccggctctgtccgtctctccgtctgtccggcggccagccactcttcgtaaagcggctgccacctcgggagagagagacaggcttccccgccgcacagcgcctgcgcccgagaaaccgagaactggatactttgcctcattcacttgtactgtaacgatgtatataatttggtggtatttcactatttaatttttaagaagcctattttactagtgttttatatgaaaaaaatactgcagaagttaaacctgtgttgtatttttcctgagatgctttgtgttagtgactactgagaccctttccgctcggtttttatatgcgggaaacagagtttgtacgggctatttttgtatcacnnnnnnaacttgcaaacagaccaaatgagtgtgtggagggaggcgcaggccggggccgtt

SEQ ID NO: 2838 - DNA, 533 bp, Canis familiaris
  misc_feature (1)..(533): n = a or c or g or t
tactgagaatnnagtagtgttcaattatannnnnnagnnnnnncttttgtcaacttgtcaatttacatttattcttcatannngcagaatagatagtatttaagagtnnnccaaannaanagcaagaatgagtccctgtaaccaaagatgaacagctcaacagcataactgtggatagctagataaaccactgtgttggtactaagaaatgttttttggtgaggggcaggcaactgtaaaagagcttttatcttgtctctctacctgtggtatcatcatggttgtatattacacagaataataagcttgatttaaattctttatttagttgtatattgtttgcactacttcagttgtattacatgcaatctcttgaccaagcctaattttaaactcaatagagtatcattttatacatatttcctgctacggaatttgtattgcttatctcaacaagagattgtctgcatggaaaggttaatagcactgattagctttctaatattttgcactttttgaaatgtttgtttttt

SEQ ID NO: 2839 - DNA, 651 bp, Canis familiaris
  misc_feature (1)..(651): n = a or c or g or t
atgaatnntctgctttcaaccaaatactgtgtattactctctctccacgaaagcaggtcatgtnnnngctagcaaannnngtatcttcctccttagaagtcgatctggtcatttctgtgcctgggcagcattagagcggtgcgagtgagctgagggttgagtgatgtggaggtgagaaagcctcaccttccttcaagaaagttgatgcaagagcatccgctggtttggaaggatggtggaaattgcatttctggctcctctcaatggcatgtcctgaggcttctggctcttggccctaatgatgcaccccagtctccttgcttggagcgaggtgtggggcacctgccctgtgcctcctggttatagatcagctccttggagaaggatcaaacgtcagacgatgtgggctgggtaaaaggtcagaggagaaactcttcccttccccaaggaggcctccaccgccttccccacagaaaccccatctactgtaagatgtctctagggggccctgtcagaggacaggagtcagacattttatatcaagggtgctctgaacatattttattttttaaaagaactatgtttgtgaattttatgtatactggcaagcttttgaaaatgtatttaatnnnnnnatgtttaccaatgatt

SEQ ID NO: 2840 - DNA, 598 bp, Canis familiaris
  misc_feature (1)..(598): n = a or c or g or t
gaatggtgctgacacagaagtatttcgacatgtactctggagatattaagctcctnnagaaattnnttcaagaaattccagagggtgcgctggtgcttgtggnntcctatgatgacccaggaaccaaaatgaacgatgagaccaggaagctcctctccagcttgggcagttcctatgcaaagcagctgggcttcagagatagctgggtcttcttaggagccaaaaacctcaaggataaaagcccctttgagcagttcttaaagaacaacccaggcaccaacaaatacgacggctggccggagctgctggagctggagggctgtgttccccggaaggtcttttagggcgccgtggctcttctgggccgggacccaagaagctcctggctggcctagggttggagcccgccgcggcgaggagggagccaagggcctacggaaagtgccggggcccccactgcgcatcttcgaatgcaccccctcccgggggctgaggcggcccaccccagggccagccatccgggtcctggaggcgcccgtctgcaggaagaacaggggtgctctccctcaagacggctggcggcccttcccaaggaagg

SEQ ID NO: 2841 - DNA, 554 bp, Canis familiaris
  misc_feature (1)..(554): n = a or c or g or t
cgtgggctcaggggncgctggcttccttgagtggtgggtcatcgagctgcaggattgccaggccgagtgcaacctgctgcccatggtcatcttcagtgacaaggtcagcccacccagccttggcttcctggctggctacgggatcatggggctctatgtgtccatcgtgctggttatcggcaagtttgtacgcggcttcttcagtgagatctcacactccatcatgtttgaggagctgccgtgtgtggaccgcatcctcaagctctgccaggacatcttcctggtgcgggagacgcgggagctggagctggaagaggagctttatgccaagcttatcttcctgtaccgctcgcctgagacgatgatcaagtggacccgtgagaaggagtaggagccgggctcctgcgcatgtgcatgaaggagttgcccagcccagcgctgggtgcagacaccccgtcccaggccaccaggccctgatgctgctgccagaaggaagcgggggcccctccttggcccggcacaggaccccggtcccttccatcatccctgctggg

SEQ ID NO: 2842 - DNA, 574 bp, Canis familiaris
  misc_feature (1)..(574): n = a or c or g or t
ctgccctgacggccctggctatcccnatagtcttccttccnntgaanncaggtttgcactggatcccctnnngccccagctccccgtggggcaggcggggcagacccctgtatatatgtacatactcagtgcctcagcccagcctcccccgtcgcttccaccacaccggcccagggagaaaggccatgccaaagcgggccaatcgggctccacagtgctccgcccctccctgccggcctggcttcctggcccccgtgtgtccccactcccaaaggccctggggccagcgggcagaaagccagagtggggtttgccttattttgctcatcggattcaacttctcttttgcatcattttcctctggtccccgtcagagtctgggggctggggaagagggcggatttatgcagctattttcatacattctctgttctgagtggggtggagagctttccacccttaccctcaccaccccctnnnccctgtggctgggtgagtgtctctgcatnnnnnnnaccatggtgggagatcgtttggctgaaccccccactccctccttggtctccaggggtgt

SEQ ID NO: 2843 - DNA, 637 bp, Canis familiaris
  misc_feature (1)..(637): n = a or c or g or t
gtgcccaccagagatgtgcagannanntgtacttgaagacaaggctgcagtttgatgnnncagccaagcatctacagaatctggagagcgccaccagaaaggcggttngtgtagctgtgaaagaattcaacaagagccaggccaccgaatcactggaaaggaaaattcaagagaaaaaacaggaacaagaagacaacgtggctgagatctccaacctgctgcatggggacctgctctcggagaacccacagcaggcagccagctcctttgggccccaccgtgtggtgccagaccgctggaagggcatgacccaggagcaactggagcagatccgcctggttcagaagcagcaaatccaggagaagctgaggcttcaagaagaagagcggcagcgagatatggactgggaccgccggcgggtgcagatggctcgagccgccctcctcctggagcggcagcagcggcgtcagcagcgtgacctgcgcagggccctggactgcaacaacctcagcctggccaaggagcagcgtttgcagaaaaaatatatggaggaaatctgtacaaatgaacccactgaagactatttcacgcaatttaatacaagaagtcggtannnnnaagagacagcgtccttctc

SEQ ID NO: 2844 - DNA, 459 bp, Canis familiaris
  misc_feature (1)..(459): n = a or c or g or t
gttcctgccagaattaacttacctgcttgtcaacagtcataacagagaagttgaggattaaataggctctagnnaagttctttcccatcattttagttaatcttgtagaacaggatttctcaacnttggtattactgacttttggggctggataatgcattgctgttggggctggcctgtacactgtaggagatttagcagtatccacgacttgtgcccggtaggtgcccgaagcnntcttttacccaggtgtgacaatcaaaaatgaccccagatattgccagacatctgctaggagcagaattgcccttggctgagaaccatggctttaggtaaacataaggcacgtgagatatggccacctacgctttgaggacaatctgacaactcttcaaaataatgttatactgacagtctttcttacaatgtatgtaatatgaatttattactgaaaatttt

SEQ ID NO: 2845 - DNA, 268 bp, Canis familiaris
aaaccattctaactcttaagtgcccttgttaggggcacgtgtcttaaagttgagggttgtgttttgttttttttttttcttttgtatatggatgaacgagatcttacctattaaatatgttattggatcatggttcctgaaggtgattaaagtttgtgtttgtgtgtgtgtgtttgtgtgtgtgttttatgacttaaatatcttttgtgtgtgttttttagagtttggttctttaaagatttggagaggatatgtaagttgtgaggca

SEQ ID NO: 2846 - DNA, 673 bp, Canis familiaris
  misc_feature (1)..(673): n = a or c or g or t
ctgaccgagataannagcgttacatgaaggaactngagcagtatcagnnnnntgnngcctacanngncttcagcangaaaacccaggaccgtcagaaaggaaaatctcataggcaagatgcagcccggcaggccactcatgatcatgagaaagaaacagaggtaaaggaacggtctgtttttgacattcctatatttacagaggaattcctgaaccacagcaaagctcgggaggccgagctccgccagctccggaaatccaacatggagtttgaggagaggaatgcagccctgcaaaagcacgtggagagcatgcgcacagccgtggagaagctggaggtggacgtgatccaggagcggagccgcaacaccgtcttgcaacagcacctggagaccttgcggcaggtgttgaccagcagctttgccagcatgcccttgcctggaagtggagagacacctacggtggacaccattgactcatatatgaacagactgcacagtattattttagctaatccccaagacaatgaaaatttcatagctacagttcgagaagttgtgaacaggcttgatcgttagggaatggtgagtgttcactgatgcaatatgtatgtgccaacacatcatcaaaaattagaagacagtagactttctcaatgctactaaaaccctgg

SEQ ID NO: 2847 - DNA, 562 bp, Canis familiaris
  misc_feature (1)..(562): n = a or c or g or t
gagcatcgnngctcctgctcgggacntgtgcctcccaacagccccccccagcccaccgcagtcggccaccccaggtgccaccntnnnnntgcccaggctgtggtattgacgctgctggccgtggccttcgnnagccccttactgtgccgcatcctctacaggctgcccgccgccaggtgggggcctccccggcgctggggccacccccgccacccccccaggtccagctgctgtctggaacctagagacatctgactaggagggaaaccagtgcctggacaggcaccgctgtcctgctcctttgcttcagactggaaccgggctggggatcggagaacctgccccgaggaggcccagccggtcactgaggcccccgggccgggggtggccagtgtggcatcctggacccaaaattggcaggtccaggggaaacagagagaaaagtctcgttacacagtttggggtgggggtggggtggggtgggctgaggtcgggcggtgacagccatcccttcccagccccagaagcgggccggaggagcagggacaacaaacgacaccac

SEQ ID NO: 2848 - DNA, 614 bp, Canis familiaris
  misc_feature (1)..(614): n = a or c or g or t
gttattnnntcaaaagattttcccagacaaatgaaagctgagggagtttatggccagtagacctgncttacaagaaatgctgaaaggaattttacaagctaaaatgaaaatacactaattactaacatgaacatatacaatataccggccaaagttaatgtatgccagattcagaaaagtctaattttatagtatggtgtgttacttacttacatcatttatagtaattaataataaaatgtaaccagagctactataatttctcaacaaatacacagtataaagagaggtaacttgtgacattaaaagtaagggtataaaaaaaagagtggaaattttgtatatacagttaggttgttaccatcataaaatggactgttaacatctatgaaatattttatgtatgcttcatggttacttcaaagcaaaaacctatagtagattcccaaaagatagagaaagagaatcagagcatgcaactatggaaagtcaccattcacaaaggaagacagcaagggaagaaaaaaaggaacgatggaaatacaaaacaattaggcagcaattaattttaaaaaagatgatattagtatccttatatgtcaataatcactcca

SEQ ID NO: 2849 - DNA, 619 bp, Canis familiaris
gctttttaccagatcttcagatcatcttttatggcagcttcatgaatcttcgagactttactggggagatcctacgttatgagaggatcttcatccacccaaacttcactgctacctctcctaaagatgacctcatgttgataaagctggctataccttttaccttcatctccacaaggcatttacagtggcctactttcaagaatgcagttaaagattgcttgattcacacttggttagagaataaatactttattggaaattcaaacaataatctgcaaagcatcacaattcaaatgagctctaatataaactgcaaaaaattattgggtgaaaaactcctagaagacatgttttgtataggacccacactaggaagtcaagaaccctgccaggtggtcacagctgcaccagccttatgtggccgtgaattacaaggaattttgtcttggggaactggatgtgttctaacaggatacactgttgtcttcactgacctacacagctacgttccgtggatcaagaacattatgtctacaaaataagctgatatagagctccattgacacacttacctcccagctgatccacagcaatcatgctatatatctcagtccca

SEQ ID NO: 2850 - DNA, 526 bp, Canis familiaris
  misc_feature (1)..(526): n = a or c or g or t
cccggctctccccctggttgtgtctagagctacgtgctctgcccccaccccagggccttgaccctgactcccctccgcttcccatcaccttccaccgcccctcccccccagcttttccaaggtcaggaaggcaatgagggccctctgctgtcccccgggctggtgggcccaggcttgtccctaaggtggcccgtctcacaccccgtgtccccccccaccctctgctgcttttccatcctggacacattggggagcgtctaattcttcaccctgctgtccagcctggcccgtcctcccctgcatcagcttcaggatggcagcagctctccaggcctgcgatgccaccgagcacccccctccacgagggtcctgggcagccaggcctacccccttgctgtgtgcggccccgtggccccggcagtccctttggacaggggcatggggctgatcctggccccgaactatgtgccagggtggtcaccagggtcccctgtnnncctgtgccctccaaaagccaagtgtctat

SEQ ID NO: 2851 - DNA, 627 bp, Canis familiaris
  misc_feature (1)..(627): n = a or c or g or t
atccggcatctccannncgcatctnncaccgannnnnaggnnnnggtgaacctggccaagctgaagctgtttcggcantactacatcatggtcatctgttacgtctacttcacgcggatcatcgccatcctgctgcaggtggctgtgcccttccagtggcagtggctataccagctcttggtagagggctccactctggccttcttcgtgcttactggctacaagttccagcctgcaggcaacaacccttacctacagctgccccaggaggatgaggaggacatgcagatggagcagataatgaccgattctgggttccgggaaggcctgtccaaggtcaacaaaacagccagcgggcgggaacttttgtgatcctcccctgtgtctgggaccgtcctgcttcccccacctcccgcctccgccctctgcgtacacgttcctcactctagctctgctcccaaagcacacatatgtgttggggtggagagtgggtgggggggtggcgggggaggaaggtgcctgggtgagagacttgagttccaggagcccatttggaagagagccccttcttcccccaagatttgggcagccctgtccctgcccctgagccacctgccacttgcagct

SEQ ID NO: 2852 - DNA, 526 bp, Canis familiaris
  misc_feature (1)..(526): n = a or c or g or t
acatctccacatctcattactcctctcccctctccaacnnnagattatggtgnngacaaccctgcccccaccnnnngncagtcaagcataatccctctccacccctcaaataccccagactgcacagacctcccaccccaaaccatccaggcctggtcctcaagactctggatccttcccctcattccaactggacagtctactccccccacccatcttgtgacttcttgaacctcttttctgaccctccacccttggacacctattccaggcctagcaggaccctcaacctcactgcagaaatacccactccatatccccagactctgcacagatatcctaagccccatccccaactctaaacagaaccccccacccccatgatcattctgtcttaaccctcaagtctccaaccatatatcccaggtaatccatctttcacatacctcccctcattctccaaaatccaaccaagcagccacttttgctttggttccccacaacccttcttccttcaattctctgc

SEQ ID NO: 2853 - DNA, 599 bp, Canis familiaris
  misc_feature (1)..(599): n = a or c or g or t
tgtcaaattttgcnnnaaagcattccatgtatctgctagggcagtaacttgcctctctgagttgtatgctctagattcagaagcaaactgattttgctttcacctttaagattgcattttagtgtagttattgttttaaattagagaataaaatcataaaaaaaacaagggagaacccttcatttaatggcatggcaaatttttaaaactgcttttgctatttcactagaaaaaaatctagtaaaggatatagctaaaaaacgccagccagaactgtatgaaattggggttgtttcctaaaaatttttctaaatgtcatacaggggtttaacatctgtgtatgctgttggggctaagtgccagtcactaatttggaaatctgtttgcattctggggctgtaaaatgacaaaagtgtcatgggattaaaatcaatcagctgtgaattgtaaaattgaaatcgctttttttggtttcattttcttcagcatattgaatatagaaatccaaaagatatttaaaatttacactgcttatgttgatggctcattttggctgtgtatcctcacttatgtactgatttctgataaaagcttgacat

SEQ ID NO: 2854 - DNA, 532 bp, Canis familiaris
  misc_feature (1)..(532): n = a or c or g or t
gcgatgccgtccgaacccacancngcaatacagctgtgccctgncctgtgaatggagagtgggngnnntgngaggagtggagcacttgtgccngtcggggcataaacatcatgtgtaaggcgatcccaggccagcagacacgctccaggagctgcaagggccgcaagtttgatggacagcggtgtgttggagaacaacaagatatccgtcactgttacaacattcaacactgtgactggaaaggcttatggtcagagtggagtacctggggtctgtgcgtacccccatgtggacccatgcccatccgcacccgccagcgcctctgcatggcccagctccccaagttctcgccaaccattactgtggtcgaaggtcagggtgagaagaacgtgaccttctgggggaaaccttcagcacagtgcgagacgctgcaggggcagaaggtggtggtggaggagactcggccatgtctacacgtgcctgcctgcaaagaccctcaggatgagaagccctaacacctgnctcttctgcc

SEQ ID NO: 2855 - DNA, 631 bp, Canis familiaris
  misc_feature (1)..(631): n = a or c or g or t
cgaatcacccagtcttnggcntggncattatnnncttctgcctggcgctggggctgggcttngtcttcaccatctggctgcacctgccgtacctacctggtcttcagagactgcctttctttagctggattgggacaatcatgagcttctttgaagttatccttattttcttcaccctcctgttgttccctattaacctctggatctttgagttgaagaagaatttatcaatccccatcggctggagctatttcataggctggctggtgtttttcctctatgtcacctgtgcggccctttgctacttcaaccataaacatttctggagcgtgattatgaaccatccccgtggcaccatgttttgcagcaacagctccagccccaaacaaaatcttctgaagaagctgatagtctcaaacacctcgatcaagcagggagaaaccctgaatcctgagcaaaagaatggatctctgtagccttgttggaaatcctggcaccatgttgtgcccattcacctgaatccctgtcctcatcctttctcacagccttggggggattggctttcatcactgcaaagaactagagagggaggacattaggtcatctttgtgcttctcctccttgttctggc

SEQ ID NO: 2856 - DNA, 669 bp, Canis familiaris
  misc_feature (1)..(669): n = a or c or g or t
tagtcactgctacaatgtggggtgtnnttgagttanntgctgagactggtatgcaaagtnctgatcttcagtgnatgagaaatctgatcagagtgatgcccctggcagtcttgcccataactatccatttccccacggcagtgttcatgtactggctctcctccaatatgttttccctgggccaggtggcttgcctccggattccagccgtacgaactatactaaaaatcccccagcgtgttgtgcatgactccaacaaattacttccacgggaaggtttcttaaaaagcttcaaaagagggtggaagaatgccgaactggcacatcagctacaggagcgtgaacggcgcatgcagaatcagttggaactagcagctaggggtcctttacgacagacctttacccacaaccctctgctacagcatggaaagaatcagcctcacagcagctctgatagcagcagtgccaagccaaagtcaaagcagccctggcgtgacacgcttggctgaattctgttcatgctcgactggtaggaactctctcttcaaagactcagcctcaaaacaagatttgatacggagtccatgccccagacctggaaacgggagtgaggggcatagagatcttcatttttaaaagtggattccattacaggctctcacatctaaa

SEQ ID NO: 2857 - DNA, 635 bp, Canis familiaris
  misc_feature (1)..(635): n = a or c or g or t
agtgaccgcgaagaccctgatgaaaaggcctcctggtggtcgggctgccacttgccacttgccggcggcgcatactgatttagcttgctctccctccggggnntggcccgaggtctgccctccaatgcttactgttcctacaatgccannnngcctgcagaaagcagaaggnntcagtggcagcgtggtcccgctatgatcaaacctgctgtgacctgcctgcctccgtagagcagaggcccctgcttcacgttaacgaagccgagctgagctgaatcccttcgtgtagggaaaccacatttccagaaccgtattaggataaaggtagtaggtgaaaaaggtctacttgaaatgagcgtctggaaatcggagttgcgggttgtggtgtacacagggcgcttctgcctccagcctcaagcctcccaacctttgttgtgatttggtttgattttcatagattgggtcttttgatggtcagtgtagagcttagatattttggccatgtttttaaatgtgtaaattaacgaccttttcctctttccacaaatacatcaaccttcaatatactgctgtcggcgggtgatttagtaatacagtcctttatgaccttggacctttccgcnnnnnncacaaan

SEQ ID NO: 2858 - DNA, 633 bp, Canis familiaris
  misc_feature (1)..(633): n = a or c or g or t
ctacaaatacagatggcaagactgagtttatttcaacaatngaagggtacaagtatccagtatatggtgtccagtggcatccagagaaagcaccttatgagtggggtcaattaaaaggcatttcccatgcacctaatgctgtgaaggctgcattctacttagctgagttctttgttgctgaagctcggaaaaacagtcatcatttcgaatctgccgttgaagagaatgaagcactgatttatcagttccgtccagtttatacgggaaatatttcttcatttcagcaaagttatatatttgattgacagcctgcaatgtgttaacagagaaattttgaatcattccgtgattaaactgttgcaataacttgctactcatggcaataatggaaagccacacagaaaagatcccttttctatgatattactagctctgattcttcattcagtgtatttgacaatttatatcgcctttgataatcagtgagataaataatcccagtgtatttcatggaaaagcttttatctgaagattagaacaaaacaaaaggattgaaaataacaaatattttttttcttattgattgtggaaataaacaccttcccctacccatcaaccccatcnnnnncaaag

SEQ ID NO: 2859 - DNA, 483 bp, Canis familiaris
  misc_feature (1)..(483): n = a or c or g or t
tctcagtattaattcccagtaaataataaccaaccaaccaaccaaacttccctctcccagcccccgaggctagaaaatcttgctgctctgtcttagcattccaagaaagtgcttccaggtatttagatagccctcagttctccaatattaggctacgtgtaaaaccttgggtacctttagattcctgtaacactagtctgtacctttttccttccccaagactgataggatgcaagctgaggtagtgtggcccaggattgacagacaccatttggggagtgtccacagagtaaaaggaacactagaattcccactcagggtgggaataattgatttccagctgcaataagccgtgcctcataatagtcacactgtggctagattatacttctttgggtgctgtgctaagaatgtccatggaaaaacttgatctcaaattttggttgatgttaacatgcctgacacnnncatcctttcctctca

SEQ ID NO: 2860 - DNA, 628 bp, Canis familiaris
  misc_feature (1)..(628): n = a or c or g or t
ggccaactgnncttctccctaccaggtagatctgtttggtatagcagatttagcacatttactgttgttcaaggaacatctacangncntctgggatgggtccctctggagacttagccaaaatctttctgagctaaaagatggtgaattgtggaataaactctttgtgcggattctgaatgccagtgatgagtccacagtgtctgttctgagggaacttggaacagcaatgagtggggtgtttgacaccacattccaaaatcacctgaacaaagccttatggaaggtagggaagttaatcagtcctggggctttgctcttccagcaggaagggcaaacagatctctcacagattcctacctaaaactgatggttgtattgtggagcactggacctgtgtatgctataatttaattcaggacatgtttagatacagtaccaatacatttctactttttactaaaggaatatttctaggtaactggcattttctacatagcactgtgccttatctaactaacaagaactgttttattctcagtggactctatatgaatgggtaccttgttgtcttttaatacatttatctccactttttcctgtacatttttcttttgtaattttggac

SEQ ID NO: 2861 - DNA, 369 bp, Canis familiaris
  misc_feature (1)..(369): n = a or c or g or t
aaaatnngtggactggtgggcctatggcgtnctattatatgaaatgctagnnggannncctccctttgatggtgaagatgaagacgagctgtttcagtccataatggagcataacgtttcttatcccaaatccttatccaaggaggccgtttccatctgcaaaggactgatgacnnnnnacccaggcaagcggctgggttgcgggccagagggagagagagacgttcgggagcacgctttcttccggaggatcnnntgggaaaaactcgagaacagggagatccagccacccttcaagcccaaagtgtgtggcaaaggcgcagaaaactttnanaagttcttcacnnnngggcagcctgtcttaacacc

SEQ ID NO: 2862 - DNA, 580 bp, Canis familiaris
  misc_feature (1)..(580): n = a or c or g or t
cccntgcaatcatttactncgttcacaccatgaccactctaattccaattctctccacgcttctatttgaggatttctccaaagccagtggcttcaaangacaagnanntaagactttccgtgaacgactaaccctcgtatctgtctatgccccctaccttctcatccctcttatgcttctgcttttcatgttgcggagcccctactacaagtatgaggagaaaagaaagaaaaaatgaaataatgactggcccagcagggagatgcccagagggcagtttcctgttggacccagtctgaggaaaacctctcagaacccatgtcttcagcagcatttgaaacataccagcaacacataagagcaagattctggcaggagccagagtcaaaacctccctttctgaggatactggcgaacacagaccagtcacctgagcacggacacaggggtgtgggctaggctatccggaagtggtgccaaatacctcatcatgtgcccaagttccattgtgagcatgaccagaccagatactggataaacttccaagaaatgtggcctgcttggcatgttcatgagtca

SEQ ID NO: 2863 - DNA, 609 bp, Canis familiaris
  misc_feature (1)..(609): n = a or c or g or t
tagagaattcatcatagnnntgagtgtgacatcgaggggnnngctgnagcagaagctgaaatgggnnntcagcatgtatgacctggatnnaaatggctacatcagcaaggcagaaatgctagagattgtgcaggcaatctataagatggtttcctccgtaatgaaaatgcctgaagatgagtcaaccccagagaaaaggacagaaaagatcttccgccagatggacaccaacagagatggccaaggctggtgcccccacctggagcagaggcctcacctagagtctcctgacattagattcctcttggtgaaagctctttgcgtctagcccctggctgaggacttgaaaagtctggacccacagacaagttagccctggagtctactcagaagcacatggggagctaacccaggagacccagacacagaggtggaagttgggcttgcccgctgctgcaggctggaggttcccagagctcacctttgggagatcctgacgggtgcaagtggccacttccagcctcctcccctcgtgccagcctttcagacccaggaagtcatcaccattttcaccactgctggagcaggggctcagctcacaagaaacga

SEQ ID NO: 2864 - DNA, 677 bp, Canis familiaris
  misc_feature (1)..(677): n = a or c or g or t
ttgcaagtatnntaangaattcagnncaagctaccatttcatgtaaatgaagtattccaaatacagtaggtgacaagatatttttggggattcacttgtcaaacttattttggtattctaacttgagttcaagaaatgaacaggggagtagaccaaaccctatatatttttttagcaaaaactaacacttttttcagaagctttttgtatccaaagctgtgggctttagaagactagcattgctataggccagtgtttctttagcctagggagccttttaaaagaatcttgaaagatttagtagatttgatagggcccaagcaataggtttgtgcaaaaatgatttttctagtataaatagcctttttttgggactagtagttgtgaaacagactgttgaagtgttactaattgggtcacaaactggcatagtacacgttgagaattgcttcattaaagtcctttatcccagtgtattttgtgctggtggtttaaatgacaggtttctttgttgtaatacctggacggagttctagttactggaccttctgtgtgcctgggggtggggaaggacattggctgccgaggggcctgacgggttttgggagtgatgtaacttatatgactggtgatggttccaagactgtatgcacttctcaaactcatccaattgtgct

SEQ ID NO: 2865 - DNA, 713 bp, Canis familiaris
  misc_feature (1)..(713): n = a or c or g or t
tcatgatgatctcatgcnaatatttatgcgtcatgacacacttctgaaggaaacttatnncgagtacttcntnnctgaactaatagaggcccaagacaaagagaatcatgctgttgtatgtgaggtngaaggtgtagctgtcgggttcatgagtgtgtgctcaagagtgaacatgcagctcctgcatgagtgttttgacttggggcccttccatggactctgcatcccacaccctgatgatgttctgcaaccaccagaagagcaaggcattgaaggaagtcaagatgctgagctcagtagtagcaaccccagttccctgaaaacagttgaggagccacaggaacctctctctccagaggccatggaaatcattcaggggagaattacagatgaagccccagttgacgatcttttctcagcagtccaaagcggaaacagtagtgaaatggaggacatagaaaaattcagccagcagtccactgtgggcgacacagactgcgatggcagctattcgagcttggcatccatgttgctgcccaaggagaccagctacttccgccccacctataagggagcctcagctgctttttgtattcagctcttttgtatcgaggagaaatatgaagcaaggtcactggactttatgaattttgtcttcagtctttttcctgtaagtacatgctgaattttgagtaacataattggttttgtga

SEQ ID NO: 2866 - DNA, 643 bp, Canis familiaris
  misc_feature (1)..(643): n = a or c or g or t
tacacgagcgagctataccccanngtcatcnggcaaacaggtatgggcataagcaacttgtggactcgtgtaggaagcatggcggccccactggtgaaaatcacagcagactttcagcccttcatccctaatgttttatttgggaccatcaccctccttggaggcagtgccaccctgttcctgcctgagaccctcaatcggcccttgccagagactatcgaagacatagagacctggtcctggcagacgaagaaaccaaagcaggaaccagaagcaaaagaagcatcccagaggatccctctgcatccttgtggaccaggcccggacccctgctgagggcaacagagccccctttctctgccctccagaaacaaatcctagccaggtcctcgcctgcctctgggctctgagggcaccttgggggccgctgagcaggtccatgctccagttcaaaggttccaccataggcctttctataccttacccttgtcctcttcatccctcagcccaggccttgccatagcccttccccactggccgcctttgtcccaccctccttccccaggggttccccctggactccttgactcagtcctaacaaagacagcttctccttcttgctccccacccttttcttcaatgg

SEQ ID NO: 2867 - DNA, 575 bp, Canis familiaris
  misc_feature (1)..(575): n = a or c or g or t
agtacccagatctcgctatccattggtagcacttnngacnnnagctgatgannntgancgagaaatttatgatattatttccatggtatcagtaattcatattcnnnataagacttataaactttcctgtagaatattgtatcaatatttactcctggctcaaggtcaatttcatgatcttaagcaacttttcatgtctgcaaataataattccactccctccagcaatccctccccagaagaaaaaagcatagaccaaagtttgctggaaaaggctgggctgtctgaaagtgaagtggagcctcctgaagagaacagcaaggactgtgttgtttgccagaacgggagtgtgaactgggtgctcctgccgtgtagacacacgtgcttgtgtgatggctgtgttaggtattttcagcagtgcccaatgtgcaggcaatttgttcaggaatcttttacgctttgcagtcaaaaggagcaagagaaagaccaacagaaagctctttgagggagtcattacgcctgaaaagtatactttccactgaagatgtagaaatttgtgttcctggaattaatca

SEQ ID NO: 2868 - DNA, 663 bp, Canis familiaris
  misc_feature (1)..(663): n = a or c or g or t
cggttggaggttattcatattccttttcattagcaaactaggtnnctgcctggcagcccctcactatgtttcccagaagagctctaaaagattttnnggcaagatgttctcgttgaacaggccttagggacaaagagacgagacagatgtcaccagggcctgaggcatcttggctaaagtcagtttacacgcattaactgagcacctactgtgttcatagcgttgtatgagaagagagggcagatggacaaatgagaaagactgtcatacccggagggggcgctggcatgcagaaagcattcctgtgccccattcccattctttctggaaagcaatccagcctagtcccctcccattggagcctgcagttcttcctcctccttctgttctcaaaggacgcaagtgtgattgtttctttctagaacacccccgatgggcactgcattcttgatcgacacccaaagtatgacaacattgtcattggtgctggattctctggacatggattcaagctcgcccctgttgtgggcaagatcctgtgtgaattaagtatgaaattaaccccatcctatgacctgacgccttttcgaatgagccgcttccctggcctgggcaaagcccacctttgacccctggccagcagcttcccttgtgcatatgtat

SEQ ID NO: 2869 - DNA, 560 bp, Canis familiaris
  misc_feature (1)..(560): n = a or c or g or t
gctcangagggcaaaaaggnnnncgagatgttnanntttgtgacaaagaaaagtactttaaaggttcatcaagacataactgaccatactgaaagtagcaccaagtagctttccaacttggtttttttccttttgttttttgtccagacctataatggagcctttcttgaaatttattttttttattctttatatttcctttgcattcagttcactaatgagctggaagaaaatccacaattaatagatccaccatctttctttatgtgtctttacggatttactatttaactaagtataagaaattgcacattaatatttttggctcaccttgtcagaaaaacaaaaattcaacattaatatttttggattttattgttacaaaaaaaaaaaaaacatcttgaccaccagaatagtttatcaaccagtgagaatccacatctcttcatttgaacgtattctaaaatatgccaaaataataagtacactactttcatgctacaagtataagatggacttctacatgtgtacatatggcttcaatgtgttttcccatcaag

SEQ ID NO: 2870 - DNA, 624 bp, Canis familiaris
  misc_feature (1)..(624): n = a or c or g or t
tggggagagagagacagagagaaggggagagacagtgaacagaatgaagtatttcagcacccatctcaggtaggacaggtgggtaaagaagctaccccacaggctatggctagagtaaagtgggcagaaccccaaccccaagagcccccagcacctagctggcagggttgcccaccccaccacccaactgctccatcctagggtcctacaagcccttaactggaaaggcagctgggggtcagatggctcaggggaagtgtgcctcccaggcctgaagacttgccttccctgacccatcccctactctcttccctgctcctgctacccagtcttcactagggagagaccaggaggtgcttgtgctggccccagggtgggggccctagtgagacccaggtgaggacgaccatcctgctctcgcgggggaatccctttcccacatctgtgctgtgtccttgttgctctgctttctttaaatgtgtcagtgcctggggggaggggaggggcaccctctcatgccccctgaacctgaccaaaagccatggctgttgctcccccctttgtatgacgcagatgctaagatgtaccaaaccaaccatgacaacaaagaaaagaccnnnnnnn

SEQ ID NO: 2871 - DNA, 689 bp, Canis familiaris
  misc_feature (1)..(689): n = a or c or g or t
ggtggnncacctgtcaccttgctcacttctgtgctgcgtgcttagggcaaagaggtctctcctncttctntnntnnctgctgnntnnnnnnnngnnnnnccacngngtnnnnntcaggctcggtgggcaaggctgnnagcagaaagctataaaaggtnngggtttggggttctgtccctgactccatcactacagattcctaagcaccagccttcccccctttggatacaggacagctctgatctacctcacagcagtgtcaggaggacttcttcagggtttgaggagggtggagggtgaattccattagagtggattccttcttttccttttagcatcaaattaataaatattagtgaatgcagttcatctactgcctgcttttctccatttctttcccctatgatccgcttactcccttcttagagctggcttttgaaagatgcaataaattaagattaatccttgcccctttcttcctactcattatgaaacaaaagatgaaaagtctgtctggatgaaggggagggagcttaagccgttgccacccctgcatctccatctttccaaaattcacggaatccagttgcaagtgggtagcaaagccatgctgcccaaaggatttgagtgcagtgctcataggaggacacagtttgctatgctcaggatcagggcttatggagtgtgtg

SEQ ID NO: 2872 - DNA, 607 bp, Canis familiaris
  misc_feature (1)..(607): n = a or c or g or t
acgatgctgcctggacagnnaataatactgccagaccccggggtgttggtaacagacaagaccgtgatgggctacgtgaggcgtgtactgagctgcttgggtgggggactagctctgtggagggcaggacagcagctctgggcacggaggctggggcactgccacacatactgggccctgggcgaggagcttctccctgacagcagtcccaggcctggcggcgaggtccccaaggatgaagatggagacctgttcgacctgaggcccttcgtgtcagatctgattgccttcatcaaaggaagccgacactcaccacgctacaccctctggttctgtgtgggggagccatggccccaagaccagccgtggaccaagaagctggtgatgctcaaggttgttcccacgtgccttagggccctgctggaaatggcacggttagagggcgcttcctccctggagaacactgtggacctgcacatttccaacagctacccactcactctcacctcggaccagtacaaggcgtacctccaggacctggttgaggacatggatttctgggtcactggggaggtctgacccctcctcaccggtgctgccttcttgt

SEQ ID NO: 2873 - DNA, 422 bp, Canis familiaris
  misc_feature (1)..(422): n = a or c or g or t
acagtatagctactacattgaaatactggtaccatggctcaccaccgggggagatcgtgtctttaggagtactaagtgaaggccagtttggtattcctgaagggatcgtcttttnnatgcctgtaaaatttgagaatggaacttggatagttcttacagatctcacagatattgaaatcagtgagcaaataatgaccagaatgacaagtgatctaattcaggaaaaacttattgcacttggagatttggtcagttttcagccctatcaatcagagactgacttagccaaaggatatgaaaagaccaccttacctaccacatacaacaaccaggaaaaccaaagagtctcagatgcagtggattttttagatccgattccacannnnatctctgaaaagccnnntagtcaagaactcataaat

SEQ ID NO: 2874 - DNA, 631 bp, Canis familiaris
  misc_feature (1)..(631): n = a or c or g or t
gannannctgagaannnnntccagaccntgtcagatcagctctnnaagcagtntacccacaccaacctggncttcagcgcncgaatctccgaggtgacagacgtgaagaataagctgcagatacagctggctaagacgctgcaggagatcttccaggcggagaataccatcatgcttctggaaaggtccatcatggccaaggagtgcccgctgaaggtggcgcagacgaggctggagtgccggacccggcgtcccaatgtggagctgtgcaaggacatcccacaattcaagcttgtgaatgaggtgttcaccattgatgacaccttacagaccctcaggctgagactgcgggagacgcaggacacgctgcagctgctggtaatgaccaagtgccggctggagcacgagctggccatcaaagccaacaccctctgcatcgacaaagagaagtgcatgagcatgcgcaagaccttcccctgcacgccgcgcctggtgggctacacctgagccactgccggcctggccccgccccagcatcctgctctgcacccgatccctgtgcagcatagaaatggaaaaggcagaaaaacaaaataaagtgtcatttttctccctctcctcctatcatgga

SEQ ID NO: 2875 - DNA, 652 bp, Canis familiaris
  misc_feature (1)..(652): n = a or c or g or t
gntgtataaagtggtgcatgggcancgacagcttgactcntacaagaatggtnncctcaacttggccctgccnttctttggctncnctgaaccccttgctgcaccccgtcaccagtactataancaggagtggacgttgtgggatcgctttgaggtccagggtctgcagcctaacggtgaggagatgacactcaaacagttccttgactactttaagacagagcataaattggagatcaccatgctgtcccagggtgtgtccatgctctactccttcttcatgccagccgccaagctcaaggaacggttggatcagccgatgacagagatcgtaagccgtgtgtcgaagcgaaagctgggccgccatgtgcgggcgctggtgcttgagctgtgctgcaacgacgagagcggcgaagacgtcgaggttccctatgtacgatacaccatccgctgacccctgtccacgcccataggctggccccagccctggctcctaccccaccccaccccccagcccagggctcccatcaagcctctggcagtggtccagctagccacgcctggtgtcccctcctcatctccctccctgcacccctcttgccgctgctttctaccttatttggaacctgaatcctaataaagaatnnnnnnn

SEQ ID NO: 2876 - DNA, 445 bp, Canis familiaris
  misc_feature (1)..(445): n = a or c or g or t
ccacagaanttttttgttgttaatcagganatccatatttattnnntaantaaatgtcnagcctgtggatgatttttgaacttggtagntcataaaggtttanantgaataaaaggatatcatcttagtagagcaatatcaaaagaaatcagtagnnactgctgtttaggaatgtaaggggaagatattatatgggtcaggtcatttttttctgtgctggttgccacannntagcaagcaccaaaaaaaaaaacaaaagcagtttctgaaccgctatttacataaaggaagtcataaagtccagtgcttctgcatacggtgtgaggttacagtccagttttgtgtgctttactacacggtttggttacaggacttctgtgcattgtaaaacataaacagcntggaaaaggttaaatacctgtgtgcnnattgtaannnnnggtcc

SEQ ID NO: 2877 - DNA, 429 bp, Canis familiaris
  misc_feature (1)..(429): n = a or c or g or t
aatacttgtatagatagcaagtaggactgtatgtgttgggtctaccagtgagnnaagcctcctggtgcccccagcattattaaggtgggcaagaggggagaagggttagctttctacaattctggttgcgatcaaggtagggttttctcccctcggtttcatttcccgattggcccaatgctggagactggagacctgagacccgagacccggagagccgttcctatcctctccgaacccnnnnnnnnnncactgacctgcgtatgcgcagctcgcacactagagggcaggagagagcagtggcttgtgacgtcactgagcggtggcaggccccgagtgtgtgtggaaaaacaccggctctggagccagacacccttgctgtcggtgtgtgctcgggggcaagttgggttaaaaacttctctataaaag

SEQ ID NO: 2878 - DNA, 601 bp, Canis familiaris
  misc_feature (1)..(601): n = a or c or g or t
tcannccataattcatgnngtaaatcagactccagcaatttttgttgtatgattttgttttttgtaaagtgtaattgtccttgtacaaaatgctcatatttaattatgaactgctttaaatcactatcaaagttacaaaaaaatgtttggcttgttgtgtgatgcaacagatatatagccctttcaagtcatgtcgtgtttggacttggggttgggacggggagagcagcagccatgtcagctacacgctcaaatgtgcacacaattatggagagtaattccaaaatcttacgaagcccaatatgcagggagttaactgaaaactatcttggcagtgaggttggcactgttgataaagctggtcccttcctttaactgtcttttaggttgttcttgccttgttgccaggagtattgcaggtaatacagtatattcataagaatatcaatcttggggctaaaatgccttgattctttgcacctcttttacaagtccttacgttgaattactaattgataagcagcagcttcctacatatagtaggagactgccacgtttttgctatcatgattggctgggnnnnctgctgttcctagtaagg

SEQ ID NO: 2879 - DNA, 527 bp, Canis familiaris
  misc_feature (1)..(527): n = a or c or g or t
cggnnagtggtggggcgggccccagggnnaacgcagccttgcnnggcccgcccgccctgcacgccagcaagcaggagcccatgtctgacggccacgagaagcgcctggacatcctcaatatttttaagacgtacattccaaaggactttgcttctctgtaccagagctggggtgccaatggtcctgcactagagcacagagggatgctccggacgcaggcccgccaaggagacttcgtgtgcgtggagtgtgggaagcgcttccaccagcccagccacctcagggcgcacacgcaggcgcacacaggggagagaccgttctaacacagatcccgtcccgacagtgcctctcagaaagggaacctgaagacacgtttccagcgtaccccggtgcccctgacagccgtcagcagcccccttgcggatgtccccacagcgacactgaccacctcgtggaagatcagccgcaggactcccgcccggacaccttgaatcctggagccgctgagccggagtagagaccgaagg

SEQ ID NO: 2880 - DNA, 431 bp, Canis familiaris
  misc_feature (1)..(431): n = a or c or g or t
cgccccatgaacattcagcntgtnacgtcacagattgacacacagcggagacccgcgcagagcgtaaacagaggtgggatgactagaaaccgtggctctggaggtttcggtggtggcggcggcaccaggagaggcactcgtggagggagccggggcagaggtcgaggcactggcaggagttcgaagcagcagctttctgcagaggagttggatgcccagctggatgcttataacgcaagaatggacaccagctaaagagaccagcagatcctcaagtggagcaggacccagatgtctcctccgtgctccctggcgggagggggcggtggactgggggctgtgcagccaatgatggatttgtttcttttatgttttaagataggatttaaaaactcatgtaaaggttttttttttttttctctccttttttt

SEQ ID NO: 2881 - DNA, 612 bp, Canis familiaris
  misc_feature (1)..(612): n = a or c or g or t
tttttctactttacataaaagttctgtatgtgtagaaataagtaaatctataacgaagtatgattttcgtgaggaggttgtaaagnnngtgttgctnnncttacagaaaggttctaagtaatggaagaagtatcagtctgtctttcccccgtaacaccagaggcctgaagctaagatgggtctttaaaatcttgtaaatatagtgcccatttcagtatctcttagcagggtgttggcctcatattgaactttaaacattttctagaatttgcctaaacatccaagtatcatgggtcaaaccgtatggatcgacagtgagagtgaggtggccaaatccggaattgcccgccccaagaacttcttctctggtcctgagctgactggtttggggtgattcttctttgagaagccctttcggatggcaacgtgctactggtatctataaattaaggcgtttctgaattgtcataaatgggatattttagtctaaaggttttcgggttacttgaatttttttaaagaaaattgagctttatttctgctatttaccctttcatttttgtatatcaagttttcattatacttaaaactgtatcttgaaacattgtgaac

SEQ ID NO: 2882 - DNA, 477 bp, Canis familiaris
  misc_feature (1)..(477): n = a or c or g or t
tagagtgcagaagtgagaaagagatcagagaatgaaatatttcaggtcatactcgtngagggttgcctnnnnnaatatctaaggtgcagccctagttgtaagtggctgcaggacaacaccagacaaaagcattgagggctggaaggtcaatgaactgagnnnaggncttggcagggccatctgtgttaggatagacctagttttagagtgttggtaagagccctgcttaaatcctcagggagggaaggaaagtggaccggggaggagatggcacattgatgcttggcacttgtggggaagtgagtggtgtgtctgaagccaagtggcctccagatgtgagccgcagtgacaggaactacatagcacaaagggatggggtaacaggcagaaagaaatcagcccaatccaagtcagaaggtctgtaagggtaaagggaagagctattacaaaacacaaaagaagnctaagagacatgtg

SEQ ID NO: 2883 - DNA, 424 bp, Canis familiaris
  misc_feature (1)..(424): n = a or c or g or t
actccaaagcttcatcnntaggggcttgttttgtagatttgcccagggtcaccctgtaacagacagagccgacacttgggccagcatcaggttggggtcctcttggctcctggctgggcctcagagcaccctgctcctcattgctcttcttggaccttctgtgttggtcagcctgccctggctgggtcgtctccacctgcggaccctgactgatcctgcccagccggtactgcctcgtgcctttgctttacccggctccactgtgggcttcctctccatccacacacaactggggggggcgggtctgagccacaccccttggtcttctcacggtgcctgggcagccacggcctcagacttcagcttgggagctaggctggccagcccccatttcttccatccccaaaccacacccacatcagcc

SEQ ID NO: 2884 - DNA, 498 bp, Canis familiaris
  misc_feature (1)..(498): n = a or c or g or t
tgcactttccttttaaaatcagaagataataatcttttaagtgtgnncacagtcactntaaaaactgtacatggcaaaaggaccagacagagaggaccacaatgttggtgccgctacccctgggagtcagggtcaggaaccgattttcttccttcccatgactcttcatctgataagtattactcttgtagtggaagactttttttttcttcttttaatttttaaatcatgtgcttttaaataagatctggattctcacgctggctgtgcctcttcctgaatatgtgatttttgtcatctcagatactcttagcttccccacctttgaaaaggaaattaatactccatgagggtagttctgaacatgaaaaagtgtgttggtataacaatagtatttgtttcttaaattttaaaactggcctggtttgctcttttctgcaagngagcatagcacatgaaaccgtgaaattcacctgttttctccctgccagcagagta

SEQ ID NO: 2885 - DNA, 599 bp, Canis familiaris
  misc_feature (1)..(599): n = a or c or g or t
tnctgccgctacatgacagtgctgttttatttgnncaacgtcannngtgngggcgagactgtcttccctgtagnagacaacagaacctacgatgaaatgagtctgattcaggatgatgttgatctccgcgacactcggaggcattgtgacaaggggaatctgcgtgtcaagccccggcagggcacagcagtcntctggtacaactacctgcctgatggacaaggttgggtgggcgacgtggatgactactcgctgcacgggggctgcctggtcacacgcggcactaagtggattgccaacaactggatcaatgtggatcccagccgggctcggcaggcactgttccagcaggagatggcgcgcctggcccgagaaggtggcgccgactcccagccagagtgggccgtggaccgggcctaccgcgacgcgcgcgtggagctctgagggcagggcgggcctcagcccccagccacaggcctcctgccgccccaggtctggggacccgccgttcgcctgtccagatgcaggccaaaggctcggccgaggtcttgccccatcccgtctccagccgcgactagggcaccgttcctatattcgtg

SEQ ID NO: 2886 - DNA, 578 bp, Canis familiaris
  misc_feature (1)..(578): n = a or c or g or t
ttttaagannnaaaagagaaaactnanctccttaaagaagaatgtaatcatagcattaaaaatgcccacctcactgaagccagaaggcagcctttgcttcctgccccgagcttgttttgtttaccgcaaacatttcagacccatgaataaagaacaccctattcctgtgtcctgagacttgagacaaaaattgcaggtagagcattcttcgcgatactctgctggtgctgtttgagggaaaggttcagcctccgcgtctgggggccggtgccacaccccttggcgtctgcaacaggtggtgtcgtgcagcctgtcgtgcagtagtgctgcctgtcgcgtcgttccttccctcacgtgcccgtggctccagtgcagattcacatgaacaatgtaaagtagctgagaatcagggtgtctcatggaatgccaggttttgctcttatctgatgttaaaattctgtttgtgttttatatacgtctctgaggaacatgttactctttgttacagaactttgtaagtactaaaactttttccccagacttttctcactctgaattttattaaaatannnnnacan

SEQ ID NO: 2887 - DNA, 561 bp, Canis familiaris
  misc_feature (1)..(561): n = a or c or g or t
aatgcaacccgagcngcaaaccaggagaaagagactctctttaggatcagatctgtgaacatgttggaaaggaaagaaaaaggaccttgtgtctggtgagaaaaggaaaaaaaaaattggaagagaggaccatgagaattttaataaaacagaaggagactaatggaccttccaggatttattgtggacggatgtggatatattctgtacagaaaacaacacacatggaagtggactgaattctatgtagaaacacacacacacacacacaaacacacacaccccaaacattgttattcattttgtaaaatactagtctttattttcatttttttgtaaaatttaaacatcgtatgcacataaaaaaaggaaacaagaattaggggaaaataacattttccaaataattataaaaaaattgtcctgtgtctatgtatctatatctgttttgtatttttttctggttccaaaccagatttcctgtgattctatactaataatttttgatataaccctttgcttcttataatgagtgcgatatatgttgtcgaggctgttctt

SEQ ID NO: 2888 - DNA, 596 bp, Canis familiaris
  misc_feature (1)..(596): n = a or c or g or t
ctgggaatcaggctnnaggcaggttttaanncgggggccnntcagaagcacatttcgagagaaagatggagagctgtgagcgggggccgagagctgggctgtggatgaattggggccccttccttccctggcagtttctctaagatatgcagtgcaatagctccccgtccctcagctgaccccagccccagagagctggccacaacgtgcagggggtatggagatgtggggaagctccagtgaggtggcccagcaggaccggcaccctggcatccaggggcaggtgtgagtgggggctcactcttccttgcaggagggatgctggggtggccgtgagggtgggaggaggcccacctccccctttcctcctggaccctcccagcccctcttattagctcctctgctcctgatcccatgaccccacctccctgctctgggcgtcctcctggtcagctacctcctgtcccaccacccccaggccgcagcccaccttccctcttggctactgtaattgtaaatagcaacctttggaaaacgttagcagtgtaacagtccaggaaactgttttttttttgttgttgttgtattgatatgaa

SEQ ID NO: 2889 - DNA, 581 bp, Canis familiaris
  misc_feature (1)..(581): n = a or c or g or t
tctccncntaaagagctgactcannntgtacaggcaggtngactctgcctcccatttttccattcttccaataggnnagacgcccctttacctcttgaggctgctttgaggttgaagtgagttaattaatgagactgtgcatcatgtgggaggtggtaaaagaatacctcccgcatctggctttagaagtttctcattgtccctcctctgagggagtcaagaaaaaggccatggattcttggcattagcacactagaccatgagaaaggatgcagcttctcagaggccttaccacctgaaaggattaaggctctcgtgtattcgcacagcgttctggatggatcgtatctaacctggaactcttgactctcctatatcaacagtcttccttctgtaacataaattgcagtgtctgtataaggtcttcccattatctgatagtagcatcttgaaactggtcaaaacttgaatgccaatagctccgtcactcaaaatatatacgattctgcacttgggaaaaacgtcttcatggtatctgattgctggggggtgggggcttgcaagaatgtgggcttggggct

SEQ ID NO: 2890 - DNA, 490 bp, Canis familiaris
  misc_feature (1)..(490): n = a or c or g or t
ggcgncaaaaccgagnntactcgaacgtcagnngcttcttaccgagaactgagacnntgnngtcgcagacaccgatgctgccgccatcttcctgnnagcccagagggccnnngcggccccaagggngnctgagttttcgagctcttccttaagattcgagagccgcccgccagnnnnnnccctaagccaacccctgatnnaaggggctggggtgttgctgcggggcctggaaacccctgcacacacccccnnngggccgcccacgctcaggggctgcacgcggaaaaggcaacacgccctaacggacgtctggagcagccaatcaaaaaannnnnnggcttccggtagcagcagagagtccgcctcttccgtcgccgacgtcacaaggtagcgcttcgctgagtctacggcggcgctcacgccgccggctcccgggcggccccgagggaactccgcaggaggggcgggccgnnnnnnngaggtgacgggc

SEQ ID NO: 2891 - DNA, 638 bp, Canis familiaris
  misc_feature (1)..(638): n = a or c or g or t
aagaatacagagntcaagccaacccatggnnngtacagacatgatnnagtaaagactgagcactacaaaacaggncttcattctccgagacgacaagcgttggatagtatagagcccatgtccagggtcctcagccccctgagttctcagatcaccccttacagttccaccgtctctttgccttctaactttctgtgtaaaactaactctttgccttcagtgctagatacaaacgaagccaattattctgacactatctctgagagtataaatgatgaagaagagtttatatcttcgtgtcccttgcctgtatctcctcttggttcaatagctaccagatttttggaagaggaggagctgaggtcgcatcatattctagagcgcctggatgcccatattgaagaacttaaaagagagagtgaaaagacagtgaaacagttcacaaccctcaagtaacctctttaaaaaatatcacaaatcttgaaagaaaaatggagttgttgtcacccaaagtagtgtctcttcaaaatacaaatagaaaaattgcgaagataagacagcctaacactgttgtgaagaagtctgaagaactgatacttctctaagtcattgtcactgcactggtttgttggaagaac

SEQ ID NO: 2892 - DNA, 558 bp, Canis familiaris
  misc_feature (1)..(558): n = a or c or g or t
catnnnctgcagatgtgccatcagatatgaagatacaagatttaaacaaagaactttgctttcagtggtacattccccctctagaaagacctccaaaggacacagaacctctggttttattgttgtatgcatataatatgaagcctcagaatatttcagatgctgcacctaatagcacttctagcaatgtctgtattggctctttgtgggttccactgaacagagttatttcaattcatgagaaactatctaatcttaagcaaatagctgaaatatcattgccaacaactcctgaaattacttcagatgaaaatgtatctgaaatgaaagaaatggaagagaaatcaattgataaggaaatggaaaacatgattattgaatgttgctctgaaataataagtctatttttgactgatagagctataacaccattgtctgaggttccatttgatatctcgctgccatctatattcaatcttgagagacttttcgatcttgctaatggttgtatcgtgtcaggaggaagccttttcaactggatggtgtcaattattccct

SEQ ID NO: 2893 - DNA, 609 bp, Canis familiaris
  misc_feature (1)..(609): n = a or c or g or t
tagagagaaataaacannnngnnttnnaaagaaggcagnnnnnactactaagtaatagtcagtcccttnnaaatgacttattaataaacacacccagggcaccaaccatcgaagaggatgaggatcaagaagagtcatcagacagatttcacaaagacattctagacaatccacataatgctgctgatgttaatactgtaaatgaagaggaggaattaaaaatagagcacacaccactggaccaatccttttaaaatgtacaatagtaactttatggtttatccagaaatgttactaagattggatagggttcaactaagagaaaatctattagcttgctgtcctctaagttttagattagtatatattttgtttacttggagtgaaaacacagattcctttttaaaatctggtattatttatatttatacttgtttcttactatagttgagcctatttattctctttagtgtttttatatagatttaactttgtgaaaataagtagttaagcaccttctgctagtgtgccattgaatgttttgttttcagtaaattggggattttaagatataaatatatattgaatattaatgtccatttnnngaan

SEQ ID NO: 2894 - DNA, 572 bp, Canis familiaris
  misc_feature (1)..(572): n = a or c or g or t
gaacgtgcgtgatgtcgtccgccaccagctgcctgtccgtgacnncagacgtgtgcttgggatgaggctgtcgtacctgcaccctgagctcacggcatggacggccagatgaaagtccgatgagagccggcccgggaactcggggggttcacgggacacaaggaaacacttgatcttaagtgcaattatctttaataaaagggacattgcaagcaagctgctggtccttctggaggtgcccaagggccatgggacgctgccaccccaccctccccgggctcctggacgccggggtggggcacgcaagtggtgccgtgagctctgacggcagcacgcccccacgccaccttccagcgcgcctcacccttctctccgggactagagaacgtcccatgggcctggggtccgaggcatggggtaggaggtgtgcccccacgccccatcccagtcagcacggggctaacactcagcctgattcctctgagatgcacccacgctgtgcgtccccgcttcactgccgaacacgccccatcgtgtggatgtgccggtttgctcagtgggccttagggctg

SEQ ID NO: 2895 - DNA, 581 bp, Canis familiaris
  misc_feature (1)..(581): n = a or c or g or t
agcaactanntgcagatagatgaggaagagtatggtggcacgtnnnngctcaccaaagaannatttatgacatcttttgccttgttcatggttatttggatcattttttacactgccatccactatgactgatggtgtacagaccccacctgctctctgtccagtccaaaggaccctcatagttacagcacagaaacctgattgtaggggcaccccagccacgtggaacctagaagacccatgtttcctggaccgagaatcagtgtgttgggcatcagtgttttctgcaagggttgtgatctgaaactttttaaagaaccatccgccttttggggaagcatttctgaattgtccatcaccaaccatttcttggatatcatcatgaaacacctgtttgctgatcggagctgtcgtttaatttgatgcacctctggatccggatgaaacattaaattgtcttcctcatatctccatcaggtgtacagtttnnnaaccaacaatggcatttcaagtcttctgaaaacagtgtggcagtatgtgcgtggtccatagcacagtacaagcagcatctaataacagtt

SEQ ID NO: 2896 - DNA, 578 bp, Canis familiaris
  misc_feature (1)..(578): n = a or c or g or t
ctcatttgccgtaacgtgcagctcaacggtgtggcccacctggtacatcccaggcaggcagatgcccggtaggtttggggccgcagagcnnnnnnnctgagaggtgcatgctagaacaaggctgcctgggcttaaatccnnngcctgtcttcctctgtgaccttgggagagtgcctcagtttctctgagccccagtttccttgtctataacacgaggatgtgagtgttacaggagttgtaatactaatgctgtgttgattaaatgagagatggtgtttggccagaagcatgtaccattgtggtttcccttttagacttctccacctctggtacttttattcattctatgaaccagcatatgtatatctagtctagtcgtttgctctgtgccaggcatctgtaaacaagaccgacaaaatccctgaccttgtggcattcacattctaatgcaggggccttgcaaacaaccccccggtgaggccaggtgcctggttttttagaggccaccagctaagaatgctttttgcatttttaaagggtnnnnaagggtaccatttnnnnnntacaaagcctaaaat

SEQ ID NO: 2897 - DNA, 567 bp, Canis familiaris
  misc_feature (1)..(567): n = a or c or g or t
caaggaaggtaatgaagacatcagagaggncattaaaaacaacgctggcttccgagtgtgggtcctcttcttcctggtgatgtgctccttctccttgctcttcctggactggtatgacagctagtccactctggctgttcccggcaggcggcgcgctgttgtgggctccggcatcagagcagggctgtgagccgatttatcacagagccattcggggggagggggctgtgacagatgtatactctcacaaaagggacacccagacctgtggttttaagcccatgtagtagctgagaaagaaaataatgaacacaaaatgacctgtgtagcaatcctgatgcaaggtgggtgagttggtggggggtggggattgttactggctgcacctaaattggagaccaatgtggaagggctgaccagaggccaggctctgggaggctccagccctgcccttctggtggcttcgggagaagcactggttaataacttctcacaacagatgatcatttctttgtttcctgtgacttctcatctgcctgggccatgtgacagaatcactatgttata

SEQ ID NO: 2898 - DNA, 439 bp, Canis familiaris
  misc_feature (1)..(439): n = a or c or g or t
aatacagtttccaanntagtcactacctannnnagctgcacccagttcctttccacaatccaactgctgccgacagcgccgacaccaaggtactcctcaccgagacacagctcttatcagccatctccgctccagcctcaaacactcttatctttgcccagtgtgacggccctcagcttatcagcccttcatcatgaccacacggcaggaaaactgcaacagcttccatctgagctttccctgctctgaccgccctcaactccatccagctgtaactgcaattatcttctttcgtttcataatttacccccaaaaataatcactccaagctcctgccaactgaaatctagtctgcttagctctcaaagaatttcgccaaggggcctcagtccctcaaccttgtttcacacaacacactgaaatgtacctcatgtttcac

SEQ ID NO: 2899 - DNA, 698 bp, Canis familiaris
  misc_feature (1)..(698): n = a or c or g or t
acccatatacccaacacccaacaactactgntaacatcttgatctatttcctccatcttgtttnagtgcacaagcttgtgnnnntactnntnnnnaatatgtatgcataangnnnaaaaaaatatngaaaataattaaaatagtgnngtcattgtgggattatggttaaatatattgtctcaaattccttgaatganntttggtgttttggtattaaatcttatgtatgtatttctccatcacaaatgtaatacatactcatagcaaactggaaaattcagtaaactagaagaaaagaagaaattcatccatattcccaacacccagcaacagttgctgttaacatcttgatttgtgcaccagtctatgataattaggatgttaatgagaagtatacatagagtttaaagatgggaagaaatatggaaaacagttaaatagttgggtggttgttgtgggattatggttaaatattttgtgttggtttcctcaaatggtctttatcatagtgttttggtaatctacctttattacatatatttccattataaacactgtatgtattcattatagaaactttgaagttgcagaaatgtagaagagaaactcacccatattttcaccatccaaagactgtggttaacatcttgatatattttcttcatcttgtttctgtgcacaggtttttggtttgttaa

SEQ ID NO: 2900 - DNA, 483 bp, Canis familiaris
acccacggtgcccatgtttccgtcgcacacacacgcacacgcacatacacacacacaccccggggtggctgcggcaaggtgccctccccctcagtcttggtcccgaccccgtgcctgtgggcgggggtggcgaagcccccggggagggcccccgaatgtggcaggtgtacgggtgcgagcgggggcgggtgccggcccccgtcagctccctccagtgtgggaccccggaaggcgccctcctttcccccgggtccagggcaagcattcccccggggatcagcggaggctgtggcttctcccagggcctgtgcttcgtgcagctagccgtccccgagttcccccgtggcttgtacatatgtggttgtgtggcacccccggcccctgcaccgtaaccgccatcccgacgtaacgactctagttccctgacgtcctaaacctgagtgttaggctctaggctcctgtactgtgtgtgcactaagatcc

SEQ ID NO: 2901 - DNA, 606 bp, Canis familiaris
  misc_feature (1)..(606): n = a or c or g or t
gacctgtactccagtggcattgcttgccaagctagtgcagcagagctccccctcatgataggggtnnagctatagaanntagggttgccaaattcctactttccaaaaaggttcagatttttatgtgaaaaaatgtattttgtaaggtcacttaaaattggtacgcatttaaaaaagtgcagcagctagtactggtcaattttaacatgtgctgacatgaaaccatcagacttctccataaagtgtgttaatcttctgacctgtctggactcccaggcaattactattaatatggctactagtcttaagttggctcttaaaagggaaccgaattaacagaccataactaatagtgacaatcagcattgaatagtgggacctttttttttaactgctgaaatgaaaaatgtgtgtttaatacacctagcagtgcagtgcccgagtctttaaggtgctaatggttgctccagttcttctactgttctcgccaattgaaatatgatcatatttgttcaagtctttttggtgttagtggttttaaannnnnntgcttaaannnnnntgtagtggtatcttaccatgaatggtgtatttcccctaacaatt

SEQ ID NO: 2902 - DNA, 499 bp, Canis familiaris
  misc_feature (1)..(499): n = a or c or g or t
ccggagtggccccactggatcaactctctaggccttatttaggggacctaggtccctatctcaattttatccctctggtcccaaccccagaaccaggagtgggaactataactagctttcccacccagttttgggcaagtcccacaccagacctggagcaagaccctggcctgacagcttgagctggaagcctgcctcccaaggcacatgtattgatcagccctgggccctcgacccctgaaatccttgacgtcgcaccgcactgttcccccatagcctgccagaatgtctctttgtgtccaataggcttccccgataaccatctgtccatctgtccctgtattctgctgtacggactttcttgctgtnccntccccaccccccgtatatgccccttcaccccattggagagaaacctcnnnagggaaaggcagggtggctacacccagcaactaatccaaatggcaaatattttgtaacaaaatagcccagaggtatt

SEQ ID NO: 2903 - DNA, 548 bp, Canis familiaris
  misc_feature (1)..(539): n = a or c or g or t
aaaatccaaatgcactgacagttttaagtctataaaaatgctnnatttttacattggtgttgaaaatctgaaatgtacattttgccatcctcactcatcagtccctgaccatttgaaggctttttgactttaaaaggagcatttttctaattggttatcctatgatttaccttacctataaaaataactcctgtttgatgaattaattttgaaatgttagcttaaagaagtcctaagtttaatgaagaaaaactcaatttaccaaacaaaaaaaggaagttgcacattggagaggtttctcatgctgtgacttaacagcacacatttgatggtcttcctactcattgatggcaccttgctaaaccagcacatcctgcatctgtcaggctatatagcctgactggtttcatccttcacttattctaatcccttggtacctggaaccttgactaccattttacatcagtccttgtacttctcagtatattttcataatgagttatgttgtcatttagatcttctaacaactctgggaaataaagtcaaaa

SEQ ID NO: 2904 - DNA, 491 bp, Canis familiaris
  misc_feature (1)..(491): n = a or c or g or t
tccagtccccctctctcatnncagacctccctcagggggtttnnagnntctccnntctatcatatctatcnncngcagnnaagaggcnnnnngctnnnnnagagtgagaacaannnnnnnntgtgcagtctgnnacaatcactaatgctntctgaatctgtttttctcatctntaaaatgggaatgaggaatatccacactctgctgattgccnnnnagggatattaatgatgtattgttgaatcagaacgtcaggatggagtacagaatgcactgaagatggnnnnnnaggagatccaannnactgtagacagaagctaccccnnncgtatgcgagtagtgagggaaggatcaagtaatggtgtgggggaggagaattttcacttttacttaagatgccttgatattgcttgaatcttatttcagcaagtgtgtgccttcttttgcaattaaaaaaacaacgtcgggatccctgggtggctaagtnnnaa

SEQ ID NO: 2905 - DNA, 482 bp, Canis familiaris
  misc_feature (1)..(482): n = a or c or g or t
tctatggagtggggcgacgggcagagactngangagcagcaagcacatgctcactgaagagactgttggcaggaacgcggccaggaacatggtgaggtgtccacgtgaggaggtagctgcagcaatggaggaattgtgaccctgccagctagtggcagagccctatgtgagcacgacggatggaggaaagtgtaagagcggcctcccagcagcacacaagaggccggactgtgcaggggagctagcaggcgggcccggacgctgcccctgctctgtgcgcgctggagatggagcccagagtacaccagagacctggactctgacgctagagctgactagtggctccagaagagccaggacagagacgggctgtccagagagggggtgtgtgagggcccgtggcctggaggccgtgtgttttaagaggcccggtgggcaggctgaggcaagaagaatcctcccctggagcctccagagactgc

SEQ ID NO: 2906 - DNA, 595 bp, Canis familiaris
  misc_feature (1)..(595): n = a or c or g or t
ctgcccaaggttttttcccacanntatttatggcctnnngcagtgtgttctcagccaaaatacaaatctaagtacgtctcacactggtcnnnctccccttgatttcaggataaaaccagaagccttgtcagacctacaaagcccgagctcatctgggctctcccccacctctgcagcctatgccataccccctccacgtctctggattcccttcaggtccacaagccccagcctgtcccagggcctttgcacatgctatggctatctatataactcctatagagcccaattccaaagtcacttccctagggaaactgcccaattcccctatccatccagagtacacccagtattctccagtaaatactgtcaggagaaccctgtccctttccttcatggggttgtcacagtttgtgattatgaatttgtgtctgatcatctatctgtcctcaataagaactcctgttctctgggacccctgggtggctcagtggttgagtgtctgcctttggctcagggtgtgatcctgggatctggaagggagtctcacattgggctccctgcaaggagtctgcttctccctctgcatatgttt

SEQ ID NO: 2907 - DNA, 693 bp, Canis familiaris
  misc_feature (1)..(693): n = a or c or g or t
gtgatnnagtaatacagtcctttatgaccttggacctttccgccagggacacaaaacatgtcatcataactaaaacaatgtgtgtgtagcttttattttgtgtgtgtgtgtagcttttacagttacttttgccataaagcatcttaatccagcaaagtttggttctaaaatgacactgtaagcagactattttcgtatgctttcctactataaatacttcttgctaaaccagaggaagaaacagttccttatcacaatctctactgctacctcccagtctgtggagtacctgcaacccagcgattagactgccaacaggtccctttaatcatggatgtgataggttgtcaaatagttaactcctttagtaacgactccagattcccattaggcanncaggatttatagtttcttttcgcaagcctgactggaaagaaactgcactcggttgatgnnaggaaccttatgccaacagaactgccttctgagctgtatctacactcagctttatagatggattggactttttttgaccctgtcttcctcttcccaagattaataacgggtccaccttttcccacacaccgataagctacagccatgaaacagagtgaagccaactaagctaagtggtctgaatcaaatgtcaaattataaacnnnnnncacacagtcaaggggttttctaaaataa

SEQ ID NO: 2908 - DNA, 475 bp, Canis familiaris
  misc_feature (1)..(475): n = a or c or g or t
actgtcttcattnnaatcatcaccctttttttccctgaaagttttggaatgactctaccagagaccttagagcagatgcagaaagtcaaagggttcagatttaggaaaaggacaagagattcagtggagaaagaagaaaatcccaaagttctgataacttcattctgataaagtttccacctcacttggtgacctgaaaaccacatgtataagactctatgaagaaaccaaagcctttcctgaggaattggaccaacgctaatgattaacactaagatagctttgctattgagaaatgcctgtcatagagcacactctgggccactcttccaataatcttcttattttaaaaaccacatcatttctagagagtccaccttcctaatgaatttgatgacatgggttcagaagattttttgaaaatgtgttgggcaaagattggtaaatccatataaagataaatttgtatctcatt

SEQ ID NO: 2909 - DNA, 515 bp, Canis familiaris
  misc_feature (1)..(515): n = a or c or g or t
aactcttttcctgccangatgtctattggtgtgnngattaaagtccttcacgnngccgagggccacatcgtgacatgtgagacaaacactggcgaggtgtatcgtgggaagctcattgagnnngaagacaacatgaactgccagatgtccaacatcacagtcacatacagagatggccgagtggcacagctggagcaggtgtacatccgtggcagcaagatccgctttctcattttgcctgacatgctgaaaaatgcacccatgttaaagagcatgaaaaacaaaaaccaaggctcgggagctggccgggggaaagctgctattctgaaagctcaagtggctgcaagaggaagaggacgtggaatggggcgtggaaacatcttccagaagcggagataaatttatctgttgaacagaactttgctgttatttttccttttaggttatctaaggttcagaggggatgtgtgcttatgtatatgtnnnagcttttcttnnnacatctttctctttag

SEQ ID NO: 2910 - DNA, 342 bp, Canis familiaris
  misc_feature (1)..(342): n = a or c or g or t
tgagtgcnnnatgtgccacaaacnnttnnnnnactccagcaacctnangacccacnnnnnnctgcacnnnngggcnnnggccttccagtgnantgtttgtcnnnnnnncttcacccagnncgttcacctgaagctgcatcatcacctgcatgnnnnnnnnccttgtggccacctgtccnnnnnatcnnnnncctgctttgnnnnatggcaccaggnagnnntggatnnngtnnnnnnnncatnnnnnnngcagacgggttgnnattcnnnnnnnnnnaaggtgtccttggcanctggggaaaagtaggggcnnncagcctgagccctcgtgcctggagagga

SEQ ID NO: 2911 - DNA, 536 bp, Canis familiaris
  misc_feature (1)..(536): n = a or c or g or t
acagagaaattganngncagagaacagannaaattttttgaagaagttctcctgtttgannatgaacttcatgatcatnnagtttcaagtctgagtgttaaaattagagtaatgccnncnagctttttcctgctgttgcgatttttcttgagaatcgatggggtgcttatcagaatgaatgacacaagactttaccacgaggctgacaagacctacatgttacgagaatatacatcacgagagagcaaaattgctaatttaatggtacagtatttaatatcagcttttagaagtcgacttttaatatttcattttgtatgtttccatctaaatctgtgtccctaaattttatcgattcacctaatannnnnntgttggataaatcctcctggagcataanttttctgaactcactttcaatgcaaaaccagttccagttccagttggtataggtaccagaaccattatctgatctaatttccacattttattctggaaaatgtgactcncnnnatgtcatgcaactttttggtggt

SEQ ID NO: 2912 - DNA, 323 bp, Canis familiaris
  misc_feature (1)..(323): n = a or c or g or t
tgggggnnnnnnnnnanngcccgtgccccctgaagtctgcactttnnnnnnnnngtcccnngccacctactgtcagactccnnnacttcggggtcnnnnncttgtgcatcngnacnnnngncgaagncntgtccccancagcccctgaaagcccatctagaaacaatgttcactttcaaaggtactttttaactgctcagtttttgactattttgaatagtnnnctgatagaaacttcctggtaatacttgctacatatcatgttttaattgcttgtacagttaacctttaattttatttagtaaagtctatccgattaggac

SEQ ID NO: 2913 - DNA, 600 bp, Canis familiaris
  misc_feature (1)..(600): n = a or c or g or t
cacagnctcnntgattcctactcntgcttgggttggtntagccctggcnnngtcntngtgttggatgagnacnnnncccgnnacgncntgnnaggctgtcacagacannnnngctaccttacgganctgatggaacattcagaaaatggtgctgtcattgacccgaccctgctccattacagctttgcatnnngcgccnctcacnnnnncggcaacaggcctgatggaattgggactgtttcagtggaggaaaaagaaagatttgaggagataaaagaaagactctcttctcttttagaaaatcagataagccatttcagatactgttttccctttggacgacctgaaggtgcnctaaaagctacgctttcgttacttgaaagggttttaatgaaagatattgccactcccataccagcggaagaggtgaaaaaagtggtcaggaagtgnnnggagaaggctgccttgatcaattacaccagactcacagaatatgccagaacagaaggtcagtgcggcgagcgctcgcccaagtggcggtgagagccaacaatgcctattaactgaattttctgtgcggagttctttccttccctgaac

SEQ ID NO: 2914 - DNA, 553 bp, Canis familiaris
  misc_feature (1)..(553): n = a or c or g or t
tacacntgctgcgctgcagaagtgctccaaannacagcagctcaganntccagatccagnntaattttattgagnnnagcgaagtgctcttactgaatggtgaggtggtccatgacactagtttttctgtaaagagaaagttgcccgatggccacttcgggacagaagaccagagggatgcagaggagcggcctcttgttattagcagtgatgcagccctggctcctgaaaaggtggcaagtgtggtgccttttaaaagacagaggaatgaaatcaggacagagggggggccgctggttaatgatgacgctcttcagattttagcattaaaccctaaaaaatatgaagaccgttcttatgaagagaaaaagcaatttcttagagattatttccacaagagaccatatcctagtaaaaaggaaatagaacttctttcttcactcttgtgggtgtggaaaatcgatgtggcttcattttttgggaaaagaagatatatttgcatgaaagcaataaaaaatcacaagccttctgtannnnnaggctttgatanntc

SEQ ID NO: 2915 - DNA, 535 bp, Canis familiaris
  misc_feature (1)..(535): n = a or c or g or t
gctctacctggagagcaccagaggcaannaggtgaccagcaagctgtnngacgagatccactggatcatcgtgcagtcgctgaaggctgtggcgccggtgatgaacaacgacaaacactgcttcgagtgctatgggtacgatatcatcatcgacgacaagctgaagccctggctgatcgaggtgaacgcgtccccatctcttacctccagcactgccaacgaccgaatccttaagtataacctgatcaacgacaccctcaatattgccgttcctaatggcgagattccggactgtaaatggaacaagtcacccccgaaggaagttctcggcaattacgaaattctctacgatgaggagctggcgcaaggtgacggggccgacagagagctgagaagtcgtcagggccagtcgctggggcccaaagggggccgatcaagagactcggggagaactgtcctcacaacctggaagtgaccaccagtaagcgcaagagactgcgacccagaccctgccagatactgcacctgggcctat

SEQ ID NO: 2916 - DNA, 42 bp, Canis familiaris
  misc_feature (1)..(42): n = a or c or g or t
tgttgcattcaagtgttacagatgaacgaatgtgtcannaag

SEQ ID NO: 2917 - DNA, 572 bp, Canis familiaris
  misc_feature (1)..(572): n = a or c or g or t
tgaanngtattccagagtatgtatataccatgttttctnnancaattcacctgttggactttgatgttgtttacacattgtggctcttgtgaataatgcctcaatgaacatgggagtgctaatatctcttcaaaatcctgatttcagttcttttggataactacccagaaatgggattgctggatcaaatggtagttacatttttaatttcttgaggaattcttttttattttttattttccatagtggctgcaccattttgcattcctacaaacagtgtgcaagggttccaatgtctgtacatccttgccaacactttattgtctttagttttttaaaaatagccaacctgacagatgtgaaatgacatctcactgtgttttgatttggatttccctgatgattagtgacattgaacattttttatatacctgttggccatgtgtatatcttctaaaatagctattcaagtccttagcccattttttagtcaacttattaggttttgttttgtgtggggggggttattaatattattattattattattgagtcntatgagtgtcttctgt

SEQ ID NO: 2918 - DNA, 397 bp, Canis familiaris
  misc_feature (1)..(397): n = a or c or g or t
ccctcaactgggagatgtctagctnntctggcatctcaatngacacatctgtaatcagaatggcannaaaagggtcacctcagcagctccctgggcccctccccaagaaagtacttggggtnnctcaaagccctgccccacactttggcgctgctttgagccagtaccaatcgcaggggtcctcatgtaatacagcagtgggcctgggaatcaggagactctagtcctaaatcaacctcacatgctctatggacaaggacgggggcctccgacttgtcccacagaatgatctcgtacctctgtgggtctcgacttatctatgacgtgaagtacaatcagtagntctcaaaagtcgccaggggctgtaagcctcatgagaacggtttcaaggttatct

SEQ ID NO: 2919 - DNA, 620 bp, Canis familiaris
  misc_feature (1)..(620): n = a or c or g or t
gagagattttttatctgtgctcaannacttctttgcacacagctaatgttctgggaccaccagaacatctacagactgcttctctcttctggatgaggcagctggctctggaatcccaatcgtgtttcttttctttcactaggtctgagactttggccaagttagctcacctctgagcctctaaaataggcactgtaacccctaccacataatgttattggtaatgaagactaaccaaggaggcaacactaactgcagtggcacaagccctggcacataataagtgataatgagggccaggagaacgttgagatccttccctctggagagcgaccacaggccaaccagaagcgaatcaccacaccatatatgaccaagtatgagcgagcccgcgtactcggcacccgtgcccttcagatcgcgatgtgtgcccctgtgatggtggagctggagggggagacagatcccttgctcatcgccatgaaagagctcaaggcccgaaagatccccatcatcattcgtcgctacctgccagacgggagctatgaagactggggggtagacgagctcatcatcaccgactgagctggaatcatcttcctgactgtgcctcatcctag

SEQ ID NO: 2920 - DNA, 624 bp, Canis familiaris
  misc_feature (1)..(624): n = a or c or g or t
cgcgggaattttgagacaatccttcatgttctatnnacacggacaccgagtgggaaaagtgatttcccatccaaattatgattccaagaccaagaacaacgacatcgccctcatgaagttgcagacgcctctgacttttaacgacagagtgaagccagtgtgcctgcctaacccgggcatgatgctagagccggagcagtcctgctggatttccgggtggggggccacctacgagaaagggaagacctcagacgagctgaacgcggtcatggtgcccctcatcgagccctggcgctgcaacagcaagtacgtctacaacaacctggtcactccggccatgatctgtgcgggcttcctgcggggaggcgtcgactcctgccagggtgacagcggaggtcccctggtcactctgaagagccgcgtctggtgnnnnnnnnncgacacgagctggggatccggctgtgccaaggctaacaggccgggagtgtacggaaacgtgaccgttttcaccgactggatttatcggcaaatgagggcaaacagctgatccccgtggcctttgtccttgttcctcgaggagatgnaggggctgattctccnnnnnnncacacatgatgtattttt

SEQ ID NO: 2921 - DNA, 280 bp, Canis familiaris
gctccttgtccccaggggcatgcagcacacacatcctgtgcactgacattgggagccatggtttgattatgggcacatcctgacataatgggttgttctgttgcccattccacaatctgtgccctgaggaaatggcaggatgtgggcaggtacaggtcgcagctctgagagggcactcttgcctttgccccagttccccaagttcacttccacagatgagcatgtggttaggagggttctggtctctgccccagggtggcaccctctgtcctggactgta

SEQ ID NO: 2922 - DNA, 618 bp, Canis familiaris
  misc_feature (1)..(618): n = a or c or g or t
gactgatttttntgtgttatttatatgttnnatgnnntagacacatnctcagcagcatcttcagtcatttggaatatttgagttttaatttttctgattaaatacatttattaattttctcatttctcttagcattgtaaatggttaatttgaaaaatactatggttagggagcaagcaatagaaacacaactaaatcgaaaaaaaaccctttagaatgtaacaactcaatttcaaacaatcttcaaaatacttcaaaatacaagtattttgaagctaaaagctatgtcttgatatttttggtgttatttcagtgtctagcattgtgtttagcatgtaattagagtttaatagatgtgtaaggattgcgtatgatgttttggtttatgtagaggacaaaccacataagataataccactgctgagaagatgtatgaattcttatgtgattcggtcagtctctaacaacacaacccaaaccccctgtgcgttaatgcggaaggcacttgggccgtcgtccttcattacataccatgacaacaacaatattcatttacttgaaattatatttaatatcaaattatgtttaggaagtttgatgagcagtccttggcaactg

SEQ ID NO: 2923 - DNA, 535 bp, Canis familiaris
  misc_feature (1)..(535): n = a or c or g or t
tcataaaaaaataccagtntactgacagagtaaaggtgcttcatgcagacatctgtnnnnagggttcacttctgcaaaatgctgatgttattataatgaataatgtcttcgaatattttcttgatgaagcagaacaggccagagcctgggaatgtatcagccataatgtaaggaaacaaggatcgttattagtaacagtaccaagtcttgaagattctctttcacgnntgcagattaatatacaattatcttcctgggttgaagaggtaacactgaactatgatgtatacccagaaaagcatattgacagagaagctcttgaacaaattcatttgtataagattctataacataaaatagtcctacctcagcataatgttttgttgaatatattacaaattaataaaaaagaaacatcaccccaatacctggacacatacttctgtatatttcttttagacttatatatatgtttacctatttgtaaatagttgtatatgtatatgtacatatacatagttgtgtatagacacat

SEQ ID NO: 2924 - DNA, 437 bp, Canis familiaris
  misc_feature (1)..(437): n = a or c or g or t
tctgcccctanntctgccatcaaggcaggcccacaaatggctnnnaaggccctggacaggactgaggcaannnnncaaagcagaggaggctgagatgggacgcacagggaaggatctacagcagcaagagacctgacctcttgtagacaagatctacaccccgggacttgctgatatggagaagaagcctgggaaactgaagatcccccaggggactccttcatgccctggacccttcctccaggaagggaggtggggagcctcttcagaagcagggaatggacaagcccactggtcaaggatcctcttgcctcccagattcagaggcaagtggtgatcagctgggctccctcaactttgtacacagggggaaggggggtgtttcaagagctccagggaggacctgacaggtggcaagtccttggtgatagtcccaa

SEQ ID NO: 2925 - DNA, 654 bp, Canis familiaris
  misc_feature (1)..(654): n = a or c or g or t
cgtgctgtntcctatccgccgggcnntgcagcagctgctnntcccnngcnnnnacttcagnnnnnnacggcatgnnnnnntagnnctgatcctgcnngncnnggtcnncnnnnntgtcatnngcgtgnnnnncatccgnnatatctttggggttattgggtccanntcagcccccagnntcatcttcatccttcntagcatcttctacctccgcattgtcccatctgaggtggagcccctctactcctggcctaagatccaggctctgtgttttggtctcctgggggtcctcttcatggcaatcagtctaggctttatgtttgccaactgggccacaggccagagccaagtgtctggacactgaccttgccctgcactgccccgggcccctgtgtacaagctcctgtgcatatggaggaagatggggccgctctccagggtccctcctgcctggcatgtggaggtggctggttcccattaacaaggctgttggaggtaggggggccacagaggttgcagagtggtctgcttccctccttcccagggatgctgagcttggatcaaggccctaagcccaaccccacgtgaggaggagaccaggtccttggggaatccctgcccaacccagtcctttctgcctctcctggcagaagc

SEQ ID NO: 2926 - DNA, 139 bp, Canis familiaris
  misc_feature (1)..(139): n = a or c or g or t
accccacccctnnccccctacttntcctcattcctctgccaagtactgcacagggacccccactggagnncctccccggggactggccccatccnnnngcccagggaccaagagataatgtgaaannngacnnnngacc

SEQ ID NO: 2927 - DNA, 564 bp, Canis familiaris
  misc_feature (1)..(564): n = a or c or g or t
aatactgtatttnaaaaatgagtccagactaacatctacatgtatttgttattgaatccctggccagatttgtttattatcctttcacagtattaaatgatctgcactgatacattctttattactgtcattacctatatcagtgggccatggaagaaacctcatgtttcattcagttcaatcccctcgagttagaatcagactgtaatttacccattctaaagaggagtgcttttctccggttctgaagtttcctttagaaacagagctcaggcctccggaggctttcaacactcacattcaggaataattttgtgatacgttttttttatgcttcataatgttcttttgattttttattcgatttgtgtacatgttaatggttaagatatattttatttatttttattcataacctttcccatatatgtatttacattacaatccaaagatctcagagagtcaaattcagccaaaaatagtttaaaagcatactttggcatctgcactgctttgcacanctaagtttccccataatataataaagtnaaatggtgtnnnnnn

SEQ ID NO: 2928 - DNA, 598 bp, Canis familiaris
  misc_feature (1)..(598): n = a or c or g or t
tcaacaagtccatnnngaattaaaagtcaacagaaacaatcnnnagctgtcaactccagttaaaaaagataccatctcctctgaagaccttccacaacaatttgccagtttggacaaagcaatgaaaggaacagtgaccacttacctgggtggtcttccagatattccatttggtgccacaccagtgaatgtcttttacaatggctgtatggaagtgaacattaatggtgttcagctggatctggatgaagccatttctaagcataatgatattagagctcactcgtgtccatcagttttgaaaagcacaaagaattcttaaggcttctttcctgtgctgataatatatttttcctgtgcgtaattatacttatgtttcaataatagcggaagggttttccctgcactgtgcagactttgattattttatggtactttgactttcctggaattttaaaaaggtcctttttcaagaagaacaagatcctcttgtgatacaaatcacattaaaaaaattcttacctctattgctgcctagaaattaaataatggaatacacaaacatttctaatttgaatttttgctacaaatgacattt

SEQ ID NO: 2929 - DNA, 507 bp, Canis familiaris
  misc_feature (1)..(507): n = a or c or g or t
ccnacagtcnnacatcttttcntgagtcannnnnncacagtgncntccatacacagccagatcatgaagaaaccatgtctcaatcagcttcagagagacttgcctgnnnngttttaacccagagatctgttgctttgggacaagataaagttgcacttcaaaagttgaatgaagcagccaccnnnnntcaggcctgttggcggggcttttatgccaggaactacaacccccaagctaaagatgtgcnnnnntgaaattcggctgcgcagaatgcaggaacacattgtttgcttaactgatgaaataaggagattaagaaaagaaagagatgaagaacgtattaaaaaatttgtgcaagaagaggctgtcagattcctctggaaccaggtaaggtctctgcaagcttggcagcagatggtggatcagcgtctcagttcctggcatactgatgttcctcctatatcaagtaccctagtaccacctaaacttccgttattcacccaaagt

SEQ ID NO: 2930 - DNA, 590 bp, Canis familiaris
  misc_feature (1)..(590): n = a or c or g or t
gtgcactcccagctggaacatcgccccagnnnnnnnnnnagctccccagtannnnncgctaaatggttnggctcagatgtgctacagcaacccctgccctccatgcctgccaaagtcatcagtgtagatgaattggagtaccgtcaatgaacagggcaggcaggctcacctatgcctggacctatggtggcaccctgattaggactctgcttcttcatctcgggttggtttacggactttcactttggaggactctgcaaaactatttagggaagcccaggcacctggtgtggtctgcactgacagaggaatggagcctacatggtctgaatccaggatgcaatgttgctatcaatcctggaaatagtcttttttttgtaagatatgtgaatgaagtgttggtgtcttcaccaaaaggtggcacctaagggttctgaggaaataaatgtatagaccctatgtacagacttgtgtataaacaacttttgtatatacatataggatagcttttttgaacttatacagctgtacataaaagtagctgatactagttaagcctgtgtcaacattttttttttcnnnnnngtaca

SEQ ID NO: 2931 - DNA, 631 bp, Canis familiaris
  misc_feature (1)..(631): n = a or c or g or t
taactgaagtttaaatacgacagtctncagctccaggctcaaagttaagnnagcgctctgtaaatttctgcccacgtaacatactcgtccctggtagtgcgttgttgggagctggggggggaaggggtgtggggaggacagacctgtaattaaaatgtctaacgtgtctctgttgaggaatttatttaatataaggaacttggcgttaatagttgagagctgtttagtaataacccagttttcttgaggtctgtttattttatagtttttaaaagtttcttcagttcctttggccagcgtgtgtgtattatctgtgcattaacagtcctcatctgactcttgcattgtgtcttacttttctgcatggattgacgtaaaaccattactaaaatctggcacctctgaggtgtctggtatcggtatgagcaggaagcttaatgtgagaatagatgtgaattcgggattttaaaatagatgaataacaactattaaatagtaaagttaccgaaatggaagtgtaaagaaaacagctaataactcctgtttcagaatcttgtctgtaacatactccatggcatttcccataggctctgctgtctggtccttgtagnnnnaggtttctcttgacctg

SEQ ID NO: 2932 - DNA, 446 bp, Canis familiaris
  misc_feature (1)..(446): n = a or c or g or t
gtgtgcacnnnnncatnnnnnnntgtgtnnntnnnnntctatgtgnnnnnntctccactngnnnagttnngccccccagnnnnnantnngnnnnntnnnnnnncatttttcattgtnacgactnnncggggggaactnnnnnnannnagtgggtagannacagggttgctgctannnnncntaaaatatagtgtnnatgggtcctcacaacagatcatgtggttccaatgtccattgtgctgtagttgagaaaccctgataaacaacccatgctacatacacgcttgaaataaagtgtgtgactgtgtctgtgtgtgtgttttaagaagggacgagatactagttggattttagttacagttgaaagaaatcggacacctgggtggctcagtgagcatcaacctatggctcatgttgtnnnaaagaaaagaaagaaagaaaannnn

SEQ ID NO: 2933 - DNA, 510 bp, Canis familiaris
aggtgtaacagtgttaccatgtcctttctttttcataaacattaaaattggaactattaaatgtgaattaagacaagatccaaatagtcatatatttgtttcctctaaagacatgtaaattttccacttttggcaatgaataactgggcctataactagattttaaataacgtcttgaatcctagtaatcatatgaaactgacgaaagtacatatcattgtttctaatactcacactataaaccgcctgttcctgacctgtaaggattaattcttctgaatattaagtggaagcagaattgctcaaagcattaggtatcactttctcagcttttctgatgtgactccctgtaaatctgtttctaatctttttcactaattttcattatctctttgggaagtcaatctactctggaacaaggctctcttacctagattacatctctcacttggaatttgccagctagcaactatgaaggatgatcatactcccacctgtcccttgacgaca

SEQ ID NO: 2934 - DNA, 515 bp, Canis familiaris
tgaaggcagacgctcaaccgccgagccacccgggtgccccatcaatacctccctttcttactttgtaaatgggaatcaacattaccaaccctgttgctctcaagaggtaagcacctggcacaggccttcattaaaaagaaccagagtaagtgatggttcctccccctggctgttgtctgcccccactactctacagtctcacttctggaagagtctcacttcatccagtgatttttgcgctcccacaagtctccagatgtgccgtccaataagctgcaattatctgtctactgctgaagactccactcgcctctgcccagtgtgtctgtagctctatcgcaagagacctctgcctgtaaggccctgaggtcacaagaacccttcgccccagaggaaactaatcctcagaaatccctagtggcttctgcaaatccctgctcacagttggagtggataagggtgtgagaaacactaaaaactttgagacagaaaagctgagagttgagcaactactg

SEQ ID NO: 2935 - DNA, 537 bp, Canis familiaris
  misc_feature (1)..(537): n = a or c or g or t
agaagctnggcgatcgccgcctgctgcacgactgccagcaaatgctcatgcgcctgggcggcnggaccaccgtcacctccagctagatccccgtccgcggccccgccgggccggagcctcgacggccagaggcagcgctggagaccccgagtgtccacggtgcagctacgtaccgcactgtctgcggggggggggggggtgggaggcacataggggcttttgctgcctcttgacctggttggccggagggggcgcgaccccagcccccccactgcaccccaacgcgacgagcggcggccagcgtggtgctgacctctggtggccgatcgggggattgcaggggctccttgccctgcaggcaccgagtggcttttccctctcccgcgtcagggaggggtacatctcactgagctgaggggggcctactccaaggcgcctctctcccttctggagagacttgtacatagtgtagatcagggtgcaccagcctcctgacctctaaggctcaagtgttacgttgccttttgcaaactttat

SEQ ID NO: 2936 - DNA, 479 bp, Canis familiaris
  misc_feature (1)..(479): n = a or c or g or t
ccaantatatccccatccnagcacccaacccccttcccagcaccatccnagnncccatgccttccatccatccttccatcctggctccttgtccatcatccatgctacccggcccatgcccatctcagaccctgtcatattctccccatccccnnncccctctccatccatctctccatctcnngcnncctgctggnnngccncagnnnnnncacccacggcnnncggcagtgagctgctgtcannngccatttgnnagcgatgagggttgccccacagagcagccgtgtcttctnnaacagagccacntgccagggctgggaatgaggagagcactcataccccttgatgatcctggtctctgcccttacatgccctnnaggnaagtgagggcaaaagagggggctcaggcataagannactcccagatgtgggggtagggagaacagaggagtgggtggcncaggccctagcctggt

SEQ ID NO: 2937 - DNA, 129 bp, Canis familiaris
aaagagcttatatttccaaataataagaaaaatggagccttttaggggtgcctggctggctcagttggttaagtgtctgcctttagctcaggtcatgcatccagctccctgctcagcagggagtcaact

SEQ ID NO: 2938 - DNA, 452 bp, Canis familiaris
  misc_feature (1)..(452): n = a or c or g or t
tctgnctggggatgatgctgagtnngatganntcaagcaactgcgcagctcacggggggnnnnnctgcgggatcatgtatgcatgaagacagacacagtgtctatccaggccagctcgggctccctggatgatacnnagacggagcagctgttgcangaagagnnnnnngagtgtagcagcgtccataccgcagctactccagaaagacggggctctctgccagacacaggctggaaacatgaacgcaagctctcctcagagagccaggtctaaatgcccatgttctcttccctccctgcctgttccttctcctttatggacttccagtccttgtgctcacttatacaacaggccccccaacctatgtgctcgtccttctccctccccccaaaaaaactgctcctgagacctccacgggagctgtttccacctgagtccataactacctgtg

SEQ ID NO: 2939 - DNA, 543 bp, Canis familiaris
  misc_feature (1)..(543): n = a or c or g or t
aagacgagganctgcagatccangtggnctagagctgccactctaggaccagcctgtgaccacaggnnnnttggtgtccgggctgaccggccgctccagccgaggcagctgccagtgctccctgccatggctgtcttcctcctctcccagggtgggcgccaatgatcctgctctggcaacaccccgtggaagggaagccgtggcctgtgttttataaatgtacatatgtgtgcggggtccttggacccatttggtcttataaacacgggaccactccaaggcctggtctcagcaccctgttccaccaaggaccttcatgcaggggtgagggggatgtcaaagggggccattgcggccttgacccaggctccctctctgaaccttggggtcagggagacctgtttacagtacaatgtgataaacccagtcttttgtaataaatggagtttgggttcttggggcagagtcctgagagtgtggcaggtgtgggtaggtgatgtaggggcggcctgagcttgcatctagcacccaacctgagctcag

SEQ ID NO: 2940 - DNA, 167 bp, Canis familiaris
taagtgaccactgatttcagctcagatcatgatctaagagttctcagattgagccccacctgggcttcacactcagcagagaatctgcttgaggattctctccctctccctaaccccctaccctgctcacatactctctctctaaaataaatcttttttttttaaag

SEQ ID NO: 2941 - DNA, 576 bp, Canis familiaris
  misc_feature (1)..(576): n = a or c or g or t
tgcngagncaagaagaatatatgagctagctgggaaaatgaaagacttgaatnngnnaggtgtccttnnatttcctgttgatgataaagagtcaaggaacaaaggacaagatctgttggncttgattgtggctcagcaccgtgatcgctccaatgtcctgtctggcattaagatggcagccctagaagagggcctgaagaagatctatttagcagcaaagaaaaagaaagcaagtgttcatcttccacgcattggacatgccacaaaagcttttaactggtatggtactgaacgacttattcggaaacacttggctgcaaaaggcatcccaacttacatatattactttcctagaagcagggtggctgttcttcatccacagtcctcctcttccccaagacagctgatgccttagcagttaatatttccccagagctactgaattagagggtttcaaaaaggagtccagatctggtgggcctctgagatactgtgttttctgaattctcattttgttctctaggatgtgnnnnntgattcagtatcnnnnnnnaggatgcacaccttaattgggaa

SEQ ID NO: 2942 - DNA, 251 bp, Canis familiaris
  misc_feature (1)..(251): n = a or c or g or t
tcccccctacttataaaaatggtattccnctttatcntagactctgtgtatgtagatacatataggtgcatgtgtatctataatggttcatgtactgtgctcttaagtggatcggtttcacctgtttggcaagagaagtagtgtttnnnnnnnnctttcgttgaaaagnnnnctttattatcagaatcnnncaacctaaagaatgaatgttcannnnagaancttcaaataagcatattttcattttgatt

SEQ ID NO: 2943 - DNA, 524 bp, Canis familiaris
  misc_feature (1)..(524): n = a or c or g or t
atacntgataaaagaataangaacagaaaactnnnagactttccattcaaagacctcaggaagannagtccgttgcttttcaggcttcagggaccatngaaagggtaggacagggctgggaggggacgaagggtgcagtcagcaggaagaggttttgtgcactccttctccccccttctcagcagcggtcatgggggtggcccagcacccacctttgaatggcatcttaaggttttgtttgtggacctcctgagtatcagccatcactcagaccctgcgcggcaggcgtaaaggagcaaacgagctcagagggtataagtgactttgcatttgcacagcttgtccttggcagagcctgcaggggcacccctgtcggtgcttggcagcggggcacgcgccctcctccgctgggtgaccctcctgccagccttcacctgtactgcagacaaggatgttcagggtgagcccggtctgggtggtccaaatccaatcccaccgtacatgaagtttaagttttgtttttt

SEQ ID NO: 2944 - DNA, 72 bp, Canis familiaris
  misc_feature (1)..(72): n = a or c or g or t
ctgaggagctcactcagacctttatgagtngtannctcatcactggaatgttccaacggttgganaagctga

SEQ ID NO: 2945 - DNA, 363 bp, Canis familiaris
  misc_feature (1)..(363): n = a or c or g or t
atattctgnnnaccnannnnatatttaacnnnttgtgttgtatgnnnctctgatttaagagattatgnnnatcctncnnnnattatggaaaaagaaagattaagnngagtcntacttgattttatccctgtgggaaaacacactaattttttattttgttaattttataacataggttgaattttagagtgggtttttttaataagtaatgaaggatnnnatgggtgggagaaaatggnnctccgcanctgaagatagngncagttctctagaactcatgcattgccannggaaagcctgtgttgggcattgatgtcatnnnnaagaatnnnctggaaaatcatcnnngacacgannnnncta

SEQ ID NO: 2946 - DNA, 490 bp, Canis familiaris
  misc_feature (1)..(490): n = a or c or g or t
cgcagccacggtnnagcagnnaggcnntccacgccagttgcacccaccgctgcccaccctacattccnctgccctgactgtggcaagacctttgggcaggctgcttctctgaggcggcaccgccaggcgcatgagacccgtgtccctccaggcccctttgcctgcactgagtgtggtcaggactttgcccaggaagctgggctgcatcaacactacatccggcatgcccggggggaactctgagtgagggttacaccctccctagggcaatgggtgtgtgtgtgggggggatgggttctgtggctgctagaacccacctctgataagggatgggcgccttggaaggatgtgcttccctccctggacaggcaaaggactcctgataaataggacccagaagatgctcatctccagattcagtctttggaggacacaaaggccttcagggatatagcgaaattagtgaaatcttttaagagaaatgaannng

SEQ ID NO: 2947 - DNA, 600 bp, Canis familiaris
  misc_feature (1)..(600): n = a or c or g or t
aatggngaaaattgtgtcaatttgtttttactgcttggnagacctgccttcttatttatcagtgactgagtacacattcacgatagtatagtttttaagcactaagatcctttttaataaaaatataaaagtaattaaagtaaaaataaaaagttattcttttagttattttaatgcaaatttgaattttaatctgttatctgaaaaacagtaaaattgaaaatataatctaagaaataattttaaaatggtaaaataatgtttatcagacagacatcacaaaattttgaagatctgtagtacatgaaaatagaatgagattaaaataaatatatatattctttttaggaactttgctgcggaaaactggactcaaatataattgatatatcttgtcaatcttgacaaatcagatttcaaaatactttaataagtaataacttggaattctaagatgggctatttattttaccaatggctttcacatctgataaatatagccacatttcttgaaaactaaaatttctgagatgaatcatacaatatgacatttttacatgtgagtcatataattaggatttttttttcaaatttttatat

SEQ ID NO: 2948 - DNA, 631 bp, Canis familiaris
  misc_feature (1)..(631): n = a or c or g or t
caagaagagttgtcgatttttcagtgctttcagctctgcacttgttaggacagagtgatgatgacttccgagttccttacatgctggaccagaaactggtgggccagcgtgccccagtgatacatgttcattgttccagcagtggagaagtagcggagttggtacaacctttctggagggcaatttggcagtatggatcaaaattttaaatttgtagaaccttcggcccagcaatttcatttcaaggatttaattcatctcaaagagctcccataggatcaactcaaccagaaggcagagggtgaaggagtccggtgataccatctatagagatcatcctctcaggcctcaaagtagagcagcatgaggcagaaaatggatctgggagaagaaatagctaatggtagaatgtggcagaagtgatgctgcatgacttctaaggccaaattatgaaagacaagatggctttacctggaaatctcttttttcctgggatgctcactctgggaagccagccaccacattatgtagaagccccagtcacgtgaagagacctcatgtaagtgtggtggctaattgcccagctaaggtcccagctgacactcagcattaattgccagannnnnnaaga

SEQ ID NO: 2949 - DNA, 511 bp, Canis familiaris
  misc_feature (1)..(511): n = a or c or g or t
ctgaacttnnncgtggttgtgtgtgctctgatgtggnnttctccccatactccccgccgcctgtgctggcccagcggaaatcacccttatcttgatggaacttggattcagtcggcccctaccgaccagtggtaccttccactggggccagcccccagccagtgaaggtgccagcgtagcaccctccagctctaactcataggtacagaccacgtgcccatcgctgccccctcaaccacactgacctgtgaggtcccagccagaaggacaacaggctcactcttctggcagaagagaaaagggacccagacttgagctgaaccaagctgttaccccgccctcacccccatttctgtgataaatgttacccttccctgggcgctcatcgtgttcactggagcacccccttccctttgtcaataggcacagaccattgtaaagaaatgtggtgtcattcagtgaacttctgtccccctcatctaagattggctctagctgatttccccactct

SEQ ID NO: 2950 - DNA, 358 bp, Canis familiaris
  misc_feature (1)..(358): n = a or c or g or t
ttgtttgtggtggtggagactcagagnnnccctcgccgtgtccatcctgggagacgtgagctgcgtggcgaggagcagcaggtagaggccacggattagatgcacacaaagactcttggacggatcttaaaatcagagtgctcagtggaaaaagtgaaaaatggaannnnnnnnntaacaatgctatttgtgtacatctaaaattacaccctcaggttgatggggaagagcatgccagaactttctgcagtgatgaaaatcttctgtgccttgatagacttgaattgctcaggtgtgtgtatttgtcaaatccacaaatagannnnntcaccaatagatacnnnnacaatctgcacat

SEQ ID NO: 2951 - DNA, 391 bp, Canis familiaris
  misc_feature (1)..(391): n = a or c or g or t
taggacccnnngagggaaatttccnnnnnnnnggaagtnnacgcggggnnggggctccttcacgggnaccgnnnnngcgacctgcacccgcgaggggcggggnngaggggcggggattggcgtctggtgcggccgtcaggtgcccggcgctggaagggccgaggttggtgtttgctgcaagtaggccgccaagtgctgttcgtnactgataacgctagagcagatgacactccttttttttannngaatatttttttgagacaccccgaagagtagtactgggtgaannnnnctcgggctnnnnnaaaatgcttggccctcnnnnacccnnngcnnnnnnnnntcatgcnnnggccctgtgctttatactaagaagactgaagaactgnag

SEQ ID NO: 2952 - DNA, 609 bp, Canis familiaris
  misc_feature (1)..(609): n = a or c or g or t
ggcatccaaggtntgtngcgaacnnggtnaactnngcaaagaacatgctcnttaattaatgaaaccatacagacccctgaaaggcacagctgctggctgtggatcacaaccttagctgcacattagaattacccatggacctttaaaaaataccaattcccaggctctctcctaaacccattccctcctaacctctggaagatagggtcatgcatcacaactttttaacagtgtccctacccaatgagttatattactattttacccatgtcttctattttctgatgttttgatacctggagtctcactaatcccggagggactgcccctcccaaggcaaactgattcctacagatagcaacttgctgaagagcacacctttcatatgcaaactaaccagtcccagcctataccccaactacttcctttatgggttcttacatttgggccgctatccatctgccctaatcactccagggccaggtgctagacaactagggatctttgccccggagtccactgaaattattcaaactagccaatcctaaatctgcttaccctaccttacttgtactcctgcagaaatcacaataaaagctcntatcnnnn

SEQ ID NO: 2953 - DNA, 607 bp, Canis familiaris
  misc_feature (1)..(607): n = a or c or g or t
gtacaagcnnnggtactatggcttgtnngnacatgaggnnncagnngccaatttccagtcactgtcatcnntncagggctcgaatcagacgcctctcaatgcaccctcattatcagtcctgggtgattgcagctgtgcagggcaacaatgaagtatccatgtgggacatggagactggcgacagaagattcactctctgggctagcagtgcaccaccactctctgagttacagccttctcctcacagtgtccatggtatctactgtagtcctgcagatggaaatcccatccttctaacagctggctcagacatgaaaataaggttttgggacttggcttaccccgagaggtcctatattgttgcaggaagtactagttcttcatctgtatcgtactataggaaaataattgaaggcactgaagttgtccaggagatccagaataagcagaaagtaggaccgagtgatgacaccccacggaagggcccagaatctctgcctgtgggacaccatgatatcatcacagatgtggccacgttccagacaacacagggcttcattgtaactgcatctagagatggaattgttaaggtgtggaaatgaaaacc

SEQ ID NO: 2954 - DNA, 654 bp, Canis familiaris
  misc_feature (1)..(654): n = a or c or g or t
gtacccaagtgtnntgaaggatttgatacnnnagcnngcgttttgaggtagagncagtgattgagncaggtgttccagannagaattacaagtcagtttctcctcatcaaggaactcatnnnaacccttcagcaaatgtgtgatctttgtccaactgtctctcaccttgttgataggagggatatctgaaacacttcatctatgacaggnnctgggaaattaaaataaatgatctnnnngnntcagctttctgaacnnccttctctggaagttggatatggtaaaggnntctctcctgaggaattcacctcgccttgtctactaagaggaaagaaaagggaaatcacacctcagagctcagcnngcccataaaatggcagagattcctgaagaaggctgccctgaaccccaaggccccggctgcctgcactgtaatgaaatgcatgactatggaagacaataataanngcagcaatggctcgttccagctcccggatgatttggtgctgtcaggagtgcgctgtcctctgacatcccannnnnnanacggcaccagtgactgcgggccctgattggggcagtgaaatattgctggcaaaaattaaaaggtccccgtgtcaaaataattcatgatatgcatatcttccattctga

SEQ ID NO: 2955 - DNA, 540 bp, Canis familiaris
  misc_feature (1)..(540): n = a or c or g or t
ctnnnagacacaagaggctgnnagagactgagtcannncnccttgccgtctcacctggagtgcttctctggacangcctttgcccatcccggcccctggctgaacacccagccctgagcgggcccacagagtgctgatcagagagcagggcccgctcccctctgccagctacctgactggagagacggggcccacagggccagcccgactgcacctgatttggtcccagtgtgagggagccaagcgtatggctcgggtcccggctgtagagtggggatcagagaggtgatgggggcgaaggaaggcagcccaccgccgagagtcaccgcagggcagggatgtgccctcgtggcagtggttcaggcccaggccagtgggcggtgcggatggaaaagcgcggggccttctcggcgtccagccctgctcctgaagatggcttgcctcacctcccggctccgtcttgcatgcctggcgggccggggcccagggcagcatgtaggagggccctgctgttctgtgctttttaccagnggtttacga

SEQ ID NO: 2956 - DNA, 605 bp, Canis familiaris
tttattaatgatcttgctttgattgtatcaaactcatcaccatttcatagcaacaatattgttttgttttttttctctgacttccctaaaataatcccgttcactatggatacaaactgtaattggaagagaaaccaatgtctgttcgttatccacacgtatcagttgttaccgattttatgaatactatatagagttcatatgctgactccatggatatgtacaactgagaagaaaggaatagattgttattctgccattagttcaaaataatgtcactgcagtctgggtaagttacagatatttgaaataaaatctctgaaaatgattaagcatacttaaatgctattaaagtgcagagcaatagggcttaagtgtttcacacttaatacacatttagatgattttctttgctctaacatattgttaaatattgttttcagacactgtaatttaaaattagtgtgagcatttgttgtaaattcacaaaaactcagtaatgttcaagttctcaggaagtaaggactaaccattatctttgttctaattaagttttataaaggatggcaagtttgttacctcacttgagtgggacttccctctcc

SEQ ID NO: 2957 - DNA, 638 bp, Canis familiaris
  misc_feature (1)..(638): n = a or c or g or t
tagaaacgtagacagaaccatctcttaagcacatttttttttttttattccttgannnnnnnctcattttcagagagattttctttctataattttccccccgttgttttaactatttcgaagaagagaggacagcgggaggctggcccagagctgatgggggtgcaggtcttgcaaacggaggcccatggccactgctcaaaacctcccgtgcagacggacagacatccaccagggcgtcttcagacatccacatggctcctatgaccattggcctctgtccanagccactgcccgcgggacgtcccacctggctgaagagggctgtccacacatgcaagcaagctggacaggcccgtgtcccaacagtccttggagccatggggcggagccgcgtggcccagtgctgtctctcaaggtgcgaacaggcgagatggttcagcctcggtgacgtcaagcccgcctgctgcttcccacacgcctgcaagangcggctgtctttccgtggcaaagagcaataagctggacttgtgtgtgcnnnnnntggannnnnntcatctgcagcatgctaggactcgaccattttggtgtaaacatttgtgttttataagatttactttgtttttatttttctactt

SEQ ID NO: 2958 - DNA, 223 bp, Canis familiaris
  misc_feature (1)..(223): n = a or c or g or t
ctgcttttgggaagggancngagacgtgccngatgacttgncnggtctgttaaaaacaattttgttgtcaatgttttttaaattaaagtcctagcttttgtgtttttgtaaaaaccgtacacgcttactgtaaaaagtacaagaaatcacctccatccgcctcggtggtagctgggnnnncctcccnncggggtgcncgnnngnnngaaagtcagcctgtggg

SEQ ID NO: 2959 - DNA, 520 bp, Canis familiaris
  misc_feature (1)..(520): n = a or c or g or t
acccaactacagccccaatgtcgtgaaagagtagctggattttagctcctgcctgccnnggatggcanntctgcccntagcagatctgcaagtacagcaggctttacatgtgcaagttctccccggtggtatcctggtaacatttctgtccacataggtttaaaaacacctagacacggggagatgcctgggtggctcagcagttgagcctctgccttgggctcagggcatgatcctggagccccaggatcgagtcccacatcgggctccctgcatggagcctgcttctccctctgcctatgtctctacctctctccttctgtgtctctcatgaataaataaataaaatattttttaaaaaaagaaagaaaggaagaaaaatgcctagatagggagggtatattgaagaataactgtccagtgggtatgagtttccttcctggatgatgaaatcttttgggcttacacagaagtgttgcttacacaacattgtgaatgtgctaatgtagaatgccactca

SEQ ID NO: 2960 - DNA, 538 bp, Canis familiaris
  misc_feature (1)..(538): n = a or c or g or t
tgctgttttacgcaacagaggcaggtgaatgcatgtgaaacccaggtggtccacttggatgccacctggttccccctttcccaatgtaacttgggaatggacacttgcaggaaagccagagtaaaaaggatacagtttgtcaagggcttagacattccagatatactgccaagacgtgctgaaagaagagctgagtgtgaagggaattaagatgtatagtggagagaagaaggaaaagtcccagttatggccccaagaccaacaacagaagtgggagctatacttcacccctctcactcacctattctgagttctatcacaggaagaaaaggccacagaaaccaagaggagcttctttctcaaccagtgaagaagtggatcaatgtggcttaggggtgaacttgttctcaaagacaagacttataattgcagattatgtttatccagcaactgcctttgttttgctcagtttatgaattgagagctatggtcctgagactcttacttcaaagactacnnnnnaaattggtttctctta

SEQ ID NO: 2961 - DNA, 479 bp, Canis familiaris
  misc_feature (1)..(479): n = a or c or g or t
ggttgcagagacactccatttccaaatggaggctcttaatcactgtctttgtccctagttttcccaacctgagacctaacaggagtggggttttggctctnnaggcccagggcagagaagctgaacagagattgtcttctgcctccaggcccacagtcctttgtcacatgtgtctcccagcctatccccttgtggatctgatgtgctggaatagctcacccaagtcattgcgctaagagtggcatctgttgagagcctgctgtgccgggctgcgtgcttaccactttacgcacatcagttcnnnnnnnnntnaccatgcaaccatatcacccccattttacagaagnnnaaagggtggaaaagttcaatagtctacccaaggtcctgcagctaataggaggctgaacagggacttgagccaggctctctgctctgaagaccaggccctggatttctgccctagaacttcctcattaggg

SEQ ID NO: 2962 - DNA, 548 bp, Canis familiaris
  misc_feature (1)..(548): n = a or c or g or t
tcatcgtgagagagagatttttcactaagaattttatngaataggcattttgctacttttnnaaattctagaggagggggagcttgtaaacaagcctttatagttccagcatatatagagcacttcagttcagtgtggttgtaagtatgagcacacaaacacataaacccacatctatacgtgctaatatgcacaagattttaactgcagatgtcttgctgctattgaatgctacagaattatatggcaaattgcttaccagaatactccatggagataagctcagctcactcttgggaagaattatttcttagaaaacaatttagtttttgttggattaattaaataaggtatccccagttttaatgactagatttggaaattggaatgccattcttcaatctcactggtctcaaattcactgataaaaatctctccctaacctagtaagtggagtaagaataatcttctagatcggtacccactggccactcttgagctgatttccagtcatgtcctccatatgtaacttttataaattaaaggta

SEQ ID NO: 2963 - DNA, 540 bp, Canis familiaris
tagagggagaattgtatgcggatgttttcatatttacattttaatgataacgtgtattagtctctttggctgtactataggaatacattaagtgattcaatggaaacatacctctttgctaattgaatattatagattggatgatgaattcttttagaagcattatatgttgtgtactctgttactttatgtctcagttttaattgaacattaagggaatgcagtattttaattgtaactctgtcaatatctttatccagagttcctgttgccatttttgtcgccaagaaaggcaggattacattttttttttttttttcagatggagttggtgtattcttggttatcaaaatactcatagtttggggactttgacatgataaatattcatggtgtgtaaaagcatgatacataactgtacaatcttacttaaaatgcttacttgtgtagatagatacacacacgggacctagaagtcaaactgcaaactgcttgtgattatggatgactttgttctttgcttcttgtgtttttcagttt

SEQ ID NO: 2964 - DNA, 453 bp, Canis familiaris
  misc_feature (1)..(453): n = a or c or g or t
tcagcagctccgtggacttctggtagcgccggatctcgcgcagggccaccgtgcccggccggtagcggtgcggcttcttgacgccgcccgtggccggcgcgctcttgcgggcagccttggtggccagctgcttgcgcggggccttgccgccggtcgacttgcgggcggtctgtttcgtacgagccatggcgccttacccgcttttttcaagaagcgctcggcagtcttatttatagatatagccctgtcttgattgggccgggagggttaggaacctccaggttgcgatctcattggccaggattcaatcctatttattcgggtagattgttatgctaatcttttccctatagtcacctttccgtacttttctgtaatcttagcgatcccagctgtttttcttcttagacctttccttgcaattggtgtcattttggtannnnnnntttttaa

SEQ ID NO: 2965 - DNA, 651 bp, Canis familiaris
  misc_feature (1)..(651): n = a or c or g or t
attcttcagnnacaaggtnanncaatgcctgtgccggggcccatcctgcnnnctannagncgcttgcgnctgcttccgtcctgnnnagggacgggtaggggtttcccctcagtgaccattggtctccagcccttccccaaggggtcacaaagntagtctcagaagtccacatctaaagctcctatccctacagaccacgcaggccaacaagaacagccaatgggaagatgcttacatcaactcaggccgaactggttggctggatgtattctccatactcatcggtttagccatcatttatgtctatgccctatttatgtgaaggccaggaagtagtccatgggtccaccccaaacagcatccagccaccaaaacactaaccagcccaatcagctaccatgcaagaaaccaacagctaagacatcttctagccaagaaacctatcagccaaggaacccaacatccaagcaacccactagcccagggacatcataccacttcatcttcttggcctccagagccatcttcatccaccgtgggggtcctcattttcatgccctggatgtgcttagctccttgatactgggttgctctttcagaaaaatatttacttaaaccaataaaaataaagggaannnccagctctccacc

SEQ ID NO: 2966 - DNA, 590 bp, Canis familiaris
  misc_feature (1)..(590): n = a or c or g or t
ccggaatggcatgatcctcaagccccacttccacaaggactggcagcggcgcgtngccacgtggttcaaccagccggcgcngaaaatccgcagacgcaaggcccgccaggnnaaggcccgccgcatcgccccgcggcctgcgtcagggcccatccggccgatcgtccgctgccccacggtgaggtaccacacgaaggtgcgggccggcaggggcttcagcctggaggagctccgggtggccggcattcacaagaaggtggcgcggaccattggcatctcggtggacccgcggcggcggaacaagtccacggagtccctgcaggccaacgtgcagcggctcaaggaatacnnntccaagctcatcctcttccccaggaagccttcagcccccaagaagggcgacagctcagctgaagaactcaaactggcaacacagctgacaggaccagtcatgcccatacggaatgtctacaagaaggagaaggccagagtcatcacagaagaggagaagaacttcaaggcatttgccagcctccgcatggcccgtgccaatgcccggctttttggcatcagggcaaaaagggccaagg

SEQ ID NO: 2967 - DNA, 516 bp, Canis familiaris
  misc_feature (1)..(516): n = a or c or g or t
taccccccagtctctcntggatcagtgttagagatcctccccgttgcctgctctcatgccaggctgtcctggtgtgtgtggagggtcccctggtaccaggagagctcctctctcaggggtctggggctccgagggcctacacccctactctccctgtctgtatctgcccaggctgggaccctgtggttgtactagttggcccatagcctcctgaacactgacccacatgggcaagactgggcagaaacgcccagggccccagcccaagctcctactccctggcagttgcacataccctctcacccctcaccccactccttctcttgtccctgagcacagtgactgcctatgatatagtccttggcgtcccctgtgtttctggagcagagataggactgagggatggggcacgtgggtgagcagggtacttcccatctggggtttctttggggtttctccttagtgtctgctaccctccccctggcctcccaannnncagttgtgtctgacagagca

SEQ ID NO: 2968 - DNA, 625 bp, Canis familiaris
  misc_feature (1)..(625): n = a or c or g or t
ggtgtaatganggaaatttgagttgggaatgcattnnnttgggtttactgttagatgttcatttagttatgttgggaaaacattcagttgtgttatgtgtaatacattttatgctgtttaatacatctaatactagccaatgtggttagaaatggctttctngaatgttcccattgcccactgtagggattcacctgatgcagtgacaggtgcagggcctgaaggtaccaggagtattcaggtaggggannagaaacaagggctgagatatacagattgagaagctaatctgtgaaaatccttttaatcatcaaatggtcaagtatattgaggaactctgtcatctgaagctaataaaattttgggatcccttgttaagaagaataatactaaattatgtacaaaggagagtgtttatttgaaattttaaaagtcacaaaaaaaatttaagctagcaaatagcacaaatatcacaaagtctaggaaagtaatccagagcagcatnnngatctgcccctgtcagcttctntgtgtctctcccctgtgtgggtctgctatttcccctctgatgggntgtagggagaggaccaataaaggattaacttcaaggtaaccatttggggtt

SEQ ID NO: 2969 - DNA, 409 bp, Canis familiaris
  misc_feature (1)..(409): n = a or c or g or t
gatgtggaccggtctggcaccatgaactcctacgagatgcnnaaagcacttgannaagcaggcttcaagctgccctgtcagctccacnnggtcatcgttgctcgctttgcggatgacgagctcatcatagacttcgacaatttcgtccggtgtctggttcgactggaaacactgttcaggatatttaagcagctggaccccgagggctctggaaccatagagctggacctcatctcttggctctgcttttccgtcctctaaagtcgtaattcgtctgcctggagaccgtccgccaagcaccgggccaccagagaacattttttctctcgaccttgaaattatgggaacagttgctcaaactaatgattataaccgaaaataaagatgccttctgagatagcaagaactt

SEQ ID NO: 2970 - DNA, 502 bp, Canis familiaris
  misc_feature (1)..(502): n = a or c or g or t
gctatgcaggnctctggcagggctgggtggtctctctgtgctgggcatgctctttgggtnntanctgatggcactggcannnnnnngcnnttgcccgcccttggtgggcaccnctgcaggggtggtccttgtggtgctgtcatgggtactgtgttcgggtgtgttttcctacgtgaaggtggccgcgagctccttgctgcacggtggcggccggccggcgctgctggcagctggagtggccatccaggtgggctccctgctcggtgctgtcgccatgtttcctcccaccagcatctatcacgtgttccgcagcgggaaggactgtgtggaccagtgtggctcctaagcctgggtggatagggacctgacgttgggctgagatgccgcagcactgaagtgctcagagtccgaggaggccctcctacacgtgggcgtactcgtggatacctgtacactccatagcagatactggtcagggtggggaccacagagcaggcccaga

SEQ ID NO: 2971 - DNA, 599 bp, Canis familiaris
  misc_feature (1)..(599): n = a or c or g or t
ttacnnntctacgttcnnntcaggagtcatgctgacgtggnctgntggnctcatgtaccagaagttccggaancagttcctgtctttctccatgtaccagagctttgtgcagttcctgcagtattactaccagagcggctgcctgtaccgcctgcgggccctgggcgagaggcacaccatggacctcaccgtggagggcttccagtcctggatgtggcgcggtctcacctttttgctcccctttctcttctttggacacttctggcagctttttaatgcgctgaccctgttcaacctggcccgggaccctgagtgcaaggagtggcaggtgctcatgtgtggcttccccttcctcctcctcttcctcggcaacttcttcaccaccctgcgggttgtgcaccagaaattccacagtcagcggcacgggagcaagaaagaatgagtctgggtcttcccctacttggctccccacggcccccctggcctggaaggggcttctggcccctgtgttgaaggggataggaggctcccctcatccgggagggtcccttccgctcnnnntggggttttgtggnnnnnntgggccccgaaggcgacac

SEQ ID NO: 2972 - DNA, 563 bp, Canis familiaris
  misc_feature (1)..(563): n = a or c or g or t
attatnnnattcaagnngtgatttttatattaaaannnnnntaagtcantnnnnnnnttcanntgatatgtatttnngnnnnnaatttttttttttttactgtatcttttagtnataattggctttatttaagttgatagcttaaaatgggtgtatgtttacagagtgcttatggaaacttgatattgtgaaatcaaacctttcagatgtttttgtttgaagcattcaactttaagtttnnnnaatgagacattttctttttaaagtatttttgtgctttgctcttaaatgaaaatgccacttgggattattatagtttagtgatgaagatttctcctgtgatttgtggcatagcataggtgagatgtaattctattttaaaatattagtgatatcattcccattcattatttttctgtaggtgggtacttaaaagtttnntnntagaaaattttaaaattcctgacttttaagaatactgtggagattgttgaaatacacttttgatgataataaaatgaaaatcctttagggggccatgtacannctnnnnttggattaat

SEQ ID NO: 2973 - DNA, 572 bp, Canis familiaris
  misc_feature (1)..(572): n = a or c or g or t
aaaggaagttggtgtttatgatgctctgaaagatgaaagctggctcaagnnagagttcatcacaaccgtgcagcagcgtggcgctgctgtcatcaaggctcgaaagctgtccagcgcgatgtctgctgcaaaagccatctgtgaccatgtcagagacatctggtttggaaccccagagggagaatttgtgtccatgggcattatctccgatggcaacccctacggtgttcctgatgatctgctgtactcattccctgttacaatcaagaataaaacctggaagattgttgaaggtctcactattaatgatttctcccgtgagaagatggatctaactgcaaaggaactggcggaagaaaaagaaactgcctttgagtttctttcttctgcctgactagcccatcattttgatgttactaaaggctccaaagctgaagaatctaaatgtcgtctttgactctagtaccaaatgacaatattgctgtacttaaattccttgtgaaaaacgtttgaaagattatgtgcttcttggtataaatttgtgacagtttatcatgctgttagtgctgcat

SEQ ID NO: 2974 - DNA, 663 bp, Canis familiaris
  misc_feature (1)..(663): n = a or c or g or t
atatganncagttcagactgaaatgctaggtgtatgtattgacttcagtgtatgaccnntaattgttaaagctatgaagttaaaacttgtatttaattggcaatcagacaaagaatttattaatttgtagagaagtgttggtctgtagttacgttaagtaggattcattgtgatgcctctgcattttattgcctcaactgttatttgaagatggcatgctatgtaatttggcctgtggtatcagtgatagaaaggatacctctctaaagaagtggtttatcatatgctgctgcttgagggcttgcacttgtagaattgcattcccttctgtgccatctttttttttttaatattatatatatatatatatatatatatcagtcctggttacactttttttccttctctttggaccatgataaacttcagagtagtgacttcaggagccagggtaacttagagtgaagagacatttatgtggagaagttaatttgcatgtatgagacaggaaggtgtcttctaggtatgtgacaggcttactttaaaccatttaacttatgctccgaagtaactgtaatttcatgttggtagtatagcaaattatgatgaatagctttaattgtatgtttaaaagtcatgttcacaagcttaaatctggaatca

SEQ ID NO: 2975 - DNA, 614 bp, Canis familiaris
  misc_feature (1)..(614): n = a or c or g or t
ccagaagttccagcatgagcnnngnancaagtnnatactgaatactgtgagcacaggggcccatgtgcttcttgnnaagatcctccaaaaccacatgttggacctccgcatccgcaactctaagctcttctggcgggcgctggccatgctgcagcggttctctggacagcccaaggctcggtgcatcgagaccctcctccaggtgatccacttcccccagccactgtcggatgatattcgggcttctccgatctccgtccacatccagaccgcacacgagaaggaacaggtgatccccatagccctgctgagcctcctgttccggtgttccatccttgaggcgcacgcgcacctggctgcagctccgtcagtctgtgaggctgtcaggagcgccctcaccgggccagggcgcaagcgcagcacggaccccttggaagcactagagcctgccctgctgtgaactggtgtgaactggtgtttctgggcggtgaagccctcggaggcccattggactagcagcacgtgtggtgggaggagaggcccagtccccgtgccacccgcagcccaggatggggagaaagagcctctctatcttggggaagttcttagcggtc

SEQ ID NO: 2976 - DNA, 586 bp, Canis familiaris
  misc_feature (1)..(586): n = a or c or g or t
atgtagannntctatgtaattagaccatctctctggccaaatatattggaccacctgtttattccagacattgataaaaagtccaaagttaantactaatgagttattaaaatagcaaaagaaaggaaaagaaagaagatcctttcagatcttaggtggccacacagcatttttatagcggacaaaaaggcccaaactctatcttttgatgctttaacttcttattcattcccacacagtcaaattggactactggttatcttagaatatcctttctggtttcctgaacttatgtcactgctatctttactggagggcaatgcttactgctatttttggattttgccataatctactaatttttcaaggagtagatacaatctgtctcctgcaggcaagtgtcattctctggtcactcccctcctgctagaaatggttttttcctcttgtgaagctttaaatcccttgtgatctgtaccctatagttgcccaatggactccttgttcccatgctccacaatctctcattttccttgtcctcagcacccttccacctgcccatctgcctcctcctctcaaggatnnn

SEQ ID NO: 2977 - DNA, 594 bp, Canis familiaris
  misc_feature (1)..(594): n = a or c or g or t
cccagccccagggcttgtgagggaccccagcactgagtcntaagnngccccactttccccctgggaggtgctgcattgcctggcacccctcatcacacctggggaccccgtgtcttcaggtgacccctttcctggggacctgggttgctcacgtcacaaaccactctgaaggccccatatcaccttgtgcccctcagacgccccctccctctggggtctgtgtcaccttatgcccctgcatccatcctaggtcctctctgccttcagggcctgtgtcacctcgtgcccccacctttactgccgtagaacactgacctgctagttgggtcccacctacacacccccagagcccctctgctaggccctggggctggtggctggccaccagtgccctttgagggcagaaggggcagcccatccagggaatcaacccgtgtacctcacttagttaccagcatccaggctgggcttctcgggtgctgggggggtgggctgtggcctggggcctcagccctggctggacgcaggcgtcccaaggccatgtggctggccacacaggccccagtgctgtgtggccggagacctgtccctgcc

SEQ ID NO: 2978 - DNA, 610 bp, Canis familiaris
  misc_feature (1)..(601): n = a or c or g or t
gttttaggattaaatatgctaattannaaaagactggcanntagtagacaaagtnaatctgtttacttcagaaggacttaccagtttacattgataatatttagcacatcttggctttttcttaaggtagtatttcaagttaaatggttcagattttacttcaaaggcctcacacaggtaagttttcctagatattcctgtaatattaaaaatgtagatgtagatcctaatgaacattgagaagtgattgaatcatctgaattttcaggtaagaaacctagaaccaaagcacccaagattcagcgtcttgttactccacgtgtcctccaacacaaacgtcggcgtattgctttgaagaaacagcgtactaagaaaaataaggaagaggctgcagaatatgctaaacttttggccaagagaatgaaggtaaatcaagaagattgagggagggagagtcaggcctgactttggatttttaacccagacaagctataactgtttgttttgttttgtttaggaggccaaagaaaaacgccaggaacagattgccaagagacggaggctgtcctctctgagagcttctacctctaagtctgagtccagtcaaaaa

SEQ ID NO: 2979 - DNA, 516 bp, Canis familiaris
  misc_feature (1)..(516): n = a or c or g or t
aagccaaaggatgaatangagccatcggtcggattgccatctggctttcacccctccctggttcccttttgaagagaaacagaaaagggggaacgttttccaatgtgacttttttataggtgaaaatcgttaaaaacatgatacgtgtgtgcactgtgcaggtttggccgtgtaaagtagattacctctctcgtgttcattccttctcggaactgtatgccatcctgcctcatgccttaacccagtgaaatcaattcattttttcctctttctcattccaaacctcctgaattctcttgcccaaacacagctgaaagcttcagcttctttgaacttactgtgtcttcttcaactaacaaaaacaatgaattttaataatctccccaaattcctattccgattgcctttaaaaggtcttgggaggttactttgtgtaatcatggtagcctcctctgcaccgccgtgggttgtttttcttttctgctttttctgtcctttatgtaaagagtacatgtt

SEQ ID NO: 2980 - DNA, 647 bp, Canis familiaris
  misc_feature (1)..(647): n = a or c or g or t
cagagagtggtatacaggtttaagtgacacttcaccagatgaaggattactagannacnngactgtagaagacaaagctgtnnngcagcnnnnagaaggattgctttctcactacttgccagatctgcagagatcaaaacaagctcttcaggaactcacaaccaagttgtattactagacacactggaacaagagatttcaaaatttaaagaatgtcattctatgttggatattaatgctttgttcactgaagccaaacactatcatgccaagttggtgaatataagaaaagagatgctgatgcttcatgaaaagacatcaaagttaaaaaaaagagcacttaaactacagcagaagaggcagaaagaagagttggaaagggagcagcaacgcgagaaggaatttgaaagagaaaagcagttgactgccaaactagctaagaggacgtgagaaactgagcgtgtctgtgtgctctcccttccctgtcccatgtgccagtgtccagggtggcgtcagtggagacggagggaaggtagtgccttatgtcactgtctcacattttgcagtgctttccccaggactgcatctctgtatctttgtttctgcattcaagaagtttgttccccaggtaggagacataatgccac

SEQ ID NO: 2981 - DNA, 508 bp, Canis familiaris
  misc_feature (1)..(508): n = a or c or g or t
ggagcatgctgtttttcaatataaaaatatttatgaggctttggggttttttttnnnnnnngagnttatatgttctncnctatgtaataagagaaacaaattcttgtgaacctttcttttttttttttttttaanncttgtgaatcttaacatgctttttagctgtggctatgatggattttatatttctcttagnntaggtcaagctgtgtaaaagttatttaactcatgtactgtactgctgtttacatggatgttttatgcgggtgctttgaagtgccttgcatcagggattaggaacaattgaattattttttcatgggactatgtaaagcatgtaagtaggaattgctttggtgtataataattgtagccttacattagatttttttttctttgagtagagaaaatactctttaaattatgatggacactcattagagaatgagtttgaagattttccaagcttacaataatggtgtttttcattacatatgaaaaatgagtg

SEQ ID NO: 2982 - DNA, 499 bp, Canis familiaris
  misc_feature (1)..(499): n = a or c or g or t
cnttctactgcttctaccaactnnaagcacagaaaannngaatttcatttattttgtttttaaaaaatatatgttgatttcttgtaacatccaataggaatgctaacagttcacttgcagtngaagatatttggaccgagtagaggcatttaggaacttgtgggctgttccataattccatatgctgtttcagagtcccgcaagtaccccagctctgcttgctgaaactggaagttatttattttttaatgaccctcgaaagtcatgaacacatcagctagcaaaagtaacaagagtgattcttgctgctattactgctaaaaaaaaaaaataataatcaagacttggaacgcccttttactaaacttgacaaaggttcagtaaattcttaccgtcaaaatgacgggttattatttataaatcaagtttgatggagtgatcactgtctacagtggttcaacttttaagttaagggaaaaacttttactttgtagataat

SEQ ID NO: 2983 - DNA, 549 bp, Canis familiaris
  misc_feature (1)..(549): n = a or c or g or t
gatttgcacnnngtagtgtnnaaagaaaaaaaaaacnctaatattgaancncttaaatttagtgtatgtaaacagctttcgatatgtattgnctaaatgcatttaaatctcttttactcaaaagctacagcaaaaatactggtatgtgaccacgtaagactgtcaatgccaacaaagacaacactaatcagcatatcctacagtggattgcagtgctctccaaattatttgaaaaatgcattacagacaacttgcctgactttgagcataaaaggccctctaacctatgcaggtttcctcattacgcatctagaaaatgctagtgtgtttttgctcacttcatatgtaacaggtgcccttatgttgtgctgtatcctgtgctttttctgtgggaccattccattcaggaacagagcaccatgattccaatctgtgtgtatttactaacccttccctgaggtttgtgtatgttggatattgtggtgttttagatcactgagtgtacagaagagagaattcaaacaaaatattgctgttcttcagttttgt

SEQ ID NO: 2984 - DNA, 612 bp, Canis familiaris
  misc_feature (1)..(612): n = a or c or g or t
tactacaacaccccgnnnnngcccgtggtnnagctgtnnngngaagggaagttccaggaggtgatccaggcggagttcgtnctgctnnaggtgaacgggctgttcacatacacgtactcgctgaccgcaaacacggcgctctgcaggtcgcagccgcagaactggaccaccatcatgagtgacgccggcgacaaagggctcttctcctggaaccgagagaactacgtcagctgccatgaccccnacaacaacgcgcccttgatgtggccagatgtcccctatcagatcttgggaggcccgacggcaaacaaggttatttttgagcagaggaacggaatctacatcttctacatttctatcgtggacccgtactacagctactgccacttggaaacgaccttcagcgtctacgtctacggggccttcccactgtccgtcatccccacggcggtcatcatcatcccgctcgtggtcatgctgctgtccgtgtggctggtctacgcgatccccaaactgctgcacactgagaaaggcctcaggttcaagagcttctgggctcacctgtgcaggaggtgcagaaaggcgtgtttccgaggcgggaactgagcgcaa

SEQ ID NO: 2985 - DNA, 606 bp, Canis familiaris
catactgcaggggcacactgtggtactgctgtgacctggggccaccccctccagcaacaggacccagcgaggttctatgttaaaagaggagagaagaaacactttcttctttcactcctgcccaccgtcgaaagggaaggggcaccagtttgtggcttgttggtgttgatttgcggggtgtgtgtgtttgaggggtatttctcaatttgtttttctcaccccttttgatgtgttgagcagagaagggctcctgcagacatcagccatctaaacggttcagttttctctgcgcctcagattgctggggctgcaaacgcccaagggcagagcatttaaagccccagcccgagtgaggtcatcgcttccagggctcctggaacctggcgaccttggctggctgtacccagagagagacctcaagtgtgcacactgctttcaggcatgggggagggggggagtgtttcaaatcaataaaagggtagtatcagttcattcatattttgttggaagcttgttttccagtctcttgtacagcgtttaaaaaaaagagattctatttattaagctttgtggaaaaaaaattgttgtgtgataacttaatgtttt

SEQ ID NO: 2986 - DNA, 569 bp, Canis familiaris
  misc_feature (1)..(569): n = a or c or g or t
tcccttgacgacatcatggagggtgatacaggggtttatattaattcctccctcgaagacaaaataccaccatatctgctgtctctctgactttctctccactctcttatctcccagtaagggccaagtttaaagtaatcatttnnacacagttcagatcttaatagcagtggctgtagaaggagatgatgaaatgctggaaaaatagagtacttgttggaagaagaccttattggtggtagttaagggcttgataagagggaagggagggtgggacccctgtgagaaactagaaggtcacaactggctttctttgcccaggagaaggatactgcagctctagcagcctttatctgcactcagccgggacactcggtgtgggacctgtttgtgtatgttttgcttccttgggaacgacactctcacttaccctgttgttagcacagatgacgtggtgctctttgtgaagcaaggtggtactgctgtagtcaggatgagcgcaagcagggagatgttcccaggaaggaatctgtgtccactctctatctctgcttctgtcagaaacttac

SEQ ID NO: 2987 - DNA, 553 bp, Canis familiaris
  misc_feature (1)..(553): n = a or c or g or t
ctctnnntctctctctctgtctctcatnnntaaataaataatatctaaaacaaaaaactagaannactttagatgtcccccatcccatgcttctcaaacttaaaagtacatatgaatcacctagggataaaatgctcattcagcaagtctgaagtggccagaagattccgttcctcttacaatctcctaattgatgctgatgctgctgatctgggcaccatagttgaagtggcaaggccttggcctaaatcctcagaaatcagctttagagggaaaccacaaagaaagcgatgatcctccataaatcaggggcaccggctaagggataacttcacctctgatctgaatcaggttgagtgacggtataagtttgggaagatggaaatctgtacccagaaaatgagaataaacttcaacaaatataatggagttactgggaattgcctccaaagaaaacactggaggaggaaacactaagtgtttcatagaggacagccaatcaatagctaccatgtatgtgtaagcagaaaagaatctaaggggatccctgggt

SEQ ID NO: 2988 - DNA, 108 bp, Canis familiaris
tcgtgtttatcttgtgggaatgtgtcgtgcagttttaaggtacatgttaaatatagaagtgacttggacatgtgccttatctgttccctctagctgtttgcaaattca

SEQ ID NO: 2989 - DNA, 626 bp, Canis familiaris
  misc_feature (1)..(626): n = a or c or g or t
tacttgtgtcccagaccgagggaccatgactaggtcctgggggtnctgcttgcttctgttcaccattttcggggccctggtggccagcacagacctaaacaagaataaagcaaaggtgttgagggaattaaaagtaatcaatgcctcaaatgccaacgtgaagcagtgcctgtggtttgccatgcaagaatacaacaaagagagtgaggataagtacctcttccaagtggtcaagacaatacaagtccagatgcaggtcacagatcatttggaatactttattgatgttgaaattgcccgcagcaattgcagaaagttttcaaacagtagtgaaaactgtgtcattcaagagagctctaaactggaaaagaaaacatcaaagagaattacaaataaaatcaagtttacatctgatctcccagcaaagcatgaaagtaatatgcagttttttggtcggagcactcccctggaatggtgaattcatcatgatgaagaagcagtgtgtggatgcttagggggttctggagtactccccctccccatcatcgcnnnnnnntctctgtgaagagataaatggctcatgctggtgttaccaatnnnnnnnccccatgcatgcctctnnnnnn

SEQ ID NO: 2990 - DNA, 220 bp, Canis familiaris
  misc_feature (1)..(220): n = a or c or g or t
gtaattgctgagtcatgcggtgattgcatgtttcgccctataggaaactgtcaagctgccttccaggatgggtgcaccacttgccagcagtgcatgggtgatgcgctctccacgttctcaccagcctggggttttgtcactgtgttttatttctgtcatcctgctgggtgcatagtgatatcagagttttaattggtactttcccgggannnagtgatgt

SEQ ID NO: 2991 - DNA, 507 bp, Canis familiaris
  misc_feature (1)..(507): n = a or c or g or t
cctcaaagacttccgcacaccctacgannnggagcagcnncagtcggtacagtccgaccaggggtatatctccaggagctccccgcagccccctgaaggacttatggaaatggaggaagaagaagcagagcaggacctgggaaaatcggccaagcagctctctcctgaggatctggagagcctgagaagcctccagagacagctcttcttccaagaacttcagacgaactctggctgggacagtgtggagctggaggtgccctagggcctccccagactcagggtgttgagcaaagggagtgtgtgtgtacacgagtgtctgtatatatgcatctgttcatgtgtgaaatgtttgcctttaaatgtagaccttgggcagcttcagtggctcagcagtttagcaccgcctttggtccagggcgcgatcctggagacccgagatcgagtcccacgtcgggctccctgcatgaagcctctctctctctctctctnnnnnnctctctctct

SEQ ID NO: 2992 - DNA, 518 bp, Canis familiaris
  misc_feature (1)..(518): n = a or c or g or t
aatctgatgcagaaaggtnnaaggcaagttttgtgtttctcttgtattcatcataacacccaaggcaggaccagacacacagtaagtgcttatgaatatacgtgtggtgccaacactgccagccaggctgccccatttccagtccctcaaggccacatgctgatacttcctctgcagagtcccgccccaccccacccctgctcgggcctatcggggtctctgcaaacctggcctttctcagggtaccctcggctccctggcaggagacctttagggcggcagatgcaattccctaaattcccagagaccctgcttctccccacgcctctcctgcttccgtgccctcatgggttctaaatctcatccctgcctcgacctgagccccacccaaagacctcacaggcccaacttcctccccaagacccccaactcaaaaccccaagggagggaaagtgctttcccttttctttgttaattctcccctcattacgcctgcaatcccacaatcagtgtgcact

SEQ ID NO: 2993 - DNA, 523 bp, Canis familiaris
  misc_feature (1)..(523): n = a or c or g or t
aatgcaaaatgaattattttttctgtacttccaaccttaaatttgggcacaataacttgtatatgaaagtaggaaagattacttgatagtcaccaattgcctgttgaatcgcaacttctggcagatttttgcttgagtacctaacaagtagaagataagaactgcgccttaggaattgtaagtaatatgagggttgaaggttttagtcaacagtaagcaccatgcatggcagcaataaatatggtcaccaaaagtttaatagtattttaggctatactaagagaaccaggaaaataacaattcctttctactttgttctagacgattgtgatcaggaacagatgtctcacttagtatacaccaatagcagtgaccagagagagagacaaagttggtgaaaaaaaaatcaaaacagcatgcagttgaaagacctatagattccagaaagacaagaagactcaacagatgcagtgtaggagtcagatggtgacacacaaacatnnnnngagaagtggccacccaa

SEQ ID NO: 2994 - DNA, 549 bp, Canis familiaris
  misc_feature (1)..(549): n = a or c or g or t
aagaagaagaagaagaagaagagttcacgtactactaccactnnngagaagaccgtggatagccagggctccacgccagtttgtacaccagcatttttggagaaacgaaaatctgaagcagctaaaataaatgttgatgatgaagataatgaaatagtttttaaacagcccgtacctggtgtaaaagaagaaacacaagagactcaaacacctacacgttcaaggaaaaaaagacaaagaaaaagcaatcagtgattctaaatgtatatttcttctggaagatgtgattttattgtgagggctgattctttgtatttaactagcagtggaatgcaaccattgacaagattcttggaggaaaaactgtcagttcaagtccgtacggaaagcggtcagctggcttacctgccgttgctgaaatgcagatgcatagtttacagtagctgggctcatgctgcctctttgtcctggtctctagatttctttgcagatttcagctatctttagttaacttgcctgaatagaaaagtcatcattttactgcagttt

SEQ ID NO: 2995 - DNA, 615 bp, Canis familiaris
  misc_feature (1)..(615): n = a or c or g or t
ccattctatcagacaaagtannaaaaaacgctactggttagtatctcgagcaaagagaaaatcagagtataaactctcgtgcccatgagagacagactcccgtnnagagctatctggccacggaatgctgttttaaaggaacacaaccgtccgggcggccaactgaaaatacaaaatgctaaaatgtatgcagagtgaagctgtcttggtttatcatggaggtgcagtcccatggatgggggtctggctgaaactctgaaagtcactaaattttgtcacatccggagcatgattaatgctcagagaggcttaaggacttgtaatgatgctaataacaactggttaccactggaaagtggtcctgctgccagaaaaacaaatgatcagacacttaaagcctctatcaggatggaaaaaggcattttgccaagttttgtcccctcttagaaaccgcctggtcagctctctgaactctgcttgaacttcagcactccatagttgcttcactggatgaaataagcttcttgtatttaagtagacctacaaatctatggaaagtcgaaaaagtttcacgttcccaacttttttggggaaaaaaaggaatattataaatag

SEQ ID NO: 2996 - DNA, 544 bp, Canis familiaris
  misc_feature (1)..(544): n = a or c or g or t
acacagatctctgattctgtggtgagagcctatcagtggtaattttttgctgatgacattttacttggacatgagatgaannaaaggagggcatacatgggaaggtaatccagttatggaaaaatgggcaaatgactgagacagagtatggctgccatctctgatttatccacctttgggaggtggagaaaagtctcagtgtgttggaaaatacaaataccccttttccaagagctgaatggttgtctgtatatccatccagtatcctcacggttgtctgtatatcaaccaatatcctcataattatgtgaagaaggaaccacattctgccaaagaatttcttagttaattttaatctgttagtggcacaactgtagtggtaatttttagacatcatatgatgttagtagttacataaatattactacatattatatacaattatataatatctataatattttgatgcttatacaagcacagttatcttctcttgaaatatttnnnncctaactgtagaggnnncatctttatttggcacttt

SEQ ID NO: 2997 - DNA, 567 bp, Canis familiaris
  misc_feature (1)..(567): n = a or c or g or t
gggggcctgttttaaagaattaggtngaaaaaatagaccaaccagtntataccctagttttagtgttttcatctcacctgacagtctaggagactcaagactcccagtctctgccgttgcctctagtccccctgtctgtccctcctatgggtaagaagtgtctgggaagctctaggacaggtattgtgcttcaccgtggccttatgaggcaaggaaaagtctgcatttttctcttttaagattcttagttcttcatttaccaggtcccatcttcctctgaaggccaccccataggagtggaagttagggtttagacattttgagaatgctgacactttttagggctgtgactgagtgagggcattgggaaaattttttctttaaaagaaggatgaacaattatatttatatttcattcaggttatagtagttttttaagtaagtggaaatgggtggatttgttgccatgtgcaccttggggtttttgtaatgcgaatgtttaaagaaaaaaaaaagtatttttttctttttgtgattttgtctctcttctcccacctcatcttcaag

SEQ ID NO: 2998 - DNA, 484 bp, Canis familiaris
  misc_feature (1)..(484): n = a or c or g or t
cccttcctgcccaccaaagtccaaactccagtggcatggggcacctgtttctgccccataacaccaactaacatcccataacacgacaaacacggggaagatggtctaaacagatggtttgtgctccactcccagcccctgccaccaaaatgacttgctatagccttaaagagctcagcctcctccttctgaagggaggaagacctggttcaagttttatttcacttttaccattatagaagctctagattggattcttttctagacaggccccgttcaccccttaccaagggctgcccttagagcttcaaagggagcgtatctttgcaagccaacaaatcatgtgactggtcaaatggacaagtttctgggaacacaaggagtttgagggaatgtttggggcaggagtcaaaactgttagttgctttaacataaaagattaaagnagccattaagaaaaacannnagtctgttaagatgtact

SEQ ID NO: 2999 - DNA, 355 bp, Canis familiaris
  misc_feature (1)..(355): n = a or c or g or t
tgtggtgtgaaacgtggtgtgatgatgaatccaaacagagagccaaaaccattgatctgtgcaataatcccaaaacaaaagaacccaagctaaaagctgctgccaggattgtcccagaatgggtggaatatgacactgagatacgacaactgttagatcaccttgaaaacaagaagaaaaatgcaattttgacgcatgatgagctctagcactggcttctaggagaaagaagannnaagtatgacaagaagtctgccacctgctggggaagtgtggaactactgctgagacttggaaatttcatttaagatcagtgacatattcaaatattatttaaaaatacatgtacttattg

SEQ ID NO: 3000 - DNA, 635 bp, Canis familiaris
  misc_feature (1)..(635): n = a or c or g or t
acctggaagaattnaagcagcaaaggttattaagatccagtatatttgaagagatttcaaaaaaatataaacaacatcagccgacagacacggctgtgaaaaacctgaagaagttactcacatactgtgaagatgtctacttgtactacaagctcgcatatgaacacaaattttatgacattgtgaatgtgcttctgaaggaccctcagagcggctgctgtctaaaggacatgctagcaggttaggtggattcagacgctaggagggtggctactgccaaggtgtcctgggtgctttgttcttgtactgagatgaggtgctgacaggtgtttgcgatcgtagtagaatagactgacctggtaaccagtcctctgtgaatagggggtaaagaatgaattttcacaaggcaataagtatttaaaagtgattgttcatctataccactttatatagatagtggtattaagatcaaaagctccatcttcctatttagatatacagtattgattaaagaatacctgtgcctgcagattccagtttcaaaggaatttaatattatttacacagttaaggaacagatgatacatttccatttgttagaaactnnnnnctataataaaatagattnnnannnn

SEQ ID NO: 3001 - DNA, 338 bp, Canis familiaris
  misc_feature (1)..(338): n = a or c or g or t
ctcttccgnggagcccagcatccaattatgcaaaacaaacaaaccaaatcccccggactcactcnaggnctatttttctaccagagagcatcagacattccttcccgcagataacccaagccccccccagctcccccgactcccctgtacattctgcactttatagttggattctgagcttagcatcattgggggacccctctctttactcctcccaagtccttggggaaccccattaaagaactgcaaaagaggaactgggttgtttgggggggcnnnnnnacccccccanngcttccacctcccctcaccgccctcccccctgctccaccgtntcc

SEQ ID NO: 3002 - DNA, 652 bp, Canis familiaris
  misc_feature (1)..(652): n = a or c or g or t
caaaagccaagagagnnntcagcttggggggccagggggtgacatagcagagacatggctactnncagccacaactgagtgaacttaggcaagttgcccggcctctctnnanntctgtcaagtgacagggctggacaggccacactcccagggcgnctgctcagaagagctgcgttcgactgcagatgagnnaagtggcatcccgactcggaccccgaccagtttgcccctcttgccaccccccccaccttcttgggctgaggcctctgccatcccccagatgtatgcaaccaggcccggcaggtggcccctggccgtggctggccttctcatatgcaatatttcttctggcttctcaatggggatcatagatcccagacttgacatttcccgatgcccgtccctggtgagcatcctgcctgcctatgcattttgggtatagctcctgtgacatgccccttccacccccaaaagctgtatttttctctggctgagattagagcatattccttgtaaagtatttttctacatggggttttcttagggctctcgggaagcacatgccaagggggctgcattgcaaaggccatttggggtctgtttggggcctatgtgtaaatctgttgtcaggggttgcannnnnnngagctgg

SEQ ID NO: 3003 - DNA, 518 bp, Canis familiaris
  misc_feature (1)..(518): n = a or c or g or t
gtttctcacnctggntgcgtgaaggcagataaagtaattgacagaagttgaattctttatatcttctctggaatagttgagaaattattgaaagaagacctgatggaatggaattaacacatcaaataagtgaaacattgaagattcaagttagatatttacgtgaaatgaccccatatttaaaattgagctaacttaaaatctattttttcccagtatttgacattttctaatctgaacttatatacagatgactaatttattactggaaatgttttatctctaatctttcctaaacagtggtccaaaggaatcatgcacttttgaaaattattttttaannnnnnataataaaggaaaactaagtactcacaaactgcagtagacacctgtgtcatttaagccatggacccaaatgcctttgtcaggcccctgtacacttgcatagcatgttacnnnaataatgcattaaaatctgttaagtttttatttaagtggaatacagacatgaggtttat

SEQ ID NO: 3004 - DNA, 180 bp, Canis familiaris
  misc_feature (1)..(180): n = a or c or g or t
atgcagaagannnnngaannggcaggaaacgnggttcagtnnnnnnnntcnnnnnnnagaagtgggggacctcactttggcctctcaacatctcaaaaacattgaaaatgtacagagcttcataatnnagtatattgttccnnnnnnngctagttgagaagantntgttttcagtaacat

SEQ ID NO: 3005 - DNA, 611 bp, Canis familiaris
  misc_feature (1)..(611): n = a or c or g or t
anntctnctcccatgcactcatcttctgncgccagcaggncntctcactngaacagacatcgacagcttgtgctctgctccaagatcttcataaggcctgtgttgcaaccccactgggcaacgtggaggaatgttaccactacttcaccagtgtccttttttgccatggagtcaggcggccccccttcagtatcaacctctttagggaggaacagctgctggccctggcagactatgtagtcaacacctacttccgccacttcaaactctacaaatatgtcttcacgccccaggtgcggctggatctgtctttgacttacatggggctacagccacccacgctctggccagaggaagagaaggagaaaggcggtgaggaggtggaggagcaggaagccaccccacaggaggaggcagaaaccatggtccagccagagccagagccaagccaggtctccatcctacgagcctacatcaagacccagatgaacaaggagttgaggcagctccaacagctgatggaggagcggctccaggccagcgaagagaggctcaacaacaagctgaccacactagagcagcccttccagctacctcctggcaaaggcaag

SEQ ID NO: 3006 - DNA, 527 bp, Canis familiaris
  misc_feature (1)..(527): n = a or c or g or t
cccttctccatnngccccctcacttcccgagatnnaggcatgtgatanagacaaaagacttcagtgactaaccctgacccaggtacataatcactgagtgngaaaagtgtgactatccacagctgggggctnaggcagcaggcccaggctaacaaaggagtgattcccccatatcctctcctgtgaccagcactttgggatggtnnaggtnngtctgcaggagttcagtagtagtgctggttccctagggccctgaatggaactaaacttagatttggtaccagcagcacctatccaaagtgtgaccctttgtcccagcactattacagcttttgcctgggcagggttagcatgccaacagcttctgcaggccccagaccgaagccagaagccagcccccaggcctgctgcctgcatacatttttccctcagtccagtgttcctagaacagacacttaggcatctcaggtctttctaccgttggtgagaaaaatgtccttttcctatgtatgcatttccttttttgt

SEQ ID NO: 3007 - DNA, 638 bp, Canis familiaris
  misc_feature (1)..(638): n = a or c or g or t
aaaagaaatcccaaaagcccttcagcttccnntagtnngcgnactaggcctgagggcatgcagacattggaatcattttttaaaccattaacacactagtggtggcctcaggcttactgcagggttttaatattttacctggaaacaaggagatggaaatatgttcacttctcaaggaaatctataactttatgaaatttttagtaagataaataatccagttaggtgctgagttaaaactcccatctcttcacatgcatggattctaattccattgctgatagagatgtaaaaactaatttatcattgcagaaatacaaatgctttgagtttttaatcattagagtttagggaggcagtgtcagagtacaaatatgtgggccttcaagcctaggagaggcactttccacacttttcctcatctgtaaaactgatatgcgttacagattatgggagattaaggacaatgtatttaaagtacagagcttaaagatggcagaaaaaggaactggatgagaaaaaaacaattaaaaaaaaccttttccccaagctctgtgacaggggcagttcagataatgctttgaccaaaatgtgatgtttgagatcaggtgaagacctgaaaccctcaagtgataaca

SEQ ID NO: 3008 - DNA, 519 bp, Canis familiaris
  misc_feature (1)..(519): n = a or c or g or t
ggatccaccgctcgtnnccacggatgtaatcgagcgnnaaggnacgnncctgatcaannnagaaggtggtgatanncgcgaagagtcttcatataaagtaattgtcatgccaactaccaaagaaaaatgccctcgttgttggaagtacacagctgagtcttcagatacactctgcccccggtgcgcagaagtcgtcaacggaaagtaagagctcagcgtgctggcggcagctctgtgagcaagaaggcgttgagagttctgatggactcttcacaacaccggggagagcaagcctagatttaggtcgtgagtggaggagtagtagcgtaaggggcaatttcagaattacaagcttttcctgtattagataatatatatatatatatatatatatatatatgcagaaaaatctaaatatgcagatggacctacacatatccataatggatttatcgagaacagatacactgaagaatgtgtgactttaaatgtggctgaccagaaannnnnnatatttta

SEQ ID NO: 3009 - DNA, 595 bp, Canis familiaris
  misc_feature (1)..(595): n = a or c or g or t
aactaagcagaagttctatatttttgacagatagcttnctaaaacccactgaagcactttggaatatttaaaaaacaaaacaaacattgtattaaggttttggagatttttaaataggtcaggaaattatttccaagttgttaaattgtgaagatacagacattttgatagatactatatgtaacattttcagctgcaaaagcacaaaataaaaaaatattcccaataaccatttaaaaaaatttttttccatagcacaattttttcccaacagtaattaccttcttgttcattcacagacttctgatcgtctgacttcgtagtaatttctaaccttgttatttggcaaagagctaatttaggtttaagagaaaggtcaactctctcattttcttgttcccacttgcttccattattactgttatctttaagggttgttttttttttaatctttttctcagagatctctctatgccacttttccattttgtaaagtatnannntgttgtctgtcacagtacgctggatgacggaatgaaaactttgctgtcaggttttttccttagttcancttgtactgtatacagatcaagtg

SEQ ID NO: 3010 - DNA, 476 bp, Canis familiaris
  misc_feature (1)..(476): n = a or c or g or t
tggattttgagangagtcgaagtcagcgnnagcannnngagaagctgctcatcagtgcctggtataatatgggcatggctctgcagcagcgagctggggaggagcgggcaccagcccatgcccagtcattcctggcacagcagcggctggccaccaacacacgccgtgggcccctgggacgcctagcatccctgaacctgcgccccactgacaagccctgatggaccttaggatcctgccacctgtccagccctggggggctcaatccaccctggattccgcccccactcacctggggcccagcatcaggaaggcctcagtctgctgcctgagagcctcaaggtcatgacttctgccctttgttctcttggatgggacaagagcgcaggatagggcaggaggcaggaagggcctattctttctagcaatgtgattcnnnnncttgattttcaacnnnnngttaatgagatgccagg

SEQ ID NO: 3011 - DNA, 161 bp, Canis familiaris
  misc_feature (1)..(161): n = a or c or g or t
ctagacacagaaagtgaaaannnggtgcaggttgcnnnggacaaagccagagaaggtcggacctgcattgtcatcgctcatcgtttgtctaccatccaaaactcagatatcattgctgtcatgtcacaggggatagtgattgaaaaggggacccatgaaga

SEQ ID NO: 3012 - DNA, 609 bp, Canis familiaris
  misc_feature (1)..(609): n = a or c or g or t
agaagganacgtncaaggacaagaaggagcgnnngcaggccatgcagnaggcccggcagcagatcaccacggtggtgctgcccacgctggccgtggtcgtgctgctgatcgtggtgttcgtgtacgtggccacgcgccccgccatcaccgaatgagcgctgggggacttccccagcaggcagcagaggcccgggagggggaaggcaaaagaaagatggccttcgtgttcagagattttcctaatgctgagctctgagcaagagcaccctgtcttctctggtctttgacttgattaaagtttctccaatttccctgggagggaatagggaacgttttatcagtgaacgtgccatacaccttatggtccacttcatgtgcctttcagacttcaaagcagtgtgcgtgtgtgtgtgcgcgcgtgtgtttctttttccgctcctaagatcaatatgtagctccacccggtgagaggaggcatctctgggtcatgaatcatttggaatcagtgcttaccccatccacattgtttagaacatgactcttcctacatgtgttcacaatttccaaagggactgtatttcttctctgtgcttaatgtgatttgaaata

SEQ ID NO: 3013 - DNA, 581 bp, Canis familiaris
  misc_feature (1)..(581): n = a or c or g or t
gatcatagnagnnncagattatagaagcaggggcaaggtcatgacacagagacagggagatgcctgtcccgggcacattgnctagtatgttgcaacctgggacctttgggttgtcaaggatagggttggtagggaatgtatgcagcatcctagctctttgttcataaagcaaatgcattaaatttgtttactgcctctacatttttccagctctggtcctgggatgtacacagcattaagggtttgagacaatctctaggtaggggagatagaaatagagtagatgtaagaagtctgctcccccactgtgcctactccatcacgccaacctccaattcctgagtaactctaatgtgctatttatttcatagctcctctgaagtaaggagttcagatccatctgatagagaagaactctgcatctatattgttttagggaagaaatggtttgaacccatgtggtgatattgcattagtttccctttcactgttttctgattcttattctgtaattgttatatttcccagaaatgtcttggtcactaagcaaagctgctagtgggattctgtattttgtgtca

SEQ ID NO: 3014 - DNA, 442 bp, Canis familiaris
  misc_feature (1)..(442): n = a or c or g or t
aagngaggacctactctaaattccaaaattggtgatgaaatactggagagaacatcagctgggcattagaaaacttgggttcaagttctagctttgccttaaggactcttgtcaagacacctgtatccctgcctccgttttctaagaagagggtgttggacttactcatcttcaagattacctctggccctacagctccaggtctgtggcctgaaagccagagacaggttggatcttcaccttcatctctccctaatttccaggctcagaaccgagccccctccagaagctccccaggactgaggacaggcatgtccttcctgagtcaaaatggacttctgggttgcacaactcttggcctttgggacacttagttcaaactgtgataatttcttagatgcttgtctatcaccgtgctttccatatgcacaattttcttctt

SEQ ID NO: 3015 - DNA, 540 bp, Canis familiaris
  misc_feature (1)..(540): n = a or c or g or t
acactgtgcccacctgcaccaggatgccggacaccatgctgctacccgcctgcttcctgggcctgctggccttcacctccgcctgctacttccagaactgtcctaggggtggcaagagggccatgtctgatctggagctgagacagtgcctcccctgcggccccgggggcaaagggcgctgcttcgggcccagcatctgctgcggcgacgagctgggctgcttcgtgggcacggccgaggcgctgcgctgccaggaggagaactacctgccgtcgccctgccagtcgggccgcacgccgtgcgggagcgggggtcgctgcgccgccgccggcatctgctgcaacgacgagagctgcgtgaccgagcccgagtgccgggagggagccggcttgcaccgccgcgcccgcgccagcgaccggagcaacgcgacccagctggacgggccgaccggagccttgctgctgcggctggtgcagctggcgggggcgcccgagcccgccgagcccgcgccgcccgnnnnnnnctgagccgcccgcccgg

SEQ ID NO: 3016 - DNA, 478 bp, Canis familiaris
tcattacaaacatttaaaactggttctgatgggttctcgttaccatggctgcatgttagcattcccccgccaacataactttgaggtgtctttaaccagttgttttctatttaaaagttgcttctattaactgttttcaaaatgaaagctatttcgtatccataattacagatttacttctgaaatttgggtcgagaagaattgtttaataattgctttcaggaagatccatcttttttggatgtttaatttaactagaagagttatctgtatggcagttttaaaacagtaattgctggttttgtttttgttttcagtgccctgaagttattcaaccgataatctcctatgggaaaattcagtctttttgtaaatttacatagctatatgctcataatattttcttgcatgcatttagtccatgaaaaaatatatataattttctgttggtaaatctagctttttgtattaggattag

SEQ ID NO: 3017 - DNA, 454 bp, Canis familiaris
  misc_feature (1)..(454): n = a or c or g or t
cagacacagtgagncgctcgagcaaacagattcnngcagcatnntnnaggctgctgggccaggagtgtggcgtgatggccggaggcaggaagcacctggacttctagcgatccctccttagccgttgcacgcgggattctaggacactctcattacgatcgctaatagcttaggtaaatattttccttaacgatttgaccctccagtcctcggaaaacagtccggattgcggaacgaggccaccgtgcttcattttccttaaaccgactccttagccggaaagactacggcaaaagtacttttcagtttaagagttgttttcggccctctttagagaaaacaggtaatttcatttttgaataaagcatcagaagctccaagtgccttgcagtggtcacgggtgtccgtgcattaaggcacttcgttcgcggtcagtgcctattgcagcaggtag

SEQ ID NO: 3018 - DNA, 765 bp, Canis familiaris
  misc_feature (1)..(765): n = a or c or g or t
actcttgcttgtggtnnagtagctctaaattctttcgatgacctaaatcctgatnnnnnnngacatgcaggacttgtctatgagtatacgttgggagaagagaaattcactttcattgagaagtgtaacaatcctcgctctgtcacattattgatcaaaggaccaaataagcacacactcactcaaatcaaagatgcaataagagatggcttgagggctgttaaaaatgctattgatgatggctgtgtagttccgggtgcgggtgcagtggaagtggcaatggcagaagccttgattaaatataagcccagtgtaaaggggagggcccagctgggagttcaagcatttgctgatgcattgctcattattcccaaggttcttgctcagaactctggttttgaccttcaggaaacactagttaaagttcaagcagaacattcagaatcaggtcaacttgtgggtgtggacttgaacacaggtgagccaatggtagccgccgaagtaggcatatgggataactattgtgtaaagaaacagcttcttcactcttgcactgtgattgccaccaacatcctcctggttgacgagatcatgcgagctggaatgtcttctctgaaaggttgaatttgaagcttcctttgtgtcatctgaatcatgaagactacagagagaccttaaggatatagctatggaatttttgtccaagcttcaaataattttaaaaagcattttctttcnnnnnnattaaaagagaatannncacan

SEQ ID NO: 3019 - DNA, 471 bp, Canis familiaris
  misc_feature (1)..(471): n = a or c or g or t
gcannacatgcaggtgannngnntnnaggatgacagncgcgncctgaacatcaccatccacnngnntgcatccagcccccactccaaacccttcccaatcctnnaggccaccttcntntnctcggaccacatccgctgcatcatcgccaagcagcgcctggccaagggccgcatccaggcaaggcgtatgaagatgcagaggnnnnncgccctcctggacctcccgatccagccgacgaccgaagtcctggggtttagacttggctcctcctcttccacccagcannnnnctttccgtttctacgaccagtgccgccggggcagcagtgaccccacnnnncaacgctctgtgtttgcatccgtggacaaggtgccaggttttcaagtnnngtccttaaaatccaagaggatttgtccatggataaagagctataggctaagagattcnnnaagttcccagctatttttgta

SEQ ID NO: 3020 - DNA, 578 bp, Canis familiaris
  misc_feature (1)..(578): n = a or c or g or t
atgcccttgattctttcactcttcttccatattttgnnnnnnnngctcccacaacaccaaatcactgtaggtgctctaaaattttatcagtagttttgagaaaagagtttnntcttnnttggtttngcaaaagaacaagataaatgctacnntaaaattaaggcggggaaaaaaataaatgaataaaaatttttaaaaaaaataaggcgggaaggggctcacatttctcttttctaaaaaaaaaaatgtgtaagaggctggatacgaatttggatgcaggatgtctgactacccacctcaagcgacgtgagcaactaggnncttgcagaccctgggaccccaaggggaaaggtggctggaagcgcagcaaacatccctgctccagtttccatgggctgcttgcgcctctccaaacaccaccgcgtcctcttggctcccccgttgctaggcaaccgcctagcccgccgggctgggtcagaccaggacacccccccgcccgcgccccgtcactgctcagtgcacattttccgcgcaaatgaatgaacggctgtagttatttgcaacaacagatgcgcggc

SEQ ID NO: 3021 - DNA, 631 bp, Canis familiaris
  misc_feature (1)..(631): n = a or c or g or t
atgttctgcaagaattaaaactgagtccatgaaaatatcataggaagacataaaacttnaaaagacaactcaaagatgatggaaacgcacttacaagtggtgaccaaaaattttaggtgaagttgagcactcttaatttgagaactggaagaaccacatacaacacttaacttcccctaccccgccccccccccccaaaagacaccataacaaacctagctttttaaaaatattttaagaaagagaatgaactgtggaatctattggcagccaaggaatgtgtccaagacacatgctgaggttttgaataaaaagtgaacttttgtaatttgaattgggtcccgcttagttcctgaattgttatgaaaatcctctatctgtttgtatatttgcaaaccctttgtattataattgttgatattttccctttttaaaaaaaataccattgaaatcagcatgacaaaataacactgttggcacttataggtaacgtgattgattcagtatcttagagtttacagtttgtgttttaaaaaaaactgaaggttttttttttaagtgcaacatttctgtatactgtaaaagttataataactgaattgtttggtcgagtctttgtgtgttatattcc

SEQ ID NO: 3022 - DNA, 470 bp, Canis familiaris
  misc_feature (1)..(470): n = a or c or g or t
gccatggagtgtnnngatgtcatnnggcagcgaggtttnnnnnnnnnngnnnatgggatctgccacggnnnagctgggannggctactctttcctgtccctgnnncatctcacgcaggataaaaagtatctctaccgagcttgcaaatttgcagagtggtgtctagaatatggagcacacgggtgccgcattcctgnnagaccctattctctctttgaaggcatggccggtgccattcactttctctccgacatcctggcaccagagacctcacggttcccggcctttgaacttgctcctccgcagagggacagaaagatataaagtgacccctaagacacctgttcggaccagaagccagattgctcagtgcctgacacagaaccaactgtgaatcctgaagaaggaaaaaaggagaagcacacaccttcccgggcccctgtgttgcagagacccnnnnnttcgagcat

SEQ ID NO: 3023 - DNA, 131 bp, Canis familiaris
  misc_feature (1)..(131): n = a or c or g or t
tacatctccatcgctccggcctgcatagctgaagccagcaggccacggnnngaagaggctcggatcggcccgcccaaccnnnnnnnnnggnnnnnnggnnnncgnnnnncaggnnnnnnnnnnnnnggnct

SEQ ID NO: 3024 - DNA, 534 bp, Canis familiaris
  misc_feature (1)..(534): n = a or c or g or t
atgtgcatatcntaccccctcaaaccaaatactttcagatcaagtatgtgaaaaaggaacactgccttgtccccggcttgtccctcacaatcaccattacattttctccagatgagtggcgatactattatgactgtattcgggttcactgtcagggagatgagactctgcttattcccatccatgcctatcctgtcgccaacacactggactttccctcatttataaatctatccaacgttctccttggtgaaagcaaaaaatatgttctccctttgcagtgcaactgccctgtagacttcgagtttcatatcactttggttcagtctcatgaagccttcactattgacccagtatcaggaataatcccagctaatgggaagatgaacgtgactgtcaaattcacaccatttcagtatgggattgcacagataaaaatgcagctgtggatctcacagttcaactctcagccatatgaatgtgtcttcaccggaacgtgccatcccaacgtggctttaccgtatggcagctttg

SEQ ID NO: 3025 - DNA, 507 bp, Canis familiaris
  misc_feature (1)..(507): n = a or c or g or t
tagttactgtggtttgaaagagaattcagaggtttgaagaaactgcagagttactgaaatgtccaaatcattanntatagaattttctacaggaacttctctaggactttggctactgtacatgttgtatattttaagaattctctataaattttaatatgctgcaatatttttatgaagaatttgaattccatttggcatatgagttttttccagtattgaataaatacttatttttatgctatgattacacttctttactctattttacttttctaaggaaaacctatgtgccaatatatttcttttacagagtgaagtcattacagcactgtatttttgtgttgacatttgttggcagtgtgctaagtaatatgttttttaaagtacaggcttgtggactatggtttacatcctgttggaaacattccaattgggacttgtgtattgtacccatgaggctctcatgcataccatcttgccgtctgtactgactaatatgttgta

SEQ ID NO: 3026 - DNA, 475 bp, Canis familiaris
  misc_feature (1)..(475): n = a or c or g or t
ctgccccaccaagagactgannngattggcctcttcccatggtttcagttggtagaacccaaaggtaagctttccacatgggggattaggtactcagcctatataagctcacgagaacgttgtgtaggaaactgccagttctggttataagagaaggctgagaaatcactccctcccttcttccaccctgcacccataaaccagacatgtctcccaggaagaaggtgtccctggagacagaatatgacagggctctacaatctgtctgtgtgattatnnnnnntcttttttttctttgcctgtatttatggggctcctaggaaggggcctggagagggtacaccccacctggggacagtaaagccaactgattccaattttctgtgtgttcttacctctgtacttccttgtggccctgctggcaaagcaagcaggccttcctgtgtccaggaccctgcccctcgcannnatgtac

SEQ ID NO: 3027 - DNA, 689 bp, Canis familiaris
  misc_feature (1)..(689): n = a or c or g or t
acntntatcagaagcagatagatatcctggaaaccagaatgaatattaatgaagacaaacaaggcacaataactaaagatatcttctcaatgaaaaaagacatcaatgctttaaagaagaaggtgacagaactagaaaaccagaatccttgctccaccatacattgtttagaagttccagaaggagagaggggtaaagagatcatagaacaacttcacaaactcatacaaccagaaactctgaagaacaccttggcttctacagactatggaatctcttcagcagaaccagaaaacgtgcccagttatcctgagctcactgatcannntgaggagaaaacaatttcccccaaagttaaaactctgggaaaaaataaccatcaaaatgcattaagaagctttaagaaagcaaagtcaaatatttatatttacccagactttagtacatggatcaagctaacttttgtccatggaggaaagtggagatttttcctcagtgctacagagttagaagaattcatccaatggcttctttctaggccagccatctctcctgaggaaccacaacgtgtaacccagagatattgtccattcactgggcttatttcaagtttaactacattctgtctctctgttttaaactatatttannnnntttttggttcctcaaaagaagaaataactcgacta

SEQ ID NO: 3028 - DNA, 205 bp, Canis familiaris
  misc_feature (1)..(205): n = a or c or g or t
aaggnnncttttcacatactgagttccannagccaganaaacaaagtacccgagggtcagagccagaccccagtacctgcctctgcctccacccgcctgtttgggttagctaagccaaaggaaaagaaggagaaaaagaagaagaacaaaggcagccgctctcagccctgtgatggccccgggtcnnnagtacccacagagggtg

SEQ ID NO: 3029 - DNA, 429 bp, Canis familiaris
  misc_feature (1)..(420): n = a or c or g or t
gcanncggcccgaccggcctcccgttcgggtggnnnnnngggtgctgcganncggnnagtccagctggccagggggggggcccggcccagacacannngctcacacgctcctctgtccccttccctgaaaaccgaggcaggaagtcctctggctgcttcccttccccgctctccactccctctccagccccacctccgccatcccccgtgtgtccccgtgtgcggtcccaggagacccccaaacggcacagccgctgggcacccagcactctgccgtgcgtcccccatgcccacctctggcatcttcaccccaccccagaggcttggcaggaaccgggcagacaaggcctctcgcccgccacccacaccatacacgcccancgccatcccatgagagaaaaaaaaaaaagtaaaacaaaaacaaaaaaa

SEQ ID NO: 3030 - DNA, 526 bp, Canis familiaris
  misc_feature (1)..(526): n = a or c or g or t
cattcccgtggggannaacgagnncacnnctgagcaatgttttggtgacgnnnngnactgggctggctgctccatcattgtcctgctgggacaacagcgtcgctttgacctgtttgacttctgttaccacctgctaaaagtacagaggcaagatgggaaggatgaggtcattaagaatgtgcccctgaagaagatggccgacagaattaggaagtaccagatcttgaacaatgaggtttttgccatcctgaacaagtacatgaaatccgtggagacggacagctccaccgtagagcatgtgcgttgcttccagccacccatccaccagtccctggccaccacctgctaggtggaaggtcctgcagatccttcacctggaagagaagaagcaccaggagagaggaagccatggccagcctgcagcagggtctgactggacagcacatgggataagcctggaagcaaacaagaacctccccaaacacannnacacctcccaagggctgggcctgttcatgctctccca

SEQ ID NO: 3031 - DNA, 456 bp, Canis familiaris
  misc_feature (1)..(456): n = a or c or g or t
ctgtnttctgtacatactgtaccatcctgtgtnnaatctgtgagtgtnntcntgagtagcgtgggctagncaatctgccgttcatggtgtattgtaaactcnnaantccatatgtaataggatgcaagtctnngcgtttcatgtngacataaatgtatctaaataaaactttccctagcactgtggctgacctcacccttacttttatactttagtatgaaactgatgacaactttggtagtgagtattttttttatatatatacatatatatgtatctatatatatatatatctcaagcatctttcaggtctttgtgtgtggctttcttaaagccctgttgtaaaaaattactatgtggatggcagtctctcacatcacagatgtggaaagtataattttatatttgtattttcaaataaataagtttgtgaaaggtttccatcctctactgtgg

SEQ ID NO: 3032 - DNA, 527 bp, Canis familiaris
  misc_feature (1)..(527): n = a or c or g or t
gccagaaannngagggcacaagattcagcttcaggcatcgttctcttttctgcagctcttcacttagtatcaacagtctaggcaattgtttgaataataatgaaccaaatctctccttagcaacagtccagtttttttaaaaaatgggtatcaaatagaaccctacttttaataataatgtgggttttttgtttttgtttttgtgttactgttatctgttgtctgaacatactggaaaaggttcattataaagtgatccataagaaactgctttatttttttcctgcattgtttcaagagtgacaatagaactgtgttcaggatgtcaatattgttatcccagtgaactggatattgccttacagaaagatttcaatttgccatgaaatcccagaacctaaactaaataaggaaatttactactgctacctctaatggtccctaataagttacatttttttatatttttagttatcccttgtttttgatttgtttttcttttgattgttttctggtcttttggagga

SEQ ID NO: 3033 - DNA, 552 bp, Canis familiaris
  misc_feature (1)..(552): n = a or c or g or t
agnnnagcaacaaggggaagaaagatgtttgggaaaagnnagaaggataatgagtttgacatgcagactaaagtatatatcaagaaggaagtatttggtcaatgactagaaatacagacctggcatcttggtgnnaactgggagaaagagatttagaagttggctatatggagatgagccctgattccattgtaacaagctgaatcatctagacaaacctacagggtgagaaagaggttcaagggtgaaaccttgtatgatacctgcgtttgaaaaatgagctgaatcagtaaacacacacacatacatacaacagggtgaatcattagaaataagggaaaaaacagaatatacttaatttgaagaaatgagccaatatggatgtgagagatactcagaatttccagagatacaaggtacaagaaattttctgagataaaataaaatgaatactgagaagaaaccagtgaattaaccatatcaaaactgttctataggcaatggtggcagagtctgatttcagtgcattgaggaggaggaggatgcataagt

SEQ ID NO: 3034 - DNA, 558 bp, Canis familiaris
  misc_feature (1)..(558): n = a or c or g or t
tgaacagtgattttatttgnnacccactttagaaagactaagaaagtactgatactgtttctcccgtacccctttgtttttcttttccttaaaaattctgattctaggattcaattcctttagtcaagatatcaaagtttaaaaataaaagttaagaaactaccatcaaggcaaaggagttgttcattttgctgaaattcattaaactagaaattcattcaactagaggttttacttacggactcatttaaatgtaggttcaactgataatttcttctctccttcccccaaattacattcaacacttaaagctgtttatagcttgccatcagcattattctggtaggcttgtcagtgttaaatctgtttgctttttaaagaccgattttaggatagttaaaatcagatagttgaattcagactgtgtattttgcaaaatgttcttgattaaagaaatttgtttgtaaattatccattgttttgaagtatgcccaattgatatgataaatgtttcattgtcttncnnnnnagctttgactatcaacagggggaaagcag

SEQ ID NO: 3035 - DNA, 464 bp, Canis familiaris
gagcaaggcagggagacttggagccctctgctgattgcactccctcagtaacagatgtggcaaccatgcccagagagggcctggctcggcagactggtcaaagcaaggagggaacaggacccagagcctgtgtgctaattgccttgagatagcaggagcgtctgaggagggctgagagagatgcatggggtaggacatgtgagtctgtgtgtagttctgagcttgaagtggcggggctttgttgactgatatgtgatgagtctggggaagaacagttcccattaggagcagttgttagggatggagattgatgccttacttaaattccaggcccctaggcggtctgggtcccttgaagtcccagactccctgccttcggctgaaagttgactgggagagctatgagtcagaataacctgaacaacttctcatggccagggatgcgggttctgatggcatggaag

SEQ ID NO: 3036 - DNA, 543 bp, Canis familiaris
  misc_feature (1)..(543): n = a or c or g or t
tcnnnngagccactgcnttacgccccaggcgcgccgagnnagcagccccgggatccccgcacagggcacaccccagctgggccgctgccccatcaccacctctcgttcagctctgaaatctggtccatgctttccttcggccccatgggtctccagccgggcagcctgtttgggggtgcttttttgagccctcacctccgtctggcccctggcactagattcagctgtactgtttggccttctgaggggccccgtgcaagtgcacagccatcctggtcctgacacgcgggtgctggctggagggccggcccagccctggtttgcacctgttcactgtctgctgatggccactggccgccggagcagcggcttcactggggcaggggcttcctcggaaacccttggcggagcggcgcgctctgaagaccaaagacaaagggagagaacggctttctgttctgctacatctctaggtggagtccctgaaagttgtgggtcttcataagttgggtgtcgctgacctccaggggcactctgacacag

SEQ ID NO: 3037 - DNA, 610 bp, Canis familiaris
  misc_feature (1)..(610): n = a or c or g or t
atcagcatcttcggnnagcccgtgaagggctacggnnnnnngacgcgnngtngacnnagacagcacgtcagttttattgaatatgtaaaggatnngctgaaacacatgcgtgtgaagttctacattgagggctccgagcctgggaaacaaggaacagtgcatcttgaagtgaaggagaacccagaaagtggcgaatatgaatttcgatacatatttgttgaacttgagccccaccctagaagaactatcatcatcgaagacaatcgatcctgagctgactgcaagacccccgcaagcacggtttccaagcacacgtggagtggtgcgggcacacagctccgcccttccccactctcctcccaaggctgtagaataagataggaaagagtgtgcagcacataaaagtgaatgtaactgggtagtagttgcatttagatacacgtacgtggagaatttcttacagagggcaaatcatgaaaaagaacatactttatggtatctctgaatcgatcatgggcagtatttctgttctagttaatatctttcatgataagaaatctgttattaaaaactataccatgtaaataagcaaaaagagttcaatatttta

SEQ ID NO: 3038 - DNA, 645 bp, Canis familiaris
  misc_feature (1)..(645): n = a or c or g or t
cttttctgactccagtggnncaagattttccttttnnatacacataantaaagtgtccattgacatgtacagagaactaacactattttatgcaaatatttttttgtagatgaaaaagcatgtacagtgttctgtttaatactcatccttgtataaaaaaatatagttgagccagcagacattgtcagcaaattaattggcagcagattttaggaaatgaatgtgtgtgttttttttctaaaactaaatagcatgtattgtgtttttgcatgatcatctggatttaatctgagatcacagtctaatttttattcataagccaatttttctgcactgggcagagtactgctacctcagtcagtattttttggtttgccaccccctcaccccccagcccctgttcactcccacccccacccccccaccctgctcggctgcttctcctgtagggttccgatggttctgtttacatcagtcttaacaagaggtatgcctgttctcgcttgtgcagaaaacattgttccagattcaatcgactgggttcatgtccccccatgtagtttttaaggttatttatttaaatgtctaatgtattttattgtaacagacattgttttgccaacattgcctatttcagtggcactt

SEQ ID NO: 3039 - DNA, 614 bp, Canis familiaris
  misc_feature (1)..(614): n = a or c or g or t
aaaaaaatacgnttccgggaactccagagactgggctgccaaaggaccgtatctgctgggcgtgaaagctgttnnggctgaaagttatgaaaagattcacaaagatcatttgattggaatcggcatagttccacttcagttccttccgggagaaaacgcagagtccttgggcctctccggcagagaaacattttccttaacgtttcctgaagagctgtctcctggactaacgttaagtataaagacaagcactggcaaagtattcagcgtgattgctgctttcgaaaatgacgtggaagtgacgttgtacagacacggaggattattaaactttgtggcacgaaaattctcatagtatctactccacgcggatacctgtcagaactgctaaccgcagggaagcctttcgggctggaccagggatctttgctctggagctgcagacgtcccgcgtgcttggcggtctcaccgtgggtgtaaatgataatgaatcatcatagtgactgaaatgaaatcttcctgattttaaataataaacgaatggtgctattaacattgctaaaatcaacgtgtgaggtgtgctgtgggagaggcctaagtccgggggtatttta

SEQ ID NO: 3040 - DNA, 561 bp, Canis familiaris
  misc_feature (1)..(561): n = a or c or g or t
cagaacccaagnatggctaaggatgtttcactcttttcaactcctccccacctggagggctcttttctcttcctggctcagaatgtgactgccaacaggagggctagtggtatcctcaaacctatttccccagctcagacccaagctgggcttcgtcctgggatgaaagaggtggcccgagaggctcctggagaggtgtgagggattgggtggcatttttaagggacttctaaaagctccatggaaagaggtgcctggtagctgtatatatggtcctaggctttgggaaggcaggataatgaaagtggaaagggggggaaataggccaggtaactttgcccagagccccagatagcctagcacccttcgatggggtgcacccttccttgggccccagactcctacttacccaaccccatccagggtctgcagagctcaggctcgcggctgggcaagggctagggctccatcaaacccctgacttgaccctctttttgttgaaatggaaccactcccactggcctattgttcgtctctcttgtacttcttgtaatggtagtt

SEQ ID NO: 3041 - DNA, 538 bp, Canis familiaris
  misc_feature (1)..(538): n = a or c or g or t
tggnnngncttcctcgctctcttccatcagcaagaaatcggngaagaaaagtaagagtcaagtgcaaataactttgcctttttatctgtccctctgctcagctgttcggtaggatactgacaacgtgggctcacatgaaggctggggttaaattttgtcaggttttggagcccctgtaacagggacgatcaggatctgaccactcgcattaactgcacgccccgcgctgggtcttcccagtcttccaagggggcgtctggcaccccggaaagcagtctggggttatgcagtgatggcccaatggtagccggcttctccagaaaacaaggagtttaaggagccagcgcttcccaagcaagatgacatgtcccagctatggcccagccctgctctgcaggccttcaacaccatgggtcctggagatannngcccaggctccctgtgtgccccacggaacagggccgggagactgaacacgcccggaccgcctgccacaaggtatggacagaaatagggggcgcttagaaactgctgtgga

SEQ ID NO: 3042 - DNA, 511 bp, Canis familiaris
  misc_feature (1)..(511): n = a or c or g or t
taggctctctctgcctagtggggatcagagtgcagatcannnncttttcaataggcctgggatttnnagccaggtgacagggccacagaacacgactnntggacagtccaagcccccgaggtgttcccggggaagttccttggacggggctccccgtgtcccagtccctctgcctggagcacccttgctctggccgtcctcaggtgtaccctcctctgatgcccgctccacgtcctcaggtgtaccctcctctgatgcccgctccaggccagcctctagagtcttctccaccaccctagctcttccctggctcagcaccgggtctgatggcctagttagggcgctctccccctaacctgtgctttccaatgtcagcaacagccactggccacatgtgcctactgcactcacggaacctgggacgtggcgtgcagtataaaacatacacaggattttgaatactccacgtcaagcatgtaaaatatcttnnnnntaattcttatactgatta

SEQ ID NO: 3043 - DNA, 693 bp, Canis familiaris
  misc_feature (1)..(693): n = a or c or g or t
acccctcnctcagatccctgactctggtactnnctggatcnatagcccagtctcagatgnnnnncccccaagctaagggaattatgtggtcatgcttttccagaccttccttttggtagacacccttccctttttaaggattcccctacttttagggcttgacttctggttgcctaatgtcctaatcctctggggtgctgcaggctttgggtgtgagaggcttcccccctgtgaccacctagccccttgagctgagaccaaggcaggagaaggatacaaggtagcagtgggtgggggtgtgagagagtggggagaaagatccccaaagagagcgctaccctctgatgccagaggagcgtaccctggagtgagctcacacagtgggacccaggccaatcagaacaagcccctttggggaggggacttttagctcctccctccaatccaggcaaccttggcatcaccctgcgatcttaagggaccaggcctgggagatggggttaggagggggcaggggctgggggactgcttccctgtccttagcaaccagtgagacatcccctttcctttttttaaatcgaggtatcgttgacacacaatcttacattagtttcaggcatacaacacagtgattggacaagacttcccctttcctttgtaattaattaggctttagaaataaaaagccaagnn

SEQ ID NO: 3044 - DNA, 530 bp, Canis familiaris
  misc_feature (1)..(530): n = a or c or g or t
tgctcactgctgactcttgctgaggtgggagtagcngagtctagtcgggcctcctgctcacatgtgaaggaagtgtggctgcctcgcatcccaccgactgcaggctnnncacccgagtcctagaggaaggaggagggttcactggattcaggattatgatggaacagcctagagactccagtcctggagcagaagaattggcattatttggattattaaatgacatgtgtgggcttgatgacataggattcaaccccatttgctgctaccccagcgttccttaaaacttgtggtttagaaatcatgacagaggccaatgacttctgcttaacgtgtgagtaaagttaaaacatgaatcttgggagtcgaccttttcttaccaccaggagctggactgcctgccatctccttaaaaatgcacaatacgtgagatggggctgacctgccagaaacccagcttttaccctgcaccttctctgccttcagcccnnnnnnngtactaactctcaactgccccatccaggggccaa

SEQ ID NO: 3045 - DNA, 601 bp, Canis familiaris
  misc_feature (1)..(601): n = a or c or g or t
agcgcttcagganngtgggtagnagccgnngtcnnngcgaccaaacttcannttgattcnnnnngcagagtaacacaaccagccttcccggaatcttccatcgggtttcgagtgactaagagcatgtcccgcacacacacttggccaagggatgccgccccctgggagaccgaaaggccagacgtttcagggttcaaccctctgaccccacacgacacctaggacttgacgttcgttttgtctttctaaaactagatcacggagccaagtgaagtgcactttgtcaaatgtaagggtctgcgttgttccttgttatttttaaccttctgttccactttttttttttttttaaatcgtgtttcttgtcaaatgcagaaatgttccttccgccactcactgaagttttgaattctggcttctgcagtttttattgtctgtgtcagacgtacagccagacgtcctctgtctgcattttctagattctgttccgtgcacatcgacccccgttctgttctcttccacccccactcaccctcacgctctctgagaaaaagaatcaccttgtgtgtcgtagctcatttgtttcaagagagaatcaaca

SEQ ID NO: 3046 - DNA, 524 bp, Canis familiaris
  misc_feature (1)..(524): n = a or c or g or t
tcaggctgattttccatgcatataggcaggggtgccatctggcatacagatgttcagtatggccagnnttcaggttcgtatttgaaagagttctcagcatttaataactaggagtttccatctaaaaatctggattgcctgctttctaaaaagactccttgcctcttttatcaatctcttttttttctctatggtacttcccacccactctatcccactccctacctcatctggaataccttgcctcctcttcttccttgacttctaaatcctgtccatccttcaagtccagattctcagttctctttcctgaaaccttccctgatttatcctatggtgacttcttgtgattcctctgaccctggctgtacccgggagttttgaaaaatataatgcctgaacaccaccctcaggtggagccctggcatcatctgtaataaagctgctttcactcaagggaaggtgtcacctgataatgtagaggacagattctgttttggaaaggaaattttgggtagcccaat

SEQ ID NO: 3047 - DNA, 562 bp, Canis familiaris
gcttgtttcagaggggatcttgtgtagaccaagtcagttggaaagttcgcatcctctttagatcgatcctgatcgttagttttcctggaacttctgccctggcctgaggttgacctttgcttcaggaccctgacagtctttggggtggcatggccttatgaattcagcccttaagagcaggacttcattcaaagccttgataaaatcatcagggtgacctccaaataagattaaaccacaggattgttgttggaagcttccttgtcaaagaagaaacaaacatgggatttccactcggatgttgtacgtacccaaccctgcttgttgtgaactgtgtctcgcttttggaggaaagtaaaaaagaacacatgaattcaggagcatgcatgcagcttaatgaccttttttactaagttatttttccaaaagaatagcaaaaatatccttgagttaaaaatagaacttcacaagtgctactgaaattcaacagagaattgatctctggtgcctggttccttaccctgggaacattctaacctgtatcggtaaaaaacatactttt

SEQ ID NO: 3048 - DNA, 595 bp, Canis familiaris
aagcatgaggtcacagggctgttgttctcagaccctcaggagtttgttcagctggcaaagagactggttagtgatcctgcattagaaaaagagattgtggccaacggaaaggaatacgtgagaatgtatcactcatggcaggtggaaagagacacttaccagaacctcatctgtaccctcgaggggagcaccgaggagtaagggtgctgtcacacgcctgccctcggccccagcccaatgcccagccctgagggagtacccagagacggggctctgggccaacaggtccagctctgtatgaatcaagccagtttaaatgaatcaccgataagcaacatcagttgtaaggcaggacctcatccaaaatccatctgggcttccagataacatcctggatgtgtctacctggtcagtcctggtggagatgaggatgctcatggacacacggggccaggaggggagccctggagagagtggccttagctgctgtaggactcttggaccagccatccccctacagacacttcccacctatcttctgatgacctatgactcagtgttccacaagcagaaactaaactgagacatgtccaca

SEQ ID NO: 3049 - DNA, 615 bp, Canis familiaris
  misc_feature (1)..(615): n = a or c or g or t
ttgaaatgtgattaaagagtagatgtgcntaaagcttnnnngnnaantgtgcnnnnnngggnaaaaaaaaaacaggnnncagtcacnnntnnnnnnggtganaaacagaannnnnnaaactcagacactaaaaaacagagagaatctnnnnntnnnagacagtcagacagaaacatcacctggagcnnnngaaccatcccattttatcccctatgtccgaaccaatgagatttatcatcttgatccagatgcaccactgtccaggcctttaacccaggatcttcagtaccaaaatccacatgactgtgaccaagaacaatggcagctatttgaatctgatgtcagggacccacttctcaatcctaacttggtgaaaaacagggatcgacagcaagcaatccttaagggactatcagaactgagacagggccttctccagaagcaaagggagttggaaactaatctcatgccttnngntgcaaatcaagaagagaattttaattcttngttttaaatgtagnaaatcaaatccttcacatttgttgcttttaaattatgtgttcattgcatnnntgtattttccagatnncctagattttaaaaatgcttatttaa

SEQ ID NO: 3050 - DNA, 507 bp, Canis familiaris
  misc_feature (1)..(507): n = a or c or g or t
actttggatctttttgtcaccaaggaaatcttcatggctctggtatctatataatattctgcctttctctcttctaaatctatgacagaagaagaacaagacacaaaaatccagcttaggagccatacgttataatgaaagggaattaaaactatatctgggctgttggccttaagagtgacagttatgtgtgccaaaaataattcattacaggatttaagagtatgacgtcagaatgcttgtgcctggagacaaattgcaaggcaaacatgtggaaaccagtggccttgcctgttgcgaggggctatgatgggtacatcacgtgttgtcaccatgatgctgtggaacacaacttctgatgtggtttaagcttgaaggtagtgactgtggagtcaggattgagcagcaaaatagatactaggtcagctacaggcagaagcaaagtaattcctgtaataaagaatagcagaaattgtctttctannnnnnttgtattggttgttcatc

SEQ ID NO: 3051 - DNA, 460 bp, Canis familiaris
  misc_feature (1)..(460): n = a or c or g or t
gatgcacaaaacatgggttattttacnnnacaggaatggnnaanaggaatnacttctctacaatgtgannnaacagaaaaactcagaaatactttggattacttaagatcattattaaatgattctacaaactttaaacttatttacagatacgcgttgactttgcacgggaaaaggaccagcgcagcctagacataaacactgccaagtgcatnnngggactgttattaggaaaaatctggcccctttttccagtnnnncaccaattcttagagcaatcaaaatataaagttattaacaaagaccagtggtgcaatgtgctagannnnnnnaggacaattaaccttgacctcagcaactacgacgaagatggagctgtggccagttttgttggacgagtttgtggagtggtataaagacaannnnntgtcctaggactttnnnnntagcagcgagagag

SEQ ID NO: 3052 - DNA, 610 bp, Canis familiaris
  misc_feature (1)..(610): n = a or c or g or t
cacaccaggtgatattgtcagcacgtatggagtncgaaangcantggggatttccatcccctcccctatcgtngaaaatnactttgtagatnnnnnaaaaggtaagtgccctgtgtcccagggaggacggagggctattgtgagcaaaaggaacacaggtcctctcccctcaagtaacattggaaagatttttatctctgcatgttgatagtgtaaactgtttttataaatgctttagacaagatgtgaaggaaataaagatttgaccacatttgcaaaaaatcctacaatgataccctcgtagtacatctatctagtctttaaccttgaaagtggtaaagaagagccgtcagcacttaactcttctggatgatacttttaccttttaattaaaagggggaaagtgctgaatgaagccataacttttcctttcagattttgaagaacctaaaaagactgatgttgctgagtgtgtacctgatgggatttgaagctaactggtatttcattatatattatgtacatattttttcattcttaacttggaaatgcttttgagaagatattaaatatttgtaaattgtgtttttaattaaacttcgggacaatt

SEQ ID NO: 3053 - DNA, 513 bp, Canis familiaris
ggaaggcactactgggaggtgggcatgaacctcactggcgatgcactctgggccttgggtgtgtgcagggacaacgtgagccggagggacagggtccccaagtgccctgagaatgggttctgggtggtgcagctgtgcaaggggaagaagtacatgcccaccatgcccagcctgacccccatcacactagcggagccccccagccacgtaggcatcttcctggacttcgaagcaggggaggtgtccttctacaacgtgaaggatgggtcccacttgcacacctatgccgagcccaagttctctggccccctgcaaccgtttttctgcctgggggcccccaaatcaggccagatggtcatctctacagtgaccctgtgggtgaagggttaggggcccaggctgggaggggaagggtcagccctgatccctccggaaggtgaggtggtccagctcagcacaggccacctgccaggcttatctctggcggagtctttgggagccaccagcaggcag

SEQ ID NO: 3054 - DNA, 588 bp, Canis familiaris
  misc_feature (1)..(588): n = a or c or g or t
cgggacacccannnnntcaaggtggggcctnnnngagtgctgcccacccccactgagaaagatgtcttcaggcttttaggcctaccctaccgagaaccagtagagcgggactggtgacccgtggctgnaggggaggggacgccaagctggaccagctgccccacgtggccatccagtacttggccagcctcagcaagctgaacctcactacttcagccacctgggcctgagggaaagggccagcctggctccctctccacaggagaaaactgccatccttctacctcatcgttgccccctgctagagttttgtacaaggcctcctgcccccattttaagcaagaacaggtgttggtgtgaagccagcttcctgtgctgaaggcccagacacccctacttccctacccaaggaggctctgactgctgggggtgggatgagggctgcagggaaggggcaaacagctgtggtgnngcatcacctaagaccctttggagccagagaaagcatttccccatgtacttcctctacccggcctgcttcctgtgcagctggagctgtggggcgggggtgaccccggcttggtaagg

SEQ ID NO: 3055 - DNA, 573 bp, Canis familiaris
  misc_feature (1)..(573): n = a or c or g or t
tgatcntgtnnctgcttgtgctcatnntncagtgtcctggtggccatggttctgctcttccaggaacggatctcagcgcttcccagaaaccccttgacccctcctaggtccctggcttcttccttcagccatctgagtctggggctattcnnnnnnntacctcctgccttcccaggctgaagaggtcagcagtcctcctgccatctcccccacactgcccctcaccccacaaacaagatgcttcttggctgaaggtgctctgaaagggaaaggctgcaggacacctgcctcatcctcaaacaccttgggggcatgaggcctggctggctatgagctcagggtgccagccggcgcgcctcctgcccctccagtcttaatcttagggtgtaggtggagattcaggggagatccctgcctacctggatggactgccactgcagatagggggctctccctgagtgccccttccccctacttgcagatgtagctggggaggtggagttgtgaagggcagatgaaggacaagctcatctgaatggggttccatgataggcagagaccgggaagggaagc

SEQ ID NO: 3056 - DNA, 487 bp, Canis familiaris
  misc_feature (1)..(487): n = a or c or g or t
ctaaacagaaaactcccnnnaatacagagaggnncaggcctgtcagccctcatacatttctatatgctggaggctgttggggcttatgctttttcattcagaagaagcagaacacatcagcagagattttcttcatctttctgatgagtaaactggggctcaaagcacctgattacaacctttgattactttcaaatgtgctggtcttagatttggaaaataagaacaaaatcaacatgactgtggtggtaaaataccacaaattttatgggagttcagaattattgtagacatgcccaaaacttatccttgggccctaattatgcaaactcatgaacaagatacatgtgtattcatatgtgtatctaatgtgtcaggctataaggctgcaaacttaaatgtatacattcttttaatgtcaccacatgtgttcagcttttctcttttaaagtatttatatataagttatacattttttaaatattct

SEQ ID NO: 3057 - DNA, 433 bp, Canis familiaris
  misc_feature (1)..(433): n = a or c or g or t
gagcccccactgtnntacagggactgagnaggtnnactctcccctcccacanngcacagatgacaccagccatcttatgcagacctagctacacctgaaaacctttgggaagttgttaaagttgtctgaattcgtttcccctacttcttctcaaatcactcttgttatcccacctgcggggttttttttttttgttttttgttttgttgtttttttttttgccatgtaacatattttattaaattcttatgctttggctgatagtagagatggctggaaagacaagcccaggctcatggagtacacagactcactgtctaaaaccccaaacagtgctgtattccctcctctattgggttctttcactccaggacaccctttgcccttcacttctgtggaggccaccctagttttccaacctttgctgttcatt

SEQ ID NO: 3058 - DNA, 547 bp, Canis familiaris
  misc_feature (1)..(547): n = a or c or g or t
gacggcatacatnnagtcatcgttcttcagttgagtgtgtnngcttcatcagaaatgatttttacaatctcaagaaaaaccatgtcccagaaattgagtnnactgttgcttgtattcggactcatttggggattgatgttactgcactatacttttcaacaaccaagacatcaaagcagtgtcaagttacgtgaacaaatactagacttgagcaaaagatatgttaaagctctagcagaggaaaataagaacacagtggatgctgagaatggtgcttctatggcaggatatgcggatctaaaaagaacaattgctgtccttttagatgacattttacaacgcttggtaaagctggagaacaaagtcgactatattgttgtgaacggctcggcaaccaacactaccaatggcaccagtggaaacctggtgccagtaaccacaaataaaaggataaatgcatcaggcagcattagatagcagttgaagatcacctgtgctgctacatccaccggggattatatcctatggcagaaagcctttcagttgc

SEQ ID NO: 3059 - DNA, 415 bp, Canis familiaris
  misc_feature (1)..(415): n = a or c or g or t
ccgccccccgcgnngtgcctgccgccggtcccagccagccctccgcgggcacgcagctattttagccaccacctgtccgggtgtccannagcccccagcaccgcgggccgggaggtcaggcggagccgcgcgggccctgggccgaggcgggagcgcggggctgaccctgccccccactgccgcaaggagggcccctgatatttatatttaagaaattaagataataatattaataatgctggaaggaaggtggcaccccgagcaggcctgtgctcgggcctgggacgtccctggcctgatggccaactgggtgggcgccgtggggccaggcacccaacagcccactgcccgtggcagccccagacctctgtaattttatatagagtttgagctgaagcttcgtatatttaattta

SEQ ID NO: 3060 - DNA, 517 bp, Canis familiaris
  misc_feature (1)..(517): n = a or c or g or t
ccgtncatgccnagcagccacttttgcctttcccaccccccgccgcngggggcacagccacacctcatcatccagcccgggcgggcagcagacgccccaggacgagcttnnnggaggccgtggcaagcggtggttaccggacaatcaacctgagtcgggagcaggaggcctaaggtctcaggaccaaaggaccaacgcagccacctgccgggggaccgtgaaggagccaggtgcctctggagcgctcctggagcaaggccgaggggaacgcccggcaccccaagcctgtgactttgggccccaggccggacggaggcaccactagccgggtgtggaccttggggccacccactggcgcggcattacctcatccccgctgctcccacctgtcacccggcctgagcctggtggcctgggcccgtccccatgcgtctctggccggtctctgcagcaccacgagacacgtgtaaatacagccccaccccccactgaccacacggccgctggtgggaggaag

SEQ ID NO: 3061 - DNA, 625 bp, Canis familiaris
  misc_feature (1)..(625): n = a or c or g or t
aagttnngtctgcttccatgcagaagactgtgcacccattcccagtgccaagagannactcccagctacatnnaagatagcagagatcatcatgatgccagaaatcaggaatagaagtccaattgcatcttgatattggagttgccaaggaaaacacgatgtaatcaagcactggatggaacaacatgtttattacatagaaagaggcagagaaagatcaggtccagtagtatgtcagtgccctatggccagcaggtcaccctcctggcagccaggacagagcatgtggcctgcaccacttgtcttgtgcagtagattcttgacccctcctctgtagagtctgaaatactgaaagctgggggtgtgcctaagggccattgatgcacacactcagtagaccaaagcctgaaacggggaaagatgttgccatctaatgccatagcctggtggtgttctaggcccagggaccattctatacaaaagaatggtgcaggactgtgcacgtgaacttgcctttcccaacaaggtgacaccatatacagattatactaggtcagtattggaaataggaggacaaatttttctaaattcctgcaatattttatttctgagttttccatgtatc

SEQ ID NO: 3062 - DNA, 472 bp, Canis familiaris
  misc_feature (1)..(472): n = a or c or g or t
tggnngagtactgtgtgaagannaaggcccccgcgcccgacgagggctcnnnnnncnnnnacgacgactactacgaggacggcgaggncgaggccgaggccgacagctgcttcggggatgacgaggacgactccggcaacgaggagtcctgacaccgcgaccccgagaataaacttacagattttacctcagcaggcccggactgtgtggcgccgagactgccgcgcgggagggacgctgcccggcccttggggggtctcctttcgggtgtcgccctcccttcccgcgtgtgtcctgggtcctctgcttcccaggggccgcctgcctcgtcctgtccctcggagcccgccaggcggggtggcggggcctgggggccctgggccctgcccgtctgcagcccctgcggctggagccagagacggcccccagctcgcgcgtggacggattcacttgtggtcacctcttctctctg

SEQ ID NO: 3063 - DNA, 339 bp, Canis familiaris
  misc_feature (1)..(339): n = a or c or g or t
tcaaatgtcagtgtgggtgcatctgtaatattttttacttgctttctcattaatagccaggacttttttaaatctcagagcaagtttccnnaaggtaaacattttctctgctcaggaatccttggtcagctttgatttggtccaccagtaagttgaccagtgtttaatttgggtcattctgttctttgtagatcaaggtgttctgtatatcatgcctttaaggactggactttggctgtttcctaaggaaaaaatgtagataaatggttgttacttagagattataaacctcttattagcaccttatattatgatgtcattnnnctgaagattgcaaga

SEQ ID NO: 3064 - DNA, 545 bp, Canis familiaris
  misc_feature (1)..(545): n = a or c or g or t
acacaagtactcnntgaaagaggccctttgtgacccttctnnagctngnngnctttcagacactaaagctgctggggaagtaaaagccttggatgacttctataaaatgttacaacatgaacctgaccgagctttttatggactcaagcaggtggagaaagccaatgaggctatggcaattgatacattgctcatcagcgatgagcttttcaggcaccaggatgttgctacccggagccggtatgtgaagttggtggacagtgtgaaagagaatgcaggcacggttaggatattctctagtcttcatgtatcgggagaacagctcagtcagttgactggagtagctgccattctccgcttccccgtccctgaactctctgatcaagaggatgattctagttctgaagaagattaatgattggaccttataattgagacaagctgtgtctctgttgttacattttcttagcatcctgacaaaaagctgcaaggcactttgtggttcttacagtgatttctcatgtatttgggcacactaggtatct

SEQ ID NO: 3065 - DNA, 548 bp, Canis familiaris
  misc_feature (1)..(548): n = a or c or g or t
attctgnannattgctgccaaaactaaggaccagacattggtacagactatagctaggggtgtgctnnnagtcatcgtagacnagtctcctttcggaccggaagagacnntcgaggaacagaaagcccaaggggaggagaacgagtnctccgaagatgagatgcctgaaaacgaggtggcatggagaaaaccagtcagtaaaaagaagcctgttcgactacaaggctgttgcggaccggctcctggagatcaccaacaggaaaaacatcccacccttcaacaggaagcgtctctccaaactcatcaaaaagttccaggatctttctgaaggtgagggcatcaggattacagctggtgatgttacatgaacatggcccaactgaggcacttacagcaaatactgacaaacaggattaagagacattgggaacgggatccctgggtggcgcagcggtttggcgcctgcctttggcccagggcacgatcctggagacccgggatcgaatcccacatcgggctcctggtgcatggagcctgcttctccctct

SEQ ID NO: 3066 - DNA, 568 bp, Canis familiaris
  misc_feature (1)..(568): n = a or c or g or t
agnatattgagcagagtatnaaatctgaaacatccggtagctttgangatgctctgctggccatagtaaagtgcatgaggaacaaatctgcatactttgctgaaaggctttataaatctatgaagggcttgggcacagatgatgacaccctcatcagggttatggtgtctcgagcggagatcgatatgatggacatccgggagagcttcaagaggctttnnngaaagtctctgtactccttcatcaagggtgacacatctggagactacagaaaggttctgctcattctctgtggaggagatgattaaaataaaatccaagaaggaaaggaggattcccaacactttgaaattttttttaacttcgtttttctacactgctattagcattatctcagaatgcttatttccaattaaaacgcctactgatgcttcctaggatacatacagactgactcttattattcatcagcaattactcattatgatgctttaaagctgtacttgcatttcaaagcttataaaacctaaaaggagatttaaaattagaaataaaaatnnntccacct

SEQ ID NO: 3067 - DNA, 455 bp, Canis familiaris
  misc_feature (1)..(455): n = a or c or g or t
tgcgaggctcagaggcacgnnnngtcgactnggtgagaatgcacccnnnnagggggcccgaaaggnnggggcgcgagcgcttccttgcgaagcctgcctgcacccctttttgcgccaggcctagagccagccccgcattcgcctgtgctccctgctttggccgaagtcttgctaggcccggcgccactaccggcctggaagcgaagtctggatttttcgaagtccaaatgccatcgggaataatcctaattggaggagccggcacgatctccacgcctctgcccccggatttcccccaaccggccgccccacagttcccgannnnnnagcgtctgttttataccagcgncnnnnaatcccgagtccacccgccgtattacccgggcgtccaggacctggtgattnnnnnnnnngcaggactttcattcaagaggttcgtccaggagttttgattg

SEQ ID NO: 3068 - DNA, 568 bp, Canis familiaris
ctgggaccagcgagtactggtaatactactgccgccgagtcagaggttggagagccagggaggacaagcacagggtgagagcctggcagggccagatggcctgggcagatccccggggcgcccccactcaaacagcatgaacgacagaatcagcctcgtcccttgcttgtcagcattgaagtgggctaacatgtaagaaaccacatctggctcttgagagctctccccattatcacgccattcccgggaaggcacctgcctttcctgctgtgtcgcccctaccagcggtgtcctcctggttccagtctgggaggtaaggaatactggtgcctcctgggcagatgctccctacggaggctgggcgtgtcttcccagctatttgtaggttatctttacatgctctctgatgattgccccttcttgctttttgtctaatggagctttcagtttttaccgtattttgttgactttaaaaatatcttttacatattaagaacaataaacctgggacacatgtattacctattacctttcctcatttatcatttgctttttgattgtattttct

SEQ ID NO: 3069 - DNA, 501 bp, Canis familiaris
  misc_feature (1)..(501): n = a or c or g or t
aatggaggccctatttatatgaaatgaatgaggccaaccagggtggtgcccacagagtagctggtgtcacctttggaagccatcacgggaaatgcctgcatagcattgactagcacagcagctgcagaaggagaggcagcctggagccttggaggaagcccagaacggggtcaaggacctcgtatcaaatcccacaattgacacttccaagctactatgaccttgagtgactctccttaccttgcttagccttcagtgtgagaccaatcacaacacgctctcaagttagcttacaaggctactatggggcatacgtggaaacaggggagcaaagaggtttgggggtggccaggcacctgacacagcaacaataatgccatgaggacaagagatgtgtggagcacagccaagatgctctcgtcccagctgaggctgtcagagatcatgaattgacaagcagctaacnnncagacatgggtcaactgatccccaaagttcagc

SEQ ID NO: 3070 - DNA, 626 bp, Canis familiaris
  misc_feature (1)..(626): n = a or c or g or t
tgnctgtgcccaaaatgcctccaagatccgggttcacccannnnnagagngctgcgtgtggtgacagccaagtgaacacacttgcaggccaccaagtagttgctggtggctctgggtgcgggcagaggccctnnagagggggtgtcccagaaggcttcccctgcagcctttgggggagggggagcccaggtgaccagaccagagccaccacaggagctcggagaccctgacccaacactcccagcaggaagccggggctgtcggccgagagcagagtgcccgggacaggacgtgcgactaagaaggacaggtctgacattggaagctttattgttcaacctcacacagacacagaggacggagggctggacatggaggctgaaggaggcttgtgcacgtgagcttggcagtcctgctcaaaggggcaaaccttcggactgctgtccatctgtccgtccctccagctgcgcccagtggccacactcacctggccccaggcaggcccgggccaccctggctgcagatccacccaagggtctttgacaaacaagggtttacatttctgtaggttgttctggaatttagttttctagatattaaaaccactcagattttgtaagtacctg

SEQ ID NO: 3071 - DNA, 474 bp, Canis familiaris
  misc_feature (1)..(474): n = a or c or g or t
atcagagncatncagccatcagtaacacataagctgaccctaacagagtttgnngcgggcacaggggtcngaacgagaccccaggtatgggcangccttcaatngacagacgccaggcttggccagctctggtgctgtggccaagagactcccagggatggggacgtgctcccaggctctggttacatctaagagaaaagcaggaagccccggcctcagctgacagcacctgggctttgcctcctcggtaaccttggcagattgttcttggcctactcatcccttccgctcagcactccctgccgggagccccagcttcctacctggtgtgctgggccctttggcttctggggagtgttctggacacttgaggaagctcagcgggaatgaaggccccgtgccccatcagaggtgctgggtgtccgcgccccgggcaagaatggcaccctctnnnnnnnccccgctccctagatc

SEQ ID NO: 3072 - DNA, 470 bp, Canis familiaris
  misc_feature (1)..(470): n = a or c or g or t
cgccccatcagcggtcatgnnacngacagccggccagctatggccatctnnnnnctgctggactatattgtgaacgagccgcctcccaagctgcccaatggtgtcttcacccaggacttccaggantttgtaaataaatgcctaataaagaacccagcagagcgagcagatctgaagatgctcatgagccacacgttcatcaagcggtccgaggtggaagaggtggattttgccggctggttgtgtaaaacgctgcggctgaatcagcccagcacgcccacgcgcannnnnntnnnacggggtcctgcgggtgacctgtccgcnntnccacnngcgccccgcccctnnnnnncaggacaggccagcgcctcctctccccaccccagcctctccctctgccttccgcggagctgcccgcataccccgcagtggacanngagccccgctcccgcctgtcccagctggtgtgg

SEQ ID NO: 3073 - DNA, 465 bp, Canis familiaris
  misc_feature (1)..(465): n = a or c or g or t
tcatttnngccatagnctannnctagcaaaannctagcaccacaggaagtgagacctctttaagtagttcataagagaatttaattgaacttgtactnngaagtcattgttcattgaatcaacctgataggtccatggcaatattgcagtttacctttttccngnnnncggggttttaacctgggtttgctagcctgtaaagtggaaagagtagctttgattatttagaaattaattaagattctattaattaatagaattaaggaacctgaccacgagcagtagcatacttatcaatgtctcaagattctggataacttttctccacccgttgttgaggccatattacttagacctcnntaaatccttccttttacanntaaatttcaggcatctactcatttgaattttgtagtttgagcactnnnaagaatgaaccagaaaatacttggtaaagaanagtca

SEQ ID NO: 3074 - DNA, 566 bp, Canis familiaris
  misc_feature (1)..(566): n = a or c or g or t
tcnnnagtgagacgntcaggcccgacacccannncacagaagagagaaattttgccttaacagttgcccggcagcggctttggctcgcagtctggagcggctcattcctcccctttggcttgaagtctcgtcgtggcacggggtggggggcgcaggtccacggccatctgtgaccaagagtctttcagggttcccctcgggggctcccaaagtgacaaggatgcttgggagggaggccaggccacgcagttggaattcaggtacagtggggggctggtcccccattttcggggaggccctctgtgccgacagggacagcaggggcaggggcaagggctggctctgccactgagccgctgggggagcgggtccctgcccttgtggcaccaaagctgtggtgttcaccttggctctgcaccacgccttcaaaaggattttttttttttttttcaaagaaagatgagattggcttggttcttcatgagcacagtttgtgttgttctttcttcttttccttgctcatttcatttgggggtaggaaatctgtgctgtattggggttgtgaa

SEQ ID NO: 3075 - DNA, 643 bp, Canis familiaris
  misc_feature (1)..(643): n = a or c or g or t
tgcnagcgtatngnntcagcaacanctcnntgtgctccagacttgtccccagttgacctccatcctgttcatttctatcacgttttaggttagtgaatgtcttctctatgagacagttgagatcttcacagaagatctccaatgagatgagggcaatgaacaccaaggactgccagcaaacagcagaagctagaagagacaacgaaggatctcccttacagtaggacccatggccctgccaacatcttgacttcggatatctagcctccagaactgttaggcatataattaatgaagctgctaagaacatctatgtactcttcttggacatttcttttggtgtaaatctaggactgtacttcctggatcaatagggcttgaaaagggagatgaatgtctgaaatgaaaatctcaactgattcagagataaagaatataaaatcagtacttctgggaacaagccacattagtcttcctctctgcagacctacttgcattccaagaatatttttcatctctatcaaaagcaagagggatgcagacatgatcactttcatagctcaccatgccaaggaccacaataacctgctgcatatgcttcctttgtgcatcagttatatgttaagagactaaagatttacac

SEQ ID NO: 3076 - DNA, 108 bp, Canis familiaris
  misc_feature (1)..(108): n = a or c or g or t
tnnagtgaggnnntcatccctgctcagttctgagacctgacttgagaggccacactccagtgttaccactccctggctggggcttggaataggttctttctctcaggc

SEQ ID NO: 3077 - DNA, 362 bp, Canis familiaris
  misc_feature (1)..(362): n = a or c or g or t
ggtaaaaaaaaattatgggtcaattttnnntgaagtnngctggatttatgtattcacctctcatcagtgtcaaaannagttgtgcacatcattccctggacaacaggatgaaaacctgtctctcattggacactagggatatcagctgtacacacaagataagtgtaaagttgaaaanngaaatgcacttagtaattcatccaagccagcatattttagcagtttgaaacttgcataaaaatgatcatgaaattatttcctcatacaagaaagctaatattgctgtttttaaatccagtgaaatgtaccgtcataaaaattttgctttacagangctgataattcaaannnnnnccagctgt

SEQ ID NO: 3078 - DNA, 475 bp, Canis familiaris
  misc_feature (1)..(475): n = a or c or g or t
cccccccccccccgcacggccggcaggtccgaggccatgtctctgagagtcacacatgagacgactcaaggggtaactgttcaaaactgttccagttttgaaaatcattgtggaacgtcttagcgattgctgctgtgctgagccatcctgtggtcctgagaggcggctgggggccccgccggagccgggcggggtgtttgcttccctctcatctggttgccctggctggtgcactgaggaatgatgtggcttcagctggtgtaggacgagatgtgggcttcatccctgcgcacggtcctcgtcctggccccacgctctccgggagcttgtgcacctgcctcccaggtggatcttgtggccgcggagaccagcaggcagtgcctggtgggacagatggggtgggggtggggctcccattgctgttttccttggtggattgttatgttttttaannnntctgttctggtaatgtatt

SEQ ID NO: 3079 - DNA, 543 bp, Canis familiaris
  misc_feature (1)..(543): n = a or c or g or t
gtgccnggcgaccatctcagcagctgtcccnntagtccgagcgcgggtcctgagacgcggagtaccccacggtggcttcggaatatttaactttggagaagagggctggctcggagtccaggcttttctacaagactcacaggacaaaagggaggaattgctgatttgggggagggctggtgcggaggagggaacaggcctgggttgtgttttgttttgttttgtttttcctttttaatttatggactaatctcattactccggtattatgctctcgtacctgtgttgttggttttcttagtcgttggtttggttttgttttctaaactggcatgtggggtggtgcagttctaatttaagcactctctgctccaagttgtgctttggggggacaatcattctttgaacaattggtgagggaggcgattcggggctgatgggaagactattgcttacttttgtttttaaggacctaagctgacgtcttgtggacagtgcacgtgccttatgctgccatcttgttttctaggaagaggggacccc

SEQ ID NO: 3080 - DNA, 324 bp, Canis familiaris
  misc_feature (1)..(324): n = a or c or g or t
canngagatccggttatggaacactgcaggacaagagcgacttagagcatggtacagcactattacagaaatgcacaggctgttgtcttcgtgtatgatattaccacgtggctcgttcttatagcctgnngtcttggctagaagaatgcaaacaacattcgccagccagtgacataccacaattctcgttggaaagaaatgtgacttgagaagtgccattcaaggaccttcagacttggcacaaaaatttgctgacacacacagtatgcctttgaaacctctgcgaaaaaccccaatgatctacagaagttgggatgcctgggt

SEQ ID NO: 3081 - DNA, 326 bp, Canis familiaris
  misc_feature (1)..(326): n = a or c or g or t
gagaatgcagactactgaaatgccattttagttgttttctgaccataaccacaatgtactaatgaatctgtgttaaaaagactattttagatgtatttcctgcttttgtaagcgttaaagatttataagaagattattcaaactattttttataaaatgaaagctatgatttttaatttaacggttcccctgccccccttttttggaagatactctgattccttgttaacttttaccctaaagcttacatatgttttttctcatatgtgcttcatgacattacaggcagctcatgaagggnnnnaatttaatttagtgttgtatgt

SEQ ID NO: 3082 - DNA, 400 bp, Canis familiaris
gcagagctgcctgtccagcagggctcacgtcatccaagccctccagcccccaccgtgaaggggctggccaaggagttcaagctgcacctgtcccccagcctcacagccaccagcactgcccacagggcccctagacacacacacacacacatacacacacacacacctgcacagatgggccaacagacacacttggcctgagttcctcccatttccctagcctgccccccgcccctcactccatacctgtaccccctccttgccccgcaggacgggcctccagggggtcccctcccctcaccccctgcacccccaggctgggggagctggctctgccctgccctccttgccccggggttggggtctcctcccctcagagcccgctggtgcgcctgttact

SEQ ID NO: 3083 - DNA, 585 bp, Canis familiaris
  misc_feature (1)..(585): n = a or c or g or t
tccctctgtcttcaggcttttgtcagtttnactaagatttcattatcttcaatcagaaattatgtcacaagtaattgaccctnnctttgcagacggtgaaataaattatgtaactagcttctccagtgatgacaccnntnagacctgggttccttctcaggagggagagcccaaaattggtcgtgcagaacctgtacttcagtaagtgtgtctttctagaattcaaagtttcgctctttctagaggtgccacatagttgtaaatacttggatggcaatagggtagaattattaatcaaaaaacttatcttttatatctgaagaatatccctccttcagggtttaatagactaagtcagatgggtctgatattaatcaaaattgtctcgtctgaggaaggctgataagcattgacttgctgtcccacagggacatccgggcnnctacaaagcattgttttagttttcgtttcaattaatgttgcattttggctggtgaatgcacatttttttctacctgtacatatttcttgcatttatatgtttnnnnnnttgattgaagctatgttaaatagaagggattttga

SEQ ID NO: 3084 - DNA, 510 bp, Canis familiaris
  misc_feature (1)..(510): n = a or c or g or t
caaataatgctactgtcactttaaagattttnctgaggtcgcnagctgtgcacacttgctctcctgccttggtgagaggcatgttcttggggcagggctgactatagcaagacggaatcaatccctttcccctttaggcacccccttacctggcagctcttaaaactaaggaaaatatggaatatacatataaatatatatacatatatctatttatgcacatactggggccaatttgatctgctagtattagacaataaaccatacaaggaaatgtatgatctcagtgtcttgatttagtataaaagtgaccttagaagaaacattaaagttagctaaacagagggcatctctgttgggggaccaaacatctgtagccaccccttagcatctttcttaccaacaagccccctccccaggaaagggcatcctgactgctaggtgagcgtctgcttccctgctccccagcattctttttagatctaggtactgaagaatcccagtgagctc

SEQ ID NO: 3085 - DNA, 480 bp, Canis familiaris
  misc_feature (1)..(480): n = a or c or g or t
gttacgctccctgtttcatgtannngtggctccccaaaatatgccagagcttggtggggcaggggggggccctgtttatccagctgtagtagctagtnnnnncatttgtatacctggagcccactgatccaattttaggagtgttaatttttcagtattaattagaagaaggacctagttcactatggttggatgggatgggcagtggagaataagattaatactgctttgatattctccaagagaaagttctaacacttgcagtacagttttttcttcccttttctggaaaataaggaggaaatgcagcttctggtgtctcactttgagacaaagtctgctttgccagagagcaaattgaggtaaattcacacccctggaattgctttgagttcagagccttgagtgggagggattgagtgtatagagatccttattagctctgtagcttattctgtatcggttaacatttgtacaata

SEQ ID NO: 3086 - DNA, 626 bp, Canis familiaris
  misc_feature (1)..(626): n = a or c or g or t
cgagccacagctacccagcagatcnntcntcctacagnnctctctnnagcccagctacctcctcacccagcgnnaatgcctactccagtcttgccaacaggactccagggttcgctgaaagtggacaaagtagcgggcagttccaggggcgnccgtcggaagtctggtcgcagtggcaaagccagcatcacggtcagcagagcggtgagcagcacccccaccagcagcccggtcagaccgaagtgttccaggacatgctgcccatgcccggagacccgacccaggggaccggcaactataacatcgaggacttcgcggacctcggcatgttcccgccgttctctgagtagcggcaggcagagtgcagccggcgctgggcagggctgtgacgcgtgctgtgacggcgccacccgccctgctggcagaaggcaccgcacccccgcgctgcccccggcgcagcatcgtgcagcccacaaccagggctgctcggccaccaacgaggagccctggtagacattgggggggccgttgtatttattgtacttttttctgtgtacgcagggaggtgagcccgtggggcccatgaggtctggttgtgaataatctcctagtagacgacgttcacc

SEQ ID NO: 3087 - DNA, 469 bp, Canis familiaris
  misc_feature (1)..(469): n = a or c or g or t
aagatgacatcccagagagtctccaaagggtnnnnngcagaagggcagctgaatggnnnccagagcagnnttaactccgcagccttcatgcccatcaccagttccacagatcctgctcacactaaaagatgaaccacagtagcacagaggaagaacctatttgccctcctgctcctgccggggtgtgaccgaggctgaagcatctaccagggctgcaaggggtccacggtattttttttttctttttctttttcttttcctttttttttttttttgctgccttggtccccagaaccttcaagcaacagtggctgtagattgttgccagtcagccaatccagacttttgctgagacgccaggaaaacatatcagctgggttttgattgaacttggcagtggagacattgaaccgatgcattatataccctatcagagcacacatgtatcttttatcccttttatcccctc

SEQ ID NO: 3088 - DNA, 589 bp, Canis familiaris
  misc_feature (1)..(589): n = a or c or g or t
aagagaacaaagaattgcgtacatccctggaagaacatcagtctgccttggaactgataatgagcaagtatcgagaacaaatgtttagacttctaatggctagcaaaaaagacgatccgggtataataacgaagttaaaagagcagcactccaagattgacatggtacatcgtaacagctccgaaggattcttccttgatgcatctcgacacatctttgaagcatctcaacatggactggagaggaggcacttggaagcaaatcagaatgaattacaagcacatgttgatcaaataacagaaatggcagcagtaatgaggaaagccattgaaattgatgagcaacagggttgcaaggaacaggaacgaatatttcaactggaacaagaaaacaaaggcttgagagagattcttcaaataactcgagaatcatttctgaatcttaggannnnnnntgtgtctgaaagttcatctttgtcagcattagtgaccaatagtgacctgagtctgaggaagagctgaagagcctgtaagtccatgagtttcttacaaggctccaannanncactgggactggcctactaaagtca

SEQ ID NO: 3089 - DNA, 614 bp, Canis familiaris
  misc_feature (1)..(614): n = a or c or g or t
catgttatgatnnaaatatatacagtgctcagatggataagagcagatatgaccggtanctgagcaaaaggaagagagagcccttgtgcaagtttggattttaaaatttgggtgtttcgaagagatcatagaactgaatattgcagaagtgcctcttcattgaaagaacaagagcagtaatacaagcttcaaaaagtgcttagcattcttgctctccagctctccagggcaatgaaacactcttctcatagttccaaaagctcatcaaccccaccattttaatttgattccaagctctcctcctgaccttcccctccagcaaaagcagtggaggttctcaagatcagtgtgaggttccagatcgtgtctgtctaatggtggggagaactctaggtctggcagtctctacactgtggccacttagcacagtgcagagaagaggttgaggatttgggggatatgcaggtcaccaatccagttctcagaaccaagcttgcagccactctaaggctgttatctgaaccatatgaaatggagcatcttctggattatcctagaatcatttggttataaaggatgtatttctgagaaatttaatactaatgtttcagnnn

SEQ ID NO: 3090 - DNA, 561 bp, Canis familiaris
  misc_feature (1)..(561): n = a or c or g or t
atgttaaaacacangnnataggctaccaataaatcaagaatccagttttcttaaggttcttatattanngtatttaatgaaagtaaatgaagacattcttaagaatttgtcatactgcccttgaggtgaaatcagctgaatgttttggaatcaagtggcaaatagaagtttggtccttcaacccatttatgcatatagtcccctatttctcattaagcacagtctgaaccaaggacatgcttctaacaatcctttcttgtcatggggacttattagacaacaaaagacatgcatttcttggacctcttacaaacatgggaactcttagaaaccttcttttaagactacaatagttgatatggttttctggggttttttccccttaagatgtttgttcttcagttatcagtctaagatagttacttttttgttttaaggaaaactattagtccatgctttgggagatagtatcaccactgaggaactgtcatgtcaaatctcttcctgagtgggaactgtacctgctgcctgtgatggggcagatggcatcgtgtgggctgt

SEQ ID NO: 3091 - DNA, 470 bp, Canis familiaris
  misc_feature (1)..(470): n = a or c or g or t
ggaaaagagaactccgtgtcatggctgctgtggtcctgcatcagcactaggcaatgaatggattgttnnaaaaggctaataagaatgtagaaccnnnagttaagnngacatctggagaagaagcatctctagtaatgtaaaattcagcaactattttcttcagcctatactactgacgagttttcttctggatgcaaagtatttattgttcttaaattttattttctttctcagacctcctaaatcttctaatttaggatgttaggctattcagattttgacaactcactacttaaattcttagtcctactggggaattttcttctttaagacattttactagggatttaaatctacagactctcagtttgtcaagtcaactcttgctcacggaaagatcttgtgaaaggccttctcattgctgcctgaaagtcataacctttctaaatgtgtaacacannnaattcata

SEQ ID NO: 3092 - DNA, 620 bp, Canis familiaris
  misc_feature (1)..(620): n = a or c or g or t
ccatctcgccaggtgtaggctcatccgccgctcngccaccnnaatcacacgtcnncagcaggagcgggcgctctgtccagccggaagannaagtgcacccacgcgcgtggcattgtgggatctgtagtcctgtgcgttcgggtgtagcaggggctagtgcctgtgggcgcctgacgtagagccggggcaagcgatggagaagggtagggtagatcccctgagagggttcattcgcccctggcgggactgtttgccacgaggggaactggccgaggggtcggggcacggtgcactacacttcccaggaggctatgcgcggcggcgggtcacgtgacgggagcgcgggctttggaaggcggcggagcgggaccgggtctgcggcggagtggaagccggggagggcctgagcactgtcctgggcagcgccggactgagcactagctgcggaggcctcgcgccgcaaaggccagttccactgcagctaccatccacagaacaagaaaggaatcactctcaccagctgcctccccaccagttctgtgagctccggacgtacaggaatgaagcaccaccactctggtctctcccaagagtctctcagtcccctcaccatgtgtcca

SEQ ID NO: 3093 - DNA, 357 bp, Canis familiaris
acaacaaccaccaccaccaccaccaccaccaccatcatccttaccatcatcacagacacggccgcgacgacagagccagcagttcacgattctcgagcaggtgaagaaggcgccatcagagcggtggatcatgccgtgatcggcggtgtcgtggccgtggtcgtgttcgccatgctgtgcttgctcatcattctggggcgctattttgccagacataaaggtacatacttcactcatgaagccaaaggagccgatgacgcagcagacgcagacacagctataatcaatgcagaaggaggacagaacaactccgaagaaaagaaagagtacttcatctagatcagcctttttgtttca

SEQ ID NO: 3094 - DNA, 354 bp, Canis familiaris
  misc_feature (1)..(354): n = a or c or g or t
ccatgacataaccccccaaatgatttnnnnactggctgttattcaaaagaaaaaattaaactatgatttgaatctagtttttaaaattcttaatgcaagagaaattttatgcttaagccattatggggttatatgcaaagtttaaatcagatgacagaaatcttgattttagactccatgttgtgctgttttgagtacactttatttcagaaagtgatatttagtatttttagtattttctatacactttgaaatcatgagcatttcactttttctaagtcaattatttcataaggattttattaatagatattggtaaatagaactttggaaatcttaattccgtattcttac

SEQ ID NO: 3095 - DNA, 567 bp, Canis familiaris
  misc_feature (1)..(567): n = a or c or g or t
cactgaacccgnacaccagcagtttatccaacagatgctgcaggctcttgctggagtaaatcctcagctacagaatccagaagtcagatttcagcaacaactggaacagctcagtgcaatgggatttttgaaccgtgaagcaaacttgcaagcgctaatagcaacaggaggtgatatcaatgctgctattgaaaggttactgggctcccagccatcatagcagcatttctgtatcttgaaaaaatgtaatttatttttgataacggctcttaaatctttaaaatacccgctttatttcattttgactcttgggattctgtgctgttataaacaaacccaatatgatgcattttaaggtggagtgcagtaagatgtgtgggtttctctgtgtttttttttgtttttgtttttgtttttttaacagtgggaatcaatgctttttcatttaaggctactgcatgcatcaaacacttctgcatttatggtaattttaaaaaaaaaaaaaacctcaccttttatagttgggtgaacagatttttgttttncatctgtccaatttatttgctt

SEQ ID NO: 3096 - DNA, 511 bp, Canis familiaris
  misc_feature (1)..(511): n = a or c or g or t
gaagtggactgcctgggatcactaggccttatgggggccagggcctcagcctcctgttggccaggtgatgtgtggggacggatgctaaccagtgttgggccaggtgtggctgctnnngatgaactccaaccccgctctgcacaccnnctgtgaagtcctgaaggaggtgattccaggcgtgatcgtggagaccctggacctggcattggagaccttccagaagagcctgcgcaaccagaagatgctgcctctgctctcanagcgccgcttcgtgctcctgcacaacgagcgttccggctctcctccctgccacagtggagccgttcacctggccatgcagagctcacagagtggcctgaggcctctgtgacacgcttccttttcctgctgcctccataatcccaggccctaagtgggtgcaatgtgaagagaagtgcaccttagcagaacagcttgccttgtcctaactgnnnnnnntcccggggctccccaaaaggcctatttgtgctct

SEQ ID NO: 3097 - DNA, 167 bp, Canis familiaris
  misc_feature (1)..(167): n = a or c or g or t
agtttttcaggagcgcaagatagatttggaattaggagtaacctctagttcttaagaaccaacactcttaaaagatttaggagaaagtttacaacataatctagtttacgaagaaaacttgtgctagaatacnnnnnnnaaagtatttttgannnccattaaaactg

SEQ ID NO: 3098 - DNA, 432 bp, Canis familiaris
  misc_feature (1)..(432): n = a or c or g or t
gcacttctagcttccagaactgtgagaaaataaacttcnatggttnnngccacgctctcccccaaaaagtatgtatgttgctaagattcattcatatgataactatagttcattcatttagactgctttgtaatatgctattttgtgcctatgtcaatttattcatccactctaacattgatggacactgggttgtttccacgtttttgctattttactattccaaaatcctaatgttgagcttgaaatgtattaaaattttggattaatatcatatccttcaaatctgttcattgtataagtattgaacactgaagtatgattgttttgcagtctcaccaacagtacggtgagaggctcactttttatttttcttccaagtttatttttcaagtttttatttaaattctggttagttagggatccctgggt

SEQ ID NO: 3099 - DNA, 557 bp, Canis familiaris
  misc_feature (1)..(557): n = a or c or g or t
ggcagctgccatcaacttcatagcattaacagttaagnngctaaacatgagtcaaatacatgaggatgacgtggagctattacagaatgctattggaaatctgaggaatgatcctgtggagtctatccagtctttggtcaatactactctgaaaaaaattgatgaatatattaacttcaggtctatctctacttccaggatgagccagataagcaataacatcctcaaagtcactggcataaaaaacccagaaagaaagaaacgactgtttaggagtgtcaaacgagaaagagatgatgataatcagaaaatctggaggtggcttcaaagccctctaannnnnnnnngcaaccggtacagtggtagggtgaaagatattccacacaaattaggcaattcagataaacagtcaacagggtcacaggtcccgacatctgaaagtccacctacagaagctgggcctgctgccaaataagttgcttctaattactctggaactaaagccttttccatttgtttttcnnnnnnntcagtactttgctnnnnnnntagctctc

SEQ ID NO: 3100 - DNA, 554 bp, Canis familiaris
  misc_feature (1)..(554): n = a or c or g or t
aggcgcnnagctgagttggattacagaaaggnntnnngaaatgaatnnnnnnnggctggcnnacaccaggatccagacagaaacagaccaaatgaggagttcgnngcagcacatcccagataccagctgctctgcctcaaatacggtgctcctgaagatggggaactcaaaacacaacagccgtttgtgctcaaaaaccagcttctaacactgaagataaaatatcctaatcaagttgatcagaaagtcctagagaaacaactgccagcctccatgacaattcaaaaggtgaagggattgctggcacgtcttctcagagttcctgtgtcagaactcctgctgtcctacgaaagtcccaaaatgcccggcagagagatcggactagaaaatgaccagcagtcattacagttttattctgtggaaagtggagactgtctattggtgcgatggtaactgggagtcactggacgtaaaagacttattggaacaattctggcagaaaaagaggtnttanagcttgccnnaagtacagaagaggtgatatttttcatngg

SEQ ID NO: 3101 - DNA, 695 bp, Canis familiaris
  misc_feature (1)..(695): n = a or c or g or t
ctgatgtatnnngnttcttgcaannagctgacaatgggnnaaagactagtcctagcatcatctaattcttcttatggggcttggattcaaatgacaaggaaggccatcccacttctgtgactagtttacattttctcttttcctttttaacccaaacaacgcacttgacgaggcagatgactgtaactgcctaattcattcagtagttctatagaaaaccattcagaatacaaaagtagttccagactaaattgtagtgaatcagttgcctcaccacacaaaaatcaaacaaattggagatggaagcgttcatttttttctaatgagttgtattaaatgtgtactaatgcttgatttaactgtagctgtaacctttcgttcagcatggaatcaccactgtttcacaggacactggtctatagcctaggcctttttttttttttttaattttctgttttctgcctttatagttgacagtggcaattttatttgtagatggtatatcatttatggtatgtgctatttacataagcctctcttctaaacacaactgaaattcatttttctatccgaaggctgcatcatacagtgtttattttaaaattatttcctgtcaagtcaagagctgaatgttcaaaccaaacatacagaaatctacaagttaacagtaaaagaaccagagccatttcaagcag

SEQ ID NO: 3102 - DNA, 603 bp, Canis familiaris
  misc_feature (1)..(594): n = a or c or g or t
ggcacctgtgtccgtnnaacagtcagtctgtatctatgaggctagagaatattcacttagactcatggggacccagcagactcttgcctaggtgagatcattgctgtgccacatgtcttgtcccttctcatgcagagaactcagaaatgggagctatgtaatccgtctgttccccatctccaagagttgcagtcccccctctggtcctctacctcctgtcaggggaagaagggagtctggcatctcaggcagattgttgaatactatcccgtctccatcccacccagccttgatagtaggttagcccatcccccaagtaactgtctatattagacacccccagccagtttctggctgcctgtctttgctgccatgttcttttttacaagaaggaaagaaacaattcttgctatttttttttcataatttactatttatgatgtatttaagtgttttattcaggacagagttctgtagggggtgggaggtaatatttgagggaggctgggtcttagggaagagaatgggaaatcaacatttttatgaagtgtcactatttgcctctactttgtattcttcagaaatggcaaatgtaatataaaa

SEQ ID NO: 3103 - DNA, 240 bp, Canis familiaris
  misc_feature (1)..(240): n = a or c or g or t
cttcaggnagttgaagatttcagctaggcggagagcttgggggacctgggctttgtcttctgtctcctctaacttctttccatattcttatccaaatccactgatgaggcttaaaacctcagtaaatagtaccttattgtttaatctctgacctgtgacgagccttggaatcagccttttaggagctgggcttcagagctcagcaaggaagcagtttctgggcaccctagcagcctgtta

SEQ ID NO: 3104 - DNA, 354 bp, Canis familiaris
  misc_feature (1)..(354): n = a or c or g or t
cagnanntggcttgcagccccaggtgtgcnnatgccagctccatcccgagnnnnnaggctgtttggacggctctatcaggaannaaagagctttgtaaccgtgtcctggggaactcggnnagctcatggaccggacacgnngggaacacccgctgctgcctctgtccccgtccccgnnaagccaggaagggtggcgccttcccggggcctcgggcctgtgggcgcagccgggagcaccctggggaggagccaggagccagaggcctctccgctggacctgccgccagggaggtgcagtcggtgaacagactctcacctcattctttaaaatcagtccctaggggatccctgggt

SEQ ID NO: 3105 - DNA, 615 bp, Canis familiaris
  misc_feature (1)..(615): n = a or c or g or t
tccagagtgancacatgaaagacaggtggcgtngactccacactatagggtacaagagtgatgttagggggatacttgaataagagaatgctgtgcatttttgtctattccctttgatcttacatatttatcgggaccagactagtgagctatccaattttctattctaagatagggcagagaattggaggggaggttggaagtcaacatcaggatggatataaccccaagaccaaagagagagactccaggggtccactgtgagaggtggcacttcttgcttgatcctgcttggattttgctccccaatactgcatgcctttcctctcactgcctacagtactggattgaatcatacccattggagacagatatttctccttaattgtttcttagtaagaaggtgataatggaatctttagccctggcctgagccggtgaggcctctaagtctggctctgatccgtaataaaggaaaaagtgggttgaaaggcagctttgcctgagacctgggcctggatcattcagcccatgaggaagaaaggaactccctgtgattgtttctgacctttgtcccacatactctatcctcgtggaaatgaccttgttccatat

SEQ ID NO: 3106 - DNA, 560 bp, Canis familiaris
  misc_feature (1)..(560): n = a or c or g or t
ccagagnntctttgacatgagcataaaacttcgttctaataatatggccctctttgggaaaattactccaaatgagaaaagatgtggaaacagtgatgaagttcaaattctgggcagcctctgaatgaaatgctattttctttagaaacagaatagctgccttagacattatgaggcatataactagtatttcatatgccctataaatgtcttcagtgttcttcagggtaattaggatcttaagagatttggttcagatccagacacatacacattctgtattttagctcagtggtttttaaaaaaggaagatgccacacagcaaaaagtgtttactttgttagacaaaccaaatcggttctcacaaaatgaccggtgcttataaaaagttattactcagtaactccaaaaccacctgaatgcataggaccaagagggaaatcagcctgtgtttagtatttacattggacaccggtttcataatcactgtcttatgtgaaaactggtggagaaaattctataacctctttgctgtttttgatacctgctttttgttttgt

SEQ ID NO: 3107 - DNA, 385 bp, Canis familiaris
  misc_feature (1)..(385): n = a or c or g or t
agtgccatctccatcaccagcnctcttacctccttcccacacagcntaccgccctcnntctttcctccctggctcctgaagaatccacnnnnnntcctgnngtccctcntagaccccgccctctgcgaacaccgccagtgcctattacggggtccacaccgaccttcgctgagcagtcagagtcttccctggctccaccaagcccctttccttggccgaccagcgtgcgcgctggtccctgactctcctttgccgatccctacccccctgcccgccctagactgtcccctccccatccccgtcccattcacgatcattctccatgcccagcacctccaataggctggcggtctgtgacccgacagtgcnnnnaggcacgaaacga

SEQ ID NO: 3108 - DNA, 688 bp, Canis familiaris
  misc_feature (1)..(688): n = a or c or g or t
ctccccatcaagnngcgcaagactcgnnagacggtcagcattgaggtgnannaggtggtgangcccctgctggtgtccaccctcggcgagaagagtngaaagggactgaagacctgcaagagccccggacggaaaagcaaggagagcagcccgaaggggcgcagcagcagcgcctcctcaccccccaagaaggagcaccaccaccatcaccaccactcagagcccccgaaggcacccgcgccgctgcttccgcccccgccccctcccccacctgagccccagagctccgaggaccccgccagcccccctgagccccaggacttgagcagcggcgtctgcaaagaggagaagatggcgagaggaggctcgctggagagcgacggctgccccaaggagccagctaagactcagcccacggtcgcgaccgccgccacggccgcagacaagtacaaacaccgaggggagggagagcgcaaagacattgtttcatcctccatgccaaggccaaacagagaggagcctgtggacagccggacgcccgtgaccgagagagttagctgactttacacagagcggattgcaaagcaaaccaacaagaataaaggcagctgttgtctcttctccttatgggtagggctctgacaaagcttcccgattaactgaaataaaaaatattttttttctnnnn

SEQ ID NO: 3109 - DNA, 483 bp, Canis familiaris
  misc_feature (1)..(483): n = a or c or g or t
tgnctgaatcataacaaggatttgggaggtcctcaggcacaaccctgcaccccatttcacagatggggaaactgaggcctagaaagggtcaacaacttgaccaaggtcacagagcatatcagagattcattgagagttggacaccagctcttctacctttacctcctccttgttttcctccctctggagggtcagacatcacatggcccctgaccctgggagcaagaggagaggataaaggataatcacattttcgatcttcctcttacacttggacactatctcatccattaaggagcatgaacccacttcacagaggaataaactaaggttcagtgaggtagcctgaggtcacagcaagttggatctgggcagggacagacctgggagtcaaatgatgctgaagctctactgccagcatgtcactggtagacagggtcagataggttgggcaaacctatgtcctggggacacgcttgactt

SEQ ID NO: 3110 - DNA, 545 bp, Canis familiaris
  misc_feature (1)..(545): n = a or c or g or t
tggcgctggcgtggctnnagcacagctcggcntcctactttgttgagtgnnagctggtnnncgccaaagccaactcgtggctggagcagcaggaggtgcccgagggccgcacgcggggtacgctcaaggcggctgcccggcagctgttcgtgctcctgcggcactgggacgagaacctggagttcaatatgctctgctataacccgaattatgtgtagtggcagggagggaggagagggaggggacattgcagcctggcggggggagctttggaagcagtagccaatatactggttgctagaaagagccctggactggcagtcaggaggcctgagttcaatcccaactttgctaccacctagctgtgcaattttaggccagcccttacccccccgtctggccctcagtctccccacctgtaaaattagtgcgtgaggtgaaggagttggactagatctctagaagctccaaaggttcctctcagcaggacgtccaggcggccgagngnnnnggagagagaacatnnnnnntggacccaagttctc

SEQ ID NO: 3111 - DNA, 477 bp, Canis familiaris
  misc_feature (1)..(477): n = a or c or g or t
ccttnaccnnacttgcatagcagttcacttcatcctcnnattagaaatagaaaaatgaaaacatattaatggaaatttaatcacgctttctaactaattcactaatggagttttgactctacctgtgagtgtatttgcaatggaagtaaccagtaacaaaataatgttgtcacctgattatgactaccaataacacgatgaggaacaaatttatggggagtaagagcaaaccatttaaactcaggtatgagtatttgatagactattttgtagtctttaaaaagacccaataatcatttggaaatattgaaaaatacttcatgatataattctaagaaagagaattcaaaatgttagcattgttatgtctgtatacaatatgaatttatatggacaaagatgggtcatgaagatagaaagnnnnnnnnnattcatatgtgtgtgtggacaggtaagattaggagtcattttaatgca

SEQ ID NO: 3112 - DNA, 514 bp, Canis familiaris
  misc_feature (1)..(514): n = a or c or g or t
taaatactcagaaattttttccagggtcatgttctcttccctnnnnannaaagaagaaannnagagtnngaaggagagaagagtcacannaagaggaacttgatattgctacacctctccattaacctcacagaactttcccagcaacttctgctttgaacctttctgtgcacaaatccagtaatgtctggggacatgtcaggaggagaagcatacagagctagtgcatctctgaaaatccaagggcctgtttaactcacagctgcacaggtgacttgatttggaatcagtggtaagctgtcatcatctgcgagaatgtttattgagctctaatggtacagcaccacagcagtcaccgcttgagaaggtggttctgcatcaagaaacagttccagtctaaaggattctaaggcatttccttgtgaggattgttttctcttcctcatggaatatggacagaaggaaagaacatgtacatttagcaggcaggagaagaaggggttgggggagaaag

SEQ ID NO: 3113 - DNA, 575 bp, Canis familiaris
  misc_feature (1)..(575): n = a or c or g or t
cannaatgctgcggggtgcccagctgggggggctgtgcctcttcttgccaggaccgcccagggcccagccctctggtgtggactcttctgctgccctcacctccacgcaccccagaccagactgcccaggctaagcctgagagaaaggaaaggtgagggaaggagacctattcggatgatccctatcttcagctctgtttttagacgctgcttcctcttcacacctgtgccttcttttcttcatcagagtggacctggcctcctggaggcggggccttgggaagggctgaattaccaccttgggacccccccctttccttgctcagcgggagacccaggtggggagactcaggtgggacaggctcttggcagcatctgctcttccctgaggtcaggggtcaggaggaggaatggggtgggtgccgaaatgccagggctcagagtagcagaggttgtgtttcctctggctcccagggctgccttgggaaagctgtgtgcctggctcatcgtgaagcacctggaaccccataagcctgttctttataacttataannnnnngggaaggggtttgaat

SEQ ID NO: 3114 - DNA, 396 bp, Canis familiaris
  misc_feature (1)..(396): n = a or c or g or t
cagcctgaacggaggcacctaaagggaggggagtgccatgcccacaaaggtaccagtgacacccaggaactgccacctcctgaggggcccctcaaggagcccatggacctaaagccagaaccctgtagccaaggggttgaaggtcctccccaagagaaggggcctggcaactggcagggtcccccaccccgcaggactcgggactgtgctcgctgggagcgctccaaggctcggacaccgggttcttcctacccccgcctgcctcggggtcggggagcctttcgtcctggtactcggagggagcccctgagcatggagtctgaggacggttcctagcagtactgtggggggcagggatttgggggggcagggaggggcaataaagagatnnnnnnn

SEQ ID NO: 3115 - DNA, 355 bp, Canis familiaris
  misc_feature (1)..(355): n = a or c or g or t
aggagaaaactcangtctatctatacacacatacacacgcacacacacgctcacagtggtcnnngttcgcgttgtgacatgtcacagccactgttatgtcaaggactcgctggnnngagggcctcgggctctgggggctcgcccagcagagaggcccggagaggtgcctncagacgctcctctccgcggtgtccctgtggagtgacagcaccgggtcttcttcctccacctggagcacaggacgagtagnnnnagcgcggtgactcctnnnnnttcatctgctcgtaccagcgcccaggcgcaccacccccatgcctccccgacttcccttcggagacagacacctgggcgatgt

SEQ ID NO: 3116 - DNA, 543 bp, Canis familiaris
  misc_feature (1)..(543): n = a or c or g or t
aatcgcattttaaaagttttttaaatgacaatnnaacatgccagaattggcccatctgcacttcctggtgcactcaggtggccttggaacttactcttgtcctccctgcacacccccttgtctgggacaggaggggctctggcttcgctgccccccacctgaccggccttcctgctgtccttggggccttgggccaggcactgacctgtgcaggcacccatctccctttaattgaactctcttcctccccattcctctgaagaaactagaggcctccaacaaaagtgagtatgtagtccattttaggtctgtgtgcttaccacctactggaggactgctagtgcgtcaaggatgcccccatctcggattctgaaggatggaagtgggcctggtggggacagtggagttaccagcgacaaggaccttcctcgttgctgtctggccacttgccgtcccctgggctgccccggaggctgggtggtgccctcgggactggggaggcggcctgcgacctacgacctacgacccttctctggaggcttc

SEQ ID NO: 3117 - DNA, 648 bp, Canis familiaris
  misc_feature (1)..(648): n = a or c or g or t
aangatgactagtgattcctattggggacgactgctagagtccagggtcagatactacatacagggccgagctgacactgggaaggctgctgtgggatggaggtgtagagaaggcacagctccaagtcagcagtcctgcgtctagcccagttcagccctctgtctcttgaggtggagtggacttctactactctttcttagctcctaatctatcttctgcttcctttcttccagggaactagtgccaaatggccttttcctgccagttttggtaccttttctggcttctctattcctgctcacttctctatttttaaagtgccaaataaatcccttcccctttgtcagaaagcacagtgatggccctgagccctacctgagacctcatgggaggggcccggcttgctctttgttaggggcagcaatgtttgctgagttgaggctggcgggggtggtggcagagctcctgcgccctaggaggacgatagggacatggtgccccgtgcccaggtgataaatactgagctgccaaaactttttatatcagaggagcccaaggggaagggggggaaggctcacccccgctatttttggggagggagggctgtggatagagccatnnnctccagaatctattttactaactga

SEQ ID NO: 3118 - DNA, 480 bp, Canis familiaris
  misc_feature (1)..(480): n = a or c or g or t
acgcctggcaaggctnnaggcctgttgagccgaaggctctgtcattcctgtccctccccaaacatctgagcaaatccacccagctttttggagtcacaggcaaggaaccaagcttggttagaaggtggacttggacacaatttctgtcctcctaggatagtttttaggtcttttaatccnnnagcctctggaaaagtctgttcccaaaggtatgctcagcaggatgctaaggaatgatggttgactccgtacaaccaccttcctgtcctctcttaattggatctggctttccctggaggctgccatggtgggaaggtggcaggttggtggagtctgtctcaatgctggcatcagggcccctctgcctgccttaatctgccctctgcgaagacctcatgctcttgcaggcacaggaaaccatagggaccctgaaaacctctccccttgccatgctccctgcaacaccccattccctcgctg

SEQ ID NO: 3119 - DNA, 146 bp, Canis familiaris
  misc_feature (1)..(146): n = a or c or g or t
gtnnnatagtggatagtnnnagtttgcttcatagaaggaagaaataggagtttcacattatagttttaggaaactcttgattccttatatatgtgtaagaagattnnnnnntgttcatttgcagtttttctctccgtgcaggagag

SEQ ID NO: 3120 - DNA, 615 bp, Canis familiaris
  misc_feature (1)..(615): n = a or c or g or t
atctatatccacttctactaaaatggntaannnnagaaaaatcactacaaagagaatngtnnagaatggtgaagaaagagtagaagttgaagagaacggncagttaaagtccttaacgataaatggtgtggcnnacgagctcgcgttcctggaggagtgccagcgcagaggccagagtgcgctgccctcccagcccgccggcagcagcggccagtcgccgagggcacagaggccggcctccctgcccaaacccgagcctcatgacatcgctgaagaggatgagccaggccgacagcgagccacccacagcctctgggacccctcactgctctctgcagggttcaaagaaggtggcaagaggaagaagcagaagcagagagaggagtccaagaagaagaaggcgaccaaaggcaaccactagacggactcgcggcctcgctggcgcccaggctggctccgtgcggcagtgcgcacgcgttaggtagcggcacctgcttggccactgtcccaagaccacaccttctctgcacggggacgctggtgatgatcagtcagcgtagggacggcaggagatgggagcgatggctgtgggtnnnngtggcacgggcgtggagc

SEQ ID NO: 3121 - DNA, 546 bp, Canis familiaris
  misc_feature (1)..(546): n = a or c or g or t
cagaagagcaactgagacnncagctcacagagnnnnnnnanntnnanntgaannagaatgtccctccttctctgttgcttctgtcacgaannntctacctgatagatgtgaagccaaagccaattgagataccactaagtggggagtctcccataacagatactcctgtggaatcacctacttctcctgaatctaaagagacgctggtggatttagcacctccactgaagggaactcaggatgaaaaatttatacaactaccaccagttccatcatcatccataacaccaacacctatttcgttacctaaaggacccatcacttccgctaaagaagctacactccaggccaaatcacaaaagatcatgcagaacagcaaggctagttcaaaaggagcataaggactactggaggatgaagctcactgtcctcagcttcctgccctcggcggtggcctccatacaggactgtccagaccatctgtctggttgaagcagaggatcagccatgttgtccttgaggcagtcctttgaggccttgtaacca

SEQ ID NO: 3122 - DNA, 559 bp, Canis familiaris
  misc_feature (1)..(559): n = a or c or g or t
cnannnnnnnncnncngngncatacnnnnnacttgagaagtnnnncntnannnnnagctnactnnnacttagtgggactatgannnnnaannnaaaataaaaacaannncnnctnnatggaccaagaattcacagtttaataatctaanntgaaaaataataaagagaatcctgactgatgaggcatctaaaggattttatttacagatacctcaaggattcaaaataaagggaagaagaaatcacagcaaagaaccaccatcttgttcaggattgtttgttaggtgtgaggagaaattgccagagtcctgcagttcagtgcaagatgtttgctggtgtggcttctcatgatgaaatggactctgctgcgacatcgccccttcccaccatactgctcataataacattttaggggggaatggggggacatgtttaaaaagaaagtctttgatttagttttttagtattgtaaagatactgctgacctgtgcttcatttttaactgtgtaaacttttttttaacaaannnnnntcattcgataaagtgaattnnnaaaag

SEQ ID NO: 3123 - DNA, 541 bp, Canis familiaris
  misc_feature (1)..(541): n = a or c or g or t
actcccccangagatatntnnngaacttaannntcattttctgtctaaacantnnncaagggaaagcttgaaatatgtgagactctatcatcaaggcagtgttgtctggagttcactgtccctaactcacatgtaaacagcccagcccagggagccatgaagagtggctgttgagttaagtggccgcagcagagtgacagcacatttatcttgggctgtttaaaataactttaaacaggcactgttttttaaccaaagtaatgtatgcatggtttaaaaaaaaactttcttacagagatttataatgacagttccctccacccctggagcctagacctgctcttcagaggtgactggttttaacctttcaagtttgttgatgtatcagttttagccagtgtgtctcaattcccatttttccagagtgaggaccatgctctgtaccagccaggtttgcttggctatacccttatttttatattatcaaggttggtaaaatttacgttctgacctttaaccatagttaggtcttttgtttcag

SEQ ID NO: 3124 - DNA, 588 bp, Canis familiaris
  misc_feature (1)..(588): n = a or c or g or t
cccactgcagattttcaagtaagagnnnctgggagaatcactagggaactcattagaaactgnnnnncagtattactctgtgttatcttctgtagtcaatacagacagattttttttttttctctgcagccccagaagaaattaggtgaaagcaggtaaccacacttgtctgtttatataaggtaattccttttatctggacagaatatttagttcaatcttataaaaatgattagaatattaaaattgctgttatgatacattgtaggtacctaacctaccatcggtgtggtccatactgttaatttcatggaatgaatttttataaattgaccaaaaaatgtattaacttagaacctgatttctttggaatgagttggcttattttttctattttaaaatctttgaattaaaatattttatttttaaaaaataactcaagagacgtcggtgtttctcaagctttactattctttccccatgaaatgtttttaatgaaaacggtaaattttcctttcatgtgttggcacagaatttttacttcttttcaaatatgagattgnnnnnnnattttcagatttattttca

SEQ ID NO: 3125 - DNA, 573 bp, Canis familiaris
  misc_feature (1)..(573): n = a or c or g or t
gtctagacttattntgattgaagaactcagtagactattannnggggacattcagtgttattccctccagcacaaagaattcttagaacttnnatttgctcaagtgtgagctgacatcttattgtactaccctgtgcttgtggaaagcaatgtggatttagggcaatgatccccaaacttgttttaacttgtgcttccttttgagaatgaagccgcacatcctttaatattctttgaaacttcaaaatataccacttctcatggctaaatcagaacaatgatcattttgaatgtgcttttaaaatctatacacacatccaccttctcctaatcggccctgtgctgccattggtagtcttggtcctgatctcccttccctggttatgaatttatggtctagtaagtttggaactgatatgcaatatggaaaagagagagtgtaatgatgtgggatgcctgggtggctcagtggttgagtgtctgccgttagctcagatcgtgatcccgaggtcctaggattgagtctcacgtcaggcttcctgngnnnnnnctgcttctccctctgcctgtgtc

SEQ ID NO: 3126 - DNA, 540 bp, Canis familiaris
gagatccagttcttccagttgcttctgtaatgaggcacatagtaatttcagtttttacatggtatctatgaaagagttcacttcatagagcataatacttgagcaaatgcatccaagacagaaagcaagtgaaaggaaactgtttatggaatcatctccagacctaaaattcagtattttagtaaaatgccagctgttcttactgtatttattaaaacttataataatgtgatttttcaaggatattagttcaaattgaaatggttatatgccacatggaattctttaatttattatttgaggtaccatacacttagggtgctagatggcaaataatgttaatatgtgcaataagaactactggtttgaatgtgtaaatggatgctctttctgagtactggcaatatccagcaaaactactgctttttctccaaagatttttgggagctctcaatcctcagtgacatgagagagagaactgagaaccctgtgactgagttttctataggaattttattaaagattgtttaattttgttgt

SEQ ID NO: 3127 - DNA, 583 bp, Canis familiaris
  misc_feature (1)..(583): n = a or c or g or t
gcnnntaaatttcacttttctgnacctcagagggatccctttctgaataagttcagcgttcaggacttaatgcnnanngccanctcctgtcatngacaagaggnnttggatatttaggactttnnagctagagagcctccgaggggctgatggtggatcgtttggaggcagactttgtaagccatagcagttggccacgctgaaggggacggaggacataggaaggagaggaacgggatctcctgagcctggcccagacctgagaccaggtgcttcagccaggtgggaaagagccctgtggaatgcagcctccctgccaggctgtggtgactcctggttgcaaggctccaccctccccgcctctgcacgatgagagaatgtataattccctttggagagtgtgtgatttaatcacagggtgaggtatcaannnnnnatcactaggtgagattaagaaacagctgcttaacactgtcacttcatcaggataattggtcataaaatatctcagaacttcaatatggagttttcatgtagtatattaaattgtattttctaatttctagttaaactaaattattgc

SEQ ID NO: 3128 - DNA, 542 bp, Canis familiaris
  misc_feature (1)..(542): n = a or c or g or t
gggggcantgccnncgagtcaagtattacgtttctttttgtcactccgagttcccttggtggcaaccntagcccccgccccagccgtcccggtgatctcttctcccgtgctgcccttgagtccagcgtgggacatggctctgaccatcccagacacacttctctgagtggaaatcttatttttgtagctgtctgtgctttgctctcgaggcttggagcggcgtgtgcccctccctggcactagcacccaccgcagccaggaatgtggtttgggaggcaagccggctggctgcccggaagggagctgtgtgtgtgtgtgtgtgtgtgtgtgtgtgtgtgacccaggagccctgagacaggtgcctggggctgaggctgaggcagggtgagctaagcccaactccttagcttttcgcgtggctctcattttttttttccagaaccgcacgatggccagcaggaggggaggaaggggtaggaaaggagggagcatcaggtgccagctgttgtctgagctaatcgagcacttctcaccaaactccg

SEQ ID NO: 3129 - DNA, 485 bp, Canis familiaris
  misc_feature (1)..(485): n = a or c or g or t
cacgcttttcattaggnnngtttcatttcttttnctgctatgtgacttgcanngtggagattgtggggcatttgagttttcnnnnntgcttatttcatttactccccaccctgggcactgggaatgcccgctgagcggactggagcaaagctttggctgaaagtccaggagggcgctgaggcccctcgccttgttccctggctttcaagatgatgcccaaaggttctccgtttactttcacgcaagaatgggataggaggagaggcacaccccaccagtgactttctgagcatgatgggaggaagggacagttcccttgcctgtcgccagccctcctctcgggatgagaaacttgtgtgggggacagaagcagcctcaggaatgggctactcttggcccaaccctcagaagcctggggttggcaaaaacttggtttcttcaatagagaattttatcgtgtttcttttgttcagtttggagacatt

SEQ ID NO: 3130 - DNA, 640 bp, Canis familiaris
  misc_feature (1)..(640): n = a or c or g or t
acaacntgtaataggtgcnnactaccctactgtcngncntctgttgccttgtgacctgnnatnnaaaacggtgcttcccntggctcactgccacccctctcctcattcctgggatctgtaagtaacaatacatcttgtggctcttgtcagggtgcattgcaacttgccttcaaacaaaacatctaaggttttctcgtcccccaaatgggagcttggatgctgagggagccacatgctacccccatgtgagggggtcatgcctccttactcagcaagccataatctgcatattattagtttaatacaccagctacgggcctctggacacaccaggcaagtgcacccttggggtgcaccaatctcatgtcatctgagaagcatggtcacttacatgatgctcatgctaataacgtagtccttctagtagggcttcaatctcctaagtctttttataagaaagtaaaaattagcaatttggggtacattttattttattaaaatgcttttgatttaacatactgtgactatctctctgttactatatttctagtggcatcatttttaaaggcttcaaaatacttcactgtttatactctgtactataatgtgcattttatgttatataaatagataccttatt

SEQ ID NO: 3131 - DNA, 555 bp, Canis familiaris
  misc_feature (1)..(555): n = a or c or g or t
acagnncacgcagacaagacagagatgcagctggtnnagctgctgggacccgacgccanngcccttccccgggagccccggcctcgctccccggaacgccgcacggcacttgggcgctctcctcgggggccgtttaagcagtaaaatctccaacaaaacccacaaaaaaatgccaagattggacactgcctgtgctgtaaacacacactgtccccggacaggcccgacgccggaaggcaggggcagcctggggctcggcttggacatgggcctcgctgtgcggatctgcacgtagccctgcagcaagggctgaaggaaggacttccggttgtgaataaattctgcacagtgtattgcagatgacggttactgtcgtgactgcaagagcgtgggctccatcaggcctggggtcggtgggccggccggtgcagggctgcatgggcgagtccgctccttcctcctgttgtcccttctccttctggtctcctttccttgcttcttgtcttgtttgtttctcttcgtttctcctgttttccccttcttccttccttcctt

SEQ ID NO: 3132 - DNA, 641 bp, Canis familiaris
  misc_feature (1)..(641): n = a or c or g or t
gggtattaaagtagagcgncctgctgnncttggatccttgtcctggtatgactgcagggnnngagctgtaatcaaatcacagaagccaagaagtatggtcccctgagtgcaaactgcttgtcacagctcaatgctagtgtcatttctatgccctccttgccttcccatccttcccccatctctgggtgaataccctgtgctctgcactaccttggaggtactggtcatggagaaagctatcccaatttacatcacagacagtgacagagacactcacactgatttgcctaatgcctgatgtttcttggggttttttccctctggttctttgttcctaaaaaacaaaactggattttggctaaactatttttttctaatccgaagtgcttttgcagttgatcctgggcagaaagtcaaagtaagcatttgagttagagattctatttttttttaatgtatatgtgtttgaaattttaattttttcatcagagggtcttactgaagggtataccttgcatatggtttcaagaaaactttgaggcactgtcaccctttgtaaaagcgttttctctttggctttacaatgaaaataccgtagaggtgtcagaaagtaagnnnnnnnttaggttgctcattaagcg

SEQ ID NO: 3133 - DNA, 624 bp, Canis familiaris
  misc_feature (1)..(624): n = a or c or g or t
acatcttcaacntgtacanngtccttacggtcgtgctccagttctgtgtccacttcnngagtctcgtctacctgtacagtgaggcccaggcccnnagccccaagaagcagnagcagtncgtnnacctgtacaaggagtttgagccaagccnggnnnnnagnaccgtgtacatcatnnnaatggccatgcagatnnnnnccttngccatcaactacaaaggcccaccattcatggaaagcttgccagagaacaagcccctcgtgtggagcctggctgtgtcactcctggccatcgtgggcctgctccttggctcctcgcctgacttcaacagtcagtttggcctcgtggacatccctgtggagttcaagctggtcatcgcccaggtcctgctcctggacttctgcctggcgctcctggccgaccgtgtcctgcagttcttcctggggaccccgaagctgaaagtgccttcctgagatggcagtgccggcacttgctgcccatgttggtgccaccgggcgggagccccaagagggaacactgccccagtggtgaggcaggtccggccttgccaccaggactgaactgagctgggaccaccccgcagccacttgagggcctggctgg

SEQ ID NO: 3134 - DNA, 569 bp, Canis familiaris
  misc_feature (1)..(569): n = a or c or g or t
gatgctctctacgacgtgtacctnnacgtgatcgacaagtggggcacggacgacttgctgttcctgggcgacttcaatgccgactgtaactacgtgcgggcgcgcgactggccatccatccgcctccgcagcagcgaggtgttcaagtggctcatccccgatagcgccgacaccaccgtgggcaactcggactgcgcctacgaccgcatcgtggcgtgcggggcccacctgcgcaagagcctcaagccgcagtcggccgctgtgcacgacttccaggaggagttctgcctggaccaggctcaggccctcgccatcagtgaccactttcccgtggaggtgaccctgaagtcccgctgagaacctccgaggcctggtcagggcccctgcctgggtattccagccaggaggaacagccccacagggctccttctgggtggccgcccccggcaaggccgcagggcagggctggctggacaagtggccagggaaacatcacagggaccactcggtttgcccatctgcgaaatgggctactgtatctacctcacaagatggtgaggagcaccctg

SEQ ID NO: 3135 - DNA, 724 bp, Canis familiaris
  misc_feature (1)..(724): n = a or c or g or t
tanntttttatggatgnnagcagtttattganntaatatttgtaaatggtctgtttgggcaggtaaaattatgtaatgcagtgtttcaaacaggggaatttttttcctttttatttccttttttttttttttaactgtataatgtccctcaagttatggcagtgtaccttgtgccactgaatttccaaagtgtaccaattttttttttactgtgcttcaaataaatagaaaaaatagttataatatggatcttcaactttgccattcatgcttctatgcacattaggctaggtattccactttgaaagcatgagcgtgtctaggcctttgaatggcacatgccatttctgggaaatgtatctgtaggctaagtattgctttctaaaaataagtacccccttgttttaaaaagaagaaatgcatattgaagtagtttcatgatcttatttgtttggcattataggaagcaagctggtgctaagtatttttaaatggttatgtaagcaagctgaactgtaaatcttccttcaggaatgtgtattaagattatggaatgggtgaaagactatggataggggagaaagtggctatgactaaatggatctttatggccctatgatctatcctttccttgaaagtttctgaagaaaagtggaaagatcattctgttgcattcctccattcttgtttttaaaagaacaagtcccaagccctacaaatggct

SEQ ID NO: 3136 - DNA, 600 bp, Canis familiaris
  misc_feature (1)..(600): n = a or c or g or t
tgccngcgtcactgnnnctcctccactcaaaacatgnggcacgnnatctttnnagtaatgggccaggnntgcttccccacgcggggtgcgtcgtgtgggataacgaggagctcgtaagttcagtngaaaagctgtgactatcgtgctcccgtgaccacatccgagccagcgcaccggccatgcacctgctctattgtacaattgctgtttctggagatagcaagcgttacaagccccaggacctttgcatgcacagcttcctaaaagcacaactctcgtcctcactccagtgtgctccagcctcaccggtttattgttcgctgaatcagtgccccccagccccccgactcagaccaagagccctccaccaggaagaatcccaggccttaggacctcgctgctgcaccgtcagttacctgaaagttcacacccctgcggaagctacaactgtgggatagcgtgtgggcttccacagactggctcagcccacggacccaggcatcctttttctccgtgtctggttcccatagtgaagcagtatatccactcgcttttgcttgttttgcatcaaatccacataaatggctcagtgtaataaac

SEQ ID NO: 3137 - DNA, 565 bp, Canis familiaris
  misc_feature (1)..(565): n = a or c or g or t
cacaaactcttcagccaggaacacntagtgatatataagggatatgttgatgatcctcgaaatacnnntaatgcatggatggagacagaagctgtgaactaccatgatgaaacaggtgagataatggataaccttaccctggaggctggagatgatgctggaaaggttaaatgggtnnncatcagtgatcaactccagctttatgccagtcactctcaattcatcaaactcgtggctgagaagcgagatgcacactggagtgaggactctgaaactgagtgcagtgggttgtagcccccatcattgtgggaaccacaggccagcaaaggggtgnnnnnnnnaagaaggcatcacagagctcatactacaagggggcagggttggtcacttggaagttagtttattcactttcaaagctatttgcatttaggtttacatcagcataaaattagtaaatacggtgaaatgcaacatggaattttccgcttttcaatcaaaagaaatataaacaatcatattttgtatgtattctatttaagcnnnnnttaaaccacgtcttaaccaa

SEQ ID NO: 3138 - DNA, 591 bp, Canis familiaris
  misc_feature (1)..(591): n = a or c or g or t
gtttgnncctgacngnnncaactaccgacagaagatcacccactgggctgagcccatagtcaagttccccggggctttggagggcgcaacctacatcctggtgatggtggatccagatgccccaagcaggtcttctcccaaagctcaattctggagacactggctggtaactgatatcaagggcactgatataaagaaagggaagctccagggccaggagttgtcaccctaccagcctccctccccgccagcacaaactggcttccaccgctaccagttcttcgtctatcttcaggaaggaaagaacatctctctccactccaaagagaataaaactcgagcctcttggaaaatggacaaattcctgaaccgcttccacctgagcgaaccagaagcaagcacccaattcatgacccaaaattaccaggactcgccaaattaccagacgcctggaacaggaagctcggagcccagggacaaacccaaatagagataactgcctgccagacgtcaggcttcgcgctgcagatgtgtgtgtccactgtgccctgccagtcggtctgagcgtagaaccttcgctgggtatggaac

SEQ ID NO: 3139 - DNA, 568 bp, Canis familiaris
  misc_feature (1)..(568): n = a or c or g or t
cntagaagcccccactnncacagcaatgtataataaggctctaaaaacaccatctgaatgttcaaaagaaagcttcggaagaaatctactggcttcccgaaaaacctaaatatacaaagaaaatgtagaactatttccccaatccccatgttcacagtgggacagtgttgatttcacacagtttttgccgtgagagggattatggtgaacagaagcaggcgtttgccctctggagagcctacacatacaccgcacaacacacgcccctgaggaatgaagaaagtacacattactagccaaatggtttttaacgtatatttcttaaggtaacagttattcttcccttgttacaaaaccatagccactgcaagagtagtagggcaagagtcaaggtctttgatattggtcttttggttaacaataaacttagcttaagtagactgtacagttgtatgaatttgtaaaagtattatatgaacaactagtgaggtttcaaactcttgtaactgtagttgaatagttcttgtattttcttgtgaaccgtgtttaatggttttacctcaaatca

SEQ ID NO: 3140 - DNA, 394 bp, Canis familiaris
tccactctgattttatgatggagatttgtaagatgattctacacgaggtcatttactagaaagccccaaatctttcctccttttctcatatgatgcctcatttcataagcatttgcaacacaaattcatgaattcccacgaaaagcagagccctgagactagcacaatttaactaataaaaccattagctctctaggttgccaggcttccttaacctaatacacagctgacatgtgtgctacacagccaggaaaatgaagtttaatttagttcagcttcagagaaaagattccgctcacacttttatcaatgagagcactccttgccatccaaagcagcttgtttatcctgaaagaacgtttggttttgctttctgccccctttgctgttgacc

SEQ ID NO: 3141 - DNA, 516 bp, Canis familiaris
  misc_feature (1)..(516): n = a or c or g or t
cgccaaccacagtngccgcttccagcnngtccggtcttttgacgtgggccacaggtctcagatcacagggatcaaacactcactgggggccttgtacaccacgtccactgacaagaccatccgggtgcacgtgcccacggatccaccaaggaccatctgcatgcgaagccacaacaatgtgctgaatgggatctgcgctgagggcaacctggtggtggctgcctccgggggcctatcgctggaggtctggaggctgcaggcctgagctgccagacgtggaagtggcggtggatctgccggcccacaggctgggccgcagcctctgttctcgggggaccttcccccgtgttggtgctgtctctgccttctcccaaagccctgaggcacatggggtccgggccatggtgaggcagggtccttgggctgtgccccacgccagggaaggtgaggttgttcaggcccacccaggggacggctccctcccctgggccctgtttttgttaaggtttggatacc

SEQ ID NO: 3142 - DNA, 583 bp, Canis familiaris
  misc_feature (1)..(583): n = a or c or g or t
tattcctggtaggaaaaattgctccttgcgtnngacatttcatgccattttagaccagccctcttctaattttataggtccataaagctgaataacagctaagtgcagagccagaccagatacttgagtgctgtgtctgatgctcttttgtgaaccatatctctcaagtgtgtcttctggtttcctgctagggaagctttaaagctgctctgtgtcatcaggcagttgtgtcagtcttgaactctataaacacttttggaaacgccttttcattaaccttggcctcatgtcccaggtaagatcgacttacctgatactttcttctggagaccaaggttgaatgatgtgtcaaaaagcccattcccttggagtccagtatgcctcagtagcagagatgagtgagtcctttgctatattttggtagaaagatctcaaatactagcatgtcatatgagcctagatctgtttccctaggatagccttgaatcattcctattgtcctgattgatacattaatggtttcttatttcactgtcacaagtttcccagtggacaaaacatatggtgctactcctnntnnnnn

SEQ ID NO: 3143 - DNA, 532 bp, Canis familiaris
  misc_feature (1)..(532): n = a or c or g or t
ttttattgcnnnacnngaatcagtctggtttaggnnggtgatagatttttttttttttatctacccaagtttgacttaaaagcaaatnctagttattaagcacttttaaaatgaaatccagaagcacatttttctgcacaaacatgttacaaaattcaaaaatgtttcttacacatttgctctaagtttcgattcttaactttgtagaccacatcagagaaacttggcacttctgcgttactgtgtgtgtgtgacttgtttttgctctattttggttaagagagaacagtagaaaaatattttctggcatttttgtgtacttgggttacatttgtataaagttctgatcgccagttgctgagataataagtaaccagccaggattctttaaaagcattaaagttccttaaacctaaggctaaatcttgaatacattattgaattctttaatatcctgatggctagcagatcgacagctgcacacttggcatgctttgttttttgggggttttatttttcattgcagatttat

SEQ ID NO: 3144 - DNA, 673 bp, Canis familiaris
  misc_feature (1)..(673): n = a or c or g or t
tgtangctttttaaagaccaaaggtagctgnntggtttttaaaatgagtacaactctagcatcctgaggttccagttatataaatgtatttgtttannagtaggtttgtgaaattggttctttgtatgggggacagtnctttttcacacatctagatattttcagaagtggtaaagattggcagctggggtattttcagcttatattgatattcatcacaccccaggtaaaatgtagaatattatataggtgcactttataaatggtggttaaatggaactgttcaagccatttttatagttgtgatgcacaatataactgaaataagtgcttctatcaaagtattccttcagtaaaatgtgtatagtttgctgcccatgatgggcaaaaaaggagtatttatcattgggcttatttgattgattaggaggagatctaatgcccatatcttatttctctacagtgctgttttcgcccttttagagtgagtcacatgcaggaagtgtgaacatcagaggtggtttattatccagtctgccttacccttaatctgttcagatatttatttactaattttttttctcaagagttatgggataggaaaatgaagtgtttgctcttcatttactaaatgattgtaaactcaagtttttcatcaataaaattccnnnnn

SEQ ID NO: 3145 - DNA, 581 bp, Canis familiaris
  misc_feature (1)..(581): n = a or c or g or t
aggnataanttcaaaaagagaaagccagatttggnnagcaatcggnncctcgagttatgagaacataggaaggctgaagaaatgaggaaaagcattcgaggaactagggaatgggttaaggnctcgacgttgacgttgaccatgcaccacgcatgtcattcccatctcattggactcctgacaacctcgcaagtgagacttatcatctctggttttcaggatggaaaactgagatgaagaataattaagtatgttgccctagatcaaggagatagcaaacgcagatccaggatcttcacctagagcactctcaactttattaaatattagatactgtttgatgtcagaaactgactatgaactcctgcaatgtgcatgtactctatgttgcaactttgcatataataatgaatttcaaccatattcaactatattgccctaacaatgtcaccctgaggtggccatgttccccctcgttgtaaggatgggatatgagggtcagagcatctaagcaggctgcccaaggaatgcaccctgtggtcaagccctgattcaataacaatgcttctcattttaaaacc

SEQ ID NO: 3146 - DNA, 425 bp, Canis familiaris
  misc_feature (1)..(425): n = a or c or g or t
atatcagatgcctctctgannngggccctacattnnaggnanngcagaaggagcaagctgctctttcctcttagaatccaaccacatnctatggtccttgctggaaagcaggcannctggtannnnnnagtgtgatcgtgtcagcttgcttttgtcncagcagccctggcctcataagaaatggcccattgtagaggcagagagaagcctgcctctctggctacctgacagcagaggtgaaaagggcccacgtgtcctggtttctcccttcagcaggtgacctgcctctaccttgacctgtacaatgaaccagtgtgctgtgcttccnangtggacagaactcataagcagatacatgtcgcgcagtcatgggggcataaagcgatcaggatggtgccttcttctgttgtgtcttcaaatcctgc

SEQ ID NO: 3147 - DNA, 495 bp, Canis familiaris
  misc_feature (1)..(495): n = a or c or g or t
cagcgtcacctccctcntnnagcccgcccctgatgcgctcagtctggtccagggcggccctggacactgggaggaccctggggggccattgaggttcctgcccccaactccccttgaactaagcagtgtgagcaccatcgtgcacagactgcagactgccttccaagaagccatggacctttacaacctggtggtctccaacgaccagatgagcactgatcagcagcggcaggcacggactgagctggcctccaccttcctttggatccatagccagttagaggccaacagctggctgctgaggagtgatgtggccccaccccaggcccagcctggcctgggctccccctccccaccgacactgtgccccctggccagcccagacttgcacgccctgctggaacattactcagagctgctggtgcaggctgtgcggaggaaggcccgggggcactgagggctggcgcctccccccgactcccaagacagccnnnc

SEQ ID NO: 3148 - DNA, 510 bp, Canis familiaris
  misc_feature (1)..(510): n = a or c or g or t
tatctcncagtttccnatanntgttttnntcttctggatcttccaaaatacaccgaaaaagaanctctacgctcnaagctgattcaagcaattgatcataatgaaggcttcagtttaatataactttggaaataactaatcagtttattgcaaaagcattaaactaattatttgtgtttttcttgtggtgatgaattcagcaaggtgacagaggtacttataataattcttacttgcaaaatgttcaatgctatgagtattcatgaaagccaaaaaatattaaaggaaaatgaacaaactgtgttaatattagacttaatgtacagaaccatggattttttttttgccatcttccaataaacatacaagtattgtgaatacattgaagttttactaacatgaattttaagagtttgcatatttcacaaatgatctggtgtgtgaatgcatggaaatgttgcttaattttcaatcacgtgagtgaaaaacctttatctttggcctgcaata

SEQ ID NO: 3149 - DNA, 199 bp, Canis familiaris
ccccccccccgtgggcacctcgctggctttccttcagccacaggggcctcctggttgttcctcccacatcccaggcccggtactacccccgggctttggatgtgccattccctctgcccgggtggctcttccccaagtgttctcttggcaccctcttttatctcctccagtcctctgatgtcacctccaagaggccctc

SEQ ID NO: 3150 - DNA, 558 bp, Canis familiaris
  misc_feature (1)..(558): n = a or c or g or t
tattgcatcagngctgtattnnntacagttgttngaacaagctagtgacataggtcatggtgccattttgcagatgagaaaactgaggcctgggaagggggaactggtatgcctgaactcccttgagctcagacccacctggctccatgcccccctcgcttggtagctctttcatgccaggtccctgttgtgaggactttgggcaggttcttttctctcccaattcttggctgctccctcaagcagtcataggccaaggacctcacagaatccaccatatcagcccagcagacttggtgcaccccaaggccatttctgcacaccgggggctggaattcccatctggaaaaccccaagctaggggacccatcaccagcccagctcagcctgagcagccagcctcttcctggaacatccacattggagggggagaagctcctgtgtcctccagcatcctgggaccctgtcctctaccctgtgacacagcggccgtggcttgtttgatttctggtgtccacagctaagcataaccttcccggggtttccgatttttcagcc

SEQ ID NO: 3151 - DNA, 195 bp, Canis familiaris
  misc_feature (1)..(195): n = a or c or g or t
caagggtcctgctggcctccnnnnnnnncgtcctcctcggcctgtgtctcctatgatgcnctggggtccggaccnnnngggctnnnanannnntggggatanngtggccctcagtgcagagagattccaggatgctgctccccatgcacaaagnnngggctctnctgagcaggtacctgggnnnancnnnggcag

SEQ ID NO: 3152 - DNA, 551 bp, Canis familiaris
  misc_feature (1)..(551): n = a or c or g or t
tggagcacaagcaaaataagannnnnncagaaataattttaatatcctgtgaaaatgannttcatttatgtcgagaatattttgccagaggaatagatgttcacaatgcagagttcattctcactggagtgctcacacaaacnnnggactatgaatcatataaaattaactgatggcatcgacactgcgctgtgactggagccctgggacgagttctggctgcgtccgtcgtccccttcagacgcccgtgttttccagctgctttaggaggcaggcattttaaagcaggaaaacaaatataataaatatactgnnncttattaagatgtgtaattttattctgaggaaacataaattatgttttgtattataggaatttatgagcccacattaggttttatgattcatttgccaggtttttaaatgttttcaaacactgttaacagaacttcggctacaaataannnnnnnnnaataaagaccttgctatctctaaattatggatgttaaagatttgaaatgttttgtactnnnnttatttttatttctta

SEQ ID NO: 3153 - DNA, 606 bp, Canis familiaris
  misc_feature (1)..(606): n = a or c or g or t
gtggcctgggccccctccattggcttgcctaccagcaccatcgnnagttgctccnannacggtcgtgtgttcatctggacttgtgatgacanntcnnnnaatacatggtcacccaaactgttgcacaagttcaatgatgttgtgtggcatgtgagctggtctatcacagccaacatcctggctgtctcgggcngagacaataaggtgaccctgtggaaggagtctgttgacggacagtgggtgtgcatcagtgatgtcaacaagggccagggatccgtgtctgcttctgtcacagagggccagcagaacgagcagtgaccagacaggcaagcccagctcctcacctgctgactccaggactgccctttcctagaccaactgactaaatagctgggaggaacagctccaacacgattactttcccaggagtagttacaaatgcagccagattgatcatctgccttaacatgatttgatatggtttgtaatttactgtcctgctgaaagcattcatgttatgaggnnnnnactacaaatgatcttcagatctattattttaaaatatttttggccatttttatgtaccttttgggttcaggcattatt

SEQ ID NO: 3154 - DNA, 547 bp, Canis familiaris
  misc_feature (1)..(547): n = a or c or g or t
atcacatcagctgtgtcatcaaggaacggacagtggctcagataaaggccacagtgaagcgcaaggtatacgaagactctggcatccctcttccagctgagtcacccaagaaaggggccaagaaggtgccatccagtgtcttgtcacctcctccagccgcccctccaccaagcagcaccagtgtccctgaggccgggggcccccccataaagaaacagaaggctgatgtgacactcagtgctctgaatgactcggacgccaacagcgacctggtggatattgaagggctgggtgaaactcctccaaccaagaaactaagcttcgaccaggacagcttgaccctggaatctggccttctcatgacctctgctgacccccctctgctctctcgctgagccttccacctctcacccctgtcactgttccctctggacctgtgaatcgcccaggactccgagcaagtctgcacgagagaaggtcaagaggctgctggggcagcacacctttgcagttctgtgcgagcannnnnnccccaagccctctgacc

SEQ ID NO: 3155 - DNA, 560 bp, Canis familiaris
  misc_feature (1)..(560): n = a or c or g or t
gtntcngagtccatagngancctggacatggcaggaaattngnnagtctgctgccntggccnctgatgcnnaagaaagctggagttcagaccacacaagggggtccgggtagaggccatgaagttcctggccagagggcaccagggtgtggtgtctaaggacacctggggctgctatggcttgtgctcacccagcaccaggcacaatgtgctacacagagatgactctggcccatggacttctaaagcatcaagtgccatcaagacatgctaggctgggccagctgagccttgtgtcctgaaccccagcacccatgcttccctcctccagccttcatcccaggtctatcctcctgtcccttgagcaatagcaaacaggtgctggcaactccatctccaggctctcctacttctgcacatgcagttctggcctgctgggtgggttgtcaagcaatcttatcgatcttttcatcagattttgtgccctttaggccacgttcctcccaactctcctggctacctggtttttacaatctaggtttgaaaatcctgaatcaaaag

SEQ ID NO: 3156 - DNA, 754 bp, Canis familiaris
  misc_feature (1)..(754): n = a or c or g or t
gnttccagacnntgcagatgnagctagagaacatnnncaaccnntnnagcccaagacaccacnnggtnnaatcaannntgangcagatgagttaccaccgggagcgccaggcagnnntccgcttcggacagactctgcccaagtacctgctctttannagtcccaannagaaccgctggcatcataagcgcagctaccggctacagatccactccatggccgaccaggtgctgcccctgggctggcagcaggagcgggctgtcacctgggccaggtaccccctggcagtgaccaagtaccgggaatcagaggtgtgcagcagcagcatctataaccagaacgatccctgggacccacctgtggtctttgaggagtttctccacaacaatgagaacattgaaaacgaggacttggtggcctgggtcaccgtgggttttctgcacattccccactcagaggacatccctaacacttccacaccgggaaactccgtgggcttcctgctccggcctttcaacttcttccctgaggacccatccctggcgtccaaagacaccgtgattgtgtggcctcgggacagtggccccaactatgtccagcgctggatccctgaggaggatggggactgcttaatgcctgacccttttagctacaatggaacctacaggcctgtgtgaaggaccctctgcccccaaataaccccacctagaagcccaactgcnnnnnngggacagacaataaagcccttcaggnn

SEQ ID NO: 3157 - DNA, 592 bp, Canis familiaris
  misc_feature (1)..(592): n = a or c or g or t
ctcccagctcctaccagtcatcacannncggctacggcagaaacgcagaccacagcatgaactaccagtatagataaagccccccccgaggggtgaagatttgtaccttctgcacttacccctcgttgtaagattcagttttatgcatcacagttaacatgtcagctggcccctccaggccccttccgccccaacttgtccacgttgctgtgttgtgaggtgcagctggtcacgcccgtgacccgtcctgtgacccatatttagccgtgtttgggacttccatgtcttcaatggtttgttagttgccatcacaactttgtccgagtagagttttttgagttcttgcagttacgtatccctctgtctatttacaattggtgttagtgttaactcagtttgtctttaaatagctacagaagggatacatcatctgttaatgcttttgtgaagtgagttaaacgagctttctgtattttaatgctttagtgtttcagttttataagtgaagattttattttaaaaaccagtgggaaagagtgggttttttttgtatgtctggatcattcaggcagtacatctgagttaagctgaa

SEQ ID NO: 3158 - DNA, 566 bp, Canis familiaris
  misc_feature (1)..(566): n = a or c or g or t
gaatggaggtaatnncagggtataaggcanncagaggaccgtnnaaggatccgtgttggccctaacctctcttctgggtgaatggaggacaagcnntagacacggggnngntaggtcncaggccacgnnngtngcanntgagaaggggctggtgttggagtgaaattttggcctcagacaccgtgagacaccagtctctgacggtaaagcttcccacccccgttcgcaggagaaaggattcgggggtggaagggaaaaaaaaaatcccagatcccaagccctgggaaataaaagaatcacaggggtttccatttcactccacttgtttgctcatcttggcactaaagaggcactttcggagtatctacccttcgccagtgggtggggtgggcaagctgctnnngggacaccccccaccccggtcggctgcttccagagcgagcgggctttctgggcatgctgaggcccagccgctgctcccggggccacggtcccgtggaggggaggtgggacagcagtaccacggggccaggcttccttcgtggctgccaccagcgaaagaaact

SEQ ID NO: 3159 - DNA, 565 bp, Canis familiaris
  misc_feature (1)..(565): n = a or c or g or t
tatnnacgctcacaaatctgacccagtgaactcagcttgtgtgtttagnnagtatacaaaagaaatcgttcttttcnnnnnnntatgttgttgaatacttcatgcacaagggaaataatcatatcccaaagagagagcaattggcttgtttagcttttgttgttgttgttcttccctgttatctgcttaatagaagtttgtgtgatgggaaagaatttttaaatacacacatacacacagacacagtatatatggggcgatgcacaggtgggagctggctgtgcagagaggaggagacaccggtctgcagcgacagcttctactaccagcccttggggcactcacccctgtgctcaagcaatcattgtcaatgacaaagtgactattgaagttataattgtattaaattaatgctaataatttggatattttattttatttttggctgctcgggtaacgttagcccttaaccaagcatacatggttttttctttcttctttctctttctttctttcttttcctttttgggtacagctgtaaaatatttggatataggaaatgttg

SEQ ID NO: 3160 - DNA, 566 bp, Canis familiaris
  misc_feature (1)..(566): n = a or c or g or t
cagccgcacccctcnaggcccagcagtgcaacgcnnaacctacagtgggcaggggtgccctnnaagaccccgtctgtgatctgccttctcttgagccaccgggcagtgggaccatgtggggtcctgtgagatgtgaggagcttcctatcctccccgaagctcccacacacccatctgctttgggcctctgtcgccttctgacaccctctgcccactgggctggcggctccgatgcagttgtctggcttctggagcagtgtgccttctccctcccgcgcctctgctctttacctgtcttgagggcctggcccctcccacctcctccaggaagctttcgctgacccctggcagggaggtgaccctagtcccaccttcctcctgtacatcccgtctgtttgaaccgttcagcactttgtgtggtctgctctccggcgagactgtgggcttcctaggggtggtctgggtggtggtctttgccttccgccctcccgtttgagagctggccaaaggcatggtggatgtacccggtttcttccagtctgtacccatgggatttgnanaaaaca

SEQ ID NO: 3161 - DNA, 522 bp, Canis familiaris
  misc_feature (1)..(522): n = a or c or g or t
ctnnagncagaggcccaaggccccgacnnnggcnngcgcccatcttacctggggctgggagggcgccgccgggcttgccaaatcgccgcagaggcgaccgcttctttgaaacagctcgccgggacccgggccaacagccacttcctgagcatctcatgcggcccgcctgagtcgcgggcggggcctgctcctattgggcagcagtcctggacggcggccaatagcctctcttcttcttctcttggtcgccgctccctgaaaaagcggctctctcattggctggcccttcgtaaactgtcgtgtgacggggtctcggacgattggtagaaccctgcgtcagtcacctggtgcccagcccacaaggaggaaagcggaaccagggtttcaccactctttatttgaactttctggcgggagaaagttgtaaggataagatctttcgggagcctgcggcgtgggaccatcgcgttcttgtatatcctctccagacgttgaagagctcatgcaaaacaactgacctac

SEQ ID NO: 3162 - DNA, 485 bp, Canis familiaris
  misc_feature (1)..(485): n = a or c or g or t
aggactcctttggattggagtgtagggtaagctttataatctgaaaatgtcttggaggttttgctgtcattccagtaacatcacctaatgaagggaatactaaaagatgacagtttgaagtttatgataaacaagatgaaaaacanannnctcttgagaagagtggtaacctacaacaaattgtgaatttnnncagtatttgggtgacaactatcaaattcttggctttggaaagctggcaaatgcttattaatactggtatatttgagatactgctatgtggattttgaccatttgagcattctttaaagaccctatttgatccnnnnnnnnncgctttatgaaagggaagtcatttctttnnnnngctttgaagtgtggcagaaagcatacaggacactttgtaattaatgacaatgctaagtggaatgtcttaccaacttctgtagnnnnnnantgcaatgnnnaaatctccattnnnnnct

SEQ ID NO: 3163 - DNA, 624 bp, Canis familiaris
  misc_feature (1)..(624): n = a or c or g or t
ccgagcaggagcacccagcaaatagggccccgtcattccgccagagnnnnntccacccttaaactagtgggagnncagccacagatgctagcagcctctattgccnntagtcctagaaaaaccaaaattgtgcccttcccagacctcacccggaaactggggcttggaagggaaggtctcgggatcacaccagcctcaggttgctccagttgcatcgtgtcctggaagggggcagactgccgagcagggtgggcccaactactggcttgttcctgtagccagccccatccctgtccatccctgtggtggtttcaggtggagttaaacttggcactggggttagtgtgtgtgtggaaaataacaggcttttcccctccagagcccccaagtttctaggctgcatgaagattttctgtaaaatcagaattgtagccagtttctttggctgcataatttaattagctatttctgaaggggacggggggagatgtgtgtggcagtgcatggtgtgtgatttttatgtttcccatggccttggggaccaaggagagaggcctgagtgtcccctagcaggctcctgcagctgcgggagctgtgcccactgtccacaacacttcacatccc

SEQ ID NO: 3164 - DNA, 597 bp, Canis familiaris
  misc_feature (1)..(597): n = a or c or g or t
tnnatcngcaccaccnctcagggcaaactggggactgagaccctttgacacccctttgnnnngccnnntgcggctacagtgggatcctcaatactgagctccagctggcactgcccaagagaagggggtgagtgggacaccccctggccagtcctgctccgccagccccacgaactggagcaggggcaggagggaaagggctgggtttggcactgctgccgaggtaccgtaaggcattctctggtggcacacgcgtacacacagctggtaatgcatctggcacaagcatttggatccacatctctgcacaagtgtgaatacctctgcacatgcagacaggcctgtgtgtgcgcacacgtggggttgggcgtggggtgtggaggactcaagacttcctgtgaccagtccacctggctcccagctgtctgcatcctcccggcccaccctggcaacacccagggaggagtggaggctgcattggccccggcctggaaatggctccatacagcatcttgtaaatacgtcatctggggctcggggtggggaggcagggacaggagcatcaattaaagatcatgtcctggggcttccnnnann

SEQ ID NO: 3165 - DNA, 567 bp, Canis familiaris
  misc_feature (1)..(567): n = a or c or g or t
acacccggnntccagaccccccagccagcgcccnnccagacagcagcagcagcaacagtgggtcacaggatannaagnagagctctnnagagcccctctcnnaggagggtcaggatgcccccatctacacagaatttgatgaggattttgaggaggaaccggcatcccccataggtcactgtgtggccatctaccactttgaagggtccagcgagggcaccatctccatggccgagggtgaagacctcagtctcatnnaagaggacaaaggcgacggctggacccgggtcaggcggaaacagggnggtgagggctacgtgcccacctcctatctccgtgtcacgctcaactgaaccctgccacaggcgggaagaagggggctgttggctgctgcttctgggccacggggggccccagnnnnnacgcactttatttctgcccccgtggcttcagctgagacctgtgtaacctgctgccccccatcccactcctcatcccaaatggacccgctgtgccttccaccattgatgtacatactnnnntttcagatcttttcttcctgccgct

SEQ ID NO: 3166 - DNA, 327 bp, Canis familiaris
  misc_feature (1)..(327): n = a or c or g or t
agaagcagaagcaccgagccaaggagagccagcaggggggccggggtctgcaggcgcccctggcggtgggcagcagtgtcgtggggcgggannncgggagggacctgcccgnngtggtggtgtatgagagnncggccggccaggcggtccagagacacnaacaccaccaccatcacgaacaccaccaccattaccaccacttctaccagacatagacccctccccagaaacccccagccctgccatatgaaggacccctcctcccccgcgcccccaaggcattattattctattaattattgttattatgatgnnnattgttattaa

SEQ ID NO: 3167 - DNA, 484 bp, Canis familiaris
  misc_feature (1)..(484): n = a or c or g or t
aatactagaatgagagacctgggaaactcatgggctccctgtccatgcagactcttctggcatagacagcatggacagggcccagnntgaagggggtggacgagatgaccactcagaggctcccaggccgcatcatgcccaccatggaagtctcctgtctacacagaggtatcctgccctgagctccaagcagagctggaatgttagggtaggacttctgatgtcatctgactctgaagatcctcccagaggtagggaatcctgggaggggaggggtcagcaggagagtttggggagcctcatctcccccacccagctgtggaggaaggacaggcttgtcctgggcagcggcatggatctggcatatgagcaggtggcggggagcaagccactgtctctgtgtccatggagtggcattctgcatgtcacacaggctctcctgggagttcgtcagactgtggatgggatgtgtggtgtcaggtgt

SEQ ID NO: 3168 - DNA, 588 bp, Canis familiaris
  misc_feature (1)..(588): n = a or c or g or t
gagccccggggcatgtngaagacgcccccgggggagccctngtctcggtgnctggtgtgtgtagcatctttctcagcaatactgccgggcgcccgccagcaccagcccntcctgcagaaccagcaccaggtgttctgtcacaccaagtgattcgcaaacgtgccttatgccctggagccgtgctgggtcgttgggggcagttgggcctccactccccctccctgagcaccagcagccgcctcgcatcctgggtttggcctctctgggtgaggtctgagtgcctgtggcccccagggcccggcacccagattgtgtctgtctgtcccactgggacggaaggagagaagcggtacgaagccttcctgacctcacccggccggccctgtggggcgctggcaccccgggtggactccgcaccacgggcctcacctcacaggtcaagctggacgtcagacgtcgaggcccaggcggccagaggggacccagcaggcggagggtctgtttcagcctgtctgacaggccgtcctggaggccgggcccaggctggggtccgggagcagctccgccaggaccgccctcgcccctacc

SEQ ID NO: 3169 - DNA, 589 bp, Canis familiaris
gcagtttcattgcagtactggtgccatatctccctgcaaattgtgaaagtaattagtgacaaaatagcagcctaatccttttcagtggccagactgtcagcattagcagacttaggtaagctagtgggactgaattatgtactggaaacctgttcctcattatcacccaccagactgaagacatgccatctcctagagaattatggcatttatggtggtcatctttttaatggaacagtaacttatgcggatattgttaaagcattcagagactattttgaaaattaagtttacattttacaattgctttattttttattaaaatagttgtatataaatattactccatttcactgatgttaaagtaaacctaaccatgtagacaagtgtgtcacctgatatgtatagaagctatgatatatatatagtacttttctctattgtgtaaatgtttatgaatataattgttctctgtttttataagttggggataatttgttgttttacaacaacaaaatcaattgaacttaagtggcttttatgtaatagaaattatgcaaaatagtgaaagatttaaaatatgtatatg

SEQ ID NO: 3170 - DNA, 565 bp, Canis familiaris
  misc_feature (1)..(565): n = a or c or g or t
gagctgctnngactgctcnnnntcattctnnntctttccnggcagcagccccgcccacacacgcacacgcacacatacatacacacatacacactcctgccccaaataagtacccctacctagtcccctgcagttcagaagagaatttgatttgttggggaaactcttgccaaggggttttaaaagacaaaaggcagaacccaggtgcttaagatgcagggcagtgctcccttcaataaaccccgcaggcagggcagcaccagccactcgggctggcagttggaactcagtctaaggcttgagcgaggcagggattgccccagaactacttgagagtgatgctctctttccccatgagcacccagcagggacctggaatgcactagataactttctctgatgttggccacttttgtccaggctctcacttgatcaggaaacttttcttccctgtgagagtaatggctggattaccaacaacaacaaaagctggctttatttatgtttgaaaaggggggaggcaaggatagatagcacatgctgctacaaataaaataatgtgctt

SEQ ID NO: 3171 - DNA, 593 bp, Canis familiaris
  misc_feature (1)..(593): n = a or c or g or t
tggnngtcataaacgtgggggcgncngncgccgggatgaacgccgnngtgcgctcggccgtgcgggtgggcatcgccgatggccacaagatgctcgccatctacgacggctttgagggcttcgccaaaggccaggtgaaggaaatcggctggggggatgtcggaggctggaccggccaaggaggctccatcctcgggaccaaacgcacgctgcccgggaagtttctggaggacatcgcccagcagatgcgcacccacagcatcaatgcgctgctcatcatcggcgggttcgagcatcggcgcggacaccgccctgaacaccatcaccgacctctgccccgtgtctccggggtctccgccgctggagcggccctgttggcaccactaacccgttgctgggccaccgcgcgccccgtcctggtgactgttgctcctgctctggccaccgtgagccgattccgctcctgaccggctgcacctgccgtgggagggtcgatgtccgtccctcactgtccatgaccttcaccagtgctttactgcccttttctctgcccttggctggagtttgcttacgctcagtagaagcaannnaan

SEQ ID NO: 3172 - DNA, 230 bp, Canis familiaris
  misc_feature (1)..(230): n = a or c or g or t
ctgattatatcaaatatgaatccaaagattcgtatcnnnannnnnnnaacctgcnnnaataatacannnnncantncacacannnnnnnactgagcccttgaaacacggtcagtccagacagagatgtgctgtaagtgcaaaccccacactnnatttgnaagatctaatataaaaaataataatattaaatatcccaccaatctttatatgcnnnnnacttgaaacgata

SEQ ID NO: 3173 - DNA, 663 bp, Canis familiaris
  misc_feature (1)..(663): n = a or c or g or t
aaagatcacactaaagatgaattctgctttgcaacaaaaaaggtcattngtgacccctcagagactagctcggcaacacatcccagcagtgtnannnnaagtttatcaacactaccatctgattcttattacagccaaagtatagaagcagctgatgactggttttctgatgatactctagcaaaaaagagctctacaatgccttttctcagggaacctctaatggaaaaagtattttcatacctgtcaacaatttcattagaagactgtactgaaaatgaactgaatatgacactttatgatgatcagaaagatgacagcattaaggaaatattttcacgaagacatacagaggttgaaatacaaaaccttcaacacaatattgaatgactttttttcttttgaaactttgttacactgaaatcatggaaagttaaaactaaattaccagcttctgagtttcttaacatgctcatactattacttttcttgtcctttaccgttgagtggtcctacttccctcaccaattcttatttctagaaacaaaattataggaagaatagagtgacatcatgaacattaagcttaactccttgtatctcatcaaaggacataatatataacatgaatgtacttcaacatacaagagaaatactttaaga

SEQ ID NO: 3174 - DNA, 181 bp, Canis familiaris
  misc_feature (1)..(181): n = a or c or g or t
acccctccacctccctacccctcccctgccccccaccnnngcgccagagcacacctcacttctattgtttcaatagaaactcacttctatttttctctctggagtgactagaaatctcaactgaaggtcatcctctgaagtgggtacccaacctcttagcttttgtattcaccctcgatgt

SEQ ID NO: 3175 - DNA, 626 bp, Canis familiaris
  misc_feature (1)..(626): n = a or c or g or t
gtgaaacttnnactcgcgatnncaacatggngctggtgnngcaatgcntgtcttctctttataagaagaatattcagaggctnnncaagacctttttaacattatcgttacaagatatggcaagtcgtgtgcagtnatctggacctcaggaggcagagaaatatgtcctacacatgatagaggatggtgaaatttttgcaagtattaatcagaaggatggaatggtcagtttccatgataaccctgaaaaatataataacccagccatgcttcataacatcgatcaagagatgctgaagtgcatagagctggatgagcgactgaaggccatggaccaggagatcacagtgaacccccagttcgtacagaagagcatgggatcacaagaagatgattctggaaacaaaccatctagttactcttgaaactaacatccatcctgagttagatggaatttatcaccttggccagtggcaagtgttaggagggcagcagggaggaccaagcctgtgtgacctggacattaagaaattacattttgttttgacatcttcagtcctatgtgctttaagaaaaccattctctctgcaaagaaaggaaaaaaaattcaaactttaaagtctgtt

SEQ ID NO: 3176 - DNA, 613 bp, Canis familiaris
  misc_feature (1)..(613): n = a or c or g or t
accaaatctaatcttgccctgagaagaatatacatttcaagtttnntaagcccaatctagaaggacatgtgattagaaaatagtactagaaaaaaaaaaagaaagaaagaactagaatggaatggctctactcttccttctgtaatggtgataagcaaaaccaagggcttatgcattttcttcagctcctgaagtctaacttcacaaatactaaccagatagaagattgcctgcctctcacttaccaaggcaaaaatgttcttttgaaactggaactattggaaatggcctgctgaaaatgccctttatcatgttacattcttctacttgttaaccatgagtgatttttctccagtgtaattttgtgcctaagagaatgtgcccacaatctaagcagactctctaaatcctggctctacactcagctggttattaattccttgtgctcaatgacactaagcatttccttcagatggtaaacaagatagtgtaaaaaagaatcctttgcatatcagcctatatgagatgtctgaggtcagtgtctttggattgtgcatgctgtattgatgtagacaatatggatactgggtttccacctatgtatagacatttg

SEQ ID NO: 3177 - DNA, 574 bp, Canis familiaris
  misc_feature (1)..(574): n = a or c or g or t
gcagagacaactcacagcacacggnncacccaaaagggagcagagaataaaaacaaaagaaagattgcttcacttctatttccacatattaaggtaatttcagaataatgtttaaagtcatccatctgtccctttgtaaattgcttattttgtatgatctataaattaaaagataattttcagcgagtgctttgaagagaccgaagcttctgcattgccaagggaattaatctttcaacaaggtgttgtttgaatttatgggaactgtgaggtgagaactccctgagtgtctttacaaaccaacacaccgtacagaactgaaaatgaggaagggaagaagatagacccacggaaaatattttagtatatgggacaagagtagttgtaacggggtagttttgttaatattttttatcttaatcttggttttcaaaaaattacagaatgtgtataaatgaataaagaaaaatcatttggctgtgttttagacagcattagaatatattgttcagcacagtgaaatatatttgaaatttgatgaaccagaaatgtggtttcaactgaatattttatg

SEQ ID NO: 3178 - DNA, 47 bp, Canis familiaris
  misc_feature (1)..(47): n = a or c or g or t
ctcacaaaaacaannngaactgtgactttgagaggtgctcttgccaa

SEQ ID NO: 3179 - DNA, 438 bp, Canis familiaris
  misc_feature (1)..(438): n = a or c or g or t
gtccctgtcccccgccccccgacnnntggggtctccctaccattcatgctctcccggcctccccagcccgatgtccctcagggaagaactgggacctgtgtgtggggctccttgccagaaccacagnnagctggcaggggctgggggctgtggtctgctttgtgagcacagaagactggtgtcaagaccagcaggtgcagtgagtggtccagccagagcagccgcaagcagggccatcagtgagtgactgtcctcgtaggagctgccccaggtgatgggtaggatctcatgaggattccctttctagggcagggccaccaagcccagagggccgggtaggagtaaggatggaaacctggtgcacacaagccctgagttcagatgctgcctgaggacaaagggttctatgtgacgatgcnnntccaggaacggctgcat

SEQ ID NO: 3180 - DNA, 627 bp, Canis familiaris
  misc_feature (1)..(627): n = a or c or g or t
atnngagttatttagtacagaaagacaattgctatgtcaaagagtatngacacttgattcataatgccaaantngtcttcatcagagctattgccaaatcagtggtaatgttcatttccttggactcttgccagccatgttgactgcagtggtggtgttggctgttgttgctgttactgttactgttatttgggggcaagtgcctaatgtgtggtcttcagtgaacatctactgaatgtctgaaaaaatgtttattctctattaacaggtacaaaggtatttatggtatatgtatatggtgtatgtatatgacttgtcaaattactattaacatttcctatagccttagataatgcatggaaaagtatagttcagtgccactcgcaaagaagtgcccagtaagtgttaactattatttgtgtctccttcctaaaagtatgttgacctgtctctctgtaattgtggatttgtcactttctcttgacatttctcatagtacttgttttataaattttggagctattgttagatgcatagattcatgacttgtagtggaatgttcttttatcaatttttgagaattgcatttgtctcataacgcttttcatattgaattctattttgtct

SEQ ID NO: 3181 - DNA, 316 bp, Canis familiaris
  misc_feature (1)..(316): n = a or c or g or t
atgcagaggctgagaagattggaggcagctcctacnnnnngggctgcctggnctgtgccacggcctacttcattttccnnngcatggagacgcactacgagaaggttctcaagaagatctcccgctacatccaggagcagaatgagaagatctttgcccctcgaggcctcctgctcacagacccggtggagcgcgggatgagggttgtatccttcctggctgttctgtgtccagtagggcccacagtgaggctaccaaaaaatagggactaccctagggtcccctgctaggggatttcctaggacttctcacatct

SEQ ID NO: 3182 - DNA, 495 bp, Canis familiaris
  misc_feature (1)..(495): n = a or c or g or t
agcatcanncagggtagctttgagtctcngtcntcctgagaactgtaggaggctggtcngncntgcatggggcccaactaaagnnagaaggaagcatggtaggcttgtgggggacaaccctgcaaggnnnttcactcccagcctctcctcatgctagattatgtcacatacagaagtgcttttggtgggctagggagaaagctgagctgacccctgccacctttgnncnnnntgggaccaggtcacccacggcccagccaccaaggcacgggactggactctggtggcagctgtctgtgccaaacctgggaccttgggagaccatgnnttctgctaaaagcaattctgcatgaccagagacagtcctttccaaaatgtctcacaattttgtgaggggtccatctgatgaagaaagctacactgctgaaagctgactgtactgcccaggccgagccctcacaaagccgagtcccaggcacatgggcncttatgaat

SEQ ID NO: 3183 - DNA, 542 bp, Canis familiaris
  misc_feature (1)..(542): n = a or c or g or t
tccccagatccgnnngcatcaancagcagactnnngctatgtccccaacctgaggatgcccaacactttcatggcggtagcaatggatctctgcgataggaagtcaccttttgnnagcatccaccctcgagacaagcagactgtggcctaccggctgcacttgggggcccgtgcagtggcttatggggagaaggtgatctttcaaggaccactgcctgagaagatggaactcttggccgacaaggggctgctcaacctcatgtattcgcaggagatccaggtgcagaggcaggacaagatatttgagatctcatgttgcagcgatcatcagtgcaagtggctcccagctcccatggatgctttctcggctcagactctgactctgagtaccggttcttgtcatggcactctggctgctgttcgctatgcctgggccacatggccttgtgaatataagcagtgccccatctaccatcccagcagcaccctgccagcgcctcccttcattgctttcatgaccaactagtcctggagagcacagc

SEQ ID NO: 3184 - DNA, 684 bp, Canis familiaris
  misc_feature (1)..(684): n = a or c or g or t
tgatccataaatccgtattnntctgtacatgtatgggctttnnatnnnnaccaggtatgaaagacagtnnnncnnnnnntaagaccaaatttcacttttaaaaataccttccaacttatttattggttgttactcaattgcctaaatataaatatatatatatatatataatgtgcgtgagtgtgtatattatcaggcatatgcttctaacttttagatagggaaggagcaaaatctatgccagatactgtgtattctacaatggtgctaatctcagagctaaatgaattactccatataatttaaaaaaagaattttaaataattatctatgtgtctgtttcccttttaagtgttgcacatcatgttaacacattagtgtaaaaacagatgaaacaaccacatgctcaaaagtctagggatagtgttataatccctatttaattcaaaatcaactagaacttttccatgtgaaatggaccaaactggcattatgttatttaaacacagagttttaatgcagtatgacatcccacagaggaaaagaatgtctatagtgggtgactgttctcaaatattttatagaaaaccatgaaaggtgctctataaaaaactggtgacttttttttttttttgagtttccatgatagatttgagacttgtcaatagcaaatcatttttgtat

SEQ ID NO: 3185 - DNA, 623 bp, Canis familiaris
  misc_feature (1)..(623): n = a or c or g or t
cggtatgacccaaacanttancaatnnagcatgttgggagatatgcagacagcccgnnngggtgncgggctagntgtggccagcnnagtgatctactgcctaggaggatatgatggcttgaatatcttaattctgttgagaaatatgatccccacacaggacactggactaatgttacaccaatggccaccangcgctctggtgcaggtgtagccctgctaaatgaccatatttatgtggtggggggatttgatgggacagcccacctttcttctgttgaagcatacaacattcgcaccgattcctggacaactgtcactagtatgaccactccgcgatgttatgtcggggccacagtgcttcgagggagactttatgctattgcaggatatgatgggaattccctgctgagtagcattgagtgctatgaccctatcatcgacagctgggaagtagtgacatccatgggaacccagcgctgtgatgctggggtttgtgttcttcgggagaagtgaccattgttggagcgccatccagagctagtgaccagtccaagggacagtttacgggagagtcaaggatcctttccagaatatctatttctcactgtgtgcacaggnnnn

SEQ ID NO: 3186 - DNA, 376 bp, Canis familiaris
ccctcctcccagcattgtcatttcagggctgctggcggtcgccacggagcagtagattcatgtagagcctgtcgagtggggtcctccctcccgttctcatcctgagcaccagccaaccaggttctcagtttccccggtgaccgctgggtttggatcactgagggtgaaccgaggagaaaacaaaaacaaaaagaacaacccatgaccttaaattgtagaaatgtcactcagaaaatgctagccatttggcccgaacttgtggcaagacccctgtgctttctgaattcaaagacatgagggaaaatctgtgatcgacaaacactacaactgactggcatttctttcgtgcatagagtgttagttcgctgaaatttct

SEQ ID NO: 3187 - DNA, 614 bp, Canis familiaris
  misc_feature (1)..(614): n = a or c or g or t
gnnncagcacccgnngcagcanccgnngcagcacccgcagcannnnncgnngccccccgaggccctgccctgccgcgacggcgcnnaccngagccagcccgccgagctcntcggnnnggtnnaccgcacggaatttgaacagtacctgcactttgtgtgcaagcccgagatgggactcccttaccagggacacgactctgttgtgaacctccctgacggccacgggcccatctcctcggtggtgtccgacgccagctcggccgtgtactactgcaactatcctgacgtctgacggcccggcccggccccgcgcggtcctgcctgcgggccagaggcgcagcgcccagcgttacacttcctgcaggggctgaggaaaccctcggcctcgtgttgttttgtttttgtttttaaattgcctaggcatataatttatggtaatttattttgtctgccacttgaacggttggggggagaaaaatgtggggtggtctgtgaagatttgtccagatacttctttcccacagttgcgttgtcagaaccccatttgagttttgagtatgtcccagaataacttgctccgtttcctgaaaatttattgaccaaaaccattttat

SEQ ID NO: 3188 - DNA, 564 bp, Canis familiaris
  misc_feature (1)..(564): n = a or c or g or t
cagcggtnngcanatacatgaatatattaaagccagaatcttgattcttnngcaaaatacatactttctttttaaaatgtgtttttggtctgctttcagacatgttgacaggaccttaaannnnnnngagaaaaaacaaggtttgtaaaagcaaaaaattgagaaacattttgaaagaagaaagtgtaacatacttatacccataaggaaaaccttcggattctgtattagcactatggctaattagattgaactctggtcagaagaactactcacattaagcattccatgtcctgaatctttaaattttacatttactgactaaacagtatgatcagattatataccannnnttcagaatagtacaatgtaggatattgtgatttgccatatactctgatcatatctccagtatacagaaatattagtataattggagtccaaaggtggggaacactaagaaannnnnaacaaataggataccagaattaccttgtattcctgagttagaatgaaatgttattcggaaatgtttatgtgcttaaagccatctttgtgattgaa

SEQ ID NO: 3189 - DNA, 212 bp, Canis familiaris
  misc_feature (1)..(212): n = a or c or g or t
atttctctcctttcttgccctcccactcatctgtnnnncaatagatctcccgctccctctctcctgaccttctttttctaccgtccctgtctctgaaacgtctacagtgtggatttgcctgtgccctggcctggctagaaatgacactcttgagggcagtccaccaaaccccctgccccacaggggagacctaagagggcagactcagaaga

SEQ ID NO: 3190 - DNA, 632 bp, Canis familiaris
  misc_feature (1)..(632): n = a or c or g or t
gaaannagcagagtnnctgatatgtttacagatcaagaaaagaaacttannnnnncaacnnnagaatttaccagaaannatacccaaaccagaagtattattnctgagaccagtaataaaattgacactgaaattgcttctttgaaaacactgatggagtctaacaagcttgagacaattcgttaccttgcagcctccgtgtttacttgcctggcaatcgcactgggattttacagaatatggaagtagagaaactgcaatgctcctgttactgctgctgtgggcttcttagaacactactccaggatacactctgactgtgaatgttgcagcagatacttaatacaagattattcaaagtacatatggactaaaaataaatattttagaatgggaagaggtgttttaggtttgtatttgtgggtctttattatgttgaaaagctgtctttcaaaacctgatttgagggaaaaaaaaaaagccttttatctttatccttttaatagttcatagaaactgatccagttttcttgtgtttgcttgaacaaatgtatgtcatatagaatttctttgatgtctgctgcaaatttaaaaactgttcccaagcctacatgttattgtattcagctttc

SEQ ID NO: 3191 - DNA, 592 bp, Canis familiaris
  misc_feature (1)..(592): n = a or c or g or t
gtaaagaangagcccccagatatctgtcagagnngtacaatttcaagaaaaagtgatgtcaggcctcccaccaacccttccaagttttaatccagaagcaaatatggaaatgatgggtaaagggggcaatgtgggaaagagaaaagaaaatatgacctaagaatcttactttgggcgctgtttcctatacccagagcaaccataaaccttgccagggccccacacaaacatatcccacccaggcacccttctcaggtttaactgggggattcagggtgagtcttttactggccttggatctcaaaaggaggaggcagctatgacaagttggtcataaaaagctgaaggagagtttctggataccccccccccaaaaaaaggagctgattcctgccttgttaagacagctcaagatttcgacttcttcccttctttgacccctttgacccaagaattgacaccttttcaggcatcagaactgggagaaggagactgctgggaatgcttaaaaatctttcttgagggtggtataagccacaattgatgaacatnnnncttcatcctgtaannnnnntttgaaaagaaattgtat

SEQ ID NO: 3192 - DNA, 370 bp, Canis familiaris
  misc_feature (1)..(370): n = a or c or g or t
caannntggtgtgcttttattactttcatctatacacttccagtgnnnnaggctggacagannngctcactttagcactntggcaattaaacagaacccccttcnggcagaagcctattcgaatttggggaatgtgtacaaggaaagagggcagttgcaggnagcaattgagcattaccggcatgcattacgtctcaaaccagatttcatcgatgnnnnnnntaacctggcagccgcattggtagcagcaggtgacatggaaggggnannncaagcttacgtcnnnnctcttcagtacaatnnngatttgtactgtgttcgcagtgacctggggaacctgctcaaagcncngngnnnnntggaagaagcc

SEQ ID NO: 3193 - DNA, 502 bp, Canis familiaris
  misc_feature (1)..(502): n = a or c or g or t
gctatgagaatcctgaggatgaggnntngggtnntgaggatgaagactccttctccagcgctgctgagtcttacgagaatgaggatgaagagctggcccagccagtcaccaggacagtagacttcctgagcccccgtgggtcagtctgggaccccagcaaggaggcaacctctcttggctcccagtcctacgaggatatgagagggatcctgtatgcagccccccagctccgctctgttcgggcgcagcctggtcccagtcacgaggaagatgcagactcctatgagaacatggataatcccaatgggccagaaccagcgtggggaggagggggtcgcatgagcacctggagcacgagatgattcccttcagcctgggcctccttaagctcctcctgagatctgtatctgatcctgaaatctgggaacctaagcagacagcgtcaacatctggagcagcattgccttggatatgtgtatctgtgtgtgtgtatgtgtgtgcg

SEQ ID NO: 3194 - DNA, 574 bp, Canis familiaris
  misc_feature (1)..(574): n = a or c or g or t
acactgtgtganctctacgacacgnngaccatcactcnnnnnntnnnnnnnngtnncaccaaannnnnngnnnnntggctgacagagaagatgagagaagccaatttnnnggtgtcgtccatgcacggggacatgcnnnagaaagagcgcgagtccatcatgaaggagntccggtctggtgccagccgggtgctcatctccacagncgtctgggcccgggggctggacgtcccacaggtgtccctcatcattaactacgacctgcccaacaacagagagttgtacatacacagaatcgggcggtcgggccgctacggccgcaagggggtggccatcaacttcgtgaagaatgacgacatccgcatcctgagggacatcgagcagtactactccacccagatcgatgagatgcccatgaacgtggcggatctgatctgaggagctgctgtgctgacaaggcgctggtgaccatctgcctgcccggtgccccggctgggacatgcttagggacagtgtctgggtgacggggattgtggggctctccaatggaccctgggacgagccgttggtgtct

SEQ ID NO: 3195 - DNA, 670 bp, Canis familiaris
  misc_feature (1)..(670): n = a or c or g or t
tagncnntgctgcaaatactgtatcatcaggacttgaaagaaagggttggtgcntatggtngatccaaaccgatccagtgtgagactactgagtatctgataccaaagtcaggacatcatggcttttatgtttttaaatgttattggaatcatttaatcagtgagtcaatgttgggttttttttgctttgtttccttccttatctatattccccaaaattactttgggactgtgctaactgtatggttttaattataaaaatgaagtagcagaggaggaaaacatttctatacattcaacagagattgggtaggtaatctgaattttaaaaaatgttaagttatatgggaaataatagcaaacaggtgctaatttggatctagtataagcagcatctcaaatctttcagaagaactaatacaactgtatttgtgtgtcactgttgctttggagcttttttcttttcagaaatcatatgcccttaagatagtaaggacattattctccttgaactttggaattttcattcacaaagatatttttacaattgatactttgtttacaaaaatttctccaaaacaggtcatactagcctttgaaatctttgaagcaaatcctttgaagcaaatccttgcttaggtaacttgtaaccaaatgcactggctttata

SEQ ID NO: 3196 - DNA, 579 bp, Canis familiaris
  misc_feature (1)..(579): n = a or c or g or t
acgtgctatcgtgtcgtttatgattcagagngcangaaaccctccctgtgtgtgtccgtaggggacgggctgactgtggtattgtgttgaacccactggaagttgctgttgttgtgaatcagaagtggtccgatgtcatgactcagtcttacccgttgacatcatgcgaagccgtgtagccgttttgtgtttttatgtacaaaacaggggctgtgtgtcaggcacatgaagcagccagtgactttaccgtgcagtgtgacctgcaggtttgtaaccggctgtgcatgtgtgtcacacgagtgtgttagtgcacgcaggaatctgcaaggaaacacactgtctggacagcagtaaccctggggacgtggtgggggtgtgctggattacaaagggctaattttctaaatcatgtattttataaaacttgaagtttttgaaataagcctttatttcataatcttttttttttttatttcataatcttttaaaatactttttaaagtcatgcagattgtaatatttgaattttatatttgtataatcataaaaagtaataaaagattttcataagtagacaca

SEQ ID NO: 3197 - DNA, 519 bp, Canis familiaris
  misc_feature (1)..(519): n = a or c or g or t
ctgagcagcggcaattggtcctagctgagaagttcaaggagctgaaacgcagcaagaggctagagagcttcttgagtcgaaagaggcgccgaaatgcaggcaaggaccggagacatctccctttgagcaaagagtaataaagaactgttctnngctctaccactgccccagtgagaaatggatctgcagggacagacttgggcttggcctcttctggttcttttccactcaagggtgaggatcatagctgcccttgagctagattagctcaaagatgactagagggtcttggactaccccaaggttggacaagaagagcagctcagcttgtactctggcacacttcctctgcttggatctggttcatcatggcttcatgtcctcccatccttactttaaaccaatgattgtggtatagaaataaaagggccaatgagtgatcttcaggctggtnnagccatgaagtccgtggntgcctcctagggctggagccagnncgtaaacattcctgcccctctc

SEQ ID NO: 3198 - DNA, 672 bp, Canis familiaris
caaactcaagatacatttgttttaggagaagttaggattcttttaattgtcagttaatttccctttgttgacaataaagtctttaaacagcacatagagatgagcatgtaaacagggattcattatgtgtgctttccatgtgttgctttctacccaatgtgtttcctattttccagatttctcctctttgccctgccctttcagcctttctcagctaggccctgctgctctgaggggcatttgccataacatccattaaacctacttgtaactgtctcctttttttccccttgggccaggtcggggtatgataggtcggggaagagggggctttggaggccgaggccgaggccgtggacgagggagaggtgccctcactcgccctgtgctgaccaaggagcagctggacaaccagttggatgcatacatgtcgaaaacaaaaggacacctggatgccgagttggatgcctacatggcacaaacagatccagaaaccaatgattgaaacctgtccaccctactgtgagagactcttattcaaaagtcaccacatctgtaaataaccttgagataacagatggagaagaaacctgatcgatgctggaaggacctatcacaataggctatggacttatttgccaccagtttgtgcatttagtgtgttccttttac

SEQ ID NO: 3199 - DNA, 635 bp, Canis familiaris
  misc_feature (1)..(635): n = a or c or g or t
gaattgaaatgttaaaataaaaaccaatnnaaatgttagctgaaactatgtgacatttaaattaaaatttataaattgtgtaaaggaatgtgatttgatggatatacacataaagatatatccagattttccatgatactgctcatcatctgctgcttatataaccatgcactttcttagtaaaatgtagtacatgatcttgcattttattattttacaactattaagtggttagcttttttcacttatgctcataaatttaatatcaatttaatcatgataaaacagtaactcttgttacctaaatatttttaaaacagacatttaaaagaatgttgttcaggtttttgaaagatatggaatgggatatacagcctattcacatgttctactgaagtattaagtgaaaaattaaatcttcacaagaataagaatattctgacattagtgactaaaatgacaaactaaaatgaacaatttctggggagaaatgggctgatgctattaaacatatttctgcatacagatctgtttattataaaacacaaatgctattatttaggaaacaatggtacagtcttcaacattaagaacaaaatgacaattttaataaaattcacaacagttnnnnncnn

SEQ ID NO: 3200 - DNA, 581 bp, Canis familiaris
  misc_feature (1)..(581): n = a or c or g or t
acagatgccatcaggggcaaagttgggtacacgcgtnnnctgcatgtnnnnnagatcacgtnnnnnatgnnnnagcngggcacacacgctgtggntngagtggcgacagcnnatgcccccctgcactctgtcgggtatacaaccctcgtggggaacaaccatgagtcttggggctgggacttggggcgcaaccggctctatcatgatggcaaaaaccaaccaagcaaaacatacccggcctttttggagccggatgagacatttattgtccccgactccttcctcgtggccctggacatggatgacgggactctgagcttcattgtggacggacagtacatgggagtggcttttcgaggactcaagggcaaaaaactatatcctgtagtgagcgccgtctggggccactgtgagatccgcatgcgctacttgaatggacttgaccgtaagtgtcctgtgctgtccaatgtggcagtgttctcggacctcctggggtcctggctgctcctgatcaaaagtttacagtcattgaaactaaaacgtctttaagtagatatcccagcatattcggatcctcagag

SEQ ID NO: 3201 - DNA, 631 bp, Canis familiaris
  misc_feature (1)..(631): n = a or c or g or t
acttccnntgaacccggatcctgtgcacnctgnngccccatcaggcancctcttcntggaccactccatgccaggtgcctgctgtgagccagcctgagcccctggcaggcttgggaaccatgtgcccacgcaacccactcatcccaacaggaagcgaattccacaacacacagtagccaggcaggcatcactaccaggaaggggcaacgcagcaagaaagctggactgaactctggccccaattttctcttaaattttgaagatagattttattttttaatcaaggaagagaaacagaacagctcattcccattttgtaaatacttctacttggcaagtccagctctcctcagtgctaggtgcttctgggtacctctctcaagggacaacctcagggctgtttatagcaatgaccccaccatcagctttcccaggatgagtccaactccagtagtgtgcagaggagtgtgggcactgctgtccctaggaacccattcccaagccctgtcaccgagaattcacctccctgatggtgtcttgggtgcccttgattatggtccttcaggccaagcagtgggtttgattctacaaataggaagtgtaagcctgggctttcaccatgattttcccc

SEQ ID NO: 3202 - DNA, 589 bp, Canis familiaris
  misc_feature (1)..(589): n = a or c or g or t
gtnngagaccctgcngcactnctcnnncnctgagggnngctngagctnnncagtgcccaccacgcttcgnnangagccactgccgctnnagcagacggactggtcacggtcacagatgctggacctgggccccatcgatgcgctgaacttcttctgtgagcagcagcgggtccggcagcagcgcttnnngcaggaggagcggcagggcctgcaccccagcccaagcccgttggttcccaacacagtactgcctcagcccctggactgctggcactaccccatcctccggcttcaggaagccaagctccagggggctccaatgagactgaggggctggatgcggtcccagctctgggtggcccgtaccctcaatgcctccatccggatgctgaagctgccactgccgagggtggaacttcagcctttcccccccaactggcccaggcctgcccgtccgctgcccccactgctcnngcaacccgctttgcagcgttattttctgccagatgatatgaaccctgacagctacagttgaccaggccggtggcccagtctcttcctccccttggcatggagtcgggatgtggct

SEQ ID NO: 3203 - DNA, 571 bp, Canis familiaris
  misc_feature (1)..(571): n = a or c or g or t
catcacaacgaacgcatgttatntcacggttctcctttcattaatgccattattcataaagggtttgatgagcgacatgcatatatannannaatgtttggtgccgggatttattttgctgaaaattcctccaaaagcaaccaatatgtttatgggattggaggaggaacaggctgccccacacataaagatcggtcatgttacatatgtcacaggcaaatgcttttctgtagagtgacccttggaaaatcctttctgcaattcagcaccatgaaaatggctcatgcccctccaggacatcactcagtgattgggagaccaagtgtgaatgggctggcatatgctgaatatgtcatctacagaggggagcaggcatacccagagtatctcatcacataccagatcatgaagccagaagctccggcacaaaccgccacagctgccgagcagaagacctagtgaatgcccactggtaaaggccacattggatttcaacctgggactggattacagtggattgtttccaacaaaannnatattccgtcaatnnnnnncagcctagaaagaagct

SEQ ID NO: 3204 - DNA, 523 bp, Canis familiaris
atactatgacaactgcccatttttcttttggttccacacatcttttatacaaaataacaggctttatcttccaagaagcgaattggataatccccataaacaaaaaacatggaaaatttaccgtccacagtttgcagtcgagatgtatcaagcagagcagaggcctcactgggcagacagaaggaaccccagggccacatggggtggcagctccacagtgtcacctgggaggaaaggacctggagacatcaggcaaaaagcaatggtgctcaagtcagagtctggtgtctactgctggtgctgcccaaggtggttatgaagatccaggtggctgagggaggtacatggaaagaacctgaattctggatttgacgcaatccactgggtaaacagcaagccagaggcagactccaccaactccaccacttaacatcaaagggacagggcctagaggaggaaattagcaaacagcactttgtctcaagaacagcatttccagaggttaatgtagtagtggctacag

SEQ ID NO: 3205 - DNA, 565 bp, Canis familiaris
  misc_feature (1)..(565): n = a or c or g or t
ccgtnnactctcagttcacccacctggcttngatcaacactcccaggaaggaannagggttgggccccctgaacatccccnnggtggctgatgtaaccagaagtttatctgaagattatggtgtgctgaaggaagatgaaggcattgcctacaggggcctctttatcatcgatggcaagggtgtccttcgccagatcactgtcaatgatttgcctgtggggcgctccgtggatgaagttctgcggctggttcaggccttccagtacacggatgagcacggggaagtatgccctgctggctggaagccaggcagtgacacaatcaagcctaacgtggacgacagcaaggaatacttctccaaacacaactagactgcagacatgcggaaagcttgggctgttggcccccacctacacccctacgtggataccccatgctgacccaggaaaggccggacctgcccctttaaactccatgaccctggagggcttgtccaaggccttctcattctcccagctgggagctggtgaatggtgagcccctccctggagcccatctagctggg

SEQ ID NO: 3206 - DNA, 528 bp, Canis familiaris
  misc_feature (1)..(528): n = a or c or g or t
atcctctcttcccttccggacatggtatatactggctgtgcaaaatgtgggttnnaactggaaacagacaagaacaagatctacaaacagtgttacagctgcttgccgtttactatgaagaagctatactacaggccagctgtaatgaccgtggctgacggagggtgtaacgtgggcatccgggtgggatctcagctgatggagaagatgcttctcaacattcctcccgactggctccgcagagttatagcgccttgggccgaggtcacctatggcgcggtggccgcagacctgttgcactcactgctggcggccggcgcggcgccgtggctcctgcaggtgcacagcctgttcgtgctggacgacaacagctgcccgctgcagcaggagtgctccctgctggatttccaccccgacgcccgcgccgaggacgtggcaggtccttcgaggaccacgctggagtcgtgtgccttgtggaataaatgaaggacggggctttcccttggggttttaaatatatatgtgtat

SEQ ID NO: 3207 - DNA, 620 bp, Canis familiaris
  misc_feature (1)..(620): n = a or c or g or t
gtgctgcaagnnaaaaaaaaaaaaaacttctgaatgctttcttttccttaaannnagaaaatgactctaagtacnnagagctgactcctgtccccttggtttatgtgtttgtctctctctgccatcttaggttggcatgagccatgatgtcaacatgcttagccccccttctgtaactgcctccctttagttcaatggacagagtttcccaaggcaaaaactaccttctgacctggactggggctgggtgccccacccttgttcctcccccatcgttaagagccaggccaagcctgtgggggccccaggtcatgcaggatgggatctgtggtcaaaggatgggtgaggagccgtgggcaggggtcctgcccccactgcctccatctctcttctccatcttgcctttgtagctccagaaaactgttagtgtccagcaaaggggatacccagttctttccctgtggctttgctgttcccctgcctcctttttgtgtttttataactgtcaccagtttagccactgtttaaattgtatatattgttctgaggcgtctggcctatcccttcagtgagccatgcccacccttgtgttgtagtgagaagctgttgtcatgactaac

SEQ ID NO: 3208 - DNA, 570 bp, Canis familiaris
  misc_feature (1)..(570): n = a or c or g or t
cacaggnaccatgcacacctgcatacacatgtacaggcaacagataggtgcacacatgttcaaatgcacacacggttccgggcatacacacatatgcatgctagacaggcagagacgtgcctctcacacacacaggtgcttctggccagtgggtctttgccttgatcaagagagaaggatatagacttttggttaaaagtggttctccttctcctgggcatagtccacttctggacaactagacttgctcttggagaggagaggcctcatttggaatgagaaatgagaacaacccaaggaaaacccactgtcataacagaagcataggctggttggtggtcctttgtgctctgggggggtgtcttatatgtgcatggagtggtcccatagggggagggggtggtcctgcatgatgcaccaggggtcctgtgtatgctggggcaccttggtaggctgtcaggcacctacctgcccattgtggggtcatgggtcttgggtaggccctctcagcgaggggacacagccaacccttgctatttccctttttcttggggagtcagacttcgtaga

SEQ ID NO: 3209 - DNA, 589 bp, Canis familiaris
cagcacctcagcctccccagccgccatccctctccagccccggattcagccaattccagtgctgtattttgggttgtggttgccaagagctgcttggtgcctgctgtaaacctttatctactgcacgggcctttgcctgcctttgactcaggcttagtatagatgttctgggctgggccaggtctgtctgtccatctgggcctttctataggctgccttgcccttgttcaccactgccaagcccacccctcacagggactgtcagcctctcccaaagccctcttgtggcaagaactgtggagcatagcagggcaaatttgcttctgccccagtactgggaagactgaggtgcgtctcccctggtgaccctggcctagagcctaacaggctcctcaggagctacaggcacgggattagggattgctggagatccaggaagacttcctgtaggaggcaacatttgatctggctctcagccttaaacatggggaggactttctttttaagcactagctcatttgtcttttgaatttaaagaagtagatgttcattgtagagaatttggaaactatagaagaaaagaaattaa

SEQ ID NO: 3210 - DNA, 519 bp, Canis familiaris
  misc_feature (1)..(519): n = a or c or g or t
aaaccctgaccatgtatcccttnnnnnnctcaccacaggctcatganntctcttcaagtagtaagaaacctaaccctcaaggaaagaatcctaaatccctagctcctcctcttcctcccacctccagggagacccagtagacagtgccaaaaaacagctccaacctccagcagctggggaagagagccagaagctgccctctcatcttgccccctgcccccccaacccctgccaatactgtgaagccccctccctgcccagcctggtttcttgatgagggtcctgcagttgtgggccctaggggacccccagggaaaggccctcaggaaggaagggaccaagggcatccttgggccaaactgtctgcctctcctgtccactgttctctcttccccacttctgtcttcaaaaagctccttcccaagatggattgggtgctaggacaactggtccaatccaccagctctccctgccccgtgtcttatttcagacatgagaatacctgtacagtgtaaactt

SEQ ID NO: 3211 - DNA, 563 bp, Canis familiaris
  misc_feature (1)..(563): n = a or c or g or t
tcgggaagaannatccccaaacctgattttcccagagctgacggcatcgtcnntgaaacgtngactgatggccccaaagacacatcagtnnaagatgctctcgaaagaacctatgtgccccgtttaaagacactggaggaagaggtgatggaggccatggggatccaggagacgcgaagacacaagaaagtctactggtattgagcctgggagagcactcctccctctgcttctagccctgaaggacaggccactcctgctgcagacaccagcaaagagccaggagtcctcccctgggtgcagcctccccatcctctggtagcctggcacccctaaccacagtgcactggcttctgggactgacgcaagaggtgttggtcctcacacaatgatagagcctggatggaagttagccagcttccaggggggccaggcctgcaggttgtgggagagagactgtccgtgtctatgtctatgtccgtccgtggatgtgggtggtccagctgtggcaactctacgactcagtaggggttggtgcacgtctgtgttttcttacactgact

SEQ ID NO: 3212 - DNA, 531 bp, Canis familiaris
  misc_feature (1)..(531): n = a or c or g or t
actgagtcagagtctgagtgtannactacatgaataaaatngacatgaaataggcagagtcgannagagccccagtgcatagcagtcaggtgcacgggcttngaccannaaaccatgggcaaagcacttaacatctctgagcttcagcctttcattaataaagtgagcataataataatatctgcttaataaggtcattgtgaagcaaatgagatcattcatggaaagagcctagccatgtaatattaagcaaatgttaactattttaatcttttttcttaagctcagagactttaaagtttcttgtgtggatatatgtgtttttagcaaatgctcttcgtattagtaaaataccatcagagataattttaactaattcattaaactatagtgaaacccttatgcattattgtacaattttctgtagaagacatttttcttactgaaaatatgaaaatgaaaacaattccgtatggtcaggatactctgtcagtagctgataccattctgaatacctattcaaaaagataa

SEQ ID NO: 3213 - DNA, 547 bp, Canis familiaris
  misc_feature (1)..(547): n = a or c or g or t
aggattccccagttggggatgtctttgtgaattattttttactgtgttcctcggtgtgaatgtacagattggactgtagaagacagttctgtccgtttttaactctgaagtaacacctcacaggagctttgcgcttttgtacagacctttgtaacaattgtacagaaaacctactctgttagagaaacaggaaattatgaacaaatcgtgctggtttttctctgagcacaaactttgatgctgtatgtccgcggctgtgggatctcactaagtggctgatgtgggtcagcaaggccccctctgccctgtgggaacaccattcctacacgtttggattcagattccattgggagcacannngctctgggagctggcaggtgaatcttatgcttttcatcctggtttcttgggcaccttctagacatttactatcattgtacctggaaaaacacttttttccttcataatttaaaaagaaacagcaacaaaggtttgtccattcactccagtctgttaatgttcacatttttataaatatgagcattga

SEQ ID NO: 3214 - DNA, 507 bp, Canis familiaris
  misc_feature (1)..(507): n = a or c or g or t
ttagcaanngtggtctgtctgtcacactggcattctgtgggttggcagatttataaatccatgtnnnaatttccggcagtatattnntcttcgaggannatttttcaatgtagnacaaaacacgtttnnnnncagacccaaatatntntagntcttctgtaaaaggaaattattctttttatgaaaagaataaacttgtgtnngataatgtgtcagtattttatctcatttggaaattattcagatatttaatgaatatctatcatttaacttgtctcaggataacttcaaagtttcaaaccaaaaaaaaatttggaaactatttttaagtagacataccataatacataattattgttgcaaatgtcatttataatcttttatctcatggctagtgaatttgttacttgttttaacaatatgtttagatcactcatgaagatttcatgagacattaaacagctctgatcttaagttattttcttgctgacaaatcttgtaacagaa

SEQ ID NO: 3215 - DNA, 644 bp, Canis familiaris
  misc_feature (1)..(644): n = a or c or g or t
annctgaattcgtaggtnctcaggatgatttgaaggtnanctaggtaatttggtggggacaggtgacttggggaccctactcttctgccatctttccccacctctataatgtcttcctgacctttcttttggggcaaattcctccattgtgtcaacttggctaagtttttatcttttgtatgttattaagggttgttctgtttcttgcacctcggagtagtagtaaatttttaaaaagtcatacagtgtccagggcctggaacataagaaagtgtttttggtgtatgctgtgtgaattctgctgttgggttttgacagctctttcccacacatccatcctctgtagagttcctccttcgtggcagtgtggagttttggggcctttattgaggtgtggtttgatttgtttgttaacaaatgcctggaataaaaggaaagaaataaaaagaaaaaaaggaagtgggtgggagaagcctactccaaaaagaaaggaaagggaaccaacacaacacaaaaacaataaaaaaactatagtctgatttcaaagaaaaagaaaaaaaaagatttcttagtcaaaaaataaaaataataaaagagaagagagaaaaggaaatgtaaaaacaaacaaacagaaaactgtaagc

SEQ ID NO: 3216 - DNA, 254 bp, Canis familiaris
  misc_feature (1)..(254): n = a or c or g or t
ccacgttgctgtaatgtccacctgtttgtccatctgctgaaatgagaaaagaaatcttcatgcactgatnnaagacaaaccaaaaaaagaaaaaaaaaagaaaaaaaatcccttcccccttnntagctgaacaaaaacgtgcagttaatacttggcgcttgaaaatgcagtagtgaatgtggaacgagcctgtctgtatatctggtagctctttcttgcttcgnntttccttaccagtatnnnngcctcacgtt

SEQ ID NO: 3217 - DNA, 467 bp, Canis familiaris
  misc_feature (1)..(467): n = a or c or g or t
gttgcctgccccagcggncngcnnnnnaagagagctgtaggatacgccgagagaatgatcagattatgtccaacatggagcaatgggcaaaagagcaaaagatcgccaatgagaaactaggaaacaagctccgtgagcaggtcaaatatattgccaagctgactggtgaaaaggaccacctgcacaatgtaatggtccatctgcagcaggaaaacaagaaactaaagactgagatagaggagaagaagctgaaaactgggcacccaaggctgtacaccaaagccctaggccccagcaagacagagcccatacagaaggggaaagtgtgtgccaccttgggctggagggggacagctcaggacatgagccaaagaatggacatcaccaagtttgtcgggataccccactgctcagagcaggtcgacaccttctgctagcctgtcaacctggtgtcaagactagaagcc

SEQ ID NO: 3218 - DNA, 550 bp, Canis familiaris
  misc_feature (1)..(550): n = a or c or g or t
acctccntgtccnnnnngtcactcaaaacggnnngcatgcggtccccacgaacagtttagctggcagcacttacgccctcacgagccccttgcagctcctggcggcccaggctagttcatccacgccagtggtggtcacacgggtgtgcgaggtggggcctgaggagccggcagcggcagccgccaccccagcaaccccagccacagctgccacctctgcctcttccaccggggagcccgaggtcaaaaggtcgcgtgtggaggagcccagtgggactgtgacggcgcaggccggggtgattgcagctgctggcccgcagggaccgggaaccggggagtgaagtcgcctgcgagtgggccgagtgggatgctcgccaaaagggattctggagccgggccctgaccgctggcctcctgccacctggggaccgcaacgaggaggctccatgctgacctgcgcacgtgccaagcggacaggacggcctccacctgcctgcacccggacacactcgtcctccttgttctgtctcctgcccctgctgtggtttaa

SEQ ID NO: 3219 - DNA, 647 bp, Canis familiaris
  misc_feature (1)..(647): n = a or c or g or t
tgtacaaatgatagctgtnnnactgtagactatcctatatcaggcttggggttcgnngtgaacttcaaagttnnnctgaaggancagccgggcaaagcattttttaaatgttcagaggnnaaaagataaacaaacaaaaaaaaaaaccttaaaatcctacctccttaaacagccttcaaagaggagaatcctcagtgcaatcattatttttattcttttggtacctgttttcccggagttcccaattttattattttggggtggctccgagcattaagaggtttaatctttgatggcattgttctagttttaaaatttctagtacatttcagagtctcttagaagagtcgtgggagatttcgttttgttttcagtgaaagtcacagacttccttcttcctttactcacaaaggggaagagtcccccatatacatatttggatggtttgttgtttttaagaccttcagagagctcctagcatttagtaacagaaaaggcctgtgaaatcttaactttcctggccttgtctcttccagataggagcaaattaagctggtctctaaagccaatattcatnnnaccagagcccaggaaagacagctcataagtgtataattctctggagctcaattctatgcagttgtact

SEQ ID NO: 3220 - DNA, 650 bp, Canis familiaris
  misc_feature (1)..(650): n = a or c or g or t
ttcagccagtttcagaagagnnaagaaaanctnnacccaaaacagataagcagcttatccagtacactgcctttccacttcttgcattcctcgatgggaaccctgcttctactgttgaacagggaagtacagcatcatcagaagttatgtcctctgtagataaacccatagaagttgatgagcttctggatagcagcctagatccagagccaacccaaacttgatgcagaggagtatgtggcttctgagtattcattcaagaagaaatttggcttcctgaatcacagcttagaagagagccacccatcaatcttggacaccattgtagacttcagagatagaacacagccattcaaaatgatggaatacaatatcaacacacagagaataaagttggggaattatgctcggtgaacatcatctccatcctccagtgacccatcacttctggctccaccatcttctattaatgttgattcatcactggttagagtcaatttattaacctgactgttgtttgaagtgcggatgctgcatgaaagttaaggaagagagaaggaaaaagggtatttttaaaaaaatgatttttatacgaatggctaagatttcttgttaatccacaatttttcttaccttgnnnnnnacacacn

SEQ ID NO: 3221 - DNA, 700 bp, Canis familiaris
  misc_feature (1)..(700): n = a or c or g or t
acgatttcaagacnacgtatgatcagatgtacaatgacctnnnncggaaggacaaagatctctacacacagaacggcatattacatatgctagacagaaacaagaggatcaagcctcacccagaaaggttccagaactgcagagacgtatttgatctgatcgttacctgtgaagagagagtgtacgatcaagtggtggaagatctgactttgagagagcaggagacctgccagccggtgcatgtgatcaacgttgacatccaagacaaccttgaagaggccactctgggagcgttcctcatctgcgagctatgccagtgcatccagcacaccgacgacatggagaacgatatcgatgaactgctacaggagttcgaggaaaagagcggcagagcctttctgcacactgtctgcttctactgatgagcccggactggcgtggggcgccccgcccacactcaggaagccggcttttccttctcatactcccaacttgcttgtgttcgttttccttttaattgtctgctagtgactactagcacccaataaattagatgtatgaaatgagcagaaaccaaagcgccagattaagaagtcgagtttttttttctctcccacttttagttgtgagtgggcatggactgttatttacctttaaccccaaaaaaagnaaacggtgctttatagtacatctgnnnnnn

SEQ ID NO: 3222 - DNA, 558 bp, Canis familiaris
  misc_feature (1)..(558): n = a or c or g or t
tcgtgctttnaggtatnnnnntgacggggacatgatnngtaaagttcanggcangagatttgtgtacaagttngtctgtgacttgangactcttattggatacagtgcagcagagttgaaccgtttggtcacagaatgtgaacagaagaaacttgcaaagatgcagcttcatgggattgcccagccagtcacagcagtagccctggctactgcttctctgcagacggaaaaggataattgagcccaggaccttctgggagtccgaggtctttcttaaataattagagcaaatattgctcttacctttattactgaatttgaatcttatttctagactgtacaatctgatgcatgatttttttataaatatttcatactcttgtgaatttggatctttttactttgagcatatattttagaatatgtgtatgttaaggatcaccacaatgtcttcagcacgaagtcaggttcattgtgggatagtttgttaacagtcaggaaagctaaactggtcagtattaatgtctagccctaccaaaaatagccagtagnnnnnga

SEQ ID NO: 3223 - DNA, 497 bp, Canis familiaris
  misc_feature (1)..(497): n = a or c or g or t
attctgaaactgcnnnnnncattttagatcctccagtgccaagagaaaatatgctgatnnngnnnntagtgcctgggtggctggtgaagactctgagtgccagaagaaatnncagaaatngactgagtcggtttcagtaacgatgctgatggaatccacaggccttctccatcccttcctgggagacttcacaatttggaattttatagacaagattgcttcaactgacttttattttcatgcagccaagcacctctcaggactgtttgctcagactgcagatgggagatgggatgtagcttccttttgggaagagatcccgaatatcatctcctagcctggaggccccacaggaagcccacctggcttcaagaagtggcctaaagtctaattgcagggaaaaaattaaaaaatctgactctaggctgctacttcttaaatatacccatctattcatattttaagttttcaaaagtagtgtcaattttctcagtaaa

SEQ ID NO: 3224 - DNA, 626 bp, Canis familiaris
  misc_feature (1)..(626): n = a or c or g or t
ccctgtgtcctgaccctgcntgtggcgtggcggccccgtcactccaagggccatgcttcccccactccttacaacacagttattggaaagtattatcggcacctgacctgagatccacggtgatttttcaaggtcttcagtttattttcatattttcgaaggaaataggtgaggttcgcgggggtctgggtcctcgttcagaagactgtgaacagcttcctgccacctcctgtcgccttcctgcttgtctctggctcgttgctgccttgccgggtccccccgaaccccgggacgtgggccgtagctagtttgcttcttgtccgtgcagaggaggatggcaagaaaccccagcgggatctaagggcttttatagagtctatttcaaaaccacatgtggtattttcagccagaaaagaagttgttgttttctttaagtttgtgtaactgtttaatcctttcttgtgcattttgagtattttttaaagaaattaaatgatagaattccttaaaaaggccttaagacacatgttatgttctaacttcccaaacccagtctcctctcctgtttagcccaatgttctcttcgaggatcccttaaccatgctttctttagaatttttacccaa

SEQ ID NO: 3225 - DNA, 373 bp, Canis familiaris
  misc_feature (1)..(373): n = a or c or g or t
cagggnnnnagccannagtccccnnnccttggctcttgannngccagaggaggccagaggtntgggttttgannaaatcnnacatnagcagcnnnagattatccaagnnnnngatgcaggcnnnnntgccctgtcctctatcataagtcgccannnanagatggggaaggaaattgggaacgaactggatgnnnnnnnnnnnataattgatgactttgccaacctggtggagaacacagagagnnannnccgnnnnnnnnncagnnnngtgaacatggtngncagaaagtcaatgtctnnnnnnntgatcatggtgattttnntgctgctcgtggctattgtggtcnnngcnnnnnnnnnnnnnnnntagtga

SEQ ID NO: 3226 - DNA, 558 bp, Canis familiaris
  misc_feature (1)..(558): n = a or c or g or t
tnagtggtnctctacatgnntnccagcccctatgactnnngaaaggattttccaaggcatttttctccagatcacnngctcccanngcatacaccagcagcatcaacattacctgtgaatnnataagaaatgcagaattccaggtgttgcccaaaactgactaagatcatatattgagagagggacccagtgatctgtgttttcacaagtcctccaggagatttggaaacactgtcaactgacaactgcaaccctatttttaagcacctctgccaaactgaaaatgagaagccatgcaatgtgaccgtagccctcttgccaggatgattggctcagttactacaacttcctgagtgttggcctgccctccctttgctttgacttctaggaactttgacccagtagaaaagttctcatgaagaaaattccacaagtgattacactgaacatttttgaggtggatcaagcggcaaacaacattgaagctgcctggtttctgaagttatcatcaacacagagggcattagaagaaaagggggcatgcttttctgatgtctt

SEQ ID NO: 3227 - DNA, 491 bp, Canis familiaris
  misc_feature (1)..(491): n = a or c or g or t
gttnnggtcnngncctgatcatctctgtgtcttgagtttgaccatgaatgtngacctgttcttaccgcagaccttcaatggaagtagttggtggcctgatgcccctgtgcttgtcagaggagttggaggagttcaactcttggagcaactcatccaagatctcctgggtgggtcattacaaaaagagccagctactggtgccaggaggcatcagaggccttccccctaatctggggttccaggttatggcagatctagcaaccaaaacagtctgtggggacacatacggtgttccttgcagcactgcagaaatggcaagagaatggcatcaggtcacgtgccaagggtctcgaaaatctgaatccgtgtggcagaccgcctcatttatggactactacaaagatctatagggatacagctcatgtcctgttgggcctacaatgatttgatgtgttctgagagacgacatgttatagagaaacatatagaat

SEQ ID NO: 3228 - DNA, 607 bp, Canis familiaris
  misc_feature (1)..(607): n = a or c or g or t
tcaaagagaagttttcctacatcatcatctaaggctgagcgagccccatgtctccctccctcannntcagagcaggtcaacttctgcttcattgcatcgaatctctcagggaactgactcaccacgaaccagacactgagcagggcctagaggaatgaaccacaaaagattgtttatgctctgagcaaaaagcaagtcacaaagagatgcagacagctgtactctccctcccatcatatggacagaggcagagcgacggccaggaagcatgactgcggagtcaaaactagaaacataaatgtcaccaggtgtaatgggggctcatttggaggccgagtacaagggaccctgaagacccaagagaaaacgtggtcagctcaacctgagaaggtcgttcgcagtaatgtcaccatagcagaatggtgggggtgcaggtggctattaatggacagggatgaacatatttttttgtctgtgttaggattgtttagtgacggggatgccagagtggcttagcagtgcagtgtctgcctttggctcaggtcatgatttcagggtcttgggattgagtcctacattgggcttcccccagggaacctgcttcaca

SEQ ID NO: 3229 - DNA, 595 bp, Canis familiaris
  misc_feature (1)..(595): n = a or c or g or t
agtttccttacagactttgaagccggttgctgaccnagcaaacccgaaaattggagtgnnngcactgnnnttcagtccagacaactacttctnggcgacaaaaaatgacagcatcccgaacgccgtgtggatctgggacatacaaaagctgaaactcttcgtggtcctggagcagctgtccccagtgcgtgccttccagtgggacccgcagcagccccggctggccatctgcacgggaggcagcagggtgtacctgtggtcgccggcgggctgcgtgtcagtgcaggtgcccggggaaggtgactttcaggtgctttctctgtgctggcatttaaacggagactcattggccctcctcagtaaggatcacttctgtctgtgtttcctggagactgaggagagggttggcaccaccttcggacggccaggtgaccacacgtaggacccatacgtatccaggcctgggtgtgaacagagggaaacaccccccggcacctgccggctgcagagtcgggaccagatttctctggggagctgctgcagctagtggcccagatgaaaggactcgcttttatttttctatagcatttttgta

SEQ ID NO: 3230 - DNA, 505 bp, Canis familiaris
  misc_feature (1)..(496): n = a or c or g or t
aggactgggnnngctcctgtgggtcatctgaacacagagaatgtgaagtttctaccntgctttttcttactctcctccttctggatgctgacccagagacaaaaactataagcttcctggacctgacccctggacctgtggaatgaggctctccagcccaggcattggtattttctacgtgatgcttaggcagatgagagcttgactgtcactgcccaacactacagattccacatgcacagtgtaccaggcactctgccccttcacggcgtaagactctcttgggcttcatgagtttgcctgccataacctggtaaactcagatgaaagcttcagcccttgagatgaatgagaatatcttatattaaagcccaaaatggggtggaacccatcctatgctctcacctaaccttgcaggtgtcctcaaagtccatgaaagtggcccagcccccatagttcccaggagaccaccactgtaattccactcccgtttccccaggcaaaa

SEQ ID NO: 3231 - DNA, 603 bp, Canis familiaris
  misc_feature (1)..(603): n = a or c or g or t
gggcgtggcagggatgctggagngctgtggctaccaggctgaagggagctggggctgcatgggctacacacttgtgcgggaattcagcaaggacctgtgaggactctggaccctggaggaagggagagcacttaatgagcagctactgtgtgcgggttgagtccccaggcctgcataaggcaggacactccactgcaggctgacggctctctgtaggcttgaacttttcgcagaggtcaacctgtccagccccctgacccggattttgtctgcactgagaagtctcctctgtccgtctgccaaggttgcacaatttatgctacaggcctgggcgagatcagtcgggaggaggacaggaggcccgcaagtgtgcccacccccatgggttaggacctgcggtcaggggcaccccaaatgggacgaggccctcctgggaacggggaggggcttgatgtctgcacagaggggatgagcagagcccttacaggggaagggagtctgaccagagcaaggccctggcaaggatggagggcacagggctgcccatgccaggcccctccccagaaggtgagctgagaggggcgccagccaaacccatctggt

SEQ ID NO: 3232 - DNA, 507 bp, Canis familiaris
  misc_feature (1)..(507): n = a or c or g or t
acgggatgagctccgaaacagcaatgaagaagcatgcangaggggtcgctgaatacagagcgtctgagggcaagactgtggaagtgccttacaagggggatgtagaaaacactattctggatattcttgggggactgaggtctacctgcacttatgtgggggccgccaaactcaaagagctcagcaggagggcaacgttcatccgggtgacccaacagcacaacacggtgttcagctaaccttgaggatgaggtgacgtccagctcgtggaagcttccactcacacctgctttcccacctccctcctgttacatcagagtttctggctgttctgagtggtggacgactgcctcctgctcccctacccgcaccctggaggctctggggctcccctcgtgccttcggggggcccagaagagggccctgacccagtccgtggtcagagcccagctgcctggaactcataacctcattgttaaaactannnnncctctttctttctctctc

SEQ ID NO: 3233 - DNA, 577 bp, Canis familiaris
  misc_feature (1)..(577): n = a or c or g or t
agcacagtgcagcnnnnagaccagccaannnnncatccgggcgtgccctcagtgtggaggacgtgagcgcccccagccaggtgcgcacggtgggccgcgtggtnnnggtgttcccagatggcacaacccagctgcagctacagcgctccccggagggcacttttggcttctgtgtggcctccgggaacgggtgccgcgactcagggttctacgtgcaggagatggctgatgcgagcgcggccaagctgtactcggggctgctgggggtcggggacgagatcctcgaggtcaatggggccaaggtcgcaggactgggcttggctcacgttagggagctcctggcccacgcagagagtttgtcaatccgtgtgctgaggcagaggcctgtccctcggtgacacacaggtgcttgtgccctcactgccaccctctcagaagccctgaactgccccaggagggccggctggaaacgcactgcacaaagctgcatcttggacccagagaggtcacagtggcgcgtaaccccttaggctgcggcagggcctcggtgagggcaggagcctgtcgctgtgttttg

SEQ ID NO: 3234 - DNA, 498 bp, Canis familiaris
  misc_feature (1)..(498): n = a or c or g or t
acaaaaannnaagaagcnnncagaaccatcacctgcattggttnnttctttgactgttacgacagagaaaacttatacgagcacnnncagcaactctatanntggatcattgnnncgcttggaagatactgnnnctcgatttacaaatgcaaacttccaagaagtctctgcgcacacaactagtggaaaagatgtttcagaggctagagggtcagagggcaaagggaagaagtcttcagctcacagctcaggtcaaaggggaagaaagcctggtggaagaaacccaggaacnantgtgtcnncagctagtcctttccagcaaggtattaattatgatgttttagnnnnnnntaattgttcttgcaatgatgantnnnnnnttaagttttgtaaaaagaatttatttcttattcnnnnntantggatcattggagattattttatgatnanttgctgtagtaagattacctgaagattagtgttccttgttaanatntt

SEQ ID NO: 3235 - DNA, 618 bp, Canis familiaris
  misc_feature (1)..(618): n = a or c or g or t
tcatccagtgtnggctcntggttgctgannagaccccaggctcccggncagcctgtgacacagggcggcagcgtttaagtgcaaagctgctgtggaaaccgagtggggactttactgatagtgacagtgatgacttcgaggaagctgagggccggtacttcaggctcagtcagcagtcacgctgccctgacttcttccttttcctctgccgcctgcttagcccgctgctcaaggcctttgcacaggctgctactttcctccaccagggacagctgcctgatacggagttgggctacaccgagcagctcttgcagttcttacaggccaatgcccaggaggaagggttctttgagtgtgcagacccaaatcttgccgtcagtgctatctggaccttcagagacctgggggtgctacagcagacacccagccctgcaggccccatgctctacctttcccctacattcaccagccgggaaaatcaggagaagctggaacagttcatccggcagttcatctgtagctagaactgtgcggggtggagcctatgctgagacttctcagccccagaacatggctgtgtcctggagccagaagactgactggagccgggggggcggg

SEQ ID NO: 3236 - DNA, 555 bp, Canis familiaris
  misc_feature (1)..(555): n = a or c or g or t
ctccccagccccnntnctgccaggtttcaggggggtggtggaggacccangtcttggnnagctcaggacctggggtgtttgtagttttttgccttttagaaaagaaaaaaaaatctttccactatttagtttttgattctgatgactcctttctcttctactctctggcccccaatttttataaactgtttttgagtgtcccatggggcagggtcgcatatctttgccctcctccaagccgctcggctccctcccagatcctaccctccagcctcgccagttgccaaacactaaatatgcagacactcacctgtctgacctcccaccatggccatgaacacagcctcccccacaaaacccccctcaaagttcaggattggggagagggaggaggggaggaacagtctccctgatttttcaatataatttttttccagagtttgggttttttgggcttatccttattttttgacaatttaggggggacgaggggccgggcatggcaagggggttggcctgagggtcaccatttggctcaacagccacgtttttgta

SEQ ID NO: 3237 - DNA, 524 bp, Canis familiaris
  misc_feature (1)..(524): n = a or c or g or t
gtcacaagtgcagatgaagaagcagaaggtgtctacacctagnnnctacacgctttccttcctcaagcgccagcgcaagggcctctgaactgcctgtcagcccatgcggtgggaggaggagggcactcaatcggatggaggcgccaccccagtcacccaactcccccgcccgccccnnnnagcccaagccccgcccccgggcctagggccctacgcccctccttcaggccccacccccacccggaaccctggctgcaagttgctggagtacttaactactccagggctctgcggttcgttgagatttagagcccatcccccagaatcccagctggccaatggaaacctcactttgagctccatcattaatctttaaaggtccaagcactggaaacgccccacttcagaaccgaggctctaaccttgggccagaccaggtctgctcaccgttgctcccggcccgcgggtctcaggttttgccctacacccaaaaagcacaggtccngccttcaacccgggaacct

SEQ ID NO: 3238 - DNA, 519 bp, Canis familiaris
  misc_feature (1)..(519): n = a or c or g or t
ccagggaacagggcagtngccaaccctactgccccagtccatcgtctagagaccatcatgttagacgatagtgacccagagagaatgggacgggcttggctcttcaccagagagcacagactacctggaggcccgaggctcttcctgccaactcccatcttgggtctgagcactgctatggcctcgaggtggtgtggtgatcctggccttacagagcctttttccttttgcccttcctcacccacttcatccagcagtttatgcccacaccggggcatctcctgggcacagacccacacactttgagccgtctcacctggggagagctagtgtcccgcccgcctgatctcggcatgctggttgatcacttcgctttaggacctgcacacctggtgtgtgctggtgtgtgtgtgtgtgtgtgtactgtttgtgccatctgggtacccctctcactccctggagtacactcatgggcacactacagtgaggacatcaaggatgcaatatttatggattgct

SEQ ID NO: 3239 - DNA, 564 bp, Canis familiaris
  misc_feature (1)..(564): n = a or c or g or t
acaaagacaaaggcaggaccctccagannacctccacaagtagtgaatcaggggaccaactgaaaaggccttttngaannttccgatctatcatggagacactcagtggcaaccagaacaataataataactaccaggcagccaaccagctgaaaacatccacgctgcccttaacctcacttggaaggaagaccacagatgccaagggaaatcctgtgagctctgctagcaaaggaaagaataaggcggagatgtacggcagctgcgtcaccctctcttctaacctgctgaccgaagagcctctgcgtaaccatgcacggcataatgacatcagtagaaaaatgaagaaatcctacagcatacagcacaatgctgagccagagccaaaagaactcttcttgtaaatcacttttttcttatctctcattgccaccctttggacaccattggaaatttctggactatccactgtggaaatagaatcatgagaacaatgtctcaccagcagaagaacaatatcaggatgccttaaatttatagtagcagactatataatacacattt

SEQ ID NO: 3240 - DNA, 524 bp, Canis familiaris
  misc_feature (1)..(524): n = a or c or g or t
ggaccaannatgtgctctnngagagcatcagnnacctcatcgactaccacntgcagaacgggcagcccatcgtnnnngccgaaagcgagctgcatctgcgcggggtggtcaaacgtgagccctgagccaggtgatggttcttggctctcgtcctgctgcgcagatgcccccgtcgtggccttagggctcctcagcctctctccaaactctggtcaggctagaaccgctgctgtctctccttactccggttgggcctctggatctcccttcttcagctggccctgggctgggtcagcgaggccaagagatgggggcccaagaccccttcgtcccgctgacccctgcctgcctccaccctctctctgcctggggtgaggccgtccataccaaagacagaaccttctctcacctttaaagaaaatatactacggaaacgcagccgtctctctccgagccttggccagggtccctgcgtggctcaggaggttccgtctctttgcccgggggggacctcagctcatctc

SEQ ID NO: 3241 - DNA, 546 bp, Canis familiaris
agaaccagcatgctgactggagaaatcaatggtgtaccgctgtgaagatctaaatacaatcacacagagagctccgctccctcaggaaggactcttttccctgtgtccgcttctgaagatctgtgaaggaacatggctgtggtctccagtccagctcctggtgccagagtagaacccaataagcacccgtgggaaggaattcaccctacgtggtcaactccagaattttcagggggagtaatcacttgcagaattcaggagatctaaaacctatcatgccacactgggcggtagcccaggatcttctcactgcttctgtcatcgtttatctgtgaccctaaataagatgcttgtgaccctgcatcctgacttgaaattgtcatttaaagttcagtagggtctaattttctcaaaaatgagagaaataaaaggttcctgaggaaatatcttgaggtcctgttttgttctctcgtcagcacaaaccaaccccagaatatagctctcagaactgataagtaaactgaaattttaatggtcaccgctgtg

SEQ ID NO: 3242 - DNA, 698 bp, Canis familiaris
  misc_feature (1)..(698): n = a or c or g or t
cagaagacatcnnagcnctcaantgtcagatatgannagcagagagctccattcccaagctcaagaacaactgcaacactannntatgggcannncnntagaagagagagcccagcagcacaggnaggctctgatggctcagatcagcaccaacattgaacagttaatgaaggcancgagtctgaannaggcagaagggaaagaacctgaactcttcctaagtagatccaggcctgtggcagctaaggccaagcaggcccatcttactgccctgaagcatatacaggcaccttggtggaagaagcttggggaagaagcaggagatgagattgatgtttcaaaggatgagtttagtttagaattaggaactttattcattggtggaaccaaacccccttaggaagctatccagagaaatgacacaaatcctttattttagattattttggttctgcctctggcatgctagtagactagagctatcttttactcatggctttccagagattcctctccaaataagattttcaggcagtaagcaaagagttgtcttcccactttttgcagttctattttcctttttccacacgaccatccatggccacacatacaaattaagaatgtggcttttatgtggaactaacctcagcacgacattctgtttatgtgaagttttctgttgttttgctgttttccta

SEQ ID NO: 3243 - DNA, 521 bp, Canis familiaris
  misc_feature (1)..(521): n = a or c or g or t
ctaccccannnactacactggggacgacgggtatgtgagcgacacnnngnnntnnntcgtgtnnnncaatgagcacgtcaagaccgactgggaccgtgccaaatcccagaagatgcgggagcagcaggcgctaagnngcgaggnnaagaactctgatgtgctgcagtccccgctggacagcgctgcccgcgacgagcnctgagggccagtggnnntgtccccggggcctgccgcgccccccgcgccccatcctgcagacccccggcaggctgccccgggctgtccgcacaaggcggtgtccagccagctcttgctctgcaatcacgtgcacgcaggcagctttcatggagtgcctactgtatgccgggaacagggcttggcaccagggggatcagcgggacccagacaccgtcagtggcttccgaacacttgaagtccttaccctgtaccaggctcctatgtttggcactgagtgatgcataattactccttccgtcagggattgattcagccatcaagct

SEQ ID NO: 3244 - DNA, 646 bp, Canis familiaris
  misc_feature (1)..(646): n = a or c or g or t
tcaatgacaaaatgatacantagaacccttattcatattgaacaattaacaagggcttgattgaatgcattttagtttccaaagaaataacgtnnaagcagatatttaattatccattatcactttgaggaatttttttgcacataaggaatcaatttatgttgctatgatgatttcagttgacacctttattgaatactggtagtgtttgctagataccacactgaaatggataaatgggcaatggagtcttcacaaaggacaaatatatcctgagttggcttggtattttcatactggtggcaaaataaactgtatttcctttttttgtaagactgctctgaaaatggaagacatcttaacattttggcatatgttcagtgaagtgatgaactatatgaccccaccccagacctactgccatgttggctctatatctaccaatccaacaaagatcttgtttgaaattttgcataagcacaggtttaaatataggacagttaatatatctatcagttctttaagtaaagctaaaattaaatcttttgcacagtgttcttagaagaatacatgagcttacataagaaagctaataattcaacagaagatggtttattaataaattgatgatttatcttaaaacata

SEQ ID NO: 3245 - DNA, 645 bp, Canis familiaris
  misc_feature (1)..(645): n = a or c or g or t
tcaatgtcgtgagannctgcttggcacacacnncagagctgaatccacactggcacgcatacatccggtcactggannagctatcagatgctatgcacggaacgtatgacattgaacatgtgctcctgaacttccatgtgcttgtgaatgatgctgtaatgcaggctcacctggatggacagaagttatcagaacaggtcagtaagatttgtggccgtccaatcagaacagctacacaaagcccccgttgttcttttgatggaagcaaagagaagcatgggatgaagatctctcctaggaatgatgaagagacacttgccaacggaagaaaagaatttatcaacagccttcgactgtacaggacattctatggaggcctggctgatgagctttgtgtaaatgaattagccgctgctgatgggctgccgtgctggaatggggaagatatagtaaaaagcatcacagcaaatgtctaagtccatcttgccatacttctactctcagaacattttcttgctgtaaccgcaacgtggcgctgcagtgacaaggagtcccggtcgatgctccaggagtccagtgaaatcaaacagttcaaacattatgagcgaagcccaagagcagcacctgaaagcttgcattttgggc

SEQ ID NO: 3246 - DNA, 576 bp, Canis familiaris
  misc_feature (1)..(576): n = a or c or g or t
aggccggagggcctnngccccagcaggtccctttttgctcccgtcnngcgggcctaggatgggtacaagccagggatctaatgagagcaccacgggatcctttcctggcccctcagtaccaactttgcggagcaccgagcggtagacgctacccccccaagggcccatgctgggagcagccccaccgaccccgactcgggggcgcgggcagagagggtcctccttgccacccctttattcctactcagactgttgcacgcactccagacctagggaggctgagcagtgagcccctgaggtcttcactccacccctgccccagccacagggtcccagcgtggggactacaggccacctgccctctctggggtctacagcacccccagctggaaagacaggaagaagctaattagggcctcttcctccgcactgacccccagttcagtccaggaggggacctgctggcccgtctccctcaaccccctggcgcgtcgggctcgtgaatgccacccagccagtccccggaccccggcctcgtcctgtgccgacgccccnnnnccctgaccgtgctaactg

SEQ ID NO: 3247 - DNA, 536 bp, Canis familiaris
cgctgtgaaatccaaggcacaggaacacccagtacctgctgagtttgtttttaagggggaaacagaagagctcagagacaaagactccaccaacccaggtgtacaggaagagttgaagaaatgaattgtttccaaggactgcataatactgcttgtctgatgtttacatatgtaaaaaatatacaatttatcttttgcgagtggagcgtgaagaaaagaagtccaaccaaaagggctaaaaccttgggcaaaactttatttcgtttaatacccactttcaagggattattctatggataaaaagttttggcaaggtattgtgtaatctaggcatctaaattcctcagcctttgttatataaatagggaatgcatatttgacttcactttacagattatatatattcatccagcatgtacgcacatacatttatgccgtaatgtgttttaatttaaaggaatctgcattatctatgctctttatcgagttttagccaaaggcagttatgcttctggcttatgaaaaccaaatataat

SEQ ID NO: 3248 - DNA, 597 bp, Canis familiaris
  misc_feature (1)..(597): n = a or c or g or t
tcaaggtgttggtnngcaacagaggtgtnnacaagagcacatactgtgactaccagctcaccttnntgctgcatatccatgggctcccactcagtgccaagcgggcactcttgatcctcatggtgtcatccagcgtgtttattggcctggtgatcctctatatcgtcttctgcctcctgctgcctgttgtggtgaaggcctgcaacacgctccgctggaagataaacaacatcatcacatcggagtcctactacacctacacttccccttctagaatcgttagtgggacatctgagaccaaatccaaggtcagctccagcgtcagttccaaagtggtggaggagaaagaggaggcccctgtggaaacctcaaagaagcattctattacctgaacctcttgcctgcccacccccaaccagtgctctccccttacttcctgcaccatcttggaaatgcaactatcctccgtcccaggcatttttttttttttttttggttttgcttcaattttcacttctcctttacgcttaaatcctcatttcaggaccagctatgggcccctgtaagggctcatgttcagttagtttgtaccacaca

SEQ ID NO: 3249 - DNA, 86 bp, Canis familiaris
  misc_feature (1)..(86): n = a or c or g or t
acctccgctacacaccccagcnnnngnctctnnnnggagtcggtgctggagctgttggcgtagctcagnnnnncagaggatccggg

SEQ ID NO: 3250 - DNA, 630 bp, Canis familiaris
  misc_feature (1)..(630): n = a or c or g or t
ggatgacactttccacccgnagtggtttgtgtccctttttgaacagaaaacagttaagggctggtggccctgcgtagcagaagagggcgagaagaagatcctggcaggcaagctggaaatgaccttggagatcgtagcagagagtgagcatgaggagcggcctgctggccagggccgggatgaacccaacatgaaccccaagctcgaggacccaaggcgccctgacacctccttcctctggttcacctctccatacaagactatgaagttcatcctgtggcggcggttccgatgtgccattatcctcttcatcattctcttcatcctgctactattcttaggcatcttcatctatgctttcccgaactacgctgccatgaagctggtgaagcccttcagctgaggactctggcccaggcctggctgccttcttcacctaccttcgctgagctcctccagaccttcaggcctgaccaggctgccagggtgggcagacagactggcacatgcaccaagagttggtgccatcgagtgctgggatcattgctgtttcatcatttctttctcccccaatccaaccctttttggatnnnnnnnatagatatttcagtaaaaaaaccagtnnnnnnn

SEQ ID NO: 3251 - DNA, 628 bp, Canis familiaris
  misc_feature (1)..(628): n = a or c or g or t
gtagacatttctttgtacnncagaattctgattattttnaaacagaggtgccaccacaagggttgtnnnncttactctcnngcaggtcttaatgcagctttgtgngaaaggtctctgggtaggcaagtggtatttggtctgctgcttgccaacccttttccccccagggatgctgtggtcataaagtcagaataacagcatattccaaatctcaaaagctattgtggcctgagcacagctgaaatctagcagagtctttcatatatagctttagagtaactcttctgcttctttgtcactcgtaattcacgttctgcctttgcttcagaacatgagcagaagagtcctcgtgacgctagttattattgcagtcatggttgaaagtcatttagggaaaggatttcaatataaagctgtggggctgcttctccccaattcctccctaacaattcattgtgtggacttctctcatctaaaaggttggtggctttttgcttgggatcagtgctctattcatgtgttgctggtctctgaacacattcctgttgcgttaagacttgaaagatttgtagatgtgtgatgttcaggcacaggatgctaagagctatgttantnttcttagtttgta

SEQ ID NO: 3252 - DNA, 577 bp, Canis familiaris
  misc_feature (1)..(577): n = a or c or g or t
ctcagagcccangagctggcatgataaactcttgtcagannnnactccttgccactgagaaatcatgactgtgaagggactctcagccatgtgtccacactccacacatgagaagtgagcacactggtcagagcaagtgctgctgaccctgtgggcagttagctccgagggaacagggtcacagctgtagaccaaccatacccactcatgacccaggcaggagtgctgaaatccaggcttctagatcatgaggaaccaggggaaaggatcatcaggaagaccactcagcacaaaccacatgccctagtgactgtgggccagctaggcccagttctgtgggaaacaatggcatatgctcagatgctgtcaataccccttggccatacgcaccacccgacccagccacggagagcaaagctctagtgaggtaatgtcatgggaactctctgagctttgggactagatggatctgtgtccagaccgcttctggagcaggtgactccgaactgctgggtgacctagaatgaccaccagaatctcagtttccccaaccataaaatggagatgataatgcaca

SEQ ID NO: 3253 - DNA, 591 bp, Canis familiaris
  misc_feature (1)..(591): n = a or c or g or t
gaaggtcgaaggccgaaggccttgtcaacaggtacatggtgtgagctaacagttagagatgtttaagcaggcagctaggctccaaaggacaaagaggttacttctatgaaatccaacatttnnaagctttctctagcttctcccttttcattaggccaaaaccatgcagcagtattccgtagtttcttgattctgtcctttgtatagctcttatatccaaaaaagtggaccctccagactttctgccctttttataacctctcaaaatactatgacattacaaaaggtgaacctctcttgaatctcagaatatctgcaattttaaacccatgataacctctttctttgtagcttttgctttcacatatcattggtaccagagatgttgagagagttttgagtgtcaaaaatgaaagctaacacagaaaaaaggaattaggctgtctacctaatactagacaatggatctaatagatgaaaaagagtgatctctttttttaatagaaaaaataatctgattcctgctacatcaagactaatcttgtttttgtggttttctcctatatcatagactgctttcacatcaacttg

SEQ ID NO: 3254 - DNA, 479 bp, Canis familiaris
  misc_feature (1)..(479): n = a or c or g or t
gcactggatnnngctttgtcctnngtcttccctccctgcngnnngccttggcnnnnnaaatgcaaactggnnnnnagggtcagagcccattccctccnnntccttatggtggcttttgagcactccagntgtnnnggggcgggcttgcctccagcagtagggactttgttacttgttataattaagtaggtgtccccagccttgtggaatgtcccagccagaggacatcttgtctcccctcctggagtcactggacctgagtggctgacagcccgcctggcacccagccctctggttatctcctcttgctcttttgacccaagtgaatgtttatctgctgggctgatgggttgngggtgtcgggcgtggacacacattacttgtttttatccttcagtctgtctgttttatccttcagtctgtctgttttatccttcagtcttctgttctctgagcatcctttgtgccatgaccttttc

SEQ ID NO: 3255 - DNA, 580 bp, Canis familiaris
  misc_feature (1)..(580): n = a or c or g or t
gcgtgatcngtctgcgcnagcaggagtnnnngcntaggctcagactggtgtggctggaggtcatcatctgggcagctcttatccctctgggggagctntcgctttcatttgnntgagatttcaaattcgtcataccaaactactttcacagaaaacctgagattagggcccttctggacctctaccactgaaaggagtccctggcacagagcaaatgcttgagtacacatttgttggatacaaggaacctgaaattctcttttttgagggactgtggaaaagcagatggatccaagcaaaatacagaaaaaccttgctttaaagaaacccaacatacagaaacctctattgatacaaaaacctcctaaggagtgacttcttcaacagatctacaacgctactgaaaaggaagtttcttccatatcttaagtatcatgtttgagacacattttattttagggccatgccccattgtataaagagaagctcatctgcatttatctctgaaaagagatttcttttgaannnnnnncctccctcctctgcaagccctggaagacatattgacaaccggaggatt

SEQ ID NO: 3256 - DNA, 595 bp, Canis familiaris
  misc_feature (1)..(595): n = a or c or g or t
ccaaactccatatatttttttaatgnnnnngaatttnngnntcgcccccatnnnnnactaacttaagtataacttaaatatgtgtatcagaacaagccacacaaccacacaacctccccttcttgagcctggcacctgacaacagattcgtggtttgaacttcagaagcatttcactttgtagcccattgctcagggcaggggatctcagccaggatgtgcaatagaagcagaagactgtggccttccgccatgtgtgctgtgtgatcccccggtcctgcgctacacctgtcctgcctcctgaagtcctgtcttcctccttgctttgatggactggggaggatggtacggggtggggcaaacaggagggtgtgaatgttctggcaacagggagaagcaaggaggacagccgcactgccactctgctgccacactacagtatttctgcctggagccctttgccctgtccctcctcctccgggaggtgctgtagagccgagggaaagaatttgctccaggccaggagcatgaattactactgttcaatttctctcctacttgaccttggtaaactgaaatgttgggggtgaagagaa

SEQ ID NO: 3257 - DNA, 523 bp, Canis familiaris
  misc_feature (1)..(523): n = a or c or g or t
aaagtacaattcacatgaggaaaacacctagtgtgtcacttacatctntgcatccggacttaatgaagattctgggtgacatcaacagtgattttactagagtggatgaggacgaagaagttattgtgaaggcaatgagtgattactgggttgttgggaagaagtctgaccagcgggagctgtatgttattctgaatcaaaaaaacgcaaacctgattgaagtaaatgaagaggtaaagaaactttgtgcaacacagttcaataacatattcttcttggattgaccgatagtggctcaccgaaacatcttttgaaaaacaactcagcaggcattttgtttaccactgcaggttctcggtcatattattgactgaattaatgacaatagtaaagcaatacttgctttgaagaatcaaatttctactcagtctgatgatcccctggggtttttagattttaaatatttatgcggaaataattaaaggtagttggctacatctctttcattccattcttttgacat

SEQ ID NO: 3258 - DNA, 645 bp, Canis familiaris
  misc_feature (1)..(645): n = a or c or g or t
ttatgnngcatttaaaacttaaaagaaannagaccactaaaaatattgttgcctaaaattattttatatctaagaagctaaggacagatatatgaatgggtatattttttgcaccgtttaagactatctaaggtttcagtcacttatgcacttctttattgagatataattaacacataataacatcatgtgagtttaaggtgtacgacattgattttacgaatctatgttgcagtgattgccactgtagcattaactaaacacctgtatcctagtagtatcctgtattctgtgctcctagttcgtgatatagttttgttcctcataatatctgtactgtgtatgctcttcaggacttatttatctactagttgcaagtatgtacccttaaacaacatccccccacccaagcctttggtagccatcattctctctatttgagttcagtttttttgtttttctcttaagagtccacatataaaaatatgtagtatttgtctttctctgtttaacttatctcagcataatgtccttaagggcattctgtattaccacaaataacagcatttcctttttcctcatgactgaatgatattccattgtgtatataccacatcttctttatcctnnggtggacacttaagt

SEQ ID NO: 3259 - DNA, 451 bp, Canis familiaris
  misc_feature (1)..(451): n = a or c or g or t
annccgccgccatccaggactcggccatgcagccctggcagccgctgggcgccaagtccatcctgggctacaacctcaagaagagcatcgggcagcggcacgcgcagctctgccgtcgcatgctcacgccggagatccagtacctgatggacctcggcgttaatctgtgggtcactaagctctggaagctcatccgggactttctgaggtggtgacatcccgccggccgccagtccccctctgcccgctggatcgcagaggaggggcggggcaggggccctcctggtgccaccccgctccggggtgaggtggggctgctgccggggctcgggcggccgggactgggcccctggcacacagagcctgaggtccgtatttgactaattatagctttttaaagagttaaatccccttccctccaaaaaagaatgttctatttcctgcctcccct

SEQ ID NO: 3260 - DNA, 609 bp, Canis familiaris
  misc_feature (1)..(609): n = a or c or g or t
ggtcatcacggccccagcaagcnnntagcatggcccagcctcttcccacatctggcttttacaccctgcttcagcctccactttcctgaggcctgtgtcaggcaggaagaggatcagtggctccagnnnnnagtggctccagggactggcaacagtgtccatgtatatgtgcgagcaagcatgcctgggtgcacacagaatgcagacacacgtgccactgggcaccaccgcacacactgtgctcctgccatctccttcagcagaagcgcgcgcacagacatagtcacnnnnnnacacacacaccctgccacgtgcactcacccacaggcacatggaatgtgcacacgaccaagaagacgtggagcactgccagcagcaagcagggctctagcgaaccacctcttcccctgcctctaaatgccccattccagcctctcctcagcccagcttctccatacctagacagccatggcctttgggaaagacagataatgtatgtcacatgtgtagggtcagcaagctacggctcagcagcactatacaactcagaaaaccgttgcttcagggaccatgggcagacaacaggaaagtgccaggccattcattcat

SEQ ID NO: 3261 - DNA, 422 bp, Canis familiaris
atattttacaacacagctacaattatcaatgaaaaattatggatgataaaacccatcctcacacataaaagcctcatccacatttacttttactattccaaaatgaaattcgtaggtagtgtaaccagcctctatagacatacatcaatttaatgtcctaaatgaaatataaacaaatgcagaaatattttatagtgaaataatcattttcctatgtaagtgttctagcatggttgtattacaaggggtgttgaaataatgaaacaaggcacatatatacttgaacctatagataaaatcaccatgaatgtggcagctacaaatggagtacaggtgtgctctgttggcaactcaatgccaagaacagatcaatgtcagtaatacgattttctaaaatgtggccaattgttggtaaagctgta

SEQ ID NO: 3262 - DNA, 311 bp, Canis familiaris
  misc_feature (1)..(311): n = a or c or g or t
ctgnnnncntnngtagactgacatnnnnnnnaccacagtgattnctgtannnnnnnnagtcttgatagtgagcccagctcagctgtggccttgtgtcctttcatctgtgcctagcaagcagagcccgnngaannnnccgaaccctcctnnccttccatacagaatacctggacaagagagaacttgctgtgggttgctttgccttttaaagcacagctttagagctcagatttgtggtttgctcacttactcgatggcttgaaaagtttcagtttatacactggtaccatggctcaagatttcccactttg

SEQ ID NO: 3263 - DNA, 672 bp, Canis familiaris
  misc_feature (1)..(672): n = a or c or g or t
gtatgtgtgtgtgcgggtgtgtgtgtgtgtgtgcgtgtaaggtttatgttgctgttatnnatttacagactntataaggttttatgtatttttctttcttccgnnagcttcctaaaaagtgattagcatctgcactgaaatataatnnaacagcaagggcaaaaaagaattggaagttgtaaattcctaaaatcactacagtgacgatcactctagaaatcgttgcttatgtagcagagaccaaataaatatatttcagacacaacctttagctcagttgattttggacagctgctttttatcaagacagggctccaggtggcaagggtgccgacttccttacgcactggcaggaggacattgcaccttccacgggggtgggggtggattataaatgggcaaggggactaccagattatgtatttatttgttttcatagctaagtggctgaagccctgaggctttcagcaacagagttgaaagtgtggtttttagttttgtgaatggatgatcataaagaaaaagcattttttaaaaagttggcaaaacgctgaaacgcactgtggtatgaagcgcattgcatatccatagcactgaagtatccgttttccattcctgggctgagatttttttccccgtggttgtattgttctgatttcacgtacaccagag

SEQ ID NO: 3264 - DNA, 689 bp, Canis familiaris
  misc_feature (1)..(689): n = a or c or g or t
gcgagtccaactccgtnnagtctttgggcttctgcagcgtgatgcctcnnnnagctgnnnnctacntnnntnggannnnnnnnntctatgacctgtctacgcagaccctcaggcatcagtgtcagcaccagtcgggcatcgtgcagctgctgtggnaggcaggcaccgccgtggtttacacttgcagcctggacggcatcgtgcgcctctgggacgcccgcaccggccgcttgcttaccgactaccggggccacacggccgagatcctggactttgccctcagcaaagatgcctccctggtggtgactacgtcaggagaccacaaagctaaagtattttgtgtgcagagacctgaccgctaacggctgcggcctctgctttggtgttgaggggtgaagggagaccccaccagcagaggcggtagggcccggggaggaggagggggccgcggactgtgttccaaccccttcagccgacttgccccctccgtcccttctcttaagagacccatcccttggccccccaccccaccctcacccagacctgcgggtccctcagaggggggtcaggcctctttctctttcaccttcatttgctggcgtgagctgcgggggtgtgtgtttgtatgtggggagtaggtgtttgaggttcccgttctttcccttcccaagtctctgggggtggaaagg

SEQ ID NO: 3265 - DNA, 557 bp, Canis familiaris
  misc_feature (1)..(557): n = a or c or g or t
acgctcacgggnnagggggacatgagcagccccaacagcactntactgccgccaacccccaccccgcangactcnnnnnnacctccgagaccannnngcggggccagaggcagccaaggcctcccagtcaacaccatcatcgacgtggaccgtgtggctggcttggcacccgggcaagtcagcagcatccccagggtgcggacaggtccccagaggtcacaggccagtgggcccctgacatcagagctccccagcctgagccccgtcccagctgggcctaccaagttcaaggccagccagcaccatgcaaccttcgtctgaggcgcctgaagccccatccccactggctgtccctcctgccgccgcatctgagctgcctcacctggacacgtgtggaggcctgtgatctcgtggggacagccccatatcacctcgagggccttggaggggccatattggccaccacgcctttgggagccaaactaggcgagggcagagtggcctagccttggacgctcgccatggctggctcagagggctcctcagaccctgccctg

SEQ ID NO: 3266 - DNA, 319 bp, Canis familiaris
  misc_feature (1)..(319): n = a or c or g or t
agggannaggttcagcccacccctgcctccnncctctttcannnnntgccttacaaccacaaagagtcagttctctggttccttnnnnnnngacagctggagggtgactcttcaaaatgtgtatttctgtctcaaggtcacaggttcgcccctgaccaggagactgcagtcaggaaccagttccccttgcaccatcccaaaggctgccttgggcatctctgcagcccactgaccctgtcacccagctgttggaacccggtttccccgagttttcaacacggaaaggtgaaggaggnngcggggaatgacgttccccgcc

SEQ ID NO: 3267 - DNA, 570 bp, Canis familiaris
  misc_feature (1)..(570): n = a or c or g or t
cangagnctgaactgacatccactcccaacttcgtggtggaagtcatcaaggatggtggcaagagggctctggtactggactgtcactacccggaagacgaggtggggcaagaggaggaggatgagagtgacatcttctccatcagggaggtgagcttccaggccgtgggcgagtcggagtggaaggacacgaattacacgctcaacaccgactccctggactgggccctgtatgaccacctgatggacttcctggccgaccggggggtggataacacctttgcggatgagctggtggagctcagcacagccctggagcaccaagaatacatcactttccttgaggatctcaaaggttttgtcaagagccagtagagcagcctgacgctgagcggggacagatggcgggccctggccagggaaggagcccgcggtgaagcaggacgtgtccctggagatggctttcttcctgatatcatgcagaataattcagatttaaattatttcctttgccctcttaactactcttcatttactgcttctgtacgactctcccactcctagattttt

SEQ ID NO: 3268 - DNA, 429 bp, Canis familiaris
  misc_feature (1)..(429): n = a or c or g or t
tctctaccaccatagcttgtgcgctggnntgggtgcacccaccccgcatcgagagcccccctccatgcacccaggcacccacctaggccacaggcctgggactctgcacctgaccggggacccctgtccacttctctggctccacctccatccgtctgtaatgccgcaaggggacacacccaggctgaagtcatctcttgacttagaccttgatcctcacccagcgaggcccaaggaaggacaggagtcactgcaagtaggtgggggggggggtcccctccccagtcaggatcctcaagctccaagtccggggtgccctgagctgaggggattctggagcatcttgccaaagacagacttttccagggggaggatggcctgccctgccacgcccatggcacacttgtgaccaccctggcccnnnnatgt

SEQ ID NO: 3269 - DNA, 624 bp, Canis familiaris
  misc_feature (1)..(624): n = a or c or g or t
gcacgagctnntcccagagcannnnntcatgaccannnnnnaggtgacagagctgctggccngatacaaactccgagagaaccagctgcccaggatccaggcaggagaccccgtggctcgctactttgggataaagcgagggcaggtggtaaagatcatccggcccagtgagaccgcaggcaggtacatcacctaccggctggtgcagtagcggctggctcagtcgtctgtcaccttccggggggcgcggaagtggccccacttcgcactcggctggtctcggcccgcagcacagacatgacgcctggttgtgccgctccctccctcccggcagcccagagaccattgggggctgtggccaccatccccacgctgcgcgccgggtggctggcctgccctgtgggagccacggccctcaggaacctcactgctgcttctgggtgctgagccctcgctggacctggcacgagctgcctccaggggggacgggaggccacagggaggctcgcaggtggctggtgacagtggtcctgggtcaggtttctggccgcccggcactgtgctgtcaccgtgccccgtgggtggccctgaggcctctgtctgtgagcacacaccccgcagcag

SEQ ID NO: 3270 - DNA, 494 bp, Canis familiaris
  misc_feature (1)..(494): n = a or c or g or t
tcactcctccttacaagtgagaatgctctggnnnngcggggttaagtggcttgcccggctatggaatatctgaactagcangacacagaaagctgggccactacagggataaacagtctctaccctgaaaatatgatttcttggaactgccgctctggagggaagcaagcttctacttcagcccagaactcctcgctggattgacacatcaccacccaaagtaaaagtggctgcggggggctgggaggagggttgggagagatgtttcctttgggagctgggtgtttagggacccaggtggcagaggccctggcaaagcccttgaggcagcaccgtctcctggaaggtaggtcatctagtggatctggctcaaattcacatgagggtctagggaactgagccctgtctctctgcaaatgacagggccaccagagccgggggttgactcgtcacaggcagcggctaattcagatcctgtgattgaagacttcgaa

SEQ ID NO: 3271 - DNA, 539 bp, Canis familiaris
  misc_feature (1)..(539): n = a or c or g or t
agctctgttgctgcaggtgagaagtccgcaaagaatcttgtgaagcagcaagtacaaaagtatttgcagaaactgtgggtacccttgtgtataatatataagctaagtgagccatattttttcttgcctcttctggatgttcctgcctgtgttccctgcattcccttggttaattgtcaggggtgagtggggccaaggaaaagagaatcaaatctgcctccttggatccacaccccatgtggggcttctctaagtttgtaataaatatagggcctttagggaaagaggctgcacttttcctttgtctgatttgttcctcatggagaaaatggacaaaagtatgaaaacttgggtgtttgtgtgtatatatatatttttggcttcatgcatggcttctcccctaacttcctcttgcacttaaaaagagccaggcttcaaattagacttgtaaatacagtgttgctatttgacaccactcctgagtagttccaagcttgcttgtggcagctttcctggcggannnnntgcttccctccttt

SEQ ID NO: 3272 - DNA, 608 bp, Canis familiaris
  misc_feature (1)..(608): n = a or c or g or t
atcacttgcattgcagataccggagagcatctccatccnntcggtgaaagcacagctgttctgaacattgtgtgtgttagggtgggttcccggggccttttgtgctaagacgacagcactgacctgttctttttcccaccagcgctacacgcagagcaatgggcgtaggccatttggcatctctgcccttattgtgggtttcgactttgatggcacgcccagactctatcagactgacccctcggggacataccatgcctggaaggccaatgccataggtcggggtgccaagtcagtgcgtgaatttctggagaagaattacactgatgaagccattgagactgatgacctgaccattaagctggttatcaaggccctcctggaagtggttcagtctggtggcaaaaacattgaactggctgttatgaggcgagatcaacccctcaagattttaaatcctgaagaaattgaaaaatatgttgctgaaattgaaaaagaaaaagaagaaaatgaaaaaaagaaacaaaagaaagcatcatgatgatggaatcttgtagtgatttttaaattcagnnnntggaagattctcaaaannnatatgtaggcat

SEQ ID NO: 3273 - DNA, 445 bp, Canis familiaris
  misc_feature (1)..(445): n = a or c or g or t
ccttgtggnnnccgttacgagcccctcccccagccctgtcatgnnnnnnnggcttcccctgcctcccatctcagccaccggggcagggaccctcctacactacagaggggcccggggaccccctctcccccctagtgccttcccccccttgatctccagagcagcttggcccagggaggggggtgtgggcgctgcttagctgatccttccctgacccagaggaaacctctatttatttattagcttttgtttacaccctggacttgaccccttcctccaggggtcttgggagggggagcccagggcccttgtgacccctccctccttcctccaatccccagtttgtatttagctgccaaataagatccccactggctcccctttttctctggggggtcagggtgctgtctcctcccctctgtttacatctcccctccaccccgct

SEQ ID NO: 3274 - DNA, 397 bp, Canis familiaris
  misc_feature (1)..(397): n = a or c or g or t
cggtggtnnnggcccacgctggggcttgcgggggggcaggggggtgcacnncacattcctggcaggcgaccctagctttggcctnctagagtatgaagattcctgacactagacacttcccgttggggacctcctgaaatctctcttggggacaagacactggggacgtgcggctnnnaagccagaggggctcctgtatctgcnnntgggctcaaccctcctgtctgagcggtcccttgaggggccacagnnnnnnnccctgnattcccnnnaggatccccccagagagaagcatctggannnnntgtggtttctttcccttgcacgcagcaaagcaaacnnnncgtcaggtnnccgggtgcctacatggtcctgtcagtttgannnnnnnnttcag

SEQ ID NO: 3275 - DNA, 640 bp, Canis familiaris
  misc_feature (1)..(640): n = a or c or g or t
aaatagtgcagactgtactctcnagtcttnngacatcgactatgcatttttgtgatngagnnntctgggtnnnnnnnntgtgggcnnnnnagtactctgaataatatggatgtcctgttcatcatgtttnnngctgcaaaggannaaagctttggaannaaaggggacggatcttttcctctcaatagagtgaaatgtcattggatttacacctccaaggttttatcaacagtcccagtgatgtcctccataaagaaagataattcctgtacnnncgaaggcattgttatcccataaccccattgattctgcatggcggaaacctgaaacgtgcaattcaattcaatcttctacaaccaccttggtcattcatcctttggagaataggattggtccttttctgttcactgatgacgtcttcttttgatttcatacattacaatagctgcttagaatctatatttcggggtgagaaaggtcaaaggggaagagggagtggataaaagtgctgcctgatgcccgagttaatgggcacagcaggtgggtgctgaagagcagcccactcttttcctcccctcctcagcagagagcctgcttctccccttccacctactcttgctcctgctctctctctctcaaa

SEQ ID NO: 3276 - DNA, 583 bp, Canis familiaris
  misc_feature (1)..(583): n = a or c or g or t
cacccatcccaaacttnnaactgaaaataggctccagacaccattatctcatgccttgtttgagattgacgnctgtcagtcactcatcagtatgcaccatagatgtaggaggttattttaatatatggcgctgtgtgtgtgtgtgtgtgctcacgcgcacgcgcgtctgtgtgtgtgatgtgtggtgtatacgtgtgagagaacttgctttccaggctggtgctttaaaagctggcttgggagcagtcagttgaagaggaggtcctcaaatgaaataaatacacagctgggtttttttttttaacggttactatgcctatggaaagtattgtttaaaagtatttttatacactgctagtctcaagttgtatttcagatcgtgcctgttgtgacataatagcaaatgtaaagaattctctttcccaccacttgtttataagccttagagttatttttagtgttcctactgttaaaatagtttttttttgggctttgctgatactggtctttaatatcagaaaaggtgaatttttctaatgaaatgaatccatgcatatgatatttatatgaatattttagcaat

SEQ ID NO: 3277 - DNA, 686 bp, Canis familiaris
  misc_feature (1)..(686): n = a or c or g or t
ggtncggcccaagggtgacaagatgcgagatgagctgtagggccccaggntcacggnatnnnannnngcagccgnnggctnnngagacacatgggtgctatgggggnnnngggggngnnngctgaggtactggccttggatgttccatggggtggggtggggaaacagagcaggcttcctgtgtgtctgagcagaccttcccagccagaattcactctgcttggacatgggctcccagataccacgatgctgagcccagacaccccgcattctgtgggacctgctaaatagtcctgtcctgccctcagagtcctgggattaagcctgcctcagtgttcatatttatagccaaatgctttctcatctgtgagatggaatcaaactagggggggttcagcccagccctgtggaatgggggccctctctccctgactctaccatcacctcagccctctctccagctctattccaatcctctcccaactcccctcaactataaaatgaggtgctgcagcccctgggacaggcacccccatgatggccctggccccagtgagagggatcgggaaatagcttgtgggcagactctggtcaggcatcatggggctgaacttttgtttttccttttgtagattttcaaaggtggggagggcaggggaaaaatgagcctttgttgctgtcaaacc

SEQ ID NO: 3278 - DNA, 513 bp, Canis familiaris
  misc_feature (1)..(513): n = a or c or g or t
tggtttattnngtattgtggtattgaatattgtgttccttttcatgaggcaacttgantgtaaacttcatgcaactatagactggaaaannccgagccgtgccaaagtctnnnnnctgtttcttcaacacgttgatccacagcacacatgtacaccaccaccaccaccaccaccaccaccaatgcttgtgaatgtatttttttctgttagctgggtttacatgtgatgttttagtgcttttgcaagttcaattcattagttcctgtatgaaagattgtgggggaaaataaacgttgtgccgttagcttttccgtcataacacccttccttctgtaaatacccgttaccatatttatccatttgtaattaaattatggtattaacttgctacagaggaaacaatatttataaagaatgtttcttaactataaatatgtacaattgtgggcataaactgtttcagattttttatttgaaggttttaagtggtttgatcatttctcgtgatatgtt

SEQ ID NO: 3279 - DNA, 223 bp, Canis familiaris
  misc_feature (1)..(223): n = a or c or g or t
tagcaaagaagttatgtctctattncccacagagannaatattcaaacatgtgctgtgtcagcaccacctggaaggttattaactagtggagtcccatctgtcctttggggaacgcagtgagggtcatcgttagtggaactgaatgttnactgctatacatccaagcagacaaacttagaaacttcccatttggtttnttgaaaacaaatttttagaaagaaa

SEQ ID NO: 3280 - DNA, 598 bp, Canis familiaris
  misc_feature (1)..(598): n = a or c or g or t
gnncctgcaagtcagnntaggcagggtgtccagcagagccagagggggctgcgtnnaaggtnnagggaccagaagaccnannagtaaagaacattgttggggtttgtgagagaagaggagatgtctggctggaagaccagggcccagacagggcatgggcaccagcttcgccctccccttccactgctctccagagctgggtggccttggcgggcacctcactggcaccactgcacagacaggccctggcctgaccactgccaggctgtccagggtccactgtcctcttgtgctgcccttataagctgggatgtccccactctttgtccttctcttccccagtgctgagctgaggagcttggaggaagggaaggccagctgtcctgctgcttgttgctgctagctgagacagtatgaactctgcagccccgattttcagcctcttcctcccggctggaggtgatttaagcttgttggatttatataacattgggaaacggtaaactgtgtaaatttgctatgttttccagggacagttatttatggagaggcatttttaactcaagtgtagaagtgttaaatcattataataaattca

SEQ ID NO: 3281 - DNA, 532 bp, Canis familiaris
  misc_feature (1)..(532): n = a or c or g or t
gtgggcgctgggtnnnngtcaccaggtcactgctctcgnnaggtcagggctctgggctcgcgcgcgccctgctccgtcagccttcttcccctggcgtccgtcttctccaagtgacggaaccgttatctgagacttccaagagggaaactgagcccttcccagtagcctcctgaacacaatgatcaggaaataatcctgagcgttcgtacattcattaaacacatactaacggagcaccttactatgtgctaggcactagggagaaacttgacctgggaaggttcctttcttccagaagcttacaggatccagctttccttatttggcgtggccttgtagctagtacctgagcacagtctttcctcttcgcagttttgcccagtgctgggagttcagttcttgttcctctgagaaaatacctctgtgccccagagcccacatttccccagatgaccatttagctccagggagaggactaggacatcctccctccctttagctgcctaaactgaatgaggcccactcagtagag

SEQ ID NO: 3282 - DNA, 569 bp, Canis familiaris
  misc_feature (1)..(569): n = a or c or g or t
tactaanggctgggaacttgacctgctacctaaaggtttcatttgggatcagactnnaggcccgagtgatcttctcctgtctcaccacccctttttacagtgatcacttgagggatacttctcctgagtgtctcggagtccttccataccatccattgtggcgcacaggaccctctgtcccttcttcccttgcttggtggccatggtgggtctcatctgccctgtgccctgctctggatgctgtgagcgtaatgctggccaaggaagcagaggacataagggacagaaacaggctcttggggctcaactttctccttctctatcatcctggtcttgggcctggacagcaccaccagtgagtgcttgaggcacccactgggctgcaggccttgtcccttggccgtgcgctgtggcctcctcggtgccatcttacccctgctgtgctgcccactgtggggtaggggttgggctctcaagcaacacggacccttcttccctcgccccctcccccaaagggacgtgactttctttctggactgtttgtattgaaacnnnnnnggtgtcaaata

SEQ ID NO: 3283 - DNA, 629 bp, Canis familiaris
  misc_feature (1)..(629): n = a or c or g or t
gcattccttcacatgccttcagtgaatgccagcaattatccatnnnctgtactngnnttttctctgnnnnagctaaagtttgccctgcaagatgagtttttggaggtaaacaaagtaactggatacatacacaggtaacaccaccggctgacagtggggtactgctgcaggtacccatgtcaaatctgcacttgactcaatagagcaatttattcttgatgtatgcaattgcacagtgtaagtatattaacaaagcacactaataaataatttgtataaattatatatattagatctcggctatggtttttacattctcccatggggaacttcttccttcctgatgtggaattgtaaatttaaatttggtcggtgtgacctttgcagtatcatcaagaagcacagttgaacacagagagaggcccatggctgatcctaccatgtgcctgggtgaatgtacatagttgattggaatgaagttttatgaatattcgtgatttttgaagcctttaatttctgtctgcatattagcttttaatgtatgattttaacaaagaatactttgacacctgtaaaaatcaaaacactactctttttaagacatttcacaaatattcacttacattaca

SEQ ID NO: 3284 - DNA, 566 bp, Canis familiaris
tggattacatcatcagaaatacagacaggggaaatgataattggttaatcaaatatgaaaagcagaaacagggaaaggaaattaaggaaacaaaatggattgatgataaagaatcacttattaaaatagctgcaattgataatggtctggcatttccctttaagcatcctgatgagtggagaacatatccatttcactgggcttggcttcctcaagcaaaagttcctttttctgaagaaataagaaatttaattctaccatatatttctgacatgaattttgtgcaagatttatgtgaagatcttcatgaactttttaagaccgacagaagatttaacaaagccacttttgaaagtcagatgtctgtgatgagaggtcagatcttaaatcttactcaggcactgaaagacgggaagagtcctgtgcagctggtacaaatgccttgtgtgattgtggagcgcagtcaaggtggaaatcaggggcgaattgtccatctgagcaattcattcacccagactgtccactgcaggaagccattcttttcctcctggtagcagatgtacttt

SEQ ID NO: 3285 - DNA, 563 bp, Canis familiaris
tcgacaagaatgatttaagggacacctttgctgctcttgggcgtgtgaacgtgaaaaatgaggaaattgatgaaatgctcaaggaagctccaggtccaattaactttactgtgttcctaacaatgtttggggagaaacttaagggggcagaccccgaggagaccattctcaacgcattcaaagtgtttgaccctgaaggcaaaggggtgctcagggctgattatgttcgggagatgctgaccacacaggcagagagattttccaaagaggagattgaccagatgttcgccgccttcccccctgatgtgactggcaacttggactataagaacctggtgcatatcatcacccacggagaagagaaggactgagggggctcaccaaccaaccctgggcttgtctttggtggggatgtagtccctgccctcctctcactttgcccagtaatgctgccatccctgctaccggcccgttagttgtgtggctgcctcattagccaccttcatcttctttgcagcctctgtggcatatagataccatgtggccacatatcctgtagatgg

SEQ ID NO: 3286 - DNA, 574 bp, Canis familiaris
  misc_feature (1)..(574): n = a or c or g or t
aatgtatacgacttctacaaaccagatgnggctacagagtacccaatagtnnatgggaagctctccatccagtgctacctacgggcnnnggacaggtgttacacattataccgtcaaaaaatccagaaacagtggaaacaagctggcatcgatcggnctttcactctcgatgacttacagtttatgatctttcacacacccttctgcaagatagtccagaaatccctggctcgcctgatgttcaatgacttcctgtcagccagcagtgacacacagaccagcctctataaggagctggagaccttcagggggctgaagctggaagacacctacaccaacaaggacatggataaagcacttcaaaaggtctccctggactcattcaacaagaaaaccaaggcctccctttacctctccacacacaatgggaatatgtacacctcatctctttacgggtgcctggcttcccttctgtcccagcactctgcccaagacttggctggctccaggattggggcnnnnncttacggctctggcttggcagcaannnnnnnnnatttagagtgtcccagga

SEQ ID NO: 3287 - DNA, 642 bp, Canis familiaris
  misc_feature (1)..(642): n = a or c or g or t
atcgtggtnnctcagcacccaaatgattgtgaccangccnntatagaatcaatannaaataaccttttgacagttctgtaggcccagaagctattctttaccagctcttttttttgagaaatgttcattggctggtgtgtcagaatttccttgctgctccgtgaatgcccctagtactgccgtctcatactctgagcctaagcaatggatgatttggcatgtgtgctgtgtacacacaaaaaattgcctttatgagaatgtgcatccaccattaaaagaaaaagcctttgttcattggctcttgttcactccctgagagaagactgcctttgcttccttaatacatgatgcttctgactcatggcaagtgtgctgacagctccattggtttcagctgtatgccacggagattatctcctgcccgcccagtttgagtagctcaagtcattttgggagggactaacttatgaaggtacattcatttttgctttctcagacactcaaagaaaaccaatatttgcaggagatctctggtctgctcctgtagcttttctttgttaggacccagtagagtgccctgtagagagcaagtccttattaaagggatttggtgatgtgactgaccactttcataggagtgct

SEQ ID NO: 3288 - DNA, 532 bp, Canis familiaris
  misc_feature (1)..(532): n = a or c or g or t
acattctgtcnatngcacgctcnnnntnnataaatgtaaacttttaaaagtgagcttatactgtttattcccttttgtgacgtgtttttttnntctggaaataaaaatatgtcgcaagtatatttccatgttgttaaatagtctttaatgactatctcactacatggtgtcaggtgcatagttcacatactggttgggcttttaagttatttctcttctttaccattctagataaacatagcatataatttcctgtctcttatggagcatacagtacctaaacctaaccccacatatagcctctgcaagaagtaatcctatgggggcgcctgggtggcttaattggtcaagcatctgccttcagctcaggtcatgatcccagatcctgggatcaagccccacattgggttctttgctccacaggaagccatctctctctctccacccccccctcctgcttctccctctgccttgtgtctctgcctctctctctctctctctctttctctctctctctctctnnnntctcatg

SEQ ID NO: 3289 - DNA, 523 bp, Canis familiaris
  misc_feature (1)..(523): n = a or c or g or t
gcactnngcccgggggtgggggcagctgctactcggtgccaaaccccgtggggcacagagccatatacctcgacgtcggccccgcccgccctcgacctccaccctgctctccacttcaggaaacgccgcactttacgcccctcttgcctcctcctctctccggcccggagcagcctcgggtgtggggtcgaggagacgggtgacctgcacccccttgggtaccgaggcgctcttgcctgcagcaccgaggggccggccccagtccgttcccctgaccccgtgggtcatacttctgttgaagcgccccagcaaggtggtttgggggcccggtccttctctttccagcttccctagttttatttatgtttctgtttacaaattggagtggggtcctccgaggggccagggcagcgctccccaacccccgggtgtcaccaggagagggttttggctcgagcccgcctacagcgtcggcctcgaccttccctcaccccaccaaggaccacactgtgaagtgctaact

SEQ ID NO: 3290 - DNA, 645 bp, Canis familiaris
  misc_feature (1)..(645): n = a or c or g or t
ggggttttnagtgctccacccaacttgattcagcgacccannncnnatgatacnngcgcagccaccattgagaagaaagccacagcaaccatcagtgccaagccacagatcactaatcccaaggcagagattactcgattcgtgcccacggcattaagggtacgtcgggagaataaaggggctgctgctgctccccaaagaaagtcagaggatgattctgctgtgcctcttgccaaagcagctcccaaatctggtccatctgttcctgtctccgttcagaccaaggatgatgtttatgaagctttcatgaaagagatggaagggctactgtgacagctcttaatgccagagcgtttctgttcataccagaggttggtggggaaagaggctcttactaaacttagtgaaagagcgactttcactgtcagggtatttttaaatttcagttcaaggaatatcctaaagtttagccttgttcagaatttattgcatataagagaggattatttcattcagaataaattggttattgaagcagtgctgctaacatccattccctttcataccaccgttttcatccggtttgttccccttctccagttttttggaaacttgtgatcgaggggatcttgttacttatttgtt

SEQ ID NO: 3291 - DNA, 418 bp, Canis familiaris
  misc_feature (1)..(418): n = a or c or g or t
anatgtaccagcattaacaccagacagaagaaaaatgtaaanngccaaacatctccatacttctgcacagactagtgaatcatgggcaaggtaaacttctagagatttcttgcaagtctgggctagatcggatatgcctttcagctcaccaccaccataccagattagtcccctctccctaaagtgtccaagctaccctatatattgtctgaaagtcatagcctgagtgtcttcattaaggctgacaagaaaatataatgtttctggtattggctttgacaccaacaaactgtgcaacaaaatgtnnnccacccttccactttggagaatctcaattttctcaactataaaaccaggggatcagatgaannatgtaaaatccctttggggtaagttgataaagnnncnngcacattgg

SEQ ID NO: 3292 - DNA, 618 bp, Canis familiaris
  misc_feature (1)..(618): n = a or c or g or t
cttntggntcttggtatgancatgtgaagggctggtnnnagnagaggaatgattatcgtatcttnnatctattttatgaagacatgaaagagaatccaaaacatgaaattcagaagttgttacagtttctagagaaagatttgtcagaagaaactgtggataaaatcctctatcacagctctttcaatgtgatgaaacagaatccaagtacaaattataccactataccagattttgatatggatcattctgtatctcctttcatgagaaagggtatttcaggagattggaaaaaccaattcaccgtagcccagtatgaaagatttgaaaaagattatgaaaagaaaatgaaaggttctacactgcggtttcgttcagagatttaagaagtcctgctctttctccgacttgtttaactgacatttaaattaaaagaaaaaatatcccttcaaatatttagtgataagaattctgtatgttaattttctctatttactaatattagtggtttgtaatagaatattcaaagaatttcaaagtctacatataaaaaaccaatattgtctgtatgattttaattaccttccacaatgttcttactcttcttaaagacaaaat

SEQ ID NO: 3293 - DNA, 644 bp, Canis familiaris
  misc_feature (1)..(644): n = a or c or g or t
tccagnncaacntgcagcagactccactccacnnngctgtgatcaccaaccaaccagaaattgctgaggcacttctnnaagctggctgtgatcctgagctccgagactttcgannnnatacccccctacaccttgcctgtgagcaaggctgcctggccagcgtgggagtcctgactcagacttgcaggacccagcacctctactccatcctccaggccaccaactacaatggtcacacatgtctacatttagcttctatccatggctatttgggcattgtggagcttctggtgtctttgggtgctgatgtcaatgctcaggagccctgtaatggccgaaccgccctccatcttgcagtggacctgcagaattctgaccttgtgtcgcttttgttgaagtgtggggctgatgtcaacagagttacctaccagggctactccccgtaccagctcacgtggggccgcccaagcacacggatacagcagcagctgggccagctgaccctagaaaaccttcagatgctgccagagagtgaggatgaggagagctatgacacagagtcagagttcacagaggacgagctgccctatgatgactgtgtgcttggaggccagcgcttgacgttatgagcttcaaaacatatc

SEQ ID NO: 3294 - DNA, 508 bp, Canis familiaris
  misc_feature (1)..(508): n = a or c or g or t
actgtaactttttacattcttnacaaacgaaaagnacaattccacatgcacactgtctggaangcacagccaggcagactgcttagggcccttctgagtccagaagaggtgccggggcttctcgatgtcgctgggctgttgtacggcgagctcatcgcggcggcgctggaggctgcacactgcgggctggggtaggggaagggctgctgaaaccatccccgagccaggacagactcggggggcctggacccgtgccccccccaatccccgccccgcacccagcagctctggcaccttcaggcacctcattaagcgctgagaagcgatgagatttctgtactaacctggcccgagaccccccctcctctttccttcagcctcttcctcctctccccccctcccaagggaagctccccttcgcttcacaaatcattttctatgctactgtgttctctcaggaggggggttagagcatgcggggcaagcctgcagggtttcttaaacaata

SEQ ID NO: 3295 - DNA, 539 bp, Canis familiaris
  misc_feature (1)..(539): n = a or c or g or t
gtgcagcagctggtgcagcagaagtaccgctnnnnngtgccggncagtgtatccgcgtcccagctggtggctgacctgctccaggaagaggacgggggctgccccgcnnaggccagagctcctgtccacatgagtcctgagctgcccacgcccagaagagaggtccagtccgaaggggccagggagccaggagcccgggatgcagaggagcagctgcagcgcctgcgggaggagcgcgtctgcaaggtgtgcctggaccgcaccgtgtgcaccgtcttcgtgccctgcggccacttggtctgtgccgagtgcgcgccagccctgcagctgtgccccgtctgcagagcccccatccgcagctgtgtgcgtaccttcctgccctagccaggcgcttccagtgctggctgtcacgcgggcgcccatccatctcagcctgtccctgcggccacgcgcaggcccccgaaccggccgtcccaagtgcccagacacggcgcatggtggaaggaagcgggtgtaaaggcgcttttactgacgcttga

SEQ ID NO: 3296 - DNA, 531 bp, Canis familiaris
  misc_feature (1)..(531): n = a or c or g or t
ccataatcctgctgcaaagggctgagcgggccaggcaaggccggctccgagccaccttcatgcgagagattcggaaagaagaggagcgggatcggaagattcgagaggaaggttggcacaggttcagtcaggaccaagcagctatcatcatacagaaggtgtggaagggttacttgcagaggaagtgtactcagcacgatcggtggacagagatggagttcattggcatgctcccctcggctcaccaggtgaatttgcgtgtcatgtatcaagacggcctgggggaagatatcggcaggctccgccaaatagagaaggaggaggaattccaggtggcaatggtgaagacccatgatgtcctcagggagacagaggggcctgacatgaaggagaaattgaaggagcaaatccgacagtggtttatcgagtgccatgcccttactggtcggttccctgattatccagatgaatctttaggtggatcctatctnnnntttgcagacaagacnnnnnnacaggtaaaaatggaac

SEQ ID NO: 3297 - DNA, 238 bp, Canis familiaris
  misc_feature (1)..(238): n = a or c or g or t
caagnnnnnnngagcggggcccagggcccaagnnnnncaggagcannnnnncncngcccctnnnnccccaccgcctgcnnnnnnnncagcanncgnnccttnnatccccnnnnnnnnctcctcgggccgtgtagtnnnnnnnnnncgnnntgnnnnnnnncnnctccaggnnnngncccgagaggtggaggccctgnnnnnctgttacccnnngggctccagatccagcaatgctgag

SEQ ID NO: 3298 - DNA, 575 bp, Canis familiaris
  misc_feature (1)..(575): n = a or c or g or t
agnngagctgnnggtcatccatcctgctgcagcgagnnntcccacccctggacttccttacatggcttcccctagcctctggtcccgcagtgaaggctcggcccagctcccaccaggcctggggtctgtgcagcagacctgggagggctcctcagaggtgggagcagtctgggccgggcccagcttcccccccgggaccccgctgtgggcagccctggatgagcaaatgctgcaggaggggatccaggcctcactccttgaggggccagcccagtgtcctgagagcccactatggctgcctaagtcctccgtctcctctctgcggctgcagcagctggagcgcatgggcttcccgacagagcaggcagtggtggcactggctgccacaggccgagtggagggtgctgtgtcactgctggttggcggggaggtgggccctgaggccctggtgactcaggggaggggcgggcctgctcaccctgagggtcctggtcccccctagcacatgtaggccctcaagtgaccagagccctggcctgtctgctgagaatcatagtgnnnnnnaggagatgccc

SEQ ID NO: 3299 - DNA, 611 bp, Canis familiaris
  misc_feature (1)..(611): n = a or c or g or t
cagnnnacccccttgcacagggnnntgtgctgcccacgtcaccagtgncgttcttccaggcacagaatgcgcagtctnngcattctcaatttttgtgaatctttttctctttttctagaatttngaagctagaatggtgggaatgtcggttgtgccaggaagagaagtgagcgagtctgtaagggaactgactacagaatgttgatttttcattcttggcctgtttgtgttcagctggacacaaatgagtctcctcagaaggcagcccccgcctctcttctgttcctctgttcccctctgctcaatgaaaccttcccgtgaggggctcgggtctctgcatattacagtggggctgactgacacggtaggcgaacacttgctcacgctgcaaatcacagcagtgattgcaattcttccctctgcctttttccttcgggtggaatgatccagacacctcgtggataggtcagacactgacattttttttgattatgtaccttttgatggatcaacactaaaaaaatgtggcgttttcttttactctcttcaaaacttttccccagaaaaaattttcatttgtcaagaggnnnactttggaggtggttttggag

SEQ ID NO: 3300 - DNA, 541 bp, Canis familiaris
  misc_feature (1)..(541): n = a or c or g or t
tatcagtcactgaaaatctaactcctttcaaataatgggtgtatgatattgcatggagcagattgagaatgaaaaccacaacagcccctgacatctggaagctggtgtggcactcacaaataggtcatgttgttctcctttgggatagtaaatgaatcactatcctcaaatgagtgttctctgagaccatggtgaagtgagacaaaacaaggctccttcttaattctgttgagacagacaaaaaacaagatcactgtgccagccacacaatgccaacatcccccttttgctggttaagtgactgctactgcgttatcccttagatctttatctttgttccagtctgccttcacaaaagatgaaatttgttgaaatactccatcttagaattgctcttgctttctgaaagtatttaatctagagtgaaccctgcttccttaggtcctccccaaaacaccaaacaagcctcaaatgttgtaatagattctttcttttaccctctttttctttggatgcctcatagttttccctagtggnnnna

SEQ ID NO: 3301 - DNA, 453 bp, Canis familiaris
  misc_feature (1)..(453): n = a or c or g or t
acttattgatggtatatgaatataacagatgattctgannagagaaaggccttgtnnnnaatactcntgnnnngccattagtctataaattccagctttactgtgaagttctatagagtgttaaatacaaattttcctgtcttgcttcacacaattctctaaaatcagttttgaactttggttatagagtcttcatacttcagtatctggtggtcncttggcttatacataactttgtaaaaagaaaattttttctgatgctttgaatatagttttgaaaggagtttgactttttttcccctcattcatctcagcatagggtgcactatttcacaatatgaaattttttgtcatttaaattatannctttattatgtaactttaacaattgagttgatctgtttaaaatataaatctactcaagttaattaaaaataagcttttcaaaaatgt

SEQ ID NO: 3302 - DNA, 608 bp, Canis familiaris
  misc_feature (1)..(608): n = a or c or g or t
atcagtgctgccgccaggncttccagagcaccaacccagaggtcagccgaggggctctggacatctgctgtcgattttacaaccacacgatctgtgcgtagcggggacagcccgtcttcggccttctgggggccgtccccacctttctctctccaggcctgtcctgggggaagccacgggacttagactcccctcagtcactcagttggaaaggagtgatggggtgagcaggcaggtgagaagtgagggatgccccccaatccttgcccccttcctgctccttctggaaatatgaattctcggggccacctcagcctcctcttctctcccctccacatccccacagcaccctggtcttctctgtctccccactgtgcgtctctcctatgcacccttccctccagttatggggtccctccccctgggctttgcagctgcctcccccttcttctgctggcacttgaatcttgccctggcttgccctggtcagatgggttctcctgggaaccctctttggaggttcccctgctgcctttgcccaccgcacttcccaaactggtatcccatggaacactgtctccacaaggtgtttggaagattccatgact

SEQ ID NO: 3303 - DNA, 645 bp, Canis familiaris
  misc_feature (1)..(645): n = a or c or g or t
aagatnnngagagaaaaagactcctcaaaagannaatcaacttcttactnntctcatcaggaccggcctccaatgaaacccttcgnnctcactcggaatgtggcccaagccaaagtatttggagcaggttatccaagtctggcatctatgacggtgaatgactggtacgatcagcatcagaaatatggagtattaccagatcagggcgtagccaagacaacaccagagctcaaaagaggtacgcagcaacaggaagatcaggaacaaaaggaggacgaggatgatgagcaaatgctccacagagctcgggagtgggatgactggaaggacacccatcctcgtggctacggcaaccgacagaacatgggttagtcttcccacaacaagatggaactacaggggctcacatcttccctgccaaggaaagctgtgcagtcttccctgggctcctgcttcagctgtgtacaacgagggcaaagatgcttaatcttgctttgcgttcaataaagtgtcaagcaattaagtgtgtgtttgtaccctaggtgatgagccagcaatcttgttttggcattcttctcctcatcatggcatattccaatttcttaagtggaaagaaaaaagtactgagaagtggctctgtataat

SEQ ID NO: 3304 - DNA, 542 bp, Canis familiaris
  misc_feature (1)..(542): n = a or c or g or t
ggtnctcttgtatgcannggtgttgtgngnctgttgggtagatagagccatnnnaaacacactctaatccccttgacatnntagtcctagccaggtcccagagaccggtccttacccacttttccaaactggggagactcaggaattattcattgcacattttaggggaggaggggggttggatagtgtggacaggacaccaagtgcttttcactttaactcttgaagcagcacatgatgatctttcccttgggagaaatcgcggaggtgggttttccatttctacttaatgaagtatgatgagagtgagcaaggctccctttttaaccaaatacactaaaacataagcactcaagagttaccataatctgtgttgtttccttgggagaccatactcttgagctgtgatgttgcacgtgccaagaatgggtggaagtcgtctttgggattatctctgaagccctgcaaggaaagatgcctcacagccttatagtcagacttcattttttcacactacccttcccagaggtagttccaagctc

SEQ ID NO: 3305 - DNA, 408 bp, Canis familiaris
  misc_feature (1)..(408): n = a or c or g or t
agaattacagcaatgtcatttnnnnnnnaacagacannnnnntgtattatgaatactttcaagcttccctttggaatatgcccagaaatgcatttggagttatctttgttttttctgtcattgtaaatttagattctggaattggcgtttggtgatgtgaagcgttgctcacgagtggccagaactcctctnnnnnaaggattttgagattgaggaacacctgtataacctcccctctatgccttggttctagttcctcccnntgagttgaataaccattttttaattttttttgtttttgttttagttggtgctctgacgcttaatctcagtaccctttactcttgattgtcaaattttgataaaacatgtgccattttctttggtaagagaaagcaggnctcntgt

SEQ ID NO: 3306 - DNA, 610 bp, Canis familiaris
  misc_feature (1)..(610): n = a or c or g or t
cgtcngacctgccgggcgcacctggcgctcacgccggacnagcnngcacacctggtgctcacgtcgnacctgccgggcgcacctggtgctcacgtcggaccaacgggcacacctggtgctcacgtcggacctgccgggcacacctggtgctcacgtcggaccaggggcgcacctggcgctcacgtcggcgacaatgtttttgcagctgtgctgtcaagccccatctcttccgttctggccatttctggcttccctttgaggagtgatgtgtttgagcttctcgctttaacgttgtcatgtgtaggtcactgaacggagcacctgccacttccgggaaatgctgacctggtgacaattagaaacttaaataaagagcccaagtgcaaaagaggtgtgatccgatccgatgtggatggggaaagaaatccctggaatatgactcttgatcgtttaatcatcttctaaaggaccgtttacatcacaatatggaagtgaaacagcagaaggctcacttcagtttcattacattaaacagatattcatccaatggtaataattaaacagacacaagattcattgcacttggtaagaaaattcaggtcatgaccac

SEQ ID NO: 3307 - DNA, 639 bp, Canis familiaris
  misc_feature (1)..(639): n = a or c or g or t
gatctcatnntcttctttaaagggatggcaaggtgtgggcagtgaggtcactggnncaggggtnaggagagaaagnnnnaggaaagaagtagtaggcatggctgggaacccaagtccgagcacgatgacccgaccaggctactgtcagcaactcttggagaagagctgttcacagccagactggcacggttttctgagaaagactattcaaacagtctcaggaaatcatatatgcaaagcactgacttctgagtaaaaccacagcagttgaatagactccaaagaaatgagagggaatctgccaacaatacaagtcccccaggtgccagttatggctataggtgctacaaaaacacagcaagggggagggggaagcattgtaaatgtgccttaaaaaatactgatgtttcctagtgaaagaggcagcttggaactgagatgtgaacacatcagcttgccctgttaagagatgaaaatatttgtatcacaaattctaacttgaaggagtccttgcatcaatttttcttagttcatttctttgagcatcttaattaaaagaatattttaacttccttgggcttgcttttaaaaatcgaaaataaactataaagttacatattattattcccatactacata

SEQ ID NO: 3308 - DNA, 603 bp, Canis familiaris
  misc_feature (1)..(603): n = a or c or g or t
annactcccactacatctccctgcccgcaggcntnctcagnnnggnntgctgcaccctctacgnnatctcctnncagtttgacccctgctgcaagtaccaagtggagtacgacgnntataaactgtnccgcctgcccctgcacacactcacttcctctaccccggtggtgctggtccggaaggacgacttgcacagaaagagactgcacaacacgatagcactggccgccctggtgtactgtgtaaagaagatttacgaactctacgccgtatgatttcagtaggacaggcagaggagcaaacagcccagcccaggagagacaagagtattcagattgccacagtaacatttttttgctctgtgaggcagcggagcctgggaaggtgtttggtttaatatttgttattttaaaaaaaataacacaggtcacaggtgtaccaagggtttttcaactcattacactaagatgtggatttccataacccacagggggtctgaggtgtggaagtctgaccaggcaatggaatgttgatggcaacgctactgagggggtgtgaatgcgcttgcggggtgggggtggggggaggtctttaagtatatcg

SEQ ID NO: 3309 - DNA, 175 bp, Canis familiaris
  misc_feature (1)..(175): n = a or c or g or t
gaggccaacccacagcacgtgaccncngagtactgtggtccagcctccagcctgtttgcccccttattgccaacttctcctttttctactgtacaagccaccaactcaaccgagagctaaagagacttaaaaaaaaagagagagagagataagctgcaagtcaactgatttgtga

SEQ ID NO: 3310 - DNA, 577 bp, Canis familiaris
  misc_feature (1)..(577): n = a or c or g or t
atgaagaaacaagtnnncaacctgttaaaaatgaatccatacatagagggatgctattcagctcatcctgggtggaccagcagtgtgcatataaactggacgcttgaccagccacaccccagacctgatggaatcagaatttcagagggtgggacacagtaattgggttttaacaagccctctaggtggccgatacatgataatgtgtgagcagcacagaagtaaaatactacaaaagcaaaaatgcctgctgtcacagcaatccccctatagaaaaaattcagtttttttcctgcaagaatgagtagtcnnnnnnnnnaagcatccttccatctctttgacccttcttgagttcaggtactccatttatttcctctagcattttcagcagacttccccggctaccagtgagcaggactctgttcattctgttcattttaatcaagtctttatccatcacaattttttttaatgcacaaggaactggtggccatcatctgtctaaccaccaaagatgagatataatagcatatccaagaatcatgccaaaaatgccaccaaacacacctnnnaannn

SEQ ID NO: 3311 - DNA, 649 bp, Canis familiaris
  misc_feature (1)..(649): n = a or c or g or t
tgtgctgcacagcaagcacgcnnngctgaaggaccgnctgcnnngcatcaaccagggctatgaccgnntgcnnngggtcagccaccggggctacggnnnnnnngnngaatttgannagccccgagtgatcgatctgtgggacctggccaagtccgccaacttcactgagaaggagctggagtcattccgggaggagcttaagcactttgaagccaaaattgaaaagcacaaccactaccagaagcagttggaaatctcacatcagaaactgaaacatgtggagagctttggggaccgggagcacgtgagccggaacaaggagaagtatgccatgctggaggagaagaccaaggagctgggctacaaggtaaagaagcacctgcaggatctgtcgggccgcatctcgagagctcgccacaacgaactctgaagactgcaggagcccgctggcgggaagaagttggggccgggggccaggcgtccgcctgaggacaggcctgggtgcttcggggcggcacctgacacggacaggaccctggaggaggtgtgaaggggaccggccaggcgtccttcatgcagaaggacagtgagcagtggtgtgccagatcgtgtgactctgcccctggaagtactgtgttcttaaaaacat

SEQ ID NO: 3312 - DNA, 444 bp, Canis familiaris
  misc_feature (1)..(444): n = a or c or g or t
acagtcgatngctgaatacggnnagtacnnagtacagcactggnntccggtgaggactcaggaaaagtcgtcgcattgctgtcctcctgtcaccacatcaccccctctgccaccaccaccatccactgtcgcctcccgtcccctctgtcactgccagnntctcctcaccaccaccgtccccactggctggaactcaggtgctggtcagggctgcgcgggagcagcaaatccaggcaggtcgcccgcctgctggttagccccaccccggtgcctcctgcagagctgccctcaccccgctctccccacgacctgtgccctcctatgtccttggcggaggggcaggggcagcccctgtgagcagggaggcgaggccctcagtgaccgccctgagtccccgccgggcccggatccgagaggtcctgcaggtgcggggaccacagcaag

SEQ ID NO: 3313 - DNA, 619 bp, Canis familiaris
  misc_feature (1)..(619): n = a or c or g or t
ctccatgtgnngtcactgtgccagcccagaacacaggnntggggcccgagaaganntctttcttccaggcttnaggcattaccactaagatctctaggggcaccattgaaatcttgagtgatgtgcagctgattaagaccggagacaaagtgggagccagcgaagccacactgctcaacatgctgaacatctcccccttctcctttgggctgatcatccagcaggtgtttgataatggcagcatctacaaccctgaagtgcttgacatcacagaggaaactctgcattctcgcttcttggagggtgtccgcaacgttgccagcgtatgtctgcagataggttacccgactgttgcatcagtgccccattctatcatcaatggatacaagcgggtcctggctttgtctgtggaaactgattacacctttccacttgctgaaaaggtcaaggccttcttggctgatccatctgcatttgtggctgctgctcctgtggctgctgccaccactgctgcacctgctgctgccgcagccccagccaaggttgaagcaaaggaagagtcggaggaatcggacgaggatatgggatttggtctctttgactaatcaccaaaaagcaa

SEQ ID NO: 3314 - DNA, 406 bp, Canis familiaris
  misc_feature (1)..(406): n = a or c or g or t
ccatggtggctgacagaactaannnnnnnngcnngtcctnncaatctgtaacttttgaaagacagcctgcctccttcatccgaatcgttggaacacacaacacagcaaatgaggtgttccactgtgtccactttgagtgtccggagcagcagagcagccataaggaggacagcagcgaggagtcggggccaggggagcctggcccgggtccgcagctcgacccccacgccctgcaggcccccnnnnnnagctccctgccttccagccccggctccgcctctcgctcccccaaccggcagcaccagtaaagggcccccaggccccattgagggcagagttttgagcggttaagcctggggtggagcagagaagcactgcccacgtctcccgtctcccgagtgaagca

SEQ ID NO: 3315 - DNA, 567 bp, Canis familiaris
gtcccagagatcacaccgagtccaactgcaacaacccatgcagttgtacagttttcctttatttaatcaaatgttccctctgtgccaagaatgattccagactctgtaatataaaaagaagttaagcatggtcttttttatgaagttgcttaccatcgtttgaggaaaggtgggcaagcaaaccgttaactgcagtgattaaagtgtgatgatgctcaggagcacatacgcataaaagaccatctctgttggaggcatcatgtggggaaagacatgctttccagggctcacgggccttgcacaggcaaggtggggctcagtctgtacatggagaagacgcaagggctgagcacaggagagcagaacatgaggatcacacgaagtacggagaaaagcccccacaagatttttcatgcaaaagaggcttttttctgtaattccagtggctatcaaatgcttcctttttttttcaagagacgttaaaataagaacttcttatatgagtagccacctgggtgaagacctcaattgactgaaatggtaaaatggggtggaaaaaaatttacc

SEQ ID NO: 3316 - DNA, 536 bp, Canis familiaris
  misc_feature (1)..(536): n = a or c or g or t
gcacagtggtcatggcctgggtnnttcatcttcatctttgatgtgaggtgggaaggctgagagaggatggccctgatgggtctagagacagagactgggattcaagcttccttggtgtccctggacccctgaactgtggtttcctgacggatgaccatgacaccttccaagatgctgtgagtcaagcagcaacgggcagcacaatgcaacagaaatgtggattctcacgacaagatttttaggtcaatccaccaactggataacttatctggggaagatctgaagatctgaagatggattttcattgtgattatttgtattattctctcattcacttcctgtacttcttgaccgggatttcatatactctctgcttttaaccaatagccatcatgattataaattacaggggcgcctgggtgactcagtcagttgagcatctgcctgtagctcaggtcatgatccctgggtcctgggattcagcccaatatcgggctccccgctcagcagagagtctgcttctccctctccctctg

SEQ ID NO: 3317 - DNA, 170 bp, Canis familiaris
  misc_feature (1)..(170): n = a or c or g or t
ttcccccccaagctgggctccccggtgctctgactcccaggnnngcctgaggcctgccccaggcagaaccagaaccctccatttccaggctgggaaacggccgagggtgcttgagccgaaccacgtgcaggccgttcttcagccatttctaccacgatagcagaattgaa

SEQ ID NO: 3318 - DNA, 564 bp, Canis familiaris
  misc_feature (1)..(564): n = a or c or g or t
gagagcagaattatttggggacngcagaccacaaaccatgtttcccccgttcagcagttccagaaccaggtttatctttgaggatgagctcctttctgtccttgtcttcctctgcacgatgtaaaaagagttaaaaatcagttcggtcacctggcagagagggatggcccgccggggacgcgggggccacctagacaatccatgcgctcacacgggactccccctgcttctccttctagtcacacgtagacgcagagaatgtgcattccgcctgaggtgtccccttgtatacgtcatagtccagatgcgctaggagctgatctaggtaaccgtaggcacgaggttagcacacgagggtggccgcgcgggacgacagaaccctggtgggctgcggcggcaggccaggactccaactagcgggagcgggagaccccgggctggagtgccgcccgcggccccttggggacacagaggggcctcgagacgttcgcctcttagctttcctttatttttttaattaagtttttttggggaaaaaaggtatttttgaaaagtttgtcttgc

SEQ ID NO: 3319 - DNA, 606 bp, Canis familiaris
  misc_feature (1)..(606): n = a or c or g or t
cgggacggnntgatgccgacagtcacgncagcatgangagnctgctgaccagcaagccagaagatgccacacacagccgnngcagcagaggcatggtccagagcagctctccagtcatgcctacagcagtggggccgtccactgcacccccagaagaacccccaggctccggtttacccagtgacacttcagatgagatcatggacctgctggtgcagtcagtgaccaagagcagtcctcgtgccttagctgctcgggaacgcaagcgttcccttggcaaccgcaagtctttgagacggacattgaagagtgggctcggagaggacctggtgcaggcactgggactgagcaaaggtcctggcctggaggtgtgaaggtactgcctccaggacacctatctgggccccagcctgcagtgcaagacactagagagtaaggagggatcagcagaatttggggcctcttctcaaccccagagccactctgtgcccagtggacagtgccctcaacagtattagctgtgcatgcctgtgtgcaagtgtgtgtctgtgtgtgtgactgtgtgtgtacacgtacttgtatgagcnnnnnngaatacatggagta

SEQ ID NO: 3320 - DNA, 555 bp, Canis familiaris
  misc_feature (1)..(555): n = a or c or g or t
gatgtactgccacgnnaaaaaggtgattcacagagacataaagccagagaatctgctcttggggctccagnnagagctgaagatcgctgactttggctggtccgtgcacgccccctccctaaggaggaagacgatgtgcggcaccttggactacctgcctccagaaatgattgaagggcgcatgcacaacgagaaggtggacctgtggtgcatcggggtgctctgctatgagctgctggtgggcaacccgccattcgagagcgcttctcacaatgagacctatcggcgcatcgtcaaggtggacctgaaattccccccttctgtacccacgggagcccaggacctcatctccaagctactcaagcacaacccttcagaacggctgcccctgtcccaggtctcagcccacccttgggtccgggcccactctcggaggatgctgcctccctctgccgtccaggccatcccctgacttgtccctatcacttattcggttgtgtctgtctgtttgcctgtatatgtgtagttnnnagaaggggtgcctggcctgttttt

SEQ ID NO: 3321 - DNA, 641 bp, Canis familiaris
  misc_feature (1)..(641): n = a or c or g or t
tcacaggcttgccttttgtcacagctccanatnnatttgaggctctagnngcacatgatgctttggttgaactcagcnnagctatgaacactacggnntgcagtctaatgaagatagcnnatgatattcgtnttctnngnnctggtncccggtcaggtctgggagagctgatcttgcctgaaaatgaaccaggaagcagtatcatgccaggcaaggtgaaccctacccagtgtgaagcactgaccatggnngcagcccaagtcatggggaatcacgttgctgtcactgtgggaggcagcaatggacattttgagttgaatgtgttnnagccaatgatgatcaaaaatgtgttacactcagcccggctgctgggagatgcagctgtttccttcacagaaaactnngtcatggnaatccaggccaacacagagaggatcagcaaactgatgagtgaatctctaatgttggtgacagctcttaatnctcatatagggtatgacannnnnncaaagattnnnnngacagcacacaaaaatngatcnnnnnngannnngactgccattgagcttggctatctcnnnncagagcagtttgatgaatgggtgaaanntaaggacatgctgggtccaaagtgatttaaa

SEQ ID NO: 3322 - DNA, 506 bp, Canis familiaris
  misc_feature (1)..(506): n = a or c or g or t
tgcatcttgatggaaaggtgtaaatatcaatcaccaggactgnnnngttaantggtatttaatatctaggtgaattnnnggtatggggtgggggtatgacannacatacttggcttgccctcctcganatgactgccagttttccatatgcctgtccagttccnnnnattttgttcacaagtgtgggggcgtcataggagtaaagcctgtaggacagatgaaaccccctgcttcagaggagcaagagctccaaggccaactgtttaacaagcaaggtgttttttttctttctttctttctctttccaatgtgtggaattttgatgatggaaatgtcattctgagagcaatatttaaaattctcaggaattgacttatagtattgagaatgaattcagttgcaatcaagtttacattaaatgttgcttttaaaaaatctcagtcatacttcacactgcaaagaatccagatcacatgggatnnnnnntgagatggttgagtggtaag

SEQ ID NO: 3323 - DNA, 597 bp, Canis familiaris
  misc_feature (1)..(597): n = a or c or g or t
atatgaagtttctgtcttnactgnnntnaatccacaggagttactaaaccaannagaattaactgaaagacggacatgagcatgggtaccaccacctggaagagcagctctatctgatcctggagtgcacatagtgggaacaagacgcttatggctcgtaatctgccagaaccaaaatgaatctgtgaaggacaggaccccacttttgcctctgttcatcttctctgacacagaagatgaatgtaggagagcttctcttcaaactacatctgatccagacaaggaagaaagcagtgaatgtgggctgggtaactgtacctacctctcttcccactacaaaattttgggatggacttctcccaaaagggaatttgattacgtgttggctgaaatttcttcagtgtgactgttgagaagggattttcatttgaagaatttgcatcccagactcagctggcttttcaccaggatgaactaaatcctgccaccaaccataaaacttcaccaagaagttgagctttcaagatgccttgttgctttggagaagggagtgatgtcaattctattgtggcattttccctttagcaacctgagtaa

SEQ ID NO: 3324 - DNA, 586 bp, Canis familiaris
  misc_feature (1)..(586): n = a or c or g or t
aagaaagttccttngtaatcagagtgatggattatgagaangccagactttgggtagagnnnggtacttgcagatttnntaaaccacttcatgccatttagcttgtatttctgaaaggcctgctttggtgccatgcattgaaatctgtcagttaattgaaagatgattatgctttcttggcaagtatttaagcaattggcaaccaccaaggtgttcttcccttattgttctctgtcatgcattatgctgatgttacagaaaggggtccagaagggaaagtgtcaccgtcttttctttcaagtacaaaagtagccccattattcatttattggaagcattttgtttttcgtgtcccctgagaaatgccgtcaacatttcctatgatttctaagagctctgtaccaaattgtcattcagtcgtcctgtcccgctgagtggtttttcctttaaaatcccttctcttaccaccctgtggtactgaatgtgttgctgtgatacaccgatgagctatggttctttaaaaggctcagttcttgtgtttttatattatgtaacagttttgtgatgcttttgtgcattctttgtc

SEQ ID NO: 3325 - DNA, 556 bp, Canis familiaris
  misc_feature (1)..(556): n = a or c or g or t
aatatcagcttcacagtttgggatgtgggnngncaggacaagattcganctctcnnnngacactacttccagaacacccaagggttgatatttgtggtcgacagcaatgatcgnnagcgagtaaatgaggcccgggaggagctgatgaggatgctggcagaggatgagctccgggatgcagtgctccttgtctttgcaaacaaacaggatttgcctaatgctatgaacgctgctgagatcacagacaagttgggcctgcattccctgcgtcaccgcaactggtacattcaggccacctgtgccaccagcggggacgggctgtacgaaggcctggactggctggccaatcagctcaaaaacaagaagtgagagccaggcagccctttccgaccaccccacccacccctgacatacctactgtctccctgccccagccctgccccaaccctgccccttccttcccgttgccagtgtggccagggccctgggtatcatgtccgcatgcccaacaagagccttgcctctcctgcttcccctctgctcccctgtccatgac

SEQ ID NO: 3326 - DNA, 458 bp, Canis familiaris
  misc_feature (1)..(458): n = a or c or g or t
cnggctgcatggcanntggcgggccaagcatgctgtgggcccactctgcatgccctgtctgtgccatgagtgtccttggccccttcctgccatgggcaggcccgcaggaagagctggaaaggggtggcgagcaggctcagaggagccacaccccacagctgccaccacttcgtccctcataggtttgctcacccatcccttgctgccaggtcactaaggggaggtgggcctagcctccccagtacaggcatgcccagcacagaggggcagcgttggcagtgccagccttcccaccctgtgctaagcctcagcagggagcaggaggaagggctggcccctcctcagggagctggtatgagtaaggcttgggggtgtaggcgggcagccccttactttactcacataggctgctggatgtatggattttgcagttggcctggggcagctgggtttgtcct

SEQ ID NO: 3327 - DNA, 652 bp, Canis familiaris
  misc_feature (1)..(652): n = a or c or g or t
aagaccagggaatgaagctcacctatattccagaacacantagcnaactacagagtcttaaagagttgtatgtggagaacaatcatctggagtacctgcccacatctttgggatcaatgcctaacctggaaattcttgactgccgccacaactggcttaagaaacttccaaattccatttgccaggcacaagctttgaaagaattactgcttgaggacaacttgatcacctgtcttccagagaatttggataacctggtgaacctcaaggttttgacactgatggacaatcccatggaagaccccccaaaagaagtgtgcattgaaggcagtcaggctatatggacatacttgaagataaaaagaaacaagaaaataatggcaacaaagattcaggcgtggtggcgtggaacaatggtccggaaaggactggggatatttgaagaactgcaaagactgctaaagaaaggaaagaattctccaaaagataagaaaggggaaaaagatgcaaaaggaaaacctgtaaagaaaaaaaagagataattctgtaatgaattgagataatgaaccctgttggattaagaaggcaaaatatgtaggagtgaagatgcctaccacgctgaaattattcatagaatcatgattatgtctaa

SEQ ID NO: 3328 - DNA, 742 bp, Canis familiaris
  misc_feature (1)..(742): n = a or c or g or t
angccaggnctgangaaagacagatggcccaagnngcaatccaggcccagaaaaggtacagagtgacattttccagggttttatgatgtgtgatgtcacaacatattgaaacaatgtgaaaaatccacctttttttttttttatnaagccaagcaagtaaagagttttgcaaaaaatgtgaaattatgccacttttctcaccaaagttttttaatttggaaaatgtatctttgacaaaagactagccacggaggaaattttgaatactggtataacagctatgaaggatcagaagaagagtatgacccagataataaaagaaaaagaacatgaaatgaacatttactattgcatgactcagagacagaagcaagaagaagttcaggaagtacttcaagaagcagagaagacacatcaggccacgcttggaaatgtgatggataaactggttaacactcagggggagctgctgtccatagcaaaacaactaggcattatgacaaactggaaagatttcctggaggaggaattacaggaaacaagggcagcatttcaaaaatacatcaattatacgtttcctaagctttcgccaggacacgcagattttatactgccagaaagaaagaaaacaccttccagtcttattattcaggagaatgaaacaactcctgattaaaagtctacaactgaaatttcactacaaaagtcnnnntccaaagactaaataaannnntcaaaaann

SEQ ID NO: 3329 - DNA, 407 bp, Canis familiaris
  misc_feature (1)..(407): n = a or c or g or t
tgtgncnnnnnnnagaaagaaannnnnnnngctcnncgccnnncatcgnnacatctcccnnnnnnnctcagnnttaattgncagtgacnnnnnagatannctctatnnnnnnaatgacagggtatatacannnnnaacataccactacgatanncggnnacccaacttctatcaaatgtcnngtncaaaaatacccaagtcacccctgaccgaacatttcnnnnnntccagacggtactgtgataaatgacatcaaagnctgaagttttataannataaaaaagactgtcttcatcattccccaaannnaatgcagaaaattgtgctcactagtattttnnnnnatcaaactcagagacaagatgccaccgccagctgttttattcatctcaacttctgcgtcgtga

SEQ ID NO: 3330 - DNA, 493 bp, Canis familiaris
  misc_feature (1)..(493): n = a or c or g or t
ctccatcacccaatatggcccaatttatgttttgtttcttccccagtcaacaactaattacatctgcctctgagtgttagacagaatgtgcaaatacttcacttttcttctcctatccatgctgtttcccatttttctctgtcatctgtcttcccttaccccatctctcaacattcttttctttctcaataaattccgcatggtcaagaatacagactggaaaacggacttcttttcctatcagccagttgcaggatcagtcagatcttgcttcctctcctcacactaaagtggatgcattttaaatcactccacattcctcaaagtggaggagtcccccagggcagagaccacaaagagaaatgcaggtagcttaaacaatactgtgggaccttctctgacccccctccttttccatcacaatagaaaccctacccctttctaccatccaatgatgtggtccaaaactcatnnnnnntttggctcttgagaa

SEQ ID NO: 3331 - DNA, 615 bp, Canis familiaris
  misc_feature (1)..(615): n = a or c or g or t
aagacaaagtgcacttgctgnagctnntgcnnntctacgcnnctgacttgaaccctgatgcagagnnnncgcccaagaactnnagcagcncctgaggccctgctaagcactgaacaccaagaatacctcttgaattctatctccgactacttgcaagttctaaaagtagctgaagtagttaaaaatcttacaggaccaaacctatcttatttatctgtaggttataatgactttctaatgctttagtaaatacctttttttgatattctatcctagcctgctctctaatatggcttaaatatacaaggtgtatatattttttaataaattatttatacttttttggaaacaggtattactatatgcattatatgtttaacatttccattcaacatgtgaaacaagaagccctctgctgaacaaattctggacatcaatgtatgtcattcaaggtaccaacaacctgtttcggaagagaaagactcatttctccctgatggaacacaaacatcctatagtagagctgttctattgcctatgaatttgactttgtggccagtctgttaagatctaacgtaatgggggtgggggatagaaacaaaggaatggagtgtg

SEQ ID NO: 3332 - DNA, 634 bp, Canis familiaris
  misc_feature (1)..(634): n = a or c or g or t
tcaagggtgctgacannccccggtagcangactgcttctgttgccacgantcanctagaattcgnncttcaccgnnaagaaaaattataaaagcatttccctcccaatcgcactcaccagactgcacagtgacatgtagtgagtagtacaaagtctggccaaaagacttgtaaatagtgtgaagtgatgtctcgggaccggacagtggaatgtacaggtagaggagctctgcgaagttgtctgctccgctcggctcacaggcctgagcttcagggcgcccgtctccgctccacacattgatactgtacagtccaaactcctaggactcatgaacatctgagcagttttgtgctttgagccactttttgacaaagaatggctccatttttccactctatggttttcttaaaatagttcactgttttatagtctcctggtagtaaagtagcgttgctttctaagctacagcaaacagttgactttattcttctactccgaaaaatcttgacttgtttgagtgtatataatatatataacgggagccttaatggatttgttttcataatttaatattttttgtatttgctcttgtacaattgtttttaatggannnnnntacagacttgagggtgga

SEQ ID NO: 3333 - DNA, 624 bp, Canis familiaris
  misc_feature (1)..(624): n = a or c or g or t
tcactggccccagnntgtgttcccagggtcnntagcagcaaacaaacactggaaaatgttttttttttctctctctcttccactcnttaattnnaacattgtggtaactgagtgtccctgcgtgcttgtgtgtgagtgtgcggggcggcagtgccgttccggaggcctggcccatctggagttctatgaagggtgaggggaccagaacagcaggaccagtgttggggatcatccccccttccccatcctggggccagggactgctggtaaccagctggggtccaacccatcacctcccctcatctgtccccccactcctacccctttctctatgaacttctaacaaaaaccacttccctacatttctccaccccctcccttgtggaggaggatgtgctggctggggcagagaactaagcgtctgagcctggggctggctccccggggtccctgactcagctgagagcccccttcccataacctctgagaggccagcacctgccctgtggtatctgggtatctggaatctgagctgcagcctgggagctggagaggcagatggcagtgcctaccagctctccctgtccccctggggccaggctctacctgtgtggtggtgggtgg

SEQ ID NO: 3334 - DNA, 582 bp, Canis familiaris
  misc_feature (1)..(582): n = a or c or g or t
tctctgtctgtnnntcgtgtgggnctgcatctgacctgggaacccccagcgatgcctgtnnagggtgtggcactgggttccctgactgtggcctcaatggggtgctggggctggttccagggggctccggagctcattcccttgggcagagggagcaaagcttgggcaccagctcaaggctgctgcttcctctttggtggcaggaattttgaaatcaaagagaaatgatcctttgttggctcttctggtttcttatgggtccatttggtgggtctctcccccgccccccggggaaaggggtctctgagaggggcagagaagagcatggtgggatgcctggcggcaccacgctctggtggctgcagcctctctcctcctctctgctccccgttcctctttcccacgttctctcctcatttcccagacgaacaccaactgtatgtacataacacgactcctttctcaacatatatgtatatacacatccatatacatatatagtgtggttcccccttttttcctttttttaagagacaaaactatcgaaataatacccccaacagatgagcgaaaatgtattat

SEQ ID NO: 3335 - DNA, 616 bp, Canis familiaris
  misc_feature (1)..(616): n = a or c or g or t
tnnagctctgaactgtacagtnttgcnaatcaacatatgttgctgnnnnnnnttgtacaatctattattgacatgtctttttctgtgtggtagctgtattgatattatgaactacatccgcatctgtccctgtgctcgctctctctctctctctctctctccctctccctctttctgctaaactgtgtgccctccacatcagctctaacagagaacatgccctaggctaagctccctactgagaaatctcccttgataactgtgtgatttgcaaaatgcaaggtgaacgctactcatctccgagaagagaagaaacccacacggagtgtcacaaaccaccccaattgcaggtactgtctccgctggggcttggggtagggactcagaatatgaacaaagaaagcacaggtgtaaatatagcagcaggccagggaatcaaggaccctgatggtgggtatcatcttgcacgtgctctcctgttttcagatgctaagtacaaacactgtgtatttattagtcacgtgttccaaaatactgttcccaattggtgttctgaaagacatcaacatctccccaacatgacaccataactaaagacagaaaaaaataaaaaaat

SEQ ID NO: 3336 - DNA, 353 bp, Canis familiaris
  misc_feature (1)..(353): n = a or c or g or t
tcatggggttccnnnnngnnnnnaggnnnnnnnacatcatnnnatcnnntgggcannngntanngcatgagnnnnaagtctcnnnnntgtttgcagcctnnnccgtgaatcccaatggcntgcacttgtacantttgggtgtttgatagataaagnnnntannnnnnnagaaaannnaataaatnnnntntnccaaaagccagcactgtgctgtcaatgttcttttttttttttttttttttcctttcnnnttnnnnnntaaaaaanncnnaaggnnnntaatgtcaggtcacatnaatatcnnntannntttnnnnnngnnnnntacagnnnnntgtaatcttttnannnnn

SEQ ID NO: 3337 - DNA, 601 bp, Canis familiaris
  misc_feature (1)..(601): n = a or c or g or t
gcatcacaagcaatattacagatcgaacaaggnctgcaacncntngccacagaagctcctgttcttctacnntgggnngcaccctacctttggggcctgggttggcntcctgcacccagctgtagccaccctgatacagtgccctgggcctgggatgtgccagatattgctgaacccaaaggtcctgaatgctgccacaaatctggaacaggcctgcagagtctacagtccttagctggagacccttctcatcttctgcaagcccctgagattcgtttcagccagcaaatggaatctcttcaggccatgggatttgggaaccaccatgccaatctgcaagcactcattgctactgagggggacaccagcgctgctattcgcaagctcaagagatcccatggattctaaccaccatgcctacttttttgcttgttacctgcctgatgatccatttgaccacatcatctctctcttctacctcttctgctgcttccaaccaggaaaggccctggaacaggagaaaccaaacaatgctttcttcactgaagaatagaccattggccatgggtagaagatctgtcaataaaatggctactcccac

SEQ ID NO: 3338 - DNA, 241 bp, Canis familiaris
  misc_feature (1)..(241): n = a or c or g or t
taaaagtaaattgcacttttaaagaataattggttaacttaatatatntgcttttttctcacctgcacttagaggaaatttgaacaagttggnnnnnnnnnnnnnnnnnnnttcaattctaagaaacacttgcagctcttttagtattcactgngtcttcctgtttttcctgtaccaggtcatggtgattttggttattttaattgttttcttaaaaccatttgaaacctgaagattnctg

SEQ ID NO: 3339 - DNA, 692 bp, Canis familiaris
  misc_feature (1)..(692): n = a or c or g or t
cnagcagaacagannnctgtatgttgngaagggccccannnagttttatgatgacacctgnnnnntcccagagaaatttgatgnagacatcaaacannagncaggaatgtatcnnnaaggacccacataccagcggcggggatcacttcaactctggcagtttttggtagctcttctggatgacccttcaaattctcatttcattgcgtggactgggcgaggcatggaatttaaactgattgagcctgaagaggtggcccggcgttggggcattcagaaaaacaggccagctatgaactatgataaacttagccgttcgcttcgctattattatgagaaaggaatcatgcaaaaggtggccggagagagatatgtctacaaatttgtgtgtgatccagaagccctgttctccatggcctttccagataatcagcgcccactgctgaagacagacatggaacgtcacatcaatgaagaggacacagtgcctctgtctcactttgacgagagcatggcctacatgcctgaagggggctgctgcaacccccacccctacaatgaaggctatgtatattaatccaagtgacagtcacgcagggcctnnncgcgnttnncnnnnnttttgcaggatgcagagaannnctgagtnnncttcaatctttgtttgattttcgttgtttgtattttatttt

SEQ ID NO: 3340 - DNA, 651 bp, Canis familiaris
  misc_feature (1)..(651): n = a or c or g or t
gatttgggtcccttcccccttntcatatcnntcaagagnnnnnacattaggntcgnnacccactnncacaatgctgatgnncnnctgnnnnnnnnnnngctnnnnnnnnacagcatcccatnnannatggggtgagtgtnnnnngagagccnntgagcttgacccntgacctnnagngccccagacctttctgagccctacctggaggtagtattttgctactaggacaagctcagctattgaggacacaccaccccaaattccagttcgtacgtgattttaaccattcaacttgctgttgggttttaattctctaattattattattattgttattattttttaggaccagttgtagtgaattgctactgaaagctatcccaggtgatacagagctctttgtaaaccgcagtcacacgttagggttagtattaaactttgtttagatgtatcataattaacttggctagttgattgtttgaggtctatggaagaaatagttttatgcaaaattttaaaaatgccagtctggtcagggaggtatagggggtttcagtgttgttggtagccaggaaggaaggagagctggcaggtggggaccttgtgtacctcggctgtgtcacatgtgagcaggcccaggttgacctggtg

SEQ ID NO: 3341 - DNA, 690 bp, Canis familiaris
  misc_feature (1)..(690): n = a or c or g or t
gaacctactgggtaactcttgagttctctaagcnnngctacattggaaaactttatcattctcatgatctcccacgtttggcacactttttattaatgttttatcaagaaatgccttgtgattggctattaactcatttccggggtcttttagctcagaaaaatgtgatccgttttaaaccatctctctttcagcacatgggttattactcatcatataaagggactgagaataagctgaaggatgatgattttgaagaagagtcatttgacatccctgataaccctcctgcaaatctatataccaacatgaatgtttttgaaaattatgaagcaagcaaggcgtatagtagtgttgatgagtacttttgggggaaaccaccttcaacaggagatgtctttgtgattatatttgaaaatccaattttaattaaaaaaattaaagtgagtactggaacagaagatcgacaaaatgacattttacatcatggagccctagatgttggggataatgttgtagatctcaaacaaagtagacaatgtgttacttacttaagactaggggaattcaaaaatggaaattttgaaatgtcagaggtgaatcaaaaaattccatttgatatacattgtataaggatatatgttaccaaaacacaaaaggaatggctgattattaggagtattagcattt

SEQ ID NO: 3342 - DNA, 409 bp, Canis familiaris
  misc_feature (1)..(409): n = a or c or g or t
gnnnnnnnncannnnnnnnnataatacnnngaaaaaagtagtctataattcatatgtgctagttagaaaaagggccaaagaagtcagatgactgaaattttcatattatttcatagttncagagttttcaaagtgaaataggannnaggaaacccttacccagaatcctaggaaattgcccgtgcctcctccatcactgaggagtcttttctccatatttttattagtttttcgttttgttatctcccaaattaatattgtatttagatattaaatacagtcagtcnnagattaaaatttttatttcttggggngagaagtaagannaatgtattcaatgtannnnntgttgaaatgaagaaaatatttaatgtaaannnnnntactttatattgacattganatggag

SEQ ID NO: 3343 - DNA, 655 bp, Canis familiaris
  misc_feature (1)..(655): n = a or c or g or t
agtcttgaacttnngtatatatctttatntatgtaccnnncactttagattatantnncaaaactggcaggtnnnnntanagctnntnaaccacaaggaaactgggataaagatgattggcaagacgaactccgtatataaatagcaaatcaggtgccaaactgatttatactagtaatgcatgcaggtatttttcacatttggctcatagggttattgagttactgaagtgcacgtgttgggatgcccttcactaacatgtgtgggttttgttgctgttaaggtccacagaagccggcaaagcattgcgggaagctaacagctttgtgggtagtgtctcgtgtgccgtatgtaagactgctgttactgagaggactgcttcatcttgaatcagtctaatagaaaaagattctttctcttcattttaaaggtagagttcctaagtatgtgcttgtggtttttattttctcagatcatcatggcaaaaccagctggtgggcccaaacctccaagtgggaagaaagactgggatgaagaccaaaatgattgactggcttagttttttactgtaggtgaagactacatttgtagtagtagtctaggaattgcctgatgttttcatattttacttaagttaagaagaagtgttttgtgt

SEQ ID NO: 3344 - DNA, 505 bp, Canis familiaris
  misc_feature (1)..(505): n = a or c or g or t
cngtatccnataaaattgccnnggctagnacttccagttcaatgttgaacagaagtggtgagaatagccatccttgtcttactcctaatcatagaggagcgtttcccaaagtgtattctgcggaactagcacctactgtgttctcaacaccgtgccacctctagaagatgatcatgggaacagcaatagtagtcatgtaaaaatctttttaccgaaaaagctgcttgaatgtctgccgaaatgttcaagtttacccaaagagaggcaccgttggaacactaatgagagatcatgatgcagccgtccttttggatttctttttaataatgtgtgacccttcacctttgatcccctgacctgcattaccttggtaaccatttcattttttaatttaatttcattttttaattttggtgtacaagctgtaacatttcatctctcaaagtgtaacacgctgatttcctcaaatagaaatacccctttgagcgataaatttgcaaaatgc

SEQ ID NO: 3345 - DNA, 403 bp, Canis familiaris
  misc_feature (1)..(403): n = a or c or g or t
gaatcaaggnnttcatccagaagagaaagcccatctggtcgcagtgagtggnctcatcagaggaggggagggcgagtgagccgccaccccagcttccaaggcccagacactgctgctgcctcgagactgtctcggggcggccggcgtcccacagaactagtggtttccatgcacatgggccgtcggaaaagctgtgatcccacgggggcagggggagctggagaatccaatgctggctagctgcgctgggaggcctggtcctccatccgctcctccaaaggccttgagggagggatcgcctgacctgggagacggtggggataccacacaagctctgccttcacaagtgtccccagaggtgcccaggggcggccacatgnnnnnnnatctccccaagatgttc

SEQ ID NO: 3346 - DNA, 383 bp, Canis familiaris
  misc_feature (1)..(383): n = a or c or g or t
acctggagtccaaccccgnnnccatcaacacaggcattcctgaagtagaccagattctgactgtgctgctgaccacagagatgttcgtgggtgggtgcctcgctttcatactggacaacacagtgccaggaagcctagaggaacgaggtctgatacagtggaaggctggggcccatgccaacagtgagatgtctacgagcctcaagagctatgacttccccattgggatgagcatagtaaaaaggactgcctttctgaaatacattcctatctgccccatcttcaaaggattttcttcaaggtcaaaagcccagcttccagttccagaagaccctccagaaaatatacaaactggatctgcatgcaccaaagtctgaaaaatt

SEQ ID NO: 3347 - DNA, 600 bp, Canis familiaris
  misc_feature (1)..(600): n = a or c or g or t
gtgacgtcagcgatgtcatnnnnnnggnnnnnnnnntgaacatggntgtccgcaggnnnnatgnnnnnattatgatnnnagtgattcccgaagaaatcgacccgtagggagaggcatgagctggatttcatgtttcccgcaaagactctccagtnnacgatgcatgatgactctgagcgggtggcacggcgcccccaggactttggaccgtgttgtttgtccagcagaaacacctggccaacagaatccttcttgatagtttgcaggcgaaacaaatgtaatgtcgtagatctgcaggcagaagctcgcccttctgtatcctatgtacgcagtgtgcttttccttgccagcttggactgttcctgcttagacagtcaacgtttgtctcttccttttaccgagtcatcatcttagtccgactaaggcagttaatgtaatgcgtagatggaggaaagtcccgcgggagccaggacggtcctgggcacgtttatgctttcctcctagtcagcacccagaggaggtcgacgccagagaccaccgctgggtggatgctggcttccagaagggccagagtccctcttttaggaaactcttcagaac

SEQ ID NO: 3348 - DNA, 621 bp, Canis familiaris
  misc_feature (1)..(621): n = a or c or g or t
tcaccnagctgacnnncgagctgaagnncatnaaaaatgctgtggccggcgtgcgcgagacagacagtaagatctacntgctggtgaannannngaagaggtacgnnnncgcgcagctgtcctgccagggccgcgggggcacgctgggcatgcccaaggacgaggccgccaacggcctgatggccgcctacatcgcgcaggccggcctggcccgcgtcttcatcggcatcaacgacctggacagggagggcacgttcgtgtactcggaccgctcccccatgcagaccttcaacaagtggcgcagcggcgagcccaacaacgcctacgacgaggaggactgcgtggagatggtggcctcgggcggctggaacgacgtggcctgccatgtcaccatgcacttcctgtgcgagttcgacaaggagcacgtgtagcgggccgcctcccgggtggccgccccctggccctgtccccccgcccctgcccccccgcctnnngcacggggcccctggtgcccgcggcccgccgtcgggaggacagncgacattgccgggcgttattggtgaagacgtgaggtcttgtcacccgtatggtggccacatgctcattatggaattattactc

SEQ ID NO: 3349 - DNA, 635 bp, Canis familiaris
  misc_feature (1)..(635): n = a or c or g or t
ctccctgttgccnntggtcatcatcgcagtgggcgncttcctcttcctggtggnnttngtnnnctgctgtggggcctgcaaggagaactactgtcttatgatcacgtttgccatcttcctgtcccttatcatgctggtggaggtggccgcagccatcgctggctatgtgtttagagacaaggtgatgtcagagtttaataaggacttccgggagcagatgaagaattatcagaaaaacaaccacacggcttcgatcctggacaggatgcaggaggattttaagtgctgcggggccgctaactacacagactggcagaccgtctctctcatgcccaagggccaggtccctgactcctgctgcatcaatgtcacgaaggactgtgggatttctttcaatgtgaagaatatctactctgagggctgcgtggagaagattgggggctggctgagaagcaatgtgctggtggtggctgcagcggccctgggcattgccttcgtggaggtactgggaattgtcttcgcctgctgcctcgtgaagagtatccgaagtggctatgaagtcatgtaggggtctggtctcttcagccccttcatctaagggagtgggatagtacactccaggtttttcaattaaa

SEQ ID NO: 3350 - DNA, 489 bp, Canis familiaris
cccaagagacctacacactggcccatgaggaaaacgtccggtttgtgtccgaagcttggcagcaagtggagcagcagctgggcagtggccccactggccatagtgggcccaggcctgtgcagtacgtggagaagacccccaacccccggctgcagaactttgtgcccattgacctggacgagtggtgggcgcagcagttcctggccaggatcacgaactgctcctagctgccttgtgaggaatgctgccgtgcagggctcagccctgcccaggggcagacccctcgccaggagaagaccgtggcgccccgttttgccgccgaggcaggccgcgcttcaccccaagtctggccaggagccggccacacctgaagtgccagcattcggacttttgcacctgctgagcccctggacgagctgtgccacgctgccgggggccgaatctgacctcaattctgctcactgtgcccagggaccagcccctgcggcc

SEQ ID NO: 3351 - DNA, 526 bp, Canis familiaris
  misc_feature (1)..(526): n = a or c or g or t
aaaaaactgggtacngnactacannatgaaaaggaaaagaaaggaaaagacaaagaagaacactaaaatcacttgatctgtgaacaaattatgattgtgtccgttaagttttattacactggagtgttttttttttgtatagtaaaattattttcagtataacttaaaataactaattttgtggccattatattgaaagtttgtaagttgtttattctagttccagcattctgtatacagtgaagtattgcatgataatgtaaattttgtgaaaacctagattaaaatatataaatctactccataaggtttatgattatattatgtgcaatatgattcctgcatctttaaaatattttcagagtaactgtgaatttttgttattggccataacttttagaaaaatcttgttcataatgtgatttttttttttttggtcattaattgcttttttttttttaaatatagtcttgtaaaatacctatttgtnnntagtttgagtaaannnnntatgattaccactaaa

SEQ ID NO: 3352 - DNA, 671 bp, Canis familiaris
  misc_feature (1)..(671): n = a or c or g or t
cagagaggagagattgaatttgangtagtttatgtggctnntgnngtggattctgatgatgaaaatgtagagtatgaagatgagagtngacatcgctaccgtttgtaccttgatgagttagagggaggtagtaatcctggagttggttgcaaagacacgagtggggaaatcaaagtgttgcaaggatttaataagaaggcagtaactgatggacatgaaaatggagacctgggaacttcaagtgaaactcctgtagaagacagtgcttctaaactggacgacctgcacagtctgtatcacaaaaaatcatactaaattagactgtacctctggacaagaatgttgatcagactcttccgagtttggggcactagggaaacggtgacaaagactatacaagatcaagggaggcttgcagcctaaatgaaaggcgggtacctcagggcttcatgtgaacaattctaaatgcataaaactccctgttttctgtgatataccataatcagctattgcatgtaaagcgactttgattttcttaaaaatgtaaagcaccaaagcatgtgtttcccaaaggggtattactaggctcttaagtaccaaatgaagcactactgttttatttggctccttttccatttagtagaaggaccgtgctaaccggaattttataa

SEQ ID NO: 3353 - DNA, 571 bp, Canis familiaris
  misc_feature (1)..(571): n = a or c or g or t
tctatgtactgtaaatatttttcaaagtaaagggaacaaatgtttagtttcatttgtataggaaattcccctgaccntaaagaatacattttgaaatgaaacaagtttacaaagatataacacaatctattttcttatttgtctcccttgtatctgtttgtgaggagtatgtttttagaatagaactatctccaaaattttctaagactatagtgaaagttttcttttaaaattttgagattatgaatgctaccaatattgtcatccatttagctgctggctgttataataggattcttcaatccctgggacctttggtcatgcattaaatttaagcgtaagccataaaacagattgttttttaaatgtataaggtagataataggttacgaatattttttctaaagaatatatattttaggagtttcagaaatctcttgcagtcatagaagagcattccttttgttagagattctcatatacaagggagaaatgagaataaattggtgaaaaagtatgcttgttaattttatccaagaatgccagtagaaaattcataatgtatatcttt

SEQ ID NO: 3354 - DNA, 523 bp, Canis familiaris
  misc_feature (1)..(523): n = a or c or g or t
ggccaccctnnaggncgacggcaccaagggccagagcgaagtgagttctgcgggactgcaagagagcctggccgtgcttgggagacacctgcagggctccgtgctcaccttcgtcgggggactgccagatgtgcctgtgacctcagcgccagtcacggctttctaccgcggctgtatgacgctggaggtcaaccagaaggcgctggacctggacgaggccgcctacaagcacagtgacatcacgtcccactcctgccccccggtcgagcaggaagacgggaggcctcggtctccccagcccaagcccaccacatgagcagctctggaccccgcactcccacaggccgagcttccttccagactgtttttctgccttgtaacatacatgtatatagctgagggcactgctgttagccaccaaagccacagccccgaccccggagcaccctccgtgtggagggctggcacatgccagagcagacccaggggatagttctctgttatttttattaccaaatgcttc

SEQ ID NO: 3355 - DNA, 640 bp, Canis familiaris
  misc_feature (1)..(640): n = a or c or g or t
ctgcgaagaagaaggtcctgtttgcactgtgctccctgctgcgccacttcccctacgcccaacaacagttcctgaaactgggggggctgcaggtcctcaggagcctggtacaggccaagggcacagaggtgctggccgtgcgtgtggtcactctgctttatgacctggtcactgaaaagatgtttgccgaggaggaggctgaactgacccaagagtcgtccccagagaagctgcagcagtatcgccaggtgcacctgctacccggcctgcgggagcaaggctggtgtgagatcaccgcccacctcctggcactccctgagcacgacgcccgagaaaaggtgctacagacgctgggcgccctcctggccacctgccgggaccgctaccaccaggacccccaactcagcaggatgctggtcagcctgcaggctgagtaccaggctctggccgccctggagctccgagnnnnnnnggatgagggatacttccgggagctgctgggctctatcaacagcttactgaaggagctgagatgaggctgctccctaatgcagggaccagactgggacatcagtgaggctggcgggcaccagttggggtgggcttctcggggtacactggccaggagggaggacttccc

SEQ ID NO: 3356 - DNA, 518 bp, Canis familiaris
  misc_feature (1)..(518): n = a or c or g or t
gtgaacatcagcaatgagctcatctcctacaaccaggacacngtcctccacaaggagatcgcagctgcctacatccatatgatccccaatgccgtgaccccgggggacggggaggtggacaagcaggaggagagccctttcgaccgcatgtcccggatctctcaggcgtcccccgatggtgaccctgctgccgagtccctctgggagctggactgcgagggggagatttcgttgggcaaaataacacctttcaccccaaacggaatccattaaactgcctaagaagcgcccctcctggatctacatgactgcacagacactaaccagcatgcggaatacacactcacagatacgtctccagtgctgctcagttgatcacattttctgtgtctgtgtctgtagtcgcccgtgtgctgagaagcctcaccagactgatttgctgtttgaagaattggcagaagtgtttgacataaactcagtcaaatataccccagtccagcagaaatgnannnagggnn

SEQ ID NO: 3357 - DNA, 475 bp, Canis familiaris
  misc_feature (1)..(475): n = a or c or g or t
ctgtgtttgtgcctatctctgtgttctgnctccagtcagtnnnngcctgatgannagcctggcccccaagcctggtcccccagggaacgggcagcccttcaagaggaacttagtgatgtcctcatctacctggtagcactagcagcccgctgccatgtggacctgccccaagcagtgctctccaagatggacctcaaccgccggcgctacccagcacatctgtcccgtggctctgccctcaagtatacagacttgccccatggggccacctgtgaagaccaagctgtggggcctgcaaaccttgaccgtgagtccacaggcgaggcctcaacctagaaatatgggcacaggacttgcaactcagcatggcatctgagaaacagaaagtggcctggctgtggaactttgttctagtccttttctaacagagcatgggtttaggggccttacttcnnaaggtctgaggcccaagaac

SEQ ID NO: 3358 - DNA, 615 bp, Canis familiaris
ctgattccacagaactacgtcaagctgctgtagtgcctggccggggaggccccacgtagaccttggcatctgggaacctgccttcatcctccagggcggaacccacagccgccggacgtgggaactgcagatcacggcttggcactccaggggcaggtggggggacaggacggaccccacagagctgcctaggtctgtggagcaggaggagagtagcaggattaacgggacggacctttcatttgtcaggcctctggactgagagttaataatgcagtcaggcctccccgctggtgatcactcctccaggcgcctccctgcacacctgctgctgagattttaaagggaactgtcctcactcgtggtggtgtccacaggatgtgctcttggcctcggttgatgtgtggagagggctgctgcgggcggggcggggggggggttccgtccaaacccagagagagggcagcacagagatgctccttcctagatggccaccccgggacccacattcactccacttagagcacactggcgtatttataacaggcttctcgttggtgcttctcacctgtgtgctgtttcccaaacaccaccttttggccccaagttctctgt

SEQ ID NO: 3359 - DNA, 676 bp, Canis familiaris
cctctaatctcgcccctggaactttagaccaacctattgtgtttgatcttcttctaaacaacttgggagaaacttttgatcttcagcttggtagatttaattgcccggtgaatggcacttatgttttcatttttcacatgctaaagctggcagtgaatgtgccactatatgtcaacctcatgaagaatgaagaagtcttggtatctgcctatgccaatgacggtgctccagaccacgaaactgctagcaatcatgcaattcttcagctcttccagggagaccagatatggttacgtttgcacaggggagcaatttatggaagtagttggaaatattctacattttcaggctatcttctttatcaagattgaaagtcagtgcagaattgacagtaaaaggatggtgttctaattagtggggttaaaggagaagtagtctttgcccttgtgactgattggattaggaaaatggtttcattcctagaggaaggaggaggtccttactttttttgttttcctccccaaggtgaaaaatttcaagctgaatgacaattagcactaatctggcactttataaattgtgatgtagcctcgctagtcaagctgtgaatgtatattgtttgcacttaatccttaactgtattaacgttcagcttactaaactgactgcctcaaat

SEQ ID NO: 3360 - DNA, 628 bp, Canis familiaris
  misc_feature (1)..(628): n = a or c or g or t
tttcagttgtactgtaggtcaaatnnccatcaaagtttctccactctgactgcatgtcagnngtgaagaanncaatagcaaaaggagacctaacactcntgacagatattaatgtcagaagtttaaaatttttccaagtttaactagaataaccaatgctttctactacctgcatggggttcactatttacttttttgtggcagtagcacagaaagatcacacataactttagactgtactgtagcaggtcacaatttacctttgtgtattttagatgtgtgtggaatacctatacttgttagtggaggttacttattaacggaggttggggtgggaagcaatagtactgcatatgggcacttgatccccgaccttccaactactctttccgctgcatgcatctgtccacatggctaacttttaatatgtgtatttttacattatgtaaattcttaatcagcttgtcttgtttagattgtatacatcattatatctgacattcttgtaactactgtatgatcaataagattcctagaagaaattctgcttttttaaaaaaacaaaagtaccatgtggagaggggtgacttttatcccacattactgggtggtcactaggatctctaaa

SEQ ID NO: 3361 - DNA, 580 bp, Canis familiaris
  misc_feature (1)..(580): n = a or c or g or t
tttatctgnnactccctggtgtcctgtgcaccctttggtcacatactcatgtctnnagagcaaacaggctcactcccacctcacaggccaagcaaaagcagatggtagtaaagagacacatacctgtgtcggcatcccttctcctgctctccctgcctatgctaacaggctgacataacagccccttcatcaagcagaaacctgacctctgtttcaggcagctagccagccagatggaggggcctagtgtcatctcagccagctggggcttgatccaaacctgatccatcccacccagcagtcatcttggcttatgtggaattccgaatgacattcaaatgccaactggtgctttatttttcttttagctcaataaaatggaatgggatgggtcccagccaatactgtaatttttaagcctattttatttgtacctataaatactgtacagacagaatatatatatgtatttgtatatatagatacatatatatgcacatctgtataagcacacatattctatcatgaatatattataatctgtgggtgcaagcaggggtctggaaagcccaagggtgca

SEQ ID NO: 3362 - DNA, 412 bp, Canis familiaris
  misc_feature (1)..(412): n = a or c or g or t
ggnancgtggggtgtnnnncatgctccccctccgtgcactcccggcacatnnnngtctnnnaagactggcagtaaaagtccatcacctgcaggtaacacaaaaacaatcccaggttccataccactaanngacgcttcctatgcactaggccctgggtaggcattctgtcccttaattctcatggccttcccaggatggaggcaggatgtccagtggcacagaagaaaaggaaggataaactgttaggcgccaggtcaccaacggaggtgggtcagactccaaagctgctgctgtcatcacaaaaccagcttttctgtggctcctgccctaaaacagaacaggttggggctgtgatgcttaaactttcccatcttaggacagtcttccactctttataaattattgagaact

SEQ ID NO: 3363 - DNA, 617 bp, Canis familiaris
  misc_feature (1)..(617): n = a or c or g or t
tatggtnncctttanaagaaagaaaaaaaaaacnntcnagtatttttgtttttagcagtcattatntacaatttgcaatggttagcttggcaaggcttccttctgtttatccctgtagtcaccatttatcagtcaggaacagttaaaagaggaaaatatttatttttatttttttggtgtcttttcaaaaaattgaaaagtaaaaattcgttaaaaccttaagttaaatataaatgttagaactcaacaatgttggcttttagattttatacagtatttgttttgttttggttttgagtgtatataatatggcgttagcaatatggttccaatagagaggagttaaatatatattattaaaggagacctgtagcagtcaaagattttattgatttaatggcaaataaaggaaattaattaaaatgttttcatttttcctgctgtaattctgcattaagctcacatgaaaatcatgattctagagtttggaatgcaaaattaattgtttcaccctcaagctgggaatatttttaaaaataaatactataatataggtatcaaattattacctcccccctttgtgttgaaatttttnnnattaaattgataaaactttg

SEQ ID NO: 3364 - DNA, 631 bp, Canis familiaris
  misc_feature (1)..(631): n = a or c or g or t
tagacaggtgtggnnagcatngagagctgggtgggctcatcttgtcactatcttcacaagctctgtggggcttgcaggcctctacctggctgctcttatgtgtccctcacactgttgggtcagatgccagctgcctcctcctgcacccaggaactctttcatgccctctgtgcccccacccaaaccaggaggcaaaatgggtagctctagtttccttttaaacctggctgtttggaagcaattctaaagcccaggacttttcagtcaagaggaaaggtttagggtcctggcaacattctctgatactgtagagcaggtgcaggaggagaacggggtgagaaggcagaggtactggctagcctgcccttccccaggtctggatacctcgggtcctccccttactcttgcaccaagagtaaactccgtaggaaaaaaaccctgacaagtagcaagagtcctcctccccacgtgggtagcccttcctgcgactcaccaggtagacctccccaggtaggctgagggctccgcagcactgctgcctgccagtggagctgagcaaggagcacaggcgccagcagggaggccttgctccttcctctctccctatgaggagatgtggagacagatggac

SEQ ID NO: 3365 - DNA, 693 bp, Canis familiaris
  misc_feature (1)..(693): n = a or c or g or t
tgttttttttccctttccccattcccttgtaaatacatttcgttctatgtgacttggtntggaaatagnnaactggtactgtaatttgcannaaataaaaagtaggttngcctggaaatgaaantaaaattcacaagtgtgtggtctttatttcagtacccaaccttcttttcttcaccctatcttgctactgcaatatgtagtcacattgccatctccgttcctccaattagagaaacatggatctttgttaaaaaatcaagatacaaacactagttctcgttctttaaatgatcttattccattgtatagccccaagaggtgcagcttccatcttggaaacctttggatttggtgtagaggaagctttgcagacactgctttgaaaagaaagaaaatatccctgaaagggacaaatttttaaaatgtgtataagtctttgattactgtgttcatggtttactgtagctgtattttcttttaactttcatcccattagtaatggtctttgggagtatctgtaaaatataagaacaccacgaaccgtggggctgtacctcccaggtaaccaacacatgttgtgtttgaatctgctcatttccaatactggatgatgtatgtaaacatgttatgtctcttagtgcaaaaagaaacatcattttttttagggctggctnnnnnngtcaggcctaa

SEQ ID NO: 3366 - DNA, 547 bp, Canis familiaris
  misc_feature (1)..(547): n = a or c or g or t
tcccttgctgattatatgtgttgatatttttnnngtcagttttancttngatttttatagaaattaacatttaaaaaatgtgatcacatttgtcaaattttccccttatggtttgtgtattttgtatgttatttaagaaaactttgagattgtaaagatacttaatatgttcttctaaaaattgaaagttttgctctttacacttaggtctttaatctggaattgatttttgtgtcaggtggcaggtagaaatctgattttttctccatttgaattgtcacctgtcctcaaaccactcattaatccattcttgccctttggtcacttagctggtttcctttatatgtgtgtgcatatatttcctggctctctttctgtatattttgttcttgcaccattgccctattgtttttatttactataagtttataataagttttaatatatctggcaaagatagctcctgtccttcagaattgtatttttatttttcctttagaattatnnnnnctcttttaatcctttnnngctctttgtgaattttagg

SEQ ID NO: 3367 - DNA, 253 bp, Canis familiaris
  misc_feature (1)..(253): n = a or c or g or t
gttgccattagcaacaacaagaaatgggtcctgtctgcttcaaaggacaggacggtgagactgtggaatattgaagaaattgaccaaattcnnnnngtaatcaagtacaaaannnnnnngggcttaaaggtgaaacagtgtgaagtatgtgagaagcctttctccaccnacgaaagtganatcttttctgaannagtnaccaaatgtgtgttctgccgaatgagcgaggacttgtcagcnnaagccttgtcag

SEQ ID NO: 3368 - DNA, 503 bp, Canis familiaris
  misc_feature (1)..(503): n = a or c or g or t
attttatttnnntttttgtccccaaatgggcttgcaaaagaaaaaaggatgcaggaaatttcgtgtaagtaattnctggtgttcttttgtaagtaaagtttatcggacatagaccagcctaagccaagcctataacctgctgcccccaactgcactgtagctttttaaaataatgctgctctcagcagtgggctcagctctctaaatctttaaatggctgccatgctgttactacctaattgggtcacgagagagaagataaggtttaaaaaaaaaatcacaattcttcagaaaagaagaaactgtttcattttattatctatatatatgatttcagaagatgatggaaggtccctcctaaagaggggtgtcaggaaccaacctgccgaatccttaaatggctaagaaaagaagatgaatatgagttctgttttaaaactacaaaatgagcctaaaatccagcaannnnnntctgtttaagaaaaatgatttacattaaactt

SEQ ID NO: 3369 - DNA, 531 bp, Canis familiaris
  misc_feature (1)..(531): n = a or c or g or t
tgagtagctcaggctgtggnnnntacctcacccccagnnctctcccagtgctacagcctgctcacctctcctgcttcctgcacatgacaggcatgtatgccgcttactctgttctgttcgcttgctcccgttctgttcagcttttgcttcgcactggtgtggagaccctagctcccagctcctctcatgctaccttttgacactacgaaggaaggtttctaaaaggcaggagcaggatggaagttctttgctgccctctccaagtttgaagcagggcccctgagagactgaggccgtcctggcctccattgctgcttattgtaccccttaaccgcctgcacaaaggacggactgggctggttgtgccctcggctgtctacctcccagcaagagagctctgggctgcctcccgctgttccccccggggctggaggggcgacaggaggcctgcgcccgaggctgtgagctgccgcattgcatgctgggacccagctcctactctccgccccacccctcgcccgcccgggccgc

SEQ ID NO: 3370 - DNA, 568 bp, Canis familiaris
  misc_feature (1)..(568): n = a or c or g or t
aaagaccagagattttatttttttaaaagagaaatcagtntacctgtttnnaaaaaaantaaatccgattcaccttgctcaccctggggagatggggtgnnggcctcaggctccgggtgacgagtggacagtgcaccccgctccctccccagcccccccagcctgtgccttctgcagcctctgtggggtgggcgctcccaaacctcgactcggctttcttgtgccttaaaacccgctgctgtggcagggccctctcgcggcagcagatgcgggggccgggggggtgggcctcccgcgtggatcacgcgcctggggcagcgggaggccgtgagctgcagggtccagccggcacccccaatccgtttaatcaagtgtgtgattctccccatccccggccccagggaccctggcgtggggcgagaccccgagggtgccgtccctgtccttcagctcggagctctgtgtccactgtaacctctgtattatgctttgatgcagttgcagacatctgtgcctagcaatatttccagttgaccaaatattctaatcttttttcatttatatgcaa

SEQ ID NO: 3371 - DNA, 127 bp, Canis familiaris
tgtgccttatgccttcatggggcttactgaaatctatgtatttatttcacctgtgatttttttttccctttctcactttaactgaaagaattttgtatgttgtggaaatataatcatttcatgtttt

SEQ ID NO: 3372 - DNA, 642 bp, Canis familiaris
  misc_feature (1)..(642): n = a or c or g or t
cngcatttcacagcttttccggttaaattnnngnactaaacgtttagatgcataccaaattatgcatnngnnnttaatataaaaggctggctaccagctttgacacagcactattcatnntctggccaaacaactgtggttaaacaacacatgtaaattgctttttaacagctgatactataataagacaaagccaaaatgcaaaaattgggctttgattggcactttttgaaaaatatgcaacaaatatgggatgtaatctggatggccgcttctgtacttaatgtgaagtatttagatacctttttgaacacttaacagtttcttctgacaatgacttttgtaaggattggtactatctatcattccttataatgtacattgtctgtcactaatcctcagatcttgctgtattgtcacctaaattggtacaggtactgatgaaaatatctaatggataatcataacactcttggtcacatgtttttcctgcagcctgaaggtttttaaaagaaaaagatatcaaatgcctgctgctaccacccttttaaattgctatcttttgaaaagcaccagtatgtgttttagattgatttccctattttagggaaatgacagacagtagtttcannnntgatggta

SEQ ID NO: 3373 - DNA, 634 bp, Canis familiaris
  misc_feature (1)..(634): n = a or c or g or t
gcttgggtgncntcacagttnnataacaaatgacttttttttcntagnnagacatttgccttaaaggctttaaattgttttgtttgcaaagagaaaaaaatgtttnnnattaaattcgggtactattaaacagcacatgttnacaataccaaaaaaagaaaaaaatctacaaangccactttattttaggatatcatgtgaccgtttccagagctacaacatgccatgtacagctaccagcttttgtcatagttttgactcttaatcccataccttcatttccctctctcccctcaaaacaactaatttaaatttgctttgttgttgttgttgttgttgttaactgaattgagttgagattgatatgttttcgctgggttttatctctctcaacttcctgcacttacaatatgaaatagaaacttttgtctccactgagatgacgagatgtgtgagacacagtcggccaacgtgagaaaatgacacataagctttggtcaccaggtggtgtgatcagaagcttgaaatttaacactcttgtcctcactcagttctagtactgaatgcctactctgctctctgttagaaatatgaaatggtgtttgatattgtctgagacattatggaaagattt

SEQ ID NO: 3374 - DNA, 671 bp, Canis familiaris
  misc_feature (1)..(671): n = a or c or g or t
tgcagggtgtacccgagcgtcctgctntgnngaaagcnanagcatcnnanncttttttgtaatagtttggtgcttatcttttagtaagatttatcacaaantgtagcacaaagtaatataatttataatttacaaattgactaaaattgggatagtagagtatttgaaagaataaacatgtttccgtttattaaaaaaagaaaaaatgatgtccagaaccgctaaccctagacacccagcattaagtgcgtggccttgtcccaggagggcagaggacggggagcacctgccagggagcgaagctttggtgcctacttcttattctgtgggcatagctgcaggcctcactgagccgcccccatgccccaccacccttacttcctccctgctaatgccccagcctcaggagcagctccttccacagaagtgcgagggacctttgcctccactagtcctgtcctgcgttgggtttgccatgtcatctggaataatacttgaagttttgttctttgttaaaaagaaaaatgttttttatcttttgttgaaatcatctattatttttgtttgcaaannnnnnaactttttgcttcttctcaggaataggattttcaactgttgtcttgctcttgatacagactctgagaagcagcaccgtgtttnnngaagaggcc

SEQ ID NO: 3375 - DNA, 520 bp, Canis familiaris
atgcccaagaaaattttccatgtatttacaaaaaaggatattttataatagtatatagtcatgtgttacatagtacggttttaaaatataaatggagtttgtatagattcacaataatatggcataaacagagaatataaaggtatagtctagactggattctgtatcactaaagtgcagcactgtacttgtatatctgtatgggggatgctcctgagaatgcccaagattgagatggcgctggtggtggtggccaggcgataatattacagaacaagaaacaataaaatactgacctttctaacagctactttgaaattttaaagatatccaacagaatcactcctgctgaaagtatactttctgtcacctacagttctacctgagggaagatgagtttcatatttatggcctctcgtgtcacaggtgcagctgtattaggaggggataggaagtatgcctggtagaataacatttacgtacttttttataaagcagaatttttatataaatacttttt

SEQ ID NO: 3376 - DNA, 74 bp, Canis familiaris
  misc_feature (1)..(74): n = a or c or g or t
gccttcagctcatggtatgaagggggggtcctgggatcaagtctcatatccggctccccatgaggnnnnnnntt

SEQ ID NO: 3377 - DNA, 599 bp, Canis familiaris
  misc_feature (1)..(599): n = a or c or g or t
gaggtggtgaaagccactgctaggggctgcatcaccatcataggtggtnnagacactgccacttgctgtgccaaatggaacacagaggataaagtcagccatgtgagcactgggggtggtgcgagtttagaactcttggaaggcaaagtccttcctggggtggatgctctcagcagtgtttagtactttcctgccttttggttcctgtgcacagtccctaagtcaacctagcacttgctgcatctctccttggcattagctaaaatcttccctcacgtcaagattcagctagtggccaagagatgcagtaccaggaacccttaaacaggcgcacagcatctcagttcctctttactgcaccctggatttgcctacattcttcaggatcccatttgaatttcttagtgactaaaccattgtgcattctagagtgcatatatttatattttgcctgttagaagaaaatgagctgtgttggcttttctttttgaagtagcttattctgattatagctgtgtcattgtttcactactcagtatggaaataagatgaaattccaattgtaggtaggtaggaagacaaagttggtgatctattaa

SEQ ID NO: 3378 - DNA, 635 bp, Canis familiaris
  misc_feature (1)..(635): n = a or c or g or t
ccaggtacctgggtgnngccctcaccanngcaggtcccacgcacgtganntcagttttaggaccaagagctgtgtnnnantcnnagatttctagcttttcctccaggggaccattgccggtgaggctcacagcccagagcccttggccctgctgagagtaatttgtattccggaccttgtccagctgagagccttgtacaccagattcttgaggtatcggcagcactttttgttttccatgaggtttttggaccatgggctgagctcaggcactttctgtaagagaatgttgtccgtaaagatggttgatttgctttcactcctccactcccatcacagcggccctcctgagggctgaccaagaggccagtggaactgccctggtggctgtgggggagggccaaagcctgctgagctgattgtccagctgctgctccagccctcccaccttaacagcacagaggtggtcaccccagggacagccaggcacctgcctgggggaggggtgcgccttctgtccctgtcactgcttcccatatggcccaacctggccacctggattggttttaaagctgtgctgacagccttttttgtctccttttggtattcacaacagccagggacatgattttgat

SEQ ID NO: 3379 - DNA, 273 bp, Canis familiaris
  misc_feature (1)..(273): n = a or c or g or t
agaaagaagtgccctggatccctgnnnnaggagtnnnctggacaggaccctcaggcaggataaggaccacagagcagtgttacccaggtcccagcttcagagggtgagctatgtggnncagagtcgagagctgcagtcaggctccaaagaccaggcttcagttctcacctcatgtgctgctaaatggtgtnnnnnttgggcaagtcatgtgtctccctgacctccagagtctccacttgtaaaatggagccagtagtactgaccctatagccc

SEQ ID NO: 3380 - DNA, 571 bp, Canis familiaris
  misc_feature (1)..(571): n = a or c or g or t
agacagagctnnacgtcagcgagcaagtccagagagannnnntcaagctctctcagacnnnncaggtgcagctnnagcnnatnnnnnanncgngctccctnnagcnngtgcnnnnnatnntgaatgacaccaagctgacggacatcaaccagctccctgagacatgaccccgtgcaggacgctggnntgcactctgggtttttaactcctcttagagcaacattaattattatttaactcttaactgaagacgtcacagannaagcctggagcgatgcttgcttctggtgggagaagcacgtgtagtgcggggcagcccagccaggggnacgtgcgnnnaaggactttcccacggggacactgatggcccatgctggactccgctgaggtggggtctgccgggtaacggacaaagtgctgctttatccaatgttttcctgcctttcgagcaacagcccaatcgtgtttggaatgacagtttctgttcctagatgttgggagagagcctttccctttctgttgtctggagtcagcggtgaccgtgttgggccagcagaaggtgtcgtgtgct

SEQ ID NO: 3381 - DNA, 547 bp, Canis familiaris
  misc_feature (1)..(538): n = a or c or g or t
ggccatgtcagcatccntgagctacgannagctggtnngaaggaatgtggagctcttcattgccacttctcagaagttcgtccaggagaccgagctgagccagcgcatcagggagtgggaagacaccatccagcccctgctgcaggagcaggaacagcacgtgccctttgacatccatacctatggggaccaggtggtctcaaggttcagccagctcaaccagtggtgtcccttcgcggagctagtggctgggcagcctgcctttgaggtgtgccgctccatgctggcctccctgcagctggccaacgactacacggtggagataacccagcagccggggctggaggcggccgtggacaccatgtccctgagactgctcacgcatcagcgggcccacaagcgcttccagacctacactgccccctccatggcccagccctgagtggggagcactgaggctgggagtgggctctggagctcccccaggggtgccgggcacccatctgcccgctccaccctgtttcctggctggctcagcccaataaaa

SEQ ID NO: 3382 - DNA, 600 bp, Canis familiaris
  misc_feature (1)..(600): n = a or c or g or t
agttctatcgcaacgnnnagtacgacctggacttcaagtcacctgatgaccctgctcggcacatcactggggagaagctgggcgagctgtataagagcttcatcaagaactaccctgtggtctccatcgaggacccatttgaccaggacgactgggccacctggacctcattcctctcgggggttaacatccagattgtgggggacgacctcacagtcaccaaccccaagaggattgcccaggccgtggagaagaaggcctgcaactgcctgctgctgaaggtcaaccagatcggctccgtgactgagtccatccaggcctgcaaactggctcagtctaacggctggggggtgatggtgagccaccgctccggggagacggaggacacatttatcgccgacctcgtcgtggggctctgcacagggcagatcaagactggtgctccctgccgctcggagcggctggccaagtacaaccagctcatgaggattgaagaggctctcggggacaaggctgtctttgccggacgcaagttccgtaacccgaaggccaagtgagaagctggacnnnnnaagaccccatgggacccatctgggccct

SEQ ID NO: 3383 - DNA, 581 bp, Canis familiaris
  misc_feature (1)..(581): n = a or c or g or t
ctggtannacagccacccgcacagccccgcgctgcngtcgctgcaggacatcgactcgcagatnnactancagctgcggctgcanngctccagnnncggcttccagnnctgcnnnnnnnngctctgctccccttactactnnnnnnncccgggccnnnngtnnaagatctcccccttctgggtgatgccacccccggagcaaaggcccagtgactacggcatccccatggacgtggagatggcctacgtccaggacaactttctgactaatgacatccttcatgagatgatgctgctggtggaattctacaagggcgcccccgacctcgtgaggttccaggagccctggagccaggagcacacgtaccttgacaagctgaagatctccttggccagcaggacacccaaggaccagggcctgtgccacgtgctggagcaggtttacagcnnnctcaaacaagggagctgaggcatcgcctccgagggcctggggggcctcttggtcagactctgnaccccagtggttccagctgaggaggaacgggtctggggttttgtttgcagctatgctgctgtccccg

SEQ ID NO: 3384 - DNA, 484 bp, Canis familiaris
  misc_feature (1)..(484): n = a or c or g or t
tnggtctnntcctggtnnnngtnnnngnnnnngtccccccgcggcncgcgnnggnngnnnnnngcgnntgnntgctccgactgcgatgacggcggcggcctggcccactgcgctgccctccctgnntccgccccgtgcagccccggctccccgccaagggccagggccnntggggcgcaaaacggtttcccgggcacccgccctcctcaaccaccctgctgcccctgcctccccaccccccgagccccacaaaagctggagaagatgaaggaggttcctcagacgctgcccactcccaaagcaggtcttgcttggggccacctcccacttggggatgggggaaggggacactggagatgcctgacctgccccttaagggcatgaggaaggagcttcaggtaggcgcacagggctctagctctagccaaggggctgctggaactcaaggggcctcttctccactgggcttactcagaactggact

SEQ ID NO: 3385 - DNA, 587 bp, Canis familiaris
  misc_feature (1)..(587): n = a or c or g or t
aggattgtnggnataaatnnacctccaatcgaacattgggactagtggttttgttagggattgtccttgggaatttgtnnaaggaaaagaagacagatgaagcaaataaaagtatagatagaatagaaaattagcaaaggacattgatctaggaacctttaaaacaaacttttgcaaaacactctcaggtcttgttaccacataattagatttgaataagcagtcttgcaatatgttaaagagttaagaaccaggaaatcagatgtagaccatatttgcctggatttagtttaagtgttatctagcaaaatccttcccctgtctcatcctgtaggatttgagtgaccttgaatatttaagttgatacattcttctgctcattgtgattcccatctgcagttacaggaatggtatgagtttgggcactttaaaagatgcctgatttatatctcatccaaatgaatgaatgtaggaaaacggaccttaattttagggaaaaattaaagctgctatagaaagttgaggtttattgtttttgttgtaacnnnnnnttactgccagaagctgtaattgaggaaaccattctc

SEQ ID NO: 3386 - DNA, 675 bp, Canis familiaris
  misc_feature (1)..(675): n = a or c or g or t
gtngatgacatgctggcgaatgacattgcccggctgatggtgatggnncgccaggaggagtccttgatgccntnnnaggctgtgaagggcggtgnnttcgacggcaccatgaacgggccctttgggcacggctacggcgaaggggccggcgagggcatcgatgacgtagagtgggtagtgggtaaggacaagcccacctacgacgagatcttctacacactatcgcctgtcaatggtaagatcacgggcgccaatgccaaaaaggagatggtgaaatccaagctgcccaacacggtactggggaagatctggaagctggccgacgtggacaaggatgggctgctggatgatgaggagtttgccctagccaaccacctcatcaaagtcaagctagagggccatgagctgcctgccgacctgcccccacacctgatccccccctccaagcggaggcatgagtgagcgtagcacccccgcccggcagggctgctgtggggaggggaagggccataaagactgagccatgattctgcagctcttgcaaagaaaaaccaccatctttcttttcaggccgttcctgggcccagcagggaggcgggtaatagtcgtatgtgaatgatggaattttgtgcacaagaactatggatatttttaatatataatgtngaggnnnnn

SEQ ID NO: 3387 - DNA, 573 bp, Canis familiaris
  misc_feature (1)..(573): n = a or c or g or t
gaaaagaaaaaagttacagggtgatgtnntanaatgaaagctgctgacagtcgcagggagaacagctgaggacccatagccagcgacacaaccagaaggtgcctgtgtccggnaggcacatgtgtggcccttccggggtctgttcctgaaggtgcaggcaggacctttacaaacagatagtaaatgctttctccttctgctagttggtgaaaacagcctcttccagggaattttagcatctttttaagtatcttgtttactctgggaagccttgttttcctattttagaacatgctgtgtttaatgaaactggttaaaagttgagtttttgtttaagtgctctttccaggtgaaaactacttttttggtttgatttgacggtaagaaagggagggggggaactttgttgttttaatttaataattacagttagcctatgatgaagtattcgattcttagcaatgccactaataagttttaagttgtcaggaattgtgaacatccatacggtactcttggtcatggcaaagaccgttaccctgagataaatggctcatattttggtgcggtgtt

SEQ ID NO: 3388 - DNA, 596 bp, Canis familiaris
tctaattgccacattgttcataataccaatctttgcatgtgggggtgtggagtagcactggtgagttgggtgctacacagtttatgcctgaccccaagctcatggatcacgggcagtcccatccagaagatgtagatatgtacagcactagaagctgaaatagtctgcatagagaactgcaagatgtgtgaagttgaaaataatgatgaaaaaaatcatgtaaagggtaactgtgacacaaaaagtatcacttttttttaggatataacttttaaacaaaagtttttccctcacatctgatacaatgtacagtttgaccagtcacataaggggttaaaacacaaactgtaaatttaatccaaacaatattaaatggttgatgaagaggcagaagtagaagttttgggatgcatttgataatttttaagagtgtttattaaaaaaaacaaaaatagagtaaatatataaatactgatgaaatatgtatgtgtatatataaatatttatacagatacatatacatatttgctttagatttttcaaattattgttagctaaattagaatggtgtatagaaggatgtgttcctctgcttt

SEQ ID NO: 3389 - DNA, 557 bp, Canis familiaris
  misc_feature (1)..(557): n = a or c or g or t
tntatcatcaagttannnnnnngcaagcttggggaagaggaannnnnnaggnnaacaaagacagacacacagnngcaacnntgggccagaggtgcnntaaaacaagaacaccattgaaaagggccaggaacaaggtcctgtgcccaaaggtatgaatgtgagtctttgagaattgccttgataaagagggcttggacaggaagagagtagaagcaaagaagcgaactatgaatgcctaagtcagaagcgcctgcaaggtcagaggagaccgaggtcttctaggaggacatgtctctatgcttccacctgagatcaacctgtgtctctggttcttgtcttgcctgtggaccccgtcttctcctttcatgtttactattaggcatgacatttttggtaaaacagggatgccgtttccaagagcagctataaaacagttttcctgaagntagtcactctcaggagtggaaggaacatagccaggttcagcaattcacagactgtttccaaaaataatttttaaacttttccacaaggcatctgtgtccttaaccattgca

SEQ ID NO: 3390 - DNA, 645 bp, Canis familiaris
  misc_feature (1)..(645): n = a or c or g or t
tacccccatttatgantgcaactcgaggtgtcaatgnnnacccgnnnntcccaatannanngtacaaaaaggcacccagtattcactttgcatctttcgaactagtaatggctgtggctggggtgtaaaaacccttgtgaagattaaaagaatgagttttgtcatggaatatgttggagaggtaatcacaagcgaagaagctgaaagacggggacaattatatgacaacaagggaatcacatatctctttgatctggattatgaatctgatgaattcacagtggatgcagcccgatatggaaatgtctctcattttgttaatcacagttgtgacccaaatcttcaggtgttcaatgttttcattgacaaccttgatacccgtcttccccgaatagcattattttccacaagaactataaatgctggagaagagctcacttttgattatcaaatgaaaggttctggagatatatcttcagattctgttgaccacagcccagccaaaaagagggtcagaactgtgtgcaagtgtggagctgtgacttgcagaggttacctcaactgaattttcaggaaatagagctgacaattgtagttttgtttttttttaatgttaacatttcaaaaaagtatttgggactcttt

SEQ ID NO: 3391 - DNA, 628 bp, Canis familiaris
tgcctgaccctggcctgatgcccctgcctgacactgctgcggatttagattggtccaacttggtggatgctgccaaggcctacgaggtccagagagcctccttctttgctgctagtgacgaaagccaccggcccttgagtgctgcatccaatggtgaccagcttgaggagcaggctctggcccagatgaagtcttatagcagcagtaaagattcctcccccactctggcttctaaagtggaccagctggaaggtatgctgaagatgctccgggaagatttgaagaaggagaaggaagacaaagcccacctgcaggcagaggtccagcacttgcgggaggacaacctgagactgcaggaggagtcccagaacgcctccgacaagctgaagaaattcacggaatgggtcttcaataccatagacatgagttagggcaagcagccatggccggtcgggccagggggccccggggtgcgctctagtgaggcccggcagtccctcagccctgccactggacgccttctccgcacacccgccctcgcttcctacttcggccccttttggggagcgcacaacacaacaattgcagatcaacaatcattatctgccttttgtagaaaagaaaaaca

SEQ ID NO: 3392 - DNA, 557 bp, Canis familiaris
  misc_feature (1)..(557): n = a or c or g or t
gannntaaaagcagagagaggaagtcagacnnnaataacagnngcaaaatttatgaagaaaccgttcaccaaataagtacaaatggctgtttagacatcaaagtataactttgcaaggaaggaaaaaaaaacatgcaaattaaagtttccaagagataccttccccctcttacatggcaaaggaaaaaaaaaatctttcactaacatagttgtgaggaaacatgcatttttcatctgtggctagtggggatatgaatggatacaacctccattgacagcagtttggcaataactaccaaaattcaaaatgcacatcatctttaattcccttatttgaattctaggaatttattctataggtacatttgcgagaaatgactttacatacaaagttattcaatgcagcattgtgtgttataaccaaagcctgaaaacaacctcattgcctaatcattgaggttaaaaatttatggtaagcccgtacttactatctgatacatgaaaagaggcaactatttacatattgacagaagaattgccaagatacattattaaca

SEQ ID NO: 3393 - DNA, 599 bp, Canis familiaris
  misc_feature (1)..(599): n = a or c or g or t
agagaagctacacatcaaacntattcaaatccagtnnaagangnnncttgcaagttacttgttttctcacctgagggtagcattttnnnctgcagtgggattgctttcaaggcaaagtgagaagttactaatcctgctgcttctcgtcaaatgacactcctctgccaatttctcctctgcctttatgattcctggctcaaatcacaggttggaagaaacacccctgcattttccaagagggaagtatcgagattacagtcaagcccgagagggttgtgtgaacactcagtacaagttggcatgggacagatcgaagcctggacatgagccattttctatcatcgtcctacatcttgctgtttctcatcgcacatccttgtggatcattaatgtgtttacaagcagatagtttcgtatgaagcatttatttacccttattattaagatgcatgtgtttccctggaagcatcagctttgaggcctttaaagcgcatgataaaagcaggcatgcaaagagaagaagagttctgcccacaggccatgagcaggttggctcagcatctcaaatggtggcaaaataagaggtaaatacaattgaa

SEQ ID NO: 3394 - DNA, 528 bp, Canis familiaris
  misc_feature (1)..(528): n = a or c or g or t
gtcnncagcgacttctaccnnaggatgcagaacagcgnnnnnntgcgcgagctcgtggtcaccatcgccagggagggccttgaggnnnnnnncagtctgcagctgaatccagagtggcgcatgttgaagaaccggcctttcttgggctccatctcccagcaaaatatccgctcccagcagcgtcctcggatccaggagctgggaaacctgtatactcctgactccctgagacctgaggaaggccccgaaaagcctcacctgaacctttggctggaagcccctgacctcctcttggctgaaattgacctccccaaactggatggagctctggggctgtcgctggagattggggagaaccgcctggtgatggggggcccccagcagctttaccatctcgatgcctatattcccctgcggatcaactctgaggagagcaaggcagccttccataggangnggaagcaattgatggtggccatgcctcttctgtcggtgccttcttgactgtgtttctttccgtgcttccac

SEQ ID NO: 3395 - DNA, 459 bp, Canis familiaris
  misc_feature (1)..(459): n = a or c or g or t
aatctcagcattttcannttgatacagtagagtcacactcannngctggttatatttttagnntgtgcctccgaannaaatcaagcatgctcannattatccctgaaaatcccatattgccagtgaagttctctgtatagtcttacagttagaatccctatagagtgatacacaggtatgaatatattatgaatatagtaagtannntatanncaatacacaatannaactacatagcaacagtagactcttttaacaccaataattaaactttaaatgtgtgttttgttttctgggcactaggtacgcttgattttatgtaannntnttgctaattccatgccttgtgatagatctagagtgtgagctccacaagggtaaagatttttatctggtttgtttgtgaatatatcctcagagcctagaacagggcccagcacacagtaagcattcaataaa

SEQ ID NO: 3396 - DNA, 548 bp, Canis familiaris
  misc_feature (1)..(548): n = a or c or g or t
ccattttgaactannngcgtcatnnacagctcattgtaaatgatggcattaatttattggatgccttttgtattaataaggcttttctggaagttaaggtttggttctgaacccagaagtagaaaaaaaaccttactacattccttggaggttctgattgactctgaagatcttgacacaaggagagtgaagccagctagaaacccctttctatggtgtgttagaagaagccagattttttggaattgactcattgattgaacacctggaagtggcaataaagaattctcaaccaccagaggatcattcgccaatatctcgaaaggaatttgtccgatttcttctagccactccaaccaaatcagaattgcgttgccagggtttaaacttcagtggtgctgatctttctcgtttggaccttcgatatattaacttcaaaatggccaatttgagccgctgcaatcttgcacatgctaatctctgctgtgcaaatcttgaacgagctgatctctctggatcagtgcttgatgtaagaatcattttttttt

SEQ ID NO: 3397 - DNA, 601 bp, Canis familiaris
  misc_feature (1)..(601): n = a or c or g or t
cngagcctgtcccagaagattgtgatnntgncnngtcagannnnnngatagangagtcgctctttgaatcccaagaagataaaaaaggtgatgaggttgatgacnntgagagccaccactcgtgctcacccntnnaagattctgaggccccaggagacgtaagccaagaggccccggacacggatggaccaacaggcaaaaagaaggaaggtggccaggaagtagaattccaggaagccaaagtccacagcgagccagaagatgagattcaaacccaaacacgggacgagacacagaaacaagagggagaaccggccaaatcagaacccacaggatcctaatgcatcatgtccaccctgagtgtctgcaagaccggaatgtgaagacgagtggtaggaggaaatggacgctgctgacgagactcgagaccagtgtttcagactcagaaccgaagaacaggcccctcgactgacctcctttctggagcaccctgacaaccctgaggctgcatcgggagctagagccatttaacgtttcctcttcgcagggccaccccattacnnnnncttgatacccttattataatgtttctgatttaagg

SEQ ID NO: 3398 - DNA, 633 bp, Canis familiaris
  misc_feature (1)..(633): n = a or c or g or t
cattgggnnnatcacttgacctctctgagnntcaatttcctcatctgtgaaatggggataataacagtaccattctcatgttgtttgtgaagatcaaaactggcgtgtcaagtacttagcctactcccagaacctttagcctctggagagcttaaaaatgctttcaagtgaatctgccgccttgaggacccaattgnnaatcaagaccctgcttgctgtgcnntctgggatccccggacccaccatgctccagttcggctacacggtnctgcagtgcatccagctccttctccacttcctgctgctgctggtggctgctgtgactgagagccacacgctccttctccagggccagcaccttagccagcagctgcccctccagctcgtccatcttggagtgcagggcggtgggcatcgcaggcgcaggggcgggggcagctgagaagttcacacgggccgggagctcctgctgcttatgaggcagaagaaagggcatgtgaggtcacttggaaggaggaaggagagagacacagggctcagagatgcctactaccactgtcgagtgaccccaggggcccatccttctccaactccaatgcaaatctttttgtttcatcatcatattgagagcaa

SEQ ID NO: 3399 - DNA, 672 bp, Canis familiaris
  misc_feature (1)..(672): n = a or c or g or t
acgatcagacccgtgcatgatgatatcctcanngctcagctgaggcctggnnannagattgacctactcatgcactgtgtcaagggcannngaaaagatcatgccaagttttcacctgtggcaacagccagttacaggctcctgccagacatcaccctgcttgagcccgtggaaggggatgcagcggaggagctgagccgatgcttctcacctggtgtcattgaggtgcaggaagtccaaggtaaaaaggtggccagggtggccaatccccggctagataccttcagcagggaagtgttccggaaggagaagctgaagaaggttgtccgccttgcgcgggttcgagaccattacatcttctctgtcgagtcaacaggggtgttaccaccagatgtgctagtgagtgaagccatcaaggtgctgatggggaagtgccgacggttcttggatgaactggatgcagttcagatggactgaggtttccaccggacttactggcatggctggcctcggatgctcctgagccaagctgaagatcttgggtcctgacctgacctcacaggcctgctagagtctggtgtgactggagatcctgggttttctgggatagttccagtcttattttcagtcagtaggttttgctaaatgtgccnnaaaatgtgacctcatgcc

SEQ ID NO: 3400 - DNA, 718 bp, Canis familiaris
  misc_feature (1)..(718): n = a or c or g or t
gagacagtagctgtcccagaagtctcaagcagtgnnctcaagttcagtgatgcatgtagatttctccactttccctgtccccgnnnnnnnngnnnnnnnntgagcaatcagatagtggtttagannnnnttttcctnctgcctatcctttataattctagagagtcacatctcgggtttatgttttgatnnnnnntgaactccattttggaggatattttggtactatgttggggttatcaaattgttaatataagaagagcaacccagaatttaaagaaaggaaaattgaggtgaaagaccaggtctatagttaatagggccaagcatcaaagaatctttaagggaggtttaaaaaaaaagattcattgcctctgcttttgtcagcctgagtccggaattgtgcccgatggcacttctgggtcatgttttcatggccgtgtctctcaccatgacagccacaggctggtgtgtccactaacccccagcgtggtacatctcagactgtttactctaggggtcagtgtcctgctctggtttctctcaagggtagtactggaaaaaagcaatagggagagttgctttgcagttgaggcacagccatctggatgagctgcagggctgattgagcgggttgtcaaaatcctttagcctctgcctgttgaaccagtcacttttcgtctatagaaaagctgatctggagttgcggaatgttgtgt

SEQ ID NO: 3401 - DNA, 499 bp, Canis familiaris
  misc_feature (1)..(499): n = a or c or g or t
acnngccaagagatgtgnngcctgagagggtnncttttactttaaaatctnncntcaggnngnnnnncatgaaatcactaattggtattgattacnngtacagcttacgtaaatgaatttatgatgtttaaccagtttttatacacttcnnnnaggtcnnnagaaggcagactttttaatgcatctgtaaataatgaagcagtcatacctccggccttggtnnnngggggaggggaanngttatcttgctaagcctggttgtaatttgtaaccattttctatttgtgcaaactctgtaaatatatgtttaaaannnnnnntaatattttnnnnannatacactggagaacaaagggaactcaagatttttccacaccccacatcttnnnnaancnnntgttnnntttgcagagcacnnntgcccctgccagctcctcctgtggctttctgaatactggacagggtataaggtatagattgtgagcggggattttttttt

SEQ ID NO: 3402 - DNA, 562 bp, Canis familiaris
  misc_feature (1)..(562): n = a or c or g or t
cangggctggcattgngnngagagggcttggtnnagctgatggttctgagtccctgcggccactcagatnntagatgttggtagaaggtggatgaggggggcaaggagctgcctctggccagggtccaaagtcttcccacaaggggacaggatctgtaaaacggcagggaaggaggagtggtggcaggttgatggtgtggttaccgggggtgtttagttggcctgagggtagtgcctgctggggacagtggccttgccttcctgccgcaggacagccaccgggatgcagatgacacctttctggagacaggagggctctttgctcccagcaccccaagggagtgctgcttctgagtgggcagcttccacagatgtggttcccctgggtgggttcaccccagcgattctctgcggcatcttcttaccccacctcctgtcatgactattatcctggggccacccggcaagtcctgagagcagaacccggtgtccctcggtcccaccaaggcatgtactcctctgtctgcaccactcagtgctcactttgcctcctccccactaa

SEQ ID NO: 3403 - DNA, 482 bp, Canis familiaris
  misc_feature (1)..(482): n = a or c or g or t
cccagagggcagctcggtgctgggcgagtccgcacgctggctcacagctgnnnagctacatgtggagcacaagaccaagtttgcaaattttagnnacaaatttcaagctttccgagtttttattccatggggtaagggccaacctttctgttcttgtctcttaaaagtctcttcctgtggcccacttggggttcgcatgcagcgaggccggcagagcttgtagagggcctgtggcagtgtgagccgtcagggtcagccggggccgaaagcgctggactgggggcagtgctctcggaccctgcttgctctccttgcaggggctggtatttttgacgtgatgtttcttgccaaatctcatgacactccccattgatggcgctggagctctcccaggtataaagttaagaacangaaacacaaagttggtcaggatgtgttgtgttcgagagagaagccagagatccacttaagactttcttttt

SEQ ID NO: 3404 - DNA, 507 bp, Canis familiaris
  misc_feature (1)..(507): n = a or c or g or t
attggtaaannaaatccaggagaggaaggaattcctggctggcatnnaggcactgggacagggcagacagtaccgagggatcatccttgctgagatctcccagtttccctgatgcctttgcagaaactacgggaaatggaagacattgaccacaagaggaatgaggaccttagaaggctcttgctaccccctgatctgtctccagagacaggggcagagtagcccatcgtagatcactggagcccaccccctggccagcccatctaccctggccttcagccacatcaaatggccgtgaagcactgccctggcctaggggcccctgggcacacacagcaccctaggaaatggaccaatcccagagaatgagctggttctcttcaagactctgcccagggagcctggaaggataggcttatttgttcaaggagttagaattttcaagcacagatgcttttcaactgtttgcatatctcaagtggaagtgagnnnnaacacttcttgaac

SEQ ID NO: 3405 - DNA, 554 bp, Canis familiaris
  misc_feature (1)..(554): n = a or c or g or t
aactctttccccagctgannagtgnnnaaggaatgatcagtgctgttaccctttcccttgactattatactgnctgaagntngcagagaaagcctgtgcnncgnntaaaaaagccaaagtagagggtgtacagtnntagggaattctnctaaagtatttgttcaaaccttataggtcaccccaagtattcttttgtcatctagcagtgcaaggtactcagatatattactataatccagaattacagcttttgaggttgtacctttatcttaagggcagtagtttgacctaaaattcttatgtaagggtcattggacaagtgtcttagacgtgaaatttgagtggccctttaacatttcttttccncnnnnttggtatnccaggcttgcctccaattttaggccctttagtttgcttctgcaagcagagaacacctacctgagggggctcctttccgtcatgtacagttcaagtaaagatcaagaatcttttgtataactatgaaaatttactatgtnnnnnnttgatggaatcttnnnnngctagtgtaactt

SEQ ID NO: 3406 - DNA, 602 bp, Canis familiaris
ccagcttaagaaaagtttttctgtgtttgtatctttatttattccccagtttgcaaaactatatcagtaaagaaaatgattactttattgttgccacactgaaaatatctgtatgtagagtgtgtcatttagcatatttacaagtttctgttgaccttgttgattgagcatgactactaaatattatgtaataaaagtaatttatcatttacagtcttgcaaagtaattctttgaatatagaagcttccataatatagcccatgaaaggaggttttttagccttctttagaaatggagctgcatttagaatgagatcacatgcttgcagtatagcaaacacctttttatatttgaaatgtttgcttttaggaatagaaggcatattttgctaattttatgactaaaacattttagaccgatctgattatttttaagccatcttgaagttgtatttctatctaataggaaaatgggacaagataggttatagtgcagttgtttcatattaaatgatctactaaacagtggtgtttgtgggataaaatcacagaaaatgtacccatatctttttcacatcttcttgattaaaatgtgattataa

SEQ ID NO: 3407 - DNA, 480 bp, Canis familiaris
  misc_feature (1)..(480): n = a or c or g or t
tgactgcaagaacattgccaacatcatgaagacacttgcatatcaaggcttcatcttcaagcagacatcaaagccattctgattggccgaggacgggatggggcaggacagggtagctgcttggcccagcccagaaccctcctttccctcaccagaggggaaaagggagagtggcacagctctacatccagagtgtcccccagcctgccctatgggcttatgccctgggtaagggcttggccactcggcccctctggagcagacactttgtgcccccctgccccaacccctcaacctcagcccagtattagcccctcccattgtgggcctgggctaggggaacccaggcactcaccgcctcttccctggtacacaggcttctgctggggccaccaagcccccctgtgccccctcccatctgtagtgcatggtgtgtggtgcccccagggctccaggnnngatcaggccccaccttgtgtc

SEQ ID NO: 3408 - DNA, 573 bp, Canis familiaris
  misc_feature (1)..(573): n = a or c or g or t
ataaatcnnaggtacttagtgttttnnntaatacggtgcaacnnnggggggttggnnnnnntngggaagaaaaaaagaataataatgagagaagcagcattgacctaagccaaccactatgtgaagtgctttgcagcttatncttacgggaaatcagttattttggatgctaagggcagctgcaatctgaaaaataatccagtaaatgtatttcatattttgtagcaggcagttaccaaccaggaaataatatctttgatatttgcagttgttgcatacggagtatttttgttaaaaggtgattagctcttgcctttattttacagtgcttcatgtaataaactcaccgggtttcctgtaaaagaaaccagttagtatatgtacataaaccatagaaataatataccaaactatttaaaaattagtgtttctacttaaaatgttgtttagcttaaaacttcttaggacatttgtaaaagcaacttcaatgaggtttttgattattttttgtaaccggagatggtttttacaaatgaaataacgtttcaattaaacaaaacattgcaaaatatt

SEQ ID NO: 3409 - DNA, 656 bp, Canis familiaris
  misc_feature (1)..(656): n = a or c or g or t
gatgagtgagaaatgtganntttnacagtatagtgcaannnnngctcaagatgcagaaaaggtaatagangatatcgaatacctcaagtatgacanannnnngtggctcgatcangacgaccggacttttcaccatctgcnnatgctggttcagaataagctgnaggtgctgaattacacaaccattcctatctatctcccagaagtcacaatcggagcgcaccagagtgaccgcatcttccataaattcacacagctgccaggccgcaagtactgccccgggtacaacgcggacgtgggtgacaagtggatctggctaaagtgacggacttccgccccgccccccacgggctgcatcgcggcgacgacgaagaggctgccacctgccgcgtcctgtggactccacgtagctttaacacgcggggggaaggtaacggactggggcgcggcctggccagagcaggctccctgtagagtagctnngcccggggagggcctcggggttacnnggctcctgaggctccgnagcttgtagctttgttcaggaaaaccctgctgtggaaggccagattactagaggaagctcctttcattacagctgtgctctgtgtcctgcagatcttgtacttgnnngcctctgacttcaagannnnnnn

SEQ ID NO: 3410 - DNA, 648 bp, Canis familiaris
  misc_feature (1)..(648): n = a or c or g or t
ccatccctnnntataaaggaggttgccagcatagntcttcacaaggactttcaaaaagtcaacatnnacaatgatattgccttgctgctgttggcntcgcctatcacattcaatggacagatggagcctatctgcatacccagnaagcccaccccctccacatggcacaaatgctgggtggcaggatggggtcagactaatagcgatgacaaatactctatgaaaattgagctgatgaaagtgccaatgatcatcatggattgggaaaaatgtttaaaggcgtttccaaaacttaccaagaatatgctgtgtgctggatatgagaatgagagctttgatgcttgccagggtgacagcggggggcctctggcctgcaccacagagtctgacaagacctggtacctggtaggcattatcagctggggcaagagctgtggacggaagaacacaccagggatatacactttgttagaaaattacaccctttggatcaagaaggtgactgagatggagggaagaccttttaatgctgaggaaatgagaggttctcccaataggaaacaaatgaggtcccatgcagcagaatttccagagccaggaagctgcagattctggcttctgatttcacttctgccctacatgttacnc

SEQ ID NO: 3411 - DNA, 616 bp, Canis familiaris
  misc_feature (1)..(616): n = a or c or g or t
ttgatggattcttcntagcacacggtnnnnnngggctggagaatggcagacaggttagggtagaaagtcaactcatgagagcagcgttgctgtcagactctgatatggaacgtgtgaaaagcaagacgcaaacttcctcaccttgagacaaaatatcagatacatcttggttttccaaaagttttccaacataagacagtgggcagtagccctagcgaggggaagactgctagttccatgttgtctgaggtgccctttaatatcccccagggaaatgatggtgccccctcggcagaggagcaaaaagaagccaactggagagcatgccacctagtggtgttgactgatagctcagcccatgctgtggaaaagattgaaaaaaatactgtcgatgggttttaattttccattcctgaaatttttttttttatagaagtgaggggtaccccctccaggtgctctttgcttctcagttataggtatctgatttcctaaaagctctcaggagggtggctgtgctgtcacaaagccctccaggatccttgctgggcccgtcaactcatgactgggtacacctcttcacatttggggtgagaaagtnnnagagtccatggat

SEQ ID NO: 3412 - DNA, 672 bp, Canis familiaris
  misc_feature (1)..(672): n = a or c or g or t
cactttcattgtgatgagggttatcacttagaannagnngcaattttgactngcnnccttcaannngatgaggtgtattggagtgatgaattcccacaatgtgaaaagatttactgtcaaccacctgcaaaaataaaaaatggaaaacacaccaatagccacagaactatttttgaatataatgaattaattacttttagttgtaatcgtttaaaaggatcagatcaatattcccttgttggagaaagagaacttacttgtattgagaaaaacaagtggagtagtcgccctcctcagtgtaaagtggtcaaatgtgactatccagtaattgaacatggaagactgatatcaggaatcaaagaaaaatattactaccaagcaatggttctacttgaatgcctcccaggcttctatcttaatggcagcaacagagtgttctgtggtgagaatagtacttgggatcctaaaataccaaaatgtattaaaggtttcaagcctactcatccaaccaaacctccagtttcaagatatccaggttatcctgaggccaacgaatatctatcagttgaagactttgaagaattagatgtaggcatccttgctgtgattgttctcactatccttgttggcatcgtggtactttgcacctgcctgtacagatgtcttaaaagg

SEQ ID NO: 3413 - DNA, 551 bp, Canis familiaris
  misc_feature (1)..(551): n = a or c or g or t
gaggaccagaaggaagttttgtgcgttagcagactcctctatgttttgttccttttaccttgagtatgcatgtgcctgtttnnagcctccagataccttttttataaaaagaagtatgaaaatcattatggtatataatctactcttaacagagctttttttattacagtgctataatgatttctgattaaatggtccctaactcaactagaaggctaaaaatgcaggaatgaaagaataaacagagtattcatgatgcctttgagaaaaatcaaaacatcatgtagggtgacctagtttccaaaccaataagaagtattgtaatattaaaggaaaactgttccaatcatttaaaagtacttgttaagtactgctttttacagttatgacaactgtttctttctatgcatataaatcaagcaaccaaatatctgtagccatggaaatgtctgactagaaatatttatattggattctgaatacaaaatgtccctgtggtagaactcttacttcttatgcctggtgcagtataattcccaagtgtactgtct

SEQ ID NO: 3414 - DNA, 549 bp, Canis familiaris
  misc_feature (1)..(549): n = a or c or g or t
cgactgnatganctgaagaataagaaaccattagaacaaataaacaaacacgaaggacaaaacatgtgtttaattcaactgactcctcatcagaatttatttacagagaatttaacatctattaactatgatgtattttttctcatgttaaagcagtgttttatgaagcgcaatttcaagctaatggaccatttacagttattgagtccagttaatgcagcagctatattgaagcaaatagggaaagatggagacatgaaaataacagatctgtatcctcaagactttaaatagctttttgaagctatagagtatttcagagaatcttgcaggtggctcttggatgattgtatggaagaaatgatcatgtaggaacttgattgcccatacctgagccattgatatatttgaaaattatggcacaaatggaagagaaccacatttgaaaagcttccagcctttcaacagaagataactcttcttgttttgcagattgagcagataatttcttttgaaggtgatagtttcctaaattggataaaaccgtgg

SEQ ID NO: 3415 - DNA, 572 bp, Canis familiaris
  misc_feature (1)..(572): n = a or c or g or t
aaaagcagagggtgacatctcaaatanngctgaggggtttaagtctcatctcattcgtctcattnnaaatctgtnnnncaagaataaagacaaccaagacaaggtaaacgagctggatggcattcccttgatcctagacagctgcagcatcgatgacagcaatccctttctgacccagtgggtggtgtacgccatccgaaaccttactgaagataacagtcaaaaccaagatctgatcgcaaagatggaggagcaggggctggcggatgcatccctacttaaaaagatgggttttgaagttgagaagaggggtgacaagctgattctgaaacctaccagtnnnnnnnnnccactgtgaatgaactctccatcaaaatacctgaatttttgaaatctgtttcatggatttttcgtcttctgcagtatgtgaaattgcaagtgtttgaagatttattacgtgcaaattcaggaacacatgagtcctttagataatagagtttaatgtggataagcttgaaagtgaacgtacatgagtattccattgtttctttgcttagaaactgtctggtttg

SEQ ID NO: 3416 - DNA, 681 bp, Canis familiaris
  misc_feature (1)..(681): n = a or c or g or t
tcaccatggccgacaanggtgagtgtgtnnccggcgagcannagncagnnnnttctccatacatgagagccnnncgggctgtgctgccccaggannaggaaggatcgggcgncgggcaactagtaaacactgtctacaagaaggaagatgcctgccagctggaccacgcggaaggcccctgcctggggatggtcaccaggtatttctacaacggctcctccatggcctgtgagaccttccagtacggcggctgcctgggcaacgggaacaacttcgcctccgagaaggagtgtctgcagacctgccgcaccgtggcggcctgcagcctccccatcgtccccggcccctgccgaatgcaccacagcctctgggcctacgacgccgtccagggcaggtgcgtccgcttcgtgtacgggggctgccaaggcaacggcaacaagttctactcggagaaggagtgcaaggagtactgcggggccccgggcgccggggacgaggagctgctgcgctaacccagaggacctgtccacgggccacagcggggcaggggtgcaggccggtgcccccccccgtgcccgcccccgtgcccaccccgtgcccgtccccgtgcccacccccgtcccccacggcaggccgggccgagccaccccggttcaaaataaaaacccaacggaggctcct

SEQ ID NO: 3417 - DNA, 555 bp, Canis familiaris
  misc_feature (1)..(555): n = a or c or g or t
gcagtcaagaanctcacgttcttctgacggggacannagctnnnnncgtcagtctgcccgccctgccgcctgagcgaccaaccacggctgtgggggcgccggcgtgacctgcttggattccccctccccgtgtggagagggggcctggtacaggcggggcctgagatggggccgcgcccctggctgctcttggggcggccggatccagtcagggtggaggccccgggtggcgggaggccttccgaggcgcggggtgtgtggctgaggcaccccttctcaccagccccgggagcttatttaatgggctatttaattaaaagggtaggaatgtgcctcgggctggtcccatggcatccggaaacgggggcatagcacagtggtctgcccactgtggataaaaacacacaagtgcttggcccactagagcctagagccagagcaggcctcccaggagggcaggggcgtctggagcgggtgggtgccctccagagaggggctgctacctcccagcgggcatgggaagagcannnnnntgaggtcccacggagaatggga

SEQ ID NO: 3418 - DNA, 582 bp, Canis familiaris
  misc_feature (1)..(582): n = a or c or g or t
ggcagagcatcggcacggtgcccaccgtggacntggcctctcgctatgagtgcgctgccgtggtgctgcactctccgctcacctcaggcatgcgcgttgccttccctgacaccaagaagacctactgcttcgatgcgttccccaacatcgagaaggtgtccaagatcacgtcaccggtgctcatcatccacggcacggaggacgaagtcatcgacttctcccacgggctggcgctctatgagcgctgccccaaggccgtggagccgctgtgggtggagggcgccgggcacaacgacatcgagctctacagccagtacttggagcgcctgcgccgcttcatctcccaggagctgcccagccagcgcgcctagcctagccctgagccgtgccgggacttcagcaataaggcggcgcctggacctcgcccccgccccgccccggggctgcatgtgaaccccccgnnnnnncccagtcctccgaggcagctggagggtagggggtcgggacctgccccagcccaggggccgtggacgatgtacaggcgcggagctatgctctcctttccttttggaagcaaaaaga

SEQ ID NO: 3419 - DNA, 563 bp, Canis familiaris
  misc_feature (1)..(563): n = a or c or g or t
atttaaattcttagacttatggaataaatttttgttngaacatcataaacgatcaataccaaaagatacttggaatcttcttttagacttcagtacaatgattgcagatgacatgtctaattatgatgaagaaggagcatggcctgttcttattgatgactttgtggaatttgcacgccctcaaattgctgggacaaaaagtacaacagtgtagcactaaaggaaccttctagaatgtacatagtctgtacaataaatacaacggaaaattgcacagtcaatttctgctggctggactgaactgaagatcaatcctcacaattcagactgagggttgtgtcaaaactttaaggatacatcttggaccatatcgtatttcattcttctaatggtggtttgggcttgtcttctagtctgggccgctctaaacatttataattccaacattgtggatttcatcttatatctgtggaccatcctagtttattctcccataagtcgtagaagctttatggtgattattttgaggtttccattcttgcataaagcacaatgctgtcttc

SEQ ID NO: 3420 - DNA, 552 bp, Canis familiaris
  misc_feature (1)..(552): n = a or c or g or t
ttctattgatgttannattttttttttttttaatgcatannncnnaggtnnatccccttggtattcattcactctaatggcacactcttacagtngaaaatttaggctcnctgaactttcagatatttattcaaaataggtttccttctaaaggaactacaactttactatggttatggagctattacaataatggtacttaagctttctctttttcaaaaatatggcgtaatataaagctgtgaccctaatgaagtatactaagtttatacaagggctctttatcttttatgcactcttaaaatatttaatttgggtaagaaagtattattacttttaccaacttaaaaaaaaaaatcagtgaaattcctttctcccaaataccctttgtttcacccaaactattttggtaaaaaatattgaaaataagcttcagtactttacttaaattttgtgaccatagaggatttaaaaaaaaatcctgttagaagcaatgtaaatgtgaggggatagaaataaaatggtggttcannnaatggaaactaaccttta

SEQ ID NO: 3421 - DNA, 553 bp, Canis familiaris
  misc_feature (1)..(544): n = a or c or g or t
canntacaaggcattcaacaccttcatcgatgacgtctttgccttcatcatcaccatgcccacctcccaccggctggcatgcttcagggacgacgtggtgttcctcgtatacctttaccagcgatggctttatcccgtggataagagcagggtgaatgagttcggggagtcatatgaggagaagccccagcggaggccccacgcagactaagtcccgcctgggccatgtggcgtcggcccctgggcannnnnnctgggctgtcggctgagtgttttcggannnnnnnnnacggggttccctggacattacatcttctgcgttgccaaaannngaacgtttcccgttacctcctgagtcccttggcactgtgtttgaaaggggcccccgcgggcagacacccacccctgcaccacgcaggagggcccaggcccggccagtgcgcggtgtctgcgagcgctccctacgcactcaagaggctctttaaatctattccttagagactgggatcaaannnnntttttcctttttgtttaaaatttgagtattttaaaa

SEQ ID NO: 3422 - DNA, 608 bp, Canis familiaris
  misc_feature (1)..(608): n = a or c or g or t
ccaagtataagaaactcaannntgccattgaagaaaagannatcattgctgaagttgtgaacaaaannnnncgtgccaatgggaagagcacatcccggattttcctcttaacaaataacaatctcctccttgctgatcaaaagtcggggcagatcaagtcagaggttcctttggtggatgtgaccaaagtgtccatgagctcacaaaacgatggcttctttgccgtccacctcaaagagggctccgaagcagctagtaaaggagactttctcttcagcagtgatcacctgattgaaatggccaccaagctgtatcggacgactctcagccaaaccaaacagaagctcaatatcgaaatttcggacgagttcctggtgcagttcagacaggataaagtatgtgtgaagtttattcagggcaaccagaaaaatgggagtgtcccaacgtgcaaacgaaaaaacaaccgtctccttgaagtggctgttccttaactggctcctcctctctgctttcacggactcatttccttgtaatagtgcaattttgttttgttttgtttggggttcattgtatgtttggggattgccaaaggccaatacnnnagagac

SEQ ID NO: 3423 - DNA, 549 bp, Canis familiaris
  misc_feature (1)..(549): n = a or c or g or t
agtttgagtcccagctgnntgcaccatcagactgggggatgctacttcagctctnnnngacgnncttcaaaacaactggcctgcccggcctcctcaacgcatctcccactgaggggcagagtcagaatttgaacctagagcagctgcttttaacctcagtggcctcaggcccttccctgaggcaggcagtttgagtcccagctgcctgcaccatcagactgggggagctcctagaatgcaaagcctgcatctgcctctttccctgctgccgcacattcgtcatgcagtaaatgtcctgcattctttcttagagcagagcacttctacactctgtcaccaggctctcctgcacccctggccccccagaaccaaggaaccggaatcccttgcccaacctgtgagcaccacagtaacatctgtagctggcacaggcaagactgcacataatctagatcgcaggctgcagcactcccttagcccattaactgcccctaagtccctttaaaaatctctgggccaggcagaaacttctgnntggcttttgggctc

SEQ ID NO: 3424 - DNA, 545 bp, Canis familiaris
  misc_feature (1)..(545): n = a or c or g or t
tcnactgatgccagcaaggtgctggccaagggcctggggctgagcaaggcctatgtgggccaaaagagcagcttcacggtggactgcagcaaagcaggcaacaacatgctgctggtaggggtgcacggcccccggacgccctgcgaggagatcctggtgaagcacgtgggcaaccggctctacaacgtgtcttacctactcaaggacaagggagaatacacgctggtggtcaagtggggtgacgagcacatcccgggcagcccctaccgtgtcctggtcccctgatctctgggcctgtgccagctgccagctcccaggacaagacgtgcccccacacccatccccccaacctgagcagcccccctggtctcctcagccctggagccccggccagccctggccgccccatcaccgcagccaccccagccctgcgttgcactcacctgcctccacttaggcaaaggagagaggcgggcagaggtagcctttggtggctctgcctatcttcttcggttctgggggggggtgagggatgggggtagtac

SEQ ID NO: 3425 - DNA, 588 bp, Canis familiaris
  misc_feature (1)..(588): n = a or c or g or t
gaaagttccccatttaaaagtggtgtgtcaatggcangtcggctnngtaaagctgcaatgttaagtcgatttaacctgcttgccaaagaagctaaaaaagaagatttacttgaggctagtacataccatgcagcaaagtgtatgtctggatcctatcaagaagctaaaactttgttgaaatcctacttgcagcagcatggctatggctcctggattgtgaaatctccctgtatagaacaatttatcccagaggatccaggaacacaagctccggctactacccaccagccaccagagccagcatttaggagctggatgcagaataggacaagactggaggatctacttcccacacctccaccattctcagattcatcctactctgaacagagaagagactgaagcccttctgatgactccttggaatcccagacctactaggaaccaaggcagcaagtaggaggtaattgtcttctgttgcctccggttcctattctcttctgttagaacagagcattgctgtcctccatatgaacttcccttctgagcctgcttcttaaatcctataatagaattcacccctcctac

SEQ ID NO: 3426 - DNA, 588 bp, Canis familiaris
tccttccaagttgggtcaggcattagtgctaggtacgaacaatgttcatttctctgttgccattgatcagagacagacattaaaaacagtcatataagaaaggaaagccttcactctgcagccttctagcagagttttgccaaaacgtttttccttttcctctcctggttctccactacccaggcccttcccactccttttcagtgtgaccatgctttcttctctgtagatgttaacggcccaagccctttttcccagggcattgaaccagccaatcagaacaccccatccttgaggggcagtaacctggccaatagtggtatccatcgcatcagctctgctggaggcaaggggcctaggtcctgctgccctgtggcctgccccctgctcccaatcttttattgtgtccataggaataataggtaagggctccatctctgtcaagccatgtaacaaaggacactgtgggaaaatctctggcatcagagggagcgtgtggagagcaactcgggaggaacaagtttattttgtattgaatgatttttaatgaatgcaatattaatccttgcagatgagcaataatcatta

SEQ ID NO: 3427 - DNA, 651 bp, Canis familiaris
  misc_feature (1)..(651): n = a or c or g or t
tcagcctatctcagccnntctcttttcatgtcctgacaaaaacaaggttnnnttcatcccaaccggatcagctttctgtcctgtaaaacttctaggccctctcttacctgnntctgacctgatgctcaagaactctcctaactctggccagagctcagctctggccactctgaccgtcgagcagctctcctcccgggtttcctttacgtctctttctgacgacaccagctcggtgggcaccatggaggcctctgcccaacagccatcccagcagcagcagcagcagcaacagcagctcctgcaggaactgcaggccgaggagcacctctctgctcagaactatgtgatcatctaaagcaaagggggagctggcctctaccctaccttcacggattaggaactagacctcagacatcttatctgcatggagtgacaaactttctgaacaccaccaccaccaccaccaccagaatacttatcagcatcataaagtatctctcaacactgatcttggcagggacggaactcctattcggcagtttttgtggaaagcagtgatgcttgcaaaatgtgtgtgtcattcagcattctcagtggagactatgcatttcatagtatgtctgacagattnnnnncgtgtcctgtgttttg

SEQ ID NO: 3428 - DNA, 533 bp, Canis familiaris
  misc_feature (1)..(533): n = a or c or g or t
gagatcatcnngcgtttcgagcaaaagggattccgcctcattgctatgaaattaatccaggcttctgaagancttctcaannngnactatattgacctgaannaccgtccattctttgccggcctggtgaagtacatgcagtcagggcctgtggttgccatggtgtgggagggcctgaatgtggtgaagacaggccgagtgatgctcggggagaccaacccggcggactccaaacctgggaccatccgtggggacttttgcatccaagttggcaggaacattatccatggcagcgattctgtggagagtgcggagaaggagattggcttgtggttccagcctgaagagctggtggattacaagagctgtgctcagaactggatttatgagtgacgagtgatgagggagcagacctcagtgctttgcccgttccattccctttccctcccatgagcaaggggccaggctcttgcaaatccagtgatttttgagaacttccttataacctggaggggacctcttggagctgggag

SEQ ID NO: 3429 - DNA, 563 bp, Canis familiaris
  misc_feature (1)..(563): n = a or c or g or t
atcccaagttcatttcccaccaggatatccgcnngcgaaactatgtgcnngatgatgnngtcttcatccgtgcctctgttgaactgccccgcaagatnnncagctgagtgcagacagggctccaggagaaagggaggatggaatgtgacctcagtcgggaactgactgaacctggagagggggccggaccccctttcagcctcttttgctgcctaggttctgttcctccgttccccctcccccccttccctcctaccctcaggtgcctcctattggtgcttcagccctggcccctgggtggagcaggtcttggggtcaccaagggcttggaaacaagtgatcccagggtctgtctcctctcctgggcagggaagacatgccttggtgccggccacactctacccgggactgaggtacctgctggtgctatgtcccaagagccatagtggggggtgggagttgggaaagtgaggggtagttcaaagaatctgtcttgatgagatctgatttctcttcccctttccccagctgtgccctctccggttatttatttacttagtgcc

SEQ ID NO: 3430 - DNA, 516 bp, Canis familiaris
  misc_feature (1)..(516): n = a or c or g or t
cgaggggggcgnnagctgcttccaaggtgatagtgtggcggcctcggcgctggattgagcgggtctgagncgggttcccagagggctgcgcgtccccggcccgtcggcgctgtcatggcgggtgtgctgaagaagaccaccggccttgtgggattggctgtatgtgagagcccacacgagaggttaagaatattgtacacaaagattcttgatgttcttgagcaaattcctaaaaacgcagcatatagaaagtatacagaacagattacaaatgagaagctgagtatggttaaagcggaaccagatgttaagaaactagaagaccaacttcagggtggccaactagaagaggtgattcttcaggctgaaaatgaattaagtctggcaagaaaaatgatacagtggaaaccatgggagcctttagtggaagagcctcctgccaaccaatggaaatggccaatataatcatcattaaatgactagtgtgttgatgggaaatggatgtaattaaatgtt

SEQ ID NO: 3431 - DNA, 473 bp, Canis familiaris
  misc_feature (1)..(473): n = a or c or g or t
accactgttgtaanaccaactttgnnntcagaaggnnctgctttgagggactggaagctgataaaacatatgtgcctccatctacgtctcaggatttatttacctttcacacagacttatgtcaggctcataatgaggagctccaaagaaagaaagacaggtttcttgtcaatctggtgaagcgaaagcctgaacttacagatgaggagctgcggtcactgcttgcagatttctctaacgtggtggtgacgtgctgcaaagccgaggggccggaagcctgctttaacgaagagggccccaaggtggtagccaaaagccaggctgcttgagaagtacaaagtaaaacccaccaaaggttttagggaacagagaggaaccctgacttacctgcttcctgtctgtcctgtggtggattttattttctgagaagaacccagtgagaagattcttctgtaacctctatctgaaatcat

SEQ ID NO: 3432 - DNA, 601 bp, Canis familiaris
  misc_feature (1)..(601): n = a or c or g or t
ggtgtggatcttaacaggaactgnnagtcgggctttggaggaaatggtnctaataacaacccctgctcagagacttatcatgggccctctgctcagtcnnagccggaggtggctgccattgtggacttcatcactgcccatgggaacatcaaggctctgatctccattcacagctactctcagatgctcatgtacccttatgggcactcactggagcctgttccaaaccagaaggagttgtacaatcttgccaaggacgcagtgcaggccctgtatcaagtccacgggatcgagtacatttatggcagcatcagcaccaccctctacatggccagcgggatcaccgtcgactgggcctatgacaatggcatcaagtactccttcaccttcgagctccgggacacggggcgctacggcttcctgctgccggcctctcagatcatccccacggcccaggagacgtggctggcgcttcggacaatcatggagcacaccctgaatcacccctactagcaacagcactgagggcagagcgggagcattcatttcctacccccaggcctgagaggctcctcctgaagcccaagttgtatatcctctt

SEQ ID NO: 3433 - DNA, 454 bp, Canis familiaris
  misc_feature (1)..(454): n = a or c or g or t
gagtttnngtctttcaganaggtcannnnnnactttgagnnnttaattgtagtaatgaaataaaatgaannatagtttcaaaatannnnnntaagaaatgaataaggggcanntgggtggctccggcagttgagcacccgactcttaatttcggctcatgtcatgatctcacagttgtgggatcaagccccacgttgggctctgcactcagcatgggaggtaacctctctccctctgcatctgcccctccctccactcacacacacaggctctctctctcttaaaatgaataattaaaatattaaaagaaaaaataaatgaataggcaggtatcacaaaattgaaatgagtcctccttatccaggtgaataaaatatttgtttaacattagaagaatgtatagtttcaaaacacattctacattgttaattgcaacatagattatatttgtgaa

SEQ ID NO: 3434 - DNA, 437 bp, Canis familiaris
  misc_feature (1)..(437): n = a or c or g or t
agntgtaatcattgaactgttcttaaatgtgtgaattattagtggaaaagacccagctgtaattagacctccactgtgtacttagctggaannncatgttaattnnnnaatatgtctcttggttaaacatnnnnnagttcttacctcatttctgtaaataaggttttgtgaatctgttttgtattgtgaaaaattcataagataacattgatattttgatttgtaatatttctaattggtagatttaattgaaaagtnnnattaatttatttttatatgttcaggggaattttaaagaaagtnaaatcttttgtagataattaaaaaaaatcggtgtggtttattttacgtatttaacccactggttattattctgtaacaatttgtataaatggtaaattttgaatgtgttgttattttacctagatgtaaaattc

SEQ ID NO: 3435 - DNA, 630 bp, Canis familiaris
  misc_feature (1)..(630): n = a or c or g or t
tatcagctctttgactttgactttgagctgaggtnngaggggcaannagaangaaaccggaaacattttcttccttcatgaagttccatcagtgtgggctttgaaaaagcagtgtacctagtagtatctagggactttcaaccagggcctgtgagtgtgcactgaattggtaagatgaagggaggggaggaaggggagacctcttcattttcgggatagaaacctttaactgctagaagggtatggtgttggaaagctggaaccaagtttgcattttcaggggttaaggggaagagatttctacaagatactgttaaagcaacttattgccacttggttgtctcttttaagtacattttgtacactattggaaattctagcatttatctggaggatttcagggtaaatctatggaatcaggatttttagcaagtttgcttgtggtcttatcttgatttaatcatttgactggtcttctgttcatagatgctaactatgaaacagatgtccagacctataccttcaccattttaggatggtaaagtgctatgctctcttctatggttatgaatatttattaaggttggaatgacatttcattgattgtttagatcacannncagttcctgt

SEQ ID NO: 3436 - DNA, 499 bp, Canis familiaris
  misc_feature (1)..(499): n = a or c or g or t
gaacatacaagaaagtaatggttaagagtnacaaannnaaattcaagataaacacagaggnnnagggatttcattactcagagcttcttttttcccttgagacataagccaattttgaaggggcatctcagaggccaggtggatgggcagtgagggtttgcttgtcttgcagagctaatgctgacagtggttagttactagggaccagccgggatgcaccatgggagtgagttacatcaggagtaggtattcagnnnancttctgaccatttcaatcactgaaagtgtattaagacgtgatctgagtgctagtgcctctgacaccttgcaaaaacaaacatatttcaagaggaagacatgttatcctagactgcaggtgttatctataaaagtttgtggggcagcctggggggttcaggggtttagcactgccttcagcctagagcgtgatcctggagacccaggatcaagtcccacaatggggtcnnnnnntggagcc

SEQ ID NO: 3437 - DNA, 626 bp, Canis familiaris
  misc_feature (1)..(626): n = a or c or g or t
tgatcttttgcaggantggctctgtacagctcatnnntgnnnnnnngcctcagatcatctgtgnnnnnnctccacccagaacttacaatctggcggtcccctnnnnncctgtatttgtcgtgtctttgcaacatccatgtttcctgctccgaggagaccatccagatgaaattgaatctgacgacaccaaggacatccagaactccatcttctactttaatctcgaggcctacccactcctggaaaacatctcaagaaatcacaccattcctaaaacggacataaccgagaacatggctttcactcaggtgttgcccttggagaaaagatgtgaggatttcctcgagagaagtttccagaagctggagaagaaggtgaaagaggaggagcactggacccggcttcacaggtattccttgatgctccaaagagagaacttcaggaagtgactgggctgccaaaaagctttgcagtgcacagccttcaccccaggatgccctgaggtccagagacacaatgacagaggacagcagctcagtaggccccagggacctggactggcaggctgggacctcagcaagggggaggtaggccctgggagcctatgcccctaagccacttgtcag

SEQ ID NO: 3438 - DNA, 578 bp, Canis familiaris
agacttcacagaggagatctgtcgtcgagtacgagatttagattgaggatccagcgaatggagtctgtccgtcattcccacccgatgagatgtaccttgatacagtatggcacctcctgtcttgcacacatttggttctcttctttcctgacagtacatttttagatacggccttttcttaacaaaatctgtgcagagggtgcaggtgacgtccctaggcctgctttcaaaggactttccctaagcgcttgttttatttattaaatgtctatccagtatatgttttttgtaaactcttaagtggactgtatcgtttgccatgttaatcattttaacacttcagttaaaatggtttcttcagctataaatacgatacagaattaacaagagaaaacaacttttttcagaagacactgttttccttggtttatgaaaaatgtaatagaaacaaaacagattacagacatgatagcacaaggtaacattcttatagagctaagtgggcataggaggtttcctggaaagttcaggtcaaaaccagtgacaacggcatattttttagtgatgtggaagtagac

SEQ ID NO: 3439 - DNA, 573 bp, Canis familiaris
ctggctttctgtggcttacagagaataagtctaatcgacgagaagtttccatgtgacgtgtgagtgccggctttctgagtagttaggaaacacatgtagagtatgacccatataacagtatacccgttaacctaaaacgaagtctgaaatgtttgttttgtgaaaaaagaaactagttgcatttattattcctaacccgaatgaaattagcctttgccttcttctgtgcatgggtaagtaacttatttctgcactgttccgttgaaccttgcggaagcgttcttttgagttcgttttttgtcattttcgcaacagtcgtcaagccaggcctggaagtcacgcagcaaacgggcctcgtgaggcaaattacgaccgcagcaaatctatatttccttttagaagtcaaggtttttctattgtgagtaaattgaatttacgttggagttgtttgttgctaagaggtagtcaatataagagagtactagttccttctgtagtgagtgcttctcctaggacatctttatttatatccaggacatgtttgtggccgtattggattgatatgtgcttctt

SEQ ID NO: 3440 - DNA, 153 bp, Canis familiaris
  misc_feature (1)..(153): n = a or c or g or t
ccccccccccccgcagccannnttcccccagagactgtttaccgaagcccagccagcccggccacctgtgggggccaggacgcgggcaccggcgtnggcccaggcgccgagtgggtgtcctcttcccgggggcaggatgtcaggactgccgac

SEQ ID NO: 3441 - DNA, 468 bp, Canis familiaris
  misc_feature (1)..(468): n = a or c or g or t
annatgagtcccnnagnctagacagacctgaccacacatgacaaggtccatctcctctcctcctctcaagnngcacaggccncnnnagtgagaggctccacccactatagcacagacagggacagcacagctgccctcccacccttggtctgtacccccacaggcagagcagcaggggagggagagaaatcaggcctacccccacaggcagagcagcaggggagggagagaaatcaggcctaaggtcaaaccagcagattaaaaagcacaaggggcagaatgtaggggccctcccagcaactcctctgaagtgggaagaggttgggcaataagccagggacccctcatgcgggatcagaagcctcagtttccccatctcacccttctacgtgagaggcccctgtagttaagctgcccttgcctcaccccactgtgtggctgcttctttggtgccctcctgctccccac

SEQ ID NO: 3442 - DNA, 582 bp, Canis familiaris
  misc_feature (1)..(582): n = a or c or g or t
gcattgccaatgctcacatnnacttccggatnnnggtgacaccnnngaagatcgccctgtggaatnnagctgcacagagcaccttcacctggctggatacggtcacaatcacgcaggatgggctgtctgtgacaatcaacaggaaaaagaacatggtgatctcctttggagatggggttactttcatggttgtcctgcaccaagtgtggaagaagcaccctgtccaccaggactttctgggcttctacgtggtggacagtcaccggatgtcagcacagacccatgggctgctgggacaattcttccaaccctttgactttaaagtgtctgacatccacccaggctctgaccccacaaagccagatgccacgatggtggtgaagaaccatcggctgacggttaccaggggctcccagaaagactacagaaaggacgtcaacattggcactaaggtcgcctgctggtttgtccacaacaatgggcaagggctgattgatggtgtccacagggactacatcatcccagacctgttctgagtagacatgtcagctcctgtggaaacggccggccaagctctcctgg

SEQ ID NO: 3443 - DNA, 656 bp, Canis familiaris
  misc_feature (1)..(656): n = a or c or g or t
tcagccgagtgagtgaannngatgtatcctnnnncaaagctgtgagnnaagttttnntcagtanncaaagcacaggctagtcctgatcaggtgctggtgcttgcactggaagatgaccctacttctgtttgaggnacgttttcagcagatgaaagaacaacaattggttcatggacatcagctcctgaaactatactgtgttccattacaatttctgatctccgttccgttttggtcgaacccaagctgatgtcgctgctactggccacgctacacacagaactgctgcttccttttctacttgaggagcctgcagcagcagatgtcttgtcgggacagttgtttttcaccaagctgctccatgattgcgttgtgcctgaaacagtggatgaaacaggtttgggtgatgccactgtatcagggtcgtaccctggtgcaagcttgaggtcaaattttccttctgcgcccatacggtaagagtttgagccaccagcatcccaggtgacatcaatccagcctggaaagggacaggagtttgtgagacccggcagaaagcagataggagcgtgtcagacagtagctccacaatatgggatcagcttttcatcagtgctgtacttctctgaatttcnntagtcattaaaggtnnnccnnnn

SEQ ID NO: 3444 - DNA, 609 bp, Canis familiaris
  misc_feature (1)..(609): n = a or c or g or t
tgagaagaatgagatcttgtatagaagagatttgacccagtgctgttgagtgaaaagctgaaaggtcagcttttccacaagannaaaatatcagagttctagcatgaggagaacaaagctagtgttttgaactatatattctttagctttgaaattgcaaagttgggggtaataagactgtatagtacatgaaagcagtgagtcaaccctaaagcctaaatagtgtccatttggcaccagatttcttaatattcttgttgacttttcaggtgtgtagaagtctgtgttagtagtcacagtttacgagctttacgagaatatttctaggtagcacctaaaactagaaatgtgtatatttctgttaaacttgttggctattcatgccttggcagtacgtctgaagcacatggcaattcttgtcagtattctgatgtattatatatttgtaaatctagataccgatttttcatgtctgctagggttaaattctaaccctactcctagcttttatactgaagttaaaaaccggtggattatcatggtatttaggaaatcataaaattgtaattttcataaaaccatgttcagtatttatagtcatgatgtgca

SEQ ID NO: 3445 - DNA, 466 bp, Canis familiaris
  misc_feature (1)..(466): n = a or c or g or t
tcntgaaaancctggtcacctgatctactgcatctggattgagtgtattnnaacagagaaagaaatcaaacgattttatataaaaagaatgggtctatatttttcctttgttcttttacccttgctcatgtcatccttggggaccacatacagcctcactcccttnnagccacttaggactagagaaggcccagtgtctctcctctgttctagtcttcccgcatccatcactggaaccgttggtgtttagagtagataactggtggcatcaccaattctatatttcttttctatcaggtaacagcatttgcagcatattatagccaacatacggagctaaactacttagcacccaaaaatctggtgttatcccagttccctaatggctttgttctcagtgacccctgttnnngaaagtcttggtttaaataaacagtacatgggggcacctgactgagaacaacac

SEQ ID NO: 3446 - DNA, 595 bp, Canis familiaris
  misc_feature (1)..(595): n = a or c or g or t
gaaatagagtttgtgaaaacnntagggggaaagggcccttnnnnnagaaatggnncagaannnagagatcacttaaatgacccagaaatctcttttgaaaaggcaaattcctccannaggcatgaagagctagcgtatcctttgcacagtgtttgttcgatcagatttctgtcctcccggaggcatctgagatgtgcagcaggggggagagagggcatcatttcagggagtgggtccccggccacgagtgctcctgggggaggcggacagggagggcagggcaagtcagcaggctcccaggggttggcagaggaggtggcacgaagcagagcctgaccagtttggcaacttcacaggctgagaatatgggaaacccatatncnngtttctaggacccaattccagaagaatctgttgacccccactgaacgaggtggaaatggaccagcatctgagttgatcttgggttcactctccccaagagatggtggtgggggttgggggtggggggtgatgatgtatttgttttcgtggttgaggacttatgtatcctttgtttctattcccaagcctttctggtgtccctgactcctac

SEQ ID NO: 3447 - DNA, 536 bp, Canis familiaris
  misc_feature (1)..(536): n = a or c or g or t
atgaagctgttctagagatacagagagannnnctgaccctctgctcccctgggacaagcnnggagaacatttacagcttgatgctgacactgatagcacagaagcttaaggagttgggaatcgtgaagaacattaagggaaataatgccttcaaggctgctcggaaatactgccctcatcatgttggccactacctcgggatggatgtccatgacactccagacatgccccgttccctccctctacagcctggtatggtaatcacagtggagccagggatctatatcccagaagatgacagagatgccccagagaagtttcgtggtcttggtgtacgaattgaagatgatgtagtggtgactcaagattcacctctcatcctttctgcagattgccccaaagagatgaatgacatcgaacagatatgcaacagggcctcttgaccctcgcttcagctcacgtgcatctcagatactacatatctactggagccatatgagcccttgtcactggtgtcctgcaatcccaccattcag

SEQ ID NO: 3448 - DNA, 631 bp, Canis familiaris
  misc_feature (1)..(631): n = a or c or g or t
tgtgacagaaatccgcatgaggnncatcaggcgaattgannnnnatctcccagctggagaggagtgaccatccccaggactngaggnnagccagcaggagcactgcttnnaatccgaagcctcagagctccctcggcctttaggaactaagtgactctctaacatggttgttacatattcttctaactgtttccattctccaggctgagatagtctgtttaccccacaagcgcaagcctacacattcaggagggaaactctttgctccagttcccttcagaggggctggatgaggccatgtttggttggactagaaagagctcaaccgttttacattcctctttgaattttccaaagcaaaacccgttttgaccccattcagaggcaatcctcccccgtcttttcctgggccttcgggaaaccattggtgaatggctgtggagaatccagggttgtgggacgggggaggagaggcccatggggtggataggaattgctggttgtagtgtgacactctcgtgcttgccaggaaggaggagtctcgtgccgggaacactgactactgggaagccacacaggtctcgttcctccctgctgtttggaggcgacatctcctctttttacagagggt

SEQ ID NO: 3449 - DNA, 684 bp, Canis familiaris
  misc_feature (1)..(684): n = a or c or g or t
gtgtcnaagagcagcgtggtagacgacatggtgcagagcnacnntgtgctctatgcacccggcgaggagcccgaccactgtgtggtcatcaagtacgtgccatacgtgggcgacagcaagcgtgcgttggatgagtacanntcggagctgatgctgggcggcaccaacacgctggtgctgcacaacacctgtgaggactccctcctggccgcacccatcatgctggacctggtgctgctgaccgagctgtgccagcgcgtgagcttctgcaccgatgccgacccagagccgcagggcttccactccgtgctgtccctgctcagcttcctattcaaggcgccactcgtgccgccgggcagccctgtggtcaatgccctcttccgccagcgcagctgcatcgagaatatcctcagggcctgtgtggggctccccccacagaaccacatgcttctggagcacaagatggagcgccctggcctcaagcgagtggggcctatggttgctgcctgccctgtgccctgcaagaaaggaccagcgccaactgcccccaatggctgtacgggtgatgccaatgggcactcgcaggctgaggcaccccagatgcccaccacttaaggccatggccatccttctccccccaaactgttgcctctgttgcccctcaggacccaacccttccaagac

SEQ ID NO: 3450 - DNA, 685 bp, Canis familiaris
  misc_feature (1)..(685): n = a or c or g or t
aattttaaaaaggtaaagtttgatgnnggtatcctatttataaatatttttactaataatgcaaataacatggcatgaatttgatatagtaacccttcttgttatagatatgttttgaatttaagaagaatatgagaagttataagctttttcttttttctagccctacacagagtaaatatcattggggctaaaatatttttctgcagatattactaccaaggaatttttgtagtttgattgcttactgaccttattatgtcaccaggcttaacattatggaatatagatacatttgagttttgatgtggaaaacattataacctggtcagctcttcatcgtggtaagacttcgtacaaccccagaaacacaattttatgtaactagagattcattgaagcgttatactgctttcttagttccaggattttcccctccaaatcacttttgtgtcttgacatttttcaccatatagagtatttctcaattccacattcataattgtttctcttttcaccttctgttttcttaatgtaaagaatgtctatttatgataggctataaaatcatgcattgccatttaatgcaaagaatattctagtcaatgttccttatttcagaagtttcagatgacacaaaatagatattttgctcattttactcctgtgtttttgaaattatatg

SEQ ID NO: 3451 - DNA, 581 bp, Canis familiaris
  misc_feature (1)..(581): n = a or c or g or t
tcctccttctctcngtnctctttttgctttctctccaactgnnagccgatcnngtcaggcaagtccgtcccgtcctgagagccccaggccccccttcgacctctaaccagatccctctattcctcggagacctccctttccaagcctgcctggacggctgttctgtgacttgacagtggctccccagccccaaagcctcccccttcatctgtgacttagtctgttgtagtggtgagctgacacatccaggcgtgatattggtgaaaacttgtgcccctctgtggtattgctcctatcccattctataaataactataaatacacacacacacacacacacacatacatatatggctgccacagcctcgcctctagtgttgggaaccaatcaccacgctgtccttgaggagtcttgtggtccaactacaggggaacactgtcaccctgacatccccctctccaaagtgtgccacctccgatgagcctccctgtcatgcccggcctgtggacggccactcttccgtccctcccccgctcgagcacaggggggcgctgtactggcagctgtgtggtcctctgcc

SEQ ID NO: 3452 - DNA, 657 bp, Canis familiaris
  misc_feature (1)..(657): n = a or c or g or t
tggggcatgccatggagntggccctgtccccacnggnncgctgcttgannnncgnntcctcagcannntcaaacccccagcctatgaggatgtggttcaccggccgggcacaccaccacctccttacactgcagcctcaggctgccccttgactgcttccagtgaacgcacctgccgctcctctgcttctagctgccctgccccctgcgagggaacaaatgtggaaggtggttcctcccaccagagtgcaccccctcatcaggagggtgagccaggggctgggatgagccctacccccacacccccttcctgccgctatcgccgcctgactggtgactcaggtattgagctctgcccttgtcctgactctagcgagggcaagccagtcaaggaggctagggctggtgccaccccaccagatctggaggacccttgtgtgctgcccctcaatcctgtaccccaggcctcccctgtggagctagcttccagtgaaggggacatcccataaacagttttgggagggtggattacttgcccaccagaaactgccctgggcccaagttctctttggcctctccctgccacttctaatctgcctgaaaggggtggagtcttgaaaagagtggcagtgtttgggggactgtgctagctctaccc

SEQ ID NO: 3453 - DNA, 647 bp, Canis familiaris
  misc_feature (1)..(647): n = a or c or g or t
annagggggactcaaggcntggactnngcggcctgtacacccaggagtttnnnnnncggtngacannagcngnanctacccggccgtgnnaaggtccacgtccagcnagtctccaagcttccaaacacccggggaatcaggtctaaacatatcttggtcctacttgtaatcagctgcaaaagtacaaagtgtgaactcacctgtttaattgtcaaagaatctgagagcgatggaaagttaaaggtgcagaaaccgaaggtcaaagaggacaagggatgtaaacaagactgcagaatctcagaggctgtggagccaactctacacccaaatctgctccttcaggaggccggtgctctttgcatcactccatgaattcaggctgtaggagtctattatttacaaagggcaagaatgagaagattataggggtaggaccaaccagtagccctgttcaaacaaggcaataactgcttatttccctcagaacaaatgtacagcgtaaggcacttcatgtctgcctggtgctgttgatggtgacgatggcgatgacaatgaaggagactggctgctgctgagggtgatgctccagtggtgctaacacttcaattacgacacagagatctctgtgatcttaaagttcttgaggt

SEQ ID NO: 3454 - DNA, 681 bp, Canis familiaris
  misc_feature (1)..(681): n = a or c or g or t
aaaagaatcatctnnagatacttttaaaatacagattcctaggcccacccctagagatgcagtgtannnagggcaagacctatgaatttgtatttttttccagatgattataatgcttctgattcaacgaccacactttgagtagcactgtcctaaatggatatgaaccaagtctttttcctgttgttactgtcataataagtgctcaaaaaaaatatctgttgaagaattgatgagggaaaggataaaagtcagttggcaaaaatctgtaaataggttagctcaaaatactgatttctaattgacttcatataaaatgtttgaatgaaaaattgatttttgtaggatataaactttttaaagaatacagatatataaataaggttaataattgcttttgttagcgacccatactttttttctgaagagtctatctaaaaccttgtgcagaaagtgctacacttcctcttttgttgtcccatgtcaaactgtagacttaggaataggcaagggggcagatgagaacataagaagcagtaaggaagacagaggagaagcaggcattaaagatggcaaattctaatgaaagacaaattatattgagtacatagaaattttattcccgaatgtgtaggttagtatacactgatttccactttcttttgattctacaatataggg

SEQ ID NO: 3455 - DNA, 577 bp, Canis familiaris
ttgacgaaaatttctgaaaatgaaggctttatcccaataaacaaaaatctgtggtccatttcatatgtcaccacactgagctcctttgccttcttcatcctgcttattctgtaccccattgtggatgtgaaaggactgtggacgggaaccccattcttctacccaggaatgaattccattctggtgtatgttggccacgaggtgtttgagaactatttcccctttcagtggaagctggaggacaaccagtcccacaaggagcatctaactcagaacatagtcgccactgctctttgggtgctcattgcctacattctctataaaaagaaggttttttggaaaatctgacagctccaactgggtctggggggagtctggaagcagcctttattaaagggaaccattacttataaaactgctgggatgtgtctttccagatgattggggaagatgctgatgtgctctggctggtttactgggacatggctgttcatcagaactctgtatatttgagacttgtatgtttggaatataattgtcttttttctccatcttctatgtaaatggatgtatttag

SEQ ID NO: 3456 - DNA, 565 bp, Canis familiaris
  misc_feature (1)..(565): n = a or c or g or t
anngaaagaagactacatctgtgtgcgctgtactgtgaannacgcaccaagccgaaaataaaaaatacaaacacaaacacccccctcacccccacccacttaatgtaattcaggactccaaccgagaagatttcttcaatttctcagcaaagctacaggactggtattcaaaccagcctgtaaacggtgctatttctattccttacgggatcatttttccagaactctttgaaaaaaagaaaaaacaactaaaaaattttttgacactttttgtatttttttccttaagagctgtttgtggttgttgaggtttgaaatgccgactgctttttttgcaggggtttccaccaatttggaaggcattggagcttgcaccttttcatgtacagcattaaaaccttacctctgtctgggatttaccggcttaagagtccaactcagtttcagtgcccagaagggcaccagaaattccagtaaatcctcatttgaggaatttctctcttgtttactctgttaccatatcggggaacttaagtttttcacttttggggtttttgtttcttta

SEQ ID NO: 3457 - DNA, 668 bp, Canis familiaris
  misc_feature (1)..(668): n = a or c or g or t
tgctgatgaatactnnnnnngctgtgctcgctgtnnngaaaatgtgnntggggaagggacnnnnngcactgccatggatcaggtcttccatgtggattgtttcacctgcatcatctgcaacaacaagctccggggacagcccttctatgcggtggagaagaaagcttactgcgagccctgctacatcaataccctggagcagtgcagtgtgtgctctaagcccatcatggagcggattctgcgagccaccgggaaggcctatcatcctcactgctttacctgtgtgatgtgccaccgcagccttgatgggatcccgttcaccgtggatgctggtggcctcattcattgcattgaggacttccacaagaaatttgctccccgatgttctgtgtgcaaggagcctatcatgccagccccaggccaggaggagactgtccggattgtggctctggatcgtgatttccatgttcactgctaccggtgtgaggattgtggcggtctcctgtccgaaggagataaccaaggctgctaccctctggacggacacatcctctgcaagacctgcaactctgcccgcatcagggtgctcaccgccaaagccagcaccgacctttaaatacggtcgcctgcttagctggttagttggtggcgctgagaagaaggaaaca

SEQ ID NO: 3458 - DNA, 492 bp, Canis familiaris
  misc_feature (1)..(492): n = a or c or g or t
tgcatcatcnnngnttctgactatnnnnnntncgacttttccattaccaattncaacaagaatatttgatatctttanntctgagggtttagaaatagtgtttcgagtaggattagcacttcttcaaatgaatcaggcagaactgatgcaacttgacatggaagggatgttacagcactttcagaaggtcattccacatcagtttgatggtggaccggacaaattaatccaggcagcttaccaagtcaaatataactcaaaaaaaatgaaaaagcttgaaaaggaatacactacaataaaaactaaagaaatggaagaacaagttgaaattaaagtaccatgagtaagagtaacattaaatcataccctccacttcaacctactaaaagtggaaaagtacgtcatcctgatgagtggggaaagagtatgggttatcgcataccacgaatattcggaactgcaaatcaagaatctgaggatgggaagccatcc

SEQ ID NO: 3459 - DNA, 296 bp, Canis familiaris
  misc_feature (1)..(296): n = a or c or g or t
atgcatccaattcccaannncagnnttcagcatcagcaanaatcacagtggttgnnnccttnnannnnntaccagtgaaaaaaggnnnaggtgctgacctataannnnnnnaatgtntnnnnnnncatcactaaannnngnnntggtaacnnnnncnnnngntcnnnnnnannnnnnnntttcttttcatccagtccactaacgcntagttatatattcantggttttacataaaggaaatccaaaataaagataacacatcaagactatctacaaaaatttattgtctatttaca

SEQ ID NO: 3460 - DNA, 113 bp, Canis familiaris
  misc_feature (1)..(113): n = a or c or g or t
taattgtcctcagatcagaactttggatggtttggaggctgtgtttnncaaccttccaaacagaattaaggtttccaaatggtagttttagcgtgtgtaattatttgaagcct

SEQ ID NO: 3461 - DNA, 628 bp, Canis familiaris
  misc_feature (1)..(628): n = a or c or g or t
caggagttcagccagaagtnagaccagattcttcanggtaacatnnnnnnnnactttattatgaatgatccagcaggaaacagctaccttcagaatgtgtatgcacctgaagatgatnntcagatgaaggtggagcattatangcgcacatttgaccaaaacgaggagctagggctcaatgacatgaagacagagggctatgacgcaggcccagccccacagcggtagcgctgggtaattcacaagccagcctctagtgctgctcagactgaaggattatttattactgtcgagaaaagctgggggtgtcctccccaccaggccttgcccatgtatggaggtcacctggtcaattggtcagatgtgggcaattttctgaatggtttgtgatggaagtgcaaacctgttggtttcctttcctgtattttggaggttttgaattggcctgggaagaaacccagaaatgaaccatgagggcatgttattatcacttttttcccatcaagtctttaccttccgtccagataattctttctgtatacagttggaactctgaagatggaagacagctacatctggagtttgggagttgcctgggggaaaaaaaacactggctttcaacaggaag

SEQ ID NO: 3462 - DNA, 554 bp, Canis familiaris
  misc_feature (1)..(554): n = a or c or g or t
cacggctccntcgtgcggtnnctggatcannactcgttccactaccacaccctggaggaaaccaagcagtacctcaggcggcataggcctgccccgctgtccatggaggatgccctggaggaggtgaagaaggagctgagtaccacgaggtgatggtggcaggagcaggcggcacccaagactcccttgagtggcatcccgggtccagcctttcagagcggagtggttctcccccagcccccacctccttggtgtgcccggcgccccgcccgaggggacacataagccagtggaaacggaaccccgggtggcgcagtcaccagccacagcaggacataggacggctgcctgtggagccccgcgcagcagccatgggggccaggtgctggcttcctgatgagctgaggcagacgggagggcgagaagccccatctgctccgcggagccagcgccaggtgtccacaccagggacaacatgtgggacgccgggacacgcctcctccggaccctgcctnnnnncacttctaactccaanncacagagaaagaggtctt

SEQ ID NO: 3463 - DNA, 502 bp, Canis familiaris
tgaggctccaatcacttttgatgcagattcttttcttaattattttgacaaaattttagggccaagtcctcatgaatcagactccgatgatctggatgaggaagactttgaatgtttagatagtgatgatgacttggatcttaaaacagaggcggctggggaagaagcatctgtaaaaggtactcttaataatctcaagtcatacatggcccagatggaccgggaattggcatataccagcattggcaaaagtttcaccacccagaagcaaatggaatctctatcccagactaccaataataattcggatgaggaagattctggtgcaggaggatctgttatgacaccagtggatgtagacctgaacctggtttcaaatatactggaatcctatagttcccaagctggactggcaggacctgcgtccaaccttttacatagcatgggagtacagctgcctgataacagtgatcacagacccacaagtaagccaacacaagat

SEQ ID NO: 3464 - DNA, 512 bp, Canis familiaris
  misc_feature (1)..(512): n = a or c or g or t
aatttgtatcgcccctgtggctgaaaaaaagncttttcggttttttgttttgttttgtttttgtttttgttttgttttctttggtaacttgggnnaaaaaaggctttttaacccatttttgaagagggtgaagtttggagaacaaattttaaaaaccatcaagtcatgtgagcagatttttctagagaggaaaagggataggagacacacacacaccacaaaacttgaaaagaaatggctttactttggctgtcttttcttctgtcatgtgcaaaatgagtttgtaattttaaaaaccggagaacccccattctgtgtcttggggcggtcacggcagctgaaggcagagccgaggcaaaacgcggaagaggagcgccgaggttctctttaccagcacatcactatgcatctgtttttggaaaagaggagagcgggagaagacgactgcctgccttggaggggtcacgtgagggacacctgtgcctgatttcattaggaaatccattctgtta

SEQ ID NO: 3465 - DNA, 434 bp, Canis familiaris
  misc_feature (1)..(434): n = a or c or g or t
gnctcagctgccccnnnatcacattccccaagcctgnggcagggcatgaaggccttccctgaaatttagggtatctctgaagtgccttccgtgctttagagcgcctgtggagtcagcccaagaccctgtggacatggcannccaactcaacttctacctctgtccaannntctttctttccttccctctctcccactctccctccttccttcccacaataattggtccctgcggctgcaccgtaatcagagtcggcttccctgggaacctcatctgagactagtagtaacctttgaggaggaagtgactggagatggccaggagacagacagacagacagccttgtggggtgccagtatgttctacatcccgatggcagatgcacaggaacatttnntttgtaaaacttcagtgagctgtgtacattttgtata

SEQ ID NO: 3466 - DNA, 646 bp, Canis familiaris
  misc_feature (1)..(646): n = a or c or g or t
ctccatccccctgtctcagaattnnatccccagtacctggctccaggttgtgactacctgcctgccatgaggtnnttttagncttgcttacttctccctttaaagacccttttctgccccagctctgagatgcttgcagatcttacgggattgtgggagcccctgctgcatactgcagtagccccttgctatctcttgcaatagtccttttgaataaaaccttcccttacctatgtccaaatttgttcttatttggccaaggttatggaagactcgcatattttaaattggggaccagttctaaagttatgattgtgttgaatatgtgtataacagctctgctgaacacccaagggaatgccaactggaaaggtgccccatccttagggaagcttgctaagaggggttctgcagaatccaagccagtgtccccaaagtcacccttctgtgcatcctctcacaccatccactgtgtgtacgtacgtgtctgggatctagggcaatgtgaattttctttttctttggagattgttcacggaaaacagatcctcttctctcttgtccacctattaattgtttacaatatttgtacatctatgcaaaatacttgaatgggccatggtgccttttnnnnnntgtttgtatt

SEQ ID NO: 3467 - DNA, 511 bp, Canis familiaris
  misc_feature (1)..(511): n = a or c or g or t
gtagccagcaaagggcagatnnnagcccagaacccactccctgagaacccatcctncttaactcctctttccctttgattacttggatgtgcagggtccatataccccctactagggcaggatcctaagagcatgactcccggggtcctttggtcttcatgctgggaattgttgcctcactcatcttgagtccttgggcacctctttcattgagtcagaattatgtcctcacagtttagagtacaaagatgctgaatatcctagagtgagccaaactgtcccctgtcctactaaaacaccctaaccaaaaaaggtccacgtgaaggcctttgccgacacgaaagccatgagggtggatctgtccccggcagggaggaccactccttccagatctggggctgggctgtgacaccagctaccaatcttaggatattattttttgttttctctaggaaaaatgggtgctagtannnattgccttgtggcttactgaactcatttgtgggtgatt

SEQ ID NO: 3468 - DNA, 437 bp, Canis familiaris
  misc_feature (1)..(437): n = a or c or g or t
cattcagaattaaagtcaaagtctattaaaacccacaaggcctttcatgatctgaaccccctcttaccatcttaccatctacctcccgcatattctgttcctaccacatagacctcagcacctctggatccatctattggaatgcaagctccacagatatcaacttgtctcttctttcctatttccttcaagtcctccttggccatctgacctaaaattgcaataatcactaccatatacttcctatgcccaagctccgctttacttttctgtttagcatttgtcatctaaatatgcaacacactttgttgacatttatttatcttgtttactgccttaatctccaaccagaatgtaactcctnnngacaaggacttgtgtctgattaatcatatgtctcacacatataagagatcaacaaatatctgttggattaa

SEQ ID NO: 3469 - DNA, 262 bp, Canis familiaris
  misc_feature (1)..(262): n = a or c or g or t
annnnntnnntnaaattcntnttngaannngctttgcattaatttaacaaataaaggttgtactttctttacttatacacttaatgacgtatnnnaattaaagtaaaactttattattgnnattaaaaatttcaatannngatgtataattgaggtgataaatnacagcccttgacttnnngaaatttttgaaattcatatttatttcaatatggcatattnnnaattacttccaatttaaaaataaatgcatgntatgtgg

SEQ ID NO: 3470 - DNA, 646 bp, Canis familiaris
  misc_feature (1)..(646): n = a or c or g or t
tgataccatggagctcttcattgaaacattgactngaacatgttttgagctgagagtttcaccctttgaagctgttatttctgtgaaagcaaaaattcaaagattggaaggtatttccatctgtcagcagcacttaatttggaataacatggaacttgaagatgaattttgcttgaatgattacaatatatcagaaggttgtaccttgaagctggtattggctatgcgtgggggacctataaatactagaagagttcctatggaagatccacttagggagatggctgagtacatggattccattcgagatgaggtctgggagaagacctcctgcaacaaacaagttacatttttggtataccgagaaggagatcaactgaatttctttcgtgtagtagataggggagatggcactttaacaccattatctgaatctttaagtggtggttctgtgtataatttgtatacggatgaggatgaagaaattgagccttctccttctgggcaacagataattgaaaattcaataactatgaataagatgaagctgctgaaggctaagttggagaacatgaatctcagcaaaaaggtgaagctgtcggcatttggccaggcttttctctannnnnnncctgcaagactcaca

SEQ ID NO: 3471 - DNA, 581 bp, Canis familiaris
  misc_feature (1)..(581): n = a or c or g or t
gcaccggtgaacttggctcattggcaggtttggctcagcacaaggcatcctgaannacctgaccatccaggggagtcagccaggagagagcctgatttggggctgtggcacctcccaggtctatttttactgtcagctaggggatttgctctcactggtaactacaagaatagctgtctcacatatgcttgtgagatgttacagattatcttttcataacacatatctttagttcagatgacatccgaatgctcattgtgccatcttgtcatacttgtgtaatatgctgtgtgactggtcctgaggtctgggcatgtacactttccccatcacacccacggagccacctgcagagaccattccgtgttgcatgttttttctgcttaaagtcacctttgacttactgtgttacacaagtaaacccaaagttagtttttctgacttattgaggctataaagtataatatatagtttggaaataagacctgcttttacactagatgtattttctcaactgcgtgtgtgttccagcagtctgctctgaggagagaacaggagttacagaatgtgtcctgaattat

SEQ ID NO: 3472 - DNA, 546 bp, Canis familiaris
  misc_feature (1)..(546): n = a or c or g or t
ggctcactcaaggnntcctgtctgtacgggcagctccccaagttccaggacggagacnnnnccctgtaccagtccaatgccatcctgcgannnntgggccgctcccttgggctctacgggaaggaccagcaggaggcggccttgctggatgtagtgaacgatggtgtggaggatctccgctgcaaatacgccctcctcatctacactaactacgaggcaggaaaggaggagtatgtgaaggcactaccaggttacctgaagccttttgaaacgctgttgtcccagaatgaggggggccaggccttcatcgtgggcaaccagatctccttcgcggactacaacctgctggacttgctgctgattcaccaggtcctggcccccagctgcctggactccttccccctgctctcggcctatgtggcgcgcctcagcgccagacccaagctcaaggcattcctgtcgtcccccgagcacgtgaaccgccccatcaatggcaacgggaagcagtgagagcttgtggaaccctgggcgggaagctggggggct

SEQ ID NO: 3473 - DNA, 436 bp, Canis familiaris
  misc_feature (1)..(436): n = a or c or g or t
aatggcaaagactatannnngtnnnnnnncnctnnntcnnnnnntnnntagtagcattcnnnatttttagttcgnnncttttgctagttagatgtggnnnaatgacnnngttttagctagtgagatagnngcaaaaannnnatgtgtctttnnnnnnagacgtttttccttatccnnnnctnnnttnntgttggctagaatgcatgcatttagcnnnancnnnnncatccaccctagaccccggaatgaccctagaannnnnnnccatacatagctaatgaacaaatagnnnangagccttnnctgccannnactctgaaactctctcactcctctggacttttaggtgagagtctctccctccnnnnnnctnnnaggtgagagtctctccctcannnnnnnnnngnttantttcagttttctagnnctagnncca

SEQ ID NO: 3474 - DNA, 508 bp, Canis familiaris
atccactgtccagtgcgcaccaggcgctgctgcttccccaccggcccctcccgccccctcctgcccccctccccttccaggtctcctacacagacccatccctcgcacctgtacctgcacctgctctgtcccctggatgttgccttttcctggcactcatgcccccaccctttgcattggaacatcgtcctattctcccaaaacagctgcaggcacccactctgcaccttgttatgaactttccttggattcacaccctcacctggtttctgcttgagctccacccccactttgtgctcatgtatcctaggtccacattcacattccttcccaggactgcttcctttggttttgtgtttttctggggggagttaagagagaagaaatgagggcaggcttggggagctgcttccagtagaagtgagaatcctaaccacaggaagccacctcgactgctggcatggacggagggaactccagggcagaaggtggcatcccctttgcattg

SEQ ID NO: 3475 - DNA, 653 bp, Canis familiaris
  misc_feature (1)..(653): n = a or c or g or t
gtgctctatgtagacagctgggctcggngncgcatctacnnngnnntcaannncgtgctgggatcaggcttgcaccaccanntccagaacaatgagctactccgtgacatctttggcctgggccctgtgctggtgctggatgccactgccctgaaggcctgcaagatctcacgttttgagaagcacttatacaacgcggctgccttcaaagcccgaaccaaggcgcgcagccgtgtgcgggacaagcgggcagacatcctctgaggtggggcccactgaagaggagacggtccacacctgtgcctgtgtttttaacagaagacactgcaacaactggtccctgccaggaattgtcgctttatttttttaatgacaaaaccaaaaacagacatggggatgggtagctggaggccagggcactcgggatcctggccccttgcccctgcacacgacgctgtggccttttcctgctctgtctcaggccagaccaaatgtgtgcttgtcccagagccgtggggcagacagcaggagggctgtccctttctgtcctttctcaggccctgctcccatgggatgacccactttcttgaagggaatggcatctggacagatggcgccaaaacaggtggggaggtgaggctacatggaatgga

SEQ ID NO: 3476 - DNA, 564 bp, Canis familiaris
  misc_feature (1)..(564): n = a or c or g or t
actatcttattcgtacagaaccattcaccaccctccatatccagcttcagannnnaaggtttgactgtgcagatcgacagttccattccattcctgccacctggcaggcactcatggacaacccatatgatgtgaaggaactgattccnnnattcttctatttcccagagtttttggaaaatcaaaatcaatttaacttgggttgtctccaagtttccaaagaagtggtaaatgatgtcattctccccaaatgggctaaatcagnnnaagatttcatctataaacataggaaagctctggagtctgagtatgtttctgcncntcttcatgaatggatagatctgatttttggctacaaacagagggggccanctgcagtggaagcnctcaatgttttctannnctgtagttatgaaggnnntgtggatctggatgccttaacagatgagaaagaaannnaagctttagaggggatgattaataattttgggcaaacaccttgtcagctnnnaaagtgaatttctctgtcttgtcattttgtccagaaaagaaaggaaggaagaa

SEQ ID NO: 3477 - DNA, 630 bp, Canis familiaris
  misc_feature (1)..(630): n = a or c or g or t
cgtatgcgaagggncagagaagccagaccagtaannaaaaaaaatagcnnatttactttaaataaacagtccattttaaatgtggggattgggaaccactagttctttcagatggtattcttcagactatagaaggagcttccagttgaattcaccagtggacaaaatgaggacaacaggtgaacacgcttttttctatgtttacataccaagtcagatccgttatgaataagtaatttagtgttaaatagacttccagctttatgctggaataaatagcatgtgagcagctgtttgttggcctgggggtggaggggtaaggtgggcgctaagcctttttttaagatttttcaggtacccctctaaaggcaccgaaggcttaagtaggacaaccatggagccttcctgtggcaagagagacaacaaagcgctattacactaaggtcaataaaaatggtgtcagcctcctaaccccagcttctgttagaaatgaggacttggggatccctgggtggcacagcggtttggcgcctgcctttggcccagggcgtgatcctggagacccgggannnnatcccacgtcgggctcccggtgcatggagcctgcttctccctctgcctatgtctctg

SEQ ID NO: 3478 - DNA, 563 bp, Canis familiaris
  misc_feature (1)..(563): n = a or c or g or t
ataccatcaaaagtacctatgtgtgtttttnttaacaatatttttttcttatagcttagactggactcatttccaaaatgatgcaatagtatttttaccattgttccaaattagcaaataccaggactggtgtgttttcagtggtacctgaatgcactggatttgtttctgtgaaagtggatttttgtggcctgtgcaaggaatggatcggagacgatgaactggatgtgaagcaccctaaggatttatagatctatcaaactattggtggtgacatcagcattgttgtcatagctgggctggttgtcatggctactgttgcagaggcctccgtgtcacctgtgataatactcctggagggcctagctgcctgattcagtggagaagaggctttggttcttcctgctcctgctcccacttgtcacattcaggatacagcatattcgtttgacaggactgaaccagcatctgtatgtgaagatccatgtcaagctttcttatgatcagtgccttctactgataccggagcacctcctctggtnnnnnttggtgttttgttaatt

SEQ ID NO: 3479 - DNA, 549 bp, Canis familiaris
ttcatgacaggtgaaaatgacttgggggtaaaaactttccaattcgttcacctctgtaagaaccacctaaagaccctctgaggctgcctcagaagtactggcttctgagtttcagtgactgctcgaacctgaggagggttctgaagggtggttggctgcctgggctttgacctacgctttctggggctgagtctttaagcccagaaatccactgttgctctcatgatgagcacatctcctgagaaacttaaaagactgctgagcacagagctctccccacttctcaggaaacctaatcagcgagggttctctggcttcctgaaaggctcttctcactctcctctcccaaccatttggatattttcccacttctgtccttggaatgagcagcccaaatcgtctgggatttgctaagtacaagcccaacactattaagtttcagaaccttagaactcgggcaaaaccttgatggtaataaccctttggtgcttttggtatgtcttgacatacagacttttcaacagcaaccagaaatgtgtaaaatgattc

SEQ ID NO: 3480 - DNA, 532 bp, Canis familiaris
  misc_feature (1)..(532): n = a or c or g or t
gctctccaccntgtnnnanntnngcgggatcttcggtnggatcctggcaggtgtgatctcagaccgactnnaaaaaagggcctccacntgcggcctgatgctgctgctggcggccccgacgctctacatattctccaccatcagcaaaatgggcctagaagccactatcgccatgctgctgctcagcggggccctggtcagcgggccgtacgccctgatcacgaccgccgtctccgccgacctgggcacacacaaaagtctcaaggggaactcccacgccctcgccactgtgactgccatcattgacgggactggctctgtaggagcagccctgggccccctgctggccgggctcctgtccccgtctggatggaacaacgtgttctacatgctgatgtttgctgacgcctgtgccttactgttcctgatccgcctcattcacaaggagctgagctgcccggggtcagcgaccggggaccaagttctatccaaggagcactgaccactcgcatgccctggagggaggctgggc

SEQ ID NO: 3481 - DNA, 514 bp, Canis familiaris
  misc_feature (1)..(514): n = a or c or g or t
tgtganncccgggcgncgtgacgaatcctggacccggccctgtgcccactcctnnnngggggctgtggcccttcccagggactcgttgtgtcaaacctttcttcccctctcccgagagatcgagcnnaagctnnagattccttaatttattgtaaaggggacggcctgctggggccttnnagtagaaggnngcgtggggccgggggcggaatccccgannagaaaggacagtccctnnnnnnagccgctggcctnnngaggcgtttgaagctccgcggctcgtcgccttttccaccgctggcgcccaggtggcgacccccttctccaccgccccttcccccgggtcagtgcggggcgccctggccatccctccgcctccccctaggccgccggcgggctcggtccagaggccggtgcggggctgggggaggcagacccccgggcggaggtggcatcgggggcggggggacggaggaagggctcgggccgagggaactagcgcagtcccgggccg

SEQ ID NO: 3482 - DNA, 433 bp, Canis familiaris
  misc_feature (1)..(433): n = a or c or g or t
gtncagctccagctgctgccacagggaccccttgtgcaatatttgaccatngagacctgtgaggatggggacgacctcgttttcttctatcaggtgtgtgacggtttggccaaggccagccatgcctcccacacagctgcccaggctggacttcctgaccaactccttactcgtggcaaggaggtctcagatttgatccgcagtgggaaacccatcaagcctgtcaaggagttgctaaaggagaagcaaatggaaaattgccagatgttagtggataaatttctgaagctggatttggaagatcccaacttggacctggaccttttcatgagtcaggaagtgctgcctgctggcactgccatcctctgagaccccttccttggccctgctgcatacactctagctgtttcctcatctccctcggacccacagt

SEQ ID NO: 3483 - DNA, 535 bp, Canis familiaris
  misc_feature (1)..(535): n = a or c or g or t
gtccacgcgggcacggggccctgccctcgctccccacccagtncgcccgcatcattcctcttctttcagcacctgcccacggctccccactgaacctggtcatggcactggagccctggggtggctcagcgacacccctccatccagatgtcaggccctggagacggggctggggccacagaacatgtcggtgtgggacttggggtgggttcatttctgtggccggggccgttcctaccactctggcccccactcacccgcgcacacaccgtcttgcccccacccctccgggacctcagccctgcccctgtgcagctgccaaggtcaccagctgggaccacgttcccccgtggcttgagcacatcacacaggtgcctccggccggggctgcacccgcgccttgcactgtgcgcggtatccagggcccctcagcctgggctgtggctccactctggtgctggtgcttttagcatctgggggggtgaccctccttttggacttagacatggacatggtgctctcctgtgcgtgcggg

SEQ ID NO: 3484 - DNA, 583 bp, Canis familiaris
  misc_feature (1)..(583): n = a or c or g or t
ttgatnnngctccctggatctttgagtctgtgtcacatgagactcaagagtnnnagtcntccagctctggaggtgctgaannagctgcttacttctnnaagattgcttcgtgcagcaactgctcaagaagctgaagaagaagggaccagacttcaactgggaatgtgaatggggttgacctggctaggactgaggagtcgaaaggaggtgtggaggatgatagtagtgtctgtattttccggactttaatttctgtgtgagaccaaaggagaaaagatgtattttgttcaaaatttaaattttatgtggcgtactatctgatgtaacctgtctggtcagtttatttggacaacccaactcagttttatttgatatggaacctagaatagacaagatcttggtttttgtacaagttgatgtgatattctgatcatttcaggggattcacaatggaagagatatttgcaaaggctcttgaggggctggctgggaaaagaaaggaggactgtctgcattggaccctaaactggacagggactaggtatttttgaggttgataggtcgtcctgctataagttcattt

SEQ ID NO: 3485 - DNA, 590 bp, Canis familiaris
  misc_feature (1)..(590): n = a or c or g or t
attatganccgctttatatatncaatcccagcccaggattatttgctgtgatgcacccnntaanntacgcagaaacnnngatagattaccatctgtgccctcaccccaagtacaagttcatcaaggagtcccacagggggtccagcattcctctcacccaaaagcaatttctccatcacacggacatcattccggggataatgcactggaagaagttccagcccctggctctctcatccctgcctgaaacctcgaagatagacacaacacagagctgtgattccttcaatttnnccatgcttcctaaaaatgtccctgcccttcttgacgccctaccagaagaagacagattggaaacagctgaacgtgagctctgcgaacagaatatagaagttatgttgactccagaaataattgaagcagaattccccatgttggatcacaaggacaccaaaaaggagaaagaggccaaagaacaagcanagccaatggagaaggcaggagaaaaggtgctggaggagatgaagactctgcggggcaaagctctcaactcctacctgatnctagaataaaaatctccagtgtccatt

SEQ ID NO: 3486 - DNA, 40 bp, Canis familiaris
tggtgactgtgggctcggcccttgccgctctgcccaggct

SEQ ID NO: 3487 - DNA, 506 bp, Canis familiaris
  misc_feature (1)..(506): n = a or c or g or t
gctctggtaggtgctccannaaacctcctcctccctgggtgtggttttctcagtcnnctgttgtcaacagtacactgtccacgtttcagagatgagcataagcctggaggttgtgcatacctcctcattggtcctgtcagcagagtcctgcatcgcccaagaaccggtgttcctgccaggacagcgtgggaggtctggaagtcacaatggccgccagaacactgtctgactccacctggctgtgtggagcactggcacctgtccttctctactcagatcttggctctaactaagctgaggctgttttgggggcacccctggagagcaagaagctgaacctgcacatgcaggaacatggggctgtgtgaggcagggctcacctgtgtgcatcttcaccactttctgtgccagacaattgttgggtttaaacataaaggaagaagactgaagctgtacatactttgtaaacatacccatttgtacttgaatagtaggcttttaaagag

SEQ ID NO: 3488 - DNA, 601 bp, Canis familiaris
  misc_feature (1)..(601): n = a or c or g or t
atcaagaatgcttnnnntttttcgtaagtannagtngctggctattttgcttgctnanccttcattttgctgctgattttctttaatttgagnnagnagtgagcaaagaatgcatttatataaaccattcctttaaaataaataacccaagtgtccatcagctagtgagtggataaataaaatgtttccatggaatattccttgtgccattcagccataaaaaaaggaatgaagtactgacattcattatagtatggatgaaccttgaaaccattaggcggaatgaaagaagccagacatacatacaaggccacatattgtatgattccatttacatgaaatgtccaggatagacaaatccagagacaaaaaagtatatgagtgattgccaggtgttgcgggaggagggaatggggagtaattgctaatgggtataggatttctttttgggaagtttcgaagggttctgaaaatggatagtagtgatggtcgcacaactttgtgaatatactaaaaagtattgaattgcacagtgattcacataaaaggatgatttttatgatatgtgaattaatttcaattaaaaatcaaataaaagata

SEQ ID NO: 3489 - DNA, 63 bp, Canis familiaris
  misc_feature (1)..(63): n = a or c or g or t
cccnntgataccaattacgtgagaaaaagnnnnnnatccaatttaggacacaagatgtctgaa

SEQ ID NO: 3490 - DNA, 584 bp, Canis familiaris
  misc_feature (1)..(584): n = a or c or g or t
catccacatttatcatttccacaccnngncctttctttgaactccaagcctgaatgtccaactgcccccaacattcccacttggaagtcacaggcacacccacctcaccctgtctgaaacagaacccatcatcatcatcctcaaaactggtctttactaaacttctccatgtgaaacggtgggcacaaggctgtcacttgtgtgtgacaccctcaaccctcaacccaccccaatatgtcacacaccatgagtcacatgctaatccgaaaaaccagctggtaacataaggcgaccttatcagacgacacccctgccccattggaaccagttccagcaattaaacacctcccagctgtggtatgatgtggagacagagtggaacaagaggacctgactaggtctgggacatcgtggaaggcctccctgagccaataaccttaagctgttgcctgaagggtgagcagcaaatctaagtaaagaccaggcacagacctcaggcagagagaaagcctgcacccacctacatctctcagctgcgcccatgtgggcacatggccctccctgcccaaggttttttcccacac

SEQ ID NO: 3491 - DNA, 596 bp, Canis familiaris
  misc_feature (1)..(596): n = a or c or g or t
actacagcatcatgtgttngnngtgtgagaactgtacttacaagaatgaaatcttcanngtcctctctctccccattccatccgaatatgagtgctctcttcaggactgtctccagtgtttttttcaacaagacacactgacctggaataaccaaattcactgttctttctgtgaaaccaagcaagaaacagctgtaagggccagtatttccaaagcaccaaaaataattatctttcatttaaaaagatttgacattctgggtacaatgaaaaggaaactgagaacagatattcactacccactcaccaacttagaccttactccttatatttgtccagtttttcggaaacaccctaaatacaacctctgtgcagtggtgaaccattttggtgatctggatggtggccactacactgctttctgcaagaactcagtgacccaagcctggtatagctttgatgacacacgagtcagtgagattccagatacttcagttcaaactgctacagcctatctcctgttctacagctgccagcccttttcaatacctnnnnnnnaaatgcaagagctaggaaaatggtgtttcctgaaaact

SEQ ID NO: 3492 - DNA, 590 bp, Canis familiaris
  misc_feature (1)..(590): n = a or c or g or t
ttgctaccctgatgcccaccaannatgtggacaagcaccgctgtgacaagnagcgccacctgggcaatgactttgtgtccatcgtctacaacgactctggtgaggacttcaagctgggcaccatccgaggccagttcaacttcgtccacgtgatcatcacccccctggactatgagtgcaacctggtgtccctgcagtgcaggaaagacatggaaggtcttgtggatactagcgtggccaagatcgtgtctgaccgcaacctgccttttgtggcacgtcagatggctttgcatgcaaatatggcctcacaagtgcatcatagccgctccaaccccaccgacatctatccctccaagtggattgccaggcttcgccacatcaagcgactccgccaccggatccgcgaggaagcccactacaccaaccccagcctgccactgatgcagatgcaccccccgggccaccccaaagcctctgctcaggcgccggcagagcctgtgcccacgtatgagacaggccagcggaagcgtctcatctcctctgtggacgacttcacggagtttgtgtgaggggtccccctgcctgtatgt

SEQ ID NO: 3493 - DNA, 621 bp, Canis familiaris
  misc_feature (1)..(621): n = a or c or g or t
atcaaggaccagtccacatgnnccacacgactctnaaatcttttttaagataacttttattttcttcttattcctttcctgttgatttttttctataataatttcatttttgtttttttcatctcattgtcccaagttctgcagaccacacaggaacttgcttcatggctctttagatgaaactgaggttcaaggttcctcaccctagtcactaaagaaggattttactctcccggcccagaaaggtgattctttctttcccatttctggagactttagtcttaattgggtaccttattaagaggaagtgctaaggtaccttctgtgttgaacaatctgcaatgtctaaattgccttaaaagagcccatttcttagctgctgaaatcagtgctctttcacttcatcagaggagcagggatggtacccaccagccaggtaggttagatgttaggtgacgcacgttcatttccccaggtgttccaaggcctgtttcctgtgtgaaggtggtgtgtctggttcagagatgagtattgttcagatccagttggtccacttggatttagtacagcccttcctccacccccaccagaccttctcgtttttcaggtctttaaccagac

SEQ ID NO: 3494 - DNA, 610 bp, Canis familiaris
  misc_feature (1)..(610): n = a or c or g or t
gagcagatcctgcagggcacagcagggaaatactgtgtnngagatgaggtnaccatggctgatcnnngcttagtgcctcaggtnnnnnacgctgaaaggttcgaggtggatctcactccctatcctgccatcagccgcatcaacaagacgctgctggcnttggaggctttccaagtgtctcacccctgccggcagccagacactccccctgagctgagggcctagctctctaactgtgccctgtgggcgagggggcagggagggggtgcaggagcagaagccgggggggtgggggggggtggggttggcgaacaggcctggaatcaagcgagccctccctggaggagcaggaggcttacacttgaacttggactctagccttggatctgccttcccactgaacgtctttgtgcctcagttacctcatctgtcaaatgtggggagaggatgctgggagggagagagggagggaggactgcaggaatgttacctgtcatttgtttgtgggggcggttgtgaagatgcggttcaccagagaggtaagggagcctgcgcacctcttcccctccctgtggctgtgcccacgctggnnntttgatcattaaactga

SEQ ID NO: 3495 - DNA, 506 bp, Canis familiaris
  misc_feature (1)..(506): n = a or c or g or t
agccagaggcacggctatctgtcctcaccatgttacctcaggtacttcactggggaggctgaggtgcacggattcatgatgctccgtgaggacaggttgaagaagccgcagcggaggaggtacggcctcctggccaacaccgacgaccccacggacatggcgtcgctggacagcgacgaggagatcgtcttcgagacccggaatctgagatgatgctccggtccaggaggcggcctttccagaagccccagggagaggacaagaggcggaacgggctccgggggcgcgcggcaccccgctgatcctcctgctggcttcgctgcagactcccagagcaccgcttcggccctacccttcacccggatgccgccgtgcaggatgctgcgtgcaaatcagaggcgccggaagcctcacgcgggcctcagagactgggggactgtggcctgggtcactccacttctgcgggggacggggcgggctgagggacctgtctgggacctgnctgg

SEQ ID NO: 3496 - DNA, 549 bp, Canis familiaris
  misc_feature (1)..(549): n = a or c or g or t
aacannnagctgcctccagaccagcactgggcacagcctgcagtggccccacgtggnnnnnctgagcccctcttccctgcccccaggctaccttgggagcctctgtgctgtgtttcagagaagtatgagctacaaatgtatcttgaaatatcttgtggtcctcccttgacgtaactccgaattgcttctctggagacaggcagtggtgaggaggcccctccagaacaaggcactagggaagcaaggccgactctgcaggcaccccctcggggatgacctctcttccttcttctttccctgggcctgcttttggactctcctggcatttctgcctcgtgacagaacaggctggatgagcagtccaagggagagacaccaggccttctcccctgaagtctgtccctgccagccccgggaagggggcggctgccctgtgcttcccaagctcggcagacaggccacatctgcccctcccctccgtgttcacctggcgtgagccagtgcctgggcagagctcacatcgcgttgctttaccacctggggcctggg

SEQ ID NO: 3497 - DNA, 490 bp, Canis familiaris
  misc_feature (1)..(490): n = a or c or g or t
cctttgagaatatgatcntngncaacaccaccatgcagctggtgtcgaggccacagcagtttgatgtcatggtgatgcctaatctctacggtaacattgtcaacaatgtctgcgcgggactggtggggggccctggccttgtggccggggccaactatggccacgtgtacgctgtgtttgagacggctacaaggaacacaggcaagagtatcgccaataagaacatcgccaaccccacagccacgctgctggcaagttgcatgatgcttgaccacctcaagctgcattcctacgccacttccatccgtaaggccgtgttggcatccatggacaacgaaaatatgcacacccccgacataggaggccaaggcactacgtcggaagccatccaggacatcatccgccacatccgcatcatcaacggccgggccgtggaagcctaggcggtccctgggactgcctccacccgctaccccttcccactgccggc

SEQ ID NO: 3498 - DNA, 519 bp, Canis familiaris
  misc_feature (1)..(519): n = a or c or g or t
cctgaccgctacatcctgcagggcttcttccgccctaacgagactgtgggggacttgcgggactttgtgannagccacctggnnaatcctgagctgcctttctacctgttcatcactcctcccaaaactgtcctggatgaccacacgctgaccctctttcaggcaaatctcttccctgctgcccttgtgcatcttggagctgaggaaccgacaggcctcttcctagcgccgaggctgctggaacacacggtttccccgtctgcggctgacgtgctggtggccaggtgcatgtccagggttgctgggacctcacccccaatgccggcccctgaccctgcaccccttgacttggagccagcggctgaggcggaggcagtgcggctccctgaacccagccctgggtcggcccagccggtcagaagggacctgggcaaggtgcccaagtggctgaagctgccagccggcaagaggtgagggccgccagcctggacgcaccatctgccgccacaggaccccccc

SEQ ID NO: 3499 - DNA, 699 bp, Canis familiaris
  misc_feature (1)..(699): n = a or c or g or t
gttcatgtacaaggtcaggagcctttgactgcttccatgttggcatctgccccanntcaagagcaaaagcaaatgttgggtgaacggctctttcctctaattcaagccatgcaccctactcttgctggtaaaatcactggcatgttgttggagattgataattcagaacttcttcatatgcttgagtctccagagtctctccgttctaaagttgatgaagctgtagctgtactacaagcccaccaagctaaagaggctgcccagaaagcagttaacagtgccactggtgttccaactgtttaaaattgatcagggaccacgaaaagaaactcgtgcttcaccgaagaaaaatatctaaacatcgaaaaacttaaacattatggaaaaaaaacattgcaaaatataaaataaataaaaaaaggaaaggaaactttgaaccttatgtaccgagcaaatgccaggtctagcaaacaatgctagtcctagattacttactgatttaaaaacaacaaaaaaactacaaaaaaatagtaaaatataaaaacaaattaatgttttatagaccctgggaaaaagaattttcagcaaagtacaaaaatttaaagcattcctttctttaattttgtaattctttactgtggaatagctcagaatgtcacttctgttttaaataacagaattgataactgagcaaggaaa

SEQ ID NO: 3500 - DNA, 687 bp, Canis familiaris
  misc_feature (1)..(687): n = a or c or g or t
gctatatatannaanttttaaaattgtaaagtaaatgtctttagnnntaggtntgtggtgtgttcatttgtgttaatgtgcagggaagggacatggacttgatggnnatggggagtgtatcttgatgtgtgtgcaggggtgagtatnnnnaaattattaacagcttttcatttaggggtgagttatgtgacaagtggcctaatcagaaaaatgaaggagcgaagatgcaagctttgccaagtgatgaagtaaacaagattttgtatctgttttttatcaggtgttgtaaaatttgtgcatggctttttttttgttgtggcttattagtaattggtagaggagaaaagaggaggaaaacccctcagctttgctaaccagtcttttcaaaggtacataagttggggagtaaaatctgactggcctaatgtgttgaaaagatcctatcctttataatattcaccccatcctgtaatcctccatgtagaggaactacattgttgtattntagtaattcactgtgatttataacaaaccagtgatgtcattctattgtgcacttttgtcaaaccatttacagtgactttaataaacatagtaaacttgctgnnngcaccaaaggtctgttagtgatttatatattgcatgacattttctatttgagttnnacatgtagaatcatttttaatt

SEQ ID NO: 3501 - DNA, 543 bp, Canis familiaris
  misc_feature (1)..(543): n = a or c or g or t
aagcaggactnngaaatgctagcctttaataaatttattagattgnagctggagtgagnnntccaggaattatggctgcaaaatgtggtgctgaagtaatcctgtcagacagttcagagctgccttactgtctagagatctgccggcaaagctgtgaaatgaataacctgccacaggtgcgtgtcattggactgacatggggccatgtgtctcaggatcttctggctctaccaccacaagatattattcttgcatctgatgtgttctttgaaccagaagattttgaagacatcttaactacagtctactttctgatgcagaagaaccccaaagtccaactgtggtctacttaccaggtgagaagtgctgactggtcacttgaagctttgctctacaagtgggatatgaaatgtgtccacattcctctggagtcttttgatgcagacaaggaagatatagcagaatctgcccttccaggaagacatacggttgaaatgctggtcatctcctttgcaaaggnnngtctctgaattaccacctaca

SEQ ID NO: 3502 - DNA, 558 bp, Canis familiaris
  misc_feature (1)..(558): n = a or c or g or t
gctggtgggcggcgtggcccaggacggggtggcnnagctgggggtccggcccggaggaggccccgtgagcgtggagctggtggggccccgaagccatcggctgcggctgcacggcctggggcccgaggacggaggcgtgtatcactgtgcccccagcgcctgggtgcagcacgccgaccgcagctggtaccaggcgggcagtgcccgctcggggcccgtcacggtgtacccctacactcacgccctggacaccctgttcgtgcccctgctggtgggcgcgggggtcgccctagtcaccggcgccactgtcctcggcaccatcacctgctgcttcatgaagaggctgagaaaacggtgatccctggctcctcaggccttgcaggtgcccagcgtcctccggcccagctccaagacagcctccggtcacctggctgccccccccactccccttcctttaatttatttgaccccttgccccccactccttccttcccgacccccgctctggccttctgttcttgatctcggcccggcccagagggaggccattccctggcc

SEQ ID NO: 3503 - DNA, 185 bp, Canis familiaris
  misc_feature (1)..(185): n = a or c or g or t
tagactccttnnnggggtcctgagacccctcgtgaggttacnnnnncccccgtgcccccgacagacccaccactctcatacacggtgccagcacccgctgcctgcagtcaggcgcccctgcccggtgtcctcagttgcccctcgcnnncggccccccccacnnnnntgctccttggggggggggt

SEQ ID NO: 3504 - DNA, 603 bp, Canis familiaris
  misc_feature (1)..(603): n = a or c or g or t
cagtaaggcccagtatgagacccagactggtgtgaaagcagaagcntcgtctcctggctccctggctcccatcccatattcccttcgcttcactggacgaaattctcctgcatcttccaaacaggctcctctgtgcttccttccctagtcccccagcatctcctcttttgcacctgtactgtcctctcggttgataggatctggctcagcatcccaggccccacagcctgttggacggatccgtctgtcagagcattggccagaatgcgagctcctctagggctggtgggctaggcccgtcaccatgtctgcagagccagcacagggcccggcaaaaagcatttgtgtgggagtgacatggaggaggccaacctgactgcccacaaagcttagactggagaagaaactcaccgtcatgcctttgcagcacagttgactaactgggacatagcaccgattgtccaggaagcacttgcctacaggcccggggcctgagcccttaaccagagagcaggaaagaaacagaatcccatcatgttctggatttaagtgccagcacttctacttgcattaactttatttattacacaaataggacattta

SEQ ID NO: 3505 - DNA, 499 bp, Canis familiaris
  misc_feature (1)..(499): n = a or c or g or t
cttacagctacttcgtctgcacggaccannagagccacctnnaggnntatagcttcgcagaggtgcagcnngacgagggcaggggcgacagctgcagccccgaggacctggctgagagcatctgctcgtcctcttcctccccagagaacacctgcccccgagaggtcagccccaaatccaggcacagcctggtccccgccgaccacatcacgtnccaggacatcctcacggcctccaagtggcacccggcccagcagagtggctacaagtgcgtggcctgctgccgcatgtaccccactctgcactccctcaagagccacataaaggggggcttcagggagggcttcagctgcaaggtgtactactgcaagctcaaaaccctctggggcaaggagcagaaggcccggctgggggacaggctgtcctcgggcagctgccaggctctcaagtagccccgcagggggctggggcggctgccttgtcgcagacccctcaggga

SEQ ID NO: 3506 - DNA, 624 bp, Canis familiaris
  misc_feature (1)..(624): n = a or c or g or t
gtgagttggcttctccctctacccctacaccaatcaaacttcctgnnagtgctctttttctctcaaataaataaataaaatctaaaaaaagaaactgctttaaccaggctgctcaggaattactggattctngaaaagtaattcatctgaccatgttcaaaagcatactaacatagacacccagatggcatgtgattattttatgctgctctgtacatttgtctgcataactctggaacaaggcattctgtcttggagggtaggtgcctcaaaagatcaaataaagctcaacagtttggtgggtattgaatttgggcaaagagacctcaaccattttttttttttaactttttttttctaaaaaaagaaaacattggttaagttctgctgggagatacaggcaaaaattcttggctatgttttagcaatgtagtcttacagggttgagtgtgcttaacagaaggttactaagttgaatggagaaaagtacatgtaatttgtgcttattgtagaaaaactgaaaatgagttaaattgaaactatcattccattagttagtgataaaccctattaactatttgtgtatttcctctcagtactgctatattaaaatcaacaaataca

SEQ ID NO: 3507 - DNA, 621 bp, Canis familiaris
  misc_feature (1)..(621): n = a or c or g or t
tgnntcagaaccatatatngagagcaggggggnnggcacangatgcatggggactnnnnnncnntnnnnnnncgaaggactgctggngncaatcaggcatgcannnggcattgaacagggagtggnctgaaagggtnnacctgcttctggactggccaggactctgtcccagcaccagggtactcagcccactggtgtccctgggctgggcagaaggcctgcgtgcagtgctgctccagacccctgcccactgtgtctgcaagagttggtgcccaggagttgatctctgctggaggggaacaaggggggcgccagtgtctgtctggctgtcctcagcctcctgtcctgttgccaccctttgtaagatcggactgctccatggtccaacaaagaatccagaggccaaccctagctacgactcttgtgctcctgtgagagactgggcccccagaggtacaggtcaggctcttgggaggagccttcccccgcaggacccaacttacctggtggaggaaggagtcaatactgtacattgtctcaatgcctgttttttatgttttcctttcactaagggtttttagtttgggtttatttttggttgggttggcactaatccttttc

SEQ ID NO: 3508 - DNA, 390 bp, Canis familiaris
  misc_feature (1)..(390): n = a or c or g or t
attggtccttaaagatctcccgtcaggccttcttctccaccctgctctgtgttctgggaagctgacccttagggacaccctcctcctctgtcttctggttagacatcaacaacaagagacaagagacatcagcaagagactggacagtgggaggaccaatacgtcagaagaatagttttagtatggttggtgtttatgaaaacgctcacagtttcaagaacctgacgcaaagcacttgaaataggaacagctgaatccttctttaacacgataaaatctatgtcatcccaaaggcctgcattctgcttgagagagaaacagtaggggcagccccactaaagttaggcatgatctctatcaccattattnnnnaaaatttcactgatggtg

SEQ ID NO: 3509 - DNA, 534 bp, Canis familiaris
  misc_feature (1)..(534): n = a or c or g or t
attgctaagctcaagggctgcaaagttgtnnnagcagcagngtctgacgaaaaggttgnntaccttaaaaagcttggatatgatgttgcctttaactacaaaaccataaagtctttggaagaaactttgaaaaaagcctctcctgatggttatgattgttactttgataatgtaggtggagagttttcaaacattgttattccccagatgaagaaatttggaagaattgctatttgtggggccatctcgacatataatagtactcgcccacttcccccaggcccacccccggagaatattatctatcagcagctccgcatggaagggttcatcgttaatcgctggcaaggagatgtccgccagaaggctctgaaagacttgctgacatgggtcatagagggtaaaatccagtaccacgaatacatcattgaaggatttgaaaacatgccggctgcatttatgggaatgctgaaaggagataatttgggaaaaacaatagtgaaagcatgaaaaaaatgacacatggaatctaga

SEQ ID NO: 3510 - DNA, 637 bp, Canis familiaris
atatccaaatattgggagatagaggaaagggtggggtgaagagcatagaaatagctccctcagtctatgactagtacatttataatttttcttagaattttgcctgctgcctaatataacaggaaggtcacttgacagagtcactttgggaagcgagaaggataatactgtgagcaattaagggtgttaaatcaaccacagttatagggttgcttatgaacaggtacttcagtgatactcatttactcattcattatttcacctgttgcttattagtcattcaacaaatgttaagtgtgttagacaatagggacatgctagtgtgcaagatagacatcatctttgacctaaaatttattcttgtcaggcagaagaacataacagatgatgaataaaaaggttattcaggtggataatgatttactgctataatctgaattcttaacattgatcagttttcctgcagtgcttttagtaaatcaaaaatggcatcctgttctcttggtaaatggtgaaaggaattcaaaatgtttggcttacatgtctgctaatactcaagagtctcttctataaatgtaactggaatataagatccatgaggacaaggactttgttttgttgattacttttgccctgt

SEQ ID NO: 3511 - DNA, 623 bp, Canis familiaris
  misc_feature (1)..(623): n = a or c or g or t
gctttccnacagannagaaatttctcaaatcacagatttccagtctattgaggagacaggaacaaatggccatcaaactctgccaagagctgatcattcacacttcagaccacaaatgtaatccttgtcctaaaatgtggcaatggtaccaacacagctgctattattttgcaacaaatgaggagaatacctggactaacagtagaaaatactgcatggacaagaactccaccttgatgaagatagatagtttggaggaaaaggattttctgaagtcacagccattacccacactctctttcttctggttgggcttatcatgggatccatctggaaggaactggctatgggaggatggctctgtcccctctccatccttattcagcactaaagagtatgcccagatcaatggatccaaaggttgtgcctattttcaaaaaggaaatatttatatttctcgctgcagtgctgagatatcttggatttgtgaaaagatggctgcgttagtgaaaattgaagatttggattaatatacttcttccaaattcaccaagatgtaagggacttgtggttaaattcatgtgaagaaagagnnnncnactctactagagccaaannnnnat

SEQ ID NO: 3512 - DNA, 632 bp, Canis familiaris
agcagcgcatccggaacgagcgggagaaggagcgtcagactcgcctggctgaggagagagcccgacgagaggaggaggagaacaggaggaaggccgaggacgaggcccggaagaagaaggcgttgtccaacatgatgcactttgggggctacatccagaaggcccagaccgagcggaaaagtgggaagaggcagacggagcgggaaaagaagaagaagattctggctgagaggaggaaggtgctggccatcgaccacctgaacgaggaccagctgagggagaaggccaaggaactgtggcagagcatctacaacctggaggccgagaagttcgacctgcaggagaagttcaagcagcagaaatacgaaatcaatgttctccggaacagaatcaatgataaccagaaagtctccaagacccgcgggaaggccaaggtcaccgggcgctggaagtaggggcagcagtcgccttgaccaaagatcctcgccggcgccccgtcccgctcgcccccagtccctggggccccccgggtgctggaggcaggctggtgtctggaaaccaggagctggcccggccagaagctgctgtgcacctgtccccccacgtgcccacgcatgcaccccacgtgccca

SEQ ID NO: 3513 - DNA, 545 bp, Canis familiaris
  misc_feature (1)..(545): n = a or c or g or t
gtattttcaattcgcttccctncagcnaacactgatctgagctctanntctgccnnnnnnaggatattactnnnnncccaacccaccntcgaggcttcagcccagtannagagacagacctgggtacaaaagactccaggacaaggcagataaggatcacaaaacggatccaaagaaagtgccactagtggtcagaggagggagataggtgttcatctcaatggggaaggtggacgttaaaacaccttcgcagaatcagcagaattggtgttggaccctgaaaaataggtccaatttggcaatggtattgagaggaggacatttcaggaggtggggaaatgccgcctagctggccttggtgccaggcgggagaggtggatgacctcaggacctcgcccggctcagggcctctgcctggcgtgacaatactggttggcttcagtggaccccattggagggcatgtcagggccctccaatttccttcttttttaaaataagatttggagggagtgaggtttataaaattatagatgtttgttgtaat

SEQ ID NO: 3514 - DNA, 373 bp, Canis familiaris
  misc_feature (1)..(373): n = a or c or g or t
tcccgtgnnccccactcccgtgggcttgggctggatcgcggggagcnntccgtgggcagcannnngcccngccgccaggccggggannntnnnnangctgtgcnnngggggccnnnnngcccannanannnnnnggcgtgtggcttgtgttcaaaagggncaatcgcctgcagttagtgnnnctagcgatctagttgnnnnntaacagtgtttaacccatatnnagtattcnatagttctacttgtgaatttgtatttattttgagttatacttgacacagaattcctttttcttttttttttaaagannnnnnactantgtgtgtattttgaagannnnnnnatcnnnnnatgttnnnatttcttctgntta

SEQ ID NO: 3515 - DNA, 590 bp, Canis familiaris
  misc_feature (1)..(590): n = a or c or g or t
gacccccctcctcccaacagagcactgaaggcccacaggaggagtggctagcactgcagaccgaggacctacaggcagagcggccctgcatcctgtcttccctgtgatttgcagacatagncttgatgctgctgtgtttttaaggtgggaagggtgggcaatggcgcccagccctgacagtgttttagtagcctgtccttgacatgctgtggttctttttaaaccgatgctctgtgccatgttgggcctgtgttgtaggccagctggccggtgttgtagactaggcttctccctggcacactgtctcggagggtctgaaggtacagagtatgtgccctcagcatcacacatgcagataggggctctgctcaggtttgggaggcaaagtggtgcttctgaagagccacatcctaactggcacgagaagcattgctacccttggacctgtttgcacaagctcaaagaagcttcccatgtgagcagcagtaaagtcatcaagccagccctctgcagcagaaacccaccctgcgactcaaaccccgtcttcctggcttgctgtgtttgtatcttccattcccacaacctgtgtg

SEQ ID NO: 3516 - DNA, 645 bp, Canis familiaris
  misc_feature (1)..(645): n = a or c or g or t
agttatgctacttacaatcagtcaggatatattccttcctttctcaaaaaagaagtggggtcagctggccagaggatacacnnngcacctctcggtgcnncaagctcagattttcctacagatggtgataggaggaaaggtaaaaaaagaagtaaatattaatcattctcaagtggtcaatgcaaatccttaggaaaacactgttctgtaagagatgtgtcttccagtgctcccacttgtgtggcagtttcccacaagaaaataaaaccagaatatacctggaacacaaaacccagtcgggggcagttttcaggacctacttacaatcctacggccaagaatctcaatattgtgaaccgtgcacagccagttccctcagtgcatgggaggacagactgggtggccaagtacggcggccaccggtaggagtccggcagccaccaataggagtctgatgtgaagccccacagcattgctccatagagtccatgcaagtcccctgtccctgggaaatgtctacagatgtctatttccaatgagttctagaagaaaaatgtagtgggtacttggaaaagcaaaaaccatctattttctttctttcctagaaatgaaatgcattttcttagcatcagttgcccacagtgc

SEQ ID NO: 3517 - DNA, 366 bp, Canis familiaris
  misc_feature (1)..(366): n = a or c or g or t
ctacattngaggacnnatnntaagaaaataannaacaatttnnnnacaagatggtcatcccagtattgcaatagagaaaatgagaagcaactgtctgagaattcatttcttttcttctgtaatgaaaatttgcaatgggggattgcttaagtaaatcattgtatatccatccagatggtggagtactgcatagccattaaaagtcatgcagaaaaacatttgactggaaagaaaaatgctctttgaatattaaaaagtttattaaaatagtgtgttatgtgatctcaattttggtttttaaaatatgggtgtattgggacgcctgggtggcttagtggttgagtgtctgcctttggctcagttcgt

SEQ ID NO: 3518 - DNA, 617 bp, Canis familiaris
  misc_feature (1)..(617): n = a or c or g or t
aggggggtatgatgctggtcagccacgacttcagactcattcagcaggnngcacannnaatctgggtctgtgagnnncagacaatcaccaagtggcctggagacatcctggcctacaannagcanctcaagtccaagctggtgggcgaagagccccagctcaccaggaggacccacaatgtgtgagcccctgcccgggctgggctgggnntctggggccacactcctgcattgctgcaataccgctccccagccccctccctgcccccacctgccttagctgcactctgtgatcttatctacagctggacagtacctgtccgtctcttgtccttccagttacttttgtccatgtctggactcggctggctgttctgccagcaccttgctggttactgacctgatagtgatgcagccagaggcacctgagggttagcccaagggcccacatcctgggttggcctgtgaaagagcttagggtcctcgtctgggttttggtgatgttggaggaatactccccagcccaccacccccattcctttctgcttctggtttggagctctggaccagggctttagtcctggtcggtttttaaataattnnnnnncagtgtaactt

SEQ ID NO: 3519 - DNA, 552 bp, Canis familiaris
  misc_feature (1)..(552): n = a or c or g or t
tacaaagattcccccgaatcctcgtgcntcancntaatcgcttttccgnntcccgaggctccatcaagaaaagttcggtaggtgtagacttcccgctgcagcgactgagnntgggggattttgccagcgacaaagcnnnnngccccgtgtaccagctgtacgccctctgcaaccactcnnnnnncgtccactacggccactatacagccctgtgcagatgccagactggttggcatgtctacaacgactctcgcgtgtcccccgtcagtgaaaaccaggtggcgtccagcgagggctacgtgctgttctaccaactgatgcaggagccgccccggtgcctgtgaccagccctctcagccccggcacctgtgaagccctttcgagaccccgaagccccatttacctcagagacgtctatttttgtgtctttttaatcggggaggggggaggcggtggttgtagctcccattattttttttattaagaagcacccctccacccggaggctccccggtctcccagccccatnnnagagccccccgggccccgccc

SEQ ID NO: 3520 - DNA, 531 bp, Canis familiaris
  misc_feature (1)..(531): n = a or c or g or t
atgaagaagtatcatgcccacaggcactggctgcagagagctggnggtggggctgagtctggggagcataccccagtgcctnntctgcacataaccttctggaactctcctgaccnntacgggacccagacatcatgctcaaaaacaatgtgaaggcatctgtgaacaaacttgttttttgggtttgcctttttttaaaacgaataaattatttaaattatttcacagcaagggagagggatagtaatttttaacaaatatttttttaagccatttttttaattgcattttttgtttatgttcttgactgatgaagtagaacttgcccagcatctgcagggccaggccctcacactccgggcaagcagaatgtgcgctcatctctttactccataccctgggagccccccgactgttgactcaggaactttctgagaatgaagatagcactgggagatgagcattggggcgtatccaccttagcnnnnnnntaaatgttcttcctggaataagatttaagattgtatcata

SEQ ID NO: 3521 - DNA, 597 bp, Canis familiaris
  misc_feature (1)..(597): n = a or c or g or t
gtggnntcngccagcctgggtnnagatactggagaaacgggnctgagccgcatcctgggaagctannagcaggaaatggnaccatctggaaagaaaagaggagcaacaaagagccaagagtacaagctatagtgatggggaataccagggagctggtcctggaagcaagtggcgtgaagccaccacatatcctgccacaagatgaacacagaaaacaaagtcaggcaacagcgacacaccagagggaccagaatgctctcagactaaaagccttgaggagccaggaagctaaaagagcagcagtgataaatacctgaggaggtgttaccaagtggctgccaagtcctcctgcaacggatggggacagaaagcaggccacatgtgatgggtgcataagcagttgcaacctcatgctctacaacttccctgcagatgaggggcacaggcacgtggtggtcctggccagggttccccgtgagggacctgggcggggctacttctcttccacagaagctgcagggcctggatggtctgctttgggcaaatgtgtccacagcctctctgccaccttttcataaacctacagctgaccatgaa

SEQ ID NO: 3522 - DNA, 538 bp, Canis familiaris
  misc_feature (1)..(538): n = a or c or g or t
ggcgtcagnnngcccatcgtacnggtgggcctcacannncccctggttggcctcctggtgggctactgtctggccacctgccnnnagctgccagtggcccnnnnncggacggtgagcannnngntaggggtgcagaacagcctgctggccnnngncannnngcagttgtccctccggcgccttcaagcagaatacgcctcccaggcccccttcattgtagcnnngnnnggcacctcggagatgctggccnnngtgattggccacttcatctanagcagcctgtgctcagtcccctgaggccgctgggtcgagctttcaccacccctcgccccccagnntccannnnctgtccccacagtnnttgtgtaccaaaggccnncagctctcatgcactatgcactcagaaaaaacgaaaaaatccaggcttattttttttactcgttttttattctccagctttcagtgccaaagaggccatnntgagttaggtaggtgggcactgctcagaaaatatatttcaataaaagagagaagnnnn

SEQ ID NO: 3523 - DNA, 499 bp, Canis familiaris
  misc_feature (1)..(499): n = a or c or g or t
atgctaccatgactcttnnngggctacaccctccaaccctgaaccagattatggattggatatgtctacttctggatgctaattttactgttgtggtaatgataccagaagcaaaaaggctactattaagtctttacaaatttgtgaaatcccagatatgcatttgttccgagctcaacaagattgaagtaagttttcgtgaactgcagaaactaaatcaagaaaannnnnnnngagaattatattcgattgaagtgctggaactcttctgnnnnnnnnngttgtccttcatcgatattttatgaagctcttttatgtgaatccttcctactcatgcaggcaagagatgtgttttgtttgtgagtgtctctcagtgacaagagaagtgtgtcagctagaacccggaccatcacctagagatgctcctaggttggactgtaggttgcacatgaaccnnnnnnngtttatgggagttgnnnnggagaggttctgaaacttt

SEQ ID NO: 3524 - DNA, 613 bp, Canis familiaris
  misc_feature (1)..(613): n = a or c or g or t
aaagtgaacttctgaacaaactgagcattcctgctcattttgtggccttgaacggggacaaactgaacannnncctcaagacagggacagagtggacaagctgtattgaggccgtttcccaagacaaagctatattccccaacttgaaggatgtccgagaggtggtgacagaccagttcctatgcagtgggacagggaaggatgacaatccctgcaagggagaatctgggggagcagttttccttgagcggagacacaggttttttcaggtgggcctggtgagttggggtctctacaacccctgtagcaagagtaataaaaactcacgccagaggccccccaagggcaaggaaccacgagattttcacatcaacctctttcgcctgcagccctggctgcggcagcacctggaggatatcctgaacttcttacccctctaattgtggccacccatccctctgttgtcctgccagcatctgccatctgtcttgtctcgcacccttgaactcagacccatgacccatctgtgctcccggcaaccccagagaagcacatccaggctggggaatccccaggggcgcaccctctcctttccttgactcactctcctttc

SEQ ID NO: 3525 - DNA, 564 bp, Canis familiaris
  misc_feature (1)..(564): n = a or c or g or t
caccccannnagaatatagatcatgtgaantgtattcagcaataatctgtttttagaacagactttgaaaaccgctgccggatttctccatttagccagatgatcctgaggactgaccactgttcgctggagggttgtccagctttttattctaatcgaaatgaggtggcagtgttaccatgaaaactttggagaagcaccctatgctagcctgtgctgccttgctcaggacctctgtctctacctagcagtgaaggctgtcgcagttgctgttgcttactctggaaggaacttagaacttaacagcagccttctaaatttgtgttgggaagacatcctttggaccaaagcaaacctctttatgctgggcatggtttctgggaagatgctgcagatgtgcccattagcacaggttcctgtccccaggtcagcagaagctattgtcaggccctgtgttcctgcccagagatggaggaacacgctccctggtttccagtatttatttggtaaacctgagtctgggataccctttttttgttactgttttccaaacactgaattatt

SEQ ID NO: 3526 - DNA, 613 bp, Canis familiaris
  misc_feature (1)..(613): n = a or c or g or t
accccagcatgcctggggccnnagcagatcntggcatggtgagcgcctacatgtacccggcaggggcagccggcgcccaggcagccccccagggccccagcgggcccaccgccagccccgcctactcgtcctaccagcccactcccacgcagggctatcagaacgtggcctcccaggcaccgcagagtcttccggccatctcccagcccccgcagtccagcgccatgggttacatggggagccagtcggtgtccatgggctaccagccttatggcatgcagagtctcatgaccacccttcccagccaggatgcccctctgccgcccccacagcagccctacatcgcagggcagcagcccatgtaccagcagatggcaccctccgggggacccccccaacagccaccccctgtggcccagccgccgcctgcgcagggccctcctgcacagggcagcgaggcccagctcatctcgtttgactgatcctcggccgggagcccgccatgcagaacactatgagctctccagcgtggcccccgaggtcagcaggcgctcctggccctcccaggagggtgggggtttgtctccagcttcnnngcttgagccgccatctc

SEQ ID NO: 3527 - DNA, 641 bp, Canis familiaris
  misc_feature (1)..(641): n = a or c or g or t
tcactgcttgaccnnngccatcatccaggtgnnngctgccctcntcacgctctacaacaagaacatcgagacgcanctcaaggagtttctggtggtggcctccgtcagcctcctgcagctgggccaagagaccgacaagctgaagaccaggaatcgggaatccatttctctgctcatgcgcttggtggtggaggagtcctccttcctgactctggacatgctggagtcctgtttcccttacgtcctgcttcgcaatgcctaccgggaggtgtcccgggccttccacctgaaccgagtggcagccagtacccactgaggggcccttcggaccccctaaccccgtgacactatagccgtttattcgagggatggatgggcccgggagccggagctgaggaacggacgacacgcgggggacaatccagggacgcggggacgcggggcaggctggccgggggtgcgggtggggggcggtctgcgggaaaagtccgggaattggggccacgtgcgtgcagttttgccgcgagaggcacgagcgacacacgggtacgtttgttctcntgcggtgacnngcgcttgagctgcgaccggcacgggtgtctcgacnttcatcacnnttccgaggatggtgctggcgggca

SEQ ID NO: 3528 - DNA, 486 bp, Canis familiaris
  misc_feature (1)..(486): n = a or c or g or t
tgtnnnnnatcccannntcaatctgcctcctcatttttcagctgttggatcagacaatgacattccnnnagatttggcgatcaagcattccagannngngccnactgcaaacggtgcctccaaggagaaaccgaaggnnncgtcaagtgtaaaaagnnaaggtcccttgaatgtagtaaaaacagagaaagttgatagaagtactcaagatgaactttcnnnaaaatgtgtgnantgtggcattgtctttctggatgaagtgatgtatgctttgcatatgagttgccatggtgacagtggacctttccagtgcagcatatgccagcatctttgcacggacaaatatgacttcacaactcatatccagaggggcctgcataggaacaatgcacaagtggaaaaaaatggaaaacctaaagagtaaaaccttagcacttagcacaattaaatagaaataggttttcttgatgggaattcaatagcttg

SEQ ID NO: 3529 - DNA, 628 bp, Canis familiaris
  misc_feature (1)..(628): n = a or c or g or t
cctgtatgctgtcatcaaccactacgnaggcatgattggcggccactacactgcctgtnnnnntctacccaatgaccgcagcagccagcgcagcgacgtgggctggcgcttgtttgatgacagcacggtgacaacagtagacgagagcnaggtcgtgacgcgttatgcctatgtactcttctaccgtcggcgaaactctcctgtggagaggccccccagggcaggtcacnctgagcaccacccagacctaggccctgcagctgaggctgctgccagccagggactaggccctggccaggcccccgaggtggcccccacgcggacagcccctgaacgcttcgccccctctgtggaccgcccagcccccacctacagcaacatggaggaggtcgattagcaggtccctggctggtggggtggggtggggactgggtttggggaatccctgacaaagggccagctctttgccgcttctctttctctaacccagaggacactggcttcatcagtttgggttgggggtatgattgaggtgggaacctcacaggttgggccctcttgtcagcttgaccctcccaaaccatgggtcttggcttctccagccacccctcagtgctgcggtgatttg

SEQ ID NO: 3530 - DNA, 666 bp, Canis familiaris
  misc_feature (1)..(666): n = a or c or g or t
agcntatgagacttnnannnacacnnnngagtngctatgttcagtcctcctttttgttatctgcatagcaagtgttccagtatgttgacttcagatgactgtgacttcttttttaaattcttgccatatacagggcaatagggacttcaatttatggaaagatttttttagaatgacaccccaagaagtctagcattttagagcttttagctgggggatgatacaaatataaagtgttggggagcacaaaagacaagttaatttcagttgttgggggagggttattgatggagaaatatttaacatggttcttaaaggatggtatggaattttgataggtaagactaagcaggagagacaaaaaagaaagatgtagaagatatagaaagaaatcccctatcctctataccaaactttgcctaagggtaagaaaagaagtctgtaatggaatacttttgagccataaatgtatcatcacatttttctaaatcatatatatgtatatatatgttttgtatttatatgttgcattaggaattggctctagttcccagattattttttcttctatgattttattctcttggcttggtattccagttgattatttatgtttctatcatagattaatataaaatattacaggaaaactttaagccagtttct

SEQ ID NO: 3531 - DNA, 532 bp, Canis familiaris
  misc_feature (1)..(532): n = a or c or g or t
gttcactttactttcaggttaaaaaatatttgaacttgcttgcagcttccttacggcatngtccttactgagggatgccagctgaatgcagacatctccggagtatataactaaaagtgcaggcctgctctgaccgcacccacgtaccgcagggctgcctgggcgcacagggtgcttggctgtatcggaggatgtgttcatctgccttggctgaggaccaaggacagcaaagcaaaaatggctttcaagcttggtgttacttttcttaagttgtttatagttcagcaatttcgaaaatgctccaaagaaatgtgaaaggactttttgtcacagcacttaatacaagcagccgccccccctcctgcccccgcgcagaaatgctgcagagtataaaacttgagacatttttgtaggatgcctggcaaagtgtagccttttatcttgtttcaggatgcatatttattattataagtactctggttaaatatnnnnnagttatatgctgtannttatagcattttgcctttgtaat

SEQ ID NO: 3532 - DNA, 590 bp, Canis familiaris
  misc_feature (1)..(590): n = a or c or g or t
cgaggcatacantatcagtatgggnacatgatcacctactcatgttacagtnnatacatgttnnagggctcnnnaannngtattngnnnagagaatnnnncnnngacnnnanctcctatnngcagagctgtctgtcgattcccatgtcagaatggaggtatctgccaacgccccaatgcttgttcctgtccagatggctggatggggcgcctctgtgaagagccaatatgcattctcccctgtttgaatggtggtcgctgtgtagccccttaccagtgtgactgtccacctggctggacggggtcccgctgtcatacagctgtttgccagtctccctgcttaaatggtggaaaatgtgtaagaccaaaccnntgtcattgtgtcttagcttggacaggacatnactgctccaggaaaaggaggactgggttttaacaantgcacagccaacccgctctcctaaaggcaggatcatctcttcctgggagtcctgggcatccttgaacttatgcaaagaaattccaacacggtgctgggtcttgttttgtttggtaaacttgttatttggggtttgcctttgtattttgtgt

SEQ ID NO: 3533 - DNA, 513 bp, Canis familiaris
  misc_feature (1)..(513): n = a or c or g or t
tgaaggaanntcttcaatggaacactaaagagatttgcagctgaggaacgagacaactcagctgacattctgacatctcattacagtttcctgtttgggggacagcagagttgcctgtggcggaagagagcccggtcttgcctttcaagggcttgaggaaggcgtgaatcgagggcagctcttattttccatggacacatggtaactctggaattgacctctgtgggcattgactcatctcagcctaggaggaggcgtcagcacctccgtgaaaagtccttaatgtacagtggcctatagccgtgagtgtggcctgctgcctgcttgtgatgagtggcacctgttttgtggcttctggttcgttcaggaccatttctgtctgcgtctgtaggcatctgtgctagacggagagcaccagcgtccttgtcctcacgcgatacctcgggaagccgaggggggcagtgctccccagactcgtttctgacactagaatgcagtagattggaaactgtt

SEQ ID NO: 3534 - DNA, 549 bp, Canis familiaris
  misc_feature (1)..(549): n = a or c or g or t
caaagacacaggtttccatggncagtatctataactacaactgaagaaanncaagataaatctgataaagatatctcaggatatcagatgaaacaagttagagtttttcttaaaagagaaaaagaaaatccaccactcccttttcccaatagcagcccatggtgccacagtcccaatgtccctgcacatccctactgtcctctgattgaaccttgcaataactgcacggctgaaagcagcttagatagacagcctaggcctcagtcatccaggcctgatccagcccagggaccaagaaaaataagacattagagctacaaaaacaaaaaggcagtcaactcaacttttaaaggacaatattatacaaatccagagactacaaggatgcccagcatgtcacagccagccttccacaaaggagaagccagcagcaagcaagaaaatagtttcttctaaaaaagataattcctcaggactttacagtaaccattccttaaagaaggaaatagattttgtggtcaagttaaaccatttgttttctaggctgtt

SEQ ID NO: 3535 - DNA, 536 bp, Canis familiaris
  misc_feature (1)..(536): n = a or c or g or t
tttcaaatgtgaaacatgttatcaactttgacttgccaagtgatattgaagaatatgtacatcgcattggnngtacaggacgtgtaggaaaccttggccttgccacctcattctttaacgagaggaatataaatattaccaaggatttgttggatcttcttgttgaagctaaacaagaagtgccatcttggttagaaaacatggcttatgaacaccactacaagggtagcagtcgtggacgatctaagagtaggtttagtggaggatttggtgcccgagactatcgacaaagcagtggtgccagcagttccagcttcagcagtagccgtgcaggcagcagccgcagtggtggaggtggccacggcagcagcagagggtttggtggagaacttggagcctcacacccagggggacaggagctgatctgtgaccacaaagacaaaaaccaaatgctgaccatagtggaatagaacgatgagcaaacctacatcatggatgacccagtgaaaccagtaccccagccttggcngncttcc

SEQ ID NO: 3536 - DNA, 650 bp, Canis familiaris
  misc_feature (1)..(641): n = a or c or g or t
tgctgcccctgnnntcgnnnncatgcctgtctcnnnnaggtcgcagacctgtctgggtttcctgaccacttagtctagtgcctcttggcaaaggctggacatgcatcagaagagcttacatcctcttcataagcacagatgtctgaagagcccttggcaaggatcattttgtcatccgtttttttgtgaatgaaaacaattagaaaaatcaaatattagacctaaaagtatagaagtgttggagtgcctggctgcctcaattggtggaatatgcaactcttgatcttgggctcatgagttcaagtcctacattggacctagagcttacttaaaaaaaattacacgtgtgtatgtgtgtctatgatcctgccatcaagtataacaactgttaattggtgtatattttttcacattctccctctatgcaaattaacatgaagatgattagttttaaaaatacaaatgggcttggggtgcctgagtgtggctcagttggctaagcgtccctctcttgatttcagctcaggtcgtgtttccaggttgtgagtgtgagccccaggttgggctccctactgggcatggagcctacttaagattctctctctggaaaaagaaaaaaagattcttcctctttccctnnnnnnnaaaaa

SEQ ID NO: 3537 - DNA, 444 bp, Canis familiaris
  misc_feature (1)..(444): n = a or c or g or t
ttgtaacaaacaggctcnnnaatgagccaggctggggnctgctggctngccgtgtgaccccggggaaagtcatggtgtctcccagcttcagtttccctggaggagacagagctcttgcaggggtggaggggcggcgttctcacggggattaccaggttccgtgtgatgggtgctccaggaattccagaattgtgatgagtccgcagggctctgggcatcactgtgcaccccatcattcgtacagtgaggtcctaacccctcgtgccgcggaatgtgactggatttggagacaaggtcttggaagagatcatgaaattaaacgagggcattaaggcgggccnnagtccaacatgactcacgtccttataaaaggagttcaggggcagcctgggtggcccagtggtttagcgccgccttcagcccagggcctgatcctggagaccc

SEQ ID NO: 3538 - DNA, 576 bp, Canis familiaris
  misc_feature (1)..(576): n = a or c or g or t
ttcaaannnncatttannaaattcgnnnnnnagccccatgnnnnnntannnnnnnntctgatcatnnnnaggaaagaatgagagnngatgcaaatttcattttaanagctgtgctcagnnngtccaagctgaggttnnnctcttgccaaaccctggctgttgtgtgtcgtctctgtgtcttcgagttcccttttttcaggctgcaccnnctggcatcattcacctgaggactccatcggcnnnctcgcgtgcagagcgccacccgtcgggatttcgnnnctcttctcaccatccgcgtgcgctgccacaaaacccgtggagcacacgtggcctttttgaaccaagactttgcaaactgatctctccccagtaaggagttgagcacattagcaacaatgtacattattaatttcagattttcattttcatgttttattatgtaaatattatctgatgtttggagcttgagtatacagaatgtaaatatagttcttgtatttgtactaattctggttctttttctgtatagccttagatgtgcaatgcaaacattatctaactgtgtatggtaacctt

SEQ ID NO: 3539 - DNA, 212 bp, Canis familiaris
tttaaaaatgtttaaccattctaggtaattgtttaaagaacatatgctatagggatgcctgggtagctcagtcacttaagtgtctgccttcagctcaggtcatgatcccagggtcctgagatttgagcctggcatcaggctccctgctcagtggggagcctgcttctccttctccctctgcccctccccacaactcatgctctctctctctc

SEQ ID NO: 3540 - DNA, 285 bp, Canis familiaris
  misc_feature (1)..(285): n = a or c or g or t
tttgtaattaaggggtgtgtccagtgnnngtttttaaatgannnnnatggatagctcaagnnnnnnncatttgtannnnnnngctttggattccaannnnnnnagngtncccnnnnncatannagttgacnnnnnntgtgagtgtaaactgcatttggttatctctgctatctgtggccacttggatggattttttttttttttttnnncnnnnnnnnnnnnnnagnnnnnnnaaggagtnnnnnngntatgtgaatancnnnacctnnnnnnngtgggcagnnn

SEQ ID NO: 3541 - DNA, 611 bp, Canis familiaris
  misc_feature (1)..(611): n = a or c or g or t
tgagcgtcatcaactctgcaggaaaagcaaaaagtgacccttgtgccatgaattgctaactcttgcacaaaatactgataaatnnaactgtacagaaaaggtgcagggacacttgattttctggaaaatagtttaacaattactgtattgttaattcagtccttgtgagacctgaaattataatattgaaagacgtgaaattttaaatgaggaaattagtacattttaaattttagttaaacctgtttatgccccttctaaattgtttttctttattgtattatatggatttttaatttgcatgggtttcttaagaattagatgttctattcttctgattctattgacaaaggacatttataaattactataatttataacgtatggtgttgtatgactttgttccagtagaaaaagccagagaaccattggtattacccaatcattctctggcactagacctaagcagatagaatgtctatataaacaaattcttaaacattattcaaatgacgttttgtgcttagaaaagcactatcttttgaggaaataccagctttttttagcacagattctggaataacatcctnnnntcactttgggaatgtcag

SEQ ID NO: 3542 - DNA, 541 bp, Canis familiaris
ggccaaccccggcagcttgcatcttgagagaaaagaaaatggagcaggagagaggaaatgaagctacttatcttttatatatacacccttcctcctcaaaataccacaagctcccttagaccacatcatacccacacacaatactaacacatgtaaattgttgattaaataaaagtatattcttacttgcttattagctggggctaatttcctggagtttaatatactttgtctcaagtaaaaacagtcatttgaagcagcaacacatcaggtcttcttcatactggaataatttcacacaggatatcctgatccttcgcatttaattctgacacctcctggccttctttcaggatgcaacagctgtctctctgctttcttcataggaaacattggcctgtggagagaatggtgtactgtgtattactactgtgaggctgtaaaattgttagcagacagtatgaagaatcgtttctatttgattaaaaagaaaactattgtgtataataactactgccctgaaacatgtatcatatcactc

SEQ ID NO: 3543 - DNA, 519 bp, Canis familiaris
  misc_feature (1)..(519): n = a or c or g or t
aaagtcagagtnatnngccatctcaatatcgcatcatgatttctaatacctttagtgtattttattttttaaattatcttctaaaatttagttaatggtatgactttgcagtatgattgtgcttnnaaaaagagctttaaatatttataagggaccatggataattaatatatatacataaaatttttactatgtgtgattatcaataaaacatgcagtgtaccaactagtgtactttgtttacactgaaaagaataatgctatgtcaacgtaatatttagtgttttacagtcaagcatttgtaaattatctgagaccaagttaagctgaatttatttatccagtgaatgtgtattaaaactctctgtacctatactacttggcattgtcctagtcaatggtgatacaaggtaaataagatatattatttatccttagagaacttaaaatgtaatgagggttaatttgagaaccttttcatacatagcatctaattttatttcattggctaaatgatta

SEQ ID NO: 3544 - DNA, 458 bp, Canis familiaris
  misc_feature (1)..(458): n = a or c or g or t
agggggacccatcttnncggcagggcccagatgccggcgccagcggccaagggggnnnnncgcgggggcccgcgggggcccagagaagggacgtcctcggaggagcgcgccacgcgggcgcccgcggcgaagccccccgggccgggcgcgaccccatcgccggaggggcgggcggccatgccccacccgcgcgcctgggggcggcccctcgagatgcccgcggtgcgccaggacctgctgctcggcgtcctcaaggcggccgaggcgcgaggccggatccgcgccctgcggctgcgctacatccgcctgcgngccgaggccatctcgctcctcatccagcagcaggagtccgcgcgcgccgccatccggctggagctgttcctgccgccgcagctgaagcccacgcggatccccgaccccctggaccgccaggagaggaggcgcgtggagaccatcct

SEQ ID NO: 3545 - DNA, 593 bp, Canis familiaris
  misc_feature (1)..(593): n = a or c or g or t
aaaaattagncaattcataggtcatgtataaatgctgatttcttgctgctancttgattttcttcactctctactagaagaactcagagcagttctgtctgtaaacaggccaaactgcaacaagccataaatggaaaggtgatgtcccttctccactgccatctctgtagctgcaagacatcttttaccattgccactgtggattgagcattaaaatgagaaagtggagctacaatgagtgaatgaaattggaggtttcttcttccccaataaataaccattctgaaggtttcatttgatctcttttcaacattccaaaggagattttaaaggactgttatgtctgatactagaataagaattacttctggtgatacttgtttttcaggagtggactgagctaatagcctctactcttaggtaactgtctcagcctgagctgaaatgtggtatggccctaaaccattcaacttttattttttacattgttccagttgcaaaggctacaggaggggaggaaaaaaacataaaggaaaaaaaaaggcaaaatgaaactaaaacctttgattttaccagaatctatgtgctaatta

SEQ ID NO: 3546 - DNA, 151 bp, Canis familiaris
  misc_feature (1)..(151): n = a or c or g or t
caagatnnnnnnnntgatggnagtcatatacgtgnntttaacagatnnnnnnnagcagtggnnnaggnnnnnntgattttatcttctgctctttcttcttccacacatgcaaggtgaagggtgtggatnnnaagacannagaccacaagag

SEQ ID NO: 3547 - DNA, 495 bp, Canis familiaris
  misc_feature (1)..(495): n = a or c or g or t
cccacccnnncaaggcagcaggtagggtccctgcagctcacatgggnnnnnnnccttcannccttttaaannccagnnnctacaaagcaacnnncagccttttntnacaggacccaatgaaaagnnnngnnnannnnnngcctggnnnnnngcaacanngaaaaccngaccnggtcnaggtcccctcccagtgtccannnnnnnnncannngatnnncaagnnnaannnnataagggaggggagaaaacccanannncttgggnnnaatcctgttatttatgcttgctgcacagacaatattagaccccccctcaaaaaaaaaaaaaaaaaaaaaaaaaagcttcgtattattcttccacatatgcnggctgctgtttacataccctgcccatgccttagcactggagagctttctgcaatacgctggggaaaagggagggaggggatgaaaagtgccaaagaaaacatgtttttaaaagctcgggttttataca

SEQ ID NO: 3548 - DNA, 542 bp, Canis familiaris
aagttctttttctttttaaaacagatgagctttgatccaaaccttctccataacaatggacacaatgggtaccctaatggtacttcagcagcactgcgtgaaactggggttattgaaaaactgctaacctcttatggatttattcagtgttcagaacgtcaagctagacttttcttccactgttcacagtataatggcaacctgcaggacttaaaagtaggaggtaatctgtaattgattatcctttttaaagtaattaatgacacatttctcttctgtatcaacttgctcatgacagtgtcatagttttggtctttaaattgtcccaattacagaagtgtgtttccataaattagcagaatcctgtttctattgtggtggggtcttcttggttggtgaaagactcattgacctaaagataattggaatatttttaaaaatactttttaaatagatgcttgtaagatctaattattttcccctatattcatgactttagttatatttttgattttaagccaatgaaaatattaaactttgat

SEQ ID NO: 3549 - DNA, 431 bp, Canis familiaris
  misc_feature (1)..(431): n = a or c or g or t
ggacctgccccaatgcaaaaagcttttatgtgcccagtgacagtcatccaagcctgtctcctttgagaggaggcctaggtttccagatgggcatttgggagtacccctcacccctggcagggcacatcaagatgtcagcttcacccccacccatcctgggggaaggaagaccaggcatcgatggctggaggtgggcatccttccttctgtgtagattctgtgcccgccgtctggagaccctcgtacagcnnnnnntggcnnnnnctggtggatgcttgtgaactcagggctttgctcaaatgtttcaaaggaaagcctttcctgggctccacagcatccaatatccctccagcagagcctgttagatcgacctttctcattgtgtttgaagtcctcattagnnnnggagccctgagggcnnnnncatgtcg

SEQ ID NO: 3550 - DNA, 675 bp, Canis familiaris
  misc_feature (1)..(675): n = a or c or g or t
atcactatgtnnactnnnnngctanntcnacagctgtttagaaactgcncnnngntcttccatngcagcnnctgccagaagagacacagcacctgttcccagggcctgagttacagacctatnnnaggtggtagaagtagaggagaaattggttctcttaatccccagcaaacatcctcctgccatttaggggtgggggtggggagagctcctctttgtagcaccatctgtatttctcagaaccagcagaatcactgcccagtgcctcgcttgtgcctggcaaatagtaggcacttagagcaagtttgaagaattgaattcccatcttttcagctgttcttgggcattacacattgaaatcctaccgcggttctaggttatcagaccatggagagtgacatggaggttggactgttagggcagctccagaacgggtctccctcatctgtgcagaagaggcagcgggtgggaatgtttgaatacgtaagaaagcacagactgtctaatacgggaaattttttcatctcgcaaatgtctaggaacttaacagaaacctttttcctgtagaaaattacagttgtttttacatagagtctatgtgaggcttgatttacccttcatccattggctggaacatggattggggatttggtagaaaaataaatcctgcttnnn

SEQ ID NO: 3551 - DNA, 300 bp, Canis familiaris
  misc_feature (1)..(300): n = a or c or g or t
ttctgacttannnnaacatgggctttgnnnnntatccggtgtagtctnnngctcagtcccattgagagtagnnncacatgtttnnaagatngctgactgggattgggaatacatgtctcaatttgagaaaccaaataatgctaagggacccatacggtgatcaaacctgtgancnnngcctcatttgcaccttgttttaactnnggtgataaggcacgtggtacccatagaaatggaccggaattactgaatcatacttctgtaacatcacaatcttcctggttttcnnnnnnaaacttt

SEQ ID NO: 3552 - DNA, 498 bp, Canis familiaris
  misc_feature (1)..(498): n = a or c or g or t
atccctggcacagggttcccagagagcaggtgctgtacattttccagctttacaatggggctgttgacagcnttaattagggaggcatgaattatgcggctataatgcagagccctacaattaaggcgggaatgaggggctggaggcaacaaacggaatctgcccagtgagcctggctattgagtcctgtctccgttctgtgtctgactttccttaatatgactggggtacagctgagaagtgattaatggagctggtgtctctctttggcgttaggacctgtatttggaggaaggtacacacggggatgggtagggggccaagggaccactactgccaaggagcannnnnnncaaacagttgatacggactcctcgtgattgctttctaccggtaggatttgtacaaacctactcaacccttgcctcaagattaagtagatgggacctgtttaaatgtcctctcacctgtgagccagtccctgacttcaggataatt

SEQ ID NO: 3553 - DNA, 535 bp, Canis familiaris
ccaccatggccctcatggcctaggacacccacatgctgggcccccaggctctggggggcagccaccaccccgaccaccacctggaatgcctcatcctggacctcctccaatgggcttgccccctcgagggcctccgtttggatctcccatgggtcacccaggtcccatgcctccacatgggatgcgtggacctcctccactaatgcctcctcatggatacactgggcctccacgacccccaccctacggctaccagcgggggcccctgcctccacccagacccaccccccggcctccagttcccccgcgtggcccactccgaggccctcttcctcaataatttctaattctctcacctcctgttctatcttcctaatatcttttcaattccttggaccaatcagatttgctgtagctccctagagctaaggcactaatccctctcaggtctttttttttttttttagtgtaattttcacaggaggttttattatttgtttctgtgttggtcctaagtgtttttgcaaatgcacag

SEQ ID NO: 3554 - DNA, 595 bp, Canis familiaris
  misc_feature (1)..(595): n = a or c or g or t
gtttcaggggtnnnactgcagcaacacacgggtgcttcacatgnnnnacactttttgtgcaggcctttctggtttctgcagaggtacagaagtacacagagggcaccacccagggcagtgtgaagagactgtggtggtagcaggaagcccagtgtggtgaggctacatctggggggggggagtggttaggaacaacctgagcacttaggtgggtgaaagtggcagcaggaccccaagaccaaggccctccagatggttgttactctaagtccacgctatctatttccctgtgtctgttcctggagaggatgttctagaagtggttggttctgtgcggaagtcattacctttgtggagaaagttggaggcacctggcagctaggcagggtagaaacggtctgtttggggccagaggtcccaggctaaataaaatgtcaccaataaaggcacaaaggtgcctagagccaaactgccttaattcagagcaccaggtatcctgcaggtgcctgtcctggggagaccggggtgtattcgcagttaacctcccagagggaagtaggtgtgtggtgtttacagaggacgctacggaactctt

SEQ ID NO: 3555 - DNA, 511 bp, Canis familiaris
  misc_feature (1)..(511): n = a or c or g or t
acgncgtgaccncagcgccaataccntnnngnanctcagtgnnagcagcttccgcctggtgnnnngccacgtacctggtgagccccagcttcgaccagagggcgagctcagctgggctgatctcaatcacctgcagacacacttccgctgccagtgctacttaggctggggtggcgagcaatgccagtgggaccatacacgggcagctgggggtgcccggggggcctgggctgggtcccacctcaccggcccgctggctgtggcagccctggtgctcacctggacttcatagaggtctctcacctggctgccaggcaagctggcctctgccacaagagctctgctaggcctgtaggagcctgcgaggggtggacaaactggnnnnnnngagggggggcagagcccctgggatccccaacgcgtccataccagctctcacccccctgttctaagggggaggggcagtcccctgagaggccccttctctcccagcctgagaggaagaggggca

SEQ ID NO: 3556 - DNA, 580 bp, Canis familiaris
  misc_feature (1)..(580): n = a or c or g or t
gagannaaaggaatggaatgcataattagaatgctttgagactcaacttttttaatagatgagnngaaaatttcataaatattacctgtgctttagatcccaggtaaccaatgctgtttcccctaaagatatcacctgttaggactattcacaaatatagtccaataattattgacttatcaggtgtgacacagtagctaattataagtcatcagactttcaagagtttctacattttaattgttgacaaatttattgttttacagcccacggaagtgtgtatgtgtggggaggcggtggggagcttgttcataatgtaatctacaggagataaacatacaggagataaacatctgtgggggtaaatatccaatgatgataatatacaggaaaacacaagccatttttattcttctttatcccaattaacttgaggtactcccaatgatgaagctctcgattgcactatgacctccctgagtgatgtgcagcttggttcctctctcactttctgtttctgtttaatatgcaaatgtgagtgtgagatcttcagtgtnnnnnnataagctaacttaaaatg

SEQ ID NO: 3557 - DNA, 514 bp, Canis familiaris
  misc_feature (1)..(514): n = a or c or g or t
ccttcgtgagacactcccatcgccttgtcntggccaatgatggaggggctcccccacccaagctagcctgctctctaaggggtccccagcctccttgtccctcccttccctgtgtccccagccccaccctctggccaaggccaggcctcaggggaggagccttcccagtggagttacctcccctcagctgctcatggtggtcccgtggtctctgcagaggcagagctgagaacggtgccaaagtccaacgatgcccccagccccttgcccccagggccttgtgacccttgggcctgaccctgtcggtgctcctggagcctggagcagcatcaaaagcaatctccctggcgcttcctggggtggggatccatgctcagttacccctttccggtcgcccacccctcagtgttacaaagcctggggaccagggtgggcatctgaggggctctcccatgggccccccacactgcccaccaccatnnnnnacactgcctgttcacactccacatgtcgc

SEQ ID NO: 3558 - DNA, 605 bp, Canis familiaris
  misc_feature (1)..(605): n = a or c or g or t
cgnctacgggatgccacgccagatnnnctgatcttccggccccgttcccgcnnnctcgtgaatggttaatatatatatatattttttagcagtgacattccctgagagctcccggggccctcagactcccctcggccgggtgggggcctggcctccccgggggtgccccctggcgggctctcccctgtgcttactaatacatccccttccttaaacccaccaaaactggaccaactggcctctcttctcctgggaccaaaatctgggggcctcgccacccccacccctatacctctcctctttccctttggcttctttttgccctgagccctgccctcgatccgttgcttgcccggggctcggggacgctgcctcctggccttccctccacgaggatgcctcacccctagctgtggctgcagggacttaatttatagggagaggcctgtggcggcggccaccccagccacagctgggccgcgcttaccgcacagccgggcagtcggcccctggcaggggccctcttggcttcccatttttcattccccttgctgtggctaaggggtgggcgggagggggcagggggagggctgcccgccacgggc

SEQ ID NO: 3559 - DNA, 513 bp, Canis familiaris
  misc_feature (1)..(513): n = a or c or g or t
cgacngcgccccgggccctgcgtgcnnaggctgctctggcccgagcgctggcactgccacccccgctgccggcagggcccggccgtcctcacgcgccaccgccacgctgcccgcagtcttcgtgctcgagtactacctggacaccctgtggaagggcacgctgctcttcgtcgtctgcctcctcctcgtcagcttcggcgtggtgagccagcctacggaaggtgcttcttccagctggttctgtgcggccacaaactagagccgctggtgctggtgcagctgtcagagcgctacgagcagatggaatacctgggccgtcnnnnnnnnnnnaagctcaacattaactactttgactgcctggccacgtcctaccgccacgtggtccgccactggccgctgggggccgccttcagcccgggcatcgtgcagcgcaagacccgcacgtacgacaagcgggactcccagtccgacctggacctggacctggacgtgtgacgccacaggcagcctcgc

SEQ ID NO: 3560 - DNA, 591 bp, Canis familiaris
  misc_feature (1)..(591): n = a or c or g or t
tagtgatcctccatgctacgagnnnctgtggggccngngagcccatgcngagaccagcaagatgagagnnnnnnagtttnnnncanaggtncatgatactgtccccagtgccttcccattccattatgaagaggctctgcgagatgannaagagcgagcccaggccagagccacggctaaggctgcctctgctaccaaggccagtgcacgttccagggccacatccagccgctccactcctccctagagagggctgaggcagattcttccctctgtgtttgatgagggctgccaaccttttaagtagtgagagcctaaggtggggttggcaagatcataatatgtatcttctttttatttttcctattgtccttggtagcttacaaatgttcctttcattagaatgtttatttagattcagaatatgtttataaatgacatagatcacacattgcagttaaacaggtttaagagtaagagttttggtattgtgtaatatagcttgaaaatttttgcatctcctttgggttccagaacaagataatatggtgttggagtggggattattcttggaaatatgaaagaaccagc

SEQ ID NO: 3561 - DNA, 623 bp, Canis familiaris
  misc_feature (1)..(623): n = a or c or g or t
gtnatacagatttttcaaaataatttttatccagggatctgannnagaanggnnggcttttaagattgatgcagnntctttatnngactatgtttaggaataacnngcgggttcattgtttnngggcctatgtccagattcctttcctgtctcaatgggctctgcttggccactgagtgtcactgaggtcatccccaggactttaagggtaaagtattactgattcccatggaagagaggtacagaacagttggcaggcacagatgtgggttttaggagaaactttgccctgccttaaagcccttctgttaaagtaactcttggggccactaattgtatagtttctggaatgagagtgacatacgtggtaatactgggacccagttctgaaagcttgaaacttggggtcttcttttcaaatgagtgatttcatgattgaagagcagtgagcctcattcgaggaaatacagcattttggacagaagcttctttgaaaggcaggtcctttagcgccaaaatgaaatgccggtggtcgacatccagaccctacagtgtttcatttgtttgttgtggtttttgaaatcctgatttgtaggtaaacctggtgggaggaagaagtaaat

SEQ ID NO: 3562 - DNA, 528 bp, Canis familiaris
  misc_feature (1)..(528): n = a or c or g or t
gatattggcattcaagttctacctaaccgaccatttggnntttttactcattatgtagataatcccacaaaaaccgcttcaaccctacgaggcaatttctacatcactggggatcggggctatatggatgaagatggctatttctggtttgttgcaagatcagatgatatcatattatcctctggttacagaattggaccatttgaggtagaaagtgccctcactgaacatcctgcagttgcagaggcagctgttgtcagcagcccagaccccatcaggggagaggtagtaaaggcttttattgttttgacccctgattataagtcatgtgaccaagaacaactgaaaaaggagattcaggagcatgtaaaaaaaactacagcaccttacaaatatcccagaaaggtagaatttattcaagagctgccaaagactatcagtgggaagataaagagaaatgaactgaggaagaaagaatgggaaacaatttaaatccattctattatttatcacagtatctataaaaca

SEQ ID NO: 3563 - DNA, 532 bp, Canis familiaris
  misc_feature (1)..(532): n = a or c or g or t
gggcctgcacaggttcttgccccaacatnntctgtcctgctccacttctaccatctcttccacagccctcccaggggctccgagaaagccttagctagccccttgacggccctgggggctggagaggctgtctccccagtggtctggctttcctgtgagttagggctcccaccctttctggaacaaagaggcaaacacctgagcattgaagtgggctcaacctgttgctctcactcatcttccaaagcagagcttcctattgctggggggaagaactatgacctccacttgtttccaaggtgctagagaaggtttcaaggtcgtcagttcccatcctctttgcagctttatgggccgagtttcgcagaactgctaacttttctattctgtgtctgatttaatgcccgatgcttctgttttattcctgatcctttctactatgcattttccttttatcaggtgtacaaagttaaatactgtgtatttatcacttaaaagtacatgaatttaagagaaaaataagcctttggtg

SEQ ID NO: 3564 - DNA, 641 bp, Canis familiaris
  misc_feature (1)..(641): n = a or c or g or t
tgagaagctgagtatctatggtgacttggaatttgtgaacgnacaaaagttaaacagatatccatcttcttctcttgtggttgttagatctaaaactgaagaccatgaagaagcagggcctctacctacaaaagtgaatcttgctcattcagaaatttaagctttctttttttttaaagtaaagggttaattgacatctaaatttccattcctcatagagcttctcaagatggtttcattggatatagggcttaaaaatcactttaaaacacaaataaagttacccaaatctgtgaagaccgtatttgccgtaactttatctgtaatttcttttctagtaatttaagaggtggatatttgggattgcatttttattttactaatacctgtagctattttattatttacattgttttttgttttctttcttagccaaattctgtgagctgttcattgctcttcctcaccttctgccataatactgtctgtcaccttagttaataaactgaatattcaataggacttgatgcttctgctcagaaatggcccacaacctgtatcttgaaatttagcaggaaatgccctttaattacactacattttcagttgtattgactgaagacattaaaattttnnnnnnn

SEQ ID NO: 3565 - DNA, 605 bp, Canis familiaris
  misc_feature (1)..(605): n = a or c or g or t
gtgctccacactcttgggcgtcccgcccggccagtggtgacnnnnnagcgctggnnnagagggnctgagccctatgggctctgcatacgcacggcatatacagatgcatgtgcatctcttcgggatggcagcgagagtaacatccactctgaggggagcagaaggaccggggggcaggagtccctcttcctctcctgggtcagcggtctgggccgaggcccggccaccttgttcacgctggaacactcagctggctgcgcagggaagccggacactaggctgtcagtgcatgtcccctcctcactaactatccccaggcacactgccgcctgcctggccagggcctacagctggggggggttcagggccaggcggcccctccctggctgcccagaggccctgcatgtccacggctcctgcctctccccaaaccgcagtgccaggaggacccaggaggacccaggagtcaggccgctcctgctgggagagaagggagggcttggagaggagcagagcccnnnggcccggggtccccgtgcgtgcctcctgaccacccccttgcttggctggagccgggccctctgggggaaggggtcagatggtct

SEQ ID NO: 3566 - DNA, 620 bp, Canis familiaris
  misc_feature (1)..(620): n = a or c or g or t
tcagaactcacttctgagaagctgggctttgctgggctcgtaaaagagatctcctttgggacaactaannacaaaatgctggtcattgagcaatgtaagaactccagggctgtgaccgttttcatcagaggaggaaataagatgatcatcgaggaagcaaagcgatcccttcacgatgccctgtgcgtcatccggaacctcatccgtgataaccgtgtggtgtatggcggaggcgctgctgagatagcctgtgccttggcagttagccaagaggcagacaagtgcccaaccttggagcagtatgccatgcgggcttttgctgatgccctggaggtcatccccatggccctttccgaaaacagtggcatgaatcccatccagactatgaccgaggtccgagccagacaagtgaaggagatgaaccctgctcttgggattgactgtttgcacaagggtacaaatgatatgaagcagcaacatgtcatagaaactctgattggcaaaaagcagcagatctctcttgcaacacaaatggttagaatgattctgaagattgatgacatccggaagcctggggaatctgaagaataaggaaaactggagaataagatgtagtagta

SEQ ID NO: 3567 - DNA, 645 bp, Canis familiaris
  misc_feature (1)..(645): n = a or c or g or t
annncagctgtgcanntancagggccctgtgctgctgatccgaagnnncaaggatgagatcatcactaccangnnnncagangacatcatgtccaaccgaggcaacganctcctgctgaagctcctgcagtatcggtatccctgtgtgatggcagannngggtcttcgagtggtgaggcagtggctggaggcctcctcacagctggaggaagcagcctcgattttcagccgttgggaggtggaggaggactggtgcctgtccgtcctccgctcctaccaggcagagcgtgggcctgactttccctggagtgtgggggaagacatgaacgcagatggacgacaacagctggccttgtttctggctcagaagcatctgcacaacttcgaggccacacattgcaccccgctcccggcccagaacttccagatgccctggcacctctagcgaccacactggcacttgttttgaaagagtgggatggagggagatgtgaggaaggatcctcgtatttgtgattctctgtgttcgtgttgctgtttatagtttgtggaaaggtggggactgtcccccttctcactgccctcttgcacgtttcccctcagccatctggcagtacctaaccttccccaatacacatcctgcat

SEQ ID NO: 3568 - DNA, 595 bp, Canis familiaris
  misc_feature (1)..(595): n = a or c or g or t
tggggagttctggttggncnacgaggccntgcacagcctgacaaaagcgggcgactactccatgcgtgtggacctgcgggctggggacgaggncgtgttcgcacagtatgactccttccgagtagactcagctgcggagtactaccgccttcatctggacggctaccacggcacagcaggggactccatgagctaccatagtggcagtgtcttttccgcccgtgatcgcgaccccaacaacctgctcatctcctgcgcggtgtcataccgcggggcctggtggtacaggaactgccactacgccaacctcaacgggctctacggaagtacagtggaccaccagggggtgagctggtactactggaagggcttcgagttctctgtgcccttcacggaaatgaagctcagaccaagaagctaccggcccccagcagcccagggaggctgaccacagctcacatctccggcgccccagtatgactgccgagcactgaggggtcgcgctgagagaagagccaggggccaccctcactatccagccaccggaggagggagnnntctccatctgcgatctcacagcaccatgtttacaggg

SEQ ID NO: 3569 - DNA, 575 bp, Canis familiaris
  misc_feature (1)..(575): n = a or c or g or t
acttctnngtttgnnnnnnnntnnnacacattcatgtggggcaggggcaaagctgttaggttagtttataaacaaccagaacagnntcatggatgtatcagctgtggtttctttacagaatgaaatactgcataattagtggtagggaaggacaagaaatagatgcttcagtttcactagattctcaaaactgattttgatgtaggaaaaaacaaatatggctaataaatcaagacagtatgattccatgtcaataaaaaacatggaacacctgagtagataaggtagtccttgacaggttttaggccagaaaatgaaaaaggtcttagattttcaagggaactctaagtattctttcattatctttataggagcaagaccaaactgcttttaagttttgaagggctagatgtatttcctgtgacgggaactgtgtcttcattttcttcctgggttgttcgtatttttagcagtttgtagaaggtaatctttatgtttggggacaattacttctttgttcataatatgaagtgtaaatattttttcccannnnntcttgtaactttgcttctggt

SEQ ID NO: 3570 - DNA, 335 bp, Canis familiaris
  misc_feature (1)..(335): n = a or c or g or t
aactcttggtgtaggttccagtggtgatctcatgggtcctgggatccnnncggcctggggctccctgctcaatgaggaatggcttgagattctgtccctcttcccctcctcccccatgcatgtgggcatgcgccggctctctctcaaatctttaaaaaaaaatttttcactttctatccccaaaactgtccctctcattctttctcagataatagcactactacctaccaaagttagataccatgaaccatcttttcaacaaatatttattggatacctgttcttannctccctctccctcaccccacccacaacccaccaatacagccatatct

SEQ ID NO: 3571 - DNA, 665 bp, Canis familiaris
  misc_feature (1)..(665): n = a or c or g or t
gtgnnnggtccccccatagtgnctccatagnaaccagtccagctacatctgtccaacattagctgttgaaacacaatgggtccttcgaaacctggtatgttggggagcagttatgctcagcaatacttatttgcagtcagagcctttaaatctttctcttctgaatctattttcttactaggaatttctttccttacttcttatctgtttttcaccctagaccagcctattctccattctgtagttcctagatattctatttgatggtttgaattctgggccttcaccttgaattgtataacccaaggcaactcacagcagaagccttgactggcaacaagttctgtcaagaaagtgtgattctgtactgcatttgcattgttacagcacatttccactgttgtgctaggtggccctcctaataactttatgcattgggaagatcagtgtcactatctgcatttgacaaatgaggacagtgagattttttaaagtttaattagtttttcatatcatgtaagtagacaaaatacaaactggggcgtgggtctctttaggccttaccagatgaacttgcttctgctaattggctctctctttgtcttgacaggaaatatgccacccagttggggattttnnnnncagcctcagaagaagaggctaaa

SEQ ID NO: 3572 - DNA, 587 bp, Canis familiaris
  misc_feature (1)..(587): n = a or c or g or t
ctggacataccagcctnnagaggacacagagagagggnnagnagctgagncctgccccttcngagtggccatctatttacctnnagaaaagccaccacctccctgggctcctcctcggctgcccctcagactgcagaggcgactcaagcccccagaaacccccacccggcatccagaccctgagactcccctaacggccagaaaggtccgtttctccgagaaagtctctgtccatctcctggctgtctgggcaggaccggctcaggcagcccgccgcggaccctgggagcagctcgcccgagatcgtagtcgcttcgcccggcggatcgcccaggcccaggagcagctgggcccctgtctcacccctgctgcccgggccagggcctgggcacgctgcgggaaccctacccctcctctggccaccacacctgctcctgcccagactttaccagtctcctccatccagaccacacccttgagccatgttggggcatctccctccattcctgtgtccctatcccctggcctggacctcagtgggaggcgtggctaagatcatgtagtttcctatttatatgaactattta

SEQ ID NO: 3573 - DNA, 578 bp, Canis familiaris
  misc_feature (1)..(578): n = a or c or g or t
agtccctcctgtcagggaaaagcctaaaactgnctcaagaagtaaaagggaaaaccttcaatnnagcaccgtcaggacgaggtccttcatattccacttagaaaggctgggaaagaggatgggagctgggaataatctgggtcacaaaattggacatgtacctagaaggtagaacagaattcagaatttggatttgaactgcagaatttggaaaacggaaacaggaaaatagaatagaggttacagaagaccaccagaggagaggttcctaaaacaaggacagttggaaagaggcccatctctcccaatataagattgagaacttgactgtgtagtttcagcccttctgtgtagggagtctcctgcccttttttttttcattcctgcaggtgaaggaaaaggctggggcctatttccttcaccatgcattcctttctctcctcatattctatcagcccaacccgcattctactgggccactgggtatgtggcatggggtcagtgactttgggagcctccttggtgatccctacacctcatgaacctctaggtcgcttgattctgtttccctttcagga

SEQ ID NO: 3574 - DNA, 616 bp, Canis familiaris
  misc_feature (1)..(616): n = a or c or g or t
tataccagagccnggtnngcattccgtgatgacaatatgcgaaagaacnnnnaaaattagagaacgcaggcatctatgcgttctnnnaaacttnnaaaaattagagaacgcaggtattttttctttcaaaagcaggtatcaatgtaaatgtgagattacaccttcaaaccaagagggttttacaaagaatcaaaaaatcaggggaaaattagagaacgcaggtattttttctttcaaaagcaggtatcaatgtaaatgtgagattacaccttcaaaccaagaaggttttacaaagaatcaaaaaatcaggggaaataaagcacagaggagcacaaggcttgcctttcaattgcggattagccttcctagcaggaatccgtatatgtcaaagggaagatgccaacctttcagctgccaggatcacatgaagtagtgaatgaagacagactttggataatctgcaagtaagctcgacacatgttcaaggaacagcagcaaatacagttctttaaaagaattgtcaaaatgcgaattatactaaactgatgaaggattagaaatatgtatgcatacatatatgtatatatatgacaacaatggcaactgttaggttttt

SEQ ID NO: 3575 - DNA, 551 bp, Canis familiaris
ctgcaaaagtggaaaataagtggcacagggtgcttttaaaaggaattctgaccaacgggttggtgtctgtgtatgagctggactacggcaagcatgaactggtcaacataagaaaggtgcagcctctggcggctgtgttccggaagctgccctttcaagcagtcacagctcaacttgcaggggtgaagtgcaaccagtggtctgaggaggcttcgatggtatttcgaaatcatgtggagaagaaacctctggtggcgttggtgcagacagttatagaaaatgctaacccttgggaccggaaagtcgtagtctatttagtggacacatcgttgccagacacagatatctggattcatgattttatgtcagagtatctggtagagctttcaaaagttaattaatcactgcttctgagatgttgacaactaattcagattttttagcaataacaaaatgtagtaggctttaaaaaaagaaaccttatctctgctacagggctctgactgctgtggggattgaaaagaatacgcttctgtttgatgaaagatatt

SEQ ID NO: 3576 - DNA, 131 bp, Canis familiaris
  misc_feature (1)..(131): n = a or c or g or t
gggggcctataggggcccccttcccaccctttctctnngcctcactccttctccctctccctgacctggtgctcacatgcacctcactagggtttgtgaccagggtctggacgagcttgaatttgaatgaa

SEQ ID NO: 3577 - DNA, 492 bp, Canis familiaris
  misc_feature (1)..(492): n = a or c or g or t
gaccaagaagagtcagaganncttcaaactaggagatngcaaatcaaaacatgaagaccgaaaacacccctacccaattaaaaattatgtatctcctannngactctgatgcccaggtctgttcacaaggcctttgtgaggctctgagaagggggccagggggccctgcccagggaagcccagtgcaccatgaccccgggcgcccctgcccccacaaacccctgcagatctgggagccatgaaaccccgaggcagatccacggatcctcctttgcctctcccctcacccttcattccgtcctcatcgcgctgatcacagaccttgagaaacacttgttcttccagcagtgatcagatataaacaaggacagcaaaacccagatggcctggccacaatggcctcgggatggaaggctacgctaacccaaattctaggacgctcttcctggaggcctgggacctgcccaatatcctcaggctctccacnnnngg

SEQ ID NO: 3578 - DNA, 555 bp, Canis familiaris
  misc_feature (1)..(555): n = a or c or g or t
ccctttcttttccaggggcagcnttagttcccgtggccctgaaacacacatatattttccccttcctttcccagcacccaccagccccacaaagcacccagtgcatccttataagtggaagaactaagatagcgctcttaaattccttagaaatgaagtttttttgttttgtttttgtttttgtttttctcagtatctttccccatggaacaggagtgaaagtatttcattgccttggggctgggaaagcatttctccagccttcttctcccctccccagcccccttaggaacaggattggcctcagcttctgggcctatctgctgccttccttcgatttcctaccagctcttttgctttcctttgagctctctcgggcttggggatcttagtttttatttcccagctcttcttcctnttttttttttttttttttttcttctgatcagtttttttttagggggggtgtccttttttttcttctaagaaagcatttgcctttttccccttttcttcctctcccaacgtaacaatcgtggtaacagaatgcnnctg

SEQ ID NO: 3579 - DNA, 670 bp, Canis familiaris
aaaaaagcaaattcttgatgattttttttaaaaacaaaatacaagatgcttattcaatgcgaaatgccactcttctaaaacctgagacaggattattgacgttttatggtagcttcacattctggtatagtttaatatgccttgggggcagtttgaagcagatcttcatgctattcggtttaaaaatgaatcctagatatgcaaatgatgattttcttagaaaaatgttcacaaaatgaatttatttaataacagagtaatgaatgtgtatggttatcagtcacatgcctattctgaattaatagcaaaaagttaattgacctagattgttgatagtgctgtatatgctatataatacaacctggagtacattaaaccgacaaactcatactggcagtaggacagtaaaaaaggagtaattgtttttccaaactttaaagttctcaaatacaaacagattgaatgaaaaaaactaaggtgcttttcaaaagaatagctgaattgttacaggccaaaatagcaatatgctactctcttaatttagttcaataagaccagtgaaactttgggttcgctaataaattctgagtaaattaatgatgaaaacataacttgtttcagtgagccactaaggcaagaatattcttcatacaaatacaaaatgtggtgc

SEQ ID NO: 3580 - DNA, 359 bp, Canis familiaris
  misc_feature (1)..(359): n = a or c or g or t
tgatnaatcccataaggaaagtatgtgaatgctgcttttgcaaaggattaaatgtattattgtaattttagctcgtgtnnngtactatgctttccgtggaatcatttaagcccttttagtgancgttgtccttgcccattaagaaactaaaatgtagtatatattgtataaaatgnnnnnaccattatagcttcgttagggaagttgtacatagacattgaaagaagggttaaaaacggttttattatgcaattgtaaaacaccaaaaatacagattcatctttgatatgtaacacactaaatgtattttgtacagcatctggtttaaaaggtgccttattaagnnnnnnnttaattgc

SEQ ID NO: 3581 - DNA, 635 bp, Canis familiaris
  misc_feature (1)..(635): n = a or c or g or t
tgcactnngaacagcccatccaccaagctttgantncgcatnnggcatcnnnagcattttatatcagcgtggcatatatccatctgaaanntctaccagagagcagaaatacggactcaccttgcttataacaacagatcctgagctcataaaataattcaatcatgtagtggacaagtgaaaggtatttaattgttgaaaaccaatttgagttttgcaggtcttcttggacccgtactttctggcatcttggtgttcatttttcagctctatacaaagaggtgtagaacactgcaatctcaaatatagtgattctccatcggaaggaagcaaataataaagtgaaagaaagtccactcttccctaccacattttgagtgggttaaatatgttgatgttaggaatctgatctggcttcacaaaacaatctctatcaactccttttgaagtgatttttgcagttcgtgtagccaggtggaacaagttggaattttacataactatgatgatgtttattattggagagaaatccactacatatttttaacatgatatattttctatagctgcctagagtttaaaaccgtcattattttaagataaaagaaaatgaaattggatccagcctgggaact

SEQ ID NO: 3582 - DNA, 575 bp, Canis familiaris
  misc_feature (1)..(575): n = a or c or g or t
agcagctggnnagacagggagtnctggagcacgtgctgtcctgatcttgtactatggcagcacaaggaggaaccacaccatngaaagttctacgcgtccctcctgacctcgcctctttggctttaaaagttaagacattctgtaagattaccagaagtgtgtggctgaggggtgaggattcatcctccgctttgtaatgaactgaaagctatatctgtatttataatcatagcattctttcagttactgcaatatggttttttgaccttttttttttttttaatgaaagtaaacatctgttatgtttgattttcttttattttttttctccccagtaatgactttattttttcagtgaatgtctccagcccacaatatagcataccgccttaaagtacaaatccaaggaaggtaatacctttcttaagttacaaaactggcaaattaatacagtactctttaatacaataaaatccttttttgtttttggagtcctgtattactttattaataattttcactccaaaagtgtcagttaagtaccaaaacaaaactgtggtttataatggtggttt

SEQ ID NO: 3583 - DNA, 642 bp, Canis familiaris
  misc_feature (1)..(642): n = a or c or g or t
agngnntactcatagcnntccccagagnnnaggaggtngagcccatgtagatcaaggttnnatcatcagnnnanntgnnaagcttctgaccagatgttgaactccctaccccacccagtgcccagtatgagctttcacatagttggtccttcctagatgtgtgttgaaggactcttggcccttaatcttataaatgccccatcatctgacattcagaaatccaaatttgtgcaacaccccccccccgaattccctggagatgaatatatgtgggaaattcttggatttggggaagtctgtgggtgcaagggtgaaagaaggtgtccttcataatgtgtagtatgcttccttggccccagatttctctctgcaggaggggtgacctctggcagcatcagtcctaggctttctgttgccctctggtcaacaattctatgtcctgctgtgcctcaggagaggggccccacaggggcagatccactgagacagctcataacgggccaactctgggactgaaccactctgggtgtaaggggagggggcgaggggtgggaggtcttctccagatgtgtgccagttacgtatctgttctgtatgggtccagcagggtttctatcnnnnnntaataaatctacaggnnnn

SEQ ID NO: 3584 - DNA, 605 bp, Canis familiaris
  misc_feature (1)..(605): n = a or c or g or t
annagntcctgccctgagtccctaggaccaggccccgtccctcttataggaggtggtggggtgagggccagagctggcggtggaaccttggttctctttttcactgacattgtcacagccgatggcagattctcgggggtggggtggggtgggtcgtcaggaagcccaaaacactaacaagccctggattctcatattggtttgcctgttgtagcctcagcccacatggcaggtctgccatcacccatgccataggtgaacacaccaattctgctctgacttgcagctttagtttggacaaagctcaaggttaaaaatgactttaaacattttacctcagattaatttttcaaaggattcaggtctcaaaactcaattattgcttatttcattgcactctttaatacccaggcaacagagacagctatgcaaaccttacttgacaagttcccggtctgagccagcatgcctggcttccatgtctttttcatcctcaggacagtcacctgctgctgagtagccactgtccttcttaaatgtagggaagtgaagttttgtcaccctttcagggaaattcaggcaattactgaaataggagggtggca

SEQ ID NO: 3585 - DNA, 524 bp, Canis familiaris
  misc_feature (1)..(524): n = a or c or g or t
ccaacaagcgaggcccgccaacgtacaacgagcacatcaccangcgtgtggnntccagcccagcgccacccgaaggccctggccaccctcgagagccaagcacaccccaccgctaccgagaggggcnnacagagctgcgcagggacaagtctccgggccgccccctggagcgggagaagtccccagggcggatgctcagcacgcggagggagcgctcccctgggaggctgtttgaagacagcagccggggccgcctgcctgtgggagccgtcaggaccccactgtcccaggtcaacaaggtctgggaccagtcttcagtgtaaatctcagccaggaaaaccaactcctcatcttaatctgcaggaaaacaccaaacactctaaggaactctgctgaaggggcccccggcacccatctgctcagccaccccaaggcacagctgggcccagacccgcctcagtgtggacaccctgcatccaggtggtgcaggggccaaggctcttaggggccgccggcgccttcct

SEQ ID NO: 3586 - DNA, 600 bp, Canis familiaris
  misc_feature (1)..(600): n = a or c or g or t
ttcagtcattaattcgggtgcaaatnnagttattgttttttttttnnagaaaactatttcaaaagttttttaggcccagaaatcaaggagtattccagctatgaaagtgtgcaagactcttgccttaagtaagtataaccagatattacttgccgaatttttttaggttcttttaccttgcctgcatttctcattagtgataagttttaatgaaagaaccctgaatgtagagtgattggggcctaagaaatttcaaggctcttcagggtatgaaatagtaaaaaagaaatgctttggcaaattctttggctaccattaattcaaatgtctttatgccttttgttccttttgatatagctgaactttaagtcagaaattgatgagctaaaaaaaaaatagattttcaattgaatcagtcttttctgatacagtttttacctagtgtactaggagaagtaggagaaagctcctggctctgagagaataatctctggtcctcagccagaagacataggtcatttatttttctgtttcctcattactcacttagattatgctaatctgccccatggcagtgattcagtgattaaggatagtgaa

SEQ ID NO: 3587 - DNA, 535 bp, Canis familiaris
  misc_feature (1)..(535): n = a or c or g or t
acttaccatgcagattncagcantaaatgnaaacnnaggcactgtaaagaaggagtnnnagtccagtcannnnngagtcagtgagctcgagaaacagacagatgacttacggggtgaaattgcagtactnnnagctacagttcagaataatcaggatgaaaggagagcactactagaaagatatcttaaaggagaaggtgaaatagaaaaacttcaaaccaaagtcctagaattgcaaagaaagctggataataccactgcagcggtgcaggaactgggtagagaaaatcaatcccttcaaatcaaacacacacaagcgttaaataggaaatgggctgaagacaatgaagtacaaaactgtatggcctgtgggaaaggcttctcagtaacagtgagacggcatcactgcagacagtgtggaaatatcttctgtgctgagtgttcagccaaaaatgccttaactccttcttccaagaagcctgttcgtgtctgtgatgcatgtttcaatgacttgcaaggataatgggttatcaca

SEQ ID NO: 3588 - DNA, 558 bp, Canis familiaris
  misc_feature (1)..(549): n = a or c or g or t
tggctgtggntcaaagactcntccatctggggaatgttnacgccanggccacccagacaggacagacagccctcatgctggccatcagccacggccgccaggacatggtagcagcccttctgtcatgtnnnnctgatgtgaatgcacaggacgcagatggggccacagcgctgatgtgcgccagtgagtacgggcgcctggacactgtccggttgctgctggcccagccagggtgtgatccggccctcctggacaatgagggcaccagtgccctggccattgccttggaggctgagcaggatgaggtggctgctctgctgcatgcccacctgacctcgggccagccagatcccctgtcacctcttgagtccacccctgatgtgcctgatgaaggagaatgcagtgaccacagagaagacccccagcctcagtgaccagcctggcaccttggatctggattgggagaagagagttagttccttccaccaccccagcctctgggacacagcaggggccagggttagtcatccagataactagccttgggccaagaaaaaa

SEQ ID NO: 3589 - DNA, 626 bp, Canis familiaris
  misc_feature (1)..(626): n = a or c or g or t
tgctnnnaaagatgctacagnaccgacanngnacnagcaagatgacagcgtgtgacgtnctcacctgccccaatgcctccttcactgaccttgctgagattgtgtcacgcattgagcccgccaaggtagccacagtngatgatgagtctgactaccagacggagtatgaggaagagctgccagatggccccaaggacgcctatgctgacttccagagtgccccagcccacctgggctcagactcggaggacgagccctcgtttcggcatcggcgccctggtctagctttgcagaactgtcctgggactcctgcttcccctaacactctgacctagaagtctccacttggatgcaccccacagcaatgtgtgccgcaggcctccttcagagaccctggctcctaccgctcctgggaggagctgccaggaagacccggcaggggtccagggccccatgcaccactgagcccagcatatcaggctgctttgggtggctctggcctgcgtgcgccggcagcttgtggtggggcgccgggtcctggcaccctctgcacacacagcagtccccagggctgtgcccgcctcttcggggctcccaaggcctctgagatgttggagcccctggtg

SEQ ID NO: 3590 - DNA, 70 bp, Canis familiaris
  misc_feature (1)..(70): n = a or c or g or t
atttggtgccaacttnnnnnnagagctgtatcaaaaacgagaaacctgtactcacatcacaatgtagttt

SEQ ID NO: 3591 - DNA, 607 bp, Canis familiaris
ccatgggtgaccgcttcacggacgaggaagtggacgagatgtaccgagaggcacccattgataagaaaggcaacttcaactacgtggagttcacccgcattctcaagcatggtgccaaggacaaggacgactaggctgcctcggatgcccctgcccaggcccctgtcccactcctgttccccactcactgtgtatcagctccatgcccgtgatcctacaggaccctctcaggggatcctccctctgaggggctaggggcccagctccttgtgggggaacaggctgagcaaacatagttccaggcaaggggcgcacagccaacatgaagcaggtgttccaccatgacctcccccatcccaagagagaactgtcttctagggagctgggcctcagggctgctccccacaggacaggccctctgtcctgttggacacaacttcacatgcacccccatgcagggcatgacagctctttcccagccactgccactaacctcaccaaggtcctttttcagagggcaggatgccagacccctcctctgtgccctgctcagccactagaacatagcccatcccaccgggagtgtgatccagaagatgcatgtagg

SEQ ID NO: 3592 - DNA, 685 bp, Canis familiaris
  misc_feature (1)..(685): n = a or c or g or t
tcactgatgagccggggtattatgaagatggggcttttggaanncgcattgaaaatgtngtnntggtggttcctgtgaagaccaagtataacttcaatnaccggggaagcctgacctttgaacctttaactttggttccaatacagaccaaaatgatagatgtggattctcttacagacaaagagtgtgattggctcaacaactaccacctgacctgcagggatgtgatcgggaaggaattgcagaagcagggccgccaggaagctctcgagtggctcatcagggagacacagcccatctccaaacagcattaatgcctccctggtttgggtttttgtaagatgctccagggaagggaagaaacctggcagattcctgacatctgtctcctttcctctccttcctttcttcccctttttactttgagattctaaggagaactgaaaatcttcttatcctctttgatattttcttgcaaacactcgatcttttatgatttttttaattattgagaacgagccaagaataaaattgctgcactggaaggagggtccccccaaaactgaacacttgacccggggggacgcctcgagcagccacagtgagttctctggcccgtgatggtgaagccctgcgcgcttgctctctgatggttccaggtgctagtacatcattcacaatctcc

SEQ ID NO: 3593 - DNA, 663 bp, Canis familiaris
  misc_feature (1)..(663): n = a or c or g or t
gntctgtttttctctttccccatctaaattgtgtatnnnnnncnntaattttaagttccaaactatcttttcctttattgataactttatttgatgaggacttgggaattggtttaacctagtttccatcctctgaatatttccagtaatatgctttccttttaatatgggaaagggaatcttcttgtaataaatattttcaaaactcgaaatatctaaatctgtgcccccaactttttttgttgaaatgtatacagcttataaaacgttgcacattttcttttgtgaattgtatttctttatgcatcaacttcttgtttctttgacattgatttaaggtcagttaatgtgtgatactttctctgtgtttttgccgatggtgttttaagagtgtgatggaggatgaaaggcattctattttggcctacatgttggtatggaagaggatcatcgagctctcagcatcctgagtgcatgtctgagggtgcatggagcatctttcccttccgtaggcgctccattttttcctcttggcccaaaactgctccgtaagcatgcccagggaacatgtggctctcctgcgttctcctggatactcaacggccatgtgccttgaatgaggtagtttgccaccggcacacttgagatgcagagagcctaggg

SEQ ID NO: 3594 - DNA, 628 bp, Canis familiaris
  misc_feature (1)..(628): n = a or c or g or t
ggttgtaatgaggnactaagatagggtaaaaagaattatacatgtagtgaagaaaatatttaaatccatctcgaacagagttaacagttctctttcatttaaaacggttattttgaaatgaagatgaaaatgtattcatcttgattttttttttccacatttgaagaaatagtttataccatcttataccacaaggatgtatagcagaaatgtgggatatggtagcagagtatgtgtatatatttttgcctttccaagcctgccagtgtatctggccttgaatagtgctatcccagcggtcagtcattactgtaacccacaactatctttttaagttttatgttcatagtgaaaggaatgttgactttgaaattatgcatttatattaatgtcactataaaccaatgggaatagtaatttttacacaaacttgctaaatattgagagactaaactactaagttaataaattatatatagcaatgtagctgttctctgtagatggtgtctcacaatggatttctgttgcttgattattttcttagtgaacatttgaactaaggcagtggctgggattggtgatctggctaagtattttgaaacacattctgaataatatgactggtgtt

SEQ ID NO: 3595 - DNA, 522 bp, Canis familiaris
  misc_feature (1)..(522): n = a or c or g or t
agggagccagaaatgctatcttgactcaatgggatcgaacattcaaagtcaccaaaactcgaatngtacaagaatccccaactccctttgcaagcttgcttaaactcttaagnnnnctggctttgctaatggccattttcctaattttcctataagaagtacccagatggcctgtcagatgcacatagtagatttacagtgctctggtccctccattcccacatcatgaccctcacagccttgaactatattcaagtggtgaaggccacctcccatccttccctggctgaccccaaggctaccactggtattcctggacctctcccagccccacctgctcccagtgctagagcaagataatcatgatttctgtgcatttgaaggctactgggaagttccatgttcattttacaaagagagttgtttacggcagcactctgagcatttatatctctctctcatataaaccatttcataggcctcaaataaaaccccctaattcacaaaagatttggttgtact

SEQ ID NO: 3596 - DNA, 625 bp, Canis familiaris
  misc_feature (1)..(625): n = a or c or g or t
ttgacagnatgaaactgcacttgagtagggactggnctcaacctctcctctctgctgtcactcagatgaagcaaagtcccagatgatggagggtcccactgggctccagatggaggcggttggttgtattgctgagcaggaactgaaggtggctgtggttttccttgggctgggagatgaacttaggtggtggggaaagctgagtgccattttggatgaatggagaggaggcagtggtgacagcacctggctagctggctgagcagacaggaagaaggaggaaggaggctgtcccgtcctgtgtccccgctttcatgccggagtgagtagagtcaagaaggtgctggcaggagcaccaagtccaaaaaggccaggctggagtttctgctgtgtgtaggttgccaaatgtaaaggatatctattgtattcaataaactatactttaaaaaaataaaaataaaaaaataaactatacttaacaatgttaaaaaataaagtcgggatccctgggtggcgcagtggtttagcgcctgcctttggcccagggtgcgatcctggagacccgggatcgagtcccgcgtcgggcttccggtgcatggagcctgcttctccctctgcctgcttc

SEQ ID NO: 3597 - DNA, 606 bp, Canis familiaris
  misc_feature (1)..(606): n = a or c or g or t
tgccgagatctgagtcacatcnnagatgctgttgtaatttcntgcgcaaaagatggagtgaaattttctgcaagtnnagaactaggaaatngaaatatcaagttgtcacaaacaagtaatgtcgataaggaggaggaagctgttaccatagagatgaatgagccagttcagctaacttttgcactgagatacttgaacttctttacaaaagccactccgctctctcctacagtaacactcagtatgtctgcagatgtaccccttgttgtagagtataaaattgctgatatgggacatttaaagtactacttggctcccaagattgaggatgaagaaggatcttagatatttttcttaaaatccaagaaaataaaattaagctctttaagaactgcttctgagatgccaacatgtacttatgtttcttctgtcatcaaatttgtacctctgagtacatatgtagatattttctgtaaataacctattttttcttcattctttacaatttgtttaaagaacaaaatcaaatctggacttgttaacctagaaatatttctgccttacctaaaaagttctcgtgattttcataacaaaagggttttgact

SEQ ID NO: 3598 - DNA, 564 bp, Canis familiaris
  misc_feature (1)..(564): n = a or c or g or t
agactgcagcatcgtttcagttcactcttcacctcacatagtagttttcgtgtttataaattagtttgggtggttacgtttgcatgcctaagcacacattcgaaaattaattatagctgtagtacaaatacctgatgtttttccttgaggatgatggccttgctattttttcttaattctgatgcttgaattctattttctaattttctttccacacctcccttcagtttttctgctgcagcagtttgaaagaatacactcggataaatgattatgatggtgggtgccaatctacaactatgctgtcaattaaagatacgtcatatattttaactgtgttggggaaaagctacccactttctcctcattagagcgtcaccataacaaaataacactgaccctaagaatttaaagtctctaagtcatcactaactaaaaacaaaaacgccacagtctttaatacctgcagtattgttttccccattgattttaaaaaccagagtaaatactgtatattagaatttgcttgtaaaatgagttataaaaactggatgtaangtctct

SEQ ID NO: 3599 - DNA, 659 bp, Canis familiaris
  misc_feature (1)..(659): n = a or c or g or t
cacccttttccaagattcnntcttatttgcttatnacaatctcccacccagctgtccctctgactgcccacttgatgctgtctgttcccccaacctgcctgtcctctgcatgtctttccccttttgcacctatttggtgtccctatattattttcctctgtctgctatgccaacttactccagtctcagtgacttagaacaacacaaacttgttctcttacattctggagctcaaagtctaaaatggattttgttggaccacagccaagatattggcctggtcccactaactctaggccctaaaggagaatccctttctgccttgtccagcatcaagctgcattctttccaatctttagctcctggagcctcctcttttcaaatgcaacagcatctttcaatgtctttttgcttctgtcttcagatccccttgtcttccataaggagttttgtgattagacaggtacgcttagagagaacagacatacttcagcttcgagacatatccctcctgctattcatgctttccctattagaagcccacagacctggaaggttggctccttggggagccaaaattcagcctgcttagtccttttgtgactcctattggtccttgcttctagctttctccnnnnnnntacctgtgtacccatttg

SEQ ID NO: 3600 - DNA, 658 bp, Canis familiaris
  misc_feature (1)..(658): n = a or c or g or t
gctggctagcgcagagagatgccccagagctgcatgtcccnnnagggtggtnnnnncgtccatgnnaantngagagggtgngagagatcnntgggctttgaccctggannntnatcattncagccccatggtaggctggggcttcttaccagggtagaaaagagaggtgggggggttcatcccaccttcagtnnnaagtgcctgtcccctcctcctccacactatanntagggaatagtnngacaagtagggaagaaaagagaagaataagcaacagccacatcccagttggctattggtctcgccccaggcaggggacaggctggccatcctgtgcagtggtgtggctgtgtcatcgggatgggaagatggaggccagagcaagtaccttggtggggaagctcccatcttgccgtctgccgggtccagcttgcctcctccacagggggccagtgggtggggaccaagcgccaacagagtggccctctggctggtgaggaccacgccccagctagtgcctctgggaaggggtttttaacattggtacatgtgctgtggtttctggggtgccttccactgcccactgctcagtaacagggccttgctaatcgggttgtcacnnnnnnaaagtgcttgagatttaagttactatcctggc

SEQ ID NO: 3601 - DNA, 159 bp, Canis familiaris
  misc_feature (1)..(159): n = a or c or g or t
tagcgagtcaggcgccagtggctcatcctttgaagagttggacctggaaggcgagggacccctgggggagccagggctgagccctgaggttgagcccctgggggctaccaaatggccccgggaaccnagtactcctgaaaagggtnnngagtaacccta

SEQ ID NO: 3602 - DNA, 88 bp, Canis familiaris
  misc_feature (1)..(88): n = a or c or g or t
ttttggatgaagcaaggtggtggggactgaggggagactggtatatgnnnnncttnactgccagngaatttcacgcacttnnnnntnc

SEQ ID NO: 3603 - DNA, 654 bp, Canis familiaris
  misc_feature (1)..(654): n = a or c or g or t
agagagcgagacagtgcaagcagagggatcccaactcggggcttgactccaggaccctgggaacatganntaagctgaaggcagatgcntaactgactgagccacccaggatgctggattaaatctacatggtttaactacatgtctaaaaaagatcagcctggtgcctctggaaaaagtgtcattggagcttgaaatgaaaagttgatttttttcttcattttcctgtcctgccatttccatataatcagctcaagtgaacacagcacaggacacacagatcaagaacctttccacctccagatgctttttaagatcagttcataaaattccttgaacaagaaaacatttcatcatgtggaaataaatatttttctgctttcgcatatttgatcggaaagggaagacacatgcctctcctaatatccccgcctgggaaataaagtagaatggggaggaggaatgctgagtggttctgcaatccagtgaagagagaaaacaaagacaatgtgataaagaaaaagaggccttgtgctgactgaatgccctaacctgagggctttgcaattgcttagtccattatctacatccccaggatcaaatgtgagatatttagagatatttatcaaagaaaggaggannnnnngccacaan

SEQ ID NO: 3604 - DNA, 657 bp, Canis familiaris
  misc_feature (1)..(657): n = a or c or g or t
aaatgttatttttcatatcatnnntaatcttgtcacagtccacttaacgaagtttggnnagatttcagtgaaaannatcttccagagtagtttcttttttcctgggattggggagggggggtaactttactacaattagtatgtatggtgcagaatttcatgcaaatgaggtgtgccagcagtgtggtaatttaatcgtatttaaacaacaacaaaaaaagaatgcacaaacttgctgctgcttagatcactgcagcttctaggacccagtttcttttactgatttaaaaacaaaacaaaaaaaaaaataaaaaagttgtgcctgaaatgaatcttgttttttttataagtagccgcctggttcctgtgtcctgtgaaatacaggcacttgacccttggtgtagcctctgttcgactttatatcacgggaacggattggtctgatttcttggccctcatcttgaattggccacatccagggcccctggccagtggactgaaggctttgtctaagatgacaagggcagctcaggggatgtgggggagggcgcttttatcttccnnnnnngtcatttgaggttttgatcttctctgggtaaagaggccgtttatctttgtaaacacgaaacatttnnnnnntctccagttttctgttaa

SEQ ID NO: 3605 - DNA, 619 bp, Canis familiaris
  misc_feature (1)..(619): n = a or c or g or t
ccacccagacccactgtgnctgaatctgcatttcaacgaaannncnnnactctccatgcacacacttcagtgtgggnagctaagcaaatgaagggatcattttccgttttagtgaagaaataagactgcctgttggcaccatgtatagtgtacactatttcctaccatgattaaggccccttgtttgtaactgagcaagatggatgtctgccttttccagatgtgcgtccgctttctttgcagttagatgagggaagagagctcagtgttaatccaaataatggcctctgcaaaaacacattcatgttcgattttgaatgcattctaggagaacagtagatgtggctccctcctaattttgtttgactaacactggaattggtctgctttctctgagcacacccagttaatgaaaggggagaaagcatggaagcttgctaatttgtcaggaaggccaatctatatttgtggcagcctgtcagcagtatggagcatggacaactgagccggatgcattttcaagagcattccagaaatcactgcaaactggctggcaaattctccgatttcatctggtgttggtattttgggataaatgagaccaagatgttttctacaa

SEQ ID NO: 3606 - DNA, 572 bp, Canis familiaris
  misc_feature (1)..(572): n = a or c or g or t
cattggctttgccgtcaccgtggacatcctggcggggggtgctgtgcctnnagnctgcatgaatcctgcccgtgcctttggacctgccgtggtggccaatcactgggacttccactggatctactggctgggcccgctcctggccagcttgcttgtaggactgctcatcaggctcttcattggagatgggaaaacccgcctgatactaaaggggcggtgacactgaggtggtggtgttcctgcggcctcgtccggattgcagacgggcggcctcctgctcgtgcggctggggtggaggcccaggggagccggccacccgcttcccccacgtgggcctggccttcccgatgacagactgctgccaaggtctgaggatgctctgggctctccgaattcctctgtgctccccagcgccctcagcctggggagcgcgctgccagccctgcccggcacaggcgtttttccccgacggggaagctcctatgagcagaagagcagttggaagaggctgctgtgtatgcatgagctcatttctgccaccccctttctttctccttctcctggcccccgac

SEQ ID NO: 3607 - DNA, 455 bp, Canis familiaris
  misc_feature (1)..(455): n = a or c or g or t
ctccacacccagctttggtcagaacacccctgccnntggggtgggcgtgtcaggcagtggtctctcctttggggcatcctcaacacccacccaaggctttgttggagttggacctttcggatcggcggccccttccttttccattggtgcaggatccaagaccccgggggctcggcagcgactgcaggcccgccggcagcatacccgcaagaaatagcccttgcctttgcccctgttccatccccccgattccctgcccaagtctggacctcagcacctgctaggaagagcctctggaccttctagttccataaagcaacctcccccagatctctctggcttctgccagtgggaggcagcggcagccctggcagccatctggctcctggaggaagaagcctcaggccctgggggtggcagtgggggtggggggcggtggcctgctacctgtactt

SEQ ID NO: 3608 - DNA, 637 bp, Canis familiaris
  misc_feature (1)..(637): n = a or c or g or t
ccccnngtaggcatctgccaaaaggggtgctcgaggctcgagccagctgtnntgggtttccgttttggttccctttcatacagagggtnttctttgggtcactgccaaacatcggggtcatcgcctctgtccagaggtcctcagcgngaagatgccagtcagtgtcactgcactgtgatggggacctctctgctaactgccatttctccaggcctcagtgatgagattgagattggagacaggcatggtgctgctgctgctgcttctccagaggatccccaggacacctttgttccagcctgctttctgaggctgggcacaggaaacctgccacattcagacctatgccccagagctgggcctctttttgttaagccaagtatggacattccaagttcataagtgtgaacaaaagagaagaggaacccagcagatgtaacagaactgactccagttcaatgtttaggttttcactaaactttgtgtttttcccttttttgctggggtttgcattaatgggagtagttagcccaggtgtggggagtgagagtgttgtgtaatgggagtctgatgaactgggaattatgcaccactgcaactggtgagtgttttacaagggaggagcatttttattttg

SEQ ID NO: 3609 - DNA, 207 bp, Canis familiaris
  misc_feature (1)..(207): n = a or c or g or t
ccccccccggttccgcctctcagtcttagactgcccgcctgctctcctccaggcgtctggctggaccgagccccctggaggcttagatttggggccaggctcgcgacccaccctagcctctggccaaggtcttcccctcgagccccccctccctttggcctagacgcgctccctcccccctcgagctccnncccctccccggcctgg

SEQ ID NO: 3610 - DNA, 639 bp, Canis familiaris
  misc_feature (1)..(639): n = a or c or g or t
tganctctactctnnnctatcaggagaagtaactgaaattaatgaagctcttgcagaaaatcnaggacttgtcaataaatcttgttacgaagatggttggctgatcaagatagcactcagtaatccttcagaactggatgaattaatgagtgaagaagcatatgagaaatacataaaatctattgaggagtgaaaatgaaaccctaaataaactagtatgaaacaacttaatctagcatagttgtcttaaattagtggtgcatacaggatttaaagagcaactattagcaatatctgtggaaaaagaaactacttgcaataatgctaatggaagaaaacacccttaatttcacaatgattgcagataaacacaatatgcatcttttttgcaacacctttggattatgctaggctccagttacgatactcagaatcctgaaattatctgtggttaaaaactagttataaaaaattacgtaattcaaggatttggggtcaaaataaataatctttccattggaaataactggcagtagagaaaggtttgttagtcttatagtgtcaggtaaggaacaatactaccttaattttgcagcatactgcacttgctggtgctattttttatacaatgaagcaaca

SEQ ID NO: 3611 - DNA, 339 bp, Canis familiaris
  misc_feature (1)..(339): n = a or c or g or t
acaatggtggagttggtaggtgtnnncaggccaaacagtggggctggacanagggtcggtggccnaagaagagtnnngagtttttactgcacatncttaaaaatgcggagagtaatnnngaacttaagggtttagatgtagatncnctggtnnnnnnnnnnatccaggtgaatnaagcccccaagatncgacgtagaannnacagggctcnnggccggnttantccatacatgagctctccctgccacattgagatgattcttactgaaaaagagcagattgttcctaaancngaagaggaggttgcacagaagaaaaagatatnnnngaagaaactga

SEQ ID NO: 3612 - DNA, 616 bp, Canis familiaris
accactaaggctttccttcccaccatgctggagattaatcatggtcatattgtgacagttgcaagttccttgggattgttcagtactgctggagttgaggattattgtgccagtaagtttggagtggtgggttttcatgaatccctgagccatgagctaaaggctgctgaaaaggatggaattaaaacaacattggtttgcccttaccttgtagacacgggcatgttccgaggctgccgaatcaggaaagaaattgagccttttctgcctcctctgaagcctgattactgtgtgaagcaggccatgaaggccatcctcaccgatcagcccatgatctgcaccccccgcctcatgtacatcgtgactttcatgaagagcatcctcccttttgaagcagttgtgtgcatgtatcggttcctaggagcagacaagtgtatgtacccgtttattgctcaaagaaaacaagccacaaacaataatgaagcgaaaaatggcatctaaaaatcttctttatatggaatatcatttctaccagaagacgatcaaggcattatagtccaatccacatcagcattactgacattctctggattctgaacccttgttgacttttttt

SEQ ID NO: 3613 - DNA, 604 bp, Canis familiaris
  misc_feature (1)..(604): n = a or c or g or t
gaggactggccagaggagtcaaagatgagannggnctggtgaccannnnccanntcttgnnagtcaaggattcccgtagcttccgaaatcagtgcccagtttcagccgccatcacgtcagacaaggagattggnctgcaacgaaaagagtattatagcaaagggaggtacctgaggtgctccccacacccggagctcgaggaggacacagaagatgagcatgaccagcaggacagctcagtaaattttaactgggtgattgagaaccccataagcacagaggtccgtctgctggaccacacaggaaaccctgttcaggatcaccaggccactgaagactgcctgacggggacagtggcgacatcacagcctggagccggcctgtcctccaaagacagagcagagtcaggctggtgtcagtggctggtatccaaggggctcaactggcagagtccggaaagtttggagagagaacctggaagcaattgaaattccccacaccaaaaccaatgcagacacgaaaccctgcggcttcgctggacacaagaggaggaagccagacaatggaaaatgtaggcagctggggatggggtggggaccagccc

SEQ ID NO: 3614 - DNA, 571 bp, Canis familiaris
  misc_feature (1)..(571): n = a or c or g or t
ccagcagctctgggctcgaaagccaccggcgtgagggcagagnngtgaacaggngctgcgggatgggggagcagaaacagggctggaggaacaaccagacntagcattcctccagacctagcattcatacacacgtgtatgctgaatctcttcctcccacccccatccccacctgaagccttacctggagctcggccagcagcgcctccaacaccaggcggcagacccttctctgcaactcgtccagcgctgcctccaccggagccaaagctcctgaagccaccccgtcgggctgcaggactgacactgaggagctggacagaccgaaagttaaggcttcaggaccaaggccaaggccctcgcggccctctgttgtgtagccactctgacgccacctggtggtgcaagtgtgtggcgagatggggcaagggggggctctcaacccttctgaagatctggggcttggattaaggacgggagtggtgggctcagacagctagcaggaacccaaccagacctgcttcaaattcaaaatgtgacttcgagcaagtcgtatcttttgttctccgtt

SEQ ID NO: 3615 - DNA, 497 bp, Canis familiaris
  misc_feature (1)..(497): n = a or c or g or t
ccgaaatcctgctgtctgtggtgctgcccnggtgccgggggacggcagaggcgnttcagatcacgnnnngccacatnntgggnnatgnnnnnagcccctatctcactggacttgtgtccagtgcnnttagggcccgacgccccgactcctacctgcagcgcttcctcagcctgcaacatagcttcctgtgctgcgccttcgtcatcgccctgggtggtggctgcttcctgctgaccgcactgcacctggagagggaccagactcaggcccggaggcccagcccagggacccccgatagcaccaaggaggagagccaagccctgctttcccacccacgggccgtcccagaggcaccctgagaccctggcccctgcgcaggcctgtgctcaccaggccgcacccctccctttggctgcacctgctgccccctgggggagccagcagtgccgaggctgggttggggctgaagctgtcccctctgtccnnnnnntcccttc

SEQ ID NO: 3616 - DNA, 538 bp, Canis familiaris
  misc_feature (1)..(538): n = a or c or g or t
attcatgaccaannagncaccattacgttttccagtatgaatgagtgtgttaaaggaaaaaaaaaaaaaaagaacaggtatatgcagatgaggactgaccctcatatttaagtgtctttatatctgactggatattgttccaaagtcttccttaagggacacctgtcggttgtctgtcctgcatcttctttctaactaagacttttcccttttggtgtctcttctcatccatatggttgcacagaagcagctatgtgagtatagcatgagtcgtacccctctttagactggaaaaaataattacaacttaaagtaaagctcagtgtcaaatcctttggtaaattaaagacccttttatagtgcaaatattcccaacaaaattaatatattttgtgagattaaacaatgcttgtatatgcttgaactttcttaaaatatgttcatttcaaactatatgaatgtacatttttatgaaccataaatattttcaaaagcatannaggcccatgaattatnnnnnnacttttgcagttgatga

SEQ ID NO: 3617 - DNA, 598 bp, Canis familiaris
  misc_feature (1)..(598): n = a or c or g or t
cttnnctgccccaaaaaaatacctgttgacagcccagagctggaggtgcctctgactcattccattgcaaagcttaacgcagagaataatggaactttctatttcaagattgacagtgtgcaaagtgcaacagtacagatggtggctggagagaaattttttatccagtttgtagccagggaaaccatgtgttccaaggaaagtaatgaagaattggcggaaagttgccagatcaataaatacggagaacagctaaaatgtgaagccgaagtgtatgtgatcccttgggagaaaaaaatttaccctactgtcaactgtcagtcactgggaaaggtcatattgatgagaaggcctccaggtttttcacctttccgatcctcattcatggagaaaacagaaaaaggaacaactaggcgcctaaggctctgcgagtacaagggtcgacctcaggaggcaggggcagagccagagccagcacctgagagtgaggtctcttgaccagtgggcagaatcgtcacgcctgacacagtagctccaacaacctctatcatcagccccgcatggaaggacaagaagatgggataaaatttaaagagaa

SEQ ID NO: 3618 - DNA, 563 bp, Canis familiaris
  misc_feature (1)..(563): n = a or c or g or t
gaggctgcccggggccagnnnnggcgccagcnnnaactaaatcgtnnnaagtaccaggtgctaggtcggcgctgccgggagatcgagcaggtgaatgagcgggtcctgaacagacttcatcaggtgcaaaggataacacggagactgcagcaggagcggaggttcctcatgagagtgctggatgcttatggcgatgactaccgtgccagccagctcaccatagtcctggaggacgagggcagccagggacagatgctcccactcccggcaatgctgagaatgagcccccagagaaagaggggctgtcaccaccccgaaggacacccgcacctccagaacccagcagcccaacccccggggaggggcccagtggacgcaagaggcggcgagcaccccgggacggacgccgagcgggagctgtgctcactccagaactagccccggtacagattaaggtcgaggaagactttggcttcgaagcagatgaggccctggactccagttgggtttctcgggggccagacaaactgctgccctaccccaccctagccagtcccccattt

SEQ ID NO: 3619 - DNA, 691 bp, Canis familiaris
  misc_feature (1)..(691): n = a or c or g or t
acctccccatccctgtcnnnnntccacttacagacaccacagcaccacctagtggtnnnnntngccattannnagatatttagatggagcgttctcaccactggaatacaggggccaggcatgaaggatagtttggctattaagatcgttttggtagcattaaactggaattgactatgttgagcatctctgtctaacctgctctctctctggtgccccttatcccacacctcagtgaggacaaccatttcccattatgggctaaaacctccttcagcatttcccaaactttgctccatgtgtagggacagagatgtcctatgtatggaaggggggcaggtatgaggtaagacagcttgtctatgcctctgcctcagccaggattcttgttcccttgttcccgcctcttcagtcccaggcacacagatctgctaagtgatggccagctgcctcctgacttaggtttccatgtagtgcagctgctagttagacaagtgtgagggaatgacttaatactaaatggggattctatggattctgattattttcacttttggggttatgtgggtgggggcggggagcaggaatcgcactcagacgtgacatttcagttcatctctgctaatgaaaagggtccttcctgtgggagaaatctgtgtccgttttgtcagctgcagattcttgtgtaatg

SEQ ID NO: 3620 - DNA, 677 bp, Canis familiaris
  misc_feature (1)..(677): n = a or c or g or t
gcatgtanaaacatcgatgtgactagtaatttgttcctcccttgaactgtgtttagtctgaagttttgaaacttgcaggcaactgaccatgatgtccagttattccttgctttttacgcatcatgttgcagatagcagctgttcccacccacaaattcctcctccattctaagcacatactcttcttctgtcaacagtccatcctggggaaaggaaaagtcttatttattcctgcactctagtttctaatttgctctcccagttatccccctctgctctgggtctcattggggagattgaaaaaaagagtgccttctccttggtaatgggggctggtggggaagggagacagcaagtctaccctatcttggtgatacatcaggtgcacaccacaggttctagaattctcatcttctaacctagataaataggtgctataaacagggaattaagtaaaatgctggatacttagatcttttaattgtcttaattttttttctattattaaactacaggctgtagatttcttagttctcacagaacttctatcattttaaaccaacttgtatatttaaaaaaaagatcttaagtaggatgttttgtactgttgccagaccctcttctgtgatgggtaatatgtttgtttgaaattttgtttttaaaaatgtagcacttga

SEQ ID NO: 3621 - DNA, 629 bp, Canis familiaris
  misc_feature (1)..(629): n = a or c or g or t
ctaagagnatctgnnagtcnctgagaacctggaggggcaaagcttgatttagatcctctctacctctctgggtccttggctggtccctgtcctcntaggcgagggagcttaaggggctatggggccgaaggactgaaggtcactcactctcagtggctggctgcttggccagggcagtgatgataccagggaaggctgcaggttggtgaccagggccatgtcacgaccagggccttgtcacagccagaccaagaagattccttgtctctctacctccctcggttctaaactttggcttttaaggatggaaggggaaaagtggggtgagggagggaggaaaagttgactgggggcctgtgtgatgtccctgaagcaggagagtcagggactgatagggccaaggtggatctgccgggggaaggcggggtgaggtggggaaccctctccacacccatccctcggatgtagcctcaaggagccagggactgctgggaccttcggcctttcccttttgtcttccaacctcttcttagtaccttgctcctgggcttcccctcttcctctggttcttctcctgggtgttcttttcacaggcctctgtggccactgctttgtatctgggtttttca

SEQ ID NO: 3622 - DNA, 601 bp, Canis familiaris
  misc_feature (1)..(601): n = a or c or g or t
tcacaagccatgggcntggcnntctacatcctgccagtgctgggccaacacgtggccacccagcacttccccgtggctgaggnngaggccgtggtgctgaccttgctggccatctatgcagccggcttggcccttccacacagcacccagcgggtggtgagtgcacgggccccagacagaggctggatggcgctgaagctcgtggccatcatctacctggcgctacaattggcctgcatcgccctcaccaacttctcactgggcttcctgctggctgtcaccatggtgcccgctgcggcgctcacgaagccctatgggccccggccactctatgctaccctgttggtgctgacgagccccgcagccacgctcctgggcagcctgttcctttggcgagagctgcaggaggcgccgctgtcgctggccgagggctggcagctgttcctggtggcagtggcccagggtgtgctggaacaccatacctatggcgccatgctctttccactgctggctctgggcctctacccctgctggctgcttttctggaatgtgctcttctggaagtgatgcgtggctgccctgcannnnngactctgggtgg

SEQ ID NO: 3623 - DNA, 543 bp, Canis familiaris
  misc_feature (1)..(543): n = a or c or g or t
gaccnnngctgccacttttctgccaggggtnntgggtctccttcccggccctccacagcctgggccttccaagtggataccctgctggccttaccccccgccccagcccatgcaccccagacctggtccagcgtcagcgttaggaaggggctggctattcctgggtagagaaaggggctgcacccttgggcccctgggtgcgtacctggtcctgcagcttctccctccacccaaagcttgaaggtcaaggttaggaggagcccattctcaccccaatctcttaaagtggaggaacctgggaggacccagagaccagctgtctcccaagcccttccctggcacgtcctcacatgcacaatgctcaccttcccccccacaccaacacagtcccacctgggctccagacccccacccccaccgtgcctgcacatgcacgtgcttggggtggctttctcctggaatgctctgtgtacatagctagttttatagccccaaaggcccctacccttcccctcggtacacaggggttaaagttgtgtgccc

SEQ ID NO: 3624 - DNA, 613 bp, Canis familiaris
atgcttcccgaggctcaaatcagaatcaccataaattctaaggggatggaaggtcgttcagcagatttgccgaaggaacaggctcccagattcattgggttcagctcccagaagctttgggattcaaatcctcatcggtcctccacggctaggggactgtgctgcctcaggaaggccgaggcccgatgtctgagacctgaagtcctgtaacgccagccgcgctgtgccgtcctgcccggcccgggccagctgcgcgaggccgcggccttccctctgcgggggatgcgtcctctccagggagagcaccgccgcacccggcacctccgggacttcacggcctccgtccagtgaccacctgtctgaactacagctcaccgcccactcaggcatctgctgccagagataaaggaacaagataatcgagtgacatttctcttaattatattttcccccaaaccctaactctttattaaattacagtataattgtgctgagtgatgttggggaaaagagctctggccaacagccaggggctgtgtcgtctgagcaagctgcttcttttccctttcaagttggctcggtgagaccagagtcactgtgctcttttgggtag

SEQ ID NO: 3625 - DNA, 495 bp, Canis familiaris
  misc_feature (1)..(495): n = a or c or g or t
ttcttnntcagtgcagctnncaagttcgggggtgacttcctggtctatcctggtgacccacttcgtnnccacgcccactacattnntcagnnntgggctcctggggaccccattccactccaggacctggtnnnngctggccgcctggggaccagcgtcagaaagacgctgctgctctgttcccctcagcctgatggtaaagtggtctacacctccctgcagtgggccagcctacagtgaactccagagacccgtggggatgtggctgcatctgtggaaagagccttnctagatggtcccaagctcatctctgcaaatgggaggctgttaaccctcctacctctttctgcggttagattttgactccggnnnnnnnacactacatccttcttatttccctccctgtttcaaagcacttattggctgtgatatttttgtagttacctatttccaagctgtgagcttcttgagnnngaagactgggtttgattcatc

SEQ ID NO: 3626 - DNA, 636 bp, Canis familiaris
  misc_feature (1)..(636): n = a or c or g or t
ccacccactnngtcccctctgcagcccttggctcatcgaccatgctgtactgcttgtgggctatnnnnnccgctctggcatacnnnnctgggccatcaagaacagctggggcactgactggggtgaggagggttattactacttgcatcgtgggtctggggcctgtggtgtgaacaccatggccagctcggcagtggtgaactaaggagcaccagcgcaggacctggtgctgaccagagccacctcttcctcagcctggcttgcacgtccaggccctttcccaggaggcacagctgactgagggccaggcaccgggtacctcagggtgagcaaaaggaactgggcgagggcaaagcccctaccccctccaccccactcctaccctgaagctccccaactgcacctttgttgacttgtggtagctaggaggctcttgagatgaaggatgatgtcctggcaactgaggctggggccagaaccttgggcttgagtaaggagcaggtgggaagaaaatgttctggtcttaaacccagctatgtcttcagcaggctctggcttccttccctggctttcctctttctgatgctataaattttctggtacccctggatctagggacnnnnnntccttacatat

SEQ ID NO: 3627 - DNA, 606 bp, Canis familiaris
  misc_feature (1)..(606): n = a or c or g or t
atcagctagcatctggacagaaaggtgtgcaagtacccgtgtcacagccgaccacgcccannnaggggccagccccagagctgcatggacagacagcttgccctgacttcgggagagcctttggccccgtgctgcaggcccagcagcccaccagtcttggtgcctgctccttttctgccaccgctgctgcttccagctttgcctctgtcctgcctggtgtggagggctccgtctgacgctgaggaccaaggaggaggagaaacctctgctgccctgggttgggggctgaggtggtgacccgggcaggggccagtgtcgggagctgccatcactggagctggggccctgtggcttgccctgtctggttgtgctcctcttatgtggagagttggaaggaggcattgccacctcccaccaggatgcaggattgggggttgggggtgtcatggcctcttgctggcaaaggtttgttggggggacagtagccccaagccccccactcctccagcctggaatgtgaagtgactccccaacccctgtggccatggcacctgtggactaggctgccactgtgtgggcaggagaaaaggtgccaggaggagcatg

SEQ ID NO: 3628 - DNA, 435 bp, Canis familiaris
  misc_feature (1)..(435): n = a or c or g or t
gaagacggnctagaatatcccaagagaaagcaaaaataaaaccactacaaatgtatacgttcaatacacccttaaattcaaattcagcctnnagattttcacctagatgttcctgaagttatgatataggattttcttatcttccacttgtcactgtattttttaggatggcactcaccacttagnnnctgcattctttgtacagatgatagtnnnnnnnnnnctggaaaactaaaatgcacaacccttgaagaaaaaagaaataggtgatagacataatgtaaaggaaaagaaaaaaaacaactgtctgtgactatatatctgattcagttgaatgaatgagaatcagagttttaacaactgagattgtgcccacctacaagacacagtttagctactttcttgaaaataacctgtctctccagttggccaaac

SEQ ID NO: 3629 - DNA, 25 bp, Canis familiaris
  misc_feature (1)..(25): n = a or c or g or t
gtgcgatcgncgtccatcctgcctg

SEQ ID NO: 3630 - DNA, 284 bp, Canis familiaris
  misc_feature (1)..(284): n = a or c or g or t
ttgtgcccgatggcactnnngggtcannnnntcatnnnnnngtctctcaccatnncagccacagnnngntntgtcnnntaacccccagcgtggnnnatctcagactgtttactctaggggtcagtgtcnnnntctggtttctctcaagggnnnnnntggaaaaaagcnntaggganagttgctttgcannnnnngnnnnnccanntgnnnnagctgnaggnctgattgagcgggnnntcaaaatcctntagcctctgccnnnnnaccnnnnnctcttnnnctat

SEQ ID NO: 3631 - DNA, 604 bp, Canis familiaris
  misc_feature (1)..(604): n = a or c or g or t
agaaggtattttgtttctgtttaagcaaaatgncttcggaagaacttaactgggtaaggtagataaaaaatgcgtatgtccacatccacttctgtaggagtttaatcatagttatgtgagtaaaatgatgaacaactctttaaggtaatcctctgggtgaaggatcctgggaaattctctcaggtaaagaaagtttgcaacagatgtataatatatgtcttgagagttatttatgagaaatttaagaggattgttttgcttttctatattaaagatttaaggttttttttttttaactttgcaaaaaaacacaaattctacaaaagttttataattgtaacattgttaattcttagaactttttcgaaacaattacctgtagccaaattatgtggttatgttttgctctgctaggatttgaaatgtaatatgtgtggtaaatttactgtttgaaatttataatagtcttggatatggttagagttttggtaactttttaaaaaattgttccttcttctagtcacaaaggcaactgtgggtttatatttgttttttgaatgctaatttttctatgaagcgtctgaagttgaccagtcttttccta

SEQ ID NO: 3632 - DNA, 658 bp, Canis familiaris
  misc_feature (1)..(658): n = a or c or g or t
ttttatggaaatancntgatgcnnnnnnnnnnnnnccgatggcccatnnngcaacggaaaactgcaannaaacctctgtttgcnnnngcgagcagtaaatnntaaacacagaattgagagttcatagctgtcntgagctttaactactgtttcagaatgttgctggtgcataaatttgtcattatgtcagccgggcagctccgagcacgtgttacccgctgccactgctgccactgccggccagagatcgttagggcttggtacaagatgtttctaacatggcaaaggttttggattttgtttgtttgtttgttttgtttctttggaaaaaaaaaactgaaaaggaaaattatgcagaatctaaagcattcagattggacaacctgcttgaattctgatcaaccctttcattgttagcgttttgcacatgattgtaatttttatgtcaaaagaagccaaaacttgcaatactatttttagcagacaaaaaaaaaaaaagaactaagtataaaatgtataaatatttttgacttgaacatttggatggcactgggtgcaaacagaccattcatcctttggacggaatgtttggaaaaaagagcctttttacaaagagacggttgatgtccagtctggtgaggggttaagtcctactgta

SEQ ID NO: 3633 - DNA, 563 bp, Canis familiaris
  misc_feature (1)..(563): n = a or c or g or t
acccctcactgtgccccagacacacaatgcccgtgancagtngctgcannacgcctttcacatcagnnnctgaagagctgagggtggggggaacatgcacccatgcaaaaggctcagaaactcaccccttagtaagtactcagacttatagtgcctgctttcccctatacccacttcacaaggcaagcctcgagcccctcagaggcaaaactgccaaccacctcttttctgactctggttagctaacactggggcaggcacctgggccacagcctttgcccaccgcactggacctccactactcccacatgtgtgcaccccagcttggccaaccttcagtctagtggtggggcccaaagcatctggcactccccttgacgtctctgggattgggatgagtgcttggttcccatcttttcaccttttgctgctatggcagctgctggctcaggggcatcccacctttggtccctgggttccactgctctagaccagggcattcccattcttgcacccacccacggccgggagggccaaggctccgtgctggatatttaagttta

SEQ ID NO: 3634 - DNA, 185 bp, Canis familiaris
  misc_feature (1)..(185): n = a or c or g or t
gtcagctgtccatcaccccttctcctccccccatttgtgcttttttctcnctgaacagaaaagtggnnnnnnncccccattcatccccatatttgtccctctcatnnnttctccccatccaggaggagctctcaggcctggggtggggccccgggtgggcacgggggcgattcaacctgtgtgct

SEQ ID NO: 3635 - DNA, 644 bp, Canis familiaris
ctcctgagtagaggctttccagcccctgggctgtgtccttgtttttcgacactctgcctgggctcctctgtgtgcatttgtgtctggcctggagaagccaggtctgaccccctccttctttatagcttagtgttactctggcatttggttaagctggcttaatctgtttaatgttatcagtgcattttaaataggggcattgaagttcactcccaccaccagggctttctttggggtgcctgggccttaagacactagccaaactcccaattctcaaatcacagctagtagttcttgctcctggctgcaggccaggccccaaggggtctccttcctagggtcacaaagagcagagaggaagaggaatagcaactcagggcctgggggttgtgtgggatctgatcttagggactggatgcctctgcctggctgagtatagtgctgactgcccctcctctcctcctaacaggttctgaatagtgcctgagcccctgccccatagggctgaggggtgggactgggggtgtacaagtggcctacccttttctgttttcactgaacggcttgttctgaggtgggaagaaggggagagctctagattgggctagagggggtgggggtgtcagggaggcaagtgtgttgtg

SEQ ID NO: 3636 - DNA, 556 bp, Canis familiaris
cagaatcataaaagcaatttcactaaaaaaagacaagaaccattgtattaaggtattgaattatgtcagaagaccttaaatgactcttgtaccttcaaaagtgcctgggcttttgtaagcctcttgccacttttaaaattatccttcaggcataaatatttttgacagtgaatacaagggtgatccatcagaacctgaaccagatgaacagctactagttattttatcaaatacaggtgacatttaaaagttcttaactgcaagagatgagaaatctaaacctcgcctgtctcttgacaggagatgacagtgagttgctgatgaactgctgcccttttacatgtgggtagaaatataagggcatgtggcagcaagatgctgcaaagtcaaaagaaagctgcctttcctctcttctctctctcccttatttttatatttttaaataaaccagaaaacctcacactcagtcctgagtaaagaaaggaaagcactaaggaccgtagacagaacggcgtcatgaagcatgattgagtcacgatagcattgtgagagttgt

SEQ ID NO: 3637 - DNA, 544 bp, Canis familiaris
ttgtaatcagtgaggcagtgactttatcatagatcttaagttgaaagtagtaaggtcagacagttggagcactcatttttaatgaagaccactcttcacttgataagaattactgatgttttatttccattgtaatttaaaggtatttcattagtcacataaaacaaggtacatctgctaagtccgtatttgtagatgggtctttgagcctggtttaaggtcacatgaagaaagagtttgaggttgtcccttaggactggaactatcacatataagagatttcttgggcaaaccagtgtgctgcttccagctgacagaaaattatggctgagaaaaaagagtgagtcttgaagtagataaaggtttcactcataaatgtgtgaatcattaccatattgtttccatatgaagatatatgatgttcgttgtgtgtaaaatctaacaagcctgtgatgggctattgggaaaggaaaccaggatatactgaagaatgagaacttaaaagcagggaaaaattatttgttactgttttgtttgaaaataa

SEQ ID NO: 3638 - DNA, 647 bp, Canis familiaris
  misc_feature (1)..(647): n = a or c or g or t
ttacacaacatcaaaaaattcacactggtgagaaatcnnnnnngtgtaangaatgtgnnnaggcatgtnnccatgtgaaccatcntagagaacatcagagagttcacactgctgaaaaaccttttgaacaaaaagaaggtgcagaagcttctatacaacattcattcctgccacagcacaaggaaaatccatgatacaatttaacataagaaagctttcactggtcactcttccgcttatagcatctcagaatagtcatgctcgaggcaaatttagagaatagagaaatcactttttcttagtgatcacacatacacagtgtagaatttttttcctgaattggcttaatgagtgcatagaagcctcctaccatttgagctttgtctcacttcagatttgttctaaggaataactgttaatgcaacgtatgtgggaaagcctcctgctgtggtacacaccctccctgttaccatcaccatcccacctctttactcttgtgacacattgggaaaatgacttgttacccctatgtgttatgtgtgaaatggggacaatcacacctacctaatactgctgttgtgctgagtttggtacatgtaaactctctgaaggtgtatctggaacattgtgtaagttcaataaatact

SEQ ID NO: 3639 - DNA, 64 bp, Canis familiaris
  misc_feature (1)..(64): n = a or c or g or t
agaagctacactgcagttagcatctgtatcctccagttagtnnngccagtaaaatattcttagt

SEQ ID NO: 3640 - DNA, 675 bp, Canis familiaris
  misc_feature (1)..(675): n = a or c or g or t
tgaaacgacttcaggctgctggcaatgcagtgnngcgagnctcnnntaacctggtgaannnagcacagaaggctgcagcctttgaagaccaagagaacgagacagtggtagtgaaggagaaaatggttgggggcattgcccagatcattgctgcacaggaagagatgcttcggaaggaacgagagctggaagaggcgcggaagaagctggcacagattcggcaacagcagtacaagttcctgccttcagagcttcgggatgagcactagggcagccacttctatttaatgcagacccagcccagagactgtgcctgccactaccaaagccttctgggctgtcgggcccaagccgcccaaccccagcactccccaaagtgcctgccaaaccctgggcctggtcctccccagtcccgctgcacatcccctgtcccctccctgactccaagtgccttcatgccctagggccccctaagtgcctgcccctccctagagtattaacgctccaagagtattattaatgctgctgtacctcagtctgaacctgccagggctcctgcccgctccaccctgccagcagcttccagccagtccccacagccttggctctactcctcttttttttgatactgtctaccccaacccccaactaccnnnnnngccacggggttgtaag

SEQ ID NO: 3641 - DNA, 656 bp, Canis familiaris
  misc_feature (1)..(656): n = a or c or g or t
gaatcactgaggggcatgtgtnncgggcacaggggctcccaaaccaagcagcttctgttttccctctgcaccgtgaccttgtgtgtctgtggcaggagactttgcaaggcttggtgaccgacaggactcgtgtgcactgctctttgttagcaaagggtttctgtctcttgcagcggggcttggctttctcttcacattgacaccacatcctgatgccatgagctgagcactagtgagttcgccagctcacaccctggccagaaccctctgtcacaggaattcacaacagttagaggctctaagcttctgtagctcaggaacataacttgtatatttgtttttttgtttctttgtgtgggttcggtgagaacctggggcggccctcccagcaggctctggttctactgtcgccccagggtggctttgctgggatgatgtttgcgtttcaacacaggaccgatgcaggttttcctcttactgtttcaatgacttttattttaaaaacacgtagcttgaaattttatttttgtactgatcttagtttggatgtgccactttggcaccaaacatgtatgtcatttttatttccattttgtaaacatgtaaataatagtgataacttgttaataatagtaaacctttgtacctcaagnnnn

SEQ ID NO: 3642 - DNA, 562 bp, Canis familiaris
  misc_feature (1)..(562): n = a or c or g or t
aaaaattagtactttngnnagatgtttaattaanannnnaagtaataacattaactttaaatgtnnntttattatattgtaaaatcactaatgctcatagtctgtaatcagtctttataatcaaagatttagttccctagcaaaaacaaatatttacttggaatgtaagaccatcatattatttttcagtctgtatatcttacaaatttaaatgtatcaattaaatattatgtcaaggatgtaagatattagcagacctgcttgactaagagtatgttttagtaaatacttatgacacaaaacactaattaaaattcatatttgaatcagctttgcattaatttaacaaataaagactgcactttctttatcccttacacttaatgacatattctaattaaagttttaatttcaatagttgatgtataattgaggtgataaattannnccgttggcttactgaaatttttgaaattcatatttatttcaatatggcatattgaaaattacttccaatttaaaaataaatgcatgatatgtgatatatgggaatatgtgtttc

SEQ ID NO: 3643 - DNA, 539 bp, Canis familiaris
  misc_feature (1)..(539): n = a or c or g or t
aagttcattaannnnnnnnttctttttatttttttattttttttnncnngtttctttttaaggaccagaatcaggaatannatatggaaaaatcagtctataaattataacattgacatagcatatatcacagagttgcccctttttgtttttaactgcctctcatgtatattcttccagggcaatatggaaaaaggaattttttttaattttgacattgtgacagtttggataactagtattccaagggggaaaatgtttgcctcttttatttccattatgatcagtaaaatgatggtcacacagcttcagttggaataggccaggtattacctggtttcactgcagatatctaaagtccaggtgcttctagtaataacagcataatttttgaagcccagaggtacatagcaggctgattgacataatctataatttgaacagcaaaatcttatcttgcagcactatcagtactatgctgaatttattatgtatattacttctaacatccaaaagtaaatacttgannnttatatgtt

SEQ ID NO: 3644 - DNA, 473 bp, Canis familiaris
catgatgtacaggaaaggcatctactccagcacttcctgtcataaaactccagataaagtgaaccacgcagtcctggctgttgggtacggagagcagaacggaataccctactggatcgtgaagaactcgtggggcccccagtggggcatgaacgggtacttcctcatggagcgtgggaagaacatgtgtggcctggccgcctgcgcctcctaccccatccccctggtgtgagctgccgcccgggccggcgctggagtcctgccctggaggaaggggcccgggaccccagggccctcgcccccatgccgtgccctgaggcctgaggaaaatgaggaagaagagtccaccgaacgagcgacaagcctaccacgtctcccacatgaaggtggccgccagctgtgtgccttcaacactcctgttcacgcacttaaaccaacggccaagaatagtctttatctcccacatttggaga

SEQ ID NO: 3645 - DNA, 440 bp, Canis familiaris
  misc_feature (1)..(440): n = a or c or g or t
ttgaaaatgagtnnngctgcagaatagagctccctaccttccattgcaagttttgcaaagtgaagaaaggctcatacttctcatatttggtattagcacaattgtaagacggccaataacgtttgtgcgttggttattctattaaacctttctgggaaagacgaaagcttaaattcgtgatgtgggtaagttagattgtgtctaacaagcagtgcaatattcagctgtgccagaaaggccccggtggtgaaacgacttgttggcaggctggacggtttgggttagtgtcctgcattgatttcccgtggggcacgtgtcccctttgactgtgaatgcaaagtatctaaagaaacccttcgctcttacgaggtaatttacatatttgcttctgttgaaataactgaaaatgttaaatctaacanttgtttatgtcttgtata

SEQ ID NO: 3646 - DNA, 636 bp, Canis familiaris
  misc_feature (1)..(636): n = a or c or g or t
ggggtgtgaagngccatctctattttctaagtngaaatcacgctgnngccnngnnatgctatnnnnnnnctnnnagnttngtannnnntgcttctgagatgcacttcatcttcctgagactggggcaaatctatctnnnngagaaagagtatgaaaaggcaaagaaaacctatctgcaagcctgtaagagatcaccttcatgccttacctggctaggactgggaatagcctgttatcggttggaggagcttacagaggctgaggatgctctctctgaagccaatgcattgaacaactacaatgctgaagtgtgggcatatctggctctggtcagcctgaaagctggacggcaactggaagctgagcaggcctataagtacacaatgaagctgaaactcaaagatgagactctgcttgcagagatccacatggtacaggagacagttggctttggaaatccatctttctgacctccttccagctgaagaatgttctgtatgggactcggagctcctttccttcccacagaaattaaactctggacgtcgtgaaaaataaggcttggggatggagaatactgtaagcagaaacccattcatttacttccgttggctgtcttattgaatggctgttact

SEQ ID NO: 3647 - DNA, 346 bp, Canis familiaris
  misc_feature (1)..(346): n = a or c or g or t
gatgggcctgngagagggtgtgggtnnngtagctgcgtacagacaggggcaggggggttggggggtgggcagagcagacctgcannnagtagcacgttgcgggcagtcggnnnnnaggtnnnaatgcccactcgcttggtgtgtccctccagnnnnnccactggctctgtcagtggggaggtgagcccatnnnnnggganntgccacannngtgggaagggtggggttgccaattgagacctctgcttggcngngnnnccagcagcctcnagcnacacctgtgaaccaggcctgaccacagcnnncgtgcctcaccatgactgtacagtnnnnnnnnnnnnnnnnn

SEQ ID NO: 3648 - DNA, 566 bp, Canis familiaris
  misc_feature (1)..(566): n = a or c or g or t
gcccacactcatnnctgcggggcatgggnnaaccagcgtgagcttacactccactctgcacacaccatcccacagcaaaggacatttctcatgttggccaatgaaagcaaaatgaaggggacattttggaggaaagatcttagttttaaggtcgatctgccataaatctgccaaccttggaaaaaatgaagtctggagacaacacactcagcagatctgacctggttactgtgatccattctccacatctgtgggttatggtttactgtgcgtactaacaagtacactcaagttaggaaagggaaagcatttctcccacccacacccttcagagtggcccctcgccctccgtggctgcgtgaccctgagcacttgggctgctttagccagaaggctcttctcccaccagatgcatctctgcacctatgccatgagggaatgataccacaggagtataggctggggaaccagcatgtgtgatacaaagttggcctctgagaataacaatggggatgaagatgatgnnnnngtaaacagttctccttaaaatgtataaatgaaaaact

SEQ ID NO: 3649 - DNA, 634 bp, Canis familiaris
  misc_feature (1)..(634): n = a or c or g or t
tctattccaggagtgttcatcanntacgtgatgctgaagaaccagaaggggaccaaaaaagctcagtgaaggcccagtggggctgaggctgtggcacccctctgccacccctccaagggtgggggtgcacaggacccatccaggcacctcggctccctcaagccagggctccctttggacatcccggggatggagctgttgaggacctaccacataggcctgctccttcctgctcaactttccagaagccaggaaggaggattactgggaagcctccctcctacccctttctggttcagggcctgaaagatgctggttgtctccctctcaccttcagactccctgtcaccttttcctctgagttctatcttgtttcagtttccctcctgtcacctgctgatgttggacttggtaggttctgaggcaccatgcaaccttcccccacgtgttctgctcctcctctgaggcagctttcctgggtctgacatagccccaggccccaccaggacttcaggacctggaaagcctaaggggaggaggactgacaggccaggggttatcaccaggcctcagggcacattaggggggccatagtaggcccccagaccaactgcttctcatagaggcccggccc

SEQ ID NO: 3650 - DNA, 436 bp, Canis familiaris
  misc_feature (1)..(436): n = a or c or g or t
gccatactggtgaaaatgcgtgtatttgncttgaatgtggcaaaaacattagctgagagccnnnttgggtttgcaccaaagaaacccnnnnnnaggaaagaccntacaaagnnnnngagtaagaaagactcctgtcagtgagcagctcttgtggtacaccagggaactcccataagggaagaaccctcctttgagtctgaaaaaagccttgctagaaactcctaccttatcaggtcccaaagaacgtactctgcacagaattttgcgccaatgagagatctcattgtggactgtgtacatatgttaggtaatagttgacccatatggtagagatgatttttaatggagtcagtatgtaaacagttgcttagatgcctggaaccttgttctgggaggagctaggcaggtcagaagtggcctgatgggtaactcaggt

SEQ ID NO: 3651 - DNA, 554 bp, Canis familiaris
  misc_feature (1)..(554): n = a or c or g or t
acccagtnctgctnnatgctgctttgtgtgtgggggctgctggggcgncaatactaaagtggagtttctgcctcacacacctgtaagcaggtggatgtaggagtagaggggcctttacctgccctcccctctcctctgggagccctgccaggtggaaggaggcagtgccggggggtggggggggtaagggaacaaggggctggtgtgtcagggtggcctctgggtgagaaccacaggggccgtatgtgtttaacttattggctgacaggcttcccatcctccgcctccttaggacaccgtccaggttctgggattgcccaaccctgtgccagcactgcagtgtggctgtgatccatctgtcttggggatcaggacagggtattacctgcagatggggctggagccagggaaagggcaggcacatgccaggtcagaatgaacccaacttttcagaagcacctccctttcccccacacctcccccgtgttacattgtaatatatatatattcccactaacctggctgatagtggcatcttcctgcagacatttcaa

SEQ ID NO: 3652 - DNA, 582 bp, Canis familiaris
  misc_feature (1)..(582): n = a or c or g or t
ctgttatgtgttgaactaatcatgctacaaacccagggtggttttgatcataccaatcagtaggtaacatattaagggggcatgggagtnnagggccatatctttcccgtgccaagcagagattagaaaattaacatggaataccttctacatgcaaagccctttgcatattcagcctcatttccactgtttccttcgcaatgccttattggaaaacgttggctttcttttgtacacaaggaaaaccttttcatggaaagatccctctgattgaaatggagcccttttgtagcataagcagtttcagaaagaaagaacctttacctctctagctctccttcacctctgtatacgggtagtcatttaattctgaagttgggcttagtgcccctccccgttgcttgtgacgtcaccaggaccagtcttgagtcccttccaggagtcatcagcccttaaccacagggcacagtgggccggagggagggacccaaccaacccntnnnaccagcattaagtaacacacctggaacaactgccctctggaaataaaatggaggcacaggcctgacatgcttttcctgc

SEQ ID NO: 3653 - DNA, 528 bp, Canis familiaris
  misc_feature (1)..(528): n = a or c or g or t
aaaaaggaacgaaccaaaatcgagtttgtgacaggnancaagaaaggtaccacaaccaacgccacagccaccaccaccaccacagccagcacagcagttgcagatgcccagaagagaaagagcaagtgggactccgccattccggtgacgacgatagcgcagccaaccatcctcaccaccacagccaccctgccagctgtcgtcacggtgaccaccagtgccagtggctccaagaccactgtgatctctgccgtgggcaccatcgtgaaaaaggccaagcagtgacctgagggaccagcttggggtggcttggacatttctttccatcgaggggaggagccacttcaggacttggggagactgtgcagcccggagaccaacattggcacagaggtgccgccttgtttatttcaggactgggatctgctccccagatgccaccccaagaggagcctctttgtggcgttccagccgggaaaaggacatagctacagaggagtcgggtgctgtggacggtgtccacacacc

SEQ ID NO: 3654 - DNA, 597 bp, Canis familiaris
  misc_feature (1)..(597): n = a or c or g or t
gttagatttgatatgtcagctttattnngtatttccttccatctngaagggttattagaccattaaggtttatatattaaaatgtgttctacttagtttgcttgttttgaagaaatctagaggtcgttacgacttctaatccacggagttgaggagttgaggctgacaacgttcgtggtcgctgcccctgtcgtagaagaagccattagccgcgggctgtcttcgttatcattgtaacttgtgtgtaaagatgcctggaagcgtatttaataccaaaatgcatctgaaaccatcaagcagtgctttcatttcagatctgtccgtcgattgtattaaaattcaaattggactgtaacagtagtagtggcctaggactgtaccgggtgtgacgagctttggacgctgcacagtctcctcgccgccctttcctgacggagccagcgctggactcaatgctcctgctgtgctgctgcccatggggccgcaaccttcactgcgctggaagtgaggcgtgtgtgtgcccagtcacgtaagggaagctgtgattgtgtgctacattttgtactttttttatttgaattaaattatgtttttttt

SEQ ID NO: 3655 - DNA, 499 bp, Canis familiaris
  misc_feature (1)..(499): n = a or c or g or t
agannnttgtcaacnnnaaagacatttcaggctttggattttaaataaactttgggagactaatatcttcacagtttgttaatatattttttgtnntacttgagttttagctctttttttattaccatgtactaagttttggntcttcctcttcatatatgttccaggaccctgtccttctccatattacactgtggtctataatcatcttgccaaattttgaaactgcacacaaagagtatatatgtgtactatttataatgaaattgcattccatagctttcctgaaaatgtttgatttcaaaattttaacatactgataaaagttactaagaaacaaacatgatttcctgacataattaaaactgatatggccaaagggatatagttgatagcaaaacttgggtatactgtagtgtactttataaaattgtaatataagcatgtaaaataattatatattttgtttttctgaagtcacttcaagtggcaactactg

SEQ ID NO: 3656 - DNA, 536 bp, Canis familiaris
  misc_feature (1)..(536): n = a or c or g or t
cgtccaggccttgttcgaaggtgtcgtgcgncagatacgnntgcgcagggacagcaaagaggccaacgcacgtcgacaagcgggtacccggcggcgagagagtctgggcaagaaggcaaagcgtttcttgggccgcattgtagcacgcaacagtcgcaagatggcctttcgtgccaagtccaaatcctgccatgatctctcagtgctctagacttcacaggcacatgctgcgttgtgcatacaaacgggcagtttggtgggctggcccagtcagctgccctaggtgcctcaaggctggctcagactctgggcatactccacctcatggtcatggacagacagacagtgctgcccaggctgctcccagtggccttcaagaactgggcgcacagcgatgcatgtacaggcccgtgtgtgtcccccagcagcagcctgagcccagcccgtggggcaggcctgtgtgtgcggacaggactctacctttctccacacttggggtgtgcatgctctggagggaggctgttcagtgcagtggt

SEQ ID NO: 3657 - DNA, 482 bp, Canis familiaris
  misc_feature (1)..(482): n = a or c or g or t
aaagtgtatnngatattaaaagtttaatattgataatgttgttgataccttnnnnnnnagtttcagctaagtcgtaggtcagactctgttgaaatgctgatgtcaacttcatttgaagaaaattgttngaattccaaagtcagaggagttgttcagatttttacaatgtctttccaattaacggtgggnctgaatgtgtttagtggtccaactttggnnaatggggtgtaccggccattaattcacatgactgtgaaattctgtagcatcctttcccaaacgttggaccacagaagtttgtttttttttttccacttaacagttattaataacctgcaaaattagtctattacatggcagtggttcccagacctttggatttcatggaccagtagtaacatttccgaaaatttgagggacagggtngccgatgtattttgccaagtaatctgaaagaaaccactgtattaacactttttttt

SEQ ID NO: 3658 - DNA, 648 bp, Canis familiaris
  misc_feature (1)..(648): n = a or c or g or t
ctgagaagcttctcagtnnaagagcaggtacattgaggtcagctgctcctgggttctagaggcaagtggnnntctgcccatctcctgcccccttcgtttgactggcaaacacagggtgtatctctccggttttctgttgctggcacgggacgggtgggaaagagaaagcacagtggtttggggaaacaggctttctccccgctcctggagctcaggcctcccacacgtgttcctgtgcctcgcagtgggtgtctgtggcctggaccttgggcgtggcgatctgcttgtgcctggagcaggctggctgttgtgtacaaccacccatccccctgtgctctccgggtttcactgccccagaaccacactaactctccccatgccactagtgtcaggccccacacggaccagccttctctgctgccttatctagcctacctagatatttatttcctccgtttttctcttaagagtagtgaagccatgctggtgctcatgccctgagcagatgcctccgctccaggggaagggagtcaggaagtagagcacacaaactgtgatcctgaagcattgggtttccttgccgatcactctgtgaatcctcaaggactcgtgaaataaatgctagagcactgaacagcanngcgnnnn

SEQ ID NO: 3659 - DNA, 546 bp, Canis familiaris
  misc_feature (1)..(546): n = a or c or g or t
gctgtcannnagctgcgggtnngcgcggtgcacacttcnnnnnngcccctcgcccgcatcggtgagaatcataccgagcatgcgcnnaaggtcgcctgaattccctggtcagtgccccgggtgccccgcgtgccctgcgtgccccggggacgatgtgnaagccacggcaagcctccgacctcaaaataactggcggtattctgggcagcgctttatcttgcgtgagacctggttcctacgcttcgtggaaattattatccgggtagatggatgataaggcggcgtttagagacgcccaaaaccacgacacgtgtggttttcagcaaggtccgtaggccagacttcaagtagaacgggggtgccctacgattctctctggtttttccagaatgctgtgggaggaattggccagggctttttccaacagaaactcagggttggggttccctgggcggcttagtggttgagcacctgccttcggcccaggacgtgaccccggggtcctgggatcgagtccctcgtcgggctccctgcatggagcctgct

SEQ ID NO: 3660 - DNA, 508 bp, Canis familiaris
  misc_feature (1)..(508): n = a or c or g or t
gtagncagtcacagcatctnngtcccttgtggggacgggtcagtaatttaagtnntcttaaattcatagaatctttactatgctaaaaaatttcatacagagctatagctattttagagatcttgttatgtataaaaccattttaaaatagtgttatatgcatttcttttccatagcagaaacttttatttgcaagtgtcagtaaacaaaatagaatactctcagattacacccttcaggtggcaatagtaaaagcagtgtgccttctctgactgtagagagatgtactgtgccactggaaagaactgcctaggatctgtttagtgtaagactatgtgtggacaactcggacagccctataagcccaaggttctcattagtaatgcaagtcaaagaaggcagaggcatgtgctaaagaacagacagcattcttgagttgcttttcatctactcctttctgtacaaaaatatgcaatggagaacttcatttggattgttttagcctagg

SEQ ID NO: 3661 - DNA, 563 bp, Canis familiaris
  misc_feature (1)..(563): n = a or c or g or t
cagcttatgtggnncaccccatgcattgttagtgtttcagattttatggnnatctccagcagctgtttctgtagtacttgcatttatcttttgtctaaccctaatattctcacggaggcatttatattcaaagtggtgatcccttcacttagacgcatagggagagtcacaagtttgatgaagaggacagtgtagtaatttatatgctgttggaatttgtgctagcagtttgagcactagttctgtgtgcctatgaacttaatgctgcttgtcatattccactttgacttcatggagaattaatcccatctactcagcaaaggctatactaatactaagttaatggtattttctgtgcagaaattgaattttgttttattagcatttagctaaggaatttttccagtaggtgctcagctactaaagaaaaacaaaaacaagacacaaaactattctcaaacattcattgttagacaactggagtttttgctggttttgtaacctactaaaatggataggctgttgaacattccacattcaaaagttttttgtagggtggtggg

SEQ ID NO: 3662 - DNA, 686 bp, Canis familiaris
  misc_feature (1)..(686): n = a or c or g or t
gtcnacacatttgcattcatcatggctgccggcccagcntnnnnntgctgccacatnnnnnggtgcgagcccaatgctgccagcctttcagaggctgtgcaggctgcgtgcatgctccgctatcagaagtgtctggatgcacgttcccaggcctccacctcctgcctcccagcaccccctgctgagtccgttgcccggcgtgtagggtggactgtccgcaggggcgttcagtcgctgtggggttcgctcaagcccaaacgcctgggggcccataccccttgaagccctcagtcctccctccacctgcttgcattgagccccagggaactcaagggtgtggagcagggaggggccctagaggctagcgttaggcctcaggttccccccaaagtttccccactccagtagctggggttccctgcctaggggctggggagagagatacctcatccctgcaatgaagtgacaatactggattgataagaggagcaagaagcaaggccagccccgggctctccacccccatgtttcaggtggagcaggaggaactggtctaggccaggccccatcttggtagggtccggcaggggcagtaggaggggactggttcaggcatgggtcccctccccccgttccatgggcacctctgctgtactgatatcactaataaagtctgtctgcnnnnn

SEQ ID NO: 3663 - DNA, 708 bp, Canis familiaris
  misc_feature (1)..(708): n = a or c or g or t
gtgacataaacacacaaaccagtactngtnntgtgttagagtgaatacanntnnagaaagagcnctgngtctccagcccctcntggtcactccttctctctctccnnnnncggnnnnnnctgactcatgggataatcattgccttgccacctggaatgcagccctagacagtctcctgcctgtttcttgaccatttatggagtcccattggatggtatctgctgtgacttgcaagtcagcacggtccgtgctgagactcaccgtgttgcacgtggctagggttcgttttcacagcactatggtgttcctcagtattgtgggacccaggaaatttaacaaaaatcccctacccctggacaagcagagcaggactaactccattttgtgctgcacccgcaacctcctgtatgaccccccacatgacctgcttattgcttaaggcgctgccccaccctagtcaagccgctgggcacgccctaatcggaaatcggctcataacaatgtaactctgccttatgcccgccaaaactgaccaaattaataggccagttcaaatggatactatagggtaaaatgtaattcaagtggccacctgcgtgtggaccgacatgactatgcaactttctgtgtacttcattggccactggcccctgtaaagctgctacgcctcttagtcttggggtccaagtccctgctccgctgtgtcgg

SEQ ID NO: 3664 - DNA, 718 bp, Canis familiaris
  misc_feature (1)..(718): n = a or c or g or t
catgctccnataantatgggaatgaagaaagtactgaaatcagattaaatataccttgggttnnagatcaggttggccntanncctgnnnnnannnaaaccctctcctgtgaggatgagcaaaaatattctccttgccctgacttgctttctggacctgaggcttcaggacttgtcgcttcagttagcctttattagcaccaaagactttatgannntnnnatacaagaacacacacnnngccccacctccatcctccctgcagnnnaatctggctctatggctggannaccagccnntccagtgggaatgcagagcttaacgtgtgtactgcttgtgtgtgtgtgtgcgtgtgtgtgtatgtgtatttcacctcccactctttccccatctgctctgggtgtttttgtttttgttttaggtttacacagagaggagttaatttatcaacagcctaaaactgttacgactttttcttatagtttaaaaaaaaactgtaatctcatggatagctcccgtcctcctcctccctctcccagtctgccaatcactctttcatgcctatgtatcccaggctgctgtttccccaccttctgcaggtgtatgaggtggagagcttggatagctttcctctcactcgttgttcaccctacttgaaaattaaaacaagaaaactttgcttcaaagatttcacctgtgggaaccacaattcctggttg

SEQ ID NO: 3665 - DNA, 437 bp, Canis familiaris
  misc_feature (1)..(437): n = a or c or g or t
gggagagtaacagcagccatgtggctctccggggcaagaaacagaaagagtgctcagagaagtcatgcctgaggacaccttctctgaagaagagagtttccgaggccaacctggaagggaaaaaggactctggaatgctgaaatacatcagactgcaggtgatgagcctgtcgcctgctcctttatctctgctaatcaaggcagcaccaattctgacagaagaaatgtatggagacatccagccagctgcctgggagctcctgctcagcatggatgagcacatggcgggggccgcagtgagaccatgtgatagatggttgatggttttgaacaagcatttaagatcactgagaggacctaatacagcaggaagactatagtgataactattaggaatgtaatgccaggagaccaannnntgcttctcagccagagtc

SEQ ID NO: 3666 - DNA, 290 bp, Canis familiaris
  misc_feature (1)..(290): n = a or c or g or t
tagtaagctggatgggagaacaagcnnaagcccttggtgttgaaatataccctggttatgnnnnnnnngaggtcctttttcatgaagatagtagtgtaaaaggaattgccactaatgacgtagggatacaaaaggatggtgcaccaaaggtataatcctggatggttttcagatttttacaacttttatttttgaatttgcgaaagaaaagctctcaggctatggatctctcactgtgcaagattcctcgaaacnnncaaggaaaaaaaactccttgctttcccataata

SEQ ID NO: 3667 - DNA, 327 bp, Canis familiaris
  misc_feature (1)..(327): n = a or c or g or t
acttcccccannggggaagagaaggggaaaaaaaaattgaagtatagattcccctcccccatcactgaagctattatcatcgcttcttccctcccccaaaaagctgtgaagccctttgcctcgctcttgacagcgtggggggccggtgggcagggactgtgagtttgcatctctggattgtttnnnnnnnnnctnngggtactcattcaggtgtgggggtctctccagcctcagccatacatgtttcttcagaatcctttggtcaacggagaccttgattttcaggcagtttggtctggggtattttcgtttgttctgtttggggtt

SEQ ID NO: 3668 - DNA, 563 bp, Canis familiaris
  misc_feature (1)..(563): n = a or c or g or t
gccccaagaggaggtccccnnngaagcagcgccgggaaggcacccgcagcgcggacaccaccctggagcggagggagaagcccgagcggaggcgcgagcgctcgcccggccgcaggagggacggctcgcccgggccgcggaggaggtccctggagaggctcctggagcagacgcgccccgccgagcgcaggagggggatggggagctcgcccgagcgcagggccaagtccaccgagcgcaggcgcgcgcgctcccccgagcgcaggcgcgagcgctccctggagaagcgggaccgggaccgggaccgggaccgggaccgggaccgcgaccgcgaggagctgcagcgagggggcgcccgggggcgggccgagccggggcccaagcccgcccccgccgccgcccccgagccgaggaggcggccctacaaggaatgcagcaccgacctcagcatctgagccgccgcgcgccgccccgccagcccggatggaccgtgtgtgtcccagggagcgaggtcgcgaacctgagagcatcctcgtttacgcacctggggacgcggctcacac

SEQ ID NO: 3669 - DNA, 523 bp, Canis familiaris
  misc_feature (1)..(523): n = a or c or g or t
tactatacacatgtngagcaaactttatagaattcttaaagaagagcgaggaggactcagtcaagcttaatgaatctttttgcttcctgcctacagtactaagctaaagaaactcctctgttattaatagaggtatgagcacagcaggccctatctgagaattaaaaatcaagatctagatgcctggtcattgacgtgatatagttgagtctccatatatgctaccatcaaaaaagataattgaaaagagatgtgtttgcattctatcttttggttctaaactacatggcaaagcaaaaggatcttgtaagattcttccaaggaaaaagacccacagcatagaccttcagatggatattataaccaagttccagggtagcgtattttcttaatgataggagacattatgccatgctgctaactctgagtataagtcaaaaccagacaaagcagatttcctctccttctgaagggggatttttactcttattttcagggatgaggctaagtaatcttctgttga

SEQ ID NO: 3670 - DNA, 526 bp, Canis familiaris
  misc_feature (1)..(526): n = a or c or g or t
aaaaaaaaaaagaaaaaactaacaacctttgtngaaaactaaatctctcctgctgcctgtctctctctccacacccagtagattctgctgcgtgctccccctgaatggaccgcaggggtggccatctttgaaaagggaagtttgggagataacaacgtttatgtaatcttagttatttgtgaagcctttctttgcctgttttctgaggaaaacaaaaaaggaaaggctcccctcttaccccatctaccctccttcacttcttcagaagaatcaagatcgtcctgtcttttctgtattctctggggtcccaagcaccctgtttcacccttaacaaagatggctcccaggcggttgcttgctcagttgattcactcatgtatcatgtgcctgctggtttggcctgtgctgtttctgctctgtgcgccctgacttcctgtggtagagaaagccttattggaattggtggttatgatgggaggggaaagggtggccctttgggactcttgataaaaatgttaaagtttga

SEQ ID NO: 3671 - DNA, 394 bp, Canis familiaris
  misc_feature (1)..(394): n = a or c or g or t
ccgccctcgtcacttcccacaagagcctctgccggggggtgggatgccaggacaccccctccacactcaggacagagctgaccctggccccatggacctcctggagggaggtgggggcttcaaagactggggaaccccttcctattgactccagagcccaggcctgggaagggcccaggatcccctctgccctgtcagcctacctactggcatctcggggaccccagacccaccacccttttcccactgacacttcaaggacgtgccccctttactctcagaaccttggggaaggcggctggactgctggggggtgggcatcatggggttctggggtgggcaggggttagtgtggggggagggagggcaggggtgnnnnncttttgcatgactg

SEQ ID NO: 3672 - DNA, 566 bp, Canis familiaris
  misc_feature (1)..(566): n = a or c or g or t
tattaaatgtagaactatgaaaaagttgaagataagcctcnnnaatgcaaatctctaaattttaataatgcaagtcttactctaacttacatttttgttggttgcctatataggttataaaatgctctctctgaacatcattatagggtctgtcaggcactctaacatttcctatttgccaaagggaatggaatacatgagtagatgttaacttccctgaaatcactgccttccacatgcaccacaggaatacaagcctactatgttagatgggaaagaccactacaattaagtggtcatttgaaagtagagattctgttggacagaagaattagaggaaggtttatactctctgacacacacacacacacacacacacacacacacagaaaagccttaacaaaattcattagagtatattgtaattagttttgtgaatataaaattaaagcacttatatttaaaattagaattagtgactttaagattgaatgttgaatcaaattctcaggattttacagatttttttcctgctattcaaaatttaaaataaagctctcnnnnnn

SEQ ID NO: 3673 - DNA, 338 bp, Canis familiaris
  misc_feature (1)..(338): n = a or c or g or t
cctaaatanntaagtcacaggcacccataggnnntaatgaaaccccataaatgggttggggggggggtggtggggataggggaaaggaggttttgtgctgtggggaaacaatggccagttcatcttaccatgtatccgaggcctgtgtttttaagacnnnagggggcctttgtgttaattgcactgataaaactctcctgatagagcttcccctggaacgcggggacaaaagatgtgacatttcgccccgtgtgaatgccacactgccaaacagacattttctaaagcagagaagtatcggtcccggcaccccccacccccaaaaccccccgccttag

SEQ ID NO: 3674 - DNA, 495 bp, Canis familiaris
  misc_feature (1)..(495): n = a or c or g or t
gacacngaccctggagnngcgggctagtagcacnagtcaccagttctgtgaatttgcagngctgtgcccatgttcccaggaccaaacctgnnaggctcgggctctgcttagcgtggctcctgagtcagctttttgccccacgcccaagctttaggagctgagcaaggcttgccagcaggttgtgcaaaaggaattcaagcgagcagccaatctttccagatcccccatctctgccctggagatgcagctgcagtgaggggcccggcctccgcagacccctgccactggcccacagctcctggggcctctggtctgttgtactatagtatacttcgctgtggaaaatgtcacgtttagtcagtcaccttggagcccactcgcctggtcccgttgtttccctgcccttctcttgagcgccctttgatttctctcgtttctgagaacagtacatccgttcanctattgtagagtannnnnngtgactcaatattacca

SEQ ID NO: 3675 - DNA, 212 bp, Canis familiaris
tagggccacataaatccaaggcattaattgtaattactgtgtaattatactgattgttattgcattaaatatgtacttctacacatgtgtttccatagttacaatggcaagactacatttagaattaacacataatggacttctttccatgttttaattatttagcccactcatcgcaaattggaaaaggactgataatcaaatatttacag

SEQ ID NO: 3676 - DNA, 464 bp, Canis familiaris
  misc_feature (1)..(464): n = a or c or g or t
tcagctgcatgagctgggtgagcacctggatcttctggacagcacagcagagccgggagcatcgnngcctcttccatggcatcaccgggcagccaggctggtgggggctgaggtgcccacaaagaaagcatggatggaaaagcccaaggaaagggtataggaaggagaggagggtgcctgacgagagggaggaggcagcctgggagagcaggggtgcaaatccagcctctggagcccaggtcggggaggggtgctttgctcttttctgcgtttggtttctttttcagaggtgccgaggccagcaaagctggcctggggagcccagcggggaaagcctggctgctcaccccatccttcttgccagagatgttgcaagggtggcgtgctagctggccactccagggcatgggggtgtggagttcttttggctcaggaaaagcattttaagaaaaccaccccccacc

SEQ ID NO: 3677 - DNA, 488 bp, Canis familiaris
  misc_feature (1)..(488): n = a or c or g or t
aaggagcaggctgagcagtggctgaaggtgatccgagatgtctacagtggctgcagtgggccggcggattcagaaggnnnacccccatcaagctccccagtgcacaagacagagctggagaagaaactgtcttctgagagacccagctccgatggagagggtgttacagaaaatggcatcactgtgtgtaatggaaaagaacaagttaagaggaaaaagagttccaaatcagaggccaagggcacagtgtctaaagtcactgggaagaagatcaccaagatcattggcttggggaagaaaaagccatcaacagatgagcagacctcatcagcagaggaggatgtccccacttgtggtaagacggagggtgcttgggtatgaacggcgctcatccagtgcatggcctcttctggagttgcgtttgcatctgctgggctctttcaagacagacttgtgatcctcagaatggcgggaaatgtactacgttt

SEQ ID NO: 3678 - DNA, 402 bp, Canis familiaris
  misc_feature (1)..(402): n = a or c or g or t
ggcagcaccagcagggagtccaggggtgaacacacccagctgcggaggactnnggtgctnnaggagctgagccccaccctgcgcaacaccgacntctcttgtgtctttgctgatccctcgcacactacccagcagcatgttgtcctggcccagctctgggctgggctggagactgtggcgccttctacccaagaagccccaccctccagcagccccctctcccgcctcatcacgacggagaaattctgaagcctaattgagtcgtcacatcttcactgaggtctccatgctctcacaactcaggcctcctccggcattgccttcatgttgtattcttcctttttccttctaatgcactgtccccactaagagacaggggtgaacgctgtgtctggtccccag

SEQ ID NO: 3679 - DNA, 558 bp, Canis familiaris
  misc_feature (1)..(558): n = a or c or g or t
aattctgnnagtngacaagaatgnnnctgaggatgaaatcaagaaagcttaccgaaaacgggcnttgatgcaccatccagatcggcacagtggagccagtgctgaagttcagaaggaagaggagaaaaagttcaaggaagttggagaagcttttaccatcctctctgatcctaagaaaaagactcgctatgacagtggacaggacctagatgaggaaggcatgaatatgggcgattttgacgcaaacaatatcttcaaggcattctttggcggtcctgggggcttcagttttgaagcatcnggnnnagggaatttcttttttcaatttggctaatgaaaggaaaccatccggaacccagaaagtgcagacttgctcaatgtaaccttgaacntgggcacagctcacctcctcccttcatcncgtctccccgtccttagagcagttgcgttttcttagntggatacccctgtgtctgtgtgagtggggggaannnagggagccagnnnnnnngactgcggggaggggagaggggtggnnnnntggacagggaggcagct

SEQ ID NO: 3680 - DNA, 688 bp, Canis familiaris
  misc_feature (1)..(688): n = a or c or g or t
tanngatctggtttctgttacttttnngtactgagctattctgtatngnnnnagnacttcacagttctttcaaataggtatttaagactgtcaatagatagtccctgnnttggaaacagaaacaaaagatatctcgtgtggaatgaaatgctgtgggagttagaaaaaattatgtgtggaaaatagatacttttggcctacttcagcttcttgactctctcattgatcataaaagttcaataaatactggttaagtgagtgacttggaagctttgccagtccttgttgagactgcacaagctaacgttaagatggcctgggaccccagcaacagcactggcctatctcggagggtctattgagtatttgcagatgaacatacacctggtctttcagggaggtaaacaataggaggcaaacaataaatgcattatttttgagaggtaggtaattataaacctcagtagaattaagacccccagctagaatgatattgtggaatgggggctctcccttcacaagggtatgaagcagatactcgcagtgacattcatgtgttgtaacacattgatgttaataagagatctgagaccagagtgctatgagaaggaaataaaacgggaatgtggagaaaaaaaaaggagctcttcnntacagaataccaaatgaatgtaggagtggatgctag

SEQ ID NO: 3681 - DNA, 658 bp, Canis familiaris
  misc_feature (1)..(658): n = a or c or g or t
ttatttactcnnatatctccagtgccaaaaacatgactagcaaatagtatttataaatatatgtattcgaatgaatgtatatgtgaaaaaagttacttgttatagacatgacatgctgtagacatgaaattgattaagtaaaattttttattgtttataatatcatctatgaataatgataattgtgattttccttttccaaacctgcaaaacagtatatacatttatctttgtgcatagtctaggacctctagaaagttgttgagtgaaagtggttggaatgggcatttttattctgttcttgattttaaagggaacaaatctgatatttcaacatgagcaaatgatatttactataagtctttggtagatgttctttatcagactaaataggttaacctttgcttccatgtttgctgtgtttgtttatttgtgctttatcatgagttagtgttaactttggtaaaaataaatgaagggcaaacttttttatcatgttcaagtgttaaaatttattttataatgaatgaatattgaattttctgttttgagatgattttctccattaatattttaatgtgataagtaatattatagaatttctaatgttaacattctctttcattcttggtacaaaactaaacattcattatgtgtt

SEQ ID NO: 3682 - DNA, 521 bp, Canis familiaris
  misc_feature (1)..(521): n = a or c or g or t
aaacaggaaagcagccaaatgcangtcnnatacaaaagtgaaatcattaaaactccaaacacaatgcaaagcataaaatctgcacatttataacaaactgcaaaaattccttaaacattcacaaagttaaaaattatttttatttttattttttatttgagagagaggaaatctcaagcaggctccatgctcagtgccaagcccaacatggggcttgatctcaccaccctgagatcatgaccagagccaaaaccaagagttggacactcaattgagccacctaggtgcccctattttaacaatacttttgtccaagcctatagaactgaattgtgttaggacacattttcatgtttacttatttaaaactaccaatgatatgtaaaaatttctgaaaaaaatctaaattgctaagttgaacctataagtgagaaccaagataagtggtgaaaatttgaggcctttgatgagctaccaacctcaaaaattaggtttcnnnnntgtgtatcctcttagacatt

SEQ ID NO: 3683 - DNA, 438 bp, Canis familiaris
  misc_feature (1)..(438): n = a or c or g or t
tgggaaatgacagtcacctaacagatacaccacacctttgtatnnntggaaaccaatnncgtctttaaaaaatgactaatctgtaagaaaaatgttgactttttttttaaaccaaagtatcttttttttaaaaaaagttattatatgcaaaatccctagacaaatagcactgcnnngaggcacttgagataaatttagatcagacacgaaagtatctctattttttttttctcctcttcacagtggctggtttcctccactactgccagcgtggcagccacattctcacgcctctccttcgcatgagctgcacatttgctagaggccgtttcgatgtagggcaaacaacagatgttcaataaatacctaattccgtggtttttgtacagtgagccagtgttccctgggggttctcgaaattctttcagaggatcagta

SEQ ID NO: 3684 - DNA, 515 bp, Canis familiaris
  misc_feature (1)..(515): n = a or c or g or t
cctcataataacttcnncttnctgatatctccccaaaaaagtatatgctcatgtgtataaaccatacttttgactccccaaaatggtgactaaaaactagaaacagatttgagctgaaaacacttacagttatgcccaggcctctcggccatgtctccacgtagacatacccatctgccccagaaagagcatggtatgagctgtccagtattccactggaaattccagttgaaatattctgcactaaagtgatgtttttatcaaattttagtttacatttctttgagatcgatgcaagcacaaagcttgattttttaatgcaaagtatcttacttctggggtggggggaataaaacagtcaaatttcaacttgcattttcttcatttgagtttttcttggccttgaatttcccttgtgacattctgtataagtgctacaaactgcagactctgcagatgcattgatatgttctccctccttttatgagtcattcaatttttgtgatcacacaaat

SEQ ID NO: 3685 - DNA, 540 bp, Canis familiaris
  misc_feature (1)..(540): n = a or c or g or t
tgtgtgggncaacccagcnttggctcactnntggcagtntctnaagatccttccctagcgctagtatcataaagctgcaaaacttgccaagacctccttgcctttgtgggttcctctcctgaatcggggatgacagggatgctacttccagtccaggagtccactgacaggttctctgctggacacttcagtgccccctgctcctccccagtaaaggcggcttgtcagaagcaaagacaacttcctttcccttaaagcacagtccaaagaggaggactgaaggcttccttctcctccctcacctcnnnngctttatcttcccttctctgctttttanngttgcagctaattgttttaaggggtggagggagggagcctggggacacaaacttttttttttttttttttataatacaaagctttgcttctccgtcctccttttcttggttcccttctctcttctgaatggttnnnnntgcttcagctgagggaggatggggattgtnnnacaaggtcccttggtgctgatgnnntgnaggg

SEQ ID NO: 3686 - DNA, 611 bp, Canis familiaris
  misc_feature (1)..(611): n = a or c or g or t
ggtctggtnntaataataattnncanctaacagtgcatagcagagncntcatnnnntgctttacntatanngtgtngnnctcacnnnaaccctgtgagatgggtactattttcatccccacattacagatgggaaacctgaagtacaaaagaaagtcggtaactttttccatgatcacacagctagaaagtggcagagctaggatttaccttaggcattctgacnnnggagttcatctcatctcaactatactacacagaaaagtagaagatatatgggggttgaattgtacccccccgccaaaagatacattcaagtcctaacctttggtacctgaccttatttggaaatagggtctttgcaggtatcatcaagttgagataaggtcacactgggttaggatcaccctagatccaatgaggtatccatataaggagagagggatacagaaacacagggcaagaaggccaaatgacaacagaggcagagattggaatgttgcagccagaaggcaaagaatgccaacgattgccagtaactaccagaagcaacgagaggcgtggatgatgatcctcacacccctaaaaggaactaaacctgctaacaccttg

SEQ ID NO: 3687 - DNA, 464 bp, Canis familiaris
  misc_feature (1)..(464): n = a or c or g or t
gctaantaccaaatgaatcatgtcaccgtaacagattttaantgtgttatgatttttgatgtttgttgcccaggtgtcatgaaagaataaagctttaagaaatgttttaaaacttagtcaacaatgaaggttgttgaacttaggtacctgtttcccattaactcatgtaaagagaacagatatattcatgattgcaattattttttaccaggctgaatgaaggtagtaatctgagacactgaagatactacaatttagtttgtcttttaaaaattgctcttatggtaacactgaagatacaattgaaaaatatgttcattgaggttgtatttggagaaactgccaagataccactgccatgtataaattcccagtttacatagaaatccatcagagtaacgctcagaattttaaacatctgaaaataaggtggaatttttcatcgtcnntactttataattatc

SEQ ID NO: 3688 - DNA, 590 bp, Canis familiaris
  misc_feature (1)..(590): n = a or c or g or t
agctctgcnnnnnnggagaatctcaaatgtacaatcagaatactaaatcttgcacatgatgtgtcttcaccatttataagctgtgtaatcttgggtaagttactggactctcctgtgattcagttttccttatccataaacagaatataataagaagaattatacccataggctgaaaaaacatatttcctttctaaagtataccaggtattagaaatactagaagtaattctctccatattgatatttcaaaagtttttaaaagtatttccacagatttatgcaaacgaacaaagacaataaacagtttacaaatttaagaaaataagaaaaatgaggtatcatctggtcagaaaggagtaggaattatagttaaaattactgatactataaaactttaggaaatcatttagtagagtcttctaaggagcaccttctgatataatgagggctcatgggagaaacctgctacttggatatgtactcataacacagtggaagcagctcagattaggaggtgtcaatactcagtgtctgcttaatctgctactgactggtcttacagccagatttgggcactagggaaggat

SEQ ID NO: 3689 - DNA, 572 bp, Canis familiaris
  misc_feature (1)..(572): n = a or c or g or t
aggttcccaaatgccccccaccacttccccaatccccacaaaagcaagcttttacctggataggaaagggaaagaggtatttttcaactctcccctccactgttctccctctctaataccctgaggcaattcttcctgacttttgtagaaaatgtgaacaagttcttacagagtctaggagagcctgtgggctttttgccttagtctgctgctcgctgctttatcaagagatctgcctagcactccagccctacagccacagggaccagaaaccctccttgagtcccagatgctactttccctcgcgtctccctctctttcctctcccaatgtgcccaccttttgcacttccactagaatgccaggcaggctgggcccccaaaggctcctttttcaaaacctctggaagccgcggttgaatgtgccatgaccctctccctctctggatggcaccatcattgaagctggcatcatcggagtctcttgttctgttggcgtgctacctggaagatccttctgtcctggacaagaggaattggaagagcattttatgttttaagaannnnnntgat

SEQ ID NO: 3690 - DNA, 517 bp, Canis familiaris
  misc_feature (1)..(517): n = a or c or g or t
tnnntcttgctttaggggtcatcnntntgctcgtgatgtattcactcctgagctatgcacatgcgtgtgtgagaaggaatgagggcccctaaaaagccatattagccagtgggtctccatcccggtaagaccacantgnncacacgatcattgactgtgagcaagtgcaacaggaagcaccccctctcattgggcttttagtcagtccctctggacatgcctcactaaatgcactccctgagcaggccattccaccagcctttcagaccctccacacactcagcatgttgctgccaggacatcagctccatcaaacccacagtgaaatgcaaattaacagaggtaactcatgaacaaaacactatacaatcctagagaatcattattatttttagagtgatgcccagtttccactggaaatgaacaagctgttcttgtaacaggaaacaaaaaggaaatgaaatcaacacttggaaaatgtttctaccttgctnnnnnataaatacaagttgagtag

SEQ ID NO: 3691 - DNA, 515 bp, Canis familiaris
  misc_feature (1)..(515): n = a or c or g or t
cgcagatccnagcaaaaactcaggactggtgtgcataaaattctcctatctccgctccccccgaggnctctggggagtgtttctctgaagtcctgatttgtgtttttgttcctctctcggttgctttccattccacaagtgccgactgagtgcgtactgaatgccctgccctgggctaggtgctccataaacacagatggttcctaagcgggaaagggcttcatagaggacacagtgcctgcacctgggaggacagtaggaggtttctatgtgcatgttaggggagggcaccaagaggggagaccgcagaaccgccctgagagctatgtgcagttccatgtccctcaagaccaggaggccaggaggtgctgctgtggaggaagccagagaagatgagtgaatggaagaaatgccaaaggcttcctcttagtactttcctcctgaacagtggccagaagccacttaatgcaagcagataattcttcaagaaaagcacagtgaggggatccctgggt

SEQ ID NO: 3692 - DNA, 174 bp, Canis familiaris
  misc_feature (1)..(174): n = a or c or g or t
catcagcaaacagttgtttcnnnnnnnnnnnntattttgagtcttttaccaaagaatgacaaggatgcaaaaatgggaanagtttggattttaattagaactatttaggagtgatgatgtgtaaaaagttgacttcttttctgcatggcatagagaaattatattcattattta

SEQ ID NO: 3693 - DNA, 444 bp, Canis familiaris
  misc_feature (1)..(444): n = a or c or g or t
ttcccatgatgatcagaagagggctgaggccacttctgnnttcatttctctggacctacggctgcctctggttccttcactccaacccacagcccagcgactctctatngaggtagcatgatggtggcatgaccaccaaagcgggagcnaggacgtgtggggcctggccccagctaactagctactaactggtcaacgtgatcttacacaaggcccttaattttgttgggccttagtttcctcatgtacaaaatgacaggcgggggtgcctgggtggctcagtcacttaagcacccgactcttcatttcatctcaggtcgtgatctcagcgtcgtaacatcgagtcccctgtggggctccacggtcagcacggagcctgcttgagattctttccttctccttctgccctccctgtcacgcttgctcgctctctctttctcaaat

SEQ ID NO: 3694 - DNA, 585 bp, Canis familiaris
  misc_feature (1)..(585): n = a or c or g or t
taatgnctcctggtttcccactccaaacctaatggcaattcacatatatacattcctctctctctctcgctgccaaaggtttgggtttagttcacttcagttccactcgagcattgaaaagattctcatggagtctggggtgtgcccagtgaaaaaaaaaatggggacttttaaattgtccacagacctctttatacctgctttgcaaaaattacaatggagtaactatttttaaagcttatttttcaattcataaaaaaaaagacatttattttcagtcaaatggatgatgtctccctgttgtccctttcttaaccctcaatgtttgcttgaatcttttttttttttcccttaattcctccccctacccacttcttgatactttggttctttcctgctcaggtcccttcatttgtactttggagtttttctcatgtaaatttgtacaatggaaaatattgttcagtttggatagaaagcatggagaattaaaaaaagatagctgaaattcagattgaagagatttatttctgtgtaaagttatttaaaaactctgtattatataaaaggcaaaaagttctatgt

SEQ ID NO: 3695 - DNA, 410 bp, Canis familiaris
  misc_feature (1)..(410): n = a or c or g or t
actcatgacnnngagcttgaganntgagctgagatcaagagtcagatnnatccttgctgatgnnatgaccattatctggaatatttcnngnnntcctggctgagggaaagagacctctggcaatcacgtgctctggcatgaagatgcaggtgccacttcctctcacacctcattagaaagtgtccactagaaagtgctggtcacatggtatcagctcaccacagagggaccaggccatgcagccctcctgtgtggttgaagatggagtggaattggtgactactcacttgagtgaaaaccatcatatgcatcccatttaccataattctaagtattcagttttgtagtttattctctaaataatgagtaacagcatttggtattggtgattatatcctgcataaatggcc

SEQ ID NO: 3696 - DNA, 643 bp, Canis familiaris
  misc_feature (1)..(643): n = a or c or g or t
gtgatccagctcatatggtganntctttcaacactggtagtacagtaatttatgacnnagaaacatcacaatcattggtgatgctttcatcacagatagattctggtttacaatccaataaacacattaacagagtagtaagtcatcccacacttcctgttacaataactgctcatgaagatagacacatcaaattttttgacaataaaacgggtaaaatgatccattctatggtagctcatttggatgctgttacaagtttagcagtagatcctaatggaatctatctgatgtctggaagccatgactgttctattagattgtggaatttggacagcaagacatgtgtgcaagaaataacagcacataggaagaaattagatgaatcgatttatgatgtagctttccatccatcaaaagcatatattgccagtgcaggggctgatgcccttgccaaagtatttgtgtgagccaacaaaaactcacatcttaacaacagatttgcttgaacagaaagagggtctgcatcactgccatcagaaaggttactgatatgacactacgtgtgatctgcctggtgaaggctattcgaggcaggcataaattgatggaaatcacatcttaatgtcaggctcattaattt

SEQ ID NO: 3697 - DNA, 596 bp, Canis familiaris
  misc_feature (1)..(596): n = a or c or g or t
aaatatatnctttatgttattacattnngcaagattacttttaaattcannattacataatgttcaaagggggttgtaaattaccttaaataaacaaatatgannaggcaagataaaacagagaagactttattagaatagagttttttgtagatttgggtattttttaaagcaggaaccatttcaagatggctatgaagagaaggaggcccagatttggcttctaaaaaggaaagaagacaactcttcccctatttgcggtggggaaattgagtgttcttttatttggttagcttcaaaaatcctattttctattgaaggaaatccttcaaaactggtggatgcttttagggtataaacaacttcaaggcattaactagtaagaaatggaaaagataattttgctttgtttttaaatgaacataaaataaattataaatgattctttatgtgacatcagaaatatactgatataaactattgtgtgtggctgctgttcctaggaaactatattttgggcaatatatgcaagctaataatttgaccagatatgctttctgtttgtaatataatgtattatatattagttctaaatt

SEQ ID NO: 3698 - DNA, 573 bp, Canis familiaris
  misc_feature (1)..(573): n = a or c or g or t
gactttggatttcgannnnnnnnggncagatctttgtgatcattacaaagttttggtagctttaatatcatcagtattgaagcattttacacatagcttttgataatcaactgggctgaacactcccgattaaggattctgtgctttagactttggctgttgtgctaaaggactgagtataggtggaggttttcagaccttggaagaaggtcccacggtgaacttgtgctgtgaacttgcacacttggggcagtctttccttaatacctaagtgcactcattagttcgcgtaggtgatctctccattcctcccagaactctgccttcagaactattatttatcaccattccttttttaggtaagggaaccaggtcccttcagggaagtctcggaagtgaaactgcctgtttcctggcctgcaattttggttattaagtctgttttgtgacttgagtccacaaataaagtcccaggccttccatatgttacttactatggctactgccttctaccaacctccccgctgattgtttttttttctcctgtgtgtaaatggtgttaaaagaactttt

SEQ ID NO: 3699 - DNA, 103 bp, Canis familiaris
  misc_feature (1)..(103): n = a or c or g or t
atgcaagtntgcanntnnnnnntannnnngtgtttatatgttcagtgacagggctgaaatgnnnttttatatgcnaattgttttgactctaacatttaagtcc

SEQ ID NO: 3700 - DNA, 172 bp, Canis familiaris
  misc_feature (1)..(172): n = a or c or g or t
gggtctgtatatgtactccacagatacccacgcgcttcaatgtaatgatcactttcaccttcctcaatctccaaattannnnnnnnagagccanannnattgaatttactgttttccatttcctgtcctctttccaccannnnnnnagccatataagaacttaaannnagca

SEQ ID NO: 3701 - DNA, 278 bp, Canis familiaris
  misc_feature (1)..(278): n = a or c or g or t
ttgggtcaactgacatccattgtatatactaatgannnnnnttcatgctattttgtnnnngtttttgtntnngtttnngcattattatcaaatgcagngccnnnnnctgatctcaccatttcaccatgcatcttggaattcagtaagtgcataccctaacttgcccgtatcctaaattatctggttggttttcagnntagaatctgagacactttttagaaacatgcccagaatagaaaagctgtgttggggcacatgtcctgcaaatatggccctag

SEQ ID NO: 3702 - DNA, 590 bp, Canis familiaris
  misc_feature (1)..(590): n = a or c or g or t
ccccgcnntccctcaccctcccacagcacggccctnntcacggtcaggatggggcagccgggggatcagggtctcaacactcaggaactgaggcctggcttcctgcggtcccatgctgagcagaggcccacttgattctgaagagccctcccagcaggcttctgcagagtgtgagggaggcccgggggctcaggggagaatggggccgacttgacccacacaggcctcagtggcagtgggcacaggcaagcagcccccatttcttccctcccagtggacagaaccttctagtggtagttgggctgtaccaaaggacctttggctgagatgaggagtgtcagttctcacgagccttctgggttctctcccagcccctggtatggccccctggaaagaccacacggaagggctcaggggacctgatgggggcaccctttcaggagtgaggagggaagcaattttcataaccattctgctttatccatgagctctggggagcactcaccgccaagcccccaacccccctgaaagccacagctcctccagccttgcctttccttcacaagttcctgcccctacaaattaccaca

SEQ ID NO: 3703 - DNA, 507 bp, Canis familiaris
  misc_feature (1)..(507): n = a or c or g or t
gctccgnaagctttaccnngtgccgcaaaacctccccccgcgaggggaggaattcttggacaggcccagcccggtgggtcctgacggccccggtttcccaccagagctgcaagaaccgaaaggttgtaaggacgacagctgaggacagttatgctttggtccccatctaagacttttagggggggtaacgnnnaagggtcccggccctcctccgactgcccttgaacttggggaggcctttggacctcaggctgtttagtgcaggtgcagggtagtagcccgggggaacccagaggtgccctgaaagtgggctttagtaccagaaagggggagataaacatcggttaggtcaagactttttcggtgagttcagctcaaaaatctttgggacacacacacacaaaaaaaaaaatcttagggacacaaccttaaatatcgaaaggtgagcaaaagggaaatgctgttggtctttcaggtagttctagtgagggcgcaagacaagcagct

SEQ ID NO: 3704 - DNA, 210 bp, Canis familiaris
ccaggaaagggagaaagtaactgagaagaatgaaacaaactttcttgggaaaatattttaatagtgataataatgtcaaattataatattctagaaaattatggaaaatagaattttattgtatgtacacacatatatatgtatcaaatgtgcttataacatgtgtattggaaaataagtaaacagtgtttgaatttattttttaaatta

SEQ ID NO: 3705 - DNA, 186 bp, Canis familiaris
  misc_feature (1)..(186): n = a or c or g or t
actactgctagaaagcataagactgcctncagataactnctacagtnnnnnctacttctgggactggnnnntannnnnnnnnnncnnnaagtnttnnnnctgagttcangtaaagggaaagaccatgctcatagctgggccaacannnnnngtggattccttncacatttcatcacctacaaacgg

SEQ ID NO: 3706 - DNA, 667 bp, Canis familiaris
  misc_feature (1)..(667): n = a or c or g or t
tcaccgaagaagacattgnnnngcttttctgtgtgtgtnnagnnntcaaaagggctcggcnggtccatcctggggtagcagaggtggtctttgtgaagaaggatgatgccattactgcatataagaagtataacaacaggtgtttggatgggcaaccaatgaaatgcaaccttcacatgaatggcaacgttatcacctcagaccagcccatcctgctacggctgagtgacagcccctcagtgaaaaaggagagcgagctgcctcgcagggtgaactccactgcctcctctaaccctcctgccgaagtggaccccgacaccattctgaaagcgctcttcaagtcttcgggggcctctgtgactacgcagcccacagaattcaaaatcaaactttgagcaggggagtgaggcagccagaagcgggggcagaggagggtggctctgtttcctaaagcaaagcttgtgaccaatgggccgtcggactggaaggccctgagcgtgggaagggccgccaggggtagagagcttcctcactggacgggacccacctctctgttttgtgtcctaccctgtgctcttctgtacgttaacatttcctgtagtctgtgtcttctccctccacctcctcaccaaggtaggctcgtgttgcccagagcatccctcccccc

SEQ ID NO: 3707 - DNA, 451 bp, Canis familiaris
  misc_feature (1)..(451): n = a or c or g or t
gaatcaaatggggggtggggnggcgggtaagacnntaagtggtgnagtggctggcccacagttttccaggtcaactgatagncttatatacttattctagtttgtgatacaatctcttggcactagaatgagatattggtacctctttaaaatccccaagaagcggcgcctgggtggctcagttggttaggtagctgcctagtcatgatcccagggtcctgggatagagccccactttgggctccctgctcagcaggggtctacttctccctctgtgtgcctgtgtgttctctctctctaagtaaataaatagaatattttttaaaaagaaatccccaagcatttggtggacctgaaatggcagcagagccataggtttcatcattttactttggagtaaaaatacaggaaatgtgctaatatgtaaaggatgggcatgttttacttttna

SEQ ID NO: 3708 - DNA, 291 bp, Canis familiaris
  misc_feature (1)..(291): n = a or c or g or t
ggccacgcccccgcccgctgcgggtcccgccccctccgcagatctgctgggcctggcggcccgacttctgnnngctgcagaagagtccgacggcagcgagttccaggacgaccctgtacttcagctgctaagagttcagagggccaagctgagatggcagaaaaggaaagtggacgcgcaactgtccctcctactgnngcacactgaggacccagggacttggtctcctcccaccgggtcgccccccaggtccccaggnnnnnggctgcggagggaaggagctcctcccga

SEQ ID NO: 3709 - DNA, 434 bp, Canis familiaris
  misc_feature (1)..(434): n = a or c or g or t
ttattacctanagtctgtttccncnnntttttatagccttccatnnnnnnanacatgacattnnncattcnnnnntgcttttnctacattggcccatnnnnaaccttnnnncttnnnnacttaatgtgttccatnnnnttgagtagatggtagcttgcaaatgccnnnnntatctgngtaggtttaatgccaaannnttnnggggtcatgtctaggtgaactctgactccctgtnntatttcaagcaggnnnnatattccannnnnnnnnnncatggaaaaagctagaaagtcgttctgcctttcaggctactagggnnngttgtggtgttttaggatgggaagaggtagctcatctanctannnatcttnatttcttnnnaatnnncaggcaagatattagatcactntntgcnnannnangaagaaaagaag

SEQ ID NO: 3710 - DNA, 472 bp, Canis familiaris
  misc_feature (1)..(472): n = a or c or g or t
cagncacgccacgggctttgtgggctgnngcaggcnctgggncgttctcggggtgcgcctgacggnctcagcagccccaagggtcctcagtgatctgcgcacaggacgggaggatctttccgacgttcccacgcgggcgaggggctccggcctccaggaaggccccagacacctggactccaaggtcttggaaggaaatcggaacggatggctggttggtgaaaacttaggatcacccagaagacttagtctgcgttttgactttgtgactcattagtgcagaaaccccacggcggccgttacgctctgaccctgttccggcttattgtcatcaccacgcgggcacctgtgcggcacctgctgctcggtgggcaggtgtgactgttctggtcagtcctgtgtaacgggcaagtgtgggctgaaggggggcttcgtgtccttctaatcttgctggtttcaagatgggaagatg

SEQ ID NO: 3711 - DNA, 624 bp, Canis familiaris
  misc_feature (1)..(624): n = a or c or g or t
aattcatttgancagctctgcatnnncatcgccaatgagcaaatccagtactatttcaaccagcatgttttcgctcttgagcagatggaatatcagaatgagggcattgatgctacacttgtgatgtatgaggacaatcgcccactcttggacatgttcctccagaaacctctgggactgcttgcgcttttggatgaggaaagtcgatttccccaagcaactgatcagaccctggttgataaatttgaagataatctacgatgcaaatacttctggaggcccaaaggggtggagctatgctttggcattctgcactatgctggaaaggtattatacgatgcttctggggttcttgagaaaaacaaagacactctccctgctgatgtggttgtagtcctgagaacgtcagaaaacaagcttctgcagcaactcttctcaattcccttgaccaaaacagacctcccttgggcagagccaggatttgattcattatctccttatgaagatatttaccctcaaactggttctaatgagattgtgcatcttacgatgaaggagtgttcctgctttctgaatcgtgtaaccttttctgaatcttgtcttcaaacggaattccacacctcc

SEQ ID NO: 3712 - DNA, 503 bp, Canis familiaris
  misc_feature (1)..(503): n = a or c or g or t
agaaatgctgaagcnagaggagtgtcagattcaacagangagtgagangtctcacangccactgatatctgtagctagttccacaaagaagactgcattcatataagagaacacaaaaccccttgagaaggatgccacgaaacaggactctctgccaggtacttccagtatgattccaggaatgcctcaatagattcctcctcgagagtcatctggccagactgactgtaatgtcaaaactctgcaagaaataaattactaggcttttcagcatgaaattgctccccaaatgtatcctggctccaaatttctttcttaagttatcaaaaagtggatgattctcacgatgcttctcccaaagctgcaaactgagaaaatggccagataggccctgaagatggtaactatgtggattaaaccaagattggagggctgtggaaggaggtgtcatgccaggactctccagccgnnngtctgttctagtngnnnnnnaaacacttgaa

SEQ ID NO: 3713 - DNA, 340 bp, Canis familiaris
  misc_feature (1)..(340): n = a or c or g or t
tctgctgtgagcagnnnnnnntgaccaggctggcacacgnnnntgtggggnnnnnntgtttgggaatgacttttgggacagcattcctcacagagaccaagctgatccactttgtnaggacnnngttacgtgtgtccagactggctgacaaaacctcatganntcagatgcattgacacntgtggcacctggaccagctgtggggcggttttgtgggtagaacacattaactgtgcacaagagccctgctgaggggtctgtggtagaagaggaccgacnnnnncaggcgagacgtcagagagaatcgccgccccaaacatcatccatttgaagcctcaaa

SEQ ID NO: 3714 - DNA, 578 bp, Canis familiaris
  misc_feature (1)..(578): n = a or c or g or t
cagcacgnagtcaggttcattgtgggatagtttgtnnnnagtcagganagctaaannggtcagtattaatgtctagccctaccaaaaatagccagtagcatctgaggatgaaaaataaatgaagtatctccaggaaacagtctggcataactatttttgaaaatataactgtttccccctctctgctgctttagatgttgctttacatagaaccagaaaatggaatttttcacagctaaagcatgtgtgcctgtttcatctaatcaagcagagctaaaatattcatatcaaataaaattataatattaattactaaactgagagtatcaggttattaaaataatttatatatttgcaagcagaggacaataagaagtcaactggcaaaagagcattgctgcagaaggagatccaggttgaaatttggcttacctcaagctaattttaaggattttctgtatagattattcataatgtcaggccaagaatttaaattattttaagagaggcatttaattctaataaaccaactattagaannnnnctgaaatgatctctgtttttcctgtcagagattt

SEQ ID NO: 3715 - DNA, 582 bp, Canis familiaris
  misc_feature (1)..(582): n = a or c or g or t
tgtcgaaaggtgctatattcactntngncttgtgtatcctgnngctcagagtttnntntgcatgtgtacatgtntagtttttagatacttatgttcttccttgctcttaaattgcatttaaatctgttaatctttttatttatatanctttcctcaaaatacattggaatcctgacaggtatttggtnaaactgagtatttctttgttcatattaaaactcagtcatagaactgaagctaaacattggccaaaattacaatttcgaggacaaagtatatcagttgttgtagggtactcaaagttttttgttttttggtttctttttttaatctcagcagnaaatatattttatacatctccaagaattttatttctgtcatcactaaaaggtggcagctggttttaggttaaagcatagaaggaatatagtcaaataaacgttttagacgactactcnngcaatcctgtaggccagagttgagtggttttctcaagatnnngccagatgagtggttcacctgctaangagctggtgtaagtcacatcacaacagcctcttttatgtnaacnntggaacactg

SEQ ID NO: 3716 - DNA, 139 bp, Canis familiaris
ggccactccaaatggtttagagtaaggggatgtggcttctccccagcaaatctatacactgtcatcagacaaagaaggaactggcactggaaagcagaacaataaattcccagcacagactccagtctttttgacaata

SEQ ID NO: 3717 - DNA, 596 bp, Canis familiaris
  misc_feature (1)..(596): n = a or c or g or t
tatctgtngnncagattttactttgatggaatgccattttgaancatngnanngtcattaagttacaattgttcactganntaattatcagaagtatggttagtatcagttcttcaattcacatttcaacagagcactggcaaaaaaaaactattttggatttatatacttaaatcagatactagattttttttttctgaattaaggaagtattttgttatagaggatacacagacttccaattttatctgggttcatactatttaatgaactggggtcattagacattagttgcattatgtttttgttggttctaagtaagtacgatttagtatcttgcttaagccattctgtagagacaaatttaaatctcagattttttttgttgtttaaaacaggaatatattttcaaaagaataaatggctataaaattcaacttgtctatatttcagcattccttagtagaacatttctgttacctttcaaagatggtaatagttaatttaagcttcaagggtaaatttctggaacaattttgcttatatttgttcattataccttaagagaccagactttgtgaacatgcacaatgttt

SEQ ID NO: 3718 - DNA, 189 bp, Canis familiaris
  misc_feature (1)..(189): n = a or c or g or t
ctgtcanccaagttcaaatgcnggtgatagaaccgatcagggctnnnggccagcctccctcttaatcaggaataatcagcagtgggtttatccttctcatccctctgatcttgttactgcattccagaactcatagtgtaggcnnctggaagtccaagggttgtggccacaggggtgaagagggaaggt

SEQ ID NO: 3719 - DNA, 562 bp, Canis familiaris
  misc_feature (1)..(562): n = a or c or g or t
tataggtatataanncaaaaatcntaaacatgaatatataaccacaaaaatttannnactgttcaatttaggcacaatcacctttccaagaaattctatcaatacatattttatgaaacttngacattcactttgtcagagccaaaaattcttgaacatcaattttttaaaagagaaattttagtgatcaaaatgttaaaaagaaaatccaatcaaatgtgaaaacttggaaatgactggccatattcaactaaatgatggaacacttctttatgctttcaccacacgatcatagagtttgagaactgtcacttcaaggtctatattatagcttatggatcagtaatttaaataataggtaaatatggtggctgtatttcagtctctaaatgtgtaattttttaaaaatagggaacctaaaactatattcaatcatgtactttttaaaaccaacttatgtatcnnnnnnaatcatgcttattttaaataaatgtttttatgatattttgtgatgatgtatgtgaagagtcataagcgtaactgaaatattacttttggaatg

SEQ ID NO: 3720 - DNA, 560 bp, Canis familiaris
  misc_feature (1)..(560): n = a or c or g or t
tgacccagcnntccaatnntacttcnnnntatatgtccaannnnnntgaaatcaggatctcaaagaaatatgtgcacatatatttattaaagcattattctcaataatatatatatatatatatatatatataaattgaatattattcagatttggaaaagaagaaaaccctgccacttgcaacaacacaggtaaacccataggacattttgttaagtaaaataagtcaaacacagaaagtaaacacgtgtgatttcactcatatgttggacttaaaataatcaaaatgaaaccagcagattgtaaaatggtggttgccaggggctggggaggagggagtaaagagatatcggtaaaggagtataaagtttcagttatgcaagattaataagttctggatatctaatgtgcagcaatgtgactacaattaacaattctgtactgtattgttgaaattcactaagaaggtagatcttaagtgttgtcatgacaaaaaacaataacaaaatgaaaatggtaacctatgcaaggtgatggctatgttaattactttgattgtg

SEQ ID NO: 3721 - DNA, 526 bp, Canis familiaris
  misc_feature (1)..(526): n = a or c or g or t
aaaaggaagcactgaaaaaaatcatagaagatcaacaagaatctctaaacaaatggaaatcaaaaggtcgcagatttaaaggaaaaggaaaggggaataaagctgcccagactgggtctgctaaaggaaaagtacagtttcagggcaagaaaactaaatttgatagtgatgaagaacacgatcagaatggtgcatctggaccagtaaaaagagcaagagaggaaacagacaaagaagaacaacctacaccaaaacaacagaaaacagaaaatggtgctggagaccagtaatttagtaaaaaaattttttattcatcttaattaggttttaagctgcttttgtctttagaggcttttaaaaagaaaaccgaattaggtccacttcaatatcaacctgtaagaaaggaaaatttttgttgttgtttaacttgtctttttttgttatccaaatgaagacattttttttaatgtatagttctgtttgtgttatttnnnatatcaaaagaaagntncttccattaaattgc

SEQ ID NO: 3722 - DNA, 445 bp, Canis familiaris
  misc_feature (1)..(445): n = a or c or g or t
catntgaatatcccngnctgcctgtcttccntnctgtctctccccagggagcccnnnngnnnnnantntcttnnngaagagaacatngnnnncnnnntctctcgactcagcctgcacaatgaccaccnntnnnncagcccccccatggtattccccccatctctgccccnnnncaggancnnntnctnngagctgctnntctggcgctaccctgggaannnganncctgaggcnnnccggctnnngagnnnaggggactcccctacccctcnnnnnnnnnnancccaaactggggagatgatggagctcnnagtgctggtggacagaaatactgnnnnnnntccctccccacaacagagaagaccagcattcccnntaagggatcagctgttccgtatattctccagaccaggnnnctgggccccaggacctaccctcaannnag

SEQ ID NO: 3723 - DNA, 166 bp, Canis familiaris
cgcgctccccgccccgccccgccacagccgccagccgccagccgccagcctggagaagggctcttcgccgccgcgccgctcggggccaggtgggctgcctgtggcctgaggtcggtctctccaactgtgtcctccgtaacgcggcacagtgctcggcgccagagag

SEQ ID NO: 3724 - DNA, 572 bp, Canis familiaris
  misc_feature (1)..(572): n = a or c or g or t
acacactaccagcaagttcaacactgctattttaatgtatttgttgttcagttggtaactttaactcaagttttatagtgacaactgtgtatgatttggctgctgcagtcttgcaattttttattatgttgtacaccgtatcctacanagtacaaattaacatgaaggggaatatatgttactgcatcaaaatttgtgactttgaattctagtctgtctagtgtttttgcaaaaatgtttatttttatattatctgtgattttaatatggttgaactagatttctttgtgattaacagtttcactgaatgngcggtatggaaacagtgttacttgacattttgagccttctcaggtttatctaaatcaacggtagcttaacaaattccagacttactgtacgtaattgtgtttttgataagaggaatgtatgtatattttttctaagtttgcatgcaggaagtgtacaataccgtgtgtttgtgtatgtgtgtgtctaaggcanncggccaccttactatctgctatttataataggagagctttggtgtgatcatgatcatcaaaattgta

SEQ ID NO: 3725 - DNA, 446 bp, Canis familiaris
  misc_feature (1)..(446): n = a or c or g or t
gatgagtagtacctgcagctcttctctgntgtgtagggatcctgttctgtattctnnccttctataacttttgtggttatcttatactgctgtaaactttcctgcttatttcctggaacttgttttttcggtgttgccatgacacatgttttgaaatacttgattacagtgcccaagaaatagattttttttactagttagttaaaagtagtaaagccacaacttccctttttggtgagttcacgtcacatcacccttcttagaataaaaaggtccagaagctttctactgacatcacctgtggttgtgatgttccaaggttctatcttgaaaaaacaatacaagtatataaggagatgatatgctaattagctttaccatagtaatgtatttactatgcctctataagctgcctgtattatatcatcatgttgtatgccttaaac

SEQ ID NO: 3726 - DNA, 539 bp, Canis familiaris
  misc_feature (1)..(539): n = a or c or g or t
gtgatcatttgaaatgatttagtcttnggtnnatnnccatgtgacagttgangcactaaaggaagatgattttaaaactcccaatttatatgaaaacaatagccttctatatgtctttcaaaaattgttgttaatgagtattttaaaattgtacaggtttcaatccagcctgttttctgggtatcccataaatttaattttgattaccattatcagcatttgagtctacaaccttcatagtagcatctcagaataaatatctgtaattgatttcagtggtaacacttcaaattaagtacagagtagggtatttatattttaccttgtttcactatagcctgttgatacttataagaaaaatactgggtttattgatgctattttagaattgtagctatttgattctttcaatttgaaaagtataagttcaaaggttttgattttggtcttgtctttaaaatgaaaaatcaaccagcatatgttgattaccttgttgtaatggatagatttatatatcacaagatgattaaatagaaata

SEQ ID NO: 3727 - DNA, 587 bp, Canis familiaris
  misc_feature (1)..(587): n = a or c or g or t
cggtggctcgagccccgctgccccgcactgcccccggggnnntcccgcaaatggccntgcgagtgcgggcgcttcggnnnngtgcagggcctgctggggtgacgccnctacctcccgaacctctgttccccaggtgacagcccggcccgggagnntgcgaaccgagcaggccgcgcgcccccggagcaggttcccacgccgcccgctgannnngcctnnngctgggccctgtctggcgccatccgctgtgttgggaaannnnnnnccccgctcaggnnnnctngcacctgtcccggtgtacaggcacagagaaccagctgcttgctcttagaagtaacaggccctcctctccgttagctgccatcgcggcaaattaaaacgccttctgttttctaaacaacataattcacaacgggagaggaagctgtagtgctctgtgcaacagaatctgaaggagaagggctcagaagtgaaagaaacagggtgaaaatatctctaagtcatacagctggaaggcattgataaatctaatgcagttccctcattctacagaggagaaatataaggggatgaataacttgaccaag

SEQ ID NO: 3728 - DNA, 214 bp, Canis familiaris
  misc_feature (1)..(214): n = a or c or g or t
ggactgctgtgttacgtttgcccctcagnnnctgcgatgcagtgctggcaaagtccaactacagctgacgtgaaatggagcatcaagatgcaggacggtctctgtagggatgtcatggagaaagaaatcagtgttgctgagatggttataagcctttcttttgatgtgaatgttcttttctttttttaagattttttaaaatttattcactcat

SEQ ID NO: 3729 - DNA, 473 bp, Canis familiaris
  misc_feature (1)..(473): n = a or c or g or t
agtnnactccagccaccaccagcntgaccttctcctcccaacgcccactttgtgnnagcccccctattcactcactccagtctctgannnngccaacaggccaggcaggtcccagcnnncntgcccctcgaaccctggccctgaggcagcgcctcaaagcatgtctgactgccatccactgcttccacgaggcccgcctggatgatgaatgtgccttctacaccagccgagccccaccctcaggctccccccgggtctgcaccaaccctgtggccacgctgcttgaatggcaggatgccctgaggtcagtggggaagggttggctacagttcaaggattgctgcgctgacagtcttcttcctctccagtgttttattccagttggtcctgctgccccacaggactctctgtcatgatgcatccacctcctgccctgccttgccccttcctttttagcctttatttannntcca

SEQ ID NO: 3730 - DNA, 490 bp, Canis familiaris
  misc_feature (1)..(481): n = a or c or g or t
ttttttcctgagaagnnnngggactttccctnnncttgcnagnnnnnnatcccaattcagccanntgaagctggactctggccagaactcttgatccccccactggtgtttcctgaagaatggcttaaaggcaattctaggagatatgtggatagcctttttaatgattctatatggtgtgttaacttgattaaaatgtagctagtaccccaaaactgcagctagtacctaaaaaaacctacacttgtgcacataatacagacatacctcgctttattgtgctttgctttattgcactttgcagatactgctttttttattttttactagttgaaggtttgtggcaaccctgtgtcaagcaagtcaattggtgccatttttccaacagtcgctcacttgtgtctgtgttacatttggtaattcttgccatatttccaactttggcattattactacatttggtatggtgctctgtgatcagtgactaaaa

SEQ ID NO: 3731 - DNA, 611 bp, Canis familiaris
  misc_feature (1)..(611): n = a or c or g or t
attatgcacagtttatncnnctgctagaaaggttattgacactgcactgtggnnctgaagaagaatttgtgcagagatttcgtaggagtgtaactattcaatcaaaaaaacaactgattgaacctgtgcagtatgacgagcaaggaatggccttcagcaccagcgaaggtaaaagaaagagtgcaaaagcagaagcaattgtttatgggcatggaagtggaagaataaaagtaaatggaattgactatcttctttacttcccagtgacacaagacagagaacagttgatgttccccttccacttcctcgaccggcttggaaaacatgacacgacctgtactgtctcggggggcgggcggtcgtcgcaggctggagccattcgcttggcagtggcgagagccttgtgcagtttcgtcacagaggaagaggttgagtggatgagacaagctggactgctgactgccgatccacgcgtcaaagaacggaagaagccaggccaagagggagcccgcagaaagtttacctggaagaagcgctgagtgttctttcacaggcgaggagaggaaacgcagtgtatatgtacctggcatgcagaaagcatacaataaata

SEQ ID NO: 3732 - DNA, 608 bp, Canis familiaris
  misc_feature (1)..(608): n = a or c or g or t
ggagcaggggcctgtgctgatcatcannntccaggcccagctggtgatggtgatcaagaaccccaaaggcgaggtggtcgagggcgacccggacaaggtgctgcgcatgctgtacgtgtgggcgctctgccgagaccaggacgagctcaacccctacgccgcctggcggcttctggacatctcagcctccagcacagagcaggtcctctgagcgcagtggccacgacgccacgaccgggggctcctgggctggctcagcacgcgctggacacgccgaggactggtgtccggctgcagcagctcgacctgaggacaggactgttggttttctaccgggcggctacggagccagctgcacggggaagggcggggggctgcgggggctgctcccacagtcagccccgcgctgccgctgtgcccggctgtgccccgtgggggctgctgggcgggctcactgcggtgcacaggccggatggtgccggggaccctctggaggcaggatggcgggcccgggcccccgccgctcagagcagcccactggccacgtcagccaggccatttgggctgtttattttaccagtgcccttactaccctgtgtacatgcctg

SEQ ID NO: 3733 - DNA, 630 bp, Canis familiaris
  misc_feature (1)..(630): n = a or c or g or t
atcaactattacatgcgctcaccccagaagggtgctgcnnngcaccannagncctgccancttccaaatgcttgagcctgacaaggaaagaaatgggaanagccaagggcaggcagattcaagccacagagcccatctaaggcattggtgggaccccgatgtactgactctcatgaacctaaagtggcccctaaaactctgttactcaccccgcccctaaaactctgttactcacccctacattcagggtcacacagatccagacaaactagccaataataacagcacctttcaaaagggcccaaatttgggaacagcagtgctgccaagggtgacatgagcttgaagctccttgagagcacatgctgggggaggccggcctagaactgagcactgagcaggcacctaatccccgcagaaccttcccatggccctcgaccaaggtcaggtcctgaaggctgtgggctccagcctgactcacgaattggctggaccgacaggcacacctggtcacccatctgcttcagagcccacatgcttcccctggacctggatttctctcttgcccagcagggctgtgggcgggggccactgcgtggaccctggaaaggcaaccacctcagagtgaaa

SEQ ID NO: 3734 - DNA, 566 bp, Canis familiaris
  misc_feature (1)..(566): n = a or c or g or t
tcccgaagtgactcagacacaccacagtaacatctttcactgcaattttatttttatttcacttgagaagtaaagacttcctccaagccacacgaggtcnctgccacccacccacatagtgggacctaaatttctgagcttagggcccagagaacctggctgcagggaccttttgggggcctcttcaccctcctgcccagccccccacccttgcatgtcctgcagggcagccgaggtggaggggacaggcggaggggacggccgtctgccctgggaaaggaaccagagctcccgcctgaccgccaccaaggaattctcgtgggaaatatctgcccaggatctcagccccaggctggttgtttttacaaatctctctcaaatgtattattttgatgacaaaaatgaaggagctttgtaaattttttttaaaattatgaatcatatcaagtagttgtttacatttcttgacaaattaggaattatgccagcagaatcaaattggcaaaatccttagattaaaaaggcaataattaggtctgctgttttggccttttgtagtaagagac

SEQ ID NO: 3735 - DNA, 390 bp, Canis familiaris
  misc_feature (1)..(390): n = a or c or g or t
cccagtgtccacaggggcacagcaggcagagggtcctcaagcccagctactctnnnggatggttcccgccaccctcagctgccccnnggggccaggcctcntctnnnnaaggctcagggaccactttccaggcctcagcgtgggcatcactgctctggacacggccagagaggcagggcagatgctcgtggccctcgagacgccagccgtggtcactccaccccctgcagtggcagannnaggccatactgcgttcccagggcccagccctccatctccggggtgggccaggaccctcccagagngcagcagagtctgcaggtaggggattttcaggtccttggctgcacctgcntggaccctggggcccctagaaggctggacaggaga

SEQ ID NO: 3736 - DNA, 525 bp, Canis familiaris
  misc_feature (1)..(525): n = a or c or g or t
gctggnnacnnnngactacctattcgagnntcactctggagaagactacagtcgtgacgaggaccacatcgcccacattgtnnagcttctgngagacatccccccagcctttgccctctcaggccgctactcccgggagttcttcaaccggagaggagagctgcggcacatccacaacctcaagcactggggcctgtacgaggtgctcatggagaagtacgagtggcccctggagcaggccacgcagttcagcgccttcctgctgcccatgatggaatacatccccgaaaagcgggccagcgccgccgactgcctccagcacccctggctcaacccctaggcctcgacgggcactttgtgcagcttgaggcnngccttgatcaccctcatgcccctcccagtgccttcagggaaggngngatgcctcctgccaccctcctgggtgccagctttctcatagcccgtggcagggcaggaagatgctggagcctggcccaccgtttagaattcnnnctgcccccaacc

SEQ ID NO: 3737 - DNA, 181 bp, Canis familiaris
  misc_feature (1)..(181): n = a or c or g or t
caggggggggatggactgctgcggggggcggggggagttgtcccatgggttcaggggataggtgcatttcaaaatataatagttgtgacaaaannnnnnttggaaatagtggtggcggttggatgattttgtgcatgtaactgttgccattgaatacgtacacttaaaaatggcttaattg

SEQ ID NO: 3738 - DNA, 527 bp, Canis familiaris
  misc_feature (1)..(527): n = a or c or g or t
agtnctatctgcagacatctntnntctagaataannatgtagaaatgatcaatgaggatgtctttttattttctgaaaattctgnctcatttaaaatgtattnnnacaatacctaaagatgattttcactctgaaaataaccttattttttgtttagtcacttgagttttcttgccacagtataaacttctgagggatttttttaaattggtgcttttaagaagcagatcccaaggttttattttcttcaatgatagccctatagaaactcttaaatgtatttgcgcatatatctatatattttttcttatgcatgctcgatgcattttcgtcctgagaaaagtgttctctacagaaactacccgtgtgtaaaaagaagattggcttaaaatggctactgtgatgggaacagtgtcttagggagatgcagcttggacttgaggtaaattgaatactttacaaactgtggtttagagtttgctttaatgacattgtatgtaaaagggcacatgattgctgtaattttg

SEQ ID NO: 3739 - DNA, 678 bp, Canis familiaris
  misc_feature (1)..(678): n = a or c or g or t
tagtanncagatatcgtctgtatcttcctgtgnnccaggaacatcaggtnnanntagcagtagntcctctcctccatnnnnncaaaagaattattcacattatatagacagtagattacaagatgaacgaatgagtcaagganntaaagaatctcaaggatttcatttctcaaatacaaaccctgctgtatctattttccattcatttccaaatttgcagagtgagcaacttttctccaagaactgctctacagatagccataaggaaccagtagtgacagtctctcatcatgaaggacttaaagaaaatagagagcaagattctagtgatgagaaaattacctttccttctgatgttgatcctgaagttttctatgaactaccagaagaggtacaaaaagagctgttggcagactggaagagagcaggatcagatttccacaatgtacataaataagcacgttcagaaaaaaggtctaaaaagcaaaggaaaggccattgttctcagatttagcagtttattaagctcctctaaattaaacactaatagatattcaataatgtagaaattccaatataaaatgttccagataaaagcaagtctagttatgggaagtaaattctgacaaagcataacaatattcataacagaagaannnatgtaaaattatcttattt

SEQ ID NO: 3740 - DNA, 436 bp, Canis familiaris
  misc_feature (1)..(436): n = a or c or g or t
gcttatttctctaacttanctttnctactactgacaaaacttctttccttgaccaaatctgagcctggctccnctgagcacccctctcgactaggctccaatgttggactccatccttggtccacttagtccagtttttgttgatgtcacttagtctagtcttagcaagagnnctggtgtaaaaaatcttccctctttggcatctgatcatcctctagatctgataaaattccttatcctccactgccagtatgttaccatcctaccctgccttgagtaggaattaggttgaatcagtttgtaagaatctctcttatgcttaatgtttcctcnnngttaattttccattcactgactctcaccctacactttggctatgaggttcccccctcaattgtccttgtgaatcagaagttnnnnntgatctctcccttac

SEQ ID NO: 3741 - DNA, 561 bp, Canis familiaris
  misc_feature (1)..(561): n = a or c or g or t
ccctgatggcatnngcacgngtagcttttaatttagactttggnnagctcttaagtgcggagaaatttcgtagtngattatgtagnntttnnaccaaaacatcatcttctgtacaaagtcacaggtatatttaaatggttggtcaaggagatgtagttggttcgggggttttgtggggagaaatctctttctctttcctttttccgctccacaggcacctaccttactccttccagagcactttatctctctcttgaaatacacagaagtttaaaaaaacaaaaacaaaaaaaaataacaactgtcttctattaggagacatggacttttattttgcttaattctattatctatgtgtttggagagcataaacagtctgtctcataccgggctggtgatgaaatattagggacaatagttggaaacacccaaccctacaacatggctatttttgttatatagaagactataatgtaaataagtgcagttgtgttcttatgtacaggtaaaaaaaaaaaannncaactataaagatttgaaaaggattgtgaattccaggaa

SEQ ID NO: 3742 - DNA, 644 bp, Canis familiaris
  misc_feature (1)..(644): n = a or c or g or t
agatcaccatgccagttatatttaatgagnnctngagctnnnngcagcgactcactgaatatatnnagcatacatacctcatccataaggccagttcattctctgattctgtggaaannatgcagtgtgtagctgcattcgctgtgtctgctgttgcttctcagtgggaacgcactggaaagcctttcaacccgctcctgggggagacctatgaattagttcgagatgaccttggtttcagactcatctccgagcaggtcagccatcacccgcccataagtgcatttcatgctgaaggattaaacaacgatttcatctttcatggctcaatctaccccaaactaaaattctggggcaagagtgtggaagcagaacccaaaggaaccatcactttggagctccttgaacacagtgaagcatacacatggacaaatcctacctgctgtgtacataatatcattgtgggtaaactctggattgagcagtatggcaatgtggaaatcacaaaccacaagactggtgacaaatgtgtgttgaattnnnnncatgcggcctttttggtaaggaattacacaaagtcgaaggctacattcaagataaaagcaaaaagaagctctgtgccctctatgggaaatggactgaat

SEQ ID NO: 3743 - DNA, 575 bp, Canis familiaris
  misc_feature (1)..(575): n = a or c or g or t
ttggaggcatcatcgctgccatcattgctaccgctgtggtcgccacagggatnntcatctgtcnnnagcagcnnaangagcagaggcttcagggggcagannannaggatgatctnnaggngnctccctcatacaagccannagcccccaaggcgaagctggaggagccagagatgccctctcagctcttcactcttgggccctcagagcacagcccactcaagaccccctactttgatgctggcatcccgtgtgctgagcaggatatgcctcgatatcatgagttgcccaccctggaagagcggtcagggcctctgctcctgggggccacaggccttgggccccccatgctggtgtctccggggccacctgctatggaaggggtttccctagacttggaagatgaggaggaggaggaagactatatagataagatcagccccatctatgatgccctgtcctactccagcccctctgattcctaccagagcaaaggctttgtcatgtcccgagccatgtatgtgtgagctgcgatggctctagcctctcagctctcactttttgatccttcaact

SEQ ID NO: 3744 - DNA, 486 bp, Canis familiaris
  misc_feature (1)..(486): n = a or c or g or t
cactgctccccacaaccaccagggngcaggagtgcccacccagtgtccaatcagtnnanntcacactggtggggcctggtcttcaccccttcctgtggttgttttcagctaataggtngacttctatttataaattacctgtgtttctatgcctgctgccatggtgaaggctggacacggtgctcctctagcctttccttacctcagatgcctgaacagaacaaggnaaacnngtagcagcttctcagagctgacagatctgtcggggctcagaagggtggttacactttcaacatgctataaagtgagcttgtcacccacaacttcccgtgtccacttcatgcttctaatgtgcacacccagcgtagatgagacactagagccaggtgacctctagtacccgccccttctccccaagatgggagaggtgagcagggcaggcagcccagggctgggcgagtcaaaatagggcatagacaggctcgg

SEQ ID NO: 3745 - DNA, 344 bp, Canis familiaris
  misc_feature (1)..(344): n = a or c or g or t
gggaaatttatatagaaaaannnnnctgattccttcttatttatctgagattgaaatgcttttagctattgaaatcttcctggtatctaatgctagtagtattcagagtcctggaacttctacacagatactgcagatagttttgaaaagatgtgaagaaaacaaatcttggannnnnnatgattatcatgctgcagtggaaaggttaattatggnnnnnnnnatatcggatccaaagctcttcattaagcatatgactgtcaatgttaataaggaacaggtttatagtttggaacattgttctgccctgaaatggttgaaggagaatatgaagtgggctggaa

SEQ ID NO: 3746 - DNA, 602 bp, Canis familiaris
  misc_feature (1)..(602): n = a or c or g or t
tatggtgncatctgtggattnngactttcattgatcaaatggatccttattgttaggttttctgattattttactggatatttcaacnnacaatattggctttggtggatatttcttgtacttggcctgcttcttttcttcagaggatttgttaattatctaaaagtcagaaacatgtctgaaagtatggcagctgcacatagaacacggtatttcttcttattatagagactgcatcgaccagacattgttttcttataccaatgtgacatttccagatcatctgtaaacctacaactttaataggatagaagactactaaaagcagaagacaaattagtgaagaaaagatagatcttcagtattgaatggcaggatggtttatgcttaaaagccatttctgttaattttcttcaatatttatatttcatttgttttgcacatttgcatatgtgcccatgtaaaggatttgcatatacttgaaagaaaccataaagttgtagcagtaaagtccagtcatatttggttaatcagtgtttgatataattgaaagaggtgagtgagaaacagtcttccagcatgtaaatgccattgacttctga

SEQ ID NO: 3747 - DNA, 501 bp, Canis familiaris
  misc_feature (1)..(501): n = a or c or g or t
gaattattatcaaccncaatgaaaatacgcaaattgaccactcagccttcccnnnggttagtctannggtgattggccactagtagctcttcttttggtcataaggtaaaacggcatttccctgtccttgtgacatgaaacaaatttatatcctcacaaattgctttggttaatgaaatgtgagaagaagaggtgacatgtgtcacctcaagatggtatctttaaaagaaaagttcaatttgctcctcacttctactaccaaggcaaccagtaactttccagatgatagaaacatcatctgcctgaagtgagaagtagaagagttcccaggtgttctggaatgagcaagaagctcatgtatgttgtgctaatctactgcagttttggggctgctatctcaggataaccctgcctatcctgatcatgctcacagctcgacttgcagaaacttaaagaataccattctttgttgaaatacattggacatacagtactgtgtac

SEQ ID NO: 3748 - DNA, 399 bp, Canis familiaris
  misc_feature (1)..(399): n = a or c or g or t
catcggtggcnagtatgnnagcacaaagnntnnaaaccataaacagagaatgcaaacgccatgtctggnancatnnacattgaatactgnnnngagaaatgaagtccttttacactgaatnaaaatataantaaaagacggggggaaaatacatcacttttgcnnnnnnnnnnnnnncctttgaatcaaagaacagaaatagaacaaaaagatgaagaaattaaatatttttccctnngcatcaaagactcttgcaaactgtnncnngcagggccatatgttctgagatgaaccagatctgaagaactagtgcccagactnnatccccattaggcaagtgtgtatccgcagctcaaannnngtctccaacctccannngaaaggcgtgtagtttacccc

SEQ ID NO: 3749 - DNA, 525 bp, Canis familiaris
  misc_feature (1)..(525): n = a or c or g or t
gtgtttttgcancaaagctgctgtcctctctgtgtttgtgaggctnnntcgagggctcggtnnaatccctcctcctggacagtcagnncttgcggtggccagcgccctggtnnacatttctcagcagatgccaatagtgtacaaagagaagtcaggaggcgtgagaaaccggaaacagcagccccctgcacagcccgggacctgcatttgaggctgggctgggaactgtccaggagcgagccgggtgcggcgtgccagcgccgtctgcaaggagggggcaggcggggagatgctgtgcggagcgggccgaagactggaaaccctcgaaacatccgactcctctgcatgtccacgagctttctttgccggtttctcccatctgtgctccagcatctaaccttttacttttgcataggaaataattgatttagttgcaggtccaggggtgatccagttttgctggaggaggccggggtagagcgagtgagagagctggaacgacactcaggttcacttgtggaaaac

SEQ ID NO: 3750 - DNA, 619 bp, Canis familiaris
  misc_feature (1)..(619): n = a or c or g or t
gataaagtccaaaaacatttccttggtctgccaannnaggaacccagnntaaaannagagnnnnntgtgactnannntttgggagcagcccnctactcagccagtctggaacttgcatctntggtatagagaatactagttcacatttatggatcagctctatcttccattttattttatttttaaattaaattaaattttattttattttattttattttaatttaatttaatttaatttatttgaggagggggagggccagagagagagggagagagagaatcccaagcaggctccatgcccagtgtggagcccaacatggagctggatctcatgaccctaagatcatgatctgaactgaaatccaaagttggacacttacccgactgagcccctcaagtgcccttccagttattttgttacataaattactctatatatccatctccagcattgtgctttccatttcatttgtgctgctctatttagtaactacttctacaaatgtaggagatctttgttctttatagctggcttaaaatcctctttttagttccattattctctgagcaaatgcatnctgagcatcaatgggctatactctgctcttnnnnnaaa

SEQ ID NO: 3751 - DNA, 641 bp, Canis familiaris
  misc_feature (1)..(641): n = a or c or g or t
cacgncatcaatgagcacgatcacccactcggctcacatnnacatcttccagaacctggctgtggacnnngacactgaaggtcggtatctcttcctgaatgccattgcaaatcaactgcggtacccaaatagccacactcactacttcagctgtaccatgctgtacctttttgcagaagccaacactgaagctattcaagaacagattacaagggttctcttggaacggttgattgtaaataggccacatccttggggtcttcttattaccttcattgagctgattaaaaatccagcgtttaagttctggaaccatgagtttgtacactgtgccccagaaattgaaaagttattccaatcggttgcacagtgctgcatgggacagaagcaggctcagcaagtaatggaagggacaggtgccagttagatggaactgcatctctgctgtaaacatgtcagtctggaggtcccactgcaccaggtttataaaccggctgaagaatcctttcagctcttcctgactttcccagccctttggttctcgggtacctgtcccaattactgtttgggtcagcttcctgtctatgtgggcacgttccaaagtttaaatgcatttttttgactcttggccaaaatttgga

SEQ ID NO: 3752 - DNA, 305 bp, Canis familiaris
  misc_feature (1)..(305): n = a or c or g or t
cgtgtggtgtggccctgggnnngtcatttggccctcngagnnnnnncatctcanctacccgttnnnnnnnnccaagaccttccccaggnnnnnnnnctgtgggcctgcagcacctggggaaggtcagacgaaacnnntggcttgtctcctgagtaaggcccgaggcnnnnnnnnnngtcactttgagaggagtgcgccagtggcttgcagggacatgtccatcctgtcactgcagattgccagaaacctgatggaaccaggctgtcactggtggatgcccagctgtccccccgtgggctcgacac

SEQ ID NO: 3753 - DNA, 629 bp, Canis familiaris
  misc_feature (1)..(629): n = a or c or g or t
gtcagagtncgnaccttcacattcaccgctgcatacacacaggtgaaaagcctttccagtgctatgagtgtgggaagggcttcagccagagctctgatctccgcatccatctcagagtccacactnnagagaagccctatcactgtggcaagtgtggaaagggatttagccagagctcaaaactcctcatccaccagagagtgcatactggagagaagccttatgaatgcagcaagtgtgggaagggtttcagccagagctccaacctccacatccaccagcgggttcataggaaagatcccattaaataaggtcttcagtcatatgcttatacgataaggacttaaatattattttgacttaaatatttttttacattgtgcttccctttatattctcaggagagagataataagagttactcacttatgttccctcactgaaaatcattcattcatttaaagtatttaagctctttgttagactatacaacaagttgattgttctggttcctcatatgggtacagtgaaatgtctgtactttgcagttcagccaatgttactagaactagatgccctacccagcctttttaagtacaaaaactttatatttatgtaagtggaacatg

SEQ ID NO: 3754 - DNA, 541 bp, Canis familiaris
  misc_feature (1)..(541): n = a or c or g or t
aaaaagcngtgaaattgttcaacctactttgtaaccaaagaagcaaagctgtgtaatggagttttttttataatgcacattctttatgtatttttatttagtgttttctcggtcacaattttctttgctgtctagcatgatctgcatgatctataatctttgaaccactttcgtacctcatgtttttatccagcactcttattgtaatatgtactagtctgtgaacaatgtcaaataaaaaagaacgaacaggtagtatgttggagctgagctagtgtactatacactagttgttaaaaaaaaaaaaaatgaagtgagccatcttttgttcatttaaaatggtgttttgaatttcgtatgcagaaaacgttttgttacattgcagattttaatgtatttaataaatgcaacatgcagattaagtgcagtgtatactgagtatttaaattaaaatgtacatttcataaatacagtttcaagagaaagcatcattttgtgtatactaacacattaagtgtatgtcagaaattgatgtataaat

SEQ ID NO: 3755 - DNA, 590 bp, Canis familiaris
  misc_feature (1)..(590): n = a or c or g or t
ccagcaggtaagtggtgtgaannnnnggaacaacatcactcccacgactnnaagacctggaattcctgctttatgtcagcataccgggggcccacctgatgcaagcacagatgagaacatcatcgtgtctatgatggcagccctctgtatcggcaaccgccctcagacccctgggggcctacctgtgtctaaggcccctggtgctcccgggaacagcaccgtacctactgcgactggacatcataacggtccctcattcctacnnnnnncacagaacccccgcaagccacagcactggtggtgcaatgggggttaccgccatgccttttagagagaaatctccactcttggaacacgtgggcctgcccctagtcagggcacccctctgactttggtgagccagcgctgtgtgtgcaagttcttggtccactgttctgtgctctgcgcatggctggggaaccttcatagcctgtctaggagccgccaccaactggttcctttcttttgtcatgaatctcaacctctacggaacagacattcccccacatattctgtgtcatagtaaatggattttgctgtannngaccctc

SEQ ID NO: 3756 - DNA, 554 bp, Canis familiaris
  misc_feature (1)..(554): n = a or c or g or t
tcggnnntcctcctgcccccctgccccccccagggcgccccccggngatgtgtttacacgcagggctcacagatctggctcctggggcacctctcctccccgggagcccagacgccgctggggacactgatgggacttcctaagatcgagacaaggccagctattctgttttgtgatctcgcaggtgaccgtgggaaaggtggggacaaggatggagcgagagcagacgggcaagccctccccgtgcatggctccacctcgctcgtccgtttcctctgaccaaagctgcttgcacgtacatatactgtggcctcctttcttctcatgtgtaaattatgcctctggtgaagtgagatgtgcccgtgtaggtcccgtatttcatgcctccgttgcccgtgaaagtgtggttccctcgtggcctgtgatcgcccccgagcctggttatgttgtggtatttatgcgctctcaatctgcccgtttccaaggaaatgcatgcgtgcccagtgccgtggagaccgtcccgtccacgtagtgagcgcaggcatctgtgtagg

SEQ ID NO: 3757 - DNA, 572 bp, Canis familiaris
  misc_feature (1)..(572): n = a or c or g or t
cnaccnagacagtcagctttgggacagtnngtgagacagtcaccntgcacatccgcccagatggggacaaggcccntggcnnnnnngagggctgaggctgtgagcagcaggtgcttggctgtgggccctnnggctgcatggagnnngccagcgctctgtggacatgtgtgctctgatcctccctccaaatctccaagaactcagggctggagcctgcccaccccttccactccaggcacttcctacttcatggggtctgatccagctgaagacactgcacacagactgggaatctcagaaagtacagaagccacctaagagtgcaggccagagggactcttggaccgcagctctgggctcagggcactagacacaggtcagggactctgcatctgtcctgccatgtttacgaggccgggctgccagttgggtcccttctgctccaggctggggacccagtcttcctctcagtggggacttcccggccacatcttcaccatgaacatttctctcggcctccaggaggcctgtgtggggcccagccctctctgcagggtggaccagggtccgtg

SEQ ID NO: 3758 - DNA, 461 bp, Canis familiaris
  misc_feature (1)..(461): n = a or c or g or t
tannnnnnnnnnanttcnannnatgtggtgatcaagatttannaagnnnntgttgctatttggnnnnngttcagncnnnnnnnnatttttagnnntaaacttccnnnnnnannnnnnnacaaaaaangntnannnnnngcannnnntnnncctctgtnnnnnnnntaattnntagagctgtgtnnnnctanntatattannnnngtaataaaaagtgtacatatatannnntgtgtnnnnnnnnannngtatatatgtatatannnagtaggnnnggtcctgattggtccnnntttgccncnnagncttcacagtgnnntnnnnnnnnntgcngnacttgannnnngnngnnnaccatacagatcaggcctgagtactgagcactgtatcaagtagaaaatggatctttcaaggacaggatttgnntgctttccagtgaggaagttaaagcaaannnncgt

SEQ ID NO: 3759 - DNA, 457 bp, Canis familiaris
  misc_feature (1)..(457): n = a or c or g or t
cagaactcaganncacgcagccgctgagnnntcgcggtgtgctggtnccacccagcacgggctacaagtgtaaaatgcacccgnggcacccaaacccccaaccacccagaatataaaatatctcacagatagttttgatatgattcacaagttgaaatgacaatattttggatatactgggtcaagtacataatcaaaattaatttcccctcttgctttttgcttttgaaggcagcaccccccgcccaaatatgaaatcaccatgtagctcaaagcgttgtggaggatttgatccgtaaagcgtgacaaagggcggccaatcctgctgttaccagcacagagtcattgctaaaaggaggaattttatctgaaaaactcatagtaattttgcattctcctctataatctatctgtgctccttttcacgaaaaacaaaatgtttgtgtgtgtgtgtgtg

SEQ ID NO: 3760 - DNA, 642 bp, Canis familiaris
  misc_feature (1)..(642): n = a or c or g or t
actacttatactggaaagattnnnaagagataatgtagagattttcatgaatacatatatatacatatatgtatacatatgtacatacctaatatgtacatatttaatacgtatgcacatacgtatttaatacatatacaaaataggaaagcacatacatcaaattacttgtcttcattttctagctaaatcggtgagagattgaaacaaaagatcaaaatatccttttgacccattattgcagtcagaattgaattctatacttcctatgtgcactagaatctaatctccacaaagcatagatttttttactgttttattaactgacatatatacaacatctagaataagggcctgctcgattataggcactcacatatttgcttaatgaataaatagcatatctgacacactgctaggcactgtgagggaaatataaaggaaagatggtaatacggaacttttccgtaagaagtatacacagcatgcagttaaattaaacaaggattcaagagtggtaacgaacattacaaataaaagtgggaagacttacagagtagagactgatacaagctcaagggaatactcattgtcttgggttgctctcatttggcatgggtgataaccagtagcattgccaaa

SEQ ID NO: 3761 - DNA, 543 bp, Canis familiaris
  misc_feature (1)..(543): n = a or c or g or t
cacagcactgaattttcccgggggctccggaaccctggacacgnnaacagccgtgctttcaaaacaacctatgcaaccgtaccgcgctgntagctctagaaagtgcaaagccccctgcaggccgaggccgagctctccaggaacctgcgggcctgcacaccaggcgccccaacggtcgaaccactggctgagaagtacaaagcccggccccccgcagcctcgggtgtggttcaccgcatcctgggggcagcctggccccttccgggggttctcctgcaaagcggagcagctgcgaggccgtccccggggtcttggtcccgctggagccgcctgcctggggtgttcagacctgctgtcccctcctgtcctcggagctgctgcaggacgggagccacttgcatatgtagatatttatgaaccaatattttgcatcaccttatttatagaatctgttttatacctgagagtgcggtgggcagagtggcacagtcagcaggcacctgcgaattctgctgggaggacgtcgggacttccgtgggacgt

SEQ ID NO: 3762 - DNA, 211 bp, Canis familiaris
tgatatggagaacttttacaccagtgtactgtccaagcccactaagtggcatcacacctctactctacgtagctcagacaagacaatctaatatcttaaaaatactcctgcaatatggaatcttagaaagagaaaaaaatcccatcaacattgtgataacaatattgctctacccttcaagagtgagaataatggttgatcatgaattggt

SEQ ID NO: 3763 - DNA, 568 bp, Canis familiaris
tgggcccatggccaggagggcacatgccctgtccgctccctgcagagtgcttcgtccagatcagtgaggccctgacacaccagggcctccagggtccccagcccagctggtctggcacctccagctgccttaacaactcacctgggcccagttcccagctgcagagcagaggctgagtcggggaaggtgggtcagaggcatcccctcaacaccagaggtagtaaaccggcaggtgatgcatctgtttgacagatggctcctggctcagcgcttggctagggttttctgtgctggacggccagtttgctgaacggccacgagggaaccccagtccaggtaggaagcctccctggtggaatcccacatttcaagccctagagaaagtgctggtgtttcctctgtggacagtcctatgcgccctagtgctgtggatacatttcatagacgagaatcctagccgttcttgtcgttgtaaaacagaatgtaaacaacgtcttatgaatgtatttccttaggaaaactgttgtaaaattttttattagaaaaattcctatttatttcgtactga

SEQ ID NO: 3764 - DNA, 641 bp, Canis familiaris
  misc_feature (1)..(641): n = a or c or g or t
gtattgctacaaaccgaatgatcactcaaacttctcntacaccctatattgcatctcctgtatctgcctaccaggtgcaaagtcctncttnnntgcaacctcaaccgtatatcctacagcaccccggggccgtgttaactccctccatggagcacaccatgtcactacagcctgcatctatgatcagccctctggcccagcagatgagtcatctgtcactaggcagcaccggaacatacatgcctgcgacatcagctatgcaaggagcttatttgccgcagtacacacatgtacagacaacggcagttcccgttgaggaagcaagtggtcagcagcaggtggctgtcgagacgtctaatgaccattcaccatatacctttcaacctaataagtaactgtgagatgtacagaagggtgttcttacatgaagaagggtgtgaaggctgaacaatcatggatttttctgatcaattgtgctttaggaaattattgacagttttgcacaggttcttgaaaacgttatttataatgaaatcaactaaaactatttttgctataagttctataaggtgcataaaacccttaaattcatctagtagctgttccccccgaacaggtttattttagtaaaaaaaaaaaca

SEQ ID NO: 3765 - DNA, 641 bp, Canis familiaris
  misc_feature (1)..(641): n = a or c or g or t
gcacanagtnctgcccagtngcacacacacagacacaggcacccactctccacnnngacccaagtcaagttgctagggtgtnnacccctggatcctgtgcccccactccttcaataaataaagcaacaccaaaggtagttgctacactgggacttctagggggatgaggaaaagggatgataggtgaatctaggagacgaggggagtccacatctgggcccagcccatgtgggcatagacgctcctgtgttccctccccagcccaacactgggcacactgcataggggggaggaacagttggcaggggttgtgggcccgtacatcaattcctcctgtgagcagaggccattaacgtctttattctagtgactgtctctagaaggagagtaggttggttgccagaagacacagccatgttccctaccctctactccaaatgagacatgctcctggagctggaaatggaatatctgacaatggctgcaggtccctccagctacctgatagcctgtgaccttccctagtagtgctgacacttgtggtccaaggacccatttacacccttcacaatcactgagggccccaaagagtccttgtttatgtgggctaaatctatccnnntatactgtattagaaatta

SEQ ID NO: 3766 - DNA, 499 bp, Canis familiaris
  misc_feature (1)..(499): n = a or c or g or t
ctgagctgcgtgccgcactgctacgcccannaagtgagccggctgtgccacctgtcggcggggacctacaggattgtgccctccacctacctgccagacacagagggggccttcaccgtgaccatcgccaccaggatagacaggcgctccatccacagccgggagaggctggggcagctgctgcaggagtcttccttcctggcagttatgaaaacctaactggatgagcctccgcatcagccctggcgacttggggttccaggggcacccttgtgaggtgccacccgccccagcgtggcgacagctgcacgtgttcacgagtccaggccaagagccccgtcctgccaggaggtggccgtggggagcaggtgccgcgggagggtgtgttctccgcggctgggaccctccggggcgcctgccccaccgccccctgctccgagagcgatctgcggcagacgagcgtgtagcaggacaaacctcgtttagatatttatgtgca

SEQ ID NO: 3767 - DNA, 534 bp, Canis familiaris
  misc_feature (1)..(534): n = a or c or g or t
caaanntgcccgaacagnntaccatgtcaacctcgctcacccntgaggacactgaagacatgccgctgggacaggatgccgagatctgcttgctgaagtccnnagaactgatgataaaattacccctcacggtagaagagatcgccaactttggggagagcaacagggagctgtttgtgcggtccagtacctacagcctcatccctatcaccgtggctgaggcaggcctcaccatcagctgggtcttctcctccgaccctaagagtatctccttcagtgtggtcttccaggaggcagaggacacaccgttggatcagtgtaaggtccttatccccacaacccgatgcagctcccacaaggagaacattcagggccagctcaaggtccgcacaccaggcatctacatgctcatcttcgacaacaccttttccaggtttgtctccaagaaagtgttttatcacttgacagttgacaggcctgtgatctacgatggaagtgattnnncgtagcctcaagcannnnnattctagattc

SEQ ID NO: 3768 - DNA, 133 bp, Canis familiaris
  misc_feature (1)..(133): n = a or c or g or t
atgtannngacttgtaatgtctttgcatgtctttaaactttatgtatgttttatcatgtatcatgaattcnnttgtgtcttgtttcactcaacatttttaagattcatacattanngcatatgnnnntaatgt

SEQ ID NO: 3769 - DNA, 623 bp, Canis familiaris
  misc_feature (1)..(623): n = a or c or g or t
tttctagcaccagatagatcttgaaagcaaacatgaatatnnagctgagaggggaactgacatttggggagaaggggattatccagggttcacttagatctcgatgtttcattgaaattgaacttggccatattatctgctctcctataatgaaccatgagagttcattatactgttctctccacttatgagaatgtttggaatgtttgactttcatgggatagagagccttccaagcccagatggccaaataacttccatgcctggacctcttgtctctgtggtgtcaagaagtagctaatggtttcatcttaatgctgccatggaaattcttcaaaccagaaagaacaagcagcaggactacaaatagtttgtcctgctctggaatcagggggaaagcttcactttcctccttgctgaaggcctctagaaatactgccaagttgaagaatgctcttctccaggggagaagacctacagatggcccattaggtctgggtctcctgtcagtaccttgtcttccccattcaccttggtccctgtgtgcctcagagcaaaatgtgatttgtatttgtaaatgtgaaatttgtaaaacttgagtctttccaatgtgtcataatgag

SEQ ID NO: 3770 - DNA, 626 bp, Canis familiaris
  misc_feature (1)..(626): n = a or c or g or t
tggncagcaacgccaacttatngccgttacaatgccccatatctctccgtgtacagtgaaaatgcagnnnncatctttgatgtgaactccatggaatggatccagactgtccccctcaagaaggttcgacccctgaatagtgaaggatccctaaatattttactttcggnnnnaattagattaatatnnnnnacaaataagatgacatatggagatgagctggtatttcccgaaacatcagagagtcatcagaagcaaatggtccgacacctccacagcaagcgacgatattccttcagagttcccagagggaaggagaggctgcccatagggctgtgatcaccatccttcacatgtgggccagaaggacgactccagaaccacatgttatttgatgttatttggaagaaaaataaataaatttctgaaacttgggcagaaatctctgttcacatcagtgttatgtttatttctctgtgaaacttcaaaggaaacctttatgtagttaaatataaatggaagtgtaacgtcaatttgtttttccatgagtgcggaataactgaaattcggtatgtaagcctccatataacataaatatagaacaaatgtggatacacattgtaaca

SEQ ID NO: 3771 - DNA, 487 bp, Canis familiaris
  misc_feature (1)..(487): n = a or c or g or t
actgagatggagtgaaatgcagagaaagagnnagggagnnaaagatgacaannagctnntcagagcacaaggaatggaccatctcctaaattcactcttagcacctacctgtctctttaagggcatgccttgtgctgttaatagtttttagggcgaaccactccattctacaaggttctcccacttaaaggagttccccttatatgggctatctggtgaatggccttccttcctgccagagggcttgtgagctggccaaggggacggtgggtcttttatacttcagtgtatatagtgtaatgtagtgtgttttacatgtgtagccatgtcgtggtctgtcagcccctcgcattcctacggggtgttgagatgccctaggtggtatgtgacaccaaagccgcctctgtcatttgttgtgctgtcttttcttggcaaaagnnnttgtgtatatttgtatattacacatttgtacagaattttggaagat

SEQ ID NO: 3772 - DNA, 546 bp, Canis familiaris
  misc_feature (1)..(546): n = a or c or g or t
ggtttagnctcccacttgcccccatgggccatccacacactggccannnggggnntgctccggggtgaaaggcccagnngtatcccccggctgctgccacgcagccagcgccggctaggaccccctgcctctcgccagccagcgcctgaaactctagctgggcggcgatcccgaacccgccagtcccgggccctgcctccctggaggtaaccaactctagctcctcctcagcctgaatctagagcattgagcactttatctcccactactcagtaaggtttctccagtcccaatcctctcctccctctcacccctccttccttagtatacttcaccaccataccccagtcctttggacctctagacaggcagcctcctccatcatggagtccagaagttacactttgtgttctcctgacactcctctcccaccctaaattattgctgttctcccgctgtgtgtgtgctcatcctcaccctcatcaactcaggcctggggccaggggtggccgtgggtgggaagtcatgttttttttttctctcttt

SEQ ID NO: 3773 - DNA, 539 bp, Canis familiaris
  misc_feature (1)..(539): n = a or c or g or t
gcaagaaatnnnaatgacgaaagacnnaancaangatngaggttggctgaagatgtattaagatgactcatgaccntggtcaagactcacaacccagatgtggctttcttctccaagctattggtaccttgcaacttatcccacagccacctcaaatatgttgcaccatttcccaccttcgttctttccagtcccatctgcttggaataaccttccacacagcattgacctcgaaaactcatcttcatccttacaaaatttgtnnnnnnnnagtgtatatctagcttctttccaagccaactgtccccttcaccatngatgcagaatttatcacttgctcctcagtgtaaactatgtaaatatctttgttactcatgtttaactcatttccctgtagcctctttatttgtgtatagccctatttctcttatgtaatttttgtaccagggtccatgctctcagatcatttgatccactctgcctatcacagaccctgagtcaatttaaatgttcaattaccaatgactgaatgttaatgg

SEQ ID NO: 3774 - DNA, 533 bp, Canis familiaris
catggggaagacagacaaagaagaaatcccttttgtggagacagtttccttgaatgaagacaacacttcagaagcataactacagactgcagcatgtctgcacgtatgcacacataccaggttgacagattgagaaaactgggtttgaaccaaatgcagtagcaacttgctgtggaccaagtccttccctctaataaaagctccaggaactccttcccacccagacctctctagactttagtccatgcttagagatcttatctggttatagccattgttttttactcctttgatcacttaatttatagaccttttgacactgccaggtctcacttgtggcctacttttctgcttcttcaggaatttgcttttattagtcaaatataggggctgccaggttctgtttctccatagatagacttgcttcttttcctatagctaaaacgtataataaacaggaacctgacctttacctcctttcaactgtttcaaagaggtgcgagatacctatgtctcagaattggaatttcttc

SEQ ID NO: 3775 - DNA, 393 bp, Canis familiaris
  misc_feature (1)..(393): n = a or c or g or t
caanacgtacacttggatactggtnctgaaaaaaaaatctatagggaaatcgattttgaagggatctggaaaaaagtaacaagtaagtggttgtcatttaatcagaatttgcctctgaacatccaaatatcctgctttatctgcagtaaggaaatcatgggtattgattggattaggattatgcagtaatattggctcacatgtaatccttcagttcacttcagtgtnnngctacacatgtttaaaggaaatcatggatatttttctgtannnnnnnnnncacttctagctgagcacagactccattgctgtgcattatagagctgtttgtttccagtctggcctaacaacataatcagtttgcgaaaagagaaagaggggggatccctgggt

SEQ ID NO: 3776 - DNA, 78 bp, Canis familiaris
  misc_feature (1)..(78): n = a or c or g or t
gggagcnctgtccccccacccccacccccacccccttgcttgcctctgtatatagtgtgagcagcaannngccccgcc

SEQ ID NO: 3777 - DNA, 265 bp, Canis familiaris
  misc_feature (1)..(265): n = a or c or g or t
catnntattcatatttgnnnatcanagnnnctaannnnagaaaacttnngtgnnnnnnnnntgatttagttgatnnnnnnnaggacatttggagatttngtnntcnnnnnnntctttagtttgctcaaatacaatgagtagacacatttaaggatggggttatgaacccnnnctgagttttatggtcctaaaaacaaaatcaaacccatagtaatgagaagacaagataatcaggcattaacttggnnnnnnaaagagctattaa

SEQ ID NO: 3778 - DNA, 656 bp, Canis familiaris
tgcagtatctgaggtcactacttgaatccaccccttctccagttgtgttttgtcacaatgattgtcaggaaggtaatatcttaatgctggaaggcagagagaattctgaaaagcagagactgatgctcatcgacttcgaatacagcagctataattacaggggattcgacattgggaatcatttctgtgaatggatgtacgactatacctatgaaaagtaccctttcttcagagcgaacatcctgaagtaccccaccaggaaacaacagctccactttatttccaattacttggctgcattccaaaatgaatttgaaaacctcagtaatgaagaaaagtccattatagaagaagaaatgttacttgaagtcaataggtttgcccttgcatcccatttcttctggggactttggtccatcgtacaggccaagatttcatccattgaatttgggtacatggactacgcccaagcaaggttcgatgcctatttcgaccagaagcggaagcttggggtgtgagcgtgggaggcgccatccacttcatccctggactgcgtgggggtggccagcaagcgggcccctccgcgctccaactgctgtccctacagcaaggcttggatgtctcgctgccgacacagatgtgtatgatacgaaaga

SEQ ID NO: 3779 - DNA, 689 bp, Canis familiaris
  misc_feature (1)..(689): n = a or c or g or t
ggaagaattgaatacanaagctgttatcctaganncacttaacacgannnnctaccaaacccagatggaactccagagagagaaagctacagtnggaaatctggagaaaatgctccagatcaagatttctgaagctgaagaaaagtttaaatataccatacagcttctgacagaagaaaacattcatctaaggaggaaaataattgccaaaaatgaagaaatttatgaagaacgatctgggaggcaacagttttttaaaaaaatacaactgtgtgagccaacattgggaggctaaaatgaaacctatctgtgatccaaatgttttccacctgtgagatgccaatggcaaaaaacaaagccaaaacaaacaaacagaacaatctccaaccaccagaagcatctgcctcttactagtttatctggaaacttgaaagctaaggaatacaagaactagaatctgcaatccaaagagaaaaaggagtctgaatttctacacacctctgattcatagtcctgttctcctagagagtccgacattggcaatatcttcacggatccctcccttataggcaactgagacatatctggaatgagacatagaagggagggtattttggtaaagaaacacatagcaccaaggataccataaggtcccctttaaaatgaaaattcatggactaccttgaaca

SEQ ID NO: 3780 - DNA, 529 bp, Canis familiaris
  misc_feature (1)..(529): n = a or c or g or t
catatgctgttnntccatctccaaacactcaaannnnnagcacatccannnnnnnactgatactgaaattgatgaaatgcctcatgtagattctgttccttttccctagccatgcaaagactacaatgattgaatacatatccaacactgaatatctgtgatattcaggcacactttgggtacttttattataagattttatttttattttagaggtagagatgggcaggggaaagaacaggagagggacaagcagactccatgttgagcatggagtccaatgtggggctcgatcccatgattctgagatcatgacctgagccgaaatcaggagttggacaccacccaggtgcatctgggcacttctacctgccatttcctttaaatctcataatgaacaacatttgtctaaacaaacgagccctgagaaattaaaggatttgctcaggcttattcaggaagtggcaaagctgtgtgatacagagccaggcctttcccctcacgtctcatgcnntacatacgacctcac

SEQ ID NO: 3781 - DNA, 557 bp, Canis familiaris
  misc_feature (1)..(557): n = a or c or g or t
ccatatcanggtannnnnngctgcagttctcagagtatatcaccnatgagaagtatatcagagaattctctcntagcannnnncntctcaggacagaaaagcagagttatagaaaatcccacagaagccctttcagttgctgttgaagaaggactcgcttggaggaaaaaaggatgtttacgcctggccacccacggtagcccaactgcctcttcccagagctctgccacaaacatggccatccaccggtcccagccatggtttcaccacaaaatttctagagaagaagctcagcgattgattattcagcaaggacttgtggatggagttttcttggtacgggatagtcagagtaaccccaaaactatcgtactgtcaatgagtcatggacaaaaaataaagcattttcaaattataccagtggaagacgatggtgaactcttccacaccctggatgatggccacacgagatttacagatctaatccagctggtggagttctatcaactcaataagggtgttcttcnttgcaagttgaaacattattgtgctaggat

SEQ ID NO: 3782 - DNA, 305 bp, Canis familiaris
  misc_feature (1)..(305): n = a or c or g or t
tnactatggnacagctttatgagaannaaaaagatnnagatggannnntgtatgtgnnntacagtggagagaacacttttggcnnctgagggccagtgctgggctaggtgnaccgttcctgcttgtgtatcttgtaaatagccggccattttcagtttccagnncncttcacataganctattagtgcatttgtaactggatttatttcntnatatattggaaggttttgtttccttagattagtaaattatcatacagagttttattttcagttttcnnnnnntgcactgtcctcatggctgtc

SEQ ID NO: 3783 - DNA, 570 bp, Canis familiaris
  misc_feature (1)..(570): n = a or c or g or t
acagaancntagtggnntggtnccacttttatgtcaatccctannnntganntcaaagagtcttnggtnggatcgcnncaacagaaacttgtcagtggcaaatggccatgcagtatggttccccagaaacctggtccaccaagttgatctttaagcttagcgtggggcttcctattgcctctttgtatcactcctgagagcaaattctatcagcagaaatgcctagaatcattgttttgcatggaggtgttttattttgatatgaactggccagtcttaaaccagaagaatgaatgtttcgcttttatagtgttctcacagagaaatggacaagtgttttgcaagtataaaaggcattaggaggaatttatttttagagacatagggaagtaaatcacaaggcaaaatagatctgtttgttgtttgttgtgggaggaagtattaataagcaaatcaaatgccttgtatggtttccagtgttataattatagatcctaaccttgcaaatacatgtcagccaaatgcacaacattttgggaatgatggtaaaaaaaatgtatgaccaaaata

SEQ ID NO: 3784 - DNA, 620 bp, Canis familiaris
gacaaccaaagcaaaaagtcgatctgcacaggcaatgcctgaaccaagatctgaacagaaggtgtctgacatatttgatgatcccctgaacgcctttgggggccagtagagcatacagggtatcaacatctcacccttcagttacatccttgagttaatgatgctgtcttacgtactcattgtcttaattgggttagaaaaagcaaatactgaaacaacctcacctctttctcacccaacatgcttaatttttttctgccttggttttaatcatgcttagtactgcaaaacaaaaataaatatttcacaatgtttttttttttaaactatatttttatttaattagccctgatggagccacagtatgatttagggcatgttggaggagaaacctctgtgtgcctttaatggatgggcaaggaattccagaggaagcaatgctagacagatgaccaggagtattcctttcatggatatcatccctagcttagagcctagggaggtgataaaggaagaggatgagagattatatacttctcatgactctttacagtaggtaaggaggtttccttggattccactgaattctaaatgcttctataggtcaattaatgtaaggt

SEQ ID NO: 3785 - DNA, 165 bp, Canis familiaris
  misc_feature (1)..(156): n = a or c or g or t
atacatacacatgcatccatataaggtatccctggaaggataaataaactgggancnntagttgcttgagggaaaaggaatgcaatagtagtgagataggaacaaggaaatttactttttactctgtgtcnnngngatcttttgaactttgtacttactccaaaa

SEQ ID NO: 3786 - DNA, 625 bp, Canis familiaris
  misc_feature (1)..(625): n = a or c or g or t
aagaagatttagataagtggatggtgacttctgataagactattgnaggcagaagtgaagtgttcctgaaaatgggcaggaataatcagagtgcattgctctatgggactctgagctctgaggcacctaaggacggggaaagtggccgcagtgggtactgtgcaatgatatccaggattccaaggggcccttttgagagaaagagggcttatgattggtcccagttcaacactctgtatctccgtgtacgtggagatggtcggccttggatggtgaatatccgagaggacacggatatagtgcaaaggaagaatcagatgtacagttacttcatgttcacccgtgggggtccctactggcaggaggtcaagattcctttctccaaatttttctactctaatcaaggaagaattcgggatgcccaataccagcttttgcttgacaagatctcttctattggattcaccctggctgataaagtagatggtccattcttcctggaaatagattttattggagtgtttactgatccagcccacacagaagaattcgcctatgaaaattctccagagcttaatccaagactttttaaataaagatggtaattttatactatcaaattaag

SEQ ID NO: 3787 - DNA, 637 bp, Canis familiaris
  misc_feature (1)..(637): n = a or c or g or t
tactagagctcaggatcacaaaatacggtagcattacaatctgtgtatatttttgatcaagatgataataatnnnnntacttgcgttattttttattgtttatcaaatcttatatagaaaagtatggaaatactcctttaaaaaatttctaaggaaaatatttctcccaatctaacataattgtaaaatggctatgtttctgaaaagtttttgaaagaaagcaaaagttctagaactaaaagtaaactggtgtttaatatcccattgatacttagaacagattattactaagaaatggaggacatatttagtactgttttaatccacttgtccagttatgtatacttttttgatcgagaatgtgacatataagttcagattagtttgtttcttttaactatacacatacatattttttttttctttccttttggttgtacatatctccatgtgttttaaaactttctaaatttctgagtggcctatgtgtaaatttctgtttttatagacctggcattatacaagttttaatgtgtgtcaaaaacttgttccatacagctgtggtatctagcaataatgtgaataacttttgaaattatataaactatgcttactaatttgtattaagaattggtac

SEQ ID NO: 3788 - DNA, 617 bp, Canis familiaris
  misc_feature (1)..(617): n = a or c or g or t
taaatcactnnnnnnntagtagaaagagnnnagaagggaagangnggtngacacggcttctttcgnnngntnncttttttgccgaacnngnngtgcagaatcaccgatgtgnnngtgtagcgctgaggacactctggctgggcgtgtattgggtggtgaagctttgcggttccccgctggcacctttgtaaagcggagcggttttctgtgatcatgatttgtactttcttacgagctgcgcggtgtgcggagaagctgtgcaggtcgtcagggaagccgttgtttccgccacacttcgtgcttaacagagctcgcttgaagaccgcgtcgggtttgagctggggtctgcgagagcaaaagaaagcggtacgacctgagagtatccttggagtcacccagaaaaccatctggacgcagaggcagagcccccagagggcaggagacgacggcagcaaacaagtgtccgtgcacagccagagaggggaacccgtcgtctcaacgtcacagaaagtgaaagaagctggaagagattttacctatttgatagtggtgcttattggaatcaccgtcacaggttgatcacagcaagtataatgtctgtccctaaaatctgttta

SEQ ID NO: 3789 - DNA, 196 bp, Canis familiaris
  misc_feature (1)..(196): n = a or c or g or t
ctttgtnnngggtgtggattgagctcaggtttgccctgctgtggcaaaaaccaaagnnnnnngccnnnnnnnnttaannnnnnntgagcnaattttatantnnnccgtcttctcaacctggcnncaatgacactcctgggcnnnnnnnnnntttcnnnggaatgtgnngnnnnngggtgatcccggccctcctcag

SEQ ID NO: 3790 - DNA, 430 bp, Canis familiaris
  misc_feature (1)..(430): n = a or c or g or t
tccagaactnnaggaaatgcnnctgtgtgctcagacctgtgaaatgatatctctttatactgtggttgttttttttaaaaaaagaactgtctccacatctcctccatcctgtgcttttggaaccaagagaagacctttgcattgatcttgcctaaattttattttgctacacgggttttcagaactttttagatcctaaatacgaccactacgtctttattcaagatgtgcaacagaactgaagtccaaggtctctgcccatccagaagtttccatttgaacatcagtccttcagaaaagttactctctagacaccagacagcctgtgtttccagaatgtcaatattgccaacagcaaccttgccagatgcctagatgaaaaccacatacctatgtctaatgaatattgttcaatttcattctggtaacc

SEQ ID NO: 3791 - DNA, 552 bp, Canis familiaris
  misc_feature (1)..(552): n = a or c or g or t
agagtcaaannaacccacagggctttgtcctctctttgtgccanctgcagnaggtcaagcattatcttattctcccgagtgannnnnngggccgcctgtacttcagcatggatgatggccagactcgcttcacggacctgttgcagctcgtggagttccaccagctgaaccggggcatcctgccgtgtttgctacgccactgctgtactcgtgtggccctctgacggcatgtgtctcagcccgttccaggctggccactggtccctgtgctcataaagtggacttggagggtacagaaggtacggacaggcccatgaataactggagggcaactctactccagagagttttctactcaatcctttgcctccctcaggcagaaagtgctcccccacccccaatctctctccttaagaaaaagtacttggggtggccctcccctccatggagctcctgggcactgctctggggcagggcattatgggagtaatgggggcagcccaggtggtcttaagccccacactttgtacagactgagaggccagttgatct

SEQ ID NO: 3792 - DNA, 626 bp, Canis familiaris
  misc_feature (1)..(626): n = a or c or g or t
aaagaaaangcactnnatcacatgcnagctgctctgannagtacagcccagaggctcacaggaataaaacgaagttgtgtttgttaactacaccaagttagaaggaaatataccttgatctttaggttataaaaaagaattgtagaaagatttgggaaataataaatacagttcctaggcattgattaggtaaaatcgaataatatattaataccttcagtttaaaggaattatatttaaatagatgtaattttgattctctgttaagcaataatttatgtaattgtaaagtacatttcctctttcaaatgtgaagttaaaaaggaaataaactatatctatggttaagatgatgatttgatttttggcaactgaaaaatgttttgcatgcttttgtctgatggcctcttgagtaacttttcattgtaagatcaacttaatcaaacaccacatgtaagtatgattctataccaaaattctgtacccagttgccataaaactatttcaggacacctgggtgggtcagtcagttaagtgtgtggattttggcctaggtcgtgatctcagagtcatgacactgagtcctgtgtcaggcttcacgctcaaaggggagtctacttgngntt

SEQ ID NO: 3793 - DNA, 548 bp, Canis familiaris
  misc_feature (1)..(548): n = a or c or g or t
taccttttctactcactttcaaatagccaaaaataaggctgtttttaaaaaaatnnngactgcttctctaatcttccttacgaatgactagcaaccccaagcctgcctgtcccctgcagtgagggggcttnnggaccctgtcactacagactaccctgcnnggggtccctccttactcggtcttagggcatgggcaggagaattaagattccctgagacttcgggtcaacactacggtcaggcaaagcccatacttcccctcattccaagcaaccctccgtacctccccactccctctgtcaggtgccaccactacagtcactcctctggtgagggtcagaatcacgtgggagctcagctcacggatgtccagggtcagctgtttgagaaacctccagataaggctttactttcctcgagtcctttgtgcacctgtgcaaaccctcggggtggggggtcgggtaacgcgcctacaatgaatgctcatttcctctggcgctttagagtttannaagtgccttcgtatcannnngctctctgctcattgt

SEQ ID NO: 3794 - DNA, 619 bp, Canis familiaris
  misc_feature (1)..(619): n = a or c or g or t
tnnggcattgctgtcagagccatgattaggccaagttaaaagactgatcagattttccatnntgaggaaaaaagtagaaatgaagcataaattcctatgcatttttgggttttagaacaattttcttgaccactctttctgcagaagaatttatagaaagaagaaaggggttttgggtgttggaagtgtgtagggcagtcatctaaaatgagcagttacagcactgcctgggttgagcataaaaggcttttaaacttatgatcaaacatttgcagtaagcttggtaatggtttcttctatgtagagaataaattctaaaggtgttttgaggctgaagaacaggggtgatgagcacatactgctgtgtaatagttaaaatgatcaaaagacaccaaccactcagttaaattaaaagtattgtaattgagcatattgaaaagcctcagctctggttttagtacaccagaattgttcttttcaattttagaaaattgagcagcttagagaaagtagagatgaattagtggatgttttctttataaatttatttataagaagagaacccataagtacttcataagatatgccctgtcttaaacttgaataataatattggtaa

SEQ ID NO: 3795 - DNA, 441 bp, Canis familiaris
aagatgatgagctgagggtaaaccaactgagaaggctttctgaggatctaggaattcaagaagatgtggaatttaaaataaacatcccatttgacgagttgaagcattacttgtctgaagcaacaattggtctgcataccatgtggaacgagcattttgggattggagttgtcgagtgtatggcagctggcacaattatccttgcacacaattcagggggcccgaagctcgacattgtcattccacaccaaagagagataactggatttctggctgaaagcgaagaagactacgctgagaccatggttcatattctttccatgtctgaggaaaagagactccaaatccgaagcaatgctcgggcatctgtgagcagattctctgatcaggagttcgaactggcattcctgtcatctgtggagaacttacttaaatagtgcc

SEQ ID NO: 3796 - DNA, 659 bp, Canis familiaris
  misc_feature (1)..(659): n = a or c or g or t
gatatnnggtttgtcaagaatgctgggagacatctatgtcgcccntgtcataatcgtgagaaagccagaggccttggaaaatacatctgccagaaatgccatgccatcattgatgagcagccgctgatattcaagaatgacccttaccatccagaccatttcaactgtgccaattgcgggaaggagctgacagctgatgcccgggagctgaagggagaactgtactgcctgccgtgccatgataaaatgggagtccccatctgtggcgcttgtcgacggcccattgaagggcgtgtggtgaatgccatgggcaagcagtggcatgtggagcattttgtttgtgccaagtgtgaaaagccatttcttggacatcgccattatgaaaggaagggcctggcctattgcgaaacccactataaccagctatttggtgatgtttgtttccactgcaaccgtgttatagagggtgatgtggtctctgctctgaataaggcctggtgtgtcaactgttttgcctgctcgacctgcaacactaaattaacactcaagaataaatttgtggagtttgacatgaagcccgtctgtaagaagtgctatgagaaatttccattggagctgaannnnagactcaagaaactagctgagaccttaggaaggaa

SEQ ID NO: 3797 - DNA, 211 bp, Canis familiaris
  misc_feature (1)..(211): n = a or c or g or t
gcacagcatctggcacatgctgctnnnnnnnngtgcggnnnncctgctnnnnnnnnnngaggagcncnnnnnnccctggnnntgctcgcagnngctcacnnnccactatcagatctgtannnaccaccgagannngctgtacaccgtgacgtgacgtggnnggctcagagacgcctgcnnctgtgatttgactnnnnnnncaggggcagga

SEQ ID NO: 3798 - DNA, 445 bp, Canis familiaris
  misc_feature (1)..(445): n = a or c or g or t
taattttaatatagctncttanntcatagatgcaaganncaattcttgtcttctctcagtgtatcatagattaaaatgatactcatctataggaaggagatatataaaacttggataataaaatttcttggataattaaatttattgtcaaatatgattaggttagcggaatgtgacctatcagggaagatctgtgagactcgggatgccttaccttagatttcctcctgcataacaaatccatctaaaattggagagcttttagagccagaaaaactgctaagagaaacaactatatttttctactgcagttttgttccaaataaacccatatcctccagaatagtaactgatagccaaaaagccccatcaccatgctttctaagatgaccgagaagaaaaaggtagatcagagctttctgtgtcttcagggaaaattaccttc

SEQ ID NO: 3799 - DNA, 535 bp, Canis familiaris
  misc_feature (1)..(535): n = a or c or g or t
ttaaaagagagatatcaaaaaattggtganaccaaaannaanantcccattgaagctctctgtgaaaactttccagaagaaatggcaaccnnncnnngatatgtcaggcgattagacttctttgaaaagcctgactatgagtatttacggaccctcttcacagacctctttgaaaggaaaggctacacgtnnnactacgcctacgattgggnnnnnaggcccattnnnacgccagtagggtcagttcatgtagattctggtnnntctgcaataacacgagaaagccacacccacagggnncggccatcacaacaacagcctctccgaaatcagccaagatctttaacagcagagtggtttgtccagcggggtcccttttcccacttcccagcacccacataagcaggaatcatgtggaaatgaaaccaggtgacagaagcagctgcacaagcaagagaagcctgatcgggtccacattaaccagatgacaggagtgagagccttcagttacaattcggggaccatcagtgagaaa

SEQ ID NO: 3800 - DNA, 588 bp, Canis familiaris
tgtgcttcaaaagtgataccatctttttagtataattttcatcattttattttattttcactttacagaagtttttaaaaggccctgcttagtcagtgtacagggtgagtcagaagcagtttcaccaaggtgtagtaattgctgttttactagttgcacatttagaatacaaaggaggcatcagaaacacactgacttttccaaagccacttccttgtacacagagtctgagcagggacagcgccaggcatctccctgtaaaggcacctgccgatgaggatttgactagaagaacgtaggcaagaaagggaaacctctcatgcagtctctgagagcgggcctgggcttggctcttcgtccagggtatgcttaggccacacacgatgcttgccttactttaaagctatttgccacagtcctgttaagtagtgtggaagtccttttgcagtctggtgtgcatgccatatgatcaggacagcttttccaccttacctggtttcctacagacaagtaggagaaatagtgaatttaccctaaaatgtccaatctgtatttatgtaccttgtcagtgttttgctgttggttttc

SEQ ID NO: 3801 - DNA, 509 bp, Canis familiaris
acccaggtccaccagagcatggtgcccctcttcctgcacctgaaggaccactgtccgggtgtcgtcacgcaggccaagttcaccctgtaccgctgcgcggtgctgctccgctggcggctccggcacacgctcttctgcacgctggcgtgggagaggggcctcagcgcccgccacttcctctggacctgcctgatgacccacagccaggaggagttcggcatccacctggcgcaggccctcagctacctgcacagccgccaccgccacatcaagacctgggcagcgctcttcataggccgtgtcccagatggtgagcagcgtcgacacaaacctgctgttctccacttttgaagatctcaaaaaagacccggagcccagcatccgagtattcgccaccaggcagctctacttcctccagaaggtggcggccagaccgtagtgacctcctccgcctccctcgcccccgtcccctcccccgtgcccaccgcactggtcagccctgccccatc

SEQ ID NO: 3802 - DNA, 513 bp, Canis familiaris
  misc_feature (1)..(513): n = a or c or g or t
ctnnnnncagatctccgccctgggtgctttaccacagtttctccatttccaaagacaactgcctttccattgtttctgagattcaaccacagatgctggtagagttggcccctccctacttcctgagtaacttgcctcccagtgagagcagagacctcttgaatgagctgagagaagaaacgacagattcttcaatagagagtgaatcaccctccacccaagagtttggagatgcctgtgtcctgcagtgacctgcctaaggaatggaactgagctcatctcaaagcattagatcctccctcaggctagcaccaaggcagccagccagatttagaaggccaaaggttaggatccaatgtaaatcctggaacctgactgagtctcaagaaatggtggactgaaaatagaggaaattggataagccacaggatacataaggttgaaccctttccttagccttgttctatttattagagaatgactgatatgccccctaaacccccagctcatacc

SEQ ID NO: 3803 - DNA, 509 bp, Canis familiaris
  misc_feature (1)..(509): n = a or c or g or t
ctccccctttcccaagatctgtcacaacacannggtagggatgttaggatacgggcantagaganncctcnntgggcaannagaaaattcagatagtgcctctatattctgtttttgccttcccccatcatggagtcgacacctggaccccagagcccagcaggcctacgccagagccagggaggtgagaccaggccccccgaggcaggctgtggtgcccggggaggagtggccggcaagagtgctggcagcaggaggcttcatgagcggctgctcctggctccgtgttccctggtcagtccaaacgggaaaacagactggacagcagatgctgtgtgagatcttaggccttgaacttttttttttttttaagaaagaaaaaaaagtaaaattaacaagcctcttttgtaaatgatttttctttctatgtataaaaccccggcagttccttgtttttacatgttcatgctgngtaattttgagatgttactgagatcctgaacataatg

SEQ ID NO: 3804 - DNA, 635 bp, Canis familiaris
  misc_feature (1)..(635): n = a or c or g or t
aagtacgtccatnncattgctgtacattggtacctggactnnctggctccagcgaaagccacactgggnnagacacaccgcctgttccccaacacaatgctctttgcctcagaggcctgtgtgggctccaagttctgggagcagagtgtgcggctgggctcttgggaccgaggggtgcagtacagccacagcatcatcacgaacctcctctaccatgtggttggctggaccgactggaaccttgccctgaacctggaaggagggcccaactgggtgcgcaactttgtcgacagccccatcatcgtcgacatcaccaaagatgtgttctataaacagcccatgttctaccaccttggccacttcagcaagttcatcccagagggctcccagagagtggggctggcagccagcaagaagaatggcttggacactgtggcactgacacgtcctgacggctctgcagttgtggttgtgttaaacnnnnnnctcgaaggatgtgcctctcaccatcaaggaccctgccgtgggcttcgtggagacgctctctccagcctactccattcatacgtatctgtggcgtcgccagtgactggggcagatgcccaagcagggctggggctcagctggggnnnnnn

SEQ ID NO: 3805 - DNA, 484 bp, Canis familiaris
  misc_feature (1)..(484): n = a or c or g or t
ctcagctccccgccccccaccccccggtgtatcgtggtgtcttacattttagcagtattttatattttctgtaacgcactangncttagatgtttctagagctcgtttgttaatacaatcacagactttttttttaatcctcacagagacccaattgaccaaaaacaaaaaacaaaaacaaaaaatacaaaaaaacgacaaaaaaaggcgtcatttttgtacaaatagctgcaagaagcctctgttgtgttgctgtgacccatctctgataacattttttttttcttgctatttgttttcgacattaagagtcaaaagttgatccagctggcgtgggggtgggnnnggcacccgtcggcccctggcgttgtcccttctgtccttggnnnnncatacgatgtttgttctcagcactgtacaacggtccctatatgatatggagaagcaatatcactgtatgaaactcacaccatgtattattatt

SEQ ID NO: 3806 - DNA, 647 bp, Canis familiaris
  misc_feature (1)..(647): n = a or c or g or t
cttttcccagttggggaaggtgatgtncnnnantcagcaggttcaattcagtaaacactgttaccccctactagatatgataagggtttcctcacatgagctttgttctgtgcatttccagagtgactaggggtcacgtgtaagtggagcactgctcggtgctctcactacatcgtttagaaagaataagtgttcagaatacagctggtaaccttgtgtgtgccgaacagagttttcaacagttcctagttgtgccttttaaaccatgcaatattcaggacagtttgaatcaaagagtaagaaagctgctatgtgggtaacttatttctctgtgggagggggcagggagagtcatgaacgatctacctccaactctcttctattttgtctagagacattacaaagtgcacctgaggcaaccccaaccctgacatttgttcttgcatgtgacgccagaaagtcttcaggtggacttgtacattctgtgctttgaaagcacaaaaagaaaaaaataatgtatatatttcctttaatgtttatacannnnnnttatatggagcagtattgttatgtctgtactaatttgcgaaaatttaagtgtacaaagagattttgagtttgcatatataaaataaatcattttattg

SEQ ID NO: 3807 - DNA, 49 bp, Canis familiaris
  misc_feature (1)..(49): n = a or c or g or t
gtgtgcatgtacatatatatatacatatatagannnatttatataatat

SEQ ID NO: 3808 - DNA, 656 bp, Canis familiaris
  misc_feature (1)..(656): n = a or c or g or t
atagggtgccaatgaaactagaatttcaaacatgcagtatttgagatgtatttgtactaaattatgtgtggtnnatctgaaatcaaacnnnnctgggtgccctaaattttatngggtcatttagntagggnncagaggcaggatagggcgttggaactagaaggtatcagagaagcagcaaggccagctggaaatctgggcaggggacaagagtgaggagactgaatggccttcgggcttggaggggggtgtcccagggactctgccctgttgacaaatgggctggggtagtgaaagcctctaaggcctccttggctcctgcctaagacagtgaacaggtagggtggccccagtggcccctgcagggtgggggtctatagggcagaagctggagcccctcctctggggaaccccagatgaggtgcagcaacagaaatatggtggtatcagataaagggattggacatttgggattgtcccagggctttgaggagatggggcaagaaggtgggtgggaggatggtggtagcagagcagtggaggccaccaggctgggtgccgggtgagcatgtgtacagggcccccaggatgggggacgcctgactgctgagaggaaaatgcatggacacacagcacaaataaaatcttctctnnnn

SEQ ID NO: 3809 - DNA, 439 bp, Canis familiaris
  misc_feature (1)..(439): n = a or c or g or t
caccaccctgctacccttcctggctgccgtgggccagtgctgctctcgggacaggacgaagccggggaccctgctcagccactgcagcaggggtgtggcccagctgggcactttcctggccctggaccagctgctgcagcaggcgggcgtggagtgcaccgtggacgttttcagtgtggccttgcagcagtcacaggcctgtggcctcatgaccccaacgctggagcagtacatggacctctatcactgtctgaacagcgcactcctggatgggctgccttgaatcggcgctggtcgccgtgctgcgcgggagcagcagaggtctgggcctggcgtgcggggatgggcggcctcggcaagccttccggggcccggcttccccaggagggcagcctgcacgccgggctccgtgccgggcagggcccgaagnnngannnan

SEQ ID NO: 3810 - DNA, 624 bp, Canis familiaris
  misc_feature (1)..(624): n = a or c or g or t
ctgngctgtacggctgtcgcccccctgccctgcctgcccagccagggggnnttggnncccttctcggctnngtcccggggtcnctgagtgcagnngcagggcatctcaggccnnntcttccgtccttgctctcctacatgggaatcttcctccacaaaggnaagccaggccagggaggcgagagaagtgtgtttgatccaggcccctgtggcggggtcctgggtcacctcaccagggtcttgggccacagacggatcccctctcagcctttggtgacatgggctgggttgtccccacctgccctggagtcgtcctttgctgggacatcccaggggacttggtcctgtgccactcacagctggacgttctaggccctcctctggccatcactgccaccggcatgatcccacaggcctctcatctgttcccttgacattcatgccaggaccactcagatcctcggacttgttttctgtgtggtttgttggaaactctgagctgcccttacaggtgaggcccctgagctgctgtcgggctctctcctgtctgtaccgcctgttggcataagcagggatcctagcattttgccaacaaatgcattttcctaaaaaacagtttttacta

SEQ ID NO: 3811 - DNA, 235 bp, Canis familiaris
ttttttcaaatgaaaattggaattgcagaacacttgaaactagtacacgggaagaaaaaaatgacttatcactacataatgtgccaatgtttttttctatgttttgtaccaaaaaatgaaatcctatatgacaattccacgcaaagaaacgtatctaaatttttttttgttagaaaagcgaatgtgcttggtcaggagagcagctagctttgtgttgtaatgctgcattatgtaa

SEQ ID NO: 3812 - DNA, 504 bp, Canis familiaris
  misc_feature (1)..(504): n = a or c or g or t
catggtagcaaattcatgagancgttaccaataacgaagaaataatttggcaaatttttaggggtgggaactttttaaagtgttcataacaaaacaaaaacagggcagccttgtagtttaaaatctatttctaaaagcttaacagttcattttcaattgaattgtgtttagggatctgtgttttcagttttgttgttttttctaaaaaaaaaaaaaacagtaagttgcaggtctatactgtataaacatgcatctgacaaaatattgctgacattctatacaaggtaaaataataatcttgccttagtgatcatggttacacaaaagaggtgcactgccaataattatctctaactcaatagttgaaaacaacgtgcatgctaatcgtgatttcggggtgagaataaaacacccccacatatcaaaacatgcatttgcatgggcccaaaccagtgaaatgttatgtttgtgcttcatttttgccaaggtaaaaatgttccatca

SEQ ID NO: 3813 - DNA, 546 bp, Canis familiaris
  misc_feature (1)..(546): n = a or c or g or t
ccccaccacacaccttnnnagagaacacatcatnngatgggaaaagaaatnncagcctgccagggacagtgacccttgtgagacccggtctgtgaataaaacaggggctaaatgcccaggatgaggggttatctgtttagaaggatcctcagcctcacagattcctcgaggccctagggtagagatcagatcagttggggtacgtgcacccccacccgtgttcccaatccctaccaggttggtccccacaaactgggaacggccccagctggacaccccactctgagctggagcttctgacaaggcctgaggacttgccccagaggaacaaggacttcctggcttcctcagtaggtttatcggtgcaggttaactcctgggagcccccaagactccctcctgtgagcagacccccccatttttaggcactagccaggagataagatgtggctgcctaggaggcagagggacggcaggctcctgcatacccacagccccgcagtgtcgagtccgaaatcctcccaagacccccagccgcctggacgc

SEQ ID NO: 3814 - DNA, 551 bp, Canis familiaris
  misc_feature (1)..(551): n = a or c or g or t
cgtccatctttcacaagaagctttgtgagacaattctccacttgcaagactgttaaagtnnaccccccaccccccacccctcnttaaagcaattagcgcattgccaaaaggcttcactgatttcaagttggaactgcctttctgggatctaattgcaaggacatcaacacagctgagccatgcctggcgagagcgcttggcagtccctcctgtggtcaggctctgttcacctagctggcttcccactcctaaacaccttctgtaccagtctccctaccagtcagatccctagtaatgtctatgcaagaaaaagctgacagtcctacaggattaagggctgaaatcttaaactttgattccatgtttggaggaatggaagtggactgacagggcaagcaataaaaacaatcaccaaaccaaatagccatggcctctcctaagcccacctccactccactcctgcagccagtggtcccaacagaaccaaacctggaagagatcagaggaccagggaatatgtgacttcaccagcaagatgtagattgcctgta

SEQ ID NO: 3815 - DNA, 632 bp, Canis familiaris
  misc_feature (1)..(632): n = a or c or g or t
agagtttataaaatgactatggataggggactgttttcacnnnnagatcaaatgggtttnnnngtagnnnnnagggnntnnaantgacttgatttctnnnaatgaaaacccacgcttttattatgnnnngcttctttaaatgcatttaatattataaagttccaagtcctgctgtaaagatcatgttgtttcgtttttcccagggctttcactgtgatttactgcattgcaggctgtatgataaaatataaataatttaaggagagaaggctcttgattccttacgcacgtggaagagttaaaacttgatcgaaggacttacattcacaagcttaacctgaggtcggggacgtggggattcaggcacttgtttacagactttgaataacagcaaagaagttatggtttgtgaagaatttgtactgtggaaaagataataaattggagacattattgtgtgggactgtgttgatttttgttgatgacactccactaaaaacactatacattttctggagagctgataagctgttctattgcttaattgcactataagaaatagtgatgttttggaagttgtcaacaaatttctttccattttatattgtttgtcatatttttatgtagtttga

SEQ ID NO: 3816 - DNA, 488 bp, Canis familiaris
  misc_feature (1)..(488): n = a or c or g or t
canaggtcgaccactcctctgtctgccttngagnncctgccagnnnataacctgactgttcacngtaagaacttcccaaaagattaaccagctcttcatnnnnagcatccacagagtggttgcagcctgagattcccttgcttcaaaatctttgccctgccgtctccacccattccagaccatgacagactcaacatacaacgagcagtgccgggacaacatacacaatagaactctgacccacaatatgcagcagccagcccaagaacgagtcatcatcaacagtaaccagcaggggaagccaacctactgcctacaaatcagacttctaggaagtcagctccctgtctctagcaaacagtctacgaagccagtgactccgatgaagaaaacacagaccatattttgttaccagttgcttggacaatgcctgaagtatctgaggacttcataaacatgaactttcagtaataatgagacactttgta

SEQ ID NO: 3817 - DNA, 592 bp, Canis familiaris
  misc_feature (1)..(592): n = a or c or g or t
actgagtaagcaannnnaactgctttccagaagtcntcctatcagtaaaaataaaaccaaacaagtgaactcatccaagaagaaaagtaaaatccaggctgatcccagccgctatctcaaggatccttcaattttccaggttgcaagacaacttcgactggtagctgttaaaccagatcagttgattaaatgcccacgtcggaaccagcccgtcatcgtattaaaccatcctgatgttgactctccagaagtgaccaatgtgatgaaggtaataaacaagtacaaaggcaacgttctcaaagtcgtcttgtcagagaggactaggtgtcagctaggcatcagacggcatcatgttcgcctaacataccagaatgtggaggaggccaatcagataaaaaggcaaatgatgttgaaaatgaaacttaaaaaagttcataaaaacaactaccaggtggtggattctttgcctgatgactcatcacagtgtatatttaaatgctggttttgtgggcgactgtatgaagaccaggaagagtggatgagtcatggccaacggcatttgatagaggcaactagagattgggatgttctt

SEQ ID NO: 3818 - DNA, 341 bp, Canis familiaris
ggacctgtgggtggcaggggcaactgctccagcctttggaagccagagagactcctggtccaggccgggactgtctgggggctcctccaagtgctccaggacatgagacctgtctgcatatcatatgacccaaaaaaacccggttcaaaatattcagccaggccctggggacagaggtcagcctggggtaacagagcagggccagtgcagctctggagacctcctgtagggaaggagggacaaagtatgagggggcagccggaccagcccctggttgcagagtctcacccgtggctggggcggggcccctgcctgggactcagcatttctgataagcctta

SEQ ID NO: 3819 - DNA, 558 bp, Canis familiaris
  misc_feature (1)..(558): n = a or c or g or t
tccagaacaactgtgcagacnnatctgcacaaatancngnactattgggngaaaggtgggtaagccctagcttcctggactannttcagggggcacaggagctgggagaagaggcaaagctacaggtttaccttggagccagctgagaagagcagactcacaggtgctggtgcttgggtttagccaggctcctctgagcacctcatgcatgcctcagcccctgggccctcgccctttcttgccctgcagcctgcagtaccagcacgcagacgccttcaccacagggtttggttttgctggcttgaagaaaaatggtcttagagttcattaagacccatagcttcatatggctgctccagccccacttcttagcattcttactcctcttctggggctaatgtcagcatctatagacaatagactattaaaaaaaaaaaaaatcaccttttaaaacaggaaatggaaggcatttgatgcagaatttttgcatgatgacatagaaataatttaaaaatagttagtgtttgttctgaatgttggtagacccttcatagcttt

SEQ ID NO: 3820 - DNA, 579 bp, Canis familiaris
  misc_feature (1)..(579): n = a or c or g or t
gccctgctacatgttaggcaagtgtgcattagtacatagncagttcttcattcttttacaatgtttttgacaggtcatctcatcataaaaatataaataattcaggaaatttgtgggaaaaagaattacgttttacaaaagatgtttcaaagtcttcctagaacttagatgatagagcctaacagttattttgtatctagttgatacatttcatgttaatttaatattaccaccgtacattttattaatcagaattatgtagcatgtgactcttttggctttcagggttctcaatttgtgttcttttgttgcatgtactgtatgtttagaggagaccggttatatactcaatatggttttactgtgccttacacaaagagaaaaatctatacagaatgtatatcatggggtggggtaacagagtctctactgcactgttaggtgatggcacacagagcatgtcccagaacatttctgtgcttaattacccaaccaaagagatctaaagtatgtatgttgtactgtaataggggtttatgcctggacaattaagtgttttatttgttttctgaaatgatg

SEQ ID NO: 3821 - DNA, 588 bp, Canis familiaris
  misc_feature (1)..(588): n = a or c or g or t
ggcntgcgggttctgtccagaatcccgtctatcacaatcagcctctaaatccagctcctgccagagaccctcactaccaaaatccccacagcaacgcagtggacaaccctgagtatctcaacacccaccccacctgcgtcaacagtgtcctcgacaggcccagcctctggacccaggaggccaaccaccaaatcagcctggacaaccctgactaccagcaggacttctttcccaaggaagccaagtccaatggcatttttaagggccctgcagctgaaaatgcagactacctgagggtagcgccaccaagcagtgagtttattggagcgtgaccacggaggatagccttggccataagagtctcagatgtttcagccccctgggacccagtcttggcagctgctccagtgctgataacatgcccacattaactcttggacctgttgactggtttggccctatttgctccgatggactcatctttcacccaggatgtgcccgctacgtggatgtactttgggaagagttactgggacattccattcctttgtnnncaaactgtgaggcctccgcaaaaaggcatccagc

SEQ ID NO: 3822 - DNA, 550 bp, Canis familiaris
  misc_feature (1)..(550): n = a or c or g or t
tattcagagnctttccctggtgaccctcccgccacaggctcagcaatcgccaatttttccgtcagggcttcccagacacgcggcgctgctgaaagtggccccgggcctgacgtcagccgttggctcagcacatggggccgctcggtggcgcgtggccccgcgcccgatgctcccggtgcaggtccccacggagagtcggggtctggtgctccttggcttggggggcccagctctgcttggagagggagggggtttgggacgccccatgcctcgccgcccggccggggggtcccccgcacacgtgcacacagcgccagcctctgggcaagtcccgagacccccagctctgggagggaggactcggccctccagacgccctgcgggggtcccgcgctgtcgacaccccagccctgggctggcctccctccttacactcccttcgccctaaaaccctgtgtcagtggctgctggctgcatggacgcacccctcctttccgtctacgtctggaagggagccgacgagggtgcccacctccaacctcagccttcc

SEQ ID NO: 3823 - DNA, 660 bp, Canis familiaris
  misc_feature (1)..(660): n = a or c or g or t
agtgccatatggnnnctggtataaacatgcannatcnnngnnngaaaagagaaagaatccacatgtgctnnnnnntttctatgaagacatgaaggaggatatcagaaaagaggtgataaaagtgatgcaatttcttggaaggcagccaacagaggagcttgtggacaagattgtacagcatacttcattccaggagatgaagaacaatccatctaccaattatacaacagtaccagatgaaatcatgaaccaaaaagtttctcccttcatgagaaaggggattgctggagactggaagaatcactttactgtagccctgaatgagaaattcgatatacattatgagcagcaaatgaaggggtccacactgaagttaagaactgaaatttaagaaggattttcttaatatacctaaaattaaatatatctaagatttcttctcatattcttcactttttttcaaattttaaattgttaggtgcttaggtggctcagtcgcttaagtgtcccactcttgattttggctcaggttcatgatctcagggtaatgagatcaagccttgcattgagctctgcactgagtatggaacctgcttcagagtttctttctttctccctcttctcctgtccatccccccacttgtgctctccctccctctn

SEQ ID NO: 3824 - DNA, 487 bp, Canis familiaris
  misc_feature (1)..(487): n = a or c or g or t
tcccctgctcccacgtcagccaccntcgcgcatgcgggnntctggctggggccggaactgccaggacaccgggaggggaggggctgtgtctgccgacgtggggggccgggctggaggtcccagctaggccaggggtcagccacggatctctgtcccgtgcagctggaggagcaccatgcccgcaggagacgtcctcacctagaacaagggcactaggctctggtccaagtggctggggcctcagtttcttcacctgcttgcggggagagagctgtccccaggccctgagcgggcccggccgccagcaggactcagcaaaccctgacggctgaggttggccgtggtggggccgcgtggagacggagtgggcggggcttggtgtccggctgtgccgacaggtgtgcacacgaggccggcggcgtgtgtgcggggtcactgcccgcggatggagcacgggacgggacagaagctgggtggggctgtgcac

SEQ ID NO: 3825 - DNA, 407 bp, Canis familiaris
  misc_feature (1)..(407): n = a or c or g or t
gccnnnagcacttgcangaaaatttgnnnnnaagagtcatgttactgaaatacatgcatcgtggaaggaatgcccgacccatcagaatacgtccaataagcatttgtaattgtgttgtgatngaggtaactaagaagagtgacatcaactnnngcgtctcatcccccatgtgaannnnnnnnnnaactaaaagagaacagccagtgtgcaanntnnnactagtagagtcttcaaggaagaattcattggtgggtnnccannactggccggagctaaggaagaagttgccctcgaccaaagaacatgagcaccctgtctcttaaacnagcatgtccccanagtngagaaggatgtantggtggcttaaaggcatgagtcaggggtgnnngggtggctcnnnnggttga

SEQ ID NO: 3826 - DNA, 549 bp, Canis familiaris
  misc_feature (1)..(549): n = a or c or g or t
caaaggnntggtcacggggagnaggatggctgctgagcacaggcacagccnnnctggctgacccgccacaggcaggccccagggctgccctctaggacccccctaggccctgggggaccctgctccaggcgggggagcagcccgaggccgggaagctcacaccatccccagcctccccagcagcaggtggcacagccctgggctgcggaggggcaggtgcttactcggtgaacagcaggtccagcacctcgtccgtggtggcgaattcatggtaatcttccaaaaagctaaagatgtagatgacatccctgcactgcaaggcgagcagcagttgtcggactttgtactccagcagctccgtctggctgagcttcttcgggaagatccgatgccccctccaggccgaggcccctgaaccctgaggtgggacagaggggacgtgcagcctgcagggagccgccgggaggcctgggatcccgccccggtaggccctgcgctggggccccgtgggcttgaggagctggggctccctctcccactcaagctccc

SEQ ID NO: 3827 - DNA, 598 bp, Canis familiaris
cttgtactcctgtgtccccattatctatgctggtgtcttccatcctttcctcctctgagtgtgagtagagcaagcatgtgggaagccagttgtgaccaaagggagatctcagcccctggcaggctactgccactggctgccttcccttgggcctggggccatttagtgttaccctttgaaaatagcattgtgtccaccactatttatgttggcagacctaggagaacactctgcaggttgaggtgctcttgtaccaagcccttttactttggggagatgtgccctacaaaagatgaggtgaatgctgacaggtaaagggctacctggaacacatgactctttttaaaggctccagcagcaaaccaaaacagcttttaaaaagtgctttttgcctgcaagtccaacctgtctagtggactaaactagactaaagtctccagactcttagactaaagaagttctttagtcttttagtcttcttcttaaagaagactaaaaagttcttcacatttttccaatattttcatatcacttaagacaaagtcagtttccatttggttgtactgactgaacttggggattctgggagtagagctgt

SEQ ID NO: 3828 - DNA, 642 bp, Canis familiaris
  misc_feature (1)..(642): n = a or c or g or t
actgggttgtagtgggacgaatgagagcagctgtagagtccacaacccagtgcccagcacacagaaagcacgtgataggggtagccctggtggcgcagcggtnnngngccgcctgtagcccagggcgtgatcctggagaccctggatcgggtcccacgtcaggctctctgcatggagcctgcttctccctctacctgtatctctgcctctctctctctctgtgtgtctctatgaataaataaataaagtttaaaaaaaagcacatgataaacgtcacaggttatcctgatgatcgaaggcttcccaaccaaacactccagactccttcctgaggatgcccgcctgtcactgtttctcatgggacagaaggctcggcaccacgtgcatctggaggaaagtgggtgtcagactattccttccctcttactttcccatttagaaactgcttgcgtttttctgggcaaatccactaatctggaagagcatcattcagagtggttatttccactctcttccattctctggctagaggatgttctctgtacaggctgaaataaggggtttctgacaacttcttccccccaccctgcactctggaatatattgctcctcctgtaaaacgaactgttggatgagaatact

SEQ ID NO: 3829 - DNA, 558 bp, Canis familiaris
  misc_feature (1)..(558): n = a or c or g or t
taggaccaaagaccccatcnctaaatggctaccataatnnnnnnnatccaatgcataactatgtaaatacagagaatgtaacagtgccggcaagtgctcacaaaatagaatattcgaggcgtcgggactgtacaccgacagtctttaactttgatatcagacgcccaagtttagaacacaggcagctcaattacatacaggttgacttggaaggtggcagtgactctgacaaccctcagactccaaaaacacctaccactccccttccacagacccctaccaggcgcacagagctgtacgctgtgatagacatcgagagaactgctgctatgtcaaatctgcagaaagcactgccgcgagacgacggtacgtctaggaagaccagacataatagtactgacctgcccatgtgagcccggaaagcggtacattgtttgcacctttgtgaagtttcaaaaaatgaagatgcaagtgcttcattttcatttctaaacactaactccttttatagactgataagattttttttctgactatttcatgtgcttctttaactaa

SEQ ID NO: 3830 - DNA, 637 bp, Canis familiaris
  misc_feature (1)..(637): n = a or c or g or t
ctgtgaagnnnnnnnnctcacgggagattnctgtttaaagaatgttctttcattaaaaagaccaaaaaaaaaaaaaaagtcaaaacttaaagtggatgatttgtgggcagctaagtgcagctttgttaatagctgagtgaacattcaattatgaaatttgtgaagcttgagaaaatcactaaaggaaaattcttggggcaaaacgagaccagaattctgcttctactgtgtctgacatcaccgtggtagaagaatgggtatggaatacacaccatgacatcatgacccctggatataaagcctgagcccatcagagctttgaaagcctctagcttcactggtgcagaaaatttttctctagatcagaatcttcacgatcagttaggttcctcactgcaaaaaaataaaatgcaaggcagtgaatgaattatattttcagaagcaaagaagctataacatgttatgtacagtatacactctgaaaagaaatctgaaacaagttattgtaatgataaaaataatgcacaggcatggttacttaatattttctaacaggaaaagtcatccctatttccttgttttactgcacttaatattatttggttggatttgttcagtataagctcnnnctngtgca

SEQ ID NO: 3831 - DNA, 514 bp, Canis familiaris
  misc_feature (1)..(514): n = a or c or g or t
atgagatgttattcctacaannnncaaaaaaatttttttgacattttatggtaatttttgtcaacatttagaagatctgtacaactcaatgaactatttttggatgactaatacatgatcttataaaatcatgcatgggtaaaaaattcattcaaaccacacagtggtccagtggattttaatgtagcagaatatgaaaatattcattcatatgtggtttcagattacacactgcaaccagtctttaaaaaattacaggtgtccacctttggtatagttccaaagaaaagtgtctacaattttctagaaaagctattaaaatactcctcccttttccagctacatacctgtttatggccacattttcttcatatacatcaaccaaaggaatgcatattgaatgtataagtagattgaatgtagaagcagatctgagaatccagccacttctgttaagccagacattgccattcttctcactgttttgtgggggatattttataaaatgtgttta

SEQ ID NO: 3832 - DNA, 633 bp, Canis familiaris
  misc_feature (1)..(633): n = a or c or g or t
agctggaccnnaaggtagcagacnagcagagcacactnnagaaggcaggggttgctggcntctatgtgaccaccaacccacaggagctgacactgcagatgaacctgttggaactcatcaggaagctgcaacagaggggctgccaggcgggcaagacagccttgtgatcagctggggtctctgccagttacccgctgcccgtcacacctgagagacacctctgtctctctgtcaccgcaagcagcaggaagctgagtggaacttgtcctcctgacacctggccaccaccttcccagctgcctgcaggagaggtcgaccctctgcggagaggccaagtggaccctggcggtcagtacctgccacccacctttgtctgaagctaggatggtggtaaagggaagagcgggtctgctctgctggctgtccgcctcagacctcaggggacagtggagttggaggtcctagcaccttctcactccactgggcacatcctcacctctgccatgccccagatttcatgcttgttctggtgtcagcccctcccttggcaggtgcagccccctaaataagtgggagacagtccaaggcccaaggcctgtgtggcccagagaaataaaggtacctcannnnnnn

SEQ ID NO: 3833 - DNA, 554 bp, Canis familiaris
  misc_feature (1)..(554): n = a or c or g or t
cccgncagctgtcgcgacaagcctcccagcatgactccgcctcccagcgcagctcccaacgcggccccgcccaccagggggcggggcacagcagcaccgagtccccctccacggggtcggagcccgccccccgcgccgacccggccgaggccgccgagcccagcctcgacagtgagctgccggaccttcggctgctctgggctcaggaggatgctggagccgaggagcaggggcccacgagcgtgggcgctaatcagagccaggaattagtagacggggacagtcagagcaatgaggaggaagatgaggaccagggtgaggacttcccagacgagggcacgccccagagctctccccgagcctcaagtggaggcggacgtcagcgactccacgaacacgagtcacagtgaccctccgtgaggccccagctccccagcacccagcgcttgattccctgctcctgctcttgctccagtggagtgctacccccacccccacccccagccggctcctgccccaagccgtcagggtgggctgaatgtccacgaggacct

SEQ ID NO: 3834 - DNA, 722 bp, Canis familiaris
  misc_feature (1)..(722): n = a or c or g or t
ttgcactttgtgtccttttcccatgcatgctttngtaacaccatgcatcagttccntnnaaatactggtatacgatgtttgctgtttttccagtggatacatttcattaaatactgaaaggtcacattcatggaacagtttcatcagggaagggttgaagtatcaggaaatcactgtcaagttttggatttttttttctacagtggttaaaatttgaccattggcaacaaatcctgtccattgtttgcctttgtgataaggtttttgagaaaatgccgtatacccaagtctaatttactatattttattgggttatttcgagaaaaatgatccgactctaagtgtggtatctacataagttagttccaaagaatacggcatgggaaggggagaaaagtattctggagaaacctgacggacggacactacctggaaccaggtgaccaaggtcaacgtgaacagcaatatggtgataacctgggcccatgatacggtgtcatgagaagaggacttggtcttcctccctaaaacccatcaccccagtctatgagaataacagacaaatccagttgagggacattctacaaaatacctgaccagtccttggaactgtcaatgtcactaaaaggaaagtgaaacgatgaggactcttaaggactgaatatgtgggatcccggatgagatttgatacaagaggatgatgatgttcgggaacacannnc

SEQ ID NO: 3835 - DNA, 536 bp, Canis familiaris
  misc_feature (1)..(536): n = a or c or g or t
tagcaggnnttcaggtggtcagaagcactgagcagggtgatcacaaccagtttaaagaannatactcggttgggaagctgacggtgctggctactgaccctctgctccaccaggacccagtgcagttagacttccatttccgcctcaccccccagacctctacccattggcacggtcttctctgtgaccatcgactcttcctggatattccatatcgggccttggatcaaggcaaccgggaaagtttgactgcaacactggagtatgtggaggagaagaccaacgtggactccgtgtttgttaacttccaaaacaaccggaatgacagaggtgccctgctacgggctttcagctacatggggtttgagttggtcagaccagatcaccctgccctccctccctgggacaatgtcatctttatggtgtatccccttgaaagggaccttggccacctgcccagtgagcctccttgaacatgcttattcctactgagaggggctgggagccttgataaatgggaaccaggatgtgactta

SEQ ID NO: 3836 - DNA, 403 bp, Canis familiaris
  misc_feature (1)..(403): n = a or c or g or t
ggccttgcttcatggccctgggccagacccaaggtgcacccctgggatgaggtggggtaagtgtggggggaacacatggagctgcccaggctcctgtgtgcccccttccctcggtgtaggccagcaggacccagataaggaccttgcagccttcagggtatctccaaacagtgggnnnnnnnnggcacgactggtcaatgcccccccaaataccattaccntcnaagttttcttcactgccaggtaccagcccctcccnnccttgcctgtaagccagaggtcctggcccagggtccccttggtaactgacccctactccccataggagcagtgagctgtatgagtccacgctggtggtggaaggtatgcttggcgagaaggcctgcaccctacggctccgggg

SEQ ID NO: 3837 - DNA, 523 bp, Canis familiaris
  misc_feature (1)..(523): n = a or c or g or t
cgaaacaaagtcaactgacagaatgnnagnagatatttgcaaatgacttatcagactcgatcaccaaagaataatccaatcaagaaatgggcagaagacatgnnnaatagccatttctccaaagaagacatactaacggacaacagacacatgaaaaaatgctcaacatcacttggcatcaaggaaatataaatcaaaaccatgatgagataccacctcacacctgtcagaatggctaaattaacaagccaggaaatgacagatgttggtgaggatgcagagaaaagggaaccctcatacactattggtggaaatgcatgctggtgcagccactccaaaaaacaaaaaggaggttcctcaaaaagttgaaaatagaactaccttatgcttcagcaattgcactactaggtatttaccacaaagatacacatttagtcatccaaaggggcacctgcatcccaatgtttatagcagcaatgtccanaatagccaactatgtaaagagcccaaacgtccattgaca

SEQ ID NO: 3838 - DNA, 466 bp, Canis familiaris
  misc_feature (1)..(466): n = a or c or g or t
ttccactnngactccagaagcagcttctgcctttgtgggcaggccccaggccctggggtgccagcgtnntgcgagcaccaagctgaccaaagatgtttcctccgtggaagactccgccaggcgtgatctgagtctcgagttttctaacgggtgctgctactgcacgggtagaaaggagctgctggagctctggcggcgtgtggtagccaggcgtgcggcgacagggctgacggggaggcctcggcctgggggacccagggccccgctttcctgtgtgagcatttcagcttccgccagaggccacggcccctgccccacggaggggcttctggcgggagtgctggctgtggaggggctgcggccttctcgcagtcctcctcctgcacccgcacacgtagacgacgcctcgtcgaggggaacggaacgaagtgcgagggggaggcgagaggactcgaggcaaggaggg

SEQ ID NO: 3839 - DNA, 266 bp, Canis familiaris
  misc_feature (1)..(266): n = a or c or g or t
acctngnacctccttcacagtcctgaaagcagcattggcctcactccacgggaaggtcaagaattagacttaaaaaggtaatctttttgtcacaactgttcgatgaggatctgaaccaccctgaagagaaaataccgaaggattgattgtaaactgtgtttagtttgattgtgaacttggtgctggatgttctgtctgaaatgtgcccaaatgctacatgtgggagtacacatctgtgcgtgtgttgccattgaagtgatgatttt

SEQ ID NO: 3840 - DNA, 408 bp, Canis familiaris
aatgcttagcagaactgttcagattaggttgtcagtagtaaatttcaagacaaaaatacccatttttctccaatccatgaaacatactatacttactatacctgcaactaagtgttaaaaattatgctctgtaaccctgtactgctagtattagaactaaaaaattttcaatacagccaatgcttaatgcttctataactgtggatttgtcagcctttatgtaatctgtattatataaagcaggggataagaaaagaggtacacaatgtatgcctttaaaaggctatttcttaaagctgttacaaggggataatggtatttcaactagttatcagcaagtgacaaatacattccaccacaaatgtactcttgttcttctagcttttagactatggaaaaaactgagtg

SEQ ID NO: 3841 - DNA, 435 bp, Canis familiaris
  misc_feature (1)..(435): n = a or c or g or t
gtcctggatgaggcanntncagcaaatacagtaggtgggnnnngagggaccacttttccannaaccaagatnngtagctgtcctccaagatgtcatggtagagatcagggtgtcgcctccacattgtgcttctattctannagcttccctcttgcccatccgcccacctcaggccctgctgcctgtgtgttgtgtgtgccgcagctgaccaagacagctgcggtgtgtgnacgtggccccgcactcttcctccatnnnagcctggtggtgttgctgtgggaggagccctgggcccggctctcccctcggagggatgtttgccccaagaaggggtaggcagcctccagcaagaaggaatccagaaagagcaagctggtgagctgtgctctggggccttggctgaggaagacctttgggcggcgggctggggtggga

SEQ ID NO: 3842 - DNA, 475 bp, Canis familiaris
  misc_feature (1)..(475): n = a or c or g or t
ccaagangngggttgagaaaccagtggtcctgccnnnnnctgggcgggtctctgtccngagtatcaaaggtgtccgtgtgtgagacacgatcccctcccctctnnnggcgccaggacannnaannntgtgaggaggggatnnntgtgtgggagggccatccgtcccnnnannnggtgggggagcagcagcnnncggggagagaggcaggagnannnnnnngtngacagcgctccatggnnagcctcgagnnnaatggaaacacgcccccacaggtgccctggcaggtgcctctggnnntactggcttctggggngggcctgtnctantgtctcagaaaatagcaagnnacgcctgggtggctcagtggtttagcgcctgcctccagcccatggtgtgaccctggggtcccgggatcaagtctcangncgggctccctgcacggagcctgcttnncctctgcctgtgtctctgccc

SEQ ID NO: 3843 - DNA, 322 bp, Canis familiaris
  misc_feature (1)..(322): n = a or c or g or t
catnnnnnactcagcgctgcnncgnnctgggcgcatcgacagaaaaattgaattcccacngcccaacgnnnnnncccggctggacattttaaaganncattctcnnaaaatgaanctgacccgggggatcaacctnnnnaaaattgctgagctcatgcctnnnnnctcaggggctgaagtgaagggtgtgtgcaccgaagccggcatgtatgccctgcgggagnnnngagtccatgtcacccaggaggactttgagatggccgtagccaaggtcatgcagaaggatagtgagaaaaatatgnnnntcaagaagctatnnaag

SEQ ID NO: 3844 - DNA, 538 bp, Canis familiaris
  misc_feature (1)..(538): n = a or c or g or t
gnnatgcgtcccagtgttacgtaaagatggtgtgcctgcnnnngcccccgcagctggtcctgggcctgcacttcctcggtcccaatgcaggcgaagtcactcaaggatttgctctggggatcaagtgtggagcctcctatgcgcaggtgatgcggaccgtgggcatccaccccacctgtgctgaggaggtggccaagctgcgtatcaccaagcgctcgggcctggaccccactgtgacgggctgctgagggtaagcagccatccctgccaggccaagggcccgtggcacaccggtagccccaccgccaggttcttcggaggctcagatccaggacactggaggcctcacccctgcctggagagccccgaggtagttggcatgggtggcccccggacggactgccgcgtgccctgcagggatggctctggggtgctgagccccagcccctcacgcaccctcccacctggaccagccccgccaggccccgatgccagaagatgacgacgtgtgcagaaacccccctgtgggctgcccang

SEQ ID NO: 3845 - DNA, 420 bp, Canis familiaris
  misc_feature (1)..(420): n = a or c or g or t
gtgttcaacccnnnntgctccaagcctggnnnnngctggaccagggagggggccctgggtggggagtcagctnnnccactgtcctgctgtgcactcnnnnnnncatctctgcctccatgggnntcctcccctgtgagnnnnngaggcnngatcaggnnntcacaaaggcctttcctgggannctttaattttcagacacacatagatatgaaacttaggaaaaagttgaagtaatnnaaaaacattcacacataaaaagcaacacannnnnttgtannaggattgaaactgatatgtttaggattctttgtagtcatnnagtnacttaactgggcttcctcagaaagctgtcnctcagcataacctattcaccttcctcccccgtcttggcccctcctctgtggataagctcccacagct

SEQ ID NO: 3846 - DNA, 699 bp, Canis familiaris
  misc_feature (1)..(699): n = a or c or g or t
tatagcttatcatangctatttgangcatgctctgaaatcctatataaaagagtgtaaactgaactttaaggtgtctccattaatcaagggttatgaaattcagaaaattaaattcacggcattgaccttttgctgtnnaagaatttccatgtattagtgaaatttgaattgcagacttgtcagtgaatttactactcagtttgagtgcatctccagagggtacaggaatcctgagagaaacaggaattagattatttcattcatgaagcaaagtggtagttacgcctttatcgagagggaagaaacaaatgaatatttctgaaacttaagattgatggaaaaaacaaaaattttaaaatgctgtaggaggctttcaattttgtaagcaaattttgctattcttactggccaaagttacactaaattaaagatttgggggagtttattttttccagcctttagagtacaagttaataattttagtactaaggaaaattcagtataatgggctgaagtggagtaggtgaaaacctgccatttgcccacagtgctgttacccttaaaaattgtgcccaacttataaaagtatggaagtttgggatttggaataattttattgcagtcttccattacacaggaaatattagcatatataatagcaagttacttgaaagatcagctaatcatctctgttgcaa

SEQ ID NO: 3847 - DNA, 651 bp, Canis familiaris
  misc_feature (1)..(651): n = a or c or g or t
gnnggtcaggtnnatgaatatcgtgcagaggtggatcaactcagggagacactngaaaagattcaggttcccaactttgctgtngaagatgactcttcttgtgagtcaagcaaagagaagaggcaaataaagaaaaaggtgtnntctgggggagtttttgtgagaagctttataagaaagcagtataaaaacgaggctgactggacaggataaaaaacacatggctttcttattctttcttctcttttccccacctgatgttgctgaccaaaaaaaccaccaccgcatttcatttcatttctgatttcataccttccgttcttacccacttcctcctcgatgttgtcaacatgcaactgtctggggcagctgtctagatcctgcctctccctgaagatctgattgttggctttgggcttcactggcagcagccttctcattacgcaccagactgcccaccctctgggccctggcatgtacttcctgtggacgtttaaaggccgttctgacagtgtcatcaggaccagtctgccctgacatgaatcaatttgagtgctagaccagttcaggctggtcagcggtctgtgagcaagtttttaaaaaaatgccttatttattatccttttgataatctttatatgattattagtt

SEQ ID NO: 3848 - DNA, 607 bp, Canis familiaris
  misc_feature (1)..(607): n = a or c or g or t
ctcttccctctccctgnntcacaggattgtgactccccagcccctgccctcaaagcttcagaccnntcaggtagcagcaggaccttgtgatcttggccccttnnaactgagatggttttgcatctttccaggagagcctcagattcttcttccaggttgtatcaccccaagttagcataccccaggctcgcagactcaacatagcagggtgggagacagctgggcacagagggggactccgttcagcctgggctctaaacccacagaactgacaaagcccctgcttccccaccccctcctcaggctcctgcgagcacatcctccagccccataaccctgcctgttccacaccggggacagaattttctctccatcttccccttctgaccattgtcccatccctcccttaagaggttctccccacagacactggacaacctctgtccttggggctggaaccaggagaaggaagttcagcactcctacatagtgtccctgttgaagataactttttattaacggaattattatgtttttttcatggaccaaaattttttttgtactgtccccttatcgatgtcacccagttttaataaaagaatcnnnn

SEQ ID NO: 3849 - DNA, 449 bp, Canis familiaris
  misc_feature (1)..(449): n = a or c or g or t
tatagaggactctttgcccagctcatccggcannnnnnaaatactgccattgtgttgtctacctatgagttaattgtgtanntattagaagaccgttcccagtaacaggccagaaaattgtgctctagaagaataaaatttaaaaactatagagaaattttttttttccattgatgtttagaacgtttgagactgaaacaggaaagaccataaaatatgtggctcatatcccctgttggacatttccttttggattcatgttttctggaaggtttaaattcattaacgttaatagttaattataacttttgttttttaacttaagaggattcaggattaagcagcanctannntaaataannntacttaatttaagtataaatttggtttgtgtcctcttttatgttcactgtgctataaacttacagcttaagtaatttagtgaaaca

SEQ ID NO: 3850 - DNA, 622 bp, Canis familiaris
aactcaaatacgactatactgtacttatggaccaaataaatggcatctgcatacttgttatacatgcctgcatagttcacgtttctgctgccttagtgggtttatatattactgcaggcatgctaaattctttccttctaaaaacttaactcctaatggatatgaaggttaaatgatctccactgtttgccatagatgagtactttctaaaataaaactttaaatggcagtgttgctttttaggtttggattgtaaacaactggctttctgttgagaacattaagtgatctttgcccagccccaggaacttagaaccttggatttgagattccagagcaggggagagtcttcttctacagtcttctctgggttgcccctccccacgccacccccaccctcaattcatcagagtcccttcttgagtgtgtaccatttagggcccaactccagcctacatatgtggccagaccagtgctggatggatcagcatccctgtctctgccgctggcctcagaggaccttggcccttagggggtactctcctcacacagatgtgccttgagtttttagataacagaaacccctggagttgttttcccccattctataccccaaccttcg

SEQ ID NO: 3851 - DNA, 503 bp, Canis familiaris
  misc_feature (1)..(494): n = a or c or g or t
cccaacccctnnncttctttcccctctctctgaacactcccttgtcctctcgacaccctcccagagcctgggcacttgctgaggcatccttaagcctgtgtccggggtatgggtgcacagatccccactgtccagtgtggagggcggctactcctgaaggaacccaatctcttaagtcactctcaaatggagtaagagatgcttccagactccttggaagtttctagaactgaaccaggctgcttgggacctgtattccctcccccctcaaccctttttctttgtggaggttcctaatctgctgctgaagcacaatattttggtgttttcttttctcatttgttaaagacagtctccaaaagccattccagatgccaggaccaggggcctatttctggggaaggttggtcagtccctacattttcctccccttcctttcttatttttattttgtactttttgcctgagacaagccaagtgtgaggtggtttgatttaagaaaa

SEQ ID NO: 3852 - DNA, 505 bp, Canis familiaris
  misc_feature (1)..(505): n = a or c or g or t
gccttgcccaantaattagtgccctccgccagcaccggcgcaatgatgttgtnnagaagattcgggggctgatggaagatacggcccagctnnaaacggacaaactggctctcccgatgagccccagcccccttagcccgagccccatccccagccccaacacgaaactggagaattccactctgctgaccgtggagccttccccgctggataagaacaagggcttcttcgtggatgagtccgagcccctgcttcgctgtgactccacatccagcggctcgtcggcgctgagcaggacgggctcctttattaccaaagaaaagaaggacacagtgttgcggcaggtacgcctggacccctgtgacttgcagcctatttttgatgacatgctccacattctgaatcctgaggagctgcgggtgattgaagagattcctcaggctgaggacaagctggaccggctatttgagattattggagtcaagagccaggaagccagtcagac

SEQ ID NO: 3853 - DNA, 302 bp, Canis familiaris
  misc_feature (1)..(302): n = a or c or g or t
tcctgttctatatggattattnnnnngttnnnnnntttttttcnntttggtatttttnnnnngttatttttaatagaagattttttagctttagaatatnngtatgtaaatgaatttgttacacatttattgctgtgtatcagatttaagaataggagtttttatattttacaaagaaactgggaaatgttctatcttattttgtgacctggaacaagatgatatgacactgaaatgggaatttccntggaaatgtgaaagaaaatggagaaaaaagtataaaaggtggttaaattttggat

SEQ ID NO: 3854 - DNA, 548 bp, Canis familiaris
  misc_feature (1)..(548): n = a or c or g or t
agccccgtgcagcagtacacgnagcatctggcggctgtgaaggccatcgcctggtccccacaccagcatgggctgctggcatctggcggcggcacagctgaccgctgcatccgcttctggaacacactcacagggcagccactgcagtgcatcgacacaggctcccaggtgtgcaacctcgcctggtcaaagcacgccaacgagctggtgagcacgcacggctactcacagaaccagatcctggtctggaagtacccgtccctgacccaggtggcaaagctgaccgggcactcgtacagggtcctgtacctggccatgtcccccgatggagaggccatagtcactggtgctggggacgaaacactgaggttctggaacgtctttagcaaaacccgttcgacaaaggaatccgtgtcagtgctcaacctcttcaccaggatccggtaaaccctcgggcctccgtccgggtcggaagagtaccacctctcgtcggcgtgcatggaccctcccctccccagctcacggtccccagagggggcgggcgggga

SEQ ID NO: 3855 - DNA, 699 bp, Canis familiaris
  misc_feature (1)..(699): n = a or c or g or t
gcagatagacacacatgtatccgtgtgtgtgccatgacgctcgnngtcccaggagagaaaccagaaatccctctgtgccgccctgtacatattatatccgctgggagtgatggtgttatttaacagatgtgtcctggaaaatatgatttttgtagcttttttgtaaattatttaaagtgctgtaaaaagtatttttggaaaatacagttgttggatttcgtaggacgtgcctacctgcagctttgcgtggtgtccatgtgagtgttagacgagtggacacttgaccaccgcagccagggttaaagtgaccctgactgatagtttgggccgatcgctgctggaaagggctggtagtatctgggaagcagcagtcgccacccacccacccgccccaaggttcacaaaagcacctgcagaggtctcctctgggaagctgctggacagcacttgcaacatgaaggccccagccccacaaggccaaagtgagccttctggacacagcacttgtggcctcgataggagaacatctcaaagcacaaaggccagcgagcgcacaggccggccatccccagttgcatgtggaaataccgagtgaggctcggtggcacgtctggtccatgtcccggcccatggggtttaacgtccagccctgtgcaacccctgcgtgattctaacagcttaataaagctctttnnnnnn

SEQ ID NO: 3856 - DNA, 565 bp, Canis familiaris
  misc_feature (1)..(565): n = a or c or g or t
tcaacgggcctgnnagggtccccagccaccctcctgcctttccccatcacgtcggtcacccgtcatctggtacccaagcgtacaccttcctgctgctggccattccttgcccagccctggacgtcactgcctcccagaccatccaggaccaggggcctctgtggtaggcagagggggaccttaccagggccttctgaggagggggcagggggactggttccaggcaaccaaccgtctcccacactcgcagcacacacaggagcaggtgccatgcccacccctaccttggaacatggtctagagccacctgggacagcctttgaagaagggccctgtgcacagggctctgagggatttccaaggaaagtgcccagcgccgccctcagggggtgaggggaaggcttcgactccacagctgtgttgcccacaccttgggtcggttgtgtgcaccccgagcctgagccatgggaagacaccaaaggccctcccagcagatccggtcacacttctctgctttaagccttagccacctagtgacaagtaaaaccagataatgcccatgtgt

SEQ ID NO: 3857 - DNA, 654 bp, Canis familiaris
  misc_feature (1)..(654): n = a or c or g or t
gtgcaccagacctgnntgcagcagtngatcaagagctctgacacacgctgctgtgagctctgcaagtacgagttcatcatggagatcaagctgaagcctttgagaaaatgggagaagttgcagatgacggctagtgagcgcaggaagataatgtgctcagtgacattccatgtcatcgccatcacctgtgtggtctggtccttgtatgtgctcattgaccgaaccactgaggagatcaaacatggacaggcaacaggaatcctagagtggcccttttggactaaactggtggttgtggccattggctttactggcggacttctttttatgtacgttcagtgcaaagtgtacatacaattatggaagagactcaaggcttataacagagtaatctatgttcagaactgtccagaaacaagcaaaaagagtatttttgaaaactctgcactaacagaacccaactttgaaaataaagatggacatggaatctgccattccgacacaaactcttcttgttggacagaacctgaagacactggaacagaaatcgttcatgtctgattttgtggagagtgtcgttttcctggacatcaaagaaaagctgaaggaaattgtttactgccaattgtgtaccttttcttatgtactttaata

SEQ ID NO: 3858 - DNA, 535 bp, Canis familiaris
  misc_feature (1)..(535): n = a or c or g or t
ctttccccaagagnnnnnngaangtagnnnaaacccagttcatactggtgcttccctcagcctaatggtgcatgtatgcacgcgcttgatgactgacctgtccccgagaaagactggggctgtgggcagtggctagaggccctctggggtggttgtggtgctccagacaccagtggagctggtgggtgttgtgtggtcgtgcttcctccacacccccactggctacctccttgtccctcctccttcccctgtgcctgaaacggttctgttaaatagcaactacctacccaggtgttgaggtcccagtgttagaatccagcccacaattctgaagaattctgggctctggaagtgtggttctcccatggttggctctacctttctgctgttctcctctcatgttctgccagttacctgggaggagtggctgtatccctgtcccacatcagagactgaccctcatgactcgaaggcccagaaacagagagaagagaaaatcagagcagaattatnnnnnaaatggatgacaattgta

SEQ ID NO: 3859 - DNA, 566 bp, Canis familiaris
  misc_feature (1)..(566): n = a or c or g or t
tnntcatgcatccacaaggtcatctgcnagacaggcacttggtatanntattgtnnngnannnnngnnnaagannaactggtgacttgcagctggaaccttttttatactttattgtgtcccagccnnntttgctnnnaagctgtnnncacagaaagcagcgagtggaaatatccatttttgatgctgtccttaaaggggtagcctctgattacaaatgtacagatcctgggaagactctgcctgaagcccttgattactgcacagtttggctgcagacagtgcctggagaaatagacagcaaaagtggtattccaccttccctggtanngctacaaattaaagactttcttaatggaccagcagacatcaacttggatatatcaaagcctttgaaagcaaacctgagctttaccaagttggatcagataaagaatttattaaagaggataagaaatacacacagcaaagagacttcagccccattggacaccatgctgaataaggatgagtttccaacctcaaaatatttctgtggaaagttgtnnaaaccnnnagttcatggtg

SEQ ID NO: 3860 - DNA, 653 bp, Canis familiaris
  misc_feature (1)..(653): n = a or c or g or t
tgtgtaaataagtaaatatttcatcctttatttttcaagtaaaagtcatgctgntacaagtgtaatttgtgcatataagtaacacttatgaattaaattatttaatatttgattacaataactgtgaaaaataaaaaaatgtgttaacatttgcctgtgagcccttgacctgctttctctactaggtaattgaaaaagaaaatctaacactaaaatgtaaagttgttttccttgtaaattattaagtttatttcaccaattttggtaaactttgtaattcacattcttaggatattactaaacacaatgtaaaaattgtgcttagacttgattataatgtacataacagtgttcgtgtgtgatttctttttttttaagaaatatttttctcaggcccttactactatttatggttgtattctttccctaatcattggttaagattttgctagttccctctgagaaatgtcaaacttaataatgagagagatgtcttaaatacagtctattaggatttgcctcctagctctgaatttctgtattaagctaaatattattgtatggtttatgtaaagcaggtttacaagtgtgtagccctggtctgtaatatcggaatgctttattatcaccagaagccatnnnnncattacata

SEQ ID NO: 3861 - DNA, 416 bp, Canis familiaris
  misc_feature (1)..(416): n = a or c or g or t
ttgataatatcaccatttgattttgtcatgattactttttactttgtnnnnnnnngagnnnngttgaaattctannncaggaatagccncagacattcctgtgtannnnnagaatgacannnaagtcaattcctggtggcctnngggaggaagnnngctttcncnnnaccatgactccagataggtcatgatatgtcagtttgatctctgtnnnnaacannnaaatgtnngtgnnnntttccaggaattnnnnnnnatatttgnnnntaaaaaaaaataatgatggggnnngcagnnngggggacatctaatttttaagnngcnnagattgtnnnacataaaatactatnnnnnnnaatattanattgccnnnnnaaattcttgatgaattgtnnnaagaatcatctnnnnntgtn

SEQ ID NO: 3862 - DNA, 563 bp, Canis familiaris
  misc_feature (1)..(563): n = a or c or g or t
tgatagtgctgtcagacttgtccatatccccacagngcnngtagtagaatgccaacaagannnatcacagattaaaaataaagaaatagctttgcgagtgtngagagctagactctaccaacagattattgagaaagacaagtgtcagcaacaaagtactagaaaactgcaggtaggaacaagagcccagtcagagagaattcggacatataatttcacccaggatagagtcactgaccacaggatagcatatgaagttcgtggtattaaggaatttctttgtggggagaagtgtctggatcagctaattcagagactgcttcattcagcggatgaagaagccattactgaatttttggatgaaaacctaaaattgggaaaataaatgcagatttgttatttattattatacaaatgaaatggacctgtatcacgaaacagctgttcataaagtacagctaaaattgcacagtacgtacaaatatattttttaatgaattaagtcacaattcttgacctaagagcttgtaaagtatagcccaactcttcaagcagaaaacaag

SEQ ID NO: 3863 - DNA, 175 bp, Canis familiaris
  misc_feature (1)..(175): n = a or c or g or t
tcancatgcaaccatatcacccccattttacagaaggctaaagggnnnnaaagttcannngtctacccaaggnnnnnnagctaataggaggctgaacagggacttnagccaggctctctgctctgaagaccaggccctggattnctgccctagaacttcctcattagggttctgt

SEQ ID NO: 3864 - DNA, 553 bp, Canis familiaris
gattcaaaatccccttaagtagttctatctccgttactgaaatacgactgcatgacggtaagagaacggtcctctttgcctcaccgtttgttagcaaacggtgaggttaggggatgggaatatgttgggagtgtcttggcttcacctgacgagctgggtgggtgatttggcgcaggtgttttacttctcatgcccttcctacagacgcggtgaagatgaaatgaaaggcccttggaagggtgtaccagcaactcaataaacgttgctagtttttcgtggatatttaaagaggtcatctattgtgaaactgatacaatggtggatagacatgccgttatacgtttggccaaacccatagaacatatcagaccaagaatgcatcctaatgtaaacaatggactttgggtgataatgttgtgtccacataggttcctcagttgtaacaaataaccccgcactggtgcaggctgtcgatggtggaggatttgggctcaaatgggccggggagggggcggggggcagacgggtatgttcaaactctgcactctccatt

SEQ ID NO: 3865 - DNA, 660 bp, Canis familiaris
  misc_feature (1)..(651): n = a or c or g or t
ccatgtttccttcctgaacaggagttggactgctcattnnnnngngagaggaacaggctgganctctagactcaagttaatttgcttttgctcttattataacaattagcagataaataaatggctcacctgtgcaggtacacaacctaattcagtttacccctcattttctcgagctcagtccagagcaggctgagatgagggctctgtggcctcacaatgacagctggcatttctaccacacttaccatgtatggggtatggagatgctccgtattcagcatttcatgtaataatgggttatgattcatctgcactgaagacgaagaatttggagctctgagaagtgaactacgttgactgaggtcataagcttagaaaaggagcagagctgggattcgaacccagatcaagcaaagcttctcctctcattgtacaagctgcctacgtgaggattgtctctctgattggttgagactaacaagtcaactaaaagaacaccacactgcagcctggagttttggatcattcttccgtgtgcactgtccccacaatctggaaaacaaagggttgatctccttcaaacataaacccacttctgaccctgaaggcaagatatcgtttcnntntttcattnttgctggtaaagaaaaaaaaaaa

SEQ ID NO: 3866 - DNA, 535 bp, Canis familiaris
  misc_feature (1)..(535): n = a or c or g or t
ccagagcaaggcgggtgaggccaagnnagccgctgacagagctgaggagnnagatgccgagnagtccaggaaagcccggcctgggaagagaaagcagaagcactcggaagatgacatagaatctaagaagaaaaaggtaaagttctcaggaccttcagagggtggagaaccagaggaccacgaatctcctgcaaaaggtaaattcaactggaagggaactattaaagcagttctgaaacaggccccagacaatgaactagcaatcaaaaagctgaggaaaaaggtcttggcgcagtattacgcagtcacgaatgaacatcacagatcggaagaggagctcctgacaatctttaacaagaaaatcagcaagaaccccacctttaagttactaaaggacaaagtcaagcttttgaaatgagcatttttatatttgaaaatttaatccatcctgttgatttctttcactactgtttataaaatatgtaatgacgtgtaacaactcccaattttgctttccaannnnnntatttttaag

SEQ ID NO: 3867 - DNA, 458 bp, Canis familiaris
  misc_feature (1)..(458): n = a or c or g or t
ccaggcanctgccaggcactgttctagacgctgccgcacagctgtgactgaggcagccgagcacctgccctcactgaacctagacaacatgagcaaacagtatgcgacaggaagaaaaccacagcaggggaaaagacagggagtgacagagtcggggggacgggacagggggaccggacgggggtgcatgtgcagctctcattggccgggagccgtgcttctcaatgtccactctcacgcccgtctgtgaactgctgggtcctagtccgccacgagggagaactgctgcttccctctctctgtatttagaggacagacgggggtgcctgtaagcatctgccttcagctcaggtcatgatctcggtcctgggatcgagccccgcatcgggctccctgctcagcgaggagcctgctcctccctctccctcggcctcccagtccccctgcttgtgctcgct

SEQ ID NO: 3868 - DNA, 511 bp, Canis familiaris
  misc_feature (1)..(511): n = a or c or g or t
annanagaagaaaaaagccagacnnnaaacgtgaatatatttttnctgaannnnacatgtgtnnnnaaacactgtctggaagattatgctgtttatgcaataatttgtgaacatgtacagagttttatataaatttaaaccaatttttaaaacaaaactgtgaacacaaccaccgtaaaaatggaatcaaaggaaagttaatttatgaaatcaagaggtcagcagaatatactccagtgctggaagacacgtggggagagtcttttcaactgaacaagaatgatcttaatttaagaatatatcctggttttacagcagtgccctgtttacaacagcttgtccctgtcgcctctgcagctgaggaatccagggttctgaggagagggggctgtctgcaagtgggcagtcttctgcacggagcttagaccatctgaggctgtttatgcttaaatccaagtgctttgatcaaatgcataatctgccatctnnnnnatctatgttggtagccgtt

SEQ ID NO: 3869 - DNA, 724 bp, Canis familiaris
  misc_feature (1)..(724): n = a or c or g or t
aattgtggtgatgattgcatnnctctgtaattgagatttcancagttgatnnactctataaagtttatagactttgctcactgtccatccatgcctgttgatataaccaaaaagacaataacaagagnnggctaggccatagagaaaggtgaacctgcatatattgctgatgggaatgtaaaatggtgtggccactctagaaaacagtttggcagtgtcttcaaaaattaattacagagtttaatccatttgacccagtgattacaccactaggtatatanntaaggggagtgaaatgtttccacaaagatttgacaaaattttcatagcagcattattcataagagctccaaagtggaagcagcccaaatgtccatcaagtggtgaagacataaagaaaatgtgatatgttcatacaaaggaatattattgaaaattaaaagaatgaactgctgatatattctacaacatggatgtacctcaaacacttttgctatatgaagggaccagatgcaaaagactacatattttataattccatctgtatgaaattttcagaaggcaaatttatagggaaaaaagtagatttagttgttgcctggggatgagagttggaagaaaaattaactacagatgaatataagaggtcttttggggatgatgaaaattaaattgtggtgatgattgcacaactctgcagtttactaaaaaattatattgtaca

SEQ ID NO: 3870 - DNA, 644 bp, Canis familiaris
  misc_feature (1)..(644): n = a or c or g or t
gctacctgcccnctgagttcactgctggnntatcttccgagctgcgttctgtcctcaccatgatgctnnaanctgaccccaagctgcgggccaccgctgaggccctgctggctctgcccatgctcaggcgncctcggccatggagcattctgtggtacgtggctgccgatgccctcagccgagggtgggccctgtggcaggccctgctttccttgctgtgctggctctggcacggattggctcaccccgccagctggctgcagccgccgagcccaccagccaccccgcctggctccccaccctgcagcctcctcctggatagcagcctctccagcagctgggatgatgacagcatagggctctcactctctgcagaggctgtcctggccagggctactgggaacacctccaccccccgcagtggctcccccgccccccggaacaggtacacactgagggatgccctggacctgagtgacattgactccgagcccgctcggggctccttcccctccttcgaacctcggaaccttctcagcctgtttgaggactcactgggcccaggctgagtccacaagccagccttggcgcttttaacctnnnnnncacccccccaatcctcctggaggtggggttccctctgg

SEQ ID NO: 3871 - DNA, 442 bp, Canis familiaris
  misc_feature (1)..(442): n = a or c or g or t
tttcaaacaatgnnaccggcatgctgacatcttcataaaaatnagggatccttgaggtgtcaaattgactaacgcaccaacacttgaagaagctcaatatccaggaatgagagacaaacttaaatacctatcttgtgttttcgtaggtgtgacctactcccttgaaaaggccatttcaatctcaaatttccattactgtttatcatccaaaaaatattgttcagtaatgcctcatcgctatacaagacttgtgccaatatttctcaggcaaccttgtcaatttgagttatagtatgtgctacttagatacagtagaaatgagtttaaactgctgaagacactggatcttttcaaagctgttcttcaatgttatgaaagagaataatcatagcaggctaatttgtagattccctanncttctgttccttgttctccctctgcc

SEQ ID NO: 3872 - DNA, 469 bp, Canis familiaris
  misc_feature (1)..(469): n = a or c or g or t
cagcgntgtttgttctcttcattacagcgtcatgctaatntaaaaaaaagactccagatctcagcgnagccagctaacagtgctgtgtgcccgagtcgnnnngcacgctgccgaaccaaaagnatttgcaccgctnnnagcccctgccccagcagggtcngcctgggtgctcccgggccattggcaggcccgggccccgccccaccccgccccgcccctgcannaacactgcttccgcttacctcaaccgttctggctgcggcatctctgtgtctgaaccaaacggggtccttgagggacggtctgtcctcatggggggtgaacgttgtgtgtgctcaaaggccaaaggccggtggcaggtctggggagcacagcggagtctgtcctgtgaccagcaagtctgtgagggtctctggtgggggggcacttttggtctgtgtgtgttttggtggcacactgtggcacagac

SEQ ID NO: 3873 - DNA, 616 bp, Canis familiaris
  misc_feature (1)..(616): n = a or c or g or t
ccccccaggtgtggcagcccccgggctccttactggttgccagaaatccctggtnntagacaatgtgaactaacttatttatccggagtccttggagcaggtttggcacgatgtcctactggggcatggcgtgtcacagaggtggatctatgcaaaatgatacgtgtatctctgtgagtgtgtcactgttgcaaactggctggatccatccctgtcttctgaatcatgcgctcagggggttggtcctctgggtgacgtaactggtgaggtaactgcggaaggatggaaccggccttcattcctcagtgggctgatctggagtcttgcttcctcctcataccttcgtgggtagccccaggacggggcaggagggtcccaccttgggtgcctctgcagagagcttgcctgggacaacgtggagaagagcagagtagtaaccttcaagatctgtcctccgccgctttggtccctttacacatcagagccaaaaccagagactcctacgagctttatgaccttgacaaaaatcccttaacttttctgagccatggcttcctacttaacctcccagatggtttcatgatacctgccccacctacctcacagtcttgttatg

SEQ ID NO: 3874 - DNA, 260 bp, Canis familiaris
  misc_feature (1)..(260): n = a or c or g or t
ttaccttacttcagttacaggaagaaaacagcttacagcttaacatcctagaaagccccatttagaataaaaacagagcccaagccagtggcaggaagcccctattagaataagaacaaagctcaatgcccttgaaggccccatatcaaaatgtaaacagaacttgaggaattgctccacaccttctggaggtcccctagaccagtccttaannnnaagctgnnnnccacctcggggtccaagtccctgctctgctgttc

SEQ ID NO: 3875 - DNA, 614 bp, Canis familiaris
  misc_feature (1)..(614): n = a or c or g or t
taggggcaannacnccagaagtgccagcagaggtcnntccatctcagactccttgacttccagggctcttttannnnngnctccnctgaaggcttcacccccaaacggcttggntgnnctgggtannaagagtaagaacttttncttgcagcnnnnagagaaggtgctgggtgtggaaaaggatgagtgtgtggcttgtacatatggattgaaaacagttgacgggaaaggtgaaaagagacccgttgagctggccaagcaccccaaggtcaatgacacactgcctttccctccccgggtggccccaacacccctgctggccaatgtggagccatgctgtnngcagtggtccctcctgcctgagagaaacctgctgtgccctcccaatcccagcaacgtgcactatctcaccaccgtgcagcttttgcagaaacagggaatgcaaaactacaaagccaaattcagagccagggagccaagacctcccatcaacactcaaaagcgcattctcacggaggccaagcaggaaaacaggctccaaatgttggagaccaaagtgttcccgagaacgctcttgccatccctcacagtgagcagagttgttattccggtct

SEQ ID NO: 3876 - DNA, 541 bp, Canis familiaris
ctgacttcttcctgtctttcctacattctgatgagcacatacatgaattaatcaaagcatcttataaaaagttacaagattacagagtctactaaacttaatttttctattgtcatagatgcatgtatatttgtatttcctttttattaaacatgactgaatattgtacccactatacttgtaagtttcatctttcacatcctcacattgcttcttcttgccatatttacttttgcttctccctgcctttactgtccccgtttgtgcctgccacttctgccttctgctgcctgtccccttttctgacgtctgtcacatttctgtcttgtctgccacctcctctttgaagcatctgcctgttgttttctcagaccctcactgcatctgaaactaccctactgaatagtcatatcatgtattgtgaagttgagagagtaatcatttgtaaaataaaggtgactctgtatgaataattaaagcattactttgaaattatataaatattagttcaaatttttactaaccctagggacttgttctt

SEQ ID NO: 3877 - DNA, 592 bp, Canis familiaris
  misc_feature (1)..(592): n = a or c or g or t
acgatttcagannctgannagcccccaatcngnctcatgntagnnnnnngtgaannaangccggtggtgcagctccaatccaagcccgaaggcncgagacccannagctccgaggtccaagaacagaagacagatgtcacagcttgagcaaaaaaacacattcacccttcccctgtcttttgttccattcaggccctcaatgattggaccatccccacttgcattggtgagggtgatccactttacttcttcgccaattcaaaagctcatctcttcctgaaacaccctcacttatatgtccagaaataatattttctcagctatctggtcatccctcagacgagttaagctgacacagaaaattaaccatcactctatctgagaacacccactactgtttgaaagtccagtctagtagtgtagtcaccagaaactcggacaggtagtctcgagctttggtacatggtaacacaggctgatgtaaggtggatggctttacttctactcagctctctagattgtgagcatttgaaacaatgaccctcgactgcagcacactgggtcctcctctnnnnngccctgggacattgtt

SEQ ID NO: 3878 - DNA, 527 bp, Canis familiaris
  misc_feature (1)..(527): n = a or c or g or t
cgtcacgtcccaggggtgtgtacttccagcgtgttgcctgcttgatggccggtgcccagcggggccnntccagggacaggtagtcctcactagggggtgaaggcagggggcaggagatagaggctgagcctgtggccctccnctgcgttgtaggcacgcacaccaggctgggggggcggtgctgagccctgcagccccctctctccagccctccaggaccctccctaaaccttttcctattttaagtgtttttggcctgtcctccccaccccatcccggggacacggggtggcagggggagcccctgtgccaggcggcctctgctgccagagcctgtctgaggctgagcattaggatggcttccctgacgagggggatgtacagaggccccggggcacagggaacagtgtaaggaacgggacacaggccagagctggaccgtaaaggttgaaggaccccccctgctggtgcagtcggggtgggggtggggtggggagcgtgtgactcctcatctcggggtttgtgag

SEQ ID NO: 3879 - DNA, 462 bp, Canis familiaris
  misc_feature (1)..(462): n = a or c or g or t
gaggtngaggggctgcnnacggagggctctgcggcggtnnaggaggtanncctgggaccagacaaaatggtggtcgacctgacagatcccaaccgaccacgcttcactctacaggagctgagggacgtgctccaggagcgcaacaaactcaagtcccagctaatggtggtgcaggaagagctgcagtgctataagagtggtctgattcctccaagagaaggcctgggaggaagaagacaaaaagacacccttgtctccaggaccagcaatgccagcagtaacaaggaggagaagacaatcataaggaagctgttctctttccgatcagggaagtagacatagatctcaagccatggttcacacagaggttctcagactcaagaagtcaatgcagcaagacttccaaactcatctcggtgccacacatannnnctggatttactcacnnnnntcccctgaaag

SEQ ID NO: 3880 - DNA, 709 bp, Canis familiaris
  misc_feature (1)..(709): n = a or c or g or t
agtgtgaatgtgtgatnngcttcttgtccctgcatagatgctgtgtncntngnnttagtnnaaaaactcgagttagtggtttcagcctagtgtggctaatagattgtaaaggacaaaacagtatattggtagctgtaaatagagcagtgctagctctgtctatatatagagagaaatgggcttagccacagaggtttaaaactgtctggttgtcccatatattaacaaaaagcagggcttggatacacagttgtatttaatgtttaatggtctcccagcctttccagcccaggcacttttggacaaatgtttgtccttgtttgaggttttgttgtcgggtttttgtgtttgtttttgtgggtatttgcctcattccatccctgagcttcgcaggtagacagatgtgattcctaacttaagtttaaggtgtttcttgtagtggagtcattggttggcaggagttaagtcatgcttttccagtaaaggggcgggggggcgggggtggttatccacgagatgagctaaagttaagttagaagaatttgattggaaattcttgattggaaattttagctttgagttttgtctctctagtcctaaaataaacttggaagatgctcctcatttgtccatcttctgctttgatccttggatcccacccattcttccactttaagaaaaaacgagtaatnnnnncagaggtctctgt

SEQ ID NO: 3881 - DNA, 448 bp, Canis familiaris
  misc_feature (1)..(448): n = a or c or g or t
acataattgggacataatacagaagaaactggtcaacagctgnnngactnnaaaancgttgccaattccacaggttattaatgaatacttcattgatgagactgggtgtaagcctgtggtttttttgttgtctcccccaaatatgttactgtcctctgggcagttgtgatggccaaaagtagtttatatttggtattagtcatcttaattttgaggcttaagggacttgagtcctatttttattggtaaaaatactggtaatacaggtaattcctgcagcataataaatagagcccaccaagccatgtaagaactgtgattttttttataatatgacggcatctcctttcttccctatcccgttgtcctgccttccatcctgggtgcctgtcatctgggcatttgtatccagtcacttgtctcaggggctgatcctggagacccggga

SEQ ID NO: 3882 - DNA, 418 bp, Canis familiaris
  misc_feature (1)..(418): n = a or c or g or t
caattgaaaacatcnntaatgtcttacttttccacttctctttcttcctcctataaactgaagagtgttgtgttaaactgatttttaaagatctgttgatgtgttatgtgttaagggtttgtttggtatctcaccgaaatgttctatgttgcagaccaaactctccttatgtcagggggatgggaccattgcatccttagccattgtcacaaaatacatggaatagtaatttaaaatgtaaagttgtaacatacatatgtttaaaacaaacgcaaagcgaaaagctgtgaaatgtctcgtgtctttcattctccgtatttatgcaactgatttatcagtctgttactgaagtgtgggttcaacgatttgtctccagccactttgcatctgtaatccaccaagnnnntgggagctgcca

SEQ ID NO: 3883 - DNA, 548 bp, Canis familiaris
  misc_feature (1)..(548): n = a or c or g or t
gtgtcantggcataccagaaaactgtangccctggtcggtgagggnctgaagagaaagcccccagcagagtcttcttatgctacatcagagcttccatggagcatnnaacccaccctgcaaagcatgagtctatacaagttgtgggatgatgatgcttgattcatcagattggtgtttggaagaacactgaatgcgttggaagattttgatcacaaatatgatttgcaaacttaacgataaggaaattcagaactgtcaggcccatgtggctaataggcaattagaatctttttatgtctgttttaatcatgtttttgaaataggtttaagaagttcttgtgctatgtcccaactcacaggacaggctgtagaacctcaggttcaaagaggatgcccacaaacctctagaagcttaaattctaaatccgtgtgcctttttcagaaagcctttccttcaaaccaatgaatgtcataatataacctcaaatccatactcaaatttgcagcgggacagtggggtgagattcagacctctacccaccactgg

SEQ ID NO: 3884 - DNA, 575 bp, Canis familiaris
  misc_feature (1)..(575): n = a or c or g or t
gttgataannagactttgctttcaactattcctaaaaccaggaacagcacagaagatgctcagtgtcctgggttacagggtttaattgaagtaaatgataatgcaaacaagataaactttgagatggcttgtttacccagtgaaagaatgaatttgccctttcttgctggtgaagtggctgatgatattaatactaataaaaagaaagaaattccagatgttatagaaggactggaactacattcttcagttacagcacaggatattttgatgagcagccctgaaaaaaatataccatcacaaaataacatcttacaggaagagaaaaccaaaatttctcagtcagtatttgatactagaagcctcacgactgaacgccatcttcttgattcgccggacctaaactgcagtactaccttcacttgggtggagaggaaacatcaagatcatatcagacacatttcctttggtggtaacttgattgccttttcacctctaaggcccttcagtgataaacaaccagaagaattttgaatttaaaaataagtccaaacattttttttcatattatcaat

SEQ ID NO: 3885 - DNA, 306 bp, Canis familiaris
caccccctcccccttctcacacacacacacacacacacacacacacacactcgcgcactcgcacggtccgataggacgccgtgcgtctcccgacaggaaaccctggccgctgctctcccatccagcacttcaggggctttggtctggctgggttacggggcgcccggcggggaggcgaccgaaggccacgcccgctggacttgggggccagctggtccgtggccaggaactggaaggaacgtgggacactgggtaggcgtctggtacactggactcctgtgaacattagcggcggacactcactgc

SEQ ID NO: 3886 - DNA, 648 bp, Canis familiaris
  misc_feature (1)..(648): n = a or c or g or t
gtgatccctcnnnnagatggtgatggtgatcgatctgttgtaaatatatacatatatgcatttatgcacttccaggtgagttgcataagaatcaggtcnnnaaatacctcccaatctgatgaaatggtagaaaggaataaagcaacatttcccagaatggaggaatacatttttatttttgtattttttattttttgtccaagtggtgagctgatggtggtgttgcttctctgcatgttatcagtgtgaacattcaggtgcttttcatgtgacatttgtgagccacaaatacaaagttgccatttgaattcagtcaggctccagagtggtgttagccaaagtttctcaggtcggggagaaactgattagggctcctactgccaaatggaagcaggcagcataacctgactatcatgtgccctcaggcagcatgctaagggagaactctgtggcctgggggacatccatgtcacagtataggattgctgttcaggtgttttgtatccatttattttctgatgttgtcccctttttttgtaccaatccagctgggaaaacctcagccaatgctggaagtgtgatttaagtacctctcttttgtgactctcttgtacagcttannnnnnaataaaggaaaagttatnnnnn

SEQ ID NO: 3887 - DNA, 444 bp, Canis familiaris
  misc_feature (1)..(444): n = a or c or g or t
gcccccgccgcntgcgcgcgcctggcnnaggcctcgctgctgctggtgacccttgacccgcgcctgtgccacccactggcccggccgcggcgcgaagccgagcccgccctgggcggcagccccgggggcgcgtgtcgcacgaggcggctctacgtgagcttccgcgaggtgggctggcaccgctgggtcattgcgccgcgcggcttcctggccaactactgccagggccagtgctcgctgcccgccacgctgtcgggacccggcgggacgcccccgctcaaccacgccgtgctgcgcgcactcatgcacgcggctgcccccggcgccgccggcctgccctgctgcgtgcccgcgcgcctgtcgcccatctcagtgctcttctttgacaacagcgacaacgtggtactgcggcactacgaggacatggtnnngacgagtgtggct

SEQ ID NO: 3888 - DNA, 605 bp, Canis familiaris
  misc_feature (1)..(605): n = a or c or g or t
atatgatctttcccgaaaacctgggaacagagtggtcaaaatagatgttctttgtacccagtgtcgagtacccagttacgagcctctcagaatgnataagatatataaagtagtcctccctagcttccttgcaaatggtggagatggattccagatgataaaagatgaagcattaagacatgactctggtgatcaagatatcaacgtggtttctggatacatcttaaaattgaaagtaatttatccagcagttgaaggtcggatcaagttttctgcaggaagtcgttgtcatggaagcttctctctaatatttcttttatttttggcagtgatcattgttttataccaatagccaaaaattcttgccattaatgtttggaactgcattttttttttttccaagtgagattcaagtctgccttttaggaactggcttggtgatggcacagaccatctttgtaagcccttagaaactgagcttagaggactataaatgaagacattgacatcacacaggatcagcaaattagtgaaaacacaggaaaaaaatgaaaatgagccctttgatgggaaggccaaccatctttagtttacatatgcaaatt

SEQ ID NO: 3889 - DNA, 510 bp, Canis familiaris
  misc_feature (1)..(510): n = a or c or g or t
cattgtgagtagctcaccaggcgagtcnngtncagaggctaccagagcagatggctgggtttcaggagaagaattctacacactcacaaggagagttcttcagttggagactgtcttnnaaggagtcatgtcccaagtagatgctgtgggctcaaagctagagatgctggagaggaaggagcagctagcttcctccccaggcatgggggatcaaggcatttgggagcatctgcagccaacctcacctgtgactccagacccctggggagtccaggagtttccaggtggaagagaaggggaagccttggaggagatgagactttctcacattggagattacagtgttgcagaggagttgggagtgagtgacctctccatccagggcaaaaaccatgaaggctcagttgagaagcctgctcccgacatttcactaaacactgggaactgcgagagctgtaaacaggcacatagatggaacctgagaagaatcagacaaagaaatgactccag

SEQ ID NO: 3890 - DNA, 529 bp, Canis familiaris
  misc_feature (1)..(529): n = a or c or g or t
ggnatagaaccnntgggcancagnnggcagtgtagactctctccctgcccctcacctccttgttagtcaggggcccacatgtcnttagcagccatagtcaggcactgaagccctgagcagagcctgccctgcctctctctgcactctcatcagctgccccctgcagccaccctgtcagtcgggtgctcctccacccaggggctctgcactgccccagagctctagcgagcccacaactgtgccagcccagtgctagccttgccctccccgtcatccaacaaaatgccaggttccctccttgctggcccttgctgccccagccccacagagctcatgaggcccatgatgatatgcacacacagagaggctagacccttttgtccagctgacaggccagccatcgcccagcatttgggggcctggcctctcctactggctcttcaccgtgctcaggccccttgaccccaaggggaccatatccaccatgcagcagatgtgcgcaagtatgagcttgcagagaccctgggaa

SEQ ID NO: 3891 - DNA, 685 bp, Canis familiaris
  misc_feature (1)..(685): n = a or c or g or t
tggtgnnagcgatgnctacaccactgacgccaaaggcttcatcntgggnntgaaacagcagattgaatacaagcaagggctacccagaaagcagcagcagttggagttccaaggtcaagtnctgaaggattggttgcctttgcagaactatgggatccagcaccgcgacacccttatcctctccaagaagaaagctgaaaggtttccatttctgcccagataatacaggactcagcctatcaaccacttcttccagcccttgcctggggaggtgtggcgtcttcaccagctttggaaacagcctagccctgccagtaggggaacaaggagggatgggagacacttggtatataatagacaatggccagaccacatatgagaataggattctgacccacacaacctccgcagtccccagcccgaagccaaaccaccatctctgccgcaatcaatcccaaatcgtcaggacttggtcaataatatccagcttccctaattccacctcatttccagcttagagccaaccagaaaaagccaaataagctccctagccaatcacacagggaggccctgcttttagttagccaggatcctgggatggagtccccagtcaggctccgtgctccggggggtgggggtggggggtagggggggtttgcttctccctctgcccctctgcactgct

SEQ ID NO: 3892 - DNA, 253 bp, Canis familiaris
  misc_feature (1)..(253): n = a or c or g or t
ggtcaggcatgccccannaannnctggcctgngnggtgtgtggnnaggaaggcttccaactgcttctctttnnnnnnttttttaagattttnnangagccacccaggcgtcccaacctccaactgctnntgaagaagggtggaccaaaggagtggtccttatccctccctcgcctcctccaacccctgtctcttcctctctgggcctccagctctaaggctgccctagctggggacttgcannngtcctgagt

SEQ ID NO: 3893 - DNA, 494 bp, Canis familiaris
  misc_feature (1)..(494): n = a or c or g or t
ccaaagccctacggcagacgctgttnnaaaaagcatatttgagaaatgccggtaaccctcatcttcaagtcgttgaagagaccgtcctagctctacagttagaccgagacccagatgtgtccttttttgccaccctggaaccaaagcggcggagtacggcagacacacgtgtgctagaagaacagaattaaccactctgtgatcccgagcactctggtcacttcgcacgtggcactcactcaccactcaccccggcctgtcgggtctgactgtgtcacatcttccgaaggaggaaagatttctgaaactttgagggagggccctcaaaagatccctttcccatccgcagtcccaggaactgcacctgggacaggccccacctttctgcgcccctacctgcctgatcaggaagtctgtgacaaggttgtagaaccagggggctctagctggggatgggggcctccatagcatcggattgccttccctacgacaga

SEQ ID NO: 3894 - DNA, 525 bp, Canis familiaris
aacactggtcataaagaaaaattgactgaaataacccatgcgattcctcgctctatcagcaaacttccaaaacaagaggattccaagagaaaatatgaaggatattattacctttcaaaaataaaagaacgtgactggcagtaaacgctggagagatgccaagcatatatccgggggtcggtgtttcaaagaacaagatttcggactcaagcctggcgtatctggcgaattcatccatcatgttgacagtggaaagctcctgcttcatgtcctggatctctgctctcatctgtgcctcctgctcggcatccttctgcagcagcctggacatctggtggagcggacagctggggtcagtcccttcccacacgggcacaccgtccccccacctcctcccgcatccccctgcagctgcttccacctgggctggcttccctttacctacacagccagcctcggctgcctaggcctgctgctgtcctctacacccaccacaaagacaaaaactccctctgatgtgaatca

SEQ ID NO: 3895 - DNA, 476 bp, Canis familiaris
  misc_feature (1)..(476): n = a or c or g or t
aatgaagatgatgtnnntattcagaaatcatnnngcaagaccnnctgnnnctatgtaaatgctattaatactgcacccaggaacattggaaaggannnnaaattccagattttagtttgccttnnaacacgggatcgcctgctcccacagtggatcccactcnnggctgagtgtcctgccattacccgaatgtacgaggaaagtgccctnntgcgagaccgcatgactgtcaactctctcatccgcattctgcagaccattcaggacttcaccatagtcttggaaggatnnntcatcaaaggagtggatgtgtaacccaaatgactagaaactctcagtccagaccccttgttcctgaaccttccccagctatggggactgatttggacttgtctgacaaggtagtgagtcactgcaggggcatcatgcagtattccccaatnnnaataatcctcacactgcagacaaggcaaaat

SEQ ID NO: 3896 - DNA, 391 bp, Canis familiaris
  misc_feature (1)..(391): n = a or c or g or t
tgcctaacgtggttgctgnnnctcttaccagcaactgttcttcttgacctcactccagagagagagagcacaagcaggnnnaacagcaggcagaaggagaggaagaagcaagctccctgctgagcaatacaatagaagcaaagagcaccaatagttcccataagtccctggtaagacttctgctgctctgaatcaagagagaggaccatggattcagctccgttttctcaatatctcagcacacagagaaggagaggaatatcctaatttctgactctgactctgaaggtataccagggaagacaagaagggatggaaggaagaatttaacactggttgagcacttattaattaaatgaaaataatctatgtgaatcggggatccctgggt

SEQ ID NO: 3897 - DNA, 385 bp, Canis familiaris
  misc_feature (1)..(385): n = a or c or g or t
atggaaagagatagaaggcgcagaatccgcatttgctgtgatgagctgannnttnnngtcccgtncngcaacgcnnagacggataaggcgaccaccctgcagtggaccacagcgtttctaaagtacattcaggaaagacatggagattctctgaaaaagatcactctacccaggcttattatgttcgagatgctggggatcatcctttgaatgagaccgagacagtgctggtgacgtggttggtgctcaggtgtctccgtcctgtcccgaggaggagagctgctctgcgggccctgcctgcagagggggctccttaggttggatgtcgagggctctggagggttttaggtagcagtggcatgtcaaccttaaaatagccagtgat

SEQ ID NO: 3898 - DNA, 410 bp, Canis familiaris
  misc_feature (1)..(410): n = a or c or g or t
cgccttcccgcgtccaaaatgcccaagaagaagccgacgcccatccagctgaacccggcccccgacggctcggcggtgaacgggaccagctcggcggactcgtctcggggagcccggcctgtgaagcggagaagggaggcaagcgtcctgcaaagaatggaggccggcccgaagtacggagtgtggagttgggaccagcaagcagcgtccgcacctttgtgctggacacctgtgggccaggagcgcccctgttgcggccaccggcgggctggctggggctggcgggggcgtgtgtgcacctggagcccctcggcccttcccttgccgacgtcggggccgggggggggggcgggggggggctccaggtccttggccttcttcctggaaaactgtnnnnnnnctaagggagc

SEQ ID NO: 3899 - DNA, 381 bp, Canis familiaris
  misc_feature (1)..(381): n = a or c or g or t
tgctctgcatattgcnaagctgcttcaaagatgtgacctttttctaaaagcatataacatgagagacccaccttccctattttatttttgttttaaatgattaaaaatcgtattccttttatgaagtgaagtacatcacacttggaaaagatgtgtgcctcataagtgagggacattttggaagtagtttctactttcagaaggagaagaattcaaagtctcttcctctgctaagagttcatagttcaatgaatgatttcaagtttttatgtgttcttgtcattttttttcctgaaaactatttccagaaacctgaaaataaaatcatagccttttcttcttataaaatttgttattatgggcagccccggtggcccagca

SEQ ID NO: 3900 - DNA, 569 bp, Canis familiaris
  misc_feature (1)..(569): n = a or c or g or t
aagnngnnnntagagtnacaatgggggcttggagataagatagctggctgaccagcacctcacatcactgcttatcctgcctcttgcagtggagactctggccacactgaaggtgcttctggtatctaaaggattgttatgtgaacatataagaaaagaaatggaaaaatgcaacaacatataagaaaaagaaaaatgtcaactgaagggacatttcgcattaaggtgtatgtatatttggatgctgaaagccagacaattgctttctaagagaagagactcatccagcatctcacataggatcaaagtgtaatttacccagttgagaaatgcttcatttactcctacctcttcctcgaagccaggagagctgtccagggttatgtgaagatactctctctgaaaaaactcatctaatcccacagctccattaccaaatctgttctgatttctctggaacctattctgcagcctaaatctctcttaagctccagaggcttatacccaatggcctcctgaacatctccacttggctattctgcaagtacnnnnnacccaacatgtataaa

SEQ ID NO: 3901 - DNA, 418 bp, Canis familiaris
  misc_feature (1)..(418): n = a or c or g or t
agggtcagaagtacattccntnnnngggttgggctgcccccacgcagacnnnggattccaggaaaggcaactcctggggaaggaggcagaccccttcttattgagagcaaaatgagtaagaatatggctgcacgtccaaagggaagcctgacagaaataatgagcctcctttggccaatggtgggggacaatctggagaaggaagtcccctattgtaggcccctttattcccagttcccagccggctagcctgcctgggctcaggtctagctcaagtcttactattgggccttagggagaggttcactttttacatctgtaaaatacagattgttgtgaggattaaattagtgttcagaaaatgtttagcacagggccttacatgagtgttagaaagtgggaactgggcagcccgggt

SEQ ID NO: 3902 - DNA, 385 bp, Canis familiaris
  misc_feature (1)..(385): n = a or c or g or t
tataatattcttttttatggctgtttnncttattctcaagtctcctttttctanannnnntatacctatgcaaggtttctttggataaatgttaggatcatatatactttactatctcttnactttttttttaacacccataggagagaaagagagtgagtgaacacagggggagggacggaggaagagaaagaatcccaagtaggctccacactcagctcaaagccaacatggagctcatctcacaaccctganntcatgacctgagctgaaatcaagagtaagacacttaatcaactgagccacccacgggcccctctatcccttgatttttaatctatctcagtccttatatttaaaatgactttctaggggatccctgggt

SEQ ID NO: 3903 - DNA, 581 bp, Canis familiaris
  misc_feature (1)..(581): n = a or c or g or t
ccgcgcgggcttgtgggtctgtgtgtggctccacaagccagccgggcacgtgacgctgttggcttttgagatgacttttacctcctggatgactgatcctttcctccgtngaaggaacgtcagacctctgctcagtagcctgttctgatgaagcctcggcttagggggggtgatcctcgggctgggggggcatgtcagccccgaaggcaaatacaaatcctagattaataacggtctaacggtcccagctcttaacggtctaaatgtgagggggggaatgatgaaaaaacctctaaacattgaggcccagcccgttggatattccagctgcactcgtccaagggaacccagaacaatccctgtagcttgttcttgagacagcagtgtggggccagatcatgtaagacgagagtgaagggctggtctggtatcagcaccaaggatcaaaagggaaaaaggagcttcttaactaatttttgnnnaaacaatcaatgatgtcactggccggatgctgtcaatacgttctctgtatgtcctttttagaataaagattatgtattatcgtccctttggggaaagtt

SEQ ID NO: 3904 - DNA, 580 bp, Canis familiaris
  misc_feature (1)..(580): n = a or c or g or t
agaaaatccccaatatcctgtctgcatttcctcacctccannagtttacagtgaaaataagtaatatccctacaattaagaaattccttgaacntggcagcaagaagangcctnntccggatgacatctacgtgagaaccgtctacaatatctttatgccataaacatcacatacatctgtgagtgagagctagcccctagagattgcagttccacagtagcatcttaattgatgccaggctgccctgatcccagctctgtcatggtgctatgtataactgttcctcagttgggtctttcatgtcaagatcttttctagaaacattgaccttttgttttgtccggtgaataattgttacgcaacttttttctgaaagccttttcggagaggcttgcatttaagttagatctgatgtagttattcatttcctgataaccagaatgggcaggaccttgtattctcccttgagctttttctcccccgcttcttatccctgtctaaaagcagtatcttcctaatttttggtgttttgtaacaacccagaatatctagtgaatannnnntctcagctataataaa

SEQ ID NO: 3905 - DNA, 515 bp, Canis familiaris
  misc_feature (1)..(515): n = a or c or g or t
tcattgactttggccgggcccgtggctctggcgcatcggagttcgagggggncgggggtcggcagagcattgtgtganngccccgagtttttactgcccccgtgtgtgtgcctgtggggtgcatgtgtgcaagaggtttttttactctttcctgtgggcgccagccactttgccatttcctgagtctgtcggaaaaaccaccaccaccccagcccccagccccgctccgtgctggggcctcttggctgctccacctgcctcacaggtcaccaggtctgctgggcagccgtgtgtgcatggaacagacattgccaccgcccccagcctgccccggcccgccagtgtccacccccgtggacaccgaaccctgtggctcagccgggcctccagaatgatccccagagcaatgggggtcggtcacagacctgcctaacccccttcccgtttgcctcaggccacagcgtgacctgtgtgtgcctgtcccagaccctcgagccacccgtccttgctctgcc

SEQ ID NO: 3906 - DNA, 590 bp, Canis familiaris
  misc_feature (1)..(590): n = a or c or g or t
gntttccaagattttttnctgattagaactggtnannagtatattaaatattgatataaaaataagtgaaaaagaannnnaaccagtttcagaatcatgaaaacaacatttttanaatttaagaagaaactatattaaacagggtttaaaaggaaattagaactatgagaagtanaatttgttatagtatagtatcaaatttctatatagattttatacctcagtggggaaaaaaaagaactgattccaatgacattcattttcatctgtgatagtcatggatgctttttttttttttttccttggggtgctgaaattgagctgaaaaaaaatggctctttgaacgtagtttttaattgctttcaatttttttatttggttttatgggctgttggaattgtaatttttaattgccttcaaagaatgaagatttaaaataatgtctgggctcactgaacacgtaagatgtctcagttgctcttgggtcaactggcttatagactttcacacacacaaatttcttaatagattttgaacttcttaacttgattnnnctgattatgcttaannnnnnnagattcatactactg

SEQ ID NO: 3907 - DNA, 243 bp, Canis familiaris
  misc_feature (1)..(243): n = a or c or g or t
gccccannngccagngnnnannnaagaagnnnnnggannnnnnnnnnnaggccttggcnnaacacgtcagggcnnnggcccnnnnnncnnnccttcgnnnggcccannncgangctttgcgggccaagaacctgctgctgacggacaagnnnnngccggaggagaaggtggccncntngnantannnannnttgaagntgtgttccctcnnngatcaacnnngnnacctgccacttgagngnn

SEQ ID NO: 3908 - DNA, 609 bp, Canis familiaris
  misc_feature (1)..(609): n = a or c or g or t
ggnnagataccagctcgtggtgacnnnnnnnnnnnnggaggagtcacagagtagcagcatctatnaccagaatgacatctnnacccccactatggnntttgctgacttcatcaacaatgagactctcttagnagaggacctggtggcttgggtcacagccagcttcntgcatattccccatgctgaggatgtccccaacacagtgactctgggcaacagagttggcttcttgctccggccctataacttctttgatgaagatccctccatcttctcccctggcagtgtctactttgagaagggccaggatactgggctctgcagtgtcaaccccgtggcctgcattcctcacctggcaacctgtgtcccggacatgcccctgttcttttaccaggacttgtagccccaagggtgtggtgggacatggaggggggttgctgagacatttgtatttttctctctgttcccacttcctgctcccttgacttctaccctcttattgttcnntaggaaaaanagnntcccacnntaaacccatatatatatatatatatatatatatatatatnnnnnataatctcccttccattaattcttattccagttcat

SEQ ID NO: 3909 - DNA, 488 bp, Canis familiaris
  misc_feature (1)..(488): n = a or c or g or t
gtgcacatctgtgacccnctgaaccccatgtccacgtgtccgcggggtgcggtgtgccttgggacnannacgnccgtcctccgtggtaacctgcctggcgtgcaggctctgcgcctggacaggacccagacggagacaccacatgctgcttcccccgataggcttgcggtgctcctgtcccatcagcaccctggaagtggtaggaaacccccactctgtcctgcggctcgaggaggaagggtcccagcggccttgtgcatttgtcccggacccgtgtgcattccagcgtgtgtccttgtagttccctgagtcagggtcccgccggcccctcccggtgtggcagggcctgagagggagctgcctcctgaacgtgcacctgctggcgcccagtggtcgggaagggggcgtacgcccgccgtgcaccaaacagccctctaagcactgctagctccggtcagcgctgtagaaggtcaccccggaaactgacc

SEQ ID NO: 3910 - DNA, 525 bp, Canis familiaris
  misc_feature (1)..(525): n = a or c or g or t
cctcatccaatcannatcaccaagacnnncgctnnnnaaaacccagacgtgaacatcgtgctggaaaggccccagactggcaattccttggatgaaagcatggggcccgacaaggggtctgacaagagaggggttcccctgctgccccttccagaggagtatccgcggaaggaaggcnaggccgccctgcgggtgcctccgggcctgcggcatagcatcagcgactactgcagccgcttcgaacaatacctccgcctggttgggcatgaggccgtgggcaccttcaacccctggctgctggctgagagcttctccgaggagctggtggacgaggcgcttggggccgtggccgcggagctggaagatgcctgcgaggactatgcggaggctgtgttcacctcggagttcctggagcccgcgacctgaaggtgccccctcggggctggggtcttgcccgtggctgtgcctctgcatctccttgtcgtggtgacggctctggtggttgatgatggaggcaaggtgctt

SEQ ID NO: 3911 - DNA, 587 bp, Canis familiaris
  misc_feature (1)..(587): n = a or c or g or t
gatngatttnncaaaaaaactaannnnnaggtagtgnntnnnnctcctatgactgatcccactatgctcacagacatgatgaaaggcaatgtgacaaatgttctccctatgattcttattggtggnnggatcaacatgacattctccggctttgtcacaaccaaggtcccatttccactgactctccgttttaagcctatgctacagcagggaattgaactactcacattagatgcatcctgggtgagctctgcatcctggtacttcctcaatgtctttgggcttcggagcatttactctctgattttgggccaagataatgccgctgaccagtcacggatgatgcaggaacagatgactggagcagccatggccatgcctgcggacaccaacaaagctttcaagacagagtgggaagctttggagctgacggatcaccagtgggcactagatgatgtcgaagaggagctcatggccaaagatctccactttgaaggcatgttcaaaaaggaattacagacctctattttttgaagaccaaggagggatttgctgtgtcaggaactcagagtagtggttaactttgt

SEQ ID NO: 3912 - DNA, 498 bp, Canis familiaris
  misc_feature (1)..(498): n = a or c or g or t
cctctgtgcctcctccatacacnctacctgatgccagtcnnngggccctgtgatgaccagcccagatgttcctgcagaactnnaggacttactctccagactgctaggaaggctgccatcagatggcccgcagctgtcagttcctgctggaaattgctgttggctaaaggcagtcgcctaggccaaggcgagacctgcttcccagggcagactctctccaatgactggtcacacagaggatataaatacccagtcctcttgccccaatctggaacactctacatggccagctcagctttggacctctccatggggtcagctgtggtcatggccaagactgcaccatggcctgactttctaataactgttctgtgtgctaacttccagtgtgatctactttccaagggatcccccatgtgacaaactctatggtgacctatgcccactatggggaacaggcatnnnnnacggaggagaatgnnnnnntaagacgcctac

SEQ ID NO: 3913 - DNA, 535 bp, Canis familiaris
  misc_feature (1)..(535): n = a or c or g or t
tgtataatnttgnnttcattggctnnnccataatggttctatctgtaacattgcacgtccttgaatccaggatacaatcaaannaacttcaggaaataagcatttctaatccctgtgtgaaaagctgcaaaatttctgatgtcatgactttgatgatatttctgttattttaatatccttttaggtagcaaggcattttgacattctctgggactcaaatgcttatattcttttggattaataagtagcaaaaaaagaaaaaaaacataattttataactttttaaggtcaggattcttatcaaacaaaataaaaaactgtaaatggaaaaaatataattcagaaaccatcaaatgagatgagttaataatagaagataaaaatgtatagagcaccannaactttcttcagcttttctaagaataacaatttaatatgataaagaagttcttgattaatatatatattttttaaagaaacattcttttactcttttgtgcacatagccatgttagtgattgattttcacgtatgg

SEQ ID NO: 3914 - DNA, 395 bp, Canis familiaris
  misc_feature (1)..(395): n = a or c or g or t
tgagacaacaaaaatatgaggnaagtactgntgggtgntattnnngccatctttcaatatcattactaatttctttttctaaaaagtaactctaaaggtataatatttcagatttcaaatctgtatttttaaaaatttacagaatgttatnnnagacattgtttggaaaaagaaaatcacttaaaaattaatgccaatattttctaaaatggtaaacaagtaatgaaggcccctttccaataatgagtagaatgatgaagtcatattttgtgctatatctttaattatataaaaatcatagngnnatttagtttctccttgtttnnnatttttcaaaatcaaactnttgttagttttccnnnnnnnnnagnntcatgttctnnnnctctannnta

SEQ ID NO: 3915 - DNA, 465 bp, Canis familiaris
  misc_feature (1)..(465): n = a or c or g or t
tgccgggtaaaggtgtggaannnnntnnnnngnntcacccnnnnncttccnnnccgngnnnnngccataaagggccgagccacnnnnnngcnnnnacccccctnnnnnnnnnnnngtcatcctcccctctttcctcttccctctctnnnnncgccnnngnctgagnngcttctcaacgtgacctgacggtgaagtnnnggagcgnncggcggttgcccggtggcccaccctangagcacacagcagtcctcaccctggctgtctttcgaggatggcccccagaccctcggcccccccggagcctggacagcacagaaggggagctgtggtctgacagggcccccagccctggggacacagggtgtgggcatcggcgaggccgctctcctgctccggcctctcccctgaccttnnnnngggatgctcttcccctgggccctcccctgcctcttggggagagaagga

SEQ ID NO: 3916 - DNA, 607 bp, Canis familiaris
  misc_feature (1)..(607): n = a or c or g or t
agagctatannanctgagggcatggcatagtgctgagatggccncagtggnnnnanccacctaccaggtnnnntcaggatnngcaaatcaagcaaagtgctctctgagcagaagcttagagtctggcctccaaagatggggtaggggctgaagacagagcaataccttgcccttcctggctggttaggactctgctctggctctccttatgctcacaccacgttcctgcgtggaggccctgctttggtttgctggctttgactctctcagtaagattctcagagtaagtaacttgccggactaaggccagcacggcagaagcagagcctgccttgggaagccctaggtcctgccccacctctaggccttcttttaccatctgcacaaaaaagcagattggacaacctaacaccaagtaatggctgtttctgctttcactatggcatatggagaactggcttttggtggctaccttcagactcatggtaacctgtctgactgacttcggctcgagtagtgatcccggggtcctgggatcgagacctcggtcaggtaggactccccactcattggagagagtctgtttatcactctccctctgctcctt

SEQ ID NO: 3917 - DNA, 535 bp, Canis familiaris
  misc_feature (1)..(535): n = a or c or g or t
cactgnnaacacctctnnncggcnnntgtccggtgtnnnaagnnnnnnnnaagnnngtatgcggctgcanngtggcgctcnngtcaacatctcgtcctctgatctcacgggnnngcaagacacctnncgcatgtccacctcacagattgccggtcgggtggcttccagtgcncttcagtctgtggtgcaccgatgngaactctcctttttgctgtgaaggnnngacaatgcatgnnngatctactctgttacaatggctttactagtgacacgccccccggtctagaancgaaatgttaacaccgggagcnctccannncgcccacccagcgacgcccgtgggggaaacaaaacacaaactaaaccggacagactccaaagcnnngccgtcgcaggnnntgcaccgagggccccccacgtggactcggttgtcacgggctgggaagaaaagcagagtgtgagagacaattgcagagagaaccaaactcccgctccctgctccctgacgagcnnnctgtaaccaccgatcttnnac

SEQ ID NO: 3918 - DNA, 638 bp, Canis familiaris
  misc_feature (1)..(638): n = a or c or g or t
aannatctatagannnagaccgannntgcctttaagtaagctcacattttggtggcacntnnataannacntgaaagctgctttgggtcaagaaatgatccccagagactactaacagcaggacatttttaggagcagtcttgtttctcatcgtcaacagagaataacagtaaattaaagcttgtgtgggtaggaggagcagaaaacaaaagtacctataattgaaaggaagaattaatgaaagatgcatttatcagaaccctctaattgtcaagggcagaaaccaaattcaaaccaacataagccaaacataagcctacgttggctcccttgactgagacagctttcatggatgttgagacacattgnnnctgaggctctaatgctgttatttccagtttcaccattaggacatgtcctcttcaagcatctggggaagaggtccacagcttggacacaagtgcacacccgcctccgaaacagcaagacctgcagcttcatcctttctggcaggttgatgctctgggccagatggagaccgtggctgtggacccccagcccttcccatccagctccagaagtcaaggctctaattcactctgaaagggcttcagcaccacccctgtgaggtccttaaa

SEQ ID NO: 3919 - DNA, 312 bp, Canis familiaris
  misc_feature (1)..(312): n = a or c or g or t
tgtggtgtcatagagtagcatgttgtagatacaatcagctgctttgttactttaaaactnngcatttgtaaatattaaaactttagaagatggcaggtgatgtcctttataacacttagctattcagattggacataactgatatagttcatcctttccctctttaaaattatagagacttgtagctcagtactgtttttttctgtttctaatttgctgctgataatgtatatgaatttactatgctgtgtaagctgggtcctagtcactgaacagtttatgcagtgctgctttgccaaataannnnnaann

SEQ ID NO: 3920 - DNA, 550 bp, Canis familiaris
  misc_feature (1)..(550): n = a or c or g or t
tcaagccccttctcgctgtagcaaatgagnnctttcccacttctgnnnnnagnnnntctgtagagcctcctagctgggcagctnnaagcactgtctggaagggctggtttaaggcagtttgggtactggggtcaggtaccaatgaagaatcacgacttatcttgctcccttgtaagccattatttgagtttccttccctgtgtaattactttaagccctctcttcttgagaaactggtcctcttgtcttttgtcatgttcctctcctaccaaatcttgatctgggaatagcagatactttcctgcccaacatgaaagtgacacctgtttgtcttcatatagagcagaggcttctgcttctggtctttccccgagacctgccttcctctggctgaccgtttttaaaacagtctgaagttgtgctcagagatgttcagtcagtctgctcccttaaaaaaaatcaaagatatgccttcacctcagtgagagcacgtctctaagcaaaggctctattccagttgtcctgaaccaggtgggcgactgtttcaggg

SEQ ID NO: 3921 - DNA, 626 bp, Canis familiaris
  misc_feature (1)..(626): n = a or c or g or t
antaagaagaaaagcccagnnaaatcnnaatcttcanntccaganntgagccggtcagtaagcccgagagagttgaccaggatgtcagagtccagcccagatagccggggagacctggagagtgaggacagttacaatgaccccaggcgggaggagccctctagcgaggatatcttggagtcttcgtcccccaggaagagagagaagaacaccatccagactaagaaacctggggcaagggcctcaccagtcaagaaggtcaagaggaaatctcccccagcatcaaatcccaatctcagttgaggccagggcatccagggtgaagaataaatgcgatcaagcctgtagctgaccccctgctgctgttctctctccctccaacctgtcccttcccaggggagggggtgggttctgggcacagcaggagtcaaggggccaggggctactggggttttggaagagtaatttgttcctcaggacggagtccatgggaacagaagggagggcagaggcggggcacagcctgtttctctgtaacattctaggctcagggcagagcacatctggatggggtgggaaggaggctccccatcttttgggagactggtctgtgaaatccactcggg

SEQ ID NO: 3922 - DNA, 445 bp, Canis familiaris
  misc_feature (1)..(445): n = a or c or g or t
tcaggaccagaggaccatgccactgtctttgggacatgaggaccatagcctttgtttctgtgtcccccagagttttggtgacttggtcacttggacacactcacttgttggccatagtgggcctctttggttggtggcatgtacatctggatgtcccccactccaggacctcaggctgactgaggcaagaccagtgaggccttttctctgtgcccagaaggcagtcaggagctgctggacccacagtgttacaaggaccgggatagggcagagggaagtctaggggtatggcctgggttgggnnagctcttctccacctctgcctggagcgatctctgcatgggcagcaaccccctggttggctgccggattttatccatgatggtcaacattcttgtgtcgaagacattttcctattttccctggaatgggtgttggtggatct

SEQ ID NO: 3923 - DNA, 517 bp, Canis familiaris
  misc_feature (1)..(517): n = a or c or g or t
gtcctcctttcagnncatccccagaaccctcacaaccatttannngactcttttttttcctctctctctctctntttttttttttttttttnnttttatttttacgtagaagctcttggacaacagctctcgttctccttccccatttccacaatttttttttttttttaatgtttcccttcagggattccctgtccccaccaggaatttttaaaccaaaacaccccaacttggcagctttttctgtggaggatagacggccggccggacctctgagcacatggtgtcctgaccagccaccagctcctccagccctgccgggcacttgcccggaggactcctgcccctcccaggcctttcctcccaggccaccctcacctccgtttgatagactttgtgaatctgtggactgctctactttaagaagatgaccggtttggagtaatcagaactaatcccctttgttttttaaggatttttttttttcctaaaaagctatttntcgctcctattgaaa

SEQ ID NO: 3924 - DNA, 560 bp, Canis familiaris
  misc_feature (1)..(560): n = a or c or g or t
gtccagccagcatcagcncggagcannncantatgtccagtggtgccccnngcagnnannnnnngacnntgcnnnnncnccagcccctgcccaccccctggctcgtgcagggtgtatgcgcccaccgcccccctgcctcctnnagccgcgtgtnnaggcgccagccctcctgcttgctgcccgtccacaggtgaggtccagaccagaaccctcagtcccacaagactcgccatggccgagcccctaagctcagcccccgcctggaccctcctcacccacctgccagctcaggaggcttgacgccaggcgggtgatggccctgggcctcgtgtggggtgttggcaggtgtcacctccccatgtctgcacgcacaccgaaggcccaggccacgcgtgggggccccacgggcaggagcccggctgcccgagtccgggtgagccgcgcaggggccagtggtgctcatcttatcctcgcccctcagaagtgccttacctgtgactccccgaaaagtgcccttgnnnnnntaatgggctccccggagcccccgacaaggccccctc

SEQ ID NO: 3925 - DNA, 553 bp, Canis familiaris
  misc_feature (1)..(553): n = a or c or g or t
tgttnnatcagtnatctcttcccacccacattgacggtgnnctggtggcatcacttggaccntgtnnaannaatcgggcccacttttgtgtccgctgttgatggattcagcttccaggccttttcttacttaaactnnacaccggcaccctctgatcttttctcctgcgtggtgactcatgagattgacaactacacggcaattgcctattgggtgccccatgatgcgctgccctctgatcttctggagaatgtgctgtgtggtgtagcctttggcctgggtatgctgggcatcattgttggcttagtcctcatcgtgtacttccgaaagccttgctcatgatcgatagttcctgaccagaatctggtgccagcagggtcaaccatgcatgcagtgggaactcacgtttctggcatcctgcccaggatctccctttctcagagcagaagtccccaggacgcctctgggagtgtatgcgtgaggatgtgtacaagtttctcagctggggctctactgtccctggacttgcacccaggggtacccagaacagctt

SEQ ID NO: 3926 - DNA, 104 bp, Canis familiaris
  misc_feature (1)..(104): n = a or c or g or t
agttcatttccatggtatagcacctcccccaggnnngattnnnngttaatgtgacatnnntgaatgaaaacttagganntgntgtgcacaatnnanncaaggtc

SEQ ID NO: 3927 - DNA, 668 bp, Canis familiaris
  misc_feature (1)..(668): n = a or c or g or t
agtntaaactttttgatgantttcttactctcagatcantattccctaccttttcatttttaggtctacanntagcacattnatcttcattatngactagttcagtctggatngatngataatgtgaaaccattcttatagtttatgattcacctttcctagcaccaactgtcacaaccacacagttgtaattaaagagtattcatggagatattttttttccaatttccctggtgaaccgtgagacttttaagattattcataaatacattttgtatttctgtcatatatattaggacacaccaaagaaaggattggaggttataggcctgtgtgggcataacagggaagagatgcccacctattcttttgtagaaaagcacacttcaggattgtgaggacacattcaagccacagaggggataagacctaactatatgtcacaagaaagttagttctaatgactgtccctgtatttttttttccatattgtctttaccagtccaccacaggacctgtgaagacagatgaaccttcctatgggggaaacagtttcccagcccctgatgatgtctccgtacagatgaataacgggggagaacctcttaccagttggccgagttctgctggaattccagaaacaacacagaccaaggcttgagccagtt

SEQ ID NO: 3928 - DNA, 493 bp, Canis familiaris
  misc_feature (1)..(493): n = a or c or g or t
cactgcccgtgactnnggtcacattnngtcagtgggggctgtnnncagggcgggcccacatctctgcccatgggaaccggtgcagtcgctgagcgcttcctggcccagcgccgagatggattccgaccctcaacctcccccttcctctgcccccagacgaggtcaggagcacttcctccaggaggccctcaggaggcctgggggtctttactccccatggcccgctggcttggggcttggcctcttcttgggtacaaaggtcaaagttcccctcccatgaaggcccagccaaggagggaaccccttcccacccctgctcctgctccagcctccacttggggtgagaaggaccagagggtcccaagcatcctgagcccaggccagaccacagctgccaactatgccttatttttggcatttgaggaaagggctccttgggtggtcccaatctctgagggccttactgcccattcccgacctgacttacagagtc

SEQ ID NO: 3929 - DNA, 514 bp, Canis familiaris
  misc_feature (1)..(514): n = a or c or g or t
ttgagaantggtatannanntaccagannncaataatccagagcgagtacggggcagagacaattgcaggcttccaccaggatccaccnctgatgttcagtgaggagtaccagaaaggtctgctcgagcagtatcacttggtgctggatcagaaacgcaaagaatatgtggttggagagctcatctggaattttgctgattttatgactgaccagtcaccacagagagcagtagggaacagaaagggcatcttcactcgccagagacaacccaaagcggcggccttccttttgcgagagaggtactggaaacttgccaatgaaaccgggcaccaccggtccgcggccaagtcccagtgtttggaaaacagcccgttcgccctctgaagcctctgtctgccccggaggggaagggaccacgtccacggaccccatggaccgcgtgtggccgcctgggacgttcctgcctgcagcctgtactgattcactggaagggaancttagaggtggaaata

SEQ ID NO: 3930 - DNA, 559 bp, Canis familiaris
  misc_feature (1)..(559): n = a or c or g or t
actcccgaaacccagccgcccgcggcctcccctccacggcctctggccgcctgcggggcacccannnagtggctcctcccacccccctcacccctacctcacacactgctaacacctctcctcggcccgtgtccggtgtggaaagagagcggaaagtgagtatgcggctgcaccgtggcgctcccgtcaacatctcgtcctctgatctcacgggccggcaagacacctcccgcatgtccacctcacagaggagcagggacgtggcgtctctccggctgcacgcggcccgccagggtgcccgctgccgtccccagcgcccgcgacgcaccacctactgaggcggccccagcggcctctgaccgggctcccagccacgcaggccaccactggccacgagggcaggtccctgagctcagcggtgggcaccgggctgctctggggtcagcaggctgggtccctggtgcagacggctcgtaaactcgcagcacggcttcaccacagacctgctttggaatgacacggttcccaccccaccgactccccagagaaacacggatgg

SEQ ID NO: 3931 - DNA, 219 bp, Canis familiaris
  misc_feature (1)..(219): n = a or c or g or t
tttcattnnnaaaaaaaaaaaaagtagaatctttaagtataagcatttgctgtgtatttaatactaaaaatacattcagaaagactaatcacaaaataattgatgtaatttcattgtttatatattttagtccaataattagcaatatatccttatatgtttatgacacacctgtgtagtgttgcttatgttccagttttttgtccattattttatacc

SEQ ID NO: 3932 - DNA, 588 bp, Canis familiaris
  misc_feature (1)..(588): n = a or c or g or t
gattngcntcgagcattgaaaatgtggcaattcctttttgactttgaagtattnnatttgctgttttaagcatttgtacatattagaagtctgaagagtagcaagctttgagaacccctggcattagcacctttgacatctttccccaggtgaccagctcctaatgtcaacaaggaaagcctgtatcatgaacaggagcggtgacccaggagcaggcttctgctgcttttacccttgccctggccagcaggttgccttctgtcctcccccctcccagaggtgtttaggatcttttgtttctagtgtcaactcgggcttttcctcataggttctttgccctgggtttaaaagaggaggcgtctctgggtgtcctaagacctgtctttaggaagtcccattccaaagagatggtagtattctggaaatctgcttaaaaacaagaagctgtctgatttttgcaaaagagagaggttaggtttttattcatcttttcttttacagttctgcagttccatcannnnnntttttttcaataactcaggtgttaatgaggataaattagaaaagaaaataacttatgtggactgt

SEQ ID NO: 3933 - DNA, 573 bp, Canis familiaris
  misc_feature (1)..(573): n = a or c or g or t
tttggttttttngtctactctaaagttccagtggtntgaaaccatttttaacatgacaaanctaaaaagtgatctgcttcattttgcagctttctccatttaatttatttaaggtctatattagacacatttggtgagagaaatccaggaacatgtttggggctatggaatgactccttataaaatcttcttgggaagtagcaaatcctcacaatctgccatgtcctaaaatgtaatggattatctctaaggggttgatagaaatatttagatgtaccctatttatagccaggtattttaatttacttaatggaaatcaagtgaataacaggcaacatagttcaagatattttattctaatacctaaataaaaagtttacttgagtggttgaagacatttgcatgaaattgcacctagtgcagtacttgatatttataattctacccacaannnnnngtattgcattttccttttttttccattctttggcgccccctttagaaatgccctgaagtctcccattttttgcccatttcagccatgggactttnnnnntattaatgtaaagatgt

SEQ ID NO: 3934 - DNA, 76 bp, Canis familiaris
aacccaattcactggtcgctaccactatctgggaggtcgttttgtaccacctgctctagaaaagaagtaccagttg

SEQ ID NO: 3935 - DNA, 703 bp, Canis familiaris
  misc_feature (1)..(703): n = a or c or g or t
gagtgaagttgattgtactgttaagaagacaccatttatccccctgtttctnnnctaagtagagtttgatctctacacggtcagcntagaaacctcccttcaaagatattatctccnctgggctgtctcagaatttagagtgtttcaaataagaaaaactaggtaggaagtgagggtttctaagcaatgcctatcataattatgtattctttttccatcagcttaagtcaatagcccactgcatttttccttcctcagaatacactccagacctgtgctgtctacagtagctattagccacatgtggctatttaaatgttaaattaaatgttaatttttaataaaaattaaaactcagtttctcagttgtactggtcacatttctagtgcttaatagctgcttgtgcctagtggctactgtattggagagcacagatatagaacattctatcactgcaaatagttctattgggtagtgctgatctcgatagattcatcagcccattgagagaagnnnnnntagccactgtctgcgtccttcagacgttctatatttaaaacaaattctcctaacatcctgaggctgagacggagctaaaagttctcagatggcaaccctgtaaatggtattaatagttgcaaactaaaaattaaacaagacctctatttttttannnnaacttaattattggcattgtgagtg

SEQ ID NO: 3936 - DNA, 701 bp, Canis familiaris
  misc_feature (1)..(701): n = a or c or g or t
atagtgttattttcctgggatcccctatgncttctttgtatttcaactaataaannaaaaaccctgtcattaaaattggtaggataatatannatnntntgannntacagtannactttnnnnatcccgttttctgacccttttctcagtcactgtaaatttttattttctatttcctattgataattaaacatgtacataatatagacactgttgtataaaactgaatgaattgggttgctatgcttgaatgggtaactaagtggaaatattatggatactgagaattcataatgtcagaacaaatctccaggagaaagaggggcatcatgtgtcctgggaaggtcacagcagatgtttcttcaaccccctggattatctgtgtgaaagaatcagctgtaaactcagtatcttatacaagtgggtctttccttccccacctccccccaaatatatgagcactaaatttcaaaatctactcaggtgaaaattgctttgcaatgaaacttatcacattgaaattttcactgttaaagatatttgtgatatttttaaatacaaactttcacatcagtagtcagcagcctgacaattgaaatctggtaagtcggtatgttttaaagtatattttaccctccaaatagaattgtttttaaacaatcggggggacttctgtttgtttgtttaaatgcatttttnaa

SEQ ID NO: 3937 - DNA, 618 bp, Canis familiaris
  misc_feature (1)..(618): n = a or c or g or t
atggaacnnattatagcacatnnacgggaaaatnnagctgatagtatcttggatcttggattannagactcctcagaaaaggtacannnanacnnnnngcgtcatggctctagtcgaagtgttgtagatatggatttagatgatacagacgatggtgatgataatgcccctttgttttaccaacctggaaaaagaggattttatactccaaggcctggcaaaaacacagaagcaaggttgaattgtttcagaaacattggcaggattcttggactatgtctgttacagaatgaactatgtcctattacattgaatagacatgtaattaaagtgttgcttggtaggaaagtcaattggcatgattttgctttttttgaccctgtgatgtatgagagtttacggcaactcatccttgcttctcagagttcagatgctgatgctgttttctctgcaatggatttggcatttgcaattgacttgtgtaaagaagagggtggaggacaggttgaacttattcctaatggtgtaaatataccagtgactccccagaatgtttatgagtatgtgcggaaatatgcagaacacagaatgttggtagttgcagaacagccattacat

SEQ ID NO: 3938 - DNA, 517 bp, Canis familiaris
  misc_feature (1)..(517): n = a or c or g or t
cccacctcagttcccgagcnntggggcancagcaccccctggtggccatccctcatccattccnngtggcctccctgttgnnntgcctcaatgccgcccccctcccccctgctnnnnnnagtgtccgtcggaaatggggctgtcagggactctcacaccaacctatacctgcttgaggaccgtccccaaactgttcttcagatggatcaggcactgatccttgcacttgaccccatcccccacctgagcccatgccccaggaggctctgcccccaccaccgttggaaagattaggatgggtttcccccaaagtaaaactcagggcctcaggacacccatgtctatgttcagctgtgagtggccattcagacaatgggggttgaggctgccttgccctgcacacaggactggggtagggtgggcacgccccaggcccgctcctcaccccgcacagcccatttaggactcaggtccaacctggacacatccctcaccacagctgatttcctttgaatgg

SEQ ID NO: 3939 - DNA, 545 bp, Canis familiaris
  misc_feature (1)..(545): n = a or c or g or t
aagcaaaacagannngtccccagaccttccaggatgatgtcctgggggaagagaatggaaggcaagttgtgctgagagctctctaatttattgacacttcctagtatggcttttcttggagagaaaaaaaaaagtgttttgttttgtttgtttgtttgtttgtttttaactttgaaaacaatgaacctaacccaaaccccatattagacagatgaaaaatacagagcagaaaaattcaatgagtcacccaagatcagacaggaagagagcagcaaagctccaaggtagctgttgttctgactgggagtccaggacttttcccatcttatctgctgtgacccttgtcttgagtcatgtacatatctcatctccaataattgtttatctgaccatagacacttggatctacagtgtttaaagagctaaaattagaatcaagagggtggggttcaaacacaagacctggtgtcatcagttaacttgtatgaatctcattgttttcatcgaaaacatggggctccaaatcccctccctgnnnntctctc

SEQ ID NO: 3940 - DNA, 432 bp, Canis familiaris
  misc_feature (1)..(432): n = a or c or g or t
ccnnatgaggatgaaggaggtaagctctgtgtctcggatgaggctcctgagttcccggagcgccgactccgtggaggaggccgaggacctgaaggccgagagggtgccacccggaggcccggtatctccaaatgcgggggacctgagggtcgggcaccccctccctgtctccaagggggccccctcgctggaagaagacgggcatccagcagcacagagagagaagactgtccagcaggacttctggtgcccagattcgtatgaccctagcagagtggagagggtgtgaggagatgccagtgaagcaccggatcgctagagtttactaactgcgtgtcctcttgtttggcctgtccgccctgcctgcccgtgtgttggctggtgcctgctggcttgtactgtactgtcgcatcctctaccactgccaccaag

SEQ ID NO: 3941 - DNA, 589 bp, Canis familiaris
  misc_feature (1)..(589): n = a or c or g or t
tngtgaggggtggtnggggnnnnanaggcctgtgagtccttgnnagcacaggtnccgtttgacactgccttatgcagtggtgtgaggggtgtggggaagctgggacaaatgatgagtgatagggtnnttctgcagcctccacctgcagcctccaccttgtaacctcctcatgcagactggagctggtgcagggcctcttgtgtggcatgtacctgtggggttctggggccaccccaaaatggggtgggtgggccacggaatggtccctgctcaagcaggatggtggaaggagccacaagttacctgtaggcgctgtctccttagcctgggggctggagatgtggagcaggagccagagggtgggtgaagaggagccacccttctccctttcctggtctgaccagggtctgtgttactttgaaaaaggtgtgggtgcccgtgccccctcccagggccctgagggaggaggggaggtcattggtcccattttctgcctcctggttccctgccccctgcaccccatgtatcatagggaactttcacctcaaaatctttctaagcaatgtgtgaataggatttttactccctt

SEQ ID NO: 3942 - DNA, 473 bp, Canis familiaris
  misc_feature (1)..(473): n = a or c or g or t
caactacaacccaaaccaatnnncannnagatcagcagnnnccagctccagctggacaggttgattataccaaggcttgggaagagtattacaagaaaatgggtcaagcagttcctgctcctactggtgctccaccaggtggtcagccagattatagtgcagcctgggctgagtactatagacaacaagcagcctactatgcccagacaagtccccagggaatgccacagcatcctccagcacctcagggccaataataagaagtggacaatacagtatttgcttcattgtgtgggggaaaaaaacctttgttaaatatatggatgcagacgacttgatgaagatcttaattttgtttttggtttaaaatagtgtttttttttttttttgaaaatgtacaaaatatctatcactncngatannnggttaatatttctgtgtannnnngaaaattggtttgtttntagtattta

SEQ ID NO: 3943 - DNA, 498 bp, Canis familiaris
  misc_feature (1)..(498): n = a or c or g or t
agggctctggctcaggaaaatatgattacctgcaacatcagcagccgaacaccttccnnnggcttatcggggtccactttcacttnnngcgnnnnggtaaaaacttcnaggtctctgatgttttggcaagccagaaaagagccctagttagacaaacagagttgaacttacgtcgagggcgannnannnagcatttttctggggagcatcaggattgactttaatggttctggccattttgaacgcctgcaagcgtgggaagtnctcagcagcacannnagcaccctgttttcaaatgcaattgcacattactgacagnnnagcatgaccctggacctactgcatgggtangcagatgggcttagcatctctcccagacaagtggggtacactactnnnnngacaagancnaagagtcacccaaagaagtctgggaatncagtcagggttaaaagctgctgagaaggctggccccnnnttatttttaaccannataaa

SEQ ID NO: 3944 - DNA, 626 bp, Canis familiaris
  misc_feature (1)..(626): n = a or c or g or t
tgtcattcttccacattctgaatannataatgctgtnnctgttcntatngaaagattacttgcaggtgtgtgtcttgaaaatnnnctctcgtgtttgtgtgtttatgtgggttctaagagacaagataagctctggaagcttcatcgtgtacctacacgtgactgtgtatctgggttccatgggcaggtggtatggaatcctgctcttagatggggtggctgaaagctaaagattcctgaaccccacttgctgtttatgtaccacatctgtacttcagagaggtggtatcttctacaacactgcatttcttgtggttgtgctgttactggtataaagtcaagtgccttcaatgctaaaggctcagaaatttttcttaaactgatttcatgtcctatgcaagtgttttctacaacctgcataaccagtactttgtaaaacttgtttacgcttattgtacatagtgttttttaaagaaatatatagtatttttatttaggtacctccaaacttgaattcgtctgtgtgaagcattgtaaaacgatagatttctcttttgagtatcattacggttgtacaaaggtttccactggttctatttttctactgttactgataagcatgtagc

SEQ ID NO: 3945 - DNA, 642 bp, Canis familiaris
  misc_feature (1)..(642): n = a or c or g or t
aaattcaaacacagtggtgtnngtgnagtagtccttcctgttctccaagccagtgaagatttatctgctgggaatgnctaagagcctctttttaaaacaagctgagcttctgntagtccctgatctcaacccatgacagtctttgtgcttctcctctttcagtctcttcatcaggggccagtgtggagcaaggccggggagtttgctgtaacctggaactgctttttactttcaagtacaagcagagataccaatgagcatagcagaggaaaggtgaagggaatatggacaagcagaacataggggtggtactggtgggggctgaggaaatgcaatataattgtcctaggacatgcctcaacagttattaaaatgatgggagaagactcagctttgagcctaggataaaacactgtgcatccattttaaagggtataaaaggttgcattaaaggttacctcttaaacaggaatgattgctatcacacctctacattgctttgagaactaaagttttcaacagagtaggcacactggactatagggaaaataccatcacctaggagtttatttatttctctttacaaataatgttatttctgtagtccatgaccatcctccttgcagttaccacattttatga

SEQ ID NO: 3946 - DNA, 530 bp, Canis familiaris
  misc_feature (1)..(530): n = a or c or g or t
agaatcngnctcaggannagtaaggtactntanncctgccaccatcagcactgtnnccattgcaaagttccctttccaggaggnnaggccctgggagtcaagttataccagatttcctttcacctgaaacccaaagccctgctaaagggggatacacgggacagaaaaggggatttttcactgtatattgtaaaacttcagaagctattttttttaagctatcaataatattcaccagagcagctagttatctttggtctattttctgcacaaatttacagcttactaattctctacatgctctttttcctatgataattctgcaaagggctagaccagcctagcttctgaacagaggcagagactaaccttatggcagaaaacaggggaaaaagagctttggttttctactcagaactaaggttagtctctttattccctttactatcattctcagtcagtgggactctgatcttctttccttaggagatttnnnnncttgaaaaacgaannnnaaattgtnnctcaga

SEQ ID NO: 3947 - DNA, 570 bp, Canis familiaris
  misc_feature (1)..(570): n = a or c or g or t
ccaaactcacatgttnattacagaagagnantggctttgaaaaaaattattccacagtgcatttcaagagatttcacagatctgatagttattaatgaagatcgtaaaataccaaagaagaggcaaggaccctacagaacacatacctgaagtaattttgaataactttactacgaggctgggtcattctattggacgtatgtttgcatctctctttccccataatcctcaatttattgggaggcaagttgccacattccataatcaacgggattatatattcttcagatttcataggtacatattcaagagtgaaaagaaagtgggaattcaggaacttggaccacgttttaccttaaaattaagatctcttcagaaaggaacctttgattctaaatatggagaatatgaatgggtccataagccccgggaaatggatacaagtagaagaaaattccatttataaaatactgaaggaatagtattgaattgtactaaacaggtctactttggatttatgacagaagaccctttttaaaacgtcatttactggttccatannncttttca

SEQ ID NO: 3948 - DNA, 290 bp, Canis familiaris
ctcagactgtcatgatggcttcctcctctgagggacacacagtgtagatgcttgttttcatggtcgctggaagatggccaggtggggaggttgcccaggagggaattgtgcttccatgttggcctcaaccttccccactcttttctatatgtgtctttaaagaattctccttcactgaaatgaccccattctcaatgtgacaaataagtaacacacttagaattcttttaagcaatgtgctttaatcaggaccccagaatggatcatgatgttgaattatgcccctttcc

SEQ ID NO: 3949 - DNA, 615 bp, Canis familiaris
  misc_feature (1)..(615): n = a or c or g or t
acgnnagtgttcntatgtgtggatgttgtgttctgtgccattgagaagaactttcccaaattttgtccaccagagctactcaagagtgtagtcttggaccagcaccaatctgtggatgtttgttttctacaatgtctaattttctagcaccatttgttgaaaaagctgttcttcctccaccaaattgcttttgcactttgtcaaaatcactggttcaacatcaggaatatagtggcccaaatgagagaacagcgttatggcatgattcaaacaaaggagcagtatttcttttgttataaagttgtgcttgaagttcagaagcttctgactttcgattaagaaagacttctgttgcctcactcttgaaatcaccactgggcttggagctgcctcataaatgttccagctgtgctgaagggctttgctgatgcacacaatgtgctttcttggtgtatcatttgactttctttctgacaacttcctgaaggcagcatcatttggtttggggtgaacagtgtttatccattaatcttacttagataatatcaaaataccctcccacattttccagtgaaacaaaagttgcataaaacaactgcagcctatttggctgca

SEQ ID NO: 3950 - DNA, 281 bp, Canis familiaris
  misc_feature (1)..(281): n = a or c or g or t
agaaaatccgagcannnncnagtgcaattctcnnnagcttttacaagagggcaggnnnnnnntaannnnnncgaaanacaatcaatnnngnagtgtnnnnatngngccnnnnnctaccccaaagaaattgcaaatgcctcnnnnnnntgaatgtgaggtgaagaagactccagaaaaacaattgaccagctttgatgggaggnnnnctagagaagaaaaaatactgtnnnnntcaagnnnctgtgttannngcattnnntnnngattgtctnnnnnctctt

SEQ ID NO: 3951 - DNA, 600 bp, Canis familiaris
  misc_feature (1)..(600): n = a or c or g or t
gcatcacngtnnttctcaaaagagtcatcacagtccccctgagaggagnnttcgaagtcctcaaaagagtcatcacagtccctctgagaggagccttcgaagtcctcaaaagagtcatcacagtccctctgagaggagccttcgaagtcctcaaaagagtcatcacagtccctctgagaggagccatcgtagtccttctcagaagagccatcaccgtccctctcagtggagccatcgcagtccttctcagaagagccatcacagtccctctgagaggagccatcgcagtccttctcagaagagccatcaccgtccctctcagtggagccatcgcagtccttctcagaagagccatcacagtccctctgagaggagctatcacagtctctctgtaaagagccatcggagcccttctgagaggagatgtcgcagtccctctgagaggaaatgtcgcagtccctctgagaggagatgtcgcagtccctctgagaggagccatcgaagtttaggattaatctgagattttgtgagcaatcaagtaccctcatttgacaagtattgtaaaacaatcgtttttgnnnaaannnngaaaaataaaag

SEQ ID NO: 3952 - DNA, 517 bp, Canis familiaris
  misc_feature (1)..(517): n = a or c or g or t
aagtgcccganctgctgttttgacaagtgnnnnngcttctccccagcccaagnnagncgggcccaggtccagactgtggtggnngcagnnacttgggcttctgtgccaaagatgagccttggagccttccctgggctcgcctgctggtgctgggcccgggcgccctctcccgctcactcaggtttggttcccacctcccggcgccgtggtgcccgcagcccctgcgtgcgccagaagctggcagccctgtgcttgctgctgtcacgtctgctcgctctcggatcgagggtccctgctctgccagggcttccgggcgggtggcctgacagcctcggggctgggcgctgggcggacacccgccgcggggtgggggtggggggacacggggctgcactcccttctcctcgttcccaccccttggcaacagggaagggctttgcctgaccggaggaaacacccagctttatgtaaatattcggccactgtcaggtgtggggtgcgcccacagccccgggct

SEQ ID NO: 3953 - DNA, 26 bp, Canis familiaris
  misc_feature (1)..(26): n = a or c or g or t
aaagaaatttggaaaatacagannnn

SEQ ID NO: 3954 - DNA, 547 bp, Canis familiaris
  misc_feature (1)..(547): n = a or c or g or t
aagaacagcagccatcagccattttgtgctgagtctcttctcagnnntctgagggtcatttgacttttcaagctactcagaattttcagaatgcagatcctaaagacagctggatgagaaacaaatatttggaaatcattttttaagtgttttgaagcagataccatcagtcatttccagccaagttaagcaaaagttaaaatgaccatgctgtcatcacaaaataaaaccacagtggagtgtatgacctaagtggttagtcttggtgaaatttattgtgaagttgccatgtgactctgtctcagatcaagtaattctttcattaggttgggtctggggaggggggaaagaggaacttttccaaggagagcggacagacatgggaaagactcctcgaagggtgtcagcggagcctcctgcactgcgaaaagaagtcagaattgcctcagcatttccatgacgcacattatgcaaacctctttagcacgattttcagtttgaaagttgaaatatggaggggaaaggggaggtttccaccaattgaatc

SEQ ID NO: 3955 - DNA, 574 bp, Canis familiaris
  misc_feature (1)..(574): n = a or c or g or t
agaccnncaatgagctcgaagcccagagggtggccacagaattcannnncaggaagcggctgcgngagatnnagagagtgtacggcgagctcaggtggcangagaagaacaccttggaggagatctccgagctgcaggaggacatccggcacctggaggacgatctgcgcagaaagttccagaacctgaagctatgccacacccggctagagtcccggactcgccggcccaacgtggaactgtgccaggaccaggctcagcacggcctcactgacgaggttcaccagttagaggcaaccatcgctgcgctcaagcacaagctggcgcaggcccaggacgccctggacgcgctgcagcggcacctggccaggctgcaggccgacctcgcgtgcaaggccagctccatgctgctggacgccaagtgcatggacacccgccgcaagctggccgcgccggccgcgacgttcgcgccgcaggtggacacgttcgcccgcaccacgaaccgcaccttgagtccgctcagaacctgcccactggagacggtctagtgcggggtggggggtgggggtggggt

SEQ ID NO: 3956 - DNA, 486 bp, Canis familiaris
agagcaccagccccctcagctgtgcccactggcaagctgcagctggggcgggacaagttgtgtgccctgtggggatctgtgggagcaaggctgcttggctccagcctctgccctggacctaagaccgagcccaggctgagctgagccgctacccccttccctgggtgccccacactggggagcagaggaagaggcccagggccggcctcctcacagagaggtctgtgcctggtggactaacggagggagggggcaccgctgaagggagccgccctgcccttgaggctggagctggcgtcacaggcaacgctggtgccacccaggagcatcctgcctctgtcacagcaaaggccaggcagaaaccaggcttgaggggcaggtggcttctgtgacccaacaggtcacccccagcctacaggtcccccattgtagttctctctcaccctccctcagcacccctccctgacccctctccaccccccagtt

SEQ ID NO: 3957 - DNA, 529 bp, Canis familiaris
  misc_feature (1)..(529): n = a or c or g or t
cgcatgtcagttggggtccgaccccccaagaggccagtttgcatcaccagnntcagtgtccttgcacctgctgttccttctgaccggaagacccgtctgcccggccggcccccggcccctccacctggctcacctcaactcacccttcagggctcaggggagatgtcctctcttcccagnaagcctgctctgacccccccaccccaccccagctgagttggggcccctgttgaccaccaccacatgcgcccctccgagcactctggcttctttgctggttggtctccaacagactgaggcccccacgggcccgggcggtgtccaccctgtccccctaccattctatccccagcaccgggcccaattccgccccctctctggatcctgccaggggccagccagcagccacctccctcaggcagcctccccagactgtcccaggcggtgcacctcccctgcaggcccccagccccccccagcaggtgtttgggaatgcggggatgaaaggacacagccccgccccctgttc

SEQ ID NO: 3958 - DNA, 631 bp, Canis familiaris
gaaggcacgttccacgtgaacacagtcacagatgatgactatgctggcttcatctttggctaccaggacagctccagcttctacgtggttatgtggaaacagatggagcagacatactggcaggcgaatcccttcagggccgtagctgaacccggcattcagctcaaggctgtgaagtcctccacaggccccggggagcagctgcggaatgcactctggcacacaggggacacagcatcacaggtgcggctgctgtggaaggacccccgcaacgtgggttggaaggacaagacatcctaccgctggttcctgcagcatcggccccaagtgggctacatcagagtgcggttctacgagggtcctgagctggtggccgacagcaacgtggtcctggacacaaccatgcggggtggccgcctgggggtcttttgcttctcccaagagaacatcatctgggccaatctgcgctaccggtgcaatgacaccataccagaggactacgagactcagaggcttctgcaggcctagggatgggggtggggacccattgctggaagatggcaccatcgtggctaccctcactgcaacaaacagggagcttggcacccggctccaagaggtagctgcccta

SEQ ID NO: 3959 - DNA, 608 bp, Canis familiaris
  misc_feature (1)..(608): n = a or c or g or t
tgtatanattattatcgnncaatcccttggtaacctcagcaccattctnaggagcgttgggattggtccccaaaaggtttgtcaaaggagaatctcatctcactgaagaatgcttctcaccttaagtatttttttttttttacatttaatgaaactttaaagttcgctgtaacttaaatagtatttgccatttagctcagacctttttaggaaacaggcttaatggttggtaattttaaattccctctttcttgcaggaaggacagtgaaaagctagaactgggtgttccaagttcaatatgttactttgtaataggtgtttcatagatttttctgctaccttgctgctatggttttctctaagagctacatcatttagtttcatatacaatttcatcagtgtagaacctaattcaacttaaaactgtgtgcttgggaaaactatcttactatttcacaataggctgacaacaatttctatagccaaaaatagctaaatacctcaatcggtctcagaatgtcattttggtactttgctggccacacaagccattattcactagtatgactagttgtgtcctgcagtttatatttaactttccttatgt

SEQ ID NO: 3960 - DNA, 649 bp, Canis familiaris
  misc_feature (1)..(649): n = a or c or g or t
tctcaaggtagtatggnaggtgttgggatagaaaaagannnggcgtgnnagcaacggtgtnntacgtgactgaattagggactggcccggagcattccttcggcgagtgaagcctttggcatgaacgtnnacgcagcctggggtgaaaatccaccaggggtggaaaagcagctgctgctcaaccaggatccctgagctggaccctcgcgctccctgtcgccagccggtcccgatgggggcctctcccgaactggagagcccagaggacaggcctgcgcccagcgaggggtttgaatgggatgagggccccaacggggatggtaggaataggaccctgggtcctcgggagaccgagggagggagctggaattcgcccctttcccagtgaggaaccaggctcagggaggccaggctgcaagctccaggtcacacagggagtgaatgctggagctgaggttgttctggaatccctcacgggaggctgaaggaggacgtcgcggctaccctctgcttctggtcgatgtccagggtgtgaggtcaaagatgggtggtggaaggggaggtgggcggggtgtgggggcgcctgggtgacgggcactgggaggggcacctgatggcatgagcactgggtgttattctatatgnnngc

SEQ ID NO: 3961 - DNA, 669 bp, Canis familiaris
  misc_feature (1)..(669): n = a or c or g or t
ccccccagcnnctccagcaccccgangagagagcgcccaccccctccccagctcnnnnnccctctgcctgtccaagtgggctctggccgtgttccgtccaatcccaagacatacggaggtcctggggggatgctggcacagcttggcaactgctgaggagggggctgggacccctttccatctccaccttgagccccaggaagtacagtgcccacacccaatcttnnnnnnccccnnnnnatatggttggaagaaagtaaccagtttccagagagccagagagtgagagagcgagcgagagagtgagagcgcgagtgagcgagcgagagatgctgttgaagcggacgcggttcagcagcccaaagatttccccgccccggcatgccccgcgggggctgcggggctgagggtcggagccagtttcttcagcgcctcctcctcacgcctccctagtgggaggaggcagctgtccatttgtccaaagtattaatgcaactgaagctgtgatatttcgaacgactgtaggaggaaaaattaaggggagagaggaaaacaaacaaaaccaaccaacccctaaaatcattttcttattgtacataacgacctcattctcctgtatatgcggaagatataaccttatatttggtaagtgtnncttgtgctatttta

SEQ ID NO: 3962 - DNA, 653 bp, Canis familiaris
  misc_feature (1)..(653): n = a or c or g or t
cccttgcaaggggtggtgcgnntcctacagctgacccctgaacgctgcctcatcgaggggactatcgatggcctnnngnctgggctgcatggactccatgtccatcagtttggagacctcaccgggaactgcaacagctgcggggaccactttaaccctgatggagcatctcacgggggccctaaggactctgaccggcaccgtggggacctggggaatgtccatgctggcactgatggccgagccatcttcaggatagaggatgagcagctgaaggtatgggatgtgattggccgaagcctggtcatcgatgaaggagaagatgatctgggcctgggtggccatcccttatccaaggtcacaggaaactcaggagagaggttggcctgtggcatcatcgcacgctctgctggccttttccagaaccctaagcagatctgctcctgtgatggccttaccatctgggaggagcgaggccggcccattgctggtgagggacgaaaggagccagccaagccccctgcccacctctgaacatggcctcagcttcgggtttgttctcccagctgtgcactgtnnnnnntccagagagaggggagggaggccctgcttgcccagtcctaggaggacttgggtacagggtgtgaaggttg

SEQ ID NO: 3963 - DNA, 609 bp, Canis familiaris
  misc_feature (1)..(609): n = a or c or g or t
gtcccactttcatctncaacntgtacttnntaaagcccaggaatttaaaagaatttaacttccatatctggccttcaaccataatgggattcgggcaatcctttccaagtgtctgttaaattatgcccactaatttcagtgaggcaaggttttaagagtcacagtgaacccatccatgtaaggactgaaagctctggtccccgagatccataacccctgagataagccagagctacaaatacatcgtctagactttgaaggagagaatacgattcttaatatagctcaccaaccgctaagtcgtgcctagactgtcataatttttctataacgggagaagcctgcctggctgcctgttggctagaaagagtctcacctcctctgccaccgcacaaaaaaagctaaaaagaacgaagggccccgaatcagggcagatggtgacccatgactgtttcagctcagggtgtcagcctctaaagcatcaggtttgaatcattttggtatcatgggactctatcattgttcatttgaatctgctgacacgcttcctctggaaagtatagtttggcatggatgagtcagtgggttttttgttttgttttggggtgg

SEQ ID NO: 3964 - DNA, 477 bp, Canis familiaris
  misc_feature (1)..(477): n = a or c or g or t
gaagtttgtaattcatcctcttggatcagtgctattganatgactgtacccttggaatggctcctgccactnnaacctgcagtgcagtctgtgaagagtcacgtcctttttccttggctgctatggtgagtgccagtttttctgccagccccagagtggtaatgataaccatcttggaacgtgagtatttctctgaggatctttgaaaccactgattgaggactcccctaactgcccaggttcatgttttaattccagttggctacgtggttctaatacatgttcttttatgaaatttcagggttttgttcatgcagaggatgcctcctatctggttggtgttgggcagatcctaggaacttccatctaatttccctgcattaatctatgcaagcagctgtcaacttactggaggaaagaaactgcccagaaatttngagatgcttaaatacnnnnngaccaattagatttatttaa

SEQ ID NO: 3965 - DNA, 687 bp, Canis familiaris
  misc_feature (1)..(687): n = a or c or g or t
acctgctgccctacnagcgggtgctgccactgcccatcntcacccccaccaagatgnnnnnngccaaggagnagcgcgagnacacccccatccagctgcgngagttgctggccctnnagacggccctgggtggccagtgtatggagcgccaggatgtggccgagatcaccaagcagctgccccctgtggtgcctgtcagcaagcccggtgcccctcgtcgctccctgtcccgctccatgtcccaggaagcacagagaggctgagagggacggtgacctgggctccactgcgcccgccgcgggctgggcccttcctggctaggaccatggaggggagctgctggccatggatgctttgtagtttgcccagagttgggggctaggggaggagggagccagaggccaggatgcctgggtcccctgagttcccaaagggaggggagcaaagacagtggccacgaagggtagggagctggggaccagcacagccaagtgccccccagccctaggagaagggacagaagatgccggggaggacaagtggtccctgaggggagtgaccctggtccgggccccggcttcagagaagatgaggatgagtgtaaggggatctggaatgctctaggaagaattggaggagacgggagtgagggggacgtgaagagggcagaggggagagtggagcccc

SEQ ID NO: 3966 - DNA, 586 bp, Canis familiaris
  misc_feature (1)..(586): n = a or c or g or t
cgggatgannattttgtgnagcccaagnnagncttcaaagccttcactggcgagggtcagaaatnnnnnagcacggccccccaggtgttgaataccagctctccagcccaacaggcagaaaacgaagccaaagccagctcttctgtctcaatcgacgagtcacagcccactacaaacatccaaatacggcttgccgacggcgggaggctggtgcagaagtttaaccacagccacaggatcagcgatatccgactcttcatcgtggatgcccggccggccatggctgctaccagctttgtcctcatgactaccttcccgaacaaagaactggctgacgagagccagaccctgaaggaagccaacctgctcaacgccgtcatcgtacagcggttaacataaccgcccgcctggccggcagcctcatctccctcctgcgtctcccacggccagctgccccgcggggaccgcctctcccgccccttcccgcacacccagcagtccagtgccacgtctcctccgtagctctgggttcttagatctcggttggacattggttttctccttagttgcatttcctgggtttttg

SEQ ID NO: 3967 - DNA, 604 bp, Canis familiaris
  misc_feature (1)..(604): n = a or c or g or t
ccatcacactgacaaatcacccgattacaanctcagtctcagagtgnnaccagtgactcaaatgaaaatnnnatcaagcagggctgccccaaagctcacactcttccacccctgtgctgtgttggcttcttcttgcccgtggctcatctcaacatcaccagcaaacctaatggaatctggaccctccaggaacaccagtgaaggcttggctggctcactgctgactgaatgcacaacgccgtgaggacgggccgtctgtgccccagaaactctgccctccctagccagcccctgggtccatgcccccagacagccttccttcccaccatcccaagctgtgctgcggaccagagcctacagcacacaggacatcaagcccaaatactatccaactctttgccctaagagagtgtggacctttgtcttcctcatccactgctctttctacactgcctcccaccggctctgccacgtggctggcactcaataaaaatgtaaggcaggaccgataaatgactagaagacaatgcaggtgactatctgtgtgacttagggccaggcaggatccttaaaatttccaaagtcaaagctgtacaaatactta

SEQ ID NO: 3968 - DNA, 513 bp, Canis familiaris
tacgggcccagctgggaccgtcccttagaaaattctaggaattttgatcagagcggctactcaggctcccagggacacaataccccacagggacacaataccggctcttcctgggggagcagtagcagcggaagtggtggcggaagtggcagtggaaataaaccggggtgtgacagcccagggaatgatgtccgcgtatccggaggatctgggggtcagggcttcggaggaggacagggaggtcctggcagctctggtgacatcagggaaataagcaaagagggtggtcacctcgttgggggcccccaagacaattctcagaactctcagacgtctgctgggctcttcaacttcgacactttctggaagaattttaaatccaagctgggtttcattaactgggatgccataaacaaggaccagaggagctttcgcaccccgtgaccttcagacaaggagctaccagatggatgggagcccccctgccaccccttcttaaaaccccattatcca

SEQ ID NO: 3969 - DNA, 548 bp, Canis familiaris
  misc_feature (1)..(548): n = a or c or g or t
taactancttctccttcactnncaactcctggtcatggtgatatttgggttctttgggaccatttcgnttttctccgtggagtgggccgccgccgccatcgtggcccggggctctgactaccgaagcatttgaccctggggcgcccaagaggtggggcgcggcttctggtggcgtggcggagcgaaaactcggctgaagaagccacctttcctttccgcggagtgctggatgttgttcaggaaggaagatcagagaattaagactgctcaatctgccagggttggtgttcaagtttacagatattatctatttaaaacaagcagaataagggaaacttgttctgtcagttataatcgttcagagataatgtttttcaattcctatgtgtcgagttccttataatcatgtncnagagtgnaaatgttttcttcgccctcctgttctcattgaaagatcctgccctgattcagaacactaggccgtatggcagatgaagattcttgctgggcatgggtgtgtgctactatgtagtaatagggagcatnng

SEQ ID NO: 3970 - DNA, 653 bp, Canis familiaris
  misc_feature (1)..(653): n = a or c or g or t
aagatannatctatcacccaggggnnanctcaaggnntcaggttctccatttcaatannngnangnnnntgctttccnatagtcccctcccaaatatgcaagtcacagaattttggaagaaagcctccctcaccagcaacnngtcntctggnctgagttggtcccttgatactatcggtaggaaaatgttgaatgtgaattgaaaatcttttctggaaaaaagtcacctttcttcctcccacttatgccttttnnnaagggacagccagttttcttccctccctgctaataaagccagagggggacttccgctatatttctaagtaagacagttagcagtcagcatatggtaggaggggctgaagagaagagattctccattatgaggaaatgggaaaacatctggtttccaagcttgcatttcctgctgcagagaattcacatatgtagttaggatatttctgaaggtacagggaagtgggaacaaataccttcacttcagatttatttatgaattacatgcttcatgagtccatttggcacagagacacaaggataaaaacacaagaaaccatttttccactagttcatagaccaagttaacagtaactgtctttcctttccacttccaccttgtnttcttcgaacatcat

SEQ ID NO: 3971 - DNA, 538 bp, Canis familiaris
  misc_feature (1)..(538): n = a or c or g or t
taccccttcctctctccctccttccatctgcccattccnnnncccccaggtccagtggacaagaccaaagtgtgtgtgtgtggggggggtggggaggcaggagtcaggctgaatgggagttaatcagtgggggtgtgtagaaatcccttggtccccactccctgtggtttagggagcacaagcgtcctttccatgcagttcatttgtctgtgtggcaggctggctggctggctggctgggggcatctgcctgtctgtgtgctgttggtgtgcctatgcctgggggaggtcagcaggggccccctccccatgtggccctcgctctgtctatgcaggagccccaaaacccgcactttgtctgtttgttctagccttgtggttttgtctccatgtgtatgtgtttcttggtgctgtggcctgtgtgtctctgtgcctctgtggctgtgctatggtctctctgagtctgcaccatccatgtgtccttttggggatctgtctgtccatccctctgttggtnntgtgccctcggctatcccaga

SEQ ID NO: 3972 - DNA, 418 bp, Canis familiaris
  misc_feature (1)..(418): n = a or c or g or t
agtaccttgagacactcctgtattcacagcagcagctggcaaagtactgggnngccttccttcctgaggcaaaggccatctcctaatggaccaannncaccagaatccacctgcctgacgctgcctttttatacactgtcctccacctctgctggactccagtgatgcatcctgcctagcctggactttaccccttcctccctgcccccacgacccctgtccctattctaaccattacttcatttagcttccatatatattttcttacctgagagaatagtttcttgctttaagcaaaagacctacactaggtggtggagttaggggataggggtggagtactgatataaatatataaatacaaatgtatatttttcnnnnnngtggttaggaactgggaataacgttttctgttact

SEQ ID NO: 3973 - DNA, 608 bp, Canis familiaris
  misc_feature (1)..(608): n = a or c or g or t
tccacatctctcgctcaactgttaatgtctcaacctccagaggtaccccacccagcacactgtcagtaaaggggcagattgaaacagtgagagttaagggtacagtagaaaattctgcatgtttgcagtgactagaagcagatagtagtgtggtgttttctattagaaacagtgggagcttgcaggtaaagcttctgtggctgtttgaaaagcagaaagcactaaatgcagcaaagtgttcgcatactatattcctgccttgtctgttttacatccagagttgaaataggttttgcaatagagctgctaaaaaacaggtgttcaaagtgtgtgtgttggttgggtggactttttctttggcttctagtagctttaatagtaactgcctctctttttttccctttttcacaggcacagaaaactgaatctgtagataacaagggagaatgaattgtcgtgaaaaatcggggttgattttatgtacctctcggggcaacttttaaaagctatttttaccaagtattttgtaaatgcnnntttttaggattctactagttggcatacaaaaatatataaggatggacattttatcttctcatagtcgtgct

SEQ ID NO: 3974 - DNA, 457 bp, Canis familiaris
ggtagccccgaaccccacagcaggtgtggacactgcagtagaggaggaagtgcagaggctgcggtcaagggtggatgtgctagaacagaagctgcagttggtcctggcaccgctgcacagcatggcctctagggccctggagcacgggctcccagaccccagcagcctcctgacccactccttccagcagctggaccgcatcgactccttgagtgagcagatctccttcctggaggagcagctggggtcctgttcctgcaagaagcagccatgacaggcctggccggggtccccactctggctcctgagagcctgtgcccgctgtgctgggtcaggcaggaggggacggcctgccaagacagggtgggaggaggggccccaccaggccggcacccctgcaccccgaccggtgggtggacccgtggctgagggatggtacgagggtcttgcttgctgg

SEQ ID NO: 3975 - DNA, 350 bp, Canis familiaris
  misc_feature (1)..(350): n = a or c or g or t
ccannctggagagagctcaggnntccccgaggggcgtcaggcgcaggggcctgggcacanggcgcccccgggcgcccccggctcccccacnngtntnnntctaacctcaccctccacacagtcaacggcggaaaggtttttataattttaaattattactgctttgaaataaatggacgttttagctcacgtgcggccctgcatgatctgtggaaagactgggtggagccgctaggccggggtcnccgcgntgcccggacaggcnnncaggccccaagccaagcgcagggggctcgggaccacagtacgaccagcaacacaacaaaactgctccgacagacgttttttaa

SEQ ID NO: 3976 - DNA, 619 bp, Canis familiaris
  misc_feature (1)..(619): n = a or c or g or t
acctgtaggttttatctnntaaatatgcctcaaanntgattcctttaatccgtttccatcccatcctctttatccagtannnnntattggtagtcctatttcagtatggactatggaaatacctttctgattggtctccctgtatttaccatttcctttgtcagttgcctatgaagcagtcaaacttgtattttaaaagtttgataatatcacttcctcattgatacccttcattggttcccccatagttcttgggttgaagaatatatttctcaaaatagnctaaaagactgctctgcctcaaattctttggatacgtatccagaattaactcgtattccagcatcaaatagatctggcttttaatccttgctctttccattttctagccttctagtttcagggaaacattttgttatttttaaggttcagtcttcttatttatattatgggaataataatggtactacctcaaaagttgatgggagaattaagtgaaagaatgcatgtaaattgctcacagtgccnagcataaagttaataaaggttaccataaaatgaaaagatactgtggtatacaaacaagacttgatcatctcagcaagattcatctgagaaa

SEQ ID NO: 3977 - DNA, 513 bp, Canis familiaris
  misc_feature (1)..(513): n = a or c or g or t
atctgtaatagaagtagtttagcatctttgaactaaaacacaatgctgcaaatggttnnnagtaattatcaaaatggaatgagctctaacttaaaatggtatttaataattacagattttaattgagaattatcttttgagtagatgtannnacaaagtgcattaactcttgttggaatattttgtggctattccaaagtatagagtgcgtaaattttatgttgaaaatgtctttcgtgactgctacnaagttttctgaagttacatatggcttttgggatttctgacacagccaagatgtgcaatgttgttaggatcttatctttcagtgcacgaaaagctatcaacctcagaggtnnnatgctaattatacctgcaagaatacctaaggcagccaagaagaaatgaagcccaaataaaacttgaaaatgcaccttaaaataaaaaagtgtgtgtgtgcatgcactcgtgtgtatacacacacatgcataagacttcatatgttacttttga

SEQ ID NO: 3978 - DNA, 384 bp, Canis familiaris
  misc_feature (1)..(384): n = a or c or g or t
ttcatctgaatacaaaccttgttgcttcaatacaaagatcccataagcatgagtcatttggaaatagtatggtagataatttagacctatttaccagaagctctgtaggaaagaaacatgataatggatgtgcaaaattattcttccataccgaatatgagaaaacaactcctgnngtaaaaccccatggatatagagagtgtgggaaagcnctcaggcgaaagaaaggtcttagtctacaagagagaattaaaaatggagagaaaccctttgaatgcaccgcgtgtaggaaaaccttcagcaagaagtcacacctcattgtacattggagaactcatacaggagagaaaccttttggnnntactgaatgtggaaaagccttta

SEQ ID NO: 3979 - DNA, 468 bp, Canis familiaris
  misc_feature (1)..(468): n = a or c or g or t
tnnnnnnntgtgaatgaaaggaagaggacccaggaggaaaataagaatgaaaggacaaggcactgccaatgaatattggtagttcaaaccagagtttgaatttttgagttctgttccctaagactaaacagttctccaaagtttatacacagatctttcttttgggctttatgaaagtaatcaaattagtaacagactggactagcttagtgtaagttgcattctttttatttcctttatcattaaaacattttatacttcagctcctatgtacatatttccaaattatctttgttagacttcaatggcccttctagtagtctgacttcgaagatgatccggaatcagtattcatttaattgacaagtatttactgagtgcctatgtgtgcctggcacttttgtatgtatttgggatacttcagtatnnnnaggtaaagctgacnnnnntttatgttgttaaggttgc

SEQ ID NO: 3980 - DNA, 605 bp, Canis familiaris
  misc_feature (1)..(605): n = a or c or g or t
ancagacaagtatccatcaccggcttcttccagannnngtgaacagccatctctgttagnnctgaggtgtggagtggtcaagggagaagaccaaggcagagtctcacttactgtgtaagttcatcctgtgcctcaccttgcctgtatcaaaagacttcttccatcctgtgagctttacactgtttctggttttaaccaaagggaaagcacctggaagcaagaggcaaaaagaatatttgagaagctgttatgtgttctaaggacatttttttaagcacaatctttgacctgttctggagaagaattcactccaaaaataaattataacaggtttcagaattatcactgaagctagttagttgctcattcactgggccctacctaccctgcgccctgagcacttatggctcaggaagtattcctccttgttcctttgcattctgtggacttgtgtgggtcttcatttatccctgaagtttactcgacatgtttaccactccccctgtaacctctttcccactaccgtacttctgtgtgaagccattttctgtaagtcttttaaatcttggttggactaaaggctgaaacaaaaatctccccgtaat

SEQ ID NO: 3981 - DNA, 543 bp, Canis familiaris
  misc_feature (1)..(543): n = a or c or g or t
ccatctccaagtatggtgacattctgaggtgctcagggnnagagcttcaacatatggattccgggggacacagttcagcccttactggggggatacgnngtcttcatccccctcccccgcagcatggctttctggaaccctgctggcatctcccactgggtactcccaaaagggatgctcttggtcccctcccctactcaccttggctcaagagagatgggggggcctcccctctgctgaggggggcacctgcactgtgtcactgcacctgcagcgcccccgccggcagcctcctccctgggctcagcatttgctgccaagcaggacgggtctttctcatctcagattttcaccttcccgctgtcgatcagagctgttgagctggttgttagtattaaatcgaacgccggcgctcgcgactcaggaaaccctttgctgttgtgtctcagctctacagccgccaggctggcgggagtttccaaataaccgttgtgatggaagtggtttcccagcaggagcaagaaataattaaaacagtattac

SEQ ID NO: 3982 - DNA, 654 bp, Canis familiaris
  misc_feature (1)..(654): n = a or c or g or t
aattatgtnntaantgtatgcaaactatttttttttgataaaactgataaactctttcccatgagtgattgttagattttacaaaaactgtgtnnaacctgttttcaaagcagtngtctagattctagaagtgtgactgttnnagnctcaggtgagattaattgagccttggaaaaaactgctaaactctcttccaaagcaaccgtatttatatccgcagcatgaaggagcgttcctgtcatatatcaccctccagcaactagtatcctcctttttgggactttagcctttctaggggcgcctgggtggctcagctggttaagcgtctgcttcggctcaggtcattatccctgggtcctgggatcgagccttgcatcaggatccctgctttggggggagcctgcttctctctccctctgcctacctctacccctacttccttgctcactctgtcaaatgagtaaaatttttttaaaaaagtaaaatttctaaaaggtgtgtagcaccatctcactgttattcacattggcaacttcctaatgctagaggatgtagaacatacttttgtaggcttgcttattttctgtgtgccatctttgtccaggtgtctgctcagatagtcacccatcgttaattaagttatctgtgttctta

SEQ ID NO: 3983 - DNA, 589 bp, Canis familiaris
  misc_feature (1)..(589): n = a or c or g or t
ctanagatcggtgatgcatcatanctcattgttatgtggcanangaaaattaaagattttcaaaattnnaanactcttgttttaatattttnccacagtcttgctttgtgttcatttctcttgacaataggtgtggatttaaggggtcaggaacaggagttcagtaaaaggtaataagccacgtgtccgaggcatgggatgtgctgactttcagaatcagatgccaggattgtaaatacaggtgtggggctgctgggggcccagggaagaggagtcccaacagaccaacaannnnnnntgtgttatgggacatgtgcaagatgctctcagtaggctgtggcacttgggttgggggggaggatctggagatcattaaaagtaatggaactgagactnnnaggtctccttccnnncaannnnnntatgtaaaagaactgtttcaaaacacagcaaagatatgctaagaatagggaatcataggnagttctcaccatttttttaagtacccnnnnnnnattnnntanngccggttggttcagaaagaaatgattttgtagntgagcatgtatcattctgagannngctaatt

SEQ ID NO: 3984 - DNA, 688 bp, Canis familiaris
  misc_feature (1)..(688): n = a or c or g or t
tnntactacggtgttgtacggctgtnnnaccggcgncagagngcctgcctacacgnnntcccattgacctcgaccccgctcagcagtcctgtgtactgcnnncgcttcaccaccaagcannnctatgctgcgctgtcntacaacctccatgtcctggactttcaaaacccgtgaccgggccaccccagcctgtgtgccagggaagccagatactcagggacctctcctgcctggagggtgaagtgatacctcctcccttgcccctgcggtgcctgtgctcctagacctgggaccgcaatgcttgggcaccataaggtaaaagctgctgcctccccggaatttggggttacctcccaggaactagttggagagaagggatctgctgctttgagagaatggctaaacccagccaggccttgcttccctgttgaccagagcaagggtcaggcctgcacaagtctgctctgcacctcgccccttctcagagccgtgccagcttagagtggggagaggggtgaggctgccaatttcctgctctggcctccaactcctcagtcagccctcatccttgaccaggctcttggggctcattcctggggcactgtgagccaggtctcactttgaaactaaggacaaagagaacctggcaattttgaatactgagccagcccaatctcaggccggctgc

SEQ ID NO: 3985 - DNA, 198 bp, Canis familiaris
  misc_feature (1)..(198): n = a or c or g or t
agaaagagagaaatcaaggatttttaccagattcctactgatgagaaagtcattccagtnnccagacagcagctctaatgtaatggaaacagactgtaatcccatnnagctgagtagcatgtcagggtttgaagaagatgcagagcttaatggttttgaagaagctgatatgaaagacatgaagctagaagctgaagc

SEQ ID NO: 3986 - DNA, 641 bp, Canis familiaris
gtaaatttcaatgattaatgtgttttccattgtcacttctgaggatctttcgcatgagggaaaggacatctattggaatagaaaggaagagttacaccttgtaggtgtgtttgggacctgttggccagcaggaatgtcactccctggaaatacaggtttagcatgttttgcacttattttgtagctttaatgacttgttttccaatagggctaatgtctctaagcttggtgagtagagctgcttcatatttcatttcacagttctagttcaaaccaatttttacaacctcccagatgggtcaccttgacctaaattgttatattttgagatgttttcatacgagaatgtaccaaaaacgtgcacaaaatgaaggtaatttacagcaagaaacaaatacacagcttatttcatttcttgcctttatgtaagcagatgagcagacggctgtttaactcattactttggttgatgtgtcatatatattttgactaaaaattataggaagttgttcctctgagggagtcttttaggggtggaagcagggggatagcaatattgcctcagattcaaactggcatcaccataaaccctgaataccagggtgggatggagtcagccttttatagttgaaatacaattt

SEQ ID NO: 3987 - DNA, 720 bp, Canis familiaris
  misc_feature (1)..(720): n = a or c or g or t
gaaaggaaagaagaaagatcccaatgctnntaaaaggnntccgtctgctttcttcctgttttgctctgaacatcgcccaaagatcaaaagtgaacaccctggtttatccatcggggacactgcaaaaaagctgggtgaaatgtggtctgaacagtcagccaaagataaacaaccatatgaacagaaagcagctaagctaaaggagaaatatgaaaaggatattgctgcatatcgcgccaagggcaaaagtgaagcgggaaagaagggccctggcaggccaacgggttcaaagaagaagaatgaaccagaggatgaggaggaagaggaagaggaggaagaagatgaagatgatgaggaagaggaggaagatgaggaataaatggctatcttgtaatatgtgtggagtgtgcgtgtgtgctcaggcaattgttttgctaagaatgtgaattcaagtgcagctcaatattagcttcagtataaaaactgtacagatttttgtatagctgataagattctttgtagagaaaatacttttttaaaaatgcaggttgtagctttttgaggggctactacatacagttagattttaaagcttctgatgttgaatgtttctaaatatttaatggttttcttaatttcttgacttgtgtattgtagcacagcagacttgtaggaattagtatcaatagtaaattttgggttttttagaatgttgcattt

SEQ ID NO: 3988 - DNA, 412 bp, Canis familiaris
  misc_feature (1)..(412): n = a or c or g or t
ttgtgaaagaaannaatgnctcctgtaggtgcttnnnatgtccannatgnnnnnttgcctccaagggcaccactcccaagtgtgggaatattnnntcattttcattnngttggttacgttcattccctannnnnatatcctctgccggggtccagtgttgcataaatatttnnncttgatgctatnnntgctgggagcccacantgcaaaatgcaaaacatcatcccagttctgtgcanncgcagggcacatgcnctcnggcngnnngagnntgaatccaagnncgaangattnctggttttgttttttgnatgagtagcacatggccttctttcaaatttggnnnnaatgctctttgaacagnnaaatgcaatcaggtgtttttnnnnttnnnntttnngttttttnnnnn

SEQ ID NO: 3989 - DNA, 443 bp, Canis familiaris
ggacacactcccaggctgtggaaacctctggctcactcctgccagaggagtgaggagtttccatttttgtaggggagacaggttggcagtagttggaattaggaaaaagctaccatggggagtgggcagggtgccgaggcctgaggcaaaggggaaggggcagcccagccctattggcctggattggcagagtcatgtggtttgctgggtccagtcatctgcagattgaacccagctgcttctgaggagcttttgtttcacagtggacagtctggttgacccatggccctccaggcagggaattgtttctcccctggccagcagcgccctgtgtagtgggcttggctaaggaaagcacaggcgacccactggctgcctcagtttacccttggagtggtatgctccctgttgctcagctgcaccgtcttgcccacgtgggggac

SEQ ID NO: 3990 - DNA, 641 bp, Canis familiaris
  misc_feature (1)..(641): n = a or c or g or t
acggttgtgttttctgatcattggtttcatttaatatggttgtattacagtatacttggttgatttaggtttcacattcactgaattcactaaaattattcctataattttagaatatcattgtttgngaaatatacatttatctctatgtttttgatatttgaaaatgaacaaaaaaaccctttgcttgtttatttctgaaaaagaattgtatttagtgattattttagatagtgatattatagcattcatctgtgtgtaaattatttcatatagggaagagttctgatctgtacctatggtccgcattgaaaacaaaactggatgtgtatttctgtgatgttatgaatacatttctactttattttgaaacatttgccaaactaaatactgtaacactgtataacattaaaaatgtttaaggactgcttagcattagaagcaggctatgtccagaaattctaaaacggcagcacatgttgttgcttgtataaagcctggtgatgatttttagactaacttccctggtgccctactggcaatagcactaccattgtaccctgctgtataataaataatcttagacatttatcaactgttgatacaaatgttagtccctaaccactttttatatgttttaa

SEQ ID NO: 3991 - DNA, 664 bp, Canis familiaris
  misc_feature (1)..(664): n = a or c or g or t
tcttcccannnctgcctcccttcatctgtcatatgctctgatatnctgacattnntctcgtcatttctgtntnnnnntnnnnnnngccccagaaagagcccatcagtgttacttcctgggttnctgagaancggnnctgttctacatnnnctttnntagcttcnnngaactgttcagaaaanctgaagctcaaaaatgaattctgccacattgatattttggggtagtaaattagggacactgatatagccgcagggccgcataacaggttacacgtggtagcacttcagatttgattaaagttacttcccatgtaagttgacaccacatgacaagtgtgctggtgggttgggtctgtgcactttgaccctgaaatactttgctcttggctttgtatcatgtcctaagagctgctgttctgttggcttacacctgcaatagagaggaaatcgccatttcatttggcaggttgttcagagaaagggctagaatgatagcacataccttctaggagtcagaagatacccaccctggaatgctattgtccttatgtttatcccaaaccaatcctgagcctctccattcattggctttgtttgaacctctatttcccttgaaggtttaaataagttcaaccatattctgtcaactgttccagttttca

SEQ ID NO: 3992 - DNA, 614 bp, Canis familiaris
  misc_feature (1)..(614): n = a or c or g or t
caaaactgcatcntnngtaaggcacactgtggctctngaagnnaagactgagactgttggagaaatgactggaagggagactgtgacccttggagaaatgactatgatttccatgcaattattgacctctgtaaagaaggataagccctttgtaaagagggcagtagccccagaaatgatgactatcccctctggaaagatgaaagtcactcctgatgggcagaccaagattcttagaggagagaatttgacttctgaagtgaacactgaccccctgttgggttatgttgatctttagatggaagccaaaagcaagaggccatcctccggccctgtcatctagccccaggacacattcctcctgttttgacaaccctgtgttcccattaaaggaaatgattcctctgtcaactcaatgacccttccaacaagtgctctctagagaaagaaaaacccaggaaactctgctgtgggtcaaggagccttaaccttgttaaaggcagaagctggggaaaacccttgtcttttcttgtaggtcccccaacaggagctgcttttactcagacatgcataaaccattcatgagtatgagcaggccccaaagctagtgagtt

SEQ ID NO: 3993 - DNA, 559 bp, Canis familiaris
  misc_feature (1)..(559): n = a or c or g or t
aaggacactgccagtcaggcnnatgtgaacttggtgaacgccaagctgctggtgcaagaggncgggctcagtgtaaccacctcccacaaccccgctgtgcccggggagcagggctgtggggaatgcctgctgaccgtggccctggcaggtgccccctaccaggcggcgggctgggtgcagggctcgacacctgtgctgcacgcgctcaacggagctgtcttcagaccggaagtgcctctgcgcaggggcctgcccctgctcctgtcccgggctcagccgtctcctcctgagatgctgcccaccatgattggcctcctggcagaggcaggcgtgcagctgctgtcctaccagacctcggtggtgtcagatggggagacctggcacgtcatgggcatctcctccctgctgcccagcctggaagcgtggaagcaacatgtgaccgaggctttccagttcctcttctaagctctggggggcctttcggaagaaacctggccactgggatccagagagaggaggtccacattcctcagctgacactgcttactctgcagaccct

SEQ ID NO: 3994 - DNA, 274 bp, Canis familiaris
gggggggggggtcctttgcaaggttccaggtcacaggccccagagtatgagccaggctgggagggtgtgaggtctctgcagtacttcactgaccccactaggtgtcacatgtgccgcatcctggctcaatttgagtcagttgctattgtagatttatttttatattagttaataaactaattttccttagtaaaattgtcaccgatggaaaatcttgtcacttcttaggttccctttctgtagctcagccaaatatcattgtgtgtcctgtcct

SEQ ID NO: 3995 - DNA, 505 bp, Canis familiaris
  misc_feature (1)..(505): n = a or c or g or t
taannataagagctgctactactaattatntcaatttagtgagctnntacntcccccccaggtgctnngcagatattattttcaacccatacaatgancttgcagttacgtattttgatcctcattttacagatgtggacactgagggtcagaggcgggaagtaacttgcccaagataatacaaccattatgatagccaaatcagggtttaaacccagagctgtctgggttcaaaacccccccttttttttttccagtgccttatgttaaatttagaaacctaagctatgctatgcaaatattagctagttataggatgggtttcagaggaggctgcaaactcagatgcccagaggggtctggcaaggtgcataaatgaaaatgctgtgcaggggatccctgggtggctcagtggtttagcgcctgccttccacccagggcatgatcctgaggtcccgggattgagtcccgcattgggctnnnngcatggagcctgcttccctct

SEQ ID NO: 3996 - DNA, 667 bp, Canis familiaris
  misc_feature (1)..(667): n = a or c or g or t
tctganntctgatcttttntgtaccaaatccaaaaatgaagaaatcaagcttgaannnnaaaaacttgaaaaaaatttgactgcaacgttagtgttagaaaaatgtctacgagaggatctaaagaaggcagagctgcatctctctacagaaagggccaaagttgacaatcgtcttcagaacatggacttcctaaaagcaaagtcggaggagttcagatttggaatcagaactgcagaggagcagctttcagccagaggcatggatgcttctctgtctcatcagtccctagtagcactttcagagaaattggcagaactaaaacagcagactatacctttgaagaaaaaattggagtcatatttagatttaatgccgaacccatcccttgctcaggtgaaaattgaagaagcaaagcgggaattagacatcattgaagctgaacttacaaagaaggtagacatgatggaactgtgaccagagtcaagtatgcttcatcttccctaaacagagtaaattgaagaggacttgaaagaattgttttctcttggcattccttaataacttaactcctgtgttcttagataataatgtcactgttgatggaacagtagtttccagttgtatattgcatttctatgcccaaatacatagttttcattnnnaann

SEQ ID NO: 3997 - DNA, 619 bp, Canis familiaris
aagttaattatctccaatattgtccagtatagccctcactgcaagctgattgttgtttccaacccggtggatgtattaacttacgtggcctggaagttgagtgaatttccccagaaccgtattattggaagtggttgtaatctggacactgcccgctttcgtttcttgattgggcagaagcttggtatccactctgacagttgtcacggatgggtccttggagagcatggagacaccagtgttcctgtgtggagtggagtgaacatcgctggggtccctctgaaggatctgaactcagatataggaactgaaaaagatcctgagcagtggaaaaatgtccacaaagatgtgattgctagtgcctatgagattatcaaaatgaaaggttatacttcttgggccattggcctatctgtagctgatttaacagaaagtattttgaagaatcttagaagagtgcatccagtttctaccataattaagggtctctatgaaataaacgaagaagtattcctcagtgttccatgtgtcttgggagagaatggtattgccgacctcataaagataaagctgacccctgaagaacaggctcgtctgaagaagagtgcaaaaacacttt

SEQ ID NO: 3998 - DNA, 704 bp, Canis familiaris
  misc_feature (1)..(704): n = a or c or g or t
gntacaacgtgtatatatacntcagtagagnctcaatatgtatcttcactgtanngtnnaaggaagttttgttttttgttttttgtttgtttttgattctgggccgctgagtttgatggtaaatattggctaaaggaacctgaatntcctgatttaaaaaaaatgcagatttggtcaggggtggagtcagacatctgacctgcaagtaaaacctctgaggaaaggatttttttctttagaaatggcatccaaggggtagaatttgaatgtgacattattaaataaaaagcagagccaaggtttaactaggaaaggggtgtgtgtgtgtctgtctttttctcatcattnnnnnnncacccccaccctcgcccataactataactgttgctgcgggctttaattttggaaagcaacttgctacttcaaccccgtgnnnnnnaagtattataaattttagttattttgcaaaatccgtctactgtattattgctaaatattttgttacttgtactaagggacaattttaagaccatggttttgcttgtttttttatgtttttttttacatgtatcatatggttctgcagagggtaatattggtgatttgccaaagagaagcaatacagtatatctgcttttgccttctgttttttgtcttacctgcagatattaagaatgtatgcattatgtaaaatgcttgattat

SEQ ID NO: 3999 - DNA, 584 bp, Canis familiaris
  misc_feature (1)..(584): n = a or c or g or t
tgcccccagccctgtgcgctcctnntcnggctgctgtcccctcggcctctccaaggcccatgtccttcctcagtagcacgggggagaactcagggtcttgttagagnntcttgtgtgtgtgccagaaaatacttcttgtttctgtgggggaatgtggagggcaaggaaaccctgtaaacacacacagaattctctggtcacggttttgggttcagaccctgccaccactggcctgtgggacatgccacagggaagctcctggatccaagggcactggctgcgtctcagagggaaggtcggcctgcaggccgttgtgaatcccctgccatcgcctgggcctcatacctcatggcattctccctttaagccatgggggtctgctcagcactgtgggtgtgcctgggttgcaggggcacctgggtggatcctgtacctggcactgtgcccactcagtgggcacttgggcctgctcttgggtcagggtggtgtcctggggacctggcgtcctcagagccactccagagagcgaaggctccctgagggcatcggccctctggcgaggagaggtttccccttttctatgt

SEQ ID NO: 4000 - DNA, 578 bp, Canis familiaris
  misc_feature (1)..(578): n = a or c or g or t
ctggtgggcttnttcngggtccaccggcccccacaggacctgagcancagtcgcatcctcaatgggcaggtctttggttcccgttcctacttctttgaccgggctgggcattgtgaggacgagggctgctcctgggagcatggtcacagcgaaagcaccagcatgtcaggcagcctaggctctggcagctggtacggagccatcgggcgggagccaggctggtgcgggggcagccagacacggaccactccgctgctcttctcccaggtgctgggaccaggtggccaccaccacagtctctactccaccccacagacgtgatccccctcccttctcccctagaacacccagatcccagtcctcccaacccaggccccgtgccaagttcacctgccgcttcttgcccaggatcacgggagactgtggccacctcttcccctggccggctccttgctcctcctgtcgtagtgagcttgtgctatccccacaagggaacatggctctggctgccagatgcccacagcaccttggcatgacctgccgcctctgcttctacactggagccagctacctctcct

SEQ ID NO: 4001 - DNA, 575 bp, Canis familiaris
cagttccagcttggcgtgtcccatgtttttgaatatatccgttctgagacgtacaagtacctgtacggcagacacatgcaagaaaacccagaaccgccaaagaaaaataatgacaaatcgaaaaagatcagccggaaaccactgacagccaagaacaaataacgggttggcctgggctggacttctggttgcctttctcattatcactcgcgctccccgccaccgtgtcccacaagtaaatgccatgtgtgtgctgctttctctcctcctagcacttaccactttaccttccaaatgcttttggtaggtggtagacttttatgaattcttaaagctgtttccatttgtttgcttaaaaatgccacaggcaggaaacaaagctctaattcaactgcaaattccatagtaggcacgggagttccgttccctgaatagatgttcacaaagttgcatattatcaaaagaataattaaaatcatgtgatcacttaaatgtcacagttaacactgttcattcttgtgttcattcacatgacttgttattttactttgttctaagctttctataaacattgg

SEQ ID NO: 4002 - DNA, 601 bp, Canis familiaris
  misc_feature (1)..(601): n = a or c or g or t
tacatgaagatccaagaagtacatagntcttttctacatnnannncttttctacatnnagagtcccagagagaggctcaggaccnntcaagtatttttcaggnntccagcaaaggcagtttataaacagtatactgttgcatatgcaactgagttggccctccttgaccatcccaagcctgtggcaagattgatcgtggggatttgtaccggcttcatcccctcttgcaatagcctggttcatgtgagcttcacagctacaagagaaaaccctctaccaaaacatgaaaggtgaaatgggttgggtaagcattaatgaacaaggcacagaaaagcagtgctatgtgagtgaccagaagagccctcgcagcacagcctggccatgggctcttcccctggttgacactagagaggtatgtcatgcactgatcaagtgtagaataatctcaagaatcagacaaatgtgggttccaacccccaagagtaccctagatgagttactgaagcatctgcaatccctagattacaaggagtttgtaaggatgacatgagtggacacagttaataagcacccagtctgacctgtactaactttcaaggtc

SEQ ID NO: 4003 - DNA, 557 bp, Canis familiaris
  misc_feature (1)..(557): n = a or c or g or t
cctccgtcctcgctcagttgtgatccagcagcccccctccccactgcctccccagctctcagtgaccccgactgtctcctgacnnnnncgagttcaatctcatccctcccagcagctccccttccaccccccggggaactgaagattgtcctggccgcgacctgagacctccatgagtggagggaagagtgatctatgtctcttcccccaagcagctcggaccagtcccagctccccaatcccccctttcccctgggggagctggggaattcctgccaagcaccttgaaggggaggggcctcaagtgggcagggccagggtccagcgggggtgggggggttcctgctctgcccctgcccgtccccaccccatcttgccctcccatcctctcatctatcccccgctggagacggaagatcttttattttctattatttataacctcagacttgggcccctgtttctttcttccccattaacttgaagtgacctgtgtgagagacagacagatgccccacaaggatggttggacaaggacttttactttttattacata

SEQ ID NO: 4004 - DNA, 596 bp, Canis familiaris
  misc_feature (1)..(596): n = a or c or g or t
tacttcnntgcagctcctctctgccgnntggagcgttatctatccacggggagataccggggaaccntgttcgctgaccagccgatgatgttcatcaccccagccagcagtccccccaggaccaagctgtgggaactggtcctcctgtgtgggggtcagatcacgcggatcccacgccaggccagcctcttcatcggaccctaccaaggaaagaggaaggcgacaatctggtatctgtcagaaacctggatcttagattcaatcattcagcacaaggtctgtgcctttgacaactacctactgctgcagtgatggagacaccgacacagggctactgccaacagctcgaaaagttgtctctggacattcgaatgagcaaagatgcaagagaagggatggacatagaaacgatgcctttttatatcatcatatgtgtgcatcgtggttcttatatgaagaagctcctttgtgtgatttcctaacaactggatttgtttttatgtgtttttttaaagaagcactgaccagccctgtttgggccttttctatgtaataccaatcttagtgttctggtgatgatcataatgattaaaaca

SEQ ID NO: 4005 - DNA, 611 bp, Canis familiaris
  misc_feature (1)..(611): n = a or c or g or t
gacactncntctgaagctggaannnaaactcannnggcacctgagctgtgacctgatgccaaatgagaacatccccgagttggcagctgagctggtgcagctgggcttcattagcgaggctgaccagagccgactgacttcnnngctagaggagaccctgaacaagttcaattttgccaggaacagcaccctcaactcagccgctgtcaccgtctcctcttagagctcacccgggccaggcccctaatcagagctgcagccgtcactagacgcgcccgcagccttcctgcctctcccccccagtcagtattaccctgtgaagccccttctctcctttattattcaggagggctttggggctccctggttctgggcatcaccctccccttccccttctcttcctcccctctgcactttgtttacttgttttgcacagacgtgggcctgggccttctcagcagccgccttctagttgggggctagtagctgatctgccggctcccgcccagcctgtgtggaaaggaggcccacgggcactgggggagctgaattctacaatcccgctggggcggacggggcgggagagaagggtgnnnnntgcagtggtggcc

SEQ ID NO: 4006 - DNA, 475 bp, Canis familiaris
  misc_feature (1)..(475): n = a or c or g or t
gananngctcctcccntcaccaatcccctgnnnccacaggatggcnntcatgcccccatcccttctgttgcacattctgttccatatcctggaggtaatccctgatgtttttagcccctcatagggaaaggccggagggcatggtcttctaattcaccgaggtttctaatgaggttagtagggtctgatgctctgaagtgagtgaatttcattaaaggtgggagtaaaacattgtaatgtaaaccctgaccgttggtgttcttttctgcaaattaggtgcctgacttagctctgatggctaaagtatccacttcagagattgccggccacaggacaggacagagagccaagtggggagggggcctgtgttttaaagattttagttgatttcagtaactgatcggttgggtcatttgttttgttgttgttgttgttgttttcctcttcctacactttaaatttccactctgatgtt

SEQ ID NO: 4007 - DNA, 516 bp, Canis familiaris
  misc_feature (1)..(516): n = a or c or g or t
ccccacccccaccnnggtgcttgcttctccagggccctttacccctattgccctgctcttcagggcagtggttcaggggccgctggagcactcagcaagcccctccttgtcttcccctctccctgaactcacccactggctctctaagattaggcagtgataccccccacctcctgccccgaaaatgggcaggggctgaactgggggtggggttgcaggtgtgccagctcctgagtttccttctagggctgcctttgggccaagctcttgccagctttccctggcccaaacccaggcgtgccctcctccactacccccaccctctnnnnnggnccacatcccctttgggaagggggagctcccgagaagcacaattcaggggcttgaccctcatacctgggctgatggcctgggcagaagccaggagaggaaccactagaatcacagaaatcgttttcctaggagaggcccagtgctggcctcccttgcagggtccagaccaccaccttcttggnn

SEQ ID NO: 4008 - DNA, 299 bp, Canis familiaris
  misc_feature (1)..(299): n = a or c or g or t
ggcctcatctccctcagnnnnctttccttcccccactcctttnnnnnaggcccctttcagtcacttggactcaggnnnnggatactcttgnctccatctcccatccctgtcaccagaagcannnnnnnnnccatacctagagccagcaggttcttttgagtgngagnnnggtgtgggcacctccaagggatccctaccctgccgcttcaccagtcctggggaggctgggactcccccacccccaccccaagcctgggccnnnncttacattccactactgggagaagaaagaggctggg

SEQ ID NO: 4009 - DNA, 651 bp, Canis familiaris
  misc_feature (1)..(651): n = a or c or g or t
ctggcgtncaatgaagnnttanaaagcannnagaaagtgnnagtgnnnnnnnnaagaagtacatngaagagaatgaccagctgaagaagnnngctgctgctggcggggtcaagttagatggtaaggatgccgaggagaaggtagaagaggagaacaggagnctgaaggctgatctgaagaagctgaaggacgagctagacatcaacaagcaaaaactagagaaagctgaacgcgaggccgtggccatgcggaagcagtctgagggccttaccaaggagtatgaccgtctgttggaggagcacgcaaagttacaggcagcggtggatggccccacggacaagaaggaggagtgaggctgctcctccccacctgccacctgggctgtgcccgctgctgcctgcagcccggcctccccggtacctcagttcgccccctctgcttcctgtccccttgcacagcttgcagttccacgctctcccggcataccccaggggacccagtttctgcctgcgcaggatgaatttgctgccatcccagccggccaggcatgaggcaggcattgcttcccactgggttgtgcctcttttgtgttgcgtgttgtttggggttccagggccccttgtctctggtcnnnnaggagggtagacggtg

SEQ ID NO: 4010 - DNA, 550 bp, Canis familiaris
  misc_feature (1)..(550): n = a or c or g or t
cccagctatgcctgttnntcntggctcagagttcttccagttacatatttatatcacccgaagtcctcgtccttacctgtgggatccaaggnctcccaggagacctgagggctcccggcaagctcccgacccttcccctctcctgtcctcctccctcatgccctccagaggagctgagggagagaggtctgtgctttctcatctttaatgggagatgtaaaaggaaacaggtatggcctcttctcacccttctcataagataaaggattgccaacacttgaagactggtcacttagagccaacaatctcctccgtcttctggcatcagagaccaatcctacacagtcccagggccctgggtccctgagagaggaaagaaaatgcagggagcacagagaaggggcatgtcccagacagtaccctcatcctcctgccttccaaagcccagatgtccagctctctgcccttcccactccttactgggatcttgacattttctaggcctctgtgccatgcacagttgcagagatgagtcaaatccataccacca

SEQ ID NO: 4011 - DNA, 671 bp, Canis familiaris
  misc_feature (1)..(671): n = a or c or g or t
cngcggcaacaccatggtgcacgtgtgctggcaccgcaacaccagcgtctccatggtngacttcagcgtcgccgtggagaatcagctgtctgggaatctgctgcggaaattcaagaacagcaacgggtggcagaagctgtgggtggtgttcacgaacttctgtctcttcttctacaagtctcaccaggacaatcaccccctggccagcctgcctctgctcggctactcgctcaccatcccctcggagtccgaggacatccacaaagactacgtattcaagctgcatttcaagtcccacgtgtactacttcagggctgaaagcgaatacacgtttgaaaggtggatggaggtgatccgcagcgcgaccagctcggcctcccgcacccacattctgagtcacaaagagtctcatgtatattgacggcgggacacgtttgttgattggctcagcggtggctgctttcctgggagatgcttcctctcctgtgtattaatgaagcctagtaaaattaacacctgtctggaaaacagaaacatggttttacagccactctcctctgtctccacaaaaccgtttttaaccttgtcttttcgagctgttaatgtgtcatctgaacggaacagcgctcccacctctgatgctggtggctcttcgtctgtcattctcccgg

SEQ ID NO: 4012 - DNA, 484 bp, Canis familiaris
  misc_feature (1)..(484): n = a or c or g or t
agagctgccccggcaatgtccccggcnnaatgcacagaccnnnnnggcatccactncctagggacctttcggccgctggcggctgaagttgggtggaggcgggggagatggaggttttcgacccagacgntctcctcgaggagcctgatgtttaggctttctaacgcaagtgcatttcctttcctttctcactcgaggtacacacagaggtctggaacagccttttgtatcttaacaaagttagagtagctgaagttgttggaggagaggctgcccacatgctcgagaacccaagctgatccgtggactccggggatcggccgcgagccctggcgctccggatggaccctgggaggcagggctgggtgtgcagagtggagccggagccctgcaagccgggcgggagcctgaggggaggcgcaagtgagaaactgaagcctcctgccaacagccatgtgtgcgagattgaaagtgaattctccag

SEQ ID NO: 4013 - DNA, 502 bp, Canis familiaris
  misc_feature (1)..(502): n = a or c or g or t
tttgggttctttaaagaacatgagacccaatttgccattttctctccgttttttagaaaccgatgagtcatggtcagctcacacctctctttcagtcactcgtggtaggccagccttgaagctgttgtgcaatctaggaagttgcatagctgagtgaagtgcttctttaaggaaggagtgagttaaaggcaggtagctggggcgttacctaaatgattatgttgcttcctttgtctgtatgtggattttatagccctttcaatcaaatgagaaaaaagatttgtatattatcaatgtttttagtttaaataaacagtcaccattactactattgaatttcctcccccagtgtacatcattctataacggccgtgtctattatagtgtgttaccgtagctgcatgtgtcataaagtgttctatatctggctaggataacccggaggcagcacttttttaaatagtaaaataaatcaaatgactataaactctnnnnnnnaacc

SEQ ID NO: 4014 - DNA, 556 bp, Canis familiaris
  misc_feature (1)..(556): n = a or c or g or t
aacacagtagctgccctcccggggcagcggggctgctctcttgattgccaggctcgtgtgtccctctggcatcacgtttgcttaaactgctttgctggcaacagcaccgagagctaagagttctaagcagctaacctcggcggcgagagagaaaggtccatttcacagaagcacaactccccaccgacccctcggagaagcccccgtagcagcgtctccgcgctcagtgaatagtgatttagttctgcttaagtgagtactatgaaaacttcgaataaccacctgataggtaaaccttgcatgacaaacctgcaacacaacatctcagctgttctggaaagtgatgttaagcagttgtcgcccgtggggggggaccccgtgagctccccgcacagaaggcaggcgtcggggagcccttcccggggcatctgcagcccctgctcgcaggccacgctggtgtcaggacaggaggtctccgtccggagtgacttagggccctggatcattcaagtacacgtttttagttgcattaannnactattcgttttcgtggcct

SEQ ID NO: 4015 - DNA, 509 bp, Canis familiaris
  misc_feature (1)..(509): n = a or c or g or t
aaaagtatnnaggacganntcgtgaatttcacagactacagttaccagatgcgtttgcccctggtnnnnaggtcgacagcttcaaagttgattaaagataacattaggttgtcagaattaataagcaatcccaacatgctcagcaacgagcttaaagtagagttcctcctacttttacagatgttgcaaagaaaattaagcagaaagttgaatccaaaatggtttgaggtcaaaccaacagtgggagaaattactcttgatcatcttcccaaacaagtctccaggtgcaaatataattccccgatttcaagggaaagagttgctcctcctgttttaagaaacacaggtactggcggcaatccacttaaagaaatttctgtgaagcaagctggaaaatgttcttttgaatctatgaaatctatcagaaacaaggaaaagtaaccttggaaagcacccgtctaatggctttgaagaagtgatgccatcatctcccgctgtactaaagggat

SEQ ID NO: 4016 - DNA, 654 bp, Canis familiaris
  misc_feature (1)..(654): n = a or c or g or t
aaaaatcagcaaatgatctctatagatattgttttatnnnggtcctcttnnnnnnnnatcgggaatgtgtnnaanacaagcagagaacttnnnnaaggaatgatacaaaggaagaatccctgttttactttaaaatgacttgtaaagcttgtgtttctttgttgctgcaagctatttgcccaagttaatgcaaatggacacattttatatgtcaggaaaaaaaaccccacaaaaacaaagaaaaaaatgcttgagctttttctaacctctttcctgcagtctgttgtgtgagcagcctgtttttttctctaatattgtgtcagtttattctctttaatgggctgtaaaaaaaatgtaatcacaagagtgccaaatatcttgaaatgccaaaaggcattttggtttcttttctttttccctgtgctctgagtccacgtaaaggaatgcttggagtgtcttttctgttatttataggggttctcttaaggcacaccagctgcctgttttgcatggtatttgcaaaaacgcctcttgcgtgaggaaatcttttaccatttttttgtttgcaactttggacctcaagaggtttcttccctaccctgttccctcttttcttaattcgatattctggatgttgcacctttaaccagcaca

SEQ ID NO: 4017 - DNA, 586 bp, Canis familiaris
  misc_feature (1)..(586): n = a or c or g or t
gatactgaattattctattttcctactttcatcaaaatactnnattnnaatgataaatttaaggnnnaaatnaaatataaaagtttaaatacagtntgatttcatattttgannnaatcnagactgtnctgaggcatgtatatctgaaccagtaantcttaaagatttttaatcccttaaaggaataatttccaaaaaaagctctaaaattctagaatggctgcccattatgctgctttgaaggatgggggcagtgggaccaggagagttttggggagtgccaggcagaggaaatggagcactttaagggcccctcttagtaacgtaaattaagagatccatgttgagtacttctggtctaaacataaataataaaacaagatagccctgagtgcagttgtacctaacaataatgtttcatatgatacatcttctgaatttcaggcagttttaacatttccaccaaacttaattatttttatattttctgcagtctcttaaaataatctatattttgaactgatacttattttttatacatgaatttttaaaatatgataaagctaaannnnnggttggacaaagt

SEQ ID NO: 4018 - DNA, 602 bp, Canis familiaris
  misc_feature (1)..(602): n = a or c or g or t
atcctgtataaacgtctcaaggtgcctcctgccattaaccagttcacccaggnnttngaccgccaaacagctacacaactgcttaagctggcccacaagtacagaccagagaccaagcaagagaagaagcagaggctgttggcccgggccgagaagaaagctgccggcaaaggggatgtccccactaagaggccgcctgtccttcgagctggggttaacactgtcaccaccttggtggaaaacaagaaggctcagctggtagtgatagctcacgacgtggatcccattgagctggttgtcttcctgcctgccctgtgtcgtaagatgggggttccttactgcattatcaaggggaaggccaggctggggcgtctggtccacaggaagacctgcaccactgtcgccttcacacaggttaactcggaagacaagggagctctggctaagctggtagaagccatccggaccaattacaatgacagatacgatgagatccgccgccactggggaggcaatgtcctgggtccgaagtcagtggctcgcatcgccaagctggaaaaagcaaaggctaaagaactggccaccaagctgggctaagtgga

SEQ ID NO: 4019 - DNA, 624 bp, Canis familiaris
  misc_feature (1)..(624): n = a or c or g or t
caagcttggnnctgaggctgtcctcccacactgggcngaggcacagcctttgggacaccaggctggccctgatcctgcctgccaggctcggaggatggggattcctgtccagggagatgctcctcagtggggagctaggaggtgggacacgagggttggcaaatgtcagcttccaatggccaccatcaagaggtgaacccactgccatcggtcgcccggaggtccccacatctttttccaagagaggccacaagtggaagggagtttgttcaggaacactttaaagaaatcttttgtgcccaagggggcctctcccatcagagccggggagtatgttgcaaggattcagcactcaccatggggctgacttgggtgtgagggaggcacagagtaacccaggcacagagttagcttcaaatactagttaataaatctatttttctttattttctttttttgcacagaagctggtaatctaggaccttcgtgtgaacaactttatatgaatattttttgtacttggtttacttgggttggtatgatacattatatttaagttccttgaacactgtggattccccctaatgtgtatgaatgactgaggctttgtaaattaagggacgt

SEQ ID NO: 4020 - DNA, 369 bp, Canis familiaris
  misc_feature (1)..(369): n = a or c or g or t
ccttgctgaccnnntgcaccgctgaccacctgtgctggatgggccacgggcccacttgccactcactggggctgctgggcctgcccgcagaaagggggccagcgggcagtgggcggggctctgcaggctgcagggccccccagcgcttctcagggatgggactgaggcccaggaggccgcaaggctgtttacagggcggggcacatcctcgtcactggcctggctccngnnnnnnccccagcnnnntgcactggctctcccaggccccctgcacaccaggtgggccctgcttcctgcccctgccggcatgggggtcagacgccaggcagcactggcgcctctcccgggcgggctcttcccaggcctggg

SEQ ID NO: 4021 - DNA, 627 bp, Canis familiaris
  misc_feature (1)..(627): n = a or c or g or t
ccctctgcaagtctggnnagagtctgcnnnggcccttgtgaaagttcttgctctcagccacactgactaccgggtgcacccgtgttcttgnntgnagggnnnnngagctctggtcccccatgtaggacccatcaggctgataaattctacaaagacaaggatcaagtcttcaatcttgtctctggtgctaccttgtagaaattatttcacagcacacacattcagcatatgtttcttgatcagaaactgctgctggcccagtactttgaatgttaggtagccagagtccaaaaccaccatccactacggtccaaggaggttcagctagctattccttgagttacgtgcggcttgagtaaacactgtaaataaatccagcaagtgaacatattatgttctataatagagcacttttatgtttttaatatcatgtattctttctctgcaaatctggttatttaaaatggcagtagatgattttattttttcatactattgtacctccccgcaatactgtgtttctaaccggctctagttgaacaaagaacttctctagtcttcctatttaaattatgtatttgcttaatatattttcacatttgtaactgtggtcaagaatctacctag

SEQ ID NO: 4022 - DNA, 642 bp, Canis familiaris
  misc_feature (1)..(642): n = a or c or g or t
catgagctgnngcagaaggtggtnncagagaaccnnnagcactttggtgttgctgttccacataccaccaggcccagaaagagccatgagaaggaaggggtcgaatatcacttnntctctaagcaagcattcgaggccgacttacatcacaacaagttcctggagcatggtgaatataaggaaaatctctatggaaccagcctggatgccattcagtctgtgatggccaaaaacaaagtgtgtttggtggacgtggaaccggacgcactgcagcaactgaggacctcagagttcaagccctatgttatatttgtaaagcccgcaattcaggaaaagaagacgccacccatgtccccaacttgtgaggacacagcaacaccacttgatgaggagcagcaagagatggccgcctccgctgccttcatagaccagtactacgggcacctggtggactctgtgctggtgaagcaggacctccagagtgcacacagccagctcagagtgctcttggagaagctgagcaaggacactcactgggtacctgttagttgggtcaggtaactgcatcctagaacatctgggttggaggggacctggaagattacctagtccagcctcccccatactaccatcaaggaatct

SEQ ID NO: 4023 - DNA, 496 bp, Canis familiaris
  misc_feature (1)..(496): n = a or c or g or t
ccccagcnnntcagtgnnagctgccnnnnnnagcacttgccactgctnnnnggnntggggctccagagggtcaggtcagctccctgaggtacccatctcccctcaggcccctggacccttccagaaagggactccaccttcctgctcacctggtgaagtcccaggagttcacaccaggtggcgagcactcacccctgagagcccctctgcctgaatgctgcctccaagtcttggattgctgtcagcccctccgcccccattgtgagccccctggtcttcatttcccactggaacatcattgcgggatgctgctgttgcgatacgacaccttggttccaaccccagcgctgcctctgaagcccctgtgaccacaggcaagtccctttgctctcggacctctggtttctggtgtgtaaatgaggaggtgggctcaaacccccccacgtgcactgcagcactggtgccagagactggggtacctgagccggagcctgca

SEQ ID NO: 4024 - DNA, 660 bp, Canis familiaris
  misc_feature (1)..(660): n = a or c or g or t
cataatgcataagacatgtttttccctgtatatgtcaaaccttnnntaacatttgtgtttgtatntacatgnngtcattnngtgatgtttaaaccagaatttggttaaaagtttatatagatataatatatgtgaaatagtttggtgtttatcntatacatgtagagaagaattataaatgggttttcctgggctgaagggcccctcaccagagtccagtatgatgcactactactactatctgtttcctgacagatgtgtcgtctgtaacccctatattgtaaaccacattctagacaactgttgacttttatgttttgagaagtatgtatttctgtatgtgatttttgtcttgaaagtagtaaagccatagacgtgcaaaggaaatatcaaatgtataaatatcaaagtatgtaacgtaaaaatcagctgtgtatgtaaaaatgcttttgccagtctgggccttttcagggaattaatgccagaaatttcaaacaaagatttcagtgagcagatatacattggataaatagaaagggtatcaataaacatagttacggcacttcacccttcttggcatggcttgtgtttcctgtgtgggattgaaattcttgactacatattttccaaannnnnttaaaaataaactttttcnnnnnn

SEQ ID NO: 4025 - DNA, 545 bp, Canis familiaris
  misc_feature (1)..(545): n = a or c or g or t
ctgcactgcctgncctttggagcctttngnctgactctgcctcgnntgggccctgcgctggaccctgctgtggcctgggaacccctggnnaggcagccctgctgacctggccagacgtggaccggggctcctcagggggccaggggctgcctggcacccaggcctggctgttttcttgcctggtgggggggtggagaatgggagaggacccgctccccagtggagacggctggtaccccgaggcctgcatttggaggcctccttgctcccctgccactgactctgagtggtttgtggttctgggatggaagctcccaggtggtgcaagacacagagcccccagaacccctgcccagaggagcccatgaggaggagaaccccacccccaaccccaggcagtcctgggagcaccctccatgggggagtcctcagctcccacagggctggcctagaaagacatcacacagcactcagcacccaggggaccgcccaggcctccctcttctccccagacctccatgtgccacacccccccctctcatgcc

SEQ ID NO: 4026 - DNA, 33 bp, Canis familiaris
acagggtgcggcggcgtttgttccagaacgccg

SEQ ID NO: 4027 - DNA, 610 bp, Canis familiaris
  misc_feature (1)..(610): n = a or c or g or t
cccatcactcaaacagtcatccacactgtgcagaccacccccggacagncgttccntaatcctatcatcccacccacggcgtaccccaccccaacctatccgatgcctttcttcacctccatcccgggtgggttgtacccctccaagagcatcatcgtgtcaggcaccgtcctgcccggtgccaagaggttccacatcaacctgcgctctgggaatgacattgccttccacctgaacccccgcttcaatgagaacaccgtggtccgcaacacgcagatcaacaactcttgggggtctgaggagcgaagcctgccccgaaaaatgccttttgtccaaggccagagcttctcggtgtggatcatgtgtgagggccactgcttcaaggtagctgtggatggtgagcacctgtttgagtactaccaccgcctgaagaacctgctggccatcaacaacatggaagtggcgggcgacgtccaactgacccacgtgcagacataggtccaaccctacctgctccaggaaagataccccgattctccactggtctccaccaccaggacctttctcagcagggggcgcttctctttcccagtctttcaaagaaagacaa

SEQ ID NO: 4028 - DNA, 589 bp, Canis familiaris
  misc_feature (1)..(589): n = a or c or g or t
ttcntcgtacctggctctagacagctgcatacnaggtgtggcacctgtagaccaaaggtcntgtcagaagccnttaacacatacattttgtatcctaatctcctttaaaatactgagatttaaggctacgaggaatcttagtgatcatctggtgaatctttccaaggcccagagagggtgagtaactctcactggctccagcccacacacagcaagctgtgagtggcagaagcagggcttagtgtgaagcttcctcagccccccagggaggtggggggggggcgccttcagaaactggaggtattttcccctgaccctctctctagctcagtccttggggacgcctgtaacttctgtgtatgtcactccagggtatgtccgtgtacaggtgaacacgaagatacacacataccccaactcccatgccgcaaactctgtacctctaccctggcacttgctgctccaggcagcaactctgaccccgcttctgtgccctcgtttggccccagcctgaaccctctcagcagatgggtatcatggccaggacaggtgtgtggcctggtcccaccccgtgatgtccccgctgccc

SEQ ID NO: 4029 - DNA, 500 bp, Canis familiaris
  misc_feature (1)..(500): n = a or c or g or t
ttttataatgatgatttctttgctttttatgtattngcnngagccaaccaaaattaagatcccatgcccgggaactatacaaacattagcannagcaggaaccagcaaactcactagccaacagattatgaacactgtgtgtccaccatagatcaagggttgtggataacaatatctagagtcggagcagagaatgttaaataaagggggcacatggactgttcaagcagtccctaagagggacagctgatactcagccttagtgttgccaaagcttgttttgccagggaagccagaagcttggatgttcattgaaattttatcaatgtttgtatcagcaattgatttttttaaaaacgtaaacaccacctgtgggccacattaagctcatgtgctgaagggacgaatcatttgttaagccagattttaagctgttgttttgctttgtttttaatggtgattcctgtgtgtcacagaccnnnnnnncaggcttgcccagg

SEQ ID NO: 4030 - DNA, 700 bp, Canis familiaris
  misc_feature (1)..(700): n = a or c or g or t
tatttactttacaattgnngtgaatgttcacattccatgtnnaaggtaggggctatgggctctcaaaattagatttccaagcttttcagcgctgctttgttctaccaacacagattagcagttacaagtttgcagaaatcaaacgacatgtggaaggtaggggctatgggctctcaaaattagatttccaagcctttcagctctgctttgttctaccaacacagattagcaattacaagtttgcagaaatcaaacgaccagctgcagaaaaggaattttgtgtatacacaacatattgtactatgtgaacttgcaatgataaaaatgacactattatgataataacacataagatacttaagaaattctcaaatgccttatggacttcttcaaaaatatgattagccaactgatttatataggtttatactctgtcatagttaagttttccttctctgttactacaattaaaattcactcagctttttcagtagttatttagtaactcagtagctatacattaactcaacacaaaactaactcataacttatctttaaaatgtttaaagtaatatcaagagcattattcatgcatgttatgatattgtttgtaattgcagaattgtaaaatgattagtgagctgtttcaaactgtgcttacttagctaaaagaaagctaaataaatnnnaaaaatannnn

SEQ ID NO: 4031 - DNA, 575 bp, Canis familiaris
  misc_feature (1)..(575): n = a or c or g or t
accaggagatgtagaatttcagannaangacatgagtgcagtgttaagacaagggtcagacttgcactagcaggtcnngtctggctgacatgacaccccatcctcnaggtctctttatcttaggccttatctctccagaagccctctcagccaccccaaagctgggtcaggtggctatcctgtggcccctataccacacagagcgtgcatctttggtagcacttgccacactgtcttgtgtagactgtttacttctctgcttcccctttagagtatgagcccccatgggccgggactgtttcttgttcccttttgtgtcttcactacagtccctctcacattttcaaatttgaatgaatgaacaacggaggtgaaacatggcatcaaatgttcagccccaaaatgcctgctgaaatggccacagggaccagagatggccacagacttggttcagaacttgttgatgctgaagcaaacctaacttgttacagtgagatccatggtgatgtccagaagacaaccagttgttgcccaaatatctttttgtatttgtctttatactttgctgcactgtc

SEQ ID NO: 4032 - DNA, 633 bp, Canis familiaris
  misc_feature (1)..(633): n = a or c or g or t
actatgacatgnnngactacctgaatgagctangagnnnnctgcttgnaggnntatnnnnnnnnngtccagggattgaagnnagaccaggaaaacgtgcanccgnatgtcatgctggtacaacccagagtagaatttattctgtctttcattgaccacattgctggagatgaggatcatacagacggagtagtagcttgtgctgctggactgataggggacttgtgtacagcatttggaaaggatgtactgaaattagtagaagctaggccaatgatccatgaactgttaacagaaggacggagatcgaagactaacaaagcaaaaacccttgctacatgggcaacaaaagaactgaggaaactgaagaaccaagcttggtaagagcttgtccccactgccctctttcttccactttctaggggaggaggcacagtttcttcagactgttccaacaagggatgcctttctcttggtgttttgttttgtactctctcccatataagtgcttttgatccaagccttagttccttaggcttgtactagtggaggggttgggcatcctcagtatttccttgagccaagtgtttgattcctcttggtgatgaagaacagaacttatgtaactagaagt

SEQ ID NO: 4033 - DNA, 647 bp, Canis familiaris
  misc_feature (1)..(647): n = a or c or g or t
gacagttaaattgtgggatcccagaactccttgtaatgcagnnannnncnctcagcctgaaaaggtatatacncnctcagtgncnnnngnccggctgattgtgggcactgcannncgcagagtcttggtgtgggacttacggaacatgggctatgtgcagcagcgccgcgagtccagcctgaagtaccagactcgctgcatacgagcattcccaaacaagcagggctatgtattaagctccatcgagggccgagtggcagttgagtacttggacccaagccctgaggtacagaagaagaagtatgccttcaagtgtcacagactaaaggagaacaatatcgagcagatttaccctgtcaatgccatttcctttcacaacatccacaatacgtttgccacaggtggctctgatggattcgtaaacatttgggatccatttaacaaaaagcgactgtgccagttccatcggtaccccaccagcattgcgtcccttgccttcagtaatgacgggaccacgcttgcaatagcatcgtcgtatatgtatgaaatggatgacacggaacatcctgaagatggtatcttcattcgccaagtgacagacgcagaaacaaaacccaagtcaccatgtacttgacaagatttcattt

SEQ ID NO: 4034 - DNA, 552 bp, Canis familiaris
  misc_feature (1)..(552): n = a or c or g or t
cgatgtgctttcccagnnnnnntcacagaagctgctctggtggctccggccccgcctcatcctgagtggccacacacacagtgcctgcgaggtgctccacggggcgggagtccccgagatcagcgtgccgtctttcagctggaggaacagaaacaaccccagtttcatcatgggcagtatgacgcccacagagtatgccctggccaagtgctacctgccctatgaggacaccgttctggtcacgtactgtgttgcagccgggttcctggtggtcctcatgttagttcactctgggcttctagtctcaccttttctttttggttggaatctgctcagaaaatttaagacaacataaacagcaggagacttttgtgtgctgtaataaataagaaagccaaagaaactgaacttggggcagtactcctgtgagatgaggtcaccagaggctggctttacacacgtcacagaaactatatatcactgctgcgagttcctgcagaataaatagttgattgtactgttctcatgctataaaaatgggacatgtactct

SEQ ID NO: 4035 - DNA, 562 bp, Canis familiaris
  misc_feature (1)..(562): n = a or c or g or t
ctgnngccttctcccgggtgggcccagnngggctcagcgctgnnntcttcacccggctcgccaccatggctgccttcccacacctggctcatggnnagctacacgccacctccttctggctgcgggtgaccctgggggccgttgggtttgcggtcactgccgtcctcagcatctcgctctacagggccctggtgaagagccgatgaggcctcaggcccccgggtgctggtattggggcacctgctcgagggggccttccttgtgtcggaacttccttctggggatactgcccaccgccctgcccgagccccaagtgcagtcccccaggtctccgcagcacgcgtcctacccagctgcacatgccaggcgttacccgcttcggggatcacgtgttggagggactggggtcatggcgaggaagccggtgaccctaggcccaggtattctcagggctccacttctctggtcccaatagccagggggactcggggactcaggataggactctgggccaaaggtgggggtggcctccatcctccctggtttggacatgggttcccgt

SEQ ID NO: 4036 - DNA, 340 bp, Canis familiaris
  misc_feature (1)..(340): n = a or c or g or t
gtggagtagcaagtaattaanngttnnnnnntttatcnnnaacannnnnnnangccggttcaagaggcaaaacagnctaatagaaatnnnntattttttatttattttactnnnatggtttaaaatgccttgtatttattgaaagctcaaatgggtgggtgtttnnnnnnatannncngtagtacctccccatggagccccccagtatcnnnnngggttgtgtgatccagcnnnnnnnnnnnnntaaccnngtgattaatgtggaggacattgnnncattgagnncnnnnnnntaactttgtnnagcnanttcagttaaaatttgccttttnnaggattg

SEQ ID NO: 4037 - DNA, 652 bp, Canis familiaris
  misc_feature (1)..(652): n = a or c or g or t
taggcctggccccaaggatagcttnngtcagtnctcagttccnnataaataaaaattgcatccaaattggtagagtggatgtttaaagtaaactccagtaaatgttcctgccttatttttacataagtactaactagaaataaaactcgattttttagctaatttgaagaagaaaagtgatgaagactatgaaaaaggaggagattccaagaacactaaagaaaaagtacaaaaaatacagtctgttggccagaataaaagctacttggctgtaaggctgaaagatcaagatctgagagattcaaggcaacaagcagcaaaggcctttatacaaaaatctttgtatggtccgggaaccaacagaactactggtaatttctttaacacagtttcttttattttattgcaaattaaacaaagaaatgataaataattctctcttcttctagtaaataaattcctgtctcttgaaaataagaggttaccagtgaaaaaggctgcggtccagtttcttaataatgcttggggaacccagagaaaacaaaatgccaagaggtttaaaagacggtggatggtcagaaagatgaaaactcctaagtagtaaagctaaatgaagagtgagaacttgtacatatagaacttagttatgtgg

SEQ ID NO: 4038 - DNA, 602 bp, Canis familiaris
cttcttcagagcaaaagctggactcacaaccagaacctactgtcacgttcctgtttacactcctgagcacagcggagcccactgagtccaaagaccctgaaaaggcctcagatatccaggagtgccagttcctggacaaggaagactgggggccccggcgcacctcaagggaaatcagccatttgcagaatgattgcaggagacttcgggagtccctgagcactatccaagcagacaaccgagccctgagggagaagctgcaaaacctgctgaccgtgtcatatgatagcctgaagagggaagcaaaggccttcttggaggaggtgaaggccgctccagaggatgcccgggctttccccgaggatgcccaggccatcccagggatggcactgtcccaggtgcactggcagcacccccatggcacgaggggagaaaggacatgccttccccagccggtcactcagctccccttgcctgtagcaactcagctcccagaaggcggctctgttcatcccgcagcctgctgctcccatgacccgcagataccagtatcagccctggcagggcccaaggctggagactagacacttcttggggaagcc

SEQ ID NO: 4039 - DNA, 59 bp, Canis familiaris
gggccctttctaatcacttcaagacctgtaagattctatttcttttttctttttttttt

SEQ ID NO: 4040 - DNA, 715 bp, Canis familiaris
  misc_feature (1)..(715): n = a or c or g or t
gtactgtgcccccagctgtcccannagtgactttcnngncngggngtcagagtgaagannaggcatcactcannntcaatgccatcaaccgttgtccccttcctcgaccctgggccctcaccttctcctatgggcgtgccctgcaggnntctgccctcaatgcctggaaagggcaacaagacaatgctggggctgccactgaggagttcatcaagcgggctgaggtgaatgggcttgcggctcagggcaagtatgaaggcagtggagaagatggtggagctgcagcacagtccctctacattgccaaccatgcctactgagtatgcattccacgccacaacctttgacctggccacctgcaccccatttcaccaatagttaaggccagagccaaatagccatgcagagcgagacgcctccatccagcactgagtcatcttccttttttgtcctccccctctcccactgctgcacctgggatcactggatgggagaatagggcgcccctcatgactgagggcagaagttgctagaagtcagagcaggatgcctgggtttccccctgcctccaccagcccctaccatttccccatgatatggtagcttctccttgggctttccttgcccctgtctcctgggatcagagagtaggatactagacatgactcatgtcttgggtacataccacatagcaaataaatggtagcaaaagatg

SEQ ID NO: 4041 - DNA, 536 bp, Canis familiaris
  misc_feature (1)..(536): n = a or c or g or t
actcnaggctggnnagtgccggattcccataggccnctccnnncnccctgggcactagattagtgagttctgtggacagctctgttagaaatgggttatcacatgcctccaagagaatttcaaggcaaacatagaatagaataaactacgtctcggttgtcttatgttgtcactatattcttagatttttctaacagtttaattgcacctctttagggaattaatcaagtttctgaaagctttagtcaatgaatgttagcacaagtgtctagagagtgtggttggttcagttttctttctctttcccgtggagtagcagcaagggttaggggcatcaggatttcctcccagcaggctcacctgggcttctcctgctgtctcagggcagccagaggacaggccccaaagcatcagggcttttatacttcggcagtgccacacttgctaatgtcctgttgaccaaagctagtcaccctctcaagcccaagtcaatctgggagagtaatactcagtgacattggcatgtgatctgcagt

SEQ ID NO: 4042 - DNA, 633 bp, Canis familiaris
  misc_feature (1)..(633): n = a or c or g or t
cagagaggtgcttcgcattcggnntgcggcccctatgctcatcccccacaaggctattgtcgattccagcattggtgagtttgctgttgacaagggcacaagtgttatcatcaatctgtgggcgctgcatcacaatgagaaggagtggtaccggcctgaccagttcatgccagagcgcttcctggacgccacaaagagtcagctcatctctccatcattaagttacttgccctttggagcaggacctcgctcctgtgtaggtgagatcctggcccgccaggaactcttcctcgtcatggcctggttgctgcagaggttcgacctggaggccccagatgatgggcagctgccttccctggagggcatccccagagtggtctttttgatcgagtctttcaaagttaagatcaaggtgcgccaggcctggagggaagcccaggctgagggtagcacctagaggctgacctagcatcccctgactccaccctgtgtgatcccacagcacaaaatcagaggtgtgattcggccctccccctggccctccccctggcccacactgccttcttttccagcctgcagtccctggtagtgatatgcataaactaaacagtttttcttcctggtccctgaaca

SEQ ID NO: 4043 - DNA, 393 bp, Canis familiaris
  misc_feature (1)..(393): n = a or c or g or t
ccactcggcggccggcaggcagagnngncannagggggatcaggatgaccgctcctacaagcagtgccggacctccagccccagctccactgggtcagtcagtctcgggcnctacactccgacctcacggtcgccccagcactacagccnnnnaggcagtgaaagtggccggagcacccccagccnctcggtgctctcagacagcaagcctcccccctgcannnancagcaggcgcctcgccacttccacgnnnnnnnnactgnnntaaaagataacatctataggaaaccccctatctacaaacagcatgccgtcaggcgaccggatggagaggacagaatgttcgagcaagataacaggaagaagaccagctggctgattctcaaggggga

SEQ ID NO: 4044 - DNA, 589 bp, Canis familiaris
  misc_feature (1)..(589): n = a or c or g or t
gcaaggacctggaggaggtgaagcagaaggtgcagccctacctggacgacttccagaagaagtggcaggagnaggtnnagctgtaccgccagaaggtggcgccgctgggctcnnagctgcgcgagggcgcgcgccagaagctgcaggagctgcaggagaagctgagcccgctgggcgaggagctgcgggaccgcgcgcgcacccacgtggacgcgctgcgcgcccagctggccccctacagcgacgacctgcgcgagcgcctggccgcgcggctgcaggcgctcaaggagggcggcggcgccagcctggccgagtaccacgccagggccagcgagcagctgagcgcgctcggcgagaaggccaggcccgcgctcgaggacctgcgccagggcctgctgcccgtgctggagagcttcaaggtcagcctgctggctgccatcgacgaggccaccaagaagctgaacgcgcagtgaggcgccccccgccccgccccgtccgtctgtccgcccgcccggccctcggaacaaacgcttcccacgcgggacgcccgtgtcgggcgcgcgggtttggaggccgcggctgtgatttt

SEQ ID NO: 4045 - DNA, 219 bp, Canis familiaris
  misc_feature (1)..(219): n = a or c or g or t
aaccctcttatgagaagggccagactgtgggctacatcngctcattgttccctgtccccccccacccccccacccccggccctggtcccttattaaaaaccaccctttaaaaatgtcaaagccaggnnagccccggtggcgcagcagtttggcactgcctgcagcccagggtgtgatcctggggacttgggatcgnnnnnnatgtcaggctccctgcat

SEQ ID NO: 4046 - DNA, 252 bp, Canis familiaris
  misc_feature (1)..(252): n = a or c or g or t
ggaagccgggcctgcgctggagcccaagccggagtcagaaccgccacaggacatcgaggaagatcctgggagacctggggctgccgaagaagccgccgtgcttcaaatagagagtgcggcctgatggctggtgctgtccgcctctcctgtgcctgtctatgnnnaatcccaaaagaaatctccctctcagaatgcagcattcacgcccaaataaggagtcaatcctgcatccacagcccaactctggcctgc

SEQ ID NO: 4047 - DNA, 686 bp, Canis familiaris
  misc_feature (1)..(686): n = a or c or g or t
tgctnncagagagngcccgacggtaaatactccagtccgnctnntccactgtggtagcacagaagcagtcngaaatncgtaaatatatggaaatttcaatttcatgtgtcagtaaatattaatttttttcagttatttaaaaacatgaaaacccctcttagcttgcaggccatacaaaaaacaggcagtgggccagactgcccctaagacatagtttgctaacaaaatgtgctgagatcggagtacagatccacaggagtgagttctctgcaggtgagaagagggtcaggggttaagggcaggccccaaagcccccccttctcacagacctctgcaaagtccatagccaagcgggtctgttagagggggggctccaggcaaggcaggggctggcagggcgggactctggaaacggaattccggcttgtttgaaagtggcagccagggcctcggtctgcatgttttctgagctaagcagacatttgcccaggtcagtatattcaggtatcagaaagaagagacagccagcgaggcctggaaagctctagaatgtctctgaggaagcactcccagagctcctccagctactgaatcgggttgagcagagctagagcaatgatgaaatgatgaagtggaaattaacagtgtgttttacttgctgatttgccttgattagcatttcttac

SEQ ID NO: 4048 - DNA, 523 bp, Canis familiaris
  misc_feature (1)..(523): n = a or c or g or t
agctgaaaagcacatcaccagccagcgagaaagcagatccgggctcagtcaaggaaaaggcaagcccccagcctgagaaggacttttcagaaaaagcaaaagcctcccctcatcccacaaaggataaactgaaggggaaagatgagactgattccccaacagtgcattnnngcctggactccgattcagaaagtgaacttgtcatagatttaggagaagaccattctgggcgggagggtcgtaaaaataagaaggaacccaaagaaacatctcccaagcaggatggtaagtgattgcaccactttctggtttcttgatttagtttagagtgccaccttgtgtttgtattcccagaaggtacgtgaccctccgatgtcacaaagggtggcaccagaacacagccttgattggctcaaggtcacctagctaagtcactgatcaggcccaggactgacccccttccctccagccccccacccgccccaggcctgcctgccnnnnnnntgcttagtacttatcccat

SEQ ID NO: 4049 - DNA, 621 bp, Canis familiaris
  misc_feature (1)..(621): n = a or c or g or t
gcgatgcaccatctcctanngcgccccagagctcttctccgtgcagagccactgtgtcattgatgagcggactgatgtctggtccctaggctgcgtgctgtatgccatgatgtttggggaaggcccatatgacatggtgttccagaagggtgacagtgtggcccttgctgtgcagaaccaactcagcatcccgcagagccccaggcattcttcaaccttgcggcagctgctggcctcaatgatgactgtagacccccaggagcgccctcccatctctctcctcctcagtcagttggaggcactgcaacccccagcttcaggccaacataccacccaaatctaaacagaccaatggctacgttgagaggtggccctgtgccttggaaggaggctctcatccctcattagaatctccacccggtgtctccaggactgctctcttggcatcggggacaagtggatgggaactgtcagctcagtcttatttctttgcttctacaacaactggacaggggactgactgggtgtggacgagggtaggagatggggaaggggaaatggatagaatctagaaaggctctgagcaggactgctgagcttacatcatggtctgccttcaca

SEQ ID NO: 4050 - DNA, 572 bp, Canis familiaris
  misc_feature (1)..(572): n = a or c or g or t
atgtttttaagatgaaggggctnatagaatgatacaggttattaatataatttggcttttgttatgcaaannaacaccagctattaaaatatattttagtagaaatgctttaattcatgttttttttcctctacactgtgaatctttaagccttggtggactagagcaacatcgtgctgcccaaaggactaacctatgcaaactagttcacattttagtggatgtcacagtaattgtgtaataagacattatttccccctgcataatgtacagcggcattgaaataaacattaagcctagcatcatgtatgtatagtatagtcactcacagacccttcaaggctactataatcattagtattattattatttgtttaaaaacaaatcgctgatttatctattaaatctacttgaacgatgttggaacaagaatgacgggtggatgtgtcggctgtggcttcaatgtggtcactgcaagtgttttcctatgataaaactgtgttcagatgcactctcttcagggtattattattctgtgtcttctttctgtatttgtaaaacattatgacgct

SEQ ID NO: 4051 - DNA, 648 bp, Canis familiaris
  misc_feature (1)..(648): n = a or c or g or t
cgtcagcantgcatcntgcaccaccaactgcctggcgnnccttgccaaggtcatccatgagcgatttgggatcgnnnnnnggctgatgaccacagttcattcctatactgccacccagaagactgtnnacgnnncatcaaagaaggcctggcgagatggccggggcgcccaccagaacatcatcccagcctccacgggggctgccaaggctgttggcaaagtcatcccagacctcaaagggaagctgacaggaatggcgttccgggtgccaaccccagacgtatctgttgtggacctgacctgccgcctggcccagcccaccccatacgaggccatcaaagaggccatcaaagcggcagccaaggggcccctcgctggcatccttgcctacaccgaggatgaggtcgtgtccacggactttgtgngcaacacccactcgtccatcttcgacgctaacgccggcatcgcgctcaacaacagcttcgtgaagctcatttcctggtacgacaacgagttcggctacagtcaccgggtggtggacctcctccgctacatgttcaaccgtgaccagtgacgcaggacggcccccctccgctcccctgggctcccgggccggaactcgtgccccccgttcccgccctcgcctcc

SEQ ID NO: 4052 - DNA, 559 bp, Canis familiaris
  misc_feature (1)..(559): n = a or c or g or t
atttaaaaatgttcnacgagtatttatatttacttgatgtaaatataaattttccatnnnaaagctctctgaaaagtccattccannatggttttgttgacgtgtgtgtgtatttactcttctaaagtaannacttggcagcggaggtgaccgatcttcagcacctggggcctggtctgggagatttctggtttaaaactcaaaaagcgggactctctaaaaagcagaaaacttatgaaaggaaatcttttcagtggggttgatctaggtggctgtattacatgactttttatatgaaaggtatctatatgaaatgacagcagtattttcgacttttatattccatagtcactgagacatgaagtactacgtgttacgttaccgtgttttttattaatcatcgcccaagtccacgtctgatggcaaaggttggatcgtgttagaggaaccggctcttgtatttgcctctggggaaacctagtgtagttctctgcgtatttatggattcctttctactaagccacatttactttggtcttacgtgtatttaaatgtttga

SEQ ID NO: 4053 - DNA, 534 bp, Canis familiaris
  misc_feature (1)..(534): n = a or c or g or t
cctcaagaaccccangaggnncaacgtggcagtgacccgcgccaaggccttgctcatcgtggtgggcaacccactcctcctgggccacgaccccgactggaaagtattcctggagttctgtaaagaaaacgggggctacaccggctgccccttcccggccaaactggacctccagcaaggacagaacctcctgcagggtctgagcaagctccggccctctacctcagggccccaaagtcatgactaccccccccaggagcgggaggaagaagatggcctgtccctgcaagtagagcccgagtggaggaacgagctctgaagacacagcagaccgctttctcacaccagccaagccttaaccacccgcacacccctgccccagagccctgcctgaacccaagcccagcggcactgcccctccaaaggaccggaaggctgggggagggagtttcaacccaagccattccaccccctcccccctactggggagaatgacacaccaagctgctaacaattgggggaagagggaggaag

SEQ ID NO: 4054 - DNA, 647 bp, Canis familiaris
  misc_feature (1)..(647): n = a or c or g or t
agaaggtcacgcanntgtccacactgcaggtnnngncnctcaatgtcaagtgcctgtccaccccgtgccacactncnnnacacatctgctactttgtgagcaagcccaacagctccgagcctcctgccgtgttcacaggcgacaccttgttcgtggccggctgcgngaagttctacgaagggactgcggatgagatgtacagagccctgctggaggtcctgggccggctccctccagacacaagagtgtactgtggccacgagtacaccatcaacaacctcaagtttgcacggcacgtggagcccagcaacgccgccgttcaggagaagctggcctgggccaaggagaagtacagtatcggggagcccactgtgccatccaccatcgcagaggagttcacctacaacccattcatgagagtgagggagaagaccgtgcagcagcatgcgggcgagacggaccctgtgaccaccatgagggccatccgcaaagagaaggaccacttcaaggtgccccgggactgaggcgctgtggggcctccgctgccctcaagcacatatgggtattcaggggttttaggtacatttcctgctggcagtgcaggaaatccagtcttggtttaaccttaaattaatttcagagccctt

SEQ ID NO: 4055 - DNA, 623 bp, Canis familiaris
cccacagagctattccaaaccccgactcactctggctggctgcccccagaactgctggctctctggacccactgtgcacagccacccctcggagcactcaggcgaaggccacctccggagcctgaggaggaagaaaggaggatggaaaccccaagtgatatcgaggtcctgagagaggcccaggagcccagtgggcccctcatgctgtcttcagagctctctctagaaacggctgaggaagagaagtcccgtgtcagcctcatccccccggaagaacggtggccctgggctgaggcagagcagccagaggcccctgtgttgcctgtggtgcctgaggtccctgaaatgcccctggagttgcctttggagctgcccccggagcccaagttgctgtcgctggaggccgtgtacagggctgtagcccaggagctgcaggccaacagggagcctgatttcagcagcctgctgtcccccttcagcccccgctggatggccgcccgggtcttttacttgcttctggtgcttgcagcccaacagatccttcgcctggagcaagagaaaccatatgggcgcctcctgatccggctggggcctcgattccattgtggttagaactaattata

SEQ ID NO: 4056 - DNA, 388 bp, Canis familiaris
  misc_feature (1)..(388): n = a or c or g or t
ttatttatgtctgtctctccaannnggatgnnaagccttnnnatgcaagnantgtgttttgttcannccagnancttttnnagtccttnaannnnanatggnctcaaannnnnnttgaaaaaatnnnnnctgngnnnngnntgtgnnnnnagtgctatttnngtannnnntgaaaggatnnnnaatagtaaggcaggcaaaannnnnnngttgtcagggaggnnngttccagatggngnnnagaggtgtttccntnnnggnnnnnaggtannnnnnnnattgttccctnnnnaaannnantnnnnnnnttctgtctanccctcaatttccttatctttcaggaagaacaaangtaatacctagctcagagttgtaatgaattaaatga

SEQ ID NO: 4057 - DNA, 631 bp, Canis familiaris
  misc_feature (1)..(631): n = a or c or g or t
ctcatagnaccagagaagagggtgnnnnncaggcattnctcatctcaggcancagaacaaccatctacccactcttgggggcaactgtgtccctcaaggtggtgacactaatacctgagcagttttngacatgagaggccaagagaacctgtggcactaatgagtcaagatcaaaggatgggtctgggactttaatttttgcatcttcttgttgtcaaataaggctctagtttaaatcatgcccagtacactctccaccaccaagcaaaagacaagctgaagggagctctggagccagactcattggatcacagtcacaaccctctgctcccttttggctgggcctaggccttaggtacaggaatgacagagtactctttctccaaacggtaaagtttcttgcaacttccttattaaagggccttattgattcattctgtctttccagaagaaactgtccagtgattcatatcctgccttcagccaatttcttagcctttgagttttatagctatggaagaactcagcaaaaccagtatttctggtggtttagctgataatcacatttataagaattctggtattatttctctatcaaataaggtttgttaatgtactattttaattcttc

SEQ ID NO: 4058 - DNA, 541 bp, Canis familiaris
  misc_feature (1)..(541): n = a or c or g or t
gaagccanacagccccaggcccctctgcccacnnngcacccagcgccgnnagcgccctgaccccaggacctgccgctgccgctgccaacgccgcagcttcctccgttgccaagggcggggcctagagctcaacccagacacctgcaggtgccggaagctgcgaaggtgacacgttgcttttcagactcagcagggccactagcctcacaagccacccccacagagggggtactgggggcaacatgttgagaatagcctagtcccaagacctcggcatgggcagaagctgctccaggacctgggcctctcggaggactttctagctgtcccgggtctctccaaggctgccaactgacagggtgggcagctggctgggaacatgtgtaggtggcaccaggggtcgcagactaactctgaaaagaaggggtaccgtctcagtgttcaaccaccatgtgcaagtgagatcttacagctggctcctctgtcccctcactaagacactgatcctctgcaaatactgggaattgggcttcggtgtgag

SEQ ID NO: 4059 - DNA, 521 bp, Canis familiaris
  misc_feature (1)..(521): n = a or c or g or t
tttatgggaccacagggctccagctgcttcnnnagcaagtgtttatnnagcccttccttgctgtcatgatgccttgtgctgtnnngaacacaaagatgtctccccccacccccccagaggtgacctgcaggaggaggggagcagggaggaggaggatcagcatagtagtagcagctagtggtggtagcaggattaagcccgtagcacttgtgagaacacatacatcacggccaggaccaggccgccttgcaaacactgcaggagttagcgtgctgaatcctcacgcagttctaggtagttgacatcatatttatcaggcctattttacatacgtgtatactgaatactgaggtcatggctagcaagaaaggccttgattctcttagccactgttcagccaggggaggtaagaccagtacaactcaacaaggtggaaaacaatgccattgaagagatgtgtgctcttggctacagaccttttctctctctgaggtgctcaatctgatggatccacagttcta

SEQ ID NO: 4060 - DNA, 585 bp, Canis familiaris
  misc_feature (1)..(585): n = a or c or g or t
aaaattaannaatctctaaaattaaactttacactgaatgttcttgtttctctaattagaanntctgctagcagctgtggctatgtacacacactcacacacaccctcacatctacacgtttgcactccagaactgtcagagggtgtcaggcacaagacagacttcaggttgcccagacaggcacacaagtgcagtcactcccaagccccctttggtgctctgctctgcgctgcttgttggaaggagtccctgaaaacaggcacccccaggctgtggctgcagccccatgacccatcctttggaaagaccacagttctggaggctctgggtctctcagtgggaggaggatggaggacaaggctcagcctggatctatcaggtcctcttgtggccccgtgggctgatgtggctcctgtgggcagccgcagaaggacagggactcatggagggcacccggaaggctccttttgtgctgggaacaagggcttgtggggtgggctgggcctggctggggagaagacagtatctgtcaattgggtgcatcacactgtggcctttctgtcgtggatttccaagcgcaaaga

SEQ ID NO: 4061 - DNA, 308 bp, Canis familiaris
tccgcccagtctcggccacgctcttctgcgcctggcagataggatgggtgttgagtctgagatggaacaagcccccaacatggtaaccaaccacatggccagtctgcccaggcctgaccccaggcgactctggcagacccctcctctcaagatatcaccttccaagggcccagggctgattttactctggacccctgcatcctgcccctgggaacccaagtgaggactgctctgcacctttggatgacacctgtggccctggagatgttttcaacccaggggtgtcctttgtaaatgttcctccatcc

SEQ ID NO: 4062 - DNA, 561 bp, Canis familiaris
  misc_feature (1)..(561): n = a or c or g or t
ttgtgtgtgtcagttttcatagtattcaattttttgggtcactnnnnnagnttcatgaatttcagattctgagggaaatgttttgtaaacattnnactacttttttttttaagataagatgaaaggcaggcctatttcatcacaagcacagacatagacacacagagacaacaaacttatgctttatttgtaaatttagtgttttctccatctctactgtcaaatgatgtgcaaagtcttctcttggttgaatggaagtcagccaaggattataactcctgaatcttaacttaatatgccaaacagcatgggctacacacatatgaatatttaatatcttgaaccaaatgatctcaaatttcaatgttcagatttgcttaactgaaaaataggtggtaaattttaagactgatgattttgcaaaatactagaccaaattcatgaagccacatacacttagagcaatatttttagtattaagaattatatagttacctagtgaaacttctcttttctagaattatttttcactctaagtcatgtgtatgttcctttttaatc

SEQ ID NO: 4063 - DNA, 518 bp, Canis familiaris
catcagacggagcacaggaggacaggacaacagcaggacggacccccacagtgtgcattctggctcccgtcaggcaccacctctaccagcctgggtcccagctcaggcggcctgccgtgttgccgctcatctgctaagacctgctggggcagaagaggcagccacgggccacagggcagcacacggcccatgggccaggacaaggccctgctgggtgacctggggcccggttccttactcgtacacagaggacacccccacagaggactgtaaccaggagagacgtggggcaggcacacggggccatcatcacaccgttttgttctgatcctctgagttaccacagaacgacttgactccgggaaggaagacagatctgcacttctgaaggcttgtggctgcactggggaacattctggactccacccaggccagggcacaagacccagcacagacacttcctcctgcacccacttggcctctggaaatatgggactcttaagcgctcccatctgcaa

SEQ ID NO: 4064 - DNA, 517 bp, Canis familiaris
  misc_feature (1)..(517): n = a or c or g or t
cacatgtacannnagaggtntagnaataaagagnnnnnnggtcaacttgcatgtnactgacaaggggttattgggattatnnnntgatgggactagcatgtcactaaagcaggccttttgatatattaaaattttttaaaaagcaaaacagaagtttagattttaatcctgttgtagggttcttctgagtcttcgttgttacagaatcacccgtttgctttggctgtctccttcctatctctgctcttatgaggacatggggacagccctggagtcagaacacttgtcattttgtatcctggtgtctattctgagtgtgagatgctcctttccattgttaagattcctgaggcgttactttttcttttataataaaatgcaaaccccatcttcatccctatgttttcctggctgtgtctggctgttttcatgttggctgcagccggccngcggtggcttcctcttgccatgacgacttctaattgccnngcacagtatgttcagttagatagctctt

SEQ ID NO: 4065 - DNA, 520 bp, Canis familiaris
  misc_feature (1)..(520): n = a or c or g or t
ctacgcggggtacggagaaggctttgacgacgtcatcatccagggggatctggaagatctcaagttcgtggctttttacaccaaanncgatgaggtgattgctgtggccagcatgaattacgatcccatcgtgtccaaggtggctgaggtgctggcttctggccgggtcatccgaaagcgggaggctgtttgtgctgcacagcaagaccggcgacatgtcctggctcacagggaaaggatcctgagctcgcatgcagcagacttgggcaggcacgcttgggcaccagggacagaggccaagccctgggggcaggtgccaacctccaatttcccaggatcccccagggcagaacctgagccttcccagtgcttgccttcggttgcctggctcacctccagaggcttctgctgcctccaggagatgcttactccccgaggcctcagctgccactgatggctggcaatccaggcaggacaggcctatcctcttctccctttcttgagactggtcccctgcagg

SEQ ID NO: 4066 - DNA, 395 bp, Canis familiaris
  misc_feature (1)..(395): n = a or c or g or t
aaacagcgcagtacaggatgtactggagttacatccaagtttctatgggagcactgcaaagagtgtgtccagctggcttggnnnnnntcagcgcaggatgtgtgtgctgagtctgnaagcatgggcaggcatccttgcggccgtgagctctgtacacagaaggaaacaaggggagagccgggaggcaggagagatcaaggcatgtgttggtaatattctgacaccaatttcagtgcgtgtgcagggagtttctccaccccgagcaactctccaccaccagctgggtgtcctatattcaacttaattcttacaccacctacctggagacggcatcagatcccacaggtgatgggctccatcnnnnaagactgccacccacttcagaaactaattgc

SEQ ID NO: 4067 - DNA, 553 bp, Canis familiaris
  misc_feature (1)..(553): n = a or c or g or t
ggggatggggcactcattaaagtgcatcagagccagagcctgttgtgtctcagttggatcgtccccagagactgctcatgnngcnctttcctcttaggtttgtagtcagagcagaggtgcctgctgcagacacctcgacggcccttcctcagccaaggccccgtgcggctgtaggtgaacgagagggagcagcccaggctgtgccttacgtttgggatgtggtgtcctgctcaccccacaccctggtgcccgcttccctacacaggaatgtgacaggcctgctagggctccctgtcctgctccttgaggtagaccattgtctcccagccatgaccgtgtagcaagggccggctgtagtgactgtaactctacaggctgtgtgctgtttgcagttcagaaaagaggtctgggggttgagctctcctccctgctcaatgtctacaaggaaagcacaggcaggctgcttctctgacagtccaccaacgctgctgcccgcctcccatccagcacatacctgtaccaggcctgtcaagaggctttgtggaaccaatct

SEQ ID NO: 4068 - DNA, 713 bp, Canis familiaris
  misc_feature (1)..(713): n = a or c or g or t
aaatcaacttcaagaatttgctgccatgctgatgcntcancaaaaagcnactacagctgatggttctagcatcttggacagagccgttattgaacacaatttgtngtctgcaagcaaattatataataatattacttttgaagaacttggagctcttctagagatccctgcagctaaggcagaaaaaaatagcatcacaaatgataacagaaggacgtatgaatggatttatcgatcagattgatggaatagttcattttgaaacacgagaagctctgccaacatgggacaaacagatccagtcactttgtttccaagtgaataaccttttggagaaaattagtcagacagcaccagaatggacagcacaagccatggaagcacagatggctcagtgaatccttacaaaacttctgtgcacactacatcttttacaatgttgtacagattaatttcactgtctctccaaagcatttgcatcatgaccttacatacttcaatcccttttatgctggatcccatttaaagaagacattattagaacaggaagtgcaagcatttgaaaatatgtagttctcgtgtattcagggtctctgtgtatcaagctaactcaaacgttttgaaggctttttctttaaacagagtaagtgaaatatctgtggctaaaaagtttgggtttgtgataactttgtagtcatgtaaaacttaaagtg

SEQ ID NO: 4069 - DNA, 525 bp, Canis familiaris
  misc_feature (1)..(525): n = a or c or g or t
cttcgnnagngngccgntggtgcaggggggctggtgacaggggacagggtccgcaggggnaagccacggcctgtgccacagaagaccgggacctccggcggcctggcatccttccacgacgacagcgacgaggacctcctgcacatctagtctcctggtgcctacgggagacgcgggtccggcctcgccaggcacctccaaccaaataagacttcagctcgatgatgcttctatcatttttgcctttaacaaaaactgtttcaaaagggaagagtttttgtgctgggggagagggtgaggaggtcaggtttacagtccttggaacgaggctctgctcctgtcactgggggtggggccggggccctgggttttgtccccagccctcactttaaaagcgtggcagccgggcgcttcatagtgtgtgcccgggccagacgcatcttggaaccgagggctgcgtatttgagaaaaacccttgctgctttaggccctgtatggttttgaccattatattttagcatttaa

SEQ ID NO: 4070 - DNA, 512 bp, Canis familiaris
  misc_feature (1)..(512): n = a or c or g or t
gtagctccttttttccaactcctgnnnnnacattcattggtnnaacagaacatatggactnnngacctaagaactggnnggattttgcattttgggaaagtgttgcctggccgannnnncagttttgatagtcaaggatcctgtccatctcccaaaccaccttccacaccataatgcctccaaaataaagaccattataataaggacccaggaccctgtgctcatcaaatcagaaaaagagtgggaggtttgatttcctcatttaaaatatatcttgataatgaacaaacttgacgtttttttcatttactcttttttttttttttttttgtcggttcattaactttggacatcttgatatattttacttgaatacaaatagtccttactcgcataaggcattttattcttcatgtcatatgcctattagcacaaagagtgttttcataagttgcaattctttgcataagaaatacattcttttaaaagaatctgtacttatctaaaattaa

SEQ ID NO: 4071 - DNA, 319 bp, Canis familiaris
  misc_feature (1)..(319): n = a or c or g or t
tcacggtgaagtccgaggnncggctccggagcctgnnngcgcnnnnnngnnnactcgccagagggtgccgcggaccctgccctccgcccccgactgcggacaggagcgcaggaaccaaggacttcaggggccggggactgcggggcccctccagaagcggaaagcagtccgcgaggagagccccatnctggaactgctcaggctccccaagacttgacacagccctccccacttctggaggaggggagggcctctgggcggatgggtgtcccctggcgcccctaaactcttctctttctctcttttttttggggagaaa

SEQ ID NO: 4072 - DNA, 655 bp, Canis familiaris
  misc_feature (1)..(655): n = a or c or g or t
gttcaaaaaaagctttgatnnnagccaggttgagacacatggttattgttctttaaaatctttgtaggtntagacatgtctctctctgactccagtaaagcctctagaaaaaggggacctggaagtgtagtgagtcaaataatgcctgcttagttgtctcctgtcaacaagcacatgtggactcaggtggcaaagtggtaccttggatcatggaaagaagggaatgatcctttgtatctggcctatcctacaaagaatacaccattaaatgttggcaactcagaatgacaaatgatttcaatcacattggtgcatttgcagggtcagaccttctcagttgtctgatgaaggatctcctcagttacgcatggtgggtgccaacagatttcaaaggtatagaaggcttaatgttcaccacatgggtgtgttttcagggtcccagcttagttaattcatccatccgtctggtctttcacctggtctcacatgtatatcctgcttttagcaagaagcagacacatccttgaaatgatggttgatggaacatgctcctgctctttggtgcaacctctgggctggagaagagaggactctggtgggagggttttgctgctaatgtatttatggaatgaatgtatttcattcaaatctgtat

SEQ ID NO: 4073 - DNA, 562 bp, Canis familiaris
  misc_feature (1)..(562): n = a or c or g or t
atccgcangtnnngagaggagcagaggnnnnnnctgcannagctggatgctgnntncaaggtgacagaacannagtggcnngaaaaagccaagaaggacntnnaggagtggaaccagcgtcagagtgaacaagttgagaagaacaagatcaataaccgggcatctgaggaggctttcgtgaaggaatccaaggaggagacccccggcacagagtgggagaaagtggctcagctgtgtgacttcaaccccaagagcagcaagcagtgcaaagacgtgtcccgcctgcgctcggtgctcatgtccctgaagcagacgccactgtcccgctaggtgcctgtcacaagcatggccacaaagcatgggctgggcctgagcacaggaggagcagctgctttggccagggggggcgttggtggctacagcacctccagcagctgctacacgcagcctactctgttcctccccatcttctggggctgggaaggggaaccctccccctctcacctcattccctcctagccctgtggcccagcccctgacacctcctctcagtccacaaaat

SEQ ID NO: 4074 - DNA, 426 bp, Canis familiaris
  misc_feature (1)..(426): n = a or c or g or t
tccttcaactccatgagagaagatgcaccccacaaccccacccttctctgtactaccaggaggacaataagagcacccacctcatccccaagatatgcacctggtcgggaacactaggtgtcatcctgggtagagagaggaaagaaggaggaactgagccacaagaggactgtcncaggcacccagagctgcagtggctacccaggaggcctgcctttgttctgccagagggagaaagtcttggtcctcctgngnagtacaatttgtcatcagcatgatgtgaaagtccttactaggtgggtgggtctgagggctggggcagcaaggaagtgagtcatctgtaagctgactggggataatggcatcaaatgtcagtccttgacatttggggggaacagcaggtgccaaagctaaaaggcaccntng

SEQ ID NO: 4075 - DNA, 350 bp, Canis familiaris
  misc_feature (1)..(350): n = a or c or g or t
tgtacaatatagcgattcnncaatcctatacattacttagtactgatcatggtacttgtactcnnaatcccattcccctacttcacccactcccctcacnngcatccnntctggtaaccacgactttgttctctatagtcaagagtctgttttgtgtttgtctcttcattatactctctggatacatccattttgtngcaaatnnnaagatttcattctttatggctgagtaatactctnnnncaaatatgtgtatgtatataatatatatgtgtatatacacatatacacacatacatacatacacaccatatcttctttatccatttgtatatcgatggacacttagt

SEQ ID NO: 4076 - DNA, 604 bp, Canis familiaris
  misc_feature (1)..(604): n = a or c or g or t
agactctgtagtgtgtaaatgttgacanggaantggatnnnaatcatgtagcagaatggcacccagactgctgcccgctagtgatggacacccacgtngaagatcgtgatttccagcccatggagccagcatttgaaccttgtacaattaactttcagttatgatttcccatctacattttctttgctctgtttgtagctgaattttgtgttttatgactcctctgttcaagcagaagggtgattatgagtgggtcacagcagcccttaaaagctgggccagaaaatttcactaggtcagtaatttaaactttggatctgcaaaaaaaataaaaataataaacaataataatgtgaaacaaaaccaactaaaaaatgattcttgcacatgaactgtcacatgtttgaaatgtgttttttagagagcctcagtcttgctgatttcaaacacttttttcttctgtgtattgcttttaaaagagccatcagttagctatcagactctaggttgatgcattttgtacttagctgtactgtgtgatatttttcattattttaggacgccaacatgagacctgtaataaaatatgtaatggggttgaaag

SEQ ID NO: 4077 - DNA, 591 bp, Canis familiaris
  misc_feature (1)..(591): n = a or c or g or t
aagcacctgcgcctgtcgctgactgagcngggccagtgcngagtgcagcatctgcacttcccctctgttgtggacatgctacaccacttccagcgctcccccatcccactggagtgcggagctgcctgtgatgtccgcttgtccagctacgtggtagtcgtctctcagccaccaggttcctccaacactgtcctgtttccgttctccctcgctcattgggattcggagctgggccttccccaccttagttcttctggctgtccacgggggcttggcccagagggtctcccaggccgatcctctcccccagagcagatattccacctggtgccttcgcccgaggagctggccaacagcctacagcacctggagcctgaacctgccagtcgagcccgggactcagactacgaaatggactcctcctcccggnnnnnnnnnagggccatagacaatcagtatacacctctctgatgggcagcgaggaatccccagcctcacacatgcccctgaggaacacaagcaagcagagatgtgaacttgtgaatgtaacttactttccttccttccagagagagttttaagggacactgt

SEQ ID NO: 4078 - DNA, 441 bp, Canis familiaris
ggatcagctcttccaccatctctcctgttactacattccctgcctgagacaaagcaatcgaaacagggcactctgagggttaaaaatgagaggggaggttgtgtgctctcatacacgccaagcctgaaccataaccttccaacattattacaaagaagagtacctaggttccctctactgggaaaggactgcttcccaagctgaggtaagggggtgagtggccagtgtcactgttgcactaggggtaaagctggagcccaactggaccaagggcagagctgacttacggtagattatctccctgttctttccaagagacccaaacataccttgtccttatgcagttatgccataaaatctctgacttcagagaaaggaaaagacatagtaatgtaagctaaatacctatctgcatagctgtatttactttgtatagacagt

SEQ ID NO: 4079 - DNA, 507 bp, Canis familiaris
  misc_feature (1)..(507): n = a or c or g or t
gagcttgacccagaccagcccgcgggcgccattgtcacctttatcaccaaagtcctactgggccagagaaagtgaaggcagaggccacaagctcnnagcccacgccaacaccgcgcacctctcagcaccccacagtcctcacttccccgggcccaggagccccaggagccagccccctccgtcgggagcggggagcccgggacactgctctcctccctgcccccagcctgctaagccaagtggatgggcctgtgagaggaccccgcatgtgcgcagatggcagagacgggcgtgtgaagggtgaggcggcatcggcagttggaccccggggggatctggacagccccgcgtgcagaacgtcaggcctggaggggagacagggcttgccagctccacccagctgcaggtcccagcctggcaggccggggaggcgggcggggagcaaggcactccctcctctgcctcccctccgagcagagggatcagagtgggatcacatgaataggg

SEQ ID NO: 4080 - DNA, 595 bp, Canis familiaris
  misc_feature (1)..(595): n = a or c or g or t
aaagaggaaaaagagaagaaaagacgnnggctnnagaacataaactccttgaaaggaatgggctactctactcatgcagccaagcaggccctgcatnnnnnncagtgggaacctggacgaagccctgaagattcttctcagcaatcctcagatgtggtggttaaatgattcagatcctgaaacgaacaaccagcaagaaagtccttcccaggaaaacattgaccaactggtgtacatgggcttcgacgctgtggtggctgatgctgccttgagagtgttcaggggaaacgtgcagctggcagctcagaccctcgcccacaacggaggaactcttcctcctgacctgcagctcttggtggaagactcttcatcaacgccatccacgtccccttccgactccgcaggtacctctagtgcctcaacagatgaagatatggaaaccgaagctgtcaatgaaatactggaagatattccagaacatgaagaagattatcttgactcaacactggaagatgaagaaattattattgcagagtacttatcttatgtagaaaatataaagtcagcaacaaagaaaaacaataatgagcagaaa

SEQ ID NO: 4081 - DNA, 617 bp, Canis familiaris
  misc_feature (1)..(617): n = a or c or g or t
atgtgttgaatnctgnaatttttcannaggtactgtaagganngnnnncannnnnnncanaatgaaaaggtttttgaaaaggggctccaactttcactttcagatcttttttgctgcagacttatcatttttaaataagactttttttttccactttgagtcaagtcagatgtataggttgattttgaaaagtttcattttcaagaactgaaattcagtactatcaacggttgccatgtcttcccacggccagtatgaactgatcttgaggcttgctttatcctaaaagtcttagcctcaggttctaaattcagtaatttctggaaagagtggaatgatacccaaacggtttcctatcagccttaggtgcattctggattttccaccaaattctttatttttacacatacttgtagggtcacttgcccctggatgcttccatcgttcccatctctccctgactcccccataagcattctcttacacagtaaatgagacagctctgttgtggtagcagataatacagttattctaggattttactctttttgtggtgcaaagaacgtgttataaatcagtgctgtcagcctcgcnnnnntaatttcttcagtagcaaa

SEQ ID NO: 4082 - DNA, 529 bp, Canis familiaris
  misc_feature (1)..(529): n = a or c or g or t
gctgccctgctcaaccatatccatactaaggctcacacaacgantagtttttttgtggtcagactggccttctgtccacttgagcctctgtgacctccaggcaggagctcattttcattttcttttggatcatttgataccactaacacagatgaagattaaatacccagtaagtctctaccattgttaggagcattcctaaccccaaatttctccttgtagttccctgtaagcaggtagatgaggttaggtcaccttgggaaaaccagacctcaggagacaaggatcagattttcagagctcatgaaaaataagtatgaccaaaatctaagcctccaaagcctgtgctcctcccagtatacccaccacatagcagttcccttcaaccctcaaacagaaagatggttgatgcttagtacctacaggtaaagtgtgtgtgtgctggggcaagtggtatcatatagctgagaaaaagacctattgccttcctgttcccctctgtccatgcctgtctacctttctgttggcc

SEQ ID NO: 4083 - DNA, 552 bp, Canis familiaris
  misc_feature (1)..(552): n = a or c or g or t
gtcccngcggtnnaggttacgctcgtcnggtcggggctgatcttcgggccgaggagtcgtctgtgggtttcgtcatttctttctctcaagacggatcccgttttcttgggcgaggggaaggggcccgggaggaggccttagggctggtgccgctgctgaagggaccggagtgcggcttcactgcgtgtggcctgtggcgacgagaacagggttagcgggctgtccacctgtgaaaacgcccccgtgttccgtgatcagaagccatagttgcctagggaggggaacttggcccccctgcccgagggaacgggcgcggcgcggctacgtgctgccgccgttactcctctccctttctgtcccttagcctacgtgcttcccaagctgtacgtgaagctccattactgcgtgagttgtgccattcacagcaaggtagtccggaatcgctctcgtgaagcgcggaaggaccgaacacccccgccccgatttagacccgcgggagccgccccacgacctccaccgaagcccatgtaagcagctgagtccttaacgact

SEQ ID NO: 4084 - DNA, 566 bp, Canis familiaris
  misc_feature (1)..(566): n = a or c or g or t
cagcagaaagatcagnnnngcttgctnnnngatgagaagggtagataaagacagtgtcacctcctcctcacttctctgcatcagaaaggnntcttgctgtgtgttctcatctgccttggggtaacagtgagaacaagcactggtgaagttgtgtcaatgacaggtccccaccctgcttccccatctcctcttcagagctgaagaggagcttaagggccaaatgcccttttcctacacctccagatctgcacatttatcaccactgcattacatttctgtcataaggatattggccattcccgaatttactgtgtaatgaacatcacattattgcagttataatcactgtgtccacagatagcgttaatatgctggtgtctgctggacaaagagttagctcccttttaaactactcccatttcctcctccccaatatctccacctaccctttctgaatgacagtctttaaacaaaatcatgtgtgggtcttggagtccacagcctggtacaagaacccaccaaagaaccagtttgcatggtcaacacttcacagaagagaagcaagg

SEQ ID NO: 4085 - DNA, 455 bp, Canis familiaris
  misc_feature (1)..(455): n = a or c or g or t
aacattgcnagcagactngaaacatggcggctaccntaatgagcttnnagcttttngacttgatagaagttatatgggaaaatccttgaaagatttgggaaagaattctgaatataattcaagtaactgctcctnaagcagttctgaaaacccatatgccactattaaagacccgcctgtacttatccccaaaaactcagagtgtggctatgtggaaatgaagtcaccagcacggagagattccccctatgcagagatcaataactcaacttcagccaacaagaatgtctatgaagttggtgagttcccctaaccaaagaaagaacctaatatgggaattctgggggggaacagttttaaagtctttgagagtacaataacagtttgtataagcatcactgaagacaatggtccatattttcagtgagacctgtgttttcagtgaccatattaat

SEQ ID NO: 4086 - DNA, 521 bp, Canis familiaris
  misc_feature (1)..(521): n = a or c or g or t
cacatagnnatncntnntaccgatcacgnngcttccnnnaaagaaaatgagcnnncnnntngtcccatacctgtagcnngcgacacaggcatgnctgaaaaaaccgtaggttctgtaagtcttgcacanntggaggtggaatcacactattcctcagtacatatggaggcnnaagcatcagttctgttctctgacacctctttgaaaggtcagcctgcnnaattcccggatgcagggggctccaccaaagcagtcggctctgaaaaaccactgcatcttgaagtggagttnactgccctagttcctggcaactcggggcaggaggagtcccagggaagctctgcagcccannagatggagggcaaactcgtgctctctggggaannngctacnnnantgctctcggctgcatctgtaagggcagctggtggtagccccactcctgttccagaaggtcttactgaacnnnagctcgaaccagaactggnagcagcacttgancaaggtttgatgaagccaga

SEQ ID NO: 4087 - DNA, 601 bp, Canis familiaris
  misc_feature (1)..(601): n = a or c or g or t
ttcgggtnntcttatgtttgattatagannangaataagtaaaaagtttgtttatagtgttaataccgacagtgtaaaaagaaaatgtccaaatctctggctggggagacggtagctgtgaaccttggcttctgtacatcttgcctcgggaaaatcggcagttgctgcttccttctgagtaaatttggcgttagataagtgttaacagataaaatatagcggttttatggattggagcggaagtgatgaaaaaaaaaacagccaggaaaccttaaaagtaacatagattgacagaggtacaggtgaatcatcacagtcttaaacaggctaactactcttgttgaaaagattccagttgggtcaaaaatgactctgaacctgaaatgtgatgttcacgtttgtataaaacaaaggattaaaggagtttaaagataatgaaaacctttaagtcatagaaattgaagtaggaagcaacatttgtatcagaatttaagctataacaaagttatacaacacagtgtaggatgtagcatttaagaatctttggtaaataacgcgttcatatgcagactgttcagtatcttgatgtgagtggtaattt

SEQ ID NO: 4088 - DNA, 635 bp, Canis familiaris
  misc_feature (1)..(635): n = a or c or g or t
atttctttgttatgtgagaataaaatatgtaaagcaccttatatgatatcttgcataggatgtactcagtaaatgttagctatttctatgaagaactttagtttagagatatttnacctcagtttctcctgattttaagaaggtaggaaaactttctaatctttatctgaaagtgaggagtcactacttttgatattataggacaatggttatcagttggagtcatttttgtcataaagtctatgcctcaactctaaaagaggcaagacccaggatggagggcatgtaaccactagattctactaaggaacacagtatttatgctgtattgatattggtaggccagattagtctctttcttgttcagatgtaagacataaggaggaagacataaaatggaggggaaaaaggaaaaatgaactatgaagaaggaaggcacctcatttatacatgccccagaagatgctcagctaacactcttctatgcatggagagaaaaatacatatatcattttataaggatgtggatactgctacacagacatttggtaagcttgttaactataataccaaatactcctgaatctgaaagaaaaatagttgaatatgatagtgatataattaaagatgtttaa

SEQ ID NO: 4089 - DNA, 626 bp, Canis familiaris
  misc_feature (1)..(626): n = a or c or g or t
ggtnnnagtgccaantggtattcctccaataccaactccgcacatcgatcttcccactacgcctgccaactcaaatatgccaaatgtcaatcctctgtgcctggctctgctcctgctggccctgcttttactgccattccttatctggtgctgctggcgacattgctgcaaaaagccttgcaaggagctaccagcagtgcagataatacaaagggagcccatgggcagatgtgtacaaccaccttgccccacatttattgtcccttgtgcttgccaaggaggtgggatgagacggatagagggcaaactggacaccttgtgtgactttgttcagtgctgcaatcagatgccgttgctgtggtgtcagcccaggagcaagcgccggtgcttcaacttcagcctccagccctgcaggcgcctgccctgtggccccaggatctgcctcccggccccccaggagtgcttccccctcagcagctgctgctctcggtaccagcccaccccccgcatctgctcccggctgccctccaggatgctgcccccgccccgcgccctctgcggaaccgctctgtcactcccgcccccgtagcccagcctccgacacaccaaatccccaagatnnnaag

SEQ ID NO: 4090 - DNA, 444 bp, Canis familiaris
acatttaccacacaaaggggtttctacctgctggggccacctgttggcctaccccctcccccatcagcacagcacgacagtcctatcaatcgacactcagccaggtccgttcctctgtgacacggtatttgacggtacgggtccctcttgaccctgtgctcgcaagaccttttctttgtcagtttgtagaaaccggtggaccccaggaggctgacgggtgtggtcagaggacaccctcaatgctagggggtgttctggcctcctggggccctgcgcaggccggtgcctgggacagggtagatgccattccagggaggagaaaaaaatactaccaattggctttggcaaaacaatttctgaaaatttttttgctttatgtgggaaataggtataaatctcattttatgctgtattttatatcttagttgtgtttgaaaacgtttt

SEQ ID NO: 4091 - DNA, 516 bp, Canis familiaris
  misc_feature (1)..(516): n = a or c or g or t
agctgcagactnntagggactgtaatattgccttataagcaaagtcagactccagcaatgagaagtaggcaaaccatagtcttagaatatatgggagtacaatcaagtttgggggaagtagtcagatgacctcaggaaataaaaatatgcagccagctgcaactgaagggagtggacactagtgcctacctggaacaaaacccactggctctgtctgtagatgggttggccaaataatctgcaaaccgcgtttctgcctcttctgtgtatccagagaatgctttcagcccttgctctctgtctactataaacccttttctctaaaggccattctacttaagccttccctcccaatgtatccattttatactatatggattcatgttctcatcctttgtgcctttgctcatactgtcgttcctcccctccccccagtcatatccatataagtcccattcatccttcaaggtcccagctcaaatttcaccttttactatggagcttcccagatttctc

SEQ ID NO: 4092 - DNA, 643 bp, Canis familiaris
  misc_feature (1)..(643): n = a or c or g or t
ccgtcaatgtttnnntgaaattaagtngacttnggtgagctnatagntctactttatatccttaaagatatgttttttaaaactccccccaaaaaatctctggtctaaaaactcatctttggggtaaagagttaagtgtccaaaggttacaacagttcatgaggttagagggagctagcctggcacctggactctgcccctccacagctgacagattccagcagaagtgtgtttaaattctccagtagacagtactgggcagggcaagggagggggtagggctgggttattaagatacaggcttctgtattttaaccaatggttgtgggggaggggtgcctggagaaaacaaagtcacttcccttttttgaaacaaaactaaaacttgaaaaaaattatttttgtttagtaaaaatggggtagaattccaatgtccctagccacaagggaccagttccactgagaaatgaacagtggggactcaaaattttgaaaacatttggggaaagggaaaattggctttctgttaattggcaaatgttccagtgggactctgtttttgttgggatgtgttatgttgtatgtacacatatatatggaccagagtctgccgagtttataaggttcaggaaaaaaatggttg

SEQ ID NO: 4093 - DNA, 534 bp, Canis familiaris
  misc_feature (1)..(534): n = a or c or g or t
agccgtgccatccaggccnannatgaccccggnnannaagaggccatcaccaccatcnagnnnntnntccgggcacacttggcacgggtcagacacagtgccgccagtcagagagccacccctgcagcttccaggaggaggagacccgcnctggcacccgcccgccagccgcccgcgccaccctgccctgcttttcctggccaggaggacagtgacatgagcagcggggagactgtggaggggccggcagcagaggatgaagtgctggggccgtgggggccaaggaagccagcctccctgcagccctgctctgggccgttctctcccttaggactgcaacagcaaccacagcccatggggcctccacaagtggatgacagcagctcggaggattcagacgagattgtcgttgctccagctctgcccacaaggaagatggcctccctgccctaggccctggccctgggccctcacacggtgctggctctgccggggagctcagggttcgtaggacgaggcgtgttccgggggaca

SEQ ID NO: 4094 - DNA, 609 bp, Canis familiaris
  misc_feature (1)..(609): n = a or c or g or t
agatacatacannnactttagaaatcaatcagattatccccaccacccaaattttttttaaaaagaaacaacaacaaatgtattagaagcaaagtgataatcacagttctgtcaaagcactagatttgtcagcttgtacctggccccctggttcgacgacccactgaccacaaggatgaatggaacatggccgtcttcctagaggtctctccgtgggagcacatgctcttggggacaccacctgcacagttccgttggctttgatacgcttgcaggccacttgccgactgtggaatccttcaccgcaagacacagagcactctgaccatgcacccgtgagccacctgagaacaaaaactatggcagcttagtgaggactgcaatgtcagatcccagagggagtgtctggaaaaggaaaaattgagcaacagaattaccagattaaaaccgtcattccccaggcttctccagacaaccagaggtatccgtggcacagaaagatgaaggaccctctgtgtggagagccctagggttacatgacatctaagtcatctctcgtagatgtgaaagtagacagctgcttattctagaaatctgcataggtttgag

SEQ ID NO: 4095 - DNA, 546 bp, Canis familiaris
  misc_feature (1)..(546): n = a or c or g or t
tacgtnnngagatcctgcccactcggagcggcaccangcagctgctcgccgatttctcctgcaacaagttccctgcgatcaaggccatgctgtccattgacgtggccgagtgaaggacctgcgtggcccccgtacaaacttgggtaacacggagcaggcagggcgcacctgtggagtgagccccctgcccatgctgtccagcctgggaaacccacaacatcccctcggtggcctggcctggatgcccagcctccggcacacgccctcgcccgcactcccaggctgggctggctccaccggggcctgggacttcacttttgcacattcccatgagccccatggccccctcagccccccagcgcatcagcgctgcagaacagagtggcacctgacccagcggctctctgaatggatccggggagaggacagtccggactgtttgctgatcccaagcctgcagttgggacattcctactcctccctcgggccacagcggagggatggggatgattggctctctgacgtggcactcannnnnttacactc

SEQ ID NO: 4096 - DNA, 583 bp, Canis familiaris
  misc_feature (1)..(583): n = a or c or g or t
aagacttaaaagagctcagacatttttttcttttttttaactggtgaagagaaaaagctgaaaagaaggaatttaccttttttgttccacttgtttgcactgtgtgctgactgnnnnnnngttgcactaactgctggtttttaaaaaatgttttctggggaagggggacaaggaaggaggagaaagaagagaaggggagaaaccctgaaaagagaagaatcttgatgaacacacaagcttgtctacaatttcaaaattctccaacagctgactcttgagtgcatttcaacttctccctaattactcatccgttttttaagcctgaagagcttattacttatttgtgcgaagtgccttatgctatgagaccattcagaatatcatcttttagacacagcccaagaaatcaacaatagtagttctttcctttttttatttttttttccttcctatctttttaaaatttttgtctttttattttgatttcaagttggagtctctctcttccctttttacctgatactcaagcccagggctggaagatgacacgtattagtaatgttaaacaccattctctttttct

SEQ ID NO: 4097 - DNA, 611 bp, Canis familiaris
  misc_feature (1)..(611): n = a or c or g or t
tgcctaganncagtattacagactgaattgtgtgtccccaaaattcatatgttgaagcccttactcccagtaaatgcctcagaatgtgactgtatgtggagatcgggtctttaaagaggcaattaagttaaaatatggcctttgaaaggtagccctcatcaaccctgatgtgttttataagaaaaggaaattagaacatacagagaaaacactggatgtgtgcactgccagaaaagaggcctcgtgaacccaaacctgctgacactttgatctttggactcagagcttctaaaaccaagaaaataaatttctcttgtttaagccacctagtctatactatttttgttatggtaaccctagtaaattaatacagttagaattgttaaatggtaggattatgtacatgttcagcttaattagtaatcctgatatattttttaaagtaatgggattaatttgcagtcctactagcagtgtcctgagaattcttgttctacattcttggccaaacccggtattgtcagactactttttcgagtctggtaggggaaaaaaagaaaactgtcattttaattgcattttcctgacaactaagagttgaatatcttcat

SEQ ID NO: 4098 - DNA, 470 bp, Canis familiaris
  misc_feature (1)..(470): n = a or c or g or t
cagggacatgctctcctctcntgacaaagagacctnnncctatgatctctccgcagtggtcatgcatcnnnnnnaagggtttggctcaggacactacacagcctatngctacaacacagagggaggtttttgggtccactgcaatgactcaaagctgaatgtatgcagtgtcgaggaagtgtgcaaaactcaagcctacatccttttttacactcaaagaacagttcagggcaatgcaagaatttcagaaacccaactccaagctcaggtgcagtccagcaacaacgatgagggcagaccacggcccttccactgaatgggaggcatgtttcaaggactggcttgcttttaaattgttggtgtttatacatctttcctcttacaggaagtaaggtttagtgcaggaacagaatactaagtttgcctcactgggactacagcagaaggtgccagccaggtgactcatgtct

SEQ ID NO: 4099 - DNA, 575 bp, Canis familiaris
  misc_feature (1)..(575): n = a or c or g or t
gcagagnannnagaagtagcatgnnnnagacnagctacnnnnnnggggtcgncatggaacacccactgaagataccccccagggctgggaccctgatcttgttggagagggcatggctgtggcgcccgggatgacggacatgttggccgaacttgctnnaaacctgcccctggagctcactggaagtcatcctttgggtcccaaggaaagttgggcatgaggagttatattgctggaggcacagcgccactaagccccccaagggagtgttgggtgaagctgctggctgctgttgctgatcaccccactgcagaggccaggccctggaggagcaccctcctggcaggagcccggtgctggatggggcaggactgggcagaggggagccacagagacaaggatgccacaggatgtggctgctggagaagttgggtatggtgttggaaccctccaggagagcaccccgggtcaaggaaagaggactcccttttcttcagtgaccctccatcaccctctgctggcagagtctaacgcccgactgcccgctggcaaagaagaaatatttcaagggccta

SEQ ID NO: 4100 - DNA, 444 bp, Canis familiaris
  misc_feature (1)..(444): n = a or c or g or t
gattggactagnnnngcttcccgtaaggaagaagtctattttgctaccccagcaggatgaaggatgattttctcctggccgagccgatgataacctgccaccactcagccaatgagaaactgtcactaccttgaactcttgctttcctccaaatgagaccctcccaaattcctccttttctgtaaggagctgagagattttatcaatctctgatcctatcagtgggggaactgaggctggaaacagcactgacttgcccaggcaagcttctcttggactcctgggtctcctaatctacaggaagttcatgacttttctctttcccttcaatctaattacaaacagtaaccataggatgaagattttgagctaagagaggaaagtgaagttcaaagaccttgttatatcgctaccaaagtgacctnnnnannnctgctcaccact

SEQ ID NO: 4101 - DNA, 639 bp, Canis familiaris
  misc_feature (1)..(639): n = a or c or g or t
tagatgtctttatctcccntggcatcagganncacagatgtctctctgaaactnntnncaattaatatcagtattatgctcaatctgtctcccaactttaancttttcctaccatttattagttcctttttctctttcaaatactcatccattccactggttaaagttagagatcttcctttagcattcttacatcccctactgtgcttggttggggactgcagatcatgaagaaggtattcagtatctgtatgccgacttctttaactcttttggcaacctcatttccaccattgacctctccctgaaactccacacttggttgtctaactgcagatgacttcagaagttgttatgagaatttaatgagtaaagtgtgtgaaagtacctggtatgagccttggtatttagcaggtgcttgacaaacgatgtttggaggggaatctcgcacatgttccccttttgcagctgaatagcaactgtggctttaagaacagaaaaggtatccaaatctcctatgtctccagccctgcccactcctgtgacttttgacccactctcctcctttagcccctatttggggttttttgttggttggttggttgatttggtttagtttttcaggtcaacaatctctga

SEQ ID NO: 4102 - DNA, 526 bp, Canis familiaris
  misc_feature (1)..(526): n = a or c or g or t
aactgtnnaagacactatngaattcataaggagttttcagtcagangcgccantaaagagaggagntgtttcagcacaagatgcttctcttcaggaaagagtgttagctcagnngcgagctgccctgtatggtattcatgacatattctttgtaatggatgcagctgaaagaatgtctattctccatcatgaccgagaagttcgcaaagaaaaaatgctcaggcaaatggacaaaatgaaaagtccacgagtggccctgtcagctgcaacacagaagtctcttgataggaagaagtacatgaaagctgctgaaatgggaatgccaaataagaaatttctggttaaacaaaatccttctgaaacaagagtccttcagccaaaccaaggacagaatgcaccagttcataggctacttagtagacaagggtaagagtgccactcctgggtaaaaacatccaaatcaagattagctttgagcagggaaaataatttagtgctctttacataaaggggaattcttttacaa

SEQ ID NO: 4103 - DNA, 584 bp, Canis familiaris
  misc_feature (1)..(584): n = a or c or g or t
tggcgttcttatcatatgggacagaatttttgggacattcnnnnnagaaaatgaaaaagttgtatatggtctaacacatcccataaatacatttgaaccattccaggtgcagtttcaccatttagtttacatatggactacattctgggccacacctggattcttcaataagttttctgtcatatttaaaggaccaggatggggtccaggtaaaccaagacttggactaagtgaagaaatcccagaggtcacggggaaagaagttcccttctcatcatctgtgtcccatctcttaaagatatatgcagttgtgcagtttgctttgatgctagcattttatgaagagacctttgcagataaagctgcactatcacaggccaccctccttttgagggtttgcttcattatcctaacattgacttccattggatttcttctagatcaaagacctaaggcagctgttctggaaactttccggtgcttggtattcctaatgttgtacagaattggtcatctgaagcctttgattccttccttgtcatttgcttttgaggtaacctgggtggctcagtggttgagcatct

SEQ ID NO: 4104 - DNA, 646 bp, Canis familiaris
  misc_feature (1)..(646): n = a or c or g or t
tgtgttnnntgattttctgttccttttctctgtggcaggctctgagtctaacagcagcacgggctcttcggggnctctgccccgcacccacgcccccctgcagagcacacccctggctgccagcgtggccactggctctcctagctgtgtgccctatccggagagtggagcagggggccaagcagcccccagcaccagctacatcctccttccacttgaggctgcaacaggcatcccacccggaagcatccttctgaatccgcatacaggccagcccttcgtgaatcctgatggaacccctgcaatatacaacccccccaccagccagcagtcataccaacagccaattatactacctaaccaggcaggtcaaggatcactcccagccactggaatgcctgtttactgtaacgtcacaccaccgacccctcagaacaaccttaggctgattggtccacactgcccttccagcactgtccctgtgatgtcggctagctgcaggacaaactgtgcaagtatgagcaacactgggtggcaggtcaaattctgagtgctctggctgtggtacatttgttgagtactcgtggcctttaagggaagagcaaggtgtgaaactggctgaggacttaagtattcactcaacact

SEQ ID NO: 4105 - DNA, 627 bp, Canis familiaris
atgtgagcgtccaggatctgttagataccacaaaccactgcctgcaccccactcctgcccacaagctcagaggcgccctgagctccccttggcgtccaagccgcgcaggctgcggagtgcgccgagctctggccctctggctggacgttcacgtcagatcccttgcagcctgtgcctttccttgcatcctccctcatttggcctcctgccacatgcatctgtcacagccgtagtgtggtggacagagaggtcccgtggcccagcccaggcctttggccacatttgcacggaatgtcctccctacagaagctgattttggactgtagtcatgaaggaaatcgggataaacaggcttttccttttccggacaattctttgagatggaatctagtcctaaaggcaagatgcttagtttgtgcccggaccctgctgcctcatgggtgcgggcccctgcaccgggaggtgtcggtgacaatcagcccgaccctccgcggcacatccatgagttgatgtgactcgggacattccgcgtcgtcccagggccctaacctttaaacacagctttagttttgggaaaccgaggccgaagaacaaaatgcctccagaacgatagtttgaattcagctg

SEQ ID NO: 4106 - DNA, 451 bp, Canis familiaris
  misc_feature (1)..(451): n = a or c or g or t
gcccntggtgggggnntgggacgnnngagtgtccccaggctctgccgccgccggnnaagccaggcttgacccatgccgggaggatgtgctggccccacagaagggggccagcacccagcaggccctcagggcagcgcccttctccagggatctcctggtgggcattgggatgtcggagagaatgtgacttgtggccacaccatggatacattatgggacttggcaggtcttaggatcttgtgcctggaaatagccctaggtggctgaggaagcagagcaagggtgccagattgttctttggcagggaccagggcccaaggccccagggttggaaggagaccaagggggcagctgccctggagggacaccagcgcttcctctttgacccagctcctcccctgtgctgttccgtgttttcctgccagcgtctgccaccaaagttgctgccccg

SEQ ID NO: 4107 - DNA, 469 bp, Canis familiaris
  misc_feature (1)..(469): n = a or c or g or t
ggtcccctccttgttcacaaagggcaggaggagcggggcccgaggtggtgccggctgaggggccggaacgcagcatccnggccancgacggggtcnnnnagtgcagaaccacacggccgcannngccctgccccccgtgtggtgtccnnngctgtatancagcctgggtggtggggcngannngagacacccacccctcccctggggnctcagtnnngggtggaggtgagatgttccgggggccatcgggggggccccgctcagcggaggaggggagtgagccgagggccagactggcagagggatttgggaggnnngggccgcagagtggggggcactgggggtattcctttggacctacctcagggaagtggggggtctcaggggctgactgacgtgggcaagcacttcgcggcacgcctggtacagnnnnnnggcccagaagttaaaggtagctaatattataata

SEQ ID NO: 4108 - DNA, 526 bp, Canis familiaris
  misc_feature (1)..(526): n = a or c or g or t
tcgtcagaagnacagtagtannnnaatgctacaacacaatgncnacatcattcacctcacttcatctcctcacataggcattttctcatatcaccataagaagggtataaaccacatcttctttgtccattgannnnncttaggatgttcccgtatcttgcctatncttccggatggttgttgctgaagggcgtcttgctatcataagaaccacaagggtcagtccagtggcaacattggtttggaaaagcgtctgtgggaagctcactgnagcccaggactttgtctggatgcctacaatggaacattatgtctggtcancnagtggtcctttatcttccaggtagaaacnnnnnnngcctggagaagaaaatttacttcttttcctgattaaagaaaaggattatggatgatcattacggaaaacaggaaggaggaggaggagaaaagcaaancacacatacaagaaagcaagctcatgatcctgccaaacagtcattgttaacattttgactgattttcacct

SEQ ID NO: 4109 - DNA, 99 bp, Canis familiaris
cacgctattatcttcctgcctctacctaaatcatctactcaccaccctgtaagctttttttttttttttttaattaatctgcctagggacacctgcagt

SEQ ID NO: 4110 - DNA, 565 bp, Canis familiaris
  misc_feature (1)..(565): n = a or c or g or t
cttgatcatgaaccacttatttatgtctatctctaagganntaaaagcactttatgtagtttttannnaatcttaagatctggaaaaggtgactaagaggtctgtttccccatatccagttgtggaaataagtgcatagatgtaaattggagttttaaggaacccaattcccaatttactaggtgtgactgctgaattatagannagggtcttagttgaaactttggttcggggctgtcagggcttagggagcccaagtgctttagggaagggtgggtggtttttctagggagaggaggcacgtgttctaagtgctgactagttgcatagttcaggcaagtcctccaaagtggaaagggaggggctgcttggaaactggctctcagcaacttgtcttatgcttctctcagggaaaaacatgcaatcctctagtgtccatgtacactctatttggggtaaacaccttggttctggttagacagctaatgctgttgacagctgtgccaggaagagttaggaccaactacaaattaatgtgggctgtaaaatgtagtatgtttcccta

SEQ ID NO: 4111 - DNA, 611 bp, Canis familiaris
  misc_feature (1)..(611): n = a or c or g or t
agtcagcattnnnnncttccctgttcagttctttanngtcnnnngtcccagctcaccaaagccctgagtaggggccagagcagcagtgccctgtgctcctcccctgccactcccacccagaactcgctcacagaggcttgcacatgtctctctctcccacacgcacaccccctgccctgtccctgtggtcccggcccttggctatccagggtgaggagctgctagtcacatccagatggagtggagttcctcactttcacatctgctcctcatcttcccttatcaaacctcatacccactagcctttgcccatctatgggccagtggcacctcccctaggtgcctcagggtccctgccttgggactcggcaccctcttgggtggtttcgttgtgtcctggttctgtgtgaggaacactgggccagcatggaccctgggctggcagcaggtctgtttccttcccttctgcctcaggcagcatggccctgggtgtcaggaagaactgactgcagagccctccgagaccctggtgcccagcccacccgaccaggcccctttcctggaagtatgaggccaatcagacaggaagcacttggttnnnnnnntatgca

SEQ ID NO: 4112 - DNA, 575 bp, Canis familiaris
aaatctatgtaaggaatagggacagtgtaatcacagagactccggagaatgacggaaagtgctgattctgaaatgtattatataatgaaaactggcagggaaagctaccaggtagggagatgtgagatcgtatttgtaccacagcagatttcctatgcaagtgaggacaagtttttcgttttttattttggaaggagaaggaaaagtctcttctgtagaggatcagtttaagaaatttatgatgaatcctcagtggaattatatgccaaggttattctttaaaaatcaagataggtaattgatatgtttttttttgtcaagcatcacagattgtgagatatttaacaaaactgttacaggtttccttcgaagttcaaacaccgtatatacacattaccaatttcttgttttagcccttcatcctaaatgggtaggaaactgttcataacctttaggaggtttatcactagtgatttcaacttcagtatcttaaacactctaatatttttcttttattatcctgagtctgtaactaaatttattctgtcttcaaatttttacccagtacgcctctc

SEQ ID NO: 4113 - DNA, 122 bp, Canis familiaris
  misc_feature (1)..(122): n = a or c or g or t
tcacatttgagccttaacaggtagaaaaggtactctataaacacatttgagaaataaaaatatatataaagtaccaagaggctcagtcacttnnnnnaagaagtctcaaaactttatgagag

SEQ ID NO: 4114 - DNA, 542 bp, Canis familiaris
  misc_feature (1)..(542): n = a or c or g or t
ccaaacatnnctgacccggtaacgtcgctggatcnctgggtagaactgttcgctcttgcaggggggcatgggggactcccacggggagcgttggctgagaagatgaaaggattctggaatatcccacgggatttccttccctctcctgcctgccttcccctcttccctgcccctctaaccttttgctgagtggggcggcaccactgacatttctgggcaacgtcggcgtcgctgtcaagttcctgtactactggcttttgattttcattttggctaaccatggatcttcttataggaagtttgatctgaggggatgaatcattatgaatcagccgctggggcctggtgctttccaggaccctcgagttgggaggaggacgtagtcaaggcttccaggtagctgaaggggcagtgactcagttgactgctcctaccacccggacgcctcccctgacccggtcaggggtcagggcaggagtggctgaatcgagacaggaaaactgttgnnncnagtctttccagagaagtttcttaatcagata

SEQ ID NO: 4115 - DNA, 182 bp, Canis familiaris
ccacccccccccaccccgggcccctaggcctgccttatcacggggtcctgttccagaaggttccccagcacaagcatgggaaccctgcgcgaggcgcagtccttgggcctggctggcagagcgtggaggcggtccccggggccgaggccgagcacgtgccgctcgcacagcgagacactcag

SEQ ID NO: 4116 - DNA, 553 bp, Canis familiaris
  misc_feature (1)..(553): n = a or c or g or t
tgctgccatgctatgttatcaatagctaaaaaataataaaaaaaactaccacagaaaacaagaatatcttcatttgctgacatctgaaagaggtgattgctgcatctctctggaattactgcctggttgaatttggcaatcaagctcttcacaaaatgcccttttgctaaacaaaattgctattttgaaatttgcctaaaagcattaagttctggttttatggttgtttttgtaagctgttaaatatcagatgtatggattggccctgctatttattaggaattagactgctttctgtatttctggtatttaggtgaagaactagattagacaatcaagctgaacaacattttggcattattttgatagcagaattaatatgctacatttcctaatatcaaaccctgtactcttgagtatcagagtatctgagatcctattggccactttatgattttgagagagaaaaaaaaagctgaaaattggagggtactgtcaagttctaaatttatctggattttttgaaaggcagnnnnnnaataacttggctatt

SEQ ID NO: 4117 - DNA, 380 bp, Canis familiaris
  misc_feature (1)..(380): n = a or c or g or t
atccaattctnnggncttaattttagtcttcaatatcctttttccctttcacagttaacatacttaattgacttaggcaggcctgcaaaaagatatgctggaaccactgttccttgcctttcaggacttgatcatttttcttaccctcatcagtaaggcccaaggtgaacaaagcatattatagggcacagcatagaagtagcttagcttagaaatagatcttatccttgccctccagaaacttacactgtggttgaaaattctgtatatagttggtgttcaattttgttacctttgtacaacctcattttcaagttaggtccctttttagtctctgaatgtggtcannntgtgnnntttaatgtcacttttgagtgatt

SEQ ID NO: 4118 - DNA, 505 bp, Canis familiaris
  misc_feature (1)..(505): n = a or c or g or t
agctgctggacgacctccgcgcnctggagcgtgatgtgtagggatgcttggtgtgtcccttcccctcccccaggcccccactttgtgttctgaaaccatcactgtgcgccatgtgttctagatggtagaatgtgagtgctcgagagggacgtgaacgtgtttgtatccacacaacttcctggaagtgaagaaccacagaacttccttcctgtgggtggctggctagcctggcccaggggcagtcttccagaaaggcccatgtcctgcacctagaagagggccgtcttagagcggctcctgctgctcaggagactttctgacacctgtgggttccccatacagagaggatgaaataaccatctgccccattggtcagcatttatctgagatacattttttttgaaaaacaattcattctctctctagttataattaataccctaaaatgcaagtttacctttaaaccttttggtgaacctgctatttcaggtgacattggacattt

SEQ ID NO: 4119 - DNA, 513 bp, Canis familiaris
  misc_feature (1)..(513): n = a or c or g or t
atanntttattgtaatgtacaaagnncaaaacaaagagcaatttagttttctaattctgaggacatggcattggaaagttctctctctctctctctctctctctctctctctctctctccctctctttctctctttttcttacagcacatgagttctggtcctaaaatataaaatctggagaattaaacaaggattgggagggtgaacatggaccctacagttcttccccgagacagcctcttctctgggcagctctcaggagcttccagaatccatatgactccctgcagcatggacggagaaggctaggaaacagatgctcctggtttttttgtgatgaccaagccaattacttttgccaaattgttctgngnttttccctgattgggatgaattgtgaaatttataccaagcaattccggaagcaggctgcttcctgcaggtgtgaatgcaccggctcctgtgctaacccctgagcccgtcactgccacccaatggggcaaggaagcaaa

SEQ ID NO: 4120 - DNA, 373 bp, Canis familiaris
  misc_feature (1)..(373): n = a or c or g or t
accagaaggacatctgatcagttcactccntggctcagaagctcctgnnnnctccctgctgnnnctaagatgcaactttagcntcctagcatcatcatccaacctctttctgttcaccttcnnnttggtgtcactccaaaaatcatgcccttnnnnngccttgtgctgcttgcatccaaatcatctaaatcatctcaaagtagctctggtannnnnnnnngctttccnnctggtactgttgtgtgtttccatggcgttgccctttatntagcannnnnctccccaccaagctatgttttccaaaggccccgatggagtatgttcatttttgtnnntcaaaaaaatgnntgccacatagctgggagttgtcatg

SEQ ID NO: 4121 - DNA, 105 bp, Canis familiaris
  misc_feature (1)..(105): n = a or c or g or t
gggggangnnnnccagaggccnnnnnngcagnnnnggtggccaggggccccccccttggannnnnnnggggcnnngnnnnngnnnttaagggtccagcnggtccg

SEQ ID NO: 4122 - DNA, 590 bp, Canis familiaris
  misc_feature (1)..(590): n = a or c or g or t
tatcagtaanngntatgttttcatatccnactgggcattttgaatannatannnnnnnnnnnncatgnnnnnnagtcatggccatgtcagtaaaagcannnnnnngcatagnnnanatagnnnntgtatcttatgcactgntgattgcgtagaaagtaaaatagaggctctggaagggaccgtcttgtcatcggtgccagnnngagcggttatgctcgctagagctggatgcagccagagggtggaatggagaggctggctctcagcaactgccctttttnnntcaaggnagangaaaggctgtgtcttttataagagatgctcaagannnantncacnnnnnnnatactataatannnagtaaaaatnnnatnnnagtagaanagtatctcttgataggggaaaatgtttgtcatctattagtgaaaagtaataaccttcatagcagtgtgcccagaatgacatcatttttgtaaaaaactatagtgtgtgtattaatatggacccacgtacaccttaataatgaaatgataaaatggttatttttagtgtgagttttttttgtgcccttnnnnattntngactttcct

SEQ ID NO: 4123 - DNA, 555 bp, Canis familiaris
  misc_feature (1)..(555): n = a or c or g or t
acatgatagatnnagatgcagatgatatggaacggttcatggaggagatgagagagctaaggaggaaaattagggagcttcagttgaggtacagttngcgcattcttataggggatccccctcaccatgaccatcatgatgagttttgccttatgccttgaatgctgaggttagtaataataaactccctgcctcccaaagttgcattttctttatgtaccctttactgtgaatctgtgatgttctgtaatttttctgattggagaattcatttgacttagtctgaaagtttttctgtcagcgggggagtttcaccaacttgcatggaaagatgtttagtacatagtgtgaaggtaataaagcagtttaaaaaccagtctataaatacactatctcatttaaaagcatgcataatatatgtgtgtgtatcagaatgtttcttctttaacttttcttgattacttattttttctcatttttccaaaatgaatacatatgtattatacatgtcaggcaaaaagtaagaggcaaagaacttgccaattgacttataaa

SEQ ID NO: 4124 - DNA, 643 bp, Canis familiaris
  misc_feature (1)..(643): n = a or c or g or t
ccaggctctctcttgctttactgtattgnnnagctccacccctcctgacctgaggtgggggtggnngtggggtgccagcccaatgatggggaagatgggactcctccagcttggctcttcccactctttcatcgtcatnnaaacttgtatcccatttgcccagggnnntgccactcctggttgccatggaaatagcagccaatggacacctcccgaagccagtgctaaggctggaaaaggcccctcttagttgccatgggaacttagtaacagactcttggcccgcccctcctccagggcgggggcggggcttggggagccaggggggaggagttgggaccagatcccgcccctcagcccaggcctcccgggggagccgggttgtaccatgtaggggaggggggaatctatccacatacctcaggtaacagggaggtgcgagggtggggggaggggctgggcggaccaaaggccggaggggagggggttctgggtattgcgaaaggcttgaggatggggccgctggagggagggggaggaggcagcccggcggggtcaagtggggggtcccagccgggctgggcccctgggccccgggtctgtacaatacggtttgctataaaactcaaaatcttccagccan

SEQ ID NO: 4125 - DNA, 53 bp, Canis familiaris
  misc_feature (1)..(53): n = a or c or g or t
agagaaacccaagatcaactacatcatcgggaaggacacatgggtggnnntgt

SEQ ID NO: 4126 - DNA, 511 bp, Canis familiaris
  misc_feature (1)..(511): n = a or c or g or t
gtcatcaaccannnnnntggggtacccaccaatcccccttccaatccccagggctctgatcccaaagctcccaggcttagaaccctttagggtnntagcatttcagagcaacctgcttgcccctctagggcaacaatcctctcattttaaagatggggccagtagaggcttagagatcatccctcactctggctccaagcactatttctcctcttcccacttaggcgcctacctctagattctcttcccacctctccctcaaaagaaatgctcagaccttgtctagttatttataaaactgtatatcctttccctcacttacctcctatctctgcttttttaccctatccatcccactctgaatttacctcctactcaattctcttgtgtctgttaattgcaagacagggaaagtttttgctggatccctttcctgctgggtggacactgtagtccaggactgaggtccaagcccagggtgagggaaggcttgctgagggctcaccatctc

SEQ ID NO: 4127 - DNA, 595 bp, Canis familiaris
  misc_feature (1)..(595): n = a or c or g or t
atatgagacgnctgcgcagaacaaacagcaagagctgcgacnngaggcagagcgcaatgttcggcangaactggagagccggtgccgggaattggaagaaactatcagacacctaaagaaatgtaaagaggcaacagagcataagctgaaagaagccagtgtggaatcagaacagataacagctaacctggaagaagctcatcgctggtttaagtgcaggtttgatggcctccaacttgagctgacaaaaaaccggttgcaaaggcttccccgagaagacaggtggctggaagaggaccaaggtaacaggcacgatattgcgtccagccagtctgttctacatcgatgggaaaataaacagaatcttaaacttatgcccaagaagtgtcaatctgaactagagagaaagtgacgtccttgacaaaggcgtgccatctatagccgcgatttccngagcccagcaaccagagctggccttttccacagtcatcagaacatgaagtctttgatgtgggctgaagattttggacttgagtttatcattttatgagttttctgataccagtacagaaccaccccaccttttttgtccttt

SEQ ID NO: 4128 - DNA, 591 bp, Canis familiaris
  misc_feature (1)..(591): n = a or c or g or t
gaagaggtgcagagtccagtggtgacatngatgttcttttgacccatccaagcttnannnctgaatcagccaaacagccaaaactgttacatcgtgttgtggaacagttacagaaggtccattttattacagatactctgtcaaaaggagaaacaaagttcatgggtgtttgccagcttcccagtaaaaatgatgaaaaggagtatccacacaggagaattgatataaggttgatacccaaggatcagtattactgtggtgttctctatttcactgggagtgatattttcaataagaatatgagagctcatgccctagaaaaaggcttcacaatcaatgagtacacaatccgtcccttgggagttactggagttgctggagagcctctgccagtggatagtgagaaagacatctttgactacatccagtggaaataccgagaacccaaggatcggagtgaatgaggccattcttctcaggctagcccagctcagttggagtcttaatttatttcttaacctttgctatgtaagggtctttggtgtttttaaatgattgtttcttcttcatgctttagcttgcactgtagtc

SEQ ID NO: 4129 - DNA, 561 bp, Canis familiaris
  misc_feature (1)..(561): n = a or c or g or t
tctacctttcactgtgtctgcttctgtcactacannnccacttngctaaaacagaaatgtnngccgagacaactaactgtgcctttaaatncngagtggggtgcngnctnntgcaaacagattcactgaggcagtgaggtgccagagctaatttgaacccgtggtgcttggttttgctggggatgctttaacgtgactttgtacgatcatatgctggattttgcattttctttataaagcatctatttttttcctgatactgtatctttgccgttctaataatgctgggtttttgattgattggatttgatttcctttgtacttccacagtgaacagttgatttaggtagatgccctttacccaggtgatccccataattagttgtaacacctcccctacccccttccctcagagtagacccccattagctttttctcactttgagagctcttcattaataatttcttttccacagctaacacaactgtttttaagttatgaagttaagtttttaacacctaaatgcgcattctaacaagttttcaccctccttcagcgtt

SEQ ID NO: 4130 - DNA, 503 bp, Canis familiaris
  misc_feature (1)..(503): n = a or c or g or t
tgattcaatnngcangagtcccagactcactcccaaactcaagcctgccaggctccccttctnctctnctctaggtccctccagtnnnaangacctatagagacaagcccacctttgggtctggtgtgccatctgcttggttgcctnncagcccaggccctggtgtgggggagggaagagggctagaagaagtcatacaggacagagggctggggagcaggggcccatctctgaataggaagaaagaatgcacagttggactgcatgtgcctgatggagaagaggacacacatgctggggggtaaaggatttgcctggggtcnnncatccttccctgtttgtggtcatagnnnnaaagtcatcaggatgactccatccttccagtggttcaccgcctgtggctnngcctcccttcctatacctccctactaccctccaggcatttctggtttgactggatagaaggnnncttagggacctnccagttggccatgatgtcttgt

SEQ ID NO: 4131 - DNA, 593 bp, Canis familiaris
  misc_feature (1)..(593): n = a or c or g or t
tccctcaaggatggctacgtgcccccaaagagccgnnagctgagggtcaaccgaggcctnnataccgggcgcaggaggatagtgccagaggccagtgggacccccagctcggtgagaagtggatggggacctgggagtcaggacgggaagacagatagggcaggggctgctactgaggtggtcactgtcttactggaaggaggctgatgtttgggccgtgctacattcacattggggatcctctgcgggtaatcctgaggccccagagaacaggtttcatgtttactggcttgcagctgtctgggcagcagctgactgagagacagaagggccaagccctggggctcctggtagaggggaaggggggtgcctgcatgaggggagcccagggtggagctggtactgatgtggcgctggatcccccaggatgccatatcccgcctggaggaggagatgaggaagctccaagccacagtgcaggagctacagaagcgcttggataggctggaggagacagtccaggccaagtagaggaccctagggcctcagctggggccacggtatcacctccctccctccattcacacccttct

SEQ ID NO: 4132 - DNA, 621 bp, Canis familiaris
  misc_feature (1)..(621): n = a or c or g or t
acgcgnngctnctcaacagaagctgtnncgaggtgataggggctcgannagactgcgagtgtgttggtcggtgtcntcccatgttagacgagggtgaccattccctccctgcagacaggatgatctcacttttttttccccctttttcattaataaacatcttatcttgagaaataggagggctttttaagagataaaaatgtaatctgatgctgcagagattttgtgtgaaggtctctcataagccaccaatcttgccactgctggcttgtcagagcaggctggtactgagcgtatttcatctgctgcttcagaaatgacttaccttttcaactcttgatgttgaatttttttcttaagagcttgcatcaggacctatttaagaccatgtgtcctaactaagctacaaagcaacttacagggtattttaaaccttgcttagtctgtccttctgtgacatttccttttggacgccattgagcttgaagaccagtcatggagaaatgttaccttactttgaacagatttagtgtcattcaagaccgttggcagtgttaaacgttacctgtgaacttcaactgtgtgatagtcaccggcttttgtattgttctcttacatgga

SEQ ID NO: 4133 - DNA, 579 bp, Canis familiaris
  misc_feature (1)..(579): n = a or c or g or t
acaatgagannagcaggtgcagtgattcatactcactctaaagctgctgtcatnnccacccttctctttccaggacgagagtttaaaattacacatcaagagatgatcaaaggaataaggaaatgtacttcgggagggtattataggtatgatgatatgttagtggtaccaattattgagaatacanntgaggagaaagacctcaaagaacgaatggctcgtgcgataaatgaatacccagactcctgcgcggtcctggtcaggcgtcatggggtgtatgtctggggagaaacctgggagaaggctaaaaccatgtgtgagtgttacgactatttgtttgatattgccgtatcaatgaagaaagtagggctggatcctacacaacttccagttggagaaaatggaattgtataagccaaatgaaagtttaatgatatacacaaagttgatcttaatnnntactcaaatgaaacttgactattctttttaatgaattgaacatttccatgatactactaacgtgtcactactgaagatgaccaccctgactctcttctgacattggatgatatttgctta

SEQ ID NO: 4134 - DNA, 537 bp, Canis familiaris
  misc_feature (1)..(537): n = a or c or g or t
cgctgnnntaccgggtnctagatgctctnnnnntccacttcctgggcttccggacagagaggcgtgaactgcntgtgctctggcancagtgnntcctgactttggtccagcgctacaaggcagacctggccacagatcagaaagacgccctcttnnaactgctccgactgcagccgcatccgcagctgtcccccgagatcaggcgtgagctccagggcgcagtcccccgagatgtagaagatgttcctctcgccatggagtgaggaaagttacttgtcctggtctgaagggcatggggggctggtcaccaggattccctgttggtggcactgagctcttaacaactgaagtctcagatcaggacagtcagtgagaggggtcacaggcatctgtgactcctgtccctgacagggaggactgagggtctgctggctccctgttcattctaggtcttcatccctgctcagttctgagacctgacttgagaggccacactccagtgnnncactccctggctggggcttggaataggttctt

SEQ ID NO: 4135 - DNA, 650 bp, Canis familiaris
  misc_feature (1)..(650): n = a or c or g or t
gctcagggaagggcacccagtgtgagaagattgtgcagaagtacggctacacccacctctccaccggggannnnnngagggccgaggtcagctcaggctcnnnnnnnnnnnngatgctgtcggaaatcannnnnnagnnnnagctnntgncactnnngacagtgctnnacatgctccgagatgccatggtnnncaaggtagatacttccaaaggcttcctgatcgatggctaccctcgggaggtacagcagggagaggagtttgagcggaggattggacagcccacgctgctgctgtatgtggacgcaggcccagagaccatgacccagcggctcctgaagcgtggagagaccagcgggcgagtggatgacaatgaggagaccatcaagaagcggttggagacctactacaaggccacagaacctgtcattgccttttatgagaaacgtggcatcgtacgcaaggtcaatgctgaaggctccgtggacaatgtcttctcccaagtctgcacccacctggatgccctcaagtagcagtcccagagccccttccccagccgagccccgccccacccctgtcctgcctgaggctgtcctggcctgggctcagnnnnnccaccctgcccggctggagcacagacagaggaagcc

SEQ ID NO: 4136 - DNA, 402 bp, Canis familiaris
  misc_feature (1)..(402): n = a or c or g or t
gctcttatttagagaaggtaaaattctctttggtaaagaatgtttgaacagcttttatcctaatatggtatgttacataaagagcaaacagtnnaagtaagttcatattaaaatactggcagaaatgaatgttttttaaaaaaattctaagcctaaacctacccagtgctgcctgccatctaaaataaagggaaagctaaaagcaaaagaannnnaaacaaaaccccaaaaccgaaagacgcttgttttgtttctgatattttaacggtttttaaaaaattaaattcaatttgctgggcacacttgggtggctcagttggttgagcatctgcctttggctcaggtcatgatctcagggtcctgggatcgagtcctacagggagcctgcttctctctctgncg

SEQ ID NO: 4137 - DNA, 671 bp, Canis familiaris
  misc_feature (1)..(671): n = a or c or g or t
catctacttccacgaccagaacccagatncagnnctgcgtactctgcaccagggggacagcctggagtgcatngccatgactgtgcagatcctactgaagctggaccgcctggatcttgctaggaaggagctgaagaaaatgcaggaccaggacgaggatgcgaccctcactcagctggccactgcgtgggtcaatctggctgtgggtggcgagaagctgcaggatgcctactacatctttcaggaaatggctgacaagtgctcatccaccctgctgctgctcaacgggcaggnnncctgccacatggcccagggccgatgggaggctgccgaaggggtgctccaggaggctctggacaaggacagtggccacccagagacactgatcaacctcatcgtcctgtcacagcacctgggcaagccacccgaggtgacaaaccgctacctgtcccagctgaaggacgcacacaggtcccacccctttatcaaggagtaccaggccaaggagaacgactttgaccggctggtgctgcagtatgctcccagcgcctgaggccggctgcaggctggttcccaagcccgggaacagcgaggctgggcatgctgcccccactgccaggcacccatcctcttgtgctcttggttgctctggctagaggtgaaggctcggg

SEQ ID NO: 4138 - DNA, 584 bp, Canis familiaris
  misc_feature (1)..(584): n = a or c or g or t
cctcaacataataatnnagcccaccgaatattcagaattaagtgaatttgtgtctagagcagaagaaagaagagatctattgatgtttttccgaagnctacgcttttttgtggagtggtgtgactatcgtaagcgcacatttcaacacttgaaggacaagtacccggaagtcgtgcacctcccagagggggccgcgtccagctgcatgggggtccggagcgcctgccagccagggttcgagctggtcgtcgtttggaggatgcacatggaggaagaagggaaggtttttccgaagctggatcttctccccaaagtgccacagcaagccctggagctagaccagcaccacatcctggagactgcgcccctccgcttcagaaccctgctgggtgtgctgggcatcgaagctgctctagaaagcctgataacatctctgtgcccagcagacaaccagtttccggcaaacacgcaggtgtgtgatttcattccacataaagagttaccggcttccagagaaaaaccacgcctttaggacacagtgtctgtgcagtttcggcacatgatatataagctgacgggatgtg

SEQ ID NO: 4139 - DNA, 565 bp, Canis familiaris
  misc_feature (1)..(565): n = a or c or g or t
ctgcagnaacaagtactatnnnngtnggctctccactgaaggcttccgcaacgcnctctatcagtacctgcacaacggtctggacctgaggcgtgacctttttgagcccatcctgagcaaactgcggggcctgaaagctgtgctggagcggcaagcctcctaccgcttctactccagctccctgctggtcatctacgatggcagggagtgccgggcagagtccttcctggatcgccgggccgagatgcgtctcaagcacctggatacagggctccctgagggggcgccgccctgtggccctagcaccagccctaatagcaccagccctgaggccggcccctcctctccacccaaggtggatgtccgcatgatcgactttgcacacagcacattcaagggcttccgggatgaccccaccgtgcatgacgggccggatcgaggctatgtgtttggcctagagaacctcatcagcatcatggaacagatgcgggacgagaaccagtaggcccagccctgggccccccaaaccccttcctctccacccgcaggcagggaccattgctct

SEQ ID NO: 4140 - DNA, 523 bp, Canis familiaris
  misc_feature (1)..(523): n = a or c or g or t
cacgagcaagaatnctcaggccctatgnnncgcctctctacccctcannngatnnnngnnnntccctnntnngccnctgnngaagactgggctggtcctaccaacccagacaacaggttagannaggtannagcccnnngcaccaggcagctgcccaagactgtgccctggcacctggcaccccccacaagactcctcacccaccccacatctcngcagacagatgtgtgtggttccccaccaggtgcctcccactaggaccaagatggctccaaaggaggtaaggagaacctttggcaggtgcttgaggacactgactacccagaaagtggacaaaggagggacgcggacacacacacacacacacacacacaccccgccccaccccaatcggggcctgtcagagccggagggtcctgacagcacttgggttctcatagccggctgaggaagggggggtgtggtaacccaacagaaggagggggcccctacccaggtgtttctcaacaaggccacaaaaagc

SEQ ID NO: 4141 - DNA, 595 bp, Canis familiaris
  misc_feature (1)..(595): n = a or c or g or t
acctgctggggacatacaccgtgaccaagtttgccctcccccacctgcggaagagccaggggaatattatcaacatctccagtctggtgggggccatcggccaggtccaggcagttccctatgtggccaccaagggggcagtaacagccatgaccaaagctttggccctggatgagagtcgatatggcgtccgggtcaactgcatctccccaggaaacatctggaccccaatgtgggaggggctggcagccttaacgcctgaccccgctgccacagtcttacagggcacaatgaaccagcccctgggccgcctgggccagccagctgaggtgggggctgctgccgtgttcctggcctctgaagccaccttctgcaccgggattgagctgcttgtgaccgggggtgcagagctggggtatgggcagaaggccatgaagggcaccctcgtggaggtccccaccatcccttcctgattcccacatttccacttgggccttcctaagattctcacccacaaattcagtctcccagatttcagcttctcccatcctgccnnnnnggtgcagaccccannnnnagacattaagcccactta

SEQ ID NO: 4142 - DNA, 490 bp, Canis familiaris
  misc_feature (1)..(490): n = a or c or g or t
gacctacaatacaatacatgcagcataccatgggagattagtgatagtactctagtttacagccggagaaagtgaagtttagaccagaatatagtgaattgaaggtataagtgtaatgcggacaaagaaaccaggctttaccagttgtttggtacaaacctagtagagcagctcatagaaaggctagtagatcattgactgaacagttttgtctgaattaagggaggtcatcaccctgctaccactctgtgctggtcataccacctcaagttgtctccttctagtgtacatttacaaatatgcannnnnnnnnnctgaagatttatacatgttataaaggaaataaaagcaaagaggaagaactttggatttcttatttgtagtcagcaattctttaaaaaagtagaaagtatactgacctgaaacataaaagtatgtgccatttcaaatatttcgtttgcactttaatgaaattatgtattttctgtag

SEQ ID NO: 4143 - DNA, 596 bp, Canis familiaris
  misc_feature (1)..(596): n = a or c or g or t
accacctgtgtggtnaccggtataacttannnnnnatggnancttacaactgtaccggctngaacaaatataccacatgccntcctcggctacctaannnggccggaatngagacagcttgtcgaggaatgcctttgcgatgccctcctaagccggaacgactcaatgcctacgagcgcgaggtggtggtgaacatgttgaactcgctgtcacggaaccagccactgccgcaaatcacttcccgatgcgggtgcggggacccgctgcccggtcgcttgcccttccagggttatgaaagcgcttgctctggccgccactactgtctacgtgggatggactactgcgccaccagagcaccctgcacggaacgccgcctccggtctttgtgcacccagcagccgactcagtgtatcgccctgcgagcaccggcccggaatgcaatgtgctgttataactcccccgccatcatactacccttgtccgaaccttagatgggacacaagtcacttcaagaagaccggtggcccccagagaaacaactatgtcatccaccctgagtttgtgtctgaaaactatcctgactgccactgctggta

SEQ ID NO: 4144 - DNA, 667 bp, Canis familiaris
  misc_feature (1)..(667): n = a or c or g or t
tcctgccagtgaaagnnttcgatcntcgcattggnctttcaactcgaccggctctgccctgtctctgccatcctcggtcccccagagaccacactgtctgtagcatagacgaccaccaccaccaccatgggcctgccagcctccaccacagcaaactgagccagctctctgctgctcacgtcccctttgtctcccagggtcagaccaaatgcacgatcacaacccacagtggtggcacagcctctcacccccaggagccaaagcaacggaaaataattggttagatgccgttgggtccgattctgagagtagatcatttccagacatgtctttcaggtgaccctcaactacctcagtttgaaggccctaaacgaagctgattactactcctagggacaaaccgagggggttcagataaatcttgctgataacttataacaaactctcacatttaggttcacagggataggttgggtttgtttttcttgtttttaacctttccccccaattttccattagaatagttcctataaatgaatttcattctttcactgagtgcctaccttcccagggcaggtagccactggcttttgttcccttccaacaatacttttattatggtattaagacctttctttgtataatacattgcatnnnnnnntcaatt

SEQ ID NO: 4145 - DNA, 672 bp, Canis familiaris
  misc_feature (1)..(672): n = a or c or g or t
tatctaagnnnactgaagaagttcntgcgaaagttgaacctgcccaagnannttccccagaagaagaagctaaagtacatgaagcagagcctggtggtnntaggggaccacatcaacancttnctgcagnactactgccgaannngnnaaatcaagcacnnnannaagatgctctggcgatttgtttctctcttctcagaattggaggcaaaacagcttcgcaggctctacaagtacaccaagagcaaccagacggccaagctcctggtggcggtctgccccttggacgccccggagagctccttgctggcggaccaggaagacaacctgcccaagctctgcagcgcctggggactgcacaataacatcagcggcatgaaggagaggctgtccaagatgcaggctccccacggagaggcctctctgttgggggagctcacatccctgacccgggtcaggaaaggttctctaaggaaacttcctcacaaaacaaagcccaagagaaagcggattgaggaagccccggagaccccagagacctgcccataagaactgccagccgggacagaaggccagcgtgtcctggctcccagaccacttgtcttcaacacccctgcatcctgggggctggagaccagtggggggaaagaagaaaactgtctttgtcaaaag

SEQ ID NO: 4146 - DNA, 623 bp, Canis familiaris
  misc_feature (1)..(614): n = a or c or g or t
tgatnctgaacagcatttgaatggcctnactgtgacgcatcagtctgatgataatganacaagagtgttagaannngaatgtcaagtacctgtgcagaaggatataaagataaagaatgcagactcttggaaaagtttaggcanaccagtcaaaacatcaggtgtactgaaatcctcagatgagctcttcaaccaatttagaaaagcagcaatagaaaaagaagtaaaagctcgaacacaggaactaacacggaaacatatggaacagaatacaaaggaaccaaaaagagttcaagaaaatcagagggaccttggcttcactcaagaatctttttcaaacaaaatgcaaaatcagtaccttggagaacagaaagaccatcagcagtcttcagaagctcaagataaatacaaactctggcttctcaaagaccgtaatttagcaagggagaaagagcaagagcggaggaggagagaagcaatggctggtaccattgatatgactcttcaaagtgacattatgacaatgtttgaaaacaactttgnnnnnnnattaaattaaccatcaacttannatgaatgatataaaagattanaatgtatatggtaaaatgattgctttaaaa

SEQ ID NO: 4147 - DNA, 577 bp, Canis familiaris
  misc_feature (1)..(577): n = a or c or g or t
tnnaaaagagacctanngtcctcancgggacagggagccctggcactggcctggcagnnnnnnnnnnnagcccctgtcccaggcaggnnaggccagagtgaaaaggcaccccgagaggccannntggcccctgccctggcaagccctccacctgcaccctcaggctgcactggcccacctcctcctcactgtgcccaggtacactttcgaggccctgtagctgtggggtgttatttattcagcaggcacctgagtgagcagccccctcaagaacgcatctccacaggtggcctgggcaacagccacagcccagctctgcccccctctccaagcccaaccttttgggtcaagatcttcacatcccttttttaaaaaacacttttaaactttttaaaaactttaaaccttttttcagcagagagggagagagctggcttttttgggggggcggggggcaggggaggcattataagctaaactgaccttctatgcagctctgcgtcctctcatggaactccacagatccatttctagggaaggggttttgtgctcaaaactgtctgaccaactctttgcc

SEQ ID NO: 4148 - DNA, 700 bp, Canis familiaris
  misc_feature (1)..(700): n = a or c or g or t
gggggcattcatcaagaagcnctnnagtcacgtcgccaagaacggggaccccatcatgtaccgaaggctctacagtatagacccgaagggaccccgcctcagcataantcctggcaactacaccaaggatggccccaggaaatccgaaatcaacatcaaggacgccatcgccctggagtccacgcagcggcccctgtcctaccgccaccaaagcatcgccgactccctgctgcaggagccgtcagccttcagcgctcggaagtccaccctcctgagagactgggtaatgagcaggacgtccgacgtgtcctacgagcgcaagctgaggagcctcatggagaagggcgcggagcccaaggccgaggcggtgaggatgctgaagcccgaggaggtgctgagctgccgatacctgaggttgtccaagaacaacattcgaaccttgctcaagctgtgcaaggatgcaggcatgaatgtggacatccatccccacatggtcgaaggagagatagatgccaaaaaggtgttcgccccaaaccccagcatagccctctaagcagcttgtctccccggccacctcagggtccctctgtgttgggccctcgccccccacacaacatcctctggtatggcacaccaagtccttcaaacctggtgcatcccttttagatggtcgtgattagcaaacaaggctanannnnnn

SEQ ID NO: 4149 - DNA, 556 bp, Canis familiaris
  misc_feature (1)..(556): n = a or c or g or t
tccatggatnggcaaactgttgtatcttgaggacttcttcgtaatgagtgattatagaggctttggcataggatcagaaattctgaagaanntaagccaggttgcgatgaaatgtcgctgcagcagcatgcacttcttggtagcagaatggaatgaaccatctatcaacttctacaaaagaagaggtgcttctgacctgtccagcgaagagggatggagactcttcaagatcgacaaggagtacttgctaaaaatggcagcagaggagtaaggcgtgtgccggtgcagacgatgacagcttccattctattttagattaagttctcaactgatcttgctttctatcctgtttgtagtcaaataatagaatgaacacccattccaaagctttattaccagtggcgttgttgcatgtttgaaatgcggtctgttgaagatggcaatcttgtatgcagtttggagtcagatttctccttgaacatcttttgataaacaaggtgnnnnnnatcttaatgtatatgaaaaaaacttcattcttgtgagtcatttaaatgtg

SEQ ID NO: 4150 - DNA, 705 bp, Canis familiaris
  misc_feature (1)..(705): n = a or c or g or t
tggntcctcctgtactgtgagggcacgcgcntcacnnagaagaaacannncgtcagcatnnnggtnnnngtctccaaggggctgcccgtcctcaagtaccacctgctgcctcgtaccaagggcttcaccacggcggtccagtgcctccgagggacagttgcagnngtctacgacgtcacgctgaatttccgtggaaacaagaacccatctttgctgggaatcctctatgggaagaagtatgaggcggacatgtgtgtgaggagatttcctctggaagagatcccactggatgaaaaggaagcagctcagtggcttcataaactgtaccaggagaaggacgccctacaggagatgtacaaccagaagggcgtgttcccgggggagcagttcaaaccccccaggaggccgtggacgctcctgaacttcctgtcctgggccacggtcctcctgtctcctctcttcagttgtgtcttgggcgtctttgcaagtggctctccccttctgatcctgacgttcctggggtttgtcggggcagcttcctttggagtccgccggctaataggagtaactgagatagaaaaaggctctagctacggaaaccaagaatttaagaaaaaggaataattactggctgtgattgcacatacagaacctgacggtggtatccaattaactcaattaaaagcagaacaacacacacnnnnn

SEQ ID NO: 4151 - DNA, 568 bp, Canis familiaris
  misc_feature (1)..(568): n = a or c or g or t
gtctgtgaatatcttccctcnnagatcagcgcaggtgctatgaggncnnagncgggggagatgagaggctctctcatagactcgctggnnagcgccacggcagggnctgcagccaggcctattgtggccacatctccgctgggccccgggagaggcagctgcaggcggctgtcatcctcgcaggcgtcccagggctgggcgggcagctcccgcggggcctcggcgctgcagagcggctcctcccccccgtggtccttccctgaagttacaggcaggcgcgggggatccgccagcctgtccatgtgaggacagcaggggctactcctctccctggtttgctcttgatgacgctggctttctccccctggcgccgtgccaagacaactttcactctctgaagacgaagaaaaacaagttgtttaaggttcaaaacaacactttgcacaggaggaaagggcaagggacagatgtgaataatacgtgtgacacaacaaaatttgaaacctctccagtggaaattgcatctgctggattaatggggtccttagagagaggaaatactctaata

SEQ ID NO: 4152 - DNA, 520 bp, Canis familiaris
  misc_feature (1)..(520): n = a or c or g or t
tcnncgagttccccgacctgcanngcaccatnntctcagagcgcgacgtgtacctgacctacatgctgannnangnngcccggcgncttgagctgccgcgctcctctgacgctgagcccaggaagtgtgtcccctctgtggtggtgggcgtcgtgggcatgggccacgtcccgggcatcgagaagaactggaccaccgacctcaacatccaggagatcatgaccgtgcccccgccgtccgtctccggcaggctgtcccggctggccgtcaaggccgctgtcctgggcctgctgggctacggcctctactggatggggcgccgcgccaccagcctggtcctgtcgctgcccgtcgctcagtactgtctgcagacggcgtccacggcccggccgcacaaataggaaggacaacctcccggccgcgcctgggtggcagcccgggggcgctggggccggcccccccaccaaggaagtcccgggcgccaccccccnnnnnntccccacccagccacgcctgcccc

SEQ ID NO: 4153 - DNA, 179 bp, Canis familiaris
  misc_feature (1)..(179): n = a or c or g or t
atatatgaactgatatgaatatatccatatgcatgaatatatatnantgtatnnnattcnnnggnnnattcaataacatttttagnncttttaaagaagaaaaaaattgaaagtatgattttagcaaatttgccagtgtttactatttnctaaannncaatacatggggatccctgggt

SEQ ID NO: 4154 - DNA, 447 bp, Canis familiaris
  misc_feature (1)..(447): n = a or c or g or t
ggaagctgaggagcgnnnnagnnnnnagcaggaggaggctggaccagnngtnntnnnnagtgagcacgtgggtnnncgggggtctccctcacannnngactccgatgagagggagagcctgatgagggaagaggatgaagacagtgaaaaagaggaagaggaggaggaggacaaagagatggaagaactgcaggaagagaaagaatgtgaaaaaccacaaggggaggaggaagaggaggaggaggaagatgagatggaggaggaggagggggaagaggcagagaatgagggagaagaagcaaaaactgaaggtctgatgaaggaagatgaagttgtaaatcaagagagcaacttagaacaaaaagtaagcaagaatagtgagcaggtgtctgaagaaaaaacaaatgaagcctaatagtttttctagaaggaaaataacattctaat

SEQ ID NO: 4155 - DNA, 604 bp, Canis familiaris
  misc_feature (1)..(604): n = a or c or g or t
agagagnntcatccctgtccccttcaccctgaagcttttgtactgaagatgggacnttgatttaaacctggatattggcatttggcaagattgctctagaatttggggaaaatttgggttcctaagatgnnnnngcttttcaaaaccaatctaaaactcccccggaaaagctagctttcctagacagtcagtactgacatctttccactagtggagaatcagtggaggggctagcgaggtgagtacataatagcctgagtgcttgggttgccatggaaactggagtgtgcgaggccacagccggggggctgaagagccattgagcactcccacagatgcttcgaaactggcagagcctgttgggaaaaacactcccacccggagccctccatagtaggggtcgcccttggctctccctgatcttgctcaacaagagaagcaaggttccttaactgtttcaccatttttttgtatttcattcttctttgactgtatatcagatatatatatatatatatatatatatatatatatatatatatatgtaagtataaagaacaaccatatgcattgtctttctttgttattcatgtaatatnnnnaa

SEQ ID NO: 4156 - DNA, 612 bp, Canis familiaris
  misc_feature (1)..(612): n = a or c or g or t
tcttacanggttcagtagnnnnagatcatgactacattggatttcctgaaattccaattnnagcataccaagcgaatattctggtagaagatgcaactattggcgtagtcgataatgaattactgacatcaagcaaagatcgtgaactattagaatttagaaatgccaaaatctctccattgatagaagatcatagtactcttgaaaagcagactttcagtctgttggactcttcaaaccaagtccttgagtacttaagttagtaaatatcaaaattcatttaaagtgcttgtttagaaagtatgactccttggatctttatcttttgcattcaaaaaaaagttgtgtagaagtgttttgatacgctcagaatgactaaatcctgaaggtttattttataactcttaatttatctaaacttgtgtaatgtttgaatgtcagtatgtatgtgtgtgtgtgtgtgtgtgtgtgtgtatgtatatatggaaaggaagcatataaatgtatagagcgtgactgcttcttagaaaggaaactaaattctagctcaagactctcagatctttctcttgtattggtaccatatatttttttttgaatattttgcccctt

SEQ ID NO: 4157 - DNA, 639 bp, Canis familiaris
  misc_feature (1)..(639): n = a or c or g or t
acacacacacacacacacacacacacacacacacacacnnnnnnntgcacacacgcagagtcagacnnngaannnntgccctggggtgtgaaatgangggcnnnncctccccaccctgccatgcccccgggnnatnnnnnnnnntatnngtctcagggcagtgnacctcccatcgaatgtgacatgagggcaggctgggggttgggaaggggtcagggaagccccgagttttctggtggggctgaggccagtggggaagcacgtgtttgggggtgtctgcgtgtgtgtgagagaggttaccctcaagccgcactgccggccagaccaccttgctaaggactgtgtctggcccctccggtggccccacccccagagtgtgaaggacttggaaaagaaagcacaatcggaggagaaaacagacccagaaccagcagcagtgctggctcgtggcctggcccagagtgatttctatctgcccgccaggcttcctggaggactgctttctctctctctttctctttctctctctcttttttttttttttacagttgcacagctctgccccatgaggggccttttttacacactgcgaggcccagctttctggggggatttttgcacatatcaggcggctctgct

SEQ ID NO: 4158 - DNA, 373 bp, Canis familiaris
  misc_feature (1)..(373): n = a or c or g or t
ccgagtgagaaattgtctctgatccgcaagcacgcgcagaccttcanngctctgtgtgccaccgactttaagttcgccatgtatccgccatcgatgattgcaactggaagcgtgggagccgccatctgtgggctgcagcaggatgaggacgtgagctccctcaccggtgatgccctggtggatctgctggccaagatcaccaacacggatgtggactgcctcaaagcctgccaggagcagattgaggtggtgctgctcaacagcctgcagcagttccgccaggaccagggggatgggtccaagtccgaggatgaactggaccaggccagcacccctacagacgtgcgggatattgacctgtgagnnnncagtc

SEQ ID NO: 4159 - DNA, 619 bp, Canis familiaris
  misc_feature (1)..(619): n = a or c or g or t
cttccaaatcaaaatcattcggnncaaacagactgtcgcttgatttaagaaaatannnnnaacccatgtttctgaaataatgctgattnntgagtaagaagggggacttgcatttgattcccagtctaattgcttagtagaataaatcctgcaccagcaacacttgtaaatttgtgaaaatgaattttatctttccttaaaaaataatttttttaatccatcacactttccttcccaccctttagtttttgataatgataaaaatgagccagttatcaaagaagaaatagttcttacttcaaaagaaacataaatacaaaaaataagttgctggttcctaacaggaaaaatacattttaataattgtgcgatgagaagctgcttacgtacacattgcagatcagatatttggagttaagatgttagtccacatagatgggtgattgtaaactttattgccattaaaagatttcaaattgcattcatgcttctgtgtacacgtaatgaaaaatgggcaaaataatgaagattgatatttccctaagtcgctctgtttaattctgctgtctactcttctataatgctgcgtctctaattgtacacagtnnagtgatctcta

SEQ ID NO: 4160 - DNA, 591 bp, Canis familiaris
  misc_feature (1)..(591): n = a or c or g or t
agagaaagatccagaannngttggacacggtgatnggcagggcacggcagcctcgcctctctgacaggccccagctgcccttaatgnaggccttcatcctggagatcttccgacacacctcctttgtccccttcaccatcccccacagcacaacaaaggacacaacgttaaagggcttctacatccccaaggaatgctgtgtcttcataaaccagtggcaggtcaatcatgaccaagaggtgtggggggatccatttgcattccggccagagcgattcctcactgcagatggtaccgccatcaacaagaccttgagtgagaaggtgatgctctttggcatgggcaagcgccggtgcataggagaggtcctggccaagtgggagatcttcctcttcctagccatcttgctgcagcggctggagttcagcgtgccagcaggtgtgaaagtagacctaacccccatctatgggctgaccatgaagcacacccgctgtgagcatgtccaggcacggccacgcttctccatcaagtgaaggcaccagcatgccaaggcagagggaggggaaggatcacccatggggcctcaaccct

SEQ ID NO: 4161 - DNA, 474 bp, Canis familiaris
  misc_feature (1)..(474): n = a or c or g or t
gatttattatatcgtcngaatnngtgatccggatggttgcccagcctttgtaaccgcttggtgcctcttagggcttaagactttacnntacaggaactgtgtattccaggacaatttttatatctgtaaatgatgtatacgacatcaagcctgcattctgtgcaaaagaggagggcagatgagtcagaacctgtgcttgctggcggtgctaacacacaatttctggttttcaaccttggtctcaaacagctgcttttgtatatgattcacaagcttttttagagtttctatttttttaaactaccgaagacattctttatctgcaaattaaaacccaccctcannnnnnaaaatagccgatggtggttggttggttgtagcaaaccaccaaaagcagtcactgcaaatcctgccattcttccctatcactttttgtatttcaatggaattattttggtccagaactgacatgta

SEQ ID NO: 4162 - DNA, 536 bp, Canis familiaris
  misc_feature (1)..(536): n = a or c or g or t
caggttgtgtgtaatactggagccaatgcaggaactgatgtcgagacataaaacttacaacctcagtccacgagactgcctgaagacctgcttgtttcagaagtggcagcggatggtggcgccgccagaacccacaaggcagccgacaaccaaacggagaaaaaggaaaaactctaccagcagcacttccaacagcagcgccggaaacaacgccaacagcaccggcagcaagaagaagacgccggccgccaacctgagtctgtccagtcaggtacctatcaagacactgcaacacagagaagaacgcataatatcacatcttcaaaggactagcaacagctcctctgaagacactgtttctcttgcactgctttaacttaaaagtgtggctttcaaaactttgtccaaatctgatccagtcaggaacccctctcttgaatggccatgtggactttcagtggcttctcttctgtcaatgcactcagaagatttttggcaaacactcgatttgatgtcgtnnnnnnatacttcttatc

SEQ ID NO: 4163 - DNA, 530 bp, Canis familiaris
  misc_feature (1)..(530): n = a or c or g or t
caacagcnnangatctcttcgcattnnaatcagatgtaannntntgtnntaattgtcaaaacaggnctggtgtagttagtgtcttttaataagacaggagaggatnnncgattnaatatggagagaaaatggacctgatgctccttgtttctagagtagagttgggggagggttatnnnaagatttgagctttcaaactgcatgctgcctgnnagtatcactgtccttcctagatggcagtcactaaattcattttttttttcaaggtaattttatgtgcctctaataacccaggaaagggaggttgatcnngtctgacatgattccttcctattgtttggaactgtgagggagcnnagctctactccagcagggttagtagaggcttagagaaagaggagtgtgagaacaactaaaactttatcatgatctgaattataatcattagggggagctctagccaaatggtttaacttctgcctctggaattgggagttgggtgggtaggaaaaggtgataccattctttct

SEQ ID NO: 4164 - DNA, 648 bp, Canis familiaris
  misc_feature (1)..(648): n = a or c or g or t
gcgctttgatttttttagggctngagncctgtttcacttatagnnnnnagaatgcttgtgttgagtaaaaaggagataccccaatattcaaagctgctaaatgttctctttgccataaagactccgtgtaactgtgtgaacacttgggatttttctcctctgtcccgaggtctctgtctgcttttttttgtttgttttttgtttctttctagaagaatgagaagtgcatgtaatgggggctgagggcacctaccccccaggctctcggccacaggctgcttctccacacccccagttcagcaaaggccctgggcaggacttcctgggggaggcagagaggggagcgccaaggtggccagatggttccaggaccacagtgtctttatttttaactgtttgccactgctgcccccacccttgcctggctctggagtacagtcacccccagactagcaggagtgagttgtggggggagaagtactgattctcctccatactggggggcgggggggcggctaactgagcagtaggaatggaaggcatgagcctgggaagtgcttttataaattattttccttgtagattttatttttaatttatctctgacctgccagggagaggggagagagagagagagagagaaagaga

SEQ ID NO: 4165 - DNA, 570 bp, Canis familiaris
  misc_feature (1)..(570): n = a or c or g or t
tagacatacagatcantngaacagaatagaaaacccagaaatnnaccctcaattgatcntcgacaaagctggaaagaatatccaatnnaaaaaagacagtctcttcaacaaatggtgttgggaaatttggacagccattctttatgtagaagaatgaaactggaccacttattagccatacatacacaaaaataaaataaaaatggatgaaagacctaaatgtgagataggaatccacccaaatcctagaggagaacccaggcagcaatgtctttggcctctgctgtaacaacttcttgctagacacacctccaaaggcaagagaaacaaaagcaaaagtagattatcaggaattcatcaagataaaaagcttttatacaactaggatcaacaaaactaaaaggaacctacagaatagaagaagatatttgcaaacgtcttatctcagataaagggctagtttccaaaatatgtgaagaatttaaaaacnnnnnaccaagaaacaaaaaatccagtcaagaaatgggtggaagacatgaacagatgtttcttcaaagaagacatacaaat

SEQ ID NO: 4166 - DNA, 611 bp, Canis familiaris
  misc_feature (1)..(611): n = a or c or g or t
tgactttttcaggatgggtagcagtcccctnnaggtccccaagcccaggcnngcagcnntaagtgagcnnnagactcggctgcannnagtacgctcaactttcttnnncgcatacagtagcacagtggggcttcgagcagcagcccccagtccctctggtgccattggaggcctactggagcagtttgtccgtggtgttggactccggggcaccagcagcagcaccttatgaagtagccagcccacaacaatttcctgctcctctcacctgagccctgagtggaatcaaagccatgcctggacaaggggtgcttcaagataggagggaaatcttctcactcctccttctccatcatgcacatggcagccccaaagctaagcagggctaaggacggggttccccaacccccagcttcctgactggtgaccaccacccctcttgtcattgcctttcacccaccctagtctttgttgggattcccatcaattctcagaactgtgtgggttttcccaagtccctggggccttgtgggggctgagacctcatgaaagactcccctcttcccattcttgtttcctggaggagggatccacctgcactgagaatgaga

SEQ ID NO: 4167 - DNA, 456 bp, Canis familiaris
  misc_feature (1)..(456): n = a or c or g or t
tgatacttacaaagagacagagttgatagtgaannnnnnnaagaaaaaacagggttttgataagaaaagaaaagcaaaagccgttaagaagatggatcacacaaagaagagaaaaacagagagtgttcataacacagctgtaaatnnannaaataatgtcaccatgtcccaacttgtcagcagtattttaccagcttcagatgtatcacgtcataacattctcacaggccacaacaaaaccagagaagaaaagagaactgaggttgaacactataccccagagaaccaggaaaaaggcacattgagttcaaatgcagcttttgaacaaagtcattcctttaataaaaattatacggaagatatttttcccataatgccaccagagttagaagaaaccattcgagatgaaaaaataagaagacttaagcaggtgctgagagagaaggaagcagctct

SEQ ID NO: 4168 - DNA, 529 bp, Canis familiaris
ataggagaaaaactacatattgtgtgaaattaaaataggaaaactacctttatatatcttgataacttgttttaaaaaatgaacatcttgcttgtaaagaaaattattacacctctattttcctgatcctgattaccaagtcacttacctgaataccagaattaaacactgtagcatacaatttcatcatcttacttgaatgaaaccaatttatggggaaactacagaatatggctgtgagggtaactcatagatatacacattcctatgcaatgatataagctggaaacatatatatggtcctttctaaatgaagtttttattttcgtaggcttcaattaaatacatttccctctatacaattttccacagcagattctcctaaattctcacaattccaaaaaagcctcactaggtttcagtgaggtttcaaatctgatttgaccaatatttatcaaatataaatcattcgaattatctacttagaaaccagagacatgaaatgtactagaagaagctcttttctaac

SEQ ID NO: 4169 - DNA, 702 bp, Canis familiaris
  misc_feature (1)..(702): n = a or c or g or t
acactggattggttnnggntatgcggcgctggttgcttctggtnggatcattggctatgcgaaagcaggtagtgtcccatcactggctgctgggctgttttttggtagtnnagcaggcctgggtgcttatcagctgtctcaagatccgaggaacatttgggttttcctagctacctctggaaccctggctggcattatgggaatgaggttctaccactctggaaaatttatgcctgcgggcttaatcgcaggtgccagtttgctgatggtcgccaaacttggaattagtgtgttgaataaaccccatcagtagtagctatgtcccagcttggactcatgaagaattttaaaacttctactatttttagtgtattaagagaaacaagtattctgacattttacttaaaacaaaaaaataacattgaacttccaggagaagaaatcagtcattatcattacaaccttaaagaggtgggtggtatgtaacctgagagcttcttcttatactctcataaagtttgattcttatacatgatgttgtctcttctttctgtatctataggtaaagcctcaaggggtaaaatgttaggtatcaacattgagggccctgaaaccccatgccctactcagaacagtgaaaaaagtctcttaggagctttaggatttctgttctttggctcattttagagcacagatctacct

SEQ ID NO: 4170 - DNA, 607 bp, Canis familiaris
  misc_feature (1)..(607): n = a or c or g or t
cacccccaccagtcaacactcattcgacaantagagttcagctgnnnctgagccagtgctnnnnccatnngaggctcagagtgagtcagctgtttgagtccaaagctgtgcagtcaggcatcctggctgaactagagaagcagccggtatctgggtcttggtacgtaaggtttacagctagaaaagctccagtttatggaatggaagaaataaatactgctttccctgagcacatatcttggtgacagggtctagaatggaccataacgtaacaatagattacaaattttggaaaaactgccagaattactaacaatgaggataggaaggaaagggcctatcttcggcttttctttggttccattgcagtttcaggattagatgaggcagacaaatgaacccctccctccagtgtcatgttctgacctaagcccttaactgagagccagctgcacatctcttctccacattgccaggttgaaatcttgccaaacgttttattgagtaatgttgggctagttgctgctggatggccttacacctggtgttgaacatgcttaagcagttggatgctcaaggttgggtgcaagaaatcccttctttctgg

SEQ ID NO: 4171 - DNA, 695 bp, Canis familiaris
  misc_feature (1)..(695): n = a or c or g or t
tttccattgtnnagcagagnctagaggctacnnaggagaaagtacgnacnacagagacacnngtgcttntggcanctgcacagaaaaagctnnnnnnnnnnagactaaagcnnnnnncagannnnnggaatgctgggatcaaggcagagctgctctataagaagaacnnnaagttgctgaaccagttgcaatactgtgaggaggcaggcatcccactggtggccatcattggtgagcaggagctcaaggatggggtcatcaagctccgatcagtggccagcagggaagaggtggacgtcccaagagaagaccttgtggaagaaatcaaaaggagaacaagccagcccttttgcatctgctgagttgagcaaactatcaggggaaagtgggactggcactatttgtggctaaaacaagactctgcatatgtactacgaacagctttgcacacttcttttccagcaggaagacctccacagtagtcagaacagagattttttattatgaatactttattggtaatcacgggcaaaaatggccaggtattacaccatttttccataagagatcctgggggctgagtctctgctccagggatggagcctaagttggtctcccctgcaggacccctatgcagaaccctgaccaaatggagggaatgctccccacaaccaacccttaaagntccannnaan

SEQ ID NO: 4172 - DNA, 620 bp, Canis familiaris
  misc_feature (1)..(620): n = a or c or g or t
tcctcancatgggagattctgaaaggtttgctctgacgaccaagaagagcaaagtgaccttnngcagcttgaaggaagaactggtcnnaangagcaaatattcagatagcttttttgaatttcaggtggtggaagggcctcccaggtttatcaaagggatttctgactgttacgcaccgttaggcacagcagcttatttccagtgtttggtccggggctctccgagacccacggtttactggtacaaagatgggaggttggtgcaaggagcacggttcagtgccgaggaaagtggcatagggttccacaacctgttcataacgagcttggggaaggatgacgaaggggagtacaggtgcgtggccacgaacaagtcagggatggcggagacctgtgcggccctcaccctgacttagtttctagtgcaacgtgtcactgcctcagtaattattaaacccatctgagcgcttccagattttccaaagtatgtagatccaatgaatttccaaataggcccactcgacccgaatctgatacctggaaaatccctgggaaaatactttctctgtgtagaactctcctgtttgtagcccatgtaaatatcctgtgatnccaactgt

SEQ ID NO: 4173 - DNA, 542 bp, Canis familiaris
  misc_feature (1)..(542): n = a or c or g or t
agcatgaccaaccagcagggcaggnnnagggagtgttctctgttcttccttcctctctgcagcagtttggtcttaatctgtttttaagctaccttaaatgcacttttccttcctgcacagctaacttctgtatcaccgaaaggcccattcctttctccatccccacctccaactgagtaggtcagccctccgagtcaccctcagccttggtgctcagtggtctctacccaggccccggccctctgcaccgccctcccccaccaaacccccacttgcttagtctggtaggtcaagaaaaagcagagccccagcacatgtgtgcccccgcaccgagctctgtgcagggaatccaggagctgcagcagcatccgccaatgaaatgggaggcagaggctgcttaacggggtcacctggcgctgcccagccctgcagtgttcatgtcaagctagtcagtggctggcaggttccatgggcctgccatcatcggggatcactaaattgaaggcttccagatccctggnnnnnncaggttccaatcctgc

SEQ ID NO: 4174 - DNA, 471 bp, Canis familiaris
  misc_feature (1)..(471): n = a or c or g or t
ctctaacgtttcaggttgaggccatgtnnggaaacctcgtgtcatagcagttacgttcttttcaaatgtcattctctaccctggaaagaagtgatctgtcagaacccgagcagcctgtgtggctgccacgaacccgcccaggatcaagtgttggtgacgcagaccaggagcacacagagcaagtccttttctctccccccaccccttcatctttacagatcttactggaagagtgttcagaaattaaacctggcatttgttaagacttccttctgttgggagttttaagaagtaatatatgtgatgtaaaatgtacgtgaaccattgcggttgacactttcccacgcatcatcagtaagttgtcagacggtggcccattgtaccgtgcaggaaatagttgaatatacatattcagaagagtgatcaggccttggatgtcctttaagtccttttaggcagtaactttttttt

SEQ ID NO: 4175 - DNA, 434 bp, Canis familiaris
  misc_feature (1)..(434): n = a or c or g or t
aattaggaatagtgctgcagtcatatttcatcccttctacccatccagaacatatctaatctggaggacaagagaatgctgtcttgaaaactatgtccaactgagctgataggcccctaatggggctgaaaatgatgaggtaaccacctgatcaaccaagggacgtctggctccagtgctctacagctctgaggtttcgctctagagactctagagattttactccaaaagtcaagaggctattcttccaagtattcgtggggggaagaggaggcctgtatagcacaatggaaaagantnnnagcttagctttccccttcttacaaatctatctgcttgtttaatggatcaaagtggtagaaagggagcaaaaacacttctagaattctctttcttgagagttcattgaattgggagaggatttgtctatccaa

SEQ ID NO: 4176 - DNA, 574 bp, Canis familiaris
  misc_feature (1)..(574): n = a or c or g or t
cacttnnnagacagaaatgctgagctagagcgggtgaacagaatcaaccagagcttgcaggaagactgggaaagcagtgctgcaatgangnnnnagcgnnanctnnannagaaggcttttgagcgggcgtcagacaaactcttcctcctggaccagtgtgagaagtatcggcgctgcaagcagtgccagaggcgcacctccaacgtgggcgagagcaacctgtggcccctgaacaagtatttgcatggttcccggttgctcgtataaaacccaaagtctggatctacgttttcctggggaagatttttttttttaaatgtttaggcatgatggtgaaactacctatttttactttagagggaaaaagttattgtgctgctttcaggagcagattgcttttcaccccttgtagaattcacatgagtagggtctcccctctaacttcccattgctcccacagaaccctgctgcccctgggggctgggaacaggggacccagcctcattctggctgcgggagtgctgctgaccctgccttgccacttcctctgtgactttgtgtaagagactttatc

SEQ ID NO: 4177 - DNA, 407 bp, Canis familiaris
gcaaaacacttcattgacgtaggagctggcgtcatagatgaagattatagaggaaatgtgggtgttgtgctatttaattttggcaaagaaaagtttgaagtcaaaaagggcgatcggattgcacagctcatttgtgaacggattttttatccagaaatagaggaagttcaggttttagatgacactgaaaggggttcaggaggttttggttctactgggaagaattaacattatgccaagaatagaaaatgagaaaacatacttttttcttaaaaatagtttttgcttaaagtgtttggatgttttgcacatctgtaaatttaatagctttagcttctaaaactgtttggttttcttaagattaaggaaaagatacctctgttggggtctcataaaaccttacttgc

SEQ ID NO: 4178 - DNA, 586 bp, Canis familiaris
  misc_feature (1)..(586): n = a or c or g or t
ttgtctttttctgccactnncacaccatctctgatttnnnnnggnntaacatctctgccctgtgcttccctccctcaaattccttctgccctcatgccaatggggatcatgccagagatcatatctgagaaagcaagacccaattttgtttgcctatgtctcttttggggagtgctggttgtgtttatatgtgtatgtgagtttatatgtgtatatggacactcttgggtgtcatgactaatttgggggaagggttgtttttaaattatgacttttgaagggagtcctaaacgttgctagtgaggcttctgtctctggtagcatccaagcagaaagattaagactcccttgagaacggattgctgctgccctcggggtgtttcaacatcatacttccaggctggaagaccctggaaggcaagaattccaggaaatgtatgctacatcttggcattgccatccattaccagaagcagaagtagaagagacaatctcatcgccttagctgagtttcatacatttctggataatgatgaagagacttgtatccattggggtggggaaccagggagggctaatccagggt

SEQ ID NO: 4179 - DNA, 604 bp, Canis familiaris
  misc_feature (1)..(604): n = a or c or g or t
cagcaacanannncncaagctatgtntaatctgggatatatgcatgagaaaggacnaggcatnaaacaggatattcaccttgcaaaacgtttttatgacatggcagctgaagccagcccagacgcccaagtaccagtcttcctagcactatgcaaactgggtgtggtatatttcttgcagtacatacgggaaacaaatattcgagatatgttcacccagcttgacatggaccagcttttgggacctgagtgggacctttacctcatgaccatcatcgcgttgctcttgggaacagttatagcttacaggcagaggcagcaccaggacatgcctctccccaggcctccaggaccacggccggggccgccacagcaggaggggccaccagagcagcagccaccccagtaacagccaccatgtccagccttgatcagtgacaaccaaggatattgtctgctgagaacacttgcatttgatttagaacttcggatcagcggtcacctcctggaagaggcacaagaagcattgaattcctaaagctgcttagaatctgatgcctttattttcagggataagtaactcttacctacactgagttgaatgt

SEQ ID NO: 4180 - DNA, 530 bp, Canis familiaris
  misc_feature (1)..(530): n = a or c or g or t
catgcctcctatccactgtgtcccactccnngtgccagagaaatnnnngcaggttcctaccccaggaggaaacagccccatgaagaaggacactcctgtgggtgggtgggtagtcagccagtgtggaccacagggcaccagcatgatcctgaggcagcacgcaggggaggctggcagacaagtggtccagggcccacccccaccagtcagtgaaactctgctcctctaaaaacatcctgtagatgcaaaaaatccagacctaagaccagacccaggctccagcatgcgaacacctctataggaacatgttctcccaggattgtgcacactgtagcgctaatcctgacccacggcctcctgtctcccaaggggagaccctttgggggatgtgtttgccagactccccgtgctggtttctttgttactatttgtttggggatttgtttcagttcttttcttttcttttcttttttaaatatgtggctgtgaacttgaatgaccactgctcaaaacttctgctactgggaggg

SEQ ID NO: 4181 - DNA, 146 bp, Canis familiaris
  misc_feature (1)..(146): n = a or c or g or t
tgaaaagccaaanaagattntagtgttgaatcccagcaaatgatgtttttagaaatgcttttatnnncaagcatatgtgaatgattattacacaaccattatttattttctgcaacaaaagaaggaataaaaacttacgttgtgtg

SEQ ID NO: 4182 - DNA, 540 bp, Canis familiaris
  misc_feature (1)..(540): n = a or c or g or t
tatcgatnngaaattgattctaagtcattcnncagcgatcgtctaccttgggtcagatgtannnacttcagaaatngacagatctgggctnngccttcttgggactcacctnnagtagactttaggggaaaacaacaacaaccaaaaaaaaaaaagtattagatttttacggtacatggctagaaggataaaccccgataggaatgggggtcctgcgccaaggcccaccatgctcctggcacgctccactgttgtaccaatattgtctccctaaatcgccgtcttatcagcaaattggaacaaacaccgcttgccaggagaagtagaggaagcactagtcaatgataaaagaaccccacaggctcgacacgcaccagcagcggcgatgtgggatagaggagcttggaactgcaggtgctgactcctgtctttgtcccgggcagatgcttcttgccaacccatctccaccgtcaccaagggcaccatcctaaacacacggctaaattcacttttgatgctttaaccaactcctctcccgtg

SEQ ID NO: 4183 - DNA, 633 bp, Canis familiaris
acgccagaacctgcaccgggccttggaccagtacctgatggaattcaatgcctgccgctgcgggccctgcttcaacaatgggaagcccatccttgagggcaccagctgcaagtgtcagtgcccgctgggtcgcaagggcctttcctgtgagcaaatggagcaaaagggagccaaggccgatggtcactggagctgctggagctcctggtcggcttgcagagcaggcacccaggagaggaggagagagtgcaacaaccccacaccccagaatggaggtgcctcgtgtccagggtggaaagcacagacccaggcttgctgatagcctctgggcacagatgctgtggatgtcactggataacgacttctttcagctgaaggaaaattgaatcaacatggatttcttctttgtcctgccaactgccaggcccaggaccagctgtctacaaccaactgccctatgactctagtcaatcaacaactgggtgctggatgttaactaggggctcagtcctgctcacagcactttggagcaccccccccccaaaaaaattcccaaaccaagagagagatctcaatccatgccatagagggatttataggatgttagaagtctgaggccagcagatgtagctg

SEQ ID NO: 4184 - DNA, 649 bp, Canis familiaris
  misc_feature (1)..(649): n = a or c or g or t
tccactgcaccatccgcctgtgggacacctannagtnnnnacccgagggcttctctcacttccacttgtacgtctgcgctgctttcctggngagatnnnnnaannnnattcnnnnngaaaannatttccannagctgttgctcttccttcagaacctgccgacagcccactggggcgatgaggacatcagcctgctgctggctgaggcctaccgnntgaagtttgnnttcgcggatgcccccaatcactacaagaaatgagccggggccagcgcagcaggcctcaccccgccctagggcagcgcgccgaatgtcgccggtggccacaggcccatggtcaaggagaggccttgctggagcagccctgccctccccggagctggccaggactgggcgtcagacgggggccagcgcctggctggggcggcctctgtttcctaggataccaaagagagccggggagggttttggccctttgggagcccggaggtgggtggtcgtctccctccctgtccctggagcgtccttgccaaatgaccgcctcttggagcccctgctgcgctgcagcctgagagccagaccctctgggagaggcctgctgtccggtgcccggggcaggaggaggtggtcgtcatctcatacctgctttg

SEQ ID NO: 4185 - DNA, 591 bp, Canis familiaris
  misc_feature (1)..(591): n = a or c or g or t
gaagttttaaatggaatgnnncagatttctgtgactnngcatgggagagacttccatcttcctatccaccattccaaggaagaaggaactngaagagaccatcaaaaatcgaaggtggcaggagaagttcgctggagacaccacggactttgtatgacactgacgactgaggaaagaaattaaagcgaccaagtgagcaggaaccagaaaacttgaacctctctttcaatgcttcttccagtccagacctgctcactagccagcccttttgccagcacacccggatctccttcccactgtactcagccattccatgatccaggcagcagctagagtgacttccagtggtccaaagcttcgtgttgaaataatttatgtggaggttgaaataatatatttcactgtagaaggagcagagagggacaggagctctggagtgatgtactgaaaacacagggtacgtaaagaaggtgacactcttcttgtggatctcctcactgcagccaaattaagtcgccacgccatttgcaatgcaatggagcagaaatggtcagaataccaaacacaacatttttaaggtttaactacaca

SEQ ID NO: 4186 - DNA, 564 bp, Canis familiaris
  misc_feature (1)..(564): n = a or c or g or t
ccaaaagtggccaaacccgtagagacagtgatgtctgcccacaccccggcctggtacctcgatcttcattggagccttcactaggtgaacagatgtgtcctcagagttggccccagaggcctggagagtctaggtcttctccctaccttgcctcatgttttcataaagcaaagtcgcttgtccatcacaaccagacttgaggccggctttgagcggctgggcctgagggctgagtcagtcctcctcagcctctggattcacaagggaccattggaggagcaggccccagtccctgctgctcctggttcccgaatctagcagggccctttgctttttgaagtccaggacttggcattgacctagtgggtgcacccagaggttctcccatccaccaaaaggctcagatgcccagagatgctcttttccagaacagatgggtcccatgcctgtgtgtggcagcaggggcagcagggtggggtcggggggccgcctcagctgccgcttatttcccaccttccccagacttctactgggnnnnnatttggagtgatggnaaggttttta

SEQ ID NO: 4187 - DNA, 663 bp, Canis familiaris
  misc_feature (1)..(663): n = a or c or g or t
tcaattcagtagtgagtgcaaagagaagattnngactaaanntatttagaaggacaatttggtgtcaaaagtatgnnaatataaagtctggtgtttggnaatataaagaagacaggnancaaattgtgctaaggtcnagcatttatgatgctagcattttttaatggatcatgcttcttgaccattacagaaaaacagactgtcaaagggctaatacagacaacccagacctgataacagatcttcagtaattaaatgaatgattataactttcatctccacccccaaacctgtctagccccataaaatttcccaactcaatgaactcaattaagtttcactccaggtattgcttacgtgactagagataaattttagtatgaagtgaattcgaaatgtgagcctgagtggagtttcactctgactctctgaaagtacaaaaaccagtccacgtgttgtctctacctgacttagttttcctttccatttgaacaattcagcatgaattgaaaccaggttttcctgtggaaagtatgtttgattggagtagggggtagaagttgagttctttcttgcaactcttggtcggtgtttatttttatattgtttctcaatgtggatgtcctcggtttgtatagtattcactgcaaaacaccctctcct

SEQ ID NO: 4188 - DNA, 532 bp, Canis familiaris
  misc_feature (1)..(532): n = a or c or g or t
cagctggtggcaggcaaggaaccagcgaatgtgggcgtcactaaagcaaagacaggaggtgctgtggaacggctgaccgacaccagcaagtacactggctcccacaaggagcgctttgatgagagtggcaagggcaagggcatcgctggacgtcaggacatcctggatgacagcggctatgtgagtgcctacaagaatgcaggcacctatgatgccaaagtgaagaagtgaggccaggaaggccccccagtgtggctacacccagcagaggctcaggcctgggcctaaagggcatgtggagcaagagaaccctgtcccctccctgctggacctgccacccagagcttcctgcccagccccacggggctagcccaccaggcctctgacccagactgctctgcgtcccctttcccttcctcttttcctccctgacttctggatgtctgaggagagtctgtgcctatagcctcactgccccaacctagccctgggcatggcnaacccctgcgtgcttgnnnnntatttaagctgc

SEQ ID NO: 4189 - DNA, 580 bp, Canis familiaris
  misc_feature (1)..(580): n = a or c or g or t
atgactttttgtcntagtgtgcttnaagaggtgatagggtaattctgtgttttctgatgagaagattgatannagctgaannntatgcttccaaacaactgaatgtaaaacacccctagccagctgttgaattccatgcccctgtttacttccagtattttcctgcaaaaatagagaaaaatgttgatgactgtttcaaattctctcaggagctctaatgttccaggaggctggtggttccagctgtgttttggtggcagtgttctcaaaacccctcagaatagtagagtcactgtttgcttcatccagtgtggttttctataggaagagagaaggcacagacgatcaaggctacagaatagagaattacctgtactgctggccattttagaacaccaaaacttgggacaaaatacttcctaacctcttaaacagttgtgctatctgtaattagttttatttttgtccttttagtaagctcagcaactttaccttgtttacaaatgtatttacaccatttgcttcaggctatggagcactattgtttccctctttttactatttataggattcctttttc

SEQ ID NO: 4190 - DNA, 439 bp, Canis familiaris
  misc_feature (1)..(439): n = a or c or g or t
aagacagtngggnctggttctaactcggnnagggggcaccctggtgcatttgtggtctctatctgcaggtaggctagctgacccgtctctttgagnnnttccctttgggaaacccaactnacagtattgatctcctttttgcctngtattgaatgacacattacctccacgctctcccggactangnagtcaacagggccacagggttgctttctctcttcggtggggatggggagttgacagggatgagggtccgaggaatgagcatgaatgcaagaaaacaaggggaaaagttaaactgtcacacagaaggttaacttttccagggtttgcagttaaaggtatttgaccattcgctggctgagccagatcacgggaacttgagagcttttactgtgattcttcaatgtaaaaaataaacaacaaggtcaaactgtgt

SEQ ID NO: 4191 - DNA, 562 bp, Canis familiaris
  misc_feature (1)..(562): n = a or c or g or t
cnacgtntgtgccaataatnnatatcaaggaccacagcaaaagaaatgatagtatatacgcaggggcaagccaatatgatttagactacgtttttgcacacttcagtggcatcttttttacaagcacagtctactttctggcctactgtatagccatgaaaaataactttaagctatatcctaaagcagtcctgccaggattcctgtcaggagttctttgggcaatagccacctgctgttggctcatagctaaccactctctcagtgctgtggtcagttttccaatagtcactgcgggtccaggatttatagctgcaatgtggggtgtcttcatgtttaaggaaataaagggtctacaaaactacctattgatgatatttgcattttgcatcatcttgactggagcattatgcacggctttctctaaagtctaacaatcccaaaaccagcagatggcaggagtgggtaagaggacaccgctgcagggcttggccggattatgctgagaacagagttcattttcatacagcaaaaggatctctacccgtcttggactgggtaa

SEQ ID NO: 4192 - DNA, 318 bp, Canis familiaris
  misc_feature (1)..(318): n = a or c or g or t
ccnnngagagagnnngtcctctgtctggaggacaaggagctggtgnnggcgccccccgccgagtcgggcctgggcccggaggccacnnncgcagggtgcggtcaccctggcggtgcgcaggagcccgcgggctcggcggaggcgcctgacggggacacctcacccgcgccccagccccccgcggcgtccgaggggaggtgaggcgggactcgcggggcacggnnnagccccgaggggaggctgacaacgaatgagagggggaacctctgggtcccgcctacacgtggctgattatacagtaagaaaccgaattctgct

SEQ ID NO: 4193 - DNA, 373 bp, Canis familiaris
  misc_feature (1)..(373): n = a or c or g or t
ggacactccgagatggctttannngacatttgtagagttnnntcctcatatnngtctcccctgtcnnnnnnngccatgcacaccnnnnnnnnnnnnaggcctnnnnnnanacacaattaccagtggaaacggcttcagggctgtgtgatgctgattaagtcttagtttgcactcaggtcatcagatatcccccatctctgccctgtttaccaaggcaaacagctggctgccgcctgccaacagctctcctgtcccattgctatctagcctttcagggtgggacccctgaaagaccaccttttgactaaccctagaatatantttatctcttacnnnnnnctccagccttgtgtnnntataaattgattgtgat

SEQ ID NO: 4194 - DNA, 532 bp, Canis familiaris
  misc_feature (1)..(532): n = a or c or g or t
gagccccgagacggcatcgaacctggccacatccccggcactgtgaacatccccttcacagacttcctgaccagcgagggtctggagaagagccccgaggagatcaaccatctgttccaggacaagaaggtggacttgtcccagccgctggtggccacgtgtggctccggcgtcacagcctgccacgtggcactgggagcttacctctgcggcaagcccgatgtgcccatctacgacggctcctgggtggagtggtacatgcgcgcccagccggaggaagtcatctccgagggccgggggaagacccactgaggctgggcaggacgcaaggagctgtgccagagtcagttctgactctgctttgaccaagtgtgtgtttcttcctgcaagtcaggtggcacacaggggaacatcccagagcccaggaattctgttgacttgtgggcttccgacagaggccggagagaaggtggtggtgggcgcaggggaagnnnnnctcccacctgctgnnnnnnaggccctccctcccttc

SEQ ID NO: 4195 - DNA, 594 bp, Canis familiaris
  misc_feature (1)..(594): n = a or c or g or t
aaaaactagnnncnnnnnatgttcagaaggttttnnatattgcttcaactgtaaacaagnnagccatagnnnggcaagaagtttttgatgatcatgtgaagcttcagccaggcacgattgttcaagtatggaaatttcaatcgtatagtgaggaacaagctcaagtcacagccgctggcttccctgtcatcctttctgctccttggtacttagattggattagttatggacaagactggaaaggttactataaagtggaccctcttgattttagtggttctccagaacagaaaaaacttgtcatgggtggagaagcttgtctgtggggagaatatgtggatgcaactaacctcactccaagattatggccccgggcaagtgctattggtgagagactgtggagtcacagcgacgtcaaagacctagaggatgcctacaacagactgacagttcaccgctgcagaatggtcagccggggaatagctgcagaacctctttatactggatattgtaaccactgaatacaaaacaaaaaaatgagcctaaacaaagaagaaaacgctacaatcaacttgattatgaaatcatggaaat

SEQ ID NO: 4196 - DNA, 527 bp, Canis familiaris
acagtggtgatgagctggagcagcagcctgggtgtagggcatcaggtggaaggtgctgtttttgatgaaaggagggctgtctattgagtggcagaagggctctcacagaactgttgctgtggcagcatgactcccaaacacaacatttttggtcttcacagtacttcctacatgtaagtgatacctttccaggcctcagtatatttttattatgatttttattcagttttactgtcagagtgcttgcattttttgatcagtggaagtattacaggatacactaagtctaccttattgtgaacagagaaatagagaatgttaagctgccaatgaaaaagaggtgacatggacccagcagatgcccagagtggcgctgtctacaagctgcacaattctgcccttcttcctgtttttccccatcctattttcaatcactcttcaagctaatgagagcatctaagggtccagtaatatttctggagagcaatgggcttattatgagactttggctttctatcttgcagttt

SEQ ID NO: 4197 - DNA, 656 bp, Canis familiaris
  misc_feature (1)..(656): n = a or c or g or t
tcccagagcaactnggcatnntgaagagtcgnnntcgttttcagtacaggccagaagactgtattttcaggaaggtaccatgcactttctgactgcaagttctgtctctcgtttttgatgtgcgtgctctgttctgtcctatggagccttttcagactcgttcctatgacctggtggcataccgtttggtgtctgacgtgtgccaagatcgctctgccacttgcactgtgcttactcctgagcagaaggaaaaggagtgtgtgttataggagaaatgcatctgaagaactcacaaagatgacagatgtgaaataaacaaaaattcttaaggcaataaaactagggggtgtatattatcttccggtgcatgttcttttctggaaaatatggtagctcgccaaccgcatccgctagtctgatattaaaacacacagtatttgtgaataagttgactctgtcaccccacctggaatttgactgtgttccccgcgtgtgtcatcgccagtggctgtccgcgggccccagcgggatccgtggctctgttgcttcgctctcttgtgtctcgtgctagcagcacgttgccatccgtcaccagaattagttctcacaacctagaaccagttttgtaccaaacacgtccgatgttttgatgccat

SEQ ID NO: 4198 - DNA, 545 bp, Canis familiaris
  misc_feature (1)..(545): n = a or c or g or t
catctggttcctccccagagggtgtcncaagcatggggtaggaggggggtggggatgtggggtgtgtagatgcaagggcgctcttcttcgtgtagtgatgacagcggtgaagggattccccccctcatcctcatgctggtgtcactggacccatgggtgctggcaccgctgagatagcctgttccctcaacattagctttagggccccacggatggtggacaggccacttcagccacaggagatagttgctctggacagtgccctgctgggggcagtgagactcctttgctcacctcctgcagccttttcctcccatgctcctggcccctggtgacctgcatggagctctagggccatgggcatgaggaggggcatgggaggggaggccagggcacagagcaccctctcggggactccctccctcttgcatctgccagcccttgctgtctgctccccgcccgtggtgggtcctgatcctacacctgcccctcacagagctatggnnnnngtgctgtgctcccnnnnntccaaaacctttcctttt

SEQ ID NO: 4199 - DNA, 657 bp, Canis familiaris
  misc_feature (1)..(657): n = a or c or g or t
tgtatngatttccntataaaattcctgctgttgnnnnnnaaaaagatgcagtatttattccagcagggtgggataatgataagaaaataggaatattacatgaaaattttcaaacattaaaagcagaagataannntgaagacattataactaaaccacctgtccgaaagtttgtgcatgagaaggaaattgtggcagaagatgaccaggtgtttcttatgaagctacagtcccttttagcaaagcaaccaccaactgcagctggaaggcctgtggatgcctcaccaagagtcccaggaggctcccctcgaacaccaaaccgatctgtgtcatccaatgttgccagcgtgtcacccatccctgctgggtccaaaaaaattgatccaaacatgaaagctggagctacaagtgaaggtgtcctggcaaatttcttcaatagtttgctgagtaaaaagactggttctccaggaggccctggggttggcagtggtagccctggaggtggagctggaagtggaagcagtggtttaccaccatccgccaaaaaatcaggccagaagcctgtcctatcagatgttcatgcagaactagacagaattgcacgcaaaccggttacagtttctcctgcagcacctacatctcctacggaaggagaag

SEQ ID NO: 4200 - DNA, 603 bp, Canis familiaris
  misc_feature (1)..(603): n = a or c or g or t
cctcngncnttacagagcccattctggtcaagactgttcccaacaaggccagaaactggcctccagatctgagtgtgtggtagtagagaatgcaatgaagcagccaccagagggctgcttttattacacctgtgaagctcttggataaaacaagacagccgtctaacgtggagcttccctttgaggagagtgagcggagagctctgcttctcaagaagtggtccctgtgcaagcatcaagagcacgcaaaggagaaggatgccatcacatctatgcttgagtcccagcaggaagctctgcaggggctggaactcatatccccagagctacattaggaggctaccaagcgggaccccaacttgttcccctttgaaacagaagggccagattacacactaccaatctccagttaccagccccctgagggcaggtaccatgacatcaccaaggtgtacacacaggtggagtttaagagatagagctgcaggcacatgtccacagaacacactgcccttttaacccagaatgagcagggcacaggcctgcttgtcacagaatcaagcatgctgtgaataaatacctttaataaagaaaaaaaannnn

SEQ ID NO: 4201 - DNA, 639 bp, Canis familiaris
aattcaagactgaaatatggatcatagtgttttcatacagtaaggtgaaagtgtattttcaaaacgatgtattactggatgtgatacagttttccattttgtgaaatgtctgcagcttacagttcccctcagtgactggagaaattttctccaggtgtttcctatatcactatcccttgttaatattaactctttttagaagtttaggttatttaagtagtttttacagaagtagcctaagaagccatgagtttcagagttaaatgatccctccctttcctctgtccctgaggcatcgatagtgaatgtgccagctggcagaagagaaagatggcacggggtggggggtgcattttagatatcttaagctttgaaactcttcttgttctccccatgtccaaaacggtttattttaacataaataatatgccttcacactggattgtaaaaggcatgtgattttatttttgtgaggtattgtcttctgcagtattaaagggaaagagatgttaatgtgtatcatcctatcttgtttttgaagccagggtagttgtataattttgttaccagcagtgctaacctgaatgtgatctggttaccttggaaatgcaggaacttatatgaatgtactgtaaaata

SEQ ID NO: 4202 - DNA, 582 bp, Canis familiaris
  misc_feature (1)..(582): n = a or c or g or t
aaacccagggtcagaacgnncagtgtgnctggctctcgacgctggtgactttgataaaagacaactgtggatgtttngaaataccaggaaataccaagacaatttgaaagaggtcccaaacatcaacttaaggaggaaagcttcgtaaccacttggggccaatggagccagaagacaagagtcatgggcattttgtcattttctgattggagatttgagaaggcttccacaggagaaatcatactctccgggaagataggagtccaagtctcctggtcttcggctggtgacctcagacaagccttgacctgtccgagtgagcctcagtctcctcctctgtgtaaagtctacatagtccttaaaagcccttccctgtctcacattgttagaacctcttttttggaactcaacattcacccccattgtggctgaaacgccagagtcatgactgtaagattttcagtagaaaaaaggattaaattaaaacaaataatttgcacttggatacacaaccccaaatgatcaacaggatcacacagcttgacagcaacccatcatttagacaaagatgtgtgaaatcaa

SEQ ID NO: 4203 - DNA, 522 bp, Canis familiaris
  misc_feature (1)..(522): n = a or c or g or t
aggattatgaattttatagaacnnnnnnnnnnnctcccaatattgggagtaatnnnttgtcttcnnnngggtnnnttttataaaaaaaaaaaaannnnaaaacatgtttgtgtaatttaaaatgatctcattattgaagaatgatttcataggaggaggagacctatgtggcttgagaacaccagtcaatgttactacgaaataagccacagatgcagtatctttggcttgtcatatcaaactctgtgttnctacagtgttgtccctctgcacagctcatacgtattgctttcttcctgggtgctaataaaaatagggaatggtgtggaaattggtttcttggatataagttttagtttgtatttatatacctagagtgttaaaataaataaagacacatttaagtcacaaagctatctgtatactgcaatcttagaccaactcaagtttcaggtttctagaatgtatggaaaaatcagcaaagaggaactaattttaagacaagcaaacagttcctatgat

SEQ ID NO: 4204 - DNA, 547 bp, Canis familiaris
  misc_feature (1)..(547): n = a or c or g or t
agacacagagctgaagaatcangaactcagaaatggtgaccagaacacatgaaaacccaggcacaaaagcctgctttctctagccacagaaccaagaaaagtgcagtctagccaannagaaaccttnaaacaataaacactcaactctggccaaataccagagaaatacctgtggccccatgcccccactcaacaaagaaggccaagcgggaagcctagacctccaccctcatctgcaaatgggagaggtggacagaatttccaggtcccttcagctgatagtgccacagagaattcatgaagatttcacattggtgggtgtgatctttatcatcaaagagaaagatggattttctttaataacattaaacacagggtgagtctttctcgtgaattgctgttattaatcccaggcagacaggagcaggaacaaaatggatacggtgcctcccgttcctgctggaagcagaggtggtgcagagaccacaggccccacccccaccttactttcatggacttctctttgaaactacaatggtttccgggc

SEQ ID NO: 4205 - DNA, 595 bp, Canis familiaris
  misc_feature (1)..(595): n = a or c or g or t
tcctcttcccaacagggctctttgtcctttccctctccttggccctagacgtgtaacccatnnaaaagcacaaggttctggccccttgctgtggtcacattccggttctccgtgctttgtggactttgctctattcacccagctcgggcagcgccaggtggtcctgtggagttgtgggggatggagagagcagtctgcctcctgccaggtagccaggagttgactcacccgtggcccggcagctctgcnnccctgtcccacaggatgggacgtgaaggactcaagaggctgggctctccacactgtctcatcctgtgtaggaaaacacatcacacttggtagccagatttctaagtggaaaaatgggaaattgaattctctatggaccttttggtttgtgggggagttttggttgtgtttcttggttttagttcagccaaacatgtcggcttttcatttttttatttttttaggataagtgatatatatatgttcgccttttaaatgtaaatgtttaaaagtaggcaatttatgtgtttccacaactgacattgatgcagacctcattctctccccctcttccaccctcctcttt

SEQ ID NO: 4206 - DNA, 495 bp, Canis familiaris
  misc_feature (1)..(495): n = a or c or g or t
tgcatgctgggnagcntagttcccaacccgcannnnnnnccgggaacctcctacccgcnnagggccacgactgcntngccacccccttccctgaggtccacacgcggaggggacgcgcaggctggagagagctgtcctgcccactcggggtccagccgtggctcgacctataaccgtgcggtactgtaggccccttctcccttcctcccgggcctccaggccccaatttttgtaagaagagtaggaaccgaatgacccaacgactgggctctgtgacctctaggccccaacaacgaagcgcttaaggctcctgcagtgctagccacggacacacaagactcgagccctgcactgcaggctgctggactccnnnntcattgctcacttccgttttaagctcataccatactttttcagaaccatttccttcgtttctacccttaccctattgggagctcctagacagcaacaacataaatacaataaatacgtaat

SEQ ID NO: 4207 - DNA, 561 bp, Canis familiaris
  misc_feature (1)..(561): n = a or c or g or t
accttgactctggcctgnnacgtannnngatctccccagagaaaaggcaacatgtttcaagaaatttcaatctctgggcaggtgactatgttccatctngtcttgatggtttttcaaataaccaaatatcatatgtctatcaagaagttgtggtggtcccaatttttagacgcttcccaagatgttataatgagaaatggaactcttttaaatttattcctcagagaagctacacagaatttttgaaaaagaaaccaaaagtaaggtttgctattgacaaaaaagttggnncttcactggagccctagtccttccagaaggttattgatgagtcttgtaatattggtactgccctgaacattcaaaatggtcagtgttctcctagttgacataggatttgtttaaattagagattagagattgtacatgccttaatgctgaggtgaagtattcttgcagtgataacacaaagattcaagtccttatatnnnaaactagaaaagctacagattatgttaccactccctgcctttaaaatatttttgtttttaaataaggttg

SEQ ID NO: 4208 - DNA, 627 bp, Canis familiaris
  misc_feature (1)..(627): n = a or c or g or t
agtaacgatgcagatngacgnacactaaacgnnngacttngnacagttatgggaaaccctcagtgtaggnnnnnnnnnangncgatccngtcggtcgctcacagagtcctgttngagnnnnncgtcctgtggtcgcnntctgattttcagtagcagctcctccggcctctgctgcagcgcagtcccggtgcgccgggcgcgtgtgtgcgtgtgtgccacacgcgccaccttggatcccagggcccgtgtctctggtccgcgtattccctcccgcctcatggagcctcaaaaacaaaatccggttctagaacagtccctgcacagatgaaaatgtgaacgtcctttgggcacttgcggttgagacgagtcggtgctctccaggctgtggccccccccccccggggtttcagagtcacagggcttgtcgcagctggtgtgcgggtgccgggtgcgcctcctacctgcaggcatccgccctcccctcggaaatgtgggaaaagcaactcgcacttccttatgcacttaatttattcattctccacagaacaccgtgttgcctggttgtggtacttacaaaatttgttttcnnngaaatggccatatannnnngcagatatgtactaattc

SEQ ID NO: 4209 - DNA, 437 bp, Canis familiaris
  misc_feature (1)..(437): n = a or c or g or t
gtgcagcanaangcgaatggttnctcttcagaaaangaagtnnnnnagtagaagtacannnnngtggaggagcatacgggcaaagnnagagcttggctnngggctctctttttttctttttgctggtggcttgtgnntgcacaactgcacatcatcagctccgttatttgtgcacagtgaccgttatttggcatggataaaggaaaagacttgtgacagctaggatcctgatcaagtctgagaagccagtattacaaaccaaacacaacttccagtttcctcgaaatgagatttggcagatgaagtatgtaccattctttgaaactttcttcagcacattgctgttggatttacagagactatttcgtgatttcagcaacttcacttttggtgcagtgatgttctatgttgattgaaatatttattccctgggggaa

SEQ ID NO: 4210 - DNA, 474 bp, Canis familiaris
  misc_feature (1)..(474): n = a or c or g or t
gtgtgtnnnactcgccccggcgcgtggggactccacgcaccgggacttctctgacctcttctgacctcgtcgcctgctcaccccgctcgacgctggagtccgagcagtggcaaagtgaagcaagtgtctgggacccaaggaaggtccgctccccggaggactctgcagcgtttctgctttcagcgtctaagcgaaactcggactttggggaagcacagtcacgagatgctgcagctgcgtgggaatgctcttcaaaaccacagtctctataactgagcagtttctgcttttcttttggaatggtcagtccaagcttcctgatgtcacctggacacagacgatggtataacttcgctgcctcaagttgtttctttttttttttaaataaagaactttaagatgcatgaacaatcatgctgcaatatgatcattctaaagcaaatatatacacatatatgtaatatatatatgtat

SEQ ID NO: 4211 - DNA, 609 bp, Canis familiaris
  misc_feature (1)..(609): n = a or c or g or t
agaggnctgggtgcccgaccagcccgcgctgtgggtgctcaagacctggatgggcctggtgctcagcagctggatggtgcagctgtctgtgctgatgtacgcgcctccctctgggcagccctggagagcggaaaaccccgaggacctggccttcctccccatcttcttctgctggcacctggccttgggggcggccctactggccgccgtctatggtctctgcagcctctggcaccatcgctcctcctctcggagagaggtcccgggcgccaagtaccggccgtgtcccaggggctacagcaacgaagacctggagaagctgggcgccgagggcgtgctgcgggatgagggcgtctaggcgagcagcgcctgtctccgtgctctgcctttggcgctgagcaggatgcagaacttgtttcctcctcgctgtagttattttacatctaaatggaacgaggctacttctgccttctgcaggagcagagggggtcagtcaatgtagcaggtgctcaagtctgagaggaggcaaagaggaagagagtcccggaggtgggtggaagaagcaaggatggtggagattaacttncngttgcttgggttttactgtaa

SEQ ID NO: 4212 - DNA, 449 bp, Canis familiaris
  misc_feature (1)..(449): n = a or c or g or t
tttttnnacgagtatnnnagtggtnnnatnnnnnnagcctttgatataattgatcgtttnnnnntnntgccnnngaatcaggnaagtgtnnnngagagnnnnnntgccnncagnnntttcagtgatgaagtcaggnnnnnncnctcagaagtgcttctcgcnaccatgaacatcttgttnnnacaatttaagaggctnnngggganaagtccatcctcggcatccaggccccnncgagtcatcgngnnnnnngnctctcaannnnnnngccaagcccgagccctaatcacctttgctgggatgataccctaccnnnnnnntggggannnnaatgcaaggcngntgcagatggaggtcctcatgaattaagtgtgatgcnnnnaggggctnnnggnnnnncacgctgtcagtacctcgggcgcatgggcccactggggtggagtttctgg

SEQ ID NO: 4213 - DNA, 614 bp, Canis familiaris
  misc_feature (1)..(614): n = a or c or g or t
tgcagttganctcnnnntncagccagttttccagagaccaaatattagacctatctgnnnngctagatgccagccaacntagtaagannaagatgcacagagcacatacatacagacactcattctaggtctcttcttttttctagatttgtctttgtctctgggcgttctccgtttctcttcattattttccacactttaattttttattttgtttagcttatgttttgccgagaagacataaagcatcttttaagcatcacaactattgcataaaccaagctgccttgaagctattttgtacatatgtttttcatttactgaaggcagggggtgctatatgcaaagaaattagcttcagtaactaggtaacatttccaaagagacacctgcagacatttatagtgccacattatagaattgctttaaaatgtatcatttctctcagatgctgccaaatgtactatgatgcatgtccttactgaggtatgcagacagcaaatgtcatacacatattcttctcatcgaagaagcaatgtgttgtaactaataatgatttctccaaatcgcagattaattggtgtgcaattaatttggcatatcctaaatgtagc

SEQ ID NO: 4214 - DNA, 570 bp, Canis familiaris
  misc_feature (1)..(570): n = a or c or g or t
tcagcagactannntngcagtgacacctcctggcnnggcnagagnagactnnaaaattctaagagccctctctgagattgcaggtatgacccttccatatgatactttggatcaagtaaggcacagattggaagaagtctctcctaatcttgtccgatatgatgatgtggaaggagccaattatttccagcaagcaaatgagctctccaagctagtgaaccagcaacttcttgctgatccacttgttccacctcagctaacaataaaagacttctacatgacagactccattagcagagcctcacagacaatggctaaatgtgtcaaagctgtcacagagggtgcccaggcaatagaggaaccatccatatgctgaaacttctattaggaaccccattttgttacaaataattaatggacagttatgttggagtgatctcctacaggttttatctctttaaaaaataatctgaataatgtaatatttaaggttgtaccttgcttatttgaaaatgatgctgcaattatcagtgaactttgaggtttcaaagacatttatgtattttgtgt

SEQ ID NO: 4215 - DNA, 672 bp, Canis familiaris
  misc_feature (1)..(672): n = a or c or g or t
tgcagagtcatgctgcngtgntccgtgtgnnnngtgtgttacannnnnnnngtgannnnntcagccagctctatnnagnnnnnnagcatctgaagacatttgaccgaggantggncnggaacaccgacntggtagagaccctnnngctgcagaacctgatgctctgtgcacttcagaccatttatggagcagaggcccggaaggagtcacgtggcgctcacgccagggaagattacaaggtgcggattgacgagtatgattactctaagcccatccagggacagcagaagaagccgtttgaggagcactggagaaagcacaccctttcctacgtcgatatcaagactgggaaggtctcattggaatatagacctgtgatcgacagaactttaaatgaggctgactgtgccacggtccctccagccattcgctcctactgatgagaccagagttgaccagcttttgtaattatgtataatagctcatgcgtgtgttcatatcctaattacctttttaaaatcctgtactcaagtgaataaggagtgtcattggaatagagatcatctacccggtagccagaagcttgctagtaatcaacagccaggaagtgtgaatgaagcttaccttttgcttcatcatccttgtgaaataataaaactgggcatgattctt

SEQ ID NO: 4216 - DNA, 578 bp, Canis familiaris
  misc_feature (1)..(578): n = a or c or g or t
ccacgnngaccttcaacannagcnagatcactgggttcctgaaaccannnnnggtacgagtnnnactgaaagaatctaaagttnnagtgttcaatgtnnagttgnnnnnnnnactactcaactacggcattctccacaccctctaccccaaggtcaatgagaagttggcagatggcttcccccttcctctgctcaaggatactcggctctatgaccctgttctggagatccacaaggacttcctgttcctgggcaccaacctccagtacctgagagcttgagggcagggacacagccggggtttggaggccacagccggattggcaaattgcatttccagatgtgcagcgtagtcctggcaattctgggaagatgaagacttctctgttctcagctctcagggagagctccacctggcttctgcccccacactgctcctcttcagcaggtgcacccacaccatctctgactctgggctttactccccccaccaccaccctgctcccaggatggaccatcttcccccactggcctgtaccgtctttaagggcaggcatcatttttntagtcatcatctg

SEQ ID NO: 4217 - DNA, 616 bp, Canis familiaris
  misc_feature (1)..(616): n = a or c or g or t
gtnnaaaangaaaaatggtcaaggttnacacaaaaactgatggnnnannngctattcatnntaaatctgttaatgtnnngcaaacagaatttcactacaantggcttatctatcatctgaagatgagaacaagtagtatatacttgtatgactgcacagaggtttctccatactgtctcttgttctttggaggtgatatttccatccagaaggataacgatcaagaaactattgctgtagatgaatggattgtctttcagtctccagcaagaattgcccatcttgttaaggaattaagaaaggagctagatacccttctgcaagagaagatcgaaagtccgcatcctgtagattggaaggacactaaatccagagactgtgcagtactgtcagctattatagacttgatcaaaacacaggaaaaagcaagtcccaggaacttaccaccacgaatccaggatggatattacagctgacgacttttctgtggtggtctgacaatttgacagccattttctatcatagtttaatttggggctagatgccaaaccatgggacatgaataatttccatatgtaaggtagaaaccttcagtaagtagtaaagacgtaatgtg

SEQ ID NO: 4218 - DNA, 560 bp, Canis familiaris
  misc_feature (1)..(560): n = a or c or g or t
gcnctccttgnnccacgcactagtgggactccagctggatatttctcttgctttctatttgagactgggggcagtgctgggctcaggggggagcatctcagcatcagccctttgcaggtgcaacaggttagcagcccctttgcagcatctcgcctgctaacctctgctctctggcctctctcctcctgcagcaactgaccaaccacatcagggagtccctgccagccttgcggagcaagctgcagagccagctgctgtccctcgagaaggaggtggaggagtacaagaacttccggcccgatgaccccacccgcaaaaccaaagccctgttgcagtatgtgttcccctgaaagcccaacccagctctccagagcctctgcccagccacagggtcccaggtccaggctgggtggcaatcctcatttgtctctctgttcacttagcctaacatttgtggagagcctcctgtgtgccaggtctgtcctgagcgctggggtccccacagtgaatggagcagacagccagccctgccgtatgtgcttagaaaggggaagggggag

SEQ ID NO: 4219 - DNA, 599 bp, Canis familiaris
  misc_feature (1)..(599): n = a or c or g or t
caannactgcaccgcactgctgcacctcctccatgcnnnngtgcagaggaaatgccccgatgctcaggaaccnntgcagatcctgtatatccgcagcatctcccctttccccgagcnnnngcagttcctccaggataccatcaagagccctcttcgttccacaggtataatctgcaggtgttggaggctgagggcgacatgaagcaggccctgagcgaactgcaggcgcggcacccccagctggaggctgtcctgatgggcacgcgccgcacagacccctactcctgcagcctctgccccttcagccccactgaccccggctggcctgccttcatgcgtgtcaacccgctgctggactggacctatagagacatctgggacttcctgcgtcagctgtttgtcccgtactgcatcctatatgaccgaggctacacgtccctggggggccgagagaacacggtgaggaacccagccctgaagtgcctgagcccagggggacagcccacctaccgtcctgcctacctacttgagaacgaagaggaggagcggaactcccgcacatgacctcgcactcatccgctccaggagctgggagggag

SEQ ID NO: 4220 - DNA, 564 bp, Canis familiaris
  misc_feature (1)..(564): n = a or c or g or t
cgaccagaatcactgaccgtcctttnngctgagctggacacatcctnnagacctnnnagtctccctgcgattttacacccatagagcctcagcccaggggagtgaggaaacacgcccatgtcctgggtaaaagcagaggtcccccagctcccggtccagaacctgcctgaccacgggcttcatttatttctcgggcaaaccagtgaacctgaataaaggaaatctcatttgaaatggagtcggaaggccagaaggggaagctctcaccctctaccactcctcatcagttgcagaagcaatagaaagagacaataccttgcattccacacagaaagaagcctggacattattttctctgcatgaggaaggaagattttctcctggtctggcaacagcccagccaatgagagtctgtcacaactcggccagtgaaaagccactacacttacaactcccagtttcctccaaaggaatttttattaaaaacagtcctcaactccctgccctttcctctttgttctttcgtctttgttcactggacttgcctatggttttgccatagct

SEQ ID NO: 4221 - DNA, 661 bp, Canis familiaris
  misc_feature (1)..(661): n = a or c or g or t
atgggcttggttcccttcgngtnggctcctgctcagacgtcgtngtggatcatgcatctnagctgaagctgccnnngacatcaagggatgtgggggcagagacttatgcccggtaccgttacccaggatcactggatgagagtcaggtggccaaacaccgnctactcttcttcaaacaccggctgcagtgcatgacttcagaatgacggccactcagggccttcagactgtcaggctgggcctgccgcctcgtccctgccaggaatttctagcaaaccccaccacccagtgaccactccactgactgtccccgatccccttcagaatgtgatcccaaatagggacttgtcctggtgacactcctcctttctgcgagtgcccagggacgtgatggagccataactcgtcccacagccagtgccaagtcctccccctacccctttctcatggggcagtaagtgtggggggggtcgctttctaagtgccaaagagcccatggggaccctaagaaaactaaagtggaactattcttctctcatcttcttgggactgagggattggggaagcccccaacatgtattcccagggctgtgctcctcttcctcatctctggatccaggactccgcaccggctctagccccaccccccatggagacaacg

SEQ ID NO: 4222 - DNA, 556 bp, Canis familiaris
  misc_feature (1)..(556): n = a or c or g or t
catccacntggtactcctaagctcnnnctgcccaccntatgctcnnggttcagactcagttcactcaaacctgaccttccatggcagcnctttgccctcagattaaacctaagttctttaactgtgtgtttaaagctcttggccctggtcacccccgtttcatcaccccaagtccctgtctacactcaagttgtggtcctttagactctagtcttctagtcctgctaacagtgttccttcctgtggatatttgttcacatagtttcctcctgcctttccctccttctccacctgtgcagtcctgcccatccttctatcctgcccatccttctacccagctcttcggtcctggtccccagtcagccctgtcctggggcacctcccctgcagcagcacaagcccagacccttttgtgggcctttgagatagcattctgtccctctcagccacctggcctatgtactggatcctgtgtttttgggggctggggctctaggaaaaatggaccgcagacagttagtttgtggattccaaggattccaaggattttggggag

SEQ ID NO: 4223 - DNA, 542 bp, Canis familiaris
  misc_feature (1)..(542): n = a or c or g or t
ctnnganggctcagtgccccttacactgaagacttgnnnagccagagctgcagctgctctcgannctgcctgcccnnnnntgccagnngactgtggatcagagaacactgatccccgttagtatgggcctccccgcactcacagccacaaagctgcgggaatcacaggtcttgcaggtttggtcacctggtccctggctggaaggctacagatttctngaacaggtgaacagaccaaaaaactaaaatgcacctgtaaaatgaacattaatctaccaccccaaatctctggcctgacactactggcatccaggctggagaagggagaaggcaggaatgcaccaaactgttatgaatgctgcctcccaagtcaccacaacccaggtttgctgatctgaacaaagaaccagtcagttagcagcgattttctgccccactgccccaacaggtccttatctagataggtttgtcaggcaggattagtttacaattacccccaggctcactcagtccccttctctaaccttcctctcctgggatctt

SEQ ID NO: 4224 - DNA, 588 bp, Canis familiaris
  misc_feature (1)..(588): n = a or c or g or t
ctnnngagacgagctccatcttcttcccaaccccctttcccacactgtttaaagggatcagtgccaacaccaatgtaaatcattttggcttctgttctaatttctgaaattcctaaaatatctgtgcagcccacaaatatgtcctctagactcttgttattcagcagcttgctgccggtgaggtttttgtttttatgattcctctggtatgtaggacagtttcacagcctagataaggtaagtacaatgctcgatattttcacagaccccaatacttcaaagcaaagcatttggccgggtaagcagtgtataagctctttcaactatgccacttatgaggaacaaaatccttaagttgcggatctgcaaaggaacattctttgcactattgtgtgctcaactgtttctttttcattagttccactagaatcagttgcttcaatttgtaaacaataactttaccacccaaagctgctcaaaaatgataagatgtggaaaaaattacaaacacacatcaacaactaggacagtcagtcagccttgaaaacaaaacaaaacgaaataaaacaaaacgaaaacaaaagacct

SEQ ID NO: 4225 - DNA, 569 bp, Canis familiaris
  misc_feature (1)..(569): n = a or c or g or t
ctctgtaaatactgtgatttctttttttttttccttttctctttagaattttgttaaagaaatnctaaaatttttaaacatctgctttccacaatacaccatgaacactaaaatgaaattacttccctataaatatcttttttttcttttttttcttttggtgtgggagatcaaagattcaaagtctaactcctaagatatatttacagaaagaagcgctgtcacaatagagagggtaatactacaattatttcttggcttccacttgctgtagttaactaagtccaaaaacagctgtcagaacctaaagagcagaacatttgaaactcagagctctggatggaaagcaggaagtttgccggggacaaaggggacagcactattactattgaatcaatgcctggagaaaaaaagcggagtttatttgtgtaacgggagccacatgcacagcgaggctgggaaggaagatactgcaccatccttaacttcggagcttgcatctctccaatgtaacgctttggcaataggagacaggtcttgccagttcaagtctcacttcctgtctgtgt

SEQ ID NO: 4226 - DNA, 725 bp, Canis familiaris
  misc_feature (1)..(725): n = a or c or g or t
acnntccccangnagggacagacgtgtgtgntgnactacacannnntgctccaaaatgggaagaaatttgattcatccagagacagaaacaaacctttcaagttcagaattggcaaacannnngtcatcaagggttttgaagagggtgcagcccagatgagcttggggcagagggcnnagctgacctgcacccccgatgtggcgtatnnagccacgggccaccctggtgtcatccctcccaatgccaccctcatctttgacgtggagctgctcaacctagagtgaaggcaggaaagaacgcaaggtggctggagatggctgctactcaccctcccagcctgctctgccactgggacggctcctcctgcttggggctcttgatcagtgcgctaacgtcactgccccacagcatcatccattctctgaccaagttgctctgtatgtgttcatcgtttacgcacatctttgcttgaggaaactttggttgcagatcaaaacatttcaggttgtgcattttgcgtgatgcatgtagtagccatttctgatcacagaatacagatttcttgttcgcacaatctacactgccttacttaagccagacacacaaggtgctcagacgtgaaatgtacatggtatacacagagggacttgagccagttacctttgctgtcactttctctcttacaaattctgttggctgctgacttacacaatgtcctctttgg

SEQ ID NO: 4227 - DNA, 365 bp, Canis familiaris
  misc_feature (1)..(365): n = a or c or g or t
tgtatatnnnannnnngnnnnntgagaggactgggaannnnaccnnannncataatnnnnncctcagtgcttggattttgattatcaagaaacagctgatttcaaggctggaatatattttttattccagnnnncaagatattcaaagaatgatgggaatgtttcagaaaannnnatagaagccagcttgaaagngnnnacannnntcaaatcagggataatttgagtatcaaaagtaatacnngtaatnnnatnanngngnnnnnnantaagtgnncactgatgttaattaattaaataggagaagggaaaagctcatccnnncaatggaatgtccaccgataaatgtggataggacttttaaa

SEQ ID NO: 4228 - DNA, 682 bp, Canis familiaris
  misc_feature (1)..(673): n = a or c or g or t
tgcccccctgngnnntgccatttgatgnnnnanggactccaggnnatcagagcgagaggctgagccatcttgtccatcagcaggnnntacgcatnnaacaccgggagctctgctcagacccagttctctggggacggtgatttggtgttttacatgatggcatccaggaattggctgagccaacaggccatgtgggccgctttggcccagtgagccagtttctctgtggcatctgggagcacagcggtgcagccacctggctcaagctatttccaaattccaaaaggatggcttgtaaaccttggtctccctctcttctgcccagagaaggcacatgtgcttgagcgtgcacacgtgtgcacacatgcacacacacacatacacacacacacacacaaacggaattttaagagaatgttttcttggtgccattttaatttaattttattttgaattttggaaggggagtaagggaatgaggccaaggaagttgtgcagcttttagctccggcctggcagcctggagattcccataccttgtgtatcgaaccccaggaaaaggaagaggtcgaaacaacactgcggaaggagcgtggtttcgggagtttattttaagactgctaggaaggaaacaggccccattttgtatatagttgcaacttaaactttttggcttgcaaaa

SEQ ID NO: 4229 - DNA, 177 bp, Canis familiaris
  misc_feature (1)..(177): n = a or c or g or t
attgcanagtgtggtggccgaagtgggtgtgcctgtctccgtctcccactttgacttgcacgaggagatgctgtgggtgggaagccacggggtaagaactgtacccctttgtaagggatgaaaagagntgnnngaggtcttttatctggctttannccaagggcagctgctttactg

SEQ ID NO: 4230 - DNA, 193 bp, Canis familiaris
  misc_feature (1)..(193): n = a or c or g or t
gangggccanngtggnnnngagtgtgaggaggggtggtgaagggcacaagtgttccccctgctgcacctggcttcctgaccgcctgacgctggcagggacttcaggnnaggctgagtgagcgattctcctgggcaggagagctggaggcagaagggtgccaccattctccacatcctcacccccctcctccct

SEQ ID NO: 4231 - DNA, 665 bp, Canis familiaris
  misc_feature (1)..(665): n = a or c or g or t
gccttggnctgagnctgcgcatggcnnatgagagcggcgatgcggcggggtgcccgccccccgctccggccccgatccgacgnnagtcttccgccaactaccgcgcgtacgccannnnnnngcacgccaagaaaaagtccaagatctccgnntcgaggaaactgcagctgaagaccctgatgctgcagatcgcgaagcaagagctggagagggaggcggaggagcggcgcggagagaaagggcgcgccctgagcacgcggtgccagccgctggagttagccgggctgggcttcgcggagctgcaggacttgtgccgacaactccacgcccgagtggacaaagtggatgaagagagatacgatgtggaggcgaaagtcaccaagaacatcacagagatagcagatctgacccagaagatctttgaccttcgtggcaaatttaagcggcccaccctgcggagggtgaggatctctgcagatgccatgatgcaggcgctgctgggcaccagggctaaggagtccttagacctgcgggcccacctcaagcaggtgaagaaggaggacacagagaaggaaaaccgggaggtgggagactggcgtaagaacatcgatgcgctgagtggaatggagggccgcaagaaaaannnnnnaggctgagctggctgc

SEQ ID NO: 4232 - DNA, 615 bp, Canis familiaris
  misc_feature (1)..(615): n = a or c or g or t
accctgcacttgcctccctgcctcatctctcttctcattccactatgcctcaagccctggtggnctggccctttctattttcctcctatcctcagggacctgtgctgctctgtcctcgtgtcccactggtggtttagtttgggcactttatccttttcctctcctgtcccatgtccctctctgctttatttcctggctgtgtcctgtcctttgcagctcactctgcactctttgccagctcctcctccccagcaggctgtggctaagcttcaaggaggctcttgtctgggtggtacagactaaacctggagtggtaggtcaggccagtggttatgcgcttaggtcactgtagctcacaaaaactccactgcacccttgccctacttcatcccaaccttccctgagaagggaggagagtgggaatcccacagcacgtgcaccagcactgcattagtgagcagcagctccatcctgttgggatgaagggctttcttaactatcctaggaaggtttaaagagactgctctctagggggccatggatgttcccagtgtggtgggacccccccttctagggtcaggacgtggacagtaacatctgtgcaagtgttgactg

SEQ ID NO: 4233 - DNA, 598 bp, Canis familiaris
  misc_feature (1)..(598): n = a or c or g or t
cctgcacagtctctgtgtcccacacgntgtccaactcattggtgtatgnnnctgactggtcctggctctactttggcaacctgtcccaaacccaccagtcataccacttagggtcctctccctgcaacaactcaggagccagggcagcacatctctgtagcatgaaggctgtataccagtcaccagcaccctctcttcatcattnngcagaggatgttgaagaggatcactccaaactgagaactcttctccagccactcacagaggatatggtaaagagtggcacccggctgcatactgcaggggccaagttctgtgaccgtgacctctatctggaagcagtgaactcggatgctgacctcctcgctacttgctccttttatgatcatgttcttcacctctggaagtgggagaacnngctgannctaggnnnnnnnnnnntnnnnnnngttnnnnnnnnnnnaagnnnnnnnntcnnnnnnntaaacccaagtgcgactttggtgaagtgccctcagatcatctcgttgagttttcctgtattccacaggtgactagagggtttggtgcacctcaggggctctacggtgtcaacggt

SEQ ID NO: 4234 - DNA, 578 bp, Canis familiaris
  misc_feature (1)..(578): n = a or c or g or t
aaacagaaaatacagnngactgcagagacgaaaagtgcttgaaagaggaaccacggtntgagaggccacactgcggctttcaagatgtctttgaagacaaagacctcttctcaggcagttattttcccactggtcatgtgggtaaggccaggagatttcactcctccttctttgatgtgatccccatattggacacaggattttccacgtttgtttccccaggctccagaccaagtcccccttcctctgggacatttgttcccttcgtaagccgtggaatgggaaacttcagactggtcaccacgtgtagccagatagtgaatggcaagagagttgtgacaaagaaagttctagaaaatgtgacagggaagactggactggaaaaagacagcctatttcatcagatgcctccaggtcatcggaaattgatggaaaatccctgctattgatgacaagaaatgacgtgttgacaggacttcagttaaaactggggcctgctctaaaaatctacgaatatcacgtaaaacctctgcagacaaagcatctcaagaacaactcttcatagtacagtcaaattg

SEQ ID NO: 4235 - DNA, 422 bp, Canis familiaris
  misc_feature (1)..(422): n = a or c or g or t
tnntaccaacccatctcaaacgtntccagaaaattgnaggggactgaacacttcctaactcattctgtgaggncagcatcactctgataccaaagccaggaaaagacaccgcaagaaacctacagaccattatcccttatgaacactgaagcaaaaatcctcaacaaataccagcaaagcaaattcaaaagcatataaaaaggactacattccatgaccaagtgtggtttattcctggaatgtgaggatggttcaaaatatgaaaatcaaaaaaaatatgaaaatcaatcaacacaatataccatacagtaacagaatgaaggggaaaaaacacagtaatctcaactgatgcagaagaagcatctgagaaaatccaacacccaccttcattataataaagactcaagaggggatccctgggt

SEQ ID NO: 4236 - DNA, 686 bp, Canis familiaris
  misc_feature (1)..(686): n = a or c or g or t
taagggtcaacatcantgtgccgatnnnnnncgagcagaagcangnnnaaganncaacacacaaaaacattgaggannaccgcaagctgctgattcannnnnccatcgtgaggatcatgaagatgaggaaggtnntcaagcaccagcagctgctcggagaagttctcactcagctgtcctcgagattcaaaccgcgggtcccagtaatcaagaaatgcattgacattctgatcgagaaagaatacttggagcgagtcgatggtgaaaaggacacctacagttacttggcttaacccttccagaagggtctgactgcgacctgcagcgaagagttcccggtggagagaacaacccgagttcatagcagccagcctgccaccatttgaacctccctttttagacctgaggccaaccgccccccgctggcctcagccggacatcagaactgctcaggattgatacatttcaagtctgtaaatatggacaccaacgccatttaacctaatttaagaacagaggggactcgaacctcccctgctgagggctgcatgctactgcatctaaaccgctacgttggctacggggttaacagctgtcgtcctggcagcacttggagagcaagtctaatgggcccacgtgtaatctgctatgaaaaaccatttgtatagtgtgtttcattttttaat

SEQ ID NO: 4237 - DNA, 372 bp, Canis familiaris
  misc_feature (1)..(363): n = a or c or g or t
gcgtgcagggcccaggcccaagcccagnnngcagggacccaagggcacgacnnncgtgcagggcccaggccnnnnnnnanncgggggnnncggnnnacnnnnncnnnnngnnnnnnngnnnnggcccnggggctgcagggactgtgnnnagggtcncgtnnncgtgacatcagcggccacaggtgtctccactccnnnnncttgtnncnnnttagatcnnnnnnnancnnnngtgtcatttctttttnnnnangccanttatgtgatcagcnnnnnnngtgnnnnagttttcagtgnnnnnnnnncagnnnnnnnctatttnnnnnnnngtgttnnnnnagtnncnnnnnnnnnnnnnnnnnnaaaaaaaaa

SEQ ID NO: 4238 - DNA, 535 bp, Canis familiaris
  misc_feature (1)..(535): n = a or c or g or t
aagaggcgtnngctgcgtgctgccttcngtctccagcccaccccctcagccctgaggttcccctctgcttctccaccgagcttgnaggccaagtggccggtattggcagctcagggtgagggagtgctgctcactctggccacgctctgcactcggctgcaccggaactttcgacgcggggagagcatctactgggagcccacagcggacagccaggacacggtggccgctgtgctgaagcggaggctgctcttgcccccacgccggctcaagcgctcccgccggagaccccttctcccgccctcgccggacagcggcccagacggggacagctccgactgacctgccccagccctgccactgcagtggtggtggtgaaggggacctttgcccaggaggccgcgacctctgccacgtggaccctgcgcgggaccgccccctggcggccggccggagcgcttcccgcctaagcatcgcaaaggggcttgtccctccgcctccggtgtggcttgctaccgagggttgagggaagggg

SEQ ID NO: 4239 - DNA, 264 bp, Canis familiaris
  misc_feature (1)..(264): n = a or c or g or t
ctcttcactcacagaggtcacattttcctnnnnnncaatcagacagacacgactccactggtcactacccatacctggcacccccacaagccaaggactttgttatcagcagcaagcgatgcctctctgcacgtgtgggactgggtagacatgcatgcgtccagctgactccagcgtctttctgcccaggcctctaagaagaggaggagctgctgtatagccaatgtgctgatttaggactccagtgactggagggagagagag

SEQ ID NO: 4240 - DNA, 635 bp, Canis familiaris
  misc_feature (1)..(635): n = a or c or g or t
cgttggaagactcagagaggccaggatcccatcctnagnaatagggaggggtggtgnntagcatcacaagaaaccaacctgaaaatcaggtcnagtcagtccangcacatggcctcccatnnggggagagcccactgtccctctcccacatgtctgggcacctgccctnngctgaggccaggctgctcnaggggcctcttgagccctcacctgccacagagcaacccaggttaaatanancccgtgcacaaagccataggctaaagcctgtggagttgtttttacgaatcaaatttaaccatttcatacttggtccctgaggtgtgcagagtgcccacttgcctcttctagactcacagcttatcttcgccatttgtggtttccatgtcactcttcgtagaaacagganagcccagtatcctcaatctttgccctcttccagctgcctcatcacagcactgcggcctccccctgctgcccaggcacgccatttccaagggcaggaaggggcagtgtcctgcagcccatcttttctgtgactgtcttaggtgatgcgtggccccctccacctttccacccaacaacttcctatccctnnnntgctgcacggtccagagtctgggacctactttgtt

SEQ ID NO: 4241 - DNA, 613 bp, Canis familiaris
  misc_feature (1)..(613): n = a or c or g or t
tgctcnnnggctatagctctcagnnttgcctgccctactctgatnnnccatgggctannnnnncnctcagagtctcagcctggtcccccacctnctgccaggctcccagccctcttccccctccagtggcttttcacggccatcagagactctgctcgctgtggctggcagagtatggaattctaggcctggccacctgcgtggccctggccaggtcatagcccctctcagcctcagctgcaacctctgtaaaatgattgtttgggggaggagagcagactctctgtgggactcttgggagttctttggtgaggagcccctatggggtggtgggtgggacagcaccaggggttagaacaccaggctgggcctttgcccctgccttgcagtgggtccctagaaagtcatggttcccctgtgggtctctgtccccagccactgaccctggagacctcttccatgggagtagggtggggtgggccagggggtgaccctgtacagtcaggagtctcatgtcagaggcaagggaaggtcttaagtgcaggggctgcgtggcttgaggtttggggagaggaagccatccgtatcaccgtctctgttagtgctgggatag

SEQ ID NO: 4242 - DNA, 409 bp, Canis familiaris
  misc_feature (1)..(409): n = a or c or g or t
acccagcggcctcagaacnncgcccagctgtcctggacacagaacgattcttcctnnngaatnngcatccctctctgcaaatgggaaatgaccttccctcccccctcatgccatctgtaaggtgaaatctgctcctcttctgatgtgaaaaggagtttccctctacctctctcacctgcacagggaagcatcccctcccgcccacacactggaacttgagcnnnnnnnctcnnnnnnctgagtggactgtgccagtgccacgtgcgtctctttccccaagactagaagggcctcgagggtccttcccacctctggtcacccccaccngcgcaccgccctcctnnnctgtatttattatgttcttatgctgtgccaggtgctaaagtccggnnnnnccccccaccgtggg

SEQ ID NO: 4243 - DNA, 644 bp, Canis familiaris
  misc_feature (1)..(644): n = a or c or g or t
ctgaagcagagagtaagaggacagactgagaccagagaggctcattgcttttctggctagggaagccagccaccagcatggaagcagcttgagggtggctgaacacaggttccaggcccatcttttccaggtggagacttcattacagaacaatgctctctgtctcttcctgatcacagatgctaaatcttggccatgactcaggactgtataggctgtgtccttaccaccgatttggccgaggttgaggacttcgtaacacctcccctactccatctccaagccttgatgggacctcccacttactctggacctcatgtgctctaaagaagctttgatagccaatgtggtgtcttccataggtctcctcttcttgctgcaaggagccagcctcatgggtcctcttggccaagaattgcatctggacaattcctggttttcaaggcggtctctgttgccagtttagactccagagtaggcctctgtgaggcttctgtggcctcaaagcagagggtgcagatggaggcccggctgagccctctgctgtcaactgctcatccttgctctagctctagctctagccacttgtgacaaacaaccttgtttcctnnnaattccagcatgactttggtgccctgttgtta

SEQ ID NO: 4244 - DNA, 611 bp, Canis familiaris
  misc_feature (1)..(611): n = a or c or g or t
gtcttctgttctgatcatttgaagtgacttttcctctttnnncttccacacactgttcttttcagatcagtaagaaaaatattgctgtcaagaattacttgagttttcaaagagataaatgctttgctttataaacattatgtctaattaaagtgtgaatatcccaatttcagaaaagacatgaactggatatagaaagttccaaaaaggaatagttatttacattattaaaaaaatgtgtttactttacaaaggcttgtttgtgtctctttaggtgtgtgttttgtacatgtatcatgaactctttgactcagtgacagggtgggatggaatggcaggaatacttatactaaattcatgagctgctgcaatttgaaggttaattagaaataaagtatatctgaactcatattaaaatgataaatggaaaaaaaattaaacaaataaaaaaataaaatgataaatggttcagtgattcaaaatcgtatacatttttctctttataacagtataatccaataaaacataaaataaagaaagtttgctaaataaacttattggagaatctttaaaacttgtgtaattttttagccgtggtctnnnnagtttta

SEQ ID NO: 4245 - DNA, 589 bp, Canis familiaris
  misc_feature (1)..(589): n = a or c or g or t
tgcgtgngaagtggctaacataacttttctcaagtcactttactaaacaaacttttgtaaatagacttaacattctattttcaagtttcatttctattttgcagtgtagccagcctcatcaaagccctgacttacccatttgaattttgcactgactatattatctaggtatttggttggcctgtggctgcacttcatgataaagtggatttgaactacctggtggctcttcataaaatgcagattttcctcatgtactgtgatgtctgatgcaatgcatcctagaacaaactagcaatttgctagtttactctaatgactaaacatagtctggtgtgtgtggtctttctcatcttctagtatctttaaagatgaatcctaagaacttggacatttgcaataaaggaattttcttttaacctcaagcgtctctggattggtgacatacacacatttgtcaacatttccggtcaggtggagaggcagctgtttgagctctaatgtgtgcagctttgaactaaaactggagttcttttctgggtgcctctctctgaaaggtataacagttattagataactggcttttttc

SEQ ID NO: 4246 - DNA, 345 bp, Canis familiaris
  misc_feature (1)..(345): n = a or c or g or t
tgtggaatagcagactagttttaattaccaacttgtcacataaaatcatatgttttaggccattcttatctagnnatttaagaaagttnncaaaataagcaggtacttattgaagtgcatcttttcagtnnnnatgttttttttccgtctgnnncctggttgtctgtgtgttnnnnntgcactcaagtgcccatgggcaggagtcagctcaaagtcgggggaggtcctagacaggatgtacccatccccatcttaatttgcatgaaaagccaaggttcttttaagcactcaagttattaannnnnnnnnnaacaaaaaacaggcacatccattcattnangtagt

SEQ ID NO: 4247 - DNA, 578 bp, Canis familiaris
  misc_feature (1)..(578): n = a or c or g or t
ccntgnctcatcctgcatgaatgcagnngtttcaagtggggtgtnnacaaaagttggctctccttgcctcctgtggtcaccccagcagacccattgcccccaggcctgatgacagctattccaccccagctttggtacatgaatcccccattagagacattcatccccgcaccataatgcaagaaaccctattgctacccaggcctctcttccaagctcccttggctccagcagcacctggagacaatgccccctgctccctccacagtgctgctctccatatccacccagctttgttctggaaactccagagagggctggagcttgacccatctcagggaatgttgcccctgggccctggcttaaggctatactccggatctctgctcaccccaagggccctctcaaagcccactgccccctctacaactcctaggaggtaccattcttctcactctgggtcctacccctgcctagcagtgtcctagctctcaacagcttagggaagctctacacagagtaacctggaaccaggcacagggaaatttggtataacnnaatcagtgtctctatgtaag

SEQ ID NO: 4248 - DNA, 662 bp, Canis familiaris
gagctttaaagtgttaccctttcagaggtacagaagaaacccaattccatgaaaagtcctttcagctgtagacttggggggaccttggtggcccctctagagagttcaggtttcttttttatctagaaatggctgcaagtggaagctgataatttgtaggcactttgttaattgatattgagtcaatgaatgaaatgatgaattcttgagaattgaactttggtttcctacccgaatgaaggagaggctcattgatggtgtgtacaaactcattgaaagagattttttttagacagattttcatgacctgtttccacccactccatcacctcttttacaccaaaagtagtctgcagggcgtgatagctgtttcttttgtgccattttggggtggagaaggtggatgtgattaagccaataattcaggacttaattccctctcatgttgtggttttctacccttgcaccagagtatgaaatagcttctaagagtcccagctctaagctgggaagagtctctgtgactgtaatcacgttgtgacaacactcggaataaaaattggacttgttatattctcactactcagtttattttttagcagtttaatgggtacattttagagtcttccattttgtgtggaattagatcatccccttcaaat

SEQ ID NO: 4249 - DNA, 672 bp, Canis familiaris
  misc_feature (1)..(672): n = a or c or g or t
cccatctgtcaggatcttntagnctcagagacatcaagttgcttgcccaagtcacacagtgaagaccagagcaggatttcatccaggtgtgattccaagtgcatgctttccctacaactccctgtcagcctcattgccaccagaagtaccctctaaaaggaggatagatgggatttttttttttttgaggcatatctggaattaaggtcaaactagttcactgtaagattaaacttgtactgttagaaatagcattatccgtaatgtgggggtggccatcattctagtggagacaaatgatattgaccctgtccccctatggcagttagttgtgttagtgactttgaaggtacatgactggtgcatagtatatatgttaacttgccagaaatagtacttaagtaatcgtagggccaggattgtaagtgaaatctgcaaaatcacttaccagcaactgaagaccattatcaaccacatggagaaaatcaaaccaagcaaggctctatgaaatatggttgtaatatccaaactgagagcactggactggatgctattccataaatgatattttcaggtgccatggactgtttccatcatgtattcatcnnnnnnattaaattttaaaattgcacatgattgtataagcatgctttctttgagttttaaattatg

SEQ ID NO: 4250 - DNA, 402 bp, Canis familiaris
  misc_feature (1)..(402): n = a or c or g or t
atagtactttatttttgagcttagaacaccctggaggttttcttctccactgctaaactgatgactttccttttggatgtggtttggtcccaccattttggggatgaaattgtaatcctagagtttcgttaactttgaacaattttggtatactgttccaatttccagtttannnnnnagcagtgcagctcgctgtcggtataattccagtagagtatgatgaaaggctgccctcttgtggtgcactgaaaggaaacgagagaggaggctaaacaaggttgctggacactgggaacaggtcctggaccggccaagaaaaggagggcagcaggcaggagcctcacgtgtcagatgctgacaggcatttgggtatttccccctacaatggcagatggctaggtg

SEQ ID NO: 4251 - DNA, 550 bp, Canis familiaris
  misc_feature (1)..(550): n = a or c or g or t
gggactgggctnnnnnccgggctttccagggagaaaaagaaggaacannagcgtcgctcgctgggacatgggtcatacacacagaagcctgccacccccgttcccaggcccttgcgtcggagtgtgtgacatgctggccaatgacagcagagaggccgcagagcatctttgtttccaaagatgggcggcatgtttcagagaacacttagtgccactttcgggttggacagcatgaaaaggcacgttctgtccagaaaaaaaaaattggaacaatttctcaattggccttagtcacttctcagagccctcccagcagcgagtgagcatgttttccaaaagcttacagccggcgaatccaggaatgtnnnnnnnnctattattatgaggcttgtgattggttcaattgtcccataaaaacacgtttgtcccaaagaagggaaactgtgcatttattccatgcatgtaacaaactctgcaagaagtttaacccacataggtttgcggcactgcaaaattgttcatgggcctatgtagcaaatgattctctgcc

SEQ ID NO: 4252 - DNA, 604 bp, Canis familiaris
  misc_feature (1)..(604): n = a or c or g or t
acagtccacccagtggtcnctgctaagcaggtagagctggtagaagtggctaaggcaatgcacagagacaagttttgtgctcaggtgaatcatcttttccaatgggacaagaatgcagccctgaatgccatccagacaggtctctacatcggctggcgctgtccccattatatatgggactgtttccggattggagatgagtccaaatgcttttgtggacacttgttgagagaacaccagatcatctcagacatatccgtgccctgcaatgtaggccagtgccgctgcctcatgttctgctttatcccttctcgcccagaggaggtgggtgagttctggctcaaaagacgagctacctttgaccccaaggcctggagggcccaatgtcgttgcaaacacagtcatgaagaccacgcagctacggggtcccatccctgcaggataaaaggttgttgctgtaactgctttgagtctaatttcctctgtgcggcctgtgaccggcgctgggaggaacatgagactttctttgagactgaggagacccggcgacgaggaggaaggcctcatgggacagacactgtcaacacttggcgcaggcctctat

SEQ ID NO: 4253 - DNA, 512 bp, Canis familiaris
  misc_feature (1)..(512): n = a or c or g or t
taattaatactctgtnnctcagttttttcccaaatgatgtatgtctcattttctgtctttggtttttaaaagttactgctttgtgaaattaatgttcataagctttttagaaagtcctttcttacttaatgagattactataaaaaagaaaaggggnagctttctacaggaattacttggaaacaagctgacttgttcttttctatgttatttccctgctgattgcaagctagtgtttttttttgtgagttaatgtttgtgccctgcccctgttcatatgttgaagtcccccaacttgatggtatttggagatggggttttgggaggtaattagagttaatgagatcataagtgtgggtccctcatgatgagattagagtcttcaaaagaagagtcaccaaagagcttgtttgctctctccactccaccacatgaggatgcagtgagaagggcgctacctgcatactagcaagagaacccttatcaaaaattgaccatgttgacaccttgat

SEQ ID NO: 4254 - DNA, 590 bp, Canis familiaris
  misc_feature (1)..(590): n = a or c or g or t
ggctgatggggatgctgcctnnggcagggggncggggcgnnaggctccgactgagccccccaggnntcttgagggagaagccaggttctgcgtgacggaagtaggctggcactgggacaggggtaccactcaggggtggaggggtgccctctgtgggcacaggcatgaccagcgcaggaggtcctgaggtgcacagcacggagcagtgtgtccactcaaacagtgcctggttctgtggccccaaagaggccttggaagacagccacgtccactctgctcacacgttctgctttacacatggaggccacagggacgagcacctgctgggagaaggcaggggacagatatacataggcctggacagagttgtctgtaccctggaggtcgtagaagcatgaactgaaaaacccacggccatgtcctagagacttccacagtccagcagaggttaagctgaggcacgttctggagctggaccgcctgaatgtgtatccctgccacatccagggccacataagggcaaacaaaccagctgtttggctttaaaatatgcaccttcttccaaaaatggaaagtggaaatattaacac

SEQ ID NO: 4255 - DNA, 589 bp, Canis familiaris
  misc_feature (1)..(589): n = a or c or g or t
catacttttttgatgcaccagagatngaccaccanctcccagcaactacagctgctccaaaccaaacagctgctgcagccaagtaactaaagaggaaattctcttttctattttttggagtgtggttctttcggccatggcatctactgcaggaaagcagaatgaccaagccagcaggaaaactgatgggatggcaccaccctctggcatctaaaaggggccacactgaagtctaatcacctaatttaacaaacaataatcaaatgttattcagtacatgtgtctttcagctcttctttctcacctgtcagttatcatcagaactatatacactgatttggaacaaaatacaagggaacgcggtagttgtgccttccatttgcctctcgctgtcatatgacatgcttcatgttaggtctgcccttacttactgtgtgagtggatccatcctaacttgggaggactttcttttgaattgtgtacagatgttcctctaggatggtcctcttctctccaaatgcttgccatcctacagtggccaaaatgtatggactttggtttgaattcattgggagcctgaaaatttgtc

SEQ ID NO: 4256 - DNA, 678 bp, Canis familiaris
  misc_feature (1)..(678): n = a or c or g or t
tgaaagtgtggccatcctgttgtatctgagtcgcaagtatgaggtccccgaccactggtacccccaggacctgcaggcnngcgnncgtgnnnncgagtanctagcatggcagcannncacnntcaggagtagctgtacccgagccatgtggcagaagatgatgtccccagtgttcctgggtgaacaggtgcccgctgagacattggtctctactctggccgagctggacaggtgcctgcagctgcttgaggacaagttcctaaaggaccaggacttccttgctggaccccacatttcagtggctgacttggtggccatcacagagctgatgcatcctgtcagtgcaggctgccaaatcttcaaaagccgacccaagctggctgcatggcgccaacgtgtggaggccgaggtggggaaggacctctttcaggaggcacatgcagttgtcctgaaggccaaggacttgccaccggccgacacctccatcaaggagaagctgaagccctcggtgcaggttttgttgcggtgagaggagggccaggcctgcagagacgatggaggctctgttgtcaaaacgaagaggtggagttgccctcgtaggctgtgagcaagacacgctgtccagtctctgtccccagttccctccaggcaccaggtcctccttcctcactccactcc

SEQ ID NO: 4257 - DNA, 445 bp, Canis familiaris
  misc_feature (1)..(445): n = a or c or g or t
ctgcgcnnngaggactccggaggccatcgnnnnacctcggccgggccgcctngnnnncagttgtattaagttgtctccgtgtccctcctccctccacccccgtgtttcttctggttttttttttccttcccttcctcctcttcctgctccccaacccttctttggttcagcacaggtaaaacggttaccctccctccctccctgcctccatggatcaccagctcacgtcatgtttccttctcttttctttttgtgtgtgtttaagttagttttcttcctcccctttttctttttggccctcccccctcttctgccatgtaactggaggatgtgcgatgagtttgcaaacagctggactgtcaggctgctttttttccagatgttcctcctctgcctcccctcccttccctttcccctcccttctccttccttcattctttccttg

SEQ ID NO: 4258 - DNA, 421 bp, Canis familiaris
  misc_feature (1)..(421): n = a or c or g or t
cannngtgaaatttgcacccatattnnaagaatcacaggtagtctttgctttgcacagtagtgcaagannnctatgtaaaaacttcacaaggtttggctggaatgcagttggagttctagaagatacagatgaccatgggaatgttgannntgctgccaatcaagaagtagttctacatatacagccagaagaatttagtgaaggcgaacattgttataaatgacgaaagcagttgtgtgttgtaaaggatcaatatgtttcagaggaagtgatggcaggtgaaaaaccacattaaaggaacactcctatttgatgacattgaatgcataaattttagaggcaaatccaaactcagttgaaaggagtatgacaatttgccaaggtgtagaaaagatgcttgctccatattgtaagttatat

SEQ ID NO: 4259 - DNA, 634 bp, Canis familiaris
  misc_feature (1)..(634): n = a or c or g or t
gatgtacacatattgaaaaagtacatcatttttanngttttccannnaatagatgactctgtngnaatgcaaggtttaaatgtattccttattgaattcatatgtaaaatttacattttaaatttgtaatgctaaatattcttttccctagaaagattaagttatctttattgattttcctgtggagcactatgaggtttttaacactgtgatatattttatatttatagtttatcatctctcttgacaagattcttatttccttatacaggtcaatctttcaagtaccattttataagcaactatgaaatttaagttaaatgttctttgtaaacatttgtctattttaaatgaataatgactttatgaagtatgctatttgaaggctaaagttataaatacatctgttttcactatataatattaagaaagaaatgacttaaatgtccatttttttctaagtagctacttcatcatgttttcatgatttggggaattattgctttttttgatattcaaagtgtgaaattaagactttagggttatattttagttcttggcaatttgcctctatgtcccatttaaagtaaaatnnnnnntcattagctttagnnnngaaacgaggctgtatatt

SEQ ID NO: 4260 - DNA, 602 bp, Canis familiaris
  misc_feature (1)..(602): n = a or c or g or t
ccaaaccccaagccccgcnctctcctgtcttccttcttttgcttctcgcccacctctgcccgcgccccgcatgcagctctgcctccgcagccgccgtgcacttccctgcgcgcactgcggggggcgccctaagcgtcgcccaagtacactcacttaaaaaaaaaaaaaagtccttccgttctgtgcgcagctaaagggggcgctctgcgtctctgcgctgttcgcgccccagccgcgccccggaactttggctctggggcgaggagagagaggaagagggttttcatggtgtcggatacctcctgctctgatcctaagggaagtacctattgctctgatcctaagagaagtacccatttcgcgccctcaccccacgcctgcctgtaatctgcttcccccccccagcgcaccccgagagccgcctctccagctctcacctggtttatgcaaacgccgagcgccggggaggctcggtaggaggagtctgccgcggccccgcccccgcccctgctagccccgccccccgccgggctcctggggctgtggcccgaaggatttttatctccgtgtgtgcatgtgaccgtgctgggttggaatgtgaa

SEQ ID NO: 4261 - DNA, 465 bp, Canis familiaris
  misc_feature (1)..(465): n = a or c or g or t
ccaacaacntctcatctttgtgtcaggacaccaaaaaagaccnnttcatctctaacaacccctggatctacgctgaagtttggagcgatgaggaaaatgcgggaagatcgttgggctgtaattgctaaaatggataggaaaaaaaaactaaaggatgcagaaaagctatttgtttaatttcagaaaatcagtgtgattaaggaacctaataacatcaaatttatagttaattaaaatttttttattttctgaagaaccattttctgacattgagacttttttatatttgcataatttgttccttatgatttttatgttttggcgtaaattaccacatgttacccgaaaacttgtaattctacttaggtaataagatgattgttttgttttttatcttttcttctattcatggaaactgttttagctaagttttcaaatttgtgaagttatccattgaatgctagg

SEQ ID NO: 4262 - DNA, 617 bp, Canis familiaris
  misc_feature (1)..(617): n = a or c or g or t
tccacactctacaggcacacggaacccaaccagtgagggacactgagggcgggtgcaggtctccacagctgaaccacccagctgcacccctggnctcctgggctcaggctgggctgggaacgagggtgcttgtttctttggctccagcttctgctcctcacgccgtctggggtgggcagtttgcctctttaacccgctgggcagccctccgcctgcgggaggtttgtctccaccttggatcagagtccatttgaggtgaccgagcacaggagggtgttatgagaacttgttttcctcttggtgtgagtccccagtgctggatgcttctgccactttggccaaagagcaagttcaaggtatttgtaatgtttttctgaactctatcctgcgggtttctctgggcttctgtgagaagagaaactgtggacagaagagcgcacaacatgtggcatagcacctccccgcccctgctgcttccctcggggtcagtgtggtagcgagctgggaatgagaattatccctggtaacaatggtgcccagccagggactggccatcaccattgctgtgttccttggtttactcctgcgaggtattccccatcctctcgttgtatatt

SEQ ID NO: 4263 - DNA, 445 bp, Canis familiaris
  misc_feature (1)..(445): n = a or c or g or t
tctcgctgccttgtacccttngacctttatgcnntgcannccactcagcnnnnngccccggtnnnnaaccacccacaatacccacaccctgatgtgtcacctnnnnnncctggtgtctccccctgtgtgggaagtgggggttggaaggagatggagtgtcctgtgagcaagaaccagggtgtgccccagccaaagccagtctcccttttagagannnnnnaatgctctgggccatcctgcctgctggtgtcagtggtctggcatctggggcagcctctctactgggtacagggggtttctggtgcctggatgacctctggagcagcatgattagctaagcaaagatagaaggggcaggggacttggatcctctctgcctgagtgtcctggagcaagacaactggttctcggggcaatcagcagcccccactggaccctcctgtgt

SEQ ID NO: 4264 - DNA, 647 bp, Canis familiaris
  misc_feature (1)..(647): n = a or c or g or t
tagatgtntacatannatttctgtagattgttgccagaagaaagttttggttccatggtangagtgagcactttggcttatgtgtaagttagaggtaattgttaattttacaacataatatatactttgtgatgaaacttctcatcttaggcgctcacaggcaggtacaaaccaaatttgggccagtggttaactagtttgtaaattttatttttatttgtaataactcatgtacttaaggcccaattaatataaatggaattttcatggtttatgtttaggggataccttagagattgctgctgttctatttattttttggaagggagagccagattttactttggaacttcctggaagctcttcagtggtctttggcctaatgaattctatcttttatcactaaaagagtattattcttatgtcatagtgagaataatcatttaaatacttggcataataaatgcctaagaaacattttatgaatctattttttttcttgctataatggggctattgtaaatcatgcatttgtattaatgatatttcttaaagcaatatatgaaacaatctacaaatggttgtaggagtctacaaattctgttcttggttctgtaaactttgntnnaatcttttaaccaacagat

SEQ ID NO: 4265 - DNA, 584 bp, Canis familiaris
  misc_feature (1)..(584): n = a or c or g or t
cantgtcannctcatctaaaatnnctactataattttacattcannnnncatgcctccaccatccttggcttctatgttaatggtataacttctactgatttcgaagtctatgggacctttggatttaatttctccactttgatggtctagtataaacatatttccaatatctcttaatgttttgaaggagtaggtgatctctgcattgatgccctcatcttggtcgatggctgtcaccttgagtacagaggtgcctgagggtaagttctctggaaggctaactttgtacacatcctgactgaacactggggcgttatcattggcgtcggtgacttcaatcttgatttgaatggtgccactttggacagggtcacccccgtccattgcggtcaggaccagaagatgggagctctggtgttctcggtccaggggcttctccagtattaattctggggcattcttgcctgcagtcttatccttcaccagcagagaaaaatgctcattatggctgagttggtaactctggagagagttaggtcctacatctgcatctatagcagattccataccgaaccganttcct

SEQ ID NO: 4266 - DNA, 576 bp, Canis familiaris
  misc_feature (1)..(576): n = a or c or g or t
ccacagtaagcannagtgagcactggtatcctgacggaccaaggccagtgggatcattgggttggcctgatcaggaccaaacgcagccaccaacatgtctggagaaagaggccccgggcattcccgtagaccgaggaggcacggcctgtcccgctctagaagagccgaactgcagttccccgtcagccgcgtggaccgcctcctgcgcgagggtcactatgcccaccgcttaagctcgtccacgcctgtgttcctggccggcatcctagagtacctgacatccaacatcctggagctcgcgggccaggaggcccgcaacagccacaagatgcgcatcacccctgagcacctgcagaaggccctgggcaacaaccagtacctgagccaactctttgaggagaacacctactcccagggggatgggatggtccaggccaggaagtggtcaggcccgggcactggggccgacagccgcatctagtcgccagagccaacagcctcgtctagtcgccagagcggcacgcagatgaggggggcctgcnnnnnnnggggcaccagccattaaagggnnnnnnn

SEQ ID NO: 4267 - DNA, 580 bp, Canis familiaris
  misc_feature (1)..(580): n = a or c or g or t
tgtgnngctgctgaagatgctggaccagatgctggccaatgggtgcttcganctcttcactgcnnagcaggaccacccgttcggcgtgaagctactggcgctctgtaaggaggagaccaggaaatccaaggatgtgcagaagctgcggtcgggcattgctgtgttctgtgggatggtacagttcccgggggacgtgaggaggaaggtcctcctgcagttgtgcctcctgctgtgccacccgttccctgtgatccggaagagcacggcgagccaggtgtacgagatgctgctcacctacggggacttcctggctgacggcgtcctggaggaggtcatggctgtgctgggcgccacggcctgggacgcggagctcccagtcgtgagagcccagcggaaccacctatgtgacctcctcggcgtgccccgaccgcagctggtccctaagcctggcaccggctgagcccctgctgcccagggggcggaggagaccgacgctggtcagcacacctgaccactggaggtggccccgggcccggaggtggccccacctgagcagcagctcttcttcccgtgtctgggg

SEQ ID NO: 4268 - DNA, 411 bp, Canis familiaris
  misc_feature (1)..(411): n = a or c or g or t
atgaagaaaggggagcannagctgancgaggtgaaagtnnnnnnngtccccaactgcaaatcggaggaggagacgtcgcccctggtgacccaccagaaccccgccggccccgcagccagcgcccccgaactggaatccaaggagtcggttctgtgaggggccggcctggggcctgcctggcagcaggggtggcccgccccgtgggcaccgtgctcccaacctgagccccaagcagggctgtggccccgtcacccgtttgaggatcacttcttggggcaggccatgggcttcctagcggggcccggttcccgaagaccaggacactctgacatttggcttgatcggcatacaggtgccactgcgtgtgcttcggaaacacgtcctggggnnnnngggctgggggcaggacag

SEQ ID NO: 4269 - DNA, 571 bp, Canis familiaris
  misc_feature (1)..(571): n = a or c or g or t
gacggtcaacacgctgctccacgaattcctgctctgggagcccgagcnntcgcccaaggccctgcccgagcccctgcccgcgcccctggaagagaagaagtagccgctgggccggnngggcatcgcttggtgagccgaggagcagcaggaggaagccaggagccgccccacggccgcagcgcggaccacccgggcgggctgttcgctccggtgggcggagtcaggccagggggacgcccccaggccagctgggtagggcatggcattctcgggagcccagtggatacacaccgctctccgcttccatcctgccggacccatcggtgtgttggggccggggccggaacccccgtggaggatgaccttgtacagaagcccctgcctctcaacgccacggccgaggcaggcccccccaccccgctctgtcttccgtgtcagccgtgcttgatcctgggaccctagcggccccgcctcattgcccgagcccctccccaccccccagttcttggcgctgggagctattgttgcccaagggggggagggataggggggctggcgccaccgaacctgc

SEQ ID NO: 4270 - DNA, 640 bp, Canis familiaris
  misc_feature (1)..(640): n = a or c or g or t
atgagtgtcgctatgtaatgatcttcaaaaaggagttngcgccatcagacgannagctggactcctaccgccgaggtgaggagtgggacccccagaaggctgaggaaaaacggaagctgaaggagctggcccagcggcaggaggaggaggtggcacagcagggtccggtggtggtgagccctgctagtgactacaaagacaagtacagccacctcatcggcaagggggcagccaaggatgccgcccacatgttgcaggccaacaagacctatggctgtgtgcccgtggccaacaagagggatacgcgctccatcgaagaggccatgaacgagatccgggccaagaagcgcctgcggcagagtggggaagagttgccacccacatcctaggcaccacggcccccaggggcagggcggggggtggggggactggctgctgctactagaacccatcctggagccccagctccacaccgccccggacagccgtgtctctggcttggggggtccagtgtgcgacgtgtcactgctggagcttggacgagtgtgcggcatgtgtgagtgcaagtgtgtgagtgtgcgagtgtgcaggtgggtatttaacgtgtattattctttttccttggactgtcttccccatg

SEQ ID NO: 4271 - DNA, 676 bp, Canis familiaris
  misc_feature (1)..(676): n = a or c or g or t
tagtgtatacagagtgaagccccaggagnnctccagacctgtgatctaaaactaaaattttcctgtgataaatttgctattgaccaatactagtcgtttttagactaagtaaaagtagaatacttgaaatgtaatagcttgtaaaaccatatggaaatattccaagtttattctggaattttagtagaaatggactaaaagatggctctgattagtaatttatatcagtaaatcaaatttatgttgatagtgaaatgctgctagctacataaaatgtagtgatttagttcctagggctttgtattggggcaggaaaacagttcttcaatgtttaatcctcgtttagtcacttttggaataccacactgatgttagaaaaatgccgtaaagcagagattgtaaactggtgctccatttgagctctagactttttggttgaataggggtgctgtactttttaaaccattatttaaaaacgagaatagttagaagaaagtctctttgggttcttgaaaaattgctgagtggttctacatcctttcatagaacaaaaccgctgcctaaatcagtcctgacaacattagattatctgtgtacccctaatgtnnnntactcatttggtggaaccttaaaaannnntatggtttgactggnnnnntcatcacgatctccaata

SEQ ID NO: 4272 - DNA, 613 bp, Canis familiaris
  misc_feature (1)..(613): n = a or c or g or t
accnntactatgctgcagagnnngagtactnnacctaccacgngtcccccaaagtgccccnnnnnagaaggttctcatcgnnaggagaggaagatgattttgaccgcagcatgcacaagctccagagtgggattggccggctgattctgaaggaggagatgaaggctcggtccagctcctatgcggatccttnnaccccacccnnnagctccaccagcagccgggaggccctgcacactgctggctatgatatgtccctcaatggctcccctcggtcccactacctggctgacagcgaccccctcatctccaaatccgcctccctgcctgcctaccgaaggaacgggctacacaggacacccagcgcagacctcttccactatgacagcatgaacgccgtcaactggggcatgcgagagtacaagatctacccttatgagctgctgctggtgaccacaagaggaagaaatcggttgcccaaggatgtggaccggacacgtttagagcgccacctgtcccaggaagagttctaccaagtgtttggcatgaccatctctgagtttgaccggctggcccnctggaagaggaatgaactgaagaagcaagcccggct

SEQ ID NO: 4273 - DNA, 525 bp, Canis familiaris
  misc_feature (1)..(525): n = a or c or g or t
agaccaaggggttgcttggactgcagcacctgnncaaggaccacgcagatggcatctgcttgaatgtgctggtgactgtggcttttcnnaacccaggcatgcagagtgagcccccaaaagttcggggtgagaactttttttggtggaaggtgatggaggaagacctacaaagccagctcttacagaggcttcaggaatcatcggtcgtcccagtcaacagataggaaggtgccatcgtggtgcaaggagccgggcacctgtgccccaccccctaccgtggctctgccttcctaagggaggcaggaggttggcagtcagaagtcttgttgcattgggagcaggtgattctcttagttctcagggtaatttccttttctgtggaacaggtccctacgctgcaccaaaaggacagtgactttaaccaaacaaggagttcagagctcaaggatctaattactctgtgggcatgatgagggcactactccctaaggggaggagagaactttctgaacctgagatggcatc

SEQ ID NO: 4274 - DNA, 543 bp, Canis familiaris
  misc_feature (1)..(543): n = a or c or g or t
gagnagcccagctacctgnnntcactgaaatatanntcaggctgagnnnnnnnncgngagagcaggtcagctgatcttctgtnnnnnngtacggcttttccctatcaccccaaccacaccgccagtccattcttagngaaccgcacaccaggactggtgtgttttagctttcagcctttggggttatttgaccaacaaacagtctttccggaagaataaagcagtccccagggattaacagatcagaatgttcacacaacttcatctttttctaacactgagcatgaaggtagcagaggctggtgtgattctaggctgttcttctaaccaaactaattttttcactgctgaccagtgaggcaggggttgcactggaccaaaggctgaagcttggccatctagcattccaagcaacatggtttcttctaagcattccttttattctgtattccaccctgggtgggcctgaacctgggagtgcaggttctcctgtatcagctgctggcagtgccctgcacccaggccagttaaaggagtcttggc

SEQ ID NO: 4275 - DNA, 554 bp, Canis familiaris
  misc_feature (1)..(554): n = a or c or g or t
gctcagtaganctctccgtcccaccaaatggaaaagtttagggactgatataagggtgacaanctgaataatgcacagtgatccctagagcttttatgttcaagaagtacggagtgatgttcctcgtgactgcaccctaaacgtcagagttgtcctgaccactaggactccagtaaatggcaaaaagccagacaccatcttcacagactgtccgctttccatctgaacacgcgctatcttgcctgctggcgagcgtgtccgtccacagttgccttacgacagtacccactgctttcattttcctgacctaccaattatagtatagaaaatggaaagtttgggcccacacaatgaaaccaaaaaataagtagaagaggaaatcagacgaacatgaatatgagaatttcttgttctttaatatcacgggttttgttgacgttttataagtaattttccctacttgatttttcttttataaaatctcatagaacaatgtttatgatacagccatttaatatatgtacaaattgtaaagaatatgtataaatgtttta

SEQ ID NO: 4276 - DNA, 522 bp, Canis familiaris
  misc_feature (1)..(522): n = a or c or g or t
aggtcagctttagtcagctcctctttnngcttcttaagaaaannnaatggctctcccaaaaagaaatctccangtctctctcaaacacacacacatggctcaggcatgtggggtttgaaaaccagcacccacccatatttctgatgatgacgatcttaaaatgcatattcctaaaatgcagaaacacattgagcctgaactgagcaagtactttaaaagctgcatcactaaggactttgtcatatatgatgctgctgcagctatggatcgttgtttcatgtattctagcgtcttccacattgagcaataactacccagctgctgctgctcctacccacctcctaacctgaccagctagtgagccagattaggagcactatttttgtatggcctaccagctaagaatagttagcacatttttaaataggggggaannnnnnnnnccccacaacacnnnnccccgtgctgttgtcctttggcttggtgtgtatgctttccttgggtaaaatggccntcttttga

SEQ ID NO: 4277 - DNA, 551 bp, Canis familiaris
  misc_feature (1)..(551): n = a or c or g or t
tcactatatccttgtgaataagatgaggaaacagaaacaggtcaattaaatnnatttgtgcctttttgattaaaggacaaaacaactaccaacctgcaaggatgtttccacctgaacaactcaggagctttttcctctgcgccctcatctatcttgctcatatttcattatttggcgaaattgtactctcctactaggctatgagctcctcaagatttttcatttttaatttcccagtgacaaggacagtgcaaatagaatgttaaataaatatctggcatgtgggttttttagtgctaaaaggctgtctttggattgtgtccagttcatcatttttggtaatggtgtggatgaattttagaggtgacatgaggtcgaaaaacagaactacattggaagaatgtacttgaaaatgtattggtagcttggaacaaagggccaaattcaacaagatgatggaataagagaataaaatcctgtatttgggcctccagaataactacaaaggcacaggttgaacctttggttttggggttttcctaagtttttgt

SEQ ID NO: 4278 - DNA, 534 bp, Canis familiaris
  misc_feature (1)..(525): n = a or c or g or t
agttcctgtnngtggtactgaaatgtcactgcgtactaagttacttgttttcctaccccaggacactggtaatgacgcaaacttctcccaggccccatgttttcctccttaataaataaataagtaagtaaataaataaataaatagatagataaataaataaataaaaaattaagttctatgtcggtcacaaatttcctagtttctataatatttcagaataaataaaaaccaagagttgcttagcaataaacaagtttatagcctagtctgagctacaaagagagagacagaataaataactgttcctgttaggtaaggtttacttgccttgaaggcggggccttctcagtcgttatgttgtaatgtgcttctcaatgtgcctaacacggagctgataagtgaattcaatctacaaatagtaagtaacctccaccccctttgcccctctaggaactccaatgaatgaatcagtcagcaaatgaacagttcttcaggagaatgactcaaagcttcttgcacagaaatgtaaaa

SEQ ID NO: 4279 - DNA, 607 bp, Canis familiaris
  misc_feature (1)..(607): n = a or c or g or t
tttccatccaagaattctatgctcaacnnngncatcaacttcaggggaataaagccatttcgagacannaaacatctcaagaagtttacctactgtgcatcatttctcatgacaggagattttactctgctaaacaagatannaaaccaaaaaagaagacacttgatataggaaacatgaaatccaatccagaggaaaaagcaaggaggattccccagggtaatagtgaaggaagaacccagcacggctgcagagtatcctgagtaagaggcagccactgaggattcaagatcagaaggcacttggacagacctctgcaggaagatggcattgatagaacatctactgcatctgagagacttgtggggaaatttaggcaattgtgaaaagatagctgattagcgaaaattatttagaaaactaaaacaaggagtgcctgtgtggctcagttgaataagtgtctgccttcgtctcagtcatgatcccaggctcctgggatcgagacccacatggggctccctgctcgggaggaagccagcttctccctctccatctgcctactgctccacctgcttgtgcactctctcctctctctctcaaataagta

SEQ ID NO: 4280 - DNA, 626 bp, Canis familiaris
  misc_feature (1)..(626): n = a or c or g or t
taccgaaagagaccaagtcataaagaaactaattgaggaaataaattttatcagctnnnannagtcaatcgagaaactaacttcaacaaagtgnnnnactcaagccctactgttggtgttattaatccattgactaagcaaaagaagaagaatgataagtcaccaacaaacaggtttgtgagtgttcccaatctaagtgctctggaatctggtggagtgggcaatggacatcctaaccgcctggaccccattcctaattctccagtccacgctattgagttcaacagcggcaaaccacttccacagccagtgccacccaaagagcccaagacatttttgagtcctcctcagagtgaagcttccccggtggcttctccagatccccagcgccaggagtggtttgcacggtacttcacgttctgaaagaactgtgttggcaacagctctgtgtggactattactaagagcatgaccttatacaaaccattatgtgaacaggctttcctatgtcagacactgtgaatgaggaagtatttgtctaatttgaaaatacactatttcctgtgctatttattggaatcactctactatattatgtgtgtaattataacagttatttttatttg

SEQ ID NO: 4281 - DNA, 688 bp, Canis familiaris
  misc_feature (1)..(688): n = a or c or g or t
agctgaagaatgnnnaagaagaaatgatcaaagaaagacttgctaaaaataaattagttgaagaaatgttgaaaatgaaagcaaacctagaagaagtccagagtgctcntcagaaccaagagatggactgccttaggatggctgaggaagttgaacgaactagaactttggaatccaaagcgttccaagaaaaggagcaactgagatcaaagctagaagaagtgtatgaagaaaaggagagaatattccaggagatggaaatgttaaggaagcaggtggagtgccttgctgaggaaaatggcaagttggtcggtcaccagaacctacaccagaagattcagtacgtggtgcggctgaagaaggagaatgtccggcttgctgaggagacagaaaagttgcgtgctgaaaatgtatttttaaaagaaaaaaaaaaggaatgaatcgtaaagatcttggtcatcacctttttggagactttctttcctcttgcaaaagtaagccctaccctgcgcatctaatagctgaattaaggagcacaagtactaactccatacgtgacactgggggctgacccccaagtttctgatgaacgttctgaaccaaactcaccctgtaacagtcagcagtctactattttgaagttaccaccccacttcaaagctttaaatcaattgtaaatactgggaaa

SEQ ID NO: 4282 - DNA, 499 bp, Canis familiaris
  misc_feature (1)..(499): n = a or c or g or t
ggatcatcaccnnntcctcacactctttccnnnngaggactccagcagcatggctgacactggggcatgacaggnntatgctccttaattttnnatgctcaagaggcttccctgggaccagtttaacatgggtctgtgaggggctctcttggcctcaatttccatctttagggtcttcagagaggaacattgaagtcttccagaaatctagaggagctgggctagatattctgagataagccctgactgaatcaccctccccttggttagcaccacccctcattcttgggttggatgctatgggaattatagaccatcacttgagatttctttgcctgccttccctggggagcctgccacacaccccctgctgagggatctctgggagggcaggtgcccaccctgtaggttgtcctagatcatgagccagttagtgcccacctgtctggtatatcgggttcttaactccttcacagcagccagcaccccccaccccccc

SEQ ID NO: 4283 - DNA, 563 bp, Canis familiaris
  misc_feature (1)..(563): n = a or c or g or t
acgtnnatgagcacaccacggtcaaggtgcccatgatgagcctgggcatgttcgacatccagcactgtgccacgctctccagctgggtgctgctcatggagtacgtgggcaacgccaccgccttcttcatcctgcccgacgagggcaaaatgcagcacctggagagcaagctgaccaaggaggtcctggccaagttcctggaaaagagatacgccaggtctgccagtttgcgcttgcccaaactgtccatctctggaacctacgatctgaaaagcgtcctgagcaaaatgggcatcaccaaggtcttcagcgccgaggctgacctctctgggatcactgaggaagggcccttgatgctgtccaaggggctgcacaaggccgtgctgaccatcgacgagaaagggactgaagctgcgggagccacctttctggaagccatccccatgtccatgccgcccagtgtcgacttcaacaagcctttcctcatcatcatcgtcgacagagacaccaagagtcccctcttcatgggaaaggtggtgaaccccacccaaaagtaactgcct

SEQ ID NO: 4284 - DNA, 662 bp, Canis familiaris
  misc_feature (1)..(662): n = a or c or g or t
gccaaagaaatnannattttcacattnnnnnaatataagaaaaaagaagttcgatgaatcgacggactacatttgccccatnnagcccagtgacagtactggtgacagtcacaggatctacggtggctaccggggccttagcccccttgatgcccctgaactggatgggctggaccaggtgggacagataagctgatggccttgttacctgtcctctgtgcaccctgagagcttcacagtaacaccgcgtgtgtcaccatatagctgcacctcaccccccgcacctgtgcatgcctcacagagaacgttccagctgctgtgtacccccggccagtctctctttgaactctggggggtggccagggtatggagttgctaaggggccggctttggggactgttgccaaaggtggactcgggaggactttcacagagatgcttgtgtatttgtagtcattcttagtggccaccgtcagcaccaatccagcatgaagctggacacgggtccagaggtcatggacgatcccaagaggctcggctctcggggcccccggctgtgcttccatcgagtggcaccctcaaatgcctcaggcctgtggccgagatccaggggatggcggcagggatttctgcctcagtgacagcataactgtgttgtgcctt

SEQ ID NO: 4285 - DNA, 558 bp, Canis familiaris
  misc_feature (1)..(558): n = a or c or g or t
atacctgaaccccagccacctgttgctctgacccacagcaatagcgcaaagctcccttcaccagcatttgtacagagcaggaattctggtgttagccgatgnacgccattgtgtgtacgaggagagtccacgctacagacagtggcgggactccgtatccgtggcttctctccatcacaaaacgggtagaaacacattcactgcttcagggctctaatctgtgtgtcttcttttggctccatttctgcaagacattcggtcattttgatacatgctgtgtttcctttgggttttgttcagcaagctggccatgctgccatcgcatcttcttccctgccgtctgttcttagggtgtggctcagttactagactcgccttgtctacgcagtcaatacacgtcttcactgtttgagaggtgttacagctgttaaagaatcttcatgaacctgaagataatttcttgtgaagttgaatgcaaatgtactgtcattcatagtgtttatataaaaaacaaataccaggaatttcacttttgctannnnnatatagcattgggct

SEQ ID NO: 4286 - DNA, 659 bp, Canis familiaris
  misc_feature (1)..(659): n = a or c or g or t
ttactnctgtagtaatnnagaaagatcctttccatgcaaactgtttacctgtacatataggtacacnngtnnngctgaataaagcaaatgaacttttctatctttctcataagttggtggatctatatcctagtaatcctgtatcttggtttgcggtgggatgctactatctcatggttggtcataaaaacgagcatgccagaagatatctcaggagcagacattaaagacaaattaaaatgttatgactttgatgtgcatacaatgaagacactaaaaaacattatttcacctccgtgggatttcagggaatttgaagtagaaaaacagactgcagaagagacagggcttgtgcccctggaaacctcacggaaaaccccagatcccagaccttctttggaagaaaccttcgaaattgaaatgaatgaaagtgacatgatgctggagacctcaatgtcagaccacagcacatgactgcagacaggtctcagctccattttgtcctgggggaggtcacggtttcctcatatccttgtcccatcttcagaaatccccacttgnnncacaaatgcagacagcacttctccactgaagagtggagacctgccaagaggctggaccatacacctttggagcagatattttctnnnnccacaaag

SEQ ID NO: 4287 - DNA, 592 bp, Canis familiaris
  misc_feature (1)..(592): n = a or c or g or t
agctgcttagacgcacagttttatgatgatgaaactgtaancgtggnncttaaagacanngtggggcgcgaaggaagagatagactcctggtccagctgccgttgtcttcagtgtatgacagcgaggttgctgcagagtatcagttcactggggcttactccacaaggctagatgaacagtgcagtgctattcccacacgtaccatgcattttgagaaacattggcgattattggaaagtatgaaagcacaatatgttgctgggaatggttttcgcaaagtgtcctgtgtgttgagctcaaatctccgccatgtgagagtatttgaaatggatatagatgatgaatgggagctcgatgaatcttcagatgaagaggaggaagccggtaataaacctgtgaaaataaaggaagaagtgttgtctgagtcggaggcggagaatcaacaagctggtgctgctgccttagctccagagatcgtcatcaaagtggaaaaacttgaccctgagctagactcctgatctcacttgccattattttgtatgttctcatcacgtcagggaggacatgggagacggactgaggtgttttgga

SEQ ID NO: 4288 - DNA, 403 bp, Canis familiaris
  misc_feature (1)..(403): n = a or c or g or t
gggcaacacggaccacagcaacagcnannnnnnnnnnnnnnncacgctnnagtacttggtgcagatgttcccggtggtnnaggagcacgtgcgcaggtccatgnnagaggggctctatcagctcttcctcagcaatgccgaggacttgtacatgaaaatagacagcattcaggcggacatcttagcggccaacaaagtcaacgtctccaaagcgttgtgcttcagcggcgtttcccaccgcaactcgagctttccccgcggcgctcacgagcccgagaggccggcttacgtcacctacttccagaaggaagatacggaaggaaaggagtgacggagccttgcgggccttccggaggggccggggccgcggttcagggagcccggcaggcgggccctggggtca

SEQ ID NO: 4289 - DNA, 559 bp, Canis familiaris
  misc_feature (1)..(559): n = a or c or g or t
caactccgtcgnnaccaaatctgccaagaaactcaggagcaataatgcagatgctgaggagaagctnnagcgtggccacgagaaatcagaccggaaccatgagaagccagaccggagccacgagaagtcagaccggagccatgagaagtcggaccggagccatgagaagtctgacagagatcgagaacgtggttatgacaaagtggacagagagagagaccgggaccgggaccgggaccgggaccgcgggtatgacaagtcagacagggaagagagcaaggagcggcgccatcatcgcagagaggagctggctccctaccccaagagcaagaaggcggcaagccggaaggatgaagagttagaccccatggaccccagctcctactcggacgcgcctcggggcacgtggtcaacaggactccccaagcggaatgaagccaagacgggcgcagacaccacagcagcggggccgctcttccagcagcgtccctacccgtctccgggagctgtgctccgggccaatgctgaggcctcccgaaccaagcaacaggactgagcc

SEQ ID NO: 4290 - DNA, 629 bp, Canis familiaris
  misc_feature (1)..(629): n = a or c or g or t
tnngtgcccgccannnagtgtaaaataaaatcanntaatacnnncttaactgttgtggncttttttcaaaagaattggtactgtttaaggccaaaagtaacagtttatagacctgttagtttcaccatggcttttacattcaaaaggatttgtattgcattgaatttataaactctgacttgtgaaaannnnagttgatctattttcttccagcccaatgtctagacttgttggtatttccagtgatatttcccttcccccccttttctctttacattgttttccttttgtaacttgtcatgttccgttttcatttcactttttgctctttttcttgaatatattatactaatttggaaagtcagtgaaactgtcaaaatgttagttatctcaataaggtacttgtaattaaaatatatgagaactacaatcactaattctactgtattaaatattaggagatatagtttgataaacatggcttgtatgaaaactgagcaagtaagtgtatgtcgttacctgtagtgttctgtgtagttaccttattgcttagtctgcagagaataatgacttagatgtctgatttgctttnnnttattaaacttgttcnnnntgggatgatgtctata

SEQ ID NO: 4291 - DNA, 482 bp, Canis familiaris
  misc_feature (1)..(482): n = a or c or g or t
taccnacagtacccatccttctctacnnngtcccactctatccaggttacttccctgctttnntcttttgctttgtgctctgcctttccatcctaactcaggatctgctcctctgagaagtctcagtttactcccaaactgggcttctctgggctcccacttcccaaatggatttactacccctgcttcatcctggcaggagggactcaaaggctgcctcgatgcataggggtggccctggcaaaggagctcatcttcacaggccgaagactgaatggtgcacaagcccaagccctggggctggtgaaccacactgtttcgcaaaatgaggacggcaatgctgcctaccatcgggcacgcgaactggcccaggagatcctgccccaggtgtggttgcagcccagcacaggagggaggtcctgtgccatgggacaggtgggggggagcacacctgtggggaggctgggggtattgtcccatgg

SEQ ID NO: 4292 - DNA, 696 bp, Canis familiaris
  misc_feature (1)..(696): n = a or c or g or t
tgnatgcagatggcnnctacatgnctccaggtntctaccntnntnnaggcccccacccacccatgggctactatccaccagggccctacccaccggggccgtaccctggccctgggggccatactgccacagtcctggttccttcgggggctgccaccacggtgacagtactacaaggagagatcttngagggcgcccctgtacagacagtgtgtccccactgccagcaggccatcaccaccaagatctcctatgagatcgggctgatgaattttgtgctgggcttcttctgctgcttcatggggtgtgacctnnnnngctgcttgatcccttgtctcatcaacgacttcaaggatgtgacgcacacatgccccagctgcaaagcctacatctacacgtacaagcgcctgtgctaacggagccaggactggactccctgctcaggtactgcagcaggagcagctgtcaggcactggactgggacaggctggggacaaggaaggagcagccacaagtggcggacgtgccttggtggacatctgccctgggcctgagcccacactgtatttcctgaatggtttgtctgtgaatttgcttatgtggaccgctgtatcctgctgccacccctctcctggtttcgcactgccactgcatggcctcctgtcactgtgaatcatggctggtctcagtttgtag

SEQ ID NO: 4293 - DNA, 592 bp, Canis familiaris
  misc_feature (1)..(592): n = a or c or g or t
gaacccccttcactcnnnctgtcaggaatgagaatcatggaagaacattccttggacggggnnnnnnncttnnntgncttcctctttttgctgttgtttcttaancagaatcangtctcttcttcacagagtgtcccactgcctcaggttcctaacgctggccaatgcgcagagctctccagctcctacacctgttggctccaaaccccggggccggctgctgctttcgtcagtggtacttttttcatttgcctggtcccgcacctccgcagttcagtgacagggttcaggagtttgtgggtctgttctctctcactgcagttgtcacacagtctgtctccctccaaagtctgcaactttaagcagctcttgctaatcagtgtctcacactggtgtagaagttttttgtactgtaaagagacctacctcaggttgctgattgctgtgtggttccgtgtgttcccgcaaaccccctttgtgctgtgggaccagtagctcaggtgggcgtggtcgctgctgtcatcaactgaatggtcagcgttgcatgtcgtgaccaactagacattctgtcgccttagcatgtttgctgaac

SEQ ID NO: 4294 - DNA, 683 bp, Canis familiaris
  misc_feature (1)..(683): n = a or c or g or t
cgtgaatgtgcacantatgnnncagttgatnatttgttgcttgcgtnannnntnngctttcatgacttnnngcacatttaagaatccacacgacggnnaatgtcggctgtgaaataagcaaagagccagcatccttgggcacggtgatcagagttttgggttgaagtctttctcgcttcaaggggttctctcctgattcgggggcctcccaacggatggggagatcactcacctctgcccacttccccccatagctgcctgaaaatcctcagcgctcaagcccatttttccagtaggaaaacatctcctgctgtccacctgcaaaggagcttaccctttgccttggccttcgggccatatctgtttagagtcctttttcctaagatgtgagttcctcacagcggactgtacacgtccaaaaagttcacttctgtttttccatgagtgctgtgtccactttcccctgtctccgcctgctcgtcatctctgagtgtgtgcctgggactgaggtggcacatgtgtgtgcgtgtatgtgtgcgtgaaatcacaagtgacatgtaccagccttttctctgttgaaactgatcccaacagtgacagaatttcacagatctacttcagtagatcttcatatagatcattgttagatatttaacattttttgtataatggaaataaaaaat

SEQ ID NO: 4295 - DNA, 685 bp, Canis familiaris
  misc_feature (1)..(685): n = a or c or g or t
agagtgncaatngcaattgcacaattttccaatggatgaacattcctgccccttngagttctccagctatggctatccacgtgaagaaattgtctaccaatngaagcgtagttctgtnnaagtgggtgacacaagatcttggaggctttatcaattttcatttgttggactgagaaatactactgaagtagtgaagacaacttctggagattatgtggtcatgtctgtctactttgacctaagcagaaggatgggatacttcaccatccagacctacattccctgcacactcattgttgtcctatcctgggtatctttctggatcaataaggatgctgttccagccagaacttctttaggtatcaccactgtcttgacaatgaccaccctcagcaccattgcccggaagtcgctccccaaggtctcctatgttacagccatggatctctttgtatctgtttgcttcatctttgtcttctctgctttggtggaatatggcaccctgcattactttgtcagcaaccggaaaccaagcaaggataaagacaaaaagaagaaaaaccctgtatgtatcatttcccattgggatcattgaaatttatatgtagaaagccacctggttttgttttgatttcgtcttagcctgtctacaacctaaatctcaacactttaagctctaaaataa

SEQ ID NO: 4296 - DNA, 644 bp, Canis familiaris
  misc_feature (1)..(644): n = a or c or g or t
atgtatgaaataaacgtgtgacatttatgagtaatgnnnnctctgaacaaacttttgaaaacttagntgataaaattttggatcaactgaaaaaaagcatgacctttgaaatctctgaatgccttggttctcagtattatcattctttattgaatttatttcttattaaaatatgtagtttttaagacttcttttctgacagtattatgtaattttttagtgtgggtagatgggagtgtcgcttgtatgttaccgtacagctgacatgtatttttgtcaattctttattatcttagtagtttcatgctatgtatgtatcataaccaacctattgcctatgagaaacatgtaagataatgtatttacagccattgttacaagtttataatgtatttttctatcttgttttatatgtatgttatataacattcaaaaagaatttttttcttgattgagaaaaggatacaaaatgcagaatccacaattttgataactgaaaattgccaattgttttgcagtactttattatattgggtgtcttgtctttcttgggcttttagttagctaatgaatgaatacattagacacttttgggttttagttgggattttacatagcttgcattttaattctttggttctttg

SEQ ID NO: 4297 - DNA, 589 bp, Canis familiaris
  misc_feature (1)..(589): n = a or c or g or t
tgatgtagcagatgaacannagcattatatangtgatgattttgacgttgaaactaaaatnnnagagcagaaaagaaaccttggatcttctgaacttggagaaccaagtttagtttgtgaggaagatgaaattatgaggtctaaagaaagtctagatctttcaatttctcattctcaggttgaacagttagtcagtaaaacatctgaacttgatgtatctgaaagcaaaacaagaagtggaaaaatctttcagaataaaatggctaatggaaatcaaccagtaaaatcttctaaagaaaatcggaagagaaatcaactcgaatctgggaaaacagtcctttatcactttgattcttctagtcaagagtcagtgcccaaaagaagaaagtttagtgaaccaaaggaacatatataaaaattatttttttcttctgtatgtttttgaagttctcaacatttaaactaaaggacacggtattactattttaacgtgtatttgacctacctgtgaagatttatatgtagtcttaagcagttagtacactaaaatgaatttttagctgagttttatattgtgattcttaatctt

SEQ ID NO: 4298 - DNA, 360 bp, Canis familiaris
  misc_feature (1)..(360): n = a or c or g or t
tgtgnnnnnnctgnnnnnnnagcatnnnnannnnnnnnnnngnnncgannngnnnnncaacgnnnngactnncattgannnnnnnntgacaacnnnnntcannnnnannnnnntctatctccannnnnncagcatccagcnnctnnnagaggtcancnngcnnnnnnnnntnnnnnggctcnnnnnnnngacactccatnnnnnccccatagannnagagaaggggtatannnaatatgtgctgtgcnncnnnnnnngtatcaccacattcgacttcagtggggtcaccaaagnagaccntgccacagctgaagtgnnnnnacacatgaacatcaagnnnaagaaggtcnggatcaagca

SEQ ID NO: 4299 - DNA, 635 bp, Canis familiaris
  misc_feature (1)..(635): n = a or c or g or t
acgggtacntgggtgtatnntgtgtttgccaaactcagccnggtgggnctaacagnnnncnnctcnctcagctacatctttagtgctggcatctatctacttggagagaaactcaaccactggaaatggggtgacgcgatgcagccaaggaaaaagaggaaatgatcacaggccattttccaagaacaaaggaggaaaaaaacatgagagtttttggttttggttttgtttttttctggttgagggaggtggtggagcaacaaaagaaggtagaaaggacagagaatgacatttaaatgtaataagagtgtttatgaaggtagattaatttggggactcttcgttttttcaaagtttactggacatgcaagaaacaataactgctgtctcagaatctgttagcttcgtctggcctctgtggtcaaaatccagccaaaggcaaaggaaccttgcacaaacccggggttagagaatgtttagagagggaaataatttaggatcactgaaactattcaccttaccaaagagtgtgttgaggacctagctgagaagtaacctgcatgaagccaaagagctaatgtcagaaccaagacaatagcatttagcccccagatcttctaactcccatcctctgc

SEQ ID NO: 4300 - DNA, 582 bp, Canis familiaris
  misc_feature (1)..(582): n = a or c or g or t
tgtnnagtcccnngtctgggggcctnnagcccagagctgccctnnanngtgncnnagacctgctgccccccaagggagagctnnagccagcgctggcatcaaatacctttcgtggncagagggacatccccggtggcctccctnnagaaaattcttctccctcttcctgggnacgcnagccccagtgtnntgaggactgccagcgagtggaacaaggctgcgcccaattctcggacgtccgcctggggcccccaccaccagggtacagccctgtcttcttcctcaacgacccccgtgagaaagcagacggcaggcccagaggtggcctgggccccgggaggacgacgcccaccatgcaggacctgccaggaggtagcaggcctgatggggtagctactgcagagctggcagcagcagccttcccaggggagtatgtcatcatgatccgcgacgtgactgacccgcccttcctgggccacacgctgcccaccgccttcaaacaccttcgggtcttggggaaggggatggaccagcggccccatgtccctggagaaggccccgaatctccgagctaggacagcc

SEQ ID NO: 4301 - DNA, 657 bp, Canis familiaris
  misc_feature (1)..(657): n = a or c or g or t
ccacatcatcgtnnagctggggaacatgagcaaagattccagcataaaaatnacnnnagtttcgttatccgcanctgannncttaaaaatcatcacagaaaatgaccacgttcttttgtttnnnnnaagtctggctctgaannagnngcattnnaatgaaagcaggggctacgagatacacatgtttgatagtgccatgaatatctcagcatannttgggaatactactgacaacttctttaaaatttccaacctgaaattgggtcataattacactttcactgtgcaagcaagatgcctttttggcagccagatttgtggggagcctgctgtcctgctgtatgatgagctggggtctggtgggggcacctcggcgtttcaggccgccaggtctactgacgtcgctgccgtggtggtacccatcctgttcctgattctgctgagcctgggggtcgggttcgccatcctgtacacaaagcatcggaggctgcagagcagcttcaccgccttcgccaacagccactacagctcccggctgggctcggctatcttctcctcgggggatgacctgggagaggatgatgaagatgctcctatgataactggattttcagacgacgtccccatggtgatagcctgaaagctttcctcactaga

SEQ ID NO: 4302 - DNA, 579 bp, Canis familiaris
  misc_feature (1)..(579): n = a or c or g or t
cggttccagtgagggcgtagacctgctgnatgaccctgtgatccagagggtggcgcagaagcacaacaagtccccggcacagattttgctccgatttcagatccagaggaatgtgatcgtgattcccaaatcagtcacccccaagcggattattgagaatatccaggtgttcgactttaaattatcagaacaggatatgaatgacatcctcggcctgaacaggagcttgcggctgtgcacgttacccatagctgcaaaccacaaggactatcctttcaacatatacttctgagcctggcttcctgcttcctcctcctgcctgggcagacagatccacgaggcccgaaccaccagcctctgccctgggctgccagggaggggaggggacggacgaggcttgattccggtggatttccgcctggaacagcagctgagctccctgagaaattcatacggttcagatggtctccgtgatggaaagggagagggtgatcctctccacagagaaccctcagtcttttgagcacagtgtgatgggattttacaagacaatgtggcctacactctcaaaaaaaaaga

SEQ ID NO: 4303 - DNA, 608 bp, Canis familiaris
  misc_feature (1)..(608): n = a or c or g or t
aagcagtgaagaaagaccggctnnatttccaccagngctnnaaaggnnacttcaaaatgaatgtggcnaggcagaataatgacagtgactgtggtgnctttgtgttacagtactgcaagcacctggccctgtctcagccattcagcttcacccagcaggacatgcccaaacttcgtcggcagatctacaaggagctgtgtcactgcaaactcactgtgtgagcctcgtatcccaggcctcaagcccattcattaatgggcatggggacatggggcacccttctttcccatgaaactccagttcctttcctctcttgcctctccccacccgattccctttggtttttcatatttaaatgtttaattgatttctgttattttttttctttgagagaatacttattgatttccgatgttgagggggtggccacggaacagccccctttcccccctctgctggggcggagcgtcgccttgtggcctgggtggggcagtcatcccctttatgtgtgcaggggcgggggcaggaaaatcttgtgctgggggtggtgggcgggcaaagggattactgcctgccagatcnnnnaacttttttttatatatatatat

SEQ ID NO: 4304 - DNA, 620 bp, Canis familiaris
  misc_feature (1)..(620): n = a or c or g or t
ctcttacncntggccaaaggaagggggctgtctgtncgggccctgaggttggggagggcattgggcactaacccttgactgggtaagcatcgccctgctgcggggggctaatatggtcctccagccggaggcagggtggcaggcctgggaaccagcagaggagggcccgtttgtgccgggcagcgctccgtccgtgaccctgggagctctgctcccggtaacacaaagggcaaagagcccctggttttcgtggcaaagccccaccccagagctcctttaacatctgttcattaagtgcaataaatttttctagaaaatggcaaagatgacttccaggtggatattgctctcttacggtgttggggatgccagaacaccacttggttttatttttctaagtgcatgtgatagagtgtgtggggctctgcgtcctcccctgggagccggcattccagcgggcccctctcccctttacccttgttgggggaaagaggcaaggagaggcccctccttccccgccggagagggcagaggcagactgtagcccattggccttatgtgcgtgtgtgcgtgcgaatgtgtcgctgctggtgggctggagtgatgtggccgggagggaa

SEQ ID NO: 4305 - DNA, 618 bp, Canis familiaris
  misc_feature (1)..(618): n = a or c or g or t
ctacangcnggtgatggantatagnacacagcattcccctccctgtaccacctgtaggccnctagagaaaatatggacagcaaaggtgatcgtgccctcagaggagttcagaatgccacaacgtgagaagctcaccatcatgaagcacatagaacggatgcagcttgctcgagccctaagaaataagcagctcttgccctacatcgagaggtttcggggctcttcatttctacctagagggggcctgtgcccagtggcaaaagacaagaccggggaagacgaggacgatgaggctgatttctatgatgacgccaagcaagaggagagaggcaaggcagagaaaagacaagagatgaacatgaaagtaattttcaagtcagaagagccaaaaaagtgtttcatacaacatccaaataatcggaaaccattcttccccacaaagaaagcagaacggtccatcactggcttaaccaaccggaatcttctccacttggctgaattccctggtgacctaatgctaatgaatcaggattttatatcacggggagtcttccccaccgaggtgacaaaggccagcctcctgggggaagagagcgtccggaaagagtacatgcctaa

SEQ ID NO: 4306 - DNA, 587 bp, Canis familiaris
  misc_feature (1)..(587): n = a or c or g or t
ctcctcacaaagagatgcccttgtattattccccttttggtgagggttggtaaggggttgatacagtcaggtcccaagtgctgtggtataaggcagtggggcactgtctggtctgaatggttgtccgcttcctgaaggcccaccgcacctaggccaggagtcaagtgcagctgaccaggtcacagcaaggcatgctgaatttctgcaggctaccatttgcccagcctctaaaggcagtgcacccagcctggcaagaggaaggggtactgtaggccctgcccaggaacacgtgaggccagagaggagtccaggagcccctctttacgccctcccacagtctgtctgagcatgctaccaaatcccaaaatatcctaacactaacaaaggcagctgtgtctgagctcaatctttccacgcagcttagtcccaattttccctctcactggagaccctcttctgtcccaagtctccagagacagagagaaaataggcctgatggctggcgtggatgagggggagttcctggagtctggaccccagccctggctagggaagccccccgggattgcannnnnnnggcccctgct

SEQ ID NO: 4307 - DNA, 629 bp, Canis familiaris
  misc_feature (1)..(629): n = a or c or g or t
gtggtcattgtgctgaccgggtggcgncctggctccggcttcaccaataccatgcgtgtggtgcctgtgccgtgacgggccccagagtccctcctccagcccctgtcccacccccttccccaacccatccattaggccagcaatgcttgtagtgctcactcgggggttgtcatgtggcactggtgggctgggatgccagggaagatgaacgcctctgtaaaacacgacttttttaggaccctgttcagtgcaggtggcccagagctgggctgcacatcaggtgacctcaccgcagcaacggacgagggaagggtgcaggactggaagccccagagctttaacacggagggcaacagctcctgcttctcctcctctgtgtactccattcggttcctatagaaaatgggtacgcagagaactcccaaccctggcctggctgggtctagagaccaccgcaagaatcgcagcccagggcagtggttccagttacactggctcaggcccttactcgcttctccacccccctgtctcccccactcccacctgcccttctgttcctaggctcagctgcaggcaaacactccaccctccatttcccccactcctgcagctgcctccaggcctgttgc

SEQ ID NO: 4308 - DNA, 700 bp, Canis familiaris
  misc_feature (1)..(700): n = a or c or g or t
tgagagnagagaactccttgctgaggagcaggtgtgacacactccatgcgnngaatctggaaatggggaagataatggacgggtttgaggggatcgtgtatcaggcaatggaggaggctcagaaacagaaggaactagcaaaagctgagatccagaagattctaaaggaaaaagaccagttggctgcagacctgagctccatggaaaagtctttctctgacctcttcaagcggtttgagaaacagaaggaagtgatcgaggggtatcacacgaatgaagaatctctgaagaagtgtgtcgaggattacatagtgaggattgagaaggagggccagcggtaccaggccctgaaggcccatgcagaagagaagctcaagctggccagtgaggagatcgcccaggtgcgcagcaaggcccaagcggaggccctggccttccaggccagcctgaggaaggagcagatgcgcatccagtcactggagaagacagtagagcagaagactaaggaaaatgaagaattaacccgaatctgtgatgacctcatttccaagatggagaagatctgacctgaagcccctccccccctttctgtatatctgtctgtctgtctggggaaggttttgtgtctttcctctcacttaacctctggtttttaaactagactactttaagaagagtaaataaagtttcccttagnnnn

SEQ ID NO: 4309 - DNA, 461 bp, Canis familiaris
gggtgggagcaaattaactggtgtcatgtcaaaagtatggactcttcccttagactctctatcatggaaggattggaattctctatatggggtcttggagaaaaggattatggagtctgacaagaccctgaaaagagaaattaggattggattttgacataggatttggagtccttctaaatgttgaggttccctgagacagatcagctctccacctgctgagcctgtaccaggggctgagtagcccctagagagtctctgctccctttcccacctccccagtgttggtgttgttgctgccttttgtatcttctgttattgactttttttaagagttcttctttcattgtgcaacaagtgctgaaagcctgaggccccatttctgctgtgtatatatcctgactcggggcttttattcagcaaactgttcattcttctgtcagacaatgtcatattcaact

SEQ ID NO: 4310 - DNA, 530 bp, Canis familiaris
  misc_feature (1)..(530): n = a or c or g or t
atnnagattaccaaactgcagacagaaaagcannagctgttacagaaaacagaaacatttgcaaaatcagttcctgtaccaggagagagtgaagctggaatggccacaaagaccacggatgtagaaggcagattgtcagcattattacaggagactaaagagttaaagaatgaaattaaagctctgtctgaggaaagaactgctattaaagagcagctggatgcatctaacagtaccattgccattttacaaaacgagaaaaacaagctcgagatggatgttacagattctaaaaaagaacaagatgatctcttggtgctgttggccgatcaggatcagaaaatattttcgttaaagaataagctcaaagaacttggtcatccggtggaagaagaagatgaacttgaatccggagaccaggatgatgaggaggatgaggatgaagatgatggcaaggaccagggtcacatctagttttcacatctctaggaatgatagagattgtattttgtaattttgaagattgagtc

SEQ ID NO: 4311 - DNA, 560 bp, Canis familiaris
  misc_feature (1)..(560): n = a or c or g or t
aaagttccaagatgctggtctatcaataatgggaaatggcaaattnnnnagcacctgatcattgaatgtacttgacctccctaatgcacgcctatcagacggagtggcttaaccgcagaactctaactgcggtctcttaaattttgtcttgcaaacttgcaaactaaccgagtagcacgataatgtccctacgccaaccctcttagacgcctcgtcttcggctccaagcaacccttcttaactaaattgtaaaagagttagattctgcttctgtaagttgtaaaacaatccctgaagcctaaggcagtgaaagtcctctgaaaaatgacttctcggcgttaatataaggtttcaagagcttctcactacagagatctctgggtcaagcgagtctgtgaaactcatcggttctcagcaataaatgaatggatggtgccagtgttctgacatcactgattgcttctgcacctgcaaattttttcctattgaaaacttttctgggtttatgtctctgtgtgtacacatacatatgccttggggataaagagaggacggggaga

SEQ ID NO: 4312 - DNA, 577 bp, Canis familiaris
  misc_feature (1)..(577): n = a or c or g or t
cgtgattcgnacgctaagaggagacttgcatttgcagctggaggttactgtcaggtcgtgggtttcgcatctaccgtctgcagattacgactcttacactgcattcagagggaggtcctaatacagctcctgcttcttcactctggttttaaactttggataccaaaccgaaaaggaaaagaaagaaagaaaaagatcttggaggaaaagcatgtcttcagatccctggaaaatcatgatgtccaaagcaagttgtgaataatgatacatgttgggggggaggggcaagactagacacggcagacgggccagtaaaattgtcacaaactctgcttcttactctgtttaaaatttctgctcttgaatgtatgagcgttcacatagtcattgtgaagttgttgggtcgtttcgtttttattctcctactctgaggactgagctctgggtggcgttggatatgtggtggtaggtagacagactcgatcattttgaactccataactcatgggtgcattctggtttttcttcggtatcgcagattatccaactgttgaataaaattataaatatgttaata

SEQ ID NO: 4313 - DNA, 517 bp, Canis familiaris
  misc_feature (1)..(517): n = a or c or g or t
acatgtacttccagacccacgaccagatcggcatgattagtgcaggccccagccacgtggctgccatgaacattcccatccccttcaacctggtcatgccccccatgccaccaccaggatattttggacaagcaaatgggccagccgcaggccggggtaccccaaaaggcaagactggtcgtggggggcgccagaagaaccgctttgggctccctggacccagccagacgaatctccccaacagccaggccagccaggatgtggcatcgcagcccttctcccagggcgccctgacacagggctacatctccatgagccagccctcccagatgagccagcctggcctctcccagcccgagttgtcccaggacagttaccttggcgatgagtttaagtcacagattgatgtggcactgnnncaagactccanntnccaaggggnnngggcataccagcacggcggagtgacagggctgtcccagtactagaaggtggcagcggaagagctaagctatgt

SEQ ID NO: 4314 - DNA, 564 bp, Canis familiaris
  misc_feature (1)..(564): n = a or c or g or t
cagggtgnctcagtgttgnngtcagacactgtcccccagncatgnnnnnnggggaccaccagtgcatactgggctagtgatcttccaggtgcatctcaccttgctgttcaccatttcccaccttggctgggtggcagtgtccttgggaccctgtcttcagcatgctacgaagcctcagggtggaaatttctataaaggttccgtggatgactttcttccattgtttaaaggggatactgtaagcttttgacctcatgccttgcatagtaaaaagggtttgggttttttgttgttcttgagggtttttttgtttttgttcccttttgtttttattttggcctttcctctttgtcttttcatgtagaccagatatttgaaagggcagacgatggctaaaggtgtaaagtgtagcttgtttatatatttttggggaaacttttgccttggatgggaaatggaatcatggattcagcaggccatggtggcacactcaccctttgcccttccctccggatcagtacctattgtttctcctttcaaatatgtgattgtactagctctttc

SEQ ID NO: 4315 - DNA, 506 bp, Canis familiaris
  misc_feature (1)..(506): n = a or c or g or t
aagacgtgaagaagaaatttaccgaaggaatgtctcccaaactccgcctgaatcttttgaatgaagaactggaagaacttaacatgaaatgcaggaaaatagaagaggaatttgaaaatgctgaaaaagaacttttgaactccaaaaaagaagtctcctcgaaacccctaaggtttcaggaaacgggtggagaaacttcgaagaaagactgggagcttcaagctttaagaaatgacctatctgaaaaagcgacaaatgtccaaaacctaactgaagagctccagcaagccaaagaactcatccacaggctgagtctagagaacagagatttaaaagaggccgttaggaaactcaagcgtcaaactgagatcggaaacgcgctcctgaaggaagaaatgaaactgtattatgaattagagatggaaaagatccgcggggagctggatgccatcaagaatgagctgagagccgagaagaccctgcaagcaagaaannnnngggccctg

SEQ ID NO: 4316 - DNA, 581 bp, Canis familiaris
  misc_feature (1)..(581): n = a or c or g or t
tggtagtgatgataaaggaacatttttcaagactggacctgttcccttgcagtngagatgcacctgtccntggcgtgttgaaaacacactttacctttacatagttgtgaacctcattagaaacagnntcagctgcccactgtctgtgttcctttcaatagttcagtccaaatgggagtggatccagcgaacacatatcagatcaaagttattgtcattggagtatacttgattgctgggtatctggtaactttcttgtaagataatttgataccactgacatgttatatgagaacatctttcccagagtgcctcagacctttattgctttaagagaattatgatgatgttttcattactttattattttaatgatttagtgaagtgactgaatctggtatagacttttttggggtatgtgtgtgaagtttttttatcaaactgtaatatttgtgaatggaatgccttgcaatatgaatgttaatataatgtgtaaagggagattaaaagtttgaatgattatcccaccgtgtagtcattaactttgctgcatttatgggggatttcagaggacagtggtg

SEQ ID NO: 4317 - DNA, 604 bp, Canis familiaris
  misc_feature (1)..(604): n = a or c or g or t
acggactggtgcatgacccagtcatggnnagccaagccaactacggcatgcagcagatggcgggatttnnncggttctatcctgtgtacccagcaccgaacgtagntgccaacgcgagcggctcggggcccaagaagaacgggaacgtgtcatgttacaactgtggtgtgagcggacactacgcacaggagtgcaagcagtcgtccatggaggccagtcaacaaggtagcatctagtacttaagagcatcatccacttgagcttggaagacaccttttttcaattctacatactgattacaaaagcactctaaggttaaggcagtgaaaccaaatggagctccagctgggtccgtggtaaatggaggtctcagccagcctctcaccaaaagaaattgctaatcgggaagcagcgccacctggtgagggacgcggacaatgccagcaagcagatgttctttcccactgacctaatttagagaaaattgaacgtaaggcagaaaacatttgagactgtaagcctgtgcccaaaaccttaaagaatgcaggcagctggccataaaagtaatttgagcaatctcctctatcggtcatcgcattcaaag

SEQ ID NO: 4318 - DNA, 608 bp, Canis familiaris
  misc_feature (1)..(608): n = a or c or g or t
gctgctgacacccagcaggacacgctgagctatggcgannagacaagcgtccagggccagctcggcctgaagtccccttcccgggaccgcttcccttccttctcgcacagggaagccgtgagcagtcgcaagaacaggaacaacgtgctgaccgccatcctgctgctgctgcgggagctggacgccgaggggctggaggccgtgcaccagactgtggtcagccggctccaggccttgcagaagcaggagcagcaagaggacgtggagtgaccctcagcgccaccccgagctgccaggccttcctcccgcaaccccgtgccccagcccctgggaggtgccgggtcaccaatacagccacggcctccgccggaccccgctgagtcccagcctgtggtctgtgtcccaagaggctcagggccgccgggaaggccacgccctcggtgtggacggtgtggatggcgccctggcggagcaggaggggcagcgggccccgtgctgggtgccctcccgagggcgcaggtgcacgccagcctgcacgggggcccacctgggcttggcgcttcccgccgtggcagcgccaccnncgtccctaannnntgtcttcccag

SEQ ID NO: 4319 - DNA, 528 bp, Canis familiaris
  misc_feature (1)..(528): n = a or c or g or t
ccaaagagtcagnngaaagacaagagagtcacactctcacttttgcacaaggcactcatggtcaggaagggtttagggnacggtcacttcgtattttccaagagtcaggnnntctctgctgataccttgattcctttgggaagacaagagtttttcttaataacacaagtccctttatgagttattctttcagttctcagtggagtacagccaagatgtaggtgtttatgaacatgctctagagaagtaagcagatagaactggtttgtgggacaggagcggcttgctcaggaagagggaatggtgcaagtcttttattggaaggcttttattatggccgtgatagtgacattgccctcaccatgatccttctccaatgtggtcgtctttctttaccttgtgtcttctcttgtaaaaaatgaaactcaaaataaatgtgtcaaatttaaaaaaaaactggaaaagcaaacgaattgtgtgaaactgcataatgctgtaatgctaanctacaatatgtaatgctatctt

SEQ ID NO: 4320 - DNA, 606 bp, Canis familiaris
  misc_feature (1)..(606): n = a or c or g or t
cgctcccgagagatnancctgggcagagcaaccaannataancagattgatgtngacctgtctctnnngggtccggcctnnaagatctcccggaagcaaggtgtcattaagctgaaaaataatggtgatttcttcattgccaatgagggtcnnnggcccatctacatcgatggacggccagtactgtgtggctccaagtggcgcctcagcaacaattccgtggtggagattgccagcctgagatncgtcttcctcatcaaccaggacctcatcgcccttattcgggccgaggctgccaagatcacgccacagtgaggggtggtggcaggacccatgtgctctctgtggcctcagtttcccctgccattccagccccttggagctggaactcaggctcctggaaaaaccatagtaggcaggaggaaacccaactgcgggcccattgatctgagcctctggtagggcagggctggtcctgggaagcccctggaggctggaaccctccagcttccttagagccagagcccctcccctcctctctctgcaggctgccctcctcttccctcgggttcccacctttgccctnnngtctccagctgattaact

SEQ ID NO: 4321 - DNA, 208 bp, Canis familiaris
  misc_feature (1)..(208): n = a or c or g or t
gccgcccgcgctcgccctnngcccccccccgccgagcgagctcccccgcactcgggtctgcacctggcgccgcgggaccctcccgacccggggtcagcggcccctcaccccgagcctggggtccccaggagccaagcctgccctgaggggaaccggggcggggggtggatttnntcaaaaaccctcgnnnnnngattgtcactagttt

SEQ ID NO: 4322 - DNA, 667 bp, Canis familiaris
  misc_feature (1)..(667): n = a or c or g or t
ttngactatatccaggtttatatcaganngcaaaattaagtaatgcttgatgcaggatctgaacttttcttttatatgtatattatgtttatttgtaaggatatagtgcaaagggaacattnngcgttttaaagtgaattacagctgtgctgtgaagagagttctttattgacctgtaggatcctacaactttgatttaaagtgtaagaaaatgttggatatttgaggccaattgttaatatatttctattgcagtatccttaaaaagcaaacaaaaacaaaacaaaacaaaaaaaaaccccaccatttctgtgatgggtttcctttgtgaaaatcttcgtgtgatggaagcactgtgttcagtccttaatcccctaccaggtgtagcatcatagtacttgggggaaagggtgtgtgcatatgggtccttccccagaagagcagggtggctgatttggctactgcttctacagcttgagtttgtccacttaatgttctacactacagcagtgatgttgtgcagttccagctttgccagaagtttgtttccataagcgctctgtaggtttggttataatgaagattcacttgggaaaacagtgtgacttcagcctatgtaattaccttgttatgagtatgtaaaagtaaaatgcatgtgaatttatta

SEQ ID NO: 4323 - DNA, 606 bp, Canis familiaris
  misc_feature (1)..(606): n = a or c or g or t
gggggctagacaccagtgnnnnnntgaggccactnatnnnggnnctgnagtctcttgtcnnaggccagcgggaagactggcagggtccacctgctagtgaagggctcttggcagagggccccagccttttctgcctgttcccgaagttgctgacctgataagcagactgtccagctgcacttgtagggtaagacctgggaagctgttccttttggcagactccttcccagcgcctcactctgtatccagtggcatttgcccacgagcttctctgctagccccagggtcactccctccctcattcttgaagttcgcatagcaataaagggtgtcctgaacccgcagctcttcccaggcctggggtgtctggggtttggactctgccgtggggcaacgtgagggcagccagcacctgtgaggttggtggtgctgacgttggctctgcgaggtcagctcaaggtgggtctggatattgagcaggcctgtcagggcgttgtcacccacaccaggagcacgcagcaggtgcggcaggcggcaacactcctgctgggcagcggcccaggagcccacgtgcactccccatctctgcccccgttgcactnnnna

SEQ ID NO: 4324 - DNA, 646 bp, Canis familiaris
  misc_feature (1)..(646): n = a or c or g or t
ttnggagattgannngcacatcactttnnacatattcacatgtctannagtgaacagttcgtgcctgctcaagaatgtcctgagatggcatatactgtgcatgttaaagatctcaatagcggttttgtgcatatctttccaacaatgggaaccatttaaatgtgtttacatatttttagttaactttttccctatttttgaaattgatggcaattgtctgatacataagggtggaactttcagcttactttgggtgtgtgtgtgtgtatgtgttggattgagtgaaagagatgatgtacgtgtgaaaatgtatgtgcatgtgcctgtgctctcgtaatatgtcaactagataaatatctagtttcaattttgggttttaaaaccattgctgtcagactgacatctcatgccaaactgtaatctgcttttacattttaaggctgaaagtgtgaaaatcctaaaaggatttcatattgaatatatgtacacaatcttaactatagtggtggtaaacatactactataatttattattctatcttccagataatgttattcatttagaacaaataaggtatatttttagaaacaactttgtaagcactataaatctttaataagttataaggtctatgatgtgtttact

SEQ ID NO: 4325 - DNA, 571 bp, Canis familiaris
  misc_feature (1)..(571): n = a or c or g or t
agaagaatntacttttccaaaaatgnnnnaagaagtgcnnnagagctgtgtattacctggtcgggccctgagcnnngaccccttcgaagaagcctatgtccaagctgctgcatgagctgaaggtgcttcctggnnncttcggggtcataacgcacaggtggaggagcagcccgtctgcagcatgaccggagatggcaggtcctggaagccgggtcctggcacttggacctgcagcctctctgctccccgggcagactatgggagtcctcgtttccataaattcaaatagagtctcctctccagcctggaggctattcctccccacaaaggcagttnnnnnnnnnnacccaattaacatcacatctaatacccgcgtccttttctcttaaaaaaccagaaggaaacacacactctctccaccagccctatcttgagacctaggcagtgtcccatgtcctttctcatcccaccatccccacagggtgtctgcaaggcctctctcactggtgctcctacattggacacacgggccccaggcctgcnnnnnattctcctgccctctgacatcccc

SEQ ID NO: 4326 - DNA, 568 bp, Canis familiaris
  misc_feature (1)..(568): n = a or c or g or t
gaatccannncagatcagnagatctgagancttgaatccaaatccccttttacagacagtacatggcccatggtcaatnacagagatagatctgggacccaagcatgcacacaaagggaagaagcaggtgaggcnacagctttgcctccttcactcacccagtgacctctgaaccctcttcagaccaccgctgaagaggctcacaggtatggtttgcacactatgcccttctcaacctccctgtcctgagggctttccctaagtgaaatgggaaggtttgtgatgtggaataaagagcagtcctactggatcgggggttgggggtgcagaataagtgagctgatttacttaaacattatcttttatcactagacagtaagattgaaatattcactattataaaaaatattgcagagaatgtcttgatatcattttgagggaacttaataaactcttaaagcagaagataacttgattccaaatgatttccagagttttatcagattaccctcattgagtggaaatgtaccagttctattgtgtcttcccagtctctaatatttgctca

SEQ ID NO: 4327 - DNA, 595 bp, Canis familiaris
  misc_feature (1)..(595): n = a or c or g or t
cccaacagctaaggtngncnngtcngcagtgctnngccccaatgnctccattggggagggggtganngtgggtgagggtgtgcggctccgcgagagcattgtcctccatggagccacgctgcaggagcacacgtgcgttctacacaccatcgtgggctgggggagcaccgtggggcgctgggcccgtgtggagggtacccccaacgaccccaatcccaacgacccccgagcacacatggacagtgagagcctcttcaaggatgggaagctgctgcctgccatcaccatcctagcaaacgtgtacaaagtgcctgccgtgtgccaggccgtgttgctgcagggtccggatcccagctgaggtgctcatcctgaactcgattgttctgccccacaaggagctgagccgcagcttcaccaaccagatcatcctctgaggggggctgccaggaggcccccaccccccaactcccagctcccagccgctccccttgaggctgccgcctgcttggccggcctccatccgagaggaccagaggagaggaagccaggcaggatcgccacaggccaggagcgccctgggtggccggaggactcc

SEQ ID NO: 4328 - DNA, 624 bp, Canis familiaris
  misc_feature (1)..(624): n = a or c or g or t
ttttcaactcnngtgcacataaaattgagnngnngttcattgtgnctttttttctttatccaaattttgagttaaagcttcatatggtnnnngcatcctgttcagacactgtagtcgaaatttttgaaactgtgtggtgttcactaaaagtaggaataacaaagtcaaagctaattaaggtcacaaacttcggtgaaacccttaaagtccaaatcttcttgatattgtgaattgtaccccttccaggttagtttcttctggactctccatactccttacagttaccttttaaattttgcacacattgagattaaattgggcctctaccgtgccgattcctatttcctcttgtgttttaagtgcgaactaacaacataagtgaacattagcatcaagtagtgcagacatatgtgtgcatttgcttgattcaatttgttgtgaccttatcagtttggaattggaattgcaccattttgtagacaaaggaaactaagtatattgctgcacttttaagttttcagaacagtgttgaaaaattgcattgtttttattttttttaaactcagttaaaaaagactaaaacgttctttcaaaagaggcatctaaatgtgttcctaattttgt

SEQ ID NO: 4329 - DNA, 601 bp, Canis familiaris
  misc_feature (1)..(601): n = a or c or g or t
aatnngagnaggggttgttttcnngtggcnagnnaacagtcacgacagcagatttggggatccctgattnnnaagannactgctgatnctggctctggggcgtgtaggagagtgcagggaatacagtgaagaggccccatacccggcatggctcacacgtgcttttgttgtgtgccagaactgcagtcgacagttctgggactgggacagaggggaggcttcatgctcatgaatattttattcggacctcattggcccttaggtccaacaggagtgtataagactaagtgtaaataaatagatgttgaatatttattttgatgggttacctataacttcaagctttttctgtggctattttatacttactttttaacctaaacatactgaggtatacttgatttttggctttctaagtttctttagtgttttcaggcacctgatcttcctgagtgtcctcatccctggacttgttatttctgaggaactgcacaaaacacttgcatggggtggctgatgctgccagggtgtttcttctttttgaagaatagtccccaccaccattttatgggggggttatctgaaaaaccaaggaagcaag

SEQ ID NO: 4330 - DNA, 422 bp, Canis familiaris
  misc_feature (1)..(422): n = a or c or g or t
ggaacctattgaagtcatcaggcctgagatagcagctctggttagacaaatgatcctaagaaagaaagacgacctttgaacatggcagtgagtcattcaaatgcaataattggaatatagacatgtttgtagggggctatggtctcatctcaaagattctgacaattaaatgtggcactgaaggatgggctgttttgtttgcttttagnnnnnngtgccaatgagtggtaatgaatgtccccaggacagagnnnnnnnnnnaagcaaaaataaagagtagctaaagaatcaacatgaaatatattaaatatttcatttgaacatactaaataattcagaatatagagtcaccaatgtgcttcaatttcctgttgtccaccttgacattttctaggattatacttgatggaaatgccaacaca

SEQ ID NO: 4331 - DNA, 696 bp, Canis familiaris
  misc_feature (1)..(696): n = a or c or g or t
cagaaccnntatgggatgancttccagnnaccaccaccgacgcccagtgcccgccaagtannngagccaggnnnncgcagccggaccatgccccgcactgtgccaggctctaccatgaagctgggctccctggagcgaaagaagttacgatattcagacctggactttgaggtgatgcacacccggaagcggcactcagaactctaccacgagctcaaccagaaattccacactttcgaccgctaccgcagccagtctacagccaaggagaagcccagccctggggagcatcctggcttgtcccagcagcggagacatcagagctggagcaccttcaagtctatgacattgggctcgctgccccccaagccccgagaacggctggccctgcaccgagcagcagcctgggagcccacagaaccacctgatggtgacttccagacagaggtgtgagtgccacaccggactgcccactgcgtataaatatatatatctctctattttcacactccactttggaaccacccaggagccggcgccccctcccctctcccgagggctgggcagggaggtgcagtggactcagccgggctgggggagccagacacggcatggcctgggggaccagggcccttccccttttctcggaggcccccccatcttcaccccagctgtctgtccctgtcctgggctggg

SEQ ID NO: 4332 - DNA, 600 bp, Canis familiaris
  misc_feature (1)..(600): n = a or c or g or t
actattatgtattgtaattaattatgtgaatnctgaattgagacagataattgtattgctgtccaacagggattgggagggggcattttatagggtttgtataatttctagagtgctaaagggtaatataaaaatgtgtccgtgtgtttagcaaacgtttttttccgtgtctctattaccagtggcagttgtgtatctaagacctccaagcttgttttaaaaacaaaacaaaaaacctttcttctctcagaaatataaatactgttatttttaatattaaaaagaaattcgatataacttttaacaaacactgtggaacgttaaaccgcgtgaaaatgtagtaactgttgtttaattccgagatgtttcttcctttttttcttttaaatattttcttaatatttgtcaaattaactagatggataaataaatctagtattaaccaccatatgaattaaataattttgatttaataaaagggataatatgattttcagtgtttactgtagtgcaacttgtacagataacatgtatttttaaaggaaagaaaaacggaatcgaagctatttttctcgcatttttaattgannngagggacat

SEQ ID NO: 4333 - DNA, 580 bp, Canis familiaris
  misc_feature (1)..(580): n = a or c or g or t
aattctgnnactgcntcacttcaggtatacntcgctnnntgcantagnactatnncgaaagacgttgggaacacatatatttggttaantggattttaaacacannagcaaaatttcctgatttgacggatcccttacagaaaccttctcattgattttttttgaagaatgattgattacatggggcacctggctggctcagtccatacatgtgactcgtgatcttggggtcatgagtttgacccctttgggtgcagagattacatacacacatacatacataaatagaattattgattgtaaaggtaatcaatggactttctaaatttagatatgtgtacatcaggattacttaaaatgagggcacatctatacttaaaaaaaaaaaggaggaatcataggaccttccagaaatactgtggtataaggtccagaaatatcctatcatttttatggaatcattgcttttgctgtaatgttgatattgatttattgatatatatattatattatcttttcatatgttttctaagaaacatttatattgacaagatccnnnnttttgccaagggcataaatt

SEQ ID NO: 4334 - DNA, 552 bp, Canis familiaris
  misc_feature (1)..(552): n = a or c or g or t
ctcagattgatctccgagatgaccccaaaactnnagcaagactgaatgatatgaaagaaaaaccgatttgtgtngaacaaggacagaaactagcaaaagagataggagcatgctgctatgtggaatgttcggctttaacccagaagggattgaagactgtttttgatgaggctatcatagccattttaactccaaagaaacacacagtaaaaaaaagaataggatcgagatgtataaactgttgtttgattacgtgaaaaacatcttcagtggccaacgagactgtccatttctctcaaaaagcatatgaaatgctacagctatacccagacctctttaaataatgaagcagtttaaaacttgaaagaaaaaaacaaacaaaacaccttgtcctcagaattctataaaattcattaagaatgtttcttaaaggtccaagaagcagcaaacagcatctgaagccacaatctattataaatactttatttcaactagaaggtacaatctctcaggggtttcatagtttaaaaagctacaatcacatcatgttgt

SEQ ID NO: 4335 - DNA, 329 bp, Canis familiaris
  misc_feature (1)..(329): n = a or c or g or t
cctcccccacacctctgctgttggccccccacaatgtccagtggtggctggagtgaccctggggctctctgttcagggctgggcttggtgttgcccttcctccctctctgtccctgctttctttctctatgggacagagaagaggaaggtgaagggggtggggataaggatggatggtagtcttagggctacgaaatccttggtttgggggagagataaacttgggagaggcttgcttgaagtgagaggggggtagacagctctgcacattcaaaaggctaaattggtggcagatccctttctcctttgtaccaaataaaagnnnnnnn

SEQ ID NO: 4336 - DNA, 619 bp, Canis familiaris
  misc_feature (1)..(619): n = a or c or g or t
cgctgattgatgacgacnnncctcctgtatcttttgtgannnnctctccaaatggcaagtacatcctggnngcnncnnnnnacaacacactgaagctctgggactacagcaaagggaagtgcctgaagacatacaccggccacaagaacgagaaatactgcatttttgccaatttctcagtcactggcgggaagtggattgtgtctggttcagaggacaacttggtatacatctggaacctgcagaccaaggagattgtacagaaattacagggccacacagacgtcgtgatctcgacagcctgccacccgacagagaacatcatcgcctcggccgcactggagaacgacaagaccatcaagctctggaagagtgactgctaggcgctgtggtcaccgcaggggggacggtcaagacggtggccgggcggcgggagcacagtgtctggaagggcacccctcagtctgggcctgggggtcgggagaggcctggattaagccgcccctgaggacgatgtggcggagggagtgtctaccaccagaaagttctagaagttgctggtgatgttctggcaatccctctcacactgtctggggaagtttctagtctgtattgtgtt

SEQ ID NO: 4337 - DNA, 672 bp, Canis familiaris
  misc_feature (1)..(672): n = a or c or g or t
agaagactngacaaagtgcagctccttctcgccacctaccacagtgatcctcctcatcctcctgtgcttcgaggggctgctcttcctcatattcacatcagtgatgtttgggacccaagtgcactccatctgtacagatgaaacgggcatcgagcnnntcnaacnnnnnnannagcccagnnngcgcaggggcagctggnngtccgtgaannngannnncggcggggacttctccccgaattggttcaaccccttctccggaccgtgcgaccccgagcctctcagtgacagggcctgggtgcggcaggcggcctcgctgtccgacacggacaacacggagaccacggaggagcagtcggaggagaggaaggacgaggactccgtggaggtgatagatgagtgaggctgccgtggggggagcccgtcacccgaaagcctcaggcaacctggacgcacccctgcaccccgctgccgcccgcagaccgcccgctgccactgccatcccctgcaccgcctcatcctctccccgggtcgggccgggtcttggggggatggactaggggtgacgagaggacgagactcggagtccatcaggaagggtctgcccagagcgggcctggacgtccctccaagaccgggtgtcctcggcatctggcacagcctcgccagcaa

SEQ ID NO: 4338 - DNA, 672 bp, Canis familiaris
  misc_feature (1)..(672): n = a or c or g or t
taaaactcancngcagagcacaccaacnagtgcacgaaggctataaatttatgtttgatgagaagctggtaacagtatggtctgctcctaattactgctatcgttgtggaaatatcgcttcgatcatggtcttcaaagatgtaaatacaagagaaccaaagttattccgggcagttccagattcagaacgtgttattcctcccagaacgacgacgccgtattttctttgaggccttcgcccatcctgctgacccatttttcttccttcttcataccccaactttcgtgtattaccctctacaatatactttttattgagcactttgctgctgaaatgctgcctcttgccttttttttaattttaaattatctaaatttattgtttgnnnnngtgtctatagcaatgttttcctatcaattttctcccctatcccatccccactttggactcatttgagaagacttgagaaatgtcttaatactcacactgctgcatgtagctcttgcttatttactggtctgggggaaacaggatgtgtctcctctttttaaaaagccaattgagggatccctgggtggcgcagcggtttggcgcctgcctttggcccagggcgcgatcctggagacccaggatcgaatcccacatcaggctcccnnnnnntggagcctgct

SEQ ID NO: 4339 - DNA, 600 bp, Canis familiaris
  misc_feature (1)..(600): n = a or c or g or t
gaaggtatnnncgttgtcnttgagtgggaatgcccagccacccctgccctcaccatagccctcaggggggccnccgcagaggggctgaagagtgcagagcaggctgcctaccacggcatcgatgcctacttccagttgtgtcaggatcccagactgctcccaggagctggggccacagagatggctctggcaaaaatactctcagaaaaaggaagcaggttggaagggcttaatgggcctgccttcctcgcatttgcacaggcccttcagtctcttcccgaaaccttagccgagaatgcaggcctagtggtctcagaggtcatggcagagatgaagggggctcaccaagctgggaacttgctggtaggcgttggggttgaggggatcatcaacgtgacccaggaaggggtgtgggacaccctggtagccaaagcccaaggacttcgagccgtagctgatgtggccctacagctcgtgaatgtagatgaaattatagtggccaagaaaagtcccatgtgtcaacaggactcgaatcctgttcctaagaaggcaaaggaatgcctatctcctgtgaaaaagtcaaatccttggaacaattaa

SEQ ID NO: 4340 - DNA, 558 bp, Canis familiaris
  misc_feature (1)..(558): n = a or c or g or t
acgaaactnnacatcctggatgccctggacgaggtgaaggtcggcgtctcgtacaagctgaacgggaagaggatcccctatttcccagcgaaccaggagatactacagaaggtcgaagtcgaatacgaaacgctgcctgggtggaaggcggacaccacgggcgccaggaagtgggaggacctccccccgcaggcccagaactacatccggttcgtggagaatcacatcggagtggcagtgaaatgggttggtgtcggcaaatcaagagactcgatgatccagctgttttaggcaaaggcagggctggccggcagccgcggccccatccgcatccacagccaccaagtcaacgcccgaaaggaggaaggagaagtattttctgtactttatgttcctaagccttcagctcagctgatttccacggtgacccaaacatctgacagccagcgttgtgtacatttttattttttaaatcctgctatttaaaatgagccaaagtactcagaacagagaacttctacggcacgtgcattgtcccacggtggtgtggccggctgg

SEQ ID NO: 4341 - DNA, 602 bp, Canis familiaris
  misc_feature (1)..(602): n = a or c or g or t
attccactatctccccttcctgnnntcagccgaggacgtttatgactgcaaggtngagcactggggtttggatgaacctcttctcaagcactgggagtttgaaccaccaacccccctcccagagacaacagagaatgtggtgtgtgccctgggcctgatcgtgggtctggtgggcatcattactgggaccattttcatcatcaagggcatgcgcaaggtcaaagctggttaacgccgagggcctctttgaggcactttcaggcaatggagtttcctagagagaagatcagtgaagaaatttatgcttcaatagctttataaacctggcaatactccaactgttcacctcactgaggacaaccatttttttgcattttccagacttttagatattctaagaaaaatgatgtcttcctgatctgatatctagttattctctctttgctgacccttcttggatccgttttcctccattttctaccatcattttaatatcaccatgcaatgcctctggaatagaccccataggatcttttctctactacggaaccttgtgaatgttcgaaacagatatctcttctacacttagtgctttggtttct

SEQ ID NO: 4342 - DNA, 569 bp, Canis familiaris
  misc_feature (1)..(569): n = a or c or g or t
agaagatannnaatagggtaaatagtgctcctttatcatccattccagcactttttttttccagcatagactcttaaacacattgatcctagtttttctcaatagaaataaaaaatcatttagaaaacatggaattttgtgaggtctctccttgcattagatctgagttttttttaaaaaaaagacttaacttccataacccatctcatgggaagatcacaggactaagattaaggagagttagacccatcaactgcctgaggagacagcactcaacctcacagtacagcaaattccttgggacaaactgacagcaatcttccgcacttggattgttgaggcagcacacaagatcttaacatacttaggaaagttaaatattctaaaaagatgtaaagttttatttttattatcaagtcttcaaaggaccatattattccgtaagacttgctctctcctgagttccactcttctgacactgtgtgtatatggggacactcaaactgcaccttgacattgcaactttggatacaattcagaatgtaaatgtttgaaggacttaaaacttt

SEQ ID NO: 4343 - DNA, 653 bp, Canis familiaris
  misc_feature (1)..(653): n = a or c or g or t
gccgttgccactctcgtctctganntcgcttctcccaaaagaggctcctcntggagnngtcntgtgtctctgaccccccagtcagtttgaagggaagggaacaaaatctttccctctcaagatcaaatgcagcctcctgtgctgtctagctcccaggcacccagagactgggcagtactcaccagactgcgggctgcactcggcctccggcccagccagcagggacactgtttgggtgccattctgttgaatgttgtaggttcatgattgttccccggttctgtctcgtccattcattgttgtttacgtgcagctcaccgtccgcgcctcctgccccttgtcctgaagctcttgggcagcacttactgagggtgcaccaccctcctcagcaaggctggtgctgggtttcctcccacatctggccaaccccagccatggcatctgtggcagcagctcctgctcctcagaggctcctggcctcctccctgaggcttctgcggaggtgccttcccagggtcagctgtgccatgtgatgctgtccctcagccacatcagtgtttgtccaccagggagtggtgtccagcaaggactgctggcctcagagggttggaggcacaggtcatccacatctgtgcttggtcatcccaccgcca

SEQ ID NO: 4344 - DNA, 606 bp, Canis familiaris
  misc_feature (1)..(606): n = a or c or g or t
tattgcagtnnccatcaagacatacaacttaaagaagaatcaggcccataccttggaggacttccagcgagttctcaatgtgaatctcttaggcancttcaatgtgatccgcctggtagctggtgagatgggccagaatgaaccagaccagggaggccaacgtggggtcatcatcaacactgccagcgtggctgcctttgagggccaggttggacaagctgcatactctgcttccaaagggggcatagtgggcatgaccctgcccattgctcgggatctggctcctgtgggcatccgagtgatgaccattgctccaggcctatttggcaccccgctgctgaccagcctcccagaaaaagtgcgcaacttcttggccagccaagtgcccttccccaaccgactgggtgatcccgctgagtatgctcatctggtacaagccatcatcgagaatccattcatcaacggagaggtcatccggctggatggggccatccgcatgcagccttgaaggcaaggggcagagaaaacatgtgcccttcttttcttgcttcccttggagtactgtactacagcttgggaggaagtccagtagccatcttgtaactg

SEQ ID NO: 4345 - DNA, 538 bp, Canis familiaris
  misc_feature (1)..(538): n = a or c or g or t
aggtggtgcactggtttggggacagtaggtacgnnntgaagaacggccagctcaagtggtacgaagactataagcggggcaacttccccccaggcctgctggtcgtcaccccgggcaaccgggagctgctgcagggctattacctgtcgcacaagacgctgtgcgaggaggacctgcagagcctctgcgacaagacccagatgagctcccagcaggtgaagcagtggtttgcggagaaaatgggcgaggagacccgggctgtggcggacacaggcgaaacagactgaatttgaactgattactctgaaggactggccagtccgggatgccgcctgccatgtggaagggctcaacctgactctctgctgccacgtgctgtccccatgcccatcactgggcatgcacgagagcttctggaggcctcgtcaccagcccagagcgcgccgccacctccggcctgccgccaccgagcaagccagcggggagagtagagttcttgtcagttcttcctcccacgatgtagggcctttcctttgcc

SEQ ID NO: 4346 - DNA, 653 bp, Canis familiaris
  misc_feature (1)..(653): n = a or c or g or t
gttgatngagtaaaaagaccnagtctcctcccaccttatatctcagccagctgaacatcactnnnacgtgtctgatctaaggcatcctaccaacagcaccatcaaggcacgttggagctttcttgccagaactgatctcttttggtatgggaggaccatgggttaccacctacactcaacaaatcaatgagggacttctttttaacttggtaggatttggactggttttgcaacaataggactattattaatagagttacctatgacaaacaatagggggttacctagataatgccaaagccagcatttatactaggtttcctcctgttacctgttcgaactatgttttctttctttttcctacttgctcaccagcttgggcttccactctagttcttttaccaaggtttgtatgaccatgttgaacttgtttcattctgattgtcctctttggatttctgtgtgaaaacacacttcactttctcttgacccttagctgaaatgtttaggtagcttctggtgatatcctttcataaatttatgtctcttaaaagggtgatagatgggatacctcatagaaaggagctttgaactgtatataactcctaaagaggacttcattttagagaattaaaatatttgtgctcancnnn

SEQ ID NO: 4347 - DNA, 641 bp, Canis familiaris
  misc_feature (1)..(641): n = a or c or g or t
aacttcagtgccnttctgcgtattcanntgtnntggcannagctgttagacacgtgattccacagacacctgaggtnntgctgtgcatcatgcaggtcgaggggtataaagcttgacagtttctctcaaagaacattgtggactagaatgtgtggaacagaccgtcgtgcagaagagcagctgcactccacggggaccacatcctgggaatcttccggaaatgccgccggcaccctgagctaggctggctgtcccctcccagggacctgtctgtccttgtacctttgtaatatccagggcacctggccgaggctactcgctgccctcatgggtcttttatcaaaatgatctaggctactggtatttttttttaaacttccagatgactattagaataactgtgagatttatgccccaaaaaaactcaaagtcattttcataagaaatgtattaaatctataaatttgggagaaagtgtatctttacaatatttattcttacatctctatagatttttatgttgtatatctcctactgagatgtataggttcttaggttttttagggttattactgttgttttggagggcatttttccactgttatgaatgagagtcccccatgatattacctaaatctaac

SEQ ID NO: 4348 - DNA, 440 bp, Canis familiaris
  misc_feature (1)..(440): n = a or c or g or t
tagagtcacttattaccgctaattgggagggacagttcaaataagcacagaggagcagttatcacatgagcgtgacatggttttaaaggggccttcctgcatccctgaactcccacagcaggctggctggccgcctgggcctcaggcctccagagagcggaggctttgtcagagcgccccatagaagtccgcagcctaagaaagctcggtttggcaagtcatcggagggagccacagacgcacagctgcctgggacacttagaaagtcaacagctgacggaaggggaggacnnngagtttggctgcccattgagaatacaattgtgatacnnnnggacaggannnnnaaaagnnncnnattaagagngnnnnnnnnnnnnagcattcccatttatagcnnnagntgcccaaannnnnnntnnnntggnnnnnggtgtttt

SEQ ID NO: 4349 - DNA, 603 bp, Canis familiaris
  misc_feature (1)..(603): n = a or c or g or t
tcaagccaatgaccatcaatcaaacaaagaaaagaaaactaattttatgaagaaagacaaatctatggagtggtntacaggaagtgaagagtgagatggctcaactaaaccaatttggaatcattaactacaacatgtcaaaataactacaagacaagtgtcaaaatgagacatttaaacagttttgaaatgttacacatcttactttagcttttattatttttcaaaattatacgtaaaagttatacaaatcatagtaaaagctaacaattccaatctatggaagtagtgattcacaatataaagttctgttttgatattttttcatcttccaatcagttgctgtcatctgaggtactactcaggttgtggtttaaacttcctcagcttgacaagaaaagctaatttaaggaaagaaaaaggtaaagttattacaataaccagaaaaaaacatcacttactatggcctgaaaacatcactcacctgtatgaccagtttgccagtgtataggtctagcaatataaggagatgatccatatggaaaatcagaatgcgattcttctgttgtagaacaaaatatatattataagctacataaaata

SEQ ID NO: 4350 - DNA, 225 bp, Canis familiaris
  misc_feature (1)..(225): n = a or c or g or t
atgtgggaagcactgggaagtgactgcagcacccaagagggatgaagtattattaggaaaactcaaagaccgagagaaatgtttctaggtcagagtactgaagccaaaactaccagagtaatccattttcagcatttcagagtgaaagatcnnnnnntaccacattgtacagttgcgggaatctctctttctgaagtatgagacgttaactactcagacannntg

SEQ ID NO: 4351 - DNA, 428 bp, Canis familiaris
  misc_feature (1)..(428): n = a or c or g or t
atcacttcactgggctctacnagccaggtnnnctgcttctgaaaacagttctccatcctggtgtataatgggaatctagggttgtgggagaggctactggttagagggcagtggtcncaggctgtggggtatctggggacattctgagcacctgaaacggggtgggggtagccctatgagannnagacctatttttggatagcacagcccacccacctgtcatccacccaccccacatccctcaggaattcttctaccagtccggggcatctgggcaaggcatgggatcaagcnnnnnnccatgagtgactttctactctgggcgaggatgcccagaagcatgctctgtgcccagcctctccaccattgctgccctccgctgcttggaaggggacacgggggcagcagcacagctcttctgtcgggca

SEQ ID NO: 4352 - DNA, 589 bp, Canis familiaris
  misc_feature (1)..(589): n = a or c or g or t
tcgcatatgannaactactganactgtcgtcaccctgttcaccacctccactcaggtgggctcgggcttcacggcctggccttccacaggccctggtgctggctccagggtcagggccttgtcctgggtctgcgtcagagggtggaccatggacatgtgcacattgaggttgtgggccttctcgaaccgccggccacactggtcacaggcaaagtccagctcggtctcagccttgtgtttagtcatgtggtacttgagggatgcccgctgccggcactggaacccacagacttcacacctgggggacagggtcaggtgagcaagggcatgggcaccagtgtggccatgagaaggtgcccagacccacacttactgcagaggtttggctcctgagtggcgcatctgatggactagaaggtgcttccgctgcttgaaggtctgtccacactcatcacagatatagttccgcacctctgtggaccagagatggagtgagcacaggcacgaggaaagcccaggactcccgtagagcacagtgccctgacatagtgtttccttacactcagggcccaatgaaggggcctgagna

SEQ ID NO: 4353 - DNA, 601 bp, Canis familiaris
  misc_feature (1)..(601): n = a or c or g or t
tgcaagtcagtatttactnnnctgtgttgctgaggtnnagtggctgtacaagtgacccctatagtgtagtaacagtcaggatactagaggtggatatttgagtcctcatttacacacacacactacatagcgaactgatattcatggtgcatggtgggatgcatggtggttttattagtgactgtgtctgaagccttgaacctccaacagcttcttatgtatataaccttctatgtttgcttctgataaatgggaatctgggttcactgctgcctcctggaatatctctctgcctgcccttctgggttgttttcaatgccattagccaaagttgggtttgccatctcctacacatgggaaatcttgtgctgttccttgctgtcctccatactgtttaggtgtctagggaaatcaatctcacacaattagtacaaaatgtcttcagataatgggagacaacaggagagtagataggaaacgagactgagaactttaagatttttttccaaaccaaatgtttttcacgtaggatgcaaaatgttggcacgtcataaaaatatggatgtgtaaactagttgtgctcagtttgtattgatggaaa

SEQ ID NO: 4354 - DNA, 541 bp, Canis familiaris
tttggagtttctgcataagttcaaggaaacattctgcatgttgtatctaagtctgatgtacttacccatctcattaaaagcaaacacaggctgcgttttgtggctctgtggcccctaaatacagaagcaattctcttctttcctgactttgacattgtagctatgatgttctgattttgattttggcaaatcctttgggtctaattctgtgagcctacctatagcactggattaaaatgtctgcatcatttctttagttatccagctaactttaaaactgttgtaaaagtgtaaaccagcccatgacagttttttgtacctgttaaagaacgttcttgttcagttttcatgattcttgtgtaaggaagactgatctagatgttctctgctgtcctggaccatgttaattacactcacaatgtactttggttccacatcacaatgatttgtccccaatgacccttttatcctttctaggcacatttttgttgttgtcgttgttgttgcagtttccctttgcattgtattgctttgacaactg

SEQ ID NO: 4355 - DNA, 603 bp, Canis familiaris
  misc_feature (1)..(603): n = a or c or g or t
aaacaggnnggcatcaaataannnnnnttcttaaaagtggctcaggttgatgtgatagtacatgttactgaatcagttctgggttcatggttctgccacctcctagncaggtagccatgggtccctcatctgtaagatccacagtatcagtggcctagggtcattgggaagattaaatgcagtggtgactataaggagtctagcatagcacctgatgcataagtaaatccagcaaatgactgctactacccttagtactgtggtaagcttgggaaaacaacagggtggatgcatgggccctgccctcacaaatgacagtctagcaaggtaggctgccattaagtgattacaaaaagcatgatgaatactaggcataggttgcaccagtaacttccagctgggggacctaaccccagggttgtagtcagagaaagtattcctggaagtgatgttgtaccttaaggagatggtatgttgatttttcactgagcatttgatttcttggctttatgttgtatgttttaagggcattgatgtatgattgcttccatgtctcctttaatctctttgagggcatggtagtctttttcatccaaagcacct

SEQ ID NO: 4356 - DNA, 602 bp, Canis familiaris
  misc_feature (1)..(602): n = a or c or g or t
aagatcaatggaatggnnggtctggtgccaaaaaactatgtnaccattatgcagaacaatccattaanctcaggtttggaaccatcacctcctcagtgtgattacattaggccttcactcactggaaagtttgctggcaatccatggtattatgggaaagtcaccaggcatcaagcagaaatggcattaaatgaaagagggcatgaaggtgatttcctcattcgtgatagtgaatcttcgccaaatgatttctctgtatcactaaaagcacaagggaaaaacaagcattttaaagtccaactaaaagagactgtctactgcattgggcagcgtaaattcagcaccatggaagaacttgtagaacattacaaaaaggcaccaatttttacaagtgaacaaggagaaaaactgtatcttatcaagcatttgtcatgataatgctgaccagaagtgactgctatacagctataactcatcatgtaattgaagactgagaaaatgtcaatccaatcatatttgattggaaattgntttctgactctacatgagaattgagtgtgatacataagtatnnnnnnttataactcagcccatacatatat

SEQ ID NO: 4357 - DNA, 578 bp, Canis familiaris
  misc_feature (1)..(578): n = a or c or g or t
ctcgggggcttcntggctggccntgcacccctcaccagcacttagatttagacttgtcacctgatgttcaaggagacattgcagtgagtttctcttggttggaagnnagggtcggtgaggcctagaccttagaaatacaaggttaggaaggatctcgcggaacccaaagcctttctctccctggcgctaaaacacccggagggccttgtggtccattctgcagcctaactgtagtaggctgaatagtgtcccccacccccccgatgtccatgttcttatcccatgaacctgggaacattactctatcgggcaaaggggactttgcagatgtaattacattaatgatttttggacaaggtgactcctggaataaccccgtgggcttcatgtaatcctggggattccttccttatgggaggaaggcaggaggtcagagaggaagtaggagatatagtgggaaggggtcagagctgtggaatgcaggccggcgcccacagaggctagaaaaggcaacaaatggattctcccttcagagcttcctgagggaaccagccctgctgacactttgactttagccc

SEQ ID NO: 4358 - DNA, 610 bp, Canis familiaris
  misc_feature (1)..(610): n = a or c or g or t
ctaacaggtgctaaagtcagngcagaaatttatgaagcatttgaaaacatctaccctattctaaagggcttcaggaagacaacgtaatggctgtgcatcctcctgcctctgcacccacttgtttttaaaacaaatcagttttggtacatttaaatggtggtggtgtggatggccccaatttggtgagaaaatggatgttctgtgggttgtagcacctggtgaagctctccagcacgtgttccccatggggatgccgggaagtggtcttccttctgcgtagagaacaccgcagtgttatgtaagtcgcccgtactgtgctgctctttgggcagcgctgcccagttatttatatttaggttttaaagacacactgctgtcaacaagttggtttgaggtacaaaacttcaagtgttaaagccacctctacagttgattggactttttcttttgtttaatttcttccccataaaccacagtttttatatttctaccagaaaagtaaaaatcttttttaaaagtgttgtttttctaattcgtgactcttaggggttatttttgtgccagacacattccgccttttcagtattgcaggacagagtggccgtattaa

SEQ ID NO: 4359 - DNA, 542 bp, Canis familiaris
  misc_feature (1)..(542): n = a or c or g or t
aatatatcaatgataactgaggtatatgctcttaaaggatgaattttataatatatgagttatatctcaataaaactannacaaaaattcataaagaangactttatttgacctagacagatttagaagctaatctttgcagttagggaaggaggtgtagagcatgctaattcattttgctggggtcatgtgctcatctttgggacaattaacaacagctggagagggagttaggctattttggaagatgggtacacaaattccttattagaaggaaataatttcctgggaaaagttgaaagttattcccagaaggaagagagaagcaatgtgggcagattaaaaaacagatgtctactccgaagagatcagtttgaaaagtctagttatggctttagtggtcagctaaagtagtgcatactgcagtgtattgaaagccacttctttagttctgtggcatgcagcaaccagctcctgggagcattaaatacagctcacaactgcattctcnnnnggaattgcccttggcaaaaaagaagctg

SEQ ID NO: 4360 - DNA, 606 bp, Canis familiaris
cttttcactgacggctcttcccagcgcagccgaacctccacctccgctttggcagaagcaataagactagtttgcttgaaataggtttcttgacgattatgccttttcctagaaggtttcgtaggtaagttagaatttcaccagataaacgaggtcagccccagacccgtttcttggaattttatatcggacaatatttatactataccagcctaatctgcagtttttagatgcgttggttaaaacagattttttttaaagcagtaagtttatagaaaaatttgttccatttaatggaaggccgggatgccaccccctgggccatgttacattcccagccaccttctctggtcctaaaatcaggttcagaggtgtagtgcagaaagggcaccgtgtgcaagcctcatcgagccacgggacgagtagatctaccctggttagcacacgtgtccccacgcagcaataacagcagcctcatccaggctgggatcttactgatacagtaagtaggtgactccctccagggtagttccctaactagttagttgtctggaatcctgaacgtggcttgtaggcaccaagcctcatcatgtactcccgatggct

SEQ ID NO: 4361 - DNA, 598 bp, Canis familiaris
  misc_feature (1)..(598): n = a or c or g or t
gccaagaggagcagtggctggagcagcnncnnnngcgcatnntgaagaaagcagctctnnangaacagcccgagagggatttcttcggtcgtgtggtcacgaagagnnnggcccccctgagtgcaggagctgtggcccccgagacagacgtggctgagcggcgcataggcagagcagtgggcaggagcgatgtctggtttcgcttcaaggaaggcgtctccaatgctgtgcggcgcagagtgcccgtcagggacctgctgtagccggggctgcacccagctccttaaggtctgctggacggcccgggtctacacccagctctgtgacgcctgctggacagcccgggtctacacccggctccgtgacgcctgctggacagcccgggtctacgcccggctccgggaagcttgctgcacagcccgggtctacacccagctccgtgacgcctgctggacagccgggggcccacgctggacaccttagcccgtgcagggggctgcagatccatatgagatgccccagggcccacacccgatgctgtgttgctttttctccatcagaagatgtacaaaatcacaaacactctcaaaaannnnnn

SEQ ID NO: 4362 - DNA, 631 bp, Canis familiaris
  misc_feature (1)..(631): n = a or c or g or t
catcactcgggtgtgggtgtgagtnnctctcctcctggcttcgctgnnngnagagcgggcacgtnnnccacgtcccgcgtacgcacacttgcctgcctgctgcnnnnagacatgtgtgttcgagtgccgtgtcttctccgccgcacgctgtcccaagaacgctttctatgagcagcctgcctctgccagcgctttagaaagtgttgcgcgtcctccaggtttgattaatggcatgcagttattttacttaactggagtaatctattctttcaggcacgtagagcatttaacacctaatttggggttatttttacggctctcaaacttaaattcatgtttttctgttgacgctccttgtttgcagtcctgggctgctcatcggtatcctgggcgggctgacctctgtgtcagcatggctgcagaatgcaccggatccagggtgggccaagcccggcagcccacctgaccccccgcgggctctggagcagggccatcccaggccccagggaccccattatgccttttcctgctgtgtctcatgccaactttgtggggtgttactcgagggcttgctgctcctctttctgaccagctcttggaatagaacctgaagagtgggtgtaagaggtgg

SEQ ID NO: 4363 - DNA, 527 bp, Canis familiaris
  misc_feature (1)..(527): n = a or c or g or t
aatgccttttaaaagaaagttataatggagaaaaaaatngagnnnnaaacaaatggttacttctgtatattacctcgcaccagtgcttcattctatttgtaaaatctttctcctttaaatggttggttaatactttgagactttgtttacgtgtggcagtgttgtaaaaagaaactaaagatcatgttttacccttatggatggaatatcccttttcctcaagtgcggtttgtgatgtgtttttggaattaacatgttctgaaagttccaactgatatttgaaattgatggtagagcatttagctgaagagttaagcgtttgattccattaggttttcacatgtgttaatctcatttacagcatcaaattgcagcagtaacattttcctttctgtgaagttctaaatttagttatgacctacttagcaatgcctttgaaaagggatactgtatccatggtaaattaattgtatacctaaacagagatcgctcagctttgcctgtcaggcttgtaattgacatctagt

SEQ ID NO: 4364 - DNA, 632 bp, Canis familiaris
  misc_feature (1)..(632): n = a or c or g or t
agttgaacaggttcctgtagaaccttacaacattcccctgtnnnangccgaagtcattcaggaagggagcgatgtgactctagttgcctggggcactcaggttcacgtgatccgagaggtggcttccatggctcaagaaaagcttggagtgtcttgtgaagtcattgatctgaggactatactaccctgggacgtagatacagtttgcaagtctgtgatcaaaacagggcgactgttaatcagtcacgaggctcccttgacaggcggctttgcatcggagatcagctctacagttcaggaagaatgcttcctgaatctagaggctcctatatcaagagtatgtgggtatgacacaccgttccctcacatttttgagccattctacatcccagacaaatggaagtgctatgatgcccttcgaaaaatgatcaactattgaccgtattgacttctctcttcttgaaaatagagtttttatgaactgaaccaccttggatattggctgaaaattttaaattaattattgtattaacacatatgaattgatgatttccattaagagtgtctcagattaactttttaaaatgtttcacttggtagtcnnntaaattccatttaattacatctgtaaa

SEQ ID NO: 4365 - DNA, 539 bp, Canis familiaris
  misc_feature (1)..(539): n = a or c or g or t
angagctgaagannaagaagctgccaannangaatnngagganncaaaggaggaagaggaannnggtgaaggcgaagaaggagaagaaaccaaagaagctgaagagnangagaaaaaagatgaaggtgctggggaggagcaagcaactaaaaagaaagattgagcccctctgtccttaatccttccaggaagaattctcccgaaatcaggtcaaccccatcaccaaccaaccagttgagttccagatactatatgaattaagaagtcaatatatgtataattctgagatgacttaggttggacattcaatgttgtgctatgacttttctccttatgcagagtatctgtttgcttgcagagtggcttcctggcttgctgccagcctgtgcatggtccacgcttatgagttcaggatctatggcaatgtgaataattcagatgtttacaataaaaaaaaacatgaataaatgaattcactaatgttaatgttaaactccatggtaaaaatagtcctttgaacctttggtggttagaaatta

SEQ ID NO: 4366 - DNA, 677 bp, Canis familiaris
  misc_feature (1)..(677): n = a or c or g or t
agatcagagtttccatgtngggctccagctgtgttcnagtnnccaccagagattcaacaaactcatctnnatacatcattcttgtcatgnnacntacaaatccactggtgagactgcagttactgcttttgagatcgacaagatgtacacccccttgttctttgccagagtgagaagctacactgctttctcagagaggcccctgtagggcctcacgtccagtcctctgtcaatgttgcatgaataaaagtatatagagcaaaagagcacctaagttataaatgtacatatatatatatatggaattggaacttattttacattgttagagttcttttaagaagagtataaattgattattttttttatttagagggatagttgatacttggggtattttgttttgaaattaaggagttgagatcacaagttgtttaataagcacatttatgttgtgaaaaaccttaaaatgagctttaaataatgtcctttttcaagaggatttctgagcagatttctgtcacacaagtctccttcctcctgatcatcccaatattttaattgcatcaggggagcttccactggatcagcatttctttcacgcatgacacggtgtctttgcactaaaggctcaaaatgtgaaaacttgttctgaatttgtttgaaactgtttgacc

SEQ ID NO: 4367 - DNA, 575 bp, Canis familiaris
  misc_feature (1)..(575): n = a or c or g or t
tcctttccacggcacaagcgattatgaatggagtgagatttttctcaaagtcggaagtngaattgtagtaaattactaatgttccctccctgggactgtttaattntaatagagctttaacaggctggcctttccgtatcgtatcacaagatagtacctccttgggctctagtaaggtatgaggcaagcaaacgctggccagagttcatataccaaagttagtctttttaacctcatccagtgcctttaagaagcgtgctatgagctgcagtctctacttacgaggcagtcccgatgaactttctgattcaagcatagtgctgccattttttaaagggtcacacctttaaaaaaaacaaaaacacaccttgtccgttgacaacataagcaggaaagggtattgctgggttctgccaagttcttaaggatttcacgctcattatatcatattctaaacatgatgttaagattattggatgcagctttttactacaaaattttataaagcctaaaatttaaactcttcctttatgattgaatggcattattctnnnnnatggaatatataaacgatg

SEQ ID NO: 4368 - DNA, 530 bp, Canis familiaris
  misc_feature (1)..(530): n = a or c or g or t
cnntaacacgtgatnnttctccaaactattttgacagatgaaatnncagataannagnctgactctgccaacttgaaattgnnnnnnntgatttctgtnnctgtactcgannnnnnggaagataatctaaaatnnagaaacaggnnagtgttatcctcacctcacccctttgacacatcgttgtaagcgtagaagaaaactgtaggttggtcataagcatctacgataaatgcaggggcttaaagccacaccgcctggatctgttgacatagcaacaagattgaaaaagtgctttcacctaaatgcctttttactaacgtcagccatccttttgagacagattccatcttctctactctatgagtctttccatctctatcccgacatgcttctctgccggtgacttcagtggcattggatcttgaaggttcaccgctgccctcttctagagcctagagtcagcgtacctttgccagatgttaggggatcgatttcagtaatggccccatgtctcttcctctgtatccaca

SEQ ID NO: 4369 - DNA, 567 bp, Canis familiaris
  misc_feature (1)..(567): n = a or c or g or t
cttcctgaccggtgcccagcagaactatgccannaaatacaccatccccattgatctccttgggtttgactatgaagtgatggaagacaaagagtataagtatgctccagaagatggggttttcattcatggattatttctggatggagcttcctggaatagaaagatcaagaaacttgcagaatcacatcccaaaattctttatgatacgatgcctgtgatgtggctaaagccctgtaagagggcagacataccagaacgaccaagctatgttgctccactgtataagacaagtgagcggagaggaacattatccaccactggccattctacaaattttgttattgccatgactcttccctctgatcaacccatggagcactggattggacggggtgtagcattattatgtcaacttaattcgtaattagaagataccatttccctgttaccgttttcttgttagatggttggttgagtagtaagtataaacacttgggtttaagtcaattttactaaagctgtacttataattttatgtgcaaatgcaacctagatttaaaatga

SEQ ID NO: 4370 - DNA, 562 bp, Canis familiaris
  misc_feature (1)..(562): n = a or c or g or t
agtctgtcacctacttcnngcagaactnnaacatcccggtgcacaagtggtgcnncaggcannnctacaagcccatgctnngacggggcagcagcaagtgggtggccaggactggggtattcttcgcctccgccttcttccacgagtacctggtgagcatcccgctgcacatgttccgcctctgggccttcacgggcatgatggctcagatcccactggcctggatagtgagccgcttcttccagggcaactatggcaacgcagctgtgtggctgacactcatcatcgggcagccggtggccgtgctcatgtacgtccacgactactatgtgctccactatgaggctcccgtggtgggggcctgagctgccccggctggtcctcatggccacctcctcacctcactgcccaaggccagagccagcccccacctgcgtgctggggagggaggctggctctccactgcctcctaccagcccccagaaggcctctctgcccctatggggctccctcctgccccactcagggaatggcagaccnnnnncaggccagggcccaggga

SEQ ID NO: 4371 - DNA, 545 bp, Canis familiaris
  misc_feature (1)..(545): n = a or c or g or t
tgacagtggaagtcacaaaaatgtcccctgcccagcccccccactgcccctgaatccccgcagaccgtgtgcatattactgtctcgtgatgtccttgcagacgtggtgtgtgctagttccacgcggccacccgctttccttcagagcgtgttccttcccgttaggtgcttcgtggtattctcttctcaaggcttcagaatctcccctgcgcactcagattagttttcaggcctcttctctctgtctcccttttccctcttaagatatcttgtttccttaggacagaactgtaggtgcttgcactggtttgtttcttgctgtcactgcttgttttgttccctccccttgaccaaacagggctcacgcttcagggccttgcgcgttgaacatgttgggttttctttctctgttatttatataaaaataatttatcaaaaggatattttaaaaaagctagtctgtcttgaaacttgtttaccttgaaattctcagaatctcagtgttggaaagtattgaagcacaaacatnnnnatctccgtaccgtt

SEQ ID NO: 4372 - DNA, 510 bp, Canis familiaris
ggaaggggaagtttcaataacatgacactaaaacagcagagaccttgaaaatgtaccccccctcccccagagttgttttgcgcatgtgcatgcctgtgtgcattggggatttttagatagggctgctttgtgacttgatggtagaggcaaggaaaaggaaattgccacctgagcagggtaggaccttgctaggtgtgtgttgtgtgtgtggggagggggaagagctaagagtcctcaggcctctctgtctagcacaaacccttggcctttctgtgaaaaccgaaggataaataggtgaaatgagaagacccctggggagtagggcggtgctcctcactgccctggaggagcttggagagaaggctagtaacacaaaggagctacggttctgtatatttttcctttcattccacacatatttgaagtccctgttagatgaatatggtcagtacgtggaagggggaatagaccaacacagtctctggccacttggatcttccagtctagtga

SEQ ID NO: 4373 - DNA, 662 bp, Canis familiaris
  misc_feature (1)..(662): n = a or c or g or t
aaaaaaagaattaaaaaaaaaagttttgccctggacaggnncagnntctaccatctgctctccagtaatagttatgaagccaatatttagatctcttgcaaggcagatgctaattgtaaagcattgagcaagcaatagtgccccaagctattgcagaagaaaaatcccagtaaaggaaaaatgggctcagaattttcaagaccaattcaagcactctcctggttttctcctctaaattcaatggaaccatatgggggaatatcagtgaagatttttagagcttttggaagccctttggtctctgaattgtaattagcaataaaccaaaataagaaaccccagatgtcagatgcttgccttgttacttggaggactaaatgtgggtgtcactagtatcctttgtatgttcttgatatctgcagagaattttgaatctatggaatttattttttcagtcttacttgacaaattcctgtcctataagtagcaggatactgtaggcagagaaacttaaggcacttttgccacttggtaatgaaagggagggtggaagaattagaaacagtacctgcacccctaaacccatgccaaaccaaaaccagaaactcctcctatctaatatgtccagtggtcatggtggaagactttgtactgccactaaa

SEQ ID NO: 4374 - DNA, 615 bp, Canis familiaris
  misc_feature (1)..(615): n = a or c or g or t
ctcccagcnnnnntgaaatagagcccccannnnngatgtatagattttcctgtcttcacttgtcagggctcccttcccactggggtnnnagtgaccctccccaccacagcctccccatcactgctgctgccatgtccagcccctccttgagcatacctgaaggactgtcggtccccagccagcccctcaccctgaggttaacgccatagacaccactctgtggagatgcactactgcccttcaactcacatctcctgggccctgccctctcagagctcctgacttatagcagagggcccaggacaactgtctgccagtatgcctttactggtgggtgttaccaggtgtctactcctagagccctatctctgtgatgaacacagcaagagcatccttgtaaagaggatggcaatctcaactcaaggatacatatgcttgtgtagaggaaacaaggtcagaggaattttaaaaattttaaatttgatgtagttaacatataatgtattattagtttcaggggcagaattcagtgatcaataggttgaatggaaaggccagtgctcatcaagtcacaatccctctttaatgcccatccctcaattaccccattcccca

SEQ ID NO: 4375 - DNA, 522 bp, Canis familiaris
  misc_feature (1)..(522): n = a or c or g or t
cncctgagctgnnaaagatcctgcattctcgggttgctnnnagactgatcatccatgcagatgagctggcccagatgtggaaggtgctgagtctcccaacagatctgtttaatagtgtgatgaacgtgggccgcttcacggaggagattgaatggctgaagtttttagctcttgcttgcagttctctgggagttaccattgccaaaacactcaagatagtttgtgaagtgttatcatctgaccatgacagtggacctcctcggatcccatttagcaccttccaatttctctacacatatattgccgaagtggacggggagatctctgcctcacatgtcagcagaatgctgaactacattgaacaggaagtgattggtcctgatggtttaatcaaggtcaatgactttacccaaaaccctagggttcggctggagtaaaagcacagtttgggccattttaaaggaagataacagatgattgggtttcagaatggccaaaccccaggcaccatccaatgtcaat

SEQ ID NO: 4376 - DNA, 534 bp, Canis familiaris
  misc_feature (1)..(534): n = a or c or g or t
gcgaagaaggagaaacagagaagcagattctactccccacagttcctgcccatttcatccagnnagtatctctaactcctgctcttcctcacttccattaaagaaaatagtaagttctgattcaaggttctggaatactctgtgaaacttaactgaggttccttttgctcagaatatgtgcggttatcctctcaggctgggggtgaaaacaggacagagcaggggctccctggagcagtgtggggcccagccgctctggaggcaggagctccccagccccgtgtgacctgatgtctgtgccaggcggggtggactgcctgcagaggacaccgccacagggaggagggaggcagagggaggcaggggtgggcctggtgagggccaggggatggaagcagggcaactgttaagatcaaaggcaatgatgtgactcctgtgttctgcaaaaggagcggcaatgtatcaaattgatgcaaatttggacaagtgtaatacttataataaagtttttaatgtgttttactttgtgatatt

SEQ ID NO: 4377 - DNA, 597 bp, Canis familiaris
  misc_feature (1)..(597): n = a or c or g or t
ggctgnnnnattcttggtcnctnnnnnntggnnagacatnnngctagacctgggaccaaatggatgggatgtctcagcctgggatcagggcttctctgtggggccctgcgctccccaagcctctgttccttcattttgccaggtgccatttcttccccagaaggccactgtccgggcccctcaccagtctgccccccagtggccagagcctggttgaagtcccccagtgcctccttgtgcatagacctttctctgcccacccctgtctaccccgccccagcctcgtacacccagcggggctgtgcaagaaccccaccccagccccgacagtagtatagagccccccctttcggctggtgtagagtagccaatagtgtagtgcggtgtgctttcccgtggtggcgggtgggtggagggctccgtgccaactgcccttgaatccgccagcggcggccgtgctgtgttttgtgctgtgtccacgcgctgcggcgcccccctcccctgtactgacgcctagaagtgcttctctttgcatagtcacgtagctgcnnnnnnccactccccttcctgtgtttcacgcaagttttatactctaat

SEQ ID NO: 4378 - DNA, 619 bp, Canis familiaris
  misc_feature (1)..(619): n = a or c or g or t
tcgggctatgggattcagttttttggacccaaggagtattacgagggtgagtggtgtggtaaccagcgcagcggatggnnnngcatgtactacagcaacggtgacctctacgaaggccagtggttgaatgacaagccgcatggggagggcatgttgcgccagaagaacgggaaccgctacgagggctactggcagagaggcatgaagaatgggtcgggccgttttttccacctggaccatggtcaactgtttgaaggcttctgggtggacgacgtggccaagtgtggcacaatgattgactttggtcgcgatgaggcccctgagcccacccagttccccattcctgagatcaaaattctagaccctgatggtgtgctggaggaagccttggccatgttcaagaagcctgaggaagaagattgatgccagggagcacaccagagcttcaggagaaactccaggccatcacccaactgctcaaaccggtgtggcttctgcaagcggagagtggggactctgggcacacccttggcaccctcaaagggcaccttactcctcccagcactggattatcctctcnnnagctggctttggggnnnntcttggtacagccttcatt

SEQ ID NO: 4379 - DNA, 671 bp, Canis familiaris
  misc_feature (1)..(671): n = a or c or g or t
agataatgggctcntgtctgcccttccttttatcattgcctgggtcattggtatcctgggaggctacntggcagatttnntnctgaccaagaatgttaggctcgttactgtgaggaaaattgccacattnctannaaatttcccatcttcggcgctgcttgtggctctgccttaccttccccctagctacatcacgacaatgaccttcctaacactctcctgtggactaagccccttatgtcagtcagggatctatatcaatgccttagatcttgctccaagatattccagttttctcatgggaaccacagggggattagcaaacatagcagctctcctggcacccactgtcagtgggtttctcctcaatcaggactctgaatttgggtggcgaaatgtcttcttgttgttgtttgccattaacctctcaggattgatcttctaccttatatgtggagatgcagttgtccaagactgggcaaaagggaggaaactcactcgtttatgaagttactccatcttgatatgatggaaagtcaccggacatctttcttcacaaatgagaagcctatggtgatgaacacacccaaagaatttcatttgctgcagttcttttcaaatctgagatcagttctttatgttactaagatttatttttgaggaaaatataa

SEQ ID NO: 4380 - DNA, 613 bp, Canis familiaris
  misc_feature (1)..(613): n = a or c or g or t
gccatgaccccccaactctgagcannnccatccacacccggcccagcctagacagggtcctggggnngtgcctgccgcccccctatgcccgtaccacgctgcacctgtttgcggggccccctgtggcccccttggatcctatccccaacacctgccatagcctgagccttaactggagtctgggggacaccgatgtcgaggtcgtggatgtggccacagggcgtgtgaaggccgatgctggcctcgggcccccctcccgcctctgcaaggcagcctttctcagggccttccgccaggttgccggagttctggggaagtcccgcctcctagccttgaagacctatgaggcagccaaggctggaccctaccaggacgcccgcaggcagctgtctctcctcctggaccagcagggcctgggggcttggtcctcgaaaccactggtgggcaaattcagaggctgaagcccacctcctgagctgagctggatcctgcggggggagggccatttttggggagaggcggggaggctcatgggagtgggagatggcacagggcaaagtgggagttgcagggaggggcctatatggtggtggtggggctgctgcacatgtgg

SEQ ID NO: 4381 - DNA, 520 bp, Canis familiaris
  misc_feature (1)..(520): n = a or c or g or t
tacaaactatgactttcagaattttggtgaacttttatactttttgcttctttaaaagaaaggcatgcgtaagtcaaagcagaaaaggagagtcaccagaaggatgagagttttgnnagctatattacctgaggaactgatgatgctacttgtgactgttctggaacacagtttgatttttgactctaaatcagactctgaattggatggtcacataaattcactccccacccccattggactaatatatcattgtccacagtagactttcacgaacattaatagtacttcaccttaaagaaatgagggtgcttttaaaaaagtgaaccaataggcttaaataagttacattcctatttgctgtttgtagaatttatattcaacacgtcagcctgaaatattctctgactcgtaactcccttcttctccattttcaaaaaaaatctaagacaagactaagttaccaaccagtcttaaaaatcttttataaacccatgctactataaattatgtgactaaa

SEQ ID NO: 4382 - DNA, 562 bp, Canis familiaris
  misc_feature (1)..(562): n = a or c or g or t
tctttcagcgnnccctcatnnnaccacctctcccaaagggagtacccctggagctctgagccaccaggggcccctaaaacagcagttaacagcaatggtgctgctcaggcttcaccttggtgctccaagccagcctccatgctgagtgtcctgctgagcgagtaggggtcagccgaggccactccccaggggcaggcaccacttctcggccacacttccctccaaaggcagaagcagagcgagtgcctttccttcccaaagtgagagcccggccggaggcctctgtccaccttcacaagtgacaggggcagagaaagcgggaaaggaggggtgcatgcggcccaggtctcaggagcacttgggcacttcttgtgaccaggctgagaaaccttatcacatgcttgagtgtgctggtgagaatagccacacttcttcccactggcatgaattttccatgccacctcccttcagacccaggcagggccctgagagggagtgtgtgagggctttccaattcctctctccaaatgtccgccttggcatcctcttgaacctgaagaag

SEQ ID NO: 4383 - DNA, 674 bp, Canis familiaris
  misc_feature (1)..(674): n = a or c or g or t
tgtcacangagctgctgcagcttgcctggcgnaagcggtggaatatgggctcatcaaacccaaccaggacnnagagggaggggctgcctcatgcacacgctagcaagaggagtgaggacttaaatagctttggctaccaggcactgggctgctgaacactggcctctcccctgtagctgcccctcagtgtcctctgctgaacccaggaccatggtcagtcacggccctgctctgccagcactgcctccagcctcacacagcaggaccccctcctgtaccaccgtagacagctgggaacggggaaggtgcatcctaatgtccctgtgcattcccagcattgggaagggcccgtgacgcactctcaccagctataggagcttcacctaagcctgtgagcaggactgcactgatgtggaaataaagtatgtggaactcagctgtgcaccccgtccctaggcaggagaatttcccacggtcccgtgctctggagcaggagccgggcctgagtgcacagcagagctatacagcacagcacagccgcctctagggaaggaatccaatggatcctcaccctggggcctgctgagtgcttttacttctgttggaggatcaggggtaaacctaggaagctaataatctattcagtcacatgggaataaatgggtnnnactccn

SEQ ID NO: 4384 - DNA, 650 bp, Canis familiaris
  misc_feature (1)..(650): n = a or c or g or t
tacgtgacacgngatcnntcaggccnnnctgcatnnnnatctctccacgnnagcggctctggtggnnnnntcatttgcacantngtctnnaatcgcacagtaaacgggctncagcagcatcataaacagtgggccatttgcgggtnntgacccgtccccaccagccgcagcgggatctcaggtgtgcttgcaccctggtccaccgagtgctgcgggctaatgggaggcagggagagttgcccctgggactgctgggtcaggaggggggagtgcagccccttccccactatgccaccagccccgcaatgcagtccccctgctgctccgcgtgcggctgcatggtctgctcggagcactcagcgcaagcctccgaggggctctgtttcctctccagccatgcgaaagacacagtccatcactgcacttattttctcttcttgagagtaaacaattcaccggtaggactttttcttctaagaatcaaaacctaaatggaattaagtgactaaacaccagatgcagttcttagaaatgcttctggctcagaagagaggtaacttctataaacacggagctaatgtcctatctctttgtgtctgtgttaagtgtatgttttaccgtctagtggggagtaagtgccaaatgttttc

SEQ ID NO: 4385 - DNA, 360 bp, Canis familiaris
  misc_feature (1)..(360): n = a or c or g or t
ggggactggaacccccgcctgtcccccccgcccgcctggatctgtggactggcctttccaaagaccccggggggtgnnnnnnnnncccccaccccctgcttcttgcccatcggtgattcttctatgttttgcaactggggcttctgcctttttgtaaaaaagaaaccaatggacccccgcccgccccgggcgccttggccgttctattctggaaagcagagctgtgaggagctttttttttcccaaaggtgggacagccactgcctcccccgtcacgcgggcagtgtgaccccgtgtgacccggaggactgtcagaaccgttactgtgaatgagcgcccggctcccaggctgcccggcgc

SEQ ID NO: 4386 - DNA, 268 bp, Canis familiaris
  misc_feature (1)..(268): n = a or c or g or t
cctatgtacaatgtttcattcatactagttgatcattttcagattgttcatactttttcttgaggaagaataagctttttcaacttgattttcaagcttactttttatattctaatttgacaaatgaaaatgtaaaatctgggttcaatgtatctgagctgctttacaatttttttttcaatgctgtactactgtctcaagatttaaattttaatgcagagtactttannngtctgaggcacacannnnnnaagaaatgtcaacatta

SEQ ID NO: 4387 - DNA, 642 bp, Canis familiaris
  misc_feature (1)..(642): n = a or c or g or t
taccagatcaaagaatcgnncaaagaagaggaaccgccagctgcttcaccccatnnncaggcgtggcgtnnannnnncagagcagctangaactcaaggnntgaacctggggccagacactctgcactccctgccatggtcaatgacccaccagtacctgccttactgtgggcccaggaggtgggccacatcttggcaggtcgtgcccgcaagctgctgctacagtttggggtgctcttctgtaccatcctcctcctgctctgggtgtctgtcttcctctatggctccttctactattcctacatgcctacagtcagccacctcagccccgtgcatttctactacagagagaagggactgactgtgattcatccacctccttactctgctccttccctgttgccaatgtctcgctggctaagggtggacgtgatcggaggttactgtgccaggggatggaccggatggcagtaggacttcagcaaacccggaaaccctgggaaatgcagaatgggagtgcatctgtttatagtaggcaaattggcggaggctttgagaagagggaggatcccttcttgcttcaaaaggaccattggagcatcaacatcacttttgctcaccagagtttgttgagttgttagc

SEQ ID NO: 4388 - DNA, 498 bp, Canis familiaris
  misc_feature (1)..(498): n = a or c or g or t
agaatggggaggggcaggggggncngaggctcacttcctagccatggcttgaggctgctgtnnnctgggagtggggcccgagcaccctctgagtaaatcactaaggtcttttcacctgacaaaagtcaagacgtggggaacaaagcgtaggctccactgagaatagcagtggcagctgttgactctgaaccgctagcatgctgtccttctcttacctgtcttgacttctagaggacacccctgctcctgatgccccaatctcagcatttctgggggccctttgcaggcttagggagcagggaggcttctgggttagtgctctgttacccttgtatctggttgacctaagagcctgtgaatcaggcagcacaaagtgcattgtcctgggagccaggagagctgaagcctgggtttgttcagctcctcacaagggtgtggccaaaggcaaaccacttactgctccacccacctacctcacagggatgttgtgagggtcag

SEQ ID NO: 4389 - DNA, 542 bp, Canis familiaris
  misc_feature (1)..(542): n = a or c or g or t
gtcagggtnntcaagagggtnntcgagannnnnnnaggctccgtcnnngcatcccgggctggtgctgcctatgtgtgtgacccatgnannagncggggcaggaggaaaggcccggcagatgcggggaagccctggtcctggagaggaagacacgtggggccacggtagctgggtcctcacgcccccgcccagtggtgcttttccaggaaagcctctgattttccagaaaaagaaaaggaatgtgcatagaaataaggccacttcctggaagtttccttccatcggcagcctgaggtgtgtatgtgccacgaatggcaggtggcatgaggctcccccaggggcagggggaatccttgtggtgcctgcggtgtggatgcatgtttgggtgaccacgtgagctgctgggtcacactgactcctgcagaaccgggctgcatgtgatgcaggggatcagcaaggctctggggtcagaggtcttcaccaggaggggacgtgggcacaggggtcggcgggcagtggctccaggagctccaagtggcttg

SEQ ID NO: 4390 - DNA, 588 bp, Canis familiaris
gtaccccaagccccgcgcttcccgcgcagttcaagcagagagcacccatgtacaacagcggccccagcccagcagcatctgcaccctcgacgcccacttcccccttgacacccaccacacccccagccgtcaccccggctgcccagacacctccagtggccatggtggccccacagacccagccccctgcccagcagcagcccaagaagaacctgtctctcacgagagagcagatgtttgctgcacaggagatgttcaagacagccaacaaagtcacacggcccgagaaggccctgatcctaggcttcatggctggctcccgagagaacccgtgccaggagcagggcgacgtgatccagatcaagctcagcgagcacacggaagacctgcccaagtccgatggccagggcagcaccaccatgctggtggacaccgtgttcgagatgaactatgccacaggccagtggacgcgcttcaagaaatacaagcccatggccaacgtgtcctagggctgcccacccacctctgcttgccttcgctgcggggtccgctgggccccagcccactgaagcttttaggttcatttct

SEQ ID NO: 4391 - DNA, 295 bp, Canis familiaris
  misc_feature (1)..(295): n = a or c or g or t
acctccacccccacccccacccccacctgcacccccatctatcactaaacctctccaagtactttcttttgccaagcgactacagcaactcatagagatcttgaaggggaagaccttttctagcgcaaaggggtattatgaaatggagaccacagatctcccagaactgaccgctgcctcctgatccaaccccactcccaacagacccagtgagcccctcactcccaagaaaacaaagatggatacaaatataaatacaaatataaatataaatataaatatatatatnnnnnnn

SEQ ID NO: 4392 - DNA, 500 bp, Canis familiaris
  misc_feature (1)..(500): n = a or c or g or t
gctgtgncggctgnnacactggtgctggtannnnagtggatccatcagaacctgctctgcaaaaaccaggacagtggtgttgctgannagcnnatcccccagacagaccatacccatctccactccctccannaggcctcagggggcctggccccactcccaagccgtgaccttcccaggcctgattttcctgctggagacaagggcactcaattcggagccctttcccaacatgaccaccaggtggcggtacaggcccagatttgggggcggggggtgttggcagggggaggtgggcgctgggaggtggagggtgatgtgctctgagtgaaatttggccttgagactttttttcaggactctgaatggctggtgcagtgaaactgcttgcttcctgccaggaacaggtctggactggggacagtcaaggaaactgttcttgactgtggcctgagcctccagaaaggagccctgtnnnnnntcagggttatttaatgaat

SEQ ID NO: 4393 - DNA, 545 bp, Canis familiaris
  misc_feature (1)..(545): n = a or c or g or t
cagcaggggcacatctcccatttggagagagagatccagaaactgagggcggagatcagcacccttcagagagcacaagtgcaggtggaggcccagctgtccagtgcgcgcagggacgagcaccggctgctcnggcagaagcagaccctggagaagcagcacagcctgcttcagctacacagcgagcagctgcagaccctgtatgagcagaaaacccacgagcttgaggaggtggcccagaagctccaggagctggccgatgcctcggaaaacctcctcactgagaacacgtggctcaagatcttggtggcgaccatggaacggaagctggagggcaaggatggagccgaaaacctcactccccacaaagaggcaggctctggccacccaaacccttcgggtgtcccccggctacctggcggcagccccccgccttccaacagcagctccacgctggcgtctgaaaggagcaatgagaacaggacagactaacttttacaatgacatgaagaaatcagagatggaaactgtactttgggaatata

SEQ ID NO: 4394 - DNA, 464 bp, Canis familiaris
ctaatatatattggtaaacaacctggtcagccttttaaagtagaaatgaaaatgataaaatgtgacaagattcaaagtaaaacaatttaagtgtacatctaaaagtttataattcttatgcagataaggtactacctgtcttatatgtgaaatataattattgtttaaaatgagcaaatataaggtactttttaacagtgaattaacaaatcttggcatattatgtatttctaacctgatttctcatcttttcatcaatttctgaagccttctgagtaatgtttttatgaaaaataaataacaaaattgagtggaatatttaaatatgtatcactgcatttgttactccttaaaatgctgatggaagcttttctatttactgtgagtgtcatggtactattattctggtcactatcttattttgattttatttattttaattatttttttaagttgaagaattg

SEQ ID NO: 4395 - DNA, 561 bp, Canis familiaris
aagaatgatgggcactaccgtggagaccccaactggtttatgaagaaagcccaggagcataagagggaattcacggagagccagctgcaggagggaaagcacgtcattggcctacagatgggcagcaacaggggggcctcccaggctggcatgacgggctacggacgaccccggcagatcatcagttagagggagggggccaggcccccgccctgcccctccccagctcgtcggccgcagccatcctgcctcgcctgcctcacccacacctgtgtgttccttcagccccggccaagcttcgaggctccgtcactgagcaaaggtgaccgcacttgggcagctctccccccacccctcagcctcagcccaacttcttgccccaaagcaccgctcctcctcccagcccccttaccgtttcccggtctttccccatctgggccaggcagcggggccatgggctgggggggcctgggcaggggcaagtccactatcctccttggcagcagatgcccttgaaggaaacccagcccaacctccccccattttttttgctggaatatt

SEQ ID NO: 4396 - DNA, 634 bp, Canis familiaris
  misc_feature (1)..(634): n = a or c or g or t
gtggtatagnttccatgatatgctcaaatatgatatnnncannnaatttcattccatnnaacattnnnnaatgtgcactgaaataaatgtaaaacatttagaatagcttgtgttatttatgttgggggaaaatgcactgaatttattagacaaacttaggagcgcttaacttccttacacaggacaggtgaaaatgacatttgggctgttctatactatgaaccatttgtaaatgtcttacccttgatgtaaatatctcaaacaagatagaacgtttttaaacttcaagtagccctaaacaggagattgagaactgcatctgattcacagagggtagctggcttttaacctcttctgaacgtttgatgatctaaatcgtagggtgcatattaaaaatactatgttgatctaaaaagaaactggaaaaaaacaactggagttatagatacctgtcattagatacccaaaagccagtatttgggggacatctataaaatggggcttgactataaaatctttattttaataactcttccccctgtnnnnntactgttaatggtttgtggtacgtcattctctagaatattaagtggaantnnatgctccggaagtnnnngctccctacttttcatgt

SEQ ID NO: 4397 - DNA, 566 bp, Canis familiaris
  misc_feature (1)..(566): n = a or c or g or t
gagaagggcccagcgaggcgaggncgggaacatcccggatgccggggggccgactgggcagaggtcccgcagggccgcagggtattcctggggtccggccacgacctcccaaacagcagatagaatcggactctcacgtccaggaagcacccccttgaaaacgaccaaaaccaaggacttccggggcttttagagtccctggagtcccccaccccaccccaccctgagacgtttctggcatgtggagccaaatgctgcgtccttgttcattccaacaggcaaagcaggagcgatgagctgaaagttgtaaagaataaatatatttatctctatttattttttcaataactgtgacctcccgcactgtgaatgctctgtgatatgacgctcttagtttaataaaactgtcattaaatttgaatgagttgatattcatggttactaaaccctggcatgagttcatttttattgtgaagaaaaatctagagtcaatatgaactaaatctttataagaaatctagcagtcagtattgtgatgcaatatatcagaatctgtacancgtcaa

SEQ ID NO: 4398 - DNA, 686 bp, Canis familiaris
  misc_feature (1)..(686): n = a or c or g or t
gtttannattattaaatcacnncaacataaggaaaaatgtcaaggtgttagaattggctttctggtgggaagaaaatcccacnttaaaaatcnttaaaaatctgaaaacaaaagtcttgtaattgcactgaaaagaataccatagatgtctgtgagtttgatgaattttcaaattatgattgtgtcggtnnnnctgaaatgaaaccagaaatcagctgttacttttgnngcacattncngncttgttaccttcagagnagacaatttttatccatttccttttgaanngagtcatttcctagnnctnngattggaaagcacacagaggccctgcatgaaccaccctccataaagagggatcatnnncagccnntgntgcaggannccgnnaggagcagtttgcttacccccagcttccagaacnncatttgaaaatgtaaatacatagctttttatgtaatatatggtgacttcagatttttctgtacagtattttgaatgtgaaataattgtcaggacgaaatatctctttaacaaaaacatttgcagtattttatattaagttttannaagtgatacatgtcaattaaaaannncnaaaccattagaattcatttaacgttgnataaaagnnnctgttaaaacatannaaggntatttnnntannnnaaagtttgtgannntgn

SEQ ID NO: 4399 - DNA, 505 bp, Canis familiaris
  misc_feature (1)..(505): n = a or c or g or t
ctgaaaaaccccttcttcagatacacnggnncgacgcnnnnncccccacccggctcccactacacgtccccctccgagaacatgtggaacacgnnnagcacctacaacctcagcagcgggatggccgtggcggggatgccgaccgcctacgacctgagcagtgttatcgccggcggctccagcgtgggccacaacaacctgattcctttagccaacacggggattgtcaatcacacccactcccggatgggctccataatgagcacggggattgtccaagggtcctccggcgcccagggcagcagcggcggcggctccagcgcccactacgcagtcaacagccagttcaccatgggcggccctgccatctccatggcctcccccatgtccatcccgaccaacaccatgcactatgggagctaggccccgccggcgtggaacagactgacagcaccaggaaaccaaatgaagaccctgcccacccccccctgcctgggcggctttc

SEQ ID NO: 4400 - DNA, 565 bp, Canis familiaris
  misc_feature (1)..(565): n = a or c or g or t
tgcagnnacatgccccccagtcctcaccctgcccccctggggtcacactcaaagccgctgccctcatcgtgtctccttgggtagagcggggccccacagcaccacccccactcgtccacaccgggtccctgtctgcagatccccctggggcctgggagggtggctggccctgggtggcctcggggcaccagctgggcccttgaggcagttcctggtcccaacctttcctggagcaagtaggggaggactcaggcctggttggtggagacaggcccccgagggacggggctgcgaggcgcccccaggggtgcttccatccttgtgtcagctgcacgtgctgcgaacgtcccgagaaactggccgccgggagcacgtgggggtcggtctacccctcagtacacactggagctgcttatccctcaggggtccccatacccccagcaggtgcctggccgcctcctggtgcttggacgccccctgcggtcggtaccgctgacacaggactcaccttcgtgccttgccatgccccaggcccgccgtggcgctgtggggctctcggtgcccc

SEQ ID NO: 4401 - DNA, 578 bp, Canis familiaris
ccagctggccctgtggatgggatcctctctgacctcttctagccatccctggggaggggggagatgggggcacatataggacagacactggataaggcctattggagcacctgggccccattggacaacactggttcctagagagaaggctgtggctcacctagcctctctctttccatcgcacactggatcccattggctgagaatctgaggaatgaggacaagaaagggagaaacatgttcccttgtgctaactcctggaattgtccttgtctttggcttctccctccaacatcctctaaaacactggacctaggggtgatccctgtcccctacccctagccatccccacttcccacctgctgtgttgtagctagaacttctctaagcctgtatgtttctgtggattaaatactggggttagggggaaagagggagcaatggcctgcagccttggggttggacatctctgttgtagctgccatattggtttttctatactcacttggggtttgtacatttttggggggagagacacagatttttacactaatatatggttctagctcaatgcaatt

SEQ ID NO: 4402 - DNA, 488 bp, Canis familiaris
  misc_feature (1)..(488): n = a or c or g or t
gatccacccatcatacttcaagaacagaanncagtgnnngnctctgtttatncagtgttgtcttccatctatgcatcacaggctcaacaggagtatctaaagatagaagaagatcttcctctaattgacagcctgattcgtgtcttacaaaacgtggaacattgtcagaagaaaccagagaactcggccgactctaacacggaagaaacgaaaaagtctgacttgacccaagatgatttccacttgaaaatcttaaaggatatttcgtgtgaatttctttctaatatttttcaggttttaacaaaggagactgtggctcggggactaaaggaaggccagttaagcaaacagaaatgttcctgtgcatttcaaaatcttcttcctttttatagtccagtgatagaagattttctcaaaattctacatgaagttgataagactcttgctgatgacctggaagaaagcttcccaaatttgaaggttcagac

SEQ ID NO: 4403 - DNA, 680 bp, Canis familiaris
  misc_feature (1)..(680): n = a or c or g or t
gtcccctccacccctccgcnnnctgcccccaaacccttcctgggcccccatggggtacagctcttacacctcggctggncagctgctctatgactcctgggaccagnnnnggcggggcaccgagggctctgagcctccttctgccctggtgccccggggctcccggcccgaggcccgggagcactgttctccacaggcccacaggcggagcctccccagccatgcgtacagccagctcaaccgcagcccccacccatccaccggccacttgggctacagctcccgggatccccacgaggttcggcgccgagcggctgaatgggcagaggccctacccgctcggcaccccctaacagcctctgcctccctcactatattgggtgagacctcataccaacgggccccagcgcccagctcggccctggtcccccactcttcccagcccctgtctgccgaccaggctcccgagcccccccaagcccagcccaccttcatgccgctcagcaggaccccaggcggcaatgcaggctaccaggtgtatgacagcctggagctgaagcgacaggtgcaagagagccgagcgagggccagctctctgcctccaccttccacctcggcctccaggccctccctgcacaggagccggaccgggaagcttcactgaccagcggggaacgcgg

SEQ ID NO: 4404 - DNA, 513 bp, Canis familiaris
  misc_feature (1)..(513): n = a or c or g or t
gaagaattcggagagtactacattgggtcatccctgcctggaaccacctagggagggattccctcgaactttactcgatattcgtattttacctgnncagcgcttggatccctccctcagctgctccaccggctcacctcccacagaccccagaaacggaagtcactgttacgcacatccggccactcatggggnnncggctggggtcccaggagtatgactcttgtggttccccctctgttataatgaaaaaatnnagatacgtagcagctgtcatgaactgtgaagaggctaagatttttatccttcttgcaagctaacaagttagcctgtcacttcttggatgctggcaaaaagcatgaggctcttggttgtttacttattgggaactagagtcaactgaaagacaaaactgaatggcctagctttcatccagcgaattagaggacttaatctcagatcctnnaaaagaaggtagaatgaactacagaagaaaaagccaggttagaatcc

SEQ ID NO: 4405 - DNA, 588 bp, Canis familiaris
  misc_feature (1)..(588): n = a or c or g or t
cgctcacctgccctcngcntcctacccctggnnagcacctcctaccccacgtcctctgcctgcgnntctgacaggggcacgttnnnnntctcnntagcagcctgggccacaggctccgggaggggcctccacgggccccacgagaacactggagactgggcttccttcctgggcgtgtggtgccagttctggctggacagacagcccaaggagcctcatctggggagcagacagccagcacctgggctctaggcctgacccgctttctgtcctggaaaaggcaactcctcaggggagaagaaagagcctggagcctccatctcaacctggagcttgtgtctgctctggaggctctgatgtgtctgtgggctccggtcacccagcaggtctcaagctccttccaggagagggaggcacaggtttgcaggcggtgagttcctctcactcggggcgtgttagaagtcaaagttcacagctgtnnntttccccaccctctagagaagcaagatatttttggggggggggaggtcgacactgtttataagaaactannnnctttatttgttaatnnnnnctgctaggacagga

SEQ ID NO: 4406 - DNA, 431 bp, Canis familiaris
agctgggtgtttgtgggggccaagggcgtgcagaacaagagcccctttgagcaggtacgggtgcagagcctggcacccccacttcccaacccagaccagtaactcggacccctccagggtctgtaaatggcagagctttcacggtggcaagactcacaattaagaaagctttctcccacacacccccaagacgctccatcctgtccccgctccctgccacccagtgccccgattcacactgcacttccttctctcaccagcccctgctgccctctcgtccactgctcctccggagccacacttgtcaagccccatgtgaggggctggggagccccaggcaccatcctcatgcttgggagcctcctagcctggtgacagccatgctgccccctcagccccaccccccacagccgaaccaggcaaataggctg

SEQ ID NO: 4407 - DNA, 525 bp, Canis familiaris
  misc_feature (1)..(525): n = a or c or g or t
aaggacnncattgtacagggttgtttcagtcagcttctgtatgacctccgggccaatgcggtcactgtggggggcgtnnnanccggaatcggggccttnnagctggctgccatgattgtgtccatgtatctgtactgcaatctgaaataagtctgctctgcctccgccactgctgctgccacacacgaactgaggagaggcaccctggcactgccaggtggcagtgattagggtggggacaggatctaacagtgtcacttgggccagagtgggccggccttgttgctctggactgggggccaaataggggatcgcccccttcaagctgtgcctgacttttccttccattggtgggcttggggcctgaagcagccagttctcctgcccaacctccagtctgtccctgaaacgcttgacaccgcctcaggcccaggtgtgctcttgctgatcccagcagcctcctgggggatgagagaaagacaccctatagtacgggcatgtgcaaaaccagcagtcaccaggcgg

SEQ ID NO: 4408 - DNA, 645 bp, Canis familiaris
  misc_feature (1)..(645): n = a or c or g or t
agaacctggccagagagctcgaccaaaggaacattagagtgaactgcctggcancaggactcattaagactagcttcagcaaagtgctttggatggacaaggcaagggaggagagcattaaaaaagtcatgcagataagaaggatgggcaagccagatgactgtgcaggcatcgtgtcattcctgtgctctgaagatgccagctacatcactggggagacagtggtagtgggtggagggacaccatcccacctctgaggacctggagagacctcaccagggcagagattgggctccacacctgagttctcttctagtattcattgactttcctttcccacctctgcctaatatattgctcaccttacaccccgccccaccccccaaatcagttctgctctgtgaaaagatccagccttccctgtggtcaaagtatcctcttgtgaggattccctctgttgctgtacccttggatacaaacttcccctgagagtgtagggcaggcctgctgagaaagctatgtctaccttggcaaaaaccaaccagtatctttttcccttgcatgggggaacttgagggagatgggactgaaggaacccaggtgggaagagcagggtggaaaatcaacaacctgcaaagggagatg

SEQ ID NO: 4409 - DNA, 648 bp, Canis familiaris
  misc_feature (1)..(648): n = a or c or g or t
ccnnnagactgtgcctnnccnctccctggtggggacagtgacactacaaagggnaccatggtcaaaggctccctcggnntctatgaggggagccaagcagctgccttccttttccctggggagaggtangaaggaaccaggccctcacctaggtntggaggggtggagaagaccactgctggccatctgctttcctccaagggctgctgtgtttagggtgtagcaggcaggacgttgcccctaaacctgggtcctaaaagagggtcctagccttgtccttcctaatatgctccctgagagccattcctgtcccttaaacattccagggcagggtgggggtgggtagccctgggggttccctccctcttgtgcaccattaggaccttgctgctgctattgcacttcaccaggggctggctctggcctcagtaccctcagtctcctctccccccattccggtgtcctaggggggtggggtcagccgctgctctgtacagaactacaggaactgatgtgtatataattatttaaagtgggatacgttcccctagtcctgtaatttcccttaattcctccttccaaccttactccctagttgcggtgttgaactgggctgggtagggtcgctctnncttgggggaggctagg

SEQ ID NO: 4410 - DNA, 614 bp, Canis familiaris
  misc_feature (1)..(614): n = a or c or g or t
gaaaagcgatcatttccctgttgagcaagttccgactgggattccatgaagttcacgtncttcccgacatcaaccagaagccacgggctgagcacaccaagcgttttgaggacatgattgcacccttccgcctgaatgacggtttcaaggacgaggccactgttgcagagatgaggcgggactgtccctggaagatctcagatgaggagattaataagaacagagtcaagtcccttcggcaagtgaggctgaatgagattctactggattcctcccgggatgctgctctggtggtcattaccttgcctatagggaggaaggggaagtgcccgagctcgctgtacatggcctggctggagacgctgtcccaagacctcagaccgccggtcatcctgatccgaggaaaccaggaaaacgtgctcaccttttactgccagtaattccaggctaggatacccaaagctgagggtgcctgggacatccacccatccgtggggacaagatacatgtcctgttgtgcttaagcatctgatgatctgactgaagaagctgacagatttccaaactttggctggaccccactcccagtggacctgtcctctgggctttgtttg

SEQ ID NO: 4411 - DNA, 580 bp, Canis familiaris
  misc_feature (1)..(580): n = a or c or g or t
gatggggggcnngcccctttatatcagctttgacatcgatgnnnnngatcctgcctacgccccaggtacannaacacctgaaattgcggggctcaccccgagtcaggggctggaaatcatccggggttgtcaaggcctgaacgtggtgggttgtgaccttgtggaagtttcaccgccctacgatccttttggaaacacggccctcctggctgctaacctgctgtttgagatgctgtgtgctctccccaaagtgacagtcgtnngaacctcgggctcttcgagatacaacaggctgtgttgatgacagttctcaaggatttatgcgcaagctgagtcctaggcaactctgagtactcaggagtttatgccagtacaactttctgctgagaaatgtccctagaggctgtaaaatcagggcgttcagtagaattctaatccaacggctaatatttctgtggggtttgagtcaactataaacagagaagcacttgtgctgttttgatgagatggtggaggattgggcggggcgggggtgggggggcagggagccaaggagcnnnnggttcacgaagatgatcta

SEQ ID NO: 4412 - DNA, 574 bp, Canis familiaris
  misc_feature (1)..(574): n = a or c or g or t
atcatcgtcctttttactggaattctgttcagaatcnnaagaaagaggcaggcttcaagaggagccatgggtgactacgtgctggncgaatatgaagaaaatgaagcacggagtgtctcacagcctgccagggctagaggcagatttccagctcatcagtctgactctgatccatctcacacgccactgcatccagacggttgaactgtgcccaggaaatggaaaaaggagggacatggctcttctgtggtcccagtgttttactgctcagtgagcttgaccaagatggagggcaacagcagaaaataagctcagtcatttcctttcaaagtctctggtgagagaactccaggatgtggatctcactggtctgccaccacccgtctgctctgtctggcatctgtcctaggccccagggtcaggacagtgatcggtggtgccagttagtggttatggtggaccttgaactattttcgctctgctggtgcctccagagtcagaaccctggtggcatttccctccatgaaacagagcaacctctgtcatattaaagatggcaaaatggaagccactg

SEQ ID NO: 4413 - DNA, 513 bp, Canis familiaris
  misc_feature (1)..(513): n = a or c or g or t
acacatgctgatctgtggncagccangcagtacccacttgtcacgccaaatgaagaaagaaatgttatggaagaggcaaaaggctttcagccctcaagatctgcagctcaacaggaacttgatgggaaacctgcttctcctactccagtaattgtcacctcccacacagccaacaaagaagaaaagagtttagtcgaactggaagtagatctggataatttagaattagaagatattgacacaacagacatcaacctggatgaagatattttggatgattgagtgtaatgtttcttgagaaccccactacacagatcattatgatggacaggtatcgatcgccaccctgaccacagtgctttagactcttgagaacctccttagattttatatggaaaggctgtttgtggcccactgggagcacactgctcttctcatcttaggagtcatttatgtgcagcatctaaatcattgtttcctcattaagtaaactaagtgtgggctttgattttt

SEQ ID NO: 4414 - DNA, 563 bp, Canis familiaris
  misc_feature (1)..(563): n = a or c or g or t
ggttgatgagnnataatgcttcctgtagcagaatccagagagaacacgtgctgggctttannnnncacaccaaggaatgagtaggtaatctcagcattgaagccttcatcttggtcagtggcactcaccttcaccaccaaagtgcctgggggcacgnnttctcgaagactgaccttgtacatattttggctgaacactggagggttatcattggcatccaccaccaggattcggatctgagctgtgctgctttgtggtggatccccgctatctaaggctgttagtaccaaatgatgagagctttgtgtttctcggtccagggtcttcttcagtactaattctggatatttgccaccatcgggattgtctttcacctccaaggagaaatactcatttggacttagttggtatttgttcagtgaattcatattaatatcaggatcttctgcagactcaagaattattccagtccctggggtgacagattcactgatttctaagtttatttcacctttatggaattgaggggcatggtcgttaatatcctcaacaaccacaatgat

SEQ ID NO: 4415 - DNA, 644 bp, Canis familiaris
  misc_feature (1)..(635): n = a or c or g or t
gtcagtatnactttgnntcttgatcaggtaaaaagtttcatcatatgatcggncaagttttaatttttatttccctttttttcttctgtatttttaaagaaatctgttatttttttgtgcattaaaaaaaatctaagcagggggacatgcaaaaacaatcatcatccacttggatgtcattttatagattaacactgtgtgcttttgtatggaaaaaatatatataatttaatagtataagtaaaggagatctatattcatttgcactcatgtaaaacaaactttgctctacaaaatgtcaagtttctgtgctttaaaaaaatgcatgtattgcatgtaaaggaaaaccatttgaattaatgtttatcacacctttctctcagtctgtttgtaaactgttgttgtggggtttttttcttgttcttgtttttaaatcacagtagacgtctgtatatcctagattactgagctggtcttgttaatgattccccagaagtggagcttttctttgatttgtcctttccaggagatcacaggaaatcctgccaggtaatgggtgtactatattagagccaatttggagactgaaagtttagggtttgttgaagttcattgtatggctatatttttgtagatatttaaaa

SEQ ID NO: 4416 - DNA, 532 bp, Canis familiaris
  misc_feature (1)..(532): n = a or c or g or t
taaggtcatatacataaaggaaaccatctggtatctggctagatnnagctatgaaaaattcaagtggttccagtcactattgtcaaaggaattatgcttctgatggcagtgagctatgtcaaccttatctagttccatctctgttctttatatgggctgtgcatcgtagttgccattatagacaagtttccttttttctcatctttgtttctgtaaggatttggatttacagacattattgacaccctgacaaactgtcaaaaaaaagaaagatatgtttcttttgtgtataaaagaaatgttgatgttatctttcaattttccacagttgtaatttttattgaatgttttaaaaacaaaaacatggatttatgggtaatgggtaaaatcacatgacttgtgtagtttacgtattaaaattgctaaattttctttgcatgcatttcaaaatccaagtatatgcataatctctgagaaataatggttgtggattataaagacatatgcttttgcttgtnnnntcaactcatat

SEQ ID NO: 4417 - DNA, 584 bp, Canis familiaris
  misc_feature (1)..(584): n = a or c or g or t
agaccccaagcagctggtcaccaacgnntgnctcataaaggaggtnnacatctatactgtcaaggtnnaggacctgaccttcacctcccccttctgcctgcaagtgaagcggaatgactacgtgcacgccctggtggcctacttcaacatcgagttcacccgctgccacaagaggacgggcttctccaccagccctgagtccccgtacacgcactggaagcagaccgtgttctacatggaggactacctgaccgtgaagacgggcgaggaaatttttggcaccattggcatgcggcccaatgccaagaataatcgtgacctggacttcaccatcgatctggacttcaagggccagctgtgtgagctgtcctgctccacggactaccgaatgcgctgaggcggcgcccggcttctcccaccccgcccgggccggccctgcacgggcccaggggctgcggcattcttaggcagtttgggggctcccccttcctctccttccctccctcagaagggggttttaggggcctgggctggggcggggcacatcgtgactgtgtttttcataacttatgtttttatatggt

SEQ ID NO: 4418 - DNA, 564 bp, Canis familiaris
  misc_feature (1)..(564): n = a or c or g or t
cttgggcttttcactaccgcctcccaagtgnnnncggccagatgtnnaannagaattttggtcttactgggtttgatggcagggaaggtnnaaannacacgttgctaatatttttgtccagcaagaaagcaacagaactaaatgccagaagaagacaagctgtttgggctcaaacacacgtgtacacaacacaattcagaaatacccaggaggactcctgcgggcttaatggatggcagtctactgaaacaaaatgtgtatgaagaagaaaatgtcaaacttgagaagcaaattcccttttatttcccaccccaactgcaagaaatggaagatgaaactaccaccagaacaaaagttctttccaaataagtacagtcgtagtactgggttagcggttaactctttcaccctacaaacaaataatctccatcctgtcctgcttgttttctacagcgttggcagcctgagatgacgtttctattatgaggctactaataacgtaaatgggcatcttttaaaacttctcgcagctcaagctagtgaaaccttgtacttctattattg

SEQ ID NO: 4419 - DNA, 607 bp, Canis familiaris
  misc_feature (1)..(607): n = a or c or g or t
cttccagaagatactgtagttcaagaccatgttcccctacctaccactgaagagctcaaagctgtccgcgtttccacagaagccaatagaagtatcgttccagtatctcggggtcagagacagaagagcagtgatgaatcatgcnnagtnntattatttgctggtgattatactatcgcaaatgccagaaaactaattgatgagatggttggtaaaggctttttcctagttcagacaaaggaagtgtcaatgaaagctgaggatgctcaaagggtttttggggaaaaagcacctgacttccttcctcttctgaacaaaggtcctgttattgccttggagtttaacggagatggagctgtagaaggatgccaacttattgtcagtgagatattcaatgggaccaagatgtttgtatcagaaagcaaggagacagcatctggagatgtagacagcttctacaactttgctgacatacagatgggaatatgaagtgcaatgtggaaccaaggacttggtttatacaaatggaccttatttttaaattactaccaaattttccagccatctgtacccaacctctccctttcctagcccataaatcagaagt

SEQ ID NO: 4420 - DNA, 675 bp, Canis familiaris
  misc_feature (1)..(675): n = a or c or g or t
cccagctgtataatgaaaacagagatatcagggaacagagnctgagnnnnctggctcanctgaatcgtatttccagaggtaagaagtaatagtnnaaatatgaaaatttcttatttcaacaaagcntagtcacaaacagttcccccattgatgagaaaaactaaaacaacaaaacagagaatgtcctaaatctgaaagcaagagggctccatctctaagactcagatttcatagccactctagatttttactccaaagggatagcttgattgcagaaataatagccctttcagtctgcaaatttgataactatgtaagagacatcaacacctagattcacagatgatcttgagatgcctaacctttcctctccctaccctcatcctatggataactggagtcaacagcagctggaagaaaatgtcaaggacttggatcaagaataagtccaaatgtcgaatgtcgtcgttgcagactattcatcagctcttcagcatgtgttcattttcattgaaggataaaagtttagaaatctcagataatagagtttattttataacattctgttgcctgtttttttttttttgacaaatcaaaattacaaagtttttgttctccagctaacagcaggaaactcaaacaatatgtccactgtatttatatcccagagtgaca

SEQ ID NO: 4421 - DNA, 514 bp, Canis familiaris
  misc_feature (1)..(514): n = a or c or g or t
caagtgcatgcctgnnagnnatactacagcnngaagctcctagactcnnggnncaccagcacacaggagaagangcgtaaatgaagcctgcctgatggactcttctgtggggtgaagcctgggcctcccaccgaaaagagtgagaaggtagannagctgttgtgaaattgttggtgattttggcagctagtgcaaactaggcccacattctggaaagcccctcctattgacatcagctgaagtggcaaaactgtatttaatttattcctggttggctggaactgggtgatcaacaactataaaacaaacttcagctggttgaacttaaggcccttcagggtttttctttaagactgagtgtcatccttgcctcttggtcattctctccacttttgtccattaccccttaggcatcaagaccgaaggagatagggaataaatcaaattctactttaatctgtaggtggtggggcaggaaacatttgggaggctccccctgcagtctgttgtctcc

SEQ ID NO: 4422 - DNA, 661 bp, Canis familiaris
  misc_feature (1)..(661): n = a or c or g or t
catccacaaggtgcacctggncangagcagcggctctgccctgacggtgtggggcactggaaagccacnnaggcagttcatctactcactggacctggcccggctcttcatctgggtcctacgggagtacaatgaagtggagcccatcatcctgtcaggcgaggaggatgaggtctctatccaggaggcggccgaagccgtggtggaggccatggacttccatggggaggtcacttttgataccaccaagtcagatggacagtttaagaaaacggccagtaacggcaagcttcggacctacctgcctgacttccggttcacacccttcaagcaggctgtgaaggagacctgtgcctggttcacccacaactacgaacaggcccggaagtgaggcaggcttcccgaagccccagaagcagcaccctcagactctgcgggagtggagggcactgcctggcaacttgggcccatgttctactccttggccagggcggctctgggcatctgtgcactgggcccaccgttcatgtctgtcctcagggaaaccaaggcctggccaggcccagcaccttgctccccaaaccagtcccggggtcctgagcgtggcccctcctgatcctgttctcccattnnnnggatctaataaagtccactttcccan

SEQ ID NO: 4423 - DNA, 473 bp, Canis familiaris
  misc_feature (1)..(473): n = a or c or g or t
gcatagagaatcagtctnnggannagtccctccnnnagcattcctcagaacagatccaggccatcagggaagaagaggaggagaaagggaagccgagaggagaggagatcccgaccccacagcaaaaccagtgacaatggatacaatgagctgtgtttcctaacagagtgacttgtcacagactcttttcaagccagcacaacacttagacacaacactgtagaaatacgagaagatgggcaaacagctattgcattttgggaatcttcgcattttatgtgtttatttttacagtgaggtacattgttaaaaactcttgctcagagaagctttcacatttgcaacaccagcttctaaggatttttttaaggaagaaatatatatgtgtgtgtgtatataagctcgcacgtagatacatgtaaaacatattcacacatatacacgcacacacacatgcacactgaaagccaggg

SEQ ID NO: 4424 - DNA, 600 bp, Canis familiaris
  misc_feature (1)..(600): n = a or c or g or t
aacacattcaccgactngagagaaagtgggctgaggaggaaaagcagtgcgtngaaatnnagannnnncttcccaaggtgcacaagagactgaccatcacctgtcagatccgcaacctctacaagaagatggccgaggacctgtgcagagaactgcagagaaccaccttctcccatgagcaggaggacctcctgtggcagaggagggcttgggagagccagcgggccgctctgtcagcggagagagagctccacgagctgaggagacaaagccaccagctcaggcagaggcttgcccacatctccagggccagggtccagcctgtcccatggggacctcgtgcacctgctgctgctcctgcagcccccagacgcccacgagggctccagggccccctgcgtccccaggtgccccagcagagagcaggggagcgcctgcaggtctgacccggcttcccagcaactgggccctggacgcccacctccaggacacaacagctcccgtgctccccctaccccaagccatgcctagtgctcttttaggttagctcaacccagttatttattagggaatgctatacagcttttagtgccattttct

SEQ ID NO: 4425 - DNA, 582 bp, Canis familiaris
  misc_feature (1)..(582): n = a or c or g or t
atgtatagatcancntccttcccctatcatttttggtttatttnnatttnnataaattcttcctttgactcctcttctgtctacctttggggatagatttttctgtttgtttcttctgttttgtgttaagcatcattttctgacttacatgttggtaagggaaggaaaagtgtaagggaaagagagagtgaaagactttgatgtatgcaatcaaccgtgatgctcaagcccattatactatcttgttattatatttgctggtgcacaattcttgcatagaaaagaaccaaaggtatgttttgttggcaggcagtttggagattgtggttttaaccaacacattgaatgtataatgatcatttgagaggacacagttaaaagacctgatgctcccacttgtaactgtttggtactatggcgctccttccttgtgtacatttctcttaaaagtgatattatatctgtttgtatgagaaacccagtaaccaagaaaaatgactgcatgttcctaactatgacacagtaaggaaaatgcacaatgtttttacttttcaaannnnnattcaaagtagttaagatgaa

SEQ ID NO: 4426 - DNA, 613 bp, Canis familiaris
  misc_feature (1)..(613): n = a or c or g or t
ggtatnnagatggtcnacgtnctcccaagatggctcgatacgacaatggaggtggatatagacgaggaggttctagttatggtggtggaggctatggcagcggaggctatggaggtggtggaggctatgttggtggcggaggctacagtggcggtggctatgctggtggctccaactcctatcggggaggctatggcggaggctatagaggagctgtcagtggtggctatagaggtggttctggaggagactatagagggtctagtggaggaggctacagaggttctgggggattccagcgagggggtgtcagagagggctatgggagtggttactttggacaaggaagaggaggtggtggctattaaaacttgttatgtcagtgcctatgcatagacagttaaaaaatgcatgcaacctgttttcccaagttgtttatttgatgccagtaagtaaacccattttccacccattttgtggttcattatagtttaaggaaaccaagcatatagatacattagtggttttgtttatattatgtaaaatatactgattctgaaactaccagtttgtatttttttctttaaggagtaaagatttgcctttaaaatta

SEQ ID NO: 4427 - DNA, 647 bp, Canis familiaris
  misc_feature (1)..(647): n = a or c or g or t
atataatgagatccatannnagtgaaatgtcaaaaaaatcattgtagaatnanngctaaaaatccagattcatactcnnnnnnngttttgtatagtagaatttcgtagttacataaaatgaagattgtcttccttatttccattgcttccacagtagatgaggaaaacaattaaaatcgtttttccacagtgtgtgtatatgtgtgtgtataaaaaagggggaaaaaatacacatacatttttctaatcactcagcacatttattgaccactttggcaaagacactgtggtaggtattgtggaaattacaagggggaatcaagcactggccgggccttgagagagctgaagtccttttcactcacattctagaatgttgccaaatgaaagggagaaagaaatgtataattctgtcaaattttcattctgtattaagaaaagcaaagaattatatttggaattggacatctttggtaggaatgtgttacttttttgtcccccttattttgatagatagaagtggaattaagtgaaagtagtttgtcttttctgttttgtcttcaaattttatattgacttttaatttaatcccattcaattatttaattgttacattgacattaactgctgtatttgatgactttgtt

SEQ ID NO: 4428 - DNA, 597 bp, Canis familiaris
  misc_feature (1)..(597): n = a or c or g or t
ctccatgtggcccccagaggccaaactaagactcgtgcttnnccattgatgaggaaggttacacaacagctcagatagcacgtatgtgggccttggaatcagatggacctgggttcaaatccctcctgcatctttactggctgcatgcccctgagcaagtcacttaacctcgtatgtggttccctacctattaagtgggagtacataggtgaggaaacaggcaaagagtaagcaaaccatcaaaaccaatctgtaaagaagtggaactnnntagttataaaatctttcagcaggaaaaaaatttttagcttagaaatgacaatagaaatcacaaaggaagtcagtggatgagccgactatgtaaaaataaacttaatcagctatcaaggcaagaatgaaaagcaagcatgactggagaaaagatttgtagcaatatgacaggctaatgtttttgtcacatggaaatcccacataaattgttaacaataaaagtttatgaccccctgggaaatgaacaaggggtactggaaggggaggtgggcgggggatggagtgactgggtgatgggcactgaggggggcacttgacaggatgagc

SEQ ID NO: 4429 - DNA, 707 bp, Canis familiaris
  misc_feature (1)..(707): n = a or c or g or t
gtgacatgtgtnnnctgcaggtnctccatccannnnnnnnngcccagagatcacaacatatannatnntgcattgaggncnatgagaaggacatnnagctctcatttgctgtccaacgcagtaannacatggtgtgtgggatctgcatnnaggtggtctatgagaaagccaaccccagtgagcgtcgctttgggattctctccaactgcaaccacacttactgtctcaagtgtattcgcaagtggaggagtgctaagcaatttgagagcaagatcataaagtgagactcctccccaatcttcgtttgtgctttctattttggggaagaatttagtatcttgtgccaactttcaaccagatggaccgcatttaaatgcatgcattttctcttgaaactggggtactttaattgggatttctttgtatttcagctagcttctaggttagttggtatatctacttttatttgaatgaggaaaccctatgtatcagttagtagaatcttcgtgtttttttctgaggagattgtatttaatggattagccagtttaggctcagtgaacaaacttacctagctctgaatgtatgtttccttgacatattacatttccactttcctattccatccattaagctagccaataatccaccatcctttaaagattgttctcataactgaacaaaaactacataatctaaacagagta

SEQ ID NO: 4430 - DNA, 672 bp, Canis familiaris
  misc_feature (1)..(672): n = a or c or g or t
cacagatgctgcgcangagtgtcgagacacgggactggctcagtaccctnnagccccggaatgtgcgtgctgtcatgangcgggtggtnnannacacgacggctattgacgtgcaggtgnnnnntctgtatgaagagggtgtccgcaaggctcagagcagtgactccagcaaaaggaccttctctgtgtatagcagctctcgccagcagggccgctatgcacccagctatacacccagtgccccaatggacactaatctcttgagcaacatccagaaactgttctctgaacgtattgatgtgttcagccccgtggagttcaacaaggtctcggtgctgactggcatcatcaagatcagcctgaagacgctgctggagtgtgtgcggttgcgcacctttggtcgcttcggcttgcagcaggtgcaggtggactgtcacttcctgcagctctacctgtggcgcttcgtggcggacgaggagcttgtgcacctgctgttggatgaagtggtggcctcagctgccctgcgctgcccagacccagtgcccatggaacccagtgttgtcgaggtcatctgcgagcgtggctaggccagccgctgccatgcacgcacccgcttgcgccgttggtcgccccagcctccccatcccctggtctcccgcccgctggcctttc

SEQ ID NO: 4431 - DNA, 266 bp, Canis familiaris
  misc_feature (1)..(257): n = a or c or g or t
ttttagtctaatacnnnnnnnannnnnnttnnntccnnnaatatattcccagtaaatacatatagaaagagtannnggactcaagtctagaaaatcctaattgtttatgttttaagaaacgaaaaaaaaactacattatttttgtaaagtatttattgagtcattgagtcttgtgcatcnnnnnnnnntgtgnnnnnnnctggttctgtagtgtggaacttaggacaaataaagagtttgttgttatnnaatctttacttgcaaaa

SEQ ID NO: 4432 - DNA, 586 bp, Canis familiaris
  misc_feature (1)..(586): n = a or c or g or t
cccagagccntgcgtgctcactcacgtctctgtcctgtagggcancggctgcatgatcgtgatgtcacacggtacagtgtcccacccacagctccttcgccacctcccctcatgcctcaccggatctcaggagagaggggcgcacgtttcgtgaactgttaccaaaaaagagaagtcagtattacgttgttctcagacacttttgtttttgttggtctttctctaggcccccccctcctgggccttctgggaaattataagaggaaaaaaataatggcttggggaaaatcgttgacatcctagatattatcctccctctcaggagaagatggaagctggagttggacacggttaatagaagccagaagcataaaccagtgtggactccaggaggacaactcgggtccttctgtgtctctagcactggctcacccagagggtagagaattcctactcccatttgcacgctttcttgcctccgtgtnnngctccttgtacaatctagacccatcttgtattctgtggcccaaaaaaaatgaacatttattttttcctccataatccaaagggcagaagtatgggggac

SEQ ID NO: 4433 - DNA, 593 bp, Canis familiaris
  misc_feature (1)..(593): n = a or c or g or t
ggatcatggtcacccagcctcttcctcttgtgcaaggacagtatganntagtatttatgatagaatacacatacctgcacagccctgattgaggacatgagctagactngcgacaggcaggagaggtggnnttgtattttcccagcagaaggtctgcagtcncnnnnnacccctcacatgatccagagatacagtggctgctgcccaaagccacattcacccagagtggaggaagtgattttaccatgtgggtctctggaggcctgaattgctgaatagctctgcttcatccacaccatggaaaggtggaggtgtttatagatgcagggattgtttttataccttccctctgttttcattttccaaatacagtctttaatgaacttcatttcttttctccgtaaattcatcttcaacactcttcaaagacacttttgacaacatcactttaaaaacatcaactgtcaggatgcctgggtggctcaacggttgagcatctgcctttggctcaggatgtgatccccgagtcctgggattgagtcccacatcgggcttcctgcatggaacctgattctccgtctgcctgtgtctct

SEQ ID NO: 4434 - DNA, 662 bp, Canis familiaris
  misc_feature (1)..(662): n = a or c or g or t
gcatgctcccagaccccaagaacacgcacatcgtggtgagctggatgatcgcccagactgtgacggncgtggnnggcgtggtctcctaccccttcgacaccgtgcggcggcggatgatgatgcagtccgggcgcaaaggagctgacatcatgtacaaggggaccgtcgactgctggcggaagatcttcaaagatgaagggggcaaagccttcttcaagggcgcgtggtccaacgtcctaaggggcatggggggcgccttcgtgctggttctgtacgacgagctgaagaaagtcatctagacattcctcctccagacacgggggccaagggaatcacgtagaatccttttaactgttacggaccattgatcttcgagaaattccagtgtccttgtcccggccagatcacgtagacagggctggggaaggttccaaagggggctcattgtgatcgatcatcggcaccaggttccatgttttgattccggggggagggcaatcatgacgtcttcgtgggtccacgggctggcagctccgccgctcagaccatagagtccaggtgcttgtgggacccgggttgtgtttaagtatttatttaaaaaaaagaatcatgtctccatttgtacttaagcactgttctcttttgcacagccgaatatttgc

SEQ ID NO: 4435 - DNA, 690 bp, Canis familiaris
  misc_feature (1)..(690): n = a or c or g or t
agagggctctcactctcaggacccannncagctttcagctgctcttcctnnntgggnnnngnnagnctgnnnnncagnnanntcnngcggtnnggcaaaactagtcaattggtctcgggatctgtngaaactgcagtttccccaaagagccaagcactctgtgaaattctgatttatctgtaaaacactataagtgtagcttatatgctccatgaacagtagcattcatcacatattacagaaacaagcaagtggattccaccttagaaatggttcagaaactcacaggnancntnnnctgattgattgaaacaatcatatttaaaatatttagaattaatgttactccaatcagctagcaatctcgagctacaggttataaaccaaaatgttctgttctgtacttaggtctgctcttttatattgctttaaatttttaaagaaattatattgcatggatgtggttatttgtgcatattttttaacaatgctgaatctgtatgaataatgtaaactttgattttttaaaaaaaatcagattttagcttgagcttttgactaatgtacagtaaatgccaaactacttgattagggatgtttttgtaagttaattttataagacttttcaccttttaagtgatgcttcaggttttgtttagctatttggccatggggtggggggttgttacc

SEQ ID NO: 4436 - DNA, 536 bp, Canis familiaris
  misc_feature (1)..(536): n = a or c or g or t
gggannnagtagtaggtnntcagtctaaggatcatagtagatagagggnaggcagggagaccctggtcagactttggtgctgaccnttagccacttactcttgtacaggctgtggaggtcagaaggttacacacccacccagctgcctcagaaggcagccaaccctttatttttgtacaatctactttatggctggcatttgggggaagcttttccccatctccagattttgatgggttccacattcttgctttagttgctgtagagaaggatttgggtgtatctatcgcagatagaggtccagcctttcctagggggagccttcctatttctggaggttcaagtgcctgccctactgccctagacccacacttaagcttctatgtctggttctcactctcctgggccagggttggagatctttggagactgagggtttgtgtgcccacctaactccctagcaagggttatagggtgaggaggttttaaggtagaaggtccagtcactagccattggaatacagagctattctgac

SEQ ID NO: 4437 - DNA, 597 bp, Canis familiaris
  misc_feature (1)..(597): n = a or c or g or t
aaatcccagatccaggaatatgtggactataatgggggtgctggggtccagcacattgctctcaagacccaagacatcatcacagcgattcgccacttgagagacagaggcatggagttcttggctgttccatcaacatactacaaacaacttcgggagaagctcaagtcggccaagattcaagtgaaggagagcattgatgtcctggaggagctgaaaatcctggtagactacgacgagaaaggctacctcctgcagatcttcaccaagcccatgcaggatcggcccacgctcttcttggaagtcattcagcgccacaatcaccagggttttggagccggcaacttcaactcactgttcaaggctttcgaggaggagcaggacctgcggggcaacctcaccgacttggagaccaacgggatgatgccgggcatgtaaggccctgcgggccctgcggagacaccgaggccccgcccgcccgccggcgtacggcgggccacgcccccaagcctggagcacgcccacgcgcaggcctcctcactggccgctctttaggccccgcctacccaccnnnnaccacgcccccatcggctgggc

SEQ ID NO: 4438 - DNA, 619 bp, Canis familiaris
  misc_feature (1)..(619): n = a or c or g or t
caaacaaaaacagaaagcccaagacgaactcagtagncgaccccaggctctccccttaccagatgtggttccagatggggaaacacaccatggtcagaatgggcttcagctcctcaatgggcatgcaccaggggctgggccgcaccttgcagggctccagcaggccaaccggcaccacggactcctgggcggcgccctggcgaacttgtttgttatagttgggtttgcagcctttgcctacacggtcaagtatgtgctgagaagcatagcgcaggagtgagccatatgccgtggccagcagaagtgatcaaaaacgagggacactgggcccaagcttgccatgggctggctggacgtgccgccgagcgcagggtggacctgcctgactcctggggttagctttttaaaaaccttgaaaaggaaaacaaaaccaaagtgtgtaatttggatttagaggagatgcaagatcctcagctccctgacctcgctctggggtctgttggggaccatggagcttgggtgtcgaggaggggcttcacgctttggttttatagcttatctcctgtatcgtcttttggacctgttttagtaaacctgtttttcattttattagatttgg

SEQ ID NO: 4439 - DNA, 612 bp, Canis familiaris
  misc_feature (1)..(612): n = a or c or g or t
aacagggtnncttgatacataatgctgttatgtatatgtgatgaaagctagcacactttgcacatgttctgaatcatttgaacagggaggagagtattttacacaccagacaccagatcctgtagttctgccagctgttttctgaagtcttgctgggagggttgcctttgacactgccttgcttaaggaataatcccaggaagaggtttccaggttccatttaactgttcatccagagaaagactgaatctcacctcagctagtcccacgagtcacacgtgaatttccttaatatgtcccagttgcgaaactcctctgtaacagtgttgggtctgagctgtgtagtttcaagctgccagcaaagccagcttcctcacactctttgatgttcctttaattcagaagtttctcatgttaaatgattgttgaaattgtttcccttttttgtttacccaattagagtgccactgtttttgcagtgttttatattttcagctttaatttaactatataattacttaattttatttttttaaagcttatttggtctaatgataagtatttttcagtacataatgttttactgagctgctttgaatgccatttcaatgt

SEQ ID NO: 4440 - DNA, 621 bp, Canis familiaris
  misc_feature (1)..(621): n = a or c or g or t
attacattttcagaatcaccatcttgggatggtnnngccaggnnnnntgaattctttaatatctggattttcttcaccgttggnnttcagaggcttaatttacaggcatgagatcactggtgacttgtctaataagtgacgtgacacatggttgaagtctgtaagtttagccatgatggactagaaatttctctagtgttttacctcacataagccattggaccactgtgcagtgtggaaaggtgttttcaagtatttggccataggttttcacatcgttgcggttggcattcaataaggaaaacattctttctgattccaatattaaactgtaaataaatcccagatgttcgtaagaacactcagggaaacaaacgtttgttgcctgggattggtcaagaaaggatggtttttgagacttgaaatttcaccattggctttttcatttctttgtatccagcaaaaggaatctcacgttccttggttcctggcagagctctgtggcttcaatctctctttcctgaggggcaaaattgtatttctgacccaataatcaatttggcaactttaatcttgaggttcttcaaattcaaaggagggttaataaagaatgataatnng

SEQ ID NO: 4441 - DNA, 578 bp, Canis familiaris
  misc_feature (1)..(578): n = a or c or g or t
aggaattgnannngctgangagcatcagtcacannnnnnnatgaatcaccctgaagacatttgtcannnnnaaagggagnagcccatcgaccagaggagggggatgtggctgagagttttttgtagctgaactactggatcaggtcctgggagagagtgtcatatagtggggcccaaaggcaccggccacatcgggttggcagcgggaaggtacagcatattggcagaaaccaggactccagtccagggcgataagcaggaacgagccctggggtgctgtccaggggttacttcacgtacgaatgggccatcccgggctccctctccctggactgatgctgtttgccgaagccactggagttcactgtctcacccctcatgctggtgttggggctatggcaccagtcgttctaaagagccctgtattaggggcctaggatgaatggccctcccagttctctgcctcccaggctactctgtcctttaaagaatactcattctacaaatttacaacctcttctggcttcagcctctcagtggcaggcaccagcttcccttggcaaacactatatttttgt

SEQ ID NO: 4442 - DNA, 675 bp, Canis familiaris
  misc_feature (1)..(675): n = a or c or g or t
agcttcagaatgagnnagaaaaaggtgaacgggacaatgcagaactanaggagtttgccaatgccattctccagcagatagcagatcattgccccgatatcnnnnagcaagtggtcaacgcattagaagagtcttcctgaccntgcttcatggggagtggccagcccagcagcctgctatagtaaatccgggagccaagaaagaagagctataaggaacgggcacccagaaacttcttggcacccaacaaacactacaaactgtatcctatcttggttggtccttcaagtgtgattccagcaccctttctacagttgaccgcttaactctgcctttctactttggatattgtctctacactaattttcttgatgtccaggttggtaagtggccagatttccgtgaagaactgccatccagtcatcagcagtggactactgtggaanctggtggttctgcccttaacagagggacatggagcagagagccctttttccttctgtccttgacatgaaaagtaaatctggaatctccttggagttcagcatattgaaagaaacttcccaatggactaagagagctgagtgttctaatattacaataggtgctttctcctaaaagggttaaaaatttaaaaaaaaaatctttaaaannnnnaggggaaaagagaacagn

SEQ ID NO: 4443 - DNA, 595 bp, Canis familiaris
  misc_feature (1)..(595): n = a or c or g or t
tgtactgtgagcctgtgcaaaagaaaacanaggatctgtaagtnngagagtgtgaatgtcagcagttgaatgacttaanncagggagtagagtcactcactagaagccaggtaanctgaatttcacacttggctttgtttctactttgctgtttgacagtaacaaatttcttaatgtctgtatctcttttctataattgcctagccctataactgacttgctatagaaatagagaattctttaaagacaagtagaatgctttctttgctaagcaatcaagaatggaaggtcaatggctattgtgtgtgctatggtctaaatgtttgtatctccccaaaattcatatatagaaatactaatcctaaggtcaggtgatattaggaggtaggacctttgggaggtgattgggttatgagggcagagccctcatgattgggattaatgccttatgaaaaaaggtccccccagggctccatatccccgtctaccatgtgaggacatagcaagaagttggccatctcccacctggatgaggggtcttccccagtcaccagatctgtcagtgactcaattgatcttggacttttcacctttt

SEQ ID NO: 4444 - DNA, 615 bp, Canis familiaris
  misc_feature (1)..(615): n = a or c or g or t
agtcttactgcttcagaagacatnnagcaagaggaactgancgtggcgcggctggggcattgtgntgnnnggtnnacagtggggatcatnntcagccagtggcagggtcagcataagttagatcgctcccaggagagagggcagccgggaccttctttacagtataatttgaaattcctgatgtattttgcttattacttggtttcattctcataataaagagagtgtatactgaccacaggcaggctgatgaaaatcatggtttaatattttacttttcaaacttaatgccaacaaggnntaagttatgtttacaagatgaagaaaacctcaaggttttaaatatttaaaatgcctagaagctagtaatttagtctttgattacctatgtgctaagacttctgccagtttcattaaacaaaccaaatcgaattcttctttcaccattgggtttctgtggccaccttaccttttaaaaccactttatgtagcagtctcagctgtttacatgaaccctagcaaaaaatcagaatcaaatccatctattaatgtttgcataaggatgcaaacaaaaccaggtaagtatggaacaatgtataagtgagatcattacac

SEQ ID NO: 4445 - DNA, 571 bp, Canis familiaris
  misc_feature (1)..(571): n = a or c or g or t
tgggggtactaggtgctgcttttcaccgaggcgctacaaccagcattctcnctgggctgctagtgagnctgctggacatcctctgattccatctgttgccagcaagacctggctggagagtggactctaatagtcctacctggagtccagttggtatgctaccagctccagaagggaagggaatggaacaggcagtgagcctggggtcgcctggggacagttagttgtatgtgttgggtaggagtggaaggcgatgtgtttactaaatgctgccctgccatcctcccaggtagtcaaagtgagctacatcctgcccctccctcatttccatggaaacatggcagcaagggcaagggtacaagagctgccaaattcatccctctcccccactccaccccttttttaacagatttgaaaccatggtctttatagcagaggtgggactgagccacttgtgcccgtgaattcctcccctctggccctccctctccagcaaggggggtttctttagccttggcagtgtactgtggaggcaaggataacacccccgcccccatcacgccgcancnga

SEQ ID NO: 4446 - DNA, 570 bp, Canis familiaris
  misc_feature (1)..(570): n = a or c or g or t
acaagtcgactgcanggcgtnngagctctcggccagacagnntctgacaatagtggcccagaagatgcaaagagacaagccaagaaacagaagacaaggcnnacgtgaggaagaagaggggcaggtgaatctcactcgggataggccacagcacagctgaggggccaccactcgcccttggcatcaagcatgcattcaactgccttcaccagctgtctgccccatgctcctgtcaccgtagctgcctgggcctgccctgcctccctctcccatccagccccttggtgcaatgcaatgaatggaccctcctgtcactctgctgagcacaatttattttctgagttgaagataatttattattattatttttgtcaaagaagtatttaagctgtgctagtggcgtgagaatgtatttcttgatcttcagcattcgtttgcaagaattccaggaaacacaggttttcgatccgctgataaagtgcccatcggatttgcctagtcccttaacttccctctgcgtctcagatccctgctggaaactgcacaacctgtaactactactaggagggt

SEQ ID NO: 4447 - DNA, 597 bp, Canis familiaris
  misc_feature (1)..(597): n = a or c or g or t
atatngagctttcttacgnngtggtggataaggacagcatccgcagtggtnnnccggttgtggtgctggtacagctnnagcgnnaagannaggtcacaggccctgtgatcgcnnntctctttccacagaaacgtgaagagggctggtgggtagtgattggtgatgccaagtccaatagcctcatctcgatcaagaggctgaccctgcagcagaaggccaaggtgaagcttgactttgtagccccagccactggtgcccacaactacactctgtatttcatgagtgatgcttacatgggctgtgaccaggaatacaaattcagcgtggatgtgaaggaagcagagacagacagtgactcagactgagtccagagcacatactcttacaaagaggagagtcgcctctgaattaggagcatgtaccgttttgtggagaccaggtcctttggcatgaggtccagccagtcagtgcagtgctgtcccagcccctcctgctcctctgccctcttactaccttgccatccagatgttggatcctttgctcactggtcccctgtagctgtcaatcatcgactatgtacagcatttttaggcttgt

SEQ ID NO: 4448 - DNA, 154 bp, Canis familiaris
ttccccccatttccccaagtgtctcgggggcctgaagccctgggcattcatttcctctcttgtccaaaataggcgtggtcctaagggtaggacagaggacatttggagacatgggcctttgataggcccacctgggcctttataccatggaccg

SEQ ID NO: 4449 - DNA, 618 bp, Canis familiaris
  misc_feature (1)..(618): n = a or c or g or t
taacatatagnganaggttcacatgcacgcacacccacatgcacacattcgctctccccagtttggagagcctttccctttgtcctttctgaggtcacataaggttagatgaaaagtccaaaaccaagactaggtctttggccacagcagggcctgggccccagccaaagctctctgtcaaccaggctgccaccacatgacatcacaggaaccagcaagcactctgcagaggtactgcctcaagcaacagtgtgacaagcctgcagccagagaccagaaggaagggctaataggatgagcagctgggcactatggtgggcacagatctgggagatgggggtggctggggtcttcccagccagagggaagccagaggtggacaaggctctcagcatctagtctgagggtccctcatcacctgtttcacactgttttgccttctgagcaaattcatccctctccgatgtattagaaccannnnnnaactgcaccaaatctaaaatgaaagtttggagatttgaatgttaggaattaggagcatatctgtgatagtaacagctgctgctgtattcttctaaaaggagcannnnntnggtggagggcaaatnnnnnnaaatn

SEQ ID NO: 4450 - DNA, 530 bp, Canis familiaris
  misc_feature (1)..(530): n = a or c or g or t
gggggatgcagggaaatgagcatggcgnggctctnnaagaaagaaataaaggaatcataccctgatggccagcgccggctccntggttcctgcccagcactggccacgggccagcagtcaggggtttgcagggccaccgagcagggggcatctgggacagggctgccttgaccccactggacggagacaaaggcaagaggcccagagacccatgcgaggaagcagttgtggccgacgcacgcctgtgggacatgctggcactggtccctgggcagctgtagggctggcagggacagggtcctccccggggccctcggtctggacaccgctctgggctgtgagaagtgtgatgtggccacgggccgggccctgtcatggcggctccgggagggcccccggacgaggtcctgggaagccccagtgagccccccagcaggcaggcctggatggccaggcacggggggcatgggtccacactggcctgacacacaccgggaagcaccgggctggcttccaagacctggtgccgg

SEQ ID NO: 4451 - DNA, 499 bp, Canis familiaris
  misc_feature (1)..(499): n = a or c or g or t
tggtaccntnctgagctgcaggcccgggcccgtgtggacgagtacctggcgtggcaacacaccgncgtccagctgcctgctaccaatgtctacctgtgcaagtccctcctgccccatttctcgggtcagcctgtggaccaggagcggctagatcggctgatgggcaagctgagaccagctctgcagcacctggatcaggaggtcctggctgccaagcccttcctggccaccgagcaggtctccctggcagatctgatggcattcacggagctgatgcagcctactgccgttggctgtgacctcttccgagactggccccggctggcagcatggcgagcccgagtggaggcagctctgggccctgagctcgtccaggaggcccacaagcttgtgctacagcctcgggacccccgagacgcccagcgtgaccccaagctggcccaggagctggtgcatcggctgctggagaggctcggctgagagggatgcgacaacgggg

SEQ ID NO: 4452 - DNA, 606 bp, Canis familiaris
  misc_feature (1)..(606): n = a or c or g or t
ctctgactttcannctctacgtgtaagattcagaatcactgtgttgnnaaaaaaaaaaaatnannnctcagtgtgtttaacgtgacatcactttgttggtaagatttcaggaatgactcttattaacaaaatatcttagtttctggtaaaactataaaaagaggtgagtccctaaattataaatgagaaaactgaggcataaggaaaaaatggacaaggctaaactattttgcaaagtagtaagataaaactaatatttatataacatatgatgtataacacattagtatttacagaacatgacctattcatctacctgaaatttataattgtttatattaatattcttttggagtaagagcagttatttatcacctcttttggtgtaattctgtgcttttagtctttttccttcatgagtatgtgtgatatatataaaagatagaaaataaagtatggtataaatcaagagcttagggacgcctgggtggctcagtggttgagcatctgccttcggctcagggcgtgatcccggatttccgggatcgagtcccacatggggctccctgcaggagcctgcctctccctctnnnnntctctgcctct

SEQ ID NO: 4453 - DNA, 587 bp, Canis familiaris
  misc_feature (1)..(587): n = a or c or g or t
cctgctttcatcacatctcaccccacatgctgttgacttcctgaaggctgtnnacatctgtgctgagatcctgaggtgcttnnacaagaggaaggtctcctggctggtgctctttcagttgacagacactgatggtggtctggggcaagtcctcctccgcctggccccagatccatacatcaggctgctaccgtttgccttctacagccttctctcctactttgatgaagacgccttcatcagggaagatgccttcctgcgcgttgctgtcgacatgtacctaaagctgatctgtctcttcgtgactggggagacaagtgcagtctcagctctagctggcaggagccaggagctccagggccagggtgaccctgtaggcttgataataaaagctcgtcactttctgctgcaatcaatacctaggtgcccagaaaagagctttgcaaacatggcagagctgctggccactagtggacattgtgacccagaggtgagtgcagccctcctgagcagacatcaagcagtatccgacgacgacctctaccaggagccccatctcttctgactggaccctgcgcagtgcacag

SEQ ID NO: 4454 - DNA, 469 bp, Canis familiaris
  misc_feature (1)..(469): n = a or c or g or t
agtatgctgctgcttcacttctgtcctccaattaccatgcaaaatgnctcttgtggcccatnntnnnnnnnnncatactgnnaagggagnnctgggaaatgtagcctagtcaaggtgacacattacanngccaccctgccatgaatcagctcccaagggtctcactgctcacctgaggataacttgataaagctacgttgctgaaaatgcaaagctgaagaccatggatttcatggtgaccccagcaagtacagagatactgtcaagcccacccagaaaaaactggctggtctcggctatttttgtgtcattcattcaagtattgagaacctggcctatggtaggcactgtacttgatactgggatacaggaatgaaaaagaatagtccatgcaattttattaaatacatcagtatgtattacaagtggtgaatggatatccaactttatcatggaatttaatggtgaa

SEQ ID NO: 4455 - DNA, 606 bp, Canis familiaris
  misc_feature (1)..(606): n = a or c or g or t
ctccaacgccccccagtaccccannnctagggaaacagaaccccagcctaccagcttctcagacccagccggtgagtaaccctgagactgcacagccacatgccgggaccttaccaagaccgggaccagtcccaaagccgaggaaccggcccagcgtgcctccaccgccccatcctcccggtgcccactcagctggggacagcgccctcgccaacgcagctcccaccgcttccaaaatagtgacagatgctctcacaggtggggaaggtccccaggactaagacgccagttctaaactttcagagccacttcgcagcacctttcctgacatgcattcagactcagcaagcaaagacctgcccggacgcattctgttggacatagacaatgatacagaaagcaccgccctgtgaagaaagccgcctcacccccgccccgaccccctccaccctggtgagcggaaccggggcaggtgcacacttctctctgcagaccaaacagtgaagagctttcagtgaagggaaaagaaggcccggcatgcaggccttcgcctccccacagcccgaggagaaggtggaggctgacactttaagctgaatgacctgt

SEQ ID NO: 4456 - DNA, 723 bp, Canis familiaris
  misc_feature (1)..(723): n = a or c or g or t
aaaatgatgaaagatnnncaaataccagataatccaccaggaaggcttttgtttaggaatttgtttcaagaggaacaagggatgagggagaaaatcagttttatccatcagagtcagtaatacgaagttgcctattagggtaaaagaaaaatgtgaagacttttgctataccaagagcatgagttcagatggcttaggggagtctgacaccagcccaagaacagggagatttgagcccattgtaagtatcattgaaaacaaacagcgtgcggtcagcatgtcacaggaaatggacgaaggacaacaagaaggggatcagaagattttgttgaccttcatgggtttacagcctctgtctctaaacaaagtatggaaacagtagagcttttattttgcgtttgtttttgtttttgttttgttttgtttgttttgttcccccacccccaccccagccccactaaatagaaatgagggttcttagtctgtttctggcgatctgttaatttattagggtagttgtcttccgttggctttccggtaggcatagtaaattaagttgaagagcacctccgtatgctacaacttgattacatctttttttctagctattttgcattttttcttttaccatgtttcagtttctgcatgtagaattaaataagacacaaaacttgtaaagttgtaacatttcacatggaaatgctgcccgatcttcaccagctt

SEQ ID NO: 4457 - DNA, 521 bp, Canis familiaris
  misc_feature (1)..(521): n = a or c or g or t
gctgatggcncactacgtgcagacgnnatgctgtgccnnggccatccaacatctgaactatctcagtcaacgaccagatgaggaagagcatatggtcctgggggtcaaatgaagaaatgggggctgcaaaaagaacattccccaggacacagtaggtgtaggctatgattcagacccatttcctgacaccatagcccctcactcactctcttcactgggctctgtcaccctcctgcacttacaaagctatccatagtgcacctcttcctatattcctttcacaattaatgtcaactcatccttatattgccatcaccatatttatcaatgccatgcacatttggctctcaacattataatcactgactgatgcaggaaggggagactgcaggagaacctgtccagataactcattttaccgctgaggacaccaaaggccaaagaggataaattctgtgcacagaaatgagacttgagtcgcaggctggtctggctctcaaaccnnnnnntctccccagcct

SEQ ID NO: 4458 - DNA, 651 bp, Canis familiaris
  misc_feature (1)..(651): n = a or c or g or t
aggctctgcttgccctacatccctcagctgacagatgaagatcgcttatccaagaggaaaagcattggagaaaccatttccctgcaggtnnaggtggaatctaggaacagccccgagaaggaggaacgagtgcctgccgaggagatcacctatgagaccctgaagaaggccatcgtggacagcgtggctgttgaggagcaggaacgtgaacggcggcgacaggtggtggagaaattccagaaggcacccttcgaggagattgcagcacactgtggggcccgggcatcactgctgcagagcaaactcaaccagatctttgaaatcaccatccggccgcccccaagcccatcaggcaccatcaccgcagcctatggccagcctcagaaccactccatccccgtctacgagatgaagtttcccgatctgtgtgtatactgaattccagaagacagagctcctcggaggggtggggtctgagggaagcacttgccctcacaacccacccctgtggcatggaaatggaactgggacctcagaggaaaagcactgtggttggcatcatcttctcggctaagcaaggtggagggccctccctcaggccacctctcggccctcccacttcctccttgtcctccccgagggagacaggcc

SEQ ID NO: 4459 - DNA, 637 bp, Canis familiaris
  misc_feature (1)..(637): n = a or c or g or t
gtgaaccttcgagagctgtannngagccacancggcatcgaggtcatcgagggcctggagaacaatgtaagacgtnngctnntctgtncggggcgatacggggtaggcctggnctgaaggagactcgtggnntctaggggtttatggtagagaccttcccgctcnnnaaacagannngtccccacgctgggatgcgcgtgacccacatacagtctccccacgcccctcggacgagcgttgggccggtgctccccactgcagccagcgcccgcaccgacctcccgacctcccgtccagggcagggtgcactgtgcggccaccagcagcgccgcagccatttgggaagagtttgagaacacaagccctgcctgttcccaggtgccccgtactgcagagggctggcaggtgtcggcagcttcttccctcccctcctgaccactgcacttcctggcccatggctttccggcccacgggccatgcgtgttcttcctcctcttttctcccgccctggcagggatgaggagggcctgtccacctgctgcggacagcccggctcttgcccagtggccttaggtgtgctgagcggggagggcggggcagcactggccgctgcccttctcggctgcctgtgggcgag

SEQ ID NO: 4460 - DNA, 571 bp, Canis familiaris
  misc_feature (1)..(571): n = a or c or g or t
gtgggaatcctggctatattgttgnnnnnccacttttggcnntaactggtgatataagtcactctatcaccctcatgaaaagtaagggtgatggaatttgctctgttaagagacatgaagtacaatttggagtgaatgcaatatctggatgcaagttcaggttgaaaaagatggactgcagccacttacagcaggagatttatgagactcttcatggaaagaccagcccagaacatgttgccatctttggtaatgctgacccagcccaaaagagagagtggatgcggattctcagcaggaactgcagtgtttcagctatgcattgtacttcctgctgtgtcataccagtttccctggagatccaggtattgtgggcgtatataggcctccagtccaacccacaagctcatgtgtcaggaacccgattcctataccggtgccaatccataaaggattaccaacaagtaacagaagtacctttgacaactgttgtgacctttgtggacattacccagaagccagagcctccaaggggccaacctagaatagactggaaactgccattcgactt

SEQ ID NO: 4461 - DNA, 539 bp, Canis familiaris
  misc_feature (1)..(539): n = a or c or g or t
tcaaggggctgacgctcaactgctgccgcgnnttccccgtcaacatggtggncttcgtcacctacgaggccgtgctgaggctcatccggggcctgtccacgtagccagcccgacgcccccggcgccaacccgccagcggctcccggacgtcgtagtgctggcggaggcgcagagcgtgttggggtctgggccccactgagccgccgggacacccagatcagccgtgctcggggcttcgtctgcccggctacgcaccccgaggacgtcgaggggcccatctgccaccagcctggggttggcctgagggtcgctggagccagggaggagtgggccgtcgctcggagtggtttgagcatgccgtcggagtcacagctccctcgtcacccctgccggccgcccactggccgccctccccgcgaggcccccactcggctctcctcggcttgctcccctgcagcaggctgctcagagacggcgctggccggcccgcatggccagcgtggcgccgggcctgctnnnnnnncctgtcctgatggggg

SEQ ID NO: 4462 - DNA, 465 bp, Canis familiaris
  misc_feature (1)..(465): n = a or c or g or t
gcacccagtttggncttctgtgaaatcagcaccaaataatccactngaaaaaagtcagctgggggaattctaaaaccagagcaagacttttgagaagaagggagagttccttttgtctttagcagtggcagcggctctctcctctgtgtgtcctgagttactatgctggtcattctgggactccttgctccctgtgttgttctcttgcctcattggtcaaagggctgaagaaggagggttcagaacctggcagaaagacaggacagcttgggaggagcaggcccgatggaggaaagcctgcatgcagtccttctggactgggacactggccctggggaccgtggcngagctgctatgnnggcctcaagcattccattagatcctctgcttcgacggtgttcttcgtggatgggttcctgggaagagttgcagaaataaacaccaacccaaatgattcctttggca

SEQ ID NO: 4463 - DNA, 597 bp, Canis familiaris
  misc_feature (1)..(597): n = a or c or g or t
agttgnnggtgacatggnnannannagctttgcccccgcnnnnnnnatnnnngtggtgaggcacacctgtcccctgtttagatcnctggggctataggggatgnnnngggacgacgcctggccaccnnnnnnnntcgtccacagcctcaaggccaccccgcagtcagtcatatatgtcactcaggtggaaaaggcacatagtttgggaaactttgttttaatgaaaagattctctcttttttttttttttgacaaatgaaaactaccctcagctatgccttcagtccgctctcagctctgccgttgttaactccatttcagagatggactaggaggttccctttctgtttgggattcgatgactttctttttgtagctaaggctttggtgttcccgggcagtgccatttcccatccaccttccgcactctggccccctcagcattgtcaccagacctgaaatgtaacttcctgaggagagggaagtgagtgccccctcccagcctctcctggagcctctctatgtgcctttcccctgttgtctccttacccctgcccctctcccatgggctctgatgaaaaattgttgactagcttt

SEQ ID NO: 4464 - DNA, 691 bp, Canis familiaris
  misc_feature (1)..(691): n = a or c or g or t
ctctcctctcaggttatgtgacccctgngccaactctnnncaactcccaggcttcaaaggccactcctaggccagacctcaacccgtcggcttcctctacttccatcagcaaagatgccccagatggcaagcangaagtngagccccaacacgtagcaggcactgtatcccctaaaacaagcaggagagaggctgatgccacgcctcagaagccccggaagcccaagaaggaggccgggagcccccaagcctccacgctggccctgcagagcgacatcagccgacgcctcctgagtgagccctggcccctgaatgaggcccaggtccaggcctcggtggtgaaggtcttgacagagctgctggagcaggaacggaagaaggccgccgatgccgccaaggagagcaacaggaagggccgggtgggccgcaagcggaagctgtcgggggaccagacagcagccagagtccccaagagcaagaaaaagaagcagctcgtggccgggggaggtggggagggtgctgctggctcaccagaaaaggccctcaggactcccaaagggaaagccaagagagatggagcaagcagtgacatcaaggagaagaaggagaaagagtctcctggctctctagaggccaaggagaagccggaaggggagccggggacactgaaggttgaaggtnnagaccaagg

SEQ ID NO: 4465 - DNA, 555 bp, Canis familiaris
  misc_feature (1)..(555): n = a or c or g or t
gggtttagtttggggggcacccctgtgtccatcgtccccgcccaagtggagcggccggggtggccggagcggctgagactgccgccagccctgcccatgcccgcgggcggtggaggctccctcggctggccacctgtgtgccggctactagaaccaggctcagagatgtgcactcggagccccttaaccctcacgtacccagtaaggtgggaacccctggccctgtgtcacagaccaggaaacagtgtcacagagcggtacctcacctgtcacacagctagggtttgatctccgatccgactgacgggaaagtgaaagctcttaactgctgcattttatatattttaacaagctgaatcctcttggttatttgtatcaccactaatattattaccaccttccctgcaaccccattcccacccgacccaccctggcatgtgactgaggagtcctctggcccctacgtcatccggacaaggcgctggtggtcctagcgtcctgtctgccctgcgccctgtggccacatggcttcctnnnnnncaccccagccacaag

SEQ ID NO: 4466 - DNA, 591 bp, Canis familiaris
  misc_feature (1)..(591): n = a or c or g or t
aggagagtgaagggtnnnnagtccgctcnnagtctttcatcctgaatttgcacagaagaaaagcgggtgtccagcatggccatcctgatgttgctgacaggatccccatgcagcttgtccttctcacagatactggcagctcagctcctggacccagcacccctcaaatggatttctgcaatgcgagagcctttctcggcatctgtcccgcgtttccatggtccccaatgtcccctccacttggtgaggccaccaactcctcaccagaaggacgctaccaagaaggcccgaacagctactgtttgccttctctgggcccgttccagcgccgatgcccccagctgccccttcacccccgcgcccagcctgttctgtttacatggtactgtgctgatggaagagcaggccgccatcctgcagcagccgcccgggtgaaagccagtgagcctattaaccgtgccatcttgcgaactacacttgtaaaagatcattgctttgtatcgtagtaaccgatatgcgccgtatatgttgaatgtatatgaatataatttcatatttctgctctttgaaaatgtcaaaagtattttttct

SEQ ID NO: 4467 - DNA, 613 bp, Canis familiaris
  misc_feature (1)..(613): n = a or c or g or t
gtgtgagaagtggggagaaatgccaccactacaacccaaacatatgagggaggctgttcggaggntaangtcgaagggacagatccccaactcaaagcacaaaaaaatcatctttttctagatcaaagcctagaaaggcctggtactgaaggaggaagtactggttctggacttcctactacatgagacttttgcactggtgctttagtatcgcagtcctccaaggattccatgatgatttttaatgtctttctcagaactctgatattcatcacatctaaaaggcatgcagcctgtttcatacatgcttgactaaatattgggacctctttgggtattttgaggcatttaactgtttcttggctagttggaagaaggtacatgggcctttaagcatcttctagacagggaagctactttcagagagaaaaacctttctaagagagctttgatagtttcacactgaagcatgaagttgctgacttaggttgtttcctccatctggttttaagtaaatgaaactaccagaagcttttgacacgagatattttaccatgaagaacacagtgataatggaagtagcagaaaagtttgcccttgtaaatgtgtaaag

SEQ ID NO: 4468 - DNA, 607 bp, Canis familiaris
caccttccaagtgtgggatgtcggggggcaagagaagctgcgaccactgtggcgctcctacacacggcggacagacgggctggtgtttgtggtagatgctgctgaggctgagcgcctggaggaggccaaggtggagctacaccgaatcagtcgggcttcggacaaccagggtgtgcctgtgctggtgctggccaacaagcaggatcagcctggggcactgagcgcagcagaggttgagaagaggcttgcagtccgggagcttgcagcagccaccctcacccacgtgcagggctgcagcgctgtggatgggctgggcttgcagccaggcctggagcgcctgtatgagatgatcctcaagaggaagaaggcagcccgggtgggcaagaagagacggtgacccgaggctgtcccctcctcaccagtaggggtctgcacacttggacagccaggcggagcctgtggcccctcattcagctctggggtgcaggacctgcccacctcaatgaaggaccaaggagcactctgggagtcctgttctggtgcagcattggggaggggtgggggagatggggtgtcttctctctctctcatcctcacctctggagaa

SEQ ID NO: 4469 - DNA, 704 bp, Canis familiaris
  misc_feature (1)..(704): n = a or c or g or t
gccatgcagacagtacatcaggccctgctnncactctacgcntatgggcgcaccactgggttggtgctgnncagtggctatgggacntcctacgtggcacctatcctcactggggatctggccccacttgacacctaccggctggatgtggccggtgttgacctcactgaatacctggctcagctactgttggcaggtggctactcactgcccaaggcagggttggtcaaccagattaaagagggctgctgctacgtggccatgaatatgacagctgagatggcccgcactcggacccaggcccgagtggactttgtgcttccagacaagcaagtcatcactctgggctctgagcgtttctgctgccctgaggccctcttccagcccagtctgctaggcctcaaccagcctggcctcccacaactagctctcttgagcatcagccggctggaagccaagcagcaggagcagttgctggccaacgtggtgctggacggtggcagcaccctgataaatggttttcctgagcgtctgagacaggagctgggcccccaagccactgtgctgggctctccccatcgtgccgttgctgcttggcttggaggctccatcatggcgtcccgggactccttccagagcctgtggctcagccgccgtgagtacgaggaggaaggcccttgggctatctacaagtaccatctgtg

SEQ ID NO: 4470 - DNA, 755 bp, Canis familiaris
  misc_feature (1)..(755): n = a or c or g or t
acccaatcaagaagatnnaaatacaacagaagaatttgactcttttcgaatctttagattggtnnnatgtgctcttcttgcctttnnagtnngagcttttgtttgcaaatacttgtccatatttgctccgtttcttactttacaacttgcgtacatgggactatacaaatattttcccaagggtgaaaagaagataaagacaaccgtactaacagctgctcttctattgtctggaatccctgctgaagtgataaatcggtcaatggatacctatagcaaaatgggcgaagttttcacagatctctgtgtctactttttcacttttatcttttgtcatgaactctttaattactggggctctgaagtaccatgaagcttgcatcactcagagaagctttccaaaaagcaccttctcttctatagtgcagtgtctctaaaggaggcaaatgggtttacacctttatgtaattcttttactttataggagttttaaaataatttgattaggaatggaatggcaggttccctgatttaaaagcattgagtttgtattaacactaatgggaagaatagactaccattgtcattaattgacttttcttgtttaattagaatccctagtctctacctttcactaacttctaagatttgtaattcctcttttgggagctgagctgttcttttagggagagcagatgaacacggtcacagccagcaccaagggctgcaacttctatttgtgttgttctgtcttg

SEQ ID NO: 4471 - DNA, 656 bp, Canis familiaris
  misc_feature (1)..(656): n = a or c or g or t
tggcccagaagcagcgngagcgtgaagaaagagagnagcgcgaggctttggaacgggnncggcagcgcaggaaacaagggcaagagttgtcagcggctcggcagcggctgcaagaagatgagatgcgccgggctgctgaggagcggaggagggaaaaggctgaagagttagcagccagacagagagtccgagaaaagattgaaagagacaaagcagagagagctaagaagtatggtggtaatgtgggctctcggccgtctccaccaacagagccagggccggttccgtcctctcccagccaggagcctccctccaagcgggagtatgaccagtgtcgcatacaggtcaggctgccagatgggacctcactgacccagacgttccgggcacgggaacagctggccgctgtgaggctctatgtggagctccaccgtggagaagagcctgggggagaccaggaccctgtgcagttgctcagtggctttccccggcgggccttctcagaggctgacatggaacggcctctgcaggagctgggacttgtgccttctgctgttcttattgtggccaagaaatgtcccagctgagaggcctttatcccaccatctctctctgacctcttcatctttgataaagcactgannnnnccttcctaa

SEQ ID NO: 4472 - DNA, 574 bp, Canis familiaris
  misc_feature (1)..(574): n = a or c or g or t
cgatcgtgaggtggtnaatctctttcntcattttactgtcannnnnnnnccacgagttgantatatcgatcggccccgatgctgnntgcgggggaaagagtgctgcatcaacaggttccagcaggnnnngagnngctggggttacagtggcacangcgaccgcatcaggttcacagttaatagaagaatctctatagtcggatttggtttatatggatctattcatggtcccacggattatcaagtgaatatacagatcatcgaatatgaaaaaaaacagaccctgggacaaaacgatactggattcagttgcgatggaactgctaacacattcagggtgatgttcaaagaacctatagagatcctgcccaacgtgtgctacacagcannnnnnnnactcaaaggtccagattcccactatggcacaaaaggattgaagaaagtcgtgcatgagacacctgctgctagcaagactgtttttttctttttcagctcccctggcaataataatggcacttcaatagaagatggacaaataccagaaataatattttatacataatntagcattctc

SEQ ID NO: 4473 - DNA, 318 bp, Canis familiaris
  misc_feature (1)..(318): n = a or c or g or t
caaggatccgtctgcttgcaccattctgcttccccttaaacatttaccattttgtccatgacttccccgggctgggtcagacagtatgtgctcttgtaaaacaccagccactctctctgtctttcgtatttatgagaaacacaaacatttctttaatattgccctcctgttaggatgtaagctctctgagagcaaggatctcctgcttcgcctgcccctccagtccctagcacttgtaggtgcttacatgatatggtgaatgaatgagaaatccatactttnnnngatgtcatcagaccacnttaaaanngtgtgatt

SEQ ID NO: 4474 - DNA, 548 bp, Canis familiaris
  misc_feature (1)..(548): n = a or c or g or t
ccgcanncagcagcnngtggggtnntccagctgnnnnctcgggcccgtgcctcgcctccatggggcttcannagctcgggctgggcctctccagtgctgccggcccactcctcctccggggcgccacccccaaccccgaggcctggccaccgcctgccgctggggacggcagcttcagtgcggcccgcggacaaagccatcttctgctccagtgtccagcgcagcaccataggcccccacctgaggggctggtcacgaggaaggcttcggcttctgctggacctcacgccagctgccgcctctccgccgctatggcccagcctgcttcagatctggtctcagatgagcccttgccaggacaccgacactgtccgtctgtctgggccttgccccccacccccctcgtcaagtccctagtgcccggttctgacaatcagagcctttggccctccttctcctggctctccacaaaggcctggcaggcagaggtctcatcccagccccgactcttgtccccctgggggactcagacaaagcacagcagcagc

SEQ ID NO: 4475 - DNA, 673 bp, Canis familiaris
  misc_feature (1)..(673): n = a or c or g or t
agttttcaaaagttcttanaggcangagtgaatttctgtngatttttactggtcccagcttttaggttcttnaagacactaacaggactgtgtagaggctttttcagcattactgtattgtctcctgccagatgtggcaagatcaccattagaaatggaaattacatttaaagccattagacttctaggtgatgcaagcatctaagagagaggttaatcacactatagaggcattgtggtatcatttttcctttttctaattgtttaaatcgaattttataccaatgttaaaaattaattggatgttagcttgaagtggttaaagattgtttggagagttgtcataatggttttgctgtaaaaagtgttgcggaaatgttgctgaaaagcatggtgctggtaacagttcaacaatccgtggctgctcattcttgcctacttttactctccctctaaagcaggttagcattgaaggtggtatggaaaagcctgcatgcgtgttcagttctttgtttcttctccttccctttccccttgggcccccccttccctccttcgctcgctcaacctcttttgttcagtatgtgtaacttgaagctaatttgtnntactggatatctgactggagccacagatacagaatctgtattgttcttactgaaacacagcatgg

SEQ ID NO: 4476 - DNA, 538 bp, Canis familiaris
  misc_feature (1)..(538): n = a or c or g or t
agggtgacatgtatgtnnnnnnnnngctgggtgtganatcatagcaccannnnnnaaagtnnngatnnnantgccggccccgggcctcctccccagtnnnnnaggtcaggnnnttgtgcaactcnnnnnnncacgagcannnaggggtgattccgatttgccccccaccccccagagacggannanntcatttccctgggatcgggacnncagtttccaaggaggcgtgcagatagctccggnnnnngnagcttccgttttaggagtggttatgagcatatcccggtccctttccacgtcctgcttcctgcgcacattctctccgccctaaatagatnnnnnntcccaaaaaccagtagccttgggagnnnnngcctgtgcctggggangnnnntgccaaaatactgtttgtgtctttaagtggnnncgtcatgtcatctgctctatagatctatagtttttgccnnnnnttgtttctccctatctggaatctaaataatgaatagaaactaatttatctgagtatnnnnnncatnna

SEQ ID NO: 4477 - DNA, 556 bp, Canis familiaris
  misc_feature (1)..(556): n = a or c or g or t
aaaggtgaacatccagatcctggangacacccatagggtgcagccccagccccctgccagnngcagctgctactttcaccaggccttccacctgccctgccgccacatcctagccattctcagtgcccaccaccaggtgctccagcccgacatgctgccagctcagtggacagcaggctgtgctgccagtctagacaacatcctgggcagcaagtggagtgagacactggataagcacttggccgtggctctcctcaccgaggaggtgggtcagctcttgcagcactgcagccaggaggagtttgaacggaggtacagcaccctgcgggaactggcggacagctggatcggcccttatgagcaggttcagctctgattaccctaaatgcccagagatgttcatacacacgtacacactcacacccacccacccacacacaacacacacacacacactattatactcctgcgggccctcttcccaggaaaggacaagggtcttctactacagcgtgctacctaaaatgtnnnnngttccctaagacgggagtcagca

SEQ ID NO: 4478 - DNA, 594 bp, Canis familiaris
  misc_feature (1)..(594): n = a or c or g or t
ggggcactttgggnnaatactctaggttctnnngctttgctcnntannncatttgnngtcatcattgagaannnnnnnggtgcagaagatgaccttaanncagtagcagctggnaccatgacaggcatgttgtataaatgtacaggtggtctacgaggggtagcacgaggtgggctagcaggnnnaacgcttaccagcctctatgcactatataannnntgggagcacatgaaaggctccttactccaacagtcactctgaagatttcgccaacttatgagtggaggacactttagtagtcatccagatcaatttatatgtcagtctggagtngctctctcttcctacaattagtttgaaaaatcggagattccagtttgctgtggtaaagatcacgtgtggttgaccaggactggcatcctgctagccagagtggaagcccaaactcctctggtggctgagtaatgtggttcttccctaccccctctgaactgaaaaactacttagaggattcaggtcatgattgttgtctataccgtatccccacatttatttaatgatctgaaactgtaatgttgccttgtannnccaata

SEQ ID NO: 4479 - DNA, 676 bp, Canis familiaris
  misc_feature (1)..(676): n = a or c or g or t
tactgaatcaaatggatggatttgaccagaacgnnaatgtcaaggtgatcatggnnacaaacagagcagacacattggatcctgccctgctgcggcccggacgtcttgatcgtaaaattgaatttccgctccctgaccgccgccagaagaggttaattttctccactatcaccagcaagatgaacctctcggaggaggttgacttggaagattatgtggcccggccagataagatttcaggagctgatatcaactccatctgtcaggaggtgagtgagggagggtttttctctggatccaggcaggggatgcatgaagactcttcccctttgagaccactctgctgcacccctcatgtcccacattgcctccctggggcttggggccaggtctcttcctccaccatcactagggcttgggagtagattttcattctcatccctcaacagagtggaatgctggccgtccgtgagaaccgctacattgttctggcaaaggactttgaaaaagcatataagactgtcatcaagaaggacgagcaggagcatgagttttataagtgacccagaccttgtggtgtgaggggagaggagggaaggggacttctctcacctccccaaccgctgtcccaaaacctagtgttgttttttctttacccatgattggtttactcaat

SEQ ID NO: 4480 - DNA, 535 bp, Canis familiaris
gaccctgcagggctgggtactgtgtacccccaggcaggctagcccttcaccccatcctgtaggattttgtagacactggtcggggttggcgctggcttgtttttaacatgagacttaattactaacccaaaggggaggcttcccctgctccaacgcccatatacctgagttggaggtctatttatttacttccctgttgggaaggggcaggatagtacctgggaatcattggggtccctgggcagctgatcctgccctttgcacacaccctcctcccaggcctggctcagaatctaacctatttattgactgtcctgagggccttgggaacaggctgaagcctatagggccttgactcctttcttggctggggtgctgccctgagggtggggctggctcttactcaggaacctgctgtgcccaacccatggacaggcccgctggggcccgcctgctgatgcagactcactcagagaccctcagacacggaaccaggcctcttctcagcctcccctttgtccaggtttccaaagct

SEQ ID NO: 4481 - DNA, 492 bp, Canis familiaris
  misc_feature (1)..(492): n = a or c or g or t
gttttcatttnngaaaatacgtntgtnctgatgaggagcttagaagatnncagaaagttcccagaaaatattttaatatttcaacagaccacagccaaagccttaaatcaaacccacacacaactcaaaattgcctccttcatctctcacctttttctttnnagaagagacgaaaaagcacatgtgtgagcctcaccaaatggtagccaggagctgataatccagctaagcatggctaggtctggaacacgaggggtcagacttctggttccccttcccctgtgcttgagctctgctttgggagccagtgctactagcctttgcctagatcctgagtggggcactgaaccatggaggtcggcccgggtgctgtgtcttggcgtggctggctttacaatgtgtggcctgaatggatctgacccctgtcgggtgaacatgacactcacagcgccctggcagttcacaagtcggggaggggtactggtttaaatg

SEQ ID NO: 4482 - DNA, 607 bp, Canis familiaris
  misc_feature (1)..(607): n = a or c or g or t
gcaggtngactcagcngaggccatggccaggtcagaggctcagctgggccttgtgacaacctcttaccacctgctcctctgggacccgaggtgggctgagccgggctcactcactgaggccacagtggccccgactgtcggcaggggggcccactggggccactgctgtcaggagggcagtgggggcacaaggggaggcagtcccagaggaggtgaccctgaggatctgggggatcaggagggagatctgatgagggccaagtgaaaactgccaacagggagtcgggcgctggaggccaggggctggggagtgagagggagggagggatccagggctgcattcggaaatctaacccactaaccaatatttagcttcaggggaggggagcagaaacaaactcaagggggggcctttggaggaagggctgtggtcccccagctctggccagccacgagggactcatccagtgtgatgcacctgtgggttgccacggcaacatgggttcccaaggccccccactgagaacccaggccccaggagctgtccttccctagagacaagatggatccatagggcactgatgttaatttttaccatgtcgcttcc

SEQ ID NO: 4483 - DNA, 539 bp, Canis familiaris
gacagaccgtggctgaccaggtgctagtaggcagctactctgtgttcagcaatcagggagggctggtacatcccaagacttcaattgaagaccaagacgagctgtcctctcttcttcaggttcctcttgtggcaggcactgtgaaccgaggcagcgaggtgattgccgctgggatggtggtgaatgactggtgtgccttctgtggcctggacacaaccagcacagagctgtcagtggtggagagtgtcttcaagctgaacgaagcccagccaagcaccatcgctaccagcatgcgggattccctcattgacagcctcacctgagtcaccttccatgctgttctgtgggctcgtggcgctggacttggaatccctctgtgccccacccaatctgttttggatgctgacagggagttggcagagagctcactgtgactgagtggctggatgcccagctcttcacctgtgcccatctcctgaacctacagttactgtaaaaatctgccatattgtgctgtcaggccttaaaggctcctgact

SEQ ID NO: 4484 - DNA, 585 bp, Canis familiaris
  misc_feature (1)..(585): n = a or c or g or t
gttatgaccatcctgctgctnnagagtgtctntccaggttttctttagcctttctgctcctagnnaatgaggagcctggacactgccaccttctagaccagagtggaggtctggaccccattgcttactccacctgggtccccagttggggttgcttctgatgataccgatgggcactgcctgccctgcccactgaaaacttggctatggccctgtgtgactctgaatcctgggaaccattcattcttcatccatggattgacccaggacagtggtgtctgaagcccagaccacactccctgcatccttccctctaacagaggctccagagcttgtcctttctccagaaacatatgaagatgcccaagaacccagaggtactgctgtccatcacttgtactttacatgagcccctggtgtttactggggcaagctctggcctaggacttgcaatctgggaaggaaggagcaaaaggaagactcaagcaataatctctgggtccagctggtaactctgaaccagctaggctacatatacgagaagttcctgnatggtctactctagctttgaggaaagggaaaatg

SEQ ID NO: 4485 - DNA, 528 bp, Canis familiaris
  misc_feature (1)..(528): n = a or c or g or t
gtatccaaagttccnnatctgtgactcttcaaaatgacaaaggatttgtaaactttgnnnnnatttctctcattttttaatagtttcattcatcacaatgatnnnatcctctgctccattttttttaaatccnnnaagcatttgatgaaacactctttaatgctatatgcattttcttacttttattaaaaatgtgacaattgtcaaaaatgcactaaaatataaatggagattgaacatgttcattttccannnnatannnnnctttatatagacttgaaaattttctccagttgtttagtaaaagnnaaagagaaagggtttttcctgccacaggatataacttttttttatataancaagcataacttaccactgcttttggtggaaaagtgcagaatagtatgtaccttttatgaagaagagtgtaatttacaatattcagtgagaatgttactgctgattcttttccaaagtgtagaatattctttgntttatagaattcattttgacccagatgnnngtctt

SEQ ID NO: 4486 - DNA, 675 bp, Canis familiaris
  misc_feature (1)..(675): n = a or c or g or t
acatgtgacccatttcactnnctgagtctggctcgtgcctgtgtgttgcacagtgtaaggcctggattctcatagggcttgtttccccgtgggaatccctgaggtggtgctnnagccatgcgcacattttagggaggtacataattgacttgccattttatacttgaaatggtacatcagggtacttagatgacgttaccttgcagactatagaaggttaaagacctaaaactaacttttggccagcggaagggctggccccaatgagaactgaattcatttcccgagggaggtttgggtgacagaggtatttcctttgcgggcagggaatatgccggacgatggctgaagctgagctcttcctaggggaccccactccgtgcagtgctcgcagccagttgaattacaagccagtttatcaaccaaagggctcggagctatattcagatccattgggcatctagtctactttttcagccaccattgttgaaagcagacccagtgatccagtgtcagtgctctattgtgtaaaccattcctttttctcatgtttctataaagggcttgtgtctgggctggacccagttctcacttatagaagacgctgctgcagacagttaggacctttccatcttgtattcgctagtaaggcaccgccctcaacatcactcaatt

SEQ ID NO: 4487 - DNA, 623 bp, Canis familiaris
  misc_feature (1)..(623): n = a or c or g or t
gaagctgaagctcctggagtngacagagggcaaggagaggaacatccgcgcgctgctgtcgaccntgcacaccgtgctgtgggacggcgagagccgctgggcccccgtgggcatggncgacctggtgacccccgggcaggtgaagaagcagtaccgccgcgccgtgctggtggtgcacccggacaaggccgcagggcagccctacgagcagtacgccaagatgatcttcatggagctgaacgacgcgtgggccgagtttgagagccagggctcccggccgctcttctgagccgtcgcggtcgaggctgcgcgtgtggctcatggagccggaagctgctgagctcaacctcgaaggtcccgtccgcggccgtcacggcgtgggctggtgtggccaccccggatcgctgtgctccgccctcgggtcgggaacagacgccgctccccggcacgagaagaaaaagcattccaaagcctctgagtttccttttctttttctggtcccaaaggaaacgtgttgattacgtccccccgtaactgtcacggtttgtggttcatgtcagtctgtccagcggccgtcgcctcgagagcgnnnnngctcagctgccccgagccccgtgcgcgac

SEQ ID NO: 4488 - DNA, 536 bp, Canis familiaris
  misc_feature (1)..(536): n = a or c or g or t
gttggggcagctgggcgnnaggnngcaccctgcacagcggctgtggctttcctgtgggctccattttatctttcagcttagagggactcgggggggggggggagcccacccttctcacggcatctgcacgtctccaccccaccccagcccggcctctgggaacaacaccggccaggcgagcgcacttacgatttaaaccctgggagcttctggaatgtggagaatattctggaactggcattttgtcttctacctcactgacagggttctcggaacgtcacgatggaaatgctgcagtaggactggcctcaggtcagtggcccccatgccgtggcacacgcctgtccatgcagcctccagactcgagctcggaaagatgtttccactgacgtgaaatgaaggcacagacaccaccaccaccacccctccccctgccatgcggtcccagctctgtccccgtctgtctgctctcagttatagacagcaggctcggggtcagccatgatccattccaaaaaataccagcgccagacaga

SEQ ID NO: 4489 - DNA, 533 bp, Canis familiaris
  misc_feature (1)..(533): n = a or c or g or t
tcatccaggtgnnncagggcaaggtgacccggcagggcnngttcaagcctaacagcgtcacttacaggaccaaatcaggcaacatcttgctgcacaagtcgaccattaacagnnaggccacgcggctccnnagccgatggctgacgtatttcatggctgtcaagtccaatggcagtgtcttcgtccgggactcctcccaggttcacccattggccgtgctgctgctgaccgacggagatgtccacatccgtgatgatgggcgccgggccaccatctcactgagtgacagcgacctgctgaggctggagggcgactcccgcaccgtgcggctgctgagggagctgcgccgggccctgggccgcatggtggagcggagcctgcgcagcgagctggccgctctgccacctggcgtgcagcaggagcatgggcagctgctggccctgctggcggagctgctgcgtgggccctgtggcagctttgacgtgcgcaagacagctgatgactgagccctatgtctgctggggctgtgtaca

SEQ ID NO: 4490 - DNA, 462 bp, Canis familiaris
  misc_feature (1)..(462): n = a or c or g or t
ggnnnggagntcnnggcctctgccannnngccaattgaaaagctgaagtcaatgtgtgacaccaatctatacttggtgacgaactgcatggaacatgccctgacagcctgccacccccgtacccgatactcacctggctgggatgctaagctcctctacctccccatgagctacctgcccaccttgctggtggacaccatgatctactggaactctccacgcccggctaaggctgtgtaacccaagaaggactagggcttcccggggacattactcaggactctgggatatcaggaggaaagaactgttttgtggctgaggaacagggatggaggtgtgaatgatgaccaccagcctgacccattagcctgaaaggccaactcacagaccttggctgaaaggacgtgtctataattgggatcaggacagaggacacagaaaccagttattgagttgtcttga

SEQ ID NO: 4491 - DNA, 536 bp, Canis familiaris
  misc_feature (1)..(536): n = a or c or g or t
aaaaaaattctgcatgggaaactctgttgaattttttccttccaacaacttgcattccaaaggagaatgaggtgctgaaggcttgcannnngcagcgagattataacaagagtgaatgtttggaatacaaatgctgttattcatcctccgagactagtaacttcagctgcttcgtcccattaaaggataagcccacacagatgttccggatgtttgggtttggtatgatcagcatgatcatgctgggatgtctgcccatttattgctgtactctttgccggaggagcaaatgggccaatcctttacgaaggagagtcagcagaattttaaaggatatgaagaaacaaaaaatgaaaatgaagagggatgctgaaatgtcagggacagcagaagaggaggaaggtgcaggtgatgataaagagcaagagaccaaagcattattttcccactaagaagaatgtgaaccattcagagcagaggagactgtcccagtcatctaaacctgatggagcattttagtacaaaaattaattgtt

SEQ ID NO: 4492 - DNA, 576 bp, Canis familiaris
  misc_feature (1)..(576): n = a or c or g or t
agagattaatgtgtgcnnaaccaaatgctggctatacccgttgaagcntctattcaaaatnncagtagtagtagtaatagtaatantagtaataaataagaagaggaaagaaaagaaaaataaaaaacaaattcattcatcttccatggtaaacaaatactgatctccacagctcttaacaggaataccccaaaccagtgaatggacatttaattggcaaataatcaaatgctacctcattgaggtatactatttcctcaggggctgaattcctgcgctggggagcctgggaaagccccaagccatcagcttaggtctggccagcctcccaggcttcagatggccagatatgcaggcaggtgggtcttcttcaattcctggattaaccaaagggaagacctttccactaaccaggcaggcagggcctgaagcaggaaggcagagattttcctgttctggcacctgtgcccttctcattccggtttctcttgacccattcttgggcgagtgccagtgttctagaaaggggagagagggctaggttctagaatggttttcccttaagatcacatctgg

SEQ ID NO: 4493 - DNA, 623 bp, Canis familiaris
  misc_feature (1)..(623): n = a or c or g or t
anttgtcacnnngaaagaaggggttcctgtagatttttggtgctaagggatactttgtcaatatgatgaagtaaatgttaagtgtcagataaatagcacactgantagttctttctgctggtctgttttttcctctttgttgttggtgttgtttttaantgtaaaatgtttatcaatcaaactattgtagcagctacaaaataattcaccagcatgacaaaatggtcaaaaaaataagtcatcagcacttcaaaaatgaaagcaacttttgagattttcttttaaaattgtcaaatatattttatgaagaatttataaaagggggaaatgattgtaatttattgttcatgactgttttttttttaataaagtgagtttcaacaaaaaaacaacccaccctgaaaatttcatattgttgaatttggtggctctgtatagttctatagtgctttacttcatgaacataaaatagagggtataatatttgaatcaatgtcattttcaccctattaggtgaaactttctgtaatagaaacgattgctgaggaaaagattattgaattctaggaatttctttcagcatttcaagttctcaaattttaatgcttactatcttgtatttg

SEQ ID NO: 4494 - DNA, 616 bp, Canis familiaris
  misc_feature (1)..(616): n = a or c or g or t
atnntgctgaagtttgttctgccattttctccaaaaattctaaatacattctctccagtnnnaaagactctgtagctaaactttgggagatatcgacaggacgaacactggtcagatacacaggtgctggcttgagcgggcggcaggtacaccggacgcaggccgtgttcaaccacactgaggactacgtgctgctgccggacgagaggaccatcagtctctgctgctgggactctcgcacagccgagcgccgaaacctgctctccctaggtcacaacaacatcgtgcgctgcatagtgcattcgcccaccaaccccggcttcatgacgtgcagtgatgacttccgagcccggttttggtaccggcgatcaaccacggactagcccacctttgttatatccggttctttccttgaggactgtgcccctcctgcccccgtgtcccatcaccagcttcggtagtaagtcactgcaccatctggcagttgtgctgccacctctccatccttcttggatttgtacaaaaggatctttttttaccttgatgtagaatcatggtgggaaaagttggaaacgcagatctatgcggttgttctgcattcactgattattacagt

SEQ ID NO: 4495 - DNA, 661 bp, Canis familiaris
  misc_feature (1)..(661): n = a or c or g or t
gaaagtacaaatanctcnngtatctaaaatgtggtatttgggtccatacnnnnnngcccagnatagaaaagggaattgnnntgagcagagcagcctgacttccctcttggggtttccttccctgtctaccaggatgaggcctcaccaatgccatgtgcagggaccacggtcagtccacatgggtgtcttcagtcactcccacagctggccacatgggcccttcccggctccttggcacagcccgtcccggcactcaactccgaggagggccgccagcacttccattcagaactcatcctacattctttaagagccttttaccacttaaatatttgtcaactaaagactctcatctggtttcctgctttgataaccagtttctcagtctggagtcctgcccgacaccattgggtctgaacccagccacatttagcaggtgggggaggtggctggatgctgatgggacagcagggcatcctatttcaataaaatactcaacagctcagtctttgcctctggctgtttatcctttatgcttatggattaaactatttagatgtgatgtgtccatcccaaatattctgttaacttaggagaaactacaatttctatgaagtggttatgaacattttttgcaatcggtacaactgattgggacatt

SEQ ID NO: 4496 - DNA, 582 bp, Canis familiaris
  misc_feature (1)..(582): n = a or c or g or t
acaaccgccacgnnngccccgaagatgtgnagcgacgnnccatggctgaccctgaggtgcagcagataatgagtgaccctgccatgcggcttatcctnnagcagatgcagaaggacnntcaggcactcagcgaacacttaaagaatcctgtaatagcacagaagatccagaagctgatggatgtgggtctgattgcaattcggtgatgacttgctcatcatccccttcccttcgccctcatgtggaaagaggagctgggaccgcggcaagccgcgcggagcagaggggagagcaagggaaagtgaacaacttctctctatatatttatatagacctatgtggaagacacaagagactcgtactcatgttactcgcaccgccgctgcctctgggccctcccagcacacgcatggtctcttccaccaccccctgggttccctgttcccttccccaacttcagtcactgtctcagctgctctcccatagttggttattttttatttggggcagtgggcatgtatggggagggggtgctgttcttccccgacctcaggtcccaattgtcctcacgttgttaactcc

SEQ ID NO: 4497 - DNA, 546 bp, Canis familiaris
  misc_feature (1)..(546): n = a or c or g or t
cttccctccacgctacgagttcctgtgggggcccagggcccannntgagaccagcaagatgagagtcctggagtttnnnnncaaggttcatgacacggtccccactgccttcccagcctggtatgaagaggctttgaaagatgaggaagagcgagcccaaacccgagctgctgcccgggctcagactgccgccctggtccgagcacgtgccagggccttggctgggggcgtctcccacactaagtgagggctgaggctggtcgagaaggttgtatttcagatgttgaagtttgatgcagattgttttctttgtggaagagaaaaagtggtcaacattctaagtagtagatggccagggtgggtctggaaggaacacagtgaatatcatctttgtgttcctgttctgtctggtaaacttagggtgttttttttgttgttctctttttctttctttcttctctttttctttctttcttctctctttctttctttttctcttttttcctttctctcttcctttcactcttttgcctttnntcatatttc

SEQ ID NO: 4498 - DNA, 529 bp, Canis familiaris
  misc_feature (1)..(529): n = a or c or g or t
acagcnngcggccccgctgagctggactgcactctgggcttccccgcggggcccctgacctcagggtgcccggctcggggnnnggggggcggggggctccctctcagatggcccaggccccctgcatgtctccctgctctcccagccctgccaggccttaaactggtctcggggcagggctggcccggggccctggacgagacacacgggtggccgggcggtgcggggttagggctccagacctaagacgccgaggggccggcagtccaactccatccctcagggaagtcccgctgtcaccaccgggtctgtgaccccttggccaggtgctccagggtgagggctgcgagcaggagcaggtgggaggagtcctcacattctgggctgtgcagccccttcccccctgcnnnnnnnnnnncactccccgagctccacggccccnnnggctccgtgcagggtgcacagcacannnccctgccttgggccggctcggaggtgtctcgttctcctgtccctggggccctgctca

SEQ ID NO: 4499 - DNA, 617 bp, Canis familiaris
  misc_feature (1)..(617): n = a or c or g or t
ccaggtgacccactacagcaacctgctgtgtgacntcctgcgtggcattgttgccaccaccaannccgctgccttgcagtacccttcgcctgccgctgctcaggacatggtggacagggtcaaggagctagggcacagcactcagcagttccgccgggtcctgggccagctggctgctgcctgagggcagatgaccagagggatgggggtcaggggagtagggcagcgagggtcccagctgcccagggcacctgccctgagagggttgccgtgctgcaggcatggggacaggcaccccagctctgcctgggcctggtgccccagactgtgcagggatttgtacatatttatgatggggcaggatatgggacggtgtctcctcagaggagctcaagcagagctgggcccgcaggaaccgaggctgaggagtgggctggtggtcttccctgagtacgctgggggctaggcctgggcacagaggccccttgacccacatggcctcagatgaccccttgagctgagtctggcgccacaggagtgccatgtccccagccccctgcagcgcaagcgccactataccaggagaaaaactctaaaacactatttttcattattga

SEQ ID NO: 4500 - DNA, 702 bp, Canis familiaris
  misc_feature (1)..(693): n = a or c or g or t
gcatccgacagcggttcattggnaggccagacatagcttatcgcctgatatctgccaagatgtcagaggctatccccattttggaggtgcagttcagcaagaagatggagctgttagaagatgccttgatgcccagaagtgccagatcgtcttccccaatagagaagggctgctcagtctggcaggcggcgtctggactgatggaccgtgccatgccccacgagccctgctcagggagccaggagggcccgtcacttcagctgcagaggagcgagccgctcgtctctgagggggacgcccaggaactgagacagatcctgaggaagctgaagagtctcgcactggacactgagacggagctggagaggcaggatgacgtcttggacggcatcaccgcagccattgaccggaccaccttaaccattgacaagcataaccaacgtacgaagaaactgacctaggactggaaagcagagaggtgtaaaagggcaatttaaaactctgtgaaagaaatgtgctgatttttgaatctgcctcacctctgtgggctgctctgcatgggcccctctcatgtcacttcgttccattcttctctggaagacgggcctatgtcttttgctttactgtgacctccagtacgtctgtaggtctttctgtgaacacctagaatattcttgtccagtttgtagccaagtgtgaaaa

SEQ ID NO: 4501 - DNA, 660 bp, Canis familiaris
  misc_feature (1)..(660): n = a or c or g or t
agatctttnntctgcacgtcaagggcannnnnacaggtgtgtgcgtnctcacnnnntggttcatggnnttcctggtgacgaaagagttcagcagtgttatnnaggtgctcaggccctacggtgccttctggcttgcctctgccttctgcatcttcagtgtccttttcactttgtcctgtgtccctgaaaccaaaggaaagactttggagcaaattacagctcattttgaggggcgatgacaacctcttcttgtgagtggctgcctctgcagcagggccggctttgggctgccgtggggaacgctgcctatgactccaagcagggctcttggccagagtcgggagtccctgcctgtcctcagggagccgggatccaggactgcagctacatggagccttgtcctccggggcccttccttcctaccggctctctacagcccagcaaacaatgagtgtgaggttcctggcccctgggtccaattnnnnnnnccaccctgtgactggggaagggaacagcttagaggggctttgatgccttgtggtccatcatccacaggccatctccatcctgccacaaaagcaacagcagaggagggggggatctcctggctcctcattttctggaagagatgctttagggtgatgncncctggtttttcct

SEQ ID NO: 4502 - DNA, 409 bp, Canis familiaris
  misc_feature (1)..(409): n = a or c or g or t
actccacgcnntgcantgcgtctgcccctcgtnnnnngntgtgtcgtacgcgtgattttgtgtctcttatctcgnnatatgtgtcnnntgtgtacgtgtacgaaatacgtgcgctcgctgacgtttgatgatgtcctctctgtttctgtctcgatggcgtgcttgcagcactagtcacagaagggacaggaggaagaggctgttgggatgtggatcctggcccccagggtgtgggaaccgacttggcggtctctgatgcaggggannnnnnnnnntgaaccaatttgctagtaaatggcacccgttgctctgtgttgtgacgtgaccccagggcccggtctgtcccgagccacgaggggtcgggagccttctccacagctgttctccgtntncgtgctctgctttggtc

SEQ ID NO: 4503 - DNA, 604 bp, Canis familiaris
  misc_feature (1)..(604): n = a or c or g or t
aaaaggatcccggtttttaaacctccccttcttcctttcagcacaatgctcaaataatatttnnngtcttttgtaacaggtaccattgtaagtgctttanntacactgaatcagtcttcacatcgctataaattgacagttattatgcccattttacagataaggaaacactcttgacagtgggtgtcagggctggaattcaggccaggctggctctagacctcaactcctagctgctacatagctgccacttagctcctcctgtgacatcagtcgggttcttaattctaacacttaaaactcatcattgattgcatgaggcaggagcccaggattgaacaagcttctctcagagggtaagctgatgaatggaagtacctggcacaggggctgacatgctaggtgctcagtggatcattaagtgttctgaaaacagcatagtgaaaagtcatgcatggggttggtgagaccagctctaccactgagggcaagtcaacctctcctgagtaaattctctttattcatcaaatgggcataatactatttgtcctgcctgcttctttgggtaattggatggtttaattgagacaattaattgtcttta

SEQ ID NO: 4504 - DNA, 198 bp, Canis familiaris
ggggggtgggggggtgcagaatgatctggacctgacaatgcctggagacatttttcagttgtcaagacgagggagagaggtgggctcccgggatctggtactcggagggcagaaatgctgttgaacatcctacaaggcacatggctccccccacatcacagaactgtttatttccagatgtctatggtccacagttga

SEQ ID NO: 4505 - DNA, 582 bp, Canis familiaris
  misc_feature (1)..(582): n = a or c or g or t
gatccatgataaaaactttnnaatctttataaattaantttgtcaaaatgtggtcatgttaaagaaaactaaggacaagtacttcactctttttcatactattataagttattctggtattaaatattttaatacaattgatttttgttttgacatatttcagttagatgaatggatgctggttgttttttatttgaatgagtcataattcatttttgccattttttaaaaaagaatcagcaaatttgttctgtgttataaactatggatgataagtcaatataggagagctttcacatgatttttttaaataccaaagcttggaatctggcctataaacacatcaagaagattttgtaattaacacatccttggcaatatctccaattgcaattacttttaatttattttttcttttgctgctttaacattttctggaaattaaagtccctccatcctttaaaagaatcttgaacaatgctgagccagcagctaagaatctaactcataatttatgttgtagagaaatagaattacctctattctttgttttgccatannnnntcattttaataaaattaa

SEQ ID NO: 4506 - DNA, 606 bp, Canis familiaris
  misc_feature (1)..(606): n = a or c or g or t
atgnntatatcagtggatactacagagtgtcatcttatttctnnnnnnnactgttatctgnnnnnctacccatgaggatgttaccaagtattatatttacttgtataatatacttcttgttaggattgaaaccagttgtggaggccttcttcatcatgatgtttacccttatgatggtggcttattcagctagttctatggcgctggccatagcagcaggccagagtgtggtatccatagcaactctcctcatgaccatcacctttgtgtttatgatgatattttcagggctgttggtaaatctcagaactgttgggccttggctctcatggcttcagtacttaagcattcctcgatatggttatgcggctttgcagtataatgaatttttgggacaaaacttctgcccaggagtcaatgtaacaacgaataatacctgtagctatgcaatatgtactggcgaagaatttttgctaaaccagggcatcgagctctccccttggggcctgtggaagaatcacgtagccttgggatgcatgattgttatcttccttacaattgcctacctannnnnnttatttcttaaaaannnttcttaaattcctc

SEQ ID NO: 4507 - DNA, 414 bp, Canis familiaris
  misc_feature (1)..(414): n = a or c or g or t
agactcangtaccaaaaggttaagtatnctgtggagttttcaccggtagccagggggacaactggtactcaaaccagaaaaattgtagtagattttccaaactgattggtgatactgcatctgaaggcggttgcacacagcagagtatggcatcatgtttttacactcactgttaattggaggactccagatggagcaaggatgacagactggtccattttgtttggtgttggaggaaacactttagtccatggtttnnnnnnctagttgtccgatctgggttgctgtgaacatggctccattcggttgacttcagatcactcattactcatctgtacatggtgcttcatgaaggaaaaaaagttgcccacgcctagaagcttgggaccttacagtggagctccgacaatgcaa

SEQ ID NO: 4508 - DNA, 341 bp, Canis familiaris
  misc_feature (1)..(341): n = a or c or g or t
atgaatgctgaaaatctggggatcgtgtttgggcccacactgatgaggtccnnngnnnncagcaccctcaccaccctccatgatatgcggtaccaaaagctgatcgtgcagattttaatagaaaatgaagatgttttgttttaatcctccagggaaatgagcctcatggccccagccccatcnangttgataaggctagaggagtaaaaacatttcttacacttgattcgttttccaaacaaatgagagaatttccaggaccacagtggatttgtcaagtcggctactgtgtctcatagacactcgcctcctccacgtaagaacagcaggggtgagagtga

SEQ ID NO: 4509 - DNA, 522 bp, Canis familiaris
  misc_feature (1)..(522): n = a or c or g or t
attgntgtgatanngaatgccatagnngaaagcattgaatacagnnnacagaatccatcnnnnngctctgttncnnntagtaatgnngaagcaanannnnnnntcaacaaagagttncnangnnnncccgcagcatagtttgtatggtnnnaagggcagcaattnntgatgcnnnnncagtttgaaattccattacaactggatttaaaagcatagtacnnntattagtactgatcanaagagactggctaatactcaaagttgcagttatttagctgcagagaaataataccattatnnntttgttagattgacagatgatgtgattatgtaaaaatatactcannnacattttctgtcagtatgtatttnnngnnnnaaatgtaagnncatnnnctgtacttttagacattcctcaccnnntatnnnnnatgtcctcttttttaagnnntnnntnnctttttagaatatttgacagttcagtctcaataagtannnctnnncnttgtgtgnnnatgttat

SEQ ID NO: 4510 - DNA, 636 bp, Canis familiaris
  misc_feature (1)..(636): n = a or c or g or t
tgannaataaaaggctatctngcattctgtnctagggnntttggctttcactagaaggggttttatttttgcaaagacctaggtatgagtctcctgtgtggatgaattagtctagcagtcactccttgcctcacagtatttnnaggcaacagcatatgccttatttccttgaagatgtagcctttgtgacacttgtcctctggcctagagccattcacccactcgtatttgccataaaccttacatttcagaccaaaatatctgtacctggacccaatcacatatatacacaggggactcttaaatcattctgtgggcacagagccccaaggagtaaatgaagttactagtgctcttcttaattctctcctggggaataacacaaccttgcctggttttgctctgacttcttggtctaaaaggaagagttagaaaggaaggtctgaaaggctttgctttgcttaatgctctgattctgctgtgaacaggataaggtagtccagccttgaaggttaggatctagcaggagctttcctgacttaatatctggttatgaggtttgttaaaatggctatatgtggtgatctcctnnaggtcaatgtaaaactgttctagtttgtcgttttttttttatgt

SEQ ID NO: 4511 - DNA, 573 bp, Canis familiaris
  misc_feature (1)..(573): n = a or c or g or t
tttaaaattttnnaagtaggttttaaattataacatgaaaaatannntgggataaanncagtaaattttaaataaatgttnngtcatngtgacgtgattatgacgttacccagcttggcaagaaaccttctcttatggnntaaaaaagagcagttggaatgatttgatcagatagagattggagttttagcctgtctcccctgatacttcatttacttgtagagggagggccctgttcttttcccaaccagctcaaaaagactgtgagaaatccaagtcactgctactctgctgctacttaaggcatgaagcattgtcacatctgtttttatgaatatgtttaaacagaagaagtggtctctggtccaaagtgaaacagctgctgctttgaccaacagcaagcacatggagctgtttgaacacggcatcatatacctttgagaaatcactggattcacagcgttctttgtaaatataataccttccatccagggagagagtatgtgttgcagggtcaattgggagcaccttttgtacattctattttgtgccttataggttaaaggagaatgt

SEQ ID NO: 4512 - DNA, 510 bp, Canis familiaris
  misc_feature (1)..(510): n = a or c or g or t
actgttgctactgttccaggaatagacagtaggaatatcagagagtnacggacataactgatgaccttgccaaccnggtngacaataccgatgagaaccgtcctactgaaaccaggtctgtgaaaatggtggacagaaagtcaacatcttgtgggatgatcatggtgattttatttctttttgtggctactgtggtcattgcagtgtggcctaccaactagggttaattaaaggatcaccagccatgaacctgtgaaggagaaaagttgagcacccttctggtacatgaaagctgctctcaataaattccctcaaagctctgaaatgaaaggaaacaaaacaaaaaactgtttactatcactactatctctgcaggctgttccaggaatagctccttttccctggcccttcagatgtagatgctgtcatggtctgtgcccaccgcctacccccccccaccccgccagccactccgaggttagtccttggctgtatcaccatcctttccca

SEQ ID NO: 4513 - DNA, 537 bp, Canis familiaris
  misc_feature (1)..(537): n = a or c or g or t
ctccacgggatcnnntggacaccaaggcnntcnaggcaatccaggcatcccaggcacaccggctgatgcagtttcatttgaagaaataaagcagtatattaatcaagaagttctaaggatttttgaagagaggatggctgtgttcctatcacagctcaagctgccagcagcaatgttggctgctcaagctcatgggaggcctggtccaccaggaaaggatggattacctgggccaccaggagaccctggaccccaaggctaccgaggacagaagggagaaagaggggagcctggaattgggcttccaggaagtccgggtcttcctgggacttcagctccgggtttgccaggctcaccaggtgccccagggccacagggccccccaggacctagtggaagatgtaatccagaagattgcctctatcctgtgtctcatgctcgtcagcggacaggtgggaaataaatacacctgaggaagacttgacattggagctatcttaatactatcaaaccctcatgatatgtgggtggcttttt

SEQ ID NO: 4514 - DNA, 631 bp, Canis familiaris
  misc_feature (1)..(631): n = a or c or g or t
attcatntatgatcttttgnnnntttagtgttttgcattgnnaacatttgcatcgttcatttagctggtatagggctttatgttcaagatagactctcattaagtgatagttgagtatcacaaattgcttttaccttttatcccttatcatgcagtgtacattcttgactctataatcattgtcactttttaggagatagtgtctacatagacttaagcttcatagtttgcttacatagctttgctatattatttacaatgtacagaaaaaagaagtgtgcatgatatctctacatgatctaaatggcaatgaagaatggaagaggtactagcaatgtaggttttctaggaatgtaaaannnnnnntaaaactcttaaattctttttgttcacctgagattctagagtgggtcacttggaaaatggctggggtgtgaggacgaaattgttttatgaataagacttaaatcacacagtaataagactggtacatttgagttaaacagctacagaatgggctgctatgttgatactttttagaggagagaaaaatcaaggatcatagttatgagagaaaaacattgcttcttannnnatttattcttggcnnnnnnatgtgtttatgattaga

SEQ ID NO: 4515 - DNA, 538 bp, Canis familiaris
  misc_feature (1)..(529): n = a or c or g or t
ttctaagattttaatataatttaagaaaggtagaagnctacatttaaagaaatagggctattttcatattcatatagccatatgtatttttatactaagcttaataacttaaagattcttttaatcattttatgtggccactgtcattttaaaaaaaggcatttccaaaatgcagtttttactacttgggtttggaaagcagttttcaatttatgaggttagtggttgcaaaaactcagtgcttgggaacccagttatttttacattggcattattgacatatcagttaataccatttttatttaatgtgaaaagaaaatttctcaagacagcttttgctgataaatacaatattttttattatatagaacaggttatgttaaatacatcatttattgtcaaaagtcatatgcattgtaacccatatttatgggtctaatgaacaattaaattacgatgtataaatgaaaaacgaattttatagtaagttctataaactaaacctttcttaaactnnnnnttgctggattttgtaaaa

SEQ ID NO: 4516 - DNA, 400 bp, Canis familiaris
  misc_feature (1)..(400): n = a or c or g or t
tnngngaattcactggtgaaacaatagaggnnatgagggtctgaatcaagacccaagttcaataggtcaaatgccaaaacaagnncaatcaactgacctggcctgtttcaagaacagannnnntgcagggagtgagannncacacttctcgtncccaaggcttccctccctctctgagcttgcccttccatnccaattcctctggcctgttgtcagtgttgtttactatagagaggaaaaccgaaggnagggtnnnacactttgcnnnnntgagccactaccagatttgctggcagctttggccacattatttgtnnggtgattttctttctttgtgttcagagtgacttgattctgattctttatgttgtttcntnnngagcggcactttatctgtgtt

SEQ ID NO: 4517 - DNA, 463 bp, Canis familiaris
  misc_feature (1)..(463): n = a or c or g or t
ctcgtgagcgagnnatgtggancnggtgggcagancgcagaggttggtggggaactcgaaggaannannnngcccgctgtgatgtactggcctgggtgccccgctcagttttgnnnggatttggccactggggtgtccttcatgttgagcnntatgtcctttcaacatttactcatcattttttgagcattgccttacctcttggcaccacgggatgttctcatcgtgtgctatctctactccagccctggagtcatccactgcttcaatggagttcttgccagaagcccatacactgaaattaataatgagaaaatagcagacagaaccaaattgaggcacctnntacaaaagaactggtcagtactcttcaaaaatgaaagacaaagcaagactgaggaatgattccagattgcaggagacaaagnnnnntggcaggtgattgccatatgtggcatatccg

SEQ ID NO: 4518 - DNA, 101 bp, Canis familiaris
  misc_feature (1)..(101): n = a or c or g or t
ctgagtactttcactgtagctgggcataccaagaaggcatgttnnnnnngtcaaaggactattcttctaacacaaaanncaaattctcnngatncctgggt

SEQ ID NO: 4519 - DNA, 542 bp, Canis familiaris
  misc_feature (1)..(542): n = a or c or g or t
ccccttccccntnctgcatagagtcctctatatgcttnnngcttnnagcttnnaacagnncttcagagcaatctgaaagacnnnnntctgggccacagacctcagtaagataacaaagaaagtaatctaatatattttgacaatggcttttttttttcagttgatgctatggatataacagctggaggtaaaagtacacttgtcagccccgcagaaaaatcaagatggaaaactgcaaaaggcaaacctaagggaagacagaagcccaacattccaggactatttagtggagatgtgaaccagtctaggcatctcaagggcctgagtggtctctgcattagaacataaggtgtacaattatgaacagtggtctccaagaatgtatataagtgtaactaatcatggattcatttcttcttttgttcatttattcaccaaatgaaacacacaaaactgattggtctgtcaatatccctacttcagccaaaatggcaagcaccaaggcaactgagaacaaaaggatttnnnnnnatgcttgaccg

SEQ ID NO: 4520 - DNA, 106 bp, Canis familiaris
  misc_feature (1)..(106): n = a or c or g or t
aaagtatggtnngcggggcanctgggtggctcagtggctgagtgtctacttttagctcaggttgtgatcncggggtcctgggatcaagccccacatccggctcctg

SEQ ID NO: 4521 - DNA, 619 bp, Canis familiaris
  misc_feature (1)..(619): n = a or c or g or t
cgcacagaccagccacttctgtnnctagagtaacagtgacacgagntagnnaannaatcctccctttccctccaatcaaaacctttaaatatatattttctatatattataaatttaaaaaagatatttgtaaaaatatttaattttagagatgacagaatcggggtgtttaaaaccagttagcattgctggttacagaagaattgtgcatttatgttgagatgatctctggtggtgattagtggctacttaaagctttacagcagagttatatactattaaggaaccacaaataaaagataaaaaatttggaaggaactgtaagaccccttggccatttataaataaatatgtaaatttggaacaggaattaataattgacttttcattcatgaatatgttgtggatatttaactatttatttctattattttcatatttcagaatattttatcaagctaatttaaaagaaatatgtctataaatttggcatcagaatacacatgtaaatacttttaatgaaaatttgcaactttttaatattttaacatagttttatatttgtctttatttcaggtaccagaatgataatatctaactaatatatttttgttgttat

SEQ ID NO: 4522 - DNA, 239 bp, Canis familiaris
  misc_feature (1)..(239): n = a or c or g or t
gtaggtgatggtcatgtggctcgtgtgtgggcnnngagctgaggtggtgaatggattgtaaattccccaccaacagatgtgcagggtggcctggtgcaacacagttaatttcccgaaggaatctagtcctggtattgggaaaaacttggtcttgcatacacagttgcatgtgcagccagctgctaatctctgggtggcattttcattatgaatttgttcaccatctgtcttgcttaagc

SEQ ID NO: 4523 - DNA, 359 bp, Canis familiaris
  misc_feature (1)..(359): n = a or c or g or t
aaggtgacggaggagtgctccnagtacgagtttgagaactacannngncnnnngctgctgctggnngnnnngaagagctcagtgcacgaggcccnnagctgggggcccannnggcagtnnnncagcgtgccncccgtgcggcggctcggccatgacgcgcagcccatgaacccctnnnnnnnnnncatcctggcgcagnnnnnnnngcgcaagtagccccatcgcccnnnnnncccgccacctcctccagcccccaggnnnnngcccccacccccctcacccccgacggccggggcnnnnacagcgcagggacagcgcaggtcacacgcggggtcagcggacgtaccacgaagctactt

SEQ ID NO: 4524 - DNA, 460 bp, Canis familiaris
  misc_feature (1)..(460): n = a or c or g or t
gagtggaccccagacccattccagagctgcgttcgaggtcactgtcttaantgttgacctcgtagggaaggtagaggctgaagtgtcccatgttgccattttgatgacatcactcccgcaaagacgggacatcggagcccatcggtctaggttctggtccagagctgtagcaggggagagcgtaactctggccgaatatctgtcctctcgtgggagatggagcccggaacccaggagtggcaggcactttggaagctcctctttcctgaatgctgcatcttggtggaggcatctggaggcaggggacctggtttgcatgtcagctctgccccttacaggttgtctcctagagcccacagctgtgtgactttgggcaatggtgagcttccgattcctcatctgtaaaatggggataaaaatgaaattgctgtaagaataaaagaaatagggatccctgggt

SEQ ID NO: 4525 - DNA, 636 bp, Canis familiaris
  misc_feature (1)..(636): n = a or c or g or t
atgaaaaaagaactcttcttcagtgtaaanntggcaagatatatacaatgaaagaatttaaagagactgaaaaggccaaactgcaatccagattcccaagtatttctaactcaaggcattttatgactccaaataagtggcttaaggtgcctacaacctacatagaaagtgaattttgtaaaaggagcagttttgatttgaaacctttgacaagagcttctcatcctgtggaatctcagcaagaaaaaaaagcagtcatttacaaaaacaaaggatcatcccttctggaaaaagaacctctatgttttcatgagagaaagaagaaagaggccaattctgaaggtcacttccttgaccctcagcagaagatagagagggatggggcccagtatgcgaaggttttagcaaccaaagagcacacactctgatccttggttggtaagaggacacaaaagaaagctgttccagaggaagccgtctgccagcaggatctattcagggtgaggaccaaggaagggactcaagcacctgcagtaaacacttcatttttgagttcagtgtttgtatgataattaagaaatcacactaccatgtattgacagctattgcaaatgtattttccccagaagttaaata

SEQ ID NO: 4526 - DNA, 102 bp, Canis familiaris
  misc_feature (1)..(102): n = a or c or g or t
ttcattcctcatataagtnngctatacaggtatgttcatctttgtgtacaaaggtttaataaattagcnnncatnnncannnnnnannnnnnnnnntataaa

SEQ ID NO: 4527 - DNA, 160 bp, Canis familiaris
agacaacaccagctgtgaatctgacagatgtttacaaggattgcgtgagatcaggcgtgcggagtgcagggctcagcgcctggcacgtgcaagtgcttcctaacaccaggtggccatgctctggttcagactcaccccttccaggcacagccctaatcca

SEQ ID NO: 4528 - DNA, 511 bp, Canis familiaris
  misc_feature (1)..(511): n = a or c or g or t
acccccatcgnntgcgcctgcccccagaggcccccaccagggtttctgtctcctcagtgcgcccccactgagtaccacccactcagccactgctgcccactgccnnnacctggggtgtcagggggctcaaggcggggagggccagcatctttgagggtgctcagagagggtgagactgggctgtcccctcccctgatgggccgcaggtcacttctccccctaacgtggggagttcggtcacccccctccttcctggagtccttctcgcagcggctgcaggcacttggagcannnnnnctgccagcagccctccagccaggcacgtcgagtcctgtctgaggtccgcaagggaccccgctgcggccagcgtgaggagtcacgtgcacacacacgcacaccctcacctgccccacacgcaccccacgcacaccctcacacgcaatcacacactcacactcacatacacaccgccctacacactcacaccctcagccctcccgattgcctccac

SEQ ID NO: 4529 - DNA, 540 bp, Canis familiaris
  misc_feature (1)..(540): n = a or c or g or t
ctccagactncntgtcaacggaataatgaacttttacatgatttaagccagttttttttttttttttccccttgtaagcaaaagcattccaagtgatacaagtgggctaagccttttagggccattaccttatttaatctcatggcagtcctaagaagtaggtcccatcacttccctacttcttaggaccccatctgcagatgagtaaacaggtcaagagagcttatgcaccagatccaaatcacagactcttagcaactctgtgatgatgtccctgttctgcctgaggccctgaaccacctgcggtcagggagcatcagtcactctcccctgtacctctagggggcaggtggatctccggaaagccagtggaatgattactaaaggaatgaatgctctatttttcactccccagttcactctatccttttttccatatttgtatcaagccaatataagaccctggtcaagggacgatgcttgcaaactaatagaaatagtaanaatgatgatggtgatgtttctcnatggttccaaaca

SEQ ID NO: 4530 - DNA, 700 bp, Canis familiaris
  misc_feature (1)..(700): n = a or c or g or t
gctccatcaccccgcgtgggcctgccaggggaatatgggacatactcctgactgaggtggagtggtgatttgtcttcacccttcacattaggtcatgtcacctcagtgatgttaaaccaatggttgagtagataaaaagcatccttggtggttctttacaggatccttggtgaaatccctgtgtcagttcaaccagcatcagccagcatgcccacacagtcttgatgatccctctctgtataatggtagcaaatgttaagagaagggggaaagataataagtatagagaaattgtgtatggggagctgagatcttattttgttggcctttatttttacattgaccaatttgcctgtaaactggactttgcaagaggtgcagtgataatccctctccattgctgtgatgcttataatctgagaaagtgagagggggaaatgtaaatttaaaaatcttaaattttagtcatgtgttaaaatgtcaccttctctctttctcccttaccctcgctttccttctttgccagatgatttatttttttttaccttgttggatgactgtgaatctataaataatgggatgggctaggtgtatcagtttgcgaccacatgttaagaactgaaggggaacttctcgagatgacttaagaatcatcccatgcaaatatannnnttgccccaaataaactattcagaannnn

SEQ ID NO: 4531 - DNA, 499 bp, Canis familiaris
atctttgggatcttgttgctcaaagctctcctgtgacttcatctcccccaccatttgtgcccatctcaagcctcagcaagagaccatttggaacatgaagcttaatgacttgccagtgttctagtgttaaactctcatacctctgttacaaatgagaaatgccacaacctggactggccttcctccccccttcacggccctctcctgaccgcgggagctctggggcaaaacctgtgtgtgtattccagtgtatgacttcaaatcatgctccggcttgccaggtgtgagctaatgtcggacaccttcctacaagcagatgttgttcaatgcattcaatgtatattgacttccatactggtttttccaaaaaccaaaggtagctttgaaaaaccacgtttggaaatgtttggaacgttaagctgattgaccttttggggctttgagtagtatataattgaattcataactgcgttaattgtattgttaaaagtgtttggga

SEQ ID NO: 4532 - DNA, 576 bp, Canis familiaris
  misc_feature (1)..(576): n = a or c or g or t
cattanggttctgacccagttttgacaaagctaaggggttgataatacttttnannntccaggcctagagtgccatgagaacagtatatttctcttaagaccacctttagagctcctaggggagtggttctttttctccagggctgtcaaatgttgagcactattgtgggggagctattccccaaatactgcaaagaaatcatgtgccttcgtgtgtaggttcacttttctggtgttattgtttgtaagactacttataggggccaggtgatgtgtacagaaataggactgcaggaagtgatgtatttgtctactgaaacttgcatccccaggtgttccagtgaccatgcctgtggttcagtttatacactccacgtgcatgttctttctatagctgaggaacttgaggccattgtcaatcttatttttctagtctgtctcaaggatattactgcacgggcaagaaaatggcaataggatagagataaaaatcctgttggtggggccttgcagctttttgatcagctgcagacccaaatagaaattatcttgaaattttcagtgatgcagggcatt

SEQ ID NO: 4533 - DNA, 380 bp, Canis familiaris
  misc_feature (1)..(380): n = a or c or g or t
catccnnnagtccatttttggatcacatcttgctgagttacctggaaaagggaggagaggagagactttgnngccactgagagagatgaagaagataaccccagcccttctgtcaccctcacccacgggcagtagtgtgacagatggtaggactggccctctggtctgggtgtccccctcgccaggcttagagtagggaggagggttggggctgacctagcgctatgggaccagcctgttgcttgttgggattgggaggcctggctagctaccccagcagacccttcctccagctgcccagccattgccctgcctggggactccctgggcctccgggcagagccacagtgtcccggacactcaccagcctgcagagtagt

SEQ ID NO: 4534 - DNA, 541 bp, Canis familiaris
  misc_feature (1)..(541): n = a or c or g or t
caatagagagtatgannnagaaaagcgacaggagaaagagaggcangagaaagcnctgggcatcctgacctacctgggccagagtgcagcagaagcccagactcagccgcnttggtatcagctacccccacggcaaggggccccccagctcagcccaggtccagatgaaaagatcaagaaccgcctggaccctctacaggagatacagaagcacttgaggaggaagagacggcacagtggggacaatggtggccatggcaggaaggggaaggagaagcctgagaagcagcggcctgaagtacccccatccctggaccagcttcgagctgaacgtcttcggcgggaagcaacagaacgggctcgggcagaggccctgctggcacgagtccggagcacaaccccccaggaggagcagcctgaggaggagacagatgaacggcggaggcggtacaactcccagttcaatccccagtgggcccggcgccccaccagcaagaccccagcgctcactgactcctggggggagaggagaggccgcagc

SEQ ID NO: 4535 - DNA, 437 bp, Canis familiaris
  misc_feature (1)..(437): n = a or c or g or t
cccctcnnncaaagactgggaatagtgntnnnnntaaaaatctagaatcctagatccatatttataaaatgggnannngggaccaaagnnncaggttatnnnnntatnnngccnnnccntnannnagnnnnntgaaagttaagtnnncctgttgatagtnnnnntagnnnnnaggtggaaatcnnnnnntgtnnnnaaaagtttatattaaccnnnncnnnnntggcttttttagnnnntnnnccaaggggtggggagtggcctcctgtnnnaagtgggatcttactataaaccactaaatgtccacttaaaaaacaagtactataaccagatattttctgtgctaattgtgagcactcaattttgttctatcctgaacaacttgagcaaatcattccaagttcggtatcagacccttgtgtgaagttggtgtcata

SEQ ID NO: 4536 - DNA, 551 bp, Canis familiaris
  misc_feature (1)..(551): n = a or c or g or t
actaaatgnnncntnnnagtagtggggnnnnnnnnntatngnntagagtgcttgcataagcctgggagnntnacttagagctatnngnnataagaaaagacacatggctatatctnnnctaagatnnnaaggtgagtgtccattccnagcagacatgaaggtataaggaaactcccctgactcctgctttcctaaccttacccagcctcacccacccatcttacggcctacaagtatggagacatgttagtgcaaggtgctggctcctgcttttctcattttgtcaagagacagttctaggtaatcatttcagaagtccctcacagagagaaaaaagtaatatttgtatgtttatttttgaataacccaaatacaattttacgttgtattcagcacaattggagttcaggtctttaattttagaacataaagtgcctgctgttttaagcattgacttgtataaaaagaattgcatgtctcattccagtaagttaatgggttttctcattttcnnnnacatggcttttaatcatgtaaagtgaaacattagt

SEQ ID NO: 4537 - DNA, 223 bp, Canis familiaris
  misc_feature (1)..(223): n = a or c or g or t
aagccgnnaacccaggtcatcgtgctgtccacgcgactcctgaagccgcttaacattcntgagctgttatttgccaccgaccggctgcatccagaccttggcttctgagcgatgctgctgctgcgatgacacctgcccgtggtggaaacacctgtattgccgcctgtcgcncttcacgacccgcctccgaaaccaacgtcctctgcccattgtggggaggacg

SEQ ID NO: 4538 - DNA, 588 bp, Canis familiaris
  misc_feature (1)..(579): n = a or c or g or t
aggttattnctgacagacaaacgccaaaaaaagatganngtcntgtatccaaagcaatggagtacatgttcggctggtagtatagtaagaaccgagaactcacctaccgtggannaggctgctacactaaaacagagtcagcagagtaccgccaacttcctgtggttagttatataaccactcttggcggtattggaaagctggctcatactttccttagaagcctttttctttaaggatacagcatatttgtagctcgcactttaaaagatgcttgagacacgttttaaagaaaaaaaaatccctgtaaataggatttggtgctttctgtgataattgcatgcttaagcacaaaaaactcagcattgattactgtaaaatatctaattgaatttgtcgtgaggctttgtagtcttcaggagttaatgggctgaatttcatgaagggtaacttgtacagctccttctgacaagacacaaagattatacttaacaatttgaattatgatcttttaatttaatattttaattatcttgtttatatatgtcctattgtggattgtcatccttcagtattctaaaaccaaaa

SEQ ID NO: 4539 - DNA, 572 bp, Canis familiaris
aggccctccatttccttcccttctctacaaaatgacggggtagaccagatggtcccccgctccttgcagcaacatcctggcattctctgatttccctggaccttgatgactaattttttttctccacaaactaaacaaatgcacagtgatttttgtttaaagactctccacctcgcattcaaaataatgccagactccctggaagtggaattttagccaggggatttccctttcccctttgcattcttgagctaaaattacactgggagtcggggttggtgacaagggacaaagaacaaagctttagtggcttgatttctcctgcagccagggagcacaacactgcaaggtagtccccaagctctgcagatgacagacaccagtggcaaggcccagtgatgttaggtttgctggaagacgtgatggtatgtcaggtccatcacatcacgatcttgatgtctgactgcagtagatgggagagttgggctgccatctcgtctttaccatctctttttcttttcaaatttaagaatgactgtaagcatcccataatagctatgtttttcagatta

SEQ ID NO: 4540 - DNA, 298 bp, Canis familiaris
  misc_feature (1)..(298): n = a or c or g or t
gnnnggggacctggnngggctggtggggaannnaggccannngccannnctgtgaagnnnnnagtgacaacagggaggggcaccacatgtctcccgaagaaggcccagctctccatcctgaaggtttgggaagactcctcccaccctctcccccgcccatcaccttctatcctcatccccagagcccagcaccctctgcccacttctcgcctcatccctgcaccccctccaccctcaccccaagcaagaccacctttcttcacagtcactatttattctttgttccttctttttgtaa

SEQ ID NO: 4541 - DNA, 588 bp, Canis familiaris
  misc_feature (1)..(588): n = a or c or g or t
tagcctttaagagttcactttggatcatcttatcattccagttctctanagtgtttatcacagctacagttgcaatgatttaatcttgagctggtgttaactttggccctttcttcagtagagtttgtaataagaaaggcagttgaacattgagggcaggtcaagagatccagacaagtattaatttcagagcccacaccacttcaatattatttctgcttacctaagttatcttttccctttctctaggcagctagggaacttgagaatgagaataaaaggatccttgaagtttcctcccagtttagcattaggtggaagtggatggagcaatctcagtatcctagcaggagaggaagccaaataaaacctgtgtgaatgatggaggtccagaccgccgggacagcagtgacaaagtgtgtttgtttccnnnnnntttggactcctagtagcagtgtgctgtattgccgatggggtccttatgtaccggaagcttctatttaatccaagtggtccttatcagaaacgtacgattcatgacaaaatataaaggttttgtcattnnntattactttttagttgatccta

SEQ ID NO: 4542 - DNA, 272 bp, Canis familiaris
  misc_feature (1)..(272): n = a or c or g or t
aggnnnnntnnaaatagagnnnntgtaagnngtctgctccccnnntgnnnnnnnnccannncncnnnnctcnannnnnngagtaacncnaatgtgctatttatttcatagctcctctgnagtaaggagttcagatccatctgatagagaagnnntctagcannnntattgttttagggaanaantggtttgaacccatgtggtgatattgcattagtttccctttcnntgtnnnnngnttcttattctnnnanngttatatttcccagaaat

SEQ ID NO: 4543 - DNA, 528 bp, Canis familiaris
  misc_feature (1)..(528): n = a or c or g or t
cccaaactnntctatcaggttcantggtacataaatatctaggaaatattttttccagnngacaatttggtggtgctattgtgcagtaaataatattactcttgccagaggagaaattatattaacttccctgctaacatcctttcctagtaatttgctctttgcaaattaaaaaccaaccgagaggaaggaaaacattgtagatatctatttatnnnnnaagtttacttttcatgaacttagctgcaggattctggcattgtgcatgccatcttccatcagatctgacttctagggatgaggactccaacatgtgcacagactcctaggtcctgtgtgatctgctacggggtggagagaataatatgcagcttggaatgctatctgagatgtatgatactcgattcattcacttgattacttcgatctagttgcagcgcaactgtatatattgtataacctaaatcaattcttattttcgttgtctttaatgcagtgatttataactagagcatgttcaataagttg

SEQ ID NO: 4544 - DNA, 554 bp, Canis familiaris
  misc_feature (1)..(554): n = a or c or g or t
tgantcatctctgtgtgtaaaacatnnactctttatcattgagtgaatatncatgtacannnnanatgaaaacttgaanttncaaaagattaatgaccagannnaagtttttattaannnaaattccccttaaattgtatattttgatatatttggttttttctacctcaaaggcttaagttttgagatgtaaccagagttgnactacattttatgtaagagctattgctgagaagtctagatattgtggtttttgttgcaatagaattagtttagatgcactggataaatcttatttaaaggaagcctatttgttaagtcactaccttttaacttattgcttatataattcccaagttttgtcctgagttttacttaaaactaggttcatacctgtaggtgtcttgtgttctttgcccttgcattgtactactgtactaatatattctgtagttaaagaaattagtgttacgcattatttctttaagtgctggataaattggacagacatgnnngacaaaaatatatccttcantgccttgaaccattaattg

SEQ ID NO: 4545 - DNA, 215 bp, Canis familiaris
  misc_feature (1)..(215): n = a or c or g or t
atttcnnnnnnngnnnnnnnnnnnnnnnnnnnntctgtttccannntccagcatnnnnnnaggtnnnncnaggnnntttatnnatcnnnncnnnannttcaacccannnnnnnnnnnannnnnntnnnnnnnnnnngtcatcnngcaggtatggcacacaagacattgtatgtgaaaganagtcctcnnnnagtggctgnnnnnngacttcatct

SEQ ID NO: 4546 - DNA, 563 bp, Canis familiaris
  misc_feature (1)..(563): n = a or c or g or t
acaagtgatanncccaaagcaaaagtattgaaagtagaagaaatcagtgatacttcaacccagccacctcaagtcaagttgaaacagggtgtatgtcagtctttccgtgagaagattcctgtagacatagacagaacacctgctcagtttgtcactgctgctcttcctccagttcctgctaactccttccagcttgaatctgatttcagacaactgaaaaattctccagatatgctgtatcagtatttgaagcaaattgagccatccatgtatcctaagttgtttcagaaaaatctagatccagatgtattcaaccaaatcattaaaattctgcatgacttttacattgagaaagaagagccatcactcatctttgaaatcttacaaaaactttctgaactaaaaaggtttgatatggcagtgatgtttatgtcagaacctgagaaaaaaattgcacatgtattgttcaatcacatagacaaatcaggattgaaggataaatctattgaagaactcaagaaaagatatggtggttgattttcatttttactgcgaaattactg

SEQ ID NO: 4547 - DNA, 215 bp, Canis familiaris
  misc_feature (1)..(215): n = a or c or g or t
ttaattaatttatccccattctacacaggagtctgatttatccatctatatctcaaacagctggaaattgagctccatgtgtacatgnnnagaaatagatggactgaaatagatgcttaacagactggatggctcataatcccaggatcctgggatagagccccacattgggctccttgctcagcagggagactgcatctccctgtcccnctgcc

SEQ ID NO: 4548 - DNA, 560 bp, Canis familiaris
  misc_feature (1)..(560): n = a or c or g or t
gnnggtccacccacgngnctgcccgctatgcaccctccgcccgaacaggtgcnagcactcgcatcatgcttcctgagaatggccactccttgatggactccaccctttagccgacctgggacttcagtggggtgctgcaaatgccagattatggcctccgaccactggtgaatgcacctggctctacctaagctgcaggacagaccttcagtctgctatggcacaactccactgccagcctgccccagggcctgggggagtggggtcatctcccaatgcccaggagagagtcagaagggattcaggaatctgcccttcaatcatctcaggttgtgggggtttttaaccgacattttctatttttaccactcatccctggtaaaccctgtggnctacttccctgtctgtggtggtgtgggtgtttaagatgggagagatgagagccctctcaggccactctgctcagtgcgacagagtgacaaggatggaccatggatgcgctatctgcctgaatctgattcttcaggggtgcagactgaggggtgctgagcatgagctgg

SEQ ID NO: 4549 - DNA, 140 bp, Canis familiaris
  misc_feature (1)..(140): n = a or c or g or t
agctatccagtggtcctggtgatggcccctgagtctgtggcctctcaggncaacccggccnngcaatgttntctgtcctgtcgnnntcccctccccnnnnctccccctctggtggcctggctcctacnnnnnngtggccc

SEQ ID NO: 4550 - DNA, 605 bp, Canis familiaris
  misc_feature (1)..(605): n = a or c or g or t
actacactgtatgagtatgtgtactgcatgtttacataatacagtnnaantttgaagnattattttaaaaactatgtttatgtataatacctaacaagctgtaaatattgtatactattgatttttaattttatataagcgatttttttatttcccaattcatgtacaaatctcactgtgtatatagcataatttcctggagaacacaaattttgcagtgaactttaattattttaattgtggtaagcatcaggttagccttagggatgttggtctttaagttatttttcaccactcattttcttcaaagggcagcaataaacatatgcaagttatttttgactatagaaagttggtctgcaaacacaagatctaggttgcaattcattgctttaaagaaaagatgcacaattagtatcatccattgtctcaccacaggaccgtttctgaggtccgtgtgtctctctcctctttgtaatatacagggtgaactctctactgacacacacaagacaactgttaacagtgaatccagcacttaaatgtcatttcacagaatttattggattaaaaatttgtaatatacagtattttaataaaatttc

SEQ ID NO: 4551 - DNA, 537 bp, Canis familiaris
  misc_feature (1)..(537): n = a or c or g or t
aaaaacccanctnnngaaagtttttcttttaaaaagcaaagttcagcactgtgacttgaacccctccatcttttcgtgcacagaaaaccttaagccataaataaaaataataanaaaaaggatggagaagataactttgaaaattagggacagagatacccaacaacaggaacttttcaaaacaggtctaaaagcagaaagatttcaaaagcagttttcttccttgaaaggaatttaatgagccagaactaaaatttaaatgtagtactcttataaccaaggaaacattgcaattgattcctgaagctttctaatttagatggctaaatgctgccatggacttaagccttaaaggggccagtattaatcctgagcattaacaagttttctttttcttttctttaaaaaattatttgttgaaaattctttctcctagactcctgcctttgaacggctttaaaacttaatacactttttaaaaagtgcaatgggatgagattatgctactttattaaaagcatgttttctgtttcttag

SEQ ID NO: 4552 - DNA, 667 bp, Canis familiaris
  misc_feature (1)..(667): n = a or c or g or t
actaagaagcctagcaatacaagctattagagaatggggatgggtacacttctagatgtgaagaggttaaatttgtgctttgagtagctcagggtattggtggtgttatctaaaactgcctgtagtgtatttttaggcatgggcgagagtaactgtgcttnnaatagaaaagccctgctgcaccgagacacgatgctggcggcggcggcggtgtacagaggtaagggagctggtcatcctttcaaccctcccctcctaaaggaacacatgccctgctgtgtttatcccttaaaattaccagtacttcctttcctggtaaggcaccatcagatttcttgtccttcttttcagaacacagatcctgtagttccatatcctttttccaaacagctcttaactgtattcctgttagcttctcggcattaggatttttcatgtgagacattctcagagtcctctgagtatcccatttctctttggaggatatgactttttttgagcagattttttctttccgtttccatcttttctagattgtaaccattatttgtctttatagaaatgtacagaaatgaggatggttcagtacctgccacatatcaaatctattacatgataggatggaaataccatgattcacaggcaagaccagctgaaagaggttcag

SEQ ID NO: 4553 - DNA, 401 bp, Canis familiaris
  misc_feature (1)..(401): n = a or c or g or t
gttgtgctnngccccggtgccacctgtgagtannnnnnnnntgccntgcggcacagtgctccctggcacccacggtgacnnnnnnnccggctctgctggtggtggtgagnnnnntcagagcctgtcccnnnnnaaaaggggggagaccagggatgnnnctctgccccccagtgagatctggcccccctactgccctcagtgtgttgacaaatcagtcgtggattgggccctctcgccctcccttggggatctaacaatggagagaattcccggtggatccgtatttgttggtaagaacagagctnnnaagctcaggtgacttagaagagatggttcgaggactcagcnnngcccagccgtgaccgcaggtgtcctcccgaggagtgtcccccacaagctta

SEQ ID NO: 4554 - DNA, 626 bp, Canis familiaris
  misc_feature (1)..(626): n = a or c or g or t
ttatttgaatngnnctaccagnnatactaaaactgaatgacaatngtgtgaaagttaatgccttcataagatcaagtatacccctgttacacagctgacatatagtgtattacctttgaggctagtaaactataaagtttagactttgaatctctttacagggttatttatataatgtgacattattcagtactgacagactacataaagtagttttaaaatnnantgctgtttttattttaaaggttagcaatgagcaggaaatgtgatctgactgtgtttgtcctctgtacaaagcctgaantgcttgtgtttttttggctgacagccacggagggcaaagtttaaggctttcnnnnnngnactaactgttcttttcaanntactgtttgtttttctcaannnnnnntttgcttccgtaggaggcaaggtccttcacgtggagtagtgcaacctgtacatggattattacaataggacagacatttgtacttgcacagtttaaatcattnntaaatcatnnntaaattttgaacatgtgaattgtccaaaagaaatctttaatttttcagtaatttttactctttttgnncacatgttgatttannnnnnaatgctttgtttaa

SEQ ID NO: 4555 - DNA, 650 bp, Canis familiaris
  misc_feature (1)..(650): n = a or c or g or t
cagagcacttctgttacagtctggngacaatgtcccccatttttagnnagacatttctnntcttgcttgtcgtcagaatacctggttatccagccatggtaccccctttgacttttagggggagaactactgagaaaatacctatgctcggaggcacttttggtcctacctttagtcaaagtaattccaactttagccttccgtttggggcttgtgggggacagaagtgaaggagcactagctcttcatattttcctagtgccagctgcagagctcagcaattaagaagcagatgcttccaagaatggaacttactctgctgggaagaggctgtccctgtagttatgtcaaacaaacctaacctcattcctcctcctgcaagcaggaggtctcacaccctgggatatgtgtgtgtcaaatgagtggggctgatgaggctggtcagaaatcaagatttgagaagttacactgtggggagtagcagagagttcttcctcaatgcgtcatcagctgaccccttcctgactgaccgctagcctggccaaccccagctctgggtcagttttccactcattttggaactggtggatgccccctgctgcccatagtctcccctttctccttacccatttgctcctgtgaacccaatc

SEQ ID NO: 4556 - DNA, 357 bp, Canis familiaris
  misc_feature (1)..(357): n = a or c or g or t
ccccccccccccccccgccccagccagcccagtctctcccttacctgtacccaagcctcgattttcggggctcacccccacgatactggtaggggtccaggccatgctccccttgggaaaagaaacaagtgcccagtcaacacccccctctctgcccccaagggatcgaatatgcaaagggagttctgctgggaacccccatccaatcaattgctgtgcccgtgggggtagtggggtttgtgtagacaccatttatcactcctccttaagttacagctggactttcccatcttccaaattcaatcagacccatctgnnnncacccactccccttcnnntgtttcacgcaagttttat

SEQ ID NO: 4557 - DNA, 601 bp, Canis familiaris
  misc_feature (1)..(601): n = a or c or g or t
gntactacttaaatnnagaactctcaaccagatctgttgatgtctgatgatgcttttctctttatactcagcaaggatttgtcagatatgtctcctcagttcactttgttgggcactcttgctatttcattataaataccagggtcatccaaaggatgaggagctaattttgtgcagtgagatctcctttctggacattgggctaatccattattttgggtgaaccctaaagaaaatcattcttcacaattctttatgtggtttctggaatttgtggcaattatacttatctgtttacacctttgtttcttacacatatagatataaatgtgtattggctgaaccatgtgaaattgccatttttgtaagtcaaaatgaccatcaatttcagatttaataatgtatttcatagacaagcataaaagtattgagaaaacaacatctatatatacaaaagtccacatttttaaaaattaaaatttaaaaatggccatgttctaatcttgctgcctttctttatatttgtaactgtttaaaaatatcatattgacatctcccattgtgaattttgttatagattaatggcttatcacagatttaa

SEQ ID NO: 4558 - DNA, 447 bp, Canis familiaris
cctcattcgcctcaaggtgatggccatctacttttccaacctgaagattctgatacccctatacagaacagggtgcagttgtgccaatttggagtcaagccatcaaaccaaatgcagtttaatttagataaacacctgttgatattcaaagagcaataaaacattccagggacattagaccttggtgaaatgccaaacggaaaatggtgctttaaaaggcagtctcttacaatgtaaggaataaaataaaacctcattagcttggaattcctgatcattcaggttgggtattctagacaagactaagaggaggcagttcaaactatttaaaaggaaaattttttccttaagcactttggaagtacctactccccttaaatgtaagttacatatctattcattaaaggaagtctaagcacttgtacttggcaagaatgctgacagtag

SEQ ID NO: 4559 - DNA, 595 bp, Canis familiaris
  misc_feature (1)..(595): n = a or c or g or t
ctttacattttcaagaccagaaattgtttcttacagattattgaggcangagttttatctgaatttcataggtaantgnnntagttatacagctttcagctatgaaaaaattaatatctttttttagtgaatgcttgtcttctctgtgtgaaggggggtaaagtgagactcatcagattcatttatgtgcatcagagaaaccacttctaacctagtagggaagagttttatcaggtatctcccacatttgaagctgtatctgactcacctatggtccagggttgattaaaattgtgcacatatagaggttttcctgcattctcccagcgtgcagagatgccgacaaaatcttataatccagatgagaaatgattcattttaatattggtgtcagcattttaatttattctaacgtaagttgtgtggaaaagcacttgtcttggtatatttaagtattagagaagtcagctagtgttgttcttcttttttctctgcttttggccttgttagcaagagataaagatggatggtaatgagattaatcatggttttgatgttggttttgattattctgtatttagttgtatcattctta

SEQ ID NO: 4560 - DNA, 611 bp, Canis familiaris
  misc_feature (1)..(611): n = a or c or g or t
tgaaagaggaataaaaaaataantgtcantntnnctgccagatgnctattgtaaaagattgtcaagtgagcctgcttagatcaatggtattgaggttcctggctgactccgttgnaagagcatgtgtgactcttgatctcggggttgtgagttcgagccctatgttgggcgtgaaggctacttaaaaaaaaaaaaaaagattgttcctaaattccacagattattgaggttgaaattaacgtagaagtcactgatgatctaaggcccagagaaactacatatgatcctgtccaaggtcatctaatgaatttatggaagagttgggtgatttaacatggccctttaaaaaatgccttggaagacgtgtccaccagctgctagatcagatacacgtttttcttcatcagctgaagcaccaacatcctggtcaagcatggatcggactctctgcattcccagagcacatctggcagtttcagatgaaattctttggatggcaaactctctctgagaatgtaatagatattcctctggatcggatcaaagtgatggactttgggaggactcttgcatccttgtgtatcacctgtaactaggagtcacaaaagccc

SEQ ID NO: 4561 - DNA, 657 bp, Canis familiaris
  misc_feature (1)..(657): n = a or c or g or t
atgtgagtgccagtgnctganntcaggtnccctagatgtagacactgagatgaggattcatgtgtaagtcatnnacaaaggaaatgccccaggggagaggggtgagagaattggggnnggcagggccagggaaataaatctggaaagaataagagcctaagtaactgtaaccaggaaatatagtgcctgtttctccatagttaacttacttattttctgagtatctgagcccctgacgcccatcacacccctcagcccatctgaaaaagcagagctgaatgctgctgtgagggcaagtgggaagggtggaggcctggcctgggcccatgtaggcagggataagagcaccatccccttggggagggggagtagggatgctctgggggaggcactgagtcaacaagcagcacagtggtgaggggcggcctccgcctgccaccaggatgacagcagctggaggtgaaggctgctgggagggaggccaggcctccgagggagctgccgccctcctggtgtggctcagctcaccccgtatctcctgccttcctccctgctgcctccgtgggccttgggccagggaagggcctcggaggctatgagtgtgccgtgccagggggtgttttaacaacatccaggctgccaagagcacattattct

SEQ ID NO: 4562 - DNA, 594 bp, Canis familiaris
  misc_feature (1)..(594): n = a or c or g or t
attatattgagcccnannacatacnactttagagacctagataangaaaaagcagcaaaagaccccaagcaggtgtggtcaganacnnnggangacatccangagagataggtgctgtggaagcctcctggaccgtccttcaaagaggaggagaagaccanctatgttgttactagtgggagaatggaggagccagtgcagcgacacttcttctccaagcatgacaaccgtacgtctttcgacaaaggcccctactgtctgctgcagggaatcggaaggcggaaggacctagaccgcctgtggcaacggcacaccttcctgcgctgggcaccctgtgagctggagttgagccagcagcggcctcttgaatcctcctaccaggccaatttccagtcaggcccaggagtcagtgacttccctcagcgtcttgtccactttgtgcagatacagcctccccgtaccagcaccacctaccagcagaacttctgccagccatcccggggtggctactgtggcaacaacatggggtcagtcaccgacacactgcctgacctcccagggatcccaagacccaagnnnnngcagcattacctt

SEQ ID NO: 4563 - DNA, 521 bp, Canis familiaris
  misc_feature (1)..(521): n = a or c or g or t
ctacagatcaactanatgcaagagagccagtcaagcaaaacaataccttttttagaaacaaatgttcatacagtttattggaacttttccattctacaagtctggtaatatcaaagttttgtcacagggttgaagtcacctatctctagcaattttagactaggaggacttttgaatatcccatttgaaacacaggaagatgacctcgtattaccagaattgggacttgcttggcaaaacctctggttgaggctagccccaagctatggaaactaaaactgtgagcaaatgggatagatccagcagaactttgcaatcacctacaccaccatgagcatnnnnntgcctgaagatacctcctggggaaatgcnnnggatctccatgaaagctctgttggactctcctttcaaatccaacattgaggggaatcaggcctgcattagaggtgaagctgagtgatgtcaactgaaagccaatctgcatgttagttctggaatccctacccttgtttagaaaaatg

SEQ ID NO: 4564 - DNA, 644 bp, Canis familiaris
  misc_feature (1)..(644): n = a or c or g or t
tgaatgtgctgctctttgccnctnnattgctgtttcttcttctcacacaatttggcttccgtnnagnccttcccaagttgggcatctgtgctgttcttcaggtggtgctggggctacccttcctgctnnagaaccccattggctacctatcccgctcctttgaccttggccgccagtttctcttccgctggacagtgaactggcgcttcctccctgaggccctcttcttgcatcgtgccttccacgtggcactgttggccgcccacctcaccctgctctttctctttgccttctgcaagtggcacagatcatctctactctcttcacctccaacttcattggcatctgcttcagccgctccctccactaccagttctacgtctggtatttccacacactgccttacctcctgtgggccacgcctgcacgctggcttacacatctgctcaggttgctggtgctggggctcatcgagctctcctggaacacatacccatccacgtcctgcagctctgctgccctgcacatatgccatgctatcatcctgctgcagctctggctgggcccccagcctttccccaagagcgtccagcacagcaagaaagcccnnnnaggtccacttcccnnnnnntccagtccactct

SEQ ID NO: 4565 - DNA, 530 bp, Canis familiaris
tccctccctttctccaagccagatccagtccaacaaccccttcccaaacctcagcccaaagacctctgctctcccctcccatccatgcccgttttgctctgtgcttgtgttcagtctttctgccacttgctgggagggaaggcaagggaatggtgatgtcctgggcctccggagctcagctctgcttcatgcttggccagagggcgatgtagccaagagtgaggcggccaacagctaccagcagcttcctgccttgttccctcctgtgccctccaggccctcattccaaggatttgtctctccctctccaccttctgtcctgaagctgacccaagaacttcccactaggaaatgcgtagtgggagtccgggggcagggactagggtcctctggggctcgcccggcctaggagagcctgggtaggattggttgtgaaggtgctgagctcacggccccagactcaacggcctccacctcctttctgccctcacagcctcctggctctggcccaaaaagtgattcatttgtaa

SEQ ID NO: 4566 - DNA, 477 bp, Canis familiaris
  misc_feature (1)..(477): n = a or c or g or t
gcagatggacatgctgaaatatngacagattggaatgatatgtccaagtttttccaatatggatnnagatgtaccactaatgagaattcctattcaaatcataccctgatgggaaactggaaccaggaaagatatgacctgaggaatatcgtgcagcccaaacccttgccttcccagtttggacactattttgaaacaacgtatgacatgagctataacaacaaaaggccactttcaactcataggtttaagagagagcctcactggtttccaggacatcagcctgagctggatcctcctcgatacaaatgcacagaaaagtcaacttatatggctagctactcagagcctccacttgggcattactctgcctgtgtgtggaatcctagtaactgccaagaggtccaggattctaagaaaaaataagaagcttcatttttccagagtaaattgtaggagggaacacnnnnnaagcac

SEQ ID NO: 4567 - DNA, 487 bp, Canis familiaris
  misc_feature (1)..(487): n = a or c or g or t
ctnnatcatgatgtcnagaccaagaatcagnngctcctnnatgccttgaaaaacaagcaatgnnaacagtgaactgtgtcaatatnngctgnnnnctgtcgttgcctttgaaagatttctatttttctcagtagaaaaaaaaaaacaacaacaaatcttacaatatcaaatcttgagcattcagaaagatttactcttcacacgatgtaggtacgagagctcggctctcgctgatggaagttccggggctgcgcggagaggagcagacaggtgattgagagcctgcaagcttggtacggccacaggagacggaatgtatcgagtgttggcagtttggaagcagtttattcatacatctctgtgaaagggtatttacagacaagttgtgtgaagatgtaaaaaagagattttataagtgcaatatttatagtgatatttgttttaccttccagcgtttgctctggggtannacagtcntctcttgcat

SEQ ID NO: 4568 - DNA, 616 bp, Canis familiaris
  misc_feature (1)..(616): n = a or c or g or t
gcatccacatcttnnctgagtttaagaggnnngcagaagctgtatttgggcatcccaccaagtggtccagctcngtnnnnnannagcttgggactattgcagctggattnnctaaggaagagctccaaatgctggacaaggatctgatgccatatttccagccatcagcaatcaaatgccttnctgatgagatattcaaagagctgtccgcggagcagatcgcgtggctgggccccgagaacgcggcggcggtgaccccgggtcagcggcggcagctcagcctggtgcagctgcagagcctccggcgggcgctagatggcgccaacactcgctcctggccggacacgcccgcgagcgcccggcccacctgggccccttcctcgggttctcctcctggagcccctggcacctggggtctttggcttggctgtcctctgctggttatcgtgcctgagaccatgtggtggtatcatcatcatcgtcatcgtcatcatcatcatcatcatcacctggtggtagntactatcctttggggagtaggtcatctctaccctgctcatatttagaaaatttttcctccagacaccctcaaattagtattgtcaggattaggggc

SEQ ID NO: 4569 - DNA, 538 bp, Canis familiaris
  misc_feature (1)..(538): n = a or c or g or t
ttttgttcagttttgcctcnagnnnnngcagaaagggttttttcagctgttaaatcctaaaaatcaatataatttatttatgtaaaaaaaaaaatcactcaatcgatatatttttgaaccttttaagtactaattttctttttatcaagtagaaaaaaaaaatgtatttgccctaaatccttaaaatacaaatgctataaaaattcatgtatcttgaaagccttactgcaaatgagtattatagacatccagcagagcctgggtttccctttgttgttgtccgttgttgttgttttgtatggaaaagctgctctccccaggttccacttagaagctccagtaggtcacagggttcaatatggatttgatttaaaaacccaccagcatgctaaatcccttgttatatcttaccaaacctgtatgnnnctctctgggtgtttaggcttatatttgactgctattgtgtccctgtttgcaaaatgaaaatgacactctgtggattatttgctctgtaaggcataagtgcttcttatgatta

SEQ ID NO: 4570 - DNA, 540 bp, Canis familiaris
  misc_feature (1)..(540): n = a or c or g or t
tcagnnntacaaacagtngatctcaatgaagaaggagatgccacanntgaacccacagangtaaaactcaaaagagaagaatacaaaccaccgagaacatccctgatggcgtttctcagacaaatgacatcggactcagcnnagaaggctgtcacatgcccagagccnnagccagcaggagcgggccagaagggcaaagaaggctcgtccaaggacaagaaggtggtggctgaagggaacaagcagaagagcaccaagcnnnaagccaaagagccggtccagtgcgtggaaccagccgtggtggaggcgaactcactgcagaatggggacaggtcccaaaagaaacaggagaagcggcgacagtccctcgggggcttctttaagggcctgggaccaaagcggatgttggacgctcaagtgcaaacagaccctgtatccatcggaccagttggcaaatccaagtaaacaaatcactacagttcccaccaagttgtcctgccagcaagatgccttnnncctgccccttctccnnnnngaacc

SEQ ID NO: 4571 - DNA, 659 bp, Canis familiaris
  misc_feature (1)..(659): n = a or c or g or t
ttnnaaaatacttttatttacatatgattnacnngccatgtaantcatctgttaaagatatacaattcaatggatgttgtatatttacacagttgtnaaaccatcaccaaaatctaatttttcaacacttctctctctgtgactatcataaataaataaaaaaaataaataaataaaataaaattggaatatgggagtggttgcacagctctactaatttactagaaatcactgaattgtacactaaaatagggtgactttaggatatatatatatatatatatatatacacctactagctttgtataatatattagctatgtatttttgtatgtggtaaaaaataaagatgtaaccttcaggattgctgtgacaggtagaccttaattaagttcttggtatatatgggggctggtcaatgaattgctgttgttttaatttctgattcttccataatttcaacttcttacttactatgcaggacagttatcctaaaacaccaatcctgtacatgtattcaaaaagtgaatggggcacctgggtgccncagttagttaggcatctggatcttgattttgccacaggtcatgatcttggggttgtgacatcaagccctgcattaggctnnnnnntcaatggggannnngcttgggattcnc

SEQ ID NO: 4572 - DNA, 703 bp, Canis familiaris
  misc_feature (1)..(703): n = a or c or g or t
acgttaccaactcaaaacttnctgnatctcattgttcaagagtttttattgaagtttcattaagtagacatgattgattaaatcattggtcattggtgattgaactcaatctccagctcctcccctcactagaaaggaggggacactgaaagttccaaggcattaatcacacagtttggccattcctggaccagtccccatcctgaagctatctaggggctcccacctggagtcatttcattagcatatactttgatatgtttaaaagtggctccttatgaaccacaaaagacactcccaccactcaggacattccaagggtttaaagagatccagtgccaggaactgagggcaaagaccaaatatgtatttttatagtacctcagtttaacaccactaatttcagttacaaagctaggaagttagacagtgaaacaaactttcctaaacaatgtgcccaaaactctcccccaaatattcctcaaagttaccttcccaggaagctttctcaaaatctactttagaaattgttttcagttccttggcttgaggtataatgatccttcaatttttgctttgctatggtaaaaataaggaacaaattacgaagaatattaaaaaagactttttatagcgtgttcatatgttattatcatgaaaattgaagttgtgtgtgatgaattactatttggattacatatat

SEQ ID NO: 4573 - DNA, 547 bp, Canis familiaris
  misc_feature (1)..(547): n = a or c or g or t
ctccatgcacgtcccccacacntgtcntcccagtgggtgaggtggctctnnngaggtggtggcannnnnntccaagggnnnttgcttatttaattgtaccttcagcccagagggcaatgcctggctttgccatgtgcctcttctccaaggacatagcagagttgatctctggaggggccagagagtgaggtttgtgactcagccaattcccaggtctctgttccgtaggactgtttagccagagagcatctgtcagtgggaaatgcaggccctacacacgtacaactggtctcccagcatttgtcagagccttgtctctgaactggagtatcctgcttaaagccagggctagggtccccttcacacccccactctgcaagtcacctccctgggtcactttgtggggctgggcccaaagggcacagacatgagctcattcaggccccagcactaccctgacaggtctgggactgtgtggctgccctagtggggagcctagggttggggttagaggcctgtgccaggatggtcccagctgttcccgcag

SEQ ID NO: 4574 - DNA, 292 bp, Canis familiaris
  misc_feature (1)..(292): n = a or c or g or t
gaganngatcctggcaagtacgtgtgcaacggcacgaactcagagggnnncagnnaggccgtcatcgtgcnnngcgtgcgaaaccnnntngccgccctctggcccttcctgggcatcgtggccgaagtcctggtgnnggtcaccgtcatcttcatctatgagaagcggcggaagccggatgaggtcctggatgacgaggannnnnncnnnnnnncnnngaagagcagtgggcanntcaacgacaaaggcaagaacgttcncnnnnngaacgccaannnaggcctcccgnnnc

SEQ ID NO: 4575 - DNA, 524 bp, Canis familiaris
  misc_feature (1)..(524): n = a or c or g or t
acatgagcccacccagnccatacagactgatnngnngagcccccggtggccctgaccagnncnnnannctcccctaaggatgagcgactctctcagagcaggatgtggcctcctgggtcctgggtgtgccccacagatccaggtcactgacctaggacagtcgtggggtataataggacaccccagggcaggggcagcaggggcaggctcctccacatgctgggtctccagcagtcattcacctggcaccactgggccagaggctgggattcagctgacctgcagggacccagcacnnnnnctnctaagctgcagggacccacccacggacccgtaagctgcaggtccaggtcaggtctactgtcctcagaactgcctctcaggccccaacttcaggaaatgtgcccacacttggagtctgcccaggctccaagctaggggactctagcatctgcacccccatgtgagttcgggttttccctaaaggacaggatggtcccnnnnnntcagagaaggtgcacacc

SEQ ID NO: 4576 - DNA, 426 bp, Canis familiaris
  misc_feature (1)..(426): n = a or c or g or t
cctcaaaatgcaactctgccaaggactccgtgaataatattataagtattaaatgtctatttgtaaagtttattgagtcagactggttgtctttaagcacctaatgcaatgctaactgaaagaggaagtgcccaagtgttaactgatgcgttgagatttaattatggattgatcagtgtttcttgaaagctgccagagtttctatcatcagctttttgaatgtggttgaataaatacttatgttgagtatcatgtgagaaagagtatttgcagtgtttcctgcccttgtaattctggtttatttctcgtaataagctagactatcatnnnnnatgggagttataagtnnnntattataaaagtgccnnnnncaattnnagcttaggatnnnnngnnannntntctctaaaannnnnaagtgcnnnn

SEQ ID NO: 4577 - DNA, 338 bp, Canis familiaris
  misc_feature (1)..(338): n = a or c or g or t
agcgccaacaaaaataagaaaannaaggataaagagtattacgtctgattccaagatcttaaaaagacccttgtatagaaatagtcttcattttannngagacataatataaacttatttactttcctttttnngaagcacatacaaaagaagacagggaatgcaatcaggaaggaaagactgtttttaaaaaataaaaacaagtatctcatgctcttgtttctccaaaaagaaagaaaacaaaaaacaaaaaacaaaaaaaacaggggccaataaattccctaacatccacagtgttttcatttactctgcctgtctttatgttnnnggaacattcc

SEQ ID NO: 4578 - DNA, 146 bp, Canis familiaris
  misc_feature (1)..(146): n = a or c or g or t
tcctgtgtgccatccacctcagccctcccactgatatcagggaagcctgggattctgtccctgccccnnnncctctgggnnccaggagagcccttatccccacagannnttaagcgactactnnnnnnnagtattttttcgactgt

SEQ ID NO: 4579 - DNA, 149 bp, Canis familiaris
  misc_feature (1)..(149): n = a or c or g or t
agatggagtttggctgcgctctttcatgtctgatagaaaaccaaaccgaatttccatggaccacagggttaagggcttttcagagcgagttcactcccctcttttggagtgaggatactgtaggccactttttttttttttttannncg

SEQ ID NO: 4580 - DNA, 569 bp, Canis familiaris
  misc_feature (1)..(569): n = a or c or g or t
acacatctgcttttgcttttccaaccctcagcatctgtcgggagtgggagaggacagaaaaggatttaagtaagcagtctaatttattttctagacntgtgtcttaacactaactggctagggaggacaaagaactatcgcctctggaaaaaagggattttccaggtacttctttccttaacaccctattccagtcatgttcgctatatcctgaccagtagaactagcagtcaaactcccaaggtggaggatcaaagccgttgtttctcagcaaacaggtaaagaatagtgcatagacagcacaagaggttcttactcagactctcaagttgggagtcctgattttgtgtcattcccttctggtaagttttcccgctctggaaaaataccaagagataaactccgtaagattcaaataggaaagtcctaaagtatgtgttctaaagtgaggtaaggttaagaatggagttgggctggcagaggttggtttcattgaataacttttcttcatcatgtaccactttgatgatcttttcccttggtccctgggagttagggccaagtaatat

SEQ ID NO: 4581 - DNA, 623 bp, Canis familiaris
  misc_feature (1)..(623): n = a or c or g or t
cacatctagatgtgaatggtgtaacggtcccaagtttggtgnnggttttcaagtcatccgatcctatgatgtttnnggagcaacgcaccttcctgttttgtttcatgtctgttcttcttcctgctacagaaaagtgaaagaaagcagtttttttttcagagaatattcctagtggaataatagtctaaattctgagttgataagtcatgtgatcatttaggagtcccgctttaaaagccattaaggtttagggacatagtaattcatttctttgagagtataggttctattttctgtaactcttctttgtaatcccagccagttctggaaaaagtttgtgactgtttaggaattgttgcagaataattacttaagaaggaatagttaaaggtctttggatttcagcaaagatctagaaaatttcattcagagcatgtttaccagaaaacgagaaatgatggaaaactttgcagaagagggtttatcttacaactggcattttcgtgcacccattccaagtagtaagctagctttttaaagtcatcagtggggtttgtgccacatatggactcgaagtcaagtatccaagttctcttggtgaatttcggtggaaatctgtccag

SEQ ID NO: 4582 - DNA, 344 bp, Canis familiaris
cccccactcccccccacccccgggccacagagggagggagagcctgtgtccactgtgttgcatttgctgatttgagtggctcagctcactggagctcaaccttttttcttttcctcgagtcatttgctgtgcttccctgcaatattccacactactggggggttggggtaccagctgctgtgtggggtctggaaacccgcgactcatggctgttcagagtgtgttcatgtgtgtgtgtgcgtgtgtacatacatgtatgtaaccgaggtgtcgtgtagaatgtcctttggtagctctgggttggttgacagatggttttgtgatacttaacccccttgccttgg

SEQ ID NO: 4583 - DNA, 595 bp, Canis familiaris
atgaacaggaattaaattttaaagtgctgcttgaagatggctgtgctaactaatgtcattgcaagagcaatactttgtcctgtttattgatggcaggattactaaaatttctaaaatgaagacatttctttagccttagttacttaaaaatatacatttaaaaaaggctataaaataaatcatgaactcagaggaactttcagattttgtttagaggcaaaataaatacaagtggaccatcagctgattataaataatttggtcaaaaaaatttattgtagtatttgttacaatgaattataaatgtcaagtattgttgaaaattattgtttttatgaaccagtaggtggtctgaaatagaagtgaggaaatcaattttctaagagggcctttttaaaaaaaatttgaaattcatataccataaaattcactcttttaaagtatataattcattagcttttagtatatttaaagtagtgcaaccattaccactctcattccagaatattttcatccccccaaaaagacactctgccaattagcagttattttccattcccttcaccccagtcccaagcaaccatcaatctatttt

SEQ ID NO: 4584 - DNA, 587 bp, Canis familiaris
  misc_feature (1)..(587): n = a or c or g or t
atttatcaggcatagcnnngaaatgttgaagatcttaagaggtatctggatttctgaatattcataattgtgttactggggatgagaatattggaagtttaaattctagccctagattttagaataaaattcactcagcacttgattgaagtaccaaaaaatgtttccnnnnnngtgatagttgtaagttatctcaaaatgtcttagactaggttaaggttctcagtgacatgagaattcactacaaaagtatttactatggagtataattctctcagctgtattttcagttttcctacccaataaagcatattgttttttaataactgtgtaaatgactaaacaaatgtaagagacaagtccatgtgatagttttaattaaaatgagtcctggaagttggattttgcatttgatatctgtttggagttttagagccactgtgttaaaaaaaaaaaaaaaatactatatgtagcaaggaaaaggtgctttttacttttaatccctttaatcaatatggcttttttccaaattggctaatggatcaaaatgaaacctgtnnnnnngaattcagttattgaccttgtta

SEQ ID NO: 4585 - DNA, 527 bp, Canis familiaris
  misc_feature (1)..(527): n = a or c or g or t
ccacccaatcgacntgcacnncgccaccaaaggnctccaaggctggccccggctccatctccaggtgtggtcgcaggacagcttcggccgctgccagctnnngggctacggcttttgccacgtgcccagcagcccgggcacccaccggctggactgccccacgtggcggcccctgggcagctggcgggagcagctggctcgggccttcgtgggtggcggccctcagctgctgcacggggatgccatctacagcggcgccgaccgctaccggctgcacacggcggccggaggcctggtccacctggagctggggctgctgctgcgccacttcgaccgctacggggtggagtgctgaccctgcctgcccgggagggggccgggggctctggacactgtcgggtctgaccccagccagtacggcagtggcttctgtccccactagcacctccagcccggtggccaccccctcagatccagtttccttgtctgtaaaatggggacagtgagtgtgcggggtggcgggggtc

SEQ ID NO: 4586 - DNA, 489 bp, Canis familiaris
  misc_feature (1)..(489): n = a or c or g or t
aaatgttaggctcagaattanngtgtttggggtgggttttttgcgtgggggcagnnagtggtcttttgattttgactttttgatttttgagcttttctgctctgagatatctaagatgaagtttatttgcagtactttgatttggcaggttttcttctacttttggtctgcctggaactgtttccatgatataaaaagcaagtgtaatattccattacattaccatgtggcttagggatttatttgttttgtttttaaatcaaccatattagctgggagtagactccctagaatctatcagtgaaaaattaacaatttaaaaatgctcttggaaattcaaattacagatttaaaaagtgcttaagagtgcttctttttataccagaagcattaaggtaatccagtgccaagtaccattcttgcagttactcttttatataactgaccagtgcttatttaataagaataagtagatacatataaataatt

SEQ ID NO: 4587 - DNA, 625 bp, Canis familiaris
  misc_feature (1)..(625): n = a or c or g or t
caaaaaggctaaagtcaagcaagaagggaaaagagaaactgngcccttgaaaaaaaatgtgcgggtgtaaaataaactcctaaatgtgtgcttgtcatccttttaggtttttgtttttgttttttaagttgcatttctttttcactataagctaagatttcagattgaggtttgtggtccagaacataccctcagcagaaatagtgactgatcggaaagtgcagttgttcaaggtctgtcatgctcaatctcttaaagctgtcatttgtttgatatgaatattaagcatgtagacctagtgcagcatgggagccactcaggaagtttatgcaattaataaactttcatgcataatttactatgaagtatgcagactttcagccacttctctacacttaacatttagttgtatatgtgaactctccttccttaattggggaatgtagcattatatagaatgttgttaaactcaattttaatccttcttgacattaactttttttttttttggtaaaccnnnnnnatctgcctttaagcagttgtctgtttttggttctttgaaactgtgatttttatttcatttgtacccagccattgtaagtattttgttttgtttcttggaaat

SEQ ID NO: 4588 - DNA, 667 bp, Canis familiaris
  misc_feature (1)..(667): n = a or c or g or t
gggacttgagcttttcacataagcaagagtctaaaagtgaactagaccagaagacagaaaagacaacttcaactcagcccagctgccgttccagcctttatgaccacagctgaaacagacccgggaaggtgttcatttcaattttctagacatacagtaacgagaaanncaataacaaaaaccacaaggatgattcttagagaactcttcctgcatgtcttcacttattctaagtctttgagatgacctcagtctccagctttccgactgcattagtcattaggttttttttaagagagatttttatttgcctcttacaccacagatattttatttaaaattattgagataatacctaaggtactgtgagatattcataataagggtgctcagcaaatgcaccatttcatgattatatatatattttttgctgtgaagtgtatgcattgcttcatttccaaacattagggagtaagccaaacacatgtattaattttcctctatttctatttttttgaccattcagttgtgtttgacttaaatagcagaatgagaaaagagagctctagccacactttggaggtactttttccaaagggcaatattacagcaacttgtaacttcttctggttcacttttctncttnncttcaaccctcccacnnnnn

SEQ ID NO: 4589 - DNA, 488 bp, Canis familiaris
  misc_feature (1)..(488): n = a or c or g or t
ctgtgcngcnacaacagcctattcctatgatggacagaaacaaaagagatgaactanntaaacttcaagttggatttattgattttgtttgtacttttgtatataaggagttctcacggtttcataaagaaatcacaccaatgctgaatggtcttcagaacaacagagtagaatggaaatccctagctgatgagtatgatgcaaagatgaaggtgcttgaagaggaggtgaaaaagcaggaagaaggaaacatgattgcaaaagccacagaagattcaggaggtggtgttgatgacaaaaagtccaaaacctgnnncatgttataatccaactggtctaaatttcaaatattgtttctnnnnncgaagaaaaaaagaagaaacaaaagagcttcagcaaacttcattcagcacaccatcaactgagtaagagtatctccagataggctacccttgtgaccaccaaaagaaaatatattgctagcctga

SEQ ID NO: 4590 - DNA, 503 bp, Canis familiaris
  misc_feature (1)..(503): n = a or c or g or t
ttcggtgatatcagcacaggtgtacaccttgctggtcaggtgccgagtnnccgctangcanctgacacacacttatttaatcatcattaacaaccctgggagttagaactttccggaagaagaaactgcaccatagggaggttcagcagcttggccaataccactctgttaatagaaggtgatggtaaacttcgcacccatgtcacttggctccagaggatgaaccaatgactctgctactgccttggccggtgagtgacatcatccacgtgtcacagtcaggatcaggcacccagaatcattgagaccaagagannnnnnnnttctnnnngaggatatcactgatgaaagcaggccgagtcgagagcaaactctcagcgttctcttgaaaccttgcctctggattgcctttgcctcatgcactcacaaataccgggtcacagctatgtggctggccccaggtgagccctacaaagtatggcagtgagnnacacccaacaagt

SEQ ID NO: 4591 - DNA, 507 bp, Canis familiaris
  misc_feature (1)..(507): n = a or c or g or t
gacagaatttcagaaagttatgtgacacttttcatgagcatccntgcangtcgaaaagatacattccttcaggtgtatcctgactgtttngnnnaagctatctatgcaacattccagnaagcatttccagaatccagtaatctttttaatgatgaatttaaagaagatctagggaataatatttttctttggttgtcaggtttaaaacctcaaaaaggcttttggacctactggaaactaaaagagctctccacaacaaccatacatggtactaagaaagcaccttcaacatctataaaggataggattgaaagaagtcaggcacgtatcacagctggacagcttataactgcaagccaactgaagtgttgtagaagaaacggatatacatatgcagtgcctctcctggacaaagaccgagagcattttgaaacctcccagtaaattcataagatactttataatgtttatattcatatcaccaaagaaggagaggatatggcaaat

SEQ ID NO: 4592 - DNA, 368 bp, Canis familiaris
  misc_feature (1)..(368): n = a or c or g or t
agtttatttgtctctcctccccctctccttgggccctcctgggggatgccccctgcccccacccccagctccagaagaggcccagtcccaccttgctggctctccagannnnatagagcatgtggggtcagagaccagannnnnnnnggaatttcccttcagatggtacagatgcgctcactttgnnnnnnnnnnntcccgcgcgcctccaccccagtacctgggtgtctcttccagccgcactgctagctctgtttgtccctctgtgtttccctccttcctttctactggctaggacttggccttgagggacaaattcctctttgatgaatgtaccctgtgggaatgtttcatactgacagattatt

SEQ ID NO: 4593 - DNA, 579 bp, Canis familiaris
  misc_feature (1)..(579): n = a or c or g or t
aagantgtgcgctgggaaagttngcagaccccatgtcaagttgannaaggaggaaaaggcaaggaggaaaaggaggaggatgcgtgtgtcatacttctacctcgcacaccagttttactcttcgttccattccaatccttgcccgcacaggcattgaggagacaggagaaaatcagcctagagcgacccaaggagtaagagagctgtcaaacattctcaagagtgagtccccacgagaacatcccagaagccaccaggatgacctaatgggctgcggtggcggctattctaccgagacattgcccgccctgggctatcaccccgatggctgcatagtaatggtgaagtgacctatggatacacactgctctgtgatctcaccccgcaggtaaaggtgctttccgctcactgatggatcatctcctgccattactagctgtaacctccattacttgagctccagtgtccttacctataaaatgaggtaaacagtacagctgcctttacaatgtctgtgagatgacatggggcttacacacaaggagccccttagcgctcannnnnnntttcatgttgata

SEQ ID NO: 4594 - DNA, 596 bp, Canis familiaris
  misc_feature (1)..(596): n = a or c or g or t
ctannaangcaggggaaaggggctcagccnnnnnnancatnnagccagagcgtttgcctctnntttnctggggctttcccccacctcatgccctctccgagccctctcagagccaaggctcggctgccactcagtggcacagatctgaagacctgccatcatccccatagggcagcttgtccagccccactgccctgttccagccaacgcctcccactctggggaggaaagctgagggtggagccagatgcttgccagcaccactccgagcctccttcccttctccccacccctgaccctgcagcttcccctagacctctcctgtgtacccctcatctgctggacctttagctctgagtacctatgggggcggggggaggagaatggctgtcaaccagaaggaacagagaggtctttagctagaaatctgggcaggtgagcccctgaggattggcccaatctcctgctgccctgtagaccaaccctcccttcttgtttattcatttaccctcatttagagccatttgcagagatttagaaagatttgcagtaacgaatggattcctatataaagattatttttatactttttgcag

SEQ ID NO: 4595 - DNA, 561 bp, Canis familiaris
  misc_feature (1)..(561): n = a or c or g or t
tttcnnggtagcagctgatggcaaagagctgaacaagtgacctgatggtctgtgaaatggtgggctagtannagggcgaagttctctgctcaaatagagctgttcagcatccctataaccttttttaaaaagaatcctgagataggctatttcaacagatataggtaaacaggtgctatccaactctgaatctgaaccactcttttatactgtaaattgtgaaaaataactcaatttttctagcacgttgcatctctgcatctatccagtatcctgaaataacgtagaataaacttatcatgaccctgactaaattagctaaatcaacccttactgaatttaaggggaaagttttacttttaaaaataactttaagatctgttatacaatgagtgtttatgttctcagttaagatgcatatttgttaaattctgtggaagtaaaacttttgcagtccggtgggttgatttaatgtaacattttcaagttatagcactagctatcacaaaataagaaaattattgagtatgagtgtgtcttataaactttgagtgtttcaag

SEQ ID NO: 4596 - DNA, 536 bp, Canis familiaris
  misc_feature (1)..(536): n = a or c or g or t
ttactatcactatctcatctgaaaatttaaanacnnaggtactatctcatatcnaggggcaacttcataaacataannnngagtactaacacagaagggccccacatttggtttaatgctctgctgtcattaacttgaaattcttaataatttcatcaagtttgtgtttctactttcatcaagagaagtgcaatgtgnnaatggagtgtgcatatgggcagaggagatatgtaccagatgtgtgcctctgtgaattccttctttactccacaagcatataacattcaggatgccccatgagcacaggattccagtggacccatcacatataggagttcagtgagattcaatgcaggaatcaggatttcgatgatggagctttgacagagtgccttttctatcctctcccctgcatgtcgggaaccaagctgagtgcgtggacagaagacaaaatgnantctaacttcctgnnnnnnntactctgctcttcctccatgagggtctgtggcagcnntgcggatggagagcaaggcagt

SEQ ID NO: 4597 - DNA, 512 bp, Canis familiaris
  misc_feature (1)..(512): n = a or c or g or t
atgagatccaggctggcatacacggggtggtcagtatgagattccaggtgcaggggccccggtgttgagtctgcgcaaagcanngtaacttactgagnnctcaggagaggagggagctggacagaaaccggcaaagctagttaaatgtgacaatcctttaataagaatctaattcttcttttcttttgcaataagaaactgaatttttaaactgtgatttaattggatcgttaggacttcagcaagatggacccttcaaggaaaatgtgatgtagaaaagctgggccagaaatggtaagaagattgagtgtcttttaggaaacaaccacattaaagtttttgttatgcttccaaagaggagagtttatcaaaccaaatgttcagaagactaactttcctttcctagaactggaccggataagacttttcattgggatgttctgagatcagtaattcaaaacttaaannncacaaaggaattttgaaaatcatgtttnctaaatttcctcaat

SEQ ID NO: 4598 - DNA, 562 bp, Canis familiaris
  misc_feature (1)..(562): n = a or c or g or t
aaccagannctngaaaaattaagaaacgtatacaaagaattcttaaagagttcgcaggnnnnnnacaaggaccatgaacatcttcttactgatgaacaaagtgaagtcagagaagaaatcgtcaagtttcaaaacaaaattatgagggaagctcagtaagagctggcaatggttcggaagtctcttcattccctgttgttctgatgactttgaagaacgaaagaacgggaagctacgttttattaagtatgacattagctgcactgaaccacactttagtagtttaaagattgtagttgaaattggtacgtcttgtttatcatagcttgcttgctaagtgcaagaatcttttcctgttaaaaccccgaccctaaaaagctgtgtgaggagtggcagttccacaattatatacgtattcagctttcaaccctttgttagtaatgaagactttttgtacttaacactgtcaattagctgttagcagtaagaatgatttaattttaggctttccctcagtggatctgtattatccccaaaaggctcaaaccacaagtacagaaag

SEQ ID NO: 4599 - DNA, 528 bp, Canis familiaris
  misc_feature (1)..(528): n = a or c or g or t
tttacccactttcgtgtgncngnaaggggtctctgtgcgcaggcccacaggattaaagaacatccatgtcntgttctgtttcaaaggcacagtctcnnagagtataccactccagcttcggccacggctcccactttctggagttgaaaaagtagctttggggatcaggagcaaatttgacctatatctttctatttctgtctgtctgtctctttctatatatgtgtgtgtatgtatatgtatatgagtgtgtgtgtgtgtgtatacacacacacattagagctggagctggattaaatgagtattgaaatcttagctcgttgataaagccgacaaaagctctagaaggggggtcacgtatgaacattcttgaacaaccagttactataaactctctagagattttgcacagttcctgttgaaccttccaaaataaaaacaacaaagacacagccaggagttctacagaaatactgattgttccagagtaaagtgcgtctaagtttttttgtagccatacttaacttg

SEQ ID NO: 4600 - DNA, 558 bp, Canis familiaris
  misc_feature (1)..(558): n = a or c or g or t
ggaccaggaggtttgtgttgacatgggttgttatnngacgggaccaactttcagagcacgttcactatggtcgctctgccatcatatgacagattattccaatgtgaattaaataacccacccctgcctctcacttaccctcagactcattatttaggtatttctatttttgtaaaaaatgactacatcatttttttttacatcattttaccaacacaaatgatgtgtttgtttagtggcattttgaaaatacttatgaagaataaacaaaatggaataattcccatgagtaacagaaactttaaataattaagttttagggcacaattctggttaaaagtttatgattttcatctaaggactggatgtaggaagatagaaaagagctttaactcttagttggggactgggttgggcttattacttgaataaaataacactgtttttaatcaaatgatctaatataaaattattttcactttttttatattttgatgatcaaatgattatgttccacaagtttattacttaactatcttacatgtgattgtcttcttc

SEQ ID NO: 4601 - DNA, 471 bp, Canis familiaris
  misc_feature (1)..(471): n = a or c or g or t
gatcctctgaccattgtcactggtagtggggtaggggaattgaagaaggaatgctagatcaggcattcagaggacagtctttagcagcttcagtgtttggcccctggcacttacgcaacaatatgaatataatatatatcatcacctaacatgtgagctgtgaactccccagtctgagctctaagttactcattaggatgaaaatctctgcccaagcaaccacaaaatgcgatcgttagattacagaaaggagaatgtctttatggttagacttttcttatgaacattactgagtgacttgtatgtggtgtttcacacaacagtggcatcaagcttgtcacagcagaggtgggatgtagaaggaaggggacagagagactatttgtgaagcattagtatgtgggaggcaggatggacatattggcatatcttnnnnnnaagaatgtccannnnnngcataggacagatatg

SEQ ID NO: 4602 - DNA, 543 bp, Canis familiaris
  misc_feature (1)..(543): n = a or c or g or t
tgctgtgtatcagtaatcatcgtattttaaaatcttctcttaaagngcagagtaagaaagagacaactattannagcaaacagnctaagatttggtnntgaagggcaactgttacgcgatgccgcttttagttccagaaaggatcaagttttttagtattcatgtataagttttctctccttcagtgttaaaatacggagttaaagagtaccctatatatgtataaaaattaaagtgcataccaaaggcatattcagttctacagggattattttagtgtttgcatggccttgcaaaaactctctgatgtactgtgcccctcacagcacattcaatctcacagaagagtgttttaggatcaggaactgtgattttgggggagaggttcgaaaactcacattaaaaacattttgaaaaacaatactgctcaaacgtaaaaataaatgggaaatatatgccttcaaaagacacagaaacaaagtctccacccctggatactgctgattagaatttcagggatttttacaacatgtatcttngttt

SEQ ID NO: 4603 - DNA, 405 bp, Canis familiaris
  misc_feature (1)..(405): n = a or c or g or t
aatatcaggcaagggggaaacataaatnctnnnattgcncataactacttacagnnngataccagtttagaaactatnnnggtaagaaaacatatnnngaanncatttttnnncttttgtccttntagctttttccaatggtgcatnnngtaagaaatttaagttgctgtttttggcagtcaaggtgtacatattnncgacagaagttaatgnnngagttgagcaattctgtnncagatttcccaagtaacatattgccagggnnnnnnnnnnngaaaaactaattgagcctgtgtctagctannnnncaagcacttatttgtgtatgaatggtgtttgaggggtacgtcaagtcaaagaatctccacaatctccacggttcttcccccacttgaaagctttcag

SEQ ID NO: 4604 - DNA, 686 bp, Canis familiaris
aggcactacagtacatggcttgacttggtttaaattctctaatgcacaatttctgagttacatttgggtatcatattaatagtcatatacatttgcttcaactgaacataaaatactgtgttcataatgcataatgtctaagccattaaatgtaatctatgcttattaccttaataaattatcacccatgctaatttataagtaaacatttaccaggcagtcagctgctggtagatgtgtgggctgtgttcagatcccccaggaccaacaaggaaaccaaatgatccatcttgctgatgtagtacaattttcaggcaaatgaagtgggcagatactcacttatagaagcaaatgatgaaattctcaaaaaaaacagctataactgtgcccaaactctaagagttttttccgatcataggtgggaaggaggatttttcaagagcacacgtctcttctctgtaatgaatacttaatatcaaaagcctaaagaagcctttgtgaacaagtggcaaaaccatggaaacctagctaggaacataagatccattacagagtgatatttttgtaggttcaaattctccagcaggagtgatttaattttttcatgtttatgcttatcatatatctactcataccacaggctggatgtttctataaatctactgcttgccacatttcaatccatt

SEQ ID NO: 4605 - DNA, 609 bp, Canis familiaris
  misc_feature (1)..(609): n = a or c or g or t
tnnggtctgtatctggtgttagnnnannnnnnaaggggaaataaacattgaatcagaatgaatcatagaaaaattactagaataatatttgatgttcatgatgattatggtagaagatagtttttggtatgttttaaatatttgtctgctgtagtctgtttgctgtatatgctgaaatttttgtattccacttagtatttttatagtctaggaaaatattttctaagaccagttttagatgtgctcctattcctatgtaatactcaatttactgtacctgcttgatggttagaaggaagccagaagctgaattcaggcactttcttccaaaaaaactaattatggctcattccttttgacaagccgtaaaattggatcaatttttaaaccgtaaattctaattgatttttaaataagtttttggaagaactttgttactagatagttgaataatctttataagatattttatatattagaagcaattataattaaatctgtggtttctgaactaaaatggtgctagttccaggtgaagaaatgtaaagtgcaagtgagattctctggtgtcnttggcattccaaannnnnntctttgtttttgtctaat

SEQ ID NO: 4606 - DNA, 717 bp, Canis familiaris
  misc_feature (1)..(717): n = a or c or g or t
atattctcatagtttatntagtccagggtannaaataaggattcacagaaaaatagtgaagctaaattttcagtttnnngaagcagagctattttctcgnnttctaatcactagagaaaaagtttactgcccagtcttacataacacattccttttatgataaagtgtgtaaagtctatgtacgtacctggatcttcacttttttttgatgacaagacttctaggagttggtacagacaaaaagtccccttgttccatagagtggaataaaaacattactttttactgttgtttttattaacctgtcactacacaacagatggtattatagagaaaacaaatcctaagctgaacactacaggatcaccatgagattccttgtctctgaaaagcttgtactgtaactgcattcttgtatgtggcatggatgggaacaagaggaaggaaaactcaaaactgaaaccatggtaaccctttaaggagaaccaaaatgtaatagatcctccagccatctttagaaatgaaataaatcagcctgggtggctcagtgggttgagcatccaaccttggtgatgaccttggtgtggtgggatcgcactctcctctctggaccccttcagttgtgattctcctctgcctcaccctctgctcctcccaccgctcatgcactccctcataaaaaaatttttttaaataaataaaaacttaannnaannn

SEQ ID NO: 4607 - DNA, 611 bp, Canis familiaris
  misc_feature (1)..(611): n = a or c or g or t
atatacccatagggctagatctatatcttagtgtagcgatgtatacatagacacatacannnctgtgttgaagggcctaacgggttttgggagtatcaactggtcccttatctcttaaggtgaattctttgaacgctgttcatttaccaagttgatccagtgtgtcctttctgttaagtaagactaaagagtaaaggcggggagggggccagcctccaaatgcagccacggatgtcttgctgctgcagcccttgccccatctgtcccctgcagacaggtgaggtcctctttcgaatgccaaaacccactattcactggtgctgacgacatagaatggggttgagagaagatcagcggggacttcacattgtcattcaaaaccttgtgtttttttatgtttgtggaaaaccttcaagtgaatggaatgattgccttgctggtgtccctttgtggaccaggggtgggaagaggggataactttgaccctgatggtgcctgggtgatgtgctcagggaagcttgtctctgggggttctgtggcagtgaacactttccactctctgacactttatcctgatttatgtctccaggatttggattttgatttttcaa

SEQ ID NO: 4608 - DNA, 148 bp, Canis familiaris
tcccccatgcctctctcttctctgcttctctccacctctgagtccatgtgcagtgcttgatagaatcacccctaccccagggcgggctggctcttaccctcctggagcctaggattgagccgtcccccaagggcccctcgcctagctg

SEQ ID NO: 4609 - DNA, 497 bp, Canis familiaris
  misc_feature (1)..(497): n = a or c or g or t
gaggcagggcgagcagagctgctggagcgggtgctgcgagacctggaggtgcacaannnngttctggtgagcccctctctgagtggccgttacgccctgcccttcttgatccaaggccaccaccagctgcgtggatttgtgcccatcgcacccgcctccacccagaactacacccaggaacaattctgggctgtgaagaccccaactctcatcttgtatggggagctggaccgtatcctggctcgggagtcactgcggcagctccggcacctgcccaaccactctgtggtgaagcttcgtgatgcaggccatgcctgctacctccacaagcctcaagacttccaccttgtccttcttgccttccttgaccacctgccttgagttcacccactgactaggccccagacctggcctgagcttggagaatctggaccagtgctccaccagggaggcagcccctgggattggagagtagaagccagggggcaatggccagc

SEQ ID NO: 4610 - DNA, 599 bp, Canis familiaris
  misc_feature (1)..(599): n = a or c or g or t
gcgcncnacggngctccaaaggtgggcctggcccagcgtggctatccaggtgatagctnnaactacacgtnnatgtgtcccctgccctcccctgctggcccagggacacagagccctgagtctctggaaagtgactccagccttctcctcctccccttctctggttttcccaacatgcctttccctaggggaggctggcgggtgtgatttttatgtggggaaatggctggatcactgcagaacggcccccagagtgcctgactgcccgaggacaatgagaagcatttaagaagggagagaatacattttgaaaagttcccctcttccccggcaacacccctgtgcctttctgccaagttgaagggctggatgggctccctgctgcagcctgggttctgctgctcaccagctgtgtgaccaggggcaggaacacttctgtgcctcagtttcccttcctgtaaaatggaggcagagtcctgacttcatgcgaccactatgagagttcacacaactcttatagtggaagggcagcagctccccagattttaaggacacagatgaagtccttaaaagactgcnnnctcataaaaggcacttnn

SEQ ID NO: 4611 - DNA, 484 bp, Canis familiaris
  misc_feature (1)..(484): n = a or c or g or t
ctgcaggtcaccnntggggtnncgggctnnnncacaccccacnnnnnncacacagaggnnnntgcacnnnnnnntccacccannnncacccccatgnnnggggctccctgccttcccccctccccacggcccctggggacnctaggggacacccgggcttctgatgggagcaggccatccagagaaccccaaggtggccagggaggctgagcatgtcccacagggggcagctgcaccgcgtccttgtggggggggggcgggaccgatagtgtaggggtggggggtgtgggggatggtgtgggaggtgatgtagggggatggcgtggggggctgcggacacagggcacccccttctctaaggtgcacacggagacgtctacagataaaggcgaccccactctggggtttgctgtgacccctgcccctgcccctggggccccgtgtgctcagcacagggcctgcctggaccggggcggcatctggg

SEQ ID NO: 4612 - DNA, 597 bp, Canis familiaris
  misc_feature (1)..(597): n = a or c or g or t
gactgtaaatgccccctttttaaagttttatnncttgtgttatntaattaatcagtcgactggctgcaatgtagngnctgataacggnnnnnnangaaggtctcacgagaccctcacatgggcagagnagggccgatggctggccacgtcaccgtgttccgtttgccacccagctaaaaaccatcagttaaagttgtccatttccatagctggcatccttttgcctgctccgaaaattaaccctcacaagcatgaaaggctgtggctgttcctcatccgtcccatagatgttgacactcatgaactgtaccccagcctctcagttcttgaggattctccttttcagcagcagggagggctcccgaacccaaagctttgaaagtcaacttcaaccgatggtgaatcccagaaaatgtcgtgggggctgggggatgctcctgtttgcatgtgcgaacgtgccggtccgccttcgaccctctcagactagcggaaagggccacggagtgtcccagtcacggagccggggtggtcttctagagagtggtgtttcccggtcagcggtggttctcgggcgtgggtgtggatcgcggaggaggg

SEQ ID NO: 4613 - DNA, 517 bp, Canis familiaris
  misc_feature (1)..(517): n = a or c or g or t
catgtgctgnnngnccacacanngcagcagcacagagccgggggccctgcctgcgctggcnnggctctgcaaaggcctcccctcgagtcgcaacaaggnnaggcaggcagtgtcggctctgccacgtggcagaggagctctttggcagtgaggctgcgtgcaagggaacatgtgcagtaccgtggggttgagcctgagtcctcgcagagagcaggagcagttgtgtcactaaccctttgtgctgcagctcctccaaaatgccagctaaccaggtgttcttttcctcttagcacccagcctgctcgtggtcatcgggttacagctgctcttgtgtcctagagcctctctgctgtcccgccggcagaaggtggcgccagtgggctttcaggagcattccccggggctctggcctgggggtcaggaccacacccagtcctggaggggaccgctgcggtgtgtgcaggtgggggggggggctgggaacgtgacacccagcgccatacttcctttctctgat

SEQ ID NO: 4614 - DNA, 609 bp, Canis familiaris
  misc_feature (1)..(609): n = a or c or g or t
aagtcagcagtacacgntttctnnnnnnctcaacgtccaatgacaggctccaccaggaatgagcagcccctgtgggctgagctctgcacgcctggcctgcattcggatgggctggggaagctgagccaggagctcggagagtgaccggaagggcacccaggcacctgagaaatgcttcctagatgtccgcttcaagaactctcttcatgcatttcccaaaattttcgtcagtgatccagtgggagaaaaccaggtcccagacttgattaaaaaacaaaacaaataaacatgatgcctgggtggctcagttggttaagcatggatccaaatagttgcaaagattataatttccagtacaccatagatattgacatatttaaataaaaatcaccttgtcaaagtgtctagtggaatctaattaccataatgttttgacacccatcattaatttttaaaatgcacaacctcttccttaacaattggaaattttacattgctcttttttttcttttaaattcatactttcattttcctccccctatagaattttttttttcttctcaatcctggcccagcatcttagtgtaatttattttggctcttggaact

SEQ ID NO: 4615 - DNA, 497 bp, Canis familiaris
  misc_feature (1)..(497): n = a or c or g or t
catatagccnntngaagtgcctcctgggtctgtgatgaagagtgtttctccacccctcaatcctctgaaaaannagaggtatggcctgaaaattatgtacatangaaccagctnnnggaagaggtacagaccttaacagaatgtaatgcatcacaggcatagccttgacttcagttgctttgtaagtgaaattggtacagaacccatttctcagaaagattcctgacagttcttaaagaaaagagtgaaggggccagtctataaaggcagcatgtgcaggtacagttggtgtttagtggactgctgtgtgaggggctgaagccagccagagtattgctgggaggaggatgaaaccagctgccacgtagcaagggcccatctcttaagggcatcagatgtaagctcagggttccacagttccgaatcttagggaggggcttttcagacatagtattcgctttctgctgnnnnnnggaatgcgtcactctgccagagta

SEQ ID NO: 4616 - DNA, 607 bp, Canis familiaris
  misc_feature (1)..(607): n = a or c or g or t
tcaatgccagcagnnncgtgaagtgnctcatcccactctaccagagcttctatgaagagcnngctctgtaccttgaagcaataattcagaaccaccgagaaatcatgacgtttgaggatttcgnngcccaagtcttttctccctcgcccagcccctccctcagcggaatggattaaaatatgagaagtcctcattgcaatgttggagcaagggccttggctgccagcctgagtggctacctcacagcgcctcttggaaggaggagatgaatgagactcccctctgttcccaccctcaacccccaaacacagagactccgggaacatccctgctctgctagtgccctcaacatagcttcccggtaacggatttctgaagttaaaggtgaactccaccagaatgtcttgggttggactttctctccaggccacgtcatctgaccctagaatctcacacaacttgggcttccaaagaggaagaggggaaagtcaccaacaaccagtgacaaacccactctcatgttgatgagagtgttgatgtggctgcttcaggcagggatggcagaagaagattctgggcttttgggaggggatggagggcagctggt

SEQ ID NO: 4617 - DNA, 616 bp, Canis familiaris
  misc_feature (1)..(616): n = a or c or g or t
ttactataaaggtacagtaatcacnncagtgtggtattgcgaaagnntaantaactggagcagggcagctnnaatgccaaaattnnnnagcaaccaagatgtccttgggcaggtgaatatcaaacagtggtacatctaggccctggaatatttcttgcggctaaacagaaatgaactaaaagccatgaataggcatggaggaaacgtaaatataaattactaaatgaaaaaatacatgaaaaggctacttactgtatgattctaactatatgacattctggaaaaggcaaaactatggcaatagtaaaaagatcagtggttgccaaagatggtagggaaggaaggatgaattggcagagcacagaggattcctgggaccatgaaactaccctgtataataacataatggtggataatgtcattacacatttgttcaaaccccatagaaggtacaacactaatagtgaaccttaatataaactatggactctgagtgaaactatgtcaatgcaggttccttgatgataacaaagnnnnnnactttggtggggggatattgataatgagactatgcatgtgtgtgggtatatgggaaannnntgtattttccactcaa

SEQ ID NO: 4618 - DNA, 692 bp, Canis familiaris
  misc_feature (1)..(692): n = a or c or g or t
ggatatnngtaaatatatnnaccaaannnanaaaaaaaataaaannnnntggatggctgttaaannntaaaggtgtagaggtgggagtngaagaatgaaaacgagggaaataaaatgcttgatagttttcaggtttgccaccagagatgcaatattttaagtactttgagaaagagtgacttttaagaatattatatttcagattttcagcactaacagattgcatatatacagttcatttacttttaataaattggcaattgatattttattgaatggggaattaagaatataaactgtaaattttgtcttaaattgatttttttcttggcctttatttttatgacttaaggtatgagttatattttgggagatactttctagacatttgggaagtttgggtgctatatgaagaaaaacatttaaggggatatatcatacttcagatataaacatcttgttttcttgaatgtaatttatttattggtttaaaataccttttctgctctcaagatggtgcctgttaacctaaacataaaatatatttattacatacaaaatatttcttagatagccacttttaagtagtaatgttttatctgaatggatgttcatttnnncatcctgataattatttaaattgttacttaacctcnnnnnggaaaaaaataaataaaccttaanannnannn

SEQ ID NO: 4619 - DNA, 518 bp, Canis familiaris
  misc_feature (1)..(518): n = a or c or g or t
tctcacaacagatgatcatttctttgtnncctgtgacttctcatctgcnngggccatgtgacagaatcactatgttatagaaaacgcacctgtgccctgttgacctaataaatgcaactatagctgcttcatgtcctatcggcgggtccgagtgtagttcagtggacgccggcctgctggctgcagaagaagtgcagggatagactctgggcactcagcaaggggccactgcgcccctgggagcttttggctggagcaggaacctggcctgtgcacctgaccctctaggaaacatgaacaggactgaccacctgttggcagtgggaagcacaagtcttctggaaccacgtctgtgcaggaaacaagctggtgttcatgcccacccccacccccaccccaccccctggtgtgggnnnggacagctctgcattgctccctgcagaactgtgtgcagtacagtctgtcacgcggccacagggaggggtcctgtgttttttattggcacagagtgaaaatgt

SEQ ID NO: 4620 - DNA, 523 bp, Canis familiaris
  misc_feature (1)..(523): n = a or c or g or t
tcagaaaaaccattcnnnnnnnctnnncctgacatgtgacatccaactcttgacctgtggcccccacttgctggctccagaatatacctgatcaagactttgccttccctccacctgcccagatccaacccttaatgcttaataaaagcagtgacatgatagtacaaattcaccctaattataccccagccccattcttgcatcactggnnacgagtggggacatgggctaaggtcttacccccaccactaagagaatacaggaaaacccctttcaagcgtctctcccaccttggttattccatgggctctacttcttcctacagaggaatggttacaagtctggcaaaacctgagttggaatcccaactctgcctcttgctggccctgtgtatcctgggcaagtacctcccttgactgtgtagattctttaatctataaattaaggataacaatagtatattactcatagggcagtgattgttattgggaggattcaatatttccaacatgtgaaacacata

SEQ ID NO: 4621 - DNA, 672 bp, Canis familiaris
  misc_feature (1)..(672): n = a or c or g or t
gtgtcnacgtagatgtagcagtccccagncgagtgaatgnnagagtnnnngtgtgtttcatnncagccatgatccccttgataggtgtntgggtattttttggtnnnnnntgagtgtgtgtgtgtgtgtgtgtgtgtgtgtgtgtgtgtatacagatacatgtgtatattccttttaaaaaagctttattgaacgtgttctgattttgaggtttagcaatagctagctatagtaggtgccgctacagtttttatttagcatggggattgcagggtgaccagcacactggactccaaggtggttcagacaagacagagaggagcagtggccatcgtcctcgtgccaggagctccttcagtcctgcgcatatagactgtatgttacgaagaatacacaggaagactttgtgactgtcacttgcttttttgctttttnnncnnttcagtaacaagtgttggcaaacgagactttctcctggcccctgcccactggggaccggcatggttgtccgtccagtctaaatcatccatctttctcttgcctgagtgggaaaggcggtgggccaggcagaggacagaactggaggcagtccatctagggaatgggactatgaggccacacttgtggaacatttggactgnnnnnntggagcttttatttttggtgtgttcg

SEQ ID NO: 4622 - DNA, 619 bp, Canis familiaris
  misc_feature (1)..(619): n = a or c or g or t
ctgctcaggccaagaatctcattgatgctggtgtagatgcnntgcgggtgggcatggncagtggctccatctgcatcacccaagaagtgttagnctgtgggcggccccaggcaacagcagtttacaaggtgtcagaatatgcaaggcgctttggtgttcctgtcattgctgatggaggaatccaaaatgtgggtcatattgccaaagccttggcccttggggcctccacagtcatgatgggctccctcctggctgctaccactgaggcccctggcgagtacttcttttctgatggaatccgcctaaagaaataccgtggtatggggtctcttgatgccatggacaagcatctcagcagccaaaaccggtatttcagcgaagctgataaaattaaggtggcccagggggtgtctggggctgtgcaagacaaagggtccatccacaaatttgtcccctacctgatcgctggcatccagcactcctgccaggacattggtgccaagagtttgacccaagtccgagccatgatgtattctggagaactcaagttnnnaagagaacatcctcagctcaggtggaaggtggtgtccacagcctccattcgtacgagaagaggctt

SEQ ID NO: 4623 - DNA, 614 bp, Canis familiaris
  misc_feature (1)..(614): n = a or c or g or t
atcgaggtgctgtcagacgagcacgcccgggagatgtgcttgcggttcgcngacatggagtgcaggcttggcgagattgaccgtgcgcgtgccatctacagcttctgctcccagatctgcgaccccaggaccactggcgctttctggcaaacatggaaggacttcgaggtccggcacggcaacgaggacaccatccgggagatgctgcggatccgccgcagcgtgcaggccacatacaacactcaggtcaatttcatggcctctcagatgctcaaggtgtcaggcagcgccacgggcaccgtgtcagacctggcccccgggcagagtggcatggatgacatgaagcttctggaacaacgggcagagcagctggcggctgaagctgagcgggatcagccctcacgggcccagagcaagatcctgtttgtgaggagcgatgcctcccgggaggagctggctgagctggcgcagcaagccaaccccgaggagattgagctgggtgaggatgaggatgaggacgagatggacctggagcccaacgaggtgcggctggagcagcagagtgtgccggccgccgtgttcgggagcctgaaagaggactgacgtgacccctg

SEQ ID NO: 4624 - DNA, 480 bp, Canis familiaris
aaatggggtgcaggcatgcaatagatatcacctgccctcaacagcccctaccctccccaaccaagttagggaaaactcagccaaaagcacaagtacaggcccaggcacagtctgtccaggggcatcctttcaaccacaggactccctcctgtaaagagacagataccaagtcctgccaccaagaagctgtctttggtggccaaggtcattttagaagtattggacagatcagagagaaggagagatgcccccataaagctgtggcatttaaggaccagctgttgtgtcagaagtatcccctatccatgccccacagggagcctgtgtcccacccaacccccaccagcaggcatccaggtggccagggtcctccggccaatctcttggctgctaaaagctctgtgttcagaggtctgtctctgctctttagacataaaacttttctccagaatctccagggcgggaagacttcccaccccc

SEQ ID NO: 4625 - DNA, 639 bp, Canis familiaris
  misc_feature (1)..(639): n = a or c or g or t
agcaatcccaccagttccntataccaggctgttgccaagnnagnncaccagccatttgatgtttctgcttttaacgctagttactctgattcnggcctctttgggatttacactatctcacaggctgctgcagctggagatgttatcaaggctgcctataatcaagtaaaaacagttgctcaaggaaacctttccagtgtagatgtccaggttgccaagaacaagctgaaagctgcctacctaatgtcagtggagtcttctgaggggttcctggatgaagtcgggtcccaggcgctggttgctggatcgtacacgccgccagccacggtccttcagcagattgattccgtagctgacgctgatatcgtaaatgctgcaaagaagtttgtttctggccggaagtccatggcagcaagtggaaatttgggccatacaccttttgttgatgagttgtaatactgaaacacatctttcagggaagagctgaacgttttctcaacccagagcagaaaacacatgaaagtcaaaaatctctaatataacatttatcttttttttccccaatgagatgaaatgtcttagaacataaatacaggtttttgttcccaactgacttaaagtcaataaaacattctgttt

SEQ ID NO: 4626 - DNA, 569 bp, Canis familiaris
  misc_feature (1)..(569): n = a or c or g or t
tcgcccatgtttgagcagatggtcntggnnnngcgggtggttcagaggacagacctggaccaggagcnnnngaaggagctgatgcagtgcgccacagacctgccnnagttccccacggccctggccaagaccatgtgcacctcagacttctatgaaggccaaggnngtctggacggcgctctctgctcctacaccgagaaggacaagcaggactacctgcgggcggcccacgcggccggcatccgcaacatcgagatggagtcttcagtcttggctgccatgtgcagcgcgtgtggcatcccagtggccgtggtgtgtgtcactctgctcaaccgcctggacggggaccaggtcagtagcccgcatgatgtgctggtcaagtaccagcagcggccacagcgcctcgtgagccacttcatcaagaagcgcctcgcggccaccgggaccctgaaagcctaaggatgcgcggctacgatggctgcaaataaagtcacagtctgggcgcctggctggcgcagcccggagagcccgctactcctgggagctcaggagcctgagttccagcccca

SEQ ID NO: 4627 - DNA, 489 bp, Canis familiaris
  misc_feature (1)..(489): n = a or c or g or t
gaatgangatgtgagtngcaggtcnntaangtgtggtttgtngactgcatggttgcatgtgaactgctgnatgncnctgaggctccagaactttggggggctcttcatggtgtccacttaatccctcccagctcctagcaggctccgtggggtcagcagggggttgcnnnctcttctgcccttagcagagaaactgaaggaaaggacattgaactcagcgcagtcaatttgagtgctaaaaaatttccaggatccatggtggtgctaaactatctccatgtttctaatatttttaatagtttttttttttttcctcatcacaaaaatgcagtgtccttggggaagggacccaaccccttggcctgccactttccaggtgtcctatatcatgctgacgggactctttggtctgcagaaaatactctgtcttggcatgcttctagactgtaagatttgggtttttttgttttgtattttgtttatgtttac

SEQ ID NO: 4628 - DNA, 558 bp, Canis familiaris
  misc_feature (1)..(558): n = a or c or g or t
tnnccgatgtgcgctccgtccccccgaagctgcagatgtgcctgtcanngcagannagncagccggacngcgcgcggtgaggctctccgcggggctgcttggccctgggcccacgcctgacgccctgcaccgacccctgtgctcggatgctgcccgggagccctgcccagcagccgagctccacacctgcccccccccgccccgcccccaggatggccctgttgggcttggccctgggtcggacgctggggactcagacagcaccaggctgcatgggaggacccgggaccttggagccagacagacccgaggttccatcacccctccagaggctgagcggcctcgggaaggtcactccctctgcaccgggcttcctgacccgtgacctaagggctccccggggcagctgtgaggtctaagcaacatggtgtgtactcgccacccacgcagaaactcacggcagcagcttcagcgctcggggtcctacacagaaaggggtgagagcctcgtgttgtgtgtggaagcgcgacccaggctctcagcgttcaaatgccacgt

SEQ ID NO: 4629 - DNA, 629 bp, Canis familiaris
  misc_feature (1)..(629): n = a or c or g or t
gtgtgacaaanncgaagagactnctcagatgtccctcactagnngactctgagttcatcaaatgggaagagtatgactctgagttcatcaaatgggaagagtatcctgacccaatcaggtaaacactttaaatgagggtttagatgtcagaaacagaagagtcagagaggttcaaagccatagacaccctcctctattgaccttaaagaaacaaattgtcatgtgtggagagggtcacatggccaggaacactgggtggcctccaggcacagagggccttagccctccagctgcaaggaactgaatcctgccaacaactgatgggcttggaagaagaccccgaccctaagatgtgatagcagccctggccaccagcacttggatttcagcattggcagactctgagccgagaaagccaggtgagcccatgagaactatgagataataaatgggcattgcttttattgctaaactgtggtacccagtgatagaacactaatgcagatcttatttactgtaagacctgccactggttgtaagacataccactgacgtttggggagacaaaaaaagctccaacattaaatgttcacagcagttataaggcatacattgtaagacatccgatt

SEQ ID NO: 4630 - DNA, 585 bp, Canis familiaris
  misc_feature (1)..(585): n = a or c or g or t
atataatgattcttgagcaattaaagannnnnatgacttattggaacaatcctgnctcagagacactgtnnncncctgngagatagtaccctcctctgctccagcctttcatcttgggtttgatggtcgctgatatggattaccccaggctggcaccctagtgtttgtctcctggctaccaaaaggaaaaagatcactacaatagttttacacaaagaaaaaactttaaaaatctgatgactataagcaaaaaaaaatgtgggagtgtaggggaggtggatgtcaacaatccccaagttggctcttgggagttgtgaaggagggtaagaacttaaagaccaggtcatgctttgaggggaggggcttcatagattctcccaggctctcacctttccccttagccagtctgctgtcctgagacccagaagtgatggagagaaaccaaccagagaaaaccctatctggaaggaatgtatttgttgctaaattttgtagcactgtttacagttttcctccatgttatttatgaattttatattccgtgaatgtatattgtctgtaatgttgcataatgttcacttttta

SEQ ID NO: 4631 - DNA, 417 bp, Canis familiaris
  misc_feature (1)..(417): n = a or c or g or t
catcnnnaccaacaaccccaaatttgangataatatnnatacatctttgaaaagtcatggttttgtactctcatggnnaagacagatnncaaacgatacagagcttctttagtggcaaaaagacaaattcatagagatggcacaaagaaagaagcaacacaacagactcccacatataaatgtgaccttcaagtaccctcaggaatatgcaatagcggtgatccacctatgggaagagagaatttcagtaggtccattcacaggtcacccaaacttccacaggctttagctacaagcctggctcctcaacaggtgccagcagaacatgttgtgtggactgtgagataaaaaaaatcaaanctcagttcccaagcctaaatattccttcagagnncctaatctcaggccagactgcaa

SEQ ID NO: 4632 - DNA, 462 bp, Canis familiaris
  misc_feature (1)..(462): n = a or c or g or t
aggcacattcgcttagcgctnnagatgtcagcccgagtccctgctacctcctttcctgccgcccgngaagagtgtgctnnagctgagctcntgcgctcctccggtgaccatcctcgtgcttcaggtgaccgaggtcagccccgagggcctgtctactttagggactccccagggagccactctcggaagtcaactcaccttagttacctagtttgttctgctctaaaggaaatgtggatctctctcaggccaggacttagtgactagtttttactagaacagcataggtcaatacctaggctcttttttttttttttaaacaaaaaaacccagagaattcaagggaagggagtagctctgctgaggttctgaacctaattccaaagtatggcagactaggtaggaactgtggggatccaaggtcaagaaacctttttcttatgatttgtagctacctactgt

SEQ ID NO: 4633 - DNA, 445 bp, Canis familiaris
  misc_feature (1)..(445): n = a or c or g or t
ccagggaaataggaccttctttcatnnagctctgtccggggctctgcctctgcccagcanctaagctgctctaggactactgtctttcatggctgtggagcaaaggtctaagttggtatgccccagcagaccagacagaagctgtcacttcaggcctgtgctggccagccaggaaccctgtactgctgctgttgcctggttgccaggctgttagaataaagataagagacttggactccagacccctctgtgactgtcccactttattaagctgggagggtgagatgcctgggtggctcagttggttaagcctctgactcttgatttcagctggagtcactgatctcagggtcctgggatcaagccttgggtggggctctgtgctcagctcagagtctgcttgagattctctttctgcctgcccctgctctctctcgctctcgct

SEQ ID NO: 4634 - DNA, 502 bp, Canis familiaris
catcccagcccaagtctttaccactttttaaaccatccgtctcaaattctttggtacctcctccagtttctgaatcctctccaagtaggactcccacttgtaaaaagtcaccagtaatcacaccatgcagttcatcaaaacttcagccaacatctagtcagacaaatcttgcaagtaatccgaatccaaaagcatctaagctccgccccccttctggctctttcagacaaaaacaaataagcaactcccaactagagcctcaaaacttccaggccaagacaagcatcccacggccactaataagaagaaaggaaatcatgcagaatctgaacggcaatttgaattctggggattgtttggcctctaatcgatactcccgtcttcctaaaccaaagatacattaagtacatagccatcacctgccaatttgttttttaaaaaaaaaaaaaacaatctgttctgtaatagctttacgtgcagtttgctaccatgacggaggttc

SEQ ID NO: 4635 - DNA, 645 bp, Canis familiaris
  misc_feature (1)..(645): n = a or c or g or t
tcatanaagatgaannctgtatctgtttattttgtnnatcttcaatttttnactggttcactgaaattcttatgaaggtgggatgaatttttcttgctgttcagtgctttattcttttcatctgttgttctgtggtcacagtgannnnngctatgtagcagactttcccaaatgtattgagtgcaaataaacagttacttagcaagacctaaaaatatgtctgcaggtttctccttgatgcaaatgtgtgggattattatatttccagaaacctgccttcctcactgtccattgatgttccatctcgtgtctcatctaacagtttcttcagttgagctgtggaatgacgagtataaattagtgttcatttgcctttccagaattatttagcagttcgtcaccaaagaaagaaagaaacaaaagtctttccttggttctctttttcaccatgtcaaaggtgcagcccttccgattaaatgtctgatacattaattaatgaatgaccagcagtgtttagctcttaaaatgcacttacattatagtttgacgtgctgggtgtctgtcacagtgttgtaaaatgcccactccatcagattgtgttcctcagttcctcttatccacaaaatactctccatttntctcaga

SEQ ID NO: 4636 - DNA, 624 bp, Canis familiaris
  misc_feature (1)..(624): n = a or c or g or t
taaattcaatgagnnaggccaataaagactgaaccaannacatttcatnntctggtatcatgtgtagatatcatgtatagaaaataaaataaaatatggctctaacttctgtgttgctgtttatatgtgttatttttcggcgttaacctaatgtgtttataaagagcattttatcttccaggctcctcatggataacatttggtctgtattttgctcactagatgtgaatatttcttattagtctgctttttgctatgcaatgattgcatttctatcatttcttagtttgttagtatgtgtgatagtattctattgtataaattgattgcacagtttatcaaagaccaattattctatgtagcttttctacagtgctttgctaaaccatgtaatactagttaagtcttccttgaaaataaagatacactcttatagaggacagttcctgtttactcccaggaacattttttaaaagatgacactgaatgtttattgcaccttagtgcagtgaagtggcaataaaacctaacatgaatcgaggttgtttatggcagatgcatgtattgctttacagagtttagcaaaagctcttaattttatgtcatactgtattctattataat

SEQ ID NO: 4637 - DNA, 583 bp, Canis familiaris
  misc_feature (1)..(583): n = a or c or g or t
agacacgagccaaccaagggcaaggagtgaccctgtgaggacagttttgtttggggctcagtgaggtgagaagagacagcgaccagtcnnnngtgtcctgaaaacagagtcccatcccaaatggggggctgaggggcagtggtcaggatccactcagtggccggaacttgacctgctgcaagtccgtgaaccctgtcccccttccgagaggagactcctgtgaaaggaccgctggtccccttggtggggtgctgagggtgccccgggtggaggaggcagcgggtctgtcgtctgggtcccccttgcctgcagacccttcctagctcaggacctgggtcccctgcccgtgaagtgcagagattgtacagggttgcacataatgttctggagtgttcaaattcaattgtaaaaatagcaaatgctctttgaagaaaacttggaaagtgcaaataagcaaaaatgaaaacaatttaaaatagttaaaatccacccttgctggggctggtgggagagagacatggggagttgttcaatgggtatagagtttgttttgccagatgaaaaaattctggagactggttgc

SEQ ID NO: 4638 - DNA, 656 bp, Canis familiaris
  misc_feature (1)..(656): n = a or c or g or t
acnnnactaatgtggtnnaaacaactgttttgctnnctgacataaatgacttcaacantgtcaatgnngtctacaaacagtatttcaagagtagttttcctgcaagagctgcttacnaggttgctgctttgcccaaaggaggccgtgtggagattgaagcagtggctgtcctaggacctctcaccacagcatcgctataagtgggcccagtgttatttagtctggaatcgtaacaatgtttttaagtttacatcttaatttttaccgttgatgttggaaagtgtatgattggctaaaacatttgaggtcattatggaaatagccataaaataaggggaattaagcatgaattggagattagatgacaactccaattactggcgccatatatcatacacacacatactcatggtactagacgtcggaaaagagatgctcattacatacgcaaataaatgaaagtagagggaaataaatcatgcaagagaggaattaccattcctaataaataattaagagcacacataattcagttaaatcctattaatttaatgatgtgaaataattagtcctcacatcagctatataattctgcttttacttgaataaaattaaagtacctgaaatttgaatggtagagataaaggagaataaag

SEQ ID NO: 4639 - DNA, 553 bp, Canis familiaris
  misc_feature (1)..(553): n = a or c or g or t
cctcttcagcagcgnngttttctgnnggttctcagcctgcaccacctacttttgggaccgtgtccagcagcagccagnnttctgtgtttggacaacagcccggtcagtctgcatttggctctgcaacagctccaagttccggttcagttttccagtttggcagcagcaccactaacttcaacttcacgaacaacaatccatcaggagtgttcacatttggtgcaaatcccagcacacctgcggcctcggcgcagccttctggctctggaggcttcccgttcagccagtcctcgccagcattcacaatggggtcaaatgggaaaaatatgttctcctcttctggaacttcagtttctggtcgcaagataaagactgctgttaggcgcaggaaataaaggtcgcggtgtgtcacacaccacacttccgcaacggctggtgccctgcttctcagatcctggcccgtactgtgcgcagggttatctgaagtcagatctgcctgaggacttctttatgttggggannnnnctcctttttctttacagaagcgctgccc

SEQ ID NO: 4640 - DNA, 406 bp, Canis familiaris
  misc_feature (1)..(406): n = a or c or g or t
atgggccctggggctccaggagaggccggggcccctggggagaggctcctgggggggggcccgcccagctgcccgggagtgcagtgcnnnagccagcccgtgggctcctgggcccttgtgtggggacttgctcctggagaggaagagaccacggctgccccgtgggccgagccactgctggggaggaggctcccagggacccgaccggcacgccccgtcctccgtgggggaagcaggaggcggcggctgcaccgcggtgggctgctgtctgtgcccgggcagggctgggcacctgctgccctgggtgccnnnggccccctgcgcttgggctcataaaggggaaacatttctatgtggcgtttcgggagttaaaagttggcaagacatttttatgtagctctgattt

SEQ ID NO: 4641 - DNA, 571 bp, Canis familiaris
  misc_feature (1)..(571): n = a or c or g or t
tnctnnctcagcagctgaccacagaagaaggtgtatnnatctttctacttgctggaggagtgtgagcttccaagactgaagagtatttgaaggaacacgatcatttctgtgttgaagtccaattcagtcgagttgtaactggttccttggacactttctaattctgcaaacttattctggctttggttttatactgtgaggtttacctctttctctggagaaatgaatgcataggtggttgaagacagactcatttggggtgggaatggaaggttgggatcatgggaggagactcgttaaatgagcatcgtttcatctccccaggatcccattacaccagcccttacctctgccatccctctggcccttcaaccactgtctctaccaccaagctcacaaagtttctgaaccatccacatctccttagagagtagtatctactgagctagatttgggggaaaggctgtacctgctaagagagtactgagtgtacactacctgctgtacataaggtactggggccctagtaataccatggttagcaagagaaaacagtccctacttcatggaa

SEQ ID NO: 4642 - DNA, 613 bp, Canis familiaris
  misc_feature (1)..(613): n = a or c or g or t
ggttagnacgagtgacgatgctttttttgggattgcacaatgttcgtcagacgtcaatgttcccccgggatcctaaacgactcactccttaaagaagccttgcttttttttattctttccagtaacctgctattgatcaggctatcccttagctagttaaaatatacaatggaataaatgtcttatctcaagtgccacagttactttggattaatgcaatataggtcactttaaaacagaagatttttataactttggacatgcttcagtaggaaatggtcgaacattttaatgaaaaattcatgtggttacgttaaaaattcatactgcattactacagtaaatgttaattttaaacagattgtgtaaagttttttttttctatattatagtggctacaatattaatgtcttaaattttcaatatttgagcttatttttttaaattctaacattgaaataagggtaattttagggaagcatctaagattttaatgattgtataattggcatctcatggaaaattaggcagaaagtatcaattctttaaagttgtgccctaaaatcctgtaaagcaggtgagaatactggttagaagatatccaatataatgc

SEQ ID NO: 4643 - DNA, 516 bp, Canis familiaris
  misc_feature (1)..(516): n = a or c or g or t
ctatccaacatggggactggttgtctgtatcttgctgatggtcctggcaatactgcccatcccagctgtctttatcattcgtcgctgcaacgtgatagacaatagttctggaaccgtgggtatgaaggagatgaaaaggacaagtaaatgtgaattctaattgtcttcaatcaagcagaatgaaaatgaagatgctataactgtgataactggagaggaaaataatttaggtggatagaagttggaaatcataatctaaaaaatgctttgaagagtaaaatatttctcctttgaatttattctggtcactgttgcctgaacactccccccaaagatccatatctatgttcattgtatatgaattaaatcaataccaattatatggattttcccataaatgttagttgtaaatctcttgagccgtaaagttttgatggaaaacacataaaactctagaaaactattggaaatattaaagataacactttccataagctnntcnttactgagcatagc

SEQ ID NO: 4644 - DNA, 597 bp, Canis familiaris
  misc_feature (1)..(597): n = a or c or g or t
agcccagtgangtattngtaatcgttgttnnaataaaagaagactttttttttttnnngcatanntctttcagaccaaaatgaatcttatctcctgtnnnaagaagttgagaaattatggaggtcagaggggcagagccagggcaggcccatagggctgggggtgctgaccaagcttgagcgatgtcacctacatacatgtcatcaccaaaccaacgtgtgggcgatgcagggtgtgcacatgagatccaggacacccgaggaggggacgatgcacacgaggccctccctggtcccagcagcagctcaccccaaatgccgcagcctccacagcctcttctgtgaaacaacccatctgcagggcccggagctgctgcctttcctgcttccggggcccacagccgtgggttggtccaccgcagccctgcagagcctccgctatggccatagcactcgtagctcccattcaccaggcctcgtgcaggggctgacgctccacaatcccacaacccggccaggagtcagcgacggaagcaccgctcacggccgctgctcctcctcccactcctccagcctctagacccctgttggtgagcca

SEQ ID NO: 4645 - DNA, 663 bp, Canis familiaris
  misc_feature (1)..(663): n = a or c or g or t
gacatggtaannnaatcttcatctgagtgtcagttcctcacagtnngtctatnntgagacttgccaaattcttccataaggcaagtggtaagatctaggtttgaaaactagggaattaanctaagagtggagggcagagtgggtgagaggtccagcagaggcgcatcccactgccacccaacccactgtggactgaagacctagttccccctttcagttctcttcagaaggggagtcagttactgcttgggcagggccccctagactctaccctcagtcaggacattttgttgaaccagactcaaccagttccctccaactgagagctggagtgaggagcaagaggggctccagctgtttaggagagaaaacagagccagacgtgtggctaatgaatgctgacatgcctgggatgtacgcaaatagccctgtcctggcctgccattgaccctgtctgtattttcttgatggttgtttttctccttctactccttcccaggaagggctttgtatgtctagtccaatgcacttaaagtcagccagcggactctgcagcacccagaaggctggatgactaaaggtttatgtcactcctttgccgggctgttcattgtcatggctgtggtgtgggacctctggaaatggagtctgttctgtctgaaa

SEQ ID NO: 4646 - DNA, 616 bp, Canis familiaris
  misc_feature (1)..(616): n = a or c or g or t
tttgtgcatcccccctgcatagccctccacccagtctgggggctcaggtggccctgccactctgactgctgcaccaaggttggggtgggagctggcgatacctcagttcccgtggggaggtccgggcgggcttggatggtctcagggcccaacaagccctctgggaccggggtttccccagtcttccaggcaacacaggcccatgggcaatggtcccctggagcagccccactgagtggacaccaggcacagggacacctctgagtatatttggaatctcggttttctttcgtttttaataaggtagtgacctgtggccagggacccaggttggggtgagggcacagcagctgggcctgaggtctggggtgtgtccggggccccaagaggaccaccccacaccagatggaggagcctgggtggatgccaggccttgaatgagcttcatgctgcgaggtgtcctcagagcggcagccacgtggggcaggggctggggtcacctgggtgctcaccatggtgaccttgccatttccagctactataggatgttttcttcattttttcaatgctgattcgatccaaacttgaggaacataaataaatgagannnnttnnn

SEQ ID NO: 4647 - DNA, 639 bp, Canis familiaris
  misc_feature (1)..(639): n = a or c or g or t
cttttcacacaactgcaagatgtnnncnnnnngnnnnnnnnncgagagcacttngnnnnnnnntcactcttcatcagtnnngtctagcatcgaggcncagagaggttggttgacttgcccaannacacacagcatgnnagcagtagagagaggcccagaatccaggnnnctgatgcccagcccagtgccactgagctctgtaggaggattgttctggcaggcatttctaccaaaaaatgtagttctaagctgaggccttctcttgcaagcaataccagccatccattcatcatggtttagaaaaaaacaaggaatggggcttctgtcccagctaaccagctgtggggcattggggtgatcctattcctctctggacctcaatttcccccatgcatccaaggaaagatcaggtgaaaggttgacatcatataaagaagcgggggtgttccctgcccatcaccatagattttaacacattccagtgctccttgtcctagaagaaaagcaagtgggcaccagggtggaaagggcccatcacatcatcgaactatcctgaggcttcattacaacctcctggcgtggctaggggcaggagaatagagacctgtnnnnacactagagtatcagttgaagacattg

SEQ ID NO: 4648 - DNA, 678 bp, Canis familiaris
  misc_feature (1)..(669): n = a or c or g or t
agtgcntatgcgctttttttggtgagctaaaacaggcatnnctgcactgaatcacgnnnctcntgacgagttagccatttccagtgtctgaacctactgtaattggatgatatttactttggctgtgccacttcggaacatctttttgcattgacatttgtctgttcaagtaatgaaacgaaaatcagtctgtcatcttgttagcatgattcatgtatttatatagatttgattattttaattttcccttttttttttttgtaaattctatgtacagatttgattttttttttccatagttttaactagattttcaagatattttgtgcatttgttttggaccgaattttggtggtgttagtgtcattacctagcaccctgatattttaatataaccagggtttcattatatgtcctcttcccttgaagtgtgacatttcattaagacatttcaatatagtccttcgtttctagctgtacatagggtgaggaaagatcttccacatggacatgtcttaaataagtgggtgtattttagaattataagcatttttcattactggaaagtgtaacggggaccttctgcatacctgtttagaaccaaaaccatcatgacacagtttttatagtgtctgtatnnntgtgatgcaatggnnnnnnaaaggtttttactgaaaa

SEQ ID NO: 4649 - DNA, 618 bp, Canis familiaris
  misc_feature (1)..(618): n = a or c or g or t
ctcgncatccggatcgccagcctggaagtggagaatcagagcttgcgaggtgtcgtgcaggatctgcagcnnnnnntttccaagctnnaggnccggctaagcgtgctnnagnagagctcacccacccaccgggcngcagcccctcagacccagcacgtgtcccccatgcgccaagcggagccccctcccaggaaggcggccactgctgcagaggacgatgaggacgatgccatcgacctgtttggcagcgatgaggaggaggacaaggaggcggcgcggcttcgggaggagcggctgcgacagtatgctgagaagaaggccaagaagccagcgctggtggccaagtcctccatcctcctggacgtcaagccttgggacgatgagacaaacatggcccagctggaggcctgcgtgcgctccatccagttagacgggctgacctgggggggctccaagctggttccggtgggctatggcatccgcaagctgcagatccagtgcgtggtggaggacgacaaggtggggacagacctgctggaggaggagatcaccaagttcgaggagcacgtgcagagtgtggacattgctgctttcaacaagatctgagccccagcaccg

SEQ ID NO: 4650 - DNA, 399 bp, Canis familiaris
  misc_feature (1)..(399): n = a or c or g or t
ctcacctgtcaaattttaaatggtatngnncaaacaaaaagaaagctgttgtgtttttgttttgttttgttttcatgaaactgtgattttcaacttctgaatgctatgatgtccagagcaggaagctaacgccgtgcaaatgtgaagttctataaaacaaatcaaccgacctacacacaaatgttttcataggcactgtataaagagaaatatatgtttattgactcaaatcagtttttcagagaaaacttcactgggaatgaagaggcgggtaaattggtttgttattttttaaaaacctgcatgtttaaaaaaaaacattgattgcttcaaatttctgctactaacttcaagctatgggagtttggcagtagtcacttgaggattttttttccaatt

SEQ ID NO: 4651 - DNA, 677 bp, Canis familiaris
  misc_feature (1)..(677): n = a or c or g or t
gacagccttcatgttttcccagaccgctctcccctccctcttcacnntcccggtcgcctgatgccannagggctcgctcctgtccctgctcccacctccgaagtggtgtcacccagtgccacacacactgccctcccggcgtggcccgttgtgtgggtttgaggacctcgggtcgcctgcacgtggccccctgcagctgggccctgtgtttgctgtgtgagaaatggccctttgttgcgggcaggcaggtgctttctttgccgtaaacgccagaaacatttttccatcaaggcagtcatgttctctgtgctaaaataccacgtcaggtgagaggaaaatgtgcctgattgactgggctgaagcgtgaagcaagcagagagtgattctccccccaggatgcaccctgtggatgctgcatgggagtgcattgccttcctgagagctggggaggccaggtcggcacctgcgacagtcaggggtggtgtctttctggaagattctgtgtctcgggtgtctgggacattagcgtctacttcctgaagcgcatttctgcataatccttgctttaccacaattaggtcgggttttatatgcaattactgtatctaagtttctgtagcacacatcataggtatgattttttttaaattaaatattcaaaataaactttttnnnnn

SEQ ID NO: 4652 - DNA, 564 bp, Canis familiaris
  misc_feature (1)..(564): n = a or c or g or t
tgactccaaggaaactggagaaagcaggccnnagcaaaccctcttcaggtgacagcagcgagcacnnnctgttctgtgttgnntattccccttactgctccgtcttttctttctcccnngtcccgcagcccaataccaattactgctgcctcctcctgccactcgtgccacctgcctccccgggggccccggccccccgcccacagctgcccccggtgcccttcccctccttcatgagcccctcctctgagtccccggggcccgtgcccgagtccccggccaccctgtgctacttccccgtctcccgccccgccccggcggagacccctgtgctgtgcctgcccggccccaggaggcccagtaaaatctacctggtgtggtaagtggccctcggccgggcacacagcacagcggaggagtcggggtgaggggggacttcaggcttccagaaggcagtggactggacgggagggggagcggggggaggcccgagggcgaggtcaccaccaaccccgggcggtgaggggggcnngaagaccacaaagnnnncaccccgcctctcaa

SEQ ID NO: 4653 - DNA, 598 bp, Canis familiaris
  misc_feature (1)..(598): n = a or c or g or t
tgatacagnnncttgcagctgctaacctggtcaaggtcaaccnncaacaaggcattgtgtatacaatgcccgagagagcacgtaaactgctcccttctttgctggaggcaaagaacttacctcttgaatctggcagagccaagaccatcaaccaagagatgtttaaactctcctccctggatgttacccacgctgccttggtgaataaattctggtatttcgggggcaacgagaggagccagagattcatcgaacgctgcatccaaaccttccccaccttctgcctgctggggcccgaggggacccttgtgtcctggagcctgatggaccagacaggcgagatacggatggggggtactgtgcctgagcaccgggccaggggtctcgtctcctatctcatggatattcatatccgtgctctggacaaacttgactatcctacctattaccatacgtttacaagcaacaaacccgtacagaaaatgagtcacagcctgggtcatatctgcatgccctgtgactggaaccagtggcactgcgtgcctctgtgaggcagccctgaacacaagacagtgttgggtggcctgatgtggaagac

SEQ ID NO: 4654 - DNA, 494 bp, Canis familiaris
  misc_feature (1)..(494): n = a or c or g or t
agttataagacgcccagacggaccagatccgggtgctgtgcctgactcagagaggnctgagccccagtgtacacgattggnnagggagtgaccgagtgtgctgcgcacaggagcgtgcgagtccagtggcttcttacaggggctgcacacacaggaggtggtccgtgtgcaaaccacagctggctgttaagcggtccacgggcgtggttcccacgtggctgtgttgggaggcgggggcaagtgaatcacctgcagaaaacactcttctgagccaagacttccagggaccgctccttttcctaacgtcctggcctcnnnnnagtgtgcggctgggctttctcggcacctggcctgtgtgtgggcccctggctgcgtacctgccccactgttttctcagacattttcttcactggggtttctccctggtcctaccatttggtatctgtgtcttgatgcatcacaatgattcttngcgtgttaatttatanannntc

SEQ ID NO: 4655 - DNA, 631 bp, Canis familiaris
  misc_feature (1)..(631): n = a or c or g or t
ctacatccgcccctgccaatacccctgaagctgctgatgtgcccccacctgtcccagccccacctacaccacctccacaggaaaggccannnnnnagacccaccagattctcctacaagggtcgaaaccccttccgcannaggccccagatgttatcaggtactaataggggatatgaagctgagagggatgagatcgggtggagggaaagagcatagggaatataggaatgtgtgccccaggaatgtgtgggggcacccttaactccacactggatcctggtaaaggggatggaatgagggagctggggggcaatgaggtggaagcctggtcctggtgagggggtgggcacagcacagagggccagggagggaccagggaggcagaaagaccagggcatgagtcaagctgtgactatccccaaccctggcagagaactggctcttcagcccccgcagccccccaccaggagtccagggtgggggccccggggaccccgaccggcactccatgtccctgcccctgctgcagggtctgtcctcagaattcgacagcgacgaatgaagctgaggcgagagatgcagggggcgaggcccccaagatctggcatagggatactngtccccaataa

SEQ ID NO: 4656 - DNA, 599 bp, Canis familiaris
  misc_feature (1)..(599): n = a or c or g or t
aagaaaatgaaaagtgttattaaatttctatgtgtnngtctaacaaaatggcatatggatggcatnnannactttgaannnnacctaaatttgagatactagtnnaggnnannagtattgaaccagatgacttttaaggctcctcctatcatgacacattaatttccaaagacaaaaaccagcagagaaattgtatttcattaattctaatcttcttctatcttgtagagtcttgttatagttgtatagatcaacgacagtaaggcacataacgttcttaatttttttccattgtaaaattgttagaggaccctaccccctctagattccctgatttcccaggcctgcagtgtatagtcaaatgggtccctgtgccaggcctcaatactgccagggaacaaaaccagagggagaggaccctcagtgtcatatcaggaagcccaatgccagaggacagacaggttcaaaattggctttcctctgggcctgggttggtgctataggccaagagtcattttatacttggagtctaagtcaatcccagtttggggaaagattatttttaagcttaaaaggctgacatgtgccattatatgtag

SEQ ID NO: 4657 - DNA, 291 bp, Canis familiaris
  misc_feature (1)..(291): n = a or c or g or t
ctgcnnngnnntcagcctgtcccaggactgggaacttcctgtgaagagagaggannagaagaagccactgaannagggtgttcaggacatgctcgtgnngcaccanctcttcagctgggacattgatgggtgatgctctgctccggtggccccgcaagccggggcctcccccacctgttggctaccaagcagccccttcctcaagcaagacgacagctcagtcctggccagtcttgggtctgctttgggatggggtctgaggtggcccgggcccactccacactgtggggt

SEQ ID NO: 4658 - DNA, 143 bp, Canis familiaris
  misc_feature (1)..(143): n = a or c or g or t
ttgatagtngngagatgcctggttggttcagttagtgtagcatgtaactcttgatctcaggacagtgagtttgagtcccactttgggtgtagagattgctnaaaatcttaaaaaaaaaannnngtngaaaagnnnattatcca

SEQ ID NO: 4659 - DNA, 647 bp, Canis familiaris
  misc_feature (1)..(647): n = a or c or g or t
ccaaagtactctantngacatgattattcccttcaaatggattacaggcttnntgagtacaggacagacttactcctcatgatgttttcttcaaaatactcttattatcaagaaagtaacaatgccagctgttactgaacagagactaagcgaatttttcagtatctggtcttaccattgacgtcagttgtttttgattgaccagcatccattgcactctttataacaactctgatgtttcttggaaccacttttccttatttccagttcacatggttcaaacagtctggcctaactttaagcttcttgggtgtacatgtaattcagacctgatcaatcagcatagtcccatctctttcaccatagtgattggttctggaatggtttgattcaaattggtccagtgatactcagccataagagttttactgaactgtggaggagaagctccgaagctatctttactgaggttgcttggctttgtagtatgaaagctctaaccaacagggcccaccatattaaatgagccagaaaatgaagccagtgccgaggaaagcagagccaaatgatggagagacttgagtcctgatgacaatgtttgtgcccctggatccaaccgtgcctgaagctagtatatccctatggac

SEQ ID NO: 4660 - DNA, 710 bp, Canis familiaris
  misc_feature (1)..(710): n = a or c or g or t
tcacttnnntcagtcaactggtaganncaaaaagggtgcagggttgttactgggaatacacatgcccgctggggggtggcgggggggaccagnagtctgnctccaggatttgacaggtaaggagtcagtaaacattttcagnnaaaaggctggatggtcaatactttaggctctgaaaccagacagtcttggttgcacatattcacttctgcttnngtagcgggaagtgggacatacatgccatggctacattccaataaaactttatttacaaaaacaggcaactggtcatatttgaaccatggactgcagtttgctgatctctgtgacagagcattattaccatgtccatttcaaatgggatatcagtctctctggcatgcagtggccctcattttttgaggaattagagtgggaagattatttttaacaaataaacaataaaatgcaaaataacctctcccctcaaaaactatatgttggactttttgttatggcaaaagcacaaaacaggtcacctctctttgtagatctgccacagtctagcttttcctttggagcttctcatttttgttcttaaaacagaatcccaagtgatgttgcctcgtcaagtcagttttgtagaccacgtaacatgtcttaatacactgtatggggaaaaataaaagttagccttagatttctttgttttctatggttactgttgtaca

SEQ ID NO: 4661 - DNA, 516 bp, Canis familiaris
  misc_feature (1)..(516): n = a or c or g or t
tgtccttttcagctctagtcnnagcacttttcagagcatnntgggtgccactgcagcccagctgtnncagcctgcagccccgtggttggtnnntagccccagggtctctatttaacaaaaccctttggtactgttgtggttttctattcctccactgcactctgtctcctaagtctgttccaaagtatctttgctctgtttggccttttcttttaccttttttttctaatcctgctttggtacttgccagtatgaggaaaaggtacaactcctcagagagaagaaagaatatctgttacttctccggcagttgttaatttcacgtttcttacttcagccagtttaattttatttatgctcctgtggcccaggtacttggggccagccaaactttagcctggccttttagtgtctttgaaggagaccaagcaccaagtgaacactaaggagagcatcagcgtgtttttctagagaccaagccctgctgcaaatccatcaggccaggcaaaggggcca

SEQ ID NO: 4662 - DNA, 361 bp, Canis familiaris
cccctagtttggtgactcagtgagctgtgtaatctctcatgcttcacgtttctcactaagatgctggggaggaattaaatgagaaaatgtatctaaagctcttatgtgacctgggactttcgtggcaagcgttcatcaaatgttagctctcgctattaccatttttgacgaatgccagaccagaggagttatctgctttggtcgggatcaaaggagttgggtacgtagactttccgttttacgggatgaaaagagtttctggccatggatggtggagacagttgcagacaacattatgaatcacttcaataccactgaactgtacgcttaaaaagggttaaaatgctcaattttatgtgtc

SEQ ID NO: 4663 - DNA, 600 bp, Canis familiaris
aaagtcagtgatgaaaggactatcagagaagcttctgataatctcgcagtgcaaaatctgaaggggtccttttctaatgcttcaggtttgtttgaaatccacggagcagcagttgtccccattgtgagcgtgatagccccagagaagctgtcagccagcacgaggaggcgttatgaaactcaggtacaaacacgacttcagacctcccttgccaacttacatcagaaaagcaatgaaattgaaattttggctgtggatctacccaaagaaacaatcttacagtttttatcgttagagtgggatgctgatgaacaggcatttaacacaactgtgaagcagctgctgtcacgcctgccaaagcagagatacctcaaattagtctgtgatgaaatttataacatcaaagtagagaaaaaggtatctgtgctattcctgtatagctacagagatgactactaccgaatcttattttaatcataaagaatagtcattatcttgttctaagataggagcttatactatgaaatgttgtacattcattgtaattttaactttacattgtaagaagctgtcctacaaagttgagctttgtaagttttt

SEQ ID NO: 4664 - DNA, 208 bp, Canis familiaris
  misc_feature (1)..(208): n = a or c or g or t
gagattctcagctgcaccaggtgggacacagacatgcannntggtggagatggggagctgggagccctctgggggtccgtcactgagatggtgagccagcaagaggtggtcagtgtgcaccatggggcactgcacagcataggaccagatgtccacagagcaagtcacttgggtgtgggtcttaagattgtaggaagaaacaggatga

SEQ ID NO: 4665 - DNA, 667 bp, Canis familiaris
  misc_feature (1)..(667): n = a or c or g or t
tgagcagtattttgggagtccaagtgacatggnnnccactgcagaacacatcagagacaggatgaaactggttngnctcaaaagacagcagctgagacatcctgaaatgatgaccacagagagctaatagctaccagcttcccacaaatctgcagttcataatcccgcatgttgttggcatactacagcattagccgcaatacattgatacatttcacagccaggataagcctcatttttttccattttacatttctctctacatgttaacaccttacaactaccaaggcatcattattttacttgctttgagaccatagactccaagtatcttaaaagaaagaactgtaaacattgcactgaaaacttgctttaaagctttacctgacctgtcaatttgtagatgaacaactgataataagctttgaatggtgctaataagagtttaggaattctctatataaaaaatggttgaccttcctccccaggtgatgtagtaaatttagactatagttaaattgttattagtagacagtggcgtactcaaaaattttactttgtaattcttcttcaaaattgattatttttattgtgtcagtatgaagaaaaccttcagatctttgatatatcatattcattaaaagacattttcctatttgtattgata

SEQ ID NO: 4666 - DNA, 682 bp, Canis familiaris
  misc_feature (1)..(682): n = a or c or g or t
gaaanctcntttacattgannnattttttgcannngcagcgtnactgacattatgaaggcctgtactgaagacagcaagctgttagtacagaccagatgctttcttggcaggctcgttgtanntcttggaanacctcaatgcaagacagtttttcagtgctggcacatttnnnaattctgcacatncgtnnagtgcaataatactgtatagctttttttttcttccccacatccactcagttaacagtttttaagaaaaatgtagacattactacttgtaccttttttttttccttagtcatatttggaaaagtagaaaattgagttataatttgactttcttttcaaagatgcctgttaaatctgttgtgattttatatgaattttcctttttttatagtttaaaatcgatctttttgggaacacagctgaagttcccacatactctaagagtttatcaggcatctttaatttggtcatgtccaatttctatagttttcaaaatactgcagattgtgaacagtgcattatatgagattatggggggaaatcctatatccagagtactctaccaatttgtgtgtatgtgcgtgtgtgcgtgtgtgattaccagagaattactaaaagaccaactgctttttaaatactgttatgtagttcaagnntcttgccttgaccaatc

SEQ ID NO: 4667 - DNA, 596 bp, Canis familiaris
  misc_feature (1)..(596): n = a or c or g or t
gccctttatgccaggctgcggcaggaaaacatgcacttcgagatctgcccntggtccagctacctcacaggcgcctgnaagtcggacacggagcacgcggtggttcggctcaaaaatgaccaggctaactactcactcaacacggatgacccactcatcttcaagtccaccctggaaacggattaccagatgaccaaacagggcatggactttaccgaggaggagtttaagagactgaacatcaatgcggcaaagtctagtttcctcccagaagatgaaaagaagcagcttcttgatctgctctataaagcctatgggatgccatctttggatgctgcagcagggcagcatccctgaagacatcatggccacctctccaagccctccccgtgtggatggagcctcctcaattctctggggttgaacgacacttacctttactctttcaaggaagacgatgatgcccatagtcaacttctgctgctcttgaagccatgtgcctgtttctatacacaggaatacctcggcacaccacatctctcctgactacgggccagagtctggttgaatctgaancctccctcctatagtgacgc

SEQ ID NO: 4668 - DNA, 532 bp, Canis familiaris
  misc_feature (1)..(532): n = a or c or g or t
gccggtggggtccggtgagtccccagnngcacgtcgccgggaaagccttaacgccccccgcgggtgctcggcgagcaagcggaacacttggtttccccccggggtgtcggtacaccggccctacctgcactgaacgctcttcgctgcacctgaaccgggagcctctcagtgttgagagtattgctcgaacctggtcaatgaagcagtttcacttctggaagttccattatcatttgttaagttttccttccttgttatcacacaacccgcataagggaatgaaatgtgtgaattgtgtttagttctgttaccaggaaataaaacttcttaaatacttaaaatgtttaagaacttttactctgaaactgttaccgtgagaagaatttattaaagctttctctatagaagctcaaactgttgacctcagtttttggtctgtgaccaccattccttgatatcagttaatgacagtaccacgttttgtaacagaannnnnaggctgcatggcattgttgtggtttagttggtactc

SEQ ID NO: 4669 - DNA, 487 bp, Canis familiaris
aaaaaaaaggatcagaattagccagcttggcttcagattttaaacatatactaattctatttctggattatattatgaagcttttatgtgaactttttttttttttttgtaatgaaaaccacattgaagatgtttaataatcgtactttgttagtggtatcaagactattagagaggtctttttagggaggttcttgaggcattgtatcctgtagacagagaatccatgagatgcagcacctctcctgggtgtactcattttgaattactgctcatctgatgctcacatactgtcactgtctgagtacagtgtaggaaagcacgtgccctctgtcctgatgcctgcattcatgccccctacaaccctaccccagccccccacagttggcacctatttgctttgaaaaatcccacttatttttgaatcgtgtaagacaattagaatctaataaatgtttttatttaatttgtggtgccttgcataatg

SEQ ID NO: 4670 - DNA, 579 bp, Canis familiaris
  misc_feature (1)..(579): n = a or c or g or t
gaatctctcnnnagtatgttnnnnnactaaagttcatttatnnacctttncnngtttgttcaagtgcaggnacactggttaatggcacataatctctctgatgtaatgacttttacaaatagaattnnanncgaatgacattcatgtgaattggttatgttcccagtcatatgaacacatggaagataatttaaagttatttttttccctgccttttactaaacatctgtagtgcaacaagtgttttaaagccctcttttctcctttattttcattagttggacattggtttcagtgtctgtacatttaaagattcatacatattgcacagtggttaacatgaaactgtggtatatttactttcatactcaattggcccaaaataattgccagactttccactgtgctcctgcatttgtgtttgagctgctatactcttctgaaaattacactgaaagttgataaaactattgaagaagcaagaatataatacatgagaggcgcctcatctacttctattttacttattttccatgtctgatgtcttgccaaatgctatgattcatggtttccttttgt

SEQ ID NO: 4671 - DNA, 602 bp, Canis familiaris
  misc_feature (1)..(602): n = a or c or g or t
gtggcatnnnaggcttgtgcttccaangccactgatgatggtgnnnnnnnggcccagctagagctagctacagctaaaagtgggtgcctcccacctcccctaaacgagatgttggcttctcggcatcaggtagctaccacagcccccaggcttgcttaggcgatcctgagaataggaggaaggctgggggcgctgagaaatgcaaaaggctcagaatatttataaatcccacccccagggtggggaggggcaggtaccagacaccgaagaagctgcaccaaggaaacagcccatgggttctcctgagtcgggctgcgcagcccagaacccctggccactgcgcccagcaggacaggctgtgccaacaggagcccagcacccagcctgcaggaatcccagtgtgcctgtccctgctggcaatggctgttggctgccagtttttgctgatacaggtaggatgggaatcttcattaatatttgactttaagaagttggtaaggatatattttttttgtctatgttctgtttcaacttatgtagattattataaattgatgtaaaccacgngagaggaaaatgttaataaaaaaatgcaangnnnn

SEQ ID NO: 4672 - DNA, 602 bp, Canis familiaris
  misc_feature (1)..(602): n = a or c or g or t
gcagctggtgtaatcacttacatcctgctgtgcggtttccctccattccgtggaagtggtgacgaccannaggtgcttttcgatcagattttgatgggacaagtggactttccttctccgtactgggataacgtttctgactcggcaaaggagctcatcaccatgatgttgttggtcgacgtggatcagcgattttcggctgtgcaggtccttgagcatccctgggttaatgatgacggcctcccagaaaatgaacatcagctgtcagtagctggaaagataaagaagcatttcaacacaggccccaagccgaatagcacagcagccggagtttctgtcatagcaaccaccgctcttgataaggagaggcaggttttccgacgaagacgcaaccaggatgtgagaagccggtacaaggcccagccagctccacctgaactcaactcggaatcggaagactactccccaagctcatctgagactgttcgctccccgaattcgcccttttaataagacccttttactcaaagtcctggcttaaccctttgagactctgagatttttttccaaattaatgtaaaacagtttcatctgatctatct

SEQ ID NO: 4673 - DNA, 505 bp, Canis familiaris
  misc_feature (1)..(505): n = a or c or g or t
gaggggtggngngnnnnaatggcagttgccacannatggctttggtnnangaggtgttttcttctaacagaatacgaatatttgtgagcctgagctgtagctagagggggaacatgtgggnnagtccaccacctcaacccccttgagcactgtggtccatattggttagagcactagtgtgtccagccatatctgcagtgctgaagtcagggtggcaggtaggcccttgacctctttctccctgtgacctggtgctctcctcacccttgaccccgcaaccccaccccatgggaggtgcaggccacaaactctttcatcacaatcctgtgttgttggtgaccagctcactttgatcagagcccttcacctggactttccaactcttgctaaacaggcttaagtggggtgtagatgacctcaggccccttggagttgaagggtacatactcaaagtattttcaaaacctgctttttatttacatttaagtccattacatgcatgttt

SEQ ID NO: 4674 - DNA, 639 bp, Canis familiaris
  misc_feature (1)..(639): n = a or c or g or t
gtcatctctgtggtnngctggggtgtcagcgacggnaccgagtactggatcgtccggaattcgtggnnagaanngtggggtgagcgcggctggatgaggatagtgaccagcacctataaagacgggaagggtgccagttacaaccttgccgtcgaggagtactgtacgtttggggaccccatcgtctaaggcccaggcccccagaagaacattttaggaaatgatatcgtgaatcacagtcagagggggtcccatcgttacgggcactggtttggtcccgccacggtctgaagggacgaggggttggcatccggctggtcacggcaccgcacacctgtcaccacgcagaccgctgtggcgctggctggaagggcgctcctgagggagagtctgaaacgggatggctgagacccgggtgccagcagctcccctgccaccatgactgcggcaaaccgtttgcctggcagaggtgcaatctgtaaggcattaatgatgtgacctccggtctcttcggtgcatgatttggtgttttctatttggcaggtgtggtgtctaatgtggtaaaaaagggcagacttatcaccagttcctctgtcaccttggaatcagtggtgggggcggagggagaggatggccatt

SEQ ID NO: 4675 - DNA, 625 bp, Canis familiaris
  misc_feature (1)..(625): n = a or c or g or t
atctgtaaaatgtggataataataataataatagctanntcataggattattgtgagaannaaataggcttatacatagactatggtagagcttannnaataaatgtcaacacccttcctttttttctaattcccctcctctcannaaagaccaacacaaattagcatttcagacatacagatcattcttcattcctgtctaaagagcagactttatctcacaagttctcaaactttaagttgccatagaattacttatagagcgctttaaaaatgcagattctcaggtctccaaacctgctggatcataatcttttcaggtggtgctgggaatttgcatttaatatgtgctccagatgatctgaacatgggtcaatcactagtcacactttgcgaaccattgccttatctgttcttgaaggaaaaaacaccattagatcattctttcctatggacaaataaccttaggattgattccattgctcttgcctcccttagtggtctccgtttacagtataattatgtatgtatgtatcttctttccccactagactgtgagctccttgagggacagggtttatcttcattcccagtgccaaggaaatggcctggacatagaagatac

SEQ ID NO: 4676 - DNA, 662 bp, Canis familiaris
  misc_feature (1)..(662): n = a or c or g or t
gtgaactccgtgagcttaaaaaccaantagcatctgncnctgcagaaactaaagaaacagaaaggcaaatttatcagcaggatgctgccatagagaatgccaaacttcagtgtgggaatctngaaactcaaatcaaatccttacatacagaaaatgtaaagcttcaatttgacatagaagcagcccaggaacactttgaggaatatatgataaaatataatgaatattatacaaaaataaaagcgcataaagatagtttggtggaggtagaaagcaaatggtcactgatgactgcactccatgaaaaacgagagcttgttaaaaaactaaaaacaatgaaagaggaacttatgcaaaatctccaaaatccagaaggaaatcacataaaacaagtacaggaagatattacaaagctaaaggatacaattatcactgtaaaagaatctatcattgaaaaaacttattttcttgaggaagaaaaaaagacacatgaaaaattaagaaaagaaatagaggtgcaacataagagatacagtgcaattcttaagcgtttgcattgtcaggtgaacaagcttcagtcaaatagaagacaatggcaatggaacattcaccaactagaaaaaactgcagctgaactaaggaaacgcattggaatgaaagat

SEQ ID NO: 4677 - DNA, 612 bp, Canis familiaris
  misc_feature (1)..(612): n = a or c or g or t
agnttctgctnnncagaacacggnnnnnnnatctccgtagagtnnnnctcatcctctatctgtaagtgtccttccgagcnaggccccactctaggcagtagacagggatcctttctactgaacctttgaggaaaggaggaaggaagaaaggctttccgatcacggatgcagacctttcaaagggctaaatgtaaccacaaggatcaaccacatgcacatccttaccacagaagccgtcctttcatttcaactcctagcaagctatgattttttatatataaatattatataaataatgtataaaacattaaaagttaactatgtaagatattatttctgaaacaattttagctatatccactatgattataaactgtgtctcgacctgtgttatttacattagctgcttaaaaaagcattgagttaatttttttttaatatcaactaaaatatcgtagttctgtggtagacattgttttacaatgagagaaataactacaactagagaagactgtataaaaacattaaattgtcagtatttttgtaaggttccattttgtaaagagaataatattcaaagacttttgtagaatacaaagtgaaaacttgtat

SEQ ID NO: 4678 - DNA, 453 bp, Canis familiaris
  misc_feature (1)..(453): n = a or c or g or t
cactgaatgagnactnnnngnngcnnagcggnnngaggccctacaggtgnngggcctgtgggagggcctgcagccggctgtctgcnnncattcagcaccagaaggtccatggcccagagtgctcccgggagggtggggaacacagacgagttggtaaaagtcannnacttgggtgnnngacnnntgatttcggctcaggtcatgatcttggagtgtgagattgagccccgatctcacgtggngncncctgggcatggagtctgcttgagattctctnnnncantttccctctgcccccccctcccatccccaaacaacagaaaaggcagagaacccattggggagaggccccaaggcagagggcccggggccagggntgtggtcaggcagcacgcagggtgaggnnggtgagccagaggggtcctcnnncnnnnggggagcctggatgcacac

SEQ ID NO: 4679 - DNA, 519 bp, Canis familiaris
  misc_feature (1)..(519): n = a or c or g or t
actcacagacctcctcactacggggcatccaatctgcatttccaggaatgctctgaattccaaatgggactgagttctcttcccctttttcacagcccacacctctctactctcttactcttccacctggaagccctccatggccacggccaggcaggcacccctctctctgatggatacctgtgctggacagtgacacaggcaggaaggtcgagcacctccccaccccccattgcaaattccagcatgccaacttcagatatggtggttgtttactctaagatgtcagtcctgagaggtgtgagggctgcaggagcaggaatgggaagcacgggagctcagtgaggatggtgctggagcactgtgtggccccgtggggagcatcagaacacaggcctgacccccatgtcctgcatagctgggtcccccaggctccaccccctctggtccttgctcgcccatctcatacctgtccaagcnnncactgtttcctccnnnnnttactacttgatgtctatc

SEQ ID NO: 4680 - DNA, 569 bp, Canis familiaris
  misc_feature (1)..(569): n = a or c or g or t
ccacagcgttgccaaagaaacagcccgcannagggccatgctggattcaggactttacccccctggctccccaagcaagtaaccggcangaagagggaacccgagctgccctctggcctgccctgtgtcctccggggcacccgcagacctcaggacatggagaaggcagccccggcgggtgttggaagcatttatatcttacccgtgtagagcgggactcaagatcccaaaggattatggctctttcttccaagagtgagctgaggcttctacacattcacttgatcttagccaaaaggccgaaaagcgatgcctctacacattcaaagtccaactcctctgccttcagccctcgttaatgaggcgcttcctgggttgcatgttctctgactagttttcctttatttatagaggatttggagaagagggcaggcaaagtcatgggaatgacttctgcctaccctcgtattgattgcacttggcttgaatatagtggcagtatttctagaaccatttaattaaataaattcttaaacagtgttcttactttactctggtatatggaaagg

SEQ ID NO: 4681 - DNA, 702 bp, Canis familiaris
  misc_feature (1)..(702): n = a or c or g or t
agaccantatccgnntgactctnnagaagagatttcaagnnnnncccaaacccagctcagagnagatctccatgatgcagagnnnnnngtccatnnngaaggaggtggtnngagtctggnnctgcaaccgacgtcagaannagaagcgaatcaactgccctgtgaccacacccatcaaatcacccatttacaactcccgcctggtctctccctctgggtctctgggccccctctctgtccctcctgtccacagcaccatgcctggaacagtaacgtcatcctgttcccctgggaacaacagcaggccttcgtctcctggctcaggactccacgccaacagccccactgcatctcaaaataactccaaagcggcagtgagctcctccagttttaactcttcaggatcttggtaccgatggaatcatcccacctacctccactaagaccaaaaagtttcttcgaattcacctggccccgtatgcccccctggaaggaagggaatcacgccttcgccctctgtatggacagattactgtcaggagagtggaagagaatccccactatcaacccaaactcttgcttcttcaggagtgagggcatccagagatccaaactgtgattgaaccatgctttggctccaagagctcttgaaacacatgcccttcccacccccccacccccaggtgttgaccatgttcgcct

SEQ ID NO: 4682 - DNA, 644 bp, Canis familiaris
  misc_feature (1)..(644): n = a or c or g or t
gaaaatctgtgtcacagattttatgtannagctttcctcncagnncgtccccaagagcagttggttttggnctttgtgaccttctctgtcttccttcagcagaatcacatggcaaatcgcttattcagcccagtgcttccaaaggaagggacacatgctccatagctgggaatgcccaaagagtaggaaacccaggtggctgtggggcttctctcctcaccagtctccagcaggggacttttaacctgaaccgataatactagcaaacctgcagggagttgctcacccacgagaagctttttacttcctgttccttaaagatctgattagtctttaagaaaacttgaagatgaaggcaaaggtggtatgtaatatcttagaagaatggaacagttaggagaaattgttggtagggagggaggcagacagagtgacaagggaagtgctatacattaaatgcatgtgagtagctaacagaagaggtttaaggaggtcccgggagacctgtgccgccctcatcccatgagcctgcctgttagtgccctgctgtcactgaattatggatcctcccatttggagggggatcttggggttagactgacgagaatgggaagggtctagaatgagcgtcaagttctcttaga

SEQ ID NO: 4683 - DNA, 540 bp, Canis familiaris
  misc_feature (1)..(540): n = a or c or g or t
tnnnagtcctgcttccctgagattacntcgagagactacgntgattggnnnnnctgggatttttagatccccatgtccatgcatgacagtctcctgtatgactgtctctcacagctggnnaagtaagcatagccattgtctctggattctgctggtttagaaaggccaccttatctccaagtttctagagggtacctcattaaaaaagaagaaggcatcctccctcttttgataatattttcctccctacagaaggatggaaggacagagggccctgaagacaaaatcactttggagatggactctagccagcctacctagggcccttttcagtggcactgggtctcagacttctggttgtggcataagaaagtgccatgccaggttcgtacttttctctttccggccacagattgtctgttgacccttaaagaatattttcggagcatattttttgtaacacggtgccagaaaatacagaaaatcnnnnnaactgagccatctctctgtctctnnnnnctctctctctctctctccctg

SEQ ID NO: 4684 - DNA, 563 bp, Canis familiaris
  misc_feature (1)..(563): n = a or c or g or t
gaccagctagcttccaagctngaggagacactgcccgtcatccgctccgtcagtgaacagttcaaggaccctgagcagaccactttcatctgcgtgtgcatcgctgagttcctgtccctgtacgagacagagcggctgatccaggagctagccaaatgtaagatcgatacccacaacatcatcgtcaaccagcttgtctttcctgaccccgagaagccctgcaagatgtgtgaggcccgccacaagattcaggccaagtacctggaccagatggaggacctgtatgaagacttccacattgtgaagctgccgctgctgccccacgaggtgcggggggcggacaaggtcaacaccttctctgccctcctcttggagccctacaagccccccagtgcccagtagcactgctgccagccccagtcgctgccatttcacacccaccctccacccctcccccggggcagagtttgcacaaagtccccccatagtatagggggagccaagtggggggcggggggcggggaggaggtctgttccccctggtggggctgggggggctgtag

SEQ ID NO: 4685 - DNA, 595 bp, Canis familiaris
  misc_feature (1)..(595): n = a or c or g or t
atttcacnnggagagaggccatcaaacagatcgaggtgctgcagcacgtggccaccaacctggggcgcagcagggcctggctgtacctggcgctcaacgagaactccctggaaagctacntgcggctgtttcaggagaacctgggtctgctgcataaatactacgtcaagaatgccctggtctgcagccacgatcacctgactctcttcctgaccttggtgtctgggctggagttcattcgattcgacctggatctggacgctccgtacttagacttggccccctacatgcccgactactacaaaccccagtacctgctggacttcgaagaccgcctccccagctcggtgcagggctcggacagcctgtccctcaactccttcaactccgtcacctccaccaacctggagtgggatgacagcgccatcgccccatccagtgaggattatgattttggagatgtgtttccagcagtgccgtctgtacccagcacagactgggaaggtgggccagagtccgctgttaccctcttttcctgttttgctgcgtttccgtgccaagcttgctgcatgattcgaaatcagctcgttgttta

SEQ ID NO: 4686 - DNA, 637 bp, Canis familiaris
  misc_feature (1)..(637): n = a or c or g or t
cannagactgtttaatactgttacttttatgtagaacccanggaatgccttcccatcatantnnngccaaaacaactcgttatatgcctcccttgcagcangcactacaatgaaagtgattgtcaatgtgaatagcttagaatactgcaaagggtaagctgattgaatgccttgaaagtattatccactggtcagatggtaaactttattcagtattatttatagttgcacttgattgcagttctgtgaggctcgagcattcatacacctcacctgccttggcaagcctatttttgtgacatggcagcacagatttaacactatgcattgaaagcactttttttgtaatgagtttaacctcccacccccccaaaaggaatgccaattaagttttgttaactgtgtcatcaacttatcctagtacctcagtattcattcctgttacctgcatatcttaaaagaaatagctgttactaatgcctttttgttttctattgagtgtacactactgaataagtgtaggagtttatgtttaccatgtaagttttgcaacactaaaaatattttgaatatcagtcatgatggcaatttctgtataaaagagccttaaatggaacattgtttttgagatcaaact

SEQ ID NO: 4687 - DNA, 648 bp, Canis familiaris
  misc_feature (1)..(648): n = a or c or g or t
attatgngnantagatactcctcacagccggagaaaagaatatngacaggaagatttggactccacatttattatatgtgaagacatcaagaannnnaagagtaaatcannngagcaagaatcactgccaaacaataataacattttacaaaggcttgcctcttcttcattctcaactaaacatcctctgcctataccaagcatagaaccatcctacatggcaatgacggctgctgccagaaggaaacggaagttaacaagttctgcatcaaatacttcattaactgctgaggtaaatcctggatttgccaaacgtgttcgacaagatgatgcaagtgaaaaggtcttacaagaaaacagaccaacagtggactataaaagaaacatccataaagtaaacccaaacatggttagaaaatttggaagaagtatttcaaaaggaaatctgagataagtcacttcaaaatcaaggaaaatggaattgacaagtctccttttaaaaggatctgttgccagcgccctttcagaaactagctaaaatctttgaaagaagaccatcttaaagctaggtttacccaaataccttcagtgagcagaaaataaaattctttctgttttgttcttttgtaatctaagcaaatattaaat

SEQ ID NO: 4688 - DNA, 533 bp, Canis familiaris
  misc_feature (1)..(533): n = a or c or g or t
ccccaataataaaccctctgccttttggnngcagattgttctcactgcgatattggacactacaggtatctgtccccaggccagcagggacctctgaagccttcttcatggcctggctctttgttttgttttgttttttttccatcctgtggtttttctaatggatattcaggacttttgtaatctcatagctatttgagctccactttccaaattttaagaactttaattgaaagtttaaattgaaggtgctgtttgtagacacataacacccaatgaaagcccagccatcatgacaaacccttgagtgttgtcttgagaaaatgatgctggtcatcacagcttcagcatctcctggtttttgatgttnngctcccccggctgatctcagagtttcctggcttttcctcctccccctctcacccctttgctgtcctgtgtagtgatttggngagagaaatnnntgctgcctacccccccacccccacctgcccgcactacgtatgagtttcaagttttattattgcaataaa

SEQ ID NO: 4689 - DNA, 622 bp, Canis familiaris
  misc_feature (1)..(622): n = a or c or g or t
ctgatcacgggccagtccaacatgtctgcatcagccatgatgaactacttcangccgctgctggactggctgctcacggagaacgggcggcacggggagaagctgggctggcctcagtacaactggacgccaaactctgctcgctccgaaggccccttaccgggcaccggccgcgtcaacttcctgggcctggatctggagaagcagcaggcccgcgtgggccagtgggtgctgctcttcctgggcgtcgccctgctggtggccaccttgggcctcacccagcggctcttcagcatccgccaccacagcctccgccggccccaccgagggccccagtttggctccgaggtggagctgagacactcctgaggtgaccgctgaccgggccgggcctgccggggagcgtccgccaccgagagacccgaccgggggctcgggccgtgggctgaggacccaccactcctctcacggctcaccccagcgcgcccgcctcctgtcaccccgcctgtcacctccctcctcaccacgcctcgaatcctgtgctgacgatccgccctccggaccacaaacccccgtggcccctgcccccgagtccccgggcagcaggccacctaacacggag

SEQ ID NO: 4690 - DNA, 542 bp, Canis familiaris
  misc_feature (1)..(542): n = a or c or g or t
taataccacctgnngcagcaannacnactgcnntagccnagcccctcggcccaccccggccctgacccttgtcctcctcacctctttggctggccttggnntctggctgcttcactaagactcactccctggctgcccctccttggctaccttgagcttagccgagtctccctgtccccgggttccccatactcgtctctccttaactccctttgctcagaaaagcatttctccaggctcttcacatttctttaattaagcagtgggctcctcacccatccttccaccttccatactccactcaccttttcctgaatcccttcccatatccctccagaccattccaaatctcccactcgtcgccagaagagctccttgctttgcctcctacactccaccatgccgactaggggagggatggggatctgggcctgaaatggggcttctgtcctgtcccccacaaaggctcccaggaaggacccgatgacctcactgtatggggttgattccctaaaccctggtccccgtacatacctcatcct

SEQ ID NO: 4691 - DNA, 403 bp, Canis familiaris
  misc_feature (1)..(403): n = a or c or g or t
gtcaaggggctgagnnngttcaacnnnagattccgggggcccggagcnagatgactttgcagatngaaagaggtgaaaatgaagaaggaagctatgttgaaacannnnnnngtcaaaaggnacaaanattacaaagaaccacgcaggaaggaaaacaaactatgtattaatttaggatggttgagttacatttaaataaaccaaatgtgctttgttaaagttcaaatgtgcagcagtagcttgggtatttttggtttatatgccctcaagtaaaagaaaagcagaaagggttaatcctattttaaaaccatattttattgtattttgatgagatgttaaattctcaaaagttttattataaattgtactaagttattttatgacaggagaagttatttatgct

SEQ ID NO: 4692 - DNA, 476 bp, Canis familiaris
  misc_feature (1)..(476): n = a or c or g or t
cgggggtcagagttgctgtcatccatctgctgaccctttggaccactcggccactggcatgctttccaagtctgtatccatgagtggcatcaattgcctcttgggcagctctgatccagctgggaatttataccagtcctctgccactgaccttagccaaagctgtggccaattggaaggaggcttgggtacctgggtaagctccccgctgcagcgtaccttcagcttcttcctgagcatgaccggaaaggctaagctggatggccactggagtcagctatgcctcagtcagcctgtcctggaatatacagggtccggagcgataaaaagaacccacacacactcgtgggctctgtagcacttgggcccggggaatccttctgactctgactatccatctggtggcctagactctgacannaagctcnnnccngngannnnctccccacccatgaagtgtggggaacacatttgtc

SEQ ID NO: 4693 - DNA, 520 bp, Canis familiaris
  misc_feature (1)..(520): n = a or c or g or t
aattgtcaaaacacctccaggtatacttttacnctcgcgtaaagagtttgaacataagacccacattatgggctcagattctgacatattcacaaacatagggacacctgagttcccttccagtggtaaaacttcaagtcacagcaaacaatttgtgaccagtagtacgacttacaacagaggagactccgcatttgaaagcaagagctataaaggggcaggtgaggccggaacggaagcagaacgtgaaatcttcagaggagaatatagcatcaaaagaggccatgctaaagctcgccctgccagaggtatccgcacttctcctttggggaagccttccctgaccccctagactaagttctctattcttgcaatgcctcccatggcaccttgaacctctttcctagccctctatgacactttatagaaattacaccttttgtttgtttgtgtttggggactagactgtaagttccatgagggcaagggttttgtctatcatgtgtattcctaaatgccc

SEQ ID NO: 4694 - DNA, 69 bp, Canis familiaris
  misc_feature (1)..(69): n = a or c or g or t
cttctctcctccagcccggggagccctgcaggcccccagaagcagcccagttctcggaganccctcaga

SEQ ID NO: 4695 - DNA, 610 bp, Canis familiaris
  misc_feature (1)..(610): n = a or c or g or t
atgacgattgttccagggctcctgaatctgaggatgattcatttcttaaggtntctggaaaagtattcaccccagccctttatgaaccgagtcagtattttttcctgaaagccctcttccccctgggagagtctggctgatgacttcggagagaggtctggccatcgatttgggggtgtcacatggccagtgacccacattctctccaactgcccagtgctgccaggagagtgtcttccttctttgttctgtgcccaggcctgaggccgcaggcgatacaggcccagctcatgaagcagcctggcctctcctaggagaggccacaatagtgcgcttctgtctttccctgagaacctgctttctccttggcagcaaggcacggcccaacctcctctagagtgacttcgtttctgcagtcttaactgatctcaggggtgtcagcgaggtgtaggggaggtagggacagagatgctgggggagtaaggccaagnnnacacccacaccctccagcatggcctttgacccagaggtgagggaccatgcctgtcacttgtgggtgccgtttgttattgtttgtgtatttaactaaagtctgaaatgctgtgacttt

SEQ ID NO: 4696 - DNA, 592 bp, Canis familiaris
  misc_feature (1)..(592): n = a or c or g or t
gatnnaaacacaattatgatctgagaccatgagcccagtanctcagatatttctacaatattgtcttnnaactcctacnngtctcattatgtctgtaccctggcttcataactgagctggttatgtgccatgataactctgacatggacactaaggatgatcacaaaactaatgttaacctttctcttctttaaagtggtaaaaattttacttagtcttttttttttcttcctaagaaaaaagaaaaaccagatatagcttgtccatatgcttattttatgttaaaattgaactcctttctttttagctacaaactattatgttgggtgggcctctctttagtgattcagagtgtgtattttctatttcattgttgaaatgtttcttttccccttataattccctgtatatggttactcccctcctttctctcacttggcagaagacctattcatcgtcttaaatgaagaaacaatataattttatggaaagaatgttagtttaataatcaagaaatatcccattgctgccttcagttagctattttttgcacttactaagtgttcaacctctactaattaaatagaattga

SEQ ID NO: 4697 - DNA, 469 bp, Canis familiaris
  misc_feature (1)..(469): n = a or c or g or t
caaatgttttcntgagagaaacaagccagatgaaattgctaaatacntngaaacagtgaaattanngggctatgctgagaaacctctctatcagaacttgcgagacactcttttgcaaggactaaaagctataggaagcaaggatgatggcaagctggacctcagccccgtggagaatnnaggcttgagagcaaagtcaatgacgaagcgcaagaaaggaattgaggagagcacacagtccagtgttgaagacatggaatgctccgatacacagacaaaagaggccacacagacccgttcaaaaaccagaaagagagtccagaagtaaatcaaatgctgtcaaccgacttttcttttcttcctgtcatttaactttttcctctttctctattttaaatgttgtattttcatgtgagtctattagggtgggactaaccatgaaaatacctatgtctttgaaaaatataaa

SEQ ID NO: 4698 - DNA, 145 bp, Canis familiaris
  misc_feature (1)..(145): n = a or c or g or t
cagggtttccacttnnnccaacagatatcttgtaacccacagatatttatttttatttttttatttttttttcccnnnnntnnnnnnntaatnnnnnnnnnnnnnnnttatcctcncaccnnnnnnnnnnnnntatttttannnn

SEQ ID NO: 4699 - DNA, 480 bp, Canis familiaris
  misc_feature (1)..(480): n = a or c or g or t
ctgcagctggagatttacctgcttttgtgngctgtctaaagcaccactcccgctcagctttgattctcctcccagtggtttccactgatgcaggggcttctcctgaaggggagctctggctggtcagtttggaaggttcagagttcagagctgactgcagaccactcctccttcctgccaggattgggcaaagcccctcccaggacaggccactgttcttgacaggctcccttcctccttctagcccattggggctttcctggtctaggtctgttggctgatcccaacctgtttgcatctggggttcatgggactagctcaccagctagttttgtggccactgctgcccacggccaggtttcttgattttactggtcagtagctctggctgtggggatttaagaagatccaaagcctgtnnnacgccattgcggccctcctgcggggactcttgggcctgttcggtctgcctgcttcagc

SEQ ID NO: 4700 - DNA, 635 bp, Canis familiaris
  misc_feature (1)..(635): n = a or c or g or t
ccagagagcagacanntangagtgacntttacagtcggtnnntanntgctatgacaaggaaatgagtgcaaagggacntgctctgcaggtgtccaggcaagttccagcttttctggcagtggcctcccatagcgtgtcatgttttcattctctgttgtttggaagttggtttcaaaataaatctaaaacttaagttttcagaggttgtaacgactaattccagttttttcgacgtgctaacgactgtggtcctcagattttctcagaaaatgaaacacttgtaaatcctctatgttatctttttggaagatgaatttaaaattcagaagtcatctggccagtaaccacagtcaggaaaagatgtagcccttcaagggctagaaatttaccatgaaactctttgatagnnnnnttttcctctaagggagccatgtagaaaattctcaagatggctttgaattcagtgttccatatcaataaccagaggctaaataattggctctgttgtttccttgtgcattctcaaactcattcctgacatagaacaactttctatatttaattttttgggaatatataagttttaagtggtgcttttaaaagaaccctcaaaagttaaaactaacataattact

SEQ ID NO: 4701 - DNA, 638 bp, Canis familiaris
  misc_feature (1)..(638): n = a or c or g or t
ctccatcagagagcagcgagagcatctcccnngtaacgcagnnngccaaacctgccactgcagctgaggcaccagtgctgcccaaggacctgtctcaaaagcttctagaggcatctttggaggaacagggcctggctgtggatgtgggtgagactggacctccgcccccagctcagttcaagccccacacccctgctggccgtcccactggcccagagcccaggcctccagccagagtagagactctgagggaggaggtactcacagacttacgggtgtttgagctgaactcggatagtgggaagtctacaccctctaacaacggaaagaaaggctcaagcacagatatcagcgaggactgggaaaaggactttgacttggacatgactgaagaagaagtgcagatggcactctccaaagtggatgcctctggggagctggaagatgtagagtgggaggactgggaatgaggggagccagagcgtacagctcnnnnacccacagaacctcccaccccttcgctcgtctcagcccagccctggaagacactgactgagaatgtttccccaatggcctctgtcaaccagagttctgggcacagattctgggtggctccttgctggtcctttgggcctctg

SEQ ID NO: 4702 - DNA, 701 bp, Canis familiaris
  misc_feature (1)..(701): n = a or c or g or t
atcnnaggttgtagtgctgncttgcaggtgtgnntaanncggatnnnnnnnnnnncntccccacaagagcagagcagctccagggtatcnnagtacaaaatgttgacctggagcttggnnttannaccacttagaactgagaaagcaagtggctgttttgtcttttttgagtaaagggggagattggctagacccttgtggtgggaggacctaagtgggctcttgagatgggccaggcagtgctccagaaggaagggggctcatcgtgggagagggtatgtgtgtgatgattgaatttaagttctatatgattccagcccatgggcttcctgaggctttttaaagaggacagggaagacataagtgcagtccctactcagcctggaggccagcctttgagaaatatgtggaaaccgtctaacctagcatggtagggtctgccccagctcttgctttttgttcttagaaacaaatatttcccactgtgaatgggaccaaatgctgttctgagccctgtaatcccaggcgtgcccgagaggagggagaggtctggtctgttggcgtggctcttttgaacatgcacggtagggatcagagcagtggccttggcaagctgcttaccccacacgagccatctcgctcctcacagtctccctttcccttggtttccctttgacttcagagcctcttagagaggaaga

SEQ ID NO: 4703 - DNA, 575 bp, Canis familiaris
  misc_feature (1)..(575): n = a or c or g or t
gagcttccaacattttaccatnaggcgtgagttcntcnnngagtcacttctgngaattccttgaggcctaggttgaaggtgatttcttccttcagagaggattcacgtnnatttccatgaggtgcctaagaactttccagtcctggatcgctttatacattcatggtttgagagtttgtgccatcagggatgtgcacttggggcttacctccatgcagctctaactccgagaggagctgatgggtcctggtcatcgctgtttctccacagaacacagttttgccacaggagacaaccatgtctcccttagacacatgtctcctgtcgagcttaggggagtagctctcaaatttccacatgcctgaggagcctattaaaacacgcagattcttgggtccacagctgagattatgattcagtgggtggagctgtggcccaggagtctgcatcttcaacaatcactaaaggtgatcgatctggtgtaggtggcagaggtccacaccatagtcttagctctcagagcttcgcggggtccattgcaccccttgggctagagggtgtgtgagccaggctcg

SEQ ID NO: 4704 - DNA, 203 bp, Canis familiaris
  misc_feature (1)..(203): n = a or c or g or t
ccgcaactctcagttngaaagtaaagatttctcaacagtgatgtcacaannnnnnccacattgatcacaacatggagtctggagaacggttaccatcctcaacagcctcctctactacaccttcatcttctctaccttctgtggcttcatcagtttcaaaannnnncctttccacgggagctgcttcannnngctctacaatc

SEQ ID NO: 4705 - DNA, 550 bp, Canis familiaris
  misc_feature (1)..(550): n = a or c or g or t
tgtcccaaggtagctnnaacgtggggccagagcatctggcntctttacttggnnnggccgcttctctgggcaagtggcaataaaaaggcaggggaattgaactacacagagccttcatgtagaaatgtttctcctgcctaaactcaggtgctaaatgaacaacaaaatgagaacctctattatgaacactttttaatgatgaaatatgtgaggctgttacatttctgggaatgacactggggctccataacagaccactagaaagaacaaattagtgagctagtcccactcagacccaataaggaaactcaatattccttccacccgttttggattttgacaaaaccagacttcatgctcagagctctatcctccagatagatacactcagaagatagttattatgaaatgcaaaactgagaaggaaagagcatggtagtactaatgcatgtaaaaaattggatattagcatggaaatgttaataagtagaaattactgaattctctgtatatgtctgttgtggaaataaaagccctggggatggatcag

SEQ ID NO: 4706 - DNA, 481 bp, Canis familiaris
  misc_feature (1)..(481): n = a or c or g or t
ctttcaatgccaaattggaccnggcgatccacatnnnctgcccagatggccncnnnnngttcactgtagagcaaggggaagacccctcggcacaggtgggcctgccgggcagcctgggcagagcgggtgacagcaatgaccgctgcccgaggccggtaccgagatagcagctgtgctgaactgaaggaggcagagaaggttcagaacagtgaaagagtgctgaaccaggaaacaaaggtttgggttctggtcccaggtgtcacaaacaagctgtgtggccctgggtgaatcatcatatttctctgggccttgtttttctcaccttgtaaaatgggcataagaatgcctgcccttcttactacacaaggtagataggagataatgaaggatagatcagagcagataataaaaaaacttgggacacctgggtagctcagtggttgagcatctgccttcagttcagggcatgatcccaggtctg

SEQ ID NO: 4707 - DNA, 570 bp, Canis familiaris
  misc_feature (1)..(570): n = a or c or g or t
ctggggaatgagctctgcagnnntgtggggtgaccannntagtcactctccatccatgtcactgtgatgtagaatgaactagtggtaggtctctggacccaagtatgtgtaggaccgcactgctctcctgcaacagctttgccctctgtgagactgtggtggtggctgctatattctcccatggtaacctcctggccagagttgccttcttcaggggagggcatctcaatgaagctggcccattatgatacctgtctttttggccactggtgattgagcagtatgggcacttgcactatgctggtacagtcacaagtctttccttggtggggggaagttgtgtgtaggacagaatattaatccacacttccttgaggatgagaggcccatgatgtcaatcttgggaactttggtggttggagaggaggtcactttgcagtgggagagttgaatctgatgtactgagggaaacagacatgcaagacagagtcatatgagccctggtgagctctagggccctggttccagctgtgcctgaagtccacattttctcttcctgccccatggttt

SEQ ID NO: 4708 - DNA, 406 bp, Canis familiaris
aaaacttgggaaggaagagcggaaagggacagcccaggaaaagaagcagctgggaatcagagagaaagaggacaaaaaatcagccaagttgccagggaaagaggaccgttcaaacagtaagaagcacaaggcaaaggatgacaagaaaccaatgaaatcttcaagtcgagacaggctttccttggaagaccctgcccctgacagcactaccacttctcaggaacccatagatcccctggtcatggagaaatacaccaagaggctgcacacagaggtctacgggctgctggacaccctagtgactgacctgatggtcctggctgatgagctcagacccataaagaatgtcgaggagattttgcgtctttgtacctgactcatgtgtccaaggggccttctgggaaac

SEQ ID NO: 4709 - DNA, 532 bp, Canis familiaris
  misc_feature (1)..(532): n = a or c or g or t
ttcntannnaagnctttagcccatannaatcnnntaannngcataagtaaatccanannnnagaaaaacccaatatgtgtaacatgnnaaagacaggcaatatgcatctcttcttgaatacacacaggagagaaggaaaacgaatataaaaactgtgggaagtctcagttaaagtgtatcccttattctatatcatctcacactggagagagctctaggagaaatgtagcaaaccattcactaagagttcttatcttgctagacatcagaagattaatgctagaacagcatgaaggatgtaggaattatgtgtaaatctttctttgcaataatgccgtttgtaagcagttctacaggagagcaaatgagtagattataaatgaatatgcctttctgatagcagtaagcatgcaattttactcaagtcctacatagaagttttgttagctaatgggcatgtaaagatatttagtcaaccagtggatccaaaaaatgtttttaaagttaaaaattaaagctgcaaaagaagtaa

SEQ ID NO: 4710 - DNA, 644 bp, Canis familiaris
  misc_feature (1)..(644): n = a or c or g or t
tanngacacaagagctctcttcctgccaagatttttagtttggtancagggttagtctttttgacccatgtagaattagtttttctcaactcgcgtaagtttgagtcccttcaacaacccttggagcagcccaaaccccagagtgttctagtactgctctaccgacatgtcaaggcatcatggtttcaacacactgctcagcgtcttttaaaaatagttgagcctttcctgtttagttttcctcttgttaaagaaacagaggatggggaataaaatggatttaggacacccagcctgaattgcagtttttctttgaaaaatggccaggctgtggtgccagacctggactgcttacatacgtgctcaagggttttacttcttgagtgtggcttgtttggcaaggaaagctataatcattaaagaagccctgaaacctgcccacttttaggtgaagcttgttttaagtgacagtagcctgagttgtaggagcagaggagtctgacacacctagagacagcagggcaggtttgaaagcagtggtattacccactgcctccttgttgtctagagcagtctgtgccttggtttgagctgaatttgagtgatgttaattatcttgctgctttaataaagtgaccttcagg

SEQ ID NO: 4711 - DNA, 583 bp, Canis familiaris
  misc_feature (1)..(583): n = a or c or g or t
cctgacgncgctcancnncannntcagctgcaccctgctgctcaagacactnnnnnnctactnntnnnnncngggncngatccccgtgcagtcccggaccncgtcctccacccacgatcgcctggggggcctgggggacgacgaggcccagcagacagcggcgctgatcgctggggccctgggcagcctgctcacgcccctcttcctccgcgccatcctcaccttcctcatctggtggacagccgcctgccagctgctctccagcctcttcggcctctacttccagcggcacctggcgggctcctagccgcccgcagacactcctggggccccgaggcccgggcctgagccagcggtgtaagggccgcttcctccgcgtgtgcctcagtatcctccggtgccaggtgggcctggggggcccccgcagcacctgctgtgcccgcccacttcaccgcagtgcctgagccctgggccccttgggtcccatgtttctgcctcaaaactcttgccctgggccccgtgccagaggatcccagggccattgtccctggatggcatgcccccgcgccccgctatttgacgc

SEQ ID NO: 4712 - DNA, 411 bp, Canis familiaris
  misc_feature (1)..(411): n = a or c or g or t
taagggggagcttgcnagtcagccaagccagagtngnnctacgctgnncacccaggaaacangagtnnnnttttttcctttaaaaaaaaaagatatatatatatatatatatttattttttcatgtagagnngcgccagaacaaggcttgtatggccacgatctgtggatcccccccttttttaagnnctcctcacatcttcagatcattcgaatcgtttttggggacctaatcatgtacattgacaagtgtaaattatgattttttggctttgttttctgttattttttaaggatctctgcaaaactatttaatttgaggttggtgttctatcttaaggtttgaagataggggttttttcatatgttgatttgtttcgtttggattttttttattctccattgtcttttt

SEQ ID NO: 4713 - DNA, 601 bp, Canis familiaris
  misc_feature (1)..(601): n = a or c or g or t
gggcctgggtgcannaanctcagcagaagctcgnccgccggtgcctgcagnngcagattcatcacctaaaatnnaaacacctggcgcgtnnaaagccggaacttgccttctcaaaccngtctttctccccgtgcccccctcctccctcgcgtnngtctctggccgagcatcctcctccccctggttcttccccaaaaggtaccgcattggtgcaggcttcttcccaaagcatgtgcccaggcccagttctgtgcagagaggatgcggaacagcaggctgataggactttctggagcttcagttttactatgagatttgcaacagctgaagttcagcaatttacaaggatctccagaagtggatggcgcactggttcttgttctagaccgtgacttcattttttccctcccaatctgtggaatcctaagctgtgggttcccggaagagtattcttcgtagaatgggcaattttgcaattattgttagtaattgaagaaaggaagcttttcacattgaactcagaatttcacattcagagtttctatgaaaatgcaatatgttagatgtagaactatatatctttggctttaaagttaacaaa

SEQ ID NO: 4714 - DNA, 636 bp, Canis familiaris
  misc_feature (1)..(636): n = a or c or g or t
gatggtcatccagttttttgaaaatgtgcnnatccagaaaggctcaagtccatgcagctgtggcagagttacagttctgtggtttcatgttagttaccttatagttactgtgtaattagtgccacttaatgtatgttaccaaaaaataaatctatctaccccagactagatgtagtattttttgtataattggatttcctaatactgatatttgtcatccctgcagaaagtgtattggtttttttaaaaaagaaagtgtatttgaaaataaagtcagatggaaaattcatttttaaaattcccgttttgtcagtttctctgataaaagatggcctgtttctcctgttttcaacgccacatatcccagtacccttccccagagctgggctaaataaataagaatttggtttcatgcctgagacactcagacacttcaaaaggtggcataacctctcacctggactgcagggtctggctctagttcacagtgctctttttcctcactgtatccaggttccctaccagagaagccaccagttctcttgggtggcactcaatttcttctctccagctgactaaactttttttctgtaccagttaatttttccaactactaatagaataaaggcagtnnnn

SEQ ID NO: 4715 - DNA, 634 bp, Canis familiaris
  misc_feature (1)..(634): n = a or c or g or t
accctcagctatgtnncagaaaccctnnnctccttcctgagtnggttcagcttcttcccccttgttggnngcctcacnnagtccgtcctccttctgccttaccggatctggaggctgctggtgggggatcctgggttcagcagcagctacttccaggagtgggagaagctctatgagtttgttagcagttttcaggatgagaagcgtcagctggcctaccaggttttgaatctctctgagggggcaacggatgaagaaatacatggacgataccgagagcttgtgaagatctggcaccctgaccacaaccggcaccggactgaggaggctcagaggcatttcctggagattcaggctgcctatgaagtcctgagtcagcccagaaagctcaggggatcctgaaggtgagaagaaatttccctttggggatggactcttcctggcagagccaggcagcttgtcccagctcagctttgtccatgtgggtcatcccaatagcgttaaagaaactgcttgcagtggggatgagaaaaacttaaaggagtaagaaagctattgtggtagaagagtgtgtttatgttgtgaatttctgaattctcattattgtattcctgacagtttcttcttaatatca

SEQ ID NO: 4716 - DNA, 574 bp, Canis familiaris
  misc_feature (1)..(574): n = a or c or g or t
atatacaatgatagtttgaatgtatagatgtgtatatacatatattccaacataatacattatatatattcaaattatggtatattgtacangtgcaaaattttatcaacttagaccttacttggtcaaatgcatacttctccagataataaggttgatttacctttacactgtatttgtatatttgctatttgctaaacaaatgctataaatactttacaagcacaaacttattttaatgtaatcttccatttatatttgtaaaaaacaatctaagctttagttgacaattctttgcaagcctgattgtgacataaaaactcaacagaaataagtctcatatatattgtattagatgaattcatagtcttcttgtccctatttaagttagtaagtctttataatataaatatttttatgcctagtggtgatctatttctataaaattctcttgcttagatttctctgcatctaaatatatttaaaactgttgagagcaagttatcaatcacaacagtgggtcatgggtgttatttttgttaatctatcattgaaaagttatatgaataatata

SEQ ID NO: 4717 - DNA, 643 bp, Canis familiaris
  misc_feature (1)..(643): n = a or c or g or t
agaggnnnctgggacttgggaagagagcaaagtggcaagacaggnaaactgcatcatgactgcaggccactggtgactgactactcctcatagagggtgcagaagcctggagaaagcctcccctagctgggccccatctcccccgcctgtggactctgcttcctcccccactcaacctttaactagacttgctgacaggaacaaaatggactggggtgtgcttcacctcttttcatttcctttgccctccccctggaagtggttttaatgagcagtgaaatggctaaaaggcaatcaggaggagtaaggcgccggataattaaattgtcttcccttccccacgggaaccgtagcacccgagccaggctgcccaaggggctggggggcctctgcgcacagggcagagctcaggctccatggcatccagacctcccctccgcccaccttccccagggtcctggagcatccagatggagaggggcaacgccctggtggtgctgcgcagcctgctctggccgggcctcaccttcttccatgctccccgcaccaagaactatggctacatctacatgggcactggtgagaagaacatagacctccccttcatgctgtaggggtgtgtgtgtgtgggggggggggagca

SEQ ID NO: 4718 - DNA, 445 bp, Canis familiaris
  misc_feature (1)..(445): n = a or c or g or t
gccggcgtgttncgctgccgcctgccgggcgcctacttcttctccttcacgctgggcaagctgccgcgcaagacgctgtcggtgaagctgatgaagaaccgcgacgaggtgcaggccatgatttacgacgacggcgcgtcgcggcgccgcgagatgcagagccagagcgtgatgctggcgctgcggcgcggcgacgccgtctggctgctcagccacgaccacgacggctacggcgcctacagcaaccacggcaagtacatcaccttctccggcttcctagtgtaccccgacctcgccgccaccggcccgccgggcctcgggcccccggagctctgagcctcgcccggggaggagcccggggccggcccggggcgtgcatgccgagccgagccgggccccgagccgggccncggccgaacgtcccnncggcgcgagcatgaggccc

SEQ ID NO: 4719 - DNA, 398 bp, Canis familiaris
  misc_feature (1)..(398): n = a or c or g or t
ggtcnagggggtcaaggtcctgagtctaccagctggaagacactggggcagcagctgaatgcagagctcaggggccgtggttggggccaacaggatggtccgggccccccctctccttgtcccagccccagcccacgaagagccagcccctccccagacagcctgggcctcccagaggacccttgcttgggccccaggaatgaagaacggcccctgcggctgcagcgctcccctgtcctcaagcggaggccgaagctcgaggcgccctcctctccaagcctcggatctggccttggaacccaacctccacccccacagcctacagagccctccagccccgagccaacccccccctccccagccacagaccaaagaggcggcggccccaacccctgatc

SEQ ID NO: 4720 - DNA, 503 bp, Canis familiaris
  misc_feature (1)..(503): n = a or c or g or t
tcatcatttaaaaaactgacaactattcacactcagttcnnnaaatnngctggaattggaacattttacaatttgtacctaaagaatttgggataaatttacttgttaatggcattcctacttactgattaacatttcagctcttttgaccaggatggttgtaaattagggaaaatatctgtatgttctacatccaattcaagaggactctaattacttaagagcatttatgtcataattataattttcattttttccataaaataagcattatgattgcacactcctattgtctgaatttatgtaagaggtatagcttgcttaaaatatatatgtaaagttatattttcttagaaacatggatgtttgcaacctttgctttcatagagattaccaccatgcattctccctgttttgttttcatgaagactgtgttatataccagaggcttctgattatcagtgatnaccagttttaactgcctgtatgtaccagatttgtga

SEQ ID NO: 4721 - DNA, 502 bp, Canis familiaris
  misc_feature (1)..(502): n = a or c or g or t
aattctnaccttccctgaaagcngcacctctctgtgaacaagataccgaacagctccacatttttctatgttgtgagacagnaagcaatttccttgcttcctctgcacatttttactcttccccgtactaccacagaccacggaaaacattaaacatgattctacattcagaaaagtccttccagatctcttcccgtgagatctcactgttctataccaatatttctttatattgagtccaaaggggaggaagcatgctccatagagacatttagcatcctgaaataaacaccaggatctgtaatcaccatagaatttaatgtccttgcatgatggggatatgacatttagcactgcatggtgtttggggcaagatgacaatgtgggagtgatatcttcaatttccttgtgctttcattctctgtcacctgtcctctttgaactgaaaaaaagaggcatggctcatttcttctgctttatgttttttgagattgccttgtaa

SEQ ID NO: 4722 - DNA, 483 bp, Canis familiaris
  misc_feature (1)..(483): n = a or c or g or t
tatcaangnntcacgtnggactannnnncagtgagctgtgctttccaaggacctcacgccatccccataaccgggggatgaaaaggaccactccatcgcccgcataaaactatgaatcacgagcactcctcttgcctgcctgagaactctggcatcttctacatttgattctttttttccctctgctttcattttgggctgatgctcacagccaggcctcatggctgtttatcagctgttcaaggctgtttagaaagatttctgctttcatttataacctaagtcccatgcttcttgcctccgctgctggattttctgaaggggttatgtcaaaggaaattcaacacccacttttctcatgattctctcctcagcttgctagctcatcagaaggccaatgctatttgatacttcagaagattattttccctgtgaggtgatgtgccgagggaaggggagctggccccagcgtcaggtgactga

SEQ ID NO: 4723 - DNA, 660 bp, Canis familiaris
  misc_feature (1)..(660): n = a or c or g or t
atctatgtaggataggacaaagaaacccccctgtaagatgaaaagatttcgtgatactttgtacttttgagnngttcttcggtaacactggggaggctttagataacaaaataacttgtgctccttggtaaagaggtgagaaagaactacagcttttaaatcaagctctggcacagtgccaaagccttgacccattcatccttcacctatttatttctttgttaaattttgtgacactaaaacaaagcaaaaaaaattgtgacactttactgggtgtctcgggaggtcaaagtatgaaatattctaaatatgaaatattctaaatattttttagaaaaccaatgcacttacccagtaaattatctccgagtatttcccaaatggttgctggaagagtaaattgagtataaaactgttgaaaatacatgatgatggctcacagaatgtcttcatatctgctgaacaaactaaaggcacactgctttgggatttaatgtccagtgtttttcgattccttacagcattggaacagctgatacttcaatgatttaataaagaaaaaacaatagattggactccaggatgtggataatttggcttaaaaatgtatgatcgtggatttaatactannnnntgagaaacattaaagactcaaaccgg

SEQ ID NO: 4724 - DNA, 644 bp, Canis familiaris
  misc_feature (1)..(644): n = a or c or g or t
ggatgtctatttttggccattccatgnnaggccacnnagctctgattngcgctttaaagaatcctggaaagtacaaatctgtgtcagcatttgctccaatttgcaacccagtgctctgtgcctggggcaaaaaagcctttggtggatatttgggaacagatcaaagtaaatggaaggcttatgatgctacccatcttgtgaagtcctaccccggttctcagctggacatactaattgatcaagggaaagatgaccagttcctttcagacggacaattactacctgataacttcatagctgcctgtacagaaaagaaagtccctgttgtttttagattacaagagggttatgatcatagctattacttcattgcaacctttattactgatcacatcagacatcatgcaaaatatctgaatgcgtgaaaaacttcagttaagaaaatttgttcgagattataaaattataataaacagaattgcagggaaagatgatttcaagacattggatttcatagtgctaaaaatgtatcattctgtagttaaatccctttctgagtaagtatgtaaaacctccttatgatttaaaagttgttttatccctgttatatgggaaatattaaatactttacagctttttcaagg

SEQ ID NO: 4725 - DNA, 584 bp, Canis familiaris
  misc_feature (1)..(584): n = a or c or g or t
agagcaagatgacgctggtgnngaggttcatccaggcnngaannntgtaccccgaggaccccannnnnnnngtgaagcagtgtgagctgctcctnnannagccagagctggaaggcaccatccgcatgggggacgtctatggcttcctggtgcagcactacctgcagggggaggagttccacatggcctacaagtatctggaggagatgcggaagcgagtgccctctgccaacatgtcctactacgtgaaccagcggactgtggacgccgtgcaccagggcctgggcatccctctcatgcacactgtgccagagcgggtccaccacaacagcgcagaggaccataaggaaatggacgaagaggtgctggaggaggtggagaacgacccctgagaaccactgccttcagctcctttggaactttccaggattcgtagcaagagcccgactttcttgttgaaataaaaacttgggtttgacgctccagggccctggccaccctgcttagaaggggccagtgtatgtccttctggcatcctggcccctgaggtccctttactatgaagggtgttgtcccattttttt

SEQ ID NO: 4726 - DNA, 732 bp, Canis familiaris
  misc_feature (1)..(732): n = a or c or g or t
aacaagatggtgatctggnnnnntaatgnntacgtgactgatgaagatgagaagatttatcaaggtatccgagatgttnctnnntggagtgagaannnnngaannnnncncgannnnnnatannnntatgactacttngccaagacctgtgagaagtgggtnnatggcatgcnncaatnnaaacatcttccagatgggaatatctgcaggcanctgctgcccctggttcagtgccccacnttaatcgtgcacggnnagaaggatcctctggtcccccgtccccacgtcgacttcatacacaaacacgtgaaagggtcgcggttgcatctgatgccagaaggcaagcacaacctccatctgcgctttgcagatgaattcaataagttagtagaagacttcctacagtaaaaatgcccgagaaccgcaggaacctgatgatgccttactgtggaatcacctgttggtgagcctcttgctgtcattcctcagctcacctgctttcccatactttctactcctccctgcaaactgctcccaaatagaaataatgacattaaaacatcctctaggggtacctggtggctcagtgattgagcatctgcctctggctcaggtcctgatcccgcagtctggggaatcgagtcccgcatcgggcttcccacagggagcctgcttcttcctctgcctctctgtgcctctcatgaataaataaatataatgttaaaaaataaa

SEQ ID NO: 4727 - DNA, 578 bp, Canis familiaris
  misc_feature (1)..(578): n = a or c or g or t
gcgnnnctacactgagccactgctggtgaacctgcccacaccggacttcagcatgccctacaatgtcatctgcctcacgtgcacagtggtggctgtgtgctatggttccttctacaatctccttacacgaaccttccacatcgaggagcccagcacgggcggcctggccaaatggctggccaaccttatccggcgtgcccgtggtgtccccccgctgtgaggtttgcccccttgacagcagggctgctgtttctctctgggagagggcttgtggtgatcccaagggctctttctgccactttctccagaattggcttttgaaccaaactgctccaggacgagtccagggcctagagtgcgctgtccaattcagtagccacaagccaaatgcgacatttgaatttaaattaagttaaattaaaaattcatttcctctgctgtcctagccacatttcaagtgctcagtaaccaaaaagtggttagtggctactgtactggacattgcgggcaaactttttcatcattgcagaaagttctaggacagcactgacccagccatgctgaagaacttgtatcac

SEQ ID NO: 4728 - DNA, 575 bp, Canis familiaris
ccccagtccttcctcacggccatcatgcagtccatggccaggaagaacgagtggccactggacaagatgtgtctgtctgtggaagtgaccaaaaagaaccgggaggacatgacggcaccgccccgagagggctcctatgtgtacgggctcttcatggaaggagctcgctgggacacccagaccggagtcatcgccgaagccaggctgaaggagctgacgccagccatgcccgtcatcttcatcaaagccatccctgtggaccgcatggagaccaagaacatctatgagtgtcccgtgtacaaaacacgcatccgcggccccacctacgtctggacctttaacctcaagaccaaagagaaggcagccaagtggatcctggcggccgtggccctgctcttacaggtctagtgcagctggaaccccgggtccccaggtcacgtccgaaccacaatttcaagatgatgttagaaactcagacttgccactgctacctattcttacaggaactgacggttactttttgttcccctaagtaagccagacactttagagcacgtcaacgtggacgggccaga

SEQ ID NO: 4729 - DNA, 549 bp, Canis familiaris
  misc_feature (1)..(549): n = a or c or g or t
caccatgggacagactcatctccatcacagacagacctcacctccannntnnnacagacctcannnccgnngtnngacagactcacctccgccgtnnnacagacntcgnntccgctgtgggacagacctcatctccaccatgggacagactcatctccaccacagacagacctcacctccaccgtgggacagacctcacctccaccgtgggacagacctcacctccaccatgggacagactcacctccaccatgggacagaccttgcctccaccgtgggacagacctcacctccaccatgggacagactcacctccaccatgggacagaccttgcctccaccgtgggacagacctcgcctccactgtgggacagaccttgcctctgccgtgggacagacctcatctccaccacgggacagattcacctctgccgtgggacaggcaggcctggggccctcacttctctggagtgaactttctgttgcctttaggaggagtggaaacagagacccatttctccagagnnnnnnntctctaataggagatgg

SEQ ID NO: 4730 - DNA, 554 bp, Canis familiaris
  misc_feature (1)..(554): n = a or c or g or t
ggagttgagtgaaaatgatgaggcaggaaaatcccaccttccgacggaggattacttagaagttgaaattgaagatcaagaaataataacagcagatgtagccaccaagcctttgccaatagaggaacgcttggagaatgttcttgaagaagaaccagaggaagggaccccagtgattgcagagggcttatctgagaagtccaaggaacatgtttccaaggaagaagaagaaaaggatcaaagtaagctttgggaaggaagcactgctaaggtgaaggacaaaaaggcaggtccccatagggtggaaaaagattaagtatggccattgagttgacctgccattgttcccatgcatggaagctgattttggtccttgcatttctgccaaagcttgggaaatactgttgtgataatgccagaggcattcaaattttttatttctctcttcgtcacataatcatacatgtactttcagcttgctgtttttccttctattgcattttaaaagttacttgataaatcttacatagctnnnnnnctattttctgtaaatt

SEQ ID NO: 4731 - DNA, 647 bp, Canis familiaris
  misc_feature (1)..(647): n = a or c or g or t
gatagacttcagtatacnnatcaaaaacgnnacaagaaatgatgctgnnaaataccgctgtgnngttagtgccccatctgagcaaggccaaannnnnnaagaagatacggtcactctagaagtgctagtggcccnngcagttccagcatgtgaagtacccaattctgctctgagtggaactgtggtagaattgcgatgtcaagacaaagaagggaatccagctcccgagtacacctggtttaaggatggcgttcctttgtcagagaatccaaaacttggctcccaaagcaccaacagctcctatacaatgaatacaaaatcgggaactctgcaatttaacactgtttcaaaactagacagtggagaatattcctgtgaagcccgtaattctgttggacatcgcaggtgtcctgggaagcgaatgcaagtagatgatctcaacatcagtggcatcatagcagctgtagtagttgtggccttagtgatttctgtttgtggccttggcgtgtgctacgctcagaggaaaggctacttttccaaagagacttcgttccagaagagtagttcttcatctaaagccaccacaatgagtgaaaatgatttcaagcatacaaaatcttttataatttaaaagaattccacctttg

SEQ ID NO: 4732 - DNA, 641 bp, Canis familiaris
  misc_feature (1)..(641): n = a or c or g or t
cttattgtgcgctgtgaacacgatggtgtcatgactnnagccaacggggangtgtnnttcatcaacatcaagacactcaacgagtgggattccaggcactgtaacggcgttgactggcgtcagaagctggactctcagcgaggggctgtcattgccactgagctgaaaaacaacagctacaagttggcccgatggacctgctgtgctctgctggccggatctgagtatctcaagcttggttatgtgtcccggtaccacgtgaaagattcctcacgccatgtcatcctgggcacccagcagttcaagcccaatgagtttgccagccagatcaacctgagtgtggagaacgcctggggcatcctgcgctgcgtcattgacatctgcatgaaactcgaggagggcaagtacctcatcctcaaggaccccaacaagcaggtcatccgcgtctacagcctgcctgatggcacattcagctctgatgaggatgacgaggatgaagaggaggaggaggaagaggaggaagaggaagaaacttaaaccggatggtgacgtggagctggagtttgtgattccactgagcttagaaggctttggatgcccagtggaatgcttgtctgattattgttgaggtttgaaggtgg

SEQ ID NO: 4733 - DNA, 572 bp, Canis familiaris
  misc_feature (1)..(563): n = a or c or g or t
gctncnnnnagatgtttgatctggtggtnactatggtaacannncaatnctaagcaacatgtgtatattagataattttgttgtgaagctactcacttggaatgcatccatgatgtacaatgtaggttattaaaaggcatattatttccagattgcacccaaaaaaaggttaagaatgtatgtcacttaaatacatatcattatctataaacccaacaaaatccactgctctctcttttgaatttacttagccagatgtatttttaattccatttttatggtaatgggtaaattattacttggtaaatataaaacaaacaccattcatttaaaactttatggaatttataggacatagtgtttttttgatgagaaggaataatagtccgaaagacatagagaatatttgtttttaaccaaaaacgcaccattttcccaccaccctaaagtgatttggaaaaattgcaaaagtttgacaacctaaatatctctagtatgtttctgcttgatgcgttttgcttctagtctatgcatactgtgatttttttcatgtggactcttagaacacaaaa

SEQ ID NO: 4734 - DNA, 641 bp, Canis familiaris
  misc_feature (1)..(641): n = a or c or g or t
cacagnntatgtggccangnagctggggctcctggtcttcccctacacacaccagaactgggaagtgcagtacagtcgtgatgtgnntctgccaccgcggcaagatctcaatgcccctgacctctatatccccacaatggccttcatcacctacgtgctgttggcagggatggcactggggattcagaaaaggttctccccagaggtgctgggcctgtgtgcaagcacagcactggtatggatcgtgatggaggtgctagccctgctcctgggtgtctatctggccaccgtgcgcagtgacctgagcactttccacctgctagcctatagtggctacaaatacgtaggaatgatcctcagcgtgctcacggggctgctgtttggcagtgatggctactatgtggcactggcctggacttcgtcttcactcatgtacttcattgtgcgctctttgcgaacagcagccctgggccctgacaacaatgggggcccagctccccggcagcgtctccagctctacctgactctgggagctgcagccttccagcccctcatcatatactggctgaccttccacttggtccggtgacccctggcccccactggcactgatttttccatacattgaagatnnntntcct

SEQ ID NO: 4735 - DNA, 420 bp, Canis familiaris
  misc_feature (1)..(420): n = a or c or g or t
ctttacgatggtggctcttctacttttttttctnnnaatgtgcaatctgatgcagaaagcccaactataaatcacactgaaagataatgcttctcattgaagcgtagaggcaaattcacgcttcctagtggggctagtggggcttcccttttgaccttgctacaggcaactggccccgtatagctgggagaccatatgcgaaagtcactgtcctaggagaaacagcgggggtttgggaaagcacatttaacatacagattctcagaccccacctctgagcaggttcaggacttctcgccttgaacacaaaatttaggagccaagaaagactcagtaatcaaaatcaaccatattttaatgcggtgttttgttttgtttaatcaaaattagggacatctgggtggctcagtggttgaacgt

SEQ ID NO: 4736 - DNA, 478 bp, Canis familiaris
  misc_feature (1)..(478): n = a or c or g or t
gtaataaacacaccacatgnngcancagtaagggctcctngccccccagaattgtgcgcacacagnnagccttcacccgtgcacattagtgtgcgtaaacttgtttgctctcagaaaaccatgggctccacgcccagggagcccagcctgctgcctcttccgtatcgtgaggggcactcgtccactgacaccactgccaccgccccccacagacacacagactcaggcacctgtctgttccccacaagttgcaaaccctgatgtctcgagcaacatcctgccccacgatccacgtcatgaagaatcactgtcacactccatctccttggggaaaactgtgtcaggaacaacaggagactgtctggttcctgtcagagtccaggggcagccaccacagccgcagctatggatacacagacttggggtcacccaggtgctgacgctcatgtcctacacnnnnagaggtgaggtccgcagg

SEQ ID NO: 4737 - DNA, 348 bp, Canis familiaris
  misc_feature (1)..(348): n = a or c or g or t
ggaacaactgtggaggaactgtcatttccgcaggaaatgttccgcaggaacaagtcaccgctagtgantttccagtgttggtggttaaaagcaagagaagcccgggggcccagctccctagcaggccctctgaaagcgtgggtatggctcttaggaagagaagaaacagacccgggggagaggggaggtcctgaactggctctctgggaaaccaggaatcagggaagggtttgaagatgaggatagaagttcataatctaaaactctgctctctcctccccagtgttctaggggctctgcccctacccactgcaggaaccctgccccctgccctccaccctgctaggg

SEQ ID NO: 4738 - DNA, 583 bp, Canis familiaris
  misc_feature (1)..(583): n = a or c or g or t
aaggatagcttaggtagaactgtcttagacattctgaannaacatnnnnctcagaaatctctccagattgcaacactcttacaagaatatttagaaggtgtgnnaagatcagcagcccttgaagagcatgtacaagaagatacaacacaagaaatacatatttcatctcctgttgagtctccttcccaaaagactaagagtgaaactgtgactggagaattatcaaaactcttggatgaaataaaactctgtcaagaaaaggattattcttttgaagatttgtgccacacaatatcagaccactacttagataatttgagcaagatttcagaggaagaacttgggaaaaatggaagccagagtgtaagaacttcatctacaataaatttgtcaccaggagaagtggaagaagaagatgatgatgaaaacacttgtgggccttcaggactctgggaagcattaactccttgtaatggatgtaggaatcttggcttccccattcttgcacagaattgttatcaatatctactggaccctgagttcaataaaggtggtgttaaannnnnngagatagagttgcttt

SEQ ID NO: 4739 - DNA, 569 bp, Canis familiaris
  misc_feature (1)..(569): n = a or c or g or t
tgtacnnctaggngcacctggctnngtcagttggtngagcgtgcatctcttgatctcggggtagtaaagtttgaaccccatgttggtatagagattacttaaataataaaatcttaaaaaaaaaaagatcaggtacttctaaatcatactttaaaaataaaattaccaaaaaataaaaaaataaaaataaaattacctcacaaaaatatgacagatatgagaaaggccagtaagaaataatactagactttaaaaacagttcttttaccctcaactacttctaatgtttccattaccgaagacctgtattataagctgtgtactgtattctgaagagcattccatgacctccatggaagggacatatgatctgtcagctccacttagtgtatcaagacatcagacactgaatgggacaccttggaaacactgtgccaggaagatttgggtacacaactgaactcctggtgctgcttgctttctttgggagtttgaaatttcctagttgttattaccaagaaataagttnnnnntttgtatttgattnnnnnncccttttgtctacttct

SEQ ID NO: 4740 - DNA, 587 bp, Canis familiaris
  misc_feature (1)..(587): n = a or c or g or t
acttgctcttatggtttgagatgcttgaccaaaaattttcagannaaaatatgtacccggtccctaannnnnctgcattaaatttagcagagacatttaaatggtctcattctcagttttattaaacaaaaaatatacttagcatcttttataaaagaattgatgctagaaattatggaaatattgcttaagaagaaaaaaaatcctttatttcttgcatagtagcccattattaaattcaaatcttttaaaatgctaaagagaatacagtctctaatgaaggcaataacagaatttatcaagctatagtacttttcaggtttttgtttagtgctgtcttcagcatcagtgtatctgcgtttcaagtacaaatgttttaaannnnnnattatttatacatatatgctgaactgattttaagannnnntgcatgatcctgtaggaacaacgtttttacctaaaaattgctaactttgtagtatttctaattgtttaaggattttcaaattctatttcagggagtatatcttctgtgtgttttgaaggnnnnnntgttctatatgtgnnntgcagtactgtaattcaaa

SEQ ID NO: 4741 - DNA, 496 bp, Canis familiaris
  misc_feature (1)..(496): n = a or c or g or t
atcctgganggcacggaccagatgtnnctgcccgtggtgcgnacctggcgcctcaacgagcnnnactacgggggcctcaccggnntcaacaaggcggagacggccgccaagcacggggaggagcaggtgaagatctggaggcgctccttcgacatcccgccaccccccatggatgagaagcacccctactacggctccatcagcaaggagcgccggtacgcgggcctgaagcccggggagttgcccacttgcgagagcctgaaggacaccatcgcgcgggccctccccttctggaacgaggagatcgccccccagatcaaggctggcaagcgagtgctcatcgcggcccatgggaacagcctgcggggcattgtcaagcacctggaagggatgtccgaccaggccatcatggagctgaacctacccacggggatccccatcgtgtatgagctggaccaggcgctgaagcccnnnnnnnctannnggttcctgggtg

SEQ ID NO: 4742 - DNA, 637 bp, Canis familiaris
  misc_feature (1)..(637): n = a or c or g or t
tanatcccagccctgtcactgtgtgacaatgggctccagtcatttcacccttctgagnntgcttccttgtttgtacaatgattatacttccctcacggtattgtgaggataaatgaaatgtgtaaattgtctactacaataggccctcaaatatttatttttattactttttcttacacgtgttgttttgcctatttttttttatagctgcctaaggtctagggaaagacgaagaagactggttaagtgctgcttttctataaaaattgtaatttaagcaatcacagtgacttgttttccttcaagcttctggtttttctgtgtttttttaaccataacgcaagaaacccacactttctggaggaacaagaaaattgtgtccatgctcttcattatttttatcttgacggtaaagtgaaaagacatcttaggatatgtaaggaagttttggctcacttgaagaggggatcgtggtgtttcagtacatggattctataaaccttttacagattttcttcactgccataaggggatcagtgtactgataagttaattggtgctctttcatgtcaaaaggatctaataagtgaaaaaggttcttgtacactaaagcaaatcaaatggggaaaactaagaa

SEQ ID NO: 4743 - DNA, 479 bp, Canis familiaris
  misc_feature (1)..(479): n = a or c or g or t
aaccacttaaggagaggacnngtccagaggatatcatanngtgtttatatncttatttttctggaatatttgttccagagaattctgtgtgtcagaaaatttttttagtgtctgagtccttgaattttaattatatgcttttaatgctttcagtctttgaatccacatcattatgtataggaatgccaactacagtaaagtactttaatttttgaaaaagaagttgttaaaattttctgtgtgattaattcttcataagtaaccttgaataaatggatttcttgatttatggtagaagatattggaaatggtcttaaaatgtaatggattttgtaaagcacgttgaactctttttatgacacatgaagaggaagtcactgatagatgcagagagtcttctggctcagatgtcagaccatttttgaagtagaagaacgttnnnaattatttcattccttnnnncagcctcatcctctcaa

SEQ ID NO: 4744 - DNA, 448 bp, Canis familiaris
  misc_feature (1)..(439): n = a or c or g or t
ctgcnggcccaaggaaaaactttgttcagtcggaagtcagaactcctcccacctnncannnnaagccaaacctggtgatagcagggagcgcgtnngtgggagggtcgggcctgatggaagaaaccagaacagccgccttcagtcagcaaactnnnnnntccgggaccatgctgggcngnntgagggcctgagaggcatctgcccaggagcancttcgtgctgttaattcattctttgnaaatacattccctgatgnngctgagatccttggcagaggatggagactgaaaaatcagagtttcatctttgcttttatnnnatttccaagagaggaataatgagatcacccttgtgtggatttgacattttacacaatagaaagtttaatgaaacaatgttaggtcagaagaacagtctctgagggatcaaaagttgagccnnaaaaaaa

SEQ ID NO: 4745 - DNA, 584 bp, Canis familiaris
  misc_feature (1)..(584): n = a or c or g or t
agcccccagccnaccncattcagacacacggatgttgggtcnctgcgtggatggtgacaatgtttacangcaccacactcacacattcacatacgcacacatgcacacacccgggcgcccgtgannagagataccccaaaccatngaacttctgcagcttttccagtggcccagtggtcagggtatggtagtttttgcactgtcttacttccacaaggtaagaggttaaaagcaaaaaggccacccctctctaatttatgaatggtgtctaagccctccccatcctgctacctgccctcaatgcccatcgcccccccgccttggagcagagaacctgccccctctccgccccctgcccctgcctgccagtgagcaggtttttactgtgaggtgaatgtggaccttgtttattttttccagtctgtggcgatgctgtctgtctgtctgtctgtctgtgtcttgtggctgcccctggaccagtgatggctgataaatcttatgggtttctgattgatcttggggtccatctgtgatatttctttgtgccaaaaagaaaaaaaaannngtggatcagtttgctaaat

SEQ ID NO: 4746 - DNA, 204 bp, Canis familiaris
  misc_feature (1)..(204): n = a or c or g or t
ccctggaggcagcaggtgacctcattcccccagcaggtggggagggggggagtggggagagtggaaacaggggctttagtttcactcggcctggctctgagaggtgtaagcagatcccgggtctgtggagtggaaagccaggcgtatggcggaggggggcatgtgggccggaggtggannnnnnnggagcaggagacaattttg

SEQ ID NO: 4747 - DNA, 654 bp, Canis familiaris
  misc_feature (1)..(654): n = a or c or g or t
ggtcatgaaaggtgttgcccagggcctacatacatngcacaaggctgacataattcatggatcacttcatcagaacaatgtatttgctttaaatcgtgaacaannaantgttggagattttgacttcaccaaatctgtgagtcagcgaacttcagtgaacatgatggttggtgacttgagtttgatatcacctgaactgaaaatgggaaagcctgcttctccaagttctgacttgtatgcttatggttgccttttattatggctttctgttcaaaatcagaaatttgagacaaatgaagatggaattccaaaagtggatcagtttcgtttgggtgataatgtcaaatccctcctctatagcttgatatattgtagaagttcaatgactgctgagcaagttttgaatgcagaatgtttcttggtgccaaaggggaaatcaactccaaacccagaaaaagatactgaatatannnaatataaagaaaaagaagaattaaagatggagaacttggaccaatataaggaaaagacaagaaatggtgaagccagctttgattgatggattagtattttttttgttgttgcagatgttccttttaaaactttttttcagttggctaagtaaacaaaaaaatnnnnaagtgttctggagct

SEQ ID NO: 4748 - DNA, 478 bp, Canis familiaris
  misc_feature (1)..(478): n = a or c or g or t
taaattaattgactttcggtttccagaatgactagtataccaaatagnnactcccactggacaaagctgtcctgataattctctttctgggtgagagggtttcttatgcatcaataatttacatttactcagtgagtgccctttgcagcaagacttccaaataggagttttctgcttgctcattcttgcccaggctgcattgagtgatccttagcttatcactgactttagtgataaggatggaaagccaagaaagtaatgtagagacagtcttgccaaggaaaacattctttaaataattgacaagggaatatcatgagacgtgatgcaaatttcattcaaaaattttatgaggaaattcctctctagcctcactttatgatcatatcatctttttgcaataacgttgaacagcactgattttttttttttgcagaagaaaataanncgattgtctnnnnnngccttataaaatgag

SEQ ID NO: 4749 - DNA, 527 bp, Canis familiaris
  misc_feature (1)..(527): n = a or c or g or t
agatacgttattatgacaacagcaggggtcttcatttaatagatttaataggtcnnnnntcttctttgacttctaaggtcaacctccgttcattccccatannnnnagtgtgtgtggctcccaagaaggcatcnnnagagtgacttaaaatttcaagttagtaaggatagtggtgccaagattgggcaccggtggcatagaattgacacacactgaatcttggattcctcactaaactgtgatctagggtaagttactgaagttctcaatttttcatttataaaatggagtccttcccttctgaggtgcagtggtgatcaatcaagacagcatgtgcgacacacttagcagagtgctaccccaaagcaagtgcaaagtttcaatcaatgttagttcctccaccctgctaatctattcagtctacgtatctacatagaggcgtttctctgtaaaggtaacttggggagagaccagcatgagtaagacaggctttctttttaatggtggattcgtnnctaagatgcttt

SEQ ID NO: 4750 - DNA, 657 bp, Canis familiaris
  misc_feature (1)..(657): n = a or c or g or t
cccccactcctcactcccacaccccaacacatacaacacaannnnnnngcaactccctagggacattctacctatctcagnnagcagcctgaaagaaggcattctcgtggnaggcatttggcaaaggggaacgagcccagcagtgagaagacctaatagttggctcccattaggagctgaactaaagcatggatggcaactgactggactccaacgaatcagtcagttctcactgagcctcccctctttaccatctgagccagcactggcttcagcgaggcaaacccaggcatgctcctcagctcccctgcaatagaggtctcccacccccaccccaagtcagagggactgagatgagccctaattaagaacagcgtggtcaggtaaagatcactcccccactctgcaaccttgggcaagtcactgtatcttcctgcacctgttttctccgagggggtaggggaggactctccagctcctcctgccctcaggtgggtggtgaggatgggaaagaacgagagcctgcaggaccctgagcaggtgagaacatcatacagatgtgaggtgtttttattagtccacaattggacattccctcgaaaagactgacccaaattgtaattagtaacctgggattaatgcctcccatccccnnnn

SEQ ID NO: 4751 - DNA, 494 bp, Canis familiaris
  misc_feature (1)..(494): n = a or c or g or t
ctatctgggtgatctcagccntggtaccaagccaagcttctgatagcacctgtgcctctacccctcacgtggcccggggccctcacctggttgcctgccatgacacatgcaaccccagcaatgcagtgctccccagagagagactgcctccttccctgcctgcctgtgtctgctgcctgtgaggcctgtcctccaagggcctgctccgctgccaaagagactccagcctcctgaggctggggctgctagcgatggaactcaccatgaccgtgccatgaccgggacaaggtacggccagccccactggacagggatgaactaaagagacgatggccacgtcacgggacccttttctacagacttcatcacagaatttgccaattagaattttatttcctatcatggaatgctccttggaagagatggaggatgaaatcatgtttacaagctttctattttggcatcctgctgcagagagagtttttttctatcac

SEQ ID NO: 4752 - DNA, 487 bp, Canis familiaris
  misc_feature (1)..(487): n = a or c or g or t
aaggctcnnctggctttttctctnnttagctcacccggagtatgtcacgcagtggctgtagtgtgtgtgaagcggtaatcagttgtaaggatagcacaaattgaatctgagtttgttccttctatgtttcgatttttgatcgattcttgtacttcttttggcctataatccagatttctattcttgaagatgaaattaagctgatcattgatgttttagtcatcattctgtgtctcatctaaatatttccattttctgtattaggagcaaattcttcctcccattctccctagaatactccaccccaaacgttttggaatgagtctcctttagtcttagattgtggattgtgtaacccatatactcttaaatgcacttgtttggtttggtcttaatttgactatatgtgcatgatagcagcaatctttgcttttctttggtcaaagttttctgtttattttgcttgtcatttactatgtactttaaa

SEQ ID NO: 4753 - DNA, 406 bp, Canis familiaris
  misc_feature (1)..(406): n = a or c or g or t
ctgcgctcaggagcgttccgtgcatccggaaggtcctctagcgtctgaggctctcgggcgcctccactgcggagccgtgggacctgcggcgagggccgagccctgcgcgtggagccccggcctctcgacgcgggaggnggcgccacgaccgtccatccgggcggcccagcccgtcgtgcttgcggccaggcacgaggtttccgggcgtccggcgccgggcgcttggtgtgggccgcgtgtgctgtgcnnnngccccgtaggagcaggcgcgggcccgggcggggcggggcgggcagagggctgcggaggccgggggggggggnnnnnnnnccacggnnnnnngcgctctccttcgctcccaccgccttacgggccggtgcccgcctcgcnnnnnnggcagcctccc

SEQ ID NO: 4754 - DNA, 615 bp, Canis familiaris
  misc_feature (1)..(615): n = a or c or g or t
aaagttttttaaattnnnaattactatntnncntctctnngcaaagatgtgtttncnttctnnctcccccccccccccctccagaataataagaataccctagaaatcctactgggaagtataggcagatctcttccacatataactgatgtttcttggcgtttggaatatcagataaagaccaatcaacttcataagatgtacagacctgcatatttggtgaccttaaatgtagagaacactgattcccgatcccacccagagattagttttagttgcaacatggaacaattacaggacttagtggggaaacttaaagatgcttcgaaaagtctggaaagagcaactcagttgtaacttggggaagttaacgatccgtccgggtctagaggaagatcaggaacgccttgtcgtcggccgaaccaccgtttgttgagagctggatgtcctcctcttgagtagaaaaaatatttcccttttggatttatgccgctcatcagttttgacactttatttttttacacttgtaaaagagttgagggaaattctgcctgagtatttcagacgtctttagtataaactgtacattgatcccattttggtctttttcaagtc

SEQ ID NO: 4755 - DNA, 509 bp, Canis familiaris
ccaaaccacaggtgtgtaataaacatgctaaaagctatgtagatggcccagcccattgctccttaaaaacaggctgctgaacttactttgacaacctgccaaaaatttaacttaaattaactcaataccagtagaaaacatgaaaacaaaacccctacccgtcatatcatgggaatatattccacactgaagtcttcaaagtcgctgaacatgggtctcctattgcaaaaacaaacatcccatgcccatcatcacctaactttccagacaccacaactggcaagtcctcagacccagcaataggctcagtcctctccagaaatcttgcaatagaggcctacaacccaaagcccagtgtacactaatgcacactgagtacaatgtcccatgaacacacgcagaaagacagttccccctcccccacatgcctagcctactccagaccatgtcacaaaatatttcctgtatatgggttcaccctggaatgttgtctcgactacctactggca

SEQ ID NO: 4756 - DNA, 531 bp, Canis familiaris
  misc_feature (1)..(531): n = a or c or g or t
atactcacangaggcccagccttccagnagcaggcttgnnnagtaggatgaaatccttcctgtactgttttaactccaagatgaaangcaaagggcataaggaatccatgttctctatagctgggaaggtggccaaccccagaaaagaaaatgtacaaaagatcctggctcctgccaaaagtccggtggggcaaaccaacactcagaagacaagagggaactccaaggcccaatcttcccccaccgagaagcaggtgtgcctgggcttcttggatggaccccattccccagacagtaagctccggcaccgctcccattctcaccaactccattctgcctcagtcctggaccaccctcgcnactgccctaggcactgtcctcgaatggcttgtgtcacccaatcagggaatgcaccctagatctcacctctcaccttagagggaaacgttggtctgctcaagaagactcaatacaatcaaaagactttgtaggctccccaacatctgtgtcccttgaagagggctgctactg

SEQ ID NO: 4757 - DNA, 532 bp, Canis familiaris
  misc_feature (1)..(532): n = a or c or g or t
ggattgnnctgcntgagctctacctggaccctgcatacagacagataaaccacaacatcctgtccacaagtacactgagcagctcaacagtgaacattggcggctttgcccctgtggtccctgatggctttggcattgggtatgctgttcatgacaagtggataggctgcaacgtctcctcctatccaggccgcaatgcccgggagtttctccagtgtgtagagaaggccttagaggacatatttgatgccatagaaggcaaacgcatcaaaacatagcttctggatgggtgaaaagcctccattgcttcattgacatgaaaattgggggtgtatgtagccaaaaggtgctattctgtatacaaaggaaactaattgcgaggtgcctaagcagccagtgctgtaaggcttgagcttcaaagtcatggttttaaagctaaccttataattgccaagtgggactaaatcacaggtaaagataatgagaagtttcgatattaagggcatttaatcaggaggtgggatttggaagg

SEQ ID NO: 4758 - DNA, 579 bp, Canis familiaris
  misc_feature (1)..(579): n = a or c or g or t
gcattaaaatatttagacatgnnnncaacacaggtgtcactttcaacaattgagagcattctcatgatgacccttgaattggaaaaactgatattacctagncgtatgtcctgttgtctctgccaactcaaaaataatattgaggttgtttgcaagacagtcaagctgcattgtgacggtgaatgtttgacaaatgccacacgttgtgatgaaaaagtatctataatgaatgtagaaggatcattcatgaaggtattaaaagcccggaagaagagtaccagtactgagctgacaattgagccagagaaggcatcctcagacaaaaatggcatcggtctgtcagcctttatgaatgagcagttagactttaatgatgaaagtgatgttatcagtgcgctgaattacatattaccttatttctcagagggaaatgtagaagatgtagaatcaacattactaccattcattaaaactctgttttcaaatgttcaagatggagacaagcctgtgggttacttgaaaaacaacacaaagagcccttctcttgaacctggacccaacaattcaacttacaaaaat

SEQ ID NO: 4759 - DNA, 541 bp, Canis familiaris
  misc_feature (1)..(541): n = a or c or g or t
aaacatgttacattaagaagaaggggataagaagaatgaaatatacagatgtgctacttaaagaagtnnactccggatctccanntcctggtatctggactgactttgtgacttgctttgatcaataaaatgcagcagaagtactgatgtgggatttgtgaccctagagctgaagaagcctcgcaggctttgctgtcaatcttttggaaagcttctgtcatcctgtgaagaaacatgggctagcctctttgaggatgagaggctatgtagagaaggtgcccagctggcatccagtaccaaccaccagcatgactaacagtggaatttacaaggcccagtagctcctcctgttctataattattaagaatctcaaggagatgggaatagcagaataaactcagcacaagctgcatgtccacgaagcaggccttgaccctagagataccatcttgaaccatcaagctcttgtcaaggtaccacagctgactatccctgtgtgagtgagcccaggcaaatgcagcggaatttcccaactaagtc

SEQ ID NO: 4760 - DNA, 333 bp, Canis familiaris
  misc_feature (1)..(333): n = a or c or g or t
aaatccctacataaataagaacaaagtttataaannncttatganattacaaacatttcnnatagagcaatgcaaatacatgtccatttcnccgtcaaaggtgaaagcngaataaatgggttcctcccccgtcaagatctgacatgccttnnnaaatcagtagtttggtccagnnnggtttggggggtgggggtaggggtgggggtgnnaaacaacaaactttatcattaatgaatacataaatattttcaatctgccataattcattctttctaggagattcaaaaaaaaaaaaangcaccaatttcaaaagatctggtaccacgctcttcc

SEQ ID NO: 4761 - DNA, 410 bp, Canis familiaris
  misc_feature (1)..(410): n = a or c or g or t
aaatgtacttgaaagtttaaatatattttataaaaatcgtatgggcgctgtcacatacgatacatatacatacgctgacatatattcagagcgttgtagttttaagactagtttgatttcagttttgannnnggatgacattaattgttagctgttttgaaattttatatatatatatatatatataaatataaatatataaatatataaatatatgccggtctgggctgaaatgttttatttacgatagttttatatctgtgtggtgctttgctacctgcatgggatatgggacaagaaggacgctgtaaagcagtttgtgatattaattgtatcgtaaagttacattaaaaatgcgaaacgaagcggaacctctccaggctgcagcgccgcgcacaaagttttgaaca

SEQ ID NO: 4762 - DNA, 506 bp, Canis familiaris
  misc_feature (1)..(506): n = a or c or g or t
gnnngcgcgctgcacatggccggcctnnnngagtaccctatgcagnnagagctggcctcggccatcagctcgggcaagaagnngcgganacgctgcggcatgtgcgcgccctgccggcggcgcatcaactgcgagcagtgcagcagttgtaggaaccgaaagactggccatcagatttgcaaattcagaaaatgtgaggaactcaaaaagaagccttccgctgctctggagaaggtgatgcttccgacgggagccgccttccggtggtttcagtgaccggcgggaccccaaagctgccctctccgtgcaatgtcactgctcgtgtggtctccagcaagggattcgggcgaagacaaacggatgcacccgtctttagaaccaaaaatattctctcacagatttcattcctgtttttatatatatattttttgttgtcgttttaacatctccacgtccctagtataaaaagaaaaagaaaaaaatnnnnactgctttttcggaagaac

SEQ ID NO: 4763 - DNA, 625 bp, Canis familiaris
  misc_feature (1)..(625): n = a or c or g or t
ttaannacagccaaagtcttcattacanatgaatcntgggttgcannntntatgnngggttctgtgttccattcannatnaacttnnagtgcagnnttgnntaattcttaaaactgtttnnnnnnctattcttaaaacagctagnnnnagcatggtcaagctgtgaacccaagctggactagttcagttatttngagattaagttcctcaaaaactgccagcttaagctttagctttcatttggagatatgtgcttttagtactgtgttgcaagaggtaaagtacctgtatgtaacccttttcaggcactccataggaatgtggctacaggaagccaggcacttccttgaggacagctggcgtagatttgcaccacagcagtcgtacataattaatcatagcctgcactctcgtagagccaaagtggaggtgagactcccatttcagcatgatgttctaggtggtaccatcagcccatgagaggcaacatgaactaaaacttgtacttatcccagctagactttgcttttttgctcagctgagtgttactcttttagtattcatccggatgattctgtgcctaaaatattataaatacaagaaatgcagctatatgtattcaccc

SEQ ID NO: 4764 - DNA, 505 bp, Canis familiaris
  misc_feature (1)..(505): n = a or c or g or t
ttaagtcnnnctctggaatgtgtgaaagagattgggtggtgtgaagaaaagcatggggttggaaaaggagtttgtacaggagtgagntatccagtcagnntgcagtggctaagggatatagagtatgaggtaagttttgaagaactgagaagttgggttttgcagctcaaagtatggatgtttctttcataactgcctgaaaggtaaaagcataagacaggaaagtagataaaattaactgagtctggaaaaccatttcttcagggtggtgcctgtggaaaatgttgctgtaatacagccactaaaagtgaggaggtacagatttttaaattgaatcagaaaagctctggtgctttatttggtgaaatagaaaagactggtatcataaatggaaagtataacacgattataaaaatgtgtgtaagtggaccaaatctatgcaaacttgtatttggctatggaaaaatctgtaatgacataaaggagaagcctgggtggctcagca

SEQ ID NO: 4765 - DNA, 618 bp, Canis familiaris
  misc_feature (1)..(618): n = a or c or g or t
catgtacagctctgcactctcacagccaggnntagagcgaggggctgaaggtgaacctgggattgaggctggggagaggcttgctgaaggggagaaccagttgcaggggcagagcatcaatgacatcctcatgacctcacagactctggacacagtacctctgaccccagaggtggtggggcctccaccacaactgtccaggagctctccttgtgcacagcctgatggttcccnnnnnntggatttacctgttatcataccagaagtttcttcagtccctgatcagatcagaggagagcccagaggctcatcaggacttgtaaacagcagacagaagagctatgaccactcaaggcaccaccaccatgggagcagcattgctggaggactggtgaagggggctttatctgttgctgcttctgcgtataaggccttgtttgctgggccaccagtcactgcccagccaatagtttctgaagatcagacagcagctctgatggcccatctcttcgaaatgggattctgtgacaggcagctgaacctcaggctgctgaagaagcacaattataacatcttacaggttgtgacagaactgcttcaggtcaacaacaatgactg

SEQ ID NO: 4766 - DNA, 429 bp, Canis familiaris
agccggctggctggctggggtggacggaggggtctcctcttccctctgggcacaggagaagctgggcacaggtgttggcctggcaaatacagtgggcccaggagggagccaaatagcctttccttcctcctccctgattccaggcctttgagaagtggtgccagcacctggcagccaggggccagaagagaggggccaccagcagcctgataaccgcaggcctcaggagccctgggagcagctgcaagatgcccgagcccatgtgtgcggtggacttggggcggagcaggggacccagctgcagctgtgacttgttcccatggaaagaaaaacaacactgagcccagcctcccgaaggaggaaaccatgccccacccgtctggggagtgcaggctcaggccaccaggcactcatcgcacagcctggtga

SEQ ID NO: 4767 - DNA, 542 bp, Canis familiaris
  misc_feature (1)..(542): n = a or c or g or t
cccaccacnagcaccccacaacgaaagctttgtnntgagctttttaatcattgcntaactgccagctccnnnctgccctttcataccagtagaaataattgtccgtgttttccctgttgctnnngccctgtgtcatcctcccctgttaagtccatttgcagattcccattcctgtccggcaggctcttaactctggccccagctttcattgtggctgtgagcagcatcccagggttttaactccacccacacccgatctggccggctagagggattccacgcctgtgtgctgctgcctcccctagagacattcaggttattggagaactaatctcatctcaaggggccagacaccaagtcccaaagcctaccgacctctttccgccagaccctgaaacttggcccagtgccagcgggatgacaagccccagggtgttcctgatgaatatggattgcagatgatgtacagtttttattcccccctggctttggaggaatgaaatgatttgcacattgaaaacctgttaaccgtagcctctgga

SEQ ID NO: 4768 - DNA, 180 bp, Canis familiaris
  misc_feature (1)..(180): n = a or c or g or t
actcagtgaaataaaagtaatatttattcatggtgatcaattaaattatttgcctaacttaagcaagctactgttcataacttttccatttgacatgatgtgacagaaaagaatctgagtatacctgtggaatatgttggtttatttccagtgcttgaagatacactcaaanctaannng

SEQ ID NO: 4769 - DNA, 644 bp, Canis familiaris
  misc_feature (1)..(644): n = a or c or g or t
cacggtgaccggctggggcaacacgcagtactacggccaacaggctggggtgctccannaggcccgagtccccatcatcagcaacgagctgtgcaacggccccgacttctacgcgaaccagatcaagcccaagatgttctgtgccggctaccccgagggcggcatcgatgcctgccagggcgacagcggcggccccttcgtgtgtgaggacagcatctctcggacgccacgttggcggctgtgtggcatcgtgagctggggcaccggctgtgccctggcccagaagccaggtgtctacaccaaagtcagtgacttccgggagtggatcttccaggccataaagactcactccgaagccagcggcatggtgacccagctctgacctgtggcttgtccttgatgcgcacgcctccagggcccaagttcacctaggtggctccggccccacctggtgggttcaccctgggcccggaacgggacatttttcttcttgggctgagcccacaggcccaaggataccctccctccaaggctcctccttccacagtggcgggcccactcagccctgggaccacctgagactcaccctcctgacccccatgtaaatattgttctgccatctagggaccccatctaggtgcccc

SEQ ID NO: 4770 - DNA, 547 bp, Canis familiaris
  misc_feature (1)..(547): n = a or c or g or t
acacttgtatagnngagtncttccagcattaccgctgtttaatagaacatgattagtcatcaccgagaagaaagcatannnnncgaggaggtagttacgcagcacgcnctgatgattgccacgatgtgattgcaatacnncttagaagcatcgtattatcccagacatgttctttcgagcccttggagccctcctttctaaattcactgtcataatttagtatctgtttaatttttcagtccaaagaggggaaaccagttgctgagtattatttgactggagtctccttgggtgcaaaaacaaaatggaaaaaataaataagagttaagtcacaaattcaaaaggaaatcataaattcaagctaataataacattttgaggccatgtagtgaactaagtcaatgcataaaatgctttttttttccacctcccacccccccgccacacccccaaatatgagagagctttcactcccttttgctaaggtggctgtctcggccagtcccgagccacaccggagtgtcacacaggcttctgtgtcatgtct

SEQ ID NO: 4771 - DNA, 600 bp, Canis familiaris
  misc_feature (1)..(600): n = a or c or g or t
agaagaattaaacacacttgatttagaagaatgacaacaaacnngnctgagaaaatnnngccagctcagcatgagttgaaattgactacagtaatttttttccacctagaattcttcaacaggatgtttatttcccatgctgattctggagggcttactctcctccaaaaaaggaatattctccctacgtcttgtcttctgactttggctacatctcatagtaagttcagagtagttgatgataaattgaaaatataatggtcattgcagaaaatgattgttgtaactgtccaagtaggaagtgtaactgcttttccagcttttgattttcattgggcatgtattataagaacaacgtaaatttaaattgaaaatatccttcatttaatgcagtttttaatgagtggtttcatttcctttgtatttatatgtttaaaagactgcctaaaatatgaacactgtatttcataaaggaaactgcatatgcagattcagtattgtaaatcttcagacaattagatggacatataacgggaaacttctttaccctcacagaatcagctgcaatgccctgtgttaaactgttttaaatgtttccct

SEQ ID NO: 4772 - DNA, 661 bp, Canis familiaris
  misc_feature (1)..(661): n = a or c or g or t
ctgtgtgcaggnctttggcatgatcttcacatgctgcctgtacaagagcctgaagctggaacactactgagcatgggtgtaccactgtgtatgnngcagcntcgccacctgactactgagctgacactactgagggccaggagctgggcttccaggatgctgctccttcccccctccccactctgccagggagggtgcgttcttaagcccatgtgcacacccccaaaccatcaccataacctctggggaaggagcagtacctctgcctgtgagtggggtcacaggaccttggggttcctgatgcctgcgctcagctggaggggcggacccactctaggatgctcctagacccccagatgttcccatgcagtctaaggaggacttggctgggtggggtaggtgaagggagtacaggacacctgcatgtgaggagtcccaggtgtccgcagatccctgggaaagccaagtaagcccggtcctgccctgggagtcctgggcctcttgtcctgaagtctctgctgcccgagcctctgcttggacttccccacctctctccccaaaggccacacatttacttgtccacagtcctctctccttcccagaagcagggggtttgtgggttttattcactgctgttatcacaaatgcctagaactgctcg

SEQ ID NO: 4773 - DNA, 581 bp, Canis familiaris
  misc_feature (1)..(581): n = a or c or g or t
gcacaggaatatgggggcatcatccgacatggcgncaagcttctctacgcattngctgaagcaactgtgcccaaagtcacagtcatcaccaggaaggnntnnngtggtgcttatgatgtcatgagctccaagcacctttnnngtgacatcaactatgcctggcctacagcagaaatcgcagtcatgggagcaaagggtgctgtggagatcatcttcaaagggcacaaggacgtggcagctgctcaggcagagtacattgagaagtttgccaacccctttcctgctgcagtgagaggatttgtggatgacatcatccagccttcctctacacgagcccgaatctgccgtgacttggatgtcttggccagcaagaaggtacagcgcccttggaggaaacatgcaaatattccattgtaaacagattaaaggaaaataaaccaagaggcaattactgcctggccattcatacccattcctgccttttgcaatcatgatacttggaattctaaataccagtaataacttgaaatggctgtttattaaattctacaaagatttcatgtatgccttactgtaaaatt

SEQ ID NO: 4774 - DNA, 665 bp, Canis familiaris
  misc_feature (1)..(665): n = a or c or g or t
ggcacacatntagtagtgactgccatgtcgatnncacagaatcagtnnagcacttctgagaaagaantagcactgttgcaggatgttgaaagtgagaaggagaacaacactgtggatatggttgatcctatagaaatagcagaggagaacacttggattaaggagccggttgataatgggagtttgcccatgactgattttgtgagtgggattgccttcagtattgaaaactctcatatatgcatgtcacctcttgcagaaagcagtgtcattccttgtgaaagcagtaacattcagatggatagtggctataatacacagaattgtggaagcaatattatggatacagttggagcagatagtgatgcacaaaccttagaggttgagagtaaatctcaagtttttaatacaaaggaagaacatgtaacacagaggtgttgaatgaaaacagccaatcctcaaggcagaagcccatacctctccgaaccaaagaccatcgctcagtggctcctcacatattttttacacacaggatcaataatatgatcgtgattgggagaaagttgcttcaaccaacatgcttattagctttctttccccccttaatgtgaaaaatcaagggcttaatttaatgacatgggaacancngaaaagctcctggaact

SEQ ID NO: 4775 - DNA, 564 bp, Canis familiaris
  misc_feature (1)..(564): n = a or c or g or t
catcgtgctgcacaaactgcactncagcctgggcgcgncaaccatcagcttcttcctnnagcatttcacccacgcgcgtgtnnnggcggggcaggctgaggnctcagaagccctnnaggcgcaagccctggcgcgcggggtggctgagctgagcctggccgactacgccttcaccagctacactccctcgctgctggccatctgctgcctggcgctggctgaccgtatgctccagctcccgcgccccgtggacctgcgcctaggcgggcacccagaggccgcactgcaggactgcctgggcaagctgcagcttctggtggccataaacgaagcctccctgactcacatgctgcccttccagatacgagagaagtgcagcctgtccccgaagttgaaatgaaacagacctttggtttcctgtgtaccctgccccggctgctggacctttcccattactgtgaaagagtgcagtcttgattcatggctcccacttggccaggaggtcatcctgaaggttgtaaatagtgtatgatagtagtgtctccccctttatttattttgcta

SEQ ID NO: 4776 - DNA, 538 bp, Canis familiaris
  misc_feature (1)..(538): n = a or c or g or t
accccgatggcctcgagntgtnngagcgctgcagggccctgatcgcagaactgctgcagttcagccccnnngcnaggccctcagcgggccaggtagcgcgcaacggctggctgcgtgcgggggactccggctagaagccggggttcccaccattcccgccgtcccgagcactnngcaagcgcagcgcacgcgcgtgaagcgcgcttccgtacccccgcgaagccgacacgcgccactnnncacnnncatttccccctttttcctgtctggacggctggggccgtagtcgcccctgtttggaatctaacccctctccccacgatcccgagagcaggagggcgcaagcgcttcctctgttccccaagagaaggcctcgggaggggaagggacgagaagaaacggaagcattgcgccagcgtggaatgagcgacggctgctggcaggcggtggctacctggaggagctgcccgcgagtggacgcgggtggagggcgcccttctctaggcnnncnancatgccggtgggcgaaggcgcgctc

SEQ ID NO: 4777 - DNA, 608 bp, Canis familiaris
  misc_feature (1)..(608): n = a or c or g or t
gctccaacanctgagctgccagccatngagttgcctgcaaatgcggatgtatgtgataaaggaaannncaaagccatagatcagtatacatttgaattaagtaggagaactcatcttccagaagtattcctcagtaaaatacttgagccaaccctgaaaagccttgcagaatgctgtgactctgaagattctactggatgtatgaatgctcagggacctcaactgaaaaaggaattatcttctttcattgacaagggacaaaaactatgtgcagattattcggaaaacacttttactgagtttaagaaaaaactagcagagggattaaaagcacaattccctgatgccagtgcgacggacctccaagggttgattgacaagcgctcagactttgcctccaagtgctgctccataaactcacctcccatctactgtgattcagagattgatgttgaaatgaacaatactgtatagtcctgatgtatgtgtgcggtcttagatctagtgttggaaccaccctgggaacatctgatggcctaacctaagaaaaccagagctcctggggagacgagtgggataatccctgcttttatcagctgcaatatctt

SEQ ID NO: 4778 - DNA, 624 bp, Canis familiaris
  misc_feature (1)..(624): n = a or c or g or t
gtggngaaaaatcagcntgtnnaggttgaaaaggtggtcctacaccctgactactccaaggtagatatcgggctcatcaaactcaaacagaaggtgcccattgatgagagagtaatgcccatctgtctaccttcaaaagattatgcagaagtggggcgtataggctacgtgtctggctggggacgaaattccaacttcaattttactgagctactgaagtatgtcatgctgcctgtggctgatcaagacaagtgtgtgcagcactacgaaggcagcacggtgcctgaaaagaagtcaccgaagagccctgtcggggtacagcccattctgaatgagcacaccttctgtgccggcatgtccaagtttcaggaagacacttgttacggtgacgctggcagtgcctttgctgttcacgaccaggacgaagacacctggtatgcggccgggatcctgagctttgataagagctgtactgtggccgagtacggggtgtacgtgaaggtgccctccgttctggcctgggtgcaggaaaccatcgctggcaactaatgctgacaggctggcagcctctgcctaagagcaagactnnnctctgggaggaaannnngcatgggagtggagggg

SEQ ID NO: 4779 - DNA, 684 bp, Canis familiaris
  misc_feature (1)..(684): n = a or c or g or t
gtagnnccatcatgaacatgactcacagcgaacttatgaaaatgtttnnggcagattatttcagtgacctccggggtcacagtgatgatcagtttattgccccttgggagttctatggaagctctgtgtgtgaaccagatgaaaaagctggacataatgttttggcaaaccctccgggaccagaggaccaggatgatgaagataaggctaacaacagtgatatgtttgaatttgaattttcagatagccccctcttaccatgttataacatccaagtgtctgtctgtcagagggcgcgaaactggtttttactttcagatgtccttaaaaaattgaaaatgtcatcctccatatttcgctgcaattttccaaatatagaaatcattacaatttcagaggcagaattttacaggcaggtttctgcaagtttcttatattcttgctccaaagaactggaagccttcaatcctgaaagcaaggaactattagatttggttgaattcacaaatgaacttcagactctgcttggctcctccatggaattgttaaatcctagtgacatggccttggagaaggacgactgatgagcagcagtatagtcgcactgtggacaggtggtgttgtgtcaattccatgcatatttgttcaaaatacaantntttctttaaaaaataaaaggacacn

SEQ ID NO: 4780 - DNA, 520 bp, Canis familiaris
  misc_feature (1)..(520): n = a or c or g or t
cactccantctgtcacaaaaaagagcangtgaaaaatcctctgcccttcctttaacttctttttgtnnacttannnggtnnnnngntgaaatgccccancgggnnngccctgcctcactgtccctcgcnngtcctgggtnnnctcagtggctttgtgaatgttaagaagggcagaggcctcggaggattgagatgtttttctatatattagaactattttttgataaattatatatattttacttcctggttgnnntgctcctgcctgtgtatgaccagcattgcagccttgtctgcattctnngtatccatacgttttagctaagggccacagcagggctcacacctgacaggtgctcccaaggcctactgtgagggccgagacttccctgggacactgggatttcaatcactgggccccagagcgaggtagtgccagagccagcacaggcagggccctcctaccctcccaccttcctannntttatttaagctgtgctaaatgttttcttcacaggaa

SEQ ID NO: 4781 - DNA, 378 bp, Canis familiaris
  misc_feature (1)..(378): n = a or c or g or t
ggaatccagattgagnncctcacctggtggaccttggctcaggatgtgctggtgggagcgaaagcaggtgatagccagacaccccagaaacatgctttttgggcccgtgtgtgtggcttcaatgccattctgctcatgtgtgtcaacatctncttctacgcctactttgcctgatgctggccctgtgggcaagaaggccaagtcgttggagtccccatgtccaccttgctttcactgatgaggacaccgaggcccagagaggtgcagactcacctcacgactacacagccagtcggtgcccagggactgggtgagcctacgaagcaggagccgcgaagaaagtaggggggcaatgaacagaaagaacgagatatttcg

SEQ ID NO: 4782 - DNA, 613 bp, Canis familiaris
  misc_feature (1)..(613): n = a or c or g or t
catgaagnncagcacgagtnnaactgcagagagagggtcacgcanncagaaagcaagtnnnnaannnnannnngtcaggatacgtnacttgaaattgactnctttggaaattgccatagnacctttnntngacatcatcagctnnaactgggatctgatgaatcccacaaaagtcagcacctgctacagaacagatgccctgatcaccaaggacttggtactgatttagagagaagagagcagctcctagcagcatcaacatctatttgtcgcttatttgccctgcagcaattcacctgcctttccttctcccatcctttttctggatatgccgcagaaggatccgtgccagaaacaagcctgtgaaatacagaaatgtttacaaggatttgagaaagaagaggaagaaaagctgacactgaagctgacatcaaagtgaagttctgccgagaagttaaatgctgctgctgagaagttaaatgctgcaccatgtatccaccaagcaagttttttgtcttcctgactctttcttcaggccaggtagcagcaaatagcaaattaaaaaaggcaactataaaagtcaatatgccatctatgcagaacagatagaaat

SEQ ID NO: 4783 - DNA, 607 bp, Canis familiaris
  misc_feature (1)..(607): n = a or c or g or t
ccaagcctggcatccaggnangaaacccattcacacnagcagtctcagggcagctcccctgctgtagatgcagccatcacccnnagatcccctttttgtctttgcctctgatttttacacagtatggagtagccacagcgagcagagttagaggatgtgcagaccctttgaggtccaataaagtgttcgtgttcatgtttaagggacgtgtgcgactatggatggggatgtgtgcttgtggggcgcagggggcctgcactggagcccggccgtccacatggtgctcgtgtaggacggacgttctcggttacctacctcccagtctcctctgcgcctgtgaagggacagaagtgagtggtgactgacgtggctggttgcaactagactacgtagagtagttacaaggagatgtgaacgtgtgtaaggtaatggatgggatttgtctgcttttcaagggaaacattactgttttataccaaaggtattaatatgggcagcctttgacacagtgtattccaaaaaacgagtttatattttgaaatggtttttacagcttaggctttgtacacactgcccttcttgggacagttgcatgcctttatttgta

SEQ ID NO: 4784 - DNA, 508 bp, Canis familiaris
  misc_feature (1)..(508): n = a or c or g or t
agtcaattcttcatatggattggtagtttttggcaattgtaatggcattgcaatggtanantacctccagaaagcagtactcctcaanntgggcactattgaattgtatggctccaatgatccnnnccggagagaaccccggtctcctcgtaaatcnnnacaaccttcaggagcaggtctatgtgatattagtgaaggaactgtagtcccagaggatcgctgcaaatctccaacttctggttcttcatcaccacacaattcagatgatgaacaaaaaatgaataattttatagaaaaggtgaagaccaaaagcagaaagttttccaagatggtagccagtgatataggctgttactcctttagaagttcatctttatatttaatctacaatatggctattggaagaatagaagttcatcttgagagagaagatgagtcaagtgtgcagcaataccatttttataggattactaatatctgaagagtatggcatagtgtgtattgtatt

SEQ ID NO: 4785 - DNA, 520 bp, Canis familiaris
  misc_feature (1)..(520): n = a or c or g or t
ttctccaagactgcaatgaagccatttacggaaggtcttgtatagccatatacataaaaacaagtatctccatggggaagatctcgaagacattaaatgaaatgatcaacttgcagagctctatatatatagtccgatcccacctagagcttccagagtgcctttgagtactgtgcctctgtgctcaaacnnnncctattcgtttagcacctgctcctgaggatgggtgagtgctgggaccagagggagtgcagagccacaggcctccctgccctccagggctgacttgggtggagtggcagctgcccctcgccttctggctgctgggggaatatgctcaccaggacctctgcactgagatgggaaggannnnnnccgtnnnnnnccggccagggcccaggcaggcagagccagagcccaagacatcagcgggcctctgggcattctcggtacagacaatgaaatgccagcttatgatgtgccttgtggccgcccggaagtgacgaccatctgtttggaa

SEQ ID NO: 4786 - DNA, 330 bp, Canis familiaris
  misc_feature (1)..(330): n = a or c or g or t
tagcnntcagagtatggagaccatgcanatctaaaggctaggattctgtcttcattttcgtcgcttttgggtgtgtcaagtgaacaggtgatagttacactgagatgagaaacagaaaaatgggaccagccaatgaactggatttatcgatttatttcctctgctttcgcagaaatattttccacaagaacagagttttggtgaatctacctagaaatagtgagagctggctattgatatagctcaaggggtctggaaaccacacaaaccctgggagagggactgtattttatttcagagactgggagtaagtagagtttgatttttgtg

SEQ ID NO: 4787 - DNA, 373 bp, Canis familiaris
  misc_feature (1)..(373): n = a or c or g or t
ctctnnnttttcccagaggagnnatgcattttcctcctcctcttcctccacccaagtttaggggaagctgannagggagaaacagccacagctctcttccaggactgtcttctcngcnctgagctttgaggaagaggatccccttcctcctttccctggccactnnnnnngcatcctacatcctttctgggccctggaccctcaccacagaggggatgtggcccgttggcatgacataacctggcggcagtaggaaaaactcccttctgtgaaggggaagcagactgggccataaggaaacagcgggactggctcaagtgcctaaggtttgcttagggcacgggaattgnncgtgtgttatttaannnnnnna

SEQ ID NO: 4788 - DNA, 570 bp, Canis familiaris
  misc_feature (1)..(570): n = a or c or g or t
tttccagcnnnngnnctcccatgaactctttgctgaattttnnngttaatttnnnggatatatcctgccttatttagaattctaactngataagaaaattgccttttccttataagtgcccaactttggtctctagctngaaggtactactacatactttagagaaaggaaaacaacctccttcccgcccaccccggttttgtgttactgagagaaaaaaaaaaaaattcagtgctggttttgtagtagtgctcaaccaaaattggtcctgcacctacatgactgttgagtgtttgaaaataaggttttgggtgtgatacatcactacaaaaagtgctaaatgtgttaataagaacttgctgccgactgtatttataacaattattttacatttgcaaaaatgtagcacttttcctccaaatttcataggtgtaagaaaaaagggggaaaggtgcaccatgttnnnantgcaaataattttttttgaaatccagattccccaaaggaaattcaccacccagaccacacacttctcagccttttacaagccaacagactgactgaagattg

SEQ ID NO: 4789 - DNA, 470 bp, Canis familiaris
  misc_feature (1)..(470): n = a or c or g or t
gcgaccaggcccagcttctcctgaatgccagccccccccccaccncgcccctggccgggctcctctctcctcccttctctcctctccccggctcccctcagtcagggaggcaggctgtctgtggaggggccaggcacccagtcgggccaaggtgtcagatttgactgaagctacacaaaatggcatttgggtggggagcacagactgaggtgggaaggtccaccctgctgtggggggaatgcggcccacaggcccagggccccaagttaaatcctggggaactgtgtggaggaggccatggacgctgaagtgtgtggctgaggttgagggcagggcagtggggaaggatccagaggcctgacagtcatctggccagccctctgggagctgctttcagatgagactttaactctggtggcactttggtcacggtttcagccacctttgggggtaggggctggagctgtaga

SEQ ID NO: 4790 - DNA, 616 bp, Canis familiaris
  misc_feature (1)..(616): n = a or c or g or t
gggacgagaaggacccagcagtggtgactcagagtgatgaggctcctgctgacgaagaccanntggggcctaactgctactatgacaagtccaagtccttctttgacaacatctcctcggagctcaagaccagttccaggcggactacgtgggctgaggagcngaagctcaacacagagacctttggggtgtcgggaaggtttcttcgtggccgtagcttcaggggtggatttcgagggggcaggggcaatgggacaacccgccgcaacccaacttcccaccgagcggggactggcagggtgtaaggacgcagccccaggcacctgcggaggcagcacagaagtggagctgggtctgaggctgttggaaatcgctgcacttactggggagacgtgggtcactttgtttactgagtttggaaaatttgcgcactactacttaggtttcggacttaattggacttggacatggtctgagttagaaccacttgttttggggggaagtattcatgggtaacctctttgaggtatcttggcctgtctttcctctttagttgcgcacagcctgattctaaggtcttggtattttgggaaaaggttnctagagcaaaagcttg

SEQ ID NO: 4791 - DNA, 62 bp, Canis familiaris
gtagcgcctgccacttaattcactccattatggaacttctcttcctcttgggtctttttttt

SEQ ID NO: 4792 - DNA, 582 bp, Canis familiaris
  misc_feature (1)..(582): n = a or c or g or t
cagcagtctgtccccaannacaccacgtgctccaagaagcagctccagacccccagtgcccagccagctccgccagccacagactcccaacagctaccaaacccctacccatcctcctccagtctctcaccagccatcggtctggaagagctggtcaactttgcctcttccttggctgtggcctcttccagcaagatggacttgcccaacttggagcacatgatcaaagctccaccccagaaggccgaggcgccttctacagatcccaccacccaggtggccgtggaccagcccgagaagaaaaagcttactaaggagttgccagatagaccaccacttaaagccagggagtcacagaaagctcagaagccacaagacaagaacttctcccacccttacctcgacttcagcaagccggggatcaagagggccaccattaaaggagaagtgaagcttctccagccaccggccatgtcccctctgcctcaaggagacatgaaagactcggtgccgggaaccaggaaagggagtccattattgctgaaaatccattttaaggtgtcgtcccccacttccccagag

SEQ ID NO: 4793 - DNA, 597 bp, Canis familiaris
gatgcatgtgctgcaaagaaaaattgtcaattatgcacagaagataataaatgtttttggtgcagtgaagaaagggcttgcaaattttcctctccctctttctcattcaactgcttatcaacttctcagaggatcaattttcccaaatctccagacagaggggcaagcagagatcacaatctttggatgatgcatgtgctgcaaagaaaaattgtcaattatgcacagaagataataaatgtttttggtgcagtgaagaaagggcttgcaaaaaaatgtgttttccatatttcgggtgtcagttcagttctgtattttggctaaactgtaaagttgacatgtttggattcctgatgcttctactcgtcataatattaattgctgtactcatttggtattgctgcatctatcactattacctgcaggaagctcaagtctgtattgctggaagaccacactcaatttttgttcaccgtgggactgctgttggatatgatgaatagataactgaaaaagctcttccagagagaaaaagagggcttcttcaacggcttccctcgggattttaatcatccttacagcctctttgaaaatgat

SEQ ID NO: 4794 - DNA, 625 bp, Canis familiaris
  misc_feature (1)..(625): n = a or c or g or t
gggggnnnggcttcaagaaacaagtgtgtcccagaaagggtggcaaagggcttggttcctagagatgtcatgcccagccttgtgagtttaaagacagatgttctttgttattctagagaagcatatggctttttatgccttctttattcttccctcggttaaattgctatggaattgtctcccttcttttaatggaccgtgtctaacatctgtgcagttacaaatggggcatgctcatttgtgggtttatggagcttgaataacctcatgtctgccacggacctgctgccccatgcaaacagcgagaagcggggggcactgctggagtgtgaattaggtcagttcacagggcaaggaaaattaatgaagcaatgggtattaaggacaaaagaaatcctaacctaactgtcctggaatattgcttaacctggattcatttgccctctctaaagcttgtacatgacatgaacgtggcatttcctgggttttattttttataatacaaatttaacatgcatattacagagaatttttaaaatataaaaaaggaaacaaatcagtcataatcgtgctactcaaagactntagttattgttttgattnnnnnttcactcattttatccca

SEQ ID NO: 4795 - DNA, 561 bp, Canis familiaris
  misc_feature (1)..(552): n = a or c or g or t
gctgcaactccatcgcacatggccccnnnagctccctcctcgagtncctgggcctaccgatcctgttactaccttttacccaaagagtggcctttcatctcaggggagggtgggaggtatttttaacccttttctactttggaaaatgtcactgtgacaaaagccagtacagttctcctgcccccacccactcattggatcccaggcaggaaagcttctctctgtaacggttcatccttcaccttgttctggttgatggcaggggctgtttcctggtgtacttttgtgagggtgggggcttcccattaatcaggggtctctttctacactcttggtcagacccaaggcaatggagagaagtgctgagtgatgcttagaaagtctggaccctccagagaggatcctttccttgctggcccaggcttacccaatgtcacactgcccagggtagcctcatggctctcagggcctgatatgggcctgacaagtgcctgcaacccagcctggttcctgacctttcactcactggctgggaaagcctagcccacatcagatagaaaa

SEQ ID NO: 4796 - DNA, 471 bp, Canis familiaris
  misc_feature (1)..(471): n = a or c or g or t
ggggtgtntctnncagtcccnaggatgtgacactgtttatcttgnnnaagttgtacgaaatcctctaccactttttcactcctgaaactcgccccatattcntaaagcaaaataagcagctcactgttccttgancttgcccacagcctgtttcaaacttctatgcctgtatttgctttaaacgtctttgtttgaaacccagcttcttcttttgaagaagcttcccgttctttcctcccattttcccatctatatggaagaatccgtaagtacctgtcatgagtaagctcaaagcatgtgcttaccctccaccagaggacaattacattactcaggactgggactttaattaacagaacctaacatgatgtctggtacaccatacgttcctccttttaaagagtaaatggatatcctctaagactgatgaatcactgacctctacctctaaaatcaataatacatatgtta

SEQ ID NO: 4797 - DNA, 580 bp, Canis familiaris
  misc_feature (1)..(580): n = a or c or g or t
ctccgtgagtgtannngagtagtactggtgtgttcatcctccgatgttcatccattctgcatttcaacatgcactcngncncgagtacnaatctggagcctcagtgtaccccatggccttaggnctgcgaaataccaccatccaagctcttcctaatctctgaaactccactgtggtaggtaactggtgttgagctatcttgagtttgtagtaggacccagtagataagcacatgaagcaagtctgagttgtggtaggtcagacttaagccctaccatagaccagctaagcctcaaagctggtaataacccccttttcccctgaatcaccatccggcaagagctgcatctgatggcagtgtgtgtgatggggggtggcggtggggctgcggaagcacgagtgcttgcagatttgagaaacaccatcaaacacaattagcaaactcttgcacctgatggatctctttgccccattgtcaccttcttactgcttgttctcggtttcccccagccaaccttttcctgaactctagaaatgttcccgatcacccaagctctnnncaacctaatgccagtatgta

SEQ ID NO: 4798 - DNA, 441 bp, Canis familiaris
  misc_feature (1)..(441): n = a or c or g or t
caacnnnnnttgnnnnnnnttaatgtnaaantatatgggtataattttgananaacaggatatannnnnntnnncttannnntgganntaaacnnnnnataattcaaaatgatatgatatttngaagccacttgaaganntggtccattataacttagtagtgtgcagtattataaaaaaatacctcattgattgtcttgaattttctaccnnnnnnnnntctttggaaatgtagattaacattgagtaatagttttgttatctagcaaatttcttaatactaagtacaaaactctggacatttaggggaattttctggaatcctttttgctaatgtgttccaagactgattttgtgcttttttctgttgttgtttcttgaatgacgataagaatatatannnnnaggtgtgattggcannnnttctcataaaatttatgc

SEQ ID NO: 4799 - DNA, 565 bp, Canis familiaris
  misc_feature (1)..(565): n = a or c or g or t
gatccgtcannagtcccttgacagtcaatctgaaaccaccacccttgatctcagttccgtnctgcagcgagagttcagtgtccagagtttaacatcggtagtcaatgaggagtgcttttatgaagcggagagccacggaaagttgtagtgcaatttcagtccggacatgggtttaattgcttgttttaaactggtggtgaagtggaaattgcagaaaacctatttgttattggggtttgtgcagcatacattttcccacaaaatagttgtaaagatttaagttattttaatttattatagatcagagaactagattaaactgatcagaatctgtaagaatctgtaaattacttagtttatatcccttttgagcaggtatcaaaatgacttaggatccttaaaattacaatctattttaatttatgtggaaaaagtaagatggagaagttgtgattaatagtttttaaaaggtccccccccccaatcctctgggcatttttctttgagctgtttttgctttatttaaagcatatttattttaatgtgggtgaggggcacaatgtgc

SEQ ID NO: 4800 - DNA, 439 bp, Canis familiaris
  misc_feature (1)..(439): n = a or c or g or t
tgctaccctgaactgcagtgtgagaggaaatnntnngcccaaaataacctggatgaaaaataaagttgctattgtggatgatccaaggtacaggatgttcagcaaccaaggggtctgtactttnnagattnncaagcccagcccctatgatggaggcacttactgctgcaaagcagtcaatgaccttgggacagtggagatcgaatgcaaactggaggtgaaaggtggcctttccttctgcaggctcctcttgcaaggtgtgcctcctaacataattgattcatatttgcgagacttgcaatcaagcaatcccgaggaatactaagggcctgggccctgcctccctacactccactgctttgaaatctggttgcaatgagaaagcattttctgtttttccaccaggcactcaagtgtggtcgttttctttcctcctaat

SEQ ID NO: 4801 - DNA, 113 bp, Canis familiaris
  misc_feature (1)..(113): n = a or c or g or t
acttgaattcttgaatttcctttggggtaaaaaaggatctgaaaccataaagtgttttgaagaaattaagctacgagaacatacnnnnnnttttccttttctcnnnnnnctcc

SEQ ID NO: 4802 - DNA, 482 bp, Canis familiaris
  misc_feature (1)..(482): n = a or c or g or t
cagcatcatgaagtgcgacatcgacatcannaangacctgtacgccaacaacgtcatgtcggggggcaccaccatgtaccccgggatcgctgaccgcatgcagaaggagatcacggcgntggcccccagcaccatgaagatcaagatcatcgccccacctgagcgcaagtactcggtgtggatcggcggctccatcctggcctcgctgtccaccttccagcagatgtggatcaccaagcaggagtacgacgaggccggcccctccatcgtccaccgcaaatgcttctagaccccacgccaccaanagcgagcgaattctcctcaggacgacaaatctgctcaggttgcaggtggctgacctcgagtcaccgctgcagcaactctgtctctaacaacttgagttgctgccgccgcaaccctacacaatgtttataacgtgtacatacattaacnnnnntacctcattttgttatttttaaaac

SEQ ID NO: 4803 - DNA, 702 bp, Canis familiaris
  misc_feature (1)..(702): n = a or c or g or t
ctccagaggtcacnntcagcangattctccccctgaagtttgnnnngctacaaatctgtgaccggctccaacgcatnntgagggttaggaccgtgactgaaaagatctactacctgaggctccacgaaaaacatccagaggctgtgtttcaattctngatccgcttggtgaaaattcngcagaaaggtctgtccatcaccaccaaagacccgagaatccaattcactcactgcctggtgcccaaaatgtccaacagctccacttcaacaacacctgaaagcagcctcccgtcatccactcagcccagcgaaaacttcatgctgttggcagctgagcagaccagtggcagtttctcgaatatctcaggaagaccccagctcacagcagacagtaacaccaatgttgccatcaaaatagacaatttggacagctatcagacacccgcaagagtggtatctccagtcaatttgaacatacccatgagagctgccttgagccacagtctctgggaacaagagaatccagatgaacacttcctgcaggctcctgttgccagttccctaggagagaaccttttaggaccctgatacctggccaaaacagggtgatcttccctagcttcattcagtgcactagctacaacctcctttaatgctgttttcccactgtgggccaaaagaccatgggagaggtatgatggtg

SEQ ID NO: 4804 - DNA, 653 bp, Canis familiaris
  misc_feature (1)..(653): n = a or c or g or t
cgagttttttgaggccattggcttccagaaggnactgcttccggttcccgatcannagggcccagaagagtnctacgtgctgagcgagnnngcggtggccgaaccccagagcntgcagagacacaaggatcagctgctggtcgccgagcccgtgcgggccacactggcccgccagcgccgggtcttccggccctcgcccatggcctcccagtttgacctgcccggggacttctttaacctcacggccgaagagatcaagcgggaacagaggctccggtccgaggccgtggagcggctgagcgtgctgcggaccaaggccatgcgggagagggaggagcagagagagctacgcaagtacacctacacgctgctgcgcgtccgcctccccgacggctgcctcctccaggggaccttctacgcccgggagcgggtgggagcactgtacgccttcgtgcgggaggccttgcagagcgactggctgcctttcgacctgctggcctcgggggggcagaagttgtcggaggaggacagcctggccttcaacgagtgcgggctggtgccctcggccctcctgaccttctcgtgggacgcagctgtgctagacgacatcagggcggctggggccgaacccaanncatctattctgaaaccgg

SEQ ID NO: 4805 - DNA, 592 bp, Canis familiaris
  misc_feature (1)..(592): n = a or c or g or t
ttattgaatcctttnatcttatttgaaattaaaannatttggtgaataacagtttgatattnnnnnanngttttggaggnnnngtaatgtcactgataaaataaaagccttgttgatttngcagaaaggtactgttactgtctgatannatgcctttgttttgtacatgatccaaatctttgttttacatttcttttatccaaaatatttaggcatctgacattttcaaccaaaatttcaattatatactgtgatttttatttgttgcaatacattaaaatttcagaggtactttggggctcaaaagctaggatttctaagtatgtgcatttcacataataaagctgttaatggtgagcaaagtattatatactaactagatttttccacatctgtatagtatattatatgtattttgtggtattgagattatagaaagtttagagtgtcaaacatgcgtttaatgtgtatttttaaacaaatttatggcaattaaaatatttggagacaagggtatcacatttcaatttgtaaagatctttttaactctactgtgtcattaagatgctttgtataatgccaaaccatagct

SEQ ID NO: 4806 - DNA, 489 bp, Canis familiaris
  misc_feature (1)..(489): n = a or c or g or t
ctcgcccgcccgccttgtgtnnncgccccctgccctgcccctaccggcccaccacacctgaccataccacttccaacctcataggagccgatgtatttattttccttgagtttttatttatgctgtaaaatgtaccaagcgatggttaaaggggacgtcagacccagtagtgtgatgttggtagatgctttttaaaaaacattgttattcacaaaccccactacccagaacccccttttactcccccacccccctccaattctcctccggaaaaaccagagcttgtctgcaagggtctagagccagggccctgctgtggcccagcagcatgggtgggagcctttctccctgctcctgctctccagtccgggccttaaagacttggctgggacctattctgtgcccaggctttgctctgaatgtgtgccagggggagaagtcggcatttccggatctttctcttaagtcattttatcatggactagtgcg

SEQ ID NO: 4807 - DNA, 608 bp, Canis familiaris
  misc_feature (1)..(608): n = a or c or g or t
tctcactnngcacagcacccatcccacgcaagcatctccaccgcnnggncttcagtctacggcacagcaaggaggagcgagaggacctggatgctgatgagctggaaggtccaacctcaccccccatacagaatgggtgtccggagcatgcggtggagatggaggagccccagcccccagcacctggcctgctccgcaggtgcctgctctggttctgtggaatgaatgggggtggggccggtagtcccccagcccctactcaggaggagatggctgcggcagccaggcggctggaggacatcagtgaggactcgagctgggcccgtgtggtcaacatcaatgccctgctaatgatggctgtggccactttcttctggggcttctatgcctgaggccaactgcgttggacaccatgagccacagtcagggcagggctcagcctcaagatgaatgggggagggggagctgggggcggggcctgcagtggtgaaaagggagtatggcaggagggggaggaggtaggccctggttccccttctctccaccttgtctctgcctggggccttgtccatctgactggcagtttacagcccatgaggccttggcca

SEQ ID NO: 4808 - DNA, 514 bp, Canis familiaris
  misc_feature (1)..(514): n = a or c or g or t
agctnngtattggggccaccgctacagnnnncagcgcctgtcaacaaaagtgccccagatgctnnnaaagtgataaaaaaagaaaagaaaacaaccaagaccaacagaacaaagacaagctcaggaggcagctgggctacaaaggcacacgtgggcctcccccgacgggactccgtctgagattccggcgcctaccacgggccgagctcncngccgagagcaggcctcctccagtaccggcgacggggagctgcctggtatccctggggccgcagagccggtttccgggaggaggtgcccctctgcggccttggcccccagcgtctagcaaacagctcgttgctacttgttcccaggctccgtgtgggagcccgggagtccctcaaagctgcagggtgttcttttccaaaggctgcttgatttcacagagcccgaaaaaaaatcacatgnnnncacaccagagccatactgtgagtnnnnnaaaaatctggggtaaaaatcacctccattccca

SEQ ID NO: 4809 - DNA, 645 bp, Canis familiaris
  misc_feature (1)..(645): n = a or c or g or t
gaaaaatcattttagagctggtatgaggactgagtgagagaatgctgagcaaagtgcctgtcagatactaaaatactaannagcctttagctgccattatttctagtatcattatcactgtaatctgcgttgtccaaagcatagtgcccacaacccactgcttgagtggactctcgtgggatggagaggagctgtgcatttcatttgagatagttcttaatttcccagactcggccactcagctcctccaggtggtgtgcagataaataagcatcagcatctattttaagcgtgcttcttgtctgactttcatatttgtaattaaaaacaagatatctctacccgcctgctgtcggatattgtcagagattcaccttcgaactcctaccactcctgttttcgtttcttcatggggggacatgtatgtcatggaccactcttaaaaaaacttcgactgtttgccagttcttgtctttgcaaggcaggatttctggacactgagcacagaacatagcagagaaatgatctggaggctgaggctggcaagagatggcagctgtcagtacacctgggtcctgcctatgcccaccaacaaagcgccactgttctcaccaaattgactttataatgagcaaatgctttcaa

SEQ ID NO: 4810 - DNA, 282 bp, Canis familiaris
  misc_feature (1)..(282): n = a or c or g or t
cttccttaaccnnnaggannncccnnaagctctctccccacagaaagaggagtagtgttttaaaaatacagnnnnngcagccagatggcaggggcttcgattttccctctgcccctccctggctgcattaactgcaggtaaatgagggannctctccatgtctctgtaaaaggggtgacagtaggcatcacataaaggtgtctggaggatccgaggggatttctggcataaggtaagtacttaaaaaaggttaagtattnnnnnnnttattattattgttat

SEQ ID NO: 4811 - DNA, 672 bp, Canis familiaris
  misc_feature (1)..(672): n = a or c or g or t
tttttcgctnnnnngaaattcttcctgnatgaaattacaaatatgtgtagaatatatttaataaaaaacttataaaatacctaactatagaacttaaatatagattggcgtgtagtatatagaacaatattccatataaataactttagcctttataaaaatgaagttgcaggctgacattatgttctgtacttaaataagtgtccatggcccttaaaaacatctaagtgtaaatggtttcaaatggtcaactttgtctaaagttaatcaggttattttattcattgtcgatgctttgatgaaaaggctttatatgcagtagatctacgaaaatattgttcatactgatcagacttaaatttgtatagagcagagttttaaaacgaatgtaaatagcactaaacattttctttctgcaacctgtacttaatagattctttctgtaaactaaagagaaaaaaatatcagtgcatttcagtggtaattttaaaggtcttgattaagtcgattattgtttaagcaccgtctcagccatgttaaaattgttttctacttttatttctgaatctttaagagatttgtttaatattctgttgttagtttcaggagtattcacgatgtatctttgatatttaacctggttaatttgtgcacagagcaacaatggatagc

SEQ ID NO: 4812 - DNA, 542 bp, Canis familiaris
  misc_feature (1)..(542): n = a or c or g or t
ctgtgtcccaaccctganntnnagggaccagctctcggggatcttgaagcaagagcaccccgagtnggcggtcctggncgactctgttgaccttcaggagtccacaggtattgcctcggacagctccagtgactcctccagctcctccagctccagctcgtcggactcggactccgagtgtgagtctgggtctgaaggtgatggcacaatgcaccgcaggaagaagcggaggacgtgcagcatgatgggaaatggggacaccacctcccaggatgactgtgtgagcaaagaacgcagctcctccaggtgaccacgcacggctgttgtctgtgtagaaggacatgcccccagcgaggggcagggccctggggagggcagccttctgaagctgcagacaaggggagggccggagaaagccagagaacaaggatgccctcggaataggagtccgttcacttagcatttgctgcagtagcttctttctctgctaccaatgcaaagtaatgtggcttattttatgcataaaggcaagaatctatgtg

SEQ ID NO: 4813 - DNA, 676 bp, Canis familiaris
  misc_feature (1)..(676): n = a or c or g or t
tggtgttatgaatttgtagnnncaaatnatctgggtatttatttctataagaaaactttnnannagctgtctgtagcttttgctacaatgtaaattgtaaagtccttcataaatttgccttctaatttgctcaggatgcctctgaagtataagttgctgttatccatttacgaatcagaagtataagatacaaagaaatagaaataatcaggagtatagccatagtctggaactgaggtttttatgaaatatgaatatatcttaggaatatttgaatgctctatagcctattttaataatttggtgtttttaaaaatacgtttatacagatgcttgcattgggcaatcaggttggcaaactttatgtttgggatttagaagtggaagatcctcataaagctaaatgtacaacactgactcatcataaatgtggtgctgctattcgacaaaccagttttagcagggatagcagtattcttatagctgtttgtgatgatgccagtatttggcgctgggaccgacttcgataaaatattttttccttatcaaaattagagtgtgttttctgtgtataatagaattaatgtatcttgctagtaagggcacatagagcatttagagttgtctttcagcattcaatcaggctgagctgaatgtagtgatgtttacattgttt

SEQ ID NO: 4814 - DNA, 567 bp, Canis familiaris
  misc_feature (1)..(567): n = a or c or g or t
atcagggnnatagctttaaggtgatcacaaagctggcgggcatgnannacgangagctnncantctccacaagggaagagcagcagcagctcttgcagaaggtcctcgcggccactgacttggatgctgaggaagaggtggtggcaggggagtttggctccaaatccagccaggtgtctcggcgttttggcacaatgagctccatgtctggagctgatgacaccgtgtacatggagtaccactcggcacggagcaaggcttccacgaagcatgtgcatccgcttttcaaacgcttccggaaatgacatccatagggtcacagtgaaggctgagtgctcggcaccagcattgggtagggattttccatatccacgttctttcctgtagcatcacccaggctgagctagattcagagtttgttaactgtgttgaagaacatgcattgagaccttggttttgtcttcatgggttgtctagggcttaaaaatcttcagagcctatattttggggtttttttcagaccgttttttaatcatggggactggccattcctgtatataaatattt

SEQ ID NO: 4815 - DNA, 566 bp, Canis familiaris
gcatgtcagaacttgagggcccagctggtgatcatcaatagcacagaggagcagaaatttctgaagtcttggaatacgagaaataaccagcgcacctggattggtctcagtgaccaccacaatgagggttcctggaaatgggtggacaacactcccctccaactcagcttctggaaagaaggggaacccaacaaccatggagacgaggactgtgtagaattgtacagtgatggctggaacgataacagatgtagtacggaaaacttctggatctgcaagaagccctcgtccccctgccctggcccctgagagccattgctctccagaccccaccagtatccagagatcgggcagcctgggtacgcgttctgctggtttctctctggtcccattctttcagcttctctctctggtgaattctatcctcctcctgcatggaggtctttgagatccagagagagagagagagaaagagagagagagagagtctgaggcccccccccttctcttctaagttctgtctctccatgggctgtagacctctcccctcttctgttgatggtctc

SEQ ID NO: 4816 - DNA, 530 bp, Canis familiaris
cttaaatctcttctcaatcaataaaaagtgtcaggtgaacagccacagtatctctcaaagcacagatttcaagccgtgcctaaggatgagaaaaggaaaaagtgaggggaactgcatcaattattaaactgaaacaagcgatgagcagatagtctcagcctgcttactgcagagacggttgacagaagactgccagcacgtggttccccaccacctgccacctactaactatgaacagactttctacaacactccaaagaaatcagctatgacaaactagttttttactagtttaaaattaactaactcaaaattaactcaaagtcaagtatgactctgtgaaggcagggagtcagatttgttataaaaaggttcaacctatacagggattttccagaaatctgtattcactacctaaccggtaatgtttcctttagtatgattgtgagaggaagcaaaatttgaaacattgtccctggattatttaaggaaacagactggcttactttcttatacctatgcccttttgg

SEQ ID NO: 4817 - DNA, 531 bp, Canis familiaris
  misc_feature (1)..(531): n = a or c or g or t
ggnnaggtgattnnagtgaataccatgaaggtcacagctnnaatctccttngccatcccttctgatcgnnttcgagagtttctgcatcgtggggaaaagaagaattcctggtttggaatcagtgggtcccagcgccgctacattggagtgatgatgctgaccctgactcccagcatccttgctgaactacagcttcgagaaccaagctttcctgatgttcagcatggtgtactcatccataaggtcatcctggactcccctgcacatcgggctggtctacggccaggtgatgtgatcttggctattggggagcagctggtacaaaacgctgaagatatttacgaagctgttcggacccaatcgcagctggcagtgcgcatccggcgaggaccngaaacattgaccttatatgtgacccctgaagtcacagaatgagtgggtcagcaggagtatgaggctcttgctctgatttccaccttgctttcctggcctaggctctgagggtacctggacagaggattaaatgaacca

SEQ ID NO: 4818 - DNA, 589 bp, Canis familiaris
  misc_feature (1)..(589): n = a or c or g or t
acggtggnnagaaaggcagaacaagactggtgagctcctgcctgctnnnagatgggtatggggtggggggtgtctctcattagctcagtaacaagataaacagcctgtttgatggcgatggggtcaggaaggtgggaactaggatccactctgctgagtccaccatccatccagtttgccccacctatagtgacaggttctaatttcattccaacttcagtatatttgctgccaccacttttcagggtctaaggtcggtcatacattcccagtttactctgttctaatctagctagttgttctgaaagtagctcattttgttgtcctaaagtagcttaatagcctaagggttatattcaatctgaagggttaacaggatagggtagaaagacaggaggactcgaggattgtctggtcaccctgatcttccaccttattctaatgccttttctttggacacagcctttggtgttctcttgcctttagctaccttttctaacatgtatgctaccatcactttaacaatatttgagagtgatggaaatgggtttgagagtcataatttatattaaaaatgtgttggactttt

SEQ ID NO: 4819 - DNA, 613 bp, Canis familiaris
  misc_feature (1)..(613): n = a or c or g or t
ctacacatnntgcatgctcagatgaactannagacatgaaacctgaggaaggtgcctgcctgggcccaatggcagggacctcagaacctgaaggtgctgacaaagatgacctgctgctgttgagtgagatcttcaatgcttcctccctggacgagggtgagttcagcaaggaatgggctgctgtgtttggagacggccgactgaaggagccagtgcccgctgtggccccaggagagccagaccccaggccccaggccggctcaggattccttccttcacagcttttagaccaaaacatgaaagacttacaggcctcactacaaggctgctcagagagcaatgtcaatcctcctcctactccatggccagcaccacaggcaagcagtccaaatgacaacagccctacaatgaaagagcctgccaaggctgcctcggatctgactgcctggtttagcctctttgctgacctcgacccattatcaaatcctgacgctgttgggaaaaccgataaagaacatgaattgctcaatgcatgaatctgcagcctcacggagggagcccacatgccgctcctcagccacacacctgggggcacgcagatgtatgaagtgat

SEQ ID NO: 4820 - DNA, 655 bp, Canis familiaris
  misc_feature (1)..(655): n = a or c or g or t
acgacttcacgtnnagncggcactcggtggtgcanntcgnctgcatctgccactcattccactacatcnngnnnctgctnnngacgctcttcgtgcaccgcttctcccatggcaccatgcccttgcgcaacatcttcaagaactgcacctactactggggctttgccgcctggatggcctattacatcaaccatcctctctacacgccccctacctacggagctcagcaggttaaactggcactggccatcttcgtgatctgccagcttggcaacttctccatccacatggccctgcgagacctgcggccagcggggtccaagaccaggaagatcccataccccaccaagaaccccttcacgtggctcttcctgctggtgtcctgccccaactacacctacgaggtggggtcctggattggctttgccatcatgacacaatgtctcccagtggccctcttctccctggtgggcttcactcagatgaccatctgggccaagggcaagcaccgcagctacctgaaggagttccgagactacccacccctgcgcatgcccatcatccccttcctgctctgagctgctacccacctcccaggctctgccaagccaggctttcatccctctgtcccagggtcattctgggggagagggga

SEQ ID NO: 4821 - DNA, 465 bp, Canis familiaris
actcagagagccccaaggtgacagtggcccagctggactgggacgtcgtgacagcccctcagctcgctgccttccagccagatgtaatcatagcagcagatgtgctgtattgcccagaaaccgtcctctccctggtcagagtcctgcagaggctctctgcttgcctgaagggccagcaggctccggatgcctacgttgccttcactgtccgcaacccgcagacctaccagctgttcactagcgagctgggccaggctgggatcccctgggaagcagtgcctcatcacgaccagaagctgtttccctatgaagaacactcagacatggcaattttgaaactaatgctgtaggtttacaaatgtttttaaagattaacatgaaaatttaatcaccatcctgtaaagaatttttatgtgggaaagctgataaaattttcactggacctgaatgcttgaagaatgttaa

SEQ ID NO: 4822 - DNA, 526 bp, Canis familiaris
  misc_feature (1)..(526): n = a or c or g or t
gcatgagagaaacctgactctgctcctgctgctgctccagatccnnnncagtgctgtcaccttctccatccggtaccagcttgtccggctcttctacgatgtctgagtcccccaatccttgcccttcactgcatagtctgcagggttcctgactcaggcctgcctctttctgggccaggcacgcttccgggcccaggcctctctcacctcttacttttctccagattttgtacttagcgattccgttccgctgtgatcgacatcctgggcctgtcttgccctgtactgactgttgattggactttgcctgtggctttcttcaacttgctgctctccctctctatcccatccctgcggcctcccaaagtgggatactgtgctttttatgcagttatccaccactcggactctcgaggaatatgttgggcctggggatagaaccctggctggggagagggacacaggctcgaagatcacttgattatttgaccataaattaagtattctgattcgtaagagcagattg

SEQ ID NO: 4823 - DNA, 341 bp, Canis familiaris
  misc_feature (1)..(341): n = a or c or g or t
aatgactcagaannnagtgaccaaaaggataacatacaaaccattgttgaaaatgtcctttgagtnnngatacatagaaaaatcttcaaaaatataagttggccggtttgttgttttggttttgtttttttgtttttgttttttagttagctgttttctcttgttgttgtttttaagttagttttgttcacacagcattgatgaaggagtgaaatgtaaaagaaaatctcttttgtgaaaattccagaaaaaggatcctagtatctactttgggttttagcattaacttcatgcaaagtgcacaaaaatgaaatagctgaatcctccagtatcccaagtat

SEQ ID NO: 4824 - DNA, 601 bp, Canis familiaris
  misc_feature (1)..(601): n = a or c or g or t
atctaatttttccccaccactacttctctgcaaacataagtnanngcgaaaatgacctacccctcctccaaatgctccccaccccctttcctgnntctgggtttctgtcaattcttccttctgataatgtcctctctgtttcacatctgattaatttcaattcctgagttctctcttttgaatcccatagtactttttgttcttgttatgtgaaatctgtatttatatatatgtcatgtaaacaagatgtatataacttatatgtataaagaaaaatgatgaaacagcatctggtttaagagaaagtaaatgtaacctgttccttgaagcactttgtgagctccttcctaatctcaatctcatttctccctccctagaggaagccactgtcctgaattttgtactcattgttcctttgcttttcattttagttttgcaatgtacatgtgccatatatttctaaacaataaattgtatagttttgcctggttttaccttatgcaaatgcaacatgtattcttaattagcttttttctgctcgatagtcaagtgtttgcagtaactccttgttgatttgtatagctatagtacatttatttta

SEQ ID NO: 4825 - DNA, 527 bp, Canis familiaris
  misc_feature (1)..(527): n = a or c or g or t
tatttnnncntttgagcaatgtaacagatttaatgtgaaaatggctttatatcaaagactnncccttgcctctttacttccnacttgaattattgatgagtacatncngcattttcagtgcttttacaaacagtatctacaaccatgtcatagagttaagcttacttgtgttcccacctcatacaggaggaagttgtgagaagtaaagtgacttccagaatcctcactgagatttaacaacagaaccagaacaagaacttcatctccggcttcagatcctctgtccttcccactgcctcttgccaaccccactgctgactcatccataatcatccccaccccccacccacccaccaagagcgcatatatttcagttatccaggccaatagaaaggagaggtaatatcaatagccaaattgggtcgataattcatttggccctggaatatgtttttatttgtggggtttgtttttatttttgtttttgttttacttaggtcaatttagaggcatgttcactgttttgg

SEQ ID NO: 4826 - DNA, 512 bp, Canis familiaris
  misc_feature (1)..(512): n = a or c or g or t
tcgtgcccactcaccgccctggccccgccacnnccccngagtgtccngtnctcttcccgcccggggnnntnntgcgccagtnactgtcatgtacatagaaggtattttttaaaaagagaaacatgcctttattttcctatgtccttttttatgttggaaactagtcacccgaggaggtgtgtgcgtaaccggaccgggtgacggnnnctttccacccccagctcgcgccgacttacgtggtctgcccgtgacgcgacaggaacagggccagtgacctggcacggtgtcctcccgccggcagcggcggtggcggtcctcctcccggggccgcatggcctcgtgcaggctgtctgttgggccgtccgcgtgcgagcccccttcccccgggtgcccccacccggcccagctagaagcctcgtgccgttngccgagcaccccccttgctttctgtttatttaaagcgtatggaacctaagcccctggtgcaggtgtgtaaagactggtacagtcgc

SEQ ID NO: 4827 - DNA, 490 bp, Canis familiaris
  misc_feature (1)..(490): n = a or c or g or t
gtgaaaacnnaaggcattncctnagactgacaaggtgcaacttcctgagagccccnnncagnntccagcctnngtcctcccgcctccccnngcccctccctccaccacttggctcagtgcaatactcccggtggggtcccttgccatggtactgtcgctgcagcccctcggtctgctccccgggccagcgccctccaccgccttttctctggtggctcagttgcattgcctgtccccgcccccaatgtcgtttttatggtcgaactgatttcaacacaatgaaactgcaaacctcgtgtgtcttaattctctctgggggttccgtgtgctcagcccccgtggtctggggtgtgacaatctggagcgcggcctcatcaggcacagaacgccgtctctttcaaacccagagccatgggcacctctgtaactgtgcagtcctgctggccccaaataacatatgcagccccccggcccctatcctccctaccgc

SEQ ID NO: 4828 - DNA, 608 bp, Canis familiaris
  misc_feature (1)..(608): n = a or c or g or t
gacggccacaaacagcaccagctacctctgctcaaagaacatcaaagcttccgagcagnnnntcagccttgtggcccagtttcagaagaacagnaaactttaaacccatcccanngcagacgtccccgactcagaggagaactttatggatgggtcagggagggttacatatgaaaaggagctttttatagtaaaggagggttggcgtgtgttcttttgcccacagcaaggtcacactgggaggctgtgccctgccttcagtctcaagaacacaggtgcggtatctgatgccagatgatagtagcacaggtggatgcagactgggcgaggatgctgtgttctccccagaagaggggcccaggcccctgccagaggtggtgctctggcacctccatcctcagaaagctctagagcctctgctggctgtcgtcccagggtggactggccagcttcacaaggccccgggcatatggcccgggtgagaacagattttccttcaagcttagaacataatccagccacggttgtcttagccatttctctctactcactacaaagggacagagggctgtgctacattgcctcaaattttggagatcctgaatata

SEQ ID NO: 4829 - DNA, 606 bp, Canis familiaris
  misc_feature (1)..(606): n = a or c or g or t
gagtgaattgctacaaagatttaatgtgacctgttttgggtcaanctgttnnaagaatgaaagaattttattactgtatatataatgtatataaaaagaatggagaggatatggtgttaaaaaaatcacgtgaggatacaatattcaaataacaaggtttgggactaggttaagggttaaagtgccaaagccatttctgtacgaactgttttcttgttcaggtaccaggggagaaggacgacccctccttgttctccagttgatgtacagtatttcatcccagcagcagtaaagacctagctcttttcttacaaaagagaggcaaaaccaagataggctagttcagaaacaaactgaatgtctaacttctcaaactgaatctatttcataatgcagacaatgacttctaggtggtgaatgagtactcctgtaagtgctgtatttgtgccattcattgtctggattcatgtttctttgcagttagatgatctacttttcttcaaaaaatatttctaatgtcacttttgtacttttttttataaagtatgtttaaaactattgggctgtcaataatttgtgaaatttcagtgtttttaaaaaattttt

SEQ ID NO: 4830 - DNA, 603 bp, Canis familiaris
  misc_feature (1)..(603): n = a or c or g or t
gcatgtatccaagtgaagtagtnnngctcaagaaagggncngcattgcttccctgttcacagttgtgacttttttaagaatgtaacttgattttagattatgctcgcatctgtgactttacttccagccccactggcgtgagaggttctggttcaggtaaagttacatcctgtcacctgcagcaaaaacgcctctgtcggtgttcatccctccctctgtgctgttccgaggcctctactcgttctctttccatgttgtccttttcagtgaagagaaatgcattgagattaggtcactcctgtctactgagcttcaagactttatgttgttttatacacaattatttcatgatagaaactggctttattgccggatttcttttttaaacatattttaactcccatacgaacaaactgtccaacttaagtttttcataagattaaatttttcttaagatcaaatttgtctctagcaatgatgtgatgagttgccaaataattgagattattttaaaatgttttgttcatattgttttataattaaaatttacattcagtgtgtgtgaatttttttttgactcttaatgtaaggtggatatttctg

SEQ ID NO: 4831 - DNA, 596 bp, Canis familiaris
  misc_feature (1)..(596): n = a or c or g or t
anctgctagctggatcaggtnctgggaagggcagtggaggacatggggaggagnngcgannnngcgggtcccaaggtctctcagggctttagcaatgccctctctttctgcccaaggcccaggccgagaggggtgactggtggctcccggacctgatgcacacagagccacggctttatatccgaggctcctggtgtgagcatctcacctttaatttcttccccagtttctttatggtgattttcattgacaggtttttaatgcattcaaaagtattggtctcttattttataggtagagctctttagagcttacttaagaagttcttactccaaggtcccaaataattcagacactttctaggcaaagttcttaagaacaccctgaattttagtcctggatccatgtggagcagattctgtgtgtgttgcgaagagagcaccccgcttcctttcccacaccctgtgattgctctgtttttgcaggaaggaaaaccacacagaaaaaaaagagcaattggatcccaaaacacccttggagatggacaaagggctccnnncccatacgtacaccnnnnncgatgtgaaattctccaa

SEQ ID NO: 4832 - DNA, 502 bp, Canis familiaris
  misc_feature (1)..(502): n = a or c or g or t
attattgtgaatgttactanagcgatcannnnnctcaatgcctgatgttaatgttgatgagtaaagaaagcttaaataatcagttaaaaagctgcaaaatttttnnngactttatatttgattacctgtcattcatgtttttaggggaaatgggaaacgagatnnntgttttnnagtttgctttttacatgtannnagattcctgttgttgatctttacntnactgttgaatcctataacttttttttnnnnnnntatgttttgggatcaggttatacttgagtatnnnnnttattttttagnnnntgttttnnnnnncgattaaactnnnattaagccatatggaagnnatctgtgtgtaantgccngatnnncnnnnnggaattcnnnnnnnnatgaagaaaaaatgagattttnnnnnnnnntgnaattttgagagcaggagggagaaggatgaaagcacgggagcatttttttaagtgcaaataattttttttttttt

SEQ ID NO: 4833 - DNA, 494 bp, Canis familiaris
  misc_feature (1)..(494): n = a or c or g or t
cnngatggcgtcaggcttctggacngcgatcttcaccacgttccgcgggggcgccatggtnnagccggagcannagcgnntgtagtttccagaccgtccaacgtccggccaannnnncgcctggtctggtgcctccgagaacgagggtgtccctctgtccaaggcctggacccgtggcccgcactcacgggtcaggctccggctcctggacaggggccgcggccttcccaagggagccgagactagttccgggttggagtcccgtgggaaggcgcctgccctgccccgccccggcagccccgccccgcccctaggtgcgccaggtgggggcggggagggcgggataccgcaacagccacacctccctttccaacaaaggtgacccgcccggtcccaccaccaatccagcagaattgcagggaggggccctgaaagaaccagatcagagatagccttaggcatggtcttttattcacttggatactgtacaaata

SEQ ID NO: 4834 - DNA, 480 bp, Canis familiaris
  misc_feature (1)..(480): n = a or c or g or t
ccctgtgtttcagctgatcntgattaannntaagacaactctgagtgtgggggtgatgctgtactgtcttcctcaagggcaggctggaaggttcctggagggggacgtgaaagatcattttgcagccgcagtgttgacttnnggaacaattgccatttgggacctactnnngggtcatnntnnngctctcctcccacctatcnnngaccagcattggtcctttgttaaatggtcagnnnnnnnnnnnnntttgctggnnnnnnnnnaagatngaaatatatttgtataccgctanngatatgaaaacacagcgttnnggattttttttttttttgaccaattagtattttttagagttgtagctataaaggatatctgggtgacatttaaactaattacttgtattcattcagacacatctttttattctgatggtagtggcaccactgatcttgaatgttcatttnnnctttgggagaa

SEQ ID NO: 4835 - DNA, 559 bp, Canis familiaris
  misc_feature (1)..(559): n = a or c or g or t
gccaagggggtgctgagcccgtttgtgctgcaggagatcgtcatnnagacgctgcagcggnnnnnnnntgctcatgcccacaaccacctgcgtgccccggccttccaccaactggtgcagcgctgccagcaggcatacatgcagtacatccaccaccgcttgattcacctgacccctgccgactacgacgactttgtgaacgcgatccgcagtgcccgcagnnnnnnnngcctgacacccatgggcatgatgcagttcaacgacatcctgcagaacctcaagcgcagcaaacagaccaaggagctgtggcagcgggtctcccncgagatgaccaccttctccccatgagtctggcccctctagggtcctatacagggacacaggcctgtggctatgggggcccctcacacagagggagtgaatcttggctggacagatcatccccactcagttctctgntagcccagactggcagctgctcttgggctgtagcttggggccaagnnntctcagaccctagaagnnnagggttgggggagacagcccngnctgggagggg

SEQ ID NO: 4836 - DNA, 689 bp, Canis familiaris
  misc_feature (1)..(689): n = a or c or g or t
ccanntgtttaagatcaagaactancataagacgacgtgaggccnctnnnnnncaaaagtggcagctgcctgtttnnngagcccagacatcccccgccccctgactgtggctgtcacatccctgctacnctgagttggnaagccgtgggggaaatctaccataataaaactgacagtcaatgttcaactttagttatttaacacagatctattttttttttaattttaaagatgcttaaataaatacttcctgtgcttattactcagcctgcctccagggcatagtcagtgccttccctgtagcctgggctgagctccccatgaccagatatttgaacaaactttggggccttgaagggagaatgaactggacagcaagaagatgcaagaagaatctgctggataaacaggtcacagccaccctagatgcttccagtgctctaaggacatatatatatgtatatacaaaccctacccccctgtcctactcagaggtggctcaacaactctggagctggccactcagcctcagagggtaatactgtggcttgaaaatgaaggtactgaggaaagtggtgttctggtgaaacaagtgggtttttctggatcagcaaatcctccgaactgtatatgatgcatcccctctctcatatgtgtaatatattttaatnataaatgtatttnnncan

SEQ ID NO: 4837 - DNA, 218 bp, Canis familiaris
  misc_feature (1)..(218): n = a or c or g or t
ctccgaactgcaagttccaccaactcaggtattccgagtacccacnnnatagagctgggcnncaaaaggctgctgtgttaaggtnaangctggnnntggcattggtgttggtgctagagnnnaannnagcacgtgtcacccggngagntgcctgggcccactctggatttcccagagctgctatgatcaggcctgtcaaaataaggccatagaagggg

SEQ ID NO: 4838 - DNA, 460 bp, Canis familiaris
  misc_feature (1)..(460): n = a or c or g or t
gcgctcacccggctggcctcgaccctggggcctccgccgcagcccctgccnnnggcccgcgatgccgactgagcaaccgcgctgtcgccgcccccgcacggcccggccccgggcaccccctgcccccagcagcctccgctccgcctgcatctccgtgtgaaatgatgctgcaggtcccactctcggggggccgggcccttccggggccatcaccgctgcccactccccagcgctgtcctggaccctcagagggccttctctgttctggaaaggccttgccccgctggcaaggaaaggaatccatggcccagagtgaccgtcctttgttctgctctttagctgaagaaacagctaagctgtcattcaaccacagtggccgaaaatatcagtattgggttcttattcatatgctcattaaaacagtcttttgttctgattttaagggactcccttggcatta

SEQ ID NO: 4839 - DNA, 700 bp, Canis familiaris
  misc_feature (1)..(700): n = a or c or g or t
agacttctactccagtgtccatttttatagtatcaagaatgatagcttcatcagtgccatcttcatcctnntcttccttctcagactcttcaagatcaccccaggagttttctattccctctccaatttgggcagttccaggagtccaaagcacaggattagaaacacttaacaagttaagaaaactatgaataacaaatgctgtgatttgatgcagtgttgaaaaaagatgagagtaaaagttttaagactgaagtgtgcatcatttgtgcaaaatttcactaacagctgcgctatggatggctgaacaatgagaaagaaaaaacatgtaactaaggttaagattttatggaaacaatggtgagaaatactgagacatactggctctcaacagttccaatcataaatctggcaagtgtatgaaaaatttccaagaacaatgtgtaacagtatatataatgcttgattatgccaatgagattaaagaataattttccaaaggaaaataaaatgctgtaaattggctaagatggaaaattttctgtttttgtaggatagatgaagaggtggatattatgtcagacttaagactagtcactgtcttgtatcttaaatgtgttctctatcaaagcagtgtttcagaaggtaaacctcagtatgtacacccttcacatatacctaatactgccaaaagtgttat

SEQ ID NO: 4840 - DNA, 561 bp, Canis familiaris
  misc_feature (1)..(561): n = a or c or g or t
taatggtgtgntcgcatgaaattgctgctagcacagcccagcntgnnnntgcatctaaggtaaaagctgataaggacagcccaaacntggcccagctgcagcaggcctcccggggggtgaaccaggccaccgccacagttgtggcctccaccatttcgggcaaatcacagattgaggagacagataatatggatttctccagcatgacactgacccagatcaaacgccaagagatggattcccaggtccgggtgctagagctggagaatgacctgcagaaggaacgtcagaaactgggagagcttcgaaaaaagcactacgagctcgctggtgttgctgagggctgggaagaaggaacagaagcctctccacctgcgctgcatgaagtggtcaccgagaaagaatagagccatgctgacaccccacacctccgagtccttttctgtttcaccatctgcaccaactcgtgagcgtcagagggctggtgggctgcacaccaggacgcagggcctgaatctttgccgtcagagcagcacgagcgtcctcgccaagcacgccaag

SEQ ID NO: 4841 - DNA, 550 bp, Canis familiaris
  misc_feature (1)..(550): n = a or c or g or t
ccagcgcagagctgcctgccgnnnagggcggggagtctcgggatggagaggccgaggctgcagctccacctgcacctgagcagcccgcccagtcagggcaggggcagccgttcgtgttgcctgtgggcgtgagctcgaggaacgaggactatccccgcacctgcaggatgtgtttttatggcacaggcctcattgctggccatggcttcaccagccctgagcgcacacctggggtcttcatcttgttcgacgaggaccgcttcgggttcatctggttggagctgaaatccttcagcctgtacagcagggtgcaggccaccttccagaacgcagaggcgccatccccacaggccttcgaggagatgctcaagaacatccagtccctgacttcctgacgggccagtgccctgtagggtggctcccagggccctggaccctgctcctgcgaaaggaagcagcatgcactttggagatttggccttctgaccagaataccgaccttgtaagagtcttggcctagccaccccaagattcttgtatagagtgtaca

SEQ ID NO: 4842 - DNA, 538 bp, Canis familiaris
ttggcaaatctgtactcttgcatctcacaactggcagctgctggcagctccgcccagcgctcgatatgggcactgcgcaaagacttccctttgcaaaaaagaaaaacaattgctcacggtgggcttcacagaggactctaacaattcaattttataactgtcctgtcctgcttagggacactcgctggtgtgaaactcacacattcaacagatgaaataagataagtattcatcaaaactgcctctccccccccccccagattctgttggagctcgaaaaacaaacctaacaagcaaaaatcaatatggctcgttccgattcgatacatgaccccaaacagcgcgtccatcagcgtgtgcgcacacagtcggctttgtgctcggacctctcccttttgcagagtgaaatactgaggcacgaggatgtcagcctattccctggggccccgggcgaggcagagaacatcgggcaagattgaagtcaaggcctcttctgctccatctcccagcaaacagctgcttgtcaggtgtttacatt

SEQ ID NO: 4843 - DNA, 559 bp, Canis familiaris
  misc_feature (1)..(559): n = a or c or g or t
gcactgtcacttccctcctcctcttggcatcctctatctccctaagatannnnggnaaaggcaaatttctaattcaccagcaataaaaattagannnggcttggccctcagcccttgtatttctctcttttcagtctcttcctcccacccccaagactgggtttggagggcagggtggagagagctggcaactactgtgagcaagttccccaatccctgaccagcctcctcccatgactggtgactgtttaatgagctgtgcatcccccacaaaaacaagagcgcccctctgtgtggcctctatccttctgcacagccccttcccggtgaccctcaccagatctctgagctgggtggggggccatctggtaatcactgcctgttccactcacccctcactgcacctgtcccagaacctgggcctgggccaggggcaggaggaagagaaggcattagtaggaaaaaaataatagaaaaatatgaacagactcagctttgggacttccaaccacaaaagaaattatatataaatatatataaatatatatctctaccatat

SEQ ID NO: 4844 - DNA, 466 bp, Canis familiaris
gtgaaaggtgacatggccactgaacccagccttcagctcctgagcttttcttgagcctccgagtctggggaggaagggcagggacttcacggggagagagagagagaaggccctggatagaaatgcttggtgctgttctcttcagccttccagacaaagtgctcctttgcccctctagctccttgaccaggagccacctgcactgtggctacaagagggaagtggactccctcctccagagctctttgttccggaagaagtttgtttctttaaccccacatggcccaatggtggcttgaagttggcgttttaaagaaggaacaagtcagttctgggccctggcagggttcctccccaccttcccagggttggaggctcattcttaagctgcagattagctaatcacatggctagggctggagcaaaagcaaagaaccaggccctgaacactcaccaacgaagaccc

SEQ ID NO: 4845 - DNA, 313 bp, Canis familiaris
  misc_feature (1)..(313): n = a or c or g or t
attatttntatcagagctgtaaagnnatctctcctccccgtnnncacnnnngccccacccgcggccnnnaaaaccaaatgtgaattttctgtttcccacctcggtcctcgtccaaagccaggacaccagctgacaattncttggttctgttgtcaataattgtaccatgtgaattcctgtcctcacttagagcaaagcctgagttcgagaatgtttctatttcaccactatatgcctgttacaagagaaggaaataggagctatttaagtttaacttttttatgtgaattcagagtttatttatcgatggaaa

SEQ ID NO: 4846 - DNA, 614 bp, Canis familiaris
  misc_feature (1)..(614): n = a or c or g or t
ttccaggacctgtccagcaccgtcctgatgcagagccgnnagcaggtggncaaggcccgagaggccctcgaccacatggttgagtacgtggcccagaacacacccatcacgtggctggtgggccccttcgccccgggagtcgtcgagaaagctccagaagagaagaaataagacagccaggaggaggctggaggggagggacctagcctctccctgaggggcggcctgagcaccagacccctcgcctcacttggaacatgtgtccctaaccttcccaccccaccccgctccaccccgctccaccctgcccatcttagctgccccctcggggagctgcaaaccgacctgtccatcccctcctctgcgctcagaggaagcgtatcctgagcatcacctcctcagtcaagacagggagggttctaggaaaagttttctaggagaccctcaatttctttttttcttaaacccagggatacatatcccatctctttttctttatcaagggccctggatatcagcctttagctgatggacttggatttctcccggggagggggtggagggagcgccacccaggcccatccgagagcagaggggctcagcctgcctggcct

SEQ ID NO: 4847 - DNA, 565 bp, Canis familiaris
  misc_feature (1)..(565): n = a or c or g or t
aagaattcggtataaaaagaacatggnnnngtttcaagaagaggctaccatttatactactaaaatggcagtcgacaccaccaaagtcgggggcctgaggagccaggctagctgcccatcaacacccagctctggttcctctgatcccttcccactgaccagtgccggggatgcacttatcaccctacagacactggcctctctccgccgtactcctgcaggaggcagcttgcggtcccaggccaagggtggctggcagggagccgcgcccccggcgtccaccgcttcgcccgctggagaccccggcagtgtccactcagacgcatctaattaaggtttggagtcgaccagaaaagcggaccgggtggcctgcagtggtttgcaggcacccgagtctttgctgcgcgtgcagctgattacctcaaagacccagaaccgcagcaggtggcaggcgccatccattgcttgccagctgggatctgaaatgggctgagatgctgctcattttctcaattcagttcatttttttaatagtaattttatgataagactgtgaattgtttct

SEQ ID NO: 4848 - DNA, 678 bp, Canis familiaris
  misc_feature (1)..(678): n = a or c or g or t
ccatcccccangannntgnnntccnnncgtggnnnnnnggatcgcttcacnnctgagtcctacacggtgctgggggacacactcatcgacggtggggaacattactgnnaggtgcgctacgagccggacagcaaggctttcggcgtgggggtggcgtaccgcagcctgggccgcttcgagcagctgggcaagacggccgcgtcctggtgcctgcacgtcaacaactggctgcaggtcagcttcaccgccaagcacgccaacaaggccaaggtgctggatgctcccgtgcccgactgcctgggcgtgcactgcgacttccaccaaggcctcctgtccttctacaacgcccgtaccaaacagctgctgcacaccttcaaggccaagttcacacagcccctgctgcctgctttcacagtgtggtgcggcagcttccaggtgacgacaggcctacaggttcccagctctgtgcgctgcctgcagaagcgaggcagtgccacgagcagctccaacaccagcctcacttaggccactggactgcccccaccctgtccggctgattttggggaggcccctcccacccccaggccttggttgtttcagccggcactctcttctcacttgctgcttggagccttaactcctgattggggggggtcnccaatggggagtgggcaccag

SEQ ID NO: 4849 - DNA, 448 bp, Canis familiaris
  misc_feature (1)..(448): n = a or c or g or t
caactaccatgctcagcgctcctaccccatgcctgatgagnnnnnctgcacagagctcaacgctgagcagcgggccctgaaggagaannaaaagggcagctggacccagctgagccatgctgagaaggtggccttgtatcgcctccagttccatgagaccttcgcagagatgaaccgtcgctccaacgagtggaagacagtgatgggctgcgttttcttcttttttggattcacagctctgctgatttggtggcagcgggtctatgtgttcccaaagaagcccatcaccctgacggatgaatggaaggcccagcagctccagcgcatcctagatatgaagggtaaccctgtgcaaggcctggcctctcggtgggactatgagaagaaggagtggaagaagtgactgggcatccaggttgccctccnnnnngctccaccctggcctaga

SEQ ID NO: 4850 - DNA, 645 bp, Canis familiaris
  misc_feature (1)..(645): n = a or c or g or t
cnacgacaggctttcagctnnnggtgacccctcacaacattacgctgaaccctgactcgggtngacccgtgttctcctnnaangaccaggcttcactgcggcagcatgaggtggtagtgaccatcaacaggaagaggaacctggtggtggctgtggaagatgggggcacgtttgaggttgtcctgcaccgggtgtggaagggcagtgccgtccaccaggacttcttgggcttctacgtgctggatagtcaccggatgtcggctcggacacacgggctgctaggacagttcttccaccccattgattatacagtctctgacccccacccgggctccgaccccacaaagacagatgccacgatgctggtaaagagccaccaactgacggtcaccaggggcttgcagaaagactacagcaagaacccccggcacggggctgaggtgacatgctggttcgtccacaacaatggggcggggctgatcgacggcgtttacactgactacatcgtccctgacatcttctgagccccctcgccggcacagctgtcctttctcgggaccgtggcagaggacagcatcctgaccggctcccggtgccacacctctctggtcaagctgatccatgtgtcaaaggccccatgacttc

SEQ ID NO: 4851 - DNA, 640 bp, Canis familiaris
  misc_feature (1)..(631): n = a or c or g or t
cgggctcctgaaggctcaagtcacctccccctggtgccctatccntagtcacgaaatacngcagtccctgcttggtggctcagccacataggacagggcttnnactctggagggctggctactgtccccaaacccagcctgggaacacagacttcttgtgccaaagccatgtgggcnnaggctgcccggtccagcccaaccagacccggagctttggccattgaccatccacctgggctgaaggcgagacacctttgcaaggtctcagtcaacagtgtgaactcgagatgcatctcaaggctgctccagcggtctccttccccaagcagactttaatctccctcgagtctgcatgggtaccaggcttgggtgtctggggccccattcctctagcctaaactgacatcttcctgtatgctgagccagccactccctgttgggggtggtgggagtctctgccccaagctgtccccagcaagggccctcagcgtttgggtgccggggcagaggtgcagaagcccagccgcatcagtctgggtgtctggtctggtcgggtgggagacccatccacccgtgactcctgctcctccctctgcctcttttctactgtaagagaagtgaagtttatcatcttttaaaa

SEQ ID NO: 4852 - DNA, 576 bp, Canis familiaris
  misc_feature (1)..(567): n = a or c or g or t
gcacgaatgtgcgctgtgtgaacatcagctgcccgctgcgagggctggacagcaaggnntctgttgttctgcgctcgaggttatggaacagcacgtttctagaggaatattccaaaatgaactacttggacattctcgtgcgggcttccattgacgtagccgccactgccgagaatatcaagctgccgaatgctggcactcagattcgtgtgactgtgtttccctcaaagaccgtagctcagtattcaggnnnnncttggtggatcatcctagtggctatacttgctgggattttgatgcttgctctcttggtgtttatactatggaagtgtggtttcttcaagagaaataagaaagatcattatgatgccacatatcacaaggctgagatccatgctcagccgtctgataaagagaggcttacttccgatgcatagtattgatctacttctgtaattgtgcggattctttaaacgctctaggtacgatgatagcgttccccgataccatgctgtgaggatccggaaggaagagcgggagatcaaagatgaaaaatncaatgataaccttgaaaaa

SEQ ID NO: 4853 - DNA, 284 bp, Canis familiaris
tgctgacttgagttgaggttatcattgtttccccctagaattgtttctgtcgaagacgaagagcaaaccccgggggcagaagactgaaaacactgaagcactcagagatctattgctgaccagccctatttctcatgagttgggggaaaaaaagccattgttttaaatttccacttaatatgaaaatgtttgtttttaaaatgtttcttcctgctggaaaaaaaatgtatttttaaaaggaaaaaaaatcctcttttggctataagaaaaagtcagctgtatga

SEQ ID NO: 4854 - DNA, 534 bp, Canis familiaris
atggcccaccatctggggcaggtaggtgggcgaagggaacagacaggtttcactcagtgcctgctagaagaaagcactgaaatgcacaggtaaacatccctttattcacccggttggctcctgaaggtagtggccctcctccagagcaccagcctgccaaggggccagcacagagtgtgcactgagctcacgccccagccaggcctgcggtttgcccagacctccccttctgcacagcagagcctgagtgaggaaaaccactggcaggctcccctttttctcccttcacagctgtggagagcatcccagtacttggggccctctgttcgtcatccaccttgagtcggaccctgggagatttggctcgagaccttggcaaactggacgtgcggcgctgggccagcttcatggatgccggactcgagcagggggacctggaggaggcgctgcaggagctgggcagtctggcccagtgctaccagggtgcagacagcctcgcaaactaagatattcccagcagaggaaagacctggt

SEQ ID NO: 4855 - DNA, 567 bp, Canis familiaris
  misc_feature (1)..(567): n = a or c or g or t
gcagctggtngccatgctggtgaactacgtcaccaannagctgcgggnngaagtccagtacggggactagaggctcctcctggggcggctcaggtcccccagacgcacaggaggggacgcgtactgggaaaccccacatcgcccctgtagtgccgtagatggagtgaaacgcgctggagacgctactactgtgccgcatcgtgtactggaaattatttatgaagacgctgttttggggtcctgacaccccgttcgccgggagcctggccaggagcaaatctgtgcctgccgcagacgtggggggcgcttcctgaagccacctctgctcccgtgggggccccgtcctcagcacctgctacgggacccgtccctccccggcggcaccgcgtcttgggacctgggagctggcccccgcgggaatcctgcttaccgtcgtgtgccccttgctgtctctgcctcgagccgccccgccgacggacggtggcccggcgactgcagccacaagcgcccaggcacccgtcccgtccccagggcctcagtctccccatccagcaggctgtggtagtt

SEQ ID NO: 4856 - DNA, 346 bp, Canis familiaris
  misc_feature (1)..(346): n = a or c or g or t
ttttnnngtatttgaagtagaaagtaagaatnnnntnnnnnnanngnntaatnaatgaaaatattgcagnnatgatgaataaataattttaannatatggggtttatttttctcntacnagatgtgcttttnnnaacagtggcantgtnnnnnctttnnnncnnncaattnnttgttggggaagnnngaaangnnnggctgtactatatattgtagaatattcaatggcaatnnnggtctctacccactagatgccagtagcaatctccacctgagtgtgacaatcaaaaatannnnnnggcatttnnnnnatnaccccnnngcattatatgnnnttaaaccnnnt

SEQ ID NO: 4857 - DNA, 584 bp, Canis familiaris
  misc_feature (1)..(584): n = a or c or g or t
tactccaggcgggcacgcnnngcacgacggccagcnctactgccacaagccctgctacggaatactgtttgggcccaagggagtgaacactnnagncgtgggcagctacatctacgacagagaccccgagggcaaagctcagccctagggcgagggcccgtccgcctcccgccggcctgctccggagcccgctgctcggccccgggggcagccgctgcccagcccggcccggcacgtcctgcctgcaggcccagggcccggtgccgcgggtggcggcctgcctgcccacgcctgttgctctggccgcccctcgccctcttgtgtcctcatggtctgtgcccctcctctgtgtgtctcgtgtccctgtgtgcccgtggccccggtgggtctccctggggtggccaccccacactccccctctcgcggccccaggcctgccccacagtattacttctgcttcccttgccagtgacggccacagccacgctcttcacggtgttcctaggggggcaccgagggcgtccctgccaggagccctccgcccacctcccgcaccgccttgcaaacgcttgtctgacacgcgg

SEQ ID NO: 4858 - DNA, 606 bp, Canis familiaris
  misc_feature (1)..(606): n = a or c or g or t
tngaccagctcttcctctnntctgactgtcggcacttcaaccggaccgagtcnctgaggtgcggttgccagctgaggcacatcctctctggcctggctgtcctgctgtgctaaagcaccagttctccctgccctctcttcttcctgctgcttgcgggcagggaagatgggagccttggcctctgcttccttaggcttgctgatgagctgagcggctgggtccagcgccaccagagaggacggcggaagatcccccagagggcccaggagagacaggtaggagggggctagggctggttccaggaaggcccactggaagactagatgtcttagggattttgagttagcatctctttgtggaggtttgagggatcatttggggtgagtggaggggtgaggtgacatcagcttccaggggccgtctctctttccctttgccttcaccctcttcacatccttagatacttctccttccagaagtctcagctacggaagaagtcacctccagttaaggcagtccccacccagtccctggtgcccccagagaggtgagtgtatgggggtgcttgtctgttattaagggaggtttcactctcaagannnnnnn

SEQ ID NO: 4859 - DNA, 581 bp, Canis familiaris
  misc_feature (1)..(581): n = a or c or g or t
ctgtctggcttccagtacctcatcctggnngcagccgtgtccaagggggcgcccttccgccggcctctctacaccaacgtgcccttcctgctggccctggcgctcctgggctccatcctggcgggcctcctcctggtccctggcctcctgcagggcccactggcgctgaggaacatcgccgacacctgcttcaagctgctgctgctgggcctggtggcctttaactttgtggcggccttcgtgctggagagtgtgctggaccagtgcctcccggcctgcctgcggcggctccggcccaaaaaggcctcaaagaagcgcttcaagcagctggagcgggagttggccgagcagccctggccgccgcccaccgggcccgtgaggtagcgcggcctggccaccccggacgcccgatctccctgcctctgagccaccgactgggacccacctccagagacagccaccgcccggaggttggcagatgtcctgctcctgtcccgcatctgcccgccccggcccccctgccctcagctggagaaataatattgtccccccacttcagacatcctgtgtagacgacagcc

SEQ ID NO: 4860 - DNA, 592 bp, Canis familiaris
  misc_feature (1)..(592): n = a or c or g or t
agaacggagagaaatacgcagtgnntgcgctcagnncaaagaagaactttattgagtnnntgcgaaannnngaggcccctccacccccagagcccacctgggaagagcagcagaccagcgtgctgcacntggcaggggacagcttccgggagacgctgaagaagaagaagcacaccttggtcatgttctatgccccttggtgcccgcactgtaagaaggtcatcccgcactttaccgccaccgccgacgtcttcaaggacgaccgaaagattgcctgtgctgctgttgactgcgtcaaagagaagaaccaggacctgtgtcagcaggaggctgtcaaggcctaccccacgttccactactaccattatgggaagtttgcagagaagtatgacagcgatcggacggaatcggggtttaccagtttcattcgagcgctccgggaaggagaccacgagagactggggaagaagaaggaagagttgtgattcctgcctcagagagagcttttccattacactgtgaaatgataacctgctttgttgttctttctgaatttccacgtgttccgaaaacgaaattttttatagccgct

SEQ ID NO: 4861 - DNA, 394 bp, Canis familiaris
  misc_feature (1)..(394): n = a or c or g or t
gattnctcagcccgtgggggnnnnngggtttnntgaaagccagatgtcctagaannnnnnnggctggcttnnnctnnnnnnnnnggggccnggggaaaggnnnnngnnngataggnnaaatgtggcccctnnnnntnctccagnaagatgnnnttnnnnnnnnncnnnnnanngaatctnnnnnnnnnnnntccacnnnnnnnnncngnnnnngttgaccacaggnnnnncatggtctttannnnnnncnnnntcagacataannntannnnnttaatggaagnnnnnnnnggggnnnttnaattatgatnnnnnnnnnnnnnttnnnattacaccctcctttatgacaagtgacattttagatgttaaagtaaaaactttaccatgctttttt

SEQ ID NO: 4862 - DNA, 616 bp, Canis familiaris
  misc_feature (1)..(616): n = a or c or g or t
gaaagacgatnnacgtggcgtgggnnnnncgctgctggaggaggggtcggggctgtgggtgcgagggcgnnacctcgtgctgctggacaaggctcaganngcggccaccgggcaccggctgcaagcagagaaggaggtgctggccccgcaggtggtgctggcccccggtggcggcgccccctaccacctgggagtcgccccgcgcaagcagttctcggggctccgccgggagctgcctccctccgtacacctgctcacactggcccgctgggaccggacgaggctgctgctgcgcttggagcaccagttcgctgtaggggagggttctggcaacctgagctccccggtgaccttggatttgaaggacctgttctccgccttcaccatcacgtacctgcaggagaccacgctggcagccaaccagccccgggccagcgcctccaggctcaagtggacaccaaacacgggccctacagcccagccctctccccctcggctggaccccaccaccatcacgctggagcccatggaaatccgcactttcctggcctcggtccagtggaaagagcatggctagacatgctgggggcaggaagactctccctctcctcctcct

SEQ ID NO: 4863 - DNA, 475 bp, Canis familiaris
  misc_feature (1)..(475): n = a or c or g or t
ggaccccttcnggcaccccttcatggcantgcccggcgcccagccctggtgctcttcccggctcccccctgcctcctcnnnccccctgcccccacccctgcttctccctccagaccttctgctggccctttgtgagtgtctcagtctgggggtgtcccctaaaggacttacttcctggagccagttggctctgggggcccctctgtgagtttccgtgctgtctggggaccccacgggattccatgttctgtctgattcctggcctctcctgacctctggaggtcagcttgctgcttgaggtcttcctgctgaggtggcagcagcagcccttgccccctcctctcaaggcctgtgctgggtgcaggggatgcctaggggttcccctcagctgccagtgagtcggaggacagctgagcaggcctgggcctccactgtnnnnctcactgaggcaatgnntgcatttggaatgtgtacc

SEQ ID NO: 4864 - DNA, 553 bp, Canis familiaris
  misc_feature (1)..(553): n = a or c or g or t
gagcaccgcccgccngtcgcgcgtgatattctacccgccgccgggcgagggcgcgcttctgctagnctcgtacacgtggtccgacggggcggccacattcgccggcctgagcgcggaagacgcgatgcgcgtggcgctcgacgacgtggcggcgctgcacgggccgatcgtgtaccggctctgggacggcagcggcatcgtcaaacgctggggcgaggacccgcacagccaggggggcttcgtggtacagccgccattgctgtggcacgaagacagggaagacgggaaggactacaactgggcggtcccttacggccgcatctacttcgcgggtgagcacacggcctaccctcacggctgggtggagaccgcggtcaagtcggcgcttcgngcggctgtgttgatcaacagccgagaggagcacacgtggagcgacagcnnnagcgaagaggggcttgtccatctggtgcccaaccatccccgtctggtgccccaccatccccgctgcgagttccagaagggtggtgccacccacagcccgggcgaacatagg

SEQ ID NO: 4865 - DNA, 589 bp, Canis familiaris
  misc_feature (1)..(589): n = a or c or g or t
caattgnagtaaactttttgttctggtcctttttggtcgaggagtnnnaatacaaatngattttgggagtgactcaagaagtgaagaatgcacaagaatggatcacaggatatggaatttatcaaactctagccttgcttgttaaattttttttttaaatatctgtaatggtactgactttgcttgctttgaagtagctctttaatttttttgcagtaactgttagttttttaagtctctcgtagtgttaagttatagtgaatactgctacagcaatttctaatttttaagaattgagtaatggtgtagaacactaattcataatcactctaattgtaatctgaataaagtgtaacattgtgtagcctttttgtataaaatagacaaatagaaatggtccaattagtttcctttttaatatgcttaaaataagcaggtggatctatttcatgtttttgatcaaaaactttatttgggatatgtatgggtagggtaaatcagtaagaggtgttatttggaaccttgttttggacagtttaccatttgccttttatcccaaagttgttgtaacctgctgtgatacgatgct

SEQ ID NO: 4866 - DNA, 553 bp, Canis familiaris
  misc_feature (1)..(553): n = a or c or g or t
tccgccttntaccatgcctttcccccgagacnnnntccagcnnnnnncgttnnaanacgatgactnntannnggnnaaactccgggcttccaagaaactgccatataagaacccaactcancntnctcagcaacaggaaccctggagtcggctcagctcaactcccacaatcacctccacgaggcgggatatttattttcttgatcctgagataccaaaggatgacctggatttccgcttagcagccttgtacaaccaccacacagggacattcaagaacaaaagtgagatacttttacaccaggagaccacccaggatatccatggaatcatcaagacccaattccctggagaacttttaccccctcctccgccaccttccgtcacttcccgagctaacatcagacactggatcaacnnnaagaaggagtctatccacagcatccagggatccatagtgtcccctcacactgctgccaccaatngaggctactcccgaaagaatgatggtggcttcttctctacttagtgttgacaggctcctggactaatt

SEQ ID NO: 4867 - DNA, 544 bp, Canis familiaris
  misc_feature (1)..(544): n = a or c or g or t
ggcatcaagctacattacgtaggttcagttattcatcgagtagtaccaaatggnnggatacaaggaggagatatagcatatnnaaaaggagatgacggagagtcgatttatggaccaacatttgaagatgaaaacttttcaattcctcataataaaaggggagttcttggaatggccaacaaaggccgtcacagcaacgggtcacaattctacatcacactgcaaccaacgccctatctagataaaaaatatgtggcttttggcccaagtatgatatcaactgatcctttaaatctccaaatcagagctgagtctgggctgaagtatttaaacaagaccttaaagaaacactagggataagctgaaaggcagtaccacaaaaggcagttgattgaaggcacagaggttcttcaaagactagaactggttccaacagagaatgaaaggccaaaactacaatgtataattattgacagtggagatctgtatgcctgattttcatatcaacattttctaacaacttattattatgtatctatcagct

SEQ ID NO: 4868 - DNA, 695 bp, Canis familiaris
  misc_feature (1)..(695): n = a or c or g or t
tctctacccagagggaaagaaaaannnnnnnatatgaagannnnnaagttcnntacntacnncatccngnnnnnngtcaaggatctcaagccagtgcacagtgctccttctcagaactcctctacttgtctctttctacctgagtggctgcttccaggtgatctgaaacaataggtccagcaggcattttggagatcaaagatgggtagaaaagatgcctccactataaaacttcctgttgatcagtacagaaagcaaattggtaaacaagattataaaaaaaccaaacctattttacgagcaaccaaattaaaagcagaagcaaagaaaacagcaataggcataaaggaagttggcctcgtacttgcagctatattggccctcctactggctttctatgctttcttttatctcagactgtccacagatgttgaccctgatctggaacgagatgaagattagctgaacagcaatcaatgcattaaagggaaataattttataaaagtaccccttgggaccaatactttttctaaagtactgaaactggaacatcttgaattctttctgctggtattttcagttttcagaaacatctttttaaatagttgcataggatatcaagaaaagaaccttacctagcaacgtagtataatgtatgctactggatacttttataaatctttctactttgaca

SEQ ID NO: 4869 - DNA, 625 bp, Canis familiaris
attaatttgtacttatcctactcgagttcctttttacaaagaaaatagtgctgtgatttatgcctttgtacgaaatagtttatgtataactatagactacaaattacctcactcaaaacgagatccaatggaggtccccagtggcagtttttgtgatgaagacaggatatgtgtaaatcgtgaatgtctagaagcaaggatgcttagagctcaattaaggttttgttcagaggggtgcggagaacacggagtatgcacttcccaaggaacgtgccattgttttgatggctaccagcctccatattgtcaaaggcgtggcagagaagcttctagtttgtctgggaaacagggtttaaccatggaaagtgcttttagaaaggctgaaaagaaccggtggcttctagctcagaaggcagcactcacacatttgctagcagatccagatcagaaagcagcagccaaacagatacagtcagatccaggtcagaaagtagtgctcaaacatataccagcagatctaaatcacaggaaagcacccaaacacataatagtagtaattagtaattccttcagaagacaatggatattacgaagtgtttcattgagaaatgaaaattccaccttt

SEQ ID NO: 4870 - DNA, 621 bp, Canis familiaris
  misc_feature (1)..(621): n = a or c or g or t
atttaaannngcagcnaatttctagctatcctcaaaataacggagaatattannnctcattagtgtaatagnctggaaaannnnntctgctgggaaaaatacaacaatggggtctccccacagactatttatttatttaatcaatcactccttcactcattcattcttttgctcattcaagaaacatgccctcggtattactttatgccaagagttgggagaggcaaaggcagctttgcctagggcccagacctgggcgagtcccagtctggagagggacccaggcacttacgtcataacagttcacatgacgcaacctactgccccaaaccaccttctcatgagcccatcaggatggatagtgcaagacagggcctggggacttctcccattctttctgcctgcatcttctagactacagtagacacgggagaaaataggtttcctatggcaaagtaagttcatggctgtagaagagagaagataaagggatctttaattccctctaaagttttggaaatacttaagctgtcacattgtgctttaggaaatgctttctgactaaaagtatgaagatcagagctgattttaaagaagcattctatttttacccagagacga

SEQ ID NO: 4871 - DNA, 655 bp, Canis familiaris
  misc_feature (1)..(655): n = a or c or g or t
aagacacaaccccaaagaagagtnnntagtcataaaatccagctcctacccacctgttgtanagctgcacctaatgaagttttaagaaagcacagggatataggtatggaaattttnnttagcgaaactcactctatttatttttatttattcctgtttatttatttatttatttgcttccataccactggtattcagatccttcatgatgatccatttggtgagcttaatttgtacataacactccagaaacttcctgtagatcattcttaaaccatgttaacgagcaatgctgtcaatgcctactcatgtgcacctcgctcatggaagatatttcaaggtgtttttaaaggacaagagtgattattgcagccctcttctgaatttttaacgctgaagtttgaggcaacagggggcatgtagcgacaggaaaggaaactgcagaatgaaaggcattctgtgagaaggacagtaaagccagctgtttgacgcctgggcctggtatcttttaccaagtcacacattgtaccaaggtgaagagaatgtcatgagtgtaagtggcgtgttgtagcaggtgcgggccactgggccatgcagaagtgaatttgctggaaaatgatgaaagtgactgcaaagtgtaaatgtgtaaatgtat

SEQ ID NO: 4872 - DNA, 611 bp, Canis familiaris
  misc_feature (1)..(611): n = a or c or g or t
cntngatgaannnnnngannnannngcanccatgatngaattgccattgcttatgctacactcgagcattttattagagatgtganatctnnaacnntctttgtcacccattatccaccagtttgtgaattagaaaaaagttacttacaagaggtgggaaattatcacatgggattcttggtcaatgaggatgaaaacaaagaggatccagctacatctgtgtttcttccattacctctaaatcctctgctgtctgaattagaggccactgcataggtcatcaggcaagcaccccaaagaccttttggatggcttttaagatactatgctgtttcccatggaggtgaagaaccagtccctgattttgtcacttttctttatcaaataaccagaggaattgcagcaaggagttatggactaaatgtggctaaactagcagatgttcctggagaaattttaaagaaagcagctagcaagtcaaaagagttagaaggattagtaaatatgaaaaggtcagaatgatcgtgttgcattttttaatttataaaaaaacctaccaatttgtccaaggaagaggagtgtcccgtaaatgaacatcaggtttaccttta

SEQ ID NO: 4873 - DNA, 529 bp, Canis familiaris
  misc_feature (1)..(529): n = a or c or g or t
tgccttagctatcaaagggcgcttgatagtaattgggtttgtctctggctaccaaactcctactggcctttcgcctgtgaaagcaggaacattaccagccaaactgctgaagaaatctgccagcgtccagggcttcttcttgaaccattccctttctaagtatcaagcagccatggaccacttgctcaagatgtatgcgggtggagacctggtttgtgaggtggacctcggagatctgtctgtggagggcaggtttcgtggcctggagtctgtattccgggctgttgattatatgtacatgggaaaaaacactggaaaaattgtagttgaattacctcgctctgtcaacagtaagctgtgaaaacagaacaatgacataaatcaaaggagaaagaaaatgggcactttattcctcagaattactcaaatcgagtgatttgtaggtggttcatggatataatatttcttgaaacaaaagtaaggtgttaatgnnnnagtttctctttctctttcttttttctttttcccc

SEQ ID NO: 4874 - DNA, 551 bp, Canis familiaris
  misc_feature (1)..(551): n = a or c or g or t
ataattaagagnncgaaacaaagatggaatcatngaanngtagagctggcaaagaactcccaggttcctgacccagagcactcaatgtgcagacctgtaaactgagccccacaggtgccgtgcaccccccaagacatgtgtactaagcagcacagccaggacccatgcctgggtctctagctctccaggacctgttgcctttatgtagccagagcacctaaactcctcaggaccatcctccagagactgtgctcagtgggaaaagtcttccagaacaatgacctgacagggtagagggagaaaaaagaaagatgctgggaaaattagttccacacctgcttagagcccatgagcaaggcgtcagaacattgactatggcatatctaacaggctctaccccccatgcctgacccttttgtgaaaactttatagatctaaccccaaagtctttggctcagaacggagctcagacaaacatgggcatggccagcaagccccagacacaagcccctcatgtgaggaaatgggtttgtcctggcacatgacctcca

SEQ ID NO: 4875 - DNA, 627 bp, Canis familiaris
  misc_feature (1)..(627): n = a or c or g or t
tgaacgtaaaagtgacaggtggggaangncngggaagcagagatatacaactgagttgaaggcactggtattcctatagtttaccctccatgttagtaaagaattagtccaaaaaaagataaatataatgtgggaacaaaaatttagaatagtaattctcaaaggaaattgagaataaggagggaccagacagcaggggctttctgaaacattagcaaataataacaataataatagcaaacttttttatttaaccaagcactgttctaaacactagcactccacatatgttaatttctatatttacatttacaaaaaccctatgaggtaggtactgttaatatcctattttacagatggagaaactgaaacagagaggttacaaaacttgctcaagccataaagtagtgtctggcaccagccaggattttgaacctaggcagtttatcactagatctgtgttcttaaccacagtgttagaatagaaacgtgctttaaaattggagtgattgatctgatggagtaagtgggtgatgggcagtaaggagggcacgtgatataatgagtactggagttatatgcatctggtgaatcactgaactctaccnnngaaacaaataatacacc

SEQ ID NO: 4876 - DNA, 593 bp, Canis familiaris
  misc_feature (1)..(593): n = a or c or g or t
tcctgtgcnngcangaagggatcnnnnnnncacccacagagggagacatcggagcggtgtttgggcttggctttcccccatgtcttggagggcccttccgctttgtggatctgtatggtgctcagaagatagtggaccggctcaggaagtttgaggctgcctatggaaaacagttcaccccatgtcagctgctcattgaccacgcgaacagtgctaacaagttctaccagtgagcaggccctcaccctgctcgctagactagcacactaacccagctgcccgtggtgctggttctccagcagagtggcatgtggcgtctagatttatcagagtaaccaggaggaaacaaactctggcattgggtatgcaccctgattaaagtgccttcagctatgacagttgctcccttctgctgaagtctggctgtgaattagtttgcacttcattagaaggaggaaccactgtgctcatgaacccataagtcctgacacccaaattagcagtatctccagaaccatctcgctgcctgctcctctagggccagtgnnncagggcagttctgcacccagccaaatacatacnnnnnnnaacca

SEQ ID NO: 4877 - DNA, 601 bp, Canis familiaris
  misc_feature (1)..(601): n = a or c or g or t
agactcagcnnnagacaccagggccaagctcagaagggnnnnnagtgattaatgcagaagccttngagccaggnnnnngcnnaagactgaagggagggggctaaaagggagaaactgaagnnnctgatnctcttttccaacccaagaaaagaaagtcatagtgagaaactaggctgaataagccnctgaaatgtgaagtagactctgcacactcctccctgtagtgtcagagggtaacggttaggagtgtgggctctgaggcgcctggctggctcagctggtagagcgtgtgattctcgatctcagggttgtggctttgcgccccactttgggtgtaaagatcacttaaaagtaaacccttaaaaaaaaaaagaatgtgggctgtaggcccagactctctggttcaaatcctggctctaccactaaatgtctctgtgaccttgggcaagttacttgccttctctgtgttttagtttcaattgtccatgtggagatgacagctagcacctacctctgagggttgttgggaggatgaaatgagtgattaagtgtttagaataatgcccagcgggcagcccgggtggctcagcagtttagtgcc

SEQ ID NO: 4878 - DNA, 522 bp, Canis familiaris
  misc_feature (1)..(522): n = a or c or g or t
gaagtcatgatgcccctatctccagcctacccagtacgcttatgctgatgtagtacgatatctggcgngagttggcacagctctgttcctccccagattacaccggggactctcctccaggccacccacaggtctgtactgccctgggcattttctaagtttttgttttaaaaaacaactggaaagcgacagagctgctgagcctttgccctgagtaggagggagggatgtcattccttgccaggccgggtgacaggcctcctttcctggaactgctgaagtagcctgaagctccccactgtctaccttagtgtttgtattttaagttatttattttggagccacagcccccttgctgatgaggttcctggggatgatgagagagaagggaaatggggcaccgtggttcagcggtttgtagctcctggaaagtcaggagggagctgagggagccccatccagtcctcattgttacctccactgtgcccagggccctggctgtgcagtaaggattgttccttg

SEQ ID NO: 4879 - DNA, 464 bp, Canis familiaris
  misc_feature (1)..(464): n = a or c or g or t
tttggataataggaattcaattnnnnaaaacaaaatgtaatgtcagacnnngntgcattnnacacatgtgctgatgtttacaatgatgctgaaacattaggaattgtttatacacannnntgcaaattatttattacttgtgcacttagcagtttttacaaaactgcttcgcacatatgttaaagcttatttttatgtggtcttatgattttattactgaaatgtttttaacactatannnnnnnnnggacatttttcttttattatcagttaaattcacattttaagtgcttcacatttgtatgtgtgtagactgtaacttttttcagttcatatgcagaaatgtatttagccattacccatgtgacaccannnnaatatattactgatttagaagcaaagatttcagtagaattttagtcctgaacgctgtggggaaaatgcattttcttcggaattatcca

SEQ ID NO: 4880 - DNA, 716 bp, Canis familiaris
  misc_feature (1)..(716): n = a or c or g or t
tcatgatgtgtngacatcgnagtgacctgctctnnngctaccagagctnntgaggcagctgagtgtctctactgagggtgaaaagttggtngacagtcactctctnnnnccatgactgtgtgaacttgccctgccccaggtgcctggaggaggtactggttctgcccttggggtccgtggatggatacggggcctggggactctaaaggctgtgttggtgcagatcctggggagaaggtccacagtcctcacagtgtttcaacttgtaagggtatcaccccaaagggaagtattactgcctcccatctcccctgagctgacccagaccacagaggctgattctggaccccatgggttccctggaagcttgcactggctgaattatgtgttggcatactgctcaccttgaaggagttctggaacaggaccccatgaaacttgtcttcaggcttcttagatatgaggtcttgagaatggcaggctgtgctcagggctctctaggggacccctcgggggaaatctggtgctggattcgataccaggaatagtcaggcatctctggagcagatgtaattctcacctcatggatcctctgaagcgtgaaatatttcccttttcccattggctgctgggtagctctgatccatatgcaaagcccagaagtatcttggcttcttgtctgctaacctggcttctagttctttcggactttcata

SEQ ID NO: 4881 - DNA, 477 bp, Canis familiaris
  misc_feature (1)..(477): n = a or c or g or t
tcctgacacactnngtgggggtccctgtataaatccatgctnncagctgctnntagagnnngggcccaggnnttggtcagaggggtggaaccaaccaattcctccttgctttgctttccgctcagcntctcctgtgtgattgaggggggtcagtgcttaaggaagaggtggttttaatttattaattgttttgaggacaactgtaagagggtgtagtggggcccggctaccccacaaatggtaaccctggtggttgctgcatccctcccctctgctactggctagaggatctttgtggccaaggagctgctatagcctggggtggggccatgccctcctctccctctggccctctgccccatcctccaggggtacaggacagagcagggataaactggaggtgactgagcccctgtctggagagagaggcaagccctgttgacacaggtctttcctaaggccacaaggtccaggctg

SEQ ID NO: 4882 - DNA, 470 bp, Canis familiaris
  misc_feature (1)..(461): n = a or c or g or t
ctatctcattaaannggtagatacaaagcattgagaaaatagccctctttctgatngatttgcattggaaattaggcccatcagtaatttgagtttaccatccacccagtcatatatgaagatattaaaaagctcctgtggaatgggaatttatctattccaggaaagcctaacaggacaatatgcaagaagagggagatggttatgggatgtaaatattcggcaagtttttcctccatcctcaacctaaaaattggctttgtgtcttttgaaaagaagttgtagaagtgataagacctggtgttatctgttaaagaaccatataatgacaacttcaacctctaacagatgttggtagtattaattgaaataaccacttgaacctgagatactgaattgtcctcactggcctaaccagctggtgtgttgattggcttcttggtatatgctgtggatgttcttaactaaaa

SEQ ID NO: 4883 - DNA, 516 bp, Canis familiaris
  misc_feature (1)..(516): n = a or c or g or t
atgaaaatgataaaatattcccacacttgggagtggtgcccttgnaggcnngctcccattttggacatttaaagcacctacaggtggcattcctttctttcacaacataaactatagataattaaggcagtaaaaaaaatttgaactgccttctaggcactgagagcaaatctttactcatttacctgcaaaccagaatgattctggcctagagtaaggtgcaggtgttaaaataaccattatcctggaggattgcataacagagaaaatgattcgtagacaaaaatgatctcacttcatctttgctgtctcataattgtcaaaaatcagaattatgttaagtcctagtttctataatcagtttttgaatcaaaggatggaaggccatccacaaaaatatcttaggtcagagatgacagaaatatccactcagagtggaaaaaaaggaattctgttcattgttatttaagtaaggtgaaattattgtctagatcgttcaatatcatcacctagcag

SEQ ID NO: 4884 - DNA, 409 bp, Canis familiaris
  misc_feature (1)..(409): n = a or c or g or t
agcccgtcatagcttctgtgagccagctcatttnnaaggatctcaaacttcgaggcttttggttgtcccagtggaagaaggatcacagtccagcccagttcaaggagctgatcctcacgctgtgcggtctcatcggccgaggccagctcacagcgcccgcctgctccgaggtcccactgcaggattacgagcgtgccttggaagcctcaatgcagcccttcgtgtcttcgaagcagattctcaccatgtgctaattgcagaggagctggagtgagttgggaggggacatggatcagcaggactggtttccggccccttagtcagggctctcagccttccccaggctgacctttcctcattgtcacttccgactgggcgggttgtgaaactagccaaggcttcccccagg

SEQ ID NO: 4885 - DNA, 504 bp, Canis familiaris
  misc_feature (1)..(504): n = a or c or g or t
cataggggctctnncctctctccnnaggtgtccagttggcccgacnnnnnnnnagtaaccnctcctgtgtgctnntgtgccctctttcccctttcccacnnnnngccaacctcttcctgtttcctgtttgttgagtagaacccaaaacagaggcatgttccatcccacccctacccctccccttggtnnngggctccatctccaggtgagagattggttcagctatggagcctggcctggtgtagaagcagcaagtgatagggagcgtttgggcccctgagagacacgtgttctctcttcctctcatccttcctgtgggggaatggatcctctgacttgaggggctgccctgggaggctgctggagcttcagccaggcaggaaagcttccttcaacttctgcaactggtgggtgaggagatccccacctctcataacccctaactatctcccccaggccccaatttcaagaaccaggcagcnnnnagccttaggagctagctgg

SEQ ID NO: 4886 - DNA, 513 bp, Canis familiaris
  misc_feature (1)..(513): n = a or c or g or t
tttttgatctgcagtgttgaacnnatnnagggctacactaggttggatgacaannngnnntgtgactttgtcggcaggacatctgccaagtnnannaangactccaccggggttttcctggcagggcccctgtggtacagtgaaggcggcagaaggaccctggaagcatctgcataaaagcataaaagctggtgagacctactgccacctgctctgaagtgacctgtccgggatcagttaggcccggtggtggtggtgggggcggtgggttcaataatacgtggtcctnnnagatcactgtatttattttgtgaggaaggataaaactaccgtccgttacattccaccatccgtcttccgcttaaggttttagaatttgcaagtatcggcttctgaaaaccaagcatcaccaggtaccacatgctttagaaagtgcatcacatttgtgaacttaatagtgtggtcgcaatttgtataaatatgcctctaatgacttttgggagatgtgatata

SEQ ID NO: 4887 - DNA, 621 bp, Canis familiaris
  misc_feature (1)..(621): n = a or c or g or t
tcagccccagaggtgttccactacttcaaatacnnnnncaagtcnnacgtttgggcantcgggatnntgatgtnnnnngtgttcagcctgggnnngcagcnctacgacctgtacgacaactcgcaggtggttgtgaaggtctcccagggccaccggctctaccggccccaactggcgtcggacaccgtctaccagatcatgtacggctgctggcacgagcttccagaaaagcgtcccacatttcagcaactcctatcttccattgaaccacttcgggaaaaagacaagccttgaagaagaaatgaggagatctgatgagaaggaccgtcaatgctggccaacattttcattccttttaaggaaagtagcaaggcgcaaaccatgtaatttagctaatcgcattctgtgtactgtttgcctcttgtattatctcaaaatgaacaaggtaagaaacaaaagatttccttgacatttaagtcaaattagtagttttgtgtatgctgctctttatattattatacttcccagcctacagcagaagcacattttctgattgtggtagacnnnnnngtgtaccatgtgtaaagattgaacagaattgaaaaattctttgttggatat

SEQ ID NO: 4888 - DNA, 296 bp, Canis familiaris
  misc_feature (1)..(296): n = a or c or g or t
tatactggagtgatctatgaagcagtgctactacagaccnnagctcnnnctgannagtgnntcaatgtgggcagtgtggctgctggtnnacgctacgatgggctggtgggcgtgtttgaccccaanngccacacggtgccatgtgtgggactcagtattggggnnnagcgaatctttgccattttnnaagagaggatgaaggtaggtnctaggtaggggtgcatttgggctggagactaaagactcatgtttgggcagccccagtggcgcagcggtttagtgccgtctgcagcctg

SEQ ID NO: 4889 - DNA, 680 bp, Canis familiaris
  misc_feature (1)..(680): n = a or c or g or t
tgnnnccatatctgtagnngtacagctcantagtagaattgngncntnngncnctgagacccagagaacaatnnagactcttcagctnnnaaaaacccttaatggnnctgaggaagaccatgcagagcaaagtggagaagaggaggcagaggcanctgaagtgctagaacaagggatagatggtgaggcctggactactgaccaccaagcaagtcaggagcagcagaagcctagcagttgcagctcagtaaacaatgagccctctgatcttaattatacgcccctaggtctataactcaggaaatgtcaactgtctgtctccaactgtgtaagggttgcagccgttatctgttatgcttcatctcaacattttgcactgtccatttaatatatgtatttaatttctgacaaatatttttgtagcttttacttgttttactataatctgtagcttagcttttaattagcatctaagtatctttctaagagctgtgtagaaattcagaaatattcgagcttattttgtcatggaaaataataattaaaaaatagaagaaggctaggttttttaaaagaaaataaatttaaaatgcctgttgagagtcattttgaaagttaaagatcaagactctaaggataggagcagttaccaatgtttgcttcaagactaagcctccttt

SEQ ID NO: 4890 - DNA, 485 bp, Canis familiaris
  misc_feature (1)..(485): n = a or c or g or t
gngagcccagaaagggcccccaaaaggctcgagcagnancnctgcgaaagcaattctgcaggactgcaaggctggtgtaaaaacacgnaaacaccaccttgaccgcgcaatggaagcactgcacgggcaggacggccgggccctcccaggcttgcccagcccagcctccacacgtaattaataccacatgttttctttatcattctgtgtgttctccggcaatctctttccaactttaaccttgactgcaactgcaggggaaaaccctggaaaactttgggtccgtcgatcgaaaaccccaaaggcaaggctgctcgcggcgcgcgggacccgttacaatttacgagcacagatatggagaaaaagaaatgccaaacaaaaacacagaagcagcacagagctctaccagtaacctgcccgcatctctgtaataaatccttttcattctacttgattaataccatgcaggagcacctcagagtcct

SEQ ID NO: 4891 - DNA, 474 bp, Canis familiaris
  misc_feature (1)..(474): n = a or c or g or t
cattctacagcagaggcaaccggatgannaggacggcgattttgatgtaatgttccagctacaacaacgcaaggagatgctacagcagctgctggccatgctcagctcggccatggtcctaaacccccagctggctgtgtgttcccatcaagagagccagctgggtcatggcccacccaaggagagccagcccagcacccagccacccaaggtggggtctctgccccagcagctgtccagtatcacaccctaccagccgggagacctgggcctggtgcctcgacaggcccacatcccacccaaccctgaggacctcaagctgctctcacacaccacacgtgtgggaatcttccaggtgcacagcaggcctgagatccacacctctggttctccaaaaaggttcaaaaagtttactcttcctgaagtttctccactttccaagtaagacacagagagaagactaatccccacccc

SEQ ID NO: 4892 - DNA, 641 bp, Canis familiaris
  misc_feature (1)..(641): n = a or c or g or t
ctgaccgctcaagagtgtggatgcatcctgnnagntgtggttcggccagaaattcagcgaaagcaggactgagcatggagacacagagagaaagagtgctactcgggcgggcacacaaatccccttcgttttttccctcccaccgaaagcggaagcagtttagatcagaagaggcaggggccagctcggggacgctttttccggtctctatggatacgggctacacaccttgggcggaagccaaaattgagggatttagactggatcatgtttctgccaatagccaatattctgctgggcgtcgtctgtgaaagcttccgaaataagccttgggcattagccaagtcttgtacaaagcaatagcgtttgccttttattaccttagtacaaggctcctcaaaaacatgtaaactcactcactcttagaatacatgtaattcaggatgatttgtaaaatgtgtttaatgtaatggcagatcagaaactaattcggcattcaatactgtgtccctttcccaaagtgagtgattttctacatatgagctttcaacggagctctaacttcttagaaatcaaataaatggtttggntacctacttattctaaaagaaaaggaagtacaagctccctactctctcagc

SEQ ID NO: 4893 - DNA, 701 bp, Canis familiaris
  misc_feature (1)..(701): n = a or c or g or t
ggtgccagggcangagcactggaccggccccgccctgctgcctcgttggtcctataacccgcagtgaagtcgcgttccctcccggganntccgtgctccctcatctgtcaagcagggacgtgtccttcccggcatcacacgcagccgactggctcctgggagctgtgcctccggcagccgtgcggacccgggagcagacactcagagggacaccggctgtccgcggtggtgacggggtcccaaattggcatcgcttccctcccctgaggagggagatgcgggggcgggaccggggcattggggggcagccctttcaccgaccagcacatcagcaaaccctaggacagtgggattttctaacaaaataaacttgcttatttggtctgttttctgtaacttttgctaaatactttatacatttttaatgttaaaaagctgtgtctcctgccagcatttctcatcccggtatgactgtgtttacttcacattgtatacccttccaccctctggctgcctagatcagtaaataaaattgatgtactataatttataagtaacactgttgaaactctgatccctatggaggctgtaaccccccccgaatttctccctccccgaccacccccccgacccctgccaccccctaatagcatttgtgtgtattaatgctaaagaattaaacgtttaaagggtttacattn

(The sequence listing continues in the following parts.)
